United States Patent Application Publication US 2015/0232836 A1 - sequence listing, part 16

SEQ ID NO: 537183 - DNA, 15 bp, Homo sapiens
atcgtgcctctgcac

SEQ ID NO: 537184 - DNA, 15 bp, Homo sapiens
tcgtgcctctgcact

SEQ ID NO: 537185 - DNA, 15 bp, Homo sapiens
cgtgcctctgcactc

SEQ ID NO: 537186 - DNA, 15 bp, Homo sapiens
gtgcctctgcactcc

SEQ ID NO: 537187 - DNA, 15 bp, Homo sapiens
tgcctctgcactcca

SEQ ID NO: 537188 - DNA, 15 bp, Homo sapiens
gcctctgcactccag

SEQ ID NO: 537189 - DNA, 15 bp, Homo sapiens
cctctgcactccagc

SEQ ID NO: 537190 - DNA, 15 bp, Homo sapiens
ctctgcactccagcc

SEQ ID NO: 537191 - DNA, 15 bp, Homo sapiens
tctgcactccagcct

SEQ ID NO: 537192 - DNA, 15 bp, Homo sapiens
ctgcactccagcctg

SEQ ID NO: 537193 - DNA, 15 bp, Homo sapiens
tgcactccagcctgg

SEQ ID NO: 537194 - DNA, 15 bp, Homo sapiens
gcactccagcctggg

SEQ ID NO: 537195 - DNA, 15 bp, Homo sapiens
cactccagcctgggc

SEQ ID NO: 537196 - DNA, 15 bp, Homo sapiens
actccagcctgggca

SEQ ID NO: 537197 - DNA, 15 bp, Homo sapiens
ctccagcctgggcaa

SEQ ID NO: 537198 - DNA, 15 bp, Homo sapiens
tccagcctgggcaac

SEQ ID NO: 537199 - DNA, 15 bp, Homo sapiens
ccagcctgggcaaca

SEQ ID NO: 537200 - DNA, 15 bp, Homo sapiens
cagcctgggcaacag

SEQ ID NO: 537201 - DNA, 15 bp, Homo sapiens
agcctgggcaacagg

SEQ ID NO: 537202 - DNA, 15 bp, Homo sapiens
gcctgggcaacaggg

SEQ ID NO: 537203 - DNA, 15 bp, Homo sapiens
cctgggcaacagggc

SEQ ID NO: 537204 - DNA, 15 bp, Homo sapiens
ctgggcaacagggcg

SEQ ID NO: 537205 - DNA, 15 bp, Homo sapiens
tgggcaacagggcga

SEQ ID NO: 537206 - DNA, 15 bp, Homo sapiens
gggcaacagggcgag

SEQ ID NO: 537207 - DNA, 15 bp, Homo sapiens
ggcaacagggcgaga

SEQ ID NO: 537208 - DNA, 15 bp, Homo sapiens
gcaacagggcgagat

SEQ ID NO: 537209 - DNA, 15 bp, Homo sapiens
caacagggcgagatt

SEQ ID NO: 537210 - DNA, 15 bp, Homo sapiens
aacagggcgagattc

SEQ ID NO: 537211 - DNA, 15 bp, Homo sapiens
acagggcgagattct

SEQ ID NO: 537212 - DNA, 15 bp, Homo sapiens
cagggcgagattctg

SEQ ID NO: 537213 - DNA, 15 bp, Homo sapiens
agggcgagattctgt

SEQ ID NO: 537214 - DNA, 15 bp, Homo sapiens
gggcgagattctgtc

SEQ ID NO: 537215 - DNA, 15 bp, Homo sapiens
ggcgagattctgtct

SEQ ID NO: 537216 - DNA, 15 bp, Homo sapiens
gcgagattctgtctc

SEQ ID NO: 537217 - DNA, 15 bp, Homo sapiens
cgagattctgtctca

SEQ ID NO: 537218 - DNA, 15 bp, Homo sapiens
gagattctgtctcaa

SEQ ID NO: 537219 - DNA, 15 bp, Homo sapiens
agattctgtctcaaa

SEQ ID NO: 537220 - DNA, 15 bp, Homo sapiens
gattctgtctcaaag

SEQ ID NO: 537221 - DNA, 15 bp, Homo sapiens
attctgtctcaaaga

SEQ ID NO: 537222 - DNA, 15 bp, Homo sapiens
ttctgtctcaaagaa

SEQ ID NO: 537223 - DNA, 15 bp, Homo sapiens
tctgtctcaaagaaa

SEQ ID NO: 537224 - DNA, 15 bp, Homo sapiens
ctgtctcaaagaaaa

SEQ ID NO: 537225 - DNA, 15 bp, Homo sapiens
tgtctcaaagaaaaa

SEQ ID NO: 537226 - DNA, 15 bp, Homo sapiens
gtctcaaagaaaaaa

SEQ ID NO: 537227 - DNA, 15 bp, Homo sapiens
tctcaaagaaaaaaa

SEQ ID NO: 537228 - DNA, 15 bp, Homo sapiens
ctcaaagaaaaaaaa

SEQ ID NO: 537229 - DNA, 15 bp, Homo sapiens
tcaaagaaaaaaaaa

SEQ ID NO: 537230 - DNA, 15 bp, Homo sapiens
caaagaaaaaaaaaa

SEQ ID NO: 537231 - DNA, 15 bp, Homo sapiens
aaagaaaaaaaaaaa

SEQ ID NO: 537232 - DNA, 15 bp, Homo sapiens
aagaaaaaaaaaaaa

SEQ ID NO: 537233 - DNA, 15 bp, Homo sapiens
agaaaaaaaaaaaaa

SEQ ID NO: 537234 - DNA, 15 bp, Homo sapiens
gaaaaaaaaaaaaaa

SEQ ID NO: 537235 - DNA, 15 bp, Homo sapiens
aaaaaaaaaaaaaac

SEQ ID NO: 537236 - DNA, 15 bp, Homo sapiens
aaaaaaaaaaaaaca

SEQ ID NO: 537237 - DNA, 15 bp, Homo sapiens
aaaaaaaaaaaacat

SEQ ID NO: 537238 - DNA, 15 bp, Homo sapiens
aaaaaaaaaaacatg

SEQ ID NO: 537239 - DNA, 15 bp, Homo sapiens
aaaaaaaaaacatgg

SEQ ID NO: 537240 - DNA, 15 bp, Homo sapiens
aaaaaaaaacatgga

SEQ ID NO: 537241 - DNA, 15 bp, Homo sapiens
aaaaaaaacatggag

SEQ ID NO: 537242 - DNA, 15 bp, Homo sapiens
aaaaaaacatggaga

SEQ ID NO: 537243 - DNA, 15 bp, Homo sapiens
aaaaaacatggagaa

SEQ ID NO: 537244 - DNA, 15 bp, Homo sapiens
aaaaacatggagaaa

SEQ ID NO: 537245 - DNA, 15 bp, Homo sapiens
aaaacatggagaaaa

SEQ ID NO: 537246 - DNA, 15 bp, Homo sapiens
aaacatggagaaaaa

SEQ ID NO: 537247 - DNA, 15 bp, Homo sapiens
aacatggagaaaaat

SEQ ID NO: 537248 - DNA, 15 bp, Homo sapiens
acatggagaaaaata

SEQ ID NO: 537249 - DNA, 15 bp, Homo sapiens
catggagaaaaatac

SEQ ID NO: 537250 - DNA, 15 bp, Homo sapiens
atggagaaaaatacc

SEQ ID NO: 537251 - DNA, 15 bp, Homo sapiens
tggagaaaaatacca

SEQ ID NO: 537252 - DNA, 15 bp, Homo sapiens
ggagaaaaataccat

SEQ ID NO: 537253 - DNA, 15 bp, Homo sapiens
gagaaaaataccata

SEQ ID NO: 537254 - DNA, 15 bp, Homo sapiens
agaaaaataccatag

SEQ ID NO: 537255 - DNA, 15 bp, Homo sapiens
gaaaaataccatagg

SEQ ID NO: 537256 - DNA, 15 bp, Homo sapiens
aaaaataccataggt

SEQ ID NO: 537257 - DNA, 15 bp, Homo sapiens
aaaataccataggta

SEQ ID NO: 537258 - DNA, 15 bp, Homo sapiens
aaataccataggtaa

SEQ ID NO: 537259 - DNA, 15 bp, Homo sapiens
aataccataggtaag

SEQ ID NO: 537260 - DNA, 15 bp, Homo sapiens
ataccataggtaagg

SEQ ID NO: 537261 - DNA, 15 bp, Homo sapiens
taccataggtaaggt

SEQ ID NO: 537262 - DNA, 15 bp, Homo sapiens
accataggtaaggtg

SEQ ID NO: 537263 - DNA, 15 bp, Homo sapiens
ccataggtaaggtga

SEQ ID NO: 537264 - DNA, 15 bp, Homo sapiens
cataggtaaggtgaa

SEQ ID NO: 537265 - DNA, 15 bp, Homo sapiens
ataggtaaggtgaaa

SEQ ID NO: 537266 - DNA, 15 bp, Homo sapiens
taggtaaggtgaaaa

SEQ ID NO: 537267 - DNA, 15 bp, Homo sapiens
aggtaaggtgaaaac

SEQ ID NO: 537268 - DNA, 15 bp, Homo sapiens
ggtaaggtgaaaact

SEQ ID NO: 537269 - DNA, 15 bp, Homo sapiens
gtaaggtgaaaacta

SEQ ID NO: 537270 - DNA, 15 bp, Homo sapiens
taaggtgaaaactaa

SEQ ID NO: 537271 - DNA, 15 bp, Homo sapiens
aaggtgaaaactaaa

SEQ ID NO: 537272 - DNA, 15 bp, Homo sapiens
aggtgaaaactaaat

SEQ ID NO: 537273 - DNA, 15 bp, Homo sapiens
ggtgaaaactaaatg

SEQ ID NO: 537274 - DNA, 15 bp, Homo sapiens
gtgaaaactaaatga

SEQ ID NO: 537275 - DNA, 15 bp, Homo sapiens
tgaaaactaaatgag

SEQ ID NO: 537276 - DNA, 15 bp, Homo sapiens
gaaaactaaatgaga

SEQ ID NO: 537277 - DNA, 15 bp, Homo sapiens
aaaactaaatgagaa

SEQ ID NO: 537278 - DNA, 15 bp, Homo sapiens
aaactaaatgagaaa

SEQ ID NO: 537279 - DNA, 15 bp, Homo sapiens
aactaaatgagaaac

SEQ ID NO: 537280 - DNA, 15 bp, Homo sapiens
actaaatgagaaacg

SEQ ID NO: 537281 - DNA, 15 bp, Homo sapiens
ctaaatgagaaacgg

SEQ ID NO: 537282 - DNA, 15 bp, Homo sapiens
taaatgagaaacgga

SEQ ID NO: 537283 - DNA, 15 bp, Homo sapiens
aaatgagaaacggag

SEQ ID NO: 537284 - DNA, 15 bp, Homo sapiens
aatgagaaacggaga

SEQ ID NO: 537285 - DNA, 15 bp, Homo sapiens
atgagaaacggagaa

SEQ ID NO: 537286 - DNA, 15 bp, Homo sapiens
tgagaaacggagaaa

SEQ ID NO: 537287 - DNA, 15 bp, Homo sapiens
gagaaacggagaaag

SEQ ID NO: 537288 - DNA, 15 bp, Homo sapiens
agaaacggagaaaga

SEQ ID NO: 537289 - DNA, 15 bp, Homo sapiens
gaaacggagaaagaa

SEQ ID NO: 537290 - DNA, 15 bp, Homo sapiens
aaacggagaaagaat

SEQ ID NO: 537291 - DNA, 15 bp, Homo sapiens
aacggagaaagaata

SEQ ID NO: 537292 - DNA, 15 bp, Homo sapiens
acggagaaagaatat

SEQ ID NO: 537293 - DNA, 15 bp, Homo sapiens
cggagaaagaatatt

SEQ ID NO: 537294 - DNA, 15 bp, Homo sapiens
ggagaaagaatattt

SEQ ID NO: 537295 - DNA, 15 bp, Homo sapiens
gagaaagaatattta

SEQ ID NO: 537296 - DNA, 15 bp, Homo sapiens
agaaagaatatttat

SEQ ID NO: 537297 - DNA, 15 bp, Homo sapiens
gaaagaatatttatc

SEQ ID NO: 537298 - DNA, 15 bp, Homo sapiens
aaagaatatttatca

SEQ ID NO: 537299 - DNA, 15 bp, Homo sapiens
aagaatatttatcat

SEQ ID NO: 537300 - DNA, 15 bp, Homo sapiens
agaatatttatcata

SEQ ID NO: 537301 - DNA, 15 bp, Homo sapiens
gaatatttatcatac

SEQ ID NO: 537302 - DNA, 15 bp, Homo sapiens
aatatttatcataca

SEQ ID NO: 537303 - DNA, 15 bp, Homo sapiens
atatttatcatacat

SEQ ID NO: 537304 - DNA, 15 bp, Homo sapiens
tatttatcatacata

SEQ ID NO: 537305 - DNA, 15 bp, Homo sapiens
atttatcatacataa

SEQ ID NO: 537306 - DNA, 15 bp, Homo sapiens
tttatcatacataaa

SEQ ID NO: 537307 - DNA, 15 bp, Homo sapiens
ttatcatacataaag

SEQ ID NO: 537308 - DNA, 15 bp, Homo sapiens
tatcatacataaagc

SEQ ID NO: 537309 - DNA, 15 bp, Homo sapiens
atcatacataaagca

SEQ ID NO: 537310 - DNA, 15 bp, Homo sapiens
tcatacataaagcat

SEQ ID NO: 537311 - DNA, 15 bp, Homo sapiens
catacataaagcata

SEQ ID NO: 537312 - DNA, 15 bp, Homo sapiens
atacataaagcataa

SEQ ID NO: 537313 - DNA, 15 bp, Homo sapiens
tacataaagcataaa

SEQ ID NO: 537314 - DNA, 15 bp, Homo sapiens
acataaagcataaat

SEQ ID NO: 537315 - DNA, 15 bp, Homo sapiens
cataaagcataaatg

SEQ ID NO: 537316 - DNA, 15 bp, Homo sapiens
ataaagcataaatgt

SEQ ID NO: 537317 - DNA, 15 bp, Homo sapiens
taaagcataaatgtc

SEQ ID NO: 537318 - DNA, 15 bp, Homo sapiens
aaagcataaatgtcc

SEQ ID NO: 537319 - DNA, 15 bp, Homo sapiens
aagcataaatgtcct

SEQ ID NO: 537320 - DNA, 15 bp, Homo sapiens
agcataaatgtccta

SEQ ID NO: 537321 - DNA, 15 bp, Homo sapiens
gcataaatgtcctat

SEQ ID NO: 537322 - DNA, 15 bp, Homo sapiens
cataaatgtcctatc

SEQ ID NO: 537323 - DNA, 15 bp, Homo sapiens
ataaatgtcctatca

SEQ ID NO: 537324 - DNA, 15 bp, Homo sapiens
taaatgtcctatcat

SEQ ID NO: 537325 - DNA, 15 bp, Homo sapiens
aaatgtcctatcata

SEQ ID NO: 537326 - DNA, 15 bp, Homo sapiens
aatgtcctatcatac

SEQ ID NO: 537327 - DNA, 15 bp, Homo sapiens
atgtcctatcataca

SEQ ID NO: 537328 - DNA, 15 bp, Homo sapiens
tgtcctatcatacaa

SEQ ID NO: 537329 - DNA, 15 bp, Homo sapiens
gtcctatcatacaaa

SEQ ID NO: 537330 - DNA, 15 bp, Homo sapiens
tcctatcatacaaag

SEQ ID NO: 537331 - DNA, 15 bp, Homo sapiens
cctatcatacaaaga

SEQ ID NO: 537332 - DNA, 15 bp, Homo sapiens
ctatcatacaaagac

SEQ ID NO: 537333 - DNA, 15 bp, Homo sapiens
tatcatacaaagact

SEQ ID NO: 537334 - DNA, 15 bp, Homo sapiens
atcatacaaagacta

SEQ ID NO: 537335 - DNA, 15 bp, Homo sapiens
tcatacaaagactac

SEQ ID NO: 537336 - DNA, 15 bp, Homo sapiens
catacaaagactact

SEQ ID NO: 537337 - DNA, 15 bp, Homo sapiens
atacaaagactactt

SEQ ID NO: 537338 - DNA, 15 bp, Homo sapiens
tacaaagactactta

SEQ ID NO: 537339 - DNA, 15 bp, Homo sapiens
acaaagactacttac

SEQ ID NO: 537340 - DNA, 15 bp, Homo sapiens
caaagactacttaca

SEQ ID NO: 537341 - DNA, 15 bp, Homo sapiens
aaagactacttacaa

SEQ ID NO: 537342 - DNA, 15 bp, Homo sapiens
aagactacttacaaa

SEQ ID NO: 537343 - DNA, 15 bp, Homo sapiens
agactacttacaaat

SEQ ID NO: 537344 - DNA, 15 bp, Homo sapiens
gactacttacaaatc

SEQ ID NO: 537345 - DNA, 15 bp, Homo sapiens
actacttacaaatca

SEQ ID NO: 537346 - DNA, 15 bp, Homo sapiens
ctacttacaaatcaa

SEQ ID NO: 537347 - DNA, 15 bp, Homo sapiens
tacttacaaatcaat

SEQ ID NO: 537348 - DNA, 15 bp, Homo sapiens
acttacaaatcaata

SEQ ID NO: 537349 - DNA, 15 bp, Homo sapiens
cttacaaatcaataa

SEQ ID NO: 537350 - DNA, 15 bp, Homo sapiens
ttacaaatcaataag

SEQ ID NO: 537351 - DNA, 15 bp, Homo sapiens
tacaaatcaataaga

SEQ ID NO: 537352 - DNA, 15 bp, Homo sapiens
acaaatcaataagaa

SEQ ID NO: 537353 - DNA, 15 bp, Homo sapiens
caaatcaataagaaa

SEQ ID NO: 537354 - DNA, 15 bp, Homo sapiens
aaatcaataagaaaa

SEQ ID NO: 537355 - DNA, 15 bp, Homo sapiens
aatcaataagaaaag

SEQ ID NO: 537356 - DNA, 15 bp, Homo sapiens
atcaataagaaaaga

SEQ ID NO: 537357 - DNA, 15 bp, Homo sapiens
tcaataagaaaagac

SEQ ID NO: 537358 - DNA, 15 bp, Homo sapiens
caataagaaaagaca

SEQ ID NO: 537359 - DNA, 15 bp, Homo sapiens
aataagaaaagacac

SEQ ID NO: 537360 - DNA, 15 bp, Homo sapiens
ataagaaaagacaca

SEQ ID NO: 537361 - DNA, 15 bp, Homo sapiens
taagaaaagacacac

SEQ ID NO: 537362 - DNA, 15 bp, Homo sapiens
aagaaaagacacacc

SEQ ID NO: 537363 - DNA, 15 bp, Homo sapiens
agaaaagacacacca

SEQ ID NO: 537364 - DNA, 15 bp, Homo sapiens
gaaaagacacaccac

SEQ ID NO: 537365 - DNA, 15 bp, Homo sapiens
aaaagacacaccact

SEQ ID NO: 537366 - DNA, 15 bp, Homo sapiens
aaagacacaccactt

SEQ ID NO: 537367 - DNA, 15 bp, Homo sapiens
aagacacaccactta

SEQ ID NO: 537368 - DNA, 15 bp, Homo sapiens
agacacaccacttaa

SEQ ID NO: 537369 - DNA, 15 bp, Homo sapiens
gacacaccacttaac

SEQ ID NO: 537370 - DNA, 15 bp, Homo sapiens
acacaccacttaaca

SEQ ID NO: 537371 - DNA, 15 bp, Homo sapiens
cacaccacttaacag

SEQ ID NO: 537372 - DNA, 15 bp, Homo sapiens
acaccacttaacaga

SEQ ID NO: 537373 - DNA, 15 bp, Homo sapiens
caccacttaacagaa

SEQ ID NO: 537374 - DNA, 15 bp, Homo sapiens
accacttaacagaaa

SEQ ID NO: 537375 - DNA, 15 bp, Homo sapiens
ccacttaacagaaaa

SEQ ID NO: 537376 - DNA, 15 bp, Homo sapiens
cacttaacagaaaat

SEQ ID NO: 537377 - DNA, 15 bp, Homo sapiens
acttaacagaaaata

SEQ ID NO: 537378 - DNA, 15 bp, Homo sapiens
cttaacagaaaatag

SEQ ID NO: 537379 - DNA, 15 bp, Homo sapiens
ttaacagaaaatagg

SEQ ID NO: 537380 - DNA, 15 bp, Homo sapiens
taacagaaaataggc

SEQ ID NO: 537381 - DNA, 15 bp, Homo sapiens
aacagaaaataggca

SEQ ID NO: 537382 - DNA, 15 bp, Homo sapiens
acagaaaataggcaa

SEQ ID NO: 537383 - DNA, 15 bp, Homo sapiens
cagaaaataggcaaa

SEQ ID NO: 537384 - DNA, 15 bp, Homo sapiens
agaaaataggcaaaa

SEQ ID NO: 537385 - DNA, 15 bp, Homo sapiens
gaaaataggcaaaaa

SEQ ID NO: 537386 - DNA, 15 bp, Homo sapiens
aaaataggcaaaaat

SEQ ID NO: 537387 - DNA, 15 bp, Homo sapiens
aaataggcaaaaatg

SEQ ID NO: 537388 - DNA, 15 bp, Homo sapiens
aataggcaaaaatgc

SEQ ID NO: 537389 - DNA, 15 bp, Homo sapiens
ataggcaaaaatgct

SEQ ID NO: 537390 - DNA, 15 bp, Homo sapiens
taggcaaaaatgcta

SEQ ID NO: 537391 - DNA, 15 bp, Homo sapiens
aggcaaaaatgctat

SEQ ID NO: 537392 - DNA, 15 bp, Homo sapiens
ggcaaaaatgctatg

SEQ ID NO: 537393 - DNA, 15 bp, Homo sapiens
gcaaaaatgctatga

SEQ ID NO: 537394 - DNA, 15 bp, Homo sapiens
caaaaatgctatgaa

SEQ ID NO: 537395 - DNA, 15 bp, Homo sapiens
aaaaatgctatgaat

SEQ ID NO: 537396 - DNA, 15 bp, Homo sapiens
aaaatgctatgaata

SEQ ID NO: 537397 - DNA, 15 bp, Homo sapiens
aaatgctatgaatag

SEQ ID NO: 537398 - DNA, 15 bp, Homo sapiens
aatgctatgaataga

SEQ ID NO: 537399 - DNA, 15 bp, Homo sapiens
atgctatgaatagac

SEQ ID NO: 537400 - DNA, 15 bp, Homo sapiens
tgctatgaatagaca

SEQ ID NO: 537401 - DNA, 15 bp, Homo sapiens
gctatgaatagacaa

SEQ ID NO: 537402 - DNA, 15 bp, Homo sapiens
ctatgaatagacaac

SEQ ID NO: 537403 - DNA, 15 bp, Homo sapiens
tatgaatagacaaca

SEQ ID NO: 537404 - DNA, 15 bp, Homo sapiens
atgaatagacaacac

SEQ ID NO: 537405 - DNA, 15 bp, Homo sapiens
tgaatagacaacact

SEQ ID NO: 537406 - DNA, 15 bp, Homo sapiens
gaatagacaacacta

SEQ ID NO: 537407 - DNA, 15 bp, Homo sapiens
aatagacaacactag

SEQ ID NO: 537408 - DNA, 15 bp, Homo sapiens
atagacaacactaga

SEQ ID NO: 537409 - DNA, 15 bp, Homo sapiens
tagacaacactagaa

SEQ ID NO: 537410 - DNA, 15 bp, Homo sapiens
agacaacactagaaa

SEQ ID NO: 537411 - DNA, 15 bp, Homo sapiens
gacaacactagaaag

SEQ ID NO: 537412 - DNA, 15 bp, Homo sapiens
acaacactagaaaga

SEQ ID NO: 537413 - DNA, 15 bp, Homo sapiens
caacactagaaagaa

SEQ ID NO: 537414 - DNA, 15 bp, Homo sapiens
aacactagaaagaaa

SEQ ID NO: 537415 - DNA, 15 bp, Homo sapiens
acactagaaagaaaa

SEQ ID NO: 537416 - DNA, 15 bp, Homo sapiens
cactagaaagaaaat

SEQ ID NO: 537417 - DNA, 15 bp, Homo sapiens
actagaaagaaaata

SEQ ID NO: 537418 - DNA, 15 bp, Homo sapiens
ctagaaagaaaatac

SEQ ID NO: 537419 - DNA, 15 bp, Homo sapiens
tagaaagaaaataca

SEQ ID NO: 537420 - DNA, 15 bp, Homo sapiens
agaaagaaaatacaa

SEQ ID NO: 537421 - DNA, 15 bp, Homo sapiens
gaaagaaaatacaaa

SEQ ID NO: 537422 - DNA, 15 bp, Homo sapiens
aaagaaaatacaaat

SEQ ID NO: 537423 - DNA, 15 bp, Homo sapiens
aagaaaatacaaatg

SEQ ID NO: 537424 - DNA, 15 bp, Homo sapiens
agaaaatacaaatgg

SEQ ID NO: 537425 - DNA, 15 bp, Homo sapiens
gaaaatacaaatggg

SEQ ID NO: 537426 - DNA, 15 bp, Homo sapiens
aaaatacaaatgggc

SEQ ID NO: 537427 - DNA, 15 bp, Homo sapiens
aaatacaaatgggca

SEQ ID NO: 537428 - DNA, 15 bp, Homo sapiens
aatacaaatgggcaa

SEQ ID NO: 537429 - DNA, 15 bp, Homo sapiens
atacaaatgggcaat

SEQ ID NO: 537430 - DNA, 15 bp, Homo sapiens
tacaaatgggcaata

SEQ ID NO: 537431 - DNA, 15 bp, Homo sapiens
acaaatgggcaataa

SEQ ID NO: 537432 - DNA, 15 bp, Homo sapiens
caaatgggcaataaa

SEQ ID NO: 537433 - DNA, 15 bp, Homo sapiens
aaatgggcaataaat

SEQ ID NO: 537434 - DNA, 15 bp, Homo sapiens
aatgggcaataaata

SEQ ID NO: 537435 - DNA, 15 bp, Homo sapiens
atgggcaataaataa

SEQ ID NO: 537436 - DNA, 15 bp, Homo sapiens
tgggcaataaataaa

SEQ ID NO: 537437 - DNA, 15 bp, Homo sapiens
gggcaataaataaat

SEQ ID NO: 537438 - DNA, 15 bp, Homo sapiens
ggcaataaataaatg

SEQ ID NO: 537439 - DNA, 15 bp, Homo sapiens
gcaataaataaatga

SEQ ID NO: 537440 - DNA, 15 bp, Homo sapiens
caataaataaatgaa

SEQ ID NO: 537441 - DNA, 15 bp, Homo sapiens
aataaataaatgaaa

SEQ ID NO: 537442 - DNA, 15 bp, Homo sapiens
ataaataaatgaaaa

SEQ ID NO: 537443 - DNA, 15 bp, Homo sapiens
taaataaatgaaaag

SEQ ID NO: 537444 - DNA, 15 bp, Homo sapiens
aaataaatgaaaaga

SEQ ID NO: 537445 - DNA, 15 bp, Homo sapiens
aataaatgaaaagaa

SEQ ID NO: 537446 - DNA, 15 bp, Homo sapiens
ataaatgaaaagaat

SEQ ID NO: 537447 - DNA, 15 bp, Homo sapiens
taaatgaaaagaatt

SEQ ID NO: 537448 - DNA, 15 bp, Homo sapiens
aaatgaaaagaattt

SEQ ID NO: 537449 - DNA, 15 bp, Homo sapiens
aatgaaaagaatttc

SEQ ID NO: 537450 - DNA, 15 bp, Homo sapiens
atgaaaagaatttca

SEQ ID NO: 537451 - DNA, 15 bp, Homo sapiens
tgaaaagaatttcaa

SEQ ID NO: 537452 - DNA, 15 bp, Homo sapiens
gaaaagaatttcaag

SEQ ID NO: 537453 - DNA, 15 bp, Homo sapiens
aaaagaatttcaagc

SEQ ID NO: 537454 - DNA, 15 bp, Homo sapiens
aaagaatttcaagca

SEQ ID NO: 537455 - DNA, 15 bp, Homo sapiens
aagaatttcaagcac

SEQ ID NO: 537456 - DNA, 15 bp, Homo sapiens
agaatttcaagcaca

SEQ ID NO: 537457 - DNA, 15 bp, Homo sapiens
gaatttcaagcacat

SEQ ID NO: 537458 - DNA, 15 bp, Homo sapiens
aatttcaagcacatg

SEQ ID NO: 537459 - DNA, 15 bp, Homo sapiens
atttcaagcacatgc

SEQ ID NO: 537460 - DNA, 15 bp, Homo sapiens
tttcaagcacatgca

SEQ ID NO: 537461 - DNA, 15 bp, Homo sapiens
ttcaagcacatgcat

SEQ ID NO: 537462 - DNA, 15 bp, Homo sapiens
tcaagcacatgcata

SEQ ID NO: 537463 - DNA, 15 bp, Homo sapiens
caagcacatgcataa

SEQ ID NO: 537464 - DNA, 15 bp, Homo sapiens
aagcacatgcataaa

SEQ ID NO: 537465 - DNA, 15 bp, Homo sapiens
agcacatgcataaag

SEQ ID NO: 537466 - DNA, 15 bp, Homo sapiens
gcacatgcataaaga

SEQ ID NO: 537467 - DNA, 15 bp, Homo sapiens
cacatgcataaagac

SEQ ID NO: 537468 - DNA, 15 bp, Homo sapiens
acatgcataaagaca

SEQ ID NO: 537469 - DNA, 15 bp, Homo sapiens
catgcataaagacat

SEQ ID NO: 537470 - DNA, 15 bp, Homo sapiens
atgcataaagacatt

SEQ ID NO: 537471 - DNA, 15 bp, Homo sapiens
tgcataaagacattc

SEQ ID NO: 537472 - DNA, 15 bp, Homo sapiens
gcataaagacattca

SEQ ID NO: 537473 - DNA, 15 bp, Homo sapiens
cataaagacattcaa

SEQ ID NO: 537474 - DNA, 15 bp, Homo sapiens
ataaagacattcaaa

SEQ ID NO: 537475 - DNA, 15 bp, Homo sapiens
taaagacattcaaat

SEQ ID NO: 537476 - DNA, 15 bp, Homo sapiens
aaagacattcaaata

SEQ ID NO: 537477 - DNA, 15 bp, Homo sapiens
aagacattcaaataa

SEQ ID NO: 537478 - DNA, 15 bp, Homo sapiens
agacattcaaataaa

SEQ ID NO: 537479 - DNA, 15 bp, Homo sapiens
gacattcaaataaaa

SEQ ID NO: 537480 - DNA, 15 bp, Homo sapiens
acattcaaataaaaa

SEQ ID NO: 537481 - DNA, 15 bp, Homo sapiens
cattcaaataaaaat

SEQ ID NO: 537482 - DNA, 15 bp, Homo sapiens
attcaaataaaaata

SEQ ID NO: 537483 - DNA, 15 bp, Homo sapiens
ttcaaataaaaataa

SEQ ID NO: 537484 - DNA, 15 bp, Homo sapiens
tcaaataaaaataat

SEQ ID NO: 537485 - DNA, 15 bp, Homo sapiens
caaataaaaataata

SEQ ID NO: 537486 - DNA, 15 bp, Homo sapiens
aaataaaaataataa

SEQ ID NO: 537487 - DNA, 15 bp, Homo sapiens
aataaaaataataaa

SEQ ID NO: 537488 - DNA, 15 bp, Homo sapiens
ataaaaataataaaa

SEQ ID NO: 537489 - DNA, 15 bp, Homo sapiens
taaaaataataaaat

SEQ ID NO: 537490 - DNA, 15 bp, Homo sapiens
aaaaataataaaatt

SEQ ID NO: 537491 - DNA, 15 bp, Homo sapiens
aaaataataaaattc

SEQ ID NO: 537492 - DNA, 15 bp, Homo sapiens
aaataataaaattcc

SEQ ID NO: 537493 - DNA, 15 bp, Homo sapiens
aataataaaattcca

SEQ ID NO: 537494 - DNA, 15 bp, Homo sapiens
ataataaaattccaa

SEQ ID NO: 537495 - DNA, 15 bp, Homo sapiens
taataaaattccaat

SEQ ID NO: 537496 - DNA, 15 bp, Homo sapiens
aataaaattccaatg

SEQ ID NO: 537497 - DNA, 15 bp, Homo sapiens
ataaaattccaatgt

SEQ ID NO: 537498 - DNA, 15 bp, Homo sapiens
taaaattccaatgtt

SEQ ID NO: 537499 - DNA, 15 bp, Homo sapiens
aaaattccaatgttt

SEQ ID NO: 537500 - DNA, 15 bp, Homo sapiens
aaattccaatgttta

SEQ ID NO: 537501 - DNA, 15 bp, Homo sapiens
aattccaatgtttat

SEQ ID NO: 537502 - DNA, 15 bp, Homo sapiens
attccaatgtttatg

SEQ ID NO: 537503 - DNA, 15 bp, Homo sapiens
ttccaatgtttatga

SEQ ID NO: 537504 - DNA, 15 bp, Homo sapiens
tccaatgtttatgac

SEQ ID NO: 537505 - DNA, 15 bp, Homo sapiens
ccaatgtttatgacc

SEQ ID NO: 537506 - DNA, 15 bp, Homo sapiens
caatgtttatgacct

SEQ ID NO: 537507 - DNA, 15 bp, Homo sapiens
aatgtttatgaccta

SEQ ID NO: 537508 - DNA, 15 bp, Homo sapiens
atgtttatgacctag

SEQ ID NO: 537509 - DNA, 15 bp, Homo sapiens
tgtttatgacctagg

SEQ ID NO: 537510 - DNA, 15 bp, Homo sapiens
gtttatgacctagga

SEQ ID NO: 537511 - DNA, 15 bp, Homo sapiens
tttatgacctaggag

SEQ ID NO: 537512 - DNA, 15 bp, Homo sapiens
ttatgacctaggagg

SEQ ID NO: 537513 - DNA, 15 bp, Homo sapiens
tatgacctaggagga

SEQ ID NO: 537514 - DNA, 15 bp, Homo sapiens
atgacctaggaggac

SEQ ID NO: 537515 - DNA, 15 bp, Homo sapiens
tgacctaggaggaca

SEQ ID NO: 537516 - DNA, 15 bp, Homo sapiens
gacctaggaggacag

SEQ ID NO: 537517 - DNA, 15 bp, Homo sapiens
acctaggaggacagc

SEQ ID NO: 537518 - DNA, 15 bp, Homo sapiens
cctaggaggacagca

SEQ ID NO: 537519 - DNA, 15 bp, Homo sapiens
ctaggaggacagcag

SEQ ID NO: 537520 - DNA, 15 bp, Homo sapiens
taggaggacagcaga

SEQ ID NO: 537521 - DNA, 15 bp, Homo sapiens
aggaggacagcagag

SEQ ID NO: 537522 - DNA, 15 bp, Homo sapiens
ggaggacagcagaga

SEQ ID NO: 537523 - DNA, 15 bp, Homo sapiens
gaggacagcagagac

SEQ ID NO: 537524 - DNA, 15 bp, Homo sapiens
aggacagcagagact

SEQ ID NO: 537525 - DNA, 15 bp, Homo sapiens
ggacagcagagacta

SEQ ID NO: 537526 - DNA, 15 bp, Homo sapiens
gacagcagagactaa

SEQ ID NO: 537527 - DNA, 15 bp, Homo sapiens
acagcagagactaaa

SEQ ID NO: 537528 - DNA, 15 bp, Homo sapiens
cagcagagactaaaa

SEQ ID NO: 537529 - DNA, 15 bp, Homo sapiens
agcagagactaaaac

SEQ ID NO: 537530 - DNA, 15 bp, Homo sapiens
gcagagactaaaaca

SEQ ID NO: 537531 - DNA, 15 bp, Homo sapiens
cagagactaaaacag

SEQ ID NO: 537532 - DNA, 15 bp, Homo sapiens
agagactaaaacagc

SEQ ID NO: 537533 - DNA, 15 bp, Homo sapiens
gagactaaaacagct

SEQ ID NO: 537534 - DNA, 15 bp, Homo sapiens
agactaaaacagctt

SEQ ID NO: 537535 - DNA, 15 bp, Homo sapiens
gactaaaacagctta

SEQ ID NO: 537536 - DNA, 15 bp, Homo sapiens
actaaaacagcttaa

SEQ ID NO: 537537 - DNA, 15 bp, Homo sapiens
ctaaaacagcttaat

SEQ ID NO: 537538 - DNA, 15 bp, Homo sapiens
taaaacagcttaatg

SEQ ID NO: 537539 - DNA, 15 bp, Homo sapiens
aaaacagcttaatgt

SEQ ID NO: 537540 - DNA, 15 bp, Homo sapiens
aaacagcttaatgtc

SEQ ID NO: 537541 - DNA, 15 bp, Homo sapiens
aacagcttaatgtct

SEQ ID NO: 537542 - DNA, 15 bp, Homo sapiens
acagcttaatgtctc

SEQ ID NO: 537543 - DNA, 15 bp, Homo sapiens
cagcttaatgtctca

SEQ ID NO: 537544 - DNA, 15 bp, Homo sapiens
agcttaatgtctcat

SEQ ID NO: 537545 - DNA, 15 bp, Homo sapiens
gcttaatgtctcatg

SEQ ID NO: 537546 - DNA, 15 bp, Homo sapiens
cttaatgtctcatgt

SEQ ID NO: 537547 - DNA, 15 bp, Homo sapiens
ttaatgtctcatgtt

SEQ ID NO: 537548 - DNA, 15 bp, Homo sapiens
taatgtctcatgttg

SEQ ID NO: 537549 - DNA, 15 bp, Homo sapiens
aatgtctcatgttgg

SEQ ID NO: 537550 - DNA, 15 bp, Homo sapiens
atgtctcatgttgga

SEQ ID NO: 537551 - DNA, 15 bp, Homo sapiens
tgtctcatgttggaa

SEQ ID NO: 537552 - DNA, 15 bp, Homo sapiens
gtctcatgttggaaa

SEQ ID NO: 537553 - DNA, 15 bp, Homo sapiens
tctcatgttggaaag

SEQ ID NO: 537554 - DNA, 15 bp, Homo sapiens
ctcatgttggaaaga

SEQ ID NO: 537555 - DNA, 15 bp, Homo sapiens
tcatgttggaaagag

SEQ ID NO: 537556 - DNA, 15 bp, Homo sapiens
catgttggaaagagt

SEQ ID NO: 537557 - DNA, 15 bp, Homo sapiens
atgttggaaagagta

SEQ ID NO: 537558 - DNA, 15 bp, Homo sapiens
tgttggaaagagtaa

SEQ ID NO: 537559 - DNA, 15 bp, Homo sapiens
gttggaaagagtaaa

SEQ ID NO: 537560 - DNA, 15 bp, Homo sapiens
ttggaaagagtaaag

SEQ ID NO: 537561 - DNA, 15 bp, Homo sapiens
tggaaagagtaaagg

SEQ ID NO: 537562 - DNA, 15 bp, Homo sapiens
ggaaagagtaaagga

SEQ ID NO: 537563 - DNA, 15 bp, Homo sapiens
gaaagagtaaaggaa

SEQ ID NO: 537564 - DNA, 15 bp, Homo sapiens
aaagagtaaaggaaa

SEQ ID NO: 537565 - DNA, 15 bp, Homo sapiens
aagagtaaaggaaat

SEQ ID NO: 537566 - DNA, 15 bp, Homo sapiens
agagtaaaggaaatg

SEQ ID NO: 537567 - DNA, 15 bp, Homo sapiens
gagtaaaggaaatgt

SEQ ID NO: 537568 - DNA, 15 bp, Homo sapiens
agtaaaggaaatgtc

SEQ ID NO: 537569 - DNA, 15 bp, Homo sapiens
gtaaaggaaatgtca

SEQ ID NO: 537570 - DNA, 15 bp, Homo sapiens
taaaggaaatgtcac

SEQ ID NO: 537571 - DNA, 15 bp, Homo sapiens
aaaggaaatgtcact

SEQ ID NO: 537572 - DNA, 15 bp, Homo sapiens
aaggaaatgtcactg

SEQ ID NO: 537573 - DNA, 15 bp, Homo sapiens
aggaaatgtcactgt

SEQ ID NO: 537574 - DNA, 15 bp, Homo sapiens
ggaaatgtcactgtc

SEQ ID NO: 537575 - DNA, 15 bp, Homo sapiens
gaaatgtcactgtct

SEQ ID NO: 537576 - DNA, 15 bp, Homo sapiens
aaatgtcactgtctt

SEQ ID NO: 537577 - DNA, 15 bp, Homo sapiens
aatgtcactgtctta

SEQ ID NO: 537578 - DNA, 15 bp, Homo sapiens
atgtcactgtcttat

SEQ ID NO: 537579 - DNA, 15 bp, Homo sapiens
tgtcactgtcttatc

SEQ ID NO: 537580 - DNA, 15 bp, Homo sapiens
gtcactgtcttatcc

SEQ ID NO: 537581 - DNA, 15 bp, Homo sapiens
tcactgtcttatcct

SEQ ID NO: 537582 - DNA, 15 bp, Homo sapiens
cactgtcttatcctc

SEQ ID NO: 537583 - DNA, 15 bp, Homo sapiens
actgtcttatcctct

SEQ ID NO: 537584 - DNA, 15 bp, Homo sapiens
ctgtcttatcctctt

SEQ ID NO: 537585 - DNA, 15 bp, Homo sapiens
tgtcttatcctcttg

SEQ ID NO: 537586 - DNA, 15 bp, Homo sapiens
gtcttatcctcttgg

SEQ ID NO: 537587 - DNA, 15 bp, Homo sapiens
tcttatcctcttggt

SEQ ID NO: 537588 - DNA, 15 bp, Homo sapiens
cttatcctcttggta

SEQ ID NO: 537589 - DNA, 15 bp, Homo sapiens
ttatcctcttggtag

SEQ ID NO: 537590 - DNA, 15 bp, Homo sapiens
tatcctcttggtagg

SEQ ID NO: 537591 - DNA, 15 bp, Homo sapiens
atcctcttggtagga

SEQ ID NO: 537592 - DNA, 15 bp, Homo sapiens
tcctcttggtaggag

SEQ ID NO: 537593 - DNA, 15 bp, Homo sapiens
cctcttggtaggagt

SEQ ID NO: 537594 - DNA, 15 bp, Homo sapiens
ctcttggtaggagta

SEQ ID NO: 537595 - DNA, 15 bp, Homo sapiens
tcttggtaggagtat

SEQ ID NO: 537596 - DNA, 15 bp, Homo sapiens
cttggtaggagtatg

SEQ ID NO: 537597 - DNA, 15 bp, Homo sapiens
ttggtaggagtatga

SEQ ID NO: 537598 - DNA, 15 bp, Homo sapiens
tggtaggagtatgac

SEQ ID NO: 537599 - DNA, 15 bp, Homo sapiens
ggtaggagtatgact

SEQ ID NO: 537600 - DNA, 15 bp, Homo sapiens
gtaggagtatgactt

SEQ ID NO: 537601 - DNA, 15 bp, Homo sapiens
taggagtatgacttg

SEQ ID NO: 537602 - DNA, 15 bp, Homo sapiens
aggagtatgacttgg

SEQ ID NO: 537603 - DNA, 15 bp, Homo sapiens
ggagtatgacttggt

SEQ ID NO: 537604 - DNA, 15 bp, Homo sapiens
gagtatgacttggta

SEQ ID NO: 537605 - DNA, 15 bp, Homo sapiens
agtatgacttggtat

SEQ ID NO: 537606 - DNA, 15 bp, Homo sapiens
gtatgacttggtata

SEQ ID NO: 537607 - DNA, 15 bp, Homo sapiens
tatgacttggtataa

SEQ ID NO: 537608 - DNA, 15 bp, Homo sapiens
atgacttggtataat

SEQ ID NO: 537609 - DNA, 15 bp, Homo sapiens
tgacttggtataatc

SEQ ID NO: 537610 - DNA, 15 bp, Homo sapiens
gacttggtataatct

SEQ ID NO: 537611 - DNA, 15 bp, Homo sapiens
acttggtataatctt

SEQ ID NO: 537612 - DNA, 15 bp, Homo sapiens
cttggtataatcttt

SEQ ID NO: 537613 - DNA, 15 bp, Homo sapiens
ttggtataatctttc

SEQ ID NO: 537614 - DNA, 15 bp, Homo sapiens
tggtataatctttcc

SEQ ID NO: 537615 - DNA, 15 bp, Homo sapiens
ggtataatctttcca

SEQ ID NO: 537616 - DNA, 15 bp, Homo sapiens
gtataatctttccac

SEQ ID NO: 537617 - DNA, 15 bp, Homo sapiens
tataatctttccaca

SEQ ID NO: 537618 - DNA, 15 bp, Homo sapiens
ataatctttccacag

SEQ ID NO: 537619 - DNA, 15 bp, Homo sapiens
taatctttccacaga

SEQ ID NO: 537620 - DNA, 15 bp, Homo sapiens
aatctttccacagag

SEQ ID NO: 537621 - DNA, 15 bp, Homo sapiens
atctttccacagagc

SEQ ID NO: 537622 - DNA, 15 bp, Homo sapiens
tctttccacagagca

SEQ ID NO: 537623 - DNA, 15 bp, Homo sapiens
ctttccacagagcaa

SEQ ID NO: 537624 - DNA, 15 bp, Homo sapiens
tttccacagagcaac

SEQ ID NO: 537625 - DNA, 15 bp, Homo sapiens
ttccacagagcaaca

SEQ ID NO: 537626 - DNA, 15 bp, Homo sapiens
tccacagagcaacat

SEQ ID NO: 537627 - DNA, 15 bp, Homo sapiens
ccacagagcaacatc

SEQ ID NO: 537628 - DNA, 15 bp, Homo sapiens
cacagagcaacatct

SEQ ID NO: 537629 - DNA, 15 bp, Homo sapiens
acagagcaacatcta

SEQ ID NO: 537630 - DNA, 15 bp, Homo sapiens
cagagcaacatctat

SEQ ID NO: 537631 - DNA, 15 bp, Homo sapiens
agagcaacatctatt

SEQ ID NO: 537632 - DNA, 15 bp, Homo sapiens
gagcaacatctattt

SEQ ID NO: 537633 - DNA, 15 bp, Homo sapiens
agcaacatctatttg

SEQ ID NO: 537634 - DNA, 15 bp, Homo sapiens
gcaacatctatttga

SEQ ID NO: 537635 - DNA, 15 bp, Homo sapiens
caacatctatttgag

SEQ ID NO: 537636 - DNA, 15 bp, Homo sapiens
aacatctatttgaga

SEQ ID NO: 537637 - DNA, 15 bp, Homo sapiens
acatctatttgagaa

SEQ ID NO: 537638 - DNA, 15 bp, Homo sapiens
catctatttgagaag

SEQ ID NO: 537639 - DNA, 15 bp, Homo sapiens
atctatttgagaagt

SEQ ID NO: 537640 - DNA, 15 bp, Homo sapiens
tctatttgagaagtt

SEQ ID NO: 537641 - DNA, 15 bp, Homo sapiens
ctatttgagaagtta

SEQ ID NO: 537642 - DNA, 15 bp, Homo sapiens
tatttgagaagttaa

SEQ ID NO: 537643 - DNA, 15 bp, Homo sapiens
atttgagaagttaac

SEQ ID NO: 537644 - DNA, 15 bp, Homo sapiens
tttgagaagttaact

SEQ ID NO: 537645 - DNA, 15 bp, Homo sapiens
ttgagaagttaacta

SEQ ID NO: 537646 - DNA, 15 bp, Homo sapiens
tgagaagttaactat

SEQ ID NO: 537647 - DNA, 15 bp, Homo sapiens
gagaagttaactatt

SEQ ID NO: 537648 - DNA, 15 bp, Homo sapiens
agaagttaactattt

SEQ ID NO: 537649 - DNA, 15 bp, Homo sapiens
gaagttaactattta

SEQ ID NO: 537650 - DNA, 15 bp, Homo sapiens
aagttaactatttac

SEQ ID NO: 537651 - DNA, 15 bp, Homo sapiens
agttaactatttaca

SEQ ID NO: 537652 - DNA, 15 bp, Homo sapiens
gttaactatttacac

SEQ ID NO: 537653 - DNA, 15 bp, Homo sapiens
ttaactatttacaca

SEQ ID NO: 537654 - DNA, 15 bp, Homo sapiens
taactatttacacaa

SEQ ID NO: 537655 - DNA, 15 bp, Homo sapiens
aactatttacacaaa

SEQ ID NO: 537656 - DNA, 15 bp, Homo sapiens
actatttacacaaat

SEQ ID NO: 537657 - DNA, 15 bp, Homo sapiens
ctatttacacaaatt

SEQ ID NO: 537658 - DNA, 15 bp, Homo sapiens
tatttacacaaattt

SEQ ID NO: 537659 - DNA, 15 bp, Homo sapiens
atttacacaaatttg

SEQ ID NO: 537660 - DNA, 15 bp, Homo sapiens
tttacacaaatttga

SEQ ID NO: 537661 - DNA, 15 bp, Homo sapiens
ttacacaaatttgat

SEQ ID NO: 537662 - DNA, 15 bp, Homo sapiens
tacacaaatttgata

SEQ ID NO: 537663 - DNA, 15 bp, Homo sapiens
acacaaatttgataa

SEQ ID NO: 537664 - DNA, 15 bp, Homo sapiens
cacaaatttgataat

SEQ ID NO: 537665 - DNA, 15 bp, Homo sapiens
acaaatttgataatg

SEQ ID NO: 537666 - DNA, 15 bp, Homo sapiens
caaatttgataatgc

SEQ ID NO: 537667 - DNA, 15 bp, Homo sapiens
aaatttgataatgcc

SEQ ID NO: 537668 - DNA, 15 bp, Homo sapiens
aatttgataatgcca

SEQ ID NO: 537669 - DNA, 15 bp, Homo sapiens
atttgataatgccaa

SEQ ID NO: 537670 - DNA, 15 bp, Homo sapiens
tttgataatgccaat

SEQ ID NO: 537671 - DNA, 15 bp, Homo sapiens
ttgataatgccaatt

SEQ ID NO: 537672 - DNA, 15 bp, Homo sapiens
tgataatgccaattc

SEQ ID NO: 537673 - DNA, 15 bp, Homo sapiens
gataatgccaattct

SEQ ID NO: 537674 - DNA, 15 bp, Homo sapiens
ataatgccaattcta

SEQ ID NO: 537675 - DNA, 15 bp, Homo sapiens
taatgccaattctac

SEQ ID NO: 537676 - DNA, 15 bp, Homo sapiens
aatgccaattctaca

SEQ ID NO: 537677 - DNA, 15 bp, Homo sapiens
atgccaattctacag

SEQ ID NO: 537678 - DNA, 15 bp, Homo sapiens
tgccaattctacagc

SEQ ID NO: 537679 - DNA, 15 bp, Homo sapiens
gccaattctacagct

SEQ ID NO: 537680 - DNA, 15 bp, Homo sapiens
ccaattctacagcta

SEQ ID NO: 537681 - DNA, 15 bp, Homo sapiens
caattctacagctat

SEQ ID NO: 537682 - DNA, 15 bp, Homo sapiens
aattctacagctatg

SEQ ID NO: 537683 - DNA, 15 bp, Homo sapiens
attctacagctatgt

SEQ ID NO: 537684 - DNA, 15 bp, Homo sapiens
ttctacagctatgtt

SEQ ID NO: 537685 - DNA, 15 bp, Homo sapiens
tctacagctatgttc

SEQ ID NO: 537686 - DNA, 15 bp, Homo sapiens
ctacagctatgttca

SEQ ID NO: 537687 - DNA, 15 bp, Homo sapiens
tacagctatgttcac

SEQ ID NO: 537688 - DNA, 15 bp, Homo sapiens
acagctatgttcact

SEQ ID NO: 537689 - DNA, 15 bp, Homo sapiens
cagctatgttcactc

SEQ ID NO: 537690 - DNA, 15 bp, Homo sapiens
agctatgttcactca

SEQ ID NO: 537691 - DNA, 15 bp, Homo sapiens
gctatgttcactcag

SEQ ID NO: 537692 - DNA, 15 bp, Homo sapiens
ctatgttcactcaga

SEQ ID NO: 537693 - DNA, 15 bp, Homo sapiens
tatgttcactcagat

SEQ ID NO: 537694 - DNA, 15 bp, Homo sapiens
atgttcactcagata

SEQ ID NO: 537695 - DNA, 15 bp, Homo sapiens
tgttcactcagatat

SEQ ID NO: 537696 - DNA, 15 bp, Homo sapiens
gttcactcagatata

SEQ ID NO: 537697 - DNA, 15 bp, Homo sapiens
ttcactcagatatat

SEQ ID NO: 537698 - DNA, 15 bp, Homo sapiens
tcactcagatatatg

SEQ ID NO: 537699 - DNA, 15 bp, Homo sapiens
cactcagatatatgt

SEQ ID NO: 537700 - DNA, 15 bp, Homo sapiens
actcagatatatgta

SEQ ID NO: 537701 - DNA, 15 bp, Homo sapiens
ctcagatatatgtac

SEQ ID NO: 537702 - DNA, 15 bp, Homo sapiens
tcagatatatgtaca

SEQ ID NO: 537703 - DNA, 15 bp, Homo sapiens
cagatatatgtacaa

SEQ ID NO: 537704 - DNA, 15 bp, Homo sapiens
agatatatgtacaat

SEQ ID NO: 537705 - DNA, 15 bp, Homo sapiens
gatatatgtacaatg

SEQ ID NO: 537706 - DNA, 15 bp, Homo sapiens
atatatgtacaatgt

SEQ ID NO: 537707 - DNA, 15 bp, Homo sapiens
tatatgtacaatgtg

SEQ ID NO: 537708 - DNA, 15 bp, Homo sapiens
atatgtacaatgtgt

SEQ ID NO: 537709 - DNA, 15 bp, Homo sapiens
tatgtacaatgtgtt

SEQ ID NO: 537710 - DNA, 15 bp, Homo sapiens
atgtacaatgtgttt

SEQ ID NO: 537711 - DNA, 15 bp, Homo sapiens
tgtacaatgtgttta

SEQ ID NO: 537712 - DNA, 15 bp, Homo sapiens
gtacaatgtgtttat

SEQ ID NO: 537713 - DNA, 15 bp, Homo sapiens
tacaatgtgtttatt

SEQ ID NO: 537714 - DNA, 15 bp, Homo sapiens
acaatgtgtttattg

SEQ ID NO: 537715 - DNA, 15 bp, Homo sapiens
caatgtgtttattgt

SEQ ID NO: 537716 - DNA, 15 bp, Homo sapiens
aatgtgtttattgta

SEQ ID NO: 537717 - DNA, 15 bp, Homo sapiens
atgtgtttattgtag

SEQ ID NO: 537718 - DNA, 15 bp, Homo sapiens
tgtgtttattgtagc

SEQ ID NO: 537719 - DNA, 15 bp, Homo sapiens
gtgtttattgtagca

SEQ ID NO: 537720 - DNA, 15 bp, Homo sapiens
tgtttattgtagcat

SEQ ID NO: 537721 - DNA, 15 bp, Homo sapiens
gtttattgtagcatt

SEQ ID NO: 537722 - DNA, 15 bp, Homo sapiens
tttattgtagcattg

SEQ ID NO: 537723 - DNA, 15 bp, Homo sapiens
ttattgtagcattgt

SEQ ID NO: 537724 - DNA, 15 bp, Homo sapiens
tattgtagcattgtt

SEQ ID NO: 537725 - DNA, 15 bp, Homo sapiens
attgtagcattgttt

SEQ ID NO: 537726 - DNA, 15 bp, Homo sapiens
ttgtagcattgtttg

SEQ ID NO: 537727 - DNA, 15 bp, Homo sapiens
tgtagcattgtttgt

SEQ ID NO: 537728 - DNA, 15 bp, Homo sapiens
gtagcattgtttgtt

SEQ ID NO: 537729 - DNA, 15 bp, Homo sapiens
tagcattgtttgtta

SEQ ID NO: 537730 - DNA, 15 bp, Homo sapiens
agcattgtttgttac

SEQ ID NO: 537731 - DNA, 15 bp, Homo sapiens
gcattgtttgttaca

SEQ ID NO: 537732 - DNA, 15 bp, Homo sapiens
cattgtttgttacag

SEQ ID NO: 537733 - DNA, 15 bp, Homo sapiens
attgtttgttacagc

SEQ ID NO: 537734 - DNA, 15 bp, Homo sapiens
ttgtttgttacagca

SEQ ID NO: 537735 - DNA, 15 bp, Homo sapiens
tgtttgttacagcaa

SEQ ID NO: 537736 - DNA, 15 bp, Homo sapiens
gtttgttacagcaaa

SEQ ID NO: 537737 - DNA, 15 bp, Homo sapiens
tttgttacagcaaaa

SEQ ID NO: 537738 - DNA, 15 bp, Homo sapiens
ttgttacagcaaaag

SEQ ID NO: 537739 - DNA, 15 bp, Homo sapiens
tgttacagcaaaagt

SEQ ID NO: 537740 - DNA, 15 bp, Homo sapiens
gttacagcaaaagtt

SEQ ID NO: 537741 - DNA, 15 bp, Homo sapiens
ttacagcaaaagttg

SEQ ID NO: 537742 - DNA, 15 bp, Homo sapiens
tacagcaaaagttgg

SEQ ID NO: 537743 - DNA, 15 bp, Homo sapiens
acagcaaaagttgga

SEQ ID NO: 537744 - DNA, 15 bp, Homo sapiens
cagcaaaagttggaa

SEQ ID NO: 537745 - DNA, 15 bp, Homo sapiens
agcaaaagttggaaa

SEQ ID NO: 537746 - DNA, 15 bp, Homo sapiens
gcaaaagttggaaat

SEQ ID NO: 537747 - DNA, 15 bp, Homo sapiens
caaaagttggaaata

SEQ ID NO: 537748 - DNA, 15 bp, Homo sapiens
aaaagttggaaataa

SEQ ID NO: 537749 - DNA, 15 bp, Homo sapiens
aaagttggaaataat

SEQ ID NO: 537750 - DNA, 15 bp, Homo sapiens
aagttggaaataatc

SEQ ID NO: 537751 - DNA, 15 bp, Homo sapiens
agttggaaataatct

SEQ ID NO: 537752 - DNA, 15 bp, Homo sapiens
gttggaaataatcta

SEQ ID NO: 537753 - DNA, 15 bp, Homo sapiens
ttggaaataatctaa

SEQ ID NO: 537754 - DNA, 15 bp, Homo sapiens
tggaaataatctaaa

SEQ ID NO: 537755 - DNA, 15 bp, Homo sapiens
ggaaataatctaaat

SEQ ID NO: 537756 - DNA, 15 bp, Homo sapiens
gaaataatctaaatg

SEQ ID NO: 537757 - DNA, 15 bp, Homo sapiens
aaataatctaaatgt

SEQ ID NO: 537758 - DNA, 15 bp, Homo sapiens
aataatctaaatgtc

SEQ ID NO: 537759 - DNA, 15 bp, Homo sapiens
ataatctaaatgtcc

SEQ ID NO: 537760 - DNA, 15 bp, Homo sapiens
taatctaaatgtcca

SEQ ID NO: 537761 - DNA, 15 bp, Homo sapiens
aatctaaatgtccac

SEQ ID NO: 537762 - DNA, 15 bp, Homo sapiens
atctaaatgtccacc

SEQ ID NO: 537763 - DNA, 15 bp, Homo sapiens
tctaaatgtccacca

SEQ ID NO: 537764 - DNA, 15 bp, Homo sapiens
ctaaatgtccaccag

SEQ ID NO: 537765 - DNA, 15 bp, Homo sapiens
taaatgtccaccagt

SEQ ID NO: 537766 - DNA, 15 bp, Homo sapiens
aaatgtccaccagta

SEQ ID NO: 537767 - DNA, 15 bp, Homo sapiens
aatgtccaccagtag

SEQ ID NO: 537768 - DNA, 15 bp, Homo sapiens
atgtccaccagtagg

SEQ ID NO: 537769 - DNA, 15 bp, Homo sapiens
tgtccaccagtaggg

SEQ ID NO: 537770 - DNA, 15 bp, Homo sapiens
gtccaccagtagggg

SEQ ID NO: 537771 - DNA, 15 bp, Homo sapiens
tccaccagtagggga

SEQ ID NO: 537772 - DNA, 15 bp, Homo sapiens
ccaccagtaggggac

SEQ ID NO: 537773 - DNA, 15 bp, Homo sapiens
caccagtaggggact

SEQ ID NO: 537774 - DNA, 15 bp, Homo sapiens
accagtaggggacta

SEQ ID NO: 537775 - DNA, 15 bp, Homo sapiens
ccagtaggggactag

SEQ ID NO: 537776 - DNA, 15 bp, Homo sapiens
cagtaggggactaga

SEQ ID NO: 537777 - DNA, 15 bp, Homo sapiens
agtaggggactagat

SEQ ID NO: 537778 - DNA, 15 bp, Homo sapiens
gtaggggactagata

SEQ ID NO: 537779 - DNA, 15 bp, Homo sapiens
taggggactagataa

SEQ ID NO: 537780 - DNA, 15 bp, Homo sapiens
aggggactagataaa

SEQ ID NO: 537781 - DNA, 15 bp, Homo sapiens
ggggactagataaac

SEQ ID NO: 537782 - DNA, 15 bp, Homo sapiens
gggactagataaaca

SEQ ID NO: 537783 - DNA, 15 bp, Homo sapiens
ggactagataaacaa

SEQ ID NO: 537784 - DNA, 15 bp, Homo sapiens
gactagataaacaaa

SEQ ID NO: 537785 - DNA, 15 bp, Homo sapiens
actagataaacaaag

SEQ ID NO: 537786 - DNA, 15 bp, Homo sapiens
ctagataaacaaagg

SEQ ID NO: 537787 - DNA, 15 bp, Homo sapiens
tagataaacaaagga

SEQ ID NO: 537788 - DNA, 15 bp, Homo sapiens
agataaacaaaggag

SEQ ID NO: 537789 - DNA, 15 bp, Homo sapiens
gataaacaaaggagg

SEQ ID NO: 537790 - DNA, 15 bp, Homo sapiens
ataaacaaaggagga

SEQ ID NO: 537791 - DNA, 15 bp, Homo sapiens
taaacaaaggaggaa

SEQ ID NO: 537792 - DNA, 15 bp, Homo sapiens
aaacaaaggaggaaa

SEQ ID NO: 537793 - DNA, 15 bp, Homo sapiens
aacaaaggaggaaag

SEQ ID NO: 537794 - DNA, 15 bp, Homo sapiens
acaaaggaggaaaga

SEQ ID NO: 537795 - DNA, 15 bp, Homo sapiens
caaaggaggaaagat

SEQ ID NO: 537796 - DNA, 15 bp, Homo sapiens
aaaggaggaaagatt

SEQ ID NO: 537797 - DNA, 15 bp, Homo sapiens
aaggaggaaagattc

SEQ ID NO: 537798 - DNA, 15 bp, Homo sapiens
aggaggaaagattca

SEQ ID NO: 537799 - DNA, 15 bp, Homo sapiens
ggaggaaagattcat

SEQ ID NO: 537800 - DNA, 15 bp, Homo sapiens
gaggaaagattcatg

SEQ ID NO: 537801 - DNA, 15 bp, Homo sapiens
aggaaagattcatgt

SEQ ID NO: 537802 - DNA, 15 bp, Homo sapiens
ggaaagattcatgta

SEQ ID NO: 537803 - DNA, 15 bp, Homo sapiens
gaaagattcatgtaa

SEQ ID NO: 537804 - DNA, 15 bp, Homo sapiens
aaagattcatgtaag

SEQ ID NO: 537805 - DNA, 15 bp, Homo sapiens
aagattcatgtaaga

SEQ ID NO: 537806 - DNA, 15 bp, Homo sapiens
agattcatgtaagaa

SEQ ID NO: 537807 - DNA, 15 bp, Homo sapiens
gattcatgtaagaaa

SEQ ID NO: 537808 - DNA, 15 bp, Homo sapiens
attcatgtaagaaaa

SEQ ID NO: 537809 - DNA, 15 bp, Homo sapiens
ttcatgtaagaaaat

SEQ ID NO: 537810 - DNA, 15 bp, Homo sapiens
tcatgtaagaaaatg

SEQ ID NO: 537811 - DNA, 15 bp, Homo sapiens
catgtaagaaaatgc

SEQ ID NO: 537812 - DNA, 15 bp, Homo sapiens
atgtaagaaaatgcc

SEQ ID NO: 537813 - DNA, 15 bp, Homo sapiens
tgtaagaaaatgcca

SEQ ID NO: 537814 - DNA, 15 bp, Homo sapiens
gtaagaaaatgccat

SEQ ID NO: 537815 - DNA, 15 bp, Homo sapiens
taagaaaatgccatg

SEQ ID NO: 537816 - DNA, 15 bp, Homo sapiens
aagaaaatgccatgc

SEQ ID NO: 537817 - DNA, 15 bp, Homo sapiens
agaaaatgccatgca

SEQ ID NO: 537818 - DNA, 15 bp, Homo sapiens
gaaaatgccatgcaa

SEQ ID NO: 537819 - DNA, 15 bp, Homo sapiens
aaaatgccatgcaac

SEQ ID NO: 537820 - DNA, 15 bp, Homo sapiens
aaatgccatgcaact

SEQ ID NO: 537821 - DNA, 15 bp, Homo sapiens
aatgccatgcaacta

SEQ ID NO: 537822 - DNA, 15 bp, Homo sapiens
atgccatgcaactac

SEQ ID NO: 537823 - DNA, 15 bp, Homo sapiens
tgccatgcaactaca

SEQ ID NO: 537824 - DNA, 15 bp, Homo sapiens
gccatgcaactacaa

SEQ ID NO: 537825 - DNA, 15 bp, Homo sapiens
ccatgcaactacaaa

SEQ ID NO: 537826 - DNA, 15 bp, Homo sapiens
catgcaactacaaaa

SEQ ID NO: 537827 - DNA, 15 bp, Homo sapiens
atgcaactacaaaat

SEQ ID NO: 537828 - DNA, 15 bp, Homo sapiens
tgcaactacaaaatg

SEQ ID NO: 537829 - DNA, 15 bp, Homo sapiens
gcaactacaaaatgg

SEQ ID NO: 537830 - DNA, 15 bp, Homo sapiens
caactacaaaatggg

SEQ ID NO: 537831 - DNA, 15 bp, Homo sapiens
aactacaaaatggga

SEQ ID NO: 537832 - DNA, 15 bp, Homo sapiens
actacaaaatgggat

SEQ ID NO: 537833 - DNA, 15 bp, Homo sapiens
ctacaaaatgggata

SEQ ID NO: 537834 - DNA, 15 bp, Homo sapiens
tacaaaatgggataa

SEQ ID NO: 537835 - DNA, 15 bp, Homo sapiens
acaaaatgggataaa

SEQ ID NO: 537836 - DNA, 15 bp, Homo sapiens
caaaatgggataaaa

SEQ ID NO: 537837 - DNA, 15 bp, Homo sapiens
aaaatgggataaaat

SEQ ID NO: 537838 - DNA, 15 bp, Homo sapiens
aaatgggataaaatc

SEQ ID NO: 537839 - DNA, 15 bp, Homo sapiens
aatgggataaaatca

SEQ ID NO: 537840 - DNA, 15 bp, Homo sapiens
atgggataaaatcaa

SEQ ID NO: 537841 - DNA, 15 bp, Homo sapiens
tgggataaaatcaat

SEQ ID NO: 537842 - DNA, 15 bp, Homo sapiens
gggataaaatcaatt

SEQ ID NO: 537843 - DNA, 15 bp, Homo sapiens
ggataaaatcaattg

SEQ ID NO: 537844 - DNA, 15 bp, Homo sapiens
gataaaatcaattgt

SEQ ID NO: 537845 - DNA, 15 bp, Homo sapiens
ataaaatcaattgtc

SEQ ID NO: 537846 - DNA, 15 bp, Homo sapiens
taaaatcaattgtcg

SEQ ID NO: 537847 - DNA, 15 bp, Homo sapiens
aaaatcaattgtcgt

SEQ ID NO: 537848 - DNA, 15 bp, Homo sapiens
aaatcaattgtcgta

SEQ ID NO: 537849 - DNA, 15 bp, Homo sapiens
aatcaattgtcgtat

SEQ ID NO: 537850 - DNA, 15 bp, Homo sapiens
atcaattgtcgtata

SEQ ID NO: 537851 - DNA, 15 bp, Homo sapiens
tcaattgtcgtatac

SEQ ID NO: 537852 - DNA, 15 bp, Homo sapiens
caattgtcgtataca

SEQ ID NO: 537853 - DNA, 15 bp, Homo sapiens
aattgtcgtatacac

SEQ ID NO: 537854 - DNA, 15 bp, Homo sapiens
attgtcgtatacact

SEQ ID NO: 537855 - DNA, 15 bp, Homo sapiens
ttgtcgtatacactg

SEQ ID NO: 537856 - DNA, 15 bp, Homo sapiens
tgtcgtatacactga

SEQ ID NO: 537857 - DNA, 15 bp, Homo sapiens
gtcgtatacactgat

SEQ ID NO: 537858 - DNA, 15 bp, Homo sapiens
tcgtatacactgatt

SEQ ID NO: 537859 - DNA, 15 bp, Homo sapiens
cgtatacactgattt

SEQ ID NO: 537860 - DNA, 15 bp, Homo sapiens
gtatacactgattta

SEQ ID NO: 537861 - DNA, 15 bp, Homo sapiens
tatacactgatttag

SEQ ID NO: 537862 - DNA, 15 bp, Homo sapiens
atacactgatttaga

SEQ ID NO: 537863 - DNA, 15 bp, Homo sapiens
tacactgatttagaa

SEQ ID NO: 537864 - DNA, 15 bp, Homo sapiens
acactgatttagaaa

SEQ ID NO: 537865 - DNA, 15 bp, Homo sapiens
cactgatttagaaaa

SEQ ID NO: 537866 - DNA, 15 bp, Homo sapiens
actgatttagaaaat

SEQ ID NO: 537867 - DNA, 15 bp, Homo sapiens
ctgatttagaaaatt

SEQ ID NO: 537868 - DNA, 15 bp, Homo sapiens
tgatttagaaaattc

SEQ ID NO: 537869 - DNA, 15 bp, Homo sapiens
gatttagaaaattct

SEQ ID NO: 537870 - DNA, 15 bp, Homo sapiens
atttagaaaattctc

SEQ ID NO: 537871 - DNA, 15 bp, Homo sapiens
tttagaaaattctcc

SEQ ID NO: 537872 - DNA, 15 bp, Homo sapiens
ttagaaaattctcca

SEQ ID NO: 537873 - DNA, 15 bp, Homo sapiens
tagaaaattctccaa

SEQ ID NO: 537874 - DNA, 15 bp, Homo sapiens
agaaaattctccaat

SEQ ID NO: 537875 - DNA, 15 bp, Homo sapiens
gaaaattctccaatg

SEQ ID NO: 537876 - DNA, 15 bp, Homo sapiens
aaaattctccaatgt

SEQ ID NO: 537877 - DNA, 15 bp, Homo sapiens
aaattctccaatgta

SEQ ID NO: 537878 - DNA, 15 bp, Homo sapiens
aattctccaatgtat

SEQ ID NO: 537879 - DNA, 15 bp, Homo sapiens
attctccaatgtata

SEQ ID NO: 537880 - DNA, 15 bp, Homo sapiens
ttctccaatgtatat

SEQ ID NO: 537881 - DNA, 15 bp, Homo sapiens
tctccaatgtatatt

SEQ ID NO: 537882 - DNA, 15 bp, Homo sapiens
ctccaatgtatatta

SEQ ID NO: 537883 - DNA, 15 bp, Homo sapiens
tccaatgtatattat

SEQ ID NO: 537884 - DNA, 15 bp, Homo sapiens
ccaatgtatattatt

SEQ ID NO: 537885 - DNA, 15 bp, Homo sapiens
caatgtatattatta

SEQ ID NO: 537886 - DNA, 15 bp, Homo sapiens
aatgtatattattac

SEQ ID NO: 537887 - DNA, 15 bp, Homo sapiens
atgtatattattaca

SEQ ID NO: 537888 - DNA, 15 bp, Homo sapiens
tgtatattattacat

SEQ ID NO: 537889 - DNA, 15 bp, Homo sapiens
gtatattattacatg

SEQ ID NO: 537890 - DNA, 15 bp, Homo sapiens
tatattattacatgg

SEQ ID NO: 537891 - DNA, 15 bp, Homo sapiens
atattattacatgga

SEQ ID NO: 537892 - DNA, 15 bp, Homo sapiens
tattattacatggaa

SEQ ID NO: 537893 - DNA, 15 bp, Homo sapiens
attattacatggaaa

SEQ ID NO: 537894 - DNA, 15 bp, Homo sapiens
ttattacatggaaaa

SEQ ID NO: 537895 - DNA, 15 bp, Homo sapiens
tattacatggaaaaa

SEQ ID NO: 537896 - DNA, 15 bp, Homo sapiens
attacatggaaaaaa

SEQ ID NO: 537897 - DNA, 15 bp, Homo sapiens
ttacatggaaaaaag

SEQ ID NO: 537898 - DNA, 15 bp, Homo sapiens
tacatggaaaaaagc

SEQ ID NO: 537899 - DNA, 15 bp, Homo sapiens
acatggaaaaaagca

SEQ ID NO: 537900 - DNA, 15 bp, Homo sapiens
catggaaaaaagcaa

SEQ ID NO: 537901 - DNA, 15 bp, Homo sapiens
atggaaaaaagcaaa

SEQ ID NO: 537902 - DNA, 15 bp, Homo sapiens
tggaaaaaagcaaaa

SEQ ID NO: 537903 - DNA, 15 bp, Homo sapiens
ggaaaaaagcaaaaa

SEQ ID NO: 537904 - DNA, 15 bp, Homo sapiens
gaaaaaagcaaaaag

SEQ ID NO: 537905 - DNA, 15 bp, Homo sapiens
aaaaaagcaaaaagt

SEQ ID NO: 537906 - DNA, 15 bp, Homo sapiens
aaaaagcaaaaagtt

SEQ ID NO: 537907 - DNA, 15 bp, Homo sapiens
aaaagcaaaaagttc

SEQ ID NO: 537908 - DNA, 15 bp, Homo sapiens
aaagcaaaaagttcc

SEQ ID NO: 537909 - DNA, 15 bp, Homo sapiens
aagcaaaaagttcca

SEQ ID NO: 537910 - DNA, 15 bp, Homo sapiens
agcaaaaagttccaa

SEQ ID NO: 537911 - DNA, 15 bp, Homo sapiens
gcaaaaagttccaaa

SEQ ID NO: 537912 - DNA, 15 bp, Homo sapiens
caaaaagttccaaaa

SEQ ID NO: 537913 - DNA, 15 bp, Homo sapiens
aaaaagttccaaaat

SEQ ID NO: 537914 - DNA, 15 bp, Homo sapiens
aaaagttccaaaata

SEQ ID NO: 537915 - DNA, 15 bp, Homo sapiens
aaagttccaaaatat

SEQ ID NO: 537916 - DNA, 15 bp, Homo sapiens
aagttccaaaatatt

SEQ ID NO: 537917 - DNA, 15 bp, Homo sapiens
agttccaaaatattg

SEQ ID NO: 537918 - DNA, 15 bp, Homo sapiens
gttccaaaatattgg

SEQ ID NO: 537919 - DNA, 15 bp, Homo sapiens
ttccaaaatattggg

SEQ ID NO: 537920 - DNA, 15 bp, Homo sapiens
tccaaaatattgggc

SEQ ID NO: 537921 - DNA, 15 bp, Homo sapiens
ccaaaatattgggcc

SEQ ID NO: 537922 - DNA, 15 bp, Homo sapiens
caaaatattgggccg

SEQ ID NO: 537923 - DNA, 15 bp, Homo sapiens
aaaatattgggccgg

SEQ ID NO: 537924 - DNA, 15 bp, Homo sapiens
aaatattgggccggg

SEQ ID NO: 537925 - DNA, 15 bp, Homo sapiens
aatattgggccgggc

SEQ ID NO: 537926 - DNA, 15 bp, Homo sapiens
atattgggccgggca

SEQ ID NO: 537927 - DNA, 15 bp, Homo sapiens
tattgggccgggcac

SEQ ID NO: 537928 - DNA, 15 bp, Homo sapiens
attgggccgggcacg

SEQ ID NO: 537929 - DNA, 15 bp, Homo sapiens
ttgggccgggcacgg

SEQ ID NO: 537930 - DNA, 15 bp, Homo sapiens
tgggccgggcacggt

SEQ ID NO: 537931 - DNA, 15 bp, Homo sapiens
gggccgggcacggtg

SEQ ID NO: 537932 - DNA, 15 bp, Homo sapiens
ggccgggcacggtgg

SEQ ID NO: 537933 - DNA, 15 bp, Homo sapiens
gccgggcacggtggc

SEQ ID NO: 537934 - DNA, 15 bp, Homo sapiens
ccgggcacggtggct

SEQ ID NO: 537935 - DNA, 15 bp, Homo sapiens
cgggcacggtggctc

SEQ ID NO: 537936 - DNA, 15 bp, Homo sapiens
gggcacggtggctca

SEQ ID NO: 537937 - DNA, 15 bp, Homo sapiens
gcacggtggctcact

SEQ ID NO: 537938 - DNA, 15 bp, Homo sapiens
cacggtggctcactc

SEQ ID NO: 537939 - DNA, 15 bp, Homo sapiens
acggtggctcactcc

SEQ ID NO: 537940 - DNA, 15 bp, Homo sapiens
cggtggctcactcct

SEQ ID NO: 537941 - DNA, 15 bp, Homo sapiens
ggtggctcactcctg

SEQ ID NO: 537942 - DNA, 15 bp, Homo sapiens
gtggctcactcctgt

SEQ ID NO: 537943 - DNA, 15 bp, Homo sapiens
tggctcactcctgta

SEQ ID NO: 537944 - DNA, 15 bp, Homo sapiens
ggctcactcctgtaa

SEQ ID NO: 537945 - DNA, 15 bp, Homo sapiens
gctcactcctgtaat

SEQ ID NO: 537946 - DNA, 15 bp, Homo sapiens
ctcactcctgtaatc

SEQ ID NO: 537947 - DNA, 15 bp, Homo sapiens
tcactcctgtaatcc

SEQ ID NO: 537948 - DNA, 15 bp, Homo sapiens
cactcctgtaatcct

SEQ ID NO: 537949 - DNA, 15 bp, Homo sapiens
actcctgtaatccta

SEQ ID NO: 537950 - DNA, 15 bp, Homo sapiens
ctcctgtaatcctag

SEQ ID NO: 537951 - DNA, 15 bp, Homo sapiens
tcctgtaatcctagc

SEQ ID NO: 537952 - DNA, 15 bp, Homo sapiens
cctgtaatcctagca

SEQ ID NO: 537953 - DNA, 15 bp, Homo sapiens
ctgtaatcctagcac

SEQ ID NO: 537954 - DNA, 15 bp, Homo sapiens
tgtaatcctagcact

SEQ ID NO: 537955 - DNA, 15 bp, Homo sapiens
gtaatcctagcactt

SEQ ID NO: 537956 - DNA, 15 bp, Homo sapiens
taatcctagcacttt

SEQ ID NO: 537957 - DNA, 15 bp, Homo sapiens
aatcctagcactttg

SEQ ID NO: 537958 - DNA, 15 bp, Homo sapiens
atcctagcactttgg

SEQ ID NO: 537959 - DNA, 15 bp, Homo sapiens
tcctagcactttggg

SEQ ID NO: 537960 - DNA, 15 bp, Homo sapiens
cctagcactttggga

SEQ ID NO: 537961 - DNA, 15 bp, Homo sapiens
ctagcactttgggag

SEQ ID NO: 537962 - DNA, 15 bp, Homo sapiens
tagcactttgggagg

SEQ ID NO: 537963 - DNA, 15 bp, Homo sapiens
agcactttgggaggc

SEQ ID NO: 537964 - DNA, 15 bp, Homo sapiens
gcactttgggaggcc

SEQ ID NO: 537965 - DNA, 15 bp, Homo sapiens
cactttgggaggccg

SEQ ID NO: 537966 - DNA, 15 bp, Homo sapiens
actttgggaggccga

SEQ ID NO: 537967 - DNA, 15 bp, Homo sapiens
ctttgggaggccgag

SEQ ID NO: 537968 - DNA, 15 bp, Homo sapiens
tttgggaggccgagg

SEQ ID NO: 537969 - DNA, 15 bp, Homo sapiens
ttgggaggccgaggc

SEQ ID NO: 537970 - DNA, 15 bp, Homo sapiens
tgggaggccgaggct

SEQ ID NO: 537971 - DNA, 15 bp, Homo sapiens
gggaggccgaggcta

SEQ ID NO: 537972 - DNA, 15 bp, Homo sapiens
ggaggccgaggctag

SEQ ID NO: 537973 - DNA, 15 bp, Homo sapiens
gaggccgaggctagc

SEQ ID NO: 537974 - DNA, 15 bp, Homo sapiens
aggccgaggctagca

SEQ ID NO: 537975 - DNA, 15 bp, Homo sapiens
ggccgaggctagcag

SEQ ID NO: 537976 - DNA, 15 bp, Homo sapiens
gccgaggctagcaga

SEQ ID NO: 537977 - DNA, 15 bp, Homo sapiens
ccgaggctagcagat

SEQ ID NO: 537978 - DNA, 15 bp, Homo sapiens
cgaggctagcagata

SEQ ID NO: 537979 - DNA, 15 bp, Homo sapiens
gaggctagcagataa

SEQ ID NO: 537980 - DNA, 15 bp, Homo sapiens
aggctagcagataat

SEQ ID NO: 537981 - DNA, 15 bp, Homo sapiens
ggctagcagataatg

SEQ ID NO: 537982 - DNA, 15 bp, Homo sapiens
gctagcagataatga

SEQ ID NO: 537983 - DNA, 15 bp, Homo sapiens
ctagcagataatgag

SEQ ID NO: 537984 - DNA, 15 bp, Homo sapiens
tagcagataatgagg

SEQ ID NO: 537985 - DNA, 15 bp, Homo sapiens
agcagataatgaggt

SEQ ID NO: 537986 - DNA, 15 bp, Homo sapiens
gcagataatgaggtc

SEQ ID NO: 537987 - DNA, 15 bp, Homo sapiens
cagataatgaggtca

SEQ ID NO: 537988 - DNA, 15 bp, Homo sapiens
agataatgaggtcaa

SEQ ID NO: 537989 - DNA, 15 bp, Homo sapiens
gataatgaggtcaag

SEQ ID NO: 537990 - DNA, 15 bp, Homo sapiens
ataatgaggtcaaga

SEQ ID NO: 537991 - DNA, 15 bp, Homo sapiens
taatgaggtcaagag

SEQ ID NO: 537992 - DNA, 15 bp, Homo sapiens
aatgaggtcaagaga

SEQ ID NO: 537993 - DNA, 15 bp, Homo sapiens
atgaggtcaagagat

SEQ ID NO: 537994 - DNA, 15 bp, Homo sapiens
tgaggtcaagagatt

SEQ ID NO: 537995 - DNA, 15 bp, Homo sapiens
gaggtcaagagattg

SEQ ID NO: 537996 - DNA, 15 bp, Homo sapiens
aggtcaagagattga

SEQ ID NO: 537997 - DNA, 15 bp, Homo sapiens
ggtcaagagattgag

SEQ ID NO: 537998 - DNA, 15 bp, Homo sapiens
gtcaagagattgaga

SEQ ID NO: 537999 - DNA, 15 bp, Homo sapiens
tcaagagattgagac

SEQ ID NO: 538000 - DNA, 15 bp, Homo sapiens
caagagattgagacc

SEQ ID NO: 538001 - DNA, 15 bp, Homo sapiens
aagagattgagacca

SEQ ID NO: 538002 - DNA, 15 bp, Homo sapiens
agagattgagaccat

SEQ ID NO: 538003 - DNA, 15 bp, Homo sapiens
gagattgagaccatc

SEQ ID NO: 538004 - DNA, 15 bp, Homo sapiens
agattgagaccatcc

SEQ ID NO: 538005 - DNA, 15 bp, Homo sapiens
gattgagaccatcct

SEQ ID NO: 538006 - DNA, 15 bp, Homo sapiens
attgagaccatcctg

SEQ ID NO: 538007 - DNA, 15 bp, Homo sapiens
ttgagaccatcctgg

SEQ ID NO: 538008 - DNA, 15 bp, Homo sapiens
tgagaccatcctggc

SEQ ID NO: 538009 - DNA, 15 bp, Homo sapiens
gagaccatcctggcc

SEQ ID NO: 538010 - DNA, 15 bp, Homo sapiens
agaccatcctggcca

SEQ ID NO: 538011 - DNA, 15 bp, Homo sapiens
gaccatcctggccaa

SEQ ID NO: 538012 - DNA, 15 bp, Homo sapiens
accatcctggccaac

SEQ ID NO: 538013 - DNA, 15 bp, Homo sapiens
ccatcctggccaaca

SEQ ID NO: 538014 - DNA, 15 bp, Homo sapiens
catcctggccaacat

SEQ ID NO: 538015 - DNA, 15 bp, Homo sapiens
atcctggccaacatg

SEQ ID NO: 538016 - DNA, 15 bp, Homo sapiens
tcctggccaacatgg

SEQ ID NO: 538017 - DNA, 15 bp, Homo sapiens
cctggccaacatggt

SEQ ID NO: 538018 - DNA, 15 bp, Homo sapiens
ctggccaacatggtg

SEQ ID NO: 538019 - DNA, 15 bp, Homo sapiens
tggccaacatggtga

SEQ ID NO: 538020 - DNA, 15 bp, Homo sapiens
ggccaacatggtgaa

SEQ ID NO: 538021 - DNA, 15 bp, Homo sapiens
gccaacatggtgaaa

SEQ ID NO: 538022 - DNA, 15 bp, Homo sapiens
ccaacatggtgaaac

SEQ ID NO: 538023 - DNA, 15 bp, Homo sapiens
caacatggtgaaact

SEQ ID NO: 538024 - DNA, 15 bp, Homo sapiens
aacatggtgaaactc

SEQ ID NO: 538025 - DNA, 15 bp, Homo sapiens
acatggtgaaactct

SEQ ID NO: 538026 - DNA, 15 bp, Homo sapiens
catggtgaaactcta

SEQ ID NO: 538027 - DNA, 15 bp, Homo sapiens
atggtgaaactctac

SEQ ID NO: 538028 - DNA, 15 bp, Homo sapiens
tggtgaaactctacc

SEQ ID NO: 538029 - DNA, 15 bp, Homo sapiens
ggtgaaactctacct

SEQ ID NO: 538030 - DNA, 15 bp, Homo sapiens
gtgaaactctacctc

SEQ ID NO: 538031 - DNA, 15 bp, Homo sapiens
tgaaactctacctct

SEQ ID NO: 538032 - DNA, 15 bp, Homo sapiens
gaaactctacctcta

SEQ ID NO: 538033 - DNA, 15 bp, Homo sapiens
aaactctacctctac

SEQ ID NO: 538034 - DNA, 15 bp, Homo sapiens
aactctacctctact

SEQ ID NO: 538035 - DNA, 15 bp, Homo sapiens
actctacctctacta

SEQ ID NO: 538036 - DNA, 15 bp, Homo sapiens
ctctacctctactaa

SEQ ID NO: 538037 - DNA, 15 bp, Homo sapiens
tctacctctactaaa

SEQ ID NO: 538038 - DNA, 15 bp, Homo sapiens
ctacctctactaaaa

SEQ ID NO: 538039 - DNA, 15 bp, Homo sapiens
tacctctactaaaaa

SEQ ID NO: 538040 - DNA, 15 bp, Homo sapiens
acctctactaaaaat

SEQ ID NO: 538041 - DNA, 15 bp, Homo sapiens
cctctactaaaaata

SEQ ID NO: 538042 - DNA, 15 bp, Homo sapiens
ctctactaaaaatac

SEQ ID NO: 538043 - DNA, 15 bp, Homo sapiens
tctactaaaaataca

SEQ ID NO: 538044 - DNA, 15 bp, Homo sapiens
ctactaaaaatacaa

SEQ ID NO: 538045 - DNA, 15 bp, Homo sapiens
tactaaaaatacaaa

SEQ ID NO: 538046 - DNA, 15 bp, Homo sapiens
actaaaaatacaaaa

SEQ ID NO: 538047 - DNA, 15 bp, Homo sapiens
ctaaaaatacaaaaa

SEQ ID NO: 538048 - DNA, 15 bp, Homo sapiens
taaaaatacaaaaat

SEQ ID NO: 538049 - DNA, 15 bp, Homo sapiens
aaaaatacaaaaatt

SEQ ID NO: 538050 - DNA, 15 bp, Homo sapiens
aaaatacaaaaatta

SEQ ID NO: 538051 - DNA, 15 bp, Homo sapiens
aaatacaaaaattag

SEQ ID NO: 538052 - DNA, 15 bp, Homo sapiens
aatacaaaaattagc

SEQ ID NO: 538053 - DNA, 15 bp, Homo sapiens
atacaaaaattagct

SEQ ID NO: 538054 - DNA, 15 bp, Homo sapiens
caaaaattagctggg

SEQ ID NO: 538055 - DNA, 15 bp, Homo sapiens
aaaaattagctgggt

SEQ ID NO: 538056 - DNA, 15 bp, Homo sapiens
aaaattagctgggtg

SEQ ID NO: 538057 - DNA, 15 bp, Homo sapiens
aaattagctgggtgt

SEQ ID NO: 538058 - DNA, 15 bp, Homo sapiens
aattagctgggtgtg

SEQ ID NO: 538059 - DNA, 15 bp, Homo sapiens
attagctgggtgtgg

SEQ ID NO: 538060 - DNA, 15 bp, Homo sapiens
ttagctgggtgtggt

SEQ ID NO: 538061 - DNA, 15 bp, Homo sapiens
tagctgggtgtggtg

SEQ ID NO: 538062 - DNA, 15 bp, Homo sapiens
agctgggtgtggtgg

SEQ ID NO: 538063 - DNA, 15 bp, Homo sapiens
gctgggtgtggtggt

SEQ ID NO: 538064 - DNA, 15 bp, Homo sapiens
ctgggtgtggtggtg

SEQ ID NO: 538065 - DNA, 15 bp, Homo sapiens
tgggtgtggtggtgc

SEQ ID NO: 538066 - DNA, 15 bp, Homo sapiens
gggtgtggtggtgca

SEQ ID NO: 538067 - DNA, 15 bp, Homo sapiens
ggtgtggtggtgcat

SEQ ID NO: 538068 - DNA, 15 bp, Homo sapiens
gtgtggtggtgcatg

SEQ ID NO: 538069 - DNA, 15 bp, Homo sapiens
tgtggtggtgcatgc

SEQ ID NO: 538070 - DNA, 15 bp, Homo sapiens
gtggtggtgcatgcc

SEQ ID NO: 538071 - DNA, 15 bp, Homo sapiens
tggtggtgcatgcct

SEQ ID NO: 538072 - DNA, 15 bp, Homo sapiens
ggtggtgcatgcctg

SEQ ID NO: 538073 - DNA, 15 bp, Homo sapiens
gtggtgcatgcctgt

SEQ ID NO: 538074 - DNA, 15 bp, Homo sapiens
tggtgcatgcctgta

SEQ ID NO: 538075 - DNA, 15 bp, Homo sapiens
ggtgcatgcctgtag

SEQ ID NO: 538076 - DNA, 15 bp, Homo sapiens
gtgcatgcctgtagt

SEQ ID NO: 538077 - DNA, 15 bp, Homo sapiens
tgcatgcctgtagtc

SEQ ID NO: 538078 - DNA, 15 bp, Homo sapiens
gcatgcctgtagtcc

SEQ ID NO: 538079 - DNA, 15 bp, Homo sapiens
catgcctgtagtccc

SEQ ID NO: 538080 - DNA, 15 bp, Homo sapiens
atgcctgtagtccca

SEQ ID NO: 538081 - DNA, 15 bp, Homo sapiens
tgcctgtagtcccag

SEQ ID NO: 538082 - DNA, 15 bp, Homo sapiens
gcctgtagtcccagc

SEQ ID NO: 538083 - DNA, 15 bp, Homo sapiens
ctgtagtcccagcta

SEQ ID NO: 538084 - DNA, 15 bp, Homo sapiens
tagtcccagctactg

SEQ ID NO: 538085 - DNA, 15 bp, Homo sapiens
agtcccagctactgg

SEQ ID NO: 538086 - DNA, 15 bp, Homo sapiens
gtcccagctactggg

SEQ ID NO: 538087 - DNA, 15 bp, Homo sapiens
tcccagctactgggg

SEQ ID NO: 538088 - DNA, 15 bp, Homo sapiens
cccagctactgggga

SEQ ID NO: 538089 - DNA, 15 bp, Homo sapiens
ccagctactggggag

SEQ ID NO: 538090 - DNA, 15 bp, Homo sapiens
cagctactggggagg

SEQ ID NO: 538091 - DNA, 15 bp, Homo sapiens
agctactggggaggc

SEQ ID NO: 538092 - DNA, 15 bp, Homo sapiens
gctactggggaggct

SEQ ID NO: 538093 - DNA, 15 bp, Homo sapiens
ctactggggaggctg

SEQ ID NO: 538094 - DNA, 15 bp, Homo sapiens
tactggggaggctga

SEQ ID NO: 538095 - DNA, 15 bp, Homo sapiens
actggggaggctgag

SEQ ID NO: 538096 - DNA, 15 bp, Homo sapiens
ctggggaggctgagg

SEQ ID NO: 538097 - DNA, 15 bp, Homo sapiens
tggggaggctgaggc

SEQ ID NO: 538098 - DNA, 15 bp, Homo sapiens
ggggaggctgaggca

SEQ ID NO: 538099 - DNA, 15 bp, Homo sapiens
ggaggctgaggcagg

SEQ ID NO: 538100 - DNA, 15 bp, Homo sapiens
gaggctgaggcagga

SEQ ID NO: 538101 - DNA, 15 bp, Homo sapiens
aggctgaggcaggag

SEQ ID NO: 538102 - DNA, 15 bp, Homo sapiens
ggctgaggcaggaga

SEQ ID NO: 538103 - DNA, 15 bp, Homo sapiens
gctgaggcaggagaa

SEQ ID NO: 538104 - DNA, 15 bp, Homo sapiens
ctgaggcaggagaat

SEQ ID NO: 538105 - DNA, 15 bp, Homo sapiens
tgaggcaggagaatc

SEQ ID NO: 538106 - DNA, 15 bp, Homo sapiens
gaggcaggagaatcg

SEQ ID NO: 538107 - DNA, 15 bp, Homo sapiens
aggcaggagaatcgc

SEQ ID NO: 538108 - DNA, 15 bp, Homo sapiens
ggcaggagaatcgct

SEQ ID NO: 538109 - DNA, 15 bp, Homo sapiens
gcaggagaatcgctt

SEQ ID NO: 538110 - DNA, 15 bp, Homo sapiens
caggagaatcgcttg

SEQ ID NO: 538111 - DNA, 15 bp, Homo sapiens
aggagaatcgcttga

SEQ ID NO: 538112 - DNA, 15 bp, Homo sapiens
ggagaatcgcttgaa

SEQ ID NO: 538113 - DNA, 15 bp, Homo sapiens
gagaatcgcttgaac

SEQ ID NO: 538114 - DNA, 15 bp, Homo sapiens
agaatcgcttgaacc

SEQ ID NO: 538115 - DNA, 15 bp, Homo sapiens
gaatcgcttgaaccc

SEQ ID NO: 538116 - DNA, 15 bp, Homo sapiens
aatcgcttgaaccca

SEQ ID NO: 538117 - DNA, 15 bp, Homo sapiens
atcgcttgaacccag

SEQ ID NO: 538118 - DNA, 15 bp, Homo sapiens
tcgcttgaacccagg

SEQ ID NO: 538119 - DNA, 15 bp, Homo sapiens
cgcttgaacccagga

SEQ ID NO: 538120 - DNA, 15 bp, Homo sapiens
gcttgaacccaggag

SEQ ID NO: 538121 - DNA, 15 bp, Homo sapiens
cttgaacccaggagg

SEQ ID NO: 538122 - DNA, 15 bp, Homo sapiens
ttgaacccaggaggc

SEQ ID NO: 538123 - DNA, 15 bp, Homo sapiens
tgaacccaggaggca

SEQ ID NO: 538124 - DNA, 15 bp, Homo sapiens
gaacccaggaggcag

SEQ ID NO: 538125 - DNA, 15 bp, Homo sapiens
aacccaggaggcaga

SEQ ID NO: 538126 - DNA, 15 bp, Homo sapiens
acccaggaggcagaa

SEQ ID NO: 538127 - DNA, 15 bp, Homo sapiens
cccaggaggcagaag

SEQ ID NO: 538128 - DNA, 15 bp, Homo sapiens
ccaggaggcagaagt

SEQ ID NO: 538129 - DNA, 15 bp, Homo sapiens
caggaggcagaagtt

SEQ ID NO: 538130 - DNA, 15 bp, Homo sapiens
aggaggcagaagttg

SEQ ID NO: 538131 - DNA, 15 bp, Homo sapiens
ggaggcagaagttgt

SEQ ID NO: 538132 - DNA, 15 bp, Homo sapiens
gaggcagaagttgtg

SEQ ID NO: 538133 - DNA, 15 bp, Homo sapiens
aggcagaagttgtgg

SEQ ID NO: 538134 - DNA, 15 bp, Homo sapiens
ggcagaagttgtggt

SEQ ID NO: 538135 - DNA, 15 bp, Homo sapiens
gcagaagttgtggtg

SEQ ID NO: 538136 - DNA, 15 bp, Homo sapiens
cagaagttgtggtga

SEQ ID NO: 538137 - DNA, 15 bp, Homo sapiens
agaagttgtggtgag

SEQ ID NO: 538138 - DNA, 15 bp, Homo sapiens
gaagttgtggtgagc

SEQ ID NO: 538139 - DNA, 15 bp, Homo sapiens
aagttgtggtgagcc

SEQ ID NO: 538140 - DNA, 15 bp, Homo sapiens
agttgtggtgagccg

SEQ ID NO: 538141 - DNA, 15 bp, Homo sapiens
gttgtggtgagccga

SEQ ID NO: 538142 - DNA, 15 bp, Homo sapiens
ttgtggtgagccgag

SEQ ID NO: 538143 - DNA, 15 bp, Homo sapiens
tgtggtgagccgagg

SEQ ID NO: 538144 - DNA, 15 bp, Homo sapiens
gtggtgagccgaggt

SEQ ID NO: 538145 - DNA, 15 bp, Homo sapiens
tggtgagccgaggtt

SEQ ID NO: 538146 - DNA, 15 bp, Homo sapiens
ggtgagccgaggttg

SEQ ID NO: 538147 - DNA, 15 bp, Homo sapiens
gtgagccgaggttgc

SEQ ID NO: 538148 - DNA, 15 bp, Homo sapiens
tgagccgaggttgca

SEQ ID NO: 538149 - DNA, 15 bp, Homo sapiens
gagccgaggttgcaa

SEQ ID NO: 538150 - DNA, 15 bp, Homo sapiens
agccgaggttgcaac

SEQ ID NO: 538151 - DNA, 15 bp, Homo sapiens
gccgaggttgcaaca

SEQ ID NO: 538152 - DNA, 15 bp, Homo sapiens
ccgaggttgcaacac

SEQ ID NO: 538153 - DNA, 15 bp, Homo sapiens
cgaggttgcaacact

SEQ ID NO: 538154 - DNA, 15 bp, Homo sapiens
gaggttgcaacacta

SEQ ID NO: 538155 - DNA, 15 bp, Homo sapiens
aggttgcaacactac

SEQ ID NO: 538156 - DNA, 15 bp, Homo sapiens
ggttgcaacactaca

SEQ ID NO: 538157 - DNA, 15 bp, Homo sapiens
gttgcaacactacac

SEQ ID NO: 538158 - DNA, 15 bp, Homo sapiens
ttgcaacactacact

SEQ ID NO: 538159 - DNA, 15 bp, Homo sapiens
tgcaacactacactc

SEQ ID NO: 538160 - DNA, 15 bp, Homo sapiens
gcaacactacactcc

SEQ ID NO: 538161 - DNA, 15 bp, Homo sapiens
caacactacactcca

SEQ ID NO: 538162 - DNA, 15 bp, Homo sapiens
aacactacactccag

SEQ ID NO: 538163 - DNA, 15 bp, Homo sapiens
acactacactccagc

SEQ ID NO: 538164 - DNA, 15 bp, Homo sapiens
cactacactccagcc

SEQ ID NO: 538165 - DNA, 15 bp, Homo sapiens
actacactccagcct

SEQ ID NO: 538166 - DNA, 15 bp, Homo sapiens
ctacactccagcctg

SEQ ID NO: 538167 - DNA, 15 bp, Homo sapiens
tacactccagcctgg

SEQ ID NO: 538168 - DNA, 15 bp, Homo sapiens
acactccagcctggg

SEQ ID NO: 538169 - DNA, 15 bp, Homo sapiens
cactccagcctgggt

SEQ ID NO: 538170 - DNA, 15 bp, Homo sapiens
actccagcctgggtg

SEQ ID NO: 538171 - DNA, 15 bp, Homo sapiens
ctccagcctgggtga

SEQ ID NO: 538172 - DNA, 15 bp, Homo sapiens
tccagcctgggtgac

SEQ ID NO: 538173 - DNA, 15 bp, Homo sapiens
ccagcctgggtgaca

SEQ ID NO: 538174 - DNA, 15 bp, Homo sapiens
cagcctgggtgacag

SEQ ID NO: 538175 - DNA, 15 bp, Homo sapiens
agcctgggtgacaga

SEQ ID NO: 538176 - DNA, 15 bp, Homo sapiens
gcctgggtgacagag

SEQ ID NO: 538177 - DNA, 15 bp, Homo sapiens
cctgggtgacagagc

SEQ ID NO: 538178 - DNA, 15 bp, Homo sapiens
ctgggtgacagagcg

SEQ ID NO: 538179 - DNA, 15 bp, Homo sapiens
tgggtgacagagcga

SEQ ID NO: 538180 - DNA, 15 bp, Homo sapiens
gggtgacagagcgag

SEQ ID NO: 538181 - DNA, 15 bp, Homo sapiens
ggtgacagagcgaga

SEQ ID NO: 538182 - DNA, 15 bp, Homo sapiens
gtgacagagcgagac

SEQ ID NO: 538183 - DNA, 15 bp, Homo sapiens
tgacagagcgagact

SEQ ID NO: 538184 - DNA, 15 bp, Homo sapiens
gacagagcgagactc

SEQ ID NO: 538185 - DNA, 15 bp, Homo sapiens
acagagcgagactcc

SEQ ID NO: 538186 - DNA, 15 bp, Homo sapiens
cagagcgagactccg

SEQ ID NO: 538187 - DNA, 15 bp, Homo sapiens
agagcgagactccgt

SEQ ID NO: 538188 - DNA, 15 bp, Homo sapiens
gagcgagactccgtc

SEQ ID NO: 538189 - DNA, 15 bp, Homo sapiens
agcgagactccgtct

SEQ ID NO: 538190 - DNA, 15 bp, Homo sapiens
gcgagactccgtctc

SEQ ID NO: 538191 - DNA, 15 bp, Homo sapiens
cgagactccgtctca

SEQ ID NO: 538192 - DNA, 15 bp, Homo sapiens
gagactccgtctcaa

SEQ ID NO: 538193 - DNA, 15 bp, Homo sapiens
agactccgtctcaaa

SEQ ID NO: 538194 - DNA, 15 bp, Homo sapiens
gactccgtctcaaaa

SEQ ID NO: 538195 - DNA, 15 bp, Homo sapiens
actccgtctcaaaaa

SEQ ID NO: 538196 - DNA, 15 bp, Homo sapiens
ctccgtctcaaaaaa

SEQ ID NO: 538197 - DNA, 15 bp, Homo sapiens
tccgtctcaaaaaaa

SEQ ID NO: 538198 - DNA, 15 bp, Homo sapiens
ccgtctcaaaaaaaa

SEQ ID NO: 538199 - DNA, 15 bp, Homo sapiens
cgtctcaaaaaaaaa

SEQ ID NO: 538200 - DNA, 15 bp, Homo sapiens
gtctcaaaaaaaaaa

SEQ ID NO: 538201 - DNA, 15 bp, Homo sapiens
tctcaaaaaaaaaaa

SEQ ID NO: 538202 - DNA, 15 bp, Homo sapiens
ctcaaaaaaaaaaaa

SEQ ID NO: 538203 - DNA, 15 bp, Homo sapiens
tcaaaaaaaaaaaaa

SEQ ID NO: 538204 - DNA, 15 bp, Homo sapiens
aaaaaaaaaaaacaa

SEQ ID NO: 538205 - DNA, 15 bp, Homo sapiens
aaaaaaaaaaacaaa

SEQ ID NO: 538206 - DNA, 15 bp, Homo sapiens
aaaaaaaaaacaaac

SEQ ID NO: 538207 - DNA, 15 bp, Homo sapiens
aaaaaaaaacaaacg

SEQ ID NO: 538208 - DNA, 15 bp, Homo sapiens
aaaaaaaacaaacgt

SEQ ID NO: 538209 - DNA, 15 bp, Homo sapiens
aaaaaaacaaacgtt

SEQ ID NO: 538210 - DNA, 15 bp, Homo sapiens
aaaaaacaaacgtta

SEQ ID NO: 538211 - DNA, 15 bp, Homo sapiens
aaaaacaaacgttaa

SEQ ID NO: 538212 - DNA, 15 bp, Homo sapiens
aaaacaaacgttaag

SEQ ID NO: 538213 - DNA, 15 bp, Homo sapiens
aaacaaacgttaaga

SEQ ID NO: 538214 - DNA, 15 bp, Homo sapiens
aacaaacgttaagag

SEQ ID NO: 538215 - DNA, 15 bp, Homo sapiens
acaaacgttaagaga

SEQ ID NO: 538216 - DNA, 15 bp, Homo sapiens
caaacgttaagagag

SEQ ID NO: 538217 - DNA, 15 bp, Homo sapiens
aaacgttaagagaga

SEQ ID NO: 538218 - DNA, 15 bp, Homo sapiens
aacgttaagagagac

SEQ ID NO: 538219 - DNA, 15 bp, Homo sapiens
acgttaagagagaca

SEQ ID NO: 538220 - DNA, 15 bp, Homo sapiens
cgttaagagagacac

SEQ ID NO: 538221 - DNA, 15 bp, Homo sapiens
gttaagagagacaca

SEQ ID NO: 538222 - DNA, 15 bp, Homo sapiens
ttaagagagacacag

SEQ ID NO: 538223 - DNA, 15 bp, Homo sapiens
taagagagacacaga

SEQ ID NO: 538224 - DNA, 15 bp, Homo sapiens
aagagagacacagaa

SEQ ID NO: 538225 - DNA, 15 bp, Homo sapiens
agagagacacagaaa

SEQ ID NO: 538226 - DNA, 15 bp, Homo sapiens
gagagacacagaaac

SEQ ID NO: 538227 - DNA, 15 bp, Homo sapiens
agagacacagaaaca

SEQ ID NO: 538228 - DNA, 15 bp, Homo sapiens
gagacacagaaacag

SEQ ID NO: 538229 - DNA, 15 bp, Homo sapiens
agacacagaaacaga

SEQ ID NO: 538230 - DNA, 15 bp, Homo sapiens
gacacagaaacagac

SEQ ID NO: 538231 - DNA, 15 bp, Homo sapiens
acacagaaacagact

SEQ ID NO: 538232 - DNA, 15 bp, Homo sapiens
cacagaaacagactt

SEQ ID NO: 538233 - DNA, 15 bp, Homo sapiens
acagaaacagacttg

SEQ ID NO: 538234 - DNA, 15 bp, Homo sapiens
cagaaacagacttgt

SEQ ID NO: 538235 - DNA, 15 bp, Homo sapiens
agaaacagacttgta

SEQ ID NO: 538236 - DNA, 15 bp, Homo sapiens
gaaacagacttgtaa

SEQ ID NO: 538237 - DNA, 15 bp, Homo sapiens
aaacagacttgtaaa

SEQ ID NO: 538238 - DNA, 15 bp, Homo sapiens
aacagacttgtaaaa

SEQ ID NO: 538239 - DNA, 15 bp, Homo sapiens
acagacttgtaaaaa

SEQ ID NO: 538240 - DNA, 15 bp, Homo sapiens
cagacttgtaaaaag

SEQ ID NO: 538241 - DNA, 15 bp, Homo sapiens
agacttgtaaaaagg

SEQ ID NO: 538242 - DNA, 15 bp, Homo sapiens
gacttgtaaaaaggt

SEQ ID NO: 538243 - DNA, 15 bp, Homo sapiens
acttgtaaaaaggtg

SEQ ID NO: 538244 - DNA, 15 bp, Homo sapiens
cttgtaaaaaggtga

SEQ ID NO: 538245 - DNA, 15 bp, Homo sapiens
ttgtaaaaaggtgaa

SEQ ID NO: 538246 - DNA, 15 bp, Homo sapiens
tgtaaaaaggtgaat

SEQ ID NO: 538247 - DNA, 15 bp, Homo sapiens
gtaaaaaggtgaatg

SEQ ID NO: 538248 - DNA, 15 bp, Homo sapiens
taaaaaggtgaatgg

SEQ ID NO: 538249 - DNA, 15 bp, Homo sapiens
aaaaaggtgaatggg

SEQ ID NO: 538250 - DNA, 15 bp, Homo sapiens
aaaaggtgaatgggc

SEQ ID NO: 538251 - DNA, 15 bp, Homo sapiens
aaaggtgaatgggca

SEQ ID NO: 538252 - DNA, 15 bp, Homo sapiens
aaggtgaatgggcac

SEQ ID NO: 538253 - DNA, 15 bp, Homo sapiens
aggtgaatgggcacc

SEQ ID NO: 538254 - DNA, 15 bp, Homo sapiens
ggtgaatgggcacca

SEQ ID NO: 538255 - DNA, 15 bp, Homo sapiens
gtgaatgggcaccaa

SEQ ID NO: 538256 - DNA, 15 bp, Homo sapiens
tgaatgggcaccaag

SEQ ID NO: 538257 - DNA, 15 bp, Homo sapiens
gaatgggcaccaaga

SEQ ID NO: 538258 - DNA, 15 bp, Homo sapiens
aatgggcaccaagat

SEQ ID NO: 538259 - DNA, 15 bp, Homo sapiens
atgggcaccaagatt

SEQ ID NO: 538260 - DNA, 15 bp, Homo sapiens
tgggcaccaagattt

SEQ ID NO: 538261 - DNA, 15 bp, Homo sapiens
gggcaccaagatttt

SEQ ID NO: 538262 - DNA, 15 bp, Homo sapiens
ggcaccaagatttta

SEQ ID NO: 538263 - DNA, 15 bp, Homo sapiens
gcaccaagattttat

SEQ ID NO: 538264 - DNA, 15 bp, Homo sapiens
caccaagattttatc

SEQ ID NO: 538265 - DNA, 15 bp, Homo sapiens
accaagattttatcc

SEQ ID NO: 538266 - DNA, 15 bp, Homo sapiens
ccaagattttatcct

SEQ ID NO: 538267 - DNA, 15 bp, Homo sapiens
caagattttatcctg

SEQ ID NO: 538268 - DNA, 15 bp, Homo sapiens
aagattttatcctga

SEQ ID NO: 538269 - DNA, 15 bp, Homo sapiens
agattttatcctgaa

SEQ ID NO: 538270 - DNA, 15 bp, Homo sapiens
gattttatcctgaat

SEQ ID NO: 538271 - DNA, 15 bp, Homo sapiens
attttatcctgaatg

SEQ ID NO: 538272 - DNA, 15 bp, Homo sapiens
ttttatcctgaatgt

SEQ ID NO: 538273 - DNA, 15 bp, Homo sapiens
tttatcctgaatgtg

SEQ ID NO: 538274 - DNA, 15 bp, Homo sapiens
ttatcctgaatgtgc

SEQ ID NO: 538275 - DNA, 15 bp, Homo sapiens
tatcctgaatgtgct

SEQ ID NO: 538276 - DNA, 15 bp, Homo sapiens
atcctgaatgtgctg

SEQ ID NO: 538277 - DNA, 15 bp, Homo sapiens
tcctgaatgtgctgg

SEQ ID NO: 538278 - DNA, 15 bp, Homo sapiens
cctgaatgtgctggt

SEQ ID NO: 538279 - DNA, 15 bp, Homo sapiens
ctgaatgtgctggtc

SEQ ID NO: 538280 - DNA, 15 bp, Homo sapiens
tgaatgtgctggtcc

SEQ ID NO: 538281 - DNA, 15 bp, Homo sapiens
gaatgtgctggtccc

SEQ ID NO: 538282 - DNA, 15 bp, Homo sapiens
aatgtgctggtcccg

SEQ ID NO: 538283 - DNA, 15 bp, Homo sapiens
atgtgctggtcccgg

SEQ ID NO: 538284 - DNA, 15 bp, Homo sapiens
tgtgctggtcccggt

SEQ ID NO: 538285 - DNA, 15 bp, Homo sapiens
gtgctggtcccggtg

SEQ ID NO: 538286 - DNA, 15 bp, Homo sapiens
tgctggtcccggtga

SEQ ID NO: 538287 - DNA, 15 bp, Homo sapiens
gctggtcccggtgac

SEQ ID NO: 538288 - DNA, 15 bp, Homo sapiens
ctggtcccggtgact

SEQ ID NO: 538289 - DNA, 15 bp, Homo sapiens
tggtcccggtgactt

SEQ ID NO: 538290 - DNA, 15 bp, Homo sapiens
ggtcccggtgacttt

SEQ ID NO: 538291 - DNA, 15 bp, Homo sapiens
gtcccggtgacttta

SEQ ID NO: 538292 - DNA, 15 bp, Homo sapiens
tcccggtgactttaa

SEQ ID NO: 538293 - DNA, 15 bp, Homo sapiens
cccggtgactttaag

SEQ ID NO: 538294 - DNA, 15 bp, Homo sapiens
ccggtgactttaaga

SEQ ID NO: 538295 - DNA, 15 bp, Homo sapiens
cggtgactttaagat

SEQ ID NO: 538296 - DNA, 15 bp, Homo sapiens
ggtgactttaagatt

SEQ ID NO: 538297 - DNA, 15 bp, Homo sapiens
gtgactttaagattc

SEQ ID NO: 538298 - DNA, 15 bp, Homo sapiens
tgactttaagattcg

SEQ ID NO: 538299 - DNA, 15 bp, Homo sapiens
gactttaagattcga

SEQ ID NO: 538300 - DNA, 15 bp, Homo sapiens
actttaagattcgaa

SEQ ID NO: 538301 - DNA, 15 bp, Homo sapiens
ctttaagattcgaaa

SEQ ID NO: 538302 - DNA, 15 bp, Homo sapiens
tttaagattcgaaat

SEQ ID NO: 538303 - DNA, 15 bp, Homo sapiens
ttaagattcgaaatt

SEQ ID NO: 538304 - DNA, 15 bp, Homo sapiens
taagattcgaaattg

SEQ ID NO: 538305 - DNA, 15 bp, Homo sapiens
aagattcgaaattga

SEQ ID NO: 538306 - DNA, 15 bp, Homo sapiens
agattcgaaattgag

SEQ ID NO: 538307 - DNA, 15 bp, Homo sapiens
gattcgaaattgagg

SEQ ID NO: 538308 - DNA, 15 bp, Homo sapiens
attcgaaattgaggt

SEQ ID NO: 538309 - DNA, 15 bp, Homo sapiens
ttcgaaattgaggta

SEQ ID NO: 538310 - DNA, 15 bp, Homo sapiens
tcgaaattgaggtaa

SEQ ID NO: 538311 - DNA, 15 bp, Homo sapiens
cgaaattgaggtaaa

SEQ ID NO: 538312 - DNA, 15 bp, Homo sapiens
gaaattgaggtaaat

SEQ ID NO: 538313 - DNA, 15 bp, Homo sapiens
aaattgaggtaaatg

SEQ ID NO: 538314 - DNA, 15 bp, Homo sapiens
aattgaggtaaatgc

SEQ ID NO: 538315 - DNA, 15 bp, Homo sapiens
attgaggtaaatgca

SEQ ID NO: 538316 - DNA, 15 bp, Homo sapiens
ttgaggtaaatgcag

SEQ ID NO: 538317 - DNA, 15 bp, Homo sapiens
tgaggtaaatgcagg

SEQ ID NO: 538318 - DNA, 15 bp, Homo sapiens
gaggtaaatgcaggg

SEQ ID NO: 538319 - DNA, 15 bp, Homo sapiens
aggtaaatgcaggga

SEQ ID NO: 538320 - DNA, 15 bp, Homo sapiens
ggtaaatgcagggag

SEQ ID NO: 538321 - DNA, 15 bp, Homo sapiens
gtaaatgcagggaga

SEQ ID NO: 538322 - DNA, 15 bp, Homo sapiens
taaatgcagggagaa

SEQ ID NO: 538323 - DNA, 15 bp, Homo sapiens
aaatgcagggagaaa

SEQ ID NO: 538324 - DNA, 15 bp, Homo sapiens
aatgcagggagaaat

SEQ ID NO: 538325 - DNA, 15 bp, Homo sapiens
atgcagggagaaatt

SEQ ID NO: 538326 - DNA, 15 bp, Homo sapiens
tgcagggagaaattg

SEQ ID NO: 538327 - DNA, 15 bp, Homo sapiens
gcagggagaaattgg

SEQ ID NO: 538328 - DNA, 15 bp, Homo sapiens
cagggagaaattggc

SEQ ID NO: 538329 - DNA, 15 bp, Homo sapiens
agggagaaattggct

SEQ ID NO: 538330 - DNA, 15 bp, Homo sapiens
gggagaaattggctg

SEQ ID NO: 538331 - DNA, 15 bp, Homo sapiens
ggagaaattggctgg

SEQ ID NO: 538332 - DNA, 15 bp, Homo sapiens
gagaaattggctggc

SEQ ID NO: 538333 - DNA, 15 bp, Homo sapiens
agaaattggctggcc

SEQ ID NO: 538334 - DNA, 15 bp, Homo sapiens
gaaattggctggcct

SEQ ID NO: 538335 - DNA, 15 bp, Homo sapiens
aaattggctggccta

SEQ ID NO: 538336 - DNA, 15 bp, Homo sapiens
aattggctggcctag

SEQ ID NO: 538337 - DNA, 15 bp, Homo sapiens
attggctggcctagg

SEQ ID NO: 538338 - DNA, 15 bp, Homo sapiens
ttggctggcctagga

SEQ ID NO: 538339 - DNA, 15 bp, Homo sapiens
tggctggcctaggat

SEQ ID NO: 538340 - DNA, 15 bp, Homo sapiens
ggctggcctaggatc

SEQ ID NO: 538341 - DNA, 15 bp, Homo sapiens
gctggcctaggatcc

SEQ ID NO: 538342 - DNA, 15 bp, Homo sapiens
ctggcctaggatccg

SEQ ID NO: 538343 - DNA, 15 bp, Homo sapiens
tggcctaggatccgg

SEQ ID NO: 538344 - DNA, 15 bp, Homo sapiens
ggcctaggatccgga

SEQ ID NO: 538345 - DNA, 15 bp, Homo sapiens
gcctaggatccggag

SEQ ID NO: 538346 - DNA, 15 bp, Homo sapiens
cctaggatccggaga

SEQ ID NO: 538347 - DNA, 15 bp, Homo sapiens
ctaggatccggagac

SEQ ID NO: 538348 - DNA, 15 bp, Homo sapiens
taggatccggagacc

SEQ ID NO: 538349 - DNA, 15 bp, Homo sapiens
aggatccggagacct

SEQ ID NO: 538350 - DNA, 15 bp, Homo sapiens
ggatccggagacctg

SEQ ID NO: 538351 - DNA, 15 bp, Homo sapiens
gatccggagacctga

SEQ ID NO: 538352 - DNA, 15 bp, Homo sapiens
atccggagacctgag

SEQ ID NO: 538353 - DNA, 15 bp, Homo sapiens
tccggagacctgagt

SEQ ID NO: 538354 - DNA, 15 bp, Homo sapiens
ccggagacctgagtt

SEQ ID NO: 538355 - DNA, 15 bp, Homo sapiens
cggagacctgagttc

SEQ ID NO: 538356 - DNA, 15 bp, Homo sapiens
ggagacctgagttcc

SEQ ID NO: 538357 - DNA, 15 bp, Homo sapiens
gagacctgagttcca

SEQ ID NO: 538358 - DNA, 15 bp, Homo sapiens
agacctgagttccag

SEQ ID NO: 538359 - DNA, 15 bp, Homo sapiens
gacctgagttccagc

SEQ ID NO: 538360 - DNA, 15 bp, Homo sapiens
acctgagttccagcc

SEQ ID NO: 538361 - DNA, 15 bp, Homo sapiens
cctgagttccagccc

SEQ ID NO: 538362 - DNA, 15 bp, Homo sapiens
ctgagttccagcccc

SEQ ID NO: 538363 - DNA, 15 bp, Homo sapiens
tgagttccagcccca

SEQ ID NO: 538364 - DNA, 15 bp, Homo sapiens
gagttccagccccag

SEQ ID NO: 538365 - DNA, 15 bp, Homo sapiens
agttccagccccagc

SEQ ID NO: 538366 - DNA, 15 bp, Homo sapiens
gttccagccccagct

SEQ ID NO: 538367 - DNA, 15 bp, Homo sapiens
ttccagccccagctc

SEQ ID NO: 538368 - DNA, 15 bp, Homo sapiens
tccagccccagctct

SEQ ID NO: 538369 - DNA, 15 bp, Homo sapiens
ccagccccagctcta

SEQ ID NO: 538370 - DNA, 15 bp, Homo sapiens
cagccccagctctat

SEQ ID NO: 538371 - DNA, 15 bp, Homo sapiens
agccccagctctatc

SEQ ID NO: 538372 - DNA, 15 bp, Homo sapiens
gccccagctctatcc

SEQ ID NO: 538373 - DNA, 15 bp, Homo sapiens
ccccagctctatccc

SEQ ID NO: 538374 - DNA, 15 bp, Homo sapiens
cccagctctatccca

SEQ ID NO: 538375 - DNA, 15 bp, Homo sapiens
ccagctctatcccaa

SEQ ID NO: 538376 - DNA, 15 bp, Homo sapiens
cagctctatcccaaa

SEQ ID NO: 538377 - DNA, 15 bp, Homo sapiens
agctctatcccaaac

SEQ ID NO: 538378 - DNA, 15 bp, Homo sapiens
gctctatcccaaact

SEQ ID NO: 538379 - DNA, 15 bp, Homo sapiens
ctctatcccaaacta

SEQ ID NO: 538380 - DNA, 15 bp, Homo sapiens
tctatcccaaactag

SEQ ID NO: 538381 - DNA, 15 bp, Homo sapiens
ctatcccaaactagc

SEQ ID NO: 538382 - DNA, 15 bp, Homo sapiens
tatcccaaactagct

SEQ ID NO: 538383 - DNA, 15 bp, Homo sapiens
atcccaaactagcta

SEQ ID NO: 538384 - DNA, 15 bp, Homo sapiens
tcccaaactagctat

SEQ ID NO: 538385 - DNA, 15 bp, Homo sapiens
cccaaactagctatg

SEQ ID NO: 538386 - DNA, 15 bp, Homo sapiens
ccaaactagctatgg

SEQ ID NO: 538387 - DNA, 15 bp, Homo sapiens
caaactagctatggg

SEQ ID NO: 538388 - DNA, 15 bp, Homo sapiens
aaactagctatggga

SEQ ID NO: 538389 - DNA, 15 bp, Homo sapiens
aactagctatgggat

SEQ ID NO: 538390 - DNA, 15 bp, Homo sapiens
actagctatgggatg

SEQ ID NO: 538391 - DNA, 15 bp, Homo sapiens
ctagctatgggatgt

SEQ ID NO: 538392 - DNA, 15 bp, Homo sapiens
tagctatgggatgtt

SEQ ID NO: 538393 - DNA, 15 bp, Homo sapiens
agctatgggatgtta

SEQ ID NO: 538394 - DNA, 15 bp, Homo sapiens
gctatgggatgttag

SEQ ID NO: 538395 - DNA, 15 bp, Homo sapiens
ctatgggatgttagg

SEQ ID NO: 538396 - DNA, 15 bp, Homo sapiens
tatgggatgttaggc

SEQ ID NO: 538397 - DNA, 15 bp, Homo sapiens
atgggatgttaggca

SEQ ID NO: 538398 - DNA, 15 bp, Homo sapiens
tgggatgttaggcaa

SEQ ID NO: 538399 - DNA, 15 bp, Homo sapiens
gggatgttaggcaag

SEQ ID NO: 538400 - DNA, 15 bp, Homo sapiens
ggatgttaggcaagt

SEQ ID NO: 538401 - DNA, 15 bp, Homo sapiens
gatgttaggcaagtc

SEQ ID NO: 538402 - DNA, 15 bp, Homo sapiens
atgttaggcaagtca

SEQ ID NO: 538403 - DNA, 15 bp, Homo sapiens
tgttaggcaagtcac

SEQ ID NO: 538404 - DNA, 15 bp, Homo sapiens
gttaggcaagtcact

SEQ ID NO: 538405 - DNA, 15 bp, Homo sapiens
ttaggcaagtcactt

SEQ ID NO: 538406 - DNA, 15 bp, Homo sapiens
taggcaagtcacttc

SEQ ID NO: 538407 - DNA, 15 bp, Homo sapiens
aggcaagtcacttca

SEQ ID NO: 538408 - DNA, 15 bp, Homo sapiens
ggcaagtcacttcac

SEQ ID NO: 538409 - DNA, 15 bp, Homo sapiens
gcaagtcacttcact

SEQ ID NO: 538410 - DNA, 15 bp, Homo sapiens
caagtcacttcactt

SEQ ID NO: 538411 - DNA, 15 bp, Homo sapiens
aagtcacttcacttc

SEQ ID NO: 538412 - DNA, 15 bp, Homo sapiens
agtcacttcacttcc

SEQ ID NO: 538413 - DNA, 15 bp, Homo sapiens
gtcacttcacttcct

SEQ ID NO: 538414 - DNA, 15 bp, Homo sapiens
tcacttcacttcctc

SEQ ID NO: 538415 - DNA, 15 bp, Homo sapiens
cacttcacttcctca

SEQ ID NO: 538416 - DNA, 15 bp, Homo sapiens
acttcacttcctcat

SEQ ID NO: 538417 - DNA, 15 bp, Homo sapiens
cttcacttcctcatc

SEQ ID NO: 538418 - DNA, 15 bp, Homo sapiens
ttcacttcctcatca

SEQ ID NO: 538419 - DNA, 15 bp, Homo sapiens
tcacttcctcatcat

SEQ ID NO: 538420 - DNA, 15 bp, Homo sapiens
cacttcctcatcatt

SEQ ID NO: 538421 - DNA, 15 bp, Homo sapiens
acttcctcatcattc

SEQ ID NO: 538422 - DNA, 15 bp, Homo sapiens
cttcctcatcattca

SEQ ID NO: 538423 - DNA, 15 bp, Homo sapiens
ttcctcatcattcat

SEQ ID NO: 538424 - DNA, 15 bp, Homo sapiens
tcctcatcattcatg

SEQ ID NO: 538425 - DNA, 15 bp, Homo sapiens
cctcatcattcatgt

SEQ ID NO: 538426 - DNA, 15 bp, Homo sapiens
ctcatcattcatgtt

SEQ ID NO: 538427 - DNA, 15 bp, Homo sapiens
tcatcattcatgtta

SEQ ID NO: 538428 - DNA, 15 bp, Homo sapiens
catcattcatgttaa

SEQ ID NO: 538429 - DNA, 15 bp, Homo sapiens
atcattcatgttaaa

SEQ ID NO: 538430 - DNA, 15 bp, Homo sapiens
tcattcatgttaaag

SEQ ID NO: 538431 - DNA, 15 bp, Homo sapiens
cattcatgttaaagg

SEQ ID NO: 538432 - DNA, 15 bp, Homo sapiens
attcatgttaaaggt

SEQ ID NO: 538433 - DNA, 15 bp, Homo sapiens
ttcatgttaaaggtc

SEQ ID NO: 538434 - DNA, 15 bp, Homo sapiens
tcatgttaaaggtct

SEQ ID NO: 538435 - DNA, 15 bp, Homo sapiens
catgttaaaggtctt

SEQ ID NO: 538436 - DNA, 15 bp, Homo sapiens
atgttaaaggtcttc

SEQ ID NO: 538437 - DNA, 15 bp, Homo sapiens
tgttaaaggtcttct

SEQ ID NO: 538438 - DNA, 15 bp, Homo sapiens
gttaaaggtcttctc

SEQ ID NO: 538439 - DNA, 15 bp, Homo sapiens
ttaaaggtcttctca

SEQ ID NO: 538440 - DNA, 15 bp, Homo sapiens
taaaggtcttctcat

SEQ ID NO: 538441 - DNA, 15 bp, Homo sapiens
aaaggtcttctcata

SEQ ID NO: 538442 - DNA, 15 bp, Homo sapiens
aaggtcttctcatat

SEQ ID NO: 538443 - DNA, 15 bp, Homo sapiens
aggtcttctcatata

SEQ ID NO: 538444 - DNA, 15 bp, Homo sapiens
ggtcttctcatatat

SEQ ID NO: 538445 - DNA, 15 bp, Homo sapiens
gtcttctcatatata

SEQ ID NO: 538446 - DNA, 15 bp, Homo sapiens
tcttctcatatataa

SEQ ID NO: 538447 - DNA, 15 bp, Homo sapiens
cttctcatatataaa

SEQ ID NO: 538448 - DNA, 15 bp, Homo sapiens
ttctcatatataaaa

SEQ ID NO: 538449 - DNA, 15 bp, Homo sapiens
tctcatatataaaat

SEQ ID NO: 538450 - DNA, 15 bp, Homo sapiens
ctcatatataaaatg

SEQ ID NO: 538451 - DNA, 15 bp, Homo sapiens
tcatatataaaatga

SEQ ID NO: 538452 - DNA, 15 bp, Homo sapiens
catatataaaatgaa

SEQ ID NO: 538453 - DNA, 15 bp, Homo sapiens
atatataaaatgaag

SEQ ID NO: 538454 - DNA, 15 bp, Homo sapiens
tatataaaatgaagg

SEQ ID NO: 538455 - DNA, 15 bp, Homo sapiens
atataaaatgaaggt

SEQ ID NO: 538456 - DNA, 15 bp, Homo sapiens
tataaaatgaaggta

SEQ ID NO: 538457 - DNA, 15 bp, Homo sapiens
ataaaatgaaggtat

SEQ ID NO: 538458 - DNA, 15 bp, Homo sapiens
taaaatgaaggtatg

SEQ ID NO: 538459 - DNA, 15 bp, Homo sapiens
aaaatgaaggtatga

SEQ ID NO: 538460 - DNA, 15 bp, Homo sapiens
aaatgaaggtatgat

SEQ ID NO: 538461 - DNA, 15 bp, Homo sapiens
aatgaaggtatgatt

SEQ ID NO: 538462 - DNA, 15 bp, Homo sapiens
atgaaggtatgattt

SEQ ID NO: 538463 - DNA, 15 bp, Homo sapiens
tgaaggtatgatttc

SEQ ID NO: 538464 - DNA, 15 bp, Homo sapiens
gaaggtatgatttca

SEQ ID NO: 538465 - DNA, 15 bp, Homo sapiens
aaggtatgatttcaa

SEQ ID NO: 538466 - DNA, 15 bp, Homo sapiens
aggtatgatttcaaa

SEQ ID NO: 538467 - DNA, 15 bp, Homo sapiens
ggtatgatttcaaaa

SEQ ID NO: 538468 - DNA, 15 bp, Homo sapiens
gtatgatttcaaaat

SEQ ID NO: 538469 - DNA, 15 bp, Homo sapiens
tatgatttcaaaatt

SEQ ID NO: 538470 - DNA, 15 bp, Homo sapiens
atgatttcaaaattt

SEQ ID NO: 538471 - DNA, 15 bp, Homo sapiens
tgatttcaaaatttg

SEQ ID NO: 538472 - DNA, 15 bp, Homo sapiens
gatttcaaaatttgc

SEQ ID NO: 538473 - DNA, 15 bp, Homo sapiens
atttcaaaatttgct

SEQ ID NO: 538474 - DNA, 15 bp, Homo sapiens
tttcaaaatttgctt

SEQ ID NO: 538475 - DNA, 15 bp, Homo sapiens
ttcaaaatttgcttt

SEQ ID NO: 538476 - DNA, 15 bp, Homo sapiens
tcaaaatttgctttc

SEQ ID NO: 538477 - DNA, 15 bp, Homo sapiens
caaaatttgctttca

SEQ ID NO: 538478 - DNA, 15 bp, Homo sapiens
aaaatttgctttcag

SEQ ID NO: 538479 - DNA, 15 bp, Homo sapiens
aaatttgctttcagc

SEQ ID NO: 538480 - DNA, 15 bp, Homo sapiens
aatttgctttcagct

SEQ ID NO: 538481 - DNA, 15 bp, Homo sapiens
atttgctttcagctc

SEQ ID NO: 538482 - DNA, 15 bp, Homo sapiens
tttgctttcagctct

SEQ ID NO: 538483 - DNA, 15 bp, Homo sapiens
ttgctttcagctctc

SEQ ID NO: 538484 - DNA, 15 bp, Homo sapiens
tgctttcagctctca

SEQ ID NO: 538485 - DNA, 15 bp, Homo sapiens
gctttcagctctcat

SEQ ID NO: 538486 - DNA, 15 bp, Homo sapiens
ctttcagctctcatg

SEQ ID NO: 538487 - DNA, 15 bp, Homo sapiens
tttcagctctcatgt

SEQ ID NO: 538488 - DNA, 15 bp, Homo sapiens
ttcagctctcatgtt

SEQ ID NO: 538489 - DNA, 15 bp, Homo sapiens
tcagctctcatgttc

SEQ ID NO: 538490 - DNA, 15 bp, Homo sapiens
cagctctcatgttca

SEQ ID NO: 538491 - DNA, 15 bp, Homo sapiens
agctctcatgttcat

SEQ ID NO: 538492 - DNA, 15 bp, Homo sapiens
gctctcatgttcatt

SEQ ID NO: 538493 - DNA, 15 bp, Homo sapiens
ctctcatgttcattt

SEQ ID NO: 538494 - DNA, 15 bp, Homo sapiens
tctcatgttcatttg

SEQ ID NO: 538495 - DNA, 15 bp, Homo sapiens
ctcatgttcatttga

SEQ ID NO: 538496 - DNA, 15 bp, Homo sapiens
tcatgttcatttgac

SEQ ID NO: 538497 - DNA, 15 bp, Homo sapiens
catgttcatttgact

SEQ ID NO: 538498 - DNA, 15 bp, Homo sapiens
atgttcatttgactc

SEQ ID NO: 538499 - DNA, 15 bp, Homo sapiens
tgttcatttgactct

SEQ ID NO: 538500 - DNA, 15 bp, Homo sapiens
gttcatttgactctg

SEQ ID NO: 538501 - DNA, 15 bp, Homo sapiens
ttcatttgactctga

SEQ ID NO: 538502 - DNA, 15 bp, Homo sapiens
tcatttgactctgat

SEQ ID NO: 538503 - DNA, 15 bp, Homo sapiens
catttgactctgatc

SEQ ID NO: 538504 - DNA, 15 bp, Homo sapiens
atttgactctgatcc

SEQ ID NO: 538505 - DNA, 15 bp, Homo sapiens
tttgactctgatcct

SEQ ID NO: 538506 - DNA, 15 bp, Homo sapiens
ttgactctgatccta

SEQ ID NO: 538507 - DNA, 15 bp, Homo sapiens
tgactctgatcctag

SEQ ID NO: 538508 - DNA, 15 bp, Homo sapiens
gactctgatcctaga

SEQ ID NO: 538509 - DNA, 15 bp, Homo sapiens
actctgatcctagac

SEQ ID NO: 538510 - DNA, 15 bp, Homo sapiens
ctctgatcctagaca

SEQ ID NO: 538511 - DNA, 15 bp, Homo sapiens
tctgatcctagacag

SEQ ID NO: 538512 - DNA, 15 bp, Homo sapiens
ctgatcctagacagg

SEQ ID NO: 538513 - DNA, 15 bp, Homo sapiens
tgatcctagacaggc

SEQ ID NO: 538514 - DNA, 15 bp, Homo sapiens
gatcctagacaggct

SEQ ID NO: 538515 - DNA, 15 bp, Homo sapiens
atcctagacaggctt

SEQ ID NO: 538516 - DNA, 15 bp, Homo sapiens
tcctagacaggcttt

SEQ ID NO: 538517 - DNA, 15 bp, Homo sapiens
cctagacaggcttta

SEQ ID NO: 538518 - DNA, 15 bp, Homo sapiens
ctagacaggctttaa

SEQ ID NO: 538519 - DNA, 15 bp, Homo sapiens
tagacaggctttaaa

SEQ ID NO: 538520 - DNA, 15 bp, Homo sapiens
agacaggctttaaaa

SEQ ID NO: 538521 - DNA, 15 bp, Homo sapiens
gacaggctttaaaac

SEQ ID NO: 538522 - DNA, 15 bp, Homo sapiens
acaggctttaaaaca

SEQ ID NO: 538523 - DNA, 15 bp, Homo sapiens
caggctttaaaacat

SEQ ID NO: 538524 - DNA, 15 bp, Homo sapiens
aggctttaaaacatt

SEQ ID NO: 538525 - DNA, 15 bp, Homo sapiens
ggctttaaaacattt

SEQ ID NO: 538526 - DNA, 15 bp, Homo sapiens
gctttaaaacatttc

SEQ ID NO: 538527 - DNA, 15 bp, Homo sapiens
ctttaaaacatttct

SEQ ID NO: 538528 - DNA, 15 bp, Homo sapiens
tttaaaacatttctt

SEQ ID NO: 538529 - DNA, 15 bp, Homo sapiens
ttaaaacatttctta

SEQ ID NO: 538530 - DNA, 15 bp, Homo sapiens
taaaacatttcttat

SEQ ID NO: 538531 - DNA, 15 bp, Homo sapiens
aaaacatttcttatt

SEQ ID NO: 538532 - DNA, 15 bp, Homo sapiens
aaacatttcttattt

SEQ ID NO: 538533 - DNA, 15 bp, Homo sapiens
aacatttcttatttg

SEQ ID NO: 538534 - DNA, 15 bp, Homo sapiens
acatttcttatttgg

SEQ ID NO: 538535 - DNA, 15 bp, Homo sapiens
catttcttatttggg

SEQ ID NO: 538536 - DNA, 15 bp, Homo sapiens
atttcttatttgggg

SEQ ID NO: 538537 - DNA, 15 bp, Homo sapiens
tttcttatttggggg

SEQ ID NO: 538538 - DNA, 15 bp, Homo sapiens
ttcttatttgggggt

SEQ ID NO: 538539 - DNA, 15 bp, Homo sapiens
tcttatttgggggtg

SEQ ID NO: 538540 - DNA, 15 bp, Homo sapiens
cttatttgggggtgt

SEQ ID NO: 538541 - DNA, 15 bp, Homo sapiens
ttatttgggggtgtg

SEQ ID NO: 538542 - DNA, 15 bp, Homo sapiens
tatttgggggtgtgg

SEQ ID NO: 538543 - DNA, 15 bp, Homo sapiens
atttgggggtgtgga

SEQ ID NO: 538544 - DNA, 15 bp, Homo sapiens
tttgggggtgtggat

SEQ ID NO: 538545 - DNA, 15 bp, Homo sapiens
ttgggggtgtggatg

SEQ ID NO: 538546 - DNA, 15 bp, Homo sapiens
tgggggtgtggatga

SEQ ID NO: 538547 - DNA, 15 bp, Homo sapiens
gggggtgtggatgat

SEQ ID NO: 538548 - DNA, 15 bp, Homo sapiens
ggggtgtggatgata

SEQ ID NO: 538549 - DNA, 15 bp, Homo sapiens
gggtgtggatgatag

SEQ ID NO: 538550 - DNA, 15 bp, Homo sapiens
ggtgtggatgataga

SEQ ID NO: 538551 - DNA, 15 bp, Homo sapiens
gtgtggatgatagaa

SEQ ID NO: 538552 - DNA, 15 bp, Homo sapiens
tgtggatgatagaac

SEQ ID NO: 538553 - DNA, 15 bp, Homo sapiens
gtggatgatagaacc

SEQ ID NO: 538554 - DNA, 15 bp, Homo sapiens
tggatgatagaacct

SEQ ID NO: 538555 - DNA, 15 bp, Homo sapiens
ggatgatagaacctc

SEQ ID NO: 538556 - DNA, 15 bp, Homo sapiens
gatgatagaacctca

SEQ ID NO: 538557 - DNA, 15 bp, Homo sapiens
atgatagaacctcac

SEQ ID NO: 538558 - DNA, 15 bp, Homo sapiens
tgatagaacctcacg

SEQ ID NO: 538559 - DNA, 15 bp, Homo sapiens
gatagaacctcacgt

SEQ ID NO: 538560 - DNA, 15 bp, Homo sapiens
atagaacctcacgta

SEQ ID NO: 538561 - DNA, 15 bp, Homo sapiens
tagaacctcacgtag

SEQ ID NO: 538562 - DNA, 15 bp, Homo sapiens
agaacctcacgtaga

SEQ ID NO: 538563 - DNA, 15 bp, Homo sapiens
gaacctcacgtagat

SEQ ID NO: 538564 - DNA, 15 bp, Homo sapiens
aacctcacgtagatg

SEQ ID NO: 538565 - DNA, 15 bp, Homo sapiens
acctcacgtagatgt

SEQ ID NO: 538566 - DNA, 15 bp, Homo sapiens
cctcacgtagatgtt

SEQ ID NO: 538567 - DNA, 15 bp, Homo sapiens
ctcacgtagatgttc

SEQ ID NO: 538568 - DNA, 15 bp, Homo sapiens
tcacgtagatgttct

SEQ ID NO: 538569 - DNA, 15 bp, Homo sapiens
cacgtagatgttcta

SEQ ID NO: 538570 - DNA, 15 bp, Homo sapiens
acgtagatgttctat

SEQ ID NO: 538571 - DNA, 15 bp, Homo sapiens
cgtagatgttctatc

SEQ ID NO: 538572 - DNA, 15 bp, Homo sapiens
gtagatgttctatct

SEQ ID NO: 538573 - DNA, 15 bp, Homo sapiens
tagatgttctatctg

SEQ ID NO: 538574 - DNA, 15 bp, Homo sapiens
agatgttctatctga

SEQ ID NO: 538575 - DNA, 15 bp, Homo sapiens
gatgttctatctgat

SEQ ID NO: 538576 - DNA, 15 bp, Homo sapiens
atgttctatctgatc

SEQ ID NO: 538577 - DNA, 15 bp, Homo sapiens
tgttctatctgatcc

SEQ ID NO: 538578 - DNA, 15 bp, Homo sapiens
gttctatctgatcct

SEQ ID NO: 538579 - DNA, 15 bp, Homo sapiens
ttctatctgatcctg

SEQ ID NO: 538580 - DNA, 15 bp, Homo sapiens
tctatctgatcctgt

SEQ ID NO: 538581 - DNA, 15 bp, Homo sapiens
ctatctgatcctgtg

SEQ ID NO: 538582 - DNA, 15 bp, Homo sapiens
tatctgatcctgtgt

SEQ ID NO: 538583 - DNA, 15 bp, Homo sapiens
atctgatcctgtgtg

SEQ ID NO: 538584 - DNA, 15 bp, Homo sapiens
tctgatcctgtgtgg

SEQ ID NO: 538585 - DNA, 15 bp, Homo sapiens
ctgatcctgtgtggc

SEQ ID NO: 538586 - DNA, 15 bp, Homo sapiens
tgatcctgtgtggct

SEQ ID NO: 538587 - DNA, 15 bp, Homo sapiens
gatcctgtgtggctc

SEQ ID NO: 538588 - DNA, 15 bp, Homo sapiens
atcctgtgtggctct

SEQ ID NO: 538589 - DNA, 15 bp, Homo sapiens
tcctgtgtggctctt

SEQ ID NO: 538590 - DNA, 15 bp, Homo sapiens
cctgtgtggctcttc

SEQ ID NO: 538591 - DNA, 15 bp, Homo sapiens
ctgtgtggctcttct

SEQ ID NO: 538592 - DNA, 15 bp, Homo sapiens
tgtgtggctcttctc

SEQ ID NO: 538593 - DNA, 15 bp, Homo sapiens
gtgtggctcttctcc

SEQ ID NO: 538594 - DNA, 15 bp, Homo sapiens
tgtggctcttctccc

SEQ ID NO: 538595 - DNA, 15 bp, Homo sapiens
gtggctcttctccca

SEQ ID NO: 538596 - DNA, 15 bp, Homo sapiens
tggctcttctcccat

SEQ ID NO: 538597 - DNA, 15 bp, Homo sapiens
ggctcttctcccata

SEQ ID NO: 538598 - DNA, 15 bp, Homo sapiens
gctcttctcccataa

SEQ ID NO: 538599 - DNA, 15 bp, Homo sapiens
ctcttctcccataat

SEQ ID NO: 538600 - DNA, 15 bp, Homo sapiens
tcttctcccataatc

SEQ ID NO: 538601 - DNA, 15 bp, Homo sapiens
cttctcccataatct

SEQ ID NO: 538602 - DNA, 15 bp, Homo sapiens
ttctcccataatctc

SEQ ID NO: 538603 - DNA, 15 bp, Homo sapiens
tctcccataatctca

SEQ ID NO: 538604 - DNA, 15 bp, Homo sapiens
ctcccataatctcag

SEQ ID NO: 538605 - DNA, 15 bp, Homo sapiens
tcccataatctcagg

SEQ ID NO: 538606 - DNA, 15 bp, Homo sapiens
cccataatctcaggg

SEQ ID NO: 538607 - DNA, 15 bp, Homo sapiens
ccataatctcagggc

SEQ ID NO: 538608 - DNA, 15 bp, Homo sapiens
cataatctcagggct

SEQ ID NO: 538609 - DNA, 15 bp, Homo sapiens
ataatctcagggcta

SEQ ID NO: 538610 - DNA, 15 bp, Homo sapiens
taatctcagggctac

SEQ ID NO: 538611 - DNA, 15 bp, Homo sapiens
aatctcagggctaca

SEQ ID NO: 538612 - DNA, 15 bp, Homo sapiens
atctcagggctacat

SEQ ID NO: 538613 - DNA, 15 bp, Homo sapiens
tctcagggctacatt

SEQ ID NO: 538614 - DNA, 15 bp, Homo sapiens
ctcagggctacattt

SEQ ID NO: 538615 - DNA, 15 bp, Homo sapiens
tcagggctacatttt

SEQ ID NO: 538616 - DNA, 15 bp, Homo sapiens
cagggctacattttg

SEQ ID NO: 538617 - DNA, 15 bp, Homo sapiens
agggctacattttgt

SEQ ID NO: 538618 - DNA, 15 bp, Homo sapiens
gggctacattttgta

SEQ ID NO: 538619 - DNA, 15 bp, Homo sapiens
ggctacattttgtac

SEQ ID NO: 538620 - DNA, 15 bp, Homo sapiens
gctacattttgtact

SEQ ID NO: 538621 - DNA, 15 bp, Homo sapiens
ctacattttgtactg

SEQ ID NO: 538622 - DNA, 15 bp, Homo sapiens
tacattttgtactgt

SEQ ID NO: 538623 - DNA, 15 bp, Homo sapiens
acattttgtactgtg

SEQ ID NO: 538624 - DNA, 15 bp, Homo sapiens
cattttgtactgtgg

SEQ ID NO: 538625 - DNA, 15 bp, Homo sapiens
attttgtactgtgga

SEQ ID NO: 538626 - DNA, 15 bp, Homo sapiens
ttttgtactgtggag

SEQ ID NO: 538627 - DNA, 15 bp, Homo sapiens
tttgtactgtggagt

SEQ ID NO: 538628 - DNA, 15 bp, Homo sapiens
ttgtactgtggagtg

SEQ ID NO: 538629 - DNA, 15 bp, Homo sapiens
tgtactgtggagtga

SEQ ID NO: 538630 - DNA, 15 bp, Homo sapiens
gtactgtggagtgac

SEQ ID NO: 538631 - DNA, 15 bp, Homo sapiens
tactgtggagtgacc

SEQ ID NO: 538632 - DNA, 15 bp, Homo sapiens
actgtggagtgaccc

SEQ ID NO: 538633 - DNA, 15 bp, Homo sapiens
ctgtggagtgaccct

SEQ ID NO: 538634 - DNA, 15 bp, Homo sapiens
tgtggagtgaccctc

SEQ ID NO: 538635 - DNA, 15 bp, Homo sapiens
gtggagtgaccctca

SEQ ID NO: 538636 - DNA, 15 bp, Homo sapiens
tggagtgaccctcaa

SEQ ID NO: 538637 - DNA, 15 bp, Homo sapiens
ggagtgaccctcaag

SEQ ID NO: 538638 - DNA, 15 bp, Homo sapiens
gagtgaccctcaagg

SEQ ID NO: 538639 - DNA, 15 bp, Homo sapiens
agtgaccctcaaggc

SEQ ID NO: 538640 - DNA, 15 bp, Homo sapiens
gtgaccctcaaggcc

SEQ ID NO: 538641 - DNA, 15 bp, Homo sapiens
tgaccctcaaggcca

SEQ ID NO: 538642 - DNA, 15 bp, Homo sapiens
gaccctcaaggccag

SEQ ID NO: 538643 - DNA, 15 bp, Homo sapiens
accctcaaggccagg

SEQ ID NO: 538644 - DNA, 15 bp, Homo sapiens
ccctcaaggccaggt

SEQ ID NO: 538645 - DNA, 15 bp, Homo sapiens
cctcaaggccaggtg

SEQ ID NO: 538646 - DNA, 15 bp, Homo sapiens
ctcaaggccaggtga

SEQ ID NO: 538647 - DNA, 15 bp, Homo sapiens
tcaaggccaggtgaa

SEQ ID NO: 538648 - DNA, 15 bp, Homo sapiens
caaggccaggtgaag

SEQ ID NO: 538649 - DNA, 15 bp, Homo sapiens
aaggccaggtgaagg

SEQ ID NO: 538650 - DNA, 15 bp, Homo sapiens
aggccaggtgaaggc

SEQ ID NO: 538651 - DNA, 15 bp, Homo sapiens
ggccaggtgaaggca

SEQ ID NO: 538652 - DNA, 15 bp, Homo sapiens
gccaggtgaaggcag

SEQ ID NO: 538653 - DNA, 15 bp, Homo sapiens
ccaggtgaaggcagg

SEQ ID NO: 538654 - DNA, 15 bp, Homo sapiens
caggtgaaggcaggg

SEQ ID NO: 538655 - DNA, 15 bp, Homo sapiens
aggtgaaggcagggg

SEQ ID NO: 538656 - DNA, 15 bp, Homo sapiens
ggtgaaggcaggggc

SEQ ID NO: 538657 - DNA, 15 bp, Homo sapiens
gtgaaggcaggggct

SEQ ID NO: 538658 - DNA, 15 bp, Homo sapiens
tgaaggcaggggctc

SEQ ID NO: 538659 - DNA, 15 bp, Homo sapiens
gaaggcaggggctct

SEQ ID NO: 538660 - DNA, 15 bp, Homo sapiens
aaggcaggggctctc

SEQ ID NO: 538661 - DNA, 15 bp, Homo sapiens
aggcaggggctctca

SEQ ID NO: 538662 - DNA, 15 bp, Homo sapiens
ggcaggggctctcag

SEQ ID NO: 538663 - DNA, 15 bp, Homo sapiens
gcaggggctctcagc

SEQ ID NO: 538664 - DNA, 15 bp, Homo sapiens
caggggctctcagca

SEQ ID NO: 538665 - DNA, 15 bp, Homo sapiens
aggggctctcagcag

SEQ ID NO: 538666 - DNA, 15 bp, Homo sapiens
ggggctctcagcagg

SEQ ID NO: 538667 - DNA, 15 bp, Homo sapiens
gggctctcagcaggt

SEQ ID NO: 538668 - DNA, 15 bp, Homo sapiens
ggctctcagcaggtg

SEQ ID NO: 538669 - DNA, 15 bp, Homo sapiens
gctctcagcaggtgc

SEQ ID NO: 538670 - DNA, 15 bp, Homo sapiens
ctctcagcaggtgct

SEQ ID NO: 538671 - DNA, 15 bp, Homo sapiens
tctcagcaggtgctt

SEQ ID NO: 538672 - DNA, 15 bp, Homo sapiens
ctcagcaggtgcttg

SEQ ID NO: 538673 - DNA, 15 bp, Homo sapiens
tcagcaggtgcttgg

SEQ ID NO: 538674 - DNA, 15 bp, Homo sapiens
cagcaggtgcttggt

SEQ ID NO: 538675 - DNA, 15 bp, Homo sapiens
agcaggtgcttggtg

SEQ ID NO: 538676 - DNA, 15 bp, Homo sapiens
gcaggtgcttggtga

SEQ ID NO: 538677 - DNA, 15 bp, Homo sapiens
caggtgcttggtgag

SEQ ID NO: 538678 - DNA, 15 bp, Homo sapiens
aggtgcttggtgagt

SEQ ID NO: 538679 - DNA, 15 bp, Homo sapiens
ggtgcttggtgagtt

SEQ ID NO: 538680 - DNA, 15 bp, Homo sapiens
gtgcttggtgagttt

SEQ ID NO: 538681 - DNA, 15 bp, Homo sapiens
tgcttggtgagtttc

SEQ ID NO: 538682 - DNA, 15 bp, Homo sapiens
gcttggtgagtttct

SEQ ID NO: 538683 - DNA, 15 bp, Homo sapiens
cttggtgagtttctc

SEQ ID NO: 538684 - DNA, 15 bp, Homo sapiens
ttggtgagtttctcc

SEQ ID NO: 538685 - DNA, 15 bp, Homo sapiens
tggtgagtttctccg

SEQ ID NO: 538686 - DNA, 15 bp, Homo sapiens
ggtgagtttctccga

SEQ ID NO: 538687 - DNA, 15 bp, Homo sapiens
gtgagtttctccgag

SEQ ID NO: 538688 - DNA, 15 bp, Homo sapiens
tgagtttctccgagc

SEQ ID NO: 538689 - DNA, 15 bp, Homo sapiens
gagtttctccgagct

SEQ ID NO: 538690 - DNA, 15 bp, Homo sapiens
agtttctccgagctg

SEQ ID NO: 538691 - DNA, 15 bp, Homo sapiens
gtttctccgagctgg

SEQ ID NO: 538692 - DNA, 15 bp, Homo sapiens
tttctccgagctggt

SEQ ID NO: 538693 - DNA, 15 bp, Homo sapiens
ttctccgagctggtt

SEQ ID NO: 538694 - DNA, 15 bp, Homo sapiens
tctccgagctggttg

SEQ ID NO: 538695 - DNA, 15 bp, Homo sapiens
ctccgagctggttgt

SEQ ID NO: 538696 - DNA, 15 bp, Homo sapiens
tccgagctggttgtt

SEQ ID NO: 538697 - DNA, 15 bp, Homo sapiens
ccgagctggttgttt

SEQ ID NO: 538698 - DNA, 15 bp, Homo sapiens
cgagctggttgtttt

SEQ ID NO: 538699 - DNA, 15 bp, Homo sapiens
gagctggttgttttt

SEQ ID NO: 538700 - DNA, 15 bp, Homo sapiens
agctggttgttttta

SEQ ID NO: 538701 - DNA, 15 bp, Homo sapiens
gctggttgtttttat

SEQ ID NO: 538702 - DNA, 15 bp, Homo sapiens
ctggttgtttttatt

SEQ ID NO: 538703 - DNA, 15 bp, Homo sapiens
tggttgtttttattg

SEQ ID NO: 538704 - DNA, 15 bp, Homo sapiens
ggttgtttttattgc

SEQ ID NO: 538705 - DNA, 15 bp, Homo sapiens
gttgtttttattgcc

SEQ ID NO: 538706 - DNA, 15 bp, Homo sapiens
ttgtttttattgcca

SEQ ID NO: 538707 - DNA, 15 bp, Homo sapiens
tgtttttattgccaa

SEQ ID NO: 538708 - DNA, 15 bp, Homo sapiens
gtttttattgccaag

SEQ ID NO: 538709 - DNA, 15 bp, Homo sapiens
tttttattgccaagt

SEQ ID NO: 538710 - DNA, 15 bp, Homo sapiens
ttttattgccaagtg

SEQ ID NO: 538711 - DNA, 15 bp, Homo sapiens
tttattgccaagtga

SEQ ID NO: 538712 - DNA, 15 bp, Homo sapiens
ttattgccaagtgac

SEQ ID NO: 538713 - DNA, 15 bp, Homo sapiens
tattgccaagtgaca

SEQ ID NO: 538714 - DNA, 15 bp, Homo sapiens
attgccaagtgacac

SEQ ID NO: 538715 - DNA, 15 bp, Homo sapiens
ttgccaagtgacact

SEQ ID NO: 538716 - DNA, 15 bp, Homo sapiens
tgccaagtgacacta

SEQ ID NO: 538717 - DNA, 15 bp, Homo sapiens
gccaagtgacactag

SEQ ID NO: 538718 - DNA, 15 bp, Homo sapiens
ccaagtgacactaga

SEQ ID NO: 538719 - DNA, 15 bp, Homo sapiens
caagtgacactagaa

SEQ ID NO: 538720 - DNA, 15 bp, Homo sapiens
aagtgacactagaac

SEQ ID NO: 538721 - DNA, 15 bp, Homo sapiens
agtgacactagaact

SEQ ID NO: 538722 - DNA, 15 bp, Homo sapiens
gtgacactagaactg

SEQ ID NO: 538723 - DNA, 15 bp, Homo sapiens
tgacactagaactgt

SEQ ID NO: 538724 - DNA, 15 bp, Homo sapiens
gacactagaactgtg

SEQ ID NO: 538725 - DNA, 15 bp, Homo sapiens
acactagaactgtgc

SEQ ID NO: 538726 - DNA, 15 bp, Homo sapiens
cactagaactgtgct

SEQ ID NO: 538727 - DNA, 15 bp, Homo sapiens
actagaactgtgcta

SEQ ID NO: 538728 - DNA, 15 bp, Homo sapiens
ctagaactgtgctaa

SEQ ID NO: 538729 - DNA, 15 bp, Homo sapiens
tagaactgtgctaat

SEQ ID NO: 538730 - DNA, 15 bp, Homo sapiens
agaactgtgctaatc

SEQ ID NO: 538731 - DNA, 15 bp, Homo sapiens
gaactgtgctaatcc

SEQ ID NO: 538732 - DNA, 15 bp, Homo sapiens
aactgtgctaatccc

SEQ ID NO: 538733 - DNA, 15 bp, Homo sapiens
actgtgctaatccct

SEQ ID NO: 538734 - DNA, 15 bp, Homo sapiens
ctgtgctaatccctt

SEQ ID NO: 538735 - DNA, 15 bp, Homo sapiens
tgtgctaatcccttt

SEQ ID NO: 538736 - DNA, 15 bp, Homo sapiens
gtgctaatccctttc

SEQ ID NO: 538737 - DNA, 15 bp, Homo sapiens
tgctaatccctttcc

SEQ ID NO: 538738 - DNA, 15 bp, Homo sapiens
gctaatccctttccg

SEQ ID NO: 538739 - DNA, 15 bp, Homo sapiens
ctaatccctttccgt

SEQ ID NO: 538740 - DNA, 15 bp, Homo sapiens
taatccctttccgtt

SEQ ID NO: 538741 - DNA, 15 bp, Homo sapiens
aatccctttccgtta

SEQ ID NO: 538742 - DNA, 15 bp, Homo sapiens
atccctttccgttaa

SEQ ID NO: 538743 - DNA, 15 bp, Homo sapiens
tccctttccgttaat

SEQ ID NO: 538744 - DNA, 15 bp, Homo sapiens
ccctttccgttaatg

SEQ ID NO: 538745 - DNA, 15 bp, Homo sapiens
cctttccgttaatgc

SEQ ID NO: 538746 - DNA, 15 bp, Homo sapiens
ctttccgttaatgca

SEQ ID NO: 538747 - DNA, 15 bp, Homo sapiens
tttccgttaatgcaa

SEQ ID NO: 538748 - DNA, 15 bp, Homo sapiens
ttccgttaatgcaaa

SEQ ID NO: 538749 - DNA, 15 bp, Homo sapiens
tccgttaatgcaaac

SEQ ID NO: 538750 - DNA, 15 bp, Homo sapiens
ccgttaatgcaaact

SEQ ID NO: 538751 - DNA, 15 bp, Homo sapiens
cgttaatgcaaacta

SEQ ID NO: 538752 - DNA, 15 bp, Homo sapiens
gttaatgcaaactaa

SEQ ID NO: 538753 - DNA, 15 bp, Homo sapiens
ttaatgcaaactaag

SEQ ID NO: 538754 - DNA, 15 bp, Homo sapiens
taatgcaaactaaga

SEQ ID NO: 538755 - DNA, 15 bp, Homo sapiens
aatgcaaactaagaa

SEQ ID NO: 538756 - DNA, 15 bp, Homo sapiens
atgcaaactaagaat

SEQ ID NO: 538757 - DNA, 15 bp, Homo sapiens
tgcaaactaagaata

SEQ ID NO: 538758 - DNA, 15 bp, Homo sapiens
gcaaactaagaatag

SEQ ID NO: 538759 - DNA, 15 bp, Homo sapiens
caaactaagaatagg

SEQ ID NO: 538760 - DNA, 15 bp, Homo sapiens
aaactaagaataggg

SEQ ID NO: 538761 - DNA, 15 bp, Homo sapiens
aactaagaatagggc

SEQ ID NO: 538762 - DNA, 15 bp, Homo sapiens
actaagaatagggcc

SEQ ID NO: 538763 - DNA, 15 bp, Homo sapiens
ctaagaatagggcct

SEQ ID NO: 538764 - DNA, 15 bp, Homo sapiens
taagaatagggcctg

SEQ ID NO: 538765 - DNA, 15 bp, Homo sapiens
aagaatagggcctga

SEQ ID NO: 538766 - DNA, 15 bp, Homo sapiens
agaatagggcctgac

SEQ ID NO: 538767 - DNA, 15 bp, Homo sapiens
gaatagggcctgacg

SEQ ID NO: 538768 - DNA, 15 bp, Homo sapiens
aatagggcctgacgc

SEQ ID NO: 538769 - DNA, 15 bp, Homo sapiens
atagggcctgacgcc

SEQ ID NO: 538770 - DNA, 15 bp, Homo sapiens
tagggcctgacgcca

SEQ ID NO: 538771 - DNA, 15 bp, Homo sapiens
agggcctgacgccac

SEQ ID NO: 538772 - DNA, 15 bp, Homo sapiens
gggcctgacgccact

SEQ ID NO: 538773 - DNA, 15 bp, Homo sapiens
ggcctgacgccactc

SEQ ID NO: 538774 - DNA, 15 bp, Homo sapiens
gcctgacgccactct

SEQ ID NO: 538775 - DNA, 15 bp, Homo sapiens
cctgacgccactctg

SEQ ID NO: 538776 - DNA, 15 bp, Homo sapiens
ctgacgccactctgg

SEQ ID NO: 538777 - DNA, 15 bp, Homo sapiens
tgacgccactctggg

SEQ ID NO: 538778 - DNA, 15 bp, Homo sapiens
gacgccactctgggg

SEQ ID NO: 538779 - DNA, 15 bp, Homo sapiens
acgccactctggggt

SEQ ID NO: 538780 - DNA, 15 bp, Homo sapiens
cgccactctggggtc

SEQ ID NO: 538781 - DNA, 15 bp, Homo sapiens
gccactctggggtct

SEQ ID NO: 538782 - DNA, 15 bp, Homo sapiens
ccactctggggtctt

SEQ ID NO: 538783 - DNA, 15 bp, Homo sapiens
cactctggggtctta

SEQ ID NO: 538784 - DNA, 15 bp, Homo sapiens
actctggggtcttag

SEQ ID NO: 538785 - DNA, 15 bp, Homo sapiens
ctctggggtcttaga

SEQ ID NO: 538786 - DNA, 15 bp, Homo sapiens
tctggggtcttagat

SEQ ID NO: 538787 - DNA, 15 bp, Homo sapiens
ctggggtcttagatt

SEQ ID NO: 538788 - DNA, 15 bp, Homo sapiens
tggggtcttagattc

SEQ ID NO: 538789 - DNA, 15 bp, Homo sapiens
ggggtcttagattct

SEQ ID NO: 538790 - DNA, 15 bp, Homo sapiens
gggtcttagattctt

SEQ ID NO: 538791 - DNA, 15 bp, Homo sapiens
ggtcttagattcttt

SEQ ID NO: 538792 - DNA, 15 bp, Homo sapiens
gtcttagattctttt

SEQ ID NO: 538793 - DNA, 15 bp, Homo sapiens
tcttagattcttttc

SEQ ID NO: 538794 - DNA, 15 bp, Homo sapiens
cttagattcttttcc

SEQ ID NO: 538795 - DNA, 15 bp, Homo sapiens
ttagattcttttccg

SEQ ID NO: 538796 - DNA, 15 bp, Homo sapiens
tagattcttttccga

SEQ ID NO: 538797 - DNA, 15 bp, Homo sapiens
agattcttttccgaa

SEQ ID NO: 538798 - DNA, 15 bp, Homo sapiens
gattcttttccgaaa

SEQ ID NO: 538799 - DNA, 15 bp, Homo sapiens
attcttttccgaaat

SEQ ID NO: 538800 - DNA, 15 bp, Homo sapiens
ttcttttccgaaatt

SEQ ID NO: 538801 - DNA, 15 bp, Homo sapiens
tcttttccgaaattt

SEQ ID NO: 538802 - DNA, 15 bp, Homo sapiens
cttttccgaaatttg

SEQ ID NO: 538803 - DNA, 15 bp, Homo sapiens
ttttccgaaatttgg

SEQ ID NO: 538804 - DNA, 15 bp, Homo sapiens
tttccgaaatttggt

SEQ ID NO: 538805 - DNA, 15 bp, Homo sapiens
ttccgaaatttggtc

SEQ ID NO: 538806 - DNA, 15 bp, Homo sapiens
tccgaaatttggtct

SEQ ID NO: 538807 - DNA, 15 bp, Homo sapiens
ccgaaatttggtctc

SEQ ID NO: 538808 - DNA, 15 bp, Homo sapiens
cgaaatttggtctca

SEQ ID NO: 538809 - DNA, 15 bp, Homo sapiens
gaaatttggtctcat

SEQ ID NO: 538810 - DNA, 15 bp, Homo sapiens
aaatttggtctcatt

SEQ ID NO: 538811 - DNA, 15 bp, Homo sapiens
aatttggtctcattt

SEQ ID NO: 538812 - DNA, 15 bp, Homo sapiens
atttggtctcattta

SEQ ID NO: 538813 - DNA, 15 bp, Homo sapiens
tttggtctcatttaa

SEQ ID NO: 538814 - DNA, 15 bp, Homo sapiens
ttggtctcatttaaa

SEQ ID NO: 538815 - DNA, 15 bp, Homo sapiens
tggtctcatttaaaa

SEQ ID NO: 538816 - DNA, 15 bp, Homo sapiens
ggtctcatttaaaac

SEQ ID NO: 538817 - DNA, 15 bp, Homo sapiens
gtctcatttaaaacc

SEQ ID NO: 538818 - DNA, 15 bp, Homo sapiens
tctcatttaaaaccc

SEQ ID NO: 538819 - DNA, 15 bp, Homo sapiens
ctcatttaaaaccca

SEQ ID NO: 538820 - DNA, 15 bp, Homo sapiens
tcatttaaaacccaa

SEQ ID NO: 538821 - DNA, 15 bp, Homo sapiens
catttaaaacccaaa

SEQ ID NO: 538822 - DNA, 15 bp, Homo sapiens
atttaaaacccaaaa

SEQ ID NO: 538823 - DNA, 15 bp, Homo sapiens
tttaaaacccaaaac

SEQ ID NO: 538824 - DNA, 15 bp, Homo sapiens
ttaaaacccaaaaca

SEQ ID NO: 538825 - DNA, 15 bp, Homo sapiens
taaaacccaaaacac

SEQ ID NO: 538826 - DNA, 15 bp, Homo sapiens
aaaacccaaaacact

SEQ ID NO: 538827 - DNA, 15 bp, Homo sapiens
aaacccaaaacactc

SEQ ID NO: 538828 - DNA, 15 bp, Homo sapiens
aacccaaaacactct

SEQ ID NO: 538829 - DNA, 15 bp, Homo sapiens
acccaaaacactctt

SEQ ID NO: 538830 - DNA, 15 bp, Homo sapiens
cccaaaacactcttt

SEQ ID NO: 538831 - DNA, 15 bp, Homo sapiens
ccaaaacactctttg

SEQ ID NO: 538832 - DNA, 15 bp, Homo sapiens
caaaacactctttgg

SEQ ID NO: 538833 - DNA, 15 bp, Homo sapiens
aaaacactctttggc

SEQ ID NO: 538834 - DNA, 15 bp, Homo sapiens
aaacactctttggct

SEQ ID NO: 538835 - DNA, 15 bp, Homo sapiens
aacactctttggctc

SEQ ID NO: 538836 - DNA, 15 bp, Homo sapiens
acactctttggctcc

SEQ ID NO: 538837 - DNA, 15 bp, Homo sapiens
cactctttggctcca

SEQ ID NO: 538838 - DNA, 15 bp, Homo sapiens
actctttggctccaa

SEQ ID NO: 538839 - DNA, 15 bp, Homo sapiens
ctctttggctccaag

SEQ ID NO: 538840 - DNA, 15 bp, Homo sapiens
tctttggctccaagc

SEQ ID NO: 538841 - DNA, 15 bp, Homo sapiens
ctttggctccaagcg

SEQ ID NO: 538842 - DNA, 15 bp, Homo sapiens
tttggctccaagcgt

SEQ ID NO: 538843 - DNA, 15 bp, Homo sapiens
ttggctccaagcgtc

SEQ ID NO: 538844 - DNA, 15 bp, Homo sapiens
tggctccaagcgtct

SEQ ID NO: 538845 - DNA, 15 bp, Homo sapiens
ggctccaagcgtctt

SEQ ID NO: 538846 - DNA, 15 bp, Homo sapiens
gctccaagcgtcttt

SEQ ID NO: 538847 - DNA, 15 bp, Homo sapiens
ctccaagcgtctttc

SEQ ID NO: 538848 - DNA, 15 bp, Homo sapiens
tccaagcgtctttcc

SEQ ID NO: 538849 - DNA, 15 bp, Homo sapiens
ccaagcgtctttccc

SEQ ID NO: 538850 - DNA, 15 bp, Homo sapiens
caagcgtctttcccg

SEQ ID NO: 538851 - DNA, 15 bp, Homo sapiens
aagcgtctttcccgt

SEQ ID NO: 538852 - DNA, 15 bp, Homo sapiens
agcgtctttcccgtg

SEQ ID NO: 538853 - DNA, 15 bp, Homo sapiens
gcgtctttcccgtgg

SEQ ID NO: 538854 - DNA, 15 bp, Homo sapiens
cgtctttcccgtggc

SEQ ID NO: 538855 - DNA, 15 bp, Homo sapiens
gtctttcccgtggcc

SEQ ID NO: 538856 - DNA, 15 bp, Homo sapiens
tctttcccgtggcct

SEQ ID NO: 538857 - DNA, 15 bp, Homo sapiens
ctttcccgtggcctt

SEQ ID NO: 538858 - DNA, 15 bp, Homo sapiens
tttcccgtggccttt

SEQ ID NO: 538859 - DNA, 15 bp, Homo sapiens
ttcccgtggccttta

SEQ ID NO: 538860 - DNA, 15 bp, Homo sapiens
tcccgtggcctttaa

SEQ ID NO: 538861 - DNA, 15 bp, Homo sapiens
cccgtggcctttaaa

SEQ ID NO: 538862 - DNA, 15 bp, Homo sapiens
ccgtggcctttaaaa

SEQ ID NO: 538863 - DNA, 15 bp, Homo sapiens
cgtggcctttaaaaa

SEQ ID NO: 538864 - DNA, 15 bp, Homo sapiens
gtggcctttaaaaaa

SEQ ID NO: 538865 - DNA, 15 bp, Homo sapiens
tggcctttaaaaaaa

SEQ ID NO: 538866 - DNA, 15 bp, Homo sapiens
ggcctttaaaaaaat

SEQ ID NO: 538867 - DNA, 15 bp, Homo sapiens
gcctttaaaaaaatc

SEQ ID NO: 538868 - DNA, 15 bp, Homo sapiens
cctttaaaaaaatcc

SEQ ID NO: 538869 - DNA, 15 bp, Homo sapiens
ctttaaaaaaatcct

SEQ ID NO: 538870 - DNA, 15 bp, Homo sapiens
tttaaaaaaatcctg

SEQ ID NO: 538871 - DNA, 15 bp, Homo sapiens
ttaaaaaaatcctgt

SEQ ID NO: 538872 - DNA, 15 bp, Homo sapiens
taaaaaaatcctgtt

SEQ ID NO: 538873 - DNA, 15 bp, Homo sapiens
aaaaaaatcctgttt

SEQ ID NO: 538874 - DNA, 15 bp, Homo sapiens
aaaaaatcctgttta

SEQ ID NO: 538875 - DNA, 15 bp, Homo sapiens
aaaaatcctgtttaa

SEQ ID NO: 538876 - DNA, 15 bp, Homo sapiens
aaaatcctgtttaat

SEQ ID NO: 538877 - DNA, 15 bp, Homo sapiens
aaatcctgtttaatt

SEQ ID NO: 538878 - DNA, 15 bp, Homo sapiens
aatcctgtttaattg

SEQ ID NO: 538879 - DNA, 15 bp, Homo sapiens
atcctgtttaattga

SEQ ID NO: 538880 - DNA, 15 bp, Homo sapiens
tcctgtttaattgaa

SEQ ID NO: 538881 - DNA, 15 bp, Homo sapiens
cctgtttaattgaaa

SEQ ID NO: 538882 - DNA, 15 bp, Homo sapiens
ctgtttaattgaaag

SEQ ID NO: 538883 - DNA, 15 bp, Homo sapiens
tgtttaattgaaagg

SEQ ID NO: 538884 - DNA, 15 bp, Homo sapiens
gtttaattgaaagga

SEQ ID NO: 538885 - DNA, 15 bp, Homo sapiens
tttaattgaaaggaa

SEQ ID NO: 538886 - DNA, 15 bp, Homo sapiens
ttaattgaaaggaaa

SEQ ID NO: 538887 - DNA, 15 bp, Homo sapiens
taattgaaaggaaat

SEQ ID NO: 538888 - DNA, 15 bp, Homo sapiens
aattgaaaggaaatt

SEQ ID NO: 538889 - DNA, 15 bp, Homo sapiens
attgaaaggaaattg

SEQ ID NO: 538890 - DNA, 15 bp, Homo sapiens
ttgaaaggaaattga

SEQ ID NO: 538891 - DNA, 15 bp, Homo sapiens
tgaaaggaaattgaa

SEQ ID NO: 538892 - DNA, 15 bp, Homo sapiens
gaaaggaaattgaat

SEQ ID NO: 538893 - DNA, 15 bp, Homo sapiens
aaaggaaattgaatt

SEQ ID NO: 538894 - DNA, 15 bp, Homo sapiens
aaggaaattgaattt

SEQ ID NO: 538895 - DNA, 15 bp, Homo sapiens
aggaaattgaatttg

SEQ ID NO: 538896 - DNA, 15 bp, Homo sapiens
ggaaattgaatttgt

SEQ ID NO: 538897 - DNA, 15 bp, Homo sapiens
gaaattgaatttgtc

SEQ ID NO: 538898 - DNA, 15 bp, Homo sapiens
aaattgaatttgtct

SEQ ID NO: 538899 - DNA, 15 bp, Homo sapiens
aattgaatttgtctg

SEQ ID NO: 538900 - DNA, 15 bp, Homo sapiens
attgaatttgtctgg

SEQ ID NO: 538901 - DNA, 15 bp, Homo sapiens
ttgaatttgtctggt

SEQ ID NO: 538902 - DNA, 15 bp, Homo sapiens
tgaatttgtctggtt

SEQ ID NO: 538903 - DNA, 15 bp, Homo sapiens
gaatttgtctggttt

SEQ ID NO: 538904 - DNA, 15 bp, Homo sapiens
aatttgtctggtttt

SEQ ID NO: 538905 - DNA, 15 bp, Homo sapiens
atttgtctggttttg

SEQ ID NO: 538906 - DNA, 15 bp, Homo sapiens
tttgtctggttttga

SEQ ID NO: 538907 - DNA, 15 bp, Homo sapiens
ttgtctggttttgat

SEQ ID NO: 538908 - DNA, 15 bp, Homo sapiens
tgtctggttttgatt

SEQ ID NO: 538909 - DNA, 15 bp, Homo sapiens
gtctggttttgattc

SEQ ID NO: 538910 - DNA, 15 bp, Homo sapiens
tctggttttgattca

SEQ ID NO: 538911 - DNA, 15 bp, Homo sapiens
ctggttttgattcat

SEQ ID NO: 538912 - DNA, 15 bp, Homo sapiens
tggttttgattcatt

SEQ ID NO: 538913 - DNA, 15 bp, Homo sapiens
ggttttgattcattt

SEQ ID NO: 538914 - DNA, 15 bp, Homo sapiens
gttttgattcattta

SEQ ID NO: 538915 - DNA, 15 bp, Homo sapiens
ttttgattcatttac

SEQ ID NO: 538916 - DNA, 15 bp, Homo sapiens
tttgattcatttaca

SEQ ID NO: 538917 - DNA, 15 bp, Homo sapiens
ttgattcatttacac

SEQ ID NO: 538918 - DNA, 15 bp, Homo sapiens
tgattcatttacact

SEQ ID NO: 538919 - DNA, 15 bp, Homo sapiens
gattcatttacactt

SEQ ID NO: 538920 - DNA, 15 bp, Homo sapiens
attcatttacactta

SEQ ID NO: 538921 - DNA, 15 bp, Homo sapiens
ttcatttacacttaa

SEQ ID NO: 538922 - DNA, 15 bp, Homo sapiens
tcatttacacttaac

SEQ ID NO: 538923 - DNA, 15 bp, Homo sapiens
catttacacttaact

SEQ ID NO: 538924 - DNA, 15 bp, Homo sapiens
atttacacttaactc

SEQ ID NO: 538925 - DNA, 15 bp, Homo sapiens
tttacacttaactct

SEQ ID NO: 538926 - DNA, 15 bp, Homo sapiens
ttacacttaactctt

SEQ ID NO: 538927 - DNA, 15 bp, Homo sapiens
tacacttaactcttc

SEQ ID NO: 538928 - DNA, 15 bp, Homo sapiens
acacttaactcttct

SEQ ID NO: 538929 - DNA, 15 bp, Homo sapiens
cacttaactcttcta

SEQ ID NO: 538930 - DNA, 15 bp, Homo sapiens
acttaactcttctaa

SEQ ID NO: 538931 - DNA, 15 bp, Homo sapiens
cttaactcttctaaa

SEQ ID NO: 538932 - DNA, 15 bp, Homo sapiens
ttaactcttctaaaa

SEQ ID NO: 538933 - DNA, 15 bp, Homo sapiens
tctgaaggaggggag

SEQ ID NO: 538934 - DNA, 15 bp, Homo sapiens
ctgaaggaggggagg

SEQ ID NO: 538935 - DNA, 15 bp, Homo sapiens
tgaaggaggggaggg

SEQ ID NO: 538936 - DNA, 15 bp, Homo sapiens
gaaggaggggaggga

SEQ ID NO: 538937 - DNA, 15 bp, Homo sapiens
aaggaggggagggac

SEQ ID NO: 538938 - DNA, 15 bp, Homo sapiens
aggaggggagggaca

SEQ ID NO: 538939 - DNA, 15 bp, Homo sapiens
ggaggggagggacaa

SEQ ID NO: 538940 - DNA, 15 bp, Homo sapiens
gaggggagggacaac

SEQ ID NO: 538941 - DNA, 15 bp, Homo sapiens
aggggagggacaacg

SEQ ID NO: 538942 - DNA, 15 bp, Homo sapiens
ggggagggacaacgg

SEQ ID NO: 538943 - DNA, 15 bp, Homo sapiens
gggagggacaacggc

SEQ ID NO: 538944 - DNA, 15 bp, Homo sapiens
ggagggacaacggct

SEQ ID NO: 538945 - DNA, 15 bp, Homo sapiens
gagggacaacggctg

SEQ ID NO: 538946 - DNA, 15 bp, Homo sapiens
agggacaacggctgg

SEQ ID NO: 538947 - DNA, 15 bp, Homo sapiens
gggacaacggctggg

SEQ ID NO: 538948 - DNA, 15 bp, Homo sapiens
ggacaacggctgggg

SEQ ID NO: 538949 - DNA, 15 bp, Homo sapiens
gacaacggctggggc

SEQ ID NO: 538950 - DNA, 15 bp, Homo sapiens
acaacggctggggca

SEQ ID NO: 538951 - DNA, 15 bp, Homo sapiens
caacggctggggcag

SEQ ID NO: 538952 - DNA, 15 bp, Homo sapiens
aacggctggggcaga

SEQ ID NO: 538953 - DNA, 15 bp, Homo sapiens
acggctggggcagag

SEQ ID NO: 538954 - DNA, 15 bp, Homo sapiens
cggctggggcagagg

SEQ ID NO: 538955 - DNA, 15 bp, Homo sapiens
ggctggggcagaggg

SEQ ID NO: 538956 - DNA, 15 bp, Homo sapiens
gctggggcagagggg

SEQ ID NO: 538957 - DNA, 15 bp, Homo sapiens
ctggggcagaggggg

SEQ ID NO: 538958 - DNA, 15 bp, Homo sapiens
tggggcagagggggg

SEQ ID NO: 538959 - DNA, 15 bp, Homo sapiens
ggggcagagggggga

SEQ ID NO: 538960 - DNA, 15 bp, Homo sapiens
gggcagaggggggaa

SEQ ID NO: 538961 - DNA, 15 bp, Homo sapiens
ggcagaggggggaag

SEQ ID NO: 538962 - DNA, 15 bp, Homo sapiens
gcagaggggggaaga

SEQ ID NO: 538963 - DNA, 15 bp, Homo sapiens
cagaggggggaagag

SEQ ID NO: 538964 - DNA, 15 bp, Homo sapiens
agaggggggaagagg

SEQ ID NO: 538965 - DNA, 15 bp, Homo sapiens
gaggggggaagagga

SEQ ID NO: 538966 - DNA, 15 bp, Homo sapiens
aggggggaagaggaa

SEQ ID NO: 538967 - DNA, 15 bp, Homo sapiens
ggggggaagaggaag

SEQ ID NO: 538968 - DNA, 15 bp, Homo sapiens
gggggaagaggaagt

SEQ ID NO: 538969 - DNA, 15 bp, Homo sapiens
ggggaagaggaagtg

SEQ ID NO: 538970 - DNA, 15 bp, Homo sapiens
gggaagaggaagtgt

SEQ ID NO: 538971 - DNA, 15 bp, Homo sapiens
ggaagaggaagtgtg

SEQ ID NO: 538972 - DNA, 15 bp, Homo sapiens
gaagaggaagtgtgt

SEQ ID NO: 538973 - DNA, 15 bp, Homo sapiens
aagaggaagtgtgtt

SEQ ID NO: 538974 - DNA, 15 bp, Homo sapiens
agaggaagtgtgttc

SEQ ID NO: 538975 - DNA, 15 bp, Homo sapiens
gaggaagtgtgttct

SEQ ID NO: 538976 - DNA, 15 bp, Homo sapiens
aggaagtgtgttctg

SEQ ID NO: 538977 - DNA, 15 bp, Homo sapiens
ggaagtgtgttctgc

SEQ ID NO: 538978 - DNA, 15 bp, Homo sapiens
gaagtgtgttctgca

SEQ ID NO: 538979 - DNA, 15 bp, Homo sapiens
aagtgtgttctgcag

SEQ ID NO: 538980 - DNA, 15 bp, Homo sapiens
agtgtgttctgcagg

SEQ ID NO: 538981 - DNA, 15 bp, Homo sapiens
gtgtgttctgcaggg

SEQ ID NO: 538982 - DNA, 15 bp, Homo sapiens
tgtgttctgcagggg

SEQ ID NO: 538983 - DNA, 15 bp, Homo sapiens
gtgttctgcagggga

SEQ ID NO: 538984 - DNA, 15 bp, Homo sapiens
tgttctgcaggggag

SEQ ID NO: 538985 - DNA, 15 bp, Homo sapiens
gttctgcaggggagg

SEQ ID NO: 538986 - DNA, 15 bp, Homo sapiens
ttctgcaggggaggg

SEQ ID NO: 538987 - DNA, 15 bp, Homo sapiens
tctgcaggggagggt

SEQ ID NO: 538988 - DNA, 15 bp, Homo sapiens
ctgcaggggagggtg

SEQ ID NO: 538989 - DNA, 15 bp, Homo sapiens
tgcaggggagggtgc

SEQ ID NO: 538990 - DNA, 15 bp, Homo sapiens
gcaggggagggtgct

SEQ ID NO: 538991 - DNA, 15 bp, Homo sapiens
caggggagggtgctg

SEQ ID NO: 538992 - DNA, 15 bp, Homo sapiens
aggggagggtgctgt

SEQ ID NO: 538993 - DNA, 15 bp, Homo sapiens
ggggagggtgctgtg

SEQ ID NO: 538994 - DNA, 15 bp, Homo sapiens
gggagggtgctgtgt

SEQ ID NO: 538995 - DNA, 15 bp, Homo sapiens
ggagggtgctgtgtc

SEQ ID NO: 538996 - DNA, 15 bp, Homo sapiens
gagggtgctgtgtct

SEQ ID NO: 538997 - DNA, 15 bp, Homo sapiens
agggtgctgtgtctt

SEQ ID NO: 538998 - DNA, 15 bp, Homo sapiens
gggtgctgtgtcttt

SEQ ID NO: 538999 - DNA, 15 bp, Homo sapiens
ggtgctgtgtctttg

SEQ ID NO: 539000 - DNA, 15 bp, Homo sapiens
gtgctgtgtctttgg

SEQ ID NO: 539001 - DNA, 15 bp, Homo sapiens
tgctgtgtctttggg

SEQ ID NO: 539002 - DNA, 15 bp, Homo sapiens
gctgtgtctttggga

SEQ ID NO: 539003 - DNA, 15 bp, Homo sapiens
ctgtgtctttgggaa

SEQ ID NO: 539004 - DNA, 15 bp, Homo sapiens
tgtgtctttgggaag

SEQ ID NO: 539005 - DNA, 15 bp, Homo sapiens
gtgtctttgggaagg

SEQ ID NO: 539006 - DNA, 15 bp, Homo sapiens
tgtctttgggaaggg

SEQ ID NO: 539007 - DNA, 15 bp, Homo sapiens
gtctttgggaagggc

SEQ ID NO: 539008 - DNA, 15 bp, Homo sapiens
tctttgggaagggca

SEQ ID NO: 539009 - DNA, 15 bp, Homo sapiens
ctttgggaagggcaa

SEQ ID NO: 539010 - DNA, 15 bp, Homo sapiens
tttgggaagggcaat

SEQ ID NO: 539011 - DNA, 15 bp, Homo sapiens
ttgggaagggcaata

SEQ ID NO: 539012 - DNA, 15 bp, Homo sapiens
tgggaagggcaatac

SEQ ID NO: 539013 - DNA, 15 bp, Homo sapiens
gggaagggcaatact

SEQ ID NO: 539014 - DNA, 15 bp, Homo sapiens
ggaagggcaatactg

SEQ ID NO: 539015 - DNA, 15 bp, Homo sapiens
gaagggcaatactga

SEQ ID NO: 539016 - DNA, 15 bp, Homo sapiens
aagggcaatactgat

SEQ ID NO: 539017 - DNA, 15 bp, Homo sapiens
agggcaatactgatt

SEQ ID NO: 539018 - DNA, 15 bp, Homo sapiens
gggcaatactgattg

SEQ ID NO: 539019 - DNA, 15 bp, Homo sapiens
ggcaatactgattgc

SEQ ID NO: 539020 - DNA, 15 bp, Homo sapiens
gcaatactgattgca

SEQ ID NO: 539021 - DNA, 15 bp, Homo sapiens
caatactgattgcat

SEQ ID NO: 539022 - DNA, 15 bp, Homo sapiens
aatactgattgcatg

SEQ ID NO: 539023 - DNA, 15 bp, Homo sapiens
atactgattgcatgg

SEQ ID NO: 539024 - DNA, 15 bp, Homo sapiens
tactgattgcatggt

SEQ ID NO: 539025 - DNA, 15 bp, Homo sapiens
actgattgcatggtg

SEQ ID NO: 539026 - DNA, 15 bp, Homo sapiens
ctgattgcatggtgg

SEQ ID NO: 539027 - DNA, 15 bp, Homo sapiens
tgattgcatggtggc

SEQ ID NO: 539028 - DNA, 15 bp, Homo sapiens
gattgcatggtggcc

SEQ ID NO: 539029 - DNA, 15 bp, Homo sapiens
attgcatggtggccc

SEQ ID NO: 539030 - DNA, 15 bp, Homo sapiens
ttgcatggtggccct

SEQ ID NO: 539031 - DNA, 15 bp, Homo sapiens
tgcatggtggccctg

SEQ ID NO: 539032 - DNA, 15 bp, Homo sapiens
gcatggtggccctgg

SEQ ID NO: 539033 - DNA, 15 bp, Homo sapiens
catggtggccctggg

SEQ ID NO: 539034 - DNA, 15 bp, Homo sapiens
atggtggccctggga

SEQ ID NO: 539035 - DNA, 15 bp, Homo sapiens
tggtggccctgggag

SEQ ID NO: 539036 - DNA, 15 bp, Homo sapiens
ggtggccctgggagc

SEQ ID NO: 539037 - DNA, 15 bp, Homo sapiens
gtggccctgggagct

SEQ ID NO: 539038 - DNA, 15 bp, Homo sapiens
tggccctgggagctg

SEQ ID NO: 539039 - DNA, 15 bp, Homo sapiens
ggccctgggagctgt

SEQ ID NO: 539040 - DNA, 15 bp, Homo sapiens
gccctgggagctgtg

SEQ ID NO: 539041 - DNA, 15 bp, Homo sapiens
ccctgggagctgtgc

SEQ ID NO: 539042 - DNA, 15 bp, Homo sapiens
cctgggagctgtgcc

SEQ ID NO: 539043 - DNA, 15 bp, Homo sapiens
ctgggagctgtgcca

SEQ ID NO: 539044 - DNA, 15 bp, Homo sapiens
tgggagctgtgccac

SEQ ID NO: 539045 - DNA, 15 bp, Homo sapiens
gggagctgtgccact

SEQ ID NO: 539046 - DNA, 15 bp, Homo sapiens
ggagctgtgccactc

SEQ ID NO: 539047 - DNA, 15 bp, Homo sapiens
gagctgtgccactct

SEQ ID NO: 539048 - DNA, 15 bp, Homo sapiens
agctgtgccactctt

SEQ ID NO: 539049 - DNA, 15 bp, Homo sapiens
gctgtgccactcttg

SEQ ID NO: 539050 - DNA, 15 bp, Homo sapiens
ctgtgccactcttga

SEQ ID NO: 539051 - DNA, 15 bp, Homo sapiens
tgtgccactcttgaa

SEQ ID NO: 539052 - DNA, 15 bp, Homo sapiens
gtgccactcttgaag

SEQ ID NO: 539053 - DNA, 15 bp, Homo sapiens
tgccactcttgaagg

SEQ ID NO: 539054 - DNA, 15 bp, Homo sapiens
gccactcttgaaggt

SEQ ID NO: 539055 - DNA, 15 bp, Homo sapiens
ccactcttgaaggtc

SEQ ID NO: 539056 - DNA, 15 bp, Homo sapiens
cactcttgaaggtcc

SEQ ID NO: 539057 - DNA, 15 bp, Homo sapiens
actcttgaaggtcct

SEQ ID NO: 539058 - DNA, 15 bp, Homo sapiens
ctcttgaaggtcctg

SEQ ID NO: 539059 - DNA, 15 bp, Homo sapiens
tcttgaaggtcctgc

SEQ ID NO: 539060 - DNA, 15 bp, Homo sapiens
cttgaaggtcctgcc

SEQ ID NO: 539061 - DNA, 15 bp, Homo sapiens
ttgaaggtcctgcct

SEQ ID NO: 539062 - DNA, 15 bp, Homo sapiens
tgaaggtcctgcctg

SEQ ID NO: 539063 - DNA, 15 bp, Homo sapiens
gaaggtcctgcctgg

SEQ ID NO: 539064 - DNA, 15 bp, Homo sapiens
aaggtcctgcctggc

SEQ ID NO: 539065 - DNA, 15 bp, Homo sapiens
aggtcctgcctggcg

SEQ ID NO: 539066 - DNA, 15 bp, Homo sapiens
ggtcctgcctggcgt

SEQ ID NO: 539067 - DNA, 15 bp, Homo sapiens
gtcctgcctggcgtt

SEQ ID NO: 539068 - DNA, 15 bp, Homo sapiens
tcctgcctggcgtta

SEQ ID NO: 539069 - DNA, 15 bp, Homo sapiens
cctgcctggcgttaa

SEQ ID NO: 539070 - DNA, 15 bp, Homo sapiens
ctgcctggcgttaat

SEQ ID NO: 539071 - DNA, 15 bp, Homo sapiens
tgcctggcgttaata

SEQ ID NO: 539072 - DNA, 15 bp, Homo sapiens
gcctggcgttaatat

SEQ ID NO: 539073 - DNA, 15 bp, Homo sapiens
cctggcgttaatatt

SEQ ID NO: 539074 - DNA, 15 bp, Homo sapiens
ctggcgttaatattt

SEQ ID NO: 539075 - DNA, 15 bp, Homo sapiens
tggcgttaatatttg

SEQ ID NO: 539076 - DNA, 15 bp, Homo sapiens
ggcgttaatatttgg

SEQ ID NO: 539077 - DNA, 15 bp, Homo sapiens
gcgttaatatttgga

SEQ ID NO: 539078 - DNA, 15 bp, Homo sapiens
cgttaatatttggat

SEQ ID NO: 539079 - DNA, 15 bp, Homo sapiens
gttaatatttggata

SEQ ID NO: 539080 - DNA, 15 bp, Homo sapiens
ttaatatttggatat

SEQ ID NO: 539081 - DNA, 15 bp, Homo sapiens
taatatttggatata

SEQ ID NO: 539082 - DNA, 15 bp, Homo sapiens
aatatttggatatat

SEQ ID NO: 539083 - DNA, 15 bp, Homo sapiens
atatttggatatatt

SEQ ID NO: 539084 - DNA, 15 bp, Homo sapiens
tatttggatatattt

SEQ ID NO: 539085 - DNA, 15 bp, Homo sapiens
atttggatatatttt

SEQ ID NO: 539086 - DNA, 15 bp, Homo sapiens
tttggatatattttc

SEQ ID NO: 539087 - DNA, 15 bp, Homo sapiens
ttggatatattttca

SEQ ID NO: 539088 - DNA, 15 bp, Homo sapiens
tggatatattttcaa

SEQ ID NO: 539089 - DNA, 15 bp, Homo sapiens
ggatatattttcaaa

SEQ ID NO: 539090 - DNA, 15 bp, Homo sapiens
gatatattttcaaag

SEQ ID NO: 539091 - DNA, 15 bp, Homo sapiens
atatattttcaaaga

SEQ ID NO: 539092 - DNA, 15 bp, Homo sapiens
tatattttcaaagag

SEQ ID NO: 539093 - DNA, 15 bp, Homo sapiens
atattttcaaagagg

SEQ ID NO: 539094 - DNA, 15 bp, Homo sapiens
tattttcaaagaggg

SEQ ID NO: 539095 - DNA, 15 bp, Homo sapiens
attttcaaagaggga

SEQ ID NO: 539096 - DNA, 15 bp, Homo sapiens
ttttcaaagagggag

SEQ ID NO: 539097 - DNA, 15 bp, Homo sapiens
tttcaaagagggaga

SEQ ID NO: 539098 - DNA, 15 bp, Homo sapiens
ttcaaagagggagaa

SEQ ID NO: 539099 - DNA, 15 bp, Homo sapiens
tcaaagagggagaat

SEQ ID NO: 539100 - DNA, 15 bp, Homo sapiens
caaagagggagaatc

SEQ ID NO: 539101 - DNA, 15 bp, Homo sapiens
aaagagggagaatcc

SEQ ID NO: 539102 - DNA, 15 bp, Homo sapiens
aagagggagaatcct

SEQ ID NO: 539103 - DNA, 15 bp, Homo sapiens
agagggagaatcctc

SEQ ID NO: 539104 - DNA, 15 bp, Homo sapiens
gagggagaatcctct

SEQ ID NO: 539105 - DNA, 15 bp, Homo sapiens
agggagaatcctctt

SEQ ID NO: 539106 - DNA, 15 bp, Homo sapiens
gggagaatcctcttc

SEQ ID NO: 539107 - DNA, 15 bp, Homo sapiens
ggagaatcctcttct

SEQ ID NO: 539108 - DNA, 15 bp, Homo sapiens
gagaatcctcttctg

SEQ ID NO: 539109 - DNA, 15 bp, Homo sapiens
agaatcctcttctgt

SEQ ID NO: 539110 - DNA, 15 bp, Homo sapiens
gaatcctcttctgta

SEQ ID NO: 539111 - DNA, 15 bp, Homo sapiens
aatcctcttctgtat

SEQ ID NO: 539112 - DNA, 15 bp, Homo sapiens
atcctcttctgtatt

SEQ ID NO: 539113 - DNA, 15 bp, Homo sapiens
tcctcttctgtatta

SEQ ID NO: 539114 - DNA, 15 bp, Homo sapiens
cctcttctgtattag

SEQ ID NO: 539115 - DNA, 15 bp, Homo sapiens
ctcttctgtattagt

SEQ ID NO: 539116 - DNA, 15 bp, Homo sapiens
tcttctgtattagta

SEQ ID NO: 539117 - DNA, 15 bp, Homo sapiens
cttctgtattagtaa

SEQ ID NO: 539118 - DNA, 15 bp, Homo sapiens
ttctgtattagtaat

SEQ ID NO: 539119 - DNA, 15 bp, Homo sapiens
tctgtattagtaata

SEQ ID NO: 539120 - DNA, 15 bp, Homo sapiens
ctgtattagtaatag

SEQ ID NO: 539121 - DNA, 15 bp, Homo sapiens
tgtattagtaatagg

SEQ ID NO: 539122 - DNA, 15 bp, Homo sapiens
gtattagtaataggc

SEQ ID NO: 539123 - DNA, 15 bp, Homo sapiens
tattagtaataggca

SEQ ID NO: 539124 - DNA, 15 bp, Homo sapiens
attagtaataggcat

SEQ ID NO: 539125 - DNA, 15 bp, Homo sapiens
ttagtaataggcatg

SEQ ID NO: 539126 - DNA, 15 bp, Homo sapiens
tagtaataggcatgt

SEQ ID NO: 539127 - DNA, 15 bp, Homo sapiens
agtaataggcatgtc

SEQ ID NO: 539128 - DNA, 15 bp, Homo sapiens
gtaataggcatgtcc

SEQ ID NO: 539129 - DNA, 15 bp, Homo sapiens
taataggcatgtccg

SEQ ID NO: 539130 - DNA, 15 bp, Homo sapiens
aataggcatgtccgt

SEQ ID NO: 539131 - DNA, 15 bp, Homo sapiens
ataggcatgtccgta

SEQ ID NO: 539132 - DNA, 15 bp, Homo sapiens
taggcatgtccgtag

SEQ ID NO: 539133 - DNA, 15 bp, Homo sapiens
aggcatgtccgtagt

SEQ ID NO: 539134 - DNA, 15 bp, Homo sapiens
ggcatgtccgtagtt

SEQ ID NO: 539135 - DNA, 15 bp, Homo sapiens
gcatgtccgtagttg

SEQ ID NO: 539136 - DNA, 15 bp, Homo sapiens
catgtccgtagttga

SEQ ID NO: 539137 - DNA, 15 bp, Homo sapiens
atgtccgtagttgaa

SEQ ID NO: 539138 - DNA, 15 bp, Homo sapiens
tgtccgtagttgaaa

SEQ ID NO: 539139 - DNA, 15 bp, Homo sapiens
gtccgtagttgaaag

SEQ ID NO: 539140 - DNA, 15 bp, Homo sapiens
tccgtagttgaaaga

SEQ ID NO: 539141 - DNA, 15 bp, Homo sapiens
ccgtagttgaaagaa

SEQ ID NO: 539142 - DNA, 15 bp, Homo sapiens
cgtagttgaaagaat

SEQ ID NO: 539143 - DNA, 15 bp, Homo sapiens
gtagttgaaagaatg

SEQ ID NO: 539144 - DNA, 15 bp, Homo sapiens
tagttgaaagaatgt

SEQ ID NO: 539145 - DNA, 15 bp, Homo sapiens
agttgaaagaatgta

SEQ ID NO: 539146 - DNA, 15 bp, Homo sapiens
gttgaaagaatgtag

SEQ ID NO: 539147 - DNA, 15 bp, Homo sapiens
ttgaaagaatgtaga

SEQ ID NO: 539148 - DNA, 15 bp, Homo sapiens
tgaaagaatgtagat

SEQ ID NO: 539149 - DNA, 15 bp, Homo sapiens
gaaagaatgtagatt

SEQ ID NO: 539150 - DNA, 15 bp, Homo sapiens
aaagaatgtagattt

SEQ ID NO: 539151 - DNA, 15 bp, Homo sapiens
aagaatgtagatttt

SEQ ID NO: 539152 - DNA, 15 bp, Homo sapiens
agaatgtagattttg

SEQ ID NO: 539153 - DNA, 15 bp, Homo sapiens
gaatgtagattttgg

SEQ ID NO: 539154 - DNA, 15 bp, Homo sapiens
aatgtagattttgga

SEQ ID NO: 539155 - DNA, 15 bp, Homo sapiens
atgtagattttggaa

SEQ ID NO: 539156 - DNA, 15 bp, Homo sapiens
tgtagattttggaag

SEQ ID NO: 539157 - DNA, 15 bp, Homo sapiens
gtagattttggaagg

SEQ ID NO: 539158 - DNA, 15 bp, Homo sapiens
tagattttggaagga

SEQ ID NO: 539159 - DNA, 15 bp, Homo sapiens
agattttggaaggag

SEQ ID NO: 539160 - DNA, 15 bp, Homo sapiens
gattttggaaggagc

SEQ ID NO: 539161 - DNA, 15 bp, Homo sapiens
attttggaaggagca

SEQ ID NO: 539162 - DNA, 15 bp, Homo sapiens
ttttggaaggagcac

SEQ ID NO: 539163 - DNA, 15 bp, Homo sapiens
tttggaaggagcaca

SEQ ID NO: 539164 - DNA, 15 bp, Homo sapiens
ttggaaggagcacac

SEQ ID NO: 539165 - DNA, 15 bp, Homo sapiens
tggaaggagcacact

SEQ ID NO: 539166 - DNA, 15 bp, Homo sapiens
ggaaggagcacactt

SEQ ID NO: 539167 - DNA, 15 bp, Homo sapiens
gaaggagcacacttc

SEQ ID NO: 539168 - DNA, 15 bp, Homo sapiens
aaggagcacacttca

SEQ ID NO: 539169 - DNA, 15 bp, Homo sapiens
aggagcacacttcag

SEQ ID NO: 539170 - DNA, 15 bp, Homo sapiens
ggagcacacttcaga

SEQ ID NO: 539171 - DNA, 15 bp, Homo sapiens
gagcacacttcagaa

SEQ ID NO: 539172 - DNA, 15 bp, Homo sapiens
agcacacttcagaat

SEQ ID NO: 539173 - DNA, 15 bp, Homo sapiens
gcacacttcagaatc

SEQ ID NO: 539174 - DNA, 15 bp, Homo sapiens
cacacttcagaatca

SEQ ID NO: 539175 - DNA, 15 bp, Homo sapiens
acacttcagaatcag

SEQ ID NO: 539176 - DNA, 15 bp, Homo sapiens
cacttcagaatcaga

SEQ ID NO: 539177 - DNA, 15 bp, Homo sapiens
acttcagaatcagat

SEQ ID NO: 539178 - DNA, 15 bp, Homo sapiens
cttcagaatcagatc

SEQ ID NO: 539179 - DNA, 15 bp, Homo sapiens
ttcagaatcagatct

SEQ ID NO: 539180 - DNA, 15 bp, Homo sapiens
tcagaatcagatctg

SEQ ID NO: 539181 - DNA, 15 bp, Homo sapiens
cagaatcagatctga

SEQ ID NO: 539182 - DNA, 15 bp, Homo sapiens
agaatcagatctgag

SEQ ID NO: 539183 - DNA, 15 bp, Homo sapiens
gaatcagatctgagt

SEQ ID NO: 539184 - DNA, 15 bp, Homo sapiens
aatcagatctgagtt

SEQ ID NO: 539185 - DNA, 15 bp, Homo sapiens
atcagatctgagttg

SEQ ID NO: 539186 - DNA, 15 bp, Homo sapiens
tcagatctgagttga

SEQ ID NO: 539187 - DNA, 15 bp, Homo sapiens
cagatctgagttgag

SEQ ID NO: 539188 - DNA, 15 bp, Homo sapiens
agatctgagttgaga

SEQ ID NO: 539189 - DNA, 15 bp, Homo sapiens
gatctgagttgagat

SEQ ID NO: 539190 - DNA, 15 bp, Homo sapiens
atctgagttgagatc

SEQ ID NO: 539191 - DNA, 15 bp, Homo sapiens
tctgagttgagatct

SEQ ID NO: 539192 - DNA, 15 bp, Homo sapiens
ctgagttgagatctt

SEQ ID NO: 539193 - DNA, 15 bp, Homo sapiens
tgagttgagatctta

SEQ ID NO: 539194 - DNA, 15 bp, Homo sapiens
gagttgagatcttag

SEQ ID NO: 539195 - DNA, 15 bp, Homo sapiens
agttgagatcttagc

SEQ ID NO: 539196 - DNA, 15 bp, Homo sapiens
gttgagatcttagct

SEQ ID NO: 539197 - DNA, 15 bp, Homo sapiens
ttgagatcttagctc

SEQ ID NO: 539198 - DNA, 15 bp, Homo sapiens
tgagatcttagctct

SEQ ID NO: 539199 - DNA, 15 bp, Homo sapiens
gagatcttagctctg

SEQ ID NO: 539200 - DNA, 15 bp, Homo sapiens
agatcttagctctgc

SEQ ID NO: 539201 - DNA, 15 bp, Homo sapiens
gatcttagctctgcc

SEQ ID NO: 539202 - DNA, 15 bp, Homo sapiens
atcttagctctgcca

SEQ ID NO: 539203 - DNA, 15 bp, Homo sapiens
tcttagctctgccac

SEQ ID NO: 539204 - DNA, 15 bp, Homo sapiens
cttagctctgccact

SEQ ID NO: 539205 - DNA, 15 bp, Homo sapiens
ttagctctgccactt

SEQ ID NO: 539206 - DNA, 15 bp, Homo sapiens
tagctctgccactta

SEQ ID NO: 539207 - DNA, 15 bp, Homo sapiens
agctctgccacttat

SEQ ID NO: 539208 - DNA, 15 bp, Homo sapiens
gctctgccacttata

SEQ ID NO: 539209 - DNA, 15 bp, Homo sapiens
ctctgccacttataa

SEQ ID NO: 539210 - DNA, 15 bp, Homo sapiens
tctgccacttataag

SEQ ID NO: 539211 - DNA, 15 bp, Homo sapiens
ctgccacttataagc

SEQ ID NO: 539212 - DNA, 15 bp, Homo sapiens
tgccacttataagct

SEQ ID NO: 539213 - DNA, 15 bp, Homo sapiens
gccacttataagctg

SEQ ID NO: 539214 - DNA, 15 bp, Homo sapiens
ccacttataagctgg

SEQ ID NO: 539215 - DNA, 15 bp, Homo sapiens
cacttataagctggg

SEQ ID NO: 539216 - DNA, 15 bp, Homo sapiens
acttataagctgggt

SEQ ID NO: 539217 - DNA, 15 bp, Homo sapiens
cttataagctgggta

SEQ ID NO: 539218 - DNA, 15 bp, Homo sapiens
ttataagctgggtaa

SEQ ID NO: 539219 - DNA, 15 bp, Homo sapiens
tataagctgggtaac

SEQ ID NO: 539220 - DNA, 15 bp, Homo sapiens
ataagctgggtaacc

SEQ ID NO: 539221 - DNA, 15 bp, Homo sapiens
taagctgggtaacct

SEQ ID NO: 539222 - DNA, 15 bp, Homo sapiens
aagctgggtaacctc

SEQ ID NO: 539223 - DNA, 15 bp, Homo sapiens
agctgggtaacctcc

SEQ ID NO: 539224 - DNA, 15 bp, Homo sapiens
gctgggtaacctccc

SEQ ID NO: 539225 - DNA, 15 bp, Homo sapiens
ctgggtaacctccca

SEQ ID NO: 539226 - DNA, 15 bp, Homo sapiens
tgggtaacctcccaa

SEQ ID NO: 539227 - DNA, 15 bp, Homo sapiens
gggtaacctcccaag

SEQ ID NO: 539228 - DNA, 15 bp, Homo sapiens
ggtaacctcccaagc

SEQ ID NO: 539229 - DNA, 15 bp, Homo sapiens
gtaacctcccaagcc

SEQ ID NO: 539230 - DNA, 15 bp, Homo sapiens
taacctcccaagcct

SEQ ID NO: 539231 - DNA, 15 bp, Homo sapiens
aacctcccaagcctc

SEQ ID NO: 539232 - DNA, 15 bp, Homo sapiens
acctcccaagcctca

SEQ ID NO: 539233 - DNA, 15 bp, Homo sapiens
cctcccaagcctcac

SEQ ID NO: 539234 - DNA, 15 bp, Homo sapiens
ctcccaagcctcacc

SEQ ID NO: 539235 - DNA, 15 bp, Homo sapiens
tcccaagcctcacct

SEQ ID NO: 539236 - DNA, 15 bp, Homo sapiens
cccaagcctcacctt

SEQ ID NO: 539237 - DNA, 15 bp, Homo sapiens
ccaagcctcaccttc

SEQ ID NO: 539238 - DNA, 15 bp, Homo sapiens
caagcctcaccttcc

SEQ ID NO: 539239 - DNA, 15 bp, Homo sapiens
aagcctcaccttcct

SEQ ID NO: 539240 - DNA, 15 bp, Homo sapiens
agcctcaccttcctg

SEQ ID NO: 539241 - DNA, 15 bp, Homo sapiens
gcctcaccttcctga

SEQ ID NO: 539242 - DNA, 15 bp, Homo sapiens
cctcaccttcctgaa

SEQ ID NO: 539243 - DNA, 15 bp, Homo sapiens
ctcaccttcctgaac

SEQ ID NO: 539244 - DNA, 15 bp, Homo sapiens
tcaccttcctgaact

SEQ ID NO: 539245 - DNA, 15 bp, Homo sapiens
caccttcctgaacta

SEQ ID NO: 539246 - DNA, 15 bp, Homo sapiens
accttcctgaactat

SEQ ID NO: 539247 - DNA, 15 bp, Homo sapiens
ccttcctgaactata

SEQ ID NO: 539248 - DNA, 15 bp, Homo sapiens
cttcctgaactataa

SEQ ID NO: 539249 - DNA, 15 bp, Homo sapiens
ttcctgaactataaa

SEQ ID NO: 539250 - DNA, 15 bp, Homo sapiens
tcctgaactataaaa

SEQ ID NO: 539251 - DNA, 15 bp, Homo sapiens
cctgaactataaaat

SEQ ID NO: 539252 - DNA, 15 bp, Homo sapiens
ctgaactataaaatg

SEQ ID NO: 539253 - DNA, 15 bp, Homo sapiens
tgaactataaaatga

SEQ ID NO: 539254 - DNA, 15 bp, Homo sapiens
gaactataaaatgag

SEQ ID NO: 539255 - DNA, 15 bp, Homo sapiens
aactataaaatgagg

SEQ ID NO: 539256 - DNA, 15 bp, Homo sapiens
actataaaatgagga

SEQ ID NO: 539257 - DNA, 15 bp, Homo sapiens
ctataaaatgaggaa

SEQ ID NO: 539258 - DNA, 15 bp, Homo sapiens
tataaaatgaggaaa

SEQ ID NO: 539259 - DNA, 15 bp, Homo sapiens
ataaaatgaggaaat

SEQ ID NO: 539260 - DNA, 15 bp, Homo sapiens
taaaatgaggaaatt

SEQ ID NO: 539261 - DNA, 15 bp, Homo sapiens
aaaatgaggaaatta

SEQ ID NO: 539262 - DNA, 15 bp, Homo sapiens
aaatgaggaaattat

SEQ ID NO: 539263 - DNA, 15 bp, Homo sapiens
aatgaggaaattatt

SEQ ID NO: 539264 - DNA, 15 bp, Homo sapiens
atgaggaaattattt

SEQ ID NO: 539265 - DNA, 15 bp, Homo sapiens
tgaggaaattatttc

SEQ ID NO: 539266 - DNA, 15 bp, Homo sapiens
gaggaaattatttca

SEQ ID NO: 539267 - DNA, 15 bp, Homo sapiens
aggaaattatttcat

SEQ ID NO: 539268 - DNA, 15 bp, Homo sapiens
ggaaattatttcata

SEQ ID NO: 539269 - DNA, 15 bp, Homo sapiens
gaaattatttcataa

SEQ ID NO: 539270 - DNA, 15 bp, Homo sapiens
aaattatttcataag

SEQ ID NO: 539271 - DNA, 15 bp, Homo sapiens
aattatttcataagg

SEQ ID NO: 539272 - DNA, 15 bp, Homo sapiens
attatttcataaggc

SEQ ID NO: 539273 - DNA, 15 bp, Homo sapiens
ttatttcataaggct

SEQ ID NO: 539274 - DNA, 15 bp, Homo sapiens
tatttcataaggcta

SEQ ID NO: 539275 - DNA, 15 bp, Homo sapiens
atttcataaggctat

SEQ ID NO: 539276 - DNA, 15 bp, Homo sapiens
tttcataaggctatg

SEQ ID NO: 539277 - DNA, 15 bp, Homo sapiens
ttcataaggctatgg

SEQ ID NO: 539278 - DNA, 15 bp, Homo sapiens
tcataaggctatggt

SEQ ID NO: 539279 - DNA, 15 bp, Homo sapiens
cataaggctatggtg

SEQ ID NO: 539280 - DNA, 15 bp, Homo sapiens
ataaggctatggtga

SEQ ID NO: 539281 - DNA, 15 bp, Homo sapiens
taaggctatggtgag

SEQ ID NO: 539282 - DNA, 15 bp, Homo sapiens
aaggctatggtgaga

SEQ ID NO: 539283 - DNA, 15 bp, Homo sapiens
aggctatggtgagaa

SEQ ID NO: 539284 - DNA, 15 bp, Homo sapiens
ggctatggtgagaat

SEQ ID NO: 539285 - DNA, 15 bp, Homo sapiens
gctatggtgagaatg

SEQ ID NO: 539286 - DNA, 15 bp, Homo sapiens
ctatggtgagaatga

SEQ ID NO: 539287 - DNA, 15 bp, Homo sapiens
tatggtgagaatgaa

SEQ ID NO: 539288 - DNA, 15 bp, Homo sapiens
atggtgagaatgaaa

SEQ ID NO: 539289 - DNA, 15 bp, Homo sapiens
tggtgagaatgaaac

SEQ ID NO: 539290 - DNA, 15 bp, Homo sapiens
ggtgagaatgaaacg

SEQ ID NO: 539291 - DNA, 15 bp, Homo sapiens
gtgagaatgaaacga

SEQ ID NO: 539292 - DNA, 15 bp, Homo sapiens
tgagaatgaaacgag

SEQ ID NO: 539293 - DNA, 15 bp, Homo sapiens
gagaatgaaacgaga

SEQ ID NO: 539294 - DNA, 15 bp, Homo sapiens
agaatgaaacgagat

SEQ ID NO: 539295 - DNA, 15 bp, Homo sapiens
gaatgaaacgagata

SEQ ID NO: 539296 - DNA, 15 bp, Homo sapiens
aatgaaacgagataa

SEQ ID NO: 539297 - DNA, 15 bp, Homo sapiens
atgaaacgagataac

SEQ ID NO: 539298 - DNA, 15 bp, Homo sapiens
tgaaacgagataact

SEQ ID NO: 539299 - DNA, 15 bp, Homo sapiens
gaaacgagataactt

SEQ ID NO: 539300 - DNA, 15 bp, Homo sapiens
aaacgagataactta

SEQ ID NO: 539301 - DNA, 15 bp, Homo sapiens
aacgagataacttac

SEQ ID NO: 539302 - DNA, 15 bp, Homo sapiens
acgagataacttacg

SEQ ID NO: 539303 - DNA, 15 bp, Homo sapiens
cgagataacttacgc

SEQ ID NO: 539304 - DNA, 15 bp, Homo sapiens
gagataacttacgca

SEQ ID NO: 539305 - DNA, 15 bp, Homo sapiens
agataacttacgcaa

SEQ ID NO: 539306 - DNA, 15 bp, Homo sapiens
gataacttacgcaaa

SEQ ID NO: 539307 - DNA, 15 bp, Homo sapiens
ataacttacgcaaag

SEQ ID NO: 539308 - DNA, 15 bp, Homo sapiens
taacttacgcaaagt

SEQ ID NO: 539309 - DNA, 15 bp, Homo sapiens
aacttacgcaaagtc

SEQ ID NO: 539310 - DNA, 15 bp, Homo sapiens
acttacgcaaagtcc

SEQ ID NO: 539311 - DNA, 15 bp, Homo sapiens
cttacgcaaagtcct

SEQ ID NO: 539312 - DNA, 15 bp, Homo sapiens
ttacgcaaagtcctt

SEQ ID NO: 539313 - DNA, 15 bp, Homo sapiens
tacgcaaagtcctta

SEQ ID NO: 539314 - DNA, 15 bp, Homo sapiens
acgcaaagtccttag

SEQ ID NO: 539315 - DNA, 15 bp, Homo sapiens
cgcaaagtccttagt

SEQ ID NO: 539316 - DNA, 15 bp, Homo sapiens
gcaaagtccttagtt

SEQ ID NO: 539317 - DNA, 15 bp, Homo sapiens
caaagtccttagttc

SEQ ID NO: 539318 - DNA, 15 bp, Homo sapiens
aaagtccttagttcc

SEQ ID NO: 539319 - DNA, 15 bp, Homo sapiens
aagtccttagttcca

SEQ ID NO: 539320 - DNA, 15 bp, Homo sapiens
agtccttagttccat

SEQ ID NO: 539321 - DNA, 15 bp, Homo sapiens
gtccttagttccata

SEQ ID NO: 539322 - DNA, 15 bp, Homo sapiens
tccttagttccatac

SEQ ID NO: 539323 - DNA, 15 bp, Homo sapiens
ccttagttccatacc

SEQ ID NO: 539324 - DNA, 15 bp, Homo sapiens
cttagttccatacct

SEQ ID NO: 539325 - DNA, 15 bp, Homo sapiens
ttagttccatacctg

SEQ ID NO: 539326 - DNA, 15 bp, Homo sapiens
tagttccatacctgg

SEQ ID NO: 539327 - DNA, 15 bp, Homo sapiens
agttccatacctggc

SEQ ID NO: 539328 - DNA, 15 bp, Homo sapiens
gttccatacctggca

SEQ ID NO: 539329 - DNA, 15 bp, Homo sapiens
ttccatacctggcaa

SEQ ID NO: 539330 - DNA, 15 bp, Homo sapiens
tccatacctggcaaa

SEQ ID NO: 539331 - DNA, 15 bp, Homo sapiens
ccatacctggcaaac

SEQ ID NO: 539332 - DNA, 15 bp, Homo sapiens
catacctggcaaaca

SEQ ID NO: 539333 - DNA, 15 bp, Homo sapiens
atacctggcaaacag

SEQ ID NO: 539334 - DNA, 15 bp, Homo sapiens
tacctggcaaacagt

SEQ ID NO: 539335 - DNA, 15 bp, Homo sapiens
acctggcaaacagta

SEQ ID NO: 539336 - DNA, 15 bp, Homo sapiens
cctggcaaacagtag

SEQ ID NO: 539337 - DNA, 15 bp, Homo sapiens
ctggcaaacagtagc

SEQ ID NO: 539338 - DNA, 15 bp, Homo sapiens
tggcaaacagtagct

SEQ ID NO: 539339 - DNA, 15 bp, Homo sapiens
ggcaaacagtagctc

SEQ ID NO: 539340 - DNA, 15 bp, Homo sapiens
gcaaacagtagctcc

SEQ ID NO: 539341 - DNA, 15 bp, Homo sapiens
caaacagtagctcct

SEQ ID NO: 539342 - DNA, 15 bp, Homo sapiens
aaacagtagctccta

SEQ ID NO: 539343 - DNA, 15 bp, Homo sapiens
aacagtagctcctaa

SEQ ID NO: 539344 - DNA, 15 bp, Homo sapiens
acagtagctcctaaa

SEQ ID NO: 539345 - DNA, 15 bp, Homo sapiens
cagtagctcctaaat

SEQ ID NO: 539346 - DNA, 15 bp, Homo sapiens
agtagctcctaaatc

SEQ ID NO: 539347 - DNA, 15 bp, Homo sapiens
gtagctcctaaatca

SEQ ID NO: 539348 - DNA, 15 bp, Homo sapiens
tagctcctaaatcaa

SEQ ID NO: 539349 - DNA, 15 bp, Homo sapiens
agctcctaaatcaat

SEQ ID NO: 539350 - DNA, 15 bp, Homo sapiens
gctcctaaatcaata

SEQ ID NO: 539351 - DNA, 15 bp, Homo sapiens
ctcctaaatcaataa

SEQ ID NO: 539352 - DNA, 15 bp, Homo sapiens
tcctaaatcaataat

SEQ ID NO: 539353 - DNA, 15 bp, Homo sapiens
cctaaatcaataatg

SEQ ID NO: 539354 - DNA, 15 bp, Homo sapiens
ctaaatcaataatgg

SEQ ID NO: 539355 - DNA, 15 bp, Homo sapiens
taaatcaataatggc

SEQ ID NO: 539356 - DNA, 15 bp, Homo sapiens
aaatcaataatggct

SEQ ID NO: 539357 - DNA, 15 bp, Homo sapiens
aatcaataatggcta

SEQ ID NO: 539358 - DNA, 15 bp, Homo sapiens
atcaataatggctag

SEQ ID NO: 539359 - DNA, 15 bp, Homo sapiens
tcaataatggctagt

SEQ ID NO: 539360 - DNA, 15 bp, Homo sapiens
caataatggctagta

SEQ ID NO: 539361 - DNA, 15 bp, Homo sapiens
aataatggctagtat

SEQ ID NO: 539362 - DNA, 15 bp, Homo sapiens
ataatggctagtatt

SEQ ID NO: 539363 - DNA, 15 bp, Homo sapiens
taatggctagtatta

SEQ ID NO: 539364 - DNA, 15 bp, Homo sapiens
aatggctagtattat

SEQ ID NO: 539365 - DNA, 15 bp, Homo sapiens
atggctagtattatg

SEQ ID NO: 539366 - DNA, 15 bp, Homo sapiens
tggctagtattatgt

SEQ ID NO: 539367 - DNA, 15 bp, Homo sapiens
ggctagtattatgta

SEQ ID NO: 539368 - DNA, 15 bp, Homo sapiens
gctagtattatgtat

SEQ ID NO: 539369 - DNA, 15 bp, Homo sapiens
ctagtattatgtata

SEQ ID NO: 539370 - DNA, 15 bp, Homo sapiens
tagtattatgtatat

SEQ ID NO: 539371 - DNA, 15 bp, Homo sapiens
agtattatgtatata

SEQ ID NO: 539372 - DNA, 15 bp, Homo sapiens
gtattatgtatatac

SEQ ID NO: 539373 - DNA, 15 bp, Homo sapiens
tattatgtatatact

SEQ ID NO: 539374 - DNA, 15 bp, Homo sapiens
attatgtatatactt

SEQ ID NO: 539375 - DNA, 15 bp, Homo sapiens
ttatgtatatacttt

SEQ ID NO: 539376 - DNA, 15 bp, Homo sapiens
tatgtatatacttta

SEQ ID NO: 539377 - DNA, 15 bp, Homo sapiens
atgtatatactttat

SEQ ID NO: 539378 - DNA, 15 bp, Homo sapiens
tgtatatactttata

SEQ ID NO: 539379 - DNA, 15 bp, Homo sapiens
gtatatactttatag

SEQ ID NO: 539380 - DNA, 15 bp, Homo sapiens
tatatactttatagc

SEQ ID NO: 539381 - DNA, 15 bp, Homo sapiens
atatactttatagct

SEQ ID NO: 539382 - DNA, 15 bp, Homo sapiens
tatactttatagctt

SEQ ID NO: 539383 - DNA, 15 bp, Homo sapiens
atactttatagctta

SEQ ID NO: 539384 - DNA, 15 bp, Homo sapiens
tactttatagcttat

SEQ ID NO: 539385 - DNA, 15 bp, Homo sapiens
actttatagcttatg

SEQ ID NO: 539386 - DNA, 15 bp, Homo sapiens
ctttatagcttatgg

SEQ ID NO: 539387 - DNA, 15 bp, Homo sapiens
tttatagcttatgga

SEQ ID NO: 539388 - DNA, 15 bp, Homo sapiens
ttatagcttatggat

SEQ ID NO: 539389 - DNA, 15 bp, Homo sapiens
tatagcttatggatt

SEQ ID NO: 539390 - DNA, 15 bp, Homo sapiens
atagcttatggatta

SEQ ID NO: 539391 - DNA, 15 bp, Homo sapiens
tagcttatggattag

SEQ ID NO: 539392 - DNA, 15 bp, Homo sapiens
agcttatggattaga

SEQ ID NO: 539393 - DNA, 15 bp, Homo sapiens
gcttatggattagaa

SEQ ID NO: 539394 - DNA, 15 bp, Homo sapiens
cttatggattagaaa

SEQ ID NO: 539395 - DNA, 15 bp, Homo sapiens
ttatggattagaaaa

SEQ ID NO: 539396 - DNA, 15 bp, Homo sapiens
tatggattagaaaac

SEQ ID NO: 539397 - DNA, 15 bp, Homo sapiens
atggattagaaaacc

SEQ ID NO: 539398 - DNA, 15 bp, Homo sapiens
tggattagaaaacca

SEQ ID NO: 539399 - DNA, 15 bp, Homo sapiens
ggattagaaaaccag

SEQ ID NO: 539400 - DNA, 15 bp, Homo sapiens
gattagaaaaccagc

SEQ ID NO: 539401 - DNA, 15 bp, Homo sapiens
attagaaaaccagcg

SEQ ID NO: 539402 - DNA, 15 bp, Homo sapiens
ttagaaaaccagcga

SEQ ID NO: 539403 - DNA, 15 bp, Homo sapiens
tagaaaaccagcgat

SEQ ID NO: 539404 - DNA, 15 bp, Homo sapiens
agaaaaccagcgata

SEQ ID NO: 539405 - DNA, 15 bp, Homo sapiens
gaaaaccagcgatag

SEQ ID NO: 539406 - DNA, 15 bp, Homo sapiens
aaaaccagcgatagc

SEQ ID NO: 539407 - DNA, 15 bp, Homo sapiens
aaaccagcgatagca

SEQ ID NO: 539408 - DNA, 15 bp, Homo sapiens
aaccagcgatagcaa

SEQ ID NO: 539409 - DNA, 15 bp, Homo sapiens
accagcgatagcaag

SEQ ID NO: 539410 - DNA, 15 bp, Homo sapiens
ccagcgatagcaagc

SEQ ID NO: 539411 - DNA, 15 bp, Homo sapiens
cagcgatagcaagcc

SEQ ID NO: 539412 - DNA, 15 bp, Homo sapiens
agcgatagcaagcca

SEQ ID NO: 539413 - DNA, 15 bp, Homo sapiens
gcgatagcaagccac

SEQ ID NO: 539414 - DNA, 15 bp, Homo sapiens
cgatagcaagccact

SEQ ID NO: 539415 - DNA, 15 bp, Homo sapiens
gatagcaagccactt

SEQ ID NO: 539416 - DNA, 15 bp, Homo sapiens
atagcaagccacttt

SEQ ID NO: 539417 - DNA, 15 bp, Homo sapiens
tagcaagccacttta

SEQ ID NO: 539418 - DNA, 15 bp, Homo sapiens
agcaagccactttaa

SEQ ID NO: 539419 - DNA, 15 bp, Homo sapiens
gcaagccactttaag

SEQ ID NO: 539420 - DNA, 15 bp, Homo sapiens
caagccactttaagt

SEQ ID NO: 539421 - DNA, 15 bp, Homo sapiens
aagccactttaagtc

SEQ ID NO: 539422 - DNA, 15 bp, Homo sapiens
agccactttaagtcc

SEQ ID NO: 539423 - DNA, 15 bp, Homo sapiens
gccactttaagtcct

SEQ ID NO: 539424 - DNA, 15 bp, Homo sapiens
ccactttaagtcctc

SEQ ID NO: 539425 - DNA, 15 bp, Homo sapiens
cactttaagtcctca

SEQ ID NO: 539426 - DNA, 15 bp, Homo sapiens
actttaagtcctcaa

SEQ ID NO: 539427 - DNA, 15 bp, Homo sapiens
ctttaagtcctcaag

SEQ ID NO: 539428 - DNA, 15 bp, Homo sapiens
tttaagtcctcaaga

SEQ ID NO: 539429 - DNA, 15 bp, Homo sapiens
ttaagtcctcaagag

SEQ ID NO: 539430 - DNA, 15 bp, Homo sapiens
taagtcctcaagagg

SEQ ID NO: 539431 - DNA, 15 bp, Homo sapiens
aagtcctcaagagga

SEQ ID NO: 539432 - DNA, 15 bp, Homo sapiens
agtcctcaagaggaa

SEQ ID NO: 539433 - DNA, 15 bp, Homo sapiens
gtcctcaagaggaag

SEQ ID NO: 539434 - DNA, 15 bp, Homo sapiens
tcctcaagaggaaga

SEQ ID NO: 539435 - DNA, 15 bp, Homo sapiens
cctcaagaggaagag

SEQ ID NO: 539436 - DNA, 15 bp, Homo sapiens
ctcaagaggaagagt

SEQ ID NO: 539437 - DNA, 15 bp, Homo sapiens
tcaagaggaagagtg

SEQ ID NO: 539438 - DNA, 15 bp, Homo sapiens
caagaggaagagtgt

SEQ ID NO: 539439 - DNA, 15 bp, Homo sapiens
aagaggaagagtgta

SEQ ID NO: 539440 - DNA, 15 bp, Homo sapiens
agaggaagagtgtaa

SEQ ID NO: 539441 - DNA, 15 bp, Homo sapiens
gaggaagagtgtaag

SEQ ID NO: 539442 - DNA, 15 bp, Homo sapiens
aggaagagtgtaagg

SEQ ID NO: 539443 - DNA, 15 bp, Homo sapiens
ggaagagtgtaagga

SEQ ID NO: 539444 - DNA, 15 bp, Homo sapiens
gaagagtgtaaggag

SEQ ID NO: 539445 - DNA, 15 bp, Homo sapiens
aagagtgtaaggagt

SEQ ID NO: 539446 - DNA, 15 bp, Homo sapiens
agagtgtaaggagtt

SEQ ID NO: 539447 - DNA, 15 bp, Homo sapiens
gagtgtaaggagttg

SEQ ID NO: 539448 - DNA, 15 bp, Homo sapiens
agtgtaaggagttgg

SEQ ID NO: 539449 - DNA, 15 bp, Homo sapiens
gtgtaaggagttggg

SEQ ID NO: 539450 - DNA, 15 bp, Homo sapiens
tgtaaggagttgggt

SEQ ID NO: 539451 - DNA, 15 bp, Homo sapiens
gtaaggagttgggtg

SEQ ID NO: 539452 - DNA, 15 bp, Homo sapiens
taaggagttgggtgg

SEQ ID NO: 539453 - DNA, 15 bp, Homo sapiens
aaggagttgggtggt

SEQ ID NO: 539454 - DNA, 15 bp, Homo sapiens
aggagttgggtggtc

SEQ ID NO: 539455 - DNA, 15 bp, Homo sapiens
ggagttgggtggtct

SEQ ID NO: 539456 - DNA, 15 bp, Homo sapiens
gagttgggtggtcta

SEQ ID NO: 539457 - DNA, 15 bp, Homo sapiens
agttgggtggtctag

SEQ ID NO: 539458 - DNA, 15 bp, Homo sapiens
gttgggtggtctaga

SEQ ID NO: 539459 - DNA, 15 bp, Homo sapiens
ttgggtggtctagat

SEQ ID NO: 539460 - DNA, 15 bp, Homo sapiens
tgggtggtctagatg

SEQ ID NO: 539461 - DNA, 15 bp, Homo sapiens
gggtggtctagatgc

SEQ ID NO: 539462 - DNA, 15 bp, Homo sapiens
ggtggtctagatgct

SEQ ID NO: 539463 - DNA, 15 bp, Homo sapiens
gtggtctagatgctg

SEQ ID NO: 539464 - DNA, 15 bp, Homo sapiens
tggtctagatgctga

SEQ ID NO: 539465 - DNA, 15 bp, Homo sapiens
ggtctagatgctgat

SEQ ID NO: 539466 - DNA, 15 bp, Homo sapiens
gtctagatgctgatc

SEQ ID NO: 539467 - DNA, 15 bp, Homo sapiens
tctagatgctgatct

SEQ ID NO: 539468 - DNA, 15 bp, Homo sapiens
ctagatgctgatctc

SEQ ID NO: 539469 - DNA, 15 bp, Homo sapiens
tagatgctgatctca

SEQ ID NO: 539470 - DNA, 15 bp, Homo sapiens
agatgctgatctcag

SEQ ID NO: 539471 - DNA, 15 bp, Homo sapiens
gatgctgatctcagc

SEQ ID NO: 539472 - DNA, 15 bp, Homo sapiens
atgctgatctcagca

SEQ ID NO: 539473 - DNA, 15 bp, Homo sapiens
tgctgatctcagcaa

SEQ ID NO: 539474 - DNA, 15 bp, Homo sapiens
gctgatctcagcaag

SEQ ID NO: 539475 - DNA, 15 bp, Homo sapiens
ctgatctcagcaagt

SEQ ID NO: 539476 - DNA, 15 bp, Homo sapiens
tgatctcagcaagtc

SEQ ID NO: 539477 - DNA, 15 bp, Homo sapiens
gatctcagcaagtca

SEQ ID NO: 539478 - DNA, 15 bp, Homo sapiens
atctcagcaagtcag

SEQ ID NO: 539479 - DNA, 15 bp, Homo sapiens
tctcagcaagtcagg

SEQ ID NO: 539480 - DNA, 15 bp, Homo sapiens
ctcagcaagtcaggc

SEQ ID NO: 539481 - DNA, 15 bp, Homo sapiens
tcagcaagtcaggcc

SEQ ID NO: 539482 - DNA, 15 bp, Homo sapiens
cagcaagtcaggccc

SEQ ID NO: 539483 - DNA, 15 bp, Homo sapiens
agcaagtcaggccct

SEQ ID NO: 539484 - DNA, 15 bp, Homo sapiens
gcaagtcaggccctg

SEQ ID NO: 539485 - DNA, 15 bp, Homo sapiens
caagtcaggccctgt

SEQ ID NO: 539486 - DNA, 15 bp, Homo sapiens
aagtcaggccctgtt

SEQ ID NO: 539487 - DNA, 15 bp, Homo sapiens
agtcaggccctgttt

SEQ ID NO: 539488 - DNA, 15 bp, Homo sapiens
gtcaggccctgtttc

SEQ ID NO: 539489 - DNA, 15 bp, Homo sapiens
tcaggccctgtttca

SEQ ID NO: 539490 - DNA, 15 bp, Homo sapiens
caggccctgtttcaa

SEQ ID NO: 539491 - DNA, 15 bp, Homo sapiens
aggccctgtttcaac

SEQ ID NO: 539492 - DNA, 15 bp, Homo sapiens
ggccctgtttcaacc

SEQ ID NO: 539493 - DNA, 15 bp, Homo sapiens
gccctgtttcaacct

SEQ ID NO: 539494 - DNA, 15 bp, Homo sapiens
ccctgtttcaacctt

SEQ ID NO: 539495 - DNA, 15 bp, Homo sapiens
cctgtttcaaccttt

SEQ ID NO: 539496 - DNA, 15 bp, Homo sapiens
ctgtttcaacctttc

SEQ ID NO: 539497 - DNA, 15 bp, Homo sapiens
tgtttcaacctttcc

SEQ ID NO: 539498 - DNA, 15 bp, Homo sapiens
gtttcaacctttccg

SEQ ID NO: 539499 - DNA, 15 bp, Homo sapiens
tttcaacctttccgt

SEQ ID NO: 539500 - DNA, 15 bp, Homo sapiens
ttcaacctttccgtg

SEQ ID NO: 539501 - DNA, 15 bp, Homo sapiens
tcaacctttccgtga

SEQ ID NO: 539502 - DNA, 15 bp, Homo sapiens
caacctttccgtgag

SEQ ID NO: 539503 - DNA, 15 bp, Homo sapiens
aacctttccgtgaga

SEQ ID NO: 539504 - DNA, 15 bp, Homo sapiens
acctttccgtgagat

SEQ ID NO: 539505 - DNA, 15 bp, Homo sapiens
cctttccgtgagatg

SEQ ID NO: 539506 - DNA, 15 bp, Homo sapiens
ctttccgtgagatgc

SEQ ID NO: 539507 - DNA, 15 bp, Homo sapiens
tttccgtgagatgca

SEQ ID NO: 539508 - DNA, 15 bp, Homo sapiens
ttccgtgagatgcag

SEQ ID NO: 539509 - DNA, 15 bp, Homo sapiens
tccgtgagatgcagg

SEQ ID NO: 539510 - DNA, 15 bp, Homo sapiens
ccgtgagatgcaggc

SEQ ID NO: 539511 - DNA, 15 bp, Homo sapiens
cgtgagatgcaggca

SEQ ID NO: 539512 - DNA, 15 bp, Homo sapiens
gtgagatgcaggcag

SEQ ID NO: 539513 - DNA, 15 bp, Homo sapiens
tgagatgcaggcagc

SEQ ID NO: 539514 - DNA, 15 bp, Homo sapiens
gagatgcaggcagcc

SEQ ID NO: 539515 - DNA, 15 bp, Homo sapiens
agatgcaggcagcca

SEQ ID NO: 539516 - DNA, 15 bp, Homo sapiens
gatgcaggcagccag

SEQ ID NO: 539517 - DNA, 15 bp, Homo sapiens
atgcaggcagccagg

SEQ ID NO: 539518 - DNA, 15 bp, Homo sapiens
tgcaggcagccagga

SEQ ID NO: 539519 - DNA, 15 bp, Homo sapiens
gcaggcagccaggac

SEQ ID NO: 539520 - DNA, 15 bp, Homo sapiens
caggcagccaggacc

SEQ ID NO: 539521 - DNA, 15 bp, Homo sapiens
aggcagccaggacct

SEQ ID NO: 539522 - DNA, 15 bp, Homo sapiens
ggcagccaggacctg

SEQ ID NO: 539523 - DNA, 15 bp, Homo sapiens
gcagccaggacctgg

SEQ ID NO: 539524 - DNA, 15 bp, Homo sapiens
cagccaggacctgga

SEQ ID NO: 539525 - DNA, 15 bp, Homo sapiens
agccaggacctggac

SEQ ID NO: 539526 - DNA, 15 bp, Homo sapiens
gccaggacctggaca

SEQ ID NO: 539527 - DNA, 15 bp, Homo sapiens
ccaggacctggacag

SEQ ID NO: 539528 - DNA, 15 bp, Homo sapiens
caggacctggacaga

SEQ ID NO: 539529 - DNA, 15 bp, Homo sapiens
aggacctggacagag

SEQ ID NO: 539530 - DNA, 15 bp, Homo sapiens
ggacctggacagagc

SEQ ID NO: 539531 - DNA, 15 bp, Homo sapiens
gacctggacagagcc

SEQ ID NO: 539532 - DNA, 15 bp, Homo sapiens
acctggacagagccc

SEQ ID NO: 539533 - DNA, 15 bp, Homo sapiens
cctggacagagccca

SEQ ID NO: 539534 - DNA, 15 bp, Homo sapiens
ctggacagagcccaa

SEQ ID NO: 539535 - DNA, 15 bp, Homo sapiens
tggacagagcccaag

SEQ ID NO: 539536 - DNA, 15 bp, Homo sapiens
ggacagagcccaagg

SEQ ID NO: 539537 - DNA, 15 bp, Homo sapiens
gacagagcccaaggg

SEQ ID NO: 539538 - DNA, 15 bp, Homo sapiens
acagagcccaagggc

SEQ ID NO: 539539 - DNA, 15 bp, Homo sapiens
cagagcccaagggcc

SEQ ID NO: 539540 - DNA, 15 bp, Homo sapiens
agagcccaagggcca

SEQ ID NO: 539541 - DNA, 15 bp, Homo sapiens
gagcccaagggccag

SEQ ID NO: 539542 - DNA, 15 bp, Homo sapiens
agcccaagggccagg

SEQ ID NO: 539543 - DNA, 15 bp, Homo sapiens
gcccaagggccaggt

SEQ ID NO: 539544 - DNA, 15 bp, Homo sapiens
cccaagggccaggtc

SEQ ID NO: 539545 - DNA, 15 bp, Homo sapiens
ccaagggccaggtct

SEQ ID NO: 539546 - DNA, 15 bp, Homo sapiens
caagggccaggtcta

SEQ ID NO: 539547 - DNA, 15 bp, Homo sapiens
aagggccaggtctag

SEQ ID NO: 539548 - DNA, 15 bp, Homo sapiens
agggccaggtctaga

SEQ ID NO: 539549 - DNA, 15 bp, Homo sapiens
gggccaggtctagag

SEQ ID NO: 539550 - DNA, 15 bp, Homo sapiens
ggccaggtctagagt

SEQ ID NO: 539551 - DNA, 15 bp, Homo sapiens
gccaggtctagagta

SEQ ID NO: 539552 - DNA, 15 bp, Homo sapiens
ccaggtctagagtag

SEQ ID NO: 539553 - DNA, 15 bp, Homo sapiens
caggtctagagtagt

SEQ ID NO: 539554 - DNA, 15 bp, Homo sapiens
aggtctagagtagtg

SEQ ID NO: 539555 - DNA, 15 bp, Homo sapiens
ggtctagagtagtgg

SEQ ID NO: 539556 - DNA, 15 bp, Homo sapiens
gtctagagtagtggt

SEQ ID NO: 539557 - DNA, 15 bp, Homo sapiens
tctagagtagtggtt

SEQ ID NO: 539558 - DNA, 15 bp, Homo sapiens
ctagagtagtggttg

SEQ ID NO: 539559 - DNA, 15 bp, Homo sapiens
tagagtagtggttgc

SEQ ID NO: 539560 - DNA, 15 bp, Homo sapiens
agagtagtggttgcg

SEQ ID NO: 539561 - DNA, 15 bp, Homo sapiens
gagtagtggttgcgg

SEQ ID NO: 539562 - DNA, 15 bp, Homo sapiens
agtagtggttgcgga

SEQ ID NO: 539563 - DNA, 15 bp, Homo sapiens
gtagtggttgcggaa

SEQ ID NO: 539564 - DNA, 15 bp, Homo sapiens
tagtggttgcggaaa

SEQ ID NO: 539565 - DNA, 15 bp, Homo sapiens
agtggttgcggaaag

SEQ ID NO: 539566 - DNA, 15 bp, Homo sapiens
gtggttgcggaaagg

SEQ ID NO: 539567 - DNA, 15 bp, Homo sapiens
tggttgcggaaaggg

SEQ ID NO: 539568 - DNA, 15 bp, Homo sapiens
ggttgcggaaagggc

SEQ ID NO: 539569 - DNA, 15 bp, Homo sapiens
gttgcggaaagggct

SEQ ID NO: 539570 - DNA, 15 bp, Homo sapiens
ttgcggaaagggctg

SEQ ID NO: 539571 - DNA, 15 bp, Homo sapiens
tgcggaaagggctga

SEQ ID NO: 539572 - DNA, 15 bp, Homo sapiens
gcggaaagggctgat

SEQ ID NO: 539573 - DNA, 15 bp, Homo sapiens
cggaaagggctgatg

SEQ ID NO: 539574 - DNA, 15 bp, Homo sapiens
ggaaagggctgatgt

SEQ ID NO: 539575 - DNA, 15 bp, Homo sapiens
gaaagggctgatgta

SEQ ID NO: 539576 - DNA, 15 bp, Homo sapiens
aaagggctgatgtat

SEQ ID NO: 539577 - DNA, 15 bp, Homo sapiens
aagggctgatgtatc

SEQ ID NO: 539578 - DNA, 15 bp, Homo sapiens
agggctgatgtatca

SEQ ID NO: 539579 - DNA, 15 bp, Homo sapiens
gggctgatgtatcag

SEQ ID NO: 539580 - DNA, 15 bp, Homo sapiens
ggctgatgtatcagc

SEQ ID NO: 539581 - DNA, 15 bp, Homo sapiens
gctgatgtatcagct

SEQ ID NO: 539582 - DNA, 15 bp, Homo sapiens
ctgatgtatcagctt

SEQ ID NO: 539583 - DNA, 15 bp, Homo sapiens
tgatgtatcagcttc

SEQ ID NO: 539584 - DNA, 15 bp, Homo sapiens
gatgtatcagcttca

SEQ ID NO: 539585 - DNA, 15 bp, Homo sapiens
atgtatcagcttcaa

SEQ ID NO: 539586 - DNA, 15 bp, Homo sapiens
tgtatcagcttcaaa

SEQ ID NO: 539587 - DNA, 15 bp, Homo sapiens
gtatcagcttcaaag

SEQ ID NO: 539588 - DNA, 15 bp, Homo sapiens
tatcagcttcaaagg

SEQ ID NO: 539589 - DNA, 15 bp, Homo sapiens
atcagcttcaaaggc

SEQ ID NO: 539590 - DNA, 15 bp, Homo sapiens
tcagcttcaaaggct

SEQ ID NO: 539591 - DNA, 15 bp, Homo sapiens
cagcttcaaaggctg

SEQ ID NO: 539592 - DNA, 15 bp, Homo sapiens
agcttcaaaggctga

SEQ ID NO: 539593 - DNA, 15 bp, Homo sapiens
gcttcaaaggctgac

SEQ ID NO: 539594 - DNA, 15 bp, Homo sapiens
cttcaaaggctgact

SEQ ID NO: 539595 - DNA, 15 bp, Homo sapiens
ttcaaaggctgactt

SEQ ID NO: 539596 - DNA, 15 bp, Homo sapiens
tcaaaggctgacttg

SEQ ID NO: 539597 - DNA, 15 bp, Homo sapiens
caaaggctgacttgc

SEQ ID NO: 539598 - DNA, 15 bp, Homo sapiens
aaaggctgacttgct

SEQ ID NO: 539599 - DNA, 15 bp, Homo sapiens
aaggctgacttgctg

SEQ ID NO: 539600 - DNA, 15 bp, Homo sapiens
aggctgacttgctgc

SEQ ID NO: 539601 - DNA, 15 bp, Homo sapiens
ggctgacttgctgca

SEQ ID NO: 539602 - DNA, 15 bp, Homo sapiens
gctgacttgctgcag

SEQ ID NO: 539603 - DNA, 15 bp, Homo sapiens
ctgacttgctgcagc

SEQ ID NO: 539604 - DNA, 15 bp, Homo sapiens
tgacttgctgcagcc

SEQ ID NO: 539605 - DNA, 15 bp, Homo sapiens
gacttgctgcagccc

SEQ ID NO: 539606 - DNA, 15 bp, Homo sapiens
acttgctgcagccca

SEQ ID NO: 539607 - DNA, 15 bp, Homo sapiens
cttgctgcagcccaa

SEQ ID NO: 539608 - DNA, 15 bp, Homo sapiens
ttgctgcagcccaag

SEQ ID NO: 539609 - DNA, 15 bp, Homo sapiens
tgctgcagcccaaga

SEQ ID NO: 539610 - DNA, 15 bp, Homo sapiens
gctgcagcccaagac

SEQ ID NO: 539611 - DNA, 15 bp, Homo sapiens
ctgcagcccaagacc

SEQ ID NO: 539612 - DNA, 15 bp, Homo sapiens
tgcagcccaagacct

SEQ ID NO: 539613 - DNA, 15 bp, Homo sapiens
gcagcccaagacctt

SEQ ID NO: 539614 - DNA, 15 bp, Homo sapiens
cagcccaagaccttg

SEQ ID NO: 539615 - DNA, 15 bp, Homo sapiens
agcccaagaccttgg

SEQ ID NO: 539616 - DNA, 15 bp, Homo sapiens
gcccaagaccttggt

SEQ ID NO: 539617 - DNA, 15 bp, Homo sapiens
cccaagaccttggta

SEQ ID NO: 539618 - DNA, 15 bp, Homo sapiens
ccaagaccttggtac

SEQ ID NO: 539619 - DNA, 15 bp, Homo sapiens
caagaccttggtaca

SEQ ID NO: 539620 - DNA, 15 bp, Homo sapiens
aagaccttggtacat

SEQ ID NO: 539621 - DNA, 15 bp, Homo sapiens
agaccttggtacata

SEQ ID NO: 539622 - DNA, 15 bp, Homo sapiens
gaccttggtacatag

SEQ ID NO: 539623 - DNA, 15 bp, Homo sapiens
accttggtacataga

SEQ ID NO: 539624 - DNA, 15 bp, Homo sapiens
ccttggtacatagat

SEQ ID NO: 539625 - DNA, 15 bp, Homo sapiens
cttggtacatagatt

SEQ ID NO: 539626 - DNA, 15 bp, Homo sapiens
ttggtacatagattt

SEQ ID NO: 539627 - DNA, 15 bp, Homo sapiens
tggtacatagattta

SEQ ID NO: 539628 - DNA, 15 bp, Homo sapiens
ggtacatagatttaa

SEQ ID NO: 539629 - DNA, 15 bp, Homo sapiens
gtacatagatttaag

SEQ ID NO: 539630 - DNA, 15 bp, Homo sapiens
tacatagatttaagt

SEQ ID NO: 539631 - DNA, 15 bp, Homo sapiens
acatagatttaagtc

SEQ ID NO: 539632 - DNA, 15 bp, Homo sapiens
catagatttaagtcc

SEQ ID NO: 539633 - DNA, 15 bp, Homo sapiens
atagatttaagtccc

SEQ ID NO: 539634 - DNA, 15 bp, Homo sapiens
tagatttaagtccca

SEQ ID NO: 539635 - DNA, 15 bp, Homo sapiens
agatttaagtcccat

SEQ ID NO: 539636 - DNA, 15 bp, Homo sapiens
gatttaagtcccatc

SEQ ID NO: 539637 - DNA, 15 bp, Homo sapiens
atttaagtcccatct

SEQ ID NO: 539638 - DNA, 15 bp, Homo sapiens
tttaagtcccatctg

SEQ ID NO: 539639 - DNA, 15 bp, Homo sapiens
ttaagtcccatctga

SEQ ID NO: 539640 - DNA, 15 bp, Homo sapiens
taagtcccatctgat

SEQ ID NO: 539641 - DNA, 15 bp, Homo sapiens
aagtcccatctgatt

SEQ ID NO: 539642 - DNA, 15 bp, Homo sapiens
agtcccatctgattg

SEQ ID NO: 539643 - DNA, 15 bp, Homo sapiens
gtcccatctgattga

SEQ ID NO: 539644 - DNA, 15 bp, Homo sapiens
tcccatctgattgag

SEQ ID NO: 539645 - DNA, 15 bp, Homo sapiens
cccatctgattgaga

SEQ ID NO: 539646 - DNA, 15 bp, Homo sapiens
ccatctgattgagaa

SEQ ID NO: 539647 - DNA, 15 bp, Homo sapiens
catctgattgagaag

SEQ ID NO: 539648 - DNA, 15 bp, Homo sapiens
atctgattgagaagg

SEQ ID NO: 539649 - DNA, 15 bp, Homo sapiens
tctgattgagaagga

SEQ ID NO: 539650 - DNA, 15 bp, Homo sapiens
ctgattgagaaggag

SEQ ID NO: 539651 - DNA, 15 bp, Homo sapiens
tgattgagaaggagg

SEQ ID NO: 539652 - DNA, 15 bp, Homo sapiens
gattgagaaggaggt

SEQ ID NO: 539653 - DNA, 15 bp, Homo sapiens
attgagaaggaggtg

SEQ ID NO: 539654 - DNA, 15 bp, Homo sapiens
ttgagaaggaggtgc

SEQ ID NO: 539655 - DNA, 15 bp, Homo sapiens
tgagaaggaggtgca

SEQ ID NO: 539656 - DNA, 15 bp, Homo sapiens
gagaaggaggtgcat

SEQ ID NO: 539657 - DNA, 15 bp, Homo sapiens
agaaggaggtgcatt

SEQ ID NO: 539658 - DNA, 15 bp, Homo sapiens
gaaggaggtgcattc

SEQ ID NO: 539659 - DNA, 15 bp, Homo sapiens
aaggaggtgcattca

SEQ ID NO: 539660 - DNA, 15 bp, Homo sapiens
aggaggtgcattcag

SEQ ID NO: 539661 - DNA, 15 bp, Homo sapiens
ggaggtgcattcagc

SEQ ID NO: 539662 - DNA, 15 bp, Homo sapiens
gaggtgcattcagcc

SEQ ID NO: 539663 - DNA, 15 bp, Homo sapiens
aggtgcattcagcca

SEQ ID NO: 539664 - DNA, 15 bp, Homo sapiens
ggtgcattcagccac

SEQ ID NO: 539665 - DNA, 15 bp, Homo sapiens
gtgcattcagccaca

SEQ ID NO: 539666 - DNA, 15 bp, Homo sapiens
tgcattcagccacat

SEQ ID NO: 539667 - DNA, 15 bp, Homo sapiens
gcattcagccacatg

SEQ ID NO: 539668 - DNA, 15 bp, Homo sapiens
cattcagccacatgt

SEQ ID NO: 539669 - DNA, 15 bp, Homo sapiens
attcagccacatgtg

SEQ ID NO: 539670 - DNA, 15 bp, Homo sapiens
ttcagccacatgtgt

SEQ ID NO: 539671 - DNA, 15 bp, Homo sapiens
tcagccacatgtgtt

SEQ ID NO: 539672 - DNA, 15 bp, Homo sapiens
cagccacatgtgttc

SEQ ID NO: 539673 - DNA, 15 bp, Homo sapiens
agccacatgtgttca

SEQ ID NO: 539674 - DNA, 15 bp, Homo sapiens
gccacatgtgttcat

SEQ ID NO: 539675 - DNA, 15 bp, Homo sapiens
ccacatgtgttcata

SEQ ID NO: 539676 - DNA, 15 bp, Homo sapiens
cacatgtgttcataa

SEQ ID NO: 539677 - DNA, 15 bp, Homo sapiens
acatgtgttcataaa

SEQ ID NO: 539678 - DNA, 15 bp, Homo sapiens
catgtgttcataaac

SEQ ID NO: 539679 - DNA, 15 bp, Homo sapiens
atgtgttcataaaca

SEQ ID NO: 539680 - DNA, 15 bp, Homo sapiens
tgtgttcataaacac

SEQ ID NO: 539681 - DNA, 15 bp, Homo sapiens
gtgttcataaacact

SEQ ID NO: 539682 - DNA, 15 bp, Homo sapiens
tgttcataaacactt

SEQ ID NO: 539683 - DNA, 15 bp, Homo sapiens
gttcataaacactta

SEQ ID NO: 539684 - DNA, 15 bp, Homo sapiens
ttcataaacacttaa

SEQ ID NO: 539685 - DNA, 15 bp, Homo sapiens
tcataaacacttaac

SEQ ID NO: 539686 - DNA, 15 bp, Homo sapiens
cataaacacttaaca

SEQ ID NO: 539687 - DNA, 15 bp, Homo sapiens
ataaacacttaacaa

SEQ ID NO: 539688 - DNA, 15 bp, Homo sapiens
taaacacttaacaac

SEQ ID NO: 539689 - DNA, 15 bp, Homo sapiens
aaacacttaacaact

SEQ ID NO: 539690 - DNA, 15 bp, Homo sapiens
aacacttaacaactg

SEQ ID NO: 539691 - DNA, 15 bp, Homo sapiens
acacttaacaactgg

SEQ ID NO: 539692 - DNA, 15 bp, Homo sapiens
cacttaacaactggc

SEQ ID NO: 539693 - DNA, 15 bp, Homo sapiens
acttaacaactggct

SEQ ID NO: 539694 - DNA, 15 bp, Homo sapiens
cttaacaactggctc

SEQ ID NO: 539695 - DNA, 15 bp, Homo sapiens
ttaacaactggctct

SEQ ID NO: 539696 - DNA, 15 bp, Homo sapiens
taacaactggctctc

SEQ ID NO: 539697 - DNA, 15 bp, Homo sapiens
aacaactggctctcc

SEQ ID NO: 539698 - DNA, 15 bp, Homo sapiens
acaactggctctcca

SEQ ID NO: 539699 - DNA, 15 bp, Homo sapiens
caactggctctccag

SEQ ID NO: 539700 - DNA, 15 bp, Homo sapiens
aactggctctccagg

SEQ ID NO: 539701 - DNA, 15 bp, Homo sapiens
actggctctccaggt

SEQ ID NO: 539702 - DNA, 15 bp, Homo sapiens
ctggctctccaggtt

SEQ ID NO: 539703 - DNA, 15 bp, Homo sapiens
tggctctccaggttt

SEQ ID NO: 539704 - DNA, 15 bp, Homo sapiens
ggctctccaggtttg

SEQ ID NO: 539705 - DNA, 15 bp, Homo sapiens
gctctccaggtttgt

SEQ ID NO: 539706 - DNA, 15 bp, Homo sapiens
ctctccaggtttgtg

SEQ ID NO: 539707 - DNA, 15 bp, Homo sapiens
tctccaggtttgtgt

SEQ ID NO: 539708 - DNA, 15 bp, Homo sapiens
ctccaggtttgtgta

SEQ ID NO: 539709 - DNA, 15 bp, Homo sapiens
tccaggtttgtgtaa

SEQ ID NO: 539710 - DNA, 15 bp, Homo sapiens
ccaggtttgtgtaat

SEQ ID NO: 539711 - DNA, 15 bp, Homo sapiens
caggtttgtgtaatt

SEQ ID NO: 539712 - DNA, 15 bp, Homo sapiens
aggtttgtgtaattt

SEQ ID NO: 539713 - DNA, 15 bp, Homo sapiens
ggtttgtgtaatttg

SEQ ID NO: 539714 - DNA, 15 bp, Homo sapiens
gtttgtgtaatttgc

SEQ ID NO: 539715 - DNA, 15 bp, Homo sapiens
tttgtgtaatttgca

SEQ ID NO: 539716 - DNA, 15 bp, Homo sapiens
ttgtgtaatttgcac

SEQ ID NO: 539717 - DNA, 15 bp, Homo sapiens
tgtgtaatttgcact

SEQ ID NO: 539718 - DNA, 15 bp, Homo sapiens
gtgtaatttgcactt

SEQ ID NO: 539719 - DNA, 15 bp, Homo sapiens
tgtaatttgcactta

SEQ ID NO: 539720 - DNA, 15 bp, Homo sapiens
gtaatttgcacttat

SEQ ID NO: 539721 - DNA, 15 bp, Homo sapiens
taatttgcacttatt

SEQ ID NO: 539722 - DNA, 15 bp, Homo sapiens
aatttgcacttattt

SEQ ID NO: 539723 - DNA, 15 bp, Homo sapiens
atttgcacttatttc

SEQ ID NO: 539724 - DNA, 15 bp, Homo sapiens
tttgcacttatttca

SEQ ID NO: 539725 - DNA, 15 bp, Homo sapiens
ttgcacttatttcat

SEQ ID NO: 539726 - DNA, 15 bp, Homo sapiens
tgcacttatttcatg

SEQ ID NO: 539727 - DNA, 15 bp, Homo sapiens
gcacttatttcatga

SEQ ID NO: 539728 - DNA, 15 bp, Homo sapiens
cacttatttcatgat

SEQ ID NO: 539729 - DNA, 15 bp, Homo sapiens
acttatttcatgatg

SEQ ID NO: 539730 - DNA, 15 bp, Homo sapiens
cttatttcatgatgc

SEQ ID NO: 539731 - DNA, 15 bp, Homo sapiens
ttatttcatgatgcc

SEQ ID NO: 539732 - DNA, 15 bp, Homo sapiens
tatttcatgatgccc

SEQ ID NO: 539733 - DNA, 15 bp, Homo sapiens
atttcatgatgccca

SEQ ID NO: 539734 - DNA, 15 bp, Homo sapiens
tttcatgatgcccag

SEQ ID NO: 539735 - DNA, 15 bp, Homo sapiens
ttcatgatgcccagc

SEQ ID NO: 539736 - DNA, 15 bp, Homo sapiens
tcatgatgcccagct

SEQ ID NO: 539737 - DNA, 15 bp, Homo sapiens
catgatgcccagctt

SEQ ID NO: 539738 - DNA, 15 bp, Homo sapiens
atgatgcccagcttc

SEQ ID NO: 539739 - DNA, 15 bp, Homo sapiens
tgatgcccagcttca

SEQ ID NO: 539740 - DNA, 15 bp, Homo sapiens
gatgcccagcttcaa

SEQ ID NO: 539741 - DNA, 15 bp, Homo sapiens
atgcccagcttcaag

SEQ ID NO: 539742 - DNA, 15 bp, Homo sapiens
tgcccagcttcaagc

SEQ ID NO: 539743 - DNA, 15 bp, Homo sapiens
gcccagcttcaagct

SEQ ID NO: 539744 - DNA, 15 bp, Homo sapiens
cccagcttcaagctc

SEQ ID NO: 539745 - DNA, 15 bp, Homo sapiens
ccagcttcaagctcc

SEQ ID NO: 539746 - DNA, 15 bp, Homo sapiens
cagcttcaagctccc

SEQ ID NO: 539747 - DNA, 15 bp, Homo sapiens
agcttcaagctccca

SEQ ID NO: 539748 - DNA, 15 bp, Homo sapiens
gcttcaagctcccac

SEQ ID NO: 539749 - DNA, 15 bp, Homo sapiens
cttcaagctcccact

SEQ ID NO: 539750 - DNA, 15 bp, Homo sapiens
ttcaagctcccactg

SEQ ID NO: 539751 - DNA, 15 bp, Homo sapiens
tcaagctcccactgg

SEQ ID NO: 539752 - DNA, 15 bp, Homo sapiens
caagctcccactggg

SEQ ID NO: 539753 - DNA, 15 bp, Homo sapiens
aagctcccactgggc

SEQ ID NO: 539754 - DNA, 15 bp, Homo sapiens
agctcccactgggca

SEQ ID NO: 539755 - DNA, 15 bp, Homo sapiens
gctcccactgggcat

SEQ ID NO: 539756 - DNA, 15 bp, Homo sapiens
ctcccactgggcatg

SEQ ID NO: 539757 - DNA, 15 bp, Homo sapiens
tcccactgggcatgc

SEQ ID NO: 539758 - DNA, 15 bp, Homo sapiens
cccactgggcatgca

SEQ ID NO: 539759 - DNA, 15 bp, Homo sapiens
ccactgggcatgcag

SEQ ID NO: 539760 - DNA, 15 bp, Homo sapiens
cactgggcatgcagt

SEQ ID NO: 539761 - DNA, 15 bp, Homo sapiens
actgggcatgcagtt

SEQ ID NO: 539762 - DNA, 15 bp, Homo sapiens
ctgggcatgcagttg

SEQ ID NO: 539763 - DNA, 15 bp, Homo sapiens
tgggcatgcagttga

SEQ ID NO: 539764 - DNA, 15 bp, Homo sapiens
gggcatgcagttgag

SEQ ID NO: 539765 - DNA, 15 bp, Homo sapiens
ggcatgcagttgaga

SEQ ID NO: 539766 - DNA, 15 bp, Homo sapiens
gcatgcagttgagaa

SEQ ID NO: 539767 - DNA, 15 bp, Homo sapiens
catgcagttgagaag

SEQ ID NO: 539768 - DNA, 15 bp, Homo sapiens
atgcagttgagaaga

SEQ ID NO: 539769 - DNA, 15 bp, Homo sapiens
tgcagttgagaagag

SEQ ID NO: 539770 - DNA, 15 bp, Homo sapiens
gcagttgagaagaga

SEQ ID NO: 539771 - DNA, 15 bp, Homo sapiens
cagttgagaagagat

SEQ ID NO: 539772 - DNA, 15 bp, Homo sapiens
agttgagaagagatg

SEQ ID NO: 539773 - DNA, 15 bp, Homo sapiens
gttgagaagagatgc

SEQ ID NO: 539774 - DNA, 15 bp, Homo sapiens
ttgagaagagatgcg

SEQ ID NO: 539775 - DNA, 15 bp, Homo sapiens
tgagaagagatgcgt

SEQ ID NO: 539776 - DNA, 15 bp, Homo sapiens
gagaagagatgcgtg

SEQ ID NO: 539777 - DNA, 15 bp, Homo sapiens
agaagagatgcgtgc

SEQ ID NO: 539778 - DNA, 15 bp, Homo sapiens
gaagagatgcgtgca

SEQ ID NO: 539779 - DNA, 15 bp, Homo sapiens
aagagatgcgtgcaa

SEQ ID NO: 539780 - DNA, 15 bp, Homo sapiens
agagatgcgtgcaac

SEQ ID NO: 539781 - DNA, 15 bp, Homo sapiens
gagatgcgtgcaact

SEQ ID NO: 539782 - DNA, 15 bp, Homo sapiens
agatgcgtgcaactg

SEQ ID NO: 539783 - DNA, 15 bp, Homo sapiens
gatgcgtgcaactgg

SEQ ID NO: 539784 - DNA, 15 bp, Homo sapiens
atgcgtgcaactggc

SEQ ID NO: 539785 - DNA, 15 bp, Homo sapiens
tgcgtgcaactggct

SEQ ID NO: 539786 - DNA, 15 bp, Homo sapiens
gcgtgcaactggctc

SEQ ID NO: 539787 - DNA, 15 bp, Homo sapiens
cgtgcaactggctct

SEQ ID NO: 539788 - DNA, 15 bp, Homo sapiens
gtgcaactggctctc

SEQ ID NO: 539789 - DNA, 15 bp, Homo sapiens
tgcaactggctctca

SEQ ID NO: 539790 - DNA, 15 bp, Homo sapiens
gcaactggctctcag

SEQ ID NO: 539791 - DNA, 15 bp, Homo sapiens
caactggctctcagg

SEQ ID NO: 539792 - DNA, 15 bp, Homo sapiens
aactggctctcagga

SEQ ID NO: 539793 - DNA, 15 bp, Homo sapiens
actggctctcaggaa

SEQ ID NO: 539794 - DNA, 15 bp, Homo sapiens
ctggctctcaggaac

SEQ ID NO: 539795 - DNA, 15 bp, Homo sapiens
tggctctcaggaacc

SEQ ID NO: 539796 - DNA, 15 bp, Homo sapiens
ggctctcaggaacct

SEQ ID NO: 539797 - DNA, 15 bp, Homo sapiens
gctctcaggaacctc

SEQ ID NO: 539798 - DNA, 15 bp, Homo sapiens
ctctcaggaacctca

SEQ ID NO: 539799 - DNA, 15 bp, Homo sapiens
tctcaggaacctcat

SEQ ID NO: 539800 - DNA, 15 bp, Homo sapiens
ctcaggaacctcatg

SEQ ID NO: 539801 - DNA, 15 bp, Homo sapiens
tcaggaacctcatga

SEQ ID NO: 539802 - DNA, 15 bp, Homo sapiens
caggaacctcatgag

SEQ ID NO: 539803 - DNA, 15 bp, Homo sapiens
aggaacctcatgagc

SEQ ID NO: 539804 - DNA, 15 bp, Homo sapiens
ggaacctcatgagcc

SEQ ID NO: 539805 - DNA, 15 bp, Homo sapiens
gaacctcatgagcca

SEQ ID NO: 539806 - DNA, 15 bp, Homo sapiens
aacctcatgagccag

SEQ ID NO: 539807 - DNA, 15 bp, Homo sapiens
acctcatgagccagt

SEQ ID NO: 539808 - DNA, 15 bp, Homo sapiens
cctcatgagccagtt

SEQ ID NO: 539809 - DNA, 15 bp, Homo sapiens
ctcatgagccagttc

SEQ ID NO: 539810 - DNA, 15 bp, Homo sapiens
tcatgagccagttcc

SEQ ID NO: 539811 - DNA, 15 bp, Homo sapiens
catgagccagttcca

SEQ ID NO: 539812 - DNA, 15 bp, Homo sapiens
atgagccagttccag

SEQ ID NO: 539813 - DNA, 15 bp, Homo sapiens
tgagccagttccagc

SEQ ID NO: 539814 - DNA, 15 bp, Homo sapiens
gagccagttccagca

SEQ ID NO: 539815 - DNA, 15 bp, Homo sapiens
agccagttccagcac

SEQ ID NO: 539816 - DNA, 15 bp, Homo sapiens
gccagttccagcaca

SEQ ID NO: 539817 - DNA, 15 bp, Homo sapiens
ccagttccagcacac

SEQ ID NO: 539818 - DNA, 15 bp, Homo sapiens
cagttccagcacacc

SEQ ID NO: 539819 - DNA, 15 bp, Homo sapiens
agttccagcacacca

SEQ ID NO: 539820 - DNA, 15 bp, Homo sapiens
gttccagcacaccac

SEQ ID NO: 539821 - DNA, 15 bp, Homo sapiens
ttccagcacaccact

SEQ ID NO: 539822 - DNA, 15 bp, Homo sapiens
tccagcacaccactg

SEQ ID NO: 539823 - DNA, 15 bp, Homo sapiens
ccagcacaccactgc

SEQ ID NO: 539824 - DNA, 15 bp, Homo sapiens
cagcacaccactgca

SEQ ID NO: 539825 - DNA, 15 bp, Homo sapiens
agcacaccactgcat

SEQ ID NO: 539826 - DNA, 15 bp, Homo sapiens
gcacaccactgcatc

SEQ ID NO: 539827 - DNA, 15 bp, Homo sapiens
cacaccactgcatcc

SEQ ID NO: 539828 - DNA, 15 bp, Homo sapiens
acaccactgcatcca

SEQ ID NO: 539829 - DNA, 15 bp, Homo sapiens
caccactgcatccag

SEQ ID NO: 539830 - DNA, 15 bp, Homo sapiens
accactgcatccagc

SEQ ID NO: 539831 - DNA, 15 bp, Homo sapiens
ccactgcatccagcc

SEQ ID NO: 539832 - DNA, 15 bp, Homo sapiens
cactgcatccagcca

SEQ ID NO: 539833 - DNA, 15 bp, Homo sapiens
actgcatccagccac

SEQ ID NO: 539834 - DNA, 15 bp, Homo sapiens
ctgcatccagccacc

SEQ ID NO: 539835 - DNA, 15 bp, Homo sapiens
tgcatccagccaccc

SEQ ID NO: 539836 - DNA, 15 bp, Homo sapiens
gcatccagccaccct

SEQ ID NO: 539837 - DNA, 15 bp, Homo sapiens
catccagccaccctg

SEQ ID NO: 539838 - DNA, 15 bp, Homo sapiens
atccagccaccctgt

SEQ ID NO: 539839 - DNA, 15 bp, Homo sapiens
tccagccaccctgtc

SEQ ID NO: 539840 - DNA, 15 bp, Homo sapiens
ccagccaccctgtcc

SEQ ID NO: 539841 - DNA, 15 bp, Homo sapiens
cagccaccctgtccc

SEQ ID NO: 539842 - DNA, 15 bp, Homo sapiens
agccaccctgtccca

SEQ ID NO: 539843 - DNA, 15 bp, Homo sapiens
gccaccctgtcccac

SEQ ID NO: 539844 - DNA, 15 bp, Homo sapiens
ccaccctgtcccaca

SEQ ID NO: 539845 - DNA, 15 bp, Homo sapiens
caccctgtcccacaa

SEQ ID NO: 539846 - DNA, 15 bp, Homo sapiens
accctgtcccacaac

SEQ ID NO: 539847 - DNA, 15 bp, Homo sapiens
ccctgtcccacaacc

SEQ ID NO: 539848 - DNA, 15 bp, Homo sapiens
cctgtcccacaacca

SEQ ID NO: 539849 - DNA, 15 bp, Homo sapiens
ctgtcccacaaccac

SEQ ID NO: 539850 - DNA, 15 bp, Homo sapiens
tgtcccacaaccaca

SEQ ID NO: 539851 - DNA, 15 bp, Homo sapiens
gtcccacaaccacag

SEQ ID NO: 539852 - DNA, 15 bp, Homo sapiens
tcccacaaccacagc

SEQ ID NO: 539853 - DNA, 15 bp, Homo sapiens
cccacaaccacagcc

SEQ ID NO: 539854 - DNA, 15 bp, Homo sapiens
ccacaaccacagccc

SEQ ID NO: 539855 - DNA, 15 bp, Homo sapiens
cacaaccacagccca

SEQ ID NO: 539856 - DNA, 15 bp, Homo sapiens
acaaccacagcccat

SEQ ID NO: 539857 - DNA, 15 bp, Homo sapiens
caaccacagcccatc

SEQ ID NO: 539858 - DNA, 15 bp, Homo sapiens
aaccacagcccatct

SEQ ID NO: 539859 - DNA, 15 bp, Homo sapiens
accacagcccatctc

SEQ ID NO: 539860 - DNA, 15 bp, Homo sapiens
ccacagcccatctca

SEQ ID NO: 539861 - DNA, 15 bp, Homo sapiens
cacagcccatctcag

SEQ ID NO: 539862 - DNA, 15 bp, Homo sapiens
acagcccatctcaga

SEQ ID NO: 539863 - DNA, 15 bp, Homo sapiens
cagcccatctcagag

SEQ ID NO: 539864 - DNA, 15 bp, Homo sapiens
agcccatctcagagc

SEQ ID NO: 539865 - DNA, 15 bp, Homo sapiens
gcccatctcagagca

SEQ ID NO: 539866 - DNA, 15 bp, Homo sapiens
cccatctcagagcaa

SEQ ID NO: 539867 - DNA, 15 bp, Homo sapiens
ccatctcagagcaaa

SEQ ID NO: 539868 - DNA, 15 bp, Homo sapiens
catctcagagcaaaa

SEQ ID NO: 539869 - DNA, 15 bp, Homo sapiens
atctcagagcaaaag

SEQ ID NO: 539870 - DNA, 15 bp, Homo sapiens
tctcagagcaaaaga

SEQ ID NO: 539871 - DNA, 15 bp, Homo sapiens
ctcagagcaaaagag

SEQ ID NO: 539872 - DNA, 15 bp, Homo sapiens
tcagagcaaaagagg

SEQ ID NO: 539873 - DNA, 15 bp, Homo sapiens
cagagcaaaagaggc

SEQ ID NO: 539874 - DNA, 15 bp, Homo sapiens
agagcaaaagaggca

SEQ ID NO: 539875 - DNA, 15 bp, Homo sapiens
gagcaaaagaggcac

SEQ ID NO: 539876 - DNA, 15 bp, Homo sapiens
agcaaaagaggcacc

SEQ ID NO: 539877 - DNA, 15 bp, Homo sapiens
gcaaaagaggcacct

SEQ ID NO: 539878 - DNA, 15 bp, Homo sapiens
caaaagaggcacctg

SEQ ID NO: 539879 - DNA, 15 bp, Homo sapiens
aaaagaggcacctgt

SEQ ID NO: 539880 - DNA, 15 bp, Homo sapiens
aaagaggcacctgtc

SEQ ID NO: 539881 - DNA, 15 bp, Homo sapiens
aagaggcacctgtcc

SEQ ID NO: 539882 - DNA, 15 bp, Homo sapiens
agaggcacctgtcct

SEQ ID NO: 539883 - DNA, 15 bp, Homo sapiens
gaggcacctgtcctc

SEQ ID NO: 539884 - DNA, 15 bp, Homo sapiens
aggcacctgtcctct

SEQ ID NO: 539885 - DNA, 15 bp, Homo sapiens
ggcacctgtcctcta

SEQ ID NO: 539886 - DNA, 15 bp, Homo sapiens
gcacctgtcctctat

SEQ ID NO: 539887 - DNA, 15 bp, Homo sapiens
cacctgtcctctatg

SEQ ID NO: 539888 - DNA, 15 bp, Homo sapiens
acctgtcctctatgt

SEQ ID NO: 539889 - DNA, 15 bp, Homo sapiens
cctgtcctctatgtc

SEQ ID NO: 539890 - DNA, 15 bp, Homo sapiens
ctgtcctctatgtct

SEQ ID NO: 539891 - DNA, 15 bp, Homo sapiens
tgtcctctatgtctg

SEQ ID NO: 539892 - DNA, 15 bp, Homo sapiens
gtcctctatgtctga

SEQ ID NO: 539893 - DNA, 15 bp, Homo sapiens
tcctctatgtctgac

SEQ ID NO: 539894 - DNA, 15 bp, Homo sapiens
cctctatgtctgacc

SEQ ID NO: 539895 - DNA, 15 bp, Homo sapiens
ctctatgtctgacct

SEQ ID NO: 539896 - DNA, 15 bp, Homo sapiens
tctatgtctgaccta

SEQ ID NO: 539897 - DNA, 15 bp, Homo sapiens
ctatgtctgacctag

SEQ ID NO: 539898 - DNA, 15 bp, Homo sapiens
tatgtctgacctagc

SEQ ID NO: 539899 - DNA, 15 bp, Homo sapiens
atgtctgacctagct

SEQ ID NO: 539900 - DNA, 15 bp, Homo sapiens
tgtctgacctagctt

SEQ ID NO: 539901 - DNA, 15 bp, Homo sapiens
gtctgacctagcttt

SEQ ID NO: 539902 - DNA, 15 bp, Homo sapiens
tctgacctagctttg

SEQ ID NO: 539903 - DNA, 15 bp, Homo sapiens
ctgacctagctttgt

SEQ ID NO: 539904 - DNA, 15 bp, Homo sapiens
tgacctagctttgtc

SEQ ID NO: 539905 - DNA, 15 bp, Homo sapiens
gacctagctttgtct

SEQ ID NO: 539906 - DNA, 15 bp, Homo sapiens
acctagctttgtcta

SEQ ID NO: 539907 - DNA, 15 bp, Homo sapiens
cctagctttgtctaa

SEQ ID NO: 539908 - DNA, 15 bp, Homo sapiens
ctagctttgtctaag

SEQ ID NO: 539909 - DNA, 15 bp, Homo sapiens
tagctttgtctaagt

SEQ ID NO: 539910 - DNA, 15 bp, Homo sapiens
agctttgtctaagtg

SEQ ID NO: 539911 - DNA, 15 bp, Homo sapiens
gctttgtctaagtgg

SEQ ID NO: 539912 - DNA, 15 bp, Homo sapiens
ctttgtctaagtgga

SEQ ID NO: 539913 - DNA, 15 bp, Homo sapiens
tttgtctaagtggag

SEQ ID NO: 539914 - DNA, 15 bp, Homo sapiens
ttgtctaagtggaga

SEQ ID NO: 539915 - DNA, 15 bp, Homo sapiens
tgtctaagtggagag

SEQ ID NO: 539916 - DNA, 15 bp, Homo sapiens
gtctaagtggagagg

SEQ ID NO: 539917 - DNA, 15 bp, Homo sapiens
tctaagtggagaggt

SEQ ID NO: 539918 - DNA, 15 bp, Homo sapiens
ctaagtggagaggta

SEQ ID NO: 539919 - DNA, 15 bp, Homo sapiens
taagtggagaggtaa

SEQ ID NO: 539920 - DNA, 15 bp, Homo sapiens
aagtggagaggtaag

SEQ ID NO: 539921 - DNA, 15 bp, Homo sapiens
agtggagaggtaagg

SEQ ID NO: 539922 - DNA, 15 bp, Homo sapiens
gtggagaggtaagga

SEQ ID NO: 539923 - DNA, 15 bp, Homo sapiens
tggagaggtaaggag

SEQ ID NO: 539924 - DNA, 15 bp, Homo sapiens
ggagaggtaaggagt

SEQ ID NO: 539925 - DNA, 15 bp, Homo sapiens
gagaggtaaggagtt

SEQ ID NO: 539926 - DNA, 15 bp, Homo sapiens
agaggtaaggagtta

SEQ ID NO: 539927 - DNA, 15 bp, Homo sapiens
gaggtaaggagttaa

SEQ ID NO: 539928 - DNA, 15 bp, Homo sapiens
aggtaaggagttaaa

SEQ ID NO: 539929 - DNA, 15 bp, Homo sapiens
ggtaaggagttaaag

SEQ ID NO: 539930 - DNA, 15 bp, Homo sapiens
gtaaggagttaaagc

SEQ ID NO: 539931 - DNA, 15 bp, Homo sapiens
taaggagttaaagcg

SEQ ID NO: 539932 - DNA, 15 bp, Homo sapiens
aaggagttaaagcgg

SEQ ID NO: 539933 - DNA, 15 bp, Homo sapiens
aggagttaaagcggg

SEQ ID NO: 539934 - DNA, 15 bp, Homo sapiens
ggagttaaagcgggg

SEQ ID NO: 539935 - DNA, 15 bp, Homo sapiens
gagttaaagcgggga

SEQ ID NO: 539936 - DNA, 15 bp, Homo sapiens
agttaaagcggggag

SEQ ID NO: 539937 - DNA, 15 bp, Homo sapiens
gttaaagcggggaga

SEQ ID NO: 539938 - DNA, 15 bp, Homo sapiens
ttaaagcggggagaa

SEQ ID NO: 539939 - DNA, 15 bp, Homo sapiens
taaagcggggagaag

SEQ ID NO: 539940 - DNA, 15 bp, Homo sapiens
aaagcggggagaaga

SEQ ID NO: 539941 - DNA, 15 bp, Homo sapiens
aagcggggagaagag

SEQ ID NO: 539942 - DNA, 15 bp, Homo sapiens
agcggggagaagagc

SEQ ID NO: 539943 - DNA, 15 bp, Homo sapiens
gcggggagaagagca

SEQ ID NO: 539944 - DNA, 15 bp, Homo sapiens
cggggagaagagcag

SEQ ID NO: 539945 - DNA, 15 bp, Homo sapiens
ggggagaagagcagg

SEQ ID NO: 539946 - DNA, 15 bp, Homo sapiens
gggagaagagcaggc

SEQ ID NO: 539947 - DNA, 15 bp, Homo sapiens
ggagaagagcaggca

SEQ ID NO: 539948 - DNA, 15 bp, Homo sapiens
gagaagagcaggcat

SEQ ID NO: 539949 - DNA, 15 bp, Homo sapiens
agaagagcaggcatt

SEQ ID NO: 539950 - DNA, 15 bp, Homo sapiens
gaagagcaggcattc

SEQ ID NO: 539951 - DNA, 15 bp, Homo sapiens
aagagcaggcattcc

SEQ ID NO: 539952 - DNA, 15 bp, Homo sapiens
agagcaggcattcct

SEQ ID NO: 539953 - DNA, 15 bp, Homo sapiens
gagcaggcattcctg

SEQ ID NO: 539954 - DNA, 15 bp, Homo sapiens
agcaggcattcctgc

SEQ ID NO: 539955 - DNA, 15 bp, Homo sapiens
gcaggcattcctgct

SEQ ID NO: 539956 - DNA, 15 bp, Homo sapiens
caggcattcctgctc

SEQ ID NO: 539957 - DNA, 15 bp, Homo sapiens
aggcattcctgctct

SEQ ID NO: 539958 - DNA, 15 bp, Homo sapiens
ggcattcctgctctc

SEQ ID NO: 539959 - DNA, 15 bp, Homo sapiens
gcattcctgctctct

SEQ ID NO: 539960 - DNA, 15 bp, Homo sapiens
cattcctgctctctt

SEQ ID NO: 539961 - DNA, 15 bp, Homo sapiens
attcctgctctcttc

SEQ ID NO: 539962 - DNA, 15 bp, Homo sapiens
ttcctgctctcttct

SEQ ID NO: 539963 - DNA, 15 bp, Homo sapiens
tcctgctctcttctc

SEQ ID NO: 539964 - DNA, 15 bp, Homo sapiens
cctgctctcttctct

SEQ ID NO: 539965 - DNA, 15 bp, Homo sapiens
ctgctctcttctctg

SEQ ID NO: 539966 - DNA, 15 bp, Homo sapiens
tgctctcttctctgt

SEQ ID NO: 539967 - DNA, 15 bp, Homo sapiens
gctctcttctctgtc

SEQ ID NO: 539968 - DNA, 15 bp, Homo sapiens
ctctcttctctgtcc

SEQ ID NO: 539969 - DNA, 15 bp, Homo sapiens
tctcttctctgtccc

SEQ ID NO: 539970 - DNA, 15 bp, Homo sapiens
ctcttctctgtccca

SEQ ID NO: 539971 - DNA, 15 bp, Homo sapiens
tcttctctgtcccac

SEQ ID NO: 539972 - DNA, 15 bp, Homo sapiens
cttctctgtcccaca

SEQ ID NO: 539973 - DNA, 15 bp, Homo sapiens
ttctctgtcccacac

SEQ ID NO: 539974 - DNA, 15 bp, Homo sapiens
tctctgtcccacacc

SEQ ID NO: 539975 - DNA, 15 bp, Homo sapiens
ctctgtcccacaccg

SEQ ID NO: 539976 - DNA, 15 bp, Homo sapiens
tctgtcccacaccgg

SEQ ID NO: 539977 - DNA, 15 bp, Homo sapiens
ctgtcccacaccggc

SEQ ID NO: 539978 - DNA, 15 bp, Homo sapiens
tgtcccacaccggcc

SEQ ID NO: 539979 - DNA, 15 bp, Homo sapiens
gtcccacaccggcca

SEQ ID NO: 539980 - DNA, 15 bp, Homo sapiens
tcccacaccggccag

SEQ ID NO: 539981 - DNA, 15 bp, Homo sapiens
cccacaccggccaga

SEQ ID NO: 539982 - DNA, 15 bp, Homo sapiens
ccacaccggccagaa

SEQ ID NO: 539983 - DNA, 15 bp, Homo sapiens
cacaccggccagaag

SEQ ID NO: 539984 - DNA, 15 bp, Homo sapiens
acaccggccagaagt

SEQ ID NO: 539985 - DNA, 15 bp, Homo sapiens
caccggccagaagta

SEQ ID NO: 539986 - DNA, 15 bp, Homo sapiens
accggccagaagtaa

SEQ ID NO: 539987 - DNA, 15 bp, Homo sapiens
ccggccagaagtaaa

SEQ ID NO: 539988 - DNA, 15 bp, Homo sapiens
cggccagaagtaaag

SEQ ID NO: 539989 - DNA, 15 bp, Homo sapiens
ggccagaagtaaagc

SEQ ID NO: 539990 - DNA, 15 bp, Homo sapiens
gccagaagtaaagct

SEQ ID NO: 539991 - DNA, 15 bp, Homo sapiens
ccagaagtaaagctt

SEQ ID NO: 539992 - DNA, 15 bp, Homo sapiens
cagaagtaaagcttc

SEQ ID NO: 539993 - DNA, 15 bp, Homo sapiens
agaagtaaagcttcc

SEQ ID NO: 539994 - DNA, 15 bp, Homo sapiens
gaagtaaagcttccc

SEQ ID NO: 539995 - DNA, 15 bp, Homo sapiens
aagtaaagcttccct

SEQ ID NO: 539996 - DNA, 15 bp, Homo sapiens
agtaaagcttccctc

SEQ ID NO: 539997 - DNA, 15 bp, Homo sapiens
gtaaagcttccctcc

SEQ ID NO: 539998 - DNA, 15 bp, Homo sapiens
taaagcttccctccc

SEQ ID NO: 539999 - DNA, 15 bp, Homo sapiens
aaagcttccctccct

SEQ ID NO: 540000 - DNA, 15 bp, Homo sapiens
aagcttccctccctg

SEQ ID NO: 540001 - DNA, 15 bp, Homo sapiens
agcttccctccctga

SEQ ID NO: 540002 - DNA, 15 bp, Homo sapiens
gcttccctccctgac

SEQ ID NO: 540003 - DNA, 15 bp, Homo sapiens
cttccctccctgacc

SEQ ID NO: 540004 - DNA, 15 bp, Homo sapiens
ttccctccctgaccc

SEQ ID NO: 540005 - DNA, 15 bp, Homo sapiens
tccctccctgaccca

SEQ ID NO: 540006 - DNA, 15 bp, Homo sapiens
ccctccctgacccac

SEQ ID NO: 540007 - DNA, 15 bp, Homo sapiens
cctccctgacccact

SEQ ID NO: 540008 - DNA, 15 bp, Homo sapiens
ctccctgacccactt

SEQ ID NO: 540009 - DNA, 15 bp, Homo sapiens
tccctgacccacttc

SEQ ID NO: 540010 - DNA, 15 bp, Homo sapiens
ccctgacccacttcc

SEQ ID NO: 540011 - DNA, 15 bp, Homo sapiens
cctgacccacttccc

SEQ ID NO: 540012 - DNA, 15 bp, Homo sapiens
ctgacccacttcccc

SEQ ID NO: 540013 - DNA, 15 bp, Homo sapiens
tgacccacttcccct

SEQ ID NO: 540014 - DNA, 15 bp, Homo sapiens
gacccacttcccctc

SEQ ID NO: 540015 - DNA, 15 bp, Homo sapiens
acccacttcccctca

SEQ ID NO: 540016 - DNA, 15 bp, Homo sapiens
cccacttcccctcag

SEQ ID NO: 540017 - DNA, 15 bp, Homo sapiens
ccacttcccctcagg

SEQ ID NO: 540018 - DNA, 15 bp, Homo sapiens
cacttcccctcaggc

SEQ ID NO: 540019 - DNA, 15 bp, Homo sapiens
acttcccctcaggcc

SEQ ID NO: 540020 - DNA, 15 bp, Homo sapiens
cttcccctcaggcca

SEQ ID NO: 540021 - DNA, 15 bp, Homo sapiens
ttcccctcaggccag

SEQ ID NO: 540022 - DNA, 15 bp, Homo sapiens
tcccctcaggccagt

SEQ ID NO: 540023 - DNA, 15 bp, Homo sapiens
cccctcaggccagtt

SEQ ID NO: 540024 - DNA, 15 bp, Homo sapiens
ccctcaggccagttc

SEQ ID NO: 540025 - DNA, 15 bp, Homo sapiens
cctcaggccagttcc

SEQ ID NO: 540026 - DNA, 15 bp, Homo sapiens
ctcaggccagttcca

SEQ ID NO: 540027 - DNA, 15 bp, Homo sapiens
tcaggccagttccat

SEQ ID NO: 540028 - DNA, 15 bp, Homo sapiens
caggccagttccata

SEQ ID NO: 540029 - DNA, 15 bp, Homo sapiens
aggccagttccatac

SEQ ID NO: 540030 - DNA, 15 bp, Homo sapiens
ggccagttccatact

SEQ ID NO: 540031 - DNA, 15 bp, Homo sapiens
gccagttccatactg

SEQ ID NO: 540032 - DNA, 15 bp, Homo sapiens
ccagttccatactga

SEQ ID NO: 540033 - DNA, 15 bp, Homo sapiens
cagttccatactgac

SEQ ID NO: 540034 - DNA, 15 bp, Homo sapiens
agttccatactgact

SEQ ID NO: 540035 - DNA, 15 bp, Homo sapiens
gttccatactgacta

SEQ ID NO: 540036 - DNA, 15 bp, Homo sapiens
ttccatactgactag

SEQ ID NO: 540037 - DNA, 15 bp, Homo sapiens
tccatactgactagc

SEQ ID NO: 540038 - DNA, 15 bp, Homo sapiens
ccatactgactagca

SEQ ID NO: 540039 - DNA, 15 bp, Homo sapiens
catactgactagcaa

SEQ ID NO: 540040 - DNA, 15 bp, Homo sapiens
atactgactagcaag

SEQ ID NO: 540041 - DNA, 15 bp, Homo sapiens
tactgactagcaagt

SEQ ID NO: 540042 - DNA, 15 bp, Homo sapiens
actgactagcaagtt

SEQ ID NO: 540043 - DNA, 15 bp, Homo sapiens
ctgactagcaagttc

SEQ ID NO: 540044 - DNA, 15 bp, Homo sapiens
tgactagcaagttca

SEQ ID NO: 540045 - DNA, 15 bp, Homo sapiens
gactagcaagttcat

SEQ ID NO: 540046 - DNA, 15 bp, Homo sapiens
actagcaagttcatt

SEQ ID NO: 540047 - DNA, 15 bp, Homo sapiens
ctagcaagttcattt

SEQ ID NO: 540048 - DNA, 15 bp, Homo sapiens
tagcaagttcatttt

SEQ ID NO: 540049 - DNA, 15 bp, Homo sapiens
agcaagttcattttc

SEQ ID NO: 540050 - DNA, 15 bp, Homo sapiens
gcaagttcattttcc

SEQ ID NO: 540051 - DNA, 15 bp, Homo sapiens
caagttcattttcct

SEQ ID NO: 540052 - DNA, 15 bp, Homo sapiens
aagttcattttcctc

SEQ ID NO: 540053 - DNA, 15 bp, Homo sapiens
agttcattttcctca

SEQ ID NO: 540054 - DNA, 15 bp, Homo sapiens
gttcattttcctcac

SEQ ID NO: 540055 - DNA, 15 bp, Homo sapiens
ttcattttcctcaca

SEQ ID NO: 540056 - DNA, 15 bp, Homo sapiens
tcattttcctcacaa

SEQ ID NO: 540057 - DNA, 15 bp, Homo sapiens
cattttcctcacaag

SEQ ID NO: 540058 - DNA, 15 bp, Homo sapiens
attttcctcacaagc

SEQ ID NO: 540059 - DNA, 15 bp, Homo sapiens
ttttcctcacaagct

SEQ ID NO: 540060 - DNA, 15 bp, Homo sapiens
tttcctcacaagctg

SEQ ID NO: 540061 - DNA, 15 bp, Homo sapiens
ttcctcacaagctga

SEQ ID NO: 540062 - DNA, 15 bp, Homo sapiens
tcctcacaagctgaa

SEQ ID NO: 540063 - DNA, 15 bp, Homo sapiens
cctcacaagctgaaa

SEQ ID NO: 540064 - DNA, 15 bp, Homo sapiens
ctcacaagctgaaac

SEQ ID NO: 540065 - DNA, 15 bp, Homo sapiens
tcacaagctgaaaca

SEQ ID NO: 540066 - DNA, 15 bp, Homo sapiens
cacaagctgaaacaa

SEQ ID NO: 540067 - DNA, 15 bp, Homo sapiens
acaagctgaaacaaa

SEQ ID NO: 540068 - DNA, 15 bp, Homo sapiens
caagctgaaacaaaa

SEQ ID NO: 540069 - DNA, 15 bp, Homo sapiens
aagctgaaacaaaac

SEQ ID NO: 540070 - DNA, 15 bp, Homo sapiens
agctgaaacaaaaca

SEQ ID NO: 540071 - DNA, 15 bp, Homo sapiens
gctgaaacaaaacaa

SEQ ID NO: 540072 - DNA, 15 bp, Homo sapiens
ctgaaacaaaacaaa

SEQ ID NO: 540073 - DNA, 15 bp, Homo sapiens
tgaaacaaaacaaaa

SEQ ID NO: 540074 - DNA, 15 bp, Homo sapiens
gaaacaaaacaaaac

SEQ ID NO: 540075 - DNA, 15 bp, Homo sapiens
aaacaaaacaaaaca

SEQ ID NO: 540076 - DNA, 15 bp, Homo sapiens
aacaaaacaaaacac

SEQ ID NO: 540077 - DNA, 15 bp, Homo sapiens
acaaaacaaaacaca

SEQ ID NO: 540078 - DNA, 15 bp, Homo sapiens
caaaacaaaacacaa

SEQ ID NO: 540079 - DNA, 15 bp, Homo sapiens
aaaacaaaacacaaa

SEQ ID NO: 540080 - DNA, 15 bp, Homo sapiens
aaacaaaacacaaaa

SEQ ID NO: 540081 - DNA, 15 bp, Homo sapiens
aacaaaacacaaaac

SEQ ID NO: 540082 - DNA, 15 bp, Homo sapiens
acaaaacacaaaacg

SEQ ID NO: 540083 - DNA, 15 bp, Homo sapiens
caaaacacaaaacgt

SEQ ID NO: 540084 - DNA, 15 bp, Homo sapiens
aaaacacaaaacgtg

SEQ ID NO: 540085 - DNA, 15 bp, Homo sapiens
aaacacaaaacgtgg

SEQ ID NO: 540086 - DNA, 15 bp, Homo sapiens
aacacaaaacgtggc

SEQ ID NO: 540087 - DNA, 15 bp, Homo sapiens
acacaaaacgtggcc

SEQ ID NO: 540088 - DNA, 15 bp, Homo sapiens
cacaaaacgtggccc

SEQ ID NO: 540089 - DNA, 15 bp, Homo sapiens
acaaaacgtggccct

SEQ ID NO: 540090 - DNA, 15 bp, Homo sapiens
caaaacgtggccctc

SEQ ID NO: 540091 - DNA, 15 bp, Homo sapiens
aaaacgtggccctct

SEQ ID NO: 540092 - DNA, 15 bp, Homo sapiens
aaacgtggccctctc

SEQ ID NO: 540093 - DNA, 15 bp, Homo sapiens
aacgtggccctctcc

SEQ ID NO: 540094 - DNA, 15 bp, Homo sapiens
acgtggccctctccc

SEQ ID NO: 540095 - DNA, 15 bp, Homo sapiens
cgtggccctctccct

SEQ ID NO: 540096 - DNA, 15 bp, Homo sapiens
gtggccctctccctt

SEQ ID NO: 540097 - DNA, 15 bp, Homo sapiens
tggccctctcccttg

SEQ ID NO: 540098 - DNA, 15 bp, Homo sapiens
ggccctctcccttgg

SEQ ID NO: 540099 - DNA, 15 bp, Homo sapiens
gccctctcccttggg

SEQ ID NO: 540100 - DNA, 15 bp, Homo sapiens
ccctctcccttgggc

SEQ ID NO: 540101 - DNA, 15 bp, Homo sapiens
cctctcccttgggcc

SEQ ID NO: 540102 - DNA, 15 bp, Homo sapiens
ctctcccttgggcct

SEQ ID NO: 540103 - DNA, 15 bp, Homo sapiens
tctcccttgggcctt

SEQ ID NO: 540104 - DNA, 15 bp, Homo sapiens
ctcccttgggccttc

SEQ ID NO: 540105 - DNA, 15 bp, Homo sapiens
tcccttgggccttca

SEQ ID NO: 540106 - DNA, 15 bp, Homo sapiens
cccttgggccttcag

SEQ ID NO: 540107 - DNA, 15 bp, Homo sapiens
ccttgggccttcagc

SEQ ID NO: 540108 - DNA, 15 bp, Homo sapiens
cttgggccttcagca

SEQ ID NO: 540109 - DNA, 15 bp, Homo sapiens
ttgggccttcagcag

SEQ ID NO: 540110 - DNA, 15 bp, Homo sapiens
tgggccttcagcaga

SEQ ID NO: 540111 - DNA, 15 bp, Homo sapiens
gggccttcagcagag

SEQ ID NO: 540112 - DNA, 15 bp, Homo sapiens
ggccttcagcagagt

SEQ ID NO: 540113 - DNA, 15 bp, Homo sapiens
gccttcagcagagta

SEQ ID NO: 540114 - DNA, 15 bp, Homo sapiens
ccttcagcagagtag

SEQ ID NO: 540115 - DNA, 15 bp, Homo sapiens
cttcagcagagtagc

SEQ ID NO: 540116 - DNA, 15 bp, Homo sapiens
ttcagcagagtagct

SEQ ID NO: 540117 - DNA, 15 bp, Homo sapiens
tcagcagagtagctc

SEQ ID NO: 540118 - DNA, 15 bp, Homo sapiens
cagcagagtagctcc

SEQ ID NO: 540119 - DNA, 15 bp, Homo sapiens
agcagagtagctccg

SEQ ID NO: 540120 - DNA, 15 bp, Homo sapiens
gcagagtagctccgc

SEQ ID NO: 540121 - DNA, 15 bp, Homo sapiens
cagagtagctccgct

SEQ ID NO: 540122 - DNA, 15 bp, Homo sapiens
agagtagctccgctt

SEQ ID NO: 540123 - DNA, 15 bp, Homo sapiens
gagtagctccgcttt

SEQ ID NO: 540124 - DNA, 15 bp, Homo sapiens
agtagctccgcttta

SEQ ID NO: 540125 - DNA, 15 bp, Homo sapiens
gtagctccgctttaa

SEQ ID NO: 540126 - DNA, 15 bp, Homo sapiens
tagctccgctttaag

SEQ ID NO: 540127 - DNA, 15 bp, Homo sapiens
agctccgctttaaga

SEQ ID NO: 540128 - DNA, 15 bp, Homo sapiens
gctccgctttaagag

SEQ ID NO: 540129 - DNA, 15 bp, Homo sapiens
ctccgctttaagagg

SEQ ID NO: 540130 - DNA, 15 bp, Homo sapiens
tccgctttaagagga

SEQ ID NO: 540131 - DNA, 15 bp, Homo sapiens
ccgctttaagaggaa

SEQ ID NO: 540132 - DNA, 15 bp, Homo sapiens
cgctttaagaggaat

SEQ ID NO: 540133 - DNA, 15 bp, Homo sapiens
gctttaagaggaatc

SEQ ID NO: 540134 - DNA, 15 bp, Homo sapiens
ctttaagaggaatca

SEQ ID NO: 540135 - DNA, 15 bp, Homo sapiens
tttaagaggaatcac

SEQ ID NO: 540136 - DNA, 15 bp, Homo sapiens
ttaagaggaatcaca

SEQ ID NO: 540137 - DNA, 15 bp, Homo sapiens
taagaggaatcacag

SEQ ID NO: 540138 - DNA, 15 bp, Homo sapiens
aagaggaatcacagg

SEQ ID NO: 540139 - DNA, 15 bp, Homo sapiens
agaggaatcacaggg

SEQ ID NO: 540140 - DNA, 15 bp, Homo sapiens
gaggaatcacagggt

SEQ ID NO: 540141 - DNA, 15 bp, Homo sapiens
aggaatcacagggtg

SEQ ID NO: 540142 - DNA, 15 bp, Homo sapiens
ggaatcacagggtgc

SEQ ID NO: 540143 - DNA, 15 bp, Homo sapiens
gaatcacagggtgca

SEQ ID NO: 540144 - DNA, 15 bp, Homo sapiens
aatcacagggtgcag

SEQ ID NO: 540145 - DNA, 15 bp, Homo sapiens
atcacagggtgcagc

SEQ ID NO: 540146 - DNA, 15 bp, Homo sapiens
tcacagggtgcagcc

SEQ ID NO: 540147 - DNA, 15 bp, Homo sapiens
cacagggtgcagccc

SEQ ID NO: 540148 - DNA, 15 bp, Homo sapiens
acagggtgcagcccc

SEQ ID NO: 540149 - DNA, 15 bp, Homo sapiens
cagggtgcagcccca

SEQ ID NO: 540150 - DNA, 15 bp, Homo sapiens
agggtgcagccccaa

SEQ ID NO: 540151 - DNA, 15 bp, Homo sapiens
gggtgcagccccaaa

SEQ ID NO: 540152 - DNA, 15 bp, Homo sapiens
ggtgcagccccaaat

SEQ ID NO: 540153 - DNA, 15 bp, Homo sapiens
gtgcagccccaaatg

SEQ ID NO: 540154 - DNA, 15 bp, Homo sapiens
tgcagccccaaatgc

SEQ ID NO: 540155 - DNA, 15 bp, Homo sapiens
gcagccccaaatgcc

SEQ ID NO: 540156 - DNA, 15 bp, Homo sapiens
cagccccaaatgcca

SEQ ID NO: 540157 - DNA, 15 bp, Homo sapiens
agccccaaatgccat

SEQ ID NO: 540158 - DNA, 15 bp, Homo sapiens
gccccaaatgccatg

SEQ ID NO: 540159 - DNA, 15 bp, Homo sapiens
ccccaaatgccatgg

SEQ ID NO: 540160 - DNA, 15 bp, Homo sapiens
cccaaatgccatgga

SEQ ID NO: 540161 - DNA, 15 bp, Homo sapiens
ccaaatgccatggag

SEQ ID NO: 540162 - DNA, 15 bp, Homo sapiens
caaatgccatggagt

SEQ ID NO: 540163 - DNA, 15 bp, Homo sapiens
aaatgccatggagtc

SEQ ID NO: 540164 - DNA, 15 bp, Homo sapiens
aatgccatggagtct

SEQ ID NO: 540165 - DNA, 15 bp, Homo sapiens
atgccatggagtctg

SEQ ID NO: 540166 - DNA, 15 bp, Homo sapiens
tgccatggagtctga

SEQ ID NO: 540167 - DNA, 15 bp, Homo sapiens
gccatggagtctgat

SEQ ID NO: 540168 - DNA, 15 bp, Homo sapiens
ccatggagtctgata

SEQ ID NO: 540169 - DNA, 15 bp, Homo sapiens
catggagtctgatag

SEQ ID NO: 540170 - DNA, 15 bp, Homo sapiens
atggagtctgatagt

SEQ ID NO: 540171 - DNA, 15 bp, Homo sapiens
tggagtctgatagtg

SEQ ID NO: 540172 - DNA, 15 bp, Homo sapiens
ggagtctgatagtgc

SEQ ID NO: 540173 - DNA, 15 bp, Homo sapiens
gagtctgatagtgca

SEQ ID NO: 540174 - DNA, 15 bp, Homo sapiens
agtctgatagtgcag

SEQ ID NO: 540175 - DNA, 15 bp, Homo sapiens
gtctgatagtgcagc

SEQ ID NO: 540176 - DNA, 15 bp, Homo sapiens
tctgatagtgcagca

SEQ ID NO: 540177 - DNA, 15 bp, Homo sapiens
ctgatagtgcagcag

SEQ ID NO: 540178 - DNA, 15 bp, Homo sapiens
tgatagtgcagcagg

SEQ ID NO: 540179 - DNA, 15 bp, Homo sapiens
gatagtgcagcaggc

SEQ ID NO: 540180 - DNA, 15 bp, Homo sapiens
atagtgcagcaggcc

SEQ ID NO: 540181 - DNA, 15 bp, Homo sapiens
tagtgcagcaggccg

SEQ ID NO: 540182 - DNA, 15 bp, Homo sapiens
agtgcagcaggccgg

SEQ ID NO: 540183 - DNA, 15 bp, Homo sapiens
gtgcagcaggccggg

SEQ ID NO: 540184 - DNA, 15 bp, Homo sapiens
tgcagcaggccgggg

SEQ ID NO: 540185 - DNA, 15 bp, Homo sapiens
gcagcaggccggggg

SEQ ID NO: 540186 - DNA, 15 bp, Homo sapiens
cagcaggccgggggc

SEQ ID NO: 540187 - DNA, 15 bp, Homo sapiens
agcaggccgggggct

SEQ ID NO: 540188 - DNA, 15 bp, Homo sapiens
gcaggccgggggcta

SEQ ID NO: 540189 - DNA, 15 bp, Homo sapiens
caggccgggggctaa

SEQ ID NO: 540190 - DNA, 15 bp, Homo sapiens
aggccgggggctaac

SEQ ID NO: 540191 - DNA, 15 bp, Homo sapiens
ggccgggggctaacg

SEQ ID NO: 540192 - DNA, 15 bp, Homo sapiens
gccgggggctaacgc

SEQ ID NO: 540193 - DNA, 15 bp, Homo sapiens
ccgggggctaacgct

SEQ ID NO: 540194 - DNA, 15 bp, Homo sapiens
cgggggctaacgctg

SEQ ID NO: 540195 - DNA, 15 bp, Homo sapiens
gggggctaacgctgt

SEQ ID NO: 540196 - DNA, 15 bp, Homo sapiens
ggggctaacgctgtc

SEQ ID NO: 540197 - DNA, 15 bp, Homo sapiens
gggctaacgctgtct

SEQ ID NO: 540198 - DNA, 15 bp, Homo sapiens
ggctaacgctgtctc

SEQ ID NO: 540199 - DNA, 15 bp, Homo sapiens
gctaacgctgtctcc

SEQ ID NO: 540200 - DNA, 15 bp, Homo sapiens
ctaacgctgtctcca

SEQ ID NO: 540201 - DNA, 15 bp, Homo sapiens
taacgctgtctccac

SEQ ID NO: 540202 - DNA, 15 bp, Homo sapiens
aacgctgtctccacc

SEQ ID NO: 540203 - DNA, 15 bp, Homo sapiens
acgctgtctccaccc

SEQ ID NO: 540204 - DNA, 15 bp, Homo sapiens
cgctgtctccaccca

SEQ ID NO: 540205 - DNA, 15 bp, Homo sapiens
gctgtctccacccag

SEQ ID NO: 540206 - DNA, 15 bp, Homo sapiens
ctgtctccacccagc

SEQ ID NO: 540207 - DNA, 15 bp, Homo sapiens
tgtctccacccagct

SEQ ID NO: 540208 - DNA, 15 bp, Homo sapiens
gtctccacccagctc

SEQ ID NO: 540209 - DNA, 15 bp, Homo sapiens
tctccacccagctca

SEQ ID NO: 540210 - DNA, 15 bp, Homo sapiens
ctccacccagctcac

SEQ ID NO: 540211 - DNA, 15 bp, Homo sapiens
tccacccagctcacc

SEQ ID NO: 540212 - DNA, 15 bp, Homo sapiens
ccacccagctcacca

SEQ ID NO: 540213 - DNA, 15 bp, Homo sapiens
cacccagctcaccac

SEQ ID NO: 540214 - DNA, 15 bp, Homo sapiens
acccagctcaccacg

SEQ ID NO: 540215 - DNA, 15 bp, Homo sapiens
cccagctcaccacgc

SEQ ID NO: 540216 - DNA, 15 bp, Homo sapiens
ccagctcaccacgca

SEQ ID NO: 540217 - DNA, 15 bp, Homo sapiens
cagctcaccacgcag

SEQ ID NO: 540218 - DNA, 15 bp, Homo sapiens
agctcaccacgcagg

SEQ ID NO: 540219 - DNA, 15 bp, Homo sapiens
gctcaccacgcaggt

SEQ ID NO: 540220 - DNA, 15 bp, Homo sapiens
ctcaccacgcaggtg

SEQ ID NO: 540221 - DNA, 15 bp, Homo sapiens
tcaccacgcaggtgg

SEQ ID NO: 540222 - DNA, 15 bp, Homo sapiens
caccacgcaggtgga

SEQ ID NO: 540223 - DNA, 15 bp, Homo sapiens
accacgcaggtggag

SEQ ID NO: 540224 - DNA, 15 bp, Homo sapiens
ccacgcaggtggagc

SEQ ID NO: 540225 - DNA, 15 bp, Homo sapiens
cacgcaggtggagcg

SEQ ID NO: 540226 - DNA, 15 bp, Homo sapiens
acgcaggtggagcgg

SEQ ID NO: 540227 - DNA, 15 bp, Homo sapiens
cgcaggtggagcggc

SEQ ID NO: 540228 - DNA, 15 bp, Homo sapiens
gcaggtggagcggcc

SEQ ID NO: 540229 - DNA, 15 bp, Homo sapiens
caggtggagcggcca

SEQ ID NO: 540230 - DNA, 15 bp, Homo sapiens
aggtggagcggccag

SEQ ID NO: 540231 - DNA, 15 bp, Homo sapiens
ggtggagcggccagg

SEQ ID NO: 540232 - DNA, 15 bp, Homo sapiens
gtggagcggccagga

SEQ ID NO: 540233 - DNA, 15 bp, Homo sapiens
tggagcggccaggac

SEQ ID NO: 540234 - DNA, 15 bp, Homo sapiens
ggagcggccaggaca

SEQ ID NO: 540235 - DNA, 15 bp, Homo sapiens
gagcggccaggacat

SEQ ID NO: 540236 - DNA, 15 bp, Homo sapiens
agcggccaggacatg

SEQ ID NO: 540237 - DNA, 15 bp, Homo sapiens
gcggccaggacatgg

SEQ ID NO: 540238 - DNA, 15 bp, Homo sapiens
cggccaggacatggg

SEQ ID NO: 540239 - DNA, 15 bp, Homo sapiens
ggccaggacatgggc

SEQ ID NO: 540240 - DNA, 15 bp, Homo sapiens
gccaggacatgggca

SEQ ID NO: 540241 - DNA, 15 bp, Homo sapiens
ccaggacatgggcat

SEQ ID NO: 540242 - DNA, 15 bp, Homo sapiens
caggacatgggcatg

SEQ ID NO: 540243 - DNA, 15 bp, Homo sapiens
aggacatgggcatgc

SEQ ID NO: 540244 - DNA, 15 bp, Homo sapiens
ggacatgggcatgcc

SEQ ID NO: 540245 - DNA, 15 bp, Homo sapiens
gacatgggcatgcct

SEQ ID NO: 540246 - DNA, 15 bp, Homo sapiens
acatgggcatgcctt

SEQ ID NO: 540247 - DNA, 15 bp, Homo sapiens
catgggcatgccttg

SEQ ID NO: 540248 - DNA, 15 bp, Homo sapiens
atgggcatgccttgg

SEQ ID NO: 540249 - DNA, 15 bp, Homo sapiens
tgggcatgccttggc

SEQ ID NO: 540250 - DNA, 15 bp, Homo sapiens
gggcatgccttggcc

SEQ ID NO: 540251 - DNA, 15 bp, Homo sapiens
ggcatgccttggcct

SEQ ID NO: 540252 - DNA, 15 bp, Homo sapiens
gcatgccttggccta

SEQ ID NO: 540253 - DNA, 15 bp, Homo sapiens
catgccttggcctag

SEQ ID NO: 540254 - DNA, 15 bp, Homo sapiens
atgccttggcctagg

SEQ ID NO: 540255 - DNA, 15 bp, Homo sapiens
tgccttggcctaggc

SEQ ID NO: 540256 - DNA, 15 bp, Homo sapiens
gccttggcctaggca

SEQ ID NO: 540257 - DNA, 15 bp, Homo sapiens
ccttggcctaggcag

SEQ ID NO: 540258 - DNA, 15 bp, Homo sapiens
cttggcctaggcagt

SEQ ID NO: 540259 - DNA, 15 bp, Homo sapiens
ttggcctaggcagtg

SEQ ID NO: 540260 - DNA, 15 bp, Homo sapiens
tggcctaggcagtgc

SEQ ID NO: 540261 - DNA, 15 bp, Homo sapiens
ggcctaggcagtgca

SEQ ID NO: 540262 - DNA, 15 bp, Homo sapiens
gcctaggcagtgcac

SEQ ID NO: 540263 - DNA, 15 bp, Homo sapiens
cctaggcagtgcact

SEQ ID NO: 540264 - DNA, 15 bp, Homo sapiens
ctaggcagtgcactt

SEQ ID NO: 540265 - DNA, 15 bp, Homo sapiens
taggcagtgcacttc

SEQ ID NO: 540266 - DNA, 15 bp, Homo sapiens
aggcagtgcacttcc

SEQ ID NO: 540267 - DNA, 15 bp, Homo sapiens
ggcagtgcacttccg

SEQ ID NO: 540268 - DNA, 15 bp, Homo sapiens
gcagtgcacttccgg

SEQ ID NO: 540269 - DNA, 15 bp, Homo sapiens
cagtgcacttccgga

SEQ ID NO: 540270 - DNA, 15 bp, Homo sapiens
agtgcacttccggat

SEQ ID NO: 540271 - DNA, 15 bp, Homo sapiens
gtgcacttccggatt

SEQ ID NO: 540272 - DNA, 15 bp, Homo sapiens
tgcacttccggattc

SEQ ID NO: 540273 - DNA, 15 bp, Homo sapiens
gcacttccggattcc

SEQ ID NO: 540274 - DNA, 15 bp, Homo sapiens
cacttccggattccc

SEQ ID NO: 540275 - DNA, 15 bp, Homo sapiens
acttccggattccct

SEQ ID NO: 540276 - DNA, 15 bp, Homo sapiens
cttccggattccctt

SEQ ID NO: 540277 - DNA, 15 bp, Homo sapiens
ttccggattcccttt

SEQ ID NO: 540278 - DNA, 15 bp, Homo sapiens
tccggattccctttg

SEQ ID NO: 540279 - DNA, 15 bp, Homo sapiens
ccggattccctttgg

SEQ ID NO: 540280 - DNA, 15 bp, Homo sapiens
cggattccctttggg

SEQ ID NO: 540281 - DNA, 15 bp, Homo sapiens
ggattccctttggga

SEQ ID NO: 540282 - DNA, 15 bp, Homo sapiens
gattccctttgggag

SEQ ID NO: 540283 - DNA, 15 bp, Homo sapiens
attccctttgggagg

SEQ ID NO: 540284 - DNA, 15 bp, Homo sapiens
ttccctttgggaggc

SEQ ID NO: 540285 - DNA, 15 bp, Homo sapiens
tccctttgggaggca

SEQ ID NO: 540286 - DNA, 15 bp, Homo sapiens
ccctttgggaggcag

SEQ ID NO: 540287 - DNA, 15 bp, Homo sapiens
cctttgggaggcagc

SEQ ID NO: 540288 - DNA, 15 bp, Homo sapiens
ctttgggaggcagca

SEQ ID NO: 540289 - DNA, 15 bp, Homo sapiens
tttgggaggcagcag

SEQ ID NO: 540290 - DNA, 15 bp, Homo sapiens
ttgggaggcagcagg

SEQ ID NO: 540291 - DNA, 15 bp, Homo sapiens
tgggaggcagcaggg

SEQ ID NO: 540292 - DNA, 15 bp, Homo sapiens
gggaggcagcaggga

SEQ ID NO: 540293 - DNA, 15 bp, Homo sapiens
ggaggcagcagggag

SEQ ID NO: 540294 - DNA, 15 bp, Homo sapiens
gaggcagcagggagg

SEQ ID NO: 540295 - DNA, 15 bp, Homo sapiens
aggcagcagggaggg

SEQ ID NO: 540296 - DNA, 15 bp, Homo sapiens
ggcagcagggagggt

SEQ ID NO: 540297 - DNA, 15 bp, Homo sapiens
gcagcagggagggtc

SEQ ID NO: 540298 - DNA, 15 bp, Homo sapiens
cagcagggagggtct

SEQ ID NO: 540299 - DNA, 15 bp, Homo sapiens
agcagggagggtctg

SEQ ID NO: 540300 - DNA, 15 bp, Homo sapiens
gcagggagggtctgg

SEQ ID NO: 540301 - DNA, 15 bp, Homo sapiens
cagggagggtctggc

SEQ ID NO: 540302 - DNA, 15 bp, Homo sapiens
agggagggtctggcc

SEQ ID NO: 540303 - DNA, 15 bp, Homo sapiens
gggagggtctggcct

SEQ ID NO: 540304 - DNA, 15 bp, Homo sapiens
ggagggtctggcctc

SEQ ID NO: 540305 - DNA, 15 bp, Homo sapiens
gagggtctggcctca

SEQ ID NO: 540306 - DNA, 15 bp, Homo sapiens
agggtctggcctcat

SEQ ID NO: 540307 - DNA, 15 bp, Homo sapiens
gggtctggcctcatc

SEQ ID NO: 540308 - DNA, 15 bp, Homo sapiens
ggtctggcctcatcc

SEQ ID NO: 540309 - DNA, 15 bp, Homo sapiens
gtctggcctcatcct

SEQ ID NO: 540310 - DNA, 15 bp, Homo sapiens
tctggcctcatcctt

SEQ ID NO: 540311 - DNA, 15 bp, Homo sapiens
ctggcctcatcctta

SEQ ID NO: 540312 - DNA, 15 bp, Homo sapiens
tggcctcatccttaa

SEQ ID NO: 540313 - DNA, 15 bp, Homo sapiens
ggcctcatccttaat

SEQ ID NO: 540314 - DNA, 15 bp, Homo sapiens
gcctcatccttaatg

SEQ ID NO: 540315 - DNA, 15 bp, Homo sapiens
cctcatccttaatga

SEQ ID NO: 540316 - DNA, 15 bp, Homo sapiens
ctcatccttaatgaa

SEQ ID NO: 540317 - DNA, 15 bp, Homo sapiens
tcatccttaatgaac

SEQ ID NO: 540318 - DNA, 15 bp, Homo sapiens
catccttaatgaact

SEQ ID NO: 540319 - DNA, 15 bp, Homo sapiens
atccttaatgaacta

SEQ ID NO: 540320 - DNA, 15 bp, Homo sapiens
tccttaatgaactat

SEQ ID NO: 540321 - DNA, 15 bp, Homo sapiens
ccttaatgaactatc

SEQ ID NO: 540322 - DNA, 15 bp, Homo sapiens
cttaatgaactatct

SEQ ID NO: 540323 - DNA, 15 bp, Homo sapiens
ttaatgaactatctg

SEQ ID NO: 540324 - DNA, 15 bp, Homo sapiens
taatgaactatctgg

SEQ ID NO: 540325 - DNA, 15 bp, Homo sapiens
aatgaactatctggc

SEQ ID NO: 540326 - DNA, 15 bp, Homo sapiens
atgaactatctggca

SEQ ID NO: 540327 - DNA, 15 bp, Homo sapiens
tgaactatctggcag

SEQ ID NO: 540328 - DNA, 15 bp, Homo sapiens
gaactatctggcaga

SEQ ID NO: 540329 - DNA, 15 bp, Homo sapiens
aactatctggcagag

SEQ ID NO: 540330 - DNA, 15 bp, Homo sapiens
actatctggcagagg

SEQ ID NO: 540331 - DNA, 15 bp, Homo sapiens
ctatctggcagaggc

SEQ ID NO: 540332 - DNA, 15 bp, Homo sapiens
tatctggcagaggct

SEQ ID NO: 540333 - DNA, 15 bp, Homo sapiens
atctggcagaggctg

SEQ ID NO: 540334 - DNA, 15 bp, Homo sapiens
tctggcagaggctgt

SEQ ID NO: 540335 - DNA, 15 bp, Homo sapiens
ctggcagaggctgtc

SEQ ID NO: 540336 - DNA, 15 bp, Homo sapiens
tggcagaggctgtca

SEQ ID NO: 540337 - DNA, 15 bp, Homo sapiens
ggcagaggctgtcac

SEQ ID NO: 540338 - DNA, 15 bp, Homo sapiens
gcagaggctgtcaca

SEQ ID NO: 540339 - DNA, 15 bp, Homo sapiens
cagaggctgtcacag

SEQ ID NO: 540340 - DNA, 15 bp, Homo sapiens
agaggctgtcacaga

SEQ ID NO: 540341 - DNA, 15 bp, Homo sapiens
gaggctgtcacagaa

SEQ ID NO: 540342 - DNA, 15 bp, Homo sapiens
aggctgtcacagaac

SEQ ID NO: 540343 - DNA, 15 bp, Homo sapiens
ggctgtcacagaacc

SEQ ID NO: 540344 - DNA, 15 bp, Homo sapiens
gctgtcacagaacca

SEQ ID NO: 540345 - DNA, 15 bp, Homo sapiens
ctgtcacagaaccat

SEQ ID NO: 540346 - DNA, 15 bp, Homo sapiens
tgtcacagaaccatg

SEQ ID NO: 540347 - DNA, 15 bp, Homo sapiens
gtcacagaaccatgg

SEQ ID NO: 540348 - DNA, 15 bp, Homo sapiens
tcacagaaccatggg

SEQ ID NO: 540349 - DNA, 15 bp, Homo sapiens
cacagaaccatggga

SEQ ID NO: 540350 - DNA, 15 bp, Homo sapiens
acagaaccatgggac

SEQ ID NO: 540351 - DNA, 15 bp, Homo sapiens
cagaaccatgggacg

SEQ ID NO: 540352 - DNA, 15 bp, Homo sapiens
agaaccatgggacgc

SEQ ID NO: 540353 - DNA, 15 bp, Homo sapiens
gaaccatgggacgcc

SEQ ID NO: 540354 - DNA, 15 bp, Homo sapiens
aaccatgggacgcca

SEQ ID NO: 540355 - DNA, 15 bp, Homo sapiens
accatgggacgccag

SEQ ID NO: 540356 - DNA, 15 bp, Homo sapiens
ccatgggacgccaga

SEQ ID NO: 540357 - DNA, 15 bp, Homo sapiens
catgggacgccagag

SEQ ID NO: 540358 - DNA, 15 bp, Homo sapiens
atgggacgccagagc

SEQ ID NO: 540359 - DNA, 15 bp, Homo sapiens
tgggacgccagagcc

SEQ ID NO: 540360 - DNA, 15 bp, Homo sapiens
gggacgccagagcca

SEQ ID NO: 540361 - DNA, 15 bp, Homo sapiens
ggacgccagagccaa

SEQ ID NO: 540362 - DNA, 15 bp, Homo sapiens
gacgccagagccaaa

SEQ ID NO: 540363 - DNA, 15 bp, Homo sapiens
acgccagagccaaaa

SEQ ID NO: 540364 - DNA, 15 bp, Homo sapiens
cgccagagccaaaaa

SEQ ID NO: 540365 - DNA, 15 bp, Homo sapiens
gccagagccaaaaag

SEQ ID NO: 540366 - DNA, 15 bp, Homo sapiens
ccagagccaaaaaga

SEQ ID NO: 540367 - DNA, 15 bp, Homo sapiens
cagagccaaaaagag

SEQ ID NO: 540368 - DNA, 15 bp, Homo sapiens
agagccaaaaagagc

SEQ ID NO: 540369 - DNA, 15 bp, Homo sapiens
gagccaaaaagagct

SEQ ID NO: 540370 - DNA, 15 bp, Homo sapiens
agccaaaaagagctt

SEQ ID NO: 540371 - DNA, 15 bp, Homo sapiens
gccaaaaagagctta

SEQ ID NO: 540372 - DNA, 15 bp, Homo sapiens
ccaaaaagagcttag

SEQ ID NO: 540373 - DNA, 15 bp, Homo sapiens
caaaaagagcttagt

SEQ ID NO: 540374 - DNA, 15 bp, Homo sapiens
aaaaagagcttagta

SEQ ID NO: 540375 - DNA, 15 bp, Homo sapiens
aaaagagcttagtaa

SEQ ID NO: 540376 - DNA, 15 bp, Homo sapiens
aaagagcttagtaat

SEQ ID NO: 540377 - DNA, 15 bp, Homo sapiens
aagagcttagtaatc

SEQ ID NO: 540378 - DNA, 15 bp, Homo sapiens
agagcttagtaatca

SEQ ID NO: 540379 - DNA, 15 bp, Homo sapiens
gagcttagtaatcac

SEQ ID NO: 540380 - DNA, 15 bp, Homo sapiens
agcttagtaatcacc

SEQ ID NO: 540381 - DNA, 15 bp, Homo sapiens
gcttagtaatcacct

SEQ ID NO: 540382 - DNA, 15 bp, Homo sapiens
cttagtaatcacctg

SEQ ID NO: 540383 - DNA, 15 bp, Homo sapiens
ttagtaatcacctgt

SEQ ID NO: 540384 - DNA, 15 bp, Homo sapiens
tagtaatcacctgtg

SEQ ID NO: 540385 - DNA, 15 bp, Homo sapiens
agtaatcacctgtgt

SEQ ID NO: 540386 - DNA, 15 bp, Homo sapiens
gtaatcacctgtgtg

SEQ ID NO: 540387 - DNA, 15 bp, Homo sapiens
taatcacctgtgtgt

SEQ ID NO: 540388 - DNA, 15 bp, Homo sapiens
aatcacctgtgtgtc

SEQ ID NO: 540389 - DNA, 15 bp, Homo sapiens
atcacctgtgtgtcc

SEQ ID NO: 540390 - DNA, 15 bp, Homo sapiens
tcacctgtgtgtccc

SEQ ID NO: 540391 - DNA, 15 bp, Homo sapiens
cacctgtgtgtccct

SEQ ID NO: 540392 - DNA, 15 bp, Homo sapiens
acctgtgtgtccctt

SEQ ID NO: 540393 - DNA, 15 bp, Homo sapiens
cctgtgtgtcccttt

SEQ ID NO: 540394 - DNA, 15 bp, Homo sapiens
ctgtgtgtccctttg

SEQ ID NO: 540395 - DNA, 15 bp, Homo sapiens
tgtgtgtccctttgc

SEQ ID NO: 540396 - DNA, 15 bp, Homo sapiens
gtgtgtccctttgct

SEQ ID NO: 540397 - DNA, 15 bp, Homo sapiens
tgtgtccctttgctg

SEQ ID NO: 540398 - DNA, 15 bp, Homo sapiens
gtgtccctttgctgc

SEQ ID NO: 540399 - DNA, 15 bp, Homo sapiens
tgtccctttgctgcg

SEQ ID NO: 540400 - DNA, 15 bp, Homo sapiens
gtccctttgctgcgc

SEQ ID NO: 540401 - DNA, 15 bp, Homo sapiens
tccctttgctgcgca

SEQ ID NO: 540402 - DNA, 15 bp, Homo sapiens
ccctttgctgcgcaa

SEQ ID NO: 540403 - DNA, 15 bp, Homo sapiens
cctttgctgcgcaat

SEQ ID NO: 540404 - DNA, 15 bp, Homo sapiens
ctttgctgcgcaatg

SEQ ID NO: 540405 - DNA, 15 bp, Homo sapiens
tttgctgcgcaatga

SEQ ID NO: 540406 - DNA, 15 bp, Homo sapiens
ttgctgcgcaatgag

SEQ ID NO: 540407 - DNA, 15 bp, Homo sapiens
tgctgcgcaatgagg

SEQ ID NO: 540408 - DNA, 15 bp, Homo sapiens
gctgcgcaatgaggg

SEQ ID NO: 540409 - DNA, 15 bp, Homo sapiens
ctgcgcaatgagggt

SEQ ID NO: 540410 - DNA, 15 bp, Homo sapiens
tgcgcaatgagggtg

SEQ ID NO: 540411 - DNA, 15 bp, Homo sapiens
gcgcaatgagggtgc

SEQ ID NO: 540412 - DNA, 15 bp, Homo sapiens
cgcaatgagggtgct

SEQ ID NO: 540413 - DNA, 15 bp, Homo sapiens
gcaatgagggtgctg

SEQ ID NO: 540414 - DNA, 15 bp, Homo sapiens
caatgagggtgctgc

SEQ ID NO: 540415 - DNA, 15 bp, Homo sapiens
aatgagggtgctgcg

SEQ ID NO: 540416 - DNA, 15 bp, Homo sapiens
atgagggtgctgcgg

SEQ ID NO: 540417 - DNA, 15 bp, Homo sapiens
tgagggtgctgcggc

SEQ ID NO: 540418 - DNA, 15 bp, Homo sapiens
gagggtgctgcggca

SEQ ID NO: 540419 - DNA, 15 bp, Homo sapiens
agggtgctgcggcag

SEQ ID NO: 540420 - DNA, 15 bp, Homo sapiens
gggtgctgcggcaga

SEQ ID NO: 540421 - DNA, 15 bp, Homo sapiens
ggtgctgcggcagag

SEQ ID NO: 540422 - DNA, 15 bp, Homo sapiens
gtgctgcggcagagg

SEQ ID NO: 540423 - DNA, 15 bp, Homo sapiens
tgctgcggcagaggc

SEQ ID NO: 540424 - DNA, 15 bp, Homo sapiens
gctgcggcagaggcc

SEQ ID NO: 540425 - DNA, 15 bp, Homo sapiens
ctgcggcagaggccg

SEQ ID NO: 540426 - DNA, 15 bp, Homo sapiens
tgcggcagaggccgc

SEQ ID NO: 540427 - DNA, 15 bp, Homo sapiens
gcggcagaggccgca

SEQ ID NO: 540428 - DNA, 15 bp, Homo sapiens
cggcagaggccgcac

SEQ ID NO: 540429 - DNA, 15 bp, Homo sapiens
ggcagaggccgcacc

SEQ ID NO: 540430 - DNA, 15 bp, Homo sapiens
gcagaggccgcacct

SEQ ID NO: 540431 - DNA, 15 bp, Homo sapiens
cagaggccgcacctc

SEQ ID NO: 540432 - DNA, 15 bp, Homo sapiens
agaggccgcacctct

SEQ ID NO: 540433 - DNA, 15 bp, Homo sapiens
gaggccgcacctctt

SEQ ID NO: 540434 - DNA, 15 bp, Homo sapiens
aggccgcacctctta

SEQ ID NO: 540435 - DNA, 15 bp, Homo sapiens
ggccgcacctcttag

SEQ ID NO: 540436 - DNA, 15 bp, Homo sapiens
gccgcacctcttagc

SEQ ID NO: 540437 - DNA, 15 bp, Homo sapiens
ccgcacctcttagct

SEQ ID NO: 540438 - DNA, 15 bp, Homo sapiens
cgcacctcttagctg

SEQ ID NO: 540439 - DNA, 15 bp, Homo sapiens
gcacctcttagctgt

SEQ ID NO: 540440 - DNA, 15 bp, Homo sapiens
cacctcttagctgtg

SEQ ID NO: 540441 - DNA, 15 bp, Homo sapiens
acctcttagctgtgt

SEQ ID NO: 540442 - DNA, 15 bp, Homo sapiens
cctcttagctgtgtc

SEQ ID NO: 540443 - DNA, 15 bp, Homo sapiens
ctcttagctgtgtca

SEQ ID NO: 540444 - DNA, 15 bp, Homo sapiens
tcttagctgtgtcac

SEQ ID NO: 540445 - DNA, 15 bp, Homo sapiens
cttagctgtgtcacc

SEQ ID NO: 540446 - DNA, 15 bp, Homo sapiens
ttagctgtgtcacct

SEQ ID NO: 540447 - DNA, 15 bp, Homo sapiens
tagctgtgtcacctc

SEQ ID NO: 540448 - DNA, 15 bp, Homo sapiens
agctgtgtcacctct

SEQ ID NO: 540449 - DNA, 15 bp, Homo sapiens
gctgtgtcacctctg

SEQ ID NO: 540450 - DNA, 15 bp, Homo sapiens
ctgtgtcacctctgg

SEQ ID NO: 540451 - DNA, 15 bp, Homo sapiens
tgtgtcacctctgga

SEQ ID NO: 540452 - DNA, 15 bp, Homo sapiens
gtgtcacctctggag

SEQ ID NO: 540453 - DNA, 15 bp, Homo sapiens
tgtcacctctggagc

SEQ ID NO: 540454 - DNA, 15 bp, Homo sapiens
gtcacctctggagct

SEQ ID NO: 540455 - DNA, 15 bp, Homo sapiens
tcacctctggagctg

SEQ ID NO: 540456 - DNA, 15 bp, Homo sapiens
cacctctggagctgg

SEQ ID NO: 540457 - DNA, 15 bp, Homo sapiens
acctctggagctgga

SEQ ID NO: 540458 - DNA, 15 bp, Homo sapiens
cctctggagctggac

SEQ ID NO: 540459 - DNA, 15 bp, Homo sapiens
ctctggagctggacc

SEQ ID NO: 540460 - DNA, 15 bp, Homo sapiens
tctggagctggaccg

SEQ ID NO: 540461 - DNA, 15 bp, Homo sapiens
ctggagctggaccgc

SEQ ID NO: 540462 - DNA, 15 bp, Homo sapiens
tggagctggaccgcc

SEQ ID NO: 540463 - DNA, 15 bp, Homo sapiens
ggagctggaccgccc

SEQ ID NO: 540464 - DNA, 15 bp, Homo sapiens
gagctggaccgccct

SEQ ID NO: 540465 - DNA, 15 bp, Homo sapiens
agctggaccgccctc

SEQ ID NO: 540466 - DNA, 15 bp, Homo sapiens
gctggaccgccctct

SEQ ID NO: 540467 - DNA, 15 bp, Homo sapiens
ctggaccgccctctc

SEQ ID NO: 540468 - DNA, 15 bp, Homo sapiens
tggaccgccctctct

SEQ ID NO: 540469 - DNA, 15 bp, Homo sapiens
ggaccgccctctctg

SEQ ID NO: 540470 - DNA, 15 bp, Homo sapiens
gaccgccctctctgg

SEQ ID NO: 540471 - DNA, 15 bp, Homo sapiens
accgccctctctggc

SEQ ID NO: 540472 - DNA, 15 bp, Homo sapiens
ccgccctctctggcc

SEQ ID NO: 540473 - DNA, 15 bp, Homo sapiens
cgccctctctggcct

SEQ ID NO: 540474 - DNA, 15 bp, Homo sapiens
gccctctctggcctg

SEQ ID NO: 540475 - DNA, 15 bp, Homo sapiens
ccctctctggcctgc

SEQ ID NO: 540476 - DNA, 15 bp, Homo sapiens
cctctctggcctgct

SEQ ID NO: 540477 - DNA, 15 bp, Homo sapiens
ctctctggcctgctg

SEQ ID NO: 540478 - DNA, 15 bp, Homo sapiens
tctctggcctgctgc

SEQ ID NO: 540479 - DNA, 15 bp, Homo sapiens
ctctggcctgctgct

SEQ ID NO: 540480 - DNA, 15 bp, Homo sapiens
tctggcctgctgctg

SEQ ID NO: 540481 - DNA, 15 bp, Homo sapiens
ctggcctgctgctgg

SEQ ID NO: 540482 - DNA, 15 bp, Homo sapiens
tggcctgctgctggt

SEQ ID NO: 540483 - DNA, 15 bp, Homo sapiens
ggcctgctgctggtg

SEQ ID NO: 540484 - DNA, 15 bp, Homo sapiens
gcctgctgctggtgg

SEQ ID NO: 540485 - DNA, 15 bp, Homo sapiens
cctgctgctggtggt

SEQ ID NO: 540486 - DNA, 15 bp, Homo sapiens
ctgctgctggtggtg

SEQ ID NO: 540487 - DNA, 15 bp, Homo sapiens
tgctgctggtggtgc

SEQ ID NO: 540488 - DNA, 15 bp, Homo sapiens
gctgctggtggtgct

SEQ ID NO: 540489 - DNA, 15 bp, Homo sapiens
ctgctggtggtgctc

SEQ ID NO: 540490 - DNA, 15 bp, Homo sapiens
tgctggtggtgctcc

SEQ ID NO: 540491 - DNA, 15 bp, Homo sapiens
gctggtggtgctcct

SEQ ID NO: 540492 - DNA, 15 bp, Homo sapiens
ctggtggtgctcctg

SEQ ID NO: 540493 - DNA, 15 bp, Homo sapiens
tggtggtgctcctgc

SEQ ID NO: 540494 - DNA, 15 bp, Homo sapiens
ggtggtgctcctgcg

SEQ ID NO: 540495 - DNA, 15 bp, Homo sapiens
gtggtgctcctgcgt

SEQ ID NO: 540496 - DNA, 15 bp, Homo sapiens
tggtgctcctgcgtg

SEQ ID NO: 540497 - DNA, 15 bp, Homo sapiens
ggtgctcctgcgtgt

SEQ ID NO: 540498 - DNA, 15 bp, Homo sapiens
gtgctcctgcgtgtt

SEQ ID NO: 540499 - DNA, 15 bp, Homo sapiens
tgctcctgcgtgttg

SEQ ID NO: 540500 - DNA, 15 bp, Homo sapiens
gctcctgcgtgttga

SEQ ID NO: 540501 - DNA, 15 bp, Homo sapiens
ctcctgcgtgttgac

SEQ ID NO: 540502 - DNA, 15 bp, Homo sapiens
tcctgcgtgttgacg

SEQ ID NO: 540503 - DNA, 15 bp, Homo sapiens
cctgcgtgttgacgc

SEQ ID NO: 540504 - DNA, 15 bp, Homo sapiens
ctgcgtgttgacgct

SEQ ID NO: 540505 - DNA, 15 bp, Homo sapiens
tgcgtgttgacgctt

SEQ ID NO: 540506 - DNA, 15 bp, Homo sapiens
gcgtgttgacgcttg

SEQ ID NO: 540507 - DNA, 15 bp, Homo sapiens
cgtgttgacgcttgg

SEQ ID NO: 540508 - DNA, 15 bp, Homo sapiens
gtgttgacgcttgga

SEQ ID NO: 540509 - DNA, 15 bp, Homo sapiens
tgttgacgcttggac

SEQ ID NO: 540510 - DNA, 15 bp, Homo sapiens
gttgacgcttggaca

SEQ ID NO: 540511 - DNA, 15 bp, Homo sapiens
ttgacgcttggacac

SEQ ID NO: 540512 - DNA, 15 bp, Homo sapiens
tgacgcttggacact

SEQ ID NO: 540513 - DNA, 15 bp, Homo sapiens
gacgcttggacactt

SEQ ID NO: 540514 - DNA, 15 bp, Homo sapiens
acgcttggacacttt

SEQ ID NO: 540515 - DNA, 15 bp, Homo sapiens
cgcttggacactttt

SEQ ID NO: 540516 - DNA, 15 bp, Homo sapiens
gcttggacacttttt

SEQ ID NO: 540517 - DNA, 15 bp, Homo sapiens
cttggacactttttg

SEQ ID NO: 540518 - DNA, 15 bp, Homo sapiens
ttggacactttttga

SEQ ID NO: 540519 - DNA, 15 bp, Homo sapiens
tggacactttttgaa

SEQ ID NO: 540520 - DNA, 15 bp, Homo sapiens
ggacactttttgaac

SEQ ID NO: 540521 - DNA, 15 bp, Homo sapiens
gacactttttgaaca

SEQ ID NO: 540522 - DNA, 15 bp, Homo sapiens
acactttttgaacaa

SEQ ID NO: 540523 - DNA, 15 bp, Homo sapiens
cactttttgaacaac

SEQ ID NO: 540524 - DNA, 15 bp, Homo sapiens
actttttgaacaaca

SEQ ID NO: 540525 - DNA, 15 bp, Homo sapiens
ctttttgaacaacat

SEQ ID NO: 540526 - DNA, 15 bp, Homo sapiens
tttttgaacaacatt

SEQ ID NO: 540527 - DNA, 15 bp, Homo sapiens
ttttgaacaacattt

SEQ ID NO: 540528 - DNA, 15 bp, Homo sapiens
tttgaacaacatttc

SEQ ID NO: 540529 - DNA, 15 bp, Homo sapiens
ttgaacaacatttct

SEQ ID NO: 540530 - DNA, 15 bp, Homo sapiens
tgaacaacatttctt

SEQ ID NO: 540531 - DNA, 15 bp, Homo sapiens
gaacaacatttcttc

SEQ ID NO: 540532 - DNA, 15 bp, Homo sapiens
aacaacatttcttcc

SEQ ID NO: 540533 - DNA, 15 bp, Homo sapiens
acaacatttcttcca

SEQ ID NO: 540534 - DNA, 15 bp, Homo sapiens
caacatttcttccat

SEQ ID NO: 540535 - DNA, 15 bp, Homo sapiens
aacatttcttccata

SEQ ID NO: 540536 - DNA, 15 bp, Homo sapiens
acatttcttccataa

SEQ ID NO: 540537 - DNA, 15 bp, Homo sapiens
catttcttccataac

SEQ ID NO: 540538 - DNA, 15 bp, Homo sapiens
atttcttccataact

SEQ ID NO: 540539 - DNA, 15 bp, Homo sapiens
tttcttccataactg

SEQ ID NO: 540540 - DNA, 15 bp, Homo sapiens
ttcttccataactgc

SEQ ID NO: 540541 - DNA, 15 bp, Homo sapiens
tcttccataactgca

SEQ ID NO: 540542 - DNA, 15 bp, Homo sapiens
cttccataactgcag

SEQ ID NO: 540543 - DNA, 15 bp, Homo sapiens
ttccataactgcagt

SEQ ID NO: 540544 - DNA, 15 bp, Homo sapiens
tccataactgcagtg

SEQ ID NO: 540545 - DNA, 15 bp, Homo sapiens
ccataactgcagtgg

SEQ ID NO: 540546 - DNA, 15 bp, Homo sapiens
cataactgcagtggc

SEQ ID NO: 540547 - DNA, 15 bp, Homo sapiens
ataactgcagtggcc

SEQ ID NO: 540548 - DNA, 15 bp, Homo sapiens
taactgcagtggccc

SEQ ID NO: 540549 - DNA, 15 bp, Homo sapiens
aactgcagtggcccc

SEQ ID NO: 540550 - DNA, 15 bp, Homo sapiens
actgcagtggcccct

SEQ ID NO: 540551 - DNA, 15 bp, Homo sapiens
ctgcagtggcccctg

SEQ ID NO: 540552 - DNA, 15 bp, Homo sapiens
tgcagtggcccctgt

SEQ ID NO: 540553 - DNA, 15 bp, Homo sapiens
gcagtggcccctgtg

SEQ ID NO: 540554 - DNA, 15 bp, Homo sapiens
cagtggcccctgtga

SEQ ID NO: 540555 - DNA, 15 bp, Homo sapiens
agtggcccctgtgag

SEQ ID NO: 540556 - DNA, 15 bp, Homo sapiens
gtggcccctgtgagt

SEQ ID NO: 540557 - DNA, 15 bp, Homo sapiens
tggcccctgtgagta

SEQ ID NO: 540558 - DNA, 15 bp, Homo sapiens
ggcccctgtgagtaa

SEQ ID NO: 540559 - DNA, 15 bp, Homo sapiens
gcccctgtgagtaaa

SEQ ID NO: 540560 - DNA, 15 bp, Homo sapiens
cccctgtgagtaaaa

SEQ ID NO: 540561 - DNA, 15 bp, Homo sapiens
ccctgtgagtaaaat

SEQ ID NO: 540562 - DNA, 15 bp, Homo sapiens
cctgtgagtaaaatc

SEQ ID NO: 540563 - DNA, 15 bp, Homo sapiens
ctgtgagtaaaatct

SEQ ID NO: 540564 - DNA, 15 bp, Homo sapiens
tgtgagtaaaatctc

SEQ ID NO: 540565 - DNA, 15 bp, Homo sapiens
gtgagtaaaatctcc

SEQ ID NO: 540566 - DNA, 15 bp, Homo sapiens
tgagtaaaatctccc

SEQ ID NO: 540567 - DNA, 15 bp, Homo sapiens
gagtaaaatctccct

SEQ ID NO: 540568 - DNA, 15 bp, Homo sapiens
agtaaaatctccctg

SEQ ID NO: 540569 - DNA, 15 bp, Homo sapiens
gtaaaatctccctga

SEQ ID NO: 540570 - DNA, 15 bp, Homo sapiens
taaaatctccctgag

SEQ ID NO: 540571 - DNA, 15 bp, Homo sapiens
aaaatctccctgagg

SEQ ID NO: 540572 - DNA, 15 bp, Homo sapiens
aaatctccctgaggc

SEQ ID NO: 540573 - DNA, 15 bp, Homo sapiens
aatctccctgaggca

SEQ ID NO: 540574 - DNA, 15 bp, Homo sapiens
atctccctgaggcag

SEQ ID NO: 540575 - DNA, 15 bp, Homo sapiens
tctccctgaggcagg

SEQ ID NO: 540576 - DNA, 15 bp, Homo sapiens
ctccctgaggcaggt

SEQ ID NO: 540577 - DNA, 15 bp, Homo sapiens
tccctgaggcaggtt

SEQ ID NO: 540578 - DNA, 15 bp, Homo sapiens
ccctgaggcaggttc

SEQ ID NO: 540579 - DNA, 15 bp, Homo sapiens
cctgaggcaggttct

SEQ ID NO: 540580 - DNA, 15 bp, Homo sapiens
ctgaggcaggttcta

SEQ ID NO: 540581 - DNA, 15 bp, Homo sapiens
tgaggcaggttctat

SEQ ID NO: 540582 - DNA, 15 bp, Homo sapiens
gaggcaggttctatg

SEQ ID NO: 540583 - DNA, 15 bp, Homo sapiens
aggcaggttctatgc

SEQ ID NO: 540584 - DNA, 15 bp, Homo sapiens
ggcaggttctatgcc

SEQ ID NO: 540585 - DNA, 15 bp, Homo sapiens
gcaggttctatgcct

SEQ ID NO: 540586 - DNA, 15 bp, Homo sapiens
caggttctatgcctt

SEQ ID NO: 540587 - DNA, 15 bp, Homo sapiens
aggttctatgccttc

SEQ ID NO: 540588 - DNA, 15 bp, Homo sapiens
ggttctatgccttct

SEQ ID NO: 540589 - DNA, 15 bp, Homo sapiens
gttctatgccttctc

SEQ ID NO: 540590 - DNA, 15 bp, Homo sapiens
ttctatgccttctct

SEQ ID NO: 540591 - DNA, 15 bp, Homo sapiens
tctatgccttctctt

SEQ ID NO: 540592 - DNA, 15 bp, Homo sapiens
ctatgccttctcttg

SEQ ID NO: 540593 - DNA, 15 bp, Homo sapiens
tatgccttctcttgt

SEQ ID NO: 540594 - DNA, 15 bp, Homo sapiens
atgccttctcttgtc

SEQ ID NO: 540595 - DNA, 15 bp, Homo sapiens
tgccttctcttgtcc

SEQ ID NO: 540596 - DNA, 15 bp, Homo sapiens
gccttctcttgtcca

SEQ ID NO: 540597 - DNA, 15 bp, Homo sapiens
ccttctcttgtccat

SEQ ID NO: 540598 - DNA, 15 bp, Homo sapiens
cttctcttgtccatt

SEQ ID NO: 540599 - DNA, 15 bp, Homo sapiens
ttctcttgtccattc

SEQ ID NO: 540600 - DNA, 15 bp, Homo sapiens
tctcttgtccattcc

SEQ ID NO: 540601 - DNA, 15 bp, Homo sapiens
ctcttgtccattccc

SEQ ID NO: 540602 - DNA, 15 bp, Homo sapiens
tcttgtccattcccc

SEQ ID NO: 540603 - DNA, 15 bp, Homo sapiens
cttgtccattcccct

SEQ ID NO: 540604 - DNA, 15 bp, Homo sapiens
ttgtccattcccctt

SEQ ID NO: 540605 - DNA, 15 bp, Homo sapiens
tgtccattccccttg

SEQ ID NO: 540606 - DNA, 15 bp, Homo sapiens
gtccattccccttgg

SEQ ID NO: 540607 - DNA, 15 bp, Homo sapiens
tccattccccttggg

SEQ ID NO: 540608 - DNA, 15 bp, Homo sapiens
ccattccccttgggc

SEQ ID NO: 540609 - DNA, 15 bp, Homo sapiens
cattccccttgggca

SEQ ID NO: 540610 - DNA, 15 bp, Homo sapiens
attccccttgggcac

SEQ ID NO: 540611 - DNA, 15 bp, Homo sapiens
ttccccttgggcacc

SEQ ID NO: 540612 - DNA, 15 bp, Homo sapiens
tccccttgggcaccc

SEQ ID NO: 540613 - DNA, 15 bp, Homo sapiens
ccccttgggcaccca

SEQ ID NO: 540614 - DNA, 15 bp, Homo sapiens
cccttgggcacccag

SEQ ID NO: 540615 - DNA, 15 bp, Homo sapiens
ccttgggcacccagt

SEQ ID NO: 540616 - DNA, 15 bp, Homo sapiens
cttgggcacccagta

SEQ ID NO: 540617 - DNA, 15 bp, Homo sapiens
ttgggcacccagtat

SEQ ID NO: 540618 - DNA, 15 bp, Homo sapiens
tgggcacccagtatg

SEQ ID NO: 540619 - DNA, 15 bp, Homo sapiens
gggcacccagtatgc

SEQ ID NO: 540620 - DNA, 15 bp, Homo sapiens
ggcacccagtatgcc

SEQ ID NO: 540621 - DNA, 15 bp, Homo sapiens
gcacccagtatgccc

SEQ ID NO: 540622 - DNA, 15 bp, Homo sapiens
cacccagtatgccct

SEQ ID NO: 540623 - DNA, 15 bp, Homo sapiens
acccagtatgccctg

SEQ ID NO: 540624 - DNA, 15 bp, Homo sapiens
cccagtatgccctga

SEQ ID NO: 540625 - DNA, 15 bp, Homo sapiens
ccagtatgccctgag

SEQ ID NO: 540626 - DNA, 15 bp, Homo sapiens
cagtatgccctgagt

SEQ ID NO: 540627 - DNA, 15 bp, Homo sapiens
agtatgccctgagtg

SEQ ID NO: 540628 - DNA, 15 bp, Homo sapiens
gtatgccctgagtgt

SEQ ID NO: 540629 - DNA, 15 bp, Homo sapiens
tatgccctgagtgtc

SEQ ID NO: 540630 - DNA, 15 bp, Homo sapiens
atgccctgagtgtcc

SEQ ID NO: 540631 - DNA, 15 bp, Homo sapiens
tgccctgagtgtcct

SEQ ID NO: 540632 - DNA, 15 bp, Homo sapiens
gccctgagtgtcctt

SEQ ID NO: 540633 - DNA, 15 bp, Homo sapiens
ccctgagtgtccttg

SEQ ID NO: 540634 - DNA, 15 bp, Homo sapiens
cctgagtgtccttgt

SEQ ID NO: 540635 - DNA, 15 bp, Homo sapiens
ctgagtgtccttgtg

SEQ ID NO: 540636 - DNA, 15 bp, Homo sapiens
tgagtgtccttgtga

SEQ ID NO: 540637 - DNA, 15 bp, Homo sapiens
gagtgtccttgtgac

SEQ ID NO: 540638 - DNA, 15 bp, Homo sapiens
agtgtccttgtgacc

SEQ ID NO: 540639 - DNA, 15 bp, Homo sapiens
gtgtccttgtgacca

SEQ ID NO: 540640 - DNA, 15 bp, Homo sapiens
tgtccttgtgaccag

SEQ ID NO: 540641 - DNA, 15 bp, Homo sapiens
gtccttgtgaccaga

SEQ ID NO: 540642 - DNA, 15 bp, Homo sapiens
tccttgtgaccagag

SEQ ID NO: 540643 - DNA, 15 bp, Homo sapiens
ccttgtgaccagagc

SEQ ID NO: 540644 - DNA, 15 bp, Homo sapiens
cttgtgaccagagcc

SEQ ID NO: 540645 - DNA, 15 bp, Homo sapiens
ttgtgaccagagcca

SEQ ID NO: 540646 - DNA, 15 bp, Homo sapiens
tgtgaccagagccac

SEQ ID NO: 540647 - DNA, 15 bp, Homo sapiens
gtgaccagagccact

SEQ ID NO: 540648 - DNA, 15 bp, Homo sapiens
tgaccagagccactc

SEQ ID NO: 540649 - DNA, 15 bp, Homo sapiens
gaccagagccactcc

SEQ ID NO: 540650 - DNA, 15 bp, Homo sapiens
accagagccactcct

SEQ ID NO: 540651 - DNA, 15 bp, Homo sapiens
ccagagccactcctg

SEQ ID NO: 540652 - DNA, 15 bp, Homo sapiens
cagagccactcctgt

SEQ ID NO: 540653 - DNA, 15 bp, Homo sapiens
agagccactcctgtt

SEQ ID NO: 540654 - DNA, 15 bp, Homo sapiens
gagccactcctgttt

SEQ ID NO: 540655 - DNA, 15 bp, Homo sapiens
agccactcctgtttt

SEQ ID NO: 540656 - DNA, 15 bp, Homo sapiens
gccactcctgttttg

SEQ ID NO: 540657 - DNA, 15 bp, Homo sapiens
ccactcctgttttgc

SEQ ID NO: 540658 - DNA, 15 bp, Homo sapiens
cactcctgttttgca

SEQ ID NO: 540659 - DNA, 15 bp, Homo sapiens
actcctgttttgcag

SEQ ID NO: 540660 - DNA, 15 bp, Homo sapiens
ctcctgttttgcagt

SEQ ID NO: 540661 - DNA, 15 bp, Homo sapiens
tcctgttttgcagta

SEQ ID NO: 540662 - DNA, 15 bp, Homo sapiens
cctgttttgcagtaa

SEQ ID NO: 540663 - DNA, 15 bp, Homo sapiens
ctgttttgcagtaag

SEQ ID NO: 540664 - DNA, 15 bp, Homo sapiens
tgttttgcagtaagg

SEQ ID NO: 540665 - DNA, 15 bp, Homo sapiens
gttttgcagtaaggg

SEQ ID NO: 540666 - DNA, 15 bp, Homo sapiens
ttttgcagtaaggga

SEQ ID NO: 540667 - DNA, 15 bp, Homo sapiens
tttgcagtaagggaa

SEQ ID NO: 540668 - DNA, 15 bp, Homo sapiens
ttgcagtaagggaag

SEQ ID NO: 540669 - DNA, 15 bp, Homo sapiens
tgcagtaagggaagc

SEQ ID NO: 540670 - DNA, 15 bp, Homo sapiens
gcagtaagggaagcc

SEQ ID NO: 540671 - DNA, 15 bp, Homo sapiens
cagtaagggaagcca

SEQ ID NO: 540672 - DNA, 15 bp, Homo sapiens
agtaagggaagccaa

SEQ ID NO: 540673 - DNA, 15 bp, Homo sapiens
gtaagggaagccaaa

SEQ ID NO: 540674 - DNA, 15 bp, Homo sapiens
taagggaagccaaac

SEQ ID NO: 540675 - DNA, 15 bp, Homo sapiens
aagggaagccaaaca

SEQ ID NO: 540676 - DNA, 15 bp, Homo sapiens
agggaagccaaacaa

SEQ ID NO: 540677 - DNA, 15 bp, Homo sapiens
gggaagccaaacaag

SEQ ID NO: 540678 - DNA, 15 bp, Homo sapiens
ggaagccaaacaagg

SEQ ID NO: 540679 - DNA, 15 bp, Homo sapiens
gaagccaaacaagga

SEQ ID NO: 540680 - DNA, 15 bp, Homo sapiens
aagccaaacaaggag

SEQ ID NO: 540681 - DNA, 15 bp, Homo sapiens
agccaaacaaggagc

SEQ ID NO: 540682 - DNA, 15 bp, Homo sapiens
gccaaacaaggagca

SEQ ID NO: 540683 - DNA, 15 bp, Homo sapiens
ccaaacaaggagcag

SEQ ID NO: 540684 - DNA, 15 bp, Homo sapiens
caaacaaggagcaga

SEQ ID NO: 540685 - DNA, 15 bp, Homo sapiens
aaacaaggagcagag

SEQ ID NO: 540686 - DNA, 15 bp, Homo sapiens
aacaaggagcagagt

SEQ ID NO: 540687 - DNA, 15 bp, Homo sapiens
acaaggagcagagtc

SEQ ID NO: 540688 - DNA, 15 bp, Homo sapiens
caaggagcagagtca

SEQ ID NO: 540689 - DNA, 15 bp, Homo sapiens
aaggagcagagtcaa

SEQ ID NO: 540690 - DNA, 15 bp, Homo sapiens
aggagcagagtcaag

SEQ ID NO: 540691 - DNA, 15 bp, Homo sapiens
ggagcagagtcaagg

SEQ ID NO: 540692 - DNA, 15 bp, Homo sapiens
gagcagagtcaaggc

SEQ ID NO: 540693 - DNA, 15 bp, Homo sapiens
agcagagtcaaggca

SEQ ID NO: 540694 - DNA, 15 bp, Homo sapiens
gcagagtcaaggcaa

SEQ ID NO: 540695 - DNA, 15 bp, Homo sapiens
cagagtcaaggcaaa

SEQ ID NO: 540696 - DNA, 15 bp, Homo sapiens
agagtcaaggcaaac

SEQ ID NO: 540697 - DNA, 15 bp, Homo sapiens
gagtcaaggcaaacg

SEQ ID NO: 540698 - DNA, 15 bp, Homo sapiens
agtcaaggcaaacgt

SEQ ID NO: 540699 - DNA, 15 bp, Homo sapiens
gtcaaggcaaacgtt

SEQ ID NO: 540700 - DNA, 15 bp, Homo sapiens
tcaaggcaaacgttc

SEQ ID NO: 540701 - DNA, 15 bp, Homo sapiens
caaggcaaacgttcc

SEQ ID NO: 540702 - DNA, 15 bp, Homo sapiens
aaggcaaacgttcca

SEQ ID NO: 540703 - DNA, 15 bp, Homo sapiens
aggcaaacgttccag

SEQ ID NO: 540704 - DNA, 15 bp, Homo sapiens
ggcaaacgttccagt

SEQ ID NO: 540705 - DNA, 15 bp, Homo sapiens
gcaaacgttccagtg

SEQ ID NO: 540706 - DNA, 15 bp, Homo sapiens
caaacgttccagtgc

SEQ ID NO: 540707 - DNA, 15 bp, Homo sapiens
aaacgttccagtgcg

SEQ ID NO: 540708 - DNA, 15 bp, Homo sapiens
aacgttccagtgcgt

SEQ ID NO: 540709 - DNA, 15 bp, Homo sapiens
acgttccagtgcgtt

SEQ ID NO: 540710 - DNA, 15 bp, Homo sapiens
cgttccagtgcgttc

SEQ ID NO: 540711 - DNA, 15 bp, Homo sapiens
gttccagtgcgttct

SEQ ID NO: 540712 - DNA, 15 bp, Homo sapiens
ttccagtgcgttctg

SEQ ID NO: 540713 - DNA, 15 bp, Homo sapiens
tccagtgcgttctgt

SEQ ID NO: 540714 - DNA, 15 bp, Homo sapiens
ccagtgcgttctgta

SEQ ID NO: 540715 - DNA, 15 bp, Homo sapiens
cagtgcgttctgtat

SEQ ID NO: 540716 - DNA, 15 bp, Homo sapiens
agtgcgttctgtatt

SEQ ID NO: 540717 - DNA, 15 bp, Homo sapiens
gtgcgttctgtattg

SEQ ID NO: 540718 - DNA, 15 bp, Homo sapiens
tgcgttctgtattgg

SEQ ID NO: 540719 - DNA, 15 bp, Homo sapiens
gcgttctgtattggg

SEQ ID NO: 540720 - DNA, 15 bp, Homo sapiens
cgttctgtattggga

SEQ ID NO: 540721 - DNA, 15 bp, Homo sapiens
gttctgtattgggat

SEQ ID NO: 540722 - DNA, 15 bp, Homo sapiens
ttctgtattgggatt

SEQ ID NO: 540723 - DNA, 15 bp, Homo sapiens
tctgtattgggattc

SEQ ID NO: 540724 - DNA, 15 bp, Homo sapiens
ctgtattgggattct

SEQ ID NO: 540725 - DNA, 15 bp, Homo sapiens
tgtattgggattctt

SEQ ID NO: 540726 - DNA, 15 bp, Homo sapiens
gtattgggattcttc

SEQ ID NO: 540727 - DNA, 15 bp, Homo sapiens
tattgggattcttcc

SEQ ID NO: 540728 - DNA, 15 bp, Homo sapiens
attgggattcttccc

SEQ ID NO: 540729 - DNA, 15 bp, Homo sapiens
ttgggattcttccct

SEQ ID NO: 540730 - DNA, 15 bp, Homo sapiens
tgggattcttccctt

SEQ ID NO: 540731 - DNA, 15 bp, Homo sapiens
gggattcttcccttc

SEQ ID NO: 540732 - DNA, 15 bp, Homo sapiens
ggattcttcccttca

SEQ ID NO: 540733 - DNA, 15 bp, Homo sapiens
gattcttcccttcag

SEQ ID NO: 540734 - DNA, 15 bp, Homo sapiens
attcttcccttcagg

SEQ ID NO: 540735 - DNA, 15 bp, Homo sapiens
ttcttcccttcaggc

SEQ ID NO: 540736 - DNA, 15 bp, Homo sapiens
tcttcccttcaggca

SEQ ID NO: 540737 - DNA, 15 bp, Homo sapiens
cttcccttcaggcac

SEQ ID NO: 540738 - DNA, 15 bp, Homo sapiens
ttcccttcaggcaca

SEQ ID NO: 540739 - DNA, 15 bp, Homo sapiens
tcccttcaggcacag

SEQ ID NO: 540740 - DNA, 15 bp, Homo sapiens
cccttcaggcacaga

SEQ ID NO: 540741 - DNA, 15 bp, Homo sapiens
ccttcaggcacagaa

SEQ ID NO: 540742 - DNA, 15 bp, Homo sapiens
cttcaggcacagaaa

SEQ ID NO: 540743 - DNA, 15 bp, Homo sapiens
ttcaggcacagaaat

SEQ ID NO: 540744 - DNA, 15 bp, Homo sapiens
tcaggcacagaaatt

SEQ ID NO: 540745 - DNA, 15 bp, Homo sapiens
caggcacagaaattc

SEQ ID NO: 540746 - DNA, 15 bp, Homo sapiens
aggcacagaaattct

SEQ ID NO: 540747 - DNA, 15 bp, Homo sapiens
ggcacagaaattctc

SEQ ID NO: 540748 - DNA, 15 bp, Homo sapiens
gcacagaaattctca

SEQ ID NO: 540749 - DNA, 15 bp, Homo sapiens
cacagaaattctcat

SEQ ID NO: 540750 - DNA, 15 bp, Homo sapiens
acagaaattctcatt

SEQ ID NO: 540751 - DNA, 15 bp, Homo sapiens
cagaaattctcattt

SEQ ID NO: 540752 - DNA, 15 bp, Homo sapiens
agaaattctcatttg

SEQ ID NO: 540753 - DNA, 15 bp, Homo sapiens
gaaattctcatttgc

SEQ ID NO: 540754 - DNA, 15 bp, Homo sapiens
aaattctcatttgca

SEQ ID NO: 540755 - DNA, 15 bp, Homo sapiens
aattctcatttgcac

SEQ ID NO: 540756 - DNA, 15 bp, Homo sapiens
attctcatttgcact

SEQ ID NO: 540757 - DNA, 15 bp, Homo sapiens
ttctcatttgcactc

SEQ ID NO: 540758 - DNA, 15 bp, Homo sapiens
tctcatttgcactcc

SEQ ID NO: 540759 - DNA, 15 bp, Homo sapiens
ctcatttgcactccc

SEQ ID NO: 540760 - DNA, 15 bp, Homo sapiens
tcatttgcactcccc

SEQ ID NO: 540761 - DNA, 15 bp, Homo sapiens
catttgcactcccca

SEQ ID NO: 540762 - DNA, 15 bp, Homo sapiens
atttgcactccccat

SEQ ID NO: 540763 - DNA, 15 bp, Homo sapiens
tttgcactccccatt

SEQ ID NO: 540764 - DNA, 15 bp, Homo sapiens
ttgcactccccattt

SEQ ID NO: 540765 - DNA, 15 bp, Homo sapiens
tgcactccccatttg

SEQ ID NO: 540766 - DNA, 15 bp, Homo sapiens
gcactccccatttgc

SEQ ID NO: 540767 - DNA, 15 bp, Homo sapiens
cactccccatttgcc

SEQ ID NO: 540768 - DNA, 15 bp, Homo sapiens
actccccatttgccc

SEQ ID NO: 540769 - DNA, 15 bp, Homo sapiens
ctccccatttgccct

SEQ ID NO: 540770 - DNA, 15 bp, Homo sapiens
tccccatttgccctg

SEQ ID NO: 540771 - DNA, 15 bp, Homo sapiens
ccccatttgccctgg

SEQ ID NO: 540772 - DNA, 15 bp, Homo sapiens
cccatttgccctggt

SEQ ID NO: 540773 - DNA, 15 bp, Homo sapiens
ccatttgccctggtg

SEQ ID NO: 540774 - DNA, 15 bp, Homo sapiens
catttgccctggtgg

SEQ ID NO: 540775 - DNA, 15 bp, Homo sapiens
atttgccctggtggg

SEQ ID NO: 540776 - DNA, 15 bp, Homo sapiens
tttgccctggtgggc

SEQ ID NO: 540777 - DNA, 15 bp, Homo sapiens
ttgccctggtgggca

SEQ ID NO: 540778 - DNA, 15 bp, Homo sapiens
tgccctggtgggcat

SEQ ID NO: 540779 - DNA, 15 bp, Homo sapiens
gccctggtgggcatc

SEQ ID NO: 540780 - DNA, 15 bp, Homo sapiens
ccctggtgggcatcc

SEQ ID NO: 540781 - DNA, 15 bp, Homo sapiens
cctggtgggcatccc

SEQ ID NO: 540782 - DNA, 15 bp, Homo sapiens
ctggtgggcatccca

SEQ ID NO: 540783 - DNA, 15 bp, Homo sapiens
tggtgggcatcccag

SEQ ID NO: 540784 - DNA, 15 bp, Homo sapiens
ggtgggcatcccagc

SEQ ID NO: 540785 - DNA, 15 bp, Homo sapiens
gtgggcatcccagct

SEQ ID NO: 540786 - DNA, 15 bp, Homo sapiens
tgggcatcccagctg

SEQ ID NO: 540787 - DNA, 15 bp, Homo sapiens
gggcatcccagctgt

SEQ ID NO: 540788 - DNA, 15 bp, Homo sapiens
ggcatcccagctgta

SEQ ID NO: 540789 - DNA, 15 bp, Homo sapiens
gcatcccagctgtac

SEQ ID NO: 540790 - DNA, 15 bp, Homo sapiens
catcccagctgtacc

SEQ ID NO: 540791 - DNA, 15 bp, Homo sapiens
atcccagctgtacct

SEQ ID NO: 540792 - DNA, 15 bp, Homo sapiens
tcccagctgtacctg

SEQ ID NO: 540793 - DNA, 15 bp, Homo sapiens
cccagctgtacctga

SEQ ID NO: 540794 - DNA, 15 bp, Homo sapiens
ccagctgtacctgag

SEQ ID NO: 540795 - DNA, 15 bp, Homo sapiens
cagctgtacctgagt

SEQ ID NO: 540796 - DNA, 15 bp, Homo sapiens
agctgtacctgagta

SEQ ID NO: 540797 - DNA, 15 bp, Homo sapiens
gctgtacctgagtat

SEQ ID NO: 540798 - DNA, 15 bp, Homo sapiens
ctgtacctgagtatc

SEQ ID NO: 540799 - DNA, 15 bp, Homo sapiens
tgtacctgagtatca

SEQ ID NO: 540800 - DNA, 15 bp, Homo sapiens
gtacctgagtatcag

SEQ ID NO: 540801 - DNA, 15 bp, Homo sapiens
tacctgagtatcagg

SEQ ID NO: 540802 - DNA, 15 bp, Homo sapiens
acctgagtatcaggt

SEQ ID NO: 540803 - DNA, 15 bp, Homo sapiens
cctgagtatcaggta

SEQ ID NO: 540804 - DNA, 15 bp, Homo sapiens
ctgagtatcaggtaa

SEQ ID NO: 540805 - DNA, 15 bp, Homo sapiens
tgagtatcaggtaaa

SEQ ID NO: 540806 - DNA, 15 bp, Homo sapiens
gagtatcaggtaaac

SEQ ID NO: 540807 - DNA, 15 bp, Homo sapiens
agtatcaggtaaacc

SEQ ID NO: 540808 - DNA, 15 bp, Homo sapiens
gtatcaggtaaacct

SEQ ID NO: 540809 - DNA, 15 bp, Homo sapiens
tatcaggtaaacctg

SEQ ID NO: 540810 - DNA, 15 bp, Homo sapiens
atcaggtaaacctgc

SEQ ID NO: 540811 - DNA, 15 bp, Homo sapiens
tcaggtaaacctgcc

SEQ ID NO: 540812 - DNA, 15 bp, Homo sapiens
caggtaaacctgcct

SEQ ID NO: 540813 - DNA, 15 bp, Homo sapiens
aggtaaacctgcctt

SEQ ID NO: 540814 - DNA, 15 bp, Homo sapiens
ggtaaacctgccttg

SEQ ID NO: 540815 - DNA, 15 bp, Homo sapiens
gtaaacctgccttgg

SEQ ID NO: 540816 - DNA, 15 bp, Homo sapiens
taaacctgccttggc

SEQ ID NO: 540817 - DNA, 15 bp, Homo sapiens
aaacctgccttggct

SEQ ID NO: 540818 - DNA, 15 bp, Homo sapiens
aacctgccttggcta

SEQ ID NO: 540819 - DNA, 15 bp, Homo sapiens
acctgccttggctac

SEQ ID NO: 540820 - DNA, 15 bp, Homo sapiens
cctgccttggctaca

SEQ ID NO: 540821 - DNA, 15 bp, Homo sapiens
ctgccttggctacat

SEQ ID NO: 540822 - DNA, 15 bp, Homo sapiens
tgccttggctacatc

SEQ ID NO: 540823 - DNA, 15 bp, Homo sapiens
gccttggctacatca

SEQ ID NO: 540824 - DNA, 15 bp, Homo sapiens
ccttggctacatcaa

SEQ ID NO: 540825 - DNA, 15 bp, Homo sapiens
cttggctacatcaag

SEQ ID NO: 540826 - DNA, 15 bp, Homo sapiens
ttggctacatcaagt

SEQ ID NO: 540827 - DNA, 15 bp, Homo sapiens
tggctacatcaagtc

SEQ ID NO: 540828 - DNA, 15 bp, Homo sapiens
ggctacatcaagtcc

SEQ ID NO: 540829 - DNA, 15 bp, Homo sapiens
gctacatcaagtcca

SEQ ID NO: 540830 - DNA, 15 bp, Homo sapiens
ctacatcaagtccag

SEQ ID NO: 540831 - DNA, 15 bp, Homo sapiens
tacatcaagtccagg

SEQ ID NO: 540832 - DNA, 15 bp, Homo sapiens
acatcaagtccaggg

SEQ ID NO: 540833 - DNA, 15 bp, Homo sapiens
catcaagtccaggga

SEQ ID NO: 540834 - DNA, 15 bp, Homo sapiens
atcaagtccagggat

SEQ ID NO: 540835 - DNA, 15 bp, Homo sapiens
tcaagtccagggata

SEQ ID NO: 540836 - DNA, 15 bp, Homo sapiens
caagtccagggatat

SEQ ID NO: 540837 - DNA, 15 bp, Homo sapiens
aagtccagggatatg

SEQ ID NO: 540838 - DNA, 15 bp, Homo sapiens
agtccagggatatga

SEQ ID NO: 540839 - DNA, 15 bp, Homo sapiens
gtccagggatatgat

SEQ ID NO: 540840 - DNA, 15 bp, Homo sapiens
tccagggatatgatg

SEQ ID NO: 540841 - DNA, 15 bp, Homo sapiens
ccagggatatgatga

SEQ ID NO: 540842 - DNA, 15 bp, Homo sapiens
cagggatatgatgaa

SEQ ID NO: 540843 - DNA, 15 bp, Homo sapiens
agggatatgatgaac

SEQ ID NO: 540844 - DNA, 15 bp, Homo sapiens
gggatatgatgaacc

SEQ ID NO: 540845 - DNA, 15 bp, Homo sapiens
ggatatgatgaacca

SEQ ID NO: 540846 - DNA, 15 bp, Homo sapiens
gatatgatgaaccat

SEQ ID NO: 540847 - DNA, 15 bp, Homo sapiens
atatgatgaaccatc

SEQ ID NO: 540848 - DNA, 15 bp, Homo sapiens
tatgatgaaccatct

SEQ ID NO: 540849 - DNA, 15 bp, Homo sapiens
atgatgaaccatcta

SEQ ID NO: 540850 - DNA, 15 bp, Homo sapiens
tgatgaaccatctag

SEQ ID NO: 540851 - DNA, 15 bp, Homo sapiens
gatgaaccatctaga

SEQ ID NO: 540852 - DNA, 15 bp, Homo sapiens
atgaaccatctagaa

SEQ ID NO: 540853 - DNA, 15 bp, Homo sapiens
tgaaccatctagaac

SEQ ID NO: 540854 - DNA, 15 bp, Homo sapiens
gaaccatctagaact

SEQ ID NO: 540855 - DNA, 15 bp, Homo sapiens
aaccatctagaacta

SEQ ID NO: 540856 - DNA, 15 bp, Homo sapiens
accatctagaactaa

SEQ ID NO: 540857 - DNA, 15 bp, Homo sapiens
ccatctagaactaac

SEQ ID NO: 540858 - DNA, 15 bp, Homo sapiens
catctagaactaacc

SEQ ID NO: 540859 - DNA, 15 bp, Homo sapiens
atctagaactaacca

SEQ ID NO: 540860 - DNA, 15 bp, Homo sapiens
tctagaactaaccac

SEQ ID NO: 540861 - DNA, 15 bp, Homo sapiens
ctagaactaaccaca

SEQ ID NO: 540862 - DNA, 15 bp, Homo sapiens
tagaactaaccacat

SEQ ID NO: 540863 - DNA, 15 bp, Homo sapiens
agaactaaccacatt

SEQ ID NO: 540864 - DNA, 15 bp, Homo sapiens
gaactaaccacattc

SEQ ID NO: 540865 - DNA, 15 bp, Homo sapiens
aactaaccacattca

SEQ ID NO: 540866 - DNA, 15 bp, Homo sapiens
actaaccacattcaa

SEQ ID NO: 540867 - DNA, 15 bp, Homo sapiens
ctaaccacattcaat

SEQ ID NO: 540868 - DNA, 15 bp, Homo sapiens
taaccacattcaatt

SEQ ID NO: 540869 - DNA, 15 bp, Homo sapiens
aaccacattcaatta

SEQ ID NO: 540870 - DNA, 15 bp, Homo sapiens
accacattcaattag

SEQ ID NO: 540871 - DNA, 15 bp, Homo sapiens
ccacattcaattagt

SEQ ID NO: 540872 - DNA, 15 bp, Homo sapiens
cacattcaattagtc

SEQ ID NO: 540873 - DNA, 15 bp, Homo sapiens
acattcaattagtcc

SEQ ID NO: 540874 - DNA, 15 bp, Homo sapiens
cattcaattagtccc

SEQ ID NO: 540875 - DNA, 15 bp, Homo sapiens
attcaattagtcccc

SEQ ID NO: 540876 - DNA, 15 bp, Homo sapiens
ttcaattagtcccct

SEQ ID NO: 540877 - DNA, 15 bp, Homo sapiens
tcaattagtccccta

SEQ ID NO: 540878 - DNA, 15 bp, Homo sapiens
caattagtcccctag

SEQ ID NO: 540879 - DNA, 15 bp, Homo sapiens
aattagtcccctagc

SEQ ID NO: 540880 - DNA, 15 bp, Homo sapiens
attagtcccctagcc

SEQ ID NO: 540881 - DNA, 15 bp, Homo sapiens
ttagtcccctagcca

SEQ ID NO: 540882 - DNA, 15 bp, Homo sapiens
tagtcccctagccaa

SEQ ID NO: 540883 - DNA, 15 bp, Homo sapiens
agtcccctagccaag

SEQ ID NO: 540884 - DNA, 15 bp, Homo sapiens
gtcccctagccaagg

SEQ ID NO: 540885 - DNA, 15 bp, Homo sapiens
tcccctagccaaggg

SEQ ID NO: 540886 - DNA, 15 bp, Homo sapiens
cccctagccaagggt

SEQ ID NO: 540887 - DNA, 15 bp, Homo sapiens
ccctagccaagggtg

SEQ ID NO: 540888 - DNA, 15 bp, Homo sapiens
cctagccaagggtgg

SEQ ID NO: 540889 - DNA, 15 bp, Homo sapiens
ctagccaagggtggg

SEQ ID NO: 540890 - DNA, 15 bp, Homo sapiens
tagccaagggtgggg

SEQ ID NO: 540891 - DNA, 15 bp, Homo sapiens
agccaagggtggggt

SEQ ID NO: 540892 - DNA, 15 bp, Homo sapiens
gccaagggtggggtg

SEQ ID NO: 540893 - DNA, 15 bp, Homo sapiens
ccaagggtggggtga

SEQ ID NO: 540894 - DNA, 15 bp, Homo sapiens
caagggtggggtgaa

SEQ ID NO: 540895 - DNA, 15 bp, Homo sapiens
aagggtggggtgaag

SEQ ID NO: 540896 - DNA, 15 bp, Homo sapiens
agggtggggtgaagg

SEQ ID NO: 540897 - DNA, 15 bp, Homo sapiens
gggtggggtgaagga

SEQ ID NO: 540898 - DNA, 15 bp, Homo sapiens
ggtggggtgaaggaa

SEQ ID NO: 540899 - DNA, 15 bp, Homo sapiens
gtggggtgaaggaaa

SEQ ID NO: 540900 - DNA, 15 bp, Homo sapiens
tggggtgaaggaaat

SEQ ID NO: 540901 - DNA, 15 bp, Homo sapiens
ggggtgaaggaaatg

SEQ ID NO: 540902 - DNA, 15 bp, Homo sapiens
gggtgaaggaaatga

SEQ ID NO: 540903 - DNA, 15 bp, Homo sapiens
ggtgaaggaaatgag

SEQ ID NO: 540904 - DNA, 15 bp, Homo sapiens
gtgaaggaaatgaga

SEQ ID NO: 540905 - DNA, 15 bp, Homo sapiens
tgaaggaaatgagag

SEQ ID NO: 540906 - DNA, 15 bp, Homo sapiens
gaaggaaatgagagg

SEQ ID NO: 540907 - DNA, 15 bp, Homo sapiens
aaggaaatgagagga

SEQ ID NO: 540908 - DNA, 15 bp, Homo sapiens
aggaaatgagaggaa

SEQ ID NO: 540909 - DNA, 15 bp, Homo sapiens
ggaaatgagaggaac

SEQ ID NO: 540910 - DNA, 15 bp, Homo sapiens
gaaatgagaggaacc

SEQ ID NO: 540911 - DNA, 15 bp, Homo sapiens
aaatgagaggaacct

SEQ ID NO: 540912 - DNA, 15 bp, Homo sapiens
aatgagaggaaccta

SEQ ID NO: 540913 - DNA, 15 bp, Homo sapiens
atgagaggaacctac

SEQ ID NO: 540914 - DNA, 15 bp, Homo sapiens
tgagaggaacctaca

SEQ ID NO: 540915 - DNA, 15 bp, Homo sapiens
gagaggaacctacaa

SEQ ID NO: 540916 - DNA, 15 bp, Homo sapiens
agaggaacctacaac

SEQ ID NO: 540917 - DNA, 15 bp, Homo sapiens
gaggaacctacaact

SEQ ID NO: 540918 - DNA, 15 bp, Homo sapiens
aggaacctacaactt

SEQ ID NO: 540919 - DNA, 15 bp, Homo sapiens
ggaacctacaacttt

SEQ ID NO: 540920 - DNA, 15 bp, Homo sapiens
gaacctacaactttt

SEQ ID NO: 540921 - DNA, 15 bp, Homo sapiens
aacctacaacttttt

SEQ ID NO: 540922 - DNA, 15 bp, Homo sapiens
acctacaactttttg

SEQ ID NO: 540923 - DNA, 15 bp, Homo sapiens
cctacaactttttgc

SEQ ID NO: 540924 - DNA, 15 bp, Homo sapiens
ctacaactttttgca

SEQ ID NO: 540925 - DNA, 15 bp, Homo sapiens
tacaactttttgcaa

SEQ ID NO: 540926 - DNA, 15 bp, Homo sapiens
acaactttttgcaac

SEQ ID NO: 540927 - DNA, 15 bp, Homo sapiens
caactttttgcaacc

SEQ ID NO: 540928 - DNA, 15 bp, Homo sapiens
aactttttgcaacct

SEQ ID NO: 540929 - DNA, 15 bp, Homo sapiens
actttttgcaacctc

SEQ ID NO: 540930 - DNA, 15 bp, Homo sapiens
ctttttgcaacctct

SEQ ID NO: 540931 - DNA, 15 bp, Homo sapiens
tttttgcaacctcta

SEQ ID NO: 540932 - DNA, 15 bp, Homo sapiens
ttttgcaacctctac

SEQ ID NO: 540933 - DNA, 15 bp, Homo sapiens
tttgcaacctctact

SEQ ID NO: 540934 - DNA, 15 bp, Homo sapiens
ttgcaacctctactc

SEQ ID NO: 540935 - DNA, 15 bp, Homo sapiens
tgcaacctctactcc

SEQ ID NO: 540936 - DNA, 15 bp, Homo sapiens
gcaacctctactcca

SEQ ID NO: 540937 - DNA, 15 bp, Homo sapiens
caacctctactccaa

SEQ ID NO: 540938 - DNA, 15 bp, Homo sapiens
aacctctactccaac

SEQ ID NO: 540939 - DNA, 15 bp, Homo sapiens
acctctactccaacc

SEQ ID NO: 540940 - DNA, 15 bp, Homo sapiens
cctctactccaaccg

SEQ ID NO: 540941 - DNA, 15 bp, Homo sapiens
ctctactccaaccgc

SEQ ID NO: 540942 - DNA, 15 bp, Homo sapiens
tctactccaaccgcc

SEQ ID NO: 540943 - DNA, 15 bp, Homo sapiens
ctactccaaccgcca

SEQ ID NO: 540944 - DNA, 15 bp, Homo sapiens
tactccaaccgccag

SEQ ID NO: 540945 - DNA, 15 bp, Homo sapiens
actccaaccgccaga

SEQ ID NO: 540946 - DNA, 15 bp, Homo sapiens
ctccaaccgccagag

SEQ ID NO: 540947 - DNA, 15 bp, Homo sapiens
tccaaccgccagaga

SEQ ID NO: 540948 - DNA, 15 bp, Homo sapiens
ccaaccgccagagac

SEQ ID NO: 540949 - DNA, 15 bp, Homo sapiens
caaccgccagagaca

SEQ ID NO: 540950 - DNA, 15 bp, Homo sapiens
aaccgccagagacac

SEQ ID NO: 540951 - DNA, 15 bp, Homo sapiens
accgccagagacaca

SEQ ID NO: 540952 - DNA, 15 bp, Homo sapiens
ccgccagagacacac

SEQ ID NO: 540953 - DNA, 15 bp, Homo sapiens
cgccagagacacacc

SEQ ID NO: 540954 - DNA, 15 bp, Homo sapiens
gccagagacacaccc

SEQ ID NO: 540955 - DNA, 15 bp, Homo sapiens
ccagagacacaccct

SEQ ID NO: 540956 - DNA, 15 bp, Homo sapiens
cagagacacaccctt

SEQ ID NO: 540957 - DNA, 15 bp, Homo sapiens
agagacacacccttc

SEQ ID NO: 540958 - DNA, 15 bp, Homo sapiens
gagacacacccttct

SEQ ID NO: 540959 - DNA, 15 bp, Homo sapiens
agacacacccttctg

SEQ ID NO: 540960 - DNA, 15 bp, Homo sapiens
gacacacccttctgc

SEQ ID NO: 540961 - DNA, 15 bp, Homo sapiens
acacacccttctgcc

SEQ ID NO: 540962 - DNA, 15 bp, Homo sapiens
cacacccttctgcct

SEQ ID NO: 540963 - DNA, 15 bp, Homo sapiens
acacccttctgcctg

SEQ ID NO: 540964 - DNA, 15 bp, Homo sapiens
cacccttctgcctga

SEQ ID NO: 540965 - DNA, 15 bp, Homo sapiens
acccttctgcctgat

SEQ ID NO: 540966 - DNA, 15 bp, Homo sapiens
cccttctgcctgatg

SEQ ID NO: 540967 - DNA, 15 bp, Homo sapiens
ccttctgcctgatgt

SEQ ID NO: 540968 - DNA, 15 bp, Homo sapiens
cttctgcctgatgtt

SEQ ID NO: 540969 - DNA, 15 bp, Homo sapiens
ttctgcctgatgttc

SEQ ID NO: 540970 - DNA, 15 bp, Homo sapiens
tctgcctgatgttct

SEQ ID NO: 540971 - DNA, 15 bp, Homo sapiens
ctgcctgatgttctt

SEQ ID NO: 540972 - DNA, 15 bp, Homo sapiens
tgcctgatgttcttt

SEQ ID NO: 540973 - DNA, 15 bp, Homo sapiens
gcctgatgttctttg

SEQ ID NO: 540974 - DNA, 15 bp, Homo sapiens
cctgatgttctttga

SEQ ID NO: 540975 - DNA, 15 bp, Homo sapiens
ctgatgttctttgac

SEQ ID NO: 540976 - DNA, 15 bp, Homo sapiens
tgatgttctttgact

SEQ ID NO: 540977 - DNA, 15 bp, Homo sapiens
gatgttctttgactc

SEQ ID NO: 540978 - DNA, 15 bp, Homo sapiens
atgttctttgactca

SEQ ID NO: 540979 - DNA, 15 bp, Homo sapiens
tgttctttgactcaa

SEQ ID NO: 540980 - DNA, 15 bp, Homo sapiens
gttctttgactcaag

SEQ ID NO: 540981 - DNA, 15 bp, Homo sapiens
ttctttgactcaagg

SEQ ID NO: 540982 - DNA, 15 bp, Homo sapiens
tctttgactcaagga

SEQ ID NO: 540983 - DNA, 15 bp, Homo sapiens
ctttgactcaaggag

SEQ ID NO: 540984 - DNA, 15 bp, Homo sapiens
tttgactcaaggagt

SEQ ID NO: 540985 - DNA, 15 bp, Homo sapiens
ttgactcaaggagtt

SEQ ID NO: 540986 - DNA, 15 bp, Homo sapiens
tgactcaaggagttg

SEQ ID NO: 540987 - DNA, 15 bp, Homo sapiens
gactcaaggagttga

SEQ ID NO: 540988 - DNA, 15 bp, Homo sapiens
actcaaggagttgag

SEQ ID NO: 540989 - DNA, 15 bp, Homo sapiens
ctcaaggagttgaga

SEQ ID NO: 540990 - DNA, 15 bp, Homo sapiens
tcaaggagttgagaa

SEQ ID NO: 540991 - DNA, 15 bp, Homo sapiens
caaggagttgagaac

SEQ ID NO: 540992 - DNA, 15 bp, Homo sapiens
aaggagttgagaacc

SEQ ID NO: 540993 - DNA, 15 bp, Homo sapiens
aggagttgagaacca

SEQ ID NO: 540994 - DNA, 15 bp, Homo sapiens
ggagttgagaaccac

SEQ ID NO: 540995 - DNA, 15 bp, Homo sapiens
gagttgagaaccact

SEQ ID NO: 540996 - DNA, 15 bp, Homo sapiens
agttgagaaccactt

SEQ ID NO: 540997 - DNA, 15 bp, Homo sapiens
gttgagaaccacttt

SEQ ID NO: 540998 - DNA, 15 bp, Homo sapiens
ttgagaaccactttg

SEQ ID NO: 540999 - DNA, 15 bp, Homo sapiens
tgagaaccactttgg

SEQ ID NO: 541000 - DNA, 15 bp, Homo sapiens
gagaaccactttggg

SEQ ID NO: 541001 - DNA, 15 bp, Homo sapiens
agaaccactttgggt

SEQ ID NO: 541002 - DNA, 15 bp, Homo sapiens
gaaccactttgggtc

SEQ ID NO: 541003 - DNA, 15 bp, Homo sapiens
aaccactttgggtct

SEQ ID NO: 541004 - DNA, 15 bp, Homo sapiens
accactttgggtcta

SEQ ID NO: 541005 - DNA, 15 bp, Homo sapiens
ccactttgggtctac

SEQ ID NO: 541006 - DNA, 15 bp, Homo sapiens
cactttgggtctaca

SEQ ID NO: 541007 - DNA, 15 bp, Homo sapiens
actttgggtctacac

SEQ ID NO: 541008 - DNA, 15 bp, Homo sapiens
ctttgggtctacaca

SEQ ID NO: 541009 - DNA, 15 bp, Homo sapiens
tttgggtctacacag

SEQ ID NO: 541010 - DNA, 15 bp, Homo sapiens
ttgggtctacacaga

SEQ ID NO: 541011 - DNA, 15 bp, Homo sapiens
tgggtctacacagat

SEQ ID NO: 541012 - DNA, 15 bp, Homo sapiens
gggtctacacagata

SEQ ID NO: 541013 - DNA, 15 bp, Homo sapiens
ggtctacacagatat

SEQ ID NO: 541014 - DNA, 15 bp, Homo sapiens
gtctacacagatatg

SEQ ID NO: 541015 - DNA, 15 bp, Homo sapiens
tctacacagatatga

SEQ ID NO: 541016 - DNA, 15 bp, Homo sapiens
ctacacagatatgac

SEQ ID NO: 541017 - DNA, 15 bp, Homo sapiens
tacacagatatgaca

SEQ ID NO: 541018 - DNA, 15 bp, Homo sapiens
acacagatatgacac

SEQ ID NO: 541019 - DNA, 15 bp, Homo sapiens
cacagatatgacaca

SEQ ID NO: 541020 - DNA, 15 bp, Homo sapiens
acagatatgacacag

SEQ ID NO: 541021 - DNA, 15 bp, Homo sapiens
cagatatgacacagc

SEQ ID NO: 541022 - DNA, 15 bp, Homo sapiens
agatatgacacagct

SEQ ID NO: 541023 - DNA, 15 bp, Homo sapiens
gatatgacacagcta

SEQ ID NO: 541024 - DNA, 15 bp, Homo sapiens
atatgacacagctac

SEQ ID NO: 541025 - DNA, 15 bp, Homo sapiens
tatgacacagctacc

SEQ ID NO: 541026 - DNA, 15 bp, Homo sapiens
atgacacagctaccc

SEQ ID NO: 541027 - DNA, 15 bp, Homo sapiens
tgacacagctacccg

SEQ ID NO: 541028 - DNA, 15 bp, Homo sapiens
gacacagctacccgt

SEQ ID NO: 541029 - DNA, 15 bp, Homo sapiens
acacagctacccgtg

SEQ ID NO: 541030 - DNA, 15 bp, Homo sapiens
cacagctacccgtgt

SEQ ID NO: 541031 - DNA, 15 bp, Homo sapiens
acagctacccgtgtc

SEQ ID NO: 541032 - DNA, 15 bp, Homo sapiens
cagctacccgtgtct

SEQ ID NO: 541033 - DNA, 15 bp, Homo sapiens
agctacccgtgtctg

SEQ ID NO: 541034 - DNA, 15 bp, Homo sapiens
gctacccgtgtctgc

SEQ ID NO: 541035 - DNA, 15 bp, Homo sapiens
ctacccgtgtctgcc

SEQ ID NO: 541036 - DNA, 15 bp, Homo sapiens
tacccgtgtctgcct

SEQ ID NO: 541037 - DNA, 15 bp, Homo sapiens
acccgtgtctgcctc

SEQ ID NO: 541038 - DNA, 15 bp, Homo sapiens
cccgtgtctgcctcg

SEQ ID NO: 541039 - DNA, 15 bp, Homo sapiens
ccgtgtctgcctcgg

SEQ ID NO: 541040 - DNA, 15 bp, Homo sapiens
cgtgtctgcctcggt

SEQ ID NO: 541041 - DNA, 15 bp, Homo sapiens
gtgtctgcctcggtt

SEQ ID NO: 541042 - DNA, 15 bp, Homo sapiens
tgtctgcctcggttt

SEQ ID NO: 541043 - DNA, 15 bp, Homo sapiens
gtctgcctcggttta

SEQ ID NO: 541044 - DNA, 15 bp, Homo sapiens
tctgcctcggtttag

SEQ ID NO: 541045 - DNA, 15 bp, Homo sapiens
ctgcctcggtttaga

SEQ ID NO: 541046 - DNA, 15 bp, Homo sapiens
tgcctcggtttagaa

SEQ ID NO: 541047 - DNA, 15 bp, Homo sapiens
gcctcggtttagaaa

SEQ ID NO: 541048 - DNA, 15 bp, Homo sapiens
cctcggtttagaaag

SEQ ID NO: 541049 - DNA, 15 bp, Homo sapiens
ctcggtttagaaaga

SEQ ID NO: 541050 - DNA, 15 bp, Homo sapiens
tcggtttagaaagag

SEQ ID NO: 541051 - DNA, 15 bp, Homo sapiens
cggtttagaaagagc

SEQ ID NO: 541052 - DNA, 15 bp, Homo sapiens
ggtttagaaagagct

SEQ ID NO: 541053 - DNA, 15 bp, Homo sapiens
gtttagaaagagctg

SEQ ID NO: 541054 - DNA, 15 bp, Homo sapiens
tttagaaagagctgg

SEQ ID NO: 541055 - DNA, 15 bp, Homo sapiens
ttagaaagagctggc

SEQ ID NO: 541056 - DNA, 15 bp, Homo sapiens
tagaaagagctggct

SEQ ID NO: 541057 - DNA, 15 bp, Homo sapiens
agaaagagctggctg

SEQ ID NO: 541058 - DNA, 15 bp, Homo sapiens
gaaagagctggctga

SEQ ID NO: 541059 - DNA, 15 bp, Homo sapiens
aaagagctggctgag

SEQ ID NO: 541060 - DNA, 15 bp, Homo sapiens
aagagctggctgagc

SEQ ID NO: 541061 - DNA, 15 bp, Homo sapiens
agagctggctgagct

SEQ ID NO: 541062 - DNA, 15 bp, Homo sapiens
gagctggctgagctc

SEQ ID NO: 541063 - DNA, 15 bp, Homo sapiens
agctggctgagctcc

SEQ ID NO: 541064 - DNA, 15 bp, Homo sapiens
gctggctgagctcct

SEQ ID NO: 541065 - DNA, 15 bp, Homo sapiens
ctggctgagctcctg

SEQ ID NO: 541066 - DNA, 15 bp, Homo sapiens
tggctgagctcctgc

SEQ ID NO: 541067 - DNA, 15 bp, Homo sapiens
ggctgagctcctgcg

SEQ ID NO: 541068 - DNA, 15 bp, Homo sapiens
gctgagctcctgcgt

SEQ ID NO: 541069 - DNA, 15 bp, Homo sapiens
ctgagctcctgcgtg

SEQ ID NO: 541070 - DNA, 15 bp, Homo sapiens
tgagctcctgcgtga

SEQ ID NO: 541071 - DNA, 15 bp, Homo sapiens
gagctcctgcgtgaa

SEQ ID NO: 541072 - DNA, 15 bp, Homo sapiens
agctcctgcgtgaat

SEQ ID NO: 541073 - DNA, 15 bp, Homo sapiens
gctcctgcgtgaatc

SEQ ID NO: 541074 - DNA, 15 bp, Homo sapiens
ctcctgcgtgaatcc

SEQ ID NO: 541075 - DNA, 15 bp, Homo sapiens
tcctgcgtgaatcct

SEQ ID NO: 541076 - DNA, 15 bp, Homo sapiens
cctgcgtgaatccta

SEQ ID NO: 541077 - DNA, 15 bp, Homo sapiens
ctgcgtgaatcctaa

SEQ ID NO: 541078 - DNA, 15 bp, Homo sapiens
tgcgtgaatcctaaa

SEQ ID NO: 541079 - DNA, 15 bp, Homo sapiens
gcgtgaatcctaaag

SEQ ID NO: 541080 - DNA, 15 bp, Homo sapiens
cgtgaatcctaaaga

SEQ ID NO: 541081 - DNA, 15 bp, Homo sapiens
gtgaatcctaaagac

SEQ ID NO: 541082 - DNA, 15 bp, Homo sapiens
tgaatcctaaagaca

SEQ ID NO: 541083 - DNA, 15 bp, Homo sapiens
gaatcctaaagacag

SEQ ID NO: 541084 - DNA, 15 bp, Homo sapiens
aatcctaaagacagg

SEQ ID NO: 541085 - DNA, 15 bp, Homo sapiens
atcctaaagacagga

SEQ ID NO: 541086 - DNA, 15 bp, Homo sapiens
tcctaaagacaggac

SEQ ID NO: 541087 - DNA, 15 bp, Homo sapiens
cctaaagacaggacg

SEQ ID NO: 541088 - DNA, 15 bp, Homo sapiens
ctaaagacaggacgg

SEQ ID NO: 541089 - DNA, 15 bp, Homo sapiens
taaagacaggacggt

SEQ ID NO: 541090 - DNA, 15 bp, Homo sapiens
aaagacaggacggtc

SEQ ID NO: 541091 - DNA, 15 bp, Homo sapiens
aagacaggacggtca

SEQ ID NO: 541092 - DNA, 15 bp, Homo sapiens
agacaggacggtcat

SEQ ID NO: 541093 - DNA, 15 bp, Homo sapiens
gacaggacggtcatt

SEQ ID NO: 541094 - DNA, 15 bp, Homo sapiens
acaggacggtcattt

SEQ ID NO: 541095 - DNA, 15 bp, Homo sapiens
caggacggtcatttg

SEQ ID NO: 541096 - DNA, 15 bp, Homo sapiens
aggacggtcatttga

SEQ ID NO: 541097 - DNA, 15 bp, Homo sapiens
ggacggtcatttgag

SEQ ID NO: 541098 - DNA, 15 bp, Homo sapiens
gacggtcatttgagt

SEQ ID NO: 541099 - DNA, 15 bp, Homo sapiens
acggtcatttgagtt

SEQ ID NO: 541100 - DNA, 15 bp, Homo sapiens
cggtcatttgagttt

SEQ ID NO: 541101 - DNA, 15 bp, Homo sapiens
ggtcatttgagtttc

SEQ ID NO: 541102 - DNA, 15 bp, Homo sapiens
gtcatttgagtttca

SEQ ID NO: 541103 - DNA, 15 bp, Homo sapiens
tcatttgagtttcag

SEQ ID NO: 541104 - DNA, 15 bp, Homo sapiens
catttgagtttcagc

SEQ ID NO: 541105 - DNA, 15 bp, Homo sapiens
atttgagtttcagct

SEQ ID NO: 541106 - DNA, 15 bp, Homo sapiens
tttgagtttcagctg

SEQ ID NO: 541107 - DNA, 15 bp, Homo sapiens
ttgagtttcagctgc

SEQ ID NO: 541108 - DNA, 15 bp, Homo sapiens
tgagtttcagctgca

SEQ ID NO: 541109 - DNA, 15 bp, Homo sapiens
gagtttcagctgcag

SEQ ID NO: 541110 - DNA, 15 bp, Homo sapiens
agtttcagctgcagg

SEQ ID NO: 541111 - DNA, 15 bp, Homo sapiens
gtttcagctgcaggg

SEQ ID NO: 541112 - DNA, 15 bp, Homo sapiens
tttcagctgcaggga

SEQ ID NO: 541113 - DNA, 15 bp, Homo sapiens
ttcagctgcagggat

SEQ ID NO: 541114 - DNA, 15 bp, Homo sapiens
tcagctgcagggatt

SEQ ID NO: 541115 - DNA, 15 bp, Homo sapiens
cagctgcagggattc

SEQ ID NO: 541116 - DNA, 15 bp, Homo sapiens
agctgcagggattct

SEQ ID NO: 541117 - DNA, 15 bp, Homo sapiens
gctgcagggattctt

SEQ ID NO: 541118 - DNA, 15 bp, Homo sapiens
ctgcagggattcttc

SEQ ID NO: 541119 - DNA, 15 bp, Homo sapiens
tgcagggattcttct

SEQ ID NO: 541120 - DNA, 15 bp, Homo sapiens
gcagggattcttctg

SEQ ID NO: 541121 - DNA, 15 bp, Homo sapiens
cagggattcttctgc

SEQ ID NO: 541122 - DNA, 15 bp, Homo sapiens
agggattcttctgct

SEQ ID NO: 541123 - DNA, 15 bp, Homo sapiens
gggattcttctgcta

SEQ ID NO: 541124 - DNA, 15 bp, Homo sapiens
ggattcttctgctag

SEQ ID NO: 541125 - DNA, 15 bp, Homo sapiens
gattcttctgctagg

SEQ ID NO: 541126 - DNA, 15 bp, Homo sapiens
attcttctgctaggc

SEQ ID NO: 541127 - DNA, 15 bp, Homo sapiens
ttcttctgctaggca

SEQ ID NO: 541128 - DNA, 15 bp, Homo sapiens
tcttctgctaggcac

SEQ ID NO: 541129 - DNA, 15 bp, Homo sapiens
cttctgctaggcacc

SEQ ID NO: 541130 - DNA, 15 bp, Homo sapiens
ttctgctaggcacct

SEQ ID NO: 541131 - DNA, 15 bp, Homo sapiens
tctgctaggcacctc

SEQ ID NO: 541132 - DNA, 15 bp, Homo sapiens
ctgctaggcacctct

SEQ ID NO: 541133 - DNA, 15 bp, Homo sapiens
tgctaggcacctctg

SEQ ID NO: 541134 - DNA, 15 bp, Homo sapiens
gctaggcacctctgc

SEQ ID NO: 541135 - DNA, 15 bp, Homo sapiens
ctaggcacctctgct

SEQ ID NO: 541136 - DNA, 15 bp, Homo sapiens
taggcacctctgctt

SEQ ID NO: 541137 - DNA, 15 bp, Homo sapiens
aggcacctctgcttt

SEQ ID NO: 541138 - DNA, 15 bp, Homo sapiens
ggcacctctgctttg

SEQ ID NO: 541139 - DNA, 15 bp, Homo sapiens
gcacctctgctttgt

SEQ ID NO: 541140 - DNA, 15 bp, Homo sapiens
cacctctgctttgta

SEQ ID NO: 541141 - DNA, 15 bp, Homo sapiens
acctctgctttgtaa

SEQ ID NO: 541142 - DNA, 15 bp, Homo sapiens
cctctgctttgtaat

SEQ ID NO: 541143 - DNA, 15 bp, Homo sapiens
ctctgctttgtaatc

SEQ ID NO: 541144 - DNA, 15 bp, Homo sapiens
tctgctttgtaatcg

SEQ ID NO: 541145 - DNA, 15 bp, Homo sapiens
ctgctttgtaatcgg

SEQ ID NO: 541146 - DNA, 15 bp, Homo sapiens
tgctttgtaatcgga

SEQ ID NO: 541147 - DNA, 15 bp, Homo sapiens
gctttgtaatcggat

SEQ ID NO: 541148 - DNA, 15 bp, Homo sapiens
ctttgtaatcggatg

SEQ ID NO: 541149 - DNA, 15 bp, Homo sapiens
tttgtaatcggatgt

SEQ ID NO: 541150 - DNA, 15 bp, Homo sapiens
ttgtaatcggatgtg

SEQ ID NO: 541151 - DNA, 15 bp, Homo sapiens
tgtaatcggatgtgt

SEQ ID NO: 541152 - DNA, 15 bp, Homo sapiens
gtaatcggatgtgta

SEQ ID NO: 541153 - DNA, 15 bp, Homo sapiens
taatcggatgtgtac

SEQ ID NO: 541154 - DNA, 15 bp, Homo sapiens
aatcggatgtgtacg

SEQ ID NO: 541155 - DNA, 15 bp, Homo sapiens
atcggatgtgtacga

SEQ ID NO: 541156 - DNA, 15 bp, Homo sapiens
tcggatgtgtacgag

SEQ ID NO: 541157 - DNA, 15 bp, Homo sapiens
cggatgtgtacgagg

SEQ ID NO: 541158 - DNA, 15 bp, Homo sapiens
ggatgtgtacgaggg

SEQ ID NO: 541159 - DNA, 15 bp, Homo sapiens
gatgtgtacgagggc

SEQ ID NO: 541160 - DNA, 15 bp, Homo sapiens
atgtgtacgagggca

SEQ ID NO: 541161 - DNA, 15 bp, Homo sapiens
tgtgtacgagggcaa

SEQ ID NO: 541162 - DNA, 15 bp, Homo sapiens
gtgtacgagggcaac

SEQ ID NO: 541163 - DNA, 15 bp, Homo sapiens
tgtacgagggcaaca

SEQ ID NO: 541164 - DNA, 15 bp, Homo sapiens
gtacgagggcaacac

SEQ ID NO: 541165 - DNA, 15 bp, Homo sapiens
tacgagggcaacaca

SEQ ID NO: 541166 - DNA, 15 bp, Homo sapiens
acgagggcaacacaa

SEQ ID NO: 541167 - DNA, 15 bp, Homo sapiens
cgagggcaacacaaa

SEQ ID NO: 541168 - DNA, 15 bp, Homo sapiens
gagggcaacacaaag

SEQ ID NO: 541169 - DNA, 15 bp, Homo sapiens
agggcaacacaaagg

SEQ ID NO: 541170 - DNA, 15 bp, Homo sapiens
gggcaacacaaagga

SEQ ID NO: 541171 - DNA, 15 bp, Homo sapiens
ggcaacacaaaggac

SEQ ID NO: 541172 - DNA, 15 bp, Homo sapiens
gcaacacaaaggact

SEQ ID NO: 541173 - DNA, 15 bp, Homo sapiens
caacacaaaggactc

SEQ ID NO: 541174 - DNA, 15 bp, Homo sapiens
aacacaaaggactcc

SEQ ID NO: 541175 - DNA, 15 bp, Homo sapiens
acacaaaggactccc

SEQ ID NO: 541176 - DNA, 15 bp, Homo sapiens
cacaaaggactccca

SEQ ID NO: 541177 - DNA, 15 bp, Homo sapiens
acaaaggactcccag

SEQ ID NO: 541178 - DNA, 15 bp, Homo sapiens
caaaggactcccagc

SEQ ID NO: 541179 - DNA, 15 bp, Homo sapiens
aaaggactcccagcc

SEQ ID NO: 541180 - DNA, 15 bp, Homo sapiens
aaggactcccagccc

SEQ ID NO: 541181 - DNA, 15 bp, Homo sapiens
aggactcccagcccg

SEQ ID NO: 541182 - DNA, 15 bp, Homo sapiens
ggactcccagcccgg

SEQ ID NO: 541183 - DNA, 15 bp, Homo sapiens
gactcccagcccggc

SEQ ID NO: 541184 - DNA, 15 bp, Homo sapiens
actcccagcccggct

SEQ ID NO: 541185 - DNA, 15 bp, Homo sapiens
ctcccagcccggctc

SEQ ID NO: 541186 - DNA, 15 bp, Homo sapiens
tcccagcccggctct

SEQ ID NO: 541187 - DNA, 15 bp, Homo sapiens
cccagcccggctctg

SEQ ID NO: 541188 - DNA, 15 bp, Homo sapiens
ccagcccggctctgc

SEQ ID NO: 541189 - DNA, 15 bp, Homo sapiens
cagcccggctctgcc

SEQ ID NO: 541190 - DNA, 15 bp, Homo sapiens
agcccggctctgcca

SEQ ID NO: 541191 - DNA, 15 bp, Homo sapiens
gcccggctctgccaa

SEQ ID NO: 541192 - DNA, 15 bp, Homo sapiens
cccggctctgccaag

SEQ ID NO: 541193 - DNA, 15 bp, Homo sapiens
ccggctctgccaaga

SEQ ID NO: 541194 - DNA, 15 bp, Homo sapiens
cggctctgccaagag

SEQ ID NO: 541195 - DNA, 15 bp, Homo sapiens
ggctctgccaagaga

SEQ ID NO: 541196 - DNA, 15 bp, Homo sapiens
gctctgccaagagac

SEQ ID NO: 541197 - DNA, 15 bp, Homo sapiens
ctctgccaagagact

SEQ ID NO: 541198 - DNA, 15 bp, Homo sapiens
tctgccaagagactt

SEQ ID NO: 541199 - DNA, 15 bp, Homo sapiens
ctgccaagagacttt

SEQ ID NO: 541200 - DNA, 15 bp, Homo sapiens
tgccaagagactttg

SEQ ID NO: 541201 - DNA, 15 bp, Homo sapiens
gccaagagactttgt

SEQ ID NO: 541202 - DNA, 15 bp, Homo sapiens
ccaagagactttgtt

SEQ ID NO: 541203 - DNA, 15 bp, Homo sapiens
caagagactttgttg

SEQ ID NO: 541204 - DNA, 15 bp, Homo sapiens
aagagactttgttgt

SEQ ID NO: 541205 - DNA, 15 bp, Homo sapiens
agagactttgttgtg

SEQ ID NO: 541206 - DNA, 15 bp, Homo sapiens
gagactttgttgtgc

SEQ ID NO: 541207 - DNA, 15 bp, Homo sapiens
agactttgttgtgct

SEQ ID NO: 541208 - DNA, 15 bp, Homo sapiens
gactttgttgtgctc

SEQ ID NO: 541209 - DNA, 15 bp, Homo sapiens
actttgttgtgctcc

SEQ ID NO: 541210 - DNA, 15 bp, Homo sapiens
ctttgttgtgctcca

SEQ ID NO: 541211 - DNA, 15 bp, Homo sapiens
tttgttgtgctccat

SEQ ID NO: 541212 - DNA, 15 bp, Homo sapiens
ttgttgtgctccatg

SEQ ID NO: 541213 - DNA, 15 bp, Homo sapiens
tgttgtgctccatgg

SEQ ID NO: 541214 - DNA, 15 bp, Homo sapiens
gttgtgctccatggt

SEQ ID NO: 541215 - DNA, 15 bp, Homo sapiens
ttgtgctccatggtt

SEQ ID NO: 541216 - DNA, 15 bp, Homo sapiens
tgtgctccatggttc

SEQ ID NO: 541217 - DNA, 15 bp, Homo sapiens
gtgctccatggttca

SEQ ID NO: 541218 - DNA, 15 bp, Homo sapiens
tgctccatggttcaa

SEQ ID NO: 541219 - DNA, 15 bp, Homo sapiens
gctccatggttcaaa

SEQ ID NO: 541220 - DNA, 15 bp, Homo sapiens
ctccatggttcaaag

SEQ ID NO: 541221 - DNA, 15 bp, Homo sapiens
tccatggttcaaaga

SEQ ID NO: 541222 - DNA, 15 bp, Homo sapiens
ccatggttcaaagaa

SEQ ID NO: 541223 - DNA, 15 bp, Homo sapiens
catggttcaaagaaa

SEQ ID NO: 541224 - DNA, 15 bp, Homo sapiens
atggttcaaagaaaa

SEQ ID NO: 541225 - DNA, 15 bp, Homo sapiens
tggttcaaagaaaaa

SEQ ID NO: 541226 - DNA, 15 bp, Homo sapiens
ggttcaaagaaaaaa

SEQ ID NO: 541227 - DNA, 15 bp, Homo sapiens
gttcaaagaaaaaag

SEQ ID NO: 541228 - DNA, 15 bp, Homo sapiens
ttcaaagaaaaaagg

SEQ ID NO: 541229 - DNA, 15 bp, Homo sapiens
tcaaagaaaaaaggt

SEQ ID NO: 541230 - DNA, 15 bp, Homo sapiens
caaagaaaaaaggta

SEQ ID NO: 541231 - DNA, 15 bp, Homo sapiens
aaagaaaaaaggtag

SEQ ID NO: 541232 - DNA, 15 bp, Homo sapiens
aagaaaaaaggtagg

SEQ ID NO: 541233 - DNA, 15 bp, Homo sapiens
agaaaaaaggtaggg

SEQ ID NO: 541234 - DNA, 15 bp, Homo sapiens
gaaaaaaggtagggg

SEQ ID NO: 541235 - DNA, 15 bp, Homo sapiens
aaaaaaggtaggggg

SEQ ID NO: 541236 - DNA, 15 bp, Homo sapiens
aaaaaggtaggggga

SEQ ID NO: 541237 - DNA, 15 bp, Homo sapiens
aaaaggtagggggag

SEQ ID NO: 541238 - DNA, 15 bp, Homo sapiens
aaaggtagggggaga

SEQ ID NO: 541239 - DNA, 15 bp, Homo sapiens
aaggtagggggagag

SEQ ID NO: 541240 - DNA, 15 bp, Homo sapiens
aggtagggggagaga

SEQ ID NO: 541241 - DNA, 15 bp, Homo sapiens
ggtagggggagagat

SEQ ID NO: 541242 - DNA, 15 bp, Homo sapiens
gtagggggagagatt

SEQ ID NO: 541243 - DNA, 15 bp, Homo sapiens
tagggggagagatta

SEQ ID NO: 541244 - DNA, 15 bp, Homo sapiens
agggggagagattaa

SEQ ID NO: 541245 - DNA, 15 bp, Homo sapiens
gggggagagattaat

SEQ ID NO: 541246 - DNA, 15 bp, Homo sapiens
ggggagagattaatg

SEQ ID NO: 541247 - DNA, 15 bp, Homo sapiens
gggagagattaatgg

SEQ ID NO: 541248 - DNA, 15 bp, Homo sapiens
ggagagattaatgga

SEQ ID NO: 541249 - DNA, 15 bp, Homo sapiens
gagagattaatggag

SEQ ID NO: 541250 - DNA, 15 bp, Homo sapiens
agagattaatggagc

SEQ ID NO: 541251 - DNA, 15 bp, Homo sapiens
gagattaatggagcg

SEQ ID NO: 541252 - DNA, 15 bp, Homo sapiens
agattaatggagcga

SEQ ID NO: 541253 - DNA, 15 bp, Homo sapiens
gattaatggagcgag

SEQ ID NO: 541254 - DNA, 15 bp, Homo sapiens
attaatggagcgaga

SEQ ID NO: 541255 - DNA, 15 bp, Homo sapiens
ttaatggagcgagag

SEQ ID NO: 541256 - DNA, 15 bp, Homo sapiens
taatggagcgagagg

SEQ ID NO: 541257 - DNA, 15 bp, Homo sapiens
aatggagcgagagga

SEQ ID NO: 541258 - DNA, 15 bp, Homo sapiens
atggagcgagaggag

SEQ ID NO: 541259 - DNA, 15 bp, Homo sapiens
tggagcgagaggagg

SEQ ID NO: 541260 - DNA, 15 bp, Homo sapiens
ggagcgagaggaggc

SEQ ID NO: 541261 - DNA, 15 bp, Homo sapiens
gagcgagaggaggca

SEQ ID NO: 541262 - DNA, 15 bp, Homo sapiens
agcgagaggaggcaa

SEQ ID NO: 541263 - DNA, 15 bp, Homo sapiens
gcgagaggaggcaag

SEQ ID NO: 541264 - DNA, 15 bp, Homo sapiens
cgagaggaggcaagc

SEQ ID NO: 541265 - DNA, 15 bp, Homo sapiens
gagaggaggcaagct

SEQ ID NO: 541266 - DNA, 15 bp, Homo sapiens
agaggaggcaagctt

SEQ ID NO: 541267 - DNA, 15 bp, Homo sapiens
gaggaggcaagctta

SEQ ID NO: 541268 - DNA, 15 bp, Homo sapiens
aggaggcaagcttat

SEQ ID NO: 541269 - DNA, 15 bp, Homo sapiens
ggaggcaagcttatt

SEQ ID NO: 541270 - DNA, 15 bp, Homo sapiens
gaggcaagcttatta

SEQ ID NO: 541271 - DNA, 15 bp, Homo sapiens
aggcaagcttattat

SEQ ID NO: 541272 - DNA, 15 bp, Homo sapiens
ggcaagcttattata

SEQ ID NO: 541273 - DNA, 15 bp, Homo sapiens
gcaagcttattatat

SEQ ID NO: 541274 - DNA, 15 bp, Homo sapiens
caagcttattatatt

SEQ ID NO: 541275 - DNA, 15 bp, Homo sapiens
aagcttattatattt

SEQ ID NO: 541276 - DNA, 15 bp, Homo sapiens
agcttattatattta

SEQ ID NO: 541277 - DNA, 15 bp, Homo sapiens
gcttattatatttat

SEQ ID NO: 541278 - DNA, 15 bp, Homo sapiens
cttattatatttatc

SEQ ID NO: 541279 - DNA, 15 bp, Homo sapiens
ttattatatttatca

SEQ ID NO: 541280 - DNA, 15 bp, Homo sapiens
tattatatttatcaa

SEQ ID NO: 541281 - DNA, 15 bp, Homo sapiens
attatatttatcaac

SEQ ID NO: 541282 - DNA, 15 bp, Homo sapiens
ttatatttatcaacc

SEQ ID NO: 541283 - DNA, 15 bp, Homo sapiens
tatatttatcaacca

SEQ ID NO: 541284 - DNA, 15 bp, Homo sapiens
atatttatcaaccat

SEQ ID NO: 541285 - DNA, 15 bp, Homo sapiens
tatttatcaaccatg

SEQ ID NO: 541286 - DNA, 15 bp, Homo sapiens
atttatcaaccatgt

SEQ ID NO: 541287 - DNA, 15 bp, Homo sapiens
tttatcaaccatgtt

SEQ ID NO: 541288 - DNA, 15 bp, Homo sapiens
ttatcaaccatgttc

SEQ ID NO: 541289 - DNA, 15 bp, Homo sapiens
tatcaaccatgttcg

SEQ ID NO: 541290 - DNA, 15 bp, Homo sapiens
atcaaccatgttcgc

SEQ ID NO: 541291 - DNA, 15 bp, Homo sapiens
tcaaccatgttcgca

SEQ ID NO: 541292 - DNA, 15 bp, Homo sapiens
caaccatgttcgcat

SEQ ID NO: 541293 - DNA, 15 bp, Homo sapiens
aaccatgttcgcatt

SEQ ID NO: 541294 - DNA, 15 bp, Homo sapiens
accatgttcgcattt

SEQ ID NO: 541295 - DNA, 15 bp, Homo sapiens
ccatgttcgcatttc

SEQ ID NO: 541296 - DNA, 15 bp, Homo sapiens
catgttcgcatttca

SEQ ID NO: 541297 - DNA, 15 bp, Homo sapiens
atgttcgcatttcaa

SEQ ID NO: 541298 - DNA, 15 bp, Homo sapiens
tgttcgcatttcaag

SEQ ID NO: 541299 - DNA, 15 bp, Homo sapiens
gttcgcatttcaagt

SEQ ID NO: 541300 - DNA, 15 bp, Homo sapiens
ttcgcatttcaagtg

SEQ ID NO: 541301 - DNA, 15 bp, Homo sapiens
tcgcatttcaagtgc

SEQ ID NO: 541302 - DNA, 15 bp, Homo sapiens
cgcatttcaagtgcc

SEQ ID NO: 541303 - DNA, 15 bp, Homo sapiens
gcatttcaagtgccc

SEQ ID NO: 541304 - DNA, 15 bp, Homo sapiens
catttcaagtgccct

SEQ ID NO: 541305 - DNA, 15 bp, Homo sapiens
atttcaagtgccctg

SEQ ID NO: 541306 - DNA, 15 bp, Homo sapiens
tttcaagtgccctga

SEQ ID NO: 541307 - DNA, 15 bp, Homo sapiens
ttcaagtgccctgat

SEQ ID NO: 541308 - DNA, 15 bp, Homo sapiens
tcaagtgccctgatt

SEQ ID NO: 541309 - DNA, 15 bp, Homo sapiens
caagtgccctgattt

SEQ ID NO: 541310 - DNA, 15 bp, Homo sapiens
aagtgccctgattta

SEQ ID NO: 541311 - DNA, 15 bp, Homo sapiens
agtgccctgatttat

SEQ ID NO: 541312 - DNA, 15 bp, Homo sapiens
gtgccctgatttatc

SEQ ID NO: 541313 - DNA, 15 bp, Homo sapiens
tgccctgatttatct

SEQ ID NO: 541314 - DNA, 15 bp, Homo sapiens
gccctgatttatctc

SEQ ID NO: 541315 - DNA, 15 bp, Homo sapiens
ccctgatttatctca

SEQ ID NO: 541316 - DNA, 15 bp, Homo sapiens
cctgatttatctcac

SEQ ID NO: 541317 - DNA, 15 bp, Homo sapiens
ctgatttatctcaca

SEQ ID NO: 541318 - DNA, 15 bp, Homo sapiens
tgatttatctcacag

SEQ ID NO: 541319 - DNA, 15 bp, Homo sapiens
gatttatctcacagg

SEQ ID NO: 541320 - DNA, 15 bp, Homo sapiens
atttatctcacaggt

SEQ ID NO: 541321 - DNA, 15 bp, Homo sapiens
tttatctcacaggtg

SEQ ID NO: 541322 - DNA, 15 bp, Homo sapiens
ttatctcacaggtgg

SEQ ID NO: 541323 - DNA, 15 bp, Homo sapiens
tatctcacaggtggg

SEQ ID NO: 541324 - DNA, 15 bp, Homo sapiens
atctcacaggtggga

SEQ ID NO: 541325 - DNA, 15 bp, Homo sapiens
tctcacaggtgggag

SEQ ID NO: 541326 - DNA, 15 bp, Homo sapiens
ctcacaggtgggagg

SEQ ID NO: 541327 - DNA, 15 bp, Homo sapiens
tcacaggtgggaggg

SEQ ID NO: 541328 - DNA, 15 bp, Homo sapiens
cacaggtgggaggga

SEQ ID NO: 541329 - DNA, 15 bp, Homo sapiens
acaggtgggagggaa

SEQ ID NO: 541330 - DNA, 15 bp, Homo sapiens
caggtgggagggaag

SEQ ID NO: 541331 - DNA, 15 bp, Homo sapiens
aggtgggagggaaga

SEQ ID NO: 541332 - DNA, 15 bp, Homo sapiens
ggtgggagggaagaa

SEQ ID NO: 541333 - DNA, 15 bp, Homo sapiens
gtgggagggaagaac

SEQ ID NO: 541334 - DNA, 15 bp, Homo sapiens
tgggagggaagaact

SEQ ID NO: 541335 - DNA, 15 bp, Homo sapiens
gggagggaagaactg

SEQ ID NO: 541336 - DNA, 15 bp, Homo sapiens
ggagggaagaactgc

SEQ ID NO: 541337 - DNA, 15 bp, Homo sapiens
gagggaagaactgct

SEQ ID NO: 541338 - DNA, 15 bp, Homo sapiens
agggaagaactgctg

SEQ ID NO: 541339 - DNA, 15 bp, Homo sapiens
gggaagaactgctgg

SEQ ID NO: 541340 - DNA, 15 bp, Homo sapiens
ggaagaactgctggc

SEQ ID NO: 541341 - DNA, 15 bp, Homo sapiens
gaagaactgctggca

SEQ ID NO: 541342 - DNA, 15 bp, Homo sapiens
aagaactgctggcaa

SEQ ID NO: 541343 - DNA, 15 bp, Homo sapiens
agaactgctggcaac

SEQ ID NO: 541344 - DNA, 15 bp, Homo sapiens
gaactgctggcaacc

SEQ ID NO: 541345 - DNA, 15 bp, Homo sapiens
aactgctggcaaccc

SEQ ID NO: 541346 - DNA, 15 bp, Homo sapiens
actgctggcaaccct

SEQ ID NO: 541347 - DNA, 15 bp, Homo sapiens
ctgctggcaaccctt

SEQ ID NO: 541348 - DNA, 15 bp, Homo sapiens
tgctggcaacccttc

SEQ ID NO: 541349 - DNA, 15 bp, Homo sapiens
gctggcaacccttct

SEQ ID NO: 541350 - DNA, 15 bp, Homo sapiens
ctggcaacccttctc

SEQ ID NO: 541351 - DNA, 15 bp, Homo sapiens
tggcaacccttctct

SEQ ID NO: 541352 - DNA, 15 bp, Homo sapiens
ggcaacccttctctc

SEQ ID NO: 541353 - DNA, 15 bp, Homo sapiens
gcaacccttctctca

SEQ ID NO: 541354 - DNA, 15 bp, Homo sapiens
caacccttctctcag

SEQ ID NO: 541355 - DNA, 15 bp, Homo sapiens
aacccttctctcagg

SEQ ID NO: 541356 - DNA, 15 bp, Homo sapiens
acccttctctcaggg

SEQ ID NO: 541357 - DNA, 15 bp, Homo sapiens
cccttctctcagggc

SEQ ID NO: 541358 - DNA, 15 bp, Homo sapiens
ccttctctcagggct

SEQ ID NO: 541359 - DNA, 15 bp, Homo sapiens
cttctctcagggctg

SEQ ID NO: 541360 - DNA, 15 bp, Homo sapiens
ttctctcagggctgt

SEQ ID NO: 541361 - DNA, 15 bp, Homo sapiens
tctctcagggctgtg

SEQ ID NO: 541362 - DNA, 15 bp, Homo sapiens
ctctcagggctgtga

SEQ ID NO: 541363 - DNA, 15 bp, Homo sapiens
tctcagggctgtgag

SEQ ID NO: 541364 - DNA, 15 bp, Homo sapiens
ctcagggctgtgagt

SEQ ID NO: 541365 - DNA, 15 bp, Homo sapiens
tcagggctgtgagtt

SEQ ID NO: 541366 - DNA, 15 bp, Homo sapiens
cagggctgtgagttt

SEQ ID NO: 541367 - DNA, 15 bp, Homo sapiens
agggctgtgagtttt

SEQ ID NO: 541368 - DNA, 15 bp, Homo sapiens
gggctgtgagttttg

SEQ ID NO: 541369 - DNA, 15 bp, Homo sapiens
ggctgtgagttttgg

SEQ ID NO: 541370 - DNA, 15 bp, Homo sapiens
gctgtgagttttgga

SEQ ID NO: 541371 - DNA, 15 bp, Homo sapiens
ctgtgagttttggaa

SEQ ID NO: 541372 - DNA, 15 bp, Homo sapiens
tgtgagttttggaac

SEQ ID NO: 541373 - DNA, 15 bp, Homo sapiens
gtgagttttggaaca

SEQ ID NO: 541374 - DNA, 15 bp, Homo sapiens
tgagttttggaacag

SEQ ID NO: 541375 - DNA, 15 bp, Homo sapiens
gagttttggaacagg

SEQ ID NO: 541376 - DNA, 15 bp, Homo sapiens
agttttggaacagga

SEQ ID NO: 541377 - DNA, 15 bp, Homo sapiens
gttttggaacaggat

SEQ ID NO: 541378 - DNA, 15 bp, Homo sapiens
ttttggaacaggatt

SEQ ID NO: 541379 - DNA, 15 bp, Homo sapiens
tttggaacaggattt

SEQ ID NO: 541380 - DNA, 15 bp, Homo sapiens
ttggaacaggatttc

SEQ ID NO: 541381 - DNA, 15 bp, Homo sapiens
tggaacaggatttcc

SEQ ID NO: 541382 - DNA, 15 bp, Homo sapiens
ggaacaggatttcct

SEQ ID NO: 541383 - DNA, 15 bp, Homo sapiens
gaacaggatttcctc

SEQ ID NO: 541384 - DNA, 15 bp, Homo sapiens
aacaggatttcctct

SEQ ID NO: 541385 - DNA, 15 bp, Homo sapiens
acaggatttcctctg

SEQ ID NO: 541386 - DNA, 15 bp, Homo sapiens
caggatttcctctgc

SEQ ID NO: 541387 - DNA, 15 bp, Homo sapiens
aggatttcctctgca

SEQ ID NO: 541388 - DNA, 15 bp, Homo sapiens
ggatttcctctgcaa

SEQ ID NO: 541389 - DNA, 15 bp, Homo sapiens
gatttcctctgcaag

SEQ ID NO: 541390 - DNA, 15 bp, Homo sapiens
atttcctctgcaagt

SEQ ID NO: 541391 - DNA, 15 bp, Homo sapiens
tttcctctgcaagtt

SEQ ID NO: 541392 - DNA, 15 bp, Homo sapiens
ttcctctgcaagttg

SEQ ID NO: 541393 - DNA, 15 bp, Homo sapiens
tcctctgcaagttgt

SEQ ID NO: 541394 - DNA, 15 bp, Homo sapiens
cctctgcaagttgtc

SEQ ID NO: 541395 - DNA, 15 bp, Homo sapiens
ctctgcaagttgtca

SEQ ID NO: 541396 - DNA, 15 bp, Homo sapiens
tctgcaagttgtcaa

SEQ ID NO: 541397 - DNA, 15 bp, Homo sapiens
ctgcaagttgtcaaa

SEQ ID NO: 541398 - DNA, 15 bp, Homo sapiens
tgcaagttgtcaaag

SEQ ID NO: 541399 - DNA, 15 bp, Homo sapiens
gcaagttgtcaaaga

SEQ ID NO: 541400 - DNA, 15 bp, Homo sapiens
caagttgtcaaagat

SEQ ID NO: 541401 - DNA, 15 bp, Homo sapiens
aagttgtcaaagatc

SEQ ID NO: 541402 - DNA, 15 bp, Homo sapiens
agttgtcaaagatca

SEQ ID NO: 541403 - DNA, 15 bp, Homo sapiens
gttgtcaaagatcag

SEQ ID NO: 541404 - DNA, 15 bp, Homo sapiens
ttgtcaaagatcaga

SEQ ID NO: 541405 - DNA, 15 bp, Homo sapiens
tgtcaaagatcagat

SEQ ID NO: 541406 - DNA, 15 bp, Homo sapiens
gtcaaagatcagata

SEQ ID NO: 541407 - DNA, 15 bp, Homo sapiens
tcaaagatcagataa

SEQ ID NO: 541408 - DNA, 15 bp, Homo sapiens
caaagatcagataaa

SEQ ID NO: 541409 - DNA, 15 bp, Homo sapiens
aaagatcagataaaa

SEQ ID NO: 541410 - DNA, 15 bp, Homo sapiens
aagatcagataaaag

SEQ ID NO: 541411 - DNA, 15 bp, Homo sapiens
agatcagataaaagt

SEQ ID NO: 541412 - DNA, 15 bp, Homo sapiens
gatcagataaaagtc

SEQ ID NO: 541413 - DNA, 15 bp, Homo sapiens
atcagataaaagtct

SEQ ID NO: 541414 - DNA, 15 bp, Homo sapiens
tcagataaaagtctt

SEQ ID NO: 541415 - DNA, 15 bp, Homo sapiens
cagataaaagtctta

SEQ ID NO: 541416 - DNA, 15 bp, Homo sapiens
agataaaagtcttaa

SEQ ID NO: 541417 - DNA, 15 bp, Homo sapiens
gataaaagtcttaat

SEQ ID NO: 541418 - DNA, 15 bp, Homo sapiens
ataaaagtcttaatc

SEQ ID NO: 541419 - DNA, 15 bp, Homo sapiens
taaaagtcttaatct

SEQ ID NO: 541420 - DNA, 15 bp, Homo sapiens
aaaagtcttaatctc

SEQ ID NO: 541421 - DNA, 15 bp, Homo sapiens
aaagtcttaatctca

SEQ ID NO: 541422 - DNA, 15 bp, Homo sapiens
aagtcttaatctcag

SEQ ID NO: 541423 - DNA, 15 bp, Homo sapiens
agtcttaatctcagg

SEQ ID NO: 541424 - DNA, 15 bp, Homo sapiens
gtcttaatctcaggc

SEQ ID NO: 541425 - DNA, 15 bp, Homo sapiens
tcttaatctcaggca

SEQ ID NO: 541426 - DNA, 15 bp, Homo sapiens
cttaatctcaggcac

SEQ ID NO: 541427 - DNA, 15 bp, Homo sapiens
ttaatctcaggcaca

SEQ ID NO: 541428 - DNA, 15 bp, Homo sapiens
taatctcaggcacac

SEQ ID NO: 541429 - DNA, 15 bp, Homo sapiens
aatctcaggcacaca

SEQ ID NO: 541430 - DNA, 15 bp, Homo sapiens
atctcaggcacacac

SEQ ID NO: 541431 - DNA, 15 bp, Homo sapiens
tctcaggcacacaca

SEQ ID NO: 541432 - DNA, 15 bp, Homo sapiens
ctcaggcacacacag

SEQ ID NO: 541433 - DNA, 15 bp, Homo sapiens
tcaggcacacacagc

SEQ ID NO: 541434 - DNA, 15 bp, Homo sapiens
caggcacacacagcc

SEQ ID NO: 541435 - DNA, 15 bp, Homo sapiens
aggcacacacagcca

SEQ ID NO: 541436 - DNA, 15 bp, Homo sapiens
ggcacacacagccac

SEQ ID NO: 541437 - DNA, 15 bp, Homo sapiens
gcacacacagccaca

SEQ ID NO: 541438 - DNA, 15 bp, Homo sapiens
cacacacagccacag

SEQ ID NO: 541439 - DNA, 15 bp, Homo sapiens
acacacagccacagg

SEQ ID NO: 541440 - DNA, 15 bp, Homo sapiens
cacacagccacaggc

SEQ ID NO: 541441 - DNA, 15 bp, Homo sapiens
acacagccacaggct

SEQ ID NO: 541442 - DNA, 15 bp, Homo sapiens
cacagccacaggctt

SEQ ID NO: 541443 - DNA, 15 bp, Homo sapiens
acagccacaggcttt

SEQ ID NO: 541444 - DNA, 15 bp, Homo sapiens
cagccacaggctttg

SEQ ID NO: 541445 - DNA, 15 bp, Homo sapiens
agccacaggctttgg

SEQ ID NO: 541446 - DNA, 15 bp, Homo sapiens
gccacaggctttggc

SEQ ID NO: 541447 - DNA, 15 bp, Homo sapiens
ccacaggctttggcc

SEQ ID NO: 541448 - DNA, 15 bp, Homo sapiens
cacaggctttggcct

SEQ ID NO: 541449 - DNA, 15 bp, Homo sapiens
acaggctttggcctc

SEQ ID NO: 541450 - DNA, 15 bp, Homo sapiens
caggctttggcctct

SEQ ID NO: 541451 - DNA, 15 bp, Homo sapiens
aggctttggcctctg

SEQ ID NO: 541452 - DNA, 15 bp, Homo sapiens
ggctttggcctctgc

SEQ ID NO: 541453 - DNA, 15 bp, Homo sapiens
gctttggcctctgcc

SEQ ID NO: 541454 - DNA, 15 bp, Homo sapiens
ctttggcctctgcca

SEQ ID NO: 541455 - DNA, 15 bp, Homo sapiens
tttggcctctgccac

SEQ ID NO: 541456 - DNA, 15 bp, Homo sapiens
ttggcctctgccact

SEQ ID NO: 541457 - DNA, 15 bp, Homo sapiens
tggcctctgccactg

SEQ ID NO: 541458 - DNA, 15 bp, Homo sapiens
ggcctctgccactgt

SEQ ID NO: 541459 - DNA, 15 bp, Homo sapiens
gcctctgccactgtg

SEQ ID NO: 541460 - DNA, 15 bp, Homo sapiens
cctctgccactgtgt

SEQ ID NO: 541461 - DNA, 15 bp, Homo sapiens
ctctgccactgtgtg

SEQ ID NO: 541462 - DNA, 15 bp, Homo sapiens
tctgccactgtgtgt

SEQ ID NO: 541463 - DNA, 15 bp, Homo sapiens
ctgccactgtgtgtt

SEQ ID NO: 541464 - DNA, 15 bp, Homo sapiens
tgccactgtgtgttc

SEQ ID NO: 541465 - DNA, 15 bp, Homo sapiens
gccactgtgtgttca

SEQ ID NO: 541466 - DNA, 15 bp, Homo sapiens
ccactgtgtgttcag

SEQ ID NO: 541467 - DNA, 15 bp, Homo sapiens
cactgtgtgttcagc

SEQ ID NO: 541468 - DNA, 15 bp, Homo sapiens
actgtgtgttcagct

SEQ ID NO: 541469 - DNA, 15 bp, Homo sapiens
ctgtgtgttcagctt

SEQ ID NO: 541470 - DNA, 15 bp, Homo sapiens
tgtgtgttcagcttt

SEQ ID NO: 541471 - DNA, 15 bp, Homo sapiens
gtgtgttcagctttc

SEQ ID NO: 541472 - DNA, 15 bp, Homo sapiens
tgtgttcagctttca

SEQ ID NO: 541473 - DNA, 15 bp, Homo sapiens
gtgttcagctttcag

SEQ ID NO: 541474 - DNA, 15 bp, Homo sapiens
tgttcagctttcagt

SEQ ID NO: 541475 - DNA, 15 bp, Homo sapiens
gttcagctttcagtg

SEQ ID NO: 541476 - DNA, 15 bp, Homo sapiens
ttcagctttcagtga

SEQ ID NO: 541477 - DNA, 15 bp, Homo sapiens
tcagctttcagtgat

SEQ ID NO: 541478 - DNA, 15 bp, Homo sapiens
cagctttcagtgatg

SEQ ID NO: 541479 - DNA, 15 bp, Homo sapiens
agctttcagtgatga

SEQ ID NO: 541480 - DNA, 15 bp, Homo sapiens
gctttcagtgatgag

SEQ ID NO: 541481 - DNA, 15 bp, Homo sapiens
ctttcagtgatgaga

SEQ ID NO: 541482 - DNA, 15 bp, Homo sapiens
tttcagtgatgagac

SEQ ID NO: 541483 - DNA, 15 bp, Homo sapiens
ttcagtgatgagact

SEQ ID NO: 541484 - DNA, 15 bp, Homo sapiens
tcagtgatgagactg

SEQ ID NO: 541485 - DNA, 15 bp, Homo sapiens
cagtgatgagactga

SEQ ID NO: 541486 - DNA, 15 bp, Homo sapiens
agtgatgagactgaa

SEQ ID NO: 541487 - DNA, 15 bp, Homo sapiens
gtgatgagactgaac

SEQ ID NO: 541488 - DNA, 15 bp, Homo sapiens
tgatgagactgaaca

SEQ ID NO: 541489 - DNA, 15 bp, Homo sapiens
gatgagactgaacaa

SEQ ID NO: 541490 - DNA, 15 bp, Homo sapiens
atgagactgaacaat

SEQ ID NO: 541491 - DNA, 15 bp, Homo sapiens
tgagactgaacaatg

SEQ ID NO: 541492 - DNA, 15 bp, Homo sapiens
gagactgaacaatgg

SEQ ID NO: 541493 - DNA, 15 bp, Homo sapiens
agactgaacaatggt

SEQ ID NO: 541494 - DNA, 15 bp, Homo sapiens
gactgaacaatggtt

SEQ ID NO: 541495 - DNA, 15 bp, Homo sapiens
actgaacaatggttg

SEQ ID NO: 541496 - DNA, 15 bp, Homo sapiens
ctgaacaatggttgg

SEQ ID NO: 541497 - DNA, 15 bp, Homo sapiens
tgaacaatggttggc

SEQ ID NO: 541498 - DNA, 15 bp, Homo sapiens
gaacaatggttggcg

SEQ ID NO: 541499 - DNA, 15 bp, Homo sapiens
aacaatggttggcga

SEQ ID NO: 541500 - DNA, 15 bp, Homo sapiens
acaatggttggcgat

SEQ ID NO: 541501 - DNA, 15 bp, Homo sapiens
caatggttggcgatg

SEQ ID NO: 541502 - DNA, 15 bp, Homo sapiens
aatggttggcgatgc

SEQ ID NO: 541503 - DNA, 15 bp, Homo sapiens
atggttggcgatgct

SEQ ID NO: 541504 - DNA, 15 bp, Homo sapiens
tggttggcgatgctt

SEQ ID NO: 541505 - DNA, 15 bp, Homo sapiens
ggttggcgatgcttt

SEQ ID NO: 541506 - DNA, 15 bp, Homo sapiens
gttggcgatgctttg

SEQ ID NO: 541507 - DNA, 15 bp, Homo sapiens
ttggcgatgctttgc

SEQ ID NO: 541508 - DNA, 15 bp, Homo sapiens
tggcgatgctttgca

SEQ ID NO: 541509 - DNA, 15 bp, Homo sapiens
ggcgatgctttgcat

SEQ ID NO: 541510 - DNA, 15 bp, Homo sapiens
gcgatgctttgcatt

SEQ ID NO: 541511 - DNA, 15 bp, Homo sapiens
cgatgctttgcattt

SEQ ID NO: 541512 - DNA, 15 bp, Homo sapiens
gatgctttgcattta

SEQ ID NO: 541513 - DNA, 15 bp, Homo sapiens
atgctttgcatttaa

SEQ ID NO: 541514 - DNA, 15 bp, Homo sapiens
tgctttgcatttaaa

SEQ ID NO: 541515 - DNA, 15 bp, Homo sapiens
gctttgcatttaaag

SEQ ID NO: 541516 - DNA, 15 bp, Homo sapiens
ctttgcatttaaaga

SEQ ID NO: 541517 - DNA, 15 bp, Homo sapiens
tttgcatttaaagag

SEQ ID NO: 541518 - DNA, 15 bp, Homo sapiens
ttgcatttaaagagg

SEQ ID NO: 541519 - DNA, 15 bp, Homo sapiens
tgcatttaaagaggt

SEQ ID NO: 541520 - DNA, 15 bp, Homo sapiens
gcatttaaagaggtg

SEQ ID NO: 541521 - DNA, 15 bp, Homo sapiens
catttaaagaggtgg

SEQ ID NO: 541522 - DNA, 15 bp, Homo sapiens
atttaaagaggtggg

SEQ ID NO: 541523 - DNA, 15 bp, Homo sapiens
tttaaagaggtggga

SEQ ID NO: 541524 - DNA, 15 bp, Homo sapiens
ttaaagaggtgggaa

SEQ ID NO: 541525 - DNA, 15 bp, Homo sapiens
taaagaggtgggaaa

SEQ ID NO: 541526 - DNA, 15 bp, Homo sapiens
aaagaggtgggaaaa

SEQ ID NO: 541527 - DNA, 15 bp, Homo sapiens
aagaggtgggaaaag

SEQ ID NO: 541528 - DNA, 15 bp, Homo sapiens
agaggtgggaaaaga

SEQ ID NO: 541529 - DNA, 15 bp, Homo sapiens
gaggtgggaaaagaa

SEQ ID NO: 541530 - DNA, 15 bp, Homo sapiens
aggtgggaaaagaaa

SEQ ID NO: 541531 - DNA, 15 bp, Homo sapiens
ggtgggaaaagaaaa

SEQ ID NO: 541532 - DNA, 15 bp, Homo sapiens
gtgggaaaagaaaag

SEQ ID NO: 541533 - DNA, 15 bp, Homo sapiens
tgggaaaagaaaagg

SEQ ID NO: 541534 - DNA, 15 bp, Homo sapiens
gggaaaagaaaagga

SEQ ID NO: 541535 - DNA, 15 bp, Homo sapiens
ggaaaagaaaaggat

SEQ ID NO: 541536 - DNA, 15 bp, Homo sapiens
gaaaagaaaaggatc

SEQ ID NO: 541537 - DNA, 15 bp, Homo sapiens
aaaagaaaaggatca

SEQ ID NO: 541538 - DNA, 15 bp, Homo sapiens
aaagaaaaggatcag

SEQ ID NO: 541539 - DNA, 15 bp, Homo sapiens
aagaaaaggatcaga

SEQ ID NO: 541540 - DNA, 15 bp, Homo sapiens
agaaaaggatcagag

SEQ ID NO: 541541 - DNA, 15 bp, Homo sapiens
gaaaaggatcagagt

SEQ ID NO: 541542 - DNA, 15 bp, Homo sapiens
aaaaggatcagagtg

SEQ ID NO: 541543 - DNA, 15 bp, Homo sapiens
aaaggatcagagtgg

SEQ ID NO: 541544 - DNA, 15 bp, Homo sapiens
aaggatcagagtgga

SEQ ID NO: 541545 - DNA, 15 bp, Homo sapiens
aggatcagagtggag

SEQ ID NO: 541546 - DNA, 15 bp, Homo sapiens
ggatcagagtggagg

SEQ ID NO: 541547 - DNA, 15 bp, Homo sapiens
gatcagagtggaggt

SEQ ID NO: 541548 - DNA, 15 bp, Homo sapiens
atcagagtggaggta

SEQ ID NO: 541549 - DNA, 15 bp, Homo sapiens
tcagagtggaggtat

SEQ ID NO: 541550 - DNA, 15 bp, Homo sapiens
cagagtggaggtatg

SEQ ID NO: 541551 - DNA, 15 bp, Homo sapiens
agagtggaggtatgt

SEQ ID NO: 541552 - DNA, 15 bp, Homo sapiens
gagtggaggtatgtg

SEQ ID NO: 541553 - DNA, 15 bp, Homo sapiens
agtggaggtatgtga

SEQ ID NO: 541554 - DNA, 15 bp, Homo sapiens
gtggaggtatgtgag

SEQ ID NO: 541555 - DNA, 15 bp, Homo sapiens
tggaggtatgtgagg

SEQ ID NO: 541556 - DNA, 15 bp, Homo sapiens
ggaggtatgtgaggc

SEQ ID NO: 541557 - DNA, 15 bp, Homo sapiens
gaggtatgtgaggca

SEQ ID NO: 541558 - DNA, 15 bp, Homo sapiens
aggtatgtgaggcat

SEQ ID NO: 541559 - DNA, 15 bp, Homo sapiens
ggtatgtgaggcata

SEQ ID NO: 541560 - DNA, 15 bp, Homo sapiens
gtatgtgaggcatat

SEQ ID NO: 541561 - DNA, 15 bp, Homo sapiens
tatgtgaggcatatg

SEQ ID NO: 541562 - DNA, 15 bp, Homo sapiens
atgtgaggcatatgg

SEQ ID NO: 541563 - DNA, 15 bp, Homo sapiens
tgtgaggcatatggc

SEQ ID NO: 541564 - DNA, 15 bp, Homo sapiens
gtgaggcatatggca

SEQ ID NO: 541565 - DNA, 15 bp, Homo sapiens
tgaggcatatggcac

SEQ ID NO: 541566 - DNA, 15 bp, Homo sapiens
gaggcatatggcact

SEQ ID NO: 541567 - DNA, 15 bp, Homo sapiens
aggcatatggcactg

SEQ ID NO: 541568 - DNA, 15 bp, Homo sapiens
ggcatatggcactgc

SEQ ID NO: 541569 - DNA, 15 bp, Homo sapiens
gcatatggcactgcc

SEQ ID NO: 541570 - DNA, 15 bp, Homo sapiens
catatggcactgccc

SEQ ID NO: 541571 - DNA, 15 bp, Homo sapiens
atatggcactgcccg

SEQ ID NO: 541572 - DNA, 15 bp, Homo sapiens
tatggcactgcccgg

SEQ ID NO: 541573 - DNA, 15 bp, Homo sapiens
atggcactgcccggg

SEQ ID NO: 541574 - DNA, 15 bp, Homo sapiens
tggcactgcccgggg

SEQ ID NO: 541575 - DNA, 15 bp, Homo sapiens
ggcactgcccggggg

SEQ ID NO: 541576 - DNA, 15 bp, Homo sapiens
gcactgcccggggga

SEQ ID NO: 541577 - DNA, 15 bp, Homo sapiens
cactgcccgggggaa

SEQ ID NO: 541578 - DNA, 15 bp, Homo sapiens
actgcccgggggaaa

SEQ ID NO: 541579 - DNA, 15 bp, Homo sapiens
ctgcccgggggaaac

SEQ ID NO: 541580 - DNA, 15 bp, Homo sapiens
tgcccgggggaaaca

SEQ ID NO: 541581 - DNA, 15 bp, Homo sapiens
gcccgggggaaacac

SEQ ID NO: 541582 - DNA, 15 bp, Homo sapiens
cccgggggaaacacg

SEQ ID NO: 541583 - DNA, 15 bp, Homo sapiens
ccgggggaaacacga

SEQ ID NO: 541584 - DNA, 15 bp, Homo sapiens
cgggggaaacacgag

SEQ ID NO: 541585 - DNA, 15 bp, Homo sapiens
gggggaaacacgagt

SEQ ID NO: 541586 - DNA, 15 bp, Homo sapiens
ggggaaacacgagtg

SEQ ID NO: 541587 - DNA, 15 bp, Homo sapiens
gggaaacacgagtgc

SEQ ID NO: 541588 - DNA, 15 bp, Homo sapiens
ggaaacacgagtgca

SEQ ID NO: 541589 - DNA, 15 bp, Homo sapiens
gaaacacgagtgcac

SEQ ID NO: 541590 - DNA, 15 bp, Homo sapiens
aaacacgagtgcacc

SEQ ID NO: 541591 - DNA, 15 bp, Homo sapiens
aacacgagtgcacca

SEQ ID NO: 541592 - DNA, 15 bp, Homo sapiens
acacgagtgcaccaa

SEQ ID NO: 541593 - DNA, 15 bp, Homo sapiens
cacgagtgcaccaag

SEQ ID NO: 541594 - DNA, 15 bp, Homo sapiens
acgagtgcaccaagc

SEQ ID NO: 541595 - DNA, 15 bp, Homo sapiens
cgagtgcaccaagca

SEQ ID NO: 541596 - DNA, 15 bp, Homo sapiens
gagtgcaccaagcag

SEQ ID NO: 541597 - DNA, 15 bp, Homo sapiens
agtgcaccaagcagg

SEQ ID NO: 541598 - DNA, 15 bp, Homo sapiens
gtgcaccaagcaggc

SEQ ID NO: 541599 - DNA, 15 bp, Homo sapiens
tgcaccaagcaggct

SEQ ID NO: 541600 - DNA, 15 bp, Homo sapiens
gcaccaagcaggctc

SEQ ID NO: 541601 - DNA, 15 bp, Homo sapiens
caccaagcaggctcc

SEQ ID NO: 541602 - DNA, 15 bp, Homo sapiens
accaagcaggctcca

SEQ ID NO: 541603 - DNA, 15 bp, Homo sapiens
ccaagcaggctccag

SEQ ID NO: 541604 - DNA, 15 bp, Homo sapiens
caagcaggctccaga

SEQ ID NO: 541605 - DNA, 15 bp, Homo sapiens
aagcaggctccagaa

SEQ ID NO: 541606 - DNA, 15 bp, Homo sapiens
agcaggctccagaat

SEQ ID NO: 541607 - DNA, 15 bp, Homo sapiens
gcaggctccagaatg

SEQ ID NO: 541608 - DNA, 15 bp, Homo sapiens
caggctccagaatga

SEQ ID NO: 541609 - DNA, 15 bp, Homo sapiens
aggctccagaatgaa

SEQ ID NO: 541610 - DNA, 15 bp, Homo sapiens
ggctccagaatgaac

SEQ ID NO: 541611 - DNA, 15 bp, Homo sapiens
gctccagaatgaact

SEQ ID NO: 541612 - DNA, 15 bp, Homo sapiens
ctccagaatgaactc

SEQ ID NO: 541613 - DNA, 15 bp, Homo sapiens
tccagaatgaactca

SEQ ID NO: 541614 - DNA, 15 bp, Homo sapiens
ccagaatgaactcag

SEQ ID NO: 541615 - DNA, 15 bp, Homo sapiens
cagaatgaactcagg

SEQ ID NO: 541616 - DNA, 15 bp, Homo sapiens
agaatgaactcagga

SEQ ID NO: 541617 - DNA, 15 bp, Homo sapiens
gaatgaactcaggac

SEQ ID NO: 541618 - DNA, 15 bp, Homo sapiens
aatgaactcaggact

SEQ ID NO: 541619 - DNA, 15 bp, Homo sapiens
atgaactcaggactc

SEQ ID NO: 541620 - DNA, 15 bp, Homo sapiens
tgaactcaggactca

SEQ ID NO: 541621 - DNA, 15 bp, Homo sapiens
gaactcaggactcag

SEQ ID NO: 541622 - DNA, 15 bp, Homo sapiens
aactcaggactcagg

SEQ ID NO: 541623 - DNA, 15 bp, Homo sapiens
actcaggactcagga

SEQ ID NO: 541624 - DNA, 15 bp, Homo sapiens
ctcaggactcaggac

SEQ ID NO: 541625 - DNA, 15 bp, Homo sapiens
tcaggactcaggaca

SEQ ID NO: 541626 - DNA, 15 bp, Homo sapiens
caggactcaggacaa

SEQ ID NO: 541627 - DNA, 15 bp, Homo sapiens
aggactcaggacaac

SEQ ID NO: 541628 - DNA, 15 bp, Homo sapiens
ggactcaggacaact

SEQ ID NO: 541629 - DNA, 15 bp, Homo sapiens
gactcaggacaactg

SEQ ID NO: 541630 - DNA, 15 bp, Homo sapiens
actcaggacaactga

SEQ ID NO: 541631 - DNA, 15 bp, Homo sapiens
ctcaggacaactgag

SEQ ID NO: 541632 - DNA, 15 bp, Homo sapiens
tcaggacaactgagg

SEQ ID NO: 541633 - DNA, 15 bp, Homo sapiens
caggacaactgaggt

SEQ ID NO: 541634 - DNA, 15 bp, Homo sapiens
aggacaactgaggtc

SEQ ID NO: 541635 - DNA, 15 bp, Homo sapiens
ggacaactgaggtcc

SEQ ID NO: 541636 - DNA, 15 bp, Homo sapiens
gacaactgaggtccc

SEQ ID NO: 541637 - DNA, 15 bp, Homo sapiens
acaactgaggtcccc

SEQ ID NO: 541638 - DNA, 15 bp, Homo sapiens
caactgaggtcccct

SEQ ID NO: 541639 - DNA, 15 bp, Homo sapiens
aactgaggtcccctt

SEQ ID NO: 541640 - DNA, 15 bp, Homo sapiens
actgaggtccccttt

SEQ ID NO: 541641 - DNA, 15 bp, Homo sapiens
ctgaggtcccctttt

SEQ ID NO: 541642 - DNA, 15 bp, Homo sapiens
tgaggtccccttttg

SEQ ID NO: 541643 - DNA, 15 bp, Homo sapiens
gaggtccccttttgc

SEQ ID NO: 541644 - DNA, 15 bp, Homo sapiens
aggtccccttttgct

SEQ ID NO: 541645 - DNA, 15 bp, Homo sapiens
ggtccccttttgctc

SEQ ID NO: 541646 - DNA, 15 bp, Homo sapiens
gtccccttttgctcc

SEQ ID NO: 541647 - DNA, 15 bp, Homo sapiens
tccccttttgctccc

SEQ ID NO: 541648 - DNA, 15 bp, Homo sapiens
ccccttttgctccct

SEQ ID NO: 541649 - DNA, 15 bp, Homo sapiens
cccttttgctccctt

SEQ ID NO: 541650 - DNA, 15 bp, Homo sapiens
ccttttgctcccttt

SEQ ID NO: 541651 - DNA, 15 bp, Homo sapiens
cttttgctccctttg

SEQ ID NO: 541652 - DNA, 15 bp, Homo sapiens
ttttgctccctttgg

SEQ ID NO: 541653 - DNA, 15 bp, Homo sapiens
tttgctccctttggt

SEQ ID NO: 541654 - DNA, 15 bp, Homo sapiens
ttgctccctttggtg

SEQ ID NO: 541655 - DNA, 15 bp, Homo sapiens
tgctccctttggtgt

SEQ ID NO: 541656 - DNA, 15 bp, Homo sapiens
gctccctttggtgtc

SEQ ID NO: 541657 - DNA, 15 bp, Homo sapiens
ctccctttggtgtcc

SEQ ID NO: 541658 - DNA, 15 bp, Homo sapiens
tccctttggtgtcct

SEQ ID NO: 541659 - DNA, 15 bp, Homo sapiens
ccctttggtgtcctt

SEQ ID NO: 541660 - DNA, 15 bp, Homo sapiens
cctttggtgtccttt

SEQ ID NO: 541661 - DNA, 15 bp, Homo sapiens
ctttggtgtcctttt

SEQ ID NO: 541662 - DNA, 15 bp, Homo sapiens
tttggtgtcctttta

SEQ ID NO: 541663 - DNA, 15 bp, Homo sapiens
ttggtgtccttttac

SEQ ID NO: 541664 - DNA, 15 bp, Homo sapiens
tggtgtccttttacc

SEQ ID NO: 541665 - DNA, 15 bp, Homo sapiens
ggtgtccttttacca

SEQ ID NO: 541666 - DNA, 15 bp, Homo sapiens
gtgtccttttaccag

SEQ ID NO: 541667 - DNA, 15 bp, Homo sapiens
tgtccttttaccagt

SEQ ID NO: 541668 - DNA, 15 bp, Homo sapiens
gtccttttaccagtc

SEQ ID NO: 541669 - DNA, 15 bp, Homo sapiens
tccttttaccagtcg

SEQ ID NO: 541670 - DNA, 15 bp, Homo sapiens
ccttttaccagtcgt

SEQ ID NO: 541671 - DNA, 15 bp, Homo sapiens
cttttaccagtcgtc

SEQ ID NO: 541672 - DNA, 15 bp, Homo sapiens
ttttaccagtcgtca

SEQ ID NO: 541673 - DNA, 15 bp, Homo sapiens
tttaccagtcgtcat

SEQ ID NO: 541674 - DNA, 15 bp, Homo sapiens
ttaccagtcgtcatg

SEQ ID NO: 541675 - DNA, 15 bp, Homo sapiens
taccagtcgtcatgt

SEQ ID NO: 541676 - DNA, 15 bp, Homo sapiens
accagtcgtcatgta

SEQ ID NO: 541677 - DNA, 15 bp, Homo sapiens
ccagtcgtcatgtac

SEQ ID NO: 541678 - DNA, 15 bp, Homo sapiens
cagtcgtcatgtaca

SEQ ID NO: 541679 - DNA, 15 bp, Homo sapiens
agtcgtcatgtacac

SEQ ID NO: 541680 - DNA, 15 bp, Homo sapiens
gtcgtcatgtacact

SEQ ID NO: 541681 - DNA, 15 bp, Homo sapiens
tcgtcatgtacacta

SEQ ID NO: 541682 - DNA, 15 bp, Homo sapiens
cgtcatgtacactaa

SEQ ID NO: 541683 - DNA, 15 bp, Homo sapiens
gtcatgtacactaaa

SEQ ID NO: 541684 - DNA, 15 bp, Homo sapiens
tcatgtacactaaat

SEQ ID NO: 541685 - DNA, 15 bp, Homo sapiens
catgtacactaaatc

SEQ ID NO: 541686 - DNA, 15 bp, Homo sapiens
atgtacactaaatca

SEQ ID NO: 541687 - DNA, 15 bp, Homo sapiens
tgtacactaaatcaa

SEQ ID NO: 541688 - DNA, 15 bp, Homo sapiens
gtacactaaatcaat

SEQ ID NO: 541689 - DNA, 15 bp, Homo sapiens
tacactaaatcaatg

SEQ ID NO: 541690 - DNA, 15 bp, Homo sapiens
acactaaatcaatgc

SEQ ID NO: 541691 - DNA, 15 bp, Homo sapiens
cactaaatcaatgca

SEQ ID NO: 541692 - DNA, 15 bp, Homo sapiens
actaaatcaatgcac

SEQ ID NO: 541693 - DNA, 15 bp, Homo sapiens
ctaaatcaatgcaca

SEQ ID NO: 541694 - DNA, 15 bp, Homo sapiens
taaatcaatgcacat

SEQ ID NO: 541695 - DNA, 15 bp, Homo sapiens
aaatcaatgcacata

SEQ ID NO: 541696 - DNA, 15 bp, Homo sapiens
aatcaatgcacatac

SEQ ID NO: 541697 - DNA, 15 bp, Homo sapiens
atcaatgcacatacc

SEQ ID NO: 541698 - DNA, 15 bp, Homo sapiens
tcaatgcacatacct

SEQ ID NO: 541699 - DNA, 15 bp, Homo sapiens
caatgcacatacctg

SEQ ID NO: 541700 - DNA, 15 bp, Homo sapiens
aatgcacatacctgt

SEQ ID NO: 541701 - DNA, 15 bp, Homo sapiens
atgcacatacctgtc

SEQ ID NO: 541702 - DNA, 15 bp, Homo sapiens
tgcacatacctgtca

SEQ ID NO: 541703 - DNA, 15 bp, Homo sapiens
gcacatacctgtcac

SEQ ID NO: 541704 - DNA, 15 bp, Homo sapiens
cacatacctgtcacc

SEQ ID NO: 541705 - DNA, 15 bp, Homo sapiens
acatacctgtcaccc

SEQ ID NO: 541706 - DNA, 15 bp, Homo sapiens
catacctgtcacccc

SEQ ID NO: 541707 - DNA, 15 bp, Homo sapiens
atacctgtcacccct

SEQ ID NO: 541708 - DNA, 15 bp, Homo sapiens
tacctgtcacccctt

SEQ ID NO: 541709 - DNA, 15 bp, Homo sapiens
acctgtcaccccttt

SEQ ID NO: 541710 - DNA, 15 bp, Homo sapiens
cctgtcacccctttt

SEQ ID NO: 541711 - DNA, 15 bp, Homo sapiens
ctgtcaccccttttt

SEQ ID NO: 541712 - DNA, 15 bp, Homo sapiens
tgtcaccccttttta

SEQ ID NO: 541713 - DNA, 15 bp, Homo sapiens
gtcacccctttttaa

SEQ ID NO: 541714 - DNA, 15 bp, Homo sapiens
tcacccctttttaaa

SEQ ID NO: 541715 - DNA, 15 bp, Homo sapiens
cacccctttttaaaa

SEQ ID NO: 541716 - DNA, 15 bp, Homo sapiens
acccctttttaaaag

SEQ ID NO: 541717 - DNA, 15 bp, Homo sapiens
cccctttttaaaagg

SEQ ID NO: 541718 - DNA, 15 bp, Homo sapiens
ccctttttaaaagga

SEQ ID NO: 541719 - DNA, 15 bp, Homo sapiens
cctttttaaaaggat

SEQ ID NO: 541720 - DNA, 15 bp, Homo sapiens
ctttttaaaaggatg

SEQ ID NO: 541721 - DNA, 15 bp, Homo sapiens
tttttaaaaggatgg

SEQ ID NO: 541722 - DNA, 15 bp, Homo sapiens
ttttaaaaggatggc

SEQ ID NO: 541723 - DNA, 15 bp, Homo sapiens
tttaaaaggatggca

SEQ ID NO: 541724 - DNA, 15 bp, Homo sapiens
ttaaaaggatggcaa

SEQ ID NO: 541725 - DNA, 15 bp, Homo sapiens
taaaaggatggcaac

SEQ ID NO: 541726 - DNA, 15 bp, Homo sapiens
aaaaggatggcaacc

SEQ ID NO: 541727 - DNA, 15 bp, Homo sapiens
aaaggatggcaacca

SEQ ID NO: 541728 - DNA, 15 bp, Homo sapiens
aaggatggcaaccag

SEQ ID NO: 541729 - DNA, 15 bp, Homo sapiens
aggatggcaaccaga

SEQ ID NO: 541730 - DNA, 15 bp, Homo sapiens
ggatggcaaccagat

SEQ ID NO: 541731 - DNA, 15 bp, Homo sapiens
gatggcaaccagatc

SEQ ID NO: 541732 - DNA, 15 bp, Homo sapiens
atggcaaccagatca

SEQ ID NO: 541733 - DNA, 15 bp, Homo sapiens
tggcaaccagatcat

SEQ ID NO: 541734 - DNA, 15 bp, Homo sapiens
ggcaaccagatcatt

SEQ ID NO: 541735 - DNA, 15 bp, Homo sapiens
gcaaccagatcattc

SEQ ID NO: 541736 - DNA, 15 bp, Homo sapiens
caaccagatcattca

SEQ ID NO: 541737 - DNA, 15 bp, Homo sapiens
aaccagatcattcac

SEQ ID NO: 541738 - DNA, 15 bp, Homo sapiens
accagatcattcacc

SEQ ID NO: 541739 - DNA, 15 bp, Homo sapiens
ccagatcattcacct

SEQ ID NO: 541740 - DNA, 15 bp, Homo sapiens
cagatcattcacctc

SEQ ID NO: 541741 - DNA, 15 bp, Homo sapiens
agatcattcacctct

SEQ ID NO: 541742 - DNA, 15 bp, Homo sapiens
gatcattcacctctc

SEQ ID NO: 541743 - DNA, 15 bp, Homo sapiens
atcattcacctctcc

SEQ ID NO: 541744 - DNA, 15 bp, Homo sapiens
tcattcacctctcct

SEQ ID NO: 541745 - DNA, 15 bp, Homo sapiens
cattcacctctcctt

SEQ ID NO: 541746 - DNA, 15 bp, Homo sapiens
attcacctctccttc

SEQ ID NO: 541747 - DNA, 15 bp, Homo sapiens
ttcacctctccttcc

SEQ ID NO: 541748 - DNA, 15 bp, Homo sapiens
tcacctctccttccc

SEQ ID NO: 541749 - DNA, 15 bp, Homo sapiens
cacctctccttcccc

SEQ ID NO: 541750 - DNA, 15 bp, Homo sapiens
acctctccttcccca

SEQ ID NO: 541751 - DNA, 15 bp, Homo sapiens
cctctccttccccat

SEQ ID NO: 541752 - DNA, 15 bp, Homo sapiens
ctctccttccccatt

SEQ ID NO: 541753 - DNA, 15 bp, Homo sapiens
tctccttccccattc

SEQ ID NO: 541754 - DNA, 15 bp, Homo sapiens
ctccttccccattcc

SEQ ID NO: 541755 - DNA, 15 bp, Homo sapiens
tccttccccattcca

SEQ ID NO: 541756 - DNA, 15 bp, Homo sapiens
ccttccccattccaa

SEQ ID NO: 541757 - DNA, 15 bp, Homo sapiens
cttccccattccaag

SEQ ID NO: 541758 - DNA, 15 bp, Homo sapiens
ttccccattccaaga

SEQ ID NO: 541759 - DNA, 15 bp, Homo sapiens
tccccattccaagag

SEQ ID NO: 541760 - DNA, 15 bp, Homo sapiens
ccccattccaagagc

SEQ ID NO: 541761 - DNA, 15 bp, Homo sapiens
cccattccaagagcc

SEQ ID NO: 541762 - DNA, 15 bp, Homo sapiens
ccattccaagagccc

SEQ ID NO: 541763 - DNA, 15 bp, Homo sapiens
cattccaagagcccg

SEQ ID NO: 541764 - DNA, 15 bp, Homo sapiens
attccaagagcccgg

SEQ ID NO: 541765 - DNA, 15 bp, Homo sapiens
ttccaagagcccggt

SEQ ID NO: 541766 - DNA, 15 bp, Homo sapiens
tccaagagcccggtt

SEQ ID NO: 541767 - DNA, 15 bp, Homo sapiens
ccaagagcccggttc

SEQ ID NO: 541768 - DNA, 15 bp, Homo sapiens
caagagcccggttct

SEQ ID NO: 541769 - DNA, 15 bp, Homo sapiens
aagagcccggttctt

SEQ ID NO: 541770 - DNA, 15 bp, Homo sapiens
agagcccggttcttg

SEQ ID NO: 541771 - DNA, 15 bp, Homo sapiens
gagcccggttcttga

SEQ ID NO: 541772 - DNA, 15 bp, Homo sapiens
agcccggttcttgag

SEQ ID NO: 541773 - DNA, 15 bp, Homo sapiens
gcccggttcttgaga

SEQ ID NO: 541774 - DNA, 15 bp, Homo sapiens
cccggttcttgagaa

SEQ ID NO: 541775 - DNA, 15 bp, Homo sapiens
ccggttcttgagaac

SEQ ID NO: 541776 - DNA, 15 bp, Homo sapiens
cggttcttgagaacc

SEQ ID NO: 541777 - DNA, 15 bp, Homo sapiens
ggttcttgagaacca

SEQ ID NO: 541778 - DNA, 15 bp, Homo sapiens
gttcttgagaaccag

SEQ ID NO: 541779 - DNA, 15 bp, Homo sapiens
ttcttgagaaccagg

SEQ ID NO: 541780 - DNA, 15 bp, Homo sapiens
tcttgagaaccaggc

SEQ ID NO: 541781 - DNA, 15 bp, Homo sapiens
cttgagaaccaggct

SEQ ID NO: 541782 - DNA, 15 bp, Homo sapiens
ttgagaaccaggctg

SEQ ID NO: 541783 - DNA, 15 bp, Homo sapiens
tgagaaccaggctgg

SEQ ID NO: 541784 - DNA, 15 bp, Homo sapiens
gagaaccaggctgga

SEQ ID NO: 541785 - DNA, 15 bp, Homo sapiens
agaaccaggctggaa

SEQ ID NO: 541786 - DNA, 15 bp, Homo sapiens
gaaccaggctggaag

SEQ ID NO: 541787 - DNA, 15 bp, Homo sapiens
aaccaggctggaaga

SEQ ID NO: 541788 - DNA, 15 bp, Homo sapiens
accaggctggaagag

SEQ ID NO: 541789 - DNA, 15 bp, Homo sapiens
ccaggctggaagagc

SEQ ID NO: 541790 - DNA, 15 bp, Homo sapiens
caggctggaagagca

SEQ ID NO: 541791 - DNA, 15 bp, Homo sapiens
aggctggaagagcat

SEQ ID NO: 541792 - DNA, 15 bp, Homo sapiens
ggctggaagagcatg

SEQ ID NO: 541793 - DNA, 15 bp, Homo sapiens
gctggaagagcatgt

SEQ ID NO: 541794 - DNA, 15 bp, Homo sapiens
ctggaagagcatgtc

SEQ ID NO: 541795 - DNA, 15 bp, Homo sapiens
tggaagagcatgtcc

SEQ ID NO: 541796 - DNA, 15 bp, Homo sapiens
ggaagagcatgtccc

SEQ ID NO: 541797 - DNA, 15 bp, Homo sapiens
gaagagcatgtccca

SEQ ID NO: 541798 - DNA, 15 bp, Homo sapiens
aagagcatgtcccag

SEQ ID NO: 541799 - DNA, 15 bp, Homo sapiens
agagcatgtcccagg

SEQ ID NO: 541800 - DNA, 15 bp, Homo sapiens
gagcatgtcccaggt

SEQ ID NO: 541801 - DNA, 15 bp, Homo sapiens
agcatgtcccaggta

SEQ ID NO: 541802 - DNA, 15 bp, Homo sapiens
gcatgtcccaggtac

SEQ ID NO: 541803 - DNA, 15 bp, Homo sapiens
catgtcccaggtact

SEQ ID NO: 541804 - DNA, 15 bp, Homo sapiens
atgtcccaggtactg

SEQ ID NO: 541805 - DNA, 15 bp, Homo sapiens
tgtcccaggtactgg

SEQ ID NO: 541806 - DNA, 15 bp, Homo sapiens
gtcccaggtactggc

SEQ ID NO: 541807 - DNA, 15 bp, Homo sapiens
tcccaggtactggct

SEQ ID NO: 541808 - DNA, 15 bp, Homo sapiens
cccaggtactggctg

SEQ ID NO: 541809 - DNA, 15 bp, Homo sapiens
ccaggtactggctgg

SEQ ID NO: 541810 - DNA, 15 bp, Homo sapiens
caggtactggctggt

SEQ ID NO: 541811 - DNA, 15 bp, Homo sapiens
aggtactggctggtg

SEQ ID NO: 541812 - DNA, 15 bp, Homo sapiens
ggtactggctggtgg

SEQ ID NO: 541813 - DNA, 15 bp, Homo sapiens
gtactggctggtggg

SEQ ID NO: 541814 - DNA, 15 bp, Homo sapiens
tactggctggtggga

SEQ ID NO: 541815 - DNA, 15 bp, Homo sapiens
actggctggtgggac

SEQ ID NO: 541816 - DNA, 15 bp, Homo sapiens
ctggctggtgggact

SEQ ID NO: 541817 - DNA, 15 bp, Homo sapiens
tggctggtgggactg

SEQ ID NO: 541818 - DNA, 15 bp, Homo sapiens
ggctggtgggactgt

SEQ ID NO: 541819 - DNA, 15 bp, Homo sapiens
gctggtgggactgtg

SEQ ID NO: 541820 - DNA, 15 bp, Homo sapiens
ctggtgggactgtgg

SEQ ID NO: 541821 - DNA, 15 bp, Homo sapiens
tggtgggactgtgga

SEQ ID NO: 541822 - DNA, 15 bp, Homo sapiens
ggtgggactgtggag

SEQ ID NO: 541823 - DNA, 15 bp, Homo sapiens
gtgggactgtggaga

SEQ ID NO: 541824 - DNA, 15 bp, Homo sapiens
tgggactgtggagat

SEQ ID NO: 541825 - DNA, 15 bp, Homo sapiens
gggactgtggagatg

SEQ ID NO: 541826 - DNA, 15 bp, Homo sapiens
ggactgtggagatgg

SEQ ID NO: 541827 - DNA, 15 bp, Homo sapiens
gactgtggagatggg

SEQ ID NO: 541828 - DNA, 15 bp, Homo sapiens
actgtggagatggga

SEQ ID NO: 541829 - DNA, 15 bp, Homo sapiens
ctgtggagatgggaa

SEQ ID NO: 541830 - DNA, 15 bp, Homo sapiens
tgtggagatgggaag

SEQ ID NO: 541831 - DNA, 15 bp, Homo sapiens
gtggagatgggaagc

SEQ ID NO: 541832 - DNA, 15 bp, Homo sapiens
tggagatgggaagca

SEQ ID NO: 541833 - DNA, 15 bp, Homo sapiens
ggagatgggaagcat

SEQ ID NO: 541834 - DNA, 15 bp, Homo sapiens
gagatgggaagcatt

SEQ ID NO: 541835 - DNA, 15 bp, Homo sapiens
agatgggaagcattt

SEQ ID NO: 541836 - DNA, 15 bp, Homo sapiens
gatgggaagcatttt

SEQ ID NO: 541837 - DNA, 15 bp, Homo sapiens
atgggaagcattttg

SEQ ID NO: 541838 - DNA, 15 bp, Homo sapiens
tgggaagcattttga

SEQ ID NO: 541839 - DNA, 15 bp, Homo sapiens
gggaagcattttgac

SEQ ID NO: 541840 - DNA, 15 bp, Homo sapiens
ggaagcattttgacc

SEQ ID NO: 541841 - DNA, 15 bp, Homo sapiens
gaagcattttgacct

SEQ ID NO: 541842 - DNA, 15 bp, Homo sapiens
aagcattttgacctt

SEQ ID NO: 541843 - DNA, 15 bp, Homo sapiens
agcattttgaccttg

SEQ ID NO: 541844 - DNA, 15 bp, Homo sapiens
gcattttgaccttgt

SEQ ID NO: 541845 - DNA, 15 bp, Homo sapiens
cattttgaccttgtt

SEQ ID NO: 541846 - DNA, 15 bp, Homo sapiens
attttgaccttgttc

SEQ ID NO: 541847 - DNA, 15 bp, Homo sapiens
ttttgaccttgttct

SEQ ID NO: 541848 - DNA, 15 bp, Homo sapiens
tttgaccttgttctc

SEQ ID NO: 541849 - DNA, 15 bp, Homo sapiens
ttgaccttgttctcc

SEQ ID NO: 541850 - DNA, 15 bp, Homo sapiens
tgaccttgttctcca

SEQ ID NO: 541851 - DNA, 15 bp, Homo sapiens
gaccttgttctccag

SEQ ID NO: 541852 - DNA, 15 bp, Homo sapiens
accttgttctccaga

SEQ ID NO: 541853 - DNA, 15 bp, Homo sapiens
ccttgttctccagaa

SEQ ID NO: 541854 - DNA, 15 bp, Homo sapiens
cttgttctccagaat

SEQ ID NO: 541855 - DNA, 15 bp, Homo sapiens
ttgttctccagaatg

SEQ ID NO: 541856 - DNA, 15 bp, Homo sapiens
tgttctccagaatga

SEQ ID NO: 541857 - DNA, 15 bp, Homo sapiens
gttctccagaatgat

SEQ ID NO: 541858 - DNA, 15 bp, Homo sapiens
ttctccagaatgatt

SEQ ID NO: 541859 - DNA, 15 bp, Homo sapiens
tctccagaatgattt

SEQ ID NO: 541860 - DNA, 15 bp, Homo sapiens
ctccagaatgatttt

SEQ ID NO: 541861 - DNA, 15 bp, Homo sapiens
tccagaatgattttt

SEQ ID NO: 541862 - DNA, 15 bp, Homo sapiens
ccagaatgatttttg

SEQ ID NO: 541863 - DNA, 15 bp, Homo sapiens
cagaatgatttttgc

SEQ ID NO: 541864 - DNA, 15 bp, Homo sapiens
agaatgatttttgct

SEQ ID NO: 541865 - DNA, 15 bp, Homo sapiens
gaatgatttttgcta

SEQ ID NO: 541866 - DNA, 15 bp, Homo sapiens
aatgatttttgctaa

SEQ ID NO: 541867 - DNA, 15 bp, Homo sapiens
atgatttttgctaaa

SEQ ID NO: 541868 - DNA, 15 bp, Homo sapiens
tgatttttgctaaag

SEQ ID NO: 541869 - DNA, 15 bp, Homo sapiens
gatttttgctaaaga

SEQ ID NO: 541870 - DNA, 15 bp, Homo sapiens
atttttgctaaagag

SEQ ID NO: 541871 - DNA, 15 bp, Homo sapiens
tttttgctaaagaga

SEQ ID NO: 541872 - DNA, 15 bp, Homo sapiens
ttttgctaaagagat

SEQ ID NO: 541873 - DNA, 15 bp, Homo sapiens
tttgctaaagagatg

SEQ ID NO: 541874 - DNA, 15 bp, Homo sapiens
ttgctaaagagatgc

SEQ ID NO: 541875 - DNA, 15 bp, Homo sapiens
tgctaaagagatgct

SEQ ID NO: 541876 - DNA, 15 bp, Homo sapiens
gctaaagagatgctt

SEQ ID NO: 541877 - DNA, 15 bp, Homo sapiens
ctaaagagatgctta

SEQ ID NO: 541878 - DNA, 15 bp, Homo sapiens
taaagagatgcttat

SEQ ID NO: 541879 - DNA, 15 bp, Homo sapiens
aaagagatgcttatt

SEQ ID NO: 541880 - DNA, 15 bp, Homo sapiens
aagagatgcttattt

SEQ ID NO: 541881 - DNA, 15 bp, Homo sapiens
agagatgcttatttt

SEQ ID NO: 541882 - DNA, 15 bp, Homo sapiens
gagatgcttattttt

SEQ ID NO: 541883 - DNA, 15 bp, Homo sapiens
agatgcttatttttt

SEQ ID NO: 541884 - DNA, 15 bp, Homo sapiens
gatgcttattttttc

SEQ ID NO: 541885 - DNA, 15 bp, Homo sapiens
atgcttattttttca

SEQ ID NO: 541886 - DNA, 15 bp, Homo sapiens
tgcttattttttcaa

SEQ ID NO: 541887 - DNA, 15 bp, Homo sapiens
gcttattttttcaaa

SEQ ID NO: 541888 - DNA, 15 bp, Homo sapiens
cttattttttcaaaa

SEQ ID NO: 541889 - DNA, 15 bp, Homo sapiens
ttattttttcaaaat

SEQ ID NO: 541890 - DNA, 15 bp, Homo sapiens
tattttttcaaaatg

SEQ ID NO: 541891 - DNA, 15 bp, Homo sapiens
attttttcaaaatgc

SEQ ID NO: 541892 - DNA, 15 bp, Homo sapiens
ttttttcaaaatgca

SEQ ID NO: 541893 - DNA, 15 bp, Homo sapiens
tttttcaaaatgcaa

SEQ ID NO: 541894 - DNA, 15 bp, Homo sapiens
ttttcaaaatgcaat

SEQ ID NO: 541895 - DNA, 15 bp, Homo sapiens
tttcaaaatgcaatt

SEQ ID NO: 541896 - DNA, 15 bp, Homo sapiens
ttcaaaatgcaattc

SEQ ID NO: 541897 - DNA, 15 bp, Homo sapiens
tcaaaatgcaattct

SEQ ID NO: 541898 - DNA, 15 bp, Homo sapiens
caaaatgcaattcta

SEQ ID NO: 541899 - DNA, 15 bp, Homo sapiens
aaaatgcaattctat

SEQ ID NO: 541900 - DNA, 15 bp, Homo sapiens
aaatgcaattctata

SEQ ID NO: 541901 - DNA, 15 bp, Homo sapiens
aatgcaattctataa

SEQ ID NO: 541902 - DNA, 15 bp, Homo sapiens
atgcaattctataac

SEQ ID NO: 541903 - DNA, 15 bp, Homo sapiens
tgcaattctataact

SEQ ID NO: 541904 - DNA, 15 bp, Homo sapiens
gcaattctataactt

SEQ ID NO: 541905 - DNA, 15 bp, Homo sapiens
caattctataacttt

SEQ ID NO: 541906 - DNA, 15 bp, Homo sapiens
aattctataacttta

SEQ ID NO: 541907 - DNA, 15 bp, Homo sapiens
attctataactttaa

SEQ ID NO: 541908 - DNA, 15 bp, Homo sapiens
ttctataactttaat

SEQ ID NO: 541909 - DNA, 15 bp, Homo sapiens
tctataactttaatg

SEQ ID NO: 541910 - DNA, 15 bp, Homo sapiens
ctataactttaatgc

SEQ ID NO: 541911 - DNA, 15 bp, Homo sapiens
tataactttaatgcc

SEQ ID NO: 541912 - DNA, 15 bp, Homo sapiens
ataactttaatgcct

SEQ ID NO: 541913 - DNA, 15 bp, Homo sapiens
taactttaatgcctt

SEQ ID NO: 541914 - DNA, 15 bp, Homo sapiens
aactttaatgccttt

SEQ ID NO: 541915 - DNA, 15 bp, Homo sapiens
actttaatgcctttt

SEQ ID NO: 541916 - DNA, 15 bp, Homo sapiens
ctttaatgccttttc

SEQ ID NO: 541917 - DNA, 15 bp, Homo sapiens
tttaatgccttttca

SEQ ID NO: 541918 - DNA, 15 bp, Homo sapiens
ttaatgccttttcag

SEQ ID NO: 541919 - DNA, 15 bp, Homo sapiens
taatgccttttcaga

SEQ ID NO: 541920 - DNA, 15 bp, Homo sapiens
aatgccttttcagaa

SEQ ID NO: 541921 - DNA, 15 bp, Homo sapiens
atgccttttcagaac

SEQ ID NO: 541922 - DNA, 15 bp, Homo sapiens
tgccttttcagaaca

SEQ ID NO: 541923 - DNA, 15 bp, Homo sapiens
gccttttcagaacag

SEQ ID NO: 541924 - DNA, 15 bp, Homo sapiens
ccttttcagaacaga

SEQ ID NO: 541925 - DNA, 15 bp, Homo sapiens
cttttcagaacagaa

SEQ ID NO: 541926 - DNA, 15 bp, Homo sapiens
ttttcagaacagaag

SEQ ID NO: 541927 - DNA, 15 bp, Homo sapiens
tttcagaacagaaga

SEQ ID NO: 541928 - DNA, 15 bp, Homo sapiens
ttcagaacagaagaa

SEQ ID NO: 541929 - DNA, 15 bp, Homo sapiens
tcagaacagaagaac

SEQ ID NO: 541930 - DNA, 15 bp, Homo sapiens
cagaacagaagaact

SEQ ID NO: 541931 - DNA, 15 bp, Homo sapiens
agaacagaagaactg

SEQ ID NO: 541932 - DNA, 15 bp, Homo sapiens
gaacagaagaactgc

SEQ ID NO: 541933 - DNA, 15 bp, Homo sapiens
aacagaagaactgca

SEQ ID NO: 541934 - DNA, 15 bp, Homo sapiens
acagaagaactgcac

SEQ ID NO: 541935 - DNA, 15 bp, Homo sapiens
cagaagaactgcacc

SEQ ID NO: 541936 - DNA, 15 bp, Homo sapiens
agaagaactgcacct

SEQ ID NO: 541937 - DNA, 15 bp, Homo sapiens
gaagaactgcacctt

SEQ ID NO: 541938 - DNA, 15 bp, Homo sapiens
aagaactgcaccttt

SEQ ID NO: 541939 - DNA, 15 bp, Homo sapiens
agaactgcacctttt

SEQ ID NO: 541940 - DNA, 15 bp, Homo sapiens
gaactgcacctttta

SEQ ID NO: 541941 - DNA, 15 bp, Homo sapiens
aactgcaccttttag

SEQ ID NO: 541942 - DNA, 15 bp, Homo sapiens
actgcaccttttagg

SEQ ID NO: 541943 - DNA, 15 bp, Homo sapiens
ctgcaccttttaggc

SEQ ID NO: 541944 - DNA, 15 bp, Homo sapiens
tgcaccttttaggca

SEQ ID NO: 541945 - DNA, 15 bp, Homo sapiens
gcaccttttaggcac

SEQ ID NO: 541946 - DNA, 15 bp, Homo sapiens
caccttttaggcacc

SEQ ID NO: 541947 - DNA, 15 bp, Homo sapiens
accttttaggcacca

SEQ ID NO: 541948 - DNA, 15 bp, Homo sapiens
ccttttaggcaccat

SEQ ID NO: 541949 - DNA, 15 bp, Homo sapiens
cttttaggcaccatg

SEQ ID NO: 541950 - DNA, 15 bp, Homo sapiens
ttttaggcaccatgt

SEQ ID NO: 541951 - DNA, 15 bp, Homo sapiens
tttaggcaccatgtt

SEQ ID NO: 541952 - DNA, 15 bp, Homo sapiens
ttaggcaccatgttg

SEQ ID NO: 541953 - DNA, 15 bp, Homo sapiens
taggcaccatgttga

SEQ ID NO: 541954 - DNA, 15 bp, Homo sapiens
aggcaccatgttgat

SEQ ID NO: 541955 - DNA, 15 bp, Homo sapiens
ggcaccatgttgatt

SEQ ID NO: 541956 - DNA, 15 bp, Homo sapiens
gcaccatgttgatta

SEQ ID NO: 541957 - DNA, 15 bp, Homo sapiens
caccatgttgattaa

SEQ ID NO: 541958 - DNA, 15 bp, Homo sapiens
accatgttgattaag

SEQ ID NO: 541959 - DNA, 15 bp, Homo sapiens
ccatgttgattaagt

SEQ ID NO: 541960 - DNA, 15 bp, Homo sapiens
catgttgattaagtg

SEQ ID NO: 541961 - DNA, 15 bp, Homo sapiens
atgttgattaagtgg

SEQ ID NO: 541962 - DNA, 15 bp, Homo sapiens
tgttgattaagtggc

SEQ ID NO: 541963 - DNA, 15 bp, Homo sapiens
gttgattaagtggcc

SEQ ID NO: 541964 - DNA, 15 bp, Homo sapiens
ttgattaagtggccc

SEQ ID NO: 541965 - DNA, 15 bp, Homo sapiens
tgattaagtggccct

SEQ ID NO: 541966 - DNA, 15 bp, Homo sapiens
gattaagtggccctg

SEQ ID NO: 541967 - DNA, 15 bp, Homo sapiens
attaagtggccctgt

SEQ ID NO: 541968 - DNA, 15 bp, Homo sapiens
ttaagtggccctgtg

SEQ ID NO: 541969 - DNA, 15 bp, Homo sapiens
taagtggccctgtgt

SEQ ID NO: 541970 - DNA, 15 bp, Homo sapiens
aagtggccctgtgtt

SEQ ID NO: 541971 - DNA, 15 bp, Homo sapiens
agtggccctgtgtta

SEQ ID NO: 541972 - DNA, 15 bp, Homo sapiens
gtggccctgtgttag

SEQ ID NO: 541973 - DNA, 15 bp, Homo sapiens
tggccctgtgttagg

SEQ ID NO: 541974 - DNA, 15 bp, Homo sapiens
ggccctgtgttaggg

SEQ ID NO: 541975 - DNA, 15 bp, Homo sapiens
gccctgtgttaggga

SEQ ID NO: 541976 - DNA, 15 bp, Homo sapiens
ccctgtgttagggag

SEQ ID NO: 541977 - DNA, 15 bp, Homo sapiens
cctgtgttagggagt

SEQ ID NO: 541978 - DNA, 15 bp, Homo sapiens
ctgtgttagggagtg

SEQ ID NO: 541979 - DNA, 15 bp, Homo sapiens
tgtgttagggagtgc

SEQ ID NO: 541980 - DNA, 15 bp, Homo sapiens
gtgttagggagtgct

SEQ ID NO: 541981 - DNA, 15 bp, Homo sapiens
tgttagggagtgctc

SEQ ID NO: 541982 - DNA, 15 bp, Homo sapiens
gttagggagtgctct

SEQ ID NO: 541983 - DNA, 15 bp, Homo sapiens
ttagggagtgctctg

SEQ ID NO: 541984 - DNA, 15 bp, Homo sapiens
tagggagtgctctga

SEQ ID NO: 541985 - DNA, 15 bp, Homo sapiens
agggagtgctctgag

SEQ ID NO: 541986 - DNA, 15 bp, Homo sapiens
gggagtgctctgagg

SEQ ID NO: 541987 - DNA, 15 bp, Homo sapiens
ggagtgctctgagga

SEQ ID NO: 541988 - DNA, 15 bp, Homo sapiens
gagtgctctgaggaa

SEQ ID NO: 541989 - DNA, 15 bp, Homo sapiens
agtgctctgaggaaa

SEQ ID NO: 541990 - DNA, 15 bp, Homo sapiens
gtgctctgaggaaac

SEQ ID NO: 541991 - DNA, 15 bp, Homo sapiens
tgctctgaggaaact

SEQ ID NO: 541992 - DNA, 15 bp, Homo sapiens
gctctgaggaaacta

SEQ ID NO: 541993 - DNA, 15 bp, Homo sapiens
ctctgaggaaactat

SEQ ID NO: 541994 - DNA, 15 bp, Homo sapiens
tctgaggaaactatg

SEQ ID NO: 541995 - DNA, 15 bp, Homo sapiens
ctgaggaaactatgt

SEQ ID NO: 541996 - DNA, 15 bp, Homo sapiens
tgaggaaactatgtt

SEQ ID NO: 541997 - DNA, 15 bp, Homo sapiens
gaggaaactatgttg

SEQ ID NO: 541998 - DNA, 15 bp, Homo sapiens
aggaaactatgttga

SEQ ID NO: 541999 - DNA, 15 bp, Homo sapiens
ggaaactatgttgat

SEQ ID NO: 542000 - DNA, 15 bp, Homo sapiens
gaaactatgttgatc

SEQ ID NO: 542001 - DNA, 15 bp, Homo sapiens
aaactatgttgatct

SEQ ID NO: 542002 - DNA, 15 bp, Homo sapiens
aactatgttgatctg

SEQ ID NO: 542003 - DNA, 15 bp, Homo sapiens
actatgttgatctgg

SEQ ID NO: 542004 - DNA, 15 bp, Homo sapiens
ctatgttgatctggc

SEQ ID NO: 542005 - DNA, 15 bp, Homo sapiens
tatgttgatctggca

SEQ ID NO: 542006 - DNA, 15 bp, Homo sapiens
atgttgatctggcat

SEQ ID NO: 542007 - DNA, 15 bp, Homo sapiens
tgttgatctggcatt

SEQ ID NO: 542008 - DNA, 15 bp, Homo sapiens
gttgatctggcattt

SEQ ID NO: 542009 - DNA, 15 bp, Homo sapiens
ttgatctggcatttg

SEQ ID NO: 542010 - DNA, 15 bp, Homo sapiens
tgatctggcatttga

SEQ ID NO: 542011 - DNA, 15 bp, Homo sapiens
gatctggcatttgac

SEQ ID NO: 542012 - DNA, 15 bp, Homo sapiens
atctggcatttgacc

SEQ ID NO: 542013 - DNA, 15 bp, Homo sapiens
tctggcatttgacct

SEQ ID NO: 542014 - DNA, 15 bp, Homo sapiens
ctggcatttgacctt

SEQ ID NO: 542015 - DNA, 15 bp, Homo sapiens
tggcatttgaccttg

SEQ ID NO: 542016 - DNA, 15 bp, Homo sapiens
ggcatttgaccttga

SEQ ID NO: 542017 - DNA, 15 bp, Homo sapiens
gcatttgaccttgaa

SEQ ID NO: 542018 - DNA, 15 bp, Homo sapiens
catttgaccttgaaa

SEQ ID NO: 542019 - DNA, 15 bp, Homo sapiens
atttgaccttgaaac

SEQ ID NO: 542020 - DNA, 15 bp, Homo sapiens
tttgaccttgaaaca

SEQ ID NO: 542021 - DNA, 15 bp, Homo sapiens
ttgaccttgaaacat

SEQ ID NO: 542022 - DNA, 15 bp, Homo sapiens
tgaccttgaaacatt

SEQ ID NO: 542023 - DNA, 15 bp, Homo sapiens
gaccttgaaacattt

SEQ ID NO: 542024 - DNA, 15 bp, Homo sapiens
accttgaaacatttc

SEQ ID NO: 542025 - DNA, 15 bp, Homo sapiens
ccttgaaacatttct

SEQ ID NO: 542026 - DNA, 15 bp, Homo sapiens
cttgaaacatttcta

SEQ ID NO: 542027 - DNA, 15 bp, Homo sapiens
ttgaaacatttctaa

SEQ ID NO: 542028 - DNA, 15 bp, Homo sapiens
tgaaacatttctaat

SEQ ID NO: 542029 - DNA, 15 bp, Homo sapiens
gaaacatttctaata

SEQ ID NO: 542030 - DNA, 15 bp, Homo sapiens
aaacatttctaatat

SEQ ID NO: 542031 - DNA, 15 bp, Homo sapiens
aacatttctaatatc

SEQ ID NO: 542032 - DNA, 15 bp, Homo sapiens
acatttctaatatca

SEQ ID NO: 542033 - DNA, 15 bp, Homo sapiens
catttctaatatcag

SEQ ID NO: 542034 - DNA, 15 bp, Homo sapiens
atttctaatatcaga

SEQ ID NO: 542035 - DNA, 15 bp, Homo sapiens
tttctaatatcagaa

SEQ ID NO: 542036 - DNA, 15 bp, Homo sapiens
ttctaatatcagaac

SEQ ID NO: 542037 - DNA, 15 bp, Homo sapiens
tctaatatcagaaca

SEQ ID NO: 542038 - DNA, 15 bp, Homo sapiens
ctaatatcagaacac

SEQ ID NO: 542039 - DNA, 15 bp, Homo sapiens
taatatcagaacaca

SEQ ID NO: 542040 - DNA, 15 bp, Homo sapiens
aatatcagaacacaa

SEQ ID NO: 542041 - DNA, 15 bp, Homo sapiens
atatcagaacacaaa

SEQ ID NO: 542042 - DNA, 15 bp, Homo sapiens
tatcagaacacaaag

SEQ ID NO: 542043 - DNA, 15 bp, Homo sapiens
atcagaacacaaagt

SEQ ID NO: 542044 - DNA, 15 bp, Homo sapiens
tcagaacacaaagtt

SEQ ID NO: 542045 - DNA, 15 bp, Homo sapiens
cagaacacaaagttc

SEQ ID NO: 542046 - DNA, 15 bp, Homo sapiens
agaacacaaagttca

SEQ ID NO: 542047 - DNA, 15 bp, Homo sapiens
gaacacaaagttcat

SEQ ID NO: 542048 - DNA, 15 bp, Homo sapiens
aacacaaagttcatt

SEQ ID NO: 542049 - DNA, 15 bp, Homo sapiens
acacaaagttcattc

SEQ ID NO: 542050 - DNA, 15 bp, Homo sapiens
cacaaagttcattca

SEQ ID NO: 542051 - DNA, 15 bp, Homo sapiens
acaaagttcattcat

SEQ ID NO: 542052 - DNA, 15 bp, Homo sapiens
caaagttcattcatg

SEQ ID NO: 542053 - DNA, 15 bp, Homo sapiens
aaagttcattcatgt

SEQ ID NO: 542054 - DNA, 15 bp, Homo sapiens
aagttcattcatgtt

SEQ ID NO: 542055 - DNA, 15 bp, Homo sapiens
agttcattcatgttg

SEQ ID NO: 542056 - DNA, 15 bp, Homo sapiens
gttcattcatgttgc

SEQ ID NO: 542057 - DNA, 15 bp, Homo sapiens
ttcattcatgttgcc

SEQ ID NO: 542058 - DNA, 15 bp, Homo sapiens
tcattcatgttgcca

SEQ ID NO: 542059 - DNA, 15 bp, Homo sapiens
cattcatgttgccag

SEQ ID NO: 542060 - DNA, 15 bp, Homo sapiens
attcatgttgccaga

SEQ ID NO: 542061 - DNA, 15 bp, Homo sapiens
ttcatgttgccagag

SEQ ID NO: 542062 - DNA, 15 bp, Homo sapiens
tcatgttgccagagc

SEQ ID NO: 542063 - DNA, 15 bp, Homo sapiens
catgttgccagagct

SEQ ID NO: 542064 - DNA, 15 bp, Homo sapiens
atgttgccagagcta

SEQ ID NO: 542065 - DNA, 15 bp, Homo sapiens
tgttgccagagctag

SEQ ID NO: 542066 - DNA, 15 bp, Homo sapiens
gttgccagagctagc

SEQ ID NO: 542067 - DNA, 15 bp, Homo sapiens
ttgccagagctagcc

SEQ ID NO: 542068 - DNA, 15 bp, Homo sapiens
tgccagagctagcca

SEQ ID NO: 542069 - DNA, 15 bp, Homo sapiens
gccagagctagccaa

SEQ ID NO: 542070 - DNA, 15 bp, Homo sapiens
ccagagctagccaac

SEQ ID NO: 542071 - DNA, 15 bp, Homo sapiens
cagagctagccaact

SEQ ID NO: 542072 - DNA, 15 bp, Homo sapiens
agagctagccaactg

SEQ ID NO: 542073 - DNA, 15 bp, Homo sapiens
gagctagccaactga

SEQ ID NO: 542074 - DNA, 15 bp, Homo sapiens
agctagccaactgag

SEQ ID NO: 542075 - DNA, 15 bp, Homo sapiens
gctagccaactgagt

SEQ ID NO: 542076 - DNA, 15 bp, Homo sapiens
ctagccaactgagtt

SEQ ID NO: 542077 - DNA, 15 bp, Homo sapiens
tagccaactgagtta

SEQ ID NO: 542078 - DNA, 15 bp, Homo sapiens
agccaactgagttag

SEQ ID NO: 542079 - DNA, 15 bp, Homo sapiens
gccaactgagttagc

SEQ ID NO: 542080 - DNA, 15 bp, Homo sapiens
ccaactgagttagca

SEQ ID NO: 542081 - DNA, 15 bp, Homo sapiens
caactgagttagcaa

SEQ ID NO: 542082 - DNA, 15 bp, Homo sapiens
aactgagttagcaag

SEQ ID NO: 542083 - DNA, 15 bp, Homo sapiens
actgagttagcaagg

SEQ ID NO: 542084 - DNA, 15 bp, Homo sapiens
ctgagttagcaaggg

SEQ ID NO: 542085 - DNA, 15 bp, Homo sapiens
tgagttagcaaggga

SEQ ID NO: 542086 - DNA, 15 bp, Homo sapiens
gagttagcaagggaa

SEQ ID NO: 542087 - DNA, 15 bp, Homo sapiens
agttagcaagggaag

SEQ ID NO: 542088 - DNA, 15 bp, Homo sapiens
gttagcaagggaagt

SEQ ID NO: 542089 - DNA, 15 bp, Homo sapiens
ttagcaagggaagtt

SEQ ID NO: 542090 - DNA, 15 bp, Homo sapiens
tagcaagggaagttt

SEQ ID NO: 542091 - DNA, 15 bp, Homo sapiens
agcaagggaagtttc

SEQ ID NO: 542092 - DNA, 15 bp, Homo sapiens
gcaagggaagtttca

SEQ ID NO: 542093 - DNA, 15 bp, Homo sapiens
caagggaagtttcag

SEQ ID NO: 542094 - DNA, 15 bp, Homo sapiens
aagggaagtttcagg

SEQ ID NO: 542095 - DNA, 15 bp, Homo sapiens
agggaagtttcagga

SEQ ID NO: 542096 - DNA, 15 bp, Homo sapiens
gggaagtttcaggaa

SEQ ID NO: 542097 - DNA, 15 bp, Homo sapiens
ggaagtttcaggaaa

SEQ ID NO: 542098 - DNA, 15 bp, Homo sapiens
gaagtttcaggaaac

SEQ ID NO: 542099 - DNA, 15 bp, Homo sapiens
aagtttcaggaaaca

SEQ ID NO: 542100 - DNA, 15 bp, Homo sapiens
agtttcaggaaacag

SEQ ID NO: 542101 - DNA, 15 bp, Homo sapiens
gtttcaggaaacaga

SEQ ID NO: 542102 - DNA, 15 bp, Homo sapiens
tttcaggaaacagaa

SEQ ID NO: 542103 - DNA, 15 bp, Homo sapiens
ttcaggaaacagaaa

SEQ ID NO: 542104 - DNA, 15 bp, Homo sapiens
tcaggaaacagaaaa

SEQ ID NO: 542105 - DNA, 15 bp, Homo sapiens
caggaaacagaaaag

SEQ ID NO: 542106 - DNA, 15 bp, Homo sapiens
aggaaacagaaaagt

SEQ ID NO: 542107 - DNA, 15 bp, Homo sapiens
ggaaacagaaaagtc

SEQ ID NO: 542108 - DNA, 15 bp, Homo sapiens
gaaacagaaaagtcg

SEQ ID NO: 542109 - DNA, 15 bp, Homo sapiens
aaacagaaaagtcga

SEQ ID NO: 542110 - DNA, 15 bp, Homo sapiens
aacagaaaagtcgaa

SEQ ID NO: 542111 - DNA, 15 bp, Homo sapiens
acagaaaagtcgaaa

SEQ ID NO: 542112 - DNA, 15 bp, Homo sapiens
cagaaaagtcgaaaa

SEQ ID NO: 542113 - DNA, 15 bp, Homo sapiens
agaaaagtcgaaaat

SEQ ID NO: 542114 - DNA, 15 bp, Homo sapiens
gaaaagtcgaaaatc

SEQ ID NO: 542115 - DNA, 15 bp, Homo sapiens
aaaagtcgaaaatct

SEQ ID NO: 542116 - DNA, 15 bp, Homo sapiens
aaagtcgaaaatctt

SEQ ID NO: 542117 - DNA, 15 bp, Homo sapiens
aagtcgaaaatcttg

SEQ ID NO: 542118 - DNA, 15 bp, Homo sapiens
agtcgaaaatcttga

SEQ ID NO: 542119 - DNA, 15 bp, Homo sapiens
gtcgaaaatcttgaa

SEQ ID NO: 542120 - DNA, 15 bp, Homo sapiens
tcgaaaatcttgaaa

SEQ ID NO: 542121 - DNA, 15 bp, Homo sapiens
cgaaaatcttgaaat

SEQ ID NO: 542122 - DNA, 15 bp, Homo sapiens
gaaaatcttgaaatc

SEQ ID NO: 542123 - DNA, 15 bp, Homo sapiens
aaaatcttgaaatct

SEQ ID NO: 542124 - DNA, 15 bp, Homo sapiens
aaatcttgaaatctg

SEQ ID NO: 542125 - DNA, 15 bp, Homo sapiens
aatcttgaaatctgg

SEQ ID NO: 542126 - DNA, 15 bp, Homo sapiens
atcttgaaatctgga

SEQ ID NO: 542127 - DNA, 15 bp, Homo sapiens
tcttgaaatctggat

SEQ ID NO: 542128 - DNA, 15 bp, Homo sapiens
cttgaaatctggatt

SEQ ID NO: 542129 - DNA, 15 bp, Homo sapiens
ttgaaatctggattc

SEQ ID NO: 542130 - DNA, 15 bp, Homo sapiens
tgaaatctggattct

SEQ ID NO: 542131 - DNA, 15 bp, Homo sapiens
gaaatctggattctt

SEQ ID NO: 542132 - DNA, 15 bp, Homo sapiens
aaatctggattcttt

SEQ ID NO: 542133 - DNA, 15 bp, Homo sapiens
aatctggattctttc

SEQ ID NO: 542134 - DNA, 15 bp, Homo sapiens
atctggattctttct

SEQ ID NO: 542135 - DNA, 15 bp, Homo sapiens
tctggattctttctg

SEQ ID NO: 542136 - DNA, 15 bp, Homo sapiens
ctggattctttctgt

SEQ ID NO: 542137 - DNA, 15 bp, Homo sapiens
tggattctttctgtt

SEQ ID NO: 542138 - DNA, 15 bp, Homo sapiens
ggattctttctgttc

SEQ ID NO: 542139 - DNA, 15 bp, Homo sapiens
gattctttctgttct

SEQ ID NO: 542140 - DNA, 15 bp, Homo sapiens
attctttctgttctc

SEQ ID NO: 542141 - DNA, 15 bp, Homo sapiens
ttctttctgttctca

SEQ ID NO: 542142 - DNA, 15 bp, Homo sapiens
tctttctgttctcaa

SEQ ID NO: 542143 - DNA, 15 bp, Homo sapiens
ctttctgttctcaag

SEQ ID NO: 542144 - DNA, 15 bp, Homo sapiens
tttctgttctcaagt

SEQ ID NO: 542145 - DNA, 15 bp, Homo sapiens
ttctgttctcaagtc

SEQ ID NO: 542146 - DNA, 15 bp, Homo sapiens
tctgttctcaagtcc

SEQ ID NO: 542147 - DNA, 15 bp, Homo sapiens
ctgttctcaagtccc

SEQ ID NO: 542148 - DNA, 15 bp, Homo sapiens
tgttctcaagtccca

SEQ ID NO: 542149 - DNA, 15 bp, Homo sapiens
gttctcaagtcccac

SEQ ID NO: 542150 - DNA, 15 bp, Homo sapiens
ttctcaagtcccact

SEQ ID NO: 542151 - DNA, 15 bp, Homo sapiens
tctcaagtcccactc

SEQ ID NO: 542152 - DNA, 15 bp, Homo sapiens
ctcaagtcccactct

SEQ ID NO: 542153 - DNA, 15 bp, Homo sapiens
tcaagtcccactctg

SEQ ID NO: 542154 - DNA, 15 bp, Homo sapiens
caagtcccactctga

SEQ ID NO: 542155 - DNA, 15 bp, Homo sapiens
aagtcccactctgat

SEQ ID NO: 542156 - DNA, 15 bp, Homo sapiens
agtcccactctgatt

SEQ ID NO: 542157 - DNA, 15 bp, Homo sapiens
gtcccactctgattt

SEQ ID NO: 542158 - DNA, 15 bp, Homo sapiens
tcccactctgatttg

SEQ ID NO: 542159 - DNA, 15 bp, Homo sapiens
cccactctgatttgt

SEQ ID NO: 542160 - DNA, 15 bp, Homo sapiens
ccactctgatttgta

SEQ ID NO: 542161 - DNA, 15 bp, Homo sapiens
cactctgatttgtat

SEQ ID NO: 542162 - DNA, 15 bp, Homo sapiens
actctgatttgtata

SEQ ID NO: 542163 - DNA, 15 bp, Homo sapiens
ctctgatttgtatat

SEQ ID NO: 542164 - DNA, 15 bp, Homo sapiens
tctgatttgtatatt

SEQ ID NO: 542165 - DNA, 15 bp, Homo sapiens
ctgatttgtatatta

SEQ ID NO: 542166 - DNA, 15 bp, Homo sapiens
tgatttgtatattat

SEQ ID NO: 542167 - DNA, 15 bp, Homo sapiens
gatttgtatattatc

SEQ ID NO: 542168 - DNA, 15 bp, Homo sapiens
atttgtatattatca

SEQ ID NO: 542169 - DNA, 15 bp, Homo sapiens
tttgtatattatcac

SEQ ID NO: 542170 - DNA, 15 bp, Homo sapiens
ttgtatattatcacc

SEQ ID NO: 542171 - DNA, 15 bp, Homo sapiens
tgtatattatcacca

SEQ ID NO: 542172 - DNA, 15 bp, Homo sapiens
gtatattatcaccac

SEQ ID NO: 542173 - DNA, 15 bp, Homo sapiens
tatattatcaccacc

SEQ ID NO: 542174 - DNA, 15 bp, Homo sapiens
atattatcaccacct

SEQ ID NO: 542175 - DNA, 15 bp, Homo sapiens
tattatcaccacctt

SEQ ID NO: 542176 - DNA, 15 bp, Homo sapiens
attatcaccaccttg

SEQ ID NO: 542177 - DNA, 15 bp, Homo sapiens
ttatcaccaccttga

SEQ ID NO: 542178 - DNA, 15 bp, Homo sapiens
tatcaccaccttgac

SEQ ID NO: 542179 - DNA, 15 bp, Homo sapiens
atcaccaccttgact

SEQ ID NO: 542180 - DNA, 15 bp, Homo sapiens
tcaccaccttgacta

SEQ ID NO: 542181 - DNA, 15 bp, Homo sapiens
caccaccttgactat

SEQ ID NO: 542182 - DNA, 15 bp, Homo sapiens
accaccttgactatg

SEQ ID NO: 542183 - DNA, 15 bp, Homo sapiens
ccaccttgactatgc

SEQ ID NO: 542184 - DNA, 15 bp, Homo sapiens
caccttgactatgcc

SEQ ID NO: 542185 - DNA, 15 bp, Homo sapiens
accttgactatgcct

SEQ ID NO: 542186 - DNA, 15 bp, Homo sapiens
ccttgactatgccta

SEQ ID NO: 542187 - DNA, 15 bp, Homo sapiens
cttgactatgcctac

SEQ ID NO: 542188 - DNA, 15 bp, Homo sapiens
ttgactatgcctacc

SEQ ID NO: 542189 - DNA, 15 bp, Homo sapiens
tgactatgcctacct

SEQ ID NO: 542190 - DNA, 15 bp, Homo sapiens
gactatgcctacctt

SEQ ID NO: 542191 - DNA, 15 bp, Homo sapiens
actatgcctaccttg

SEQ ID NO: 542192 - DNA, 15 bp, Homo sapiens
ctatgcctaccttgt

SEQ ID NO: 542193 - DNA, 15 bp, Homo sapiens
tatgcctaccttgta

SEQ ID NO: 542194 - DNA, 15 bp, Homo sapiens
atgcctaccttgtat

SEQ ID NO: 542195 - DNA, 15 bp, Homo sapiens
tgcctaccttgtatt

SEQ ID NO: 542196 - DNA, 15 bp, Homo sapiens
gcctaccttgtattg

SEQ ID NO: 542197 - DNA, 15 bp, Homo sapiens
cctaccttgtattgt

SEQ ID NO: 542198 - DNA, 15 bp, Homo sapiens
ctaccttgtattgtg

SEQ ID NO: 542199 - DNA, 15 bp, Homo sapiens
taccttgtattgtgc

SEQ ID NO: 542200 - DNA, 15 bp, Homo sapiens
accttgtattgtgca

SEQ ID NO: 542201 - DNA, 15 bp, Homo sapiens
ccttgtattgtgcat

SEQ ID NO: 542202 - DNA, 15 bp, Homo sapiens
cttgtattgtgcatt

SEQ ID NO: 542203 - DNA, 15 bp, Homo sapiens
ttgtattgtgcattt

SEQ ID NO: 542204 - DNA, 15 bp, Homo sapiens
tgtattgtgcatttg

SEQ ID NO: 542205 - DNA, 15 bp, Homo sapiens
gtattgtgcatttgt

SEQ ID NO: 542206 - DNA, 15 bp, Homo sapiens
tattgtgcatttgtt

SEQ ID NO: 542207 - DNA, 15 bp, Homo sapiens
attgtgcatttgtta

SEQ ID NO: 542208 - DNA, 15 bp, Homo sapiens
ttgtgcatttgttaa

SEQ ID NO: 542209 - DNA, 15 bp, Homo sapiens
tgtgcatttgttaag

SEQ ID NO: 542210 - DNA, 15 bp, Homo sapiens
gtgcatttgttaagt

SEQ ID NO: 542211 - DNA, 15 bp, Homo sapiens
tgcatttgttaagtg

SEQ ID NO: 542212 - DNA, 15 bp, Homo sapiens
gcatttgttaagtgt

SEQ ID NO: 542213 - DNA, 15 bp, Homo sapiens
catttgttaagtgtg

SEQ ID NO: 542214 - DNA, 15 bp, Homo sapiens
atttgttaagtgtgt

SEQ ID NO: 542215 - DNA, 15 bp, Homo sapiens
tttgttaagtgtgta

SEQ ID NO: 542216 - DNA, 15 bp, Homo sapiens
ttgttaagtgtgtac

SEQ ID NO: 542217 - DNA, 15 bp, Homo sapiens
tgttaagtgtgtact

SEQ ID NO: 542218 - DNA, 15 bp, Homo sapiens
gttaagtgtgtactg

SEQ ID NO: 542219 - DNA, 15 bp, Homo sapiens
ttaagtgtgtactgt

SEQ ID NO: 542220 - DNA, 15 bp, Homo sapiens
taagtgtgtactgtg

SEQ ID NO: 542221 - DNA, 15 bp, Homo sapiens
aagtgtgtactgtgt

SEQ ID NO: 542222 - DNA, 15 bp, Homo sapiens
agtgtgtactgtgtt

SEQ ID NO: 542223 - DNA, 15 bp, Homo sapiens
gtgtgtactgtgtta

SEQ ID NO: 542224 - DNA, 15 bp, Homo sapiens
tgtgtactgtgttaa

SEQ ID NO: 542225 - DNA, 15 bp, Homo sapiens
gtgtactgtgttaaa

SEQ ID NO: 542226 - DNA, 15 bp, Homo sapiens
tgtactgtgttaaaa

SEQ ID NO: 542227 - DNA, 15 bp, Homo sapiens
gtactgtgttaaaaa

SEQ ID NO: 542228 - DNA, 15 bp, Homo sapiens
tactgtgttaaaaac

SEQ ID NO: 542229 - DNA, 15 bp, Homo sapiens
actgtgttaaaaact

SEQ ID NO: 542230 - DNA, 15 bp, Homo sapiens
ctgtgttaaaaactt

SEQ ID NO: 542231 - DNA, 15 bp, Homo sapiens
tgtgttaaaaacttt

SEQ ID NO: 542232 - DNA, 15 bp, Homo sapiens
gtgttaaaaacttta

SEQ ID NO: 542233 - DNA, 15 bp, Homo sapiens
tgttaaaaactttac

SEQ ID NO: 542234 - DNA, 15 bp, Homo sapiens
gttaaaaactttact

SEQ ID NO: 542235 - DNA, 15 bp, Homo sapiens
ttaaaaactttactt

SEQ ID NO: 542236 - DNA, 15 bp, Homo sapiens
taaaaactttactta

SEQ ID NO: 542237 - DNA, 15 bp, Homo sapiens
aaaaactttacttat

SEQ ID NO: 542238 - DNA, 15 bp, Homo sapiens
aaaactttacttata

SEQ ID NO: 542239 - DNA, 15 bp, Homo sapiens
aaactttacttatat

SEQ ID NO: 542240 - DNA, 15 bp, Homo sapiens
aactttacttatatc

SEQ ID NO: 542241 - DNA, 15 bp, Homo sapiens
actttacttatatcc

SEQ ID NO: 542242 - DNA, 15 bp, Homo sapiens
ctttacttatatcct

SEQ ID NO: 542243 - DNA, 15 bp, Homo sapiens
tttacttatatcctc

SEQ ID NO: 542244 - DNA, 15 bp, Homo sapiens
ttacttatatcctct

SEQ ID NO: 542245 - DNA, 15 bp, Homo sapiens
tacttatatcctctc

SEQ ID NO: 542246 - DNA, 15 bp, Homo sapiens
acttatatcctctca

SEQ ID NO: 542247 - DNA, 15 bp, Homo sapiens
cttatatcctctcat

SEQ ID NO: 542248 - DNA, 15 bp, Homo sapiens
ttatatcctctcatt

SEQ ID NO: 542249 - DNA, 15 bp, Homo sapiens
tatatcctctcattc

SEQ ID NO: 542250 - DNA, 15 bp, Homo sapiens
atatcctctcattcc

SEQ ID NO: 542251 - DNA, 15 bp, Homo sapiens
tatcctctcattcca

SEQ ID NO: 542252 - DNA, 15 bp, Homo sapiens
atcctctcattccat

SEQ ID NO: 542253 - DNA, 15 bp, Homo sapiens
tcctctcattccatc

SEQ ID NO: 542254 - DNA, 15 bp, Homo sapiens
cctctcattccatcc

SEQ ID NO: 542255 - DNA, 15 bp, Homo sapiens
ctctcattccatcct

SEQ ID NO: 542256 - DNA, 15 bp, Homo sapiens
tctcattccatcctc

SEQ ID NO: 542257 - DNA, 15 bp, Homo sapiens
ctcattccatcctca

SEQ ID NO: 542258 - DNA, 15 bp, Homo sapiens
tcattccatcctcac

SEQ ID NO: 542259 - DNA, 15 bp, Homo sapiens
cattccatcctcaca

SEQ ID NO: 542260 - DNA, 15 bp, Homo sapiens
attccatcctcacaa

SEQ ID NO: 542261 - DNA, 15 bp, Homo sapiens
ttccatcctcacaac

SEQ ID NO: 542262 - DNA, 15 bp, Homo sapiens
tccatcctcacaacc

SEQ ID NO: 542263 - DNA, 15 bp, Homo sapiens
ccatcctcacaaccc

SEQ ID NO: 542264 - DNA, 15 bp, Homo sapiens
catcctcacaaccct

SEQ ID NO: 542265 - DNA, 15 bp, Homo sapiens
atcctcacaacccta

SEQ ID NO: 542266 - DNA, 15 bp, Homo sapiens
tcctcacaaccctat

SEQ ID NO: 542267 - DNA, 15 bp, Homo sapiens
cctcacaaccctatt

SEQ ID NO: 542268 - DNA, 15 bp, Homo sapiens
ctcacaaccctattt

SEQ ID NO: 542269 - DNA, 15 bp, Homo sapiens
tcacaaccctatttt

SEQ ID NO: 542270 - DNA, 15 bp, Homo sapiens
cacaaccctatttta

SEQ ID NO: 542271 - DNA, 15 bp, Homo sapiens
acaaccctattttac

SEQ ID NO: 542272 - DNA, 15 bp, Homo sapiens
caaccctattttaca

SEQ ID NO: 542273 - DNA, 15 bp, Homo sapiens
aaccctattttacag

SEQ ID NO: 542274 - DNA, 15 bp, Homo sapiens
accctattttacaga

SEQ ID NO: 542275 - DNA, 15 bp, Homo sapiens
ccctattttacagat

SEQ ID NO: 542276 - DNA, 15 bp, Homo sapiens
cctattttacagatg

SEQ ID NO: 542277 - DNA, 15 bp, Homo sapiens
ctattttacagatga

SEQ ID NO: 542278 - DNA, 15 bp, Homo sapiens
tattttacagatgaa

SEQ ID NO: 542279 - DNA, 15 bp, Homo sapiens
attttacagatgaaa

SEQ ID NO: 542280 - DNA, 15 bp, Homo sapiens
ttttacagatgaaaa

SEQ ID NO: 542281 - DNA, 15 bp, Homo sapiens
tttacagatgaaaac

SEQ ID NO: 542282 - DNA, 15 bp, Homo sapiens
ttacagatgaaaact

SEQ ID NO: 542283 - DNA, 15 bp, Homo sapiens
tacagatgaaaactg

SEQ ID NO: 542284 - DNA, 15 bp, Homo sapiens
acagatgaaaactgg

SEQ ID NO: 542285 - DNA, 15 bp, Homo sapiens
cagatgaaaactgga

SEQ ID NO: 542286 - DNA, 15 bp, Homo sapiens
agatgaaaactggaa

SEQ ID NO: 542287 - DNA, 15 bp, Homo sapiens
gatgaaaactggaat

SEQ ID NO: 542288 - DNA, 15 bp, Homo sapiens
atgaaaactggaatc

SEQ ID NO: 542289 - DNA, 15 bp, Homo sapiens
tgaaaactggaatct

SEQ ID NO: 542290 - DNA, 15 bp, Homo sapiens
gaaaactggaatctc

SEQ ID NO: 542291 - DNA, 15 bp, Homo sapiens
aaaactggaatctca

SEQ ID NO: 542292 - DNA, 15 bp, Homo sapiens
aaactggaatctcaa

SEQ ID NO: 542293 - DNA, 15 bp, Homo sapiens
aactggaatctcaaa

SEQ ID NO: 542294 - DNA, 15 bp, Homo sapiens
actggaatctcaaag

SEQ ID NO: 542295 - DNA, 15 bp, Homo sapiens
ctggaatctcaaaga

SEQ ID NO: 542296 - DNA, 15 bp, Homo sapiens
tggaatctcaaagag

SEQ ID NO: 542297 - DNA, 15 bp, Homo sapiens
ggaatctcaaagagg

SEQ ID NO: 542298 - DNA, 15 bp, Homo sapiens
gaatctcaaagaggt

SEQ ID NO: 542299 - DNA, 15 bp, Homo sapiens
aatctcaaagaggtt

SEQ ID NO: 542300 - DNA, 15 bp, Homo sapiens
atctcaaagaggttt

SEQ ID NO: 542301 - DNA, 15 bp, Homo sapiens
tctcaaagaggtttc

SEQ ID NO: 542302 - DNA, 15 bp, Homo sapiens
ctcaaagaggtttcc

SEQ ID NO: 542303 - DNA, 15 bp, Homo sapiens
tcaaagaggtttcct

SEQ ID NO: 542304 - DNA, 15 bp, Homo sapiens
caaagaggtttccta

SEQ ID NO: 542305 - DNA, 15 bp, Homo sapiens
aaagaggtttcctaa

SEQ ID NO: 542306 - DNA, 15 bp, Homo sapiens
aagaggtttcctaat

SEQ ID NO: 542307 - DNA, 15 bp, Homo sapiens
agaggtttcctaatt

SEQ ID NO: 542308 - DNA, 15 bp, Homo sapiens
gaggtttcctaattg

SEQ ID NO: 542309 - DNA, 15 bp, Homo sapiens
aggtttcctaattgg

SEQ ID NO: 542310 - DNA, 15 bp, Homo sapiens
ggtttcctaattggc

SEQ ID NO: 542311 - DNA, 15 bp, Homo sapiens
gtttcctaattggct

SEQ ID NO: 542312 - DNA, 15 bp, Homo sapiens
tttcctaattggctg

SEQ ID NO: 542313 - DNA, 15 bp, Homo sapiens
ttcctaattggctga

SEQ ID NO: 542314 - DNA, 15 bp, Homo sapiens
tcctaattggctgag

SEQ ID NO: 542315 - DNA, 15 bp, Homo sapiens
cctaattggctgagg

SEQ ID NO: 542316 - DNA, 15 bp, Homo sapiens
ctaattggctgaggt

SEQ ID NO: 542317 - DNA, 15 bp, Homo sapiens
taattggctgaggtc

SEQ ID NO: 542318 - DNA, 15 bp, Homo sapiens
aattggctgaggtca

SEQ ID NO: 542319 - DNA, 15 bp, Homo sapiens
attggctgaggtcac

SEQ ID NO: 542320 - DNA, 15 bp, Homo sapiens
ttggctgaggtcacc

SEQ ID NO: 542321 - DNA, 15 bp, Homo sapiens
tggctgaggtcaccc

SEQ ID NO: 542322 - DNA, 15 bp, Homo sapiens
ggctgaggtcaccca

SEQ ID NO: 542323 - DNA, 15 bp, Homo sapiens
gctgaggtcacccag

SEQ ID NO: 542324 - DNA, 15 bp, Homo sapiens
ctgaggtcacccaga

SEQ ID NO: 542325 - DNA, 15 bp, Homo sapiens
tgaggtcacccagac

SEQ ID NO: 542326 - DNA, 15 bp, Homo sapiens
gaggtcacccagact

SEQ ID NO: 542327 - DNA, 15 bp, Homo sapiens
aggtcacccagactg

SEQ ID NO: 542328 - DNA, 15 bp, Homo sapiens
ggtcacccagactgc

SEQ ID NO: 542329 - DNA, 15 bp, Homo sapiens
gtcacccagactgcg

SEQ ID NO: 542330 - DNA, 15 bp, Homo sapiens
tcacccagactgcgg

SEQ ID NO: 542331 - DNA, 15 bp, Homo sapiens
cacccagactgcggg

SEQ ID NO: 542332 - DNA, 15 bp, Homo sapiens
acccagactgcgggt

SEQ ID NO: 542333 - DNA, 15 bp, Homo sapiens
cccagactgcgggtg

SEQ ID NO: 542334 - DNA, 15 bp, Homo sapiens
ccagactgcgggtgt

SEQ ID NO: 542335 - DNA, 15 bp, Homo sapiens
cagactgcgggtgta

SEQ ID NO: 542336 - DNA, 15 bp, Homo sapiens
agactgcgggtgtag

SEQ ID NO: 542337 - DNA, 15 bp, Homo sapiens
gactgcgggtgtagg

SEQ ID NO: 542338 - DNA, 15 bp, Homo sapiens
actgcgggtgtaggc

SEQ ID NO: 542339 - DNA, 15 bp, Homo sapiens
ctgcgggtgtaggcc

SEQ ID NO: 542340 - DNA, 15 bp, Homo sapiens
tgcgggtgtaggcca

SEQ ID NO: 542341 - DNA, 15 bp, Homo sapiens
gcgggtgtaggccac

SEQ ID NO: 542342 - DNA, 15 bp, Homo sapiens
cgggtgtaggccaca

SEQ ID NO: 542343 - DNA, 15 bp, Homo sapiens
gggtgtaggccacac

SEQ ID NO: 542344 - DNA, 15 bp, Homo sapiens
ggtgtaggccacacg

SEQ ID NO: 542345 - DNA, 15 bp, Homo sapiens
gtgtaggccacacgt

SEQ ID NO: 542346 - DNA, 15 bp, Homo sapiens
tgtaggccacacgtt

SEQ ID NO: 542347 - DNA, 15 bp, Homo sapiens
gtaggccacacgttt

SEQ ID NO: 542348 - DNA, 15 bp, Homo sapiens
taggccacacgttta

SEQ ID NO: 542349 - DNA, 15 bp, Homo sapiens
aggccacacgtttac

SEQ ID NO: 542350 - DNA, 15 bp, Homo sapiens
ggccacacgtttacg

SEQ ID NO: 542351 - DNA, 15 bp, Homo sapiens
gccacacgtttacgc

SEQ ID NO: 542352 - DNA, 15 bp, Homo sapiens
ccacacgtttacgct

SEQ ID NO: 542353 - DNA, 15 bp, Homo sapiens
cacacgtttacgctc

SEQ ID NO: 542354 - DNA, 15 bp, Homo sapiens
acacgtttacgctca

SEQ ID NO: 542355 - DNA, 15 bp, Homo sapiens
cacgtttacgctcac

SEQ ID NO: 542356 - DNA, 15 bp, Homo sapiens
acgtttacgctcacc

SEQ ID NO: 542357 - DNA, 15 bp, Homo sapiens
cgtttacgctcacct

SEQ ID NO: 542358 - DNA, 15 bp, Homo sapiens
gtttacgctcacctt

SEQ ID NO: 542359 - DNA, 15 bp, Homo sapiens
tttacgctcaccttt

SEQ ID NO: 542360 - DNA, 15 bp, Homo sapiens
ttacgctcacctttg

SEQ ID NO: 542361 - DNA, 15 bp, Homo sapiens
tacgctcacctttgt

SEQ ID NO: 542362 - DNA, 15 bp, Homo sapiens
acgctcacctttgtg

SEQ ID NO: 542363 - DNA, 15 bp, Homo sapiens
cgctcacctttgtgg

SEQ ID NO: 542364 - DNA, 15 bp, Homo sapiens
gctcacctttgtggg

SEQ ID NO: 542365 - DNA, 15 bp, Homo sapiens
ctcacctttgtgggt

SEQ ID NO: 542366 - DNA, 15 bp, Homo sapiens
tcacctttgtgggtc

SEQ ID NO: 542367 - DNA, 15 bp, Homo sapiens
cacctttgtgggtca

SEQ ID NO: 542368 - DNA, 15 bp, Homo sapiens
acctttgtgggtcag

SEQ ID NO: 542369 - DNA, 15 bp, Homo sapiens
cctttgtgggtcagc

SEQ ID NO: 542370 - DNA, 15 bp, Homo sapiens
ctttgtgggtcagcc

SEQ ID NO: 542371 - DNA, 15 bp, Homo sapiens
tttgtgggtcagcct

SEQ ID NO: 542372 - DNA, 15 bp, Homo sapiens
ttgtgggtcagcctc

SEQ ID NO: 542373 - DNA, 15 bp, Homo sapiens
tgtgggtcagcctct

SEQ ID NO: 542374 - DNA, 15 bp, Homo sapiens
gtgggtcagcctctc

SEQ ID NO: 542375 - DNA, 15 bp, Homo sapiens
tgggtcagcctctca

SEQ ID NO: 542376 - DNA, 15 bp, Homo sapiens
gggtcagcctctcag

SEQ ID NO: 542377 - DNA, 15 bp, Homo sapiens
ggtcagcctctcagt

SEQ ID NO: 542378 - DNA, 15 bp, Homo sapiens
gtcagcctctcagta

SEQ ID NO: 542379 - DNA, 15 bp, Homo sapiens
tcagcctctcagtag

SEQ ID NO: 542380 - DNA, 15 bp, Homo sapiens
cagcctctcagtagc

SEQ ID NO: 542381 - DNA, 15 bp, Homo sapiens
agcctctcagtagct

SEQ ID NO: 542382 - DNA, 15 bp, Homo sapiens
gcctctcagtagctg

SEQ ID NO: 542383 - DNA, 15 bp, Homo sapiens
cctctcagtagctgc

SEQ ID NO: 542384 - DNA, 15 bp, Homo sapiens
ctctcagtagctgcg

SEQ ID NO: 542385 - DNA, 15 bp, Homo sapiens
tctcagtagctgcgc

SEQ ID NO: 542386 - DNA, 15 bp, Homo sapiens
ctcagtagctgcgct

SEQ ID NO: 542387 - DNA, 15 bp, Homo sapiens
tcagtagctgcgctg

SEQ ID NO: 542388 - DNA, 15 bp, Homo sapiens
cagtagctgcgctgc

SEQ ID NO: 542389 - DNA, 15 bp, Homo sapiens
agtagctgcgctgct

SEQ ID NO: 542390 - DNA, 15 bp, Homo sapiens
gtagctgcgctgctc

SEQ ID NO: 542391 - DNA, 15 bp, Homo sapiens
tagctgcgctgctca

SEQ ID NO: 542392 - DNA, 15 bp, Homo sapiens
agctgcgctgctcat

SEQ ID NO: 542393 - DNA, 15 bp, Homo sapiens
gctgcgctgctcatc

SEQ ID NO: 542394 - DNA, 15 bp, Homo sapiens
ctgcgctgctcatcc

SEQ ID NO: 542395 - DNA, 15 bp, Homo sapiens
tgcgctgctcatcct

SEQ ID NO: 542396 - DNA, 15 bp, Homo sapiens
gcgctgctcatccta

SEQ ID NO: 542397 - DNA, 15 bp, Homo sapiens
cgctgctcatcctat

SEQ ID NO: 542398 - DNA, 15 bp, Homo sapiens
gctgctcatcctatt

SEQ ID NO: 542399 - DNA, 15 bp, Homo sapiens
ctgctcatcctattc

SEQ ID NO: 542400 - DNA, 15 bp, Homo sapiens
tgctcatcctattca

SEQ ID NO: 542401 - DNA, 15 bp, Homo sapiens
gctcatcctattcat

SEQ ID NO: 542402 - DNA, 15 bp, Homo sapiens
ctcatcctattcatt

SEQ ID NO: 542403 - DNA, 15 bp, Homo sapiens
tcatcctattcattt

SEQ ID NO: 542404 - DNA, 15 bp, Homo sapiens
catcctattcatttc

SEQ ID NO: 542405 - DNA, 15 bp, Homo sapiens
atcctattcatttct

SEQ ID NO: 542406 - DNA, 15 bp, Homo sapiens
tcctattcatttctg

SEQ ID NO: 542407 - DNA, 15 bp, Homo sapiens
cctattcatttctgt

SEQ ID NO: 542408 - DNA, 15 bp, Homo sapiens
ctattcatttctgtg

SEQ ID NO: 542409 - DNA, 15 bp, Homo sapiens
tattcatttctgtgc

SEQ ID NO: 542410 - DNA, 15 bp, Homo sapiens
attcatttctgtgct

SEQ ID NO: 542411 - DNA, 15 bp, Homo sapiens
ttcatttctgtgctt

SEQ ID NO: 542412 - DNA, 15 bp, Homo sapiens
tcatttctgtgctta

SEQ ID NO: 542413 - DNA, 15 bp, Homo sapiens
catttctgtgcttac

SEQ ID NO: 542414 - DNA, 15 bp, Homo sapiens
atttctgtgcttact

SEQ ID NO: 542415 - DNA, 15 bp, Homo sapiens
tttctgtgcttactc

SEQ ID NO: 542416 - DNA, 15 bp, Homo sapiens
ttctgtgcttactca

SEQ ID NO: 542417 - DNA, 15 bp, Homo sapiens
tctgtgcttactcaa

SEQ ID NO: 542418 - DNA, 15 bp, Homo sapiens
ctgtgcttactcaat

SEQ ID NO: 542419 - DNA, 15 bp, Homo sapiens
tgtgcttactcaata

SEQ ID NO: 542420 - DNA, 15 bp, Homo sapiens
gtgcttactcaatag

SEQ ID NO: 542421 - DNA, 15 bp, Homo sapiens
tgcttactcaatagg

SEQ ID NO: 542422 - DNA, 15 bp, Homo sapiens
gcttactcaataggg

SEQ ID NO: 542423 - DNA, 15 bp, Homo sapiens
cttactcaataggga

SEQ ID NO: 542424 - DNA, 15 bp, Homo sapiens
ttactcaatagggag

SEQ ID NO: 542425 - DNA, 15 bp, Homo sapiens
tactcaatagggaga

SEQ ID NO: 542426 - DNA, 15 bp, Homo sapiens
actcaatagggagaa

SEQ ID NO: 542427 - DNA, 15 bp, Homo sapiens
ctcaatagggagaag

SEQ ID NO: 542428 - DNA, 15 bp, Homo sapiens
tcaatagggagaaga

SEQ ID NO: 542429 - DNA, 15 bp, Homo sapiens
caatagggagaagag

SEQ ID NO: 542430 - DNA, 15 bp, Homo sapiens
aatagggagaagagc

SEQ ID NO: 542431 - DNA, 15 bp, Homo sapiens
atagggagaagagct

SEQ ID NO: 542432 - DNA, 15 bp, Homo sapiens
tagggagaagagctg

SEQ ID NO: 542433 - DNA, 15 bp, Homo sapiens
agggagaagagctgg

SEQ ID NO: 542434 - DNA, 15 bp, Homo sapiens
gggagaagagctggg

SEQ ID NO: 542435 - DNA, 15 bp, Homo sapiens
ggagaagagctgggt

SEQ ID NO: 542436 - DNA, 15 bp, Homo sapiens
gagaagagctgggta

SEQ ID NO: 542437 - DNA, 15 bp, Homo sapiens
agaagagctgggtaa

SEQ ID NO: 542438 - DNA, 15 bp, Homo sapiens
gaagagctgggtaag

SEQ ID NO: 542439 - DNA, 15 bp, Homo sapiens
aagagctgggtaagg

SEQ ID NO: 542440 - DNA, 15 bp, Homo sapiens
agagctgggtaagga

SEQ ID NO: 542441 - DNA, 15 bp, Homo sapiens
gagctgggtaaggag

SEQ ID NO: 542442 - DNA, 15 bp, Homo sapiens
agctgggtaaggagc

SEQ ID NO: 542443 - DNA, 15 bp, Homo sapiens
gctgggtaaggagca

SEQ ID NO: 542444 - DNA, 15 bp, Homo sapiens
ctgggtaaggagcaa

SEQ ID NO: 542445 - DNA, 15 bp, Homo sapiens
tgggtaaggagcaaa

SEQ ID NO: 542446 - DNA, 15 bp, Homo sapiens
gggtaaggagcaaat

SEQ ID NO: 542447 - DNA, 15 bp, Homo sapiens
ggtaaggagcaaatc

SEQ ID NO: 542448 - DNA, 15 bp, Homo sapiens
gtaaggagcaaatcg

SEQ ID NO: 542449 - DNA, 15 bp, Homo sapiens
taaggagcaaatcgg

SEQ ID NO: 542450 - DNA, 15 bp, Homo sapiens
aaggagcaaatcggt

SEQ ID NO: 542451 - DNA, 15 bp, Homo sapiens
aggagcaaatcggtg

SEQ ID NO: 542452 - DNA, 15 bp, Homo sapiens
ggagcaaatcggtgc

SEQ ID NO: 542453 - DNA, 15 bp, Homo sapiens
gagcaaatcggtgct

SEQ ID NO: 542454 - DNA, 15 bp, Homo sapiens
agcaaatcggtgcta

SEQ ID NO: 542455 - DNA, 15 bp, Homo sapiens
gcaaatcggtgctac

SEQ ID NO: 542456 - DNA, 15 bp, Homo sapiens
caaatcggtgctact

SEQ ID NO: 542457 - DNA, 15 bp, Homo sapiens
aaatcggtgctacta

SEQ ID NO: 542458 - DNA, 15 bp, Homo sapiens
aatcggtgctactaa

SEQ ID NO: 542459 - DNA, 15 bp, Homo sapiens
atcggtgctactaaa

SEQ ID NO: 542460 - DNA, 15 bp, Homo sapiens
tcggtgctactaaag

SEQ ID NO: 542461 - DNA, 15 bp, Homo sapiens
cggtgctactaaagt

SEQ ID NO: 542462 - DNA, 15 bp, Homo sapiens
ggtgctactaaagtc

SEQ ID NO: 542463 - DNA, 15 bp, Homo sapiens
gtgctactaaagtca

SEQ ID NO: 542464 - DNA, 15 bp, Homo sapiens
tgctactaaagtcag

SEQ ID NO: 542465 - DNA, 15 bp, Homo sapiens
gctactaaagtcagg

SEQ ID NO: 542466 - DNA, 15 bp, Homo sapiens
ctactaaagtcaggc

SEQ ID NO: 542467 - DNA, 15 bp, Homo sapiens
tactaaagtcaggct

SEQ ID NO: 542468 - DNA, 15 bp, Homo sapiens
actaaagtcaggctc

SEQ ID NO: 542469 - DNA, 15 bp, Homo sapiens
ctaaagtcaggctca

SEQ ID NO: 542470 - DNA, 15 bp, Homo sapiens
taaagtcaggctcag

SEQ ID NO: 542471 - DNA, 15 bp, Homo sapiens
aaagtcaggctcagt

SEQ ID NO: 542472 - DNA, 15 bp, Homo sapiens
aagtcaggctcagta

SEQ ID NO: 542473 - DNA, 15 bp, Homo sapiens
agtcaggctcagtat

SEQ ID NO: 542474 - DNA, 15 bp, Homo sapiens
gtcaggctcagtatc

SEQ ID NO: 542475 - DNA, 15 bp, Homo sapiens
tcaggctcagtatca

SEQ ID NO: 542476 - DNA, 15 bp, Homo sapiens
caggctcagtatcaa

SEQ ID NO: 542477 - DNA, 15 bp, Homo sapiens
aggctcagtatcaag

SEQ ID NO: 542478 - DNA, 15 bp, Homo sapiens
ggctcagtatcaaga

SEQ ID NO: 542479 - DNA, 15 bp, Homo sapiens
gctcagtatcaagaa

SEQ ID NO: 542480 - DNA, 15 bp, Homo sapiens
ctcagtatcaagaac

SEQ ID NO: 542481 - DNA, 15 bp, Homo sapiens
tcagtatcaagaaca

SEQ ID NO: 542482 - DNA, 15 bp, Homo sapiens
cagtatcaagaacat

SEQ ID NO: 542483 - DNA, 15 bp, Homo sapiens
agtatcaagaacatg

SEQ ID NO: 542484 - DNA, 15 bp, Homo sapiens
gtatcaagaacatgc

SEQ ID NO: 542485 - DNA, 15 bp, Homo sapiens
tatcaagaacatgca

SEQ ID NO: 542486 - DNA, 15 bp, Homo sapiens
atcaagaacatgcat

SEQ ID NO: 542487 - DNA, 15 bp, Homo sapiens
tcaagaacatgcatt

SEQ ID NO: 542488 - DNA, 15 bp, Homo sapiens
caagaacatgcattc

SEQ ID NO: 542489 - DNA, 15 bp, Homo sapiens
aagaacatgcattct

SEQ ID NO: 542490 - DNA, 15 bp, Homo sapiens
agaacatgcattcta

SEQ ID NO: 542491 - DNA, 15 bp, Homo sapiens
gaacatgcattctat

SEQ ID NO: 542492 - DNA, 15 bp, Homo sapiens
aacatgcattctatt

SEQ ID NO: 542493 - DNA, 15 bp, Homo sapiens
acatgcattctattc

SEQ ID NO: 542494 - DNA, 15 bp, Homo sapiens
catgcattctattct

SEQ ID NO: 542495 - DNA, 15 bp, Homo sapiens
atgcattctattcta

SEQ ID NO: 542496 - DNA, 15 bp, Homo sapiens
tgcattctattctag

SEQ ID NO: 542497 - DNA, 15 bp, Homo sapiens
gcattctattctaga

SEQ ID NO: 542498 - DNA, 15 bp, Homo sapiens
cattctattctagaa

SEQ ID NO: 542499 - DNA, 15 bp, Homo sapiens
attctattctagaat

SEQ ID NO: 542500 - DNA, 15 bp, Homo sapiens
ttctattctagaatg

SEQ ID NO: 542501 - DNA, 15 bp, Homo sapiens
tctattctagaatgc

SEQ ID NO: 542502 - DNA, 15 bp, Homo sapiens
ctattctagaatgct

SEQ ID NO: 542503 - DNA, 15 bp, Homo sapiens
tattctagaatgctg

SEQ ID NO: 542504 - DNA, 15 bp, Homo sapiens
attctagaatgctga

SEQ ID NO: 542505 - DNA, 15 bp, Homo sapiens
ttctagaatgctgat

SEQ ID NO: 542506 - DNA, 15 bp, Homo sapiens
tctagaatgctgata

SEQ ID NO: 542507 - DNA, 15 bp, Homo sapiens
ctagaatgctgataa

SEQ ID NO: 542508 - DNA, 15 bp, Homo sapiens
tagaatgctgataaa

SEQ ID NO: 542509 - DNA, 15 bp, Homo sapiens
agaatgctgataaat

SEQ ID NO: 542510 - DNA, 15 bp, Homo sapiens
gaatgctgataaata

SEQ ID NO: 542511 - DNA, 15 bp, Homo sapiens
aatgctgataaatac

SEQ ID NO: 542512 - DNA, 15 bp, Homo sapiens
atgctgataaataca

SEQ ID NO: 542513 - DNA, 15 bp, Homo sapiens
tgctgataaatacac

SEQ ID NO: 542514 - DNA, 15 bp, Homo sapiens
gctgataaatacact

SEQ ID NO: 542515 - DNA, 15 bp, Homo sapiens
ctgataaatacactg

SEQ ID NO: 542516 - DNA, 15 bp, Homo sapiens
tgataaatacactgg

SEQ ID NO: 542517 - DNA, 15 bp, Homo sapiens
gataaatacactggc

SEQ ID NO: 542518 - DNA, 15 bp, Homo sapiens
ataaatacactggca

SEQ ID NO: 542519 - DNA, 15 bp, Homo sapiens
taaatacactggcag

SEQ ID NO: 542520 - DNA, 15 bp, Homo sapiens
aaatacactggcagt

SEQ ID NO: 542521 - DNA, 15 bp, Homo sapiens
aatacactggcagtc

SEQ ID NO: 542522 - DNA, 15 bp, Homo sapiens
atacactggcagtcc

SEQ ID NO: 542523 - DNA, 15 bp, Homo sapiens
tacactggcagtccc

SEQ ID NO: 542524 - DNA, 15 bp, Homo sapiens
acactggcagtccca

SEQ ID NO: 542525 - DNA, 15 bp, Homo sapiens
cactggcagtcccag

SEQ ID NO: 542526 - DNA, 15 bp, Homo sapiens
actggcagtcccaga

SEQ ID NO: 542527 - DNA, 15 bp, Homo sapiens
ctggcagtcccagaa

SEQ ID NO: 542528 - DNA, 15 bp, Homo sapiens
tggcagtcccagaaa

SEQ ID NO: 542529 - DNA, 15 bp, Homo sapiens
ggcagtcccagaaag

SEQ ID NO: 542530 - DNA, 15 bp, Homo sapiens
gcagtcccagaaagt

SEQ ID NO: 542531 - DNA, 15 bp, Homo sapiens
cagtcccagaaagtc

SEQ ID NO: 542532 - DNA, 15 bp, Homo sapiens
agtcccagaaagtca

SEQ ID NO: 542533 - DNA, 15 bp, Homo sapiens
gtcccagaaagtcac

SEQ ID NO: 542534 - DNA, 15 bp, Homo sapiens
tcccagaaagtcact

SEQ ID NO: 542535 - DNA, 15 bp, Homo sapiens
cccagaaagtcactt

SEQ ID NO: 542536 - DNA, 15 bp, Homo sapiens
ccagaaagtcacttc

SEQ ID NO: 542537 - DNA, 15 bp, Homo sapiens
cagaaagtcacttcc

SEQ ID NO: 542538 - DNA, 15 bp, Homo sapiens
agaaagtcacttcca

SEQ ID NO: 542539 - DNA, 15 bp, Homo sapiens
gaaagtcacttccaa

SEQ ID NO: 542540 - DNA, 15 bp, Homo sapiens
aaagtcacttccaaa

SEQ ID NO: 542541 - DNA, 15 bp, Homo sapiens
aagtcacttccaaag

SEQ ID NO: 542542 - DNA, 15 bp, Homo sapiens
agtcacttccaaagc

SEQ ID NO: 542543 - DNA, 15 bp, Homo sapiens
gtcacttccaaagca

SEQ ID NO: 542544 - DNA, 15 bp, Homo sapiens
tcacttccaaagcag

SEQ ID NO: 542545 - DNA, 15 bp, Homo sapiens
cacttccaaagcagt

SEQ ID NO: 542546 - DNA, 15 bp, Homo sapiens
acttccaaagcagta

SEQ ID NO: 542547 - DNA, 15 bp, Homo sapiens
cttccaaagcagtaa

SEQ ID NO: 542548 - DNA, 15 bp, Homo sapiens
ttccaaagcagtaaa

SEQ ID NO: 542549 - DNA, 15 bp, Homo sapiens
tccaaagcagtaaag

SEQ ID NO: 542550 - DNA, 15 bp, Homo sapiens
ccaaagcagtaaaga

SEQ ID NO: 542551 - DNA, 15 bp, Homo sapiens
caaagcagtaaagaa

SEQ ID NO: 542552 - DNA, 15 bp, Homo sapiens
aaagcagtaaagaag

SEQ ID NO: 542553 - DNA, 15 bp, Homo sapiens
aagcagtaaagaagg

SEQ ID NO: 542554 - DNA, 15 bp, Homo sapiens
agcagtaaagaaggg

SEQ ID NO: 542555 - DNA, 15 bp, Homo sapiens
gcagtaaagaagggc

SEQ ID NO: 542556 - DNA, 15 bp, Homo sapiens
cagtaaagaagggct

SEQ ID NO: 542557 - DNA, 15 bp, Homo sapiens
agtaaagaagggctc

SEQ ID NO: 542558 - DNA, 15 bp, Homo sapiens
gtaaagaagggctct

SEQ ID NO: 542559 - DNA, 15 bp, Homo sapiens
taaagaagggctctg

SEQ ID NO: 542560 - DNA, 15 bp, Homo sapiens
aaagaagggctctgg

SEQ ID NO: 542561 - DNA, 15 bp, Homo sapiens
aagaagggctctgga

SEQ ID NO: 542562 - DNA, 15 bp, Homo sapiens
agaagggctctggaa

SEQ ID NO: 542563 - DNA, 15 bp, Homo sapiens
gaagggctctggaac

SEQ ID NO: 542564 - DNA, 15 bp, Homo sapiens
aagggctctggaaca

SEQ ID NO: 542565 - DNA, 15 bp, Homo sapiens
agggctctggaacag

SEQ ID NO: 542566 - DNA, 15 bp, Homo sapiens
gggctctggaacaga

SEQ ID NO: 542567 - DNA, 15 bp, Homo sapiens
ggctctggaacagac

SEQ ID NO: 542568 - DNA, 15 bp, Homo sapiens
gctctggaacagaca

SEQ ID NO: 542569 - DNA, 15 bp, Homo sapiens
ctctggaacagacac

SEQ ID NO: 542570 - DNA, 15 bp, Homo sapiens
tctggaacagacaca

SEQ ID NO: 542571 - DNA, 15 bp, Homo sapiens
ctggaacagacacat

SEQ ID NO: 542572 - DNA, 15 bp, Homo sapiens
tggaacagacacatg

SEQ ID NO: 542573 - DNA, 15 bp, Homo sapiens
ggaacagacacatgt

SEQ ID NO: 542574 - DNA, 15 bp, Homo sapiens
gaacagacacatgtt

SEQ ID NO: 542575 - DNA, 15 bp, Homo sapiens
aacagacacatgttt

SEQ ID NO: 542576 - DNA, 15 bp, Homo sapiens
acagacacatgtttt

SEQ ID NO: 542577 - DNA, 15 bp, Homo sapiens
cagacacatgttttc

SEQ ID NO: 542578 - DNA, 15 bp, Homo sapiens
agacacatgttttca

SEQ ID NO: 542579 - DNA, 15 bp, Homo sapiens
gacacatgttttcat

SEQ ID NO: 542580 - DNA, 15 bp, Homo sapiens
acacatgttttcatt

SEQ ID NO: 542581 - DNA, 15 bp, Homo sapiens
cacatgttttcattt

SEQ ID NO: 542582 - DNA, 15 bp, Homo sapiens
acatgttttcatttc

SEQ ID NO: 542583 - DNA, 15 bp, Homo sapiens
catgttttcatttct

SEQ ID NO: 542584 - DNA, 15 bp, Homo sapiens
atgttttcatttctt

SEQ ID NO: 542585 - DNA, 15 bp, Homo sapiens
tgttttcatttcttt

SEQ ID NO: 542586 - DNA, 15 bp, Homo sapiens
gttttcatttctttt

SEQ ID NO: 542587 - DNA, 15 bp, Homo sapiens
ttttcatttcttttt

SEQ ID NO: 542588 - DNA, 15 bp, Homo sapiens
tttcatttctttttg

SEQ ID NO: 542589 - DNA, 15 bp, Homo sapiens
ttcatttctttttga

SEQ ID NO: 542590 - DNA, 15 bp, Homo sapiens
tcatttctttttgaa

SEQ ID NO: 542591 - DNA, 15 bp, Homo sapiens
catttctttttgaag

SEQ ID NO: 542592 - DNA, 15 bp, Homo sapiens
atttctttttgaagg

SEQ ID NO: 542593 - DNA, 15 bp, Homo sapiens
tttctttttgaaggc

SEQ ID NO: 542594 - DNA, 15 bp, Homo sapiens
ttctttttgaaggct

SEQ ID NO: 542595 - DNA, 15 bp, Homo sapiens
tctttttgaaggctt

SEQ ID NO: 542596 - DNA, 15 bp, Homo sapiens
ctttttgaaggcttc

SEQ ID NO: 542597 - DNA, 15 bp, Homo sapiens
tttttgaaggcttcc

SEQ ID NO: 542598 - DNA, 15 bp, Homo sapiens
ttttgaaggcttccc

SEQ ID NO: 542599 - DNA, 15 bp, Homo sapiens
tttgaaggcttccct

SEQ ID NO: 542600 - DNA, 15 bp, Homo sapiens
ttgaaggcttccctt

SEQ ID NO: 542601 - DNA, 15 bp, Homo sapiens
tgaaggcttcccttt

SEQ ID NO: 542602 - DNA, 15 bp, Homo sapiens
gaaggcttccctttg

SEQ ID NO: 542603 - DNA, 15 bp, Homo sapiens
aaggcttccctttga

SEQ ID NO: 542604 - DNA, 15 bp, Homo sapiens
aggcttccctttgag

SEQ ID NO: 542605 - DNA, 15 bp, Homo sapiens
ggcttccctttgaga

SEQ ID NO: 542606 - DNA, 15 bp, Homo sapiens
gcttccctttgagaa

SEQ ID NO: 542607 - DNA, 15 bp, Homo sapiens
cttccctttgagaac

SEQ ID NO: 542608 - DNA, 15 bp, Homo sapiens
ttccctttgagaaca

SEQ ID NO: 542609 - DNA, 15 bp, Homo sapiens
tccctttgagaacaa

SEQ ID NO: 542610 - DNA, 15 bp, Homo sapiens
ccctttgagaacaaa

SEQ ID NO: 542611 - DNA, 15 bp, Homo sapiens
cctttgagaacaaag

SEQ ID NO: 542612 - DNA, 15 bp, Homo sapiens
ctttgagaacaaagg

SEQ ID NO: 542613 - DNA, 15 bp, Homo sapiens
tttgagaacaaaggt

SEQ ID NO: 542614 - DNA, 15 bp, Homo sapiens
ttgagaacaaaggtg

SEQ ID NO: 542615 - DNA, 15 bp, Homo sapiens
tgagaacaaaggtgg

SEQ ID NO: 542616 - DNA, 15 bp, Homo sapiens
gagaacaaaggtggt

SEQ ID NO: 542617 - DNA, 15 bp, Homo sapiens
agaacaaaggtggtc

SEQ ID NO: 542618 - DNA, 15 bp, Homo sapiens
gaacaaaggtggtct

SEQ ID NO: 542619 - DNA, 15 bp, Homo sapiens
aacaaaggtggtctg

SEQ ID NO: 542620 - DNA, 15 bp, Homo sapiens
acaaaggtggtctgt

SEQ ID NO: 542621 - DNA, 15 bp, Homo sapiens
caaaggtggtctgtg

SEQ ID NO: 542622 - DNA, 15 bp, Homo sapiens
aaaggtggtctgtgg

SEQ ID NO: 542623 - DNA, 15 bp, Homo sapiens
aaggtggtctgtggt

SEQ ID NO: 542624 - DNA, 15 bp, Homo sapiens
aggtggtctgtggtg

SEQ ID NO: 542625 - DNA, 15 bp, Homo sapiens
ggtggtctgtggtgc

SEQ ID NO: 542626 - DNA, 15 bp, Homo sapiens
gtggtctgtggtgct

SEQ ID NO: 542627 - DNA, 15 bp, Homo sapiens
tggtctgtggtgctg

SEQ ID NO: 542628 - DNA, 15 bp, Homo sapiens
ggtctgtggtgctgg

SEQ ID NO: 542629 - DNA, 15 bp, Homo sapiens
gtctgtggtgctggg

SEQ ID NO: 542630 - DNA, 15 bp, Homo sapiens
tctgtggtgctgggc

SEQ ID NO: 542631 - DNA, 15 bp, Homo sapiens
ctgtggtgctgggcc

SEQ ID NO: 542632 - DNA, 15 bp, Homo sapiens
tgtggtgctgggccc

SEQ ID NO: 542633 - DNA, 15 bp, Homo sapiens
gtggtgctgggccct

SEQ ID NO: 542634 - DNA, 15 bp, Homo sapiens
tggtgctgggccctt

SEQ ID NO: 542635 - DNA, 15 bp, Homo sapiens
ggtgctgggcccttc

SEQ ID NO: 542636 - DNA, 15 bp, Homo sapiens
gtgctgggcccttca

SEQ ID NO: 542637 - DNA, 15 bp, Homo sapiens
tgctgggcccttcaa

SEQ ID NO: 542638 - DNA, 15 bp, Homo sapiens
gctgggcccttcaag

SEQ ID NO: 542639 - DNA, 15 bp, Homo sapiens
ctgggcccttcaagc

SEQ ID NO: 542640 - DNA, 15 bp, Homo sapiens
tgggcccttcaagcc

SEQ ID NO: 542641 - DNA, 15 bp, Homo sapiens
gggcccttcaagccc

SEQ ID NO: 542642 - DNA, 15 bp, Homo sapiens
ggcccttcaagccct

SEQ ID NO: 542643 - DNA, 15 bp, Homo sapiens
gcccttcaagccctg

SEQ ID NO: 542644 - DNA, 15 bp, Homo sapiens
cccttcaagccctga

SEQ ID NO: 542645 - DNA, 15 bp, Homo sapiens
ccttcaagccctgac

SEQ ID NO: 542646 - DNA, 15 bp, Homo sapiens
cttcaagccctgaca

SEQ ID NO: 542647 - DNA, 15 bp, Homo sapiens
ttcaagccctgacac

SEQ ID NO: 542648 - DNA, 15 bp, Homo sapiens
tcaagccctgacacc

SEQ ID NO: 542649 - DNA, 15 bp, Homo sapiens
caagccctgacaccc

SEQ ID NO: 542650 - DNA, 15 bp, Homo sapiens
aagccctgacaccca

SEQ ID NO: 542651 - DNA, 15 bp, Homo sapiens
agccctgacacccac

SEQ ID NO: 542652 - DNA, 15 bp, Homo sapiens
gccctgacacccact

SEQ ID NO: 542653 - DNA, 15 bp, Homo sapiens
ccctgacacccactc

SEQ ID NO: 542654 - DNA, 15 bp, Homo sapiens
cctgacacccactcc

SEQ ID NO: 542655 - DNA, 15 bp, Homo sapiens
ctgacacccactcct

SEQ ID NO: 542656 - DNA, 15 bp, Homo sapiens
tgacacccactcctt

SEQ ID NO: 542657 - DNA, 15 bp, Homo sapiens
gacacccactccttt

SEQ ID NO: 542658 - DNA, 15 bp, Homo sapiens
acacccactcctttt

SEQ ID NO: 542659 - DNA, 15 bp, Homo sapiens
cacccactccttttg

SEQ ID NO: 542660 - DNA, 15 bp, Homo sapiens
acccactccttttgt

SEQ ID NO: 542661 - DNA, 15 bp, Homo sapiens
cccactccttttgtc

SEQ ID NO: 542662 - DNA, 15 bp, Homo sapiens
ccactccttttgtct

SEQ ID NO: 542663 - DNA, 15 bp, Homo sapiens
cactccttttgtctc

SEQ ID NO: 542664 - DNA, 15 bp, Homo sapiens
actccttttgtctct

SEQ ID NO: 542665 - DNA, 15 bp, Homo sapiens
ctccttttgtctctg

SEQ ID NO: 542666 - DNA, 15 bp, Homo sapiens
tccttttgtctctgc

SEQ ID NO: 542667 - DNA, 15 bp, Homo sapiens
ccttttgtctctgcc

SEQ ID NO: 542668 - DNA, 15 bp, Homo sapiens
cttttgtctctgcct

SEQ ID NO: 542669 - DNA, 15 bp, Homo sapiens
ttttgtctctgcctc

SEQ ID NO: 542670 - DNA, 15 bp, Homo sapiens
tttgtctctgcctct

SEQ ID NO: 542671 - DNA, 15 bp, Homo sapiens
ttgtctctgcctctt

SEQ ID NO: 542672 - DNA, 15 bp, Homo sapiens
tgtctctgcctcttg

SEQ ID NO: 542673 - DNA, 15 bp, Homo sapiens
gtctctgcctcttgg

SEQ ID NO: 542674 - DNA, 15 bp, Homo sapiens
tctctgcctcttggg

SEQ ID NO: 542675 - DNA, 15 bp, Homo sapiens
ctctgcctcttggga

SEQ ID NO: 542676 - DNA, 15 bp, Homo sapiens
tctgcctcttgggat

SEQ ID NO: 542677 - DNA, 15 bp, Homo sapiens
ctgcctcttgggatc

SEQ ID NO: 542678 - DNA, 15 bp, Homo sapiens
tgcctcttgggatct

SEQ ID NO: 542679 - DNA, 15 bp, Homo sapiens
gcctcttgggatctt

SEQ ID NO: 542680 - DNA, 15 bp, Homo sapiens
cctcttgggatcttg

SEQ ID NO: 542681 - DNA, 15 bp, Homo sapiens
ctcttgggatcttgg

SEQ ID NO: 542682 - DNA, 15 bp, Homo sapiens
tcttgggatcttggg

SEQ ID NO: 542683 - DNA, 15 bp, Homo sapiens
cttgggatcttggga

SEQ ID NO: 542684 - DNA, 15 bp, Homo sapiens
ttgggatcttgggag

SEQ ID NO: 542685 - DNA, 15 bp, Homo sapiens
tgggatcttgggaga

SEQ ID NO: 542686 - DNA, 15 bp, Homo sapiens
gggatcttgggagag

SEQ ID NO: 542687 - DNA, 15 bp, Homo sapiens
ggatcttgggagagc

SEQ ID NO: 542688 - DNA, 15 bp, Homo sapiens
gatcttgggagagct

SEQ ID NO: 542689 - DNA, 15 bp, Homo sapiens
atcttgggagagcta

SEQ ID NO: 542690 - DNA, 15 bp, Homo sapiens
tcttgggagagctac

SEQ ID NO: 542691 - DNA, 15 bp, Homo sapiens
cttgggagagctaca

SEQ ID NO: 542692 - DNA, 15 bp, Homo sapiens
ttgggagagctacac

SEQ ID NO: 542693 - DNA, 15 bp, Homo sapiens
tgggagagctacacc

SEQ ID NO: 542694 - DNA, 15 bp, Homo sapiens
gggagagctacacca

SEQ ID NO: 542695 - DNA, 15 bp, Homo sapiens
ggagagctacaccaa

SEQ ID NO: 542696 - DNA, 15 bp, Homo sapiens
gagagctacaccaag

SEQ ID NO: 542697 - DNA, 15 bp, Homo sapiens
agagctacaccaagg

SEQ ID NO: 542698 - DNA, 15 bp, Homo sapiens
gagctacaccaaggg

SEQ ID NO: 542699 - DNA, 15 bp, Homo sapiens
agctacaccaagggc

SEQ ID NO: 542700 - DNA, 15 bp, Homo sapiens
gctacaccaagggct

SEQ ID NO: 542701 - DNA, 15 bp, Homo sapiens
ctacaccaagggctg

SEQ ID NO: 542702 - DNA, 15 bp, Homo sapiens
tacaccaagggctgc

SEQ ID NO: 542703 - DNA, 15 bp, Homo sapiens
acaccaagggctgcg

SEQ ID NO: 542704 - DNA, 15 bp, Homo sapiens
caccaagggctgcgt

SEQ ID NO: 542705 - DNA, 15 bp, Homo sapiens
accaagggctgcgtg

SEQ ID NO: 542706 - DNA, 15 bp, Homo sapiens
ccaagggctgcgtga

SEQ ID NO: 542707 - DNA, 15 bp, Homo sapiens
caagggctgcgtgat

SEQ ID NO: 542708 - DNA, 15 bp, Homo sapiens
aagggctgcgtgatg

SEQ ID NO: 542709 - DNA, 15 bp, Homo sapiens
agggctgcgtgatgg

SEQ ID NO: 542710 - DNA, 15 bp, Homo sapiens
gggctgcgtgatgga

SEQ ID NO: 542711 - DNA, 15 bp, Homo sapiens
ggctgcgtgatggat

SEQ ID NO: 542712 - DNA, 15 bp, Homo sapiens
gctgcgtgatggata

SEQ ID NO: 542713 - DNA, 15 bp, Homo sapiens
ctgcgtgatggatac

SEQ ID NO: 542714 - DNA, 15 bp, Homo sapiens
tgcgtgatggataca

SEQ ID NO: 542715 - DNA, 15 bp, Homo sapiens
gcgtgatggatacac

SEQ ID NO: 542716 - DNA, 15 bp, Homo sapiens
cgtgatggatacacc

SEQ ID NO: 542717 - DNA, 15 bp, Homo sapiens
gtgatggatacacca

SEQ ID NO: 542718 - DNA, 15 bp, Homo sapiens
tgatggatacaccac

SEQ ID NO: 542719 - DNA, 15 bp, Homo sapiens
gatggatacaccacg

SEQ ID NO: 542720 - DNA, 15 bp, Homo sapiens
atggatacaccacga

SEQ ID NO: 542721 - DNA, 15 bp, Homo sapiens
tggatacaccacgaa

SEQ ID NO: 542722 - DNA, 15 bp, Homo sapiens
ggatacaccacgaag

SEQ ID NO: 542723 - DNA, 15 bp, Homo sapiens
gatacaccacgaagg

SEQ ID NO: 542724 - DNA, 15 bp, Homo sapiens
atacaccacgaaggg

SEQ ID NO: 542725 - DNA, 15 bp, Homo sapiens
tacaccacgaagggg

SEQ ID NO: 542726 - DNA, 15 bp, Homo sapiens
acaccacgaaggggt

SEQ ID NO: 542727 - DNA, 15 bp, Homo sapiens
caccacgaaggggtg

SEQ ID NO: 542728 - DNA, 15 bp, Homo sapiens
accacgaaggggtgt

SEQ ID NO: 542729 - DNA, 15 bp, Homo sapiens
ccacgaaggggtgta

SEQ ID NO: 542730 - DNA, 15 bp, Homo sapiens
cacgaaggggtgtat

SEQ ID NO: 542731 - DNA, 15 bp, Homo sapiens
acgaaggggtgtatt

SEQ ID NO: 542732 - DNA, 15 bp, Homo sapiens
cgaaggggtgtattt

SEQ ID NO: 542733 - DNA, 15 bp, Homo sapiens
gaaggggtgtattta

SEQ ID NO: 542734 - DNA, 15 bp, Homo sapiens
aaggggtgtatttat

SEQ ID NO: 542735 - DNA, 15 bp, Homo sapiens
aggggtgtatttatt

SEQ ID NO: 542736 - DNA, 15 bp, Homo sapiens
ggggtgtatttattt

SEQ ID NO: 542737 - DNA, 15 bp, Homo sapiens
gggtgtatttattta

SEQ ID NO: 542738 - DNA, 15 bp, Homo sapiens
ggtgtatttatttat

SEQ ID NO: 542739 - DNA, 15 bp, Homo sapiens
gtgtatttatttatt

SEQ ID NO: 542740 - DNA, 15 bp, Homo sapiens
tgtatttatttattt

SEQ ID NO: 542741 - DNA, 15 bp, Homo sapiens
gtatttatttatttg

SEQ ID NO: 542742 - DNA, 15 bp, Homo sapiens
tatttatttatttgc

SEQ ID NO: 542743 - DNA, 15 bp, Homo sapiens
atttatttatttgcc

SEQ ID NO: 542744 - DNA, 15 bp, Homo sapiens
tttatttatttgcca

SEQ ID NO: 542745 - DNA, 15 bp, Homo sapiens
ttatttatttgccag

SEQ ID NO: 542746 - DNA, 15 bp, Homo sapiens
tatttatttgccagg

SEQ ID NO: 542747 - DNA, 15 bp, Homo sapiens
atttatttgccaggg

SEQ ID NO: 542748 - DNA, 15 bp, Homo sapiens
tttatttgccaggga

SEQ ID NO: 542749 - DNA, 15 bp, Homo sapiens
ttatttgccagggaa

SEQ ID NO: 542750 - DNA, 15 bp, Homo sapiens
tatttgccagggaaa

SEQ ID NO: 542751 - DNA, 15 bp, Homo sapiens
atttgccagggaaat

SEQ ID NO: 542752 - DNA, 15 bp, Homo sapiens
tttgccagggaaatg

SEQ ID NO: 542753 - DNA, 15 bp, Homo sapiens
ttgccagggaaatgt

SEQ ID NO: 542754 - DNA, 15 bp, Homo sapiens
tgccagggaaatgta

SEQ ID NO: 542755 - DNA, 15 bp, Homo sapiens
gccagggaaatgtat

SEQ ID NO: 542756 - DNA, 15 bp, Homo sapiens
ccagggaaatgtatt

SEQ ID NO: 542757 - DNA, 15 bp, Homo sapiens
cagggaaatgtatta

SEQ ID NO: 542758 - DNA, 15 bp, Homo sapiens
agggaaatgtattag

SEQ ID NO: 542759 - DNA, 15 bp, Homo sapiens
gggaaatgtattagg

SEQ ID NO: 542760 - DNA, 15 bp, Homo sapiens
ggaaatgtattaggg

SEQ ID NO: 542761 - DNA, 15 bp, Homo sapiens
gaaatgtattaggga

SEQ ID NO: 542762 - DNA, 15 bp, Homo sapiens
aaatgtattagggag

SEQ ID NO: 542763 - DNA, 15 bp, Homo sapiens
aatgtattagggaga

SEQ ID NO: 542764 - DNA, 15 bp, Homo sapiens
atgtattagggagaa

SEQ ID NO: 542765 - DNA, 15 bp, Homo sapiens
tgtattagggagaag

SEQ ID NO: 542766 - DNA, 15 bp, Homo sapiens
gtattagggagaagc

SEQ ID NO: 542767 - DNA, 15 bp, Homo sapiens
tattagggagaagca

SEQ ID NO: 542768 - DNA, 15 bp, Homo sapiens
attagggagaagcaa

SEQ ID NO: 542769 - DNA, 15 bp, Homo sapiens
ttagggagaagcaaa

SEQ ID NO: 542770 - DNA, 15 bp, Homo sapiens
tagggagaagcaaag

SEQ ID NO: 542771 - DNA, 15 bp, Homo sapiens
agggagaagcaaaga

SEQ ID NO: 542772 - DNA, 15 bp, Homo sapiens
gggagaagcaaagac

SEQ ID NO: 542773 - DNA, 15 bp, Homo sapiens
ggagaagcaaagact

SEQ ID NO: 542774 - DNA, 15 bp, Homo sapiens
gagaagcaaagacta

SEQ ID NO: 542775 - DNA, 15 bp, Homo sapiens
agaagcaaagactaa

SEQ ID NO: 542776 - DNA, 15 bp, Homo sapiens
gaagcaaagactaat

SEQ ID NO: 542777 - DNA, 15 bp, Homo sapiens
aagcaaagactaatt

SEQ ID NO: 542778 - DNA, 15 bp, Homo sapiens
agcaaagactaatta

SEQ ID NO: 542779 - DNA, 15 bp, Homo sapiens
gcaaagactaattaa

SEQ ID NO: 542780 - DNA, 15 bp, Homo sapiens
caaagactaattaat

SEQ ID NO: 542781 - DNA, 15 bp, Homo sapiens
aaagactaattaatg

SEQ ID NO: 542782 - DNA, 15 bp, Homo sapiens
aagactaattaatga

SEQ ID NO: 542783 - DNA, 15 bp, Homo sapiens
agactaattaatgat

SEQ ID NO: 542784 - DNA, 15 bp, Homo sapiens
gactaattaatgatt

SEQ ID NO: 542785 - DNA, 15 bp, Homo sapiens
actaattaatgattt

SEQ ID NO: 542786 - DNA, 15 bp, Homo sapiens
ctaattaatgatttt

SEQ ID NO: 542787 - DNA, 15 bp, Homo sapiens
taattaatgattttc

SEQ ID NO: 542788 - DNA, 15 bp, Homo sapiens
aattaatgattttca

SEQ ID NO: 542789 - DNA, 15 bp, Homo sapiens
attaatgattttcaa

SEQ ID NO: 542790 - DNA, 15 bp, Homo sapiens
ttaatgattttcaag

SEQ ID NO: 542791 - DNA, 15 bp, Homo sapiens
taatgattttcaagg

SEQ ID NO: 542792 - DNA, 15 bp, Homo sapiens
aatgattttcaaggg

SEQ ID NO: 542793 - DNA, 15 bp, Homo sapiens
atgattttcaaggga

SEQ ID NO: 542794 - DNA, 15 bp, Homo sapiens
tgattttcaagggaa

SEQ ID NO: 542795 - DNA, 15 bp, Homo sapiens
gattttcaagggaaa

SEQ ID NO: 542796 - DNA, 15 bp, Homo sapiens
attttcaagggaaac

SEQ ID NO: 542797 - DNA, 15 bp, Homo sapiens
ttttcaagggaaact

SEQ ID NO: 542798 - DNA, 15 bp, Homo sapiens
tttcaagggaaactc

SEQ ID NO: 542799 - DNA, 15 bp, Homo sapiens
ttcaagggaaactca

SEQ ID NO: 542800 - DNA, 15 bp, Homo sapiens
tcaagggaaactcaa

SEQ ID NO: 542801 - DNA, 15 bp, Homo sapiens
caagggaaactcaat

SEQ ID NO: 542802 - DNA, 15 bp, Homo sapiens
aagggaaactcaatc

SEQ ID NO: 542803 - DNA, 15 bp, Homo sapiens
agggaaactcaatct

SEQ ID NO: 542804 - DNA, 15 bp, Homo sapiens
gggaaactcaatcta

SEQ ID NO: 542805 - DNA, 15 bp, Homo sapiens
ggaaactcaatctat

SEQ ID NO: 542806 - DNA, 15 bp, Homo sapiens
gaaactcaatctatg

SEQ ID NO: 542807 - DNA, 15 bp, Homo sapiens
aaactcaatctatgg

SEQ ID NO: 542808 - DNA, 15 bp, Homo sapiens
aactcaatctatgga

SEQ ID NO: 542809 - DNA, 15 bp, Homo sapiens
actcaatctatggaa

SEQ ID NO: 542810 - DNA, 15 bp, Homo sapiens
ctcaatctatggaat

SEQ ID NO: 542811 - DNA, 15 bp, Homo sapiens
tcaatctatggaatg

SEQ ID NO: 542812 - DNA, 15 bp, Homo sapiens
caatctatggaatga

SEQ ID NO: 542813 - DNA, 15 bp, Homo sapiens
aatctatggaatgaa

SEQ ID NO: 542814 - DNA, 15 bp, Homo sapiens
atctatggaatgaat

SEQ ID NO: 542815 - DNA, 15 bp, Homo sapiens
tctatggaatgaatg

SEQ ID NO: 542816 - DNA, 15 bp, Homo sapiens
ctatggaatgaatgg

SEQ ID NO: 542817 - DNA, 15 bp, Homo sapiens
tatggaatgaatggt

SEQ ID NO: 542818 - DNA, 15 bp, Homo sapiens
atggaatgaatggtt

SEQ ID NO: 542819 - DNA, 15 bp, Homo sapiens
tggaatgaatggttt

SEQ ID NO: 542820 - DNA, 15 bp, Homo sapiens
ggaatgaatggtttt

SEQ ID NO: 542821 - DNA, 15 bp, Homo sapiens
gaatgaatggttttc

SEQ ID NO: 542822 - DNA, 15 bp, Homo sapiens
aatgaatggttttcc

SEQ ID NO: 542823 - DNA, 15 bp, Homo sapiens
atgaatggttttccc

SEQ ID NO: 542824 - DNA, 15 bp, Homo sapiens
tgaatggttttccca

SEQ ID NO: 542825 - DNA, 15 bp, Homo sapiens
gaatggttttcccaa

SEQ ID NO: 542826 - DNA, 15 bp, Homo sapiens
aatggttttcccaat

SEQ ID NO: 542827 - DNA, 15 bp, Homo sapiens
atggttttcccaatg

SEQ ID NO: 542828 - DNA, 15 bp, Homo sapiens
tggttttcccaatgg

SEQ ID NO: 542829 - DNA, 15 bp, Homo sapiens
ggttttcccaatggg

SEQ ID NO: 542830 - DNA, 15 bp, Homo sapiens
gttttcccaatgggc

SEQ ID NO: 542831 - DNA, 15 bp, Homo sapiens
ttttcccaatgggct

SEQ ID NO: 542832 - DNA, 15 bp, Homo sapiens
tttcccaatgggctg

SEQ ID NO: 542833 - DNA, 15 bp, Homo sapiens
ttcccaatgggctgt

SEQ ID NO: 542834 - DNA, 15 bp, Homo sapiens
tcccaatgggctgta

SEQ ID NO: 542835 - DNA, 15 bp, Homo sapiens
cccaatgggctgtat

SEQ ID NO: 542836 - DNA, 15 bp, Homo sapiens
ccaatgggctgtatt

SEQ ID NO: 542837 - DNA, 15 bp, Homo sapiens
caatgggctgtattt

SEQ ID NO: 542838 - DNA, 15 bp, Homo sapiens
aatgggctgtattta

SEQ ID NO: 542839 - DNA, 15 bp, Homo sapiens
atgggctgtatttag

SEQ ID NO: 542840 - DNA, 15 bp, Homo sapiens
tgggctgtatttaga

SEQ ID NO: 542841 - DNA, 15 bp, Homo sapiens
gggctgtatttagag

SEQ ID NO: 542842 - DNA, 15 bp, Homo sapiens
ggctgtatttagagg

SEQ ID NO: 542843 - DNA, 15 bp, Homo sapiens
gctgtatttagaggc

SEQ ID NO: 542844 - DNA, 15 bp, Homo sapiens
ctgtatttagaggct

SEQ ID NO: 542845 - DNA, 15 bp, Homo sapiens
tgtatttagaggctc

SEQ ID NO: 542846 - DNA, 15 bp, Homo sapiens
gtatttagaggctca

SEQ ID NO: 542847 - DNA, 15 bp, Homo sapiens
tatttagaggctcac

SEQ ID NO: 542848 - DNA, 15 bp, Homo sapiens
atttagaggctcaca

SEQ ID NO: 542849 - DNA, 15 bp, Homo sapiens
tttagaggctcacag

SEQ ID NO: 542850 - DNA, 15 bp, Homo sapiens
ttagaggctcacaga

SEQ ID NO: 542851 - DNA, 15 bp, Homo sapiens
tagaggctcacagaa

SEQ ID NO: 542852 - DNA, 15 bp, Homo sapiens
agaggctcacagaaa

SEQ ID NO: 542853 - DNA, 15 bp, Homo sapiens
gaggctcacagaaat

SEQ ID NO: 542854 - DNA, 15 bp, Homo sapiens
aggctcacagaaatc

SEQ ID NO: 542855 - DNA, 15 bp, Homo sapiens
ggctcacagaaatcc

SEQ ID NO: 542856 - DNA, 15 bp, Homo sapiens
gctcacagaaatcct

SEQ ID NO: 542857 - DNA, 15 bp, Homo sapiens
ctcacagaaatcctg

SEQ ID NO: 542858 - DNA, 15 bp, Homo sapiens
tcacagaaatcctgc

SEQ ID NO: 542859 - DNA, 15 bp, Homo sapiens
cacagaaatcctgca

SEQ ID NO: 542860 - DNA, 15 bp, Homo sapiens
acagaaatcctgcat

SEQ ID NO: 542861 - DNA, 15 bp, Homo sapiens
cagaaatcctgcatg

SEQ ID NO: 542862 - DNA, 15 bp, Homo sapiens
agaaatcctgcatgc

SEQ ID NO: 542863 - DNA, 15 bp, Homo sapiens
gaaatcctgcatgct

SEQ ID NO: 542864 - DNA, 15 bp, Homo sapiens
aaatcctgcatgctt

SEQ ID NO: 542865 - DNA, 15 bp, Homo sapiens
aatcctgcatgcttc

SEQ ID NO: 542866 - DNA, 15 bp, Homo sapiens
atcctgcatgcttcc

SEQ ID NO: 542867 - DNA, 15 bp, Homo sapiens
tcctgcatgcttcca

SEQ ID NO: 542868 - DNA, 15 bp, Homo sapiens
cctgcatgcttccat

SEQ ID NO: 542869 - DNA, 15 bp, Homo sapiens
ctgcatgcttccatt

SEQ ID NO: 542870 - DNA, 15 bp, Homo sapiens
tgcatgcttccattg

SEQ ID NO: 542871 - DNA, 15 bp, Homo sapiens
gcatgcttccattgc

SEQ ID NO: 542872 - DNA, 15 bp, Homo sapiens
catgcttccattgcc

SEQ ID NO: 542873 - DNA, 15 bp, Homo sapiens
atgcttccattgccg

SEQ ID NO: 542874 - DNA, 15 bp, Homo sapiens
tgcttccattgccgt

SEQ ID NO: 542875 - DNA, 15 bp, Homo sapiens
gcttccattgccgtt

SEQ ID NO: 542876 - DNA, 15 bp, Homo sapiens
cttccattgccgttt

SEQ ID NO: 542877 - DNA, 15 bp, Homo sapiens
ttccattgccgtttc

SEQ ID NO: 542878 - DNA, 15 bp, Homo sapiens
tccattgccgtttcc

SEQ ID NO: 542879 - DNA, 15 bp, Homo sapiens
ccattgccgtttccc

SEQ ID NO: 542880 - DNA, 15 bp, Homo sapiens
cattgccgtttccca

SEQ ID NO: 542881 - DNA, 15 bp, Homo sapiens
attgccgtttcccat

SEQ ID NO: 542882 - DNA, 15 bp, Homo sapiens
ttgccgtttcccatc

SEQ ID NO: 542883 - DNA, 15 bp, Homo sapiens
tgccgtttcccatcc

SEQ ID NO: 542884 - DNA, 15 bp, Homo sapiens
gccgtttcccatcct

SEQ ID NO: 542885 - DNA, 15 bp, Homo sapiens
ccgtttcccatcctt

SEQ ID NO: 542886 - DNA, 15 bp, Homo sapiens
cgtttcccatccttt

SEQ ID NO: 542887 - DNA, 15 bp, Homo sapiens
gtttcccatcctttc

SEQ ID NO: 542888 - DNA, 15 bp, Homo sapiens
tttcccatcctttct

SEQ ID NO: 542889 - DNA, 15 bp, Homo sapiens
ttcccatcctttctt

SEQ ID NO: 542890 - DNA, 15 bp, Homo sapiens
tcccatcctttctta

SEQ ID NO: 542891 - DNA, 15 bp, Homo sapiens
cccatcctttcttag

SEQ ID NO: 542892 - DNA, 15 bp, Homo sapiens
ccatcctttcttagc

SEQ ID NO: 542893 - DNA, 15 bp, Homo sapiens
catcctttcttagcc

SEQ ID NO: 542894 - DNA, 15 bp, Homo sapiens
atcctttcttagcct

SEQ ID NO: 542895 - DNA, 15 bp, Homo sapiens
tcctttcttagcctt

SEQ ID NO: 542896 - DNA, 15 bp, Homo sapiens
cctttcttagccttt

SEQ ID NO: 542897 - DNA, 15 bp, Homo sapiens
ctttcttagcctttg

SEQ ID NO: 542898 - DNA, 15 bp, Homo sapiens
tttcttagcctttgc

SEQ ID NO: 542899 - DNA, 15 bp, Homo sapiens
ttcttagcctttgct

SEQ ID NO: 542900 - DNA, 15 bp, Homo sapiens
tcttagcctttgctg

SEQ ID NO: 542901 - DNA, 15 bp, Homo sapiens
cttagcctttgctga

SEQ ID NO: 542902 - DNA, 15 bp, Homo sapiens
ttagcctttgctgaa

SEQ ID NO: 542903 - DNA, 15 bp, Homo sapiens
tagcctttgctgaat

SEQ ID NO: 542904 - DNA, 15 bp, Homo sapiens
agcctttgctgaatg

SEQ ID NO: 542905 - DNA, 15 bp, Homo sapiens
gcctttgctgaatgt

SEQ ID NO: 542906 - DNA, 15 bp, Homo sapiens
cctttgctgaatgtg

SEQ ID NO: 542907 - DNA, 15 bp, Homo sapiens
ctttgctgaatgtgt

SEQ ID NO: 542908 - DNA, 15 bp, Homo sapiens
tttgctgaatgtgtc

SEQ ID NO: 542909 - DNA, 15 bp, Homo sapiens
ttgctgaatgtgtcc

SEQ ID NO: 542910 - DNA, 15 bp, Homo sapiens
tgctgaatgtgtccg

SEQ ID NO: 542911 - DNA, 15 bp, Homo sapiens
gctgaatgtgtccgg

SEQ ID NO: 542912 - DNA, 15 bp, Homo sapiens
ctgaatgtgtccgga

SEQ ID NO: 542913 - DNA, 15 bp, Homo sapiens
tgaatgtgtccggaa

SEQ ID NO: 542914 - DNA, 15 bp, Homo sapiens
gaatgtgtccggaaa

SEQ ID NO: 542915 - DNA, 15 bp, Homo sapiens
aatgtgtccggaaat

SEQ ID NO: 542916 - DNA, 15 bp, Homo sapiens
atgtgtccggaaatc

SEQ ID NO: 542917 - DNA, 15 bp, Homo sapiens
tgtgtccggaaatct

SEQ ID NO: 542918 - DNA, 15 bp, Homo sapiens
gtgtccggaaatctt

SEQ ID NO: 542919 - DNA, 15 bp, Homo sapiens
tgtccggaaatcttt

SEQ ID NO: 542920 - DNA, 15 bp, Homo sapiens
gtccggaaatctttt

SEQ ID NO: 542921 - DNA, 15 bp, Homo sapiens
tccggaaatcttttg

SEQ ID NO: 542922 - DNA, 15 bp, Homo sapiens
ccggaaatcttttgc

SEQ ID NO: 542923 - DNA, 15 bp, Homo sapiens
cggaaatcttttgca

SEQ ID NO: 542924 - DNA, 15 bp, Homo sapiens
ggaaatcttttgcaa

SEQ ID NO: 542925 - DNA, 15 bp, Homo sapiens
gaaatcttttgcaaa

SEQ ID NO: 542926 - DNA, 15 bp, Homo sapiens
aaatcttttgcaaaa

SEQ ID NO: 542927 - DNA, 15 bp, Homo sapiens
aatcttttgcaaaag

SEQ ID NO: 542928 - DNA, 15 bp, Homo sapiens
atcttttgcaaaaga

SEQ ID NO: 542929 - DNA, 15 bp, Homo sapiens
tcttttgcaaaagaa

SEQ ID NO: 542930 - DNA, 15 bp, Homo sapiens
cttttgcaaaagaaa

SEQ ID NO: 542931 - DNA, 15 bp, Homo sapiens
ttttgcaaaagaaaa

SEQ ID NO: 542932 - DNA, 15 bp, Homo sapiens
tttgcaaaagaaaag

SEQ ID NO: 542933 - DNA, 15 bp, Homo sapiens
ttgcaaaagaaaagg

SEQ ID NO: 542934 - DNA, 15 bp, Homo sapiens
tgcaaaagaaaaggc

SEQ ID NO: 542935 - DNA, 15 bp, Homo sapiens
gcaaaagaaaaggca

SEQ ID NO: 542936 - DNA, 15 bp, Homo sapiens
caaaagaaaaggcac

SEQ ID NO: 542937 - DNA, 15 bp, Homo sapiens
aaaagaaaaggcacc

SEQ ID NO: 542938 - DNA, 15 bp, Homo sapiens
aaagaaaaggcacca

SEQ ID NO: 542939 - DNA, 15 bp, Homo sapiens
aagaaaaggcaccag

SEQ ID NO: 542940 - DNA, 15 bp, Homo sapiens
agaaaaggcaccagt

SEQ ID NO: 542941 - DNA, 15 bp, Homo sapiens
gaaaaggcaccagtc

SEQ ID NO: 542942 - DNA, 15 bp, Homo sapiens
aaaaggcaccagtct

SEQ ID NO: 542943 - DNA, 15 bp, Homo sapiens
aaaggcaccagtctg

SEQ ID NO: 542944 - DNA, 15 bp, Homo sapiens
aaggcaccagtctgt

SEQ ID NO: 542945 - DNA, 15 bp, Homo sapiens
aggcaccagtctgtt

SEQ ID NO: 542946 - DNA, 15 bp, Homo sapiens
ggcaccagtctgttt

SEQ ID NO: 542947 - DNA, 15 bp, Homo sapiens
gcaccagtctgtttg

SEQ ID NO: 542948 - DNA, 15 bp, Homo sapiens
caccagtctgtttgc

SEQ ID NO: 542949 - DNA, 15 bp, Homo sapiens
accagtctgtttgcc

SEQ ID NO: 542950 - DNA, 15 bp, Homo sapiens
ccagtctgtttgcct

SEQ ID NO: 542951 - DNA, 15 bp, Homo sapiens
cagtctgtttgcctt

SEQ ID NO: 542952 - DNA, 15 bp, Homo sapiens
agtctgtttgccttg

SEQ ID NO: 542953 - DNA, 15 bp, Homo sapiens
gtctgtttgccttga

SEQ ID NO: 542954 - DNA, 15 bp, Homo sapiens
tctgtttgccttgaa

SEQ ID NO: 542955 - DNA, 15 bp, Homo sapiens
ctgtttgccttgaaa

SEQ ID NO: 542956 - DNA, 15 bp, Homo sapiens
tgtttgccttgaaaa

SEQ ID NO: 542957 - DNA, 15 bp, Homo sapiens
gtttgccttgaaaat

SEQ ID NO: 542958 - DNA, 15 bp, Homo sapiens
tttgccttgaaaatg

SEQ ID NO: 542959 - DNA, 15 bp, Homo sapiens
ttgccttgaaaatga

SEQ ID NO: 542960 - DNA, 15 bp, Homo sapiens
tgccttgaaaatgaa

SEQ ID NO: 542961 - DNA, 15 bp, Homo sapiens
gccttgaaaatgaag

SEQ ID NO: 542962 - DNA, 15 bp, Homo sapiens
ccttgaaaatgaaga

SEQ ID NO: 542963 - DNA, 15 bp, Homo sapiens
cttgaaaatgaagaa

SEQ ID NO: 542964 - DNA, 15 bp, Homo sapiens
ttgaaaatgaagaaa

SEQ ID NO: 542965 - DNA, 15 bp, Homo sapiens
tgaaaatgaagaaac

SEQ ID NO: 542966 - DNA, 15 bp, Homo sapiens
gaaaatgaagaaacc

SEQ ID NO: 542967 - DNA, 15 bp, Homo sapiens
aaaatgaagaaacca

SEQ ID NO: 542968 - DNA, 15 bp, Homo sapiens
aaatgaagaaaccaa

SEQ ID NO: 542969 - DNA, 15 bp, Homo sapiens
aatgaagaaaccaaa

SEQ ID NO: 542970 - DNA, 15 bp, Homo sapiens
atgaagaaaccaaaa

SEQ ID NO: 542971 - DNA, 15 bp, Homo sapiens
tgaagaaaccaaaag

SEQ ID NO: 542972 - DNA, 15 bp, Homo sapiens
gaagaaaccaaaagg

SEQ ID NO: 542973 - DNA, 15 bp, Homo sapiens
aagaaaccaaaaggt

SEQ ID NO: 542974 - DNA, 15 bp, Homo sapiens
agaaaccaaaaggtg

SEQ ID NO: 542975 - DNA, 15 bp, Homo sapiens
gaaaccaaaaggtgt

SEQ ID NO: 542976 - DNA, 15 bp, Homo sapiens
aaaccaaaaggtgta

SEQ ID NO: 542977 - DNA, 15 bp, Homo sapiens
aaccaaaaggtgtaa

SEQ ID NO: 542978 - DNA, 15 bp, Homo sapiens
accaaaaggtgtaac

SEQ ID NO: 542979 - DNA, 15 bp, Homo sapiens
ccaaaaggtgtaaca

SEQ ID NO: 542980 - DNA, 15 bp, Homo sapiens
caaaaggtgtaacat

SEQ ID NO: 542981 - DNA, 15 bp, Homo sapiens
aaaaggtgtaacatc

SEQ ID NO: 542982 - DNA, 15 bp, Homo sapiens
aaaggtgtaacatcc

SEQ ID NO: 542983 - DNA, 15 bp, Homo sapiens
aaggtgtaacatcct

SEQ ID NO: 542984 - DNA, 15 bp, Homo sapiens
aggtgtaacatcctt

SEQ ID NO: 542985 - DNA, 15 bp, Homo sapiens
ggtgtaacatccttc

SEQ ID NO: 542986 - DNA, 15 bp, Homo sapiens
gtgtaacatccttct

SEQ ID NO: 542987 - DNA, 15 bp, Homo sapiens
tgtaacatccttctt

SEQ ID NO: 542988 - DNA, 15 bp, Homo sapiens
gtaacatccttcttc

SEQ ID NO: 542989 - DNA, 15 bp, Homo sapiens
taacatccttcttcc

SEQ ID NO: 542990 - DNA, 15 bp, Homo sapiens
aacatccttcttcct

SEQ ID NO: 542991 - DNA, 15 bp, Homo sapiens
acatccttcttcctt

SEQ ID NO: 542992 - DNA, 15 bp, Homo sapiens
catccttcttccttc

SEQ ID NO: 542993 - DNA, 15 bp, Homo sapiens
atccttcttccttct

SEQ ID NO: 542994 - DNA, 15 bp, Homo sapiens
tccttcttccttctc

SEQ ID NO: 542995 - DNA, 15 bp, Homo sapiens
ccttcttccttctca

SEQ ID NO: 542996 - DNA, 15 bp, Homo sapiens
ggaaattcaaaggaa

SEQ ID NO: 542997 - DNA, 15 bp, Homo sapiens
gaaattcaaaggaac

SEQ ID NO: 542998 - DNA, 15 bp, Homo sapiens
aaattcaaaggaact

SEQ ID NO: 542999 - DNA, 15 bp, Homo sapiens
aattcaaaggaactt

SEQ ID NO: 543000 - DNA, 15 bp, Homo sapiens
attcaaaggaactta

SEQ ID NO: 543001 - DNA, 15 bp, Homo sapiens
ttcaaaggaacttaa

SEQ ID NO: 543002 - DNA, 15 bp, Homo sapiens
tcaaaggaacttaaa

SEQ ID NO: 543003 - DNA, 15 bp, Homo sapiens
caaaggaacttaaac

SEQ ID NO: 543004 - DNA, 15 bp, Homo sapiens
aaaggaacttaaaca

SEQ ID NO: 543005 - DNA, 15 bp, Homo sapiens
aaggaacttaaacaa

SEQ ID NO: 543006 - DNA, 15 bp, Homo sapiens
aggaacttaaacaag

SEQ ID NO: 543007 - DNA, 15 bp, Homo sapiens
ggaacttaaacaagt

SEQ ID NO: 543008 - DNA, 15 bp, Homo sapiens
gaacttaaacaagtc

SEQ ID NO: 543009 - DNA, 15 bp, Homo sapiens
aacttaaacaagtct

SEQ ID NO: 543010 - DNA, 15 bp, Homo sapiens
acttaaacaagtctc

SEQ ID NO: 543011 - DNA, 15 bp, Homo sapiens
cttaaacaagtctct

SEQ ID NO: 543012 - DNA, 15 bp, Homo sapiens
ttaaacaagtctctt

SEQ ID NO: 543013 - DNA, 15 bp, Homo sapiens
taaacaagtctcttt

SEQ ID NO: 543014 - DNA, 15 bp, Homo sapiens
aaacaagtctctttg

SEQ ID NO: 543015 - DNA, 15 bp, Homo sapiens
aacaagtctctttgc

SEQ ID NO: 543016 - DNA, 15 bp, Homo sapiens
acaagtctctttgca

SEQ ID NO: 543017 - DNA, 15 bp, Homo sapiens
caagtctctttgcat

SEQ ID NO: 543018 - DNA, 15 bp, Homo sapiens
aagtctctttgcatc

SEQ ID NO: 543019 - DNA, 15 bp, Homo sapiens
agtctctttgcatca

SEQ ID NO: 543020 - DNA, 15 bp, Homo sapiens
gtctctttgcatcag

SEQ ID NO: 543021 - DNA, 15 bp, Homo sapiens
tctctttgcatcagg

SEQ ID NO: 543022 - DNA, 15 bp, Homo sapiens
ctctttgcatcagga

SEQ ID NO: 543023 - DNA, 15 bp, Homo sapiens
tctttgcatcaggac

SEQ ID NO: 543024 - DNA, 15 bp, Homo sapiens
ctttgcatcaggact

SEQ ID NO: 543025 - DNA, 15 bp, Homo sapiens
tttgcatcaggactt

SEQ ID NO: 543026 - DNA, 15 bp, Homo sapiens
ttgcatcaggactta

SEQ ID NO: 543027 - DNA, 15 bp, Homo sapiens
tgcatcaggacttat

SEQ ID NO: 543028 - DNA, 15 bp, Homo sapiens
gcatcaggacttatc

SEQ ID NO: 543029 - DNA, 15 bp, Homo sapiens
catcaggacttatca

SEQ ID NO: 543030 - DNA, 15 bp, Homo sapiens
atcaggacttatcag

SEQ ID NO: 543031 - DNA, 15 bp, Homo sapiens
tcaggacttatcaga

SEQ ID NO: 543032 - DNA, 15 bp, Homo sapiens
caggacttatcagag

SEQ ID NO: 543033 - DNA, 15 bp, Homo sapiens
aggacttatcagagc

SEQ ID NO: 543034 - DNA, 15 bp, Homo sapiens
ggacttatcagagcc

SEQ ID NO: 543035 - DNA, 15 bp, Homo sapiens
gacttatcagagcct

SEQ ID NO: 543036 - DNA, 15 bp, Homo sapiens
acttatcagagcctt

SEQ ID NO: 543037 - DNA, 15 bp, Homo sapiens
cttatcagagccttg

SEQ ID NO: 543038 - DNA, 15 bp, Homo sapiens
ttatcagagccttga

SEQ ID NO: 543039 - DNA, 15 bp, Homo sapiens
tatcagagccttgaa

SEQ ID NO: 543040 - DNA, 15 bp, Homo sapiens
atcagagccttgaat

SEQ ID NO: 543041 - DNA, 15 bp, Homo sapiens
tcagagccttgaata

SEQ ID NO: 543042 - DNA, 15 bp, Homo sapiens
cagagccttgaatat

SEQ ID NO: 543043 - DNA, 15 bp, Homo sapiens
agagccttgaatata

SEQ ID NO: 543044 - DNA, 15 bp, Homo sapiens
gagccttgaatatac

SEQ ID NO: 543045 - DNA, 15 bp, Homo sapiens
agccttgaatatact

SEQ ID NO: 543046 - DNA, 15 bp, Homo sapiens
gccttgaatatacta

SEQ ID NO: 543047 - DNA, 15 bp, Homo sapiens
ccttgaatatactaa

SEQ ID NO: 543048 - DNA, 15 bp, Homo sapiens
cttgaatatactaat

SEQ ID NO: 543049 - DNA, 15 bp, Homo sapiens
ttgaatatactaatg

SEQ ID NO: 543050 - DNA, 15 bp, Homo sapiens
tgaatatactaatgg

SEQ ID NO: 543051 - DNA, 15 bp, Homo sapiens
gaatatactaatgga

SEQ ID NO: 543052 - DNA, 15 bp, Homo sapiens
aatatactaatggag

SEQ ID NO: 543053 - DNA, 15 bp, Homo sapiens
atatactaatggaga

SEQ ID NO: 543054 - DNA, 15 bp, Homo sapiens
tatactaatggagat

SEQ ID NO: 543055 - DNA, 15 bp, Homo sapiens
atactaatggagatc

SEQ ID NO: 543056 - DNA, 15 bp, Homo sapiens
tactaatggagatcc

SEQ ID NO: 543057 - DNA, 15 bp, Homo sapiens
actaatggagatcct

SEQ ID NO: 543058 - DNA, 15 bp, Homo sapiens
ctaatggagatcctg

SEQ ID NO: 543059 - DNA, 15 bp, Homo sapiens
taatggagatcctga

SEQ ID NO: 543060 - DNA, 15 bp, Homo sapiens
aatggagatcctgaa

SEQ ID NO: 543061 - DNA, 15 bp, Homo sapiens
atggagatcctgaag

SEQ ID NO: 543062 - DNA, 15 bp, Homo sapiens
tggagatcctgaagc

SEQ ID NO: 543063 - DNA, 15 bp, Homo sapiens
ggagatcctgaagct

SEQ ID NO: 543064 - DNA, 15 bp, Homo sapiens
gagatcctgaagctc

SEQ ID NO: 543065 - DNA, 15 bp, Homo sapiens
agatcctgaagctcc

SEQ ID NO: 543066 - DNA, 15 bp, Homo sapiens
gatcctgaagctcca

SEQ ID NO: 543067 - DNA, 15 bp, Homo sapiens
atcctgaagctccaa

SEQ ID NO: 543068 - DNA, 15 bp, Homo sapiens
tcctgaagctccaag

SEQ ID NO: 543069 - DNA, 15 bp, Homo sapiens
cctgaagctccaagg

SEQ ID NO: 543070 - DNA, 15 bp, Homo sapiens
ctgaagctccaaggg

SEQ ID NO: 543071 - DNA, 15 bp, Homo sapiens
tgaagctccaaggga

SEQ ID NO: 543072 - DNA, 15 bp, Homo sapiens
gaagctccaagggaa

SEQ ID NO: 543073 - DNA, 15 bp, Homo sapiens
aagctccaagggaaa

SEQ ID NO: 543074 - DNA, 15 bp, Homo sapiens
agctccaagggaaag

SEQ ID NO: 543075 - DNA, 15 bp, Homo sapiens
gctccaagggaaagg

SEQ ID NO: 543076 - DNA, 15 bp, Homo sapiens
ctccaagggaaaggg

SEQ ID NO: 543077 - DNA, 15 bp, Homo sapiens
tccaagggaaagggc

SEQ ID NO: 543078 - DNA, 15 bp, Homo sapiens
ccaagggaaagggcc

SEQ ID NO: 543079 - DNA, 15 bp, Homo sapiens
caagggaaagggccg

SEQ ID NO: 543080 - DNA, 15 bp, Homo sapiens
aagggaaagggccgc

SEQ ID NO: 543081 - DNA, 15 bp, Homo sapiens
agggaaagggccgca

SEQ ID NO: 543082 - DNA, 15 bp, Homo sapiens
gggaaagggccgcac

SEQ ID NO: 543083 - DNA, 15 bp, Homo sapiens
ggaaagggccgcaca

SEQ ID NO: 543084 - DNA, 15 bp, Homo sapiens
gaaagggccgcacaa

SEQ ID NO: 543085 - DNA, 15 bp, Homo sapiens
aaagggccgcacaat

SEQ ID NO: 543086 - DNA, 15 bp, Homo sapiens
aagggccgcacaatg

SEQ ID NO: 543087 - DNA, 15 bp, Homo sapiens
agggccgcacaatgc

SEQ ID NO: 543088 - DNA, 15 bp, Homo sapiens
gggccgcacaatgca

SEQ ID NO: 543089 - DNA, 15 bp, Homo sapiens
ggccgcacaatgcag

SEQ ID NO: 543090 - DNA, 15 bp, Homo sapiens
gccgcacaatgcagt

SEQ ID NO: 543091 - DNA, 15 bp, Homo sapiens
ccgcacaatgcagtc

SEQ ID NO: 543092 - DNA, 15 bp, Homo sapiens
cgcacaatgcagtct

SEQ ID NO: 543093 - DNA, 15 bp, Homo sapiens
gcacaatgcagtctg

SEQ ID NO: 543094 - DNA, 15 bp, Homo sapiens
cacaatgcagtctgc

SEQ ID NO: 543095 - DNA, 15 bp, Homo sapiens
acaatgcagtctgca

SEQ ID NO: 543096 - DNA, 15 bp, Homo sapiens
caatgcagtctgcag

SEQ ID NO: 543097 - DNA, 15 bp, Homo sapiens
aatgcagtctgcagc

SEQ ID NO: 543098 - DNA, 15 bp, Homo sapiens
atgcagtctgcagcg

SEQ ID NO: 543099 - DNA, 15 bp, Homo sapiens
tgcagtctgcagcgt

SEQ ID NO: 543100 - DNA, 15 bp, Homo sapiens
gcagtctgcagcgtt

SEQ ID NO: 543101 - DNA, 15 bp, Homo sapiens
cagtctgcagcgttt

SEQ ID NO: 543102 - DNA, 15 bp, Homo sapiens
agtctgcagcgtttt

SEQ ID NO: 543103 - DNA, 15 bp, Homo sapiens
gtctgcagcgttttc

SEQ ID NO: 543104 - DNA, 15 bp, Homo sapiens
tctgcagcgttttcc

SEQ ID NO: 543105 - DNA, 15 bp, Homo sapiens
ctgcagcgttttcca

SEQ ID NO: 543106 - DNA, 15 bp, Homo sapiens
tgcagcgttttccaa

SEQ ID NO: 543107 - DNA, 15 bp, Homo sapiens
gcagcgttttccaat

SEQ ID NO: 543108 - DNA, 15 bp, Homo sapiens
cagcgttttccaatc

SEQ ID NO: 543109 - DNA, 15 bp, Homo sapiens
agcgttttccaatca

SEQ ID NO: 543110 - DNA, 15 bp, Homo sapiens
gcgttttccaatcaa

SEQ ID NO: 543111 - DNA, 15 bp, Homo sapiens
cgttttccaatcaaa

SEQ ID NO: 543112 - DNA, 15 bp, Homo sapiens
gttttccaatcaaat

SEQ ID NO: 543113 - DNA, 15 bp, Homo sapiens
ttttccaatcaaatt

SEQ ID NO: 543114 - DNA, 15 bp, Homo sapiens
tttccaatcaaattt

SEQ ID NO: 543115 - DNA, 15 bp, Homo sapiens
ttccaatcaaatttg

SEQ ID NO: 543116 - DNA, 15 bp, Homo sapiens
tccaatcaaatttga

SEQ ID NO: 543117 - DNA, 15 bp, Homo sapiens
ccaatcaaatttgat

SEQ ID NO: 543118 - DNA, 15 bp, Homo sapiens
caatcaaatttgatt

SEQ ID NO: 543119 - DNA, 15 bp, Homo sapiens
aatcaaatttgattg

SEQ ID NO: 543120 - DNA, 15 bp, Homo sapiens
atcaaatttgattgc

SEQ ID NO: 543121 - DNA, 15 bp, Homo sapiens
tcaaatttgattgca

SEQ ID NO: 543122 - DNA, 15 bp, Homo sapiens
caaatttgattgcaa

SEQ ID NO: 543123 - DNA, 15 bp, Homo sapiens
aaatttgattgcaag

SEQ ID NO: 543124 - DNA, 15 bp, Homo sapiens
aatttgattgcaaga

SEQ ID NO: 543125 - DNA, 15 bp, Homo sapiens
atttgattgcaagag

SEQ ID NO: 543126 - DNA, 15 bp, Homo sapiens
tttgattgcaagagg

SEQ ID NO: 543127 - DNA, 15 bp, Homo sapiens
ttgattgcaagaggt

SEQ ID NO: 543128 - DNA, 15 bp, Homo sapiens
tgattgcaagaggtt

SEQ ID NO: 543129 - DNA, 15 bp, Homo sapiens
gattgcaagaggttt

SEQ ID NO: 543130 - DNA, 15 bp, Homo sapiens
attgcaagaggtttt

SEQ ID NO: 543131 - DNA, 15 bp, Homo sapiens
ttgcaagaggttttt

SEQ ID NO: 543132 - DNA, 15 bp, Homo sapiens
tgcaagaggtttttt

SEQ ID NO: 543133 - DNA, 15 bp, Homo sapiens
gcaagaggttttttt

SEQ ID NO: 543134 - DNA, 15 bp, Homo sapiens
caagaggtttttttt

SEQ ID NO: 543135 - DNA, 15 bp, Homo sapiens
aagaggttttttttt

SEQ ID NO: 543136 - DNA, 15 bp, Homo sapiens
agaggtttttttttt

SEQ ID NO: 543137 - DNA, 15 bp, Homo sapiens
gaggttttttttttt

SEQ ID NO: 543138 - DNA, 15 bp, Homo sapiens
aggtttttttttttc

SEQ ID NO: 543139 - DNA, 15 bp, Homo sapiens
ggtttttttttttca

SEQ ID NO: 543140 - DNA, 15 bp, Homo sapiens
gtttttttttttcac

SEQ ID NO: 543141 - DNA, 15 bp, Homo sapiens
tttttttttttcact

SEQ ID NO: 543142 - DNA, 15 bp, Homo sapiens
ttttttttttcactg

SEQ ID NO: 543143 - DNA, 15 bp, Homo sapiens
tttttttttcactga

SEQ ID NO: 543144 - DNA, 15 bp, Homo sapiens
ttttttttcactgag

SEQ ID NO: 543145 - DNA, 15 bp, Homo sapiens
tttttttcactgagt

SEQ ID NO: 543146 - DNA, 15 bp, Homo sapiens
ttttttcactgagta

SEQ ID NO: 543147 - DNA, 15 bp, Homo sapiens
tttttcactgagtac

SEQ ID NO: 543148 - DNA, 15 bp, Homo sapiens
ttttcactgagtacc

SEQ ID NO: 543149 - DNA, 15 bp, Homo sapiens
tttcactgagtacct

SEQ ID NO: 543150 - DNA, 15 bp, Homo sapiens
ttcactgagtaccta

SEQ ID NO: 543151 - DNA, 15 bp, Homo sapiens
tcactgagtacctaa

SEQ ID NO: 543152 - DNA, 15 bp, Homo sapiens
cactgagtacctaac

SEQ ID NO: 543153 - DNA, 15 bp, Homo sapiens
actgagtacctaact

SEQ ID NO: 543154 - DNA, 15 bp, Homo sapiens
ctgagtacctaactc

SEQ ID NO: 543155 - DNA, 15 bp, Homo sapiens
tgagtacctaactca

SEQ ID NO: 543156 - DNA, 15 bp, Homo sapiens
gagtacctaactcag

SEQ ID NO: 543157 - DNA, 15 bp, Homo sapiens
agtacctaactcagt

SEQ ID NO: 543158 - DNA, 15 bp, Homo sapiens
gtacctaactcagtg

SEQ ID NO: 543159 - DNA, 15 bp, Homo sapiens
tacctaactcagtgg

SEQ ID NO: 543160 - DNA, 15 bp, Homo sapiens
acctaactcagtggc

SEQ ID NO: 543161 - DNA, 15 bp, Homo sapiens
cctaactcagtggct

SEQ ID NO: 543162 - DNA, 15 bp, Homo sapiens
ctaactcagtggctc

SEQ ID NO: 543163 - DNA, 15 bp, Homo sapiens
taactcagtggctct

SEQ ID NO: 543164 - DNA, 15 bp, Homo sapiens
aactcagtggctctg

SEQ ID NO: 543165 - DNA, 15 bp, Homo sapiens
actcagtggctctga

SEQ ID NO: 543166 - DNA, 15 bp, Homo sapiens
ctcagtggctctgaa

SEQ ID NO: 543167 - DNA, 15 bp, Homo sapiens
tcagtggctctgaaa

SEQ ID NO: 543168 - DNA, 15 bp, Homo sapiens
cagtggctctgaaac

SEQ ID NO: 543169 - DNA, 15 bp, Homo sapiens
agtggctctgaaact

SEQ ID NO: 543170 - DNA, 15 bp, Homo sapiens
gtggctctgaaactt

SEQ ID NO: 543171 - DNA, 15 bp, Homo sapiens
tggctctgaaactta

SEQ ID NO: 543172 - DNA, 15 bp, Homo sapiens
ggctctgaaacttac

SEQ ID NO: 543173 - DNA, 15 bp, Homo sapiens
gctctgaaacttaca

SEQ ID NO: 543174 - DNA, 15 bp, Homo sapiens
ctctgaaacttacat

SEQ ID NO: 543175 - DNA, 15 bp, Homo sapiens
tctgaaacttacatc

SEQ ID NO: 543176 - DNA, 15 bp, Homo sapiens
ctgaaacttacatct

SEQ ID NO: 543177 - DNA, 15 bp, Homo sapiens
tgaaacttacatctg

SEQ ID NO: 543178 - DNA, 15 bp, Homo sapiens
gaaacttacatctgc

SEQ ID NO: 543179 - DNA, 15 bp, Homo sapiens
aaacttacatctgca

SEQ ID NO: 543180 - DNA, 15 bp, Homo sapiens
aacttacatctgcac

SEQ ID NO: 543181 - DNA, 15 bp, Homo sapiens
acttacatctgcaca

SEQ ID NO: 543182 - DNA, 15 bp, Homo sapiens
cttacatctgcacaa

SEQ ID NO: 543183 - DNA, 15 bp, Homo sapiens
ttacatctgcacaaa

SEQ ID NO: 543184 - DNA, 15 bp, Homo sapiens
tacatctgcacaaaa

SEQ ID NO: 543185 - DNA, 15 bp, Homo sapiens
acatctgcacaaaat

SEQ ID NO: 543186 - DNA, 15 bp, Homo sapiens
catctgcacaaaatt

SEQ ID NO: 543187 - DNA, 15 bp, Homo sapiens
atctgcacaaaattc

SEQ ID NO: 543188 - DNA, 15 bp, Homo sapiens
tctgcacaaaattcc

SEQ ID NO: 543189 - DNA, 15 bp, Homo sapiens
ctgcacaaaattccc

SEQ ID NO: 543190 - DNA, 15 bp, Homo sapiens
tgcacaaaattccct

SEQ ID NO: 543191 - DNA, 15 bp, Homo sapiens
gcacaaaattccctt

SEQ ID NO: 543192 - DNA, 15 bp, Homo sapiens
cacaaaattcccttg

SEQ ID NO: 543193 - DNA, 15 bp, Homo sapiens
acaaaattcccttgg

SEQ ID NO: 543194 - DNA, 15 bp, Homo sapiens
caaaattcccttggg

SEQ ID NO: 543195 - DNA, 15 bp, Homo sapiens
aaaattcccttgggg

SEQ ID NO: 543196 - DNA, 15 bp, Homo sapiens
aaattcccttgggga

SEQ ID NO: 543197 - DNA, 15 bp, Homo sapiens
aattcccttggggag

SEQ ID NO: 543198 - DNA, 15 bp, Homo sapiens
attcccttggggagt

SEQ ID NO: 543199 - DNA, 15 bp, Homo sapiens
ttcccttggggagtg

SEQ ID NO: 543200 - DNA, 15 bp, Homo sapiens
tcccttggggagtgt

SEQ ID NO: 543201 - DNA, 15 bp, Homo sapiens
cccttggggagtgta

SEQ ID NO: 543202 - DNA, 15 bp, Homo sapiens
ccttggggagtgtaa

SEQ ID NO: 543203 - DNA, 15 bp, Homo sapiens
cttggggagtgtaaa

SEQ ID NO: 543204 - DNA, 15 bp, Homo sapiens
ttggggagtgtaaag

SEQ ID NO: 543205 - DNA, 15 bp, Homo sapiens
tggggagtgtaaaga

SEQ ID NO: 543206 - DNA, 15 bp, Homo sapiens
ggggagtgtaaagaa

SEQ ID NO: 543207 - DNA, 15 bp, Homo sapiens
gggagtgtaaagaat

SEQ ID NO: 543208 - DNA, 15 bp, Homo sapiens
ggagtgtaaagaatg

SEQ ID NO: 543209 - DNA, 15 bp, Homo sapiens
gagtgtaaagaatgc

SEQ ID NO: 543210 - DNA, 15 bp, Homo sapiens
agtgtaaagaatgct

SEQ ID NO: 543211 - DNA, 15 bp, Homo sapiens
gtgtaaagaatgctg

SEQ ID NO: 543212 - DNA, 15 bp, Homo sapiens
tgtaaagaatgctga

SEQ ID NO: 543213 - DNA, 15 bp, Homo sapiens
gtaaagaatgctgat

SEQ ID NO: 543214 - DNA, 15 bp, Homo sapiens
taaagaatgctgatt

SEQ ID NO: 543215 - DNA, 15 bp, Homo sapiens
aaagaatgctgattc

SEQ ID NO: 543216 - DNA, 15 bp, Homo sapiens
aagaatgctgattcc

SEQ ID NO: 543217 - DNA, 15 bp, Homo sapiens
agaatgctgattcct

SEQ ID NO: 543218 - DNA, 15 bp, Homo sapiens
gaatgctgattcctc

SEQ ID NO: 543219 - DNA, 15 bp, Homo sapiens
aatgctgattcctcg

SEQ ID NO: 543220 - DNA, 15 bp, Homo sapiens
atgctgattcctcgg

SEQ ID NO: 543221 - DNA, 15 bp, Homo sapiens
tgctgattcctcggc

SEQ ID NO: 543222 - DNA, 15 bp, Homo sapiens
gctgattcctcggct

SEQ ID NO: 543223 - DNA, 15 bp, Homo sapiens
ctgattcctcggctc

SEQ ID NO: 543224 - DNA, 15 bp, Homo sapiens
tgattcctcggctcc

SEQ ID NO: 543225 - DNA, 15 bp, Homo sapiens
gattcctcggctcca

SEQ ID NO: 543226 - DNA, 15 bp, Homo sapiens
attcctcggctccag

SEQ ID NO: 543227 - DNA, 15 bp, Homo sapiens
ttcctcggctccagc

SEQ ID NO: 543228 - DNA, 15 bp, Homo sapiens
tcctcggctccagct

SEQ ID NO: 543229 - DNA, 15 bp, Homo sapiens
cctcggctccagctc

SEQ ID NO: 543230 - DNA, 15 bp, Homo sapiens
ctcggctccagctcc

SEQ ID NO: 543231 - DNA, 15 bp, Homo sapiens
tcggctccagctcca

SEQ ID NO: 543232 - DNA, 15 bp, Homo sapiens
cggctccagctccag

SEQ ID NO: 543233 - DNA, 15 bp, Homo sapiens
ggctccagctccaga

SEQ ID NO: 543234 - DNA, 15 bp, Homo sapiens
gctccagctccagag

SEQ ID NO: 543235 - DNA, 15 bp, Homo sapiens
ctccagctccagaga

SEQ ID NO: 543236 - DNA, 15 bp, Homo sapiens
tccagctccagagat

SEQ ID NO: 543237 - DNA, 15 bp, Homo sapiens
ccagctccagagatt

SEQ ID NO: 543238 - DNA, 15 bp, Homo sapiens
cagctccagagattc

SEQ ID NO: 543239 - DNA, 15 bp, Homo sapiens
agctccagagattct

SEQ ID NO: 543240 - DNA, 15 bp, Homo sapiens
gctccagagattcta

SEQ ID NO: 543241 - DNA, 15 bp, Homo sapiens
ctccagagattctaa

SEQ ID NO: 543242 - DNA, 15 bp, Homo sapiens
tccagagattctaat

SEQ ID NO: 543243 - DNA, 15 bp, Homo sapiens
ccagagattctaatt

SEQ ID NO: 543244 - DNA, 15 bp, Homo sapiens
cagagattctaattc

SEQ ID NO: 543245 - DNA, 15 bp, Homo sapiens
agagattctaattca

SEQ ID NO: 543246 - DNA, 15 bp, Homo sapiens
gagattctaattcac

SEQ ID NO: 543247 - DNA, 15 bp, Homo sapiens
agattctaattcact

SEQ ID NO: 543248 - DNA, 15 bp, Homo sapiens
gattctaattcactg

SEQ ID NO: 543249 - DNA, 15 bp, Homo sapiens
attctaattcactgg

SEQ ID NO: 543250 - DNA, 15 bp, Homo sapiens
ttctaattcactgga

SEQ ID NO: 543251 - DNA, 15 bp, Homo sapiens
tctaattcactggat

SEQ ID NO: 543252 - DNA, 15 bp, Homo sapiens
ctaattcactggatc

SEQ ID NO: 543253 - DNA, 15 bp, Homo sapiens
taattcactggatct

SEQ ID NO: 543254 - DNA, 15 bp, Homo sapiens
aattcactggatctg

SEQ ID NO: 543255 - DNA, 15 bp, Homo sapiens
attcactggatctgg

SEQ ID NO: 543256 - DNA, 15 bp, Homo sapiens
ttcactggatctgga

SEQ ID NO: 543257 - DNA, 15 bp, Homo sapiens
tcactggatctggaa

SEQ ID NO: 543258 - DNA, 15 bp, Homo sapiens
cactggatctggaat

SEQ ID NO: 543259 - DNA, 15 bp, Homo sapiens
actggatctggaatg

SEQ ID NO: 543260 - DNA, 15 bp, Homo sapiens
ctggatctggaatgg

SEQ ID NO: 543261 - DNA, 15 bp, Homo sapiens
tggatctggaatggt

SEQ ID NO: 543262 - DNA, 15 bp, Homo sapiens
ggatctggaatggtc

SEQ ID NO: 543263 - DNA, 15 bp, Homo sapiens
gatctggaatggtcc

SEQ ID NO: 543264 - DNA, 15 bp, Homo sapiens
atctggaatggtccc

SEQ ID NO: 543265 - DNA, 15 bp, Homo sapiens
tctggaatggtcccg

SEQ ID NO: 543266 - DNA, 15 bp, Homo sapiens
ctggaatggtcccgg

SEQ ID NO: 543267 - DNA, 15 bp, Homo sapiens
tggaatggtcccggg

SEQ ID NO: 543268 - DNA, 15 bp, Homo sapiens
ggaatggtcccggga

SEQ ID NO: 543269 - DNA, 15 bp, Homo sapiens
gaatggtcccgggaa

SEQ ID NO: 543270 - DNA, 15 bp, Homo sapiens
aatggtcccgggaat

SEQ ID NO: 543271 - DNA, 15 bp, Homo sapiens
atggtcccgggaatc

SEQ ID NO: 543272 - DNA, 15 bp, Homo sapiens
tggtcccgggaatct

SEQ ID NO: 543273 - DNA, 15 bp, Homo sapiens
ggtcccgggaatctt

SEQ ID NO: 543274 - DNA, 15 bp, Homo sapiens
gtcccgggaatcttc

SEQ ID NO: 543275 - DNA, 15 bp, Homo sapiens
tcccgggaatcttca

SEQ ID NO: 543276 - DNA, 15 bp, Homo sapiens
cccgggaatcttcat

SEQ ID NO: 543277 - DNA, 15 bp, Homo sapiens
ccgggaatcttcatt

SEQ ID NO: 543278 - DNA, 15 bp, Homo sapiens
cgggaatcttcattt

SEQ ID NO: 543279 - DNA, 15 bp, Homo sapiens
gggaatcttcatttt

SEQ ID NO: 543280 - DNA, 15 bp, Homo sapiens
ggaatcttcattttt

SEQ ID NO: 543281 - DNA, 15 bp, Homo sapiens
gaatcttcattttta

SEQ ID NO: 543282 - DNA, 15 bp, Homo sapiens
aatcttcatttttaa

SEQ ID NO: 543283 - DNA, 15 bp, Homo sapiens
atcttcatttttaac

SEQ ID NO: 543284 - DNA, 15 bp, Homo sapiens
tcttcatttttaaca

SEQ ID NO: 543285 - DNA, 15 bp, Homo sapiens
cttcatttttaacaa

SEQ ID NO: 543286 - DNA, 15 bp, Homo sapiens
ttcatttttaacaac

SEQ ID NO: 543287 - DNA, 15 bp, Homo sapiens
tcatttttaacaaca

SEQ ID NO: 543288 - DNA, 15 bp, Homo sapiens
catttttaacaacac

SEQ ID NO: 543289 - DNA, 15 bp, Homo sapiens
atttttaacaacact

SEQ ID NO: 543290 - DNA, 15 bp, Homo sapiens
tttttaacaacactt

SEQ ID NO: 543291 - DNA, 15 bp, Homo sapiens
ttttaacaacacttc

SEQ ID NO: 543292 - DNA, 15 bp, Homo sapiens
tttaacaacacttca

SEQ ID NO: 543293 - DNA, 15 bp, Homo sapiens
ttaacaacacttcaa

SEQ ID NO: 543294 - DNA, 15 bp, Homo sapiens
taacaacacttcaag

SEQ ID NO: 543295 - DNA, 15 bp, Homo sapiens
aacaacacttcaagt

SEQ ID NO: 543296 - DNA, 15 bp, Homo sapiens
acaacacttcaagtg

SEQ ID NO: 543297 - DNA, 15 bp, Homo sapiens
caacacttcaagtga

SEQ ID NO: 543298 - DNA, 15 bp, Homo sapiens
aacacttcaagtgat

SEQ ID NO: 543299 - DNA, 15 bp, Homo sapiens
acacttcaagtgatt

SEQ ID NO: 543300 - DNA, 15 bp, Homo sapiens
cacttcaagtgattt

SEQ ID NO: 543301 - DNA, 15 bp, Homo sapiens
acttcaagtgatttt

SEQ ID NO: 543302 - DNA, 15 bp, Homo sapiens
cttcaagtgattttg

SEQ ID NO: 543303 - DNA, 15 bp, Homo sapiens
ttcaagtgattttga

SEQ ID NO: 543304 - DNA, 15 bp, Homo sapiens
tcaagtgattttgag

SEQ ID NO: 543305 - DNA, 15 bp, Homo sapiens
caagtgattttgagg

SEQ ID NO: 543306 - DNA, 15 bp, Homo sapiens
aagtgattttgaggc

SEQ ID NO: 543307 - DNA, 15 bp, Homo sapiens
agtgattttgaggca

SEQ ID NO: 543308 - DNA, 15 bp, Homo sapiens
gtgattttgaggcag

SEQ ID NO: 543309 - DNA, 15 bp, Homo sapiens
tgattttgaggcagc

SEQ ID NO: 543310 - DNA, 15 bp, Homo sapiens
gattttgaggcagca

SEQ ID NO: 543311 - DNA, 15 bp, Homo sapiens
attttgaggcagcaa

SEQ ID NO: 543312 - DNA, 15 bp, Homo sapiens
ttttgaggcagcaag

SEQ ID NO: 543313 - DNA, 15 bp, Homo sapiens
tttgaggcagcaagt

SEQ ID NO: 543314 - DNA, 15 bp, Homo sapiens
ttgaggcagcaagtc

SEQ ID NO: 543315 - DNA, 15 bp, Homo sapiens
tgaggcagcaagtcc

SEQ ID NO: 543316 - DNA, 15 bp, Homo sapiens
gaggcagcaagtcca

SEQ ID NO: 543317 - DNA, 15 bp, Homo sapiens
aggcagcaagtccag

SEQ ID NO: 543318 - DNA, 15 bp, Homo sapiens
ggcagcaagtccagg

SEQ ID NO: 543319 - DNA, 15 bp, Homo sapiens
gcagcaagtccagga

SEQ ID NO: 543320 - DNA, 15 bp, Homo sapiens
cagcaagtccaggat

SEQ ID NO: 543321 - DNA, 15 bp, Homo sapiens
agcaagtccaggatc

SEQ ID NO: 543322 - DNA, 15 bp, Homo sapiens
gcaagtccaggatcc

SEQ ID NO: 543323 - DNA, 15 bp, Homo sapiens
caagtccaggatcca

SEQ ID NO: 543324 - DNA, 15 bp, Homo sapiens
aagtccaggatccac

SEQ ID NO: 543325 - DNA, 15 bp, Homo sapiens
agtccaggatccaca

SEQ ID NO: 543326 - DNA, 15 bp, Homo sapiens
gtccaggatccacac

SEQ ID NO: 543327 - DNA, 15 bp, Homo sapiens
tccaggatccacact

SEQ ID NO: 543328 - DNA, 15 bp, Homo sapiens
ccaggatccacacta

SEQ ID NO: 543329 - DNA, 15 bp, Homo sapiens
caggatccacactag

SEQ ID NO: 543330 - DNA, 15 bp, Homo sapiens
aggatccacactagg

SEQ ID NO: 543331 - DNA, 15 bp, Homo sapiens
ggatccacactagga

SEQ ID NO: 543332 - DNA, 15 bp, Homo sapiens
gatccacactaggag

SEQ ID NO: 543333 - DNA, 15 bp, Homo sapiens
atccacactaggaga

SEQ ID NO: 543334 - DNA, 15 bp, Homo sapiens
tccacactaggagaa

SEQ ID NO: 543335 - DNA, 15 bp, Homo sapiens
ccacactaggagaaa

SEQ ID NO: 543336 - DNA, 15 bp, Homo sapiens
cacactaggagaaaa

SEQ ID NO: 543337 - DNA, 15 bp, Homo sapiens
acactaggagaaaaa

SEQ ID NO: 543338 - DNA, 15 bp, Homo sapiens
cactaggagaaaaac

SEQ ID NO: 543339 - DNA, 15 bp, Homo sapiens
actaggagaaaaact

SEQ ID NO: 543340 - DNA, 15 bp, Homo sapiens
ctaggagaaaaacta

SEQ ID NO: 543341 - DNA, 15 bp, Homo sapiens
taggagaaaaactag

SEQ ID NO: 543342 - DNA, 15 bp, Homo sapiens
aggagaaaaactagt

SEQ ID NO: 543343 - DNA, 15 bp, Homo sapiens
ggagaaaaactagta

SEQ ID NO: 543344 - DNA, 15 bp, Homo sapiens
gagaaaaactagtag

SEQ ID NO: 543345 - DNA, 15 bp, Homo sapiens
agaaaaactagtagg

SEQ ID NO: 543346 - DNA, 15 bp, Homo sapiens
gaaaaactagtagga

SEQ ID NO: 543347 - DNA, 15 bp, Homo sapiens
aaaaactagtaggat

SEQ ID NO: 543348 - DNA, 15 bp, Homo sapiens
aaaactagtaggatt

SEQ ID NO: 543349 - DNA, 15 bp, Homo sapiens
aaactagtaggatta

SEQ ID NO: 543350 - DNA, 15 bp, Homo sapiens
aactagtaggattag

SEQ ID NO: 543351 - DNA, 15 bp, Homo sapiens
actagtaggattagt

SEQ ID NO: 543352 - DNA, 15 bp, Homo sapiens
ctagtaggattagtg

SEQ ID NO: 543353 - DNA, 15 bp, Homo sapiens
tagtaggattagtgt

SEQ ID NO: 543354 - DNA, 15 bp, Homo sapiens
agtaggattagtgtc

SEQ ID NO: 543355 - DNA, 15 bp, Homo sapiens
gtaggattagtgtcc

SEQ ID NO: 543356 - DNA, 15 bp, Homo sapiens
taggattagtgtcct

SEQ ID NO: 543357 - DNA, 15 bp, Homo sapiens
aggattagtgtcctg

SEQ ID NO: 543358 - DNA, 15 bp, Homo sapiens
ggattagtgtcctgc

SEQ ID NO: 543359 - DNA, 15 bp, Homo sapiens
gattagtgtcctgct

SEQ ID NO: 543360 - DNA, 15 bp, Homo sapiens
attagtgtcctgctg

SEQ ID NO: 543361 - DNA, 15 bp, Homo sapiens
ttagtgtcctgctgg

SEQ ID NO: 543362 - DNA, 15 bp, Homo sapiens
tagtgtcctgctggt

SEQ ID NO: 543363 - DNA, 15 bp, Homo sapiens
agtgtcctgctggtg

SEQ ID NO: 543364 - DNA, 15 bp, Homo sapiens
gtgtcctgctggtgt

SEQ ID NO: 543365 - DNA, 15 bp, Homo sapiens
tgtcctgctggtgtc

SEQ ID NO: 543366 - DNA, 15 bp, Homo sapiens
gtcctgctggtgtcc

SEQ ID NO: 543367 - DNA, 15 bp, Homo sapiens
tcctgctggtgtccc

SEQ ID NO: 543368 - DNA, 15 bp, Homo sapiens
cctgctggtgtcccg

SEQ ID NO: 543369 - DNA, 15 bp, Homo sapiens
ctgctggtgtcccgg

SEQ ID NO: 543370 - DNA, 15 bp, Homo sapiens
tgctggtgtcccgga

SEQ ID NO: 543371 - DNA, 15 bp, Homo sapiens
gctggtgtcccggaa

SEQ ID NO: 543372 - DNA, 15 bp, Homo sapiens
ctggtgtcccggaag

SEQ ID NO: 543373 - DNA, 15 bp, Homo sapiens
tggtgtcccggaagc

SEQ ID NO: 543374 - DNA, 15 bp, Homo sapiens
ggtgtcccggaagca

SEQ ID NO: 543375 - DNA, 15 bp, Homo sapiens
gtgtcccggaagcat

SEQ ID NO: 543376 - DNA, 15 bp, Homo sapiens
tgtcccggaagcatc

SEQ ID NO: 543377 - DNA, 15 bp, Homo sapiens
gtcccggaagcatct

SEQ ID NO: 543378 - DNA, 15 bp, Homo sapiens
tcccggaagcatctc

SEQ ID NO: 543379 - DNA, 15 bp, Homo sapiens
cccggaagcatctca

SEQ ID NO: 543380 - DNA, 15 bp, Homo sapiens
ccggaagcatctcag

SEQ ID NO: 543381 - DNA, 15 bp, Homo sapiens
cggaagcatctcagt

SEQ ID NO: 543382 - DNA, 15 bp, Homo sapiens
ggaagcatctcagta

SEQ ID NO: 543383 - DNA, 15 bp, Homo sapiens
gaagcatctcagtag

SEQ ID NO: 543384 - DNA, 15 bp, Homo sapiens
aagcatctcagtagc

SEQ ID NO: 543385 - DNA, 15 bp, Homo sapiens
agcatctcagtagct

SEQ ID NO: 543386 - DNA, 15 bp, Homo sapiens
gcatctcagtagctc

SEQ ID NO: 543387 - DNA, 15 bp, Homo sapiens
catctcagtagctct

SEQ ID NO: 543388 - DNA, 15 bp, Homo sapiens
atctcagtagctcta

SEQ ID NO: 543389 - DNA, 15 bp, Homo sapiens
tctcagtagctctac

SEQ ID NO: 543390 - DNA, 15 bp, Homo sapiens
ctcagtagctctaca

SEQ ID NO: 543391 - DNA, 15 bp, Homo sapiens
tcagtagctctacac

SEQ ID NO: 543392 - DNA, 15 bp, Homo sapiens
cagtagctctacaca

SEQ ID NO: 543393 - DNA, 15 bp, Homo sapiens
agtagctctacacac

SEQ ID NO: 543394 - DNA, 15 bp, Homo sapiens
gtagctctacacact

SEQ ID NO: 543395 - DNA, 15 bp, Homo sapiens
tagctctacacactc

SEQ ID NO: 543396 - DNA, 15 bp, Homo sapiens
agctctacacactcc

SEQ ID NO: 543397 - DNA, 15 bp, Homo sapiens
gctctacacactccg

SEQ ID NO: 543398 - DNA, 15 bp, Homo sapiens
ctctacacactccgc

SEQ ID NO: 543399 - DNA, 15 bp, Homo sapiens
tctacacactccgcc

SEQ ID NO: 543400 - DNA, 15 bp, Homo sapiens
ctacacactccgcca

SEQ ID NO: 543401 - DNA, 15 bp, Homo sapiens
tacacactccgccat

SEQ ID NO: 543402 - DNA, 15 bp, Homo sapiens
acacactccgccatt

SEQ ID NO: 543403 - DNA, 15 bp, Homo sapiens
cacactccgccattc

SEQ ID NO: 543404 - DNA, 15 bp, Homo sapiens
acactccgccattca

SEQ ID NO: 543405 - DNA, 15 bp, Homo sapiens
cactccgccattcaa

SEQ ID NO: 543406 - DNA, 15 bp, Homo sapiens
actccgccattcaag

SEQ ID NO: 543407 - DNA, 15 bp, Homo sapiens
ctccgccattcaagc

SEQ ID NO: 543408 - DNA, 15 bp, Homo sapiens
tccgccattcaagct

SEQ ID NO: 543409 - DNA, 15 bp, Homo sapiens
ccgccattcaagctt

SEQ ID NO: 543410 - DNA, 15 bp, Homo sapiens
cgccattcaagcttt

SEQ ID NO: 543411 - DNA, 15 bp, Homo sapiens
gccattcaagctttc

SEQ ID NO: 543412 - DNA, 15 bp, Homo sapiens
ccattcaagctttct

SEQ ID NO: 543413 - DNA, 15 bp, Homo sapiens
cattcaagctttctc

SEQ ID NO: 543414 - DNA, 15 bp, Homo sapiens
attcaagctttctca

SEQ ID NO: 543415 - DNA, 15 bp, Homo sapiens
ttcaagctttctcag

SEQ ID NO: 543416 - DNA, 15 bp, Homo sapiens
tcaagctttctcagc

SEQ ID NO: 543417 - DNA, 15 bp, Homo sapiens
caagctttctcagct

SEQ ID NO: 543418 - DNA, 15 bp, Homo sapiens
aagctttctcagctt

SEQ ID NO: 543419 - DNA, 15 bp, Homo sapiens
agctttctcagcttc

SEQ ID NO: 543420 - DNA, 15 bp, Homo sapiens
gctttctcagcttcc

SEQ ID NO: 543421 - DNA, 15 bp, Homo sapiens
ctttctcagcttccc

SEQ ID NO: 543422 - DNA, 15 bp, Homo sapiens
tttctcagcttcccc

SEQ ID NO: 543423 - DNA, 15 bp, Homo sapiens
ttctcagcttcccct

SEQ ID NO: 543424 - DNA, 15 bp, Homo sapiens
tctcagcttcccctc

SEQ ID NO: 543425 - DNA, 15 bp, Homo sapiens
ctcagcttcccctca

SEQ ID NO: 543426 - DNA, 15 bp, Homo sapiens
tcagcttcccctcac

SEQ ID NO: 543427 - DNA, 15 bp, Homo sapiens
cagcttcccctcact

SEQ ID NO: 543428 - DNA, 15 bp, Homo sapiens
agcttcccctcactc

SEQ ID NO: 543429 - DNA, 15 bp, Homo sapiens
gcttcccctcactct

SEQ ID NO: 543430 - DNA, 15 bp, Homo sapiens
cttcccctcactctt

SEQ ID NO: 543431 - DNA, 15 bp, Homo sapiens
ttcccctcactcttt

SEQ ID NO: 543432 - DNA, 15 bp, Homo sapiens
tcccctcactcttta

SEQ ID NO: 543433 - DNA, 15 bp, Homo sapiens
cccctcactctttag

SEQ ID NO: 543434 - DNA, 15 bp, Homo sapiens
ccctcactctttaga

SEQ ID NO: 543435 - DNA, 15 bp, Homo sapiens
cctcactctttagaa

SEQ ID NO: 543436 - DNA, 15 bp, Homo sapiens
ctcactctttagaac

SEQ ID NO: 543437 - DNA, 15 bp, Homo sapiens
tcactctttagaacc

SEQ ID NO: 543438 - DNA, 15 bp, Homo sapiens
cactctttagaacct

SEQ ID NO: 543439 - DNA, 15 bp, Homo sapiens
actctttagaacctg

SEQ ID NO: 543440 - DNA, 15 bp, Homo sapiens
ctctttagaacctgg

SEQ ID NO: 543441 - DNA, 15 bp, Homo sapiens
tctttagaacctggc

SEQ ID NO: 543442 - DNA, 15 bp, Homo sapiens
ctttagaacctggct

SEQ ID NO: 543443 - DNA, 15 bp, Homo sapiens
tttagaacctggctg

SEQ ID NO: 543444 - DNA, 15 bp, Homo sapiens
ttagaacctggctga

SEQ ID NO: 543445 - DNA, 15 bp, Homo sapiens
tagaacctggctgat

SEQ ID NO: 543446 - DNA, 15 bp, Homo sapiens
agaacctggctgatg

SEQ ID NO: 543447 - DNA, 15 bp, Homo sapiens
gaacctggctgatgc

SEQ ID NO: 543448 - DNA, 15 bp, Homo sapiens
aacctggctgatgct

SEQ ID NO: 543449 - DNA, 15 bp, Homo sapiens
acctggctgatgctg

SEQ ID NO: 543450 - DNA, 15 bp, Homo sapiens
cctggctgatgctga

SEQ ID NO: 543451 - DNA, 15 bp, Homo sapiens
ctggctgatgctgag

SEQ ID NO: 543452 - DNA, 15 bp, Homo sapiens
tggctgatgctgagt

SEQ ID NO: 543453 - DNA, 15 bp, Homo sapiens
ggctgatgctgagtg

SEQ ID NO: 543454 - DNA, 15 bp, Homo sapiens
gctgatgctgagtga

SEQ ID NO: 543455 - DNA, 15 bp, Homo sapiens
ctgatgctgagtgaa

SEQ ID NO: 543456 - DNA, 15 bp, Homo sapiens
tgatgctgagtgaac

SEQ ID NO: 543457 - DNA, 15 bp, Homo sapiens
gatgctgagtgaaca

SEQ ID NO: 543458 - DNA, 15 bp, Homo sapiens
atgctgagtgaacac

SEQ ID NO: 543459 - DNA, 15 bp, Homo sapiens
tgctgagtgaacacg

SEQ ID NO: 543460 - DNA, 15 bp, Homo sapiens
gctgagtgaacacgg

SEQ ID NO: 543461 - DNA, 15 bp, Homo sapiens
ctgagtgaacacggt

SEQ ID NO: 543462 - DNA, 15 bp, Homo sapiens
tgagtgaacacggtc

SEQ ID NO: 543463 - DNA, 15 bp, Homo sapiens
gagtgaacacggtca

SEQ ID NO: 543464 - DNA, 15 bp, Homo sapiens
agtgaacacggtcaa

SEQ ID NO: 543465 - DNA, 15 bp, Homo sapiens
gtgaacacggtcaag

SEQ ID NO: 543466 - DNA, 15 bp, Homo sapiens
tgaacacggtcaagt

SEQ ID NO: 543467 - DNA, 15 bp, Homo sapiens
gaacacggtcaagtt

SEQ ID NO: 543468 - DNA, 15 bp, Homo sapiens
aacacggtcaagtta

SEQ ID NO: 543469 - DNA, 15 bp, Homo sapiens
acacggtcaagttag

SEQ ID NO: 543470 - DNA, 15 bp, Homo sapiens
cacggtcaagttagt

SEQ ID NO: 543471 - DNA, 15 bp, Homo sapiens
acggtcaagttagtg

SEQ ID NO: 543472 - DNA, 15 bp, Homo sapiens
cggtcaagttagtgg

SEQ ID NO: 543473 - DNA, 15 bp, Homo sapiens
ggtcaagttagtggg

SEQ ID NO: 543474 - DNA, 15 bp, Homo sapiens
gtcaagttagtgggc

SEQ ID NO: 543475 - DNA, 15 bp, Homo sapiens
tcaagttagtgggcc

SEQ ID NO: 543476 - DNA, 15 bp, Homo sapiens
caagttagtgggcca

SEQ ID NO: 543477 - DNA, 15 bp, Homo sapiens
aagttagtgggccag

SEQ ID NO: 543478 - DNA, 15 bp, Homo sapiens
agttagtgggccaga

SEQ ID NO: 543479 - DNA, 15 bp, Homo sapiens
gttagtgggccagag

SEQ ID NO: 543480 - DNA, 15 bp, Homo sapiens
ttagtgggccagagt

SEQ ID NO: 543481 - DNA, 15 bp, Homo sapiens
tagtgggccagagta

SEQ ID NO: 543482 - DNA, 15 bp, Homo sapiens
agtgggccagagtag

SEQ ID NO: 543483 - DNA, 15 bp, Homo sapiens
gtgggccagagtaga

SEQ ID NO: 543484 - DNA, 15 bp, Homo sapiens
tgggccagagtagat

SEQ ID NO: 543485 - DNA, 15 bp, Homo sapiens
gggccagagtagata

SEQ ID NO: 543486 - DNA, 15 bp, Homo sapiens
ggccagagtagataa

SEQ ID NO: 543487 - DNA, 15 bp, Homo sapiens
gccagagtagataaa

SEQ ID NO: 543488 - DNA, 15 bp, Homo sapiens
ccagagtagataaaa

SEQ ID NO: 543489 - DNA, 15 bp, Homo sapiens
cagagtagataaaaa

SEQ ID NO: 543490 - DNA, 15 bp, Homo sapiens
agagtagataaaaat

SEQ ID NO: 543491 - DNA, 15 bp, Homo sapiens
gagtagataaaaata

SEQ ID NO: 543492 - DNA, 15 bp, Homo sapiens
agtagataaaaataa

SEQ ID NO: 543493 - DNA, 15 bp, Homo sapiens
gtagataaaaataat

SEQ ID NO: 543494 - DNA, 15 bp, Homo sapiens
tagataaaaataatg

SEQ ID NO: 543495 - DNA, 15 bp, Homo sapiens
agataaaaataatgg

SEQ ID NO: 543496 - DNA, 15 bp, Homo sapiens
gataaaaataatgga

SEQ ID NO: 543497 - DNA, 15 bp, Homo sapiens
ataaaaataatggaa

SEQ ID NO: 543498 - DNA, 15 bp, Homo sapiens
taaaaataatggaaa

SEQ ID NO: 543499 - DNA, 15 bp, Homo sapiens
aaaaataatggaaac

SEQ ID NO: 543500 - DNA, 15 bp, Homo sapiens
aaaataatggaaaca

SEQ ID NO: 543501 - DNA, 15 bp, Homo sapiens
aaataatggaaacat

SEQ ID NO: 543502 - DNA, 15 bp, Homo sapiens
aataatggaaacatg

SEQ ID NO: 543503 - DNA, 15 bp, Homo sapiens
ataatggaaacatgc

SEQ ID NO: 543504 - DNA, 15 bp, Homo sapiens
taatggaaacatgca

SEQ ID NO: 543505 - DNA, 15 bp, Homo sapiens
aatggaaacatgcaa

SEQ ID NO: 543506 - DNA, 15 bp, Homo sapiens
atggaaacatgcaaa

SEQ ID NO: 543507 - DNA, 15 bp, Homo sapiens
tggaaacatgcaaag

SEQ ID NO: 543508 - DNA, 15 bp, Homo sapiens
ggaaacatgcaaagt

SEQ ID NO: 543509 - DNA, 15 bp, Homo sapiens
gaaacatgcaaagtg

SEQ ID NO: 543510 - DNA, 15 bp, Homo sapiens
aaacatgcaaagtga

SEQ ID NO: 543511 - DNA, 15 bp, Homo sapiens
aacatgcaaagtgag

SEQ ID NO: 543512 - DNA, 15 bp, Homo sapiens
acatgcaaagtgagt

SEQ ID NO: 543513 - DNA, 15 bp, Homo sapiens
catgcaaagtgagtc

SEQ ID NO: 543514 - DNA, 15 bp, Homo sapiens
atgcaaagtgagtca

SEQ ID NO: 543515 - DNA, 15 bp, Homo sapiens
tgcaaagtgagtcac

SEQ ID NO: 543516 - DNA, 15 bp, Homo sapiens
gcaaagtgagtcaca

SEQ ID NO: 543517 - DNA, 15 bp, Homo sapiens
caaagtgagtcacag

SEQ ID NO: 543518 - DNA, 15 bp, Homo sapiens
aaagtgagtcacaga

SEQ ID NO: 543519 - DNA, 15 bp, Homo sapiens
aagtgagtcacagac

SEQ ID NO: 543520 - DNA, 15 bp, Homo sapiens
agtgagtcacagaca

SEQ ID NO: 543521 - DNA, 15 bp, Homo sapiens
gtgagtcacagacag

SEQ ID NO: 543522 - DNA, 15 bp, Homo sapiens
tgagtcacagacagc

SEQ ID NO: 543523 - DNA, 15 bp, Homo sapiens
gagtcacagacagca

SEQ ID NO: 543524 - DNA, 15 bp, Homo sapiens
agtcacagacagcaa

SEQ ID NO: 543525 - DNA, 15 bp, Homo sapiens
gtcacagacagcaaa

SEQ ID NO: 543526 - DNA, 15 bp, Homo sapiens
tcacagacagcaaat

SEQ ID NO: 543527 - DNA, 15 bp, Homo sapiens
cacagacagcaaatc

SEQ ID NO: 543528 - DNA, 15 bp, Homo sapiens
acagacagcaaatcc

SEQ ID NO: 543529 - DNA, 15 bp, Homo sapiens
cagacagcaaatcca

SEQ ID NO: 543530 - DNA, 15 bp, Homo sapiens
agacagcaaatccaa

SEQ ID NO: 543531 - DNA, 15 bp, Homo sapiens
gacagcaaatccaac

SEQ ID NO: 543532 - DNA, 15 bp, Homo sapiens
acagcaaatccaacc

SEQ ID NO: 543533 - DNA, 15 bp, Homo sapiens
cagcaaatccaacca

SEQ ID NO: 543534 - DNA, 15 bp, Homo sapiens
agcaaatccaaccat

SEQ ID NO: 543535 - DNA, 15 bp, Homo sapiens
gcaaatccaaccatt

SEQ ID NO: 543536 - DNA, 15 bp, Homo sapiens
caaatccaaccattg

SEQ ID NO: 543537 - DNA, 15 bp, Homo sapiens
aaatccaaccattgc

SEQ ID NO: 543538 - DNA, 15 bp, Homo sapiens
aatccaaccattgcc

SEQ ID NO: 543539 - DNA, 15 bp, Homo sapiens
atccaaccattgcct

SEQ ID NO: 543540 - DNA, 15 bp, Homo sapiens
tccaaccattgccta

SEQ ID NO: 543541 - DNA, 15 bp, Homo sapiens
ccaaccattgcctag

SEQ ID NO: 543542 - DNA, 15 bp, Homo sapiens
caaccattgcctaga

SEQ ID NO: 543543 - DNA, 15 bp, Homo sapiens
aaccattgcctagaa

SEQ ID NO: 543544 - DNA, 15 bp, Homo sapiens
accattgcctagaat

SEQ ID NO: 543545 - DNA, 15 bp, Homo sapiens
ccattgcctagaatt

SEQ ID NO: 543546 - DNA, 15 bp, Homo sapiens
cattgcctagaattt

SEQ ID NO: 543547 - DNA, 15 bp, Homo sapiens
attgcctagaatttg

SEQ ID NO: 543548 - DNA, 15 bp, Homo sapiens
ttgcctagaatttgt

SEQ ID NO: 543549 - DNA, 15 bp, Homo sapiens
tgcctagaatttgtt

SEQ ID NO: 543550 - DNA, 15 bp, Homo sapiens
gcctagaatttgttg

SEQ ID NO: 543551 - DNA, 15 bp, Homo sapiens
cctagaatttgttgg

SEQ ID NO: 543552 - DNA, 15 bp, Homo sapiens
ctagaatttgttggg

SEQ ID NO: 543553 - DNA, 15 bp, Homo sapiens
tagaatttgttgggt

SEQ ID NO: 543554 - DNA, 15 bp, Homo sapiens
agaatttgttgggtg

SEQ ID NO: 543555 - DNA, 15 bp, Homo sapiens
gaatttgttgggtgt

SEQ ID NO: 543556 - DNA, 15 bp, Homo sapiens
aatttgttgggtgtc

SEQ ID NO: 543557 - DNA, 15 bp, Homo sapiens
atttgttgggtgtca

SEQ ID NO: 543558 - DNA, 15 bp, Homo sapiens
tttgttgggtgtcac

SEQ ID NO: 543559 - DNA, 15 bp, Homo sapiens
ttgttgggtgtcaca

SEQ ID NO: 543560 - DNA, 15 bp, Homo sapiens
tgttgggtgtcacag

SEQ ID NO: 543561 - DNA, 15 bp, Homo sapiens
gttgggtgtcacagg

SEQ ID NO: 543562 - DNA, 15 bp, Homo sapiens
ttgggtgtcacaggt

SEQ ID NO: 543563 - DNA, 15 bp, Homo sapiens
tgggtgtcacaggtc

SEQ ID NO: 543564 - DNA, 15 bp, Homo sapiens
gggtgtcacaggtca

SEQ ID NO: 543565 - DNA, 15 bp, Homo sapiens
ggtgtcacaggtcaa

SEQ ID NO: 543566 - DNA, 15 bp, Homo sapiens
gtgtcacaggtcaag

SEQ ID NO: 543567 - DNA, 15 bp, Homo sapiens
tgtcacaggtcaagc

SEQ ID NO: 543568 - DNA, 15 bp, Homo sapiens
gtcacaggtcaagct

SEQ ID NO: 543569 - DNA, 15 bp, Homo sapiens
tcacaggtcaagcta

SEQ ID NO: 543570 - DNA, 15 bp, Homo sapiens
cacaggtcaagctac

SEQ ID NO: 543571 - DNA, 15 bp, Homo sapiens
acaggtcaagctaca

SEQ ID NO: 543572 - DNA, 15 bp, Homo sapiens
caggtcaagctacaa

SEQ ID NO: 543573 - DNA, 15 bp, Homo sapiens
aggtcaagctacaaa

SEQ ID NO: 543574 - DNA, 15 bp, Homo sapiens
ggtcaagctacaaag

SEQ ID NO: 543575 - DNA, 15 bp, Homo sapiens
gtcaagctacaaaga

SEQ ID NO: 543576 - DNA, 15 bp, Homo sapiens
tcaagctacaaagat

SEQ ID NO: 543577 - DNA, 15 bp, Homo sapiens
caagctacaaagatc

SEQ ID NO: 543578 - DNA, 15 bp, Homo sapiens
aagctacaaagatca

SEQ ID NO: 543579 - DNA, 15 bp, Homo sapiens
agctacaaagatcac

SEQ ID NO: 543580 - DNA, 15 bp, Homo sapiens
gctacaaagatcaca

SEQ ID NO: 543581 - DNA, 15 bp, Homo sapiens
ctacaaagatcacat

SEQ ID NO: 543582 - DNA, 15 bp, Homo sapiens
tacaaagatcacatt

SEQ ID NO: 543583 - DNA, 15 bp, Homo sapiens
acaaagatcacattc

SEQ ID NO: 543584 - DNA, 15 bp, Homo sapiens
caaagatcacattcg

SEQ ID NO: 543585 - DNA, 15 bp, Homo sapiens
aaagatcacattcgc

SEQ ID NO: 543586 - DNA, 15 bp, Homo sapiens
aagatcacattcgcc

SEQ ID NO: 543587 - DNA, 15 bp, Homo sapiens
agatcacattcgcca

SEQ ID NO: 543588 - DNA, 15 bp, Homo sapiens
gatcacattcgccat

SEQ ID NO: 543589 - DNA, 15 bp, Homo sapiens
atcacattcgccatt

SEQ ID NO: 543590 - DNA, 15 bp, Homo sapiens
tcacattcgccattt

SEQ ID NO: 543591 - DNA, 15 bp, Homo sapiens
cacattcgccatttg

SEQ ID NO: 543592 - DNA, 15 bp, Homo sapiens
acattcgccatttgg

SEQ ID NO: 543593 - DNA, 15 bp, Homo sapiens
cattcgccatttgga

SEQ ID NO: 543594 - DNA, 15 bp, Homo sapiens
attcgccatttggac

SEQ ID NO: 543595 - DNA, 15 bp, Homo sapiens
ttcgccatttggact

SEQ ID NO: 543596 - DNA, 15 bp, Homo sapiens
tcgccatttggactc

SEQ ID NO: 543597 - DNA, 15 bp, Homo sapiens
cgccatttggactca

SEQ ID NO: 543598 - DNA, 15 bp, Homo sapiens
gccatttggactcag

SEQ ID NO: 543599 - DNA, 15 bp, Homo sapiens
ccatttggactcagt

SEQ ID NO: 543600 - DNA, 15 bp, Homo sapiens
catttggactcagtt

SEQ ID NO: 543601 - DNA, 15 bp, Homo sapiens
atttggactcagttg

SEQ ID NO: 543602 - DNA, 15 bp, Homo sapiens
tttggactcagttgg

SEQ ID NO: 543603 - DNA, 15 bp, Homo sapiens
ttggactcagttggc

SEQ ID NO: 543604 - DNA, 15 bp, Homo sapiens
tggactcagttggca

SEQ ID NO: 543605 - DNA, 15 bp, Homo sapiens
ggactcagttggcag

SEQ ID NO: 543606 - DNA, 15 bp, Homo sapiens
gactcagttggcagg

SEQ ID NO: 543607 - DNA, 15 bp, Homo sapiens
actcagttggcagga

SEQ ID NO: 543608 - DNA, 15 bp, Homo sapiens
ctcagttggcaggaa

SEQ ID NO: 543609 - DNA, 15 bp, Homo sapiens
tcagttggcaggaat

SEQ ID NO: 543610 - DNA, 15 bp, Homo sapiens
cagttggcaggaatg

SEQ ID NO: 543611 - DNA, 15 bp, Homo sapiens
agttggcaggaatgt

SEQ ID NO: 543612 - DNA, 15 bp, Homo sapiens
gttggcaggaatgtt

SEQ ID NO: 543613 - DNA, 15 bp, Homo sapiens
ttggcaggaatgtta

SEQ ID NO: 543614 - DNA, 15 bp, Homo sapiens
tggcaggaatgttat

SEQ ID NO: 543615 - DNA, 15 bp, Homo sapiens
ggcaggaatgttatg

SEQ ID NO: 543616 - DNA, 15 bp, Homo sapiens
gcaggaatgttatgc

SEQ ID NO: 543617 - DNA, 15 bp, Homo sapiens
caggaatgttatgca

SEQ ID NO: 543618 - DNA, 15 bp, Homo sapiens
aggaatgttatgcat

SEQ ID NO: 543619 - DNA, 15 bp, Homo sapiens
ggaatgttatgcatg

SEQ ID NO: 543620 - DNA, 15 bp, Homo sapiens
gaatgttatgcatgt

SEQ ID NO: 543621 - DNA, 15 bp, Homo sapiens
aatgttatgcatgtg

SEQ ID NO: 543622 - DNA, 15 bp, Homo sapiens
atgttatgcatgtgt

SEQ ID NO: 543623 - DNA, 15 bp, Homo sapiens
tgttatgcatgtgtg

SEQ ID NO: 543624 - DNA, 15 bp, Homo sapiens
gttatgcatgtgtga

SEQ ID NO: 543625 - DNA, 15 bp, Homo sapiens
ttatgcatgtgtgat

SEQ ID NO: 543626 - DNA, 15 bp, Homo sapiens
tatgcatgtgtgata

SEQ ID NO: 543627 - DNA, 15 bp, Homo sapiens
atgcatgtgtgatat

SEQ ID NO: 543628 - DNA, 15 bp, Homo sapiens
tgcatgtgtgatata

SEQ ID NO: 543629 - DNA, 15 bp, Homo sapiens
gcatgtgtgatataa

SEQ ID NO: 543630 - DNA, 15 bp, Homo sapiens
catgtgtgatataag

SEQ ID NO: 543631 - DNA, 15 bp, Homo sapiens
atgtgtgatataaga

SEQ ID NO: 543632 - DNA, 15 bp, Homo sapiens
tgtgtgatataagat

SEQ ID NO: 543633 - DNA, 15 bp, Homo sapiens
gtgtgatataagatg

SEQ ID NO: 543634 - DNA, 15 bp, Homo sapiens
tgtgatataagatgc

SEQ ID NO: 543635 - DNA, 15 bp, Homo sapiens
gtgatataagatgct

SEQ ID NO: 543636 - DNA, 15 bp, Homo sapiens
tgatataagatgctg

SEQ ID NO: 543637 - DNA, 15 bp, Homo sapiens
gatataagatgctgt

SEQ ID NO: 543638 - DNA, 15 bp, Homo sapiens
atataagatgctgtg

SEQ ID NO: 543639 - DNA, 15 bp, Homo sapiens
tataagatgctgtgc

SEQ ID NO: 543640 - DNA, 15 bp, Homo sapiens
ataagatgctgtgcg

SEQ ID NO: 543641 - DNA, 15 bp, Homo sapiens
taagatgctgtgcgc

SEQ ID NO: 543642 - DNA, 15 bp, Homo sapiens
aagatgctgtgcgct

SEQ ID NO: 543643 - DNA, 15 bp, Homo sapiens
agatgctgtgcgctg

SEQ ID NO: 543644 - DNA, 15 bp, Homo sapiens
gatgctgtgcgctga

SEQ ID NO: 543645 - DNA, 15 bp, Homo sapiens
atgctgtgcgctgaa

SEQ ID NO: 543646 - DNA, 15 bp, Homo sapiens
tgctgtgcgctgaaa

SEQ ID NO: 543647 - DNA, 15 bp, Homo sapiens
gctgtgcgctgaaag

SEQ ID NO: 543648 - DNA, 15 bp, Homo sapiens
ctgtgcgctgaaagt

SEQ ID NO: 543649 - DNA, 15 bp, Homo sapiens
tgtgcgctgaaagtc

SEQ ID NO: 543650 - DNA, 15 bp, Homo sapiens
gtgcgctgaaagtcc

SEQ ID NO: 543651 - DNA, 15 bp, Homo sapiens
tgcgctgaaagtccc

SEQ ID NO: 543652 - DNA, 15 bp, Homo sapiens
gcgctgaaagtccct

SEQ ID NO: 543653 - DNA, 15 bp, Homo sapiens
cgctgaaagtccctg

SEQ ID NO: 543654 - DNA, 15 bp, Homo sapiens
gctgaaagtccctga

SEQ ID NO: 543655 - DNA, 15 bp, Homo sapiens
ctgaaagtccctgaa

SEQ ID NO: 543656 - DNA, 15 bp, Homo sapiens
tgaaagtccctgaag

SEQ ID NO: 543657 - DNA, 15 bp, Homo sapiens
gaaagtccctgaagc

SEQ ID NO: 543658 - DNA, 15 bp, Homo sapiens
aaagtccctgaagct

SEQ ID NO: 543659 - DNA, 15 bp, Homo sapiens
aagtccctgaagctg

SEQ ID NO: 543660 - DNA, 15 bp, Homo sapiens
agtccctgaagctgt

SEQ ID NO: 543661 - DNA, 15 bp, Homo sapiens
gtccctgaagctgtg

SEQ ID NO: 543662 - DNA, 15 bp, Homo sapiens
tccctgaagctgtgc

SEQ ID NO: 543663 - DNA, 15 bp, Homo sapiens
ccctgaagctgtgca

SEQ ID NO: 543664 - DNA, 15 bp, Homo sapiens
cctgaagctgtgcaa

SEQ ID NO: 543665 - DNA, 15 bp, Homo sapiens
ctgaagctgtgcaaa

SEQ ID NO: 543666 - DNA, 15 bp, Homo sapiens
tgaagctgtgcaaat

SEQ ID NO: 543667 - DNA, 15 bp, Homo sapiens
gaagctgtgcaaata

SEQ ID NO: 543668 - DNA, 15 bp, Homo sapiens
aagctgtgcaaatac

SEQ ID NO: 543669 - DNA, 15 bp, Homo sapiens
agctgtgcaaatact

SEQ ID NO: 543670 - DNA, 15 bp, Homo sapiens
gctgtgcaaatactg

SEQ ID NO: 543671 - DNA, 15 bp, Homo sapiens
ctgtgcaaatactgg

SEQ ID NO: 543672 - DNA, 15 bp, Homo sapiens
tgtgcaaatactgga

SEQ ID NO: 543673 - DNA, 15 bp, Homo sapiens
gtgcaaatactggat

SEQ ID NO: 543674 - DNA, 15 bp, Homo sapiens
tgcaaatactggatc

SEQ ID NO: 543675 - DNA, 15 bp, Homo sapiens
gcaaatactggatcc

SEQ ID NO: 543676 - DNA, 15 bp, Homo sapiens
caaatactggatcca

SEQ ID NO: 543677 - DNA, 15 bp, Homo sapiens
aaatactggatccag

SEQ ID NO: 543678 - DNA, 15 bp, Homo sapiens
aatactggatccagc

SEQ ID NO: 543679 - DNA, 15 bp, Homo sapiens
atactggatccagca

SEQ ID NO: 543680 - DNA, 15 bp, Homo sapiens
tactggatccagcag

SEQ ID NO: 543681 - DNA, 15 bp, Homo sapiens
actggatccagcaga

SEQ ID NO: 543682 - DNA, 15 bp, Homo sapiens
ctggatccagcagaa

SEQ ID NO: 543683 - DNA, 15 bp, Homo sapiens
tggatccagcagaag

SEQ ID NO: 543684 - DNA, 15 bp, Homo sapiens
ggatccagcagaagt

SEQ ID NO: 543685 - DNA, 15 bp, Homo sapiens
gatccagcagaagtt

SEQ ID NO: 543686 - DNA, 15 bp, Homo sapiens
atccagcagaagttt

SEQ ID NO: 543687 - DNA, 15 bp, Homo sapiens
tccagcagaagtttt

SEQ ID NO: 543688 - DNA, 15 bp, Homo sapiens
ccagcagaagttttc

SEQ ID NO: 543689 - DNA, 15 bp, Homo sapiens
cagcagaagttttct

SEQ ID NO: 543690 - DNA, 15 bp, Homo sapiens
agcagaagttttctc

SEQ ID NO: 543691 - DNA, 15 bp, Homo sapiens
gcagaagttttctct

SEQ ID NO: 543692 - DNA, 15 bp, Homo sapiens
cagaagttttctctg

SEQ ID NO: 543693 - DNA, 15 bp, Homo sapiens
agaagttttctctgt

SEQ ID NO: 543694 - DNA, 15 bp, Homo sapiens
gaagttttctctgtt

SEQ ID NO: 543695 - DNA, 15 bp, Homo sapiens
aagttttctctgttg

SEQ ID NO: 543696 - DNA, 15 bp, Homo sapiens
agttttctctgttgt

SEQ ID NO: 543697 - DNA, 15 bp, Homo sapiens
gttttctctgttgtg

SEQ ID NO: 543698 - DNA, 15 bp, Homo sapiens
ttttctctgttgtgc

SEQ ID NO: 543699 - DNA, 15 bp, Homo sapiens
tttctctgttgtgcc

SEQ ID NO: 543700 - DNA, 15 bp, Homo sapiens
ttctctgttgtgccc

SEQ ID NO: 543701 - DNA, 15 bp, Homo sapiens
tctctgttgtgccca

SEQ ID NO: 543702 - DNA, 15 bp, Homo sapiens
ctctgttgtgcccat

SEQ ID NO: 543703 - DNA, 15 bp, Homo sapiens
tctgttgtgcccatc

SEQ ID NO: 543704 - DNA, 15 bp, Homo sapiens
ctgttgtgcccatct

SEQ ID NO: 543705 - DNA, 15 bp, Homo sapiens
tgttgtgcccatctg

SEQ ID NO: 543706 - DNA, 15 bp, Homo sapiens
gttgtgcccatctgc

SEQ ID NO: 543707 - DNA, 15 bp, Homo sapiens
ttgtgcccatctgcc

SEQ ID NO: 543708 - DNA, 15 bp, Homo sapiens
tgtgcccatctgcct

SEQ ID NO: 543709 - DNA, 15 bp, Homo sapiens
gtgcccatctgcctt

SEQ ID NO: 543710 - DNA, 15 bp, Homo sapiens
tgcccatctgccttt

SEQ ID NO: 543711 - DNA, 15 bp, Homo sapiens
gcccatctgcctttg

SEQ ID NO: 543712 - DNA, 15 bp, Homo sapiens
cccatctgcctttgt

SEQ ID NO: 543713 - DNA, 15 bp, Homo sapiens
ccatctgcctttgtc

SEQ ID NO: 543714 - DNA, 15 bp, Homo sapiens
catctgcctttgtct

SEQ ID NO: 543715 - DNA, 15 bp, Homo sapiens
atctgcctttgtcta

SEQ ID NO: 543716 - DNA, 15 bp, Homo sapiens
tctgcctttgtctaa

SEQ ID NO: 543717 - DNA, 15 bp, Homo sapiens
ctgcctttgtctaat

SEQ ID NO: 543718 - DNA, 15 bp, Homo sapiens
tgcctttgtctaatt

SEQ ID NO: 543719 - DNA, 15 bp, Homo sapiens
gcctttgtctaatta

SEQ ID NO: 543720 - DNA, 15 bp, Homo sapiens
cctttgtctaattag

SEQ ID NO: 543721 - DNA, 15 bp, Homo sapiens
ctttgtctaattagc

SEQ ID NO: 543722 - DNA, 15 bp, Homo sapiens
tttgtctaattagcc

SEQ ID NO: 543723 - DNA, 15 bp, Homo sapiens
ttgtctaattagcca

SEQ ID NO: 543724 - DNA, 15 bp, Homo sapiens
tgtctaattagccaa

SEQ ID NO: 543725 - DNA, 15 bp, Homo sapiens
gtctaattagccaag

SEQ ID NO: 543726 - DNA, 15 bp, Homo sapiens
tctaattagccaagg

SEQ ID NO: 543727 - DNA, 15 bp, Homo sapiens
ctaattagccaaggg

SEQ ID NO: 543728 - DNA, 15 bp, Homo sapiens
taattagccaagggt

SEQ ID NO: 543729 - DNA, 15 bp, Homo sapiens
aattagccaagggtc

SEQ ID NO: 543730 - DNA, 15 bp, Homo sapiens
attagccaagggtca

SEQ ID NO: 543731 - DNA, 15 bp, Homo sapiens
ttagccaagggtcac

SEQ ID NO: 543732 - DNA, 15 bp, Homo sapiens
tagccaagggtcact

SEQ ID NO: 543733 - DNA, 15 bp, Homo sapiens
agccaagggtcactt

SEQ ID NO: 543734 - DNA, 15 bp, Homo sapiens
gccaagggtcacttt

SEQ ID NO: 543735 - DNA, 15 bp, Homo sapiens
ccaagggtcactttg

SEQ ID NO: 543736 - DNA, 15 bp, Homo sapiens
caagggtcactttgg

SEQ ID NO: 543737 - DNA, 15 bp, Homo sapiens
aagggtcactttggc

SEQ ID NO: 543738 - DNA, 15 bp, Homo sapiens
agggtcactttggct

SEQ ID NO: 543739 - DNA, 15 bp, Homo sapiens
gggtcactttggctg

SEQ ID NO: 543740 - DNA, 15 bp, Homo sapiens
ggtcactttggctgc

SEQ ID NO: 543741 - DNA, 15 bp, Homo sapiens
gtcactttggctgcc

SEQ ID NO: 543742 - DNA, 15 bp, Homo sapiens
tcactttggctgcct

SEQ ID NO: 543743 - DNA, 15 bp, Homo sapiens
cactttggctgcctc

SEQ ID NO: 543744 - DNA, 15 bp, Homo sapiens
actttggctgcctcc

SEQ ID NO: 543745 - DNA, 15 bp, Homo sapiens
ctttggctgcctccc

SEQ ID NO: 543746 - DNA, 15 bp, Homo sapiens
tttggctgcctccct

SEQ ID NO: 543747 - DNA, 15 bp, Homo sapiens
ttggctgcctccctt

SEQ ID NO: 543748 - DNA, 15 bp, Homo sapiens
tggctgcctcccttc

SEQ ID NO: 543749 - DNA, 15 bp, Homo sapiens
ggctgcctcccttcc

SEQ ID NO: 543750 - DNA, 15 bp, Homo sapiens
gctgcctcccttcct

SEQ ID NO: 543751 - DNA, 15 bp, Homo sapiens
ctgcctcccttcctt

SEQ ID NO: 543752 - DNA, 15 bp, Homo sapiens
tgcctcccttccttt

SEQ ID NO: 543753 - DNA, 15 bp, Homo sapiens
gcctcccttcctttc

SEQ ID NO: 543754 - DNA, 15 bp, Homo sapiens
cctcccttcctttca

SEQ ID NO: 543755 - DNA, 15 bp, Homo sapiens
ctcccttcctttcac

SEQ ID NO: 543756 - DNA, 15 bp, Homo sapiens
tcccttcctttcaca

SEQ ID NO: 543757 - DNA, 15 bp, Homo sapiens
cccttcctttcacat

SEQ ID NO: 543758 - DNA, 15 bp, Homo sapiens
ccttcctttcacatg

SEQ ID NO: 543759 - DNA, 15 bp, Homo sapiens
cttcctttcacatgg

SEQ ID NO: 543760 - DNA, 15 bp, Homo sapiens
ttcctttcacatgga

SEQ ID NO: 543761 - DNA, 15 bp, Homo sapiens
tcctttcacatggag

SEQ ID NO: 543762 - DNA, 15 bp, Homo sapiens
cctttcacatggagc

SEQ ID NO: 543763 - DNA, 15 bp, Homo sapiens
ctttcacatggagca

SEQ ID NO: 543764 - DNA, 15 bp, Homo sapiens
tttcacatggagcaa

SEQ ID NO: 543765 - DNA, 15 bp, Homo sapiens
ttcacatggagcaaa

SEQ ID NO: 543766 - DNA, 15 bp, Homo sapiens
tcacatggagcaaag

SEQ ID NO: 543767 - DNA, 15 bp, Homo sapiens
cacatggagcaaagg

SEQ ID NO: 543768 - DNA, 15 bp, Homo sapiens
acatggagcaaaggt

SEQ ID NO: 543769 - DNA, 15 bp, Homo sapiens
catggagcaaaggta

SEQ ID NO: 543770 - DNA, 15 bp, Homo sapiens
atggagcaaaggtac

SEQ ID NO: 543771 - DNA, 15 bp, Homo sapiens
tggagcaaaggtacc

SEQ ID NO: 543772 - DNA, 15 bp, Homo sapiens
ggagcaaaggtaccc

SEQ ID NO: 543773 - DNA, 15 bp, Homo sapiens
gagcaaaggtaccca

SEQ ID NO: 543774 - DNA, 15 bp, Homo sapiens
agcaaaggtacccag

SEQ ID NO: 543775 - DNA, 15 bp, Homo sapiens
gcaaaggtacccaga

SEQ ID NO: 543776 - DNA, 15 bp, Homo sapiens
caaaggtacccagag

SEQ ID NO: 543777 - DNA, 15 bp, Homo sapiens
aaaggtacccagaga

SEQ ID NO: 543778 - DNA, 15 bp, Homo sapiens
aaggtacccagagag

SEQ ID NO: 543779 - DNA, 15 bp, Homo sapiens
aggtacccagagagg

SEQ ID NO: 543780 - DNA, 15 bp, Homo sapiens
ggtacccagagaggc

SEQ ID NO: 543781 - DNA, 15 bp, Homo sapiens
gtacccagagaggca

SEQ ID NO: 543782 - DNA, 15 bp, Homo sapiens
tacccagagaggcac

SEQ ID NO: 543783 - DNA, 15 bp, Homo sapiens
acccagagaggcaca

SEQ ID NO: 543784 - DNA, 15 bp, Homo sapiens
cccagagaggcacat

SEQ ID NO: 543785 - DNA, 15 bp, Homo sapiens
ccagagaggcacatg

SEQ ID NO: 543786 - DNA, 15 bp, Homo sapiens
cagagaggcacatgt

SEQ ID NO: 543787 - DNA, 15 bp, Homo sapiens
agagaggcacatgtt

SEQ ID NO: 543788 - DNA, 15 bp, Homo sapiens
gagaggcacatgttg

SEQ ID NO: 543789 - DNA, 15 bp, Homo sapiens
agaggcacatgttga

SEQ ID NO: 543790 - DNA, 15 bp, Homo sapiens
gaggcacatgttgat

SEQ ID NO: 543791 - DNA, 15 bp, Homo sapiens
aggcacatgttgatg

SEQ ID NO: 543792 - DNA, 15 bp, Homo sapiens
ggcacatgttgatgc

SEQ ID NO: 543793 - DNA, 15 bp, Homo sapiens
gcacatgttgatgca

SEQ ID NO: 543794 - DNA, 15 bp, Homo sapiens
cacatgttgatgcat

SEQ ID NO: 543795 - DNA, 15 bp, Homo sapiens
acatgttgatgcatt

SEQ ID NO: 543796 - DNA, 15 bp, Homo sapiens
catgttgatgcattc

SEQ ID NO: 543797 - DNA, 15 bp, Homo sapiens
atgttgatgcattca

SEQ ID NO: 543798 - DNA, 15 bp, Homo sapiens
tgttgatgcattcat

SEQ ID NO: 543799 - DNA, 15 bp, Homo sapiens
gttgatgcattcata

SEQ ID NO: 543800 - DNA, 15 bp, Homo sapiens
ttgatgcattcatat

SEQ ID NO: 543801 - DNA, 15 bp, Homo sapiens
tgatgcattcatatg

SEQ ID NO: 543802 - DNA, 15 bp, Homo sapiens
gatgcattcatatgc

SEQ ID NO: 543803 - DNA, 15 bp, Homo sapiens
atgcattcatatgca

SEQ ID NO: 543804 - DNA, 15 bp, Homo sapiens
tgcattcatatgcaa

SEQ ID NO: 543805 - DNA, 15 bp, Homo sapiens
gcattcatatgcaaa

SEQ ID NO: 543806 - DNA, 15 bp, Homo sapiens
cattcatatgcaaag

SEQ ID NO: 543807 - DNA, 15 bp, Homo sapiens
attcatatgcaaaga

SEQ ID NO: 543808 - DNA, 15 bp, Homo sapiens
ttcatatgcaaagaa

SEQ ID NO: 543809 - DNA, 15 bp, Homo sapiens
tcatatgcaaagaag

SEQ ID NO: 543810 - DNA, 15 bp, Homo sapiens
catatgcaaagaagt

SEQ ID NO: 543811 - DNA, 15 bp, Homo sapiens
atatgcaaagaagtt

SEQ ID NO: 543812 - DNA, 15 bp, Homo sapiens
tatgcaaagaagttc

SEQ ID NO: 543813 - DNA, 15 bp, Homo sapiens
atgcaaagaagttct

SEQ ID NO: 543814 - DNA, 15 bp, Homo sapiens
tgcaaagaagttctt

SEQ ID NO: 543815 - DNA, 15 bp, Homo sapiens
gcaaagaagttcttg

SEQ ID NO: 543816 - DNA, 15 bp, Homo sapiens
caaagaagttcttgt

SEQ ID NO: 543817 - DNA, 15 bp, Homo sapiens
aaagaagttcttgtc

SEQ ID NO: 543818 - DNA, 15 bp, Homo sapiens
aagaagttcttgtct

SEQ ID NO: 543819 - DNA, 15 bp, Homo sapiens
agaagttcttgtctt

SEQ ID NO: 543820 - DNA, 15 bp, Homo sapiens
gaagttcttgtcttt

SEQ ID NO: 543821 - DNA, 15 bp, Homo sapiens
aagttcttgtctttc

SEQ ID NO: 543822 - DNA, 15 bp, Homo sapiens
agttcttgtctttct

SEQ ID NO: 543823 - DNA, 15 bp, Homo sapiens
gttcttgtctttctc

SEQ ID NO: 543824 - DNA, 15 bp, Homo sapiens
ttcttgtctttctct

SEQ ID NO: 543825 - DNA, 15 bp, Homo sapiens
tcttgtctttctctc

SEQ ID NO: 543826 - DNA, 15 bp, Homo sapiens
cttgtctttctctct

SEQ ID NO: 543827 - DNA, 15 bp, Homo sapiens
ttgtctttctctctc

SEQ ID NO: 543828 - DNA, 15 bp, Homo sapiens
tgtctttctctctct

SEQ ID NO: 543829 - DNA, 15 bp, Homo sapiens
gtctttctctctctc

SEQ ID NO: 543830 - DNA, 15 bp, Homo sapiens
tctttctctctctca

SEQ ID NO: 543831 - DNA, 15 bp, Homo sapiens
ctttctctctctcaa

SEQ ID NO: 543832 - DNA, 15 bp, Homo sapiens
tttctctctctcaag

SEQ ID NO: 543833 - DNA, 15 bp, Homo sapiens
ttctctctctcaagt

SEQ ID NO: 543834 - DNA, 15 bp, Homo sapiens
tctctctctcaagtc

SEQ ID NO: 543835 - DNA, 15 bp, Homo sapiens
ctctctctcaagtca

SEQ ID NO: 543836 - DNA, 15 bp, Homo sapiens
tctctctcaagtcat

SEQ ID NO: 543837 - DNA, 15 bp, Homo sapiens
ctctctcaagtcatt

SEQ ID NO: 543838 - DNA, 15 bp, Homo sapiens
tctctcaagtcattg

SEQ ID NO: 543839 - DNA, 15 bp, Homo sapiens
ctctcaagtcattgt

SEQ ID NO: 543840 - DNA, 15 bp, Homo sapiens
tctcaagtcattgtt

SEQ ID NO: 543841 - DNA, 15 bp, Homo sapiens
ctcaagtcattgttc

SEQ ID NO: 543842 - DNA, 15 bp, Homo sapiens
tcaagtcattgttca

SEQ ID NO: 543843 - DNA, 15 bp, Homo sapiens
caagtcattgttcag

SEQ ID NO: 543844 - DNA, 15 bp, Homo sapiens
aagtcattgttcagt

SEQ ID NO: 543845 - DNA, 15 bp, Homo sapiens
agtcattgttcagtg

SEQ ID NO: 543846 - DNA, 15 bp, Homo sapiens
gtcattgttcagtga

SEQ ID NO: 543847 - DNA, 15 bp, Homo sapiens
tcattgttcagtgag

SEQ ID NO: 543848 - DNA, 15 bp, Homo sapiens
cattgttcagtgagg

SEQ ID NO: 543849 - DNA, 15 bp, Homo sapiens
attgttcagtgagga

SEQ ID NO: 543850 - DNA, 15 bp, Homo sapiens
ttgttcagtgaggag

SEQ ID NO: 543851 - DNA, 15 bp, Homo sapiens
tgttcagtgaggagt

SEQ ID NO: 543852 - DNA, 15 bp, Homo sapiens
gttcagtgaggagtc

SEQ ID NO: 543853 - DNA, 15 bp, Homo sapiens
ttcagtgaggagtca

SEQ ID NO: 543854 - DNA, 15 bp, Homo sapiens
tcagtgaggagtcag

SEQ ID NO: 543855 - DNA, 15 bp, Homo sapiens
cagtgaggagtcagc

SEQ ID NO: 543856 - DNA, 15 bp, Homo sapiens
agtgaggagtcagct

SEQ ID NO: 543857 - DNA, 15 bp, Homo sapiens
gtgaggagtcagctc

SEQ ID NO: 543858 - DNA, 15 bp, Homo sapiens
tgaggagtcagctcc

SEQ ID NO: 543859 - DNA, 15 bp, Homo sapiens
gaggagtcagctccc

SEQ ID NO: 543860 - DNA, 15 bp, Homo sapiens
aggagtcagctccca

SEQ ID NO: 543861 - DNA, 15 bp, Homo sapiens
ggagtcagctcccac

SEQ ID NO: 543862 - DNA, 15 bp, Homo sapiens
gagtcagctcccaca

SEQ ID NO: 543863 - DNA, 15 bp, Homo sapiens
agtcagctcccacat

SEQ ID NO: 543864 - DNA, 15 bp, Homo sapiens
gtcagctcccacatg

SEQ ID NO: 543865 - DNA, 15 bp, Homo sapiens
tcagctcccacatgc

SEQ ID NO: 543866 - DNA, 15 bp, Homo sapiens
cagctcccacatgct

SEQ ID NO: 543867 - DNA, 15 bp, Homo sapiens
agctcccacatgctc

SEQ ID NO: 543868 - DNA, 15 bp, Homo sapiens
gctcccacatgctcc

SEQ ID NO: 543869 - DNA, 15 bp, Homo sapiens
ctcccacatgctcct

SEQ ID NO: 543870 - DNA, 15 bp, Homo sapiens
tcccacatgctcctc

SEQ ID NO: 543871 - DNA, 15 bp, Homo sapiens
cccacatgctcctcc

SEQ ID NO: 543872 - DNA, 15 bp, Homo sapiens
ccacatgctcctcct

SEQ ID NO: 543873 - DNA, 15 bp, Homo sapiens
cacatgctcctccta

SEQ ID NO: 543874 - DNA, 15 bp, Homo sapiens
acatgctcctcctat

SEQ ID NO: 543875 - DNA, 15 bp, Homo sapiens
catgctcctcctatc

SEQ ID NO: 543876 - DNA, 15 bp, Homo sapiens
atgctcctcctatct

SEQ ID NO: 543877 - DNA, 15 bp, Homo sapiens
tgctcctcctatctg

SEQ ID NO: 543878 - DNA, 15 bp, Homo sapiens
gctcctcctatctgg

SEQ ID NO: 543879 - DNA, 15 bp, Homo sapiens
ctcctcctatctggg

SEQ ID NO: 543880 - DNA, 15 bp, Homo sapiens
tcctcctatctgggc

SEQ ID NO: 543881 - DNA, 15 bp, Homo sapiens
cctcctatctgggct

SEQ ID NO: 543882 - DNA, 15 bp, Homo sapiens
ctcctatctgggctg

SEQ ID NO: 543883 - DNA, 15 bp, Homo sapiens
tcctatctgggctgc

SEQ ID NO: 543884 - DNA, 15 bp, Homo sapiens
cctatctgggctgca

SEQ ID NO: 543885 - DNA, 15 bp, Homo sapiens
ctatctgggctgcaa

SEQ ID NO: 543886 - DNA, 15 bp, Homo sapiens
tatctgggctgcaat

SEQ ID NO: 543887 - DNA, 15 bp, Homo sapiens
atctgggctgcaatc

SEQ ID NO: 543888 - DNA, 15 bp, Homo sapiens
tctgggctgcaatca

SEQ ID NO: 543889 - DNA, 15 bp, Homo sapiens
ctgggctgcaatcag

SEQ ID NO: 543890 - DNA, 15 bp, Homo sapiens
tgggctgcaatcagc

SEQ ID NO: 543891 - DNA, 15 bp, Homo sapiens
gggctgcaatcagca

SEQ ID NO: 543892 - DNA, 15 bp, Homo sapiens
ggctgcaatcagcac

SEQ ID NO: 543893 - DNA, 15 bp, Homo sapiens
gctgcaatcagcaca

SEQ ID NO: 543894 - DNA, 15 bp, Homo sapiens
ctgcaatcagcacag

SEQ ID NO: 543895 - DNA, 15 bp, Homo sapiens
tgcaatcagcacagt

SEQ ID NO: 543896 - DNA, 15 bp, Homo sapiens
gcaatcagcacagtg

SEQ ID NO: 543897 - DNA, 15 bp, Homo sapiens
caatcagcacagtga

SEQ ID NO: 543898 - DNA, 15 bp, Homo sapiens
aatcagcacagtgag

SEQ ID NO: 543899 - DNA, 15 bp, Homo sapiens
atcagcacagtgagg

SEQ ID NO: 543900 - DNA, 15 bp, Homo sapiens
tcagcacagtgagga

SEQ ID NO: 543901 - DNA, 15 bp, Homo sapiens
cagcacagtgaggag

SEQ ID NO: 543902 - DNA, 15 bp, Homo sapiens
agcacagtgaggaga

SEQ ID NO: 543903 - DNA, 15 bp, Homo sapiens
gcacagtgaggagag

SEQ ID NO: 543904 - DNA, 15 bp, Homo sapiens
cacagtgaggagagg

SEQ ID NO: 543905 - DNA, 15 bp, Homo sapiens
acagtgaggagagga

SEQ ID NO: 543906 - DNA, 15 bp, Homo sapiens
cagtgaggagaggag

SEQ ID NO: 543907 - DNA, 15 bp, Homo sapiens
agtgaggagaggagc

SEQ ID NO: 543908 - DNA, 15 bp, Homo sapiens
gtgaggagaggagcg

SEQ ID NO: 543909 - DNA, 15 bp, Homo sapiens
tgaggagaggagcga

SEQ ID NO: 543910 - DNA, 15 bp, Homo sapiens
gaggagaggagcgac

SEQ ID NO: 543911 - DNA, 15 bp, Homo sapiens
aggagaggagcgaca

SEQ ID NO: 543912 - DNA, 15 bp, Homo sapiens
ggagaggagcgacag

SEQ ID NO: 543913 - DNA, 15 bp, Homo sapiens
gagaggagcgacaga

SEQ ID NO: 543914 - DNA, 15 bp, Homo sapiens
agaggagcgacagag

SEQ ID NO: 543915 - DNA, 15 bp, Homo sapiens
gaggagcgacagagc

SEQ ID NO: 543916 - DNA, 15 bp, Homo sapiens
aggagcgacagagca

SEQ ID NO: 543917 - DNA, 15 bp, Homo sapiens
ggagcgacagagcac

SEQ ID NO: 543918 - DNA, 15 bp, Homo sapiens
gagcgacagagcaca

SEQ ID NO: 543919 - DNA, 15 bp, Homo sapiens
agcgacagagcacat

SEQ ID NO: 543920 - DNA, 15 bp, Homo sapiens
gcgacagagcacatg

SEQ ID NO: 543921 - DNA, 15 bp, Homo sapiens
cgacagagcacatga

SEQ ID NO: 543922 - DNA, 15 bp, Homo sapiens
gacagagcacatgat

SEQ ID NO: 543923 - DNA, 15 bp, Homo sapiens
acagagcacatgatt

SEQ ID NO: 543924 - DNA, 15 bp, Homo sapiens
cagagcacatgatta

SEQ ID NO: 543925 - DNA, 15 bp, Homo sapiens
agagcacatgattat

SEQ ID NO: 543926 - DNA, 15 bp, Homo sapiens
gagcacatgattatg

SEQ ID NO: 543927 - DNA, 15 bp, Homo sapiens
agcacatgattatga

SEQ ID NO: 543928 - DNA, 15 bp, Homo sapiens
gcacatgattatgac

SEQ ID NO: 543929 - DNA, 15 bp, Homo sapiens
cacatgattatgacc

SEQ ID NO: 543930 - DNA, 15 bp, Homo sapiens
acatgattatgaccg

SEQ ID NO: 543931 - DNA, 15 bp, Homo sapiens
catgattatgaccgg

SEQ ID NO: 543932 - DNA, 15 bp, Homo sapiens
atgattatgaccggg

SEQ ID NO: 543933 - DNA, 15 bp, Homo sapiens
tgattatgaccgggg

SEQ ID NO: 543934 - DNA, 15 bp, Homo sapiens
gattatgaccggggc

SEQ ID NO: 543935 - DNA, 15 bp, Homo sapiens
attatgaccggggct

SEQ ID NO: 543936 - DNA, 15 bp, Homo sapiens
ttatgaccggggctt

SEQ ID NO: 543937 - DNA, 15 bp, Homo sapiens
tatgaccggggcttg

SEQ ID NO: 543938 - DNA, 15 bp, Homo sapiens
atgaccggggcttgc

SEQ ID NO: 543939 - DNA, 15 bp, Homo sapiens
tgaccggggcttgct

SEQ ID NO: 543940 - DNA, 15 bp, Homo sapiens
gaccggggcttgctg

SEQ ID NO: 543941 - DNA, 15 bp, Homo sapiens
accggggcttgctgc

SEQ ID NO: 543942 - DNA, 15 bp, Homo sapiens
ccggggcttgctgct

SEQ ID NO: 543943 - DNA, 15 bp, Homo sapiens
cggggcttgctgctg

SEQ ID NO: 543944 - DNA, 15 bp, Homo sapiens
ggggcttgctgctga

SEQ ID NO: 543945 - DNA, 15 bp, Homo sapiens
gggcttgctgctgag

SEQ ID NO: 543946 - DNA, 15 bp, Homo sapiens
ggcttgctgctgagc

SEQ ID NO: 543947 - DNA, 15 bp, Homo sapiens
gcttgctgctgagct

SEQ ID NO: 543948 - DNA, 15 bp, Homo sapiens
cttgctgctgagctg

SEQ ID NO: 543949 - DNA, 15 bp, Homo sapiens
ttgctgctgagctgc

SEQ ID NO: 543950 - DNA, 15 bp, Homo sapiens
tgctgctgagctgca

SEQ ID NO: 543951 - DNA, 15 bp, Homo sapiens
gctgctgagctgcag

SEQ ID NO: 543952 - DNA, 15 bp, Homo sapiens
ctgctgagctgcagg

SEQ ID NO: 543953 - DNA, 15 bp, Homo sapiens
tgctgagctgcaggg

SEQ ID NO: 543954 - DNA, 15 bp, Homo sapiens
gctgagctgcagggg

SEQ ID NO: 543955 - DNA, 15 bp, Homo sapiens
ctgagctgcaggggt

SEQ ID NO: 543956 - DNA, 15 bp, Homo sapiens
tgagctgcaggggtt

SEQ ID NO: 543957 - DNA, 15 bp, Homo sapiens
gagctgcaggggttc

SEQ ID NO: 543958 - DNA, 15 bp, Homo sapiens
agctgcaggggttca

SEQ ID NO: 543959 - DNA, 15 bp, Homo sapiens
gctgcaggggttcag

SEQ ID NO: 543960 - DNA, 15 bp, Homo sapiens
ctgcaggggttcaga

SEQ ID NO: 543961 - DNA, 15 bp, Homo sapiens
tgcaggggttcagag

SEQ ID NO: 543962 - DNA, 15 bp, Homo sapiens
gcaggggttcagagt

SEQ ID NO: 543963 - DNA, 15 bp, Homo sapiens
caggggttcagagta

SEQ ID NO: 543964 - DNA, 15 bp, Homo sapiens
aggggttcagagtac

SEQ ID NO: 543965 - DNA, 15 bp, Homo sapiens
ggggttcagagtact

SEQ ID NO: 543966 - DNA, 15 bp, Homo sapiens
gggttcagagtactg

SEQ ID NO: 543967 - DNA, 15 bp, Homo sapiens
ggttcagagtactgc

SEQ ID NO: 543968 - DNA, 15 bp, Homo sapiens
gttcagagtactgct

SEQ ID NO: 543969 - DNA, 15 bp, Homo sapiens
ttcagagtactgcta

SEQ ID NO: 543970 - DNA, 15 bp, Homo sapiens
tcagagtactgctac

SEQ ID NO: 543971 - DNA, 15 bp, Homo sapiens
cagagtactgctacc

SEQ ID NO: 543972 - DNA, 15 bp, Homo sapiens
agagtactgctacct

SEQ ID NO: 543973 - DNA, 15 bp, Homo sapiens
gagtactgctacctg

SEQ ID NO: 543974 - DNA, 15 bp, Homo sapiens
agtactgctacctgt

SEQ ID NO: 543975 - DNA, 15 bp, Homo sapiens
gtactgctacctgtg

SEQ ID NO: 543976 - DNA, 15 bp, Homo sapiens
tactgctacctgtgc

SEQ ID NO: 543977 - DNA, 15 bp, Homo sapiens
actgctacctgtgca

SEQ ID NO: 543978 - DNA, 15 bp, Homo sapiens
ctgctacctgtgcaa

SEQ ID NO: 543979 - DNA, 15 bp, Homo sapiens
tgctacctgtgcaat

SEQ ID NO: 543980 - DNA, 15 bp, Homo sapiens
gctacctgtgcaatg

SEQ ID NO: 543981 - DNA, 15 bp, Homo sapiens
ctacctgtgcaatgg

SEQ ID NO: 543982 - DNA, 15 bp, Homo sapiens
tacctgtgcaatggc

SEQ ID NO: 543983 - DNA, 15 bp, Homo sapiens
acctgtgcaatggca

SEQ ID NO: 543984 - DNA, 15 bp, Homo sapiens
cctgtgcaatggcag

SEQ ID NO: 543985 - DNA, 15 bp, Homo sapiens
ctgtgcaatggcagc

SEQ ID NO: 543986 - DNA, 15 bp, Homo sapiens
tgtgcaatggcagct

SEQ ID NO: 543987 - DNA, 15 bp, Homo sapiens
gtgcaatggcagctt

SEQ ID NO: 543988 - DNA, 15 bp, Homo sapiens
tgcaatggcagcttc

SEQ ID NO: 543989 - DNA, 15 bp, Homo sapiens
gcaatggcagcttcc

SEQ ID NO: 543990 - DNA, 15 bp, Homo sapiens
caatggcagcttccc

SEQ ID NO: 543991 - DNA, 15 bp, Homo sapiens
aatggcagcttcccc

SEQ ID NO: 543992 - DNA, 15 bp, Homo sapiens
atggcagcttcccca

SEQ ID NO: 543993 - DNA, 15 bp, Homo sapiens
tggcagcttccccag

SEQ ID NO: 543994 - DNA, 15 bp, Homo sapiens
ggcagcttccccaga

SEQ ID NO: 543995 - DNA, 15 bp, Homo sapiens
gcagcttccccagag

SEQ ID NO: 543996 - DNA, 15 bp, Homo sapiens
cagcttccccagagc

SEQ ID NO: 543997 - DNA, 15 bp, Homo sapiens
agcttccccagagcg

SEQ ID NO: 543998 - DNA, 15 bp, Homo sapiens
gcttccccagagcgc

SEQ ID NO: 543999 - DNA, 15 bp, Homo sapiens
cttccccagagcgcc

SEQ ID NO: 544000 - DNA, 15 bp, Homo sapiens
ttccccagagcgccc

SEQ ID NO: 544001 - DNA, 15 bp, Homo sapiens
tccccagagcgccca

SEQ ID NO: 544002 - DNA, 15 bp, Homo sapiens
ccccagagcgcccag

SEQ ID NO: 544003 - DNA, 15 bp, Homo sapiens
cccagagcgcccagg

SEQ ID NO: 544004 - DNA, 15 bp, Homo sapiens
ccagagcgcccaggg

SEQ ID NO: 544005 - DNA, 15 bp, Homo sapiens
cagagcgcccagggg

SEQ ID NO: 544006 - DNA, 15 bp, Homo sapiens
agagcgcccaggggc

SEQ ID NO: 544007 - DNA, 15 bp, Homo sapiens
gagcgcccaggggct

SEQ ID NO: 544008 - DNA, 15 bp, Homo sapiens
agcgcccaggggctc

SEQ ID NO: 544009 - DNA, 15 bp, Homo sapiens
gcgcccaggggctcc

SEQ ID NO: 544010 - DNA, 15 bp, Homo sapiens
cgcccaggggctccg

SEQ ID NO: 544011 - DNA, 15 bp, Homo sapiens
gcccaggggctccga

SEQ ID NO: 544012 - DNA, 15 bp, Homo sapiens
cccaggggctccgag

SEQ ID NO: 544013 - DNA, 15 bp, Homo sapiens
ccaggggctccgagg

SEQ ID NO: 544014 - DNA, 15 bp, Homo sapiens
caggggctccgaggc

SEQ ID NO: 544015 - DNA, 15 bp, Homo sapiens
aggggctccgaggcc

SEQ ID NO: 544016 - DNA, 15 bp, Homo sapiens
ggggctccgaggcca

SEQ ID NO: 544017 - DNA, 15 bp, Homo sapiens
gggctccgaggccac

SEQ ID NO: 544018 - DNA, 15 bp, Homo sapiens
ggctccgaggccaca

SEQ ID NO: 544019 - DNA, 15 bp, Homo sapiens
gctccgaggccacag

SEQ ID NO: 544020 - DNA, 15 bp, Homo sapiens
ctccgaggccacaga

SEQ ID NO: 544021 - DNA, 15 bp, Homo sapiens
tccgaggccacagac

SEQ ID NO: 544022 - DNA, 15 bp, Homo sapiens
ccgaggccacagaca

SEQ ID NO: 544023 - DNA, 15 bp, Homo sapiens
cgaggccacagacag

SEQ ID NO: 544024 - DNA, 15 bp, Homo sapiens
gaggccacagacaga

SEQ ID NO: 544025 - DNA, 15 bp, Homo sapiens
aggccacagacagaa

SEQ ID NO: 544026 - DNA, 15 bp, Homo sapiens
ggccacagacagaaa

SEQ ID NO: 544027 - DNA, 15 bp, Homo sapiens
gccacagacagaaaa

SEQ ID NO: 544028 - DNA, 15 bp, Homo sapiens
ccacagacagaaaat

SEQ ID NO: 544029 - DNA, 15 bp, Homo sapiens
cacagacagaaaata

SEQ ID NO: 544030 - DNA, 15 bp, Homo sapiens
acagacagaaaatat

SEQ ID NO: 544031 - DNA, 15 bp, Homo sapiens
cagacagaaaatatc

SEQ ID NO: 544032 - DNA, 15 bp, Homo sapiens
agacagaaaatatct

SEQ ID NO: 544033 - DNA, 15 bp, Homo sapiens
gacagaaaatatctt

SEQ ID NO: 544034 - DNA, 15 bp, Homo sapiens
acagaaaatatcttt

SEQ ID NO: 544035 - DNA, 15 bp, Homo sapiens
cagaaaatatctttg

SEQ ID NO: 544036 - DNA, 15 bp, Homo sapiens
agaaaatatctttgc

SEQ ID NO: 544037 - DNA, 15 bp, Homo sapiens
gaaaatatctttgct

SEQ ID NO: 544038 - DNA, 15 bp, Homo sapiens
aaaatatctttgcta

SEQ ID NO: 544039 - DNA, 15 bp, Homo sapiens
aaatatctttgctac

SEQ ID NO: 544040 - DNA, 15 bp, Homo sapiens
aatatctttgctacc

SEQ ID NO: 544041 - DNA, 15 bp, Homo sapiens
atatctttgctacca

SEQ ID NO: 544042 - DNA, 15 bp, Homo sapiens
tatctttgctaccac

SEQ ID NO: 544043 - DNA, 15 bp, Homo sapiens
atctttgctaccacg

SEQ ID NO: 544044 - DNA, 15 bp, Homo sapiens
tctttgctaccacgt

SEQ ID NO: 544045 - DNA, 15 bp, Homo sapiens
ctttgctaccacgtg

SEQ ID NO: 544046 - DNA, 15 bp, Homo sapiens
tttgctaccacgtgc

SEQ ID NO: 544047 - DNA, 15 bp, Homo sapiens
ttgctaccacgtgct

SEQ ID NO: 544048 - DNA, 15 bp, Homo sapiens
tgctaccacgtgctg

SEQ ID NO: 544049 - DNA, 15 bp, Homo sapiens
gctaccacgtgctga

SEQ ID NO: 544050 - DNA, 15 bp, Homo sapiens
ctaccacgtgctgaa

SEQ ID NO: 544051 - DNA, 15 bp, Homo sapiens
taccacgtgctgaaa

SEQ ID NO: 544052 - DNA, 15 bp, Homo sapiens
accacgtgctgaaaa

SEQ ID NO: 544053 - DNA, 15 bp, Homo sapiens
ccacgtgctgaaaaa

SEQ ID NO: 544054 - DNA, 15 bp, Homo sapiens
cacgtgctgaaaaat

SEQ ID NO: 544055 - DNA, 15 bp, Homo sapiens
acgtgctgaaaaata

SEQ ID NO: 544056 - DNA, 15 bp, Homo sapiens
cgtgctgaaaaatat

SEQ ID NO: 544057 - DNA, 15 bp, Homo sapiens
gtgctgaaaaatatc

SEQ ID NO: 544058 - DNA, 15 bp, Homo sapiens
tgctgaaaaatatcc

SEQ ID NO: 544059 - DNA, 15 bp, Homo sapiens
gctgaaaaatatccc

SEQ ID NO: 544060 - DNA, 15 bp, Homo sapiens
ctgaaaaatatcccc

SEQ ID NO: 544061 - DNA, 15 bp, Homo sapiens
tgaaaaatatcccca

SEQ ID NO: 544062 - DNA, 15 bp, Homo sapiens
gaaaaatatccccaa

SEQ ID NO: 544063 - DNA, 15 bp, Homo sapiens
aaaaatatccccaaa

SEQ ID NO: 544064 - DNA, 15 bp, Homo sapiens
aaaatatccccaaaa

SEQ ID NO: 544065 - DNA, 15 bp, Homo sapiens
aaatatccccaaaac

SEQ ID NO: 544066 - DNA, 15 bp, Homo sapiens
aatatccccaaaacc

SEQ ID NO: 544067 - DNA, 15 bp, Homo sapiens
atatccccaaaacca

SEQ ID NO: 544068 - DNA, 15 bp, Homo sapiens
tatccccaaaaccat

SEQ ID NO: 544069 - DNA, 15 bp, Homo sapiens
atccccaaaaccatt

SEQ ID NO: 544070 - DNA, 15 bp, Homo sapiens
tccccaaaaccattt

SEQ ID NO: 544071 - DNA, 15 bp, Homo sapiens
ccccaaaaccatttg

SEQ ID NO: 544072 - DNA, 15 bp, Homo sapiens
cccaaaaccatttgc

SEQ ID NO: 544073 - DNA, 15 bp, Homo sapiens
ccaaaaccatttgcc

SEQ ID NO: 544074 - DNA, 15 bp, Homo sapiens
caaaaccatttgcca

SEQ ID NO: 544075 - DNA, 15 bp, Homo sapiens
aaaaccatttgccaa

SEQ ID NO: 544076 - DNA, 15 bp, Homo sapiens
aaaccatttgccaaa

SEQ ID NO: 544077 - DNA, 15 bp, Homo sapiens
aaccatttgccaaag

SEQ ID NO: 544078 - DNA, 15 bp, Homo sapiens
accatttgccaaaga

SEQ ID NO: 544079 - DNA, 15 bp, Homo sapiens
ccatttgccaaagat

SEQ ID NO: 544080 - DNA, 15 bp, Homo sapiens
catttgccaaagatt

SEQ ID NO: 544081 - DNA, 15 bp, Homo sapiens
atttgccaaagattt

SEQ ID NO: 544082 - DNA, 15 bp, Homo sapiens
tttgccaaagatttg

SEQ ID NO: 544083 - DNA, 15 bp, Homo sapiens
ttgccaaagatttga

SEQ ID NO: 544084 - DNA, 15 bp, Homo sapiens
tgccaaagatttgac

SEQ ID NO: 544085 - DNA, 15 bp, Homo sapiens
gccaaagatttgact

SEQ ID NO: 544086 - DNA, 15 bp, Homo sapiens
ccaaagatttgactt

SEQ ID NO: 544087 - DNA, 15 bp, Homo sapiens
caaagatttgacttg

SEQ ID NO: 544088 - DNA, 15 bp, Homo sapiens
aaagatttgacttgg

SEQ ID NO: 544089 - DNA, 15 bp, Homo sapiens
aagatttgacttggt

SEQ ID NO: 544090 - DNA, 15 bp, Homo sapiens
agatttgacttggtt

SEQ ID NO: 544091 - DNA, 15 bp, Homo sapiens
gatttgacttggtta

SEQ ID NO: 544092 - DNA, 15 bp, Homo sapiens
atttgacttggttaa

SEQ ID NO: 544093 - DNA, 15 bp, Homo sapiens
tttgacttggttaaa

SEQ ID NO: 544094 - DNA, 15 bp, Homo sapiens
ttgacttggttaaaa

SEQ ID NO: 544095 - DNA, 15 bp, Homo sapiens
tgacttggttaaaag

SEQ ID NO: 544096 - DNA, 15 bp, Homo sapiens
gacttggttaaaagc

SEQ ID NO: 544097 - DNA, 15 bp, Homo sapiens
acttggttaaaagcg

SEQ ID NO: 544098 - DNA, 15 bp, Homo sapiens
cttggttaaaagcga

SEQ ID NO: 544099 - DNA, 15 bp, Homo sapiens
ttggttaaaagcgag

SEQ ID NO: 544100 - DNA, 15 bp, Homo sapiens
tggttaaaagcgagg

SEQ ID NO: 544101 - DNA, 15 bp, Homo sapiens
ggttaaaagcgaggt

SEQ ID NO: 544102 - DNA, 15 bp, Homo sapiens
gttaaaagcgaggtg

SEQ ID NO: 544103 - DNA, 15 bp, Homo sapiens
ttaaaagcgaggtgg

SEQ ID NO: 544104 - DNA, 15 bp, Homo sapiens
taaaagcgaggtgga

SEQ ID NO: 544105 - DNA, 15 bp, Homo sapiens
aaaagcgaggtggag

SEQ ID NO: 544106 - DNA, 15 bp, Homo sapiens
aaagcgaggtggaga

SEQ ID NO: 544107 - DNA, 15 bp, Homo sapiens
aagcgaggtggagag

SEQ ID NO: 544108 - DNA, 15 bp, Homo sapiens
agcgaggtggagagg

SEQ ID NO: 544109 - DNA, 15 bp, Homo sapiens
gcgaggtggagaggg

SEQ ID NO: 544110 - DNA, 15 bp, Homo sapiens
cgaggtggagagggg

SEQ ID NO: 544111 - DNA, 15 bp, Homo sapiens
gaggtggagaggggt

SEQ ID NO: 544112 - DNA, 15 bp, Homo sapiens
aggtggagaggggtg

SEQ ID NO: 544113 - DNA, 15 bp, Homo sapiens
ggtggagaggggtgg

SEQ ID NO: 544114 - DNA, 15 bp, Homo sapiens
gtggagaggggtggt

SEQ ID NO: 544115 - DNA, 15 bp, Homo sapiens
tggagaggggtggtt

SEQ ID NO: 544116 - DNA, 15 bp, Homo sapiens
ggagaggggtggtta

SEQ ID NO: 544117 - DNA, 15 bp, Homo sapiens
gagaggggtggttaa

SEQ ID NO: 544118 - DNA, 15 bp, Homo sapiens
agaggggtggttaaa

SEQ ID NO: 544119 - DNA, 15 bp, Homo sapiens
gaggggtggttaaac

SEQ ID NO: 544120 - DNA, 15 bp, Homo sapiens
aggggtggttaaaca

SEQ ID NO: 544121 - DNA, 15 bp, Homo sapiens
ggggtggttaaacag

SEQ ID NO: 544122 - DNA, 15 bp, Homo sapiens
gggtggttaaacagg

SEQ ID NO: 544123 - DNA, 15 bp, Homo sapiens
ggtggttaaacaggg

SEQ ID NO: 544124 - DNA, 15 bp, Homo sapiens
gtggttaaacagggg

SEQ ID NO: 544125 - DNA, 15 bp, Homo sapiens
tggttaaacagggga

SEQ ID NO: 544126 - DNA, 15 bp, Homo sapiens
ggttaaacaggggaa

SEQ ID NO: 544127 - DNA, 15 bp, Homo sapiens
gttaaacaggggaag

SEQ ID NO: 544128 - DNA, 15 bp, Homo sapiens
ttaaacaggggaagc

SEQ ID NO: 544129 - DNA, 15 bp, Homo sapiens
taaacaggggaagct

SEQ ID NO: 544130 - DNA, 15 bp, Homo sapiens
aaacaggggaagcta

SEQ ID NO: 544131 - DNA, 15 bp, Homo sapiens
aacaggggaagctat

SEQ ID NO: 544132 - DNA, 15 bp, Homo sapiens
acaggggaagctata

SEQ ID NO: 544133 - DNA, 15 bp, Homo sapiens
caggggaagctatag

SEQ ID NO: 544134 - DNA, 15 bp, Homo sapiens
aggggaagctataga

SEQ ID NO: 544135 - DNA, 15 bp, Homo sapiens
ggggaagctatagaa

SEQ ID NO: 544136 - DNA, 15 bp, Homo sapiens
gggaagctatagaaa

SEQ ID NO: 544137 - DNA, 15 bp, Homo sapiens
ggaagctatagaaag

SEQ ID NO: 544138 - DNA, 15 bp, Homo sapiens
gaagctatagaaagg

SEQ ID NO: 544139 - DNA, 15 bp, Homo sapiens
aagctatagaaagga

SEQ ID NO: 544140 - DNA, 15 bp, Homo sapiens
agctatagaaaggaa

SEQ ID NO: 544141 - DNA, 15 bp, Homo sapiens
gctatagaaaggaaa

SEQ ID NO: 544142 - DNA, 15 bp, Homo sapiens
ctatagaaaggaaaa

SEQ ID NO: 544143 - DNA, 15 bp, Homo sapiens
tatagaaaggaaaat

SEQ ID NO: 544144 - DNA, 15 bp, Homo sapiens
atagaaaggaaaatg

SEQ ID NO: 544145 - DNA, 15 bp, Homo sapiens
tagaaaggaaaatgc

SEQ ID NO: 544146 - DNA, 15 bp, Homo sapiens
agaaaggaaaatgcg

SEQ ID NO: 544147 - DNA, 15 bp, Homo sapiens
gaaaggaaaatgcga

SEQ ID NO: 544148 - DNA, 15 bp, Homo sapiens
aaaggaaaatgcgag

SEQ ID NO: 544149 - DNA, 15 bp, Homo sapiens
aaggaaaatgcgaga

SEQ ID NO: 544150 - DNA, 15 bp, Homo sapiens
aggaaaatgcgagaa

SEQ ID NO: 544151 - DNA, 15 bp, Homo sapiens
ggaaaatgcgagaaa

SEQ ID NO: 544152 - DNA, 15 bp, Homo sapiens
gaaaatgcgagaaaa

SEQ ID NO: 544153 - DNA, 15 bp, Homo sapiens
aaaatgcgagaaaaa

SEQ ID NO: 544154 - DNA, 15 bp, Homo sapiens
aaatgcgagaaaaag

SEQ ID NO: 544155 - DNA, 15 bp, Homo sapiens
aatgcgagaaaaaga

SEQ ID NO: 544156 - DNA, 15 bp, Homo sapiens
atgcgagaaaaagat

SEQ ID NO: 544157 - DNA, 15 bp, Homo sapiens
tgcgagaaaaagatg

SEQ ID NO: 544158 - DNA, 15 bp, Homo sapiens
gcgagaaaaagatgt

SEQ ID NO: 544159 - DNA, 15 bp, Homo sapiens
cgagaaaaagatgtt

SEQ ID NO: 544160 - DNA, 15 bp, Homo sapiens
gagaaaaagatgttt

SEQ ID NO: 544161 - DNA, 15 bp, Homo sapiens
agaaaaagatgtttt

SEQ ID NO: 544162 - DNA, 15 bp, Homo sapiens
gaaaaagatgttttg

SEQ ID NO: 544163 - DNA, 15 bp, Homo sapiens
aaaaagatgttttgc

SEQ ID NO: 544164 - DNA, 15 bp, Homo sapiens
aaaagatgttttgca

SEQ ID NO: 544165 - DNA, 15 bp, Homo sapiens
aaagatgttttgcat

SEQ ID NO: 544166 - DNA, 15 bp, Homo sapiens
aagatgttttgcata

SEQ ID NO: 544167 - DNA, 15 bp, Homo sapiens
agatgttttgcatat

SEQ ID NO: 544168 - DNA, 15 bp, Homo sapiens
gatgttttgcatatt

SEQ ID NO: 544169 - DNA, 15 bp, Homo sapiens
atgttttgcatatta

SEQ ID NO: 544170 - DNA, 15 bp, Homo sapiens
tgttttgcatattaa

SEQ ID NO: 544171 - DNA, 15 bp, Homo sapiens
gttttgcatattaaa

SEQ ID NO: 544172 - DNA, 15 bp, Homo sapiens
ttttgcatattaaac

SEQ ID NO: 544173 - DNA, 15 bp, Homo sapiens
tttgcatattaaaca

SEQ ID NO: 544174 - DNA, 15 bp, Homo sapiens
ttgcatattaaacag

SEQ ID NO: 544175 - DNA, 15 bp, Homo sapiens
tgcatattaaacagc

SEQ ID NO: 544176 - DNA, 15 bp, Homo sapiens
gcatattaaacagcc

SEQ ID NO: 544177 - DNA, 15 bp, Homo sapiens
catattaaacagccc

SEQ ID NO: 544178 - DNA, 15 bp, Homo sapiens
atattaaacagccct

SEQ ID NO: 544179 - DNA, 15 bp, Homo sapiens
tattaaacagccctg

SEQ ID NO: 544180 - DNA, 15 bp, Homo sapiens
attaaacagccctgc

SEQ ID NO: 544181 - DNA, 15 bp, Homo sapiens
ttaaacagccctgct

SEQ ID NO: 544182 - DNA, 15 bp, Homo sapiens
taaacagccctgctt

SEQ ID NO: 544183 - DNA, 15 bp, Homo sapiens
aaacagccctgcttt

SEQ ID NO: 544184 - DNA, 15 bp, Homo sapiens
aacagccctgctttg

SEQ ID NO: 544185 - DNA, 15 bp, Homo sapiens
acagccctgctttgt

SEQ ID NO: 544186 - DNA, 15 bp, Homo sapiens
cagccctgctttgtc

SEQ ID NO: 544187 - DNA, 15 bp, Homo sapiens
agccctgctttgtcc

SEQ ID NO: 544188 - DNA, 15 bp, Homo sapiens
gccctgctttgtcct

SEQ ID NO: 544189 - DNA, 15 bp, Homo sapiens
ccctgctttgtcctc

SEQ ID NO: 544190 - DNA, 15 bp, Homo sapiens
cctgctttgtcctcc

SEQ ID NO: 544191 - DNA, 15 bp, Homo sapiens
ctgctttgtcctcca

SEQ ID NO: 544192 - DNA, 15 bp, Homo sapiens
tgctttgtcctccaa

SEQ ID NO: 544193 - DNA, 15 bp, Homo sapiens
gctttgtcctccaat

SEQ ID NO: 544194 - DNA, 15 bp, Homo sapiens
ctttgtcctccaatt

SEQ ID NO: 544195 - DNA, 15 bp, Homo sapiens
tttgtcctccaattc

SEQ ID NO: 544196 - DNA, 15 bp, Homo sapiens
ttgtcctccaattca

SEQ ID NO: 544197 - DNA, 15 bp, Homo sapiens
tgtcctccaattcag

SEQ ID NO: 544198 - DNA, 15 bp, Homo sapiens
gtcctccaattcagc

SEQ ID NO: 544199 - DNA, 15 bp, Homo sapiens
tcctccaattcagcc

SEQ ID NO: 544200 - DNA, 15 bp, Homo sapiens
cctccaattcagcca

SEQ ID NO: 544201 - DNA, 15 bp, Homo sapiens
ctccaattcagccaa

SEQ ID NO: 544202 - DNA, 15 bp, Homo sapiens
tccaattcagccaaa

SEQ ID NO: 544203 - DNA, 15 bp, Homo sapiens
ccaattcagccaaaa

SEQ ID NO: 544204 - DNA, 15 bp, Homo sapiens
caattcagccaaaac

SEQ ID NO: 544205 - DNA, 15 bp, Homo sapiens
aattcagccaaaacg

SEQ ID NO: 544206 - DNA, 15 bp, Homo sapiens
attcagccaaaacgt

SEQ ID NO: 544207 - DNA, 15 bp, Homo sapiens
ttcagccaaaacgtt

SEQ ID NO: 544208 - DNA, 15 bp, Homo sapiens
tcagccaaaacgttt

SEQ ID NO: 544209 - DNA, 15 bp, Homo sapiens
cagccaaaacgtttg

SEQ ID NO: 544210 - DNA, 15 bp, Homo sapiens
agccaaaacgtttgg

SEQ ID NO: 544211 - DNA, 15 bp, Homo sapiens
gccaaaacgtttgga

SEQ ID NO: 544212 - DNA, 15 bp, Homo sapiens
ccaaaacgtttggag

SEQ ID NO: 544213 - DNA, 15 bp, Homo sapiens
caaaacgtttggagg

SEQ ID NO: 544214 - DNA, 15 bp, Homo sapiens
aaaacgtttggagga

SEQ ID NO: 544215 - DNA, 15 bp, Homo sapiens
aaacgtttggaggag

SEQ ID NO: 544216 - DNA, 15 bp, Homo sapiens
aacgtttggaggagg

SEQ ID NO: 544217 - DNA, 15 bp, Homo sapiens
acgtttggaggaggc

SEQ ID NO: 544218 - DNA, 15 bp, Homo sapiens
cgtttggaggaggct

SEQ ID NO: 544219 - DNA, 15 bp, Homo sapiens
gtttggaggaggctg

SEQ ID NO: 544220 - DNA, 15 bp, Homo sapiens
tttggaggaggctgc

SEQ ID NO: 544221 - DNA, 15 bp, Homo sapiens
ttggaggaggctgcg

SEQ ID NO: 544222 - DNA, 15 bp, Homo sapiens
tggaggaggctgcgc

SEQ ID NO: 544223 - DNA, 15 bp, Homo sapiens
ggaggaggctgcgct

SEQ ID NO: 544224 - DNA, 15 bp, Homo sapiens
gaggaggctgcgctg

SEQ ID NO: 544225 - DNA, 15 bp, Homo sapiens
aggaggctgcgctgt

SEQ ID NO: 544226 - DNA, 15 bp, Homo sapiens
ggaggctgcgctgtc

SEQ ID NO: 544227 - DNA, 15 bp, Homo sapiens
gaggctgcgctgtcc

SEQ ID NO: 544228 - DNA, 15 bp, Homo sapiens
aggctgcgctgtcca

SEQ ID NO: 544229 - DNA, 15 bp, Homo sapiens
ggctgcgctgtccac

SEQ ID NO: 544230 - DNA, 15 bp, Homo sapiens
gctgcgctgtccacg

SEQ ID NO: 544231 - DNA, 15 bp, Homo sapiens
ctgcgctgtccacgt

SEQ ID NO: 544232 - DNA, 15 bp, Homo sapiens
tgcgctgtccacgtc

SEQ ID NO: 544233 - DNA, 15 bp, Homo sapiens
gcgctgtccacgtcc

SEQ ID NO: 544234 - DNA, 15 bp, Homo sapiens
cgctgtccacgtcca

SEQ ID NO: 544235 - DNA, 15 bp, Homo sapiens
gctgtccacgtccac

SEQ ID NO: 544236 - DNA, 15 bp, Homo sapiens
ctgtccacgtccaca

SEQ ID NO: 544237 - DNA, 15 bp, Homo sapiens
tgtccacgtccacag

SEQ ID NO: 544238 - DNA, 15 bp, Homo sapiens
gtccacgtccacagt

SEQ ID NO: 544239 - DNA, 15 bp, Homo sapiens
tccacgtccacagtg

SEQ ID NO: 544240 - DNA, 15 bp, Homo sapiens
ccacgtccacagtgc

SEQ ID NO: 544241 - DNA, 15 bp, Homo sapiens
cacgtccacagtgct

SEQ ID NO: 544242 - DNA, 15 bp, Homo sapiens
acgtccacagtgctc

SEQ ID NO: 544243 - DNA, 15 bp, Homo sapiens
cgtccacagtgctct

SEQ ID NO: 544244 - DNA, 15 bp, Homo sapiens
gtccacagtgctctg

SEQ ID NO: 544245 - DNA, 15 bp, Homo sapiens
tccacagtgctctga

SEQ ID NO: 544246 - DNA, 15 bp, Homo sapiens
ccacagtgctctgaa

SEQ ID NO: 544247 - DNA, 15 bp, Homo sapiens
cacagtgctctgaac

SEQ ID NO: 544248 - DNA, 15 bp, Homo sapiens
acagtgctctgaacg

SEQ ID NO: 544249 - DNA, 15 bp, Homo sapiens
cagtgctctgaacgt

SEQ ID NO: 544250 - DNA, 15 bp, Homo sapiens
agtgctctgaacgtg

SEQ ID NO: 544251 - DNA, 15 bp, Homo sapiens
gtgctctgaacgtgc

SEQ ID NO: 544252 - DNA, 15 bp, Homo sapiens
tgctctgaacgtgcc

SEQ ID NO: 544253 - DNA, 15 bp, Homo sapiens
gctctgaacgtgcct

SEQ ID NO: 544254 - DNA, 15 bp, Homo sapiens
ctctgaacgtgcctc

SEQ ID NO: 544255 - DNA, 15 bp, Homo sapiens
tctgaacgtgcctca

SEQ ID NO: 544256 - DNA, 15 bp, Homo sapiens
ctgaacgtgcctcat

SEQ ID NO: 544257 - DNA, 15 bp, Homo sapiens
tgaacgtgcctcatc

SEQ ID NO: 544258 - DNA, 15 bp, Homo sapiens
gaacgtgcctcatct

SEQ ID NO: 544259 - DNA, 15 bp, Homo sapiens
aacgtgcctcatctg

SEQ ID NO: 544260 - DNA, 15 bp, Homo sapiens
acgtgcctcatctga

SEQ ID NO: 544261 - DNA, 15 bp, Homo sapiens
cgtgcctcatctgat

SEQ ID NO: 544262 - DNA, 15 bp, Homo sapiens
gtgcctcatctgatc

SEQ ID NO: 544263 - DNA, 15 bp, Homo sapiens
tgcctcatctgatct

SEQ ID NO: 544264 - DNA, 15 bp, Homo sapiens
gcctcatctgatctt

SEQ ID NO: 544265 - DNA, 15 bp, Homo sapiens
cctcatctgatcttg

SEQ ID NO: 544266 - DNA, 15 bp, Homo sapiens
ctcatctgatcttgg

SEQ ID NO: 544267 - DNA, 15 bp, Homo sapiens
tcatctgatcttgga

SEQ ID NO: 544268 - DNA, 15 bp, Homo sapiens
catctgatcttggaa

SEQ ID NO: 544269 - DNA, 15 bp, Homo sapiens
atctgatcttggaag

SEQ ID NO: 544270 - DNA, 15 bp, Homo sapiens
tctgatcttggaagc

SEQ ID NO: 544271 - DNA, 15 bp, Homo sapiens
ctgatcttggaagct

SEQ ID NO: 544272 - DNA, 15 bp, Homo sapiens
tgatcttggaagcta

SEQ ID NO: 544273 - DNA, 15 bp, Homo sapiens
gatcttggaagctaa

SEQ ID NO: 544274 - DNA, 15 bp, Homo sapiens
atcttggaagctaag

SEQ ID NO: 544275 - DNA, 15 bp, Homo sapiens
tcttggaagctaagc

SEQ ID NO: 544276 - DNA, 15 bp, Homo sapiens
cttggaagctaagca

SEQ ID NO: 544277 - DNA, 15 bp, Homo sapiens
ttggaagctaagcag

SEQ ID NO: 544278 - DNA, 15 bp, Homo sapiens
tggaagctaagcagg

SEQ ID NO: 544279 - DNA, 15 bp, Homo sapiens
ggaagctaagcagga

SEQ ID NO: 544280 - DNA, 15 bp, Homo sapiens
gaagctaagcaggat

SEQ ID NO: 544281 - DNA, 15 bp, Homo sapiens
aagctaagcaggatc

SEQ ID NO: 544282 - DNA, 15 bp, Homo sapiens
agctaagcaggatcg

SEQ ID NO: 544283 - DNA, 15 bp, Homo sapiens
gctaagcaggatcga

SEQ ID NO: 544284 - DNA, 15 bp, Homo sapiens
ctaagcaggatcgag

SEQ ID NO: 544285 - DNA, 15 bp, Homo sapiens
taagcaggatcgagc

SEQ ID NO: 544286 - DNA, 15 bp, Homo sapiens
aagcaggatcgagct

SEQ ID NO: 544287 - DNA, 15 bp, Homo sapiens
agcaggatcgagctg

SEQ ID NO: 544288 - DNA, 15 bp, Homo sapiens
gcaggatcgagctga

SEQ ID NO: 544289 - DNA, 15 bp, Homo sapiens
caggatcgagctgag

SEQ ID NO: 544290 - DNA, 15 bp, Homo sapiens
aggatcgagctgagt

SEQ ID NO: 544291 - DNA, 15 bp, Homo sapiens
ggatcgagctgagta

SEQ ID NO: 544292 - DNA, 15 bp, Homo sapiens
gatcgagctgagtac

SEQ ID NO: 544293 - DNA, 15 bp, Homo sapiens
atcgagctgagtact

SEQ ID NO: 544294 - DNA, 15 bp, Homo sapiens
tcgagctgagtactc

SEQ ID NO: 544295 - DNA, 15 bp, Homo sapiens
cgagctgagtactca

SEQ ID NO: 544296 - DNA, 15 bp, Homo sapiens
gagctgagtactcag

SEQ ID NO: 544297 - DNA, 15 bp, Homo sapiens
agctgagtactcaga

SEQ ID NO: 544298 - DNA, 15 bp, Homo sapiens
gctgagtactcagat

SEQ ID NO: 544299 - DNA, 15 bp, Homo sapiens
ctgagtactcagatg

SEQ ID NO: 544300 - DNA, 15 bp, Homo sapiens
tgagtactcagatgg

SEQ ID NO: 544301 - DNA, 15 bp, Homo sapiens
gagtactcagatgga

SEQ ID NO: 544302 - DNA, 15 bp, Homo sapiens
agtactcagatggaa

SEQ ID NO: 544303 - DNA, 15 bp, Homo sapiens
gtactcagatggaag

SEQ ID NO: 544304 - DNA, 15 bp, Homo sapiens
tactcagatggaaga

SEQ ID NO: 544305 - DNA, 15 bp, Homo sapiens
actcagatggaagaa

SEQ ID NO: 544306 - DNA, 15 bp, Homo sapiens
ctcagatggaagaag

SEQ ID NO: 544307 - DNA, 15 bp, Homo sapiens
tcagatggaagaagg

SEQ ID NO: 544308 - DNA, 15 bp, Homo sapiens
cagatggaagaaggc

SEQ ID NO: 544309 - DNA, 15 bp, Homo sapiens
agatggaagaaggct

SEQ ID NO: 544310 - DNA, 15 bp, Homo sapiens
gatggaagaaggcta

SEQ ID NO: 544311 - DNA, 15 bp, Homo sapiens
atggaagaaggctat

SEQ ID NO: 544312 - DNA, 15 bp, Homo sapiens
tggaagaaggctatt

SEQ ID NO: 544313 - DNA, 15 bp, Homo sapiens
ggaagaaggctattc

SEQ ID NO: 544314 - DNA, 15 bp, Homo sapiens
gaagaaggctattct

SEQ ID NO: 544315 - DNA, 15 bp, Homo sapiens
aagaaggctattctc

SEQ ID NO: 544316 - DNA, 15 bp, Homo sapiens
agaaggctattctcg

SEQ ID NO: 544317 - DNA, 15 bp, Homo sapiens
gaaggctattctcgt

SEQ ID NO: 544318 - DNA, 15 bp, Homo sapiens
aaggctattctcgtg

SEQ ID NO: 544319 - DNA, 15 bp, Homo sapiens
aggctattctcgtgc

SEQ ID NO: 544320 - DNA, 15 bp, Homo sapiens
ggctattctcgtgcg

SEQ ID NO: 544321 - DNA, 15 bp, Homo sapiens
gctattctcgtgcgt

SEQ ID NO: 544322 - DNA, 15 bp, Homo sapiens
ctattctcgtgcgtg

SEQ ID NO: 544323 - DNA, 15 bp, Homo sapiens
tattctcgtgcgtgt

SEQ ID NO: 544324 - DNA, 15 bp, Homo sapiens
attctcgtgcgtgtg

SEQ ID NO: 544325 - DNA, 15 bp, Homo sapiens
ttctcgtgcgtgtgc

SEQ ID NO: 544326 - DNA, 15 bp, Homo sapiens
tctcgtgcgtgtgca

SEQ ID NO: 544327 - DNA, 15 bp, Homo sapiens
ctcgtgcgtgtgcag

SEQ ID NO: 544328 - DNA, 15 bp, Homo sapiens
tcgtgcgtgtgcaga

SEQ ID NO: 544329 - DNA, 15 bp, Homo sapiens
cgtgcgtgtgcagag

SEQ ID NO: 544330 - DNA, 15 bp, Homo sapiens
gtgcgtgtgcagaga

SEQ ID NO: 544331 - DNA, 15 bp, Homo sapiens
tgcgtgtgcagagac

SEQ ID NO: 544332 - DNA, 15 bp, Homo sapiens
gcgtgtgcagagacc

SEQ ID NO: 544333 - DNA, 15 bp, Homo sapiens
cgtgtgcagagacca

SEQ ID NO: 544334 - DNA, 15 bp, Homo sapiens
gtgtgcagagaccaa

SEQ ID NO: 544335 - DNA, 15 bp, Homo sapiens
tgtgcagagaccaag

SEQ ID NO: 544336 - DNA, 15 bp, Homo sapiens
gtgcagagaccaaga

SEQ ID NO: 544337 - DNA, 15 bp, Homo sapiens
tgcagagaccaagat

SEQ ID NO: 544338 - DNA, 15 bp, Homo sapiens
gcagagaccaagatc

SEQ ID NO: 544339 - DNA, 15 bp, Homo sapiens
cagagaccaagatca

SEQ ID NO: 544340 - DNA, 15 bp, Homo sapiens
agagaccaagatcat

SEQ ID NO: 544341 - DNA, 15 bp, Homo sapiens
gagaccaagatcata

SEQ ID NO: 544342 - DNA, 15 bp, Homo sapiens
agaccaagatcatag

SEQ ID NO: 544343 - DNA, 15 bp, Homo sapiens
gaccaagatcatagg

SEQ ID NO: 544344 - DNA, 15 bp, Homo sapiens
accaagatcataggg

SEQ ID NO: 544345 - DNA, 15 bp, Homo sapiens
ccaagatcataggga

SEQ ID NO: 544346 - DNA, 15 bp, Homo sapiens
caagatcatagggaa

SEQ ID NO: 544347 - DNA, 15 bp, Homo sapiens
aagatcatagggaaa

SEQ ID NO: 544348 - DNA, 15 bp, Homo sapiens
agatcatagggaaaa

SEQ ID NO: 544349 - DNA, 15 bp, Homo sapiens
gatcatagggaaaag

SEQ ID NO: 544350 - DNA, 15 bp, Homo sapiens
atcatagggaaaagc

SEQ ID NO: 544351 - DNA, 15 bp, Homo sapiens
tcatagggaaaagca

SEQ ID NO: 544352 - DNA, 15 bp, Homo sapiens
catagggaaaagcat

SEQ ID NO: 544353 - DNA, 15 bp, Homo sapiens
atagggaaaagcatg

SEQ ID NO: 544354 - DNA, 15 bp, Homo sapiens
tagggaaaagcatgt

SEQ ID NO: 544355 - DNA, 15 bp, Homo sapiens
agggaaaagcatgtc

SEQ ID NO: 544356 - DNA, 15 bp, Homo sapiens
gggaaaagcatgtct

SEQ ID NO: 544357 - DNA, 15 bp, Homo sapiens
ggaaaagcatgtcta

SEQ ID NO: 544358 - DNA, 15 bp, Homo sapiens
gaaaagcatgtctaa

SEQ ID NO: 544359 - DNA, 15 bp, Homo sapiens
aaaagcatgtctaag

SEQ ID NO: 544360 - DNA, 15 bp, Homo sapiens
aaagcatgtctaagg

SEQ ID NO: 544361 - DNA, 15 bp, Homo sapiens
aagcatgtctaaggt

SEQ ID NO: 544362 - DNA, 15 bp, Homo sapiens
agcatgtctaaggtt

SEQ ID NO: 544363 - DNA, 15 bp, Homo sapiens
gcatgtctaaggttg

SEQ ID NO: 544364 - DNA, 15 bp, Homo sapiens
catgtctaaggttgg

SEQ ID NO: 544365 - DNA, 15 bp, Homo sapiens
atgtctaaggttggg

SEQ ID NO: 544366 - DNA, 15 bp, Homo sapiens
tgtctaaggttgggt

SEQ ID NO: 544367 - DNA, 15 bp, Homo sapiens
gtctaaggttgggtt

SEQ ID NO: 544368 - DNA, 15 bp, Homo sapiens
tctaaggttgggttt

SEQ ID NO: 544369 - DNA, 15 bp, Homo sapiens
ctaaggttgggtttt

SEQ ID NO: 544370 - DNA, 15 bp, Homo sapiens
taaggttgggttttg

SEQ ID NO: 544371 - DNA, 15 bp, Homo sapiens
aaggttgggttttgt

SEQ ID NO: 544372 - DNA, 15 bp, Homo sapiens
aggttgggttttgtg

SEQ ID NO: 544373 - DNA, 15 bp, Homo sapiens
ggttgggttttgtgt

SEQ ID NO: 544374 - DNA, 15 bp, Homo sapiens
gttgggttttgtgta

SEQ ID NO: 544375 - DNA, 15 bp, Homo sapiens
ttgggttttgtgtac

SEQ ID NO: 544376 - DNA, 15 bp, Homo sapiens
tgggttttgtgtaca

SEQ ID NO: 544377 - DNA, 15 bp, Homo sapiens
gggttttgtgtacaa

SEQ ID NO: 544378 - DNA, 15 bp, Homo sapiens
ggttttgtgtacaaa

SEQ ID NO: 544379 - DNA, 15 bp, Homo sapiens
gttttgtgtacaaat

SEQ ID NO: 544380 - DNA, 15 bp, Homo sapiens
ttttgtgtacaaata

SEQ ID NO: 544381 - DNA, 15 bp, Homo sapiens
tttgtgtacaaatat

SEQ ID NO: 544382 - DNA, 15 bp, Homo sapiens
ttgtgtacaaatatt

SEQ ID NO: 544383 - DNA, 15 bp, Homo sapiens
tgtgtacaaatattg

SEQ ID NO: 544384 - DNA, 15 bp, Homo sapiens
gtgtacaaatattgt

SEQ ID NO: 544385 - DNA, 15 bp, Homo sapiens
tgtacaaatattgta

SEQ ID NO: 544386 - DNA, 15 bp, Homo sapiens
gtacaaatattgtat

SEQ ID NO: 544387 - DNA, 15 bp, Homo sapiens
tacaaatattgtata

SEQ ID NO: 544388 - DNA, 15 bp, Homo sapiens
acaaatattgtatag

SEQ ID NO: 544389 - DNA, 15 bp, Homo sapiens
caaatattgtatagg

SEQ ID NO: 544390 - DNA, 15 bp, Homo sapiens
aaatattgtatagga

SEQ ID NO: 544391 - DNA, 15 bp, Homo sapiens
aatattgtataggaa

SEQ ID NO: 544392 - DNA, 15 bp, Homo sapiens
atattgtataggaac

SEQ ID NO: 544393 - DNA, 15 bp, Homo sapiens
tattgtataggaaca

SEQ ID NO: 544394 - DNA, 15 bp, Homo sapiens
attgtataggaacat

SEQ ID NO: 544395 - DNA, 15 bp, Homo sapiens
ttgtataggaacata

SEQ ID NO: 544396 - DNA, 15 bp, Homo sapiens
tgtataggaacataa

SEQ ID NO: 544397 - DNA, 15 bp, Homo sapiens
gtataggaacataat

SEQ ID NO: 544398 - DNA, 15 bp, Homo sapiens
tataggaacataatt

SEQ ID NO: 544399 - DNA, 15 bp, Homo sapiens
ataggaacataattc

SEQ ID NO: 544400 - DNA, 15 bp, Homo sapiens
taggaacataattca

SEQ ID NO: 544401 - DNA, 15 bp, Homo sapiens
aggaacataattcaa

SEQ ID NO: 544402 - DNA, 15 bp, Homo sapiens
ggaacataattcaac

SEQ ID NO: 544403 - DNA, 15 bp, Homo sapiens
gaacataattcaacc

SEQ ID NO: 544404 - DNA, 15 bp, Homo sapiens
aacataattcaacct

SEQ ID NO: 544405 - DNA, 15 bp, Homo sapiens
acataattcaacctg

SEQ ID NO: 544406 - DNA, 15 bp, Homo sapiens
cataattcaacctgt

SEQ ID NO: 544407 - DNA, 15 bp, Homo sapiens
ataattcaacctgtt

SEQ ID NO: 544408 - DNA, 15 bp, Homo sapiens
taattcaacctgttt

SEQ ID NO: 544409 - DNA, 15 bp, Homo sapiens
aattcaacctgttta

SEQ ID NO: 544410 - DNA, 15 bp, Homo sapiens
attcaacctgtttaa

SEQ ID NO: 544411 - DNA, 15 bp, Homo sapiens
ttcaacctgtttaaa

SEQ ID NO: 544412 - DNA, 15 bp, Homo sapiens
tcaacctgtttaaaa

SEQ ID NO: 544413 - DNA, 15 bp, Homo sapiens
caacctgtttaaaac

SEQ ID NO: 544414 - DNA, 15 bp, Homo sapiens
aacctgtttaaaaca

SEQ ID NO: 544415 - DNA, 15 bp, Homo sapiens
acctgtttaaaacag

SEQ ID NO: 544416 - DNA, 15 bp, Homo sapiens
cctgtttaaaacagg

SEQ ID NO: 544417 - DNA, 15 bp, Homo sapiens
ctgtttaaaacagga

SEQ ID NO: 544418 - DNA, 15 bp, Homo sapiens
tgtttaaaacaggag

SEQ ID NO: 544419 - DNA, 15 bp, Homo sapiens
gtttaaaacaggagg

SEQ ID NO: 544420 - DNA, 15 bp, Homo sapiens
tttaaaacaggagga

SEQ ID NO: 544421 - DNA, 15 bp, Homo sapiens
ttaaaacaggaggat

SEQ ID NO: 544422 - DNA, 15 bp, Homo sapiens
taaaacaggaggatg

SEQ ID NO: 544423 - DNA, 15 bp, Homo sapiens
aaaacaggaggatga

SEQ ID NO: 544424 - DNA, 15 bp, Homo sapiens
aaacaggaggatgat

SEQ ID NO: 544425 - DNA, 15 bp, Homo sapiens
aacaggaggatgatt

SEQ ID NO: 544426 - DNA, 15 bp, Homo sapiens
acaggaggatgattg

SEQ ID NO: 544427 - DNA, 15 bp, Homo sapiens
caggaggatgattgt

SEQ ID NO: 544428 - DNA, 15 bp, Homo sapiens
aggaggatgattgtg

SEQ ID NO: 544429 - DNA, 15 bp, Homo sapiens
ggaggatgattgtgg

SEQ ID NO: 544430 - DNA, 15 bp, Homo sapiens
gaggatgattgtggc

SEQ ID NO: 544431 - DNA, 15 bp, Homo sapiens
aggatgattgtggct

SEQ ID NO: 544432 - DNA, 15 bp, Homo sapiens
ggatgattgtggctg

SEQ ID NO: 544433 - DNA, 15 bp, Homo sapiens
gatgattgtggctga

SEQ ID NO: 544434 - DNA, 15 bp, Homo sapiens
atgattgtggctgaa

SEQ ID NO: 544435 - DNA, 15 bp, Homo sapiens
tgattgtggctgaaa

SEQ ID NO: 544436 - DNA, 15 bp, Homo sapiens
gattgtggctgaaac

SEQ ID NO: 544437 - DNA, 15 bp, Homo sapiens
attgtggctgaaacc

SEQ ID NO: 544438 - DNA, 15 bp, Homo sapiens
ttgtggctgaaacca

SEQ ID NO: 544439 - DNA, 15 bp, Homo sapiens
tgtggctgaaaccac

SEQ ID NO: 544440 - DNA, 15 bp, Homo sapiens
gtggctgaaaccacg

SEQ ID NO: 544441 - DNA, 15 bp, Homo sapiens
tggctgaaaccacgg

SEQ ID NO: 544442 - DNA, 15 bp, Homo sapiens
ggctgaaaccacggt

SEQ ID NO: 544443 - DNA, 15 bp, Homo sapiens
gctgaaaccacggtg

SEQ ID NO: 544444 - DNA, 15 bp, Homo sapiens
ctgaaaccacggtgg

SEQ ID NO: 544445 - DNA, 15 bp, Homo sapiens
tgaaaccacggtggg

SEQ ID NO: 544446 - DNA, 15 bp, Homo sapiens
gaaaccacggtggga

SEQ ID NO: 544447 - DNA, 15 bp, Homo sapiens
aaaccacggtgggag

SEQ ID NO: 544448 - DNA, 15 bp, Homo sapiens
aaccacggtgggagg

SEQ ID NO: 544449 - DNA, 15 bp, Homo sapiens
accacggtgggagga

SEQ ID NO: 544450 - DNA, 15 bp, Homo sapiens
ccacggtgggaggaa

SEQ ID NO: 544451 - DNA, 15 bp, Homo sapiens
cacggtgggaggaag

SEQ ID NO: 544452 - DNA, 15 bp, Homo sapiens
acggtgggaggaagg

SEQ ID NO: 544453 - DNA, 15 bp, Homo sapiens
cggtgggaggaagga

SEQ ID NO: 544454 - DNA, 15 bp, Homo sapiens
ggtgggaggaaggaa

SEQ ID NO: 544455 - DNA, 15 bp, Homo sapiens
gtgggaggaaggaac

SEQ ID NO: 544456 - DNA, 15 bp, Homo sapiens
tgggaggaaggaaca

SEQ ID NO: 544457 - DNA, 15 bp, Homo sapiens
gggaggaaggaacat

SEQ ID NO: 544458 - DNA, 15 bp, Homo sapiens
ggaggaaggaacatg

SEQ ID NO: 544459 - DNA, 15 bp, Homo sapiens
gaggaaggaacatgt

SEQ ID NO: 544460 - DNA, 15 bp, Homo sapiens
aggaaggaacatgtt

SEQ ID NO: 544461 - DNA, 15 bp, Homo sapiens
ggaaggaacatgtta

SEQ ID NO: 544462 - DNA, 15 bp, Homo sapiens
gaaggaacatgttac

SEQ ID NO: 544463 - DNA, 15 bp, Homo sapiens
aaggaacatgttaca

SEQ ID NO: 544464 - DNA, 15 bp, Homo sapiens
aggaacatgttacat

SEQ ID NO: 544465 - DNA, 15 bp, Homo sapiens
ggaacatgttacatt

SEQ ID NO: 544466 - DNA, 15 bp, Homo sapiens
gaacatgttacattt

SEQ ID NO: 544467 - DNA, 15 bp, Homo sapiens
aacatgttacatttc

SEQ ID NO: 544468 - DNA, 15 bp, Homo sapiens
acatgttacatttct

SEQ ID NO: 544469 - DNA, 15 bp, Homo sapiens
catgttacatttctt

SEQ ID NO: 544470 - DNA, 15 bp, Homo sapiens
atgttacatttcttc

SEQ ID NO: 544471 - DNA, 15 bp, Homo sapiens
tgttacatttcttca

SEQ ID NO: 544472 - DNA, 15 bp, Homo sapiens
gttacatttcttcaa

SEQ ID NO: 544473 - DNA, 15 bp, Homo sapiens
ttacatttcttcaaa

SEQ ID NO: 544474 - DNA, 15 bp, Homo sapiens
tacatttcttcaaag

SEQ ID NO: 544475 - DNA, 15 bp, Homo sapiens
acatttcttcaaaga

SEQ ID NO: 544476 - DNA, 15 bp, Homo sapiens
catttcttcaaagat

SEQ ID NO: 544477 - DNA, 15 bp, Homo sapiens
atttcttcaaagata

SEQ ID NO: 544478 - DNA, 15 bp, Homo sapiens
tttcttcaaagataa

SEQ ID NO: 544479 - DNA, 15 bp, Homo sapiens
ttcttcaaagataac

SEQ ID NO: 544480 - DNA, 15 bp, Homo sapiens
tcttcaaagataact

SEQ ID NO: 544481 - DNA, 15 bp, Homo sapiens
cttcaaagataactg

SEQ ID NO: 544482 - DNA, 15 bp, Homo sapiens
ttcaaagataactgc

SEQ ID NO: 544483 - DNA, 15 bp, Homo sapiens
tcaaagataactgca

SEQ ID NO: 544484 - DNA, 15 bp, Homo sapiens
caaagataactgcag

SEQ ID NO: 544485 - DNA, 15 bp, Homo sapiens
aaagataactgcaga

SEQ ID NO: 544486 - DNA, 15 bp, Homo sapiens
aagataactgcagat

SEQ ID NO: 544487 - DNA, 15 bp, Homo sapiens
agataactgcagatc

SEQ ID NO: 544488 - DNA, 15 bp, Homo sapiens
gataactgcagatcg

SEQ ID NO: 544489 - DNA, 15 bp, Homo sapiens
ataactgcagatcga

SEQ ID NO: 544490 - DNA, 15 bp, Homo sapiens
taactgcagatcgaa

SEQ ID NO: 544491 - DNA, 15 bp, Homo sapiens
aactgcagatcgaat

SEQ ID NO: 544492 - DNA, 15 bp, Homo sapiens
actgcagatcgaatg

SEQ ID NO: 544493 - DNA, 15 bp, Homo sapiens
ctgcagatcgaatgc

SEQ ID NO: 544494 - DNA, 15 bp, Homo sapiens
tgcagatcgaatgcc

SEQ ID NO: 544495 - DNA, 15 bp, Homo sapiens
gcagatcgaatgcct

SEQ ID NO: 544496 - DNA, 15 bp, Homo sapiens
cagatcgaatgcctt

SEQ ID NO: 544497 - DNA, 15 bp, Homo sapiens
agatcgaatgccttc

SEQ ID NO: 544498 - DNA, 15 bp, Homo sapiens
gatcgaatgccttca

SEQ ID NO: 544499 - DNA, 15 bp, Homo sapiens
atcgaatgccttcat

SEQ ID NO: 544500 - DNA, 15 bp, Homo sapiens
tcgaatgccttcatc

SEQ ID NO: 544501 - DNA, 15 bp, Homo sapiens
cgaatgccttcatcc

SEQ ID NO: 544502 - DNA, 15 bp, Homo sapiens
gaatgccttcatcct

SEQ ID NO: 544503 - DNA, 15 bp, Homo sapiens
aatgccttcatcctt

SEQ ID NO: 544504 - DNA, 15 bp, Homo sapiens
atgccttcatccttg

SEQ ID NO: 544505 - DNA, 15 bp, Homo sapiens
tgccttcatccttgt

SEQ ID NO: 544506 - DNA, 15 bp, Homo sapiens
gccttcatccttgtg

SEQ ID NO: 544507 - DNA, 15 bp, Homo sapiens
ccttcatccttgtga

SEQ ID NO: 544508 - DNA, 15 bp, Homo sapiens
cttcatccttgtgac

SEQ ID NO: 544509 - DNA, 15 bp, Homo sapiens
ttcatccttgtgacc

SEQ ID NO: 544510 - DNA, 15 bp, Homo sapiens
tcatccttgtgaccc

SEQ ID NO: 544511 - DNA, 15 bp, Homo sapiens
catccttgtgacccg

SEQ ID NO: 544512 - DNA, 15 bp, Homo sapiens
atccttgtgacccgc

SEQ ID NO: 544513 - DNA, 15 bp, Homo sapiens
tccttgtgacccgcg

SEQ ID NO: 544514 - DNA, 15 bp, Homo sapiens
ccttgtgacccgcgc

SEQ ID NO: 544515 - DNA, 15 bp, Homo sapiens
cttgtgacccgcgct

SEQ ID NO: 544516 - DNA, 15 bp, Homo sapiens
ttgtgacccgcgctg

SEQ ID NO: 544517 - DNA, 15 bp, Homo sapiens
tgtgacccgcgctgc

SEQ ID NO: 544518 - DNA, 15 bp, Homo sapiens
gtgacccgcgctgcc

SEQ ID NO: 544519 - DNA, 15 bp, Homo sapiens
tgacccgcgctgcct

SEQ ID NO: 544520 - DNA, 15 bp, Homo sapiens
gacccgcgctgcctg

SEQ ID NO: 544521 - DNA, 15 bp, Homo sapiens
acccgcgctgcctgc

SEQ ID NO: 544522 - DNA, 15 bp, Homo sapiens
cccgcgctgcctgca

SEQ ID NO: 544523 - DNA, 15 bp, Homo sapiens
ccgcgctgcctgcac

SEQ ID NO: 544524 - DNA, 15 bp, Homo sapiens
cgcgctgcctgcact

SEQ ID NO: 544525 - DNA, 15 bp, Homo sapiens
gcgctgcctgcactg

SEQ ID NO: 544526 - DNA, 15 bp, Homo sapiens
cgctgcctgcactgt

SEQ ID NO: 544527 - DNA, 15 bp, Homo sapiens
gctgcctgcactgtg

SEQ ID NO: 544528 - DNA, 15 bp, Homo sapiens
ctgcctgcactgtgg

SEQ ID NO: 544529 - DNA, 15 bp, Homo sapiens
tgcctgcactgtggt

SEQ ID NO: 544530 - DNA, 15 bp, Homo sapiens
gcctgcactgtggtg

SEQ ID NO: 544531 - DNA, 15 bp, Homo sapiens
cctgcactgtggtgt

SEQ ID NO: 544532 - DNA, 15 bp, Homo sapiens
ctgcactgtggtgtg

SEQ ID NO: 544533 - DNA, 15 bp, Homo sapiens
tgcactgtggtgtgt

SEQ ID NO: 544534 - DNA, 15 bp, Homo sapiens
gcactgtggtgtgtt

SEQ ID NO: 544535 - DNA, 15 bp, Homo sapiens
cactgtggtgtgttt

SEQ ID NO: 544536 - DNA, 15 bp, Homo sapiens
actgtggtgtgtttt

SEQ ID NO: 544537 - DNA, 15 bp, Homo sapiens
ctgtggtgtgttttg

SEQ ID NO: 544538 - DNA, 15 bp, Homo sapiens
tgtggtgtgttttgc

SEQ ID NO: 544539 - DNA, 15 bp, Homo sapiens
gtggtgtgttttgct

SEQ ID NO: 544540 - DNA, 15 bp, Homo sapiens
tggtgtgttttgctt

SEQ ID NO: 544541 - DNA, 15 bp, Homo sapiens
ggtgtgttttgcttg

SEQ ID NO: 544542 - DNA, 15 bp, Homo sapiens
gtgtgttttgcttgg

SEQ ID NO: 544543 - DNA, 15 bp, Homo sapiens
tgtgttttgcttggt

SEQ ID NO: 544544 - DNA, 15 bp, Homo sapiens
gtgttttgcttggtt

SEQ ID NO: 544545 - DNA, 15 bp, Homo sapiens
tgttttgcttggttt

SEQ ID NO: 544546 - DNA, 15 bp, Homo sapiens
gttttgcttggtttg

SEQ ID NO: 544547 - DNA, 15 bp, Homo sapiens
ttttgcttggtttgc

SEQ ID NO: 544548 - DNA, 15 bp, Homo sapiens
tttgcttggtttgca

SEQ ID NO: 544549 - DNA, 15 bp, Homo sapiens
ttgcttggtttgcac

SEQ ID NO: 544550 - DNA, 15 bp, Homo sapiens
tgcttggtttgcacc

SEQ ID NO: 544551 - DNA, 15 bp, Homo sapiens
gcttggtttgcacca

SEQ ID NO: 544552 - DNA, 15 bp, Homo sapiens
cttggtttgcaccaa

SEQ ID NO: 544553 - DNA, 15 bp, Homo sapiens
ttggtttgcaccaat

SEQ ID NO: 544554 - DNA, 15 bp, Homo sapiens
tggtttgcaccaatg

SEQ ID NO: 544555 - DNA, 15 bp, Homo sapiens
ggtttgcaccaatgc

SEQ ID NO: 544556 - DNA, 15 bp, Homo sapiens
gtttgcaccaatgcc

SEQ ID NO: 544557 - DNA, 15 bp, Homo sapiens
tttgcaccaatgccc

SEQ ID NO: 544558 - DNA, 15 bp, Homo sapiens
ttgcaccaatgccct

SEQ ID NO: 544559 - DNA, 15 bp, Homo sapiens
tgcaccaatgccctg

SEQ ID NO: 544560 - DNA, 15 bp, Homo sapiens
gcaccaatgccctgg

SEQ ID NO: 544561 - DNA, 15 bp, Homo sapiens
caccaatgccctggc

SEQ ID NO: 544562 - DNA, 15 bp, Homo sapiens
accaatgccctggct

SEQ ID NO: 544563 - DNA, 15 bp, Homo sapiens
ccaatgccctggctg

SEQ ID NO: 544564 - DNA, 15 bp, Homo sapiens
caatgccctggctgg

SEQ ID NO: 544565 - DNA, 15 bp, Homo sapiens
aatgccctggctggc

SEQ ID NO: 544566 - DNA, 15 bp, Homo sapiens
atgccctggctggcg

SEQ ID NO: 544567 - DNA, 15 bp, Homo sapiens
tgccctggctggcgg

SEQ ID NO: 544568 - DNA, 15 bp, Homo sapiens
gccctggctggcggt

SEQ ID NO: 544569 - DNA, 15 bp, Homo sapiens
ccctggctggcggtc

SEQ ID NO: 544570 - DNA, 15 bp, Homo sapiens
cctggctggcggtca

SEQ ID NO: 544571 - DNA, 15 bp, Homo sapiens
ctggctggcggtcac

SEQ ID NO: 544572 - DNA, 15 bp, Homo sapiens
tggctggcggtcact

SEQ ID NO: 544573 - DNA, 15 bp, Homo sapiens
ggctggcggtcactt

SEQ ID NO: 544574 - DNA, 15 bp, Homo sapiens
gctggcggtcacttg

SEQ ID NO: 544575 - DNA, 15 bp, Homo sapiens
ctggcggtcacttgc

SEQ ID NO: 544576 - DNA, 15 bp, Homo sapiens
tggcggtcacttgct

SEQ ID NO: 544577 - DNA, 15 bp, Homo sapiens
ggcggtcacttgctc

SEQ ID NO: 544578 - DNA, 15 bp, Homo sapiens
gcggtcacttgctct

SEQ ID NO: 544579 - DNA, 15 bp, Homo sapiens
cggtcacttgctctt

SEQ ID NO: 544580 - DNA, 15 bp, Homo sapiens
ggtcacttgctcttg

SEQ ID NO: 544581 - DNA, 15 bp, Homo sapiens
gtcacttgctcttgg

SEQ ID NO: 544582 - DNA, 15 bp, Homo sapiens
tcacttgctcttggt

SEQ ID NO: 544583 - DNA, 15 bp, Homo sapiens
cacttgctcttggtg

SEQ ID NO: 544584 - DNA, 15 bp, Homo sapiens
acttgctcttggtgg

SEQ ID NO: 544585 - DNA, 15 bp, Homo sapiens
cttgctcttggtggc

SEQ ID NO: 544586 - DNA, 15 bp, Homo sapiens
ttgctcttggtggcc

SEQ ID NO: 544587 - DNA, 15 bp, Homo sapiens
tgctcttggtggcca

SEQ ID NO: 544588 - DNA, 15 bp, Homo sapiens
gctcttggtggccag

SEQ ID NO: 544589 - DNA, 15 bp, Homo sapiens
ctcttggtggccagt

SEQ ID NO: 544590 - DNA, 15 bp, Homo sapiens
tcttggtggccagtt

SEQ ID NO: 544591 - DNA, 15 bp, Homo sapiens
cttggtggccagttt

SEQ ID NO: 544592 - DNA, 15 bp, Homo sapiens
ttggtggccagtttc

SEQ ID NO: 544593 - DNA, 15 bp, Homo sapiens
tggtggccagtttca

SEQ ID NO: 544594 - DNA, 15 bp, Homo sapiens
ggtggccagtttcat

SEQ ID NO: 544595 - DNA, 15 bp, Homo sapiens
gtggccagtttcatt

SEQ ID NO: 544596 - DNA, 15 bp, Homo sapiens
tggccagtttcattt

SEQ ID NO: 544597 - DNA, 15 bp, Homo sapiens
ggccagtttcatttc

SEQ ID NO: 544598 - DNA, 15 bp, Homo sapiens
gccagtttcatttcc

SEQ ID NO: 544599 - DNA, 15 bp, Homo sapiens
ccagtttcatttcct

SEQ ID NO: 544600 - DNA, 15 bp, Homo sapiens
cagtttcatttcctg

SEQ ID NO: 544601 - DNA, 15 bp, Homo sapiens
agtttcatttcctgg

SEQ ID NO: 544602 - DNA, 15 bp, Homo sapiens
gtttcatttcctggt

SEQ ID NO: 544603 - DNA, 15 bp, Homo sapiens
tttcatttcctggtt

SEQ ID NO: 544604 - DNA, 15 bp, Homo sapiens
ttcatttcctggttt

SEQ ID NO: 544605 - DNA, 15 bp, Homo sapiens
tcatttcctggtttt

SEQ ID NO: 544606 - DNA, 15 bp, Homo sapiens
catttcctggttttg

SEQ ID NO: 544607 - DNA, 15 bp, Homo sapiens
atttcctggttttga

SEQ ID NO: 544608 - DNA, 15 bp, Homo sapiens
tttcctggttttgag

SEQ ID NO: 544609 - DNA, 15 bp, Homo sapiens
ttcctggttttgaga

SEQ ID NO: 544610 - DNA, 15 bp, Homo sapiens
tcctggttttgagaa

SEQ ID NO: 544611 - DNA, 15 bp, Homo sapiens
cctggttttgagaaa

SEQ ID NO: 544612 - DNA, 15 bp, Homo sapiens
ctggttttgagaaaa

SEQ ID NO: 544613 - DNA, 15 bp, Homo sapiens
tggttttgagaaaat

SEQ ID NO: 544614 - DNA, 15 bp, Homo sapiens
ggttttgagaaaatg

SEQ ID NO: 544615 - DNA, 15 bp, Homo sapiens
gttttgagaaaatgt

SEQ ID NO: 544616 - DNA, 15 bp, Homo sapiens
ttttgagaaaatgtc

SEQ ID NO: 544617 - DNA, 15 bp, Homo sapiens
tttgagaaaatgtca

SEQ ID NO: 544618 - DNA, 15 bp, Homo sapiens
ttgagaaaatgtcag

SEQ ID NO: 544619 - DNA, 15 bp, Homo sapiens
tgagaaaatgtcagg

SEQ ID NO: 544620 - DNA, 15 bp, Homo sapiens
gagaaaatgtcaggg

SEQ ID NO: 544621 - DNA, 15 bp, Homo sapiens
agaaaatgtcaggga

SEQ ID NO: 544622 - DNA, 15 bp, Homo sapiens
gaaaatgtcagggag

SEQ ID NO: 544623 - DNA, 15 bp, Homo sapiens
aaaatgtcagggagg

SEQ ID NO: 544624 - DNA, 15 bp, Homo sapiens
aaatgtcagggaggc

SEQ ID NO: 544625 - DNA, 15 bp, Homo sapiens
aatgtcagggaggcc

SEQ ID NO: 544626 - DNA, 15 bp, Homo sapiens
atgtcagggaggcct

SEQ ID NO: 544627 - DNA, 15 bp, Homo sapiens
tgtcagggaggcctg

SEQ ID NO: 544628 - DNA, 15 bp, Homo sapiens
gtcagggaggcctgt

SEQ ID NO: 544629 - DNA, 15 bp, Homo sapiens
tcagggaggcctgtt

SEQ ID NO: 544630 - DNA, 15 bp, Homo sapiens
cagggaggcctgttg

SEQ ID NO: 544631 - DNA, 15 bp, Homo sapiens
agggaggcctgttgc

SEQ ID NO: 544632 - DNA, 15 bp, Homo sapiens
gggaggcctgttgct

SEQ ID NO: 544633 - DNA, 15 bp, Homo sapiens
ggaggcctgttgctt

SEQ ID NO: 544634 - DNA, 15 bp, Homo sapiens
gaggcctgttgcttg

SEQ ID NO: 544635 - DNA, 15 bp, Homo sapiens
aggcctgttgcttgg

SEQ ID NO: 544636 - DNA, 15 bp, Homo sapiens
ggcctgttgcttggg

SEQ ID NO: 544637 - DNA, 15 bp, Homo sapiens
gcctgttgcttgggc

SEQ ID NO: 544638 - DNA, 15 bp, Homo sapiens
cctgttgcttgggca

SEQ ID NO: 544639 - DNA, 15 bp, Homo sapiens
ctgttgcttgggcat

SEQ ID NO: 544640 - DNA, 15 bp, Homo sapiens
tgttgcttgggcata

SEQ ID NO: 544641 - DNA, 15 bp, Homo sapiens
gttgcttgggcatac

SEQ ID NO: 544642 - DNA, 15 bp, Homo sapiens
ttgcttgggcatact

SEQ ID NO: 544643 - DNA, 15 bp, Homo sapiens
tgcttgggcatactg

SEQ ID NO: 544644 - DNA, 15 bp, Homo sapiens
gcttgggcatactgt

SEQ ID NO: 544645 - DNA, 15 bp, Homo sapiens
cttgggcatactgtc

SEQ ID NO: 544646 - DNA, 15 bp, Homo sapiens
ttgggcatactgtca

SEQ ID NO: 544647 - DNA, 15 bp, Homo sapiens
tgggcatactgtcac

SEQ ID NO: 544648 - DNA, 15 bp, Homo sapiens
gggcatactgtcact

SEQ ID NO: 544649 - DNA, 15 bp, Homo sapiens
ggcatactgtcactg

SEQ ID NO: 544650 - DNA, 15 bp, Homo sapiens
gcatactgtcactga

SEQ ID NO: 544651 - DNA, 15 bp, Homo sapiens
catactgtcactgag

SEQ ID NO: 544652 - DNA, 15 bp, Homo sapiens
atactgtcactgagg

SEQ ID NO: 544653 - DNA, 15 bp, Homo sapiens
tactgtcactgaggg

SEQ ID NO: 544654 - DNA, 15 bp, Homo sapiens
actgtcactgaggga

SEQ ID NO: 544655 - DNA, 15 bp, Homo sapiens
ctgtcactgagggaa

SEQ ID NO: 544656 - DNA, 15 bp, Homo sapiens
tgtcactgagggaag

SEQ ID NO: 544657 - DNA, 15 bp, Homo sapiens
gtcactgagggaagt

SEQ ID NO: 544658 - DNA, 15 bp, Homo sapiens
tcactgagggaagtg

SEQ ID NO: 544659 - DNA, 15 bp, Homo sapiens
cactgagggaagtgt

SEQ ID NO: 544660 - DNA, 15 bp, Homo sapiens
actgagggaagtgtg

SEQ ID NO: 544661 - DNA, 15 bp, Homo sapiens
ctgagggaagtgtgc

SEQ ID NO: 544662 - DNA, 15 bp, Homo sapiens
tgagggaagtgtgca

SEQ ID NO: 544663 - DNA, 15 bp, Homo sapiens
gagggaagtgtgcag

SEQ ID NO: 544664 - DNA, 15 bp, Homo sapiens
agggaagtgtgcagt

SEQ ID NO: 544665 - DNA, 15 bp, Homo sapiens
gggaagtgtgcagtt

SEQ ID NO: 544666 - DNA, 15 bp, Homo sapiens
ggaagtgtgcagttt

SEQ ID NO: 544667 - DNA, 15 bp, Homo sapiens
gaagtgtgcagtttt

SEQ ID NO: 544668 - DNA, 15 bp, Homo sapiens
aagtgtgcagtttta

SEQ ID NO: 544669 - DNA, 15 bp, Homo sapiens
agtgtgcagttttaa

SEQ ID NO: 544670 - DNA, 15 bp, Homo sapiens
gtgtgcagttttaaa

SEQ ID NO: 544671 - DNA, 15 bp, Homo sapiens
tgtgcagttttaaaa

SEQ ID NO: 544672 - DNA, 15 bp, Homo sapiens
gtgcagttttaaaat

SEQ ID NO: 544673 - DNA, 15 bp, Homo sapiens
tgcagttttaaaatg

SEQ ID NO: 544674 - DNA, 15 bp, Homo sapiens
gcagttttaaaatgt

SEQ ID NO: 544675 - DNA, 15 bp, Homo sapiens
cagttttaaaatgtc

SEQ ID NO: 544676 - DNA, 15 bp, Homo sapiens
agttttaaaatgtca

SEQ ID NO: 544677 - DNA, 15 bp, Homo sapiens
gttttaaaatgtcaa

SEQ ID NO: 544678 - DNA, 15 bp, Homo sapiens
ttttaaaatgtcaaa

SEQ ID NO: 544679 - DNA, 15 bp, Homo sapiens
tttaaaatgtcaaag

SEQ ID NO: 544680 - DNA, 15 bp, Homo sapiens
ttaaaatgtcaaagc

SEQ ID NO: 544681 - DNA, 15 bp, Homo sapiens
taaaatgtcaaagcc

SEQ ID NO: 544682 - DNA, 15 bp, Homo sapiens
aaaatgtcaaagcca

SEQ ID NO: 544683 - DNA, 15 bp, Homo sapiens
aaatgtcaaagccag

SEQ ID NO: 544684 - DNA, 15 bp, Homo sapiens
aatgtcaaagccagc

SEQ ID NO: 544685 - DNA, 15 bp, Homo sapiens
atgtcaaagccagca

SEQ ID NO: 544686 - DNA, 15 bp, Homo sapiens
tgtcaaagccagcag

SEQ ID NO: 544687 - DNA, 15 bp, Homo sapiens
gtcaaagccagcagg

SEQ ID NO: 544688 - DNA, 15 bp, Homo sapiens
tcaaagccagcaggc

SEQ ID NO: 544689 - DNA, 15 bp, Homo sapiens
caaagccagcaggct

SEQ ID NO: 544690 - DNA, 15 bp, Homo sapiens
aaagccagcaggctc

SEQ ID NO: 544691 - DNA, 15 bp, Homo sapiens
aagccagcaggctca

SEQ ID NO: 544692 - DNA, 15 bp, Homo sapiens
agccagcaggctcat

SEQ ID NO: 544693 - DNA, 15 bp, Homo sapiens
gccagcaggctcatg

SEQ ID NO: 544694 - DNA, 15 bp, Homo sapiens
ccagcaggctcatgt

SEQ ID NO: 544695 - DNA, 15 bp, Homo sapiens
cagcaggctcatgtc

SEQ ID NO: 544696 - DNA, 15 bp, Homo sapiens
agcaggctcatgtcc

SEQ ID NO: 544697 - DNA, 15 bp, Homo sapiens
gcaggctcatgtcca

SEQ ID NO: 544698 - DNA, 15 bp, Homo sapiens
caggctcatgtccag

SEQ ID NO: 544699 - DNA, 15 bp, Homo sapiens
aggctcatgtccagt

SEQ ID NO: 544700 - DNA, 15 bp, Homo sapiens
ggctcatgtccagtg

SEQ ID NO: 544701 - DNA, 15 bp, Homo sapiens
gctcatgtccagtgc

SEQ ID NO: 544702 - DNA, 15 bp, Homo sapiens
ctcatgtccagtgca

SEQ ID NO: 544703 - DNA, 15 bp, Homo sapiens
tcatgtccagtgcat

SEQ ID NO: 544704 - DNA, 15 bp, Homo sapiens
catgtccagtgcatg

SEQ ID NO: 544705 - DNA, 15 bp, Homo sapiens
atgtccagtgcatgc

SEQ ID NO: 544706 - DNA, 15 bp, Homo sapiens
tgtccagtgcatgcc

SEQ ID NO: 544707 - DNA, 15 bp, Homo sapiens
gtccagtgcatgcca

SEQ ID NO: 544708 - DNA, 15 bp, Homo sapiens
tccagtgcatgccat

SEQ ID NO: 544709 - DNA, 15 bp, Homo sapiens
ccagtgcatgccatc

SEQ ID NO: 544710 - DNA, 15 bp, Homo sapiens
cagtgcatgccatca

SEQ ID NO: 544711 - DNA, 15 bp, Homo sapiens
agtgcatgccatcaa

SEQ ID NO: 544712 - DNA, 15 bp, Homo sapiens
gtgcatgccatcaat

SEQ ID NO: 544713 - DNA, 15 bp, Homo sapiens
tgcatgccatcaatc

SEQ ID NO: 544714 - DNA, 15 bp, Homo sapiens
gcatgccatcaatca

SEQ ID NO: 544715 - DNA, 15 bp, Homo sapiens
catgccatcaatcag

SEQ ID NO: 544716 - DNA, 15 bp, Homo sapiens
atgccatcaatcagc

SEQ ID NO: 544717 - DNA, 15 bp, Homo sapiens
tgccatcaatcagca

SEQ ID NO: 544718 - DNA, 15 bp, Homo sapiens
gccatcaatcagcaa

SEQ ID NO: 544719 - DNA, 15 bp, Homo sapiens
ccatcaatcagcaaa

SEQ ID NO: 544720 - DNA, 15 bp, Homo sapiens
catcaatcagcaaat

SEQ ID NO: 544721 - DNA, 15 bp, Homo sapiens
atcaatcagcaaatg

SEQ ID NO: 544722 - DNA, 15 bp, Homo sapiens
tcaatcagcaaatgt

SEQ ID NO: 544723 - DNA, 15 bp, Homo sapiens
caatcagcaaatgtc

SEQ ID NO: 544724 - DNA, 15 bp, Homo sapiens
aatcagcaaatgtcc

SEQ ID NO: 544725 - DNA, 15 bp, Homo sapiens
atcagcaaatgtccc

SEQ ID NO: 544726 - DNA, 15 bp, Homo sapiens
tcagcaaatgtccct

SEQ ID NO: 544727 - DNA, 15 bp, Homo sapiens
cagcaaatgtccctg

SEQ ID NO: 544728 - DNA, 15 bp, Homo sapiens
agcaaatgtccctgg

SEQ ID NO: 544729 - DNA, 15 bp, Homo sapiens
gcaaatgtccctgga

SEQ ID NO: 544730 - DNA, 15 bp, Homo sapiens
caaatgtccctggac

SEQ ID NO: 544731 - DNA, 15 bp, Homo sapiens
aaatgtccctggacc

SEQ ID NO: 544732 - DNA, 15 bp, Homo sapiens
aatgtccctggaccc

SEQ ID NO: 544733 - DNA, 15 bp, Homo sapiens
atgtccctggacccc

SEQ ID NO: 544734 - DNA, 15 bp, Homo sapiens
tgtccctggacccct

SEQ ID NO: 544735 - DNA, 15 bp, Homo sapiens
gtccctggaccccta

SEQ ID NO: 544736 - DNA, 15 bp, Homo sapiens
tccctggacccctaa

SEQ ID NO: 544737 - DNA, 15 bp, Homo sapiens
ccctggacccctaat

SEQ ID NO: 544738 - DNA, 15 bp, Homo sapiens
cctggacccctaatg

SEQ ID NO: 544739 - DNA, 15 bp, Homo sapiens
ctggacccctaatga

SEQ ID NO: 544740 - DNA, 15 bp, Homo sapiens
tggacccctaatgag

SEQ ID NO: 544741 - DNA, 15 bp, Homo sapiens
ggacccctaatgagc

SEQ ID NO: 544742 - DNA, 15 bp, Homo sapiens
gacccctaatgagcc

SEQ ID NO: 544743 - DNA, 15 bp, Homo sapiens
acccctaatgagccc

SEQ ID NO: 544744 - DNA, 15 bp, Homo sapiens
cccctaatgagccca

SEQ ID NO: 544745 - DNA, 15 bp, Homo sapiens
ccctaatgagcccac

SEQ ID NO: 544746 - DNA, 15 bp, Homo sapiens
cctaatgagcccact

SEQ ID NO: 544747 - DNA, 15 bp, Homo sapiens
ctaatgagcccactg

SEQ ID NO: 544748 - DNA, 15 bp, Homo sapiens
taatgagcccactga

SEQ ID NO: 544749 - DNA, 15 bp, Homo sapiens
aatgagcccactgaa

SEQ ID NO: 544750 - DNA, 15 bp, Homo sapiens
atgagcccactgaaa

SEQ ID NO: 544751 - DNA, 15 bp, Homo sapiens
tgagcccactgaaag

SEQ ID NO: 544752 - DNA, 15 bp, Homo sapiens
gagcccactgaaagt

SEQ ID NO: 544753 - DNA, 15 bp, Homo sapiens
agcccactgaaagtt

SEQ ID NO: 544754 - DNA, 15 bp, Homo sapiens
gcccactgaaagttc

SEQ ID NO: 544755 - DNA, 15 bp, Homo sapiens
cccactgaaagttca

SEQ ID NO: 544756 - DNA, 15 bp, Homo sapiens
ccactgaaagttcaa

SEQ ID NO: 544757 - DNA, 15 bp, Homo sapiens
cactgaaagttcaaa

SEQ ID NO: 544758 - DNA, 15 bp, Homo sapiens
actgaaagttcaaac

SEQ ID NO: 544759 - DNA, 15 bp, Homo sapiens
ctgaaagttcaaacg

SEQ ID NO: 544760 - DNA, 15 bp, Homo sapiens
tgaaagttcaaacgg

SEQ ID NO: 544761 - DNA, 15 bp, Homo sapiens
gaaagttcaaacggt

SEQ ID NO: 544762 - DNA, 15 bp, Homo sapiens
aaagttcaaacggta

SEQ ID NO: 544763 - DNA, 15 bp, Homo sapiens
aagttcaaacggtaa

SEQ ID NO: 544764 - DNA, 15 bp, Homo sapiens
agttcaaacggtaaa

SEQ ID NO: 544765 - DNA, 15 bp, Homo sapiens
gttcaaacggtaaat

SEQ ID NO: 544766 - DNA, 15 bp, Homo sapiens
ttcaaacggtaaata

SEQ ID NO: 544767 - DNA, 15 bp, Homo sapiens
tcaaacggtaaataa

SEQ ID NO: 544768 - DNA, 15 bp, Homo sapiens
caaacggtaaataac

SEQ ID NO: 544769 - DNA, 15 bp, Homo sapiens
aaacggtaaataacg

SEQ ID NO: 544770 - DNA, 15 bp, Homo sapiens
aacggtaaataacga

SEQ ID NO: 544771 - DNA, 15 bp, Homo sapiens
acggtaaataacgaa

SEQ ID NO: 544772 - DNA, 15 bp, Homo sapiens
cggtaaataacgaac

SEQ ID NO: 544773 - DNA, 15 bp, Homo sapiens
ggtaaataacgaaca

SEQ ID NO: 544774 - DNA, 15 bp, Homo sapiens
gtaaataacgaacag

SEQ ID NO: 544775 - DNA, 15 bp, Homo sapiens
taaataacgaacaga

SEQ ID NO: 544776 - DNA, 15 bp, Homo sapiens
aaataacgaacagat

SEQ ID NO: 544777 - DNA, 15 bp, Homo sapiens
aataacgaacagata

SEQ ID NO: 544778 - DNA, 15 bp, Homo sapiens
ataacgaacagataa

SEQ ID NO: 544779 - DNA, 15 bp, Homo sapiens
taacgaacagataaa

SEQ ID NO: 544780 - DNA, 15 bp, Homo sapiens
aacgaacagataaag

SEQ ID NO: 544781 - DNA, 15 bp, Homo sapiens
acgaacagataaaga

SEQ ID NO: 544782 - DNA, 15 bp, Homo sapiens
cgaacagataaagat

SEQ ID NO: 544783 - DNA, 15 bp, Homo sapiens
gaacagataaagatc

SEQ ID NO: 544784 - DNA, 15 bp, Homo sapiens
aacagataaagatct

SEQ ID NO: 544785 - DNA, 15 bp, Homo sapiens
acagataaagatctt

SEQ ID NO: 544786 - DNA, 15 bp, Homo sapiens
cagataaagatcttg

SEQ ID NO: 544787 - DNA, 15 bp, Homo sapiens
agataaagatcttgc

SEQ ID NO: 544788 - DNA, 15 bp, Homo sapiens
gataaagatcttgcc

SEQ ID NO: 544789 - DNA, 15 bp, Homo sapiens
ataaagatcttgccc

SEQ ID NO: 544790 - DNA, 15 bp, Homo sapiens
taaagatcttgccct

SEQ ID NO: 544791 - DNA, 15 bp, Homo sapiens
aaagatcttgcccta

SEQ ID NO: 544792 - DNA, 15 bp, Homo sapiens
aagatcttgccctaa

SEQ ID NO: 544793 - DNA, 15 bp, Homo sapiens
agatcttgccctaaa

SEQ ID NO: 544794 - DNA, 15 bp, Homo sapiens
gatcttgccctaaaa

SEQ ID NO: 544795 - DNA, 15 bp, Homo sapiens
atcttgccctaaaat

SEQ ID NO: 544796 - DNA, 15 bp, Homo sapiens
tcttgccctaaaatc

SEQ ID NO: 544797 - DNA, 15 bp, Homo sapiens
cttgccctaaaatcg

SEQ ID NO: 544798 - DNA, 15 bp, Homo sapiens
ttgccctaaaatcgc

SEQ ID NO: 544799 - DNA, 15 bp, Homo sapiens
tgccctaaaatcgcc

SEQ ID NO: 544800 - DNA, 15 bp, Homo sapiens
gccctaaaatcgcct

SEQ ID NO: 544801 - DNA, 15 bp, Homo sapiens
ccctaaaatcgccta

SEQ ID NO: 544802 - DNA, 15 bp, Homo sapiens
cctaaaatcgcctac

SEQ ID NO: 544803 - DNA, 15 bp, Homo sapiens
ctaaaatcgcctacc

SEQ ID NO: 544804 - DNA, 15 bp, Homo sapiens
taaaatcgcctacca

SEQ ID NO: 544805 - DNA, 15 bp, Homo sapiens
aaaatcgcctaccat

SEQ ID NO: 544806 - DNA, 15 bp, Homo sapiens
aaatcgcctaccatc

SEQ ID NO: 544807 - DNA, 15 bp, Homo sapiens
aatcgcctaccatct

SEQ ID NO: 544808 - DNA, 15 bp, Homo sapiens
atcgcctaccatcta

SEQ ID NO: 544809 - DNA, 15 bp, Homo sapiens
tcgcctaccatctaa

SEQ ID NO: 544810 - DNA, 15 bp, Homo sapiens
cgcctaccatctaac

SEQ ID NO: 544811 - DNA, 15 bp, Homo sapiens
gcctaccatctaacc

SEQ ID NO: 544812 - DNA, 15 bp, Homo sapiens
cctaccatctaacca

SEQ ID NO: 544813 - DNA, 15 bp, Homo sapiens
ctaccatctaaccaa

SEQ ID NO: 544814 - DNA, 15 bp, Homo sapiens
taccatctaaccaaa

SEQ ID NO: 544815 - DNA, 15 bp, Homo sapiens
accatctaaccaaag

SEQ ID NO: 544816 - DNA, 15 bp, Homo sapiens
ccatctaaccaaagg

SEQ ID NO: 544817 - DNA, 15 bp, Homo sapiens
catctaaccaaaggg

SEQ ID NO: 544818 - DNA, 15 bp, Homo sapiens
atctaaccaaagggg

SEQ ID NO: 544819 - DNA, 15 bp, Homo sapiens
tctaaccaaaggggc

SEQ ID NO: 544820 - DNA, 15 bp, Homo sapiens
ctaaccaaaggggca

SEQ ID NO: 544821 - DNA, 15 bp, Homo sapiens
taaccaaaggggcaa

SEQ ID NO: 544822 - DNA, 15 bp, Homo sapiens
aaccaaaggggcaag

SEQ ID NO: 544823 - DNA, 15 bp, Homo sapiens
accaaaggggcaaga

SEQ ID NO: 544824 - DNA, 15 bp, Homo sapiens
ccaaaggggcaagat

SEQ ID NO: 544825 - DNA, 15 bp, Homo sapiens
caaaggggcaagatc

SEQ ID NO: 544826 - DNA, 15 bp, Homo sapiens
aaaggggcaagatca

SEQ ID NO: 544827 - DNA, 15 bp, Homo sapiens
aaggggcaagatcaa

SEQ ID NO: 544828 - DNA, 15 bp, Homo sapiens
aggggcaagatcaaa

SEQ ID NO: 544829 - DNA, 15 bp, Homo sapiens
ggggcaagatcaaaa

SEQ ID NO: 544830 - DNA, 15 bp, Homo sapiens
gggcaagatcaaaag

SEQ ID NO: 544831 - DNA, 15 bp, Homo sapiens
ggcaagatcaaaagg

SEQ ID NO: 544832 - DNA, 15 bp, Homo sapiens
gcaagatcaaaaggg

SEQ ID NO: 544833 - DNA, 15 bp, Homo sapiens
caagatcaaaaggga

SEQ ID NO: 544834 - DNA, 15 bp, Homo sapiens
aagatcaaaagggaa

SEQ ID NO: 544835 - DNA, 15 bp, Homo sapiens
agatcaaaagggaaa

SEQ ID NO: 544836 - DNA, 15 bp, Homo sapiens
gatcaaaagggaaag

SEQ ID NO: 544837 - DNA, 15 bp, Homo sapiens
atcaaaagggaaaga

SEQ ID NO: 544838 - DNA, 15 bp, Homo sapiens
tcaaaagggaaagaa

SEQ ID NO: 544839 - DNA, 15 bp, Homo sapiens
caaaagggaaagaaa

SEQ ID NO: 544840 - DNA, 15 bp, Homo sapiens
aaaagggaaagaaaa

SEQ ID NO: 544841 - DNA, 15 bp, Homo sapiens
aaagggaaagaaaaa

SEQ ID NO: 544842 - DNA, 15 bp, Homo sapiens
aagggaaagaaaaat

SEQ ID NO: 544843 - DNA, 15 bp, Homo sapiens
agggaaagaaaaata

SEQ ID NO: 544844 - DNA, 15 bp, Homo sapiens
gggaaagaaaaatag

SEQ ID NO: 544845 - DNA, 15 bp, Homo sapiens
ggaaagaaaaatagt

SEQ ID NO: 544846 - DNA, 15 bp, Homo sapiens
gaaagaaaaatagta

SEQ ID NO: 544847 - DNA, 15 bp, Homo sapiens
aaagaaaaatagtat

SEQ ID NO: 544848 - DNA, 15 bp, Homo sapiens
aagaaaaatagtatc

SEQ ID NO: 544849 - DNA, 15 bp, Homo sapiens
agaaaaatagtatca

SEQ ID NO: 544850 - DNA, 15 bp, Homo sapiens
gaaaaatagtatcaa

SEQ ID NO: 544851 - DNA, 15 bp, Homo sapiens
aaaaatagtatcaat

SEQ ID NO: 544852 - DNA, 15 bp, Homo sapiens
aaaatagtatcaata

SEQ ID NO: 544853 - DNA, 15 bp, Homo sapiens
aaatagtatcaatat

SEQ ID NO: 544854 - DNA, 15 bp, Homo sapiens
aatagtatcaatatg

SEQ ID NO: 544855 - DNA, 15 bp, Homo sapiens
atagtatcaatatgg

SEQ ID NO: 544856 - DNA, 15 bp, Homo sapiens
tagtatcaatatgga

SEQ ID NO: 544857 - DNA, 15 bp, Homo sapiens
agtatcaatatggaa

SEQ ID NO: 544858 - DNA, 15 bp, Homo sapiens
gtatcaatatggaaa

SEQ ID NO: 544859 - DNA, 15 bp, Homo sapiens
tatcaatatggaaaa

SEQ ID NO: 544860 - DNA, 15 bp, Homo sapiens
atcaatatggaaaaa

SEQ ID NO: 544861 - DNA, 15 bp, Homo sapiens
tcaatatggaaaaat

SEQ ID NO: 544862 - DNA, 15 bp, Homo sapiens
caatatggaaaaata

SEQ ID NO: 544863 - DNA, 15 bp, Homo sapiens
aatatggaaaaataa

SEQ ID NO: 544864 - DNA, 15 bp, Homo sapiens
atatggaaaaataaa

SEQ ID NO: 544865 - DNA, 15 bp, Homo sapiens
tatggaaaaataaat

SEQ ID NO: 544866 - DNA, 15 bp, Homo sapiens
atggaaaaataaatg

SEQ ID NO: 544867 - DNA, 15 bp, Homo sapiens
tggaaaaataaatgt

SEQ ID NO: 544868 - DNA, 15 bp, Homo sapiens
ggaaaaataaatgta

SEQ ID NO: 544869 - DNA, 15 bp, Homo sapiens
gaaaaataaatgtac

SEQ ID NO: 544870 - DNA, 15 bp, Homo sapiens
aaaaataaatgtact

SEQ ID NO: 544871 - DNA, 15 bp, Homo sapiens
aaaataaatgtacta

SEQ ID NO: 544872 - DNA, 15 bp, Homo sapiens
aaataaatgtactaa

SEQ ID NO: 544873 - DNA, 15 bp, Homo sapiens
aataaatgtactaat

SEQ ID NO: 544874 - DNA, 15 bp, Homo sapiens
ataaatgtactaatt

SEQ ID NO: 544875 - DNA, 15 bp, Homo sapiens
taaatgtactaattg

SEQ ID NO: 544876 - DNA, 15 bp, Homo sapiens
aaatgtactaattgc

SEQ ID NO: 544877 - DNA, 15 bp, Homo sapiens
aatgtactaattgct

SEQ ID NO: 544878 - DNA, 15 bp, Homo sapiens
atgtactaattgctg

SEQ ID NO: 544879 - DNA, 15 bp, Homo sapiens
tgtactaattgctgt

SEQ ID NO: 544880 - DNA, 15 bp, Homo sapiens
gtactaattgctgta

SEQ ID NO: 544881 - DNA, 15 bp, Homo sapiens
tactaattgctgtag

SEQ ID NO: 544882 - DNA, 15 bp, Homo sapiens
actaattgctgtagt

SEQ ID NO: 544883 - DNA, 15 bp, Homo sapiens
ctaattgctgtagtg

SEQ ID NO: 544884 - DNA, 15 bp, Homo sapiens
taattgctgtagtgt

SEQ ID NO: 544885 - DNA, 15 bp, Homo sapiens
aattgctgtagtgtt

SEQ ID NO: 544886 - DNA, 15 bp, Homo sapiens
attgctgtagtgttt

SEQ ID NO: 544887 - DNA, 15 bp, Homo sapiens
ttgctgtagtgtttg

SEQ ID NO: 544888 - DNA, 15 bp, Homo sapiens
tgctgtagtgtttgt

SEQ ID NO: 544889 - DNA, 15 bp, Homo sapiens
gctgtagtgtttgtg

SEQ ID NO: 544890 - DNA, 15 bp, Homo sapiens
ctgtagtgtttgtgg

SEQ ID NO: 544891 - DNA, 15 bp, Homo sapiens
tgtagtgtttgtggg

SEQ ID NO: 544892 - DNA, 15 bp, Homo sapiens
gtagtgtttgtgggc

SEQ ID NO: 544893 - DNA, 15 bp, Homo sapiens
tagtgtttgtgggca

SEQ ID NO: 544894 - DNA, 15 bp, Homo sapiens
agtgtttgtgggcaa

SEQ ID NO: 544895 - DNA, 15 bp, Homo sapiens
gtgtttgtgggcaaa

SEQ ID NO: 544896 - DNA, 15 bp, Homo sapiens
tgtttgtgggcaaag

SEQ ID NO: 544897 - DNA, 15 bp, Homo sapiens
gtttgtgggcaaaga

SEQ ID NO: 544898 - DNA, 15 bp, Homo sapiens
tttgtgggcaaagaa

SEQ ID NO: 544899 - DNA, 15 bp, Homo sapiens
ttgtgggcaaagaat

SEQ ID NO: 544900 - DNA, 15 bp, Homo sapiens
tgtgggcaaagaatg

SEQ ID NO: 544901 - DNA, 15 bp, Homo sapiens
gtgggcaaagaatgc

SEQ ID NO: 544902 - DNA, 15 bp, Homo sapiens
tgggcaaagaatgca

SEQ ID NO: 544903 - DNA, 15 bp, Homo sapiens
gggcaaagaatgcag

SEQ ID NO: 544904 - DNA, 15 bp, Homo sapiens
ggcaaagaatgcagc

SEQ ID NO: 544905 - DNA, 15 bp, Homo sapiens
gcaaagaatgcagct

SEQ ID NO: 544906 - DNA, 15 bp, Homo sapiens
caaagaatgcagctg

SEQ ID NO: 544907 - DNA, 15 bp, Homo sapiens
aaagaatgcagctga

SEQ ID NO: 544908 - DNA, 15 bp, Homo sapiens
aagaatgcagctgag

SEQ ID NO: 544909 - DNA, 15 bp, Homo sapiens
agaatgcagctgaga

SEQ ID NO: 544910 - DNA, 15 bp, Homo sapiens
gaatgcagctgagaa

SEQ ID NO: 544911 - DNA, 15 bp, Homo sapiens
aatgcagctgagaaa

SEQ ID NO: 544912 - DNA, 15 bp, Homo sapiens
atgcagctgagaaag

SEQ ID NO: 544913 - DNA, 15 bp, Homo sapiens
tgcagctgagaaagt

SEQ ID NO: 544914 - DNA, 15 bp, Homo sapiens
gcagctgagaaagtg

SEQ ID NO: 544915 - DNA, 15 bp, Homo sapiens
cagctgagaaagtgc

SEQ ID NO: 544916 - DNA, 15 bp, Homo sapiens
agctgagaaagtgca

SEQ ID NO: 544917 - DNA, 15 bp, Homo sapiens
gctgagaaagtgcag

SEQ ID NO: 544918 - DNA, 15 bp, Homo sapiens
ctgagaaagtgcagc

SEQ ID NO: 544919 - DNA, 15 bp, Homo sapiens
tgagaaagtgcagcc

SEQ ID NO: 544920 - DNA, 15 bp, Homo sapiens
gagaaagtgcagcct

SEQ ID NO: 544921 - DNA, 15 bp, Homo sapiens
agaaagtgcagcctc

SEQ ID NO: 544922 - DNA, 15 bp, Homo sapiens
gaaagtgcagcctcg

SEQ ID NO: 544923 - DNA, 15 bp, Homo sapiens
aaagtgcagcctcgt

SEQ ID NO: 544924 - DNA, 15 bp, Homo sapiens
aagtgcagcctcgtg

SEQ ID NO: 544925 - DNA, 15 bp, Homo sapiens
agtgcagcctcgtgg

SEQ ID NO: 544926 - DNA, 15 bp, Homo sapiens
gtgcagcctcgtgga

SEQ ID NO: 544927 - DNA, 15 bp, Homo sapiens
tgcagcctcgtggaa

SEQ ID NO: 544928 - DNA, 15 bp, Homo sapiens
gcagcctcgtggaaa

SEQ ID NO: 544929 - DNA, 15 bp, Homo sapiens
cagcctcgtggaaag

SEQ ID NO: 544930 - DNA, 15 bp, Homo sapiens
agcctcgtggaaagg

SEQ ID NO: 544931 - DNA, 15 bp, Homo sapiens
gcctcgtggaaaggg

SEQ ID NO: 544932 - DNA, 15 bp, Homo sapiens
cctcgtggaaagggc

SEQ ID NO: 544933 - DNA, 15 bp, Homo sapiens
ctcgtggaaagggcc

SEQ ID NO: 544934 - DNA, 15 bp, Homo sapiens
tcgtggaaagggccc

SEQ ID NO: 544935 - DNA, 15 bp, Homo sapiens
cgtggaaagggcccc

SEQ ID NO: 544936 - DNA, 15 bp, Homo sapiens
gtggaaagggcccca

SEQ ID NO: 544937 - DNA, 15 bp, Homo sapiens
tggaaagggccccac

SEQ ID NO: 544938 - DNA, 15 bp, Homo sapiens
ggaaagggccccacg

SEQ ID NO: 544939 - DNA, 15 bp, Homo sapiens
gaaagggccccacgg

SEQ ID NO: 544940 - DNA, 15 bp, Homo sapiens
aaagggccccacgga

SEQ ID NO: 544941 - DNA, 15 bp, Homo sapiens
aagggccccacggaa

SEQ ID NO: 544942 - DNA, 15 bp, Homo sapiens
agggccccacggaag

SEQ ID NO: 544943 - DNA, 15 bp, Homo sapiens
gggccccacggaagg

SEQ ID NO: 544944 - DNA, 15 bp, Homo sapiens
ggccccacggaaggg

SEQ ID NO: 544945 - DNA, 15 bp, Homo sapiens
gccccacggaaggga

SEQ ID NO: 544946 - DNA, 15 bp, Homo sapiens
ccccacggaagggag

SEQ ID NO: 544947 - DNA, 15 bp, Homo sapiens
cccacggaagggagt

SEQ ID NO: 544948 - DNA, 15 bp, Homo sapiens
ccacggaagggagtc

SEQ ID NO: 544949 - DNA, 15 bp, Homo sapiens
cacggaagggagtcc

SEQ ID NO: 544950 - DNA, 15 bp, Homo sapiens
acggaagggagtcca

SEQ ID NO: 544951 - DNA, 15 bp, Homo sapiens
cggaagggagtccag

SEQ ID NO: 544952 - DNA, 15 bp, Homo sapiens
ggaagggagtccaga

SEQ ID NO: 544953 - DNA, 15 bp, Homo sapiens
gaagggagtccagag

SEQ ID NO: 544954 - DNA, 15 bp, Homo sapiens
aagggagtccagagg

SEQ ID NO: 544955 - DNA, 15 bp, Homo sapiens
agggagtccagaggg

SEQ ID NO: 544956 - DNA, 15 bp, Homo sapiens
gggagtccagagggt

SEQ ID NO: 544957 - DNA, 15 bp, Homo sapiens
ggagtccagagggtt

SEQ ID NO: 544958 - DNA, 15 bp, Homo sapiens
gagtccagagggttg

SEQ ID NO: 544959 - DNA, 15 bp, Homo sapiens
agtccagagggttgg

SEQ ID NO: 544960 - DNA, 15 bp, Homo sapiens
gtccagagggttggc

SEQ ID NO: 544961 - DNA, 15 bp, Homo sapiens
tccagagggttggcc

SEQ ID NO: 544962 - DNA, 15 bp, Homo sapiens
ccagagggttggcct

SEQ ID NO: 544963 - DNA, 15 bp, Homo sapiens
cagagggttggcctc

SEQ ID NO: 544964 - DNA, 15 bp, Homo sapiens
agagggttggcctca

SEQ ID NO: 544965 - DNA, 15 bp, Homo sapiens
gagggttggcctcac

SEQ ID NO: 544966 - DNA, 15 bp, Homo sapiens
agggttggcctcaca

SEQ ID NO: 544967 - DNA, 15 bp, Homo sapiens
gggttggcctcacac

SEQ ID NO: 544968 - DNA, 15 bp, Homo sapiens
ggttggcctcacact

SEQ ID NO: 544969 - DNA, 15 bp, Homo sapiens
gttggcctcacactc

SEQ ID NO: 544970 - DNA, 15 bp, Homo sapiens
ttggcctcacactct

SEQ ID NO: 544971 - DNA, 15 bp, Homo sapiens
tggcctcacactctt

SEQ ID NO: 544972 - DNA, 15 bp, Homo sapiens
ggcctcacactcttc

SEQ ID NO: 544973 - DNA, 15 bp, Homo sapiens
gcctcacactcttcc

SEQ ID NO: 544974 - DNA, 15 bp, Homo sapiens
cctcacactcttccc

SEQ ID NO: 544975 - DNA, 15 bp, Homo sapiens
ctcacactcttcccc

SEQ ID NO: 544976 - DNA, 15 bp, Homo sapiens
tcacactcttcccct

SEQ ID NO: 544977 - DNA, 15 bp, Homo sapiens
cacactcttcccctt

SEQ ID NO: 544978 - DNA, 15 bp, Homo sapiens
acactcttccccttc

SEQ ID NO: 544979 - DNA, 15 bp, Homo sapiens
cactcttccccttcc

SEQ ID NO: 544980 - DNA, 15 bp, Homo sapiens
actcttccccttccc

SEQ ID NO: 544981 - DNA, 15 bp, Homo sapiens
ctcttccccttcccg

SEQ ID NO: 544982 - DNA, 15 bp, Homo sapiens
tcttccccttcccgc

SEQ ID NO: 544983 - DNA, 15 bp, Homo sapiens
cttccccttcccgct

SEQ ID NO: 544984 - DNA, 15 bp, Homo sapiens
ttccccttcccgctt

SEQ ID NO: 544985 - DNA, 15 bp, Homo sapiens
tccccttcccgcttt

SEQ ID NO: 544986 - DNA, 15 bp, Homo sapiens
ccccttcccgcttta

SEQ ID NO: 544987 - DNA, 15 bp, Homo sapiens
cccttcccgctttat

SEQ ID NO: 544988 - DNA, 15 bp, Homo sapiens
ccttcccgctttatg

SEQ ID NO: 544989 - DNA, 15 bp, Homo sapiens
cttcccgctttatga

SEQ ID NO: 544990 - DNA, 15 bp, Homo sapiens
ttcccgctttatgac

SEQ ID NO: 544991 - DNA, 15 bp, Homo sapiens
tcccgctttatgacc

SEQ ID NO: 544992 - DNA, 15 bp, Homo sapiens
cccgctttatgacca

SEQ ID NO: 544993 - DNA, 15 bp, Homo sapiens
ccgctttatgaccac

SEQ ID NO: 544994 - DNA, 15 bp, Homo sapiens
cgctttatgaccacg

SEQ ID NO: 544995 - DNA, 15 bp, Homo sapiens
gctttatgaccacga

SEQ ID NO: 544996 - DNA, 15 bp, Homo sapiens
ctttatgaccacgaa

SEQ ID NO: 544997 - DNA, 15 bp, Homo sapiens
tttatgaccacgaac

SEQ ID NO: 544998 - DNA, 15 bp, Homo sapiens
ttatgaccacgaacg

SEQ ID NO: 544999 - DNA, 15 bp, Homo sapiens
tatgaccacgaacgt

SEQ ID NO: 545000 - DNA, 15 bp, Homo sapiens
atgaccacgaacgta

SEQ ID NO: 545001 - DNA, 15 bp, Homo sapiens
tgaccacgaacgtag

SEQ ID NO: 545002 - DNA, 15 bp, Homo sapiens
gaccacgaacgtagt

SEQ ID NO: 545003 - DNA, 15 bp, Homo sapiens
accacgaacgtagtc

SEQ ID NO: 545004 - DNA, 15 bp, Homo sapiens
ccacgaacgtagtcc

SEQ ID NO: 545005 - DNA, 15 bp, Homo sapiens
cacgaacgtagtcct

SEQ ID NO: 545006 - DNA, 15 bp, Homo sapiens
acgaacgtagtcctt

SEQ ID NO: 545007 - DNA, 15 bp, Homo sapiens
cgaacgtagtccttc

SEQ ID NO: 545008 - DNA, 15 bp, Homo sapiens
gaacgtagtccttca

SEQ ID NO: 545009 - DNA, 15 bp, Homo sapiens
aacgtagtccttcag

SEQ ID NO: 545010 - DNA, 15 bp, Homo sapiens
acgtagtccttcaga

SEQ ID NO: 545011 - DNA, 15 bp, Homo sapiens
cgtagtccttcagaa

SEQ ID NO: 545012 - DNA, 15 bp, Homo sapiens
gtagtccttcagaac

SEQ ID NO: 545013 - DNA, 15 bp, Homo sapiens
tagtccttcagaacc

SEQ ID NO: 545014 - DNA, 15 bp, Homo sapiens
agtccttcagaacct

SEQ ID NO: 545015 - DNA, 15 bp, Homo sapiens
gtccttcagaacctt

SEQ ID NO: 545016 - DNA, 15 bp, Homo sapiens
tccttcagaaccttt

SEQ ID NO: 545017 - DNA, 15 bp, Homo sapiens
ccttcagaacctttg

SEQ ID NO: 545018 - DNA, 15 bp, Homo sapiens
cttcagaacctttgt

SEQ ID NO: 545019 - DNA, 15 bp, Homo sapiens
ttcagaacctttgtt

SEQ ID NO: 545020 - DNA, 15 bp, Homo sapiens
tcagaacctttgttt

SEQ ID NO: 545021 - DNA, 15 bp, Homo sapiens
cagaacctttgtttc

SEQ ID NO: 545022 - DNA, 15 bp, Homo sapiens
agaacctttgtttct

SEQ ID NO: 545023 - DNA, 15 bp, Homo sapiens
gaacctttgtttctt

SEQ ID NO: 545024 - DNA, 15 bp, Homo sapiens
aacctttgtttcttc

SEQ ID NO: 545025 - DNA, 15 bp, Homo sapiens
acctttgtttcttca

SEQ ID NO: 545026 - DNA, 15 bp, Homo sapiens
cctttgtttcttcat

SEQ ID NO: 545027 - DNA, 15 bp, Homo sapiens
ctttgtttcttcatc

SEQ ID NO: 545028 - DNA, 15 bp, Homo sapiens
tttgtttcttcatca

SEQ ID NO: 545029 - DNA, 15 bp, Homo sapiens
ttgtttcttcatcag

SEQ ID NO: 545030 - DNA, 15 bp, Homo sapiens
tgtttcttcatcagc

SEQ ID NO: 545031 - DNA, 15 bp, Homo sapiens
gtttcttcatcagca

SEQ ID NO: 545032 - DNA, 15 bp, Homo sapiens
tttcttcatcagcaa

SEQ ID NO: 545033 - DNA, 15 bp, Homo sapiens
ttcttcatcagcaaa

SEQ ID NO: 545034 - DNA, 15 bp, Homo sapiens
tcttcatcagcaaag

SEQ ID NO: 545035 - DNA, 15 bp, Homo sapiens
cttcatcagcaaagt

SEQ ID NO: 545036 - DNA, 15 bp, Homo sapiens
ttcatcagcaaagtg

SEQ ID NO: 545037 - DNA, 15 bp, Homo sapiens
tcatcagcaaagtgg

SEQ ID NO: 545038 - DNA, 15 bp, Homo sapiens
catcagcaaagtggg

SEQ ID NO: 545039 - DNA, 15 bp, Homo sapiens
atcagcaaagtgggg

SEQ ID NO: 545040 - DNA, 15 bp, Homo sapiens
tcagcaaagtggggg

SEQ ID NO: 545041 - DNA, 15 bp, Homo sapiens
cagcaaagtggggga

SEQ ID NO: 545042 - DNA, 15 bp, Homo sapiens
agcaaagtgggggag

SEQ ID NO: 545043 - DNA, 15 bp, Homo sapiens
gcaaagtgggggagg

SEQ ID NO: 545044 - DNA, 15 bp, Homo sapiens
caaagtgggggaggg

SEQ ID NO: 545045 - DNA, 15 bp, Homo sapiens
aaagtgggggagggg

SEQ ID NO: 545046 - DNA, 15 bp, Homo sapiens
aagtgggggagggga

SEQ ID NO: 545047 - DNA, 15 bp, Homo sapiens
agtgggggaggggaa

SEQ ID NO: 545048 - DNA, 15 bp, Homo sapiens
gtgggggaggggaat

SEQ ID NO: 545049 - DNA, 15 bp, Homo sapiens
tgggggaggggaata

SEQ ID NO: 545050 - DNA, 15 bp, Homo sapiens
gggggaggggaataa

SEQ ID NO: 545051 - DNA, 15 bp, Homo sapiens
ggggaggggaataat

SEQ ID NO: 545052 - DNA, 15 bp, Homo sapiens
gggaggggaataatc

SEQ ID NO: 545053 - DNA, 15 bp, Homo sapiens
ggaggggaataatcc

SEQ ID NO: 545054 - DNA, 15 bp, Homo sapiens
gaggggaataatcct

SEQ ID NO: 545055 - DNA, 15 bp, Homo sapiens
aggggaataatcctg

SEQ ID NO: 545056 - DNA, 15 bp, Homo sapiens
ggggaataatcctgc

SEQ ID NO: 545057 - DNA, 15 bp, Homo sapiens
gggaataatcctgcc

SEQ ID NO: 545058 - DNA, 15 bp, Homo sapiens
ggaataatcctgcct

SEQ ID NO: 545059 - DNA, 15 bp, Homo sapiens
gaataatcctgcctt

SEQ ID NO: 545060 - DNA, 15 bp, Homo sapiens
aataatcctgccttc

SEQ ID NO: 545061 - DNA, 15 bp, Homo sapiens
ataatcctgccttct

SEQ ID NO: 545062 - DNA, 15 bp, Homo sapiens
taatcctgccttctt

SEQ ID NO: 545063 - DNA, 15 bp, Homo sapiens
aatcctgccttcttc

SEQ ID NO: 545064 - DNA, 15 bp, Homo sapiens
atcctgccttcttct

SEQ ID NO: 545065 - DNA, 15 bp, Homo sapiens
tcctgccttcttctc

SEQ ID NO: 545066 - DNA, 15 bp, Homo sapiens
cctgccttcttctcc

SEQ ID NO: 545067 - DNA, 15 bp, Homo sapiens
ctgccttcttctcca

SEQ ID NO: 545068 - DNA, 15 bp, Homo sapiens
tgccttcttctccag

SEQ ID NO: 545069 - DNA, 15 bp, Homo sapiens
gccttcttctccagt

SEQ ID NO: 545070 - DNA, 15 bp, Homo sapiens
ccttcttctccagtt

SEQ ID NO: 545071 - DNA, 15 bp, Homo sapiens
cttcttctccagttt

SEQ ID NO: 545072 - DNA, 15 bp, Homo sapiens
ttcttctccagttta

SEQ ID NO: 545073 - DNA, 15 bp, Homo sapiens
tcttctccagtttat

SEQ ID NO: 545074 - DNA, 15 bp, Homo sapiens
cttctccagtttatt

SEQ ID NO: 545075 - DNA, 15 bp, Homo sapiens
ttctccagtttatta

SEQ ID NO: 545076 - DNA, 15 bp, Homo sapiens
tctccagtttattag

SEQ ID NO: 545077 - DNA, 15 bp, Homo sapiens
ctccagtttattaga

SEQ ID NO: 545078 - DNA, 15 bp, Homo sapiens
tccagtttattagag

SEQ ID NO: 545079 - DNA, 15 bp, Homo sapiens
ccagtttattagagt

SEQ ID NO: 545080 - DNA, 15 bp, Homo sapiens
cagtttattagagta

SEQ ID NO: 545081 - DNA, 15 bp, Homo sapiens
agtttattagagtaa

SEQ ID NO: 545082 - DNA, 15 bp, Homo sapiens
gtttattagagtaat

SEQ ID NO: 545083 - DNA, 15 bp, Homo sapiens
tttattagagtaatt

SEQ ID NO: 545084 - DNA, 15 bp, Homo sapiens
ttattagagtaatta

SEQ ID NO: 545085 - DNA, 15 bp, Homo sapiens
tattagagtaattaa

SEQ ID NO: 545086 - DNA, 15 bp, Homo sapiens
attagagtaattaaa

SEQ ID NO: 545087 - DNA, 15 bp, Homo sapiens
ttagagtaattaaat

SEQ ID NO: 545088 - DNA, 15 bp, Homo sapiens
tagagtaattaaata

SEQ ID NO: 545089 - DNA, 15 bp, Homo sapiens
agagtaattaaataa

SEQ ID NO: 545090 - DNA, 15 bp, Homo sapiens
gagtaattaaataag

SEQ ID NO: 545091 - DNA, 15 bp, Homo sapiens
agtaattaaataaga

SEQ ID NO: 545092 - DNA, 15 bp, Homo sapiens
gtaattaaataagat

SEQ ID NO: 545093 - DNA, 15 bp, Homo sapiens
taattaaataagatt

SEQ ID NO: 545094 - DNA, 15 bp, Homo sapiens
aattaaataagatta

SEQ ID NO: 545095 - DNA, 15 bp, Homo sapiens
attaaataagattat

SEQ ID NO: 545096 - DNA, 15 bp, Homo sapiens
ttaaataagattata

SEQ ID NO: 545097 - DNA, 15 bp, Homo sapiens
taaataagattatag

SEQ ID NO: 545098 - DNA, 15 bp, Homo sapiens
aaataagattataga

SEQ ID NO: 545099 - DNA, 15 bp, Homo sapiens
aataagattatagat

SEQ ID NO: 545100 - DNA, 15 bp, Homo sapiens
ataagattatagatg

SEQ ID NO: 545101 - DNA, 15 bp, Homo sapiens
taagattatagatgt

SEQ ID NO: 545102 - DNA, 15 bp, Homo sapiens
aagattatagatgtg

SEQ ID NO: 545103 - DNA, 15 bp, Homo sapiens
agattatagatgtgg

SEQ ID NO: 545104 - DNA, 15 bp, Homo sapiens
gattatagatgtggg

SEQ ID NO: 545105 - DNA, 15 bp, Homo sapiens
attatagatgtggga

SEQ ID NO: 545106 - DNA, 15 bp, Homo sapiens
ttatagatgtgggaa

SEQ ID NO: 545107 - DNA, 15 bp, Homo sapiens
tatagatgtgggaag

SEQ ID NO: 545108 - DNA, 15 bp, Homo sapiens
atagatgtgggaagg

SEQ ID NO: 545109 - DNA, 15 bp, Homo sapiens
tagatgtgggaaggc

SEQ ID NO: 545110 - DNA, 15 bp, Homo sapiens
agatgtgggaaggct

SEQ ID NO: 545111 - DNA, 15 bp, Homo sapiens
gatgtgggaaggctc

SEQ ID NO: 545112 - DNA, 15 bp, Homo sapiens
atgtgggaaggctcc

SEQ ID NO: 545113 - DNA, 15 bp, Homo sapiens
tgtgggaaggctcct

SEQ ID NO: 545114 - DNA, 15 bp, Homo sapiens
gtgggaaggctccta

SEQ ID NO: 545115 - DNA, 15 bp, Homo sapiens
tgggaaggctcctat

SEQ ID NO: 545116 - DNA, 15 bp, Homo sapiens
gggaaggctcctatt

SEQ ID NO: 545117 - DNA, 15 bp, Homo sapiens
ggaaggctcctatta

SEQ ID NO: 545118 - DNA, 15 bp, Homo sapiens
gaaggctcctattaa

SEQ ID NO: 545119 - DNA, 15 bp, Homo sapiens
aaggctcctattaag

SEQ ID NO: 545120 - DNA, 15 bp, Homo sapiens
aggctcctattaaga

SEQ ID NO: 545121 - DNA, 15 bp, Homo sapiens
ggctcctattaagat

SEQ ID NO: 545122 - DNA, 15 bp, Homo sapiens
gctcctattaagatc

SEQ ID NO: 545123 - DNA, 15 bp, Homo sapiens
ctcctattaagatca

SEQ ID NO: 545124 - DNA, 15 bp, Homo sapiens
tcctattaagatcaa

SEQ ID NO: 545125 - DNA, 15 bp, Homo sapiens
cctattaagatcaat

SEQ ID NO: 545126 - DNA, 15 bp, Homo sapiens
ctattaagatcaatg

SEQ ID NO: 545127 - DNA, 15 bp, Homo sapiens
tattaagatcaatgt

SEQ ID NO: 545128 - DNA, 15 bp, Homo sapiens
attaagatcaatgtc

SEQ ID NO: 545129 - DNA, 15 bp, Homo sapiens
ttaagatcaatgtct

SEQ ID NO: 545130 - DNA, 15 bp, Homo sapiens
taagatcaatgtctt

SEQ ID NO: 545131 - DNA, 15 bp, Homo sapiens
aagatcaatgtctta

SEQ ID NO: 545132 - DNA, 15 bp, Homo sapiens
agatcaatgtcttaa

SEQ ID NO: 545133 - DNA, 15 bp, Homo sapiens
gatcaatgtcttaaa

SEQ ID NO: 545134 - DNA, 15 bp, Homo sapiens
atcaatgtcttaaac

SEQ ID NO: 545135 - DNA, 15 bp, Homo sapiens
tcaatgtcttaaact

SEQ ID NO: 545136 - DNA, 15 bp, Homo sapiens
caatgtcttaaacta

SEQ ID NO: 545137 - DNA, 15 bp, Homo sapiens
aatgtcttaaactat

SEQ ID NO: 545138 - DNA, 15 bp, Homo sapiens
atgtcttaaactata

SEQ ID NO: 545139 - DNA, 15 bp, Homo sapiens
tgtcttaaactataa

SEQ ID NO: 545140 - DNA, 15 bp, Homo sapiens
gtcttaaactataaa

SEQ ID NO: 545141 - DNA, 15 bp, Homo sapiens
tcttaaactataaaa

SEQ ID NO: 545142 - DNA, 15 bp, Homo sapiens
cttaaactataaaat

SEQ ID NO: 545143 - DNA, 15 bp, Homo sapiens
ttaaactataaaata

SEQ ID NO: 545144 - DNA, 15 bp, Homo sapiens
taaactataaaataa

SEQ ID NO: 545145 - DNA, 15 bp, Homo sapiens
aaactataaaataat

SEQ ID NO: 545146 - DNA, 15 bp, Homo sapiens
aactataaaataatc

SEQ ID NO: 545147 - DNA, 15 bp, Homo sapiens
actataaaataatct

SEQ ID NO: 545148 - DNA, 15 bp, Homo sapiens
ctataaaataatcta

SEQ ID NO: 545149 - DNA, 15 bp, Homo sapiens
tataaaataatctac

SEQ ID NO: 545150 - DNA, 15 bp, Homo sapiens
ataaaataatctaca

SEQ ID NO: 545151 - DNA, 15 bp, Homo sapiens
taaaataatctacaa

SEQ ID NO: 545152 - DNA, 15 bp, Homo sapiens
aaaataatctacaat

SEQ ID NO: 545153 - DNA, 15 bp, Homo sapiens
aaataatctacaatt

SEQ ID NO: 545154 - DNA, 15 bp, Homo sapiens
aataatctacaattt

SEQ ID NO: 545155 - DNA, 15 bp, Homo sapiens
ataatctacaatttt

SEQ ID NO: 545156 - DNA, 15 bp, Homo sapiens
taatctacaattttc

SEQ ID NO: 545157 - DNA, 15 bp, Homo sapiens
aatctacaattttcc

SEQ ID NO: 545158 - DNA, 15 bp, Homo sapiens
atctacaattttcct

SEQ ID NO: 545159 - DNA, 15 bp, Homo sapiens
tctacaattttcctt

SEQ ID NO: 545160 - DNA, 15 bp, Homo sapiens
ctacaattttccttg

SEQ ID NO: 545161 - DNA, 15 bp, Homo sapiens
tacaattttccttgt

SEQ ID NO: 545162 - DNA, 15 bp, Homo sapiens
acaattttccttgtc

SEQ ID NO: 545163 - DNA, 15 bp, Homo sapiens
caattttccttgtca

SEQ ID NO: 545164 - DNA, 15 bp, Homo sapiens
aattttccttgtcat

SEQ ID NO: 545165 - DNA, 15 bp, Homo sapiens
attttccttgtcatt

SEQ ID NO: 545166 - DNA, 15 bp, Homo sapiens
ttttccttgtcatta

SEQ ID NO: 545167 - DNA, 15 bp, Homo sapiens
tttccttgtcattat

SEQ ID NO: 545168 - DNA, 15 bp, Homo sapiens
ttccttgtcattatt

SEQ ID NO: 545169 - DNA, 15 bp, Homo sapiens
tccttgtcattatta

SEQ ID NO: 545170 - DNA, 15 bp, Homo sapiens
ccttgtcattattat

SEQ ID NO: 545171 - DNA, 15 bp, Homo sapiens
cttgtcattattatt

SEQ ID NO: 545172 - DNA, 15 bp, Homo sapiens
ttgtcattattatta

SEQ ID NO: 545173 - DNA, 15 bp, Homo sapiens
tgtcattattattac

SEQ ID NO: 545174 - DNA, 15 bp, Homo sapiens
gtcattattattact

SEQ ID NO: 545175 - DNA, 15 bp, Homo sapiens
tcattattattactg

SEQ ID NO: 545176 - DNA, 15 bp, Homo sapiens
cattattattactga

SEQ ID NO: 545177 - DNA, 15 bp, Homo sapiens
attattattactgat

SEQ ID NO: 545178 - DNA, 15 bp, Homo sapiens
ttattattactgata

SEQ ID NO: 545179 - DNA, 15 bp, Homo sapiens
tattattactgataa

SEQ ID NO: 545180 - DNA, 15 bp, Homo sapiens
attattactgataac

SEQ ID NO: 545181 - DNA, 15 bp, Homo sapiens
ttattactgataaca

SEQ ID NO: 545182 - DNA, 15 bp, Homo sapiens
tattactgataacaa

SEQ ID NO: 545183 - DNA, 15 bp, Homo sapiens
attactgataacaac

SEQ ID NO: 545184 - DNA, 15 bp, Homo sapiens
ttactgataacaaca

SEQ ID NO: 545185 - DNA, 15 bp, Homo sapiens
tactgataacaacaa

SEQ ID NO: 545186 - DNA, 15 bp, Homo sapiens
actgataacaacaaa

SEQ ID NO: 545187 - DNA, 15 bp, Homo sapiens
ctgataacaacaaaa

SEQ ID NO: 545188 - DNA, 15 bp, Homo sapiens
tgataacaacaaaat

SEQ ID NO: 545189 - DNA, 15 bp, Homo sapiens
gataacaacaaaatg

SEQ ID NO: 545190 - DNA, 15 bp, Homo sapiens
ataacaacaaaatga

SEQ ID NO: 545191 - DNA, 15 bp, Homo sapiens
taacaacaaaatgag

SEQ ID NO: 545192 - DNA, 15 bp, Homo sapiens
aacaacaaaatgagg

SEQ ID NO: 545193 - DNA, 15 bp, Homo sapiens
acaacaaaatgaggg

SEQ ID NO: 545194 - DNA, 15 bp, Homo sapiens
caacaaaatgagggg

SEQ ID NO: 545195 - DNA, 15 bp, Homo sapiens
aacaaaatgagggga

SEQ ID NO: 545196 - DNA, 15 bp, Homo sapiens
acaaaatgaggggaa

SEQ ID NO: 545197 - DNA, 15 bp, Homo sapiens
caaaatgaggggaaa

SEQ ID NO: 545198 - DNA, 15 bp, Homo sapiens
aaaatgaggggaaat

SEQ ID NO: 545199 - DNA, 15 bp, Homo sapiens
aaatgaggggaaata

SEQ ID NO: 545200 - DNA, 15 bp, Homo sapiens
aatgaggggaaataa

SEQ ID NO: 545201 - DNA, 15 bp, Homo sapiens
atgaggggaaataag

SEQ ID NO: 545202 - DNA, 15 bp, Homo sapiens
tgaggggaaataagt

SEQ ID NO: 545203 - DNA, 15 bp, Homo sapiens
gaggggaaataagtc

SEQ ID NO: 545204 - DNA, 15 bp, Homo sapiens
aggggaaataagtct

SEQ ID NO: 545205 - DNA, 15 bp, Homo sapiens
ggggaaataagtcta

SEQ ID NO: 545206 - DNA, 15 bp, Homo sapiens
gggaaataagtctag

SEQ ID NO: 545207 - DNA, 15 bp, Homo sapiens
ggaaataagtctaga

SEQ ID NO: 545208 - DNA, 15 bp, Homo sapiens
gaaataagtctagaa

SEQ ID NO: 545209 - DNA, 15 bp, Homo sapiens
aaataagtctagaaa

SEQ ID NO: 545210 - DNA, 15 bp, Homo sapiens
aataagtctagaaaa

SEQ ID NO: 545211 - DNA, 15 bp, Homo sapiens
ataagtctagaaaat

SEQ ID NO: 545212 - DNA, 15 bp, Homo sapiens
taagtctagaaaatg

SEQ ID NO: 545213 - DNA, 15 bp, Homo sapiens
aagtctagaaaatgc

SEQ ID NO: 545214 - DNA, 15 bp, Homo sapiens
agtctagaaaatgca

SEQ ID NO: 545215 - DNA, 15 bp, Homo sapiens
gtctagaaaatgcat

SEQ ID NO: 545216 - DNA, 15 bp, Homo sapiens
tctagaaaatgcatc

SEQ ID NO: 545217 - DNA, 15 bp, Homo sapiens
ctagaaaatgcatca

SEQ ID NO: 545218 - DNA, 15 bp, Homo sapiens
tagaaaatgcatcat

SEQ ID NO: 545219 - DNA, 15 bp, Homo sapiens
agaaaatgcatcatc

SEQ ID NO: 545220 - DNA, 15 bp, Homo sapiens
gaaaatgcatcatct

SEQ ID NO: 545221 - DNA, 15 bp, Homo sapiens
aaaatgcatcatctg

SEQ ID NO: 545222 - DNA, 15 bp, Homo sapiens
aaatgcatcatctgc

SEQ ID NO: 545223 - DNA, 15 bp, Homo sapiens
aatgcatcatctgcc

SEQ ID NO: 545224 - DNA, 15 bp, Homo sapiens
atgcatcatctgcct

SEQ ID NO: 545225 - DNA, 15 bp, Homo sapiens
tgcatcatctgcctg

SEQ ID NO: 545226 - DNA, 15 bp, Homo sapiens
gcatcatctgcctgt

SEQ ID NO: 545227 - DNA, 15 bp, Homo sapiens
catcatctgcctgtt

SEQ ID NO: 545228 - DNA, 15 bp, Homo sapiens
atcatctgcctgttc

SEQ ID NO: 545229 - DNA, 15 bp, Homo sapiens
tcatctgcctgttcc

SEQ ID NO: 545230 - DNA, 15 bp, Homo sapiens
catctgcctgttcca

SEQ ID NO: 545231 - DNA, 15 bp, Homo sapiens
atctgcctgttccat

SEQ ID NO: 545232 - DNA, 15 bp, Homo sapiens
tctgcctgttccatt

SEQ ID NO: 545233 - DNA, 15 bp, Homo sapiens
ctgcctgttccatta

SEQ ID NO: 545234 - DNA, 15 bp, Homo sapiens
tgcctgttccattaa

SEQ ID NO: 545235 - DNA, 15 bp, Homo sapiens
gcctgttccattaaa

SEQ ID NO: 545236 - DNA, 15 bp, Homo sapiens
cctgttccattaaaa

SEQ ID NO: 545237 - DNA, 15 bp, Homo sapiens
ctgttccattaaaaa

SEQ ID NO: 545238 - DNA, 15 bp, Homo sapiens
tgttccattaaaaag

SEQ ID NO: 545239 - DNA, 15 bp, Homo sapiens
gttccattaaaaaga

SEQ ID NO: 545240 - DNA, 15 bp, Homo sapiens
ttccattaaaaagag

SEQ ID NO: 545241 - DNA, 15 bp, Homo sapiens
tccattaaaaagaga

SEQ ID NO: 545242 - DNA, 15 bp, Homo sapiens
ccattaaaaagagac

SEQ ID NO: 545243 - DNA, 15 bp, Homo sapiens
cattaaaaagagaca

SEQ ID NO: 545244 - DNA, 15 bp, Homo sapiens
attaaaaagagacag

SEQ ID NO: 545245 - DNA, 15 bp, Homo sapiens
ttaaaaagagacaga

SEQ ID NO: 545246 - DNA, 15 bp, Homo sapiens
taaaaagagacagag

SEQ ID NO: 545247 - DNA, 15 bp, Homo sapiens
aaaaagagacagagg

SEQ ID NO: 545248 - DNA, 15 bp, Homo sapiens
aaaagagacagaggc

SEQ ID NO: 545249 - DNA, 15 bp, Homo sapiens
aaagagacagaggca

SEQ ID NO: 545250 - DNA, 15 bp, Homo sapiens
aagagacagaggcag

SEQ ID NO: 545251 - DNA, 15 bp, Homo sapiens
agagacagaggcaga

SEQ ID NO: 545252 - DNA, 15 bp, Homo sapiens
gagacagaggcagag

SEQ ID NO: 545253 - DNA, 15 bp, Homo sapiens
agacagaggcagaga

SEQ ID NO: 545254 - DNA, 15 bp, Homo sapiens
gacagaggcagagat

SEQ ID NO: 545255 - DNA, 15 bp, Homo sapiens
acagaggcagagatg

SEQ ID NO: 545256 - DNA, 15 bp, Homo sapiens
cagaggcagagatgg

SEQ ID NO: 545257 - DNA, 15 bp, Homo sapiens
agaggcagagatgga

SEQ ID NO: 545258 - DNA, 15 bp, Homo sapiens
gaggcagagatggag

SEQ ID NO: 545259 - DNA, 15 bp, Homo sapiens
aggcagagatggagc

SEQ ID NO: 545260 - DNA, 15 bp, Homo sapiens
ggcagagatggagct

SEQ ID NO: 545261 - DNA, 15 bp, Homo sapiens
gcagagatggagctg

SEQ ID NO: 545262 - DNA, 15 bp, Homo sapiens
cagagatggagctgg

SEQ ID NO: 545263 - DNA, 15 bp, Homo sapiens
agagatggagctgga

SEQ ID NO: 545264 - DNA, 15 bp, Homo sapiens
gagatggagctggac

SEQ ID NO: 545265 - DNA, 15 bp, Homo sapiens
agatggagctggaca

SEQ ID NO: 545266 - DNA, 15 bp, Homo sapiens
gatggagctggacac

SEQ ID NO: 545267 - DNA, 15 bp, Homo sapiens
atggagctggacaca

SEQ ID NO: 545268 - DNA, 15 bp, Homo sapiens
tggagctggacacaa

SEQ ID NO: 545269 - DNA, 15 bp, Homo sapiens
ggagctggacacaag

SEQ ID NO: 545270 - DNA, 15 bp, Homo sapiens
gagctggacacaaga

SEQ ID NO: 545271 - DNA, 15 bp, Homo sapiens
agctggacacaagaa

SEQ ID NO: 545272 - DNA, 15 bp, Homo sapiens
gctggacacaagaat

SEQ ID NO: 545273 - DNA, 15 bp, Homo sapiens
ctggacacaagaatt

SEQ ID NO: 545274 - DNA, 15 bp, Homo sapiens
tggacacaagaattc

SEQ ID NO: 545275 - DNA, 15 bp, Homo sapiens
ggacacaagaattca

SEQ ID NO: 545276 - DNA, 15 bp, Homo sapiens
gacacaagaattcaa

SEQ ID NO: 545277 - DNA, 15 bp, Homo sapiens
acacaagaattcaac

SEQ ID NO: 545278 - DNA, 15 bp, Homo sapiens
cacaagaattcaacc

SEQ ID NO: 545279 - DNA, 15 bp, Homo sapiens
acaagaattcaacca

SEQ ID NO: 545280 - DNA, 15 bp, Homo sapiens
caagaattcaaccag

SEQ ID NO: 545281 - DNA, 15 bp, Homo sapiens
aagaattcaaccagc

SEQ ID NO: 545282 - DNA, 15 bp, Homo sapiens
agaattcaaccagcc

SEQ ID NO: 545283 - DNA, 15 bp, Homo sapiens
gaattcaaccagcct

SEQ ID NO: 545284 - DNA, 15 bp, Homo sapiens
aattcaaccagccta

SEQ ID NO: 545285 - DNA, 15 bp, Homo sapiens
attcaaccagcctag

SEQ ID NO: 545286 - DNA, 15 bp, Homo sapiens
ttcaaccagcctagg

SEQ ID NO: 545287 - DNA, 15 bp, Homo sapiens
tcaaccagcctagga

SEQ ID NO: 545288 - DNA, 15 bp, Homo sapiens
caaccagcctaggac

SEQ ID NO: 545289 - DNA, 15 bp, Homo sapiens
aaccagcctaggact

SEQ ID NO: 545290 - DNA, 15 bp, Homo sapiens
accagcctaggactt

SEQ ID NO: 545291 - DNA, 15 bp, Homo sapiens
ccagcctaggacttt

SEQ ID NO: 545292 - DNA, 15 bp, Homo sapiens
cagcctaggactttg

SEQ ID NO: 545293 - DNA, 15 bp, Homo sapiens
agcctaggactttgt

SEQ ID NO: 545294 - DNA, 15 bp, Homo sapiens
gcctaggactttgtt

SEQ ID NO: 545295 - DNA, 15 bp, Homo sapiens
cctaggactttgttc

SEQ ID NO: 545296 - DNA, 15 bp, Homo sapiens
ctaggactttgttct

SEQ ID NO: 545297 - DNA, 15 bp, Homo sapiens
taggactttgttctg

SEQ ID NO: 545298 - DNA, 15 bp, Homo sapiens
aggactttgttctgg

SEQ ID NO: 545299 - DNA, 15 bp, Homo sapiens
ggactttgttctggc

SEQ ID NO: 545300 - DNA, 15 bp, Homo sapiens
gactttgttctggca

SEQ ID NO: 545301 - DNA, 15 bp, Homo sapiens
actttgttctggcac

SEQ ID NO: 545302 - DNA, 15 bp, Homo sapiens
ctttgttctggcacc

SEQ ID NO: 545303 - DNA, 15 bp, Homo sapiens
tttgttctggcacct

SEQ ID NO: 545304 - DNA, 15 bp, Homo sapiens
ttgttctggcacctc

SEQ ID NO: 545305 - DNA, 15 bp, Homo sapiens
tgttctggcacctca

SEQ ID NO: 545306 - DNA, 15 bp, Homo sapiens
gttctggcacctcag

SEQ ID NO: 545307 - DNA, 15 bp, Homo sapiens
ttctggcacctcagt

SEQ ID NO: 545308 - DNA, 15 bp, Homo sapiens
tctggcacctcagtg

SEQ ID NO: 545309 - DNA, 15 bp, Homo sapiens
ctggcacctcagtgt

SEQ ID NO: 545310 - DNA, 15 bp, Homo sapiens
tggcacctcagtgta

SEQ ID NO: 545311 - DNA, 15 bp, Homo sapiens
ggcacctcagtgtat

SEQ ID NO: 545312 - DNA, 15 bp, Homo sapiens
gcacctcagtgtata

SEQ ID NO: 545313 - DNA, 15 bp, Homo sapiens
cacctcagtgtatat

SEQ ID NO: 545314 - DNA, 15 bp, Homo sapiens
acctcagtgtatatt

SEQ ID NO: 545315 - DNA, 15 bp, Homo sapiens
cctcagtgtatattt

SEQ ID NO: 545316 - DNA, 15 bp, Homo sapiens
ctcagtgtatattta

SEQ ID NO: 545317 - DNA, 15 bp, Homo sapiens
tcagtgtatatttaa

SEQ ID NO: 545318 - DNA, 15 bp, Homo sapiens
cagtgtatatttaaa

SEQ ID NO: 545319 - DNA, 15 bp, Homo sapiens
agtgtatatttaaag

SEQ ID NO: 545320 - DNA, 15 bp, Homo sapiens
gtgtatatttaaagt

SEQ ID NO: 545321 - DNA, 15 bp, Homo sapiens
tgtatatttaaagtc

SEQ ID NO: 545322 - DNA, 15 bp, Homo sapiens
gtatatttaaagtcc

SEQ ID NO: 545323 - DNA, 15 bp, Homo sapiens
tatatttaaagtcct

SEQ ID NO: 545324 - DNA, 15 bp, Homo sapiens
atatttaaagtcctg

SEQ ID NO: 545325 - DNA, 15 bp, Homo sapiens
tatttaaagtcctgt

SEQ ID NO: 545326 - DNA, 15 bp, Homo sapiens
atttaaagtcctgta

SEQ ID NO: 545327 - DNA, 15 bp, Homo sapiens
tttaaagtcctgtat

SEQ ID NO: 545328 - DNA, 15 bp, Homo sapiens
ttaaagtcctgtata

SEQ ID NO: 545329 - DNA, 15 bp, Homo sapiens
taaagtcctgtataa

SEQ ID NO: 545330 - DNA, 15 bp, Homo sapiens
aaagtcctgtataat

SEQ ID NO: 545331 - DNA, 15 bp, Homo sapiens
aagtcctgtataata

SEQ ID NO: 545332 - DNA, 15 bp, Homo sapiens
agtcctgtataataa

SEQ ID NO: 545333 - DNA, 15 bp, Homo sapiens
gtcctgtataataac

SEQ ID NO: 545334 - DNA, 15 bp, Homo sapiens
tcctgtataataaca

SEQ ID NO: 545335 - DNA, 15 bp, Homo sapiens
cctgtataataacat

SEQ ID NO: 545336 - DNA, 15 bp, Homo sapiens
ctgtataataacata

SEQ ID NO: 545337 - DNA, 15 bp, Homo sapiens
tgtataataacatag

SEQ ID NO: 545338 - DNA, 15 bp, Homo sapiens
gtataataacataga

SEQ ID NO: 545339 - DNA, 15 bp, Homo sapiens
tataataacatagaa

SEQ ID NO: 545340 - DNA, 15 bp, Homo sapiens
ataataacatagaag

SEQ ID NO: 545341 - DNA, 15 bp, Homo sapiens
taataacatagaagt

SEQ ID NO: 545342 - DNA, 15 bp, Homo sapiens
aataacatagaagta

SEQ ID NO: 545343 - DNA, 15 bp, Homo sapiens
ataacatagaagtaa

SEQ ID NO: 545344 - DNA, 15 bp, Homo sapiens
taacatagaagtaat

SEQ ID NO: 545345 - DNA, 15 bp, Homo sapiens
aacatagaagtaatc

SEQ ID NO: 545346 - DNA, 15 bp, Homo sapiens
acatagaagtaatca

SEQ ID NO: 545347 - DNA, 15 bp, Homo sapiens
catagaagtaatcat

SEQ ID NO: 545348 - DNA, 15 bp, Homo sapiens
atagaagtaatcatg

SEQ ID NO: 545349 - DNA, 15 bp, Homo sapiens
tagaagtaatcatgg

SEQ ID NO: 545350 - DNA, 15 bp, Homo sapiens
agaagtaatcatggt

SEQ ID NO: 545351 - DNA, 15 bp, Homo sapiens
gaagtaatcatggtt

SEQ ID NO: 545352 - DNA, 15 bp, Homo sapiens
aagtaatcatggtta

SEQ ID NO: 545353 - DNA, 15 bp, Homo sapiens
agtaatcatggttat

SEQ ID NO: 545354 - DNA, 15 bp, Homo sapiens
gtaatcatggttatc

SEQ ID NO: 545355 - DNA, 15 bp, Homo sapiens
taatcatggttatcg

SEQ ID NO: 545356 - DNA, 15 bp, Homo sapiens
aatcatggttatcgc

SEQ ID NO: 545357 - DNA, 15 bp, Homo sapiens
atcatggttatcgct

SEQ ID NO: 545358 - DNA, 15 bp, Homo sapiens
tcatggttatcgctt

SEQ ID NO: 545359 - DNA, 15 bp, Homo sapiens
catggttatcgctta

SEQ ID NO: 545360 - DNA, 15 bp, Homo sapiens
atggttatcgcttat

SEQ ID NO: 545361 - DNA, 15 bp, Homo sapiens
tggttatcgcttatt

SEQ ID NO: 545362 - DNA, 15 bp, Homo sapiens
ggttatcgcttattt

SEQ ID NO: 545363 - DNA, 15 bp, Homo sapiens
gttatcgcttatttg

SEQ ID NO: 545364 - DNA, 15 bp, Homo sapiens
ttatcgcttatttgt

SEQ ID NO: 545365 - DNA, 15 bp, Homo sapiens
tatcgcttatttgta

SEQ ID NO: 545366 - DNA, 15 bp, Homo sapiens
atcgcttatttgtat

SEQ ID NO: 545367 - DNA, 15 bp, Homo sapiens
tcgcttatttgtatt

SEQ ID NO: 545368 - DNA, 15 bp, Homo sapiens
cgcttatttgtattg

SEQ ID NO: 545369 - DNA, 15 bp, Homo sapiens
gcttatttgtattga

SEQ ID NO: 545370 - DNA, 15 bp, Homo sapiens
cttatttgtattgat

SEQ ID NO: 545371 - DNA, 15 bp, Homo sapiens
ttatttgtattgatg

SEQ ID NO: 545372 - DNA, 15 bp, Homo sapiens
tatttgtattgatgg

SEQ ID NO: 545373 - DNA, 15 bp, Homo sapiens
atttgtattgatgga

SEQ ID NO: 545374 - DNA, 15 bp, Homo sapiens
tttgtattgatggat

SEQ ID NO: 545375 - DNA, 15 bp, Homo sapiens
ttgtattgatggatt

SEQ ID NO: 545376 - DNA, 15 bp, Homo sapiens
tgtattgatggattt

SEQ ID NO: 545377 - DNA, 15 bp, Homo sapiens
gtattgatggattta

SEQ ID NO: 545378 - DNA, 15 bp, Homo sapiens
tattgatggatttaa

SEQ ID NO: 545379 - DNA, 15 bp, Homo sapiens
attgatggatttaag

SEQ ID NO: 545380 - DNA, 15 bp, Homo sapiens
ttgatggatttaagg

SEQ ID NO: 545381 - DNA, 15 bp, Homo sapiens
tgatggatttaaggt

SEQ ID NO: 545382 - DNA, 15 bp, Homo sapiens
gatggatttaaggtg

SEQ ID NO: 545383 - DNA, 15 bp, Homo sapiens
atggatttaaggtgg

SEQ ID NO: 545384 - DNA, 15 bp, Homo sapiens
tggatttaaggtggg

SEQ ID NO: 545385 - DNA, 15 bp, Homo sapiens
ggatttaaggtgggc

SEQ ID NO: 545386 - DNA, 15 bp, Homo sapiens
gatttaaggtgggct

SEQ ID NO: 545387 - DNA, 15 bp, Homo sapiens
atttaaggtgggctt

SEQ ID NO: 545388 - DNA, 15 bp, Homo sapiens
tttaaggtgggcttt

SEQ ID NO: 545389 - DNA, 15 bp, Homo sapiens
ttaaggtgggctttt

SEQ ID NO: 545390 - DNA, 15 bp, Homo sapiens
taaggtgggcttttt

SEQ ID NO: 545391 - DNA, 15 bp, Homo sapiens
aaggtgggcttttta

SEQ ID NO: 545392 - DNA, 15 bp, Homo sapiens
aggtgggctttttat

SEQ ID NO: 545393 - DNA, 15 bp, Homo sapiens
ggtgggctttttatt

SEQ ID NO: 545394 - DNA, 15 bp, Homo sapiens
gtgggctttttattt

SEQ ID NO: 545395 - DNA, 15 bp, Homo sapiens
tgggctttttatttc

SEQ ID NO: 545396 - DNA, 15 bp, Homo sapiens
gggctttttatttct

SEQ ID NO: 545397 - DNA, 15 bp, Homo sapiens
ggctttttatttcta

SEQ ID NO: 545398 - DNA, 15 bp, Homo sapiens
gctttttatttctaa

SEQ ID NO: 545399 - DNA, 15 bp, Homo sapiens
ctttttatttctaag

SEQ ID NO: 545400 - DNA, 15 bp, Homo sapiens
tttttatttctaagg

SEQ ID NO: 545401 - DNA, 15 bp, Homo sapiens
ttttatttctaaggt

SEQ ID NO: 545402 - DNA, 15 bp, Homo sapiens
tttatttctaaggtt

SEQ ID NO: 545403 - DNA, 15 bp, Homo sapiens
ttatttctaaggttt

SEQ ID NO: 545404 - DNA, 15 bp, Homo sapiens
tatttctaaggtttg

SEQ ID NO: 545405 - DNA, 15 bp, Homo sapiens
atttctaaggtttgg

SEQ ID NO: 545406 - DNA, 15 bp, Homo sapiens
tttctaaggtttgga

SEQ ID NO: 545407 - DNA, 15 bp, Homo sapiens
ttctaaggtttggat

SEQ ID NO: 545408 - DNA, 15 bp, Homo sapiens
tctaaggtttggata

SEQ ID NO: 545409 - DNA, 15 bp, Homo sapiens
ctaaggtttggatac

SEQ ID NO: 545410 - DNA, 15 bp, Homo sapiens
taaggtttggataca

SEQ ID NO: 545411 - DNA, 15 bp, Homo sapiens
aaggtttggatacat

SEQ ID NO: 545412 - DNA, 15 bp, Homo sapiens
aggtttggatacatc

SEQ ID NO: 545413 - DNA, 15 bp, Homo sapiens
ggtttggatacatct

SEQ ID NO: 545414 - DNA, 15 bp, Homo sapiens
gtttggatacatcta

SEQ ID NO: 545415 - DNA, 15 bp, Homo sapiens
tttggatacatctaa

SEQ ID NO: 545416 - DNA, 15 bp, Homo sapiens
ttggatacatctaag

SEQ ID NO: 545417 - DNA, 15 bp, Homo sapiens
tggatacatctaaga

SEQ ID NO: 545418 - DNA, 15 bp, Homo sapiens
ggatacatctaagaa

SEQ ID NO: 545419 - DNA, 15 bp, Homo sapiens
gatacatctaagaaa

SEQ ID NO: 545420 - DNA, 15 bp, Homo sapiens
atacatctaagaaaa

SEQ ID NO: 545421 - DNA, 15 bp, Homo sapiens
tacatctaagaaaat

SEQ ID NO: 545422 - DNA, 15 bp, Homo sapiens
acatctaagaaaata

SEQ ID NO: 545423 - DNA, 15 bp, Homo sapiens
catctaagaaaatag

SEQ ID NO: 545424 - DNA, 15 bp, Homo sapiens
atctaagaaaatagc

SEQ ID NO: 545425 - DNA, 15 bp, Homo sapiens
tctaagaaaatagca

SEQ ID NO: 545426 - DNA, 15 bp, Homo sapiens
ctaagaaaatagcat

SEQ ID NO: 545427 - DNA, 15 bp, Homo sapiens
taagaaaatagcata

SEQ ID NO: 545428 - DNA, 15 bp, Homo sapiens
aagaaaatagcatac

SEQ ID NO: 545429 - DNA, 15 bp, Homo sapiens
agaaaatagcatact

SEQ ID NO: 545430 - DNA, 15 bp, Homo sapiens
gaaaatagcatactt

SEQ ID NO: 545431 - DNA, 15 bp, Homo sapiens
aaaatagcatacttc

SEQ ID NO: 545432 - DNA, 15 bp, Homo sapiens
aaatagcatacttcc

SEQ ID NO: 545433 - DNA, 15 bp, Homo sapiens
aatagcatacttcct

SEQ ID NO: 545434 - DNA, 15 bp, Homo sapiens
atagcatacttccta

SEQ ID NO: 545435 - DNA, 15 bp, Homo sapiens
tagcatacttcctaa

SEQ ID NO: 545436 - DNA, 15 bp, Homo sapiens
agcatacttcctaag

SEQ ID NO: 545437 - DNA, 15 bp, Homo sapiens
gcatacttcctaaga

SEQ ID NO: 545438 - DNA, 15 bp, Homo sapiens
catacttcctaagat

SEQ ID NO: 545439 - DNA, 15 bp, Homo sapiens
atacttcctaagata

SEQ ID NO: 545440 - DNA, 15 bp, Homo sapiens
tacttcctaagatac

SEQ ID NO: 545441 - DNA, 15 bp, Homo sapiens
acttcctaagatacc

SEQ ID NO: 545442 - DNA, 15 bp, Homo sapiens
cttcctaagatacca

SEQ ID NO: 545443 - DNA, 15 bp, Homo sapiens
ttcctaagataccat

SEQ ID NO: 545444 - DNA, 15 bp, Homo sapiens
tcctaagataccatt

SEQ ID NO: 545445 - DNA, 15 bp, Homo sapiens
cctaagataccattt

SEQ ID NO: 545446 - DNA, 15 bp, Homo sapiens
ctaagataccatttg

SEQ ID NO: 545447 - DNA, 15 bp, Homo sapiens
taagataccatttga

SEQ ID NO: 545448 - DNA, 15 bp, Homo sapiens
aagataccatttgat

SEQ ID NO: 545449 - DNA, 15 bp, Homo sapiens
agataccatttgatt

SEQ ID NO: 545450 - DNA, 15 bp, Homo sapiens
gataccatttgattt

SEQ ID NO: 545451 - DNA, 15 bp, Homo sapiens
ataccatttgatttt

SEQ ID NO: 545452 - DNA, 15 bp, Homo sapiens
taccatttgatttta

SEQ ID NO: 545453 - DNA, 15 bp, Homo sapiens
accatttgattttaa

SEQ ID NO: 545454 - DNA, 15 bp, Homo sapiens
ccatttgattttaat

SEQ ID NO: 545455 - DNA, 15 bp, Homo sapiens
catttgattttaatt

SEQ ID NO: 545456 - DNA, 15 bp, Homo sapiens
atttgattttaattt

SEQ ID NO: 545457 - DNA, 15 bp, Homo sapiens
tttgattttaatttt

SEQ ID NO: 545458 - DNA, 15 bp, Homo sapiens
ttgattttaattttc

SEQ ID NO: 545459 - DNA, 15 bp, Homo sapiens
tgattttaattttca

SEQ ID NO: 545460 - DNA, 15 bp, Homo sapiens
gattttaattttcag

SEQ ID NO: 545461 - DNA, 15 bp, Homo sapiens
attttaattttcaga

SEQ ID NO: 545462 - DNA, 15 bp, Homo sapiens
ttttaattttcagag

SEQ ID NO: 545463 - DNA, 15 bp, Homo sapiens
tttaattttcagaga

SEQ ID NO: 545464 - DNA, 15 bp, Homo sapiens
ttaattttcagagag

SEQ ID NO: 545465 - DNA, 15 bp, Homo sapiens
taattttcagagagc

SEQ ID NO: 545466 - DNA, 15 bp, Homo sapiens
aattttcagagagct

SEQ ID NO: 545467 - DNA, 15 bp, Homo sapiens
attttcagagagctg

SEQ ID NO: 545468 - DNA, 15 bp, Homo sapiens
ttttcagagagctga

SEQ ID NO: 545469 - DNA, 15 bp, Homo sapiens
tttcagagagctgat

SEQ ID NO: 545470 - DNA, 15 bp, Homo sapiens
ttcagagagctgatc

SEQ ID NO: 545471 - DNA, 15 bp, Homo sapiens
tcagagagctgatca

SEQ ID NO: 545472 - DNA, 15 bp, Homo sapiens
cagagagctgatcac

SEQ ID NO: 545473 - DNA, 15 bp, Homo sapiens
agagagctgatcacc

SEQ ID NO: 545474 - DNA, 15 bp, Homo sapiens
gagagctgatcacca

SEQ ID NO: 545475 - DNA, 15 bp, Homo sapiens
agagctgatcaccaa

SEQ ID NO: 545476 - DNA, 15 bp, Homo sapiens
gagctgatcaccaat

SEQ ID NO: 545477 - DNA, 15 bp, Homo sapiens
agctgatcaccaatt

SEQ ID NO: 545478 - DNA, 15 bp, Homo sapiens
gctgatcaccaattt

SEQ ID NO: 545479 - DNA, 15 bp, Homo sapiens
ctgatcaccaatttg

SEQ ID NO: 545480 - DNA, 15 bp, Homo sapiens
tgatcaccaatttgg

SEQ ID NO: 545481 - DNA, 15 bp, Homo sapiens
gatcaccaatttggg

SEQ ID NO: 545482 - DNA, 15 bp, Homo sapiens
atcaccaatttggga

SEQ ID NO: 545483 - DNA, 15 bp, Homo sapiens
tcaccaatttgggag

SEQ ID NO: 545484 - DNA, 15 bp, Homo sapiens
caccaatttgggaga

SEQ ID NO: 545485 - DNA, 15 bp, Homo sapiens
accaatttgggagaa

SEQ ID NO: 545486 - DNA, 15 bp, Homo sapiens
ccaatttgggagaac

SEQ ID NO: 545487 - DNA, 15 bp, Homo sapiens
caatttgggagaact

SEQ ID NO: 545488 - DNA, 15 bp, Homo sapiens
aatttgggagaactt

SEQ ID NO: 545489 - DNA, 15 bp, Homo sapiens
atttgggagaacttt

SEQ ID NO: 545490 - DNA, 15 bp, Homo sapiens
tttgggagaactttg

SEQ ID NO: 545491 - DNA, 15 bp, Homo sapiens
ttgggagaactttgt

SEQ ID NO: 545492 - DNA, 15 bp, Homo sapiens
tgggagaactttgtg

SEQ ID NO: 545493 - DNA, 15 bp, Homo sapiens
gggagaactttgtga

SEQ ID NO: 545494 - DNA, 15 bp, Homo sapiens
ggagaactttgtgac

SEQ ID NO: 545495 - DNA, 15 bp, Homo sapiens
gagaactttgtgact

SEQ ID NO: 545496 - DNA, 15 bp, Homo sapiens
agaactttgtgactg

SEQ ID NO: 545497 - DNA, 15 bp, Homo sapiens
gaactttgtgactgt

SEQ ID NO: 545498 - DNA, 15 bp, Homo sapiens
aactttgtgactgta

SEQ ID NO: 545499 - DNA, 15 bp, Homo sapiens
actttgtgactgtat

SEQ ID NO: 545500 - DNA, 15 bp, Homo sapiens
ctttgtgactgtatg

SEQ ID NO: 545501 - DNA, 15 bp, Homo sapiens
tttgtgactgtatgt

SEQ ID NO: 545502 - DNA, 15 bp, Homo sapiens
ttgtgactgtatgtt

SEQ ID NO: 545503 - DNA, 15 bp, Homo sapiens
tgtgactgtatgttt

SEQ ID NO: 545504 - DNA, 15 bp, Homo sapiens
gtgactgtatgtttg

SEQ ID NO: 545505 - DNA, 15 bp, Homo sapiens
tgactgtatgtttgg

SEQ ID NO: 545506 - DNA, 15 bp, Homo sapiens
gactgtatgtttggt

SEQ ID NO: 545507 - DNA, 15 bp, Homo sapiens
actgtatgtttggta

SEQ ID NO: 545508 - DNA, 15 bp, Homo sapiens
ctgtatgtttggtat

SEQ ID NO: 545509 - DNA, 15 bp, Homo sapiens
tgtatgtttggtata

SEQ ID NO: 545510 - DNA, 15 bp, Homo sapiens
gtatgtttggtataa

SEQ ID NO: 545511 - DNA, 15 bp, Homo sapiens
tatgtttggtataat

SEQ ID NO: 545512 - DNA, 15 bp, Homo sapiens
atgtttggtataatt

SEQ ID NO: 545513 - DNA, 15 bp, Homo sapiens
tgtttggtataattc

SEQ ID NO: 545514 - DNA, 15 bp, Homo sapiens
gtttggtataattcc

SEQ ID NO: 545515 - DNA, 15 bp, Homo sapiens
tttggtataattcct

SEQ ID NO: 545516 - DNA, 15 bp, Homo sapiens
ttggtataattcctt

SEQ ID NO: 545517 - DNA, 15 bp, Homo sapiens
tggtataattccttt

SEQ ID NO: 545518 - DNA, 15 bp, Homo sapiens
ggtataattccttta

SEQ ID NO: 545519 - DNA, 15 bp, Homo sapiens
gtataattcctttag

SEQ ID NO: 545520 - DNA, 15 bp, Homo sapiens
tataattcctttaga

SEQ ID NO: 545521 - DNA, 15 bp, Homo sapiens
ataattcctttagag

SEQ ID NO: 545522 - DNA, 15 bp, Homo sapiens
taattcctttagaga

SEQ ID NO: 545523 - DNA, 15 bp, Homo sapiens
aattcctttagagat

SEQ ID NO: 545524 - DNA, 15 bp, Homo sapiens
attcctttagagatc

SEQ ID NO: 545525 - DNA, 15 bp, Homo sapiens
ttcctttagagatca

SEQ ID NO: 545526 - DNA, 15 bp, Homo sapiens
tcctttagagatcaa

SEQ ID NO: 545527 - DNA, 15 bp, Homo sapiens
cctttagagatcaat

SEQ ID NO: 545528 - DNA, 15 bp, Homo sapiens
ctttagagatcaatt

SEQ ID NO: 545529 - DNA, 15 bp, Homo sapiens
tttagagatcaattt

SEQ ID NO: 545530 - DNA, 15 bp, Homo sapiens
ttagagatcaatttg

SEQ ID NO: 545531 - DNA, 15 bp, Homo sapiens
tagagatcaatttga

SEQ ID NO: 545532 - DNA, 15 bp, Homo sapiens
agagatcaatttgat

SEQ ID NO: 545533 - DNA, 15 bp, Homo sapiens
gagatcaatttgatg

SEQ ID NO: 545534 - DNA, 15 bp, Homo sapiens
agatcaatttgatga

SEQ ID NO: 545535 - DNA, 15 bp, Homo sapiens
gatcaatttgatgat

SEQ ID NO: 545536 - DNA, 15 bp, Homo sapiens
atcaatttgatgatg

SEQ ID NO: 545537 - DNA, 15 bp, Homo sapiens
tcaatttgatgatgg

SEQ ID NO: 545538 - DNA, 15 bp, Homo sapiens
caatttgatgatgga

SEQ ID NO: 545539 - DNA, 15 bp, Homo sapiens
aatttgatgatggag

SEQ ID NO: 545540 - DNA, 15 bp, Homo sapiens
atttgatgatggaga

SEQ ID NO: 545541 - DNA, 15 bp, Homo sapiens
tttgatgatggagaa

SEQ ID NO: 545542 - DNA, 15 bp, Homo sapiens
ttgatgatggagaaa

SEQ ID NO: 545543 - DNA, 15 bp, Homo sapiens
tgatgatggagaaat

SEQ ID NO: 545544 - DNA, 15 bp, Homo sapiens
gatgatggagaaata

SEQ ID NO: 545545 - DNA, 15 bp, Homo sapiens
atgatggagaaataa

SEQ ID NO: 545546 - DNA, 15 bp, Homo sapiens
tgatggagaaataat

SEQ ID NO: 545547 - DNA, 15 bp, Homo sapiens
gatggagaaataatc

SEQ ID NO: 545548 - DNA, 15 bp, Homo sapiens
atggagaaataatcc

SEQ ID NO: 545549 - DNA, 15 bp, Homo sapiens
tggagaaataatcct

SEQ ID NO: 545550 - DNA, 15 bp, Homo sapiens
ggagaaataatcctc

SEQ ID NO: 545551 - DNA, 15 bp, Homo sapiens
gagaaataatcctca

SEQ ID NO: 545552 - DNA, 15 bp, Homo sapiens
agaaataatcctcac

SEQ ID NO: 545553 - DNA, 15 bp, Homo sapiens
gaaataatcctcaca

SEQ ID NO: 545554 - DNA, 15 bp, Homo sapiens
aaataatcctcacat

SEQ ID NO: 545555 - DNA, 15 bp, Homo sapiens
aataatcctcacatt

SEQ ID NO: 545556 - DNA, 15 bp, Homo sapiens
ataatcctcacatta

SEQ ID NO: 545557 - DNA, 15 bp, Homo sapiens
taatcctcacattat

SEQ ID NO: 545558 - DNA, 15 bp, Homo sapiens
aatcctcacattatc

SEQ ID NO: 545559 - DNA, 15 bp, Homo sapiens
atcctcacattatcc

SEQ ID NO: 545560 - DNA, 15 bp, Homo sapiens
tcctcacattatcca

SEQ ID NO: 545561 - DNA, 15 bp, Homo sapiens
cctcacattatccac

SEQ ID NO: 545562 - DNA, 15 bp, Homo sapiens
ctcacattatccaca

SEQ ID NO: 545563 - DNA, 15 bp, Homo sapiens
tcacattatccacat

SEQ ID NO: 545564 - DNA, 15 bp, Homo sapiens
cacattatccacatt

SEQ ID NO: 545565 - DNA, 15 bp, Homo sapiens
acattatccacatta

SEQ ID NO: 545566 - DNA, 15 bp, Homo sapiens
cattatccacattat

SEQ ID NO: 545567 - DNA, 15 bp, Homo sapiens
attatccacattatc

SEQ ID NO: 545568 - DNA, 15 bp, Homo sapiens
ttatccacattatca

SEQ ID NO: 545569 - DNA, 15 bp, Homo sapiens
tatccacattatcag

SEQ ID NO: 545570 - DNA, 15 bp, Homo sapiens
atccacattatcaga

SEQ ID NO: 545571 - DNA, 15 bp, Homo sapiens
tccacattatcagat

SEQ ID NO: 545572 - DNA, 15 bp, Homo sapiens
ccacattatcagatg

SEQ ID NO: 545573 - DNA, 15 bp, Homo sapiens
cacattatcagatgt

SEQ ID NO: 545574 - DNA, 15 bp, Homo sapiens
acattatcagatgtc

SEQ ID NO: 545575 - DNA, 15 bp, Homo sapiens
cattatcagatgtct

SEQ ID NO: 545576 - DNA, 15 bp, Homo sapiens
attatcagatgtcta

SEQ ID NO: 545577 - DNA, 15 bp, Homo sapiens
ttatcagatgtctag

SEQ ID NO: 545578 - DNA, 15 bp, Homo sapiens
tatcagatgtctaga

SEQ ID NO: 545579 - DNA, 15 bp, Homo sapiens
atcagatgtctagat

SEQ ID NO: 545580 - DNA, 15 bp, Homo sapiens
tcagatgtctagata

SEQ ID NO: 545581 - DNA, 15 bp, Homo sapiens
cagatgtctagataa

SEQ ID NO: 545582 - DNA, 15 bp, Homo sapiens
agatgtctagataag

SEQ ID NO: 545583 - DNA, 15 bp, Homo sapiens
gatgtctagataaga

SEQ ID NO: 545584 - DNA, 15 bp, Homo sapiens
atgtctagataagat

SEQ ID NO: 545585 - DNA, 15 bp, Homo sapiens
tgtctagataagata

SEQ ID NO: 545586 - DNA, 15 bp, Homo sapiens
gtctagataagatag

SEQ ID NO: 545587 - DNA, 15 bp, Homo sapiens
tctagataagatagg

SEQ ID NO: 545588 - DNA, 15 bp, Homo sapiens
ctagataagatagga

SEQ ID NO: 545589 - DNA, 15 bp, Homo sapiens
tagataagataggaa

SEQ ID NO: 545590 - DNA, 15 bp, Homo sapiens
agataagataggaaa

SEQ ID NO: 545591 - DNA, 15 bp, Homo sapiens
gataagataggaaag

SEQ ID NO: 545592 - DNA, 15 bp, Homo sapiens
ataagataggaaagg

SEQ ID NO: 545593 - DNA, 15 bp, Homo sapiens
taagataggaaaggt

SEQ ID NO: 545594 - DNA, 15 bp, Homo sapiens
aagataggaaaggta

SEQ ID NO: 545595 - DNA, 15 bp, Homo sapiens
agataggaaaggtaa

SEQ ID NO: 545596 - DNA, 15 bp, Homo sapiens
gataggaaaggtaac

SEQ ID NO: 545597 - DNA, 15 bp, Homo sapiens
ataggaaaggtaact

SEQ ID NO: 545598 - DNA, 15 bp, Homo sapiens
taggaaaggtaactt

SEQ ID NO: 545599 - DNA, 15 bp, Homo sapiens
aggaaaggtaacttt

SEQ ID NO: 545600 - DNA, 15 bp, Homo sapiens
ggaaaggtaacttta

SEQ ID NO: 545601 - DNA, 15 bp, Homo sapiens
gaaaggtaactttat

SEQ ID NO: 545602 - DNA, 15 bp, Homo sapiens
aaaggtaactttatc

SEQ ID NO: 545603 - DNA, 15 bp, Homo sapiens
aaggtaactttatca

SEQ ID NO: 545604 - DNA, 15 bp, Homo sapiens
aggtaactttatcac

SEQ ID NO: 545605 - DNA, 15 bp, Homo sapiens
ggtaactttatcaca

SEQ ID NO: 545606 - DNA, 15 bp, Homo sapiens
gtaactttatcacag

SEQ ID NO: 545607 - DNA, 15 bp, Homo sapiens
taactttatcacagc

SEQ ID NO: 545608 - DNA, 15 bp, Homo sapiens
aactttatcacagct

SEQ ID NO: 545609 - DNA, 15 bp, Homo sapiens
actttatcacagctg

SEQ ID NO: 545610 - DNA, 15 bp, Homo sapiens
ctttatcacagctgt

SEQ ID NO: 545611 - DNA, 15 bp, Homo sapiens
tttatcacagctgtg

SEQ ID NO: 545612 - DNA, 15 bp, Homo sapiens
ttatcacagctgtgt

SEQ ID NO: 545613 - DNA, 15 bp, Homo sapiens
tatcacagctgtgtg

SEQ ID NO: 545614 - DNA, 15 bp, Homo sapiens
atcacagctgtgtga

SEQ ID NO: 545615 - DNA, 15 bp, Homo sapiens
tcacagctgtgtgac

SEQ ID NO: 545616 - DNA, 15 bp, Homo sapiens
cacagctgtgtgacc

SEQ ID NO: 545617 - DNA, 15 bp, Homo sapiens
acagctgtgtgaccc

SEQ ID NO: 545618 - DNA, 15 bp, Homo sapiens
cagctgtgtgaccca

SEQ ID NO: 545619 - DNA, 15 bp, Homo sapiens
agctgtgtgacccat

SEQ ID NO: 545620 - DNA, 15 bp, Homo sapiens
gctgtgtgacccatg

SEQ ID NO: 545621 - DNA, 15 bp, Homo sapiens
ctgtgtgacccatga

SEQ ID NO: 545622 - DNA, 15 bp, Homo sapiens
tgtgtgacccatgat

SEQ ID NO: 545623 - DNA, 15 bp, Homo sapiens
gtgtgacccatgatg

SEQ ID NO: 545624 - DNA, 15 bp, Homo sapiens
tgtgacccatgatgg

SEQ ID NO: 545625 - DNA, 15 bp, Homo sapiens
gtgacccatgatggc

SEQ ID NO: 545626 - DNA, 15 bp, Homo sapiens
tgacccatgatggcc

SEQ ID NO: 545627 - DNA, 15 bp, Homo sapiens
gacccatgatggcct

SEQ ID NO: 545628 - DNA, 15 bp, Homo sapiens
acccatgatggccta

SEQ ID NO: 545629 - DNA, 15 bp, Homo sapiens
cccatgatggcctag

SEQ ID NO: 545630 - DNA, 15 bp, Homo sapiens
ccatgatggcctagg

SEQ ID NO: 545631 - DNA, 15 bp, Homo sapiens
catgatggcctaggt

SEQ ID NO: 545632 - DNA, 15 bp, Homo sapiens
atgatggcctaggta

SEQ ID NO: 545633 - DNA, 15 bp, Homo sapiens
tgatggcctaggtag

SEQ ID NO: 545634 - DNA, 15 bp, Homo sapiens
gatggcctaggtagc

SEQ ID NO: 545635 - DNA, 15 bp, Homo sapiens
atggcctaggtagct

SEQ ID NO: 545636 - DNA, 15 bp, Homo sapiens
tggcctaggtagctg

SEQ ID NO: 545637 - DNA, 15 bp, Homo sapiens
ggcctaggtagctga

SEQ ID NO: 545638 - DNA, 15 bp, Homo sapiens
gcctaggtagctgag

SEQ ID NO: 545639 - DNA, 15 bp, Homo sapiens
cctaggtagctgagt

SEQ ID NO: 545640 - DNA, 15 bp, Homo sapiens
ctaggtagctgagtg

SEQ ID NO: 545641 - DNA, 15 bp, Homo sapiens
taggtagctgagtga

SEQ ID NO: 545642 - DNA, 15 bp, Homo sapiens
aggtagctgagtgaa

SEQ ID NO: 545643 - DNA, 15 bp, Homo sapiens
ggtagctgagtgaac

SEQ ID NO: 545644 - DNA, 15 bp, Homo sapiens
gtagctgagtgaacc

SEQ ID NO: 545645 - DNA, 15 bp, Homo sapiens
tagctgagtgaacca

SEQ ID NO: 545646 - DNA, 15 bp, Homo sapiens
agctgagtgaaccag

SEQ ID NO: 545647 - DNA, 15 bp, Homo sapiens
gctgagtgaaccaga

SEQ ID NO: 545648 - DNA, 15 bp, Homo sapiens
ctgagtgaaccagaa

SEQ ID NO: 545649 - DNA, 15 bp, Homo sapiens
tgagtgaaccagaag

SEQ ID NO: 545650 - DNA, 15 bp, Homo sapiens
gagtgaaccagaagt

SEQ ID NO: 545651 - DNA, 15 bp, Homo sapiens
agtgaaccagaagtc

SEQ ID NO: 545652 - DNA, 15 bp, Homo sapiens
gtgaaccagaagtct

SEQ ID NO: 545653 - DNA, 15 bp, Homo sapiens
tgaaccagaagtctg

SEQ ID NO: 545654 - DNA, 15 bp, Homo sapiens
gaaccagaagtctga

SEQ ID NO: 545655 - DNA, 15 bp, Homo sapiens
aaccagaagtctgaa

SEQ ID NO: 545656 - DNA, 15 bp, Homo sapiens
accagaagtctgaac

SEQ ID NO: 545657 - DNA, 15 bp, Homo sapiens
ccagaagtctgaact

SEQ ID NO: 545658 - DNA, 15 bp, Homo sapiens
cagaagtctgaactt

SEQ ID NO: 545659 - DNA, 15 bp, Homo sapiens
agaagtctgaacttg

SEQ ID NO: 545660 - DNA, 15 bp, Homo sapiens
gaagtctgaacttgg

SEQ ID NO: 545661 - DNA, 15 bp, Homo sapiens
aagtctgaacttgga

SEQ ID NO: 545662 - DNA, 15 bp, Homo sapiens
agtctgaacttggaa

SEQ ID NO: 545663 - DNA, 15 bp, Homo sapiens
gtctgaacttggaaa

SEQ ID NO: 545664 - DNA, 15 bp, Homo sapiens
tctgaacttggaaac

SEQ ID NO: 545665 - DNA, 15 bp, Homo sapiens
ctgaacttggaaact

SEQ ID NO: 545666 - DNA, 15 bp, Homo sapiens
tgaacttggaaacta

SEQ ID NO: 545667 - DNA, 15 bp, Homo sapiens
gaacttggaaactaa

SEQ ID NO: 545668 - DNA, 15 bp, Homo sapiens
aacttggaaactaag

SEQ ID NO: 545669 - DNA, 15 bp, Homo sapiens
acttggaaactaagt

SEQ ID NO: 545670 - DNA, 15 bp, Homo sapiens
cttggaaactaagtt

SEQ ID NO: 545671 - DNA, 15 bp, Homo sapiens
ttggaaactaagttg

SEQ ID NO: 545672 - DNA, 15 bp, Homo sapiens
tggaaactaagttgt

SEQ ID NO: 545673 - DNA, 15 bp, Homo sapiens
ggaaactaagttgta

SEQ ID NO: 545674 - DNA, 15 bp, Homo sapiens
gaaactaagttgtaa

SEQ ID NO: 545675 - DNA, 15 bp, Homo sapiens
aaactaagttgtaaa

SEQ ID NO: 545676 - DNA, 15 bp, Homo sapiens
aactaagttgtaaag

SEQ ID NO: 545677 - DNA, 15 bp, Homo sapiens
actaagttgtaaagt

SEQ ID NO: 545678 - DNA, 15 bp, Homo sapiens
ctaagttgtaaagtt

SEQ ID NO: 545679 - DNA, 15 bp, Homo sapiens
taagttgtaaagttc

SEQ ID NO: 545680 - DNA, 15 bp, Homo sapiens
aagttgtaaagttct

SEQ ID NO: 545681 - DNA, 15 bp, Homo sapiens
agttgtaaagttctt

SEQ ID NO: 545682 - DNA, 15 bp, Homo sapiens
gttgtaaagttctta

SEQ ID NO: 545683 - DNA, 15 bp, Homo sapiens
ttgtaaagttcttat

SEQ ID NO: 545684 - DNA, 15 bp, Homo sapiens
tgtaaagttcttatg

SEQ ID NO: 545685 - DNA, 15 bp, Homo sapiens
gtaaagttcttatga

SEQ ID NO: 545686 - DNA, 15 bp, Homo sapiens
taaagttcttatgaa

SEQ ID NO: 545687 - DNA, 15 bp, Homo sapiens
aaagttcttatgaac

SEQ ID NO: 545688 - DNA, 15 bp, Homo sapiens
aagttcttatgaact

SEQ ID NO: 545689 - DNA, 15 bp, Homo sapiens
agttcttatgaactt

SEQ ID NO: 545690 - DNA, 15 bp, Homo sapiens
gttcttatgaacttc

SEQ ID NO: 545691 - DNA, 15 bp, Homo sapiens
ttcttatgaacttcc

SEQ ID NO: 545692 - DNA, 15 bp, Homo sapiens
tcttatgaacttcct

SEQ ID NO: 545693 - DNA, 15 bp, Homo sapiens
cttatgaacttccta

SEQ ID NO: 545694 - DNA, 15 bp, Homo sapiens
ttatgaacttcctag

SEQ ID NO: 545695 - DNA, 15 bp, Homo sapiens
tatgaacttcctagg

SEQ ID NO: 545696 - DNA, 15 bp, Homo sapiens
atgaacttcctaggg

SEQ ID NO: 545697 - DNA, 15 bp, Homo sapiens
tgaacttcctagggc

SEQ ID NO: 545698 - DNA, 15 bp, Homo sapiens
gaacttcctagggct

SEQ ID NO: 545699 - DNA, 15 bp, Homo sapiens
aacttcctagggctt

SEQ ID NO: 545700 - DNA, 15 bp, Homo sapiens
acttcctagggcttc

SEQ ID NO: 545701 - DNA, 15 bp, Homo sapiens
cttcctagggcttcc

SEQ ID NO: 545702 - DNA, 15 bp, Homo sapiens
ttcctagggcttcct

SEQ ID NO: 545703 - DNA, 15 bp, Homo sapiens
tcctagggcttcctg

SEQ ID NO: 545704 - DNA, 15 bp, Homo sapiens
cctagggcttcctga

SEQ ID NO: 545705 - DNA, 15 bp, Homo sapiens
ctagggcttcctgag

SEQ ID NO: 545706 - DNA, 15 bp, Homo sapiens
tagggcttcctgagc

SEQ ID NO: 545707 - DNA, 15 bp, Homo sapiens
agggcttcctgagcc

SEQ ID NO: 545708 - DNA, 15 bp, Homo sapiens
gggcttcctgagcct

SEQ ID NO: 545709 - DNA, 15 bp, Homo sapiens
ggcttcctgagcctc

SEQ ID NO: 545710 - DNA, 15 bp, Homo sapiens
gcttcctgagcctcc

SEQ ID NO: 545711 - DNA, 15 bp, Homo sapiens
cttcctgagcctccc

SEQ ID NO: 545712 - DNA, 15 bp, Homo sapiens
ttcctgagcctcccc

SEQ ID NO: 545713 - DNA, 15 bp, Homo sapiens
tcctgagcctccccc

SEQ ID NO: 545714 - DNA, 15 bp, Homo sapiens
cctgagcctcccccc

SEQ ID NO: 545715 - DNA, 15 bp, Homo sapiens
ctgagcctcccccca

SEQ ID NO: 545716 - DNA, 15 bp, Homo sapiens
tgagcctccccccac

SEQ ID NO: 545717 - DNA, 15 bp, Homo sapiens
gagcctccccccacc

SEQ ID NO: 545718 - DNA, 15 bp, Homo sapiens
agcctccccccacct

SEQ ID NO: 545719 - DNA, 15 bp, Homo sapiens
gcctccccccacctt

SEQ ID NO: 545720 - DNA, 15 bp, Homo sapiens
cctccccccaccttt

SEQ ID NO: 545721 - DNA, 15 bp, Homo sapiens
ctccccccaccttta

SEQ ID NO: 545722 - DNA, 15 bp, Homo sapiens
tccccccacctttag

SEQ ID NO: 545723 - DNA, 15 bp, Homo sapiens
ccccccacctttaga

SEQ ID NO: 545724 - DNA, 15 bp, Homo sapiens
cccccacctttagat

SEQ ID NO: 545725 - DNA, 15 bp, Homo sapiens
ccccacctttagatg

SEQ ID NO: 545726 - DNA, 15 bp, Homo sapiens
cccacctttagatgc

SEQ ID NO: 545727 - DNA, 15 bp, Homo sapiens
ccacctttagatgcc

SEQ ID NO: 545728 - DNA, 15 bp, Homo sapiens
cacctttagatgcca

SEQ ID NO: 545729 - DNA, 15 bp, Homo sapiens
acctttagatgccaa

SEQ ID NO: 545730 - DNA, 15 bp, Homo sapiens
cctttagatgccaag

SEQ ID NO: 545731 - DNA, 15 bp, Homo sapiens
ctttagatgccaagt

SEQ ID NO: 545732 - DNA, 15 bp, Homo sapiens
tttagatgccaagtc

SEQ ID NO: 545733 - DNA, 15 bp, Homo sapiens
ttagatgccaagtct

SEQ ID NO: 545734 - DNA, 15 bp, Homo sapiens
tagatgccaagtctc

SEQ ID NO: 545735 - DNA, 15 bp, Homo sapiens
agatgccaagtctct

SEQ ID NO: 545736 - DNA, 15 bp, Homo sapiens
gatgccaagtctctt

SEQ ID NO: 545737 - DNA, 15 bp, Homo sapiens
atgccaagtctcttt

SEQ ID NO: 545738 - DNA, 15 bp, Homo sapiens
tgccaagtctctttg

SEQ ID NO: 545739 - DNA, 15 bp, Homo sapiens
gccaagtctctttgc

SEQ ID NO: 545740 - DNA, 15 bp, Homo sapiens
ccaagtctctttgca

SEQ ID NO: 545741 - DNA, 15 bp, Homo sapiens
caagtctctttgcaa

SEQ ID NO: 545742 - DNA, 15 bp, Homo sapiens
aagtctctttgcaaa

SEQ ID NO: 545743 - DNA, 15 bp, Homo sapiens
agtctctttgcaaat

SEQ ID NO: 545744 - DNA, 15 bp, Homo sapiens
gtctctttgcaaatt

SEQ ID NO: 545745 - DNA, 15 bp, Homo sapiens
tctctttgcaaattc

SEQ ID NO: 545746 - DNA, 15 bp, Homo sapiens
ctctttgcaaattca

SEQ ID NO: 545747 - DNA, 15 bp, Homo sapiens
tctttgcaaattcat

SEQ ID NO: 545748 - DNA, 15 bp, Homo sapiens
ctttgcaaattcata

SEQ ID NO: 545749 - DNA, 15 bp, Homo sapiens
tttgcaaattcatat

SEQ ID NO: 545750 - DNA, 15 bp, Homo sapiens
ttgcaaattcatatc

SEQ ID NO: 545751 - DNA, 15 bp, Homo sapiens
tgcaaattcatatca

SEQ ID NO: 545752 - DNA, 15 bp, Homo sapiens
gcaaattcatatcat

SEQ ID NO: 545753 - DNA, 15 bp, Homo sapiens
caaattcatatcatt

SEQ ID NO: 545754 - DNA, 15 bp, Homo sapiens
aaattcatatcattc

SEQ ID NO: 545755 - DNA, 15 bp, Homo sapiens
aattcatatcattcc

SEQ ID NO: 545756 - DNA, 15 bp, Homo sapiens
attcatatcattcct

SEQ ID NO: 545757 - DNA, 15 bp, Homo sapiens
ttcatatcattcctg

SEQ ID NO: 545758 - DNA, 15 bp, Homo sapiens
tcatatcattcctgc

SEQ ID NO: 545759 - DNA, 15 bp, Homo sapiens
catatcattcctgca

SEQ ID NO: 545760 - DNA, 15 bp, Homo sapiens
atatcattcctgcaa

SEQ ID NO: 545761 - DNA, 15 bp, Homo sapiens
tatcattcctgcaaa

SEQ ID NO: 545762 - DNA, 15 bp, Homo sapiens
atcattcctgcaaac

SEQ ID NO: 545763 - DNA, 15 bp, Homo sapiens
tcattcctgcaaaca

SEQ ID NO: 545764 - DNA, 15 bp, Homo sapiens
cattcctgcaaacag

SEQ ID NO: 545765 - DNA, 15 bp, Homo sapiens
attcctgcaaacaga

SEQ ID NO: 545766 - DNA, 15 bp, Homo sapiens
ttcctgcaaacagaa

SEQ ID NO: 545767 - DNA, 15 bp, Homo sapiens
tcctgcaaacagaaa

SEQ ID NO: 545768 - DNA, 15 bp, Homo sapiens
cctgcaaacagaaaa

SEQ ID NO: 545769 - DNA, 15 bp, Homo sapiens
ctgcaaacagaaaat

SEQ ID NO: 545770 - DNA, 15 bp, Homo sapiens
tgcaaacagaaaata

SEQ ID NO: 545771 - DNA, 15 bp, Homo sapiens
gcaaacagaaaatag

SEQ ID NO: 545772 - DNA, 15 bp, Homo sapiens
caaacagaaaatagt

SEQ ID NO: 545773 - DNA, 15 bp, Homo sapiens
aaacagaaaatagta

SEQ ID NO: 545774 - DNA, 15 bp, Homo sapiens
aacagaaaatagtat

SEQ ID NO: 545775 - DNA, 15 bp, Homo sapiens
acagaaaatagtatt

SEQ ID NO: 545776 - DNA, 15 bp, Homo sapiens
cagaaaatagtattt

SEQ ID NO: 545777 - DNA, 15 bp, Homo sapiens
agaaaatagtattta

SEQ ID NO: 545778 - DNA, 15 bp, Homo sapiens
gaaaatagtatttag

SEQ ID NO: 545779 - DNA, 15 bp, Homo sapiens
aaaatagtatttaga

SEQ ID NO: 545780 - DNA, 15 bp, Homo sapiens
aaatagtatttagaa

SEQ ID NO: 545781 - DNA, 15 bp, Homo sapiens
aatagtatttagaat

SEQ ID NO: 545782 - DNA, 15 bp, Homo sapiens
atagtatttagaata

SEQ ID NO: 545783 - DNA, 15 bp, Homo sapiens
tagtatttagaataa

SEQ ID NO: 545784 - DNA, 15 bp, Homo sapiens
agtatttagaataat

SEQ ID NO: 545785 - DNA, 15 bp, Homo sapiens
gtatttagaataata

SEQ ID NO: 545786 - DNA, 15 bp, Homo sapiens
tatttagaataataa

SEQ ID NO: 545787 - DNA, 15 bp, Homo sapiens
atttagaataataag

SEQ ID NO: 545788 - DNA, 15 bp, Homo sapiens
tttagaataataaga

SEQ ID NO: 545789 - DNA, 15 bp, Homo sapiens
ttagaataataagat

SEQ ID NO: 545790 - DNA, 15 bp, Homo sapiens
tagaataataagatg

SEQ ID NO: 545791 - DNA, 15 bp, Homo sapiens
agaataataagatgt

SEQ ID NO: 545792 - DNA, 15 bp, Homo sapiens
gaataataagatgtt

SEQ ID NO: 545793 - DNA, 15 bp, Homo sapiens
aataataagatgttt

SEQ ID NO: 545794 - DNA, 15 bp, Homo sapiens
ataataagatgtttt

SEQ ID NO: 545795 - DNA, 15 bp, Homo sapiens
taataagatgttttt

SEQ ID NO: 545796 - DNA, 15 bp, Homo sapiens
aataagatgtttttc

SEQ ID NO: 545797 - DNA, 15 bp, Homo sapiens
ataagatgtttttca

SEQ ID NO: 545798 - DNA, 15 bp, Homo sapiens
taagatgtttttcaa

SEQ ID NO: 545799 - DNA, 15 bp, Homo sapiens
aagatgtttttcaaa

SEQ ID NO: 545800 - DNA, 15 bp, Homo sapiens
agatgtttttcaaat

SEQ ID NO: 545801 - DNA, 15 bp, Homo sapiens
gatgtttttcaaatt

SEQ ID NO: 545802 - DNA, 15 bp, Homo sapiens
atgtttttcaaattt

SEQ ID NO: 545803 - DNA, 15 bp, Homo sapiens
tgtttttcaaatttt

SEQ ID NO: 545804 - DNA, 15 bp, Homo sapiens
gtttttcaaattttc

SEQ ID NO: 545805 - DNA, 15 bp, Homo sapiens
tttttcaaattttcc

SEQ ID NO: 545806 - DNA, 15 bp, Homo sapiens
ttttcaaattttcct

SEQ ID NO: 545807 - DNA, 15 bp, Homo sapiens
tttcaaattttcctt

SEQ ID NO: 545808 - DNA, 15 bp, Homo sapiens
ttcaaattttccttc

SEQ ID NO: 545809 - DNA, 15 bp, Homo sapiens
tcaaattttccttca

SEQ ID NO: 545810 - DNA, 15 bp, Homo sapiens
caaattttccttcaa

SEQ ID NO: 545811 - DNA, 15 bp, Homo sapiens
aaattttccttcaag

SEQ ID NO: 545812 - DNA, 15 bp, Homo sapiens
aattttccttcaagg

SEQ ID NO: 545813 - DNA, 15 bp, Homo sapiens
attttccttcaaggg

SEQ ID NO: 545814 - DNA, 15 bp, Homo sapiens
ttttccttcaagggt

SEQ ID NO: 545815 - DNA, 15 bp, Homo sapiens
tttccttcaagggtc

SEQ ID NO: 545816 - DNA, 15 bp, Homo sapiens
ttccttcaagggtcc

SEQ ID NO: 545817 - DNA, 15 bp, Homo sapiens
tccttcaagggtcct

SEQ ID NO: 545818 - DNA, 15 bp, Homo sapiens
ccttcaagggtccta

SEQ ID NO: 545819 - DNA, 15 bp, Homo sapiens
cttcaagggtcctat

SEQ ID NO: 545820 - DNA, 15 bp, Homo sapiens
ttcaagggtcctatg

SEQ ID NO: 545821 - DNA, 15 bp, Homo sapiens
tcaagggtcctatga

SEQ ID NO: 545822 - DNA, 15 bp, Homo sapiens
caagggtcctatgag

SEQ ID NO: 545823 - DNA, 15 bp, Homo sapiens
aagggtcctatgagc

SEQ ID NO: 545824 - DNA, 15 bp, Homo sapiens
agggtcctatgagct

SEQ ID NO: 545825 - DNA, 15 bp, Homo sapiens
gggtcctatgagctg

SEQ ID NO: 545826 - DNA, 15 bp, Homo sapiens
ggtcctatgagctgg

SEQ ID NO: 545827 - DNA, 15 bp, Homo sapiens
gtcctatgagctggc

SEQ ID NO: 545828 - DNA, 15 bp, Homo sapiens
tcctatgagctggcc

SEQ ID NO: 545829 - DNA, 15 bp, Homo sapiens
cctatgagctggcct

SEQ ID NO: 545830 - DNA, 15 bp, Homo sapiens
ctatgagctggcctg

SEQ ID NO: 545831 - DNA, 15 bp, Homo sapiens
tatgagctggcctga

SEQ ID NO: 545832 - DNA, 15 bp, Homo sapiens
atgagctggcctgat

SEQ ID NO: 545833 - DNA, 15 bp, Homo sapiens
tgagctggcctgata

SEQ ID NO: 545834 - DNA, 15 bp, Homo sapiens
gagctggcctgataa

SEQ ID NO: 545835 - DNA, 15 bp, Homo sapiens
agctggcctgataaa

SEQ ID NO: 545836 - DNA, 15 bp, Homo sapiens
gctggcctgataaat

SEQ ID NO: 545837 - DNA, 15 bp, Homo sapiens
ctggcctgataaatt

SEQ ID NO: 545838 - DNA, 15 bp, Homo sapiens
tggcctgataaattg

SEQ ID NO: 545839 - DNA, 15 bp, Homo sapiens
ggcctgataaattgt

SEQ ID NO: 545840 - DNA, 15 bp, Homo sapiens
gcctgataaattgtt

SEQ ID NO: 545841 - DNA, 15 bp, Homo sapiens
cctgataaattgttt

SEQ ID NO: 545842 - DNA, 15 bp, Homo sapiens
ctgataaattgttta

SEQ ID NO: 545843 - DNA, 15 bp, Homo sapiens
tgataaattgtttaa

SEQ ID NO: 545844 - DNA, 15 bp, Homo sapiens
gataaattgtttaac

SEQ ID NO: 545845 - DNA, 15 bp, Homo sapiens
ataaattgtttaact

SEQ ID NO: 545846 - DNA, 15 bp, Homo sapiens
taaattgtttaactt

SEQ ID NO: 545847 - DNA, 15 bp, Homo sapiens
aaattgtttaacttt

SEQ ID NO: 545848 - DNA, 15 bp, Homo sapiens
aattgtttaactttg

SEQ ID NO: 545849 - DNA, 15 bp, Homo sapiens
attgtttaactttga

SEQ ID NO: 545850 - DNA, 15 bp, Homo sapiens
ttgtttaactttgaa

SEQ ID NO: 545851 - DNA, 15 bp, Homo sapiens
tgtttaactttgaag

SEQ ID NO: 545852 - DNA, 15 bp, Homo sapiens
gtttaactttgaagg

SEQ ID NO: 545853 - DNA, 15 bp, Homo sapiens
tttaactttgaaggg

SEQ ID NO: 545854 - DNA, 15 bp, Homo sapiens
ttaactttgaaggga

SEQ ID NO: 545855 - DNA, 15 bp, Homo sapiens
taactttgaagggaa

SEQ ID NO: 545856 - DNA, 15 bp, Homo sapiens
aactttgaagggaat

SEQ ID NO: 545857 - DNA, 15 bp, Homo sapiens
actttgaagggaatt

SEQ ID NO: 545858 - DNA, 15 bp, Homo sapiens
ctttgaagggaattt

SEQ ID NO: 545859 - DNA, 15 bp, Homo sapiens
tttgaagggaatttt

SEQ ID NO: 545860 - DNA, 15 bp, Homo sapiens
ttgaagggaattttg

SEQ ID NO: 545861 - DNA, 15 bp, Homo sapiens
tgaagggaattttga

SEQ ID NO: 545862 - DNA, 15 bp, Homo sapiens
gaagggaattttgaa

SEQ ID NO: 545863 - DNA, 15 bp, Homo sapiens
aagggaattttgaac

SEQ ID NO: 545864 - DNA, 15 bp, Homo sapiens
agggaattttgaaca

SEQ ID NO: 545865 - DNA, 15 bp, Homo sapiens
gggaattttgaacaa

SEQ ID NO: 545866 - DNA, 15 bp, Homo sapiens
ggaattttgaacaaa

SEQ ID NO: 545867 - DNA, 15 bp, Homo sapiens
gaattttgaacaaat

SEQ ID NO: 545868 - DNA, 15 bp, Homo sapiens
aattttgaacaaata

SEQ ID NO: 545869 - DNA, 15 bp, Homo sapiens
attttgaacaaatag

SEQ ID NO: 545870 - DNA, 15 bp, Homo sapiens
ttttgaacaaatagg

SEQ ID NO: 545871 - DNA, 15 bp, Homo sapiens
tttgaacaaatagga

SEQ ID NO: 545872 - DNA, 15 bp, Homo sapiens
ttgaacaaataggac

SEQ ID NO: 545873 - DNA, 15 bp, Homo sapiens
tgaacaaataggaca

SEQ ID NO: 545874 - DNA, 15 bp, Homo sapiens
gaacaaataggacaa

SEQ ID NO: 545875 - DNA, 15 bp, Homo sapiens
aacaaataggacaag

SEQ ID NO: 545876 - DNA, 15 bp, Homo sapiens
acaaataggacaaga

SEQ ID NO: 545877 - DNA, 15 bp, Homo sapiens
caaataggacaagac

SEQ ID NO: 545878 - DNA, 15 bp, Homo sapiens
aaataggacaagaca

SEQ ID NO: 545879 - DNA, 15 bp, Homo sapiens
aataggacaagacaa

SEQ ID NO: 545880 - DNA, 15 bp, Homo sapiens
ataggacaagacaat

SEQ ID NO: 545881 - DNA, 15 bp, Homo sapiens
taggacaagacaatc

SEQ ID NO: 545882 - DNA, 15 bp, Homo sapiens
aggacaagacaatcg

SEQ ID NO: 545883 - DNA, 15 bp, Homo sapiens
ggacaagacaatcga

SEQ ID NO: 545884 - DNA, 15 bp, Homo sapiens
gacaagacaatcgaa

SEQ ID NO: 545885 - DNA, 15 bp, Homo sapiens
acaagacaatcgaaa

SEQ ID NO: 545886 - DNA, 15 bp, Homo sapiens
caagacaatcgaaac

SEQ ID NO: 545887 - DNA, 15 bp, Homo sapiens
aagacaatcgaaaca

SEQ ID NO: 545888 - DNA, 15 bp, Homo sapiens
agacaatcgaaacac

SEQ ID NO: 545889 - DNA, 15 bp, Homo sapiens
gacaatcgaaacacg

SEQ ID NO: 545890 - DNA, 15 bp, Homo sapiens
acaatcgaaacacgt

SEQ ID NO: 545891 - DNA, 15 bp, Homo sapiens
caatcgaaacacgta

SEQ ID NO: 545892 - DNA, 15 bp, Homo sapiens
aatcgaaacacgtat

SEQ ID NO: 545893 - DNA, 15 bp, Homo sapiens
atcgaaacacgtatc

SEQ ID NO: 545894 - DNA, 15 bp, Homo sapiens
tcgaaacacgtatct

SEQ ID NO: 545895 - DNA, 15 bp, Homo sapiens
cgaaacacgtatcta

SEQ ID NO: 545896 - DNA, 15 bp, Homo sapiens
gaaacacgtatctag

SEQ ID NO: 545897 - DNA, 15 bp, Homo sapiens
aaacacgtatctaga

SEQ ID NO: 545898 - DNA, 15 bp, Homo sapiens
aacacgtatctagaa

SEQ ID NO: 545899 - DNA, 15 bp, Homo sapiens
acacgtatctagaat

SEQ ID NO: 545900 - DNA, 15 bp, Homo sapiens
cacgtatctagaatt

SEQ ID NO: 545901 - DNA, 15 bp, Homo sapiens
acgtatctagaatta

SEQ ID NO: 545902 - DNA, 15 bp, Homo sapiens
cgtatctagaattag

SEQ ID NO: 545903 - DNA, 15 bp, Homo sapiens
gtatctagaattagg

SEQ ID NO: 545904 - DNA, 15 bp, Homo sapiens
tatctagaattagga

SEQ ID NO: 545905 - DNA, 15 bp, Homo sapiens
atctagaattaggac

SEQ ID NO: 545906 - DNA, 15 bp, Homo sapiens
tctagaattaggaca

SEQ ID NO: 545907 - DNA, 15 bp, Homo sapiens
ctagaattaggacat

SEQ ID NO: 545908 - DNA, 15 bp, Homo sapiens
tagaattaggacatg

SEQ ID NO: 545909 - DNA, 15 bp, Homo sapiens
agaattaggacatgg

SEQ ID NO: 545910 - DNA, 15 bp, Homo sapiens
gaattaggacatggt

SEQ ID NO: 545911 - DNA, 15 bp, Homo sapiens
aattaggacatggtt

SEQ ID NO: 545912 - DNA, 15 bp, Homo sapiens
attaggacatggttg

SEQ ID NO: 545913 - DNA, 15 bp, Homo sapiens
ttaggacatggttga

SEQ ID NO: 545914 - DNA, 15 bp, Homo sapiens
taggacatggttgat

SEQ ID NO: 545915 - DNA, 15 bp, Homo sapiens
aggacatggttgatc

SEQ ID NO: 545916 - DNA, 15 bp, Homo sapiens
ggacatggttgatcc

SEQ ID NO: 545917 - DNA, 15 bp, Homo sapiens
gacatggttgatccc

SEQ ID NO: 545918 - DNA, 15 bp, Homo sapiens
acatggttgatcccg

SEQ ID NO: 545919 - DNA, 15 bp, Homo sapiens
catggttgatcccga

SEQ ID NO: 545920 - DNA, 15 bp, Homo sapiens
atggttgatcccgaa

SEQ ID NO: 545921 - DNA, 15 bp, Homo sapiens
tggttgatcccgaag

SEQ ID NO: 545922 - DNA, 15 bp, Homo sapiens
ggttgatcccgaagt

SEQ ID NO: 545923 - DNA, 15 bp, Homo sapiens
gttgatcccgaagtt

SEQ ID NO: 545924 - DNA, 15 bp, Homo sapiens
ttgatcccgaagttc

SEQ ID NO: 545925 - DNA, 15 bp, Homo sapiens
tgatcccgaagttct

SEQ ID NO: 545926 - DNA, 15 bp, Homo sapiens
gatcccgaagttctt

SEQ ID NO: 545927 - DNA, 15 bp, Homo sapiens
atcccgaagttctta

SEQ ID NO: 545928 - DNA, 15 bp, Homo sapiens
tcccgaagttcttaa

SEQ ID NO: 545929 - DNA, 15 bp, Homo sapiens
cccgaagttcttaaa

SEQ ID NO: 545930 - DNA, 15 bp, Homo sapiens
ccgaagttcttaaat

SEQ ID NO: 545931 - DNA, 15 bp, Homo sapiens
cgaagttcttaaata

SEQ ID NO: 545932 - DNA, 15 bp, Homo sapiens
gaagttcttaaatac

SEQ ID NO: 545933 - DNA, 15 bp, Homo sapiens
aagttcttaaatact

SEQ ID NO: 545934 - DNA, 15 bp, Homo sapiens
agttcttaaatactg

SEQ ID NO: 545935 - DNA, 15 bp, Homo sapiens
gttcttaaatactga

SEQ ID NO: 545936 - DNA, 15 bp, Homo sapiens
ttcttaaatactgaa

SEQ ID NO: 545937 - DNA, 15 bp, Homo sapiens
tcttaaatactgaaa

SEQ ID NO: 545938 - DNA, 15 bp, Homo sapiens
cttaaatactgaaac

SEQ ID NO: 545939 - DNA, 15 bp, Homo sapiens
ttaaatactgaaacc

SEQ ID NO: 545940 - DNA, 15 bp, Homo sapiens
taaatactgaaacct

SEQ ID NO: 545941 - DNA, 15 bp, Homo sapiens
aaatactgaaacctc

SEQ ID NO: 545942 - DNA, 15 bp, Homo sapiens
aatactgaaacctcc

SEQ ID NO: 545943 - DNA, 15 bp, Homo sapiens
atactgaaacctcct

SEQ ID NO: 545944 - DNA, 15 bp, Homo sapiens
tactgaaacctcctt

SEQ ID NO: 545945 - DNA, 15 bp, Homo sapiens
actgaaacctccttg

SEQ ID NO: 545946 - DNA, 15 bp, Homo sapiens
ctgaaacctccttgt

SEQ ID NO: 545947 - DNA, 15 bp, Homo sapiens
tgaaacctccttgtg

SEQ ID NO: 545948 - DNA, 15 bp, Homo sapiens
gaaacctccttgtgg

SEQ ID NO: 545949 - DNA, 15 bp, Homo sapiens
aaacctccttgtggt

SEQ ID NO: 545950 - DNA, 15 bp, Homo sapiens
aacctccttgtggta

SEQ ID NO: 545951 - DNA, 15 bp, Homo sapiens
acctccttgtggtat

SEQ ID NO: 545952 - DNA, 15 bp, Homo sapiens
cctccttgtggtatg

SEQ ID NO: 545953 - DNA, 15 bp, Homo sapiens
ctccttgtggtatgc

SEQ ID NO: 545954 - DNA, 15 bp, Homo sapiens
tccttgtggtatgca

SEQ ID NO: 545955 - DNA, 15 bp, Homo sapiens
ccttgtggtatgcag

SEQ ID NO: 545956 - DNA, 15 bp, Homo sapiens
cttgtggtatgcaga

SEQ ID NO: 545957 - DNA, 15 bp, Homo sapiens
ttgtggtatgcagag

SEQ ID NO: 545958 - DNA, 15 bp, Homo sapiens
tgtggtatgcagagg

SEQ ID NO: 545959 - DNA, 15 bp, Homo sapiens
gtggtatgcagaggc

SEQ ID NO: 545960 - DNA, 15 bp, Homo sapiens
tggtatgcagaggcc

SEQ ID NO: 545961 - DNA, 15 bp, Homo sapiens
ggtatgcagaggcca

SEQ ID NO: 545962 - DNA, 15 bp, Homo sapiens
gtatgcagaggccaa

SEQ ID NO: 545963 - DNA, 15 bp, Homo sapiens
tatgcagaggccaaa

SEQ ID NO: 545964 - DNA, 15 bp, Homo sapiens
atgcagaggccaaat

SEQ ID NO: 545965 - DNA, 15 bp, Homo sapiens
tgcagaggccaaatt

SEQ ID NO: 545966 - DNA, 15 bp, Homo sapiens
gcagaggccaaattg

SEQ ID NO: 545967 - DNA, 15 bp, Homo sapiens
cagaggccaaattga

SEQ ID NO: 545968 - DNA, 15 bp, Homo sapiens
agaggccaaattgat

SEQ ID NO: 545969 - DNA, 15 bp, Homo sapiens
gaggccaaattgatc

SEQ ID NO: 545970 - DNA, 15 bp, Homo sapiens
aggccaaattgatca

SEQ ID NO: 545971 - DNA, 15 bp, Homo sapiens
ggccaaattgatcat

SEQ ID NO: 545972 - DNA, 15 bp, Homo sapiens
gccaaattgatcatc

SEQ ID NO: 545973 - DNA, 15 bp, Homo sapiens
ccaaattgatcatct

SEQ ID NO: 545974 - DNA, 15 bp, Homo sapiens
caaattgatcatctt

SEQ ID NO: 545975 - DNA, 15 bp, Homo sapiens
aaattgatcatcttt

SEQ ID NO: 545976 - DNA, 15 bp, Homo sapiens
aattgatcatcttta

SEQ ID NO: 545977 - DNA, 15 bp, Homo sapiens
attgatcatctttag

SEQ ID NO: 545978 - DNA, 15 bp, Homo sapiens
ttgatcatctttagg

SEQ ID NO: 545979 - DNA, 15 bp, Homo sapiens
tgatcatctttaggc

SEQ ID NO: 545980 - DNA, 15 bp, Homo sapiens
gatcatctttaggca

SEQ ID NO: 545981 - DNA, 15 bp, Homo sapiens
atcatctttaggcag

SEQ ID NO: 545982 - DNA, 15 bp, Homo sapiens
tcatctttaggcaga

SEQ ID NO: 545983 - DNA, 15 bp, Homo sapiens
catctttaggcagag

SEQ ID NO: 545984 - DNA, 15 bp, Homo sapiens
atctttaggcagaga

SEQ ID NO: 545985 - DNA, 15 bp, Homo sapiens
tctttaggcagagat

SEQ ID NO: 545986 - DNA, 15 bp, Homo sapiens
ctttaggcagagatt

SEQ ID NO: 545987 - DNA, 15 bp, Homo sapiens
tttaggcagagattc

SEQ ID NO: 545988 - DNA, 15 bp, Homo sapiens
ttaggcagagattcc

SEQ ID NO: 545989 - DNA, 15 bp, Homo sapiens
taggcagagattcct

SEQ ID NO: 545990 - DNA, 15 bp, Homo sapiens
aggcagagattcctt

SEQ ID NO: 545991 - DNA, 15 bp, Homo sapiens
ggcagagattcctta

SEQ ID NO: 545992 - DNA, 15 bp, Homo sapiens
gcagagattccttag

SEQ ID NO: 545993 - DNA, 15 bp, Homo sapiens
cagagattccttaga

SEQ ID NO: 545994 - DNA, 15 bp, Homo sapiens
agagattccttagac

SEQ ID NO: 545995 - DNA, 15 bp, Homo sapiens
gagattccttagaca

SEQ ID NO: 545996 - DNA, 15 bp, Homo sapiens
agattccttagacat

SEQ ID NO: 545997 - DNA, 15 bp, Homo sapiens
gattccttagacatg

SEQ ID NO: 545998 - DNA, 15 bp, Homo sapiens
attccttagacatga

SEQ ID NO: 545999 - DNA, 15 bp, Homo sapiens
ttccttagacatgat

SEQ ID NO: 546000 - DNA, 15 bp, Homo sapiens
tccttagacatgatc

SEQ ID NO: 546001 - DNA, 15 bp, Homo sapiens
ccttagacatgatcg

SEQ ID NO: 546002 - DNA, 15 bp, Homo sapiens
cttagacatgatcga

SEQ ID NO: 546003 - DNA, 15 bp, Homo sapiens
ttagacatgatcgat

SEQ ID NO: 546004 - DNA, 15 bp, Homo sapiens
tagacatgatcgatg

SEQ ID NO: 546005 - DNA, 15 bp, Homo sapiens
agacatgatcgatga

SEQ ID NO: 546006 - DNA, 15 bp, Homo sapiens
gacatgatcgatgag

SEQ ID NO: 546007 - DNA, 15 bp, Homo sapiens
acatgatcgatgagg

SEQ ID NO: 546008 - DNA, 15 bp, Homo sapiens
catgatcgatgaggc

SEQ ID NO: 546009 - DNA, 15 bp, Homo sapiens
atgatcgatgaggct

SEQ ID NO: 546010 - DNA, 15 bp, Homo sapiens
tgatcgatgaggcta

SEQ ID NO: 546011 - DNA, 15 bp, Homo sapiens
gatcgatgaggctat

SEQ ID NO: 546012 - DNA, 15 bp, Homo sapiens
atcgatgaggctatc

SEQ ID NO: 546013 - DNA, 15 bp, Homo sapiens
tcgatgaggctatcc

SEQ ID NO: 546014 - DNA, 15 bp, Homo sapiens
cgatgaggctatcca

SEQ ID NO: 546015 - DNA, 15 bp, Homo sapiens
gatgaggctatccat

SEQ ID NO: 546016 - DNA, 15 bp, Homo sapiens
atgaggctatccatc

SEQ ID NO: 546017 - DNA, 15 bp, Homo sapiens
tgaggctatccatct

SEQ ID NO: 546018 - DNA, 15 bp, Homo sapiens
gaggctatccatcta

SEQ ID NO: 546019 - DNA, 15 bp, Homo sapiens
aggctatccatctag

SEQ ID NO: 546020 - DNA, 15 bp, Homo sapiens
ggctatccatctagc

SEQ ID NO: 546021 - DNA, 15 bp, Homo sapiens
gctatccatctagcg

SEQ ID NO: 546022 - DNA, 15 bp, Homo sapiens
ctatccatctagcgt

SEQ ID NO: 546023 - DNA, 15 bp, Homo sapiens
tatccatctagcgta

SEQ ID NO: 546024 - DNA, 15 bp, Homo sapiens
atccatctagcgtaa

SEQ ID NO: 546025 - DNA, 15 bp, Homo sapiens
tccatctagcgtaac

SEQ ID NO: 546026 - DNA, 15 bp, Homo sapiens
ccatctagcgtaaca

SEQ ID NO: 546027 - DNA, 15 bp, Homo sapiens
catctagcgtaacac

SEQ ID NO: 546028 - DNA, 15 bp, Homo sapiens
atctagcgtaacact

SEQ ID NO: 546029 - DNA, 15 bp, Homo sapiens
tctagcgtaacactg

SEQ ID NO: 546030 - DNA, 15 bp, Homo sapiens
ctagcgtaacactga

SEQ ID NO: 546031 - DNA, 15 bp, Homo sapiens
tagcgtaacactgag

SEQ ID NO: 546032 - DNA, 15 bp, Homo sapiens
agcgtaacactgaga

SEQ ID NO: 546033 - DNA, 15 bp, Homo sapiens
gcgtaacactgagac

SEQ ID NO: 546034 - DNA, 15 bp, Homo sapiens
cgtaacactgagact

SEQ ID NO: 546035 - DNA, 15 bp, Homo sapiens
gtaacactgagactt

SEQ ID NO: 546036 - DNA, 15 bp, Homo sapiens
taacactgagacttt

SEQ ID NO: 546037 - DNA, 15 bp, Homo sapiens
aacactgagactttc

SEQ ID NO: 546038 - DNA, 15 bp, Homo sapiens
acactgagactttct

SEQ ID NO: 546039 - DNA, 15 bp, Homo sapiens
cactgagactttctt

SEQ ID NO: 546040 - DNA, 15 bp, Homo sapiens
actgagactttcttg

SEQ ID NO: 546041 - DNA, 15 bp, Homo sapiens
ctgagactttcttgt

SEQ ID NO: 546042 - DNA, 15 bp, Homo sapiens
tgagactttcttgtg

SEQ ID NO: 546043 - DNA, 15 bp, Homo sapiens
gagactttcttgtgt

SEQ ID NO: 546044 - DNA, 15 bp, Homo sapiens
agactttcttgtgta

SEQ ID NO: 546045 - DNA, 15 bp, Homo sapiens
gactttcttgtgtaa

SEQ ID NO: 546046 - DNA, 15 bp, Homo sapiens
actttcttgtgtaaa

SEQ ID NO: 546047 - DNA, 15 bp, Homo sapiens
ctttcttgtgtaaac

SEQ ID NO: 546048 - DNA, 15 bp, Homo sapiens
tttcttgtgtaaacc

SEQ ID NO: 546049 - DNA, 15 bp, Homo sapiens
ttcttgtgtaaaccc

SEQ ID NO: 546050 - DNA, 15 bp, Homo sapiens
tcttgtgtaaacccc

SEQ ID NO: 546051 - DNA, 15 bp, Homo sapiens
cttgtgtaaacccct

SEQ ID NO: 546052 - DNA, 15 bp, Homo sapiens
ttgtgtaaacccctc

SEQ ID NO: 546053 - DNA, 15 bp, Homo sapiens
tgtgtaaacccctca

SEQ ID NO: 546054 - DNA, 15 bp, Homo sapiens
gtgtaaacccctcac

SEQ ID NO: 546055 - DNA, 15 bp, Homo sapiens
tgtaaacccctcaca

SEQ ID NO: 546056 - DNA, 15 bp, Homo sapiens
gtaaacccctcacac

SEQ ID NO: 546057 - DNA, 15 bp, Homo sapiens
taaacccctcacacc

SEQ ID NO: 546058 - DNA, 15 bp, Homo sapiens
aaacccctcacaccc

SEQ ID NO: 546059 - DNA, 15 bp, Homo sapiens
aacccctcacaccca

SEQ ID NO: 546060 - DNA, 15 bp, Homo sapiens
acccctcacacccac

SEQ ID NO: 546061 - DNA, 15 bp, Homo sapiens
cccctcacacccact

SEQ ID NO: 546062 - DNA, 15 bp, Homo sapiens
ccctcacacccacta

SEQ ID NO: 546063 - DNA, 15 bp, Homo sapiens
cctcacacccactaa

SEQ ID NO: 546064 - DNA, 15 bp, Homo sapiens
ctcacacccactaaa

SEQ ID NO: 546065 - DNA, 15 bp, Homo sapiens
tcacacccactaaac

SEQ ID NO: 546066 - DNA, 15 bp, Homo sapiens
cacacccactaaaca

SEQ ID NO: 546067 - DNA, 15 bp, Homo sapiens
acacccactaaacag

SEQ ID NO: 546068 - DNA, 15 bp, Homo sapiens
cacccactaaacagg

SEQ ID NO: 546069 - DNA, 15 bp, Homo sapiens
acccactaaacagga

SEQ ID NO: 546070 - DNA, 15 bp, Homo sapiens
cccactaaacaggaa

SEQ ID NO: 546071 - DNA, 15 bp, Homo sapiens
ccactaaacaggaaa

SEQ ID NO: 546072 - DNA, 15 bp, Homo sapiens
cactaaacaggaaat

SEQ ID NO: 546073 - DNA, 15 bp, Homo sapiens
actaaacaggaaatg

SEQ ID NO: 546074 - DNA, 15 bp, Homo sapiens
ctaaacaggaaatgc

SEQ ID NO: 546075 - DNA, 15 bp, Homo sapiens
taaacaggaaatgca

SEQ ID NO: 546076 - DNA, 15 bp, Homo sapiens
aaacaggaaatgcaa

SEQ ID NO: 546077 - DNA, 15 bp, Homo sapiens
aacaggaaatgcaag

SEQ ID NO: 546078 - DNA, 15 bp, Homo sapiens
acaggaaatgcaagc

SEQ ID NO: 546079 - DNA, 15 bp, Homo sapiens
caggaaatgcaagct

SEQ ID NO: 546080 - DNA, 15 bp, Homo sapiens
aggaaatgcaagcta

SEQ ID NO: 546081 - DNA, 15 bp, Homo sapiens
ggaaatgcaagctac

SEQ ID NO: 546082 - DNA, 15 bp, Homo sapiens
gaaatgcaagctact

SEQ ID NO: 546083 - DNA, 15 bp, Homo sapiens
aaatgcaagctacta

SEQ ID NO: 546084 - DNA, 15 bp, Homo sapiens
aatgcaagctactag

SEQ ID NO: 546085 - DNA, 15 bp, Homo sapiens
atgcaagctactaga

SEQ ID NO: 546086 - DNA, 15 bp, Homo sapiens
tgcaagctactagag

SEQ ID NO: 546087 - DNA, 15 bp, Homo sapiens
gcaagctactagagc

SEQ ID NO: 546088 - DNA, 15 bp, Homo sapiens
caagctactagagct

SEQ ID NO: 546089 - DNA, 15 bp, Homo sapiens
aagctactagagctg

SEQ ID NO: 546090 - DNA, 15 bp, Homo sapiens
agctactagagctga

SEQ ID NO: 546091 - DNA, 15 bp, Homo sapiens
gctactagagctgaa

SEQ ID NO: 546092 - DNA, 15 bp, Homo sapiens
ctactagagctgaac

SEQ ID NO: 546093 - DNA, 15 bp, Homo sapiens
tactagagctgaaca

SEQ ID NO: 546094 - DNA, 15 bp, Homo sapiens
actagagctgaacat

SEQ ID NO: 546095 - DNA, 15 bp, Homo sapiens
ctagagctgaacatt

SEQ ID NO: 546096 - DNA, 15 bp, Homo sapiens
tagagctgaacattc

SEQ ID NO: 546097 - DNA, 15 bp, Homo sapiens
agagctgaacattca

SEQ ID NO: 546098 - DNA, 15 bp, Homo sapiens
gagctgaacattcaa

SEQ ID NO: 546099 - DNA, 15 bp, Homo sapiens
agctgaacattcaac

SEQ ID NO: 546100 - DNA, 15 bp, Homo sapiens
gctgaacattcaacc

SEQ ID NO: 546101 - DNA, 15 bp, Homo sapiens
ctgaacattcaacca

SEQ ID NO: 546102 - DNA, 15 bp, Homo sapiens
tgaacattcaaccac

SEQ ID NO: 546103 - DNA, 15 bp, Homo sapiens
gaacattcaaccacc

SEQ ID NO: 546104 - DNA, 15 bp, Homo sapiens
aacattcaaccaccc

SEQ ID NO: 546105 - DNA, 15 bp, Homo sapiens
acattcaaccacccc

SEQ ID NO: 546106 - DNA, 15 bp, Homo sapiens
cattcaaccaccccc

SEQ ID NO: 546107 - DNA, 15 bp, Homo sapiens
attcaaccaccccct

SEQ ID NO: 546108 - DNA, 15 bp, Homo sapiens
ttcaaccacccccta

SEQ ID NO: 546109 - DNA, 15 bp, Homo sapiens
tcaaccaccccctaa

SEQ ID NO: 546110 - DNA, 15 bp, Homo sapiens
caaccaccccctaag

SEQ ID NO: 546111 - DNA, 15 bp, Homo sapiens
aaccaccccctaagt

SEQ ID NO: 546112 - DNA, 15 bp, Homo sapiens
accaccccctaagtc

SEQ ID NO: 546113 - DNA, 15 bp, Homo sapiens
ccaccccctaagtcc

SEQ ID NO: 546114 - DNA, 15 bp, Homo sapiens
caccccctaagtccc

SEQ ID NO: 546115 - DNA, 15 bp, Homo sapiens
accccctaagtcccc

SEQ ID NO: 546116 - DNA, 15 bp, Homo sapiens
ccccctaagtcccca

SEQ ID NO: 546117 - DNA, 15 bp, Homo sapiens
cccctaagtccccac

SEQ ID NO: 546118 - DNA, 15 bp, Homo sapiens
ccctaagtccccacc

SEQ ID NO: 546119 - DNA, 15 bp, Homo sapiens
cctaagtccccaccc

SEQ ID NO: 546120 - DNA, 15 bp, Homo sapiens
ctaagtccccaccct

SEQ ID NO: 546121 - DNA, 15 bp, Homo sapiens
taagtccccaccctc

SEQ ID NO: 546122 - DNA, 15 bp, Homo sapiens
aagtccccaccctcc

SEQ ID NO: 546123 - DNA, 15 bp, Homo sapiens
agtccccaccctcca

SEQ ID NO: 546124 - DNA, 15 bp, Homo sapiens
gtccccaccctccac

SEQ ID NO: 546125 - DNA, 15 bp, Homo sapiens
tccccaccctccacc

SEQ ID NO: 546126 - DNA, 15 bp, Homo sapiens
ccccaccctccaccc

SEQ ID NO: 546127 - DNA, 15 bp, Homo sapiens
cccaccctccacccc

SEQ ID NO: 546128 - DNA, 15 bp, Homo sapiens
ccaccctccaccccc

SEQ ID NO: 546129 - DNA, 15 bp, Homo sapiens
caccctccacccccg

SEQ ID NO: 546130 - DNA, 15 bp, Homo sapiens
accctccacccccgc

SEQ ID NO: 546131 - DNA, 15 bp, Homo sapiens
ccctccacccccgcc

SEQ ID NO: 546132 - DNA, 15 bp, Homo sapiens
cctccacccccgccc

SEQ ID NO: 546133 - DNA, 15 bp, Homo sapiens
ctccacccccgccca

SEQ ID NO: 546134 - DNA, 15 bp, Homo sapiens
tccacccccgcccag

SEQ ID NO: 546135 - DNA, 15 bp, Homo sapiens
ccacccccgcccagc

SEQ ID NO: 546136 - DNA, 15 bp, Homo sapiens
cacccccgcccagca

SEQ ID NO: 546137 - DNA, 15 bp, Homo sapiens
acccccgcccagcat

SEQ ID NO: 546138 - DNA, 15 bp, Homo sapiens
cccccgcccagcata

SEQ ID NO: 546139 - DNA, 15 bp, Homo sapiens
ccccgcccagcataa

SEQ ID NO: 546140 - DNA, 15 bp, Homo sapiens
cccgcccagcataag

SEQ ID NO: 546141 - DNA, 15 bp, Homo sapiens
ccgcccagcataaga

SEQ ID NO: 546142 - DNA, 15 bp, Homo sapiens
cgcccagcataagaa

SEQ ID NO: 546143 - DNA, 15 bp, Homo sapiens
gcccagcataagaac

SEQ ID NO: 546144 - DNA, 15 bp, Homo sapiens
cccagcataagaaca

SEQ ID NO: 546145 - DNA, 15 bp, Homo sapiens
ccagcataagaacat

SEQ ID NO: 546146 - DNA, 15 bp, Homo sapiens
cagcataagaacatt

SEQ ID NO: 546147 - DNA, 15 bp, Homo sapiens
agcataagaacatta

SEQ ID NO: 546148 - DNA, 15 bp, Homo sapiens
gcataagaacattat

SEQ ID NO: 546149 - DNA, 15 bp, Homo sapiens
cataagaacattatt

SEQ ID NO: 546150 - DNA, 15 bp, Homo sapiens
ataagaacattattc

SEQ ID NO: 546151 - DNA, 15 bp, Homo sapiens
taagaacattattct

SEQ ID NO: 546152 - DNA, 15 bp, Homo sapiens
aagaacattattctt

SEQ ID NO: 546153 - DNA, 15 bp, Homo sapiens
agaacattattcttt

SEQ ID NO: 546154 - DNA, 15 bp, Homo sapiens
gaacattattctttg

SEQ ID NO: 546155 - DNA, 15 bp, Homo sapiens
aacattattctttgc

SEQ ID NO: 546156 - DNA, 15 bp, Homo sapiens
acattattctttgct

SEQ ID NO: 546157 - DNA, 15 bp, Homo sapiens
cattattctttgctt

SEQ ID NO: 546158 - DNA, 15 bp, Homo sapiens
attattctttgcttt

SEQ ID NO: 546159 - DNA, 15 bp, Homo sapiens
ttattctttgctttc

SEQ ID NO: 546160 - DNA, 15 bp, Homo sapiens
tattctttgctttcc

SEQ ID NO: 546161 - DNA, 15 bp, Homo sapiens
attctttgctttcct

SEQ ID NO: 546162 - DNA, 15 bp, Homo sapiens
ttctttgctttcctt

SEQ ID NO: 546163 - DNA, 15 bp, Homo sapiens
tctttgctttccttt

SEQ ID NO: 546164 - DNA, 15 bp, Homo sapiens
ctttgctttcctttc

SEQ ID NO: 546165 - DNA, 15 bp, Homo sapiens
tttgctttcctttcc

SEQ ID NO: 546166 - DNA, 15 bp, Homo sapiens
ttgctttcctttccg

SEQ ID NO: 546167 - DNA, 15 bp, Homo sapiens
tgctttcctttccga

SEQ ID NO: 546168 - DNA, 15 bp, Homo sapiens
gctttcctttccgaa

SEQ ID NO: 546169 - DNA, 15 bp, Homo sapiens
ctttcctttccgaag

SEQ ID NO: 546170 - DNA, 15 bp, Homo sapiens
tttcctttccgaaga

SEQ ID NO: 546171 - DNA, 15 bp, Homo sapiens
ttcctttccgaagag

SEQ ID NO: 546172 - DNA, 15 bp, Homo sapiens
tcctttccgaagagc

SEQ ID NO: 546173 - DNA, 15 bp, Homo sapiens
cctttccgaagagct

SEQ ID NO: 546174 - DNA, 15 bp, Homo sapiens
ctttccgaagagctg

SEQ ID NO: 546175 - DNA, 15 bp, Homo sapiens
tttccgaagagctgt

SEQ ID NO: 546176 - DNA, 15 bp, Homo sapiens
ttccgaagagctgta

SEQ ID NO: 546177 - DNA, 15 bp, Homo sapiens
tccgaagagctgtag

SEQ ID NO: 546178 - DNA, 15 bp, Homo sapiens
ccgaagagctgtagg

SEQ ID NO: 546179 - DNA, 15 bp, Homo sapiens
cgaagagctgtaggc

SEQ ID NO: 546180 - DNA, 15 bp, Homo sapiens
gaagagctgtaggca

SEQ ID NO: 546181 - DNA, 15 bp, Homo sapiens
aagagctgtaggcat

SEQ ID NO: 546182 - DNA, 15 bp, Homo sapiens
agagctgtaggcatt

SEQ ID NO: 546183 - DNA, 15 bp, Homo sapiens
gagctgtaggcattc

SEQ ID NO: 546184 - DNA, 15 bp, Homo sapiens
agctgtaggcattca

SEQ ID NO: 546185 - DNA, 15 bp, Homo sapiens
gctgtaggcattcat

SEQ ID NO: 546186 - DNA, 15 bp, Homo sapiens
ctgtaggcattcatt

SEQ ID NO: 546187 - DNA, 15 bp, Homo sapiens
tgtaggcattcattc

SEQ ID NO: 546188 - DNA, 15 bp, Homo sapiens
gtaggcattcattca

SEQ ID NO: 546189 - DNA, 15 bp, Homo sapiens
taggcattcattcat

SEQ ID NO: 546190 - DNA, 15 bp, Homo sapiens
aggcattcattcata

SEQ ID NO: 546191 - DNA, 15 bp, Homo sapiens
ggcattcattcatat

SEQ ID NO: 546192 - DNA, 15 bp, Homo sapiens
gcattcattcatata

SEQ ID NO: 546193 - DNA, 15 bp, Homo sapiens
cattcattcatatat

SEQ ID NO: 546194 - DNA, 15 bp, Homo sapiens
attcattcatatatg

SEQ ID NO: 546195 - DNA, 15 bp, Homo sapiens
ttcattcatatatgc

SEQ ID NO: 546196 - DNA, 15 bp, Homo sapiens
tcattcatatatgca

SEQ ID NO: 546197 - DNA, 15 bp, Homo sapiens
cattcatatatgcag

SEQ ID NO: 546198 - DNA, 15 bp, Homo sapiens
attcatatatgcaga

SEQ ID NO: 546199 - DNA, 15 bp, Homo sapiens
ttcatatatgcagag

SEQ ID NO: 546200 - DNA, 15 bp, Homo sapiens
tcatatatgcagagc

SEQ ID NO: 546201 - DNA, 15 bp, Homo sapiens
catatatgcagagca

SEQ ID NO: 546202 - DNA, 15 bp, Homo sapiens
atatatgcagagcaa

SEQ ID NO: 546203 - DNA, 15 bp, Homo sapiens
tatatgcagagcaat

SEQ ID NO: 546204 - DNA, 15 bp, Homo sapiens
atatgcagagcaatc

SEQ ID NO: 546205 - DNA, 15 bp, Homo sapiens
tatgcagagcaatca

SEQ ID NO: 546206 - DNA, 15 bp, Homo sapiens
atgcagagcaatcag

SEQ ID NO: 546207 - DNA, 15 bp, Homo sapiens
tgcagagcaatcaga

SEQ ID NO: 546208 - DNA, 15 bp, Homo sapiens
gcagagcaatcagac

SEQ ID NO: 546209 - DNA, 15 bp, Homo sapiens
cagagcaatcagaca

SEQ ID NO: 546210 - DNA, 15 bp, Homo sapiens
agagcaatcagacat

SEQ ID NO: 546211 - DNA, 15 bp, Homo sapiens
gagcaatcagacatc

SEQ ID NO: 546212 - DNA, 15 bp, Homo sapiens
agcaatcagacatca

SEQ ID NO: 546213 - DNA, 15 bp, Homo sapiens
gcaatcagacatcat

SEQ ID NO: 546214 - DNA, 15 bp, Homo sapiens
caatcagacatcatt

SEQ ID NO: 546215 - DNA, 15 bp, Homo sapiens
aatcagacatcatta

SEQ ID NO: 546216 - DNA, 15 bp, Homo sapiens
atcagacatcattag

SEQ ID NO: 546217 - DNA, 15 bp, Homo sapiens
tcagacatcattaga

SEQ ID NO: 546218 - DNA, 15 bp, Homo sapiens
cagacatcattagac

SEQ ID NO: 546219 - DNA, 15 bp, Homo sapiens
agacatcattagaca

SEQ ID NO: 546220 - DNA, 15 bp, Homo sapiens
gacatcattagacaa

SEQ ID NO: 546221 - DNA, 15 bp, Homo sapiens
acatcattagacaaa

SEQ ID NO: 546222 - DNA, 15 bp, Homo sapiens
catcattagacaaag

SEQ ID NO: 546223 - DNA, 15 bp, Homo sapiens
atcattagacaaaga

SEQ ID NO: 546224 - DNA, 15 bp, Homo sapiens
tcattagacaaagaa

SEQ ID NO: 546225 - DNA, 15 bp, Homo sapiens
cattagacaaagaac

SEQ ID NO: 546226 - DNA, 15 bp, Homo sapiens
attagacaaagaaca

SEQ ID NO: 546227 - DNA, 15 bp, Homo sapiens
ttagacaaagaacac

SEQ ID NO: 546228 - DNA, 15 bp, Homo sapiens
tagacaaagaacacc

SEQ ID NO: 546229 - DNA, 15 bp, Homo sapiens
agacaaagaacacct

SEQ ID NO: 546230 - DNA, 15 bp, Homo sapiens
gacaaagaacacctg

SEQ ID NO: 546231 - DNA, 15 bp, Homo sapiens
acaaagaacacctga

SEQ ID NO: 546232 - DNA, 15 bp, Homo sapiens
caaagaacacctgat

SEQ ID NO: 546233 - DNA, 15 bp, Homo sapiens
aaagaacacctgata

SEQ ID NO: 546234 - DNA, 15 bp, Homo sapiens
aagaacacctgataa

SEQ ID NO: 546235 - DNA, 15 bp, Homo sapiens
agaacacctgataat

SEQ ID NO: 546236 - DNA, 15 bp, Homo sapiens
gaacacctgataata

SEQ ID NO: 546237 - DNA, 15 bp, Homo sapiens
aacacctgataataa

SEQ ID NO: 546238 - DNA, 15 bp, Homo sapiens
acacctgataataat

SEQ ID NO: 546239 - DNA, 15 bp, Homo sapiens
cacctgataataatt

SEQ ID NO: 546240 - DNA, 15 bp, Homo sapiens
acctgataataattc

SEQ ID NO: 546241 - DNA, 15 bp, Homo sapiens
cctgataataattct

SEQ ID NO: 546242 - DNA, 15 bp, Homo sapiens
ctgataataattctc

SEQ ID NO: 546243 - DNA, 15 bp, Homo sapiens
tgataataattctca

SEQ ID NO: 546244 - DNA, 15 bp, Homo sapiens
gataataattctcac

SEQ ID NO: 546245 - DNA, 15 bp, Homo sapiens
ataataattctcaca

SEQ ID NO: 546246 - DNA, 15 bp, Homo sapiens
taataattctcacat

SEQ ID NO: 546247 - DNA, 15 bp, Homo sapiens
aataattctcacatt

SEQ ID NO: 546248 - DNA, 15 bp, Homo sapiens
ataattctcacattt

SEQ ID NO: 546249 - DNA, 15 bp, Homo sapiens
taattctcacatttt

SEQ ID NO: 546250 - DNA, 15 bp, Homo sapiens
aattctcacattttg

SEQ ID NO: 546251 - DNA, 15 bp, Homo sapiens
attctcacattttgg

SEQ ID NO: 546252 - DNA, 15 bp, Homo sapiens
ttctcacattttgga

SEQ ID NO: 546253 - DNA, 15 bp, Homo sapiens
tctcacattttggaa

SEQ ID NO: 546254 - DNA, 15 bp, Homo sapiens
ctcacattttggaat

SEQ ID NO: 546255 - DNA, 15 bp, Homo sapiens
tcacattttggaatc

SEQ ID NO: 546256 - DNA, 15 bp, Homo sapiens
cacattttggaatct

SEQ ID NO: 546257 - DNA, 15 bp, Homo sapiens
acattttggaatctt

SEQ ID NO: 546258 - DNA, 15 bp, Homo sapiens
cattttggaatctta

SEQ ID NO: 546259 - DNA, 15 bp, Homo sapiens
attttggaatcttaa

SEQ ID NO: 546260 - DNA, 15 bp, Homo sapiens
ttttggaatcttaag

SEQ ID NO: 546261 - DNA, 15 bp, Homo sapiens
tttggaatcttaaga

SEQ ID NO: 546262 - DNA, 15 bp, Homo sapiens
ttggaatcttaagaa

SEQ ID NO: 546263 - DNA, 15 bp, Homo sapiens
tggaatcttaagaaa

SEQ ID NO: 546264 - DNA, 15 bp, Homo sapiens
ggaatcttaagaaac

SEQ ID NO: 546265 - DNA, 15 bp, Homo sapiens
gaatcttaagaaact

SEQ ID NO: 546266 - DNA, 15 bp, Homo sapiens
aatcttaagaaactt

SEQ ID NO: 546267 - DNA, 15 bp, Homo sapiens
atcttaagaaacttc

SEQ ID NO: 546268 - DNA, 15 bp, Homo sapiens
tcttaagaaacttcc

SEQ ID NO: 546269 - DNA, 15 bp, Homo sapiens
cttaagaaacttcca

SEQ ID NO: 546270 - DNA, 15 bp, Homo sapiens
ttaagaaacttccaa

SEQ ID NO: 546271 - DNA, 15 bp, Homo sapiens
taagaaacttccaat

SEQ ID NO: 546272 - DNA, 15 bp, Homo sapiens
aagaaacttccaatg

SEQ ID NO: 546273 - DNA, 15 bp, Homo sapiens
agaaacttccaatga

SEQ ID NO: 546274 - DNA, 15 bp, Homo sapiens
gaaacttccaatgaa

SEQ ID NO: 546275 - DNA, 15 bp, Homo sapiens
aaacttccaatgaaa

SEQ ID NO: 546276 - DNA, 15 bp, Homo sapiens
aacttccaatgaaag

SEQ ID NO: 546277 - DNA, 15 bp, Homo sapiens
acttccaatgaaagg

SEQ ID NO: 546278 - DNA, 15 bp, Homo sapiens
cttccaatgaaaggg

SEQ ID NO: 546279 - DNA, 15 bp, Homo sapiens
ttccaatgaaagggg

SEQ ID NO: 546280 - DNA, 15 bp, Homo sapiens
tccaatgaaaggggt

SEQ ID NO: 546281 - DNA, 15 bp, Homo sapiens
ccaatgaaaggggtg

SEQ ID NO: 546282 - DNA, 15 bp, Homo sapiens
caatgaaaggggtga

SEQ ID NO: 546283 - DNA, 15 bp, Homo sapiens
aatgaaaggggtgat

SEQ ID NO: 546284 - DNA, 15 bp, Homo sapiens
atgaaaggggtgata

SEQ ID NO: 546285 - DNA, 15 bp, Homo sapiens
tgaaaggggtgatac

SEQ ID NO: 546286 - DNA, 15 bp, Homo sapiens
gaaaggggtgatacg

SEQ ID NO: 546287 - DNA, 15 bp, Homo sapiens
aaaggggtgatacga

SEQ ID NO: 546288 - DNA, 15 bp, Homo sapiens
aaggggtgatacgag

SEQ ID NO: 546289 - DNA, 15 bp, Homo sapiens
aggggtgatacgagt

SEQ ID NO: 546290 - DNA, 15 bp, Homo sapiens
ggggtgatacgagtt

SEQ ID NO: 546291 - DNA, 15 bp, Homo sapiens
gggtgatacgagttg

SEQ ID NO: 546292 - DNA, 15 bp, Homo sapiens
ggtgatacgagttgg

SEQ ID NO: 546293 - DNA, 15 bp, Homo sapiens
gtgatacgagttggt

SEQ ID NO: 546294 - DNA, 15 bp, Homo sapiens
tgatacgagttggta

SEQ ID NO: 546295 - DNA, 15 bp, Homo sapiens
gatacgagttggtaa

SEQ ID NO: 546296 - DNA, 15 bp, Homo sapiens
atacgagttggtaag

SEQ ID NO: 546297 - DNA, 15 bp, Homo sapiens
tacgagttggtaagc

SEQ ID NO: 546298 - DNA, 15 bp, Homo sapiens
acgagttggtaagcc

SEQ ID NO: 546299 - DNA, 15 bp, Homo sapiens
cgagttggtaagcca

SEQ ID NO: 546300 - DNA, 15 bp, Homo sapiens
gagttggtaagccac

SEQ ID NO: 546301 - DNA, 15 bp, Homo sapiens
agttggtaagccaca

SEQ ID NO: 546302 - DNA, 15 bp, Homo sapiens
gttggtaagccacag

SEQ ID NO: 546303 - DNA, 15 bp, Homo sapiens
ttggtaagccacagc

SEQ ID NO: 546304 - DNA, 15 bp, Homo sapiens
tggtaagccacagct

SEQ ID NO: 546305 - DNA, 15 bp, Homo sapiens
ggtaagccacagctt

SEQ ID NO: 546306 - DNA, 15 bp, Homo sapiens
gtaagccacagcttt

SEQ ID NO: 546307 - DNA, 15 bp, Homo sapiens
taagccacagctttt

SEQ ID NO: 546308 - DNA, 15 bp, Homo sapiens
aagccacagcttttg

SEQ ID NO: 546309 - DNA, 15 bp, Homo sapiens
agccacagcttttgg

SEQ ID NO: 546310 - DNA, 15 bp, Homo sapiens
gccacagcttttggc

SEQ ID NO: 546311 - DNA, 15 bp, Homo sapiens
ccacagcttttggcg

SEQ ID NO: 546312 - DNA, 15 bp, Homo sapiens
cacagcttttggcgg

SEQ ID NO: 546313 - DNA, 15 bp, Homo sapiens
acagcttttggcggt

SEQ ID NO: 546314 - DNA, 15 bp, Homo sapiens
cagcttttggcggta

SEQ ID NO: 546315 - DNA, 15 bp, Homo sapiens
agcttttggcggtag

SEQ ID NO: 546316 - DNA, 15 bp, Homo sapiens
gcttttggcggtagc

SEQ ID NO: 546317 - DNA, 15 bp, Homo sapiens
cttttggcggtagca

SEQ ID NO: 546318 - DNA, 15 bp, Homo sapiens
ttttggcggtagcat

SEQ ID NO: 546319 - DNA, 15 bp, Homo sapiens
tttggcggtagcatg

SEQ ID NO: 546320 - DNA, 15 bp, Homo sapiens
ttggcggtagcatga

SEQ ID NO: 546321 - DNA, 15 bp, Homo sapiens
tggcggtagcatgag

SEQ ID NO: 546322 - DNA, 15 bp, Homo sapiens
ggcggtagcatgagc

SEQ ID NO: 546323 - DNA, 15 bp, Homo sapiens
gcggtagcatgagcc

SEQ ID NO: 546324 - DNA, 15 bp, Homo sapiens
cggtagcatgagccc

SEQ ID NO: 546325 - DNA, 15 bp, Homo sapiens
ggtagcatgagccct

SEQ ID NO: 546326 - DNA, 15 bp, Homo sapiens
gtagcatgagccctc

SEQ ID NO: 546327 - DNA, 15 bp, Homo sapiens
tagcatgagccctct

SEQ ID NO: 546328 - DNA, 15 bp, Homo sapiens
agcatgagccctctg

SEQ ID NO: 546329 - DNA, 15 bp, Homo sapiens
gcatgagccctctgg

SEQ ID NO: 546330 - DNA, 15 bp, Homo sapiens
catgagccctctggc

SEQ ID NO: 546331 - DNA, 15 bp, Homo sapiens
atgagccctctggct

SEQ ID NO: 546332 - DNA, 15 bp, Homo sapiens
tgagccctctggctt

SEQ ID NO: 546333 - DNA, 15 bp, Homo sapiens
gagccctctggcttc

SEQ ID NO: 546334 - DNA, 15 bp, Homo sapiens
agccctctggcttct

SEQ ID NO: 546335 - DNA, 15 bp, Homo sapiens
gccctctggcttctg

SEQ ID NO: 546336 - DNA, 15 bp, Homo sapiens
ccctctggcttctga

SEQ ID NO: 546337 - DNA, 15 bp, Homo sapiens
cctctggcttctgaa

SEQ ID NO: 546338 - DNA, 15 bp, Homo sapiens
ctctggcttctgaaa

SEQ ID NO: 546339 - DNA, 15 bp, Homo sapiens
tctggcttctgaaac

SEQ ID NO: 546340 - DNA, 15 bp, Homo sapiens
ctggcttctgaaacc

SEQ ID NO: 546341 - DNA, 15 bp, Homo sapiens
tggcttctgaaaccc

SEQ ID NO: 546342 - DNA, 15 bp, Homo sapiens
ggcttctgaaaccct

SEQ ID NO: 546343 - DNA, 15 bp, Homo sapiens
gcttctgaaacccta

SEQ ID NO: 546344 - DNA, 15 bp, Homo sapiens
cttctgaaaccctag

SEQ ID NO: 546345 - DNA, 15 bp, Homo sapiens
ttctgaaaccctaga

SEQ ID NO: 546346 - DNA, 15 bp, Homo sapiens
tctgaaaccctagag

SEQ ID NO: 546347 - DNA, 15 bp, Homo sapiens
ctgaaaccctagagg

SEQ ID NO: 546348 - DNA, 15 bp, Homo sapiens
tgaaaccctagaggc

SEQ ID NO: 546349 - DNA, 15 bp, Homo sapiens
gaaaccctagaggcc

SEQ ID NO: 546350 - DNA, 15 bp, Homo sapiens
aaaccctagaggcca

SEQ ID NO: 546351 - DNA, 15 bp, Homo sapiens
aaccctagaggccac

SEQ ID NO: 546352 - DNA, 15 bp, Homo sapiens
accctagaggccaca

SEQ ID NO: 546353 - DNA, 15 bp, Homo sapiens
ccctagaggccacag

SEQ ID NO: 546354 - DNA, 15 bp, Homo sapiens
cctagaggccacaga

SEQ ID NO: 546355 - DNA, 15 bp, Homo sapiens
ctagaggccacagat

SEQ ID NO: 546356 - DNA, 15 bp, Homo sapiens
tagaggccacagata

SEQ ID NO: 546357 - DNA, 15 bp, Homo sapiens
agaggccacagataa

SEQ ID NO: 546358 - DNA, 15 bp, Homo sapiens
gaggccacagataag

SEQ ID NO: 546359 - DNA, 15 bp, Homo sapiens
aggccacagataaga

SEQ ID NO: 546360 - DNA, 15 bp, Homo sapiens
ggccacagataagat

SEQ ID NO: 546361 - DNA, 15 bp, Homo sapiens
gccacagataagata

SEQ ID NO: 546362 - DNA, 15 bp, Homo sapiens
ccacagataagatac

SEQ ID NO: 546363 - DNA, 15 bp, Homo sapiens
cacagataagataca

SEQ ID NO: 546364 - DNA, 15 bp, Homo sapiens
acagataagatacac

SEQ ID NO: 546365 - DNA, 15 bp, Homo sapiens
cagataagatacact

SEQ ID NO: 546366 - DNA, 15 bp, Homo sapiens
agataagatacactc

SEQ ID NO: 546367 - DNA, 15 bp, Homo sapiens
gataagatacactct

SEQ ID NO: 546368 - DNA, 15 bp, Homo sapiens
ataagatacactctt

SEQ ID NO: 546369 - DNA, 15 bp, Homo sapiens
taagatacactcttg

SEQ ID NO: 546370 - DNA, 15 bp, Homo sapiens
aagatacactcttgt

SEQ ID NO: 546371 - DNA, 15 bp, Homo sapiens
agatacactcttgta

SEQ ID NO: 546372 - DNA, 15 bp, Homo sapiens
gatacactcttgtag

SEQ ID NO: 546373 - DNA, 15 bp, Homo sapiens
atacactcttgtagc

SEQ ID NO: 546374 - DNA, 15 bp, Homo sapiens
tacactcttgtagca

SEQ ID NO: 546375 - DNA, 15 bp, Homo sapiens
acactcttgtagcag

SEQ ID NO: 546376 - DNA, 15 bp, Homo sapiens
cactcttgtagcagg

SEQ ID NO: 546377 - DNA, 15 bp, Homo sapiens
actcttgtagcaggc

SEQ ID NO: 546378 - DNA, 15 bp, Homo sapiens
ctcttgtagcaggct

SEQ ID NO: 546379 - DNA, 15 bp, Homo sapiens
tcttgtagcaggctt

SEQ ID NO: 546380 - DNA, 15 bp, Homo sapiens
cttgtagcaggcttg

SEQ ID NO: 546381 - DNA, 15 bp, Homo sapiens
ttgtagcaggcttgt

SEQ ID NO: 546382 - DNA, 15 bp, Homo sapiens
tgtagcaggcttgtc

SEQ ID NO: 546383 - DNA, 15 bp, Homo sapiens
gtagcaggcttgtca

SEQ ID NO: 546384 - DNA, 15 bp, Homo sapiens
tagcaggcttgtcat

SEQ ID NO: 546385 - DNA, 15 bp, Homo sapiens
agcaggcttgtcata

SEQ ID NO: 546386 - DNA, 15 bp, Homo sapiens
gcaggcttgtcatac

SEQ ID NO: 546387 - DNA, 15 bp, Homo sapiens
caggcttgtcatact

SEQ ID NO: 546388 - DNA, 15 bp, Homo sapiens
aggcttgtcatactt

SEQ ID NO: 546389 - DNA, 15 bp, Homo sapiens
ggcttgtcatacttg

SEQ ID NO: 546390 - DNA, 15 bp, Homo sapiens
gcttgtcatacttga

SEQ ID NO: 546391 - DNA, 15 bp, Homo sapiens
cttgtcatacttgaa

SEQ ID NO: 546392 - DNA, 15 bp, Homo sapiens
ttgtcatacttgaaa

SEQ ID NO: 546393 - DNA, 15 bp, Homo sapiens
tgtcatacttgaaat

SEQ ID NO: 546394 - DNA, 15 bp, Homo sapiens
gtcatacttgaaatt

SEQ ID NO: 546395 - DNA, 15 bp, Homo sapiens
tcatacttgaaattc

SEQ ID NO: 546396 - DNA, 15 bp, Homo sapiens
catacttgaaattct

SEQ ID NO: 546397 - DNA, 15 bp, Homo sapiens
atacttgaaattcta

SEQ ID NO: 546398 - DNA, 15 bp, Homo sapiens
tacttgaaattctaa

SEQ ID NO: 546399 - DNA, 15 bp, Homo sapiens
acttgaaattctaac

SEQ ID NO: 546400 - DNA, 15 bp, Homo sapiens
cttgaaattctaact

SEQ ID NO: 546401 - DNA, 15 bp, Homo sapiens
ttgaaattctaactg

SEQ ID NO: 546402 - DNA, 15 bp, Homo sapiens
tgaaattctaactgg

SEQ ID NO: 546403 - DNA, 15 bp, Homo sapiens
gaaattctaactggt

SEQ ID NO: 546404 - DNA, 15 bp, Homo sapiens
aaattctaactggta

SEQ ID NO: 546405 - DNA, 15 bp, Homo sapiens
aattctaactggtag

SEQ ID NO: 546406 - DNA, 15 bp, Homo sapiens
attctaactggtagc

SEQ ID NO: 546407 - DNA, 15 bp, Homo sapiens
ttctaactggtagct

SEQ ID NO: 546408 - DNA, 15 bp, Homo sapiens
tctaactggtagctt

SEQ ID NO: 546409 - DNA, 15 bp, Homo sapiens
ctaactggtagcttg

SEQ ID NO: 546410 - DNA, 15 bp, Homo sapiens
taactggtagcttga

SEQ ID NO: 546411 - DNA, 15 bp, Homo sapiens
aactggtagcttgat

SEQ ID NO: 546412 - DNA, 15 bp, Homo sapiens
actggtagcttgata

SEQ ID NO: 546413 - DNA, 15 bp, Homo sapiens
ctggtagcttgatat

SEQ ID NO: 546414 - DNA, 15 bp, Homo sapiens
tggtagcttgatatc

SEQ ID NO: 546415 - DNA, 15 bp, Homo sapiens
ggtagcttgatatcc

SEQ ID NO: 546416 - DNA, 15 bp, Homo sapiens
gtagcttgatatcct

SEQ ID NO: 546417 - DNA, 15 bp, Homo sapiens
tagcttgatatcctg

SEQ ID NO: 546418 - DNA, 15 bp, Homo sapiens
agcttgatatcctga

SEQ ID NO: 546419 - DNA, 15 bp, Homo sapiens
gcttgatatcctgag

SEQ ID NO: 546420 - DNA, 15 bp, Homo sapiens
cttgatatcctgagt

SEQ ID NO: 546421 - DNA, 15 bp, Homo sapiens
ttgatatcctgagtt

SEQ ID NO: 546422 - DNA, 15 bp, Homo sapiens
tgatatcctgagttg

SEQ ID NO: 546423 - DNA, 15 bp, Homo sapiens
gatatcctgagttgc

SEQ ID NO: 546424 - DNA, 15 bp, Homo sapiens
atatcctgagttgct

SEQ ID NO: 546425 - DNA, 15 bp, Homo sapiens
tatcctgagttgctt

SEQ ID NO: 546426 - DNA, 15 bp, Homo sapiens
atcctgagttgcttt

SEQ ID NO: 546427 - DNA, 15 bp, Homo sapiens
tcctgagttgctttc

SEQ ID NO: 546428 - DNA, 15 bp, Homo sapiens
cctgagttgctttct

SEQ ID NO: 546429 - DNA, 15 bp, Homo sapiens
ctgagttgctttctc

SEQ ID NO: 546430 - DNA, 15 bp, Homo sapiens
tgagttgctttctca

SEQ ID NO: 546431 - DNA, 15 bp, Homo sapiens
gagttgctttctcac

SEQ ID NO: 546432 - DNA, 15 bp, Homo sapiens
agttgctttctcact

SEQ ID NO: 546433 - DNA, 15 bp, Homo sapiens
gttgctttctcactt

SEQ ID NO: 546434 - DNA, 15 bp, Homo sapiens
ttgctttctcacttg

SEQ ID NO: 546435 - DNA, 15 bp, Homo sapiens
tgctttctcacttga

SEQ ID NO: 546436 - DNA, 15 bp, Homo sapiens
gctttctcacttgag

SEQ ID NO: 546437 - DNA, 15 bp, Homo sapiens
ctttctcacttgagc

SEQ ID NO: 546438 - DNA, 15 bp, Homo sapiens
tttctcacttgagca

SEQ ID NO: 546439 - DNA, 15 bp, Homo sapiens
ttctcacttgagcaa

SEQ ID NO: 546440 - DNA, 15 bp, Homo sapiens
tctcacttgagcaac

SEQ ID NO: 546441 - DNA, 15 bp, Homo sapiens
ctcacttgagcaact

SEQ ID NO: 546442 - DNA, 15 bp, Homo sapiens
tcacttgagcaactt

SEQ ID NO: 546443 - DNA, 15 bp, Homo sapiens
cacttgagcaacttt

SEQ ID NO: 546444 - DNA, 15 bp, Homo sapiens
acttgagcaactttg

SEQ ID NO: 546445 - DNA, 15 bp, Homo sapiens
cttgagcaactttgg

SEQ ID NO: 546446 - DNA, 15 bp, Homo sapiens
ttgagcaactttggt

SEQ ID NO: 546447 - DNA, 15 bp, Homo sapiens
tgagcaactttggtt

SEQ ID NO: 546448 - DNA, 15 bp, Homo sapiens
gagcaactttggttg

SEQ ID NO: 546449 - DNA, 15 bp, Homo sapiens
agcaactttggttga

SEQ ID NO: 546450 - DNA, 15 bp, Homo sapiens
gcaactttggttgag

SEQ ID NO: 546451 - DNA, 15 bp, Homo sapiens
caactttggttgaga

SEQ ID NO: 546452 - DNA, 15 bp, Homo sapiens
aactttggttgagaa

SEQ ID NO: 546453 - DNA, 15 bp, Homo sapiens
actttggttgagaat

SEQ ID NO: 546454 - DNA, 15 bp, Homo sapiens
ctttggttgagaatg

SEQ ID NO: 546455 - DNA, 15 bp, Homo sapiens
tttggttgagaatgt

SEQ ID NO: 546456 - DNA, 15 bp, Homo sapiens
ttggttgagaatgta

SEQ ID NO: 546457 - DNA, 15 bp, Homo sapiens
tggttgagaatgtag

SEQ ID NO: 546458 - DNA, 15 bp, Homo sapiens
ggttgagaatgtagg

SEQ ID NO: 546459 - DNA, 15 bp, Homo sapiens
gttgagaatgtagga

SEQ ID NO: 546460 - DNA, 15 bp, Homo sapiens
ttgagaatgtaggaa

SEQ ID NO: 546461 - DNA, 15 bp, Homo sapiens
tgagaatgtaggaac

SEQ ID NO: 546462 - DNA, 15 bp, Homo sapiens
gagaatgtaggaacc

SEQ ID NO: 546463 - DNA, 15 bp, Homo sapiens
agaatgtaggaacct

SEQ ID NO: 546464 - DNA, 15 bp, Homo sapiens
gaatgtaggaacctg

SEQ ID NO: 546465 - DNA, 15 bp, Homo sapiens
aatgtaggaacctgg

SEQ ID NO: 546466 - DNA, 15 bp, Homo sapiens
atgtaggaacctgga

SEQ ID NO: 546467 - DNA, 15 bp, Homo sapiens
tgtaggaacctggaa

SEQ ID NO: 546468 - DNA, 15 bp, Homo sapiens
gtaggaacctggaaa

SEQ ID NO: 546469 - DNA, 15 bp, Homo sapiens
taggaacctggaaag

SEQ ID NO: 546470 - DNA, 15 bp, Homo sapiens
aggaacctggaaaga

SEQ ID NO: 546471 - DNA, 15 bp, Homo sapiens
ggaacctggaaagat

SEQ ID NO: 546472 - DNA, 15 bp, Homo sapiens
gaacctggaaagatt

SEQ ID NO: 546473 - DNA, 15 bp, Homo sapiens
aacctggaaagattt

SEQ ID NO: 546474 - DNA, 15 bp, Homo sapiens
acctggaaagatttc

SEQ ID NO: 546475 - DNA, 15 bp, Homo sapiens
cctggaaagatttct

SEQ ID NO: 546476 - DNA, 15 bp, Homo sapiens
ctggaaagatttctt

SEQ ID NO: 546477 - DNA, 15 bp, Homo sapiens
tggaaagatttcttg

SEQ ID NO: 546478 - DNA, 15 bp, Homo sapiens
ggaaagatttcttga

SEQ ID NO: 546479 - DNA, 15 bp, Homo sapiens
gaaagatttcttgag

SEQ ID NO: 546480 - DNA, 15 bp, Homo sapiens
aaagatttcttgaga

SEQ ID NO: 546481 - DNA, 15 bp, Homo sapiens
aagatttcttgagac

SEQ ID NO: 546482 - DNA, 15 bp, Homo sapiens
agatttcttgagaca

SEQ ID NO: 546483 - DNA, 15 bp, Homo sapiens
gatttcttgagacat

SEQ ID NO: 546484 - DNA, 15 bp, Homo sapiens
atttcttgagacatg

SEQ ID NO: 546485 - DNA, 15 bp, Homo sapiens
tttcttgagacatgc

SEQ ID NO: 546486 - DNA, 15 bp, Homo sapiens
ttcttgagacatgct

SEQ ID NO: 546487 - DNA, 15 bp, Homo sapiens
tcttgagacatgctc

SEQ ID NO: 546488 - DNA, 15 bp, Homo sapiens
cttgagacatgctca

SEQ ID NO: 546489 - DNA, 15 bp, Homo sapiens
ttgagacatgctcat

SEQ ID NO: 546490 - DNA, 15 bp, Homo sapiens
tgagacatgctcatt

SEQ ID NO: 546491 - DNA, 15 bp, Homo sapiens
gagacatgctcattt

SEQ ID NO: 546492 - DNA, 15 bp, Homo sapiens
agacatgctcatttt

SEQ ID NO: 546493 - DNA, 15 bp, Homo sapiens
gacatgctcatttta

SEQ ID NO: 546494 - DNA, 15 bp, Homo sapiens
acatgctcattttag

SEQ ID NO: 546495 - DNA, 15 bp, Homo sapiens
catgctcattttaga

SEQ ID NO: 546496 - DNA, 15 bp, Homo sapiens
atgctcattttagac

SEQ ID NO: 546497 - DNA, 15 bp, Homo sapiens
tgctcattttagaca

SEQ ID NO: 546498 - DNA, 15 bp, Homo sapiens
gctcattttagacac

SEQ ID NO: 546499 - DNA, 15 bp, Homo sapiens
ctcattttagacaca

SEQ ID NO: 546500 - DNA, 15 bp, Homo sapiens
tcattttagacacac

SEQ ID NO: 546501 - DNA, 15 bp, Homo sapiens
cattttagacacacc

SEQ ID NO: 546502 - DNA, 15 bp, Homo sapiens
attttagacacaccc

SEQ ID NO: 546503 - DNA, 15 bp, Homo sapiens
ttttagacacaccca

SEQ ID NO: 546504 - DNA, 15 bp, Homo sapiens
tttagacacacccag

SEQ ID NO: 546505 - DNA, 15 bp, Homo sapiens
ttagacacacccaga

SEQ ID NO: 546506 - DNA, 15 bp, Homo sapiens
tagacacacccagaa

SEQ ID NO: 546507 - DNA, 15 bp, Homo sapiens
agacacacccagaaa

SEQ ID NO: 546508 - DNA, 15 bp, Homo sapiens
gacacacccagaaac

SEQ ID NO: 546509 - DNA, 15 bp, Homo sapiens
acacacccagaaaca

SEQ ID NO: 546510 - DNA, 15 bp, Homo sapiens
cacacccagaaacat

SEQ ID NO: 546511 - DNA, 15 bp, Homo sapiens
acacccagaaacatg

SEQ ID NO: 546512 - DNA, 15 bp, Homo sapiens
cacccagaaacatgc

SEQ ID NO: 546513 - DNA, 15 bp, Homo sapiens
acccagaaacatgcc

SEQ ID NO: 546514 - DNA, 15 bp, Homo sapiens
cccagaaacatgcca

SEQ ID NO: 546515 - DNA, 15 bp, Homo sapiens
ccagaaacatgccag

SEQ ID NO: 546516 - DNA, 15 bp, Homo sapiens
cagaaacatgccagg

SEQ ID NO: 546517 - DNA, 15 bp, Homo sapiens
agaaacatgccaggt

SEQ ID NO: 546518 - DNA, 15 bp, Homo sapiens
gaaacatgccaggta

SEQ ID NO: 546519 - DNA, 15 bp, Homo sapiens
aaacatgccaggtac

SEQ ID NO: 546520 - DNA, 15 bp, Homo sapiens
aacatgccaggtaca

SEQ ID NO: 546521 - DNA, 15 bp, Homo sapiens
acatgccaggtacag

SEQ ID NO: 546522 - DNA, 15 bp, Homo sapiens
catgccaggtacaga

SEQ ID NO: 546523 - DNA, 15 bp, Homo sapiens
atgccaggtacagat

SEQ ID NO: 546524 - DNA, 15 bp, Homo sapiens
tgccaggtacagatg

SEQ ID NO: 546525 - DNA, 15 bp, Homo sapiens
gccaggtacagatga

SEQ ID NO: 546526 - DNA, 15 bp, Homo sapiens
ccaggtacagatgac

SEQ ID NO: 546527 - DNA, 15 bp, Homo sapiens
caggtacagatgaca

SEQ ID NO: 546528 - DNA, 15 bp, Homo sapiens
aggtacagatgacaa

SEQ ID NO: 546529 - DNA, 15 bp, Homo sapiens
ggtacagatgacaat

SEQ ID NO: 546530 - DNA, 15 bp, Homo sapiens
gtacagatgacaatt

SEQ ID NO: 546531 - DNA, 15 bp, Homo sapiens
tacagatgacaattt

SEQ ID NO: 546532 - DNA, 15 bp, Homo sapiens
acagatgacaatttc

SEQ ID NO: 546533 - DNA, 15 bp, Homo sapiens
cagatgacaatttcc

SEQ ID NO: 546534 - DNA, 15 bp, Homo sapiens
agatgacaatttcca

SEQ ID NO: 546535 - DNA, 15 bp, Homo sapiens
gatgacaatttccac

SEQ ID NO: 546536 - DNA, 15 bp, Homo sapiens
atgacaatttccact

SEQ ID NO: 546537 - DNA, 15 bp, Homo sapiens
tgacaatttccacta

SEQ ID NO: 546538 - DNA, 15 bp, Homo sapiens
gacaatttccactat

SEQ ID NO: 546539 - DNA, 15 bp, Homo sapiens
acaatttccactata

SEQ ID NO: 546540 - DNA, 15 bp, Homo sapiens
caatttccactatag

SEQ ID NO: 546541 - DNA, 15 bp, Homo sapiens
aatttccactatagg

SEQ ID NO: 546542 - DNA, 15 bp, Homo sapiens
atttccactataggt

SEQ ID NO: 546543 - DNA, 15 bp, Homo sapiens
tttccactataggta

SEQ ID NO: 546544 - DNA, 15 bp, Homo sapiens
ttccactataggtaa

SEQ ID NO: 546545 - DNA, 15 bp, Homo sapiens
tccactataggtaaa

SEQ ID NO: 546546 - DNA, 15 bp, Homo sapiens
ccactataggtaaaa

SEQ ID NO: 546547 - DNA, 15 bp, Homo sapiens
cactataggtaaaac

SEQ ID NO: 546548 - DNA, 15 bp, Homo sapiens
actataggtaaaaca

SEQ ID NO: 546549 - DNA, 15 bp, Homo sapiens
ctataggtaaaacat

SEQ ID NO: 546550 - DNA, 15 bp, Homo sapiens
tataggtaaaacatc

SEQ ID NO: 546551 - DNA, 15 bp, Homo sapiens
ataggtaaaacatct

SEQ ID NO: 546552 - DNA, 15 bp, Homo sapiens
taggtaaaacatctc

SEQ ID NO: 546553 - DNA, 15 bp, Homo sapiens
aggtaaaacatctca

SEQ ID NO: 546554 - DNA, 15 bp, Homo sapiens
ggtaaaacatctcaa

SEQ ID NO: 546555 - DNA, 15 bp, Homo sapiens
gtaaaacatctcaaa

SEQ ID NO: 546556 - DNA, 15 bp, Homo sapiens
taaaacatctcaaaa

SEQ ID NO: 546557 - DNA, 15 bp, Homo sapiens
aaaacatctcaaaac

SEQ ID NO: 546558 - DNA, 15 bp, Homo sapiens
aaacatctcaaaaca

SEQ ID NO: 546559 - DNA, 15 bp, Homo sapiens
aacatctcaaaacag

SEQ ID NO: 546560 - DNA, 15 bp, Homo sapiens
acatctcaaaacaga

SEQ ID NO: 546561 - DNA, 15 bp, Homo sapiens
catctcaaaacagaa

SEQ ID NO: 546562 - DNA, 15 bp, Homo sapiens
atctcaaaacagaag

SEQ ID NO: 546563 - DNA, 15 bp, Homo sapiens
tctcaaaacagaagc

SEQ ID NO: 546564 - DNA, 15 bp, Homo sapiens
ctcaaaacagaagcc

SEQ ID NO: 546565 - DNA, 15 bp, Homo sapiens
tcaaaacagaagcct

SEQ ID NO: 546566 - DNA, 15 bp, Homo sapiens
caaaacagaagccta

SEQ ID NO: 546567 - DNA, 15 bp, Homo sapiens
aaaacagaagcctaa

SEQ ID NO: 546568 - DNA, 15 bp, Homo sapiens
aaacagaagcctaag

SEQ ID NO: 546569 - DNA, 15 bp, Homo sapiens
aacagaagcctaagc

SEQ ID NO: 546570 - DNA, 15 bp, Homo sapiens
acagaagcctaagct

SEQ ID NO: 546571 - DNA, 15 bp, Homo sapiens
cagaagcctaagctg

SEQ ID NO: 546572 - DNA, 15 bp, Homo sapiens
agaagcctaagctga

SEQ ID NO: 546573 - DNA, 15 bp, Homo sapiens
gaagcctaagctgac

SEQ ID NO: 546574 - DNA, 15 bp, Homo sapiens
aagcctaagctgaca

SEQ ID NO: 546575 - DNA, 15 bp, Homo sapiens
agcctaagctgacag

SEQ ID NO: 546576 - DNA, 15 bp, Homo sapiens
gcctaagctgacagt

SEQ ID NO: 546577 - DNA, 15 bp, Homo sapiens
cctaagctgacagtg

SEQ ID NO: 546578 - DNA, 15 bp, Homo sapiens
ctaagctgacagtgg

SEQ ID NO: 546579 - DNA, 15 bp, Homo sapiens
taagctgacagtgga

SEQ ID NO: 546580 - DNA, 15 bp, Homo sapiens
aagctgacagtggac

SEQ ID NO: 546581 - DNA, 15 bp, Homo sapiens
agctgacagtggacc

SEQ ID NO: 546582 - DNA, 15 bp, Homo sapiens
gctgacagtggacca

SEQ ID NO: 546583 - DNA, 15 bp, Homo sapiens
ctgacagtggaccaa

SEQ ID NO: 546584 - DNA, 15 bp, Homo sapiens
tgacagtggaccaat

SEQ ID NO: 546585 - DNA, 15 bp, Homo sapiens
gacagtggaccaata

SEQ ID NO: 546586 - DNA, 15 bp, Homo sapiens
acagtggaccaataa

SEQ ID NO: 546587 - DNA, 15 bp, Homo sapiens
cagtggaccaataac

SEQ ID NO: 546588 - DNA, 15 bp, Homo sapiens
agtggaccaataact

SEQ ID NO: 546589 - DNA, 15 bp, Homo sapiens
gtggaccaataactg

SEQ ID NO: 546590 - DNA, 15 bp, Homo sapiens
tggaccaataactgc

SEQ ID NO: 546591 - DNA, 15 bp, Homo sapiens
ggaccaataactgca

SEQ ID NO: 546592 - DNA, 15 bp, Homo sapiens
gaccaataactgcat

SEQ ID NO: 546593 - DNA, 15 bp, Homo sapiens
accaataactgcatt

SEQ ID NO: 546594 - DNA, 15 bp, Homo sapiens
ccaataactgcattg

SEQ ID NO: 546595 - DNA, 15 bp, Homo sapiens
caataactgcattgt

SEQ ID NO: 546596 - DNA, 15 bp, Homo sapiens
aataactgcattgtt

SEQ ID NO: 546597 - DNA, 15 bp, Homo sapiens
ataactgcattgttt

SEQ ID NO: 546598 - DNA, 15 bp, Homo sapiens
taactgcattgttta

SEQ ID NO: 546599 - DNA, 15 bp, Homo sapiens
aactgcattgtttat

SEQ ID NO: 546600 - DNA, 15 bp, Homo sapiens
actgcattgtttatt

SEQ ID NO: 546601 - DNA, 15 bp, Homo sapiens
ctgcattgtttattg

SEQ ID NO: 546602 - DNA, 15 bp, Homo sapiens
tgcattgtttattgg

SEQ ID NO: 546603 - DNA, 15 bp, Homo sapiens
gcattgtttattggt

SEQ ID NO: 546604 - DNA, 15 bp, Homo sapiens
cattgtttattggtt

SEQ ID NO: 546605 - DNA, 15 bp, Homo sapiens
attgtttattggttt

SEQ ID NO: 546606 - DNA, 15 bp, Homo sapiens
ttgtttattggtttc

SEQ ID NO: 546607 - DNA, 15 bp, Homo sapiens
tgtttattggtttcc

SEQ ID NO: 546608 - DNA, 15 bp, Homo sapiens
gtttattggtttccc

SEQ ID NO: 546609 - DNA, 15 bp, Homo sapiens
tttattggtttccca

SEQ ID NO: 546610 - DNA, 15 bp, Homo sapiens
ttattggtttcccaa

SEQ ID NO: 546611 - DNA, 15 bp, Homo sapiens
tattggtttcccaag

SEQ ID NO: 546612 - DNA, 15 bp, Homo sapiens
attggtttcccaagg

SEQ ID NO: 546613 - DNA, 15 bp, Homo sapiens
ttggtttcccaaggc

SEQ ID NO: 546614 - DNA, 15 bp, Homo sapiens
tggtttcccaaggca

SEQ ID NO: 546615 - DNA, 15 bp, Homo sapiens
ggtttcccaaggcaa

SEQ ID NO: 546616 - DNA, 15 bp, Homo sapiens
gtttcccaaggcaaa

SEQ ID NO: 546617 - DNA, 15 bp, Homo sapiens
tttcccaaggcaaat

SEQ ID NO: 546618 - DNA, 15 bp, Homo sapiens
ttcccaaggcaaatg

SEQ ID NO: 546619 - DNA, 15 bp, Homo sapiens
tcccaaggcaaatgt

SEQ ID NO: 546620 - DNA, 15 bp, Homo sapiens
cccaaggcaaatgtt

SEQ ID NO: 546621 - DNA, 15 bp, Homo sapiens
ccaaggcaaatgttc

SEQ ID NO: 546622 - DNA, 15 bp, Homo sapiens
caaggcaaatgttca

SEQ ID NO: 546623 - DNA, 15 bp, Homo sapiens
aaggcaaatgttcag

SEQ ID NO: 546624 - DNA, 15 bp, Homo sapiens
aggcaaatgttcagc

SEQ ID NO: 546625 - DNA, 15 bp, Homo sapiens
ggcaaatgttcagca

SEQ ID NO: 546626 - DNA, 15 bp, Homo sapiens
gcaaatgttcagcaa

SEQ ID NO: 546627 - DNA, 15 bp, Homo sapiens
caaatgttcagcaaa

SEQ ID NO: 546628 - DNA, 15 bp, Homo sapiens
aaatgttcagcaaat

SEQ ID NO: 546629 - DNA, 15 bp, Homo sapiens
aatgttcagcaaatt

SEQ ID NO: 546630 - DNA, 15 bp, Homo sapiens
atgttcagcaaattc

SEQ ID NO: 546631 - DNA, 15 bp, Homo sapiens
tgttcagcaaattct

SEQ ID NO: 546632 - DNA, 15 bp, Homo sapiens
gttcagcaaattctg

SEQ ID NO: 546633 - DNA, 15 bp, Homo sapiens
ttcagcaaattctgt

SEQ ID NO: 546634 - DNA, 15 bp, Homo sapiens
tcagcaaattctgta

SEQ ID NO: 546635 - DNA, 15 bp, Homo sapiens
cagcaaattctgtat

SEQ ID NO: 546636 - DNA, 15 bp, Homo sapiens
agcaaattctgtata

SEQ ID NO: 546637 - DNA, 15 bp, Homo sapiens
gcaaattctgtatat

SEQ ID NO: 546638 - DNA, 15 bp, Homo sapiens
caaattctgtatata

SEQ ID NO: 546639 - DNA, 15 bp, Homo sapiens
aaattctgtatatat

SEQ ID NO: 546640 - DNA, 15 bp, Homo sapiens
aattctgtatatata

SEQ ID NO: 546641 - DNA, 15 bp, Homo sapiens
attctgtatatataa

SEQ ID NO: 546642 - DNA, 15 bp, Homo sapiens
ttctgtatatataat

SEQ ID NO: 546643 - DNA, 15 bp, Homo sapiens
tctgtatatataatc

SEQ ID NO: 546644 - DNA, 15 bp, Homo sapiens
ctgtatatataatca

SEQ ID NO: 546645 - DNA, 15 bp, Homo sapiens
tgtatatataatcaa

SEQ ID NO: 546646 - DNA, 15 bp, Homo sapiens
gtatatataatcaac

SEQ ID NO: 546647 - DNA, 15 bp, Homo sapiens
tatatataatcaaca

SEQ ID NO: 546648 - DNA, 15 bp, Homo sapiens
atatataatcaacag

SEQ ID NO: 546649 - DNA, 15 bp, Homo sapiens
tatataatcaacaga

SEQ ID NO: 546650 - DNA, 15 bp, Homo sapiens
atataatcaacagaa

SEQ ID NO: 546651 - DNA, 15 bp, Homo sapiens
tataatcaacagaaa

SEQ ID NO: 546652 - DNA, 15 bp, Homo sapiens
ataatcaacagaaaa

SEQ ID NO: 546653 - DNA, 15 bp, Homo sapiens
taatcaacagaaaat

SEQ ID NO: 546654 - DNA, 15 bp, Homo sapiens
aatcaacagaaaatt

SEQ ID NO: 546655 - DNA, 15 bp, Homo sapiens
atcaacagaaaattt

SEQ ID NO: 546656 - DNA, 15 bp, Homo sapiens
tcaacagaaaatttt

SEQ ID NO: 546657 - DNA, 15 bp, Homo sapiens
caacagaaaattttg

SEQ ID NO: 546658 - DNA, 15 bp, Homo sapiens
aacagaaaattttgt

SEQ ID NO: 546659 - DNA, 15 bp, Homo sapiens
acagaaaattttgtt

SEQ ID NO: 546660 - DNA, 15 bp, Homo sapiens
cagaaaattttgttc

SEQ ID NO: 546661 - DNA, 15 bp, Homo sapiens
agaaaattttgttca

SEQ ID NO: 546662 - DNA, 15 bp, Homo sapiens
gaaaattttgttcag

SEQ ID NO: 546663 - DNA, 15 bp, Homo sapiens
aaaattttgttcaga

SEQ ID NO: 546664 - DNA, 15 bp, Homo sapiens
aaattttgttcagat

SEQ ID NO: 546665 - DNA, 15 bp, Homo sapiens
aattttgttcagatt

SEQ ID NO: 546666 - DNA, 15 bp, Homo sapiens
attttgttcagattc

SEQ ID NO: 546667 - DNA, 15 bp, Homo sapiens
ttttgttcagattct

SEQ ID NO: 546668 - DNA, 15 bp, Homo sapiens
tttgttcagattcta

SEQ ID NO: 546669 - DNA, 15 bp, Homo sapiens
ttgttcagattctag

SEQ ID NO: 546670 - DNA, 15 bp, Homo sapiens
tgttcagattctaga

SEQ ID NO: 546671 - DNA, 15 bp, Homo sapiens
gttcagattctagaa

SEQ ID NO: 546672 - DNA, 15 bp, Homo sapiens
ttcagattctagaaa

SEQ ID NO: 546673 - DNA, 15 bp, Homo sapiens
tcagattctagaaaa

SEQ ID NO: 546674 - DNA, 15 bp, Homo sapiens
cagattctagaaaag

SEQ ID NO: 546675 - DNA, 15 bp, Homo sapiens
agattctagaaaaga

SEQ ID NO: 546676 - DNA, 15 bp, Homo sapiens
gattctagaaaagat

SEQ ID NO: 546677 - DNA, 15 bp, Homo sapiens
attctagaaaagata

SEQ ID NO: 546678 - DNA, 15 bp, Homo sapiens
ttctagaaaagatag

SEQ ID NO: 546679 - DNA, 15 bp, Homo sapiens
tctagaaaagatagc

SEQ ID NO: 546680 - DNA, 15 bp, Homo sapiens
ctagaaaagatagct

SEQ ID NO: 546681 - DNA, 15 bp, Homo sapiens
tagaaaagatagctg

SEQ ID NO: 546682 - DNA, 15 bp, Homo sapiens
agaaaagatagctgc

SEQ ID NO: 546683 - DNA, 15 bp, Homo sapiens
gaaaagatagctgct

SEQ ID NO: 546684 - DNA, 15 bp, Homo sapiens
aaaagatagctgctg

SEQ ID NO: 546685 - DNA, 15 bp, Homo sapiens
aaagatagctgctgt

SEQ ID NO: 546686 - DNA, 15 bp, Homo sapiens
aagatagctgctgtt

SEQ ID NO: 546687 - DNA, 15 bp, Homo sapiens
agatagctgctgttt

SEQ ID NO: 546688 - DNA, 15 bp, Homo sapiens
gatagctgctgtttt

SEQ ID NO: 546689 - DNA, 15 bp, Homo sapiens
atagctgctgttttg

SEQ ID NO: 546690 - DNA, 15 bp, Homo sapiens
tagctgctgttttgt

SEQ ID NO: 546691 - DNA, 15 bp, Homo sapiens
agctgctgttttgta

SEQ ID NO: 546692 - DNA, 15 bp, Homo sapiens
gctgctgttttgtat

SEQ ID NO: 546693 - DNA, 15 bp, Homo sapiens
ctgctgttttgtata

SEQ ID NO: 546694 - DNA, 15 bp, Homo sapiens
tgctgttttgtatat

SEQ ID NO: 546695 - DNA, 15 bp, Homo sapiens
gctgttttgtatatg

SEQ ID NO: 546696 - DNA, 15 bp, Homo sapiens
ctgttttgtatatgt

SEQ ID NO: 546697 - DNA, 15 bp, Homo sapiens
tgttttgtatatgtg

SEQ ID NO: 546698 - DNA, 15 bp, Homo sapiens
gttttgtatatgtgt

SEQ ID NO: 546699 - DNA, 15 bp, Homo sapiens
ttttgtatatgtgtg

SEQ ID NO: 546700 - DNA, 15 bp, Homo sapiens
tttgtatatgtgtgt

SEQ ID NO: 546701 - DNA, 15 bp, Homo sapiens
ttgtatatgtgtgta

SEQ ID NO: 546702 - DNA, 15 bp, Homo sapiens
tgtatatgtgtgtac

SEQ ID NO: 546703 - DNA, 15 bp, Homo sapiens
gtatatgtgtgtact

SEQ ID NO: 546704 - DNA, 15 bp, Homo sapiens
tatatgtgtgtactt

SEQ ID NO: 546705 - DNA, 15 bp, Homo sapiens
atatgtgtgtacttt

SEQ ID NO: 546706 - DNA, 15 bp, Homo sapiens
tatgtgtgtactttc

SEQ ID NO: 546707 - DNA, 15 bp, Homo sapiens
atgtgtgtactttct

SEQ ID NO: 546708 - DNA, 15 bp, Homo sapiens
tgtgtgtactttctg

SEQ ID NO: 546709 - DNA, 15 bp, Homo sapiens
gtgtgtactttctgc

SEQ ID NO: 546710 - DNA, 15 bp, Homo sapiens
tgtgtactttctgct

SEQ ID NO: 546711 - DNA, 15 bp, Homo sapiens
gtgtactttctgcta

SEQ ID NO: 546712 - DNA, 15 bp, Homo sapiens
tgtactttctgctat

SEQ ID NO: 546713 - DNA, 15 bp, Homo sapiens
gtactttctgctata

SEQ ID NO: 546714 - DNA, 15 bp, Homo sapiens
tactttctgctatag

SEQ ID NO: 546715 - DNA, 15 bp, Homo sapiens
actttctgctatagt

SEQ ID NO: 546716 - DNA, 15 bp, Homo sapiens
ctttctgctatagta

SEQ ID NO: 546717 - DNA, 15 bp, Homo sapiens
tttctgctatagtag

SEQ ID NO: 546718 - DNA, 15 bp, Homo sapiens
ttctgctatagtagt

SEQ ID NO: 546719 - DNA, 15 bp, Homo sapiens
tctgctatagtagta

SEQ ID NO: 546720 - DNA, 15 bp, Homo sapiens
ctgctatagtagtat

SEQ ID NO: 546721 - DNA, 15 bp, Homo sapiens
tgctatagtagtatt

SEQ ID NO: 546722 - DNA, 15 bp, Homo sapiens
gctatagtagtattt

SEQ ID NO: 546723 - DNA, 15 bp, Homo sapiens
ctatagtagtatttg

SEQ ID NO: 546724 - DNA, 15 bp, Homo sapiens
tatagtagtatttgc

SEQ ID NO: 546725 - DNA, 15 bp, Homo sapiens
atagtagtatttgca

SEQ ID NO: 546726 - DNA, 15 bp, Homo sapiens
tagtagtatttgcat

SEQ ID NO: 546727 - DNA, 15 bp, Homo sapiens
agtagtatttgcata

SEQ ID NO: 546728 - DNA, 15 bp, Homo sapiens
gtagtatttgcataa

SEQ ID NO: 546729 - DNA, 15 bp, Homo sapiens
tagtatttgcataag

SEQ ID NO: 546730 - DNA, 15 bp, Homo sapiens
agtatttgcataagt

SEQ ID NO: 546731 - DNA, 15 bp, Homo sapiens
gtatttgcataagtt

SEQ ID NO: 546732 - DNA, 15 bp, Homo sapiens
tatttgcataagtta

SEQ ID NO: 546733 - DNA, 15 bp, Homo sapiens
atttgcataagttaa

SEQ ID NO: 546734 - DNA, 15 bp, Homo sapiens
tttgcataagttaaa

SEQ ID NO: 546735 - DNA, 15 bp, Homo sapiens
ttgcataagttaaat

SEQ ID NO: 546736 - DNA, 15 bp, Homo sapiens
tgcataagttaaata

SEQ ID NO: 546737 - DNA, 15 bp, Homo sapiens
gcataagttaaatat

SEQ ID NO: 546738 - DNA, 15 bp, Homo sapiens
cataagttaaatatt

SEQ ID NO: 546739 - DNA, 15 bp, Homo sapiens
ataagttaaatattt

SEQ ID NO: 546740 - DNA, 15 bp, Homo sapiens
taagttaaatatttt

SEQ ID NO: 546741 - DNA, 15 bp, Homo sapiens
aagttaaatattttc

SEQ ID NO: 546742 - DNA, 15 bp, Homo sapiens
agttaaatattttca

SEQ ID NO: 546743 - DNA, 15 bp, Homo sapiens
gttaaatattttcag

SEQ ID NO: 546744 - DNA, 15 bp, Homo sapiens
ttaaatattttcagt

SEQ ID NO: 546745 - DNA, 15 bp, Homo sapiens
taaatattttcagtg

SEQ ID NO: 546746 - DNA, 15 bp, Homo sapiens
aaatattttcagtgc

SEQ ID NO: 546747 - DNA, 15 bp, Homo sapiens
aatattttcagtgca

SEQ ID NO: 546748 - DNA, 15 bp, Homo sapiens
atattttcagtgcaa

SEQ ID NO: 546749 - DNA, 15 bp, Homo sapiens
tattttcagtgcaat

SEQ ID NO: 546750 - DNA, 15 bp, Homo sapiens
attttcagtgcaatt

SEQ ID NO: 546751 - DNA, 15 bp, Homo sapiens
ttttcagtgcaattt

SEQ ID NO: 546752 - DNA, 15 bp, Homo sapiens
tttcagtgcaatttt

SEQ ID NO: 546753 - DNA, 15 bp, Homo sapiens
ttcagtgcaattttt

SEQ ID NO: 546754 - DNA, 15 bp, Homo sapiens
tcagtgcaattttta

SEQ ID NO: 546755 - DNA, 15 bp, Homo sapiens
cagtgcaatttttat

SEQ ID NO: 546756 - DNA, 15 bp, Homo sapiens
agtgcaatttttatt

SEQ ID NO: 546757 - DNA, 15 bp, Homo sapiens
gtgcaatttttatta

SEQ ID NO: 546758 - DNA, 15 bp, Homo sapiens
tgcaatttttattag

SEQ ID NO: 546759 - DNA, 15 bp, Homo sapiens
gcaatttttattagt

SEQ ID NO: 546760 - DNA, 15 bp, Homo sapiens
caatttttattagtt

SEQ ID NO: 546761 - DNA, 15 bp, Homo sapiens
aatttttattagttt

SEQ ID NO: 546762 - DNA, 15 bp, Homo sapiens
atttttattagtttt

SEQ ID NO: 546763 - DNA, 15 bp, Homo sapiens
tttttattagttttc

SEQ ID NO: 546764 - DNA, 15 bp, Homo sapiens
ttttattagttttca

SEQ ID NO: 546765 - DNA, 15 bp, Homo sapiens
tttattagttttcaa

SEQ ID NO: 546766 - DNA, 15 bp, Homo sapiens
ttattagttttcaaa

SEQ ID NO: 546767 - DNA, 15 bp, Homo sapiens
tattagttttcaaaa

SEQ ID NO: 546768 - DNA, 15 bp, Homo sapiens
attagttttcaaaat

SEQ ID NO: 546769 - DNA, 15 bp, Homo sapiens
ttagttttcaaaatg

SEQ ID NO: 546770 - DNA, 15 bp, Homo sapiens
tagttttcaaaatgc

SEQ ID NO: 546771 - DNA, 15 bp, Homo sapiens
agttttcaaaatgca

SEQ ID NO: 546772 - DNA, 15 bp, Homo sapiens
gttttcaaaatgcac

SEQ ID NO: 546773 - DNA, 15 bp, Homo sapiens
ttttcaaaatgcact

SEQ ID NO: 546774 - DNA, 15 bp, Homo sapiens
tttcaaaatgcactt

SEQ ID NO: 546775 - DNA, 15 bp, Homo sapiens
ttcaaaatgcacttt

SEQ ID NO: 546776 - DNA, 15 bp, Homo sapiens
tcaaaatgcactttt

SEQ ID NO: 546777 - DNA, 15 bp, Homo sapiens
caaaatgcacttttg

SEQ ID NO: 546778 - DNA, 15 bp, Homo sapiens
aaaatgcacttttgt

SEQ ID NO: 546779 - DNA, 15 bp, Homo sapiens
aaatgcacttttgtg

SEQ ID NO: 546780 - DNA, 15 bp, Homo sapiens
aatgcacttttgtgg

SEQ ID NO: 546781 - DNA, 15 bp, Homo sapiens
atgcacttttgtggg

SEQ ID NO: 546782 - DNA, 15 bp, Homo sapiens
tgcacttttgtgggt

SEQ ID NO: 546783 - DNA, 15 bp, Homo sapiens
gcacttttgtgggta

SEQ ID NO: 546784 - DNA, 15 bp, Homo sapiens
cacttttgtgggtat

SEQ ID NO: 546785 - DNA, 15 bp, Homo sapiens
acttttgtgggtatc

SEQ ID NO: 546786 - DNA, 15 bp, Homo sapiens
cttttgtgggtatct

SEQ ID NO: 546787 - DNA, 15 bp, Homo sapiens
ttttgtgggtatctg

SEQ ID NO: 546788 - DNA, 15 bp, Homo sapiens
tttgtgggtatctgt

SEQ ID NO: 546789 - DNA, 15 bp, Homo sapiens
ttgtgggtatctgtg

SEQ ID NO: 546790 - DNA, 15 bp, Homo sapiens
tgtgggtatctgtgt

SEQ ID NO: 546791 - DNA, 15 bp, Homo sapiens
gtgggtatctgtgtg

SEQ ID NO: 546792 - DNA, 15 bp, Homo sapiens
tgggtatctgtgtgt

SEQ ID NO: 546793 - DNA, 15 bp, Homo sapiens
gggtatctgtgtgta

SEQ ID NO: 546794 - DNA, 15 bp, Homo sapiens
ggtatctgtgtgtat

SEQ ID NO: 546795 - DNA, 15 bp, Homo sapiens
gtatctgtgtgtatg

SEQ ID NO: 546796 - DNA, 15 bp, Homo sapiens
tatctgtgtgtatgc

SEQ ID NO: 546797 - DNA, 15 bp, Homo sapiens
atctgtgtgtatgca

SEQ ID NO: 546798 - DNA, 15 bp, Homo sapiens
tctgtgtgtatgcag

SEQ ID NO: 546799 - DNA, 15 bp, Homo sapiens
ctgtgtgtatgcagg

SEQ ID NO: 546800 - DNA, 15 bp, Homo sapiens
tgtgtgtatgcaggt

SEQ ID NO: 546801 - DNA, 15 bp, Homo sapiens
gtgtgtatgcaggtg

SEQ ID NO: 546802 - DNA, 15 bp, Homo sapiens
tgtgtatgcaggtgt

SEQ ID NO: 546803 - DNA, 15 bp, Homo sapiens
gtgtatgcaggtgtg

SEQ ID NO: 546804 - DNA, 15 bp, Homo sapiens
tgtatgcaggtgtgt

SEQ ID NO: 546805 - DNA, 15 bp, Homo sapiens
gtatgcaggtgtgtg

SEQ ID NO: 546806 - DNA, 15 bp, Homo sapiens
tatgcaggtgtgtgg

SEQ ID NO: 546807 - DNA, 15 bp, Homo sapiens
atgcaggtgtgtggg

SEQ ID NO: 546808 - DNA, 15 bp, Homo sapiens
tgcaggtgtgtgggg

SEQ ID NO: 546809 - DNA, 15 bp, Homo sapiens
gcaggtgtgtgggga

SEQ ID NO: 546810 - DNA, 15 bp, Homo sapiens
caggtgtgtggggag

SEQ ID NO: 546811 - DNA, 15 bp, Homo sapiens
aggtgtgtggggaga

SEQ ID NO: 546812 - DNA, 15 bp, Homo sapiens
ggtgtgtggggagaa

SEQ ID NO: 546813 - DNA, 15 bp, Homo sapiens
gtgtgtggggagaac

SEQ ID NO: 546814 - DNA, 15 bp, Homo sapiens
tgtgtggggagaacc

SEQ ID NO: 546815 - DNA, 15 bp, Homo sapiens
gtgtggggagaacca

SEQ ID NO: 546816 - DNA, 15 bp, Homo sapiens
tgtggggagaaccat

SEQ ID NO: 546817 - DNA, 15 bp, Homo sapiens
gtggggagaaccatg

SEQ ID NO: 546818 - DNA, 15 bp, Homo sapiens
tggggagaaccatga

SEQ ID NO: 546819 - DNA, 15 bp, Homo sapiens
ggggagaaccatgaa

SEQ ID NO: 546820 - DNA, 15 bp, Homo sapiens
gggagaaccatgaac

SEQ ID NO: 546821 - DNA, 15 bp, Homo sapiens
ggagaaccatgaaca

SEQ ID NO: 546822 - DNA, 15 bp, Homo sapiens
gagaaccatgaacaa

SEQ ID NO: 546823 - DNA, 15 bp, Homo sapiens
agaaccatgaacaag

SEQ ID NO: 546824 - DNA, 15 bp, Homo sapiens
gaaccatgaacaaga

SEQ ID NO: 546825 - DNA, 15 bp, Homo sapiens
aaccatgaacaagac

SEQ ID NO: 546826 - DNA, 15 bp, Homo sapiens
accatgaacaagaca

SEQ ID NO: 546827 - DNA, 15 bp, Homo sapiens
ccatgaacaagacaa

SEQ ID NO: 546828 - DNA, 15 bp, Homo sapiens
catgaacaagacaaa

SEQ ID NO: 546829 - DNA, 15 bp, Homo sapiens
atgaacaagacaaag

SEQ ID NO: 546830 - DNA, 15 bp, Homo sapiens
tgaacaagacaaaga

SEQ ID NO: 546831 - DNA, 15 bp, Homo sapiens
gaacaagacaaagac

SEQ ID NO: 546832 - DNA, 15 bp, Homo sapiens
aacaagacaaagacc

SEQ ID NO: 546833 - DNA, 15 bp, Homo sapiens
acaagacaaagaccc

SEQ ID NO: 546834 - DNA, 15 bp, Homo sapiens
caagacaaagacccc

SEQ ID NO: 546835 - DNA, 15 bp, Homo sapiens
aagacaaagacccct

SEQ ID NO: 546836 - DNA, 15 bp, Homo sapiens
agacaaagacccctt

SEQ ID NO: 546837 - DNA, 15 bp, Homo sapiens
gacaaagaccccttg

SEQ ID NO: 546838 - DNA, 15 bp, Homo sapiens
acaaagaccccttgt

SEQ ID NO: 546839 - DNA, 15 bp, Homo sapiens
caaagaccccttgtc

SEQ ID NO: 546840 - DNA, 15 bp, Homo sapiens
aaagaccccttgtca

SEQ ID NO: 546841 - DNA, 15 bp, Homo sapiens
aagaccccttgtcac

SEQ ID NO: 546842 - DNA, 15 bp, Homo sapiens
agaccccttgtcact

SEQ ID NO: 546843 - DNA, 15 bp, Homo sapiens
gaccccttgtcactg

SEQ ID NO: 546844 - DNA, 15 bp, Homo sapiens
accccttgtcactga

SEQ ID NO: 546845 - DNA, 15 bp, Homo sapiens
ccccttgtcactgag

SEQ ID NO: 546846 - DNA, 15 bp, Homo sapiens
cccttgtcactgagg

SEQ ID NO: 546847 - DNA, 15 bp, Homo sapiens
ccttgtcactgaggg

SEQ ID NO: 546848 - DNA, 15 bp, Homo sapiens
cttgtcactgagggc

SEQ ID NO: 546849 - DNA, 15 bp, Homo sapiens
ttgtcactgagggca

SEQ ID NO: 546850 - DNA, 15 bp, Homo sapiens
tgtcactgagggcag

SEQ ID NO: 546851 - DNA, 15 bp, Homo sapiens
gtcactgagggcaga

SEQ ID NO: 546852 - DNA, 15 bp, Homo sapiens
tcactgagggcagag

SEQ ID NO: 546853 - DNA, 15 bp, Homo sapiens
cactgagggcagagc

SEQ ID NO: 546854 - DNA, 15 bp, Homo sapiens
actgagggcagagcc

SEQ ID NO: 546855 - DNA, 15 bp, Homo sapiens
ctgagggcagagcct

SEQ ID NO: 546856 - DNA, 15 bp, Homo sapiens
tgagggcagagcctg

SEQ ID NO: 546857 - DNA, 15 bp, Homo sapiens
gagggcagagcctga

SEQ ID NO: 546858 - DNA, 15 bp, Homo sapiens
agggcagagcctgac

SEQ ID NO: 546859 - DNA, 15 bp, Homo sapiens
gggcagagcctgact

SEQ ID NO: 546860 - DNA, 15 bp, Homo sapiens
ggcagagcctgactc

SEQ ID NO: 546861 - DNA, 15 bp, Homo sapiens
gcagagcctgactca

SEQ ID NO: 546862 - DNA, 15 bp, Homo sapiens
cagagcctgactcag

SEQ ID NO: 546863 - DNA, 15 bp, Homo sapiens
agagcctgactcagc

SEQ ID NO: 546864 - DNA, 15 bp, Homo sapiens
gagcctgactcagca

SEQ ID NO: 546865 - DNA, 15 bp, Homo sapiens
agcctgactcagcat

SEQ ID NO: 546866 - DNA, 15 bp, Homo sapiens
gcctgactcagcatc

SEQ ID NO: 546867 - DNA, 15 bp, Homo sapiens
cctgactcagcatcc

SEQ ID NO: 546868 - DNA, 15 bp, Homo sapiens
ctgactcagcatccc

SEQ ID NO: 546869 - DNA, 15 bp, Homo sapiens
tgactcagcatccca

SEQ ID NO: 546870 - DNA, 15 bp, Homo sapiens
gactcagcatcccaa

SEQ ID NO: 546871 - DNA, 15 bp, Homo sapiens
actcagcatcccaat

SEQ ID NO: 546872 - DNA, 15 bp, Homo sapiens
ctcagcatcccaata

SEQ ID NO: 546873 - DNA, 15 bp, Homo sapiens
tcagcatcccaatac

SEQ ID NO: 546874 - DNA, 15 bp, Homo sapiens
cagcatcccaataca

SEQ ID NO: 546875 - DNA, 15 bp, Homo sapiens
agcatcccaatacag

SEQ ID NO: 546876 - DNA, 15 bp, Homo sapiens
gcatcccaatacagc

SEQ ID NO: 546877 - DNA, 15 bp, Homo sapiens
catcccaatacagcc

SEQ ID NO: 546878 - DNA, 15 bp, Homo sapiens
atcccaatacagccc

SEQ ID NO: 546879 - DNA, 15 bp, Homo sapiens
tcccaatacagcccc

SEQ ID NO: 546880 - DNA, 15 bp, Homo sapiens
cccaatacagcccct

SEQ ID NO: 546881 - DNA, 15 bp, Homo sapiens
ccaatacagcccctg

SEQ ID NO: 546882 - DNA, 15 bp, Homo sapiens
caatacagcccctgg

SEQ ID NO: 546883 - DNA, 15 bp, Homo sapiens
aatacagcccctggt

SEQ ID NO: 546884 - DNA, 15 bp, Homo sapiens
atacagcccctggtt

SEQ ID NO: 546885 - DNA, 15 bp, Homo sapiens
tacagcccctggttt

SEQ ID NO: 546886 - DNA, 15 bp, Homo sapiens
acagcccctggtttg

SEQ ID NO: 546887 - DNA, 15 bp, Homo sapiens
cagcccctggtttgc

SEQ ID NO: 546888 - DNA, 15 bp, Homo sapiens
agcccctggtttgca

SEQ ID NO: 546889 - DNA, 15 bp, Homo sapiens
gcccctggtttgcat

SEQ ID NO: 546890 - DNA, 15 bp, Homo sapiens
cccctggtttgcatt

SEQ ID NO: 546891 - DNA, 15 bp, Homo sapiens
ccctggtttgcattc

SEQ ID NO: 546892 - DNA, 15 bp, Homo sapiens
cctggtttgcattct

SEQ ID NO: 546893 - DNA, 15 bp, Homo sapiens
ctggtttgcattctt

SEQ ID NO: 546894 - DNA, 15 bp, Homo sapiens
tggtttgcattcttc

SEQ ID NO: 546895 - DNA, 15 bp, Homo sapiens
ggtttgcattcttcc

SEQ ID NO: 546896 - DNA, 15 bp, Homo sapiens
gtttgcattcttccc

SEQ ID NO: 546897 - DNA, 15 bp, Homo sapiens
tttgcattcttccca

SEQ ID NO: 546898 - DNA, 15 bp, Homo sapiens
ttgcattcttcccaa

SEQ ID NO: 546899 - DNA, 15 bp, Homo sapiens
tgcattcttcccaaa

SEQ ID NO: 546900 - DNA, 15 bp, Homo sapiens
gcattcttcccaaag

SEQ ID NO: 546901 - DNA, 15 bp, Homo sapiens
cattcttcccaaagg

SEQ ID NO: 546902 - DNA, 15 bp, Homo sapiens
attcttcccaaagga

SEQ ID NO: 546903 - DNA, 15 bp, Homo sapiens
ttcttcccaaaggag

SEQ ID NO: 546904 - DNA, 15 bp, Homo sapiens
tcttcccaaaggagg

SEQ ID NO: 546905 - DNA, 15 bp, Homo sapiens
cttcccaaaggaggc

SEQ ID NO: 546906 - DNA, 15 bp, Homo sapiens
ttcccaaaggaggca

SEQ ID NO: 546907 - DNA, 15 bp, Homo sapiens
tcccaaaggaggcac

SEQ ID NO: 546908 - DNA, 15 bp, Homo sapiens
cccaaaggaggcaca

SEQ ID NO: 546909 - DNA, 15 bp, Homo sapiens
ccaaaggaggcacat

SEQ ID NO: 546910 - DNA, 15 bp, Homo sapiens
caaaggaggcacatt

SEQ ID NO: 546911 - DNA, 15 bp, Homo sapiens
aaaggaggcacattc

SEQ ID NO: 546912 - DNA, 15 bp, Homo sapiens
aaggaggcacattct

SEQ ID NO: 546913 - DNA, 15 bp, Homo sapiens
aggaggcacattcta

SEQ ID NO: 546914 - DNA, 15 bp, Homo sapiens
ggaggcacattctaa

SEQ ID NO: 546915 - DNA, 15 bp, Homo sapiens
gaggcacattctaac

SEQ ID NO: 546916 - DNA, 15 bp, Homo sapiens
aggcacattctaaca

SEQ ID NO: 546917 - DNA, 15 bp, Homo sapiens
ggcacattctaacaa

SEQ ID NO: 546918 - DNA, 15 bp, Homo sapiens
gcacattctaacaaa

SEQ ID NO: 546919 - DNA, 15 bp, Homo sapiens
cacattctaacaaac

SEQ ID NO: 546920 - DNA, 15 bp, Homo sapiens
acattctaacaaaca

SEQ ID NO: 546921 - DNA, 15 bp, Homo sapiens
cattctaacaaacaa

SEQ ID NO: 546922 - DNA, 15 bp, Homo sapiens
attctaacaaacaaa

SEQ ID NO: 546923 - DNA, 15 bp, Homo sapiens
ttctaacaaacaaac

SEQ ID NO: 546924 - DNA, 15 bp, Homo sapiens
tctaacaaacaaaca

SEQ ID NO: 546925 - DNA, 15 bp, Homo sapiens
ctaacaaacaaacaa

SEQ ID NO: 546926 - DNA, 15 bp, Homo sapiens
taacaaacaaacaac

SEQ ID NO: 546927 - DNA, 15 bp, Homo sapiens
aacaaacaaacaacc

SEQ ID NO: 546928 - DNA, 15 bp, Homo sapiens
acaaacaaacaacca

SEQ ID NO: 546929 - DNA, 15 bp, Homo sapiens
caaacaaacaaccat

SEQ ID NO: 546930 - DNA, 15 bp, Homo sapiens
aaacaaacaaccatg

SEQ ID NO: 546931 - DNA, 15 bp, Homo sapiens
aacaaacaaccatgc

SEQ ID NO: 546932 - DNA, 15 bp, Homo sapiens
acaaacaaccatgcc

SEQ ID NO: 546933 - DNA, 15 bp, Homo sapiens
caaacaaccatgcca

SEQ ID NO: 546934 - DNA, 15 bp, Homo sapiens
aaacaaccatgccaa

SEQ ID NO: 546935 - DNA, 15 bp, Homo sapiens
aacaaccatgccaag

SEQ ID NO: 546936 - DNA, 15 bp, Homo sapiens
acaaccatgccaagc

SEQ ID NO: 546937 - DNA, 15 bp, Homo sapiens
caaccatgccaagcc

SEQ ID NO: 546938 - DNA, 15 bp, Homo sapiens
aaccatgccaagcct

SEQ ID NO: 546939 - DNA, 15 bp, Homo sapiens
accatgccaagcctc

SEQ ID NO: 546940 - DNA, 15 bp, Homo sapiens
ccatgccaagcctcc

SEQ ID NO: 546941 - DNA, 15 bp, Homo sapiens
catgccaagcctccg

SEQ ID NO: 546942 - DNA, 15 bp, Homo sapiens
atgccaagcctccga

SEQ ID NO: 546943 - DNA, 15 bp, Homo sapiens
tgccaagcctccgac

SEQ ID NO: 546944 - DNA, 15 bp, Homo sapiens
gccaagcctccgacc

SEQ ID NO: 546945 - DNA, 15 bp, Homo sapiens
ccaagcctccgacca

SEQ ID NO: 546946 - DNA, 15 bp, Homo sapiens
caagcctccgaccac

SEQ ID NO: 546947 - DNA, 15 bp, Homo sapiens
aagcctccgaccaca

SEQ ID NO: 546948 - DNA, 15 bp, Homo sapiens
agcctccgaccacaa

SEQ ID NO: 546949 - DNA, 15 bp, Homo sapiens
gcctccgaccacaaa

SEQ ID NO: 546950 - DNA, 15 bp, Homo sapiens
cctccgaccacaaac

SEQ ID NO: 546951 - DNA, 15 bp, Homo sapiens
ctccgaccacaaacc

SEQ ID NO: 546952 - DNA, 15 bp, Homo sapiens
tccgaccacaaaccc

SEQ ID NO: 546953 - DNA, 15 bp, Homo sapiens
ccgaccacaaaccca

SEQ ID NO: 546954 - DNA, 15 bp, Homo sapiens
cgaccacaaacccaa

SEQ ID NO: 546955 - DNA, 15 bp, Homo sapiens
gaccacaaacccaac

SEQ ID NO: 546956 - DNA, 15 bp, Homo sapiens
accacaaacccaacc

SEQ ID NO: 546957 - DNA, 15 bp, Homo sapiens
ccacaaacccaacca

SEQ ID NO: 546958 - DNA, 15 bp, Homo sapiens
cacaaacccaaccaa

SEQ ID NO: 546959 - DNA, 15 bp, Homo sapiens
acaaacccaaccaaa

SEQ ID NO: 546960 - DNA, 15 bp, Homo sapiens
caaacccaaccaaac

SEQ ID NO: 546961 - DNA, 15 bp, Homo sapiens
aaacccaaccaaaca

SEQ ID NO: 546962 - DNA, 15 bp, Homo sapiens
aacccaaccaaacat

SEQ ID NO: 546963 - DNA, 15 bp, Homo sapiens
acccaaccaaacatt

SEQ ID NO: 546964 - DNA, 15 bp, Homo sapiens
cccaaccaaacattt

SEQ ID NO: 546965 - DNA, 15 bp, Homo sapiens
ccaaccaaacatttt

SEQ ID NO: 546966 - DNA, 15 bp, Homo sapiens
caaccaaacattttc

SEQ ID NO: 546967 - DNA, 15 bp, Homo sapiens
aaccaaacattttca

SEQ ID NO: 546968 - DNA, 15 bp, Homo sapiens
accaaacattttcaa

SEQ ID NO: 546969 - DNA, 15 bp, Homo sapiens
ccaaacattttcaaa

SEQ ID NO: 546970 - DNA, 15 bp, Homo sapiens
caaacattttcaaaa

SEQ ID NO: 546971 - DNA, 15 bp, Homo sapiens
aaacattttcaaaaa

SEQ ID NO: 546972 - DNA, 15 bp, Homo sapiens
aacattttcaaaaag

SEQ ID NO: 546973 - DNA, 15 bp, Homo sapiens
acattttcaaaaaga

SEQ ID NO: 546974 - DNA, 15 bp, Homo sapiens
cattttcaaaaagat

SEQ ID NO: 546975 - DNA, 15 bp, Homo sapiens
attttcaaaaagatg

SEQ ID NO: 546976 - DNA, 15 bp, Homo sapiens
ttttcaaaaagatgt

SEQ ID NO: 546977 - DNA, 15 bp, Homo sapiens
tttcaaaaagatgta

SEQ ID NO: 546978 - DNA, 15 bp, Homo sapiens
ttcaaaaagatgtat

SEQ ID NO: 546979 - DNA, 15 bp, Homo sapiens
tcaaaaagatgtata

SEQ ID NO: 546980 - DNA, 15 bp, Homo sapiens
caaaaagatgtatat

SEQ ID NO: 546981 - DNA, 15 bp, Homo sapiens
aaaaagatgtatata

SEQ ID NO: 546982 - DNA, 15 bp, Homo sapiens
aaaagatgtatatat

SEQ ID NO: 546983 - DNA, 15 bp, Homo sapiens
aaagatgtatatatt

SEQ ID NO: 546984 - DNA, 15 bp, Homo sapiens
aagatgtatatattt

SEQ ID NO: 546985 - DNA, 15 bp, Homo sapiens
agatgtatatatttc

SEQ ID NO: 546986 - DNA, 15 bp, Homo sapiens
gatgtatatatttct

SEQ ID NO: 546987 - DNA, 15 bp, Homo sapiens
atgtatatatttctg

SEQ ID NO: 546988 - DNA, 15 bp, Homo sapiens
tgtatatatttctgt

SEQ ID NO: 546989 - DNA, 15 bp, Homo sapiens
gtatatatttctgtg

SEQ ID NO: 546990 - DNA, 15 bp, Homo sapiens
tatatatttctgtga

SEQ ID NO: 546991 - DNA, 15 bp, Homo sapiens
atatatttctgtgaa

SEQ ID NO: 546992 - DNA, 15 bp, Homo sapiens
tatatttctgtgaaa

SEQ ID NO: 546993 - DNA, 15 bp, Homo sapiens
atatttctgtgaaag

SEQ ID NO: 546994 - DNA, 15 bp, Homo sapiens
tatttctgtgaaaga

SEQ ID NO: 546995 - DNA, 15 bp, Homo sapiens
atttctgtgaaagaa

SEQ ID NO: 546996 - DNA, 15 bp, Homo sapiens
tttctgtgaaagaat

SEQ ID NO: 546997 - DNA, 15 bp, Homo sapiens
ttctgtgaaagaata

SEQ ID NO: 546998 - DNA, 15 bp, Homo sapiens
tctgtgaaagaatat

SEQ ID NO: 546999 - DNA, 15 bp, Homo sapiens
ctgtgaaagaatatg

SEQ ID NO: 547000 - DNA, 15 bp, Homo sapiens
tgtgaaagaatatgg

SEQ ID NO: 547001 - DNA, 15 bp, Homo sapiens
gtgaaagaatatgga

SEQ ID NO: 547002 - DNA, 15 bp, Homo sapiens
tgaaagaatatggat

SEQ ID NO: 547003 - DNA, 15 bp, Homo sapiens
gaaagaatatggata

SEQ ID NO: 547004 - DNA, 15 bp, Homo sapiens
aaagaatatggatat

SEQ ID NO: 547005 - DNA, 15 bp, Homo sapiens
aagaatatggatatc

SEQ ID NO: 547006 - DNA, 15 bp, Homo sapiens
agaatatggatatct

SEQ ID NO: 547007 - DNA, 15 bp, Homo sapiens
gaatatggatatctt

SEQ ID NO: 547008 - DNA, 15 bp, Homo sapiens
aatatggatatcttt

SEQ ID NO: 547009 - DNA, 15 bp, Homo sapiens
atatggatatctttc

SEQ ID NO: 547010 - DNA, 15 bp, Homo sapiens
tatggatatctttca

SEQ ID NO: 547011 - DNA, 15 bp, Homo sapiens
atggatatctttcag

SEQ ID NO: 547012 - DNA, 15 bp, Homo sapiens
tggatatctttcagt

SEQ ID NO: 547013 - DNA, 15 bp, Homo sapiens
ggatatctttcagtg

SEQ ID NO: 547014 - DNA, 15 bp, Homo sapiens
gatatctttcagtgc

SEQ ID NO: 547015 - DNA, 15 bp, Homo sapiens
atatctttcagtgct

SEQ ID NO: 547016 - DNA, 15 bp, Homo sapiens
tatctttcagtgctc

SEQ ID NO: 547017 - DNA, 15 bp, Homo sapiens
atctttcagtgctca

SEQ ID NO: 547018 - DNA, 15 bp, Homo sapiens
tctttcagtgctcaa

SEQ ID NO: 547019 - DNA, 15 bp, Homo sapiens
ctttcagtgctcaag

SEQ ID NO: 547020 - DNA, 15 bp, Homo sapiens
tttcagtgctcaaga

SEQ ID NO: 547021 - DNA, 15 bp, Homo sapiens
ttcagtgctcaagag

SEQ ID NO: 547022 - DNA, 15 bp, Homo sapiens
tcagtgctcaagagg

SEQ ID NO: 547023 - DNA, 15 bp, Homo sapiens
cagtgctcaagaggc

SEQ ID NO: 547024 - DNA, 15 bp, Homo sapiens
agtgctcaagaggca

SEQ ID NO: 547025 - DNA, 15 bp, Homo sapiens
gtgctcaagaggcag

SEQ ID NO: 547026 - DNA, 15 bp, Homo sapiens
tgctcaagaggcagt

SEQ ID NO: 547027 - DNA, 15 bp, Homo sapiens
gctcaagaggcagta

SEQ ID NO: 547028 - DNA, 15 bp, Homo sapiens
ctcaagaggcagtat

SEQ ID NO: 547029 - DNA, 15 bp, Homo sapiens
tcaagaggcagtatt

SEQ ID NO: 547030 - DNA, 15 bp, Homo sapiens
caagaggcagtattc

SEQ ID NO: 547031 - DNA, 15 bp, Homo sapiens
aagaggcagtattct

SEQ ID NO: 547032 - DNA, 15 bp, Homo sapiens
agaggcagtattctg

SEQ ID NO: 547033 - DNA, 15 bp, Homo sapiens
gaggcagtattctgc

SEQ ID NO: 547034 - DNA, 15 bp, Homo sapiens
aggcagtattctgca

SEQ ID NO: 547035 - DNA, 15 bp, Homo sapiens
ggcagtattctgcag

SEQ ID NO: 547036 - DNA, 15 bp, Homo sapiens
gcagtattctgcagt

SEQ ID NO: 547037 - DNA, 15 bp, Homo sapiens
cagtattctgcagta

SEQ ID NO: 547038 - DNA, 15 bp, Homo sapiens
agtattctgcagtag

SEQ ID NO: 547039 - DNA, 15 bp, Homo sapiens
gtattctgcagtaga

SEQ ID NO: 547040 - DNA, 15 bp, Homo sapiens
tattctgcagtagat

SEQ ID NO: 547041 - DNA, 15 bp, Homo sapiens
attctgcagtagatc

SEQ ID NO: 547042 - DNA, 15 bp, Homo sapiens
ttctgcagtagatct

SEQ ID NO: 547043 - DNA, 15 bp, Homo sapiens
tctgcagtagatcta

SEQ ID NO: 547044 - DNA, 15 bp, Homo sapiens
ctgcagtagatctaa

SEQ ID NO: 547045 - DNA, 15 bp, Homo sapiens
tgcagtagatctaac

SEQ ID NO: 547046 - DNA, 15 bp, Homo sapiens
gcagtagatctaact

SEQ ID NO: 547047 - DNA, 15 bp, Homo sapiens
cagtagatctaactc

SEQ ID NO: 547048 - DNA, 15 bp, Homo sapiens
agtagatctaactca

SEQ ID NO: 547049 - DNA, 15 bp, Homo sapiens
gtagatctaactcaa

SEQ ID NO: 547050 - DNA, 15 bp, Homo sapiens
tagatctaactcaag

SEQ ID NO: 547051 - DNA, 15 bp, Homo sapiens
agatctaactcaagt

SEQ ID NO: 547052 - DNA, 15 bp, Homo sapiens
gatctaactcaagtg

SEQ ID NO: 547053 - DNA, 15 bp, Homo sapiens
atctaactcaagtgg

SEQ ID NO: 547054 - DNA, 15 bp, Homo sapiens
tctaactcaagtgga

SEQ ID NO: 547055 - DNA, 15 bp, Homo sapiens
ctaactcaagtggat

SEQ ID NO: 547056 - DNA, 15 bp, Homo sapiens
taactcaagtggata

SEQ ID NO: 547057 - DNA, 15 bp, Homo sapiens
aactcaagtggatag

SEQ ID NO: 547058 - DNA, 15 bp, Homo sapiens
actcaagtggatagg

SEQ ID NO: 547059 - DNA, 15 bp, Homo sapiens
ctcaagtggataggg

SEQ ID NO: 547060 - DNA, 15 bp, Homo sapiens
tcaagtggataggga

SEQ ID NO: 547061 - DNA, 15 bp, Homo sapiens
caagtggatagggac

SEQ ID NO: 547062 - DNA, 15 bp, Homo sapiens
aagtggatagggact

SEQ ID NO: 547063 - DNA, 15 bp, Homo sapiens
agtggatagggactt

SEQ ID NO: 547064 - DNA, 15 bp, Homo sapiens
gtggatagggacttc

SEQ ID NO: 547065 - DNA, 15 bp, Homo sapiens
tggatagggacttcg

SEQ ID NO: 547066 - DNA, 15 bp, Homo sapiens
ggatagggacttcgg

SEQ ID NO: 547067 - DNA, 15 bp, Homo sapiens
gatagggacttcgga

SEQ ID NO: 547068 - DNA, 15 bp, Homo sapiens
atagggacttcggaa

SEQ ID NO: 547069 - DNA, 15 bp, Homo sapiens
tagggacttcggaaa

SEQ ID NO: 547070 - DNA, 15 bp, Homo sapiens
agggacttcggaaag

SEQ ID NO: 547071 - DNA, 15 bp, Homo sapiens
gggacttcggaaagc

SEQ ID NO: 547072 - DNA, 15 bp, Homo sapiens
ggacttcggaaagcc

SEQ ID NO: 547073 - DNA, 15 bp, Homo sapiens
gacttcggaaagccc

SEQ ID NO: 547074 - DNA, 15 bp, Homo sapiens
acttcggaaagccct

SEQ ID NO: 547075 - DNA, 15 bp, Homo sapiens
cttcggaaagccctt

SEQ ID NO: 547076 - DNA, 15 bp, Homo sapiens
ttcggaaagcccttt

SEQ ID NO: 547077 - DNA, 15 bp, Homo sapiens
tcggaaagccctttt

SEQ ID NO: 547078 - DNA, 15 bp, Homo sapiens
cggaaagcccttttt

SEQ ID NO: 547079 - DNA, 15 bp, Homo sapiens
ggaaagccctttttc

SEQ ID NO: 547080 - DNA, 15 bp, Homo sapiens
gaaagccctttttca

SEQ ID NO: 547081 - DNA, 15 bp, Homo sapiens
aaagccctttttcaa

SEQ ID NO: 547082 - DNA, 15 bp, Homo sapiens
aagccctttttcaaa

SEQ ID NO: 547083 - DNA, 15 bp, Homo sapiens
agccctttttcaaac

SEQ ID NO: 547084 - DNA, 15 bp, Homo sapiens
gccctttttcaaact

SEQ ID NO: 547085 - DNA, 15 bp, Homo sapiens
ccctttttcaaactg

SEQ ID NO: 547086 - DNA, 15 bp, Homo sapiens
cctttttcaaactga

SEQ ID NO: 547087 - DNA, 15 bp, Homo sapiens
ctttttcaaactgag

SEQ ID NO: 547088 - DNA, 15 bp, Homo sapiens
tttttcaaactgagt

SEQ ID NO: 547089 - DNA, 15 bp, Homo sapiens
ttttcaaactgagtt

SEQ ID NO: 547090 - DNA, 15 bp, Homo sapiens
tttcaaactgagttt

SEQ ID NO: 547091 - DNA, 15 bp, Homo sapiens
ttcaaactgagtttg

SEQ ID NO: 547092 - DNA, 15 bp, Homo sapiens
tcaaactgagtttgt

SEQ ID NO: 547093 - DNA, 15 bp, Homo sapiens
caaactgagtttgtt

SEQ ID NO: 547094 - DNA, 15 bp, Homo sapiens
aaactgagtttgttg

SEQ ID NO: 547095 - DNA, 15 bp, Homo sapiens
aactgagtttgttga

SEQ ID NO: 547096 - DNA, 15 bp, Homo sapiens
actgagtttgttgaa

SEQ ID NO: 547097 - DNA, 15 bp, Homo sapiens
ctgagtttgttgaat

SEQ ID NO: 547098 - DNA, 15 bp, Homo sapiens
tgagtttgttgaatc

SEQ ID NO: 547099 - DNA, 15 bp, Homo sapiens
gagtttgttgaatcc

SEQ ID NO: 547100 - DNA, 15 bp, Homo sapiens
agtttgttgaatcca

SEQ ID NO: 547101 - DNA, 15 bp, Homo sapiens
gtttgttgaatccag

SEQ ID NO: 547102 - DNA, 15 bp, Homo sapiens
tttgttgaatccagc

SEQ ID NO: 547103 - DNA, 15 bp, Homo sapiens
ttgttgaatccagct

SEQ ID NO: 547104 - DNA, 15 bp, Homo sapiens
tgttgaatccagcta

SEQ ID NO: 547105 - DNA, 15 bp, Homo sapiens
gttgaatccagctag

SEQ ID NO: 547106 - DNA, 15 bp, Homo sapiens
ttgaatccagctagc

SEQ ID NO: 547107 - DNA, 15 bp, Homo sapiens
tgaatccagctagct

SEQ ID NO: 547108 - DNA, 15 bp, Homo sapiens
gaatccagctagcta

SEQ ID NO: 547109 - DNA, 15 bp, Homo sapiens
aatccagctagctac

SEQ ID NO: 547110 - DNA, 15 bp, Homo sapiens
atccagctagctaca

SEQ ID NO: 547111 - DNA, 15 bp, Homo sapiens
tccagctagctacat

SEQ ID NO: 547112 - DNA, 15 bp, Homo sapiens
ccagctagctacatg

SEQ ID NO: 547113 - DNA, 15 bp, Homo sapiens
cagctagctacatgg

SEQ ID NO: 547114 - DNA, 15 bp, Homo sapiens
agctagctacatgga

SEQ ID NO: 547115 - DNA, 15 bp, Homo sapiens
gctagctacatggaa

SEQ ID NO: 547116 - DNA, 15 bp, Homo sapiens
ctagctacatggaag

SEQ ID NO: 547117 - DNA, 15 bp, Homo sapiens
tagctacatggaagg

SEQ ID NO: 547118 - DNA, 15 bp, Homo sapiens
agctacatggaaggg

SEQ ID NO: 547119 - DNA, 15 bp, Homo sapiens
gctacatggaaggga

SEQ ID NO: 547120 - DNA, 15 bp, Homo sapiens
ctacatggaagggat

SEQ ID NO: 547121 - DNA, 15 bp, Homo sapiens
tacatggaagggatg

SEQ ID NO: 547122 - DNA, 15 bp, Homo sapiens
acatggaagggatgg

SEQ ID NO: 547123 - DNA, 15 bp, Homo sapiens
catggaagggatggc

SEQ ID NO: 547124 - DNA, 15 bp, Homo sapiens
atggaagggatggca

SEQ ID NO: 547125 - DNA, 15 bp, Homo sapiens
tggaagggatggcag

SEQ ID NO: 547126 - DNA, 15 bp, Homo sapiens
ggaagggatggcagg

SEQ ID NO: 547127 - DNA, 15 bp, Homo sapiens
gaagggatggcaggg

SEQ ID NO: 547128 - DNA, 15 bp, Homo sapiens
aagggatggcagggc

SEQ ID NO: 547129 - DNA, 15 bp, Homo sapiens
agggatggcagggct

SEQ ID NO: 547130 - DNA, 15 bp, Homo sapiens
gggatggcagggctc

SEQ ID NO: 547131 - DNA, 15 bp, Homo sapiens
ggatggcagggctca

SEQ ID NO: 547132 - DNA, 15 bp, Homo sapiens
gatggcagggctcag

SEQ ID NO: 547133 - DNA, 15 bp, Homo sapiens
atggcagggctcagt

SEQ ID NO: 547134 - DNA, 15 bp, Homo sapiens
tggcagggctcagtg

SEQ ID NO: 547135 - DNA, 15 bp, Homo sapiens
ggcagggctcagtgg

SEQ ID NO: 547136 - DNA, 15 bp, Homo sapiens
gcagggctcagtggg

SEQ ID NO: 547137 - DNA, 15 bp, Homo sapiens
cagggctcagtggga

SEQ ID NO: 547138 - DNA, 15 bp, Homo sapiens
agggctcagtgggag

SEQ ID NO: 547139 - DNA, 15 bp, Homo sapiens
gggctcagtgggagc

SEQ ID NO: 547140 - DNA, 15 bp, Homo sapiens
ggctcagtgggagca

SEQ ID NO: 547141 - DNA, 15 bp, Homo sapiens
gctcagtgggagcag

SEQ ID NO: 547142 - DNA, 15 bp, Homo sapiens
ctcagtgggagcagg

SEQ ID NO: 547143 - DNA, 15 bp, Homo sapiens
tcagtgggagcagga

SEQ ID NO: 547144 - DNA, 15 bp, Homo sapiens
cagtgggagcaggac

SEQ ID NO: 547145 - DNA, 15 bp, Homo sapiens
agtgggagcaggaca

SEQ ID NO: 547146 - DNA, 15 bp, Homo sapiens
gtgggagcaggacac

SEQ ID NO: 547147 - DNA, 15 bp, Homo sapiens
tgggagcaggacaca

SEQ ID NO: 547148 - DNA, 15 bp, Homo sapiens
gggagcaggacacag

SEQ ID NO: 547149 - DNA, 15 bp, Homo sapiens
ggagcaggacacagt

SEQ ID NO: 547150 - DNA, 15 bp, Homo sapiens
gagcaggacacagta

SEQ ID NO: 547151 - DNA, 15 bp, Homo sapiens
agcaggacacagtag

SEQ ID NO: 547152 - DNA, 15 bp, Homo sapiens
gcaggacacagtagg

SEQ ID NO: 547153 - DNA, 15 bp, Homo sapiens
caggacacagtaggg

SEQ ID NO: 547154 - DNA, 15 bp, Homo sapiens
aggacacagtagggg

SEQ ID NO: 547155 - DNA, 15 bp, Homo sapiens
ggacacagtagggga

SEQ ID NO: 547156 - DNA, 15 bp, Homo sapiens
gacacagtaggggag

SEQ ID NO: 547157 - DNA, 15 bp, Homo sapiens
acacagtaggggagg

SEQ ID NO: 547158 - DNA, 15 bp, Homo sapiens
cacagtaggggaggc

SEQ ID NO: 547159 - DNA, 15 bp, Homo sapiens
acagtaggggaggcc

SEQ ID NO: 547160 - DNA, 15 bp, Homo sapiens
cagtaggggaggcca

SEQ ID NO: 547161 - DNA, 15 bp, Homo sapiens
agtaggggaggccag

SEQ ID NO: 547162 - DNA, 15 bp, Homo sapiens
gtaggggaggccagg

SEQ ID NO: 547163 - DNA, 15 bp, Homo sapiens
taggggaggccaggg

SEQ ID NO: 547164 - DNA, 15 bp, Homo sapiens
aggggaggccagggt

SEQ ID NO: 547165 - DNA, 15 bp, Homo sapiens
ggggaggccagggtg

SEQ ID NO: 547166 - DNA, 15 bp, Homo sapiens
gggaggccagggtgc

SEQ ID NO: 547167 - DNA, 15 bp, Homo sapiens
ggaggccagggtgca

SEQ ID NO: 547168 - DNA, 15 bp, Homo sapiens
gaggccagggtgcaa

SEQ ID NO: 547169 - DNA, 15 bp, Homo sapiens
aggccagggtgcaag

SEQ ID NO: 547170 - DNA, 15 bp, Homo sapiens
ggccagggtgcaagc

SEQ ID NO: 547171 - DNA, 15 bp, Homo sapiens
gccagggtgcaagct

SEQ ID NO: 547172 - DNA, 15 bp, Homo sapiens
ccagggtgcaagctc

SEQ ID NO: 547173 - DNA, 15 bp, Homo sapiens
cagggtgcaagctca

SEQ ID NO: 547174 - DNA, 15 bp, Homo sapiens
agggtgcaagctcat

SEQ ID NO: 547175 - DNA, 15 bp, Homo sapiens
gggtgcaagctcatc

SEQ ID NO: 547176 - DNA, 15 bp, Homo sapiens
ggtgcaagctcatcc

SEQ ID NO: 547177 - DNA, 15 bp, Homo sapiens
gtgcaagctcatcca

SEQ ID NO: 547178 - DNA, 15 bp, Homo sapiens
tgcaagctcatccac

SEQ ID NO: 547179 - DNA, 15 bp, Homo sapiens
gcaagctcatccact

SEQ ID NO: 547180 - DNA, 15 bp, Homo sapiens
caagctcatccactc

SEQ ID NO: 547181 - DNA, 15 bp, Homo sapiens
aagctcatccactcc

SEQ ID NO: 547182 - DNA, 15 bp, Homo sapiens
agctcatccactccc

SEQ ID NO: 547183 - DNA, 15 bp, Homo sapiens
gctcatccactccct

SEQ ID NO: 547184 - DNA, 15 bp, Homo sapiens
ctcatccactccctc

SEQ ID NO: 547185 - DNA, 15 bp, Homo sapiens
tcatccactccctca

SEQ ID NO: 547186 - DNA, 15 bp, Homo sapiens
catccactccctcat

SEQ ID NO: 547187 - DNA, 15 bp, Homo sapiens
atccactccctcatc

SEQ ID NO: 547188 - DNA, 15 bp, Homo sapiens
tccactccctcatct

SEQ ID NO: 547189 - DNA, 15 bp, Homo sapiens
ccactccctcatctg

SEQ ID NO: 547190 - DNA, 15 bp, Homo sapiens
cactccctcatctgt

SEQ ID NO: 547191 - DNA, 15 bp, Homo sapiens
actccctcatctgta

SEQ ID NO: 547192 - DNA, 15 bp, Homo sapiens
ctccctcatctgtaa

SEQ ID NO: 547193 - DNA, 15 bp, Homo sapiens
tccctcatctgtaaa

SEQ ID NO: 547194 - DNA, 15 bp, Homo sapiens
ccctcatctgtaaaa

SEQ ID NO: 547195 - DNA, 15 bp, Homo sapiens
cctcatctgtaaaat

SEQ ID NO: 547196 - DNA, 15 bp, Homo sapiens
ctcatctgtaaaatg

SEQ ID NO: 547197 - DNA, 15 bp, Homo sapiens
tcatctgtaaaatgg

SEQ ID NO: 547198 - DNA, 15 bp, Homo sapiens
catctgtaaaatggg

SEQ ID NO: 547199 - DNA, 15 bp, Homo sapiens
atctgtaaaatgggt

SEQ ID NO: 547200 - DNA, 15 bp, Homo sapiens
tctgtaaaatgggtt

SEQ ID NO: 547201 - DNA, 15 bp, Homo sapiens
ctgtaaaatgggtta

SEQ ID NO: 547202 - DNA, 15 bp, Homo sapiens
tgtaaaatgggttag

SEQ ID NO: 547203 - DNA, 15 bp, Homo sapiens
gtaaaatgggttagt

SEQ ID NO: 547204 - DNA, 15 bp, Homo sapiens
taaaatgggttagtt

SEQ ID NO: 547205 - DNA, 15 bp, Homo sapiens
aaaatgggttagttc

SEQ ID NO: 547206 - DNA, 15 bp, Homo sapiens
aaatgggttagttcc

SEQ ID NO: 547207 - DNA, 15 bp, Homo sapiens
aatgggttagttccc

SEQ ID NO: 547208 - DNA, 15 bp, Homo sapiens
atgggttagttccct

SEQ ID NO: 547209 - DNA, 15 bp, Homo sapiens
tgggttagttccctg

SEQ ID NO: 547210 - DNA, 15 bp, Homo sapiens
gggttagttccctga

SEQ ID NO: 547211 - DNA, 15 bp, Homo sapiens
ggttagttccctgac

SEQ ID NO: 547212 - DNA, 15 bp, Homo sapiens
gttagttccctgacc

SEQ ID NO: 547213 - DNA, 15 bp, Homo sapiens
ttagttccctgacca

SEQ ID NO: 547214 - DNA, 15 bp, Homo sapiens
tagttccctgaccac

SEQ ID NO: 547215 - DNA, 15 bp, Homo sapiens
agttccctgaccacc

SEQ ID NO: 547216 - DNA, 15 bp, Homo sapiens
gttccctgaccacct

SEQ ID NO: 547217 - DNA, 15 bp, Homo sapiens
ttccctgaccacctc

SEQ ID NO: 547218 - DNA, 15 bp, Homo sapiens
tccctgaccacctca

SEQ ID NO: 547219 - DNA, 15 bp, Homo sapiens
ccctgaccacctcac

SEQ ID NO: 547220 - DNA, 15 bp, Homo sapiens
cctgaccacctcacc

SEQ ID NO: 547221 - DNA, 15 bp, Homo sapiens
ctgaccacctcacca

SEQ ID NO: 547222 - DNA, 15 bp, Homo sapiens
tgaccacctcaccac

SEQ ID NO: 547223 - DNA, 15 bp, Homo sapiens
gaccacctcaccaca

SEQ ID NO: 547224 - DNA, 15 bp, Homo sapiens
accacctcaccacac

SEQ ID NO: 547225 - DNA, 15 bp, Homo sapiens
ccacctcaccacact

SEQ ID NO: 547226 - DNA, 15 bp, Homo sapiens
cacctcaccacacta

SEQ ID NO: 547227 - DNA, 15 bp, Homo sapiens
acctcaccacactat

SEQ ID NO: 547228 - DNA, 15 bp, Homo sapiens
cctcaccacactatt

SEQ ID NO: 547229 - DNA, 15 bp, Homo sapiens
ctcaccacactattg

SEQ ID NO: 547230 - DNA, 15 bp, Homo sapiens
tcaccacactattgt

SEQ ID NO: 547231 - DNA, 15 bp, Homo sapiens
caccacactattgtc

SEQ ID NO: 547232 - DNA, 15 bp, Homo sapiens
accacactattgtca

SEQ ID NO: 547233 - DNA, 15 bp, Homo sapiens
ccacactattgtcag

SEQ ID NO: 547234 - DNA, 15 bp, Homo sapiens
cacactattgtcagg

SEQ ID NO: 547235 - DNA, 15 bp, Homo sapiens
acactattgtcaggc

SEQ ID NO: 547236 - DNA, 15 bp, Homo sapiens
cactattgtcaggcc

SEQ ID NO: 547237 - DNA, 15 bp, Homo sapiens
actattgtcaggcct

SEQ ID NO: 547238 - DNA, 15 bp, Homo sapiens
ctattgtcaggcctc

SEQ ID NO: 547239 - DNA, 15 bp, Homo sapiens
tattgtcaggcctcc

SEQ ID NO: 547240 - DNA, 15 bp, Homo sapiens
attgtcaggcctcct

SEQ ID NO: 547241 - DNA, 15 bp, Homo sapiens
ttgtcaggcctcctt

SEQ ID NO: 547242 - DNA, 15 bp, Homo sapiens
tgtcaggcctccttc

SEQ ID NO: 547243 - DNA, 15 bp, Homo sapiens
gtcaggcctccttca

SEQ ID NO: 547244 - DNA, 15 bp, Homo sapiens
tcaggcctccttcac

SEQ ID NO: 547245 - DNA, 15 bp, Homo sapiens
caggcctccttcact

SEQ ID NO: 547246 - DNA, 15 bp, Homo sapiens
aggcctccttcactg

SEQ ID NO: 547247 - DNA, 15 bp, Homo sapiens
ggcctccttcactgg

SEQ ID NO: 547248 - DNA, 15 bp, Homo sapiens
gcctccttcactggg

SEQ ID NO: 547249 - DNA, 15 bp, Homo sapiens
cctccttcactggga

SEQ ID NO: 547250 - DNA, 15 bp, Homo sapiens
ctccttcactgggag

SEQ ID NO: 547251 - DNA, 15 bp, Homo sapiens
tccttcactgggagc

SEQ ID NO: 547252 - DNA, 15 bp, Homo sapiens
ccttcactgggagct

SEQ ID NO: 547253 - DNA, 15 bp, Homo sapiens
cttcactgggagctg

SEQ ID NO: 547254 - DNA, 15 bp, Homo sapiens
ttcactgggagctga

SEQ ID NO: 547255 - DNA, 15 bp, Homo sapiens
tcactgggagctgaa

SEQ ID NO: 547256 - DNA, 15 bp, Homo sapiens
cactgggagctgaaa

SEQ ID NO: 547257 - DNA, 15 bp, Homo sapiens
actgggagctgaaaa

SEQ ID NO: 547258 - DNA, 15 bp, Homo sapiens
ctgggagctgaaaaa

SEQ ID NO: 547259 - DNA, 15 bp, Homo sapiens
tgggagctgaaaaag

SEQ ID NO: 547260 - DNA, 15 bp, Homo sapiens
gggagctgaaaaaga

SEQ ID NO: 547261 - DNA, 15 bp, Homo sapiens
ggagctgaaaaagac

SEQ ID NO: 547262 - DNA, 15 bp, Homo sapiens
gagctgaaaaagaca

SEQ ID NO: 547263 - DNA, 15 bp, Homo sapiens
agctgaaaaagacaa

SEQ ID NO: 547264 - DNA, 15 bp, Homo sapiens
gctgaaaaagacaaa

SEQ ID NO: 547265 - DNA, 15 bp, Homo sapiens
ctgaaaaagacaaac

SEQ ID NO: 547266 - DNA, 15 bp, Homo sapiens
tgaaaaagacaaacg

SEQ ID NO: 547267 - DNA, 15 bp, Homo sapiens
gaaaaagacaaacgc

SEQ ID NO: 547268 - DNA, 15 bp, Homo sapiens
aaaaagacaaacgct

SEQ ID NO: 547269 - DNA, 15 bp, Homo sapiens
aaaagacaaacgctg

SEQ ID NO: 547270 - DNA, 15 bp, Homo sapiens
aaagacaaacgctga

SEQ ID NO: 547271 - DNA, 15 bp, Homo sapiens
aagacaaacgctgaa

SEQ ID NO: 547272 - DNA, 15 bp, Homo sapiens
agacaaacgctgaag

SEQ ID NO: 547273 - DNA, 15 bp, Homo sapiens
gacaaacgctgaagc

SEQ ID NO: 547274 - DNA, 15 bp, Homo sapiens
acaaacgctgaagca

SEQ ID NO: 547275 - DNA, 15 bp, Homo sapiens
caaacgctgaagcag

SEQ ID NO: 547276 - DNA, 15 bp, Homo sapiens
aaacgctgaagcaga

SEQ ID NO: 547277 - DNA, 15 bp, Homo sapiens
aacgctgaagcagaa

SEQ ID NO: 547278 - DNA, 15 bp, Homo sapiens
acgctgaagcagaaa

SEQ ID NO: 547279 - DNA, 15 bp, Homo sapiens
cgctgaagcagaaag

SEQ ID NO: 547280 - DNA, 15 bp, Homo sapiens
gctgaagcagaaagg

SEQ ID NO: 547281 - DNA, 15 bp, Homo sapiens
ctgaagcagaaagga

SEQ ID NO: 547282 - DNA, 15 bp, Homo sapiens
tgaagcagaaaggag

SEQ ID NO: 547283 - DNA, 15 bp, Homo sapiens
gaagcagaaaggagg

SEQ ID NO: 547284 - DNA, 15 bp, Homo sapiens
aagcagaaaggaggg

SEQ ID NO: 547285 - DNA, 15 bp, Homo sapiens
agcagaaaggagggt

SEQ ID NO: 547286 - DNA, 15 bp, Homo sapiens
gcagaaaggagggtt

SEQ ID NO: 547287 - DNA, 15 bp, Homo sapiens
cagaaaggagggttt

SEQ ID NO: 547288 - DNA, 15 bp, Homo sapiens
agaaaggagggtttt

SEQ ID NO: 547289 - DNA, 15 bp, Homo sapiens
gaaaggagggttttt

SEQ ID NO: 547290 - DNA, 15 bp, Homo sapiens
aaaggagggttttta

SEQ ID NO: 547291 - DNA, 15 bp, Homo sapiens
aaggagggtttttac

SEQ ID NO: 547292 - DNA, 15 bp, Homo sapiens
aggagggtttttaca

SEQ ID NO: 547293 - DNA, 15 bp, Homo sapiens
ggagggtttttacaa

SEQ ID NO: 547294 - DNA, 15 bp, Homo sapiens
gagggtttttacaaa

SEQ ID NO: 547295 - DNA, 15 bp, Homo sapiens
agggtttttacaaac

SEQ ID NO: 547296 - DNA, 15 bp, Homo sapiens
gggtttttacaaaca

SEQ ID NO: 547297 - DNA, 15 bp, Homo sapiens
ggtttttacaaacaa

SEQ ID NO: 547298 - DNA, 15 bp, Homo sapiens
gtttttacaaacaag

SEQ ID NO: 547299 - DNA, 15 bp, Homo sapiens
tttttacaaacaagg

SEQ ID NO: 547300 - DNA, 15 bp, Homo sapiens
ttttacaaacaaggc

SEQ ID NO: 547301 - DNA, 15 bp, Homo sapiens
tttacaaacaaggct

SEQ ID NO: 547302 - DNA, 15 bp, Homo sapiens
ttacaaacaaggctt

SEQ ID NO: 547303 - DNA, 15 bp, Homo sapiens
tacaaacaaggcttg

SEQ ID NO: 547304 - DNA, 15 bp, Homo sapiens
acaaacaaggcttga

SEQ ID NO: 547305 - DNA, 15 bp, Homo sapiens
caaacaaggcttgaa

SEQ ID NO: 547306 - DNA, 15 bp, Homo sapiens
aaacaaggcttgaat

SEQ ID NO: 547307 - DNA, 15 bp, Homo sapiens
aacaaggcttgaatg

SEQ ID NO: 547308 - DNA, 15 bp, Homo sapiens
acaaggcttgaatga

SEQ ID NO: 547309 - DNA, 15 bp, Homo sapiens
caaggcttgaatgat

SEQ ID NO: 547310 - DNA, 15 bp, Homo sapiens
aaggcttgaatgata

SEQ ID NO: 547311 - DNA, 15 bp, Homo sapiens
aggcttgaatgatag

SEQ ID NO: 547312 - DNA, 15 bp, Homo sapiens
ggcttgaatgataga

SEQ ID NO: 547313 - DNA, 15 bp, Homo sapiens
gcttgaatgatagac

SEQ ID NO: 547314 - DNA, 15 bp, Homo sapiens
cttgaatgatagaca

SEQ ID NO: 547315 - DNA, 15 bp, Homo sapiens
ttgaatgatagacac

SEQ ID NO: 547316 - DNA, 15 bp, Homo sapiens
tgaatgatagacaca

SEQ ID NO: 547317 - DNA, 15 bp, Homo sapiens
gaatgatagacacat

SEQ ID NO: 547318 - DNA, 15 bp, Homo sapiens
aatgatagacacata

SEQ ID NO: 547319 - DNA, 15 bp, Homo sapiens
atgatagacacatat

SEQ ID NO: 547320 - DNA, 15 bp, Homo sapiens
tgatagacacatatg

SEQ ID NO: 547321 - DNA, 15 bp, Homo sapiens
gatagacacatatgg

SEQ ID NO: 547322 - DNA, 15 bp, Homo sapiens
atagacacatatggg

SEQ ID NO: 547323 - DNA, 15 bp, Homo sapiens
tagacacatatgggg

SEQ ID NO: 547324 - DNA, 15 bp, Homo sapiens
agacacatatggggc

SEQ ID NO: 547325 - DNA, 15 bp, Homo sapiens
gacacatatggggca

SEQ ID NO: 547326 - DNA, 15 bp, Homo sapiens
acacatatggggcat

SEQ ID NO: 547327 - DNA, 15 bp, Homo sapiens
cacatatggggcatg

SEQ ID NO: 547328 - DNA, 15 bp, Homo sapiens
acatatggggcatgc

SEQ ID NO: 547329 - DNA, 15 bp, Homo sapiens
catatggggcatgcg

SEQ ID NO: 547330 - DNA, 15 bp, Homo sapiens
atatggggcatgcgt

SEQ ID NO: 547331 - DNA, 15 bp, Homo sapiens
tatggggcatgcgtc

SEQ ID NO: 547332 - DNA, 15 bp, Homo sapiens
atggggcatgcgtct

SEQ ID NO: 547333 - DNA, 15 bp, Homo sapiens
tggggcatgcgtctc

SEQ ID NO: 547334 - DNA, 15 bp, Homo sapiens
ggggcatgcgtctcc

SEQ ID NO: 547335 - DNA, 15 bp, Homo sapiens
gggcatgcgtctccc

SEQ ID NO: 547336 - DNA, 15 bp, Homo sapiens
ggcatgcgtctccca

SEQ ID NO: 547337 - DNA, 15 bp, Homo sapiens
gcatgcgtctcccat

SEQ ID NO: 547338 - DNA, 15 bp, Homo sapiens
catgcgtctcccatc

SEQ ID NO: 547339 - DNA, 15 bp, Homo sapiens
atgcgtctcccatca

SEQ ID NO: 547340 - DNA, 15 bp, Homo sapiens
tgcgtctcccatcac

SEQ ID NO: 547341 - DNA, 15 bp, Homo sapiens
gcgtctcccatcaca

SEQ ID NO: 547342 - DNA, 15 bp, Homo sapiens
cgtctcccatcacag

SEQ ID NO: 547343 - DNA, 15 bp, Homo sapiens
gtctcccatcacagc

SEQ ID NO: 547344 - DNA, 15 bp, Homo sapiens
tctcccatcacagcc

SEQ ID NO: 547345 - DNA, 15 bp, Homo sapiens
ctcccatcacagccc

SEQ ID NO: 547346 - DNA, 15 bp, Homo sapiens
tcccatcacagcccc

SEQ ID NO: 547347 - DNA, 15 bp, Homo sapiens
cccatcacagccccc

SEQ ID NO: 547348 - DNA, 15 bp, Homo sapiens
ccatcacagccccca

SEQ ID NO: 547349 - DNA, 15 bp, Homo sapiens
catcacagcccccac

SEQ ID NO: 547350 - DNA, 15 bp, Homo sapiens
atcacagcccccacc

SEQ ID NO: 547351 - DNA, 15 bp, Homo sapiens
tcacagcccccacca

SEQ ID NO: 547352 - DNA, 15 bp, Homo sapiens
cacagcccccaccac

SEQ ID NO: 547353 - DNA, 15 bp, Homo sapiens
acagcccccaccaca

SEQ ID NO: 547354 - DNA, 15 bp, Homo sapiens
cagcccccaccacac

SEQ ID NO: 547355 - DNA, 15 bp, Homo sapiens
agcccccaccacacc

SEQ ID NO: 547356 - DNA, 15 bp, Homo sapiens
gcccccaccacaccg

SEQ ID NO: 547357 - DNA, 15 bp, Homo sapiens
cccccaccacaccgg

SEQ ID NO: 547358 - DNA, 15 bp, Homo sapiens
ccccaccacaccgga

SEQ ID NO: 547359 - DNA, 15 bp, Homo sapiens
cccaccacaccggaa

SEQ ID NO: 547360 - DNA, 15 bp, Homo sapiens
ccaccacaccggaac

SEQ ID NO: 547361 - DNA, 15 bp, Homo sapiens
caccacaccggaaca

SEQ ID NO: 547362 - DNA, 15 bp, Homo sapiens
accacaccggaacac

SEQ ID NO: 547363 - DNA, 15 bp, Homo sapiens
ccacaccggaacacg

SEQ ID NO: 547364 - DNA, 15 bp, Homo sapiens
cacaccggaacacga

SEQ ID NO: 547365 - DNA, 15 bp, Homo sapiens
acaccggaacacgag

SEQ ID NO: 547366 - DNA, 15 bp, Homo sapiens
caccggaacacgagc

SEQ ID NO: 547367 - DNA, 15 bp, Homo sapiens
accggaacacgagct

SEQ ID NO: 547368 - DNA, 15 bp, Homo sapiens
ccggaacacgagctc

SEQ ID NO: 547369 - DNA, 15 bp, Homo sapiens
cggaacacgagctct

SEQ ID NO: 547370 - DNA, 15 bp, Homo sapiens
ggaacacgagctctg

SEQ ID NO: 547371 - DNA, 15 bp, Homo sapiens
gaacacgagctctgt

SEQ ID NO: 547372 - DNA, 15 bp, Homo sapiens
aacacgagctctgtt

SEQ ID NO: 547373 - DNA, 15 bp, Homo sapiens
acacgagctctgttc

SEQ ID NO: 547374 - DNA, 15 bp, Homo sapiens
cacgagctctgttca

SEQ ID NO: 547375 - DNA, 15 bp, Homo sapiens
acgagctctgttcaa

SEQ ID NO: 547376 - DNA, 15 bp, Homo sapiens
cgagctctgttcaac

SEQ ID NO: 547377 - DNA, 15 bp, Homo sapiens
gagctctgttcaaca

SEQ ID NO: 547378 - DNA, 15 bp, Homo sapiens
agctctgttcaacat

SEQ ID NO: 547379 - DNA, 15 bp, Homo sapiens
gctctgttcaacatg

SEQ ID NO: 547380 - DNA, 15 bp, Homo sapiens
ctctgttcaacatgg

SEQ ID NO: 547381 - DNA, 15 bp, Homo sapiens
tctgttcaacatggt

SEQ ID NO: 547382 - DNA, 15 bp, Homo sapiens
ctgttcaacatggtc

SEQ ID NO: 547383 - DNA, 15 bp, Homo sapiens
tgttcaacatggtcc

SEQ ID NO: 547384 - DNA, 15 bp, Homo sapiens
gttcaacatggtcct

SEQ ID NO: 547385 - DNA, 15 bp, Homo sapiens
ttcaacatggtcctc

SEQ ID NO: 547386 - DNA, 15 bp, Homo sapiens
tcaacatggtcctcc

SEQ ID NO: 547387 - DNA, 15 bp, Homo sapiens
caacatggtcctcct

SEQ ID NO: 547388 - DNA, 15 bp, Homo sapiens
aacatggtcctcctc

SEQ ID NO: 547389 - DNA, 15 bp, Homo sapiens
acatggtcctcctct

SEQ ID NO: 547390 - DNA, 15 bp, Homo sapiens
catggtcctcctctc

SEQ ID NO: 547391 - DNA, 15 bp, Homo sapiens
atggtcctcctctct

SEQ ID NO: 547392 - DNA, 15 bp, Homo sapiens
tggtcctcctctcta

SEQ ID NO: 547393 - DNA, 15 bp, Homo sapiens
ggtcctcctctctaa

SEQ ID NO: 547394 - DNA, 15 bp, Homo sapiens
gtcctcctctctaat

SEQ ID NO: 547395 - DNA, 15 bp, Homo sapiens
tcctcctctctaatg

SEQ ID NO: 547396 - DNA, 15 bp, Homo sapiens
cctcctctctaatgt

SEQ ID NO: 547397 - DNA, 15 bp, Homo sapiens
ctcctctctaatgtc

SEQ ID NO: 547398 - DNA, 15 bp, Homo sapiens
tcctctctaatgtct

SEQ ID NO: 547399 - DNA, 15 bp, Homo sapiens
cctctctaatgtcta

SEQ ID NO: 547400 - DNA, 15 bp, Homo sapiens
ctctctaatgtctat

SEQ ID NO: 547401 - DNA, 15 bp, Homo sapiens
tctctaatgtctatg

SEQ ID NO: 547402 - DNA, 15 bp, Homo sapiens
ctctaatgtctatga

SEQ ID NO: 547403 - DNA, 15 bp, Homo sapiens
tctaatgtctatgag

SEQ ID NO: 547404 - DNA, 15 bp, Homo sapiens
ctaatgtctatgagt

SEQ ID NO: 547405 - DNA, 15 bp, Homo sapiens
taatgtctatgagtt

SEQ ID NO: 547406 - DNA, 15 bp, Homo sapiens
aatgtctatgagttc

SEQ ID NO: 547407 - DNA, 15 bp, Homo sapiens
atgtctatgagttct

SEQ ID NO: 547408 - DNA, 15 bp, Homo sapiens
tgtctatgagttcta

SEQ ID NO: 547409 - DNA, 15 bp, Homo sapiens
gtctatgagttctag

SEQ ID NO: 547410 - DNA, 15 bp, Homo sapiens
tctatgagttctaga

SEQ ID NO: 547411 - DNA, 15 bp, Homo sapiens
ctatgagttctagaa

SEQ ID NO: 547412 - DNA, 15 bp, Homo sapiens
tatgagttctagaac

SEQ ID NO: 547413 - DNA, 15 bp, Homo sapiens
atgagttctagaact

SEQ ID NO: 547414 - DNA, 15 bp, Homo sapiens
tgagttctagaactt

SEQ ID NO: 547415 - DNA, 15 bp, Homo sapiens
gagttctagaacttg

SEQ ID NO: 547416 - DNA, 15 bp, Homo sapiens
agttctagaacttga

SEQ ID NO: 547417 - DNA, 15 bp, Homo sapiens
gttctagaacttgaa

SEQ ID NO: 547418 - DNA, 15 bp, Homo sapiens
ttctagaacttgaac

SEQ ID NO: 547419 - DNA, 15 bp, Homo sapiens
tctagaacttgaaca

SEQ ID NO: 547420 - DNA, 15 bp, Homo sapiens
ctagaacttgaacaa

SEQ ID NO: 547421 - DNA, 15 bp, Homo sapiens
tagaacttgaacaaa

SEQ ID NO: 547422 - DNA, 15 bp, Homo sapiens
agaacttgaacaaat

SEQ ID NO: 547423 - DNA, 15 bp, Homo sapiens
gaacttgaacaaatc

SEQ ID NO: 547424 - DNA, 15 bp, Homo sapiens
aacttgaacaaatct

SEQ ID NO: 547425 - DNA, 15 bp, Homo sapiens
acttgaacaaatctt

SEQ ID NO: 547426 - DNA, 15 bp, Homo sapiens
cttgaacaaatcttt

SEQ ID NO: 547427 - DNA, 15 bp, Homo sapiens
ttgaacaaatctttg

SEQ ID NO: 547428 - DNA, 15 bp, Homo sapiens
tgaacaaatctttgt

SEQ ID NO: 547429 - DNA, 15 bp, Homo sapiens
gaacaaatctttgtc

SEQ ID NO: 547430 - DNA, 15 bp, Homo sapiens
aacaaatctttgtca

SEQ ID NO: 547431 - DNA, 15 bp, Homo sapiens
acaaatctttgtcaa

SEQ ID NO: 547432 - DNA, 15 bp, Homo sapiens
caaatctttgtcaag

SEQ ID NO: 547433 - DNA, 15 bp, Homo sapiens
aaatctttgtcaaga

SEQ ID NO: 547434 - DNA, 15 bp, Homo sapiens
aatctttgtcaagaa

SEQ ID NO: 547435 - DNA, 15 bp, Homo sapiens
atctttgtcaagaat

SEQ ID NO: 547436 - DNA, 15 bp, Homo sapiens
tctttgtcaagaatg

SEQ ID NO: 547437 - DNA, 15 bp, Homo sapiens
ctttgtcaagaatgt

SEQ ID NO: 547438 - DNA, 15 bp, Homo sapiens
tttgtcaagaatgta

SEQ ID NO: 547439 - DNA, 15 bp, Homo sapiens
ttgtcaagaatgtag

SEQ ID NO: 547440 - DNA, 15 bp, Homo sapiens
tgtcaagaatgtagt

SEQ ID NO: 547441 - DNA, 15 bp, Homo sapiens
gtcaagaatgtagtc

SEQ ID NO: 547442 - DNA, 15 bp, Homo sapiens
tcaagaatgtagtcc

SEQ ID NO: 547443 - DNA, 15 bp, Homo sapiens
caagaatgtagtcca

SEQ ID NO: 547444 - DNA, 15 bp, Homo sapiens
aagaatgtagtccag

SEQ ID NO: 547445 - DNA, 15 bp, Homo sapiens
agaatgtagtccagc

SEQ ID NO: 547446 - DNA, 15 bp, Homo sapiens
gaatgtagtccagct

SEQ ID NO: 547447 - DNA, 15 bp, Homo sapiens
aatgtagtccagctc

SEQ ID NO: 547448 - DNA, 15 bp, Homo sapiens
atgtagtccagctct

SEQ ID NO: 547449 - DNA, 15 bp, Homo sapiens
tgtagtccagctctg

SEQ ID NO: 547450 - DNA, 15 bp, Homo sapiens
gtagtccagctctgt

SEQ ID NO: 547451 - DNA, 15 bp, Homo sapiens
tagtccagctctgtc

SEQ ID NO: 547452 - DNA, 15 bp, Homo sapiens
agtccagctctgtct

SEQ ID NO: 547453 - DNA, 15 bp, Homo sapiens
gtccagctctgtctc

SEQ ID NO: 547454 - DNA, 15 bp, Homo sapiens
tccagctctgtctcc

SEQ ID NO: 547455 - DNA, 15 bp, Homo sapiens
ccagctctgtctcca

SEQ ID NO: 547456 - DNA, 15 bp, Homo sapiens
cagctctgtctccaa

SEQ ID NO: 547457 - DNA, 15 bp, Homo sapiens
agctctgtctccaaa

SEQ ID NO: 547458 - DNA, 15 bp, Homo sapiens
gctctgtctccaaac

SEQ ID NO: 547459 - DNA, 15 bp, Homo sapiens
ctctgtctccaaacc

SEQ ID NO: 547460 - DNA, 15 bp, Homo sapiens
tctgtctccaaacca

SEQ ID NO: 547461 - DNA, 15 bp, Homo sapiens
ctgtctccaaaccat

SEQ ID NO: 547462 - DNA, 15 bp, Homo sapiens
tgtctccaaaccatg

SEQ ID NO: 547463 - DNA, 15 bp, Homo sapiens
gtctccaaaccatga

SEQ ID NO: 547464 - DNA, 15 bp, Homo sapiens
tctccaaaccatgaa

SEQ ID NO: 547465 - DNA, 15 bp, Homo sapiens
ctccaaaccatgaac

SEQ ID NO: 547466 - DNA, 15 bp, Homo sapiens
tccaaaccatgaact

SEQ ID NO: 547467 - DNA, 15 bp, Homo sapiens
ccaaaccatgaactc

SEQ ID NO: 547468 - DNA, 15 bp, Homo sapiens
caaaccatgaactca

SEQ ID NO: 547469 - DNA, 15 bp, Homo sapiens
aaaccatgaactcat

SEQ ID NO: 547470 - DNA, 15 bp, Homo sapiens
aaccatgaactcatc

SEQ ID NO: 547471 - DNA, 15 bp, Homo sapiens
accatgaactcatct

SEQ ID NO: 547472 - DNA, 15 bp, Homo sapiens
ccatgaactcatctg

SEQ ID NO: 547473 - DNA, 15 bp, Homo sapiens
catgaactcatctgt

SEQ ID NO: 547474 - DNA, 15 bp, Homo sapiens
atgaactcatctgtg

SEQ ID NO: 547475 - DNA, 15 bp, Homo sapiens
tgaactcatctgtga

SEQ ID NO: 547476 - DNA, 15 bp, Homo sapiens
gaactcatctgtgaa

SEQ ID NO: 547477 - DNA, 15 bp, Homo sapiens
aactcatctgtgaac

SEQ ID NO: 547478 - DNA, 15 bp, Homo sapiens
actcatctgtgaaca

SEQ ID NO: 547479 - DNA, 15 bp, Homo sapiens
ctcatctgtgaacaa

SEQ ID NO: 547480 - DNA, 15 bp, Homo sapiens
tcatctgtgaacaag

SEQ ID NO: 547481 - DNA, 15 bp, Homo sapiens
catctgtgaacaaga

SEQ ID NO: 547482 - DNA, 15 bp, Homo sapiens
atctgtgaacaagac

SEQ ID NO: 547483 - DNA, 15 bp, Homo sapiens
tctgtgaacaagaca

SEQ ID NO: 547484 - DNA, 15 bp, Homo sapiens
ctgtgaacaagacat

SEQ ID NO: 547485 - DNA, 15 bp, Homo sapiens
tgtgaacaagacatt

SEQ ID NO: 547486 - DNA, 15 bp, Homo sapiens
gtgaacaagacattt

SEQ ID NO: 547487 - DNA, 15 bp, Homo sapiens
tgaacaagacatttc

SEQ ID NO: 547488 - DNA, 15 bp, Homo sapiens
gaacaagacatttct

SEQ ID NO: 547489 - DNA, 15 bp, Homo sapiens
aacaagacatttcta

SEQ ID NO: 547490 - DNA, 15 bp, Homo sapiens
acaagacatttctat

SEQ ID NO: 547491 - DNA, 15 bp, Homo sapiens
caagacatttctatt

SEQ ID NO: 547492 - DNA, 15 bp, Homo sapiens
aagacatttctattt

SEQ ID NO: 547493 - DNA, 15 bp, Homo sapiens
agacatttctatttt

SEQ ID NO: 547494 - DNA, 15 bp, Homo sapiens
gacatttctattttc

SEQ ID NO: 547495 - DNA, 15 bp, Homo sapiens
acatttctattttcc

SEQ ID NO: 547496 - DNA, 15 bp, Homo sapiens
catttctattttcct

SEQ ID NO: 547497 - DNA, 15 bp, Homo sapiens
atttctattttcctt

SEQ ID NO: 547498 - DNA, 15 bp, Homo sapiens
tttctattttccttt

SEQ ID NO: 547499 - DNA, 15 bp, Homo sapiens
ttctattttccttta

SEQ ID NO: 547500 - DNA, 15 bp, Homo sapiens
tctattttcctttat

SEQ ID NO: 547501 - DNA, 15 bp, Homo sapiens
ctattttcctttatc

SEQ ID NO: 547502 - DNA, 15 bp, Homo sapiens
tattttcctttatct

SEQ ID NO: 547503 - DNA, 15 bp, Homo sapiens
attttcctttatctt

SEQ ID NO: 547504 - DNA, 15 bp, Homo sapiens
ttttcctttatcttt

SEQ ID NO: 547505 - DNA, 15 bp, Homo sapiens
tttcctttatcttta

SEQ ID NO: 547506 - DNA, 15 bp, Homo sapiens
ttcctttatctttaa

SEQ ID NO: 547507 - DNA, 15 bp, Homo sapiens
tcctttatctttaaa

SEQ ID NO: 547508 - DNA, 15 bp, Homo sapiens
cctttatctttaaaa

SEQ ID NO: 547509 - DNA, 15 bp, Homo sapiens
ctttatctttaaaaa

SEQ ID NO: 547510 - DNA, 15 bp, Homo sapiens
tttatctttaaaaat

SEQ ID NO: 547511 - DNA, 15 bp, Homo sapiens
ttatctttaaaaatt

SEQ ID NO: 547512 - DNA, 15 bp, Homo sapiens
tatctttaaaaattt

SEQ ID NO: 547513 - DNA, 15 bp, Homo sapiens
atctttaaaaattta

SEQ ID NO: 547514 - DNA, 15 bp, Homo sapiens
tctttaaaaatttat

SEQ ID NO: 547515 - DNA, 15 bp, Homo sapiens
ctttaaaaatttatt

SEQ ID NO: 547516 - DNA, 15 bp, Homo sapiens
tttaaaaatttattt

SEQ ID NO: 547517 - DNA, 15 bp, Homo sapiens
ttaaaaatttatttt

SEQ ID NO: 547518 - DNA, 15 bp, Homo sapiens
taaaaatttatttta

SEQ ID NO: 547519 - DNA, 15 bp, Homo sapiens
aaaaatttattttaa

SEQ ID NO: 547520 - DNA, 15 bp, Homo sapiens
aaaatttattttaaa

SEQ ID NO: 547521 - DNA, 15 bp, Homo sapiens
aaatttattttaaat

SEQ ID NO: 547522 - DNA, 15 bp, Homo sapiens
aatttattttaaatg

SEQ ID NO: 547523 - DNA, 15 bp, Homo sapiens
atttattttaaatga

SEQ ID NO: 547524 - DNA, 15 bp, Homo sapiens
tttattttaaatgaa

SEQ ID NO: 547525 - DNA, 15 bp, Homo sapiens
ttattttaaatgaaa

SEQ ID NO: 547526 - DNA, 15 bp, Homo sapiens
tattttaaatgaaat

SEQ ID NO: 547527 - DNA, 15 bp, Homo sapiens
attttaaatgaaata

SEQ ID NO: 547528 - DNA, 15 bp, Homo sapiens
ttttaaatgaaataa

SEQ ID NO: 547529 - DNA, 15 bp, Homo sapiens
tttaaatgaaataaa

SEQ ID NO: 547530 - DNA, 15 bp, Homo sapiens
ttaaatgaaataaat

SEQ ID NO: 547531 - DNA, 15 bp, Homo sapiens
taaatgaaataaatg

SEQ ID NO: 547532 - DNA, 15 bp, Homo sapiens
aaatgaaataaatga

SEQ ID NO: 547533 - DNA, 15 bp, Homo sapiens
aatgaaataaatgat

SEQ ID NO: 547534 - DNA, 15 bp, Homo sapiens
atgaaataaatgatg

SEQ ID NO: 547535 - DNA, 15 bp, Homo sapiens
tgaaataaatgatgc

SEQ ID NO: 547536 - DNA, 15 bp, Homo sapiens
gaaataaatgatgca

SEQ ID NO: 547537 - DNA, 15 bp, Homo sapiens
aaataaatgatgcat

SEQ ID NO: 547538 - DNA, 15 bp, Homo sapiens
aataaatgatgcatg

SEQ ID NO: 547539 - DNA, 15 bp, Homo sapiens
ataaatgatgcatga

SEQ ID NO: 547540 - DNA, 15 bp, Homo sapiens
taaatgatgcatgaa

SEQ ID NO: 547541 - DNA, 15 bp, Homo sapiens
aaatgatgcatgaat

SEQ ID NO: 547542 - DNA, 15 bp, Homo sapiens
aatgatgcatgaatg

SEQ ID NO: 547543 - DNA, 15 bp, Homo sapiens
atgatgcatgaatgt

SEQ ID NO: 547544 - DNA, 15 bp, Homo sapiens
tgatgcatgaatgta

SEQ ID NO: 547545 - DNA, 15 bp, Homo sapiens
gatgcatgaatgtat

SEQ ID NO: 547546 - DNA, 15 bp, Homo sapiens
atgcatgaatgtatt

SEQ ID NO: 547547 - DNA, 15 bp, Homo sapiens
tgcatgaatgtattc

SEQ ID NO: 547548 - DNA, 15 bp, Homo sapiens
gcatgaatgtattct

SEQ ID NO: 547549 - DNA, 15 bp, Homo sapiens
catgaatgtattctg

SEQ ID NO: 547550 - DNA, 15 bp, Homo sapiens
atgaatgtattctgt

SEQ ID NO: 547551 - DNA, 15 bp, Homo sapiens
tgaatgtattctgta

SEQ ID NO: 547552 - DNA, 15 bp, Homo sapiens
gaatgtattctgtag

SEQ ID NO: 547553 - DNA, 15 bp, Homo sapiens
aatgtattctgtaga

SEQ ID NO: 547554 - DNA, 15 bp, Homo sapiens
atgtattctgtagaa

SEQ ID NO: 547555 - DNA, 15 bp, Homo sapiens
tgtattctgtagaaa

SEQ ID NO: 547556 - DNA, 15 bp, Homo sapiens
gtattctgtagaaaa

SEQ ID NO: 547557 - DNA, 15 bp, Homo sapiens
tattctgtagaaaat

SEQ ID NO: 547558 - DNA, 15 bp, Homo sapiens
attctgtagaaaatt

SEQ ID NO: 547559 - DNA, 15 bp, Homo sapiens
ttctgtagaaaattt

SEQ ID NO: 547560 - DNA, 15 bp, Homo sapiens
tctgtagaaaattta

SEQ ID NO: 547561 - DNA, 15 bp, Homo sapiens
ctgtagaaaatttaa

SEQ ID NO: 547562 - DNA, 15 bp, Homo sapiens
tgtagaaaatttaaa

SEQ ID NO: 547563 - DNA, 15 bp, Homo sapiens
gtagaaaatttaaat

SEQ ID NO: 547564 - DNA, 15 bp, Homo sapiens
tagaaaatttaaata

SEQ ID NO: 547565 - DNA, 15 bp, Homo sapiens
agaaaatttaaatag

SEQ ID NO: 547566 - DNA, 15 bp, Homo sapiens
gaaaatttaaataga

SEQ ID NO: 547567 - DNA, 15 bp, Homo sapiens
aaaatttaaatagag

SEQ ID NO: 547568 - DNA, 15 bp, Homo sapiens
aaatttaaatagaga

SEQ ID NO: 547569 - DNA, 15 bp, Homo sapiens
aatttaaatagagat

SEQ ID NO: 547570 - DNA, 15 bp, Homo sapiens
atttaaatagagatc

SEQ ID NO: 547571 - DNA, 15 bp, Homo sapiens
tttaaatagagatcg

SEQ ID NO: 547572 - DNA, 15 bp, Homo sapiens
ttaaatagagatcga

SEQ ID NO: 547573 - DNA, 15 bp, Homo sapiens
taaatagagatcgag

SEQ ID NO: 547574 - DNA, 15 bp, Homo sapiens
aaatagagatcgagg

SEQ ID NO: 547575 - DNA, 15 bp, Homo sapiens
aatagagatcgagga

SEQ ID NO: 547576 - DNA, 15 bp, Homo sapiens
atagagatcgaggaa

SEQ ID NO: 547577 - DNA, 15 bp, Homo sapiens
tagagatcgaggaaa

SEQ ID NO: 547578 - DNA, 15 bp, Homo sapiens
agagatcgaggaaaa

SEQ ID NO: 547579 - DNA, 15 bp, Homo sapiens
gagatcgaggaaaag

SEQ ID NO: 547580 - DNA, 15 bp, Homo sapiens
agatcgaggaaaagc

SEQ ID NO: 547581 - DNA, 15 bp, Homo sapiens
gatcgaggaaaagcc

SEQ ID NO: 547582 - DNA, 15 bp, Homo sapiens
atcgaggaaaagccc

SEQ ID NO: 547583 - DNA, 15 bp, Homo sapiens
tcgaggaaaagccct

SEQ ID NO: 547584 - DNA, 15 bp, Homo sapiens
cgaggaaaagccctc

SEQ ID NO: 547585 - DNA, 15 bp, Homo sapiens
gaggaaaagccctct

SEQ ID NO: 547586 - DNA, 15 bp, Homo sapiens
aggaaaagccctctt

SEQ ID NO: 547587 - DNA, 15 bp, Homo sapiens
ggaaaagccctcttg

SEQ ID NO: 547588 - DNA, 15 bp, Homo sapiens
gaaaagccctcttgc

SEQ ID NO: 547589 - DNA, 15 bp, Homo sapiens
aaaagccctcttgcc

SEQ ID NO: 547590 - DNA, 15 bp, Homo sapiens
aaagccctcttgcct

SEQ ID NO: 547591 - DNA, 15 bp, Homo sapiens
aagccctcttgcctc

SEQ ID NO: 547592 - DNA, 15 bp, Homo sapiens
agccctcttgcctca

SEQ ID NO: 547593 - DNA, 15 bp, Homo sapiens
gccctcttgcctcag

SEQ ID NO: 547594 - DNA, 15 bp, Homo sapiens
ccctcttgcctcagg

SEQ ID NO: 547595 - DNA, 15 bp, Homo sapiens
cctcttgcctcaggg

SEQ ID NO: 547596 - DNA, 15 bp, Homo sapiens
ctcttgcctcagggt

SEQ ID NO: 547597 - DNA, 15 bp, Homo sapiens
tcttgcctcagggta

SEQ ID NO: 547598 - DNA, 15 bp, Homo sapiens
cttgcctcagggtac

SEQ ID NO: 547599 - DNA, 15 bp, Homo sapiens
ttgcctcagggtacc

SEQ ID NO: 547600 - DNA, 15 bp, Homo sapiens
tgcctcagggtaccc

SEQ ID NO: 547601 - DNA, 15 bp, Homo sapiens
gcctcagggtacccc

SEQ ID NO: 547602 - DNA, 15 bp, Homo sapiens
cctcagggtacccca

SEQ ID NO: 547603 - DNA, 15 bp, Homo sapiens
ctcagggtaccccat

SEQ ID NO: 547604 - DNA, 15 bp, Homo sapiens
tcagggtaccccata

SEQ ID NO: 547605 - DNA, 15 bp, Homo sapiens
cagggtaccccataa

SEQ ID NO: 547606 - DNA, 15 bp, Homo sapiens
agggtaccccataat

SEQ ID NO: 547607 - DNA, 15 bp, Homo sapiens
gggtaccccataatc

SEQ ID NO: 547608 - DNA, 15 bp, Homo sapiens
ggtaccccataatct

SEQ ID NO: 547609 - DNA, 15 bp, Homo sapiens
gtaccccataatctc

SEQ ID NO: 547610 - DNA, 15 bp, Homo sapiens
taccccataatctca

SEQ ID NO: 547611 - DNA, 15 bp, Homo sapiens
accccataatctcac

SEQ ID NO: 547612 - DNA, 15 bp, Homo sapiens
ccccataatctcact

SEQ ID NO: 547613 - DNA, 15 bp, Homo sapiens
cccataatctcactt

SEQ ID NO: 547614 - DNA, 15 bp, Homo sapiens
ccataatctcacttc

SEQ ID NO: 547615 - DNA, 15 bp, Homo sapiens
cataatctcacttcc

SEQ ID NO: 547616 - DNA, 15 bp, Homo sapiens
ataatctcacttccc

SEQ ID NO: 547617 - DNA, 15 bp, Homo sapiens
taatctcacttccca

SEQ ID NO: 547618 - DNA, 15 bp, Homo sapiens
aatctcacttcccat

SEQ ID NO: 547619 - DNA, 15 bp, Homo sapiens
atctcacttcccatc

SEQ ID NO: 547620 - DNA, 15 bp, Homo sapiens
tctcacttcccatcc

SEQ ID NO: 547621 - DNA, 15 bp, Homo sapiens
ctcacttcccatcct

SEQ ID NO: 547622 - DNA, 15 bp, Homo sapiens
tcacttcccatccta

SEQ ID NO: 547623 - DNA, 15 bp, Homo sapiens
cacttcccatcctag

SEQ ID NO: 547624 - DNA, 15 bp, Homo sapiens
acttcccatcctaga

SEQ ID NO: 547625 - DNA, 15 bp, Homo sapiens
cttcccatcctagaa

SEQ ID NO: 547626 - DNA, 15 bp, Homo sapiens
ttcccatcctagaaa

SEQ ID NO: 547627 - DNA, 15 bp, Homo sapiens
tcccatcctagaaat

SEQ ID NO: 547628 - DNA, 15 bp, Homo sapiens
cccatcctagaaatg

SEQ ID NO: 547629 - DNA, 15 bp, Homo sapiens
ccatcctagaaatgg

SEQ ID NO: 547630 - DNA, 15 bp, Homo sapiens
catcctagaaatggc

SEQ ID NO: 547631 - DNA, 15 bp, Homo sapiens
atcctagaaatggcc

SEQ ID NO: 547632 - DNA, 15 bp, Homo sapiens
tcctagaaatggcca

SEQ ID NO: 547633 - DNA, 15 bp, Homo sapiens
cctagaaatggccat

SEQ ID NO: 547634 - DNA, 15 bp, Homo sapiens
ctagaaatggccatc

SEQ ID NO: 547635 - DNA, 15 bp, Homo sapiens
tagaaatggccatcc

SEQ ID NO: 547636 - DNA, 15 bp, Homo sapiens
agaaatggccatcca

SEQ ID NO: 547637 - DNA, 15 bp, Homo sapiens
gaaatggccatccag

SEQ ID NO: 547638 - DNA, 15 bp, Homo sapiens
aaatggccatccagg

SEQ ID NO: 547639 - DNA, 15 bp, Homo sapiens
aatggccatccaggg

SEQ ID NO: 547640 - DNA, 15 bp, Homo sapiens
atggccatccagggc

SEQ ID NO: 547641 - DNA, 15 bp, Homo sapiens
tggccatccagggct

SEQ ID NO: 547642 - DNA, 15 bp, Homo sapiens
ggccatccagggctt

SEQ ID NO: 547643 - DNA, 15 bp, Homo sapiens
gccatccagggctta

SEQ ID NO: 547644 - DNA, 15 bp, Homo sapiens
ccatccagggcttat

SEQ ID NO: 547645 - DNA, 15 bp, Homo sapiens
catccagggcttatt

SEQ ID NO: 547646 - DNA, 15 bp, Homo sapiens
atccagggcttattg

SEQ ID NO: 547647 - DNA, 15 bp, Homo sapiens
tccagggcttattga

SEQ ID NO: 547648 - DNA, 15 bp, Homo sapiens
ccagggcttattgag

SEQ ID NO: 547649 - DNA, 15 bp, Homo sapiens
cagggcttattgagg

SEQ ID NO: 547650 - DNA, 15 bp, Homo sapiens
agggcttattgaggt

SEQ ID NO: 547651 - DNA, 15 bp, Homo sapiens
gggcttattgaggta

SEQ ID NO: 547652 - DNA, 15 bp, Homo sapiens
ggcttattgaggtac

SEQ ID NO: 547653 - DNA, 15 bp, Homo sapiens
gcttattgaggtacc

SEQ ID NO: 547654 - DNA, 15 bp, Homo sapiens
cttattgaggtacct

SEQ ID NO: 547655 - DNA, 15 bp, Homo sapiens
ttattgaggtaccta

SEQ ID NO: 547656 - DNA, 15 bp, Homo sapiens
tattgaggtacctaa

SEQ ID NO: 547657 - DNA, 15 bp, Homo sapiens
attgaggtacctaag

SEQ ID NO: 547658 - DNA, 15 bp, Homo sapiens
ttgaggtacctaaga

SEQ ID NO: 547659 - DNA, 15 bp, Homo sapiens
tgaggtacctaagat

SEQ ID NO: 547660 - DNA, 15 bp, Homo sapiens
gaggtacctaagata

SEQ ID NO: 547661 - DNA, 15 bp, Homo sapiens
aggtacctaagatag

SEQ ID NO: 547662 - DNA, 15 bp, Homo sapiens
ggtacctaagatagc

SEQ ID NO: 547663 - DNA, 15 bp, Homo sapiens
gtacctaagatagct

SEQ ID NO: 547664 - DNA, 15 bp, Homo sapiens
tacctaagatagctt

SEQ ID NO: 547665 - DNA, 15 bp, Homo sapiens
acctaagatagctta

SEQ ID NO: 547666 - DNA, 15 bp, Homo sapiens
cctaagatagcttat

SEQ ID NO: 547667 - DNA, 15 bp, Homo sapiens
ctaagatagcttatg

SEQ ID NO: 547668 - DNA, 15 bp, Homo sapiens
taagatagcttatgt

SEQ ID NO: 547669 - DNA, 15 bp, Homo sapiens
aagatagcttatgtg

SEQ ID NO: 547670 - DNA, 15 bp, Homo sapiens
agatagcttatgtga

SEQ ID NO: 547671 - DNA, 15 bp, Homo sapiens
gatagcttatgtgaa

SEQ ID NO: 547672 - DNA, 15 bp, Homo sapiens
atagcttatgtgaat

SEQ ID NO: 547673 - DNA, 15 bp, Homo sapiens
tagcttatgtgaatg

SEQ ID NO: 547674 - DNA, 15 bp, Homo sapiens
agcttatgtgaatga

SEQ ID NO: 547675 - DNA, 15 bp, Homo sapiens
gcttatgtgaatgat

SEQ ID NO: 547676 - DNA, 15 bp, Homo sapiens
cttatgtgaatgatg

SEQ ID NO: 547677 - DNA, 15 bp, Homo sapiens
ttatgtgaatgatgt

SEQ ID NO: 547678 - DNA, 15 bp, Homo sapiens
tatgtgaatgatgtc

SEQ ID NO: 547679 - DNA, 15 bp, Homo sapiens
atgtgaatgatgtca

SEQ ID NO: 547680 - DNA, 15 bp, Homo sapiens
tgtgaatgatgtcac

SEQ ID NO: 547681 - DNA, 15 bp, Homo sapiens
gtgaatgatgtcact

SEQ ID NO: 547682 - DNA, 15 bp, Homo sapiens
tgaatgatgtcactt

SEQ ID NO: 547683 - DNA, 15 bp, Homo sapiens
gaatgatgtcacttt

SEQ ID NO: 547684 - DNA, 15 bp, Homo sapiens
aatgatgtcactttt

SEQ ID NO: 547685 - DNA, 15 bp, Homo sapiens
atgatgtcactttta

SEQ ID NO: 547686 - DNA, 15 bp, Homo sapiens
tgatgtcacttttag

SEQ ID NO: 547687 - DNA, 15 bp, Homo sapiens
gatgtcacttttagc

SEQ ID NO: 547688 - DNA, 15 bp, Homo sapiens
atgtcacttttagcc

SEQ ID NO: 547689 - DNA, 15 bp, Homo sapiens
tgtcacttttagcct

SEQ ID NO: 547690 - DNA, 15 bp, Homo sapiens
gtcacttttagcctt

SEQ ID NO: 547691 - DNA, 15 bp, Homo sapiens
tcacttttagcctta

SEQ ID NO: 547692 - DNA, 15 bp, Homo sapiens
cacttttagccttag

SEQ ID NO: 547693 - DNA, 15 bp, Homo sapiens
acttttagccttagg

SEQ ID NO: 547694 - DNA, 15 bp, Homo sapiens
cttttagccttagga

SEQ ID NO: 547695 - DNA, 15 bp, Homo sapiens
ttttagccttaggaa

SEQ ID NO: 547696 - DNA, 15 bp, Homo sapiens
tttagccttaggaaa

SEQ ID NO: 547697 - DNA, 15 bp, Homo sapiens
ttagccttaggaaat

SEQ ID NO: 547698 - DNA, 15 bp, Homo sapiens
tagccttaggaaatg

SEQ ID NO: 547699 - DNA, 15 bp, Homo sapiens
agccttaggaaatgt

SEQ ID NO: 547700 - DNA, 15 bp, Homo sapiens
gccttaggaaatgtt

SEQ ID NO: 547701 - DNA, 15 bp, Homo sapiens
ccttaggaaatgttc

SEQ ID NO: 547702 - DNA, 15 bp, Homo sapiens
cttaggaaatgttct

SEQ ID NO: 547703 - DNA, 15 bp, Homo sapiens
ttaggaaatgttctt

SEQ ID NO: 547704 - DNA, 15 bp, Homo sapiens
taggaaatgttcttt

SEQ ID NO: 547705 - DNA, 15 bp, Homo sapiens
aggaaatgttctttt

SEQ ID NO: 547706 - DNA, 15 bp, Homo sapiens
ggaaatgttcttttg

SEQ ID NO: 547707 - DNA, 15 bp, Homo sapiens
gaaatgttcttttgg

SEQ ID NO: 547708 - DNA, 15 bp, Homo sapiens
aaatgttcttttggg

SEQ ID NO: 547709 - DNA, 15 bp, Homo sapiens
aatgttcttttgggc

SEQ ID NO: 547710 - DNA, 15 bp, Homo sapiens
atgttcttttgggct

SEQ ID NO: 547711 - DNA, 15 bp, Homo sapiens
tgttcttttgggctc

SEQ ID NO: 547712 - DNA, 15 bp, Homo sapiens
gttcttttgggctca

SEQ ID NO: 547713 - DNA, 15 bp, Homo sapiens
ttcttttgggctcag

SEQ ID NO: 547714 - DNA, 15 bp, Homo sapiens
tcttttgggctcagt

SEQ ID NO: 547715 - DNA, 15 bp, Homo sapiens
cttttgggctcagtt

SEQ ID NO: 547716 - DNA, 15 bp, Homo sapiens
ttttgggctcagttc

SEQ ID NO: 547717 - DNA, 15 bp, Homo sapiens
tttgggctcagttcc

SEQ ID NO: 547718 - DNA, 15 bp, Homo sapiens
ttgggctcagttcca

SEQ ID NO: 547719 - DNA, 15 bp, Homo sapiens
tgggctcagttccag

SEQ ID NO: 547720 - DNA, 15 bp, Homo sapiens
gggctcagttccagt

SEQ ID NO: 547721 - DNA, 15 bp, Homo sapiens
ggctcagttccagtt

SEQ ID NO: 547722 - DNA, 15 bp, Homo sapiens
gctcagttccagtta

SEQ ID NO: 547723 - DNA, 15 bp, Homo sapiens
ctcagttccagttac

SEQ ID NO: 547724 - DNA, 15 bp, Homo sapiens
tcagttccagttact

SEQ ID NO: 547725 - DNA, 15 bp, Homo sapiens
cagttccagttactt

SEQ ID NO: 547726 - DNA, 15 bp, Homo sapiens
agttccagttacttt

SEQ ID NO: 547727 - DNA, 15 bp, Homo sapiens
gttccagttactttt

SEQ ID NO: 547728 - DNA, 15 bp, Homo sapiens
ttccagttacttttg

SEQ ID NO: 547729 - DNA, 15 bp, Homo sapiens
tccagttacttttgt

SEQ ID NO: 547730 - DNA, 15 bp, Homo sapiens
ccagttacttttgtt

SEQ ID NO: 547731 - DNA, 15 bp, Homo sapiens
cagttacttttgttg

SEQ ID NO: 547732 - DNA, 15 bp, Homo sapiens
agttacttttgttgt

SEQ ID NO: 547733 - DNA, 15 bp, Homo sapiens
gttacttttgttgtg

SEQ ID NO: 547734 - DNA, 15 bp, Homo sapiens
ttacttttgttgtga

SEQ ID NO: 547735 - DNA, 15 bp, Homo sapiens
tacttttgttgtgag

SEQ ID NO: 547736 - DNA, 15 bp, Homo sapiens
acttttgttgtgagg

SEQ ID NO: 547737 - DNA, 15 bp, Homo sapiens
cttttgttgtgaggt

SEQ ID NO: 547738 - DNA, 15 bp, Homo sapiens
ttttgttgtgaggtt

SEQ ID NO: 547739 - DNA, 15 bp, Homo sapiens
tttgttgtgaggttc

SEQ ID NO: 547740 - DNA, 15 bp, Homo sapiens
ttgttgtgaggttct

SEQ ID NO: 547741 - DNA, 15 bp, Homo sapiens
tgttgtgaggttctt

SEQ ID NO: 547742 - DNA, 15 bp, Homo sapiens
gttgtgaggttcttg

SEQ ID NO: 547743 - DNA, 15 bp, Homo sapiens
ttgtgaggttcttgt

SEQ ID NO: 547744 - DNA, 15 bp, Homo sapiens
tgtgaggttcttgtg

SEQ ID NO: 547745 - DNA, 15 bp, Homo sapiens
gtgaggttcttgtgg

SEQ ID NO: 547746 - DNA, 15 bp, Homo sapiens
tgaggttcttgtgga

SEQ ID NO: 547747 - DNA, 15 bp, Homo sapiens
gaggttcttgtggaa

SEQ ID NO: 547748 - DNA, 15 bp, Homo sapiens
aggttcttgtggaag

SEQ ID NO: 547749 - DNA, 15 bp, Homo sapiens
ggttcttgtggaagg

SEQ ID NO: 547750 - DNA, 15 bp, Homo sapiens
gttcttgtggaaggt

SEQ ID NO: 547751 - DNA, 15 bp, Homo sapiens
ttcttgtggaaggtt

SEQ ID NO: 547752 - DNA, 15 bp, Homo sapiens
tcttgtggaaggttc

SEQ ID NO: 547753 - DNA, 15 bp, Homo sapiens
cttgtggaaggttca

SEQ ID NO: 547754 - DNA, 15 bp, Homo sapiens
ttgtggaaggttcac

SEQ ID NO: 547755 - DNA, 15 bp, Homo sapiens
tgtggaaggttcact

SEQ ID NO: 547756 - DNA, 15 bp, Homo sapiens
gtggaaggttcactt

SEQ ID NO: 547757 - DNA, 15 bp, Homo sapiens
tggaaggttcacttt

SEQ ID NO: 547758 - DNA, 15 bp, Homo sapiens
ggaaggttcactttc

SEQ ID NO: 547759 - DNA, 15 bp, Homo sapiens
gaaggttcactttct

SEQ ID NO: 547760 - DNA, 15 bp, Homo sapiens
aaggttcactttcta

SEQ ID NO: 547761 - DNA, 15 bp, Homo sapiens
aggttcactttctat

SEQ ID NO: 547762 - DNA, 15 bp, Homo sapiens
ggttcactttctatc

SEQ ID NO: 547763 - DNA, 15 bp, Homo sapiens
gttcactttctatct

SEQ ID NO: 547764 - DNA, 15 bp, Homo sapiens
ttcactttctatcta

SEQ ID NO: 547765 - DNA, 15 bp, Homo sapiens
tcactttctatctac

SEQ ID NO: 547766 - DNA, 15 bp, Homo sapiens
cactttctatctacc

SEQ ID NO: 547767 - DNA, 15 bp, Homo sapiens
actttctatctacct

SEQ ID NO: 547768 - DNA, 15 bp, Homo sapiens
ctttctatctacctg

SEQ ID NO: 547769 - DNA, 15 bp, Homo sapiens
tttctatctacctgc

SEQ ID NO: 547770 - DNA, 15 bp, Homo sapiens
ttctatctacctgca

SEQ ID NO: 547771 - DNA, 15 bp, Homo sapiens
tctatctacctgcag

SEQ ID NO: 547772 - DNA, 15 bp, Homo sapiens
ctatctacctgcaga

SEQ ID NO: 547773 - DNA, 15 bp, Homo sapiens
tatctacctgcagac

SEQ ID NO: 547774 - DNA, 15 bp, Homo sapiens
atctacctgcagaca

SEQ ID NO: 547775 - DNA, 15 bp, Homo sapiens
tctacctgcagacaa

SEQ ID NO: 547776 - DNA, 15 bp, Homo sapiens
ctacctgcagacaaa

SEQ ID NO: 547777 - DNA, 15 bp, Homo sapiens
tacctgcagacaaat

SEQ ID NO: 547778 - DNA, 15 bp, Homo sapiens
acctgcagacaaatg

SEQ ID NO: 547779 - DNA, 15 bp, Homo sapiens
cctgcagacaaatgc

SEQ ID NO: 547780 - DNA, 15 bp, Homo sapiens
ctgcagacaaatgct

SEQ ID NO: 547781 - DNA, 15 bp, Homo sapiens
tgcagacaaatgctc

SEQ ID NO: 547782 - DNA, 15 bp, Homo sapiens
gcagacaaatgctcg

SEQ ID NO: 547783 - DNA, 15 bp, Homo sapiens
cagacaaatgctcgg

SEQ ID NO: 547784 - DNA, 15 bp, Homo sapiens
agacaaatgctcgga

SEQ ID NO: 547785 - DNA, 15 bp, Homo sapiens
gacaaatgctcggag

SEQ ID NO: 547786 - DNA, 15 bp, Homo sapiens
acaaatgctcggagc

SEQ ID NO: 547787 - DNA, 15 bp, Homo sapiens
caaatgctcggagct

SEQ ID NO: 547788 - DNA, 15 bp, Homo sapiens
aaatgctcggagctt

SEQ ID NO: 547789 - DNA, 15 bp, Homo sapiens
aatgctcggagctta

SEQ ID NO: 547790 - DNA, 15 bp, Homo sapiens
atgctcggagcttat

SEQ ID NO: 547791 - DNA, 15 bp, Homo sapiens
tgctcggagcttatg

SEQ ID NO: 547792 - DNA, 15 bp, Homo sapiens
gctcggagcttatga

SEQ ID NO: 547793 - DNA, 15 bp, Homo sapiens
ctcggagcttatgat

SEQ ID NO: 547794 - DNA, 15 bp, Homo sapiens
tcggagcttatgata

SEQ ID NO: 547795 - DNA, 15 bp, Homo sapiens
cggagcttatgatat

SEQ ID NO: 547796 - DNA, 15 bp, Homo sapiens
ggagcttatgatata

SEQ ID NO: 547797 - DNA, 15 bp, Homo sapiens
gagcttatgatatat

SEQ ID NO: 547798 - DNA, 15 bp, Homo sapiens
agcttatgatatata

SEQ ID NO: 547799 - DNA, 15 bp, Homo sapiens
gcttatgatatataa

SEQ ID NO: 547800 - DNA, 15 bp, Homo sapiens
cttatgatatataac

SEQ ID NO: 547801 - DNA, 15 bp, Homo sapiens
ttatgatatataaca

SEQ ID NO: 547802 - DNA, 15 bp, Homo sapiens
tatgatatataacat

SEQ ID NO: 547803 - DNA, 15 bp, Homo sapiens
atgatatataacatc

SEQ ID NO: 547804 - DNA, 15 bp, Homo sapiens
tgatatataacatca

SEQ ID NO: 547805 - DNA, 15 bp, Homo sapiens
gatatataacatcaa

SEQ ID NO: 547806 - DNA, 15 bp, Homo sapiens
atatataacatcaag

SEQ ID NO: 547807 - DNA, 15 bp, Homo sapiens
tatataacatcaagg

SEQ ID NO: 547808 - DNA, 15 bp, Homo sapiens
atataacatcaaggg

SEQ ID NO: 547809 - DNA, 15 bp, Homo sapiens
tataacatcaagggc

SEQ ID NO: 547810 - DNA, 15 bp, Homo sapiens
ataacatcaagggct

SEQ ID NO: 547811 - DNA, 15 bp, Homo sapiens
taacatcaagggctt

SEQ ID NO: 547812 - DNA, 15 bp, Homo sapiens
aacatcaagggcttg

SEQ ID NO: 547813 - DNA, 15 bp, Homo sapiens
acatcaagggcttgc

SEQ ID NO: 547814 - DNA, 15 bp, Homo sapiens
catcaagggcttgct

SEQ ID NO: 547815 - DNA, 15 bp, Homo sapiens
atcaagggcttgctt

SEQ ID NO: 547816 - DNA, 15 bp, Homo sapiens
tcaagggcttgcttg

SEQ ID NO: 547817 - DNA, 15 bp, Homo sapiens
caagggcttgcttgg

SEQ ID NO: 547818 - DNA, 15 bp, Homo sapiens
aagggcttgcttggc

SEQ ID NO: 547819 - DNA, 15 bp, Homo sapiens
agggcttgcttggct

SEQ ID NO: 547820 - DNA, 15 bp, Homo sapiens
gggcttgcttggctg

SEQ ID NO: 547821 - DNA, 15 bp, Homo sapiens
ggcttgcttggctgt

SEQ ID NO: 547822 - DNA, 15 bp, Homo sapiens
gcttgcttggctgtc

SEQ ID NO: 547823 - DNA, 15 bp, Homo sapiens
cttgcttggctgtca

SEQ ID NO: 547824 - DNA, 15 bp, Homo sapiens
ttgcttggctgtcag

SEQ ID NO: 547825 - DNA, 15 bp, Homo sapiens
tgcttggctgtcaga

SEQ ID NO: 547826 - DNA, 15 bp, Homo sapiens
gcttggctgtcagaa

SEQ ID NO: 547827 - DNA, 15 bp, Homo sapiens
cttggctgtcagaag

SEQ ID NO: 547828 - DNA, 15 bp, Homo sapiens
ttggctgtcagaagt

SEQ ID NO: 547829 - DNA, 15 bp, Homo sapiens
tggctgtcagaagta

SEQ ID NO: 547830 - DNA, 15 bp, Homo sapiens
ggctgtcagaagtag

SEQ ID NO: 547831 - DNA, 15 bp, Homo sapiens
gctgtcagaagtagg

SEQ ID NO: 547832 - DNA, 15 bp, Homo sapiens
ctgtcagaagtagga

SEQ ID NO: 547833 - DNA, 15 bp, Homo sapiens
tgtcagaagtaggat

SEQ ID NO: 547834 - DNA, 15 bp, Homo sapiens
gtcagaagtaggatt

SEQ ID NO: 547835 - DNA, 15 bp, Homo sapiens
tcagaagtaggattg

SEQ ID NO: 547836 - DNA, 15 bp, Homo sapiens
cagaagtaggattgc

SEQ ID NO: 547837 - DNA, 15 bp, Homo sapiens
agaagtaggattgct

SEQ ID NO: 547838 - DNA, 15 bp, Homo sapiens
gaagtaggattgctt

SEQ ID NO: 547839 - DNA, 15 bp, Homo sapiens
aagtaggattgctta

SEQ ID NO: 547840 - DNA, 15 bp, Homo sapiens
agtaggattgcttaa

SEQ ID NO: 547841 - DNA, 15 bp, Homo sapiens
gtaggattgcttaat

SEQ ID NO: 547842 - DNA, 15 bp, Homo sapiens
taggattgcttaatc

SEQ ID NO: 547843 - DNA, 15 bp, Homo sapiens
aggattgcttaatca

SEQ ID NO: 547844 - DNA, 15 bp, Homo sapiens
ggattgcttaatcaa

SEQ ID NO: 547845 - DNA, 15 bp, Homo sapiens
gattgcttaatcaaa

SEQ ID NO: 547846 - DNA, 15 bp, Homo sapiens
attgcttaatcaaaa

SEQ ID NO: 547847 - DNA, 15 bp, Homo sapiens
ttgcttaatcaaaac

SEQ ID NO: 547848 - DNA, 15 bp, Homo sapiens
tgcttaatcaaaacc

SEQ ID NO: 547849 - DNA, 15 bp, Homo sapiens
gcttaatcaaaacct

SEQ ID NO: 547850 - DNA, 15 bp, Homo sapiens
cttaatcaaaacctg

SEQ ID NO: 547851 - DNA, 15 bp, Homo sapiens
ttaatcaaaacctgt

SEQ ID NO: 547852 - DNA, 15 bp, Homo sapiens
taatcaaaacctgtg

SEQ ID NO: 547853 - DNA, 15 bp, Homo sapiens
aatcaaaacctgtgt

SEQ ID NO: 547854 - DNA, 15 bp, Homo sapiens
atcaaaacctgtgtg

SEQ ID NO: 547855 - DNA, 15 bp, Homo sapiens
tcaaaacctgtgtgg

SEQ ID NO: 547856 - DNA, 15 bp, Homo sapiens
caaaacctgtgtgga

SEQ ID NO: 547857 - DNA, 15 bp, Homo sapiens
aaaacctgtgtggaa

SEQ ID NO: 547858 - DNA, 15 bp, Homo sapiens
aaacctgtgtggaaa

SEQ ID NO: 547859 - DNA, 15 bp, Homo sapiens
aacctgtgtggaaat

SEQ ID NO: 547860 - DNA, 15 bp, Homo sapiens
acctgtgtggaaata

SEQ ID NO: 547861 - DNA, 15 bp, Homo sapiens
cctgtgtggaaatag

SEQ ID NO: 547862 - DNA, 15 bp, Homo sapiens
ctgtgtggaaatagc

SEQ ID NO: 547863 - DNA, 15 bp, Homo sapiens
tgtgtggaaatagcc

SEQ ID NO: 547864 - DNA, 15 bp, Homo sapiens
gtgtggaaatagcct

SEQ ID NO: 547865 - DNA, 15 bp, Homo sapiens
tgtggaaatagcctg

SEQ ID NO: 547866 - DNA, 15 bp, Homo sapiens
gtggaaatagcctgt

SEQ ID NO: 547867 - DNA, 15 bp, Homo sapiens
tggaaatagcctgtt

SEQ ID NO: 547868 - DNA, 15 bp, Homo sapiens
ggaaatagcctgtta

SEQ ID NO: 547869 - DNA, 15 bp, Homo sapiens
gaaatagcctgttat

SEQ ID NO: 547870 - DNA, 15 bp, Homo sapiens
aaatagcctgttatc

SEQ ID NO: 547871 - DNA, 15 bp, Homo sapiens
aatagcctgttatct

SEQ ID NO: 547872 - DNA, 15 bp, Homo sapiens
atagcctgttatctc

SEQ ID NO: 547873 - DNA, 15 bp, Homo sapiens
tagcctgttatctct

SEQ ID NO: 547874 - DNA, 15 bp, Homo sapiens
agcctgttatctcta

SEQ ID NO: 547875 - DNA, 15 bp, Homo sapiens
gcctgttatctctat

SEQ ID NO: 547876 - DNA, 15 bp, Homo sapiens
cctgttatctctatg

SEQ ID NO: 547877 - DNA, 15 bp, Homo sapiens
ctgttatctctatgg

SEQ ID NO: 547878 - DNA, 15 bp, Homo sapiens
tgttatctctatgga

SEQ ID NO: 547879 - DNA, 15 bp, Homo sapiens
gttatctctatggac

SEQ ID NO: 547880 - DNA, 15 bp, Homo sapiens
ttatctctatggact

SEQ ID NO: 547881 - DNA, 15 bp, Homo sapiens
tatctctatggactt

SEQ ID NO: 547882 - DNA, 15 bp, Homo sapiens
atctctatggactta

SEQ ID NO: 547883 - DNA, 15 bp, Homo sapiens
tctctatggacttaa

SEQ ID NO: 547884 - DNA, 15 bp, Homo sapiens
ctctatggacttaaa

SEQ ID NO: 547885 - DNA, 15 bp, Homo sapiens
tctatggacttaaat

SEQ ID NO: 547886 - DNA, 15 bp, Homo sapiens
ctatggacttaaatg

SEQ ID NO: 547887 - DNA, 15 bp, Homo sapiens
tatggacttaaatgg

SEQ ID NO: 547888 - DNA, 15 bp, Homo sapiens
atggacttaaatggt

SEQ ID NO: 547889 - DNA, 15 bp, Homo sapiens
tggacttaaatggtc

SEQ ID NO: 547890 - DNA, 15 bp, Homo sapiens
ggacttaaatggtca

SEQ ID NO: 547891 - DNA, 15 bp, Homo sapiens
gacttaaatggtcat

SEQ ID NO: 547892 - DNA, 15 bp, Homo sapiens
acttaaatggtcatc

SEQ ID NO: 547893 - DNA, 15 bp, Homo sapiens
cttaaatggtcatca

SEQ ID NO: 547894 - DNA, 15 bp, Homo sapiens
ttaaatggtcatcag

SEQ ID NO: 547895 - DNA, 15 bp, Homo sapiens
taaatggtcatcagc

SEQ ID NO: 547896 - DNA, 15 bp, Homo sapiens
aaatggtcatcagca

SEQ ID NO: 547897 - DNA, 15 bp, Homo sapiens
aatggtcatcagcag

SEQ ID NO: 547898 - DNA, 15 bp, Homo sapiens
atggtcatcagcagt

SEQ ID NO: 547899 - DNA, 15 bp, Homo sapiens
tggtcatcagcagtt

SEQ ID NO: 547900 - DNA, 15 bp, Homo sapiens
ggtcatcagcagttc

SEQ ID NO: 547901 - DNA, 15 bp, Homo sapiens
gtcatcagcagttcc

SEQ ID NO: 547902 - DNA, 15 bp, Homo sapiens
tcatcagcagttccc

SEQ ID NO: 547903 - DNA, 15 bp, Homo sapiens
catcagcagttcccc

SEQ ID NO: 547904 - DNA, 15 bp, Homo sapiens
atcagcagttcccca

SEQ ID NO: 547905 - DNA, 15 bp, Homo sapiens
tcagcagttccccaa

SEQ ID NO: 547906 - DNA, 15 bp, Homo sapiens
cagcagttccccaaa

SEQ ID NO: 547907 - DNA, 15 bp, Homo sapiens
agcagttccccaaat

SEQ ID NO: 547908 - DNA, 15 bp, Homo sapiens
gcagttccccaaatt

SEQ ID NO: 547909 - DNA, 15 bp, Homo sapiens
cagttccccaaattc

SEQ ID NO: 547910 - DNA, 15 bp, Homo sapiens
agttccccaaattca

SEQ ID NO: 547911 - DNA, 15 bp, Homo sapiens
gttccccaaattcaa

SEQ ID NO: 547912 - DNA, 15 bp, Homo sapiens
ttccccaaattcaag

SEQ ID NO: 547913 - DNA, 15 bp, Homo sapiens
tccccaaattcaaga

SEQ ID NO: 547914 - DNA, 15 bp, Homo sapiens
ccccaaattcaagac

SEQ ID NO: 547915 - DNA, 15 bp, Homo sapiens
cccaaattcaagact

SEQ ID NO: 547916 - DNA, 15 bp, Homo sapiens
ccaaattcaagactc

SEQ ID NO: 547917 - DNA, 15 bp, Homo sapiens
caaattcaagactcc

SEQ ID NO: 547918 - DNA, 15 bp, Homo sapiens
aaattcaagactccc

SEQ ID NO: 547919 - DNA, 15 bp, Homo sapiens
aattcaagactccca

SEQ ID NO: 547920 - DNA, 15 bp, Homo sapiens
attcaagactcccat

SEQ ID NO: 547921 - DNA, 15 bp, Homo sapiens
ttcaagactcccatg

SEQ ID NO: 547922 - DNA, 15 bp, Homo sapiens
tcaagactcccatga

SEQ ID NO: 547923 - DNA, 15 bp, Homo sapiens
caagactcccatgac

SEQ ID NO: 547924 - DNA, 15 bp, Homo sapiens
aagactcccatgaca

SEQ ID NO: 547925 - DNA, 15 bp, Homo sapiens
agactcccatgacaa

SEQ ID NO: 547926 - DNA, 15 bp, Homo sapiens
gactcccatgacaat

SEQ ID NO: 547927 - DNA, 15 bp, Homo sapiens
actcccatgacaata

SEQ ID NO: 547928 - DNA, 15 bp, Homo sapiens
ctcccatgacaatac

SEQ ID NO: 547929 - DNA, 15 bp, Homo sapiens
tcccatgacaatacc

SEQ ID NO: 547930 - DNA, 15 bp, Homo sapiens
cccatgacaatacca

SEQ ID NO: 547931 - DNA, 15 bp, Homo sapiens
ccatgacaataccat

SEQ ID NO: 547932 - DNA, 15 bp, Homo sapiens
catgacaataccatt

SEQ ID NO: 547933 - DNA, 15 bp, Homo sapiens
atgacaataccattg

SEQ ID NO: 547934 - DNA, 15 bp, Homo sapiens
tgacaataccattga

SEQ ID NO: 547935 - DNA, 15 bp, Homo sapiens
gacaataccattgag

SEQ ID NO: 547936 - DNA, 15 bp, Homo sapiens
acaataccattgagt

SEQ ID NO: 547937 - DNA, 15 bp, Homo sapiens
caataccattgagtt

SEQ ID NO: 547938 - DNA, 15 bp, Homo sapiens
aataccattgagttc

SEQ ID NO: 547939 - DNA, 15 bp, Homo sapiens
ataccattgagttct

SEQ ID NO: 547940 - DNA, 15 bp, Homo sapiens
taccattgagttctg

SEQ ID NO: 547941 - DNA, 15 bp, Homo sapiens
accattgagttctga

SEQ ID NO: 547942 - DNA, 15 bp, Homo sapiens
ccattgagttctgaa

SEQ ID NO: 547943 - DNA, 15 bp, Homo sapiens
cattgagttctgaag

SEQ ID NO: 547944 - DNA, 15 bp, Homo sapiens
attgagttctgaagc

SEQ ID NO: 547945 - DNA, 15 bp, Homo sapiens
ttgagttctgaagct

SEQ ID NO: 547946 - DNA, 15 bp, Homo sapiens
tgagttctgaagctg

SEQ ID NO: 547947 - DNA, 15 bp, Homo sapiens
gagttctgaagctgg

SEQ ID NO: 547948 - DNA, 15 bp, Homo sapiens
agttctgaagctgga

SEQ ID NO: 547949 - DNA, 15 bp, Homo sapiens
gttctgaagctggaa

SEQ ID NO: 547950 - DNA, 15 bp, Homo sapiens
ttctgaagctggaag

SEQ ID NO: 547951 - DNA, 15 bp, Homo sapiens
tctgaagctggaagg

SEQ ID NO: 547952 - DNA, 15 bp, Homo sapiens
ctgaagctggaaggg

SEQ ID NO: 547953 - DNA, 15 bp, Homo sapiens
tgaagctggaaggga

SEQ ID NO: 547954 - DNA, 15 bp, Homo sapiens
gaagctggaagggat

SEQ ID NO: 547955 - DNA, 15 bp, Homo sapiens
aagctggaagggatc

SEQ ID NO: 547956 - DNA, 15 bp, Homo sapiens
agctggaagggatca

SEQ ID NO: 547957 - DNA, 15 bp, Homo sapiens
gctggaagggatcaa

SEQ ID NO: 547958 - DNA, 15 bp, Homo sapiens
ctggaagggatcaac

SEQ ID NO: 547959 - DNA, 15 bp, Homo sapiens
tggaagggatcaaca

SEQ ID NO: 547960 - DNA, 15 bp, Homo sapiens
ggaagggatcaacaa

SEQ ID NO: 547961 - DNA, 15 bp, Homo sapiens
gaagggatcaacaag

SEQ ID NO: 547962 - DNA, 15 bp, Homo sapiens
aagggatcaacaaga

SEQ ID NO: 547963 - DNA, 15 bp, Homo sapiens
agggatcaacaagac

SEQ ID NO: 547964 - DNA, 15 bp, Homo sapiens
gggatcaacaagacg

SEQ ID NO: 547965 - DNA, 15 bp, Homo sapiens
ggatcaacaagacga

SEQ ID NO: 547966 - DNA, 15 bp, Homo sapiens
gatcaacaagacgag

SEQ ID NO: 547967 - DNA, 15 bp, Homo sapiens
atcaacaagacgagg

SEQ ID NO: 547968 - DNA, 15 bp, Homo sapiens
tcaacaagacgaggt

SEQ ID NO: 547969 - DNA, 15 bp, Homo sapiens
caacaagacgaggtt

SEQ ID NO: 547970 - DNA, 15 bp, Homo sapiens
aacaagacgaggttc

SEQ ID NO: 547971 - DNA, 15 bp, Homo sapiens
acaagacgaggttct

SEQ ID NO: 547972 - DNA, 15 bp, Homo sapiens
caagacgaggttcta

SEQ ID NO: 547973 - DNA, 15 bp, Homo sapiens
aagacgaggttctac

SEQ ID NO: 547974 - DNA, 15 bp, Homo sapiens
agacgaggttctacc

SEQ ID NO: 547975 - DNA, 15 bp, Homo sapiens
gacgaggttctacca

SEQ ID NO: 547976 - DNA, 15 bp, Homo sapiens
acgaggttctaccat

SEQ ID NO: 547977 - DNA, 15 bp, Homo sapiens
cgaggttctaccatt

SEQ ID NO: 547978 - DNA, 15 bp, Homo sapiens
gaggttctaccattg

SEQ ID NO: 547979 - DNA, 15 bp, Homo sapiens
aggttctaccattgt

SEQ ID NO: 547980 - DNA, 15 bp, Homo sapiens
ggttctaccattgtt

SEQ ID NO: 547981 - DNA, 15 bp, Homo sapiens
gttctaccattgttt

SEQ ID NO: 547982 - DNA, 15 bp, Homo sapiens
ttctaccattgtttg

SEQ ID NO: 547983 - DNA, 15 bp, Homo sapiens
tctaccattgtttga

SEQ ID NO: 547984 - DNA, 15 bp, Homo sapiens
ctaccattgtttgag

SEQ ID NO: 547985 - DNA, 15 bp, Homo sapiens
taccattgtttgagc

SEQ ID NO: 547986 - DNA, 15 bp, Homo sapiens
accattgtttgagcc

SEQ ID NO: 547987 - DNA, 15 bp, Homo sapiens
ccattgtttgagcct

SEQ ID NO: 547988 - DNA, 15 bp, Homo sapiens
cattgtttgagcctt

SEQ ID NO: 547989 - DNA, 15 bp, Homo sapiens
attgtttgagcctta

SEQ ID NO: 547990 - DNA, 15 bp, Homo sapiens
ttgtttgagccttaa

SEQ ID NO: 547991 - DNA, 15 bp, Homo sapiens
tgtttgagccttaac

SEQ ID NO: 547992 - DNA, 15 bp, Homo sapiens
gtttgagccttaaca

SEQ ID NO: 547993 - DNA, 15 bp, Homo sapiens
tttgagccttaacaa

SEQ ID NO: 547994 - DNA, 15 bp, Homo sapiens
ttgagccttaacaag

SEQ ID NO: 547995 - DNA, 15 bp, Homo sapiens
tgagccttaacaagt

SEQ ID NO: 547996 - DNA, 15 bp, Homo sapiens
gagccttaacaagtc

SEQ ID NO: 547997 - DNA, 15 bp, Homo sapiens
agccttaacaagtca

SEQ ID NO: 547998 - DNA, 15 bp, Homo sapiens
gccttaacaagtcat

SEQ ID NO: 547999 - DNA, 15 bp, Homo sapiens
ccttaacaagtcatg

SEQ ID NO: 548000 - DNA, 15 bp, Homo sapiens
cttaacaagtcatgg

SEQ ID NO: 548001 - DNA, 15 bp, Homo sapiens
ttaacaagtcatggc

SEQ ID NO: 548002 - DNA, 15 bp, Homo sapiens
taacaagtcatggca

SEQ ID NO: 548003 - DNA, 15 bp, Homo sapiens
aacaagtcatggcaa

SEQ ID NO: 548004 - DNA, 15 bp, Homo sapiens
acaagtcatggcaag

SEQ ID NO: 548005 - DNA, 15 bp, Homo sapiens
caagtcatggcaagg

SEQ ID NO: 548006 - DNA, 15 bp, Homo sapiens
aagtcatggcaaggt

SEQ ID NO: 548007 - DNA, 15 bp, Homo sapiens
agtcatggcaaggtt

SEQ ID NO: 548008 - DNA, 15 bp, Homo sapiens
gtcatggcaaggttt

SEQ ID NO: 548009 - DNA, 15 bp, Homo sapiens
tcatggcaaggtttt

SEQ ID NO: 548010 - DNA, 15 bp, Homo sapiens
catggcaaggtttta

SEQ ID NO: 548011 - DNA, 15 bp, Homo sapiens
atggcaaggttttac

SEQ ID NO: 548012 - DNA, 15 bp, Homo sapiens
tggcaaggttttacc

SEQ ID NO: 548013 - DNA, 15 bp, Homo sapiens
ggcaaggttttacct

SEQ ID NO: 548014 - DNA, 15 bp, Homo sapiens
gcaaggttttacctt

SEQ ID NO: 548015 - DNA, 15 bp, Homo sapiens
caaggttttacctta

SEQ ID NO: 548016 - DNA, 15 bp, Homo sapiens
aaggttttaccttaa

SEQ ID NO: 548017 - DNA, 15 bp, Homo sapiens
aggttttaccttaat

SEQ ID NO: 548018 - DNA, 15 bp, Homo sapiens
ggttttaccttaata

SEQ ID NO: 548019 - DNA, 15 bp, Homo sapiens
gttttaccttaatat

SEQ ID NO: 548020 - DNA, 15 bp, Homo sapiens
ttttaccttaatatt

SEQ ID NO: 548021 - DNA, 15 bp, Homo sapiens
tttaccttaatattg

SEQ ID NO: 548022 - DNA, 15 bp, Homo sapiens
ttaccttaatattgt

SEQ ID NO: 548023 - DNA, 15 bp, Homo sapiens
taccttaatattgtc

SEQ ID NO: 548024 - DNA, 15 bp, Homo sapiens
accttaatattgtca

SEQ ID NO: 548025 - DNA, 15 bp, Homo sapiens
ccttaatattgtcat

SEQ ID NO: 548026 - DNA, 15 bp, Homo sapiens
cttaatattgtcatt

SEQ ID NO: 548027 - DNA, 15 bp, Homo sapiens
ttaatattgtcatta

SEQ ID NO: 548028 - DNA, 15 bp, Homo sapiens
taatattgtcattat

SEQ ID NO: 548029 - DNA, 15 bp, Homo sapiens
aatattgtcattatt

SEQ ID NO: 548030 - DNA, 15 bp, Homo sapiens
atattgtcattatta

SEQ ID NO: 548031 - DNA, 15 bp, Homo sapiens
tattgtcattattac

SEQ ID NO: 548032 - DNA, 15 bp, Homo sapiens
attgtcattattaca

SEQ ID NO: 548033 - DNA, 15 bp, Homo sapiens
ttgtcattattacag

SEQ ID NO: 548034 - DNA, 15 bp, Homo sapiens
tgtcattattacagt

SEQ ID NO: 548035 - DNA, 15 bp, Homo sapiens
gtcattattacagta

SEQ ID NO: 548036 - DNA, 15 bp, Homo sapiens
tcattattacagtat

SEQ ID NO: 548037 - DNA, 15 bp, Homo sapiens
cattattacagtata

SEQ ID NO: 548038 - DNA, 15 bp, Homo sapiens
attattacagtataa

SEQ ID NO: 548039 - DNA, 15 bp, Homo sapiens
ttattacagtataat

SEQ ID NO: 548040 - DNA, 15 bp, Homo sapiens
tattacagtataatt

SEQ ID NO: 548041 - DNA, 15 bp, Homo sapiens
attacagtataattt

SEQ ID NO: 548042 - DNA, 15 bp, Homo sapiens
ttacagtataatttt

SEQ ID NO: 548043 - DNA, 15 bp, Homo sapiens
tacagtataatttta

SEQ ID NO: 548044 - DNA, 15 bp, Homo sapiens
acagtataattttag

SEQ ID NO: 548045 - DNA, 15 bp, Homo sapiens
cagtataattttaga

SEQ ID NO: 548046 - DNA, 15 bp, Homo sapiens
agtataattttagaa

SEQ ID NO: 548047 - DNA, 15 bp, Homo sapiens
gtataattttagaag

SEQ ID NO: 548048 - DNA, 15 bp, Homo sapiens
tataattttagaaga

SEQ ID NO: 548049 - DNA, 15 bp, Homo sapiens
ataattttagaagaa

SEQ ID NO: 548050 - DNA, 15 bp, Homo sapiens
taattttagaagaat

SEQ ID NO: 548051 - DNA, 15 bp, Homo sapiens
aattttagaagaatg

SEQ ID NO: 548052 - DNA, 15 bp, Homo sapiens
attttagaagaatga

SEQ ID NO: 548053 - DNA, 15 bp, Homo sapiens
ttttagaagaatgag

SEQ ID NO: 548054 - DNA, 15 bp, Homo sapiens
tttagaagaatgagt

SEQ ID NO: 548055 - DNA, 15 bp, Homo sapiens
ttagaagaatgagtt

SEQ ID NO: 548056 - DNA, 15 bp, Homo sapiens
tagaagaatgagttt

SEQ ID NO: 548057 - DNA, 15 bp, Homo sapiens
agaagaatgagttta

SEQ ID NO: 548058 - DNA, 15 bp, Homo sapiens
gaagaatgagtttat

SEQ ID NO: 548059 - DNA, 15 bp, Homo sapiens
aagaatgagtttata

SEQ ID NO: 548060 - DNA, 15 bp, Homo sapiens
agaatgagtttatag

SEQ ID NO: 548061 - DNA, 15 bp, Homo sapiens
gaatgagtttatagg

SEQ ID NO: 548062 - DNA, 15 bp, Homo sapiens
aatgagtttataggg

SEQ ID NO: 548063 - DNA, 15 bp, Homo sapiens
atgagtttatagggg

SEQ ID NO: 548064 - DNA, 15 bp, Homo sapiens
tgagtttatagggga

SEQ ID NO: 548065 - DNA, 15 bp, Homo sapiens
gagtttataggggag

SEQ ID NO: 548066 - DNA, 15 bp, Homo sapiens
agtttataggggagc

SEQ ID NO: 548067 - DNA, 15 bp, Homo sapiens
gtttataggggagca

SEQ ID NO: 548068 - DNA, 15 bp, Homo sapiens
tttataggggagcaa

SEQ ID NO: 548069 - DNA, 15 bp, Homo sapiens
ttataggggagcaaa

SEQ ID NO: 548070 - DNA, 15 bp, Homo sapiens
tataggggagcaaac

SEQ ID NO: 548071 - DNA, 15 bp, Homo sapiens
ataggggagcaaaca

SEQ ID NO: 548072 - DNA, 15 bp, Homo sapiens
taggggagcaaacat

SEQ ID NO: 548073 - DNA, 15 bp, Homo sapiens
aggggagcaaacatt

SEQ ID NO: 548074 - DNA, 15 bp, Homo sapiens
ggggagcaaacattc

SEQ ID NO: 548075 - DNA, 15 bp, Homo sapiens
gggagcaaacattct

SEQ ID NO: 548076 - DNA, 15 bp, Homo sapiens
ggagcaaacattctc

SEQ ID NO: 548077 - DNA, 15 bp, Homo sapiens
gagcaaacattctcc

SEQ ID NO: 548078 - DNA, 15 bp, Homo sapiens
agcaaacattctcca

SEQ ID NO: 548079 - DNA, 15 bp, Homo sapiens
gcaaacattctccat

SEQ ID NO: 548080 - DNA, 15 bp, Homo sapiens
caaacattctccatg

SEQ ID NO: 548081 - DNA, 15 bp, Homo sapiens
aaacattctccatgc

SEQ ID NO: 548082 - DNA, 15 bp, Homo sapiens
aacattctccatgct

SEQ ID NO: 548083 - DNA, 15 bp, Homo sapiens
acattctccatgctc

SEQ ID NO: 548084 - DNA, 15 bp, Homo sapiens
cattctccatgctcc

SEQ ID NO: 548085 - DNA, 15 bp, Homo sapiens
attctccatgctccc

SEQ ID NO: 548086 - DNA, 15 bp, Homo sapiens
ttctccatgctcccc

SEQ ID NO: 548087 - DNA, 15 bp, Homo sapiens
tctccatgctcccct

SEQ ID NO: 548088 - DNA, 15 bp, Homo sapiens
ctccatgctcccctt

SEQ ID NO: 548089 - DNA, 15 bp, Homo sapiens
tccatgctcccctta

SEQ ID NO: 548090 - DNA, 15 bp, Homo sapiens
ccatgctccccttaa

SEQ ID NO: 548091 - DNA, 15 bp, Homo sapiens
catgctccccttaac

SEQ ID NO: 548092 - DNA, 15 bp, Homo sapiens
atgctccccttaacg

SEQ ID NO: 548093 - DNA, 15 bp, Homo sapiens
tgctccccttaacgt

SEQ ID NO: 548094 - DNA, 15 bp, Homo sapiens
gctccccttaacgtc

SEQ ID NO: 548095 - DNA, 15 bp, Homo sapiens
ctccccttaacgtca

SEQ ID NO: 548096 - DNA, 15 bp, Homo sapiens
tccccttaacgtcac

SEQ ID NO: 548097 - DNA, 15 bp, Homo sapiens
ccccttaacgtcacc

SEQ ID NO: 548098 - DNA, 15 bp, Homo sapiens
cccttaacgtcaccc

SEQ ID NO: 548099 - DNA, 15 bp, Homo sapiens
ccttaacgtcaccct

SEQ ID NO: 548100 - DNA, 15 bp, Homo sapiens
cttaacgtcaccctg

SEQ ID NO: 548101 - DNA, 15 bp, Homo sapiens
ttaacgtcaccctgc

SEQ ID NO: 548102 - DNA, 15 bp, Homo sapiens
taacgtcaccctgct

SEQ ID NO: 548103 - DNA, 15 bp, Homo sapiens
aacgtcaccctgctc

SEQ ID NO: 548104 - DNA, 15 bp, Homo sapiens
acgtcaccctgctct

SEQ ID NO: 548105 - DNA, 15 bp, Homo sapiens
cgtcaccctgctctc

SEQ ID NO: 548106 - DNA, 15 bp, Homo sapiens
gtcaccctgctctcc

SEQ ID NO: 548107 - DNA, 15 bp, Homo sapiens
tcaccctgctctcct

SEQ ID NO: 548108 - DNA, 15 bp, Homo sapiens
caccctgctctcctg

SEQ ID NO: 548109 - DNA, 15 bp, Homo sapiens
accctgctctcctga

SEQ ID NO: 548110 - DNA, 15 bp, Homo sapiens
ccctgctctcctgac

SEQ ID NO: 548111 - DNA, 15 bp, Homo sapiens
cctgctctcctgact

SEQ ID NO: 548112 - DNA, 15 bp, Homo sapiens
ctgctctcctgactt

SEQ ID NO: 548113 - DNA, 15 bp, Homo sapiens
tgctctcctgactta

SEQ ID NO: 548114 - DNA, 15 bp, Homo sapiens
gctctcctgacttaa

SEQ ID NO: 548115 - DNA, 15 bp, Homo sapiens
ctctcctgacttaag

SEQ ID NO: 548116 - DNA, 15 bp, Homo sapiens
tctcctgacttaagt

SEQ ID NO: 548117 - DNA, 15 bp, Homo sapiens
ctcctgacttaagtg

SEQ ID NO: 548118 - DNA, 15 bp, Homo sapiens
tcctgacttaagtgc

SEQ ID NO: 548119 - DNA, 15 bp, Homo sapiens
cctgacttaagtgcc

SEQ ID NO: 548120 - DNA, 15 bp, Homo sapiens
ctgacttaagtgcca

SEQ ID NO: 548121 - DNA, 15 bp, Homo sapiens
tgacttaagtgccat

SEQ ID NO: 548122 - DNA, 15 bp, Homo sapiens
gacttaagtgccatc

SEQ ID NO: 548123 - DNA, 15 bp, Homo sapiens
acttaagtgccatcc

SEQ ID NO: 548124 - DNA, 15 bp, Homo sapiens
cttaagtgccatccg

SEQ ID NO: 548125 - DNA, 15 bp, Homo sapiens
ttaagtgccatccgc

SEQ ID NO: 548126 - DNA, 15 bp, Homo sapiens
taagtgccatccgcc

SEQ ID NO: 548127 - DNA, 15 bp, Homo sapiens
aagtgccatccgcct

SEQ ID NO: 548128 - DNA, 15 bp, Homo sapiens
agtgccatccgcctt

SEQ ID NO: 548129 - DNA, 15 bp, Homo sapiens
gtgccatccgcctta

SEQ ID NO: 548130 - DNA, 15 bp, Homo sapiens
tgccatccgccttat

SEQ ID NO: 548131 - DNA, 15 bp, Homo sapiens
gccatccgccttatt

SEQ ID NO: 548132 - DNA, 15 bp, Homo sapiens
ccatccgccttattt

SEQ ID NO: 548133 - DNA, 15 bp, Homo sapiens
catccgccttatttt

SEQ ID NO: 548134 - DNA, 15 bp, Homo sapiens
atccgccttatttta

SEQ ID NO: 548135 - DNA, 15 bp, Homo sapiens
tccgccttattttat

SEQ ID NO: 548136 - DNA, 15 bp, Homo sapiens
ccgccttattttata

SEQ ID NO: 548137 - DNA, 15 bp, Homo sapiens
cgccttattttatag

SEQ ID NO: 548138 - DNA, 15 bp, Homo sapiens
gccttattttataga

SEQ ID NO: 548139 - DNA, 15 bp, Homo sapiens
ccttattttatagaa

SEQ ID NO: 548140 - DNA, 15 bp, Homo sapiens
cttattttatagaag

SEQ ID NO: 548141 - DNA, 15 bp, Homo sapiens
ttattttatagaaga

SEQ ID NO: 548142 - DNA, 15 bp, Homo sapiens
tattttatagaagaa

SEQ ID NO: 548143 - DNA, 15 bp, Homo sapiens
attttatagaagaaa

SEQ ID NO: 548144 - DNA, 15 bp, Homo sapiens
ttttatagaagaaaa

SEQ ID NO: 548145 - DNA, 15 bp, Homo sapiens
tttatagaagaaaat

SEQ ID NO: 548146 - DNA, 15 bp, Homo sapiens
ttatagaagaaaata

SEQ ID NO: 548147 - DNA, 15 bp, Homo sapiens
tatagaagaaaatac

SEQ ID NO: 548148 - DNA, 15 bp, Homo sapiens
atagaagaaaatact

SEQ ID NO: 548149 - DNA, 15 bp, Homo sapiens
tagaagaaaatactg

SEQ ID NO: 548150 - DNA, 15 bp, Homo sapiens
agaagaaaatactga

SEQ ID NO: 548151 - DNA, 15 bp, Homo sapiens
gaagaaaatactgaa

SEQ ID NO: 548152 - DNA, 15 bp, Homo sapiens
aagaaaatactgaaa

SEQ ID NO: 548153 - DNA, 15 bp, Homo sapiens
agaaaatactgaaac

SEQ ID NO: 548154 - DNA, 15 bp, Homo sapiens
gaaaatactgaaact

SEQ ID NO: 548155 - DNA, 15 bp, Homo sapiens
aaaatactgaaactc

SEQ ID NO: 548156 - DNA, 15 bp, Homo sapiens
aaatactgaaactca

SEQ ID NO: 548157 - DNA, 15 bp, Homo sapiens
aatactgaaactcaa

SEQ ID NO: 548158 - DNA, 15 bp, Homo sapiens
atactgaaactcaag

SEQ ID NO: 548159 - DNA, 15 bp, Homo sapiens
tactgaaactcaaga

SEQ ID NO: 548160 - DNA, 15 bp, Homo sapiens
actgaaactcaagac

SEQ ID NO: 548161 - DNA, 15 bp, Homo sapiens
ctgaaactcaagacc

SEQ ID NO: 548162 - DNA, 15 bp, Homo sapiens
tgaaactcaagaccc

SEQ ID NO: 548163 - DNA, 15 bp, Homo sapiens
gaaactcaagacccg

SEQ ID NO: 548164 - DNA, 15 bp, Homo sapiens
aaactcaagacccgc

SEQ ID NO: 548165 - DNA, 15 bp, Homo sapiens
aactcaagacccgct

SEQ ID NO: 548166 - DNA, 15 bp, Homo sapiens
actcaagacccgcta

SEQ ID NO: 548167 - DNA, 15 bp, Homo sapiens
ctcaagacccgctac

SEQ ID NO: 548168 - DNA, 15 bp, Homo sapiens
tcaagacccgctacc

SEQ ID NO: 548169 - DNA, 15 bp, Homo sapiens
caagacccgctacct

SEQ ID NO: 548170 - DNA, 15 bp, Homo sapiens
aagacccgctacctg

SEQ ID NO: 548171 - DNA, 15 bp, Homo sapiens
agacccgctacctgg

SEQ ID NO: 548172 - DNA, 15 bp, Homo sapiens
gacccgctacctggg

SEQ ID NO: 548173 - DNA, 15 bp, Homo sapiens
acccgctacctgggc

SEQ ID NO: 548174 - DNA, 15 bp, Homo sapiens
cccgctacctgggca

SEQ ID NO: 548175 - DNA, 15 bp, Homo sapiens
ccgctacctgggcag

SEQ ID NO: 548176 - DNA, 15 bp, Homo sapiens
cgctacctgggcagg

SEQ ID NO: 548177 - DNA, 15 bp, Homo sapiens
gctacctgggcaggg

SEQ ID NO: 548178 - DNA, 15 bp, Homo sapiens
ctacctgggcagggg

SEQ ID NO: 548179 - DNA, 15 bp, Homo sapiens
tacctgggcagggga

SEQ ID NO: 548180 - DNA, 15 bp, Homo sapiens
acctgggcaggggag

SEQ ID NO: 548181 - DNA, 15 bp, Homo sapiens
cctgggcaggggagg

SEQ ID NO: 548182 - DNA, 15 bp, Homo sapiens
ctgggcaggggagga

SEQ ID NO: 548183 - DNA, 15 bp, Homo sapiens
tgggcaggggaggag

SEQ ID NO: 548184 - DNA, 15 bp, Homo sapiens
gggcaggggaggagc

SEQ ID NO: 548185 - DNA, 15 bp, Homo sapiens
ggcaggggaggagca

SEQ ID NO: 548186 - DNA, 15 bp, Homo sapiens
gcaggggaggagcag

SEQ ID NO: 548187 - DNA, 15 bp, Homo sapiens
caggggaggagcaga

SEQ ID NO: 548188 - DNA, 15 bp, Homo sapiens
aggggaggagcagag

SEQ ID NO: 548189 - DNA, 15 bp, Homo sapiens
ggggaggagcagaga

SEQ ID NO: 548190 - DNA, 15 bp, Homo sapiens
gggaggagcagagac

SEQ ID NO: 548191 - DNA, 15 bp, Homo sapiens
ggaggagcagagacc

SEQ ID NO: 548192 - DNA, 15 bp, Homo sapiens
gaggagcagagacca

SEQ ID NO: 548193 - DNA, 15 bp, Homo sapiens
aggagcagagaccag

SEQ ID NO: 548194 - DNA, 15 bp, Homo sapiens
ggagcagagaccaga

SEQ ID NO: 548195 - DNA, 15 bp, Homo sapiens
gagcagagaccagaa

SEQ ID NO: 548196 - DNA, 15 bp, Homo sapiens
agcagagaccagaac

SEQ ID NO: 548197 - DNA, 15 bp, Homo sapiens
gcagagaccagaacc

SEQ ID NO: 548198 - DNA, 15 bp, Homo sapiens
cagagaccagaaccc

SEQ ID NO: 548199 - DNA, 15 bp, Homo sapiens
agagaccagaaccct

SEQ ID NO: 548200 - DNA, 15 bp, Homo sapiens
gagaccagaaccctg

SEQ ID NO: 548201 - DNA, 15 bp, Homo sapiens
agaccagaaccctgg

SEQ ID NO: 548202 - DNA, 15 bp, Homo sapiens
gaccagaaccctgga

SEQ ID NO: 548203 - DNA, 15 bp, Homo sapiens
accagaaccctggac

SEQ ID NO: 548204 - DNA, 15 bp, Homo sapiens
ccagaaccctggacc

SEQ ID NO: 548205 - DNA, 15 bp, Homo sapiens
cagaaccctggacct

SEQ ID NO: 548206 - DNA, 15 bp, Homo sapiens
agaaccctggacctc

SEQ ID NO: 548207 - DNA, 15 bp, Homo sapiens
gaaccctggacctct

SEQ ID NO: 548208 - DNA, 15 bp, Homo sapiens
aaccctggacctctg

SEQ ID NO: 548209 - DNA, 15 bp, Homo sapiens
accctggacctctgg

SEQ ID NO: 548210 - DNA, 15 bp, Homo sapiens
ccctggacctctggc

SEQ ID NO: 548211 - DNA, 15 bp, Homo sapiens
cctggacctctggct

SEQ ID NO: 548212 - DNA, 15 bp, Homo sapiens
ctggacctctggctc

SEQ ID NO: 548213 - DNA, 15 bp, Homo sapiens
tggacctctggctcc

SEQ ID NO: 548214 - DNA, 15 bp, Homo sapiens
ggacctctggctcca

SEQ ID NO: 548215 - DNA, 15 bp, Homo sapiens
gacctctggctccat

SEQ ID NO: 548216 - DNA, 15 bp, Homo sapiens
acctctggctccatg

SEQ ID NO: 548217 - DNA, 15 bp, Homo sapiens
cctctggctccatgc

SEQ ID NO: 548218 - DNA, 15 bp, Homo sapiens
ctctggctccatgct

SEQ ID NO: 548219 - DNA, 15 bp, Homo sapiens
tctggctccatgctg

SEQ ID NO: 548220 - DNA, 15 bp, Homo sapiens
ctggctccatgctgt

SEQ ID NO: 548221 - DNA, 15 bp, Homo sapiens
tggctccatgctgtt

SEQ ID NO: 548222 - DNA, 15 bp, Homo sapiens
ggctccatgctgttt

SEQ ID NO: 548223 - DNA, 15 bp, Homo sapiens
gctccatgctgtttc

SEQ ID NO: 548224 - DNA, 15 bp, Homo sapiens
ctccatgctgtttct

SEQ ID NO: 548225 - DNA, 15 bp, Homo sapiens
tccatgctgtttcta

SEQ ID NO: 548226 - DNA, 15 bp, Homo sapiens
ccatgctgtttctac

SEQ ID NO: 548227 - DNA, 15 bp, Homo sapiens
catgctgtttctact

SEQ ID NO: 548228 - DNA, 15 bp, Homo sapiens
atgctgtttctactc

SEQ ID NO: 548229 - DNA, 15 bp, Homo sapiens
tgctgtttctactct

SEQ ID NO: 548230 - DNA, 15 bp, Homo sapiens
gctgtttctactcta

SEQ ID NO: 548231 - DNA, 15 bp, Homo sapiens
ctgtttctactctac

SEQ ID NO: 548232 - DNA, 15 bp, Homo sapiens
tgtttctactctaca

SEQ ID NO: 548233 - DNA, 15 bp, Homo sapiens
gtttctactctacac

SEQ ID NO: 548234 - DNA, 15 bp, Homo sapiens
tttctactctacact

SEQ ID NO: 548235 - DNA, 15 bp, Homo sapiens
ttctactctacactc

SEQ ID NO: 548236 - DNA, 15 bp, Homo sapiens
tctactctacactcc

SEQ ID NO: 548237 - DNA, 15 bp, Homo sapiens
ctactctacactcca

SEQ ID NO: 548238 - DNA, 15 bp, Homo sapiens
tactctacactccat

SEQ ID NO: 548239 - DNA, 15 bp, Homo sapiens
actctacactccatc

SEQ ID NO: 548240 - DNA, 15 bp, Homo sapiens
ctctacactccatct

SEQ ID NO: 548241 - DNA, 15 bp, Homo sapiens
tctacactccatctt

SEQ ID NO: 548242 - DNA, 15 bp, Homo sapiens
ctacactccatcttc

SEQ ID NO: 548243 - DNA, 15 bp, Homo sapiens
tacactccatcttcc

SEQ ID NO: 548244 - DNA, 15 bp, Homo sapiens
acactccatcttcca

SEQ ID NO: 548245 - DNA, 15 bp, Homo sapiens
cactccatcttccac

SEQ ID NO: 548246 - DNA, 15 bp, Homo sapiens
actccatcttccaca

SEQ ID NO: 548247 - DNA, 15 bp, Homo sapiens
ctccatcttccacat

SEQ ID NO: 548248 - DNA, 15 bp, Homo sapiens
tccatcttccacatc

SEQ ID NO: 548249 - DNA, 15 bp, Homo sapiens
ccatcttccacatct

SEQ ID NO: 548250 - DNA, 15 bp, Homo sapiens
catcttccacatctg

SEQ ID NO: 548251 - DNA, 15 bp, Homo sapiens
atcttccacatctgc

SEQ ID NO: 548252 - DNA, 15 bp, Homo sapiens
tcttccacatctgct

SEQ ID NO: 548253 - DNA, 15 bp, Homo sapiens
cttccacatctgctt

SEQ ID NO: 548254 - DNA, 15 bp, Homo sapiens
ttccacatctgcttt

SEQ ID NO: 548255 - DNA, 15 bp, Homo sapiens
tccacatctgctttt

SEQ ID NO: 548256 - DNA, 15 bp, Homo sapiens
ccacatctgcttttt

SEQ ID NO: 548257 - DNA, 15 bp, Homo sapiens
cacatctgctttttg

SEQ ID NO: 548258 - DNA, 15 bp, Homo sapiens
acatctgctttttgc

SEQ ID NO: 548259 - DNA, 15 bp, Homo sapiens
catctgctttttgct

SEQ ID NO: 548260 - DNA, 15 bp, Homo sapiens
atctgctttttgcta

SEQ ID NO: 548261 - DNA, 15 bp, Homo sapiens
tctgctttttgctaa

SEQ ID NO: 548262 - DNA, 15 bp, Homo sapiens
ctgctttttgctaat

SEQ ID NO: 548263 - DNA, 15 bp, Homo sapiens
tgctttttgctaata

SEQ ID NO: 548264 - DNA, 15 bp, Homo sapiens
gctttttgctaatat

SEQ ID NO: 548265 - DNA, 15 bp, Homo sapiens
ctttttgctaatatc

SEQ ID NO: 548266 - DNA, 15 bp, Homo sapiens
tttttgctaatatcc

SEQ ID NO: 548267 - DNA, 15 bp, Homo sapiens
ttttgctaatatccc

SEQ ID NO: 548268 - DNA, 15 bp, Homo sapiens
tttgctaatatccca

SEQ ID NO: 548269 - DNA, 15 bp, Homo sapiens
ttgctaatatcccat

SEQ ID NO: 548270 - DNA, 15 bp, Homo sapiens
tgctaatatcccata

SEQ ID NO: 548271 - DNA, 15 bp, Homo sapiens
gctaatatcccatag

SEQ ID NO: 548272 - DNA, 15 bp, Homo sapiens
ctaatatcccatagc

SEQ ID NO: 548273 - DNA, 15 bp, Homo sapiens
taatatcccatagct

SEQ ID NO: 548274 - DNA, 15 bp, Homo sapiens
aatatcccatagcta

SEQ ID NO: 548275 - DNA, 15 bp, Homo sapiens
atatcccatagctaa

SEQ ID NO: 548276 - DNA, 15 bp, Homo sapiens
tatcccatagctaag

SEQ ID NO: 548277 - DNA, 15 bp, Homo sapiens
atcccatagctaaga

SEQ ID NO: 548278 - DNA, 15 bp, Homo sapiens
tcccatagctaagaa

SEQ ID NO: 548279 - DNA, 15 bp, Homo sapiens
cccatagctaagaaa

SEQ ID NO: 548280 - DNA, 15 bp, Homo sapiens
ccatagctaagaaat

SEQ ID NO: 548281 - DNA, 15 bp, Homo sapiens
catagctaagaaata

SEQ ID NO: 548282 - DNA, 15 bp, Homo sapiens
atagctaagaaataa

SEQ ID NO: 548283 - DNA, 15 bp, Homo sapiens
tagctaagaaataag

SEQ ID NO: 548284 - DNA, 15 bp, Homo sapiens
agctaagaaataaga

SEQ ID NO: 548285 - DNA, 15 bp, Homo sapiens
gctaagaaataagat

SEQ ID NO: 548286 - DNA, 15 bp, Homo sapiens
ctaagaaataagata

SEQ ID NO: 548287 - DNA, 15 bp, Homo sapiens
taagaaataagatat

SEQ ID NO: 548288 - DNA, 15 bp, Homo sapiens
aagaaataagatata

SEQ ID NO: 548289 - DNA, 15 bp, Homo sapiens
agaaataagatataa

SEQ ID NO: 548290 - DNA, 15 bp, Homo sapiens
gaaataagatataaa

SEQ ID NO: 548291 - DNA, 15 bp, Homo sapiens
aaataagatataaac

SEQ ID NO: 548292 - DNA, 15 bp, Homo sapiens
aataagatataaaca

SEQ ID NO: 548293 - DNA, 15 bp, Homo sapiens
ataagatataaacaa

SEQ ID NO: 548294 - DNA, 15 bp, Homo sapiens
taagatataaacaat

SEQ ID NO: 548295 - DNA, 15 bp, Homo sapiens
aagatataaacaatg

SEQ ID NO: 548296 - DNA, 15 bp, Homo sapiens
agatataaacaatgc

SEQ ID NO: 548297 - DNA, 15 bp, Homo sapiens
gatataaacaatgcc

SEQ ID NO: 548298 - DNA, 15 bp, Homo sapiens
atataaacaatgcct

SEQ ID NO: 548299 - DNA, 15 bp, Homo sapiens
tataaacaatgcctt

SEQ ID NO: 548300 - DNA, 15 bp, Homo sapiens
ataaacaatgccttg

SEQ ID NO: 548301 - DNA, 15 bp, Homo sapiens
taaacaatgccttga

SEQ ID NO: 548302 - DNA, 15 bp, Homo sapiens
aaacaatgccttgaa

SEQ ID NO: 548303 - DNA, 15 bp, Homo sapiens
aacaatgccttgaaa

SEQ ID NO: 548304 - DNA, 15 bp, Homo sapiens
acaatgccttgaaat

SEQ ID NO: 548305 - DNA, 15 bp, Homo sapiens
caatgccttgaaata

SEQ ID NO: 548306 - DNA, 15 bp, Homo sapiens
aatgccttgaaatac

SEQ ID NO: 548307 - DNA, 15 bp, Homo sapiens
atgccttgaaataca

SEQ ID NO: 548308 - DNA, 15 bp, Homo sapiens
tgccttgaaatacaa

SEQ ID NO: 548309 - DNA, 15 bp, Homo sapiens
gccttgaaatacaag

SEQ ID NO: 548310 - DNA, 15 bp, Homo sapiens
ccttgaaatacaaga

SEQ ID NO: 548311 - DNA, 15 bp, Homo sapiens
cttgaaatacaagac

SEQ ID NO: 548312 - DNA, 15 bp, Homo sapiens
ttgaaatacaagaca

SEQ ID NO: 548313 - DNA, 15 bp, Homo sapiens
tgaaatacaagacaa

SEQ ID NO: 548314 - DNA, 15 bp, Homo sapiens
gaaatacaagacaac

SEQ ID NO: 548315 - DNA, 15 bp, Homo sapiens
aaatacaagacaacc

SEQ ID NO: 548316 - DNA, 15 bp, Homo sapiens
aatacaagacaacca

SEQ ID NO: 548317 - DNA, 15 bp, Homo sapiens
atacaagacaaccaa

SEQ ID NO: 548318 - DNA, 15 bp, Homo sapiens
tacaagacaaccaag

SEQ ID NO: 548319 - DNA, 15 bp, Homo sapiens
acaagacaaccaagg

SEQ ID NO: 548320 - DNA, 15 bp, Homo sapiens
caagacaaccaaggc

SEQ ID NO: 548321 - DNA, 15 bp, Homo sapiens
aagacaaccaaggcc

SEQ ID NO: 548322 - DNA, 15 bp, Homo sapiens
agacaaccaaggcct

SEQ ID NO: 548323 - DNA, 15 bp, Homo sapiens
gacaaccaaggcctc

SEQ ID NO: 548324 - DNA, 15 bp, Homo sapiens
acaaccaaggcctca

SEQ ID NO: 548325 - DNA, 15 bp, Homo sapiens
caaccaaggcctcac

SEQ ID NO: 548326 - DNA, 15 bp, Homo sapiens
aaccaaggcctcacc

SEQ ID NO: 548327 - DNA, 15 bp, Homo sapiens
accaaggcctcacct

SEQ ID NO: 548328 - DNA, 15 bp, Homo sapiens
ccaaggcctcacctt

SEQ ID NO: 548329 - DNA, 15 bp, Homo sapiens
caaggcctcaccttt

SEQ ID NO: 548330 - DNA, 15 bp, Homo sapiens
aaggcctcacctttc

SEQ ID NO: 548331 - DNA, 15 bp, Homo sapiens
aggcctcacctttct

SEQ ID NO: 548332 - DNA, 15 bp, Homo sapiens
ggcctcacctttctc

SEQ ID NO: 548333 - DNA, 15 bp, Homo sapiens
gcctcacctttctct

SEQ ID NO: 548334 - DNA, 15 bp, Homo sapiens
cctcacctttctctc

SEQ ID NO: 548335 - DNA, 15 bp, Homo sapiens
ctcacctttctctca

SEQ ID NO: 548336 - DNA, 15 bp, Homo sapiens
tcacctttctctcat

SEQ ID NO: 548337 - DNA, 15 bp, Homo sapiens
cacctttctctcatt

SEQ ID NO: 548338 - DNA, 15 bp, Homo sapiens
acctttctctcatta

SEQ ID NO: 548339 - DNA, 15 bp, Homo sapiens
cctttctctcattac

SEQ ID NO: 548340 - DNA, 15 bp, Homo sapiens
ctttctctcattact

SEQ ID NO: 548341 - DNA, 15 bp, Homo sapiens
tttctctcattactc

SEQ ID NO: 548342 - DNA, 15 bp, Homo sapiens
ttctctcattactca

SEQ ID NO: 548343 - DNA, 15 bp, Homo sapiens
tctctcattactcaa

SEQ ID NO: 548344 - DNA, 15 bp, Homo sapiens
ctctcattactcaaa

SEQ ID NO: 548345 - DNA, 15 bp, Homo sapiens
tctcattactcaaat

SEQ ID NO: 548346 - DNA, 15 bp, Homo sapiens
ctcattactcaaatg

SEQ ID NO: 548347 - DNA, 15 bp, Homo sapiens
tcattactcaaatga

SEQ ID NO: 548348 - DNA, 15 bp, Homo sapiens
cattactcaaatgat

SEQ ID NO: 548349 - DNA, 15 bp, Homo sapiens
attactcaaatgatg

SEQ ID NO: 548350 - DNA, 15 bp, Homo sapiens
ttactcaaatgatgc

SEQ ID NO: 548351 - DNA, 15 bp, Homo sapiens
tactcaaatgatgca

SEQ ID NO: 548352 - DNA, 15 bp, Homo sapiens
actcaaatgatgcaa

SEQ ID NO: 548353 - DNA, 15 bp, Homo sapiens
ctcaaatgatgcaaa

SEQ ID NO: 548354 - DNA, 15 bp, Homo sapiens
tcaaatgatgcaaag

SEQ ID NO: 548355 - DNA, 15 bp, Homo sapiens
caaatgatgcaaagc

SEQ ID NO: 548356 - DNA, 15 bp, Homo sapiens
aaatgatgcaaagcc

SEQ ID NO: 548357 - DNA, 15 bp, Homo sapiens
aatgatgcaaagccc

SEQ ID NO: 548358 - DNA, 15 bp, Homo sapiens
atgatgcaaagcccg

SEQ ID NO: 548359 - DNA, 15 bp, Homo sapiens
tgatgcaaagcccga

SEQ ID NO: 548360 - DNA, 15 bp, Homo sapiens
gatgcaaagcccgaa

SEQ ID NO: 548361 - DNA, 15 bp, Homo sapiens
atgcaaagcccgaag

SEQ ID NO: 548362 - DNA, 15 bp, Homo sapiens
tgcaaagcccgaagc

SEQ ID NO: 548363 - DNA, 15 bp, Homo sapiens
gcaaagcccgaagcc

SEQ ID NO: 548364 - DNA, 15 bp, Homo sapiens
caaagcccgaagccc

SEQ ID NO: 548365 - DNA, 15 bp, Homo sapiens
aaagcccgaagccct

SEQ ID NO: 548366 - DNA, 15 bp, Homo sapiens
aagcccgaagccctc

SEQ ID NO: 548367 - DNA, 15 bp, Homo sapiens
agcccgaagccctct

SEQ ID NO: 548368 - DNA, 15 bp, Homo sapiens
gcccgaagccctctc

SEQ ID NO: 548369 - DNA, 15 bp, Homo sapiens
cccgaagccctctcc

SEQ ID NO: 548370 - DNA, 15 bp, Homo sapiens
ccgaagccctctcca

SEQ ID NO: 548371 - DNA, 15 bp, Homo sapiens
cgaagccctctccac

SEQ ID NO: 548372 - DNA, 15 bp, Homo sapiens
gaagccctctccacc

SEQ ID NO: 548373 - DNA, 15 bp, Homo sapiens
aagccctctccacct

SEQ ID NO: 548374 - DNA, 15 bp, Homo sapiens
agccctctccacctg

SEQ ID NO: 548375 - DNA, 15 bp, Homo sapiens
gccctctccacctga

SEQ ID NO: 548376 - DNA, 15 bp, Homo sapiens
ccctctccacctgac

SEQ ID NO: 548377 - DNA, 15 bp, Homo sapiens
cctctccacctgact

SEQ ID NO: 548378 - DNA, 15 bp, Homo sapiens
ctctccacctgactt

SEQ ID NO: 548379 - DNA, 15 bp, Homo sapiens
tctccacctgacttc

SEQ ID NO: 548380 - DNA, 15 bp, Homo sapiens
ctccacctgacttca

SEQ ID NO: 548381 - DNA, 15 bp, Homo sapiens
tccacctgacttcat

SEQ ID NO: 548382 - DNA, 15 bp, Homo sapiens
ccacctgacttcatc

SEQ ID NO: 548383 - DNA, 15 bp, Homo sapiens
cacctgacttcatcc

SEQ ID NO: 548384 - DNA, 15 bp, Homo sapiens
acctgacttcatcca

SEQ ID NO: 548385 - DNA, 15 bp, Homo sapiens
cctgacttcatccac

SEQ ID NO: 548386 - DNA, 15 bp, Homo sapiens
ctgacttcatccact

SEQ ID NO: 548387 - DNA, 15 bp, Homo sapiens
tgacttcatccacta

SEQ ID NO: 548388 - DNA, 15 bp, Homo sapiens
gacttcatccactac

SEQ ID NO: 548389 - DNA, 15 bp, Homo sapiens
acttcatccactacc

SEQ ID NO: 548390 - DNA, 15 bp, Homo sapiens
cttcatccactaccg

SEQ ID NO: 548391 - DNA, 15 bp, Homo sapiens
ttcatccactaccgc

SEQ ID NO: 548392 - DNA, 15 bp, Homo sapiens
tcatccactaccgcc

SEQ ID NO: 548393 - DNA, 15 bp, Homo sapiens
catccactaccgcct

SEQ ID NO: 548394 - DNA, 15 bp, Homo sapiens
atccactaccgcctg

SEQ ID NO: 548395 - DNA, 15 bp, Homo sapiens
tccactaccgcctga

SEQ ID NO: 548396 - DNA, 15 bp, Homo sapiens
ccactaccgcctgag

SEQ ID NO: 548397 - DNA, 15 bp, Homo sapiens
cactaccgcctgagc

SEQ ID NO: 548398 - DNA, 15 bp, Homo sapiens
actaccgcctgagct

SEQ ID NO: 548399 - DNA, 15 bp, Homo sapiens
ctaccgcctgagctc

SEQ ID NO: 548400 - DNA, 15 bp, Homo sapiens
taccgcctgagctct

SEQ ID NO: 548401 - DNA, 15 bp, Homo sapiens
accgcctgagctctc

SEQ ID NO: 548402 - DNA, 15 bp, Homo sapiens
ccgcctgagctctcc

SEQ ID NO: 548403 - DNA, 15 bp, Homo sapiens
cgcctgagctctcca

SEQ ID NO: 548404 - DNA, 15 bp, Homo sapiens
gcctgagctctccaa

SEQ ID NO: 548405 - DNA, 15 bp, Homo sapiens
cctgagctctccaaa

SEQ ID NO: 548406 - DNA, 15 bp, Homo sapiens
ctgagctctccaaat

SEQ ID NO: 548407 - DNA, 15 bp, Homo sapiens
tgagctctccaaatg

SEQ ID NO: 548408 - DNA, 15 bp, Homo sapiens
gagctctccaaatgc

SEQ ID NO: 548409 - DNA, 15 bp, Homo sapiens
agctctccaaatgct

SEQ ID NO: 548410 - DNA, 15 bp, Homo sapiens
gctctccaaatgctt

SEQ ID NO: 548411 - DNA, 15 bp, Homo sapiens
ctctccaaatgcttc

SEQ ID NO: 548412 - DNA, 15 bp, Homo sapiens
tctccaaatgcttcc

SEQ ID NO: 548413 - DNA, 15 bp, Homo sapiens
ctccaaatgcttcca

SEQ ID NO: 548414 - DNA, 15 bp, Homo sapiens
tccaaatgcttccag

SEQ ID NO: 548415 - DNA, 15 bp, Homo sapiens
ccaaatgcttccagg

SEQ ID NO: 548416 - DNA, 15 bp, Homo sapiens
caaatgcttccaggt

SEQ ID NO: 548417 - DNA, 15 bp, Homo sapiens
aaatgcttccaggtg

SEQ ID NO: 548418 - DNA, 15 bp, Homo sapiens
aatgcttccaggtgg

SEQ ID NO: 548419 - DNA, 15 bp, Homo sapiens
atgcttccaggtggg

SEQ ID NO: 548420 - DNA, 15 bp, Homo sapiens
tgcttccaggtggga

SEQ ID NO: 548421 - DNA, 15 bp, Homo sapiens
gcttccaggtgggac

SEQ ID NO: 548422 - DNA, 15 bp, Homo sapiens
cttccaggtgggaca

SEQ ID NO: 548423 - DNA, 15 bp, Homo sapiens
ttccaggtgggacac

SEQ ID NO: 548424 - DNA, 15 bp, Homo sapiens
tccaggtgggacacc

SEQ ID NO: 548425 - DNA, 15 bp, Homo sapiens
ccaggtgggacaccc

SEQ ID NO: 548426 - DNA, 15 bp, Homo sapiens
caggtgggacaccca

SEQ ID NO: 548427 - DNA, 15 bp, Homo sapiens
aggtgggacacccaa

SEQ ID NO: 548428 - DNA, 15 bp, Homo sapiens
ggtgggacacccaag

SEQ ID NO: 548429 - DNA, 15 bp, Homo sapiens
gtgggacacccaagt

SEQ ID NO: 548430 - DNA, 15 bp, Homo sapiens
tgggacacccaagtt

SEQ ID NO: 548431 - DNA, 15 bp, Homo sapiens
gggacacccaagttc

SEQ ID NO: 548432 - DNA, 15 bp, Homo sapiens
ggacacccaagttca

SEQ ID NO: 548433 - DNA, 15 bp, Homo sapiens
gacacccaagttcaa

SEQ ID NO: 548434 - DNA, 15 bp, Homo sapiens
acacccaagttcaag

SEQ ID NO: 548435 - DNA, 15 bp, Homo sapiens
cacccaagttcaagg

SEQ ID NO: 548436 - DNA, 15 bp, Homo sapiens
acccaagttcaaggc

SEQ ID NO: 548437 - DNA, 15 bp, Homo sapiens
cccaagttcaaggcc

SEQ ID NO: 548438 - DNA, 15 bp, Homo sapiens
ccaagttcaaggccc

SEQ ID NO: 548439 - DNA, 15 bp, Homo sapiens
caagttcaaggcccc

SEQ ID NO: 548440 - DNA, 15 bp, Homo sapiens
aagttcaaggcccct

SEQ ID NO: 548441 - DNA, 15 bp, Homo sapiens
agttcaaggcccctt

SEQ ID NO: 548442 - DNA, 15 bp, Homo sapiens
gttcaaggccccttt

SEQ ID NO: 548443 - DNA, 15 bp, Homo sapiens
ttcaaggcccctttg

SEQ ID NO: 548444 - DNA, 15 bp, Homo sapiens
tcaaggcccctttga

SEQ ID NO: 548445 - DNA, 15 bp, Homo sapiens
caaggcccctttgat

SEQ ID NO: 548446 - DNA, 15 bp, Homo sapiens
aaggcccctttgatt

SEQ ID NO: 548447 - DNA, 15 bp, Homo sapiens
aggcccctttgattc

SEQ ID NO: 548448 - DNA, 15 bp, Homo sapiens
ggcccctttgattcc

SEQ ID NO: 548449 - DNA, 15 bp, Homo sapiens
gcccctttgattcct

SEQ ID NO: 548450 - DNA, 15 bp, Homo sapiens
cccctttgattcctg

SEQ ID NO: 548451 - DNA, 15 bp, Homo sapiens
ccctttgattcctgg

SEQ ID NO: 548452 - DNA, 15 bp, Homo sapiens
cctttgattcctggt

SEQ ID NO: 548453 - DNA, 15 bp, Homo sapiens
ctttgattcctggtt

SEQ ID NO: 548454 - DNA, 15 bp, Homo sapiens
tttgattcctggtta

SEQ ID NO: 548455 - DNA, 15 bp, Homo sapiens
ttgattcctggttat

SEQ ID NO: 548456 - DNA, 15 bp, Homo sapiens
tgattcctggttatc

SEQ ID NO: 548457 - DNA, 15 bp, Homo sapiens
gattcctggttatct

SEQ ID NO: 548458 - DNA, 15 bp, Homo sapiens
attcctggttatctt

SEQ ID NO: 548459 - DNA, 15 bp, Homo sapiens
ttcctggttatcttc

SEQ ID NO: 548460 - DNA, 15 bp, Homo sapiens
tcctggttatcttct

SEQ ID NO: 548461 - DNA, 15 bp, Homo sapiens
cctggttatcttcta

SEQ ID NO: 548462 - DNA, 15 bp, Homo sapiens
ctggttatcttctag

SEQ ID NO: 548463 - DNA, 15 bp, Homo sapiens
tggttatcttctagc

SEQ ID NO: 548464 - DNA, 15 bp, Homo sapiens
ggttatcttctagct

SEQ ID NO: 548465 - DNA, 15 bp, Homo sapiens
gttatcttctagctg

SEQ ID NO: 548466 - DNA, 15 bp, Homo sapiens
ttatcttctagctgc

SEQ ID NO: 548467 - DNA, 15 bp, Homo sapiens
tatcttctagctgct

SEQ ID NO: 548468 - DNA, 15 bp, Homo sapiens
atcttctagctgctg

SEQ ID NO: 548469 - DNA, 15 bp, Homo sapiens
tcttctagctgctga

SEQ ID NO: 548470 - DNA, 15 bp, Homo sapiens
cttctagctgctgag

SEQ ID NO: 548471 - DNA, 15 bp, Homo sapiens
ttctagctgctgagc

SEQ ID NO: 548472 - DNA, 15 bp, Homo sapiens
tctagctgctgagcc

SEQ ID NO: 548473 - DNA, 15 bp, Homo sapiens
ctagctgctgagcct

SEQ ID NO: 548474 - DNA, 15 bp, Homo sapiens
tagctgctgagcctc

SEQ ID NO: 548475 - DNA, 15 bp, Homo sapiens
agctgctgagcctct

SEQ ID NO: 548476 - DNA, 15 bp, Homo sapiens
gctgctgagcctctg

SEQ ID NO: 548477 - DNA, 15 bp, Homo sapiens
ctgctgagcctctgc

SEQ ID NO: 548478 - DNA, 15 bp, Homo sapiens
tgctgagcctctgca

SEQ ID NO: 548479 - DNA, 15 bp, Homo sapiens
gctgagcctctgcat

SEQ ID NO: 548480 - DNA, 15 bp, Homo sapiens
ctgagcctctgcatt

SEQ ID NO: 548481 - DNA, 15 bp, Homo sapiens
tgagcctctgcattg

SEQ ID NO: 548482 - DNA, 15 bp, Homo sapiens
gagcctctgcattgt

SEQ ID NO: 548483 - DNA, 15 bp, Homo sapiens
agcctctgcattgta

SEQ ID NO: 548484 - DNA, 15 bp, Homo sapiens
gcctctgcattgtat

SEQ ID NO: 548485 - DNA, 15 bp, Homo sapiens
cctctgcattgtata

SEQ ID NO: 548486 - DNA, 15 bp, Homo sapiens
ctctgcattgtatag

SEQ ID NO: 548487 - DNA, 15 bp, Homo sapiens
tctgcattgtatagc

SEQ ID NO: 548488 - DNA, 15 bp, Homo sapiens
ctgcattgtatagcg

SEQ ID NO: 548489 - DNA, 15 bp, Homo sapiens
tgcattgtatagcgt

SEQ ID NO: 548490 - DNA, 15 bp, Homo sapiens
gcattgtatagcgtg

SEQ ID NO: 548491 - DNA, 15 bp, Homo sapiens
cattgtatagcgtga

SEQ ID NO: 548492 - DNA, 15 bp, Homo sapiens
attgtatagcgtgaa

SEQ ID NO: 548493 - DNA, 15 bp, Homo sapiens
ttgtatagcgtgaac

SEQ ID NO: 548494 - DNA, 15 bp, Homo sapiens
tgtatagcgtgaaca

SEQ ID NO: 548495 - DNA, 15 bp, Homo sapiens
gtatagcgtgaacag

SEQ ID NO: 548496 - DNA, 15 bp, Homo sapiens
tatagcgtgaacaga

SEQ ID NO: 548497 - DNA, 15 bp, Homo sapiens
atagcgtgaacagag

SEQ ID NO: 548498 - DNA, 15 bp, Homo sapiens
tagcgtgaacagagc

SEQ ID NO: 548499 - DNA, 15 bp, Homo sapiens
agcgtgaacagagcc

SEQ ID NO: 548500 - DNA, 15 bp, Homo sapiens
gcgtgaacagagccc

SEQ ID NO: 548501 - DNA, 15 bp, Homo sapiens
cgtgaacagagccca

SEQ ID NO: 548502 - DNA, 15 bp, Homo sapiens
gtgaacagagcccag

SEQ ID NO: 548503 - DNA, 15 bp, Homo sapiens
tgaacagagcccagc

SEQ ID NO: 548504 - DNA, 15 bp, Homo sapiens
gaacagagcccagct

SEQ ID NO: 548505 - DNA, 15 bp, Homo sapiens
aacagagcccagctt

SEQ ID NO: 548506 - DNA, 15 bp, Homo sapiens
acagagcccagcttt

SEQ ID NO: 548507 - DNA, 15 bp, Homo sapiens
cagagcccagctttg

SEQ ID NO: 548508 - DNA, 15 bp, Homo sapiens
agagcccagctttgc

SEQ ID NO: 548509 - DNA, 15 bp, Homo sapiens
gagcccagctttgca

SEQ ID NO: 548510 - DNA, 15 bp, Homo sapiens
agcccagctttgcag

SEQ ID NO: 548511 - DNA, 15 bp, Homo sapiens
gcccagctttgcagc

SEQ ID NO: 548512 - DNA, 15 bp, Homo sapiens
cccagctttgcagcc

SEQ ID NO: 548513 - DNA, 15 bp, Homo sapiens
ccagctttgcagcca

SEQ ID NO: 548514 - DNA, 15 bp, Homo sapiens
cagctttgcagccag

SEQ ID NO: 548515 - DNA, 15 bp, Homo sapiens
agctttgcagccaga

SEQ ID NO: 548516 - DNA, 15 bp, Homo sapiens
gctttgcagccagaa

SEQ ID NO: 548517 - DNA, 15 bp, Homo sapiens
ctttgcagccagaaa

SEQ ID NO: 548518 - DNA, 15 bp, Homo sapiens
tttgcagccagaaag

SEQ ID NO: 548519 - DNA, 15 bp, Homo sapiens
ttgcagccagaaaga

SEQ ID NO: 548520 - DNA, 15 bp, Homo sapiens
tgcagccagaaagat

SEQ ID NO: 548521 - DNA, 15 bp, Homo sapiens
gcagccagaaagatc

SEQ ID NO: 548522 - DNA, 15 bp, Homo sapiens
cagccagaaagatct

SEQ ID NO: 548523 - DNA, 15 bp, Homo sapiens
agccagaaagatctg

SEQ ID NO: 548524 - DNA, 15 bp, Homo sapiens
gccagaaagatctgg

SEQ ID NO: 548525 - DNA, 15 bp, Homo sapiens
ccagaaagatctggc

SEQ ID NO: 548526 - DNA, 15 bp, Homo sapiens
cagaaagatctggct

SEQ ID NO: 548527 - DNA, 15 bp, Homo sapiens
agaaagatctggctt

SEQ ID NO: 548528 - DNA, 15 bp, Homo sapiens
gaaagatctggcttt

SEQ ID NO: 548529 - DNA, 15 bp, Homo sapiens
aaagatctggctttt

SEQ ID NO: 548530 - DNA, 15 bp, Homo sapiens
aagatctggctttta

SEQ ID NO: 548531 - DNA, 15 bp, Homo sapiens
agatctggcttttac

SEQ ID NO: 548532 - DNA, 15 bp, Homo sapiens
gatctggcttttact

SEQ ID NO: 548533 - DNA, 15 bp, Homo sapiens
atctggcttttactc

SEQ ID NO: 548534 - DNA, 15 bp, Homo sapiens
tctggcttttactcc

SEQ ID NO: 548535 - DNA, 15 bp, Homo sapiens
ctggcttttactcct

SEQ ID NO: 548536 - DNA, 15 bp, Homo sapiens
tggcttttactcctg

SEQ ID NO: 548537 - DNA, 15 bp, Homo sapiens
ggcttttactcctgg

SEQ ID NO: 548538 - DNA, 15 bp, Homo sapiens
gcttttactcctggc

SEQ ID NO: 548539 - DNA, 15 bp, Homo sapiens
cttttactcctggca

SEQ ID NO: 548540 - DNA, 15 bp, Homo sapiens
ttttactcctggcac

SEQ ID NO: 548541 - DNA, 15 bp, Homo sapiens
tttactcctggcacc

SEQ ID NO: 548542 - DNA, 15 bp, Homo sapiens
ttactcctggcaccc

SEQ ID NO: 548543 - DNA, 15 bp, Homo sapiens
tactcctggcacccc

SEQ ID NO: 548544 - DNA, 15 bp, Homo sapiens
actcctggcacccca

SEQ ID NO: 548545 - DNA, 15 bp, Homo sapiens
ctcctggcaccccac

SEQ ID NO: 548546 - DNA, 15 bp, Homo sapiens
tcctggcaccccact

SEQ ID NO: 548547 - DNA, 15 bp, Homo sapiens
cctggcaccccactt

SEQ ID NO: 548548 - DNA, 15 bp, Homo sapiens
ctggcaccccacttc

SEQ ID NO: 548549 - DNA, 15 bp, Homo sapiens
tggcaccccacttca

SEQ ID NO: 548550 - DNA, 15 bp, Homo sapiens
ggcaccccacttcaa

SEQ ID NO: 548551 - DNA, 15 bp, Homo sapiens
gcaccccacttcaag

SEQ ID NO: 548552 - DNA, 15 bp, Homo sapiens
caccccacttcaagc

SEQ ID NO: 548553 - DNA, 15 bp, Homo sapiens
accccacttcaagct

SEQ ID NO: 548554 - DNA, 15 bp, Homo sapiens
ccccacttcaagctg

SEQ ID NO: 548555 - DNA, 15 bp, Homo sapiens
cccacttcaagctgt

SEQ ID NO: 548556 - DNA, 15 bp, Homo sapiens
ccacttcaagctgtg

SEQ ID NO: 548557 - DNA, 15 bp, Homo sapiens
cacttcaagctgtgt

SEQ ID NO: 548558 - DNA, 15 bp, Homo sapiens
acttcaagctgtgtg

SEQ ID NO: 548559 - DNA, 15 bp, Homo sapiens
cttcaagctgtgtga

SEQ ID NO: 548560 - DNA, 15 bp, Homo sapiens
ttcaagctgtgtgac

SEQ ID NO: 548561 - DNA, 15 bp, Homo sapiens
tcaagctgtgtgaca

SEQ ID NO: 548562 - DNA, 15 bp, Homo sapiens
caagctgtgtgacat

SEQ ID NO: 548563 - DNA, 15 bp, Homo sapiens
aagctgtgtgacatt

SEQ ID NO: 548564 - DNA, 15 bp, Homo sapiens
agctgtgtgacattg

SEQ ID NO: 548565 - DNA, 15 bp, Homo sapiens
gctgtgtgacattgg

SEQ ID NO: 548566 - DNA, 15 bp, Homo sapiens
ctgtgtgacattgga

SEQ ID NO: 548567 - DNA, 15 bp, Homo sapiens
tgtgtgacattggac

SEQ ID NO: 548568 - DNA, 15 bp, Homo sapiens
gtgtgacattggaca

SEQ ID NO: 548569 - DNA, 15 bp, Homo sapiens
tgtgacattggacaa

SEQ ID NO: 548570 - DNA, 15 bp, Homo sapiens
gtgacattggacaaa

SEQ ID NO: 548571 - DNA, 15 bp, Homo sapiens
tgacattggacaaat

SEQ ID NO: 548572 - DNA, 15 bp, Homo sapiens
gacattggacaaatc

SEQ ID NO: 548573 - DNA, 15 bp, Homo sapiens
acattggacaaatca

SEQ ID NO: 548574 - DNA, 15 bp, Homo sapiens
cattggacaaatcac

SEQ ID NO: 548575 - DNA, 15 bp, Homo sapiens
attggacaaatcaca

SEQ ID NO: 548576 - DNA, 15 bp, Homo sapiens
ttggacaaatcacat

SEQ ID NO: 548577 - DNA, 15 bp, Homo sapiens
tggacaaatcacata

SEQ ID NO: 548578 - DNA, 15 bp, Homo sapiens
ggacaaatcacatat

SEQ ID NO: 548579 - DNA, 15 bp, Homo sapiens
gacaaatcacatatc

SEQ ID NO: 548580 - DNA, 15 bp, Homo sapiens
acaaatcacatatcc

SEQ ID NO: 548581 - DNA, 15 bp, Homo sapiens
caaatcacatatcct

SEQ ID NO: 548582 - DNA, 15 bp, Homo sapiens
aaatcacatatccta

SEQ ID NO: 548583 - DNA, 15 bp, Homo sapiens
aatcacatatcctag

SEQ ID NO: 548584 - DNA, 15 bp, Homo sapiens
atcacatatcctagc

SEQ ID NO: 548585 - DNA, 15 bp, Homo sapiens
tcacatatcctagct

SEQ ID NO: 548586 - DNA, 15 bp, Homo sapiens
cacatatcctagctc

SEQ ID NO: 548587 - DNA, 15 bp, Homo sapiens
acatatcctagctca

SEQ ID NO: 548588 - DNA, 15 bp, Homo sapiens
catatcctagctcag

SEQ ID NO: 548589 - DNA, 15 bp, Homo sapiens
atatcctagctcagg

SEQ ID NO: 548590 - DNA, 15 bp, Homo sapiens
tatcctagctcaggc

SEQ ID NO: 548591 - DNA, 15 bp, Homo sapiens
atcctagctcaggcg

SEQ ID NO: 548592 - DNA, 15 bp, Homo sapiens
tcctagctcaggcgc

SEQ ID NO: 548593 - DNA, 15 bp, Homo sapiens
cctagctcaggcgca

SEQ ID NO: 548594 - DNA, 15 bp, Homo sapiens
ctagctcaggcgcag

SEQ ID NO: 548595 - DNA, 15 bp, Homo sapiens
tagctcaggcgcagt

SEQ ID NO: 548596 - DNA, 15 bp, Homo sapiens
agctcaggcgcagtt

SEQ ID NO: 548597 - DNA, 15 bp, Homo sapiens
gctcaggcgcagttt

SEQ ID NO: 548598 - DNA, 15 bp, Homo sapiens
ctcaggcgcagtttc

SEQ ID NO: 548599 - DNA, 15 bp, Homo sapiens
tcaggcgcagtttct

SEQ ID NO: 548600 - DNA, 15 bp, Homo sapiens
caggcgcagtttctt

SEQ ID NO: 548601 - DNA, 15 bp, Homo sapiens
aggcgcagtttcttt

SEQ ID NO: 548602 - DNA, 15 bp, Homo sapiens
ggcgcagtttcttta

SEQ ID NO: 548603 - DNA, 15 bp, Homo sapiens
gcgcagtttctttac

SEQ ID NO: 548604 - DNA, 15 bp, Homo sapiens
cgcagtttctttacc

SEQ ID NO: 548605 - DNA, 15 bp, Homo sapiens
gcagtttctttacct

SEQ ID NO: 548606 - DNA, 15 bp, Homo sapiens
cagtttctttacctg

SEQ ID NO: 548607 - DNA, 15 bp, Homo sapiens
agtttctttacctgt

SEQ ID NO: 548608 - DNA, 15 bp, Homo sapiens
gtttctttacctgtg

SEQ ID NO: 548609 - DNA, 15 bp, Homo sapiens
tttctttacctgtga

SEQ ID NO: 548610 - DNA, 15 bp, Homo sapiens
ttctttacctgtgaa

SEQ ID NO: 548611 - DNA, 15 bp, Homo sapiens
tctttacctgtgaac

SEQ ID NO: 548612 - DNA, 15 bp, Homo sapiens
ctttacctgtgaacc

SEQ ID NO: 548613 - DNA, 15 bp, Homo sapiens
tttacctgtgaaccg

SEQ ID NO: 548614 - DNA, 15 bp, Homo sapiens
ttacctgtgaaccgt

SEQ ID NO: 548615 - DNA, 15 bp, Homo sapiens
tacctgtgaaccgtc

SEQ ID NO: 548616 - DNA, 15 bp, Homo sapiens
acctgtgaaccgtct

SEQ ID NO: 548617 - DNA, 15 bp, Homo sapiens
cctgtgaaccgtctg

SEQ ID NO: 548618 - DNA, 15 bp, Homo sapiens
ctgtgaaccgtctgt

SEQ ID NO: 548619 - DNA, 15 bp, Homo sapiens
tgtgaaccgtctgtc

SEQ ID NO: 548620 - DNA, 15 bp, Homo sapiens
gtgaaccgtctgtcc

SEQ ID NO: 548621 - DNA, 15 bp, Homo sapiens
tgaaccgtctgtccc

SEQ ID NO: 548622 - DNA, 15 bp, Homo sapiens
gaaccgtctgtccca

SEQ ID NO: 548623 - DNA, 15 bp, Homo sapiens
aaccgtctgtcccac

SEQ ID NO: 548624 - DNA, 15 bp, Homo sapiens
accgtctgtcccacc

SEQ ID NO: 548625 - DNA, 15 bp, Homo sapiens
ccgtctgtcccacct

SEQ ID NO: 548626 - DNA, 15 bp, Homo sapiens
cgtctgtcccaccta

SEQ ID NO: 548627 - DNA, 15 bp, Homo sapiens
gtctgtcccacctac

SEQ ID NO: 548628 - DNA, 15 bp, Homo sapiens
tctgtcccacctacc

SEQ ID NO: 548629 - DNA, 15 bp, Homo sapiens
ctgtcccacctacct

SEQ ID NO: 548630 - DNA, 15 bp, Homo sapiens
tgtcccacctacctt

SEQ ID NO: 548631 - DNA, 15 bp, Homo sapiens
gtcccacctacctta

SEQ ID NO: 548632 - DNA, 15 bp, Homo sapiens
tcccacctaccttaa

SEQ ID NO: 548633 - DNA, 15 bp, Homo sapiens
cccacctaccttaaa

SEQ ID NO: 548634 - DNA, 15 bp, Homo sapiens
ccacctaccttaaag

SEQ ID NO: 548635 - DNA, 15 bp, Homo sapiens
cacctaccttaaaga

SEQ ID NO: 548636 - DNA, 15 bp, Homo sapiens
acctaccttaaagag

SEQ ID NO: 548637 - DNA, 15 bp, Homo sapiens
cctaccttaaagagt

SEQ ID NO: 548638 - DNA, 15 bp, Homo sapiens
ctaccttaaagagtt

SEQ ID NO: 548639 - DNA, 15 bp, Homo sapiens
taccttaaagagttg

SEQ ID NO: 548640 - DNA, 15 bp, Homo sapiens
accttaaagagttgc

SEQ ID NO: 548641 - DNA, 15 bp, Homo sapiens
ccttaaagagttgcc

SEQ ID NO: 548642 - DNA, 15 bp, Homo sapiens
cttaaagagttgcca

SEQ ID NO: 548643 - DNA, 15 bp, Homo sapiens
ttaaagagttgccat

SEQ ID NO: 548644 - DNA, 15 bp, Homo sapiens
taaagagttgccatg

SEQ ID NO: 548645 - DNA, 15 bp, Homo sapiens
aaagagttgccatga

SEQ ID NO: 548646 - DNA, 15 bp, Homo sapiens
aagagttgccatgag

SEQ ID NO: 548647 - DNA, 15 bp, Homo sapiens
agagttgccatgagg

SEQ ID NO: 548648 - DNA, 15 bp, Homo sapiens
gagttgccatgaggg

SEQ ID NO: 548649 - DNA, 15 bp, Homo sapiens
agttgccatgagggc

SEQ ID NO: 548650 - DNA, 15 bp, Homo sapiens
gttgccatgagggcc

SEQ ID NO: 548651 - DNA, 15 bp, Homo sapiens
ttgccatgagggcca

SEQ ID NO: 548652 - DNA, 15 bp, Homo sapiens
tgccatgagggccag

SEQ ID NO: 548653 - DNA, 15 bp, Homo sapiens
gccatgagggccaga

SEQ ID NO: 548654 - DNA, 15 bp, Homo sapiens
ccatgagggccagac

SEQ ID NO: 548655 - DNA, 15 bp, Homo sapiens
catgagggccagaca

SEQ ID NO: 548656 - DNA, 15 bp, Homo sapiens
atgagggccagacaa

SEQ ID NO: 548657 - DNA, 15 bp, Homo sapiens
tgagggccagacaat

SEQ ID NO: 548658 - DNA, 15 bp, Homo sapiens
gagggccagacaatg

SEQ ID NO: 548659 - DNA, 15 bp, Homo sapiens
agggccagacaatgc

SEQ ID NO: 548660 - DNA, 15 bp, Homo sapiens
gggccagacaatgca

SEQ ID NO: 548661 - DNA, 15 bp, Homo sapiens
ggccagacaatgcaa

SEQ ID NO: 548662 - DNA, 15 bp, Homo sapiens
gccagacaatgcaat

SEQ ID NO: 548663 - DNA, 15 bp, Homo sapiens
ccagacaatgcaatg

SEQ ID NO: 548664 - DNA, 15 bp, Homo sapiens
cagacaatgcaatga

SEQ ID NO: 548665 - DNA, 15 bp, Homo sapiens
agacaatgcaatgac

SEQ ID NO: 548666 - DNA, 15 bp, Homo sapiens
gacaatgcaatgact

SEQ ID NO: 548667 - DNA, 15 bp, Homo sapiens
acaatgcaatgacta

SEQ ID NO: 548668 - DNA, 15 bp, Homo sapiens
caatgcaatgactaa

SEQ ID NO: 548669 - DNA, 15 bp, Homo sapiens
aatgcaatgactaag

SEQ ID NO: 548670 - DNA, 15 bp, Homo sapiens
atgcaatgactaaga

SEQ ID NO: 548671 - DNA, 15 bp, Homo sapiens
tgcaatgactaagag

SEQ ID NO: 548672 - DNA, 15 bp, Homo sapiens
gcaatgactaagagc

SEQ ID NO: 548673 - DNA, 15 bp, Homo sapiens
caatgactaagagcg

SEQ ID NO: 548674 - DNA, 15 bp, Homo sapiens
aatgactaagagcgc

SEQ ID NO: 548675 - DNA, 15 bp, Homo sapiens
atgactaagagcgct

SEQ ID NO: 548676 - DNA, 15 bp, Homo sapiens
tgactaagagcgctt

SEQ ID NO: 548677 - DNA, 15 bp, Homo sapiens
gactaagagcgcttt

SEQ ID NO: 548678 - DNA, 15 bp, Homo sapiens
actaagagcgctttg

SEQ ID NO: 548679 - DNA, 15 bp, Homo sapiens
ctaagagcgctttgg

SEQ ID NO: 548680 - DNA, 15 bp, Homo sapiens
taagagcgctttgga

SEQ ID NO: 548681 - DNA, 15 bp, Homo sapiens
aagagcgctttggaa

SEQ ID NO: 548682 - DNA, 15 bp, Homo sapiens
agagcgctttggaaa

SEQ ID NO: 548683 - DNA, 15 bp, Homo sapiens
gagcgctttggaaag

SEQ ID NO: 548684 - DNA, 15 bp, Homo sapiens
agcgctttggaaagg

SEQ ID NO: 548685 - DNA, 15 bp, Homo sapiens
gcgctttggaaagga

SEQ ID NO: 548686 - DNA, 15 bp, Homo sapiens
cgctttggaaaggag

SEQ ID NO: 548687 - DNA, 15 bp, Homo sapiens
gctttggaaaggaga

SEQ ID NO: 548688 - DNA, 15 bp, Homo sapiens
ctttggaaaggagaa

SEQ ID NO: 548689 - DNA, 15 bp, Homo sapiens
tttggaaaggagaat

SEQ ID NO: 548690 - DNA, 15 bp, Homo sapiens
ttggaaaggagaatg

SEQ ID NO: 548691 - DNA, 15 bp, Homo sapiens
tggaaaggagaatgc

SEQ ID NO: 548692 - DNA, 15 bp, Homo sapiens
ggaaaggagaatgct

SEQ ID NO: 548693 - DNA, 15 bp, Homo sapiens
gaaaggagaatgctg

SEQ ID NO: 548694 - DNA, 15 bp, Homo sapiens
aaaggagaatgctgg

SEQ ID NO: 548695 - DNA, 15 bp, Homo sapiens
aaggagaatgctgga

SEQ ID NO: 548696 - DNA, 15 bp, Homo sapiens
aggagaatgctggat

SEQ ID NO: 548697 - DNA, 15 bp, Homo sapiens
ggagaatgctggatg

SEQ ID NO: 548698 - DNA, 15 bp, Homo sapiens
gagaatgctggatgc

SEQ ID NO: 548699 - DNA, 15 bp, Homo sapiens
agaatgctggatgca

SEQ ID NO: 548700 - DNA, 15 bp, Homo sapiens
gaatgctggatgcag

SEQ ID NO: 548701 - DNA, 15 bp, Homo sapiens
aatgctggatgcagg

SEQ ID NO: 548702 - DNA, 15 bp, Homo sapiens
atgctggatgcaggt

SEQ ID NO: 548703 - DNA, 15 bp, Homo sapiens
tgctggatgcaggtg

SEQ ID NO: 548704 - DNA, 15 bp, Homo sapiens
gctggatgcaggtgt

SEQ ID NO: 548705 - DNA, 15 bp, Homo sapiens
ctggatgcaggtgtc

SEQ ID NO: 548706 - DNA, 15 bp, Homo sapiens
tggatgcaggtgtcg

SEQ ID NO: 548707 - DNA, 15 bp, Homo sapiens
ggatgcaggtgtcgt

SEQ ID NO: 548708 - DNA, 15 bp, Homo sapiens
gatgcaggtgtcgtc

SEQ ID NO: 548709 - DNA, 15 bp, Homo sapiens
atgcaggtgtcgtcg

SEQ ID NO: 548710 - DNA, 15 bp, Homo sapiens
tgcaggtgtcgtcgt

SEQ ID NO: 548711 - DNA, 15 bp, Homo sapiens
gcaggtgtcgtcgtt

SEQ ID NO: 548712 - DNA, 15 bp, Homo sapiens
caggtgtcgtcgtta

SEQ ID NO: 548713 - DNA, 15 bp, Homo sapiens
aggtgtcgtcgttat

SEQ ID NO: 548714 - DNA, 15 bp, Homo sapiens
ggtgtcgtcgttatt

SEQ ID NO: 548715 - DNA, 15 bp, Homo sapiens
gtgtcgtcgttatta

SEQ ID NO: 548716 - DNA, 15 bp, Homo sapiens
tgtcgtcgttattag

SEQ ID NO: 548717 - DNA, 15 bp, Homo sapiens
gtcgtcgttattagt

SEQ ID NO: 548718 - DNA, 15 bp, Homo sapiens
tcgtcgttattagtg

SEQ ID NO: 548719 - DNA, 15 bp, Homo sapiens
cgtcgttattagtgt

SEQ ID NO: 548720 - DNA, 15 bp, Homo sapiens
gtcgttattagtgtc

SEQ ID NO: 548721 - DNA, 15 bp, Homo sapiens
tcgttattagtgtcc

SEQ ID NO: 548722 - DNA, 15 bp, Homo sapiens
cgttattagtgtcca

SEQ ID NO: 548723 - DNA, 15 bp, Homo sapiens
gttattagtgtccag

SEQ ID NO: 548724 - DNA, 15 bp, Homo sapiens
ttattagtgtccagc

SEQ ID NO: 548725 - DNA, 15 bp, Homo sapiens
tattagtgtccagcc

SEQ ID NO: 548726 - DNA, 15 bp, Homo sapiens
attagtgtccagccc

SEQ ID NO: 548727 - DNA, 15 bp, Homo sapiens
ttagtgtccagccca

SEQ ID NO: 548728 - DNA, 15 bp, Homo sapiens
tagtgtccagcccat

SEQ ID NO: 548729 - DNA, 15 bp, Homo sapiens
agtgtccagcccatc

SEQ ID NO: 548730 - DNA, 15 bp, Homo sapiens
gtgtccagcccatcc

SEQ ID NO: 548731 - DNA, 15 bp, Homo sapiens
tgtccagcccatcct

SEQ ID NO: 548732 - DNA, 15 bp, Homo sapiens
gtccagcccatcctt

SEQ ID NO: 548733 - DNA, 15 bp, Homo sapiens
tccagcccatccttt

SEQ ID NO: 548734 - DNA, 15 bp, Homo sapiens
ccagcccatcctttt

SEQ ID NO: 548735 - DNA, 15 bp, Homo sapiens
cagcccatccttttt

SEQ ID NO: 548736 - DNA, 15 bp, Homo sapiens
agcccatccttttta

SEQ ID NO: 548737 - DNA, 15 bp, Homo sapiens
gcccatcctttttat

SEQ ID NO: 548738 - DNA, 15 bp, Homo sapiens
cccatcctttttatg

SEQ ID NO: 548739 - DNA, 15 bp, Homo sapiens
ccatcctttttatgt

SEQ ID NO: 548740 - DNA, 15 bp, Homo sapiens
catcctttttatgtg

SEQ ID NO: 548741 - DNA, 15 bp, Homo sapiens
atcctttttatgtgc

SEQ ID NO: 548742 - DNA, 15 bp, Homo sapiens
tcctttttatgtgca

SEQ ID NO: 548743 - DNA, 15 bp, Homo sapiens
cctttttatgtgcag

SEQ ID NO: 548744 - DNA, 15 bp, Homo sapiens
ctttttatgtgcagc

SEQ ID NO: 548745 - DNA, 15 bp, Homo sapiens
tttttatgtgcagct

SEQ ID NO: 548746 - DNA, 15 bp, Homo sapiens
ttttatgtgcagctc

SEQ ID NO: 548747 - DNA, 15 bp, Homo sapiens
tttatgtgcagctct

SEQ ID NO: 548748 - DNA, 15 bp, Homo sapiens
ttatgtgcagctctg

SEQ ID NO: 548749 - DNA, 15 bp, Homo sapiens
tatgtgcagctctgt

SEQ ID NO: 548750 - DNA, 15 bp, Homo sapiens
atgtgcagctctgtg

SEQ ID NO: 548751 - DNA, 15 bp, Homo sapiens
tgtgcagctctgtga

SEQ ID NO: 548752 - DNA, 15 bp, Homo sapiens
gtgcagctctgtgaa

SEQ ID NO: 548753 - DNA, 15 bp, Homo sapiens
tgcagctctgtgaag

SEQ ID NO: 548754 - DNA, 15 bp, Homo sapiens
gcagctctgtgaaga

SEQ ID NO: 548755 - DNA, 15 bp, Homo sapiens
cagctctgtgaagac

SEQ ID NO: 548756 - DNA, 15 bp, Homo sapiens
agctctgtgaagaca

SEQ ID NO: 548757 - DNA, 15 bp, Homo sapiens
gctctgtgaagacat

SEQ ID NO: 548758 - DNA, 15 bp, Homo sapiens
ctctgtgaagacatc

SEQ ID NO: 548759 - DNA, 15 bp, Homo sapiens
tctgtgaagacatct

SEQ ID NO: 548760 - DNA, 15 bp, Homo sapiens
ctgtgaagacatctt

SEQ ID NO: 548761 - DNA, 15 bp, Homo sapiens
tgtgaagacatcttc

SEQ ID NO: 548762 - DNA, 15 bp, Homo sapiens
gtgaagacatcttcc

SEQ ID NO: 548763 - DNA, 15 bp, Homo sapiens
tgaagacatcttccc

SEQ ID NO: 548764 - DNA, 15 bp, Homo sapiens
gaagacatcttccct

SEQ ID NO: 548765 - DNA, 15 bp, Homo sapiens
aagacatcttccctt

SEQ ID NO: 548766 - DNA, 15 bp, Homo sapiens
agacatcttcccttg

SEQ ID NO: 548767 - DNA, 15 bp, Homo sapiens
gacatcttcccttga

SEQ ID NO: 548768 - DNA, 15 bp, Homo sapiens
acatcttcccttgat

SEQ ID NO: 548769 - DNA, 15 bp, Homo sapiens
catcttcccttgatg

SEQ ID NO: 548770 - DNA, 15 bp, Homo sapiens
atcttcccttgatgt

SEQ ID NO: 548771 - DNA, 15 bp, Homo sapiens
tcttcccttgatgtc

SEQ ID NO: 548772 - DNA, 15 bp, Homo sapiens
cttcccttgatgtca

SEQ ID NO: 548773 - DNA, 15 bp, Homo sapiens
ttcccttgatgtcag

SEQ ID NO: 548774 - DNA, 15 bp, Homo sapiens
tcccttgatgtcaga

SEQ ID NO: 548775 - DNA, 15 bp, Homo sapiens
cccttgatgtcagaa

SEQ ID NO: 548776 - DNA, 15 bp, Homo sapiens
ccttgatgtcagaac

SEQ ID NO: 548777 - DNA, 15 bp, Homo sapiens
cttgatgtcagaacc

SEQ ID NO: 548778 - DNA, 15 bp, Homo sapiens
ttgatgtcagaacca

SEQ ID NO: 548779 - DNA, 15 bp, Homo sapiens
tgatgtcagaaccaa

SEQ ID NO: 548780 - DNA, 15 bp, Homo sapiens
gatgtcagaaccaaa

SEQ ID NO: 548781 - DNA, 15 bp, Homo sapiens
atgtcagaaccaaaa

SEQ ID NO: 548782 - DNA, 15 bp, Homo sapiens
tgtcagaaccaaaaa

SEQ ID NO: 548783 - DNA, 15 bp, Homo sapiens
gtcagaaccaaaaaa

SEQ ID NO: 548784 - DNA, 15 bp, Homo sapiens
tcagaaccaaaaaac

SEQ ID NO: 548785 - DNA, 15 bp, Homo sapiens
cagaaccaaaaaacc

SEQ ID NO: 548786 - DNA, 15 bp, Homo sapiens
agaaccaaaaaaccc

SEQ ID NO: 548787 - DNA, 15 bp, Homo sapiens
gaaccaaaaaaccca

SEQ ID NO: 548788 - DNA, 15 bp, Homo sapiens
aaccaaaaaacccaa

SEQ ID NO: 548789 - DNA, 15 bp, Homo sapiens
accaaaaaacccaag

SEQ ID NO: 548790 - DNA, 15 bp, Homo sapiens
ccaaaaaacccaagc

SEQ ID NO: 548791 - DNA, 15 bp, Homo sapiens
caaaaaacccaagca

SEQ ID NO: 548792 - DNA, 15 bp, Homo sapiens
aaaaaacccaagcaa

SEQ ID NO: 548793 - DNA, 15 bp, Homo sapiens
aaaaacccaagcaaa

SEQ ID NO: 548794 - DNA, 15 bp, Homo sapiens
aaaacccaagcaaag

SEQ ID NO: 548795 - DNA, 15 bp, Homo sapiens
aaacccaagcaaagc

SEQ ID NO: 548796 - DNA, 15 bp, Homo sapiens
aacccaagcaaagca

SEQ ID NO: 548797 - DNA, 15 bp, Homo sapiens
acccaagcaaagcaa

SEQ ID NO: 548798 - DNA, 15 bp, Homo sapiens
cccaagcaaagcaaa

SEQ ID NO: 548799 - DNA, 15 bp, Homo sapiens
ccaagcaaagcaaag

SEQ ID NO: 548800 - DNA, 15 bp, Homo sapiens
caagcaaagcaaaga

SEQ ID NO: 548801 - DNA, 15 bp, Homo sapiens
aagcaaagcaaagac

SEQ ID NO: 548802 - DNA, 15 bp, Homo sapiens
agcaaagcaaagacc

SEQ ID NO: 548803 - DNA, 15 bp, Homo sapiens
gcaaagcaaagaccc

SEQ ID NO: 548804 - DNA, 15 bp, Homo sapiens
caaagcaaagaccca

SEQ ID NO: 548805 - DNA, 15 bp, Homo sapiens
aaagcaaagacccag

SEQ ID NO: 548806 - DNA, 15 bp, Homo sapiens
aagcaaagacccagg

SEQ ID NO: 548807 - DNA, 15 bp, Homo sapiens
agcaaagacccaggg

SEQ ID NO: 548808 - DNA, 15 bp, Homo sapiens
gcaaagacccagggc

SEQ ID NO: 548809 - DNA, 15 bp, Homo sapiens
caaagacccagggct

SEQ ID NO: 548810 - DNA, 15 bp, Homo sapiens
aaagacccagggcta

SEQ ID NO: 548811 - DNA, 15 bp, Homo sapiens
aagacccagggctac

SEQ ID NO: 548812 - DNA, 15 bp, Homo sapiens
agacccagggctaca

SEQ ID NO: 548813 - DNA, 15 bp, Homo sapiens
gacccagggctacat

SEQ ID NO: 548814 - DNA, 15 bp, Homo sapiens
acccagggctacatt

SEQ ID NO: 548815 - DNA, 15 bp, Homo sapiens
cccagggctacattt

SEQ ID NO: 548816 - DNA, 15 bp, Homo sapiens
ccagggctacatttc

SEQ ID NO: 548817 - DNA, 15 bp, Homo sapiens
cagggctacatttct

SEQ ID NO: 548818 - DNA, 15 bp, Homo sapiens
agggctacatttctg

SEQ ID NO: 548819 - DNA, 15 bp, Homo sapiens
gggctacatttctgc

SEQ ID NO: 548820 - DNA, 15 bp, Homo sapiens
ggctacatttctgct

SEQ ID NO: 548821 - DNA, 15 bp, Homo sapiens
gctacatttctgctc

SEQ ID NO: 548822 - DNA, 15 bp, Homo sapiens
ctacatttctgctct

SEQ ID NO: 548823 - DNA, 15 bp, Homo sapiens
tacatttctgctctg

SEQ ID NO: 548824 - DNA, 15 bp, Homo sapiens
acatttctgctctgg

SEQ ID NO: 548825 - DNA, 15 bp, Homo sapiens
catttctgctctgga

SEQ ID NO: 548826 - DNA, 15 bp, Homo sapiens
atttctgctctggag

SEQ ID NO: 548827 - DNA, 15 bp, Homo sapiens
tttctgctctggagt

SEQ ID NO: 548828 - DNA, 15 bp, Homo sapiens
ttctgctctggagtc

SEQ ID NO: 548829 - DNA, 15 bp, Homo sapiens
tctgctctggagtct

SEQ ID NO: 548830 - DNA, 15 bp, Homo sapiens
ctgctctggagtctc

SEQ ID NO: 548831 - DNA, 15 bp, Homo sapiens
tgctctggagtctct

SEQ ID NO: 548832 - DNA, 15 bp, Homo sapiens
gctctggagtctctt

SEQ ID NO: 548833 - DNA, 15 bp, Homo sapiens
ctctggagtctcttg

SEQ ID NO: 548834 - DNA, 15 bp, Homo sapiens
tctggagtctcttgt

SEQ ID NO: 548835 - DNA, 15 bp, Homo sapiens
ctggagtctcttgta

SEQ ID NO: 548836 - DNA, 15 bp, Homo sapiens
tggagtctcttgtat

SEQ ID NO: 548837 - DNA, 15 bp, Homo sapiens
ggagtctcttgtatg

SEQ ID NO: 548838 - DNA, 15 bp, Homo sapiens
gagtctcttgtatga

SEQ ID NO: 548839 - DNA, 15 bp, Homo sapiens
agtctcttgtatgac

SEQ ID NO: 548840 - DNA, 15 bp, Homo sapiens
gtctcttgtatgaca

SEQ ID NO: 548841 - DNA, 15 bp, Homo sapiens
tctcttgtatgacag

SEQ ID NO: 548842 - DNA, 15 bp, Homo sapiens
ctcttgtatgacagt

SEQ ID NO: 548843 - DNA, 15 bp, Homo sapiens
tcttgtatgacagta

SEQ ID NO: 548844 - DNA, 15 bp, Homo sapiens
cttgtatgacagtat

SEQ ID NO: 548845 - DNA, 15 bp, Homo sapiens
ttgtatgacagtatc

SEQ ID NO: 548846 - DNA, 15 bp, Homo sapiens
tgtatgacagtatct

SEQ ID NO: 548847 - DNA, 15 bp, Homo sapiens
gtatgacagtatcta

SEQ ID NO: 548848 - DNA, 15 bp, Homo sapiens
tatgacagtatctat

SEQ ID NO: 548849 - DNA, 15 bp, Homo sapiens
atgacagtatctatg

SEQ ID NO: 548850 - DNA, 15 bp, Homo sapiens
tgacagtatctatgt

SEQ ID NO: 548851 - DNA, 15 bp, Homo sapiens
gacagtatctatgtt

SEQ ID NO: 548852 - DNA, 15 bp, Homo sapiens
acagtatctatgttg

SEQ ID NO: 548853 - DNA, 15 bp, Homo sapiens
cagtatctatgttgg

SEQ ID NO: 548854 - DNA, 15 bp, Homo sapiens
agtatctatgttggg

SEQ ID NO: 548855 - DNA, 15 bp, Homo sapiens
gtatctatgttgggc

SEQ ID NO: 548856 - DNA, 15 bp, Homo sapiens
tatctatgttgggct

SEQ ID NO: 548857 - DNA, 15 bp, Homo sapiens
atctatgttgggctt

SEQ ID NO: 548858 - DNA, 15 bp, Homo sapiens
tctatgttgggcttt

SEQ ID NO: 548859 - DNA, 15 bp, Homo sapiens
ctatgttgggctttt

SEQ ID NO: 548860 - DNA, 15 bp, Homo sapiens
tatgttgggcttttc

SEQ ID NO: 548861 - DNA, 15 bp, Homo sapiens
atgttgggcttttca

SEQ ID NO: 548862 - DNA, 15 bp, Homo sapiens
tgttgggcttttcag

SEQ ID NO: 548863 - DNA, 15 bp, Homo sapiens
gttgggcttttcagt

SEQ ID NO: 548864 - DNA, 15 bp, Homo sapiens
ttgggcttttcagtg

SEQ ID NO: 548865 - DNA, 15 bp, Homo sapiens
tgggcttttcagtgt

SEQ ID NO: 548866 - DNA, 15 bp, Homo sapiens
gggcttttcagtgtg

SEQ ID NO: 548867 - DNA, 15 bp, Homo sapiens
ggcttttcagtgtgt

SEQ ID NO: 548868 - DNA, 15 bp, Homo sapiens
gcttttcagtgtgta

SEQ ID NO: 548869 - DNA, 15 bp, Homo sapiens
cttttcagtgtgtaa

SEQ ID NO: 548870 - DNA, 15 bp, Homo sapiens
ttttcagtgtgtaaa

SEQ ID NO: 548871 - DNA, 15 bp, Homo sapiens
tttcagtgtgtaaac

SEQ ID NO: 548872 - DNA, 15 bp, Homo sapiens
ttcagtgtgtaaacc

SEQ ID NO: 548873 - DNA, 15 bp, Homo sapiens
tcagtgtgtaaaccg

SEQ ID NO: 548874 - DNA, 15 bp, Homo sapiens
cagtgtgtaaaccga

SEQ ID NO: 548875 - DNA, 15 bp, Homo sapiens
agtgtgtaaaccgaa

SEQ ID NO: 548876 - DNA, 15 bp, Homo sapiens
gtgtgtaaaccgaaa

SEQ ID NO: 548877 - DNA, 15 bp, Homo sapiens
tgtgtaaaccgaaac

SEQ ID NO: 548878 - DNA, 15 bp, Homo sapiens
gtgtaaaccgaaaca

SEQ ID NO: 548879 - DNA, 15 bp, Homo sapiens
tgtaaaccgaaacaa

SEQ ID NO: 548880 - DNA, 15 bp, Homo sapiens
gtaaaccgaaacaaa

SEQ ID NO: 548881 - DNA, 15 bp, Homo sapiens
taaaccgaaacaaaa

SEQ ID NO: 548882 - DNA, 15 bp, Homo sapiens
aaaccgaaacaaaac

SEQ ID NO: 548883 - DNA, 15 bp, Homo sapiens
aaccgaaacaaaaca

SEQ ID NO: 548884 - DNA, 15 bp, Homo sapiens
accgaaacaaaacaa

SEQ ID NO: 548885 - DNA, 15 bp, Homo sapiens
ccgaaacaaaacaaa

SEQ ID NO: 548886 - DNA, 15 bp, Homo sapiens
cgaaacaaaacaaaa

SEQ ID NO: 548887 - DNA, 15 bp, Homo sapiens
aacaaaacaaaacaa

SEQ ID NO: 548888 - DNA, 15 bp, Homo sapiens
acaaaacaaaacaaa

SEQ ID NO: 548889 - DNA, 15 bp, Homo sapiens
caaaacaaaacaaaa

SEQ ID NO: 548890 - DNA, 15 bp, Homo sapiens
aacaaaacaaaaaag

SEQ ID NO: 548891 - DNA, 15 bp, Homo sapiens
acaaaacaaaaaaga

SEQ ID NO: 548892 - DNA, 15 bp, Homo sapiens
caaaacaaaaaagaa

SEQ ID NO: 548893 - DNA, 15 bp, Homo sapiens
aaaacaaaaaagaag

SEQ ID NO: 548894 - DNA, 15 bp, Homo sapiens
aaacaaaaaagaaga

SEQ ID NO: 548895 - DNA, 15 bp, Homo sapiens
aacaaaaaagaagaa

SEQ ID NO: 548896 - DNA, 15 bp, Homo sapiens
acaaaaaagaagaaa

SEQ ID NO: 548897 - DNA, 15 bp, Homo sapiens
caaaaaagaagaaaa

SEQ ID NO: 548898 - DNA, 15 bp, Homo sapiens
aaaaaagaagaaaaa

SEQ ID NO: 548899 - DNA, 15 bp, Homo sapiens
aaaaagaagaaaaat

SEQ ID NO: 548900 - DNA, 15 bp, Homo sapiens
aaaagaagaaaaatc

SEQ ID NO: 548901 - DNA, 15 bp, Homo sapiens
aaagaagaaaaatca

SEQ ID NO: 548902 - DNA, 15 bp, Homo sapiens
aagaagaaaaatcag

SEQ ID NO: 548903 - DNA, 15 bp, Homo sapiens
agaagaaaaatcagc

SEQ ID NO: 548904 - DNA, 15 bp, Homo sapiens
gaagaaaaatcagca

SEQ ID NO: 548905 - DNA, 15 bp, Homo sapiens
aagaaaaatcagcag

SEQ ID NO: 548906 - DNA, 15 bp, Homo sapiens
agaaaaatcagcagc

SEQ ID NO: 548907 - DNA, 15 bp, Homo sapiens
gaaaaatcagcagca

SEQ ID NO: 548908 - DNA, 15 bp, Homo sapiens
aaaaatcagcagcaa

SEQ ID NO: 548909 - DNA, 15 bp, Homo sapiens
aaaatcagcagcaaa

SEQ ID NO: 548910 - DNA, 15 bp, Homo sapiens
aaatcagcagcaaat

SEQ ID NO: 548911 - DNA, 15 bp, Homo sapiens
aatcagcagcaaata

SEQ ID NO: 548912 - DNA, 15 bp, Homo sapiens
atcagcagcaaatac

SEQ ID NO: 548913 - DNA, 15 bp, Homo sapiens
tcagcagcaaatact

SEQ ID NO: 548914 - DNA, 15 bp, Homo sapiens
cagcagcaaatactg

SEQ ID NO: 548915 - DNA, 15 bp, Homo sapiens
agcagcaaatactgc

SEQ ID NO: 548916 - DNA, 15 bp, Homo sapiens
gcagcaaatactgct

SEQ ID NO: 548917 - DNA, 15 bp, Homo sapiens
cagcaaatactgctt

SEQ ID NO: 548918 - DNA, 15 bp, Homo sapiens
agcaaatactgcttg

SEQ ID NO: 548919 - DNA, 15 bp, Homo sapiens
gcaaatactgcttgg

SEQ ID NO: 548920 - DNA, 15 bp, Homo sapiens
caaatactgcttggt

SEQ ID NO: 548921 - DNA, 15 bp, Homo sapiens
aaatactgcttggtt

SEQ ID NO: 548922 - DNA, 15 bp, Homo sapiens
aatactgcttggttt

SEQ ID NO: 548923 - DNA, 15 bp, Homo sapiens
atactgcttggtttt

SEQ ID NO: 548924 - DNA, 15 bp, Homo sapiens
tactgcttggttttg

SEQ ID NO: 548925 - DNA, 15 bp, Homo sapiens
actgcttggttttgc

SEQ ID NO: 548926 - DNA, 15 bp, Homo sapiens
ctgcttggttttgca

SEQ ID NO: 548927 - DNA, 15 bp, Homo sapiens
tgcttggttttgcat

SEQ ID NO: 548928 - DNA, 15 bp, Homo sapiens
gcttggttttgcatt

SEQ ID NO: 548929 - DNA, 15 bp, Homo sapiens
cttggttttgcattt

SEQ ID NO: 548930 - DNA, 15 bp, Homo sapiens
ttggttttgcatttt

SEQ ID NO: 548931 - DNA, 15 bp, Homo sapiens
tggttttgcattttc

SEQ ID NO: 548932 - DNA, 15 bp, Homo sapiens
ggttttgcattttcc

SEQ ID NO: 548933 - DNA, 15 bp, Homo sapiens
gttttgcattttccc

SEQ ID NO: 548934 - DNA, 15 bp, Homo sapiens
ttttgcattttccct

SEQ ID NO: 548935 - DNA, 15 bp, Homo sapiens
tttgcattttccctt

SEQ ID NO: 548936 - DNA, 15 bp, Homo sapiens
ttgcattttcccttc

SEQ ID NO: 548937 - DNA, 15 bp, Homo sapiens
tgcattttcccttct

SEQ ID NO: 548938 - DNA, 15 bp, Homo sapiens
gcattttcccttctg

SEQ ID NO: 548939 - DNA, 15 bp, Homo sapiens
cattttcccttctgt

SEQ ID NO: 548940 - DNA, 15 bp, Homo sapiens
attttcccttctgtt

SEQ ID NO: 548941 - DNA, 15 bp, Homo sapiens
ttttcccttctgttt

SEQ ID NO: 548942 - DNA, 15 bp, Homo sapiens
tttcccttctgtttt

SEQ ID NO: 548943 - DNA, 15 bp, Homo sapiens
ttcccttctgttttc

SEQ ID NO: 548944 - DNA, 15 bp, Homo sapiens
tcccttctgttttct

SEQ ID NO: 548945 - DNA, 15 bp, Homo sapiens
cccttctgttttctg

SEQ ID NO: 548946 - DNA, 15 bp, Homo sapiens
ccttctgttttctga

SEQ ID NO: 548947 - DNA, 15 bp, Homo sapiens
cttctgttttctgat

SEQ ID NO: 548948 - DNA, 15 bp, Homo sapiens
ttctgttttctgatt

SEQ ID NO: 548949 - DNA, 15 bp, Homo sapiens
tctgttttctgatta

SEQ ID NO: 548950 - DNA, 15 bp, Homo sapiens
ctgttttctgattag

SEQ ID NO: 548951 - DNA, 15 bp, Homo sapiens
tgttttctgattaga

SEQ ID NO: 548952 - DNA, 15 bp, Homo sapiens
gttttctgattagag

SEQ ID NO: 548953 - DNA, 15 bp, Homo sapiens
ttttctgattagagt

SEQ ID NO: 548954 - DNA, 15 bp, Homo sapiens
tttctgattagagtc

SEQ ID NO: 548955 - DNA, 15 bp, Homo sapiens
ttctgattagagtct

SEQ ID NO: 548956 - DNA, 15 bp, Homo sapiens
tctgattagagtctc

SEQ ID NO: 548957 - DNA, 15 bp, Homo sapiens
ctgattagagtctct

SEQ ID NO: 548958 - DNA, 15 bp, Homo sapiens
tgattagagtctcta

SEQ ID NO: 548959 - DNA, 15 bp, Homo sapiens
gattagagtctctat

SEQ ID NO: 548960 - DNA, 15 bp, Homo sapiens
attagagtctctatg

SEQ ID NO: 548961 - DNA, 15 bp, Homo sapiens
ttagagtctctatgg

SEQ ID NO: 548962 - DNA, 15 bp, Homo sapiens
tagagtctctatggc

SEQ ID NO: 548963 - DNA, 15 bp, Homo sapiens
agagtctctatggct

SEQ ID NO: 548964 - DNA, 15 bp, Homo sapiens
gagtctctatggctt

SEQ ID NO: 548965 - DNA, 15 bp, Homo sapiens
agtctctatggctta

SEQ ID NO: 548966 - DNA, 15 bp, Homo sapiens
gtctctatggcttat

SEQ ID NO: 548967 - DNA, 15 bp, Homo sapiens
tctctatggcttatg

SEQ ID NO: 548968 - DNA, 15 bp, Homo sapiens
ctctatggcttatga

SEQ ID NO: 548969 - DNA, 15 bp, Homo sapiens
tctatggcttatgag

SEQ ID NO: 548970 - DNA, 15 bp, Homo sapiens
ctatggcttatgagt

SEQ ID NO: 548971 - DNA, 15 bp, Homo sapiens
tatggcttatgagtg

SEQ ID NO: 548972 - DNA, 15 bp, Homo sapiens
atggcttatgagtgc

SEQ ID NO: 548973 - DNA, 15 bp, Homo sapiens
tggcttatgagtgca

SEQ ID NO: 548974 - DNA, 15 bp, Homo sapiens
ggcttatgagtgcag

SEQ ID NO: 548975 - DNA, 15 bp, Homo sapiens
gcttatgagtgcaga

SEQ ID NO: 548976 - DNA, 15 bp, Homo sapiens
cttatgagtgcagag

SEQ ID NO: 548977 - DNA, 15 bp, Homo sapiens
ttatgagtgcagaga

SEQ ID NO: 548978 - DNA, 15 bp, Homo sapiens
tatgagtgcagagag

SEQ ID NO: 548979 - DNA, 15 bp, Homo sapiens
atgagtgcagagaga

SEQ ID NO: 548980 - DNA, 15 bp, Homo sapiens
tgagtgcagagagaa

SEQ ID NO: 548981 - DNA, 15 bp, Homo sapiens
gagtgcagagagaac

SEQ ID NO: 548982 - DNA, 15 bp, Homo sapiens
agtgcagagagaacc

SEQ ID NO: 548983 - DNA, 15 bp, Homo sapiens
gtgcagagagaacct

SEQ ID NO: 548984 - DNA, 15 bp, Homo sapiens
tgcagagagaacctc

SEQ ID NO: 548985 - DNA, 15 bp, Homo sapiens
gcagagagaacctca

SEQ ID NO: 548986 - DNA, 15 bp, Homo sapiens
cagagagaacctcaa

SEQ ID NO: 548987 - DNA, 15 bp, Homo sapiens
agagagaacctcaaa

SEQ ID NO: 548988 - DNA, 15 bp, Homo sapiens
gagagaacctcaaaa

SEQ ID NO: 548989 - DNA, 15 bp, Homo sapiens
agagaacctcaaaag

SEQ ID NO: 548990 - DNA, 15 bp, Homo sapiens
gagaacctcaaaaga

SEQ ID NO: 548991 - DNA, 15 bp, Homo sapiens
agaacctcaaaagat

SEQ ID NO: 548992 - DNA, 15 bp, Homo sapiens
gaacctcaaaagatc

SEQ ID NO: 548993 - DNA, 15 bp, Homo sapiens
aacctcaaaagatca

SEQ ID NO: 548994 - DNA, 15 bp, Homo sapiens
acctcaaaagatcat

SEQ ID NO: 548995 - DNA, 15 bp, Homo sapiens
cctcaaaagatcatg

SEQ ID NO: 548996 - DNA, 15 bp, Homo sapiens
ctcaaaagatcatgt

SEQ ID NO: 548997 - DNA, 15 bp, Homo sapiens
tcaaaagatcatgtt

SEQ ID NO: 548998 - DNA, 15 bp, Homo sapiens
caaaagatcatgttt

SEQ ID NO: 548999 - DNA, 15 bp, Homo sapiens
aaaagatcatgtttg

SEQ ID NO: 549000 - DNA, 15 bp, Homo sapiens
aaagatcatgtttgc

SEQ ID NO: 549001 - DNA, 15 bp, Homo sapiens
aagatcatgtttgct

SEQ ID NO: 549002 - DNA, 15 bp, Homo sapiens
agatcatgtttgctg

SEQ ID NO: 549003 - DNA, 15 bp, Homo sapiens
gatcatgtttgctgc

SEQ ID NO: 549004 - DNA, 15 bp, Homo sapiens
atcatgtttgctgcg

SEQ ID NO: 549005 - DNA, 15 bp, Homo sapiens
tcatgtttgctgcgg

SEQ ID NO: 549006 - DNA, 15 bp, Homo sapiens
catgtttgctgcgga

SEQ ID NO: 549007 - DNA, 15 bp, Homo sapiens
atgtttgctgcggat

SEQ ID NO: 549008 - DNA, 15 bp, Homo sapiens
tgtttgctgcggata

SEQ ID NO: 549009 - DNA, 15 bp, Homo sapiens
gtttgctgcggataa

SEQ ID NO: 549010 - DNA, 15 bp, Homo sapiens
tttgctgcggataag

SEQ ID NO: 549011 - DNA, 15 bp, Homo sapiens
ttgctgcggataagc

SEQ ID NO: 549012 - DNA, 15 bp, Homo sapiens
tgctgcggataagca

SEQ ID NO: 549013 - DNA, 15 bp, Homo sapiens
gctgcggataagcac

SEQ ID NO: 549014 - DNA, 15 bp, Homo sapiens
ctgcggataagcacc

SEQ ID NO: 549015 - DNA, 15 bp, Homo sapiens
tgcggataagcacca

SEQ ID NO: 549016 - DNA, 15 bp, Homo sapiens
gcggataagcaccaa

SEQ ID NO: 549017 - DNA, 15 bp, Homo sapiens
cggataagcaccaaa

SEQ ID NO: 549018 - DNA, 15 bp, Homo sapiens
ggataagcaccaaac

SEQ ID NO: 549019 - DNA, 15 bp, Homo sapiens
gataagcaccaaact

SEQ ID NO: 549020 - DNA, 15 bp, Homo sapiens
ataagcaccaaactc

SEQ ID NO: 549021 - DNA, 15 bp, Homo sapiens
taagcaccaaactcg

SEQ ID NO: 549022 - DNA, 15 bp, Homo sapiens
aagcaccaaactcga

SEQ ID NO: 549023 - DNA, 15 bp, Homo sapiens
agcaccaaactcgat

SEQ ID NO: 549024 - DNA, 15 bp, Homo sapiens
gcaccaaactcgatg

SEQ ID NO: 549025 - DNA, 15 bp, Homo sapiens
caccaaactcgatgt

SEQ ID NO: 549026 - DNA, 15 bp, Homo sapiens
accaaactcgatgtt

SEQ ID NO: 549027 - DNA, 15 bp, Homo sapiens
ccaaactcgatgttt

SEQ ID NO: 549028 - DNA, 15 bp, Homo sapiens
caaactcgatgttta

SEQ ID NO: 549029 - DNA, 15 bp, Homo sapiens
aaactcgatgtttat

SEQ ID NO: 549030 - DNA, 15 bp, Homo sapiens
aactcgatgtttatc

SEQ ID NO: 549031 - DNA, 15 bp, Homo sapiens
actcgatgtttatca

SEQ ID NO: 549032 - DNA, 15 bp, Homo sapiens
ctcgatgtttatcag

SEQ ID NO: 549033 - DNA, 15 bp, Homo sapiens
tcgatgtttatcagc

SEQ ID NO: 549034 - DNA, 15 bp, Homo sapiens
cgatgtttatcagca

SEQ ID NO: 549035 - DNA, 15 bp, Homo sapiens
gatgtttatcagcac

SEQ ID NO: 549036 - DNA, 15 bp, Homo sapiens
atgtttatcagcact

SEQ ID NO: 549037 - DNA, 15 bp, Homo sapiens
tgtttatcagcactt

SEQ ID NO: 549038 - DNA, 15 bp, Homo sapiens
gtttatcagcactta

SEQ ID NO: 549039 - DNA, 15 bp, Homo sapiens
tttatcagcacttat

SEQ ID NO: 549040 - DNA, 15 bp, Homo sapiens
ttatcagcacttatc

SEQ ID NO: 549041 - DNA, 15 bp, Homo sapiens
tatcagcacttatct

SEQ ID NO: 549042 - DNA, 15 bp, Homo sapiens
atcagcacttatctc

SEQ ID NO: 549043 - DNA, 15 bp, Homo sapiens
tcagcacttatctcc

SEQ ID NO: 549044 - DNA, 15 bp, Homo sapiens
cagcacttatctcct

SEQ ID NO: 549045 - DNA, 15 bp, Homo sapiens
agcacttatctcctg

SEQ ID NO: 549046 - DNA, 15 bp, Homo sapiens
gcacttatctcctgc

SEQ ID NO: 549047 - DNA, 15 bp, Homo sapiens
cacttatctcctgca

SEQ ID NO: 549048 - DNA, 15 bp, Homo sapiens
acttatctcctgcaa

SEQ ID NO: 549049 - DNA, 15 bp, Homo sapiens
cttatctcctgcaaa

SEQ ID NO: 549050 - DNA, 15 bp, Homo sapiens
ttatctcctgcaaac

SEQ ID NO: 549051 - DNA, 15 bp, Homo sapiens
tatctcctgcaaact

SEQ ID NO: 549052 - DNA, 15 bp, Homo sapiens
atctcctgcaaactc

SEQ ID NO: 549053 - DNA, 15 bp, Homo sapiens
tctcctgcaaactca

SEQ ID NO: 549054 - DNA, 15 bp, Homo sapiens
ctcctgcaaactcac

SEQ ID NO: 549055 - DNA, 15 bp, Homo sapiens
tcctgcaaactcact

SEQ ID NO: 549056 - DNA, 15 bp, Homo sapiens
cctgcaaactcactc

SEQ ID NO: 549057 - DNA, 15 bp, Homo sapiens
ctgcaaactcactct

SEQ ID NO: 549058 - DNA, 15 bp, Homo sapiens
tgcaaactcactctc

SEQ ID NO: 549059 - DNA, 15 bp, Homo sapiens
gcaaactcactctct

SEQ ID NO: 549060 - DNA, 15 bp, Homo sapiens
caaactcactctctg

SEQ ID NO: 549061 - DNA, 15 bp, Homo sapiens
aaactcactctctgg

SEQ ID NO: 549062 - DNA, 15 bp, Homo sapiens
aactcactctctgga

SEQ ID NO: 549063 - DNA, 15 bp, Homo sapiens
actcactctctggag

SEQ ID NO: 549064 - DNA, 15 bp, Homo sapiens
ctcactctctggagg

SEQ ID NO: 549065 - DNA, 15 bp, Homo sapiens
tcactctctggaggc

SEQ ID NO: 549066 - DNA, 15 bp, Homo sapiens
cactctctggaggct

SEQ ID NO: 549067 - DNA, 15 bp, Homo sapiens
actctctggaggctt

SEQ ID NO: 549068 - DNA, 15 bp, Homo sapiens
ctctctggaggcttc

SEQ ID NO: 549069 - DNA, 15 bp, Homo sapiens
tctctggaggcttca

SEQ ID NO: 549070 - DNA, 15 bp, Homo sapiens
ctctggaggcttcaa

SEQ ID NO: 549071 - DNA, 15 bp, Homo sapiens
tctggaggcttcaaa

SEQ ID NO: 549072 - DNA, 15 bp, Homo sapiens
ctggaggcttcaaag

SEQ ID NO: 549073 - DNA, 15 bp, Homo sapiens
tggaggcttcaaagg

SEQ ID NO: 549074 - DNA, 15 bp, Homo sapiens
ggaggcttcaaaggc

SEQ ID NO: 549075 - DNA, 15 bp, Homo sapiens
gaggcttcaaaggct

SEQ ID NO: 549076 - DNA, 15 bp, Homo sapiens
aggcttcaaaggctg

SEQ ID NO: 549077 - DNA, 15 bp, Homo sapiens
ggcttcaaaggctga

SEQ ID NO: 549078 - DNA, 15 bp, Homo sapiens
gcttcaaaggctgag

SEQ ID NO: 549079 - DNA, 15 bp, Homo sapiens
cttcaaaggctgagg

SEQ ID NO: 549080 - DNA, 15 bp, Homo sapiens
ttcaaaggctgaggg

SEQ ID NO: 549081 - DNA, 15 bp, Homo sapiens
tcaaaggctgaggga

SEQ ID NO: 549082 - DNA, 15 bp, Homo sapiens
caaaggctgagggag

SEQ ID NO: 549083 - DNA, 15 bp, Homo sapiens
aaaggctgagggaga

SEQ ID NO: 549084 - DNA, 15 bp, Homo sapiens
aaggctgagggagat

SEQ ID NO: 549085 - DNA, 15 bp, Homo sapiens
aggctgagggagatc

SEQ ID NO: 549086 - DNA, 15 bp, Homo sapiens
ggctgagggagatct

SEQ ID NO: 549087 - DNA, 15 bp, Homo sapiens
gctgagggagatctc

SEQ ID NO: 549088 - DNA, 15 bp, Homo sapiens
ctgagggagatctct

SEQ ID NO: 549089 - DNA, 15 bp, Homo sapiens
tgagggagatctctt

SEQ ID NO: 549090 - DNA, 15 bp, Homo sapiens
gagggagatctctta

SEQ ID NO: 549091 - DNA, 15 bp, Homo sapiens
agggagatctcttag

SEQ ID NO: 549092 - DNA, 15 bp, Homo sapiens
gggagatctcttagc

SEQ ID NO: 549093 - DNA, 15 bp, Homo sapiens
ggagatctcttagcc

SEQ ID NO: 549094 - DNA, 15 bp, Homo sapiens
gagatctcttagcct

SEQ ID NO: 549095 - DNA, 15 bp, Homo sapiens
agatctcttagcctt

SEQ ID NO: 549096 - DNA, 15 bp, Homo sapiens
gatctcttagccttg

SEQ ID NO: 549097 - DNA, 15 bp, Homo sapiens
atctcttagccttgc

SEQ ID NO: 549098 - DNA, 15 bp, Homo sapiens
tctcttagccttgct

SEQ ID NO: 549099 - DNA, 15 bp, Homo sapiens
ctcttagccttgctc

SEQ ID NO: 549100 - DNA, 15 bp, Homo sapiens
tcttagccttgctct

SEQ ID NO: 549101 - DNA, 15 bp, Homo sapiens
cttagccttgctctg

SEQ ID NO: 549102 - DNA, 15 bp, Homo sapiens
ttagccttgctctga

SEQ ID NO: 549103 - DNA, 15 bp, Homo sapiens
tagccttgctctgag

SEQ ID NO: 549104 - DNA, 15 bp, Homo sapiens
agccttgctctgagg

SEQ ID NO: 549105 - DNA, 15 bp, Homo sapiens
gccttgctctgagga

SEQ ID NO: 549106 - DNA, 15 bp, Homo sapiens
ccttgctctgaggag

SEQ ID NO: 549107 - DNA, 15 bp, Homo sapiens
cttgctctgaggaga

SEQ ID NO: 549108 - DNA, 15 bp, Homo sapiens
ttgctctgaggagac

SEQ ID NO: 549109 - DNA, 15 bp, Homo sapiens
tgctctgaggagaca

SEQ ID NO: 549110 - DNA, 15 bp, Homo sapiens
gctctgaggagacag

SEQ ID NO: 549111 - DNA, 15 bp, Homo sapiens
ctctgaggagacagg

SEQ ID NO: 549112 - DNA, 15 bp, Homo sapiens
tctgaggagacaggc

SEQ ID NO: 549113 - DNA, 15 bp, Homo sapiens
ctgaggagacaggca

SEQ ID NO: 549114 - DNA, 15 bp, Homo sapiens
tgaggagacaggcag

SEQ ID NO: 549115 - DNA, 15 bp, Homo sapiens
gaggagacaggcagg

SEQ ID NO: 549116 - DNA, 15 bp, Homo sapiens
aggagacaggcaggc

SEQ ID NO: 549117 - DNA, 15 bp, Homo sapiens
ggagacaggcaggca

SEQ ID NO: 549118 - DNA, 15 bp, Homo sapiens
gagacaggcaggcac

SEQ ID NO: 549119 - DNA, 15 bp, Homo sapiens
agacaggcaggcact

SEQ ID NO: 549120 - DNA, 15 bp, Homo sapiens
gacaggcaggcactc

SEQ ID NO: 549121 - DNA, 15 bp, Homo sapiens
acaggcaggcactcc

SEQ ID NO: 549122 - DNA, 15 bp, Homo sapiens
caggcaggcactcct

SEQ ID NO: 549123 - DNA, 15 bp, Homo sapiens
aggcaggcactcctc

SEQ ID NO: 549124 - DNA, 15 bp, Homo sapiens
ggcaggcactcctcc

SEQ ID NO: 549125 - DNA, 15 bp, Homo sapiens
gcaggcactcctccc

SEQ ID NO: 549126 - DNA, 15 bp, Homo sapiens
caggcactcctcccc

SEQ ID NO: 549127 - DNA, 15 bp, Homo sapiens
aggcactcctccccg

SEQ ID NO: 549128 - DNA, 15 bp, Homo sapiens
ggcactcctccccgg

SEQ ID NO: 549129 - DNA, 15 bp, Homo sapiens
gcactcctccccggg

SEQ ID NO: 549130 - DNA, 15 bp, Homo sapiens
cactcctccccgggg

SEQ ID NO: 549131 - DNA, 15 bp, Homo sapiens
actcctccccggggc

SEQ ID NO: 549132 - DNA, 15 bp, Homo sapiens
ctcctccccggggct

SEQ ID NO: 549133 - DNA, 15 bp, Homo sapiens
tcctccccggggctt

SEQ ID NO: 549134 - DNA, 15 bp, Homo sapiens
cctccccggggcttc

SEQ ID NO: 549135 - DNA, 15 bp, Homo sapiens
ctccccggggcttca

SEQ ID NO: 549136 - DNA, 15 bp, Homo sapiens
tccccggggcttcag

SEQ ID NO: 549137 - DNA, 15 bp, Homo sapiens
ccccggggcttcagc

SEQ ID NO: 549138 - DNA, 15 bp, Homo sapiens
cccggggcttcagct

SEQ ID NO: 549139 - DNA, 15 bp, Homo sapiens
ccggggcttcagctg

SEQ ID NO: 549140 - DNA, 15 bp, Homo sapiens
cggggcttcagctgc

SEQ ID NO: 549141 - DNA, 15 bp, Homo sapiens
ggggcttcagctgca

SEQ ID NO: 549142 - DNA, 15 bp, Homo sapiens
gggcttcagctgcag

SEQ ID NO: 549143 - DNA, 15 bp, Homo sapiens
ggcttcagctgcagg

SEQ ID NO: 549144 - DNA, 15 bp, Homo sapiens
gcttcagctgcaggt

SEQ ID NO: 549145 - DNA, 15 bp, Homo sapiens
cttcagctgcaggtg

SEQ ID NO: 549146 - DNA, 15 bp, Homo sapiens
ttcagctgcaggtgt

SEQ ID NO: 549147 - DNA, 15 bp, Homo sapiens
tcagctgcaggtgtg

SEQ ID NO: 549148 - DNA, 15 bp, Homo sapiens
cagctgcaggtgtgg

SEQ ID NO: 549149 - DNA, 15 bp, Homo sapiens
agctgcaggtgtggc

SEQ ID NO: 549150 - DNA, 15 bp, Homo sapiens
gctgcaggtgtggcc

SEQ ID NO: 549151 - DNA, 15 bp, Homo sapiens
ctgcaggtgtggccc

SEQ ID NO: 549152 - DNA, 15 bp, Homo sapiens
tgcaggtgtggccca

SEQ ID NO: 549153 - DNA, 15 bp, Homo sapiens
gcaggtgtggcccaa

SEQ ID NO: 549154 - DNA, 15 bp, Homo sapiens
caggtgtggcccaat

SEQ ID NO: 549155 - DNA, 15 bp, Homo sapiens
aggtgtggcccaata

SEQ ID NO: 549156 - DNA, 15 bp, Homo sapiens
ggtgtggcccaatag

SEQ ID NO: 549157 - DNA, 15 bp, Homo sapiens
gtgtggcccaatagc

SEQ ID NO: 549158 - DNA, 15 bp, Homo sapiens
tgtggcccaatagca

SEQ ID NO: 549159 - DNA, 15 bp, Homo sapiens
gtggcccaatagcac

SEQ ID NO: 549160 - DNA, 15 bp, Homo sapiens
tggcccaatagcact

SEQ ID NO: 549161 - DNA, 15 bp, Homo sapiens
ggcccaatagcactt

SEQ ID NO: 549162 - DNA, 15 bp, Homo sapiens
gcccaatagcacttg

SEQ ID NO: 549163 - DNA, 15 bp, Homo sapiens
cccaatagcacttgc

SEQ ID NO: 549164 - DNA, 15 bp, Homo sapiens
ccaatagcacttgct

SEQ ID NO: 549165 - DNA, 15 bp, Homo sapiens
caatagcacttgctc

SEQ ID NO: 549166 - DNA, 15 bp, Homo sapiens
aatagcacttgctcc

SEQ ID NO: 549167 - DNA, 15 bp, Homo sapiens
atagcacttgctcca

SEQ ID NO: 549168 - DNA, 15 bp, Homo sapiens
tagcacttgctccat

SEQ ID NO: 549169 - DNA, 15 bp, Homo sapiens
agcacttgctccatt

SEQ ID NO: 549170 - DNA, 15 bp, Homo sapiens
gcacttgctccattc

SEQ ID NO: 549171 - DNA, 15 bp, Homo sapiens
cacttgctccattct

SEQ ID NO: 549172 - DNA, 15 bp, Homo sapiens
acttgctccattctt

SEQ ID NO: 549173 - DNA, 15 bp, Homo sapiens
cttgctccattctta

SEQ ID NO: 549174 - DNA, 15 bp, Homo sapiens
ttgctccattcttag

SEQ ID NO: 549175 - DNA, 15 bp, Homo sapiens
tgctccattcttagg

SEQ ID NO: 549176 - DNA, 15 bp, Homo sapiens
gctccattcttagga

SEQ ID NO: 549177 - DNA, 15 bp, Homo sapiens
ctccattcttaggaa

SEQ ID NO: 549178 - DNA, 15 bp, Homo sapiens
tccattcttaggaac

SEQ ID NO: 549179 - DNA, 15 bp, Homo sapiens
ccattcttaggaacg

SEQ ID NO: 549180 - DNA, 15 bp, Homo sapiens
cattcttaggaacgt

SEQ ID NO: 549181 - DNA, 15 bp, Homo sapiens
attcttaggaacgtg

SEQ ID NO: 549182 - DNA, 15 bp, Homo sapiens
ttcttaggaacgtgg

SEQ ID NO: 549183 - DNA, 15 bp, Homo sapiens
tcttaggaacgtggt

SEQ ID NO: 549184 - DNA, 15 bp, Homo sapiens
cttaggaacgtggtt

SEQ ID NO: 549185 - DNA, 15 bp, Homo sapiens
ttaggaacgtggttc

SEQ ID NO: 549186 - DNA, 15 bp, Homo sapiens
taggaacgtggttct

SEQ ID NO: 549187 - DNA, 15 bp, Homo sapiens
aggaacgtggttctc

SEQ ID NO: 549188 - DNA, 15 bp, Homo sapiens
ggaacgtggttctct

SEQ ID NO: 549189 - DNA, 15 bp, Homo sapiens
gaacgtggttctctt

SEQ ID NO: 549190 - DNA, 15 bp, Homo sapiens
aacgtggttctcttg

SEQ ID NO: 549191 - DNA, 15 bp, Homo sapiens
acgtggttctcttgc

SEQ ID NO: 549192 - DNA, 15 bp, Homo sapiens
cgtggttctcttgct

SEQ ID NO: 549193 - DNA, 15 bp, Homo sapiens
gtggttctcttgctc

SEQ ID NO: 549194 - DNA, 15 bp, Homo sapiens
tggttctcttgctct

SEQ ID NO: 549195 - DNA, 15 bp, Homo sapiens
ggttctcttgctctt

SEQ ID NO: 549196 - DNA, 15 bp, Homo sapiens
gttctcttgctcttc

SEQ ID NO: 549197 - DNA, 15 bp, Homo sapiens
ttctcttgctcttcc

SEQ ID NO: 549198 - DNA, 15 bp, Homo sapiens
tctcttgctcttccc

SEQ ID NO: 549199 - DNA, 15 bp, Homo sapiens
ctcttgctcttcccc

SEQ ID NO: 549200 - DNA, 15 bp, Homo sapiens
tcttgctcttcccca

SEQ ID NO: 549201 - DNA, 15 bp, Homo sapiens
cttgctcttccccat

SEQ ID NO: 549202 - DNA, 15 bp, Homo sapiens
ttgctcttccccatg

SEQ ID NO: 549203 - DNA, 15 bp, Homo sapiens
tgctcttccccatgc

SEQ ID NO: 549204 - DNA, 15 bp, Homo sapiens
gctcttccccatgca

SEQ ID NO: 549205 - DNA, 15 bp, Homo sapiens
ctcttccccatgcaa

SEQ ID NO: 549206 - DNA, 15 bp, Homo sapiens
tcttccccatgcaaa

SEQ ID NO: 549207 - DNA, 15 bp, Homo sapiens
cttccccatgcaaaa

SEQ ID NO: 549208 - DNA, 15 bp, Homo sapiens
ttccccatgcaaaaa

SEQ ID NO: 549209 - DNA, 15 bp, Homo sapiens
tccccatgcaaaaaa

SEQ ID NO: 549210 - DNA, 15 bp, Homo sapiens
ccccatgcaaaaaaa

SEQ ID NO: 549211 - DNA, 15 bp, Homo sapiens
cccatgcaaaaaaag

SEQ ID NO: 549212 - DNA, 15 bp, Homo sapiens
ccatgcaaaaaaagg

SEQ ID NO: 549213 - DNA, 15 bp, Homo sapiens
catgcaaaaaaagga

SEQ ID NO: 549214 - DNA, 15 bp, Homo sapiens
atgcaaaaaaaggaa

SEQ ID NO: 549215 - DNA, 15 bp, Homo sapiens
tgcaaaaaaaggaag

SEQ ID NO: 549216 - DNA, 15 bp, Homo sapiens
gcaaaaaaaggaagc

SEQ ID NO: 549217 - DNA, 15 bp, Homo sapiens
caaaaaaaggaagca

SEQ ID NO: 549218 - DNA, 15 bp, Homo sapiens
aaaaaaaggaagcag

SEQ ID NO: 549219 - DNA, 15 bp, Homo sapiens
aaaaaaggaagcagc

SEQ ID NO: 549220 - DNA, 15 bp, Homo sapiens
aaaaaggaagcagca

SEQ ID NO: 549221 - DNA, 15 bp, Homo sapiens
aaaaggaagcagcag

SEQ ID NO: 549222 - DNA, 15 bp, Homo sapiens
aaaggaagcagcagg

SEQ ID NO: 549223 - DNA, 15 bp, Homo sapiens
aaggaagcagcaggt

SEQ ID NO: 549224 - DNA, 15 bp, Homo sapiens
aggaagcagcaggtt

SEQ ID NO: 549225 - DNA, 15 bp, Homo sapiens
ggaagcagcaggttt

SEQ ID NO: 549226 - DNA, 15 bp, Homo sapiens
gaagcagcaggttta

SEQ ID NO: 549227 - DNA, 15 bp, Homo sapiens
aagcagcaggtttac

SEQ ID NO: 549228 - DNA, 15 bp, Homo sapiens
agcagcaggtttact

SEQ ID NO: 549229 - DNA, 15 bp, Homo sapiens
gcagcaggtttactg

SEQ ID NO: 549230 - DNA, 15 bp, Homo sapiens
cagcaggtttactga

SEQ ID NO: 549231 - DNA, 15 bp, Homo sapiens
agcaggtttactgaa

SEQ ID NO: 549232 - DNA, 15 bp, Homo sapiens
gcaggtttactgaag

SEQ ID NO: 549233 - DNA, 15 bp, Homo sapiens
caggtttactgaagg

SEQ ID NO: 549234 - DNA, 15 bp, Homo sapiens
aggtttactgaaggt

SEQ ID NO: 549235 - DNA, 15 bp, Homo sapiens
ggtttactgaaggta

SEQ ID NO: 549236 - DNA, 15 bp, Homo sapiens
gtttactgaaggtat

SEQ ID NO: 549237 - DNA, 15 bp, Homo sapiens
tttactgaaggtatg

SEQ ID NO: 549238 - DNA, 15 bp, Homo sapiens
ttactgaaggtatgg

SEQ ID NO: 549239 - DNA, 15 bp, Homo sapiens
tactgaaggtatggg

SEQ ID NO: 549240 - DNA, 15 bp, Homo sapiens
actgaaggtatgggg

SEQ ID NO: 549241 - DNA, 15 bp, Homo sapiens
ctgaaggtatgggga

SEQ ID NO: 549242 - DNA, 15 bp, Homo sapiens
tgaaggtatggggat

SEQ ID NO: 549243 - DNA, 15 bp, Homo sapiens
gaaggtatggggatg

SEQ ID NO: 549244 - DNA, 15 bp, Homo sapiens
aaggtatggggatga

SEQ ID NO: 549245 - DNA, 15 bp, Homo sapiens
aggtatggggatgag

SEQ ID NO: 549246 - DNA, 15 bp, Homo sapiens
ggtatggggatgagc

SEQ ID NO: 549247 - DNA, 15 bp, Homo sapiens
gtatggggatgagct

SEQ ID NO: 549248 - DNA, 15 bp, Homo sapiens
tatggggatgagctg

SEQ ID NO: 549249 - DNA, 15 bp, Homo sapiens
atggggatgagctgt

SEQ ID NO: 549250 - DNA, 15 bp, Homo sapiens
tggggatgagctgtg

SEQ ID NO: 549251 - DNA, 15 bp, Homo sapiens
ggggatgagctgtgg

SEQ ID NO: 549252 - DNA, 15 bp, Homo sapiens
gggatgagctgtggg

SEQ ID NO: 549253 - DNA, 15 bp, Homo sapiens
ggatgagctgtgggg

SEQ ID NO: 549254 - DNA, 15 bp, Homo sapiens
gatgagctgtggggt

SEQ ID NO: 549255 - DNA, 15 bp, Homo sapiens
atgagctgtggggta

SEQ ID NO: 549256 - DNA, 15 bp, Homo sapiens
tgagctgtggggtag

SEQ ID NO: 549257 - DNA, 15 bp, Homo sapiens
gagctgtggggtaga

SEQ ID NO: 549258 - DNA, 15 bp, Homo sapiens
agctgtggggtagag

SEQ ID NO: 549259 - DNA, 15 bp, Homo sapiens
gctgtggggtagagg

SEQ ID NO: 549260 - DNA, 15 bp, Homo sapiens
ctgtggggtagaggg

SEQ ID NO: 549261 - DNA, 15 bp, Homo sapiens
tgtggggtagaggga

SEQ ID NO: 549262 - DNA, 15 bp, Homo sapiens
gtggggtagagggag

SEQ ID NO: 549263 - DNA, 15 bp, Homo sapiens
tggggtagagggagc

SEQ ID NO: 549264 - DNA, 15 bp, Homo sapiens
ggggtagagggagca

SEQ ID NO: 549265 - DNA, 15 bp, Homo sapiens
gggtagagggagcag

SEQ ID NO: 549266 - DNA, 15 bp, Homo sapiens
ggtagagggagcagg

SEQ ID NO: 549267 - DNA, 15 bp, Homo sapiens
gtagagggagcagga

SEQ ID NO: 549268 - DNA, 15 bp, Homo sapiens
tagagggagcaggag

SEQ ID NO: 549269 - DNA, 15 bp, Homo sapiens
agagggagcaggaga

SEQ ID NO: 549270 - DNA, 15 bp, Homo sapiens
gagggagcaggagaa

SEQ ID NO: 549271 - DNA, 15 bp, Homo sapiens
agggagcaggagaag

SEQ ID NO: 549272 - DNA, 15 bp, Homo sapiens
gggagcaggagaaga

SEQ ID NO: 549273 - DNA, 15 bp, Homo sapiens
ggagcaggagaagaa

SEQ ID NO: 549274 - DNA, 15 bp, Homo sapiens
gagcaggagaagaaa

SEQ ID NO: 549275 - DNA, 15 bp, Homo sapiens
agcaggagaagaaaa

SEQ ID NO: 549276 - DNA, 15 bp, Homo sapiens
gcaggagaagaaaac

SEQ ID NO: 549277 - DNA, 15 bp, Homo sapiens
caggagaagaaaaca

SEQ ID NO: 549278 - DNA, 15 bp, Homo sapiens
aggagaagaaaacaa

SEQ ID NO: 549279 - DNA, 15 bp, Homo sapiens
ggagaagaaaacaag

SEQ ID NO: 549280 - DNA, 15 bp, Homo sapiens
gagaagaaaacaagt

SEQ ID NO: 549281 - DNA, 15 bp, Homo sapiens
agaagaaaacaagta

SEQ ID NO: 549282 - DNA, 15 bp, Homo sapiens
gaagaaaacaagtat

SEQ ID NO: 549283 - DNA, 15 bp, Homo sapiens
aagaaaacaagtatt

SEQ ID NO: 549284 - DNA, 15 bp, Homo sapiens
agaaaacaagtattt

SEQ ID NO: 549285 - DNA, 15 bp, Homo sapiens
gaaaacaagtatttt

SEQ ID NO: 549286 - DNA, 15 bp, Homo sapiens
aaaacaagtatttta

SEQ ID NO: 549287 - DNA, 15 bp, Homo sapiens
aaacaagtattttaa

SEQ ID NO: 549288 - DNA, 15 bp, Homo sapiens
aacaagtattttaaa

SEQ ID NO: 549289 - DNA, 15 bp, Homo sapiens
acaagtattttaaaa

SEQ ID NO: 549290 - DNA, 15 bp, Homo sapiens
caagtattttaaaac

SEQ ID NO: 549291 - DNA, 15 bp, Homo sapiens
aagtattttaaaaca

SEQ ID NO: 549292 - DNA, 15 bp, Homo sapiens
agtattttaaaacaa

SEQ ID NO: 549293 - DNA, 15 bp, Homo sapiens
gtattttaaaacaag

SEQ ID NO: 549294 - DNA, 15 bp, Homo sapiens
tattttaaaacaagc

SEQ ID NO: 549295 - DNA, 15 bp, Homo sapiens
attttaaaacaagcc

SEQ ID NO: 549296 - DNA, 15 bp, Homo sapiens
ttttaaaacaagccc

SEQ ID NO: 549297 - DNA, 15 bp, Homo sapiens
tttaaaacaagcccg

SEQ ID NO: 549298 - DNA, 15 bp, Homo sapiens
ttaaaacaagcccgg

SEQ ID NO: 549299 - DNA, 15 bp, Homo sapiens
taaaacaagcccgga

SEQ ID NO: 549300 - DNA, 15 bp, Homo sapiens
aaaacaagcccggaa

SEQ ID NO: 549301 - DNA, 15 bp, Homo sapiens
aaacaagcccggaaa

SEQ ID NO: 549302 - DNA, 15 bp, Homo sapiens
aacaagcccggaaag

SEQ ID NO: 549303 - DNA, 15 bp, Homo sapiens
acaagcccggaaagg

SEQ ID NO: 549304 - DNA, 15 bp, Homo sapiens
caagcccggaaaggc

SEQ ID NO: 549305 - DNA, 15 bp, Homo sapiens
aagcccggaaaggct

SEQ ID NO: 549306 - DNA, 15 bp, Homo sapiens
agcccggaaaggctg

SEQ ID NO: 549307 - DNA, 15 bp, Homo sapiens
gcccggaaaggctga

SEQ ID NO: 549308 - DNA, 15 bp, Homo sapiens
cccggaaaggctgag

SEQ ID NO: 549309 - DNA, 15 bp, Homo sapiens
ccggaaaggctgaga

SEQ ID NO: 549310 - DNA, 15 bp, Homo sapiens
cggaaaggctgagaa

SEQ ID NO: 549311 - DNA, 15 bp, Homo sapiens
ggaaaggctgagaaa

SEQ ID NO: 549312 - DNA, 15 bp, Homo sapiens
gaaaggctgagaaag

SEQ ID NO: 549313 - DNA, 15 bp, Homo sapiens
aaaggctgagaaagt

SEQ ID NO: 549314 - DNA, 15 bp, Homo sapiens
aaggctgagaaagta

SEQ ID NO: 549315 - DNA, 15 bp, Homo sapiens
aggctgagaaagtag

SEQ ID NO: 549316 - DNA, 15 bp, Homo sapiens
ggctgagaaagtagg

SEQ ID NO: 549317 - DNA, 15 bp, Homo sapiens
gctgagaaagtaggt

SEQ ID NO: 549318 - DNA, 15 bp, Homo sapiens
ctgagaaagtaggta

SEQ ID NO: 549319 - DNA, 15 bp, Homo sapiens
tgagaaagtaggtag

SEQ ID NO: 549320 - DNA, 15 bp, Homo sapiens
gagaaagtaggtaga

SEQ ID NO: 549321 - DNA, 15 bp, Homo sapiens
agaaagtaggtagag

SEQ ID NO: 549322 - DNA, 15 bp, Homo sapiens
gaaagtaggtagaga

SEQ ID NO: 549323 - DNA, 15 bp, Homo sapiens
aaagtaggtagagag

SEQ ID NO: 549324 - DNA, 15 bp, Homo sapiens
aagtaggtagagagg

SEQ ID NO: 549325 - DNA, 15 bp, Homo sapiens
agtaggtagagaggg

SEQ ID NO: 549326 - DNA, 15 bp, Homo sapiens
gtaggtagagaggga

SEQ ID NO: 549327 - DNA, 15 bp, Homo sapiens
taggtagagagggaa

SEQ ID NO: 549328 - DNA, 15 bp, Homo sapiens
aggtagagagggaaa

SEQ ID NO: 549329 - DNA, 15 bp, Homo sapiens
ggtagagagggaaag

SEQ ID NO: 549330 - DNA, 15 bp, Homo sapiens
gtagagagggaaagg

SEQ ID NO: 549331 - DNA, 15 bp, Homo sapiens
tagagagggaaaggg

SEQ ID NO: 549332 - DNA, 15 bp, Homo sapiens
agagagggaaaggga

SEQ ID NO: 549333 - DNA, 15 bp, Homo sapiens
gagagggaaagggaa

SEQ ID NO: 549334 - DNA, 15 bp, Homo sapiens
agagggaaagggaaa

SEQ ID NO: 549335 - DNA, 15 bp, Homo sapiens
gagggaaagggaaag

SEQ ID NO: 549336 - DNA, 15 bp, Homo sapiens
agggaaagggaaagg

SEQ ID NO: 549337 - DNA, 15 bp, Homo sapiens
gggaaagggaaaggc

SEQ ID NO: 549338 - DNA, 15 bp, Homo sapiens
ggaaagggaaaggca

SEQ ID NO: 549339 - DNA, 15 bp, Homo sapiens
gaaagggaaaggcac

SEQ ID NO: 549340 - DNA, 15 bp, Homo sapiens
aaagggaaaggcaca

SEQ ID NO: 549341 - DNA, 15 bp, Homo sapiens
aagggaaaggcacac

SEQ ID NO: 549342 - DNA, 15 bp, Homo sapiens
agggaaaggcacact

SEQ ID NO: 549343 - DNA, 15 bp, Homo sapiens
gggaaaggcacactc

SEQ ID NO: 549344 - DNA, 15 bp, Homo sapiens
ggaaaggcacactcc

SEQ ID NO: 549345 - DNA, 15 bp, Homo sapiens
gaaaggcacactcct

SEQ ID NO: 549346 - DNA, 15 bp, Homo sapiens
aaaggcacactcctt

SEQ ID NO: 549347 - DNA, 15 bp, Homo sapiens
aaggcacactcctta

SEQ ID NO: 549348 - DNA, 15 bp, Homo sapiens
aggcacactccttac

SEQ ID NO: 549349 - DNA, 15 bp, Homo sapiens
ggcacactccttacg

SEQ ID NO: 549350 - DNA, 15 bp, Homo sapiens
gcacactccttacgc

SEQ ID NO: 549351 - DNA, 15 bp, Homo sapiens
cacactccttacgct

SEQ ID NO: 549352 - DNA, 15 bp, Homo sapiens
acactccttacgctc

SEQ ID NO: 549353 - DNA, 15 bp, Homo sapiens
cactccttacgctcc

SEQ ID NO: 549354 - DNA, 15 bp, Homo sapiens
actccttacgctcct

SEQ ID NO: 549355 - DNA, 15 bp, Homo sapiens
ctccttacgctcctg

SEQ ID NO: 549356 - DNA, 15 bp, Homo sapiens
tccttacgctcctgc

SEQ ID NO: 549357 - DNA, 15 bp, Homo sapiens
ccttacgctcctgct

SEQ ID NO: 549358 - DNA, 15 bp, Homo sapiens
cttacgctcctgctg

SEQ ID NO: 549359 - DNA, 15 bp, Homo sapiens
ttacgctcctgctgc

SEQ ID NO: 549360 - DNA, 15 bp, Homo sapiens
tacgctcctgctgcc

SEQ ID NO: 549361 - DNA, 15 bp, Homo sapiens
acgctcctgctgccc

SEQ ID NO: 549362 - DNA, 15 bp, Homo sapiens
cgctcctgctgcccc

SEQ ID NO: 549363 - DNA, 15 bp, Homo sapiens
gctcctgctgccccc

SEQ ID NO: 549364 - DNA, 15 bp, Homo sapiens
ctcctgctgccccca

SEQ ID NO: 549365 - DNA, 15 bp, Homo sapiens
tcctgctgcccccac

SEQ ID NO: 549366 - DNA, 15 bp, Homo sapiens
cctgctgcccccacc

SEQ ID NO: 549367 - DNA, 15 bp, Homo sapiens
ctgctgcccccaccc

SEQ ID NO: 549368 - DNA, 15 bp, Homo sapiens
tgctgcccccacccc

SEQ ID NO: 549369 - DNA, 15 bp, Homo sapiens
gctgcccccacccct

SEQ ID NO: 549370 - DNA, 15 bp, Homo sapiens
ctgcccccacccctc

SEQ ID NO: 549371 - DNA, 15 bp, Homo sapiens
tgcccccacccctca

SEQ ID NO: 549372 - DNA, 15 bp, Homo sapiens
gcccccacccctcaa

SEQ ID NO: 549373 - DNA, 15 bp, Homo sapiens
cccccacccctcaac

SEQ ID NO: 549374 - DNA, 15 bp, Homo sapiens
ccccacccctcaacc

SEQ ID NO: 549375 - DNA, 15 bp, Homo sapiens
cccacccctcaaccc

SEQ ID NO: 549376 - DNA, 15 bp, Homo sapiens
ccacccctcaacccc

SEQ ID NO: 549377 - DNA, 15 bp, Homo sapiens
cacccctcaaccccc

SEQ ID NO: 549378 - DNA, 15 bp, Homo sapiens
acccctcaacccccc

SEQ ID NO: 549379 - DNA, 15 bp, Homo sapiens
cccctcaacccccct

SEQ ID NO: 549380 - DNA, 15 bp, Homo sapiens
ccctcaacccccctg

SEQ ID NO: 549381 - DNA, 15 bp, Homo sapiens
cctcaacccccctgc

SEQ ID NO: 549382 - DNA, 15 bp, Homo sapiens
ctcaacccccctgcc

SEQ ID NO: 549383 - DNA, 15 bp, Homo sapiens
tcaacccccctgccc

SEQ ID NO: 549384 - DNA, 15 bp, Homo sapiens
caacccccctgcccc

SEQ ID NO: 549385 - DNA, 15 bp, Homo sapiens
aacccccctgcccca

SEQ ID NO: 549386 - DNA, 15 bp, Homo sapiens
acccccctgccccac

SEQ ID NO: 549387 - DNA, 15 bp, Homo sapiens
cccccctgccccacc

SEQ ID NO: 549388 - DNA, 15 bp, Homo sapiens
ccccctgccccaccc

SEQ ID NO: 549389 - DNA, 15 bp, Homo sapiens
cccctgccccaccca

SEQ ID NO: 549390 - DNA, 15 bp, Homo sapiens
ccctgccccacccat

SEQ ID NO: 549391 - DNA, 15 bp, Homo sapiens
cctgccccacccatc

SEQ ID NO: 549392 - DNA, 15 bp, Homo sapiens
ctgccccacccatct

SEQ ID NO: 549393 - DNA, 15 bp, Homo sapiens
tgccccacccatctc

SEQ ID NO: 549394 - DNA, 15 bp, Homo sapiens
gccccacccatctca

SEQ ID NO: 549395 - DNA, 15 bp, Homo sapiens
ccccacccatctcag

SEQ ID NO: 549396 - DNA, 15 bp, Homo sapiens
cccacccatctcagt

SEQ ID NO: 549397 - DNA, 15 bp, Homo sapiens
ccacccatctcagtc

SEQ ID NO: 549398 - DNA, 15 bp, Homo sapiens
cacccatctcagtct

SEQ ID NO: 549399 - DNA, 15 bp, Homo sapiens
acccatctcagtctt

SEQ ID NO: 549400 - DNA, 15 bp, Homo sapiens
cccatctcagtcttt

SEQ ID NO: 549401 - DNA, 15 bp, Homo sapiens
ccatctcagtcttta

SEQ ID NO: 549402 - DNA, 15 bp, Homo sapiens
catctcagtctttaa

SEQ ID NO: 549403 - DNA, 15 bp, Homo sapiens
atctcagtctttaat

SEQ ID NO: 549404 - DNA, 15 bp, Homo sapiens
tctcagtctttaatc

SEQ ID NO: 549405 - DNA, 15 bp, Homo sapiens
ctcagtctttaatct

SEQ ID NO: 549406 - DNA, 15 bp, Homo sapiens
tcagtctttaatctg

SEQ ID NO: 549407 - DNA, 15 bp, Homo sapiens
cagtctttaatctgc

SEQ ID NO: 549408 - DNA, 15 bp, Homo sapiens
agtctttaatctgcc

SEQ ID NO: 549409 - DNA, 15 bp, Homo sapiens
gtctttaatctgcca

SEQ ID NO: 549410 - DNA, 15 bp, Homo sapiens
tctttaatctgccaa

SEQ ID NO: 549411 - DNA, 15 bp, Homo sapiens
ctttaatctgccaaa

SEQ ID NO: 549412 - DNA, 15 bp, Homo sapiens
tttaatctgccaaac

SEQ ID NO: 549413 - DNA, 15 bp, Homo sapiens
ttaatctgccaaaca

SEQ ID NO: 549414 - DNA, 15 bp, Homo sapiens
taatctgccaaacaa

SEQ ID NO: 549415 - DNA, 15 bp, Homo sapiens
aatctgccaaacaag

SEQ ID NO: 549416 - DNA, 15 bp, Homo sapiens
atctgccaaacaagc

SEQ ID NO: 549417 - DNA, 15 bp, Homo sapiens
tctgccaaacaagcc

SEQ ID NO: 549418 - DNA, 15 bp, Homo sapiens
ctgccaaacaagccc

SEQ ID NO: 549419 - DNA, 15 bp, Homo sapiens
tgccaaacaagcccg

SEQ ID NO: 549420 - DNA, 15 bp, Homo sapiens
gccaaacaagcccgt

SEQ ID NO: 549421 - DNA, 15 bp, Homo sapiens
ccaaacaagcccgtg

SEQ ID NO: 549422 - DNA, 15 bp, Homo sapiens
caaacaagcccgtga

SEQ ID NO: 549423 - DNA, 15 bp, Homo sapiens
aaacaagcccgtgag

SEQ ID NO: 549424 - DNA, 15 bp, Homo sapiens
aacaagcccgtgagc

SEQ ID NO: 549425 - DNA, 15 bp, Homo sapiens
acaagcccgtgagcc

SEQ ID NO: 549426 - DNA, 15 bp, Homo sapiens
caagcccgtgagcct

SEQ ID NO: 549427 - DNA, 15 bp, Homo sapiens
aagcccgtgagcctt

SEQ ID NO: 549428 - DNA, 15 bp, Homo sapiens
agcccgtgagccttc

SEQ ID NO: 549429 - DNA, 15 bp, Homo sapiens
gcccgtgagccttca

SEQ ID NO: 549430 - DNA, 15 bp, Homo sapiens
cccgtgagccttcaa

SEQ ID NO: 549431 - DNA, 15 bp, Homo sapiens
ccgtgagccttcaaa

SEQ ID NO: 549432 - DNA, 15 bp, Homo sapiens
cgtgagccttcaaaa

SEQ ID NO: 549433 - DNA, 15 bp, Homo sapiens
gtgagccttcaaaag

SEQ ID NO: 549434 - DNA, 15 bp, Homo sapiens
tgagccttcaaaagg

SEQ ID NO: 549435 - DNA, 15 bp, Homo sapiens
gagccttcaaaaggc

SEQ ID NO: 549436 - DNA, 15 bp, Homo sapiens
agccttcaaaaggca

SEQ ID NO: 549437 - DNA, 15 bp, Homo sapiens
gccttcaaaaggcat

SEQ ID NO: 549438 - DNA, 15 bp, Homo sapiens
ccttcaaaaggcatt

SEQ ID NO: 549439 - DNA, 15 bp, Homo sapiens
cttcaaaaggcattt

SEQ ID NO: 549440 - DNA, 15 bp, Homo sapiens
ttcaaaaggcatttt

SEQ ID NO: 549441 - DNA, 15 bp, Homo sapiens
tcaaaaggcatttta

SEQ ID NO: 549442 - DNA, 15 bp, Homo sapiens
caaaaggcattttaa

SEQ ID NO: 549443 - DNA, 15 bp, Homo sapiens
aaaaggcattttaat

SEQ ID NO: 549444 - DNA, 15 bp, Homo sapiens
aaaggcattttaatt

SEQ ID NO: 549445 - DNA, 15 bp, Homo sapiens
aaggcattttaattc

SEQ ID NO: 549446 - DNA, 15 bp, Homo sapiens
aggcattttaattca

SEQ ID NO: 549447 - DNA, 15 bp, Homo sapiens
ggcattttaattcac

SEQ ID NO: 549448 - DNA, 15 bp, Homo sapiens
gcattttaattcact

SEQ ID NO: 549449 - DNA, 15 bp, Homo sapiens
cattttaattcactt

SEQ ID NO: 549450 - DNA, 15 bp, Homo sapiens
attttaattcacttc

SEQ ID NO: 549451 - DNA, 15 bp, Homo sapiens
ttttaattcacttca

SEQ ID NO: 549452 - DNA, 15 bp, Homo sapiens
tttaattcacttcat

SEQ ID NO: 549453 - DNA, 15 bp, Homo sapiens
ttaattcacttcatc

SEQ ID NO: 549454 - DNA, 15 bp, Homo sapiens
taattcacttcatct

SEQ ID NO: 549455 - DNA, 15 bp, Homo sapiens
aattcacttcatctg

SEQ ID NO: 549456 - DNA, 15 bp, Homo sapiens
attcacttcatctgc

SEQ ID NO: 549457 - DNA, 15 bp, Homo sapiens
ttcacttcatctgct

SEQ ID NO: 549458 - DNA, 15 bp, Homo sapiens
tcacttcatctgctc

SEQ ID NO: 549459 - DNA, 15 bp, Homo sapiens
cacttcatctgctcc

SEQ ID NO: 549460 - DNA, 15 bp, Homo sapiens
acttcatctgctccc

SEQ ID NO: 549461 - DNA, 15 bp, Homo sapiens
cttcatctgctccca

SEQ ID NO: 549462 - DNA, 15 bp, Homo sapiens
ttcatctgctcccag

SEQ ID NO: 549463 - DNA, 15 bp, Homo sapiens
tcatctgctcccagc

SEQ ID NO: 549464 - DNA, 15 bp, Homo sapiens
catctgctcccagct

SEQ ID NO: 549465 - DNA, 15 bp, Homo sapiens
atctgctcccagctc

SEQ ID NO: 549466 - DNA, 15 bp, Homo sapiens
tctgctcccagctca

SEQ ID NO: 549467 - DNA, 15 bp, Homo sapiens
ctgctcccagctcac

SEQ ID NO: 549468 - DNA, 15 bp, Homo sapiens
tgctcccagctcacc

SEQ ID NO: 549469 - DNA, 15 bp, Homo sapiens
gctcccagctcacct

SEQ ID NO: 549470 - DNA, 15 bp, Homo sapiens
ctcccagctcacctt

SEQ ID NO: 549471 - DNA, 15 bp, Homo sapiens
tcccagctcaccttc

SEQ ID NO: 549472 - DNA, 15 bp, Homo sapiens
cccagctcaccttcc

SEQ ID NO: 549473 - DNA, 15 bp, Homo sapiens
ccagctcaccttccc

SEQ ID NO: 549474 - DNA, 15 bp, Homo sapiens
cagctcaccttccct

SEQ ID NO: 549475 - DNA, 15 bp, Homo sapiens
agctcaccttcccta

SEQ ID NO: 549476 - DNA, 15 bp, Homo sapiens
gctcaccttccctac

SEQ ID NO: 549477 - DNA, 15 bp, Homo sapiens
ctcaccttccctacc

SEQ ID NO: 549478 - DNA, 15 bp, Homo sapiens
tcaccttccctacct

SEQ ID NO: 549479 - DNA, 15 bp, Homo sapiens
caccttccctacctc

SEQ ID NO: 549480 - DNA, 15 bp, Homo sapiens
accttccctacctcc

SEQ ID NO: 549481 - DNA, 15 bp, Homo sapiens
ccttccctacctcct

SEQ ID NO: 549482 - DNA, 15 bp, Homo sapiens
cttccctacctcctt

SEQ ID NO: 549483 - DNA, 15 bp, Homo sapiens
ttccctacctccttt

SEQ ID NO: 549484 - DNA, 15 bp, Homo sapiens
tccctacctcctttg

SEQ ID NO: 549485 - DNA, 15 bp, Homo sapiens
ccctacctcctttgg

SEQ ID NO: 549486 - DNA, 15 bp, Homo sapiens
cctacctcctttggg

SEQ ID NO: 549487 - DNA, 15 bp, Homo sapiens
ctacctcctttgggt

SEQ ID NO: 549488 - DNA, 15 bp, Homo sapiens
tacctcctttgggtc

SEQ ID NO: 549489 - DNA, 15 bp, Homo sapiens
acctcctttgggtct

SEQ ID NO: 549490 - DNA, 15 bp, Homo sapiens
cctcctttgggtctg

SEQ ID NO: 549491 - DNA, 15 bp, Homo sapiens
ctcctttgggtctgc

SEQ ID NO: 549492 - DNA, 15 bp, Homo sapiens
tcctttgggtctgcc

SEQ ID NO: 549493 - DNA, 15 bp, Homo sapiens
cctttgggtctgccc

SEQ ID NO: 549494 - DNA, 15 bp, Homo sapiens
ctttgggtctgccca

SEQ ID NO: 549495 - DNA, 15 bp, Homo sapiens
tttgggtctgcccac

SEQ ID NO: 549496 - DNA, 15 bp, Homo sapiens
ttgggtctgcccact

SEQ ID NO: 549497 - DNA, 15 bp, Homo sapiens
tgggtctgcccacta

SEQ ID NO: 549498 - DNA, 15 bp, Homo sapiens
gggtctgcccactac

SEQ ID NO: 549499 - DNA, 15 bp, Homo sapiens
ggtctgcccactact

SEQ ID NO: 549500 - DNA, 15 bp, Homo sapiens
gtctgcccactactc

SEQ ID NO: 549501 - DNA, 15 bp, Homo sapiens
tctgcccactactct

SEQ ID NO: 549502 - DNA, 15 bp, Homo sapiens
ctgcccactactctc

SEQ ID NO: 549503 - DNA, 15 bp, Homo sapiens
tgcccactactctcc

SEQ ID NO: 549504 - DNA, 15 bp, Homo sapiens
gcccactactctcca

SEQ ID NO: 549505 - DNA, 15 bp, Homo sapiens
cccactactctccat

SEQ ID NO: 549506 - DNA, 15 bp, Homo sapiens
ccactactctccatt

SEQ ID NO: 549507 - DNA, 15 bp, Homo sapiens
cactactctccattc

SEQ ID NO: 549508 - DNA, 15 bp, Homo sapiens
actactctccattcc

SEQ ID NO: 549509 - DNA, 15 bp, Homo sapiens
ctactctccattccc

SEQ ID NO: 549510 - DNA, 15 bp, Homo sapiens
tactctccattccca

SEQ ID NO: 549511 - DNA, 15 bp, Homo sapiens
actctccattcccaa

SEQ ID NO: 549512 - DNA, 15 bp, Homo sapiens
ctctccattcccaag

SEQ ID NO: 549513 - DNA, 15 bp, Homo sapiens
tctccattcccaagg

SEQ ID NO: 549514 - DNA, 15 bp, Homo sapiens
ctccattcccaagga

SEQ ID NO: 549515 - DNA, 15 bp, Homo sapiens
tccattcccaaggat

SEQ ID NO: 549516 - DNA, 15 bp, Homo sapiens
ccattcccaaggatt

SEQ ID NO: 549517 - DNA, 15 bp, Homo sapiens
cattcccaaggattg

SEQ ID NO: 549518 - DNA, 15 bp, Homo sapiens
attcccaaggattgt

SEQ ID NO: 549519 - DNA, 15 bp, Homo sapiens
ttcccaaggattgtt

SEQ ID NO: 549520 - DNA, 15 bp, Homo sapiens
tcccaaggattgttg

SEQ ID NO: 549521 - DNA, 15 bp, Homo sapiens
cccaaggattgttgg

SEQ ID NO: 549522 - DNA, 15 bp, Homo sapiens
ccaaggattgttggc

SEQ ID NO: 549523 - DNA, 15 bp, Homo sapiens
caaggattgttggct

SEQ ID NO: 549524 - DNA, 15 bp, Homo sapiens
aaggattgttggctg

SEQ ID NO: 549525 - DNA, 15 bp, Homo sapiens
aggattgttggctga

SEQ ID NO: 549526 - DNA, 15 bp, Homo sapiens
ggattgttggctgag

SEQ ID NO: 549527 - DNA, 15 bp, Homo sapiens
gattgttggctgaga

SEQ ID NO: 549528 - DNA, 15 bp, Homo sapiens
attgttggctgagag

SEQ ID NO: 549529 - DNA, 15 bp, Homo sapiens
ttgttggctgagagt

SEQ ID NO: 549530 - DNA, 15 bp, Homo sapiens
tgttggctgagagtg

SEQ ID NO: 549531 - DNA, 15 bp, Homo sapiens
gttggctgagagtgg

SEQ ID NO: 549532 - DNA, 15 bp, Homo sapiens
ttggctgagagtggg

SEQ ID NO: 549533 - DNA, 15 bp, Homo sapiens
tggctgagagtggga

SEQ ID NO: 549534 - DNA, 15 bp, Homo sapiens
ggctgagagtgggac

SEQ ID NO: 549535 - DNA, 15 bp, Homo sapiens
gctgagagtgggaca

SEQ ID NO: 549536 - DNA, 15 bp, Homo sapiens
ctgagagtgggacag

SEQ ID NO: 549537 - DNA, 15 bp, Homo sapiens
tgagagtgggacagt

SEQ ID NO: 549538 - DNA, 15 bp, Homo sapiens
gagagtgggacagtg

SEQ ID NO: 549539 - DNA, 15 bp, Homo sapiens
agagtgggacagtgg

SEQ ID NO: 549540 - DNA, 15 bp, Homo sapiens
gagtgggacagtggg

SEQ ID NO: 549541 - DNA, 15 bp, Homo sapiens
agtgggacagtggga

SEQ ID NO: 549542 - DNA, 15 bp, Homo sapiens
gtgggacagtgggag

SEQ ID NO: 549543 - DNA, 15 bp, Homo sapiens
tgggacagtgggagg

SEQ ID NO: 549544 - DNA, 15 bp, Homo sapiens
gggacagtgggaggg

SEQ ID NO: 549545 - DNA, 15 bp, Homo sapiens
ggacagtgggaggga

SEQ ID NO: 549546 - DNA, 15 bp, Homo sapiens
gacagtgggagggag

SEQ ID NO: 549547 - DNA, 15 bp, Homo sapiens
acagtgggagggagg

SEQ ID NO: 549548 - DNA, 15 bp, Homo sapiens
cagtgggagggaggg

SEQ ID NO: 549549 - DNA, 15 bp, Homo sapiens
agtgggagggaggga

SEQ ID NO: 549550 - DNA, 15 bp, Homo sapiens
gtgggagggagggag

SEQ ID NO: 549551 - DNA, 15 bp, Homo sapiens
tgggagggagggagg

SEQ ID NO: 549552 - DNA, 15 bp, Homo sapiens
gggagggagggaggc

SEQ ID NO: 549553 - DNA, 15 bp, Homo sapiens
ggagggagggaggca

SEQ ID NO: 549554 - DNA, 15 bp, Homo sapiens
gagggagggaggcag

SEQ ID NO: 549555 - DNA, 15 bp, Homo sapiens
agggagggaggcagt

SEQ ID NO: 549556 - DNA, 15 bp, Homo sapiens
gggagggaggcagtg

SEQ ID NO: 549557 - DNA, 15 bp, Homo sapiens
ggagggaggcagtgg

SEQ ID NO: 549558 - DNA, 15 bp, Homo sapiens
gagggaggcagtggt

SEQ ID NO: 549559 - DNA, 15 bp, Homo sapiens
agggaggcagtggtg

SEQ ID NO: 549560 - DNA, 15 bp, Homo sapiens
gggaggcagtggtgt

SEQ ID NO: 549561 - DNA, 15 bp, Homo sapiens
ggaggcagtggtgtg

SEQ ID NO: 549562 - DNA, 15 bp, Homo sapiens
gaggcagtggtgtgg

SEQ ID NO: 549563 - DNA, 15 bp, Homo sapiens
aggcagtggtgtggg

SEQ ID NO: 549564 - DNA, 15 bp, Homo sapiens
ggcagtggtgtgggc

SEQ ID NO: 549565 - DNA, 15 bp, Homo sapiens
gcagtggtgtgggca

SEQ ID NO: 549566 - DNA, 15 bp, Homo sapiens
cagtggtgtgggcag

SEQ ID NO: 549567 - DNA, 15 bp, Homo sapiens
agtggtgtgggcagg

SEQ ID NO: 549568 - DNA, 15 bp, Homo sapiens
gtggtgtgggcaggg

SEQ ID NO: 549569 - DNA, 15 bp, Homo sapiens
tggtgtgggcagggg

SEQ ID NO: 549570 - DNA, 15 bp, Homo sapiens
ggtgtgggcaggggg

SEQ ID NO: 549571 - DNA, 15 bp, Homo sapiens
gtgtgggcaggggga

SEQ ID NO: 549572 - DNA, 15 bp, Homo sapiens
tgtgggcagggggag

SEQ ID NO: 549573 - DNA, 15 bp, Homo sapiens
gtgggcagggggagc

SEQ ID NO: 549574 - DNA, 15 bp, Homo sapiens
tgggcagggggagcc

SEQ ID NO: 549575 - DNA, 15 bp, Homo sapiens
gggcagggggagcca

SEQ ID NO: 549576 - DNA, 15 bp, Homo sapiens
ggcagggggagccag

SEQ ID NO: 549577 - DNA, 15 bp, Homo sapiens
gcagggggagccagc

SEQ ID NO: 549578 - DNA, 15 bp, Homo sapiens
cagggggagccagca

SEQ ID NO: 549579 - DNA, 15 bp, Homo sapiens
agggggagccagcat

SEQ ID NO: 549580 - DNA, 15 bp, Homo sapiens
gggggagccagcatt

SEQ ID NO: 549581 - DNA, 15 bp, Homo sapiens
ggggagccagcattt

SEQ ID NO: 549582 - DNA, 15 bp, Homo sapiens
gggagccagcatttt

SEQ ID NO: 549583 - DNA, 15 bp, Homo sapiens
ggagccagcatttta

SEQ ID NO: 549584 - DNA, 15 bp, Homo sapiens
gagccagcattttat

SEQ ID NO: 549585 - DNA, 15 bp, Homo sapiens
agccagcattttatt

SEQ ID NO: 549586 - DNA, 15 bp, Homo sapiens
gccagcattttatta

SEQ ID NO: 549587 - DNA, 15 bp, Homo sapiens
ccagcattttattag

SEQ ID NO: 549588 - DNA, 15 bp, Homo sapiens
cagcattttattagg

SEQ ID NO: 549589 - DNA, 15 bp, Homo sapiens
agcattttattaggc

SEQ ID NO: 549590 - DNA, 15 bp, Homo sapiens
gcattttattaggct

SEQ ID NO: 549591 - DNA, 15 bp, Homo sapiens
cattttattaggctg

SEQ ID NO: 549592 - DNA, 15 bp, Homo sapiens
attttattaggctgt

SEQ ID NO: 549593 - DNA, 15 bp, Homo sapiens
ttttattaggctgtt

SEQ ID NO: 549594 - DNA, 15 bp, Homo sapiens
tttattaggctgttg

SEQ ID NO: 549595 - DNA, 15 bp, Homo sapiens
ttattaggctgttga

SEQ ID NO: 549596 - DNA, 15 bp, Homo sapiens
tattaggctgttgaa

SEQ ID NO: 549597 - DNA, 15 bp, Homo sapiens
attaggctgttgaat

SEQ ID NO: 549598 - DNA, 15 bp, Homo sapiens
ttaggctgttgaatt

SEQ ID NO: 549599 - DNA, 15 bp, Homo sapiens
taggctgttgaattt

SEQ ID NO: 549600 - DNA, 15 bp, Homo sapiens
aggctgttgaatttg

SEQ ID NO: 549601 - DNA, 15 bp, Homo sapiens
ggctgttgaatttga

SEQ ID NO: 549602 - DNA, 15 bp, Homo sapiens
gctgttgaatttgat

SEQ ID NO: 549603 - DNA, 15 bp, Homo sapiens
ctgttgaatttgatt

SEQ ID NO: 549604 - DNA, 15 bp, Homo sapiens
tgttgaatttgattt

SEQ ID NO: 549605 - DNA, 15 bp, Homo sapiens
gttgaatttgattta

SEQ ID NO: 549606 - DNA, 15 bp, Homo sapiens
ttgaatttgatttat

SEQ ID NO: 549607 - DNA, 15 bp, Homo sapiens
tgaatttgatttatt

SEQ ID NO: 549608 - DNA, 15 bp, Homo sapiens
gaatttgatttatta

SEQ ID NO: 549609 - DNA, 15 bp, Homo sapiens
aatttgatttattag

SEQ ID NO: 549610 - DNA, 15 bp, Homo sapiens
atttgatttattagg

SEQ ID NO: 549611 - DNA, 15 bp, Homo sapiens
tttgatttattaggg

SEQ ID NO: 549612 - DNA, 15 bp, Homo sapiens
ttgatttattagggg

SEQ ID NO: 549613 - DNA, 15 bp, Homo sapiens
tgatttattaggggg

SEQ ID NO: 549614 - DNA, 15 bp, Homo sapiens
gatttattagggggg

SEQ ID NO: 549615 - DNA, 15 bp, Homo sapiens
atttattagggggga

SEQ ID NO: 549616 - DNA, 15 bp, Homo sapiens
tttattaggggggaa

SEQ ID NO: 549617 - DNA, 15 bp, Homo sapiens
ttattaggggggaaa

SEQ ID NO: 549618 - DNA, 15 bp, Homo sapiens
tattaggggggaaaa

SEQ ID NO: 549619 - DNA, 15 bp, Homo sapiens
attaggggggaaaaa

SEQ ID NO: 549620 - DNA, 15 bp, Homo sapiens
ttaggggggaaaaat

SEQ ID NO: 549621 - DNA, 15 bp, Homo sapiens
taggggggaaaaatc

SEQ ID NO: 549622 - DNA, 15 bp, Homo sapiens
aggggggaaaaatcc

SEQ ID NO: 549623 - DNA, 15 bp, Homo sapiens
ggggggaaaaatcct

SEQ ID NO: 549624 - DNA, 15 bp, Homo sapiens
gggggaaaaatcctt

SEQ ID NO: 549625 - DNA, 15 bp, Homo sapiens
ggggaaaaatccttc

SEQ ID NO: 549626 - DNA, 15 bp, Homo sapiens
gggaaaaatccttcg

SEQ ID NO: 549627 - DNA, 15 bp, Homo sapiens
ggaaaaatccttcgc

SEQ ID NO: 549628 - DNA, 15 bp, Homo sapiens
gaaaaatccttcgct

SEQ ID NO: 549629 - DNA, 15 bp, Homo sapiens
aaaaatccttcgctt

SEQ ID NO: 549630 - DNA, 15 bp, Homo sapiens
aaaatccttcgcttg

SEQ ID NO: 549631 - DNA, 15 bp, Homo sapiens
aaatccttcgcttgc

SEQ ID NO: 549632 - DNA, 15 bp, Homo sapiens
aatccttcgcttgct

SEQ ID NO: 549633 - DNA, 15 bp, Homo sapiens
atccttcgcttgctt

SEQ ID NO: 549634 - DNA, 15 bp, Homo sapiens
tccttcgcttgcttg

SEQ ID NO: 549635 - DNA, 15 bp, Homo sapiens
ccttcgcttgcttgc

SEQ ID NO: 549636 - DNA, 15 bp, Homo sapiens
cttcgcttgcttgcc

SEQ ID NO: 549637 - DNA, 15 bp, Homo sapiens
ttcgcttgcttgcca

SEQ ID NO: 549638 - DNA, 15 bp, Homo sapiens
tcgcttgcttgccac

SEQ ID NO: 549639 - DNA, 15 bp, Homo sapiens
cgcttgcttgccaca

SEQ ID NO: 549640 - DNA, 15 bp, Homo sapiens
gcttgcttgccacac

SEQ ID NO: 549641 - DNA, 15 bp, Homo sapiens
cttgcttgccacaca

SEQ ID NO: 549642 - DNA, 15 bp, Homo sapiens
ttgcttgccacacag

SEQ ID NO: 549643 - DNA, 15 bp, Homo sapiens
tgcttgccacacagg

SEQ ID NO: 549644 - DNA, 15 bp, Homo sapiens
gcttgccacacaggt

SEQ ID NO: 549645 - DNA, 15 bp, Homo sapiens
cttgccacacaggtt

SEQ ID NO: 549646 - DNA, 15 bp, Homo sapiens
ttgccacacaggtta

SEQ ID NO: 549647 - DNA, 15 bp, Homo sapiens
tgccacacaggttat

SEQ ID NO: 549648 - DNA, 15 bp, Homo sapiens
gccacacaggttatt

SEQ ID NO: 549649 - DNA, 15 bp, Homo sapiens
ccacacaggttattc

SEQ ID NO: 549650 - DNA, 15 bp, Homo sapiens
cacacaggttattct

SEQ ID NO: 549651 - DNA, 15 bp, Homo sapiens
acacaggttattctc

SEQ ID NO: 549652 - DNA, 15 bp, Homo sapiens
cacaggttattctca

SEQ ID NO: 549653 - DNA, 15 bp, Homo sapiens
acaggttattctcaa

SEQ ID NO: 549654 - DNA, 15 bp, Homo sapiens
caggttattctcaaa

SEQ ID NO: 549655 - DNA, 15 bp, Homo sapiens
aggttattctcaaag

SEQ ID NO: 549656 - DNA, 15 bp, Homo sapiens
ggttattctcaaagt

SEQ ID NO: 549657 - DNA, 15 bp, Homo sapiens
gttattctcaaagtg

SEQ ID NO: 549658 - DNA, 15 bp, Homo sapiens
ttattctcaaagtga

SEQ ID NO: 549659 - DNA, 15 bp, Homo sapiens
tattctcaaagtgaa

SEQ ID NO: 549660 - DNA, 15 bp, Homo sapiens
attctcaaagtgaaa

SEQ ID NO: 549661 - DNA, 15 bp, Homo sapiens
ttctcaaagtgaaaa

SEQ ID NO: 549662 - DNA, 15 bp, Homo sapiens
tctcaaagtgaaaac

SEQ ID NO: 549663 - DNA, 15 bp, Homo sapiens
ctcaaagtgaaaact

SEQ ID NO: 549664 - DNA, 15 bp, Homo sapiens
tcaaagtgaaaactc

SEQ ID NO: 549665 - DNA, 15 bp, Homo sapiens
caaagtgaaaactct

SEQ ID NO: 549666 - DNA, 15 bp, Homo sapiens
aaagtgaaaactcta

SEQ ID NO: 549667 - DNA, 15 bp, Homo sapiens
aagtgaaaactctat

SEQ ID NO: 549668 - DNA, 15 bp, Homo sapiens
agtgaaaactctatt

SEQ ID NO: 549669 - DNA, 15 bp, Homo sapiens
gtgaaaactctattt

SEQ ID NO: 549670 - DNA, 15 bp, Homo sapiens
tgaaaactctatttt

SEQ ID NO: 549671 - DNA, 15 bp, Homo sapiens
gaaaactctatttta

SEQ ID NO: 549672 - DNA, 15 bp, Homo sapiens
aaaactctattttac

SEQ ID NO: 549673 - DNA, 15 bp, Homo sapiens
aaactctattttact

SEQ ID NO: 549674 - DNA, 15 bp, Homo sapiens
aactctattttactt

SEQ ID NO: 549675 - DNA, 15 bp, Homo sapiens
actctattttacttc

SEQ ID NO: 549676 - DNA, 15 bp, Homo sapiens
ctctattttacttcg

SEQ ID NO: 549677 - DNA, 15 bp, Homo sapiens
tctattttacttcga

SEQ ID NO: 549678 - DNA, 15 bp, Homo sapiens
ctattttacttcgaa

SEQ ID NO: 549679 - DNA, 15 bp, Homo sapiens
tattttacttcgaaa

SEQ ID NO: 549680 - DNA, 15 bp, Homo sapiens
attttacttcgaaaa

SEQ ID NO: 549681 - DNA, 15 bp, Homo sapiens
ttttacttcgaaaaa

SEQ ID NO: 549682 - DNA, 15 bp, Homo sapiens
tttacttcgaaaaaa

SEQ ID NO: 549683 - DNA, 15 bp, Homo sapiens
ttacttcgaaaaaaa

SEQ ID NO: 549684 - DNA, 15 bp, Homo sapiens
tacttcgaaaaaaaa

SEQ ID NO: 549685 - DNA, 15 bp, Homo sapiens
acttcgaaaaaaaaa

SEQ ID NO: 549686 - DNA, 15 bp, Homo sapiens
cttcgaaaaaaaaat

SEQ ID NO: 549687 - DNA, 15 bp, Homo sapiens
ttcgaaaaaaaaatg

SEQ ID NO: 549688 - DNA, 15 bp, Homo sapiens
tcgaaaaaaaaatgg

SEQ ID NO: 549689 - DNA, 15 bp, Homo sapiens
cgaaaaaaaaatggt

SEQ ID NO: 549690 - DNA, 15 bp, Homo sapiens
gaaaaaaaaatggtg

SEQ ID NO: 549691 - DNA, 15 bp, Homo sapiens
aaaaaaaaatggtga

SEQ ID NO: 549692 - DNA, 15 bp, Homo sapiens
aaaaaaaatggtgaa

SEQ ID NO: 549693 - DNA, 15 bp, Homo sapiens
aaaaaaatggtgaaa

SEQ ID NO: 549694 - DNA, 15 bp, Homo sapiens
aaaaaatggtgaaag

SEQ ID NO: 549695 - DNA, 15 bp, Homo sapiens
aaaaatggtgaaagt

SEQ ID NO: 549696 - DNA, 15 bp, Homo sapiens
aaaatggtgaaagtg

SEQ ID NO: 549697 - DNA, 15 bp, Homo sapiens
aaatggtgaaagtgc

SEQ ID NO: 549698 - DNA, 15 bp, Homo sapiens
aatggtgaaagtgcc

SEQ ID NO: 549699 - DNA, 15 bp, Homo sapiens
atggtgaaagtgcct

SEQ ID NO: 549700 - DNA, 15 bp, Homo sapiens
tggtgaaagtgccta

SEQ ID NO: 549701 - DNA, 15 bp, Homo sapiens
ggtgaaagtgcctac

SEQ ID NO: 549702 - DNA, 15 bp, Homo sapiens
gtgaaagtgcctaca

SEQ ID NO: 549703 - DNA, 15 bp, Homo sapiens
tgaaagtgcctacag

SEQ ID NO: 549704 - DNA, 15 bp, Homo sapiens
gaaagtgcctacagt

SEQ ID NO: 549705 - DNA, 15 bp, Homo sapiens
aaagtgcctacagtt

SEQ ID NO: 549706 - DNA, 15 bp, Homo sapiens
aagtgcctacagtta

SEQ ID NO: 549707 - DNA, 15 bp, Homo sapiens
agtgcctacagttat

SEQ ID NO: 549708 - DNA, 15 bp, Homo sapiens
gtgcctacagttatg

SEQ ID NO: 549709 - DNA, 15 bp, Homo sapiens
tgcctacagttatga

SEQ ID NO: 549710 - DNA, 15 bp, Homo sapiens
gcctacagttatgaa

SEQ ID NO: 549711 - DNA, 15 bp, Homo sapiens
cctacagttatgaat

SEQ ID NO: 549712 - DNA, 15 bp, Homo sapiens
ctacagttatgaatg

SEQ ID NO: 549713 - DNA, 15 bp, Homo sapiens
tacagttatgaatgg

SEQ ID NO: 549714 - DNA, 15 bp, Homo sapiens
acagttatgaatgga

SEQ ID NO: 549715 - DNA, 15 bp, Homo sapiens
cagttatgaatggag

SEQ ID NO: 549716 - DNA, 15 bp, Homo sapiens
agttatgaatggagc

SEQ ID NO: 549717 - DNA, 15 bp, Homo sapiens
gttatgaatggagct

SEQ ID NO: 549718 - DNA, 15 bp, Homo sapiens
ttatgaatggagctc

SEQ ID NO: 549719 - DNA, 15 bp, Homo sapiens
tatgaatggagctct

SEQ ID NO: 549720 - DNA, 15 bp, Homo sapiens
atgaatggagctctt

SEQ ID NO: 549721 - DNA, 15 bp, Homo sapiens
tgaatggagctcttt

SEQ ID NO: 549722 - DNA, 15 bp, Homo sapiens
gaatggagctctttg

SEQ ID NO: 549723 - DNA, 15 bp, Homo sapiens
aatggagctctttgt

SEQ ID NO: 549724 - DNA, 15 bp, Homo sapiens
atggagctctttgtt

SEQ ID NO: 549725 - DNA, 15 bp, Homo sapiens
tggagctctttgtta

SEQ ID NO: 549726 - DNA, 15 bp, Homo sapiens
ggagctctttgttac

SEQ ID NO: 549727 - DNA, 15 bp, Homo sapiens
gagctctttgttacc

SEQ ID NO: 549728 - DNA, 15 bp, Homo sapiens
agctctttgttacct

SEQ ID NO: 549729 - DNA, 15 bp, Homo sapiens
gctctttgttacctt

SEQ ID NO: 549730 - DNA, 15 bp, Homo sapiens
ctctttgttaccttc

SEQ ID NO: 549731 - DNA, 15 bp, Homo sapiens
tctttgttaccttcc

SEQ ID NO: 549732 - DNA, 15 bp, Homo sapiens
ctttgttaccttcca

SEQ ID NO: 549733 - DNA, 15 bp, Homo sapiens
tttgttaccttccag

SEQ ID NO: 549734 - DNA, 15 bp, Homo sapiens
ttgttaccttccaga

SEQ ID NO: 549735 - DNA, 15 bp, Homo sapiens
tgttaccttccagat

SEQ ID NO: 549736 - DNA, 15 bp, Homo sapiens
gttaccttccagatc

SEQ ID NO: 549737 - DNA, 15 bp, Homo sapiens
ttaccttccagatcg

SEQ ID NO: 549738 - DNA, 15 bp, Homo sapiens
taccttccagatcga

SEQ ID NO: 549739 - DNA, 15 bp, Homo sapiens
accttccagatcgac

SEQ ID NO: 549740 - DNA, 15 bp, Homo sapiens
ccttccagatcgaca

SEQ ID NO: 549741 - DNA, 15 bp, Homo sapiens
cttccagatcgacaa

SEQ ID NO: 549742 - DNA, 15 bp, Homo sapiens
ttccagatcgacaag

SEQ ID NO: 549743 - DNA, 15 bp, Homo sapiens
tccagatcgacaaga

SEQ ID NO: 549744 - DNA, 15 bp, Homo sapiens
ccagatcgacaagac

SEQ ID NO: 549745 - DNA, 15 bp, Homo sapiens
cagatcgacaagaca

SEQ ID NO: 549746 - DNA, 15 bp, Homo sapiens
agatcgacaagacag

SEQ ID NO: 549747 - DNA, 15 bp, Homo sapiens
gatcgacaagacaga

SEQ ID NO: 549748 - DNA, 15 bp, Homo sapiens
atcgacaagacagac

SEQ ID NO: 549749 - DNA, 15 bp, Homo sapiens
tcgacaagacagact

SEQ ID NO: 549750 - DNA, 15 bp, Homo sapiens
cgacaagacagactg

SEQ ID NO: 549751 - DNA, 15 bp, Homo sapiens
gacaagacagactgt

SEQ ID NO: 549752 - DNA, 15 bp, Homo sapiens
acaagacagactgtt

SEQ ID NO: 549753 - DNA, 15 bp, Homo sapiens
caagacagactgttt

SEQ ID NO: 549754 - DNA, 15 bp, Homo sapiens
aagacagactgtttg

SEQ ID NO: 549755 - DNA, 15 bp, Homo sapiens
agacagactgtttgg

SEQ ID NO: 549756 - DNA, 15 bp, Homo sapiens
gacagactgtttggt

SEQ ID NO: 549757 - DNA, 15 bp, Homo sapiens
acagactgtttggtt

SEQ ID NO: 549758 - DNA, 15 bp, Homo sapiens
cagactgtttggttc

SEQ ID NO: 549759 - DNA, 15 bp, Homo sapiens
agactgtttggttca

SEQ ID NO: 549760 - DNA, 15 bp, Homo sapiens
gactgtttggttcat

SEQ ID NO: 549761 - DNA, 15 bp, Homo sapiens
actgtttggttcatg

SEQ ID NO: 549762 - DNA, 15 bp, Homo sapiens
ctgtttggttcatgt

SEQ ID NO: 549763 - DNA, 15 bp, Homo sapiens
tgtttggttcatgtc

SEQ ID NO: 549764 - DNA, 15 bp, Homo sapiens
gtttggttcatgtct

SEQ ID NO: 549765 - DNA, 15 bp, Homo sapiens
tttggttcatgtctg

SEQ ID NO: 549766 - DNA, 15 bp, Homo sapiens
ttggttcatgtctgt

SEQ ID NO: 549767 - DNA, 15 bp, Homo sapiens
tggttcatgtctgtg

SEQ ID NO: 549768 - DNA, 15 bp, Homo sapiens
ggttcatgtctgtgc

SEQ ID NO: 549769 - DNA, 15 bp, Homo sapiens
gttcatgtctgtgca

SEQ ID NO: 549770 - DNA, 15 bp, Homo sapiens
ttcatgtctgtgcac

SEQ ID NO: 549771 - DNA, 15 bp, Homo sapiens
tcatgtctgtgcacc

SEQ ID NO: 549772 - DNA, 15 bp, Homo sapiens
catgtctgtgcacca

SEQ ID NO: 549773 - DNA, 15 bp, Homo sapiens
atgtctgtgcaccag

SEQ ID NO: 549774 - DNA, 15 bp, Homo sapiens
tgtctgtgcaccagc

SEQ ID NO: 549775 - DNA, 15 bp, Homo sapiens
gtctgtgcaccagca

SEQ ID NO: 549776 - DNA, 15 bp, Homo sapiens
tctgtgcaccagcaa

SEQ ID NO: 549777 - DNA, 15 bp, Homo sapiens
ctgtgcaccagcaaa

SEQ ID NO: 549778 - DNA, 15 bp, Homo sapiens
tgtgcaccagcaaag

SEQ ID NO: 549779 - DNA, 15 bp, Homo sapiens
gtgcaccagcaaagg

SEQ ID NO: 549780 - DNA, 15 bp, Homo sapiens
tgcaccagcaaagga

SEQ ID NO: 549781 - DNA, 15 bp, Homo sapiens
gcaccagcaaaggag

SEQ ID NO: 549782 - DNA, 15 bp, Homo sapiens
caccagcaaaggagt

SEQ ID NO: 549783 - DNA, 15 bp, Homo sapiens
accagcaaaggagtg

SEQ ID NO: 549784 - DNA, 15 bp, Homo sapiens
ccagcaaaggagtgt

SEQ ID NO: 549785 - DNA, 15 bp, Homo sapiens
cagcaaaggagtgtg

SEQ ID NO: 549786 - DNA, 15 bp, Homo sapiens
agcaaaggagtgtgg

SEQ ID NO: 549787 - DNA, 15 bp, Homo sapiens
gcaaaggagtgtggg

SEQ ID NO: 549788 - DNA, 15 bp, Homo sapiens
caaaggagtgtgggg

SEQ ID NO: 549789 - DNA, 15 bp, Homo sapiens
aaaggagtgtggggg

SEQ ID NO: 549790 - DNA, 15 bp, Homo sapiens
aaggagtgtgggggc

SEQ ID NO: 549791 - DNA, 15 bp, Homo sapiens
aggagtgtgggggcc

SEQ ID NO: 549792 - DNA, 15 bp, Homo sapiens
ggagtgtgggggcct

SEQ ID NO: 549793 - DNA, 15 bp, Homo sapiens
gagtgtgggggcctg

SEQ ID NO: 549794 - DNA, 15 bp, Homo sapiens
agtgtgggggcctgg

SEQ ID NO: 549795 - DNA, 15 bp, Homo sapiens
gtgtgggggcctggg

SEQ ID NO: 549796 - DNA, 15 bp, Homo sapiens
tgtgggggcctggga

SEQ ID NO: 549797 - DNA, 15 bp, Homo sapiens
gtgggggcctgggag

SEQ ID NO: 549798 - DNA, 15 bp, Homo sapiens
tgggggcctgggaga

SEQ ID NO: 549799 - DNA, 15 bp, Homo sapiens
gggggcctgggagac

SEQ ID NO: 549800 - DNA, 15 bp, Homo sapiens
ggggcctgggagaca

SEQ ID NO: 549801 - DNA, 15 bp, Homo sapiens
gggcctgggagacag

SEQ ID NO: 549802 - DNA, 15 bp, Homo sapiens
ggcctgggagacaga

SEQ ID NO: 549803 - DNA, 15 bp, Homo sapiens
gcctgggagacagat

SEQ ID NO: 549804 - DNA, 15 bp, Homo sapiens
cctgggagacagatg

SEQ ID NO: 549805 - DNA, 15 bp, Homo sapiens
ctgggagacagatgt

SEQ ID NO: 549806 - DNA, 15 bp, Homo sapiens
tgggagacagatgtg

SEQ ID NO: 549807 - DNA, 15 bp, Homo sapiens
gggagacagatgtgg

SEQ ID NO: 549808 - DNA, 15 bp, Homo sapiens
ggagacagatgtggc

SEQ ID NO: 549809 - DNA, 15 bp, Homo sapiens
gagacagatgtggcc

SEQ ID NO: 549810 - DNA, 15 bp, Homo sapiens
agacagatgtggcct

SEQ ID NO: 549811 - DNA, 15 bp, Homo sapiens
gacagatgtggcctt

SEQ ID NO: 549812 - DNA, 15 bp, Homo sapiens
acagatgtggcctta

SEQ ID NO: 549813 - DNA, 15 bp, Homo sapiens
cagatgtggccttaa

SEQ ID NO: 549814 - DNA, 15 bp, Homo sapiens
agatgtggccttaat

SEQ ID NO: 549815 - DNA, 15 bp, Homo sapiens
gatgtggccttaatt

SEQ ID NO: 549816 - DNA, 15 bp, Homo sapiens
atgtggccttaattg

SEQ ID NO: 549817 - DNA, 15 bp, Homo sapiens
tgtggccttaattgc

SEQ ID NO: 549818 - DNA, 15 bp, Homo sapiens
gtggccttaattgca

SEQ ID NO: 549819 - DNA, 15 bp, Homo sapiens
tggccttaattgcat

SEQ ID NO: 549820 - DNA, 15 bp, Homo sapiens
ggccttaattgcatg

SEQ ID NO: 549821 - DNA, 15 bp, Homo sapiens
gccttaattgcatgg

SEQ ID NO: 549822 - DNA, 15 bp, Homo sapiens
ccttaattgcatgga

SEQ ID NO: 549823 - DNA, 15 bp, Homo sapiens
cttaattgcatggaa

SEQ ID NO: 549824 - DNA, 15 bp, Homo sapiens
ttaattgcatggaaa

SEQ ID NO: 549825 - DNA, 15 bp, Homo sapiens
taattgcatggaaat

SEQ ID NO: 549826 - DNA, 15 bp, Homo sapiens
aattgcatggaaata

SEQ ID NO: 549827 - DNA, 15 bp, Homo sapiens
attgcatggaaatat

SEQ ID NO: 549828 - DNA, 15 bp, Homo sapiens
ttgcatggaaatatt

SEQ ID NO: 549829 - DNA, 15 bp, Homo sapiens
tgcatggaaatatta

SEQ ID NO: 549830 - DNA, 15 bp, Homo sapiens
gcatggaaatattag

SEQ ID NO: 549831 - DNA, 15 bp, Homo sapiens
catggaaatattaga

SEQ ID NO: 549832 - DNA, 15 bp, Homo sapiens
atggaaatattagaa

SEQ ID NO: 549833 - DNA, 15 bp, Homo sapiens
tggaaatattagaag

SEQ ID NO: 549834 - DNA, 15 bp, Homo sapiens
ggaaatattagaaga

SEQ ID NO: 549835 - DNA, 15 bp, Homo sapiens
gaaatattagaagat

SEQ ID NO: 549836 - DNA, 15 bp, Homo sapiens
aaatattagaagatc

SEQ ID NO: 549837 - DNA, 15 bp, Homo sapiens
aatattagaagatcg

SEQ ID NO: 549838 - DNA, 15 bp, Homo sapiens
atattagaagatcgt

SEQ ID NO: 549839 - DNA, 15 bp, Homo sapiens
tattagaagatcgtt

SEQ ID NO: 549840 - DNA, 15 bp, Homo sapiens
attagaagatcgtta

SEQ ID NO: 549841 - DNA, 15 bp, Homo sapiens
ttagaagatcgttaa

SEQ ID NO: 549842 - DNA, 15 bp, Homo sapiens
tagaagatcgttaag

SEQ ID NO: 549843 - DNA, 15 bp, Homo sapiens
agaagatcgttaagg

SEQ ID NO: 549844 - DNA, 15 bp, Homo sapiens
gaagatcgttaaggc

SEQ ID NO: 549845 - DNA, 15 bp, Homo sapiens
aagatcgttaaggca

SEQ ID NO: 549846 - DNA, 15 bp, Homo sapiens
agatcgttaaggcat

SEQ ID NO: 549847 - DNA, 15 bp, Homo sapiens
gatcgttaaggcatt

SEQ ID NO: 549848 - DNA, 15 bp, Homo sapiens
atcgttaaggcattt

SEQ ID NO: 549849 - DNA, 15 bp, Homo sapiens
tcgttaaggcatttt

SEQ ID NO: 549850 - DNA, 15 bp, Homo sapiens
cgttaaggcattttg

SEQ ID NO: 549851 - DNA, 15 bp, Homo sapiens
gttaaggcattttga

SEQ ID NO: 549852 - DNA, 15 bp, Homo sapiens
ttaaggcattttgac

SEQ ID NO: 549853 - DNA, 15 bp, Homo sapiens
taaggcattttgaca

SEQ ID NO: 549854 - DNA, 15 bp, Homo sapiens
aaggcattttgacag

SEQ ID NO: 549855 - DNA, 15 bp, Homo sapiens
aggcattttgacagg

SEQ ID NO: 549856 - DNA, 15 bp, Homo sapiens
ggcattttgacagga

SEQ ID NO: 549857 - DNA, 15 bp, Homo sapiens
gcattttgacaggat

SEQ ID NO: 549858 - DNA, 15 bp, Homo sapiens
cattttgacaggatt

SEQ ID NO: 549859 - DNA, 15 bp, Homo sapiens
attttgacaggattt

SEQ ID NO: 549860 - DNA, 15 bp, Homo sapiens
ttttgacaggatttt

SEQ ID NO: 549861 - DNA, 15 bp, Homo sapiens
tttgacaggattttc

SEQ ID NO: 549862 - DNA, 15 bp, Homo sapiens
ttgacaggattttcc

SEQ ID NO: 549863 - DNA, 15 bp, Homo sapiens
tgacaggattttcct

SEQ ID NO: 549864 - DNA, 15 bp, Homo sapiens
gacaggattttcctc

SEQ ID NO: 549865 - DNA, 15 bp, Homo sapiens
acaggattttcctct

SEQ ID NO: 549866 - DNA, 15 bp, Homo sapiens
caggattttcctcta

SEQ ID NO: 549867 - DNA, 15 bp, Homo sapiens
aggattttcctctag

SEQ ID NO: 549868 - DNA, 15 bp, Homo sapiens
ggattttcctctagc

SEQ ID NO: 549869 - DNA, 15 bp, Homo sapiens
gattttcctctagct

SEQ ID NO: 549870 - DNA, 15 bp, Homo sapiens
attttcctctagctg

SEQ ID NO: 549871 - DNA, 15 bp, Homo sapiens
ttttcctctagctgt

SEQ ID NO: 549872 - DNA, 15 bp, Homo sapiens
tttcctctagctgtg

SEQ ID NO: 549873 - DNA, 15 bp, Homo sapiens
ttcctctagctgtgg

SEQ ID NO: 549874 - DNA, 15 bp, Homo sapiens
tcctctagctgtggg

SEQ ID NO: 549875 - DNA, 15 bp, Homo sapiens
cctctagctgtggga

SEQ ID NO: 549876 - DNA, 15 bp, Homo sapiens
ctctagctgtgggag

SEQ ID NO: 549877 - DNA, 15 bp, Homo sapiens
tctagctgtgggagc

SEQ ID NO: 549878 - DNA, 15 bp, Homo sapiens
ctagctgtgggagca

SEQ ID NO: 549879 - DNA, 15 bp, Homo sapiens
tagctgtgggagcaa

SEQ ID NO: 549880 - DNA, 15 bp, Homo sapiens
agctgtgggagcaaa

SEQ ID NO: 549881 - DNA, 15 bp, Homo sapiens
gctgtgggagcaaag

SEQ ID NO: 549882 - DNA, 15 bp, Homo sapiens
ctgtgggagcaaagg

SEQ ID NO: 549883 - DNA, 15 bp, Homo sapiens
tgtgggagcaaaggg

SEQ ID NO: 549884 - DNA, 15 bp, Homo sapiens
gtgggagcaaagggc

SEQ ID NO: 549885 - DNA, 15 bp, Homo sapiens
tgggagcaaagggcc

SEQ ID NO: 549886 - DNA, 15 bp, Homo sapiens
gggagcaaagggcca

SEQ ID NO: 549887 - DNA, 15 bp, Homo sapiens
ggagcaaagggccac

SEQ ID NO: 549888 - DNA, 15 bp, Homo sapiens
gagcaaagggccacg

SEQ ID NO: 549889 - DNA, 15 bp, Homo sapiens
agcaaagggccacgt

SEQ ID NO: 549890 - DNA, 15 bp, Homo sapiens
gcaaagggccacgtc

SEQ ID NO: 549891 - DNA, 15 bp, Homo sapiens
caaagggccacgtct

SEQ ID NO: 549892 - DNA, 15 bp, Homo sapiens
aaagggccacgtctg

SEQ ID NO: 549893 - DNA, 15 bp, Homo sapiens
aagggccacgtctga

SEQ ID NO: 549894 - DNA, 15 bp, Homo sapiens
agggccacgtctgag

SEQ ID NO: 549895 - DNA, 15 bp, Homo sapiens
gggccacgtctgagc

SEQ ID NO: 549896 - DNA, 15 bp, Homo sapiens
ggccacgtctgagcc

SEQ ID NO: 549897 - DNA, 15 bp, Homo sapiens
gccacgtctgagccg

SEQ ID NO: 549898 - DNA, 15 bp, Homo sapiens
ccacgtctgagccgc

SEQ ID NO: 549899 - DNA, 15 bp, Homo sapiens
cacgtctgagccgca

SEQ ID NO: 549900 - DNA, 15 bp, Homo sapiens
acgtctgagccgcat

SEQ ID NO: 549901 - DNA, 15 bp, Homo sapiens
cgtctgagccgcatc

SEQ ID NO: 549902 - DNA, 15 bp, Homo sapiens
gtctgagccgcatca

SEQ ID NO: 549903 - DNA, 15 bp, Homo sapiens
tctgagccgcatcag

SEQ ID NO: 549904 - DNA, 15 bp, Homo sapiens
ctgagccgcatcagg

SEQ ID NO: 549905 - DNA, 15 bp, Homo sapiens
tgagccgcatcaggc

SEQ ID NO: 549906 - DNA, 15 bp, Homo sapiens
gagccgcatcaggcc

SEQ ID NO: 549907 - DNA, 15 bp, Homo sapiens
agccgcatcaggcct

SEQ ID NO: 549908 - DNA, 15 bp, Homo sapiens
gccgcatcaggcctg

SEQ ID NO: 549909 - DNA, 15 bp, Homo sapiens
ccgcatcaggcctgg

SEQ ID NO: 549910 - DNA, 15 bp, Homo sapiens
cgcatcaggcctggc

SEQ ID NO: 549911 - DNA, 15 bp, Homo sapiens
gcatcaggcctggcc

SEQ ID NO: 549912 - DNA, 15 bp, Homo sapiens
catcaggcctggcca

SEQ ID NO: 549913 - DNA, 15 bp, Homo sapiens
atcaggcctggccag

SEQ ID NO: 549914 - DNA, 15 bp, Homo sapiens
tcaggcctggccaga

SEQ ID NO: 549915 - DNA, 15 bp, Homo sapiens
caggcctggccagag

SEQ ID NO: 549916 - DNA, 15 bp, Homo sapiens
aggcctggccagagc

SEQ ID NO: 549917 - DNA, 15 bp, Homo sapiens
ggcctggccagagcc

SEQ ID NO: 549918 - DNA, 15 bp, Homo sapiens
gcctggccagagcca

SEQ ID NO: 549919 - DNA, 15 bp, Homo sapiens
cctggccagagccac

SEQ ID NO: 549920 - DNA, 15 bp, Homo sapiens
ctggccagagccact

SEQ ID NO: 549921 - DNA, 15 bp, Homo sapiens
tggccagagccactg

SEQ ID NO: 549922 - DNA, 15 bp, Homo sapiens
ggccagagccactgg

SEQ ID NO: 549923 - DNA, 15 bp, Homo sapiens
gccagagccactggc

SEQ ID NO: 549924 - DNA, 15 bp, Homo sapiens
ccagagccactggca

SEQ ID NO: 549925 - DNA, 15 bp, Homo sapiens
cagagccactggcaa

SEQ ID NO: 549926 - DNA, 15 bp, Homo sapiens
agagccactggcaag

SEQ ID NO: 549927 - DNA, 15 bp, Homo sapiens
gagccactggcaagg

SEQ ID NO: 549928 - DNA, 15 bp, Homo sapiens
agccactggcaaggt

SEQ ID NO: 549929 - DNA, 15 bp, Homo sapiens
gccactggcaaggtc

SEQ ID NO: 549930 - DNA, 15 bp, Homo sapiens
ccactggcaaggtct

SEQ ID NO: 549931 - DNA, 15 bp, Homo sapiens
cactggcaaggtctc

SEQ ID NO: 549932 - DNA, 15 bp, Homo sapiens
actggcaaggtctct

SEQ ID NO: 549933 - DNA, 15 bp, Homo sapiens
ctggcaaggtctctc

SEQ ID NO: 549934 - DNA, 15 bp, Homo sapiens
tggcaaggtctctca

SEQ ID NO: 549935 - DNA, 15 bp, Homo sapiens
ggcaaggtctctcat

SEQ ID NO: 549936 - DNA, 15 bp, Homo sapiens
gcaaggtctctcatc

SEQ ID NO: 549937 - DNA, 15 bp, Homo sapiens
caaggtctctcatcc

SEQ ID NO: 549938 - DNA, 15 bp, Homo sapiens
aaggtctctcatccc

SEQ ID NO: 549939 - DNA, 15 bp, Homo sapiens
aggtctctcatcccc

SEQ ID NO: 549940 - DNA, 15 bp, Homo sapiens
ggtctctcatcccca

SEQ ID NO: 549941 - DNA, 15 bp, Homo sapiens
gtctctcatccccac

SEQ ID NO: 549942 - DNA, 15 bp, Homo sapiens
tctctcatccccacg

SEQ ID NO: 549943 - DNA, 15 bp, Homo sapiens
ctctcatccccacgt

SEQ ID NO: 549944 - DNA, 15 bp, Homo sapiens
tctcatccccacgtg

SEQ ID NO: 549945 - DNA, 15 bp, Homo sapiens
ctcatccccacgtgt

SEQ ID NO: 549946 - DNA, 15 bp, Homo sapiens
tcatccccacgtgtg

SEQ ID NO: 549947 - DNA, 15 bp, Homo sapiens
catccccacgtgtga

SEQ ID NO: 549948 - DNA, 15 bp, Homo sapiens
atccccacgtgtgag

SEQ ID NO: 549949 - DNA, 15 bp, Homo sapiens
tccccacgtgtgagg

SEQ ID NO: 549950 - DNA, 15 bp, Homo sapiens
ccccacgtgtgaggg

SEQ ID NO: 549951 - DNA, 15 bp, Homo sapiens
cccacgtgtgaggga

SEQ ID NO: 549952 - DNA, 15 bp, Homo sapiens
ccacgtgtgagggac

SEQ ID NO: 549953 - DNA, 15 bp, Homo sapiens
cacgtgtgagggaca

SEQ ID NO: 549954 - DNA, 15 bp, Homo sapiens
acgtgtgagggacac

SEQ ID NO: 549955 - DNA, 15 bp, Homo sapiens
cgtgtgagggacaca

SEQ ID NO: 549956 - DNA, 15 bp, Homo sapiens
gtgtgagggacacat

SEQ ID NO: 549957 - DNA, 15 bp, Homo sapiens
tgtgagggacacatg

SEQ ID NO: 549958 - DNA, 15 bp, Homo sapiens
gtgagggacacatgg

SEQ ID NO: 549959 - DNA, 15 bp, Homo sapiens
tgagggacacatggg

SEQ ID NO: 549960 - DNA, 15 bp, Homo sapiens
gagggacacatgggc

SEQ ID NO: 549961 - DNA, 15 bp, Homo sapiens
agggacacatgggcc

SEQ ID NO: 549962 - DNA, 15 bp, Homo sapiens
gggacacatgggcct

SEQ ID NO: 549963 - DNA, 15 bp, Homo sapiens
ggacacatgggcctt

SEQ ID NO: 549964 - DNA, 15 bp, Homo sapiens
gacacatgggccttg

SEQ ID NO: 549965 - DNA, 15 bp, Homo sapiens
acacatgggccttgg

SEQ ID NO: 549966 - DNA, 15 bp, Homo sapiens
cacatgggccttggt

SEQ ID NO: 549967 - DNA, 15 bp, Homo sapiens
acatgggccttggtt

SEQ ID NO: 549968 - DNA, 15 bp, Homo sapiens
catgggccttggttc

SEQ ID NO: 549969 - DNA, 15 bp, Homo sapiens
atgggccttggttca

SEQ ID NO: 549970 - DNA, 15 bp, Homo sapiens
tgggccttggttcac

SEQ ID NO: 549971 - DNA, 15 bp, Homo sapiens
gggccttggttcacg

SEQ ID NO: 549972 - DNA, 15 bp, Homo sapiens
ggccttggttcacgt

SEQ ID NO: 549973 - DNA, 15 bp, Homo sapiens
gccttggttcacgtg

SEQ ID NO: 549974 - DNA, 15 bp, Homo sapiens
ccttggttcacgtgc

SEQ ID NO: 549975 - DNA, 15 bp, Homo sapiens
cttggttcacgtgcc

SEQ ID NO: 549976 - DNA, 15 bp, Homo sapiens
ttggttcacgtgccc

SEQ ID NO: 549977 - DNA, 15 bp, Homo sapiens
tggttcacgtgccct

SEQ ID NO: 549978 - DNA, 15 bp, Homo sapiens
ggttcacgtgcccta

SEQ ID NO: 549979 - DNA, 15 bp, Homo sapiens
gttcacgtgccctaa

SEQ ID NO: 549980 - DNA, 15 bp, Homo sapiens
ttcacgtgccctaat

SEQ ID NO: 549981 - DNA, 15 bp, Homo sapiens
tcacgtgccctaata

SEQ ID NO: 549982 - DNA, 15 bp, Homo sapiens
cacgtgccctaatat

SEQ ID NO: 549983 - DNA, 15 bp, Homo sapiens
acgtgccctaatatt

SEQ ID NO: 549984 - DNA, 15 bp, Homo sapiens
cgtgccctaatattg

SEQ ID NO: 549985 - DNA, 15 bp, Homo sapiens
gtgccctaatattgg

SEQ ID NO: 549986 - DNA, 15 bp, Homo sapiens
tgccctaatattggt

SEQ ID NO: 549987 - DNA, 15 bp, Homo sapiens
gccctaatattggta

SEQ ID NO: 549988 - DNA, 15 bp, Homo sapiens
ccctaatattggtag

SEQ ID NO: 549989 - DNA, 15 bp, Homo sapiens
cctaatattggtagg

SEQ ID NO: 549990 - DNA, 15 bp, Homo sapiens
ctaatattggtaggg

SEQ ID NO: 549991 - DNA, 15 bp, Homo sapiens
taatattggtaggga

SEQ ID NO: 549992 - DNA, 15 bp, Homo sapiens
aatattggtagggaa

SEQ ID NO: 549993 - DNA, 15 bp, Homo sapiens
atattggtagggaat

SEQ ID NO: 549994 - DNA, 15 bp, Homo sapiens
tattggtagggaata

SEQ ID NO: 549995 - DNA, 15 bp, Homo sapiens
attggtagggaatag

SEQ ID NO: 549996 - DNA, 15 bp, Homo sapiens
ttggtagggaataga

SEQ ID NO: 549997 - DNA, 15 bp, Homo sapiens
tggtagggaatagat

SEQ ID NO: 549998 - DNA, 15 bp, Homo sapiens
ggtagggaatagatg

SEQ ID NO: 549999 - DNA, 15 bp, Homo sapiens
gtagggaatagatgt

SEQ ID NO: 550000 - DNA, 15 bp, Homo sapiens
tagggaatagatgtc

SEQ ID NO: 550001 - DNA, 15 bp, Homo sapiens
agggaatagatgtct

SEQ ID NO: 550002 - DNA, 15 bp, Homo sapiens
gggaatagatgtctc

SEQ ID NO: 550003 - DNA, 15 bp, Homo sapiens
ggaatagatgtctcc

SEQ ID NO: 550004 - DNA, 15 bp, Homo sapiens
gaatagatgtctcct

SEQ ID NO: 550005 - DNA, 15 bp, Homo sapiens
aatagatgtctcctt

SEQ ID NO: 550006 - DNA, 15 bp, Homo sapiens
atagatgtctccttg

SEQ ID NO: 550007 - DNA, 15 bp, Homo sapiens
tagatgtctccttgt

SEQ ID NO: 550008 - DNA, 15 bp, Homo sapiens
agatgtctccttgtc

SEQ ID NO: 550009 - DNA, 15 bp, Homo sapiens
gatgtctccttgtca

SEQ ID NO: 550010 - DNA, 15 bp, Homo sapiens
atgtctccttgtcac

SEQ ID NO: 550011 - DNA, 15 bp, Homo sapiens
tgtctccttgtcacc

SEQ ID NO: 550012 - DNA, 15 bp, Homo sapiens
gtctccttgtcacca

SEQ ID NO: 550013 - DNA, 15 bp, Homo sapiens
tctccttgtcaccaa

SEQ ID NO: 550014 - DNA, 15 bp, Homo sapiens
ctccttgtcaccaac

SEQ ID NO: 550015 - DNA, 15 bp, Homo sapiens
tccttgtcaccaact

SEQ ID NO: 550016 - DNA, 15 bp, Homo sapiens
ccttgtcaccaactt

SEQ ID NO: 550017 - DNA, 15 bp, Homo sapiens
cttgtcaccaacttc

SEQ ID NO: 550018 - DNA, 15 bp, Homo sapiens
ttgtcaccaacttcc

SEQ ID NO: 550019 - DNA, 15 bp, Homo sapiens
tgtcaccaacttcca

SEQ ID NO: 550020 - DNA, 15 bp, Homo sapiens
gtcaccaacttccac

SEQ ID NO: 550021 - DNA, 15 bp, Homo sapiens
tcaccaacttccacc

SEQ ID NO: 550022 - DNA, 15 bp, Homo sapiens
caccaacttccaccc

SEQ ID NO: 550023 - DNA, 15 bp, Homo sapiens
accaacttccacccc

SEQ ID NO: 550024 - DNA, 15 bp, Homo sapiens
ccaacttccacccca

SEQ ID NO: 550025 - DNA, 15 bp, Homo sapiens
caacttccaccccac

SEQ ID NO: 550026 - DNA, 15 bp, Homo sapiens
aacttccaccccaca

SEQ ID NO: 550027 - DNA, 15 bp, Homo sapiens
acttccaccccacat

SEQ ID NO: 550028 - DNA, 15 bp, Homo sapiens
cttccaccccacatc

SEQ ID NO: 550029 - DNA, 15 bp, Homo sapiens
ttccaccccacatct

SEQ ID NO: 550030 - DNA, 15 bp, Homo sapiens
tccaccccacatctc

SEQ ID NO: 550031 - DNA, 15 bp, Homo sapiens
ccaccccacatctct

SEQ ID NO: 550032 - DNA, 15 bp, Homo sapiens
caccccacatctctg

SEQ ID NO: 550033 - DNA, 15 bp, Homo sapiens
accccacatctctgc

SEQ ID NO: 550034 - DNA, 15 bp, Homo sapiens
ccccacatctctgcc

SEQ ID NO: 550035 - DNA, 15 bp, Homo sapiens
cccacatctctgccc

SEQ ID NO: 550036 - DNA, 15 bp, Homo sapiens
ccacatctctgcccc

SEQ ID NO: 550037 - DNA, 15 bp, Homo sapiens
cacatctctgcccca

SEQ ID NO: 550038 - DNA, 15 bp, Homo sapiens
acatctctgccccat

SEQ ID NO: 550039 - DNA, 15 bp, Homo sapiens
catctctgccccata

SEQ ID NO: 550040 - DNA, 15 bp, Homo sapiens
atctctgccccataa

SEQ ID NO: 550041 - DNA, 15 bp, Homo sapiens
tctctgccccataag

SEQ ID NO: 550042 - DNA, 15 bp, Homo sapiens
ctctgccccataagc

SEQ ID NO: 550043 - DNA, 15 bp, Homo sapiens
tctgccccataagcg

SEQ ID NO: 550044 - DNA, 15 bp, Homo sapiens
ctgccccataagcgc

SEQ ID NO: 550045 - DNA, 15 bp, Homo sapiens
tgccccataagcgca

SEQ ID NO: 550046 - DNA, 15 bp, Homo sapiens
gccccataagcgcag

SEQ ID NO: 550047 - DNA, 15 bp, Homo sapiens
ccccataagcgcaga

SEQ ID NO: 550048 - DNA, 15 bp, Homo sapiens
cccataagcgcagaa

SEQ ID NO: 550049 - DNA, 15 bp, Homo sapiens
ccataagcgcagaaa

SEQ ID NO: 550050 - DNA, 15 bp, Homo sapiens
cataagcgcagaaag

SEQ ID NO: 550051 - DNA, 15 bp, Homo sapiens
ataagcgcagaaagc

SEQ ID NO: 550052 - DNA, 15 bp, Homo sapiens
taagcgcagaaagca

SEQ ID NO: 550053 - DNA, 15 bp, Homo sapiens
aagcgcagaaagcaa

SEQ ID NO: 550054 - DNA, 15 bp, Homo sapiens
agcgcagaaagcaat

SEQ ID NO: 550055 - DNA, 15 bp, Homo sapiens
gcgcagaaagcaatc

SEQ ID NO: 550056 - DNA, 15 bp, Homo sapiens
cgcagaaagcaatct

SEQ ID NO: 550057 - DNA, 15 bp, Homo sapiens
gcagaaagcaatctc

SEQ ID NO: 550058 - DNA, 15 bp, Homo sapiens
cagaaagcaatctcc

SEQ ID NO: 550059 - DNA, 15 bp, Homo sapiens
agaaagcaatctccc

SEQ ID NO: 550060 - DNA, 15 bp, Homo sapiens
gaaagcaatctccca

SEQ ID NO: 550061 - DNA, 15 bp, Homo sapiens
aaagcaatctcccaa

SEQ ID NO: 550062 - DNA, 15 bp, Homo sapiens
aagcaatctcccaag

SEQ ID NO: 550063 - DNA, 15 bp, Homo sapiens
agcaatctcccaaga

SEQ ID NO: 550064 - DNA, 15 bp, Homo sapiens
gcaatctcccaagaa

SEQ ID NO: 550065 - DNA, 15 bp, Homo sapiens
caatctcccaagaaa

SEQ ID NO: 550066 - DNA, 15 bp, Homo sapiens
aatctcccaagaaac

SEQ ID NO: 550067 - DNA, 15 bp, Homo sapiens
atctcccaagaaacc

SEQ ID NO: 550068 - DNA, 15 bp, Homo sapiens
tctcccaagaaaccc

SEQ ID NO: 550069 - DNA, 15 bp, Homo sapiens
ctcccaagaaaccct

SEQ ID NO: 550070 - DNA, 15 bp, Homo sapiens
tcccaagaaacccta

SEQ ID NO: 550071 - DNA, 15 bp, Homo sapiens
cccaagaaaccctaa

SEQ ID NO: 550072 - DNA, 15 bp, Homo sapiens
ccaagaaaccctaag

SEQ ID NO: 550073 - DNA, 15 bp, Homo sapiens
caagaaaccctaagg

SEQ ID NO: 550074 - DNA, 15 bp, Homo sapiens
aagaaaccctaaggc

SEQ ID NO: 550075 - DNA, 15 bp, Homo sapiens
agaaaccctaaggcc

SEQ ID NO: 550076 - DNA, 15 bp, Homo sapiens
gaaaccctaaggcct

SEQ ID NO: 550077 - DNA, 15 bp, Homo sapiens
aaaccctaaggcctg

SEQ ID NO: 550078 - DNA, 15 bp, Homo sapiens
aaccctaaggcctgt

SEQ ID NO: 550079 - DNA, 15 bp, Homo sapiens
accctaaggcctgta

SEQ ID NO: 550080 - DNA, 15 bp, Homo sapiens
ccctaaggcctgtag

SEQ ID NO: 550081 - DNA, 15 bp, Homo sapiens
cctaaggcctgtagc

SEQ ID NO: 550082 - DNA, 15 bp, Homo sapiens
ctaaggcctgtagcg

SEQ ID NO: 550083 - DNA, 15 bp, Homo sapiens
taaggcctgtagcgg

SEQ ID NO: 550084 - DNA, 15 bp, Homo sapiens
aaggcctgtagcggg

SEQ ID NO: 550085 - DNA, 15 bp, Homo sapiens
aggcctgtagcggga

SEQ ID NO: 550086 - DNA, 15 bp, Homo sapiens
ggcctgtagcgggag

SEQ ID NO: 550087 - DNA, 15 bp, Homo sapiens
gcctgtagcgggagt

SEQ ID NO: 550088 - DNA, 15 bp, Homo sapiens
cctgtagcgggagtt

SEQ ID NO: 550089 - DNA, 15 bp, Homo sapiens
ctgtagcgggagttg

SEQ ID NO: 550090 - DNA, 15 bp, Homo sapiens
tgtagcgggagttgg

SEQ ID NO: 550091 - DNA, 15 bp, Homo sapiens
gtagcgggagttgga

SEQ ID NO: 550092 - DNA, 15 bp, Homo sapiens
tagcgggagttggaa

SEQ ID NO: 550093 - DNA, 15 bp, Homo sapiens
agcgggagttggaag

SEQ ID NO: 550094 - DNA, 15 bp, Homo sapiens
gcgggagttggaaga

SEQ ID NO: 550095 - DNA, 15 bp, Homo sapiens
cgggagttggaagag

SEQ ID NO: 550096 - DNA, 15 bp, Homo sapiens
gggagttggaagaga

SEQ ID NO: 550097 - DNA, 15 bp, Homo sapiens
ggagttggaagagaa

SEQ ID NO: 550098 - DNA, 15 bp, Homo sapiens
gagttggaagagaag

SEQ ID NO: 550099 - DNA, 15 bp, Homo sapiens
agttggaagagaagc

SEQ ID NO: 550100 - DNA, 15 bp, Homo sapiens
gttggaagagaagct

SEQ ID NO: 550101 - DNA, 15 bp, Homo sapiens
ttggaagagaagcta

SEQ ID NO: 550102 - DNA, 15 bp, Homo sapiens
tggaagagaagctac

SEQ ID NO: 550103 - DNA, 15 bp, Homo sapiens
ggaagagaagctacc

SEQ ID NO: 550104 - DNA, 15 bp, Homo sapiens
gaagagaagctacct

SEQ ID NO: 550105 - DNA, 15 bp, Homo sapiens
aagagaagctaccta

SEQ ID NO: 550106 - DNA, 15 bp, Homo sapiens
agagaagctacctag

SEQ ID NO: 550107 - DNA, 15 bp, Homo sapiens
gagaagctacctagt

SEQ ID NO: 550108 - DNA, 15 bp, Homo sapiens
agaagctacctagtg

SEQ ID NO: 550109 - DNA, 15 bp, Homo sapiens
gaagctacctagtga

SEQ ID NO: 550110 - DNA, 15 bp, Homo sapiens
aagctacctagtgaa

SEQ ID NO: 550111 - DNA, 15 bp, Homo sapiens
agctacctagtgaaa

SEQ ID NO: 550112 - DNA, 15 bp, Homo sapiens
gctacctagtgaaat

SEQ ID NO: 550113 - DNA, 15 bp, Homo sapiens
ctacctagtgaaata

SEQ ID NO: 550114 - DNA, 15 bp, Homo sapiens
tacctagtgaaataa

SEQ ID NO: 550115 - DNA, 15 bp, Homo sapiens
acctagtgaaataaa

SEQ ID NO: 550116 - DNA, 15 bp, Homo sapiens
cctagtgaaataaat

SEQ ID NO: 550117 - DNA, 15 bp, Homo sapiens
ctagtgaaataaata

SEQ ID NO: 550118 - DNA, 15 bp, Homo sapiens
tagtgaaataaatat

SEQ ID NO: 550119 - DNA, 15 bp, Homo sapiens
agtgaaataaatatt

SEQ ID NO: 550120 - DNA, 15 bp, Homo sapiens
gtgaaataaatattt

SEQ ID NO: 550121 - DNA, 15 bp, Homo sapiens
tgaaataaatatttg

SEQ ID NO: 550122 - DNA, 15 bp, Homo sapiens
gaaataaatatttgg

SEQ ID NO: 550123 - DNA, 15 bp, Homo sapiens
aaataaatatttggg

SEQ ID NO: 550124 - DNA, 15 bp, Homo sapiens
aataaatatttggga

SEQ ID NO: 550125 - DNA, 15 bp, Homo sapiens
ataaatatttgggaa

SEQ ID NO: 550126 - DNA, 15 bp, Homo sapiens
taaatatttgggaat

SEQ ID NO: 550127 - DNA, 15 bp, Homo sapiens
aaatatttgggaatg

SEQ ID NO: 550128 - DNA, 15 bp, Homo sapiens
aatatttgggaatgt

SEQ ID NO: 550129 - DNA, 15 bp, Homo sapiens
atatttgggaatgta

SEQ ID NO: 550130 - DNA, 15 bp, Homo sapiens
tatttgggaatgtat

SEQ ID NO: 550131 - DNA, 15 bp, Homo sapiens
atttgggaatgtata

SEQ ID NO: 550132 - DNA, 15 bp, Homo sapiens
tttgggaatgtatac

SEQ ID NO: 550133 - DNA, 15 bp, Homo sapiens
ttgggaatgtatacg

SEQ ID NO: 550134 - DNA, 15 bp, Homo sapiens
tgggaatgtatacgc

SEQ ID NO: 550135 - DNA, 15 bp, Homo sapiens
gggaatgtatacgca

SEQ ID NO: 550136 - DNA, 15 bp, Homo sapiens
ggaatgtatacgcac

SEQ ID NO: 550137 - DNA, 15 bp, Homo sapiens
gaatgtatacgcaca

SEQ ID NO: 550138 - DNA, 15 bp, Homo sapiens
aatgtatacgcacaa

SEQ ID NO: 550139 - DNA, 15 bp, Homo sapiens
atgtatacgcacaag

SEQ ID NO: 550140 - DNA, 15 bp, Homo sapiens
tgtatacgcacaagt

SEQ ID NO: 550141 - DNA, 15 bp, Homo sapiens
gtatacgcacaagta

SEQ ID NO: 550142 - DNA, 15 bp, Homo sapiens
tatacgcacaagtac

SEQ ID NO: 550143 - DNA, 15 bp, Homo sapiens
atacgcacaagtaca

SEQ ID NO: 550144 - DNA, 15 bp, Homo sapiens
tacgcacaagtacat

SEQ ID NO: 550145 - DNA, 15 bp, Homo sapiens
acgcacaagtacatg

SEQ ID NO: 550146 - DNA, 15 bp, Homo sapiens
cgcacaagtacatgg

SEQ ID NO: 550147 - DNA, 15 bp, Homo sapiens
gcacaagtacatgga

SEQ ID NO: 550148 - DNA, 15 bp, Homo sapiens
cacaagtacatggac

SEQ ID NO: 550149 - DNA, 15 bp, Homo sapiens
acaagtacatggaca

SEQ ID NO: 550150 - DNA, 15 bp, Homo sapiens
caagtacatggacag

SEQ ID NO: 550151 - DNA, 15 bp, Homo sapiens
aagtacatggacaga

SEQ ID NO: 550152 - DNA, 15 bp, Homo sapiens
agtacatggacagag

SEQ ID NO: 550153 - DNA, 15 bp, Homo sapiens
gtacatggacagaga

SEQ ID NO: 550154 - DNA, 15 bp, Homo sapiens
tacatggacagagag

SEQ ID NO: 550155 - DNA, 15 bp, Homo sapiens
acatggacagagaga

SEQ ID NO: 550156 - DNA, 15 bp, Homo sapiens
catggacagagagag

SEQ ID NO: 550157 - DNA, 15 bp, Homo sapiens
atggacagagagaga

SEQ ID NO: 550158 - DNA, 15 bp, Homo sapiens
tggacagagagagat

SEQ ID NO: 550159 - DNA, 15 bp, Homo sapiens
ggacagagagagatc

SEQ ID NO: 550160 - DNA, 15 bp, Homo sapiens
gacagagagagatca

SEQ ID NO: 550161 - DNA, 15 bp, Homo sapiens
acagagagagatcag

SEQ ID NO: 550162 - DNA, 15 bp, Homo sapiens
cagagagagatcaga

SEQ ID NO: 550163 - DNA, 15 bp, Homo sapiens
agagagagatcagac

SEQ ID NO: 550164 - DNA, 15 bp, Homo sapiens
gagagagatcagacc

SEQ ID NO: 550165 - DNA, 15 bp, Homo sapiens
agagagatcagacca

SEQ ID NO: 550166 - DNA, 15 bp, Homo sapiens
gagagatcagaccat

SEQ ID NO: 550167 - DNA, 15 bp, Homo sapiens
agagatcagaccatc

SEQ ID NO: 550168 - DNA, 15 bp, Homo sapiens
gagatcagaccatct

SEQ ID NO: 550169 - DNA, 15 bp, Homo sapiens
agatcagaccatctc

SEQ ID NO: 550170 - DNA, 15 bp, Homo sapiens
gatcagaccatctcc

SEQ ID NO: 550171 - DNA, 15 bp, Homo sapiens
atcagaccatctcca

SEQ ID NO: 550172 - DNA, 15 bp, Homo sapiens
tcagaccatctccaa

SEQ ID NO: 550173 - DNA, 15 bp, Homo sapiens
cagaccatctccaac

SEQ ID NO: 550174 - DNA, 15 bp, Homo sapiens
agaccatctccaacc

SEQ ID NO: 550175 - DNA, 15 bp, Homo sapiens
gaccatctccaacct

SEQ ID NO: 550176 - DNA, 15 bp, Homo sapiens
accatctccaacctg

SEQ ID NO: 550177 - DNA, 15 bp, Homo sapiens
ccatctccaacctga

SEQ ID NO: 550178 - DNA, 15 bp, Homo sapiens
catctccaacctgaa

SEQ ID NO: 550179 - DNA, 15 bp, Homo sapiens
atctccaacctgaaa

SEQ ID NO: 550180 - DNA, 15 bp, Homo sapiens
tctccaacctgaaag

SEQ ID NO: 550181 - DNA, 15 bp, Homo sapiens
ctccaacctgaaagg

SEQ ID NO: 550182 - DNA, 15 bp, Homo sapiens
tccaacctgaaaggt

SEQ ID NO: 550183 - DNA, 15 bp, Homo sapiens
ccaacctgaaaggtg

SEQ ID NO: 550184 - DNA, 15 bp, Homo sapiens
caacctgaaaggtgc

SEQ ID NO: 550185 - DNA, 15 bp, Homo sapiens
aacctgaaaggtgca

SEQ ID NO: 550186 - DNA, 15 bp, Homo sapiens
acctgaaaggtgcac

SEQ ID NO: 550187 - DNA, 15 bp, Homo sapiens
cctgaaaggtgcact

SEQ ID NO: 550188 - DNA, 15 bp, Homo sapiens
ctgaaaggtgcactc

SEQ ID NO: 550189 - DNA, 15 bp, Homo sapiens
tgaaaggtgcactcc

SEQ ID NO: 550190 - DNA, 15 bp, Homo sapiens
gaaaggtgcactcca

SEQ ID NO: 550191 - DNA, 15 bp, Homo sapiens
aaaggtgcactccat

SEQ ID NO: 550192 - DNA, 15 bp, Homo sapiens
aaggtgcactccata

SEQ ID NO: 550193 - DNA, 15 bp, Homo sapiens
aggtgcactccataa

SEQ ID NO: 550194 - DNA, 15 bp, Homo sapiens
ggtgcactccataag

SEQ ID NO: 550195 - DNA, 15 bp, Homo sapiens
gtgcactccataagg

SEQ ID NO: 550196 - DNA, 15 bp, Homo sapiens
tgcactccataaggc

SEQ ID NO: 550197 - DNA, 15 bp, Homo sapiens
gcactccataaggct

SEQ ID NO: 550198 - DNA, 15 bp, Homo sapiens
cactccataaggctc

SEQ ID NO: 550199 - DNA, 15 bp, Homo sapiens
actccataaggctct

SEQ ID NO: 550200 - DNA, 15 bp, Homo sapiens
ctccataaggctctc

SEQ ID NO: 550201 - DNA, 15 bp, Homo sapiens
tccataaggctctcc

SEQ ID NO: 550202 - DNA, 15 bp, Homo sapiens
ccataaggctctcca

SEQ ID NO: 550203 - DNA, 15 bp, Homo sapiens
cataaggctctccag

SEQ ID NO: 550204 - DNA, 15 bp, Homo sapiens
ataaggctctccagg

SEQ ID NO: 550205 - DNA, 15 bp, Homo sapiens
taaggctctccaggg

SEQ ID NO: 550206 - DNA, 15 bp, Homo sapiens
aaggctctccaggga

SEQ ID NO: 550207 - DNA, 15 bp, Homo sapiens
aggctctccagggac

SEQ ID NO: 550208 - DNA, 15 bp, Homo sapiens
ggctctccagggacc

SEQ ID NO: 550209 - DNA, 15 bp, Homo sapiens
gctctccagggaccc

SEQ ID NO: 550210 - DNA, 15 bp, Homo sapiens
ctctccagggaccca

SEQ ID NO: 550211 - DNA, 15 bp, Homo sapiens
tctccagggacccac

SEQ ID NO: 550212 - DNA, 15 bp, Homo sapiens
ctccagggacccaca

SEQ ID NO: 550213 - DNA, 15 bp, Homo sapiens
tccagggacccacac

SEQ ID NO: 550214 - DNA, 15 bp, Homo sapiens
ccagggacccacacg

SEQ ID NO: 550215 - DNA, 15 bp, Homo sapiens
cagggacccacacgg

SEQ ID NO: 550216 - DNA, 15 bp, Homo sapiens
agggacccacacggg

SEQ ID NO: 550217 - DNA, 15 bp, Homo sapiens
gggacccacacgggc

SEQ ID NO: 550218 - DNA, 15 bp, Homo sapiens
ggacccacacgggcc

SEQ ID NO: 550219 - DNA, 15 bp, Homo sapiens
gacccacacgggcct

SEQ ID NO: 550220 - DNA, 15 bp, Homo sapiens
acccacacgggcctg

SEQ ID NO: 550221 - DNA, 15 bp, Homo sapiens
cccacacgggcctga

SEQ ID NO: 550222 - DNA, 15 bp, Homo sapiens
ccacacgggcctgaa

SEQ ID NO: 550223 - DNA, 15 bp, Homo sapiens
cacacgggcctgaaa

SEQ ID NO: 550224 - DNA, 15 bp, Homo sapiens
acacgggcctgaaag

SEQ ID NO: 550225 - DNA, 15 bp, Homo sapiens
cacgggcctgaaaga

SEQ ID NO: 550226 - DNA, 15 bp, Homo sapiens
acgggcctgaaagag

SEQ ID NO: 550227 - DNA, 15 bp, Homo sapiens
cgggcctgaaagagg

SEQ ID NO: 550228 - DNA, 15 bp, Homo sapiens
gggcctgaaagagga

SEQ ID NO: 550229 - DNA, 15 bp, Homo sapiens
ggcctgaaagaggaa

SEQ ID NO: 550230 - DNA, 15 bp, Homo sapiens
gcctgaaagaggaaa

SEQ ID NO: 550231 - DNA, 15 bp, Homo sapiens
cctgaaagaggaaat

SEQ ID NO: 550232 - DNA, 15 bp, Homo sapiens
ctgaaagaggaaatg

SEQ ID NO: 550233 - DNA, 15 bp, Homo sapiens
tgaaagaggaaatgt

SEQ ID NO: 550234 - DNA, 15 bp, Homo sapiens
gaaagaggaaatgtt

SEQ ID NO: 550235 - DNA, 15 bp, Homo sapiens
aaagaggaaatgttg

SEQ ID NO: 550236 - DNA, 15 bp, Homo sapiens
aagaggaaatgttgt

SEQ ID NO: 550237 - DNA, 15 bp, Homo sapiens
agaggaaatgttgtc

SEQ ID NO: 550238 - DNA, 15 bp, Homo sapiens
gaggaaatgttgtca

SEQ ID NO: 550239 - DNA, 15 bp, Homo sapiens
aggaaatgttgtcac

SEQ ID NO: 550240 - DNA, 15 bp, Homo sapiens
ggaaatgttgtcacg

SEQ ID NO: 550241 - DNA, 15 bp, Homo sapiens
gaaatgttgtcacga

SEQ ID NO: 550242 - DNA, 15 bp, Homo sapiens
aaatgttgtcacgac

SEQ ID NO: 550243 - DNA, 15 bp, Homo sapiens
aatgttgtcacgaca

SEQ ID NO: 550244 - DNA, 15 bp, Homo sapiens
atgttgtcacgacaa

SEQ ID NO: 550245 - DNA, 15 bp, Homo sapiens
tgttgtcacgacaaa

SEQ ID NO: 550246 - DNA, 15 bp, Homo sapiens
gttgtcacgacaaat

SEQ ID NO: 550247 - DNA, 15 bp, Homo sapiens
ttgtcacgacaaatt

SEQ ID NO: 550248 - DNA, 15 bp, Homo sapiens
tgtcacgacaaatta

SEQ ID NO: 550249 - DNA, 15 bp, Homo sapiens
gtcacgacaaattat

SEQ ID NO: 550250 - DNA, 15 bp, Homo sapiens
tcacgacaaattatg

SEQ ID NO: 550251 - DNA, 15 bp, Homo sapiens
cacgacaaattatgg

SEQ ID NO: 550252 - DNA, 15 bp, Homo sapiens
acgacaaattatggt

SEQ ID NO: 550253 - DNA, 15 bp, Homo sapiens
cgacaaattatggtg

SEQ ID NO: 550254 - DNA, 15 bp, Homo sapiens
gacaaattatggtgt

SEQ ID NO: 550255 - DNA, 15 bp, Homo sapiens
acaaattatggtgtc

SEQ ID NO: 550256 - DNA, 15 bp, Homo sapiens
caaattatggtgtct

SEQ ID NO: 550257 - DNA, 15 bp, Homo sapiens
aaattatggtgtcta

SEQ ID NO: 550258 - DNA, 15 bp, Homo sapiens
aattatggtgtctaa

SEQ ID NO: 550259 - DNA, 15 bp, Homo sapiens
attatggtgtctaaa

SEQ ID NO: 550260 - DNA, 15 bp, Homo sapiens
ttatggtgtctaaag

SEQ ID NO: 550261 - DNA, 15 bp, Homo sapiens
tatggtgtctaaaga

SEQ ID NO: 550262 - DNA, 15 bp, Homo sapiens
atggtgtctaaagac

SEQ ID NO: 550263 - DNA, 15 bp, Homo sapiens
tggtgtctaaagaca

SEQ ID NO: 550264 - DNA, 15 bp, Homo sapiens
ggtgtctaaagacaa

SEQ ID NO: 550265 - DNA, 15 bp, Homo sapiens
gtgtctaaagacaaa

SEQ ID NO: 550266 - DNA, 15 bp, Homo sapiens
tgtctaaagacaaaa

SEQ ID NO: 550267 - DNA, 15 bp, Homo sapiens
gtctaaagacaaaac

SEQ ID NO: 550268 - DNA, 15 bp, Homo sapiens
tctaaagacaaaacc

SEQ ID NO: 550269 - DNA, 15 bp, Homo sapiens
ctaaagacaaaacct

SEQ ID NO: 550270 - DNA, 15 bp, Homo sapiens
taaagacaaaacctt

SEQ ID NO: 550271 - DNA, 15 bp, Homo sapiens
aaagacaaaaccttt

SEQ ID NO: 550272 - DNA, 15 bp, Homo sapiens
aagacaaaacctttt

SEQ ID NO: 550273 - DNA, 15 bp, Homo sapiens
agacaaaaccttttc

SEQ ID NO: 550274 - DNA, 15 bp, Homo sapiens
gacaaaaccttttct

SEQ ID NO: 550275 - DNA, 15 bp, Homo sapiens
acaaaaccttttcta

SEQ ID NO: 550276 - DNA, 15 bp, Homo sapiens
caaaaccttttctat

SEQ ID NO: 550277 - DNA, 15 bp, Homo sapiens
aaaaccttttctatc

SEQ ID NO: 550278 - DNA, 15 bp, Homo sapiens
aaaccttttctatct

SEQ ID NO: 550279 - DNA, 15 bp, Homo sapiens
aaccttttctatcta

SEQ ID NO: 550280 - DNA, 15 bp, Homo sapiens
accttttctatctat

SEQ ID NO: 550281 - DNA, 15 bp, Homo sapiens
ccttttctatctatt

SEQ ID NO: 550282 - DNA, 15 bp, Homo sapiens
cttttctatctattc

SEQ ID NO: 550283 - DNA, 15 bp, Homo sapiens
ttttctatctattca

SEQ ID NO: 550284 - DNA, 15 bp, Homo sapiens
tttctatctattcac

SEQ ID NO: 550285 - DNA, 15 bp, Homo sapiens
ttctatctattcact

SEQ ID NO: 550286 - DNA, 15 bp, Homo sapiens
tctatctattcactt

SEQ ID NO: 550287 - DNA, 15 bp, Homo sapiens
ctatctattcacttc

SEQ ID NO: 550288 - DNA, 15 bp, Homo sapiens
tatctattcacttct

SEQ ID NO: 550289 - DNA, 15 bp, Homo sapiens
atctattcacttctt

SEQ ID NO: 550290 - DNA, 15 bp, Homo sapiens
tctattcacttcttc

SEQ ID NO: 550291 - DNA, 15 bp, Homo sapiens
ctattcacttcttcc

SEQ ID NO: 550292 - DNA, 15 bp, Homo sapiens
tattcacttcttccc

SEQ ID NO: 550293 - DNA, 15 bp, Homo sapiens
attcacttcttccct

SEQ ID NO: 550294 - DNA, 15 bp, Homo sapiens
ttcacttcttccctt

SEQ ID NO: 550295 - DNA, 15 bp, Homo sapiens
tcacttcttcccttt

SEQ ID NO: 550296 - DNA, 15 bp, Homo sapiens
cacttcttccctttc

SEQ ID NO: 550297 - DNA, 15 bp, Homo sapiens
acttcttccctttca

SEQ ID NO: 550298 - DNA, 15 bp, Homo sapiens
cttcttccctttcaa

SEQ ID NO: 550299 - DNA, 15 bp, Homo sapiens
ttcttccctttcaaa

SEQ ID NO: 550300 - DNA, 15 bp, Homo sapiens
tcttccctttcaaag

SEQ ID NO: 550301 - DNA, 15 bp, Homo sapiens
cttccctttcaaagt

SEQ ID NO: 550302 - DNA, 15 bp, Homo sapiens
ttccctttcaaagta

SEQ ID NO: 550303 - DNA, 15 bp, Homo sapiens
tccctttcaaagtaa

SEQ ID NO: 550304 - DNA, 15 bp, Homo sapiens
ccctttcaaagtaac

SEQ ID NO: 550305 - DNA, 15 bp, Homo sapiens
cctttcaaagtaaca

SEQ ID NO: 550306 - DNA, 15 bp, Homo sapiens
ctttcaaagtaacat

SEQ ID NO: 550307 - DNA, 15 bp, Homo sapiens
tttcaaagtaacatt

SEQ ID NO: 550308 - DNA, 15 bp, Homo sapiens
ttcaaagtaacattt

SEQ ID NO: 550309 - DNA, 15 bp, Homo sapiens
tcaaagtaacatttg

SEQ ID NO: 550310 - DNA, 15 bp, Homo sapiens
caaagtaacatttgg

SEQ ID NO: 550311 - DNA, 15 bp, Homo sapiens
aaagtaacatttggt

SEQ ID NO: 550312 - DNA, 15 bp, Homo sapiens
aagtaacatttggtt

SEQ ID NO: 550313 - DNA, 15 bp, Homo sapiens
agtaacatttggtta

SEQ ID NO: 550314 - DNA, 15 bp, Homo sapiens
gtaacatttggttac

SEQ ID NO: 550315 - DNA, 15 bp, Homo sapiens
taacatttggttaca

SEQ ID NO: 550316 - DNA, 15 bp, Homo sapiens
aacatttggttacag

SEQ ID NO: 550317 - DNA, 15 bp, Homo sapiens
acatttggttacaga

SEQ ID NO: 550318 - DNA, 15 bp, Homo sapiens
catttggttacagaa

SEQ ID NO: 550319 - DNA, 15 bp, Homo sapiens
atttggttacagaag

SEQ ID NO: 550320 - DNA, 15 bp, Homo sapiens
tttggttacagaagt

SEQ ID NO: 550321 - DNA, 15 bp, Homo sapiens
ttggttacagaagtc

SEQ ID NO: 550322 - DNA, 15 bp, Homo sapiens
tggttacagaagtca

SEQ ID NO: 550323 - DNA, 15 bp, Homo sapiens
ggttacagaagtcat

SEQ ID NO: 550324 - DNA, 15 bp, Homo sapiens
gttacagaagtcatg

SEQ ID NO: 550325 - DNA, 15 bp, Homo sapiens
ttacagaagtcatga

SEQ ID NO: 550326 - DNA, 15 bp, Homo sapiens
tacagaagtcatgac

SEQ ID NO: 550327 - DNA, 15 bp, Homo sapiens
acagaagtcatgacc

SEQ ID NO: 550328 - DNA, 15 bp, Homo sapiens
cagaagtcatgaccc

SEQ ID NO: 550329 - DNA, 15 bp, Homo sapiens
agaagtcatgaccca

SEQ ID NO: 550330 - DNA, 15 bp, Homo sapiens
gaagtcatgacccat

SEQ ID NO: 550331 - DNA, 15 bp, Homo sapiens
aagtcatgacccatg

SEQ ID NO: 550332 - DNA, 15 bp, Homo sapiens
agtcatgacccatga

SEQ ID NO: 550333 - DNA, 15 bp, Homo sapiens
gtcatgacccatgag

SEQ ID NO: 550334 - DNA, 15 bp, Homo sapiens
tcatgacccatgaga

SEQ ID NO: 550335 - DNA, 15 bp, Homo sapiens
catgacccatgagag

SEQ ID NO: 550336 - DNA, 15 bp, Homo sapiens
atgacccatgagagt

SEQ ID NO: 550337 - DNA, 15 bp, Homo sapiens
tgacccatgagagtc

SEQ ID NO: 550338 - DNA, 15 bp, Homo sapiens
gacccatgagagtcc

SEQ ID NO: 550339 - DNA, 15 bp, Homo sapiens
acccatgagagtcct

SEQ ID NO: 550340 - DNA, 15 bp, Homo sapiens
cccatgagagtcctg

SEQ ID NO: 550341 - DNA, 15 bp, Homo sapiens
ccatgagagtcctgt

SEQ ID NO: 550342 - DNA, 15 bp, Homo sapiens
catgagagtcctgta

SEQ ID NO: 550343 - DNA, 15 bp, Homo sapiens
atgagagtcctgtaa

SEQ ID NO: 550344 - DNA, 15 bp, Homo sapiens
tgagagtcctgtaat

SEQ ID NO: 550345 - DNA, 15 bp, Homo sapiens
gagagtcctgtaatt

SEQ ID NO: 550346 - DNA, 15 bp, Homo sapiens
agagtcctgtaatta

SEQ ID NO: 550347 - DNA, 15 bp, Homo sapiens
gagtcctgtaattaa

SEQ ID NO: 550348 - DNA, 15 bp, Homo sapiens
agtcctgtaattaag

SEQ ID NO: 550349 - DNA, 15 bp, Homo sapiens
gtcctgtaattaagt

SEQ ID NO: 550350 - DNA, 15 bp, Homo sapiens
tcctgtaattaagtc

SEQ ID NO: 550351 - DNA, 15 bp, Homo sapiens
cctgtaattaagtca

SEQ ID NO: 550352 - DNA, 15 bp, Homo sapiens
ctgtaattaagtcag

SEQ ID NO: 550353 - DNA, 15 bp, Homo sapiens
tgtaattaagtcaga

SEQ ID NO: 550354 - DNA, 15 bp, Homo sapiens
gtaattaagtcagag

SEQ ID NO: 550355 - DNA, 15 bp, Homo sapiens
taattaagtcagaga

SEQ ID NO: 550356 - DNA, 15 bp, Homo sapiens
aattaagtcagagaa

SEQ ID NO: 550357 - DNA, 15 bp, Homo sapiens
attaagtcagagaaa

SEQ ID NO: 550358 - DNA, 15 bp, Homo sapiens
ttaagtcagagaaat

SEQ ID NO: 550359 - DNA, 15 bp, Homo sapiens
taagtcagagaaatc

SEQ ID NO: 550360 - DNA, 15 bp, Homo sapiens
aagtcagagaaatcc

SEQ ID NO: 550361 - DNA, 15 bp, Homo sapiens
agtcagagaaatcct

SEQ ID NO: 550362 - DNA, 15 bp, Homo sapiens
gtcagagaaatcctt

SEQ ID NO: 550363 - DNA, 15 bp, Homo sapiens
tcagagaaatcctta

SEQ ID NO: 550364 - DNA, 15 bp, Homo sapiens
cagagaaatccttaa

SEQ ID NO: 550365 - DNA, 15 bp, Homo sapiens
agagaaatccttaaa

SEQ ID NO: 550366 - DNA, 15 bp, Homo sapiens
gagaaatccttaaac

SEQ ID NO: 550367 - DNA, 15 bp, Homo sapiens
agaaatccttaaaca

SEQ ID NO: 550368 - DNA, 15 bp, Homo sapiens
gaaatccttaaacac

SEQ ID NO: 550369 - DNA, 15 bp, Homo sapiens
aaatccttaaacact

SEQ ID NO: 550370 - DNA, 15 bp, Homo sapiens
aatccttaaacactg

SEQ ID NO: 550371 - DNA, 15 bp, Homo sapiens
atccttaaacactgt

SEQ ID NO: 550372 - DNA, 15 bp, Homo sapiens
tccttaaacactgtt

SEQ ID NO: 550373 - DNA, 15 bp, Homo sapiens
ccttaaacactgttg

SEQ ID NO: 550374 - DNA, 15 bp, Homo sapiens
cttaaacactgttgg

SEQ ID NO: 550375 - DNA, 15 bp, Homo sapiens
ttaaacactgttggc

SEQ ID NO: 550376 - DNA, 15 bp, Homo sapiens
taaacactgttggct

SEQ ID NO: 550377 - DNA, 15 bp, Homo sapiens
aaacactgttggctc

SEQ ID NO: 550378 - DNA, 15 bp, Homo sapiens
aacactgttggctcg

SEQ ID NO: 550379 - DNA, 15 bp, Homo sapiens
acactgttggctcgc

SEQ ID NO: 550380 - DNA, 15 bp, Homo sapiens
cactgttggctcgcc

SEQ ID NO: 550381 - DNA, 15 bp, Homo sapiens
actgttggctcgcca

SEQ ID NO: 550382 - DNA, 15 bp, Homo sapiens
ctgttggctcgccaa

SEQ ID NO: 550383 - DNA, 15 bp, Homo sapiens
tgttggctcgccaaa

SEQ ID NO: 550384 - DNA, 15 bp, Homo sapiens
gttggctcgccaaag

SEQ ID NO: 550385 - DNA, 15 bp, Homo sapiens
ttggctcgccaaaga

SEQ ID NO: 550386 - DNA, 15 bp, Homo sapiens
tggctcgccaaagaa

SEQ ID NO: 550387 - DNA, 15 bp, Homo sapiens
ggctcgccaaagaac

SEQ ID NO: 550388 - DNA, 15 bp, Homo sapiens
gctcgccaaagaacg

SEQ ID NO: 550389 - DNA, 15 bp, Homo sapiens
ctcgccaaagaacga

SEQ ID NO: 550390 - DNA, 15 bp, Homo sapiens
tcgccaaagaacgag

SEQ ID NO: 550391 - DNA, 15 bp, Homo sapiens
cgccaaagaacgaga

SEQ ID NO: 550392 - DNA, 15 bp, Homo sapiens
gccaaagaacgagac

SEQ ID NO: 550393 - DNA, 15 bp, Homo sapiens
ccaaagaacgagacc

SEQ ID NO: 550394 - DNA, 15 bp, Homo sapiens
caaagaacgagaccc

SEQ ID NO: 550395 - DNA, 15 bp, Homo sapiens
aaagaacgagacccc

SEQ ID NO: 550396 - DNA, 15 bp, Homo sapiens
aagaacgagacccca

SEQ ID NO: 550397 - DNA, 15 bp, Homo sapiens
agaacgagaccccat

SEQ ID NO: 550398 - DNA, 15 bp, Homo sapiens
gaacgagaccccata

SEQ ID NO: 550399 - DNA, 15 bp, Homo sapiens
aacgagaccccataa

SEQ ID NO: 550400 - DNA, 15 bp, Homo sapiens
acgagaccccataaa

SEQ ID NO: 550401 - DNA, 15 bp, Homo sapiens
cgagaccccataaat

SEQ ID NO: 550402 - DNA, 15 bp, Homo sapiens
gagaccccataaata

SEQ ID NO: 550403 - DNA, 15 bp, Homo sapiens
agaccccataaatat

SEQ ID NO: 550404 - DNA, 15 bp, Homo sapiens
gaccccataaatatg

SEQ ID NO: 550405 - DNA, 15 bp, Homo sapiens
accccataaatatgg

SEQ ID NO: 550406 - DNA, 15 bp, Homo sapiens
ccccataaatatggt

SEQ ID NO: 550407 - DNA, 15 bp, Homo sapiens
cccataaatatggtc

SEQ ID NO: 550408 - DNA, 15 bp, Homo sapiens
ccataaatatggtca

SEQ ID NO: 550409 - DNA, 15 bp, Homo sapiens
cataaatatggtcaa

SEQ ID NO: 550410 - DNA, 15 bp, Homo sapiens
ataaatatggtcaac

SEQ ID NO: 550411 - DNA, 15 bp, Homo sapiens
taaatatggtcaacc

SEQ ID NO: 550412 - DNA, 15 bp, Homo sapiens
aaatatggtcaacct

SEQ ID NO: 550413 - DNA, 15 bp, Homo sapiens
aatatggtcaacctt

SEQ ID NO: 550414 - DNA, 15 bp, Homo sapiens
atatggtcaaccttg

SEQ ID NO: 550415 - DNA, 15 bp, Homo sapiens
tatggtcaaccttgt

SEQ ID NO: 550416 - DNA, 15 bp, Homo sapiens
atggtcaaccttgtt

SEQ ID NO: 550417 - DNA, 15 bp, Homo sapiens
tggtcaaccttgttt

SEQ ID NO: 550418 - DNA, 15 bp, Homo sapiens
ggtcaaccttgtttc

SEQ ID NO: 550419 - DNA, 15 bp, Homo sapiens
gtcaaccttgtttct

SEQ ID NO: 550420 - DNA, 15 bp, Homo sapiens
tcaaccttgtttctc

SEQ ID NO: 550421 - DNA, 15 bp, Homo sapiens
caaccttgtttctcc

SEQ ID NO: 550422 - DNA, 15 bp, Homo sapiens
aaccttgtttctcct

SEQ ID NO: 550423 - DNA, 15 bp, Homo sapiens
accttgtttctccta

SEQ ID NO: 550424 - DNA, 15 bp, Homo sapiens
ccttgtttctcctag

SEQ ID NO: 550425 - DNA, 15 bp, Homo sapiens
cttgtttctcctagg

SEQ ID NO: 550426 - DNA, 15 bp, Homo sapiens
ttgtttctcctaggc

SEQ ID NO: 550427 - DNA, 15 bp, Homo sapiens
tgtttctcctaggct

SEQ ID NO: 550428 - DNA, 15 bp, Homo sapiens
gtttctcctaggctg

SEQ ID NO: 550429 - DNA, 15 bp, Homo sapiens
tttctcctaggctgg

SEQ ID NO: 550430 - DNA, 15 bp, Homo sapiens
ttctcctaggctggc

SEQ ID NO: 550431 - DNA, 15 bp, Homo sapiens
tctcctaggctggcc

SEQ ID NO: 550432 - DNA, 15 bp, Homo sapiens
ctcctaggctggcct

SEQ ID NO: 550433 - DNA, 15 bp, Homo sapiens
tcctaggctggccta

SEQ ID NO: 550434 - DNA, 15 bp, Homo sapiens
cctaggctggcctaa

SEQ ID NO: 550435 - DNA, 15 bp, Homo sapiens
ctaggctggcctaat

SEQ ID NO: 550436 - DNA, 15 bp, Homo sapiens
taggctggcctaatc

SEQ ID NO: 550437 - DNA, 15 bp, Homo sapiens
aggctggcctaatca

SEQ ID NO: 550438 - DNA, 15 bp, Homo sapiens
ggctggcctaatcat

SEQ ID NO: 550439 - DNA, 15 bp, Homo sapiens
gctggcctaatcatg

SEQ ID NO: 550440 - DNA, 15 bp, Homo sapiens
ctggcctaatcatgg

SEQ ID NO: 550441 - DNA, 15 bp, Homo sapiens
tggcctaatcatggt

SEQ ID NO: 550442 - DNA, 15 bp, Homo sapiens
ggcctaatcatggtt

SEQ ID NO: 550443 - DNA, 15 bp, Homo sapiens
gcctaatcatggttc

SEQ ID NO: 550444 - DNA, 15 bp, Homo sapiens
cctaatcatggttcc

SEQ ID NO: 550445 - DNA, 15 bp, Homo sapiens
ctaatcatggttcca

SEQ ID NO: 550446 - DNA, 15 bp, Homo sapiens
taatcatggttccaa

SEQ ID NO: 550447 - DNA, 15 bp, Homo sapiens
aatcatggttccaac

SEQ ID NO: 550448 - DNA, 15 bp, Homo sapiens
atcatggttccaaca

SEQ ID NO: 550449 - DNA, 15 bp, Homo sapiens
tcatggttccaacat

SEQ ID NO: 550450 - DNA, 15 bp, Homo sapiens
catggttccaacata

SEQ ID NO: 550451 - DNA, 15 bp, Homo sapiens
atggttccaacatac

SEQ ID NO: 550452 - DNA, 15 bp, Homo sapiens
tggttccaacatact

SEQ ID NO: 550453 - DNA, 15 bp, Homo sapiens
ggttccaacatactt

SEQ ID NO: 550454 - DNA, 15 bp, Homo sapiens
gttccaacatacttt

SEQ ID NO: 550455 - DNA, 15 bp, Homo sapiens
ttccaacatactttt

SEQ ID NO: 550456 - DNA, 15 bp, Homo sapiens
tccaacatactttta

SEQ ID NO: 550457 - DNA, 15 bp, Homo sapiens
ccaacatacttttag

SEQ ID NO: 550458 - DNA, 15 bp, Homo sapiens
caacatacttttagc

SEQ ID NO: 550459 - DNA, 15 bp, Homo sapiens
aacatacttttagct

SEQ ID NO: 550460 - DNA, 15 bp, Homo sapiens
acatacttttagctc

SEQ ID NO: 550461 - DNA, 15 bp, Homo sapiens
catacttttagctcc

SEQ ID NO: 550462 - DNA, 15 bp, Homo sapiens
atacttttagctccc

SEQ ID NO: 550463 - DNA, 15 bp, Homo sapiens
tacttttagctcccc

SEQ ID NO: 550464 - DNA, 15 bp, Homo sapiens
acttttagctcccca

SEQ ID NO: 550465 - DNA, 15 bp, Homo sapiens
cttttagctccccac

SEQ ID NO: 550466 - DNA, 15 bp, Homo sapiens
ttttagctccccact

SEQ ID NO: 550467 - DNA, 15 bp, Homo sapiens
tttagctccccactt

SEQ ID NO: 550468 - DNA, 15 bp, Homo sapiens
ttagctccccacttt

SEQ ID NO: 550469 - DNA, 15 bp, Homo sapiens
tagctccccactttt

SEQ ID NO: 550470 - DNA, 15 bp, Homo sapiens
agctccccacttttt

SEQ ID NO: 550471 - DNA, 15 bp, Homo sapiens
gctccccactttttc

SEQ ID NO: 550472 - DNA, 15 bp, Homo sapiens
ctccccactttttcc

SEQ ID NO: 550473 - DNA, 15 bp, Homo sapiens
tccccactttttccc

SEQ ID NO: 550474 - DNA, 15 bp, Homo sapiens
ccccactttttcccc

SEQ ID NO: 550475 - DNA, 15 bp, Homo sapiens
cccactttttccccc

SEQ ID NO: 550476 - DNA, 15 bp, Homo sapiens
ccactttttccccca

SEQ ID NO: 550477 - DNA, 15 bp, Homo sapiens
cactttttcccccac

SEQ ID NO: 550478 - DNA, 15 bp, Homo sapiens
actttttcccccact

SEQ ID NO: 550479 - DNA, 15 bp, Homo sapiens
ctttttcccccactt

SEQ ID NO: 550480 - DNA, 15 bp, Homo sapiens
tttttcccccacttg

SEQ ID NO: 550481 - DNA, 15 bp, Homo sapiens
ttttcccccacttgc

SEQ ID NO: 550482 - DNA, 15 bp, Homo sapiens
tttcccccacttgcc

SEQ ID NO: 550483 - DNA, 15 bp, Homo sapiens
ttcccccacttgccc

SEQ ID NO: 550484 - DNA, 15 bp, Homo sapiens
tcccccacttgccct

SEQ ID NO: 550485 - DNA, 15 bp, Homo sapiens
cccccacttgccctg

SEQ ID NO: 550486 - DNA, 15 bp, Homo sapiens
ccccacttgccctgg

SEQ ID NO: 550487 - DNA, 15 bp, Homo sapiens
cccacttgccctggt

SEQ ID NO: 550488 - DNA, 15 bp, Homo sapiens
ccacttgccctggtt

SEQ ID NO: 550489 - DNA, 15 bp, Homo sapiens
cacttgccctggttc

SEQ ID NO: 550490 - DNA, 15 bp, Homo sapiens
acttgccctggttca

SEQ ID NO: 550491 - DNA, 15 bp, Homo sapiens
cttgccctggttcat

SEQ ID NO: 550492 - DNA, 15 bp, Homo sapiens
ttgccctggttcatt

SEQ ID NO: 550493 - DNA, 15 bp, Homo sapiens
tgccctggttcattt

SEQ ID NO: 550494 - DNA, 15 bp, Homo sapiens
gccctggttcatttt

SEQ ID NO: 550495 - DNA, 15 bp, Homo sapiens
ccctggttcattttc

SEQ ID NO: 550496 - DNA, 15 bp, Homo sapiens
cctggttcattttct

SEQ ID NO: 550497 - DNA, 15 bp, Homo sapiens
ctggttcattttctg

SEQ ID NO: 550498 - DNA, 15 bp, Homo sapiens
tggttcattttctgc

SEQ ID NO: 550499 - DNA, 15 bp, Homo sapiens
ggttcattttctgca

SEQ ID NO: 550500 - DNA, 15 bp, Homo sapiens
gttcattttctgcat

SEQ ID NO: 550501 - DNA, 15 bp, Homo sapiens
ttcattttctgcatg

SEQ ID NO: 550502 - DNA, 15 bp, Homo sapiens
tcattttctgcatgc

SEQ ID NO: 550503 - DNA, 15 bp, Homo sapiens
cattttctgcatgct

SEQ ID NO: 550504 - DNA, 15 bp, Homo sapiens
attttctgcatgctc

SEQ ID NO: 550505 - DNA, 15 bp, Homo sapiens
ttttctgcatgctca

SEQ ID NO: 550506 - DNA, 15 bp, Homo sapiens
tttctgcatgctcag

SEQ ID NO: 550507 - DNA, 15 bp, Homo sapiens
ttctgcatgctcaga

SEQ ID NO: 550508 - DNA, 15 bp, Homo sapiens
tctgcatgctcagag

SEQ ID NO: 550509 - DNA, 15 bp, Homo sapiens
ctgcatgctcagaga

SEQ ID NO: 550510 - DNA, 15 bp, Homo sapiens
tgcatgctcagagaa

SEQ ID NO: 550511 - DNA, 15 bp, Homo sapiens
gcatgctcagagaat

SEQ ID NO: 550512 - DNA, 15 bp, Homo sapiens
catgctcagagaatg

SEQ ID NO: 550513 - DNA, 15 bp, Homo sapiens
atgctcagagaatgc

SEQ ID NO: 550514 - DNA, 15 bp, Homo sapiens
tgctcagagaatgca

SEQ ID NO: 550515 - DNA, 15 bp, Homo sapiens
gctcagagaatgcaa

SEQ ID NO: 550516 - DNA, 15 bp, Homo sapiens
ctcagagaatgcaaa

SEQ ID NO: 550517 - DNA, 15 bp, Homo sapiens
tcagagaatgcaaat

SEQ ID NO: 550518 - DNA, 15 bp, Homo sapiens
cagagaatgcaaata

SEQ ID NO: 550519 - DNA, 15 bp, Homo sapiens
agagaatgcaaatat

SEQ ID NO: 550520 - DNA, 15 bp, Homo sapiens
gagaatgcaaatatt

SEQ ID NO: 550521 - DNA, 15 bp, Homo sapiens
agaatgcaaatattt

SEQ ID NO: 550522 - DNA, 15 bp, Homo sapiens
gaatgcaaatatttt

SEQ ID NO: 550523 - DNA, 15 bp, Homo sapiens
aatgcaaatattttc

SEQ ID NO: 550524 - DNA, 15 bp, Homo sapiens
atgcaaatattttca

SEQ ID NO: 550525 - DNA, 15 bp, Homo sapiens
tgcaaatattttcac

SEQ ID NO: 550526 - DNA, 15 bp, Homo sapiens
gcaaatattttcaca

SEQ ID NO: 550527 - DNA, 15 bp, Homo sapiens
caaatattttcacat

SEQ ID NO: 550528 - DNA, 15 bp, Homo sapiens
aaatattttcacatt

SEQ ID NO: 550529 - DNA, 15 bp, Homo sapiens
aatattttcacatta

SEQ ID NO: 550530 - DNA, 15 bp, Homo sapiens
atattttcacattag

SEQ ID NO: 550531 - DNA, 15 bp, Homo sapiens
tattttcacattagc

SEQ ID NO: 550532 - DNA, 15 bp, Homo sapiens
attttcacattagct

SEQ ID NO: 550533 - DNA, 15 bp, Homo sapiens
ttttcacattagctt

SEQ ID NO: 550534 - DNA, 15 bp, Homo sapiens
tttcacattagctta

SEQ ID NO: 550535 - DNA, 15 bp, Homo sapiens
ttcacattagcttaa

SEQ ID NO: 550536 - DNA, 15 bp, Homo sapiens
tcacattagcttaaa

SEQ ID NO: 550537 - DNA, 15 bp, Homo sapiens
cacattagcttaaat

SEQ ID NO: 550538 - DNA, 15 bp, Homo sapiens
acattagcttaaatt

SEQ ID NO: 550539 - DNA, 15 bp, Homo sapiens
cattagcttaaatta

SEQ ID NO: 550540 - DNA, 15 bp, Homo sapiens
attagcttaaattaa

SEQ ID NO: 550541 - DNA, 15 bp, Homo sapiens
ttagcttaaattaaa

SEQ ID NO: 550542 - DNA, 15 bp, Homo sapiens
tagcttaaattaaaa

SEQ ID NO: 550543 - DNA, 15 bp, Homo sapiens
agcttaaattaaaaa

SEQ ID NO: 550544 - DNA, 15 bp, Homo sapiens
gcttaaattaaaaat

SEQ ID NO: 550545 - DNA, 15 bp, Homo sapiens
cttaaattaaaaata

SEQ ID NO: 550546 - DNA, 15 bp, Homo sapiens
ttaaattaaaaataa

SEQ ID NO: 550547 - DNA, 15 bp, Homo sapiens
taaattaaaaataag

SEQ ID NO: 550548 - DNA, 15 bp, Homo sapiens
aaattaaaaataagt

SEQ ID NO: 550549 - DNA, 15 bp, Homo sapiens
aattaaaaataagta

SEQ ID NO: 550550 - DNA, 15 bp, Homo sapiens
attaaaaataagtag

SEQ ID NO: 550551 - DNA, 15 bp, Homo sapiens
ttaaaaataagtagg

SEQ ID NO: 550552 - DNA, 15 bp, Homo sapiens
taaaaataagtagga

SEQ ID NO: 550553 - DNA, 15 bp, Homo sapiens
aaaaataagtaggag

SEQ ID NO: 550554 - DNA, 15 bp, Homo sapiens
aaaataagtaggagg

SEQ ID NO: 550555 - DNA, 15 bp, Homo sapiens
aaataagtaggaggg

SEQ ID NO: 550556 - DNA, 15 bp, Homo sapiens
aataagtaggagggt

SEQ ID NO: 550557 - DNA, 15 bp, Homo sapiens
ataagtaggagggtt

SEQ ID NO: 550558 - DNA, 15 bp, Homo sapiens
taagtaggagggtta

SEQ ID NO: 550559 - DNA, 15 bp, Homo sapiens
aagtaggagggttag

SEQ ID NO: 550560 - DNA, 15 bp, Homo sapiens
agtaggagggttagt

SEQ ID NO: 550561 - DNA, 15 bp, Homo sapiens
gtaggagggttagtc

SEQ ID NO: 550562 - DNA, 15 bp, Homo sapiens
taggagggttagtct

SEQ ID NO: 550563 - DNA, 15 bp, Homo sapiens
aggagggttagtctg

SEQ ID NO: 550564 - DNA, 15 bp, Homo sapiens
ggagggttagtctgc

SEQ ID NO: 550565 - DNA, 15 bp, Homo sapiens
gagggttagtctgct

SEQ ID NO: 550566 - DNA, 15 bp, Homo sapiens
agggttagtctgctg

SEQ ID NO: 550567 - DNA, 15 bp, Homo sapiens
gggttagtctgctgg

SEQ ID NO: 550568 - DNA, 15 bp, Homo sapiens
ggttagtctgctggg

SEQ ID NO: 550569 - DNA, 15 bp, Homo sapiens
gttagtctgctggga

SEQ ID NO: 550570 - DNA, 15 bp, Homo sapiens
ttagtctgctgggag

SEQ ID NO: 550571 - DNA, 15 bp, Homo sapiens
tagtctgctgggagg

SEQ ID NO: 550572 - DNA, 15 bp, Homo sapiens
agtctgctgggaggg

SEQ ID NO: 550573 - DNA, 15 bp, Homo sapiens
gtctgctgggaggga

SEQ ID NO: 550574 - DNA, 15 bp, Homo sapiens
tctgctgggagggag

SEQ ID NO: 550575 - DNA, 15 bp, Homo sapiens
ctgctgggagggagg

SEQ ID NO: 550576 - DNA, 15 bp, Homo sapiens
tgctgggagggaggg

SEQ ID NO: 550577 - DNA, 15 bp, Homo sapiens
gctgggagggaggga

SEQ ID NO: 550578 - DNA, 15 bp, Homo sapiens
ctgggagggagggag

SEQ ID NO: 550579 - DNA, 15 bp, Homo sapiens
tgggagggagggaga

SEQ ID NO: 550580 - DNA, 15 bp, Homo sapiens
gggagggagggagaa

SEQ ID NO: 550581 - DNA, 15 bp, Homo sapiens
ggagggagggagaag

SEQ ID NO: 550582 - DNA, 15 bp, Homo sapiens
gagggagggagaagc

SEQ ID NO: 550583 - DNA, 15 bp, Homo sapiens
agggagggagaagcc

SEQ ID NO: 550584 - DNA, 15 bp, Homo sapiens
gggagggagaagccc

SEQ ID NO: 550585 - DNA, 15 bp, Homo sapiens
ggagggagaagcccc

SEQ ID NO: 550586 - DNA, 15 bp, Homo sapiens
gagggagaagccccg

SEQ ID NO: 550587 - DNA, 15 bp, Homo sapiens
agggagaagccccgc

SEQ ID NO: 550588 - DNA, 15 bp, Homo sapiens
gggagaagccccgcc

SEQ ID NO: 550589 - DNA, 15 bp, Homo sapiens
ggagaagccccgccc

SEQ ID NO: 550590 - DNA, 15 bp, Homo sapiens
gagaagccccgccca

SEQ ID NO: 550591 - DNA, 15 bp, Homo sapiens
agaagccccgcccaa

SEQ ID NO: 550592 - DNA, 15 bp, Homo sapiens
gaagccccgcccaaa

SEQ ID NO: 550593 - DNA, 15 bp, Homo sapiens
aagccccgcccaaac

SEQ ID NO: 550594 - DNA, 15 bp, Homo sapiens
agccccgcccaaact

SEQ ID NO: 550595 - DNA, 15 bp, Homo sapiens
gccccgcccaaacta

SEQ ID NO: 550596 - DNA, 15 bp, Homo sapiens
ccccgcccaaactac

SEQ ID NO: 550597 - DNA, 15 bp, Homo sapiens
cccgcccaaactaca

SEQ ID NO: 550598 - DNA, 15 bp, Homo sapiens
ccgcccaaactacag

SEQ ID NO: 550599 - DNA, 15 bp, Homo sapiens
cgcccaaactacagt

SEQ ID NO: 550600 - DNA, 15 bp, Homo sapiens
gcccaaactacagtt

SEQ ID NO: 550601 - DNA, 15 bp, Homo sapiens
cccaaactacagttc

SEQ ID NO: 550602 - DNA, 15 bp, Homo sapiens
ccaaactacagttca

SEQ ID NO: 550603 - DNA, 15 bp, Homo sapiens
caaactacagttcag

SEQ ID NO: 550604 - DNA, 15 bp, Homo sapiens
aaactacagttcagt

SEQ ID NO: 550605 - DNA, 15 bp, Homo sapiens
aactacagttcagta

SEQ ID NO: 550606 - DNA, 15 bp, Homo sapiens
actacagttcagtaa

SEQ ID NO: 550607 - DNA, 15 bp, Homo sapiens
ctacagttcagtaat

SEQ ID NO: 550608 - DNA, 15 bp, Homo sapiens
tacagttcagtaatc

SEQ ID NO: 550609 - DNA, 15 bp, Homo sapiens
acagttcagtaatcc

SEQ ID NO: 550610 - DNA, 15 bp, Homo sapiens
cagttcagtaatccc

SEQ ID NO: 550611 - DNA, 15 bp, Homo sapiens
agttcagtaatccct

SEQ ID NO: 550612 - DNA, 15 bp, Homo sapiens
gttcagtaatccctt

SEQ ID NO: 550613 - DNA, 15 bp, Homo sapiens
ttcagtaatcccttt

SEQ ID NO: 550614 - DNA, 15 bp, Homo sapiens
tcagtaatccctttg

SEQ ID NO: 550615 - DNA, 15 bp, Homo sapiens
cagtaatccctttgg

SEQ ID NO: 550616 - DNA, 15 bp, Homo sapiens
agtaatccctttggg

SEQ ID NO: 550617 - DNA, 15 bp, Homo sapiens
gtaatccctttgggt

SEQ ID NO: 550618 - DNA, 15 bp, Homo sapiens
taatccctttgggtt

SEQ ID NO: 550619 - DNA, 15 bp, Homo sapiens
aatccctttgggtta

SEQ ID NO: 550620 - DNA, 15 bp, Homo sapiens
atccctttgggttat

SEQ ID NO: 550621 - DNA, 15 bp, Homo sapiens
tccctttgggttatg

SEQ ID NO: 550622 - DNA, 15 bp, Homo sapiens
ccctttgggttatga

SEQ ID NO: 550623 - DNA, 15 bp, Homo sapiens
cctttgggttatgac

SEQ ID NO: 550624 - DNA, 15 bp, Homo sapiens
ctttgggttatgaca

SEQ ID NO: 550625 - DNA, 15 bp, Homo sapiens
tttgggttatgacag

SEQ ID NO: 550626 - DNA, 15 bp, Homo sapiens
ttgggttatgacagc

SEQ ID NO: 550627 - DNA, 15 bp, Homo sapiens
tgggttatgacagca

SEQ ID NO: 550628 - DNA, 15 bp, Homo sapiens
gggttatgacagcaa

SEQ ID NO: 550629 - DNA, 15 bp, Homo sapiens
ggttatgacagcaat

SEQ ID NO: 550630 - DNA, 15 bp, Homo sapiens
gttatgacagcaatg

SEQ ID NO: 550631 - DNA, 15 bp, Homo sapiens
ttatgacagcaatgt

SEQ ID NO: 550632 - DNA, 15 bp, Homo sapiens
tatgacagcaatgtt

SEQ ID NO: 550633 - DNA, 15 bp, Homo sapiens
atgacagcaatgttt

SEQ ID NO: 550634 - DNA, 15 bp, Homo sapiens
tgacagcaatgtttt

SEQ ID NO: 550635 - DNA, 15 bp, Homo sapiens
gacagcaatgtttta

SEQ ID NO: 550636 - DNA, 15 bp, Homo sapiens
acagcaatgttttag

SEQ ID NO: 550637 - DNA, 15 bp, Homo sapiens
cagcaatgttttaga

SEQ ID NO: 550638 - DNA, 15 bp, Homo sapiens
agcaatgttttagat

SEQ ID NO: 550639 - DNA, 15 bp, Homo sapiens
gcaatgttttagatc

SEQ ID NO: 550640 - DNA, 15 bp, Homo sapiens
caatgttttagatca

SEQ ID NO: 550641 - DNA, 15 bp, Homo sapiens
aatgttttagatcag

SEQ ID NO: 550642 - DNA, 15 bp, Homo sapiens
atgttttagatcagc

SEQ ID NO: 550643 - DNA, 15 bp, Homo sapiens
tgttttagatcagct

SEQ ID NO: 550644 - DNA, 15 bp, Homo sapiens
gttttagatcagctc

SEQ ID NO: 550645 - DNA, 15 bp, Homo sapiens
ttttagatcagctct

SEQ ID NO: 550646 - DNA, 15 bp, Homo sapiens
tttagatcagctctt

SEQ ID NO: 550647 - DNA, 15 bp, Homo sapiens
ttagatcagctcttc

SEQ ID NO: 550648 - DNA, 15 bp, Homo sapiens
tagatcagctcttcc

SEQ ID NO: 550649 - DNA, 15 bp, Homo sapiens
agatcagctcttcct

SEQ ID NO: 550650 - DNA, 15 bp, Homo sapiens
gatcagctcttcctc

SEQ ID NO: 550651 - DNA, 15 bp, Homo sapiens
atcagctcttcctca

SEQ ID NO: 550652 - DNA, 15 bp, Homo sapiens
tcagctcttcctcac

SEQ ID NO: 550653 - DNA, 15 bp, Homo sapiens
cagctcttcctcact

SEQ ID NO: 550654 - DNA, 15 bp, Homo sapiens
agctcttcctcactt

SEQ ID NO: 550655 - DNA, 15 bp, Homo sapiens
gctcttcctcactta

SEQ ID NO: 550656 - DNA, 15 bp, Homo sapiens
ctcttcctcacttag

SEQ ID NO: 550657 - DNA, 15 bp, Homo sapiens
tcttcctcacttaga

SEQ ID NO: 550658 - DNA, 15 bp, Homo sapiens
cttcctcacttagat

SEQ ID NO: 550659 - DNA, 15 bp, Homo sapiens
ttcctcacttagatc

SEQ ID NO: 550660 - DNA, 15 bp, Homo sapiens
tcctcacttagatca

SEQ ID NO: 550661 - DNA, 15 bp, Homo sapiens
cctcacttagatcag

SEQ ID NO: 550662 - DNA, 15 bp, Homo sapiens
ctcacttagatcaga

SEQ ID NO: 550663 - DNA, 15 bp, Homo sapiens
tcacttagatcagac

SEQ ID NO: 550664 - DNA, 15 bp, Homo sapiens
cacttagatcagaca

SEQ ID NO: 550665 - DNA, 15 bp, Homo sapiens
acttagatcagacaa

SEQ ID NO: 550666 - DNA, 15 bp, Homo sapiens
cttagatcagacaat

SEQ ID NO: 550667 - DNA, 15 bp, Homo sapiens
ttagatcagacaatg

SEQ ID NO: 550668 - DNA, 15 bp, Homo sapiens
tagatcagacaatgt

SEQ ID NO: 550669 - DNA, 15 bp, Homo sapiens
agatcagacaatgtt

SEQ ID NO: 550670 - DNA, 15 bp, Homo sapiens
gatcagacaatgttg

SEQ ID NO: 550671 - DNA, 15 bp, Homo sapiens
atcagacaatgttgg

SEQ ID NO: 550672 - DNA, 15 bp, Homo sapiens
tcagacaatgttggc

SEQ ID NO: 550673 - DNA, 15 bp, Homo sapiens
cagacaatgttggca

SEQ ID NO: 550674 - DNA, 15 bp, Homo sapiens
agacaatgttggcag

SEQ ID NO: 550675 - DNA, 15 bp, Homo sapiens
gacaatgttggcagt

SEQ ID NO: 550676 - DNA, 15 bp, Homo sapiens
acaatgttggcagtc

SEQ ID NO: 550677 - DNA, 15 bp, Homo sapiens
caatgttggcagtca

SEQ ID NO: 550678 - DNA, 15 bp, Homo sapiens
aatgttggcagtcag

SEQ ID NO: 550679 - DNA, 15 bp, Homo sapiens
atgttggcagtcaga

SEQ ID NO: 550680 - DNA, 15 bp, Homo sapiens
tgttggcagtcagac

SEQ ID NO: 550681 - DNA, 15 bp, Homo sapiens
gttggcagtcagacc

SEQ ID NO: 550682 - DNA, 15 bp, Homo sapiens
ttggcagtcagacca

SEQ ID NO: 550683 - DNA, 15 bp, Homo sapiens
tggcagtcagaccag

SEQ ID NO: 550684 - DNA, 15 bp, Homo sapiens
ggcagtcagaccagg

SEQ ID NO: 550685 - DNA, 15 bp, Homo sapiens
gcagtcagaccagga

SEQ ID NO: 550686 - DNA, 15 bp, Homo sapiens
cagtcagaccaggag

SEQ ID NO: 550687 - DNA, 15 bp, Homo sapiens
agtcagaccaggagt

SEQ ID NO: 550688 - DNA, 15 bp, Homo sapiens
gtcagaccaggagta

SEQ ID NO: 550689 - DNA, 15 bp, Homo sapiens
tcagaccaggagtag

SEQ ID NO: 550690 - DNA, 15 bp, Homo sapiens
cagaccaggagtaga

SEQ ID NO: 550691 - DNA, 15 bp, Homo sapiens
agaccaggagtagat

SEQ ID NO: 550692 - DNA, 15 bp, Homo sapiens
gaccaggagtagatt

SEQ ID NO: 550693 - DNA, 15 bp, Homo sapiens
accaggagtagatta

SEQ ID NO: 550694 - DNA, 15 bp, Homo sapiens
ccaggagtagattag

SEQ ID NO: 550695 - DNA, 15 bp, Homo sapiens
caggagtagattagt

SEQ ID NO: 550696 - DNA, 15 bp, Homo sapiens
aggagtagattagta

SEQ ID NO: 550697 - DNA, 15 bp, Homo sapiens
ggagtagattagtat

SEQ ID NO: 550698 - DNA, 15 bp, Homo sapiens
gagtagattagtatt

SEQ ID NO: 550699 - DNA, 15 bp, Homo sapiens
agtagattagtatta

SEQ ID NO: 550700 - DNA, 15 bp, Homo sapiens
gtagattagtattat

SEQ ID NO: 550701 - DNA, 15 bp, Homo sapiens
tagattagtattata

SEQ ID NO: 550702 - DNA, 15 bp, Homo sapiens
agattagtattatag

SEQ ID NO: 550703 - DNA, 15 bp, Homo sapiens
gattagtattatagg

SEQ ID NO: 550704 - DNA, 15 bp, Homo sapiens
attagtattataggg

SEQ ID NO: 550705 - DNA, 15 bp, Homo sapiens
ttagtattatagggt

SEQ ID NO: 550706 - DNA, 15 bp, Homo sapiens
tagtattatagggtc

SEQ ID NO: 550707 - DNA, 15 bp, Homo sapiens
agtattatagggtcc

SEQ ID NO: 550708 - DNA, 15 bp, Homo sapiens
gtattatagggtcct

SEQ ID NO: 550709 - DNA, 15 bp, Homo sapiens
tattatagggtcctc

SEQ ID NO: 550710 - DNA, 15 bp, Homo sapiens
attatagggtcctcc

SEQ ID NO: 550711 - DNA, 15 bp, Homo sapiens
ttatagggtcctccc

SEQ ID NO: 550712 - DNA, 15 bp, Homo sapiens
tatagggtcctccct

SEQ ID NO: 550713 - DNA, 15 bp, Homo sapiens
atagggtcctccctt

SEQ ID NO: 550714 - DNA, 15 bp, Homo sapiens
tagggtcctcccttc

SEQ ID NO: 550715 - DNA, 15 bp, Homo sapiens
agggtcctcccttca

SEQ ID NO: 550716 - DNA, 15 bp, Homo sapiens
gggtcctcccttcag

SEQ ID NO: 550717 - DNA, 15 bp, Homo sapiens
ggtcctcccttcaga

SEQ ID NO: 550718 - DNA, 15 bp, Homo sapiens
gtcctcccttcagag

SEQ ID NO: 550719 - DNA, 15 bp, Homo sapiens
tcctcccttcagagg

SEQ ID NO: 550720 - DNA, 15 bp, Homo sapiens
cctcccttcagaggg

SEQ ID NO: 550721 - DNA, 15 bp, Homo sapiens
ctcccttcagagggg

SEQ ID NO: 550722 - DNA, 15 bp, Homo sapiens
tcccttcagaggggt

SEQ ID NO: 550723 - DNA, 15 bp, Homo sapiens
cccttcagaggggta

SEQ ID NO: 550724 - DNA, 15 bp, Homo sapiens
ccttcagaggggtac

SEQ ID NO: 550725 - DNA, 15 bp, Homo sapiens
cttcagaggggtaca

SEQ ID NO: 550726 - DNA, 15 bp, Homo sapiens
ttcagaggggtacac

SEQ ID NO: 550727 - DNA, 15 bp, Homo sapiens
tcagaggggtacacc

SEQ ID NO: 550728 - DNA, 15 bp, Homo sapiens
cagaggggtacaccc

SEQ ID NO: 550729 - DNA, 15 bp, Homo sapiens
agaggggtacacccc

SEQ ID NO: 550730 - DNA, 15 bp, Homo sapiens
gaggggtacacccct

SEQ ID NO: 550731 - DNA, 15 bp, Homo sapiens
aggggtacaccccta

SEQ ID NO: 550732 - DNA, 15 bp, Homo sapiens
ggggtacacccctac

SEQ ID NO: 550733 - DNA, 15 bp, Homo sapiens
gggtacacccctaca

SEQ ID NO: 550734 - DNA, 15 bp, Homo sapiens
ggtacacccctacag

SEQ ID NO: 550735 - DNA, 15 bp, Homo sapiens
gtacacccctacagc

SEQ ID NO: 550736 - DNA, 15 bp, Homo sapiens
tacacccctacagct

SEQ ID NO: 550737 - DNA, 15 bp, Homo sapiens
acacccctacagctc

SEQ ID NO: 550738 - DNA, 15 bp, Homo sapiens
cacccctacagctca

SEQ ID NO: 550739 - DNA, 15 bp, Homo sapiens
acccctacagctcag

SEQ ID NO: 550740 - DNA, 15 bp, Homo sapiens
cccctacagctcaga

SEQ ID NO: 550741 - DNA, 15 bp, Homo sapiens
ccctacagctcagag

SEQ ID NO: 550742 - DNA, 15 bp, Homo sapiens
cctacagctcagagg

SEQ ID NO: 550743 - DNA, 15 bp, Homo sapiens
ctacagctcagaggc

SEQ ID NO: 550744 - DNA, 15 bp, Homo sapiens
tacagctcagaggcc

SEQ ID NO: 550745 - DNA, 15 bp, Homo sapiens
acagctcagaggcca

SEQ ID NO: 550746 - DNA, 15 bp, Homo sapiens
cagctcagaggccac

SEQ ID NO: 550747 - DNA, 15 bp, Homo sapiens
agctcagaggccact

SEQ ID NO: 550748 - DNA, 15 bp, Homo sapiens
gctcagaggccactt

SEQ ID NO: 550749 - DNA, 15 bp, Homo sapiens
ctcagaggccacttc

SEQ ID NO: 550750 - DNA, 15 bp, Homo sapiens
tcagaggccacttct

SEQ ID NO: 550751 - DNA, 15 bp, Homo sapiens
cagaggccacttctt

SEQ ID NO: 550752 - DNA, 15 bp, Homo sapiens
agaggccacttctta

SEQ ID NO: 550753 - DNA, 15 bp, Homo sapiens
gaggccacttcttag

SEQ ID NO: 550754 - DNA, 15 bp, Homo sapiens
aggccacttcttaga

SEQ ID NO: 550755 - DNA, 15 bp, Homo sapiens
ggccacttcttagag

SEQ ID NO: 550756 - DNA, 15 bp, Homo sapiens
gccacttcttagagt

SEQ ID NO: 550757 - DNA, 15 bp, Homo sapiens
ccacttcttagagtt

SEQ ID NO: 550758 - DNA, 15 bp, Homo sapiens
cacttcttagagttg

SEQ ID NO: 550759 - DNA, 15 bp, Homo sapiens
acttcttagagttgg

SEQ ID NO: 550760 - DNA, 15 bp, Homo sapiens
cttcttagagttggg

SEQ ID NO: 550761 - DNA, 15 bp, Homo sapiens
ttcttagagttgggg

SEQ ID NO: 550762 - DNA, 15 bp, Homo sapiens
tcttagagttggggt

SEQ ID NO: 550763 - DNA, 15 bp, Homo sapiens
cttagagttggggtg

SEQ ID NO: 550764 - DNA, 15 bp, Homo sapiens
ttagagttggggtgg

SEQ ID NO: 550765 - DNA, 15 bp, Homo sapiens
tagagttggggtggt

SEQ ID NO: 550766 - DNA, 15 bp, Homo sapiens
agagttggggtggta

SEQ ID NO: 550767 - DNA, 15 bp, Homo sapiens
gagttggggtggtag

SEQ ID NO: 550768 - DNA, 15 bp, Homo sapiens
agttggggtggtagg

SEQ ID NO: 550769 - DNA, 15 bp, Homo sapiens
gttggggtggtaggt

SEQ ID NO: 550770 - DNA, 15 bp, Homo sapiens
ttggggtggtaggtg

SEQ ID NO: 550771 - DNA, 15 bp, Homo sapiens
tggggtggtaggtgg

SEQ ID NO: 550772 - DNA, 15 bp, Homo sapiens
ggggtggtaggtggt

SEQ ID NO: 550773 - DNA, 15 bp, Homo sapiens
gggtggtaggtggtt

SEQ ID NO: 550774 - DNA, 15 bp, Homo sapiens
ggtggtaggtggttg

SEQ ID NO: 550775 - DNA, 15 bp, Homo sapiens
gtggtaggtggttgc

SEQ ID NO: 550776 - DNA, 15 bp, Homo sapiens
tggtaggtggttgct

SEQ ID NO: 550777 - DNA, 15 bp, Homo sapiens
ggtaggtggttgctt

SEQ ID NO: 550778 - DNA, 15 bp, Homo sapiens
gtaggtggttgctta

SEQ ID NO: 550779 - DNA, 15 bp, Homo sapiens
taggtggttgcttag

SEQ ID NO: 550780 - DNA, 15 bp, Homo sapiens
aggtggttgcttaga

SEQ ID NO: 550781 - DNA, 15 bp, Homo sapiens
ggtggttgcttagat

SEQ ID NO: 550782 - DNA, 15 bp, Homo sapiens
gtggttgcttagatg

SEQ ID NO: 550783 - DNA, 15 bp, Homo sapiens
tggttgcttagatga

SEQ ID NO: 550784 - DNA, 15 bp, Homo sapiens
ggttgcttagatgat

SEQ ID NO: 550785 - DNA, 15 bp, Homo sapiens
gttgcttagatgatg

SEQ ID NO: 550786 - DNA, 15 bp, Homo sapiens
ttgcttagatgatgt

SEQ ID NO: 550787 - DNA, 15 bp, Homo sapiens
tgcttagatgatgtt

SEQ ID NO: 550788 - DNA, 15 bp, Homo sapiens
gcttagatgatgttt

SEQ ID NO: 550789 - DNA, 15 bp, Homo sapiens
cttagatgatgtttg

SEQ ID NO: 550790 - DNA, 15 bp, Homo sapiens
ttagatgatgtttgg

SEQ ID NO: 550791 - DNA, 15 bp, Homo sapiens
tagatgatgtttggg

SEQ ID NO: 550792 - DNA, 15 bp, Homo sapiens
agatgatgtttgggc

SEQ ID NO: 550793 - DNA, 15 bp, Homo sapiens
gatgatgtttgggcc

SEQ ID NO: 550794 - DNA, 15 bp, Homo sapiens
atgatgtttgggcct

SEQ ID NO: 550795 - DNA, 15 bp, Homo sapiens
tgatgtttgggcctc

SEQ ID NO: 550796 - DNA, 15 bp, Homo sapiens
gatgtttgggcctca

SEQ ID NO: 550797 - DNA, 15 bp, Homo sapiens
atgtttgggcctcag

SEQ ID NO: 550798 - DNA, 15 bp, Homo sapiens
tgtttgggcctcagc

SEQ ID NO: 550799 - DNA, 15 bp, Homo sapiens
gtttgggcctcagcc

SEQ ID NO: 550800 - DNA, 15 bp, Homo sapiens
tttgggcctcagcct

SEQ ID NO: 550801 - DNA, 15 bp, Homo sapiens
ttgggcctcagcctg

SEQ ID NO: 550802 - DNA, 15 bp, Homo sapiens
tgggcctcagcctgg

SEQ ID NO: 550803 - DNA, 15 bp, Homo sapiens
gggcctcagcctggt

SEQ ID NO: 550804 - DNA, 15 bp, Homo sapiens
ggcctcagcctggtg

SEQ ID NO: 550805 - DNA, 15 bp, Homo sapiens
gcctcagcctggtgc

SEQ ID NO: 550806 - DNA, 15 bp, Homo sapiens
cctcagcctggtgct

SEQ ID NO: 550807 - DNA, 15 bp, Homo sapiens
ctcagcctggtgcta

SEQ ID NO: 550808 - DNA, 15 bp, Homo sapiens
tcagcctggtgctaa

SEQ ID NO: 550809 - DNA, 15 bp, Homo sapiens
cagcctggtgctaat

SEQ ID NO: 550810 - DNA, 15 bp, Homo sapiens
agcctggtgctaatg

SEQ ID NO: 550811 - DNA, 15 bp, Homo sapiens
gcctggtgctaatgg

SEQ ID NO: 550812 - DNA, 15 bp, Homo sapiens
cctggtgctaatggg

SEQ ID NO: 550813 - DNA, 15 bp, Homo sapiens
ctggtgctaatgggg

SEQ ID NO: 550814 - DNA, 15 bp, Homo sapiens
tggtgctaatgggga

SEQ ID NO: 550815 - DNA, 15 bp, Homo sapiens
ggtgctaatggggat

SEQ ID NO: 550816 - DNA, 15 bp, Homo sapiens
gtgctaatggggatg

SEQ ID NO: 550817 - DNA, 15 bp, Homo sapiens
tgctaatggggatgg

SEQ ID NO: 550818 - DNA, 15 bp, Homo sapiens
gctaatggggatggg

SEQ ID NO: 550819 - DNA, 15 bp, Homo sapiens
ctaatggggatgggg

SEQ ID NO: 550820 - DNA, 15 bp, Homo sapiens
taatggggatgggga

SEQ ID NO: 550821 - DNA, 15 bp, Homo sapiens
aatggggatggggac

SEQ ID NO: 550822 - DNA, 15 bp, Homo sapiens
atggggatggggact

SEQ ID NO: 550823 - DNA, 15 bp, Homo sapiens
tggggatggggacta

SEQ ID NO: 550824 - DNA, 15 bp, Homo sapiens
ggggatggggactag

SEQ ID NO: 550825 - DNA, 15 bp, Homo sapiens
gggatggggactagg

SEQ ID NO: 550826 - DNA, 15 bp, Homo sapiens
ggatggggactaggt

SEQ ID NO: 550827 - DNA, 15 bp, Homo sapiens
gatggggactaggtg

SEQ ID NO: 550828 - DNA, 15 bp, Homo sapiens
atggggactaggtga

SEQ ID NO: 550829 - DNA, 15 bp, Homo sapiens
tggggactaggtgaa

SEQ ID NO: 550830 - DNA, 15 bp, Homo sapiens
ggggactaggtgaac

SEQ ID NO: 550831 - DNA, 15 bp, Homo sapiens
gggactaggtgaaca

SEQ ID NO: 550832 - DNA, 15 bp, Homo sapiens
ggactaggtgaacag

SEQ ID NO: 550833 - DNA, 15 bp, Homo sapiens
gactaggtgaacaga

SEQ ID NO: 550834 - DNA, 15 bp, Homo sapiens
actaggtgaacagaa

SEQ ID NO: 550835 - DNA, 15 bp, Homo sapiens
ctaggtgaacagaaa

SEQ ID NO: 550836 - DNA, 15 bp, Homo sapiens
taggtgaacagaaag

SEQ ID NO: 550837 - DNA, 15 bp, Homo sapiens
aggtgaacagaaagg

SEQ ID NO: 550838 - DNA, 15 bp, Homo sapiens
ggtgaacagaaagga

SEQ ID NO: 550839 - DNA, 15 bp, Homo sapiens
gtgaacagaaaggaa

SEQ ID NO: 550840 - DNA, 15 bp, Homo sapiens
tgaacagaaaggaag

SEQ ID NO: 550841 - DNA, 15 bp, Homo sapiens
gaacagaaaggaagg

SEQ ID NO: 550842 - DNA, 15 bp, Homo sapiens
aacagaaaggaaggc

SEQ ID NO: 550843 - DNA, 15 bp, Homo sapiens
acagaaaggaaggct

SEQ ID NO: 550844 - DNA, 15 bp, Homo sapiens
cagaaaggaaggctg

SEQ ID NO: 550845 - DNA, 15 bp, Homo sapiens
agaaaggaaggctgg

SEQ ID NO: 550846 - DNA, 15 bp, Homo sapiens
gaaaggaaggctggt

SEQ ID NO: 550847 - DNA, 15 bp, Homo sapiens
aaaggaaggctggtg

SEQ ID NO: 550848 - DNA, 15 bp, Homo sapiens
aaggaaggctggtgg

SEQ ID NO: 550849 - DNA, 15 bp, Homo sapiens
aggaaggctggtgga

SEQ ID NO: 550850 - DNA, 15 bp, Homo sapiens
ggaaggctggtggag

SEQ ID NO: 550851 - DNA, 15 bp, Homo sapiens
gaaggctggtggaga

SEQ ID NO: 550852 - DNA, 15 bp, Homo sapiens
aaggctggtggagag

SEQ ID NO: 550853 - DNA, 15 bp, Homo sapiens
aggctggtggagaga

SEQ ID NO: 550854 - DNA, 15 bp, Homo sapiens
ggctggtggagagat

SEQ ID NO: 550855 - DNA, 15 bp, Homo sapiens
gctggtggagagatg

SEQ ID NO: 550856 - DNA, 15 bp, Homo sapiens
ctggtggagagatga

SEQ ID NO: 550857 - DNA, 15 bp, Homo sapiens
tggtggagagatgag

SEQ ID NO: 550858 - DNA, 15 bp, Homo sapiens
ggtggagagatgagg

SEQ ID NO: 550859 - DNA, 15 bp, Homo sapiens
gtggagagatgagga

SEQ ID NO: 550860 - DNA, 15 bp, Homo sapiens
tggagagatgaggaa

SEQ ID NO: 550861 - DNA, 15 bp, Homo sapiens
ggagagatgaggaag

SEQ ID NO: 550862 - DNA, 15 bp, Homo sapiens
gagagatgaggaagg

SEQ ID NO: 550863 - DNA, 15 bp, Homo sapiens
agagatgaggaagga

SEQ ID NO: 550864 - DNA, 15 bp, Homo sapiens
gagatgaggaaggag

SEQ ID NO: 550865 - DNA, 15 bp, Homo sapiens
agatgaggaaggaga

SEQ ID NO: 550866 - DNA, 15 bp, Homo sapiens
gatgaggaaggagag

SEQ ID NO: 550867 - DNA, 15 bp, Homo sapiens
atgaggaaggagaga

SEQ ID NO: 550868 - DNA, 15 bp, Homo sapiens
tgaggaaggagagaa

SEQ ID NO: 550869 - DNA, 15 bp, Homo sapiens
aggaaggagagaagg

SEQ ID NO: 550870 - DNA, 15 bp, Homo sapiens
ggaaggagagaaggt

SEQ ID NO: 550871 - DNA, 15 bp, Homo sapiens
gaaggagagaaggtg

SEQ ID NO: 550872 - DNA, 15 bp, Homo sapiens
aaggagagaaggtgc

SEQ ID NO: 550873 - DNA, 15 bp, Homo sapiens
aggagagaaggtgca

SEQ ID NO: 550874 - DNA, 15 bp, Homo sapiens
ggagagaaggtgcag

SEQ ID NO: 550875 - DNA, 15 bp, Homo sapiens
gagagaaggtgcagc

SEQ ID NO: 550876 - DNA, 15 bp, Homo sapiens
agagaaggtgcagcc

SEQ ID NO: 550877 - DNA, 15 bp, Homo sapiens
gagaaggtgcagcca

SEQ ID NO: 550878 - DNA, 15 bp, Homo sapiens
agaaggtgcagccac

SEQ ID NO: 550879 - DNA, 15 bp, Homo sapiens
gaaggtgcagccaca

SEQ ID NO: 550880 - DNA, 15 bp, Homo sapiens
aaggtgcagccacag

SEQ ID NO: 550881 - DNA, 15 bp, Homo sapiens
aggtgcagccacaga

SEQ ID NO: 550882 - DNA, 15 bp, Homo sapiens
ggtgcagccacagag

SEQ ID NO: 550883 - DNA, 15 bp, Homo sapiens
gtgcagccacagaga

SEQ ID NO: 550884 - DNA, 15 bp, Homo sapiens
tgcagccacagagat

SEQ ID NO: 550885 - DNA, 15 bp, Homo sapiens
gcagccacagagatc

SEQ ID NO: 550886 - DNA, 15 bp, Homo sapiens
cagccacagagatcc

SEQ ID NO: 550887 - DNA, 15 bp, Homo sapiens
agccacagagatccc

SEQ ID NO: 550888 - DNA, 15 bp, Homo sapiens
gccacagagatcccg

SEQ ID NO: 550889 - DNA, 15 bp, Homo sapiens
ccacagagatcccgt

SEQ ID NO: 550890 - DNA, 15 bp, Homo sapiens
cacagagatcccgtt

SEQ ID NO: 550891 - DNA, 15 bp, Homo sapiens
acagagatcccgttc

SEQ ID NO: 550892 - DNA, 15 bp, Homo sapiens
cagagatcccgttct

SEQ ID NO: 550893 - DNA, 15 bp, Homo sapiens
agagatcccgttctc

SEQ ID NO: 550894 - DNA, 15 bp, Homo sapiens
gagatcccgttctca

SEQ ID NO: 550895 - DNA, 15 bp, Homo sapiens
agatcccgttctcat

SEQ ID NO: 550896 - DNA, 15 bp, Homo sapiens
gatcccgttctcatg

SEQ ID NO: 550897 - DNA, 15 bp, Homo sapiens
atcccgttctcatgc

SEQ ID NO: 550898 - DNA, 15 bp, Homo sapiens
tcccgttctcatgcc

SEQ ID NO: 550899 - DNA, 15 bp, Homo sapiens
cccgttctcatgcca

SEQ ID NO: 550900 - DNA, 15 bp, Homo sapiens
ccgttctcatgccaa

SEQ ID NO: 550901 - DNA, 15 bp, Homo sapiens
cgttctcatgccaac

SEQ ID NO: 550902 - DNA, 15 bp, Homo sapiens
gttctcatgccaacg

SEQ ID NO: 550903 - DNA, 15 bp, Homo sapiens
ttctcatgccaacgt

SEQ ID NO: 550904 - DNA, 15 bp, Homo sapiens
tctcatgccaacgtt

SEQ ID NO: 550905 - DNA, 15 bp, Homo sapiens
ctcatgccaacgttg

SEQ ID NO: 550906 - DNA, 15 bp, Homo sapiens
tcatgccaacgttgt

SEQ ID NO: 550907 - DNA, 15 bp, Homo sapiens
catgccaacgttgtt

SEQ ID NO: 550908 - DNA, 15 bp, Homo sapiens
atgccaacgttgttg

SEQ ID NO: 550909 - DNA, 15 bp, Homo sapiens
tgccaacgttgttgt

SEQ ID NO: 550910 - DNA, 15 bp, Homo sapiens
gccaacgttgttgtt

SEQ ID NO: 550911 - DNA, 15 bp, Homo sapiens
ccaacgttgttgtta

SEQ ID NO: 550912 - DNA, 15 bp, Homo sapiens
caacgttgttgttaa

SEQ ID NO: 550913 - DNA, 15 bp, Homo sapiens
aacgttgttgttaac

SEQ ID NO: 550914 - DNA, 15 bp, Homo sapiens
acgttgttgttaacc

SEQ ID NO: 550915 - DNA, 15 bp, Homo sapiens
cgttgttgttaaccc

SEQ ID NO: 550916 - DNA, 15 bp, Homo sapiens
gttgttgttaaccca

SEQ ID NO: 550917 - DNA, 15 bp, Homo sapiens
ttgttgttaacccag

SEQ ID NO: 550918 - DNA, 15 bp, Homo sapiens
tgttgttaacccaga

SEQ ID NO: 550919 - DNA, 15 bp, Homo sapiens
gttgttaacccagag

SEQ ID NO: 550920 - DNA, 15 bp, Homo sapiens
ttgttaacccagagg

SEQ ID NO: 550921 - DNA, 15 bp, Homo sapiens
tgttaacccagaggg

SEQ ID NO: 550922 - DNA, 15 bp, Homo sapiens
gttaacccagaggga

SEQ ID NO: 550923 - DNA, 15 bp, Homo sapiens
ttaacccagagggaa

SEQ ID NO: 550924 - DNA, 15 bp, Homo sapiens
taacccagagggaaa

SEQ ID NO: 550925 - DNA, 15 bp, Homo sapiens
aacccagagggaaaa

SEQ ID NO: 550926 - DNA, 15 bp, Homo sapiens
acccagagggaaaaa

SEQ ID NO: 550927 - DNA, 15 bp, Homo sapiens
cccagagggaaaaag

SEQ ID NO: 550928 - DNA, 15 bp, Homo sapiens
ccagagggaaaaagg

SEQ ID NO: 550929 - DNA, 15 bp, Homo sapiens
cagagggaaaaaggg

SEQ ID NO: 550930 - DNA, 15 bp, Homo sapiens
agagggaaaaaggga

SEQ ID NO: 550931 - DNA, 15 bp, Homo sapiens
gagggaaaaagggaa

SEQ ID NO: 550932 - DNA, 15 bp, Homo sapiens
agggaaaaagggaag

SEQ ID NO: 550933 - DNA, 15 bp, Homo sapiens
gggaaaaagggaaga

SEQ ID NO: 550934 - DNA, 15 bp, Homo sapiens
ggaaaaagggaagag

SEQ ID NO: 550935 - DNA, 15 bp, Homo sapiens
gaaaaagggaagagc

SEQ ID NO: 550936 - DNA, 15 bp, Homo sapiens
aaaaagggaagagct

SEQ ID NO: 550937 - DNA, 15 bp, Homo sapiens
aaaagggaagagctc

SEQ ID NO: 550938 - DNA, 15 bp, Homo sapiens
aaagggaagagctcc

SEQ ID NO: 550939 - DNA, 15 bp, Homo sapiens
aagggaagagctccc

SEQ ID NO: 550940 - DNA, 15 bp, Homo sapiens
agggaagagctccca

SEQ ID NO: 550941 - DNA, 15 bp, Homo sapiens
gggaagagctcccag

SEQ ID NO: 550942 - DNA, 15 bp, Homo sapiens
ggaagagctcccagg

SEQ ID NO: 550943 - DNA, 15 bp, Homo sapiens
gaagagctcccaggc

SEQ ID NO: 550944 - DNA, 15 bp, Homo sapiens
aagagctcccaggca

SEQ ID NO: 550945 - DNA, 15 bp, Homo sapiens
agagctcccaggcac

SEQ ID NO: 550946 - DNA, 15 bp, Homo sapiens
gagctcccaggcacg

SEQ ID NO: 550947 - DNA, 15 bp, Homo sapiens
agctcccaggcacgt

SEQ ID NO: 550948 - DNA, 15 bp, Homo sapiens
gctcccaggcacgtt

SEQ ID NO: 550949 - DNA, 15 bp, Homo sapiens
ctcccaggcacgttg

SEQ ID NO: 550950 - DNA, 15 bp, Homo sapiens
tcccaggcacgttgg

SEQ ID NO: 550951 - DNA, 15 bp, Homo sapiens
cccaggcacgttggc

SEQ ID NO: 550952 - DNA, 15 bp, Homo sapiens
ccaggcacgttggca

SEQ ID NO: 550953 - DNA, 15 bp, Homo sapiens
caggcacgttggcac

SEQ ID NO: 550954 - DNA, 15 bp, Homo sapiens
aggcacgttggcacg

SEQ ID NO: 550955 - DNA, 15 bp, Homo sapiens
ggcacgttggcacgc

SEQ ID NO: 550956 - DNA, 15 bp, Homo sapiens
gcacgttggcacgcc

SEQ ID NO: 550957 - DNA, 15 bp, Homo sapiens
cacgttggcacgcca

SEQ ID NO: 550958 - DNA, 15 bp, Homo sapiens
acgttggcacgccag

SEQ ID NO: 550959 - DNA, 15 bp, Homo sapiens
cgttggcacgccagc

SEQ ID NO: 550960 - DNA, 15 bp, Homo sapiens
gttggcacgccagca

SEQ ID NO: 550961 - DNA, 15 bp, Homo sapiens
ttggcacgccagcat

SEQ ID NO: 550962 - DNA, 15 bp, Homo sapiens
tggcacgccagcatc

SEQ ID NO: 550963 - DNA, 15 bp, Homo sapiens
ggcacgccagcatcc

SEQ ID NO: 550964 - DNA, 15 bp, Homo sapiens
gcacgccagcatccc

SEQ ID NO: 550965 - DNA, 15 bp, Homo sapiens
cacgccagcatcccc

SEQ ID NO: 550966 - DNA, 15 bp, Homo sapiens
acgccagcatcccca

SEQ ID NO: 550967 - DNA, 15 bp, Homo sapiens
cgccagcatccccag

SEQ ID NO: 550968 - DNA, 15 bp, Homo sapiens
gccagcatccccagg

SEQ ID NO: 550969 - DNA, 15 bp, Homo sapiens
ccagcatccccaggc

SEQ ID NO: 550970 - DNA, 15 bp, Homo sapiens
cagcatccccaggct

SEQ ID NO: 550971 - DNA, 15 bp, Homo sapiens
agcatccccaggctg

SEQ ID NO: 550972 - DNA, 15 bp, Homo sapiens
gcatccccaggctgg

SEQ ID NO: 550973 - DNA, 15 bp, Homo sapiens
catccccaggctggg

SEQ ID NO: 550974 - DNA, 15 bp, Homo sapiens
atccccaggctgggt

SEQ ID NO: 550975 - DNA, 15 bp, Homo sapiens
tccccaggctgggtt

SEQ ID NO: 550976 - DNA, 15 bp, Homo sapiens
ccccaggctgggttt

SEQ ID NO: 550977 - DNA, 15 bp, Homo sapiens
cccaggctgggtttg

SEQ ID NO: 550978 - DNA, 15 bp, Homo sapiens
ccaggctgggtttga

SEQ ID NO: 550979 - DNA, 15 bp, Homo sapiens
caggctgggtttgac

SEQ ID NO: 550980 - DNA, 15 bp, Homo sapiens
aggctgggtttgaca

SEQ ID NO: 550981 - DNA, 15 bp, Homo sapiens
ggctgggtttgacat

SEQ ID NO: 550982 - DNA, 15 bp, Homo sapiens
gctgggtttgacatt

SEQ ID NO: 550983 - DNA, 15 bp, Homo sapiens
ctgggtttgacattt

SEQ ID NO: 550984 - DNA, 15 bp, Homo sapiens
tgggtttgacattta

SEQ ID NO: 550985 - DNA, 15 bp, Homo sapiens
gggtttgacatttaa

SEQ ID NO: 550986 - DNA, 15 bp, Homo sapiens
ggtttgacatttaag

SEQ ID NO: 550987 - DNA, 15 bp, Homo sapiens
gtttgacatttaagg

SEQ ID NO: 550988 - DNA, 15 bp, Homo sapiens
tttgacatttaagga

SEQ ID NO: 550989 - DNA, 15 bp, Homo sapiens
ttgacatttaaggag

SEQ ID NO: 550990 - DNA, 15 bp, Homo sapiens
tgacatttaaggagc

SEQ ID NO: 550991 - DNA, 15 bp, Homo sapiens
gacatttaaggagca

SEQ ID NO: 550992 - DNA, 15 bp, Homo sapiens
acatttaaggagcac

SEQ ID NO: 550993 - DNA, 15 bp, Homo sapiens
catttaaggagcacc

SEQ ID NO: 550994 - DNA, 15 bp, Homo sapiens
atttaaggagcacca

SEQ ID NO: 550995 - DNA, 15 bp, Homo sapiens
tttaaggagcaccag

SEQ ID NO: 550996 - DNA, 15 bp, Homo sapiens
ttaaggagcaccagc

SEQ ID NO: 550997 - DNA, 15 bp, Homo sapiens
taaggagcaccagca

SEQ ID NO: 550998 - DNA, 15 bp, Homo sapiens
aaggagcaccagcaa

SEQ ID NO: 550999 - DNA, 15 bp, Homo sapiens
aggagcaccagcaat

SEQ ID NO: 551000 - DNA, 15 bp, Homo sapiens
ggagcaccagcaatg

SEQ ID NO: 551001 - DNA, 15 bp, Homo sapiens
gagcaccagcaatga

SEQ ID NO: 551002 - DNA, 15 bp, Homo sapiens
agcaccagcaatgag

SEQ ID NO: 551003 - DNA, 15 bp, Homo sapiens
gcaccagcaatgagt

SEQ ID NO: 551004 - DNA, 15 bp, Homo sapiens
caccagcaatgagtt

SEQ ID NO: 551005 - DNA, 15 bp, Homo sapiens
accagcaatgagtta

SEQ ID NO: 551006 - DNA, 15 bp, Homo sapiens
ccagcaatgagttaa

SEQ ID NO: 551007 - DNA, 15 bp, Homo sapiens
cagcaatgagttaag

SEQ ID NO: 551008 - DNA, 15 bp, Homo sapiens
agcaatgagttaagg

SEQ ID NO: 551009 - DNA, 15 bp, Homo sapiens
gcaatgagttaaggg

SEQ ID NO: 551010 - DNA, 15 bp, Homo sapiens
caatgagttaagggg

SEQ ID NO: 551011 - DNA, 15 bp, Homo sapiens
aatgagttaaggggc

SEQ ID NO: 551012 - DNA, 15 bp, Homo sapiens
atgagttaaggggct

SEQ ID NO: 551013 - DNA, 15 bp, Homo sapiens
tgagttaaggggcta

SEQ ID NO: 551014 - DNA, 15 bp, Homo sapiens
gagttaaggggctaa

SEQ ID NO: 551015 - DNA, 15 bp, Homo sapiens
agttaaggggctaaa

SEQ ID NO: 551016 - DNA, 15 bp, Homo sapiens
gttaaggggctaaag

SEQ ID NO: 551017 - DNA, 15 bp, Homo sapiens
ttaaggggctaaagg

SEQ ID NO: 551018 - DNA, 15 bp, Homo sapiens
taaggggctaaaggc

SEQ ID NO: 551019 - DNA, 15 bp, Homo sapiens
aaggggctaaaggcc

SEQ ID NO: 551020 - DNA, 15 bp, Homo sapiens
aggggctaaaggccc

SEQ ID NO: 551021 - DNA, 15 bp, Homo sapiens
ggggctaaaggccca

SEQ ID NO: 551022 - DNA, 15 bp, Homo sapiens
gggctaaaggcccac

SEQ ID NO: 551023 - DNA, 15 bp, Homo sapiens
ggctaaaggcccaca

SEQ ID NO: 551024 - DNA, 15 bp, Homo sapiens
gctaaaggcccacag

SEQ ID NO: 551025 - DNA, 15 bp, Homo sapiens
ctaaaggcccacagt

SEQ ID NO: 551026 - DNA, 15 bp, Homo sapiens
taaaggcccacagtc

SEQ ID NO: 551027 - DNA, 15 bp, Homo sapiens
aaaggcccacagtct

SEQ ID NO: 551028 - DNA, 15 bp, Homo sapiens
aaggcccacagtctg

SEQ ID NO: 551029 - DNA, 15 bp, Homo sapiens
aggcccacagtctgc

SEQ ID NO: 551030 - DNA, 15 bp, Homo sapiens
ggcccacagtctgca

SEQ ID NO: 551031 - DNA, 15 bp, Homo sapiens
gcccacagtctgcaa

SEQ ID NO: 551032 - DNA, 15 bp, Homo sapiens
cccacagtctgcaag

SEQ ID NO: 551033 - DNA, 15 bp, Homo sapiens
ccacagtctgcaagc

SEQ ID NO: 551034 - DNA, 15 bp, Homo sapiens
cacagtctgcaagct

SEQ ID NO: 551035 - DNA, 15 bp, Homo sapiens
acagtctgcaagctc

SEQ ID NO: 551036 - DNA, 15 bp, Homo sapiens
cagtctgcaagctct

SEQ ID NO: 551037 - DNA, 15 bp, Homo sapiens
agtctgcaagctctg

SEQ ID NO: 551038 - DNA, 15 bp, Homo sapiens
gtctgcaagctctgg

SEQ ID NO: 551039 - DNA, 15 bp, Homo sapiens
tctgcaagctctggt

SEQ ID NO: 551040 - DNA, 15 bp, Homo sapiens
ctgcaagctctggtt

SEQ ID NO: 551041 - DNA, 15 bp, Homo sapiens
tgcaagctctggttt

SEQ ID NO: 551042 - DNA, 15 bp, Homo sapiens
gcaagctctggttta

SEQ ID NO: 551043 - DNA, 15 bp, Homo sapiens
caagctctggtttaa

SEQ ID NO: 551044 - DNA, 15 bp, Homo sapiens
aagctctggtttaaa

SEQ ID NO: 551045 - DNA, 15 bp, Homo sapiens
agctctggtttaaaa

SEQ ID NO: 551046 - DNA, 15 bp, Homo sapiens
gctctggtttaaaat

SEQ ID NO: 551047 - DNA, 15 bp, Homo sapiens
ctctggtttaaaata

SEQ ID NO: 551048 - DNA, 15 bp, Homo sapiens
tctggtttaaaatac

SEQ ID NO: 551049 - DNA, 15 bp, Homo sapiens
ctggtttaaaataca

SEQ ID NO: 551050 - DNA, 15 bp, Homo sapiens
tggtttaaaatacag

SEQ ID NO: 551051 - DNA, 15 bp, Homo sapiens
ggtttaaaatacagt

SEQ ID NO: 551052 - DNA, 15 bp, Homo sapiens
gtttaaaatacagtc

SEQ ID NO: 551053 - DNA, 15 bp, Homo sapiens
tttaaaatacagtca

SEQ ID NO: 551054 - DNA, 15 bp, Homo sapiens
ttaaaatacagtcac

SEQ ID NO: 551055 - DNA, 15 bp, Homo sapiens
taaaatacagtcact

SEQ ID NO: 551056 - DNA, 15 bp, Homo sapiens
aaaatacagtcactc

SEQ ID NO: 551057 - DNA, 15 bp, Homo sapiens
aaatacagtcactca

SEQ ID NO: 551058 - DNA, 15 bp, Homo sapiens
aatacagtcactcag

SEQ ID NO: 551059 - DNA, 15 bp, Homo sapiens
atacagtcactcagc

SEQ ID NO: 551060 - DNA, 15 bp, Homo sapiens
tacagtcactcagcc

SEQ ID NO: 551061 - DNA, 15 bp, Homo sapiens
acagtcactcagcca

SEQ ID NO: 551062 - DNA, 15 bp, Homo sapiens
cagtcactcagccag

SEQ ID NO: 551063 - DNA, 15 bp, Homo sapiens
agtcactcagccagg

SEQ ID NO: 551064 - DNA, 15 bp, Homo sapiens
gtcactcagccaggc

SEQ ID NO: 551065 - DNA, 15 bp, Homo sapiens
tcactcagccaggca

SEQ ID NO: 551066 - DNA, 15 bp, Homo sapiens
cactcagccaggcat

SEQ ID NO: 551067 - DNA, 15 bp, Homo sapiens
actcagccaggcatg

SEQ ID NO: 551068 - DNA, 15 bp, Homo sapiens
ctcagccaggcatgg

SEQ ID NO: 551069 - DNA, 15 bp, Homo sapiens
tcagccaggcatggt

SEQ ID NO: 551070 - DNA, 15 bp, Homo sapiens
cagccaggcatggtg

SEQ ID NO: 551071 - DNA, 15 bp, Homo sapiens
agccaggcatggtgg

SEQ ID NO: 551072 - DNA, 15 bp, Homo sapiens
gccaggcatggtggc

SEQ ID NO: 551073 - DNA, 15 bp, Homo sapiens
ccaggcatggtggct

SEQ ID NO: 551074 - DNA, 15 bp, Homo sapiens
caggcatggtggctc

SEQ ID NO: 551075 - DNA, 15 bp, Homo sapiens
aggcatggtggctca

SEQ ID NO: 551076 - DNA, 15 bp, Homo sapiens
ggcatggtggctcat

SEQ ID NO: 551077 - DNA, 15 bp, Homo sapiens
gcatggtggctcatg

SEQ ID NO: 551078 - DNA, 15 bp, Homo sapiens
catggtggctcatgc

SEQ ID NO: 551079 - DNA, 15 bp, Homo sapiens
atggtggctcatgct

SEQ ID NO: 551080 - DNA, 15 bp, Homo sapiens
tggtggctcatgctt

SEQ ID NO: 551081 - DNA, 15 bp, Homo sapiens
ggtggctcatgctta

SEQ ID NO: 551082 - DNA, 15 bp, Homo sapiens
gtggctcatgcttat

SEQ ID NO: 551083 - DNA, 15 bp, Homo sapiens
tggctcatgcttata

SEQ ID NO: 551084 - DNA, 15 bp, Homo sapiens
ggctcatgcttataa

SEQ ID NO: 551085 - DNA, 15 bp, Homo sapiens
gctcatgcttataat

SEQ ID NO: 551086 - DNA, 15 bp, Homo sapiens
ctcatgcttataatc

SEQ ID NO: 551087 - DNA, 15 bp, Homo sapiens
tcatgcttataatcc

SEQ ID NO: 551088 - DNA, 15 bp, Homo sapiens
catgcttataatccc

SEQ ID NO: 551089 - DNA, 15 bp, Homo sapiens
atgcttataatccca

SEQ ID NO: 551090 - DNA, 15 bp, Homo sapiens
tgcttataatcccag

SEQ ID NO: 551091 - DNA, 15 bp, Homo sapiens
gcttataatcccagc

SEQ ID NO: 551092 - DNA, 15 bp, Homo sapiens
cttataatcccagca

SEQ ID NO: 551093 - DNA, 15 bp, Homo sapiens
ttataatcccagcac

SEQ ID NO: 551094 - DNA, 15 bp, Homo sapiens
tataatcccagcact

SEQ ID NO: 551095 - DNA, 15 bp, Homo sapiens
ataatcccagcactt

SEQ ID NO: 551096 - DNA, 15 bp, Homo sapiens
taatcccagcacttt

SEQ ID NO: 551097 - DNA, 15 bp, Homo sapiens
aatcccagcactttg

SEQ ID NO: 551098 - DNA, 15 bp, Homo sapiens
atcccagcactttgg

SEQ ID NO: 551099 - DNA, 15 bp, Homo sapiens
tcccagcactttggg

SEQ ID NO: 551100 - DNA, 15 bp, Homo sapiens
cccagcactttggga

SEQ ID NO: 551101 - DNA, 15 bp, Homo sapiens
gcactttgggaggct

SEQ ID NO: 551102 - DNA, 15 bp, Homo sapiens
cactttgggaggctg

SEQ ID NO: 551103 - DNA, 15 bp, Homo sapiens
actttgggaggctga

SEQ ID NO: 551104 - DNA, 15 bp, Homo sapiens
ctttgggaggctgag

SEQ ID NO: 551105 - DNA, 15 bp, Homo sapiens
tttgggaggctgagg

SEQ ID NO: 551106 - DNA, 15 bp, Homo sapiens
tgggaggctgaggcg

SEQ ID NO: 551107 - DNA, 15 bp, Homo sapiens
gggaggctgaggcgg

SEQ ID NO: 551108 - DNA, 15 bp, Homo sapiens
ggaggctgaggcggg

SEQ ID NO: 551109 - DNA, 15 bp, Homo sapiens
gaggctgaggcgggc

SEQ ID NO: 551110 - DNA, 15 bp, Homo sapiens
aggctgaggcgggcg

SEQ ID NO: 551111 - DNA, 15 bp, Homo sapiens
ggctgaggcgggcgg

SEQ ID NO: 551112 - DNA, 15 bp, Homo sapiens
gctgaggcgggcgga

SEQ ID NO: 551113 - DNA, 15 bp, Homo sapiens
ctgaggcgggcggat

SEQ ID NO: 551114 - DNA, 15 bp, Homo sapiens
tgaggcgggcggatc

SEQ ID NO: 551115 - DNA, 15 bp, Homo sapiens
gaggcgggcggatca

SEQ ID NO: 551116 - DNA, 15 bp, Homo sapiens
aggcgggcggatcac

SEQ ID NO: 551117 - DNA, 15 bp, Homo sapiens
ggcgggcggatcact

SEQ ID NO: 551118 - DNA, 15 bp, Homo sapiens
gcgggcggatcactt

SEQ ID NO: 551119 - DNA, 15 bp, Homo sapiens
cgggcggatcacttg

SEQ ID NO: 551120 - DNA, 15 bp, Homo sapiens
gggcggatcacttga

SEQ ID NO: 551121 - DNA, 15 bp, Homo sapiens
ggcggatcacttgag

SEQ ID NO: 551122 - DNA, 15 bp, Homo sapiens
gcggatcacttgagg

SEQ ID NO: 551123 - DNA, 15 bp, Homo sapiens
cggatcacttgaggt

SEQ ID NO: 551124 - DNA, 15 bp, Homo sapiens
ggatcacttgaggtc

SEQ ID NO: 551125 - DNA, 15 bp, Homo sapiens
gatcacttgaggtca

SEQ ID NO: 551126 - DNA, 15 bp, Homo sapiens
tgaggtcaggagttg

SEQ ID NO: 551127 - DNA, 15 bp, Homo sapiens
gaggtcaggagttgg

SEQ ID NO: 551128 - DNA, 15 bp, Homo sapiens
aggtcaggagttgga

SEQ ID NO: 551129 - DNA, 15 bp, Homo sapiens
ggtcaggagttggag

SEQ ID NO: 551130 - DNA, 15 bp, Homo sapiens
gtcaggagttggaga

SEQ ID NO: 551131 - DNA, 15 bp, Homo sapiens
tcaggagttggagac

SEQ ID NO: 551132 - DNA, 15 bp, Homo sapiens
caggagttggagacc

SEQ ID NO: 551133 - DNA, 15 bp, Homo sapiens
aggagttggagacca

SEQ ID NO: 551134 - DNA, 15 bp, Homo sapiens
ggagttggagaccag

SEQ ID NO: 551135 - DNA, 15 bp, Homo sapiens
gagttggagaccagg

SEQ ID NO: 551136 - DNA, 15 bp, Homo sapiens
agttggagaccaggc

SEQ ID NO: 551137 - DNA, 15 bp, Homo sapiens
gttggagaccaggct

SEQ ID NO: 551138 - DNA, 15 bp, Homo sapiens
ttggagaccaggctg

SEQ ID NO: 551139 - DNA, 15 bp, Homo sapiens
tggagaccaggctgg

SEQ ID NO: 551140 - DNA, 15 bp, Homo sapiens
ggagaccaggctggc

SEQ ID NO: 551141 - DNA, 15 bp, Homo sapiens
gagaccaggctggca

SEQ ID NO: 551142 - DNA, 15 bp, Homo sapiens
agaccaggctggcaa

SEQ ID NO: 551143 - DNA, 15 bp, Homo sapiens
gaccaggctggcaaa

SEQ ID NO: 551144 - DNA, 15 bp, Homo sapiens
accaggctggcaaac

SEQ ID NO: 551145 - DNA, 15 bp, Homo sapiens
ccaggctggcaaaca

SEQ ID NO: 551146 - DNA, 15 bp, Homo sapiens
caggctggcaaacat

SEQ ID NO: 551147 - DNA, 15 bp, Homo sapiens
aggctggcaaacata

SEQ ID NO: 551148 - DNA, 15 bp, Homo sapiens
ggctggcaaacataa

SEQ ID NO: 551149 - DNA, 15 bp, Homo sapiens
gctggcaaacataac

SEQ ID NO: 551150 - DNA, 15 bp, Homo sapiens
ctggcaaacataacg

SEQ ID NO: 551151 - DNA, 15 bp, Homo sapiens
tggcaaacataacga

SEQ ID NO: 551152 - DNA, 15 bp, Homo sapiens
ggcaaacataacgaa

SEQ ID NO: 551153 - DNA, 15 bp, Homo sapiens
gcaaacataacgaaa

SEQ ID NO: 551154 - DNA, 15 bp, Homo sapiens
caaacataacgaaac

SEQ ID NO: 551155 - DNA, 15 bp, Homo sapiens
aaacataacgaaacc

SEQ ID NO: 551156 - DNA, 15 bp, Homo sapiens
aacataacgaaaccc

SEQ ID NO: 551157 - DNA, 15 bp, Homo sapiens
acataacgaaaccct

SEQ ID NO: 551158 - DNA, 15 bp, Homo sapiens
cataacgaaaccctg

SEQ ID NO: 551159 - DNA, 15 bp, Homo sapiens
ataacgaaaccctgt

SEQ ID NO: 551160 - DNA, 15 bp, Homo sapiens
taacgaaaccctgtc

SEQ ID NO: 551161 - DNA, 15 bp, Homo sapiens
aacgaaaccctgtct

SEQ ID NO: 551162 - DNA, 15 bp, Homo sapiens
acgaaaccctgtctc

SEQ ID NO: 551163 - DNA, 15 bp, Homo sapiens
cgaaaccctgtctct

SEQ ID NO: 551164 - DNA, 15 bp, Homo sapiens
gaaaccctgtctcta

SEQ ID NO: 551165 - DNA, 15 bp, Homo sapiens
aaaccctgtctctac

SEQ ID NO: 551166 - DNA, 15 bp, Homo sapiens
aaccctgtctctact

SEQ ID NO: 551167 - DNA, 15 bp, Homo sapiens
accctgtctctacta

SEQ ID NO: 551168 - DNA, 15 bp, Homo sapiens
ccctgtctctactaa

SEQ ID NO: 551169 - DNA, 15 bp, Homo sapiens
cctgtctctactaaa

SEQ ID NO: 551170 - DNA, 15 bp, Homo sapiens
ctgtctctactaaaa

SEQ ID NO: 551171 - DNA, 15 bp, Homo sapiens
tgtctctactaaaat

SEQ ID NO: 551172 - DNA, 15 bp, Homo sapiens
gtctctactaaaata

SEQ ID NO: 551173 - DNA, 15 bp, Homo sapiens
tctctactaaaatac

SEQ ID NO: 551174 - DNA, 15 bp, Homo sapiens
ctctactaaaataca

SEQ ID NO: 551175 - DNA, 15 bp, Homo sapiens
tctactaaaatacaa

SEQ ID NO: 551176 - DNA, 15 bp, Homo sapiens
ctactaaaatacaaa

SEQ ID NO: 551177 - DNA, 15 bp, Homo sapiens
tactaaaatacaaaa

SEQ ID NO: 551178 - DNA, 15 bp, Homo sapiens
actaaaatacaaaaa

SEQ ID NO: 551179 - DNA, 15 bp, Homo sapiens
ctaaaatacaaaaat

SEQ ID NO: 551180 - DNA, 15 bp, Homo sapiens
taaaatacaaaaatt

SEQ ID NO: 551181 - DNA, 15 bp, Homo sapiens
atacaaaaattagcc

SEQ ID NO: 551182 - DNA, 15 bp, Homo sapiens
tacaaaaattagcca

SEQ ID NO: 551183 - DNA, 15 bp, Homo sapiens
acaaaaattagccag

SEQ ID NO: 551184 - DNA, 15 bp, Homo sapiens
caaaaattagccagg

SEQ ID NO: 551185 - DNA, 15 bp, Homo sapiens
aaaaattagccaggt

SEQ ID NO: 551186 - DNA, 15 bp, Homo sapiens
aaaattagccaggtg

SEQ ID NO: 551187 - DNA, 15 bp, Homo sapiens
aaattagccaggtgt

SEQ ID NO: 551188 - DNA, 15 bp, Homo sapiens
aattagccaggtgtg

SEQ ID NO: 551189 - DNA, 15 bp, Homo sapiens
attagccaggtgtgg

SEQ ID NO: 551190 - DNA, 15 bp, Homo sapiens
ttagccaggtgtggt

SEQ ID NO: 551191 - DNA, 15 bp, Homo sapiens
tagccaggtgtggtc

SEQ ID NO: 551192 - DNA, 15 bp, Homo sapiens
agccaggtgtggtca

SEQ ID NO: 551193 - DNA, 15 bp, Homo sapiens
gccaggtgtggtcat

SEQ ID NO: 551194 - DNA, 15 bp, Homo sapiens
ccaggtgtggtcatg

SEQ ID NO: 551195 - DNA, 15 bp, Homo sapiens
caggtgtggtcatgg

SEQ ID NO: 551196 - DNA, 15 bp, Homo sapiens
aggtgtggtcatggg

SEQ ID NO: 551197 - DNA, 15 bp, Homo sapiens
ggtgtggtcatgggc

SEQ ID NO: 551198 - DNA, 15 bp, Homo sapiens
gtgtggtcatgggcg

SEQ ID NO: 551199 - DNA, 15 bp, Homo sapiens
tgtggtcatgggcgc

SEQ ID NO: 551200 - DNA, 15 bp, Homo sapiens
gtggtcatgggcgcc

SEQ ID NO: 551201 - DNA, 15 bp, Homo sapiens
tggtcatgggcgcct

SEQ ID NO: 551202 - DNA, 15 bp, Homo sapiens
ggtcatgggcgcctg

SEQ ID NO: 551203 - DNA, 15 bp, Homo sapiens
gtcatgggcgcctgt

SEQ ID NO: 551204 - DNA, 15 bp, Homo sapiens
tcatgggcgcctgta

SEQ ID NO: 551205 - DNA, 15 bp, Homo sapiens
catgggcgcctgtaa

SEQ ID NO: 551206 - DNA, 15 bp, Homo sapiens
atgggcgcctgtaat

SEQ ID NO: 551207 - DNA, 15 bp, Homo sapiens
tgggcgcctgtaatc

SEQ ID NO: 551208 - DNA, 15 bp, Homo sapiens
gggcgcctgtaatcc

SEQ ID NO: 551209 - DNA, 15 bp, Homo sapiens
ggcgcctgtaatccc

SEQ ID NO: 551210 - DNA, 15 bp, Homo sapiens
gcgcctgtaatccca

SEQ ID NO: 551211 - DNA, 15 bp, Homo sapiens
cgcctgtaatcccat

SEQ ID NO: 551212 - DNA, 15 bp, Homo sapiens
gcctgtaatcccatc

SEQ ID NO: 551213 - DNA, 15 bp, Homo sapiens
cctgtaatcccatct

SEQ ID NO: 551214 - DNA, 15 bp, Homo sapiens
ctgtaatcccatcta

SEQ ID NO: 551215 - DNA, 15 bp, Homo sapiens
tgtaatcccatctac

SEQ ID NO: 551216 - DNA, 15 bp, Homo sapiens
gtaatcccatctact

SEQ ID NO: 551217 - DNA, 15 bp, Homo sapiens
taatcccatctactc

SEQ ID NO: 551218 - DNA, 15 bp, Homo sapiens
aatcccatctactcg

SEQ ID NO: 551219 - DNA, 15 bp, Homo sapiens
atcccatctactcgg

SEQ ID NO: 551220 - DNA, 15 bp, Homo sapiens
tcccatctactcggg

SEQ ID NO: 551221 - DNA, 15 bp, Homo sapiens
cccatctactcggga

SEQ ID NO: 551222 - DNA, 15 bp, Homo sapiens
ccatctactcgggag

SEQ ID NO: 551223 - DNA, 15 bp, Homo sapiens
catctactcgggagg

SEQ ID NO: 551224 - DNA, 15 bp, Homo sapiens
atctactcgggaggc

SEQ ID NO: 551225 - DNA, 15 bp, Homo sapiens
tctactcgggaggct

SEQ ID NO: 551226 - DNA, 15 bp, Homo sapiens
ctactcgggaggctg

SEQ ID NO: 551227 - DNA, 15 bp, Homo sapiens
tactcgggaggctga

SEQ ID NO: 551228 - DNA, 15 bp, Homo sapiens
actcgggaggctgag

SEQ ID NO: 551229 - DNA, 15 bp, Homo sapiens
ctcgggaggctgagg

SEQ ID NO: 551230 - DNA, 15 bp, Homo sapiens
tcgggaggctgaggc

SEQ ID NO: 551231 - DNA, 15 bp, Homo sapiens
cgggaggctgaggca

SEQ ID NO: 551232 - DNA, 15 bp, Homo sapiens
aatcgcttgaacccg

SEQ ID NO: 551233 - DNA, 15 bp, Homo sapiens
atcgcttgaacccgg

SEQ ID NO: 551234 - DNA, 15 bp, Homo sapiens
tcgcttgaacccggg

SEQ ID NO: 551235 - DNA, 15 bp, Homo sapiens
cgcttgaacccggga

SEQ ID NO: 551236 - DNA, 15 bp, Homo sapiens
gcttgaacccgggag

SEQ ID NO: 551237 - DNA, 15 bp, Homo sapiens
cttgaacccgggagg

SEQ ID NO: 551238 - DNA, 15 bp, Homo sapiens
ttgaacccgggaggc

SEQ ID NO: 551239 - DNA, 15 bp, Homo sapiens
tgaacccgggaggca

SEQ ID NO: 551240 - DNA, 15 bp, Homo sapiens
gaacccgggaggcag

SEQ ID NO: 551241 - DNA, 15 bp, Homo sapiens
aacccgggaggcaga

SEQ ID NO: 551242 - DNA, 15 bp, Homo sapiens
acccgggaggcagag

SEQ ID NO: 551243 - DNA, 15 bp, Homo sapiens
cccgggaggcagagg

SEQ ID NO: 551244 - DNA, 15 bp, Homo sapiens
ccgggaggcagaggt

SEQ ID NO: 551245 - DNA, 15 bp, Homo sapiens
cgggaggcagaggtt

SEQ ID NO: 551246 - DNA, 15 bp, Homo sapiens
gggaggcagaggttc

SEQ ID NO: 551247 - DNA, 15 bp, Homo sapiens
ggaggcagaggttcc

SEQ ID NO: 551248 - DNA, 15 bp, Homo sapiens
gaggcagaggttcca

SEQ ID NO: 551249 - DNA, 15 bp, Homo sapiens
aggcagaggttccat

SEQ ID NO: 551250 - DNA, 15 bp, Homo sapiens
ggcagaggttccatt

SEQ ID NO: 551251 - DNA, 15 bp, Homo sapiens
gcagaggttccattg

SEQ ID NO: 551252 - DNA, 15 bp, Homo sapiens
cagaggttccattga

SEQ ID NO: 551253 - DNA, 15 bp, Homo sapiens
agaggttccattgag

SEQ ID NO: 551254 - DNA, 15 bp, Homo sapiens
gaggttccattgagc

SEQ ID NO: 551255 - DNA, 15 bp, Homo sapiens
aggttccattgagct

SEQ ID NO: 551256 - DNA, 15 bp, Homo sapiens
ggttccattgagctg

SEQ ID NO: 551257 - DNA, 15 bp, Homo sapiens
gttccattgagctga

SEQ ID NO: 551258 - DNA, 15 bp, Homo sapiens
ttccattgagctgag

SEQ ID NO: 551259 - DNA, 15 bp, Homo sapiens
tccattgagctgaga

SEQ ID NO: 551260 - DNA, 15 bp, Homo sapiens
ccattgagctgagat

SEQ ID NO: 551261 - DNA, 15 bp, Homo sapiens
cattgagctgagatc

SEQ ID NO: 551262 - DNA, 15 bp, Homo sapiens
attgagctgagatcg

SEQ ID NO: 551263 - DNA, 15 bp, Homo sapiens
ttgagctgagatcgt

SEQ ID NO: 551264 - DNA, 15 bp, Homo sapiens
tgagctgagatcgtg

SEQ ID NO: 551265 - DNA, 15 bp, Homo sapiens
gagctgagatcgtgc

SEQ ID NO: 551266 - DNA, 15 bp, Homo sapiens
agctgagatcgtgcc

SEQ ID NO: 551267 - DNA, 15 bp, Homo sapiens
gctgagatcgtgcca

SEQ ID NO: 551268 - DNA, 15 bp, Homo sapiens
ctgagatcgtgccag

SEQ ID NO: 551269 - DNA, 15 bp, Homo sapiens
tgagatcgtgccagt

SEQ ID NO: 551270 - DNA, 15 bp, Homo sapiens
gagatcgtgccagtg

SEQ ID NO: 551271 - DNA, 15 bp, Homo sapiens
agatcgtgccagtgc

SEQ ID NO: 551272 - DNA, 15 bp, Homo sapiens
gatcgtgccagtgca

SEQ ID NO: 551273 - DNA, 15 bp, Homo sapiens
atcgtgccagtgcac

SEQ ID NO: 551274 - DNA, 15 bp, Homo sapiens
tcgtgccagtgcact

SEQ ID NO: 551275 - DNA, 15 bp, Homo sapiens
cgtgccagtgcactc

SEQ ID NO: 551276 - DNA, 15 bp, Homo sapiens
gtgccagtgcactcc

SEQ ID NO: 551277 - DNA, 15 bp, Homo sapiens
tgccagtgcactcca

SEQ ID NO: 551278 - DNA, 15 bp, Homo sapiens
gccagtgcactccag

SEQ ID NO: 551279 - DNA, 15 bp, Homo sapiens
ccagtgcactccagc

SEQ ID NO: 551280 - DNA, 15 bp, Homo sapiens
cagtgcactccagcc

SEQ ID NO: 551281 - DNA, 15 bp, Homo sapiens
agtgcactccagcct

SEQ ID NO: 551282 - DNA, 15 bp, Homo sapiens
gtgcactccagcctg

SEQ ID NO: 551283 - DNA, 15 bp, Homo sapiens
ctccagcctgggcag

SEQ ID NO: 551284 - DNA, 15 bp, Homo sapiens
tccagcctgggcagc

SEQ ID NO: 551285 - DNA, 15 bp, Homo sapiens
ccagcctgggcagca

SEQ ID NO: 551286 - DNA, 15 bp, Homo sapiens
cagcctgggcagcag

SEQ ID NO: 551287 - DNA, 15 bp, Homo sapiens
agcctgggcagcaga

SEQ ID NO: 551288 - DNA, 15 bp, Homo sapiens
gcctgggcagcagag

SEQ ID NO: 551289 - DNA, 15 bp, Homo sapiens
cctgggcagcagagt

SEQ ID NO: 551290 - DNA, 15 bp, Homo sapiens
ctgggcagcagagtg

SEQ ID NO: 551291 - DNA, 15 bp, Homo sapiens
tgggcagcagagtga

SEQ ID NO: 551292 - DNA, 15 bp, Homo sapiens
gggcagcagagtgag

SEQ ID NO: 551293 - DNA, 15 bp, Homo sapiens
ggcagcagagtgaga

SEQ ID NO: 551294 - DNA, 15 bp, Homo sapiens
gcagcagagtgagac

SEQ ID NO: 551295 - DNA, 15 bp, Homo sapiens
cagcagagtgagact

SEQ ID NO: 551296 - DNA, 15 bp, Homo sapiens
agcagagtgagactc

SEQ ID NO: 551297 - DNA, 15 bp, Homo sapiens
gcagagtgagactcc

SEQ ID NO: 551298 - DNA, 15 bp, Homo sapiens
cagagtgagactccg

SEQ ID NO: 551299 - DNA, 15 bp, Homo sapiens
agagtgagactccgt

SEQ ID NO: 551300 - DNA, 15 bp, Homo sapiens
gagtgagactccgtc

SEQ ID NO: 551301 - DNA, 15 bp, Homo sapiens
agtgagactccgtct

SEQ ID NO: 551302 - DNA, 15 bp, Homo sapiens
gtgagactccgtctc

SEQ ID NO: 551303 - DNA, 15 bp, Homo sapiens
tgagactccgtctca

SEQ ID NO: 551304 - DNA, 15 bp, Homo sapiens
actccgtctcaaaag

SEQ ID NO: 551305 - DNA, 15 bp, Homo sapiens
ctccgtctcaaaagt

SEQ ID NO: 551306 - DNA, 15 bp, Homo sapiens
tccgtctcaaaagta

SEQ ID NO: 551307 - DNA, 15 bp, Homo sapiens
ccgtctcaaaagtaa

SEQ ID NO: 551308 - DNA, 15 bp, Homo sapiens
cgtctcaaaagtaat

SEQ ID NO: 551309 - DNA, 15 bp, Homo sapiens
gtctcaaaagtaata

SEQ ID NO: 551310 - DNA, 15 bp, Homo sapiens
tctcaaaagtaataa

SEQ ID NO: 551311 - DNA, 15 bp, Homo sapiens
ctcaaaagtaataaa

SEQ ID NO: 551312 - DNA, 15 bp, Homo sapiens
tcaaaagtaataaat

SEQ ID NO: 551313 - DNA, 15 bp, Homo sapiens
caaaagtaataaata

SEQ ID NO: 551314 - DNA, 15 bp, Homo sapiens
aaaagtaataaataa

SEQ ID NO: 551315 - DNA, 15 bp, Homo sapiens
aaagtaataaataaa

SEQ ID NO: 551316 - DNA, 15 bp, Homo sapiens
aagtaataaataaat

SEQ ID NO: 551317 - DNA, 15 bp, Homo sapiens
agtaataaataaata

SEQ ID NO: 551318 - DNA, 15 bp, Homo sapiens
gtaataaataaataa

SEQ ID NO: 551319 - DNA, 15 bp, Homo sapiens
taataaataaataaa

SEQ ID NO: 551320 - DNA, 15 bp, Homo sapiens
aataaataaataaat

SEQ ID NO: 551321 - DNA, 15 bp, Homo sapiens
ataaataaataaata

SEQ ID NO: 551322 - DNA, 15 bp, Homo sapiens
taaataaataaataa

SEQ ID NO: 551323 - DNA, 15 bp, Homo sapiens
aaataaataaataaa

SEQ ID NO: 551324 - DNA, 15 bp, Homo sapiens
aataaataaataaaa

SEQ ID NO: 551325 - DNA, 15 bp, Homo sapiens
ataaataaataaaat

SEQ ID NO: 551326 - DNA, 15 bp, Homo sapiens
taaataaataaaata

SEQ ID NO: 551327 - DNA, 15 bp, Homo sapiens
aaataaataaaataa

SEQ ID NO: 551328 - DNA, 15 bp, Homo sapiens
aataaataaaataag

SEQ ID NO: 551329 - DNA, 15 bp, Homo sapiens
ataaataaaataaga

SEQ ID NO: 551330 - DNA, 15 bp, Homo sapiens
taaataaaataagac

SEQ ID NO: 551331 - DNA, 15 bp, Homo sapiens
aaataaaataagaca

SEQ ID NO: 551332 - DNA, 15 bp, Homo sapiens
aataaaataagacac

SEQ ID NO: 551333 - DNA, 15 bp, Homo sapiens
ataaaataagacaca

SEQ ID NO: 551334 - DNA, 15 bp, Homo sapiens
taaaataagacacag

SEQ ID NO: 551335 - DNA, 15 bp, Homo sapiens
aaaataagacacagt

SEQ ID NO: 551336 - DNA, 15 bp, Homo sapiens
aaataagacacagtc

SEQ ID NO: 551337 - DNA, 15 bp, Homo sapiens
aataagacacagtca

SEQ ID NO: 551338 - DNA, 15 bp, Homo sapiens
ataagacacagtcat

SEQ ID NO: 551339 - DNA, 15 bp, Homo sapiens
taagacacagtcatt

SEQ ID NO: 551340 - DNA, 15 bp, Homo sapiens
aagacacagtcattc

SEQ ID NO: 551341 - DNA, 15 bp, Homo sapiens
agacacagtcattct

SEQ ID NO: 551342 - DNA, 15 bp, Homo sapiens
gacacagtcattctg

SEQ ID NO: 551343 - DNA, 15 bp, Homo sapiens
acacagtcattctgc

SEQ ID NO: 551344 - DNA, 15 bp, Homo sapiens
cacagtcattctgcc

SEQ ID NO: 551345 - DNA, 15 bp, Homo sapiens
acagtcattctgcct

SEQ ID NO: 551346 - DNA, 15 bp, Homo sapiens
cagtcattctgccta

SEQ ID NO: 551347 - DNA, 15 bp, Homo sapiens
agtcattctgcctac

SEQ ID NO: 551348 - DNA, 15 bp, Homo sapiens
gtcattctgcctacg

SEQ ID NO: 551349 - DNA, 15 bp, Homo sapiens
tcattctgcctacgg

SEQ ID NO: 551350 - DNA, 15 bp, Homo sapiens
cattctgcctacggt

SEQ ID NO: 551351 - DNA, 15 bp, Homo sapiens
attctgcctacggtg

SEQ ID NO: 551352 - DNA, 15 bp, Homo sapiens
ttctgcctacggtga

SEQ ID NO: 551353 - DNA, 15 bp, Homo sapiens
tctgcctacggtgac

SEQ ID NO: 551354 - DNA, 15 bp, Homo sapiens
ctgcctacggtgact

SEQ ID NO: 551355 - DNA, 15 bp, Homo sapiens
tgcctacggtgactc

SEQ ID NO: 551356 - DNA, 15 bp, Homo sapiens
gcctacggtgactct

SEQ ID NO: 551357 - DNA, 15 bp, Homo sapiens
cctacggtgactctt

SEQ ID NO: 551358 - DNA, 15 bp, Homo sapiens
ctacggtgactcttc

SEQ ID NO: 551359 - DNA, 15 bp, Homo sapiens
tacggtgactcttca

SEQ ID NO: 551360 - DNA, 15 bp, Homo sapiens
acggtgactcttcag

SEQ ID NO: 551361 - DNA, 15 bp, Homo sapiens
cggtgactcttcagg

SEQ ID NO: 551362 - DNA, 15 bp, Homo sapiens
ggtgactcttcaggc

SEQ ID NO: 551363 - DNA, 15 bp, Homo sapiens
gtgactcttcaggcc

SEQ ID NO: 551364 - DNA, 15 bp, Homo sapiens
tgactcttcaggcca

SEQ ID NO: 551365 - DNA, 15 bp, Homo sapiens
gactcttcaggccag

SEQ ID NO: 551366 - DNA, 15 bp, Homo sapiens
actcttcaggccaga

SEQ ID NO: 551367 - DNA, 15 bp, Homo sapiens
ctcttcaggccagag

SEQ ID NO: 551368 - DNA, 15 bp, Homo sapiens
tcttcaggccagagc

SEQ ID NO: 551369 - DNA, 15 bp, Homo sapiens
cttcaggccagagcc

SEQ ID NO: 551370 - DNA, 15 bp, Homo sapiens
ttcaggccagagccc

SEQ ID NO: 551371 - DNA, 15 bp, Homo sapiens
tcaggccagagcccc

SEQ ID NO: 551372 - DNA, 15 bp, Homo sapiens
caggccagagccccc

SEQ ID NO: 551373 - DNA, 15 bp, Homo sapiens
aggccagagccccca

SEQ ID NO: 551374 - DNA, 15 bp, Homo sapiens
ggccagagcccccag

SEQ ID NO: 551375 - DNA, 15 bp, Homo sapiens
gccagagcccccagc

SEQ ID NO: 551376 - DNA, 15 bp, Homo sapiens
ccagagcccccagcc

SEQ ID NO: 551377 - DNA, 15 bp, Homo sapiens
cagagcccccagcca

SEQ ID NO: 551378 - DNA, 15 bp, Homo sapiens
agagcccccagccag

SEQ ID NO: 551379 - DNA, 15 bp, Homo sapiens
gagcccccagccagt

SEQ ID NO: 551380 - DNA, 15 bp, Homo sapiens
agcccccagccagtc

SEQ ID NO: 551381 - DNA, 15 bp, Homo sapiens
gcccccagccagtcc

SEQ ID NO: 551382 - DNA, 15 bp, Homo sapiens
cccccagccagtccg

SEQ ID NO: 551383 - DNA, 15 bp, Homo sapiens
ccccagccagtccgg

SEQ ID NO: 551384 - DNA, 15 bp, Homo sapiens
cccagccagtccgga

SEQ ID NO: 551385 - DNA, 15 bp, Homo sapiens
ccagccagtccggat

SEQ ID NO: 551386 - DNA, 15 bp, Homo sapiens
cagccagtccggatg

SEQ ID NO: 551387 - DNA, 15 bp, Homo sapiens
agccagtccggatgc

SEQ ID NO: 551388 - DNA, 15 bp, Homo sapiens
gccagtccggatgca

SEQ ID NO: 551389 - DNA, 15 bp, Homo sapiens
ccagtccggatgcag

SEQ ID NO: 551390 - DNA, 15 bp, Homo sapiens
cagtccggatgcagg

SEQ ID NO: 551391 - DNA, 15 bp, Homo sapiens
agtccggatgcaggg

SEQ ID NO: 551392 - DNA, 15 bp, Homo sapiens
gtccggatgcagggg

SEQ ID NO: 551393 - DNA, 15 bp, Homo sapiens
tccggatgcaggggc

SEQ ID NO: 551394 - DNA, 15 bp, Homo sapiens
ccggatgcaggggca

SEQ ID NO: 551395 - DNA, 15 bp, Homo sapiens
cggatgcaggggcaa

SEQ ID NO: 551396 - DNA, 15 bp, Homo sapiens
ggatgcaggggcaac

SEQ ID NO: 551397 - DNA, 15 bp, Homo sapiens
gatgcaggggcaact

SEQ ID NO: 551398 - DNA, 15 bp, Homo sapiens
atgcaggggcaactt

SEQ ID NO: 551399 - DNA, 15 bp, Homo sapiens
tgcaggggcaactta

SEQ ID NO: 551400 - DNA, 15 bp, Homo sapiens
gcaggggcaacttac

SEQ ID NO: 551401 - DNA, 15 bp, Homo sapiens
caggggcaacttact

SEQ ID NO: 551402 - DNA, 15 bp, Homo sapiens
aggggcaacttactg

SEQ ID NO: 551403 - DNA, 15 bp, Homo sapiens
ggggcaacttactgt

SEQ ID NO: 551404 - DNA, 15 bp, Homo sapiens
gggcaacttactgtg

SEQ ID NO: 551405 - DNA, 15 bp, Homo sapiens
ggcaacttactgtgg

SEQ ID NO: 551406 - DNA, 15 bp, Homo sapiens
gcaacttactgtgga

SEQ ID NO: 551407 - DNA, 15 bp, Homo sapiens
caacttactgtggac

SEQ ID NO: 551408 - DNA, 15 bp, Homo sapiens
aacttactgtggact

SEQ ID NO: 551409 - DNA, 15 bp, Homo sapiens
acttactgtggactc

SEQ ID NO: 551410 - DNA, 15 bp, Homo sapiens
cttactgtggactct

SEQ ID NO: 551411 - DNA, 15 bp, Homo sapiens
ttactgtggactctc

SEQ ID NO: 551412 - DNA, 15 bp, Homo sapiens
tactgtggactctct

SEQ ID NO: 551413 - DNA, 15 bp, Homo sapiens
actgtggactctctc

SEQ ID NO: 551414 - DNA, 15 bp, Homo sapiens
ctgtggactctctct

SEQ ID NO: 551415 - DNA, 15 bp, Homo sapiens
tgtggactctctctc

SEQ ID NO: 551416 - DNA, 15 bp, Homo sapiens
gtggactctctctcc

SEQ ID NO: 551417 - DNA, 15 bp, Homo sapiens
tggactctctctccc

SEQ ID NO: 551418 - DNA, 15 bp, Homo sapiens
ggactctctctcccg

SEQ ID NO: 551419 - DNA, 15 bp, Homo sapiens
gactctctctcccgc

SEQ ID NO: 551420 - DNA, 15 bp, Homo sapiens
actctctctcccgcc

SEQ ID NO: 551421 - DNA, 15 bp, Homo sapiens
ctctctctcccgcct

SEQ ID NO: 551422 - DNA, 15 bp, Homo sapiens
tctctctcccgcctt

SEQ ID NO: 551423 - DNA, 15 bp, Homo sapiens
ctctctcccgccttt

SEQ ID NO: 551424 - DNA, 15 bp, Homo sapiens
tctctcccgcctttc

SEQ ID NO: 551425 - DNA, 15 bp, Homo sapiens
ctctcccgcctttcc

SEQ ID NO: 551426 - DNA, 15 bp, Homo sapiens
tctcccgcctttcca

SEQ ID NO: 551427 - DNA, 15 bp, Homo sapiens
ctcccgcctttccag

SEQ ID NO: 551428 - DNA, 15 bp, Homo sapiens
tcccgcctttccaga

SEQ ID NO: 551429 - DNA, 15 bp, Homo sapiens
cccgcctttccagag

SEQ ID NO: 551430 - DNA, 15 bp, Homo sapiens
ccgcctttccagagg

SEQ ID NO: 551431 - DNA, 15 bp, Homo sapiens
cgcctttccagagga

SEQ ID NO: 551432 - DNA, 15 bp, Homo sapiens
gcctttccagaggac

SEQ ID NO: 551433 - DNA, 15 bp, Homo sapiens
cctttccagaggact

SEQ ID NO: 551434 - DNA, 15 bp, Homo sapiens
ctttccagaggactc

SEQ ID NO: 551435 - DNA, 15 bp, Homo sapiens
tttccagaggactcc

SEQ ID NO: 551436 - DNA, 15 bp, Homo sapiens
ttccagaggactcca

SEQ ID NO: 551437 - DNA, 15 bp, Homo sapiens
tccagaggactccag

SEQ ID NO: 551438 - DNA, 15 bp, Homo sapiens
ccagaggactccaga

SEQ ID NO: 551439 - DNA, 15 bp, Homo sapiens
cagaggactccagat

SEQ ID NO: 551440 - DNA, 15 bp, Homo sapiens
agaggactccagatc

SEQ ID NO: 551441 - DNA, 15 bp, Homo sapiens
gaggactccagatct

SEQ ID NO: 551442 - DNA, 15 bp, Homo sapiens
aggactccagatcta

SEQ ID NO: 551443 - DNA, 15 bp, Homo sapiens
ggactccagatctaa

SEQ ID NO: 551444 - DNA, 15 bp, Homo sapiens
gactccagatctaat

SEQ ID NO: 551445 - DNA, 15 bp, Homo sapiens
actccagatctaatg

SEQ ID NO: 551446 - DNA, 15 bp, Homo sapiens
ctccagatctaatgg

SEQ ID NO: 551447 - DNA, 15 bp, Homo sapiens
tccagatctaatggg

SEQ ID NO: 551448 - DNA, 15 bp, Homo sapiens
ccagatctaatgggt

SEQ ID NO: 551449 - DNA, 15 bp, Homo sapiens
cagatctaatgggtg

SEQ ID NO: 551450 - DNA, 15 bp, Homo sapiens
agatctaatgggtgt

SEQ ID NO: 551451 - DNA, 15 bp, Homo sapiens
gatctaatgggtgtt

SEQ ID NO: 551452 - DNA, 15 bp, Homo sapiens
atctaatgggtgttt

SEQ ID NO: 551453 - DNA, 15 bp, Homo sapiens
tctaatgggtgtttc

SEQ ID NO: 551454 - DNA, 15 bp, Homo sapiens
ctaatgggtgtttca

SEQ ID NO: 551455 - DNA, 15 bp, Homo sapiens
taatgggtgtttcag

SEQ ID NO: 551456 - DNA, 15 bp, Homo sapiens
aatgggtgtttcagg

SEQ ID NO: 551457 - DNA, 15 bp, Homo sapiens
atgggtgtttcagga

SEQ ID NO: 551458 - DNA, 15 bp, Homo sapiens
tgggtgtttcaggac

SEQ ID NO: 551459 - DNA, 15 bp, Homo sapiens
gggtgtttcaggacc

SEQ ID NO: 551460 - DNA, 15 bp, Homo sapiens
ggtgtttcaggaccc

SEQ ID NO: 551461 - DNA, 15 bp, Homo sapiens
gtgtttcaggaccct

SEQ ID NO: 551462 - DNA, 15 bp, Homo sapiens
tgtttcaggaccctg

SEQ ID NO: 551463 - DNA, 15 bp, Homo sapiens
gtttcaggaccctgc

SEQ ID NO: 551464 - DNA, 15 bp, Homo sapiens
tttcaggaccctgca

SEQ ID NO: 551465 - DNA, 15 bp, Homo sapiens
ttcaggaccctgcag

SEQ ID NO: 551466 - DNA, 15 bp, Homo sapiens
tcaggaccctgcagt

SEQ ID NO: 551467 - DNA, 15 bp, Homo sapiens
caggaccctgcagtg

SEQ ID NO: 551468 - DNA, 15 bp, Homo sapiens
aggaccctgcagtga

SEQ ID NO: 551469 - DNA, 15 bp, Homo sapiens
ggaccctgcagtgag

SEQ ID NO: 551470 - DNA, 15 bp, Homo sapiens
gaccctgcagtgaga

SEQ ID NO: 551471 - DNA, 15 bp, Homo sapiens
accctgcagtgagag

SEQ ID NO: 551472 - DNA, 15 bp, Homo sapiens
ccctgcagtgagagc

SEQ ID NO: 551473 - DNA, 15 bp, Homo sapiens
cctgcagtgagagcc

SEQ ID NO: 551474 - DNA, 15 bp, Homo sapiens
ctgcagtgagagcca

SEQ ID NO: 551475 - DNA, 15 bp, Homo sapiens
tgcagtgagagccac

SEQ ID NO: 551476 - DNA, 15 bp, Homo sapiens
gcagtgagagccaca

SEQ ID NO: 551477 - DNA, 15 bp, Homo sapiens
cagtgagagccacaa

SEQ ID NO: 551478 - DNA, 15 bp, Homo sapiens
agtgagagccacaac

SEQ ID NO: 551479 - DNA, 15 bp, Homo sapiens
gagcaccgatgtgac

SEQ ID NO: 551480 - DNA, 15 bp, Homo sapiens
agcaccgatgtgaca

SEQ ID NO: 551481 - DNA, 15 bp, Homo sapiens
gcaccgatgtgacat

SEQ ID NO: 551482 - DNA, 15 bp, Homo sapiens
caccgatgtgacatt

SEQ ID NO: 551483 - DNA, 15 bp, Homo sapiens
accgatgtgacattt

SEQ ID NO: 551484 - DNA, 15 bp, Homo sapiens
ccgatgtgacattta

SEQ ID NO: 551485 - DNA, 15 bp, Homo sapiens
cgatgtgacatttaa

SEQ ID NO: 551486 - DNA, 15 bp, Homo sapiens
gatgtgacatttaac

SEQ ID NO: 551487 - DNA, 15 bp, Homo sapiens
atgtgacatttaacc

SEQ ID NO: 551488 - DNA, 15 bp, Homo sapiens
tgtgacatttaaccc

SEQ ID NO: 551489 - DNA, 15 bp, Homo sapiens
gtgacatttaaccca

SEQ ID NO: 551490 - DNA, 15 bp, Homo sapiens
tgacatttaacccag

SEQ ID NO: 551491 - DNA, 15 bp, Homo sapiens
gacatttaacccaga

SEQ ID NO: 551492 - DNA, 15 bp, Homo sapiens
acatttaacccagag

SEQ ID NO: 551493 - DNA, 15 bp, Homo sapiens
catttaacccagagg

SEQ ID NO: 551494 - DNA, 15 bp, Homo sapiens
atttaacccagaggc

SEQ ID NO: 551495 - DNA, 15 bp, Homo sapiens
tttaacccagaggct

SEQ ID NO: 551496 - DNA, 15 bp, Homo sapiens
ttaacccagaggctg

SEQ ID NO: 551497 - DNA, 15 bp, Homo sapiens
taacccagaggctga

SEQ ID NO: 551498 - DNA, 15 bp, Homo sapiens
aacccagaggctgac

SEQ ID NO: 551499 - DNA, 15 bp, Homo sapiens
acccagaggctgact

SEQ ID NO: 551500 - DNA, 15 bp, Homo sapiens
cccagaggctgactt

SEQ ID NO: 551501 - DNA, 15 bp, Homo sapiens
ctgactttgagcaca

SEQ ID NO: 551502 - DNA, 15 bp, Homo sapiens
tgactttgagcacag

SEQ ID NO: 551503 - DNA, 15 bp, Homo sapiens
gactttgagcacaga

SEQ ID NO: 551504 - DNA, 15 bp, Homo sapiens
actttgagcacagac

SEQ ID NO: 551505 - DNA, 15 bp, Homo sapiens
ctttgagcacagacg

SEQ ID NO: 551506 - DNA, 15 bp, Homo sapiens
tttgagcacagacgt

SEQ ID NO: 551507 - DNA, 15 bp, Homo sapiens
ttgagcacagacgtg

SEQ ID NO: 551508 - DNA, 15 bp, Homo sapiens
tgagcacagacgtga

SEQ ID NO: 551509 - DNA, 15 bp, Homo sapiens
gagcacagacgtgac

SEQ ID NO: 551510 - DNA, 15 bp, Homo sapiens
agcacagacgtgaca

SEQ ID NO: 551511 - DNA, 15 bp, Homo sapiens
gcacagacgtgacat

SEQ ID NO: 551512 - DNA, 15 bp, Homo sapiens
cacagacgtgacatt

SEQ ID NO: 551513 - DNA, 15 bp, Homo sapiens
acagacgtgacattt

SEQ ID NO: 551514 - DNA, 15 bp, Homo sapiens
cagacgtgacattta

SEQ ID NO: 551515 - DNA, 15 bp, Homo sapiens
agacgtgacatttaa

SEQ ID NO: 551516 - DNA, 15 bp, Homo sapiens
gacgtgacatttaac

SEQ ID NO: 551517 - DNA, 15 bp, Homo sapiens
acgtgacatttaacc

SEQ ID NO: 551518 - DNA, 15 bp, Homo sapiens
cgtgacatttaacct

SEQ ID NO: 551519 - DNA, 15 bp, Homo sapiens
gtgacatttaacctc

SEQ ID NO: 551520 - DNA, 15 bp, Homo sapiens
tgacatttaacctca

SEQ ID NO: 551521 - DNA, 15 bp, Homo sapiens
gacatttaacctcat

SEQ ID NO: 551522 - DNA, 15 bp, Homo sapiens
acatttaacctcatc

SEQ ID NO: 551523 - DNA, 15 bp, Homo sapiens
catttaacctcatca

SEQ ID NO: 551524 - DNA, 15 bp, Homo sapiens
atttaacctcatcag

SEQ ID NO: 551525 - DNA, 15 bp, Homo sapiens
tttaacctcatcaga

SEQ ID NO: 551526 - DNA, 15 bp, Homo sapiens
ttaacctcatcagag

SEQ ID NO: 551527 - DNA, 15 bp, Homo sapiens
taacctcatcagagc

SEQ ID NO: 551528 - DNA, 15 bp, Homo sapiens
aacctcatcagagca

SEQ ID NO: 551529 - DNA, 15 bp, Homo sapiens
acctcatcagagcag

SEQ ID NO: 551530 - DNA, 15 bp, Homo sapiens
cctcatcagagcagt

SEQ ID NO: 551531 - DNA, 15 bp, Homo sapiens
ctcatcagagcagtg

SEQ ID NO: 551532 - DNA, 15 bp, Homo sapiens
tcatcagagcagtga

SEQ ID NO: 551533 - DNA, 15 bp, Homo sapiens
catcagagcagtgac

SEQ ID NO: 551534 - DNA, 15 bp, Homo sapiens
atcagagcagtgact

SEQ ID NO: 551535 - DNA, 15 bp, Homo sapiens
tcagagcagtgactt

SEQ ID NO: 551536 - DNA, 15 bp, Homo sapiens
cagagcagtgactta

SEQ ID NO: 551537 - DNA, 15 bp, Homo sapiens
agagcagtgacttaa

SEQ ID NO: 551538 - DNA, 15 bp, Homo sapiens
gagcagtgacttaag

SEQ ID NO: 551539 - DNA, 15 bp, Homo sapiens
agcagtgacttaaga

SEQ ID NO: 551540 - DNA, 15 bp, Homo sapiens
gcagtgacttaagac

SEQ ID NO: 551541 - DNA, 15 bp, Homo sapiens
cagtgacttaagact

SEQ ID NO: 551542 - DNA, 15 bp, Homo sapiens
agtgacttaagacta

SEQ ID NO: 551543 - DNA, 15 bp, Homo sapiens
gtgacttaagactag

SEQ ID NO: 551544 - DNA, 15 bp, Homo sapiens
tgacttaagactagc

SEQ ID NO: 551545 - DNA, 15 bp, Homo sapiens
gacttaagactagcg

SEQ ID NO: 551546 - DNA, 15 bp, Homo sapiens
acttaagactagcga

SEQ ID NO: 551547 - DNA, 15 bp, Homo sapiens
cttaagactagcgag

SEQ ID NO: 551548 - DNA, 15 bp, Homo sapiens
ttaagactagcgagc

SEQ ID NO: 551549 - DNA, 15 bp, Homo sapiens
taagactagcgagct

SEQ ID NO: 551550 - DNA, 15 bp, Homo sapiens
aagactagcgagctg

SEQ ID NO: 551551 - DNA, 15 bp, Homo sapiens
agactagcgagctga

SEQ ID NO: 551552 - DNA, 15 bp, Homo sapiens
gactagcgagctgac

SEQ ID NO: 551553 - DNA, 15 bp, Homo sapiens
actagcgagctgaca

SEQ ID NO: 551554 - DNA, 15 bp, Homo sapiens
ctagcgagctgacag

SEQ ID NO: 551555 - DNA, 15 bp, Homo sapiens
tagcgagctgacagt

SEQ ID NO: 551556 - DNA, 15 bp, Homo sapiens
agcgagctgacagtc

SEQ ID NO: 551557 - DNA, 15 bp, Homo sapiens
gcgagctgacagtcc

SEQ ID NO: 551558 - DNA, 15 bp, Homo sapiens
cgagctgacagtcct

SEQ ID NO: 551559 - DNA, 15 bp, Homo sapiens
gagctgacagtcctt

SEQ ID NO: 551560 - DNA, 15 bp, Homo sapiens
agctgacagtccttg

SEQ ID NO: 551561 - DNA, 15 bp, Homo sapiens
gctgacagtccttgc

SEQ ID NO: 551562 - DNA, 15 bp, Homo sapiens
ctgacagtccttgcg

SEQ ID NO: 551563 - DNA, 15 bp, Homo sapiens
tgacagtccttgcgc

SEQ ID NO: 551564 - DNA, 15 bp, Homo sapiens
gacagtccttgcgca

SEQ ID NO: 551565 - DNA, 15 bp, Homo sapiens
acagtccttgcgcac

SEQ ID NO: 551566 - DNA, 15 bp, Homo sapiens
cagtccttgcgcaca

SEQ ID NO: 551567 - DNA, 15 bp, Homo sapiens
agtccttgcgcacag

SEQ ID NO: 551568 - DNA, 15 bp, Homo sapiens
gtccttgcgcacaga

SEQ ID NO: 551569 - DNA, 15 bp, Homo sapiens
tccttgcgcacagac

SEQ ID NO: 551570 - DNA, 15 bp, Homo sapiens
ccttgcgcacagacg

SEQ ID NO: 551571 - DNA, 15 bp, Homo sapiens
cttgcgcacagacgg

SEQ ID NO: 551572 - DNA, 15 bp, Homo sapiens
ttgcgcacagacggt

SEQ ID NO: 551573 - DNA, 15 bp, Homo sapiens
tgcgcacagacggta

SEQ ID NO: 551574 - DNA, 15 bp, Homo sapiens
gcgcacagacggtag

SEQ ID NO: 551575 - DNA, 15 bp, Homo sapiens
cgcacagacggtagg

SEQ ID NO: 551576 - DNA, 15 bp, Homo sapiens
gcacagacggtagga

SEQ ID NO: 551577 - DNA, 15 bp, Homo sapiens
cacagacggtaggat

SEQ ID NO: 551578 - DNA, 15 bp, Homo sapiens
acagacggtaggatg

SEQ ID NO: 551579 - DNA, 15 bp, Homo sapiens
cagacggtaggatgg

SEQ ID NO: 551580 - DNA, 15 bp, Homo sapiens
agacggtaggatggg

SEQ ID NO: 551581 - DNA, 15 bp, Homo sapiens
gacggtaggatggga

SEQ ID NO: 551582 - DNA, 15 bp, Homo sapiens
acggtaggatgggag

SEQ ID NO: 551583 - DNA, 15 bp, Homo sapiens
cggtaggatgggaga

SEQ ID NO: 551584 - DNA, 15 bp, Homo sapiens
ggtaggatgggagag

SEQ ID NO: 551585 - DNA, 15 bp, Homo sapiens
gtaggatgggagagt

SEQ ID NO: 551586 - DNA, 15 bp, Homo sapiens
taggatgggagagtc

SEQ ID NO: 551587 - DNA, 15 bp, Homo sapiens
aggatgggagagtca

SEQ ID NO: 551588 - DNA, 15 bp, Homo sapiens
ggatgggagagtcag

SEQ ID NO: 551589 - DNA, 15 bp, Homo sapiens
gatgggagagtcaga

SEQ ID NO: 551590 - DNA, 15 bp, Homo sapiens
atgggagagtcagaa

SEQ ID NO: 551591 - DNA, 15 bp, Homo sapiens
tgggagagtcagaaa

SEQ ID NO: 551592 - DNA, 15 bp, Homo sapiens
gggagagtcagaaag

SEQ ID NO: 551593 - DNA, 15 bp, Homo sapiens
ggagagtcagaaaga

SEQ ID NO: 551594 - DNA, 15 bp, Homo sapiens
gagagtcagaaagac

SEQ ID NO: 551595 - DNA, 15 bp, Homo sapiens
agagtcagaaagaca

SEQ ID NO: 551596 - DNA, 15 bp, Homo sapiens
gagtcagaaagacaa

SEQ ID NO: 551597 - DNA, 15 bp, Homo sapiens
agtcagaaagacaag

SEQ ID NO: 551598 - DNA, 15 bp, Homo sapiens
gtcagaaagacaagt

SEQ ID NO: 551599 - DNA, 15 bp, Homo sapiens
tcagaaagacaagtg

SEQ ID NO: 551600 - DNA, 15 bp, Homo sapiens
cagaaagacaagtga

SEQ ID NO: 551601 - DNA, 15 bp, Homo sapiens
agaaagacaagtgaa

SEQ ID NO: 551602 - DNA, 15 bp, Homo sapiens
gaaagacaagtgaag

SEQ ID NO: 551603 - DNA, 15 bp, Homo sapiens
aaagacaagtgaaga

SEQ ID NO: 551604 - DNA, 15 bp, Homo sapiens
aagacaagtgaagaa

SEQ ID NO: 551605 - DNA, 15 bp, Homo sapiens
agacaagtgaagaag

SEQ ID NO: 551606 - DNA, 15 bp, Homo sapiens
gacaagtgaagaagt

SEQ ID NO: 551607 - DNA, 15 bp, Homo sapiens
acaagtgaagaagtt

SEQ ID NO: 551608 - DNA, 15 bp, Homo sapiens
caagtgaagaagtta

SEQ ID NO: 551609 - DNA, 15 bp, Homo sapiens
aagtgaagaagttag

SEQ ID NO: 551610 - DNA, 15 bp, Homo sapiens
agtgaagaagttagt

SEQ ID NO: 551611 - DNA, 15 bp, Homo sapiens
gtgaagaagttagta

SEQ ID NO: 551612 - DNA, 15 bp, Homo sapiens
tgaagaagttagtaa

SEQ ID NO: 551613 - DNA, 15 bp, Homo sapiens
gaagaagttagtaaa

SEQ ID NO: 551614 - DNA, 15 bp, Homo sapiens
aagaagttagtaaaa

SEQ ID NO: 551615 - DNA, 15 bp, Homo sapiens
agaagttagtaaaat

SEQ ID NO: 551616 - DNA, 15 bp, Homo sapiens
gaagttagtaaaata

SEQ ID NO: 551617 - DNA, 15 bp, Homo sapiens
aagttagtaaaatat

SEQ ID NO: 551618 - DNA, 15 bp, Homo sapiens
agttagtaaaatatc

SEQ ID NO: 551619 - DNA, 15 bp, Homo sapiens
gttagtaaaatatcc

SEQ ID NO: 551620 - DNA, 15 bp, Homo sapiens
ttagtaaaatatccc

SEQ ID NO: 551621 - DNA, 15 bp, Homo sapiens
tagtaaaatatccca

SEQ ID NO: 551622 - DNA, 15 bp, Homo sapiens
agtaaaatatcccag

SEQ ID NO: 551623 - DNA, 15 bp, Homo sapiens
gtaaaatatcccaga

SEQ ID NO: 551624 - DNA, 15 bp, Homo sapiens
taaaatatcccagat

SEQ ID NO: 551625 - DNA, 15 bp, Homo sapiens
aaaatatcccagata

SEQ ID NO: 551626 - DNA, 15 bp, Homo sapiens
aaatatcccagatag

SEQ ID NO: 551627 - DNA, 15 bp, Homo sapiens
aatatcccagatagg

SEQ ID NO: 551628 - DNA, 15 bp, Homo sapiens
atatcccagatagga

SEQ ID NO: 551629 - DNA, 15 bp, Homo sapiens
tatcccagataggaa

SEQ ID NO: 551630 - DNA, 15 bp, Homo sapiens
atcccagataggaaa

SEQ ID NO: 551631 - DNA, 15 bp, Homo sapiens
tcccagataggaaat

SEQ ID NO: 551632 - DNA, 15 bp, Homo sapiens
cccagataggaaata

SEQ ID NO: 551633 - DNA, 15 bp, Homo sapiens
ccagataggaaataa

SEQ ID NO: 551634 - DNA, 15 bp, Homo sapiens
cagataggaaataat

SEQ ID NO: 551635 - DNA, 15 bp, Homo sapiens
agataggaaataatg

SEQ ID NO: 551636 - DNA, 15 bp, Homo sapiens
gataggaaataatga

SEQ ID NO: 551637 - DNA, 15 bp, Homo sapiens
ataggaaataatgaa

SEQ ID NO: 551638 - DNA, 15 bp, Homo sapiens
taggaaataatgaag

SEQ ID NO: 551639 - DNA, 15 bp, Homo sapiens
aggaaataatgaagt

SEQ ID NO: 551640 - DNA, 15 bp, Homo sapiens
ggaaataatgaagtt

SEQ ID NO: 551641 - DNA, 15 bp, Homo sapiens
gaaataatgaagttc

SEQ ID NO: 551642 - DNA, 15 bp, Homo sapiens
aaataatgaagttcg

SEQ ID NO: 551643 - DNA, 15 bp, Homo sapiens
aataatgaagttcgg

SEQ ID NO: 551644 - DNA, 15 bp, Homo sapiens
ataatgaagttcgga

SEQ ID NO: 551645 - DNA, 15 bp, Homo sapiens
taatgaagttcggaa

SEQ ID NO: 551646 - DNA, 15 bp, Homo sapiens
aatgaagttcggaac

SEQ ID NO: 551647 - DNA, 15 bp, Homo sapiens
atgaagttcggaact

SEQ ID NO: 551648 - DNA, 15 bp, Homo sapiens
tgaagttcggaacta

SEQ ID NO: 551649 - DNA, 15 bp, Homo sapiens
gaagttcggaactaa

SEQ ID NO: 551650 - DNA, 15 bp, Homo sapiens
aagttcggaactaag

SEQ ID NO: 551651 - DNA, 15 bp, Homo sapiens
agttcggaactaagt

SEQ ID NO: 551652 - DNA, 15 bp, Homo sapiens
gttcggaactaagtg

SEQ ID NO: 551653 - DNA, 15 bp, Homo sapiens
ttcggaactaagtga

SEQ ID NO: 551654 - DNA, 15 bp, Homo sapiens
tcggaactaagtgat

SEQ ID NO: 551655 - DNA, 15 bp, Homo sapiens
cggaactaagtgatg

SEQ ID NO: 551656 - DNA, 15 bp, Homo sapiens
ggaactaagtgatga

SEQ ID NO: 551657 - DNA, 15 bp, Homo sapiens
gaactaagtgatgat

SEQ ID NO: 551658 - DNA, 15 bp, Homo sapiens
aactaagtgatgata

SEQ ID NO: 551659 - DNA, 15 bp, Homo sapiens
actaagtgatgatag

SEQ ID NO: 551660 - DNA, 15 bp, Homo sapiens
ctaagtgatgatagt

SEQ ID NO: 551661 - DNA, 15 bp, Homo sapiens
taagtgatgatagtg

SEQ ID NO: 551662 - DNA, 15 bp, Homo sapiens
aagtgatgatagtga

SEQ ID NO: 551663 - DNA, 15 bp, Homo sapiens
agtgatgatagtgat

SEQ ID NO: 551664 - DNA, 15 bp, Homo sapiens
gtgatgatagtgatt

SEQ ID NO: 551665 - DNA, 15 bp, Homo sapiens
tgatgatagtgattt

SEQ ID NO: 551666 - DNA, 15 bp, Homo sapiens
gatgatagtgatttt

SEQ ID NO: 551667 - DNA, 15 bp, Homo sapiens
atgatagtgattttg

SEQ ID NO: 551668 - DNA, 15 bp, Homo sapiens
tgatagtgattttgg

SEQ ID NO: 551669 - DNA, 15 bp, Homo sapiens
gatagtgattttgga

SEQ ID NO: 551670 - DNA, 15 bp, Homo sapiens
atagtgattttggaa

SEQ ID NO: 551671 - DNA, 15 bp, Homo sapiens
tagtgattttggaaa

SEQ ID NO: 551672 - DNA, 15 bp, Homo sapiens
agtgattttggaaag

SEQ ID NO: 551673 - DNA, 15 bp, Homo sapiens
gtgattttggaaagt

SEQ ID NO: 551674 - DNA, 15 bp, Homo sapiens
tgattttggaaagtg

SEQ ID NO: 551675 - DNA, 15 bp, Homo sapiens
gattttggaaagtga

SEQ ID NO: 551676 - DNA, 15 bp, Homo sapiens
attttggaaagtgaa

SEQ ID NO: 551677 - DNA, 15 bp, Homo sapiens
ttttggaaagtgaaa

SEQ ID NO: 551678 - DNA, 15 bp, Homo sapiens
tttggaaagtgaaaa

SEQ ID NO: 551679 - DNA, 15 bp, Homo sapiens
ttggaaagtgaaaag

SEQ ID NO: 551680 - DNA, 15 bp, Homo sapiens
tggaaagtgaaaagg

SEQ ID NO: 551681 - DNA, 15 bp, Homo sapiens
ggaaagtgaaaagga

SEQ ID NO: 551682 - DNA, 15 bp, Homo sapiens
gaaagtgaaaaggac

SEQ ID NO: 551683 - DNA, 15 bp, Homo sapiens
aaagtgaaaaggaca

SEQ ID NO: 551684 - DNA, 15 bp, Homo sapiens
aagtgaaaaggacag

SEQ ID NO: 551685 - DNA, 15 bp, Homo sapiens
agtgaaaaggacaga

SEQ ID NO: 551686 - DNA, 15 bp, Homo sapiens
gtgaaaaggacagat

SEQ ID NO: 551687 - DNA, 15 bp, Homo sapiens
tgaaaaggacagata

SEQ ID NO: 551688 - DNA, 15 bp, Homo sapiens
gaaaaggacagatac

SEQ ID NO: 551689 - DNA, 15 bp, Homo sapiens
aaaaggacagataca

SEQ ID NO: 551690 - DNA, 15 bp, Homo sapiens
aaaggacagatacat

SEQ ID NO: 551691 - DNA, 15 bp, Homo sapiens
aaggacagatacata

SEQ ID NO: 551692 - DNA, 15 bp, Homo sapiens
aggacagatacataa

SEQ ID NO: 551693 - DNA, 15 bp, Homo sapiens
ggacagatacataag

SEQ ID NO: 551694 - DNA, 15 bp, Homo sapiens
gacagatacataagg

SEQ ID NO: 551695 - DNA, 15 bp, Homo sapiens
acagatacataaggg

SEQ ID NO: 551696 - DNA, 15 bp, Homo sapiens
cagatacataagggc

SEQ ID NO: 551697 - DNA, 15 bp, Homo sapiens
agatacataagggcg

SEQ ID NO: 551698 - DNA, 15 bp, Homo sapiens
gatacataagggcga

SEQ ID NO: 551699 - DNA, 15 bp, Homo sapiens
atacataagggcgat

SEQ ID NO: 551700 - DNA, 15 bp, Homo sapiens
tacataagggcgata

SEQ ID NO: 551701 - DNA, 15 bp, Homo sapiens
acataagggcgatag

SEQ ID NO: 551702 - DNA, 15 bp, Homo sapiens
cataagggcgatagc

SEQ ID NO: 551703 - DNA, 15 bp, Homo sapiens
ataagggcgatagca

SEQ ID NO: 551704 - DNA, 15 bp, Homo sapiens
taagggcgatagcaa

SEQ ID NO: 551705 - DNA, 15 bp, Homo sapiens
aagggcgatagcaaa

SEQ ID NO: 551706 - DNA, 15 bp, Homo sapiens
agggcgatagcaaag

SEQ ID NO: 551707 - DNA, 15 bp, Homo sapiens
gggcgatagcaaaga

SEQ ID NO: 551708 - DNA, 15 bp, Homo sapiens
ggcgatagcaaagag

SEQ ID NO: 551709 - DNA, 15 bp, Homo sapiens
gcgatagcaaagaga

SEQ ID NO: 551710 - DNA, 15 bp, Homo sapiens
cgatagcaaagagat

SEQ ID NO: 551711 - DNA, 15 bp, Homo sapiens
gatagcaaagagatg

SEQ ID NO: 551712 - DNA, 15 bp, Homo sapiens
atagcaaagagatga

SEQ ID NO: 551713 - DNA, 15 bp, Homo sapiens
tagcaaagagatgat

SEQ ID NO: 551714 - DNA, 15 bp, Homo sapiens
agcaaagagatgatt

SEQ ID NO: 551715 - DNA, 15 bp, Homo sapiens
gcaaagagatgatta

SEQ ID NO: 551716 - DNA, 15 bp, Homo sapiens
caaagagatgattaa

SEQ ID NO: 551717 - DNA, 15 bp, Homo sapiens
aaagagatgattaac

SEQ ID NO: 551718 - DNA, 15 bp, Homo sapiens
aagagatgattaaca

SEQ ID NO: 551719 - DNA, 15 bp, Homo sapiens
agagatgattaacag

SEQ ID NO: 551720 - DNA, 15 bp, Homo sapiens
gagatgattaacagg

SEQ ID NO: 551721 - DNA, 15 bp, Homo sapiens
agatgattaacaggg

SEQ ID NO: 551722 - DNA, 15 bp, Homo sapiens
gatgattaacagggc

SEQ ID NO: 551723 - DNA, 15 bp, Homo sapiens
atgattaacagggct

SEQ ID NO: 551724 - DNA, 15 bp, Homo sapiens
tgattaacagggctt

SEQ ID NO: 551725 - DNA, 15 bp, Homo sapiens
gattaacagggctta

SEQ ID NO: 551726 - DNA, 15 bp, Homo sapiens
attaacagggcttag

SEQ ID NO: 551727 - DNA, 15 bp, Homo sapiens
ttaacagggcttagg

SEQ ID NO: 551728 - DNA, 15 bp, Homo sapiens
taacagggcttaggt

SEQ ID NO: 551729 - DNA, 15 bp, Homo sapiens
aacagggcttaggtg

SEQ ID NO: 551730 - DNA, 15 bp, Homo sapiens
acagggcttaggtga

SEQ ID NO: 551731 - DNA, 15 bp, Homo sapiens
cagggcttaggtgag

SEQ ID NO: 551732 - DNA, 15 bp, Homo sapiens
agggcttaggtgagt

SEQ ID NO: 551733 - DNA, 15 bp, Homo sapiens
gggcttaggtgagta

SEQ ID NO: 551734 - DNA, 15 bp, Homo sapiens
ggcttaggtgagtaa

SEQ ID NO: 551735 - DNA, 15 bp, Homo sapiens
gcttaggtgagtaaa

SEQ ID NO: 551736 - DNA, 15 bp, Homo sapiens
cttaggtgagtaaag

SEQ ID NO: 551737 - DNA, 15 bp, Homo sapiens
ttaggtgagtaaagt

SEQ ID NO: 551738 - DNA, 15 bp, Homo sapiens
taggtgagtaaagtg

SEQ ID NO: 551739 - DNA, 15 bp, Homo sapiens
aggtgagtaaagtgt

SEQ ID NO: 551740 - DNA, 15 bp, Homo sapiens
ggtgagtaaagtgtg

SEQ ID NO: 551741 - DNA, 15 bp, Homo sapiens
gtgagtaaagtgtga

SEQ ID NO: 551742 - DNA, 15 bp, Homo sapiens
tgagtaaagtgtgaa

SEQ ID NO: 551743 - DNA, 15 bp, Homo sapiens
gagtaaagtgtgaat

SEQ ID NO: 551744 - DNA, 15 bp, Homo sapiens
agtaaagtgtgaatg

SEQ ID NO: 551745 - DNA, 15 bp, Homo sapiens
gtaaagtgtgaatga

SEQ ID NO: 551746 - DNA, 15 bp, Homo sapiens
taaagtgtgaatgaa

SEQ ID NO: 551747 - DNA, 15 bp, Homo sapiens
aaagtgtgaatgaag

SEQ ID NO: 551748 - DNA, 15 bp, Homo sapiens
aagtgtgaatgaagg

SEQ ID NO: 551749 - DNA, 15 bp, Homo sapiens
agtgtgaatgaaggg

SEQ ID NO: 551750 - DNA, 15 bp, Homo sapiens
gtgtgaatgaagggg

SEQ ID NO: 551751 - DNA, 15 bp, Homo sapiens
tgtgaatgaaggggg

SEQ ID NO: 551752 - DNA, 15 bp, Homo sapiens
gtgaatgaagggggt

SEQ ID NO: 551753 - DNA, 15 bp, Homo sapiens
tgaatgaagggggtg

SEQ ID NO: 551754 - DNA, 15 bp, Homo sapiens
gaatgaagggggtgc

SEQ ID NO: 551755 - DNA, 15 bp, Homo sapiens
aatgaagggggtgca

SEQ ID NO: 551756 - DNA, 15 bp, Homo sapiens
atgaagggggtgcat

SEQ ID NO: 551757 - DNA, 15 bp, Homo sapiens
tgaagggggtgcatg

SEQ ID NO: 551758 - DNA, 15 bp, Homo sapiens
gaagggggtgcatga

SEQ ID NO: 551759 - DNA, 15 bp, Homo sapiens
aagggggtgcatgac

SEQ ID NO: 551760 - DNA, 15 bp, Homo sapiens
agggggtgcatgaca

SEQ ID NO: 551761 - DNA, 15 bp, Homo sapiens
gggggtgcatgacag

SEQ ID NO: 551762 - DNA, 15 bp, Homo sapiens
ggggtgcatgacagg

SEQ ID NO: 551763 - DNA, 15 bp, Homo sapiens
gggtgcatgacagga

SEQ ID NO: 551764 - DNA, 15 bp, Homo sapiens
ggtgcatgacaggaa

SEQ ID NO: 551765 - DNA, 15 bp, Homo sapiens
gtgcatgacaggaaa

SEQ ID NO: 551766 - DNA, 15 bp, Homo sapiens
tgcatgacaggaaag

SEQ ID NO: 551767 - DNA, 15 bp, Homo sapiens
gcatgacaggaaaga

SEQ ID NO: 551768 - DNA, 15 bp, Homo sapiens
catgacaggaaagaa

SEQ ID NO: 551769 - DNA, 15 bp, Homo sapiens
atgacaggaaagaat

SEQ ID NO: 551770 - DNA, 15 bp, Homo sapiens
tgacaggaaagaatc

SEQ ID NO: 551771 - DNA, 15 bp, Homo sapiens
gacaggaaagaatca

SEQ ID NO: 551772 - DNA, 15 bp, Homo sapiens
acaggaaagaatcaa

SEQ ID NO: 551773 - DNA, 15 bp, Homo sapiens
caggaaagaatcaaa

SEQ ID NO: 551774 - DNA, 15 bp, Homo sapiens
aggaaagaatcaaag

SEQ ID NO: 551775 - DNA, 15 bp, Homo sapiens
ggaaagaatcaaagg

SEQ ID NO: 551776 - DNA, 15 bp, Homo sapiens
gaaagaatcaaaggc

SEQ ID NO: 551777 - DNA, 15 bp, Homo sapiens
aaagaatcaaaggcg

SEQ ID NO: 551778 - DNA, 15 bp, Homo sapiens
aagaatcaaaggcga

SEQ ID NO: 551779 - DNA, 15 bp, Homo sapiens
agaatcaaaggcgac

SEQ ID NO: 551780 - DNA, 15 bp, Homo sapiens
gaatcaaaggcgact

SEQ ID NO: 551781 - DNA, 15 bp, Homo sapiens
aatcaaaggcgacta

SEQ ID NO: 551782 - DNA, 15 bp, Homo sapiens
atcaaaggcgactaa

SEQ ID NO: 551783 - DNA, 15 bp, Homo sapiens
tcaaaggcgactaaa

SEQ ID NO: 551784 - DNA, 15 bp, Homo sapiens
caaaggcgactaaag

SEQ ID NO: 551785 - DNA, 15 bp, Homo sapiens
aaaggcgactaaagc

SEQ ID NO: 551786 - DNA, 15 bp, Homo sapiens
aaggcgactaaagcc

SEQ ID NO: 551787 - DNA, 15 bp, Homo sapiens
aggcgactaaagcct

SEQ ID NO: 551788 - DNA, 15 bp, Homo sapiens
ggcgactaaagcctg

SEQ ID NO: 551789 - DNA, 15 bp, Homo sapiens
gcgactaaagcctgc

SEQ ID NO: 551790 - DNA, 15 bp, Homo sapiens
cgactaaagcctgca

SEQ ID NO: 551791 - DNA, 15 bp, Homo sapiens
gactaaagcctgcac

SEQ ID NO: 551792 - DNA, 15 bp, Homo sapiens
actaaagcctgcaca

SEQ ID NO: 551793 - DNA, 15 bp, Homo sapiens
ctaaagcctgcacat

SEQ ID NO: 551794 - DNA, 15 bp, Homo sapiens
taaagcctgcacatt

SEQ ID NO: 551795 - DNA, 15 bp, Homo sapiens
aaagcctgcacattt

SEQ ID NO: 551796 - DNA, 15 bp, Homo sapiens
aagcctgcacatttt

SEQ ID NO: 551797 - DNA, 15 bp, Homo sapiens
agcctgcacatttta

SEQ ID NO: 551798 - DNA, 15 bp, Homo sapiens
gcctgcacattttaa

SEQ ID NO: 551799 - DNA, 15 bp, Homo sapiens
cctgcacattttaaa

SEQ ID NO: 551800 - DNA, 15 bp, Homo sapiens
ctgcacattttaaag

SEQ ID NO: 551801 - DNA, 15 bp, Homo sapiens
tgcacattttaaagg

SEQ ID NO: 551802 - DNA, 15 bp, Homo sapiens
gcacattttaaaggc

SEQ ID NO: 551803 - DNA, 15 bp, Homo sapiens
cacattttaaaggct

SEQ ID NO: 551804 - DNA, 15 bp, Homo sapiens
acattttaaaggctg

SEQ ID NO: 551805 - DNA, 15 bp, Homo sapiens
cattttaaaggctgg

SEQ ID NO: 551806 - DNA, 15 bp, Homo sapiens
attttaaaggctggt

SEQ ID NO: 551807 - DNA, 15 bp, Homo sapiens
ttttaaaggctggtg

SEQ ID NO: 551808 - DNA, 15 bp, Homo sapiens
tttaaaggctggtgc

SEQ ID NO: 551809 - DNA, 15 bp, Homo sapiens
ttaaaggctggtgct

SEQ ID NO: 551810 - DNA, 15 bp, Homo sapiens
taaaggctggtgctg

SEQ ID NO: 551811 - DNA, 15 bp, Homo sapiens
aaaggctggtgctgt

SEQ ID NO: 551812 - DNA, 15 bp, Homo sapiens
aaggctggtgctgtg

SEQ ID NO: 551813 - DNA, 15 bp, Homo sapiens
aggctggtgctgtga

SEQ ID NO: 551814 - DNA, 15 bp, Homo sapiens
ggctggtgctgtgag

SEQ ID NO: 551815 - DNA, 15 bp, Homo sapiens
gctggtgctgtgagc

SEQ ID NO: 551816 - DNA, 15 bp, Homo sapiens
ctggtgctgtgagca

SEQ ID NO: 551817 - DNA, 15 bp, Homo sapiens
tggtgctgtgagcag

SEQ ID NO: 551818 - DNA, 15 bp, Homo sapiens
ggtgctgtgagcagc

SEQ ID NO: 551819 - DNA, 15 bp, Homo sapiens
gtgctgtgagcagcc

SEQ ID NO: 551820 - DNA, 15 bp, Homo sapiens
tgctgtgagcagccg

SEQ ID NO: 551821 - DNA, 15 bp, Homo sapiens
gctgtgagcagccgc

SEQ ID NO: 551822 - DNA, 15 bp, Homo sapiens
ctgtgagcagccgca

SEQ ID NO: 551823 - DNA, 15 bp, Homo sapiens
tgtgagcagccgcag

SEQ ID NO: 551824 - DNA, 15 bp, Homo sapiens
gtgagcagccgcaga

SEQ ID NO: 551825 - DNA, 15 bp, Homo sapiens
tgagcagccgcagaa

SEQ ID NO: 551826 - DNA, 15 bp, Homo sapiens
gagcagccgcagaaa

SEQ ID NO: 551827 - DNA, 15 bp, Homo sapiens
agcagccgcagaaag

SEQ ID NO: 551828 - DNA, 15 bp, Homo sapiens
gcagccgcagaaagg

SEQ ID NO: 551829 - DNA, 15 bp, Homo sapiens
cagccgcagaaaggt

SEQ ID NO: 551830 - DNA, 15 bp, Homo sapiens
agccgcagaaaggtg

SEQ ID NO: 551831 - DNA, 15 bp, Homo sapiens
gccgcagaaaggtgg

SEQ ID NO: 551832 - DNA, 15 bp, Homo sapiens
ccgcagaaaggtggc

SEQ ID NO: 551833 - DNA, 15 bp, Homo sapiens
cgcagaaaggtggca

SEQ ID NO: 551834 - DNA, 15 bp, Homo sapiens
gcagaaaggtggcac

SEQ ID NO: 551835 - DNA, 15 bp, Homo sapiens
cagaaaggtggcaca

SEQ ID NO: 551836 - DNA, 15 bp, Homo sapiens
agaaaggtggcacag

SEQ ID NO: 551837 - DNA, 15 bp, Homo sapiens
gaaaggtggcacagg

SEQ ID NO: 551838 - DNA, 15 bp, Homo sapiens
aaaggtggcacagga

SEQ ID NO: 551839 - DNA, 15 bp, Homo sapiens
aaggtggcacaggaa

SEQ ID NO: 551840 - DNA, 15 bp, Homo sapiens
aggtggcacaggaaa

SEQ ID NO: 551841 - DNA, 15 bp, Homo sapiens
ggtggcacaggaaat

SEQ ID NO: 551842 - DNA, 15 bp, Homo sapiens
gtggcacaggaaatg

SEQ ID NO: 551843 - DNA, 15 bp, Homo sapiens
tggcacaggaaatgc

SEQ ID NO: 551844 - DNA, 15 bp, Homo sapiens
ggcacaggaaatgct

SEQ ID NO: 551845 - DNA, 15 bp, Homo sapiens
gcacaggaaatgctt

SEQ ID NO: 551846 - DNA, 15 bp, Homo sapiens
cacaggaaatgcttt

SEQ ID NO: 551847 - DNA, 15 bp, Homo sapiens
acaggaaatgcttta

SEQ ID NO: 551848 - DNA, 15 bp, Homo sapiens
caggaaatgctttag

SEQ ID NO: 551849 - DNA, 15 bp, Homo sapiens
aggaaatgctttagg

SEQ ID NO: 551850 - DNA, 15 bp, Homo sapiens
ggaaatgctttagga

SEQ ID NO: 551851 - DNA, 15 bp, Homo sapiens
gaaatgctttaggat

SEQ ID NO: 551852 - DNA, 15 bp, Homo sapiens
aaatgctttaggatg

SEQ ID NO: 551853 - DNA, 15 bp, Homo sapiens
aatgctttaggatgg

SEQ ID NO: 551854 - DNA, 15 bp, Homo sapiens
atgctttaggatggg

SEQ ID NO: 551855 - DNA, 15 bp, Homo sapiens
tgctttaggatggga

SEQ ID NO: 551856 - DNA, 15 bp, Homo sapiens
gctttaggatgggat

SEQ ID NO: 551857 - DNA, 15 bp, Homo sapiens
ctttaggatgggatg

SEQ ID NO: 551858 - DNA, 15 bp, Homo sapiens
tttaggatgggatgt

SEQ ID NO: 551859 - DNA, 15 bp, Homo sapiens
ttaggatgggatgtc

SEQ ID NO: 551860 - DNA, 15 bp, Homo sapiens
taggatgggatgtca

SEQ ID NO: 551861 - DNA, 15 bp, Homo sapiens
aggatgggatgtcag

SEQ ID NO: 551862 - DNA, 15 bp, Homo sapiens
ggatgggatgtcagt

SEQ ID NO: 551863 - DNA, 15 bp, Homo sapiens
gatgggatgtcagtg

SEQ ID NO: 551864 - DNA, 15 bp, Homo sapiens
atgggatgtcagtgt

SEQ ID NO: 551865 - DNA, 15 bp, Homo sapiens
tgggatgtcagtgtt

SEQ ID NO: 551866 - DNA, 15 bp, Homo sapiens
gggatgtcagtgttc

SEQ ID NO: 551867 - DNA, 15 bp, Homo sapiens
ggatgtcagtgttct

SEQ ID NO: 551868 - DNA, 15 bp, Homo sapiens
gatgtcagtgttctc

SEQ ID NO: 551869 - DNA, 15 bp, Homo sapiens
atgtcagtgttctct

SEQ ID NO: 551870 - DNA, 15 bp, Homo sapiens
tgtcagtgttctctt

SEQ ID NO: 551871 - DNA, 15 bp, Homo sapiens
gtcagtgttctcttt

SEQ ID NO: 551872 - DNA, 15 bp, Homo sapiens
tcagtgttctctttg

SEQ ID NO: 551873 - DNA, 15 bp, Homo sapiens
cagtgttctctttga

SEQ ID NO: 551874 - DNA, 15 bp, Homo sapiens
agtgttctctttgag

SEQ ID NO: 551875 - DNA, 15 bp, Homo sapiens
gtgttctctttgaga

SEQ ID NO: 551876 - DNA, 15 bp, Homo sapiens
tgttctctttgagat

SEQ ID NO: 551877 - DNA, 15 bp, Homo sapiens
gttctctttgagatt

SEQ ID NO: 551878 - DNA, 15 bp, Homo sapiens
ttctctttgagattc

SEQ ID NO: 551879 - DNA, 15 bp, Homo sapiens
tctctttgagattcc

SEQ ID NO: 551880 - DNA, 15 bp, Homo sapiens
ctctttgagattcct

SEQ ID NO: 551881 - DNA, 15 bp, Homo sapiens
tctttgagattcctt

SEQ ID NO: 551882 - DNA, 15 bp, Homo sapiens
ctttgagattccttg

SEQ ID NO: 551883 - DNA, 15 bp, Homo sapiens
tttgagattccttgt

SEQ ID NO: 551884 - DNA, 15 bp, Homo sapiens
ttgagattccttgtg

SEQ ID NO: 551885 - DNA, 15 bp, Homo sapiens
tgagattccttgtga

SEQ ID NO: 551886 - DNA, 15 bp, Homo sapiens
gagattccttgtgag

SEQ ID NO: 551887 - DNA, 15 bp, Homo sapiens
agattccttgtgagc

SEQ ID NO: 551888 - DNA, 15 bp, Homo sapiens
gattccttgtgagca

SEQ ID NO: 551889 - DNA, 15 bp, Homo sapiens
attccttgtgagcaa

SEQ ID NO: 551890 - DNA, 15 bp, Homo sapiens
ttccttgtgagcaat

SEQ ID NO: 551891 - DNA, 15 bp, Homo sapiens
tccttgtgagcaatg

SEQ ID NO: 551892 - DNA, 15 bp, Homo sapiens
ccttgtgagcaatgg

SEQ ID NO: 551893 - DNA, 15 bp, Homo sapiens
cttgtgagcaatggg

SEQ ID NO: 551894 - DNA, 15 bp, Homo sapiens
ttgtgagcaatgggt

SEQ ID NO: 551895 - DNA, 15 bp, Homo sapiens
tgtgagcaatgggta

SEQ ID NO: 551896 - DNA, 15 bp, Homo sapiens
gtgagcaatgggtag

SEQ ID NO: 551897 - DNA, 15 bp, Homo sapiens
tgagcaatgggtaga

SEQ ID NO: 551898 - DNA, 15 bp, Homo sapiens
gagcaatgggtagaa

SEQ ID NO: 551899 - DNA, 15 bp, Homo sapiens
agcaatgggtagaac

SEQ ID NO: 551900 - DNA, 15 bp, Homo sapiens
gcaatgggtagaaca

SEQ ID NO: 551901 - DNA, 15 bp, Homo sapiens
caatgggtagaacat

SEQ ID NO: 551902 - DNA, 15 bp, Homo sapiens
aatgggtagaacatc

SEQ ID NO: 551903 - DNA, 15 bp, Homo sapiens
atgggtagaacatcc

SEQ ID NO: 551904 - DNA, 15 bp, Homo sapiens
tgggtagaacatcca

SEQ ID NO: 551905 - DNA, 15 bp, Homo sapiens
gggtagaacatccag

SEQ ID NO: 551906 - DNA, 15 bp, Homo sapiens
ggtagaacatccaga

SEQ ID NO: 551907 - DNA, 15 bp, Homo sapiens
gtagaacatccagat

SEQ ID NO: 551908 - DNA, 15 bp, Homo sapiens
tagaacatccagata

SEQ ID NO: 551909 - DNA, 15 bp, Homo sapiens
agaacatccagataa

SEQ ID NO: 551910 - DNA, 15 bp, Homo sapiens
gaacatccagataaa

SEQ ID NO: 551911 - DNA, 15 bp, Homo sapiens
aacatccagataaaa

SEQ ID NO: 551912 - DNA, 15 bp, Homo sapiens
acatccagataaaaa

SEQ ID NO: 551913 - DNA, 15 bp, Homo sapiens
catccagataaaaac

SEQ ID NO: 551914 - DNA, 15 bp, Homo sapiens
atccagataaaaacg

SEQ ID NO: 551915 - DNA, 15 bp, Homo sapiens
tccagataaaaacgt

SEQ ID NO: 551916 - DNA, 15 bp, Homo sapiens
ccagataaaaacgtc

SEQ ID NO: 551917 - DNA, 15 bp, Homo sapiens
cagataaaaacgtct

SEQ ID NO: 551918 - DNA, 15 bp, Homo sapiens
agataaaaacgtcta

SEQ ID NO: 551919 - DNA, 15 bp, Homo sapiens
gataaaaacgtctac

SEQ ID NO: 551920 - DNA, 15 bp, Homo sapiens
ataaaaacgtctact

SEQ ID NO: 551921 - DNA, 15 bp, Homo sapiens
taaaaacgtctacta

SEQ ID NO: 551922 - DNA, 15 bp, Homo sapiens
aaaaacgtctactag

SEQ ID NO: 551923 - DNA, 15 bp, Homo sapiens
aaaacgtctactagg

SEQ ID NO: 551924 - DNA, 15 bp, Homo sapiens
aaacgtctactaggc

SEQ ID NO: 551925 - DNA, 15 bp, Homo sapiens
aacgtctactaggct

SEQ ID NO: 551926 - DNA, 15 bp, Homo sapiens
acgtctactaggctt

SEQ ID NO: 551927 - DNA, 15 bp, Homo sapiens
cgtctactaggcttt

SEQ ID NO: 551928 - DNA, 15 bp, Homo sapiens
gtctactaggctttg

SEQ ID NO: 551929 - DNA, 15 bp, Homo sapiens
tctactaggctttgg

SEQ ID NO: 551930 - DNA, 15 bp, Homo sapiens
ctactaggctttggg

SEQ ID NO: 551931 - DNA, 15 bp, Homo sapiens
tactaggctttggga

SEQ ID NO: 551932 - DNA, 15 bp, Homo sapiens
actaggctttgggaa

SEQ ID NO: 551933 - DNA, 15 bp, Homo sapiens
ctaggctttgggaac

SEQ ID NO: 551934 - DNA, 15 bp, Homo sapiens
taggctttgggaact

SEQ ID NO: 551935 - DNA, 15 bp, Homo sapiens
aggctttgggaactg

SEQ ID NO: 551936 - DNA, 15 bp, Homo sapiens
ggctttgggaactga

SEQ ID NO: 551937 - DNA, 15 bp, Homo sapiens
gctttgggaactgaa

SEQ ID NO: 551938 - DNA, 15 bp, Homo sapiens
ctttgggaactgaag

SEQ ID NO: 551939 - DNA, 15 bp, Homo sapiens
tttgggaactgaagc

SEQ ID NO: 551940 - DNA, 15 bp, Homo sapiens
ttgggaactgaagct

SEQ ID NO: 551941 - DNA, 15 bp, Homo sapiens
tgggaactgaagctc

SEQ ID NO: 551942 - DNA, 15 bp, Homo sapiens
gggaactgaagctca

SEQ ID NO: 551943 - DNA, 15 bp, Homo sapiens
ggaactgaagctcag

SEQ ID NO: 551944 - DNA, 15 bp, Homo sapiens
gaactgaagctcaga

SEQ ID NO: 551945 - DNA, 15 bp, Homo sapiens
aactgaagctcagat

SEQ ID NO: 551946 - DNA, 15 bp, Homo sapiens
actgaagctcagata

SEQ ID NO: 551947 - DNA, 15 bp, Homo sapiens
ctgaagctcagataa

SEQ ID NO: 551948 - DNA, 15 bp, Homo sapiens
tgaagctcagataat

SEQ ID NO: 551949 - DNA, 15 bp, Homo sapiens
gaagctcagataatc

SEQ ID NO: 551950 - DNA, 15 bp, Homo sapiens
aagctcagataatct

SEQ ID NO: 551951 - DNA, 15 bp, Homo sapiens
agctcagataatctt

SEQ ID NO: 551952 - DNA, 15 bp, Homo sapiens
gctcagataatcttt

SEQ ID NO: 551953 - DNA, 15 bp, Homo sapiens
ctcagataatctttc

SEQ ID NO: 551954 - DNA, 15 bp, Homo sapiens
tcagataatctttca

SEQ ID NO: 551955 - DNA, 15 bp, Homo sapiens
cagataatctttcag

SEQ ID NO: 551956 - DNA, 15 bp, Homo sapiens
agataatctttcagg

SEQ ID NO: 551957 - DNA, 15 bp, Homo sapiens
gataatctttcaggc

SEQ ID NO: 551958 - DNA, 15 bp, Homo sapiens
ataatctttcaggcc

SEQ ID NO: 551959 - DNA, 15 bp, Homo sapiens
taatctttcaggcct

SEQ ID NO: 551960 - DNA, 15 bp, Homo sapiens
aatctttcaggcctg

SEQ ID NO: 551961 - DNA, 15 bp, Homo sapiens
atctttcaggcctgg

SEQ ID NO: 551962 - DNA, 15 bp, Homo sapiens
tctttcaggcctgga

SEQ ID NO: 551963 - DNA, 15 bp, Homo sapiens
ctttcaggcctggaa

SEQ ID NO: 551964 - DNA, 15 bp, Homo sapiens
tttcaggcctggaat

SEQ ID NO: 551965 - DNA, 15 bp, Homo sapiens
ttcaggcctggaatt

SEQ ID NO: 551966 - DNA, 15 bp, Homo sapiens
tcaggcctggaattt

SEQ ID NO: 551967 - DNA, 15 bp, Homo sapiens
caggcctggaattta

SEQ ID NO: 551968 - DNA, 15 bp, Homo sapiens
aggcctggaatttac

SEQ ID NO: 551969 - DNA, 15 bp, Homo sapiens
ggcctggaatttacg

SEQ ID NO: 551970 - DNA, 15 bp, Homo sapiens
gcctggaatttacgt

SEQ ID NO: 551971 - DNA, 15 bp, Homo sapiens
cctggaatttacgtt

SEQ ID NO: 551972 - DNA, 15 bp, Homo sapiens
ctggaatttacgttt

SEQ ID NO: 551973 - DNA, 15 bp, Homo sapiens
tggaatttacgtttg

SEQ ID NO: 551974 - DNA, 15 bp, Homo sapiens
ggaatttacgtttgg

SEQ ID NO: 551975 - DNA, 15 bp, Homo sapiens
gaatttacgtttggg

SEQ ID NO: 551976 - DNA, 15 bp, Homo sapiens
aatttacgtttgggc

SEQ ID NO: 551977 - DNA, 15 bp, Homo sapiens
atttacgtttgggca

SEQ ID NO: 551978 - DNA, 15 bp, Homo sapiens
tttacgtttgggcat

SEQ ID NO: 551979 - DNA, 15 bp, Homo sapiens
ttacgtttgggcatc

SEQ ID NO: 551980 - DNA, 15 bp, Homo sapiens
tacgtttgggcatca

SEQ ID NO: 551981 - DNA, 15 bp, Homo sapiens
acgtttgggcatcat

SEQ ID NO: 551982 - DNA, 15 bp, Homo sapiens
cgtttgggcatcatc

SEQ ID NO: 551983 - DNA, 15 bp, Homo sapiens
gtttgggcatcatct

SEQ ID NO: 551984 - DNA, 15 bp, Homo sapiens
tttgggcatcatctc

SEQ ID NO: 551985 - DNA, 15 bp, Homo sapiens
ttgggcatcatctct

SEQ ID NO: 551986 - DNA, 15 bp, Homo sapiens
tgggcatcatctcta

SEQ ID NO: 551987 - DNA, 15 bp, Homo sapiens
gggcatcatctctaa

SEQ ID NO: 551988 - DNA, 15 bp, Homo sapiens
ggcatcatctctaag

SEQ ID NO: 551989 - DNA, 15 bp, Homo sapiens
gcatcatctctaagg

SEQ ID NO: 551990 - DNA, 15 bp, Homo sapiens
catcatctctaagga

SEQ ID NO: 551991 - DNA, 15 bp, Homo sapiens
atcatctctaaggag

SEQ ID NO: 551992 - DNA, 15 bp, Homo sapiens
tcatctctaaggagt

SEQ ID NO: 551993 - DNA, 15 bp, Homo sapiens
catctctaaggagtc

SEQ ID NO: 551994 - DNA, 15 bp, Homo sapiens
atctctaaggagtct

SEQ ID NO: 551995 - DNA, 15 bp, Homo sapiens
tctctaaggagtctg

SEQ ID NO: 551996 - DNA, 15 bp, Homo sapiens
ctctaaggagtctga

SEQ ID NO: 551997 - DNA, 15 bp, Homo sapiens
tctaaggagtctgaa

SEQ ID NO: 551998 - DNA, 15 bp, Homo sapiens
ctaaggagtctgaac

SEQ ID NO: 551999 - DNA, 15 bp, Homo sapiens
taaggagtctgaact

SEQ ID NO: 552000 - DNA, 15 bp, Homo sapiens
aaggagtctgaactg

SEQ ID NO: 552001 - DNA, 15 bp, Homo sapiens
aggagtctgaactgt

SEQ ID NO: 552002 - DNA, 15 bp, Homo sapiens
ggagtctgaactgtg

SEQ ID NO: 552003 - DNA, 15 bp, Homo sapiens
gagtctgaactgtga

SEQ ID NO: 552004 - DNA, 15 bp, Homo sapiens
agtctgaactgtgaa

SEQ ID NO: 552005 - DNA, 15 bp, Homo sapiens
gtctgaactgtgaaa

SEQ ID NO: 552006 - DNA, 15 bp, Homo sapiens
tctgaactgtgaaag

SEQ ID NO: 552007 - DNA, 15 bp, Homo sapiens
ctgaactgtgaaagt

SEQ ID NO: 552008 - DNA, 15 bp, Homo sapiens
tgaactgtgaaagtg

SEQ ID NO: 552009 - DNA, 15 bp, Homo sapiens
gaactgtgaaagtgg

SEQ ID NO: 552010 - DNA, 15 bp, Homo sapiens
aactgtgaaagtgga

SEQ ID NO: 552011 - DNA, 15 bp, Homo sapiens
actgtgaaagtggat

SEQ ID NO: 552012 - DNA, 15 bp, Homo sapiens
ctgtgaaagtggatg

SEQ ID NO: 552013 - DNA, 15 bp, Homo sapiens
tgtgaaagtggatga

SEQ ID NO: 552014 - DNA, 15 bp, Homo sapiens
gtgaaagtggatgag

SEQ ID NO: 552015 - DNA, 15 bp, Homo sapiens
tgaaagtggatgagg

SEQ ID NO: 552016 - DNA, 15 bp, Homo sapiens
gaaagtggatgaggt

SEQ ID NO: 552017 - DNA, 15 bp, Homo sapiens
aaagtggatgaggtc

SEQ ID NO: 552018 - DNA, 15 bp, Homo sapiens
aagtggatgaggtca

SEQ ID NO: 552019 - DNA, 15 bp, Homo sapiens
agtggatgaggtcac

SEQ ID NO: 552020 - DNA, 15 bp, Homo sapiens
gtggatgaggtcacc

SEQ ID NO: 552021 - DNA, 15 bp, Homo sapiens
tggatgaggtcaccg

SEQ ID NO: 552022 - DNA, 15 bp, Homo sapiens
ggatgaggtcaccga

SEQ ID NO: 552023 - DNA, 15 bp, Homo sapiens
gatgaggtcaccgag

SEQ ID NO: 552024 - DNA, 15 bp, Homo sapiens
atgaggtcaccgagg

SEQ ID NO: 552025 - DNA, 15 bp, Homo sapiens
tgaggtcaccgagga

SEQ ID NO: 552026 - DNA, 15 bp, Homo sapiens
gaggtcaccgaggaa

SEQ ID NO: 552027 - DNA, 15 bp, Homo sapiens
aggtcaccgaggaaa

SEQ ID NO: 552028 - DNA, 15 bp, Homo sapiens
ggtcaccgaggaaac

SEQ ID NO: 552029 - DNA, 15 bp, Homo sapiens
gtcaccgaggaaact

SEQ ID NO: 552030 - DNA, 15 bp, Homo sapiens
tcaccgaggaaacta

SEQ ID NO: 552031 - DNA, 15 bp, Homo sapiens
caccgaggaaactag

SEQ ID NO: 552032 - DNA, 15 bp, Homo sapiens
accgaggaaactagt

SEQ ID NO: 552033 - DNA, 15 bp, Homo sapiens
ccgaggaaactagtc

SEQ ID NO: 552034 - DNA, 15 bp, Homo sapiens
cgaggaaactagtct

SEQ ID NO: 552035 - DNA, 15 bp, Homo sapiens
gaggaaactagtcta

SEQ ID NO: 552036 - DNA, 15 bp, Homo sapiens
aggaaactagtctag

SEQ ID NO: 552037 - DNA, 15 bp, Homo sapiens
ggaaactagtctaga

SEQ ID NO: 552038 - DNA, 15 bp, Homo sapiens
gaaactagtctagat

SEQ ID NO: 552039 - DNA, 15 bp, Homo sapiens
aaactagtctagatt

SEQ ID NO: 552040 - DNA, 15 bp, Homo sapiens
aactagtctagattg

SEQ ID NO: 552041 - DNA, 15 bp, Homo sapiens
actagtctagattga

SEQ ID NO: 552042 - DNA, 15 bp, Homo sapiens
ctagtctagattgaa

SEQ ID NO: 552043 - DNA, 15 bp, Homo sapiens
tagtctagattgaag

SEQ ID NO: 552044 - DNA, 15 bp, Homo sapiens
agtctagattgaaga

SEQ ID NO: 552045 - DNA, 15 bp, Homo sapiens
gtctagattgaagag

SEQ ID NO: 552046 - DNA, 15 bp, Homo sapiens
tctagattgaagaga

SEQ ID NO: 552047 - DNA, 15 bp, Homo sapiens
ctagattgaagagag

SEQ ID NO: 552048 - DNA, 15 bp, Homo sapiens
tagattgaagagaga

SEQ ID NO: 552049 - DNA, 15 bp, Homo sapiens
agattgaagagagag

SEQ ID NO: 552050 - DNA, 15 bp, Homo sapiens
gattgaagagagaga

SEQ ID NO: 552051 - DNA, 15 bp, Homo sapiens
attgaagagagagaa

SEQ ID NO: 552052 - DNA, 15 bp, Homo sapiens
ttgaagagagagaag

SEQ ID NO: 552053 - DNA, 15 bp, Homo sapiens
tgaagagagagaagg

SEQ ID NO: 552054 - DNA, 15 bp, Homo sapiens
gaagagagagaaggg

SEQ ID NO: 552055 - DNA, 15 bp, Homo sapiens
aagagagagaaggga

SEQ ID NO: 552056 - DNA, 15 bp, Homo sapiens
agagagagaagggaa

SEQ ID NO: 552057 - DNA, 15 bp, Homo sapiens
gagagagaagggaat

SEQ ID NO: 552058 - DNA, 15 bp, Homo sapiens
agagagaagggaatg

SEQ ID NO: 552059 - DNA, 15 bp, Homo sapiens
gagagaagggaatga

SEQ ID NO: 552060 - DNA, 15 bp, Homo sapiens
agagaagggaatgag

SEQ ID NO: 552061 - DNA, 15 bp, Homo sapiens
gagaagggaatgagc

SEQ ID NO: 552062 - DNA, 15 bp, Homo sapiens
agaagggaatgagca

SEQ ID NO: 552063 - DNA, 15 bp, Homo sapiens
gaagggaatgagcat

SEQ ID NO: 552064 - DNA, 15 bp, Homo sapiens
aagggaatgagcatg

SEQ ID NO: 552065 - DNA, 15 bp, Homo sapiens
agggaatgagcatgg

SEQ ID NO: 552066 - DNA, 15 bp, Homo sapiens
gggaatgagcatggt

SEQ ID NO: 552067 - DNA, 15 bp, Homo sapiens
ggaatgagcatggtt

SEQ ID NO: 552068 - DNA, 15 bp, Homo sapiens
gaatgagcatggttg

SEQ ID NO: 552069 - DNA, 15 bp, Homo sapiens
aatgagcatggttgg

SEQ ID NO: 552070 - DNA, 15 bp, Homo sapiens
atgagcatggttggg

SEQ ID NO: 552071 - DNA, 15 bp, Homo sapiens
tgagcatggttggga

SEQ ID NO: 552072 - DNA, 15 bp, Homo sapiens
gagcatggttgggag

SEQ ID NO: 552073 - DNA, 15 bp, Homo sapiens
agcatggttgggagg

SEQ ID NO: 552074 - DNA, 15 bp, Homo sapiens
gcatggttgggaggg

SEQ ID NO: 552075 - DNA, 15 bp, Homo sapiens
catggttgggaggga

SEQ ID NO: 552076 - DNA, 15 bp, Homo sapiens
atggttgggagggag

SEQ ID NO: 552077 - DNA, 15 bp, Homo sapiens
tggttgggagggaga

SEQ ID NO: 552078 - DNA, 15 bp, Homo sapiens
ggttgggagggagaa

SEQ ID NO: 552079 - DNA, 15 bp, Homo sapiens
gttgggagggagaac

SEQ ID NO: 552080 - DNA, 15 bp, Homo sapiens
ttgggagggagaact

SEQ ID NO: 552081 - DNA, 15 bp, Homo sapiens
tgggagggagaactc

SEQ ID NO: 552082 - DNA, 15 bp, Homo sapiens
gggagggagaactcc

SEQ ID NO: 552083 - DNA, 15 bp, Homo sapiens
ggagggagaactcct

SEQ ID NO: 552084 - DNA, 15 bp, Homo sapiens
gagggagaactcctc

SEQ ID NO: 552085 - DNA, 15 bp, Homo sapiens
agggagaactcctcc

SEQ ID NO: 552086 - DNA, 15 bp, Homo sapiens
gggagaactcctcca

SEQ ID NO: 552087 - DNA, 15 bp, Homo sapiens
ggagaactcctccag

SEQ ID NO: 552088 - DNA, 15 bp, Homo sapiens
gagaactcctccaga

SEQ ID NO: 552089 - DNA, 15 bp, Homo sapiens
agaactcctccagag

SEQ ID NO: 552090 - DNA, 15 bp, Homo sapiens
gaactcctccagagc

SEQ ID NO: 552091 - DNA, 15 bp, Homo sapiens
aactcctccagagca

SEQ ID NO: 552092 - DNA, 15 bp, Homo sapiens
actcctccagagcag

SEQ ID NO: 552093 - DNA, 15 bp, Homo sapiens
ctcctccagagcagc

SEQ ID NO: 552094 - DNA, 15 bp, Homo sapiens
tcctccagagcagct

SEQ ID NO: 552095 - DNA, 15 bp, Homo sapiens
cctccagagcagctc

SEQ ID NO: 552096 - DNA, 15 bp, Homo sapiens
ctccagagcagctca

SEQ ID NO: 552097 - DNA, 15 bp, Homo sapiens
tccagagcagctcat

SEQ ID NO: 552098 - DNA, 15 bp, Homo sapiens
ccagagcagctcatg

SEQ ID NO: 552099 - DNA, 15 bp, Homo sapiens
cagagcagctcatgg

SEQ ID NO: 552100 - DNA, 15 bp, Homo sapiens
agagcagctcatggc

SEQ ID NO: 552101 - DNA, 15 bp, Homo sapiens
gagcagctcatggcc

SEQ ID NO: 552102 - DNA, 15 bp, Homo sapiens
agcagctcatggcct

SEQ ID NO: 552103 - DNA, 15 bp, Homo sapiens
gcagctcatggcctc

SEQ ID NO: 552104 - DNA, 15 bp, Homo sapiens
cagctcatggcctca

SEQ ID NO: 552105 - DNA, 15 bp, Homo sapiens
agctcatggcctcag

SEQ ID NO: 552106 - DNA, 15 bp, Homo sapiens
gctcatggcctcaga

SEQ ID NO: 552107 - DNA, 15 bp, Homo sapiens
ctcatggcctcagac

SEQ ID NO: 552108 - DNA, 15 bp, Homo sapiens
tcatggcctcagacc

SEQ ID NO: 552109 - DNA, 15 bp, Homo sapiens
catggcctcagacct

SEQ ID NO: 552110 - DNA, 15 bp, Homo sapiens
atggcctcagacctg

SEQ ID NO: 552111 - DNA, 15 bp, Homo sapiens
tggcctcagacctgc

SEQ ID NO: 552112 - DNA, 15 bp, Homo sapiens
ggcctcagacctgcc

SEQ ID NO: 552113 - DNA, 15 bp, Homo sapiens
gcctcagacctgcct

SEQ ID NO: 552114 - DNA, 15 bp, Homo sapiens
cctcagacctgcctg

SEQ ID NO: 552115 - DNA, 15 bp, Homo sapiens
ctcagacctgcctgt

SEQ ID NO: 552116 - DNA, 15 bp, Homo sapiens
tcagacctgcctgtg

SEQ ID NO: 552117 - DNA, 15 bp, Homo sapiens
cagacctgcctgtgg

SEQ ID NO: 552118 - DNA, 15 bp, Homo sapiens
agacctgcctgtggg

SEQ ID NO: 552119 - DNA, 15 bp, Homo sapiens
gacctgcctgtggga

SEQ ID NO: 552120 - DNA, 15 bp, Homo sapiens
acctgcctgtgggaa

SEQ ID NO: 552121 - DNA, 15 bp, Homo sapiens
cctgcctgtgggaac

SEQ ID NO: 552122 - DNA, 15 bp, Homo sapiens
ctgcctgtgggaact

SEQ ID NO: 552123 - DNA, 15 bp, Homo sapiens
tgcctgtgggaactg

SEQ ID NO: 552124 - DNA, 15 bp, Homo sapiens
gcctgtgggaactgc

SEQ ID NO: 552125 - DNA, 15 bp, Homo sapiens
cctgtgggaactgcc

SEQ ID NO: 552126 - DNA, 15 bp, Homo sapiens
ctgtgggaactgcca

SEQ ID NO: 552127 - DNA, 15 bp, Homo sapiens
tgtgggaactgccag

SEQ ID NO: 552128 - DNA, 15 bp, Homo sapiens
gtgggaactgccagg

SEQ ID NO: 552129 - DNA, 15 bp, Homo sapiens
tgggaactgccaggc

SEQ ID NO: 552130 - DNA, 15 bp, Homo sapiens
gggaactgccaggcc

SEQ ID NO: 552131 - DNA, 15 bp, Homo sapiens
ggaactgccaggcct

SEQ ID NO: 552132 - DNA, 15 bp, Homo sapiens
gaactgccaggccta

SEQ ID NO: 552133 - DNA, 15 bp, Homo sapiens
aactgccaggcctac

SEQ ID NO: 552134 - DNA, 15 bp, Homo sapiens
actgccaggcctacc

SEQ ID NO: 552135 - DNA, 15 bp, Homo sapiens
ctgccaggcctacca

SEQ ID NO: 552136 - DNA, 15 bp, Homo sapiens
tgccaggcctaccac

SEQ ID NO: 552137 - DNA, 15 bp, Homo sapiens
gccaggcctaccaca

SEQ ID NO: 552138 - DNA, 15 bp, Homo sapiens
ccaggcctaccacat

SEQ ID NO: 552139 - DNA, 15 bp, Homo sapiens
caggcctaccacatt

SEQ ID NO: 552140 - DNA, 15 bp, Homo sapiens
aggcctaccacattt

SEQ ID NO: 552141 - DNA, 15 bp, Homo sapiens
ggcctaccacatttc

SEQ ID NO: 552142 - DNA, 15 bp, Homo sapiens
gcctaccacatttca

SEQ ID NO: 552143 - DNA, 15 bp, Homo sapiens
cctaccacatttcaa

SEQ ID NO: 552144 - DNA, 15 bp, Homo sapiens
ctaccacatttcaac

SEQ ID NO: 552145 - DNA, 15 bp, Homo sapiens
taccacatttcaacc

SEQ ID NO: 552146 - DNA, 15 bp, Homo sapiens
accacatttcaaccc

SEQ ID NO: 552147 - DNA, 15 bp, Homo sapiens
ccacatttcaaccct

SEQ ID NO: 552148 - DNA, 15 bp, Homo sapiens
cacatttcaacccta

SEQ ID NO: 552149 - DNA, 15 bp, Homo sapiens
acatttcaaccctac

SEQ ID NO: 552150 - DNA, 15 bp, Homo sapiens
catttcaaccctact

SEQ ID NO: 552151 - DNA, 15 bp, Homo sapiens
atttcaaccctacta

SEQ ID NO: 552152 - DNA, 15 bp, Homo sapiens
tttcaaccctactaa

SEQ ID NO: 552153 - DNA, 15 bp, Homo sapiens
ttcaaccctactaac

SEQ ID NO: 552154 - DNA, 15 bp, Homo sapiens
tcaaccctactaacc

SEQ ID NO: 552155 - DNA, 15 bp, Homo sapiens
caaccctactaacca

SEQ ID NO: 552156 - DNA, 15 bp, Homo sapiens
aaccctactaaccaa

SEQ ID NO: 552157 - DNA, 15 bp, Homo sapiens
accctactaaccaaa

SEQ ID NO: 552158 - DNA, 15 bp, Homo sapiens
ccctactaaccaaaa

SEQ ID NO: 552159 - DNA, 15 bp, Homo sapiens
cctactaaccaaaac

SEQ ID NO: 552160 - DNA, 15 bp, Homo sapiens
ctactaaccaaaacc

SEQ ID NO: 552161 - DNA, 15 bp, Homo sapiens
tactaaccaaaacca

SEQ ID NO: 552162 - DNA, 15 bp, Homo sapiens
actaaccaaaaccag

SEQ ID NO: 552163 - DNA, 15 bp, Homo sapiens
ctaaccaaaaccagt

SEQ ID NO: 552164 - DNA, 15 bp, Homo sapiens
taaccaaaaccagtg

SEQ ID NO: 552165 - DNA, 15 bp, Homo sapiens
aaccaaaaccagtga

SEQ ID NO: 552166 - DNA, 15 bp, Homo sapiens
accaaaaccagtgac

SEQ ID NO: 552167 - DNA, 15 bp, Homo sapiens
ccaaaaccagtgact

SEQ ID NO: 552168 - DNA, 15 bp, Homo sapiens
caaaaccagtgactg

SEQ ID NO: 552169 - DNA, 15 bp, Homo sapiens
aaaaccagtgactgg

SEQ ID NO: 552170 - DNA, 15 bp, Homo sapiens
aaaccagtgactggg

SEQ ID NO: 552171 - DNA, 15 bp, Homo sapiens
aaccagtgactggga

SEQ ID NO: 552172 - DNA, 15 bp, Homo sapiens
accagtgactgggat

SEQ ID NO: 552173 - DNA, 15 bp, Homo sapiens
ccagtgactgggatc

SEQ ID NO: 552174 - DNA, 15 bp, Homo sapiens
cagtgactgggatct

SEQ ID NO: 552175 - DNA, 15 bp, Homo sapiens
agtgactgggatctc

SEQ ID NO: 552176 - DNA, 15 bp, Homo sapiens
gtgactgggatctca

SEQ ID NO: 552177 - DNA, 15 bp, Homo sapiens
tgactgggatctcag

SEQ ID NO: 552178 - DNA, 15 bp, Homo sapiens
gactgggatctcagc

SEQ ID NO: 552179 - DNA, 15 bp, Homo sapiens
actgggatctcagcc

SEQ ID NO: 552180 - DNA, 15 bp, Homo sapiens
ctgggatctcagcca

SEQ ID NO: 552181 - DNA, 15 bp, Homo sapiens
tgggatctcagccac

SEQ ID NO: 552182 - DNA, 15 bp, Homo sapiens
gggatctcagccacc

SEQ ID NO: 552183 - DNA, 15 bp, Homo sapiens
ggatctcagccacct

SEQ ID NO: 552184 - DNA, 15 bp, Homo sapiens
gatctcagccacctt

SEQ ID NO: 552185 - DNA, 15 bp, Homo sapiens
atctcagccaccttt

SEQ ID NO: 552186 - DNA, 15 bp, Homo sapiens
tctcagccacctttc

SEQ ID NO: 552187 - DNA, 15 bp, Homo sapiens
ctcagccacctttcc

SEQ ID NO: 552188 - DNA, 15 bp, Homo sapiens
tcagccacctttcca

SEQ ID NO: 552189 - DNA, 15 bp, Homo sapiens
cagccacctttccag

SEQ ID NO: 552190 - DNA, 15 bp, Homo sapiens
agccacctttccaga

SEQ ID NO: 552191 - DNA, 15 bp, Homo sapiens
gccacctttccagat

SEQ ID NO: 552192 - DNA, 15 bp, Homo sapiens
ccacctttccagatc

SEQ ID NO: 552193 - DNA, 15 bp, Homo sapiens
cacctttccagatcc

SEQ ID NO: 552194 - DNA, 15 bp, Homo sapiens
acctttccagatccc

SEQ ID NO: 552195 - DNA, 15 bp, Homo sapiens
cctttccagatccca

SEQ ID NO: 552196 - DNA, 15 bp, Homo sapiens
ctttccagatcccag

SEQ ID NO: 552197 - DNA, 15 bp, Homo sapiens
tttccagatcccagg

SEQ ID NO: 552198 - DNA, 15 bp, Homo sapiens
ttccagatcccagga

SEQ ID NO: 552199 - DNA, 15 bp, Homo sapiens
tccagatcccaggat

SEQ ID NO: 552200 - DNA, 15 bp, Homo sapiens
ccagatcccaggatt

SEQ ID NO: 552201 - DNA, 15 bp, Homo sapiens
cagatcccaggattt

SEQ ID NO: 552202 - DNA, 15 bp, Homo sapiens
agatcccaggatttc

SEQ ID NO: 552203 - DNA, 15 bp, Homo sapiens
gatcccaggatttca

SEQ ID NO: 552204 - DNA, 15 bp, Homo sapiens
atcccaggatttcag

SEQ ID NO: 552205 - DNA, 15 bp, Homo sapiens
tcccaggatttcagg

SEQ ID NO: 552206 - DNA, 15 bp, Homo sapiens
cccaggatttcagga

SEQ ID NO: 552207 - DNA, 15 bp, Homo sapiens
ccaggatttcaggaa

SEQ ID NO: 552208 - DNA, 15 bp, Homo sapiens
caggatttcaggaag

SEQ ID NO: 552209 - DNA, 15 bp, Homo sapiens
aggatttcaggaagg

SEQ ID NO: 552210 - DNA, 15 bp, Homo sapiens
ggatttcaggaaggc

SEQ ID NO: 552211 - DNA, 15 bp, Homo sapiens
gatttcaggaaggct

SEQ ID NO: 552212 - DNA, 15 bp, Homo sapiens
atttcaggaaggctc

SEQ ID NO: 552213 - DNA, 15 bp, Homo sapiens
tttcaggaaggctca

SEQ ID NO: 552214 - DNA, 15 bp, Homo sapiens
ttcaggaaggctcag

SEQ ID NO: 552215 - DNA, 15 bp, Homo sapiens
tcaggaaggctcaga

SEQ ID NO: 552216 - DNA, 15 bp, Homo sapiens
caggaaggctcagag

SEQ ID NO: 552217 - DNA, 15 bp, Homo sapiens
aggaaggctcagagg

SEQ ID NO: 552218 - DNA, 15 bp, Homo sapiens
ggaaggctcagaggt

SEQ ID NO: 552219 - DNA, 15 bp, Homo sapiens
gaaggctcagaggtt

SEQ ID NO: 552220 - DNA, 15 bp, Homo sapiens
aaggctcagaggttc

SEQ ID NO: 552221 - DNA, 15 bp, Homo sapiens
aggctcagaggttct

SEQ ID NO: 552222 - DNA, 15 bp, Homo sapiens
ggctcagaggttctg

SEQ ID NO: 552223 - DNA, 15 bp, Homo sapiens
gctcagaggttctga

SEQ ID NO: 552224 - DNA, 15 bp, Homo sapiens
ctcagaggttctgag

SEQ ID NO: 552225 - DNA, 15 bp, Homo sapiens
tcagaggttctgagc

SEQ ID NO: 552226 - DNA, 15 bp, Homo sapiens
cagaggttctgagcc

SEQ ID NO: 552227 - DNA, 15 bp, Homo sapiens
agaggttctgagcct

SEQ ID NO: 552228 - DNA, 15 bp, Homo sapiens
gaggttctgagcctg

SEQ ID NO: 552229 - DNA, 15 bp, Homo sapiens
aggttctgagcctgc

SEQ ID NO: 552230 - DNA, 15 bp, Homo sapiens
ggttctgagcctgca

SEQ ID NO: 552231 - DNA, 15 bp, Homo sapiens
gttctgagcctgcag

SEQ ID NO: 552232 - DNA, 15 bp, Homo sapiens
ttctgagcctgcagc

SEQ ID NO: 552233 - DNA, 15 bp, Homo sapiens
tctgagcctgcagcc

SEQ ID NO: 552234 - DNA, 15 bp, Homo sapiens
ctgagcctgcagccc

SEQ ID NO: 552235 - DNA, 15 bp, Homo sapiens
tgagcctgcagcccc

SEQ ID NO: 552236 - DNA, 15 bp, Homo sapiens
gagcctgcagcccct

SEQ ID NO: 552237 - DNA, 15 bp, Homo sapiens
agcctgcagcccctc

SEQ ID NO: 552238 - DNA, 15 bp, Homo sapiens
gcctgcagcccctca

SEQ ID NO: 552239 - DNA, 15 bp, Homo sapiens
cctgcagcccctcag

SEQ ID NO: 552240 - DNA, 15 bp, Homo sapiens
ctgcagcccctcaga

SEQ ID NO: 552241 - DNA, 15 bp, Homo sapiens
tgcagcccctcagat

SEQ ID NO: 552242 - DNA, 15 bp, Homo sapiens
gcagcccctcagatg

SEQ ID NO: 552243 - DNA, 15 bp, Homo sapiens
cagcccctcagatga

SEQ ID NO: 552244 - DNA, 15 bp, Homo sapiens
agcccctcagatgaa

SEQ ID NO: 552245 - DNA, 15 bp, Homo sapiens
gcccctcagatgaat

SEQ ID NO: 552246 - DNA, 15 bp, Homo sapiens
cccctcagatgaatc

SEQ ID NO: 552247 - DNA, 15 bp, Homo sapiens
ccctcagatgaatct

SEQ ID NO: 552248 - DNA, 15 bp, Homo sapiens
cctcagatgaatctc

SEQ ID NO: 552249 - DNA, 15 bp, Homo sapiens
ctcagatgaatctct

SEQ ID NO: 552250 - DNA, 15 bp, Homo sapiens
tcagatgaatctctc

SEQ ID NO: 552251 - DNA, 15 bp, Homo sapiens
cagatgaatctctct

SEQ ID NO: 552252 - DNA, 15 bp, Homo sapiens
agatgaatctctctc

SEQ ID NO: 552253 - DNA, 15 bp, Homo sapiens
gatgaatctctctcc

SEQ ID NO: 552254 - DNA, 15 bp, Homo sapiens
atgaatctctctcca

SEQ ID NO: 552255 - DNA, 15 bp, Homo sapiens
tgaatctctctccag

SEQ ID NO: 552256 - DNA, 15 bp, Homo sapiens
gaatctctctccaga

SEQ ID NO: 552257 - DNA, 15 bp, Homo sapiens
aatctctctccagat

SEQ ID NO: 552258 - DNA, 15 bp, Homo sapiens
atctctctccagatg

SEQ ID NO: 552259 - DNA, 15 bp, Homo sapiens
tctctctccagatgt

SEQ ID NO: 552260 - DNA, 15 bp, Homo sapiens
ctctctccagatgta

SEQ ID NO: 552261 - DNA, 15 bp, Homo sapiens
tctctccagatgtaa

SEQ ID NO: 552262 - DNA, 15 bp, Homo sapiens
ctctccagatgtaat

SEQ ID NO: 552263 - DNA, 15 bp, Homo sapiens
tctccagatgtaatt

SEQ ID NO: 552264 - DNA, 15 bp, Homo sapiens
ctccagatgtaattc

SEQ ID NO: 552265 - DNA, 15 bp, Homo sapiens
tccagatgtaattct

SEQ ID NO: 552266 - DNA, 15 bp, Homo sapiens
ccagatgtaattctg

SEQ ID NO: 552267 - DNA, 15 bp, Homo sapiens
cagatgtaattctga

SEQ ID NO: 552268 - DNA, 15 bp, Homo sapiens
agatgtaattctgat

SEQ ID NO: 552269 - DNA, 15 bp, Homo sapiens
gatgtaattctgatg

SEQ ID NO: 552270 - DNA, 15 bp, Homo sapiens
atgtaattctgatgg

SEQ ID NO: 552271 - DNA, 15 bp, Homo sapiens
tgtaattctgatggt

SEQ ID NO: 552272 - DNA, 15 bp, Homo sapiens
gtaattctgatggtg

SEQ ID NO: 552273 - DNA, 15 bp, Homo sapiens
taattctgatggtgc

SEQ ID NO: 552274 - DNA, 15 bp, Homo sapiens
aattctgatggtgcc

SEQ ID NO: 552275 - DNA, 15 bp, Homo sapiens
attctgatggtgccg

SEQ ID NO: 552276 - DNA, 15 bp, Homo sapiens
ttctgatggtgccgg

SEQ ID NO: 552277 - DNA, 15 bp, Homo sapiens
tctgatggtgccgga

SEQ ID NO: 552278 - DNA, 15 bp, Homo sapiens
ctgatggtgccggag

SEQ ID NO: 552279 - DNA, 15 bp, Homo sapiens
tgatggtgccggagc

SEQ ID NO: 552280 - DNA, 15 bp, Homo sapiens
gatggtgccggagct

SEQ ID NO: 552281 - DNA, 15 bp, Homo sapiens
atggtgccggagctc

SEQ ID NO: 552282 - DNA, 15 bp, Homo sapiens
tggtgccggagctcc

SEQ ID NO: 552283 - DNA, 15 bp, Homo sapiens
ggtgccggagctcct

SEQ ID NO: 552284 - DNA, 15 bp, Homo sapiens
gtgccggagctccta

SEQ ID NO: 552285 - DNA, 15 bp, Homo sapiens
tgccggagctcctaa

SEQ ID NO: 552286 - DNA, 15 bp, Homo sapiens
gccggagctcctaac

SEQ ID NO: 552287 - DNA, 15 bp, Homo sapiens
ccggagctcctaaca

SEQ ID NO: 552288 - DNA, 15 bp, Homo sapiens
cggagctcctaacag

SEQ ID NO: 552289 - DNA, 15 bp, Homo sapiens
ggagctcctaacagt

SEQ ID NO: 552290 - DNA, 15 bp, Homo sapiens
gagctcctaacagtc

SEQ ID NO: 552291 - DNA, 15 bp, Homo sapiens
agctcctaacagtcg

SEQ ID NO: 552292 - DNA, 15 bp, Homo sapiens
gctcctaacagtcga

SEQ ID NO: 552293 - DNA, 15 bp, Homo sapiens
ctcctaacagtcgaa

SEQ ID NO: 552294 - DNA, 15 bp, Homo sapiens
tcctaacagtcgaag

SEQ ID NO: 552295 - DNA, 15 bp, Homo sapiens
cctaacagtcgaagg

SEQ ID NO: 552296 - DNA, 15 bp, Homo sapiens
ctaacagtcgaagga

SEQ ID NO: 552297 - DNA, 15 bp, Homo sapiens
taacagtcgaaggac

SEQ ID NO: 552298 - DNA, 15 bp, Homo sapiens
aacagtcgaaggaca

SEQ ID NO: 552299 - DNA, 15 bp, Homo sapiens
acagtcgaaggacat

SEQ ID NO: 552300 - DNA, 15 bp, Homo sapiens
cagtcgaaggacatg

SEQ ID NO: 552301 - DNA, 15 bp, Homo sapiens
agtcgaaggacatgg

SEQ ID NO: 552302 - DNA, 15 bp, Homo sapiens
gtcgaaggacatggt

SEQ ID NO: 552303 - DNA, 15 bp, Homo sapiens
tcgaaggacatggtg

SEQ ID NO: 552304 - DNA, 15 bp, Homo sapiens
cgaaggacatggtgt

SEQ ID NO: 552305 - DNA, 15 bp, Homo sapiens
gaaggacatggtgtg

SEQ ID NO: 552306 - DNA, 15 bp, Homo sapiens
aaggacatggtgtgt

SEQ ID NO: 552307 - DNA, 15 bp, Homo sapiens
aggacatggtgtgtt

SEQ ID NO: 552308 - DNA, 15 bp, Homo sapiens
ggacatggtgtgttg

SEQ ID NO: 552309 - DNA, 15 bp, Homo sapiens
gacatggtgtgttga

SEQ ID NO: 552310 - DNA, 15 bp, Homo sapiens
acatggtgtgttgaa

SEQ ID NO: 552311 - DNA, 15 bp, Homo sapiens
catggtgtgttgaac

SEQ ID NO: 552312 - DNA, 15 bp, Homo sapiens
atggtgtgttgaacg

SEQ ID NO: 552313 - DNA, 15 bp, Homo sapiens
tggtgtgttgaacgt

SEQ ID NO: 552314 - DNA, 15 bp, Homo sapiens
ggtgtgttgaacgtt

SEQ ID NO: 552315 - DNA, 15 bp, Homo sapiens
gtgtgttgaacgttt

SEQ ID NO: 552316 - DNA, 15 bp, Homo sapiens
tgtgttgaacgtttt

SEQ ID NO: 552317 - DNA, 15 bp, Homo sapiens
gtgttgaacgttttc

SEQ ID NO: 552318 - DNA, 15 bp, Homo sapiens
tgttgaacgttttcc

SEQ ID NO: 552319 - DNA, 15 bp, Homo sapiens
gttgaacgttttccc

SEQ ID NO: 552320 - DNA, 15 bp, Homo sapiens
ttgaacgttttccca

SEQ ID NO: 552321 - DNA, 15 bp, Homo sapiens
tgaacgttttcccat

SEQ ID NO: 552322 - DNA, 15 bp, Homo sapiens
gaacgttttcccata

SEQ ID NO: 552323 - DNA, 15 bp, Homo sapiens
aacgttttcccatat

SEQ ID NO: 552324 - DNA, 15 bp, Homo sapiens
acgttttcccatatt

SEQ ID NO: 552325 - DNA, 15 bp, Homo sapiens
cgttttcccatatta

SEQ ID NO: 552326 - DNA, 15 bp, Homo sapiens
gttttcccatattat

SEQ ID NO: 552327 - DNA, 15 bp, Homo sapiens
ttttcccatattatc

SEQ ID NO: 552328 - DNA, 15 bp, Homo sapiens
tttcccatattatct

SEQ ID NO: 552329 - DNA, 15 bp, Homo sapiens
ttcccatattatctt

SEQ ID NO: 552330 - DNA, 15 bp, Homo sapiens
tcccatattatctta

SEQ ID NO: 552331 - DNA, 15 bp, Homo sapiens
cccatattatcttac

SEQ ID NO: 552332 - DNA, 15 bp, Homo sapiens
ccatattatcttacc

SEQ ID NO: 552333 - DNA, 15 bp, Homo sapiens
catattatcttacca

SEQ ID NO: 552334 - DNA, 15 bp, Homo sapiens
atattatcttaccac

SEQ ID NO: 552335 - DNA, 15 bp, Homo sapiens
tattatcttaccact

SEQ ID NO: 552336 - DNA, 15 bp, Homo sapiens
attatcttaccactt

SEQ ID NO: 552337 - DNA, 15 bp, Homo sapiens
ttatcttaccacttg

SEQ ID NO: 552338 - DNA, 15 bp, Homo sapiens
tatcttaccacttgt

SEQ ID NO: 552339 - DNA, 15 bp, Homo sapiens
atcttaccacttgtt

SEQ ID NO: 552340 - DNA, 15 bp, Homo sapiens
tcttaccacttgttc

SEQ ID NO: 552341 - DNA, 15 bp, Homo sapiens
cttaccacttgttcc

SEQ ID NO: 552342 - DNA, 15 bp, Homo sapiens
ttaccacttgttcct

SEQ ID NO: 552343 - DNA, 15 bp, Homo sapiens
taccacttgttcctc

SEQ ID NO: 552344 - DNA, 15 bp, Homo sapiens
accacttgttcctca

SEQ ID NO: 552345 - DNA, 15 bp, Homo sapiens
ccacttgttcctcac

SEQ ID NO: 552346 - DNA, 15 bp, Homo sapiens
cacttgttcctcacc

SEQ ID NO: 552347 - DNA, 15 bp, Homo sapiens
acttgttcctcacca

SEQ ID NO: 552348 - DNA, 15 bp, Homo sapiens
cttgttcctcaccac

SEQ ID NO: 552349 - DNA, 15 bp, Homo sapiens
ttgttcctcaccact

SEQ ID NO: 552350 - DNA, 15 bp, Homo sapiens
tgttcctcaccacta

SEQ ID NO: 552351 - DNA, 15 bp, Homo sapiens
gttcctcaccactat

SEQ ID NO: 552352 - DNA, 15 bp, Homo sapiens
ttcctcaccactata

SEQ ID NO: 552353 - DNA, 15 bp, Homo sapiens
tcctcaccactatac

SEQ ID NO: 552354 - DNA, 15 bp, Homo sapiens
cctcaccactatact

SEQ ID NO: 552355 - DNA, 15 bp, Homo sapiens
ctcaccactatacta

SEQ ID NO: 552356 - DNA, 15 bp, Homo sapiens
tcaccactatactaa

SEQ ID NO: 552357 - DNA, 15 bp, Homo sapiens
caccactatactaag

SEQ ID NO: 552358 - DNA, 15 bp, Homo sapiens
accactatactaaga

SEQ ID NO: 552359 - DNA, 15 bp, Homo sapiens
ccactatactaagaa

SEQ ID NO: 552360 - DNA, 15 bp, Homo sapiens
cactatactaagaag

SEQ ID NO: 552361 - DNA, 15 bp, Homo sapiens
actatactaagaagt

SEQ ID NO: 552362 - DNA, 15 bp, Homo sapiens
ctatactaagaagta

SEQ ID NO: 552363 - DNA, 15 bp, Homo sapiens
tatactaagaagtag

SEQ ID NO: 552364 - DNA, 15 bp, Homo sapiens
atactaagaagtagt

SEQ ID NO: 552365 - DNA, 15 bp, Homo sapiens
tactaagaagtagtt

SEQ ID NO: 552366 - DNA, 15 bp, Homo sapiens
actaagaagtagtta

SEQ ID NO: 552367 - DNA, 15 bp, Homo sapiens
ctaagaagtagttac

SEQ ID NO: 552368 - DNA, 15 bp, Homo sapiens
taagaagtagttact

SEQ ID NO: 552369 - DNA, 15 bp, Homo sapiens
aagaagtagttactg

SEQ ID NO: 552370 - DNA, 15 bp, Homo sapiens
agaagtagttactgt

SEQ ID NO: 552371 - DNA, 15 bp, Homo sapiens
gaagtagttactgta

SEQ ID NO: 552372 - DNA, 15 bp, Homo sapiens
aagtagttactgtaa

SEQ ID NO: 552373 - DNA, 15 bp, Homo sapiens
agtagttactgtaac

SEQ ID NO: 552374 - DNA, 15 bp, Homo sapiens
gtagttactgtaact

SEQ ID NO: 552375 - DNA, 15 bp, Homo sapiens
tagttactgtaactt

SEQ ID NO: 552376 - DNA, 15 bp, Homo sapiens
agttactgtaacttc

SEQ ID NO: 552377 - DNA, 15 bp, Homo sapiens
gttactgtaacttca

SEQ ID NO: 552378 - DNA, 15 bp, Homo sapiens
ttactgtaacttcac

SEQ ID NO: 552379 - DNA, 15 bp, Homo sapiens
tactgtaacttcact

SEQ ID NO: 552380 - DNA, 15 bp, Homo sapiens
actgtaacttcactg

SEQ ID NO: 552381 - DNA, 15 bp, Homo sapiens
ctgtaacttcactgt

SEQ ID NO: 552382 - DNA, 15 bp, Homo sapiens
tgtaacttcactgtt

SEQ ID NO: 552383 - DNA, 15 bp, Homo sapiens
gtaacttcactgtta

SEQ ID NO: 552384 - DNA, 15 bp, Homo sapiens
taacttcactgttac

SEQ ID NO: 552385 - DNA, 15 bp, Homo sapiens
aacttcactgttaca

SEQ ID NO: 552386 - DNA, 15 bp, Homo sapiens
acttcactgttacac

SEQ ID NO: 552387 - DNA, 15 bp, Homo sapiens
cttcactgttacaca

SEQ ID NO: 552388 - DNA, 15 bp, Homo sapiens
ttcactgttacacag

SEQ ID NO: 552389 - DNA, 15 bp, Homo sapiens
tcactgttacacagg

SEQ ID NO: 552390 - DNA, 15 bp, Homo sapiens
cactgttacacagga

SEQ ID NO: 552391 - DNA, 15 bp, Homo sapiens
actgttacacaggaa

SEQ ID NO: 552392 - DNA, 15 bp, Homo sapiens
ctgttacacaggaag

SEQ ID NO: 552393 - DNA, 15 bp, Homo sapiens
tgttacacaggaagg

SEQ ID NO: 552394 - DNA, 15 bp, Homo sapiens
gttacacaggaaggc

SEQ ID NO: 552395 - DNA, 15 bp, Homo sapiens
ttacacaggaaggca

SEQ ID NO: 552396 - DNA, 15 bp, Homo sapiens
tacacaggaaggcaa

SEQ ID NO: 552397 - DNA, 15 bp, Homo sapiens
acacaggaaggcaag

SEQ ID NO: 552398 - DNA, 15 bp, Homo sapiens
cacaggaaggcaagc

SEQ ID NO: 552399 - DNA, 15 bp, Homo sapiens
acaggaaggcaagca

SEQ ID NO: 552400 - DNA, 15 bp, Homo sapiens
caggaaggcaagcag

SEQ ID NO: 552401 - DNA, 15 bp, Homo sapiens
aggaaggcaagcagg

SEQ ID NO: 552402 - DNA, 15 bp, Homo sapiens
ggaaggcaagcaggg

SEQ ID NO: 552403 - DNA, 15 bp, Homo sapiens
gaaggcaagcagggc

SEQ ID NO: 552404 - DNA, 15 bp, Homo sapiens
aaggcaagcagggct

SEQ ID NO: 552405 - DNA, 15 bp, Homo sapiens
aggcaagcagggctt

SEQ ID NO: 552406 - DNA, 15 bp, Homo sapiens
ggcaagcagggcttt

SEQ ID NO: 552407 - DNA, 15 bp, Homo sapiens
gcaagcagggctttc

SEQ ID NO: 552408 - DNA, 15 bp, Homo sapiens
caagcagggctttca

SEQ ID NO: 552409 - DNA, 15 bp, Homo sapiens
aagcagggctttcag

SEQ ID NO: 552410 - DNA, 15 bp, Homo sapiens
agcagggctttcagg

SEQ ID NO: 552411 - DNA, 15 bp, Homo sapiens
gcagggctttcaggg

SEQ ID NO: 552412 - DNA, 15 bp, Homo sapiens
cagggctttcagggg

SEQ ID NO: 552413 - DNA, 15 bp, Homo sapiens
agggctttcagggga

SEQ ID NO: 552414 - DNA, 15 bp, Homo sapiens
gggctttcaggggac

SEQ ID NO: 552415 - DNA, 15 bp, Homo sapiens
ggctttcaggggaca

SEQ ID NO: 552416 - DNA, 15 bp, Homo sapiens
gctttcaggggacag

SEQ ID NO: 552417 - DNA, 15 bp, Homo sapiens
ctttcaggggacagt

SEQ ID NO: 552418 - DNA, 15 bp, Homo sapiens
tttcaggggacagtg

SEQ ID NO: 552419 - DNA, 15 bp, Homo sapiens
ttcaggggacagtgc

SEQ ID NO: 552420 - DNA, 15 bp, Homo sapiens
tcaggggacagtgct

SEQ ID NO: 552421 - DNA, 15 bp, Homo sapiens
caggggacagtgctt

SEQ ID NO: 552422 - DNA, 15 bp, Homo sapiens
aggggacagtgcttt

SEQ ID NO: 552423 - DNA, 15 bp, Homo sapiens
ggggacagtgctttg

SEQ ID NO: 552424 - DNA, 15 bp, Homo sapiens
gggacagtgctttgt

SEQ ID NO: 552425 - DNA, 15 bp, Homo sapiens
ggacagtgctttgtc

SEQ ID NO: 552426 - DNA, 15 bp, Homo sapiens
gacagtgctttgtct

SEQ ID NO: 552427 - DNA, 15 bp, Homo sapiens
acagtgctttgtcta

SEQ ID NO: 552428 - DNA, 15 bp, Homo sapiens
cagtgctttgtctaa

SEQ ID NO: 552429 - DNA, 15 bp, Homo sapiens
agtgctttgtctaag

SEQ ID NO: 552430 - DNA, 15 bp, Homo sapiens
gtgctttgtctaagg

SEQ ID NO: 552431 - DNA, 15 bp, Homo sapiens
tgctttgtctaagga

SEQ ID NO: 552432 - DNA, 15 bp, Homo sapiens
gctttgtctaaggat

SEQ ID NO: 552433 - DNA, 15 bp, Homo sapiens
ctttgtctaaggatt

SEQ ID NO: 552434 - DNA, 15 bp, Homo sapiens
tttgtctaaggattt

SEQ ID NO: 552435 - DNA, 15 bp, Homo sapiens
ttgtctaaggattta

SEQ ID NO: 552436 - DNA, 15 bp, Homo sapiens
tgtctaaggatttaa

SEQ ID NO: 552437 - DNA, 15 bp, Homo sapiens
gtctaaggatttaaa

SEQ ID NO: 552438 - DNA, 15 bp, Homo sapiens
tctaaggatttaaag

SEQ ID NO: 552439 - DNA, 15 bp, Homo sapiens
ctaaggatttaaagg

SEQ ID NO: 552440 - DNA, 15 bp, Homo sapiens
taaggatttaaagga

SEQ ID NO: 552441 - DNA, 15 bp, Homo sapiens
aaggatttaaaggag

SEQ ID NO: 552442 - DNA, 15 bp, Homo sapiens
aggatttaaaggagg

SEQ ID NO: 552443 - DNA, 15 bp, Homo sapiens
ggatttaaaggaggc

SEQ ID NO: 552444 - DNA, 15 bp, Homo sapiens
gatttaaaggaggca

SEQ ID NO: 552445 - DNA, 15 bp, Homo sapiens
atttaaaggaggcaa

SEQ ID NO: 552446 - DNA, 15 bp, Homo sapiens
tttaaaggaggcaaa

SEQ ID NO: 552447 - DNA, 15 bp, Homo sapiens
ttaaaggaggcaaag

SEQ ID NO: 552448 - DNA, 15 bp, Homo sapiens
taaaggaggcaaagt

SEQ ID NO: 552449 - DNA, 15 bp, Homo sapiens
aaaggaggcaaagtt

SEQ ID NO: 552450 - DNA, 15 bp, Homo sapiens
aaggaggcaaagttg

SEQ ID NO: 552451 - DNA, 15 bp, Homo sapiens
aggaggcaaagttgg

SEQ ID NO: 552452 - DNA, 15 bp, Homo sapiens
ggaggcaaagttgga

SEQ ID NO: 552453 - DNA, 15 bp, Homo sapiens
gaggcaaagttggag

SEQ ID NO: 552454 - DNA, 15 bp, Homo sapiens
aggcaaagttggagc

SEQ ID NO: 552455 - DNA, 15 bp, Homo sapiens
ggcaaagttggagcc

SEQ ID NO: 552456 - DNA, 15 bp, Homo sapiens
gcaaagttggagccc

SEQ ID NO: 552457 - DNA, 15 bp, Homo sapiens
caaagttggagcccg

SEQ ID NO: 552458 - DNA, 15 bp, Homo sapiens
aaagttggagcccga

SEQ ID NO: 552459 - DNA, 15 bp, Homo sapiens
aagttggagcccgaa

SEQ ID NO: 552460 - DNA, 15 bp, Homo sapiens
agttggagcccgaac

SEQ ID NO: 552461 - DNA, 15 bp, Homo sapiens
gttggagcccgaacc

SEQ ID NO: 552462 - DNA, 15 bp, Homo sapiens
ttggagcccgaaccc

SEQ ID NO: 552463 - DNA, 15 bp, Homo sapiens
tggagcccgaaccca

SEQ ID NO: 552464 - DNA, 15 bp, Homo sapiens
ggagcccgaacccag

SEQ ID NO: 552465 - DNA, 15 bp, Homo sapiens
gagcccgaacccagg

SEQ ID NO: 552466 - DNA, 15 bp, Homo sapiens
agcccgaacccaggc

SEQ ID NO: 552467 - DNA, 15 bp, Homo sapiens
gcccgaacccaggcg

SEQ ID NO: 552468 - DNA, 15 bp, Homo sapiens
cccgaacccaggcgt

SEQ ID NO: 552469 - DNA, 15 bp, Homo sapiens
ccgaacccaggcgtt

SEQ ID NO: 552470 - DNA, 15 bp, Homo sapiens
cgaacccaggcgttt

SEQ ID NO: 552471 - DNA, 15 bp, Homo sapiens
gaacccaggcgtttg

SEQ ID NO: 552472 - DNA, 15 bp, Homo sapiens
aacccaggcgtttgg

SEQ ID NO: 552473 - DNA, 15 bp, Homo sapiens
acccaggcgtttggt

SEQ ID NO: 552474 - DNA, 15 bp, Homo sapiens
cccaggcgtttggtt

SEQ ID NO: 552475 - DNA, 15 bp, Homo sapiens
ccaggcgtttggttc

SEQ ID NO: 552476 - DNA, 15 bp, Homo sapiens
caggcgtttggttcc

SEQ ID NO: 552477 - DNA, 15 bp, Homo sapiens
aggcgtttggttcca

SEQ ID NO: 552478 - DNA, 15 bp, Homo sapiens
ggcgtttggttccag

SEQ ID NO: 552479 - DNA, 15 bp, Homo sapiens
gcgtttggttccagc

SEQ ID NO: 552480 - DNA, 15 bp, Homo sapiens
cgtttggttccagcc

SEQ ID NO: 552481 - DNA, 15 bp, Homo sapiens
gtttggttccagccc

SEQ ID NO: 552482 - DNA, 15 bp, Homo sapiens
tttggttccagcccc

SEQ ID NO: 552483 - DNA, 15 bp, Homo sapiens
ttggttccagcccca

SEQ ID NO: 552484 - DNA, 15 bp, Homo sapiens
tggttccagccccac

SEQ ID NO: 552485 - DNA, 15 bp, Homo sapiens
ggttccagccccacg

SEQ ID NO: 552486 - DNA, 15 bp, Homo sapiens
gttccagccccacgt

SEQ ID NO: 552487 - DNA, 15 bp, Homo sapiens
ttccagccccacgtg

SEQ ID NO: 552488 - DNA, 15 bp, Homo sapiens
tccagccccacgtgc

SEQ ID NO: 552489 - DNA, 15 bp, Homo sapiens
ccagccccacgtgcc

SEQ ID NO: 552490 - DNA, 15 bp, Homo sapiens
cagccccacgtgcca

SEQ ID NO: 552491 - DNA, 15 bp, Homo sapiens
agccccacgtgccat

SEQ ID NO: 552492 - DNA, 15 bp, Homo sapiens
gccccacgtgccatc

SEQ ID NO: 552493 - DNA, 15 bp, Homo sapiens
ccccacgtgccatct

SEQ ID NO: 552494 - DNA, 15 bp, Homo sapiens
cccacgtgccatctg

SEQ ID NO: 552495 - DNA, 15 bp, Homo sapiens
ccacgtgccatctgt

SEQ ID NO: 552496 - DNA, 15 bp, Homo sapiens
cacgtgccatctgtt

SEQ ID NO: 552497 - DNA, 15 bp, Homo sapiens
acgtgccatctgtta

SEQ ID NO: 552498 - DNA, 15 bp, Homo sapiens
cgtgccatctgttag

SEQ ID NO: 552499 - DNA, 15 bp, Homo sapiens
gtgccatctgttagg

SEQ ID NO: 552500 - DNA, 15 bp, Homo sapiens
tgccatctgttaggc

SEQ ID NO: 552501 - DNA, 15 bp, Homo sapiens
gccatctgttaggca

SEQ ID NO: 552502 - DNA, 15 bp, Homo sapiens
ccatctgttaggcac

SEQ ID NO: 552503 - DNA, 15 bp, Homo sapiens
catctgttaggcacc

SEQ ID NO: 552504 - DNA, 15 bp, Homo sapiens
atctgttaggcacct

SEQ ID NO: 552505 - DNA, 15 bp, Homo sapiens
tctgttaggcacctt

SEQ ID NO: 552506 - DNA, 15 bp, Homo sapiens
ctgttaggcaccttt

SEQ ID NO: 552507 - DNA, 15 bp, Homo sapiens
tgttaggcacctttc

SEQ ID NO: 552508 - DNA, 15 bp, Homo sapiens
gttaggcacctttct

SEQ ID NO: 552509 - DNA, 15 bp, Homo sapiens
ttaggcacctttctg

SEQ ID NO: 552510 - DNA, 15 bp, Homo sapiens
taggcacctttctgc

SEQ ID NO: 552511 - DNA, 15 bp, Homo sapiens
aggcacctttctgct

SEQ ID NO: 552512 - DNA, 15 bp, Homo sapiens
ggcacctttctgctc

SEQ ID NO: 552513 - DNA, 15 bp, Homo sapiens
gcacctttctgctcc

SEQ ID NO: 552514 - DNA, 15 bp, Homo sapiens
cacctttctgctccc

SEQ ID NO: 552515 - DNA, 15 bp, Homo sapiens
acctttctgctccct

SEQ ID NO: 552516 - DNA, 15 bp, Homo sapiens
cctttctgctccctc

SEQ ID NO: 552517 - DNA, 15 bp, Homo sapiens
ctttctgctccctct

SEQ ID NO: 552518 - DNA, 15 bp, Homo sapiens
tttctgctccctctg

SEQ ID NO: 552519 - DNA, 15 bp, Homo sapiens
ttctgctccctctgc

SEQ ID NO: 552520 - DNA, 15 bp, Homo sapiens
tctgctccctctgct

SEQ ID NO: 552521 - DNA, 15 bp, Homo sapiens
ctgctccctctgctt

SEQ ID NO: 552522 - DNA, 15 bp, Homo sapiens
tgctccctctgcttg

SEQ ID NO: 552523 - DNA, 15 bp, Homo sapiens
gctccctctgcttgt

SEQ ID NO: 552524 - DNA, 15 bp, Homo sapiens
ctccctctgcttgtg

SEQ ID NO: 552525 - DNA, 15 bp, Homo sapiens
tccctctgcttgtgt

SEQ ID NO: 552526 - DNA, 15 bp, Homo sapiens
ccctctgcttgtgtg

SEQ ID NO: 552527 - DNA, 15 bp, Homo sapiens
cctctgcttgtgtgt

SEQ ID NO: 552528 - DNA, 15 bp, Homo sapiens
ctctgcttgtgtgtc

SEQ ID NO: 552529 - DNA, 15 bp, Homo sapiens
tctgcttgtgtgtca

SEQ ID NO: 552530 - DNA, 15 bp, Homo sapiens
ctgcttgtgtgtcat

SEQ ID NO: 552531 - DNA, 15 bp, Homo sapiens
tgcttgtgtgtcatg

SEQ ID NO: 552532 - DNA, 15 bp, Homo sapiens
gcttgtgtgtcatgc

SEQ ID NO: 552533 - DNA, 15 bp, Homo sapiens
cttgtgtgtcatgct

SEQ ID NO: 552534 - DNA, 15 bp, Homo sapiens
ttgtgtgtcatgctt

SEQ ID NO: 552535 - DNA, 15 bp, Homo sapiens
tgtgtgtcatgcttt

SEQ ID NO: 552536 - DNA, 15 bp, Homo sapiens
gtgtgtcatgctttt

SEQ ID NO: 552537 - DNA, 15 bp, Homo sapiens
tgtgtcatgcttttg

SEQ ID NO: 552538 - DNA, 15 bp, Homo sapiens
gtgtcatgcttttgc

SEQ ID NO: 552539 - DNA, 15 bp, Homo sapiens
tgtcatgcttttgca

SEQ ID NO: 552540 - DNA, 15 bp, Homo sapiens
gtcatgcttttgcac

SEQ ID NO: 552541 - DNA, 15 bp, Homo sapiens
tcatgcttttgcacc

SEQ ID NO: 552542 - DNA, 15 bp, Homo sapiens
catgcttttgcacca

SEQ ID NO: 552543 - DNA, 15 bp, Homo sapiens
atgcttttgcaccac

SEQ ID NO: 552544 - DNA, 15 bp, Homo sapiens
tgcttttgcaccacc

SEQ ID NO: 552545 - DNA, 15 bp, Homo sapiens
gcttttgcaccacca

SEQ ID NO: 552546 - DNA, 15 bp, Homo sapiens
cttttgcaccaccac

SEQ ID NO: 552547 - DNA, 15 bp, Homo sapiens
ttttgcaccaccacc

SEQ ID NO: 552548 - DNA, 15 bp, Homo sapiens
tttgcaccaccacct

SEQ ID NO: 552549 - DNA, 15 bp, Homo sapiens
ttgcaccaccacctc

SEQ ID NO: 552550 - DNA, 15 bp, Homo sapiens
tgcaccaccacctca

SEQ ID NO: 552551 - DNA, 15 bp, Homo sapiens
gcaccaccacctcat

SEQ ID NO: 552552 - DNA, 15 bp, Homo sapiens
caccaccacctcatt

SEQ ID NO: 552553 - DNA, 15 bp, Homo sapiens
accaccacctcattc

SEQ ID NO: 552554 - DNA, 15 bp, Homo sapiens
ccaccacctcattcc

SEQ ID NO: 552555 - DNA, 15 bp, Homo sapiens
caccacctcattcct

SEQ ID NO: 552556 - DNA, 15 bp, Homo sapiens
accacctcattcctg

SEQ ID NO: 552557 - DNA, 15 bp, Homo sapiens
ccacctcattcctgc

SEQ ID NO: 552558 - DNA, 15 bp, Homo sapiens
cacctcattcctgcc

SEQ ID NO: 552559 - DNA, 15 bp, Homo sapiens
acctcattcctgcca

SEQ ID NO: 552560 - DNA, 15 bp, Homo sapiens
cctcattcctgccaa

SEQ ID NO: 552561 - DNA, 15 bp, Homo sapiens
ctcattcctgccaac

SEQ ID NO: 552562 - DNA, 15 bp, Homo sapiens
tcattcctgccaacg

SEQ ID NO: 552563 - DNA, 15 bp, Homo sapiens
cattcctgccaacgc

SEQ ID NO: 552564 - DNA, 15 bp, Homo sapiens
attcctgccaacgcc

SEQ ID NO: 552565 - DNA, 15 bp, Homo sapiens
ttcctgccaacgccc

SEQ ID NO: 552566 - DNA, 15 bp, Homo sapiens
tcctgccaacgccca

SEQ ID NO: 552567 - DNA, 15 bp, Homo sapiens
cctgccaacgcccac

SEQ ID NO: 552568 - DNA, 15 bp, Homo sapiens
ctgccaacgcccacc

SEQ ID NO: 552569 - DNA, 15 bp, Homo sapiens
tgccaacgcccacct

SEQ ID NO: 552570 - DNA, 15 bp, Homo sapiens
gccaacgcccacctg

SEQ ID NO: 552571 - DNA, 15 bp, Homo sapiens
ccaacgcccacctgg

SEQ ID NO: 552572 - DNA, 15 bp, Homo sapiens
caacgcccacctggt

SEQ ID NO: 552573 - DNA, 15 bp, Homo sapiens
aacgcccacctggtg

SEQ ID NO: 552574 - DNA, 15 bp, Homo sapiens
acgcccacctggtga

SEQ ID NO: 552575 - DNA, 15 bp, Homo sapiens
cgcccacctggtgag

SEQ ID NO: 552576 - DNA, 15 bp, Homo sapiens
gcccacctggtgagg

SEQ ID NO: 552577 - DNA, 15 bp, Homo sapiens
cccacctggtgagga

SEQ ID NO: 552578 - DNA, 15 bp, Homo sapiens
ccacctggtgaggag

SEQ ID NO: 552579 - DNA, 15 bp, Homo sapiens
cacctggtgaggagg

SEQ ID NO: 552580 - DNA, 15 bp, Homo sapiens
acctggtgaggaggc

SEQ ID NO: 552581 - DNA, 15 bp, Homo sapiens
cctggtgaggaggcc

SEQ ID NO: 552582 - DNA, 15 bp, Homo sapiens
ctggtgaggaggcct

SEQ ID NO: 552583 - DNA, 15 bp, Homo sapiens
tggtgaggaggccta

SEQ ID NO: 552584 - DNA, 15 bp, Homo sapiens
ggtgaggaggcctat

SEQ ID NO: 552585 - DNA, 15 bp, Homo sapiens
gtgaggaggcctatt

SEQ ID NO: 552586 - DNA, 15 bp, Homo sapiens
tgaggaggcctattc

SEQ ID NO: 552587 - DNA, 15 bp, Homo sapiens
gaggaggcctattct

SEQ ID NO: 552588 - DNA, 15 bp, Homo sapiens
aggaggcctattcta

SEQ ID NO: 552589 - DNA, 15 bp, Homo sapiens
ggaggcctattctac

SEQ ID NO: 552590 - DNA, 15 bp, Homo sapiens
gaggcctattctacg

SEQ ID NO: 552591 - DNA, 15 bp, Homo sapiens
aggcctattctacga

SEQ ID NO: 552592 - DNA, 15 bp, Homo sapiens
ggcctattctacgat

SEQ ID NO: 552593 - DNA, 15 bp, Homo sapiens
gcctattctacgatg

SEQ ID NO: 552594 - DNA, 15 bp, Homo sapiens
cctattctacgatgc

SEQ ID NO: 552595 - DNA, 15 bp, Homo sapiens
ctattctacgatgcc

SEQ ID NO: 552596 - DNA, 15 bp, Homo sapiens
tattctacgatgcct

SEQ ID NO: 552597 - DNA, 15 bp, Homo sapiens
attctacgatgcctc

SEQ ID NO: 552598 - DNA, 15 bp, Homo sapiens
ttctacgatgcctcc

SEQ ID NO: 552599 - DNA, 15 bp, Homo sapiens
tctacgatgcctcct

SEQ ID NO: 552600 - DNA, 15 bp, Homo sapiens
ctacgatgcctccta

SEQ ID NO: 552601 - DNA, 15 bp, Homo sapiens
tacgatgcctcctaa

SEQ ID NO: 552602 - DNA, 15 bp, Homo sapiens
acgatgcctcctaaa

SEQ ID NO: 552603 - DNA, 15 bp, Homo sapiens
cgatgcctcctaaat

SEQ ID NO: 552604 - DNA, 15 bp, Homo sapiens
gatgcctcctaaatg

SEQ ID NO: 552605 - DNA, 15 bp, Homo sapiens
atgcctcctaaatgg

SEQ ID NO: 552606 - DNA, 15 bp, Homo sapiens
tgcctcctaaatggg

SEQ ID NO: 552607 - DNA, 15 bp, Homo sapiens
gcctcctaaatgggg

SEQ ID NO: 552608 - DNA, 15 bp, Homo sapiens
cctcctaaatggggc

SEQ ID NO: 552609 - DNA, 15 bp, Homo sapiens
ctcctaaatggggcc

SEQ ID NO: 552610 - DNA, 15 bp, Homo sapiens
tcctaaatggggccc

SEQ ID NO: 552611 - DNA, 15 bp, Homo sapiens
cctaaatggggccct

SEQ ID NO: 552612 - DNA, 15 bp, Homo sapiens
ctaaatggggccctt

SEQ ID NO: 552613 - DNA, 15 bp, Homo sapiens
taaatggggcccttc

SEQ ID NO: 552614 - DNA, 15 bp, Homo sapiens
aaatggggcccttct

SEQ ID NO: 552615 - DNA, 15 bp, Homo sapiens
aatggggcccttctc

SEQ ID NO: 552616 - DNA, 15 bp, Homo sapiens
atggggcccttctcc

SEQ ID NO: 552617 - DNA, 15 bp, Homo sapiens
tggggcccttctcca

SEQ ID NO: 552618 - DNA, 15 bp, Homo sapiens
ggggcccttctccaa

SEQ ID NO: 552619 - DNA, 15 bp, Homo sapiens
gggcccttctccaag

SEQ ID NO: 552620 - DNA, 15 bp, Homo sapiens
ggcccttctccaagg

SEQ ID NO: 552621 - DNA, 15 bp, Homo sapiens
gcccttctccaagga

SEQ ID NO: 552622 - DNA, 15 bp, Homo sapiens
cccttctccaaggag

SEQ ID NO: 552623 - DNA, 15 bp, Homo sapiens
ccttctccaaggagc

SEQ ID NO: 552624 - DNA, 15 bp, Homo sapiens
cttctccaaggagct

SEQ ID NO: 552625 - DNA, 15 bp, Homo sapiens
ttctccaaggagctc

SEQ ID NO: 552626 - DNA, 15 bp, Homo sapiens
tctccaaggagctcc

SEQ ID NO: 552627 - DNA, 15 bp, Homo sapiens
ctccaaggagctccc

SEQ ID NO: 552628 - DNA, 15 bp, Homo sapiens
tccaaggagctccca

SEQ ID NO: 552629 - DNA, 15 bp, Homo sapiens
ccaaggagctcccaa

SEQ ID NO: 552630 - DNA, 15 bp, Homo sapiens
caaggagctcccaat

SEQ ID NO: 552631 - DNA, 15 bp, Homo sapiens
aaggagctcccaatg

SEQ ID NO: 552632 - DNA, 15 bp, Homo sapiens
aggagctcccaatgc

SEQ ID NO: 552633 - DNA, 15 bp, Homo sapiens
ggagctcccaatgct

SEQ ID NO: 552634 - DNA, 15 bp, Homo sapiens
gagctcccaatgctt

SEQ ID NO: 552635 - DNA, 15 bp, Homo sapiens
agctcccaatgcttg

SEQ ID NO: 552636 - DNA, 15 bp, Homo sapiens
gctcccaatgcttgt

SEQ ID NO: 552637 - DNA, 15 bp, Homo sapiens
ctcccaatgcttgtt

SEQ ID NO: 552638 - DNA, 15 bp, Homo sapiens
tcccaatgcttgttg

SEQ ID NO: 552639 - DNA, 15 bp, Homo sapiens
cccaatgcttgttga

SEQ ID NO: 552640 - DNA, 15 bp, Homo sapiens
ccaatgcttgttgaa

SEQ ID NO: 552641 - DNA, 15 bp, Homo sapiens
caatgcttgttgaag

SEQ ID NO: 552642 - DNA, 15 bp, Homo sapiens
aatgcttgttgaaga

SEQ ID NO: 552643 - DNA, 15 bp, Homo sapiens
atgcttgttgaagat

SEQ ID NO: 552644 - DNA, 15 bp, Homo sapiens
tgcttgttgaagatc

SEQ ID NO: 552645 - DNA, 15 bp, Homo sapiens
gcttgttgaagatcc

SEQ ID NO: 552646 - DNA, 15 bp, Homo sapiens
cttgttgaagatcca

SEQ ID NO: 552647 - DNA, 15 bp, Homo sapiens
ttgttgaagatccag

SEQ ID NO: 552648 - DNA, 15 bp, Homo sapiens
tgttgaagatccaga

SEQ ID NO: 552649 - DNA, 15 bp, Homo sapiens
gttgaagatccagat

SEQ ID NO: 552650 - DNA, 15 bp, Homo sapiens
ttgaagatccagatc

SEQ ID NO: 552651 - DNA, 15 bp, Homo sapiens
tgaagatccagatcc

SEQ ID NO: 552652 - DNA, 15 bp, Homo sapiens
gaagatccagatccc

SEQ ID NO: 552653 - DNA, 15 bp, Homo sapiens
aagatccagatccca

SEQ ID NO: 552654 - DNA, 15 bp, Homo sapiens
agatccagatcccac

SEQ ID NO: 552655 - DNA, 15 bp, Homo sapiens
gatccagatcccact

SEQ ID NO: 552656 - DNA, 15 bp, Homo sapiens
atccagatcccactg

SEQ ID NO: 552657 - DNA, 15 bp, Homo sapiens
tccagatcccactgg

SEQ ID NO: 552658 - DNA, 15 bp, Homo sapiens
ccagatcccactggt

SEQ ID NO: 552659 - DNA, 15 bp, Homo sapiens
cagatcccactggtg

SEQ ID NO: 552660 - DNA, 15 bp, Homo sapiens
agatcccactggtgg

SEQ ID NO: 552661 - DNA, 15 bp, Homo sapiens
gatcccactggtgga

SEQ ID NO: 552662 - DNA, 15 bp, Homo sapiens
atcccactggtggag

SEQ ID NO: 552663 - DNA, 15 bp, Homo sapiens
tcccactggtggaga

SEQ ID NO: 552664 - DNA, 15 bp, Homo sapiens
cccactggtggagat

SEQ ID NO: 552665 - DNA, 15 bp, Homo sapiens
ccactggtggagatt

SEQ ID NO: 552666 - DNA, 15 bp, Homo sapiens
cactggtggagattc

SEQ ID NO: 552667 - DNA, 15 bp, Homo sapiens
actggtggagattcc

SEQ ID NO: 552668 - DNA, 15 bp, Homo sapiens
ctggtggagattcct

SEQ ID NO: 552669 - DNA, 15 bp, Homo sapiens
tggtggagattcctt

SEQ ID NO: 552670 - DNA, 15 bp, Homo sapiens
ggtggagattccttt

SEQ ID NO: 552671 - DNA, 15 bp, Homo sapiens
gtggagattcctttt

SEQ ID NO: 552672 - DNA, 15 bp, Homo sapiens
tggagattccttttt

SEQ ID NO: 552673 - DNA, 15 bp, Homo sapiens
ggagattcctttttt

SEQ ID NO: 552674 - DNA, 15 bp, Homo sapiens
gagattccttttttt

SEQ ID NO: 552675 - DNA, 15 bp, Homo sapiens
agattcctttttttt

SEQ ID NO: 552676 - DNA, 15 bp, Homo sapiens
gattccttttttttt

SEQ ID NO: 552677 - DNA, 15 bp, Homo sapiens
attcctttttttttt

SEQ ID NO: 552678 - DNA, 15 bp, Homo sapiens
ttccttttttttttt

SEQ ID NO: 552679 - DNA, 15 bp, Homo sapiens
tcctttttttttttt

SEQ ID NO: 552680 - DNA, 15 bp, Homo sapiens
ttttttttttgagat

SEQ ID NO: 552681 - DNA, 15 bp, Homo sapiens
tttttttttgagatg

SEQ ID NO: 552682 - DNA, 15 bp, Homo sapiens
ttttttttgagatgg

SEQ ID NO: 552683 - DNA, 15 bp, Homo sapiens
tttttttgagatgga

SEQ ID NO: 552684 - DNA, 15 bp, Homo sapiens
ttttttgagatggag

SEQ ID NO: 552685 - DNA, 15 bp, Homo sapiens
tttttgagatggagt

SEQ ID NO: 552686 - DNA, 15 bp, Homo sapiens
ttttgagatggagtc

SEQ ID NO: 552687 - DNA, 15 bp, Homo sapiens
tttgagatggagtct

SEQ ID NO: 552688 - DNA, 15 bp, Homo sapiens
ttgagatggagtctc

SEQ ID NO: 552689 - DNA, 15 bp, Homo sapiens
tgagatggagtctca

SEQ ID NO: 552690 - DNA, 15 bp, Homo sapiens
gagatggagtctcac

SEQ ID NO: 552691 - DNA, 15 bp, Homo sapiens
agatggagtctcact

SEQ ID NO: 552692 - DNA, 15 bp, Homo sapiens
gatggagtctcactc

SEQ ID NO: 552693 - DNA, 15 bp, Homo sapiens
atggagtctcactct

SEQ ID NO: 552694 - DNA, 15 bp, Homo sapiens
tggagtctcactctg

SEQ ID NO: 552695 - DNA, 15 bp, Homo sapiens
ggagtctcactctgt

SEQ ID NO: 552696 - DNA, 15 bp, Homo sapiens
gagtctcactctgtt

SEQ ID NO: 552697 - DNA, 15 bp, Homo sapiens
agtctcactctgttg

SEQ ID NO: 552698 - DNA, 15 bp, Homo sapiens
gtctcactctgttgc

SEQ ID NO: 552699 - DNA, 15 bp, Homo sapiens
tctcactctgttgcc

SEQ ID NO: 552700 - DNA, 15 bp, Homo sapiens
ctcactctgttgccc

SEQ ID NO: 552701 - DNA, 15 bp, Homo sapiens
tcactctgttgccca

SEQ ID NO: 552702 - DNA, 15 bp, Homo sapiens
cactctgttgcccag

SEQ ID NO: 552703 - DNA, 15 bp, Homo sapiens
ctctgttgcccaggc

SEQ ID NO: 552704 - DNA, 15 bp, Homo sapiens
tctgttgcccaggct

SEQ ID NO: 552705 - DNA, 15 bp, Homo sapiens
ctgttgcccaggctg

SEQ ID NO: 552706 - DNA, 15 bp, Homo sapiens
tgttgcccaggctgg

SEQ ID NO: 552707 - DNA, 15 bp, Homo sapiens
gttgcccaggctgga

SEQ ID NO: 552708 - DNA, 15 bp, Homo sapiens
ttgcccaggctggag

SEQ ID NO: 552709 - DNA, 15 bp, Homo sapiens
tgcccaggctggagt

SEQ ID NO: 552710 - DNA, 15 bp, Homo sapiens
gcccaggctggagtg

SEQ ID NO: 552711 - DNA, 15 bp, Homo sapiens
cccaggctggagtgc

SEQ ID NO: 552712 - DNA, 15 bp, Homo sapiens
tggagtgcagtggta

SEQ ID NO: 552713 - DNA, 15 bp, Homo sapiens
ggagtgcagtggtac

SEQ ID NO: 552714 - DNA, 15 bp, Homo sapiens
gagtgcagtggtaca

SEQ ID NO: 552715 - DNA, 15 bp, Homo sapiens
agtgcagtggtacag

SEQ ID NO: 552716 - DNA, 15 bp, Homo sapiens
gtgcagtggtacagt

SEQ ID NO: 552717 - DNA, 15 bp, Homo sapiens
tgcagtggtacagtc

SEQ ID NO: 552718 - DNA, 15 bp, Homo sapiens
gcagtggtacagtct

SEQ ID NO: 552719 - DNA, 15 bp, Homo sapiens
cagtggtacagtctt

SEQ ID NO: 552720 - DNA, 15 bp, Homo sapiens
agtggtacagtcttg

SEQ ID NO: 552721 - DNA, 15 bp, Homo sapiens
gtggtacagtcttgg

SEQ ID NO: 552722 - DNA, 15 bp, Homo sapiens
tggtacagtcttggc

SEQ ID NO: 552723 - DNA, 15 bp, Homo sapiens
ggtacagtcttggct

SEQ ID NO: 552724 - DNA, 15 bp, Homo sapiens
gtacagtcttggctc

SEQ ID NO: 552725 - DNA, 15 bp, Homo sapiens
tacagtcttggctca

SEQ ID NO: 552726 - DNA, 15 bp, Homo sapiens
acagtcttggctcac

SEQ ID NO: 552727 - DNA, 15 bp, Homo sapiens
cagtcttggctcact

SEQ ID NO: 552728 - DNA, 15 bp, Homo sapiens
agtcttggctcacta

SEQ ID NO: 552729 - DNA, 15 bp, Homo sapiens
gtcttggctcactac

SEQ ID NO: 552730 - DNA, 15 bp, Homo sapiens
tcttggctcactaca

SEQ ID NO: 552731 - DNA, 15 bp, Homo sapiens
cttggctcactacaa

SEQ ID NO: 552732 - DNA, 15 bp, Homo sapiens
ttggctcactacaac

SEQ ID NO: 552733 - DNA, 15 bp, Homo sapiens
tggctcactacaacc

SEQ ID NO: 552734 - DNA, 15 bp, Homo sapiens
ggctcactacaacct

SEQ ID NO: 552735 - DNA, 15 bp, Homo sapiens
gctcactacaacctc

SEQ ID NO: 552736 - DNA, 15 bp, Homo sapiens
ctcactacaacctct

SEQ ID NO: 552737 - DNA, 15 bp, Homo sapiens
tcactacaacctctg

SEQ ID NO: 552738 - DNA, 15 bp, Homo sapiens
cactacaacctctgc

SEQ ID NO: 552739 - DNA, 15 bp, Homo sapiens
actacaacctctgcc

SEQ ID NO: 552740 - DNA, 15 bp, Homo sapiens
ctacaacctctgcct

SEQ ID NO: 552741 - DNA, 15 bp, Homo sapiens
tacaacctctgcctc

SEQ ID NO: 552742 - DNA, 15 bp, Homo sapiens
acaacctctgcctcc

SEQ ID NO: 552743 - DNA, 15 bp, Homo sapiens
caacctctgcctccc

SEQ ID NO: 552744 - DNA, 15 bp, Homo sapiens
ttcaagcaattctct

SEQ ID NO: 552745 - DNA, 15 bp, Homo sapiens
tcaagcaattctctt

SEQ ID NO: 552746 - DNA, 15 bp, Homo sapiens
caagcaattctcttg

SEQ ID NO: 552747 - DNA, 15 bp, Homo sapiens
aagcaattctcttgc

SEQ ID NO: 552748 - DNA, 15 bp, Homo sapiens
agcaattctcttgcc

SEQ ID NO: 552749 - DNA, 15 bp, Homo sapiens
gcaattctcttgcct

SEQ ID NO: 552750 - DNA, 15 bp, Homo sapiens
caattctcttgcctc

SEQ ID NO: 552751 - DNA, 15 bp, Homo sapiens
aattctcttgcctca

SEQ ID NO: 552752 - DNA, 15 bp, Homo sapiens
attctcttgcctcag

SEQ ID NO: 552753 - DNA, 15 bp, Homo sapiens
ttctcttgcctcagc

SEQ ID NO: 552754 - DNA, 15 bp, Homo sapiens
tctcttgcctcagcc

SEQ ID NO: 552755 - DNA, 15 bp, Homo sapiens
ctcttgcctcagcct

SEQ ID NO: 552756 - DNA, 15 bp, Homo sapiens
tcttgcctcagcctc

SEQ ID NO: 552757 - DNA, 15 bp, Homo sapiens
cttgcctcagcctcc

SEQ ID NO: 552758 - DNA, 15 bp, Homo sapiens
ttgcctcagcctcct

SEQ ID NO: 552759 - DNA, 15 bp, Homo sapiens
cagcctcctgagtat

SEQ ID NO: 552760 - DNA, 15 bp, Homo sapiens
agcctcctgagtatc

SEQ ID NO: 552761 - DNA, 15 bp, Homo sapiens
gcctcctgagtatct

SEQ ID NO: 552762 - DNA, 15 bp, Homo sapiens
cctcctgagtatctg

SEQ ID NO: 552763 - DNA, 15 bp, Homo sapiens
ctcctgagtatctgg

SEQ ID NO: 552764 - DNA, 15 bp, Homo sapiens
tcctgagtatctggg

SEQ ID NO: 552765 - DNA, 15 bp, Homo sapiens
cctgagtatctggga

SEQ ID NO: 552766 - DNA, 15 bp, Homo sapiens
ctgagtatctgggat

SEQ ID NO: 552767 - DNA, 15 bp, Homo sapiens
tgagtatctgggatt

SEQ ID NO: 552768 - DNA, 15 bp, Homo sapiens
gagtatctgggatta

SEQ ID NO: 552769 - DNA, 15 bp, Homo sapiens
agtatctgggattac

SEQ ID NO: 552770 - DNA, 15 bp, Homo sapiens
gtatctgggattaca

SEQ ID NO: 552771 - DNA, 15 bp, Homo sapiens
tatctgggattacaa

SEQ ID NO: 552772 - DNA, 15 bp, Homo sapiens
atctgggattacaag

SEQ ID NO: 552773 - DNA, 15 bp, Homo sapiens
tctgggattacaagc

SEQ ID NO: 552774 - DNA, 15 bp, Homo sapiens
ctgggattacaagca

SEQ ID NO: 552775 - DNA, 15 bp, Homo sapiens
tgggattacaagcac

SEQ ID NO: 552776 - DNA, 15 bp, Homo sapiens
gggattacaagcaca

SEQ ID NO: 552777 - DNA, 15 bp, Homo sapiens
ggattacaagcacat

SEQ ID NO: 552778 - DNA, 15 bp, Homo sapiens
gattacaagcacatg

SEQ ID NO: 552779 - DNA, 15 bp, Homo sapiens
attacaagcacatgg

SEQ ID NO: 552780 - DNA, 15 bp, Homo sapiens
ttacaagcacatggc

SEQ ID NO: 552781 - DNA, 15 bp, Homo sapiens
tacaagcacatggca

SEQ ID NO: 552782 - DNA, 15 bp, Homo sapiens
acaagcacatggcac

SEQ ID NO: 552783 - DNA, 15 bp, Homo sapiens
caagcacatggcacc

SEQ ID NO: 552784 - DNA, 15 bp, Homo sapiens
aagcacatggcacca

SEQ ID NO: 552785 - DNA, 15 bp, Homo sapiens
agcacatggcaccac

SEQ ID NO: 552786 - DNA, 15 bp, Homo sapiens
gcacatggcaccaca

SEQ ID NO: 552787 - DNA, 15 bp, Homo sapiens
cacatggcaccacac

SEQ ID NO: 552788 - DNA, 15 bp, Homo sapiens
acatggcaccacacc

SEQ ID NO: 552789 - DNA, 15 bp, Homo sapiens
catggcaccacacct

SEQ ID NO: 552790 - DNA, 15 bp, Homo sapiens
atggcaccacacctg

SEQ ID NO: 552791 - DNA, 15 bp, Homo sapiens
tggcaccacacctgg

SEQ ID NO: 552792 - DNA, 15 bp, Homo sapiens
ggcaccacacctggc

SEQ ID NO: 552793 - DNA, 15 bp, Homo sapiens
gcaccacacctggca

SEQ ID NO: 552794 - DNA, 15 bp, Homo sapiens
caccacacctggcaa

SEQ ID NO: 552795 - DNA, 15 bp, Homo sapiens
accacacctggcaag

SEQ ID NO: 552796 - DNA, 15 bp, Homo sapiens
ccacacctggcaagt

SEQ ID NO: 552797 - DNA, 15 bp, Homo sapiens
cacacctggcaagtt

SEQ ID NO: 552798 - DNA, 15 bp, Homo sapiens
acacctggcaagttt

SEQ ID NO: 552799 - DNA, 15 bp, Homo sapiens
cacctggcaagtttt

SEQ ID NO: 552800 - DNA, 15 bp, Homo sapiens
acctggcaagttttt

SEQ ID NO: 552801 - DNA, 15 bp, Homo sapiens
cctggcaagtttttg

SEQ ID NO: 552802 - DNA, 15 bp, Homo sapiens
ctggcaagtttttgt

SEQ ID NO: 552803 - DNA, 15 bp, Homo sapiens
tggcaagtttttgta

SEQ ID NO: 552804 - DNA, 15 bp, Homo sapiens
ggcaagtttttgtat

SEQ ID NO: 552805 - DNA, 15 bp, Homo sapiens
gcaagtttttgtatt

SEQ ID NO: 552806 - DNA, 15 bp, Homo sapiens
caagtttttgtattt

SEQ ID NO: 552807 - DNA, 15 bp, Homo sapiens
aagtttttgtatttt

SEQ ID NO: 552808 - DNA, 15 bp, Homo sapiens
agtttttgtattttt

SEQ ID NO: 552809 - DNA, 15 bp, Homo sapiens
gtttttgtattttta

SEQ ID NO: 552810 - DNA, 15 bp, Homo sapiens
tagagacggggtttt

SEQ ID NO: 552811 - DNA, 15 bp, Homo sapiens
agagacggggtttta

SEQ ID NO: 552812 - DNA, 15 bp, Homo sapiens
gagacggggttttac

SEQ ID NO: 552813 - DNA, 15 bp, Homo sapiens
agacggggttttact

SEQ ID NO: 552814 - DNA, 15 bp, Homo sapiens
gacggggttttacta

SEQ ID NO: 552815 - DNA, 15 bp, Homo sapiens
acggggttttactat

SEQ ID NO: 552816 - DNA, 15 bp, Homo sapiens
cggggttttactatg

SEQ ID NO: 552817 - DNA, 15 bp, Homo sapiens
ggggttttactatgt

SEQ ID NO: 552818 - DNA, 15 bp, Homo sapiens
gggttttactatgtt

SEQ ID NO: 552819 - DNA, 15 bp, Homo sapiens
ggttttactatgttg

SEQ ID NO: 552820 - DNA, 15 bp, Homo sapiens
gttttactatgttgg

SEQ ID NO: 552821 - DNA, 15 bp, Homo sapiens
ttttactatgttggc

SEQ ID NO: 552822 - DNA, 15 bp, Homo sapiens
tttactatgttggcc

SEQ ID NO: 552823 - DNA, 15 bp, Homo sapiens
ttactatgttggccc

SEQ ID NO: 552824 - DNA, 15 bp, Homo sapiens
tactatgttggcccg

SEQ ID NO: 552825 - DNA, 15 bp, Homo sapiens
actatgttggcccgg

SEQ ID NO: 552826 - DNA, 15 bp, Homo sapiens
ctatgttggcccggc

SEQ ID NO: 552827 - DNA, 15 bp, Homo sapiens
tatgttggcccggct

SEQ ID NO: 552828 - DNA, 15 bp, Homo sapiens
atgttggcccggctg

SEQ ID NO: 552829 - DNA, 15 bp, Homo sapiens
tgttggcccggctgg

SEQ ID NO: 552830 - DNA, 15 bp, Homo sapiens
gttggcccggctggt

SEQ ID NO: 552831 - DNA, 15 bp, Homo sapiens
ttggcccggctggtc

SEQ ID NO: 552832 - DNA, 15 bp, Homo sapiens
tggcccggctggtct

SEQ ID NO: 552833 - DNA, 15 bp, Homo sapiens
ggcccggctggtctt

SEQ ID NO: 552834 - DNA, 15 bp, Homo sapiens
gcccggctggtcttc

SEQ ID NO: 552835 - DNA, 15 bp, Homo sapiens
cccggctggtcttca

SEQ ID NO: 552836 - DNA, 15 bp, Homo sapiens
ccggctggtcttcaa

SEQ ID NO: 552837 - DNA, 15 bp, Homo sapiens
cggctggtcttcaac

SEQ ID NO: 552838 - DNA, 15 bp, Homo sapiens
ggctggtcttcaact

SEQ ID NO: 552839 - DNA, 15 bp, Homo sapiens
gctggtcttcaactc

SEQ ID NO: 552840 - DNA, 15 bp, Homo sapiens
ctggtcttcaactcc

SEQ ID NO: 552841 - DNA, 15 bp, Homo sapiens
tggtcttcaactcct

SEQ ID NO: 552842 - DNA, 15 bp, Homo sapiens
ggtcttcaactcctg

SEQ ID NO: 552843 - DNA, 15 bp, Homo sapiens
gtcttcaactcctga

SEQ ID NO: 552844 - DNA, 15 bp, Homo sapiens
tcttcaactcctgac

SEQ ID NO: 552845 - DNA, 15 bp, Homo sapiens
cttcaactcctgacc

SEQ ID NO: 552846 - DNA, 15 bp, Homo sapiens
ttcaactcctgacct

SEQ ID NO: 552847 - DNA, 15 bp, Homo sapiens
tcaactcctgacctc

SEQ ID NO: 552848 - DNA, 15 bp, Homo sapiens
caactcctgacctca

SEQ ID NO: 552849 - DNA, 15 bp, Homo sapiens
aactcctgacctcat

SEQ ID NO: 552850 - DNA, 15 bp, Homo sapiens
actcctgacctcatg

SEQ ID NO: 552851 - DNA, 15 bp, Homo sapiens
ctcctgacctcatga

SEQ ID NO: 552852 - DNA, 15 bp, Homo sapiens
tcctgacctcatgat

SEQ ID NO: 552853 - DNA, 15 bp, Homo sapiens
cctgacctcatgatc

SEQ ID NO: 552854 - DNA, 15 bp, Homo sapiens
ctgacctcatgatcc

SEQ ID NO: 552855 - DNA, 15 bp, Homo sapiens
tgacctcatgatccg

SEQ ID NO: 552856 - DNA, 15 bp, Homo sapiens
gacctcatgatccgc

SEQ ID NO: 552857 - DNA, 15 bp, Homo sapiens
acctcatgatccgcc

SEQ ID NO: 552858 - DNA, 15 bp, Homo sapiens
cctcatgatccgcct

SEQ ID NO: 552859 - DNA, 15 bp, Homo sapiens
ctcatgatccgcctg

SEQ ID NO: 552860 - DNA, 15 bp, Homo sapiens
tcatgatccgcctgc

SEQ ID NO: 552861 - DNA, 15 bp, Homo sapiens
catgatccgcctgcc

SEQ ID NO: 552862 - DNA, 15 bp, Homo sapiens
atgatccgcctgcct

SEQ ID NO: 552863 - DNA, 15 bp, Homo sapiens
tgatccgcctgcctc

SEQ ID NO: 552864 - DNA, 15 bp, Homo sapiens
gatccgcctgcctcg

SEQ ID NO: 552865 - DNA, 15 bp, Homo sapiens
atccgcctgcctcgg

SEQ ID NO: 552866 - DNA, 15 bp, Homo sapiens
tccgcctgcctcggc

SEQ ID NO: 552867 - DNA, 15 bp, Homo sapiens
ccgcctgcctcggcc

SEQ ID NO: 552868 - DNA, 15 bp, Homo sapiens
cgcctgcctcggcct

SEQ ID NO: 552869 - DNA, 15 bp, Homo sapiens
gcctgcctcggcctc

SEQ ID NO: 552870 - DNA, 15 bp, Homo sapiens
cctgcctcggcctcc

SEQ ID NO: 552871 - DNA, 15 bp, Homo sapiens
ctgcctcggcctccc

SEQ ID NO: 552872 - DNA, 15 bp, Homo sapiens
tgcctcggcctccca

SEQ ID NO: 552873 - DNA, 15 bp, Homo sapiens
gcctcggcctcccaa

SEQ ID NO: 552874 - DNA, 15 bp, Homo sapiens
cctcggcctcccaaa

SEQ ID NO: 552875 - DNA, 15 bp, Homo sapiens
ctcggcctcccaaag

SEQ ID NO: 552876 - DNA, 15 bp, Homo sapiens
tcggcctcccaaagt

SEQ ID NO: 552877 - DNA, 15 bp, Homo sapiens
cggcctcccaaagtg

SEQ ID NO: 552878 - DNA, 15 bp, Homo sapiens
ggattacaggcgtga

SEQ ID NO: 552879 - DNA, 15 bp, Homo sapiens
gattacaggcgtgag

SEQ ID NO: 552880 - DNA, 15 bp, Homo sapiens
attacaggcgtgagc

SEQ ID NO: 552881 - DNA, 15 bp, Homo sapiens
ttacaggcgtgagcc

SEQ ID NO: 552882 - DNA, 15 bp, Homo sapiens
tacaggcgtgagcca

SEQ ID NO: 552883 - DNA, 15 bp, Homo sapiens
acaggcgtgagccac

SEQ ID NO: 552884 - DNA, 15 bp, Homo sapiens
caggcgtgagccacc

SEQ ID NO: 552885 - DNA, 15 bp, Homo sapiens
aggcgtgagccaccg

SEQ ID NO: 552886 - DNA, 15 bp, Homo sapiens
ggcgtgagccaccgc

SEQ ID NO: 552887 - DNA, 15 bp, Homo sapiens
gcgtgagccaccgca

SEQ ID NO: 552888 - DNA, 15 bp, Homo sapiens
cgtgagccaccgcac

SEQ ID NO: 552889 - DNA, 15 bp, Homo sapiens
gtgagccaccgcacc

SEQ ID NO: 552890 - DNA, 15 bp, Homo sapiens
tgagccaccgcaccc

SEQ ID NO: 552891 - DNA, 15 bp, Homo sapiens
gagccaccgcaccca

SEQ ID NO: 552892 - DNA, 15 bp, Homo sapiens
agccaccgcacccag

SEQ ID NO: 552893 - DNA, 15 bp, Homo sapiens
gccaccgcacccagc

SEQ ID NO: 552894 - DNA, 15 bp, Homo sapiens
ccaccgcacccagct

SEQ ID NO: 552895 - DNA, 15 bp, Homo sapiens
caccgcacccagctt

SEQ ID NO: 552896 - DNA, 15 bp, Homo sapiens
accgcacccagcttt

SEQ ID NO: 552897 - DNA, 15 bp, Homo sapiens
ccgcacccagctttg

SEQ ID NO: 552898 - DNA, 15 bp, Homo sapiens
cgcacccagctttgt

SEQ ID NO: 552899 - DNA, 15 bp, Homo sapiens
gcacccagctttgtt

SEQ ID NO: 552900 - DNA, 15 bp, Homo sapiens
cacccagctttgttg

SEQ ID NO: 552901 - DNA, 15 bp, Homo sapiens
acccagctttgttgg

SEQ ID NO: 552902 - DNA, 15 bp, Homo sapiens
cccagctttgttgga

SEQ ID NO: 552903 - DNA, 15 bp, Homo sapiens
ccagctttgttggag

SEQ ID NO: 552904 - DNA, 15 bp, Homo sapiens
cagctttgttggaga

SEQ ID NO: 552905 - DNA, 15 bp, Homo sapiens
agctttgttggagat

SEQ ID NO: 552906 - DNA, 15 bp, Homo sapiens
gctttgttggagatt

SEQ ID NO: 552907 - DNA, 15 bp, Homo sapiens
ctttgttggagattc

SEQ ID NO: 552908 - DNA, 15 bp, Homo sapiens
tttgttggagattct

SEQ ID NO: 552909 - DNA, 15 bp, Homo sapiens
ttgttggagattctc

SEQ ID NO: 552910 - DNA, 15 bp, Homo sapiens
tgttggagattctct

SEQ ID NO: 552911 - DNA, 15 bp, Homo sapiens
gttggagattctctg

SEQ ID NO: 552912 - DNA, 15 bp, Homo sapiens
ttggagattctctgg

SEQ ID NO: 552913 - DNA, 15 bp, Homo sapiens
tggagattctctggc

SEQ ID NO: 552914 - DNA, 15 bp, Homo sapiens
ggagattctctggcc

SEQ ID NO: 552915 - DNA, 15 bp, Homo sapiens
gagattctctggcct

SEQ ID NO: 552916 - DNA, 15 bp, Homo sapiens
agattctctggcctg

SEQ ID NO: 552917 - DNA, 15 bp, Homo sapiens
gattctctggcctgt

SEQ ID NO: 552918 - DNA, 15 bp, Homo sapiens
attctctggcctgtt

SEQ ID NO: 552919 - DNA, 15 bp, Homo sapiens
ttctctggcctgttg

SEQ ID NO: 552920 - DNA, 15 bp, Homo sapiens
tctctggcctgttgt

SEQ ID NO: 552921 - DNA, 15 bp, Homo sapiens
ctctggcctgttgta

SEQ ID NO: 552922 - DNA, 15 bp, Homo sapiens
tctggcctgttgtaa

SEQ ID NO: 552923 - DNA, 15 bp, Homo sapiens
ctggcctgttgtaac

SEQ ID NO: 552924 - DNA, 15 bp, Homo sapiens
tggcctgttgtaacc

SEQ ID NO: 552925 - DNA, 15 bp, Homo sapiens
ggcctgttgtaacct

SEQ ID NO: 552926 - DNA, 15 bp, Homo sapiens
gcctgttgtaacctg

SEQ ID NO: 552927 - DNA, 15 bp, Homo sapiens
cctgttgtaacctga

SEQ ID NO: 552928 - DNA, 15 bp, Homo sapiens
ctgttgtaacctgaa

SEQ ID NO: 552929 - DNA, 15 bp, Homo sapiens
tgttgtaacctgaat

SEQ ID NO: 552930 - DNA, 15 bp, Homo sapiens
gttgtaacctgaatc

SEQ ID NO: 552931 - DNA, 15 bp, Homo sapiens
ttgtaacctgaatct

SEQ ID NO: 552932 - DNA, 15 bp, Homo sapiens
tgtaacctgaatctg

SEQ ID NO: 552933 - DNA, 15 bp, Homo sapiens
gtaacctgaatctgc

SEQ ID NO: 552934 - DNA, 15 bp, Homo sapiens
taacctgaatctgcc

SEQ ID NO: 552935 - DNA, 15 bp, Homo sapiens
aacctgaatctgcct

SEQ ID NO: 552936 - DNA, 15 bp, Homo sapiens
acctgaatctgccta

SEQ ID NO: 552937 - DNA, 15 bp, Homo sapiens
cctgaatctgcctac

SEQ ID NO: 552938 - DNA, 15 bp, Homo sapiens
ctgaatctgcctact

SEQ ID NO: 552939 - DNA, 15 bp, Homo sapiens
tgaatctgcctactc

SEQ ID NO: 552940 - DNA, 15 bp, Homo sapiens
gaatctgcctactcc

SEQ ID NO: 552941 - DNA, 15 bp, Homo sapiens
aatctgcctactcct

SEQ ID NO: 552942 - DNA, 15 bp, Homo sapiens
atctgcctactcctt

SEQ ID NO: 552943 - DNA, 15 bp, Homo sapiens
tctgcctactcctta

SEQ ID NO: 552944 - DNA, 15 bp, Homo sapiens
ctgcctactccttac

SEQ ID NO: 552945 - DNA, 15 bp, Homo sapiens
tgcctactccttacc

SEQ ID NO: 552946 - DNA, 15 bp, Homo sapiens
gcctactccttacct

SEQ ID NO: 552947 - DNA, 15 bp, Homo sapiens
cctactccttacctc

SEQ ID NO: 552948 - DNA, 15 bp, Homo sapiens
ctactccttacctcc

SEQ ID NO: 552949 - DNA, 15 bp, Homo sapiens
tactccttacctcca

SEQ ID NO: 552950 - DNA, 15 bp, Homo sapiens
actccttacctccac

SEQ ID NO: 552951 - DNA, 15 bp, Homo sapiens
ctccttacctccact

SEQ ID NO: 552952 - DNA, 15 bp, Homo sapiens
tccttacctccactg

SEQ ID NO: 552953 - DNA, 15 bp, Homo sapiens
ccttacctccactgc

SEQ ID NO: 552954 - DNA, 15 bp, Homo sapiens
cttacctccactgcc

SEQ ID NO: 552955 - DNA, 15 bp, Homo sapiens
ttacctccactgccc

SEQ ID NO: 552956 - DNA, 15 bp, Homo sapiens
tacctccactgcccc

SEQ ID NO: 552957 - DNA, 15 bp, Homo sapiens
acctccactgcccct

SEQ ID NO: 552958 - DNA, 15 bp, Homo sapiens
cctccactgcccctg

SEQ ID NO: 552959 - DNA, 15 bp, Homo sapiens
ctccactgcccctgc

SEQ ID NO: 552960 - DNA, 15 bp, Homo sapiens
tccactgcccctgcc

SEQ ID NO: 552961 - DNA, 15 bp, Homo sapiens
ccactgcccctgcct

SEQ ID NO: 552962 - DNA, 15 bp, Homo sapiens
cactgcccctgcctg

SEQ ID NO: 552963 - DNA, 15 bp, Homo sapiens
actgcccctgcctgg

SEQ ID NO: 552964 - DNA, 15 bp, Homo sapiens
ctgcccctgcctggt

SEQ ID NO: 552965 - DNA, 15 bp, Homo sapiens
tgcccctgcctggtg

SEQ ID NO: 552966 - DNA, 15 bp, Homo sapiens
gcccctgcctggtgc

SEQ ID NO: 552967 - DNA, 15 bp, Homo sapiens
cccctgcctggtgca

SEQ ID NO: 552968 - DNA, 15 bp, Homo sapiens
ccctgcctggtgcaa

SEQ ID NO: 552969 - DNA, 15 bp, Homo sapiens
cctgcctggtgcaag

SEQ ID NO: 552970 - DNA, 15 bp, Homo sapiens
ctgcctggtgcaagc

SEQ ID NO: 552971 - DNA, 15 bp, Homo sapiens
tgcctggtgcaagcc

SEQ ID NO: 552972 - DNA, 15 bp, Homo sapiens
gcctggtgcaagcca

SEQ ID NO: 552973 - DNA, 15 bp, Homo sapiens
cctggtgcaagccag

SEQ ID NO: 552974 - DNA, 15 bp, Homo sapiens
ctggtgcaagccagc

SEQ ID NO: 552975 - DNA, 15 bp, Homo sapiens
tggtgcaagccagca

SEQ ID NO: 552976 - DNA, 15 bp, Homo sapiens
ggtgcaagccagcag

SEQ ID NO: 552977 - DNA, 15 bp, Homo sapiens
gtgcaagccagcagc

SEQ ID NO: 552978 - DNA, 15 bp, Homo sapiens
tgcaagccagcagca

SEQ ID NO: 552979 - DNA, 15 bp, Homo sapiens
gcaagccagcagcac

SEQ ID NO: 552980 - DNA, 15 bp, Homo sapiens
caagccagcagcacc

SEQ ID NO: 552981 - DNA, 15 bp, Homo sapiens
aagccagcagcacct

SEQ ID NO: 552982 - DNA, 15 bp, Homo sapiens
agccagcagcacctc

SEQ ID NO: 552983 - DNA, 15 bp, Homo sapiens
gccagcagcacctct

SEQ ID NO: 552984 - DNA, 15 bp, Homo sapiens
ccagcagcacctctc

SEQ ID NO: 552985 - DNA, 15 bp, Homo sapiens
cagcagcacctctcc

SEQ ID NO: 552986 - DNA, 15 bp, Homo sapiens
agcagcacctctcct

SEQ ID NO: 552987 - DNA, 15 bp, Homo sapiens
gcagcacctctccta

SEQ ID NO: 552988 - DNA, 15 bp, Homo sapiens
cagcacctctcctag

SEQ ID NO: 552989 - DNA, 15 bp, Homo sapiens
agcacctctcctagg

SEQ ID NO: 552990 - DNA, 15 bp, Homo sapiens
gcacctctcctaggc

SEQ ID NO: 552991 - DNA, 15 bp, Homo sapiens
cacctctcctaggct

SEQ ID NO: 552992 - DNA, 15 bp, Homo sapiens
acctctcctaggctt

SEQ ID NO: 552993 - DNA, 15 bp, Homo sapiens
cctctcctaggcttc

SEQ ID NO: 552994 - DNA, 15 bp, Homo sapiens
ctctcctaggcttct

SEQ ID NO: 552995 - DNA, 15 bp, Homo sapiens
tctcctaggcttctg

SEQ ID NO: 552996 - DNA, 15 bp, Homo sapiens
ctcctaggcttctgc

SEQ ID NO: 552997 - DNA, 15 bp, Homo sapiens
tcctaggcttctgcg

SEQ ID NO: 552998 - DNA, 15 bp, Homo sapiens
cctaggcttctgcgg

SEQ ID NO: 552999 - DNA, 15 bp, Homo sapiens
ctaggcttctgcggg

SEQ ID NO: 553000 - DNA, 15 bp, Homo sapiens
taggcttctgcgggg

SEQ ID NO: 553001 - DNA, 15 bp, Homo sapiens
aggcttctgcggggg

SEQ ID NO: 553002 - DNA, 15 bp, Homo sapiens
ggcttctgcgggggc

SEQ ID NO: 553003 - DNA, 15 bp, Homo sapiens
gcttctgcgggggca

SEQ ID NO: 553004 - DNA, 15 bp, Homo sapiens
cttctgcgggggcat

SEQ ID NO: 553005 - DNA, 15 bp, Homo sapiens
ttctgcgggggcatc

SEQ ID NO: 553006 - DNA, 15 bp, Homo sapiens
tctgcgggggcatcc

SEQ ID NO: 553007 - DNA, 15 bp, Homo sapiens
ctgcgggggcatcct

SEQ ID NO: 553008 - DNA, 15 bp, Homo sapiens
tgcgggggcatcctg

SEQ ID NO: 553009 - DNA, 15 bp, Homo sapiens
gcgggggcatcctgc

SEQ ID NO: 553010 - DNA, 15 bp, Homo sapiens
cgggggcatcctgct

SEQ ID NO: 553011 - DNA, 15 bp, Homo sapiens
gggggcatcctgctc

SEQ ID NO: 553012 - DNA, 15 bp, Homo sapiens
ggggcatcctgctct

SEQ ID NO: 553013 - DNA, 15 bp, Homo sapiens
gggcatcctgctctc

SEQ ID NO: 553014 - DNA, 15 bp, Homo sapiens
ggcatcctgctctcc

SEQ ID NO: 553015 - DNA, 15 bp, Homo sapiens
gcatcctgctctccc

SEQ ID NO: 553016 - DNA, 15 bp, Homo sapiens
catcctgctctcccc

SEQ ID NO: 553017 - DNA, 15 bp, Homo sapiens
atcctgctctcccca

SEQ ID NO: 553018 - DNA, 15 bp, Homo sapiens
tcctgctctccccac

SEQ ID NO: 553019 - DNA, 15 bp, Homo sapiens
cctgctctccccact

SEQ ID NO: 553020 - DNA, 15 bp, Homo sapiens
ctgctctccccactt

SEQ ID NO: 553021 - DNA, 15 bp, Homo sapiens
tgctctccccacttc

SEQ ID NO: 553022 - DNA, 15 bp, Homo sapiens
gctctccccacttcc

SEQ ID NO: 553023 - DNA, 15 bp, Homo sapiens
ctctccccacttcct

SEQ ID NO: 553024 - DNA, 15 bp, Homo sapiens
tctccccacttcctc

SEQ ID NO: 553025 - DNA, 15 bp, Homo sapiens
ctccccacttcctcc

SEQ ID NO: 553026 - DNA, 15 bp, Homo sapiens
tccccacttcctcct

SEQ ID NO: 553027 - DNA, 15 bp, Homo sapiens
ccccacttcctcctg

SEQ ID NO: 553028 - DNA, 15 bp, Homo sapiens
cccacttcctcctgc

SEQ ID NO: 553029 - DNA, 15 bp, Homo sapiens
ccacttcctcctgcc

SEQ ID NO: 553030 - DNA, 15 bp, Homo sapiens
cacttcctcctgcct

SEQ ID NO: 553031 - DNA, 15 bp, Homo sapiens
acttcctcctgcctt

SEQ ID NO: 553032 - DNA, 15 bp, Homo sapiens
cttcctcctgccttc

SEQ ID NO: 553033 - DNA, 15 bp, Homo sapiens
ttcctcctgccttcc

SEQ ID NO: 553034 - DNA, 15 bp, Homo sapiens
tcctcctgccttcct

SEQ ID NO: 553035 - DNA, 15 bp, Homo sapiens
cctcctgccttcctg

SEQ ID NO: 553036 - DNA, 15 bp, Homo sapiens
ctcctgccttcctga

SEQ ID NO: 553037 - DNA, 15 bp, Homo sapiens
tcctgccttcctgaa

SEQ ID NO: 553038 - DNA, 15 bp, Homo sapiens
cctgccttcctgaag

SEQ ID NO: 553039 - DNA, 15 bp, Homo sapiens
ctgccttcctgaagt

SEQ ID NO: 553040 - DNA, 15 bp, Homo sapiens
tgccttcctgaagtc

SEQ ID NO: 553041 - DNA, 15 bp, Homo sapiens
gccttcctgaagtct

SEQ ID NO: 553042 - DNA, 15 bp, Homo sapiens
ccttcctgaagtcta

SEQ ID NO: 553043 - DNA, 15 bp, Homo sapiens
cttcctgaagtctat

SEQ ID NO: 553044 - DNA, 15 bp, Homo sapiens
ttcctgaagtctatt

SEQ ID NO: 553045 - DNA, 15 bp, Homo sapiens
tcctgaagtctattc

SEQ ID NO: 553046 - DNA, 15 bp, Homo sapiens
cctgaagtctattct

SEQ ID NO: 553047 - DNA, 15 bp, Homo sapiens
ctgaagtctattctc

SEQ ID NO: 553048 - DNA, 15 bp, Homo sapiens
tgaagtctattctcc

SEQ ID NO: 553049 - DNA, 15 bp, Homo sapiens
gaagtctattctccg

SEQ ID NO: 553050 - DNA, 15 bp, Homo sapiens
aagtctattctccgg

SEQ ID NO: 553051 - DNA, 15 bp, Homo sapiens
agtctattctccgga

SEQ ID NO: 553052 - DNA, 15 bp, Homo sapiens
gtctattctccggac

SEQ ID NO: 553053 - DNA, 15 bp, Homo sapiens
tctattctccggaca

SEQ ID NO: 553054 - DNA, 15 bp, Homo sapiens
ctattctccggacag

SEQ ID NO: 553055 - DNA, 15 bp, Homo sapiens
tattctccggacagc

SEQ ID NO: 553056 - DNA, 15 bp, Homo sapiens
attctccggacagca

SEQ ID NO: 553057 - DNA, 15 bp, Homo sapiens
ttctccggacagcaa

SEQ ID NO: 553058 - DNA, 15 bp, Homo sapiens
tctccggacagcaag

SEQ ID NO: 553059 - DNA, 15 bp, Homo sapiens
ctccggacagcaagc

SEQ ID NO: 553060 - DNA, 15 bp, Homo sapiens
tccggacagcaagca

SEQ ID NO: 553061 - DNA, 15 bp, Homo sapiens
ccggacagcaagcag

SEQ ID NO: 553062 - DNA, 15 bp, Homo sapiens
cggacagcaagcagc

SEQ ID NO: 553063 - DNA, 15 bp, Homo sapiens
ggacagcaagcagcc

SEQ ID NO: 553064 - DNA, 15 bp, Homo sapiens
gacagcaagcagcca

SEQ ID NO: 553065 - DNA, 15 bp, Homo sapiens
acagcaagcagccag

SEQ ID NO: 553066 - DNA, 15 bp, Homo sapiens
cagcaagcagccaga

SEQ ID NO: 553067 - DNA, 15 bp, Homo sapiens
agcaagcagccagag

SEQ ID NO: 553068 - DNA, 15 bp, Homo sapiens
gcaagcagccagagc

SEQ ID NO: 553069 - DNA, 15 bp, Homo sapiens
caagcagccagagcc

SEQ ID NO: 553070 - DNA, 15 bp, Homo sapiens
aagcagccagagcca

SEQ ID NO: 553071 - DNA, 15 bp, Homo sapiens
agcagccagagccat

SEQ ID NO: 553072 - DNA, 15 bp, Homo sapiens
gcagccagagccatg

SEQ ID NO: 553073 - DNA, 15 bp, Homo sapiens
cagccagagccatgc

SEQ ID NO: 553074 - DNA, 15 bp, Homo sapiens
agccagagccatgct

SEQ ID NO: 553075 - DNA, 15 bp, Homo sapiens
gccagagccatgctt

SEQ ID NO: 553076 - DNA, 15 bp, Homo sapiens
ccagagccatgcttt

SEQ ID NO: 553077 - DNA, 15 bp, Homo sapiens
cagagccatgctttc

SEQ ID NO: 553078 - DNA, 15 bp, Homo sapiens
agagccatgctttcc

SEQ ID NO: 553079 - DNA, 15 bp, Homo sapiens
gagccatgctttcct

SEQ ID NO: 553080 - DNA, 15 bp, Homo sapiens
agccatgctttcctc

SEQ ID NO: 553081 - DNA, 15 bp, Homo sapiens
gccatgctttcctcg

SEQ ID NO: 553082 - DNA, 15 bp, Homo sapiens
ccatgctttcctcgt

SEQ ID NO: 553083 - DNA, 15 bp, Homo sapiens
catgctttcctcgtt

SEQ ID NO: 553084 - DNA, 15 bp, Homo sapiens
atgctttcctcgttt

SEQ ID NO: 553085 - DNA, 15 bp, Homo sapiens
tgctttcctcgtttg

SEQ ID NO: 553086 - DNA, 15 bp, Homo sapiens
gctttcctcgtttgt

SEQ ID NO: 553087 - DNA, 15 bp, Homo sapiens
ctttcctcgtttgta

SEQ ID NO: 553088 - DNA, 15 bp, Homo sapiens
tttcctcgtttgtaa

SEQ ID NO: 553089 - DNA, 15 bp, Homo sapiens
ttcctcgtttgtaat

SEQ ID NO: 553090 - DNA, 15 bp, Homo sapiens
tcctcgtttgtaatc

SEQ ID NO: 553091 - DNA, 15 bp, Homo sapiens
cctcgtttgtaatcc

SEQ ID NO: 553092 - DNA, 15 bp, Homo sapiens
ctcgtttgtaatcct

SEQ ID NO: 553093 - DNA, 15 bp, Homo sapiens
tcgtttgtaatcctc

SEQ ID NO: 553094 - DNA, 15 bp, Homo sapiens
cgtttgtaatcctct

SEQ ID NO: 553095 - DNA, 15 bp, Homo sapiens
gtttgtaatcctctt

SEQ ID NO: 553096 - DNA, 15 bp, Homo sapiens
tttgtaatcctcttg

SEQ ID NO: 553097 - DNA, 15 bp, Homo sapiens
ttgtaatcctcttgc

SEQ ID NO: 553098 - DNA, 15 bp, Homo sapiens
tgtaatcctcttgct

SEQ ID NO: 553099 - DNA, 15 bp, Homo sapiens
gtaatcctcttgctc

SEQ ID NO: 553100 - DNA, 15 bp, Homo sapiens
taatcctcttgctca

SEQ ID NO: 553101 - DNA, 15 bp, Homo sapiens
aatcctcttgctcaa

SEQ ID NO: 553102 - DNA, 15 bp, Homo sapiens
atcctcttgctcaaa

SEQ ID NO: 553103 - DNA, 15 bp, Homo sapiens
tcctcttgctcaaaa

SEQ ID NO: 553104 - DNA, 15 bp, Homo sapiens
cctcttgctcaaaac

SEQ ID NO: 553105 - DNA, 15 bp, Homo sapiens
ctcttgctcaaaact

SEQ ID NO: 553106 - DNA, 15 bp, Homo sapiens
tcttgctcaaaactc

SEQ ID NO: 553107 - DNA, 15 bp, Homo sapiens
cttgctcaaaactct

SEQ ID NO: 553108 - DNA, 15 bp, Homo sapiens
ttgctcaaaactctt

SEQ ID NO: 553109 - DNA, 15 bp, Homo sapiens
tgctcaaaactcttc

SEQ ID NO: 553110 - DNA, 15 bp, Homo sapiens
gctcaaaactcttca

SEQ ID NO: 553111 - DNA, 15 bp, Homo sapiens
ctcaaaactcttcaa

SEQ ID NO: 553112 - DNA, 15 bp, Homo sapiens
tcaaaactcttcaat

SEQ ID NO: 553113 - DNA, 15 bp, Homo sapiens
caaaactcttcaatg

SEQ ID NO: 553114 - DNA, 15 bp, Homo sapiens
aaaactcttcaatgg

SEQ ID NO: 553115 - DNA, 15 bp, Homo sapiens
aaactcttcaatggc

SEQ ID NO: 553116 - DNA, 15 bp, Homo sapiens
aactcttcaatggct

SEQ ID NO: 553117 - DNA, 15 bp, Homo sapiens
actcttcaatggctt

SEQ ID NO: 553118 - DNA, 15 bp, Homo sapiens
ctcttcaatggctta

SEQ ID NO: 553119 - DNA, 15 bp, Homo sapiens
tcttcaatggcttat

SEQ ID NO: 553120 - DNA, 15 bp, Homo sapiens
cttcaatggcttatg

SEQ ID NO: 553121 - DNA, 15 bp, Homo sapiens
ttcaatggcttatga

SEQ ID NO: 553122 - DNA, 15 bp, Homo sapiens
tcaatggcttatgac

SEQ ID NO: 553123 - DNA, 15 bp, Homo sapiens
caatggcttatgaca

SEQ ID NO: 553124 - DNA, 15 bp, Homo sapiens
aatggcttatgacaa

SEQ ID NO: 553125 - DNA, 15 bp, Homo sapiens
atggcttatgacaaa

SEQ ID NO: 553126 - DNA, 15 bp, Homo sapiens
tggcttatgacaaaa

SEQ ID NO: 553127 - DNA, 15 bp, Homo sapiens
ggcttatgacaaaat

SEQ ID NO: 553128 - DNA, 15 bp, Homo sapiens
gcttatgacaaaatg

SEQ ID NO: 553129 - DNA, 15 bp, Homo sapiens
cttatgacaaaatgc

SEQ ID NO: 553130 - DNA, 15 bp, Homo sapiens
ttatgacaaaatgca

SEQ ID NO: 553131 - DNA, 15 bp, Homo sapiens
tatgacaaaatgcaa

SEQ ID NO: 553132 - DNA, 15 bp, Homo sapiens
atgacaaaatgcaaa

SEQ ID NO: 553133 - DNA, 15 bp, Homo sapiens
tgacaaaatgcaaag

SEQ ID NO: 553134 - DNA, 15 bp, Homo sapiens
gacaaaatgcaaagc

SEQ ID NO: 553135 - DNA, 15 bp, Homo sapiens
acaaaatgcaaagcc

SEQ ID NO: 553136 - DNA, 15 bp, Homo sapiens
caaaatgcaaagccc

SEQ ID NO: 553137 - DNA, 15 bp, Homo sapiens
aaaatgcaaagccct

SEQ ID NO: 553138 - DNA, 15 bp, Homo sapiens
aaatgcaaagccctt

SEQ ID NO: 553139 - DNA, 15 bp, Homo sapiens
aatgcaaagccctta

SEQ ID NO: 553140 - DNA, 15 bp, Homo sapiens
atgcaaagcccttag

SEQ ID NO: 553141 - DNA, 15 bp, Homo sapiens
tgcaaagcccttagt

SEQ ID NO: 553142 - DNA, 15 bp, Homo sapiens
gcaaagcccttagtg

SEQ ID NO: 553143 - DNA, 15 bp, Homo sapiens
caaagcccttagtgt

SEQ ID NO: 553144 - DNA, 15 bp, Homo sapiens
aaagcccttagtgtg

SEQ ID NO: 553145 - DNA, 15 bp, Homo sapiens
aagcccttagtgtgg

SEQ ID NO: 553146 - DNA, 15 bp, Homo sapiens
agcccttagtgtggc

SEQ ID NO: 553147 - DNA, 15 bp, Homo sapiens
gcccttagtgtggcc

SEQ ID NO: 553148 - DNA, 15 bp, Homo sapiens
cccttagtgtggccc

SEQ ID NO: 553149 - DNA, 15 bp, Homo sapiens
ccttagtgtggcccc

SEQ ID NO: 553150 - DNA, 15 bp, Homo sapiens
cttagtgtggcccca

SEQ ID NO: 553151 - DNA, 15 bp, Homo sapiens
ttagtgtggccccac

SEQ ID NO: 553152 - DNA, 15 bp, Homo sapiens
tagtgtggccccacc

SEQ ID NO: 553153 - DNA, 15 bp, Homo sapiens
agtgtggccccacca

SEQ ID NO: 553154 - DNA, 15 bp, Homo sapiens
gtgtggccccaccat

SEQ ID NO: 553155 - DNA, 15 bp, Homo sapiens
tgtggccccaccatc

SEQ ID NO: 553156 - DNA, 15 bp, Homo sapiens
gtggccccaccatcc

SEQ ID NO: 553157 - DNA, 15 bp, Homo sapiens
tggccccaccatccc

SEQ ID NO: 553158 - DNA, 15 bp, Homo sapiens
ggccccaccatccct

SEQ ID NO: 553159 - DNA, 15 bp, Homo sapiens
gccccaccatccctc

SEQ ID NO: 553160 - DNA, 15 bp, Homo sapiens
ccccaccatccctct

SEQ ID NO: 553161 - DNA, 15 bp, Homo sapiens
cccaccatccctctg

SEQ ID NO: 553162 - DNA, 15 bp, Homo sapiens
ccaccatccctctga

SEQ ID NO: 553163 - DNA, 15 bp, Homo sapiens
caccatccctctgac

SEQ ID NO: 553164 - DNA, 15 bp, Homo sapiens
accatccctctgaca

SEQ ID NO: 553165 - DNA, 15 bp, Homo sapiens
ccatccctctgacat

SEQ ID NO: 553166 - DNA, 15 bp, Homo sapiens
catccctctgacatc

SEQ ID NO: 553167 - DNA, 15 bp, Homo sapiens
atccctctgacatcc

SEQ ID NO: 553168 - DNA, 15 bp, Homo sapiens
tccctctgacatcct

SEQ ID NO: 553169 - DNA, 15 bp, Homo sapiens
ccctctgacatcctc

SEQ ID NO: 553170 - DNA, 15 bp, Homo sapiens
cctctgacatcctct

SEQ ID NO: 553171 - DNA, 15 bp, Homo sapiens
ctctgacatcctctc

SEQ ID NO: 553172 - DNA, 15 bp, Homo sapiens
tctgacatcctctct

SEQ ID NO: 553173 - DNA, 15 bp, Homo sapiens
ctgacatcctctcta

SEQ ID NO: 553174 - DNA, 15 bp, Homo sapiens
tgacatcctctctac

SEQ ID NO: 553175 - DNA, 15 bp, Homo sapiens
gacatcctctctact

SEQ ID NO: 553176 - DNA, 15 bp, Homo sapiens
acatcctctctactg

SEQ ID NO: 553177 - DNA, 15 bp, Homo sapiens
catcctctctactgc

SEQ ID NO: 553178 - DNA, 15 bp, Homo sapiens
atcctctctactgcc

SEQ ID NO: 553179 - DNA, 15 bp, Homo sapiens
tcctctctactgccc

SEQ ID NO: 553180 - DNA, 15 bp, Homo sapiens
cctctctactgcccc

SEQ ID NO: 553181 - DNA, 15 bp, Homo sapiens
ctctctactgccccc

SEQ ID NO: 553182 - DNA, 15 bp, Homo sapiens
tctctactgccccct

SEQ ID NO: 553183 - DNA, 15 bp, Homo sapiens
ctctactgccccctc

SEQ ID NO: 553184 - DNA, 15 bp, Homo sapiens
tctactgccccctcc

SEQ ID NO: 553185 - DNA, 15 bp, Homo sapiens
ctactgccccctccc

SEQ ID NO: 553186 - DNA, 15 bp, Homo sapiens
tactgccccctccct

SEQ ID NO: 553187 - DNA, 15 bp, Homo sapiens
actgccccctccctc

SEQ ID NO: 553188 - DNA, 15 bp, Homo sapiens
ctgccccctccctcc

SEQ ID NO: 553189 - DNA, 15 bp, Homo sapiens
tgccccctccctccc

SEQ ID NO: 553190 - DNA, 15 bp, Homo sapiens
gccccctccctccca

SEQ ID NO: 553191 - DNA, 15 bp, Homo sapiens
ccccctccctcccac

SEQ ID NO: 553192 - DNA, 15 bp, Homo sapiens
cccctccctcccact

SEQ ID NO: 553193 - DNA, 15 bp, Homo sapiens
ccctccctcccactt

SEQ ID NO: 553194 - DNA, 15 bp, Homo sapiens
cctccctcccacttc

SEQ ID NO: 553195 - DNA, 15 bp, Homo sapiens
ctccctcccacttct

SEQ ID NO: 553196 - DNA, 15 bp, Homo sapiens
tccctcccacttctt

SEQ ID NO: 553197 - DNA, 15 bp, Homo sapiens
ccctcccacttcttc

SEQ ID NO: 553198 - DNA, 15 bp, Homo sapiens
cctcccacttcttcc

SEQ ID NO: 553199 - DNA, 15 bp, Homo sapiens
ctcccacttcttccc

SEQ ID NO: 553200 - DNA, 15 bp, Homo sapiens
tcccacttcttccct

SEQ ID NO: 553201 - DNA, 15 bp, Homo sapiens
cccacttcttccctc

SEQ ID NO: 553202 - DNA, 15 bp, Homo sapiens
ccacttcttccctcc

SEQ ID NO: 553203 - DNA, 15 bp, Homo sapiens
cacttcttccctccg

SEQ ID NO: 553204 - DNA, 15 bp, Homo sapiens
acttcttccctccgc

SEQ ID NO: 553205 - DNA, 15 bp, Homo sapiens
cttcttccctccgcg

SEQ ID NO: 553206 - DNA, 15 bp, Homo sapiens
ttcttccctccgcgc

SEQ ID NO: 553207 - DNA, 15 bp, Homo sapiens
tcttccctccgcgcc

SEQ ID NO: 553208 - DNA, 15 bp, Homo sapiens
cttccctccgcgcca

SEQ ID NO: 553209 - DNA, 15 bp, Homo sapiens
ttccctccgcgccag

SEQ ID NO: 553210 - DNA, 15 bp, Homo sapiens
tccctccgcgccagc

SEQ ID NO: 553211 - DNA, 15 bp, Homo sapiens
ccctccgcgccagcc

SEQ ID NO: 553212 - DNA, 15 bp, Homo sapiens
cctccgcgccagcct

SEQ ID NO: 553213 - DNA, 15 bp, Homo sapiens
ctccgcgccagcctc

SEQ ID NO: 553214 - DNA, 15 bp, Homo sapiens
tccgcgccagcctca

SEQ ID NO: 553215 - DNA, 15 bp, Homo sapiens
ccgcgccagcctcat

SEQ ID NO: 553216 - DNA, 15 bp, Homo sapiens
cgcgccagcctcata

SEQ ID NO: 553217 - DNA, 15 bp, Homo sapiens
gcgccagcctcataa

SEQ ID NO: 553218 - DNA, 15 bp, Homo sapiens
cgccagcctcataag

SEQ ID NO: 553219 - DNA, 15 bp, Homo sapiens
gccagcctcataaga

SEQ ID NO: 553220 - DNA, 15 bp, Homo sapiens
ccagcctcataagac

SEQ ID NO: 553221 - DNA, 15 bp, Homo sapiens
cagcctcataagact

SEQ ID NO: 553222 - DNA, 15 bp, Homo sapiens
agcctcataagactc

SEQ ID NO: 553223 - DNA, 15 bp, Homo sapiens
gcctcataagactct

SEQ ID NO: 553224 - DNA, 15 bp, Homo sapiens
cctcataagactcta

SEQ ID NO: 553225 - DNA, 15 bp, Homo sapiens
ctcataagactctag

SEQ ID NO: 553226 - DNA, 15 bp, Homo sapiens
tcataagactctagc

SEQ ID NO: 553227 - DNA, 15 bp, Homo sapiens
cataagactctagct

SEQ ID NO: 553228 - DNA, 15 bp, Homo sapiens
ataagactctagctg

SEQ ID NO: 553229 - DNA, 15 bp, Homo sapiens
taagactctagctgc

SEQ ID NO: 553230 - DNA, 15 bp, Homo sapiens
aagactctagctgct

SEQ ID NO: 553231 - DNA, 15 bp, Homo sapiens
agactctagctgctg

SEQ ID NO: 553232 - DNA, 15 bp, Homo sapiens
gactctagctgctgc

SEQ ID NO: 553233 - DNA, 15 bp, Homo sapiens
actctagctgctgct

SEQ ID NO: 553234 - DNA, 15 bp, Homo sapiens
ctctagctgctgctc

SEQ ID NO: 553235 - DNA, 15 bp, Homo sapiens
tctagctgctgctcc

SEQ ID NO: 553236 - DNA, 15 bp, Homo sapiens
ctagctgctgctcct

SEQ ID NO: 553237 - DNA, 15 bp, Homo sapiens
tagctgctgctccta

SEQ ID NO: 553238 - DNA, 15 bp, Homo sapiens
agctgctgctcctag

SEQ ID NO: 553239 - DNA, 15 bp, Homo sapiens
gctgctgctcctaga

SEQ ID NO: 553240 - DNA, 15 bp, Homo sapiens
ctgctgctcctagac

SEQ ID NO: 553241 - DNA, 15 bp, Homo sapiens
tgctgctcctagacc

SEQ ID NO: 553242 - DNA, 15 bp, Homo sapiens
gctgctcctagaccc

SEQ ID NO: 553243 - DNA, 15 bp, Homo sapiens
ctgctcctagacccc

SEQ ID NO: 553244 - DNA, 15 bp, Homo sapiens
tgctcctagaccccc

SEQ ID NO: 553245 - DNA, 15 bp, Homo sapiens
gctcctagaccccca

SEQ ID NO: 553246 - DNA, 15 bp, Homo sapiens
ctcctagacccccag

SEQ ID NO: 553247 - DNA, 15 bp, Homo sapiens
tcctagacccccagg

SEQ ID NO: 553248 - DNA, 15 bp, Homo sapiens
cctagacccccaggc

SEQ ID NO: 553249 - DNA, 15 bp, Homo sapiens
ctagacccccaggca

SEQ ID NO: 553250 - DNA, 15 bp, Homo sapiens
tagacccccaggcac

SEQ ID NO: 553251 - DNA, 15 bp, Homo sapiens
agacccccaggcacc

SEQ ID NO: 553252 - DNA, 15 bp, Homo sapiens
gacccccaggcaccc

SEQ ID NO: 553253 - DNA, 15 bp, Homo sapiens
acccccaggcaccct

SEQ ID NO: 553254 - DNA, 15 bp, Homo sapiens
cccccaggcaccctc

SEQ ID NO: 553255 - DNA, 15 bp, Homo sapiens
ccccaggcaccctcg

SEQ ID NO: 553256 - DNA, 15 bp, Homo sapiens
cccaggcaccctcgt

SEQ ID NO: 553257 - DNA, 15 bp, Homo sapiens
ccaggcaccctcgtg

SEQ ID NO: 553258 - DNA, 15 bp, Homo sapiens
caggcaccctcgtgc

SEQ ID NO: 553259 - DNA, 15 bp, Homo sapiens
aggcaccctcgtgcc

SEQ ID NO: 553260 - DNA, 15 bp, Homo sapiens
ggcaccctcgtgcct

SEQ ID NO: 553261 - DNA, 15 bp, Homo sapiens
gcaccctcgtgcctc

SEQ ID NO: 553262 - DNA, 15 bp, Homo sapiens
caccctcgtgcctca

SEQ ID NO: 553263 - DNA, 15 bp, Homo sapiens
accctcgtgcctcag

SEQ ID NO: 553264 - DNA, 15 bp, Homo sapiens
ccctcgtgcctcaga

SEQ ID NO: 553265 - DNA, 15 bp, Homo sapiens
cctcgtgcctcagaa

SEQ ID NO: 553266 - DNA, 15 bp, Homo sapiens
ctcgtgcctcagaat

SEQ ID NO: 553267 - DNA, 15 bp, Homo sapiens
tcgtgcctcagaatc

SEQ ID NO: 553268 - DNA, 15 bp, Homo sapiens
cgtgcctcagaatct

SEQ ID NO: 553269 - DNA, 15 bp, Homo sapiens
gtgcctcagaatctc

SEQ ID NO: 553270 - DNA, 15 bp, Homo sapiens
tgcctcagaatctct

SEQ ID NO: 553271 - DNA, 15 bp, Homo sapiens
gcctcagaatctctt

SEQ ID NO: 553272 - DNA, 15 bp, Homo sapiens
cctcagaatctcttc

SEQ ID NO: 553273 - DNA, 15 bp, Homo sapiens
ctcagaatctcttcc

SEQ ID NO: 553274 - DNA, 15 bp, Homo sapiens
tcagaatctcttccc

SEQ ID NO: 553275 - DNA, 15 bp, Homo sapiens
cagaatctcttcccc

SEQ ID NO: 553276 - DNA, 15 bp, Homo sapiens
agaatctcttcccct

SEQ ID NO: 553277 - DNA, 15 bp, Homo sapiens
gaatctcttcccctg

SEQ ID NO: 553278 - DNA, 15 bp, Homo sapiens
aatctcttcccctga

SEQ ID NO: 553279 - DNA, 15 bp, Homo sapiens
atctcttcccctgag

SEQ ID NO: 553280 - DNA, 15 bp, Homo sapiens
tctcttcccctgagc

SEQ ID NO: 553281 - DNA, 15 bp, Homo sapiens
ctcttcccctgagct

SEQ ID NO: 553282 - DNA, 15 bp, Homo sapiens
tcttcccctgagctc

SEQ ID NO: 553283 - DNA, 15 bp, Homo sapiens
cttcccctgagctcc

SEQ ID NO: 553284 - DNA, 15 bp, Homo sapiens
ttcccctgagctcct

SEQ ID NO: 553285 - DNA, 15 bp, Homo sapiens
tcccctgagctcctt

SEQ ID NO: 553286 - DNA, 15 bp, Homo sapiens
cccctgagctccttc

SEQ ID NO: 553287 - DNA, 15 bp, Homo sapiens
ccctgagctccttca

SEQ ID NO: 553288 - DNA, 15 bp, Homo sapiens
cctgagctccttcat

SEQ ID NO: 553289 - DNA, 15 bp, Homo sapiens
ctgagctccttcatt

SEQ ID NO: 553290 - DNA, 15 bp, Homo sapiens
tgagctccttcattc

SEQ ID NO: 553291 - DNA, 15 bp, Homo sapiens
gagctccttcattct

SEQ ID NO: 553292 - DNA, 15 bp, Homo sapiens
agctccttcattctg

SEQ ID NO: 553293 - DNA, 15 bp, Homo sapiens
gctccttcattctgg

SEQ ID NO: 553294 - DNA, 15 bp, Homo sapiens
ctccttcattctgga

SEQ ID NO: 553295 - DNA, 15 bp, Homo sapiens
tccttcattctggaa

SEQ ID NO: 553296 - DNA, 15 bp, Homo sapiens
ccttcattctggaac

SEQ ID NO: 553297 - DNA, 15 bp, Homo sapiens
cttcattctggaaca

SEQ ID NO: 553298 - DNA, 15 bp, Homo sapiens
ttcattctggaacat

SEQ ID NO: 553299 - DNA, 15 bp, Homo sapiens
tcattctggaacatt

SEQ ID NO: 553300 - DNA, 15 bp, Homo sapiens
cattctggaacattc

SEQ ID NO: 553301 - DNA, 15 bp, Homo sapiens
attctggaacattcc

SEQ ID NO: 553302 - DNA, 15 bp, Homo sapiens
ttctggaacattcct

SEQ ID NO: 553303 - DNA, 15 bp, Homo sapiens
tctggaacattccta

SEQ ID NO: 553304 - DNA, 15 bp, Homo sapiens
ctggaacattcctac

SEQ ID NO: 553305 - DNA, 15 bp, Homo sapiens
tggaacattcctact

SEQ ID NO: 553306 - DNA, 15 bp, Homo sapiens
ggaacattcctactc

SEQ ID NO: 553307 - DNA, 15 bp, Homo sapiens
gaacattcctactcc

SEQ ID NO: 553308 - DNA, 15 bp, Homo sapiens
aacattcctactcca

SEQ ID NO: 553309 - DNA, 15 bp, Homo sapiens
acattcctactccat

SEQ ID NO: 553310 - DNA, 15 bp, Homo sapiens
cattcctactccatc

SEQ ID NO: 553311 - DNA, 15 bp, Homo sapiens
attcctactccatct

SEQ ID NO: 553312 - DNA, 15 bp, Homo sapiens
ttcctactccatcta

SEQ ID NO: 553313 - DNA, 15 bp, Homo sapiens
tcctactccatctag

SEQ ID NO: 553314 - DNA, 15 bp, Homo sapiens
cctactccatctagt

SEQ ID NO: 553315 - DNA, 15 bp, Homo sapiens
ctactccatctagtc

SEQ ID NO: 553316 - DNA, 15 bp, Homo sapiens
tactccatctagtca

SEQ ID NO: 553317 - DNA, 15 bp, Homo sapiens
actccatctagtcat

SEQ ID NO: 553318 - DNA, 15 bp, Homo sapiens
ctccatctagtcata

SEQ ID NO: 553319 - DNA, 15 bp, Homo sapiens
tccatctagtcatat

SEQ ID NO: 553320 - DNA, 15 bp, Homo sapiens
ccatctagtcatatg

SEQ ID NO: 553321 - DNA, 15 bp, Homo sapiens
catctagtcatatga

SEQ ID NO: 553322 - DNA, 15 bp, Homo sapiens
atctagtcatatgac

SEQ ID NO: 553323 - DNA, 15 bp, Homo sapiens
tctagtcatatgact

SEQ ID NO: 553324 - DNA, 15 bp, Homo sapiens
ctagtcatatgactc

SEQ ID NO: 553325 - DNA, 15 bp, Homo sapiens
tagtcatatgactct

SEQ ID NO: 553326 - DNA, 15 bp, Homo sapiens
agtcatatgactctc

SEQ ID NO: 553327 - DNA, 15 bp, Homo sapiens
gtcatatgactctct

SEQ ID NO: 553328 - DNA, 15 bp, Homo sapiens
tcatatgactctctc

SEQ ID NO: 553329 - DNA, 15 bp, Homo sapiens
catatgactctctcc

SEQ ID NO: 553330 - DNA, 15 bp, Homo sapiens
atatgactctctccc

SEQ ID NO: 553331 - DNA, 15 bp, Homo sapiens
tatgactctctccct

SEQ ID NO: 553332 - DNA, 15 bp, Homo sapiens
atgactctctccctc

SEQ ID NO: 553333 - DNA, 15 bp, Homo sapiens
tgactctctccctca

SEQ ID NO: 553334 - DNA, 15 bp, Homo sapiens
gactctctccctcac

SEQ ID NO: 553335 - DNA, 15 bp, Homo sapiens
actctctccctcacg

SEQ ID NO: 553336 - DNA, 15 bp, Homo sapiens
ctctctccctcacga

SEQ ID NO: 553337 - DNA, 15 bp, Homo sapiens
tctctccctcacgag

SEQ ID NO: 553338 - DNA, 15 bp, Homo sapiens
ctctccctcacgagt

SEQ ID NO: 553339 - DNA, 15 bp, Homo sapiens
tctccctcacgagtt

SEQ ID NO: 553340 - DNA, 15 bp, Homo sapiens
ctccctcacgagttt

SEQ ID NO: 553341 - DNA, 15 bp, Homo sapiens
tccctcacgagtttt

SEQ ID NO: 553342 - DNA, 15 bp, Homo sapiens
ccctcacgagttttg

SEQ ID NO: 553343 - DNA, 15 bp, Homo sapiens
cctcacgagttttgg

SEQ ID NO: 553344 - DNA, 15 bp, Homo sapiens
ctcacgagttttggg

SEQ ID NO: 553345 - DNA, 15 bp, Homo sapiens
tcacgagttttgggt

SEQ ID NO: 553346 - DNA, 15 bp, Homo sapiens
cacgagttttgggtt

SEQ ID NO: 553347 - DNA, 15 bp, Homo sapiens
acgagttttgggttt

SEQ ID NO: 553348 - DNA, 15 bp, Homo sapiens
cgagttttgggtttc

SEQ ID NO: 553349 - DNA, 15 bp, Homo sapiens
gagttttgggtttct

SEQ ID NO: 553350 - DNA, 15 bp, Homo sapiens
agttttgggtttctc

SEQ ID NO: 553351 - DNA, 15 bp, Homo sapiens
gttttgggtttctct

SEQ ID NO: 553352 - DNA, 15 bp, Homo sapiens
ttttgggtttctcta

SEQ ID NO: 553353 - DNA, 15 bp, Homo sapiens
tttgggtttctctac

SEQ ID NO: 553354 - DNA, 15 bp, Homo sapiens
ttgggtttctctacc

SEQ ID NO: 553355 - DNA, 15 bp, Homo sapiens
tgggtttctctacct

SEQ ID NO: 553356 - DNA, 15 bp, Homo sapiens
gggtttctctacctg

SEQ ID NO: 553357 - DNA, 15 bp, Homo sapiens
ggtttctctacctga

SEQ ID NO: 553358 - DNA, 15 bp, Homo sapiens
gtttctctacctgaa

SEQ ID NO: 553359 - DNA, 15 bp, Homo sapiens
tttctctacctgaac

SEQ ID NO: 553360 - DNA, 15 bp, Homo sapiens
ttctctacctgaacc

SEQ ID NO: 553361 - DNA, 15 bp, Homo sapiens
tctctacctgaacct

SEQ ID NO: 553362 - DNA, 15 bp, Homo sapiens
ctctacctgaacctc

SEQ ID NO: 553363 - DNA, 15 bp, Homo sapiens
tctacctgaacctca

SEQ ID NO: 553364 - DNA, 15 bp, Homo sapiens
ctacctgaacctcac

SEQ ID NO: 553365 - DNA, 15 bp, Homo sapiens
tacctgaacctcacc

SEQ ID NO: 553366 - DNA, 15 bp, Homo sapiens
acctgaacctcacct

SEQ ID NO: 553367 - DNA, 15 bp, Homo sapiens
cctgaacctcacctt

SEQ ID NO: 553368 - DNA, 15 bp, Homo sapiens
ctgaacctcaccttt

SEQ ID NO: 553369 - DNA, 15 bp, Homo sapiens
tgaacctcacctttt

SEQ ID NO: 553370 - DNA, 15 bp, Homo sapiens
gaacctcaccttttc

SEQ ID NO: 553371 - DNA, 15 bp, Homo sapiens
aacctcaccttttca

SEQ ID NO: 553372 - DNA, 15 bp, Homo sapiens
acctcaccttttcag

SEQ ID NO: 553373 - DNA, 15 bp, Homo sapiens
cctcaccttttcaga

SEQ ID NO: 553374 - DNA, 15 bp, Homo sapiens
ctcaccttttcagag

SEQ ID NO: 553375 - DNA, 15 bp, Homo sapiens
tcaccttttcagagg

SEQ ID NO: 553376 - DNA, 15 bp, Homo sapiens
caccttttcagaggc

SEQ ID NO: 553377 - DNA, 15 bp, Homo sapiens
accttttcagaggcc

SEQ ID NO: 553378 - DNA, 15 bp, Homo sapiens
ccttttcagaggcct

SEQ ID NO: 553379 - DNA, 15 bp, Homo sapiens
cttttcagaggcctc

SEQ ID NO: 553380 - DNA, 15 bp, Homo sapiens
ttttcagaggcctcc

SEQ ID NO: 553381 - DNA, 15 bp, Homo sapiens
tttcagaggcctccc

SEQ ID NO: 553382 - DNA, 15 bp, Homo sapiens
ttcagaggcctcccc

SEQ ID NO: 553383 - DNA, 15 bp, Homo sapiens
tcagaggcctcccct

SEQ ID NO: 553384 - DNA, 15 bp, Homo sapiens
cagaggcctcccctg

SEQ ID NO: 553385 - DNA, 15 bp, Homo sapiens
agaggcctcccctgg

SEQ ID NO: 553386 - DNA, 15 bp, Homo sapiens
gaggcctcccctggc

SEQ ID NO: 553387 - DNA, 15 bp, Homo sapiens
aggcctcccctggcc

SEQ ID NO: 553388 - DNA, 15 bp, Homo sapiens
ggcctcccctggcca

SEQ ID NO: 553389 - DNA, 15 bp, Homo sapiens
gcctcccctggccac

SEQ ID NO: 553390 - DNA, 15 bp, Homo sapiens
cctcccctggccacc

SEQ ID NO: 553391 - DNA, 15 bp, Homo sapiens
ctcccctggccacct

SEQ ID NO: 553392 - DNA, 15 bp, Homo sapiens
tcccctggccacctg

SEQ ID NO: 553393 - DNA, 15 bp, Homo sapiens
cccctggccacctga

SEQ ID NO: 553394 - DNA, 15 bp, Homo sapiens
ccctggccacctgat

SEQ ID NO: 553395 - DNA, 15 bp, Homo sapiens
cctggccacctgatc

SEQ ID NO: 553396 - DNA, 15 bp, Homo sapiens
ctggccacctgatcg

SEQ ID NO: 553397 - DNA, 15 bp, Homo sapiens
tggccacctgatcga

SEQ ID NO: 553398 - DNA, 15 bp, Homo sapiens
ggccacctgatcgaa

SEQ ID NO: 553399 - DNA, 15 bp, Homo sapiens
gccacctgatcgaaa

SEQ ID NO: 553400 - DNA, 15 bp, Homo sapiens
ccacctgatcgaaac

SEQ ID NO: 553401 - DNA, 15 bp, Homo sapiens
cacctgatcgaaacc

SEQ ID NO: 553402 - DNA, 15 bp, Homo sapiens
acctgatcgaaacca

SEQ ID NO: 553403 - DNA, 15 bp, Homo sapiens
cctgatcgaaaccag

SEQ ID NO: 553404 - DNA, 15 bp, Homo sapiens
ctgatcgaaaccagc

SEQ ID NO: 553405 - DNA, 15 bp, Homo sapiens
tgatcgaaaccagcg

SEQ ID NO: 553406 - DNA, 15 bp, Homo sapiens
gatcgaaaccagcgc

SEQ ID NO: 553407 - DNA, 15 bp, Homo sapiens
atcgaaaccagcgcc

SEQ ID NO: 553408 - DNA, 15 bp, Homo sapiens
tcgaaaccagcgcct

SEQ ID NO: 553409 - DNA, 15 bp, Homo sapiens
cgaaaccagcgcctc

SEQ ID NO: 553410 - DNA, 15 bp, Homo sapiens
gaaaccagcgcctcc

SEQ ID NO: 553411 - DNA, 15 bp, Homo sapiens
aaaccagcgcctcct

SEQ ID NO: 553412 - DNA, 15 bp, Homo sapiens
aaccagcgcctcctc

SEQ ID NO: 553413 - DNA, 15 bp, Homo sapiens
accagcgcctcctca

SEQ ID NO: 553414 - DNA, 15 bp, Homo sapiens
ccagcgcctcctcac

SEQ ID NO: 553415 - DNA, 15 bp, Homo sapiens
cagcgcctcctcact

SEQ ID NO: 553416 - DNA, 15 bp, Homo sapiens
agcgcctcctcactc

SEQ ID NO: 553417 - DNA, 15 bp, Homo sapiens
gcgcctcctcactct

SEQ ID NO: 553418 - DNA, 15 bp, Homo sapiens
cgcctcctcactctt

SEQ ID NO: 553419 - DNA, 15 bp, Homo sapiens
gcctcctcactcttt

SEQ ID NO: 553420 - DNA, 15 bp, Homo sapiens
cctcctcactcttta

SEQ ID NO: 553421 - DNA, 15 bp, Homo sapiens
ctcctcactctttac

SEQ ID NO: 553422 - DNA, 15 bp, Homo sapiens
tcctcactctttacc

SEQ ID NO: 553423 - DNA, 15 bp, Homo sapiens
cctcactctttaccc

SEQ ID NO: 553424 - DNA, 15 bp, Homo sapiens
ctcactctttaccct

SEQ ID NO: 553425 - DNA, 15 bp, Homo sapiens
tcactctttaccctg

SEQ ID NO: 553426 - DNA, 15 bp, Homo sapiens
cactctttaccctgc

SEQ ID NO: 553427 - DNA, 15 bp, Homo sapiens
actctttaccctgct

SEQ ID NO: 553428 - DNA, 15 bp, Homo sapiens
ctctttaccctgctt

SEQ ID NO: 553429 - DNA, 15 bp, Homo sapiens
tctttaccctgctta

SEQ ID NO: 553430 - DNA, 15 bp, Homo sapiens
ctttaccctgcttag

SEQ ID NO: 553431 - DNA, 15 bp, Homo sapiens
tttaccctgcttaga

SEQ ID NO: 553432 - DNA, 15 bp, Homo sapiens
ttaccctgcttagag

SEQ ID NO: 553433 - DNA, 15 bp, Homo sapiens
taccctgcttagagt

SEQ ID NO: 553434 - DNA, 15 bp, Homo sapiens
accctgcttagagtg

SEQ ID NO: 553435 - DNA, 15 bp, Homo sapiens
ccctgcttagagtgt

SEQ ID NO: 553436 - DNA, 15 bp, Homo sapiens
cctgcttagagtgtc

SEQ ID NO: 553437 - DNA, 15 bp, Homo sapiens
ctgcttagagtgtct

SEQ ID NO: 553438 - DNA, 15 bp, Homo sapiens
tgcttagagtgtctg

SEQ ID NO: 553439 - DNA, 15 bp, Homo sapiens
gcttagagtgtctgt

SEQ ID NO: 553440 - DNA, 15 bp, Homo sapiens
cttagagtgtctgtc

SEQ ID NO: 553441 - DNA, 15 bp, Homo sapiens
ttagagtgtctgtcc

SEQ ID NO: 553442 - DNA, 15 bp, Homo sapiens
tagagtgtctgtcct

SEQ ID NO: 553443 - DNA, 15 bp, Homo sapiens
agagtgtctgtccta

SEQ ID NO: 553444 - DNA, 15 bp, Homo sapiens
gagtgtctgtcctag

SEQ ID NO: 553445 - DNA, 15 bp, Homo sapiens
agtgtctgtcctagt

SEQ ID NO: 553446 - DNA, 15 bp, Homo sapiens
gtgtctgtcctagtt

SEQ ID NO: 553447 - DNA, 15 bp, Homo sapiens
tgtctgtcctagttc

SEQ ID NO: 553448 - DNA, 15 bp, Homo sapiens
gtctgtcctagttct

SEQ ID NO: 553449 - DNA, 15 bp, Homo sapiens
tctgtcctagttctt

SEQ ID NO: 553450 - DNA, 15 bp, Homo sapiens
ctgtcctagttctta

SEQ ID NO: 553451 - DNA, 15 bp, Homo sapiens
tgtcctagttcttat

SEQ ID NO: 553452 - DNA, 15 bp, Homo sapiens
gtcctagttcttatc

SEQ ID NO: 553453 - DNA, 15 bp, Homo sapiens
tcctagttcttatca

SEQ ID NO: 553454 - DNA, 15 bp, Homo sapiens
cctagttcttatcac

SEQ ID NO: 553455 - DNA, 15 bp, Homo sapiens
ctagttcttatcacc

SEQ ID NO: 553456 - DNA, 15 bp, Homo sapiens
tagttcttatcacct

SEQ ID NO: 553457 - DNA, 15 bp, Homo sapiens
agttcttatcacctc

SEQ ID NO: 553458 - DNA, 15 bp, Homo sapiens
gttcttatcacctcc

SEQ ID NO: 553459 - DNA, 15 bp, Homo sapiens
ttcttatcacctccc

SEQ ID NO: 553460 - DNA, 15 bp, Homo sapiens
tcttatcacctccct

SEQ ID NO: 553461 - DNA, 15 bp, Homo sapiens
cttatcacctccctc

SEQ ID NO: 553462 - DNA, 15 bp, Homo sapiens
ttatcacctccctca

SEQ ID NO: 553463 - DNA, 15 bp, Homo sapiens
tatcacctccctcac

SEQ ID NO: 553464 - DNA, 15 bp, Homo sapiens
atcacctccctcact

SEQ ID NO: 553465 - DNA, 15 bp, Homo sapiens
tcacctccctcactg

SEQ ID NO: 553466 - DNA, 15 bp, Homo sapiens
cacctccctcactga

SEQ ID NO: 553467 - DNA, 15 bp, Homo sapiens
acctccctcactgac

SEQ ID NO: 553468 - DNA, 15 bp, Homo sapiens
cctccctcactgaca

SEQ ID NO: 553469 - DNA, 15 bp, Homo sapiens
ctccctcactgacac

SEQ ID NO: 553470 - DNA, 15 bp, Homo sapiens
tccctcactgacacg

SEQ ID NO: 553471 - DNA, 15 bp, Homo sapiens
ccctcactgacacgt

SEQ ID NO: 553472 - DNA, 15 bp, Homo sapiens
cctcactgacacgtg

SEQ ID NO: 553473 - DNA, 15 bp, Homo sapiens
ctcactgacacgtgg

SEQ ID NO: 553474 - DNA, 15 bp, Homo sapiens
tcactgacacgtggg

SEQ ID NO: 553475 - DNA, 15 bp, Homo sapiens
cactgacacgtgggc

SEQ ID NO: 553476 - DNA, 15 bp, Homo sapiens
actgacacgtgggca

SEQ ID NO: 553477 - DNA, 15 bp, Homo sapiens
ctgacacgtgggcag

SEQ ID NO: 553478 - DNA, 15 bp, Homo sapiens
tgacacgtgggcagg

SEQ ID NO: 553479 - DNA, 15 bp, Homo sapiens
gacacgtgggcaggg

SEQ ID NO: 553480 - DNA, 15 bp, Homo sapiens
acacgtgggcagggc

SEQ ID NO: 553481 - DNA, 15 bp, Homo sapiens
cacgtgggcagggcc

SEQ ID NO: 553482 - DNA, 15 bp, Homo sapiens
acgtgggcagggcct

SEQ ID NO: 553483 - DNA, 15 bp, Homo sapiens
cgtgggcagggcctg

SEQ ID NO: 553484 - DNA, 15 bp, Homo sapiens
gtgggcagggcctga

SEQ ID NO: 553485 - DNA, 15 bp, Homo sapiens
tgggcagggcctgaa

SEQ ID NO: 553486 - DNA, 15 bp, Homo sapiens
gggcagggcctgaaa

SEQ ID NO: 553487 - DNA, 15 bp, Homo sapiens
ggcagggcctgaaac

SEQ ID NO: 553488 - DNA, 15 bp, Homo sapiens
gcagggcctgaaacg

SEQ ID NO: 553489 - DNA, 15 bp, Homo sapiens
cagggcctgaaacgg

SEQ ID NO: 553490 - DNA, 15 bp, Homo sapiens
agggcctgaaacggt

SEQ ID NO: 553491 - DNA, 15 bp, Homo sapiens
gggcctgaaacggta

SEQ ID NO: 553492 - DNA, 15 bp, Homo sapiens
ggcctgaaacggtag

SEQ ID NO: 553493 - DNA, 15 bp, Homo sapiens
gcctgaaacggtagg

SEQ ID NO: 553494 - DNA, 15 bp, Homo sapiens
cctgaaacggtaggt

SEQ ID NO: 553495 - DNA, 15 bp, Homo sapiens
ctgaaacggtaggtg

SEQ ID NO: 553496 - DNA, 15 bp, Homo sapiens
tgaaacggtaggtgc

SEQ ID NO: 553497 - DNA, 15 bp, Homo sapiens
gaaacggtaggtgct

SEQ ID NO: 553498 - DNA, 15 bp, Homo sapiens
aaacggtaggtgctc

SEQ ID NO: 553499 - DNA, 15 bp, Homo sapiens
aacggtaggtgctca

SEQ ID NO: 553500 - DNA, 15 bp, Homo sapiens
acggtaggtgctcaa

SEQ ID NO: 553501 - DNA, 15 bp, Homo sapiens
cggtaggtgctcaat

SEQ ID NO: 553502 - DNA, 15 bp, Homo sapiens
ggtaggtgctcaata

SEQ ID NO: 553503 - DNA, 15 bp, Homo sapiens
gtaggtgctcaataa

SEQ ID NO: 553504 - DNA, 15 bp, Homo sapiens
taggtgctcaataaa

SEQ ID NO: 553505 - DNA, 15 bp, Homo sapiens
aggtgctcaataaat

SEQ ID NO: 553506 - DNA, 15 bp, Homo sapiens
ggtgctcaataaatt

SEQ ID NO: 553507 - DNA, 15 bp, Homo sapiens
gtgctcaataaattg

SEQ ID NO: 553508 - DNA, 15 bp, Homo sapiens
tgctcaataaattgt

SEQ ID NO: 553509 - DNA, 15 bp, Homo sapiens
gctcaataaattgtc

SEQ ID NO: 553510 - DNA, 15 bp, Homo sapiens
ctcaataaattgtcg

SEQ ID NO: 553511 - DNA, 15 bp, Homo sapiens
tcaataaattgtcgt

SEQ ID NO: 553512 - DNA, 15 bp, Homo sapiens
caataaattgtcgtc

SEQ ID NO: 553513 - DNA, 15 bp, Homo sapiens
aataaattgtcgtca

SEQ ID NO: 553514 - DNA, 15 bp, Homo sapiens
ataaattgtcgtcaa

SEQ ID NO: 553515 - DNA, 15 bp, Homo sapiens
taaattgtcgtcaaa

SEQ ID NO: 553516 - DNA, 15 bp, Homo sapiens
aaattgtcgtcaaat

SEQ ID NO: 553517 - DNA, 15 bp, Homo sapiens
aattgtcgtcaaata

SEQ ID NO: 553518 - DNA, 15 bp, Homo sapiens
attgtcgtcaaataa

SEQ ID NO: 553519 - DNA, 15 bp, Homo sapiens
ttgtcgtcaaataaa

SEQ ID NO: 553520 - DNA, 15 bp, Homo sapiens
tgtcgtcaaataaat

SEQ ID NO: 553521 - DNA, 15 bp, Homo sapiens
gtcgtcaaataaata

SEQ ID NO: 553522 - DNA, 15 bp, Homo sapiens
tcgtcaaataaataa

SEQ ID NO: 553523 - DNA, 15 bp, Homo sapiens
cgtcaaataaataac

SEQ ID NO: 553524 - DNA, 15 bp, Homo sapiens
gtcaaataaataact

SEQ ID NO: 553525 - DNA, 15 bp, Homo sapiens
tcaaataaataactg

SEQ ID NO: 553526 - DNA, 15 bp, Homo sapiens
caaataaataactga

SEQ ID NO: 553527 - DNA, 15 bp, Homo sapiens
aaataaataactgag

SEQ ID NO: 553528 - DNA, 15 bp, Homo sapiens
aataaataactgaga

SEQ ID NO: 553529 - DNA, 15 bp, Homo sapiens
ataaataactgagaa

SEQ ID NO: 553530 - DNA, 15 bp, Homo sapiens
taaataactgagaac

SEQ ID NO: 553531 - DNA, 15 bp, Homo sapiens
aaataactgagaaca

SEQ ID NO: 553532 - DNA, 15 bp, Homo sapiens
aataactgagaacac

SEQ ID NO: 553533 - DNA, 15 bp, Homo sapiens
ataactgagaacaca

SEQ ID NO: 553534 - DNA, 15 bp, Homo sapiens
taactgagaacacat

SEQ ID NO: 553535 - DNA, 15 bp, Homo sapiens
aactgagaacacatg

SEQ ID NO: 553536 - DNA, 15 bp, Homo sapiens
actgagaacacatgg

SEQ ID NO: 553537 - DNA, 15 bp, Homo sapiens
ctgagaacacatggc

SEQ ID NO: 553538 - DNA, 15 bp, Homo sapiens
tgagaacacatggct

SEQ ID NO: 553539 - DNA, 15 bp, Homo sapiens
gagaacacatggctg

SEQ ID NO: 553540 - DNA, 15 bp, Homo sapiens
agaacacatggctga

SEQ ID NO: 553541 - DNA, 15 bp, Homo sapiens
gaacacatggctgag

SEQ ID NO: 553542 - DNA, 15 bp, Homo sapiens
aacacatggctgagc

SEQ ID NO: 553543 - DNA, 15 bp, Homo sapiens
acacatggctgagca

SEQ ID NO: 553544 - DNA, 15 bp, Homo sapiens
cacatggctgagcag

SEQ ID NO: 553545 - DNA, 15 bp, Homo sapiens
acatggctgagcaga

SEQ ID NO: 553546 - DNA, 15 bp, Homo sapiens
catggctgagcagac

SEQ ID NO: 553547 - DNA, 15 bp, Homo sapiens
atggctgagcagact

SEQ ID NO: 553548 - DNA, 15 bp, Homo sapiens
tggctgagcagactc

SEQ ID NO: 553549 - DNA, 15 bp, Homo sapiens
ggctgagcagactca

SEQ ID NO: 553550 - DNA, 15 bp, Homo sapiens
gctgagcagactcaa

SEQ ID NO: 553551 - DNA, 15 bp, Homo sapiens
ctgagcagactcaaa

SEQ ID NO: 553552 - DNA, 15 bp, Homo sapiens
tgagcagactcaaaa

SEQ ID NO: 553553 - DNA, 15 bp, Homo sapiens
gagcagactcaaaag

SEQ ID NO: 553554 - DNA, 15 bp, Homo sapiens
agcagactcaaaaga

SEQ ID NO: 553555 - DNA, 15 bp, Homo sapiens
gcagactcaaaagag

SEQ ID NO: 553556 - DNA, 15 bp, Homo sapiens
cagactcaaaagaga

SEQ ID NO: 553557 - DNA, 15 bp, Homo sapiens
agactcaaaagagaa

SEQ ID NO: 553558 - DNA, 15 bp, Homo sapiens
gactcaaaagagaag

SEQ ID NO: 553559 - DNA, 15 bp, Homo sapiens
actcaaaagagaagg

SEQ ID NO: 553560 - DNA, 15 bp, Homo sapiens
ctcaaaagagaaggt

SEQ ID NO: 553561 - DNA, 15 bp, Homo sapiens
tcaaaagagaaggtg

SEQ ID NO: 553562 - DNA, 15 bp, Homo sapiens
caaaagagaaggtgc

SEQ ID NO: 553563 - DNA, 15 bp, Homo sapiens
aaaagagaaggtgct

SEQ ID NO: 553564 - DNA, 15 bp, Homo sapiens
aaagagaaggtgctt

SEQ ID NO: 553565 - DNA, 15 bp, Homo sapiens
aagagaaggtgcttg

SEQ ID NO: 553566 - DNA, 15 bp, Homo sapiens
agagaaggtgcttgt

SEQ ID NO: 553567 - DNA, 15 bp, Homo sapiens
gagaaggtgcttgtt

SEQ ID NO: 553568 - DNA, 15 bp, Homo sapiens
agaaggtgcttgttt

SEQ ID NO: 553569 - DNA, 15 bp, Homo sapiens
gaaggtgcttgttta

SEQ ID NO: 553570 - DNA, 15 bp, Homo sapiens
aaggtgcttgtttaa

SEQ ID NO: 553571 - DNA, 15 bp, Homo sapiens
aggtgcttgtttaaa

SEQ ID NO: 553572 - DNA, 15 bp, Homo sapiens
ggtgcttgtttaaag

SEQ ID NO: 553573 - DNA, 15 bp, Homo sapiens
gtgcttgtttaaagt

SEQ ID NO: 553574 - DNA, 15 bp, Homo sapiens
tgcttgtttaaagtt

SEQ ID NO: 553575 - DNA, 15 bp, Homo sapiens
gcttgtttaaagtta

SEQ ID NO: 553576 - DNA, 15 bp, Homo sapiens
cttgtttaaagttag

SEQ ID NO: 553577 - DNA, 15 bp, Homo sapiens
ttgtttaaagttagg

SEQ ID NO: 553578 - DNA, 15 bp, Homo sapiens
tgtttaaagttagga

SEQ ID NO: 553579 - DNA, 15 bp, Homo sapiens
gtttaaagttaggac

SEQ ID NO: 553580 - DNA, 15 bp, Homo sapiens
tttaaagttaggacg

SEQ ID NO: 553581 - DNA, 15 bp, Homo sapiens
ttaaagttaggacgc

SEQ ID NO: 553582 - DNA, 15 bp, Homo sapiens
taaagttaggacgca

SEQ ID NO: 553583 - DNA, 15 bp, Homo sapiens
aaagttaggacgcag

SEQ ID NO: 553584 - DNA, 15 bp, Homo sapiens
aagttaggacgcaga

SEQ ID NO: 553585 - DNA, 15 bp, Homo sapiens
agttaggacgcagat

SEQ ID NO: 553586 - DNA, 15 bp, Homo sapiens
gttaggacgcagatc

SEQ ID NO: 553587 - DNA, 15 bp, Homo sapiens
ttaggacgcagatcc

SEQ ID NO: 553588 - DNA, 15 bp, Homo sapiens
taggacgcagatcca

SEQ ID NO: 553589 - DNA, 15 bp, Homo sapiens
aggacgcagatccag

SEQ ID NO: 553590 - DNA, 15 bp, Homo sapiens
ggacgcagatccagg

SEQ ID NO: 553591 - DNA, 15 bp, Homo sapiens
gacgcagatccaggt

SEQ ID NO: 553592 - DNA, 15 bp, Homo sapiens
acgcagatccaggtc

SEQ ID NO: 553593 - DNA, 15 bp, Homo sapiens
cgcagatccaggtct

SEQ ID NO: 553594 - DNA, 15 bp, Homo sapiens
gcagatccaggtctg

SEQ ID NO: 553595 - DNA, 15 bp, Homo sapiens
cagatccaggtctgc

SEQ ID NO: 553596 - DNA, 15 bp, Homo sapiens
agatccaggtctgct

SEQ ID NO: 553597 - DNA, 15 bp, Homo sapiens
gatccaggtctgctg

SEQ ID NO: 553598 - DNA, 15 bp, Homo sapiens
atccaggtctgctga

SEQ ID NO: 553599 - DNA, 15 bp, Homo sapiens
tccaggtctgctgac

SEQ ID NO: 553600 - DNA, 15 bp, Homo sapiens
ccaggtctgctgact

SEQ ID NO: 553601 - DNA, 15 bp, Homo sapiens
caggtctgctgactc

SEQ ID NO: 553602 - DNA, 15 bp, Homo sapiens
aggtctgctgactca

SEQ ID NO: 553603 - DNA, 15 bp, Homo sapiens
ggtctgctgactcag

SEQ ID NO: 553604 - DNA, 15 bp, Homo sapiens
gtctgctgactcagc

SEQ ID NO: 553605 - DNA, 15 bp, Homo sapiens
tctgctgactcagcc

SEQ ID NO: 553606 - DNA, 15 bp, Homo sapiens
ctgctgactcagccc

SEQ ID NO: 553607 - DNA, 15 bp, Homo sapiens
tgctgactcagcccc

SEQ ID NO: 553608 - DNA, 15 bp, Homo sapiens
gctgactcagcccct

SEQ ID NO: 553609 - DNA, 15 bp, Homo sapiens
ctgactcagcccctt

SEQ ID NO: 553610 - DNA, 15 bp, Homo sapiens
tgactcagccccttc

SEQ ID NO: 553611 - DNA, 15 bp, Homo sapiens
gactcagccccttca

SEQ ID NO: 553612 - DNA, 15 bp, Homo sapiens
actcagccccttcaa

SEQ ID NO: 553613 - DNA, 15 bp, Homo sapiens
ctcagccccttcaat

SEQ ID NO: 553614 - DNA, 15 bp, Homo sapiens
tcagccccttcaatg

SEQ ID NO: 553615 - DNA, 15 bp, Homo sapiens
cagccccttcaatgc

SEQ ID NO: 553616 - DNA, 15 bp, Homo sapiens
agccccttcaatgct

SEQ ID NO: 553617 - DNA, 15 bp, Homo sapiens
gccccttcaatgctg

SEQ ID NO: 553618 - DNA, 15 bp, Homo sapiens
ccccttcaatgctga

SEQ ID NO: 553619 - DNA, 15 bp, Homo sapiens
cccttcaatgctgag

SEQ ID NO: 553620 - DNA, 15 bp, Homo sapiens
ccttcaatgctgagc

SEQ ID NO: 553621 - DNA, 15 bp, Homo sapiens
cttcaatgctgagcc

SEQ ID NO: 553622 - DNA, 15 bp, Homo sapiens
ttcaatgctgagcct

SEQ ID NO: 553623 - DNA, 15 bp, Homo sapiens
tcaatgctgagcctg

SEQ ID NO: 553624 - DNA, 15 bp, Homo sapiens
caatgctgagcctga

SEQ ID NO: 553625 - DNA, 15 bp, Homo sapiens
aatgctgagcctgag

SEQ ID NO: 553626 - DNA, 15 bp, Homo sapiens
atgctgagcctgagt

SEQ ID NO: 553627 - DNA, 15 bp, Homo sapiens
tgctgagcctgagtt

SEQ ID NO: 553628 - DNA, 15 bp, Homo sapiens
gctgagcctgagttg

SEQ ID NO: 553629 - DNA, 15 bp, Homo sapiens
ctgagcctgagttga

SEQ ID NO: 553630 - DNA, 15 bp, Homo sapiens
tgagcctgagttgat

SEQ ID NO: 553631 - DNA, 15 bp, Homo sapiens
gagcctgagttgatg

SEQ ID NO: 553632 - DNA, 15 bp, Homo sapiens
agcctgagttgatgc

SEQ ID NO: 553633 - DNA, 15 bp, Homo sapiens
gcctgagttgatgca

SEQ ID NO: 553634 - DNA, 15 bp, Homo sapiens
cctgagttgatgcat

SEQ ID NO: 553635 - DNA, 15 bp, Homo sapiens
ctgagttgatgcatg

SEQ ID NO: 553636 - DNA, 15 bp, Homo sapiens
tgagttgatgcatgg

SEQ ID NO: 553637 - DNA, 15 bp, Homo sapiens
gagttgatgcatggg

SEQ ID NO: 553638 - DNA, 15 bp, Homo sapiens
agttgatgcatgggc

SEQ ID NO: 553639 - DNA, 15 bp, Homo sapiens
gttgatgcatgggct

SEQ ID NO: 553640 - DNA, 15 bp, Homo sapiens
ttgatgcatgggctt

SEQ ID NO: 553641 - DNA, 15 bp, Homo sapiens
tgatgcatgggcttc

SEQ ID NO: 553642 - DNA, 15 bp, Homo sapiens
gatgcatgggcttct

SEQ ID NO: 553643 - DNA, 15 bp, Homo sapiens
atgcatgggcttctg

SEQ ID NO: 553644 - DNA, 15 bp, Homo sapiens
tgcatgggcttctga

SEQ ID NO: 553645 - DNA, 15 bp, Homo sapiens
gcatgggcttctgag

SEQ ID NO: 553646 - DNA, 15 bp, Homo sapiens
catgggcttctgagt

SEQ ID NO: 553647 - DNA, 15 bp, Homo sapiens
atgggcttctgagtt

SEQ ID NO: 553648 - DNA, 15 bp, Homo sapiens
tgggcttctgagttc

SEQ ID NO: 553649 - DNA, 15 bp, Homo sapiens
gggcttctgagttcc

SEQ ID NO: 553650 - DNA, 15 bp, Homo sapiens
ggcttctgagttcca

SEQ ID NO: 553651 - DNA, 15 bp, Homo sapiens
gcttctgagttccat

SEQ ID NO: 553652 - DNA, 15 bp, Homo sapiens
cttctgagttccatc

SEQ ID NO: 553653 - DNA, 15 bp, Homo sapiens
ttctgagttccatct

SEQ ID NO: 553654 - DNA, 15 bp, Homo sapiens
tctgagttccatctt

SEQ ID NO: 553655 - DNA, 15 bp, Homo sapiens
ctgagttccatcttc

SEQ ID NO: 553656 - DNA, 15 bp, Homo sapiens
tgagttccatcttca

SEQ ID NO: 553657 - DNA, 15 bp, Homo sapiens
gagttccatcttcat

SEQ ID NO: 553658 - DNA, 15 bp, Homo sapiens
agttccatcttcatg

SEQ ID NO: 553659 - DNA, 15 bp, Homo sapiens
gttccatcttcatgc

SEQ ID NO: 553660 - DNA, 15 bp, Homo sapiens
ttccatcttcatgct

SEQ ID NO: 553661 - DNA, 15 bp, Homo sapiens
tccatcttcatgctc

SEQ ID NO: 553662 - DNA, 15 bp, Homo sapiens
ccatcttcatgctca

SEQ ID NO: 553663 - DNA, 15 bp, Homo sapiens
catcttcatgctcaa

SEQ ID NO: 553664 - DNA, 15 bp, Homo sapiens
atcttcatgctcaat

SEQ ID NO: 553665 - DNA, 15 bp, Homo sapiens
tcttcatgctcaatg

SEQ ID NO: 553666 - DNA, 15 bp, Homo sapiens
cttcatgctcaatgg

SEQ ID NO: 553667 - DNA, 15 bp, Homo sapiens
ttcatgctcaatgga

SEQ ID NO: 553668 - DNA, 15 bp, Homo sapiens
tcatgctcaatggag

SEQ ID NO: 553669 - DNA, 15 bp, Homo sapiens
catgctcaatggaga

SEQ ID NO: 553670 - DNA, 15 bp, Homo sapiens
atgctcaatggagac

SEQ ID NO: 553671 - DNA, 15 bp, Homo sapiens
tgctcaatggagacc

SEQ ID NO: 553672 - DNA, 15 bp, Homo sapiens
gctcaatggagaccc

SEQ ID NO: 553673 - DNA, 15 bp, Homo sapiens
ctcaatggagaccca

SEQ ID NO: 553674 - DNA, 15 bp, Homo sapiens
tcaatggagacccat

SEQ ID NO: 553675 - DNA, 15 bp, Homo sapiens
caatggagacccatg

SEQ ID NO: 553676 - DNA, 15 bp, Homo sapiens
aatggagacccatgg

SEQ ID NO: 553677 - DNA, 15 bp, Homo sapiens
atggagacccatggg

SEQ ID NO: 553678 - DNA, 15 bp, Homo sapiens
tggagacccatgggt

SEQ ID NO: 553679 - DNA, 15 bp, Homo sapiens
ggagacccatgggta

SEQ ID NO: 553680 - DNA, 15 bp, Homo sapiens
gagacccatgggtat

SEQ ID NO: 553681 - DNA, 15 bp, Homo sapiens
agacccatgggtatt

SEQ ID NO: 553682 - DNA, 15 bp, Homo sapiens
gacccatgggtattt

SEQ ID NO: 553683 - DNA, 15 bp, Homo sapiens
acccatgggtatttg

SEQ ID NO: 553684 - DNA, 15 bp, Homo sapiens
cccatgggtatttgt

SEQ ID NO: 553685 - DNA, 15 bp, Homo sapiens
ccatgggtatttgtg

SEQ ID NO: 553686 - DNA, 15 bp, Homo sapiens
catgggtatttgtgt

SEQ ID NO: 553687 - DNA, 15 bp, Homo sapiens
atgggtatttgtgtc

SEQ ID NO: 553688 - DNA, 15 bp, Homo sapiens
tgggtatttgtgtct

SEQ ID NO: 553689 - DNA, 15 bp, Homo sapiens
gggtatttgtgtctc

SEQ ID NO: 553690 - DNA, 15 bp, Homo sapiens
ggtatttgtgtctct

SEQ ID NO: 553691 - DNA, 15 bp, Homo sapiens
gtatttgtgtctctg

SEQ ID NO: 553692 - DNA, 15 bp, Homo sapiens
tatttgtgtctctgg

SEQ ID NO: 553693 - DNA, 15 bp, Homo sapiens
atttgtgtctctggt

SEQ ID NO: 553694 - DNA, 15 bp, Homo sapiens
tttgtgtctctggtg

SEQ ID NO: 553695 - DNA, 15 bp, Homo sapiens
ttgtgtctctggtgg

SEQ ID NO: 553696 - DNA, 15 bp, Homo sapiens
tgtgtctctggtggg

SEQ ID NO: 553697 - DNA, 15 bp, Homo sapiens
gtgtctctggtggga

SEQ ID NO: 553698 - DNA, 15 bp, Homo sapiens
tgtctctggtgggaa

SEQ ID NO: 553699 - DNA, 15 bp, Homo sapiens
gtctctggtgggaag

SEQ ID NO: 553700 - DNA, 15 bp, Homo sapiens
tctctggtgggaagg

SEQ ID NO: 553701 - DNA, 15 bp, Homo sapiens
ctctggtgggaagga

SEQ ID NO: 553702 - DNA, 15 bp, Homo sapiens
tctggtgggaaggaa

SEQ ID NO: 553703 - DNA, 15 bp, Homo sapiens
ctggtgggaaggaag

SEQ ID NO: 553704 - DNA, 15 bp, Homo sapiens
tggtgggaaggaagt

SEQ ID NO: 553705 - DNA, 15 bp, Homo sapiens
ggtgggaaggaagta

SEQ ID NO: 553706 - DNA, 15 bp, Homo sapiens
gtgggaaggaagtat

SEQ ID NO: 553707 - DNA, 15 bp, Homo sapiens
tgggaaggaagtatg

SEQ ID NO: 553708 - DNA, 15 bp, Homo sapiens
gggaaggaagtatgc

SEQ ID NO: 553709 - DNA, 15 bp, Homo sapiens
ggaaggaagtatgct

SEQ ID NO: 553710 - DNA, 15 bp, Homo sapiens
gaaggaagtatgctg

SEQ ID NO: 553711 - DNA, 15 bp, Homo sapiens
aaggaagtatgctgc

SEQ ID NO: 553712 - DNA, 15 bp, Homo sapiens
aggaagtatgctgct

SEQ ID NO: 553713 - DNA, 15 bp, Homo sapiens
ggaagtatgctgctc

SEQ ID NO: 553714 - DNA, 15 bp, Homo sapiens
gaagtatgctgctca

SEQ ID NO: 553715 - DNA, 15 bp, Homo sapiens
aagtatgctgctcac

SEQ ID NO: 553716 - DNA, 15 bp, Homo sapiens
agtatgctgctcacc

SEQ ID NO: 553717 - DNA, 15 bp, Homo sapiens
gtatgctgctcacca

SEQ ID NO: 553718 - DNA, 15 bp, Homo sapiens
tatgctgctcaccac

SEQ ID NO: 553719 - DNA, 15 bp, Homo sapiens
atgctgctcaccact

SEQ ID NO: 553720 - DNA, 15 bp, Homo sapiens
tgctgctcaccactc

SEQ ID NO: 553721 - DNA, 15 bp, Homo sapiens
gctgctcaccactcc

SEQ ID NO: 553722 - DNA, 15 bp, Homo sapiens
ctgctcaccactccc

SEQ ID NO: 553723 - DNA, 15 bp, Homo sapiens
tgctcaccactccct

SEQ ID NO: 553724 - DNA, 15 bp, Homo sapiens
gctcaccactccctc

SEQ ID NO: 553725 - DNA, 15 bp, Homo sapiens
ctcaccactccctcc

SEQ ID NO: 553726 - DNA, 15 bp, Homo sapiens
tcaccactccctccc

SEQ ID NO: 553727 - DNA, 15 bp, Homo sapiens
caccactccctcccc

SEQ ID NO: 553728 - DNA, 15 bp, Homo sapiens
accactccctcccct

SEQ ID NO: 553729 - DNA, 15 bp, Homo sapiens
ccactccctcccctg

SEQ ID NO: 553730 - DNA, 15 bp, Homo sapiens
cactccctcccctgc

SEQ ID NO: 553731 - DNA, 15 bp, Homo sapiens
actccctcccctgct

SEQ ID NO: 553732 - DNA, 15 bp, Homo sapiens
ctccctcccctgctc

SEQ ID NO: 553733 - DNA, 15 bp, Homo sapiens
tccctcccctgctct

SEQ ID NO: 553734 - DNA, 15 bp, Homo sapiens
ccctcccctgctctc

SEQ ID NO: 553735 - DNA, 15 bp, Homo sapiens
cctcccctgctctca

SEQ ID NO: 553736 - DNA, 15 bp, Homo sapiens
ctcccctgctctcag

SEQ ID NO: 553737 - DNA, 15 bp, Homo sapiens
tcccctgctctcaga

SEQ ID NO: 553738 - DNA, 15 bp, Homo sapiens
cccctgctctcagag

SEQ ID NO: 553739 - DNA, 15 bp, Homo sapiens
ccctgctctcagaga

SEQ ID NO: 553740 - DNA, 15 bp, Homo sapiens
cctgctctcagagaa

SEQ ID NO: 553741 - DNA, 15 bp, Homo sapiens
ctgctctcagagaat

SEQ ID NO: 553742 - DNA, 15 bp, Homo sapiens
tgctctcagagaatc

SEQ ID NO: 553743 - DNA, 15 bp, Homo sapiens
gctctcagagaatcc

SEQ ID NO: 553744 - DNA, 15 bp, Homo sapiens
ctctcagagaatcct

SEQ ID NO: 553745 - DNA, 15 bp, Homo sapiens
tctcagagaatcctc

SEQ ID NO: 553746 - DNA, 15 bp, Homo sapiens
ctcagagaatcctca

SEQ ID NO: 553747 - DNA, 15 bp, Homo sapiens
tcagagaatcctcaa

SEQ ID NO: 553748 - DNA, 15 bp, Homo sapiens
cagagaatcctcaag

SEQ ID NO: 553749 - DNA, 15 bp, Homo sapiens
agagaatcctcaagc

SEQ ID NO: 553750 - DNA, 15 bp, Homo sapiens
gagaatcctcaagca

SEQ ID NO: 553751 - DNA, 15 bp, Homo sapiens
agaatcctcaagcac

SEQ ID NO: 553752 - DNA, 15 bp, Homo sapiens
gaatcctcaagcact

SEQ ID NO: 553753 - DNA, 15 bp, Homo sapiens
aatcctcaagcactt

SEQ ID NO: 553754 - DNA, 15 bp, Homo sapiens
atcctcaagcacttc

SEQ ID NO: 553755 - DNA, 15 bp, Homo sapiens
tcctcaagcacttca

SEQ ID NO: 553756 - DNA, 15 bp, Homo sapiens
cctcaagcacttcag

SEQ ID NO: 553757 - DNA, 15 bp, Homo sapiens
ctcaagcacttcagg

SEQ ID NO: 553758 - DNA, 15 bp, Homo sapiens
tcaagcacttcagga

SEQ ID NO: 553759 - DNA, 15 bp, Homo sapiens
caagcacttcaggat

SEQ ID NO: 553760 - DNA, 15 bp, Homo sapiens
aagcacttcaggata

SEQ ID NO: 553761 - DNA, 15 bp, Homo sapiens
agcacttcaggatac

SEQ ID NO: 553762 - DNA, 15 bp, Homo sapiens
gcacttcaggatact

SEQ ID NO: 553763 - DNA, 15 bp, Homo sapiens
cacttcaggatactg

SEQ ID NO: 553764 - DNA, 15 bp, Homo sapiens
acttcaggatactga

SEQ ID NO: 553765 - DNA, 15 bp, Homo sapiens
cttcaggatactgat

SEQ ID NO: 553766 - DNA, 15 bp, Homo sapiens
ttcaggatactgatc

SEQ ID NO: 553767 - DNA, 15 bp, Homo sapiens
tcaggatactgatcc

SEQ ID NO: 553768 - DNA, 15 bp, Homo sapiens
caggatactgatcct

SEQ ID NO: 553769 - DNA, 15 bp, Homo sapiens
aggatactgatcctg

SEQ ID NO: 553770 - DNA, 15 bp, Homo sapiens
ggatactgatcctgt

SEQ ID NO: 553771 - DNA, 15 bp, Homo sapiens
gatactgatcctgtg

SEQ ID NO: 553772 - DNA, 15 bp, Homo sapiens
atactgatcctgtgc

SEQ ID NO: 553773 - DNA, 15 bp, Homo sapiens
tactgatcctgtgca

SEQ ID NO: 553774 - DNA, 15 bp, Homo sapiens
actgatcctgtgcaa

SEQ ID NO: 553775 - DNA, 15 bp, Homo sapiens
ctgatcctgtgcaaa

SEQ ID NO: 553776 - DNA, 15 bp, Homo sapiens
tgatcctgtgcaaag

SEQ ID NO: 553777 - DNA, 15 bp, Homo sapiens
gatcctgtgcaaaga

SEQ ID NO: 553778 - DNA, 15 bp, Homo sapiens
atcctgtgcaaagag

SEQ ID NO: 553779 - DNA, 15 bp, Homo sapiens
tcctgtgcaaagagg

SEQ ID NO: 553780 - DNA, 15 bp, Homo sapiens
cctgtgcaaagaggg

SEQ ID NO: 553781 - DNA, 15 bp, Homo sapiens
ctgtgcaaagagggt

SEQ ID NO: 553782 - DNA, 15 bp, Homo sapiens
tgtgcaaagagggtc

SEQ ID NO: 553783 - DNA, 15 bp, Homo sapiens
gtgcaaagagggtcc

SEQ ID NO: 553784 - DNA, 15 bp, Homo sapiens
tgcaaagagggtccc

SEQ ID NO: 553785 - DNA, 15 bp, Homo sapiens
gcaaagagggtcccc

SEQ ID NO: 553786 - DNA, 15 bp, Homo sapiens
caaagagggtccccc

SEQ ID NO: 553787 - DNA, 15 bp, Homo sapiens
aaagagggtccccca

SEQ ID NO: 553788 - DNA, 15 bp, Homo sapiens
aagagggtcccccaa

SEQ ID NO: 553789 - DNA, 15 bp, Homo sapiens
agagggtcccccaag

SEQ ID NO: 553790 - DNA, 15 bp, Homo sapiens
gagggtcccccaagg

SEQ ID NO: 553791 - DNA, 15 bp, Homo sapiens
agggtcccccaagga

SEQ ID NO: 553792 - DNA, 15 bp, Homo sapiens
gggtcccccaaggaa

SEQ ID NO: 553793 - DNA, 15 bp, Homo sapiens
ggtcccccaaggaaa

SEQ ID NO: 553794 - DNA, 15 bp, Homo sapiens
gtcccccaaggaaat

SEQ ID NO: 553795 - DNA, 15 bp, Homo sapiens
tcccccaaggaaatt

SEQ ID NO: 553796 - DNA, 15 bp, Homo sapiens
cccccaaggaaattg

SEQ ID NO: 553797 - DNA, 15 bp, Homo sapiens
ccccaaggaaattga

SEQ ID NO: 553798 - DNA, 15 bp, Homo sapiens
cccaaggaaattgat

SEQ ID NO: 553799 - DNA, 15 bp, Homo sapiens
ccaaggaaattgatt

SEQ ID NO: 553800 - DNA, 15 bp, Homo sapiens
caaggaaattgattt

SEQ ID NO: 553801 - DNA, 15 bp, Homo sapiens
aaggaaattgatttt

SEQ ID NO: 553802 - DNA, 15 bp, Homo sapiens
aggaaattgattttt

SEQ ID NO: 553803 - DNA, 15 bp, Homo sapiens
ggaaattgatttttc

SEQ ID NO: 553804 - DNA, 15 bp, Homo sapiens
gaaattgatttttca

SEQ ID NO: 553805 - DNA, 15 bp, Homo sapiens
aaattgatttttcag

SEQ ID NO: 553806 - DNA, 15 bp, Homo sapiens
aattgatttttcaga

SEQ ID NO: 553807 - DNA, 15 bp, Homo sapiens
attgatttttcagaa

SEQ ID NO: 553808 - DNA, 15 bp, Homo sapiens
ttgatttttcagaac

SEQ ID NO: 553809 - DNA, 15 bp, Homo sapiens
tgatttttcagaacc

SEQ ID NO: 553810 - DNA, 15 bp, Homo sapiens
gatttttcagaaccc

SEQ ID NO: 553811 - DNA, 15 bp, Homo sapiens
atttttcagaaccca

SEQ ID NO: 553812 - DNA, 15 bp, Homo sapiens
tttttcagaacccac

SEQ ID NO: 553813 - DNA, 15 bp, Homo sapiens
ttttcagaacccact

SEQ ID NO: 553814 - DNA, 15 bp, Homo sapiens
tttcagaacccactt

SEQ ID NO: 553815 - DNA, 15 bp, Homo sapiens
ttcagaacccacttg

SEQ ID NO: 553816 - DNA, 15 bp, Homo sapiens
tcagaacccacttgc

SEQ ID NO: 553817 - DNA, 15 bp, Homo sapiens
cagaacccacttgcc

SEQ ID NO: 553818 - DNA, 15 bp, Homo sapiens
agaacccacttgcca

SEQ ID NO: 553819 - DNA, 15 bp, Homo sapiens
gaacccacttgccag

SEQ ID NO: 553820 - DNA, 15 bp, Homo sapiens
aacccacttgccagc

SEQ ID NO: 553821 - DNA, 15 bp, Homo sapiens
acccacttgccagct

SEQ ID NO: 553822 - DNA, 15 bp, Homo sapiens
cccacttgccagctc

SEQ ID NO: 553823 - DNA, 15 bp, Homo sapiens
ccacttgccagctca

SEQ ID NO: 553824 - DNA, 15 bp, Homo sapiens
cacttgccagctcat

SEQ ID NO: 553825 - DNA, 15 bp, Homo sapiens
acttgccagctcata

SEQ ID NO: 553826 - DNA, 15 bp, Homo sapiens
cttgccagctcatac

SEQ ID NO: 553827 - DNA, 15 bp, Homo sapiens
ttgccagctcatacc

SEQ ID NO: 553828 - DNA, 15 bp, Homo sapiens
tgccagctcatacct

SEQ ID NO: 553829 - DNA, 15 bp, Homo sapiens
gccagctcatacctg

SEQ ID NO: 553830 - DNA, 15 bp, Homo sapiens
ccagctcatacctgg

SEQ ID NO: 553831 - DNA, 15 bp, Homo sapiens
cagctcatacctggc

SEQ ID NO: 553832 - DNA, 15 bp, Homo sapiens
agctcatacctggct

SEQ ID NO: 553833 - DNA, 15 bp, Homo sapiens
gctcatacctggctc

SEQ ID NO: 553834 - DNA, 15 bp, Homo sapiens
ctcatacctggctcc

SEQ ID NO: 553835 - DNA, 15 bp, Homo sapiens
tcatacctggctcca

SEQ ID NO: 553836 - DNA, 15 bp, Homo sapiens
catacctggctccag

SEQ ID NO: 553837 - DNA, 15 bp, Homo sapiens
atacctggctccagt

SEQ ID NO: 553838 - DNA, 15 bp, Homo sapiens
tacctggctccagtc

SEQ ID NO: 553839 - DNA, 15 bp, Homo sapiens
acctggctccagtca

SEQ ID NO: 553840 - DNA, 15 bp, Homo sapiens
cctggctccagtcac

SEQ ID NO: 553841 - DNA, 15 bp, Homo sapiens
ctggctccagtcaca

SEQ ID NO: 553842 - DNA, 15 bp, Homo sapiens
tggctccagtcacac

SEQ ID NO: 553843 - DNA, 15 bp, Homo sapiens
ggctccagtcacacc

SEQ ID NO: 553844 - DNA, 15 bp, Homo sapiens
gctccagtcacacca

SEQ ID NO: 553845 - DNA, 15 bp, Homo sapiens
ctccagtcacaccaa

SEQ ID NO: 553846 - DNA, 15 bp, Homo sapiens
tccagtcacaccaaa

SEQ ID NO: 553847 - DNA, 15 bp, Homo sapiens
ccagtcacaccaaaa

SEQ ID NO: 553848 - DNA, 15 bp, Homo sapiens
cagtcacaccaaaag

SEQ ID NO: 553849 - DNA, 15 bp, Homo sapiens
agtcacaccaaaagc

SEQ ID NO: 553850 - DNA, 15 bp, Homo sapiens
gtcacaccaaaagcc

SEQ ID NO: 553851 - DNA, 15 bp, Homo sapiens
tcacaccaaaagcca

SEQ ID NO: 553852 - DNA, 15 bp, Homo sapiens
cacaccaaaagccag

SEQ ID NO: 553853 - DNA, 15 bp, Homo sapiens
acaccaaaagccagc

SEQ ID NO: 553854 - DNA, 15 bp, Homo sapiens
caccaaaagccagct

SEQ ID NO: 553855 - DNA, 15 bp, Homo sapiens
accaaaagccagctg

SEQ ID NO: 553856 - DNA, 15 bp, Homo sapiens
ccaaaagccagctgg

SEQ ID NO: 553857 - DNA, 15 bp, Homo sapiens
caaaagccagctgga

SEQ ID NO: 553858 - DNA, 15 bp, Homo sapiens
aaaagccagctggag

SEQ ID NO: 553859 - DNA, 15 bp, Homo sapiens
aaagccagctggaga

SEQ ID NO: 553860 - DNA, 15 bp, Homo sapiens
aagccagctggagag

SEQ ID NO: 553861 - DNA, 15 bp, Homo sapiens
agccagctggagagg

SEQ ID NO: 553862 - DNA, 15 bp, Homo sapiens
gccagctggagaggg

SEQ ID NO: 553863 - DNA, 15 bp, Homo sapiens
ccagctggagagggc

SEQ ID NO: 553864 - DNA, 15 bp, Homo sapiens
cagctggagagggcc

SEQ ID NO: 553865 - DNA, 15 bp, Homo sapiens
agctggagagggcct

SEQ ID NO: 553866 - DNA, 15 bp, Homo sapiens
gctggagagggcctg

SEQ ID NO: 553867 - DNA, 15 bp, Homo sapiens
ctggagagggcctgt

SEQ ID NO: 553868 - DNA, 15 bp, Homo sapiens
tggagagggcctgtg

SEQ ID NO: 553869 - DNA, 15 bp, Homo sapiens
ggagagggcctgtgt

SEQ ID NO: 553870 - DNA, 15 bp, Homo sapiens
gagagggcctgtgtg

SEQ ID NO: 553871 - DNA, 15 bp, Homo sapiens
agagggcctgtgtga

SEQ ID NO: 553872 - DNA, 15 bp, Homo sapiens
gagggcctgtgtgaa

SEQ ID NO: 553873 - DNA, 15 bp, Homo sapiens
agggcctgtgtgaat

SEQ ID NO: 553874 - DNA, 15 bp, Homo sapiens
gggcctgtgtgaata

SEQ ID NO: 553875 - DNA, 15 bp, Homo sapiens
ggcctgtgtgaatat

SEQ ID NO: 553876 - DNA, 15 bp, Homo sapiens
gcctgtgtgaatatt

SEQ ID NO: 553877 - DNA, 15 bp, Homo sapiens
cctgtgtgaatattc

SEQ ID NO: 553878 - DNA, 15 bp, Homo sapiens
ctgtgtgaatattcc

SEQ ID NO: 553879 - DNA, 15 bp, Homo sapiens
tgtgtgaatattcca

SEQ ID NO: 553880 - DNA, 15 bp, Homo sapiens
gtgtgaatattccag

SEQ ID NO: 553881 - DNA, 15 bp, Homo sapiens
tgtgaatattccagt

SEQ ID NO: 553882 - DNA, 15 bp, Homo sapiens
gtgaatattccagtg

SEQ ID NO: 553883 - DNA, 15 bp, Homo sapiens
tgaatattccagtga

SEQ ID NO: 553884 - DNA, 15 bp, Homo sapiens
gaatattccagtgaa

SEQ ID NO: 553885 - DNA, 15 bp, Homo sapiens
aatattccagtgaac

SEQ ID NO: 553886 - DNA, 15 bp, Homo sapiens
atattccagtgaaca

SEQ ID NO: 553887 - DNA, 15 bp, Homo sapiens
tattccagtgaacag

SEQ ID NO: 553888 - DNA, 15 bp, Homo sapiens
attccagtgaacaga

SEQ ID NO: 553889 - DNA, 15 bp, Homo sapiens
ttccagtgaacagac

SEQ ID NO: 553890 - DNA, 15 bp, Homo sapiens
tccagtgaacagaca

SEQ ID NO: 553891 - DNA, 15 bp, Homo sapiens
ccagtgaacagacag

SEQ ID NO: 553892 - DNA, 15 bp, Homo sapiens
cagtgaacagacagg

SEQ ID NO: 553893 - DNA, 15 bp, Homo sapiens
agtgaacagacagga

SEQ ID NO: 553894 - DNA, 15 bp, Homo sapiens
gtgaacagacaggat

SEQ ID NO: 553895 - DNA, 15 bp, Homo sapiens
tgaacagacaggata

SEQ ID NO: 553896 - DNA, 15 bp, Homo sapiens
gaacagacaggatat

SEQ ID NO: 553897 - DNA, 15 bp, Homo sapiens
aacagacaggatatt

SEQ ID NO: 553898 - DNA, 15 bp, Homo sapiens
acagacaggatattt

SEQ ID NO: 553899 - DNA, 15 bp, Homo sapiens
cagacaggatattta

SEQ ID NO: 553900 - DNA, 15 bp, Homo sapiens
agacaggatatttac

SEQ ID NO: 553901 - DNA, 15 bp, Homo sapiens
gacaggatatttacc

SEQ ID NO: 553902 - DNA, 15 bp, Homo sapiens
acaggatatttacct

SEQ ID NO: 553903 - DNA, 15 bp, Homo sapiens
caggatatttacctg

SEQ ID NO: 553904 - DNA, 15 bp, Homo sapiens
aggatatttacctgg

SEQ ID NO: 553905 - DNA, 15 bp, Homo sapiens
ggatatttacctggc

SEQ ID NO: 553906 - DNA, 15 bp, Homo sapiens
gatatttacctggct

SEQ ID NO: 553907 - DNA, 15 bp, Homo sapiens
atatttacctggctt

SEQ ID NO: 553908 - DNA, 15 bp, Homo sapiens
tatttacctggcttt

SEQ ID NO: 553909 - DNA, 15 bp, Homo sapiens
atttacctggctttg

SEQ ID NO: 553910 - DNA, 15 bp, Homo sapiens
tttacctggctttgg

SEQ ID NO: 553911 - DNA, 15 bp, Homo sapiens
ttacctggctttggc

SEQ ID NO: 553912 - DNA, 15 bp, Homo sapiens
tacctggctttggct

SEQ ID NO: 553913 - DNA, 15 bp, Homo sapiens
acctggctttggcta

SEQ ID NO: 553914 - DNA, 15 bp, Homo sapiens
cctggctttggctac

SEQ ID NO: 553915 - DNA, 15 bp, Homo sapiens
ctggctttggctaca

SEQ ID NO: 553916 - DNA, 15 bp, Homo sapiens
tggctttggctacac

SEQ ID NO: 553917 - DNA, 15 bp, Homo sapiens
ggctttggctacaca

SEQ ID NO: 553918 - DNA, 15 bp, Homo sapiens
gctttggctacacag

SEQ ID NO: 553919 - DNA, 15 bp, Homo sapiens
ctttggctacacaga

SEQ ID NO: 553920 - DNA, 15 bp, Homo sapiens
tttggctacacagag

SEQ ID NO: 553921 - DNA, 15 bp, Homo sapiens
ttggctacacagagc

SEQ ID NO: 553922 - DNA, 15 bp, Homo sapiens
tggctacacagagca

SEQ ID NO: 553923 - DNA, 15 bp, Homo sapiens
ggctacacagagcag

SEQ ID NO: 553924 - DNA, 15 bp, Homo sapiens
gctacacagagcagc

SEQ ID NO: 553925 - DNA, 15 bp, Homo sapiens
ctacacagagcagca

SEQ ID NO: 553926 - DNA, 15 bp, Homo sapiens
tacacagagcagcaa

SEQ ID NO: 553927 - DNA, 15 bp, Homo sapiens
acacagagcagcaac

SEQ ID NO: 553928 - DNA, 15 bp, Homo sapiens
cacagagcagcaacc

SEQ ID NO: 553929 - DNA, 15 bp, Homo sapiens
acagagcagcaacct

SEQ ID NO: 553930 - DNA, 15 bp, Homo sapiens
cagagcagcaacctc

SEQ ID NO: 553931 - DNA, 15 bp, Homo sapiens
agagcagcaacctct

SEQ ID NO: 553932 - DNA, 15 bp, Homo sapiens
gagcagcaacctctg

SEQ ID NO: 553933 - DNA, 15 bp, Homo sapiens
agcagcaacctctgc

SEQ ID NO: 553934 - DNA, 15 bp, Homo sapiens
gcagcaacctctgct

SEQ ID NO: 553935 - DNA, 15 bp, Homo sapiens
cagcaacctctgctt

SEQ ID NO: 553936 - DNA, 15 bp, Homo sapiens
agcaacctctgcttt

SEQ ID NO: 553937 - DNA, 15 bp, Homo sapiens
gcaacctctgctttt

SEQ ID NO: 553938 - DNA, 15 bp, Homo sapiens
caacctctgcttttg

SEQ ID NO: 553939 - DNA, 15 bp, Homo sapiens
aacctctgcttttga

SEQ ID NO: 553940 - DNA, 15 bp, Homo sapiens
acctctgcttttgag

SEQ ID NO: 553941 - DNA, 15 bp, Homo sapiens
cctctgcttttgagt

SEQ ID NO: 553942 - DNA, 15 bp, Homo sapiens
ctctgcttttgagtt

SEQ ID NO: 553943 - DNA, 15 bp, Homo sapiens
tctgcttttgagttg

SEQ ID NO: 553944 - DNA, 15 bp, Homo sapiens
ctgcttttgagttgc

SEQ ID NO: 553945 - DNA, 15 bp, Homo sapiens
tgcttttgagttgct

SEQ ID NO: 553946 - DNA, 15 bp, Homo sapiens
gcttttgagttgctt

SEQ ID NO: 553947 - DNA, 15 bp, Homo sapiens
cttttgagttgcttg

SEQ ID NO: 553948 - DNA, 15 bp, Homo sapiens
ttttgagttgcttgt

SEQ ID NO: 553949 - DNA, 15 bp, Homo sapiens
tttgagttgcttgtc

SEQ ID NO: 553950 - DNA, 15 bp, Homo sapiens
ttgagttgcttgtct

SEQ ID NO: 553951 - DNA, 15 bp, Homo sapiens
tgagttgcttgtctt

SEQ ID NO: 553952 - DNA, 15 bp, Homo sapiens
gagttgcttgtcttg

SEQ ID NO: 553953 - DNA, 15 bp, Homo sapiens
agttgcttgtcttga

SEQ ID NO: 553954 - DNA, 15 bp, Homo sapiens
gttgcttgtcttgac

SEQ ID NO: 553955 - DNA, 15 bp, Homo sapiens
ttgcttgtcttgacc

SEQ ID NO: 553956 - DNA, 15 bp, Homo sapiens
tgcttgtcttgaccc

SEQ ID NO: 553957 - DNA, 15 bp, Homo sapiens
gcttgtcttgaccca

SEQ ID NO: 553958 - DNA, 15 bp, Homo sapiens
cttgtcttgacccat

SEQ ID NO: 553959 - DNA, 15 bp, Homo sapiens
ttgtcttgacccata

SEQ ID NO: 553960 - DNA, 15 bp, Homo sapiens
tgtcttgacccatac

SEQ ID NO: 553961 - DNA, 15 bp, Homo sapiens
gtcttgacccatacc

SEQ ID NO: 553962 - DNA, 15 bp, Homo sapiens
tcttgacccatacca

SEQ ID NO: 553963 - DNA, 15 bp, Homo sapiens
cttgacccataccat

SEQ ID NO: 553964 - DNA, 15 bp, Homo sapiens
ttgacccataccatc

SEQ ID NO: 553965 - DNA, 15 bp, Homo sapiens
tgacccataccatca

SEQ ID NO: 553966 - DNA, 15 bp, Homo sapiens
gacccataccatcag

SEQ ID NO: 553967 - DNA, 15 bp, Homo sapiens
acccataccatcagc

SEQ ID NO: 553968 - DNA, 15 bp, Homo sapiens
cccataccatcagcg

SEQ ID NO: 553969 - DNA, 15 bp, Homo sapiens
ccataccatcagcgg

SEQ ID NO: 553970 - DNA, 15 bp, Homo sapiens
cataccatcagcggg

SEQ ID NO: 553971 - DNA, 15 bp, Homo sapiens
ataccatcagcgggt

SEQ ID NO: 553972 - DNA, 15 bp, Homo sapiens
taccatcagcgggta

SEQ ID NO: 553973 - DNA, 15 bp, Homo sapiens
accatcagcgggtaa

SEQ ID NO: 553974 - DNA, 15 bp, Homo sapiens
ccatcagcgggtaac

SEQ ID NO: 553975 - DNA, 15 bp, Homo sapiens
catcagcgggtaaca

SEQ ID NO: 553976 - DNA, 15 bp, Homo sapiens
atcagcgggtaacaa

SEQ ID NO: 553977 - DNA, 15 bp, Homo sapiens
tcagcgggtaacaaa

SEQ ID NO: 553978 - DNA, 15 bp, Homo sapiens
cagcgggtaacaaag

SEQ ID NO: 553979 - DNA, 15 bp, Homo sapiens
agcgggtaacaaagt

SEQ ID NO: 553980 - DNA, 15 bp, Homo sapiens
gcgggtaacaaagta

SEQ ID NO: 553981 - DNA, 15 bp, Homo sapiens
cgggtaacaaagtag

SEQ ID NO: 553982 - DNA, 15 bp, Homo sapiens
gggtaacaaagtagg

SEQ ID NO: 553983 - DNA, 15 bp, Homo sapiens
ggtaacaaagtaggt

SEQ ID NO: 553984 - DNA, 15 bp, Homo sapiens
gtaacaaagtaggtt

SEQ ID NO: 553985 - DNA, 15 bp, Homo sapiens
taacaaagtaggttc

SEQ ID NO: 553986 - DNA, 15 bp, Homo sapiens
aacaaagtaggttca

SEQ ID NO: 553987 - DNA, 15 bp, Homo sapiens
acaaagtaggttcag

SEQ ID NO: 553988 - DNA, 15 bp, Homo sapiens
caaagtaggttcaga

SEQ ID NO: 553989 - DNA, 15 bp, Homo sapiens
aaagtaggttcagaa

SEQ ID NO: 553990 - DNA, 15 bp, Homo sapiens
aagtaggttcagaaa

SEQ ID NO: 553991 - DNA, 15 bp, Homo sapiens
agtaggttcagaaag

SEQ ID NO: 553992 - DNA, 15 bp, Homo sapiens
gtaggttcagaaaga

SEQ ID NO: 553993 - DNA, 15 bp, Homo sapiens
taggttcagaaagac

SEQ ID NO: 553994 - DNA, 15 bp, Homo sapiens
aggttcagaaagact

SEQ ID NO: 553995 - DNA, 15 bp, Homo sapiens
ggttcagaaagactg

SEQ ID NO: 553996 - DNA, 15 bp, Homo sapiens
gttcagaaagactga

SEQ ID NO: 553997 - DNA, 15 bp, Homo sapiens
ttcagaaagactgat

SEQ ID NO: 553998 - DNA, 15 bp, Homo sapiens
tcagaaagactgata

SEQ ID NO: 553999 - DNA, 15 bp, Homo sapiens
cagaaagactgatat

SEQ ID NO: 554000 - DNA, 15 bp, Homo sapiens
agaaagactgatatc

SEQ ID NO: 554001 - DNA, 15 bp, Homo sapiens
gaaagactgatatct

SEQ ID NO: 554002 - DNA, 15 bp, Homo sapiens
aaagactgatatctt

SEQ ID NO: 554003 - DNA, 15 bp, Homo sapiens
aagactgatatcttc

SEQ ID NO: 554004 - DNA, 15 bp, Homo sapiens
agactgatatcttct

SEQ ID NO: 554005 - DNA, 15 bp, Homo sapiens
gactgatatcttctc

SEQ ID NO: 554006 - DNA, 15 bp, Homo sapiens
actgatatcttctca

SEQ ID NO: 554007 - DNA, 15 bp, Homo sapiens
ctgatatcttctcac

SEQ ID NO: 554008 - DNA, 15 bp, Homo sapiens
tgatatcttctcacc

SEQ ID NO: 554009 - DNA, 15 bp, Homo sapiens
gatatcttctcaccc

SEQ ID NO: 554010 - DNA, 15 bp, Homo sapiens
atatcttctcaccca

SEQ ID NO: 554011 - DNA, 15 bp, Homo sapiens
tatcttctcacccac

SEQ ID NO: 554012 - DNA, 15 bp, Homo sapiens
atcttctcacccacc

SEQ ID NO: 554013 - DNA, 15 bp, Homo sapiens
tcttctcacccaccc

SEQ ID NO: 554014 - DNA, 15 bp, Homo sapiens
cttctcacccaccct

SEQ ID NO: 554015 - DNA, 15 bp, Homo sapiens
ttctcacccaccctg

SEQ ID NO: 554016 - DNA, 15 bp, Homo sapiens
tctcacccaccctgg

SEQ ID NO: 554017 - DNA, 15 bp, Homo sapiens
ctcacccaccctggg

SEQ ID NO: 554018 - DNA, 15 bp, Homo sapiens
tcacccaccctgggc

SEQ ID NO: 554019 - DNA, 15 bp, Homo sapiens
cacccaccctgggca

SEQ ID NO: 554020 - DNA, 15 bp, Homo sapiens
acccaccctgggcaa

SEQ ID NO: 554021 - DNA, 15 bp, Homo sapiens
cccaccctgggcaag

SEQ ID NO: 554022 - DNA, 15 bp, Homo sapiens
ccaccctgggcaagc

SEQ ID NO: 554023 - DNA, 15 bp, Homo sapiens
caccctgggcaagca

SEQ ID NO: 554024 - DNA, 15 bp, Homo sapiens
accctgggcaagcag

SEQ ID NO: 554025 - DNA, 15 bp, Homo sapiens
ccctgggcaagcaga

SEQ ID NO: 554026 - DNA, 15 bp, Homo sapiens
cctgggcaagcagag

SEQ ID NO: 554027 - DNA, 15 bp, Homo sapiens
ctgggcaagcagaga

SEQ ID NO: 554028 - DNA, 15 bp, Homo sapiens
tgggcaagcagagac

SEQ ID NO: 554029 - DNA, 15 bp, Homo sapiens
gggcaagcagagaca

SEQ ID NO: 554030 - DNA, 15 bp, Homo sapiens
ggcaagcagagacaa

SEQ ID NO: 554031 - DNA, 15 bp, Homo sapiens
gcaagcagagacaat

SEQ ID NO: 554032 - DNA, 15 bp, Homo sapiens
caagcagagacaatc

SEQ ID NO: 554033 - DNA, 15 bp, Homo sapiens
aagcagagacaatcc

SEQ ID NO: 554034 - DNA, 15 bp, Homo sapiens
agcagagacaatcct

SEQ ID NO: 554035 - DNA, 15 bp, Homo sapiens
gcagagacaatcctg

SEQ ID NO: 554036 - DNA, 15 bp, Homo sapiens
cagagacaatcctgt

SEQ ID NO: 554037 - DNA, 15 bp, Homo sapiens
agagacaatcctgtg

SEQ ID NO: 554038 - DNA, 15 bp, Homo sapiens
gagacaatcctgtgg

SEQ ID NO: 554039 - DNA, 15 bp, Homo sapiens
agacaatcctgtgga

SEQ ID NO: 554040 - DNA, 15 bp, Homo sapiens
gacaatcctgtggac

SEQ ID NO: 554041 - DNA, 15 bp, Homo sapiens
acaatcctgtggact

SEQ ID NO: 554042 - DNA, 15 bp, Homo sapiens
caatcctgtggactc

SEQ ID NO: 554043 - DNA, 15 bp, Homo sapiens
aatcctgtggactct

SEQ ID NO: 554044 - DNA, 15 bp, Homo sapiens
atcctgtggactctc

SEQ ID NO: 554045 - DNA, 15 bp, Homo sapiens
tcctgtggactctca

SEQ ID NO: 554046 - DNA, 15 bp, Homo sapiens
cctgtggactctcag

SEQ ID NO: 554047 - DNA, 15 bp, Homo sapiens
ctgtggactctcaga

SEQ ID NO: 554048 - DNA, 15 bp, Homo sapiens
tgtggactctcagag

SEQ ID NO: 554049 - DNA, 15 bp, Homo sapiens
gtggactctcagagc

SEQ ID NO: 554050 - DNA, 15 bp, Homo sapiens
tggactctcagagcc

SEQ ID NO: 554051 - DNA, 15 bp, Homo sapiens
ggactctcagagcca

SEQ ID NO: 554052 - DNA, 15 bp, Homo sapiens
gactctcagagccaa

SEQ ID NO: 554053 - DNA, 15 bp, Homo sapiens
actctcagagccaag

SEQ ID NO: 554054 - DNA, 15 bp, Homo sapiens
ctctcagagccaagc

SEQ ID NO: 554055 - DNA, 15 bp, Homo sapiens
tctcagagccaagca

SEQ ID NO: 554056 - DNA, 15 bp, Homo sapiens
ctcagagccaagcag

SEQ ID NO: 554057 - DNA, 15 bp, Homo sapiens
tcagagccaagcagc

SEQ ID NO: 554058 - DNA, 15 bp, Homo sapiens
cagagccaagcagct

SEQ ID NO: 554059 - DNA, 15 bp, Homo sapiens
agagccaagcagctt

SEQ ID NO: 554060 - DNA, 15 bp, Homo sapiens
gagccaagcagctta

SEQ ID NO: 554061 - DNA, 15 bp, Homo sapiens
agccaagcagcttag

SEQ ID NO: 554062 - DNA, 15 bp, Homo sapiens
gccaagcagcttagg

SEQ ID NO: 554063 - DNA, 15 bp, Homo sapiens
ccaagcagcttaggc

SEQ ID NO: 554064 - DNA, 15 bp, Homo sapiens
caagcagcttaggca

SEQ ID NO: 554065 - DNA, 15 bp, Homo sapiens
aagcagcttaggcac

SEQ ID NO: 554066 - DNA, 15 bp, Homo sapiens
agcagcttaggcaca

SEQ ID NO: 554067 - DNA, 15 bp, Homo sapiens
gcagcttaggcacag

SEQ ID NO: 554068 - DNA, 15 bp, Homo sapiens
cagcttaggcacagc

SEQ ID NO: 554069 - DNA, 15 bp, Homo sapiens
agcttaggcacagct

SEQ ID NO: 554070 - DNA, 15 bp, Homo sapiens
gcttaggcacagcta

SEQ ID NO: 554071 - DNA, 15 bp, Homo sapiens
cttaggcacagctat

SEQ ID NO: 554072 - DNA, 15 bp, Homo sapiens
ttaggcacagctatc

SEQ ID NO: 554073 - DNA, 15 bp, Homo sapiens
taggcacagctatcg

SEQ ID NO: 554074 - DNA, 15 bp, Homo sapiens
aggcacagctatcgc

SEQ ID NO: 554075 - DNA, 15 bp, Homo sapiens
ggcacagctatcgcc

SEQ ID NO: 554076 - DNA, 15 bp, Homo sapiens
gcacagctatcgcca

SEQ ID NO: 554077 - DNA, 15 bp, Homo sapiens
cacagctatcgccag

SEQ ID NO: 554078 - DNA, 15 bp, Homo sapiens
acagctatcgccagc

SEQ ID NO: 554079 - DNA, 15 bp, Homo sapiens
cagctatcgccagca

SEQ ID NO: 554080 - DNA, 15 bp, Homo sapiens
agctatcgccagcac

SEQ ID NO: 554081 - DNA, 15 bp, Homo sapiens
gctatcgccagcacc

SEQ ID NO: 554082 - DNA, 15 bp, Homo sapiens
ctatcgccagcaccc

SEQ ID NO: 554083 - DNA, 15 bp, Homo sapiens
tatcgccagcacccc

SEQ ID NO: 554084 - DNA, 15 bp, Homo sapiens
atcgccagcacccca

SEQ ID NO: 554085 - DNA, 15 bp, Homo sapiens
tcgccagcaccccac

SEQ ID NO: 554086 - DNA, 15 bp, Homo sapiens
cgccagcaccccaca

SEQ ID NO: 554087 - DNA, 15 bp, Homo sapiens
gccagcaccccacaa

SEQ ID NO: 554088 - DNA, 15 bp, Homo sapiens
ccagcaccccacaaa

SEQ ID NO: 554089 - DNA, 15 bp, Homo sapiens
cagcaccccacaaat

SEQ ID NO: 554090 - DNA, 15 bp, Homo sapiens
agcaccccacaaata

SEQ ID NO: 554091 - DNA, 15 bp, Homo sapiens
gcaccccacaaatat

SEQ ID NO: 554092 - DNA, 15 bp, Homo sapiens
caccccacaaatatt

SEQ ID NO: 554093 - DNA, 15 bp, Homo sapiens
accccacaaatattc

SEQ ID NO: 554094 - DNA, 15 bp, Homo sapiens
ccccacaaatattcc

SEQ ID NO: 554095 - DNA, 15 bp, Homo sapiens
cccacaaatattccc

SEQ ID NO: 554096 - DNA, 15 bp, Homo sapiens
ccacaaatattccct

SEQ ID NO: 554097 - DNA, 15 bp, Homo sapiens
cacaaatattcccta

SEQ ID NO: 554098 - DNA, 15 bp, Homo sapiens
acaaatattccctaa

SEQ ID NO: 554099 - DNA, 15 bp, Homo sapiens
caaatattccctaag

SEQ ID NO: 554100 - DNA, 15 bp, Homo sapiens
aaatattccctaagg

SEQ ID NO: 554101 - DNA, 15 bp, Homo sapiens
aatattccctaaggg

SEQ ID NO: 554102 - DNA, 15 bp, Homo sapiens
atattccctaagggc

SEQ ID NO: 554103 - DNA, 15 bp, Homo sapiens
tattccctaagggct

SEQ ID NO: 554104 - DNA, 15 bp, Homo sapiens
attccctaagggctc

SEQ ID NO: 554105 - DNA, 15 bp, Homo sapiens
ttccctaagggctca

SEQ ID NO: 554106 - DNA, 15 bp, Homo sapiens
tccctaagggctcac

SEQ ID NO: 554107 - DNA, 15 bp, Homo sapiens
ccctaagggctcaca

SEQ ID NO: 554108 - DNA, 15 bp, Homo sapiens
cctaagggctcacat

SEQ ID NO: 554109 - DNA, 15 bp, Homo sapiens
ctaagggctcacatg

SEQ ID NO: 554110 - DNA, 15 bp, Homo sapiens
taagggctcacatgt

SEQ ID NO: 554111 - DNA, 15 bp, Homo sapiens
aagggctcacatgta

SEQ ID NO: 554112 - DNA, 15 bp, Homo sapiens
agggctcacatgtaa

SEQ ID NO: 554113 - DNA, 15 bp, Homo sapiens
gggctcacatgtaag

SEQ ID NO: 554114 - DNA, 15 bp, Homo sapiens
ggctcacatgtaagc

SEQ ID NO: 554115 - DNA, 15 bp, Homo sapiens
gctcacatgtaagct

SEQ ID NO: 554116 - DNA, 15 bp, Homo sapiens
ctcacatgtaagctg

SEQ ID NO: 554117 - DNA, 15 bp, Homo sapiens
tcacatgtaagctgg

SEQ ID NO: 554118 - DNA, 15 bp, Homo sapiens
cacatgtaagctgga

SEQ ID NO: 554119 - DNA, 15 bp, Homo sapiens
acatgtaagctggac

SEQ ID NO: 554120 - DNA, 15 bp, Homo sapiens
catgtaagctggact

SEQ ID NO: 554121 - DNA, 15 bp, Homo sapiens
atgtaagctggacta

SEQ ID NO: 554122 - DNA, 15 bp, Homo sapiens
tgtaagctggactag

SEQ ID NO: 554123 - DNA, 15 bp, Homo sapiens
gtaagctggactagt

SEQ ID NO: 554124 - DNA, 15 bp, Homo sapiens
taagctggactagtg

SEQ ID NO: 554125 - DNA, 15 bp, Homo sapiens
aagctggactagtgg

SEQ ID NO: 554126 - DNA, 15 bp, Homo sapiens
agctggactagtggc

SEQ ID NO: 554127 - DNA, 15 bp, Homo sapiens
gctggactagtggct

SEQ ID NO: 554128 - DNA, 15 bp, Homo sapiens
ctggactagtggcta

SEQ ID NO: 554129 - DNA, 15 bp, Homo sapiens
tggactagtggctag

SEQ ID NO: 554130 - DNA, 15 bp, Homo sapiens
ggactagtggctagc

SEQ ID NO: 554131 - DNA, 15 bp, Homo sapiens
gactagtggctagca

SEQ ID NO: 554132 - DNA, 15 bp, Homo sapiens
actagtggctagcag

SEQ ID NO: 554133 - DNA, 15 bp, Homo sapiens
ctagtggctagcagg

SEQ ID NO: 554134 - DNA, 15 bp, Homo sapiens
tagtggctagcagga

SEQ ID NO: 554135 - DNA, 15 bp, Homo sapiens
agtggctagcaggaa

SEQ ID NO: 554136 - DNA, 15 bp, Homo sapiens
gtggctagcaggaag

SEQ ID NO: 554137 - DNA, 15 bp, Homo sapiens
tggctagcaggaagc

SEQ ID NO: 554138 - DNA, 15 bp, Homo sapiens
ggctagcaggaagca

SEQ ID NO: 554139 - DNA, 15 bp, Homo sapiens
gctagcaggaagcaa

SEQ ID NO: 554140 - DNA, 15 bp, Homo sapiens
ctagcaggaagcaag

SEQ ID NO: 554141 - DNA, 15 bp, Homo sapiens
tagcaggaagcaagg

SEQ ID NO: 554142 - DNA, 15 bp, Homo sapiens
agcaggaagcaagga

SEQ ID NO: 554143 - DNA, 15 bp, Homo sapiens
gcaggaagcaaggag

SEQ ID NO: 554144 - DNA, 15 bp, Homo sapiens
caggaagcaaggagt

SEQ ID NO: 554145 - DNA, 15 bp, Homo sapiens
aggaagcaaggagtt

SEQ ID NO: 554146 - DNA, 15 bp, Homo sapiens
ggaagcaaggagttt

SEQ ID NO: 554147 - DNA, 15 bp, Homo sapiens
gaagcaaggagtttt

SEQ ID NO: 554148 - DNA, 15 bp, Homo sapiens
aagcaaggagtttta

SEQ ID NO: 554149 - DNA, 15 bp, Homo sapiens
agcaaggagttttag

SEQ ID NO: 554150 - DNA, 15 bp, Homo sapiens
gcaaggagttttaga

SEQ ID NO: 554151 - DNA, 15 bp, Homo sapiens
caaggagttttagaa

SEQ ID NO: 554152 - DNA, 15 bp, Homo sapiens
aaggagttttagaaa

SEQ ID NO: 554153 - DNA, 15 bp, Homo sapiens
aggagttttagaaaa

SEQ ID NO: 554154 - DNA, 15 bp, Homo sapiens
ggagttttagaaaaa

SEQ ID NO: 554155 - DNA, 15 bp, Homo sapiens
gagttttagaaaaat

SEQ ID NO: 554156 - DNA, 15 bp, Homo sapiens
agttttagaaaaatg

SEQ ID NO: 554157 - DNA, 15 bp, Homo sapiens
gttttagaaaaatgt

SEQ ID NO: 554158 - DNA, 15 bp, Homo sapiens
ttttagaaaaatgtc

SEQ ID NO: 554159 - DNA, 15 bp, Homo sapiens
tttagaaaaatgtca

SEQ ID NO: 554160 - DNA, 15 bp, Homo sapiens
ttagaaaaatgtcat

SEQ ID NO: 554161 - DNA, 15 bp, Homo sapiens
tagaaaaatgtcatt

SEQ ID NO: 554162 - DNA, 15 bp, Homo sapiens
agaaaaatgtcattg

SEQ ID NO: 554163 - DNA, 15 bp, Homo sapiens
gaaaaatgtcattgc

SEQ ID NO: 554164 - DNA, 15 bp, Homo sapiens
aaaaatgtcattgct

SEQ ID NO: 554165 - DNA, 15 bp, Homo sapiens
aaaatgtcattgctt

SEQ ID NO: 554166 - DNA, 15 bp, Homo sapiens
aaatgtcattgctta

SEQ ID NO: 554167 - DNA, 15 bp, Homo sapiens
aatgtcattgcttac

SEQ ID NO: 554168 - DNA, 15 bp, Homo sapiens
atgtcattgcttaca

SEQ ID NO: 554169 - DNA, 15 bp, Homo sapiens
tgtcattgcttacag

SEQ ID NO: 554170 - DNA, 15 bp, Homo sapiens
gtcattgcttacagt

SEQ ID NO: 554171 - DNA, 15 bp, Homo sapiens
tcattgcttacagtg

SEQ ID NO: 554172 - DNA, 15 bp, Homo sapiens
cattgcttacagtgg

SEQ ID NO: 554173 - DNA, 15 bp, Homo sapiens
attgcttacagtgga

SEQ ID NO: 554174 - DNA, 15 bp, Homo sapiens
ttgcttacagtggaa

SEQ ID NO: 554175 - DNA, 15 bp, Homo sapiens
tgcttacagtggaac

SEQ ID NO: 554176 - DNA, 15 bp, Homo sapiens
gcttacagtggaacc

SEQ ID NO: 554177 - DNA, 15 bp, Homo sapiens
cttacagtggaacca

SEQ ID NO: 554178 - DNA, 15 bp, Homo sapiens
ttacagtggaaccat

SEQ ID NO: 554179 - DNA, 15 bp, Homo sapiens
tacagtggaaccatg

SEQ ID NO: 554180 - DNA, 15 bp, Homo sapiens
acagtggaaccatgt

SEQ ID NO: 554181 - DNA, 15 bp, Homo sapiens
cagtggaaccatgtc

SEQ ID NO: 554182 - DNA, 15 bp, Homo sapiens
agtggaaccatgtca

SEQ ID NO: 554183 - DNA, 15 bp, Homo sapiens
gtggaaccatgtcag

SEQ ID NO: 554184 - DNA, 15 bp, Homo sapiens
tggaaccatgtcaga

SEQ ID NO: 554185 - DNA, 15 bp, Homo sapiens
ggaaccatgtcagac

SEQ ID NO: 554186 - DNA, 15 bp, Homo sapiens
gaaccatgtcagacc

SEQ ID NO: 554187 - DNA, 15 bp, Homo sapiens
aaccatgtcagaccc

SEQ ID NO: 554188 - DNA, 15 bp, Homo sapiens
accatgtcagaccct

SEQ ID NO: 554189 - DNA, 15 bp, Homo sapiens
ccatgtcagacccta

SEQ ID NO: 554190 - DNA, 15 bp, Homo sapiens
catgtcagaccctat

SEQ ID NO: 554191 - DNA, 15 bp, Homo sapiens
atgtcagaccctatc

SEQ ID NO: 554192 - DNA, 15 bp, Homo sapiens
tgtcagaccctatca

SEQ ID NO: 554193 - DNA, 15 bp, Homo sapiens
gtcagaccctatcat

SEQ ID NO: 554194 - DNA, 15 bp, Homo sapiens
tcagaccctatcatt

SEQ ID NO: 554195 - DNA, 15 bp, Homo sapiens
cagaccctatcattt

SEQ ID NO: 554196 - DNA, 15 bp, Homo sapiens
agaccctatcattta

SEQ ID NO: 554197 - DNA, 15 bp, Homo sapiens
gaccctatcatttaa

SEQ ID NO: 554198 - DNA, 15 bp, Homo sapiens
accctatcatttaat

SEQ ID NO: 554199 - DNA, 15 bp, Homo sapiens
ccctatcatttaatt

SEQ ID NO: 554200 - DNA, 15 bp, Homo sapiens
cctatcatttaatta

SEQ ID NO: 554201 - DNA, 15 bp, Homo sapiens
ctatcatttaattat

SEQ ID NO: 554202 - DNA, 15 bp, Homo sapiens
tatcatttaattatg

SEQ ID NO: 554203 - DNA, 15 bp, Homo sapiens
atcatttaattatgc

SEQ ID NO: 554204 - DNA, 15 bp, Homo sapiens
tcatttaattatgcc

SEQ ID NO: 554205 - DNA, 15 bp, Homo sapiens
catttaattatgcca

SEQ ID NO: 554206 - DNA, 15 bp, Homo sapiens
atttaattatgccaa

SEQ ID NO: 554207 - DNA, 15 bp, Homo sapiens
tttaattatgccaaa

SEQ ID NO: 554208 - DNA, 15 bp, Homo sapiens
ttaattatgccaaaa

SEQ ID NO: 554209 - DNA, 15 bp, Homo sapiens
taattatgccaaaag

SEQ ID NO: 554210 - DNA, 15 bp, Homo sapiens
aattatgccaaaagc

SEQ ID NO: 554211 - DNA, 15 bp, Homo sapiens
attatgccaaaagca

SEQ ID NO: 554212 - DNA, 15 bp, Homo sapiens
ttatgccaaaagcaa

SEQ ID NO: 554213 - DNA, 15 bp, Homo sapiens
tatgccaaaagcaat

SEQ ID NO: 554214 - DNA, 15 bp, Homo sapiens
atgccaaaagcaatg

SEQ ID NO: 554215 - DNA, 15 bp, Homo sapiens
tgccaaaagcaatga

SEQ ID NO: 554216 - DNA, 15 bp, Homo sapiens
gccaaaagcaatgac

SEQ ID NO: 554217 - DNA, 15 bp, Homo sapiens
ccaaaagcaatgaca

SEQ ID NO: 554218 - DNA, 15 bp, Homo sapiens
caaaagcaatgacag

SEQ ID NO: 554219 - DNA, 15 bp, Homo sapiens
aaaagcaatgacaga

SEQ ID NO: 554220 - DNA, 15 bp, Homo sapiens
aaagcaatgacagaa

SEQ ID NO: 554221 - DNA, 15 bp, Homo sapiens
aagcaatgacagaat

SEQ ID NO: 554222 - DNA, 15 bp, Homo sapiens
agcaatgacagaatg

SEQ ID NO: 554223 - DNA, 15 bp, Homo sapiens
gcaatgacagaatga

SEQ ID NO: 554224 - DNA, 15 bp, Homo sapiens
caatgacagaatgaa

SEQ ID NO: 554225 - DNA, 15 bp, Homo sapiens
aatgacagaatgaaa

SEQ ID NO: 554226 - DNA, 15 bp, Homo sapiens
atgacagaatgaaat

SEQ ID NO: 554227 - DNA, 15 bp, Homo sapiens
tgacagaatgaaata

SEQ ID NO: 554228 - DNA, 15 bp, Homo sapiens
gacagaatgaaataa

SEQ ID NO: 554229 - DNA, 15 bp, Homo sapiens
acagaatgaaataaa

SEQ ID NO: 554230 - DNA, 15 bp, Homo sapiens
cagaatgaaataaat

SEQ ID NO: 554231 - DNA, 15 bp, Homo sapiens
agaatgaaataaatg

SEQ ID NO: 554232 - DNA, 15 bp, Homo sapiens
gaatgaaataaatgc

SEQ ID NO: 554233 - DNA, 15 bp, Homo sapiens
aatgaaataaatgcc

SEQ ID NO: 554234 - DNA, 15 bp, Homo sapiens
atgaaataaatgcca

SEQ ID NO: 554235 - DNA, 15 bp, Homo sapiens
tgaaataaatgccag

SEQ ID NO: 554236 - DNA, 15 bp, Homo sapiens
gaaataaatgccagg

SEQ ID NO: 554237 - DNA, 15 bp, Homo sapiens
aaataaatgccaggc

SEQ ID NO: 554238 - DNA, 15 bp, Homo sapiens
aataaatgccaggct

SEQ ID NO: 554239 - DNA, 15 bp, Homo sapiens
ataaatgccaggctc

SEQ ID NO: 554240 - DNA, 15 bp, Homo sapiens
taaatgccaggctct

SEQ ID NO: 554241 - DNA, 15 bp, Homo sapiens
aaatgccaggctctt

SEQ ID NO: 554242 - DNA, 15 bp, Homo sapiens
aatgccaggctcttt

SEQ ID NO: 554243 - DNA, 15 bp, Homo sapiens
atgccaggctcttta

SEQ ID NO: 554244 - DNA, 15 bp, Homo sapiens
tgccaggctctttaa

SEQ ID NO: 554245 - DNA, 15 bp, Homo sapiens
gccaggctctttaaa

SEQ ID NO: 554246 - DNA, 15 bp, Homo sapiens
ccaggctctttaaat

SEQ ID NO: 554247 - DNA, 15 bp, Homo sapiens
caggctctttaaatc

SEQ ID NO: 554248 - DNA, 15 bp, Homo sapiens
aggctctttaaatct

SEQ ID NO: 554249 - DNA, 15 bp, Homo sapiens
ggctctttaaatctc

SEQ ID NO: 554250 - DNA, 15 bp, Homo sapiens
gctctttaaatctct

SEQ ID NO: 554251 - DNA, 15 bp, Homo sapiens
ctctttaaatctctc

SEQ ID NO: 554252 - DNA, 15 bp, Homo sapiens
tctttaaatctctca

SEQ ID NO: 554253 - DNA, 15 bp, Homo sapiens
ctttaaatctctcat

SEQ ID NO: 554254 - DNA, 15 bp, Homo sapiens
tttaaatctctcatc

SEQ ID NO: 554255 - DNA, 15 bp, Homo sapiens
ttaaatctctcatcc

SEQ ID NO: 554256 - DNA, 15 bp, Homo sapiens
taaatctctcatcct

SEQ ID NO: 554257 - DNA, 15 bp, Homo sapiens
aaatctctcatcctg

SEQ ID NO: 554258 - DNA, 15 bp, Homo sapiens
aatctctcatcctga

SEQ ID NO: 554259 - DNA, 15 bp, Homo sapiens
atctctcatcctgaa

SEQ ID NO: 554260 - DNA, 15 bp, Homo sapiens
tctctcatcctgaac

SEQ ID NO: 554261 - DNA, 15 bp, Homo sapiens
ctctcatcctgaaca

SEQ ID NO: 554262 - DNA, 15 bp, Homo sapiens
tctcatcctgaacac

SEQ ID NO: 554263 - DNA, 15 bp, Homo sapiens
ctcatcctgaacact

SEQ ID NO: 554264 - DNA, 15 bp, Homo sapiens
tcatcctgaacactg

SEQ ID NO: 554265 - DNA, 15 bp, Homo sapiens
catcctgaacactgt

SEQ ID NO: 554266 - DNA, 15 bp, Homo sapiens
atcctgaacactgtg

SEQ ID NO: 554267 - DNA, 15 bp, Homo sapiens
tcctgaacactgtgc

SEQ ID NO: 554268 - DNA, 15 bp, Homo sapiens
cctgaacactgtgct

SEQ ID NO: 554269 - DNA, 15 bp, Homo sapiens
ctgaacactgtgctt

SEQ ID NO: 554270 - DNA, 15 bp, Homo sapiens
tgaacactgtgcttc

SEQ ID NO: 554271 - DNA, 15 bp, Homo sapiens
gaacactgtgcttct

SEQ ID NO: 554272 - DNA, 15 bp, Homo sapiens
aacactgtgcttctc

SEQ ID NO: 554273 - DNA, 15 bp, Homo sapiens
acactgtgcttctcc

SEQ ID NO: 554274 - DNA, 15 bp, Homo sapiens
cactgtgcttctcct

SEQ ID NO: 554275 - DNA, 15 bp, Homo sapiens
actgtgcttctccta

SEQ ID NO: 554276 - DNA, 15 bp, Homo sapiens
ctgtgcttctcctat

SEQ ID NO: 554277 - DNA, 15 bp, Homo sapiens
tgtgcttctcctatc

SEQ ID NO: 554278 - DNA, 15 bp, Homo sapiens
gtgcttctcctatcc

SEQ ID NO: 554279 - DNA, 15 bp, Homo sapiens
tgcttctcctatcct

SEQ ID NO: 554280 - DNA, 15 bp, Homo sapiens
gcttctcctatcctc

SEQ ID NO: 554281 - DNA, 15 bp, Homo sapiens
cttctcctatcctct

SEQ ID NO: 554282 - DNA, 15 bp, Homo sapiens
ttctcctatcctctg

SEQ ID NO: 554283 - DNA, 15 bp, Homo sapiens
tctcctatcctctga

SEQ ID NO: 554284 - DNA, 15 bp, Homo sapiens
ctcctatcctctgag

SEQ ID NO: 554285 - DNA, 15 bp, Homo sapiens
tcctatcctctgagt

SEQ ID NO: 554286 - DNA, 15 bp, Homo sapiens
cctatcctctgagta

SEQ ID NO: 554287 - DNA, 15 bp, Homo sapiens
ctatcctctgagtat

SEQ ID NO: 554288 - DNA, 15 bp, Homo sapiens
tatcctctgagtatt

SEQ ID NO: 554289 - DNA, 15 bp, Homo sapiens
atcctctgagtatta

SEQ ID NO: 554290 - DNA, 15 bp, Homo sapiens
tcctctgagtattat

SEQ ID NO: 554291 - DNA, 15 bp, Homo sapiens
cctctgagtattatt

SEQ ID NO: 554292 - DNA, 15 bp, Homo sapiens
ctctgagtattattg

SEQ ID NO: 554293 - DNA, 15 bp, Homo sapiens
tctgagtattattga

SEQ ID NO: 554294 - DNA, 15 bp, Homo sapiens
ctgagtattattgat

SEQ ID NO: 554295 - DNA, 15 bp, Homo sapiens
tgagtattattgata

SEQ ID NO: 554296 - DNA, 15 bp, Homo sapiens
gagtattattgataa

SEQ ID NO: 554297 - DNA, 15 bp, Homo sapiens
agtattattgataat

SEQ ID NO: 554298 - DNA, 15 bp, Homo sapiens
gtattattgataatg

SEQ ID NO: 554299 - DNA, 15 bp, Homo sapiens
tattattgataatga

SEQ ID NO: 554300 - DNA, 15 bp, Homo sapiens
attattgataatgac

SEQ ID NO: 554301 - DNA, 15 bp, Homo sapiens
ttattgataatgaca

SEQ ID NO: 554302 - DNA, 15 bp, Homo sapiens
tattgataatgacag

SEQ ID NO: 554303 - DNA, 15 bp, Homo sapiens
attgataatgacagt

SEQ ID NO: 554304 - DNA, 15 bp, Homo sapiens
ttgataatgacagtt

SEQ ID NO: 554305 - DNA, 15 bp, Homo sapiens
tgataatgacagttc

SEQ ID NO: 554306 - DNA, 15 bp, Homo sapiens
gataatgacagttcg

SEQ ID NO: 554307 - DNA, 15 bp, Homo sapiens
ataatgacagttcgt

SEQ ID NO: 554308 - DNA, 15 bp, Homo sapiens
taatgacagttcgtt

SEQ ID NO: 554309 - DNA, 15 bp, Homo sapiens
aatgacagttcgtta

SEQ ID NO: 554310 - DNA, 15 bp, Homo sapiens
atgacagttcgttac

SEQ ID NO: 554311 - DNA, 15 bp, Homo sapiens
tgacagttcgttact

SEQ ID NO: 554312 - DNA, 15 bp, Homo sapiens
gacagttcgttactt

SEQ ID NO: 554313 - DNA, 15 bp, Homo sapiens
acagttcgttacttg

SEQ ID NO: 554314 - DNA, 15 bp, Homo sapiens
cagttcgttacttgc

SEQ ID NO: 554315 - DNA, 15 bp, Homo sapiens
agttcgttacttgca

SEQ ID NO: 554316 - DNA, 15 bp, Homo sapiens
gttcgttacttgcac

SEQ ID NO: 554317 - DNA, 15 bp, Homo sapiens
ttcgttacttgcaca

SEQ ID NO: 554318 - DNA, 15 bp, Homo sapiens
tcgttacttgcacat

SEQ ID NO: 554319 - DNA, 15 bp, Homo sapiens
cgttacttgcacatg

SEQ ID NO: 554320 - DNA, 15 bp, Homo sapiens
gttacttgcacatga

SEQ ID NO: 554321 - DNA, 15 bp, Homo sapiens
ttacttgcacatgat

SEQ ID NO: 554322 - DNA, 15 bp, Homo sapiens
tacttgcacatgatt

SEQ ID NO: 554323 - DNA, 15 bp, Homo sapiens
acttgcacatgattt

SEQ ID NO: 554324 - DNA, 15 bp, Homo sapiens
cttgcacatgatttg

SEQ ID NO: 554325 - DNA, 15 bp, Homo sapiens
ttgcacatgatttga

SEQ ID NO: 554326 - DNA, 15 bp, Homo sapiens
tgcacatgatttgat

SEQ ID NO: 554327 - DNA, 15 bp, Homo sapiens
gcacatgatttgatt

SEQ ID NO: 554328 - DNA, 15 bp, Homo sapiens
cacatgatttgattg

SEQ ID NO: 554329 - DNA, 15 bp, Homo sapiens
acatgatttgattgt

SEQ ID NO: 554330 - DNA, 15 bp, Homo sapiens
catgatttgattgtt

SEQ ID NO: 554331 - DNA, 15 bp, Homo sapiens
atgatttgattgttt

SEQ ID NO: 554332 - DNA, 15 bp, Homo sapiens
tgatttgattgtttg

SEQ ID NO: 554333 - DNA, 15 bp, Homo sapiens
gatttgattgtttgc

SEQ ID NO: 554334 - DNA, 15 bp, Homo sapiens
atttgattgtttgca

SEQ ID NO: 554335 - DNA, 15 bp, Homo sapiens
tttgattgtttgcag

SEQ ID NO: 554336 - DNA, 15 bp, Homo sapiens
ttgattgtttgcagt

SEQ ID NO: 554337 - DNA, 15 bp, Homo sapiens
tgattgtttgcagtg

SEQ ID NO: 554338 - DNA, 15 bp, Homo sapiens
gattgtttgcagtgg

SEQ ID NO: 554339 - DNA, 15 bp, Homo sapiens
attgtttgcagtggt

SEQ ID NO: 554340 - DNA, 15 bp, Homo sapiens
ttgtttgcagtggtc

SEQ ID NO: 554341 - DNA, 15 bp, Homo sapiens
tgtttgcagtggtct

SEQ ID NO: 554342 - DNA, 15 bp, Homo sapiens
gtttgcagtggtcta

SEQ ID NO: 554343 - DNA, 15 bp, Homo sapiens
tttgcagtggtctaa

SEQ ID NO: 554344 - DNA, 15 bp, Homo sapiens
ttgcagtggtctaat

SEQ ID NO: 554345 - DNA, 15 bp, Homo sapiens
tgcagtggtctaatt

SEQ ID NO: 554346 - DNA, 15 bp, Homo sapiens
gcagtggtctaattc

SEQ ID NO: 554347 - DNA, 15 bp, Homo sapiens
cagtggtctaattcg

SEQ ID NO: 554348 - DNA, 15 bp, Homo sapiens
agtggtctaattcgc

SEQ ID NO: 554349 - DNA, 15 bp, Homo sapiens
gtggtctaattcgcc

SEQ ID NO: 554350 - DNA, 15 bp, Homo sapiens
tggtctaattcgcca

SEQ ID NO: 554351 - DNA, 15 bp, Homo sapiens
ggtctaattcgccat

SEQ ID NO: 554352 - DNA, 15 bp, Homo sapiens
gtctaattcgccata

SEQ ID NO: 554353 - DNA, 15 bp, Homo sapiens
tctaattcgccataa

SEQ ID NO: 554354 - DNA, 15 bp, Homo sapiens
ctaattcgccataac

SEQ ID NO: 554355 - DNA, 15 bp, Homo sapiens
taattcgccataaca

SEQ ID NO: 554356 - DNA, 15 bp, Homo sapiens
aattcgccataacac

SEQ ID NO: 554357 - DNA, 15 bp, Homo sapiens
attcgccataacaca

SEQ ID NO: 554358 - DNA, 15 bp, Homo sapiens
ttcgccataacacaa

SEQ ID NO: 554359 - DNA, 15 bp, Homo sapiens
tcgccataacacaaa

SEQ ID NO: 554360 - DNA, 15 bp, Homo sapiens
cgccataacacaaaa

SEQ ID NO: 554361 - DNA, 15 bp, Homo sapiens
gccataacacaaaaa

SEQ ID NO: 554362 - DNA, 15 bp, Homo sapiens
ccataacacaaaaag

SEQ ID NO: 554363 - DNA, 15 bp, Homo sapiens
cataacacaaaaaga

SEQ ID NO: 554364 - DNA, 15 bp, Homo sapiens
ataacacaaaaagat

SEQ ID NO: 554365 - DNA, 15 bp, Homo sapiens
taacacaaaaagata

SEQ ID NO: 554366 - DNA, 15 bp, Homo sapiens
aacacaaaaagatag

SEQ ID NO: 554367 - DNA, 15 bp, Homo sapiens
acacaaaaagatagg

SEQ ID NO: 554368 - DNA, 15 bp, Homo sapiens
cacaaaaagatagga

SEQ ID NO: 554369 - DNA, 15 bp, Homo sapiens
acaaaaagataggag

SEQ ID NO: 554370 - DNA, 15 bp, Homo sapiens
caaaaagataggaga

SEQ ID NO: 554371 - DNA, 15 bp, Homo sapiens
aaaaagataggagag

SEQ ID NO: 554372 - DNA, 15 bp, Homo sapiens
aaaagataggagagg

SEQ ID NO: 554373 - DNA, 15 bp, Homo sapiens
aaagataggagagga

SEQ ID NO: 554374 - DNA, 15 bp, Homo sapiens
aagataggagaggat

SEQ ID NO: 554375 - DNA, 15 bp, Homo sapiens
agataggagaggatg

SEQ ID NO: 554376 - DNA, 15 bp, Homo sapiens
gataggagaggatgt

SEQ ID NO: 554377 - DNA, 15 bp, Homo sapiens
ataggagaggatgtt

SEQ ID NO: 554378 - DNA, 15 bp, Homo sapiens
taggagaggatgtta

SEQ ID NO: 554379 - DNA, 15 bp, Homo sapiens
aggagaggatgttat

SEQ ID NO: 554380 - DNA, 15 bp, Homo sapiens
ggagaggatgttata

SEQ ID NO: 554381 - DNA, 15 bp, Homo sapiens
gagaggatgttataa

SEQ ID NO: 554382 - DNA, 15 bp, Homo sapiens
agaggatgttataat

SEQ ID NO: 554383 - DNA, 15 bp, Homo sapiens
gaggatgttataatg

SEQ ID NO: 554384 - DNA, 15 bp, Homo sapiens
aggatgttataatga

SEQ ID NO: 554385 - DNA, 15 bp, Homo sapiens
ggatgttataatgat

SEQ ID NO: 554386 - DNA, 15 bp, Homo sapiens
gatgttataatgatt

SEQ ID NO: 554387 - DNA, 15 bp, Homo sapiens
atgttataatgattc

SEQ ID NO: 554388 - DNA, 15 bp, Homo sapiens
tgttataatgattct

SEQ ID NO: 554389 - DNA, 15 bp, Homo sapiens
gttataatgattctg

SEQ ID NO: 554390 - DNA, 15 bp, Homo sapiens
ttataatgattctga

SEQ ID NO: 554391 - DNA, 15 bp, Homo sapiens
tataatgattctgaa

SEQ ID NO: 554392 - DNA, 15 bp, Homo sapiens
ataatgattctgaac

SEQ ID NO: 554393 - DNA, 15 bp, Homo sapiens
taatgattctgaact

SEQ ID NO: 554394 - DNA, 15 bp, Homo sapiens
aatgattctgaactt

SEQ ID NO: 554395 - DNA, 15 bp, Homo sapiens
atgattctgaacttc

SEQ ID NO: 554396 - DNA, 15 bp, Homo sapiens
tgattctgaacttca

SEQ ID NO: 554397 - DNA, 15 bp, Homo sapiens
gattctgaacttcag

SEQ ID NO: 554398 - DNA, 15 bp, Homo sapiens
attctgaacttcaga

SEQ ID NO: 554399 - DNA, 15 bp, Homo sapiens
ttctgaacttcagat

SEQ ID NO: 554400 - DNA, 15 bp, Homo sapiens
tctgaacttcagatg

SEQ ID NO: 554401 - DNA, 15 bp, Homo sapiens
ctgaacttcagatga

SEQ ID NO: 554402 - DNA, 15 bp, Homo sapiens
tgaacttcagatgag

SEQ ID NO: 554403 - DNA, 15 bp, Homo sapiens
gaacttcagatgaga

SEQ ID NO: 554404 - DNA, 15 bp, Homo sapiens
aacttcagatgagaa

SEQ ID NO: 554405 - DNA, 15 bp, Homo sapiens
acttcagatgagaaa

SEQ ID NO: 554406 - DNA, 15 bp, Homo sapiens
cttcagatgagaaaa

SEQ ID NO: 554407 - DNA, 15 bp, Homo sapiens
ttcagatgagaaaac

SEQ ID NO: 554408 - DNA, 15 bp, Homo sapiens
tcagatgagaaaacc

SEQ ID NO: 554409 - DNA, 15 bp, Homo sapiens
cagatgagaaaacca

SEQ ID NO: 554410 - DNA, 15 bp, Homo sapiens
agatgagaaaaccaa

SEQ ID NO: 554411 - DNA, 15 bp, Homo sapiens
gatgagaaaaccaag

SEQ ID NO: 554412 - DNA, 15 bp, Homo sapiens
atgagaaaaccaagg

SEQ ID NO: 554413 - DNA, 15 bp, Homo sapiens
tgagaaaaccaaggc

SEQ ID NO: 554414 - DNA, 15 bp, Homo sapiens
gagaaaaccaaggca

SEQ ID NO: 554415 - DNA, 15 bp, Homo sapiens
agaaaaccaaggcag

SEQ ID NO: 554416 - DNA, 15 bp, Homo sapiens
gaaaaccaaggcagg

SEQ ID NO: 554417 - DNA, 15 bp, Homo sapiens
aaaaccaaggcaggg

SEQ ID NO: 554418 - DNA, 15 bp, Homo sapiens
aaaccaaggcagggt

SEQ ID NO: 554419 - DNA, 15 bp, Homo sapiens
aaccaaggcagggta

SEQ ID NO: 554420 - DNA, 15 bp, Homo sapiens
accaaggcagggtat

SEQ ID NO: 554421 - DNA, 15 bp, Homo sapiens
ccaaggcagggtata

SEQ ID NO: 554422 - DNA, 15 bp, Homo sapiens
caaggcagggtataa

SEQ ID NO: 554423 - DNA, 15 bp, Homo sapiens
aaggcagggtataaa

SEQ ID NO: 554424 - DNA, 15 bp, Homo sapiens
aggcagggtataaaa

SEQ ID NO: 554425 - DNA, 15 bp, Homo sapiens
ggcagggtataaaat

SEQ ID NO: 554426 - DNA, 15 bp, Homo sapiens
gcagggtataaaatt

SEQ ID NO: 554427 - DNA, 15 bp, Homo sapiens
cagggtataaaattt

SEQ ID NO: 554428 - DNA, 15 bp, Homo sapiens
agggtataaaatttg

SEQ ID NO: 554429 - DNA, 15 bp, Homo sapiens
gggtataaaatttga

SEQ ID NO: 554430 - DNA, 15 bp, Homo sapiens
ggtataaaatttgag

SEQ ID NO: 554431 - DNA, 15 bp, Homo sapiens
gtataaaatttgaga

SEQ ID NO: 554432 - DNA, 15 bp, Homo sapiens
tataaaatttgagat

SEQ ID NO: 554433 - DNA, 15 bp, Homo sapiens
ataaaatttgagatt

SEQ ID NO: 554434 - DNA, 15 bp, Homo sapiens
taaaatttgagattg

SEQ ID NO: 554435 - DNA, 15 bp, Homo sapiens
aaaatttgagattgc

SEQ ID NO: 554436 - DNA, 15 bp, Homo sapiens
aaatttgagattgct

SEQ ID NO: 554437 - DNA, 15 bp, Homo sapiens
aatttgagattgctt

SEQ ID NO: 554438 - DNA, 15 bp, Homo sapiens
atttgagattgcttg

SEQ ID NO: 554439 - DNA, 15 bp, Homo sapiens
tttgagattgcttgg

SEQ ID NO: 554440 - DNA, 15 bp, Homo sapiens
ttgagattgcttggc

SEQ ID NO: 554441 - DNA, 15 bp, Homo sapiens
tgagattgcttggct

SEQ ID NO: 554442 - DNA, 15 bp, Homo sapiens
gagattgcttggctc

SEQ ID NO: 554443 - DNA, 15 bp, Homo sapiens
agattgcttggctca

SEQ ID NO: 554444 - DNA, 15 bp, Homo sapiens
gattgcttggctcat

SEQ ID NO: 554445 - DNA, 15 bp, Homo sapiens
attgcttggctcatg

SEQ ID NO: 554446 - DNA, 15 bp, Homo sapiens
ttgcttggctcatgg

SEQ ID NO: 554447 - DNA, 15 bp, Homo sapiens
tgcttggctcatggg

SEQ ID NO: 554448 - DNA, 15 bp, Homo sapiens
gcttggctcatgggc

SEQ ID NO: 554449 - DNA, 15 bp, Homo sapiens
cttggctcatgggct

SEQ ID NO: 554450 - DNA, 15 bp, Homo sapiens
ttggctcatgggcta

SEQ ID NO: 554451 - DNA, 15 bp, Homo sapiens
tggctcatgggctag

SEQ ID NO: 554452 - DNA, 15 bp, Homo sapiens
ggctcatgggctaga

SEQ ID NO: 554453 - DNA, 15 bp, Homo sapiens
gctcatgggctagac

SEQ ID NO: 554454 - DNA, 15 bp, Homo sapiens
ctcatgggctagacc

SEQ ID NO: 554455 - DNA, 15 bp, Homo sapiens
tcatgggctagacct

SEQ ID NO: 554456 - DNA, 15 bp, Homo sapiens
catgggctagacctg

SEQ ID NO: 554457 - DNA, 15 bp, Homo sapiens
atgggctagacctgt

SEQ ID NO: 554458 - DNA, 15 bp, Homo sapiens
tgggctagacctgtg

SEQ ID NO: 554459 - DNA, 15 bp, Homo sapiens
gggctagacctgtgc

SEQ ID NO: 554460 - DNA, 15 bp, Homo sapiens
ggctagacctgtgct

SEQ ID NO: 554461 - DNA, 15 bp, Homo sapiens
gctagacctgtgctg

SEQ ID NO: 554462 - DNA, 15 bp, Homo sapiens
ctagacctgtgctgt

SEQ ID NO: 554463 - DNA, 15 bp, Homo sapiens
tagacctgtgctgtt

SEQ ID NO: 554464 - DNA, 15 bp, Homo sapiens
agacctgtgctgttc

SEQ ID NO: 554465 - DNA, 15 bp, Homo sapiens
gacctgtgctgttca

SEQ ID NO: 554466 - DNA, 15 bp, Homo sapiens
acctgtgctgttcaa

SEQ ID NO: 554467 - DNA, 15 bp, Homo sapiens
cctgtgctgttcaat

SEQ ID NO: 554468 - DNA, 15 bp, Homo sapiens
ctgtgctgttcaatg

SEQ ID NO: 554469 - DNA, 15 bp, Homo sapiens
tgtgctgttcaatgc

SEQ ID NO: 554470 - DNA, 15 bp, Homo sapiens
gtgctgttcaatgca

SEQ ID NO: 554471 - DNA, 15 bp, Homo sapiens
tgctgttcaatgcag

SEQ ID NO: 554472 - DNA, 15 bp, Homo sapiens
gctgttcaatgcagc

SEQ ID NO: 554473 - DNA, 15 bp, Homo sapiens
ctgttcaatgcagca

SEQ ID NO: 554474 - DNA, 15 bp, Homo sapiens
tgttcaatgcagcag

SEQ ID NO: 554475 - DNA, 15 bp, Homo sapiens
gttcaatgcagcagc

SEQ ID NO: 554476 - DNA, 15 bp, Homo sapiens
ttcaatgcagcagcc

SEQ ID NO: 554477 - DNA, 15 bp, Homo sapiens
tcaatgcagcagcca

SEQ ID NO: 554478 - DNA, 15 bp, Homo sapiens
caatgcagcagccac

SEQ ID NO: 554479 - DNA, 15 bp, Homo sapiens
aatgcagcagccact

SEQ ID NO: 554480 - DNA, 15 bp, Homo sapiens
atgcagcagccacta

SEQ ID NO: 554481 - DNA, 15 bp, Homo sapiens
tgcagcagccactag

SEQ ID NO: 554482 - DNA, 15 bp, Homo sapiens
gcagcagccactagc

SEQ ID NO: 554483 - DNA, 15 bp, Homo sapiens
cagcagccactagcc

SEQ ID NO: 554484 - DNA, 15 bp, Homo sapiens
agcagccactagcca

SEQ ID NO: 554485 - DNA, 15 bp, Homo sapiens
gcagccactagccac

SEQ ID NO: 554486 - DNA, 15 bp, Homo sapiens
cagccactagccaca

SEQ ID NO: 554487 - DNA, 15 bp, Homo sapiens
agccactagccacag

SEQ ID NO: 554488 - DNA, 15 bp, Homo sapiens
gccactagccacagg

SEQ ID NO: 554489 - DNA, 15 bp, Homo sapiens
ccactagccacaggt

SEQ ID NO: 554490 - DNA, 15 bp, Homo sapiens
cactagccacaggtt

SEQ ID NO: 554491 - DNA, 15 bp, Homo sapiens
actagccacaggttg

SEQ ID NO: 554492 - DNA, 15 bp, Homo sapiens
ctagccacaggttgc

SEQ ID NO: 554493 - DNA, 15 bp, Homo sapiens
tagccacaggttgct

SEQ ID NO: 554494 - DNA, 15 bp, Homo sapiens
agccacaggttgcta

SEQ ID NO: 554495 - DNA, 15 bp, Homo sapiens
gccacaggttgctac

SEQ ID NO: 554496 - DNA, 15 bp, Homo sapiens
ccacaggttgctact

SEQ ID NO: 554497 - DNA, 15 bp, Homo sapiens
cacaggttgctactg

SEQ ID NO: 554498 - DNA, 15 bp, Homo sapiens
acaggttgctactga

SEQ ID NO: 554499 - DNA, 15 bp, Homo sapiens
caggttgctactgag

SEQ ID NO: 554500 - DNA, 15 bp, Homo sapiens
aggttgctactgagc

SEQ ID NO: 554501 - DNA, 15 bp, Homo sapiens
ggttgctactgagca

SEQ ID NO: 554502 - DNA, 15 bp, Homo sapiens
gttgctactgagcac

SEQ ID NO: 554503 - DNA, 15 bp, Homo sapiens
ttgctactgagcact

SEQ ID NO: 554504 - DNA, 15 bp, Homo sapiens
tgctactgagcactt

SEQ ID NO: 554505 - DNA, 15 bp, Homo sapiens
gctactgagcacttg

SEQ ID NO: 554506 - DNA, 15 bp, Homo sapiens
ctactgagcacttga

SEQ ID NO: 554507 - DNA, 15 bp, Homo sapiens
tactgagcacttgaa

SEQ ID NO: 554508 - DNA, 15 bp, Homo sapiens
actgagcacttgaaa

SEQ ID NO: 554509 - DNA, 15 bp, Homo sapiens
ctgagcacttgaaat

SEQ ID NO: 554510 - DNA, 15 bp, Homo sapiens
tgagcacttgaaata

SEQ ID NO: 554511 - DNA, 15 bp, Homo sapiens
gagcacttgaaatac

SEQ ID NO: 554512 - DNA, 15 bp, Homo sapiens
agcacttgaaatacg

SEQ ID NO: 554513 - DNA, 15 bp, Homo sapiens
gcacttgaaatacgg

SEQ ID NO: 554514 - DNA, 15 bp, Homo sapiens
cacttgaaatacggt

SEQ ID NO: 554515 - DNA, 15 bp, Homo sapiens
acttgaaatacggtt

SEQ ID NO: 554516 - DNA, 15 bp, Homo sapiens
cttgaaatacggtta

SEQ ID NO: 554517 - DNA, 15 bp, Homo sapiens
ttgaaatacggttag

SEQ ID NO: 554518 - DNA, 15 bp, Homo sapiens
tgaaatacggttagt

SEQ ID NO: 554519 - DNA, 15 bp, Homo sapiens
gaaatacggttagtt

SEQ ID NO: 554520 - DNA, 15 bp, Homo sapiens
aaatacggttagttg

SEQ ID NO: 554521 - DNA, 15 bp, Homo sapiens
aatacggttagttga

SEQ ID NO: 554522 - DNA, 15 bp, Homo sapiens
atacggttagttgaa

SEQ ID NO: 554523 - DNA, 15 bp, Homo sapiens
tacggttagttgaaa

SEQ ID NO: 554524 - DNA, 15 bp, Homo sapiens
acggttagttgaaaa

SEQ ID NO: 554525 - DNA, 15 bp, Homo sapiens
cggttagttgaaaat

SEQ ID NO: 554526 - DNA, 15 bp, Homo sapiens
ggttagttgaaaatt

SEQ ID NO: 554527 - DNA, 15 bp, Homo sapiens
gttagttgaaaattg

SEQ ID NO: 554528 - DNA, 15 bp, Homo sapiens
ttagttgaaaattga

SEQ ID NO: 554529 - DNA, 15 bp, Homo sapiens
tagttgaaaattgaa

SEQ ID NO: 554530 - DNA, 15 bp, Homo sapiens
agttgaaaattgaaa

SEQ ID NO: 554531 - DNA, 15 bp, Homo sapiens
gttgaaaattgaaat

SEQ ID NO: 554532 - DNA, 15 bp, Homo sapiens
ttgaaaattgaaatg

SEQ ID NO: 554533 - DNA, 15 bp, Homo sapiens
tgaaaattgaaatgt

SEQ ID NO: 554534 - DNA, 15 bp, Homo sapiens
gaaaattgaaatgtg

SEQ ID NO: 554535 - DNA, 15 bp, Homo sapiens
aaaattgaaatgtgc

SEQ ID NO: 554536 - DNA, 15 bp, Homo sapiens
aaattgaaatgtgct

SEQ ID NO: 554537 - DNA, 15 bp, Homo sapiens
aattgaaatgtgctc

SEQ ID NO: 554538 - DNA, 15 bp, Homo sapiens
attgaaatgtgctct

SEQ ID NO: 554539 - DNA, 15 bp, Homo sapiens
ttgaaatgtgctcta

SEQ ID NO: 554540 - DNA, 15 bp, Homo sapiens
tgaaatgtgctctaa

SEQ ID NO: 554541 - DNA, 15 bp, Homo sapiens
gaaatgtgctctaaa

SEQ ID NO: 554542 - DNA, 15 bp, Homo sapiens
aaatgtgctctaaat

SEQ ID NO: 554543 - DNA, 15 bp, Homo sapiens
aatgtgctctaaata

SEQ ID NO: 554544 - DNA, 15 bp, Homo sapiens
atgtgctctaaatat

SEQ ID NO: 554545 - DNA, 15 bp, Homo sapiens
tgtgctctaaatata

SEQ ID NO: 554546 - DNA, 15 bp, Homo sapiens
gtgctctaaatataa

SEQ ID NO: 554547 - DNA, 15 bp, Homo sapiens
tgctctaaatataaa

SEQ ID NO: 554548 - DNA, 15 bp, Homo sapiens
gctctaaatataaac

SEQ ID NO: 554549 - DNA, 15 bp, Homo sapiens
ctctaaatataaacc

SEQ ID NO: 554550 - DNA, 15 bp, Homo sapiens
tctaaatataaacca

SEQ ID NO: 554551 - DNA, 15 bp, Homo sapiens
ctaaatataaaccac

SEQ ID NO: 554552 - DNA, 15 bp, Homo sapiens
taaatataaaccaca

SEQ ID NO: 554553 - DNA, 15 bp, Homo sapiens
aaatataaaccacat

SEQ ID NO: 554554 - DNA, 15 bp, Homo sapiens
aatataaaccacata

SEQ ID NO: 554555 - DNA, 15 bp, Homo sapiens
atataaaccacatac

SEQ ID NO: 554556 - DNA, 15 bp, Homo sapiens
tataaaccacatact

SEQ ID NO: 554557 - DNA, 15 bp, Homo sapiens
ataaaccacatactg

SEQ ID NO: 554558 - DNA, 15 bp, Homo sapiens
taaaccacatactgg

SEQ ID NO: 554559 - DNA, 15 bp, Homo sapiens
aaaccacatactgga

SEQ ID NO: 554560 - DNA, 15 bp, Homo sapiens
aaccacatactggat

SEQ ID NO: 554561 - DNA, 15 bp, Homo sapiens
accacatactggatt

SEQ ID NO: 554562 - DNA, 15 bp, Homo sapiens
ccacatactggattt

SEQ ID NO: 554563 - DNA, 15 bp, Homo sapiens
cacatactggattta

SEQ ID NO: 554564 - DNA, 15 bp, Homo sapiens
acatactggatttag

SEQ ID NO: 554565 - DNA, 15 bp, Homo sapiens
catactggatttaga

SEQ ID NO: 554566 - DNA, 15 bp, Homo sapiens
atactggatttagaa

SEQ ID NO: 554567 - DNA, 15 bp, Homo sapiens
tactggatttagaag

SEQ ID NO: 554568 - DNA, 15 bp, Homo sapiens
actggatttagaaga

SEQ ID NO: 554569 - DNA, 15 bp, Homo sapiens
ctggatttagaagac

SEQ ID NO: 554570 - DNA, 15 bp, Homo sapiens
tggatttagaagact

SEQ ID NO: 554571 - DNA, 15 bp, Homo sapiens
ggatttagaagactt

SEQ ID NO: 554572 - DNA, 15 bp, Homo sapiens
gatttagaagactta

SEQ ID NO: 554573 - DNA, 15 bp, Homo sapiens
atttagaagacttac

SEQ ID NO: 554574 - DNA, 15 bp, Homo sapiens
tttagaagacttact

SEQ ID NO: 554575 - DNA, 15 bp, Homo sapiens
ttagaagacttacta

SEQ ID NO: 554576 - DNA, 15 bp, Homo sapiens
tagaagacttactat

SEQ ID NO: 554577 - DNA, 15 bp, Homo sapiens
agaagacttactatg

SEQ ID NO: 554578 - DNA, 15 bp, Homo sapiens
gaagacttactatgg

SEQ ID NO: 554579 - DNA, 15 bp, Homo sapiens
aagacttactatgga

SEQ ID NO: 554580 - DNA, 15 bp, Homo sapiens
agacttactatggaa

SEQ ID NO: 554581 - DNA, 15 bp, Homo sapiens
gacttactatggaaa

SEQ ID NO: 554582 - DNA, 15 bp, Homo sapiens
acttactatggaaaa

SEQ ID NO: 554583 - DNA, 15 bp, Homo sapiens
cttactatggaaaaa

SEQ ID NO: 554584 - DNA, 15 bp, Homo sapiens
ttactatggaaaaag

SEQ ID NO: 554585 - DNA, 15 bp, Homo sapiens
tactatggaaaaagt

SEQ ID NO: 554586 - DNA, 15 bp, Homo sapiens
actatggaaaaagtg

SEQ ID NO: 554587 - DNA, 15 bp, Homo sapiens
ctatggaaaaagtgt

SEQ ID NO: 554588 - DNA, 15 bp, Homo sapiens
tatggaaaaagtgta

SEQ ID NO: 554589 - DNA, 15 bp, Homo sapiens
atggaaaaagtgtaa

SEQ ID NO: 554590 - DNA, 15 bp, Homo sapiens
tggaaaaagtgtaaa

SEQ ID NO: 554591 - DNA, 15 bp, Homo sapiens
ggaaaaagtgtaaaa

SEQ ID NO: 554592 - DNA, 15 bp, Homo sapiens
gaaaaagtgtaaaat

SEQ ID NO: 554593 - DNA, 15 bp, Homo sapiens
aaaaagtgtaaaata

SEQ ID NO: 554594 - DNA, 15 bp, Homo sapiens
aaaagtgtaaaatat

SEQ ID NO: 554595 - DNA, 15 bp, Homo sapiens
aaagtgtaaaatatc

SEQ ID NO: 554596 - DNA, 15 bp, Homo sapiens
aagtgtaaaatatct

SEQ ID NO: 554597 - DNA, 15 bp, Homo sapiens
agtgtaaaatatctc

SEQ ID NO: 554598 - DNA, 15 bp, Homo sapiens
gtgtaaaatatctca

SEQ ID NO: 554599 - DNA, 15 bp, Homo sapiens
tgtaaaatatctcat

SEQ ID NO: 554600 - DNA, 15 bp, Homo sapiens
gtaaaatatctcatt

SEQ ID NO: 554601 - DNA, 15 bp, Homo sapiens
taaaatatctcattg

SEQ ID NO: 554602 - DNA, 15 bp, Homo sapiens
aaaatatctcattga

SEQ ID NO: 554603 - DNA, 15 bp, Homo sapiens
aaatatctcattgat

SEQ ID NO: 554604 - DNA, 15 bp, Homo sapiens
aatatctcattgatt

SEQ ID NO: 554605 - DNA, 15 bp, Homo sapiens
atatctcattgatta

SEQ ID NO: 554606 - DNA, 15 bp, Homo sapiens
tatctcattgattat

SEQ ID NO: 554607 - DNA, 15 bp, Homo sapiens
atctcattgattatt

SEQ ID NO: 554608 - DNA, 15 bp, Homo sapiens
tctcattgattattt

SEQ ID NO: 554609 - DNA, 15 bp, Homo sapiens
ctcattgattattta

SEQ ID NO: 554610 - DNA, 15 bp, Homo sapiens
tcattgattatttat

SEQ ID NO: 554611 - DNA, 15 bp, Homo sapiens
cattgattatttatt

SEQ ID NO: 554612 - DNA, 15 bp, Homo sapiens
attgattatttatta

SEQ ID NO: 554613 - DNA, 15 bp, Homo sapiens
ttgattatttattat

SEQ ID NO: 554614 - DNA, 15 bp, Homo sapiens
tgattatttattatg

SEQ ID NO: 554615 - DNA, 15 bp, Homo sapiens
gattatttattatgc

SEQ ID NO: 554616 - DNA, 15 bp, Homo sapiens
attatttattatgct

SEQ ID NO: 554617 - DNA, 15 bp, Homo sapiens
ttatttattatgctg

SEQ ID NO: 554618 - DNA, 15 bp, Homo sapiens
tatttattatgctga

SEQ ID NO: 554619 - DNA, 15 bp, Homo sapiens
atttattatgctgaa

SEQ ID NO: 554620 - DNA, 15 bp, Homo sapiens
tttattatgctgaaa

SEQ ID NO: 554621 - DNA, 15 bp, Homo sapiens
ttattatgctgaaat

SEQ ID NO: 554622 - DNA, 15 bp, Homo sapiens
tattatgctgaaatg

SEQ ID NO: 554623 - DNA, 15 bp, Homo sapiens
attatgctgaaatga

SEQ ID NO: 554624 - DNA, 15 bp, Homo sapiens
ttatgctgaaatgat

SEQ ID NO: 554625 - DNA, 15 bp, Homo sapiens
tatgctgaaatgatc

SEQ ID NO: 554626 - DNA, 15 bp, Homo sapiens
atgctgaaatgatct

SEQ ID NO: 554627 - DNA, 15 bp, Homo sapiens
tgctgaaatgatctt

SEQ ID NO: 554628 - DNA, 15 bp, Homo sapiens
gctgaaatgatcttc

SEQ ID NO: 554629 - DNA, 15 bp, Homo sapiens
ctgaaatgatcttct

SEQ ID NO: 554630 - DNA, 15 bp, Homo sapiens
tgaaatgatcttctt

SEQ ID NO: 554631 - DNA, 15 bp, Homo sapiens
gaaatgatcttcttt

SEQ ID NO: 554632 - DNA, 15 bp, Homo sapiens
aaatgatcttctttt

SEQ ID NO: 554633 - DNA, 15 bp, Homo sapiens
aatgatcttcttttg

SEQ ID NO: 554634 - DNA, 15 bp, Homo sapiens
atgatcttcttttgg

SEQ ID NO: 554635 - DNA, 15 bp, Homo sapiens
tgatcttcttttggc

SEQ ID NO: 554636 - DNA, 15 bp, Homo sapiens
gatcttcttttggct

SEQ ID NO: 554637 - DNA, 15 bp, Homo sapiens
atcttcttttggcta

SEQ ID NO: 554638 - DNA, 15 bp, Homo sapiens
tcttcttttggctat

SEQ ID NO: 554639 - DNA, 15 bp, Homo sapiens
cttcttttggctata

SEQ ID NO: 554640 - DNA, 15 bp, Homo sapiens
ttcttttggctatat

SEQ ID NO: 554641 - DNA, 15 bp, Homo sapiens
tcttttggctatatt

SEQ ID NO: 554642 - DNA, 15 bp, Homo sapiens
cttttggctatattg

SEQ ID NO: 554643 - DNA, 15 bp, Homo sapiens
ttttggctatattga

SEQ ID NO: 554644 - DNA, 15 bp, Homo sapiens
tttggctatattgag

SEQ ID NO: 554645 - DNA, 15 bp, Homo sapiens
ttggctatattgagt

SEQ ID NO: 554646 - DNA, 15 bp, Homo sapiens
tggctatattgagtt

SEQ ID NO: 554647 - DNA, 15 bp, Homo sapiens
ggctatattgagtta

SEQ ID NO: 554648 - DNA, 15 bp, Homo sapiens
gctatattgagttaa

SEQ ID NO: 554649 - DNA, 15 bp, Homo sapiens
ctatattgagttaac

SEQ ID NO: 554650 - DNA, 15 bp, Homo sapiens
tatattgagttaaca

SEQ ID NO: 554651 - DNA, 15 bp, Homo sapiens
atattgagttaacat

SEQ ID NO: 554652 - DNA, 15 bp, Homo sapiens
tattgagttaacata

SEQ ID NO: 554653 - DNA, 15 bp, Homo sapiens
attgagttaacatat

SEQ ID NO: 554654 - DNA, 15 bp, Homo sapiens
ttgagttaacatatt

SEQ ID NO: 554655 - DNA, 15 bp, Homo sapiens
tgagttaacatatta

SEQ ID NO: 554656 - DNA, 15 bp, Homo sapiens
gagttaacatattaa

SEQ ID NO: 554657 - DNA, 15 bp, Homo sapiens
agttaacatattaat

SEQ ID NO: 554658 - DNA, 15 bp, Homo sapiens
gttaacatattaata

SEQ ID NO: 554659 - DNA, 15 bp, Homo sapiens
ttaacatattaatat

SEQ ID NO: 554660 - DNA, 15 bp, Homo sapiens
taacatattaatata

SEQ ID NO: 554661 - DNA, 15 bp, Homo sapiens
aacatattaatatac

SEQ ID NO: 554662 - DNA, 15 bp, Homo sapiens
acatattaatatact

SEQ ID NO: 554663 - DNA, 15 bp, Homo sapiens
catattaatatactt

SEQ ID NO: 554664 - DNA, 15 bp, Homo sapiens
atattaatatacttt

SEQ ID NO: 554665 - DNA, 15 bp, Homo sapiens
tattaatatacttta

SEQ ID NO: 554666 - DNA, 15 bp, Homo sapiens
attaatatactttaa

SEQ ID NO: 554667 - DNA, 15 bp, Homo sapiens
ttaatatactttaat

SEQ ID NO: 554668 - DNA, 15 bp, Homo sapiens
taatatactttaata

SEQ ID NO: 554669 - DNA, 15 bp, Homo sapiens
aatatactttaatat

SEQ ID NO: 554670 - DNA, 15 bp, Homo sapiens
atatactttaatata

SEQ ID NO: 554671 - DNA, 15 bp, Homo sapiens
tatactttaatatat

SEQ ID NO: 554672 - DNA, 15 bp, Homo sapiens
atactttaatatatt

SEQ ID NO: 554673 - DNA, 15 bp, Homo sapiens
tactttaatatatta

SEQ ID NO: 554674 - DNA, 15 bp, Homo sapiens
actttaatatattat

SEQ ID NO: 554675 - DNA, 15 bp, Homo sapiens
ctttaatatattatt

SEQ ID NO: 554676 - DNA, 15 bp, Homo sapiens
tttaatatattatta

SEQ ID NO: 554677 - DNA, 15 bp, Homo sapiens
ttaatatattattaa

SEQ ID NO: 554678 - DNA, 15 bp, Homo sapiens
taatatattattaaa

SEQ ID NO: 554679 - DNA, 15 bp, Homo sapiens
aatatattattaaaa

SEQ ID NO: 554680 - DNA, 15 bp, Homo sapiens
atatattattaaaat

SEQ ID NO: 554681 - DNA, 15 bp, Homo sapiens
tatattattaaaatt

SEQ ID NO: 554682 - DNA, 15 bp, Homo sapiens
atattattaaaattc

SEQ ID NO: 554683 - DNA, 15 bp, Homo sapiens
tattattaaaattca

SEQ ID NO: 554684 - DNA, 15 bp, Homo sapiens
attattaaaattcat

SEQ ID NO: 554685 - DNA, 15 bp, Homo sapiens
ttattaaaattcatt

SEQ ID NO: 554686 - DNA, 15 bp, Homo sapiens
tattaaaattcattt

SEQ ID NO: 554687 - DNA, 15 bp, Homo sapiens
attaaaattcatttc

SEQ ID NO: 554688 - DNA, 15 bp, Homo sapiens
ttaaaattcatttca

SEQ ID NO: 554689 - DNA, 15 bp, Homo sapiens
taaaattcatttcat

SEQ ID NO: 554690 - DNA, 15 bp, Homo sapiens
aaaattcatttcatc

SEQ ID NO: 554691 - DNA, 15 bp, Homo sapiens
aaattcatttcatcg

SEQ ID NO: 554692 - DNA, 15 bp, Homo sapiens
aattcatttcatcgt

SEQ ID NO: 554693 - DNA, 15 bp, Homo sapiens
attcatttcatcgtt

SEQ ID NO: 554694 - DNA, 15 bp, Homo sapiens
ttcatttcatcgttt

SEQ ID NO: 554695 - DNA, 15 bp, Homo sapiens
tcatttcatcgtttt

SEQ ID NO: 554696 - DNA, 15 bp, Homo sapiens
catttcatcgttttg

SEQ ID NO: 554697 - DNA, 15 bp, Homo sapiens
atttcatcgttttgt

SEQ ID NO: 554698 - DNA, 15 bp, Homo sapiens
tttcatcgttttgtt

SEQ ID NO: 554699 - DNA, 15 bp, Homo sapiens
ttcatcgttttgttt

SEQ ID NO: 554700 - DNA, 15 bp, Homo sapiens
tcatcgttttgtttt

SEQ ID NO: 554701 - DNA, 15 bp, Homo sapiens
catcgttttgttttc

SEQ ID NO: 554702 - DNA, 15 bp, Homo sapiens
atcgttttgttttct

SEQ ID NO: 554703 - DNA, 15 bp, Homo sapiens
tcgttttgttttctt

SEQ ID NO: 554704 - DNA, 15 bp, Homo sapiens
cgttttgttttcttt

SEQ ID NO: 554705 - DNA, 15 bp, Homo sapiens
gttttgttttctttt

SEQ ID NO: 554706 - DNA, 15 bp, Homo sapiens
ttttgttttctttta

SEQ ID NO: 554707 - DNA, 15 bp, Homo sapiens
tttgttttcttttaa

SEQ ID NO: 554708 - DNA, 15 bp, Homo sapiens
ttgttttcttttaaa

SEQ ID NO: 554709 - DNA, 15 bp, Homo sapiens
tgttttcttttaaaa

SEQ ID NO: 554710 - DNA, 15 bp, Homo sapiens
gttttcttttaaaaa

SEQ ID NO: 554711 - DNA, 15 bp, Homo sapiens
ttttcttttaaaaat

SEQ ID NO: 554712 - DNA, 15 bp, Homo sapiens
tttcttttaaaaatc

SEQ ID NO: 554713 - DNA, 15 bp, Homo sapiens
ttcttttaaaaatct

SEQ ID NO: 554714 - DNA, 15 bp, Homo sapiens
tcttttaaaaatctg

SEQ ID NO: 554715 - DNA, 15 bp, Homo sapiens
cttttaaaaatctgg

SEQ ID NO: 554716 - DNA, 15 bp, Homo sapiens
ttttaaaaatctggc

SEQ ID NO: 554717 - DNA, 15 bp, Homo sapiens
tttaaaaatctggct

SEQ ID NO: 554718 - DNA, 15 bp, Homo sapiens
ttaaaaatctggcta

SEQ ID NO: 554719 - DNA, 15 bp, Homo sapiens
taaaaatctggctac

SEQ ID NO: 554720 - DNA, 15 bp, Homo sapiens
aaaaatctggctact

SEQ ID NO: 554721 - DNA, 15 bp, Homo sapiens
aaaatctggctacta

SEQ ID NO: 554722 - DNA, 15 bp, Homo sapiens
aaatctggctactag

SEQ ID NO: 554723 - DNA, 15 bp, Homo sapiens
aatctggctactagt

SEQ ID NO: 554724 - DNA, 15 bp, Homo sapiens
atctggctactagta

SEQ ID NO: 554725 - DNA, 15 bp, Homo sapiens
tctggctactagtaa

SEQ ID NO: 554726 - DNA, 15 bp, Homo sapiens
ctggctactagtaaa

SEQ ID NO: 554727 - DNA, 15 bp, Homo sapiens
tggctactagtaaat

SEQ ID NO: 554728 - DNA, 15 bp, Homo sapiens
ggctactagtaaatt

SEQ ID NO: 554729 - DNA, 15 bp, Homo sapiens
gctactagtaaattt

SEQ ID NO: 554730 - DNA, 15 bp, Homo sapiens
ctactagtaaattta

SEQ ID NO: 554731 - DNA, 15 bp, Homo sapiens
tactagtaaatttaa

SEQ ID NO: 554732 - DNA, 15 bp, Homo sapiens
actagtaaatttaaa

SEQ ID NO: 554733 - DNA, 15 bp, Homo sapiens
ctagtaaatttaaaa

SEQ ID NO: 554734 - DNA, 15 bp, Homo sapiens
tagtaaatttaaaat

SEQ ID NO: 554735 - DNA, 15 bp, Homo sapiens
agtaaatttaaaatt

SEQ ID NO: 554736 - DNA, 15 bp, Homo sapiens
gtaaatttaaaatta

SEQ ID NO: 554737 - DNA, 15 bp, Homo sapiens
taaatttaaaattat

SEQ ID NO: 554738 - DNA, 15 bp, Homo sapiens
aaatttaaaattatg

SEQ ID NO: 554739 - DNA, 15 bp, Homo sapiens
aatttaaaattatgt

SEQ ID NO: 554740 - DNA, 15 bp, Homo sapiens
atttaaaattatgta

SEQ ID NO: 554741 - DNA, 15 bp, Homo sapiens
tttaaaattatgtag

SEQ ID NO: 554742 - DNA, 15 bp, Homo sapiens
ttaaaattatgtagc

SEQ ID NO: 554743 - DNA, 15 bp, Homo sapiens
taaaattatgtagct

SEQ ID NO: 554744 - DNA, 15 bp, Homo sapiens
aaaattatgtagctc

SEQ ID NO: 554745 - DNA, 15 bp, Homo sapiens
aaattatgtagctcg

SEQ ID NO: 554746 - DNA, 15 bp, Homo sapiens
aattatgtagctcgg

SEQ ID NO: 554747 - DNA, 15 bp, Homo sapiens
attatgtagctcggc

SEQ ID NO: 554748 - DNA, 15 bp, Homo sapiens
ttatgtagctcggcc

SEQ ID NO: 554749 - DNA, 15 bp, Homo sapiens
tatgtagctcggcca

SEQ ID NO: 554750 - DNA, 15 bp, Homo sapiens
atgtagctcggccag

SEQ ID NO: 554751 - DNA, 15 bp, Homo sapiens
tgtagctcggccagg

SEQ ID NO: 554752 - DNA, 15 bp, Homo sapiens
gtagctcggccaggt

SEQ ID NO: 554753 - DNA, 15 bp, Homo sapiens
tagctcggccaggtg

SEQ ID NO: 554754 - DNA, 15 bp, Homo sapiens
agctcggccaggtgt

SEQ ID NO: 554755 - DNA, 15 bp, Homo sapiens
gctcggccaggtgtg

SEQ ID NO: 554756 - DNA, 15 bp, Homo sapiens
ctcggccaggtgtgg

SEQ ID NO: 554757 - DNA, 15 bp, Homo sapiens
tcggccaggtgtggt

SEQ ID NO: 554758 - DNA, 15 bp, Homo sapiens
cggccaggtgtggtg

SEQ ID NO: 554759 - DNA, 15 bp, Homo sapiens
ggccaggtgtggtgg

SEQ ID NO: 554760 - DNA, 15 bp, Homo sapiens
gccaggtgtggtggc

SEQ ID NO: 554761 - DNA, 15 bp, Homo sapiens
ccaggtgtggtggct

SEQ ID NO: 554762 - DNA, 15 bp, Homo sapiens
caggtgtggtggctc

SEQ ID NO: 554763 - DNA, 15 bp, Homo sapiens
aggtgtggtggctca

SEQ ID NO: 554764 - DNA, 15 bp, Homo sapiens
ggtgtggtggctcat

SEQ ID NO: 554765 - DNA, 15 bp, Homo sapiens
gtgtggtggctcatg

SEQ ID NO: 554766 - DNA, 15 bp, Homo sapiens
tgtggtggctcatgc

SEQ ID NO: 554767 - DNA, 15 bp, Homo sapiens
gtggtggctcatgcc

SEQ ID NO: 554768 - DNA, 15 bp, Homo sapiens
ggaggccaaggcggc

SEQ ID NO: 554769 - DNA, 15 bp, Homo sapiens
gaggccaaggcggcg

SEQ ID NO: 554770 - DNA, 15 bp, Homo sapiens
aggccaaggcggcgg

SEQ ID NO: 554771 - DNA, 15 bp, Homo sapiens
ggccaaggcggcgga

SEQ ID NO: 554772 - DNA, 15 bp, Homo sapiens
gccaaggcggcggat

SEQ ID NO: 554773 - DNA, 15 bp, Homo sapiens
ccaaggcggcggatc

SEQ ID NO: 554774 - DNA, 15 bp, Homo sapiens
caaggcggcggatca

SEQ ID NO: 554775 - DNA, 15 bp, Homo sapiens
aaggcggcggatcac

SEQ ID NO: 554776 - DNA, 15 bp, Homo sapiens
aggcggcggatcacc

SEQ ID NO: 554777 - DNA, 15 bp, Homo sapiens
ggcggcggatcacct

SEQ ID NO: 554778 - DNA, 15 bp, Homo sapiens
gcggcggatcacctg

SEQ ID NO: 554779 - DNA, 15 bp, Homo sapiens
cggcggatcacctga

SEQ ID NO: 554780 - DNA, 15 bp, Homo sapiens
ggcggatcacctgag

SEQ ID NO: 554781 - DNA, 15 bp, Homo sapiens
gcggatcacctgagg

SEQ ID NO: 554782 - DNA, 15 bp, Homo sapiens
cggatcacctgaggt

SEQ ID NO: 554783 - DNA, 15 bp, Homo sapiens
gatcacctgaggtcg

SEQ ID NO: 554784 - DNA, 15 bp, Homo sapiens
atcacctgaggtcgg

SEQ ID NO: 554785 - DNA, 15 bp, Homo sapiens
tcacctgaggtcggg

SEQ ID NO: 554786 - DNA, 15 bp, Homo sapiens
cacctgaggtcggga

SEQ ID NO: 554787 - DNA, 15 bp, Homo sapiens
acctgaggtcgggag

SEQ ID NO: 554788 - DNA, 15 bp, Homo sapiens
cctgaggtcgggagt

SEQ ID NO: 554789 - DNA, 15 bp, Homo sapiens
ctgaggtcgggagtt

SEQ ID NO: 554790 - DNA, 15 bp, Homo sapiens
tgaggtcgggagttc

SEQ ID NO: 554791 - DNA, 15 bp, Homo sapiens
gaggtcgggagttcg

SEQ ID NO: 554792 - DNA, 15 bp, Homo sapiens
aggtcgggagttcga

SEQ ID NO: 554793 - DNA, 15 bp, Homo sapiens
ggtcgggagttcgag

SEQ ID NO: 554794 - DNA, 15 bp, Homo sapiens
gtcgggagttcgaga

SEQ ID NO: 554795 - DNA, 15 bp, Homo sapiens
tcgggagttcgagac

SEQ ID NO: 554796 - DNA, 15 bp, Homo sapiens
cgggagttcgagacc

SEQ ID NO: 554797 - DNA, 15 bp, Homo sapiens
gggagttcgagacca

SEQ ID NO: 554798 - DNA, 15 bp, Homo sapiens
ggagttcgagaccag

SEQ ID NO: 554799 - DNA, 15 bp, Homo sapiens
gagttcgagaccagc

SEQ ID NO: 554800 - DNA, 15 bp, Homo sapiens
agttcgagaccagcc

SEQ ID NO: 554801 - DNA, 15 bp, Homo sapiens
gttcgagaccagcct

SEQ ID NO: 554802 - DNA, 15 bp, Homo sapiens
ttcgagaccagcctg

SEQ ID NO: 554803 - DNA, 15 bp, Homo sapiens
tcgagaccagcctgg

SEQ ID NO: 554804 - DNA, 15 bp, Homo sapiens
cgagaccagcctggc

SEQ ID NO: 554805 - DNA, 15 bp, Homo sapiens
gagaccagcctggcc

SEQ ID NO: 554806 - DNA, 15 bp, Homo sapiens
accagcctggccaac

SEQ ID NO: 554807 - DNA, 15 bp, Homo sapiens
ccagcctggccaaca

SEQ ID NO: 554808 - DNA, 15 bp, Homo sapiens
gaaaccctgtctctg

SEQ ID NO: 554809 - DNA, 15 bp, Homo sapiens
aaaccctgtctctgc

SEQ ID NO: 554810 - DNA, 15 bp, Homo sapiens
aaccctgtctctgct

SEQ ID NO: 554811 - DNA, 15 bp, Homo sapiens
accctgtctctgctg

SEQ ID NO: 554812 - DNA, 15 bp, Homo sapiens
ccctgtctctgctga

SEQ ID NO: 554813 - DNA, 15 bp, Homo sapiens
cctgtctctgctgaa

SEQ ID NO: 554814 - DNA, 15 bp, Homo sapiens
ctgtctctgctgaaa

SEQ ID NO: 554815 - DNA, 15 bp, Homo sapiens
tgtctctgctgaaaa

SEQ ID NO: 554816 - DNA, 15 bp, Homo sapiens
gtctctgctgaaaat

SEQ ID NO: 554817 - DNA, 15 bp, Homo sapiens
tctctgctgaaaata

SEQ ID NO: 554818 - DNA, 15 bp, Homo sapiens
ctctgctgaaaatac

SEQ ID NO: 554819 - DNA, 15 bp, Homo sapiens
tctgctgaaaataca

SEQ ID NO: 554820 - DNA, 15 bp, Homo sapiens
ctgctgaaaatacaa

SEQ ID NO: 554821 - DNA, 15 bp, Homo sapiens
tgctgaaaatacaaa

SEQ ID NO: 554822 - DNA, 15 bp, Homo sapiens
gctgaaaatacaaaa

SEQ ID NO: 554823 - DNA, 15 bp, Homo sapiens
ctgaaaatacaaaat

SEQ ID NO: 554824 - DNA, 15 bp, Homo sapiens
tgaaaatacaaaatt

SEQ ID NO: 554825 - DNA, 15 bp, Homo sapiens
gaaaatacaaaatta

SEQ ID NO: 554826 - DNA, 15 bp, Homo sapiens
aaaatacaaaattag

SEQ ID NO: 554827 - DNA, 15 bp, Homo sapiens
aaatacaaaattagc

SEQ ID NO: 554828 - DNA, 15 bp, Homo sapiens
aatacaaaattagcc

SEQ ID NO: 554829 - DNA, 15 bp, Homo sapiens
atacaaaattagcct

SEQ ID NO: 554830 - DNA, 15 bp, Homo sapiens
tacaaaattagcctg

SEQ ID NO: 554831 - DNA, 15 bp, Homo sapiens
acaaaattagcctgg

SEQ ID NO: 554832 - DNA, 15 bp, Homo sapiens
caaaattagcctggc

SEQ ID NO: 554833 - DNA, 15 bp, Homo sapiens
aaaattagcctggca

SEQ ID NO: 554834 - DNA, 15 bp, Homo sapiens
aaattagcctggcat

SEQ ID NO: 554835 - DNA, 15 bp, Homo sapiens
aattagcctggcatg

SEQ ID NO: 554836 - DNA, 15 bp, Homo sapiens
attagcctggcatgg

SEQ ID NO: 554837 - DNA, 15 bp, Homo sapiens
ttagcctggcatggt

SEQ ID NO: 554838 - DNA, 15 bp, Homo sapiens
tagcctggcatggtg

SEQ ID NO: 554839 - DNA, 15 bp, Homo sapiens
agcctggcatggtgg

SEQ ID NO: 554840 - DNA, 15 bp, Homo sapiens
gcctggcatggtggc

SEQ ID NO: 554841 - DNA, 15 bp, Homo sapiens
cctggcatggtggcg

SEQ ID NO: 554842 - DNA, 15 bp, Homo sapiens
ctggcatggtggcgc

SEQ ID NO: 554843 - DNA, 15 bp, Homo sapiens
tggcatggtggcgca

SEQ ID NO: 554844 - DNA, 15 bp, Homo sapiens
ggcatggtggcgcat

SEQ ID NO: 554845 - DNA, 15 bp, Homo sapiens
gcatggtggcgcatg

SEQ ID NO: 554846 - DNA, 15 bp, Homo sapiens
catggtggcgcatgc

SEQ ID NO: 554847 - DNA, 15 bp, Homo sapiens
atggtggcgcatgcc

SEQ ID NO: 554848 - DNA, 15 bp, Homo sapiens
tggtggcgcatgcct

SEQ ID NO: 554849 - DNA, 15 bp, Homo sapiens
ggtggcgcatgcctg

SEQ ID NO: 554850 - DNA, 15 bp, Homo sapiens
gtggcgcatgcctgt

SEQ ID NO: 554851 - DNA, 15 bp, Homo sapiens
tggcgcatgcctgta

SEQ ID NO: 554852 - DNA, 15 bp, Homo sapiens
ggcgcatgcctgtaa

SEQ ID NO: 554853 - DNA, 15 bp, Homo sapiens
gcgcatgcctgtaat

SEQ ID NO: 554854 - DNA, 15 bp, Homo sapiens
cgcatgcctgtaatc

SEQ ID NO: 554855 - DNA, 15 bp, Homo sapiens
gcatgcctgtaatcc

SEQ ID NO: 554856 - DNA, 15 bp, Homo sapiens
tgcctgtaatcccac

SEQ ID NO: 554857 - DNA, 15 bp, Homo sapiens
gcctgtaatcccacc

SEQ ID NO: 554858 - DNA, 15 bp, Homo sapiens
cctgtaatcccacct

SEQ ID NO: 554859 - DNA, 15 bp, Homo sapiens
ctgtaatcccaccta

SEQ ID NO: 554860 - DNA, 15 bp, Homo sapiens
tgtaatcccacctac

SEQ ID NO: 554861 - DNA, 15 bp, Homo sapiens
gtaatcccacctact

SEQ ID NO: 554862 - DNA, 15 bp, Homo sapiens
taatcccacctactc

SEQ ID NO: 554863 - DNA, 15 bp, Homo sapiens
aatcccacctactca

SEQ ID NO: 554864 - DNA, 15 bp, Homo sapiens
atcccacctactcag

SEQ ID NO: 554865 - DNA, 15 bp, Homo sapiens
tcccacctactcagg

SEQ ID NO: 554866 - DNA, 15 bp, Homo sapiens
cccacctactcagga

SEQ ID NO: 554867 - DNA, 15 bp, Homo sapiens
ccacctactcaggag

SEQ ID NO: 554868 - DNA, 15 bp, Homo sapiens
cacctactcaggagg

SEQ ID NO: 554869 - DNA, 15 bp, Homo sapiens
acctactcaggaggc

SEQ ID NO: 554870 - DNA, 15 bp, Homo sapiens
cctactcaggaggct

SEQ ID NO: 554871 - DNA, 15 bp, Homo sapiens
gaggcaggagaattg

SEQ ID NO: 554872 - DNA, 15 bp, Homo sapiens
aggcaggagaattgc

SEQ ID NO: 554873 - DNA, 15 bp, Homo sapiens
ggcaggagaattgct

SEQ ID NO: 554874 - DNA, 15 bp, Homo sapiens
gcaggagaattgctt

SEQ ID NO: 554875 - DNA, 15 bp, Homo sapiens
caggagaattgcttg

SEQ ID NO: 554876 - DNA, 15 bp, Homo sapiens
aggagaattgcttga

SEQ ID NO: 554877 - DNA, 15 bp, Homo sapiens
ggagaattgcttgaa

SEQ ID NO: 554878 - DNA, 15 bp, Homo sapiens
gagaattgcttgaat

SEQ ID NO: 554879 - DNA, 15 bp, Homo sapiens
agaattgcttgaatc

SEQ ID NO: 554880 - DNA, 15 bp, Homo sapiens
gaattgcttgaatct

SEQ ID NO: 554881 - DNA, 15 bp, Homo sapiens
aattgcttgaatctg

SEQ ID NO: 554882 - DNA, 15 bp, Homo sapiens
attgcttgaatctgg

SEQ ID NO: 554883 - DNA, 15 bp, Homo sapiens
ttgcttgaatctggg

SEQ ID NO: 554884 - DNA, 15 bp, Homo sapiens
tgcttgaatctggga

SEQ ID NO: 554885 - DNA, 15 bp, Homo sapiens
gcttgaatctgggag

SEQ ID NO: 554886 - DNA, 15 bp, Homo sapiens
cttgaatctgggaga

SEQ ID NO: 554887 - DNA, 15 bp, Homo sapiens
ttgaatctgggagac

SEQ ID NO: 554888 - DNA, 15 bp, Homo sapiens
tgaatctgggagacg

SEQ ID NO: 554889 - DNA, 15 bp, Homo sapiens
gaatctgggagacgg

SEQ ID NO: 554890 - DNA, 15 bp, Homo sapiens
aatctgggagacgga

SEQ ID NO: 554891 - DNA, 15 bp, Homo sapiens
atctgggagacggag

SEQ ID NO: 554892 - DNA, 15 bp, Homo sapiens
tctgggagacggagg

SEQ ID NO: 554893 - DNA, 15 bp, Homo sapiens
ctgggagacggaggt

SEQ ID NO: 554894 - DNA, 15 bp, Homo sapiens
tgggagacggaggtt

SEQ ID NO: 554895 - DNA, 15 bp, Homo sapiens
gggagacggaggttg

SEQ ID NO: 554896 - DNA, 15 bp, Homo sapiens
ggagacggaggttgc

SEQ ID NO: 554897 - DNA, 15 bp, Homo sapiens
gagacggaggttgct

SEQ ID NO: 554898 - DNA, 15 bp, Homo sapiens
agacggaggttgctg

SEQ ID NO: 554899 - DNA, 15 bp, Homo sapiens
gacggaggttgctgt

SEQ ID NO: 554900 - DNA, 15 bp, Homo sapiens
acggaggttgctgtg

SEQ ID NO: 554901 - DNA, 15 bp, Homo sapiens
cggaggttgctgtga

SEQ ID NO: 554902 - DNA, 15 bp, Homo sapiens
ggaggttgctgtgag

SEQ ID NO: 554903 - DNA, 15 bp, Homo sapiens
gaggttgctgtgagc

SEQ ID NO: 554904 - DNA, 15 bp, Homo sapiens
aggttgctgtgagcc

SEQ ID NO: 554905 - DNA, 15 bp, Homo sapiens
ggttgctgtgagccg

SEQ ID NO: 554906 - DNA, 15 bp, Homo sapiens
gttgctgtgagccga

SEQ ID NO: 554907 - DNA, 15 bp, Homo sapiens
ttgctgtgagccgag

SEQ ID NO: 554908 - DNA, 15 bp, Homo sapiens
tgctgtgagccgaga

SEQ ID NO: 554909 - DNA, 15 bp, Homo sapiens
gctgtgagccgagat

SEQ ID NO: 554910 - DNA, 15 bp, Homo sapiens
ctgtgagccgagatc

SEQ ID NO: 554911 - DNA, 15 bp, Homo sapiens
tgtgagccgagatca

SEQ ID NO: 554912 - DNA, 15 bp, Homo sapiens
gtgagccgagatcat

SEQ ID NO: 554913 - DNA, 15 bp, Homo sapiens
tgagccgagatcatg

SEQ ID NO: 554914 - DNA, 15 bp, Homo sapiens
gagccgagatcatgc

SEQ ID NO: 554915 - DNA, 15 bp, Homo sapiens
agccgagatcatgcc

SEQ ID NO: 554916 - DNA, 15 bp, Homo sapiens
gccgagatcatgcca

SEQ ID NO: 554917 - DNA, 15 bp, Homo sapiens
ccgagatcatgccac

SEQ ID NO: 554918 - DNA, 15 bp, Homo sapiens
cgagatcatgccact

SEQ ID NO: 554919 - DNA, 15 bp, Homo sapiens
gagatcatgccactg

SEQ ID NO: 554920 - DNA, 15 bp, Homo sapiens
agatcatgccactgg

SEQ ID NO: 554921 - DNA, 15 bp, Homo sapiens
gatcatgccactgga

SEQ ID NO: 554922 - DNA, 15 bp, Homo sapiens
atcatgccactggac

SEQ ID NO: 554923 - DNA, 15 bp, Homo sapiens
tcatgccactggact

SEQ ID NO: 554924 - DNA, 15 bp, Homo sapiens
catgccactggactc

SEQ ID NO: 554925 - DNA, 15 bp, Homo sapiens
atgccactggactcc

SEQ ID NO: 554926 - DNA, 15 bp, Homo sapiens
tgccactggactccg

SEQ ID NO: 554927 - DNA, 15 bp, Homo sapiens
gccactggactccgg

SEQ ID NO: 554928 - DNA, 15 bp, Homo sapiens
ccactggactccggt

SEQ ID NO: 554929 - DNA, 15 bp, Homo sapiens
cactggactccggtc

SEQ ID NO: 554930 - DNA, 15 bp, Homo sapiens
actggactccggtct

SEQ ID NO: 554931 - DNA, 15 bp, Homo sapiens
ctggactccggtctg

SEQ ID NO: 554932 - DNA, 15 bp, Homo sapiens
tggactccggtctgg

SEQ ID NO: 554933 - DNA, 15 bp, Homo sapiens
ggactccggtctggg

SEQ ID NO: 554934 - DNA, 15 bp, Homo sapiens
gactccggtctgggc

SEQ ID NO: 554935 - DNA, 15 bp, Homo sapiens
actccggtctgggca

SEQ ID NO: 554936 - DNA, 15 bp, Homo sapiens
ctccggtctgggcaa

SEQ ID NO: 554937 - DNA, 15 bp, Homo sapiens
tccggtctgggcaac

SEQ ID NO: 554938 - DNA, 15 bp, Homo sapiens
ccggtctgggcaaca

SEQ ID NO: 554939 - DNA, 15 bp, Homo sapiens
cggtctgggcaacaa

SEQ ID NO: 554940 - DNA, 15 bp, Homo sapiens
ggtctgggcaacaaa

SEQ ID NO: 554941 - DNA, 15 bp, Homo sapiens
gtctgggcaacaaaa

SEQ ID NO: 554942 - DNA, 15 bp, Homo sapiens
tctgggcaacaaaag

SEQ ID NO: 554943 - DNA, 15 bp, Homo sapiens
ctgggcaacaaaagt

SEQ ID NO: 554944 - DNA, 15 bp, Homo sapiens
tgggcaacaaaagtg

SEQ ID NO: 554945 - DNA, 15 bp, Homo sapiens
gggcaacaaaagtga

SEQ ID NO: 554946 - DNA, 15 bp, Homo sapiens
ggcaacaaaagtgaa

SEQ ID NO: 554947 - DNA, 15 bp, Homo sapiens
gcaacaaaagtgaaa

SEQ ID NO: 554948 - DNA, 15 bp, Homo sapiens
caacaaaagtgaaac

SEQ ID NO: 554949 - DNA, 15 bp, Homo sapiens
aacaaaagtgaaaca

SEQ ID NO: 554950 - DNA, 15 bp, Homo sapiens
acaaaagtgaaacac

SEQ ID NO: 554951 - DNA, 15 bp, Homo sapiens
caaaagtgaaacacc

SEQ ID NO: 554952 - DNA, 15 bp, Homo sapiens
aaaagtgaaacacca

SEQ ID NO: 554953 - DNA, 15 bp, Homo sapiens
aaagtgaaacaccat

SEQ ID NO: 554954 - DNA, 15 bp, Homo sapiens
aagtgaaacaccatc

SEQ ID NO: 554955 - DNA, 15 bp, Homo sapiens
agtgaaacaccatct

SEQ ID NO: 554956 - DNA, 15 bp, Homo sapiens
gtgaaacaccatctc

SEQ ID NO: 554957 - DNA, 15 bp, Homo sapiens
tgaaacaccatctca

SEQ ID NO: 554958 - DNA, 15 bp, Homo sapiens
gaaacaccatctcaa

SEQ ID NO: 554959 - DNA, 15 bp, Homo sapiens
aaacaccatctcaaa

SEQ ID NO: 554960 - DNA, 15 bp, Homo sapiens
aacaccatctcaaaa

SEQ ID NO: 554961 - DNA, 15 bp, Homo sapiens
acaccatctcaaaaa

SEQ ID NO: 554962 - DNA, 15 bp, Homo sapiens
caccatctcaaaaaa

SEQ ID NO: 554963 - DNA, 15 bp, Homo sapiens
accatctcaaaaaaa

SEQ ID NO: 554964 - DNA, 15 bp, Homo sapiens
aaaaaaaaaaaaaat

SEQ ID NO: 554965 - DNA, 15 bp, Homo sapiens
aaaaaaaaaaaaatt

SEQ ID NO: 554966 - DNA, 15 bp, Homo sapiens
aaaaaaaaaaaatta

SEQ ID NO: 554967 - DNA, 15 bp, Homo sapiens
aaaaaaaaaaattat

SEQ ID NO: 554968 - DNA, 15 bp, Homo sapiens
aaaaaaaaaattatg

SEQ ID NO: 554969 - DNA, 15 bp, Homo sapiens
aaaaaaaaattatgt

SEQ ID NO: 554970 - DNA, 15 bp, Homo sapiens
aaaaaaaattatgta

SEQ ID NO: 554971 - DNA, 15 bp, Homo sapiens
aaaaaaattatgtag

SEQ ID NO: 554972 - DNA, 15 bp, Homo sapiens
aaaaaattatgtagt

SEQ ID NO: 554973 - DNA, 15 bp, Homo sapiens
aaaaattatgtagtt

SEQ ID NO: 554974 - DNA, 15 bp, Homo sapiens
aaaattatgtagttc

SEQ ID NO: 554975 - DNA, 15 bp, Homo sapiens
aaattatgtagttcg

SEQ ID NO: 554976 - DNA, 15 bp, Homo sapiens
aattatgtagttcgc

SEQ ID NO: 554977 - DNA, 15 bp, Homo sapiens
attatgtagttcgca

SEQ ID NO: 554978 - DNA, 15 bp, Homo sapiens
ttatgtagttcgcac

SEQ ID NO: 554979 - DNA, 15 bp, Homo sapiens
tatgtagttcgcaca

SEQ ID NO: 554980 - DNA, 15 bp, Homo sapiens
atgtagttcgcacat

SEQ ID NO: 554981 - DNA, 15 bp, Homo sapiens
tgtagttcgcacatg

SEQ ID NO: 554982 - DNA, 15 bp, Homo sapiens
gtagttcgcacatgt

SEQ ID NO: 554983 - DNA, 15 bp, Homo sapiens
tagttcgcacatgtg

SEQ ID NO: 554984 - DNA, 15 bp, Homo sapiens
agttcgcacatgtgg

SEQ ID NO: 554985 - DNA, 15 bp, Homo sapiens
gttcgcacatgtggt

SEQ ID NO: 554986 - DNA, 15 bp, Homo sapiens
ttcgcacatgtggtt

SEQ ID NO: 554987 - DNA, 15 bp, Homo sapiens
tcgcacatgtggttc

SEQ ID NO: 554988 - DNA, 15 bp, Homo sapiens
cgcacatgtggttcc

SEQ ID NO: 554989 - DNA, 15 bp, Homo sapiens
gcacatgtggttccc

SEQ ID NO: 554990 - DNA, 15 bp, Homo sapiens
cacatgtggttccca

SEQ ID NO: 554991 - DNA, 15 bp, Homo sapiens
acatgtggttcccat

SEQ ID NO: 554992 - DNA, 15 bp, Homo sapiens
catgtggttcccatt

SEQ ID NO: 554993 - DNA, 15 bp, Homo sapiens
atgtggttcccattc

SEQ ID NO: 554994 - DNA, 15 bp, Homo sapiens
tgtggttcccattct

SEQ ID NO: 554995 - DNA, 15 bp, Homo sapiens
gtggttcccattcta

SEQ ID NO: 554996 - DNA, 15 bp, Homo sapiens
tggttcccattctac

SEQ ID NO: 554997 - DNA, 15 bp, Homo sapiens
ggttcccattctact

SEQ ID NO: 554998 - DNA, 15 bp, Homo sapiens
gttcccattctactt

SEQ ID NO: 554999 - DNA, 15 bp, Homo sapiens
ttcccattctacttc

SEQ ID NO: 555000 - DNA, 15 bp, Homo sapiens
tcccattctacttct

SEQ ID NO: 555001 - DNA, 15 bp, Homo sapiens
cccattctacttcta

SEQ ID NO: 555002 - DNA, 15 bp, Homo sapiens
ccattctacttctat

SEQ ID NO: 555003 - DNA, 15 bp, Homo sapiens
cattctacttctatt

SEQ ID NO: 555004 - DNA, 15 bp, Homo sapiens
attctacttctattg

SEQ ID NO: 555005 - DNA, 15 bp, Homo sapiens
ttctacttctattgg

SEQ ID NO: 555006 - DNA, 15 bp, Homo sapiens
tctacttctattgga

SEQ ID NO: 555007 - DNA, 15 bp, Homo sapiens
ctacttctattggac

SEQ ID NO: 555008 - DNA, 15 bp, Homo sapiens
tacttctattggaca

SEQ ID NO: 555009 - DNA, 15 bp, Homo sapiens
acttctattggacag

SEQ ID NO: 555010 - DNA, 15 bp, Homo sapiens
cttctattggacagt

SEQ ID NO: 555011 - DNA, 15 bp, Homo sapiens
ttctattggacagtg

SEQ ID NO: 555012 - DNA, 15 bp, Homo sapiens
tctattggacagtgc

SEQ ID NO: 555013 - DNA, 15 bp, Homo sapiens
ctattggacagtgct

SEQ ID NO: 555014 - DNA, 15 bp, Homo sapiens
tattggacagtgctg

SEQ ID NO: 555015 - DNA, 15 bp, Homo sapiens
attggacagtgctgg

SEQ ID NO: 555016 - DNA, 15 bp, Homo sapiens
ttggacagtgctggg

SEQ ID NO: 555017 - DNA, 15 bp, Homo sapiens
tggacagtgctgggc

SEQ ID NO: 555018 - DNA, 15 bp, Homo sapiens
ggacagtgctgggcc

SEQ ID NO: 555019 - DNA, 15 bp, Homo sapiens
gacagtgctgggcca

SEQ ID NO: 555020 - DNA, 15 bp, Homo sapiens
acagtgctgggccat

SEQ ID NO: 555021 - DNA, 15 bp, Homo sapiens
cagtgctgggccatg

SEQ ID NO: 555022 - DNA, 15 bp, Homo sapiens
agtgctgggccatgg

SEQ ID NO: 555023 - DNA, 15 bp, Homo sapiens
gtgctgggccatggt

SEQ ID NO: 555024 - DNA, 15 bp, Homo sapiens
tgctgggccatggtg

SEQ ID NO: 555025 - DNA, 15 bp, Homo sapiens
gctgggccatggtgg

SEQ ID NO: 555026 - DNA, 15 bp, Homo sapiens
ctgggccatggtggt

SEQ ID NO: 555027 - DNA, 15 bp, Homo sapiens
tgggccatggtggtc

SEQ ID NO: 555028 - DNA, 15 bp, Homo sapiens
gggccatggtggtct

SEQ ID NO: 555029 - DNA, 15 bp, Homo sapiens
ggccatggtggtctg

SEQ ID NO: 555030 - DNA, 15 bp, Homo sapiens
gccatggtggtctgg

SEQ ID NO: 555031 - DNA, 15 bp, Homo sapiens
ccatggtggtctgga

SEQ ID NO: 555032 - DNA, 15 bp, Homo sapiens
catggtggtctggac

SEQ ID NO: 555033 - DNA, 15 bp, Homo sapiens
atggtggtctggact

SEQ ID NO: 555034 - DNA, 15 bp, Homo sapiens
tggtggtctggactg

SEQ ID NO: 555035 - DNA, 15 bp, Homo sapiens
ggtggtctggactgt

SEQ ID NO: 555036 - DNA, 15 bp, Homo sapiens
gtggtctggactgtt

SEQ ID NO: 555037 - DNA, 15 bp, Homo sapiens
tggtctggactgttc

SEQ ID NO: 555038 - DNA, 15 bp, Homo sapiens
ggtctggactgttct

SEQ ID NO: 555039 - DNA, 15 bp, Homo sapiens
gtctggactgttctg

SEQ ID NO: 555040 - DNA, 15 bp, Homo sapiens
tctggactgttctgt

SEQ ID NO: 555041 - DNA, 15 bp, Homo sapiens
ctggactgttctgtg

SEQ ID NO: 555042 - DNA, 15 bp, Homo sapiens
tggactgttctgtga

SEQ ID NO: 555043 - DNA, 15 bp, Homo sapiens
ggactgttctgtgat

SEQ ID NO: 555044 - DNA, 15 bp, Homo sapiens
gactgttctgtgatt

SEQ ID NO: 555045 - DNA, 15 bp, Homo sapiens
actgttctgtgattc

SEQ ID NO: 555046 - DNA, 15 bp, Homo sapiens
ctgttctgtgattca

SEQ ID NO: 555047 - DNA, 15 bp, Homo sapiens
tgttctgtgattcac

SEQ ID NO: 555048 - DNA, 15 bp, Homo sapiens
gttctgtgattcaca

SEQ ID NO: 555049 - DNA, 15 bp, Homo sapiens
ttctgtgattcacag

SEQ ID NO: 555050 - DNA, 15 bp, Homo sapiens
tctgtgattcacagt

SEQ ID NO: 555051 - DNA, 15 bp, Homo sapiens
ctgtgattcacagtg

SEQ ID NO: 555052 - DNA, 15 bp, Homo sapiens
tgtgattcacagtgc

SEQ ID NO: 555053 - DNA, 15 bp, Homo sapiens
gtgattcacagtgca

SEQ ID NO: 555054 - DNA, 15 bp, Homo sapiens
tgattcacagtgcat

SEQ ID NO: 555055 - DNA, 15 bp, Homo sapiens
gattcacagtgcatt

SEQ ID NO: 555056 - DNA, 15 bp, Homo sapiens
attcacagtgcattt

SEQ ID NO: 555057 - DNA, 15 bp, Homo sapiens
ttcacagtgcatttt

SEQ ID NO: 555058 - DNA, 15 bp, Homo sapiens
tcacagtgcattttt

SEQ ID NO: 555059 - DNA, 15 bp, Homo sapiens
cacagtgcatttttt

SEQ ID NO: 555060 - DNA, 15 bp, Homo sapiens
acagtgcattttttc

SEQ ID NO: 555061 - DNA, 15 bp, Homo sapiens
cagtgcattttttct

SEQ ID NO: 555062 - DNA, 15 bp, Homo sapiens
agtgcattttttctg

SEQ ID NO: 555063 - DNA, 15 bp, Homo sapiens
gtgcattttttctgc

SEQ ID NO: 555064 - DNA, 15 bp, Homo sapiens
tgcattttttctgca

SEQ ID NO: 555065 - DNA, 15 bp, Homo sapiens
gcattttttctgcat

SEQ ID NO: 555066 - DNA, 15 bp, Homo sapiens
cattttttctgcatt

SEQ ID NO: 555067 - DNA, 15 bp, Homo sapiens
attttttctgcattc

SEQ ID NO: 555068 - DNA, 15 bp, Homo sapiens
ttttttctgcattcc

SEQ ID NO: 555069 - DNA, 15 bp, Homo sapiens
tttttctgcattcct

SEQ ID NO: 555070 - DNA, 15 bp, Homo sapiens
ttttctgcattcctt

SEQ ID NO: 555071 - DNA, 15 bp, Homo sapiens
tttctgcattccttg

SEQ ID NO: 555072 - DNA, 15 bp, Homo sapiens
ttctgcattccttga

SEQ ID NO: 555073 - DNA, 15 bp, Homo sapiens
tctgcattccttgac

SEQ ID NO: 555074 - DNA, 15 bp, Homo sapiens
ctgcattccttgaca

SEQ ID NO: 555075 - DNA, 15 bp, Homo sapiens
tgcattccttgacag

SEQ ID NO: 555076 - DNA, 15 bp, Homo sapiens
gcattccttgacagc

SEQ ID NO: 555077 - DNA, 15 bp, Homo sapiens
cattccttgacagca

SEQ ID NO: 555078 - DNA, 15 bp, Homo sapiens
attccttgacagcat

SEQ ID NO: 555079 - DNA, 15 bp, Homo sapiens
ttccttgacagcatg

SEQ ID NO: 555080 - DNA, 15 bp, Homo sapiens
tccttgacagcatgg

SEQ ID NO: 555081 - DNA, 15 bp, Homo sapiens
ccttgacagcatggg

SEQ ID NO: 555082 - DNA, 15 bp, Homo sapiens
cttgacagcatgggc

SEQ ID NO: 555083 - DNA, 15 bp, Homo sapiens
ttgacagcatgggct

SEQ ID NO: 555084 - DNA, 15 bp, Homo sapiens
tgacagcatgggctt

SEQ ID NO: 555085 - DNA, 15 bp, Homo sapiens
gacagcatgggcttc

SEQ ID NO: 555086 - DNA, 15 bp, Homo sapiens
acagcatgggcttct

SEQ ID NO: 555087 - DNA, 15 bp, Homo sapiens
cagcatgggcttctg

SEQ ID NO: 555088 - DNA, 15 bp, Homo sapiens
agcatgggcttctga

SEQ ID NO: 555089 - DNA, 15 bp, Homo sapiens
tgggcttctgagtta

SEQ ID NO: 555090 - DNA, 15 bp, Homo sapiens
gggcttctgagttat

SEQ ID NO: 555091 - DNA, 15 bp, Homo sapiens
ggcttctgagttatg

SEQ ID NO: 555092 - DNA, 15 bp, Homo sapiens
gcttctgagttatgt

SEQ ID NO: 555093 - DNA, 15 bp, Homo sapiens
cttctgagttatgtc

SEQ ID NO: 555094 - DNA, 15 bp, Homo sapiens
ttctgagttatgtct

SEQ ID NO: 555095 - DNA, 15 bp, Homo sapiens
tctgagttatgtctt

SEQ ID NO: 555096 - DNA, 15 bp, Homo sapiens
ctgagttatgtcttc

SEQ ID NO: 555097 - DNA, 15 bp, Homo sapiens
tgagttatgtcttca

SEQ ID NO: 555098 - DNA, 15 bp, Homo sapiens
gagttatgtcttcat

SEQ ID NO: 555099 - DNA, 15 bp, Homo sapiens
agttatgtcttcatg

SEQ ID NO: 555100 - DNA, 15 bp, Homo sapiens
gttatgtcttcatgc

SEQ ID NO: 555101 - DNA, 15 bp, Homo sapiens
ttatgtcttcatgct

SEQ ID NO: 555102 - DNA, 15 bp, Homo sapiens
tatgtcttcatgctc

SEQ ID NO: 555103 - DNA, 15 bp, Homo sapiens
atgtcttcatgctca

SEQ ID NO: 555104 - DNA, 15 bp, Homo sapiens
tgtcttcatgctcac

SEQ ID NO: 555105 - DNA, 15 bp, Homo sapiens
gtcttcatgctcact

SEQ ID NO: 555106 - DNA, 15 bp, Homo sapiens
tcttcatgctcactg

SEQ ID NO: 555107 - DNA, 15 bp, Homo sapiens
cttcatgctcactgg

SEQ ID NO: 555108 - DNA, 15 bp, Homo sapiens
ttcatgctcactgga

SEQ ID NO: 555109 - DNA, 15 bp, Homo sapiens
tcatgctcactggag

SEQ ID NO: 555110 - DNA, 15 bp, Homo sapiens
catgctcactggaga

SEQ ID NO: 555111 - DNA, 15 bp, Homo sapiens
atgctcactggagac

SEQ ID NO: 555112 - DNA, 15 bp, Homo sapiens
tgctcactggagacc

SEQ ID NO: 555113 - DNA, 15 bp, Homo sapiens
gctcactggagaccc

SEQ ID NO: 555114 - DNA, 15 bp, Homo sapiens
ctcactggagaccca

SEQ ID NO: 555115 - DNA, 15 bp, Homo sapiens
tcactggagacccat

SEQ ID NO: 555116 - DNA, 15 bp, Homo sapiens
cactggagacccatt

SEQ ID NO: 555117 - DNA, 15 bp, Homo sapiens
actggagacccattg

SEQ ID NO: 555118 - DNA, 15 bp, Homo sapiens
ctggagacccattgg

SEQ ID NO: 555119 - DNA, 15 bp, Homo sapiens
tggagacccattggc

SEQ ID NO: 555120 - DNA, 15 bp, Homo sapiens
ggagacccattggca

SEQ ID NO: 555121 - DNA, 15 bp, Homo sapiens
gagacccattggcat

SEQ ID NO: 555122 - DNA, 15 bp, Homo sapiens
agacccattggcatt

SEQ ID NO: 555123 - DNA, 15 bp, Homo sapiens
gacccattggcattt

SEQ ID NO: 555124 - DNA, 15 bp, Homo sapiens
acccattggcatttg

SEQ ID NO: 555125 - DNA, 15 bp, Homo sapiens
cccattggcatttgt

SEQ ID NO: 555126 - DNA, 15 bp, Homo sapiens
ccattggcatttgtg

SEQ ID NO: 555127 - DNA, 15 bp, Homo sapiens
cattggcatttgtgt

SEQ ID NO: 555128 - DNA, 15 bp, Homo sapiens
attggcatttgtgtc

SEQ ID NO: 555129 - DNA, 15 bp, Homo sapiens
ttggcatttgtgtct

SEQ ID NO: 555130 - DNA, 15 bp, Homo sapiens
tggcatttgtgtctc

SEQ ID NO: 555131 - DNA, 15 bp, Homo sapiens
ggcatttgtgtctct

SEQ ID NO: 555132 - DNA, 15 bp, Homo sapiens
gcatttgtgtctctg

SEQ ID NO: 555133 - DNA, 15 bp, Homo sapiens
catttgtgtctctgg

SEQ ID NO: 555134 - DNA, 15 bp, Homo sapiens
tctggtgggaaggag

SEQ ID NO: 555135 - DNA, 15 bp, Homo sapiens
ctggtgggaaggagg

SEQ ID NO: 555136 - DNA, 15 bp, Homo sapiens
tggtgggaaggaggt

SEQ ID NO: 555137 - DNA, 15 bp, Homo sapiens
ggtgggaaggaggtg

SEQ ID NO: 555138 - DNA, 15 bp, Homo sapiens
gtgggaaggaggtgt

SEQ ID NO: 555139 - DNA, 15 bp, Homo sapiens
tgggaaggaggtgtg

SEQ ID NO: 555140 - DNA, 15 bp, Homo sapiens
gggaaggaggtgtgc

SEQ ID NO: 555141 - DNA, 15 bp, Homo sapiens
ggaaggaggtgtgcg

SEQ ID NO: 555142 - DNA, 15 bp, Homo sapiens
gaaggaggtgtgcgg

SEQ ID NO: 555143 - DNA, 15 bp, Homo sapiens
aaggaggtgtgcggt

SEQ ID NO: 555144 - DNA, 15 bp, Homo sapiens
aggaggtgtgcggtg

SEQ ID NO: 555145 - DNA, 15 bp, Homo sapiens
ggaggtgtgcggtgc

SEQ ID NO: 555146 - DNA, 15 bp, Homo sapiens
gaggtgtgcggtgca

SEQ ID NO: 555147 - DNA, 15 bp, Homo sapiens
aggtgtgcggtgcac

SEQ ID NO: 555148 - DNA, 15 bp, Homo sapiens
ggtgtgcggtgcacc

SEQ ID NO: 555149 - DNA, 15 bp, Homo sapiens
gtgtgcggtgcacct

SEQ ID NO: 555150 - DNA, 15 bp, Homo sapiens
tgtgcggtgcacctg

SEQ ID NO: 555151 - DNA, 15 bp, Homo sapiens
gtgcggtgcacctga

SEQ ID NO: 555152 - DNA, 15 bp, Homo sapiens
tgcggtgcacctgaa

SEQ ID NO: 555153 - DNA, 15 bp, Homo sapiens
gcggtgcacctgaag

SEQ ID NO: 555154 - DNA, 15 bp, Homo sapiens
cggtgcacctgaagc

SEQ ID NO: 555155 - DNA, 15 bp, Homo sapiens
ggtgcacctgaagct

SEQ ID NO: 555156 - DNA, 15 bp, Homo sapiens
gtgcacctgaagcta

SEQ ID NO: 555157 - DNA, 15 bp, Homo sapiens
tgcacctgaagctac

SEQ ID NO: 555158 - DNA, 15 bp, Homo sapiens
gcacctgaagctacc

SEQ ID NO: 555159 - DNA, 15 bp, Homo sapiens
cacctgaagctacca

SEQ ID NO: 555160 - DNA, 15 bp, Homo sapiens
acctgaagctaccat

SEQ ID NO: 555161 - DNA, 15 bp, Homo sapiens
cctgaagctaccatg

SEQ ID NO: 555162 - DNA, 15 bp, Homo sapiens
ctgaagctaccatgc

SEQ ID NO: 555163 - DNA, 15 bp, Homo sapiens
tgaagctaccatgcc

SEQ ID NO: 555164 - DNA, 15 bp, Homo sapiens
gaagctaccatgccc

SEQ ID NO: 555165 - DNA, 15 bp, Homo sapiens
aagctaccatgccca

SEQ ID NO: 555166 - DNA, 15 bp, Homo sapiens
agctaccatgcccac

SEQ ID NO: 555167 - DNA, 15 bp, Homo sapiens
gctaccatgcccact

SEQ ID NO: 555168 - DNA, 15 bp, Homo sapiens
ctaccatgcccactt

SEQ ID NO: 555169 - DNA, 15 bp, Homo sapiens
taccatgcccacttg

SEQ ID NO: 555170 - DNA, 15 bp, Homo sapiens
accatgcccacttgc

SEQ ID NO: 555171 - DNA, 15 bp, Homo sapiens
ccatgcccacttgct

SEQ ID NO: 555172 - DNA, 15 bp, Homo sapiens
catgcccacttgctt

SEQ ID NO: 555173 - DNA, 15 bp, Homo sapiens
atgcccacttgcttt

SEQ ID NO: 555174 - DNA, 15 bp, Homo sapiens
tgcccacttgctttt

SEQ ID NO: 555175 - DNA, 15 bp, Homo sapiens
gcccacttgcttttc

SEQ ID NO: 555176 - DNA, 15 bp, Homo sapiens
cccacttgcttttca

SEQ ID NO: 555177 - DNA, 15 bp, Homo sapiens
ccacttgcttttcac

SEQ ID NO: 555178 - DNA, 15 bp, Homo sapiens
cacttgcttttcacc

SEQ ID NO: 555179 - DNA, 15 bp, Homo sapiens
acttgcttttcaccc

SEQ ID NO: 555180 - DNA, 15 bp, Homo sapiens
cttgcttttcacccc

SEQ ID NO: 555181 - DNA, 15 bp, Homo sapiens
ttgcttttcacccca

SEQ ID NO: 555182 - DNA, 15 bp, Homo sapiens
tgcttttcaccccag

SEQ ID NO: 555183 - DNA, 15 bp, Homo sapiens
gcttttcaccccagt

SEQ ID NO: 555184 - DNA, 15 bp, Homo sapiens
cttttcaccccagta

SEQ ID NO: 555185 - DNA, 15 bp, Homo sapiens
ttttcaccccagtag

SEQ ID NO: 555186 - DNA, 15 bp, Homo sapiens
tttcaccccagtagc

SEQ ID NO: 555187 - DNA, 15 bp, Homo sapiens
ttcaccccagtagca

SEQ ID NO: 555188 - DNA, 15 bp, Homo sapiens
tcaccccagtagcaa

SEQ ID NO: 555189 - DNA, 15 bp, Homo sapiens
caccccagtagcaaa

SEQ ID NO: 555190 - DNA, 15 bp, Homo sapiens
accccagtagcaaac

SEQ ID NO: 555191 - DNA, 15 bp, Homo sapiens
ccccagtagcaaacc

SEQ ID NO: 555192 - DNA, 15 bp, Homo sapiens
cccagtagcaaaccc

SEQ ID NO: 555193 - DNA, 15 bp, Homo sapiens
ccagtagcaaaccct

SEQ ID NO: 555194 - DNA, 15 bp, Homo sapiens
cagtagcaaaccctc

SEQ ID NO: 555195 - DNA, 15 bp, Homo sapiens
agtagcaaaccctct

SEQ ID NO: 555196 - DNA, 15 bp, Homo sapiens
gtagcaaaccctctg

SEQ ID NO: 555197 - DNA, 15 bp, Homo sapiens
tagcaaaccctctgg

SEQ ID NO: 555198 - DNA, 15 bp, Homo sapiens
agcaaaccctctggc

SEQ ID NO: 555199 - DNA, 15 bp, Homo sapiens
gcaaaccctctggcc

SEQ ID NO: 555200 - DNA, 15 bp, Homo sapiens
caaaccctctggccc

SEQ ID NO: 555201 - DNA, 15 bp, Homo sapiens
aaaccctctggccca

SEQ ID NO: 555202 - DNA, 15 bp, Homo sapiens
aaccctctggcccag

SEQ ID NO: 555203 - DNA, 15 bp, Homo sapiens
accctctggcccagg

SEQ ID NO: 555204 - DNA, 15 bp, Homo sapiens
ccctctggcccagga

SEQ ID NO: 555205 - DNA, 15 bp, Homo sapiens
cctctggcccaggag

SEQ ID NO: 555206 - DNA, 15 bp, Homo sapiens
ctctggcccaggagc

SEQ ID NO: 555207 - DNA, 15 bp, Homo sapiens
tctggcccaggagca

SEQ ID NO: 555208 - DNA, 15 bp, Homo sapiens
ctggcccaggagcaa

SEQ ID NO: 555209 - DNA, 15 bp, Homo sapiens
tggcccaggagcaaa

SEQ ID NO: 555210 - DNA, 15 bp, Homo sapiens
ggcccaggagcaaag

SEQ ID NO: 555211 - DNA, 15 bp, Homo sapiens
gcccaggagcaaagg

SEQ ID NO: 555212 - DNA, 15 bp, Homo sapiens
cccaggagcaaaggg

SEQ ID NO: 555213 - DNA, 15 bp, Homo sapiens
ccaggagcaaagggt

SEQ ID NO: 555214 - DNA, 15 bp, Homo sapiens
caggagcaaagggtc

SEQ ID NO: 555215 - DNA, 15 bp, Homo sapiens
aggagcaaagggtca

SEQ ID NO: 555216 - DNA, 15 bp, Homo sapiens
ggagcaaagggtcaa

SEQ ID NO: 555217 - DNA, 15 bp, Homo sapiens
gagcaaagggtcaag

SEQ ID NO: 555218 - DNA, 15 bp, Homo sapiens
agcaaagggtcaagt

SEQ ID NO: 555219 - DNA, 15 bp, Homo sapiens
gcaaagggtcaagtg

SEQ ID NO: 555220 - DNA, 15 bp, Homo sapiens
caaagggtcaagtgc

SEQ ID NO: 555221 - DNA, 15 bp, Homo sapiens
aaagggtcaagtgca

SEQ ID NO: 555222 - DNA, 15 bp, Homo sapiens
aagggtcaagtgcag

SEQ ID NO: 555223 - DNA, 15 bp, Homo sapiens
agggtcaagtgcaga

SEQ ID NO: 555224 - DNA, 15 bp, Homo sapiens
gggtcaagtgcagag

SEQ ID NO: 555225 - DNA, 15 bp, Homo sapiens
ggtcaagtgcagaga

SEQ ID NO: 555226 - DNA, 15 bp, Homo sapiens
gtcaagtgcagagac

SEQ ID NO: 555227 - DNA, 15 bp, Homo sapiens
tcaagtgcagagact

SEQ ID NO: 555228 - DNA, 15 bp, Homo sapiens
caagtgcagagactg

SEQ ID NO: 555229 - DNA, 15 bp, Homo sapiens
aagtgcagagactga

SEQ ID NO: 555230 - DNA, 15 bp, Homo sapiens
agtgcagagactgag

SEQ ID NO: 555231 - DNA, 15 bp, Homo sapiens
gtgcagagactgagg

SEQ ID NO: 555232 - DNA, 15 bp, Homo sapiens
tgcagagactgaggt

SEQ ID NO: 555233 - DNA, 15 bp, Homo sapiens
gcagagactgaggtc

SEQ ID NO: 555234 - DNA, 15 bp, Homo sapiens
cagagactgaggtct

SEQ ID NO: 555235 - DNA, 15 bp, Homo sapiens
agagactgaggtctg

SEQ ID NO: 555236 - DNA, 15 bp, Homo sapiens
gagactgaggtctga

SEQ ID NO: 555237 - DNA, 15 bp, Homo sapiens
agactgaggtctgag

SEQ ID NO: 555238 - DNA, 15 bp, Homo sapiens
gactgaggtctgagg

SEQ ID NO: 555239 - DNA, 15 bp, Homo sapiens
actgaggtctgagga

SEQ ID NO: 555240 - DNA, 15 bp, Homo sapiens
ctgaggtctgaggat

SEQ ID NO: 555241 - DNA, 15 bp, Homo sapiens
tgaggtctgaggatc

SEQ ID NO: 555242 - DNA, 15 bp, Homo sapiens
gaggtctgaggatct

SEQ ID NO: 555243 - DNA, 15 bp, Homo sapiens
aggtctgaggatctc

SEQ ID NO: 555244 - DNA, 15 bp, Homo sapiens
ggtctgaggatctca

SEQ ID NO: 555245 - DNA, 15 bp, Homo sapiens
gtctgaggatctcag

SEQ ID NO: 555246 - DNA, 15 bp, Homo sapiens
tctgaggatctcaga

SEQ ID NO: 555247 - DNA, 15 bp, Homo sapiens
ctgaggatctcagag

SEQ ID NO: 555248 - DNA, 15 bp, Homo sapiens
tgaggatctcagaga

SEQ ID NO: 555249 - DNA, 15 bp, Homo sapiens
gaggatctcagagac

SEQ ID NO: 555250 - DNA, 15 bp, Homo sapiens
aggatctcagagaca

SEQ ID NO: 555251 - DNA, 15 bp, Homo sapiens
ggatctcagagacag

SEQ ID NO: 555252 - DNA, 15 bp, Homo sapiens
gatctcagagacaga

SEQ ID NO: 555253 - DNA, 15 bp, Homo sapiens
atctcagagacagag

SEQ ID NO: 555254 - DNA, 15 bp, Homo sapiens
tctcagagacagagt

SEQ ID NO: 555255 - DNA, 15 bp, Homo sapiens
ctcagagacagagtg

SEQ ID NO: 555256 - DNA, 15 bp, Homo sapiens
tcagagacagagtgg

SEQ ID NO: 555257 - DNA, 15 bp, Homo sapiens
cagagacagagtggc

SEQ ID NO: 555258 - DNA, 15 bp, Homo sapiens
agagacagagtggct

SEQ ID NO: 555259 - DNA, 15 bp, Homo sapiens
gagacagagtggctt

SEQ ID NO: 555260 - DNA, 15 bp, Homo sapiens
agacagagtggcttg

SEQ ID NO: 555261 - DNA, 15 bp, Homo sapiens
gacagagtggcttgc

SEQ ID NO: 555262 - DNA, 15 bp, Homo sapiens
acagagtggcttgcc

SEQ ID NO: 555263 - DNA, 15 bp, Homo sapiens
cagagtggcttgccc

SEQ ID NO: 555264 - DNA, 15 bp, Homo sapiens
agagtggcttgccca

SEQ ID NO: 555265 - DNA, 15 bp, Homo sapiens
gagtggcttgcccat

SEQ ID NO: 555266 - DNA, 15 bp, Homo sapiens
agtggcttgcccatg

SEQ ID NO: 555267 - DNA, 15 bp, Homo sapiens
gtggcttgcccatgt

SEQ ID NO: 555268 - DNA, 15 bp, Homo sapiens
tggcttgcccatgtt

SEQ ID NO: 555269 - DNA, 15 bp, Homo sapiens
ggcttgcccatgttg

SEQ ID NO: 555270 - DNA, 15 bp, Homo sapiens
gcttgcccatgttga

SEQ ID NO: 555271 - DNA, 15 bp, Homo sapiens
cttgcccatgttgag

SEQ ID NO: 555272 - DNA, 15 bp, Homo sapiens
ttgcccatgttgagg

SEQ ID NO: 555273 - DNA, 15 bp, Homo sapiens
tgcccatgttgaggg

SEQ ID NO: 555274 - DNA, 15 bp, Homo sapiens
gcccatgttgaggga

SEQ ID NO: 555275 - DNA, 15 bp, Homo sapiens
cccatgttgagggag

SEQ ID NO: 555276 - DNA, 15 bp, Homo sapiens
ccatgttgagggagt

SEQ ID NO: 555277 - DNA, 15 bp, Homo sapiens
catgttgagggagtt

SEQ ID NO: 555278 - DNA, 15 bp, Homo sapiens
atgttgagggagttt

SEQ ID NO: 555279 - DNA, 15 bp, Homo sapiens
tgttgagggagtttt

SEQ ID NO: 555280 - DNA, 15 bp, Homo sapiens
gttgagggagttttg

SEQ ID NO: 555281 - DNA, 15 bp, Homo sapiens
ttgagggagttttgt

SEQ ID NO: 555282 - DNA, 15 bp, Homo sapiens
tgagggagttttgtg

SEQ ID NO: 555283 - DNA, 15 bp, Homo sapiens
gagggagttttgtgc

SEQ ID NO: 555284 - DNA, 15 bp, Homo sapiens
agggagttttgtgct

SEQ ID NO: 555285 - DNA, 15 bp, Homo sapiens
gggagttttgtgctc

SEQ ID NO: 555286 - DNA, 15 bp, Homo sapiens
ggagttttgtgctct

SEQ ID NO: 555287 - DNA, 15 bp, Homo sapiens
gagttttgtgctctc

SEQ ID NO: 555288 - DNA, 15 bp, Homo sapiens
agttttgtgctctct

SEQ ID NO: 555289 - DNA, 15 bp, Homo sapiens
gttttgtgctctctt

SEQ ID NO: 555290 - DNA, 15 bp, Homo sapiens
ttttgtgctctcttt

SEQ ID NO: 555291 - DNA, 15 bp, Homo sapiens
tttgtgctctctttc

SEQ ID NO: 555292 - DNA, 15 bp, Homo sapiens
ttgtgctctctttct

SEQ ID NO: 555293 - DNA, 15 bp, Homo sapiens
tgtgctctctttctt

SEQ ID NO: 555294 - DNA, 15 bp, Homo sapiens
gtgctctctttcttc

SEQ ID NO: 555295 - DNA, 15 bp, Homo sapiens
tgctctctttcttca

SEQ ID NO: 555296 - DNA, 15 bp, Homo sapiens
gctctctttcttcat

SEQ ID NO: 555297 - DNA, 15 bp, Homo sapiens
ctctctttcttcata

SEQ ID NO: 555298 - DNA, 15 bp, Homo sapiens
tctctttcttcatat

SEQ ID NO: 555299 - DNA, 15 bp, Homo sapiens
ctctttcttcatatc

SEQ ID NO: 555300 - DNA, 15 bp, Homo sapiens
tctttcttcatatct

SEQ ID NO: 555301 - DNA, 15 bp, Homo sapiens
ctttcttcatatctt

SEQ ID NO: 555302 - DNA, 15 bp, Homo sapiens
tttcttcatatcttc

SEQ ID NO: 555303 - DNA, 15 bp, Homo sapiens
ttcttcatatcttcc

SEQ ID NO: 555304 - DNA, 15 bp, Homo sapiens
tcttcatatcttcct

SEQ ID NO: 555305 - DNA, 15 bp, Homo sapiens
cttcatatcttcctg

SEQ ID NO: 555306 - DNA, 15 bp, Homo sapiens
ttcatatcttcctgt

SEQ ID NO: 555307 - DNA, 15 bp, Homo sapiens
tcatatcttcctgtt

SEQ ID NO: 555308 - DNA, 15 bp, Homo sapiens
catatcttcctgttg

SEQ ID NO: 555309 - DNA, 15 bp, Homo sapiens
atatcttcctgttgt

SEQ ID NO: 555310 - DNA, 15 bp, Homo sapiens
tatcttcctgttgtg

SEQ ID NO: 555311 - DNA, 15 bp, Homo sapiens
atcttcctgttgtgg

SEQ ID NO: 555312 - DNA, 15 bp, Homo sapiens
tcttcctgttgtggt

SEQ ID NO: 555313 - DNA, 15 bp, Homo sapiens
cttcctgttgtggtt

SEQ ID NO: 555314 - DNA, 15 bp, Homo sapiens
ttcctgttgtggttg

SEQ ID NO: 555315 - DNA, 15 bp, Homo sapiens
tcctgttgtggttga

SEQ ID NO: 555316 - DNA, 15 bp, Homo sapiens
cctgttgtggttgac

SEQ ID NO: 555317 - DNA, 15 bp, Homo sapiens
ctgttgtggttgact

SEQ ID NO: 555318 - DNA, 15 bp, Homo sapiens
tgttgtggttgactc

SEQ ID NO: 555319 - DNA, 15 bp, Homo sapiens
gttgtggttgactct

SEQ ID NO: 555320 - DNA, 15 bp, Homo sapiens
ttgtggttgactctg

SEQ ID NO: 555321 - DNA, 15 bp, Homo sapiens
tgtggttgactctgt

SEQ ID NO: 555322 - DNA, 15 bp, Homo sapiens
gtggttgactctgtt

SEQ ID NO: 555323 - DNA, 15 bp, Homo sapiens
tggttgactctgtta

SEQ ID NO: 555324 - DNA, 15 bp, Homo sapiens
ggttgactctgttag

SEQ ID NO: 555325 - DNA, 15 bp, Homo sapiens
gttgactctgttagg

SEQ ID NO: 555326 - DNA, 15 bp, Homo sapiens
ttgactctgttaggc

SEQ ID NO: 555327 - DNA, 15 bp, Homo sapiens
tgactctgttaggct

SEQ ID NO: 555328 - DNA, 15 bp, Homo sapiens
gactctgttaggctg

SEQ ID NO: 555329 - DNA, 15 bp, Homo sapiens
actctgttaggctgg

SEQ ID NO: 555330 - DNA, 15 bp, Homo sapiens
ctctgttaggctggg

SEQ ID NO: 555331 - DNA, 15 bp, Homo sapiens
tctgttaggctgggt

SEQ ID NO: 555332 - DNA, 15 bp, Homo sapiens
ctgttaggctgggtt

SEQ ID NO: 555333 - DNA, 15 bp, Homo sapiens
tgttaggctgggttg

SEQ ID NO: 555334 - DNA, 15 bp, Homo sapiens
gttaggctgggttgc

SEQ ID NO: 555335 - DNA, 15 bp, Homo sapiens
ttaggctgggttgcc

SEQ ID NO: 555336 - DNA, 15 bp, Homo sapiens
taggctgggttgcct

SEQ ID NO: 555337 - DNA, 15 bp, Homo sapiens
aggctgggttgcctt

SEQ ID NO: 555338 - DNA, 15 bp, Homo sapiens
ggctgggttgccttg

SEQ ID NO: 555339 - DNA, 15 bp, Homo sapiens
gctgggttgccttga

SEQ ID NO: 555340 - DNA, 15 bp, Homo sapiens
ctgggttgccttgaa

SEQ ID NO: 555341 - DNA, 15 bp, Homo sapiens
tgggttgccttgaaa

SEQ ID NO: 555342 - DNA, 15 bp, Homo sapiens
gggttgccttgaaac

SEQ ID NO: 555343 - DNA, 15 bp, Homo sapiens
ggttgccttgaaaca

SEQ ID NO: 555344 - DNA, 15 bp, Homo sapiens
gttgccttgaaacag

SEQ ID NO: 555345 - DNA, 15 bp, Homo sapiens
ttgccttgaaacagc

SEQ ID NO: 555346 - DNA, 15 bp, Homo sapiens
tgccttgaaacagca

SEQ ID NO: 555347 - DNA, 15 bp, Homo sapiens
gccttgaaacagcat

SEQ ID NO: 555348 - DNA, 15 bp, Homo sapiens
ccttgaaacagcatg

SEQ ID NO: 555349 - DNA, 15 bp, Homo sapiens
cttgaaacagcatgg

SEQ ID NO: 555350 - DNA, 15 bp, Homo sapiens
ttgaaacagcatggc

SEQ ID NO: 555351 - DNA, 15 bp, Homo sapiens
tgaaacagcatggcc

SEQ ID NO: 555352 - DNA, 15 bp, Homo sapiens
gaaacagcatggccc

SEQ ID NO: 555353 - DNA, 15 bp, Homo sapiens
aaacagcatggccca

SEQ ID NO: 555354 - DNA, 15 bp, Homo sapiens
aacagcatggcccat

SEQ ID NO: 555355 - DNA, 15 bp, Homo sapiens
acagcatggcccata

SEQ ID NO: 555356 - DNA, 15 bp, Homo sapiens
cagcatggcccatag

SEQ ID NO: 555357 - DNA, 15 bp, Homo sapiens
agcatggcccatagg

SEQ ID NO: 555358 - DNA, 15 bp, Homo sapiens
gcatggcccataggt

SEQ ID NO: 555359 - DNA, 15 bp, Homo sapiens
catggcccataggtt

SEQ ID NO: 555360 - DNA, 15 bp, Homo sapiens
atggcccataggttc

SEQ ID NO: 555361 - DNA, 15 bp, Homo sapiens
tggcccataggttct

SEQ ID NO: 555362 - DNA, 15 bp, Homo sapiens
ggcccataggttctg

SEQ ID NO: 555363 - DNA, 15 bp, Homo sapiens
gcccataggttctgt

SEQ ID NO: 555364 - DNA, 15 bp, Homo sapiens
cccataggttctgtg

SEQ ID NO: 555365 - DNA, 15 bp, Homo sapiens
ccataggttctgtgt

SEQ ID NO: 555366 - DNA, 15 bp, Homo sapiens
cataggttctgtgtc

SEQ ID NO: 555367 - DNA, 15 bp, Homo sapiens
ataggttctgtgtcg

SEQ ID NO: 555368 - DNA, 15 bp, Homo sapiens
taggttctgtgtcgc

SEQ ID NO: 555369 - DNA, 15 bp, Homo sapiens
aggttctgtgtcgca

SEQ ID NO: 555370 - DNA, 15 bp, Homo sapiens
ggttctgtgtcgcat

SEQ ID NO: 555371 - DNA, 15 bp, Homo sapiens
gttctgtgtcgcatg

SEQ ID NO: 555372 - DNA, 15 bp, Homo sapiens
ttctgtgtcgcatgt

SEQ ID NO: 555373 - DNA, 15 bp, Homo sapiens
tctgtgtcgcatgta

SEQ ID NO: 555374 - DNA, 15 bp, Homo sapiens
ctgtgtcgcatgtag

SEQ ID NO: 555375 - DNA, 15 bp, Homo sapiens
tgtgtcgcatgtaga

SEQ ID NO: 555376 - DNA, 15 bp, Homo sapiens
gtgtcgcatgtagac

SEQ ID NO: 555377 - DNA, 15 bp, Homo sapiens
tgtcgcatgtagact

SEQ ID NO: 555378 - DNA, 15 bp, Homo sapiens
gtcgcatgtagactt

SEQ ID NO: 555379 - DNA, 15 bp, Homo sapiens
tcgcatgtagacttc

SEQ ID NO: 555380 - DNA, 15 bp, Homo sapiens
cgcatgtagacttca

SEQ ID NO: 555381 - DNA, 15 bp, Homo sapiens
gcatgtagacttcag

SEQ ID NO: 555382 - DNA, 15 bp, Homo sapiens
catgtagacttcagc

SEQ ID NO: 555383 - DNA, 15 bp, Homo sapiens
atgtagacttcagca

SEQ ID NO: 555384 - DNA, 15 bp, Homo sapiens
tgtagacttcagcaa

SEQ ID NO: 555385 - DNA, 15 bp, Homo sapiens
gtagacttcagcaac

SEQ ID NO: 555386 - DNA, 15 bp, Homo sapiens
tagacttcagcaact

SEQ ID NO: 555387 - DNA, 15 bp, Homo sapiens
agacttcagcaactt

SEQ ID NO: 555388 - DNA, 15 bp, Homo sapiens
gacttcagcaacttg

SEQ ID NO: 555389 - DNA, 15 bp, Homo sapiens
acttcagcaacttga

SEQ ID NO: 555390 - DNA, 15 bp, Homo sapiens
cttcagcaacttgat

SEQ ID NO: 555391 - DNA, 15 bp, Homo sapiens
ttcagcaacttgatc

SEQ ID NO: 555392 - DNA, 15 bp, Homo sapiens
tcagcaacttgatcc

SEQ ID NO: 555393 - DNA, 15 bp, Homo sapiens
cagcaacttgatcca

SEQ ID NO: 555394 - DNA, 15 bp, Homo sapiens
agcaacttgatccaa

SEQ ID NO: 555395 - DNA, 15 bp, Homo sapiens
gcaacttgatccaaa

SEQ ID NO: 555396 - DNA, 15 bp, Homo sapiens
caacttgatccaaac

SEQ ID NO: 555397 - DNA, 15 bp, Homo sapiens
aacttgatccaaact

SEQ ID NO: 555398 - DNA, 15 bp, Homo sapiens
acttgatccaaactg

SEQ ID NO: 555399 - DNA, 15 bp, Homo sapiens
cttgatccaaactgt

SEQ ID NO: 555400 - DNA, 15 bp, Homo sapiens
ttgatccaaactgtg

SEQ ID NO: 555401 - DNA, 15 bp, Homo sapiens
tgatccaaactgtgg

SEQ ID NO: 555402 - DNA, 15 bp, Homo sapiens
gatccaaactgtggt

SEQ ID NO: 555403 - DNA, 15 bp, Homo sapiens
atccaaactgtggtc

SEQ ID NO: 555404 - DNA, 15 bp, Homo sapiens
tccaaactgtggtct

SEQ ID NO: 555405 - DNA, 15 bp, Homo sapiens
ccaaactgtggtctg

SEQ ID NO: 555406 - DNA, 15 bp, Homo sapiens
caaactgtggtctgc

SEQ ID NO: 555407 - DNA, 15 bp, Homo sapiens
aaactgtggtctgca

SEQ ID NO: 555408 - DNA, 15 bp, Homo sapiens
aactgtggtctgcaa

SEQ ID NO: 555409 - DNA, 15 bp, Homo sapiens
actgtggtctgcaaa

SEQ ID NO: 555410 - DNA, 15 bp, Homo sapiens
ctgtggtctgcaaat

SEQ ID NO: 555411 - DNA, 15 bp, Homo sapiens
tgtggtctgcaaata

SEQ ID NO: 555412 - DNA, 15 bp, Homo sapiens
gtggtctgcaaataa

SEQ ID NO: 555413 - DNA, 15 bp, Homo sapiens
tggtctgcaaataac

SEQ ID NO: 555414 - DNA, 15 bp, Homo sapiens
ggtctgcaaataact

SEQ ID NO: 555415 - DNA, 15 bp, Homo sapiens
gtctgcaaataactc

SEQ ID NO: 555416 - DNA, 15 bp, Homo sapiens
tctgcaaataactct

SEQ ID NO: 555417 - DNA, 15 bp, Homo sapiens
ctgcaaataactctc

SEQ ID NO: 555418 - DNA, 15 bp, Homo sapiens
tgcaaataactctca

SEQ ID NO: 555419 - DNA, 15 bp, Homo sapiens
gcaaataactctcag

SEQ ID NO: 555420 - DNA, 15 bp, Homo sapiens
caaataactctcagc

SEQ ID NO: 555421 - DNA, 15 bp, Homo sapiens
aaataactctcagct

SEQ ID NO: 555422 - DNA, 15 bp, Homo sapiens
aataactctcagctg

SEQ ID NO: 555423 - DNA, 15 bp, Homo sapiens
ataactctcagctgc

SEQ ID NO: 555424 - DNA, 15 bp, Homo sapiens
taactctcagctgca

SEQ ID NO: 555425 - DNA, 15 bp, Homo sapiens
aactctcagctgcat

SEQ ID NO: 555426 - DNA, 15 bp, Homo sapiens
actctcagctgcatc

SEQ ID NO: 555427 - DNA, 15 bp, Homo sapiens
ctctcagctgcatcc

SEQ ID NO: 555428 - DNA, 15 bp, Homo sapiens
tctcagctgcatcct

SEQ ID NO: 555429 - DNA, 15 bp, Homo sapiens
ctcagctgcatcctg

SEQ ID NO: 555430 - DNA, 15 bp, Homo sapiens
tcagctgcatcctgt

SEQ ID NO: 555431 - DNA, 15 bp, Homo sapiens
cagctgcatcctgtc

SEQ ID NO: 555432 - DNA, 15 bp, Homo sapiens
agctgcatcctgtct

SEQ ID NO: 555433 - DNA, 15 bp, Homo sapiens
gctgcatcctgtctc

SEQ ID NO: 555434 - DNA, 15 bp, Homo sapiens
ctgcatcctgtctca

SEQ ID NO: 555435 - DNA, 15 bp, Homo sapiens
tgcatcctgtctcaa

SEQ ID NO: 555436 - DNA, 15 bp, Homo sapiens
gcatcctgtctcaac

SEQ ID NO: 555437 - DNA, 15 bp, Homo sapiens
catcctgtctcaacc

SEQ ID NO: 555438 - DNA, 15 bp, Homo sapiens
atcctgtctcaacca

SEQ ID NO: 555439 - DNA, 15 bp, Homo sapiens
tcctgtctcaaccac

SEQ ID NO: 555440 - DNA, 15 bp, Homo sapiens
cctgtctcaaccaca

SEQ ID NO: 555441 - DNA, 15 bp, Homo sapiens
ctgtctcaaccacag

SEQ ID NO: 555442 - DNA, 15 bp, Homo sapiens
tgtctcaaccacagg

SEQ ID NO: 555443 - DNA, 15 bp, Homo sapiens
gtctcaaccacaggg

SEQ ID NO: 555444 - DNA, 15 bp, Homo sapiens
tctcaaccacaggga

SEQ ID NO: 555445 - DNA, 15 bp, Homo sapiens
ctcaaccacagggat

SEQ ID NO: 555446 - DNA, 15 bp, Homo sapiens
tcaaccacagggata

SEQ ID NO: 555447 - DNA, 15 bp, Homo sapiens
caaccacagggatag

SEQ ID NO: 555448 - DNA, 15 bp, Homo sapiens
aaccacagggatagg

SEQ ID NO: 555449 - DNA, 15 bp, Homo sapiens
accacagggataggg

SEQ ID NO: 555450 - DNA, 15 bp, Homo sapiens
ccacagggatagggg

SEQ ID NO: 555451 - DNA, 15 bp, Homo sapiens
cacagggatagggga

SEQ ID NO: 555452 - DNA, 15 bp, Homo sapiens
acagggataggggaa

SEQ ID NO: 555453 - DNA, 15 bp, Homo sapiens
cagggataggggaaa

SEQ ID NO: 555454 - DNA, 15 bp, Homo sapiens
agggataggggaaaa

SEQ ID NO: 555455 - DNA, 15 bp, Homo sapiens
gggataggggaaaac

SEQ ID NO: 555456 - DNA, 15 bp, Homo sapiens
ggataggggaaaaca

SEQ ID NO: 555457 - DNA, 15 bp, Homo sapiens
gataggggaaaacat

SEQ ID NO: 555458 - DNA, 15 bp, Homo sapiens
ataggggaaaacatc

SEQ ID NO: 555459 - DNA, 15 bp, Homo sapiens
taggggaaaacatcc

SEQ ID NO: 555460 - DNA, 15 bp, Homo sapiens
aggggaaaacatccc

SEQ ID NO: 555461 - DNA, 15 bp, Homo sapiens
ggggaaaacatccca

SEQ ID NO: 555462 - DNA, 15 bp, Homo sapiens
gggaaaacatcccat

SEQ ID NO: 555463 - DNA, 15 bp, Homo sapiens
ggaaaacatcccatg

SEQ ID NO: 555464 - DNA, 15 bp, Homo sapiens
gaaaacatcccatga

SEQ ID NO: 555465 - DNA, 15 bp, Homo sapiens
aaaacatcccatgaa

SEQ ID NO: 555466 - DNA, 15 bp, Homo sapiens
aaacatcccatgaag

SEQ ID NO: 555467 - DNA, 15 bp, Homo sapiens
aacatcccatgaaga

SEQ ID NO: 555468 - DNA, 15 bp, Homo sapiens
acatcccatgaagaa

SEQ ID NO: 555469 - DNA, 15 bp, Homo sapiens
catcccatgaagaaa

SEQ ID NO: 555470 - DNA, 15 bp, Homo sapiens
atcccatgaagaaaa

SEQ ID NO: 555471 - DNA, 15 bp, Homo sapiens
tcccatgaagaaaag

SEQ ID NO: 555472 - DNA, 15 bp, Homo sapiens
cccatgaagaaaaga

SEQ ID NO: 555473 - DNA, 15 bp, Homo sapiens
ccatgaagaaaagaa

SEQ ID NO: 555474 - DNA, 15 bp, Homo sapiens
catgaagaaaagaat

SEQ ID NO: 555475 - DNA, 15 bp, Homo sapiens
atgaagaaaagaata

SEQ ID NO: 555476 - DNA, 15 bp, Homo sapiens
tgaagaaaagaatat

SEQ ID NO: 555477 - DNA, 15 bp, Homo sapiens
gaagaaaagaatatc

SEQ ID NO: 555478 - DNA, 15 bp, Homo sapiens
aagaaaagaatatca

SEQ ID NO: 555479 - DNA, 15 bp, Homo sapiens
agaaaagaatatcag

SEQ ID NO: 555480 - DNA, 15 bp, Homo sapiens
gaaaagaatatcagg

SEQ ID NO: 555481 - DNA, 15 bp, Homo sapiens
aaaagaatatcaggt

SEQ ID NO: 555482 - DNA, 15 bp, Homo sapiens
aaagaatatcaggtt

SEQ ID NO: 555483 - DNA, 15 bp, Homo sapiens
aagaatatcaggtta

SEQ ID NO: 555484 - DNA, 15 bp, Homo sapiens
agaatatcaggttat

SEQ ID NO: 555485 - DNA, 15 bp, Homo sapiens
gaatatcaggttata

SEQ ID NO: 555486 - DNA, 15 bp, Homo sapiens
aatatcaggttatag

SEQ ID NO: 555487 - DNA, 15 bp, Homo sapiens
atatcaggttataga

SEQ ID NO: 555488 - DNA, 15 bp, Homo sapiens
tatcaggttatagag

SEQ ID NO: 555489 - DNA, 15 bp, Homo sapiens
atcaggttatagagg

SEQ ID NO: 555490 - DNA, 15 bp, Homo sapiens
tcaggttatagaggg

SEQ ID NO: 555491 - DNA, 15 bp, Homo sapiens
caggttatagaggga

SEQ ID NO: 555492 - DNA, 15 bp, Homo sapiens
aggttatagagggaa

SEQ ID NO: 555493 - DNA, 15 bp, Homo sapiens
ggttatagagggaaa

SEQ ID NO: 555494 - DNA, 15 bp, Homo sapiens
gttatagagggaaat

SEQ ID NO: 555495 - DNA, 15 bp, Homo sapiens
ttatagagggaaatg

SEQ ID NO: 555496 - DNA, 15 bp, Homo sapiens
tatagagggaaatgc

SEQ ID NO: 555497 - DNA, 15 bp, Homo sapiens
atagagggaaatgca

SEQ ID NO: 555498 - DNA, 15 bp, Homo sapiens
tagagggaaatgcaa

SEQ ID NO: 555499 - DNA, 15 bp, Homo sapiens
agagggaaatgcaag

SEQ ID NO: 555500 - DNA, 15 bp, Homo sapiens
gagggaaatgcaaga

SEQ ID NO: 555501 - DNA, 15 bp, Homo sapiens
agggaaatgcaagac

SEQ ID NO: 555502 - DNA, 15 bp, Homo sapiens
gggaaatgcaagact

SEQ ID NO: 555503 - DNA, 15 bp, Homo sapiens
ggaaatgcaagactt

SEQ ID NO: 555504 - DNA, 15 bp, Homo sapiens
gaaatgcaagacttg

SEQ ID NO: 555505 - DNA, 15 bp, Homo sapiens
aaatgcaagacttgc

SEQ ID NO: 555506 - DNA, 15 bp, Homo sapiens
aatgcaagacttgcc

SEQ ID NO: 555507 - DNA, 15 bp, Homo sapiens
atgcaagacttgcct

SEQ ID NO: 555508 - DNA, 15 bp, Homo sapiens
tgcaagacttgcctt

SEQ ID NO: 555509 - DNA, 15 bp, Homo sapiens
gcaagacttgccttg

SEQ ID NO: 555510 - DNA, 15 bp, Homo sapiens
caagacttgccttgt

SEQ ID NO: 555511 - DNA, 15 bp, Homo sapiens
aagacttgccttgtg

SEQ ID NO: 555512 - DNA, 15 bp, Homo sapiens
agacttgccttgtga

SEQ ID NO: 555513 - DNA, 15 bp, Homo sapiens
gacttgccttgtgag

SEQ ID NO: 555514 - DNA, 15 bp, Homo sapiens
acttgccttgtgagc

SEQ ID NO: 555515 - DNA, 15 bp, Homo sapiens
cttgccttgtgagcc

SEQ ID NO: 555516 - DNA, 15 bp, Homo sapiens
ttgccttgtgagcct

SEQ ID NO: 555517 - DNA, 15 bp, Homo sapiens
tgccttgtgagcctg

SEQ ID NO: 555518 - DNA, 15 bp, Homo sapiens
gccttgtgagcctgg

SEQ ID NO: 555519 - DNA, 15 bp, Homo sapiens
ccttgtgagcctggt

SEQ ID NO: 555520 - DNA, 15 bp, Homo sapiens
cttgtgagcctggta

SEQ ID NO: 555521 - DNA, 15 bp, Homo sapiens
ttgtgagcctggtat

SEQ ID NO: 555522 - DNA, 15 bp, Homo sapiens
tgtgagcctggtatt

SEQ ID NO: 555523 - DNA, 15 bp, Homo sapiens
gtgagcctggtattc

SEQ ID NO: 555524 - DNA, 15 bp, Homo sapiens
tgagcctggtattca

SEQ ID NO: 555525 - DNA, 15 bp, Homo sapiens
gagcctggtattcag

SEQ ID NO: 555526 - DNA, 15 bp, Homo sapiens
agcctggtattcagg

SEQ ID NO: 555527 - DNA, 15 bp, Homo sapiens
gcctggtattcagga

SEQ ID NO: 555528 - DNA, 15 bp, Homo sapiens
cctggtattcaggac

SEQ ID NO: 555529 - DNA, 15 bp, Homo sapiens
ctggtattcaggacc

SEQ ID NO: 555530 - DNA, 15 bp, Homo sapiens
tggtattcaggacca

SEQ ID NO: 555531 - DNA, 15 bp, Homo sapiens
ggtattcaggaccag

SEQ ID NO: 555532 - DNA, 15 bp, Homo sapiens
gtattcaggaccaga

SEQ ID NO: 555533 - DNA, 15 bp, Homo sapiens
tattcaggaccagag

SEQ ID NO: 555534 - DNA, 15 bp, Homo sapiens
attcaggaccagagt

SEQ ID NO: 555535 - DNA, 15 bp, Homo sapiens
ttcaggaccagagtt

SEQ ID NO: 555536 - DNA, 15 bp, Homo sapiens
tcaggaccagagttc

SEQ ID NO: 555537 - DNA, 15 bp, Homo sapiens
caggaccagagttca

SEQ ID NO: 555538 - DNA, 15 bp, Homo sapiens
aggaccagagttcag

SEQ ID NO: 555539 - DNA, 15 bp, Homo sapiens
ggaccagagttcaga

SEQ ID NO: 555540 - DNA, 15 bp, Homo sapiens
gaccagagttcagag

SEQ ID NO: 555541 - DNA, 15 bp, Homo sapiens
accagagttcagagc

SEQ ID NO: 555542 - DNA, 15 bp, Homo sapiens
ccagagttcagagct

SEQ ID NO: 555543 - DNA, 15 bp, Homo sapiens
cagagttcagagcta

SEQ ID NO: 555544 - DNA, 15 bp, Homo sapiens
agagttcagagctaa

SEQ ID NO: 555545 - DNA, 15 bp, Homo sapiens
gagttcagagctaac

SEQ ID NO: 555546 - DNA, 15 bp, Homo sapiens
agttcagagctaacc

SEQ ID NO: 555547 - DNA, 15 bp, Homo sapiens
gttcagagctaacct

SEQ ID NO: 555548 - DNA, 15 bp, Homo sapiens
ttcagagctaacctt

SEQ ID NO: 555549 - DNA, 15 bp, Homo sapiens
tcagagctaaccttc

SEQ ID NO: 555550 - DNA, 15 bp, Homo sapiens
cagagctaaccttcc

SEQ ID NO: 555551 - DNA, 15 bp, Homo sapiens
agagctaaccttcct

SEQ ID NO: 555552 - DNA, 15 bp, Homo sapiens
gagctaaccttcctt

SEQ ID NO: 555553 - DNA, 15 bp, Homo sapiens
agctaaccttccttg

SEQ ID NO: 555554 - DNA, 15 bp, Homo sapiens
gctaaccttccttga

SEQ ID NO: 555555 - DNA, 15 bp, Homo sapiens
ctaaccttccttgaa

SEQ ID NO: 555556 - DNA, 15 bp, Homo sapiens
taaccttccttgaaa

SEQ ID NO: 555557 - DNA, 15 bp, Homo sapiens
aaccttccttgaaat

SEQ ID NO: 555558 - DNA, 15 bp, Homo sapiens
accttccttgaaatt

SEQ ID NO: 555559 - DNA, 15 bp, Homo sapiens
ccttccttgaaattc

SEQ ID NO: 555560 - DNA, 15 bp, Homo sapiens
cttccttgaaattcc

SEQ ID NO: 555561 - DNA, 15 bp, Homo sapiens
ttccttgaaattccc

SEQ ID NO: 555562 - DNA, 15 bp, Homo sapiens
tccttgaaattccct

SEQ ID NO: 555563 - DNA, 15 bp, Homo sapiens
ccttgaaattccctg

SEQ ID NO: 555564 - DNA, 15 bp, Homo sapiens
cttgaaattccctgg

SEQ ID NO: 555565 - DNA, 15 bp, Homo sapiens
ttgaaattccctggc

SEQ ID NO: 555566 - DNA, 15 bp, Homo sapiens
tgaaattccctggcc

SEQ ID NO: 555567 - DNA, 15 bp, Homo sapiens
gaaattccctggcct

SEQ ID NO: 555568 - DNA, 15 bp, Homo sapiens
aaattccctggcctg

SEQ ID NO: 555569 - DNA, 15 bp, Homo sapiens
aattccctggcctgg

SEQ ID NO: 555570 - DNA, 15 bp, Homo sapiens
attccctggcctggc

SEQ ID NO: 555571 - DNA, 15 bp, Homo sapiens
ttccctggcctggcc

SEQ ID NO: 555572 - DNA, 15 bp, Homo sapiens
tccctggcctggccc

SEQ ID NO: 555573 - DNA, 15 bp, Homo sapiens
ccctggcctggcccc

SEQ ID NO: 555574 - DNA, 15 bp, Homo sapiens
cctggcctggccccc

SEQ ID NO: 555575 - DNA, 15 bp, Homo sapiens
ctggcctggccccca

SEQ ID NO: 555576 - DNA, 15 bp, Homo sapiens
tggcctggcccccag

SEQ ID NO: 555577 - DNA, 15 bp, Homo sapiens
ggcctggcccccagg

SEQ ID NO: 555578 - DNA, 15 bp, Homo sapiens
gcctggcccccaggg

SEQ ID NO: 555579 - DNA, 15 bp, Homo sapiens
cctggcccccagggt

SEQ ID NO: 555580 - DNA, 15 bp, Homo sapiens
ctggcccccagggtc

SEQ ID NO: 555581 - DNA, 15 bp, Homo sapiens
tggcccccagggtct

SEQ ID NO: 555582 - DNA, 15 bp, Homo sapiens
ggcccccagggtctg

SEQ ID NO: 555583 - DNA, 15 bp, Homo sapiens
gcccccagggtctgg

SEQ ID NO: 555584 - DNA, 15 bp, Homo sapiens
cccccagggtctgga

SEQ ID NO: 555585 - DNA, 15 bp, Homo sapiens
ccccagggtctggat

SEQ ID NO: 555586 - DNA, 15 bp, Homo sapiens
cccagggtctggatg

SEQ ID NO: 555587 - DNA, 15 bp, Homo sapiens
ccagggtctggatgc

SEQ ID NO: 555588 - DNA, 15 bp, Homo sapiens
cagggtctggatgcc

SEQ ID NO: 555589 - DNA, 15 bp, Homo sapiens
agggtctggatgccc

SEQ ID NO: 555590 - DNA, 15 bp, Homo sapiens
gggtctggatgccct

SEQ ID NO: 555591 - DNA, 15 bp, Homo sapiens
ggtctggatgccctg

SEQ ID NO: 555592 - DNA, 15 bp, Homo sapiens
gtctggatgccctgg

SEQ ID NO: 555593 - DNA, 15 bp, Homo sapiens
tctggatgccctgga

SEQ ID NO: 555594 - DNA, 15 bp, Homo sapiens
ctggatgccctggac

SEQ ID NO: 555595 - DNA, 15 bp, Homo sapiens
tggatgccctggaca

SEQ ID NO: 555596 - DNA, 15 bp, Homo sapiens
ggatgccctggacac

SEQ ID NO: 555597 - DNA, 15 bp, Homo sapiens
gatgccctggacacc

SEQ ID NO: 555598 - DNA, 15 bp, Homo sapiens
atgccctggacacct

SEQ ID NO: 555599 - DNA, 15 bp, Homo sapiens
tgccctggacaccta

SEQ ID NO: 555600 - DNA, 15 bp, Homo sapiens
gccctggacacctag

SEQ ID NO: 555601 - DNA, 15 bp, Homo sapiens
ccctggacacctagg

SEQ ID NO: 555602 - DNA, 15 bp, Homo sapiens
cctggacacctaggg

SEQ ID NO: 555603 - DNA, 15 bp, Homo sapiens
ctggacacctaggga

SEQ ID NO: 555604 - DNA, 15 bp, Homo sapiens
tggacacctagggac

SEQ ID NO: 555605 - DNA, 15 bp, Homo sapiens
ggacacctagggact

SEQ ID NO: 555606 - DNA, 15 bp, Homo sapiens
gacacctagggactc

SEQ ID NO: 555607 - DNA, 15 bp, Homo sapiens
acacctagggactca

SEQ ID NO: 555608 - DNA, 15 bp, Homo sapiens
cacctagggactcac

SEQ ID NO: 555609 - DNA, 15 bp, Homo sapiens
acctagggactcaca

SEQ ID NO: 555610 - DNA, 15 bp, Homo sapiens
cctagggactcacat

SEQ ID NO: 555611 - DNA, 15 bp, Homo sapiens
ctagggactcacatt

SEQ ID NO: 555612 - DNA, 15 bp, Homo sapiens
tagggactcacattc

SEQ ID NO: 555613 - DNA, 15 bp, Homo sapiens
agggactcacattcc

SEQ ID NO: 555614 - DNA, 15 bp, Homo sapiens
gggactcacattcca

SEQ ID NO: 555615 - DNA, 15 bp, Homo sapiens
ggactcacattccac

SEQ ID NO: 555616 - DNA, 15 bp, Homo sapiens
gactcacattccaca

SEQ ID NO: 555617 - DNA, 15 bp, Homo sapiens
actcacattccacac

SEQ ID NO: 555618 - DNA, 15 bp, Homo sapiens
ctcacattccacaca

SEQ ID NO: 555619 - DNA, 15 bp, Homo sapiens
tcacattccacacag

SEQ ID NO: 555620 - DNA, 15 bp, Homo sapiens
cacattccacacaga

SEQ ID NO: 555621 - DNA, 15 bp, Homo sapiens
acattccacacagag

SEQ ID NO: 555622 - DNA, 15 bp, Homo sapiens
cattccacacagaga

SEQ ID NO: 555623 - DNA, 15 bp, Homo sapiens
attccacacagagaa

SEQ ID NO: 555624 - DNA, 15 bp, Homo sapiens
ttccacacagagaag

SEQ ID NO: 555625 - DNA, 15 bp, Homo sapiens
tccacacagagaagg

SEQ ID NO: 555626 - DNA, 15 bp, Homo sapiens
ccacacagagaagga

SEQ ID NO: 555627 - DNA, 15 bp, Homo sapiens
cacacagagaaggat

SEQ ID NO: 555628 - DNA, 15 bp, Homo sapiens
acacagagaaggatc

SEQ ID NO: 555629 - DNA, 15 bp, Homo sapiens
cacagagaaggatca

SEQ ID NO: 555630 - DNA, 15 bp, Homo sapiens
acagagaaggatcag

SEQ ID NO: 555631 - DNA, 15 bp, Homo sapiens
cagagaaggatcagc

SEQ ID NO: 555632 - DNA, 15 bp, Homo sapiens
agagaaggatcagct

SEQ ID NO: 555633 - DNA, 15 bp, Homo sapiens
gagaaggatcagctc

SEQ ID NO: 555634 - DNA, 15 bp, Homo sapiens
agaaggatcagctcc

SEQ ID NO: 555635 - DNA, 15 bp, Homo sapiens
gaaggatcagctcct

SEQ ID NO: 555636 - DNA, 15 bp, Homo sapiens
aaggatcagctcctg

SEQ ID NO: 555637 - DNA, 15 bp, Homo sapiens
aggatcagctcctgt

SEQ ID NO: 555638 - DNA, 15 bp, Homo sapiens
ggatcagctcctgtt

SEQ ID NO: 555639 - DNA, 15 bp, Homo sapiens
gatcagctcctgttc

SEQ ID NO: 555640 - DNA, 15 bp, Homo sapiens
atcagctcctgttcc

SEQ ID NO: 555641 - DNA, 15 bp, Homo sapiens
tcagctcctgttccc

SEQ ID NO: 555642 - DNA, 15 bp, Homo sapiens
cagctcctgttccct

SEQ ID NO: 555643 - DNA, 15 bp, Homo sapiens
agctcctgttccctg

SEQ ID NO: 555644 - DNA, 15 bp, Homo sapiens
gctcctgttccctgg

SEQ ID NO: 555645 - DNA, 15 bp, Homo sapiens
ctcctgttccctgga

SEQ ID NO: 555646 - DNA, 15 bp, Homo sapiens
tcctgttccctggaa

SEQ ID NO: 555647 - DNA, 15 bp, Homo sapiens
cctgttccctggaac

SEQ ID NO: 555648 - DNA, 15 bp, Homo sapiens
ctgttccctggaact

SEQ ID NO: 555649 - DNA, 15 bp, Homo sapiens
tgttccctggaactt

SEQ ID NO: 555650 - DNA, 15 bp, Homo sapiens
gttccctggaacttg

SEQ ID NO: 555651 - DNA, 15 bp, Homo sapiens
ttccctggaacttgt

SEQ ID NO: 555652 - DNA, 15 bp, Homo sapiens
tccctggaacttgtg

SEQ ID NO: 555653 - DNA, 15 bp, Homo sapiens
ccctggaacttgtgc

SEQ ID NO: 555654 - DNA, 15 bp, Homo sapiens
cctggaacttgtgcc

SEQ ID NO: 555655 - DNA, 15 bp, Homo sapiens
ctggaacttgtgcct

SEQ ID NO: 555656 - DNA, 15 bp, Homo sapiens
tggaacttgtgcctc

SEQ ID NO: 555657 - DNA, 15 bp, Homo sapiens
ggaacttgtgcctct

SEQ ID NO: 555658 - DNA, 15 bp, Homo sapiens
gaacttgtgcctctc

SEQ ID NO: 555659 - DNA, 15 bp, Homo sapiens
aacttgtgcctctct

SEQ ID NO: 555660 - DNA, 15 bp, Homo sapiens
acttgtgcctctctg

SEQ ID NO: 555661 - DNA, 15 bp, Homo sapiens
cttgtgcctctctgg

SEQ ID NO: 555662 - DNA, 15 bp, Homo sapiens
ttgtgcctctctggc

SEQ ID NO: 555663 - DNA, 15 bp, Homo sapiens
tgtgcctctctggct

SEQ ID NO: 555664 - DNA, 15 bp, Homo sapiens
gtgcctctctggctg

SEQ ID NO: 555665 - DNA, 15 bp, Homo sapiens
tgcctctctggctgc

SEQ ID NO: 555666 - DNA, 15 bp, Homo sapiens
gcctctctggctgcg

SEQ ID NO: 555667 - DNA, 15 bp, Homo sapiens
cctctctggctgcga

SEQ ID NO: 555668 - DNA, 15 bp, Homo sapiens
ctctctggctgcgag

SEQ ID NO: 555669 - DNA, 15 bp, Homo sapiens
tctctggctgcgagg

SEQ ID NO: 555670 - DNA, 15 bp, Homo sapiens
ctctggctgcgaggc

SEQ ID NO: 555671 - DNA, 15 bp, Homo sapiens
tctggctgcgaggcc

SEQ ID NO: 555672 - DNA, 15 bp, Homo sapiens
ctggctgcgaggccc

SEQ ID NO: 555673 - DNA, 15 bp, Homo sapiens
tggctgcgaggcccc

SEQ ID NO: 555674 - DNA, 15 bp, Homo sapiens
ggctgcgaggcccct

SEQ ID NO: 555675 - DNA, 15 bp, Homo sapiens
gctgcgaggcccctt

SEQ ID NO: 555676 - DNA, 15 bp, Homo sapiens
ctgcgaggccccttt

SEQ ID NO: 555677 - DNA, 15 bp, Homo sapiens
tgcgaggcccctttc

SEQ ID NO: 555678 - DNA, 15 bp, Homo sapiens
gcgaggcccctttct

SEQ ID NO: 555679 - DNA, 15 bp, Homo sapiens
cgaggcccctttcta

SEQ ID NO: 555680 - DNA, 15 bp, Homo sapiens
gaggcccctttctaa

SEQ ID NO: 555681 - DNA, 15 bp, Homo sapiens
aggcccctttctaaa

SEQ ID NO: 555682 - DNA, 15 bp, Homo sapiens
ggcccctttctaaac

SEQ ID NO: 555683 - DNA, 15 bp, Homo sapiens
gcccctttctaaact

SEQ ID NO: 555684 - DNA, 15 bp, Homo sapiens
cccctttctaaactc

SEQ ID NO: 555685 - DNA, 15 bp, Homo sapiens
ccctttctaaactct

SEQ ID NO: 555686 - DNA, 15 bp, Homo sapiens
cctttctaaactctt

SEQ ID NO: 555687 - DNA, 15 bp, Homo sapiens
ctttctaaactcttg

SEQ ID NO: 555688 - DNA, 15 bp, Homo sapiens
tttctaaactcttgt

SEQ ID NO: 555689 - DNA, 15 bp, Homo sapiens
ttctaaactcttgtg

SEQ ID NO: 555690 - DNA, 15 bp, Homo sapiens
tctaaactcttgtgt

SEQ ID NO: 555691 - DNA, 15 bp, Homo sapiens
ctaaactcttgtgtt

SEQ ID NO: 555692 - DNA, 15 bp, Homo sapiens
taaactcttgtgttc

SEQ ID NO: 555693 - DNA, 15 bp, Homo sapiens
aaactcttgtgttct

SEQ ID NO: 555694 - DNA, 15 bp, Homo sapiens
aactcttgtgttctc

SEQ ID NO: 555695 - DNA, 15 bp, Homo sapiens
agtcaagagctatgt

SEQ ID NO: 555696 - DNA, 15 bp, Homo sapiens
gtcaagagctatgtc

SEQ ID NO: 555697 - DNA, 15 bp, Homo sapiens
tcaagagctatgtcc

SEQ ID NO: 555698 - DNA, 15 bp, Homo sapiens
caagagctatgtcca

SEQ ID NO: 555699 - DNA, 15 bp, Homo sapiens
aagagctatgtccag

SEQ ID NO: 555700 - DNA, 15 bp, Homo sapiens
agagctatgtccagt

SEQ ID NO: 555701 - DNA, 15 bp, Homo sapiens
gagctatgtccagtg

SEQ ID NO: 555702 - DNA, 15 bp, Homo sapiens
agctatgtccagtgg

SEQ ID NO: 555703 - DNA, 15 bp, Homo sapiens
gctatgtccagtggt

SEQ ID NO: 555704 - DNA, 15 bp, Homo sapiens
ctatgtccagtggtg

SEQ ID NO: 555705 - DNA, 15 bp, Homo sapiens
tatgtccagtggtgg

SEQ ID NO: 555706 - DNA, 15 bp, Homo sapiens
atgtccagtggtgga

SEQ ID NO: 555707 - DNA, 15 bp, Homo sapiens
tgtccagtggtggaa

SEQ ID NO: 555708 - DNA, 15 bp, Homo sapiens
gtccagtggtggaaa

SEQ ID NO: 555709 - DNA, 15 bp, Homo sapiens
tccagtggtggaaat

SEQ ID NO: 555710 - DNA, 15 bp, Homo sapiens
ccagtggtggaaatg

SEQ ID NO: 555711 - DNA, 15 bp, Homo sapiens
cagtggtggaaatga

SEQ ID NO: 555712 - DNA, 15 bp, Homo sapiens
agtggtggaaatgaa

SEQ ID NO: 555713 - DNA, 15 bp, Homo sapiens
gtggtggaaatgaag

SEQ ID NO: 555714 - DNA, 15 bp, Homo sapiens
tggtggaaatgaagg

SEQ ID NO: 555715 - DNA, 15 bp, Homo sapiens
ggtggaaatgaagga

SEQ ID NO: 555716 - DNA, 15 bp, Homo sapiens
gtggaaatgaaggac

SEQ ID NO: 555717 - DNA, 15 bp, Homo sapiens
tggaaatgaaggaca

SEQ ID NO: 555718 - DNA, 15 bp, Homo sapiens
ggaaatgaaggacaa

SEQ ID NO: 555719 - DNA, 15 bp, Homo sapiens
gaaatgaaggacaag

SEQ ID NO: 555720 - DNA, 15 bp, Homo sapiens
aaatgaaggacaagg

SEQ ID NO: 555721 - DNA, 15 bp, Homo sapiens
aatgaaggacaaggg

SEQ ID NO: 555722 - DNA, 15 bp, Homo sapiens
atgaaggacaagggc

SEQ ID NO: 555723 - DNA, 15 bp, Homo sapiens
tgaaggacaagggct

SEQ ID NO: 555724 - DNA, 15 bp, Homo sapiens
gaaggacaagggcta

SEQ ID NO: 555725 - DNA, 15 bp, Homo sapiens
aaggacaagggctac

SEQ ID NO: 555726 - DNA, 15 bp, Homo sapiens
aggacaagggctacc

SEQ ID NO: 555727 - DNA, 15 bp, Homo sapiens
ggacaagggctaccc

SEQ ID NO: 555728 - DNA, 15 bp, Homo sapiens
gacaagggctaccct

SEQ ID NO: 555729 - DNA, 15 bp, Homo sapiens
acaagggctacccta

SEQ ID NO: 555730 - DNA, 15 bp, Homo sapiens
caagggctaccctac

SEQ ID NO: 555731 - DNA, 15 bp, Homo sapiens
aagggctaccctacc

SEQ ID NO: 555732 - DNA, 15 bp, Homo sapiens
agggctaccctaccc

SEQ ID NO: 555733 - DNA, 15 bp, Homo sapiens
gggctaccctaccct

SEQ ID NO: 555734 - DNA, 15 bp, Homo sapiens
ggctaccctaccctc

SEQ ID NO: 555735 - DNA, 15 bp, Homo sapiens
gctaccctaccctcg

SEQ ID NO: 555736 - DNA, 15 bp, Homo sapiens
ctaccctaccctcgg

SEQ ID NO: 555737 - DNA, 15 bp, Homo sapiens
taccctaccctcggc

SEQ ID NO: 555738 - DNA, 15 bp, Homo sapiens
accctaccctcggca

SEQ ID NO: 555739 - DNA, 15 bp, Homo sapiens
ccctaccctcggcag

SEQ ID NO: 555740 - DNA, 15 bp, Homo sapiens
cctaccctcggcagc

SEQ ID NO: 555741 - DNA, 15 bp, Homo sapiens
ctaccctcggcagct

SEQ ID NO: 555742 - DNA, 15 bp, Homo sapiens
taccctcggcagctc

SEQ ID NO: 555743 - DNA, 15 bp, Homo sapiens
accctcggcagctct

SEQ ID NO: 555744 - DNA, 15 bp, Homo sapiens
ccctcggcagctctg

SEQ ID NO: 555745 - DNA, 15 bp, Homo sapiens
cctcggcagctctgc

SEQ ID NO: 555746 - DNA, 15 bp, Homo sapiens
ctcggcagctctgct

SEQ ID NO: 555747 - DNA, 15 bp, Homo sapiens
tcggcagctctgctg

SEQ ID NO: 555748 - DNA, 15 bp, Homo sapiens
cggcagctctgctgt

SEQ ID NO: 555749 - DNA, 15 bp, Homo sapiens
ggcagctctgctgtg

SEQ ID NO: 555750 - DNA, 15 bp, Homo sapiens
gcagctctgctgtgg

SEQ ID NO: 555751 - DNA, 15 bp, Homo sapiens
cagctctgctgtggc

SEQ ID NO: 555752 - DNA, 15 bp, Homo sapiens
agctctgctgtggcc

SEQ ID NO: 555753 - DNA, 15 bp, Homo sapiens
gctctgctgtggcct

SEQ ID NO: 555754 - DNA, 15 bp, Homo sapiens
ctctgctgtggcctc

SEQ ID NO: 555755 - DNA, 15 bp, Homo sapiens
tctgctgtggcctct

SEQ ID NO: 555756 - DNA, 15 bp, Homo sapiens
ctgctgtggcctctg

SEQ ID NO: 555757 - DNA, 15 bp, Homo sapiens
tgctgtggcctctgt

SEQ ID NO: 555758 - DNA, 15 bp, Homo sapiens
gctgtggcctctgtc

SEQ ID NO: 555759 - DNA, 15 bp, Homo sapiens
ctgtggcctctgtcg

SEQ ID NO: 555760 - DNA, 15 bp, Homo sapiens
tgtggcctctgtcgc

SEQ ID NO: 555761 - DNA, 15 bp, Homo sapiens
gtggcctctgtcgcc

SEQ ID NO: 555762 - DNA, 15 bp, Homo sapiens
tggcctctgtcgccc

SEQ ID NO: 555763 - DNA, 15 bp, Homo sapiens
ggcctctgtcgccct

SEQ ID NO: 555764 - DNA, 15 bp, Homo sapiens
gcctctgtcgccctg

SEQ ID NO: 555765 - DNA, 15 bp, Homo sapiens
cctctgtcgccctga

SEQ ID NO: 555766 - DNA, 15 bp, Homo sapiens
ctctgtcgccctgag

SEQ ID NO: 555767 - DNA, 15 bp, Homo sapiens
tctgtcgccctgaga

SEQ ID NO: 555768 - DNA, 15 bp, Homo sapiens
ctgtcgccctgagat

SEQ ID NO: 555769 - DNA, 15 bp, Homo sapiens
tgtcgccctgagatg

SEQ ID NO: 555770 - DNA, 15 bp, Homo sapiens
gtcgccctgagatgg

SEQ ID NO: 555771 - DNA, 15 bp, Homo sapiens
tcgccctgagatgga

SEQ ID NO: 555772 - DNA, 15 bp, Homo sapiens
cgccctgagatggag

SEQ ID NO: 555773 - DNA, 15 bp, Homo sapiens
gccctgagatggaga

SEQ ID NO: 555774 - DNA, 15 bp, Homo sapiens
ccctgagatggagat

SEQ ID NO: 555775 - DNA, 15 bp, Homo sapiens
cctgagatggagatg

SEQ ID NO: 555776 - DNA, 15 bp, Homo sapiens
ctgagatggagatgt

SEQ ID NO: 555777 - DNA, 15 bp, Homo sapiens
tgagatggagatgtg

SEQ ID NO: 555778 - DNA, 15 bp, Homo sapiens
gagatggagatgtgc

SEQ ID NO: 555779 - DNA, 15 bp, Homo sapiens
agatggagatgtgct

SEQ ID NO: 555780 - DNA, 15 bp, Homo sapiens
gatggagatgtgctg

SEQ ID NO: 555781 - DNA, 15 bp, Homo sapiens
atggagatgtgctga

SEQ ID NO: 555782 - DNA, 15 bp, Homo sapiens
tggagatgtgctgag

SEQ ID NO: 555783 - DNA, 15 bp, Homo sapiens
ggagatgtgctgagt

SEQ ID NO: 555784 - DNA, 15 bp, Homo sapiens
gagatgtgctgagtt

SEQ ID NO: 555785 - DNA, 15 bp, Homo sapiens
agatgtgctgagtta

SEQ ID NO: 555786 - DNA, 15 bp, Homo sapiens
gatgtgctgagttat

SEQ ID NO: 555787 - DNA, 15 bp, Homo sapiens
atgtgctgagttatt

SEQ ID NO: 555788 - DNA, 15 bp, Homo sapiens
tgtgctgagttatta

SEQ ID NO: 555789 - DNA, 15 bp, Homo sapiens
gtgctgagttattac

SEQ ID NO: 555790 - DNA, 15 bp, Homo sapiens
tgctgagttattaca

SEQ ID NO: 555791 - DNA, 15 bp, Homo sapiens
gctgagttattacac

SEQ ID NO: 555792 - DNA, 15 bp, Homo sapiens
ctgagttattacacc

SEQ ID NO: 555793 - DNA, 15 bp, Homo sapiens
tgagttattacaccc

SEQ ID NO: 555794 - DNA, 15 bp, Homo sapiens
gagttattacaccct

SEQ ID NO: 555795 - DNA, 15 bp, Homo sapiens
agttattacaccctt

SEQ ID NO: 555796 - DNA, 15 bp, Homo sapiens
gttattacacccttg

SEQ ID NO: 555797 - DNA, 15 bp, Homo sapiens
ttattacacccttgg

SEQ ID NO: 555798 - DNA, 15 bp, Homo sapiens
tattacacccttggg

SEQ ID NO: 555799 - DNA, 15 bp, Homo sapiens
attacacccttgggg

SEQ ID NO: 555800 - DNA, 15 bp, Homo sapiens
ttacacccttggggc

SEQ ID NO: 555801 - DNA, 15 bp, Homo sapiens
tacacccttggggcc

SEQ ID NO: 555802 - DNA, 15 bp, Homo sapiens
acacccttggggcca

SEQ ID NO: 555803 - DNA, 15 bp, Homo sapiens
cacccttggggccac

SEQ ID NO: 555804 - DNA, 15 bp, Homo sapiens
acccttggggccacc

SEQ ID NO: 555805 - DNA, 15 bp, Homo sapiens
cccttggggccaccg

SEQ ID NO: 555806 - DNA, 15 bp, Homo sapiens
ccttggggccaccgc

SEQ ID NO: 555807 - DNA, 15 bp, Homo sapiens
cttggggccaccgcc

SEQ ID NO: 555808 - DNA, 15 bp, Homo sapiens
ttggggccaccgcca

SEQ ID NO: 555809 - DNA, 15 bp, Homo sapiens
tggggccaccgccac

SEQ ID NO: 555810 - DNA, 15 bp, Homo sapiens
ggggccaccgccacc

SEQ ID NO: 555811 - DNA, 15 bp, Homo sapiens
gggccaccgccacct

SEQ ID NO: 555812 - DNA, 15 bp, Homo sapiens
ggccaccgccacctc

SEQ ID NO: 555813 - DNA, 15 bp, Homo sapiens
gccaccgccacctcc

SEQ ID NO: 555814 - DNA, 15 bp, Homo sapiens
ccaccgccacctccc

SEQ ID NO: 555815 - DNA, 15 bp, Homo sapiens
caccgccacctccct

SEQ ID NO: 555816 - DNA, 15 bp, Homo sapiens
accgccacctccctg

SEQ ID NO: 555817 - DNA, 15 bp, Homo sapiens
ccgccacctccctgc

SEQ ID NO: 555818 - DNA, 15 bp, Homo sapiens
cgccacctccctgct

SEQ ID NO: 555819 - DNA, 15 bp, Homo sapiens
gccacctccctgctc

SEQ ID NO: 555820 - DNA, 15 bp, Homo sapiens
ccacctccctgctct

SEQ ID NO: 555821 - DNA, 15 bp, Homo sapiens
cacctccctgctcta

SEQ ID NO: 555822 - DNA, 15 bp, Homo sapiens
acctccctgctctat

SEQ ID NO: 555823 - DNA, 15 bp, Homo sapiens
cctccctgctctatt

SEQ ID NO: 555824 - DNA, 15 bp, Homo sapiens
ctccctgctctattg

SEQ ID NO: 555825 - DNA, 15 bp, Homo sapiens
tccctgctctattgt

SEQ ID NO: 555826 - DNA, 15 bp, Homo sapiens
ccctgctctattgtg

SEQ ID NO: 555827 - DNA, 15 bp, Homo sapiens
cctgctctattgtgg

SEQ ID NO: 555828 - DNA, 15 bp, Homo sapiens
ctgctctattgtggc

SEQ ID NO: 555829 - DNA, 15 bp, Homo sapiens
tgctctattgtggca

SEQ ID NO: 555830 - DNA, 15 bp, Homo sapiens
gctctattgtggcag

SEQ ID NO: 555831 - DNA, 15 bp, Homo sapiens
ctctattgtggcagc

SEQ ID NO: 555832 - DNA, 15 bp, Homo sapiens
tctattgtggcagcc

SEQ ID NO: 555833 - DNA, 15 bp, Homo sapiens
ctattgtggcagccc

SEQ ID NO: 555834 - DNA, 15 bp, Homo sapiens
tattgtggcagcccc

SEQ ID NO: 555835 - DNA, 15 bp, Homo sapiens
attgtggcagcccca

SEQ ID NO: 555836 - DNA, 15 bp, Homo sapiens
ttgtggcagccccag

SEQ ID NO: 555837 - DNA, 15 bp, Homo sapiens
tgtggcagccccagg

SEQ ID NO: 555838 - DNA, 15 bp, Homo sapiens
gtggcagccccaggc

SEQ ID NO: 555839 - DNA, 15 bp, Homo sapiens
tggcagccccaggct

SEQ ID NO: 555840 - DNA, 15 bp, Homo sapiens
ggcagccccaggctc

SEQ ID NO: 555841 - DNA, 15 bp, Homo sapiens
gcagccccaggctct

SEQ ID NO: 555842 - DNA, 15 bp, Homo sapiens
cagccccaggctctc

SEQ ID NO: 555843 - DNA, 15 bp, Homo sapiens
agccccaggctctct

SEQ ID NO: 555844 - DNA, 15 bp, Homo sapiens
gccccaggctctctt

SEQ ID NO: 555845 - DNA, 15 bp, Homo sapiens
ccccaggctctcttg

SEQ ID NO: 555846 - DNA, 15 bp, Homo sapiens
cccaggctctcttgt

SEQ ID NO: 555847 - DNA, 15 bp, Homo sapiens
ccaggctctcttgtc

SEQ ID NO: 555848 - DNA, 15 bp, Homo sapiens
caggctctcttgtca

SEQ ID NO: 555849 - DNA, 15 bp, Homo sapiens
aggctctcttgtcac

SEQ ID NO: 555850 - DNA, 15 bp, Homo sapiens
ggctctcttgtcacc

SEQ ID NO: 555851 - DNA, 15 bp, Homo sapiens
gctctcttgtcacct

SEQ ID NO: 555852 - DNA, 15 bp, Homo sapiens
ctctcttgtcacctg

SEQ ID NO: 555853 - DNA, 15 bp, Homo sapiens
tctcttgtcacctgt

SEQ ID NO: 555854 - DNA, 15 bp, Homo sapiens
ctcttgtcacctgtc

SEQ ID NO: 555855 - DNA, 15 bp, Homo sapiens
tcttgtcacctgtcc

SEQ ID NO: 555856 - DNA, 15 bp, Homo sapiens
cttgtcacctgtccc

SEQ ID NO: 555857 - DNA, 15 bp, Homo sapiens
ttgtcacctgtccca

SEQ ID NO: 555858 - DNA, 15 bp, Homo sapiens
tgtcacctgtcccag

SEQ ID NO: 555859 - DNA, 15 bp, Homo sapiens
gtcacctgtcccagt

SEQ ID NO: 555860 - DNA, 15 bp, Homo sapiens
tcacctgtcccagtg

SEQ ID NO: 555861 - DNA, 15 bp, Homo sapiens
cacctgtcccagtgc

SEQ ID NO: 555862 - DNA, 15 bp, Homo sapiens
acctgtcccagtgct

SEQ ID NO: 555863 - DNA, 15 bp, Homo sapiens
cctgtcccagtgcta

SEQ ID NO: 555864 - DNA, 15 bp, Homo sapiens
ctgtcccagtgctat

SEQ ID NO: 555865 - DNA, 15 bp, Homo sapiens
tgtcccagtgctatc

SEQ ID NO: 555866 - DNA, 15 bp, Homo sapiens
gtcccagtgctatca

SEQ ID NO: 555867 - DNA, 15 bp, Homo sapiens
tcccagtgctatcag

SEQ ID NO: 555868 - DNA, 15 bp, Homo sapiens
cccagtgctatcagc

SEQ ID NO: 555869 - DNA, 15 bp, Homo sapiens
ccagtgctatcagct

SEQ ID NO: 555870 - DNA, 15 bp, Homo sapiens
cagtgctatcagctg

SEQ ID NO: 555871 - DNA, 15 bp, Homo sapiens
agtgctatcagctgc

SEQ ID NO: 555872 - DNA, 15 bp, Homo sapiens
gtgctatcagctgcc

SEQ ID NO: 555873 - DNA, 15 bp, Homo sapiens
tgctatcagctgcca

SEQ ID NO: 555874 - DNA, 15 bp, Homo sapiens
gctatcagctgccag

SEQ ID NO: 555875 - DNA, 15 bp, Homo sapiens
ctatcagctgccagt

SEQ ID NO: 555876 - DNA, 15 bp, Homo sapiens
tatcagctgccagtg

SEQ ID NO: 555877 - DNA, 15 bp, Homo sapiens
atcagctgccagtgg

SEQ ID NO: 555878 - DNA, 15 bp, Homo sapiens
tcagctgccagtggg

SEQ ID NO: 555879 - DNA, 15 bp, Homo sapiens
cagctgccagtgggc

SEQ ID NO: 555880 - DNA, 15 bp, Homo sapiens
agctgccagtgggcc

SEQ ID NO: 555881 - DNA, 15 bp, Homo sapiens
gctgccagtgggccc

SEQ ID NO: 555882 - DNA, 15 bp, Homo sapiens
ctgccagtgggcccc

SEQ ID NO: 555883 - DNA, 15 bp, Homo sapiens
tgccagtgggcccca

SEQ ID NO: 555884 - DNA, 15 bp, Homo sapiens
gccagtgggccccag

SEQ ID NO: 555885 - DNA, 15 bp, Homo sapiens
ccagtgggccccagc

SEQ ID NO: 555886 - DNA, 15 bp, Homo sapiens
cagtgggccccagcc

SEQ ID NO: 555887 - DNA, 15 bp, Homo sapiens
agtgggccccagccc

SEQ ID NO: 555888 - DNA, 15 bp, Homo sapiens
gtgggccccagcccc

SEQ ID NO: 555889 - DNA, 15 bp, Homo sapiens
tgggccccagcccca

SEQ ID NO: 555890 - DNA, 15 bp, Homo sapiens
gggccccagccccat

SEQ ID NO: 555891 - DNA, 15 bp, Homo sapiens
ggccccagccccatg

SEQ ID NO: 555892 - DNA, 15 bp, Homo sapiens
gccccagccccatgc

SEQ ID NO: 555893 - DNA, 15 bp, Homo sapiens
ccccagccccatgct

SEQ ID NO: 555894 - DNA, 15 bp, Homo sapiens
cccagccccatgcta

SEQ ID NO: 555895 - DNA, 15 bp, Homo sapiens
ccagccccatgctag

SEQ ID NO: 555896 - DNA, 15 bp, Homo sapiens
cagccccatgctagc

SEQ ID NO: 555897 - DNA, 15 bp, Homo sapiens
agccccatgctagct

SEQ ID NO: 555898 - DNA, 15 bp, Homo sapiens
gccccatgctagctg

SEQ ID NO: 555899 - DNA, 15 bp, Homo sapiens
ccccatgctagctgt

SEQ ID NO: 555900 - DNA, 15 bp, Homo sapiens
cccatgctagctgta

SEQ ID NO: 555901 - DNA, 15 bp, Homo sapiens
ccatgctagctgtaa

SEQ ID NO: 555902 - DNA, 15 bp, Homo sapiens
catgctagctgtaag

SEQ ID NO: 555903 - DNA, 15 bp, Homo sapiens
atgctagctgtaagt

SEQ ID NO: 555904 - DNA, 15 bp, Homo sapiens
tgctagctgtaagtg

SEQ ID NO: 555905 - DNA, 15 bp, Homo sapiens
gctagctgtaagtgc

SEQ ID NO: 555906 - DNA, 15 bp, Homo sapiens
ctagctgtaagtgca

SEQ ID NO: 555907 - DNA, 15 bp, Homo sapiens
tagctgtaagtgcag

SEQ ID NO: 555908 - DNA, 15 bp, Homo sapiens
agctgtaagtgcagg

SEQ ID NO: 555909 - DNA, 15 bp, Homo sapiens
gctgtaagtgcaggt

SEQ ID NO: 555910 - DNA, 15 bp, Homo sapiens
ctgtaagtgcaggtc

SEQ ID NO: 555911 - DNA, 15 bp, Homo sapiens
tgtaagtgcaggtct

SEQ ID NO: 555912 - DNA, 15 bp, Homo sapiens
gtaagtgcaggtctt

SEQ ID NO: 555913 - DNA, 15 bp, Homo sapiens
taagtgcaggtctta

SEQ ID NO: 555914 - DNA, 15 bp, Homo sapiens
aagtgcaggtcttaa

SEQ ID NO: 555915 - DNA, 15 bp, Homo sapiens
agtgcaggtcttaat

SEQ ID NO: 555916 - DNA, 15 bp, Homo sapiens
gtgcaggtcttaata

SEQ ID NO: 555917 - DNA, 15 bp, Homo sapiens
tgcaggtcttaatac

SEQ ID NO: 555918 - DNA, 15 bp, Homo sapiens
gcaggtcttaataca

SEQ ID NO: 555919 - DNA, 15 bp, Homo sapiens
caggtcttaatacaa

SEQ ID NO: 555920 - DNA, 15 bp, Homo sapiens
aggtcttaatacaaa

SEQ ID NO: 555921 - DNA, 15 bp, Homo sapiens
ggtcttaatacaaat

SEQ ID NO: 555922 - DNA, 15 bp, Homo sapiens
gtcttaatacaaatt

SEQ ID NO: 555923 - DNA, 15 bp, Homo sapiens
tcttaatacaaatta

SEQ ID NO: 555924 - DNA, 15 bp, Homo sapiens
cttaatacaaattag

SEQ ID NO: 555925 - DNA, 15 bp, Homo sapiens
ttaatacaaattagc

SEQ ID NO: 555926 - DNA, 15 bp, Homo sapiens
taatacaaattagca

SEQ ID NO: 555927 - DNA, 15 bp, Homo sapiens
aatacaaattagcag

SEQ ID NO: 555928 - DNA, 15 bp, Homo sapiens
atacaaattagcagc

SEQ ID NO: 555929 - DNA, 15 bp, Homo sapiens
tacaaattagcagca

SEQ ID NO: 555930 - DNA, 15 bp, Homo sapiens
acaaattagcagcag

SEQ ID NO: 555931 - DNA, 15 bp, Homo sapiens
caaattagcagcagt

SEQ ID NO: 555932 - DNA, 15 bp, Homo sapiens
aaattagcagcagtg

SEQ ID NO: 555933 - DNA, 15 bp, Homo sapiens
aattagcagcagtgc

SEQ ID NO: 555934 - DNA, 15 bp, Homo sapiens
attagcagcagtgca

SEQ ID NO: 555935 - DNA, 15 bp, Homo sapiens
ttagcagcagtgcag

SEQ ID NO: 555936 - DNA, 15 bp, Homo sapiens
tagcagcagtgcagg

SEQ ID NO: 555937 - DNA, 15 bp, Homo sapiens
agcagcagtgcaggc

SEQ ID NO: 555938 - DNA, 15 bp, Homo sapiens
gcagcagtgcaggca

SEQ ID NO: 555939 - DNA, 15 bp, Homo sapiens
cagcagtgcaggcaa

SEQ ID NO: 555940 - DNA, 15 bp, Homo sapiens
agcagtgcaggcaag

SEQ ID NO: 555941 - DNA, 15 bp, Homo sapiens
gcagtgcaggcaagc

SEQ ID NO: 555942 - DNA, 15 bp, Homo sapiens
cagtgcaggcaagct

SEQ ID NO: 555943 - DNA, 15 bp, Homo sapiens
agtgcaggcaagctg

SEQ ID NO: 555944 - DNA, 15 bp, Homo sapiens
gtgcaggcaagctga

SEQ ID NO: 555945 - DNA, 15 bp, Homo sapiens
tgcaggcaagctgaa

SEQ ID NO: 555946 - DNA, 15 bp, Homo sapiens
gcaggcaagctgaat

SEQ ID NO: 555947 - DNA, 15 bp, Homo sapiens
caggcaagctgaatg

SEQ ID NO: 555948 - DNA, 15 bp, Homo sapiens
aggcaagctgaatgg

SEQ ID NO: 555949 - DNA, 15 bp, Homo sapiens
ggcaagctgaatggc

SEQ ID NO: 555950 - DNA, 15 bp, Homo sapiens
gcaagctgaatggca

SEQ ID NO: 555951 - DNA, 15 bp, Homo sapiens
caagctgaatggcaa

SEQ ID NO: 555952 - DNA, 15 bp, Homo sapiens
aagctgaatggcaaa

SEQ ID NO: 555953 - DNA, 15 bp, Homo sapiens
agctgaatggcaaaa

SEQ ID NO: 555954 - DNA, 15 bp, Homo sapiens
gctgaatggcaaaac

SEQ ID NO: 555955 - DNA, 15 bp, Homo sapiens
ctgaatggcaaaacc

SEQ ID NO: 555956 - DNA, 15 bp, Homo sapiens
tgaatggcaaaacct

SEQ ID NO: 555957 - DNA, 15 bp, Homo sapiens
gaatggcaaaacctc

SEQ ID NO: 555958 - DNA, 15 bp, Homo sapiens
aatggcaaaacctcg

SEQ ID NO: 555959 - DNA, 15 bp, Homo sapiens
atggcaaaacctcgt

SEQ ID NO: 555960 - DNA, 15 bp, Homo sapiens
tggcaaaacctcgtc

SEQ ID NO: 555961 - DNA, 15 bp, Homo sapiens
ggcaaaacctcgtcc

SEQ ID NO: 555962 - DNA, 15 bp, Homo sapiens
gcaaaacctcgtccc

SEQ ID NO: 555963 - DNA, 15 bp, Homo sapiens
caaaacctcgtcccg

SEQ ID NO: 555964 - DNA, 15 bp, Homo sapiens
aaaacctcgtcccgc

SEQ ID NO: 555965 - DNA, 15 bp, Homo sapiens
aaacctcgtcccgca

SEQ ID NO: 555966 - DNA, 15 bp, Homo sapiens
aacctcgtcccgcac

SEQ ID NO: 555967 - DNA, 15 bp, Homo sapiens
acctcgtcccgcact

SEQ ID NO: 555968 - DNA, 15 bp, Homo sapiens
cctcgtcccgcactc

SEQ ID NO: 555969 - DNA, 15 bp, Homo sapiens
ctcgtcccgcactcc

SEQ ID NO: 555970 - DNA, 15 bp, Homo sapiens
tcgtcccgcactccc

SEQ ID NO: 555971 - DNA, 15 bp, Homo sapiens
cgtcccgcactcccc

SEQ ID NO: 555972 - DNA, 15 bp, Homo sapiens
gtcccgcactccccc

SEQ ID NO: 555973 - DNA, 15 bp, Homo sapiens
tcccgcactccccct

SEQ ID NO: 555974 - DNA, 15 bp, Homo sapiens
cccgcactccccctc

SEQ ID NO: 555975 - DNA, 15 bp, Homo sapiens
ccgcactccccctcc

SEQ ID NO: 555976 - DNA, 15 bp, Homo sapiens
cgcactccccctccc

SEQ ID NO: 555977 - DNA, 15 bp, Homo sapiens
gcactccccctccct

SEQ ID NO: 555978 - DNA, 15 bp, Homo sapiens
cactccccctccctc

SEQ ID NO: 555979 - DNA, 15 bp, Homo sapiens
actccccctccctct

SEQ ID NO: 555980 - DNA, 15 bp, Homo sapiens
ctccccctccctctt

SEQ ID NO: 555981 - DNA, 15 bp, Homo sapiens
tccccctccctcttg

SEQ ID NO: 555982 - DNA, 15 bp, Homo sapiens
ccccctccctcttgt

SEQ ID NO: 555983 - DNA, 15 bp, Homo sapiens
cccctccctcttgtt

SEQ ID NO: 555984 - DNA, 15 bp, Homo sapiens
ccctccctcttgttt

SEQ ID NO: 555985 - DNA, 15 bp, Homo sapiens
cctccctcttgtttt

SEQ ID NO: 555986 - DNA, 15 bp, Homo sapiens
ctccctcttgttttc

SEQ ID NO: 555987 - DNA, 15 bp, Homo sapiens
tccctcttgttttca

SEQ ID NO: 555988 - DNA, 15 bp, Homo sapiens
ccctcttgttttcat

SEQ ID NO: 555989 - DNA, 15 bp, Homo sapiens
cctcttgttttcatc

SEQ ID NO: 555990 - DNA, 15 bp, Homo sapiens
ctcttgttttcatca

SEQ ID NO: 555991 - DNA, 15 bp, Homo sapiens
tcttgttttcatcaa

SEQ ID NO: 555992 - DNA, 15 bp, Homo sapiens
cttgttttcatcaag

SEQ ID NO: 555993 - DNA, 15 bp, Homo sapiens
ttgttttcatcaagc

SEQ ID NO: 555994 - DNA, 15 bp, Homo sapiens
tgttttcatcaagcc

SEQ ID NO: 555995 - DNA, 15 bp, Homo sapiens
gttttcatcaagcct

SEQ ID NO: 555996 - DNA, 15 bp, Homo sapiens
ttttcatcaagcctt

SEQ ID NO: 555997 - DNA, 15 bp, Homo sapiens
tttcatcaagccttc

SEQ ID NO: 555998 - DNA, 15 bp, Homo sapiens
ttcatcaagccttct

SEQ ID NO: 555999 - DNA, 15 bp, Homo sapiens
tcatcaagccttctt

SEQ ID NO: 556000 - DNA, 15 bp, Homo sapiens
catcaagccttcttc

SEQ ID NO: 556001 - DNA, 15 bp, Homo sapiens
atcaagccttcttca

SEQ ID NO: 556002 - DNA, 15 bp, Homo sapiens
tcaagccttcttcac

SEQ ID NO: 556003 - DNA, 15 bp, Homo sapiens
caagccttcttcaca

SEQ ID NO: 556004 - DNA, 15 bp, Homo sapiens
aagccttcttcacag

SEQ ID NO: 556005 - DNA, 15 bp, Homo sapiens
agccttcttcacagg

SEQ ID NO: 556006 - DNA, 15 bp, Homo sapiens
gccttcttcacaggc

SEQ ID NO: 556007 - DNA, 15 bp, Homo sapiens
ccttcttcacaggcg

SEQ ID NO: 556008 - DNA, 15 bp, Homo sapiens
cttcttcacaggcgc

SEQ ID NO: 556009 - DNA, 15 bp, Homo sapiens
ttcttcacaggcgcc

SEQ ID NO: 556010 - DNA, 15 bp, Homo sapiens
tcttcacaggcgcca

SEQ ID NO: 556011 - DNA, 15 bp, Homo sapiens
cttcacaggcgccag

SEQ ID NO: 556012 - DNA, 15 bp, Homo sapiens
ttcacaggcgccagc

SEQ ID NO: 556013 - DNA, 15 bp, Homo sapiens
tcacaggcgccagct

SEQ ID NO: 556014 - DNA, 15 bp, Homo sapiens
cacaggcgccagctg

SEQ ID NO: 556015 - DNA, 15 bp, Homo sapiens
acaggcgccagctgc

SEQ ID NO: 556016 - DNA, 15 bp, Homo sapiens
caggcgccagctgcc

SEQ ID NO: 556017 - DNA, 15 bp, Homo sapiens
aggcgccagctgcct

SEQ ID NO: 556018 - DNA, 15 bp, Homo sapiens
ggcgccagctgcctc

SEQ ID NO: 556019 - DNA, 15 bp, Homo sapiens
gcgccagctgcctca

SEQ ID NO: 556020 - DNA, 15 bp, Homo sapiens
cgccagctgcctcat

SEQ ID NO: 556021 - DNA, 15 bp, Homo sapiens
gccagctgcctcatt

SEQ ID NO: 556022 - DNA, 15 bp, Homo sapiens
ccagctgcctcatta

SEQ ID NO: 556023 - DNA, 15 bp, Homo sapiens
cagctgcctcattaa

SEQ ID NO: 556024 - DNA, 15 bp, Homo sapiens
agctgcctcattaaa

SEQ ID NO: 556025 - DNA, 15 bp, Homo sapiens
gctgcctcattaaag

SEQ ID NO: 556026 - DNA, 15 bp, Homo sapiens
ctgcctcattaaaga

SEQ ID NO: 556027 - DNA, 15 bp, Homo sapiens
tgcctcattaaagag

SEQ ID NO: 556028 - DNA, 15 bp, Homo sapiens
gcctcattaaagagc

SEQ ID NO: 556029 - DNA, 15 bp, Homo sapiens
cctcattaaagagca

SEQ ID NO: 556030 - DNA, 15 bp, Homo sapiens
ctcattaaagagcag

SEQ ID NO: 556031 - DNA, 15 bp, Homo sapiens
tcattaaagagcagc

SEQ ID NO: 556032 - DNA, 15 bp, Homo sapiens
cattaaagagcagcc

SEQ ID NO: 556033 - DNA, 15 bp, Homo sapiens
attaaagagcagcct

SEQ ID NO: 556034 - DNA, 15 bp, Homo sapiens
ttaaagagcagcctt

SEQ ID NO: 556035 - DNA, 15 bp, Homo sapiens
taaagagcagccttt

SEQ ID NO: 556036 - DNA, 15 bp, Homo sapiens
aaagagcagcctttt

SEQ ID NO: 556037 - DNA, 15 bp, Homo sapiens
aagagcagcctttta

SEQ ID NO: 556038 - DNA, 15 bp, Homo sapiens
agagcagccttttat

SEQ ID NO: 556039 - DNA, 15 bp, Homo sapiens
gagcagccttttatg

SEQ ID NO: 556040 - DNA, 15 bp, Homo sapiens
agcagccttttatgc

SEQ ID NO: 556041 - DNA, 15 bp, Homo sapiens
gcagccttttatgct

SEQ ID NO: 556042 - DNA, 15 bp, Homo sapiens
cagccttttatgctg

SEQ ID NO: 556043 - DNA, 15 bp, Homo sapiens
agccttttatgctgg

SEQ ID NO: 556044 - DNA, 15 bp, Homo sapiens
gccttttatgctggg

SEQ ID NO: 556045 - DNA, 15 bp, Homo sapiens
ccttttatgctgggc

SEQ ID NO: 556046 - DNA, 15 bp, Homo sapiens
cttttatgctgggct

SEQ ID NO: 556047 - DNA, 15 bp, Homo sapiens
ttttatgctgggctt

SEQ ID NO: 556048 - DNA, 15 bp, Homo sapiens
tttatgctgggcttc

SEQ ID NO: 556049 - DNA, 15 bp, Homo sapiens
ttatgctgggcttca

SEQ ID NO: 556050 - DNA, 15 bp, Homo sapiens
tatgctgggcttcac

SEQ ID NO: 556051 - DNA, 15 bp, Homo sapiens
atgctgggcttcacc

SEQ ID NO: 556052 - DNA, 15 bp, Homo sapiens
tgctgggcttcacct

SEQ ID NO: 556053 - DNA, 15 bp, Homo sapiens
gctgggcttcacctg

SEQ ID NO: 556054 - DNA, 15 bp, Homo sapiens
ctgggcttcacctgt

SEQ ID NO: 556055 - DNA, 15 bp, Homo sapiens
tgggcttcacctgta

SEQ ID NO: 556056 - DNA, 15 bp, Homo sapiens
gggcttcacctgtac

SEQ ID NO: 556057 - DNA, 15 bp, Homo sapiens
ggcttcacctgtacc

SEQ ID NO: 556058 - DNA, 15 bp, Homo sapiens
gcttcacctgtaccc

SEQ ID NO: 556059 - DNA, 15 bp, Homo sapiens
cttcacctgtaccca

SEQ ID NO: 556060 - DNA, 15 bp, Homo sapiens
ttcacctgtacccac

SEQ ID NO: 556061 - DNA, 15 bp, Homo sapiens
tcacctgtacccacc

SEQ ID NO: 556062 - DNA, 15 bp, Homo sapiens
cacctgtacccaccc

SEQ ID NO: 556063 - DNA, 15 bp, Homo sapiens
acctgtacccaccct

SEQ ID NO: 556064 - DNA, 15 bp, Homo sapiens
cctgtacccaccctg

SEQ ID NO: 556065 - DNA, 15 bp, Homo sapiens
ctgtacccaccctga

SEQ ID NO: 556066 - DNA, 15 bp, Homo sapiens
tgtacccaccctgag

SEQ ID NO: 556067 - DNA, 15 bp, Homo sapiens
gtacccaccctgagc

SEQ ID NO: 556068 - DNA, 15 bp, Homo sapiens
tacccaccctgagcg

SEQ ID NO: 556069 - DNA, 15 bp, Homo sapiens
acccaccctgagcgg

SEQ ID NO: 556070 - DNA, 15 bp, Homo sapiens
cccaccctgagcggc

SEQ ID NO: 556071 - DNA, 15 bp, Homo sapiens
ccaccctgagcggca

SEQ ID NO: 556072 - DNA, 15 bp, Homo sapiens
caccctgagcggcag

SEQ ID NO: 556073 - DNA, 15 bp, Homo sapiens
accctgagcggcagc

SEQ ID NO: 556074 - DNA, 15 bp, Homo sapiens
ccctgagcggcagcc

SEQ ID NO: 556075 - DNA, 15 bp, Homo sapiens
cctgagcggcagccg

SEQ ID NO: 556076 - DNA, 15 bp, Homo sapiens
ctgagcggcagccgt

SEQ ID NO: 556077 - DNA, 15 bp, Homo sapiens
tgagcggcagccgtg

SEQ ID NO: 556078 - DNA, 15 bp, Homo sapiens
gagcggcagccgtgg

SEQ ID NO: 556079 - DNA, 15 bp, Homo sapiens
agcggcagccgtgga

SEQ ID NO: 556080 - DNA, 15 bp, Homo sapiens
gcggcagccgtggag

SEQ ID NO: 556081 - DNA, 15 bp, Homo sapiens
cggcagccgtggagc

SEQ ID NO: 556082 - DNA, 15 bp, Homo sapiens
ggcagccgtggagcc

SEQ ID NO: 556083 - DNA, 15 bp, Homo sapiens
gcagccgtggagccc

SEQ ID NO: 556084 - DNA, 15 bp, Homo sapiens
cagccgtggagcccc

SEQ ID NO: 556085 - DNA, 15 bp, Homo sapiens
agccgtggagcccca

SEQ ID NO: 556086 - DNA, 15 bp, Homo sapiens
gccgtggagccccat

SEQ ID NO: 556087 - DNA, 15 bp, Homo sapiens
ccgtggagccccatg

SEQ ID NO: 556088 - DNA, 15 bp, Homo sapiens
cgtggagccccatgg

SEQ ID NO: 556089 - DNA, 15 bp, Homo sapiens
gtggagccccatggc

SEQ ID NO: 556090 - DNA, 15 bp, Homo sapiens
tggagccccatggcc

SEQ ID NO: 556091 - DNA, 15 bp, Homo sapiens
ggagccccatggccg

SEQ ID NO: 556092 - DNA, 15 bp, Homo sapiens
gagccccatggccgc

SEQ ID NO: 556093 - DNA, 15 bp, Homo sapiens
agccccatggccgca

SEQ ID NO: 556094 - DNA, 15 bp, Homo sapiens
gccccatggccgcac

SEQ ID NO: 556095 - DNA, 15 bp, Homo sapiens
ccccatggccgcacg

SEQ ID NO: 556096 - DNA, 15 bp, Homo sapiens
cccatggccgcacgc

SEQ ID NO: 556097 - DNA, 15 bp, Homo sapiens
ccatggccgcacgca

SEQ ID NO: 556098 - DNA, 15 bp, Homo sapiens
catggccgcacgcag

SEQ ID NO: 556099 - DNA, 15 bp, Homo sapiens
atggccgcacgcagg

SEQ ID NO: 556100 - DNA, 15 bp, Homo sapiens
tggccgcacgcaggg

SEQ ID NO: 556101 - DNA, 15 bp, Homo sapiens
ggccgcacgcagggc

SEQ ID NO: 556102 - DNA, 15 bp, Homo sapiens
gccgcacgcagggct

SEQ ID NO: 556103 - DNA, 15 bp, Homo sapiens
ccgcacgcagggctt

SEQ ID NO: 556104 - DNA, 15 bp, Homo sapiens
cgcacgcagggcttg

SEQ ID NO: 556105 - DNA, 15 bp, Homo sapiens
gcacgcagggcttgc

SEQ ID NO: 556106 - DNA, 15 bp, Homo sapiens
cacgcagggcttgcg

SEQ ID NO: 556107 - DNA, 15 bp, Homo sapiens
acgcagggcttgcgc

SEQ ID NO: 556108 - DNA, 15 bp, Homo sapiens
cgcagggcttgcgct

SEQ ID NO: 556109 - DNA, 15 bp, Homo sapiens
gcagggcttgcgctg

SEQ ID NO: 556110 - DNA, 15 bp, Homo sapiens
cagggcttgcgctgg

SEQ ID NO: 556111 - DNA, 15 bp, Homo sapiens
agggcttgcgctggc

SEQ ID NO: 556112 - DNA, 15 bp, Homo sapiens
gggcttgcgctggct

SEQ ID NO: 556113 - DNA, 15 bp, Homo sapiens
ggcttgcgctggctg

SEQ ID NO: 556114 - DNA, 15 bp, Homo sapiens
gcttgcgctggctgg

SEQ ID NO: 556115 - DNA, 15 bp, Homo sapiens
cttgcgctggctgga

SEQ ID NO: 556116 - DNA, 15 bp, Homo sapiens
ttgcgctggctggag

SEQ ID NO: 556117 - DNA, 15 bp, Homo sapiens
tgcgctggctggagg

SEQ ID NO: 556118 - DNA, 15 bp, Homo sapiens
gcgctggctggagga

SEQ ID NO: 556119 - DNA, 15 bp, Homo sapiens
cgctggctggaggag

SEQ ID NO: 556120 - DNA, 15 bp, Homo sapiens
gctggctggaggagg

SEQ ID NO: 556121 - DNA, 15 bp, Homo sapiens
ctggctggaggaggc

SEQ ID NO: 556122 - DNA, 15 bp, Homo sapiens
tggctggaggaggca

SEQ ID NO: 556123 - DNA, 15 bp, Homo sapiens
ggctggaggaggcac

SEQ ID NO: 556124 - DNA, 15 bp, Homo sapiens
gctggaggaggcacg

SEQ ID NO: 556125 - DNA, 15 bp, Homo sapiens
ctggaggaggcacgg

SEQ ID NO: 556126 - DNA, 15 bp, Homo sapiens
tggaggaggcacggt

SEQ ID NO: 556127 - DNA, 15 bp, Homo sapiens
ggaggaggcacggtg

SEQ ID NO: 556128 - DNA, 15 bp, Homo sapiens
gaggaggcacggtgc

SEQ ID NO: 556129 - DNA, 15 bp, Homo sapiens
aggaggcacggtgct

SEQ ID NO: 556130 - DNA, 15 bp, Homo sapiens
ggaggcacggtgctt

SEQ ID NO: 556131 - DNA, 15 bp, Homo sapiens
gaggcacggtgcttg

SEQ ID NO: 556132 - DNA, 15 bp, Homo sapiens
aggcacggtgcttgg

SEQ ID NO: 556133 - DNA, 15 bp, Homo sapiens
ggcacggtgcttggg

SEQ ID NO: 556134 - DNA, 15 bp, Homo sapiens
gcacggtgcttggga

SEQ ID NO: 556135 - DNA, 15 bp, Homo sapiens
cacggtgcttgggag

SEQ ID NO: 556136 - DNA, 15 bp, Homo sapiens
acggtgcttgggagc

SEQ ID NO: 556137 - DNA, 15 bp, Homo sapiens
cggtgcttgggagct

SEQ ID NO: 556138 - DNA, 15 bp, Homo sapiens
ggtgcttgggagctg

SEQ ID NO: 556139 - DNA, 15 bp, Homo sapiens
gtgcttgggagctgc

SEQ ID NO: 556140 - DNA, 15 bp, Homo sapiens
tgcttgggagctgca

SEQ ID NO: 556141 - DNA, 15 bp, Homo sapiens
gcttgggagctgcaa

SEQ ID NO: 556142 - DNA, 15 bp, Homo sapiens
cttgggagctgcaag

SEQ ID NO: 556143 - DNA, 15 bp, Homo sapiens
ttgggagctgcaaga

SEQ ID NO: 556144 - DNA, 15 bp, Homo sapiens
tgggagctgcaagaa

SEQ ID NO: 556145 - DNA, 15 bp, Homo sapiens
gggagctgcaagaat

SEQ ID NO: 556146 - DNA, 15 bp, Homo sapiens
ggagctgcaagaatg

SEQ ID NO: 556147 - DNA, 15 bp, Homo sapiens
gagctgcaagaatgg

SEQ ID NO: 556148 - DNA, 15 bp, Homo sapiens
agctgcaagaatgga

SEQ ID NO: 556149 - DNA, 15 bp, Homo sapiens
gctgcaagaatggag

SEQ ID NO: 556150 - DNA, 15 bp, Homo sapiens
ctgcaagaatggagg

SEQ ID NO: 556151 - DNA, 15 bp, Homo sapiens
tgcaagaatggaggg

SEQ ID NO: 556152 - DNA, 15 bp, Homo sapiens
gcaagaatggaggga

SEQ ID NO: 556153 - DNA, 15 bp, Homo sapiens
caagaatggagggag

SEQ ID NO: 556154 - DNA, 15 bp, Homo sapiens
aagaatggagggagg

SEQ ID NO: 556155 - DNA, 15 bp, Homo sapiens
agaatggagggagga

SEQ ID NO: 556156 - DNA, 15 bp, Homo sapiens
gaatggagggaggac

SEQ ID NO: 556157 - DNA, 15 bp, Homo sapiens
aatggagggaggact

SEQ ID NO: 556158 - DNA, 15 bp, Homo sapiens
atggagggaggactg

SEQ ID NO: 556159 - DNA, 15 bp, Homo sapiens
tggagggaggactgg

SEQ ID NO: 556160 - DNA, 15 bp, Homo sapiens
ggagggaggactggc

SEQ ID NO: 556161 - DNA, 15 bp, Homo sapiens
gagggaggactggca

SEQ ID NO: 556162 - DNA, 15 bp, Homo sapiens
agggaggactggcag

SEQ ID NO: 556163 - DNA, 15 bp, Homo sapiens
gggaggactggcagg

SEQ ID NO: 556164 - DNA, 15 bp, Homo sapiens
ggaggactggcaggc

SEQ ID NO: 556165 - DNA, 15 bp, Homo sapiens
gaggactggcaggcg

SEQ ID NO: 556166 - DNA, 15 bp, Homo sapiens
aggactggcaggcga

SEQ ID NO: 556167 - DNA, 15 bp, Homo sapiens
ggactggcaggcgag

SEQ ID NO: 556168 - DNA, 15 bp, Homo sapiens
gactggcaggcgagc

SEQ ID NO: 556169 - DNA, 15 bp, Homo sapiens
actggcaggcgagcg

SEQ ID NO: 556170 - DNA, 15 bp, Homo sapiens
ctggcaggcgagcgg

SEQ ID NO: 556171 - DNA, 15 bp, Homo sapiens
tggcaggcgagcggg

SEQ ID NO: 556172 - DNA, 15 bp, Homo sapiens
ggcaggcgagcgggc

SEQ ID NO: 556173 - DNA, 15 bp, Homo sapiens
gcaggcgagcgggcg

SEQ ID NO: 556174 - DNA, 15 bp, Homo sapiens
caggcgagcgggcga

SEQ ID NO: 556175 - DNA, 15 bp, Homo sapiens
aggcgagcgggcgag

SEQ ID NO: 556176 - DNA, 15 bp, Homo sapiens
ggcgagcgggcgagg

SEQ ID NO: 556177 - DNA, 15 bp, Homo sapiens
gcgagcgggcgaggt

SEQ ID NO: 556178 - DNA, 15 bp, Homo sapiens
cgagcgggcgaggta

SEQ ID NO: 556179 - DNA, 15 bp, Homo sapiens
gagcgggcgaggtat

SEQ ID NO: 556180 - DNA, 15 bp, Homo sapiens
agcgggcgaggtatg

SEQ ID NO: 556181 - DNA, 15 bp, Homo sapiens
gcgggcgaggtatgg

SEQ ID NO: 556182 - DNA, 15 bp, Homo sapiens
cgggcgaggtatggc

SEQ ID NO: 556183 - DNA, 15 bp, Homo sapiens
gggcgaggtatggct

SEQ ID NO: 556184 - DNA, 15 bp, Homo sapiens
ggcgaggtatggctt

SEQ ID NO: 556185 - DNA, 15 bp, Homo sapiens
gcgaggtatggcttt

SEQ ID NO: 556186 - DNA, 15 bp, Homo sapiens
cgaggtatggctttc

SEQ ID NO: 556187 - DNA, 15 bp, Homo sapiens
gaggtatggctttcc

SEQ ID NO: 556188 - DNA, 15 bp, Homo sapiens
aggtatggctttcct

SEQ ID NO: 556189 - DNA, 15 bp, Homo sapiens
ggtatggctttcctt

SEQ ID NO: 556190 - DNA, 15 bp, Homo sapiens
gtatggctttccttc

SEQ ID NO: 556191 - DNA, 15 bp, Homo sapiens
tatggctttccttct

SEQ ID NO: 556192 - DNA, 15 bp, Homo sapiens
atggctttccttctt

SEQ ID NO: 556193 - DNA, 15 bp, Homo sapiens
tggctttccttcttt

SEQ ID NO: 556194 - DNA, 15 bp, Homo sapiens
ggctttccttctttc

SEQ ID NO: 556195 - DNA, 15 bp, Homo sapiens
gctttccttctttct

SEQ ID NO: 556196 - DNA, 15 bp, Homo sapiens
ctttccttctttctc

SEQ ID NO: 556197 - DNA, 15 bp, Homo sapiens
tttccttctttctct

SEQ ID NO: 556198 - DNA, 15 bp, Homo sapiens
ttccttctttctctc

SEQ ID NO: 556199 - DNA, 15 bp, Homo sapiens
tccttctttctctcc

SEQ ID NO: 556200 - DNA, 15 bp, Homo sapiens
ccttctttctctccc

SEQ ID NO: 556201 - DNA, 15 bp, Homo sapiens
cttctttctctccct

SEQ ID NO: 556202 - DNA, 15 bp, Homo sapiens
ttctttctctccctg

SEQ ID NO: 556203 - DNA, 15 bp, Homo sapiens
tctttctctccctga

SEQ ID NO: 556204 - DNA, 15 bp, Homo sapiens
ctttctctccctgag

SEQ ID NO: 556205 - DNA, 15 bp, Homo sapiens
tttctctccctgagc

SEQ ID NO: 556206 - DNA, 15 bp, Homo sapiens
ttctctccctgagca

SEQ ID NO: 556207 - DNA, 15 bp, Homo sapiens
tctctccctgagcag

SEQ ID NO: 556208 - DNA, 15 bp, Homo sapiens
ctctccctgagcagt

SEQ ID NO: 556209 - DNA, 15 bp, Homo sapiens
tctccctgagcagtg

SEQ ID NO: 556210 - DNA, 15 bp, Homo sapiens
ctccctgagcagtgg

SEQ ID NO: 556211 - DNA, 15 bp, Homo sapiens
tccctgagcagtggg

SEQ ID NO: 556212 - DNA, 15 bp, Homo sapiens
ccctgagcagtggga

SEQ ID NO: 556213 - DNA, 15 bp, Homo sapiens
cctgagcagtgggag

SEQ ID NO: 556214 - DNA, 15 bp, Homo sapiens
ctgagcagtgggagg

SEQ ID NO: 556215 - DNA, 15 bp, Homo sapiens
tgagcagtgggagga

SEQ ID NO: 556216 - DNA, 15 bp, Homo sapiens
gagcagtgggaggag

SEQ ID NO: 556217 - DNA, 15 bp, Homo sapiens
agcagtgggaggagg

SEQ ID NO: 556218 - DNA, 15 bp, Homo sapiens
gcagtgggaggaggg

SEQ ID NO: 556219 - DNA, 15 bp, Homo sapiens
cagtgggaggagggc

SEQ ID NO: 556220 - DNA, 15 bp, Homo sapiens
agtgggaggagggcc

SEQ ID NO: 556221 - DNA, 15 bp, Homo sapiens
gtgggaggagggcca

SEQ ID NO: 556222 - DNA, 15 bp, Homo sapiens
tgggaggagggccag

SEQ ID NO: 556223 - DNA, 15 bp, Homo sapiens
gggaggagggccagc

SEQ ID NO: 556224 - DNA, 15 bp, Homo sapiens
ggaggagggccagct

SEQ ID NO: 556225 - DNA, 15 bp, Homo sapiens
gaggagggccagctg

SEQ ID NO: 556226 - DNA, 15 bp, Homo sapiens
aggagggccagctgg

SEQ ID NO: 556227 - DNA, 15 bp, Homo sapiens
ggagggccagctggg

SEQ ID NO: 556228 - DNA, 15 bp, Homo sapiens
gagggccagctgggc

SEQ ID NO: 556229 - DNA, 15 bp, Homo sapiens
agggccagctgggca

SEQ ID NO: 556230 - DNA, 15 bp, Homo sapiens
gggccagctgggcaa

SEQ ID NO: 556231 - DNA, 15 bp, Homo sapiens
ggccagctgggcaag

SEQ ID NO: 556232 - DNA, 15 bp, Homo sapiens
gccagctgggcaagt

SEQ ID NO: 556233 - DNA, 15 bp, Homo sapiens
ccagctgggcaagtg

SEQ ID NO: 556234 - DNA, 15 bp, Homo sapiens
cagctgggcaagtgt

SEQ ID NO: 556235 - DNA, 15 bp, Homo sapiens
agctgggcaagtgtg

SEQ ID NO: 556236 - DNA, 15 bp, Homo sapiens
gctgggcaagtgtgg

SEQ ID NO: 556237 - DNA, 15 bp, Homo sapiens
ctgggcaagtgtggg

SEQ ID NO: 556238 - DNA, 15 bp, Homo sapiens
tgggcaagtgtgggg

SEQ ID NO: 556239 - DNA, 15 bp, Homo sapiens
gggcaagtgtgggga

SEQ ID NO: 556240 - DNA, 15 bp, Homo sapiens
ggcaagtgtggggaa

SEQ ID NO: 556241 - DNA, 15 bp, Homo sapiens
gcaagtgtggggaac

SEQ ID NO: 556242 - DNA, 15 bp, Homo sapiens
caagtgtggggaacc

SEQ ID NO: 556243 - DNA, 15 bp, Homo sapiens
aagtgtggggaacca

SEQ ID NO: 556244 - DNA, 15 bp, Homo sapiens
agtgtggggaaccag

SEQ ID NO: 556245 - DNA, 15 bp, Homo sapiens
gtgtggggaaccagg

SEQ ID NO: 556246 - DNA, 15 bp, Homo sapiens
tgtggggaaccagga

SEQ ID NO: 556247 - DNA, 15 bp, Homo sapiens
gtggggaaccaggat

SEQ ID NO: 556248 - DNA, 15 bp, Homo sapiens
tggggaaccaggatg

SEQ ID NO: 556249 - DNA, 15 bp, Homo sapiens
ggggaaccaggatgg

SEQ ID NO: 556250 - DNA, 15 bp, Homo sapiens
gggaaccaggatggt

SEQ ID NO: 556251 - DNA, 15 bp, Homo sapiens
ggaaccaggatggtg

SEQ ID NO: 556252 - DNA, 15 bp, Homo sapiens
gaaccaggatggtgc

SEQ ID NO: 556253 - DNA, 15 bp, Homo sapiens
aaccaggatggtgcc

SEQ ID NO: 556254 - DNA, 15 bp, Homo sapiens
accaggatggtgcca

SEQ ID NO: 556255 - DNA, 15 bp, Homo sapiens
ccaggatggtgccag

SEQ ID NO: 556256 - DNA, 15 bp, Homo sapiens
caggatggtgccagc

SEQ ID NO: 556257 - DNA, 15 bp, Homo sapiens
aggatggtgccagcc

SEQ ID NO: 556258 - DNA, 15 bp, Homo sapiens
ggatggtgccagccc

SEQ ID NO: 556259 - DNA, 15 bp, Homo sapiens
gatggtgccagccct

SEQ ID NO: 556260 - DNA, 15 bp, Homo sapiens
atggtgccagccctt

SEQ ID NO: 556261 - DNA, 15 bp, Homo sapiens
tggtgccagcccttc

SEQ ID NO: 556262 - DNA, 15 bp, Homo sapiens
ggtgccagcccttct

SEQ ID NO: 556263 - DNA, 15 bp, Homo sapiens
gtgccagcccttctc

SEQ ID NO: 556264 - DNA, 15 bp, Homo sapiens
tgccagcccttctcc

SEQ ID NO: 556265 - DNA, 15 bp, Homo sapiens
gccagcccttctccc

SEQ ID NO: 556266 - DNA, 15 bp, Homo sapiens
ccagcccttctccct

SEQ ID NO: 556267 - DNA, 15 bp, Homo sapiens
cagcccttctcccta

SEQ ID NO: 556268 - DNA, 15 bp, Homo sapiens
agcccttctccctaa

SEQ ID NO: 556269 - DNA, 15 bp, Homo sapiens
gcccttctccctaag

SEQ ID NO: 556270 - DNA, 15 bp, Homo sapiens
cccttctccctaagg

SEQ ID NO: 556271 - DNA, 15 bp, Homo sapiens
ccttctccctaagga

SEQ ID NO: 556272 - DNA, 15 bp, Homo sapiens
cttctccctaaggac

SEQ ID NO: 556273 - DNA, 15 bp, Homo sapiens
ttctccctaaggaca

SEQ ID NO: 556274 - DNA, 15 bp, Homo sapiens
tctccctaaggacac

SEQ ID NO: 556275 - DNA, 15 bp, Homo sapiens
ctccctaaggacacc

SEQ ID NO: 556276 - DNA, 15 bp, Homo sapiens
tccctaaggacaccc

SEQ ID NO: 556277 - DNA, 15 bp, Homo sapiens
ccctaaggacacccg

SEQ ID NO: 556278 - DNA, 15 bp, Homo sapiens
cctaaggacacccgc

SEQ ID NO: 556279 - DNA, 15 bp, Homo sapiens
ctaaggacacccgcc

SEQ ID NO: 556280 - DNA, 15 bp, Homo sapiens
taaggacacccgcct

SEQ ID NO: 556281 - DNA, 15 bp, Homo sapiens
aaggacacccgcctg

SEQ ID NO: 556282 - DNA, 15 bp, Homo sapiens
aggacacccgcctgc

SEQ ID NO: 556283 - DNA, 15 bp, Homo sapiens
ggacacccgcctgca

SEQ ID NO: 556284 - DNA, 15 bp, Homo sapiens
gacacccgcctgcag

SEQ ID NO: 556285 - DNA, 15 bp, Homo sapiens
acacccgcctgcagg

SEQ ID NO: 556286 - DNA, 15 bp, Homo sapiens
cacccgcctgcaggt

SEQ ID NO: 556287 - DNA, 15 bp, Homo sapiens
acccgcctgcaggtc

SEQ ID NO: 556288 - DNA, 15 bp, Homo sapiens
cccgcctgcaggtcc

SEQ ID NO: 556289 - DNA, 15 bp, Homo sapiens
ccgcctgcaggtcct

SEQ ID NO: 556290 - DNA, 15 bp, Homo sapiens
cgcctgcaggtccta

SEQ ID NO: 556291 - DNA, 15 bp, Homo sapiens
gcctgcaggtcctag

SEQ ID NO: 556292 - DNA, 15 bp, Homo sapiens
cctgcaggtcctagt

SEQ ID NO: 556293 - DNA, 15 bp, Homo sapiens
ctgcaggtcctagtg

SEQ ID NO: 556294 - DNA, 15 bp, Homo sapiens
tgcaggtcctagtgc

SEQ ID NO: 556295 - DNA, 15 bp, Homo sapiens
gcaggtcctagtgca

SEQ ID NO: 556296 - DNA, 15 bp, Homo sapiens
caggtcctagtgcag

SEQ ID NO: 556297 - DNA, 15 bp, Homo sapiens
aggtcctagtgcaga

SEQ ID NO: 556298 - DNA, 15 bp, Homo sapiens
ggtcctagtgcagaa

SEQ ID NO: 556299 - DNA, 15 bp, Homo sapiens
gtcctagtgcagaag

SEQ ID NO: 556300 - DNA, 15 bp, Homo sapiens
tcctagtgcagaagc

SEQ ID NO: 556301 - DNA, 15 bp, Homo sapiens
cctagtgcagaagcc

SEQ ID NO: 556302 - DNA, 15 bp, Homo sapiens
ctagtgcagaagcct

SEQ ID NO: 556303 - DNA, 15 bp, Homo sapiens
tagtgcagaagcctg

SEQ ID NO: 556304 - DNA, 15 bp, Homo sapiens
agtgcagaagcctgg

SEQ ID NO: 556305 - DNA, 15 bp, Homo sapiens
gtgcagaagcctggg

SEQ ID NO: 556306 - DNA, 15 bp, Homo sapiens
tgcagaagcctggga

SEQ ID NO: 556307 - DNA, 15 bp, Homo sapiens
gcagaagcctgggac

SEQ ID NO: 556308 - DNA, 15 bp, Homo sapiens
cagaagcctgggacc

SEQ ID NO: 556309 - DNA, 15 bp, Homo sapiens
agaagcctgggaccg

SEQ ID NO: 556310 - DNA, 15 bp, Homo sapiens
gaagcctgggaccga

SEQ ID NO: 556311 - DNA, 15 bp, Homo sapiens
aagcctgggaccgag

SEQ ID NO: 556312 - DNA, 15 bp, Homo sapiens
agcctgggaccgagg

SEQ ID NO: 556313 - DNA, 15 bp, Homo sapiens
gcctgggaccgagga

SEQ ID NO: 556314 - DNA, 15 bp, Homo sapiens
cctgggaccgaggac

SEQ ID NO: 556315 - DNA, 15 bp, Homo sapiens
ctgggaccgaggaca

SEQ ID NO: 556316 - DNA, 15 bp, Homo sapiens
tgggaccgaggacag

SEQ ID NO: 556317 - DNA, 15 bp, Homo sapiens
gggaccgaggacagg

SEQ ID NO: 556318 - DNA, 15 bp, Homo sapiens
ggaccgaggacaggg

SEQ ID NO: 556319 - DNA, 15 bp, Homo sapiens
gaccgaggacagggc

SEQ ID NO: 556320 - DNA, 15 bp, Homo sapiens
accgaggacagggcc

SEQ ID NO: 556321 - DNA, 15 bp, Homo sapiens
ccgaggacagggcca

SEQ ID NO: 556322 - DNA, 15 bp, Homo sapiens
cgaggacagggccat

SEQ ID NO: 556323 - DNA, 15 bp, Homo sapiens
gaggacagggccatt

SEQ ID NO: 556324 - DNA, 15 bp, Homo sapiens
aggacagggccattt

SEQ ID NO: 556325 - DNA, 15 bp, Homo sapiens
ggacagggccatttt

SEQ ID NO: 556326 - DNA, 15 bp, Homo sapiens
gacagggccattttc

SEQ ID NO: 556327 - DNA, 15 bp, Homo sapiens
acagggccattttcc

SEQ ID NO: 556328 - DNA, 15 bp, Homo sapiens
cagggccattttcca

SEQ ID NO: 556329 - DNA, 15 bp, Homo sapiens
agggccattttccag

SEQ ID NO: 556330 - DNA, 15 bp, Homo sapiens
gggccattttccaga

SEQ ID NO: 556331 - DNA, 15 bp, Homo sapiens
ggccattttccagag

SEQ ID NO: 556332 - DNA, 15 bp, Homo sapiens
gccattttccagagg

SEQ ID NO: 556333 - DNA, 15 bp, Homo sapiens
ccattttccagagga

SEQ ID NO: 556334 - DNA, 15 bp, Homo sapiens
cattttccagaggag

SEQ ID NO: 556335 - DNA, 15 bp, Homo sapiens
attttccagaggaga

SEQ ID NO: 556336 - DNA, 15 bp, Homo sapiens
ttttccagaggagaa

SEQ ID NO: 556337 - DNA, 15 bp, Homo sapiens
tttccagaggagaaa

SEQ ID NO: 556338 - DNA, 15 bp, Homo sapiens
ttccagaggagaaac

SEQ ID NO: 556339 - DNA, 15 bp, Homo sapiens
tccagaggagaaaca

SEQ ID NO: 556340 - DNA, 15 bp, Homo sapiens
ccagaggagaaacac

SEQ ID NO: 556341 - DNA, 15 bp, Homo sapiens
cagaggagaaacacc

SEQ ID NO: 556342 - DNA, 15 bp, Homo sapiens
agaggagaaacaccc

SEQ ID NO: 556343 - DNA, 15 bp, Homo sapiens
gaggagaaacaccct

SEQ ID NO: 556344 - DNA, 15 bp, Homo sapiens
aggagaaacaccctg

SEQ ID NO: 556345 - DNA, 15 bp, Homo sapiens
ggagaaacaccctgg

SEQ ID NO: 556346 - DNA, 15 bp, Homo sapiens
gagaaacaccctggc

SEQ ID NO: 556347 - DNA, 15 bp, Homo sapiens
agaaacaccctggcg

SEQ ID NO: 556348 - DNA, 15 bp, Homo sapiens
gaaacaccctggcgg

SEQ ID NO: 556349 - DNA, 15 bp, Homo sapiens
aaacaccctggcggg

SEQ ID NO: 556350 - DNA, 15 bp, Homo sapiens
aacaccctggcgggc

SEQ ID NO: 556351 - DNA, 15 bp, Homo sapiens
acaccctggcgggcg

SEQ ID NO: 556352 - DNA, 15 bp, Homo sapiens
caccctggcgggcga

SEQ ID NO: 556353 - DNA, 15 bp, Homo sapiens
accctggcgggcgag

SEQ ID NO: 556354 - DNA, 15 bp, Homo sapiens
ccctggcgggcgagc

SEQ ID NO: 556355 - DNA, 15 bp, Homo sapiens
cctggcgggcgagcg

SEQ ID NO: 556356 - DNA, 15 bp, Homo sapiens
ctggcgggcgagcgg

SEQ ID NO: 556357 - DNA, 15 bp, Homo sapiens
tggcgggcgagcggc

SEQ ID NO: 556358 - DNA, 15 bp, Homo sapiens
ggcgggcgagcggcc

SEQ ID NO: 556359 - DNA, 15 bp, Homo sapiens
gcgggcgagcggcca

SEQ ID NO: 556360 - DNA, 15 bp, Homo sapiens
cgggcgagcggccaa

SEQ ID NO: 556361 - DNA, 15 bp, Homo sapiens
gggcgagcggccaaa

SEQ ID NO: 556362 - DNA, 15 bp, Homo sapiens
ggcgagcggccaaac

SEQ ID NO: 556363 - DNA, 15 bp, Homo sapiens
gcgagcggccaaacc

SEQ ID NO: 556364 - DNA, 15 bp, Homo sapiens
cgagcggccaaaccg

SEQ ID NO: 556365 - DNA, 15 bp, Homo sapiens
gagcggccaaaccga

SEQ ID NO: 556366 - DNA, 15 bp, Homo sapiens
agcggccaaaccgat

SEQ ID NO: 556367 - DNA, 15 bp, Homo sapiens
gcggccaaaccgatc

SEQ ID NO: 556368 - DNA, 15 bp, Homo sapiens
cggccaaaccgatca

SEQ ID NO: 556369 - DNA, 15 bp, Homo sapiens
ggccaaaccgatcac

SEQ ID NO: 556370 - DNA, 15 bp, Homo sapiens
gccaaaccgatcacc

SEQ ID NO: 556371 - DNA, 15 bp, Homo sapiens
ccaaaccgatcacct

SEQ ID NO: 556372 - DNA, 15 bp, Homo sapiens
caaaccgatcacctg

SEQ ID NO: 556373 - DNA, 15 bp, Homo sapiens
aaaccgatcacctgt

SEQ ID NO: 556374 - DNA, 15 bp, Homo sapiens
aaccgatcacctgtc

SEQ ID NO: 556375 - DNA, 15 bp, Homo sapiens
accgatcacctgtcc

SEQ ID NO: 556376 - DNA, 15 bp, Homo sapiens
ccgatcacctgtcca

SEQ ID NO: 556377 - DNA, 15 bp, Homo sapiens
cgatcacctgtccag

SEQ ID NO: 556378 - DNA, 15 bp, Homo sapiens
gatcacctgtccagc

SEQ ID NO: 556379 - DNA, 15 bp, Homo sapiens
atcacctgtccagct

SEQ ID NO: 556380 - DNA, 15 bp, Homo sapiens
tcacctgtccagctg

SEQ ID NO: 556381 - DNA, 15 bp, Homo sapiens
cacctgtccagctgg

SEQ ID NO: 556382 - DNA, 15 bp, Homo sapiens
acctgtccagctgga

SEQ ID NO: 556383 - DNA, 15 bp, Homo sapiens
cctgtccagctggag

SEQ ID NO: 556384 - DNA, 15 bp, Homo sapiens
ctgtccagctggaga

SEQ ID NO: 556385 - DNA, 15 bp, Homo sapiens
tgtccagctggagag

SEQ ID NO: 556386 - DNA, 15 bp, Homo sapiens
gtccagctggagagc

SEQ ID NO: 556387 - DNA, 15 bp, Homo sapiens
tccagctggagagca

SEQ ID NO: 556388 - DNA, 15 bp, Homo sapiens
ccagctggagagcag

SEQ ID NO: 556389 - DNA, 15 bp, Homo sapiens
cagctggagagcagg

SEQ ID NO: 556390 - DNA, 15 bp, Homo sapiens
agctggagagcaggt

SEQ ID NO: 556391 - DNA, 15 bp, Homo sapiens
gctggagagcaggtg

SEQ ID NO: 556392 - DNA, 15 bp, Homo sapiens
ctggagagcaggtgt

SEQ ID NO: 556393 - DNA, 15 bp, Homo sapiens
tggagagcaggtgtg

SEQ ID NO: 556394 - DNA, 15 bp, Homo sapiens
ggagagcaggtgtgt

SEQ ID NO: 556395 - DNA, 15 bp, Homo sapiens
gagagcaggtgtgtg

SEQ ID NO: 556396 - DNA, 15 bp, Homo sapiens
agagcaggtgtgtgc

SEQ ID NO: 556397 - DNA, 15 bp, Homo sapiens
gagcaggtgtgtgca

SEQ ID NO: 556398 - DNA, 15 bp, Homo sapiens
agcaggtgtgtgcac

SEQ ID NO: 556399 - DNA, 15 bp, Homo sapiens
gcaggtgtgtgcaca

SEQ ID NO: 556400 - DNA, 15 bp, Homo sapiens
caggtgtgtgcacag

SEQ ID NO: 556401 - DNA, 15 bp, Homo sapiens
aggtgtgtgcacagg

SEQ ID NO: 556402 - DNA, 15 bp, Homo sapiens
ggtgtgtgcacaggg

SEQ ID NO: 556403 - DNA, 15 bp, Homo sapiens
gtgtgtgcacagggc

SEQ ID NO: 556404 - DNA, 15 bp, Homo sapiens
tgtgtgcacagggcc

SEQ ID NO: 556405 - DNA, 15 bp, Homo sapiens
gtgtgcacagggccg

SEQ ID NO: 556406 - DNA, 15 bp, Homo sapiens
tgtgcacagggccgg

SEQ ID NO: 556407 - DNA, 15 bp, Homo sapiens
gtgcacagggccggg

SEQ ID NO: 556408 - DNA, 15 bp, Homo sapiens
tgcacagggccgggg

SEQ ID NO: 556409 - DNA, 15 bp, Homo sapiens
gcacagggccggggg

SEQ ID NO: 556410 - DNA, 15 bp, Homo sapiens
cacagggccggggga

SEQ ID NO: 556411 - DNA, 15 bp, Homo sapiens
acagggccgggggag

SEQ ID NO: 556412 - DNA, 15 bp, Homo sapiens
cagggccgggggagg

SEQ ID NO: 556413 - DNA, 15 bp, Homo sapiens
agggccgggggaggg

SEQ ID NO: 556414 - DNA, 15 bp, Homo sapiens
gggccgggggaggga

SEQ ID NO: 556415 - DNA, 15 bp, Homo sapiens
ggccgggggagggag

SEQ ID NO: 556416 - DNA, 15 bp, Homo sapiens
gccgggggagggaga

SEQ ID NO: 556417 - DNA, 15 bp, Homo sapiens
ccgggggagggagag

SEQ ID NO: 556418 - DNA, 15 bp, Homo sapiens
cgggggagggagaga

SEQ ID NO: 556419 - DNA, 15 bp, Homo sapiens
gggggagggagagag

SEQ ID NO: 556420 - DNA, 15 bp, Homo sapiens
ggggagggagagagg

SEQ ID NO: 556421 - DNA, 15 bp, Homo sapiens
gggagggagagagga

SEQ ID NO: 556422 - DNA, 15 bp, Homo sapiens
ggagggagagaggag

SEQ ID NO: 556423 - DNA, 15 bp, Homo sapiens
gagggagagaggagg

SEQ ID NO: 556424 - DNA, 15 bp, Homo sapiens
agggagagaggagga

SEQ ID NO: 556425 - DNA, 15 bp, Homo sapiens
gggagagaggaggag

SEQ ID NO: 556426 - DNA, 15 bp, Homo sapiens
ggagagaggaggagg

SEQ ID NO: 556427 - DNA, 15 bp, Homo sapiens
gagagaggaggaggg

SEQ ID NO: 556428 - DNA, 15 bp, Homo sapiens
agagaggaggaggga

SEQ ID NO: 556429 - DNA, 15 bp, Homo sapiens
gagaggaggagggaa

SEQ ID NO: 556430 - DNA, 15 bp, Homo sapiens
agaggaggagggaag

SEQ ID NO: 556431 - DNA, 15 bp, Homo sapiens
gaggaggagggaagc

SEQ ID NO: 556432 - DNA, 15 bp, Homo sapiens
aggaggagggaagcg

SEQ ID NO: 556433 - DNA, 15 bp, Homo sapiens
ggaggagggaagcgg

SEQ ID NO: 556434 - DNA, 15 bp, Homo sapiens
gaggagggaagcgga

SEQ ID NO: 556435 - DNA, 15 bp, Homo sapiens
aggagggaagcggaa

SEQ ID NO: 556436 - DNA, 15 bp, Homo sapiens
ggagggaagcggaac

SEQ ID NO: 556437 - DNA, 15 bp, Homo sapiens
gagggaagcggaact

SEQ ID NO: 556438 - DNA, 15 bp, Homo sapiens
agggaagcggaactg

SEQ ID NO: 556439 - DNA, 15 bp, Homo sapiens
gggaagcggaactgg

SEQ ID NO: 556440 - DNA, 15 bp, Homo sapiens
ggaagcggaactggg

SEQ ID NO: 556441 - DNA, 15 bp, Homo sapiens
gaagcggaactggga

SEQ ID NO: 556442 - DNA, 15 bp, Homo sapiens
aagcggaactgggag

SEQ ID NO: 556443 - DNA, 15 bp, Homo sapiens
agcggaactgggaga

SEQ ID NO: 556444 - DNA, 15 bp, Homo sapiens
gcggaactgggagaa

SEQ ID NO: 556445 - DNA, 15 bp, Homo sapiens
cggaactgggagaac

SEQ ID NO: 556446 - DNA, 15 bp, Homo sapiens
ggaactgggagaact

SEQ ID NO: 556447 - DNA, 15 bp, Homo sapiens
gaactgggagaactt

SEQ ID NO: 556448 - DNA, 15 bp, Homo sapiens
aactgggagaacttc

SEQ ID NO: 556449 - DNA, 15 bp, Homo sapiens
actgggagaacttct

SEQ ID NO: 556450 - DNA, 15 bp, Homo sapiens
ctgggagaacttcta

SEQ ID NO: 556451 - DNA, 15 bp, Homo sapiens
tgggagaacttctat

SEQ ID NO: 556452 - DNA, 15 bp, Homo sapiens
gggagaacttctatg

SEQ ID NO: 556453 - DNA, 15 bp, Homo sapiens
ggagaacttctatgg

SEQ ID NO: 556454 - DNA, 15 bp, Homo sapiens
gagaacttctatggg

SEQ ID NO: 556455 - DNA, 15 bp, Homo sapiens
agaacttctatgggt

SEQ ID NO: 556456 - DNA, 15 bp, Homo sapiens
gaacttctatgggtc

SEQ ID NO: 556457 - DNA, 15 bp, Homo sapiens
aacttctatgggtca

SEQ ID NO: 556458 - DNA, 15 bp, Homo sapiens
acttctatgggtcag

SEQ ID NO: 556459 - DNA, 15 bp, Homo sapiens
cttctatgggtcagt

SEQ ID NO: 556460 - DNA, 15 bp, Homo sapiens
ttctatgggtcagtg

SEQ ID NO: 556461 - DNA, 15 bp, Homo sapiens
tctatgggtcagtga

SEQ ID NO: 556462 - DNA, 15 bp, Homo sapiens
ctatgggtcagtgaa

SEQ ID NO: 556463 - DNA, 15 bp, Homo sapiens
tatgggtcagtgaat

SEQ ID NO: 556464 - DNA, 15 bp, Homo sapiens
atgggtcagtgaatg

SEQ ID NO: 556465 - DNA, 15 bp, Homo sapiens
tgggtcagtgaatga

SEQ ID NO: 556466 - DNA, 15 bp, Homo sapiens
gggtcagtgaatgag

SEQ ID NO: 556467 - DNA, 15 bp, Homo sapiens
ggtcagtgaatgagg

SEQ ID NO: 556468 - DNA, 15 bp, Homo sapiens
gtcagtgaatgagga

SEQ ID NO: 556469 - DNA, 15 bp, Homo sapiens
tcagtgaatgaggag

SEQ ID NO: 556470 - DNA, 15 bp, Homo sapiens
cagtgaatgaggagg

SEQ ID NO: 556471 - DNA, 15 bp, Homo sapiens
agtgaatgaggaggt

SEQ ID NO: 556472 - DNA, 15 bp, Homo sapiens
gtgaatgaggaggtt

SEQ ID NO: 556473 - DNA, 15 bp, Homo sapiens
tgaatgaggaggttc

SEQ ID NO: 556474 - DNA, 15 bp, Homo sapiens
gaatgaggaggttct

SEQ ID NO: 556475 - DNA, 15 bp, Homo sapiens
aatgaggaggttctg

SEQ ID NO: 556476 - DNA, 15 bp, Homo sapiens
atgaggaggttctgc

SEQ ID NO: 556477 - DNA, 15 bp, Homo sapiens
tgaggaggttctgct

SEQ ID NO: 556478 - DNA, 15 bp, Homo sapiens
gaggaggttctgctc

SEQ ID NO: 556479 - DNA, 15 bp, Homo sapiens
aggaggttctgctca

SEQ ID NO: 556480 - DNA, 15 bp, Homo sapiens
ggaggttctgctcag

SEQ ID NO: 556481 - DNA, 15 bp, Homo sapiens
gaggttctgctcagg

SEQ ID NO: 556482 - DNA, 15 bp, Homo sapiens
aggttctgctcaggg

SEQ ID NO: 556483 - DNA, 15 bp, Homo sapiens
ggttctgctcaggga

SEQ ID NO: 556484 - DNA, 15 bp, Homo sapiens
gttctgctcagggaa

SEQ ID NO: 556485 - DNA, 15 bp, Homo sapiens
ttctgctcagggaat

SEQ ID NO: 556486 - DNA, 15 bp, Homo sapiens
tctgctcagggaatg

SEQ ID NO: 556487 - DNA, 15 bp, Homo sapiens
ctgctcagggaatga

SEQ ID NO: 556488 - DNA, 15 bp, Homo sapiens
tgctcagggaatgag

SEQ ID NO: 556489 - DNA, 15 bp, Homo sapiens
gctcagggaatgagt

SEQ ID NO: 556490 - DNA, 15 bp, Homo sapiens
ctcagggaatgagtg

SEQ ID NO: 556491 - DNA, 15 bp, Homo sapiens
tcagggaatgagtgg

SEQ ID NO: 556492 - DNA, 15 bp, Homo sapiens
cagggaatgagtggc

SEQ ID NO: 556493 - DNA, 15 bp, Homo sapiens
agggaatgagtggca

SEQ ID NO: 556494 - DNA, 15 bp, Homo sapiens
gggaatgagtggcag

SEQ ID NO: 556495 - DNA, 15 bp, Homo sapiens
ggaatgagtggcagc

SEQ ID NO: 556496 - DNA, 15 bp, Homo sapiens
gaatgagtggcagcg

SEQ ID NO: 556497 - DNA, 15 bp, Homo sapiens
aatgagtggcagcgg

SEQ ID NO: 556498 - DNA, 15 bp, Homo sapiens
atgagtggcagcggc

SEQ ID NO: 556499 - DNA, 15 bp, Homo sapiens
tgagtggcagcggcc

SEQ ID NO: 556500 - DNA, 15 bp, Homo sapiens
gagtggcagcggcca

SEQ ID NO: 556501 - DNA, 15 bp, Homo sapiens
agtggcagcggccac

SEQ ID NO: 556502 - DNA, 15 bp, Homo sapiens
gtggcagcggccacc

SEQ ID NO: 556503 - DNA, 15 bp, Homo sapiens
tggcagcggccaccc

SEQ ID NO: 556504 - DNA, 15 bp, Homo sapiens
ggcagcggccacccc

SEQ ID NO: 556505 - DNA, 15 bp, Homo sapiens
gcagcggccacccca

SEQ ID NO: 556506 - DNA, 15 bp, Homo sapiens
cagcggccaccccag

SEQ ID NO: 556507 - DNA, 15 bp, Homo sapiens
agcggccaccccagc

SEQ ID NO: 556508 - DNA, 15 bp, Homo sapiens
gcggccaccccagca

SEQ ID NO: 556509 - DNA, 15 bp, Homo sapiens
cggccaccccagcaa

SEQ ID NO: 556510 - DNA, 15 bp, Homo sapiens
ggccaccccagcaag

SEQ ID NO: 556511 - DNA, 15 bp, Homo sapiens
gccaccccagcaaga

SEQ ID NO: 556512 - DNA, 15 bp, Homo sapiens
ccaccccagcaagag

SEQ ID NO: 556513 - DNA, 15 bp, Homo sapiens
caccccagcaagaga

SEQ ID NO: 556514 - DNA, 15 bp, Homo sapiens
accccagcaagagag

SEQ ID NO: 556515 - DNA, 15 bp, Homo sapiens
ccccagcaagagagc

SEQ ID NO: 556516 - DNA, 15 bp, Homo sapiens
cccagcaagagagcc

SEQ ID NO: 556517 - DNA, 15 bp, Homo sapiens
ccagcaagagagccc

SEQ ID NO: 556518 - DNA, 15 bp, Homo sapiens
cagcaagagagcccc

SEQ ID NO: 556519 - DNA, 15 bp, Homo sapiens
agcaagagagccccc

SEQ ID NO: 556520 - DNA, 15 bp, Homo sapiens
gcaagagagccccct

SEQ ID NO: 556521 - DNA, 15 bp, Homo sapiens
caagagagccccctc

SEQ ID NO: 556522 - DNA, 15 bp, Homo sapiens
aagagagccccctcc

SEQ ID NO: 556523 - DNA, 15 bp, Homo sapiens
agagagccccctcct

SEQ ID NO: 556524 - DNA, 15 bp, Homo sapiens
gagagccccctcctc

SEQ ID NO: 556525 - DNA, 15 bp, Homo sapiens
agagccccctcctcc

SEQ ID NO: 556526 - DNA, 15 bp, Homo sapiens
gagccccctcctcct

SEQ ID NO: 556527 - DNA, 15 bp, Homo sapiens
agccccctcctcctc

SEQ ID NO: 556528 - DNA, 15 bp, Homo sapiens
gccccctcctcctct

SEQ ID NO: 556529 - DNA, 15 bp, Homo sapiens
ccccctcctcctctg

SEQ ID NO: 556530 - DNA, 15 bp, Homo sapiens
cccctcctcctctgc

SEQ ID NO: 556531 - DNA, 15 bp, Homo sapiens
ccctcctcctctgcg

SEQ ID NO: 556532 - DNA, 15 bp, Homo sapiens
cctcctcctctgcgt

SEQ ID NO: 556533 - DNA, 15 bp, Homo sapiens
ctcctcctctgcgtc

SEQ ID NO: 556534 - DNA, 15 bp, Homo sapiens
tcctcctctgcgtcc

SEQ ID NO: 556535 - DNA, 15 bp, Homo sapiens
cctcctctgcgtcca

SEQ ID NO: 556536 - DNA, 15 bp, Homo sapiens
ctcctctgcgtccac

SEQ ID NO: 556537 - DNA, 15 bp, Homo sapiens
tcctctgcgtccact

SEQ ID NO: 556538 - DNA, 15 bp, Homo sapiens
cctctgcgtccactt

SEQ ID NO: 556539 - DNA, 15 bp, Homo sapiens
ctctgcgtccacttt

SEQ ID NO: 556540 - DNA, 15 bp, Homo sapiens
tctgcgtccactttc

SEQ ID NO: 556541 - DNA, 15 bp, Homo sapiens
ctgcgtccactttcc

SEQ ID NO: 556542 - DNA, 15 bp, Homo sapiens
tgcgtccactttccc

SEQ ID NO: 556543 - DNA, 15 bp, Homo sapiens
gcgtccactttccct

SEQ ID NO: 556544 - DNA, 15 bp, Homo sapiens
cgtccactttccctt

SEQ ID NO: 556545 - DNA, 15 bp, Homo sapiens
gtccactttcccttc

SEQ ID NO: 556546 - DNA, 15 bp, Homo sapiens
tccactttcccttcg

SEQ ID NO: 556547 - DNA, 15 bp, Homo sapiens
ccactttcccttcgt

SEQ ID NO: 556548 - DNA, 15 bp, Homo sapiens
cactttcccttcgtc

SEQ ID NO: 556549 - DNA, 15 bp, Homo sapiens
actttcccttcgtct

SEQ ID NO: 556550 - DNA, 15 bp, Homo sapiens
ctttcccttcgtcta

SEQ ID NO: 556551 - DNA, 15 bp, Homo sapiens
tttcccttcgtctag

SEQ ID NO: 556552 - DNA, 15 bp, Homo sapiens
ttcccttcgtctagg

SEQ ID NO: 556553 - DNA, 15 bp, Homo sapiens
tcccttcgtctaggt

SEQ ID NO: 556554 - DNA, 15 bp, Homo sapiens
cccttcgtctaggtg

SEQ ID NO: 556555 - DNA, 15 bp, Homo sapiens
ccttcgtctaggtgc

SEQ ID NO: 556556 - DNA, 15 bp, Homo sapiens
cttcgtctaggtgcc

SEQ ID NO: 556557 - DNA, 15 bp, Homo sapiens
ttcgtctaggtgccc

SEQ ID NO: 556558 - DNA, 15 bp, Homo sapiens
tcgtctaggtgccca

SEQ ID NO: 556559 - DNA, 15 bp, Homo sapiens
cgtctaggtgcccat

SEQ ID NO: 556560 - DNA, 15 bp, Homo sapiens
gtctaggtgcccatg

SEQ ID NO: 556561 - DNA, 15 bp, Homo sapiens
tctaggtgcccatgg

SEQ ID NO: 556562 - DNA, 15 bp, Homo sapiens
ctaggtgcccatggc

SEQ ID NO: 556563 - DNA, 15 bp, Homo sapiens
taggtgcccatggct

SEQ ID NO: 556564 - DNA, 15 bp, Homo sapiens
aggtgcccatggctc

SEQ ID NO: 556565 - DNA, 15 bp, Homo sapiens
ggtgcccatggctcc

SEQ ID NO: 556566 - DNA, 15 bp, Homo sapiens
gtgcccatggctcct

SEQ ID NO: 556567 - DNA, 15 bp, Homo sapiens
tgcccatggctcctc

SEQ ID NO: 556568 - DNA, 15 bp, Homo sapiens
gcccatggctcctct

SEQ ID NO: 556569 - DNA, 15 bp, Homo sapiens
cccatggctcctctc

SEQ ID NO: 556570 - DNA, 15 bp, Homo sapiens
ccatggctcctctcc

SEQ ID NO: 556571 - DNA, 15 bp, Homo sapiens
catggctcctctcct

SEQ ID NO: 556572 - DNA, 15 bp, Homo sapiens
atggctcctctcctt

SEQ ID NO: 556573 - DNA, 15 bp, Homo sapiens
tggctcctctcctta

SEQ ID NO: 556574 - DNA, 15 bp, Homo sapiens
ggctcctctccttac

SEQ ID NO: 556575 - DNA, 15 bp, Homo sapiens
gctcctctccttaca

SEQ ID NO: 556576 - DNA, 15 bp, Homo sapiens
ctcctctccttacaa

SEQ ID NO: 556577 - DNA, 15 bp, Homo sapiens
tcctctccttacaag

SEQ ID NO: 556578 - DNA, 15 bp, Homo sapiens
cctctccttacaagg

SEQ ID NO: 556579 - DNA, 15 bp, Homo sapiens
ctctccttacaaggt

SEQ ID NO: 556580 - DNA, 15 bp, Homo sapiens
tctccttacaaggtc

SEQ ID NO: 556581 - DNA, 15 bp, Homo sapiens
ctccttacaaggtca

SEQ ID NO: 556582 - DNA, 15 bp, Homo sapiens
tccttacaaggtcac

SEQ ID NO: 556583 - DNA, 15 bp, Homo sapiens
ccttacaaggtcacg

SEQ ID NO: 556584 - DNA, 15 bp, Homo sapiens
cttacaaggtcacgt

SEQ ID NO: 556585 - DNA, 15 bp, Homo sapiens
ttacaaggtcacgtg

SEQ ID NO: 556586 - DNA, 15 bp, Homo sapiens
tacaaggtcacgtgt

SEQ ID NO: 556587 - DNA, 15 bp, Homo sapiens
acaaggtcacgtgtt

SEQ ID NO: 556588 - DNA, 15 bp, Homo sapiens
caaggtcacgtgtta

SEQ ID NO: 556589 - DNA, 15 bp, Homo sapiens
aaggtcacgtgttag

SEQ ID NO: 556590 - DNA, 15 bp, Homo sapiens
aggtcacgtgttagg

SEQ ID NO: 556591 - DNA, 15 bp, Homo sapiens
ggtcacgtgttaggc

SEQ ID NO: 556592 - DNA, 15 bp, Homo sapiens
gtcacgtgttaggca

SEQ ID NO: 556593 - DNA, 15 bp, Homo sapiens
tcacgtgttaggcag

SEQ ID NO: 556594 - DNA, 15 bp, Homo sapiens
cacgtgttaggcagg

SEQ ID NO: 556595 - DNA, 15 bp, Homo sapiens
acgtgttaggcaggt

SEQ ID NO: 556596 - DNA, 15 bp, Homo sapiens
cgtgttaggcaggtt

SEQ ID NO: 556597 - DNA, 15 bp, Homo sapiens
gtgttaggcaggttt

SEQ ID NO: 556598 - DNA, 15 bp, Homo sapiens
tgttaggcaggtttg

SEQ ID NO: 556599 - DNA, 15 bp, Homo sapiens
gttaggcaggtttgg

SEQ ID NO: 556600 - DNA, 15 bp, Homo sapiens
ttaggcaggtttggg

SEQ ID NO: 556601 - DNA, 15 bp, Homo sapiens
taggcaggtttgggg

SEQ ID NO: 556602 - DNA, 15 bp, Homo sapiens
aggcaggtttgggga

SEQ ID NO: 556603 - DNA, 15 bp, Homo sapiens
ggcaggtttggggaa

SEQ ID NO: 556604 - DNA, 15 bp, Homo sapiens
gcaggtttggggaaa

SEQ ID NO: 556605 - DNA, 15 bp, Homo sapiens
caggtttggggaaat

SEQ ID NO: 556606 - DNA, 15 bp, Homo sapiens
aggtttggggaaatg

SEQ ID NO: 556607 - DNA, 15 bp, Homo sapiens
ggtttggggaaatgt

SEQ ID NO: 556608 - DNA, 15 bp, Homo sapiens
gtttggggaaatgtt

SEQ ID NO: 556609 - DNA, 15 bp, Homo sapiens
tttggggaaatgttt

SEQ ID NO: 556610 - DNA, 15 bp, Homo sapiens
ttggggaaatgtttc

SEQ ID NO: 556611 - DNA, 15 bp, Homo sapiens
tggggaaatgtttct

SEQ ID NO: 556612 - DNA, 15 bp, Homo sapiens
ggggaaatgtttctt

SEQ ID NO: 556613 - DNA, 15 bp, Homo sapiens
gggaaatgtttcttt

SEQ ID NO: 556614 - DNA, 15 bp, Homo sapiens
ggaaatgtttctttc

SEQ ID NO: 556615 - DNA, 15 bp, Homo sapiens
gaaatgtttctttca

SEQ ID NO: 556616 - DNA, 15 bp, Homo sapiens
aaatgtttctttcag

SEQ ID NO: 556617 - DNA, 15 bp, Homo sapiens
aatgtttctttcagc

SEQ ID NO: 556618 - DNA, 15 bp, Homo sapiens
atgtttctttcagct

SEQ ID NO: 556619 - DNA, 15 bp, Homo sapiens
tgtttctttcagctt

SEQ ID NO: 556620 - DNA, 15 bp, Homo sapiens
gtttctttcagcttt

SEQ ID NO: 556621 - DNA, 15 bp, Homo sapiens
tttctttcagctttt

SEQ ID NO: 556622 - DNA, 15 bp, Homo sapiens
ttctttcagcttttc

SEQ ID NO: 556623 - DNA, 15 bp, Homo sapiens
tctttcagcttttca

SEQ ID NO: 556624 - DNA, 15 bp, Homo sapiens
ctttcagcttttcac

SEQ ID NO: 556625 - DNA, 15 bp, Homo sapiens
tttcagcttttcaca

SEQ ID NO: 556626 - DNA, 15 bp, Homo sapiens
ttcagcttttcacat

SEQ ID NO: 556627 - DNA, 15 bp, Homo sapiens
tcagcttttcacatt

SEQ ID NO: 556628 - DNA, 15 bp, Homo sapiens
cagcttttcacattt

SEQ ID NO: 556629 - DNA, 15 bp, Homo sapiens
agcttttcacattta

SEQ ID NO: 556630 - DNA, 15 bp, Homo sapiens
gcttttcacatttat

SEQ ID NO: 556631 - DNA, 15 bp, Homo sapiens
cttttcacatttatt

SEQ ID NO: 556632 - DNA, 15 bp, Homo sapiens
ttttcacatttattt

SEQ ID NO: 556633 - DNA, 15 bp, Homo sapiens
tttcacatttatttt

SEQ ID NO: 556634 - DNA, 15 bp, Homo sapiens
ttcacatttattttc

SEQ ID NO: 556635 - DNA, 15 bp, Homo sapiens
tcacatttattttcc

SEQ ID NO: 556636 - DNA, 15 bp, Homo sapiens
cacatttattttcct

SEQ ID NO: 556637 - DNA, 15 bp, Homo sapiens
acatttattttcctc

SEQ ID NO: 556638 - DNA, 15 bp, Homo sapiens
catttattttcctcc

SEQ ID NO: 556639 - DNA, 15 bp, Homo sapiens
atttattttcctcca

SEQ ID NO: 556640 - DNA, 15 bp, Homo sapiens
tttattttcctccaa

SEQ ID NO: 556641 - DNA, 15 bp, Homo sapiens
ttattttcctccaac

SEQ ID NO: 556642 - DNA, 15 bp, Homo sapiens
tattttcctccaacc

SEQ ID NO: 556643 - DNA, 15 bp, Homo sapiens
attttcctccaaccc

SEQ ID NO: 556644 - DNA, 15 bp, Homo sapiens
ttttcctccaaccct

SEQ ID NO: 556645 - DNA, 15 bp, Homo sapiens
tttcctccaaccctg

SEQ ID NO: 556646 - DNA, 15 bp, Homo sapiens
ttcctccaaccctgg

SEQ ID NO: 556647 - DNA, 15 bp, Homo sapiens
tcctccaaccctggc

SEQ ID NO: 556648 - DNA, 15 bp, Homo sapiens
cctccaaccctggca

SEQ ID NO: 556649 - DNA, 15 bp, Homo sapiens
ctccaaccctggcac

SEQ ID NO: 556650 - DNA, 15 bp, Homo sapiens
tccaaccctggcacc

SEQ ID NO: 556651 - DNA, 15 bp, Homo sapiens
ccaaccctggcacct

SEQ ID NO: 556652 - DNA, 15 bp, Homo sapiens
caaccctggcacctg

SEQ ID NO: 556653 - DNA, 15 bp, Homo sapiens
aaccctggcacctgg

SEQ ID NO: 556654 - DNA, 15 bp, Homo sapiens
accctggcacctggg

SEQ ID NO: 556655 - DNA, 15 bp, Homo sapiens
ccctggcacctggga

SEQ ID NO: 556656 - DNA, 15 bp, Homo sapiens
cctggcacctgggac

SEQ ID NO: 556657 - DNA, 15 bp, Homo sapiens
ctggcacctgggacc

SEQ ID NO: 556658 - DNA, 15 bp, Homo sapiens
tggcacctgggacca

SEQ ID NO: 556659 - DNA, 15 bp, Homo sapiens
ggcacctgggaccag

SEQ ID NO: 556660 - DNA, 15 bp, Homo sapiens
gcacctgggaccagc

SEQ ID NO: 556661 - DNA, 15 bp, Homo sapiens
cacctgggaccagcc

SEQ ID NO: 556662 - DNA, 15 bp, Homo sapiens
acctgggaccagccc

SEQ ID NO: 556663 - DNA, 15 bp, Homo sapiens
cctgggaccagccct

SEQ ID NO: 556664 - DNA, 15 bp, Homo sapiens
ctgggaccagccctg

SEQ ID NO: 556665 - DNA, 15 bp, Homo sapiens
tgggaccagccctgc

SEQ ID NO: 556666 - DNA, 15 bp, Homo sapiens
gggaccagccctgcc

SEQ ID NO: 556667 - DNA, 15 bp, Homo sapiens
ggaccagccctgcca

SEQ ID NO: 556668 - DNA, 15 bp, Homo sapiens
gaccagccctgccac

SEQ ID NO: 556669 - DNA, 15 bp, Homo sapiens
accagccctgccacc

SEQ ID NO: 556670 - DNA, 15 bp, Homo sapiens
ccagccctgccacct

SEQ ID NO: 556671 - DNA, 15 bp, Homo sapiens
cagccctgccacctg

SEQ ID NO: 556672 - DNA, 15 bp, Homo sapiens
agccctgccacctgt

SEQ ID NO: 556673 - DNA, 15 bp, Homo sapiens
gccctgccacctgtg

SEQ ID NO: 556674 - DNA, 15 bp, Homo sapiens
ccctgccacctgtgc

SEQ ID NO: 556675 - DNA, 15 bp, Homo sapiens
cctgccacctgtgcc

SEQ ID NO: 556676 - DNA, 15 bp, Homo sapiens
ctgccacctgtgcct

SEQ ID NO: 556677 - DNA, 15 bp, Homo sapiens
tgccacctgtgccta

SEQ ID NO: 556678 - DNA, 15 bp, Homo sapiens
gccacctgtgcctac

SEQ ID NO: 556679 - DNA, 15 bp, Homo sapiens
ccacctgtgcctacc

SEQ ID NO: 556680 - DNA, 15 bp, Homo sapiens
cacctgtgcctaccg

SEQ ID NO: 556681 - DNA, 15 bp, Homo sapiens
acctgtgcctaccgt

SEQ ID NO: 556682 - DNA, 15 bp, Homo sapiens
cctgtgcctaccgta

SEQ ID NO: 556683 - DNA, 15 bp, Homo sapiens
ctgtgcctaccgtac

SEQ ID NO: 556684 - DNA, 15 bp, Homo sapiens
tgtgcctaccgtaca

SEQ ID NO: 556685 - DNA, 15 bp, Homo sapiens
gtgcctaccgtacat

SEQ ID NO: 556686 - DNA, 15 bp, Homo sapiens
tgcctaccgtacatg

SEQ ID NO: 556687 - DNA, 15 bp, Homo sapiens
gcctaccgtacatgg

SEQ ID NO: 556688 - DNA, 15 bp, Homo sapiens
cctaccgtacatggc

SEQ ID NO: 556689 - DNA, 15 bp, Homo sapiens
ctaccgtacatggcc

SEQ ID NO: 556690 - DNA, 15 bp, Homo sapiens
taccgtacatggcca

SEQ ID NO: 556691 - DNA, 15 bp, Homo sapiens
accgtacatggccat

SEQ ID NO: 556692 - DNA, 15 bp, Homo sapiens
ccgtacatggccata

SEQ ID NO: 556693 - DNA, 15 bp, Homo sapiens
cgtacatggccataa

SEQ ID NO: 556694 - DNA, 15 bp, Homo sapiens
gtacatggccataac

SEQ ID NO: 556695 - DNA, 15 bp, Homo sapiens
tacatggccataacc

SEQ ID NO: 556696 - DNA, 15 bp, Homo sapiens
acatggccataacca

SEQ ID NO: 556697 - DNA, 15 bp, Homo sapiens
catggccataaccat

SEQ ID NO: 556698 - DNA, 15 bp, Homo sapiens
atggccataaccata

SEQ ID NO: 556699 - DNA, 15 bp, Homo sapiens
tggccataaccataa

SEQ ID NO: 556700 - DNA, 15 bp, Homo sapiens
ggccataaccataaa

SEQ ID NO: 556701 - DNA, 15 bp, Homo sapiens
gccataaccataaag

SEQ ID NO: 556702 - DNA, 15 bp, Homo sapiens
ccataaccataaagg

SEQ ID NO: 556703 - DNA, 15 bp, Homo sapiens
cataaccataaaggc

SEQ ID NO: 556704 - DNA, 15 bp, Homo sapiens
ataaccataaaggct

SEQ ID NO: 556705 - DNA, 15 bp, Homo sapiens
taaccataaaggctc

SEQ ID NO: 556706 - DNA, 15 bp, Homo sapiens
aaccataaaggctca

SEQ ID NO: 556707 - DNA, 15 bp, Homo sapiens
accataaaggctcac

SEQ ID NO: 556708 - DNA, 15 bp, Homo sapiens
ccataaaggctcact

SEQ ID NO: 556709 - DNA, 15 bp, Homo sapiens
cataaaggctcactc

SEQ ID NO: 556710 - DNA, 15 bp, Homo sapiens
ataaaggctcactcc

SEQ ID NO: 556711 - DNA, 15 bp, Homo sapiens
taaaggctcactcca

SEQ ID NO: 556712 - DNA, 15 bp, Homo sapiens
aaaggctcactccat

SEQ ID NO: 556713 - DNA, 15 bp, Homo sapiens
aaggctcactccatt

SEQ ID NO: 556714 - DNA, 15 bp, Homo sapiens
aggctcactccattt

SEQ ID NO: 556715 - DNA, 15 bp, Homo sapiens
ggctcactccatttc

SEQ ID NO: 556716 - DNA, 15 bp, Homo sapiens
gctcactccatttca

SEQ ID NO: 556717 - DNA, 15 bp, Homo sapiens
ctcactccatttcag

SEQ ID NO: 556718 - DNA, 15 bp, Homo sapiens
tcactccatttcagt

SEQ ID NO: 556719 - DNA, 15 bp, Homo sapiens
cactccatttcagtg

SEQ ID NO: 556720 - DNA, 15 bp, Homo sapiens
actccatttcagtga

SEQ ID NO: 556721 - DNA, 15 bp, Homo sapiens
ctccatttcagtgag

SEQ ID NO: 556722 - DNA, 15 bp, Homo sapiens
tccatttcagtgagt

SEQ ID NO: 556723 - DNA, 15 bp, Homo sapiens
ccatttcagtgagtc

SEQ ID NO: 556724 - DNA, 15 bp, Homo sapiens
catttcagtgagtcc

SEQ ID NO: 556725 - DNA, 15 bp, Homo sapiens
atttcagtgagtcct

SEQ ID NO: 556726 - DNA, 15 bp, Homo sapiens
tttcagtgagtcctg

SEQ ID NO: 556727 - DNA, 15 bp, Homo sapiens
ttcagtgagtcctga

SEQ ID NO: 556728 - DNA, 15 bp, Homo sapiens
tcagtgagtcctgag

SEQ ID NO: 556729 - DNA, 15 bp, Homo sapiens
cagtgagtcctgagg

SEQ ID NO: 556730 - DNA, 15 bp, Homo sapiens
agtgagtcctgaggt

SEQ ID NO: 556731 - DNA, 15 bp, Homo sapiens
gtgagtcctgaggtg

SEQ ID NO: 556732 - DNA, 15 bp, Homo sapiens
tgagtcctgaggtgc

SEQ ID NO: 556733 - DNA, 15 bp, Homo sapiens
gagtcctgaggtgct

SEQ ID NO: 556734 - DNA, 15 bp, Homo sapiens
agtcctgaggtgctg

SEQ ID NO: 556735 - DNA, 15 bp, Homo sapiens
gtcctgaggtgctga

SEQ ID NO: 556736 - DNA, 15 bp, Homo sapiens
tcctgaggtgctgac

SEQ ID NO: 556737 - DNA, 15 bp, Homo sapiens
cctgaggtgctgact

SEQ ID NO: 556738 - DNA, 15 bp, Homo sapiens
ctgaggtgctgactt

SEQ ID NO: 556739 - DNA, 15 bp, Homo sapiens
tgaggtgctgacttc

SEQ ID NO: 556740 - DNA, 15 bp, Homo sapiens
gaggtgctgacttct

SEQ ID NO: 556741 - DNA, 15 bp, Homo sapiens
aggtgctgacttctc

SEQ ID NO: 556742 - DNA, 15 bp, Homo sapiens
ggtgctgacttctct

SEQ ID NO: 556743 - DNA, 15 bp, Homo sapiens
gtgctgacttctctg

SEQ ID NO: 556744 - DNA, 15 bp, Homo sapiens
tgctgacttctctgc

SEQ ID NO: 556745 - DNA, 15 bp, Homo sapiens
gctgacttctctgca

SEQ ID NO: 556746 - DNA, 15 bp, Homo sapiens
ctgacttctctgcac

SEQ ID NO: 556747 - DNA, 15 bp, Homo sapiens
tgacttctctgcaca

SEQ ID NO: 556748 - DNA, 15 bp, Homo sapiens
gacttctctgcacag

SEQ ID NO: 556749 - DNA, 15 bp, Homo sapiens
acttctctgcacagc

SEQ ID NO: 556750 - DNA, 15 bp, Homo sapiens
cttctctgcacagca

SEQ ID NO: 556751 - DNA, 15 bp, Homo sapiens
ttctctgcacagcaa

SEQ ID NO: 556752 - DNA, 15 bp, Homo sapiens
tctctgcacagcaag

SEQ ID NO: 556753 - DNA, 15 bp, Homo sapiens
ctctgcacagcaaga

SEQ ID NO: 556754 - DNA, 15 bp, Homo sapiens
tctgcacagcaagag

SEQ ID NO: 556755 - DNA, 15 bp, Homo sapiens
ctgcacagcaagagg

SEQ ID NO: 556756 - DNA, 15 bp, Homo sapiens
tgcacagcaagaggt

SEQ ID NO: 556757 - DNA, 15 bp, Homo sapiens
gcacagcaagaggtc

SEQ ID NO: 556758 - DNA, 15 bp, Homo sapiens
cacagcaagaggtca

SEQ ID NO: 556759 - DNA, 15 bp, Homo sapiens
acagcaagaggtcag

SEQ ID NO: 556760 - DNA, 15 bp, Homo sapiens
cagcaagaggtcagt

SEQ ID NO: 556761 - DNA, 15 bp, Homo sapiens
agcaagaggtcagtt

SEQ ID NO: 556762 - DNA, 15 bp, Homo sapiens
gcaagaggtcagttt

SEQ ID NO: 556763 - DNA, 15 bp, Homo sapiens
caagaggtcagtttt

SEQ ID NO: 556764 - DNA, 15 bp, Homo sapiens
aagaggtcagttttt

SEQ ID NO: 556765 - DNA, 15 bp, Homo sapiens
agaggtcagttttta

SEQ ID NO: 556766 - DNA, 15 bp, Homo sapiens
gaggtcagtttttaa

SEQ ID NO: 556767 - DNA, 15 bp, Homo sapiens
aggtcagtttttaac

SEQ ID NO: 556768 - DNA, 15 bp, Homo sapiens
ggtcagtttttaact

SEQ ID NO: 556769 - DNA, 15 bp, Homo sapiens
gtcagtttttaactc

SEQ ID NO: 556770 - DNA, 15 bp, Homo sapiens
tcagtttttaactca

SEQ ID NO: 556771 - DNA, 15 bp, Homo sapiens
cagtttttaactcag

SEQ ID NO: 556772 - DNA, 15 bp, Homo sapiens
agtttttaactcaga

SEQ ID NO: 556773 - DNA, 15 bp, Homo sapiens
gtttttaactcagaa

SEQ ID NO: 556774 - DNA, 15 bp, Homo sapiens
tttttaactcagaaa

SEQ ID NO: 556775 - DNA, 15 bp, Homo sapiens
ttttaactcagaaat

SEQ ID NO: 556776 - DNA, 15 bp, Homo sapiens
tttaactcagaaatc

SEQ ID NO: 556777 - DNA, 15 bp, Homo sapiens
ttaactcagaaatcc

SEQ ID NO: 556778 - DNA, 15 bp, Homo sapiens
taactcagaaatccc

SEQ ID NO: 556779 - DNA, 15 bp, Homo sapiens
aactcagaaatcccc

SEQ ID NO: 556780 - DNA, 15 bp, Homo sapiens
actcagaaatcccca

SEQ ID NO: 556781 - DNA, 15 bp, Homo sapiens
ctcagaaatccccag

SEQ ID NO: 556782 - DNA, 15 bp, Homo sapiens
tcagaaatccccagg

SEQ ID NO: 556783 - DNA, 15 bp, Homo sapiens
cagaaatccccaggg

SEQ ID NO: 556784 - DNA, 15 bp, Homo sapiens
agaaatccccagggg

SEQ ID NO: 556785 - DNA, 15 bp, Homo sapiens
gaaatccccaggggc

SEQ ID NO: 556786 - DNA, 15 bp, Homo sapiens
aaatccccaggggcc

SEQ ID NO: 556787 - DNA, 15 bp, Homo sapiens
aatccccaggggccc

SEQ ID NO: 556788 - DNA, 15 bp, Homo sapiens
atccccaggggcccg

SEQ ID NO: 556789 - DNA, 15 bp, Homo sapiens
tccccaggggcccgg

SEQ ID NO: 556790 - DNA, 15 bp, Homo sapiens
ccccaggggcccggc

SEQ ID NO: 556791 - DNA, 15 bp, Homo sapiens
cccaggggcccggct

SEQ ID NO: 556792 - DNA, 15 bp, Homo sapiens
ccaggggcccggctg

SEQ ID NO: 556793 - DNA, 15 bp, Homo sapiens
caggggcccggctga

SEQ ID NO: 556794 - DNA, 15 bp, Homo sapiens
aggggcccggctgat

SEQ ID NO: 556795 - DNA, 15 bp, Homo sapiens
ggggcccggctgatg

SEQ ID NO: 556796 - DNA, 15 bp, Homo sapiens
gggcccggctgatgt

SEQ ID NO: 556797 - DNA, 15 bp, Homo sapiens
ggcccggctgatgtg

SEQ ID NO: 556798 - DNA, 15 bp, Homo sapiens
gcccggctgatgtgg

SEQ ID NO: 556799 - DNA, 15 bp, Homo sapiens
cccggctgatgtgga

SEQ ID NO: 556800 - DNA, 15 bp, Homo sapiens
ccggctgatgtggaa

SEQ ID NO: 556801 - DNA, 15 bp, Homo sapiens
cggctgatgtggaaa

SEQ ID NO: 556802 - DNA, 15 bp, Homo sapiens
ggctgatgtggaaaa

SEQ ID NO: 556803 - DNA, 15 bp, Homo sapiens
gctgatgtggaaaag

SEQ ID NO: 556804 - DNA, 15 bp, Homo sapiens
ctgatgtggaaaaga

SEQ ID NO: 556805 - DNA, 15 bp, Homo sapiens
tgatgtggaaaagaa

SEQ ID NO: 556806 - DNA, 15 bp, Homo sapiens
gatgtggaaaagaat

SEQ ID NO: 556807 - DNA, 15 bp, Homo sapiens
atgtggaaaagaatt

SEQ ID NO: 556808 - DNA, 15 bp, Homo sapiens
tgtggaaaagaattt

SEQ ID NO: 556809 - DNA, 15 bp, Homo sapiens
gtggaaaagaatttt

SEQ ID NO: 556810 - DNA, 15 bp, Homo sapiens
tggaaaagaattttt

SEQ ID NO: 556811 - DNA, 15 bp, Homo sapiens
ggaaaagaatttttc

SEQ ID NO: 556812 - DNA, 15 bp, Homo sapiens
gaaaagaatttttcc

SEQ ID NO: 556813 - DNA, 15 bp, Homo sapiens
aaaagaatttttcca

SEQ ID NO: 556814 - DNA, 15 bp, Homo sapiens
aaagaatttttccaa

SEQ ID NO: 556815 - DNA, 15 bp, Homo sapiens
aagaatttttccaaa

SEQ ID NO: 556816 - DNA, 15 bp, Homo sapiens
agaatttttccaaat

SEQ ID NO: 556817 - DNA, 15 bp, Homo sapiens
gaatttttccaaata

SEQ ID NO: 556818 - DNA, 15 bp, Homo sapiens
aatttttccaaatat

SEQ ID NO: 556819 - DNA, 15 bp, Homo sapiens
atttttccaaatatc

SEQ ID NO: 556820 - DNA, 15 bp, Homo sapiens
tttttccaaatatcg

SEQ ID NO: 556821 - DNA, 15 bp, Homo sapiens
ttttccaaatatcgt

SEQ ID NO: 556822 - DNA, 15 bp, Homo sapiens
tttccaaatatcgta

SEQ ID NO: 556823 - DNA, 15 bp, Homo sapiens
ttccaaatatcgtat

SEQ ID NO: 556824 - DNA, 15 bp, Homo sapiens
tccaaatatcgtatc

SEQ ID NO: 556825 - DNA, 15 bp, Homo sapiens
ccaaatatcgtatcc

SEQ ID NO: 556826 - DNA, 15 bp, Homo sapiens
caaatatcgtatccc

SEQ ID NO: 556827 - DNA, 15 bp, Homo sapiens
aaatatcgtatcccc

SEQ ID NO: 556828 - DNA, 15 bp, Homo sapiens
aatatcgtatcccca

SEQ ID NO: 556829 - DNA, 15 bp, Homo sapiens
atatcgtatccccac

SEQ ID NO: 556830 - DNA, 15 bp, Homo sapiens
tatcgtatccccacc

SEQ ID NO: 556831 - DNA, 15 bp, Homo sapiens
atcgtatccccaccg

SEQ ID NO: 556832 - DNA, 15 bp, Homo sapiens
tcgtatccccaccgt

SEQ ID NO: 556833 - DNA, 15 bp, Homo sapiens
cgtatccccaccgtc

SEQ ID NO: 556834 - DNA, 15 bp, Homo sapiens
gtatccccaccgtcc

SEQ ID NO: 556835 - DNA, 15 bp, Homo sapiens
tatccccaccgtcca

SEQ ID NO: 556836 - DNA, 15 bp, Homo sapiens
atccccaccgtccac

SEQ ID NO: 556837 - DNA, 15 bp, Homo sapiens
tccccaccgtccaca

SEQ ID NO: 556838 - DNA, 15 bp, Homo sapiens
ccccaccgtccacaa

SEQ ID NO: 556839 - DNA, 15 bp, Homo sapiens
cccaccgtccacaaa

SEQ ID NO: 556840 - DNA, 15 bp, Homo sapiens
ccaccgtccacaaac

SEQ ID NO: 556841 - DNA, 15 bp, Homo sapiens
caccgtccacaaacg

SEQ ID NO: 556842 - DNA, 15 bp, Homo sapiens
accgtccacaaacgg

SEQ ID NO: 556843 - DNA, 15 bp, Homo sapiens
ccgtccacaaacggg

SEQ ID NO: 556844 - DNA, 15 bp, Homo sapiens
cgtccacaaacggga

SEQ ID NO: 556845 - DNA, 15 bp, Homo sapiens
gtccacaaacgggag

SEQ ID NO: 556846 - DNA, 15 bp, Homo sapiens
tccacaaacgggagg

SEQ ID NO: 556847 - DNA, 15 bp, Homo sapiens
ccacaaacgggagga

SEQ ID NO: 556848 - DNA, 15 bp, Homo sapiens
cacaaacgggaggag

SEQ ID NO: 556849 - DNA, 15 bp, Homo sapiens
acaaacgggaggagc

SEQ ID NO: 556850 - DNA, 15 bp, Homo sapiens
caaacgggaggagcc

SEQ ID NO: 556851 - DNA, 15 bp, Homo sapiens
aaacgggaggagccc

SEQ ID NO: 556852 - DNA, 15 bp, Homo sapiens
aacgggaggagcccg

SEQ ID NO: 556853 - DNA, 15 bp, Homo sapiens
acgggaggagcccgg

SEQ ID NO: 556854 - DNA, 15 bp, Homo sapiens
cgggaggagcccggg

SEQ ID NO: 556855 - DNA, 15 bp, Homo sapiens
gggaggagcccgggg

SEQ ID NO: 556856 - DNA, 15 bp, Homo sapiens
ggaggagcccgggga

SEQ ID NO: 556857 - DNA, 15 bp, Homo sapiens
gaggagcccggggag

SEQ ID NO: 556858 - DNA, 15 bp, Homo sapiens
aggagcccggggagt

SEQ ID NO: 556859 - DNA, 15 bp, Homo sapiens
ggagcccggggagtg

SEQ ID NO: 556860 - DNA, 15 bp, Homo sapiens
gagcccggggagtgt

SEQ ID NO: 556861 - DNA, 15 bp, Homo sapiens
agcccggggagtgtg

SEQ ID NO: 556862 - DNA, 15 bp, Homo sapiens
gcccggggagtgtgc

SEQ ID NO: 556863 - DNA, 15 bp, Homo sapiens
cccggggagtgtgcc

SEQ ID NO: 556864 - DNA, 15 bp, Homo sapiens
ccggggagtgtgccc

SEQ ID NO: 556865 - DNA, 15 bp, Homo sapiens
cggggagtgtgccct

SEQ ID NO: 556866 - DNA, 15 bp, Homo sapiens
ggggagtgtgccctc

SEQ ID NO: 556867 - DNA, 15 bp, Homo sapiens
gggagtgtgccctcc

SEQ ID NO: 556868 - DNA, 15 bp, Homo sapiens
ggagtgtgccctcct

SEQ ID NO: 556869 - DNA, 15 bp, Homo sapiens
gagtgtgccctcctg

SEQ ID NO: 556870 - DNA, 15 bp, Homo sapiens
agtgtgccctcctgt

SEQ ID NO: 556871 - DNA, 15 bp, Homo sapiens
gtgtgccctcctgtc

SEQ ID NO: 556872 - DNA, 15 bp, Homo sapiens
tgtgccctcctgtcc

SEQ ID NO: 556873 - DNA, 15 bp, Homo sapiens
gtgccctcctgtccc

SEQ ID NO: 556874 - DNA, 15 bp, Homo sapiens
tgccctcctgtccca

SEQ ID NO: 556875 - DNA, 15 bp, Homo sapiens
gccctcctgtcccac

SEQ ID NO: 556876 - DNA, 15 bp, Homo sapiens
ccctcctgtcccacc

SEQ ID NO: 556877 - DNA, 15 bp, Homo sapiens
cctcctgtcccacca

SEQ ID NO: 556878 - DNA, 15 bp, Homo sapiens
ctcctgtcccaccat

SEQ ID NO: 556879 - DNA, 15 bp, Homo sapiens
tcctgtcccaccatc

SEQ ID NO: 556880 - DNA, 15 bp, Homo sapiens
cctgtcccaccatcc

SEQ ID NO: 556881 - DNA, 15 bp, Homo sapiens
ctgtcccaccatcct

SEQ ID NO: 556882 - DNA, 15 bp, Homo sapiens
tgtcccaccatcctg

SEQ ID NO: 556883 - DNA, 15 bp, Homo sapiens
gtcccaccatcctgc

SEQ ID NO: 556884 - DNA, 15 bp, Homo sapiens
tcccaccatcctgcc

SEQ ID NO: 556885 - DNA, 15 bp, Homo sapiens
cccaccatcctgccc

SEQ ID NO: 556886 - DNA, 15 bp, Homo sapiens
ccaccatcctgcccc

SEQ ID NO: 556887 - DNA, 15 bp, Homo sapiens
caccatcctgccccc

SEQ ID NO: 556888 - DNA, 15 bp, Homo sapiens
accatcctgccccct

SEQ ID NO: 556889 - DNA, 15 bp, Homo sapiens
ccatcctgccccctg

SEQ ID NO: 556890 - DNA, 15 bp, Homo sapiens
catcctgccccctgc

SEQ ID NO: 556891 - DNA, 15 bp, Homo sapiens
atcctgccccctgct

SEQ ID NO: 556892 - DNA, 15 bp, Homo sapiens
tcctgccccctgctg

SEQ ID NO: 556893 - DNA, 15 bp, Homo sapiens
cctgccccctgctgt

SEQ ID NO: 556894 - DNA, 15 bp, Homo sapiens
ctgccccctgctgta

SEQ ID NO: 556895 - DNA, 15 bp, Homo sapiens
tgccccctgctgtag

SEQ ID NO: 556896 - DNA, 15 bp, Homo sapiens
gccccctgctgtagt

SEQ ID NO: 556897 - DNA, 15 bp, Homo sapiens
ccccctgctgtagtt

SEQ ID NO: 556898 - DNA, 15 bp, Homo sapiens
cccctgctgtagttc

SEQ ID NO: 556899 - DNA, 15 bp, Homo sapiens
ccctgctgtagttct

SEQ ID NO: 556900 - DNA, 15 bp, Homo sapiens
cctgctgtagttctc

SEQ ID NO: 556901 - DNA, 15 bp, Homo sapiens
ctgctgtagttctcc

SEQ ID NO: 556902 - DNA, 15 bp, Homo sapiens
tgctgtagttctcct

SEQ ID NO: 556903 - DNA, 15 bp, Homo sapiens
gctgtagttctcctt

SEQ ID NO: 556904 - DNA, 15 bp, Homo sapiens
ctgtagttctccttt

SEQ ID NO: 556905 - DNA, 15 bp, Homo sapiens
tgtagttctcctttc

SEQ ID NO: 556906 - DNA, 15 bp, Homo sapiens
gtagttctcctttcc

SEQ ID NO: 556907 - DNA, 15 bp, Homo sapiens
tagttctcctttccg

SEQ ID NO: 556908 - DNA, 15 bp, Homo sapiens
agttctcctttccga

SEQ ID NO: 556909 - DNA, 15 bp, Homo sapiens
gttctcctttccgag

SEQ ID NO: 556910 - DNA, 15 bp, Homo sapiens
ttctcctttccgaga

SEQ ID NO: 556911 - DNA, 15 bp, Homo sapiens
tctcctttccgagag

SEQ ID NO: 556912 - DNA, 15 bp, Homo sapiens
ctcctttccgagaga

SEQ ID NO: 556913 - DNA, 15 bp, Homo sapiens
tcctttccgagagac

SEQ ID NO: 556914 - DNA, 15 bp, Homo sapiens
cctttccgagagacc

SEQ ID NO: 556915 - DNA, 15 bp, Homo sapiens
ctttccgagagaccc

SEQ ID NO: 556916 - DNA, 15 bp, Homo sapiens
tttccgagagacccc

SEQ ID NO: 556917 - DNA, 15 bp, Homo sapiens
ttccgagagacccct

SEQ ID NO: 556918 - DNA, 15 bp, Homo sapiens
tccgagagacccctg

SEQ ID NO: 556919 - DNA, 15 bp, Homo sapiens
ccgagagacccctgc

SEQ ID NO: 556920 - DNA, 15 bp, Homo sapiens
cgagagacccctgcc

SEQ ID NO: 556921 - DNA, 15 bp, Homo sapiens
gagagacccctgccc

SEQ ID NO: 556922 - DNA, 15 bp, Homo sapiens
agagacccctgccca

SEQ ID NO: 556923 - DNA, 15 bp, Homo sapiens
gagacccctgcccat

SEQ ID NO: 556924 - DNA, 15 bp, Homo sapiens
agacccctgcccata

SEQ ID NO: 556925 - DNA, 15 bp, Homo sapiens
gacccctgcccatac

SEQ ID NO: 556926 - DNA, 15 bp, Homo sapiens
acccctgcccatacc

SEQ ID NO: 556927 - DNA, 15 bp, Homo sapiens
cccctgcccataccc

SEQ ID NO: 556928 - DNA, 15 bp, Homo sapiens
ccctgcccataccct

SEQ ID NO: 556929 - DNA, 15 bp, Homo sapiens
cctgcccatacccta

SEQ ID NO: 556930 - DNA, 15 bp, Homo sapiens
ctgcccataccctat

SEQ ID NO: 556931 - DNA, 15 bp, Homo sapiens
tgcccataccctatg

SEQ ID NO: 556932 - DNA, 15 bp, Homo sapiens
gcccataccctatgc

SEQ ID NO: 556933 - DNA, 15 bp, Homo sapiens
cccataccctatgcc

SEQ ID NO: 556934 - DNA, 15 bp, Homo sapiens
ccataccctatgccc

SEQ ID NO: 556935 - DNA, 15 bp, Homo sapiens
cataccctatgccct

SEQ ID NO: 556936 - DNA, 15 bp, Homo sapiens
ataccctatgccctc

SEQ ID NO: 556937 - DNA, 15 bp, Homo sapiens
taccctatgccctct

SEQ ID NO: 556938 - DNA, 15 bp, Homo sapiens
accctatgccctctt

SEQ ID NO: 556939 - DNA, 15 bp, Homo sapiens
ccctatgccctcttg

SEQ ID NO: 556940 - DNA, 15 bp, Homo sapiens
cctatgccctcttgc

SEQ ID NO: 556941 - DNA, 15 bp, Homo sapiens
ctatgccctcttgct

SEQ ID NO: 556942 - DNA, 15 bp, Homo sapiens
tatgccctcttgctc

SEQ ID NO: 556943 - DNA, 15 bp, Homo sapiens
atgccctcttgctct

SEQ ID NO: 556944 - DNA, 15 bp, Homo sapiens
tgccctcttgctctg

SEQ ID NO: 556945 - DNA, 15 bp, Homo sapiens
gccctcttgctctgg

SEQ ID NO: 556946 - DNA, 15 bp, Homo sapiens
ccctcttgctctggg

SEQ ID NO: 556947 - DNA, 15 bp, Homo sapiens
cctcttgctctgggg

SEQ ID NO: 556948 - DNA, 15 bp, Homo sapiens
ctcttgctctggggg

SEQ ID NO: 556949 - DNA, 15 bp, Homo sapiens
tcttgctctgggggt

SEQ ID NO: 556950 - DNA, 15 bp, Homo sapiens
cttgctctgggggtc

SEQ ID NO: 556951 - DNA, 15 bp, Homo sapiens
ttgctctgggggtcc

SEQ ID NO: 556952 - DNA, 15 bp, Homo sapiens
tgctctgggggtcct

SEQ ID NO: 556953 - DNA, 15 bp, Homo sapiens
gctctgggggtcctc

SEQ ID NO: 556954 - DNA, 15 bp, Homo sapiens
ctctgggggtcctcc

SEQ ID NO: 556955 - DNA, 15 bp, Homo sapiens
tctgggggtcctcca

SEQ ID NO: 556956 - DNA, 15 bp, Homo sapiens
ctgggggtcctccaa

SEQ ID NO: 556957 - DNA, 15 bp, Homo sapiens
tgggggtcctccaag

SEQ ID NO: 556958 - DNA, 15 bp, Homo sapiens
gggggtcctccaagg

SEQ ID NO: 556959 - DNA, 15 bp, Homo sapiens
ggggtcctccaaggg

SEQ ID NO: 556960 - DNA, 15 bp, Homo sapiens
gggtcctccaaggga

SEQ ID NO: 556961 - DNA, 15 bp, Homo sapiens
ggtcctccaagggaa

SEQ ID NO: 556962 - DNA, 15 bp, Homo sapiens
gtcctccaagggaag

SEQ ID NO: 556963 - DNA, 15 bp, Homo sapiens
tcctccaagggaaga

SEQ ID NO: 556964 - DNA, 15 bp, Homo sapiens
cctccaagggaagag

SEQ ID NO: 556965 - DNA, 15 bp, Homo sapiens
ctccaagggaagagc

SEQ ID NO: 556966 - DNA, 15 bp, Homo sapiens
tccaagggaagagcg

SEQ ID NO: 556967 - DNA, 15 bp, Homo sapiens
ccaagggaagagcgt

SEQ ID NO: 556968 - DNA, 15 bp, Homo sapiens
caagggaagagcgtg

SEQ ID NO: 556969 - DNA, 15 bp, Homo sapiens
aagggaagagcgtgc

SEQ ID NO: 556970 - DNA, 15 bp, Homo sapiens
agggaagagcgtgca

SEQ ID NO: 556971 - DNA, 15 bp, Homo sapiens
gggaagagcgtgcag

SEQ ID NO: 556972 - DNA, 15 bp, Homo sapiens
ggaagagcgtgcagt

SEQ ID NO: 556973 - DNA, 15 bp, Homo sapiens
gaagagcgtgcagtg

SEQ ID NO: 556974 - DNA, 15 bp, Homo sapiens
aagagcgtgcagtgt

SEQ ID NO: 556975 - DNA, 15 bp, Homo sapiens
agagcgtgcagtgtg

SEQ ID NO: 556976 - DNA, 15 bp, Homo sapiens
gagcgtgcagtgtgg

SEQ ID NO: 556977 - DNA, 15 bp, Homo sapiens
agcgtgcagtgtgga

SEQ ID NO: 556978 - DNA, 15 bp, Homo sapiens
gcgtgcagtgtggag

SEQ ID NO: 556979 - DNA, 15 bp, Homo sapiens
cgtgcagtgtggagc

SEQ ID NO: 556980 - DNA, 15 bp, Homo sapiens
gtgcagtgtggagcc

SEQ ID NO: 556981 - DNA, 15 bp, Homo sapiens
tgcagtgtggagccc

SEQ ID NO: 556982 - DNA, 15 bp, Homo sapiens
gcagtgtggagccca

SEQ ID NO: 556983 - DNA, 15 bp, Homo sapiens
cagtgtggagcccac

SEQ ID NO: 556984 - DNA, 15 bp, Homo sapiens
agtgtggagcccacc

SEQ ID NO: 556985 - DNA, 15 bp, Homo sapiens
gtgtggagcccacct

SEQ ID NO: 556986 - DNA, 15 bp, Homo sapiens
tgtggagcccacctc

SEQ ID NO: 556987 - DNA, 15 bp, Homo sapiens
gtggagcccacctct

SEQ ID NO: 556988 - DNA, 15 bp, Homo sapiens
tggagcccacctctc

SEQ ID NO: 556989 - DNA, 15 bp, Homo sapiens
ggagcccacctctcc

SEQ ID NO: 556990 - DNA, 15 bp, Homo sapiens
gagcccacctctccc

SEQ ID NO: 556991 - DNA, 15 bp, Homo sapiens
agcccacctctccca

SEQ ID NO: 556992 - DNA, 15 bp, Homo sapiens
gcccacctctcccac

SEQ ID NO: 556993 - DNA, 15 bp, Homo sapiens
cccacctctcccaca

SEQ ID NO: 556994 - DNA, 15 bp, Homo sapiens
ccacctctcccacag

SEQ ID NO: 556995 - DNA, 15 bp, Homo sapiens
cacctctcccacaga

SEQ ID NO: 556996 - DNA, 15 bp, Homo sapiens
acctctcccacagag

SEQ ID NO: 556997 - DNA, 15 bp, Homo sapiens
cctctcccacagagg

SEQ ID NO: 556998 - DNA, 15 bp, Homo sapiens
ctctcccacagaggc

SEQ ID NO: 556999 - DNA, 15 bp, Homo sapiens
tctcccacagaggcc

SEQ ID NO: 557000 - DNA, 15 bp, Homo sapiens
ctcccacagaggccg

SEQ ID NO: 557001 - DNA, 15 bp, Homo sapiens
tcccacagaggccgc

SEQ ID NO: 557002 - DNA, 15 bp, Homo sapiens
cccacagaggccgcc

SEQ ID NO: 557003 - DNA, 15 bp, Homo sapiens
ccacagaggccgcct

SEQ ID NO: 557004 - DNA, 15 bp, Homo sapiens
cacagaggccgcctg

SEQ ID NO: 557005 - DNA, 15 bp, Homo sapiens
acagaggccgcctgc

SEQ ID NO: 557006 - DNA, 15 bp, Homo sapiens
cagaggccgcctgcc

SEQ ID NO: 557007 - DNA, 15 bp, Homo sapiens
agaggccgcctgcca

SEQ ID NO: 557008 - DNA, 15 bp, Homo sapiens
gaggccgcctgccaa

SEQ ID NO: 557009 - DNA, 15 bp, Homo sapiens
aggccgcctgccaat

SEQ ID NO: 557010 - DNA, 15 bp, Homo sapiens
ggccgcctgccaatg

SEQ ID NO: 557011 - DNA, 15 bp, Homo sapiens
gccgcctgccaatga

SEQ ID NO: 557012 - DNA, 15 bp, Homo sapiens
ccgcctgccaatgaa

SEQ ID NO: 557013 - DNA, 15 bp, Homo sapiens
cgcctgccaatgaaa

SEQ ID NO: 557014 - DNA, 15 bp, Homo sapiens
gcctgccaatgaaaa

SEQ ID NO: 557015 - DNA, 15 bp, Homo sapiens
cctgccaatgaaaac

SEQ ID NO: 557016 - DNA, 15 bp, Homo sapiens
ctgccaatgaaaacc

SEQ ID NO: 557017 - DNA, 15 bp, Homo sapiens
tgccaatgaaaacct

SEQ ID NO: 557018 - DNA, 15 bp, Homo sapiens
gccaatgaaaacctt

SEQ ID NO: 557019 - DNA, 15 bp, Homo sapiens
ccaatgaaaaccttg

SEQ ID NO: 557020 - DNA, 15 bp, Homo sapiens
caatgaaaaccttgc

SEQ ID NO: 557021 - DNA, 15 bp, Homo sapiens
aatgaaaaccttgct

SEQ ID NO: 557022 - DNA, 15 bp, Homo sapiens
atgaaaaccttgctc

SEQ ID NO: 557023 - DNA, 15 bp, Homo sapiens
tgaaaaccttgctca

SEQ ID NO: 557024 - DNA, 15 bp, Homo sapiens
gaaaaccttgctcac

SEQ ID NO: 557025 - DNA, 15 bp, Homo sapiens
aaaaccttgctcact

SEQ ID NO: 557026 - DNA, 15 bp, Homo sapiens
aaaccttgctcactt

SEQ ID NO: 557027 - DNA, 15 bp, Homo sapiens
aaccttgctcacttg

SEQ ID NO: 557028 - DNA, 15 bp, Homo sapiens
accttgctcacttgg

SEQ ID NO: 557029 - DNA, 15 bp, Homo sapiens
ccttgctcacttggt

SEQ ID NO: 557030 - DNA, 15 bp, Homo sapiens
cttgctcacttggtt

SEQ ID NO: 557031 - DNA, 15 bp, Homo sapiens
ttgctcacttggttg

SEQ ID NO: 557032 - DNA, 15 bp, Homo sapiens
tgctcacttggttgc

SEQ ID NO: 557033 - DNA, 15 bp, Homo sapiens
gctcacttggttgca

SEQ ID NO: 557034 - DNA, 15 bp, Homo sapiens
ctcacttggttgcag

SEQ ID NO: 557035 - DNA, 15 bp, Homo sapiens
tcacttggttgcagg

SEQ ID NO: 557036 - DNA, 15 bp, Homo sapiens
cacttggttgcaggc

SEQ ID NO: 557037 - DNA, 15 bp, Homo sapiens
acttggttgcaggcc

SEQ ID NO: 557038 - DNA, 15 bp, Homo sapiens
cttggttgcaggcca

SEQ ID NO: 557039 - DNA, 15 bp, Homo sapiens
ttggttgcaggccaa

SEQ ID NO: 557040 - DNA, 15 bp, Homo sapiens
tggttgcaggccaac

SEQ ID NO: 557041 - DNA, 15 bp, Homo sapiens
ggttgcaggccaact

SEQ ID NO: 557042 - DNA, 15 bp, Homo sapiens
gttgcaggccaactt

SEQ ID NO: 557043 - DNA, 15 bp, Homo sapiens
ttgcaggccaactta

SEQ ID NO: 557044 - DNA, 15 bp, Homo sapiens
tgcaggccaacttaa

SEQ ID NO: 557045 - DNA, 15 bp, Homo sapiens
gcaggccaacttaat

SEQ ID NO: 557046 - DNA, 15 bp, Homo sapiens
caggccaacttaatc

SEQ ID NO: 557047 - DNA, 15 bp, Homo sapiens
aggccaacttaatcc

SEQ ID NO: 557048 - DNA, 15 bp, Homo sapiens
ggccaacttaatcct

SEQ ID NO: 557049 - DNA, 15 bp, Homo sapiens
gccaacttaatcctt

SEQ ID NO: 557050 - DNA, 15 bp, Homo sapiens
ccaacttaatccttc

SEQ ID NO: 557051 - DNA, 15 bp, Homo sapiens
caacttaatccttca

SEQ ID NO: 557052 - DNA, 15 bp, Homo sapiens
aacttaatccttcaa

SEQ ID NO: 557053 - DNA, 15 bp, Homo sapiens
acttaatccttcaaa

SEQ ID NO: 557054 - DNA, 15 bp, Homo sapiens
cttaatccttcaaac

SEQ ID NO: 557055 - DNA, 15 bp, Homo sapiens
ttaatccttcaaact

SEQ ID NO: 557056 - DNA, 15 bp, Homo sapiens
taatccttcaaactt

SEQ ID NO: 557057 - DNA, 15 bp, Homo sapiens
aatccttcaaacttc

SEQ ID NO: 557058 - DNA, 15 bp, Homo sapiens
atccttcaaacttct

SEQ ID NO: 557059 - DNA, 15 bp, Homo sapiens
tccttcaaacttctg

SEQ ID NO: 557060 - DNA, 15 bp, Homo sapiens
ccttcaaacttctgc

SEQ ID NO: 557061 - DNA, 15 bp, Homo sapiens
cttcaaacttctgca

SEQ ID NO: 557062 - DNA, 15 bp, Homo sapiens
ttcaaacttctgcag

SEQ ID NO: 557063 - DNA, 15 bp, Homo sapiens
tcaaacttctgcagc

SEQ ID NO: 557064 - DNA, 15 bp, Homo sapiens
caaacttctgcagca

SEQ ID NO: 557065 - DNA, 15 bp, Homo sapiens
aaacttctgcagcac

SEQ ID NO: 557066 - DNA, 15 bp, Homo sapiens
aacttctgcagcact

SEQ ID NO: 557067 - DNA, 15 bp, Homo sapiens
acttctgcagcactt

SEQ ID NO: 557068 - DNA, 15 bp, Homo sapiens
cttctgcagcacttg

SEQ ID NO: 557069 - DNA, 15 bp, Homo sapiens
ttctgcagcacttgg

SEQ ID NO: 557070 - DNA, 15 bp, Homo sapiens
tctgcagcacttgga

SEQ ID NO: 557071 - DNA, 15 bp, Homo sapiens
ctgcagcacttggac

SEQ ID NO: 557072 - DNA, 15 bp, Homo sapiens
tgcagcacttggact

SEQ ID NO: 557073 - DNA, 15 bp, Homo sapiens
gcagcacttggactg

SEQ ID NO: 557074 - DNA, 15 bp, Homo sapiens
cagcacttggactgt

SEQ ID NO: 557075 - DNA, 15 bp, Homo sapiens
agcacttggactgtt

SEQ ID NO: 557076 - DNA, 15 bp, Homo sapiens
gcacttggactgttt

SEQ ID NO: 557077 - DNA, 15 bp, Homo sapiens
cacttggactgtttc

SEQ ID NO: 557078 - DNA, 15 bp, Homo sapiens
acttggactgtttca

SEQ ID NO: 557079 - DNA, 15 bp, Homo sapiens
cttggactgtttcac

SEQ ID NO: 557080 - DNA, 15 bp, Homo sapiens
ttggactgtttcaca

SEQ ID NO: 557081 - DNA, 15 bp, Homo sapiens
tggactgtttcacaa

SEQ ID NO: 557082 - DNA, 15 bp, Homo sapiens
ggactgtttcacaac

SEQ ID NO: 557083 - DNA, 15 bp, Homo sapiens
gactgtttcacaact

SEQ ID NO: 557084 - DNA, 15 bp, Homo sapiens
actgtttcacaactg

SEQ ID NO: 557085 - DNA, 15 bp, Homo sapiens
ctgtttcacaactga

SEQ ID NO: 557086 - DNA, 15 bp, Homo sapiens
tgtttcacaactgac

SEQ ID NO: 557087 - DNA, 15 bp, Homo sapiens
gtttcacaactgaca

SEQ ID NO: 557088 - DNA, 15 bp, Homo sapiens
tttcacaactgacaa

SEQ ID NO: 557089 - DNA, 15 bp, Homo sapiens
ttcacaactgacaag

SEQ ID NO: 557090 - DNA, 15 bp, Homo sapiens
tcacaactgacaagg

SEQ ID NO: 557091 - DNA, 15 bp, Homo sapiens
cacaactgacaagga

SEQ ID NO: 557092 - DNA, 15 bp, Homo sapiens
acaactgacaaggat

SEQ ID NO: 557093 - DNA, 15 bp, Homo sapiens
caactgacaaggatg

SEQ ID NO: 557094 - DNA, 15 bp, Homo sapiens
aactgacaaggatgc

SEQ ID NO: 557095 - DNA, 15 bp, Homo sapiens
actgacaaggatgca

SEQ ID NO: 557096 - DNA, 15 bp, Homo sapiens
ctgacaaggatgcag

SEQ ID NO: 557097 - DNA, 15 bp, Homo sapiens
tgacaaggatgcagg

SEQ ID NO: 557098 - DNA, 15 bp, Homo sapiens
gacaaggatgcaggg

SEQ ID NO: 557099 - DNA, 15 bp, Homo sapiens
acaaggatgcaggga

SEQ ID NO: 557100 - DNA, 15 bp, Homo sapiens
caaggatgcagggaa

SEQ ID NO: 557101 - DNA, 15 bp, Homo sapiens
aaggatgcagggaaa

SEQ ID NO: 557102 - DNA, 15 bp, Homo sapiens
aggatgcagggaaag

SEQ ID NO: 557103 - DNA, 15 bp, Homo sapiens
ggatgcagggaaagg

SEQ ID NO: 557104 - DNA, 15 bp, Homo sapiens
gatgcagggaaaggc

SEQ ID NO: 557105 - DNA, 15 bp, Homo sapiens
atgcagggaaaggct

SEQ ID NO: 557106 - DNA, 15 bp, Homo sapiens
tgcagggaaaggctg

SEQ ID NO: 557107 - DNA, 15 bp, Homo sapiens
gcagggaaaggctgc

SEQ ID NO: 557108 - DNA, 15 bp, Homo sapiens
cagggaaaggctgcc

SEQ ID NO: 557109 - DNA, 15 bp, Homo sapiens
agggaaaggctgcca

SEQ ID NO: 557110 - DNA, 15 bp, Homo sapiens
gggaaaggctgccag

SEQ ID NO: 557111 - DNA, 15 bp, Homo sapiens
ggaaaggctgccaga

SEQ ID NO: 557112 - DNA, 15 bp, Homo sapiens
gaaaggctgccagac

SEQ ID NO: 557113 - DNA, 15 bp, Homo sapiens
aaaggctgccagacc

SEQ ID NO: 557114 - DNA, 15 bp, Homo sapiens
aaggctgccagacca

SEQ ID NO: 557115 - DNA, 15 bp, Homo sapiens
aggctgccagaccat

SEQ ID NO: 557116 - DNA, 15 bp, Homo sapiens
ggctgccagaccatg

SEQ ID NO: 557117 - DNA, 15 bp, Homo sapiens
gctgccagaccatgt

SEQ ID NO: 557118 - DNA, 15 bp, Homo sapiens
ctgccagaccatgtg

SEQ ID NO: 557119 - DNA, 15 bp, Homo sapiens
tgccagaccatgtgc

SEQ ID NO: 557120 - DNA, 15 bp, Homo sapiens
gccagaccatgtgcg

SEQ ID NO: 557121 - DNA, 15 bp, Homo sapiens
ccagaccatgtgcgt

SEQ ID NO: 557122 - DNA, 15 bp, Homo sapiens
cagaccatgtgcgtg

SEQ ID NO: 557123 - DNA, 15 bp, Homo sapiens
agaccatgtgcgtga

SEQ ID NO: 557124 - DNA, 15 bp, Homo sapiens
gaccatgtgcgtgag

SEQ ID NO: 557125 - DNA, 15 bp, Homo sapiens
accatgtgcgtgagt

SEQ ID NO: 557126 - DNA, 15 bp, Homo sapiens
ccatgtgcgtgagtg

SEQ ID NO: 557127 - DNA, 15 bp, Homo sapiens
catgtgcgtgagtgt

SEQ ID NO: 557128 - DNA, 15 bp, Homo sapiens
atgtgcgtgagtgtg

SEQ ID NO: 557129 - DNA, 15 bp, Homo sapiens
tgtgcgtgagtgtgt

SEQ ID NO: 557130 - DNA, 15 bp, Homo sapiens
gtgcgtgagtgtgtg

SEQ ID NO: 557131 - DNA, 15 bp, Homo sapiens
tgcgtgagtgtgtgt

SEQ ID NO: 557132 - DNA, 15 bp, Homo sapiens
gcgtgagtgtgtgtg

SEQ ID NO: 557133 - DNA, 15 bp, Homo sapiens
cgtgagtgtgtgtgt

SEQ ID NO: 557134 - DNA, 15 bp, Homo sapiens
gtgagtgtgtgtgta

SEQ ID NO: 557135 - DNA, 15 bp, Homo sapiens
tgagtgtgtgtgtat

SEQ ID NO: 557136 - DNA, 15 bp, Homo sapiens
gagtgtgtgtgtatg

SEQ ID NO: 557137 - DNA, 15 bp, Homo sapiens
agtgtgtgtgtatgc

SEQ ID NO: 557138 - DNA, 15 bp, Homo sapiens
gtgtgtgtgtatgca

SEQ ID NO: 557139 - DNA, 15 bp, Homo sapiens
tgtgtgtgtatgcac

SEQ ID NO: 557140 - DNA, 15 bp, Homo sapiens
gtgtgtgtatgcacg

SEQ ID NO: 557141 - DNA, 15 bp, Homo sapiens
tgtgtgtatgcacgc

SEQ ID NO: 557142 - DNA, 15 bp, Homo sapiens
gtgtgtatgcacgcg

SEQ ID NO: 557143 - DNA, 15 bp, Homo sapiens
tgtgtatgcacgcgt

SEQ ID NO: 557144 - DNA, 15 bp, Homo sapiens
gtgtatgcacgcgtg

SEQ ID NO: 557145 - DNA, 15 bp, Homo sapiens
tgtatgcacgcgtgt

SEQ ID NO: 557146 - DNA, 15 bp, Homo sapiens
gtatgcacgcgtgtg

SEQ ID NO: 557147 - DNA, 15 bp, Homo sapiens
tatgcacgcgtgtgt

SEQ ID NO: 557148 - DNA, 15 bp, Homo sapiens
atgcacgcgtgtgtg

SEQ ID NO: 557149 - DNA, 15 bp, Homo sapiens
tgcacgcgtgtgtgt

SEQ ID NO: 557150 - DNA, 15 bp, Homo sapiens
gcacgcgtgtgtgta

SEQ ID NO: 557151 - DNA, 15 bp, Homo sapiens
cacgcgtgtgtgtaa

SEQ ID NO: 557152 - DNA, 15 bp, Homo sapiens
acgcgtgtgtgtaat

SEQ ID NO: 557153 - DNA, 15 bp, Homo sapiens
cgcgtgtgtgtaatg

SEQ ID NO: 557154 - DNA, 15 bp, Homo sapiens
gcgtgtgtgtaatgt

SEQ ID NO: 557155 - DNA, 15 bp, Homo sapiens
cgtgtgtgtaatgtg

SEQ ID NO: 557156 - DNA, 15 bp, Homo sapiens
gtgtgtgtaatgtgt

SEQ ID NO: 557157 - DNA, 15 bp, Homo sapiens
tgtgtgtaatgtgta

SEQ ID NO: 557158 - DNA, 15 bp, Homo sapiens
gtgtgtaatgtgtat

SEQ ID NO: 557159 - DNA, 15 bp, Homo sapiens
tgtgtaatgtgtatg

SEQ ID NO: 557160 - DNA, 15 bp, Homo sapiens
gtgtaatgtgtatgc

SEQ ID NO: 557161 - DNA, 15 bp, Homo sapiens
tgtaatgtgtatgcg

SEQ ID NO: 557162 - DNA, 15 bp, Homo sapiens
gtaatgtgtatgcgt

SEQ ID NO: 557163 - DNA, 15 bp, Homo sapiens
taatgtgtatgcgtg

SEQ ID NO: 557164 - DNA, 15 bp, Homo sapiens
aatgtgtatgcgtgt

SEQ ID NO: 557165 - DNA, 15 bp, Homo sapiens
atgtgtatgcgtgtg

SEQ ID NO: 557166 - DNA, 15 bp, Homo sapiens
tgtgtatgcgtgtgt

SEQ ID NO: 557167 - DNA, 15 bp, Homo sapiens
gtgtatgcgtgtgtg

SEQ ID NO: 557168 - DNA, 15 bp, Homo sapiens
tgtatgcgtgtgtgt

SEQ ID NO: 557169 - DNA, 15 bp, Homo sapiens
gtatgcgtgtgtgtg

SEQ ID NO: 557170 - DNA, 15 bp, Homo sapiens
tatgcgtgtgtgtgc

SEQ ID NO: 557171 - DNA, 15 bp, Homo sapiens
atgcgtgtgtgtgca

SEQ ID NO: 557172 - DNA, 15 bp, Homo sapiens
tgcgtgtgtgtgcac

SEQ ID NO: 557173 - DNA, 15 bp, Homo sapiens
gcgtgtgtgtgcact

SEQ ID NO: 557174 - DNA, 15 bp, Homo sapiens
cgtgtgtgtgcactg

SEQ ID NO: 557175 - DNA, 15 bp, Homo sapiens
gtgtgtgtgcactgt

SEQ ID NO: 557176 - DNA, 15 bp, Homo sapiens
tgtgtgtgcactgtg

SEQ ID NO: 557177 - DNA, 15 bp, Homo sapiens
gtgtgtgcactgtgt

SEQ ID NO: 557178 - DNA, 15 bp, Homo sapiens
tgtgtgcactgtgtt

SEQ ID NO: 557179 - DNA, 15 bp, Homo sapiens
gtgtgcactgtgttt

SEQ ID NO: 557180 - DNA, 15 bp, Homo sapiens
tgtgcactgtgtttg

SEQ ID NO: 557181 - DNA, 15 bp, Homo sapiens
gtgcactgtgtttgc

SEQ ID NO: 557182 - DNA, 15 bp, Homo sapiens
tgcactgtgtttgca

SEQ ID NO: 557183 - DNA, 15 bp, Homo sapiens
gcactgtgtttgcat

SEQ ID NO: 557184 - DNA, 15 bp, Homo sapiens
cactgtgtttgcatg

SEQ ID NO: 557185 - DNA, 15 bp, Homo sapiens
actgtgtttgcatgt

SEQ ID NO: 557186 - DNA, 15 bp, Homo sapiens
ctgtgtttgcatgtg

SEQ ID NO: 557187 - DNA, 15 bp, Homo sapiens
tgtgtttgcatgtgt

SEQ ID NO: 557188 - DNA, 15 bp, Homo sapiens
gtgtttgcatgtgtg

SEQ ID NO: 557189 - DNA, 15 bp, Homo sapiens
tgtttgcatgtgtgt

SEQ ID NO: 557190 - DNA, 15 bp, Homo sapiens
gtttgcatgtgtgtg

SEQ ID NO: 557191 - DNA, 15 bp, Homo sapiens
tttgcatgtgtgtgc

SEQ ID NO: 557192 - DNA, 15 bp, Homo sapiens
ttgcatgtgtgtgca

SEQ ID NO: 557193 - DNA, 15 bp, Homo sapiens
tgcatgtgtgtgcat

SEQ ID NO: 557194 - DNA, 15 bp, Homo sapiens
gcatgtgtgtgcatg

SEQ ID NO: 557195 - DNA, 15 bp, Homo sapiens
catgtgtgtgcatgt

SEQ ID NO: 557196 - DNA, 15 bp, Homo sapiens
atgtgtgtgcatgtg

SEQ ID NO: 557197 - DNA, 15 bp, Homo sapiens
tgtgtgtgcatgtgt

SEQ ID NO: 557198 - DNA, 15 bp, Homo sapiens
gtgtgtgcatgtgtt

SEQ ID NO: 557199 - DNA, 15 bp, Homo sapiens
tgtgtgcatgtgttg

SEQ ID NO: 557200 - DNA, 15 bp, Homo sapiens
gtgtgcatgtgttga

SEQ ID NO: 557201 - DNA, 15 bp, Homo sapiens
tgtgcatgtgttgaa

SEQ ID NO: 557202 - DNA, 15 bp, Homo sapiens
gtgcatgtgttgaat

SEQ ID NO: 557203 - DNA, 15 bp, Homo sapiens
tgcatgtgttgaatg

SEQ ID NO: 557204 - DNA, 15 bp, Homo sapiens
gcatgtgttgaatgt

SEQ ID NO: 557205 - DNA, 15 bp, Homo sapiens
catgtgttgaatgtg

SEQ ID NO: 557206 - DNA, 15 bp, Homo sapiens
atgtgttgaatgtgt

SEQ ID NO: 557207 - DNA, 15 bp, Homo sapiens
tgtgttgaatgtgtg

SEQ ID NO: 557208 - DNA, 15 bp, Homo sapiens
gtgttgaatgtgtgt

SEQ ID NO: 557209 - DNA, 15 bp, Homo sapiens
tgttgaatgtgtgtg

SEQ ID NO: 557210 - DNA, 15 bp, Homo sapiens
gttgaatgtgtgtgc

SEQ ID NO: 557211 - DNA, 15 bp, Homo sapiens
ttgaatgtgtgtgca

SEQ ID NO: 557212 - DNA, 15 bp, Homo sapiens
tgaatgtgtgtgcag

SEQ ID NO: 557213 - DNA, 15 bp, Homo sapiens
gaatgtgtgtgcaga

SEQ ID NO: 557214 - DNA, 15 bp, Homo sapiens
aatgtgtgtgcagat

SEQ ID NO: 557215 - DNA, 15 bp, Homo sapiens
atgtgtgtgcagatg

SEQ ID NO: 557216 - DNA, 15 bp, Homo sapiens
tgtgtgtgcagatga

SEQ ID NO: 557217 - DNA, 15 bp, Homo sapiens
gtgtgtgcagatgaa

SEQ ID NO: 557218 - DNA, 15 bp, Homo sapiens
tgtgtgcagatgaag

SEQ ID NO: 557219 - DNA, 15 bp, Homo sapiens
gtgtgcagatgaagt

SEQ ID NO: 557220 - DNA, 15 bp, Homo sapiens
tgtgcagatgaagtg

SEQ ID NO: 557221 - DNA, 15 bp, Homo sapiens
gtgcagatgaagtgt

SEQ ID NO: 557222 - DNA, 15 bp, Homo sapiens
tgcagatgaagtgta

SEQ ID NO: 557223 - DNA, 15 bp, Homo sapiens
gcagatgaagtgtac

SEQ ID NO: 557224 - DNA, 15 bp, Homo sapiens
cagatgaagtgtacg

SEQ ID NO: 557225 - DNA, 15 bp, Homo sapiens
agatgaagtgtacgt

SEQ ID NO: 557226 - DNA, 15 bp, Homo sapiens
gatgaagtgtacgtg

SEQ ID NO: 557227 - DNA, 15 bp, Homo sapiens
atgaagtgtacgtgc

SEQ ID NO: 557228 - DNA, 15 bp, Homo sapiens
tgaagtgtacgtgca

SEQ ID NO: 557229 - DNA, 15 bp, Homo sapiens
gaagtgtacgtgcat

SEQ ID NO: 557230 - DNA, 15 bp, Homo sapiens
aagtgtacgtgcatg

SEQ ID NO: 557231 - DNA, 15 bp, Homo sapiens
agtgtacgtgcatgt

SEQ ID NO: 557232 - DNA, 15 bp, Homo sapiens
gtgtacgtgcatgtg

SEQ ID NO: 557233 - DNA, 15 bp, Homo sapiens
tgtacgtgcatgtgt

SEQ ID NO: 557234 - DNA, 15 bp, Homo sapiens
gtacgtgcatgtgtg

SEQ ID NO: 557235 - DNA, 15 bp, Homo sapiens
tacgtgcatgtgtgt

SEQ ID NO: 557236 - DNA, 15 bp, Homo sapiens
acgtgcatgtgtgtg

SEQ ID NO: 557237 - DNA, 15 bp, Homo sapiens
cgtgcatgtgtgtgc

SEQ ID NO: 557238 - DNA, 15 bp, Homo sapiens
gtgcatgtgtgtgca

SEQ ID NO: 557239 - DNA, 15 bp, Homo sapiens
atgtgtgtgcatgtt

SEQ ID NO: 557240 - DNA, 15 bp, Homo sapiens
tgtgtgtgcatgttc

SEQ ID NO: 557241 - DNA, 15 bp, Homo sapiens
gtgtgtgcatgttct

SEQ ID NO: 557242 - DNA, 15 bp, Homo sapiens
tgtgtgcatgttctc

SEQ ID NO: 557243 - DNA, 15 bp, Homo sapiens
gtgtgcatgttctct

SEQ ID NO: 557244 - DNA, 15 bp, Homo sapiens
tgtgcatgttctctg

SEQ ID NO: 557245 - DNA, 15 bp, Homo sapiens
gtgcatgttctctgt

SEQ ID NO: 557246 - DNA, 15 bp, Homo sapiens
tgcatgttctctgtg

SEQ ID NO: 557247 - DNA, 15 bp, Homo sapiens
gcatgttctctgtgt

SEQ ID NO: 557248 - DNA, 15 bp, Homo sapiens
catgttctctgtgtt

SEQ ID NO: 557249 - DNA, 15 bp, Homo sapiens
atgttctctgtgttg

SEQ ID NO: 557250 - DNA, 15 bp, Homo sapiens
tgttctctgtgttga

SEQ ID NO: 557251 - DNA, 15 bp, Homo sapiens
gttctctgtgttgaa

SEQ ID NO: 557252 - DNA, 15 bp, Homo sapiens
ttctctgtgttgaaa

SEQ ID NO: 557253 - DNA, 15 bp, Homo sapiens
tctctgtgttgaaat

SEQ ID NO: 557254 - DNA, 15 bp, Homo sapiens
ctctgtgttgaaatg

SEQ ID NO: 557255 - DNA, 15 bp, Homo sapiens
tctgtgttgaaatgt

SEQ ID NO: 557256 - DNA, 15 bp, Homo sapiens
ctgtgttgaaatgtg

SEQ ID NO: 557257 - DNA, 15 bp, Homo sapiens
tgtgttgaaatgtgt

SEQ ID NO: 557258 - DNA, 15 bp, Homo sapiens
gtgttgaaatgtgtg

SEQ ID NO: 557259 - DNA, 15 bp, Homo sapiens
tgttgaaatgtgtgc

SEQ ID NO: 557260 - DNA, 15 bp, Homo sapiens
gttgaaatgtgtgct

SEQ ID NO: 557261 - DNA, 15 bp, Homo sapiens
ttgaaatgtgtgctt

SEQ ID NO: 557262 - DNA, 15 bp, Homo sapiens
tgaaatgtgtgcttc

SEQ ID NO: 557263 - DNA, 15 bp, Homo sapiens
gaaatgtgtgcttcc

SEQ ID NO: 557264 - DNA, 15 bp, Homo sapiens
aaatgtgtgcttcca

SEQ ID NO: 557265 - DNA, 15 bp, Homo sapiens
aatgtgtgcttccat

SEQ ID NO: 557266 - DNA, 15 bp, Homo sapiens
atgtgtgcttccatg

SEQ ID NO: 557267 - DNA, 15 bp, Homo sapiens
tgtgtgcttccatgt

SEQ ID NO: 557268 - DNA, 15 bp, Homo sapiens
gtgtgcttccatgtg

SEQ ID NO: 557269 - DNA, 15 bp, Homo sapiens
tgtgcttccatgtgg

SEQ ID NO: 557270 - DNA, 15 bp, Homo sapiens
gtgcttccatgtggg

SEQ ID NO: 557271 - DNA, 15 bp, Homo sapiens
tgcttccatgtgggt

SEQ ID NO: 557272 - DNA, 15 bp, Homo sapiens
gcttccatgtgggtg

SEQ ID NO: 557273 - DNA, 15 bp, Homo sapiens
cttccatgtgggtga

SEQ ID NO: 557274 - DNA, 15 bp, Homo sapiens
ttccatgtgggtgaa

SEQ ID NO: 557275 - DNA, 15 bp, Homo sapiens
tccatgtgggtgaag

SEQ ID NO: 557276 - DNA, 15 bp, Homo sapiens
ccatgtgggtgaagt

SEQ ID NO: 557277 - DNA, 15 bp, Homo sapiens
catgtgggtgaagta

SEQ ID NO: 557278 - DNA, 15 bp, Homo sapiens
atgtgggtgaagtat

SEQ ID NO: 557279 - DNA, 15 bp, Homo sapiens
tgtgggtgaagtatg

SEQ ID NO: 557280 - DNA, 15 bp, Homo sapiens
gtgggtgaagtatgt

SEQ ID NO: 557281 - DNA, 15 bp, Homo sapiens
tgggtgaagtatgtg

SEQ ID NO: 557282 - DNA, 15 bp, Homo sapiens
gggtgaagtatgtgt

SEQ ID NO: 557283 - DNA, 15 bp, Homo sapiens
ggtgaagtatgtgtg

SEQ ID NO: 557284 - DNA, 15 bp, Homo sapiens
gtgaagtatgtgtgt

SEQ ID NO: 557285 - DNA, 15 bp, Homo sapiens
tgaagtatgtgtgtt

SEQ ID NO: 557286 - DNA, 15 bp, Homo sapiens
gaagtatgtgtgttc

SEQ ID NO: 557287 - DNA, 15 bp, Homo sapiens
aagtatgtgtgttcc

SEQ ID NO: 557288 - DNA, 15 bp, Homo sapiens
agtatgtgtgttcca

SEQ ID NO: 557289 - DNA, 15 bp, Homo sapiens
gtatgtgtgttccat

SEQ ID NO: 557290 - DNA, 15 bp, Homo sapiens
tatgtgtgttccatg

SEQ ID NO: 557291 - DNA, 15 bp, Homo sapiens
atgtgtgttccatgt

SEQ ID NO: 557292 - DNA, 15 bp, Homo sapiens
tgtgtgttccatgtt

SEQ ID NO: 557293 - DNA, 15 bp, Homo sapiens
gtgtgttccatgttg

SEQ ID NO: 557294 - DNA, 15 bp, Homo sapiens
tgtgttccatgttgg

SEQ ID NO: 557295 - DNA, 15 bp, Homo sapiens
gtgttccatgttgga

SEQ ID NO: 557296 - DNA, 15 bp, Homo sapiens
tgttccatgttggaa

SEQ ID NO: 557297 - DNA, 15 bp, Homo sapiens
gttccatgttggaat

SEQ ID NO: 557298 - DNA, 15 bp, Homo sapiens
ttccatgttggaatg

SEQ ID NO: 557299 - DNA, 15 bp, Homo sapiens
tccatgttggaatgt

SEQ ID NO: 557300 - DNA, 15 bp, Homo sapiens
ccatgttggaatgtg

SEQ ID NO: 557301 - DNA, 15 bp, Homo sapiens
catgttggaatgtgt

SEQ ID NO: 557302 - DNA, 15 bp, Homo sapiens
atgttggaatgtgta

SEQ ID NO: 557303 - DNA, 15 bp, Homo sapiens
tgttggaatgtgtac

SEQ ID NO: 557304 - DNA, 15 bp, Homo sapiens
gttggaatgtgtaca

SEQ ID NO: 557305 - DNA, 15 bp, Homo sapiens
ttggaatgtgtacag

SEQ ID NO: 557306 - DNA, 15 bp, Homo sapiens
tggaatgtgtacagt

SEQ ID NO: 557307 - DNA, 15 bp, Homo sapiens
ggaatgtgtacagtg

SEQ ID NO: 557308 - DNA, 15 bp, Homo sapiens
gaatgtgtacagtgc

SEQ ID NO: 557309 - DNA, 15 bp, Homo sapiens
aatgtgtacagtgca

SEQ ID NO: 557310 - DNA, 15 bp, Homo sapiens
atgtgtacagtgcat

SEQ ID NO: 557311 - DNA, 15 bp, Homo sapiens
tgtgtacagtgcatg

SEQ ID NO: 557312 - DNA, 15 bp, Homo sapiens
gtgtacagtgcatgt

SEQ ID NO: 557313 - DNA, 15 bp, Homo sapiens
tgtacagtgcatgtc

SEQ ID NO: 557314 - DNA, 15 bp, Homo sapiens
gtacagtgcatgtct

SEQ ID NO: 557315 - DNA, 15 bp, Homo sapiens
tacagtgcatgtctg

SEQ ID NO: 557316 - DNA, 15 bp, Homo sapiens
acagtgcatgtctgt

SEQ ID NO: 557317 - DNA, 15 bp, Homo sapiens
cagtgcatgtctgtg

SEQ ID NO: 557318 - DNA, 15 bp, Homo sapiens
agtgcatgtctgtgc

SEQ ID NO: 557319 - DNA, 15 bp, Homo sapiens
gtgcatgtctgtgca

SEQ ID NO: 557320 - DNA, 15 bp, Homo sapiens
tgcatgtctgtgcat

SEQ ID NO: 557321 - DNA, 15 bp, Homo sapiens
gcatgtctgtgcatg

SEQ ID NO: 557322 - DNA, 15 bp, Homo sapiens
catgtctgtgcatgt

SEQ ID NO: 557323 - DNA, 15 bp, Homo sapiens
atgtctgtgcatgtg

SEQ ID NO: 557324 - DNA, 15 bp, Homo sapiens
tgtctgtgcatgtgt

SEQ ID NO: 557325 - DNA, 15 bp, Homo sapiens
tctgtgcatgtgtgt

SEQ ID NO: 557326 - DNA, 15 bp, Homo sapiens
ctgtgcatgtgtgtt

SEQ ID NO: 557327 - DNA, 15 bp, Homo sapiens
tgtgcatgtgtgttg

SEQ ID NO: 557328 - DNA, 15 bp, Homo sapiens
gtgcatgtgtgttga

SEQ ID NO: 557329 - DNA, 15 bp, Homo sapiens
tgcatgtgtgttgaa

SEQ ID NO: 557330 - DNA, 15 bp, Homo sapiens
gcatgtgtgttgaag

SEQ ID NO: 557331 - DNA, 15 bp, Homo sapiens
catgtgtgttgaagt

SEQ ID NO: 557332 - DNA, 15 bp, Homo sapiens
atgtgtgttgaagtg

SEQ ID NO: 557333 - DNA, 15 bp, Homo sapiens
tgtgtgttgaagtgt

SEQ ID NO: 557334 - DNA, 15 bp, Homo sapiens
gtgtgttgaagtgtg

SEQ ID NO: 557335 - DNA, 15 bp, Homo sapiens
tgtgttgaagtgtgt

SEQ ID NO: 557336 - DNA, 15 bp, Homo sapiens
gtgttgaagtgtgtc

SEQ ID NO: 557337 - DNA, 15 bp, Homo sapiens
tgttgaagtgtgtcc

SEQ ID NO: 557338 - DNA, 15 bp, Homo sapiens
gttgaagtgtgtcca

SEQ ID NO: 557339 - DNA, 15 bp, Homo sapiens
ttgaagtgtgtccat

SEQ ID NO: 557340 - DNA, 15 bp, Homo sapiens
tgaagtgtgtccatg

SEQ ID NO: 557341 - DNA, 15 bp, Homo sapiens
gaagtgtgtccatgc

SEQ ID NO: 557342 - DNA, 15 bp, Homo sapiens
aagtgtgtccatgca

SEQ ID NO: 557343 - DNA, 15 bp, Homo sapiens
agtgtgtccatgcat

SEQ ID NO: 557344 - DNA, 15 bp, Homo sapiens
gtgtgtccatgcatg

SEQ ID NO: 557345 - DNA, 15 bp, Homo sapiens
tgtgtccatgcatgg

SEQ ID NO: 557346 - DNA, 15 bp, Homo sapiens
gtgtccatgcatggg

SEQ ID NO: 557347 - DNA, 15 bp, Homo sapiens
tgtccatgcatggga

SEQ ID NO: 557348 - DNA, 15 bp, Homo sapiens
gtccatgcatgggag

SEQ ID NO: 557349 - DNA, 15 bp, Homo sapiens
tccatgcatgggagt

SEQ ID NO: 557350 - DNA, 15 bp, Homo sapiens
ccatgcatgggagta

SEQ ID NO: 557351 - DNA, 15 bp, Homo sapiens
catgcatgggagtaa

SEQ ID NO: 557352 - DNA, 15 bp, Homo sapiens
atgcatgggagtaag

SEQ ID NO: 557353 - DNA, 15 bp, Homo sapiens
tgcatgggagtaagc

SEQ ID NO: 557354 - DNA, 15 bp, Homo sapiens
gcatgggagtaagca

SEQ ID NO: 557355 - DNA, 15 bp, Homo sapiens
catgggagtaagcat

SEQ ID NO: 557356 - DNA, 15 bp, Homo sapiens
atgggagtaagcata

SEQ ID NO: 557357 - DNA, 15 bp, Homo sapiens
tgggagtaagcatat

SEQ ID NO: 557358 - DNA, 15 bp, Homo sapiens
gggagtaagcatatg

SEQ ID NO: 557359 - DNA, 15 bp, Homo sapiens
ggagtaagcatatgt

SEQ ID NO: 557360 - DNA, 15 bp, Homo sapiens
gagtaagcatatgtg

SEQ ID NO: 557361 - DNA, 15 bp, Homo sapiens
agtaagcatatgtgt

SEQ ID NO: 557362 - DNA, 15 bp, Homo sapiens
gtaagcatatgtgtg

SEQ ID NO: 557363 - DNA, 15 bp, Homo sapiens
taagcatatgtgtgc

SEQ ID NO: 557364 - DNA, 15 bp, Homo sapiens
aagcatatgtgtgca

SEQ ID NO: 557365 - DNA, 15 bp, Homo sapiens
agcatatgtgtgcac

SEQ ID NO: 557366 - DNA, 15 bp, Homo sapiens
gcatatgtgtgcacg

SEQ ID NO: 557367 - DNA, 15 bp, Homo sapiens
catatgtgtgcacgt

SEQ ID NO: 557368 - DNA, 15 bp, Homo sapiens
atatgtgtgcacgtg

SEQ ID NO: 557369 - DNA, 15 bp, Homo sapiens
tatgtgtgcacgtgt

SEQ ID NO: 557370 - DNA, 15 bp, Homo sapiens
atgtgtgcacgtgtt

SEQ ID NO: 557371 - DNA, 15 bp, Homo sapiens
tgtgtgcacgtgttc

SEQ ID NO: 557372 - DNA, 15 bp, Homo sapiens
gtgtgcacgtgttct

SEQ ID NO: 557373 - DNA, 15 bp, Homo sapiens
tgtgcacgtgttctc

SEQ ID NO: 557374 - DNA, 15 bp, Homo sapiens
gtgcacgtgttctct

SEQ ID NO: 557375 - DNA, 15 bp, Homo sapiens
tgcacgtgttctctg

SEQ ID NO: 557376 - DNA, 15 bp, Homo sapiens
gcacgtgttctctgt

SEQ ID NO: 557377 - DNA, 15 bp, Homo sapiens
cacgtgttctctgtt

SEQ ID NO: 557378 - DNA, 15 bp, Homo sapiens
acgtgttctctgttg

SEQ ID NO: 557379 - DNA, 15 bp, Homo sapiens
cgtgttctctgttga

SEQ ID NO: 557380 - DNA, 15 bp, Homo sapiens
gtgttctctgttgaa

SEQ ID NO: 557381 - DNA, 15 bp, Homo sapiens
tgttctctgttgaag

SEQ ID NO: 557382 - DNA, 15 bp, Homo sapiens
gttctctgttgaagt

SEQ ID NO: 557383 - DNA, 15 bp, Homo sapiens
ttctctgttgaagta

SEQ ID NO: 557384 - DNA, 15 bp, Homo sapiens
tctctgttgaagtat

SEQ ID NO: 557385 - DNA, 15 bp, Homo sapiens
ctctgttgaagtatg

SEQ ID NO: 557386 - DNA, 15 bp, Homo sapiens
tctgttgaagtatgt

SEQ ID NO: 557387 - DNA, 15 bp, Homo sapiens
ctgttgaagtatgtg

SEQ ID NO: 557388 - DNA, 15 bp, Homo sapiens
tgttgaagtatgtgc

SEQ ID NO: 557389 - DNA, 15 bp, Homo sapiens
gttgaagtatgtgca

SEQ ID NO: 557390 - DNA, 15 bp, Homo sapiens
ttgaagtatgtgcat

SEQ ID NO: 557391 - DNA, 15 bp, Homo sapiens
tgaagtatgtgcatg

SEQ ID NO: 557392 - DNA, 15 bp, Homo sapiens
gaagtatgtgcatgc

SEQ ID NO: 557393 - DNA, 15 bp, Homo sapiens
aagtatgtgcatgca

SEQ ID NO: 557394 - DNA, 15 bp, Homo sapiens
agtatgtgcatgcat

SEQ ID NO: 557395 - DNA, 15 bp, Homo sapiens
gtatgtgcatgcatg

SEQ ID NO: 557396 - DNA, 15 bp, Homo sapiens
tatgtgcatgcatgt

SEQ ID NO: 557397 - DNA, 15 bp, Homo sapiens
atgtgcatgcatgtg

SEQ ID NO: 557398 - DNA, 15 bp, Homo sapiens
tgtgcatgcatgtgg

SEQ ID NO: 557399 - DNA, 15 bp, Homo sapiens
gtgcatgcatgtggg

SEQ ID NO: 557400 - DNA, 15 bp, Homo sapiens
tgcatgcatgtgggt

SEQ ID NO: 557401 - DNA, 15 bp, Homo sapiens
gcatgcatgtgggta

SEQ ID NO: 557402 - DNA, 15 bp, Homo sapiens
catgcatgtgggtaa

SEQ ID NO: 557403 - DNA, 15 bp, Homo sapiens
atgcatgtgggtaaa

SEQ ID NO: 557404 - DNA, 15 bp, Homo sapiens
tgcatgtgggtaaag

SEQ ID NO: 557405 - DNA, 15 bp, Homo sapiens
gcatgtgggtaaagt

SEQ ID NO: 557406 - DNA, 15 bp, Homo sapiens
catgtgggtaaagta

SEQ ID NO: 557407 - DNA, 15 bp, Homo sapiens
atgtgggtaaagtat

SEQ ID NO: 557408 - DNA, 15 bp, Homo sapiens
tgtgggtaaagtatt

SEQ ID NO: 557409 - DNA, 15 bp, Homo sapiens
gtgggtaaagtattg

SEQ ID NO: 557410 - DNA, 15 bp, Homo sapiens
tgggtaaagtattgt

SEQ ID NO: 557411 - DNA, 15 bp, Homo sapiens
gggtaaagtattgtg

SEQ ID NO: 557412 - DNA, 15 bp, Homo sapiens
ggtaaagtattgtgc

SEQ ID NO: 557413 - DNA, 15 bp, Homo sapiens
gtaaagtattgtgca

SEQ ID NO: 557414 - DNA, 15 bp, Homo sapiens
taaagtattgtgcac

SEQ ID NO: 557415 - DNA, 15 bp, Homo sapiens
aaagtattgtgcaca

SEQ ID NO: 557416 - DNA, 15 bp, Homo sapiens
aagtattgtgcacat

SEQ ID NO: 557417 - DNA, 15 bp, Homo sapiens
agtattgtgcacatg

SEQ ID NO: 557418 - DNA, 15 bp, Homo sapiens
gtattgtgcacatgt

SEQ ID NO: 557419 - DNA, 15 bp, Homo sapiens
tattgtgcacatgtg

SEQ ID NO: 557420 - DNA, 15 bp, Homo sapiens
attgtgcacatgtgt

SEQ ID NO: 557421 - DNA, 15 bp, Homo sapiens
ttgtgcacatgtgtt

SEQ ID NO: 557422 - DNA, 15 bp, Homo sapiens
tgtgcacatgtgttc

SEQ ID NO: 557423 - DNA, 15 bp, Homo sapiens
gtgcacatgtgttct

SEQ ID NO: 557424 - DNA, 15 bp, Homo sapiens
tgcacatgtgttctg

SEQ ID NO: 557425 - DNA, 15 bp, Homo sapiens
gcacatgtgttctgt

SEQ ID NO: 557426 - DNA, 15 bp, Homo sapiens
cacatgtgttctgtg

SEQ ID NO: 557427 - DNA, 15 bp, Homo sapiens
acatgtgttctgtgt

SEQ ID NO: 557428 - DNA, 15 bp, Homo sapiens
catgtgttctgtgtt

SEQ ID NO: 557429 - DNA, 15 bp, Homo sapiens
atgtgttctgtgttg

SEQ ID NO: 557430 - DNA, 15 bp, Homo sapiens
tgtgttctgtgttgg

SEQ ID NO: 557431 - DNA, 15 bp, Homo sapiens
gtgttctgtgttgga

SEQ ID NO: 557432 - DNA, 15 bp, Homo sapiens
tgttctgtgttggag

SEQ ID NO: 557433 - DNA, 15 bp, Homo sapiens
gttctgtgttggagt

SEQ ID NO: 557434 - DNA, 15 bp, Homo sapiens
ttctgtgttggagtg

SEQ ID NO: 557435 - DNA, 15 bp, Homo sapiens
tctgtgttggagtgt

SEQ ID NO: 557436 - DNA, 15 bp, Homo sapiens
ctgtgttggagtgtg

SEQ ID NO: 557437 - DNA, 15 bp, Homo sapiens
tgtgttggagtgtgt

SEQ ID NO: 557438 - DNA, 15 bp, Homo sapiens
gtgttggagtgtgtg

SEQ ID NO: 557439 - DNA, 15 bp, Homo sapiens
tgttggagtgtgtgt

SEQ ID NO: 557440 - DNA, 15 bp, Homo sapiens
gttggagtgtgtgtg

SEQ ID NO: 557441 - DNA, 15 bp, Homo sapiens
ttggagtgtgtgtgc

SEQ ID NO: 557442 - DNA, 15 bp, Homo sapiens
tggagtgtgtgtgca

SEQ ID NO: 557443 - DNA, 15 bp, Homo sapiens
ggagtgtgtgtgcac

SEQ ID NO: 557444 - DNA, 15 bp, Homo sapiens
gagtgtgtgtgcaca

SEQ ID NO: 557445 - DNA, 15 bp, Homo sapiens
agtgtgtgtgcacat

SEQ ID NO: 557446 - DNA, 15 bp, Homo sapiens
gtgtgtgtgcacatg

SEQ ID NO: 557447 - DNA, 15 bp, Homo sapiens
tgtgtgtgcacatgt

SEQ ID NO: 557448 - DNA, 15 bp, Homo sapiens
gtgtgtgcacatgtg

SEQ ID NO: 557449 - DNA, 15 bp, Homo sapiens
tgtgtgcacatgtgc

SEQ ID NO: 557450 - DNA, 15 bp, Homo sapiens
gtgtgcacatgtgca

SEQ ID NO: 557451 - DNA, 15 bp, Homo sapiens
tgtgcacatgtgcat

SEQ ID NO: 557452 - DNA, 15 bp, Homo sapiens
gtgcacatgtgcatg

SEQ ID NO: 557453 - DNA, 15 bp, Homo sapiens
tgcacatgtgcatgc

SEQ ID NO: 557454 - DNA, 15 bp, Homo sapiens
gcacatgtgcatgca

SEQ ID NO: 557455 - DNA, 15 bp, Homo sapiens
cacatgtgcatgcat

SEQ ID NO: 557456 - DNA, 15 bp, Homo sapiens
acatgtgcatgcatg

SEQ ID NO: 557457 - DNA, 15 bp, Homo sapiens
catgtgcatgcatgt

SEQ ID NO: 557458 - DNA, 15 bp, Homo sapiens
tgtgcatgcatgtgt

SEQ ID NO: 557459 - DNA, 15 bp, Homo sapiens
gtgcatgcatgtgtg

SEQ ID NO: 557460 - DNA, 15 bp, Homo sapiens
tgcatgcatgtgtgt

SEQ ID NO: 557461 - DNA, 15 bp, Homo sapiens
gcatgcatgtgtgtg

SEQ ID NO: 557462 - DNA, 15 bp, Homo sapiens
catgcatgtgtgtga

SEQ ID NO: 557463 - DNA, 15 bp, Homo sapiens
atgcatgtgtgtgag

SEQ ID NO: 557464 - DNA, 15 bp, Homo sapiens
tgcatgtgtgtgagt

SEQ ID NO: 557465 - DNA, 15 bp, Homo sapiens
gcatgtgtgtgagtg

SEQ ID NO: 557466 - DNA, 15 bp, Homo sapiens
catgtgtgtgagtgt

SEQ ID NO: 557467 - DNA, 15 bp, Homo sapiens
atgtgtgtgagtgtg

SEQ ID NO: 557468 - DNA, 15 bp, Homo sapiens
tgtgtgtgagtgtgt

SEQ ID NO: 557469 - DNA, 15 bp, Homo sapiens
gtgtgtgagtgtgtg

SEQ ID NO: 557470 - DNA, 15 bp, Homo sapiens
tgtgtgagtgtgtgc

SEQ ID NO: 557471 - DNA, 15 bp, Homo sapiens
gtgtgagtgtgtgcc

SEQ ID NO: 557472 - DNA, 15 bp, Homo sapiens
tgtgagtgtgtgcct

SEQ ID NO: 557473 - DNA, 15 bp, Homo sapiens
gtgagtgtgtgcctg

SEQ ID NO: 557474 - DNA, 15 bp, Homo sapiens
tgagtgtgtgcctgc

SEQ ID NO: 557475 - DNA, 15 bp, Homo sapiens
gagtgtgtgcctgca

SEQ ID NO: 557476 - DNA, 15 bp, Homo sapiens
agtgtgtgcctgcag

SEQ ID NO: 557477 - DNA, 15 bp, Homo sapiens
gtgtgtgcctgcagt

SEQ ID NO: 557478 - DNA, 15 bp, Homo sapiens
tgtgtgcctgcagtt

SEQ ID NO: 557479 - DNA, 15 bp, Homo sapiens
gtgtgcctgcagtta

SEQ ID NO: 557480 - DNA, 15 bp, Homo sapiens
tgtgcctgcagttag

SEQ ID NO: 557481 - DNA, 15 bp, Homo sapiens
gtgcctgcagttagc

SEQ ID NO: 557482 - DNA, 15 bp, Homo sapiens
tgcctgcagttagcc

SEQ ID NO: 557483 - DNA, 15 bp, Homo sapiens
gcctgcagttagccc

SEQ ID NO: 557484 - DNA, 15 bp, Homo sapiens
cctgcagttagcccc

SEQ ID NO: 557485 - DNA, 15 bp, Homo sapiens
ctgcagttagcccca

SEQ ID NO: 557486 - DNA, 15 bp, Homo sapiens
tgcagttagccccag

SEQ ID NO: 557487 - DNA, 15 bp, Homo sapiens
gcagttagccccagg

SEQ ID NO: 557488 - DNA, 15 bp, Homo sapiens
cagttagccccaggg

SEQ ID NO: 557489 - DNA, 15 bp, Homo sapiens
agttagccccagggc

SEQ ID NO: 557490 - DNA, 15 bp, Homo sapiens
gttagccccagggcg

SEQ ID NO: 557491 - DNA, 15 bp, Homo sapiens
ttagccccagggcgg

SEQ ID NO: 557492 - DNA, 15 bp, Homo sapiens
tagccccagggcggg

SEQ ID NO: 557493 - DNA, 15 bp, Homo sapiens
agccccagggcgggt

SEQ ID NO: 557494 - DNA, 15 bp, Homo sapiens
gccccagggcgggtg

SEQ ID NO: 557495 - DNA, 15 bp, Homo sapiens
ccccagggcgggtga

SEQ ID NO: 557496 - DNA, 15 bp, Homo sapiens
cccagggcgggtgag

SEQ ID NO: 557497 - DNA, 15 bp, Homo sapiens
ccagggcgggtgagg

SEQ ID NO: 557498 - DNA, 15 bp, Homo sapiens
cagggcgggtgaggg

SEQ ID NO: 557499 - DNA, 15 bp, Homo sapiens
agggcgggtgagggg

SEQ ID NO: 557500 - DNA, 15 bp, Homo sapiens
gggcgggtgagggga

SEQ ID NO: 557501 - DNA, 15 bp, Homo sapiens
ggcgggtgaggggac

SEQ ID NO: 557502 - DNA, 15 bp, Homo sapiens
gcgggtgaggggacc

SEQ ID NO: 557503 - DNA, 15 bp, Homo sapiens
cgggtgaggggaccc

SEQ ID NO: 557504 - DNA, 15 bp, Homo sapiens
gggtgaggggaccca

SEQ ID NO: 557505 - DNA, 15 bp, Homo sapiens
ggtgaggggacccag

SEQ ID NO: 557506 - DNA, 15 bp, Homo sapiens
gtgaggggacccagt

SEQ ID NO: 557507 - DNA, 15 bp, Homo sapiens
tgaggggacccagtg

SEQ ID NO: 557508 - DNA, 15 bp, Homo sapiens
gaggggacccagtgc

SEQ ID NO: 557509 - DNA, 15 bp, Homo sapiens
aggggacccagtgca

SEQ ID NO: 557510 - DNA, 15 bp, Homo sapiens
ggggacccagtgcac

SEQ ID NO: 557511 - DNA, 15 bp, Homo sapiens
gggacccagtgcact

SEQ ID NO: 557512 - DNA, 15 bp, Homo sapiens
ggacccagtgcactc

SEQ ID NO: 557513 - DNA, 15 bp, Homo sapiens
gacccagtgcactcg

SEQ ID NO: 557514 - DNA, 15 bp, Homo sapiens
acccagtgcactcgg

SEQ ID NO: 557515 - DNA, 15 bp, Homo sapiens
cccagtgcactcggg

SEQ ID NO: 557516 - DNA, 15 bp, Homo sapiens
ccagtgcactcgggc

SEQ ID NO: 557517 - DNA, 15 bp, Homo sapiens
cagtgcactcgggcc

SEQ ID NO: 557518 - DNA, 15 bp, Homo sapiens
agtgcactcgggcca

SEQ ID NO: 557519 - DNA, 15 bp, Homo sapiens
gtgcactcgggccag

SEQ ID NO: 557520 - DNA, 15 bp, Homo sapiens
tgcactcgggccaga

SEQ ID NO: 557521 - DNA, 15 bp, Homo sapiens
gcactcgggccagag

SEQ ID NO: 557522 - DNA, 15 bp, Homo sapiens
cactcgggccagagc

SEQ ID NO: 557523 - DNA, 15 bp, Homo sapiens
actcgggccagagct

SEQ ID NO: 557524 - DNA, 15 bp, Homo sapiens
ctcgggccagagctc

SEQ ID NO: 557525 - DNA, 15 bp, Homo sapiens
tcgggccagagctca

SEQ ID NO: 557526 - DNA, 15 bp, Homo sapiens
cgggccagagctcag

SEQ ID NO: 557527 - DNA, 15 bp, Homo sapiens
gggccagagctcagc

SEQ ID NO: 557528 - DNA, 15 bp, Homo sapiens
ggccagagctcagct

SEQ ID NO: 557529 - DNA, 15 bp, Homo sapiens
gccagagctcagctc

SEQ ID NO: 557530 - DNA, 15 bp, Homo sapiens
ccagagctcagctca

SEQ ID NO: 557531 - DNA, 15 bp, Homo sapiens
cagagctcagctcag

SEQ ID NO: 557532 - DNA, 15 bp, Homo sapiens
agagctcagctcaga

SEQ ID NO: 557533 - DNA, 15 bp, Homo sapiens
gagctcagctcagat

SEQ ID NO: 557534 - DNA, 15 bp, Homo sapiens
agctcagctcagatg

SEQ ID NO: 557535 - DNA, 15 bp, Homo sapiens
gctcagctcagatgc

SEQ ID NO: 557536 - DNA, 15 bp, Homo sapiens
ctcagctcagatgca

SEQ ID NO: 557537 - DNA, 15 bp, Homo sapiens
tcagctcagatgcag

SEQ ID NO: 557538 - DNA, 15 bp, Homo sapiens
cagctcagatgcagg

SEQ ID NO: 557539 - DNA, 15 bp, Homo sapiens
agctcagatgcaggc

SEQ ID NO: 557540 - DNA, 15 bp, Homo sapiens
gctcagatgcaggca

SEQ ID NO: 557541 - DNA, 15 bp, Homo sapiens
ctcagatgcaggcac

SEQ ID NO: 557542 - DNA, 15 bp, Homo sapiens
tcagatgcaggcacc

SEQ ID NO: 557543 - DNA, 15 bp, Homo sapiens
cagatgcaggcacca

SEQ ID NO: 557544 - DNA, 15 bp, Homo sapiens
agatgcaggcaccag

SEQ ID NO: 557545 - DNA, 15 bp, Homo sapiens
gatgcaggcaccagg

SEQ ID NO: 557546 - DNA, 15 bp, Homo sapiens
atgcaggcaccaggg

SEQ ID NO: 557547 - DNA, 15 bp, Homo sapiens
tgcaggcaccagggt

SEQ ID NO: 557548 - DNA, 15 bp, Homo sapiens
gcaggcaccagggtc

SEQ ID NO: 557549 - DNA, 15 bp, Homo sapiens
caggcaccagggtct

SEQ ID NO: 557550 - DNA, 15 bp, Homo sapiens
aggcaccagggtctg

SEQ ID NO: 557551 - DNA, 15 bp, Homo sapiens
ggcaccagggtctga

SEQ ID NO: 557552 - DNA, 15 bp, Homo sapiens
gcaccagggtctgac

SEQ ID NO: 557553 - DNA, 15 bp, Homo sapiens
caccagggtctgact

SEQ ID NO: 557554 - DNA, 15 bp, Homo sapiens
accagggtctgactg

SEQ ID NO: 557555 - DNA, 15 bp, Homo sapiens
ccagggtctgactgg

SEQ ID NO: 557556 - DNA, 15 bp, Homo sapiens
cagggtctgactggg

SEQ ID NO: 557557 - DNA, 15 bp, Homo sapiens
agggtctgactggga

SEQ ID NO: 557558 - DNA, 15 bp, Homo sapiens
gggtctgactgggac

SEQ ID NO: 557559 - DNA, 15 bp, Homo sapiens
ggtctgactgggact

SEQ ID NO: 557560 - DNA, 15 bp, Homo sapiens
gtctgactgggactg

SEQ ID NO: 557561 - DNA, 15 bp, Homo sapiens
tctgactgggactgc

SEQ ID NO: 557562 - DNA, 15 bp, Homo sapiens
ctgactgggactgct

SEQ ID NO: 557563 - DNA, 15 bp, Homo sapiens
tgactgggactgctt

SEQ ID NO: 557564 - DNA, 15 bp, Homo sapiens
gactgggactgcttc

SEQ ID NO: 557565 - DNA, 15 bp, Homo sapiens
actgggactgcttca

SEQ ID NO: 557566 - DNA, 15 bp, Homo sapiens
ctgggactgcttcat

SEQ ID NO: 557567 - DNA, 15 bp, Homo sapiens
tgggactgcttcatc

SEQ ID NO: 557568 - DNA, 15 bp, Homo sapiens
gggactgcttcatct

SEQ ID NO: 557569 - DNA, 15 bp, Homo sapiens
ggactgcttcatctc

SEQ ID NO: 557570 - DNA, 15 bp, Homo sapiens
gactgcttcatctca

SEQ ID NO: 557571 - DNA, 15 bp, Homo sapiens
actgcttcatctcag

SEQ ID NO: 557572 - DNA, 15 bp, Homo sapiens
ctgcttcatctcagg

SEQ ID NO: 557573 - DNA, 15 bp, Homo sapiens
tgcttcatctcaggc

SEQ ID NO: 557574 - DNA, 15 bp, Homo sapiens
gcttcatctcaggcc

SEQ ID NO: 557575 - DNA, 15 bp, Homo sapiens
cttcatctcaggcca

SEQ ID NO: 557576 - DNA, 15 bp, Homo sapiens
ttcatctcaggccag

SEQ ID NO: 557577 - DNA, 15 bp, Homo sapiens
tcatctcaggccagg

SEQ ID NO: 557578 - DNA, 15 bp, Homo sapiens
catctcaggccaggt

SEQ ID NO: 557579 - DNA, 15 bp, Homo sapiens
atctcaggccaggtc

SEQ ID NO: 557580 - DNA, 15 bp, Homo sapiens
tctcaggccaggtcc

SEQ ID NO: 557581 - DNA, 15 bp, Homo sapiens
ctcaggccaggtcct

SEQ ID NO: 557582 - DNA, 15 bp, Homo sapiens
tcaggccaggtcctt

SEQ ID NO: 557583 - DNA, 15 bp, Homo sapiens
caggccaggtccttc

SEQ ID NO: 557584 - DNA, 15 bp, Homo sapiens
aggccaggtccttcc

SEQ ID NO: 557585 - DNA, 15 bp, Homo sapiens
ggccaggtccttccg

SEQ ID NO: 557586 - DNA, 15 bp, Homo sapiens
gccaggtccttccgc

SEQ ID NO: 557587 - DNA, 15 bp, Homo sapiens
ccaggtccttccgca

SEQ ID NO: 557588 - DNA, 15 bp, Homo sapiens
caggtccttccgcag

SEQ ID NO: 557589 - DNA, 15 bp, Homo sapiens
aggtccttccgcagc

SEQ ID NO: 557590 - DNA, 15 bp, Homo sapiens
ggtccttccgcagca

SEQ ID NO: 557591 - DNA, 15 bp, Homo sapiens
gtccttccgcagcag

SEQ ID NO: 557592 - DNA, 15 bp, Homo sapiens
tccttccgcagcaga

SEQ ID NO: 557593 - DNA, 15 bp, Homo sapiens
ccttccgcagcagaa

SEQ ID NO: 557594 - DNA, 15 bp, Homo sapiens
cttccgcagcagaag

SEQ ID NO: 557595 - DNA, 15 bp, Homo sapiens
ttccgcagcagaagc

SEQ ID NO: 557596 - DNA, 15 bp, Homo sapiens
tccgcagcagaagcc

SEQ ID NO: 557597 - DNA, 15 bp, Homo sapiens
ccgcagcagaagcca

SEQ ID NO: 557598 - DNA, 15 bp, Homo sapiens
cgcagcagaagccaa

SEQ ID NO: 557599 - DNA, 15 bp, Homo sapiens
gcagcagaagccaaa

SEQ ID NO: 557600 - DNA, 15 bp, Homo sapiens
cagcagaagccaaag

SEQ ID NO: 557601 - DNA, 15 bp, Homo sapiens
agcagaagccaaagg

SEQ ID NO: 557602 - DNA, 15 bp, Homo sapiens
gcagaagccaaaggg

SEQ ID NO: 557603 - DNA, 15 bp, Homo sapiens
cagaagccaaagggc

SEQ ID NO: 557604 - DNA, 15 bp, Homo sapiens
agaagccaaagggcc

SEQ ID NO: 557605 - DNA, 15 bp, Homo sapiens
gaagccaaagggcca

SEQ ID NO: 557606 - DNA, 15 bp, Homo sapiens
aagccaaagggccaa

SEQ ID NO: 557607 - DNA, 15 bp, Homo sapiens
agccaaagggccaaa

SEQ ID NO: 557608 - DNA, 15 bp, Homo sapiens
gccaaagggccaaac

SEQ ID NO: 557609 - DNA, 15 bp, Homo sapiens
ccaaagggccaaacg

SEQ ID NO: 557610 - DNA, 15 bp, Homo sapiens
caaagggccaaacgc

SEQ ID NO: 557611 - DNA, 15 bp, Homo sapiens
aaagggccaaacgct

SEQ ID NO: 557612 - DNA, 15 bp, Homo sapiens
aagggccaaacgctg

SEQ ID NO: 557613 - DNA, 15 bp, Homo sapiens
agggccaaacgctgg

SEQ ID NO: 557614 - DNA, 15 bp, Homo sapiens
gggccaaacgctggt

SEQ ID NO: 557615 - DNA, 15 bp, Homo sapiens
ggccaaacgctggtg

SEQ ID NO: 557616 - DNA, 15 bp, Homo sapiens
gccaaacgctggtga

SEQ ID NO: 557617 - DNA, 15 bp, Homo sapiens
ccaaacgctggtgaa

SEQ ID NO: 557618 - DNA, 15 bp, Homo sapiens
caaacgctggtgaaa

SEQ ID NO: 557619 - DNA, 15 bp, Homo sapiens
aaacgctggtgaaaa

SEQ ID NO: 557620 - DNA, 15 bp, Homo sapiens
aacgctggtgaaaag

SEQ ID NO: 557621 - DNA, 15 bp, Homo sapiens
acgctggtgaaaagt

SEQ ID NO: 557622 - DNA, 15 bp, Homo sapiens
cgctggtgaaaagtc

SEQ ID NO: 557623 - DNA, 15 bp, Homo sapiens
gctggtgaaaagtcc

SEQ ID NO: 557624 - DNA, 15 bp, Homo sapiens
ctggtgaaaagtcct

SEQ ID NO: 557625 - DNA, 15 bp, Homo sapiens
tggtgaaaagtcctg

SEQ ID NO: 557626 - DNA, 15 bp, Homo sapiens
ggtgaaaagtcctga

SEQ ID NO: 557627 - DNA, 15 bp, Homo sapiens
gtgaaaagtcctgat

SEQ ID NO: 557628 - DNA, 15 bp, Homo sapiens
tgaaaagtcctgatg

SEQ ID NO: 557629 - DNA, 15 bp, Homo sapiens
gaaaagtcctgatgt

SEQ ID NO: 557630 - DNA, 15 bp, Homo sapiens
aaaagtcctgatgtg

SEQ ID NO: 557631 - DNA, 15 bp, Homo sapiens
aaagtcctgatgtgc

SEQ ID NO: 557632 - DNA, 15 bp, Homo sapiens
aagtcctgatgtgct

SEQ ID NO: 557633 - DNA, 15 bp, Homo sapiens
agtcctgatgtgcta

SEQ ID NO: 557634 - DNA, 15 bp, Homo sapiens
gtcctgatgtgctac

SEQ ID NO: 557635 - DNA, 15 bp, Homo sapiens
tcctgatgtgctact

SEQ ID NO: 557636 - DNA, 15 bp, Homo sapiens
cctgatgtgctactg

SEQ ID NO: 557637 - DNA, 15 bp, Homo sapiens
ctgatgtgctactgc

SEQ ID NO: 557638 - DNA, 15 bp, Homo sapiens
tgatgtgctactgcc

SEQ ID NO: 557639 - DNA, 15 bp, Homo sapiens
gatgtgctactgcct

SEQ ID NO: 557640 - DNA, 15 bp, Homo sapiens
atgtgctactgcctc

SEQ ID NO: 557641 - DNA, 15 bp, Homo sapiens
tgtgctactgcctcc

SEQ ID NO: 557642 - DNA, 15 bp, Homo sapiens
gtgctactgcctccc

SEQ ID NO: 557643 - DNA, 15 bp, Homo sapiens
tgctactgcctcccc

SEQ ID NO: 557644 - DNA, 15 bp, Homo sapiens
gctactgcctcccct

SEQ ID NO: 557645 - DNA, 15 bp, Homo sapiens
ctactgcctcccctc

SEQ ID NO: 557646 - DNA, 15 bp, Homo sapiens
tactgcctcccctcc

SEQ ID NO: 557647 - DNA, 15 bp, Homo sapiens
actgcctcccctccc

SEQ ID NO: 557648 - DNA, 15 bp, Homo sapiens
ctgcctcccctcccc

SEQ ID NO: 557649 - DNA, 15 bp, Homo sapiens
tgcctcccctcccct

SEQ ID NO: 557650 - DNA, 15 bp, Homo sapiens
gcctcccctcccctc

SEQ ID NO: 557651 - DNA, 15 bp, Homo sapiens
cctcccctcccctcc

SEQ ID NO: 557652 - DNA, 15 bp, Homo sapiens
ctcccctcccctccc

SEQ ID NO: 557653 - DNA, 15 bp, Homo sapiens
tcccctcccctcccc

SEQ ID NO: 557654 - DNA, 15 bp, Homo sapiens
cccctcccctcccct

SEQ ID NO: 557655 - DNA, 15 bp, Homo sapiens
ccctcccctcccctg

SEQ ID NO: 557656 - DNA, 15 bp, Homo sapiens
cctcccctcccctgc

SEQ ID NO: 557657 - DNA, 15 bp, Homo sapiens
ctcccctcccctgcc

SEQ ID NO: 557658 - DNA, 15 bp, Homo sapiens
tcccctcccctgcca

SEQ ID NO: 557659 - DNA, 15 bp, Homo sapiens
cccctcccctgccat

SEQ ID NO: 557660 - DNA, 15 bp, Homo sapiens
ccctcccctgccatg

SEQ ID NO: 557661 - DNA, 15 bp, Homo sapiens
cctcccctgccatgg

SEQ ID NO: 557662 - DNA, 15 bp, Homo sapiens
ctcccctgccatggg

SEQ ID NO: 557663 - DNA, 15 bp, Homo sapiens
tcccctgccatgggg

SEQ ID NO: 557664 - DNA, 15 bp, Homo sapiens
cccctgccatgggga

SEQ ID NO: 557665 - DNA, 15 bp, Homo sapiens
ccctgccatggggac

SEQ ID NO: 557666 - DNA, 15 bp, Homo sapiens
cctgccatggggacg

SEQ ID NO: 557667 - DNA, 15 bp, Homo sapiens
ctgccatggggacgt

SEQ ID NO: 557668 - DNA, 15 bp, Homo sapiens
tgccatggggacgtt

SEQ ID NO: 557669 - DNA, 15 bp, Homo sapiens
gccatggggacgtta

SEQ ID NO: 557670 - DNA, 15 bp, Homo sapiens
ccatggggacgttaa

SEQ ID NO: 557671 - DNA, 15 bp, Homo sapiens
catggggacgttaaa

SEQ ID NO: 557672 - DNA, 15 bp, Homo sapiens
atggggacgttaaac

SEQ ID NO: 557673 - DNA, 15 bp, Homo sapiens
tggggacgttaaacc

SEQ ID NO: 557674 - DNA, 15 bp, Homo sapiens
ggggacgttaaacct

SEQ ID NO: 557675 - DNA, 15 bp, Homo sapiens
gggacgttaaacctt

SEQ ID NO: 557676 - DNA, 15 bp, Homo sapiens
ggacgttaaaccttc

SEQ ID NO: 557677 - DNA, 15 bp, Homo sapiens
gacgttaaaccttca

SEQ ID NO: 557678 - DNA, 15 bp, Homo sapiens
acgttaaaccttcag

SEQ ID NO: 557679 - DNA, 15 bp, Homo sapiens
cgttaaaccttcagc

SEQ ID NO: 557680 - DNA, 15 bp, Homo sapiens
gttaaaccttcagca

SEQ ID NO: 557681 - DNA, 15 bp, Homo sapiens
ttaaaccttcagcaa

SEQ ID NO: 557682 - DNA, 15 bp, Homo sapiens
taaaccttcagcaat

SEQ ID NO: 557683 - DNA, 15 bp, Homo sapiens
aaaccttcagcaatc

SEQ ID NO: 557684 - DNA, 15 bp, Homo sapiens
aaccttcagcaatct

SEQ ID NO: 557685 - DNA, 15 bp, Homo sapiens
accttcagcaatctg

SEQ ID NO: 557686 - DNA, 15 bp, Homo sapiens
ccttcagcaatctgg

SEQ ID NO: 557687 - DNA, 15 bp, Homo sapiens
cttcagcaatctggg

SEQ ID NO: 557688 - DNA, 15 bp, Homo sapiens
ttcagcaatctggga

SEQ ID NO: 557689 - DNA, 15 bp, Homo sapiens
tcagcaatctgggac

SEQ ID NO: 557690 - DNA, 15 bp, Homo sapiens
cagcaatctgggact

SEQ ID NO: 557691 - DNA, 15 bp, Homo sapiens
agcaatctgggactc

SEQ ID NO: 557692 - DNA, 15 bp, Homo sapiens
gcaatctgggactct

SEQ ID NO: 557693 - DNA, 15 bp, Homo sapiens
caatctgggactctg

SEQ ID NO: 557694 - DNA, 15 bp, Homo sapiens
aatctgggactctga

SEQ ID NO: 557695 - DNA, 15 bp, Homo sapiens
atctgggactctgac

SEQ ID NO: 557696 - DNA, 15 bp, Homo sapiens
tctgggactctgacg

SEQ ID NO: 557697 - DNA, 15 bp, Homo sapiens
ctgggactctgacgg

SEQ ID NO: 557698 - DNA, 15 bp, Homo sapiens
tgggactctgacggc

SEQ ID NO: 557699 - DNA, 15 bp, Homo sapiens
gggactctgacggct

SEQ ID NO: 557700 - DNA, 15 bp, Homo sapiens
ggactctgacggctg

SEQ ID NO: 557701 - DNA, 15 bp, Homo sapiens
gactctgacggctgg

SEQ ID NO: 557702 - DNA, 15 bp, Homo sapiens
actctgacggctggt

SEQ ID NO: 557703 - DNA, 15 bp, Homo sapiens
ctctgacggctggtt

SEQ ID NO: 557704 - DNA, 15 bp, Homo sapiens
tctgacggctggttt

SEQ ID NO: 557705 - DNA, 15 bp, Homo sapiens
ctgacggctggtttt

SEQ ID NO: 557706 - DNA, 15 bp, Homo sapiens
tgacggctggttttt

SEQ ID NO: 557707 - DNA, 15 bp, Homo sapiens
gacggctggtttttg

SEQ ID NO: 557708 - DNA, 15 bp, Homo sapiens
acggctggtttttgg

SEQ ID NO: 557709 - DNA, 15 bp, Homo sapiens
cggctggtttttggt

SEQ ID NO: 557710 - DNA, 15 bp, Homo sapiens
ggctggtttttggtt

SEQ ID NO: 557711 - DNA, 15 bp, Homo sapiens
gctggtttttggttc

SEQ ID NO: 557712 - DNA, 15 bp, Homo sapiens
ctggtttttggttct

SEQ ID NO: 557713 - DNA, 15 bp, Homo sapiens
tggtttttggttctc

SEQ ID NO: 557714 - DNA, 15 bp, Homo sapiens
ggtttttggttctct

SEQ ID NO: 557715 - DNA, 15 bp, Homo sapiens
gtttttggttctctg

SEQ ID NO: 557716 - DNA, 15 bp, Homo sapiens
tttttggttctctgc

SEQ ID NO: 557717 - DNA, 15 bp, Homo sapiens
ttttggttctctgcc

SEQ ID NO: 557718 - DNA, 15 bp, Homo sapiens
tttggttctctgcct

SEQ ID NO: 557719 - DNA, 15 bp, Homo sapiens
ttggttctctgcctg

SEQ ID NO: 557720 - DNA, 15 bp, Homo sapiens
tggttctctgcctgg

SEQ ID NO: 557721 - DNA, 15 bp, Homo sapiens
ggttctctgcctgga

SEQ ID NO: 557722 - DNA, 15 bp, Homo sapiens
gttctctgcctggaa

SEQ ID NO: 557723 - DNA, 15 bp, Homo sapiens
ttctctgcctggaaa

SEQ ID NO: 557724 - DNA, 15 bp, Homo sapiens
tctctgcctggaaaa

SEQ ID NO: 557725 - DNA, 15 bp, Homo sapiens
ctctgcctggaaaaa

SEQ ID NO: 557726 - DNA, 15 bp, Homo sapiens
tctgcctggaaaaac

SEQ ID NO: 557727 - DNA, 15 bp, Homo sapiens
ctgcctggaaaaaca

SEQ ID NO: 557728 - DNA, 15 bp, Homo sapiens
tgcctggaaaaacag

SEQ ID NO: 557729 - DNA, 15 bp, Homo sapiens
gcctggaaaaacagt

SEQ ID NO: 557730 - DNA, 15 bp, Homo sapiens
cctggaaaaacagta

SEQ ID NO: 557731 - DNA, 15 bp, Homo sapiens
ctggaaaaacagtag

SEQ ID NO: 557732 - DNA, 15 bp, Homo sapiens
tggaaaaacagtagg

SEQ ID NO: 557733 - DNA, 15 bp, Homo sapiens
ggaaaaacagtaggc

SEQ ID NO: 557734 - DNA, 15 bp, Homo sapiens
gaaaaacagtaggcg

SEQ ID NO: 557735 - DNA, 15 bp, Homo sapiens
aaaaacagtaggcga

SEQ ID NO: 557736 - DNA, 15 bp, Homo sapiens
aaaacagtaggcgaa

SEQ ID NO: 557737 - DNA, 15 bp, Homo sapiens
aaacagtaggcgaat

SEQ ID NO: 557738 - DNA, 15 bp, Homo sapiens
aacagtaggcgaata

SEQ ID NO: 557739 - DNA, 15 bp, Homo sapiens
acagtaggcgaatag

SEQ ID NO: 557740 - DNA, 15 bp, Homo sapiens
cagtaggcgaatagt

SEQ ID NO: 557741 - DNA, 15 bp, Homo sapiens
agtaggcgaatagta

SEQ ID NO: 557742 - DNA, 15 bp, Homo sapiens
gtaggcgaatagtaa

SEQ ID NO: 557743 - DNA, 15 bp, Homo sapiens
taggcgaatagtaaa

SEQ ID NO: 557744 - DNA, 15 bp, Homo sapiens
aggcgaatagtaaaa

SEQ ID NO: 557745 - DNA, 15 bp, Homo sapiens
ggcgaatagtaaaac

SEQ ID NO: 557746 - DNA, 15 bp, Homo sapiens
gcgaatagtaaaacc

SEQ ID NO: 557747 - DNA, 15 bp, Homo sapiens
cgaatagtaaaacct

SEQ ID NO: 557748 - DNA, 15 bp, Homo sapiens
gaatagtaaaacctt

SEQ ID NO: 557749 - DNA, 15 bp, Homo sapiens
aatagtaaaacctta

SEQ ID NO: 557750 - DNA, 15 bp, Homo sapiens
atagtaaaaccttaa

SEQ ID NO: 557751 - DNA, 15 bp, Homo sapiens
tagtaaaaccttaaa

SEQ ID NO: 557752 - DNA, 15 bp, Homo sapiens
agtaaaaccttaaat

SEQ ID NO: 557753 - DNA, 15 bp, Homo sapiens
gtaaaaccttaaatt

SEQ ID NO: 557754 - DNA, 15 bp, Homo sapiens
taaaaccttaaattc

SEQ ID NO: 557755 - DNA, 15 bp, Homo sapiens
aaaaccttaaattct

SEQ ID NO: 557756 - DNA, 15 bp, Homo sapiens
aaaccttaaattcta

SEQ ID NO: 557757 - DNA, 15 bp, Homo sapiens
aaccttaaattctaa

SEQ ID NO: 557758 - DNA, 15 bp, Homo sapiens
accttaaattctaac

SEQ ID NO: 557759 - DNA, 15 bp, Homo sapiens
ccttaaattctaaca

SEQ ID NO: 557760 - DNA, 15 bp, Homo sapiens
cttaaattctaacat

SEQ ID NO: 557761 - DNA, 15 bp, Homo sapiens
ttaaattctaacatg

SEQ ID NO: 557762 - DNA, 15 bp, Homo sapiens
taaattctaacatgt

SEQ ID NO: 557763 - DNA, 15 bp, Homo sapiens
aaattctaacatgtg

SEQ ID NO: 557764 - DNA, 15 bp, Homo sapiens
aattctaacatgtgt

SEQ ID NO: 557765 - DNA, 15 bp, Homo sapiens
attctaacatgtgtg

SEQ ID NO: 557766 - DNA, 15 bp, Homo sapiens
ttctaacatgtgtga

SEQ ID NO: 557767 - DNA, 15 bp, Homo sapiens
tctaacatgtgtgag

SEQ ID NO: 557768 - DNA, 15 bp, Homo sapiens
ctaacatgtgtgagt

SEQ ID NO: 557769 - DNA, 15 bp, Homo sapiens
taacatgtgtgagtt

SEQ ID NO: 557770 - DNA, 15 bp, Homo sapiens
aacatgtgtgagtta

SEQ ID NO: 557771 - DNA, 15 bp, Homo sapiens
acatgtgtgagttat

SEQ ID NO: 557772 - DNA, 15 bp, Homo sapiens
catgtgtgagttata

SEQ ID NO: 557773 - DNA, 15 bp, Homo sapiens
atgtgtgagttatac

SEQ ID NO: 557774 - DNA, 15 bp, Homo sapiens
tgtgtgagttataca

SEQ ID NO: 557775 - DNA, 15 bp, Homo sapiens
gtgtgagttatacat

SEQ ID NO: 557776 - DNA, 15 bp, Homo sapiens
tgtgagttatacatc

SEQ ID NO: 557777 - DNA, 15 bp, Homo sapiens
gtgagttatacatct

SEQ ID NO: 557778 - DNA, 15 bp, Homo sapiens
tgagttatacatctt

SEQ ID NO: 557779 - DNA, 15 bp, Homo sapiens
gagttatacatctta

SEQ ID NO: 557780 - DNA, 15 bp, Homo sapiens
agttatacatcttat

SEQ ID NO: 557781 - DNA, 15 bp, Homo sapiens
gttatacatcttatt

SEQ ID NO: 557782 - DNA, 15 bp, Homo sapiens
ttatacatcttattt

SEQ ID NO: 557783 - DNA, 15 bp, Homo sapiens
tatacatcttatttt

SEQ ID NO: 557784 - DNA, 15 bp, Homo sapiens
atacatcttattttc

SEQ ID NO: 557785 - DNA, 15 bp, Homo sapiens
tacatcttattttca

SEQ ID NO: 557786 - DNA, 15 bp, Homo sapiens
acatcttattttcat

SEQ ID NO: 557787 - DNA, 15 bp, Homo sapiens
catcttattttcatt

SEQ ID NO: 557788 - DNA, 15 bp, Homo sapiens
atcttattttcattt

SEQ ID NO: 557789 - DNA, 15 bp, Homo sapiens
tcttattttcatttt

SEQ ID NO: 557790 - DNA, 15 bp, Homo sapiens
cttattttcattttc

SEQ ID NO: 557791 - DNA, 15 bp, Homo sapiens
ttattttcattttca

SEQ ID NO: 557792 - DNA, 15 bp, Homo sapiens
tattttcattttcag

SEQ ID NO: 557793 - DNA, 15 bp, Homo sapiens
attttcattttcagc

SEQ ID NO: 557794 - DNA, 15 bp, Homo sapiens
ttttcattttcagcc

SEQ ID NO: 557795 - DNA, 15 bp, Homo sapiens
tttcattttcagccc

SEQ ID NO: 557796 - DNA, 15 bp, Homo sapiens
ttcattttcagccca

SEQ ID NO: 557797 - DNA, 15 bp, Homo sapiens
tcattttcagcccat

SEQ ID NO: 557798 - DNA, 15 bp, Homo sapiens
cattttcagcccatg

SEQ ID NO: 557799 - DNA, 15 bp, Homo sapiens
attttcagcccatgt

SEQ ID NO: 557800 - DNA, 15 bp, Homo sapiens
ttttcagcccatgtt

SEQ ID NO: 557801 - DNA, 15 bp, Homo sapiens
tttcagcccatgttt

SEQ ID NO: 557802 - DNA, 15 bp, Homo sapiens
ttcagcccatgtttc

SEQ ID NO: 557803 - DNA, 15 bp, Homo sapiens
tcagcccatgtttcc

SEQ ID NO: 557804 - DNA, 15 bp, Homo sapiens
cagcccatgtttccc

SEQ ID NO: 557805 - DNA, 15 bp, Homo sapiens
agcccatgtttccct

SEQ ID NO: 557806 - DNA, 15 bp, Homo sapiens
gcccatgtttccctc

SEQ ID NO: 557807 - DNA, 15 bp, Homo sapiens
cccatgtttccctct

SEQ ID NO: 557808 - DNA, 15 bp, Homo sapiens
ccatgtttccctctg

SEQ ID NO: 557809 - DNA, 15 bp, Homo sapiens
catgtttccctctgt

SEQ ID NO: 557810 - DNA, 15 bp, Homo sapiens
atgtttccctctgta

SEQ ID NO: 557811 - DNA, 15 bp, Homo sapiens
tgtttccctctgtaa

SEQ ID NO: 557812 - DNA, 15 bp, Homo sapiens
gtttccctctgtaag

SEQ ID NO: 557813 - DNA, 15 bp, Homo sapiens
tttccctctgtaaga

SEQ ID NO: 557814 - DNA, 15 bp, Homo sapiens
ttccctctgtaagac

SEQ ID NO: 557815 - DNA, 15 bp, Homo sapiens
tccctctgtaagaca

SEQ ID NO: 557816 - DNA, 15 bp, Homo sapiens
ccctctgtaagacat

SEQ ID NO: 557817 - DNA, 15 bp, Homo sapiens
cctctgtaagacatc

SEQ ID NO: 557818 - DNA, 15 bp, Homo sapiens
ctctgtaagacatca

SEQ ID NO: 557819 - DNA, 15 bp, Homo sapiens
tctgtaagacatcag

SEQ ID NO: 557820 - DNA, 15 bp, Homo sapiens
ctgtaagacatcagg

SEQ ID NO: 557821 - DNA, 15 bp, Homo sapiens
tgtaagacatcagga

SEQ ID NO: 557822 - DNA, 15 bp, Homo sapiens
gtaagacatcaggaa

SEQ ID NO: 557823 - DNA, 15 bp, Homo sapiens
taagacatcaggaaa

SEQ ID NO: 557824 - DNA, 15 bp, Homo sapiens
aagacatcaggaaaa

SEQ ID NO: 557825 - DNA, 15 bp, Homo sapiens
agacatcaggaaaaa

SEQ ID NO: 557826 - DNA, 15 bp, Homo sapiens
gacatcaggaaaaaa

SEQ ID NO: 557827 - DNA, 15 bp, Homo sapiens
acatcaggaaaaaat

SEQ ID NO: 557828 - DNA, 15 bp, Homo sapiens
catcaggaaaaaatt

SEQ ID NO: 557829 - DNA, 15 bp, Homo sapiens
atcaggaaaaaatta

SEQ ID NO: 557830 - DNA, 15 bp, Homo sapiens
tcaggaaaaaattac

SEQ ID NO: 557831 - DNA, 15 bp, Homo sapiens
caggaaaaaattacc

SEQ ID NO: 557832 - DNA, 15 bp, Homo sapiens
aggaaaaaattaccg

SEQ ID NO: 557833 - DNA, 15 bp, Homo sapiens
ggaaaaaattaccgt

SEQ ID NO: 557834 - DNA, 15 bp, Homo sapiens
gaaaaaattaccgtc

SEQ ID NO: 557835 - DNA, 15 bp, Homo sapiens
aaaaaattaccgtct

SEQ ID NO: 557836 - DNA, 15 bp, Homo sapiens
aaaaattaccgtctg

SEQ ID NO: 557837 - DNA, 15 bp, Homo sapiens
aaaattaccgtctga

SEQ ID NO: 557838 - DNA, 15 bp, Homo sapiens
aaattaccgtctgac

SEQ ID NO: 557839 - DNA, 15 bp, Homo sapiens
aattaccgtctgact

SEQ ID NO: 557840 - DNA, 15 bp, Homo sapiens
attaccgtctgactt

SEQ ID NO: 557841 - DNA, 15 bp, Homo sapiens
ttaccgtctgacttc

SEQ ID NO: 557842 - DNA, 15 bp, Homo sapiens
taccgtctgacttct

SEQ ID NO: 557843 - DNA, 15 bp, Homo sapiens
accgtctgacttcta

SEQ ID NO: 557844 - DNA, 15 bp, Homo sapiens
ccgtctgacttctaa

SEQ ID NO: 557845 - DNA, 15 bp, Homo sapiens
cgtctgacttctaat

SEQ ID NO: 557846 - DNA, 15 bp, Homo sapiens
gtctgacttctaata

SEQ ID NO: 557847 - DNA, 15 bp, Homo sapiens
tctgacttctaatat

SEQ ID NO: 557848 - DNA, 15 bp, Homo sapiens
ctgacttctaatatc

SEQ ID NO: 557849 - DNA, 15 bp, Homo sapiens
tgacttctaatatct

SEQ ID NO: 557850 - DNA, 15 bp, Homo sapiens
gacttctaatatctc

SEQ ID NO: 557851 - DNA, 15 bp, Homo sapiens
acttctaatatctca

SEQ ID NO: 557852 - DNA, 15 bp, Homo sapiens
cttctaatatctcag

SEQ ID NO: 557853 - DNA, 15 bp, Homo sapiens
ttctaatatctcagt

SEQ ID NO: 557854 - DNA, 15 bp, Homo sapiens
tctaatatctcagtg

SEQ ID NO: 557855 - DNA, 15 bp, Homo sapiens
ctaatatctcagtgg

SEQ ID NO: 557856 - DNA, 15 bp, Homo sapiens
taatatctcagtgga

SEQ ID NO: 557857 - DNA, 15 bp, Homo sapiens
aatatctcagtggag

SEQ ID NO: 557858 - DNA, 15 bp, Homo sapiens
atatctcagtggagc

SEQ ID NO: 557859 - DNA, 15 bp, Homo sapiens
tatctcagtggagca

SEQ ID NO: 557860 - DNA, 15 bp, Homo sapiens
atctcagtggagcat

SEQ ID NO: 557861 - DNA, 15 bp, Homo sapiens
tctcagtggagcatt

SEQ ID NO: 557862 - DNA, 15 bp, Homo sapiens
ctcagtggagcattt

SEQ ID NO: 557863 - DNA, 15 bp, Homo sapiens
tcagtggagcattta

SEQ ID NO: 557864 - DNA, 15 bp, Homo sapiens
cagtggagcatttat

SEQ ID NO: 557865 - DNA, 15 bp, Homo sapiens
agtggagcatttatc

SEQ ID NO: 557866 - DNA, 15 bp, Homo sapiens
gtggagcatttatct

SEQ ID NO: 557867 - DNA, 15 bp, Homo sapiens
tggagcatttatctc

SEQ ID NO: 557868 - DNA, 15 bp, Homo sapiens
ggagcatttatctcc

SEQ ID NO: 557869 - DNA, 15 bp, Homo sapiens
gagcatttatctccc

SEQ ID NO: 557870 - DNA, 15 bp, Homo sapiens
agcatttatctccca

SEQ ID NO: 557871 - DNA, 15 bp, Homo sapiens
gcatttatctcccag

SEQ ID NO: 557872 - DNA, 15 bp, Homo sapiens
catttatctcccagc

SEQ ID NO: 557873 - DNA, 15 bp, Homo sapiens
atttatctcccagct

SEQ ID NO: 557874 - DNA, 15 bp, Homo sapiens
tttatctcccagcta

SEQ ID NO: 557875 - DNA, 15 bp, Homo sapiens
ttatctcccagctat

SEQ ID NO: 557876 - DNA, 15 bp, Homo sapiens
tatctcccagctatg

SEQ ID NO: 557877 - DNA, 15 bp, Homo sapiens
atctcccagctatga

SEQ ID NO: 557878 - DNA, 15 bp, Homo sapiens
tctcccagctatgat

SEQ ID NO: 557879 - DNA, 15 bp, Homo sapiens
ctcccagctatgata

SEQ ID NO: 557880 - DNA, 15 bp, Homo sapiens
tcccagctatgataa

SEQ ID NO: 557881 - DNA, 15 bp, Homo sapiens
cccagctatgataag

SEQ ID NO: 557882 - DNA, 15 bp, Homo sapiens
ccagctatgataagt

SEQ ID NO: 557883 - DNA, 15 bp, Homo sapiens
cagctatgataagtg

SEQ ID NO: 557884 - DNA, 15 bp, Homo sapiens
agctatgataagtga

SEQ ID NO: 557885 - DNA, 15 bp, Homo sapiens
gctatgataagtgat

SEQ ID NO: 557886 - DNA, 15 bp, Homo sapiens
ctatgataagtgatc

SEQ ID NO: 557887 - DNA, 15 bp, Homo sapiens
tatgataagtgatct

SEQ ID NO: 557888 - DNA, 15 bp, Homo sapiens
atgataagtgatctt

SEQ ID NO: 557889 - DNA, 15 bp, Homo sapiens
tgataagtgatcttc

SEQ ID NO: 557890 - DNA, 15 bp, Homo sapiens
gataagtgatcttca

SEQ ID NO: 557891 - DNA, 15 bp, Homo sapiens
ataagtgatcttcaa

SEQ ID NO: 557892 - DNA, 15 bp, Homo sapiens
taagtgatcttcaat

SEQ ID NO: 557893 - DNA, 15 bp, Homo sapiens
aagtgatcttcaata

SEQ ID NO: 557894 - DNA, 15 bp, Homo sapiens
agtgatcttcaatat

SEQ ID NO: 557895 - DNA, 15 bp, Homo sapiens
gtgatcttcaatatt

SEQ ID NO: 557896 - DNA, 15 bp, Homo sapiens
tgatcttcaatattt

SEQ ID NO: 557897 - DNA, 15 bp, Homo sapiens
gatcttcaatatttt

SEQ ID NO: 557898 - DNA, 15 bp, Homo sapiens
atcttcaatattttt

SEQ ID NO: 557899 - DNA, 15 bp, Homo sapiens
tcttcaatatttttt

SEQ ID NO: 557900 - DNA, 15 bp, Homo sapiens
cttcaatattttttt

SEQ ID NO: 557901 - DNA, 15 bp, Homo sapiens
ttcaatatttttttc

SEQ ID NO: 557902 - DNA, 15 bp, Homo sapiens
tcaatatttttttcc

SEQ ID NO: 557903 - DNA, 15 bp, Homo sapiens
caatatttttttcct

SEQ ID NO: 557904 - DNA, 15 bp, Homo sapiens
aatatttttttcctt

SEQ ID NO: 557905 - DNA, 15 bp, Homo sapiens
atatttttttccttt

SEQ ID NO: 557906 - DNA, 15 bp, Homo sapiens
tatttttttcctttc

SEQ ID NO: 557907 - DNA, 15 bp, Homo sapiens
atttttttcctttca

SEQ ID NO: 557908 - DNA, 15 bp, Homo sapiens
tttttttcctttcag

SEQ ID NO: 557909 - DNA, 15 bp, Homo sapiens
ttttttcctttcaga

SEQ ID NO: 557910 - DNA, 15 bp, Homo sapiens
tttttcctttcagat

SEQ ID NO: 557911 - DNA, 15 bp, Homo sapiens
ttttcctttcagatt

SEQ ID NO: 557912 - DNA, 15 bp, Homo sapiens
tttcctttcagatta

SEQ ID NO: 557913 - DNA, 15 bp, Homo sapiens
ttcctttcagattaa

SEQ ID NO: 557914 - DNA, 15 bp, Homo sapiens
tcctttcagattaag

SEQ ID NO: 557915 - DNA, 15 bp, Homo sapiens
cctttcagattaaga

SEQ ID NO: 557916 - DNA, 15 bp, Homo sapiens
ctttcagattaagaa

SEQ ID NO: 557917 - DNA, 15 bp, Homo sapiens
tttcagattaagaaa

SEQ ID NO: 557918 - DNA, 15 bp, Homo sapiens
ttcagattaagaaac

SEQ ID NO: 557919 - DNA, 15 bp, Homo sapiens
tcagattaagaaaca

SEQ ID NO: 557920 - DNA, 15 bp, Homo sapiens
cagattaagaaacaa

SEQ ID NO: 557921 - DNA, 15 bp, Homo sapiens
agattaagaaacaaa

SEQ ID NO: 557922 - DNA, 15 bp, Homo sapiens
gattaagaaacaaat

SEQ ID NO: 557923 - DNA, 15 bp, Homo sapiens
attaagaaacaaatt

SEQ ID NO: 557924 - DNA, 15 bp, Homo sapiens
ttaagaaacaaattc

SEQ ID NO: 557925 - DNA, 15 bp, Homo sapiens
taagaaacaaattca

SEQ ID NO: 557926 - DNA, 15 bp, Homo sapiens
aagaaacaaattcat

SEQ ID NO: 557927 - DNA, 15 bp, Homo sapiens
agaaacaaattcatt

SEQ ID NO: 557928 - DNA, 15 bp, Homo sapiens
gaaacaaattcattt

SEQ ID NO: 557929 - DNA, 15 bp, Homo sapiens
aaacaaattcattta

SEQ ID NO: 557930 - DNA, 15 bp, Homo sapiens
aacaaattcatttaa

SEQ ID NO: 557931 - DNA, 15 bp, Homo sapiens
acaaattcatttaat

SEQ ID NO: 557932 - DNA, 15 bp, Homo sapiens
caaattcatttaatt

SEQ ID NO: 557933 - DNA, 15 bp, Homo sapiens
aaattcatttaattt

SEQ ID NO: 557934 - DNA, 15 bp, Homo sapiens
aattcatttaatttt

SEQ ID NO: 557935 - DNA, 15 bp, Homo sapiens
attcatttaattttc

SEQ ID NO: 557936 - DNA, 15 bp, Homo sapiens
ttcatttaattttct

SEQ ID NO: 557937 - DNA, 15 bp, Homo sapiens
tcatttaattttctt

SEQ ID NO: 557938 - DNA, 15 bp, Homo sapiens
catttaattttcttt

SEQ ID NO: 557939 - DNA, 15 bp, Homo sapiens
atttaattttcttta

SEQ ID NO: 557940 - DNA, 15 bp, Homo sapiens
tttaattttctttat

SEQ ID NO: 557941 - DNA, 15 bp, Homo sapiens
ttaattttctttatt

SEQ ID NO: 557942 - DNA, 15 bp, Homo sapiens
taattttctttattg

SEQ ID NO: 557943 - DNA, 15 bp, Homo sapiens
aattttctttattga

SEQ ID NO: 557944 - DNA, 15 bp, Homo sapiens
attttctttattgaa

SEQ ID NO: 557945 - DNA, 15 bp, Homo sapiens
ttttctttattgaat

SEQ ID NO: 557946 - DNA, 15 bp, Homo sapiens
tttctttattgaatg

SEQ ID NO: 557947 - DNA, 15 bp, Homo sapiens
ttctttattgaatgt

SEQ ID NO: 557948 - DNA, 15 bp, Homo sapiens
tctttattgaatgtg

SEQ ID NO: 557949 - DNA, 15 bp, Homo sapiens
ctttattgaatgtgc

SEQ ID NO: 557950 - DNA, 15 bp, Homo sapiens
tttattgaatgtgct

SEQ ID NO: 557951 - DNA, 15 bp, Homo sapiens
ttattgaatgtgctc

SEQ ID NO: 557952 - DNA, 15 bp, Homo sapiens
tattgaatgtgctca

SEQ ID NO: 557953 - DNA, 15 bp, Homo sapiens
attgaatgtgctcag

SEQ ID NO: 557954 - DNA, 15 bp, Homo sapiens
ttgaatgtgctcagg

SEQ ID NO: 557955 - DNA, 15 bp, Homo sapiens
tgaatgtgctcaggc

SEQ ID NO: 557956 - DNA, 15 bp, Homo sapiens
gaatgtgctcaggcc

SEQ ID NO: 557957 - DNA, 15 bp, Homo sapiens
aatgtgctcaggcct

SEQ ID NO: 557958 - DNA, 15 bp, Homo sapiens
atgtgctcaggcctc

SEQ ID NO: 557959 - DNA, 15 bp, Homo sapiens
tgtgctcaggcctcc

SEQ ID NO: 557960 - DNA, 15 bp, Homo sapiens
gtgctcaggcctccc

SEQ ID NO: 557961 - DNA, 15 bp, Homo sapiens
tgctcaggcctcccc

SEQ ID NO: 557962 - DNA, 15 bp, Homo sapiens
gctcaggcctccccg

SEQ ID NO: 557963 - DNA, 15 bp, Homo sapiens
ctcaggcctccccgc

SEQ ID NO: 557964 - DNA, 15 bp, Homo sapiens
tcaggcctccccgcc

SEQ ID NO: 557965 - DNA, 15 bp, Homo sapiens
caggcctccccgccc

SEQ ID NO: 557966 - DNA, 15 bp, Homo sapiens
aggcctccccgccct

SEQ ID NO: 557967 - DNA, 15 bp, Homo sapiens
ggcctccccgccctg

SEQ ID NO: 557968 - DNA, 15 bp, Homo sapiens
gcctccccgccctgc

SEQ ID NO: 557969 - DNA, 15 bp, Homo sapiens
cctccccgccctgcc

SEQ ID NO: 557970 - DNA, 15 bp, Homo sapiens
ctccccgccctgcct

SEQ ID NO: 557971 - DNA, 15 bp, Homo sapiens
tccccgccctgcctg

SEQ ID NO: 557972 - DNA, 15 bp, Homo sapiens
ccccgccctgcctgg

SEQ ID NO: 557973 - DNA, 15 bp, Homo sapiens
cccgccctgcctggg

SEQ ID NO: 557974 - DNA, 15 bp, Homo sapiens
ccgccctgcctgggt

SEQ ID NO: 557975 - DNA, 15 bp, Homo sapiens
cgccctgcctgggtc

SEQ ID NO: 557976 - DNA, 15 bp, Homo sapiens
gccctgcctgggtct

SEQ ID NO: 557977 - DNA, 15 bp, Homo sapiens
ccctgcctgggtctc

SEQ ID NO: 557978 - DNA, 15 bp, Homo sapiens
cctgcctgggtctca

SEQ ID NO: 557979 - DNA, 15 bp, Homo sapiens
ctgcctgggtctcag

SEQ ID NO: 557980 - DNA, 15 bp, Homo sapiens
tgcctgggtctcagg

SEQ ID NO: 557981 - DNA, 15 bp, Homo sapiens
gcctgggtctcagga

SEQ ID NO: 557982 - DNA, 15 bp, Homo sapiens
cctgggtctcaggaa

SEQ ID NO: 557983 - DNA, 15 bp, Homo sapiens
ctgggtctcaggaag

SEQ ID NO: 557984 - DNA, 15 bp, Homo sapiens
tgggtctcaggaagc

SEQ ID NO: 557985 - DNA, 15 bp, Homo sapiens
gggtctcaggaagcc

SEQ ID NO: 557986 - DNA, 15 bp, Homo sapiens
ggtctcaggaagccc

SEQ ID NO: 557987 - DNA, 15 bp, Homo sapiens
gtctcaggaagccct

SEQ ID NO: 557988 - DNA, 15 bp, Homo sapiens
tctcaggaagccctg

SEQ ID NO: 557989 - DNA, 15 bp, Homo sapiens
ctcaggaagccctgg

SEQ ID NO: 557990 - DNA, 15 bp, Homo sapiens
tcaggaagccctggg

SEQ ID NO: 557991 - DNA, 15 bp, Homo sapiens
caggaagccctgggc

SEQ ID NO: 557992 - DNA, 15 bp, Homo sapiens
aggaagccctgggct

SEQ ID NO: 557993 - DNA, 15 bp, Homo sapiens
ggaagccctgggctg

SEQ ID NO: 557994 - DNA, 15 bp, Homo sapiens
gaagccctgggctga

SEQ ID NO: 557995 - DNA, 15 bp, Homo sapiens
aagccctgggctgat

SEQ ID NO: 557996 - DNA, 15 bp, Homo sapiens
agccctgggctgatc

SEQ ID NO: 557997 - DNA, 15 bp, Homo sapiens
gccctgggctgatct

SEQ ID NO: 557998 - DNA, 15 bp, Homo sapiens
ccctgggctgatctc

SEQ ID NO: 557999 - DNA, 15 bp, Homo sapiens
cctgggctgatctcc

SEQ ID NO: 558000 - DNA, 15 bp, Homo sapiens
ctgggctgatctccc

SEQ ID NO: 558001 - DNA, 15 bp, Homo sapiens
tgggctgatctccct

SEQ ID NO: 558002 - DNA, 15 bp, Homo sapiens
gggctgatctccctt

SEQ ID NO: 558003 - DNA, 15 bp, Homo sapiens
ggctgatctcccttc

SEQ ID NO: 558004 - DNA, 15 bp, Homo sapiens
gctgatctcccttct

SEQ ID NO: 558005 - DNA, 15 bp, Homo sapiens
ctgatctcccttctc

SEQ ID NO: 558006 - DNA, 15 bp, Homo sapiens
tgatctcccttctcc

SEQ ID NO: 558007 - DNA, 15 bp, Homo sapiens
gatctcccttctcct

SEQ ID NO: 558008 - DNA, 15 bp, Homo sapiens
atctcccttctcctg

SEQ ID NO: 558009 - DNA, 15 bp, Homo sapiens
tctcccttctcctgg

SEQ ID NO: 558010 - DNA, 15 bp, Homo sapiens
ctcccttctcctggg

SEQ ID NO: 558011 - DNA, 15 bp, Homo sapiens
tcccttctcctgggt

SEQ ID NO: 558012 - DNA, 15 bp, Homo sapiens
cccttctcctgggtt

SEQ ID NO: 558013 - DNA, 15 bp, Homo sapiens
ccttctcctgggtta

SEQ ID NO: 558014 - DNA, 15 bp, Homo sapiens
cttctcctgggttag

SEQ ID NO: 558015 - DNA, 15 bp, Homo sapiens
ttctcctgggttagt

SEQ ID NO: 558016 - DNA, 15 bp, Homo sapiens
tctcctgggttagtg

SEQ ID NO: 558017 - DNA, 15 bp, Homo sapiens
ctcctgggttagtga

SEQ ID NO: 558018 - DNA, 15 bp, Homo sapiens
tcctgggttagtgac

SEQ ID NO: 558019 - DNA, 15 bp, Homo sapiens
cctgggttagtgact

SEQ ID NO: 558020 - DNA, 15 bp, Homo sapiens
ctgggttagtgactg

SEQ ID NO: 558021 - DNA, 15 bp, Homo sapiens
tgggttagtgactgc

SEQ ID NO: 558022 - DNA, 15 bp, Homo sapiens
gggttagtgactgcc

SEQ ID NO: 558023 - DNA, 15 bp, Homo sapiens
ggttagtgactgccg

SEQ ID NO: 558024 - DNA, 15 bp, Homo sapiens
gttagtgactgccgt

SEQ ID NO: 558025 - DNA, 15 bp, Homo sapiens
ttagtgactgccgtc

SEQ ID NO: 558026 - DNA, 15 bp, Homo sapiens
tagtgactgccgtcc

SEQ ID NO: 558027 - DNA, 15 bp, Homo sapiens
agtgactgccgtccc

SEQ ID NO: 558028 - DNA, 15 bp, Homo sapiens
gtgactgccgtccct

SEQ ID NO: 558029 - DNA, 15 bp, Homo sapiens
tgactgccgtccctg

SEQ ID NO: 558030 - DNA, 15 bp, Homo sapiens
gactgccgtccctgc

SEQ ID NO: 558031 - DNA, 15 bp, Homo sapiens
actgccgtccctgct

SEQ ID NO: 558032 - DNA, 15 bp, Homo sapiens
ctgccgtccctgctt

SEQ ID NO: 558033 - DNA, 15 bp, Homo sapiens
tgccgtccctgcttg

SEQ ID NO: 558034 - DNA, 15 bp, Homo sapiens
gccgtccctgcttgt

SEQ ID NO: 558035 - DNA, 15 bp, Homo sapiens
ccgtccctgcttgtg

SEQ ID NO: 558036 - DNA, 15 bp, Homo sapiens
cgtccctgcttgtgg

SEQ ID NO: 558037 - DNA, 15 bp, Homo sapiens
gtccctgcttgtggg

SEQ ID NO: 558038 - DNA, 15 bp, Homo sapiens
tccctgcttgtggga

SEQ ID NO: 558039 - DNA, 15 bp, Homo sapiens
ccctgcttgtgggat

SEQ ID NO: 558040 - DNA, 15 bp, Homo sapiens
cctgcttgtgggatg

SEQ ID NO: 558041 - DNA, 15 bp, Homo sapiens
ctgcttgtgggatgg

SEQ ID NO: 558042 - DNA, 15 bp, Homo sapiens
tgcttgtgggatggg

SEQ ID NO: 558043 - DNA, 15 bp, Homo sapiens
gcttgtgggatgggt

SEQ ID NO: 558044 - DNA, 15 bp, Homo sapiens
cttgtgggatgggtg

SEQ ID NO: 558045 - DNA, 15 bp, Homo sapiens
ttgtgggatgggtgg

SEQ ID NO: 558046 - DNA, 15 bp, Homo sapiens
tgtgggatgggtggg

SEQ ID NO: 558047 - DNA, 15 bp, Homo sapiens
gtgggatgggtgggt

SEQ ID NO: 558048 - DNA, 15 bp, Homo sapiens
tgggatgggtgggtc

SEQ ID NO: 558049 - DNA, 15 bp, Homo sapiens
gggatgggtgggtcc

SEQ ID NO: 558050 - DNA, 15 bp, Homo sapiens
ggatgggtgggtccc

SEQ ID NO: 558051 - DNA, 15 bp, Homo sapiens
gatgggtgggtccct

SEQ ID NO: 558052 - DNA, 15 bp, Homo sapiens
atgggtgggtcccta

SEQ ID NO: 558053 - DNA, 15 bp, Homo sapiens
tgggtgggtccctat

SEQ ID NO: 558054 - DNA, 15 bp, Homo sapiens
gggtgggtccctatc

SEQ ID NO: 558055 - DNA, 15 bp, Homo sapiens
ggtgggtccctatct

SEQ ID NO: 558056 - DNA, 15 bp, Homo sapiens
gtgggtccctatctg

SEQ ID NO: 558057 - DNA, 15 bp, Homo sapiens
tgggtccctatctgg

SEQ ID NO: 558058 - DNA, 15 bp, Homo sapiens
gggtccctatctggt

SEQ ID NO: 558059 - DNA, 15 bp, Homo sapiens
ggtccctatctggta

SEQ ID NO: 558060 - DNA, 15 bp, Homo sapiens
gtccctatctggtac

SEQ ID NO: 558061 - DNA, 15 bp, Homo sapiens
tccctatctggtacg

SEQ ID NO: 558062 - DNA, 15 bp, Homo sapiens
ccctatctggtacgg

SEQ ID NO: 558063 - DNA, 15 bp, Homo sapiens
cctatctggtacggc

SEQ ID NO: 558064 - DNA, 15 bp, Homo sapiens
ctatctggtacggcc

SEQ ID NO: 558065 - DNA, 15 bp, Homo sapiens
tatctggtacggccc

SEQ ID NO: 558066 - DNA, 15 bp, Homo sapiens
atctggtacggccct

SEQ ID NO: 558067 - DNA, 15 bp, Homo sapiens
tctggtacggccctg

SEQ ID NO: 558068 - DNA, 15 bp, Homo sapiens
ctggtacggccctgc

SEQ ID NO: 558069 - DNA, 15 bp, Homo sapiens
tggtacggccctgct

SEQ ID NO: 558070 - DNA, 15 bp, Homo sapiens
ggtacggccctgctc

SEQ ID NO: 558071 - DNA, 15 bp, Homo sapiens
gtacggccctgctcc

SEQ ID NO: 558072 - DNA, 15 bp, Homo sapiens
tacggccctgctcct

SEQ ID NO: 558073 - DNA, 15 bp, Homo sapiens
acggccctgctcctc

SEQ ID NO: 558074 - DNA, 15 bp, Homo sapiens
cggccctgctcctca

SEQ ID NO: 558075 - DNA, 15 bp, Homo sapiens
ggccctgctcctcaa

SEQ ID NO: 558076 - DNA, 15 bp, Homo sapiens
gccctgctcctcaag

SEQ ID NO: 558077 - DNA, 15 bp, Homo sapiens
ccctgctcctcaagg

SEQ ID NO: 558078 - DNA, 15 bp, Homo sapiens
cctgctcctcaaggc

SEQ ID NO: 558079 - DNA, 15 bp, Homo sapiens
ctgctcctcaaggcc

SEQ ID NO: 558080 - DNA, 15 bp, Homo sapiens
tgctcctcaaggcct

SEQ ID NO: 558081 - DNA, 15 bp, Homo sapiens
gctcctcaaggcctc

SEQ ID NO: 558082 - DNA, 15 bp, Homo sapiens
ctcctcaaggcctcg

SEQ ID NO: 558083 - DNA, 15 bp, Homo sapiens
tcctcaaggcctcgc

SEQ ID NO: 558084 - DNA, 15 bp, Homo sapiens
cctcaaggcctcgct

SEQ ID NO: 558085 - DNA, 15 bp, Homo sapiens
ctcaaggcctcgctg

SEQ ID NO: 558086 - DNA, 15 bp, Homo sapiens
tcaaggcctcgctgt

SEQ ID NO: 558087 - DNA, 15 bp, Homo sapiens
caaggcctcgctgtg

SEQ ID NO: 558088 - DNA, 15 bp, Homo sapiens
aaggcctcgctgtgg

SEQ ID NO: 558089 - DNA, 15 bp, Homo sapiens
aggcctcgctgtggt

SEQ ID NO: 558090 - DNA, 15 bp, Homo sapiens
ggcctcgctgtggtc

SEQ ID NO: 558091 - DNA, 15 bp, Homo sapiens
gcctcgctgtggtcc

SEQ ID NO: 558092 - DNA, 15 bp, Homo sapiens
cctcgctgtggtccg

SEQ ID NO: 558093 - DNA, 15 bp, Homo sapiens
ctcgctgtggtccgt

SEQ ID NO: 558094 - DNA, 15 bp, Homo sapiens
tcgctgtggtccgtt

SEQ ID NO: 558095 - DNA, 15 bp, Homo sapiens
cgctgtggtccgttc

SEQ ID NO: 558096 - DNA, 15 bp, Homo sapiens
gctgtggtccgttcc

SEQ ID NO: 558097 - DNA, 15 bp, Homo sapiens
ctgtggtccgttcct

SEQ ID NO: 558098 - DNA, 15 bp, Homo sapiens
tgtggtccgttcctg

SEQ ID NO: 558099 - DNA, 15 bp, Homo sapiens
gtggtccgttcctgc

SEQ ID NO: 558100 - DNA, 15 bp, Homo sapiens
tggtccgttcctgcg

SEQ ID NO: 558101 - DNA, 15 bp, Homo sapiens
ggtccgttcctgcgc

SEQ ID NO: 558102 - DNA, 15 bp, Homo sapiens
gtccgttcctgcgcc

SEQ ID NO: 558103 - DNA, 15 bp, Homo sapiens
tccgttcctgcgcct

SEQ ID NO: 558104 - DNA, 15 bp, Homo sapiens
ccgttcctgcgcctg

SEQ ID NO: 558105 - DNA, 15 bp, Homo sapiens
cgttcctgcgcctgg

SEQ ID NO: 558106 - DNA, 15 bp, Homo sapiens
gttcctgcgcctggc

SEQ ID NO: 558107 - DNA, 15 bp, Homo sapiens
ttcctgcgcctggca

SEQ ID NO: 558108 - DNA, 15 bp, Homo sapiens
tcctgcgcctggcag

SEQ ID NO: 558109 - DNA, 15 bp, Homo sapiens
cctgcgcctggcagg

SEQ ID NO: 558110 - DNA, 15 bp, Homo sapiens
ctgcgcctggcaggg

SEQ ID NO: 558111 - DNA, 15 bp, Homo sapiens
tgcgcctggcagggg

SEQ ID NO: 558112 - DNA, 15 bp, Homo sapiens
gcgcctggcagggga

SEQ ID NO: 558113 - DNA, 15 bp, Homo sapiens
cgcctggcaggggat

SEQ ID NO: 558114 - DNA, 15 bp, Homo sapiens
gcctggcaggggatg

SEQ ID NO: 558115 - DNA, 15 bp, Homo sapiens
cctggcaggggatgg

SEQ ID NO: 558116 - DNA, 15 bp, Homo sapiens
ctggcaggggatgga

SEQ ID NO: 558117 - DNA, 15 bp, Homo sapiens
tggcaggggatggag

SEQ ID NO: 558118 - DNA, 15 bp, Homo sapiens
ggcaggggatggagg

SEQ ID NO: 558119 - DNA, 15 bp, Homo sapiens
gcaggggatggagga

SEQ ID NO: 558120 - DNA, 15 bp, Homo sapiens
caggggatggaggac

SEQ ID NO: 558121 - DNA, 15 bp, Homo sapiens
aggggatggaggaca

SEQ ID NO: 558122 - DNA, 15 bp, Homo sapiens
ggggatggaggacag

SEQ ID NO: 558123 - DNA, 15 bp, Homo sapiens
gggatggaggacagt

SEQ ID NO: 558124 - DNA, 15 bp, Homo sapiens
ggatggaggacagtg

SEQ ID NO: 558125 - DNA, 15 bp, Homo sapiens
gatggaggacagtgg

SEQ ID NO: 558126 - DNA, 15 bp, Homo sapiens
atggaggacagtggc

SEQ ID NO: 558127 - DNA, 15 bp, Homo sapiens
tggaggacagtggcc

SEQ ID NO: 558128 - DNA, 15 bp, Homo sapiens
ggaggacagtggcca

SEQ ID NO: 558129 - DNA, 15 bp, Homo sapiens
gaggacagtggccag

SEQ ID NO: 558130 - DNA, 15 bp, Homo sapiens
aggacagtggccagg

SEQ ID NO: 558131 - DNA, 15 bp, Homo sapiens
ggacagtggccaggc

SEQ ID NO: 558132 - DNA, 15 bp, Homo sapiens
gacagtggccaggcc

SEQ ID NO: 558133 - DNA, 15 bp, Homo sapiens
acagtggccaggcct

SEQ ID NO: 558134 - DNA, 15 bp, Homo sapiens
cagtggccaggcctt

SEQ ID NO: 558135 - DNA, 15 bp, Homo sapiens
agtggccaggccttt

SEQ ID NO: 558136 - DNA, 15 bp, Homo sapiens
gtggccaggcctttg

SEQ ID NO: 558137 - DNA, 15 bp, Homo sapiens
tggccaggcctttgg

SEQ ID NO: 558138 - DNA, 15 bp, Homo sapiens
ggccaggcctttgga

SEQ ID NO: 558139 - DNA, 15 bp, Homo sapiens
gccaggcctttggaa

SEQ ID NO: 558140 - DNA, 15 bp, Homo sapiens
ccaggcctttggaac

SEQ ID NO: 558141 - DNA, 15 bp, Homo sapiens
caggcctttggaacg

SEQ ID NO: 558142 - DNA, 15 bp, Homo sapiens
aggcctttggaacgt

SEQ ID NO: 558143 - DNA, 15 bp, Homo sapiens
ggcctttggaacgtc

SEQ ID NO: 558144 - DNA, 15 bp, Homo sapiens
gcctttggaacgtcc

SEQ ID NO: 558145 - DNA, 15 bp, Homo sapiens
cctttggaacgtccg

SEQ ID NO: 558146 - DNA, 15 bp, Homo sapiens
ctttggaacgtccgg

SEQ ID NO: 558147 - DNA, 15 bp, Homo sapiens
tttggaacgtccgga

SEQ ID NO: 558148 - DNA, 15 bp, Homo sapiens
ttggaacgtccggag

SEQ ID NO: 558149 - DNA, 15 bp, Homo sapiens
tggaacgtccggaga

SEQ ID NO: 558150 - DNA, 15 bp, Homo sapiens
ggaacgtccggagag

SEQ ID NO: 558151 - DNA, 15 bp, Homo sapiens
gaacgtccggagagg

SEQ ID NO: 558152 - DNA, 15 bp, Homo sapiens
aacgtccggagaggt

SEQ ID NO: 558153 - DNA, 15 bp, Homo sapiens
acgtccggagaggtt

SEQ ID NO: 558154 - DNA, 15 bp, Homo sapiens
cgtccggagaggtta

SEQ ID NO: 558155 - DNA, 15 bp, Homo sapiens
gtccggagaggttat

SEQ ID NO: 558156 - DNA, 15 bp, Homo sapiens
tccggagaggttatg

SEQ ID NO: 558157 - DNA, 15 bp, Homo sapiens
ccggagaggttatgc

SEQ ID NO: 558158 - DNA, 15 bp, Homo sapiens
cggagaggttatgcg

SEQ ID NO: 558159 - DNA, 15 bp, Homo sapiens
ggagaggttatgcgg

SEQ ID NO: 558160 - DNA, 15 bp, Homo sapiens
gagaggttatgcggc

SEQ ID NO: 558161 - DNA, 15 bp, Homo sapiens
agaggttatgcggcc

SEQ ID NO: 558162 - DNA, 15 bp, Homo sapiens
gaggttatgcggcct

SEQ ID NO: 558163 - DNA, 15 bp, Homo sapiens
aggttatgcggccta

SEQ ID NO: 558164 - DNA, 15 bp, Homo sapiens
ggttatgcggcctag

SEQ ID NO: 558165 - DNA, 15 bp, Homo sapiens
gttatgcggcctaga

SEQ ID NO: 558166 - DNA, 15 bp, Homo sapiens
ttatgcggcctagag

SEQ ID NO: 558167 - DNA, 15 bp, Homo sapiens
tatgcggcctagagt

SEQ ID NO: 558168 - DNA, 15 bp, Homo sapiens
atgcggcctagagtt

SEQ ID NO: 558169 - DNA, 15 bp, Homo sapiens
tgcggcctagagttg

SEQ ID NO: 558170 - DNA, 15 bp, Homo sapiens
gcggcctagagttgg

SEQ ID NO: 558171 - DNA, 15 bp, Homo sapiens
cggcctagagttgga

SEQ ID NO: 558172 - DNA, 15 bp, Homo sapiens
ggcctagagttggaa

SEQ ID NO: 558173 - DNA, 15 bp, Homo sapiens
gcctagagttggaag

SEQ ID NO: 558174 - DNA, 15 bp, Homo sapiens
cctagagttggaagg

SEQ ID NO: 558175 - DNA, 15 bp, Homo sapiens
ctagagttggaaggc

SEQ ID NO: 558176 - DNA, 15 bp, Homo sapiens
tagagttggaaggct

SEQ ID NO: 558177 - DNA, 15 bp, Homo sapiens
agagttggaaggctg

SEQ ID NO: 558178 - DNA, 15 bp, Homo sapiens
gagttggaaggctgt

SEQ ID NO: 558179 - DNA, 15 bp, Homo sapiens
agttggaaggctgta

SEQ ID NO: 558180 - DNA, 15 bp, Homo sapiens
gttggaaggctgtaa

SEQ ID NO: 558181 - DNA, 15 bp, Homo sapiens
ttggaaggctgtaat

SEQ ID NO: 558182 - DNA, 15 bp, Homo sapiens
tggaaggctgtaatc

SEQ ID NO: 558183 - DNA, 15 bp, Homo sapiens
ggaaggctgtaatct

SEQ ID NO: 558184 - DNA, 15 bp, Homo sapiens
gaaggctgtaatctg

SEQ ID NO: 558185 - DNA, 15 bp, Homo sapiens
aaggctgtaatctga

SEQ ID NO: 558186 - DNA, 15 bp, Homo sapiens
aggctgtaatctgaa

SEQ ID NO: 558187 - DNA, 15 bp, Homo sapiens
ggctgtaatctgaac

SEQ ID NO: 558188 - DNA, 15 bp, Homo sapiens
gctgtaatctgaacc

SEQ ID NO: 558189 - DNA, 15 bp, Homo sapiens
ctgtaatctgaacct

SEQ ID NO: 558190 - DNA, 15 bp, Homo sapiens
tgtaatctgaacctt

SEQ ID NO: 558191 - DNA, 15 bp, Homo sapiens
gtaatctgaacctta

SEQ ID NO: 558192 - DNA, 15 bp, Homo sapiens
taatctgaaccttat

SEQ ID NO: 558193 - DNA, 15 bp, Homo sapiens
aatctgaaccttatc

SEQ ID NO: 558194 - DNA, 15 bp, Homo sapiens
atctgaaccttatct

SEQ ID NO: 558195 - DNA, 15 bp, Homo sapiens
tctgaaccttatctg

SEQ ID NO: 558196 - DNA, 15 bp, Homo sapiens
ctgaaccttatctga

SEQ ID NO: 558197 - DNA, 15 bp, Homo sapiens
tgaaccttatctgaa

SEQ ID NO: 558198 - DNA, 15 bp, Homo sapiens
gaaccttatctgaac

SEQ ID NO: 558199 - DNA, 15 bp, Homo sapiens
aaccttatctgaact

SEQ ID NO: 558200 - DNA, 15 bp, Homo sapiens
accttatctgaactc

SEQ ID NO: 558201 - DNA, 15 bp, Homo sapiens
ccttatctgaactcc

SEQ ID NO: 558202 - DNA, 15 bp, Homo sapiens
cttatctgaactcct

SEQ ID NO: 558203 - DNA, 15 bp, Homo sapiens
ttatctgaactcctt

SEQ ID NO: 558204 - DNA, 15 bp, Homo sapiens
tatctgaactccttg

SEQ ID NO: 558205 - DNA, 15 bp, Homo sapiens
atctgaactccttgg

SEQ ID NO: 558206 - DNA, 15 bp, Homo sapiens
tctgaactccttggt

SEQ ID NO: 558207 - DNA, 15 bp, Homo sapiens
ctgaactccttggtc

SEQ ID NO: 558208 - DNA, 15 bp, Homo sapiens
tgaactccttggtct

SEQ ID NO: 558209 - DNA, 15 bp, Homo sapiens
gaactccttggtctg

SEQ ID NO: 558210 - DNA, 15 bp, Homo sapiens
aactccttggtctga

SEQ ID NO: 558211 - DNA, 15 bp, Homo sapiens
actccttggtctgaa

SEQ ID NO: 558212 - DNA, 15 bp, Homo sapiens
ctccttggtctgaag

SEQ ID NO: 558213 - DNA, 15 bp, Homo sapiens
tccttggtctgaagg

SEQ ID NO: 558214 - DNA, 15 bp, Homo sapiens
ccttggtctgaaggc

SEQ ID NO: 558215 - DNA, 15 bp, Homo sapiens
cttggtctgaaggcc

SEQ ID NO: 558216 - DNA, 15 bp, Homo sapiens
ttggtctgaaggcct

SEQ ID NO: 558217 - DNA, 15 bp, Homo sapiens
tggtctgaaggcctg

SEQ ID NO: 558218 - DNA, 15 bp, Homo sapiens
ggtctgaaggcctgg

SEQ ID NO: 558219 - DNA, 15 bp, Homo sapiens
gtctgaaggcctggt

SEQ ID NO: 558220 - DNA, 15 bp, Homo sapiens
tctgaaggcctggtt

SEQ ID NO: 558221 - DNA, 15 bp, Homo sapiens
ctgaaggcctggttt

SEQ ID NO: 558222 - DNA, 15 bp, Homo sapiens
tgaaggcctggtttg

SEQ ID NO: 558223 - DNA, 15 bp, Homo sapiens
gaaggcctggtttgg

SEQ ID NO: 558224 - DNA, 15 bp, Homo sapiens
aaggcctggtttgga

SEQ ID NO: 558225 - DNA, 15 bp, Homo sapiens
aggcctggtttggag

SEQ ID NO: 558226 - DNA, 15 bp, Homo sapiens
ggcctggtttggagc

SEQ ID NO: 558227 - DNA, 15 bp, Homo sapiens
gcctggtttggagct

SEQ ID NO: 558228 - DNA, 15 bp, Homo sapiens
cctggtttggagctc

SEQ ID NO: 558229 - DNA, 15 bp, Homo sapiens
ctggtttggagctct

SEQ ID NO: 558230 - DNA, 15 bp, Homo sapiens
tggtttggagctctt

SEQ ID NO: 558231 - DNA, 15 bp, Homo sapiens
ggtttggagctcttg

SEQ ID NO: 558232 - DNA, 15 bp, Homo sapiens
gtttggagctcttga

SEQ ID NO: 558233 - DNA, 15 bp, Homo sapiens
tttggagctcttgag

SEQ ID NO: 558234 - DNA, 15 bp, Homo sapiens
ttggagctcttgaga

SEQ ID NO: 558235 - DNA, 15 bp, Homo sapiens
tggagctcttgagag

SEQ ID NO: 558236 - DNA, 15 bp, Homo sapiens
ggagctcttgagaga

SEQ ID NO: 558237 - DNA, 15 bp, Homo sapiens
gagctcttgagagaa

SEQ ID NO: 558238 - DNA, 15 bp, Homo sapiens
agctcttgagagaac

SEQ ID NO: 558239 - DNA, 15 bp, Homo sapiens
gctcttgagagaact

SEQ ID NO: 558240 - DNA, 15 bp, Homo sapiens
ctcttgagagaactg

SEQ ID NO: 558241 - DNA, 15 bp, Homo sapiens
tcttgagagaactgg

SEQ ID NO: 558242 - DNA, 15 bp, Homo sapiens
cttgagagaactggc

SEQ ID NO: 558243 - DNA, 15 bp, Homo sapiens
ttgagagaactggct

SEQ ID NO: 558244 - DNA, 15 bp, Homo sapiens
tgagagaactggctg

SEQ ID NO: 558245 - DNA, 15 bp, Homo sapiens
gagagaactggctgt

SEQ ID NO: 558246 - DNA, 15 bp, Homo sapiens
agagaactggctgtc

SEQ ID NO: 558247 - DNA, 15 bp, Homo sapiens
gagaactggctgtct

SEQ ID NO: 558248 - DNA, 15 bp, Homo sapiens
agaactggctgtctc

SEQ ID NO: 558249 - DNA, 15 bp, Homo sapiens
gaactggctgtctcc

SEQ ID NO: 558250 - DNA, 15 bp, Homo sapiens
aactggctgtctccc

SEQ ID NO: 558251 - DNA, 15 bp, Homo sapiens
actggctgtctccca

SEQ ID NO: 558252 - DNA, 15 bp, Homo sapiens
ctggctgtctcccag

SEQ ID NO: 558253 - DNA, 15 bp, Homo sapiens
tggctgtctcccagg

SEQ ID NO: 558254 - DNA, 15 bp, Homo sapiens
ggctgtctcccaggc

SEQ ID NO: 558255 - DNA, 15 bp, Homo sapiens
gctgtctcccaggct

SEQ ID NO: 558256 - DNA, 15 bp, Homo sapiens
ctgtctcccaggctg

SEQ ID NO: 558257 - DNA, 15 bp, Homo sapiens
tgtctcccaggctgc

SEQ ID NO: 558258 - DNA, 15 bp, Homo sapiens
gtctcccaggctgcc

SEQ ID NO: 558259 - DNA, 15 bp, Homo sapiens
tctcccaggctgcca

SEQ ID NO: 558260 - DNA, 15 bp, Homo sapiens
ctcccaggctgccag

SEQ ID NO: 558261 - DNA, 15 bp, Homo sapiens
tcccaggctgccaga

SEQ ID NO: 558262 - DNA, 15 bp, Homo sapiens
cccaggctgccagaa

SEQ ID NO: 558263 - DNA, 15 bp, Homo sapiens
ccaggctgccagaac

SEQ ID NO: 558264 - DNA, 15 bp, Homo sapiens
caggctgccagaacc

SEQ ID NO: 558265 - DNA, 15 bp, Homo sapiens
aggctgccagaaccg

SEQ ID NO: 558266 - DNA, 15 bp, Homo sapiens
ggctgccagaaccga

SEQ ID NO: 558267 - DNA, 15 bp, Homo sapiens
gctgccagaaccgat

SEQ ID NO: 558268 - DNA, 15 bp, Homo sapiens
ctgccagaaccgatg

SEQ ID NO: 558269 - DNA, 15 bp, Homo sapiens
tgccagaaccgatgc

SEQ ID NO: 558270 - DNA, 15 bp, Homo sapiens
gccagaaccgatgct

SEQ ID NO: 558271 - DNA, 15 bp, Homo sapiens
ccagaaccgatgctt

SEQ ID NO: 558272 - DNA, 15 bp, Homo sapiens
cagaaccgatgcttc

SEQ ID NO: 558273 - DNA, 15 bp, Homo sapiens
agaaccgatgcttcc

SEQ ID NO: 558274 - DNA, 15 bp, Homo sapiens
gaaccgatgcttcct

SEQ ID NO: 558275 - DNA, 15 bp, Homo sapiens
aaccgatgcttcctg

SEQ ID NO: 558276 - DNA, 15 bp, Homo sapiens
accgatgcttcctgc

SEQ ID NO: 558277 - DNA, 15 bp, Homo sapiens
ccgatgcttcctgct

SEQ ID NO: 558278 - DNA, 15 bp, Homo sapiens
cgatgcttcctgctc

SEQ ID NO: 558279 - DNA, 15 bp, Homo sapiens
gatgcttcctgctca

SEQ ID NO: 558280 - DNA, 15 bp, Homo sapiens
atgcttcctgctcag

SEQ ID NO: 558281 - DNA, 15 bp, Homo sapiens
tgcttcctgctcagt

SEQ ID NO: 558282 - DNA, 15 bp, Homo sapiens
gcttcctgctcagta

SEQ ID NO: 558283 - DNA, 15 bp, Homo sapiens
cttcctgctcagtat

SEQ ID NO: 558284 - DNA, 15 bp, Homo sapiens
ttcctgctcagtata

SEQ ID NO: 558285 - DNA, 15 bp, Homo sapiens
tcctgctcagtataa

SEQ ID NO: 558286 - DNA, 15 bp, Homo sapiens
cctgctcagtataat

SEQ ID NO: 558287 - DNA, 15 bp, Homo sapiens
ctgctcagtataatg

SEQ ID NO: 558288 - DNA, 15 bp, Homo sapiens
tgctcagtataatgg

SEQ ID NO: 558289 - DNA, 15 bp, Homo sapiens
gctcagtataatggc

SEQ ID NO: 558290 - DNA, 15 bp, Homo sapiens
ctcagtataatggcg

SEQ ID NO: 558291 - DNA, 15 bp, Homo sapiens
tcagtataatggcgg

SEQ ID NO: 558292 - DNA, 15 bp, Homo sapiens
cagtataatggcggc

SEQ ID NO: 558293 - DNA, 15 bp, Homo sapiens
agtataatggcggct

SEQ ID NO: 558294 - DNA, 15 bp, Homo sapiens
gtataatggcggcta

SEQ ID NO: 558295 - DNA, 15 bp, Homo sapiens
tataatggcggctac

SEQ ID NO: 558296 - DNA, 15 bp, Homo sapiens
ataatggcggctaca

SEQ ID NO: 558297 - DNA, 15 bp, Homo sapiens
taatggcggctacag

SEQ ID NO: 558298 - DNA, 15 bp, Homo sapiens
aatggcggctacagc

SEQ ID NO: 558299 - DNA, 15 bp, Homo sapiens
atggcggctacagct

SEQ ID NO: 558300 - DNA, 15 bp, Homo sapiens
tggcggctacagctt

SEQ ID NO: 558301 - DNA, 15 bp, Homo sapiens
ggcggctacagcttc

SEQ ID NO: 558302 - DNA, 15 bp, Homo sapiens
gcggctacagcttct

SEQ ID NO: 558303 - DNA, 15 bp, Homo sapiens
cggctacagcttctc

SEQ ID NO: 558304 - DNA, 15 bp, Homo sapiens
ggctacagcttctcc

SEQ ID NO: 558305 - DNA, 15 bp, Homo sapiens
gctacagcttctcct

SEQ ID NO: 558306 - DNA, 15 bp, Homo sapiens
ctacagcttctcctt

SEQ ID NO: 558307 - DNA, 15 bp, Homo sapiens
tacagcttctccttg

SEQ ID NO: 558308 - DNA, 15 bp, Homo sapiens
acagcttctccttgg

SEQ ID NO: 558309 - DNA, 15 bp, Homo sapiens
cagcttctccttggc

SEQ ID NO: 558310 - DNA, 15 bp, Homo sapiens
agcttctccttggcc

SEQ ID NO: 558311 - DNA, 15 bp, Homo sapiens
gcttctccttggcct

SEQ ID NO: 558312 - DNA, 15 bp, Homo sapiens
cttctccttggcctt

SEQ ID NO: 558313 - DNA, 15 bp, Homo sapiens
ttctccttggccttc

SEQ ID NO: 558314 - DNA, 15 bp, Homo sapiens
tctccttggccttcc

SEQ ID NO: 558315 - DNA, 15 bp, Homo sapiens
ctccttggccttccc

SEQ ID NO: 558316 - DNA, 15 bp, Homo sapiens
tccttggccttccca

SEQ ID NO: 558317 - DNA, 15 bp, Homo sapiens
ccttggccttcccat

SEQ ID NO: 558318 - DNA, 15 bp, Homo sapiens
cttggccttcccatc

SEQ ID NO: 558319 - DNA, 15 bp, Homo sapiens
ttggccttcccatcg

SEQ ID NO: 558320 - DNA, 15 bp, Homo sapiens
tggccttcccatcgt

SEQ ID NO: 558321 - DNA, 15 bp, Homo sapiens
ggccttcccatcgtc

SEQ ID NO: 558322 - DNA, 15 bp, Homo sapiens
gccttcccatcgtct

SEQ ID NO: 558323 - DNA, 15 bp, Homo sapiens
ccttcccatcgtctc

SEQ ID NO: 558324 - DNA, 15 bp, Homo sapiens
cttcccatcgtctcc

SEQ ID NO: 558325 - DNA, 15 bp, Homo sapiens
ttcccatcgtctcct

SEQ ID NO: 558326 - DNA, 15 bp, Homo sapiens
tcccatcgtctcctt

SEQ ID NO: 558327 - DNA, 15 bp, Homo sapiens
cccatcgtctccttt

SEQ ID NO: 558328 - DNA, 15 bp, Homo sapiens
ccatcgtctcctttg

SEQ ID NO: 558329 - DNA, 15 bp, Homo sapiens
catcgtctcctttgg

SEQ ID NO: 558330 - DNA, 15 bp, Homo sapiens
atcgtctcctttggt

SEQ ID NO: 558331 - DNA, 15 bp, Homo sapiens
tcgtctcctttggtc

SEQ ID NO: 558332 - DNA, 15 bp, Homo sapiens
cgtctcctttggtcc

SEQ ID NO: 558333 - DNA, 15 bp, Homo sapiens
gtctcctttggtcct

SEQ ID NO: 558334 - DNA, 15 bp, Homo sapiens
tctcctttggtcctg

SEQ ID NO: 558335 - DNA, 15 bp, Homo sapiens
ctcctttggtcctgc

SEQ ID NO: 558336 - DNA, 15 bp, Homo sapiens
tcctttggtcctgct

SEQ ID NO: 558337 - DNA, 15 bp, Homo sapiens
cctttggtcctgctg

SEQ ID NO: 558338 - DNA, 15 bp, Homo sapiens
ctttggtcctgctgc

SEQ ID NO: 558339 - DNA, 15 bp, Homo sapiens
tttggtcctgctgct

SEQ ID NO: 558340 - DNA, 15 bp, Homo sapiens
ttggtcctgctgctg

SEQ ID NO: 558341 - DNA, 15 bp, Homo sapiens
tggtcctgctgctgc

SEQ ID NO: 558342 - DNA, 15 bp, Homo sapiens
ggtcctgctgctgct

SEQ ID NO: 558343 - DNA, 15 bp, Homo sapiens
gtcctgctgctgctg

SEQ ID NO: 558344 - DNA, 15 bp, Homo sapiens
tcctgctgctgctgg

SEQ ID NO: 558345 - DNA, 15 bp, Homo sapiens
cctgctgctgctgga

SEQ ID NO: 558346 - DNA, 15 bp, Homo sapiens
ctgctgctgctggag

SEQ ID NO: 558347 - DNA, 15 bp, Homo sapiens
tgctgctgctggagt

SEQ ID NO: 558348 - DNA, 15 bp, Homo sapiens
gctgctgctggagtg

SEQ ID NO: 558349 - DNA, 15 bp, Homo sapiens
ctgctgctggagtgg

SEQ ID NO: 558350 - DNA, 15 bp, Homo sapiens
tgctgctggagtggc

SEQ ID NO: 558351 - DNA, 15 bp, Homo sapiens
gctgctggagtggct

SEQ ID NO: 558352 - DNA, 15 bp, Homo sapiens
ctgctggagtggctg

SEQ ID NO: 558353 - DNA, 15 bp, Homo sapiens
tgctggagtggctga

SEQ ID NO: 558354 - DNA, 15 bp, Homo sapiens
gctggagtggctgag

SEQ ID NO: 558355 - DNA, 15 bp, Homo sapiens
ctggagtggctgagc

SEQ ID NO: 558356 - DNA, 15 bp, Homo sapiens
tggagtggctgagca

SEQ ID NO: 558357 - DNA, 15 bp, Homo sapiens
ggagtggctgagcag

SEQ ID NO: 558358 - DNA, 15 bp, Homo sapiens
gagtggctgagcagc

SEQ ID NO: 558359 - DNA, 15 bp, Homo sapiens
agtggctgagcagcg

SEQ ID NO: 558360 - DNA, 15 bp, Homo sapiens
gtggctgagcagcgg

SEQ ID NO: 558361 - DNA, 15 bp, Homo sapiens
tggctgagcagcggg

SEQ ID NO: 558362 - DNA, 15 bp, Homo sapiens
ggctgagcagcgggc

SEQ ID NO: 558363 - DNA, 15 bp, Homo sapiens
gctgagcagcgggca

SEQ ID NO: 558364 - DNA, 15 bp, Homo sapiens
ctgagcagcgggcac

SEQ ID NO: 558365 - DNA, 15 bp, Homo sapiens
tgagcagcgggcact

SEQ ID NO: 558366 - DNA, 15 bp, Homo sapiens
gagcagcgggcactg

SEQ ID NO: 558367 - DNA, 15 bp, Homo sapiens
agcagcgggcactgg

SEQ ID NO: 558368 - DNA, 15 bp, Homo sapiens
gcagcgggcactggg

SEQ ID NO: 558369 - DNA, 15 bp, Homo sapiens
cagcgggcactgggt

SEQ ID NO: 558370 - DNA, 15 bp, Homo sapiens
agcgggcactgggtg

SEQ ID NO: 558371 - DNA, 15 bp, Homo sapiens
gcgggcactgggtgt

SEQ ID NO: 558372 - DNA, 15 bp, Homo sapiens
cgggcactgggtgtg

SEQ ID NO: 558373 - DNA, 15 bp, Homo sapiens
gggcactgggtgtga

SEQ ID NO: 558374 - DNA, 15 bp, Homo sapiens
ggcactgggtgtgac

SEQ ID NO: 558375 - DNA, 15 bp, Homo sapiens
gcactgggtgtgaca

SEQ ID NO: 558376 - DNA, 15 bp, Homo sapiens
cactgggtgtgacag

SEQ ID NO: 558377 - DNA, 15 bp, Homo sapiens
actgggtgtgacagg

SEQ ID NO: 558378 - DNA, 15 bp, Homo sapiens
ctgggtgtgacaggg

SEQ ID NO: 558379 - DNA, 15 bp, Homo sapiens
tgggtgtgacagggt

SEQ ID NO: 558380 - DNA, 15 bp, Homo sapiens
gggtgtgacagggtg

SEQ ID NO: 558381 - DNA, 15 bp, Homo sapiens
ggtgtgacagggtgg

SEQ ID NO: 558382 - DNA, 15 bp, Homo sapiens
gtgtgacagggtggc

SEQ ID NO: 558383 - DNA, 15 bp, Homo sapiens
tgtgacagggtggca

SEQ ID NO: 558384 - DNA, 15 bp, Homo sapiens
gtgacagggtggcac

SEQ ID NO: 558385 - DNA, 15 bp, Homo sapiens
tgacagggtggcacc

SEQ ID NO: 558386 - DNA, 15 bp, Homo sapiens
gacagggtggcacct

SEQ ID NO: 558387 - DNA, 15 bp, Homo sapiens
acagggtggcacctc

SEQ ID NO: 558388 - DNA, 15 bp, Homo sapiens
cagggtggcacctcc

SEQ ID NO: 558389 - DNA, 15 bp, Homo sapiens
agggtggcacctccc

SEQ ID NO: 558390 - DNA, 15 bp, Homo sapiens
gggtggcacctcccc

SEQ ID NO: 558391 - DNA, 15 bp, Homo sapiens
ggtggcacctccccc

SEQ ID NO: 558392 - DNA, 15 bp, Homo sapiens
gtggcacctccccca

SEQ ID NO: 558393 - DNA, 15 bp, Homo sapiens
tggcacctcccccaa

SEQ ID NO: 558394 - DNA, 15 bp, Homo sapiens
ggcacctcccccaag

SEQ ID NO: 558395 - DNA, 15 bp, Homo sapiens
gcacctcccccaagt

SEQ ID NO: 558396 - DNA, 15 bp, Homo sapiens
cacctcccccaagta

SEQ ID NO: 558397 - DNA, 15 bp, Homo sapiens
acctcccccaagtat

SEQ ID NO: 558398 - DNA, 15 bp, Homo sapiens
cctcccccaagtatg

SEQ ID NO: 558399 - DNA, 15 bp, Homo sapiens
ctcccccaagtatgc

SEQ ID NO: 558400 - DNA, 15 bp, Homo sapiens
tcccccaagtatgct

SEQ ID NO: 558401 - DNA, 15 bp, Homo sapiens
cccccaagtatgctg

SEQ ID NO: 558402 - DNA, 15 bp, Homo sapiens
ccccaagtatgctgg

SEQ ID NO: 558403 - DNA, 15 bp, Homo sapiens
cccaagtatgctgga

SEQ ID NO: 558404 - DNA, 15 bp, Homo sapiens
ccaagtatgctggag

SEQ ID NO: 558405 - DNA, 15 bp, Homo sapiens
caagtatgctggagg

SEQ ID NO: 558406 - DNA, 15 bp, Homo sapiens
aagtatgctggaggt

SEQ ID NO: 558407 - DNA, 15 bp, Homo sapiens
agtatgctggaggtg

SEQ ID NO: 558408 - DNA, 15 bp, Homo sapiens
gtatgctggaggtgc

SEQ ID NO: 558409 - DNA, 15 bp, Homo sapiens
tatgctggaggtgcg

SEQ ID NO: 558410 - DNA, 15 bp, Homo sapiens
atgctggaggtgcgt

SEQ ID NO: 558411 - DNA, 15 bp, Homo sapiens
tgctggaggtgcgtg

SEQ ID NO: 558412 - DNA, 15 bp, Homo sapiens
gctggaggtgcgtga

SEQ ID NO: 558413 - DNA, 15 bp, Homo sapiens
ctggaggtgcgtgat

SEQ ID NO: 558414 - DNA, 15 bp, Homo sapiens
tggaggtgcgtgatg

SEQ ID NO: 558415 - DNA, 15 bp, Homo sapiens
ggaggtgcgtgatgc

SEQ ID NO: 558416 - DNA, 15 bp, Homo sapiens
gaggtgcgtgatgct

SEQ ID NO: 558417 - DNA, 15 bp, Homo sapiens
aggtgcgtgatgctg

SEQ ID NO: 558418 - DNA, 15 bp, Homo sapiens
ggtgcgtgatgctgg

SEQ ID NO: 558419 - DNA, 15 bp, Homo sapiens
gtgcgtgatgctggg

SEQ ID NO: 558420 - DNA, 15 bp, Homo sapiens
tgcgtgatgctgggc

SEQ ID NO: 558421 - DNA, 15 bp, Homo sapiens
gcgtgatgctgggct

SEQ ID NO: 558422 - DNA, 15 bp, Homo sapiens
cgtgatgctgggctg

SEQ ID NO: 558423 - DNA, 15 bp, Homo sapiens
gtgatgctgggctgg

SEQ ID NO: 558424 - DNA, 15 bp, Homo sapiens
tgatgctgggctgga

SEQ ID NO: 558425 - DNA, 15 bp, Homo sapiens
gatgctgggctggag

SEQ ID NO: 558426 - DNA, 15 bp, Homo sapiens
atgctgggctggagg

SEQ ID NO: 558427 - DNA, 15 bp, Homo sapiens
tgctgggctggaggg

SEQ ID NO: 558428 - DNA, 15 bp, Homo sapiens
gctgggctggagggc

SEQ ID NO: 558429 - DNA, 15 bp, Homo sapiens
ctgggctggagggca

SEQ ID NO: 558430 - DNA, 15 bp, Homo sapiens
tgggctggagggcat

SEQ ID NO: 558431 - DNA, 15 bp, Homo sapiens
gggctggagggcatg

SEQ ID NO: 558432 - DNA, 15 bp, Homo sapiens
ggctggagggcatgc

SEQ ID NO: 558433 - DNA, 15 bp, Homo sapiens
gctggagggcatgca

SEQ ID NO: 558434 - DNA, 15 bp, Homo sapiens
ctggagggcatgcag

SEQ ID NO: 558435 - DNA, 15 bp, Homo sapiens
tggagggcatgcaga

SEQ ID NO: 558436 - DNA, 15 bp, Homo sapiens
ggagggcatgcagag

SEQ ID NO: 558437 - DNA, 15 bp, Homo sapiens
gagggcatgcagagt

SEQ ID NO: 558438 - DNA, 15 bp, Homo sapiens
agggcatgcagagtg

SEQ ID NO: 558439 - DNA, 15 bp, Homo sapiens
gggcatgcagagtgt

SEQ ID NO: 558440 - DNA, 15 bp, Homo sapiens
ggcatgcagagtgtg

SEQ ID NO: 558441 - DNA, 15 bp, Homo sapiens
gcatgcagagtgtgt

SEQ ID NO: 558442 - DNA, 15 bp, Homo sapiens
catgcagagtgtgtt

SEQ ID NO: 558443 - DNA, 15 bp, Homo sapiens
atgcagagtgtgttt

SEQ ID NO: 558444 - DNA, 15 bp, Homo sapiens
tgcagagtgtgtttg

SEQ ID NO: 558445 - DNA, 15 bp, Homo sapiens
gcagagtgtgtttgc

SEQ ID NO: 558446 - DNA, 15 bp, Homo sapiens
cagagtgtgtttgcc

SEQ ID NO: 558447 - DNA, 15 bp, Homo sapiens
agagtgtgtttgcca

SEQ ID NO: 558448 - DNA, 15 bp, Homo sapiens
gagtgtgtttgccag

SEQ ID NO: 558449 - DNA, 15 bp, Homo sapiens
agtgtgtttgccagc

SEQ ID NO: 558450 - DNA, 15 bp, Homo sapiens
gtgtgtttgccagcc

SEQ ID NO: 558451 - DNA, 15 bp, Homo sapiens
tgtgtttgccagcca

SEQ ID NO: 558452 - DNA, 15 bp, Homo sapiens
gtgtttgccagccag

SEQ ID NO: 558453 - DNA, 15 bp, Homo sapiens
tgtttgccagccagc

SEQ ID NO: 558454 - DNA, 15 bp, Homo sapiens
gtttgccagccagct

SEQ ID NO: 558455 - DNA, 15 bp, Homo sapiens
tttgccagccagctt

SEQ ID NO: 558456 - DNA, 15 bp, Homo sapiens
ttgccagccagcttc

SEQ ID NO: 558457 - DNA, 15 bp, Homo sapiens
tgccagccagcttca

SEQ ID NO: 558458 - DNA, 15 bp, Homo sapiens
gccagccagcttcag

SEQ ID NO: 558459 - DNA, 15 bp, Homo sapiens
ccagccagcttcagg

SEQ ID NO: 558460 - DNA, 15 bp, Homo sapiens
cagccagcttcaggg

SEQ ID NO: 558461 - DNA, 15 bp, Homo sapiens
agccagcttcagggc

SEQ ID NO: 558462 - DNA, 15 bp, Homo sapiens
gccagcttcagggcg

SEQ ID NO: 558463 - DNA, 15 bp, Homo sapiens
ccagcttcagggcgc

SEQ ID NO: 558464 - DNA, 15 bp, Homo sapiens
cagcttcagggcgcc

SEQ ID NO: 558465 - DNA, 15 bp, Homo sapiens
agcttcagggcgcca

SEQ ID NO: 558466 - DNA, 15 bp, Homo sapiens
gcttcagggcgccag

SEQ ID NO: 558467 - DNA, 15 bp, Homo sapiens
cttcagggcgccagg

SEQ ID NO: 558468 - DNA, 15 bp, Homo sapiens
ttcagggcgccaggt

SEQ ID NO: 558469 - DNA, 15 bp, Homo sapiens
tcagggcgccaggtg

SEQ ID NO: 558470 - DNA, 15 bp, Homo sapiens
cagggcgccaggtgg

SEQ ID NO: 558471 - DNA, 15 bp, Homo sapiens
agggcgccaggtggc

SEQ ID NO: 558472 - DNA, 15 bp, Homo sapiens
gggcgccaggtggcc

SEQ ID NO: 558473 - DNA, 15 bp, Homo sapiens
ggcgccaggtggcca

SEQ ID NO: 558474 - DNA, 15 bp, Homo sapiens
gcgccaggtggccat

SEQ ID NO: 558475 - DNA, 15 bp, Homo sapiens
cgccaggtggccatg

SEQ ID NO: 558476 - DNA, 15 bp, Homo sapiens
gccaggtggccatgg

SEQ ID NO: 558477 - DNA, 15 bp, Homo sapiens
ccaggtggccatggg

SEQ ID NO: 558478 - DNA, 15 bp, Homo sapiens
caggtggccatgggt

SEQ ID NO: 558479 - DNA, 15 bp, Homo sapiens
aggtggccatgggtg

SEQ ID NO: 558480 - DNA, 15 bp, Homo sapiens
ggtggccatgggtgg

SEQ ID NO: 558481 - DNA, 15 bp, Homo sapiens
gtggccatgggtggg

SEQ ID NO: 558482 - DNA, 15 bp, Homo sapiens
tggccatgggtggga

SEQ ID NO: 558483 - DNA, 15 bp, Homo sapiens
ggccatgggtgggac

SEQ ID NO: 558484 - DNA, 15 bp, Homo sapiens
gccatgggtgggact

SEQ ID NO: 558485 - DNA, 15 bp, Homo sapiens
ccatgggtgggactt

SEQ ID NO: 558486 - DNA, 15 bp, Homo sapiens
catgggtgggacttc

SEQ ID NO: 558487 - DNA, 15 bp, Homo sapiens
atgggtgggacttca

SEQ ID NO: 558488 - DNA, 15 bp, Homo sapiens
tgggtgggacttcac

SEQ ID NO: 558489 - DNA, 15 bp, Homo sapiens
gggtgggacttcacc

SEQ ID NO: 558490 - DNA, 15 bp, Homo sapiens
ggtgggacttcaccc

SEQ ID NO: 558491 - DNA, 15 bp, Homo sapiens
gtgggacttcacccc

SEQ ID NO: 558492 - DNA, 15 bp, Homo sapiens
tgggacttcacccct

SEQ ID NO: 558493 - DNA, 15 bp, Homo sapiens
gggacttcacccctc

SEQ ID NO: 558494 - DNA, 15 bp, Homo sapiens
ggacttcacccctcc

SEQ ID NO: 558495 - DNA, 15 bp, Homo sapiens
gacttcacccctcca

SEQ ID NO: 558496 - DNA, 15 bp, Homo sapiens
acttcacccctccag

SEQ ID NO: 558497 - DNA, 15 bp, Homo sapiens
cttcacccctccaga

SEQ ID NO: 558498 - DNA, 15 bp, Homo sapiens
ttcacccctccagac

SEQ ID NO: 558499 - DNA, 15 bp, Homo sapiens
tcacccctccagaca

SEQ ID NO: 558500 - DNA, 15 bp, Homo sapiens
cacccctccagacag

SEQ ID NO: 558501 - DNA, 15 bp, Homo sapiens
acccctccagacagc

SEQ ID NO: 558502 - DNA, 15 bp, Homo sapiens
cccctccagacagct

SEQ ID NO: 558503 - DNA, 15 bp, Homo sapiens
ccctccagacagctg

SEQ ID NO: 558504 - DNA, 15 bp, Homo sapiens
cctccagacagctgc

SEQ ID NO: 558505 - DNA, 15 bp, Homo sapiens
ctccagacagctgcc

SEQ ID NO: 558506 - DNA, 15 bp, Homo sapiens
tccagacagctgccc

SEQ ID NO: 558507 - DNA, 15 bp, Homo sapiens
ccagacagctgccca

SEQ ID NO: 558508 - DNA, 15 bp, Homo sapiens
cagacagctgcccat

SEQ ID NO: 558509 - DNA, 15 bp, Homo sapiens
agacagctgcccatc

SEQ ID NO: 558510 - DNA, 15 bp, Homo sapiens
gacagctgcccatca

SEQ ID NO: 558511 - DNA, 15 bp, Homo sapiens
acagctgcccatcac

SEQ ID NO: 558512 - DNA, 15 bp, Homo sapiens
cagctgcccatcacc

SEQ ID NO: 558513 - DNA, 15 bp, Homo sapiens
agctgcccatcacca

SEQ ID NO: 558514 - DNA, 15 bp, Homo sapiens
gctgcccatcaccag

SEQ ID NO: 558515 - DNA, 15 bp, Homo sapiens
ctgcccatcaccagt

SEQ ID NO: 558516 - DNA, 15 bp, Homo sapiens
tgcccatcaccagtg

SEQ ID NO: 558517 - DNA, 15 bp, Homo sapiens
gcccatcaccagtgc

SEQ ID NO: 558518 - DNA, 15 bp, Homo sapiens
cccatcaccagtgct

SEQ ID NO: 558519 - DNA, 15 bp, Homo sapiens
ccatcaccagtgctg

SEQ ID NO: 558520 - DNA, 15 bp, Homo sapiens
catcaccagtgctgc

SEQ ID NO: 558521 - DNA, 15 bp, Homo sapiens
atcaccagtgctgca

SEQ ID NO: 558522 - DNA, 15 bp, Homo sapiens
tcaccagtgctgcaa

SEQ ID NO: 558523 - DNA, 15 bp, Homo sapiens
caccagtgctgcaaa

SEQ ID NO: 558524 - DNA, 15 bp, Homo sapiens
accagtgctgcaaaa

SEQ ID NO: 558525 - DNA, 15 bp, Homo sapiens
ccagtgctgcaaaat

SEQ ID NO: 558526 - DNA, 15 bp, Homo sapiens
cagtgctgcaaaata

SEQ ID NO: 558527 - DNA, 15 bp, Homo sapiens
agtgctgcaaaatac

SEQ ID NO: 558528 - DNA, 15 bp, Homo sapiens
gtgctgcaaaatacc

SEQ ID NO: 558529 - DNA, 15 bp, Homo sapiens
tgctgcaaaatacca

SEQ ID NO: 558530 - DNA, 15 bp, Homo sapiens
gctgcaaaataccag

SEQ ID NO: 558531 - DNA, 15 bp, Homo sapiens
ctgcaaaataccagg

SEQ ID NO: 558532 - DNA, 15 bp, Homo sapiens
tgcaaaataccaggt

SEQ ID NO: 558533 - DNA, 15 bp, Homo sapiens
gcaaaataccaggtg

SEQ ID NO: 558534 - DNA, 15 bp, Homo sapiens
caaaataccaggtgc

SEQ ID NO: 558535 - DNA, 15 bp, Homo sapiens
aaaataccaggtgct

SEQ ID NO: 558536 - DNA, 15 bp, Homo sapiens
aaataccaggtgctg

SEQ ID NO: 558537 - DNA, 15 bp, Homo sapiens
aataccaggtgctga

SEQ ID NO: 558538 - DNA, 15 bp, Homo sapiens
ataccaggtgctgat

SEQ ID NO: 558539 - DNA, 15 bp, Homo sapiens
taccaggtgctgatc

SEQ ID NO: 558540 - DNA, 15 bp, Homo sapiens
accaggtgctgatca

SEQ ID NO: 558541 - DNA, 15 bp, Homo sapiens
ccaggtgctgatcaa

SEQ ID NO: 558542 - DNA, 15 bp, Homo sapiens
caggtgctgatcaag

SEQ ID NO: 558543 - DNA, 15 bp, Homo sapiens
aggtgctgatcaagt

SEQ ID NO: 558544 - DNA, 15 bp, Homo sapiens
ggtgctgatcaagtt

SEQ ID NO: 558545 - DNA, 15 bp, Homo sapiens
gtgctgatcaagttc

SEQ ID NO: 558546 - DNA, 15 bp, Homo sapiens
tgctgatcaagttct

SEQ ID NO: 558547 - DNA, 15 bp, Homo sapiens
gctgatcaagttctg

SEQ ID NO: 558548 - DNA, 15 bp, Homo sapiens
ctgatcaagttctgt

SEQ ID NO: 558549 - DNA, 15 bp, Homo sapiens
tgatcaagttctgta

SEQ ID NO: 558550 - DNA, 15 bp, Homo sapiens
gatcaagttctgtag

SEQ ID NO: 558551 - DNA, 15 bp, Homo sapiens
atcaagttctgtagt

SEQ ID NO: 558552 - DNA, 15 bp, Homo sapiens
tcaagttctgtagtt

SEQ ID NO: 558553 - DNA, 15 bp, Homo sapiens
caagttctgtagttc

SEQ ID NO: 558554 - DNA, 15 bp, Homo sapiens
aagttctgtagttct

SEQ ID NO: 558555 - DNA, 15 bp, Homo sapiens
agttctgtagttcta

SEQ ID NO: 558556 - DNA, 15 bp, Homo sapiens
gttctgtagttctag

SEQ ID NO: 558557 - DNA, 15 bp, Homo sapiens
ttctgtagttctagg

SEQ ID NO: 558558 - DNA, 15 bp, Homo sapiens
tctgtagttctaggc

SEQ ID NO: 558559 - DNA, 15 bp, Homo sapiens
ctgtagttctaggct

SEQ ID NO: 558560 - DNA, 15 bp, Homo sapiens
tgtagttctaggcta

SEQ ID NO: 558561 - DNA, 15 bp, Homo sapiens
gtagttctaggctaa

SEQ ID NO: 558562 - DNA, 15 bp, Homo sapiens
tagttctaggctaag

SEQ ID NO: 558563 - DNA, 15 bp, Homo sapiens
agttctaggctaagt

SEQ ID NO: 558564 - DNA, 15 bp, Homo sapiens
gttctaggctaagtt

SEQ ID NO: 558565 - DNA, 15 bp, Homo sapiens
ttctaggctaagttg

SEQ ID NO: 558566 - DNA, 15 bp, Homo sapiens
tctaggctaagttgg

SEQ ID NO: 558567 - DNA, 15 bp, Homo sapiens
ctaggctaagttgga

SEQ ID NO: 558568 - DNA, 15 bp, Homo sapiens
taggctaagttggat

SEQ ID NO: 558569 - DNA, 15 bp, Homo sapiens
aggctaagttggatg

SEQ ID NO: 558570 - DNA, 15 bp, Homo sapiens
ggctaagttggatga

SEQ ID NO: 558571 - DNA, 15 bp, Homo sapiens
gctaagttggatgat

SEQ ID NO: 558572 - DNA, 15 bp, Homo sapiens
ctaagttggatgatc

SEQ ID NO: 558573 - DNA, 15 bp, Homo sapiens
taagttggatgatct

SEQ ID NO: 558574 - DNA, 15 bp, Homo sapiens
aagttggatgatctg

SEQ ID NO: 558575 - DNA, 15 bp, Homo sapiens
agttggatgatctgc

SEQ ID NO: 558576 - DNA, 15 bp, Homo sapiens
gttggatgatctgct

SEQ ID NO: 558577 - DNA, 15 bp, Homo sapiens
ttggatgatctgctt

SEQ ID NO: 558578 - DNA, 15 bp, Homo sapiens
tggatgatctgcttt

SEQ ID NO: 558579 - DNA, 15 bp, Homo sapiens
ggatgatctgctttc

SEQ ID NO: 558580 - DNA, 15 bp, Homo sapiens
gatgatctgctttct

SEQ ID NO: 558581 - DNA, 15 bp, Homo sapiens
atgatctgctttctc

SEQ ID NO: 558582 - DNA, 15 bp, Homo sapiens
tgatctgctttctct

SEQ ID NO: 558583 - DNA, 15 bp, Homo sapiens
gatctgctttctctc

SEQ ID NO: 558584 - DNA, 15 bp, Homo sapiens
atctgctttctctct

SEQ ID NO: 558585 - DNA, 15 bp, Homo sapiens
tctgctttctctctt

SEQ ID NO: 558586 - DNA, 15 bp, Homo sapiens
ctgctttctctcttg

SEQ ID NO: 558587 - DNA, 15 bp, Homo sapiens
tgctttctctcttgt

SEQ ID NO: 558588 - DNA, 15 bp, Homo sapiens
gctttctctcttgtg

SEQ ID NO: 558589 - DNA, 15 bp, Homo sapiens
ctttctctcttgtga

SEQ ID NO: 558590 - DNA, 15 bp, Homo sapiens
tttctctcttgtgaa

SEQ ID NO: 558591 - DNA, 15 bp, Homo sapiens
ttctctcttgtgaat

SEQ ID NO: 558592 - DNA, 15 bp, Homo sapiens
tctctcttgtgaatg

SEQ ID NO: 558593 - DNA, 15 bp, Homo sapiens
ctctcttgtgaatgt

SEQ ID NO: 558594 - DNA, 15 bp, Homo sapiens
tctcttgtgaatgtc

SEQ ID NO: 558595 - DNA, 15 bp, Homo sapiens
ctcttgtgaatgtcc

SEQ ID NO: 558596 - DNA, 15 bp, Homo sapiens
tcttgtgaatgtcca

SEQ ID NO: 558597 - DNA, 15 bp, Homo sapiens
cttgtgaatgtccat

SEQ ID NO: 558598 - DNA, 15 bp, Homo sapiens
ttgtgaatgtccata

SEQ ID NO: 558599 - DNA, 15 bp, Homo sapiens
tgtgaatgtccatac

SEQ ID NO: 558600 - DNA, 15 bp, Homo sapiens
gtgaatgtccatact

SEQ ID NO: 558601 - DNA, 15 bp, Homo sapiens
tgaatgtccatactg

SEQ ID NO: 558602 - DNA, 15 bp, Homo sapiens
gaatgtccatactgc

SEQ ID NO: 558603 - DNA, 15 bp, Homo sapiens
aatgtccatactgct

SEQ ID NO: 558604 - DNA, 15 bp, Homo sapiens
atgtccatactgctt

SEQ ID NO: 558605 - DNA, 15 bp, Homo sapiens
tgtccatactgcttc

SEQ ID NO: 558606 - DNA, 15 bp, Homo sapiens
gtccatactgcttcc

SEQ ID NO: 558607 - DNA, 15 bp, Homo sapiens
tccatactgcttcca

SEQ ID NO: 558608 - DNA, 15 bp, Homo sapiens
ccatactgcttccac

SEQ ID NO: 558609 - DNA, 15 bp, Homo sapiens
catactgcttccaca

SEQ ID NO: 558610 - DNA, 15 bp, Homo sapiens
atactgcttccacag

SEQ ID NO: 558611 - DNA, 15 bp, Homo sapiens
tactgcttccacagt

SEQ ID NO: 558612 - DNA, 15 bp, Homo sapiens
actgcttccacagtg

SEQ ID NO: 558613 - DNA, 15 bp, Homo sapiens
ctgcttccacagtga

SEQ ID NO: 558614 - DNA, 15 bp, Homo sapiens
tgcttccacagtgag

SEQ ID NO: 558615 - DNA, 15 bp, Homo sapiens
gcttccacagtgagc

SEQ ID NO: 558616 - DNA, 15 bp, Homo sapiens
cttccacagtgagct

SEQ ID NO: 558617 - DNA, 15 bp, Homo sapiens
ttccacagtgagctt

SEQ ID NO: 558618 - DNA, 15 bp, Homo sapiens
tccacagtgagcttg

SEQ ID NO: 558619 - DNA, 15 bp, Homo sapiens
ccacagtgagcttgg

SEQ ID NO: 558620 - DNA, 15 bp, Homo sapiens
cacagtgagcttggg

SEQ ID NO: 558621 - DNA, 15 bp, Homo sapiens
acagtgagcttgggg

SEQ ID NO: 558622 - DNA, 15 bp, Homo sapiens
cagtgagcttggggc

SEQ ID NO: 558623 - DNA, 15 bp, Homo sapiens
agtgagcttggggcc

SEQ ID NO: 558624 - DNA, 15 bp, Homo sapiens
gtgagcttggggcca

SEQ ID NO: 558625 - DNA, 15 bp, Homo sapiens
tgagcttggggccag

SEQ ID NO: 558626 - DNA, 15 bp, Homo sapiens
gagcttggggccagg

SEQ ID NO: 558627 - DNA, 15 bp, Homo sapiens
agcttggggccaggg

SEQ ID NO: 558628 - DNA, 15 bp, Homo sapiens
gcttggggccaggga

SEQ ID NO: 558629 - DNA, 15 bp, Homo sapiens
cttggggccagggat

SEQ ID NO: 558630 - DNA, 15 bp, Homo sapiens
ttggggccagggatg

SEQ ID NO: 558631 - DNA, 15 bp, Homo sapiens
tggggccagggatgc

SEQ ID NO: 558632 - DNA, 15 bp, Homo sapiens
ggggccagggatgca

SEQ ID NO: 558633 - DNA, 15 bp, Homo sapiens
gggccagggatgcaa

SEQ ID NO: 558634 - DNA, 15 bp, Homo sapiens
ggccagggatgcaaa

SEQ ID NO: 558635 - DNA, 15 bp, Homo sapiens
gccagggatgcaaaa

SEQ ID NO: 558636 - DNA, 15 bp, Homo sapiens
ccagggatgcaaaat

SEQ ID NO: 558637 - DNA, 15 bp, Homo sapiens
cagggatgcaaaatg

SEQ ID NO: 558638 - DNA, 15 bp, Homo sapiens
agggatgcaaaatgc

SEQ ID NO: 558639 - DNA, 15 bp, Homo sapiens
gggatgcaaaatgcc

SEQ ID NO: 558640 - DNA, 15 bp, Homo sapiens
ggatgcaaaatgcca

SEQ ID NO: 558641 - DNA, 15 bp, Homo sapiens
gatgcaaaatgccac

SEQ ID NO: 558642 - DNA, 15 bp, Homo sapiens
atgcaaaatgccaca

SEQ ID NO: 558643 - DNA, 15 bp, Homo sapiens
tgcaaaatgccacag

SEQ ID NO: 558644 - DNA, 15 bp, Homo sapiens
gcaaaatgccacagg

SEQ ID NO: 558645 - DNA, 15 bp, Homo sapiens
caaaatgccacaggg

SEQ ID NO: 558646 - DNA, 15 bp, Homo sapiens
aaaatgccacagggc

SEQ ID NO: 558647 - DNA, 15 bp, Homo sapiens
aaatgccacagggcc

SEQ ID NO: 558648 - DNA, 15 bp, Homo sapiens
aatgccacagggcca

SEQ ID NO: 558649 - DNA, 15 bp, Homo sapiens
atgccacagggccac

SEQ ID NO: 558650 - DNA, 15 bp, Homo sapiens
tgccacagggccacc

SEQ ID NO: 558651 - DNA, 15 bp, Homo sapiens
gccacagggccacca

SEQ ID NO: 558652 - DNA, 15 bp, Homo sapiens
ccacagggccaccac

SEQ ID NO: 558653 - DNA, 15 bp, Homo sapiens
cacagggccaccacc

SEQ ID NO: 558654 - DNA, 15 bp, Homo sapiens
acagggccaccacct

SEQ ID NO: 558655 - DNA, 15 bp, Homo sapiens
cagggccaccacctc

SEQ ID NO: 558656 - DNA, 15 bp, Homo sapiens
agggccaccacctct

SEQ ID NO: 558657 - DNA, 15 bp, Homo sapiens
gggccaccacctctc

SEQ ID NO: 558658 - DNA, 15 bp, Homo sapiens
ggccaccacctctcc

SEQ ID NO: 558659 - DNA, 15 bp, Homo sapiens
gccaccacctctcca

SEQ ID NO: 558660 - DNA, 15 bp, Homo sapiens
ccaccacctctccat

SEQ ID NO: 558661 - DNA, 15 bp, Homo sapiens
caccacctctccatc

SEQ ID NO: 558662 - DNA, 15 bp, Homo sapiens
accacctctccatca

SEQ ID NO: 558663 - DNA, 15 bp, Homo sapiens
ccacctctccatcag

SEQ ID NO: 558664 - DNA, 15 bp, Homo sapiens
cacctctccatcagg

SEQ ID NO: 558665 - DNA, 15 bp, Homo sapiens
acctctccatcaggt

SEQ ID NO: 558666 - DNA, 15 bp, Homo sapiens
cctctccatcaggtg

SEQ ID NO: 558667 - DNA, 15 bp, Homo sapiens
ctctccatcaggtgg

SEQ ID NO: 558668 - DNA, 15 bp, Homo sapiens
tctccatcaggtgga

SEQ ID NO: 558669 - DNA, 15 bp, Homo sapiens
ctccatcaggtggaa

SEQ ID NO: 558670 - DNA, 15 bp, Homo sapiens
tccatcaggtggaag

SEQ ID NO: 558671 - DNA, 15 bp, Homo sapiens
ccatcaggtggaagt

SEQ ID NO: 558672 - DNA, 15 bp, Homo sapiens
catcaggtggaagtt

SEQ ID NO: 558673 - DNA, 15 bp, Homo sapiens
atcaggtggaagttc

SEQ ID NO: 558674 - DNA, 15 bp, Homo sapiens
tcaggtggaagttcc

SEQ ID NO: 558675 - DNA, 15 bp, Homo sapiens
caggtggaagttcct

SEQ ID NO: 558676 - DNA, 15 bp, Homo sapiens
aggtggaagttcctg

SEQ ID NO: 558677 - DNA, 15 bp, Homo sapiens
ggtggaagttcctgg

SEQ ID NO: 558678 - DNA, 15 bp, Homo sapiens
gtggaagttcctgga

SEQ ID NO: 558679 - DNA, 15 bp, Homo sapiens
tggaagttcctggac

SEQ ID NO: 558680 - DNA, 15 bp, Homo sapiens
ggaagttcctggact

SEQ ID NO: 558681 - DNA, 15 bp, Homo sapiens
gaagttcctggactc

SEQ ID NO: 558682 - DNA, 15 bp, Homo sapiens
aagttcctggactcc

SEQ ID NO: 558683 - DNA, 15 bp, Homo sapiens
agttcctggactcca

SEQ ID NO: 558684 - DNA, 15 bp, Homo sapiens
gttcctggactccat

SEQ ID NO: 558685 - DNA, 15 bp, Homo sapiens
ttcctggactccatt

SEQ ID NO: 558686 - DNA, 15 bp, Homo sapiens
tcctggactccattc

SEQ ID NO: 558687 - DNA, 15 bp, Homo sapiens
cctggactccattcc

SEQ ID NO: 558688 - DNA, 15 bp, Homo sapiens
ctggactccattcct

SEQ ID NO: 558689 - DNA, 15 bp, Homo sapiens
tggactccattcctt

SEQ ID NO: 558690 - DNA, 15 bp, Homo sapiens
ggactccattccttc

SEQ ID NO: 558691 - DNA, 15 bp, Homo sapiens
gactccattccttct

SEQ ID NO: 558692 - DNA, 15 bp, Homo sapiens
actccattccttctc

SEQ ID NO: 558693 - DNA, 15 bp, Homo sapiens
ctccattccttctcc

SEQ ID NO: 558694 - DNA, 15 bp, Homo sapiens
tccattccttctcca

SEQ ID NO: 558695 - DNA, 15 bp, Homo sapiens
ccattccttctccaa

SEQ ID NO: 558696 - DNA, 15 bp, Homo sapiens
cattccttctccaag

SEQ ID NO: 558697 - DNA, 15 bp, Homo sapiens
attccttctccaagt

SEQ ID NO: 558698 - DNA, 15 bp, Homo sapiens
ttccttctccaagta

SEQ ID NO: 558699 - DNA, 15 bp, Homo sapiens
tccttctccaagtag

SEQ ID NO: 558700 - DNA, 15 bp, Homo sapiens
ccttctccaagtagc

SEQ ID NO: 558701 - DNA, 15 bp, Homo sapiens
cttctccaagtagca

SEQ ID NO: 558702 - DNA, 15 bp, Homo sapiens
ttctccaagtagcaa

SEQ ID NO: 558703 - DNA, 15 bp, Homo sapiens
tctccaagtagcaac

SEQ ID NO: 558704 - DNA, 15 bp, Homo sapiens
ctccaagtagcaacc

SEQ ID NO: 558705 - DNA, 15 bp, Homo sapiens
tccaagtagcaacca

SEQ ID NO: 558706 - DNA, 15 bp, Homo sapiens
ccaagtagcaaccag

SEQ ID NO: 558707 - DNA, 15 bp, Homo sapiens
caagtagcaaccagc

SEQ ID NO: 558708 - DNA, 15 bp, Homo sapiens
aagtagcaaccagct

SEQ ID NO: 558709 - DNA, 15 bp, Homo sapiens
agtagcaaccagctc

SEQ ID NO: 558710 - DNA, 15 bp, Homo sapiens
gtagcaaccagctct

SEQ ID NO: 558711 - DNA, 15 bp, Homo sapiens
tagcaaccagctctt

SEQ ID NO: 558712 - DNA, 15 bp, Homo sapiens
agcaaccagctcttt

SEQ ID NO: 558713 - DNA, 15 bp, Homo sapiens
gcaaccagctctttt

SEQ ID NO: 558714 - DNA, 15 bp, Homo sapiens
caaccagctcttttg

SEQ ID NO: 558715 - DNA, 15 bp, Homo sapiens
aaccagctcttttgc

SEQ ID NO: 558716 - DNA, 15 bp, Homo sapiens
accagctcttttgca

SEQ ID NO: 558717 - DNA, 15 bp, Homo sapiens
ccagctcttttgcat

SEQ ID NO: 558718 - DNA, 15 bp, Homo sapiens
cagctcttttgcatg

SEQ ID NO: 558719 - DNA, 15 bp, Homo sapiens
agctcttttgcatgt

SEQ ID NO: 558720 - DNA, 15 bp, Homo sapiens
gctcttttgcatgtg

SEQ ID NO: 558721 - DNA, 15 bp, Homo sapiens
ctcttttgcatgtgt

SEQ ID NO: 558722 - DNA, 15 bp, Homo sapiens
tcttttgcatgtgtg

SEQ ID NO: 558723 - DNA, 15 bp, Homo sapiens
cttttgcatgtgtgc

SEQ ID NO: 558724 - DNA, 15 bp, Homo sapiens
ttttgcatgtgtgct

SEQ ID NO: 558725 - DNA, 15 bp, Homo sapiens
tttgcatgtgtgctt

SEQ ID NO: 558726 - DNA, 15 bp, Homo sapiens
ttgcatgtgtgcttg

SEQ ID NO: 558727 - DNA, 15 bp, Homo sapiens
tgcatgtgtgcttga

SEQ ID NO: 558728 - DNA, 15 bp, Homo sapiens
gcatgtgtgcttgat

SEQ ID NO: 558729 - DNA, 15 bp, Homo sapiens
catgtgtgcttgata

SEQ ID NO: 558730 - DNA, 15 bp, Homo sapiens
atgtgtgcttgatag

SEQ ID NO: 558731 - DNA, 15 bp, Homo sapiens
tgtgtgcttgatagt

SEQ ID NO: 558732 - DNA, 15 bp, Homo sapiens
gtgtgcttgatagtg

SEQ ID NO: 558733 - DNA, 15 bp, Homo sapiens
tgtgcttgatagtga

SEQ ID NO: 558734 - DNA, 15 bp, Homo sapiens
gtgcttgatagtgaa

SEQ ID NO: 558735 - DNA, 15 bp, Homo sapiens
tgcttgatagtgaag

SEQ ID NO: 558736 - DNA, 15 bp, Homo sapiens
gcttgatagtgaagc

SEQ ID NO: 558737 - DNA, 15 bp, Homo sapiens
cttgatagtgaagct

SEQ ID NO: 558738 - DNA, 15 bp, Homo sapiens
ttgatagtgaagctt

SEQ ID NO: 558739 - DNA, 15 bp, Homo sapiens
tgatagtgaagctta

SEQ ID NO: 558740 - DNA, 15 bp, Homo sapiens
gatagtgaagcttaa

SEQ ID NO: 558741 - DNA, 15 bp, Homo sapiens
atagtgaagcttaac

SEQ ID NO: 558742 - DNA, 15 bp, Homo sapiens
tagtgaagcttaaca

SEQ ID NO: 558743 - DNA, 15 bp, Homo sapiens
agtgaagcttaacac

SEQ ID NO: 558744 - DNA, 15 bp, Homo sapiens
gtgaagcttaacaca

SEQ ID NO: 558745 - DNA, 15 bp, Homo sapiens
tgaagcttaacacag

SEQ ID NO: 558746 - DNA, 15 bp, Homo sapiens
gaagcttaacacaga

SEQ ID NO: 558747 - DNA, 15 bp, Homo sapiens
aagcttaacacagaa

SEQ ID NO: 558748 - DNA, 15 bp, Homo sapiens
agcttaacacagaag

SEQ ID NO: 558749 - DNA, 15 bp, Homo sapiens
gcttaacacagaaga

SEQ ID NO: 558750 - DNA, 15 bp, Homo sapiens
cttaacacagaagac

SEQ ID NO: 558751 - DNA, 15 bp, Homo sapiens
ttaacacagaagacc

SEQ ID NO: 558752 - DNA, 15 bp, Homo sapiens
taacacagaagacct

SEQ ID NO: 558753 - DNA, 15 bp, Homo sapiens
aacacagaagacctg

SEQ ID NO: 558754 - DNA, 15 bp, Homo sapiens
acacagaagacctga

SEQ ID NO: 558755 - DNA, 15 bp, Homo sapiens
cacagaagacctgag

SEQ ID NO: 558756 - DNA, 15 bp, Homo sapiens
acagaagacctgagt

SEQ ID NO: 558757 - DNA, 15 bp, Homo sapiens
cagaagacctgagtc

SEQ ID NO: 558758 - DNA, 15 bp, Homo sapiens
agaagacctgagtcc

SEQ ID NO: 558759 - DNA, 15 bp, Homo sapiens
gaagacctgagtcct

SEQ ID NO: 558760 - DNA, 15 bp, Homo sapiens
aagacctgagtcctg

SEQ ID NO: 558761 - DNA, 15 bp, Homo sapiens
agacctgagtcctgt

SEQ ID NO: 558762 - DNA, 15 bp, Homo sapiens
gacctgagtcctgtt

SEQ ID NO: 558763 - DNA, 15 bp, Homo sapiens
acctgagtcctgttt

SEQ ID NO: 558764 - DNA, 15 bp, Homo sapiens
cctgagtcctgtttc

SEQ ID NO: 558765 - DNA, 15 bp, Homo sapiens
ctgagtcctgtttcc

SEQ ID NO: 558766 - DNA, 15 bp, Homo sapiens
tgagtcctgtttcca

SEQ ID NO: 558767 - DNA, 15 bp, Homo sapiens
gagtcctgtttccac

SEQ ID NO: 558768 - DNA, 15 bp, Homo sapiens
agtcctgtttccacc

SEQ ID NO: 558769 - DNA, 15 bp, Homo sapiens
gtcctgtttccacct

SEQ ID NO: 558770 - DNA, 15 bp, Homo sapiens
tcctgtttccacctt

SEQ ID NO: 558771 - DNA, 15 bp, Homo sapiens
cctgtttccaccttg

SEQ ID NO: 558772 - DNA, 15 bp, Homo sapiens
ctgtttccaccttga

SEQ ID NO: 558773 - DNA, 15 bp, Homo sapiens
tgtttccaccttgac

SEQ ID NO: 558774 - DNA, 15 bp, Homo sapiens
gtttccaccttgact

SEQ ID NO: 558775 - DNA, 15 bp, Homo sapiens
tttccaccttgacta

SEQ ID NO: 558776 - DNA, 15 bp, Homo sapiens
ttccaccttgactag

SEQ ID NO: 558777 - DNA, 15 bp, Homo sapiens
tccaccttgactagc

SEQ ID NO: 558778 - DNA, 15 bp, Homo sapiens
ccaccttgactagct

SEQ ID NO: 558779 - DNA, 15 bp, Homo sapiens
caccttgactagctg

SEQ ID NO: 558780 - DNA, 15 bp, Homo sapiens
accttgactagctgt

SEQ ID NO: 558781 - DNA, 15 bp, Homo sapiens
ccttgactagctgtg

SEQ ID NO: 558782 - DNA, 15 bp, Homo sapiens
cttgactagctgtgt

SEQ ID NO: 558783 - DNA, 15 bp, Homo sapiens
ttgactagctgtgtg

SEQ ID NO: 558784 - DNA, 15 bp, Homo sapiens
tgactagctgtgtga

SEQ ID NO: 558785 - DNA, 15 bp, Homo sapiens
gactagctgtgtgac

SEQ ID NO: 558786 - DNA, 15 bp, Homo sapiens
actagctgtgtgact

SEQ ID NO: 558787 - DNA, 15 bp, Homo sapiens
ctagctgtgtgactg

SEQ ID NO: 558788 - DNA, 15 bp, Homo sapiens
tagctgtgtgactga

SEQ ID NO: 558789 - DNA, 15 bp, Homo sapiens
agctgtgtgactgag

SEQ ID NO: 558790 - DNA, 15 bp, Homo sapiens
gctgtgtgactgagc

SEQ ID NO: 558791 - DNA, 15 bp, Homo sapiens
ctgtgtgactgagcc

SEQ ID NO: 558792 - DNA, 15 bp, Homo sapiens
tgtgtgactgagcca

SEQ ID NO: 558793 - DNA, 15 bp, Homo sapiens
gtgtgactgagccag

SEQ ID NO: 558794 - DNA, 15 bp, Homo sapiens
tgtgactgagccagg

SEQ ID NO: 558795 - DNA, 15 bp, Homo sapiens
gtgactgagccaggc

SEQ ID NO: 558796 - DNA, 15 bp, Homo sapiens
tgactgagccaggca

SEQ ID NO: 558797 - DNA, 15 bp, Homo sapiens
gactgagccaggcag

SEQ ID NO: 558798 - DNA, 15 bp, Homo sapiens
actgagccaggcagc

SEQ ID NO: 558799 - DNA, 15 bp, Homo sapiens
ctgagccaggcagcc

SEQ ID NO: 558800 - DNA, 15 bp, Homo sapiens
tgagccaggcagccc

SEQ ID NO: 558801 - DNA, 15 bp, Homo sapiens
gagccaggcagcccc

SEQ ID NO: 558802 - DNA, 15 bp, Homo sapiens
agccaggcagcccct

SEQ ID NO: 558803 - DNA, 15 bp, Homo sapiens
gccaggcagcccctg

SEQ ID NO: 558804 - DNA, 15 bp, Homo sapiens
ccaggcagcccctgt

SEQ ID NO: 558805 - DNA, 15 bp, Homo sapiens
caggcagcccctgtc

SEQ ID NO: 558806 - DNA, 15 bp, Homo sapiens
aggcagcccctgtct

SEQ ID NO: 558807 - DNA, 15 bp, Homo sapiens
ggcagcccctgtctc

SEQ ID NO: 558808 - DNA, 15 bp, Homo sapiens
gcagcccctgtctcg

SEQ ID NO: 558809 - DNA, 15 bp, Homo sapiens
cagcccctgtctcga

SEQ ID NO: 558810 - DNA, 15 bp, Homo sapiens
agcccctgtctcgat

SEQ ID NO: 558811 - DNA, 15 bp, Homo sapiens
gcccctgtctcgatt

SEQ ID NO: 558812 - DNA, 15 bp, Homo sapiens
cccctgtctcgattt

SEQ ID NO: 558813 - DNA, 15 bp, Homo sapiens
ccctgtctcgatttc

SEQ ID NO: 558814 - DNA, 15 bp, Homo sapiens
cctgtctcgatttca

SEQ ID NO: 558815 - DNA, 15 bp, Homo sapiens
ctgtctcgatttcat

SEQ ID NO: 558816 - DNA, 15 bp, Homo sapiens
tgtctcgatttcatt

SEQ ID NO: 558817 - DNA, 15 bp, Homo sapiens
gtctcgatttcatta

SEQ ID NO: 558818 - DNA, 15 bp, Homo sapiens
tctcgatttcattaa

SEQ ID NO: 558819 - DNA, 15 bp, Homo sapiens
ctcgatttcattaac

SEQ ID NO: 558820 - DNA, 15 bp, Homo sapiens
tcgatttcattaacc

SEQ ID NO: 558821 - DNA, 15 bp, Homo sapiens
cgatttcattaacca

SEQ ID NO: 558822 - DNA, 15 bp, Homo sapiens
gatttcattaaccat

SEQ ID NO: 558823 - DNA, 15 bp, Homo sapiens
atttcattaaccatg

SEQ ID NO: 558824 - DNA, 15 bp, Homo sapiens
tttcattaaccatga

SEQ ID NO: 558825 - DNA, 15 bp, Homo sapiens
ttcattaaccatgaa

SEQ ID NO: 558826 - DNA, 15 bp, Homo sapiens
tcattaaccatgaaa

SEQ ID NO: 558827 - DNA, 15 bp, Homo sapiens
cattaaccatgaaaa

SEQ ID NO: 558828 - DNA, 15 bp, Homo sapiens
attaaccatgaaaag

SEQ ID NO: 558829 - DNA, 15 bp, Homo sapiens
ttaaccatgaaaagg

SEQ ID NO: 558830 - DNA, 15 bp, Homo sapiens
taaccatgaaaagga

SEQ ID NO: 558831 - DNA, 15 bp, Homo sapiens
aaccatgaaaaggag

SEQ ID NO: 558832 - DNA, 15 bp, Homo sapiens
accatgaaaaggaga

SEQ ID NO: 558833 - DNA, 15 bp, Homo sapiens
ccatgaaaaggagat

SEQ ID NO: 558834 - DNA, 15 bp, Homo sapiens
catgaaaaggagata

SEQ ID NO: 558835 - DNA, 15 bp, Homo sapiens
atgaaaaggagatag

SEQ ID NO: 558836 - DNA, 15 bp, Homo sapiens
tgaaaaggagatagt

SEQ ID NO: 558837 - DNA, 15 bp, Homo sapiens
gaaaaggagatagta

SEQ ID NO: 558838 - DNA, 15 bp, Homo sapiens
aaaaggagatagtaa

SEQ ID NO: 558839 - DNA, 15 bp, Homo sapiens
aaaggagatagtaac

SEQ ID NO: 558840 - DNA, 15 bp, Homo sapiens
aaggagatagtaacc

SEQ ID NO: 558841 - DNA, 15 bp, Homo sapiens
aggagatagtaaccc

SEQ ID NO: 558842 - DNA, 15 bp, Homo sapiens
ggagatagtaaccct

SEQ ID NO: 558843 - DNA, 15 bp, Homo sapiens
gagatagtaaccctt

SEQ ID NO: 558844 - DNA, 15 bp, Homo sapiens
agatagtaacccttg

SEQ ID NO: 558845 - DNA, 15 bp, Homo sapiens
gatagtaacccttgc

SEQ ID NO: 558846 - DNA, 15 bp, Homo sapiens
atagtaacccttgct

SEQ ID NO: 558847 - DNA, 15 bp, Homo sapiens
tagtaacccttgctg

SEQ ID NO: 558848 - DNA, 15 bp, Homo sapiens
agtaacccttgctgt

SEQ ID NO: 558849 - DNA, 15 bp, Homo sapiens
gtaacccttgctgtg

SEQ ID NO: 558850 - DNA, 15 bp, Homo sapiens
taacccttgctgtgc

SEQ ID NO: 558851 - DNA, 15 bp, Homo sapiens
aacccttgctgtgcc

SEQ ID NO: 558852 - DNA, 15 bp, Homo sapiens
acccttgctgtgcct

SEQ ID NO: 558853 - DNA, 15 bp, Homo sapiens
cccttgctgtgccta

SEQ ID NO: 558854 - DNA, 15 bp, Homo sapiens
ccttgctgtgcctat

SEQ ID NO: 558855 - DNA, 15 bp, Homo sapiens
cttgctgtgcctatc

SEQ ID NO: 558856 - DNA, 15 bp, Homo sapiens
ttgctgtgcctatcc

SEQ ID NO: 558857 - DNA, 15 bp, Homo sapiens
tgctgtgcctatcct

SEQ ID NO: 558858 - DNA, 15 bp, Homo sapiens
gctgtgcctatcctg

SEQ ID NO: 558859 - DNA, 15 bp, Homo sapiens
ctgtgcctatcctgg

SEQ ID NO: 558860 - DNA, 15 bp, Homo sapiens
tgtgcctatcctggg

SEQ ID NO: 558861 - DNA, 15 bp, Homo sapiens
gtgcctatcctgggg

SEQ ID NO: 558862 - DNA, 15 bp, Homo sapiens
tgcctatcctggggg

SEQ ID NO: 558863 - DNA, 15 bp, Homo sapiens
gcctatcctgggggc

SEQ ID NO: 558864 - DNA, 15 bp, Homo sapiens
cctatcctgggggct

SEQ ID NO: 558865 - DNA, 15 bp, Homo sapiens
ctatcctgggggctt

SEQ ID NO: 558866 - DNA, 15 bp, Homo sapiens
tatcctgggggctta

SEQ ID NO: 558867 - DNA, 15 bp, Homo sapiens
atcctgggggcttat

SEQ ID NO: 558868 - DNA, 15 bp, Homo sapiens
tcctgggggcttatt

SEQ ID NO: 558869 - DNA, 15 bp, Homo sapiens
cctgggggcttattg

SEQ ID NO: 558870 - DNA, 15 bp, Homo sapiens
ctgggggcttattgg

SEQ ID NO: 558871 - DNA, 15 bp, Homo sapiens
tgggggcttattggg

SEQ ID NO: 558872 - DNA, 15 bp, Homo sapiens
gggggcttattggga

SEQ ID NO: 558873 - DNA, 15 bp, Homo sapiens
ggggcttattgggaa

SEQ ID NO: 558874 - DNA, 15 bp, Homo sapiens
gggcttattgggaaa

SEQ ID NO: 558875 - DNA, 15 bp, Homo sapiens
ggcttattgggaaat

SEQ ID NO: 558876 - DNA, 15 bp, Homo sapiens
gcttattgggaaatt

SEQ ID NO: 558877 - DNA, 15 bp, Homo sapiens
cttattgggaaattc

SEQ ID NO: 558878 - DNA, 15 bp, Homo sapiens
ttattgggaaattcg

SEQ ID NO: 558879 - DNA, 15 bp, Homo sapiens
tattgggaaattcga

SEQ ID NO: 558880 - DNA, 15 bp, Homo sapiens
attgggaaattcgaa

SEQ ID NO: 558881 - DNA, 15 bp, Homo sapiens
ttgggaaattcgaat

SEQ ID NO: 558882 - DNA, 15 bp, Homo sapiens
tgggaaattcgaata

SEQ ID NO: 558883 - DNA, 15 bp, Homo sapiens
gggaaattcgaatac

SEQ ID NO: 558884 - DNA, 15 bp, Homo sapiens
ggaaattcgaataca

SEQ ID NO: 558885 - DNA, 15 bp, Homo sapiens
gaaattcgaatacaa

SEQ ID NO: 558886 - DNA, 15 bp, Homo sapiens
aaattcgaatacaac

SEQ ID NO: 558887 - DNA, 15 bp, Homo sapiens
aattcgaatacaaca

SEQ ID NO: 558888 - DNA, 15 bp, Homo sapiens
attcgaatacaacag

SEQ ID NO: 558889 - DNA, 15 bp, Homo sapiens
ttcgaatacaacagt

SEQ ID NO: 558890 - DNA, 15 bp, Homo sapiens
tcgaatacaacagtg

SEQ ID NO: 558891 - DNA, 15 bp, Homo sapiens
cgaatacaacagtgc

SEQ ID NO: 558892 - DNA, 15 bp, Homo sapiens
gaatacaacagtgca

SEQ ID NO: 558893 - DNA, 15 bp, Homo sapiens
aatacaacagtgcat

SEQ ID NO: 558894 - DNA, 15 bp, Homo sapiens
atacaacagtgcata

SEQ ID NO: 558895 - DNA, 15 bp, Homo sapiens
tacaacagtgcataa

SEQ ID NO: 558896 - DNA, 15 bp, Homo sapiens
acaacagtgcataag

SEQ ID NO: 558897 - DNA, 15 bp, Homo sapiens
caacagtgcataaga

SEQ ID NO: 558898 - DNA, 15 bp, Homo sapiens
aacagtgcataagaa

SEQ ID NO: 558899 - DNA, 15 bp, Homo sapiens
acagtgcataagaaa

SEQ ID NO: 558900 - DNA, 15 bp, Homo sapiens
cagtgcataagaaat

SEQ ID NO: 558901 - DNA, 15 bp, Homo sapiens
agtgcataagaaatg

SEQ ID NO: 558902 - DNA, 15 bp, Homo sapiens
gtgcataagaaatgc

SEQ ID NO: 558903 - DNA, 15 bp, Homo sapiens
tgcataagaaatgca

SEQ ID NO: 558904 - DNA, 15 bp, Homo sapiens
gcataagaaatgcat

SEQ ID NO: 558905 - DNA, 15 bp, Homo sapiens
cataagaaatgcatt

SEQ ID NO: 558906 - DNA, 15 bp, Homo sapiens
ataagaaatgcatta

SEQ ID NO: 558907 - DNA, 15 bp, Homo sapiens
taagaaatgcattaa

SEQ ID NO: 558908 - DNA, 15 bp, Homo sapiens
aagaaatgcattaaa

SEQ ID NO: 558909 - DNA, 15 bp, Homo sapiens
agaaatgcattaaac

SEQ ID NO: 558910 - DNA, 15 bp, Homo sapiens
gaaatgcattaaact

SEQ ID NO: 558911 - DNA, 15 bp, Homo sapiens
aaatgcattaaactt

SEQ ID NO: 558912 - DNA, 15 bp, Homo sapiens
aatgcattaaactta

SEQ ID NO: 558913 - DNA, 15 bp, Homo sapiens
atgcattaaacttat

SEQ ID NO: 558914 - DNA, 15 bp, Homo sapiens
tgcattaaacttata

SEQ ID NO: 558915 - DNA, 15 bp, Homo sapiens
gcattaaacttatat

SEQ ID NO: 558916 - DNA, 15 bp, Homo sapiens
cattaaacttatata

SEQ ID NO: 558917 - DNA, 15 bp, Homo sapiens
attaaacttatatat

SEQ ID NO: 558918 - DNA, 15 bp, Homo sapiens
ttaaacttatatatg

SEQ ID NO: 558919 - DNA, 15 bp, Homo sapiens
taaacttatatatgt

SEQ ID NO: 558920 - DNA, 15 bp, Homo sapiens
aaacttatatatgtg

SEQ ID NO: 558921 - DNA, 15 bp, Homo sapiens
aacttatatatgtgc

SEQ ID NO: 558922 - DNA, 15 bp, Homo sapiens
acttatatatgtgca

SEQ ID NO: 558923 - DNA, 15 bp, Homo sapiens
cttatatatgtgcaa

SEQ ID NO: 558924 - DNA, 15 bp, Homo sapiens
ttatatatgtgcaat

SEQ ID NO: 558925 - DNA, 15 bp, Homo sapiens
tatatatgtgcaata

SEQ ID NO: 558926 - DNA, 15 bp, Homo sapiens
atatatgtgcaatag

SEQ ID NO: 558927 - DNA, 15 bp, Homo sapiens
tatatgtgcaataga

SEQ ID NO: 558928 - DNA, 15 bp, Homo sapiens
atatgtgcaatagaa

SEQ ID NO: 558929 - DNA, 15 bp, Homo sapiens
tatgtgcaatagaaa

SEQ ID NO: 558930 - DNA, 15 bp, Homo sapiens
atgtgcaatagaaat

SEQ ID NO: 558931 - DNA, 15 bp, Homo sapiens
tgtgcaatagaaata

SEQ ID NO: 558932 - DNA, 15 bp, Homo sapiens
gtgcaatagaaataa

SEQ ID NO: 558933 - DNA, 15 bp, Homo sapiens
tgcaatagaaataac

SEQ ID NO: 558934 - DNA, 15 bp, Homo sapiens
gcaatagaaataact

SEQ ID NO: 558935 - DNA, 15 bp, Homo sapiens
caatagaaataactc

SEQ ID NO: 558936 - DNA, 15 bp, Homo sapiens
aatagaaataactca

SEQ ID NO: 558937 - DNA, 15 bp, Homo sapiens
atagaaataactcac

SEQ ID NO: 558938 - DNA, 15 bp, Homo sapiens
tagaaataactcact

SEQ ID NO: 558939 - DNA, 15 bp, Homo sapiens
agaaataactcactg

SEQ ID NO: 558940 - DNA, 15 bp, Homo sapiens
gaaataactcactga

SEQ ID NO: 558941 - DNA, 15 bp, Homo sapiens
aaataactcactgag

SEQ ID NO: 558942 - DNA, 15 bp, Homo sapiens
aataactcactgaga

SEQ ID NO: 558943 - DNA, 15 bp, Homo sapiens
ataactcactgagaa

SEQ ID NO: 558944 - DNA, 15 bp, Homo sapiens
taactcactgagaaa

SEQ ID NO: 558945 - DNA, 15 bp, Homo sapiens
aactcactgagaaag

SEQ ID NO: 558946 - DNA, 15 bp, Homo sapiens
actcactgagaaagc

SEQ ID NO: 558947 - DNA, 15 bp, Homo sapiens
ctcactgagaaagca

SEQ ID NO: 558948 - DNA, 15 bp, Homo sapiens
tcactgagaaagcat

SEQ ID NO: 558949 - DNA, 15 bp, Homo sapiens
cactgagaaagcatt

SEQ ID NO: 558950 - DNA, 15 bp, Homo sapiens
actgagaaagcattt

SEQ ID NO: 558951 - DNA, 15 bp, Homo sapiens
ctgagaaagcatttg

SEQ ID NO: 558952 - DNA, 15 bp, Homo sapiens
tgagaaagcatttgc

SEQ ID NO: 558953 - DNA, 15 bp, Homo sapiens
gagaaagcatttgct

SEQ ID NO: 558954 - DNA, 15 bp, Homo sapiens
agaaagcatttgctg

SEQ ID NO: 558955 - DNA, 15 bp, Homo sapiens
gaaagcatttgctgc

SEQ ID NO: 558956 - DNA, 15 bp, Homo sapiens
aaagcatttgctgct

SEQ ID NO: 558957 - DNA, 15 bp, Homo sapiens
aagcatttgctgctc

SEQ ID NO: 558958 - DNA, 15 bp, Homo sapiens
agcatttgctgctca

SEQ ID NO: 558959 - DNA, 15 bp, Homo sapiens
gcatttgctgctcac

SEQ ID NO: 558960 - DNA, 15 bp, Homo sapiens
catttgctgctcacc

SEQ ID NO: 558961 - DNA, 15 bp, Homo sapiens
atttgctgctcacct

SEQ ID NO: 558962 - DNA, 15 bp, Homo sapiens
tttgctgctcacctc

SEQ ID NO: 558963 - DNA, 15 bp, Homo sapiens
ttgctgctcacctcc

SEQ ID NO: 558964 - DNA, 15 bp, Homo sapiens
tgctgctcacctcct

SEQ ID NO: 558965 - DNA, 15 bp, Homo sapiens
gctgctcacctcctg

SEQ ID NO: 558966 - DNA, 15 bp, Homo sapiens
ctgctcacctcctgt

SEQ ID NO: 558967 - DNA, 15 bp, Homo sapiens
tgctcacctcctgta

SEQ ID NO: 558968 - DNA, 15 bp, Homo sapiens
gctcacctcctgtaa

SEQ ID NO: 558969 - DNA, 15 bp, Homo sapiens
ctcacctcctgtaag

SEQ ID NO: 558970 - DNA, 15 bp, Homo sapiens
tcacctcctgtaaga

SEQ ID NO: 558971 - DNA, 15 bp, Homo sapiens
cacctcctgtaagaa

SEQ ID NO: 558972 - DNA, 15 bp, Homo sapiens
acctcctgtaagaat

SEQ ID NO: 558973 - DNA, 15 bp, Homo sapiens
cctcctgtaagaata

SEQ ID NO: 558974 - DNA, 15 bp, Homo sapiens
ctcctgtaagaatac

SEQ ID NO: 558975 - DNA, 15 bp, Homo sapiens
tcctgtaagaatact

SEQ ID NO: 558976 - DNA, 15 bp, Homo sapiens
cctgtaagaatacta

SEQ ID NO: 558977 - DNA, 15 bp, Homo sapiens
ctgtaagaatactag

SEQ ID NO: 558978 - DNA, 15 bp, Homo sapiens
tgtaagaatactagg

SEQ ID NO: 558979 - DNA, 15 bp, Homo sapiens
gtaagaatactaggg

SEQ ID NO: 558980 - DNA, 15 bp, Homo sapiens
taagaatactagggt

SEQ ID NO: 558981 - DNA, 15 bp, Homo sapiens
aagaatactagggtt

SEQ ID NO: 558982 - DNA, 15 bp, Homo sapiens
agaatactagggtta

SEQ ID NO: 558983 - DNA, 15 bp, Homo sapiens
gaatactagggttaa

SEQ ID NO: 558984 - DNA, 15 bp, Homo sapiens
aatactagggttaaa

SEQ ID NO: 558985 - DNA, 15 bp, Homo sapiens
atactagggttaaac

SEQ ID NO: 558986 - DNA, 15 bp, Homo sapiens
tactagggttaaaca

SEQ ID NO: 558987 - DNA, 15 bp, Homo sapiens
actagggttaaacaa

SEQ ID NO: 558988 - DNA, 15 bp, Homo sapiens
ctagggttaaacaaa

SEQ ID NO: 558989 - DNA, 15 bp, Homo sapiens
tagggttaaacaaag

SEQ ID NO: 558990 - DNA, 15 bp, Homo sapiens
agggttaaacaaaga

SEQ ID NO: 558991 - DNA, 15 bp, Homo sapiens
gggttaaacaaagaa

SEQ ID NO: 558992 - DNA, 15 bp, Homo sapiens
ggttaaacaaagaaa

SEQ ID NO: 558993 - DNA, 15 bp, Homo sapiens
gttaaacaaagaaag

SEQ ID NO: 558994 - DNA, 15 bp, Homo sapiens
ttaaacaaagaaagt

SEQ ID NO: 558995 - DNA, 15 bp, Homo sapiens
taaacaaagaaagtg

SEQ ID NO: 558996 - DNA, 15 bp, Homo sapiens
aaacaaagaaagtga

SEQ ID NO: 558997 - DNA, 15 bp, Homo sapiens
aacaaagaaagtgat

SEQ ID NO: 558998 - DNA, 15 bp, Homo sapiens
acaaagaaagtgatg

SEQ ID NO: 558999 - DNA, 15 bp, Homo sapiens
caaagaaagtgatga

SEQ ID NO: 559000 - DNA, 15 bp, Homo sapiens
aaagaaagtgatgac

SEQ ID NO: 559001 - DNA, 15 bp, Homo sapiens
aagaaagtgatgact

SEQ ID NO: 559002 - DNA, 15 bp, Homo sapiens
agaaagtgatgacta

SEQ ID NO: 559003 - DNA, 15 bp, Homo sapiens
gaaagtgatgactat

SEQ ID NO: 559004 - DNA, 15 bp, Homo sapiens
aaagtgatgactatc

SEQ ID NO: 559005 - DNA, 15 bp, Homo sapiens
aagtgatgactatcc

SEQ ID NO: 559006 - DNA, 15 bp, Homo sapiens
agtgatgactatcct

SEQ ID NO: 559007 - DNA, 15 bp, Homo sapiens
gtgatgactatcctc

SEQ ID NO: 559008 - DNA, 15 bp, Homo sapiens
tgatgactatcctct

SEQ ID NO: 559009 - DNA, 15 bp, Homo sapiens
gatgactatcctctc

SEQ ID NO: 559010 - DNA, 15 bp, Homo sapiens
atgactatcctctca

SEQ ID NO: 559011 - DNA, 15 bp, Homo sapiens
tgactatcctctcaa

SEQ ID NO: 559012 - DNA, 15 bp, Homo sapiens
gactatcctctcaag

SEQ ID NO: 559013 - DNA, 15 bp, Homo sapiens
actatcctctcaaga

SEQ ID NO: 559014 - DNA, 15 bp, Homo sapiens
ctatcctctcaagaa

SEQ ID NO: 559015 - DNA, 15 bp, Homo sapiens
tatcctctcaagaac

SEQ ID NO: 559016 - DNA, 15 bp, Homo sapiens
atcctctcaagaact

SEQ ID NO: 559017 - DNA, 15 bp, Homo sapiens
tcctctcaagaactc

SEQ ID NO: 559018 - DNA, 15 bp, Homo sapiens
cctctcaagaactca

SEQ ID NO: 559019 - DNA, 15 bp, Homo sapiens
ctctcaagaactcag

SEQ ID NO: 559020 - DNA, 15 bp, Homo sapiens
tctcaagaactcagc

SEQ ID NO: 559021 - DNA, 15 bp, Homo sapiens
ctcaagaactcagca

SEQ ID NO: 559022 - DNA, 15 bp, Homo sapiens
tcaagaactcagcag

SEQ ID NO: 559023 - DNA, 15 bp, Homo sapiens
caagaactcagcagt

SEQ ID NO: 559024 - DNA, 15 bp, Homo sapiens
aagaactcagcagtc

SEQ ID NO: 559025 - DNA, 15 bp, Homo sapiens
agaactcagcagtca

SEQ ID NO: 559026 - DNA, 15 bp, Homo sapiens
gaactcagcagtcag

SEQ ID NO: 559027 - DNA, 15 bp, Homo sapiens
aactcagcagtcagg

SEQ ID NO: 559028 - DNA, 15 bp, Homo sapiens
actcagcagtcaggg

SEQ ID NO: 559029 - DNA, 15 bp, Homo sapiens
ctcagcagtcagggg

SEQ ID NO: 559030 - DNA, 15 bp, Homo sapiens
tcagcagtcaggggg

SEQ ID NO: 559031 - DNA, 15 bp, Homo sapiens
cagcagtcagggggc

SEQ ID NO: 559032 - DNA, 15 bp, Homo sapiens
agcagtcagggggcg

SEQ ID NO: 559033 - DNA, 15 bp, Homo sapiens
gcagtcagggggcgc

SEQ ID NO: 559034 - DNA, 15 bp, Homo sapiens
cagtcagggggcgca

SEQ ID NO: 559035 - DNA, 15 bp, Homo sapiens
agtcagggggcgcag

SEQ ID NO: 559036 - DNA, 15 bp, Homo sapiens
gtcagggggcgcagg

SEQ ID NO: 559037 - DNA, 15 bp, Homo sapiens
tcagggggcgcaggc

SEQ ID NO: 559038 - DNA, 15 bp, Homo sapiens
cagggggcgcaggcc

SEQ ID NO: 559039 - DNA, 15 bp, Homo sapiens
agggggcgcaggcca

SEQ ID NO: 559040 - DNA, 15 bp, Homo sapiens
gggggcgcaggccaa

SEQ ID NO: 559041 - DNA, 15 bp, Homo sapiens
ggggcgcaggccaag

SEQ ID NO: 559042 - DNA, 15 bp, Homo sapiens
gggcgcaggccaagc

SEQ ID NO: 559043 - DNA, 15 bp, Homo sapiens
ggcgcaggccaagct

SEQ ID NO: 559044 - DNA, 15 bp, Homo sapiens
gcgcaggccaagctg

SEQ ID NO: 559045 - DNA, 15 bp, Homo sapiens
cgcaggccaagctga

SEQ ID NO: 559046 - DNA, 15 bp, Homo sapiens
gcaggccaagctgag

SEQ ID NO: 559047 - DNA, 15 bp, Homo sapiens
caggccaagctgaga

SEQ ID NO: 559048 - DNA, 15 bp, Homo sapiens
aggccaagctgagaa

SEQ ID NO: 559049 - DNA, 15 bp, Homo sapiens
ggccaagctgagaat

SEQ ID NO: 559050 - DNA, 15 bp, Homo sapiens
gccaagctgagaatc

SEQ ID NO: 559051 - DNA, 15 bp, Homo sapiens
ccaagctgagaatca

SEQ ID NO: 559052 - DNA, 15 bp, Homo sapiens
caagctgagaatcag

SEQ ID NO: 559053 - DNA, 15 bp, Homo sapiens
aagctgagaatcaga

SEQ ID NO: 559054 - DNA, 15 bp, Homo sapiens
agctgagaatcagac

SEQ ID NO: 559055 - DNA, 15 bp, Homo sapiens
gctgagaatcagaca

SEQ ID NO: 559056 - DNA, 15 bp, Homo sapiens
ctgagaatcagacag

SEQ ID NO: 559057 - DNA, 15 bp, Homo sapiens
tgagaatcagacagt

SEQ ID NO: 559058 - DNA, 15 bp, Homo sapiens
gagaatcagacagtg

SEQ ID NO: 559059 - DNA, 15 bp, Homo sapiens
agaatcagacagtgt

SEQ ID NO: 559060 - DNA, 15 bp, Homo sapiens
gaatcagacagtgtg

SEQ ID NO: 559061 - DNA, 15 bp, Homo sapiens
aatcagacagtgtga

SEQ ID NO: 559062 - DNA, 15 bp, Homo sapiens
atcagacagtgtgac

SEQ ID NO: 559063 - DNA, 15 bp, Homo sapiens
tcagacagtgtgaca

SEQ ID NO: 559064 - DNA, 15 bp, Homo sapiens
cagacagtgtgacaa

SEQ ID NO: 559065 - DNA, 15 bp, Homo sapiens
agacagtgtgacaag

SEQ ID NO: 559066 - DNA, 15 bp, Homo sapiens
gacagtgtgacaagt

SEQ ID NO: 559067 - DNA, 15 bp, Homo sapiens
acagtgtgacaagtc

SEQ ID NO: 559068 - DNA, 15 bp, Homo sapiens
cagtgtgacaagtcc

SEQ ID NO: 559069 - DNA, 15 bp, Homo sapiens
agtgtgacaagtcct

SEQ ID NO: 559070 - DNA, 15 bp, Homo sapiens
gtgtgacaagtcctt

SEQ ID NO: 559071 - DNA, 15 bp, Homo sapiens
tgtgacaagtcctta

SEQ ID NO: 559072 - DNA, 15 bp, Homo sapiens
gtgacaagtccttat

SEQ ID NO: 559073 - DNA, 15 bp, Homo sapiens
tgacaagtccttata

SEQ ID NO: 559074 - DNA, 15 bp, Homo sapiens
gacaagtccttataa

SEQ ID NO: 559075 - DNA, 15 bp, Homo sapiens
acaagtccttataac

SEQ ID NO: 559076 - DNA, 15 bp, Homo sapiens
caagtccttataacc

SEQ ID NO: 559077 - DNA, 15 bp, Homo sapiens
aagtccttataacca

SEQ ID NO: 559078 - DNA, 15 bp, Homo sapiens
agtccttataaccaa

SEQ ID NO: 559079 - DNA, 15 bp, Homo sapiens
gtccttataaccaag

SEQ ID NO: 559080 - DNA, 15 bp, Homo sapiens
tccttataaccaagg

SEQ ID NO: 559081 - DNA, 15 bp, Homo sapiens
ccttataaccaaggc

SEQ ID NO: 559082 - DNA, 15 bp, Homo sapiens
cttataaccaaggcg

SEQ ID NO: 559083 - DNA, 15 bp, Homo sapiens
ttataaccaaggcgg

SEQ ID NO: 559084 - DNA, 15 bp, Homo sapiens
tataaccaaggcggg

SEQ ID NO: 559085 - DNA, 15 bp, Homo sapiens
ataaccaaggcgggc

SEQ ID NO: 559086 - DNA, 15 bp, Homo sapiens
taaccaaggcgggca

SEQ ID NO: 559087 - DNA, 15 bp, Homo sapiens
aaccaaggcgggcac

SEQ ID NO: 559088 - DNA, 15 bp, Homo sapiens
accaaggcgggcacc

SEQ ID NO: 559089 - DNA, 15 bp, Homo sapiens
ccaaggcgggcacca

SEQ ID NO: 559090 - DNA, 15 bp, Homo sapiens
caaggcgggcaccaa

SEQ ID NO: 559091 - DNA, 15 bp, Homo sapiens
aaggcgggcaccaag

SEQ ID NO: 559092 - DNA, 15 bp, Homo sapiens
aggcgggcaccaagt

SEQ ID NO: 559093 - DNA, 15 bp, Homo sapiens
ggcgggcaccaagtg

SEQ ID NO: 559094 - DNA, 15 bp, Homo sapiens
gcgggcaccaagtgc

SEQ ID NO: 559095 - DNA, 15 bp, Homo sapiens
cgggcaccaagtgct

SEQ ID NO: 559096 - DNA, 15 bp, Homo sapiens
gggcaccaagtgctg

SEQ ID NO: 559097 - DNA, 15 bp, Homo sapiens
ggcaccaagtgctgg

SEQ ID NO: 559098 - DNA, 15 bp, Homo sapiens
gcaccaagtgctggg

SEQ ID NO: 559099 - DNA, 15 bp, Homo sapiens
caccaagtgctgggg

SEQ ID NO: 559100 - DNA, 15 bp, Homo sapiens
accaagtgctggggg

SEQ ID NO: 559101 - DNA, 15 bp, Homo sapiens
ccaagtgctggggga

SEQ ID NO: 559102 - DNA, 15 bp, Homo sapiens
caagtgctgggggac

SEQ ID NO: 559103 - DNA, 15 bp, Homo sapiens
aagtgctgggggact

SEQ ID NO: 559104 - DNA, 15 bp, Homo sapiens
agtgctgggggactg

SEQ ID NO: 559105 - DNA, 15 bp, Homo sapiens
gtgctgggggactgt

SEQ ID NO: 559106 - DNA, 15 bp, Homo sapiens
tgctgggggactgtg

SEQ ID NO: 559107 - DNA, 15 bp, Homo sapiens
gctgggggactgtgg

SEQ ID NO: 559108 - DNA, 15 bp, Homo sapiens
ctgggggactgtggg

SEQ ID NO: 559109 - DNA, 15 bp, Homo sapiens
tgggggactgtgggg

SEQ ID NO: 559110 - DNA, 15 bp, Homo sapiens
gggggactgtgggga

SEQ ID NO: 559111 - DNA, 15 bp, Homo sapiens
ggggactgtggggaa

SEQ ID NO: 559112 - DNA, 15 bp, Homo sapiens
gggactgtggggaag

SEQ ID NO: 559113 - DNA, 15 bp, Homo sapiens
ggactgtggggaagg

SEQ ID NO: 559114 - DNA, 15 bp, Homo sapiens
gactgtggggaaggc

SEQ ID NO: 559115 - DNA, 15 bp, Homo sapiens
actgtggggaaggcg

SEQ ID NO: 559116 - DNA, 15 bp, Homo sapiens
ctgtggggaaggcgt

SEQ ID NO: 559117 - DNA, 15 bp, Homo sapiens
tgtggggaaggcgtg

SEQ ID NO: 559118 - DNA, 15 bp, Homo sapiens
gtggggaaggcgtgt

SEQ ID NO: 559119 - DNA, 15 bp, Homo sapiens
tggggaaggcgtgtc

SEQ ID NO: 559120 - DNA, 15 bp, Homo sapiens
ggggaaggcgtgtct

SEQ ID NO: 559121 - DNA, 15 bp, Homo sapiens
gggaaggcgtgtctg

SEQ ID NO: 559122 - DNA, 15 bp, Homo sapiens
ggaaggcgtgtctgg

SEQ ID NO: 559123 - DNA, 15 bp, Homo sapiens
gaaggcgtgtctggg

SEQ ID NO: 559124 - DNA, 15 bp, Homo sapiens
aaggcgtgtctggga

SEQ ID NO: 559125 - DNA, 15 bp, Homo sapiens
aggcgtgtctgggag

SEQ ID NO: 559126 - DNA, 15 bp, Homo sapiens
ggcgtgtctgggagc

SEQ ID NO: 559127 - DNA, 15 bp, Homo sapiens
gcgtgtctgggagca

SEQ ID NO: 559128 - DNA, 15 bp, Homo sapiens
cgtgtctgggagcat

SEQ ID NO: 559129 - DNA, 15 bp, Homo sapiens
gtgtctgggagcatg

SEQ ID NO: 559130 - DNA, 15 bp, Homo sapiens
tgtctgggagcatgg

SEQ ID NO: 559131 - DNA, 15 bp, Homo sapiens
gtctgggagcatgga

SEQ ID NO: 559132 - DNA, 15 bp, Homo sapiens
tctgggagcatggac

SEQ ID NO: 559133 - DNA, 15 bp, Homo sapiens
ctgggagcatggact

SEQ ID NO: 559134 - DNA, 15 bp, Homo sapiens
tgggagcatggacta

SEQ ID NO: 559135 - DNA, 15 bp, Homo sapiens
gggagcatggactag

SEQ ID NO: 559136 - DNA, 15 bp, Homo sapiens
ggagcatggactagg

SEQ ID NO: 559137 - DNA, 15 bp, Homo sapiens
gagcatggactaggt

SEQ ID NO: 559138 - DNA, 15 bp, Homo sapiens
agcatggactaggtt

SEQ ID NO: 559139 - DNA, 15 bp, Homo sapiens
gcatggactaggttg

SEQ ID NO: 559140 - DNA, 15 bp, Homo sapiens
catggactaggttgc

SEQ ID NO: 559141 - DNA, 15 bp, Homo sapiens
atggactaggttgcc

SEQ ID NO: 559142 - DNA, 15 bp, Homo sapiens
tggactaggttgcct

SEQ ID NO: 559143 - DNA, 15 bp, Homo sapiens
ggactaggttgcctg

SEQ ID NO: 559144 - DNA, 15 bp, Homo sapiens
gactaggttgcctgg

SEQ ID NO: 559145 - DNA, 15 bp, Homo sapiens
actaggttgcctggc

SEQ ID NO: 559146 - DNA, 15 bp, Homo sapiens
ctaggttgcctggca

SEQ ID NO: 559147 - DNA, 15 bp, Homo sapiens
taggttgcctggcag

SEQ ID NO: 559148 - DNA, 15 bp, Homo sapiens
aggttgcctggcagt

SEQ ID NO: 559149 - DNA, 15 bp, Homo sapiens
ggttgcctggcagtg

SEQ ID NO: 559150 - DNA, 15 bp, Homo sapiens
gttgcctggcagtga

SEQ ID NO: 559151 - DNA, 15 bp, Homo sapiens
ttgcctggcagtgag

SEQ ID NO: 559152 - DNA, 15 bp, Homo sapiens
tgcctggcagtgagg

SEQ ID NO: 559153 - DNA, 15 bp, Homo sapiens
gcctggcagtgaggc

SEQ ID NO: 559154 - DNA, 15 bp, Homo sapiens
cctggcagtgaggct

SEQ ID NO: 559155 - DNA, 15 bp, Homo sapiens
ctggcagtgaggcta

SEQ ID NO: 559156 - DNA, 15 bp, Homo sapiens
tggcagtgaggctaa

SEQ ID NO: 559157 - DNA, 15 bp, Homo sapiens
ggcagtgaggctaaa

SEQ ID NO: 559158 - DNA, 15 bp, Homo sapiens
gcagtgaggctaaaa

SEQ ID NO: 559159 - DNA, 15 bp, Homo sapiens
cagtgaggctaaaaa

SEQ ID NO: 559160 - DNA, 15 bp, Homo sapiens
agtgaggctaaaaat

SEQ ID NO: 559161 - DNA, 15 bp, Homo sapiens
gtgaggctaaaaatg

SEQ ID NO: 559162 - DNA, 15 bp, Homo sapiens
tgaggctaaaaatgt

SEQ ID NO: 559163 - DNA, 15 bp, Homo sapiens
gaggctaaaaatgta

SEQ ID NO: 559164 - DNA, 15 bp, Homo sapiens
aggctaaaaatgtaa

SEQ ID NO: 559165 - DNA, 15 bp, Homo sapiens
ggctaaaaatgtaag

SEQ ID NO: 559166 - DNA, 15 bp, Homo sapiens
gctaaaaatgtaagc

SEQ ID NO: 559167 - DNA, 15 bp, Homo sapiens
ctaaaaatgtaagct

SEQ ID NO: 559168 - DNA, 15 bp, Homo sapiens
taaaaatgtaagctg

SEQ ID NO: 559169 - DNA, 15 bp, Homo sapiens
aaaaatgtaagctgc

SEQ ID NO: 559170 - DNA, 15 bp, Homo sapiens
aaaatgtaagctgca

SEQ ID NO: 559171 - DNA, 15 bp, Homo sapiens
aaatgtaagctgcag

SEQ ID NO: 559172 - DNA, 15 bp, Homo sapiens
aatgtaagctgcagt

SEQ ID NO: 559173 - DNA, 15 bp, Homo sapiens
atgtaagctgcagtc

SEQ ID NO: 559174 - DNA, 15 bp, Homo sapiens
tgtaagctgcagtca

SEQ ID NO: 559175 - DNA, 15 bp, Homo sapiens
gtaagctgcagtcag

SEQ ID NO: 559176 - DNA, 15 bp, Homo sapiens
taagctgcagtcaga

SEQ ID NO: 559177 - DNA, 15 bp, Homo sapiens
aagctgcagtcagac

SEQ ID NO: 559178 - DNA, 15 bp, Homo sapiens
agctgcagtcagaca

SEQ ID NO: 559179 - DNA, 15 bp, Homo sapiens
gctgcagtcagacag

SEQ ID NO: 559180 - DNA, 15 bp, Homo sapiens
ctgcagtcagacagg

SEQ ID NO: 559181 - DNA, 15 bp, Homo sapiens
tgcagtcagacaggg

SEQ ID NO: 559182 - DNA, 15 bp, Homo sapiens
gcagtcagacaggga

SEQ ID NO: 559183 - DNA, 15 bp, Homo sapiens
cagtcagacagggag

SEQ ID NO: 559184 - DNA, 15 bp, Homo sapiens
agtcagacagggagg

SEQ ID NO: 559185 - DNA, 15 bp, Homo sapiens
gtcagacagggaggg

SEQ ID NO: 559186 - DNA, 15 bp, Homo sapiens
tcagacagggagggc

SEQ ID NO: 559187 - DNA, 15 bp, Homo sapiens
cagacagggagggct

SEQ ID NO: 559188 - DNA, 15 bp, Homo sapiens
agacagggagggctg

SEQ ID NO: 559189 - DNA, 15 bp, Homo sapiens
gacagggagggctgc

SEQ ID NO: 559190 - DNA, 15 bp, Homo sapiens
acagggagggctgcg

SEQ ID NO: 559191 - DNA, 15 bp, Homo sapiens
cagggagggctgcga

SEQ ID NO: 559192 - DNA, 15 bp, Homo sapiens
agggagggctgcgat

SEQ ID NO: 559193 - DNA, 15 bp, Homo sapiens
gggagggctgcgatg

SEQ ID NO: 559194 - DNA, 15 bp, Homo sapiens
ggagggctgcgatgc

SEQ ID NO: 559195 - DNA, 15 bp, Homo sapiens
gagggctgcgatgcc

SEQ ID NO: 559196 - DNA, 15 bp, Homo sapiens
agggctgcgatgcca

SEQ ID NO: 559197 - DNA, 15 bp, Homo sapiens
gggctgcgatgccac

SEQ ID NO: 559198 - DNA, 15 bp, Homo sapiens
ggctgcgatgccaca

SEQ ID NO: 559199 - DNA, 15 bp, Homo sapiens
gctgcgatgccacac

SEQ ID NO: 559200 - DNA, 15 bp, Homo sapiens
ctgcgatgccacaca

SEQ ID NO: 559201 - DNA, 15 bp, Homo sapiens
tgcgatgccacacaa

SEQ ID NO: 559202 - DNA, 15 bp, Homo sapiens
gcgatgccacacaaa

SEQ ID NO: 559203 - DNA, 15 bp, Homo sapiens
cgatgccacacaaag

SEQ ID NO: 559204 - DNA, 15 bp, Homo sapiens
gatgccacacaaaga

SEQ ID NO: 559205 - DNA, 15 bp, Homo sapiens
atgccacacaaagaa

SEQ ID NO: 559206 - DNA, 15 bp, Homo sapiens
tgccacacaaagaag

SEQ ID NO: 559207 - DNA, 15 bp, Homo sapiens
gccacacaaagaagc

SEQ ID NO: 559208 - DNA, 15 bp, Homo sapiens
ccacacaaagaagct

SEQ ID NO: 559209 - DNA, 15 bp, Homo sapiens
cacacaaagaagctc

SEQ ID NO: 559210 - DNA, 15 bp, Homo sapiens
acacaaagaagctca

SEQ ID NO: 559211 - DNA, 15 bp, Homo sapiens
cacaaagaagctcag

SEQ ID NO: 559212 - DNA, 15 bp, Homo sapiens
acaaagaagctcaga

SEQ ID NO: 559213 - DNA, 15 bp, Homo sapiens
caaagaagctcagac

SEQ ID NO: 559214 - DNA, 15 bp, Homo sapiens
aaagaagctcagacc

SEQ ID NO: 559215 - DNA, 15 bp, Homo sapiens
aagaagctcagacct

SEQ ID NO: 559216 - DNA, 15 bp, Homo sapiens
agaagctcagacctt

SEQ ID NO: 559217 - DNA, 15 bp, Homo sapiens
gaagctcagaccttg

SEQ ID NO: 559218 - DNA, 15 bp, Homo sapiens
aagctcagaccttgg

SEQ ID NO: 559219 - DNA, 15 bp, Homo sapiens
agctcagaccttggt

SEQ ID NO: 559220 - DNA, 15 bp, Homo sapiens
gctcagaccttggtc

SEQ ID NO: 559221 - DNA, 15 bp, Homo sapiens
ctcagaccttggtct

SEQ ID NO: 559222 - DNA, 15 bp, Homo sapiens
tcagaccttggtctg

SEQ ID NO: 559223 - DNA, 15 bp, Homo sapiens
cagaccttggtctga

SEQ ID NO: 559224 - DNA, 15 bp, Homo sapiens
agaccttggtctgag

SEQ ID NO: 559225 - DNA, 15 bp, Homo sapiens
gaccttggtctgagg

SEQ ID NO: 559226 - DNA, 15 bp, Homo sapiens
accttggtctgaggg

SEQ ID NO: 559227 - DNA, 15 bp, Homo sapiens
ccttggtctgagggc

SEQ ID NO: 559228 - DNA, 15 bp, Homo sapiens
cttggtctgagggca

SEQ ID NO: 559229 - DNA, 15 bp, Homo sapiens
ttggtctgagggcac

SEQ ID NO: 559230 - DNA, 15 bp, Homo sapiens
tggtctgagggcact

SEQ ID NO: 559231 - DNA, 15 bp, Homo sapiens
ggtctgagggcactg

SEQ ID NO: 559232 - DNA, 15 bp, Homo sapiens
gtctgagggcactga

SEQ ID NO: 559233 - DNA, 15 bp, Homo sapiens
tctgagggcactgag

SEQ ID NO: 559234 - DNA, 15 bp, Homo sapiens
ctgagggcactgagg

SEQ ID NO: 559235 - DNA, 15 bp, Homo sapiens
tgagggcactgaggc

SEQ ID NO: 559236 - DNA, 15 bp, Homo sapiens
gagggcactgaggcg

SEQ ID NO: 559237 - DNA, 15 bp, Homo sapiens
agggcactgaggcgc

SEQ ID NO: 559238 - DNA, 15 bp, Homo sapiens
gggcactgaggcgct

SEQ ID NO: 559239 - DNA, 15 bp, Homo sapiens
ggcactgaggcgctg

SEQ ID NO: 559240 - DNA, 15 bp, Homo sapiens
gcactgaggcgctgc

SEQ ID NO: 559241 - DNA, 15 bp, Homo sapiens
cactgaggcgctgcc

SEQ ID NO: 559242 - DNA, 15 bp, Homo sapiens
actgaggcgctgcca

SEQ ID NO: 559243 - DNA, 15 bp, Homo sapiens
ctgaggcgctgccag

SEQ ID NO: 559244 - DNA, 15 bp, Homo sapiens
tgaggcgctgccagc

SEQ ID NO: 559245 - DNA, 15 bp, Homo sapiens
gaggcgctgccagca

SEQ ID NO: 559246 - DNA, 15 bp, Homo sapiens
aggcgctgccagcag

SEQ ID NO: 559247 - DNA, 15 bp, Homo sapiens
ggcgctgccagcagt

SEQ ID NO: 559248 - DNA, 15 bp, Homo sapiens
gcgctgccagcagtt

SEQ ID NO: 559249 - DNA, 15 bp, Homo sapiens
cgctgccagcagttt

SEQ ID NO: 559250 - DNA, 15 bp, Homo sapiens
gctgccagcagtttt

SEQ ID NO: 559251 - DNA, 15 bp, Homo sapiens
ctgccagcagttttt

SEQ ID NO: 559252 - DNA, 15 bp, Homo sapiens
tgccagcagttttta

SEQ ID NO: 559253 - DNA, 15 bp, Homo sapiens
gccagcagtttttac

SEQ ID NO: 559254 - DNA, 15 bp, Homo sapiens
ccagcagtttttacg

SEQ ID NO: 559255 - DNA, 15 bp, Homo sapiens
cagcagtttttacgt

SEQ ID NO: 559256 - DNA, 15 bp, Homo sapiens
agcagtttttacgta

SEQ ID NO: 559257 - DNA, 15 bp, Homo sapiens
gcagtttttacgtac

SEQ ID NO: 559258 - DNA, 15 bp, Homo sapiens
cagtttttacgtact

SEQ ID NO: 559259 - DNA, 15 bp, Homo sapiens
agtttttacgtactg

SEQ ID NO: 559260 - DNA, 15 bp, Homo sapiens
gtttttacgtactgt

SEQ ID NO: 559261 - DNA, 15 bp, Homo sapiens
tttttacgtactgta

SEQ ID NO: 559262 - DNA, 15 bp, Homo sapiens
ttttacgtactgtaa

SEQ ID NO: 559263 - DNA, 15 bp, Homo sapiens
tttacgtactgtaat

SEQ ID NO: 559264 - DNA, 15 bp, Homo sapiens
ttacgtactgtaatt

SEQ ID NO: 559265 - DNA, 15 bp, Homo sapiens
tacgtactgtaatta

SEQ ID NO: 559266 - DNA, 15 bp, Homo sapiens
acgtactgtaattat

SEQ ID NO: 559267 - DNA, 15 bp, Homo sapiens
cgtactgtaattata

SEQ ID NO: 559268 - DNA, 15 bp, Homo sapiens
gtactgtaattatag

SEQ ID NO: 559269 - DNA, 15 bp, Homo sapiens
tactgtaattatagg

SEQ ID NO: 559270 - DNA, 15 bp, Homo sapiens
actgtaattatagga

SEQ ID NO: 559271 - DNA, 15 bp, Homo sapiens
ctgtaattataggat

SEQ ID NO: 559272 - DNA, 15 bp, Homo sapiens
tgtaattataggatt

SEQ ID NO: 559273 - DNA, 15 bp, Homo sapiens
gtaattataggattg

SEQ ID NO: 559274 - DNA, 15 bp, Homo sapiens
taattataggattgg

SEQ ID NO: 559275 - DNA, 15 bp, Homo sapiens
aattataggattggg

SEQ ID NO: 559276 - DNA, 15 bp, Homo sapiens
attataggattgggc

SEQ ID NO: 559277 - DNA, 15 bp, Homo sapiens
ttataggattgggct

SEQ ID NO: 559278 - DNA, 15 bp, Homo sapiens
tataggattgggctg

SEQ ID NO: 559279 - DNA, 15 bp, Homo sapiens
ataggattgggctgg

SEQ ID NO: 559280 - DNA, 15 bp, Homo sapiens
taggattgggctggg

SEQ ID NO: 559281 - DNA, 15 bp, Homo sapiens
aggattgggctggga

SEQ ID NO: 559282 - DNA, 15 bp, Homo sapiens
ggattgggctgggat

SEQ ID NO: 559283 - DNA, 15 bp, Homo sapiens
gattgggctgggatt

SEQ ID NO: 559284 - DNA, 15 bp, Homo sapiens
attgggctgggattt

SEQ ID NO: 559285 - DNA, 15 bp, Homo sapiens
ttgggctgggatttg

SEQ ID NO: 559286 - DNA, 15 bp, Homo sapiens
tgggctgggatttga

SEQ ID NO: 559287 - DNA, 15 bp, Homo sapiens
gggctgggatttgaa

SEQ ID NO: 559288 - DNA, 15 bp, Homo sapiens
ggctgggatttgaag

SEQ ID NO: 559289 - DNA, 15 bp, Homo sapiens
gctgggatttgaaga

SEQ ID NO: 559290 - DNA, 15 bp, Homo sapiens
ctgggatttgaagaa

SEQ ID NO: 559291 - DNA, 15 bp, Homo sapiens
tgggatttgaagaaa

SEQ ID NO: 559292 - DNA, 15 bp, Homo sapiens
gggatttgaagaaaa

SEQ ID NO: 559293 - DNA, 15 bp, Homo sapiens
ggatttgaagaaaac

SEQ ID NO: 559294 - DNA, 15 bp, Homo sapiens
gatttgaagaaaact

SEQ ID NO: 559295 - DNA, 15 bp, Homo sapiens
atttgaagaaaactc

SEQ ID NO: 559296 - DNA, 15 bp, Homo sapiens
tttgaagaaaactct

SEQ ID NO: 559297 - DNA, 15 bp, Homo sapiens
ttgaagaaaactctg

SEQ ID NO: 559298 - DNA, 15 bp, Homo sapiens
tgaagaaaactctgg

SEQ ID NO: 559299 - DNA, 15 bp, Homo sapiens
gaagaaaactctggt

SEQ ID NO: 559300 - DNA, 15 bp, Homo sapiens
aagaaaactctggtg

SEQ ID NO: 559301 - DNA, 15 bp, Homo sapiens
agaaaactctggtgg

SEQ ID NO: 559302 - DNA, 15 bp, Homo sapiens
gaaaactctggtggc

SEQ ID NO: 559303 - DNA, 15 bp, Homo sapiens
aaaactctggtggca

SEQ ID NO: 559304 - DNA, 15 bp, Homo sapiens
aaactctggtggcag

SEQ ID NO: 559305 - DNA, 15 bp, Homo sapiens
aactctggtggcagc

SEQ ID NO: 559306 - DNA, 15 bp, Homo sapiens
actctggtggcagca

SEQ ID NO: 559307 - DNA, 15 bp, Homo sapiens
ctctggtggcagcat

SEQ ID NO: 559308 - DNA, 15 bp, Homo sapiens
tctggtggcagcatg

SEQ ID NO: 559309 - DNA, 15 bp, Homo sapiens
ctggtggcagcatgg

SEQ ID NO: 559310 - DNA, 15 bp, Homo sapiens
tggtggcagcatgga

SEQ ID NO: 559311 - DNA, 15 bp, Homo sapiens
ggtggcagcatggag

SEQ ID NO: 559312 - DNA, 15 bp, Homo sapiens
gtggcagcatggagg

SEQ ID NO: 559313 - DNA, 15 bp, Homo sapiens
tggcagcatggagga

SEQ ID NO: 559314 - DNA, 15 bp, Homo sapiens
ggcagcatggaggat

SEQ ID NO: 559315 - DNA, 15 bp, Homo sapiens
gcagcatggaggata

SEQ ID NO: 559316 - DNA, 15 bp, Homo sapiens
cagcatggaggatag

SEQ ID NO: 559317 - DNA, 15 bp, Homo sapiens
agcatggaggataga

SEQ ID NO: 559318 - DNA, 15 bp, Homo sapiens
gcatggaggatagaa

SEQ ID NO: 559319 - DNA, 15 bp, Homo sapiens
catggaggatagaaa

SEQ ID NO: 559320 - DNA, 15 bp, Homo sapiens
atggaggatagaaag

SEQ ID NO: 559321 - DNA, 15 bp, Homo sapiens
tggaggatagaaaga

SEQ ID NO: 559322 - DNA, 15 bp, Homo sapiens
ggaggatagaaagag

SEQ ID NO: 559323 - DNA, 15 bp, Homo sapiens
gaggatagaaagagg

SEQ ID NO: 559324 - DNA, 15 bp, Homo sapiens
aggatagaaagaggg

SEQ ID NO: 559325 - DNA, 15 bp, Homo sapiens
ggatagaaagagggc

SEQ ID NO: 559326 - DNA, 15 bp, Homo sapiens
gatagaaagagggca

SEQ ID NO: 559327 - DNA, 15 bp, Homo sapiens
atagaaagagggcat

SEQ ID NO: 559328 - DNA, 15 bp, Homo sapiens
tagaaagagggcatc

SEQ ID NO: 559329 - DNA, 15 bp, Homo sapiens
agaaagagggcatca

SEQ ID NO: 559330 - DNA, 15 bp, Homo sapiens
gaaagagggcatcat

SEQ ID NO: 559331 - DNA, 15 bp, Homo sapiens
aaagagggcatcatc

SEQ ID NO: 559332 - DNA, 15 bp, Homo sapiens
aagagggcatcatca

SEQ ID NO: 559333 - DNA, 15 bp, Homo sapiens
agagggcatcatcat

SEQ ID NO: 559334 - DNA, 15 bp, Homo sapiens
gagggcatcatcatc

SEQ ID NO: 559335 - DNA, 15 bp, Homo sapiens
agggcatcatcatca

SEQ ID NO: 559336 - DNA, 15 bp, Homo sapiens
gggcatcatcatcat

SEQ ID NO: 559337 - DNA, 15 bp, Homo sapiens
ggcatcatcatcatc

SEQ ID NO: 559338 - DNA, 15 bp, Homo sapiens
gcatcatcatcatca

SEQ ID NO: 559339 - DNA, 15 bp, Homo sapiens
catcatcatcatcat

SEQ ID NO: 559340 - DNA, 15 bp, Homo sapiens
atcatcatcatcatg

SEQ ID NO: 559341 - DNA, 15 bp, Homo sapiens
tcatcatcatcatga

SEQ ID NO: 559342 - DNA, 15 bp, Homo sapiens
catcatcatcatgac

SEQ ID NO: 559343 - DNA, 15 bp, Homo sapiens
atcatcatcatgaca

SEQ ID NO: 559344 - DNA, 15 bp, Homo sapiens
tcatcatcatgacac

SEQ ID NO: 559345 - DNA, 15 bp, Homo sapiens
catcatcatgacacc

SEQ ID NO: 559346 - DNA, 15 bp, Homo sapiens
atcatcatgacacca

SEQ ID NO: 559347 - DNA, 15 bp, Homo sapiens
tcatcatgacaccaa

SEQ ID NO: 559348 - DNA, 15 bp, Homo sapiens
catcatgacaccaag

SEQ ID NO: 559349 - DNA, 15 bp, Homo sapiens
atcatgacaccaagt

SEQ ID NO: 559350 - DNA, 15 bp, Homo sapiens
tcatgacaccaagtg

SEQ ID NO: 559351 - DNA, 15 bp, Homo sapiens
catgacaccaagtgt

SEQ ID NO: 559352 - DNA, 15 bp, Homo sapiens
atgacaccaagtgtg

SEQ ID NO: 559353 - DNA, 15 bp, Homo sapiens
tgacaccaagtgtgg

SEQ ID NO: 559354 - DNA, 15 bp, Homo sapiens
gacaccaagtgtggc

SEQ ID NO: 559355 - DNA, 15 bp, Homo sapiens
acaccaagtgtggcc

SEQ ID NO: 559356 - DNA, 15 bp, Homo sapiens
caccaagtgtggccg

SEQ ID NO: 559357 - DNA, 15 bp, Homo sapiens
accaagtgtggccgg

SEQ ID NO: 559358 - DNA, 15 bp, Homo sapiens
ccaagtgtggccggg

SEQ ID NO: 559359 - DNA, 15 bp, Homo sapiens
caagtgtggccgggc

SEQ ID NO: 559360 - DNA, 15 bp, Homo sapiens
aagtgtggccgggca

SEQ ID NO: 559361 - DNA, 15 bp, Homo sapiens
agtgtggccgggcaa

SEQ ID NO: 559362 - DNA, 15 bp, Homo sapiens
gtgtggccgggcaat

SEQ ID NO: 559363 - DNA, 15 bp, Homo sapiens
tgtggccgggcaatg

SEQ ID NO: 559364 - DNA, 15 bp, Homo sapiens
gtggccgggcaatgg

SEQ ID NO: 559365 - DNA, 15 bp, Homo sapiens
tggccgggcaatggc

SEQ ID NO: 559366 - DNA, 15 bp, Homo sapiens
ggccgggcaatggct

SEQ ID NO: 559367 - DNA, 15 bp, Homo sapiens
gccgggcaatggctc

SEQ ID NO: 559368 - DNA, 15 bp, Homo sapiens
ccgggcaatggctcc

SEQ ID NO: 559369 - DNA, 15 bp, Homo sapiens
cgggcaatggctcca

SEQ ID NO: 559370 - DNA, 15 bp, Homo sapiens
gggcaatggctccat

SEQ ID NO: 559371 - DNA, 15 bp, Homo sapiens
ggcaatggctccatg

SEQ ID NO: 559372 - DNA, 15 bp, Homo sapiens
gcaatggctccatgc

SEQ ID NO: 559373 - DNA, 15 bp, Homo sapiens
caatggctccatgct

SEQ ID NO: 559374 - DNA, 15 bp, Homo sapiens
aatggctccatgctc

SEQ ID NO: 559375 - DNA, 15 bp, Homo sapiens
atggctccatgctca

SEQ ID NO: 559376 - DNA, 15 bp, Homo sapiens
tggctccatgctcat

SEQ ID NO: 559377 - DNA, 15 bp, Homo sapiens
ggctccatgctcatc

SEQ ID NO: 559378 - DNA, 15 bp, Homo sapiens
gctccatgctcatca

SEQ ID NO: 559379 - DNA, 15 bp, Homo sapiens
ctccatgctcatcat

SEQ ID NO: 559380 - DNA, 15 bp, Homo sapiens
tccatgctcatcatc

SEQ ID NO: 559381 - DNA, 15 bp, Homo sapiens
ccatgctcatcatcg

SEQ ID NO: 559382 - DNA, 15 bp, Homo sapiens
catgctcatcatcgg

SEQ ID NO: 559383 - DNA, 15 bp, Homo sapiens
atgctcatcatcgga

SEQ ID NO: 559384 - DNA, 15 bp, Homo sapiens
tgctcatcatcggag

SEQ ID NO: 559385 - DNA, 15 bp, Homo sapiens
gctcatcatcggagc

SEQ ID NO: 559386 - DNA, 15 bp, Homo sapiens
ctcatcatcggagcc

SEQ ID NO: 559387 - DNA, 15 bp, Homo sapiens
tcatcatcggagccc

SEQ ID NO: 559388 - DNA, 15 bp, Homo sapiens
catcatcggagccct

SEQ ID NO: 559389 - DNA, 15 bp, Homo sapiens
atcatcggagccctg

SEQ ID NO: 559390 - DNA, 15 bp, Homo sapiens
tcatcggagccctgg

SEQ ID NO: 559391 - DNA, 15 bp, Homo sapiens
catcggagccctggg

SEQ ID NO: 559392 - DNA, 15 bp, Homo sapiens
atcggagccctgggc

SEQ ID NO: 559393 - DNA, 15 bp, Homo sapiens
tcggagccctgggct

SEQ ID NO: 559394 - DNA, 15 bp, Homo sapiens
cggagccctgggctc

SEQ ID NO: 559395 - DNA, 15 bp, Homo sapiens
ggagccctgggctca

SEQ ID NO: 559396 - DNA, 15 bp, Homo sapiens
gagccctgggctcat

SEQ ID NO: 559397 - DNA, 15 bp, Homo sapiens
agccctgggctcatg

SEQ ID NO: 559398 - DNA, 15 bp, Homo sapiens
gccctgggctcatga

SEQ ID NO: 559399 - DNA, 15 bp, Homo sapiens
ccctgggctcatgat

SEQ ID NO: 559400 - DNA, 15 bp, Homo sapiens
cctgggctcatgatt

SEQ ID NO: 559401 - DNA, 15 bp, Homo sapiens
ctgggctcatgattc

SEQ ID NO: 559402 - DNA, 15 bp, Homo sapiens
tgggctcatgattca

SEQ ID NO: 559403 - DNA, 15 bp, Homo sapiens
gggctcatgattcag

SEQ ID NO: 559404 - DNA, 15 bp, Homo sapiens
ggctcatgattcaga

SEQ ID NO: 559405 - DNA, 15 bp, Homo sapiens
gctcatgattcagag

SEQ ID NO: 559406 - DNA, 15 bp, Homo sapiens
ctcatgattcagagg

SEQ ID NO: 559407 - DNA, 15 bp, Homo sapiens
tcatgattcagaggc

SEQ ID NO: 559408 - DNA, 15 bp, Homo sapiens
catgattcagaggct

SEQ ID NO: 559409 - DNA, 15 bp, Homo sapiens
atgattcagaggctg

SEQ ID NO: 559410 - DNA, 15 bp, Homo sapiens
tgattcagaggctga

SEQ ID NO: 559411 - DNA, 15 bp, Homo sapiens
gattcagaggctgag

SEQ ID NO: 559412 - DNA, 15 bp, Homo sapiens
attcagaggctgagg

SEQ ID NO: 559413 - DNA, 15 bp, Homo sapiens
ttcagaggctgaggc

SEQ ID NO: 559414 - DNA, 15 bp, Homo sapiens
tcagaggctgaggca

SEQ ID NO: 559415 - DNA, 15 bp, Homo sapiens
cagaggctgaggcaa

SEQ ID NO: 559416 - DNA, 15 bp, Homo sapiens
agaggctgaggcaag

SEQ ID NO: 559417 - DNA, 15 bp, Homo sapiens
gaggctgaggcaagc

SEQ ID NO: 559418 - DNA, 15 bp, Homo sapiens
aggctgaggcaagct

SEQ ID NO: 559419 - DNA, 15 bp, Homo sapiens
ggctgaggcaagctg

SEQ ID NO: 559420 - DNA, 15 bp, Homo sapiens
gctgaggcaagctgc

SEQ ID NO: 559421 - DNA, 15 bp, Homo sapiens
ctgaggcaagctgcc

SEQ ID NO: 559422 - DNA, 15 bp, Homo sapiens
tgaggcaagctgccc

SEQ ID NO: 559423 - DNA, 15 bp, Homo sapiens
gaggcaagctgccct

SEQ ID NO: 559424 - DNA, 15 bp, Homo sapiens
aggcaagctgccctg

SEQ ID NO: 559425 - DNA, 15 bp, Homo sapiens
ggcaagctgccctgt

SEQ ID NO: 559426 - DNA, 15 bp, Homo sapiens
gcaagctgccctgtc

SEQ ID NO: 559427 - DNA, 15 bp, Homo sapiens
caagctgccctgtca

SEQ ID NO: 559428 - DNA, 15 bp, Homo sapiens
aagctgccctgtcag

SEQ ID NO: 559429 - DNA, 15 bp, Homo sapiens
agctgccctgtcagt

SEQ ID NO: 559430 - DNA, 15 bp, Homo sapiens
gctgccctgtcagtg

SEQ ID NO: 559431 - DNA, 15 bp, Homo sapiens
ctgccctgtcagtgc

SEQ ID NO: 559432 - DNA, 15 bp, Homo sapiens
tgccctgtcagtgct

SEQ ID NO: 559433 - DNA, 15 bp, Homo sapiens
gccctgtcagtgctg

SEQ ID NO: 559434 - DNA, 15 bp, Homo sapiens
ccctgtcagtgctga

SEQ ID NO: 559435 - DNA, 15 bp, Homo sapiens
cctgtcagtgctgac

SEQ ID NO: 559436 - DNA, 15 bp, Homo sapiens
ctgtcagtgctgacc

SEQ ID NO: 559437 - DNA, 15 bp, Homo sapiens
tgtcagtgctgaccg

SEQ ID NO: 559438 - DNA, 15 bp, Homo sapiens
gtcagtgctgaccgc

SEQ ID NO: 559439 - DNA, 15 bp, Homo sapiens
tcagtgctgaccgcc

SEQ ID NO: 559440 - DNA, 15 bp, Homo sapiens
cagtgctgaccgcct

SEQ ID NO: 559441 - DNA, 15 bp, Homo sapiens
agtgctgaccgcctc

SEQ ID NO: 559442 - DNA, 15 bp, Homo sapiens
gtgctgaccgcctct

SEQ ID NO: 559443 - DNA, 15 bp, Homo sapiens
tgctgaccgcctctg

SEQ ID NO: 559444 - DNA, 15 bp, Homo sapiens
gctgaccgcctctgg

SEQ ID NO: 559445 - DNA, 15 bp, Homo sapiens
ctgaccgcctctggg

SEQ ID NO: 559446 - DNA, 15 bp, Homo sapiens
tgaccgcctctgggc

SEQ ID NO: 559447 - DNA, 15 bp, Homo sapiens
gaccgcctctgggct

SEQ ID NO: 559448 - DNA, 15 bp, Homo sapiens
accgcctctgggctt

SEQ ID NO: 559449 - DNA, 15 bp, Homo sapiens
ccgcctctgggcttt

SEQ ID NO: 559450 - DNA, 15 bp, Homo sapiens
cgcctctgggctttg

SEQ ID NO: 559451 - DNA, 15 bp, Homo sapiens
gcctctgggctttgt

SEQ ID NO: 559452 - DNA, 15 bp, Homo sapiens
cctctgggctttgtc

SEQ ID NO: 559453 - DNA, 15 bp, Homo sapiens
ctctgggctttgtct

SEQ ID NO: 559454 - DNA, 15 bp, Homo sapiens
tctgggctttgtctc

SEQ ID NO: 559455 - DNA, 15 bp, Homo sapiens
ctgggctttgtctct

SEQ ID NO: 559456 - DNA, 15 bp, Homo sapiens
tgggctttgtctctt

SEQ ID NO: 559457 - DNA, 15 bp, Homo sapiens
gggctttgtctcttc

SEQ ID NO: 559458 - DNA, 15 bp, Homo sapiens
ggctttgtctcttct

SEQ ID NO: 559459 - DNA, 15 bp, Homo sapiens
gctttgtctcttctc

SEQ ID NO: 559460 - DNA, 15 bp, Homo sapiens
ctttgtctcttctca

SEQ ID NO: 559461 - DNA, 15 bp, Homo sapiens
tttgtctcttctcac

SEQ ID NO: 559462 - DNA, 15 bp, Homo sapiens
ttgtctcttctcact

SEQ ID NO: 559463 - DNA, 15 bp, Homo sapiens
tgtctcttctcactt

SEQ ID NO: 559464 - DNA, 15 bp, Homo sapiens
gtctcttctcacttt

SEQ ID NO: 559465 - DNA, 15 bp, Homo sapiens
tctcttctcacttta

SEQ ID NO: 559466 - DNA, 15 bp, Homo sapiens
ctcttctcactttag

SEQ ID NO: 559467 - DNA, 15 bp, Homo sapiens
tcttctcactttagg

SEQ ID NO: 559468 - DNA, 15 bp, Homo sapiens
cttctcactttaggg

SEQ ID NO: 559469 - DNA, 15 bp, Homo sapiens
ttctcactttaggga

SEQ ID NO: 559470 - DNA, 15 bp, Homo sapiens
tctcactttagggag

SEQ ID NO: 559471 - DNA, 15 bp, Homo sapiens
ctcactttagggagt

SEQ ID NO: 559472 - DNA, 15 bp, Homo sapiens
tcactttagggagtc

SEQ ID NO: 559473 - DNA, 15 bp, Homo sapiens
cactttagggagtct

SEQ ID NO: 559474 - DNA, 15 bp, Homo sapiens
actttagggagtctc

SEQ ID NO: 559475 - DNA, 15 bp, Homo sapiens
ctttagggagtctcc

SEQ ID NO: 559476 - DNA, 15 bp, Homo sapiens
tttagggagtctccg

SEQ ID NO: 559477 - DNA, 15 bp, Homo sapiens
ttagggagtctccgg

SEQ ID NO: 559478 - DNA, 15 bp, Homo sapiens
tagggagtctccggt

SEQ ID NO: 559479 - DNA, 15 bp, Homo sapiens
agggagtctccggtg

SEQ ID NO: 559480 - DNA, 15 bp, Homo sapiens
gggagtctccggtgg

SEQ ID NO: 559481 - DNA, 15 bp, Homo sapiens
ggagtctccggtgga

SEQ ID NO: 559482 - DNA, 15 bp, Homo sapiens
gagtctccggtggac

SEQ ID NO: 559483 - DNA, 15 bp, Homo sapiens
agtctccggtggact

SEQ ID NO: 559484 - DNA, 15 bp, Homo sapiens
gtctccggtggactg

SEQ ID NO: 559485 - DNA, 15 bp, Homo sapiens
tctccggtggactgc

SEQ ID NO: 559486 - DNA, 15 bp, Homo sapiens
ctccggtggactgca

SEQ ID NO: 559487 - DNA, 15 bp, Homo sapiens
tccggtggactgcag

SEQ ID NO: 559488 - DNA, 15 bp, Homo sapiens
ccggtggactgcagc

SEQ ID NO: 559489 - DNA, 15 bp, Homo sapiens
cggtggactgcagcg

SEQ ID NO: 559490 - DNA, 15 bp, Homo sapiens
ggtggactgcagcgt

SEQ ID NO: 559491 - DNA, 15 bp, Homo sapiens
gtggactgcagcgtt

SEQ ID NO: 559492 - DNA, 15 bp, Homo sapiens
tggactgcagcgtta

SEQ ID NO: 559493 - DNA, 15 bp, Homo sapiens
ggactgcagcgttag

SEQ ID NO: 559494 - DNA, 15 bp, Homo sapiens
gactgcagcgttagc

SEQ ID NO: 559495 - DNA, 15 bp, Homo sapiens
actgcagcgttagca

SEQ ID NO: 559496 - DNA, 15 bp, Homo sapiens
ctgcagcgttagcaa

SEQ ID NO: 559497 - DNA, 15 bp, Homo sapiens
tgcagcgttagcaaa

SEQ ID NO: 559498 - DNA, 15 bp, Homo sapiens
gcagcgttagcaaat

SEQ ID NO: 559499 - DNA, 15 bp, Homo sapiens
cagcgttagcaaatg

SEQ ID NO: 559500 - DNA, 15 bp, Homo sapiens
agcgttagcaaatgc

SEQ ID NO: 559501 - DNA, 15 bp, Homo sapiens
gcgttagcaaatgca

SEQ ID NO: 559502 - DNA, 15 bp, Homo sapiens
cgttagcaaatgcag

SEQ ID NO: 559503 - DNA, 15 bp, Homo sapiens
gttagcaaatgcagc

SEQ ID NO: 559504 - DNA, 15 bp, Homo sapiens
ttagcaaatgcagca

SEQ ID NO: 559505 - DNA, 15 bp, Homo sapiens
tagcaaatgcagcaa

SEQ ID NO: 559506 - DNA, 15 bp, Homo sapiens
agcaaatgcagcaag

SEQ ID NO: 559507 - DNA, 15 bp, Homo sapiens
gcaaatgcagcaagc

SEQ ID NO: 559508 - DNA, 15 bp, Homo sapiens
caaatgcagcaagct

SEQ ID NO: 559509 - DNA, 15 bp, Homo sapiens
aaatgcagcaagctg

SEQ ID NO: 559510 - DNA, 15 bp, Homo sapiens
aatgcagcaagctgg

SEQ ID NO: 559511 - DNA, 15 bp, Homo sapiens
atgcagcaagctggt

SEQ ID NO: 559512 - DNA, 15 bp, Homo sapiens
tgcagcaagctggtg

SEQ ID NO: 559513 - DNA, 15 bp, Homo sapiens
gcagcaagctggtgg

SEQ ID NO: 559514 - DNA, 15 bp, Homo sapiens
cagcaagctggtggg

SEQ ID NO: 559515 - DNA, 15 bp, Homo sapiens
agcaagctggtgggc

SEQ ID NO: 559516 - DNA, 15 bp, Homo sapiens
gcaagctggtgggcg

SEQ ID NO: 559517 - DNA, 15 bp, Homo sapiens
caagctggtgggcgg

SEQ ID NO: 559518 - DNA, 15 bp, Homo sapiens
aagctggtgggcgga

SEQ ID NO: 559519 - DNA, 15 bp, Homo sapiens
agctggtgggcggag

SEQ ID NO: 559520 - DNA, 15 bp, Homo sapiens
gctggtgggcggagg

SEQ ID NO: 559521 - DNA, 15 bp, Homo sapiens
ctggtgggcggaggc

SEQ ID NO: 559522 - DNA, 15 bp, Homo sapiens
tggtgggcggaggcg

SEQ ID NO: 559523 - DNA, 15 bp, Homo sapiens
ggtgggcggaggcga

SEQ ID NO: 559524 - DNA, 15 bp, Homo sapiens
gtgggcggaggcgag

SEQ ID NO: 559525 - DNA, 15 bp, Homo sapiens
tgggcggaggcgagt

SEQ ID NO: 559526 - DNA, 15 bp, Homo sapiens
gggcggaggcgagtc

SEQ ID NO: 559527 - DNA, 15 bp, Homo sapiens
ggcggaggcgagtcc

SEQ ID NO: 559528 - DNA, 15 bp, Homo sapiens
gcggaggcgagtcca

SEQ ID NO: 559529 - DNA, 15 bp, Homo sapiens
cggaggcgagtccaa

SEQ ID NO: 559530 - DNA, 15 bp, Homo sapiens
ggaggcgagtccaac

SEQ ID NO: 559531 - DNA, 15 bp, Homo sapiens
gaggcgagtccaacc

SEQ ID NO: 559532 - DNA, 15 bp, Homo sapiens
aggcgagtccaaccc

SEQ ID NO: 559533 - DNA, 15 bp, Homo sapiens
ggcgagtccaacccc

SEQ ID NO: 559534 - DNA, 15 bp, Homo sapiens
gcgagtccaacccca

SEQ ID NO: 559535 - DNA, 15 bp, Homo sapiens
cgagtccaaccccat

SEQ ID NO: 559536 - DNA, 15 bp, Homo sapiens
gagtccaaccccatg

SEQ ID NO: 559537 - DNA, 15 bp, Homo sapiens
agtccaaccccatga

SEQ ID NO: 559538 - DNA, 15 bp, Homo sapiens
gtccaaccccatgaa

SEQ ID NO: 559539 - DNA, 15 bp, Homo sapiens
tccaaccccatgaac

SEQ ID NO: 559540 - DNA, 15 bp, Homo sapiens
ccaaccccatgaact

SEQ ID NO: 559541 - DNA, 15 bp, Homo sapiens
caaccccatgaacta

SEQ ID NO: 559542 - DNA, 15 bp, Homo sapiens
aaccccatgaactac

SEQ ID NO: 559543 - DNA, 15 bp, Homo sapiens
accccatgaactaca

SEQ ID NO: 559544 - DNA, 15 bp, Homo sapiens
ccccatgaactacaa

SEQ ID NO: 559545 - DNA, 15 bp, Homo sapiens
cccatgaactacaac

SEQ ID NO: 559546 - DNA, 15 bp, Homo sapiens
ccatgaactacaaca

SEQ ID NO: 559547 - DNA, 15 bp, Homo sapiens
catgaactacaacag

SEQ ID NO: 559548 - DNA, 15 bp, Homo sapiens
atgaactacaacagc

SEQ ID NO: 559549 - DNA, 15 bp, Homo sapiens
tgaactacaacagct

SEQ ID NO: 559550 - DNA, 15 bp, Homo sapiens
gaactacaacagcta

SEQ ID NO: 559551 - DNA, 15 bp, Homo sapiens
aactacaacagctat

SEQ ID NO: 559552 - DNA, 15 bp, Homo sapiens
actacaacagctata

SEQ ID NO: 559553 - DNA, 15 bp, Homo sapiens
ctacaacagctatat

SEQ ID NO: 559554 - DNA, 15 bp, Homo sapiens
tacaacagctatatg

SEQ ID NO: 559555 - DNA, 15 bp, Homo sapiens
acaacagctatatgg

SEQ ID NO: 559556 - DNA, 15 bp, Homo sapiens
caacagctatatgga

SEQ ID NO: 559557 - DNA, 15 bp, Homo sapiens
aacagctatatggac

SEQ ID NO: 559558 - DNA, 15 bp, Homo sapiens
acagctatatggacg

SEQ ID NO: 559559 - DNA, 15 bp, Homo sapiens
cagctatatggacga

SEQ ID NO: 559560 - DNA, 15 bp, Homo sapiens
agctatatggacgag

SEQ ID NO: 559561 - DNA, 15 bp, Homo sapiens
gctatatggacgaga

SEQ ID NO: 559562 - DNA, 15 bp, Homo sapiens
ctatatggacgagaa

SEQ ID NO: 559563 - DNA, 15 bp, Homo sapiens
tatatggacgagaag

SEQ ID NO: 559564 - DNA, 15 bp, Homo sapiens
atatggacgagaaga

SEQ ID NO: 559565 - DNA, 15 bp, Homo sapiens
tatggacgagaagaa

SEQ ID NO: 559566 - DNA, 15 bp, Homo sapiens
atggacgagaagaat

SEQ ID NO: 559567 - DNA, 15 bp, Homo sapiens
tggacgagaagaatg

SEQ ID NO: 559568 - DNA, 15 bp, Homo sapiens
ggacgagaagaatgg

SEQ ID NO: 559569 - DNA, 15 bp, Homo sapiens
gacgagaagaatggc

SEQ ID NO: 559570 - DNA, 15 bp, Homo sapiens
acgagaagaatggcc

SEQ ID NO: 559571 - DNA, 15 bp, Homo sapiens
cgagaagaatggccc

SEQ ID NO: 559572 - DNA, 15 bp, Homo sapiens
gagaagaatggcccc

SEQ ID NO: 559573 - DNA, 15 bp, Homo sapiens
agaagaatggccccc

SEQ ID NO: 559574 - DNA, 15 bp, Homo sapiens
gaagaatggcccccc

SEQ ID NO: 559575 - DNA, 15 bp, Homo sapiens
aagaatggcccccct

SEQ ID NO: 559576 - DNA, 15 bp, Homo sapiens
agaatggcccccctc

SEQ ID NO: 559577 - DNA, 15 bp, Homo sapiens
gaatggcccccctcc

SEQ ID NO: 559578 - DNA, 15 bp, Homo sapiens
aatggcccccctcct

SEQ ID NO: 559579 - DNA, 15 bp, Homo sapiens
atggcccccctcctc

SEQ ID NO: 559580 - DNA, 15 bp, Homo sapiens
tggcccccctcctcc

SEQ ID NO: 559581 - DNA, 15 bp, Homo sapiens
ggcccccctcctccc

SEQ ID NO: 559582 - DNA, 15 bp, Homo sapiens
gcccccctcctccca

SEQ ID NO: 559583 - DNA, 15 bp, Homo sapiens
cccccctcctcccaa

SEQ ID NO: 559584 - DNA, 15 bp, Homo sapiens
ccccctcctcccaac

SEQ ID NO: 559585 - DNA, 15 bp, Homo sapiens
cccctcctcccaaca

SEQ ID NO: 559586 - DNA, 15 bp, Homo sapiens
ccctcctcccaacat

SEQ ID NO: 559587 - DNA, 15 bp, Homo sapiens
cctcctcccaacatg

SEQ ID NO: 559588 - DNA, 15 bp, Homo sapiens
ctcctcccaacatga

SEQ ID NO: 559589 - DNA, 15 bp, Homo sapiens
tcctcccaacatgac

SEQ ID NO: 559590 - DNA, 15 bp, Homo sapiens
cctcccaacatgacc

SEQ ID NO: 559591 - DNA, 15 bp, Homo sapiens
ctcccaacatgacca

SEQ ID NO: 559592 - DNA, 15 bp, Homo sapiens
tcccaacatgaccac

SEQ ID NO: 559593 - DNA, 15 bp, Homo sapiens
cccaacatgaccacc

SEQ ID NO: 559594 - DNA, 15 bp, Homo sapiens
ccaacatgaccacca

SEQ ID NO: 559595 - DNA, 15 bp, Homo sapiens
caacatgaccaccaa

SEQ ID NO: 559596 - DNA, 15 bp, Homo sapiens
aacatgaccaccaac

SEQ ID NO: 559597 - DNA, 15 bp, Homo sapiens
acatgaccaccaacg

SEQ ID NO: 559598 - DNA, 15 bp, Homo sapiens
catgaccaccaacga

SEQ ID NO: 559599 - DNA, 15 bp, Homo sapiens
atgaccaccaacgag

SEQ ID NO: 559600 - DNA, 15 bp, Homo sapiens
tgaccaccaacgaga

SEQ ID NO: 559601 - DNA, 15 bp, Homo sapiens
gaccaccaacgagag

SEQ ID NO: 559602 - DNA, 15 bp, Homo sapiens
accaccaacgagagg

SEQ ID NO: 559603 - DNA, 15 bp, Homo sapiens
ccaccaacgagagga

SEQ ID NO: 559604 - DNA, 15 bp, Homo sapiens
caccaacgagaggag

SEQ ID NO: 559605 - DNA, 15 bp, Homo sapiens
accaacgagaggaga

SEQ ID NO: 559606 - DNA, 15 bp, Homo sapiens
ccaacgagaggagag

SEQ ID NO: 559607 - DNA, 15 bp, Homo sapiens
caacgagaggagagt

SEQ ID NO: 559608 - DNA, 15 bp, Homo sapiens
aacgagaggagagtc

SEQ ID NO: 559609 - DNA, 15 bp, Homo sapiens
acgagaggagagtca

SEQ ID NO: 559610 - DNA, 15 bp, Homo sapiens
cgagaggagagtcat

SEQ ID NO: 559611 - DNA, 15 bp, Homo sapiens
gagaggagagtcatc

SEQ ID NO: 559612 - DNA, 15 bp, Homo sapiens
agaggagagtcatcg

SEQ ID NO: 559613 - DNA, 15 bp, Homo sapiens
gaggagagtcatcgt

SEQ ID NO: 559614 - DNA, 15 bp, Homo sapiens
aggagagtcatcgtc

SEQ ID NO: 559615 - DNA, 15 bp, Homo sapiens
ggagagtcatcgtcc

SEQ ID NO: 559616 - DNA, 15 bp, Homo sapiens
gagagtcatcgtccc

SEQ ID NO: 559617 - DNA, 15 bp, Homo sapiens
agagtcatcgtcccc

SEQ ID NO: 559618 - DNA, 15 bp, Homo sapiens
gagtcatcgtccccg

SEQ ID NO: 559619 - DNA, 15 bp, Homo sapiens
agtcatcgtccccgc

SEQ ID NO: 559620 - DNA, 15 bp, Homo sapiens
gtcatcgtccccgca

SEQ ID NO: 559621 - DNA, 15 bp, Homo sapiens
tcatcgtccccgcag

SEQ ID NO: 559622 - DNA, 15 bp, Homo sapiens
catcgtccccgcagg

SEQ ID NO: 559623 - DNA, 15 bp, Homo sapiens
atcgtccccgcaggt

SEQ ID NO: 559624 - DNA, 15 bp, Homo sapiens
tcgtccccgcaggta

SEQ ID NO: 559625 - DNA, 15 bp, Homo sapiens
cgtccccgcaggtaa

SEQ ID NO: 559626 - DNA, 15 bp, Homo sapiens
gtccccgcaggtaat

SEQ ID NO: 559627 - DNA, 15 bp, Homo sapiens
tccccgcaggtaatt

SEQ ID NO: 559628 - DNA, 15 bp, Homo sapiens
ccccgcaggtaattc

SEQ ID NO: 559629 - DNA, 15 bp, Homo sapiens
cccgcaggtaattcg

SEQ ID NO: 559630 - DNA, 15 bp, Homo sapiens
ccgcaggtaattcga

SEQ ID NO: 559631 - DNA, 15 bp, Homo sapiens
cgcaggtaattcgag

SEQ ID NO: 559632 - DNA, 15 bp, Homo sapiens
gcaggtaattcgaga

SEQ ID NO: 559633 - DNA, 15 bp, Homo sapiens
caggtaattcgagaa

SEQ ID NO: 559634 - DNA, 15 bp, Homo sapiens
aggtaattcgagaac

SEQ ID NO: 559635 - DNA, 15 bp, Homo sapiens
ggtaattcgagaacc

SEQ ID NO: 559636 - DNA, 15 bp, Homo sapiens
gtaattcgagaacca

SEQ ID NO: 559637 - DNA, 15 bp, Homo sapiens
taattcgagaaccag

SEQ ID NO: 559638 - DNA, 15 bp, Homo sapiens
aattcgagaaccagg

SEQ ID NO: 559639 - DNA, 15 bp, Homo sapiens
attcgagaaccaggc

SEQ ID NO: 559640 - DNA, 15 bp, Homo sapiens
ttcgagaaccaggct

SEQ ID NO: 559641 - DNA, 15 bp, Homo sapiens
tcgagaaccaggctg

SEQ ID NO: 559642 - DNA, 15 bp, Homo sapiens
cgagaaccaggctgc

SEQ ID NO: 559643 - DNA, 15 bp, Homo sapiens
gagaaccaggctgcc

SEQ ID NO: 559644 - DNA, 15 bp, Homo sapiens
agaaccaggctgcct

SEQ ID NO: 559645 - DNA, 15 bp, Homo sapiens
gaaccaggctgcctg

SEQ ID NO: 559646 - DNA, 15 bp, Homo sapiens
aaccaggctgcctgg

SEQ ID NO: 559647 - DNA, 15 bp, Homo sapiens
accaggctgcctggg

SEQ ID NO: 559648 - DNA, 15 bp, Homo sapiens
ccaggctgcctgggc

SEQ ID NO: 559649 - DNA, 15 bp, Homo sapiens
caggctgcctgggcg

SEQ ID NO: 559650 - DNA, 15 bp, Homo sapiens
aggctgcctgggcgc

SEQ ID NO: 559651 - DNA, 15 bp, Homo sapiens
ggctgcctgggcgcc

SEQ ID NO: 559652 - DNA, 15 bp, Homo sapiens
gctgcctgggcgcca

SEQ ID NO: 559653 - DNA, 15 bp, Homo sapiens
ctgcctgggcgccat

SEQ ID NO: 559654 - DNA, 15 bp, Homo sapiens
tgcctgggcgccatt

SEQ ID NO: 559655 - DNA, 15 bp, Homo sapiens
gcctgggcgccattc

SEQ ID NO: 559656 - DNA, 15 bp, Homo sapiens
cctgggcgccattca

SEQ ID NO: 559657 - DNA, 15 bp, Homo sapiens
ctgggcgccattcac

SEQ ID NO: 559658 - DNA, 15 bp, Homo sapiens
tgggcgccattcact

SEQ ID NO: 559659 - DNA, 15 bp, Homo sapiens
gggcgccattcactt

SEQ ID NO: 559660 - DNA, 15 bp, Homo sapiens
ggcgccattcacttc

SEQ ID NO: 559661 - DNA, 15 bp, Homo sapiens
gcgccattcacttcc

SEQ ID NO: 559662 - DNA, 15 bp, Homo sapiens
cgccattcacttccc

SEQ ID NO: 559663 - DNA, 15 bp, Homo sapiens
gccattcacttcccc

SEQ ID NO: 559664 - DNA, 15 bp, Homo sapiens
ccattcacttcccca

SEQ ID NO: 559665 - DNA, 15 bp, Homo sapiens
cattcacttccccac

SEQ ID NO: 559666 - DNA, 15 bp, Homo sapiens
attcacttccccact

SEQ ID NO: 559667 - DNA, 15 bp, Homo sapiens
ttcacttccccactc

SEQ ID NO: 559668 - DNA, 15 bp, Homo sapiens
tcacttccccactct

SEQ ID NO: 559669 - DNA, 15 bp, Homo sapiens
cacttccccactctc

SEQ ID NO: 559670 - DNA, 15 bp, Homo sapiens
acttccccactctct

SEQ ID NO: 559671 - DNA, 15 bp, Homo sapiens
cttccccactctctg

SEQ ID NO: 559672 - DNA, 15 bp, Homo sapiens
ttccccactctctgg

SEQ ID NO: 559673 - DNA, 15 bp, Homo sapiens
tccccactctctggg

SEQ ID NO: 559674 - DNA, 15 bp, Homo sapiens
ccccactctctgggg

SEQ ID NO: 559675 - DNA, 15 bp, Homo sapiens
cccactctctggggg

SEQ ID NO: 559676 - DNA, 15 bp, Homo sapiens
ccactctctgggggg

SEQ ID NO: 559677 - DNA, 15 bp, Homo sapiens
cactctctggggggg

SEQ ID NO: 559678 - DNA, 15 bp, Homo sapiens
actctctgggggggc

SEQ ID NO: 559679 - DNA, 15 bp, Homo sapiens
ctctctgggggggca

SEQ ID NO: 559680 - DNA, 15 bp, Homo sapiens
tctctgggggggcag

SEQ ID NO: 559681 - DNA, 15 bp, Homo sapiens
ctctgggggggcagg

SEQ ID NO: 559682 - DNA, 15 bp, Homo sapiens
tctgggggggcaggg

SEQ ID NO: 559683 - DNA, 15 bp, Homo sapiens
ctgggggggcaggga

SEQ ID NO: 559684 - DNA, 15 bp, Homo sapiens
tgggggggcagggag

SEQ ID NO: 559685 - DNA, 15 bp, Homo sapiens
gggggggcagggagc

SEQ ID NO: 559686 - DNA, 15 bp, Homo sapiens
ggggggcagggagca

SEQ ID NO: 559687 - DNA, 15 bp, Homo sapiens
gggggcagggagcat

SEQ ID NO: 559688 - DNA, 15 bp, Homo sapiens
ggggcagggagcatc

SEQ ID NO: 559689 - DNA, 15 bp, Homo sapiens
gggcagggagcatct

SEQ ID NO: 559690 - DNA, 15 bp, Homo sapiens
ggcagggagcatcta

SEQ ID NO: 559691 - DNA, 15 bp, Homo sapiens
gcagggagcatctaa

SEQ ID NO: 559692 - DNA, 15 bp, Homo sapiens
cagggagcatctaaa

SEQ ID NO: 559693 - DNA, 15 bp, Homo sapiens
agggagcatctaaac

SEQ ID NO: 559694 - DNA, 15 bp, Homo sapiens
gggagcatctaaacc

SEQ ID NO: 559695 - DNA, 15 bp, Homo sapiens
ggagcatctaaacct

SEQ ID NO: 559696 - DNA, 15 bp, Homo sapiens
gagcatctaaacctt

SEQ ID NO: 559697 - DNA, 15 bp, Homo sapiens
agcatctaaaccttt

SEQ ID NO: 559698 - DNA, 15 bp, Homo sapiens
gcatctaaaccttta

SEQ ID NO: 559699 - DNA, 15 bp, Homo sapiens
catctaaacctttat

SEQ ID NO: 559700 - DNA, 15 bp, Homo sapiens
atctaaacctttatc

SEQ ID NO: 559701 - DNA, 15 bp, Homo sapiens
tctaaacctttatct

SEQ ID NO: 559702 - DNA, 15 bp, Homo sapiens
ctaaacctttatctg

SEQ ID NO: 559703 - DNA, 15 bp, Homo sapiens
taaacctttatctga

SEQ ID NO: 559704 - DNA, 15 bp, Homo sapiens
aaacctttatctgat

SEQ ID NO: 559705 - DNA, 15 bp, Homo sapiens
aacctttatctgata

SEQ ID NO: 559706 - DNA, 15 bp, Homo sapiens
acctttatctgatac

SEQ ID NO: 559707 - DNA, 15 bp, Homo sapiens
cctttatctgatact

SEQ ID NO: 559708 - DNA, 15 bp, Homo sapiens
ctttatctgatactc

SEQ ID NO: 559709 - DNA, 15 bp, Homo sapiens
tttatctgatactct

SEQ ID NO: 559710 - DNA, 15 bp, Homo sapiens
ttatctgatactcta

SEQ ID NO: 559711 - DNA, 15 bp, Homo sapiens
tatctgatactctat

SEQ ID NO: 559712 - DNA, 15 bp, Homo sapiens
atctgatactctatt

SEQ ID NO: 559713 - DNA, 15 bp, Homo sapiens
tctgatactctattc

SEQ ID NO: 559714 - DNA, 15 bp, Homo sapiens
ctgatactctattcc

SEQ ID NO: 559715 - DNA, 15 bp, Homo sapiens
tgatactctattccc

SEQ ID NO: 559716 - DNA, 15 bp, Homo sapiens
gatactctattccct

SEQ ID NO: 559717 - DNA, 15 bp, Homo sapiens
atactctattccctg

SEQ ID NO: 559718 - DNA, 15 bp, Homo sapiens
tactctattccctgt

SEQ ID NO: 559719 - DNA, 15 bp, Homo sapiens
actctattccctgtg

SEQ ID NO: 559720 - DNA, 15 bp, Homo sapiens
ctctattccctgtgg

SEQ ID NO: 559721 - DNA, 15 bp, Homo sapiens
tctattccctgtgga

SEQ ID NO: 559722 - DNA, 15 bp, Homo sapiens
ctattccctgtggaa

SEQ ID NO: 559723 - DNA, 15 bp, Homo sapiens
tattccctgtggaat

SEQ ID NO: 559724 - DNA, 15 bp, Homo sapiens
attccctgtggaatt

SEQ ID NO: 559725 - DNA, 15 bp, Homo sapiens
ttccctgtggaattg

SEQ ID NO: 559726 - DNA, 15 bp, Homo sapiens
tccctgtggaattgc

SEQ ID NO: 559727 - DNA, 15 bp, Homo sapiens
ccctgtggaattgca

SEQ ID NO: 559728 - DNA, 15 bp, Homo sapiens
cctgtggaattgcaa

SEQ ID NO: 559729 - DNA, 15 bp, Homo sapiens
ctgtggaattgcaaa

SEQ ID NO: 559730 - DNA, 15 bp, Homo sapiens
tgtggaattgcaaaa

SEQ ID NO: 559731 - DNA, 15 bp, Homo sapiens
gtggaattgcaaaat

SEQ ID NO: 559732 - DNA, 15 bp, Homo sapiens
tggaattgcaaaatg

SEQ ID NO: 559733 - DNA, 15 bp, Homo sapiens
ggaattgcaaaatgg

SEQ ID NO: 559734 - DNA, 15 bp, Homo sapiens
gaattgcaaaatgga

SEQ ID NO: 559735 - DNA, 15 bp, Homo sapiens
aattgcaaaatggag

SEQ ID NO: 559736 - DNA, 15 bp, Homo sapiens
attgcaaaatggaga

SEQ ID NO: 559737 - DNA, 15 bp, Homo sapiens
ttgcaaaatggagaa

SEQ ID NO: 559738 - DNA, 15 bp, Homo sapiens
tgcaaaatggagaaa

SEQ ID NO: 559739 - DNA, 15 bp, Homo sapiens
gcaaaatggagaaag

SEQ ID NO: 559740 - DNA, 15 bp, Homo sapiens
caaaatggagaaagc

SEQ ID NO: 559741 - DNA, 15 bp, Homo sapiens
aaaatggagaaagct

SEQ ID NO: 559742 - DNA, 15 bp, Homo sapiens
aaatggagaaagctg

SEQ ID NO: 559743 - DNA, 15 bp, Homo sapiens
aatggagaaagctgc

SEQ ID NO: 559744 - DNA, 15 bp, Homo sapiens
atggagaaagctgca

SEQ ID NO: 559745 - DNA, 15 bp, Homo sapiens
tggagaaagctgcac

SEQ ID NO: 559746 - DNA, 15 bp, Homo sapiens
ggagaaagctgcacg

SEQ ID NO: 559747 - DNA, 15 bp, Homo sapiens
gagaaagctgcacgc

SEQ ID NO: 559748 - DNA, 15 bp, Homo sapiens
agaaagctgcacgcc

SEQ ID NO: 559749 - DNA, 15 bp, Homo sapiens
gaaagctgcacgcca

SEQ ID NO: 559750 - DNA, 15 bp, Homo sapiens
aaagctgcacgccag

SEQ ID NO: 559751 - DNA, 15 bp, Homo sapiens
aagctgcacgccagc

SEQ ID NO: 559752 - DNA, 15 bp, Homo sapiens
agctgcacgccagcc

SEQ ID NO: 559753 - DNA, 15 bp, Homo sapiens
gctgcacgccagccg

SEQ ID NO: 559754 - DNA, 15 bp, Homo sapiens
ctgcacgccagccgg

SEQ ID NO: 559755 - DNA, 15 bp, Homo sapiens
tgcacgccagccggg

SEQ ID NO: 559756 - DNA, 15 bp, Homo sapiens
gcacgccagccggga

SEQ ID NO: 559757 - DNA, 15 bp, Homo sapiens
cacgccagccgggag

SEQ ID NO: 559758 - DNA, 15 bp, Homo sapiens
acgccagccgggagt

SEQ ID NO: 559759 - DNA, 15 bp, Homo sapiens
cgccagccgggagtg

SEQ ID NO: 559760 - DNA, 15 bp, Homo sapiens
gccagccgggagtgg

SEQ ID NO: 559761 - DNA, 15 bp, Homo sapiens
ccagccgggagtggt

SEQ ID NO: 559762 - DNA, 15 bp, Homo sapiens
cagccgggagtggtg

SEQ ID NO: 559763 - DNA, 15 bp, Homo sapiens
agccgggagtggtgg

SEQ ID NO: 559764 - DNA, 15 bp, Homo sapiens
gccgggagtggtggc

SEQ ID NO: 559765 - DNA, 15 bp, Homo sapiens
ccgggagtggtggct

SEQ ID NO: 559766 - DNA, 15 bp, Homo sapiens
cgggagtggtggctc

SEQ ID NO: 559767 - DNA, 15 bp, Homo sapiens
gggagtggtggctcg

SEQ ID NO: 559768 - DNA, 15 bp, Homo sapiens
ggagtggtggctcgc

SEQ ID NO: 559769 - DNA, 15 bp, Homo sapiens
gagtggtggctcgcg

SEQ ID NO: 559770 - DNA, 15 bp, Homo sapiens
agtggtggctcgcgc

SEQ ID NO: 559771 - DNA, 15 bp, Homo sapiens
gtggtggctcgcgcc

SEQ ID NO: 559772 - DNA, 15 bp, Homo sapiens
tggtggctcgcgcct

SEQ ID NO: 559773 - DNA, 15 bp, Homo sapiens
ggtggctcgcgcctg

SEQ ID NO: 559774 - DNA, 15 bp, Homo sapiens
gtggctcgcgcctgt

SEQ ID NO: 559775 - DNA, 15 bp, Homo sapiens
tggctcgcgcctgta

SEQ ID NO: 559776 - DNA, 15 bp, Homo sapiens
ggctcgcgcctgtaa

SEQ ID NO: 559777 - DNA, 15 bp, Homo sapiens
gctcgcgcctgtaat

SEQ ID NO: 559778 - DNA, 15 bp, Homo sapiens
ctcgcgcctgtaatc

SEQ ID NO: 559779 - DNA, 15 bp, Homo sapiens
tcgcgcctgtaatcc

SEQ ID NO: 559780 - DNA, 15 bp, Homo sapiens
cgcgcctgtaatccc

SEQ ID NO: 559781 - DNA, 15 bp, Homo sapiens
atcccagcactttga

SEQ ID NO: 559782 - DNA, 15 bp, Homo sapiens
tcccagcactttgag

SEQ ID NO: 559783 - DNA, 15 bp, Homo sapiens
cccagcactttgaga

SEQ ID NO: 559784 - DNA, 15 bp, Homo sapiens
ccagcactttgagag

SEQ ID NO: 559785 - DNA, 15 bp, Homo sapiens
cagcactttgagagg

SEQ ID NO: 559786 - DNA, 15 bp, Homo sapiens
agcactttgagaggc

SEQ ID NO: 559787 - DNA, 15 bp, Homo sapiens
gcactttgagaggcc

SEQ ID NO: 559788 - DNA, 15 bp, Homo sapiens
cactttgagaggcca

SEQ ID NO: 559789 - DNA, 15 bp, Homo sapiens
actttgagaggccaa

SEQ ID NO: 559790 - DNA, 15 bp, Homo sapiens
ctttgagaggccaag

SEQ ID NO: 559791 - DNA, 15 bp, Homo sapiens
tttgagaggccaaga

SEQ ID NO: 559792 - DNA, 15 bp, Homo sapiens
ttgagaggccaagac

SEQ ID NO: 559793 - DNA, 15 bp, Homo sapiens
tgagaggccaagacg

SEQ ID NO: 559794 - DNA, 15 bp, Homo sapiens
gagaggccaagacgg

SEQ ID NO: 559795 - DNA, 15 bp, Homo sapiens
agaggccaagacggg

SEQ ID NO: 559796 - DNA, 15 bp, Homo sapiens
gaggccaagacgggt

SEQ ID NO: 559797 - DNA, 15 bp, Homo sapiens
aggccaagacgggtg

SEQ ID NO: 559798 - DNA, 15 bp, Homo sapiens
ggccaagacgggtga

SEQ ID NO: 559799 - DNA, 15 bp, Homo sapiens
gccaagacgggtgaa

SEQ ID NO: 559800 - DNA, 15 bp, Homo sapiens
ccaagacgggtgaat

SEQ ID NO: 559801 - DNA, 15 bp, Homo sapiens
caagacgggtgaatc

SEQ ID NO: 559802 - DNA, 15 bp, Homo sapiens
aagacgggtgaatca

SEQ ID NO: 559803 - DNA, 15 bp, Homo sapiens
agacgggtgaatcac

SEQ ID NO: 559804 - DNA, 15 bp, Homo sapiens
gacgggtgaatcact

SEQ ID NO: 559805 - DNA, 15 bp, Homo sapiens
acgggtgaatcactt

SEQ ID NO: 559806 - DNA, 15 bp, Homo sapiens
cgggtgaatcacttg

SEQ ID NO: 559807 - DNA, 15 bp, Homo sapiens
gggtgaatcacttgt

SEQ ID NO: 559808 - DNA, 15 bp, Homo sapiens
ggtgaatcacttgtc

SEQ ID NO: 559809 - DNA, 15 bp, Homo sapiens
gtgaatcacttgtca

SEQ ID NO: 559810 - DNA, 15 bp, Homo sapiens
tgaatcacttgtcag

SEQ ID NO: 559811 - DNA, 15 bp, Homo sapiens
gaatcacttgtcagg

SEQ ID NO: 559812 - DNA, 15 bp, Homo sapiens
aatcacttgtcagga

SEQ ID NO: 559813 - DNA, 15 bp, Homo sapiens
atcacttgtcaggag

SEQ ID NO: 559814 - DNA, 15 bp, Homo sapiens
tcacttgtcaggagt

SEQ ID NO: 559815 - DNA, 15 bp, Homo sapiens
cacttgtcaggagtt

SEQ ID NO: 559816 - DNA, 15 bp, Homo sapiens
acttgtcaggagttc

SEQ ID NO: 559817 - DNA, 15 bp, Homo sapiens
cttgtcaggagttca

SEQ ID NO: 559818 - DNA, 15 bp, Homo sapiens
ttgtcaggagttcaa

SEQ ID NO: 559819 - DNA, 15 bp, Homo sapiens
tgtcaggagttcaag

SEQ ID NO: 559820 - DNA, 15 bp, Homo sapiens
caagaccagcctagc

SEQ ID NO: 559821 - DNA, 15 bp, Homo sapiens
aagaccagcctagcc

SEQ ID NO: 559822 - DNA, 15 bp, Homo sapiens
agaccagcctagcca

SEQ ID NO: 559823 - DNA, 15 bp, Homo sapiens
gaccagcctagccaa

SEQ ID NO: 559824 - DNA, 15 bp, Homo sapiens
accagcctagccaac

SEQ ID NO: 559825 - DNA, 15 bp, Homo sapiens
ccagcctagccaacg

SEQ ID NO: 559826 - DNA, 15 bp, Homo sapiens
cagcctagccaacgt

SEQ ID NO: 559827 - DNA, 15 bp, Homo sapiens
agcctagccaacgtg

SEQ ID NO: 559828 - DNA, 15 bp, Homo sapiens
gcctagccaacgtgg

SEQ ID NO: 559829 - DNA, 15 bp, Homo sapiens
cctagccaacgtggt

SEQ ID NO: 559830 - DNA, 15 bp, Homo sapiens
ctagccaacgtggtg

SEQ ID NO: 559831 - DNA, 15 bp, Homo sapiens
tagccaacgtggtga

SEQ ID NO: 559832 - DNA, 15 bp, Homo sapiens
agccaacgtggtgaa

SEQ ID NO: 559833 - DNA, 15 bp, Homo sapiens
gccaacgtggtgaaa

SEQ ID NO: 559834 - DNA, 15 bp, Homo sapiens
ccaacgtggtgaaac

SEQ ID NO: 559835 - DNA, 15 bp, Homo sapiens
caacgtggtgaaacc

SEQ ID NO: 559836 - DNA, 15 bp, Homo sapiens
aacgtggtgaaacct

SEQ ID NO: 559837 - DNA, 15 bp, Homo sapiens
acgtggtgaaacctc

SEQ ID NO: 559838 - DNA, 15 bp, Homo sapiens
cgtggtgaaacctca

SEQ ID NO: 559839 - DNA, 15 bp, Homo sapiens
gtggtgaaacctcat

SEQ ID NO: 559840 - DNA, 15 bp, Homo sapiens
tggtgaaacctcatc

SEQ ID NO: 559841 - DNA, 15 bp, Homo sapiens
ggtgaaacctcatct

SEQ ID NO: 559842 - DNA, 15 bp, Homo sapiens
gtgaaacctcatctc

SEQ ID NO: 559843 - DNA, 15 bp, Homo sapiens
tgaaacctcatctct

SEQ ID NO: 559844 - DNA, 15 bp, Homo sapiens
gaaacctcatctcta

SEQ ID NO: 559845 - DNA, 15 bp, Homo sapiens
aaacctcatctctac

SEQ ID NO: 559846 - DNA, 15 bp, Homo sapiens
aacctcatctctact

SEQ ID NO: 559847 - DNA, 15 bp, Homo sapiens
acctcatctctacta

SEQ ID NO: 559848 - DNA, 15 bp, Homo sapiens
cctcatctctactaa

SEQ ID NO: 559849 - DNA, 15 bp, Homo sapiens
ctcatctctactaaa

SEQ ID NO: 559850 - DNA, 15 bp, Homo sapiens
tcatctctactaaaa

SEQ ID NO: 559851 - DNA, 15 bp, Homo sapiens
catctctactaaaaa

SEQ ID NO: 559852 - DNA, 15 bp, Homo sapiens
atctctactaaaaaa

SEQ ID NO: 559853 - DNA, 15 bp, Homo sapiens
tctctactaaaaaaa

SEQ ID NO: 559854 - DNA, 15 bp, Homo sapiens
ctctactaaaaaaaa

SEQ ID NO: 559855 - DNA, 15 bp, Homo sapiens
tctactaaaaaaaaa

SEQ ID NO: 559856 - DNA, 15 bp, Homo sapiens
ctactaaaaaaaaaa

SEQ ID NO: 559857 - DNA, 15 bp, Homo sapiens
tactaaaaaaaaaaa

SEQ ID NO: 559858 - DNA, 15 bp, Homo sapiens
actaaaaaaaaaaaa

SEQ ID NO: 559859 - DNA, 15 bp, Homo sapiens
aaaaaaaaaaaaata

SEQ ID NO: 559860 - DNA, 15 bp, Homo sapiens
aaaaaaaaaaaatac

SEQ ID NO: 559861 - DNA, 15 bp, Homo sapiens
aaaaaaaaaaataca

SEQ ID NO: 559862 - DNA, 15 bp, Homo sapiens
aaaaaaaaaatacaa

SEQ ID NO: 559863 - DNA, 15 bp, Homo sapiens
aaaaaaaaatacaaa

SEQ ID NO: 559864 - DNA, 15 bp, Homo sapiens
aaaaaaaatacaaaa

SEQ ID NO: 559865 - DNA, 15 bp, Homo sapiens
aaaaaaatacaaaaa

SEQ ID NO: 559866 - DNA, 15 bp, Homo sapiens
aaaaaatacaaaaat

SEQ ID NO: 559867 - DNA, 15 bp, Homo sapiens
tagccaggtgtggta

SEQ ID NO: 559868 - DNA, 15 bp, Homo sapiens
agccaggtgtggtag

SEQ ID NO: 559869 - DNA, 15 bp, Homo sapiens
gccaggtgtggtagt

SEQ ID NO: 559870 - DNA, 15 bp, Homo sapiens
ccaggtgtggtagtg

SEQ ID NO: 559871 - DNA, 15 bp, Homo sapiens
caggtgtggtagtgg

SEQ ID NO: 559872 - DNA, 15 bp, Homo sapiens
aggtgtggtagtgga

SEQ ID NO: 559873 - DNA, 15 bp, Homo sapiens
ggtgtggtagtggac

SEQ ID NO: 559874 - DNA, 15 bp, Homo sapiens
gtgtggtagtggacg

SEQ ID NO: 559875 - DNA, 15 bp, Homo sapiens
tgtggtagtggacgc

SEQ ID NO: 559876 - DNA, 15 bp, Homo sapiens
gtggtagtggacgct

SEQ ID NO: 559877 - DNA, 15 bp, Homo sapiens
tggtagtggacgctt

SEQ ID NO: 559878 - DNA, 15 bp, Homo sapiens
ggtagtggacgctta

SEQ ID NO: 559879 - DNA, 15 bp, Homo sapiens
gtagtggacgcttat

SEQ ID NO: 559880 - DNA, 15 bp, Homo sapiens
tagtggacgcttata

SEQ ID NO: 559881 - DNA, 15 bp, Homo sapiens
agtggacgcttatat

SEQ ID NO: 559882 - DNA, 15 bp, Homo sapiens
gtggacgcttatatt

SEQ ID NO: 559883 - DNA, 15 bp, Homo sapiens
tggacgcttatattc

SEQ ID NO: 559884 - DNA, 15 bp, Homo sapiens
ggacgcttatattcc

SEQ ID NO: 559885 - DNA, 15 bp, Homo sapiens
gacgcttatattccc

SEQ ID NO: 559886 - DNA, 15 bp, Homo sapiens
acgcttatattccca

SEQ ID NO: 559887 - DNA, 15 bp, Homo sapiens
cgcttatattcccag

SEQ ID NO: 559888 - DNA, 15 bp, Homo sapiens
gcttatattcccagc

SEQ ID NO: 559889 - DNA, 15 bp, Homo sapiens
cttatattcccagct

SEQ ID NO: 559890 - DNA, 15 bp, Homo sapiens
ttatattcccagcta

SEQ ID NO: 559891 - DNA, 15 bp, Homo sapiens
tatattcccagctac

SEQ ID NO: 559892 - DNA, 15 bp, Homo sapiens
atattcccagctact

SEQ ID NO: 559893 - DNA, 15 bp, Homo sapiens
tattcccagctactc

SEQ ID NO: 559894 - DNA, 15 bp, Homo sapiens
attcccagctactca

SEQ ID NO: 559895 - DNA, 15 bp, Homo sapiens
ttcccagctactcag

SEQ ID NO: 559896 - DNA, 15 bp, Homo sapiens
cccagctactcaggg

SEQ ID NO: 559897 - DNA, 15 bp, Homo sapiens
ccagctactcagggg

SEQ ID NO: 559898 - DNA, 15 bp, Homo sapiens
cagctactcaggggg

SEQ ID NO: 559899 - DNA, 15 bp, Homo sapiens
agctactcagggggc

SEQ ID NO: 559900 - DNA, 15 bp, Homo sapiens
gctactcagggggct

SEQ ID NO: 559901 - DNA, 15 bp, Homo sapiens
ctactcagggggctg

SEQ ID NO: 559902 - DNA, 15 bp, Homo sapiens
tactcagggggctga

SEQ ID NO: 559903 - DNA, 15 bp, Homo sapiens
actcagggggctgaa

SEQ ID NO: 559904 - DNA, 15 bp, Homo sapiens
ctcagggggctgaag

SEQ ID NO: 559905 - DNA, 15 bp, Homo sapiens
tcagggggctgaagc

SEQ ID NO: 559906 - DNA, 15 bp, Homo sapiens
cagggggctgaagca

SEQ ID NO: 559907 - DNA, 15 bp, Homo sapiens
agggggctgaagcag

SEQ ID NO: 559908 - DNA, 15 bp, Homo sapiens
gggggctgaagcagg

SEQ ID NO: 559909 - DNA, 15 bp, Homo sapiens
ggggctgaagcagga

SEQ ID NO: 559910 - DNA, 15 bp, Homo sapiens
gggctgaagcaggag

SEQ ID NO: 559911 - DNA, 15 bp, Homo sapiens
ggctgaagcaggaga

SEQ ID NO: 559912 - DNA, 15 bp, Homo sapiens
gctgaagcaggagac

SEQ ID NO: 559913 - DNA, 15 bp, Homo sapiens
ctgaagcaggagact

SEQ ID NO: 559914 - DNA, 15 bp, Homo sapiens
tgaagcaggagactc

SEQ ID NO: 559915 - DNA, 15 bp, Homo sapiens
gaagcaggagactcg

SEQ ID NO: 559916 - DNA, 15 bp, Homo sapiens
aagcaggagactcgc

SEQ ID NO: 559917 - DNA, 15 bp, Homo sapiens
agcaggagactcgct

SEQ ID NO: 559918 - DNA, 15 bp, Homo sapiens
gcaggagactcgctt

SEQ ID NO: 559919 - DNA, 15 bp, Homo sapiens
caggagactcgcttt

SEQ ID NO: 559920 - DNA, 15 bp, Homo sapiens
aggagactcgcttta

SEQ ID NO: 559921 - DNA, 15 bp, Homo sapiens
ggagactcgctttaa

SEQ ID NO: 559922 - DNA, 15 bp, Homo sapiens
gagactcgctttaac

SEQ ID NO: 559923 - DNA, 15 bp, Homo sapiens
agactcgctttaacc

SEQ ID NO: 559924 - DNA, 15 bp, Homo sapiens
gactcgctttaaccg

SEQ ID NO: 559925 - DNA, 15 bp, Homo sapiens
actcgctttaaccgg

SEQ ID NO: 559926 - DNA, 15 bp, Homo sapiens
ctcgctttaaccggg

SEQ ID NO: 559927 - DNA, 15 bp, Homo sapiens
tcgctttaaccggga

SEQ ID NO: 559928 - DNA, 15 bp, Homo sapiens
cgctttaaccgggaa

SEQ ID NO: 559929 - DNA, 15 bp, Homo sapiens
gctttaaccgggaag

SEQ ID NO: 559930 - DNA, 15 bp, Homo sapiens
ctttaaccgggaagg

SEQ ID NO: 559931 - DNA, 15 bp, Homo sapiens
tttaaccgggaaggc

SEQ ID NO: 559932 - DNA, 15 bp, Homo sapiens
ttaaccgggaaggcg

SEQ ID NO: 559933 - DNA, 15 bp, Homo sapiens
taaccgggaaggcgg

SEQ ID NO: 559934 - DNA, 15 bp, Homo sapiens
aaccgggaaggcgga

SEQ ID NO: 559935 - DNA, 15 bp, Homo sapiens
accgggaaggcggag

SEQ ID NO: 559936 - DNA, 15 bp, Homo sapiens
ccgggaaggcggagg

SEQ ID NO: 559937 - DNA, 15 bp, Homo sapiens
cgggaaggcggaggt

SEQ ID NO: 559938 - DNA, 15 bp, Homo sapiens
gggaaggcggaggtt

SEQ ID NO: 559939 - DNA, 15 bp, Homo sapiens
ggaaggcggaggttg

SEQ ID NO: 559940 - DNA, 15 bp, Homo sapiens
gaaggcggaggttgc

SEQ ID NO: 559941 - DNA, 15 bp, Homo sapiens
aaggcggaggttgca

SEQ ID NO: 559942 - DNA, 15 bp, Homo sapiens
ggcggaggttgcagg

SEQ ID NO: 559943 - DNA, 15 bp, Homo sapiens
gcggaggttgcaggg

SEQ ID NO: 559944 - DNA, 15 bp, Homo sapiens
cggaggttgcaggga

SEQ ID NO: 559945 - DNA, 15 bp, Homo sapiens
ggaggttgcagggag

SEQ ID NO: 559946 - DNA, 15 bp, Homo sapiens
gaggttgcagggagc

SEQ ID NO: 559947 - DNA, 15 bp, Homo sapiens
aggttgcagggagcc

SEQ ID NO: 559948 - DNA, 15 bp, Homo sapiens
ggttgcagggagcca

SEQ ID NO: 559949 - DNA, 15 bp, Homo sapiens
gttgcagggagccaa

SEQ ID NO: 559950 - DNA, 15 bp, Homo sapiens
ttgcagggagccaag

SEQ ID NO: 559951 - DNA, 15 bp, Homo sapiens
tgcagggagccaaga

SEQ ID NO: 559952 - DNA, 15 bp, Homo sapiens
gcagggagccaagat

SEQ ID NO: 559953 - DNA, 15 bp, Homo sapiens
cagggagccaagatc

SEQ ID NO: 559954 - DNA, 15 bp, Homo sapiens
agggagccaagatca

SEQ ID NO: 559955 - DNA, 15 bp, Homo sapiens
gggagccaagatcac

SEQ ID NO: 559956 - DNA, 15 bp, Homo sapiens
ggagccaagatcaca

SEQ ID NO: 559957 - DNA, 15 bp, Homo sapiens
gagccaagatcacac

SEQ ID NO: 559958 - DNA, 15 bp, Homo sapiens
agccaagatcacacc

SEQ ID NO: 559959 - DNA, 15 bp, Homo sapiens
gccaagatcacacca

SEQ ID NO: 559960 - DNA, 15 bp, Homo sapiens
ccaagatcacaccac

SEQ ID NO: 559961 - DNA, 15 bp, Homo sapiens
caagatcacaccact

SEQ ID NO: 559962 - DNA, 15 bp, Homo sapiens
aagatcacaccactg

SEQ ID NO: 559963 - DNA, 15 bp, Homo sapiens
agatcacaccactgc

SEQ ID NO: 559964 - DNA, 15 bp, Homo sapiens
gatcacaccactgca

SEQ ID NO: 559965 - DNA, 15 bp, Homo sapiens
atcacaccactgcac

SEQ ID NO: 559966 - DNA, 15 bp, Homo sapiens
tcacaccactgcact

SEQ ID NO: 559967 - DNA, 15 bp, Homo sapiens
cacaccactgcactc

SEQ ID NO: 559968 - DNA, 15 bp, Homo sapiens
acaccactgcactcc

SEQ ID NO: 559969 - DNA, 15 bp, Homo sapiens
caccactgcactcca

SEQ ID NO: 559970 - DNA, 15 bp, Homo sapiens
accactgcactccag

SEQ ID NO: 559971 - DNA, 15 bp, Homo sapiens
ccactgcactccagc

SEQ ID NO: 559972 - DNA, 15 bp, Homo sapiens
cactgcactccagcc

SEQ ID NO: 559973 - DNA, 15 bp, Homo sapiens
actgcactccagcct

SEQ ID NO: 559974 - DNA, 15 bp, Homo sapiens
tccagcctgggtgat

SEQ ID NO: 559975 - DNA, 15 bp, Homo sapiens
ccagcctgggtgatg

SEQ ID NO: 559976 - DNA, 15 bp, Homo sapiens
cagcctgggtgatgg

SEQ ID NO: 559977 - DNA, 15 bp, Homo sapiens
agcctgggtgatgga

SEQ ID NO: 559978 - DNA, 15 bp, Homo sapiens
gcctgggtgatggaa

SEQ ID NO: 559979 - DNA, 15 bp, Homo sapiens
cctgggtgatggaat

SEQ ID NO: 559980 - DNA, 15 bp, Homo sapiens
ctgggtgatggaatg

SEQ ID NO: 559981 - DNA, 15 bp, Homo sapiens
tgggtgatggaatga

SEQ ID NO: 559982 - DNA, 15 bp, Homo sapiens
gggtgatggaatgag

SEQ ID NO: 559983 - DNA, 15 bp, Homo sapiens
ggtgatggaatgaga

SEQ ID NO: 559984 - DNA, 15 bp, Homo sapiens
gtgatggaatgagac

SEQ ID NO: 559985 - DNA, 15 bp, Homo sapiens
tgatggaatgagact

SEQ ID NO: 559986 - DNA, 15 bp, Homo sapiens
gatggaatgagactc

SEQ ID NO: 559987 - DNA, 15 bp, Homo sapiens
atggaatgagactct

SEQ ID NO: 559988 - DNA, 15 bp, Homo sapiens
tggaatgagactctg

SEQ ID NO: 559989 - DNA, 15 bp, Homo sapiens
ggaatgagactctgt

SEQ ID NO: 559990 - DNA, 15 bp, Homo sapiens
gaatgagactctgtc

SEQ ID NO: 559991 - DNA, 15 bp, Homo sapiens
aatgagactctgtct

SEQ ID NO: 559992 - DNA, 15 bp, Homo sapiens
atgagactctgtctc

SEQ ID NO: 559993 - DNA, 15 bp, Homo sapiens
tgagactctgtctca

SEQ ID NO: 559994 - DNA, 15 bp, Homo sapiens
gagactctgtctcaa

SEQ ID NO: 559995 - DNA, 15 bp, Homo sapiens
agactctgtctcaaa

SEQ ID NO: 559996 - DNA, 15 bp, Homo sapiens
gactctgtctcaaaa

SEQ ID NO: 559997 - DNA, 15 bp, Homo sapiens
aaaaaaaaaagctgc

SEQ ID NO: 559998 - DNA, 15 bp, Homo sapiens
aaaaaaaaagctgca

SEQ ID NO: 559999 - DNA, 15 bp, Homo sapiens
aaaaaaaagctgcac

SEQ ID NO: 560000 - DNA, 15 bp, Homo sapiens
aaaaaaagctgcaca

SEQ ID NO: 560001 - DNA, 15 bp, Homo sapiens
aaaaaagctgcacat

SEQ ID NO: 560002 - DNA, 15 bp, Homo sapiens
aaaaagctgcacatt

SEQ ID NO: 560003 - DNA, 15 bp, Homo sapiens
aaaagctgcacattt

SEQ ID NO: 560004 - DNA, 15 bp, Homo sapiens
aaagctgcacatttt

SEQ ID NO: 560005 - DNA, 15 bp, Homo sapiens
aagctgcacatttta

SEQ ID NO: 560006 - DNA, 15 bp, Homo sapiens
agctgcacattttac

SEQ ID NO: 560007 - DNA, 15 bp, Homo sapiens
gctgcacattttacc

SEQ ID NO: 560008 - DNA, 15 bp, Homo sapiens
ctgcacattttacct

SEQ ID NO: 560009 - DNA, 15 bp, Homo sapiens
tgcacattttacctg

SEQ ID NO: 560010 - DNA, 15 bp, Homo sapiens
gcacattttacctga

SEQ ID NO: 560011 - DNA, 15 bp, Homo sapiens
cacattttacctgac

SEQ ID NO: 560012 - DNA, 15 bp, Homo sapiens
acattttacctgact

SEQ ID NO: 560013 - DNA, 15 bp, Homo sapiens
cattttacctgactt

SEQ ID NO: 560014 - DNA, 15 bp, Homo sapiens
attttacctgacttc

SEQ ID NO: 560015 - DNA, 15 bp, Homo sapiens
ttttacctgacttcc

SEQ ID NO: 560016 - DNA, 15 bp, Homo sapiens
tttacctgacttcct

SEQ ID NO: 560017 - DNA, 15 bp, Homo sapiens
ttacctgacttccta

SEQ ID NO: 560018 - DNA, 15 bp, Homo sapiens
tacctgacttcctag

SEQ ID NO: 560019 - DNA, 15 bp, Homo sapiens
acctgacttcctagc

SEQ ID NO: 560020 - DNA, 15 bp, Homo sapiens
cctgacttcctagct

SEQ ID NO: 560021 - DNA, 15 bp, Homo sapiens
ctgacttcctagctg

SEQ ID NO: 560022 - DNA, 15 bp, Homo sapiens
tgacttcctagctgc

SEQ ID NO: 560023 - DNA, 15 bp, Homo sapiens
gacttcctagctgcc

SEQ ID NO: 560024 - DNA, 15 bp, Homo sapiens
acttcctagctgccc

SEQ ID NO: 560025 - DNA, 15 bp, Homo sapiens
cttcctagctgccct

SEQ ID NO: 560026 - DNA, 15 bp, Homo sapiens
ttcctagctgccctt

SEQ ID NO: 560027 - DNA, 15 bp, Homo sapiens
tcctagctgcccttt

SEQ ID NO: 560028 - DNA, 15 bp, Homo sapiens
cctagctgcccttta

SEQ ID NO: 560029 - DNA, 15 bp, Homo sapiens
ctagctgccctttaa

SEQ ID NO: 560030 - DNA, 15 bp, Homo sapiens
tagctgccctttaag

SEQ ID NO: 560031 - DNA, 15 bp, Homo sapiens
agctgccctttaagg

SEQ ID NO: 560032 - DNA, 15 bp, Homo sapiens
gctgccctttaaggc

SEQ ID NO: 560033 - DNA, 15 bp, Homo sapiens
ctgccctttaaggca

SEQ ID NO: 560034 - DNA, 15 bp, Homo sapiens
tgccctttaaggcag

SEQ ID NO: 560035 - DNA, 15 bp, Homo sapiens
gccctttaaggcagt

SEQ ID NO: 560036 - DNA, 15 bp, Homo sapiens
ccctttaaggcagta

SEQ ID NO: 560037 - DNA, 15 bp, Homo sapiens
cctttaaggcagtat

SEQ ID NO: 560038 - DNA, 15 bp, Homo sapiens
ctttaaggcagtatc

SEQ ID NO: 560039 - DNA, 15 bp, Homo sapiens
tttaaggcagtatcc

SEQ ID NO: 560040 - DNA, 15 bp, Homo sapiens
ttaaggcagtatccc

SEQ ID NO: 560041 - DNA, 15 bp, Homo sapiens
taaggcagtatccca

SEQ ID NO: 560042 - DNA, 15 bp, Homo sapiens
aaggcagtatcccag

SEQ ID NO: 560043 - DNA, 15 bp, Homo sapiens
aggcagtatcccaga

SEQ ID NO: 560044 - DNA, 15 bp, Homo sapiens
ggcagtatcccagat

SEQ ID NO: 560045 - DNA, 15 bp, Homo sapiens
gcagtatcccagatg

SEQ ID NO: 560046 - DNA, 15 bp, Homo sapiens
cagtatcccagatgt

SEQ ID NO: 560047 - DNA, 15 bp, Homo sapiens
agtatcccagatgtc

SEQ ID NO: 560048 - DNA, 15 bp, Homo sapiens
gtatcccagatgtca

SEQ ID NO: 560049 - DNA, 15 bp, Homo sapiens
tatcccagatgtcac

SEQ ID NO: 560050 - DNA, 15 bp, Homo sapiens
atcccagatgtcacc

SEQ ID NO: 560051 - DNA, 15 bp, Homo sapiens
tcccagatgtcacct

SEQ ID NO: 560052 - DNA, 15 bp, Homo sapiens
cccagatgtcacctg

SEQ ID NO: 560053 - DNA, 15 bp, Homo sapiens
ccagatgtcacctga

SEQ ID NO: 560054 - DNA, 15 bp, Homo sapiens
cagatgtcacctgat

SEQ ID NO: 560055 - DNA, 15 bp, Homo sapiens
agatgtcacctgatg

SEQ ID NO: 560056 - DNA, 15 bp, Homo sapiens
gatgtcacctgatgt

SEQ ID NO: 560057 - DNA, 15 bp, Homo sapiens
atgtcacctgatgtg

SEQ ID NO: 560058 - DNA, 15 bp, Homo sapiens
tgtcacctgatgtgt

SEQ ID NO: 560059 - DNA, 15 bp, Homo sapiens
gtcacctgatgtgtg

SEQ ID NO: 560060 - DNA, 15 bp, Homo sapiens
tcacctgatgtgtgg

SEQ ID NO: 560061 - DNA, 15 bp, Homo sapiens
cacctgatgtgtggg

SEQ ID NO: 560062 - DNA, 15 bp, Homo sapiens
acctgatgtgtgggt

SEQ ID NO: 560063 - DNA, 15 bp, Homo sapiens
cctgatgtgtgggtg

SEQ ID NO: 560064 - DNA, 15 bp, Homo sapiens
ctgatgtgtgggtgc

SEQ ID NO: 560065 - DNA, 15 bp, Homo sapiens
tgatgtgtgggtgct

SEQ ID NO: 560066 - DNA, 15 bp, Homo sapiens
gatgtgtgggtgcta

SEQ ID NO: 560067 - DNA, 15 bp, Homo sapiens
atgtgtgggtgctag

SEQ ID NO: 560068 - DNA, 15 bp, Homo sapiens
tgtgtgggtgctaga

SEQ ID NO: 560069 - DNA, 15 bp, Homo sapiens
gtgtgggtgctagaa

SEQ ID NO: 560070 - DNA, 15 bp, Homo sapiens
tgtgggtgctagaag

SEQ ID NO: 560071 - DNA, 15 bp, Homo sapiens
gtgggtgctagaagc

SEQ ID NO: 560072 - DNA, 15 bp, Homo sapiens
tgggtgctagaagcc

SEQ ID NO: 560073 - DNA, 15 bp, Homo sapiens
gggtgctagaagccc

SEQ ID NO: 560074 - DNA, 15 bp, Homo sapiens
ggtgctagaagcccc

SEQ ID NO: 560075 - DNA, 15 bp, Homo sapiens
gtgctagaagcccca

SEQ ID NO: 560076 - DNA, 15 bp, Homo sapiens
tgctagaagccccac

SEQ ID NO: 560077 - DNA, 15 bp, Homo sapiens
gctagaagccccacc

SEQ ID NO: 560078 - DNA, 15 bp, Homo sapiens
ctagaagccccaccc

SEQ ID NO: 560079 - DNA, 15 bp, Homo sapiens
tagaagccccaccct

SEQ ID NO: 560080 - DNA, 15 bp, Homo sapiens
agaagccccaccctt

SEQ ID NO: 560081 - DNA, 15 bp, Homo sapiens
gaagccccaccctta

SEQ ID NO: 560082 - DNA, 15 bp, Homo sapiens
aagccccacccttaa

SEQ ID NO: 560083 - DNA, 15 bp, Homo sapiens
agccccacccttaaa

SEQ ID NO: 560084 - DNA, 15 bp, Homo sapiens
gccccacccttaaac

SEQ ID NO: 560085 - DNA, 15 bp, Homo sapiens
ccccacccttaaaca

SEQ ID NO: 560086 - DNA, 15 bp, Homo sapiens
cccacccttaaacag

SEQ ID NO: 560087 - DNA, 15 bp, Homo sapiens
ccacccttaaacaga

SEQ ID NO: 560088 - DNA, 15 bp, Homo sapiens
cacccttaaacagac

SEQ ID NO: 560089 - DNA, 15 bp, Homo sapiens
acccttaaacagacc

SEQ ID NO: 560090 - DNA, 15 bp, Homo sapiens
cccttaaacagacca

SEQ ID NO: 560091 - DNA, 15 bp, Homo sapiens
ccttaaacagaccac

SEQ ID NO: 560092 - DNA, 15 bp, Homo sapiens
cttaaacagaccaca

SEQ ID NO: 560093 - DNA, 15 bp, Homo sapiens
ttaaacagaccacat

SEQ ID NO: 560094 - DNA, 15 bp, Homo sapiens
taaacagaccacatc

SEQ ID NO: 560095 - DNA, 15 bp, Homo sapiens
aaacagaccacatca

SEQ ID NO: 560096 - DNA, 15 bp, Homo sapiens
aacagaccacatcac

SEQ ID NO: 560097 - DNA, 15 bp, Homo sapiens
acagaccacatcaca

SEQ ID NO: 560098 - DNA, 15 bp, Homo sapiens
cagaccacatcacag

SEQ ID NO: 560099 - DNA, 15 bp, Homo sapiens
agaccacatcacaga

SEQ ID NO: 560100 - DNA, 15 bp, Homo sapiens
gaccacatcacagac

SEQ ID NO: 560101 - DNA, 15 bp, Homo sapiens
accacatcacagact

SEQ ID NO: 560102 - DNA, 15 bp, Homo sapiens
ccacatcacagactc

SEQ ID NO: 560103 - DNA, 15 bp, Homo sapiens
cacatcacagactct

SEQ ID NO: 560104 - DNA, 15 bp, Homo sapiens
acatcacagactcta

SEQ ID NO: 560105 - DNA, 15 bp, Homo sapiens
catcacagactctac

SEQ ID NO: 560106 - DNA, 15 bp, Homo sapiens
atcacagactctaca

SEQ ID NO: 560107 - DNA, 15 bp, Homo sapiens
tcacagactctacat

SEQ ID NO: 560108 - DNA, 15 bp, Homo sapiens
cacagactctacatc

SEQ ID NO: 560109 - DNA, 15 bp, Homo sapiens
acagactctacatca

SEQ ID NO: 560110 - DNA, 15 bp, Homo sapiens
cagactctacatcaa

SEQ ID NO: 560111 - DNA, 15 bp, Homo sapiens
agactctacatcaat

SEQ ID NO: 560112 - DNA, 15 bp, Homo sapiens
gactctacatcaatg

SEQ ID NO: 560113 - DNA, 15 bp, Homo sapiens
actctacatcaatgg

SEQ ID NO: 560114 - DNA, 15 bp, Homo sapiens
ctctacatcaatggc

SEQ ID NO: 560115 - DNA, 15 bp, Homo sapiens
tctacatcaatggcc

SEQ ID NO: 560116 - DNA, 15 bp, Homo sapiens
ctacatcaatggcct

SEQ ID NO: 560117 - DNA, 15 bp, Homo sapiens
tacatcaatggcctg

SEQ ID NO: 560118 - DNA, 15 bp, Homo sapiens
acatcaatggcctgg

SEQ ID NO: 560119 - DNA, 15 bp, Homo sapiens
catcaatggcctggt

SEQ ID NO: 560120 - DNA, 15 bp, Homo sapiens
atcaatggcctggtc

SEQ ID NO: 560121 - DNA, 15 bp, Homo sapiens
tcaatggcctggtcc

SEQ ID NO: 560122 - DNA, 15 bp, Homo sapiens
caatggcctggtcct

SEQ ID NO: 560123 - DNA, 15 bp, Homo sapiens
aatggcctggtcctc

SEQ ID NO: 560124 - DNA, 15 bp, Homo sapiens
atggcctggtcctca

SEQ ID NO: 560125 - DNA, 15 bp, Homo sapiens
tggcctggtcctcaa

SEQ ID NO: 560126 - DNA, 15 bp, Homo sapiens
ggcctggtcctcaag

SEQ ID NO: 560127 - DNA, 15 bp, Homo sapiens
gcctggtcctcaagg

SEQ ID NO: 560128 - DNA, 15 bp, Homo sapiens
cctggtcctcaagga

SEQ ID NO: 560129 - DNA, 15 bp, Homo sapiens
ctggtcctcaaggac

SEQ ID NO: 560130 - DNA, 15 bp, Homo sapiens
tggtcctcaaggacg

SEQ ID NO: 560131 - DNA, 15 bp, Homo sapiens
ggtcctcaaggacgg

SEQ ID NO: 560132 - DNA, 15 bp, Homo sapiens
gtcctcaaggacggg

SEQ ID NO: 560133 - DNA, 15 bp, Homo sapiens
tcctcaaggacgggc

SEQ ID NO: 560134 - DNA, 15 bp, Homo sapiens
cctcaaggacgggct

SEQ ID NO: 560135 - DNA, 15 bp, Homo sapiens
ctcaaggacgggctg

SEQ ID NO: 560136 - DNA, 15 bp, Homo sapiens
tcaaggacgggctgc

SEQ ID NO: 560137 - DNA, 15 bp, Homo sapiens
caaggacgggctgct

SEQ ID NO: 560138 - DNA, 15 bp, Homo sapiens
aaggacgggctgctc

SEQ ID NO: 560139 - DNA, 15 bp, Homo sapiens
aggacgggctgctca

SEQ ID NO: 560140 - DNA, 15 bp, Homo sapiens
ggacgggctgctcag

SEQ ID NO: 560141 - DNA, 15 bp, Homo sapiens
gacgggctgctcaga

SEQ ID NO: 560142 - DNA, 15 bp, Homo sapiens
acgggctgctcagag

SEQ ID NO: 560143 - DNA, 15 bp, Homo sapiens
cgggctgctcagaga

SEQ ID NO: 560144 - DNA, 15 bp, Homo sapiens
gggctgctcagagag

SEQ ID NO: 560145 - DNA, 15 bp, Homo sapiens
ggctgctcagagagc

SEQ ID NO: 560146 - DNA, 15 bp, Homo sapiens
gctgctcagagagca

SEQ ID NO: 560147 - DNA, 15 bp, Homo sapiens
ctgctcagagagcag

SEQ ID NO: 560148 - DNA, 15 bp, Homo sapiens
tgctcagagagcaga

SEQ ID NO: 560149 - DNA, 15 bp, Homo sapiens
gctcagagagcagag

SEQ ID NO: 560150 - DNA, 15 bp, Homo sapiens
ctcagagagcagagg

SEQ ID NO: 560151 - DNA, 15 bp, Homo sapiens
tcagagagcagaggc

SEQ ID NO: 560152 - DNA, 15 bp, Homo sapiens
cagagagcagaggca

SEQ ID NO: 560153 - DNA, 15 bp, Homo sapiens
agagagcagaggcaa

SEQ ID NO: 560154 - DNA, 15 bp, Homo sapiens
gagagcagaggcaag

SEQ ID NO: 560155 - DNA, 15 bp, Homo sapiens
agagcagaggcaagg

SEQ ID NO: 560156 - DNA, 15 bp, Homo sapiens
gagcagaggcaaggc

SEQ ID NO: 560157 - DNA, 15 bp, Homo sapiens
agcagaggcaaggcc

SEQ ID NO: 560158 - DNA, 15 bp, Homo sapiens
gcagaggcaaggccg

SEQ ID NO: 560159 - DNA, 15 bp, Homo sapiens
cagaggcaaggccgc

SEQ ID NO: 560160 - DNA, 15 bp, Homo sapiens
agaggcaaggccgcc

SEQ ID NO: 560161 - DNA, 15 bp, Homo sapiens
gaggcaaggccgcct

SEQ ID NO: 560162 - DNA, 15 bp, Homo sapiens
aggcaaggccgcctc

SEQ ID NO: 560163 - DNA, 15 bp, Homo sapiens
ggcaaggccgcctcc

SEQ ID NO: 560164 - DNA, 15 bp, Homo sapiens
gcaaggccgcctcca

SEQ ID NO: 560165 - DNA, 15 bp, Homo sapiens
caaggccgcctccac

SEQ ID NO: 560166 - DNA, 15 bp, Homo sapiens
aaggccgcctccacc

SEQ ID NO: 560167 - DNA, 15 bp, Homo sapiens
aggccgcctccaccc

SEQ ID NO: 560168 - DNA, 15 bp, Homo sapiens
ggccgcctccaccca

SEQ ID NO: 560169 - DNA, 15 bp, Homo sapiens
gccgcctccacccaa

SEQ ID NO: 560170 - DNA, 15 bp, Homo sapiens
ccgcctccacccaaa

SEQ ID NO: 560171 - DNA, 15 bp, Homo sapiens
cgcctccacccaaaa

SEQ ID NO: 560172 - DNA, 15 bp, Homo sapiens
gcctccacccaaaag

SEQ ID NO: 560173 - DNA, 15 bp, Homo sapiens
cctccacccaaaagg

SEQ ID NO: 560174 - DNA, 15 bp, Homo sapiens
ctccacccaaaagga

SEQ ID NO: 560175 - DNA, 15 bp, Homo sapiens
tccacccaaaaggaa

SEQ ID NO: 560176 - DNA, 15 bp, Homo sapiens
ccacccaaaaggaat

SEQ ID NO: 560177 - DNA, 15 bp, Homo sapiens
cacccaaaaggaatc

SEQ ID NO: 560178 - DNA, 15 bp, Homo sapiens
acccaaaaggaatcc

SEQ ID NO: 560179 - DNA, 15 bp, Homo sapiens
cccaaaaggaatccc

SEQ ID NO: 560180 - DNA, 15 bp, Homo sapiens
ccaaaaggaatcccg

SEQ ID NO: 560181 - DNA, 15 bp, Homo sapiens
caaaaggaatcccgt

SEQ ID NO: 560182 - DNA, 15 bp, Homo sapiens
aaaaggaatcccgtg

SEQ ID NO: 560183 - DNA, 15 bp, Homo sapiens
aaaggaatcccgtga

SEQ ID NO: 560184 - DNA, 15 bp, Homo sapiens
aaggaatcccgtgag

SEQ ID NO: 560185 - DNA, 15 bp, Homo sapiens
aggaatcccgtgagc

SEQ ID NO: 560186 - DNA, 15 bp, Homo sapiens
ggaatcccgtgagct

SEQ ID NO: 560187 - DNA, 15 bp, Homo sapiens
gaatcccgtgagctc

SEQ ID NO: 560188 - DNA, 15 bp, Homo sapiens
aatcccgtgagctct

SEQ ID NO: 560189 - DNA, 15 bp, Homo sapiens
atcccgtgagctctg

SEQ ID NO: 560190 - DNA, 15 bp, Homo sapiens
tcccgtgagctctgg

SEQ ID NO: 560191 - DNA, 15 bp, Homo sapiens
cccgtgagctctgga

SEQ ID NO: 560192 - DNA, 15 bp, Homo sapiens
ccgtgagctctggat

SEQ ID NO: 560193 - DNA, 15 bp, Homo sapiens
cgtgagctctggatg

SEQ ID NO: 560194 - DNA, 15 bp, Homo sapiens
gtgagctctggatgt

SEQ ID NO: 560195 - DNA, 15 bp, Homo sapiens
tgagctctggatgtg

SEQ ID NO: 560196 - DNA, 15 bp, Homo sapiens
gagctctggatgtgg

SEQ ID NO: 560197 - DNA, 15 bp, Homo sapiens
agctctggatgtggg

SEQ ID NO: 560198 - DNA, 15 bp, Homo sapiens
gctctggatgtgggc

SEQ ID NO: 560199 - DNA, 15 bp, Homo sapiens
ctctggatgtgggca

SEQ ID NO: 560200 - DNA, 15 bp, Homo sapiens
tctggatgtgggcat

SEQ ID NO: 560201 - DNA, 15 bp, Homo sapiens
ctggatgtgggcatc

SEQ ID NO: 560202 - DNA, 15 bp, Homo sapiens
tggatgtgggcatcc

SEQ ID NO: 560203 - DNA, 15 bp, Homo sapiens
ggatgtgggcatccc

SEQ ID NO: 560204 - DNA, 15 bp, Homo sapiens
gatgtgggcatccct

SEQ ID NO: 560205 - DNA, 15 bp, Homo sapiens
atgtgggcatccctg

SEQ ID NO: 560206 - DNA, 15 bp, Homo sapiens
tgtgggcatccctgc

SEQ ID NO: 560207 - DNA, 15 bp, Homo sapiens
gtgggcatccctgcc

SEQ ID NO: 560208 - DNA, 15 bp, Homo sapiens
tgggcatccctgcct

SEQ ID NO: 560209 - DNA, 15 bp, Homo sapiens
gggcatccctgcctg

SEQ ID NO: 560210 - DNA, 15 bp, Homo sapiens
ggcatccctgcctgt

SEQ ID NO: 560211 - DNA, 15 bp, Homo sapiens
gcatccctgcctgtg

SEQ ID NO: 560212 - DNA, 15 bp, Homo sapiens
catccctgcctgtga

SEQ ID NO: 560213 - DNA, 15 bp, Homo sapiens
atccctgcctgtgag

SEQ ID NO: 560214 - DNA, 15 bp, Homo sapiens
tccctgcctgtgagg

SEQ ID NO: 560215 - DNA, 15 bp, Homo sapiens
ccctgcctgtgagga

SEQ ID NO: 560216 - DNA, 15 bp, Homo sapiens
cctgcctgtgaggag

SEQ ID NO: 560217 - DNA, 15 bp, Homo sapiens
ctgcctgtgaggagg

SEQ ID NO: 560218 - DNA, 15 bp, Homo sapiens
tgcctgtgaggagga

SEQ ID NO: 560219 - DNA, 15 bp, Homo sapiens
gcctgtgaggaggag

SEQ ID NO: 560220 - DNA, 15 bp, Homo sapiens
cctgtgaggaggagg

SEQ ID NO: 560221 - DNA, 15 bp, Homo sapiens
ctgtgaggaggaggt

SEQ ID NO: 560222 - DNA, 15 bp, Homo sapiens
tgtgaggaggaggtc

SEQ ID NO: 560223 - DNA, 15 bp, Homo sapiens
gtgaggaggaggtca

SEQ ID NO: 560224 - DNA, 15 bp, Homo sapiens
tgaggaggaggtcag

SEQ ID NO: 560225 - DNA, 15 bp, Homo sapiens
gaggaggaggtcagc

SEQ ID NO: 560226 - DNA, 15 bp, Homo sapiens
aggaggaggtcagct

SEQ ID NO: 560227 - DNA, 15 bp, Homo sapiens
ggaggaggtcagctg

SEQ ID NO: 560228 - DNA, 15 bp, Homo sapiens
gaggaggtcagctgc

SEQ ID NO: 560229 - DNA, 15 bp, Homo sapiens
aggaggtcagctgca

SEQ ID NO: 560230 - DNA, 15 bp, Homo sapiens
ggaggtcagctgcag

SEQ ID NO: 560231 - DNA, 15 bp, Homo sapiens
gaggtcagctgcaga

SEQ ID NO: 560232 - DNA, 15 bp, Homo sapiens
aggtcagctgcagag

SEQ ID NO: 560233 - DNA, 15 bp, Homo sapiens
ggtcagctgcagagg

SEQ ID NO: 560234 - DNA, 15 bp, Homo sapiens
gtcagctgcagaggc

SEQ ID NO: 560235 - DNA, 15 bp, Homo sapiens
tcagctgcagaggcc

SEQ ID NO: 560236 - DNA, 15 bp, Homo sapiens
cagctgcagaggcca

SEQ ID NO: 560237 - DNA, 15 bp, Homo sapiens
agctgcagaggccag

SEQ ID NO: 560238 - DNA, 15 bp, Homo sapiens
gctgcagaggccagt

SEQ ID NO: 560239 - DNA, 15 bp, Homo sapiens
ctgcagaggccagtc

SEQ ID NO: 560240 - DNA, 15 bp, Homo sapiens
tgcagaggccagtcc

SEQ ID NO: 560241 - DNA, 15 bp, Homo sapiens
gcagaggccagtcct

SEQ ID NO: 560242 - DNA, 15 bp, Homo sapiens
cagaggccagtcctt

SEQ ID NO: 560243 - DNA, 15 bp, Homo sapiens
agaggccagtccttc

SEQ ID NO: 560244 - DNA, 15 bp, Homo sapiens
gaggccagtccttcc

SEQ ID NO: 560245 - DNA, 15 bp, Homo sapiens
aggccagtccttccc

SEQ ID NO: 560246 - DNA, 15 bp, Homo sapiens
ggccagtccttccct

SEQ ID NO: 560247 - DNA, 15 bp, Homo sapiens
gccagtccttccctc

SEQ ID NO: 560248 - DNA, 15 bp, Homo sapiens
ccagtccttccctcc

SEQ ID NO: 560249 - DNA, 15 bp, Homo sapiens
cagtccttccctcca

SEQ ID NO: 560250 - DNA, 15 bp, Homo sapiens
agtccttccctccag

SEQ ID NO: 560251 - DNA, 15 bp, Homo sapiens
gtccttccctccagg

SEQ ID NO: 560252 - DNA, 15 bp, Homo sapiens
tccttccctccaggc

SEQ ID NO: 560253 - DNA, 15 bp, Homo sapiens
ccttccctccaggct

SEQ ID NO: 560254 - DNA, 15 bp, Homo sapiens
cttccctccaggctc

SEQ ID NO: 560255 - DNA, 15 bp, Homo sapiens
ttccctccaggctcg

SEQ ID NO: 560256 - DNA, 15 bp, Homo sapiens
tccctccaggctcgt

SEQ ID NO: 560257 - DNA, 15 bp, Homo sapiens
ccctccaggctcgta

SEQ ID NO: 560258 - DNA, 15 bp, Homo sapiens
cctccaggctcgtac

SEQ ID NO: 560259 - DNA, 15 bp, Homo sapiens
ctccaggctcgtact

SEQ ID NO: 560260 - DNA, 15 bp, Homo sapiens
tccaggctcgtactt

SEQ ID NO: 560261 - DNA, 15 bp, Homo sapiens
ccaggctcgtacttc

SEQ ID NO: 560262 - DNA, 15 bp, Homo sapiens
caggctcgtacttcc

SEQ ID NO: 560263 - DNA, 15 bp, Homo sapiens
aggctcgtacttccc

SEQ ID NO: 560264 - DNA, 15 bp, Homo sapiens
ggctcgtacttcccg

SEQ ID NO: 560265 - DNA, 15 bp, Homo sapiens
gctcgtacttcccgg

SEQ ID NO: 560266 - DNA, 15 bp, Homo sapiens
ctcgtacttcccggc

SEQ ID NO: 560267 - DNA, 15 bp, Homo sapiens
tcgtacttcccggca

SEQ ID NO: 560268 - DNA, 15 bp, Homo sapiens
cgtacttcccggcat

SEQ ID NO: 560269 - DNA, 15 bp, Homo sapiens
gtacttcccggcatc

SEQ ID NO: 560270 - DNA, 15 bp, Homo sapiens
tacttcccggcatct

SEQ ID NO: 560271 - DNA, 15 bp, Homo sapiens
acttcccggcatcta

SEQ ID NO: 560272 - DNA, 15 bp, Homo sapiens
cttcccggcatctac

SEQ ID NO: 560273 - DNA, 15 bp, Homo sapiens
ttcccggcatctacc

SEQ ID NO: 560274 - DNA, 15 bp, Homo sapiens
tcccggcatctacca

SEQ ID NO: 560275 - DNA, 15 bp, Homo sapiens
cccggcatctaccag

SEQ ID NO: 560276 - DNA, 15 bp, Homo sapiens
ccggcatctaccagg

SEQ ID NO: 560277 - DNA, 15 bp, Homo sapiens
cggcatctaccaggt

SEQ ID NO: 560278 - DNA, 15 bp, Homo sapiens
ggcatctaccaggtt

SEQ ID NO: 560279 - DNA, 15 bp, Homo sapiens
gcatctaccaggttc

SEQ ID NO: 560280 - DNA, 15 bp, Homo sapiens
catctaccaggttcc

SEQ ID NO: 560281 - DNA, 15 bp, Homo sapiens
atctaccaggttcca

SEQ ID NO: 560282 - DNA, 15 bp, Homo sapiens
tctaccaggttccac

SEQ ID NO: 560283 - DNA, 15 bp, Homo sapiens
ctaccaggttccacc

SEQ ID NO: 560284 - DNA, 15 bp, Homo sapiens
taccaggttccacct

SEQ ID NO: 560285 - DNA, 15 bp, Homo sapiens
accaggttccacctt

SEQ ID NO: 560286 - DNA, 15 bp, Homo sapiens
ccaggttccaccttt

SEQ ID NO: 560287 - DNA, 15 bp, Homo sapiens
caggttccacctttc

SEQ ID NO: 560288 - DNA, 15 bp, Homo sapiens
aggttccacctttcc

SEQ ID NO: 560289 - DNA, 15 bp, Homo sapiens
ggttccacctttcca

SEQ ID NO: 560290 - DNA, 15 bp, Homo sapiens
gttccacctttccaa

SEQ ID NO: 560291 - DNA, 15 bp, Homo sapiens
ttccacctttccaaa

SEQ ID NO: 560292 - DNA, 15 bp, Homo sapiens
tccacctttccaaaa

SEQ ID NO: 560293 - DNA, 15 bp, Homo sapiens
ccacctttccaaaat

SEQ ID NO: 560294 - DNA, 15 bp, Homo sapiens
cacctttccaaaatt

SEQ ID NO: 560295 - DNA, 15 bp, Homo sapiens
acctttccaaaatta

SEQ ID NO: 560296 - DNA, 15 bp, Homo sapiens
cctttccaaaattac

SEQ ID NO: 560297 - DNA, 15 bp, Homo sapiens
ctttccaaaattaca

SEQ ID NO: 560298 - DNA, 15 bp, Homo sapiens
tttccaaaattacag

SEQ ID NO: 560299 - DNA, 15 bp, Homo sapiens
ttccaaaattacagc

SEQ ID NO: 560300 - DNA, 15 bp, Homo sapiens
tccaaaattacagcc

SEQ ID NO: 560301 - DNA, 15 bp, Homo sapiens
ccaaaattacagcca

SEQ ID NO: 560302 - DNA, 15 bp, Homo sapiens
caaaattacagccag

SEQ ID NO: 560303 - DNA, 15 bp, Homo sapiens
aaaattacagccagc

SEQ ID NO: 560304 - DNA, 15 bp, Homo sapiens
aaattacagccagct

SEQ ID NO: 560305 - DNA, 15 bp, Homo sapiens
aattacagccagctc

SEQ ID NO: 560306 - DNA, 15 bp, Homo sapiens
attacagccagctct

SEQ ID NO: 560307 - DNA, 15 bp, Homo sapiens
ttacagccagctctt

SEQ ID NO: 560308 - DNA, 15 bp, Homo sapiens
tacagccagctcttt

SEQ ID NO: 560309 - DNA, 15 bp, Homo sapiens
acagccagctctttc

SEQ ID NO: 560310 - DNA, 15 bp, Homo sapiens
cagccagctctttca

SEQ ID NO: 560311 - DNA, 15 bp, Homo sapiens
agccagctctttcag

SEQ ID NO: 560312 - DNA, 15 bp, Homo sapiens
gccagctctttcagt

SEQ ID NO: 560313 - DNA, 15 bp, Homo sapiens
ccagctctttcagtt

SEQ ID NO: 560314 - DNA, 15 bp, Homo sapiens
cagctctttcagttt

SEQ ID NO: 560315 - DNA, 15 bp, Homo sapiens
agctctttcagtttt

SEQ ID NO: 560316 - DNA, 15 bp, Homo sapiens
gctctttcagtttta

SEQ ID NO: 560317 - DNA, 15 bp, Homo sapiens
ctctttcagttttaa

SEQ ID NO: 560318 - DNA, 15 bp, Homo sapiens
tctttcagttttaaa

SEQ ID NO: 560319 - DNA, 15 bp, Homo sapiens
ctttcagttttaaaa

SEQ ID NO: 560320 - DNA, 15 bp, Homo sapiens
tttcagttttaaaat

SEQ ID NO: 560321 - DNA, 15 bp, Homo sapiens
ttcagttttaaaata

SEQ ID NO: 560322 - DNA, 15 bp, Homo sapiens
tcagttttaaaatag

SEQ ID NO: 560323 - DNA, 15 bp, Homo sapiens
cagttttaaaataga

SEQ ID NO: 560324 - DNA, 15 bp, Homo sapiens
agttttaaaatagaa

SEQ ID NO: 560325 - DNA, 15 bp, Homo sapiens
gttttaaaatagaaa

SEQ ID NO: 560326 - DNA, 15 bp, Homo sapiens
ttttaaaatagaaag

SEQ ID NO: 560327 - DNA, 15 bp, Homo sapiens
tttaaaatagaaaga

SEQ ID NO: 560328 - DNA, 15 bp, Homo sapiens
ttaaaatagaaagaa

SEQ ID NO: 560329 - DNA, 15 bp, Homo sapiens
taaaatagaaagaac

SEQ ID NO: 560330 - DNA, 15 bp, Homo sapiens
aaaatagaaagaact

SEQ ID NO: 560331 - DNA, 15 bp, Homo sapiens
aaatagaaagaacta

SEQ ID NO: 560332 - DNA, 15 bp, Homo sapiens
aatagaaagaactat

SEQ ID NO: 560333 - DNA, 15 bp, Homo sapiens
atagaaagaactata

SEQ ID NO: 560334 - DNA, 15 bp, Homo sapiens
tagaaagaactatat

SEQ ID NO: 560335 - DNA, 15 bp, Homo sapiens
agaaagaactatatt

SEQ ID NO: 560336 - DNA, 15 bp, Homo sapiens
gaaagaactatattt

SEQ ID NO: 560337 - DNA, 15 bp, Homo sapiens
aaagaactatattta

SEQ ID NO: 560338 - DNA, 15 bp, Homo sapiens
aagaactatatttaa

SEQ ID NO: 560339 - DNA, 15 bp, Homo sapiens
agaactatatttaac

SEQ ID NO: 560340 - DNA, 15 bp, Homo sapiens
gaactatatttaact

SEQ ID NO: 560341 - DNA, 15 bp, Homo sapiens
aactatatttaacta

SEQ ID NO: 560342 - DNA, 15 bp, Homo sapiens
actatatttaactaa

SEQ ID NO: 560343 - DNA, 15 bp, Homo sapiens
ctatatttaactaat

SEQ ID NO: 560344 - DNA, 15 bp, Homo sapiens
tatatttaactaatg

SEQ ID NO: 560345 - DNA, 15 bp, Homo sapiens
atatttaactaatgg

SEQ ID NO: 560346 - DNA, 15 bp, Homo sapiens
tatttaactaatgga

SEQ ID NO: 560347 - DNA, 15 bp, Homo sapiens
atttaactaatggag

SEQ ID NO: 560348 - DNA, 15 bp, Homo sapiens
tttaactaatggagt

SEQ ID NO: 560349 - DNA, 15 bp, Homo sapiens
ttaactaatggagtg

SEQ ID NO: 560350 - DNA, 15 bp, Homo sapiens
taactaatggagtgc

SEQ ID NO: 560351 - DNA, 15 bp, Homo sapiens
aactaatggagtgcc

SEQ ID NO: 560352 - DNA, 15 bp, Homo sapiens
actaatggagtgcct

SEQ ID NO: 560353 - DNA, 15 bp, Homo sapiens
ctaatggagtgcctt

SEQ ID NO: 560354 - DNA, 15 bp, Homo sapiens
taatggagtgcctta

SEQ ID NO: 560355 - DNA, 15 bp, Homo sapiens
aatggagtgccttaa

SEQ ID NO: 560356 - DNA, 15 bp, Homo sapiens
atggagtgccttaac

SEQ ID NO: 560357 - DNA, 15 bp, Homo sapiens
tggagtgccttaaca

SEQ ID NO: 560358 - DNA, 15 bp, Homo sapiens
ggagtgccttaacat

SEQ ID NO: 560359 - DNA, 15 bp, Homo sapiens
gagtgccttaacatg

SEQ ID NO: 560360 - DNA, 15 bp, Homo sapiens
agtgccttaacatgt

SEQ ID NO: 560361 - DNA, 15 bp, Homo sapiens
gtgccttaacatgtg

SEQ ID NO: 560362 - DNA, 15 bp, Homo sapiens
tgccttaacatgtgt

SEQ ID NO: 560363 - DNA, 15 bp, Homo sapiens
gccttaacatgtgtg

SEQ ID NO: 560364 - DNA, 15 bp, Homo sapiens
ccttaacatgtgtgc

SEQ ID NO: 560365 - DNA, 15 bp, Homo sapiens
cttaacatgtgtgcc

SEQ ID NO: 560366 - DNA, 15 bp, Homo sapiens
ttaacatgtgtgcca

SEQ ID NO: 560367 - DNA, 15 bp, Homo sapiens
taacatgtgtgccac

SEQ ID NO: 560368 - DNA, 15 bp, Homo sapiens
aacatgtgtgccaca

SEQ ID NO: 560369 - DNA, 15 bp, Homo sapiens
acatgtgtgccacaa

SEQ ID NO: 560370 - DNA, 15 bp, Homo sapiens
catgtgtgccacaag

SEQ ID NO: 560371 - DNA, 15 bp, Homo sapiens
atgtgtgccacaagt

SEQ ID NO: 560372 - DNA, 15 bp, Homo sapiens
tgtgtgccacaagtt

SEQ ID NO: 560373 - DNA, 15 bp, Homo sapiens
gtgtgccacaagtta

SEQ ID NO: 560374 - DNA, 15 bp, Homo sapiens
tgtgccacaagttat

SEQ ID NO: 560375 - DNA, 15 bp, Homo sapiens
gtgccacaagttatg

SEQ ID NO: 560376 - DNA, 15 bp, Homo sapiens
tgccacaagttatgt

SEQ ID NO: 560377 - DNA, 15 bp, Homo sapiens
gccacaagttatgtc

SEQ ID NO: 560378 - DNA, 15 bp, Homo sapiens
ccacaagttatgtca

SEQ ID NO: 560379 - DNA, 15 bp, Homo sapiens
cacaagttatgtcat

SEQ ID NO: 560380 - DNA, 15 bp, Homo sapiens
acaagttatgtcatt

SEQ ID NO: 560381 - DNA, 15 bp, Homo sapiens
caagttatgtcatta

SEQ ID NO: 560382 - DNA, 15 bp, Homo sapiens
aagttatgtcattag

SEQ ID NO: 560383 - DNA, 15 bp, Homo sapiens
agttatgtcattagg

SEQ ID NO: 560384 - DNA, 15 bp, Homo sapiens
gttatgtcattaggt

SEQ ID NO: 560385 - DNA, 15 bp, Homo sapiens
ttatgtcattaggta

SEQ ID NO: 560386 - DNA, 15 bp, Homo sapiens
tatgtcattaggtaa

SEQ ID NO: 560387 - DNA, 15 bp, Homo sapiens
atgtcattaggtaaa

SEQ ID NO: 560388 - DNA, 15 bp, Homo sapiens
tgtcattaggtaaaa

SEQ ID NO: 560389 - DNA, 15 bp, Homo sapiens
gtcattaggtaaaaa

SEQ ID NO: 560390 - DNA, 15 bp, Homo sapiens
tcattaggtaaaaat

SEQ ID NO: 560391 - DNA, 15 bp, Homo sapiens
cattaggtaaaaata

SEQ ID NO: 560392 - DNA, 15 bp, Homo sapiens
attaggtaaaaatag

SEQ ID NO: 560393 - DNA, 15 bp, Homo sapiens
ttaggtaaaaatagc

SEQ ID NO: 560394 - DNA, 15 bp, Homo sapiens
taggtaaaaatagcc

SEQ ID NO: 560395 - DNA, 15 bp, Homo sapiens
aggtaaaaatagcct

SEQ ID NO: 560396 - DNA, 15 bp, Homo sapiens
ggtaaaaatagcctc

SEQ ID NO: 560397 - DNA, 15 bp, Homo sapiens
gtaaaaatagcctct

SEQ ID NO: 560398 - DNA, 15 bp, Homo sapiens
taaaaatagcctctt

SEQ ID NO: 560399 - DNA, 15 bp, Homo sapiens
aaaaatagcctcttt

SEQ ID NO: 560400 - DNA, 15 bp, Homo sapiens
aaaatagcctctttt

SEQ ID NO: 560401 - DNA, 15 bp, Homo sapiens
aaatagcctcttttt

SEQ ID NO: 560402 - DNA, 15 bp, Homo sapiens
aatagcctctttttc

SEQ ID NO: 560403 - DNA, 15 bp, Homo sapiens
atagcctctttttcc

SEQ ID NO: 560404 - DNA, 15 bp, Homo sapiens
tagcctctttttcct

SEQ ID NO: 560405 - DNA, 15 bp, Homo sapiens
agcctctttttccta

SEQ ID NO: 560406 - DNA, 15 bp, Homo sapiens
gcctctttttcctag

SEQ ID NO: 560407 - DNA, 15 bp, Homo sapiens
cctctttttcctagg

SEQ ID NO: 560408 - DNA, 15 bp, Homo sapiens
ctctttttcctaggt

SEQ ID NO: 560409 - DNA, 15 bp, Homo sapiens
tctttttcctaggtg

SEQ ID NO: 560410 - DNA, 15 bp, Homo sapiens
ctttttcctaggtgt

SEQ ID NO: 560411 - DNA, 15 bp, Homo sapiens
tttttcctaggtgtt

SEQ ID NO: 560412 - DNA, 15 bp, Homo sapiens
ttttcctaggtgttg

SEQ ID NO: 560413 - DNA, 15 bp, Homo sapiens
tttcctaggtgttgg

SEQ ID NO: 560414 - DNA, 15 bp, Homo sapiens
ttcctaggtgttggt

SEQ ID NO: 560415 - DNA, 15 bp, Homo sapiens
tcctaggtgttggtg

SEQ ID NO: 560416 - DNA, 15 bp, Homo sapiens
cctaggtgttggtgc

SEQ ID NO: 560417 - DNA, 15 bp, Homo sapiens
ctaggtgttggtgct

SEQ ID NO: 560418 - DNA, 15 bp, Homo sapiens
taggtgttggtgctg

SEQ ID NO: 560419 - DNA, 15 bp, Homo sapiens
aggtgttggtgctgt

SEQ ID NO: 560420 - DNA, 15 bp, Homo sapiens
ggtgttggtgctgtt

SEQ ID NO: 560421 - DNA, 15 bp, Homo sapiens
gtgttggtgctgttg

SEQ ID NO: 560422 - DNA, 15 bp, Homo sapiens
tgttggtgctgttgg

SEQ ID NO: 560423 - DNA, 15 bp, Homo sapiens
gttggtgctgttggt

SEQ ID NO: 560424 - DNA, 15 bp, Homo sapiens
ttggtgctgttggtc

SEQ ID NO: 560425 - DNA, 15 bp, Homo sapiens
tggtgctgttggtcc

SEQ ID NO: 560426 - DNA, 15 bp, Homo sapiens
ggtgctgttggtccc

SEQ ID NO: 560427 - DNA, 15 bp, Homo sapiens
gtgctgttggtccca

SEQ ID NO: 560428 - DNA, 15 bp, Homo sapiens
tgctgttggtcccag

SEQ ID NO: 560429 - DNA, 15 bp, Homo sapiens
gctgttggtcccaga

SEQ ID NO: 560430 - DNA, 15 bp, Homo sapiens
ctgttggtcccagaa

SEQ ID NO: 560431 - DNA, 15 bp, Homo sapiens
tgttggtcccagaaa

SEQ ID NO: 560432 - DNA, 15 bp, Homo sapiens
gttggtcccagaaaa

SEQ ID NO: 560433 - DNA, 15 bp, Homo sapiens
ttggtcccagaaaat

SEQ ID NO: 560434 - DNA, 15 bp, Homo sapiens
tggtcccagaaaata

SEQ ID NO: 560435 - DNA, 15 bp, Homo sapiens
ggtcccagaaaataa

SEQ ID NO: 560436 - DNA, 15 bp, Homo sapiens
gtcccagaaaataaa

SEQ ID NO: 560437 - DNA, 15 bp, Homo sapiens
tcccagaaaataaaa

SEQ ID NO: 560438 - DNA, 15 bp, Homo sapiens
cccagaaaataaaat

SEQ ID NO: 560439 - DNA, 15 bp, Homo sapiens
ccagaaaataaaatc

SEQ ID NO: 560440 - DNA, 15 bp, Homo sapiens
cagaaaataaaatca

SEQ ID NO: 560441 - DNA, 15 bp, Homo sapiens
agaaaataaaatcat

SEQ ID NO: 560442 - DNA, 15 bp, Homo sapiens
gaaaataaaatcatc

SEQ ID NO: 560443 - DNA, 15 bp, Homo sapiens
aaaataaaatcatcg

SEQ ID NO: 560444 - DNA, 15 bp, Homo sapiens
aaataaaatcatcgt

SEQ ID NO: 560445 - DNA, 15 bp, Homo sapiens
aataaaatcatcgtt

SEQ ID NO: 560446 - DNA, 15 bp, Homo sapiens
ataaaatcatcgttc

SEQ ID NO: 560447 - DNA, 15 bp, Homo sapiens
taaaatcatcgttca

SEQ ID NO: 560448 - DNA, 15 bp, Homo sapiens
aaaatcatcgttcag

SEQ ID NO: 560449 - DNA, 15 bp, Homo sapiens
aaatcatcgttcagt

SEQ ID NO: 560450 - DNA, 15 bp, Homo sapiens
aatcatcgttcagtc

SEQ ID NO: 560451 - DNA, 15 bp, Homo sapiens
atcatcgttcagtcc

SEQ ID NO: 560452 - DNA, 15 bp, Homo sapiens
tcatcgttcagtcct

SEQ ID NO: 560453 - DNA, 15 bp, Homo sapiens
catcgttcagtcctt

SEQ ID NO: 560454 - DNA, 15 bp, Homo sapiens
atcgttcagtccttc

SEQ ID NO: 560455 - DNA, 15 bp, Homo sapiens
tcgttcagtccttca

SEQ ID NO: 560456 - DNA, 15 bp, Homo sapiens
cgttcagtccttcag

SEQ ID NO: 560457 - DNA, 15 bp, Homo sapiens
gttcagtccttcagt

SEQ ID NO: 560458 - DNA, 15 bp, Homo sapiens
ttcagtccttcagtc

SEQ ID NO: 560459 - DNA, 15 bp, Homo sapiens
tcagtccttcagtcc

SEQ ID NO: 560460 - DNA, 15 bp, Homo sapiens
cagtccttcagtcca

SEQ ID NO: 560461 - DNA, 15 bp, Homo sapiens
agtccttcagtccat

SEQ ID NO: 560462 - DNA, 15 bp, Homo sapiens
gtccttcagtccatt

SEQ ID NO: 560463 - DNA, 15 bp, Homo sapiens
tccttcagtccattg

SEQ ID NO: 560464 - DNA, 15 bp, Homo sapiens
ccttcagtccattgg

SEQ ID NO: 560465 - DNA, 15 bp, Homo sapiens
cttcagtccattggc

SEQ ID NO: 560466 - DNA, 15 bp, Homo sapiens
ttcagtccattggct

SEQ ID NO: 560467 - DNA, 15 bp, Homo sapiens
tcagtccattggctg

SEQ ID NO: 560468 - DNA, 15 bp, Homo sapiens
cagtccattggctgg

SEQ ID NO: 560469 - DNA, 15 bp, Homo sapiens
agtccattggctgga

SEQ ID NO: 560470 - DNA, 15 bp, Homo sapiens
gtccattggctggac

SEQ ID NO: 560471 - DNA, 15 bp, Homo sapiens
tccattggctggaca

SEQ ID NO: 560472 - DNA, 15 bp, Homo sapiens
ccattggctggacac

SEQ ID NO: 560473 - DNA, 15 bp, Homo sapiens
cattggctggacact

SEQ ID NO: 560474 - DNA, 15 bp, Homo sapiens
attggctggacactc

SEQ ID NO: 560475 - DNA, 15 bp, Homo sapiens
ttggctggacactcc

SEQ ID NO: 560476 - DNA, 15 bp, Homo sapiens
tggctggacactcca

SEQ ID NO: 560477 - DNA, 15 bp, Homo sapiens
ggctggacactccac

SEQ ID NO: 560478 - DNA, 15 bp, Homo sapiens
gctggacactccacc

SEQ ID NO: 560479 - DNA, 15 bp, Homo sapiens
ctggacactccaccc

SEQ ID NO: 560480 - DNA, 15 bp, Homo sapiens
tggacactccacccc

SEQ ID NO: 560481 - DNA, 15 bp, Homo sapiens
ggacactccacccca

SEQ ID NO: 560482 - DNA, 15 bp, Homo sapiens
gacactccaccccag

SEQ ID NO: 560483 - DNA, 15 bp, Homo sapiens
acactccaccccagc

SEQ ID NO: 560484 - DNA, 15 bp, Homo sapiens
cactccaccccagct

SEQ ID NO: 560485 - DNA, 15 bp, Homo sapiens
actccaccccagcta

SEQ ID NO: 560486 - DNA, 15 bp, Homo sapiens
ctccaccccagctag

SEQ ID NO: 560487 - DNA, 15 bp, Homo sapiens
tccaccccagctagc

SEQ ID NO: 560488 - DNA, 15 bp, Homo sapiens
ccaccccagctagca

SEQ ID NO: 560489 - DNA, 15 bp, Homo sapiens
caccccagctagcac

SEQ ID NO: 560490 - DNA, 15 bp, Homo sapiens
accccagctagcacc

SEQ ID NO: 560491 - DNA, 15 bp, Homo sapiens
ccccagctagcacca

SEQ ID NO: 560492 - DNA, 15 bp, Homo sapiens
cccagctagcaccag

SEQ ID NO: 560493 - DNA, 15 bp, Homo sapiens
ccagctagcaccagc

SEQ ID NO: 560494 - DNA, 15 bp, Homo sapiens
cagctagcaccagca

SEQ ID NO: 560495 - DNA, 15 bp, Homo sapiens
agctagcaccagcaa

SEQ ID NO: 560496 - DNA, 15 bp, Homo sapiens
gctagcaccagcaag

SEQ ID NO: 560497 - DNA, 15 bp, Homo sapiens
ctagcaccagcaagc

SEQ ID NO: 560498 - DNA, 15 bp, Homo sapiens
tagcaccagcaagct

SEQ ID NO: 560499 - DNA, 15 bp, Homo sapiens
agcaccagcaagctc

SEQ ID NO: 560500 - DNA, 15 bp, Homo sapiens
gcaccagcaagctca

SEQ ID NO: 560501 - DNA, 15 bp, Homo sapiens
caccagcaagctcag

SEQ ID NO: 560502 - DNA, 15 bp, Homo sapiens
accagcaagctcagc

SEQ ID NO: 560503 - DNA, 15 bp, Homo sapiens
ccagcaagctcagct

SEQ ID NO: 560504 - DNA, 15 bp, Homo sapiens
cagcaagctcagctg

SEQ ID NO: 560505 - DNA, 15 bp, Homo sapiens
agcaagctcagctgc

SEQ ID NO: 560506 - DNA, 15 bp, Homo sapiens
gcaagctcagctgcc

SEQ ID NO: 560507 - DNA, 15 bp, Homo sapiens
caagctcagctgcct

SEQ ID NO: 560508 - DNA, 15 bp, Homo sapiens
aagctcagctgcctg

SEQ ID NO: 560509 - DNA, 15 bp, Homo sapiens
agctcagctgcctgc

SEQ ID NO: 560510 - DNA, 15 bp, Homo sapiens
gctcagctgcctgca

SEQ ID NO: 560511 - DNA, 15 bp, Homo sapiens
ctcagctgcctgcac

SEQ ID NO: 560512 - DNA, 15 bp, Homo sapiens
tcagctgcctgcaca

SEQ ID NO: 560513 - DNA, 15 bp, Homo sapiens
cagctgcctgcacaa

SEQ ID NO: 560514 - DNA, 15 bp, Homo sapiens
agctgcctgcacaag

SEQ ID NO: 560515 - DNA, 15 bp, Homo sapiens
gctgcctgcacaaga

SEQ ID NO: 560516 - DNA, 15 bp, Homo sapiens
ctgcctgcacaagaa

SEQ ID NO: 560517 - DNA, 15 bp, Homo sapiens
tgcctgcacaagaag

SEQ ID NO: 560518 - DNA, 15 bp, Homo sapiens
gcctgcacaagaagg

SEQ ID NO: 560519 - DNA, 15 bp, Homo sapiens
cctgcacaagaaggg

SEQ ID NO: 560520 - DNA, 15 bp, Homo sapiens
ctgcacaagaagggt

SEQ ID NO: 560521 - DNA, 15 bp, Homo sapiens
tgcacaagaagggtg

SEQ ID NO: 560522 - DNA, 15 bp, Homo sapiens
gcacaagaagggtgt

SEQ ID NO: 560523 - DNA, 15 bp, Homo sapiens
cacaagaagggtgtt

SEQ ID NO: 560524 - DNA, 15 bp, Homo sapiens
acaagaagggtgttt

SEQ ID NO: 560525 - DNA, 15 bp, Homo sapiens
caagaagggtgttta

SEQ ID NO: 560526 - DNA, 15 bp, Homo sapiens
aagaagggtgtttac

SEQ ID NO: 560527 - DNA, 15 bp, Homo sapiens
agaagggtgtttaca

SEQ ID NO: 560528 - DNA, 15 bp, Homo sapiens
gaagggtgtttacaa

SEQ ID NO: 560529 - DNA, 15 bp, Homo sapiens
aagggtgtttacaaa

SEQ ID NO: 560530 - DNA, 15 bp, Homo sapiens
agggtgtttacaaac

SEQ ID NO: 560531 - DNA, 15 bp, Homo sapiens
gggtgtttacaaact

SEQ ID NO: 560532 - DNA, 15 bp, Homo sapiens
ggtgtttacaaactg

SEQ ID NO: 560533 - DNA, 15 bp, Homo sapiens
gtgtttacaaactgc

SEQ ID NO: 560534 - DNA, 15 bp, Homo sapiens
tgtttacaaactgcc

SEQ ID NO: 560535 - DNA, 15 bp, Homo sapiens
gtttacaaactgcca

SEQ ID NO: 560536 - DNA, 15 bp, Homo sapiens
tttacaaactgccac

SEQ ID NO: 560537 - DNA, 15 bp, Homo sapiens
ttacaaactgccacg

SEQ ID NO: 560538 - DNA, 15 bp, Homo sapiens
tacaaactgccacgt

SEQ ID NO: 560539 - DNA, 15 bp, Homo sapiens
acaaactgccacgtg

SEQ ID NO: 560540 - DNA, 15 bp, Homo sapiens
caaactgccacgtgt

SEQ ID NO: 560541 - DNA, 15 bp, Homo sapiens
aaactgccacgtgta

SEQ ID NO: 560542 - DNA, 15 bp, Homo sapiens
aactgccacgtgtag

SEQ ID NO: 560543 - DNA, 15 bp, Homo sapiens
actgccacgtgtaga

SEQ ID NO: 560544 - DNA, 15 bp, Homo sapiens
ctgccacgtgtagaa

SEQ ID NO: 560545 - DNA, 15 bp, Homo sapiens
tgccacgtgtagaac

SEQ ID NO: 560546 - DNA, 15 bp, Homo sapiens
gccacgtgtagaact

SEQ ID NO: 560547 - DNA, 15 bp, Homo sapiens
ccacgtgtagaactg

SEQ ID NO: 560548 - DNA, 15 bp, Homo sapiens
cacgtgtagaactgg

SEQ ID NO: 560549 - DNA, 15 bp, Homo sapiens
acgtgtagaactggt

SEQ ID NO: 560550 - DNA, 15 bp, Homo sapiens
cgtgtagaactggtg

SEQ ID NO: 560551 - DNA, 15 bp, Homo sapiens
gtgtagaactggtgc

SEQ ID NO: 560552 - DNA, 15 bp, Homo sapiens
tgtagaactggtgcc

SEQ ID NO: 560553 - DNA, 15 bp, Homo sapiens
gtagaactggtgcca

SEQ ID NO: 560554 - DNA, 15 bp, Homo sapiens
tagaactggtgccag

SEQ ID NO: 560555 - DNA, 15 bp, Homo sapiens
agaactggtgccagg

SEQ ID NO: 560556 - DNA, 15 bp, Homo sapiens
gaactggtgccaggt

SEQ ID NO: 560557 - DNA, 15 bp, Homo sapiens
aactggtgccaggta

SEQ ID NO: 560558 - DNA, 15 bp, Homo sapiens
actggtgccaggtag

SEQ ID NO: 560559 - DNA, 15 bp, Homo sapiens
ctggtgccaggtaga

SEQ ID NO: 560560 - DNA, 15 bp, Homo sapiens
tggtgccaggtagaa

SEQ ID NO: 560561 - DNA, 15 bp, Homo sapiens
ggtgccaggtagaag

SEQ ID NO: 560562 - DNA, 15 bp, Homo sapiens
gtgccaggtagaagg

SEQ ID NO: 560563 - DNA, 15 bp, Homo sapiens
tgccaggtagaaggg

SEQ ID NO: 560564 - DNA, 15 bp, Homo sapiens
gccaggtagaagggg

SEQ ID NO: 560565 - DNA, 15 bp, Homo sapiens
ccaggtagaaggggc

SEQ ID NO: 560566 - DNA, 15 bp, Homo sapiens
caggtagaaggggca

SEQ ID NO: 560567 - DNA, 15 bp, Homo sapiens
aggtagaaggggcaa

SEQ ID NO: 560568 - DNA, 15 bp, Homo sapiens
ggtagaaggggcaag

SEQ ID NO: 560569 - DNA, 15 bp, Homo sapiens
gtagaaggggcaagg

SEQ ID NO: 560570 - DNA, 15 bp, Homo sapiens
tagaaggggcaagga

SEQ ID NO: 560571 - DNA, 15 bp, Homo sapiens
agaaggggcaaggat

SEQ ID NO: 560572 - DNA, 15 bp, Homo sapiens
gaaggggcaaggatg

SEQ ID NO: 560573 - DNA, 15 bp, Homo sapiens
aaggggcaaggatgt

SEQ ID NO: 560574 - DNA, 15 bp, Homo sapiens
aggggcaaggatgtc

SEQ ID NO: 560575 - DNA, 15 bp, Homo sapiens
ggggcaaggatgtcc

SEQ ID NO: 560576 - DNA, 15 bp, Homo sapiens
gggcaaggatgtcca

SEQ ID NO: 560577 - DNA, 15 bp, Homo sapiens
ggcaaggatgtccaa

SEQ ID NO: 560578 - DNA, 15 bp, Homo sapiens
gcaaggatgtccaaa

SEQ ID NO: 560579 - DNA, 15 bp, Homo sapiens
caaggatgtccaaat

SEQ ID NO: 560580 - DNA, 15 bp, Homo sapiens
aaggatgtccaaatc

SEQ ID NO: 560581 - DNA, 15 bp, Homo sapiens
aggatgtccaaatct

SEQ ID NO: 560582 - DNA, 15 bp, Homo sapiens
ggatgtccaaatctt

SEQ ID NO: 560583 - DNA, 15 bp, Homo sapiens
gatgtccaaatctta

SEQ ID NO: 560584 - DNA, 15 bp, Homo sapiens
atgtccaaatcttaa

SEQ ID NO: 560585 - DNA, 15 bp, Homo sapiens
tgtccaaatcttaag

SEQ ID NO: 560586 - DNA, 15 bp, Homo sapiens
gtccaaatcttaagc

SEQ ID NO: 560587 - DNA, 15 bp, Homo sapiens
tccaaatcttaagca

SEQ ID NO: 560588 - DNA, 15 bp, Homo sapiens
ccaaatcttaagcaa

SEQ ID NO: 560589 - DNA, 15 bp, Homo sapiens
caaatcttaagcaaa

SEQ ID NO: 560590 - DNA, 15 bp, Homo sapiens
aaatcttaagcaaag

SEQ ID NO: 560591 - DNA, 15 bp, Homo sapiens
aatcttaagcaaagt

SEQ ID NO: 560592 - DNA, 15 bp, Homo sapiens
atcttaagcaaagtg

SEQ ID NO: 560593 - DNA, 15 bp, Homo sapiens
tcttaagcaaagtga

SEQ ID NO: 560594 - DNA, 15 bp, Homo sapiens
cttaagcaaagtgat

SEQ ID NO: 560595 - DNA, 15 bp, Homo sapiens
ttaagcaaagtgatt

SEQ ID NO: 560596 - DNA, 15 bp, Homo sapiens
taagcaaagtgatta

SEQ ID NO: 560597 - DNA, 15 bp, Homo sapiens
aagcaaagtgattac

SEQ ID NO: 560598 - DNA, 15 bp, Homo sapiens
agcaaagtgattaca

SEQ ID NO: 560599 - DNA, 15 bp, Homo sapiens
gcaaagtgattacag

SEQ ID NO: 560600 - DNA, 15 bp, Homo sapiens
caaagtgattacagg

SEQ ID NO: 560601 - DNA, 15 bp, Homo sapiens
aaagtgattacaggg

SEQ ID NO: 560602 - DNA, 15 bp, Homo sapiens
aagtgattacagggc

SEQ ID NO: 560603 - DNA, 15 bp, Homo sapiens
agtgattacagggca

SEQ ID NO: 560604 - DNA, 15 bp, Homo sapiens
gtgattacagggcag

SEQ ID NO: 560605 - DNA, 15 bp, Homo sapiens
tgattacagggcagg

SEQ ID NO: 560606 - DNA, 15 bp, Homo sapiens
gattacagggcaggg

SEQ ID NO: 560607 - DNA, 15 bp, Homo sapiens
attacagggcaggga

SEQ ID NO: 560608 - DNA, 15 bp, Homo sapiens
ttacagggcagggat

SEQ ID NO: 560609 - DNA, 15 bp, Homo sapiens
tacagggcagggatt

SEQ ID NO: 560610 - DNA, 15 bp, Homo sapiens
acagggcagggatta

SEQ ID NO: 560611 - DNA, 15 bp, Homo sapiens
cagggcagggattaa

SEQ ID NO: 560612 - DNA, 15 bp, Homo sapiens
agggcagggattaaa

SEQ ID NO: 560613 - DNA, 15 bp, Homo sapiens
gggcagggattaaac

SEQ ID NO: 560614 - DNA, 15 bp, Homo sapiens
ggcagggattaaacc

SEQ ID NO: 560615 - DNA, 15 bp, Homo sapiens
gcagggattaaacct

SEQ ID NO: 560616 - DNA, 15 bp, Homo sapiens
cagggattaaacctg

SEQ ID NO: 560617 - DNA, 15 bp, Homo sapiens
agggattaaacctga

SEQ ID NO: 560618 - DNA, 15 bp, Homo sapiens
gggattaaacctgat

SEQ ID NO: 560619 - DNA, 15 bp, Homo sapiens
ggattaaacctgatc

SEQ ID NO: 560620 - DNA, 15 bp, Homo sapiens
gattaaacctgatct

SEQ ID NO: 560621 - DNA, 15 bp, Homo sapiens
attaaacctgatctt

SEQ ID NO: 560622 - DNA, 15 bp, Homo sapiens
ttaaacctgatctta

SEQ ID NO: 560623 - DNA, 15 bp, Homo sapiens
taaacctgatcttac

SEQ ID NO: 560624 - DNA, 15 bp, Homo sapiens
aaacctgatcttacc

SEQ ID NO: 560625 - DNA, 15 bp, Homo sapiens
aacctgatcttacca

SEQ ID NO: 560626 - DNA, 15 bp, Homo sapiens
acctgatcttaccaa

SEQ ID NO: 560627 - DNA, 15 bp, Homo sapiens
cctgatcttaccaaa

SEQ ID NO: 560628 - DNA, 15 bp, Homo sapiens
ctgatcttaccaaaa

SEQ ID NO: 560629 - DNA, 15 bp, Homo sapiens
tgatcttaccaaaat

SEQ ID NO: 560630 - DNA, 15 bp, Homo sapiens
gatcttaccaaaata

SEQ ID NO: 560631 - DNA, 15 bp, Homo sapiens
atcttaccaaaataa

SEQ ID NO: 560632 - DNA, 15 bp, Homo sapiens
tcttaccaaaataac

SEQ ID NO: 560633 - DNA, 15 bp, Homo sapiens
cttaccaaaataact

SEQ ID NO: 560634 - DNA, 15 bp, Homo sapiens
ttaccaaaataactt

SEQ ID NO: 560635 - DNA, 15 bp, Homo sapiens
taccaaaataacttt

SEQ ID NO: 560636 - DNA, 15 bp, Homo sapiens
accaaaataacttta

SEQ ID NO: 560637 - DNA, 15 bp, Homo sapiens
ccaaaataactttac

SEQ ID NO: 560638 - DNA, 15 bp, Homo sapiens
caaaataactttacc

SEQ ID NO: 560639 - DNA, 15 bp, Homo sapiens
aaaataactttacca

SEQ ID NO: 560640 - DNA, 15 bp, Homo sapiens
aaataactttaccag

SEQ ID NO: 560641 - DNA, 15 bp, Homo sapiens
aataactttaccaga

SEQ ID NO: 560642 - DNA, 15 bp, Homo sapiens
ataactttaccagag

SEQ ID NO: 560643 - DNA, 15 bp, Homo sapiens
taactttaccagaga

SEQ ID NO: 560644 - DNA, 15 bp, Homo sapiens
aactttaccagagag

SEQ ID NO: 560645 - DNA, 15 bp, Homo sapiens
actttaccagagagg

SEQ ID NO: 560646 - DNA, 15 bp, Homo sapiens
ctttaccagagaggc

SEQ ID NO: 560647 - DNA, 15 bp, Homo sapiens
tttaccagagaggca

SEQ ID NO: 560648 - DNA, 15 bp, Homo sapiens
ttaccagagaggcaa

SEQ ID NO: 560649 - DNA, 15 bp, Homo sapiens
taccagagaggcaaa

SEQ ID NO: 560650 - DNA, 15 bp, Homo sapiens
accagagaggcaaaa

SEQ ID NO: 560651 - DNA, 15 bp, Homo sapiens
ccagagaggcaaaac

SEQ ID NO: 560652 - DNA, 15 bp, Homo sapiens
cagagaggcaaaact

SEQ ID NO: 560653 - DNA, 15 bp, Homo sapiens
agagaggcaaaactc

SEQ ID NO: 560654 - DNA, 15 bp, Homo sapiens
gagaggcaaaactcc

SEQ ID NO: 560655 - DNA, 15 bp, Homo sapiens
agaggcaaaactcct

SEQ ID NO: 560656 - DNA, 15 bp, Homo sapiens
gaggcaaaactcctt

SEQ ID NO: 560657 - DNA, 15 bp, Homo sapiens
aggcaaaactccttc

SEQ ID NO: 560658 - DNA, 15 bp, Homo sapiens
ggcaaaactccttcc

SEQ ID NO: 560659 - DNA, 15 bp, Homo sapiens
gcaaaactccttcca

SEQ ID NO: 560660 - DNA, 15 bp, Homo sapiens
caaaactccttccat

SEQ ID NO: 560661 - DNA, 15 bp, Homo sapiens
aaaactccttccatt

SEQ ID NO: 560662 - DNA, 15 bp, Homo sapiens
aaactccttccattt

SEQ ID NO: 560663 - DNA, 15 bp, Homo sapiens
aactccttccatttg

SEQ ID NO: 560664 - DNA, 15 bp, Homo sapiens
actccttccatttgt

SEQ ID NO: 560665 - DNA, 15 bp, Homo sapiens
ctccttccatttgta

SEQ ID NO: 560666 - DNA, 15 bp, Homo sapiens
tccttccatttgtaa

SEQ ID NO: 560667 - DNA, 15 bp, Homo sapiens
ccttccatttgtaaa

SEQ ID NO: 560668 - DNA, 15 bp, Homo sapiens
cttccatttgtaaaa

SEQ ID NO: 560669 - DNA, 15 bp, Homo sapiens
ttccatttgtaaaag

SEQ ID NO: 560670 - DNA, 15 bp, Homo sapiens
tccatttgtaaaagc

SEQ ID NO: 560671 - DNA, 15 bp, Homo sapiens
ccatttgtaaaagca

SEQ ID NO: 560672 - DNA, 15 bp, Homo sapiens
catttgtaaaagcat

SEQ ID NO: 560673 - DNA, 15 bp, Homo sapiens
atttgtaaaagcata

SEQ ID NO: 560674 - DNA, 15 bp, Homo sapiens
tttgtaaaagcataa

SEQ ID NO: 560675 - DNA, 15 bp, Homo sapiens
ttgtaaaagcataaa

SEQ ID NO: 560676 - DNA, 15 bp, Homo sapiens
tgtaaaagcataaat

SEQ ID NO: 560677 - DNA, 15 bp, Homo sapiens
gtaaaagcataaatg

SEQ ID NO: 560678 - DNA, 15 bp, Homo sapiens
taaaagcataaatgt

SEQ ID NO: 560679 - DNA, 15 bp, Homo sapiens
aaaagcataaatgta

SEQ ID NO: 560680 - DNA, 15 bp, Homo sapiens
aaagcataaatgtag

SEQ ID NO: 560681 - DNA, 15 bp, Homo sapiens
aagcataaatgtagt

SEQ ID NO: 560682 - DNA, 15 bp, Homo sapiens
agcataaatgtagtt

SEQ ID NO: 560683 - DNA, 15 bp, Homo sapiens
gcataaatgtagttg

SEQ ID NO: 560684 - DNA, 15 bp, Homo sapiens
cataaatgtagttgc

SEQ ID NO: 560685 - DNA, 15 bp, Homo sapiens
ataaatgtagttgcc

SEQ ID NO: 560686 - DNA, 15 bp, Homo sapiens
taaatgtagttgcct

SEQ ID NO: 560687 - DNA, 15 bp, Homo sapiens
aaatgtagttgcctc

SEQ ID NO: 560688 - DNA, 15 bp, Homo sapiens
aatgtagttgcctct

SEQ ID NO: 560689 - DNA, 15 bp, Homo sapiens
atgtagttgcctctg

SEQ ID NO: 560690 - DNA, 15 bp, Homo sapiens
tgtagttgcctctga

SEQ ID NO: 560691 - DNA, 15 bp, Homo sapiens
gtagttgcctctgaa

SEQ ID NO: 560692 - DNA, 15 bp, Homo sapiens
tagttgcctctgaag

SEQ ID NO: 560693 - DNA, 15 bp, Homo sapiens
agttgcctctgaagt

SEQ ID NO: 560694 - DNA, 15 bp, Homo sapiens
gttgcctctgaagtc

SEQ ID NO: 560695 - DNA, 15 bp, Homo sapiens
ttgcctctgaagtca

SEQ ID NO: 560696 - DNA, 15 bp, Homo sapiens
tgcctctgaagtcaa

SEQ ID NO: 560697 - DNA, 15 bp, Homo sapiens
gcctctgaagtcaaa

SEQ ID NO: 560698 - DNA, 15 bp, Homo sapiens
cctctgaagtcaaaa

SEQ ID NO: 560699 - DNA, 15 bp, Homo sapiens
ctctgaagtcaaaag

SEQ ID NO: 560700 - DNA, 15 bp, Homo sapiens
tctgaagtcaaaagg

SEQ ID NO: 560701 - DNA, 15 bp, Homo sapiens
ctgaagtcaaaaggt

SEQ ID NO: 560702 - DNA, 15 bp, Homo sapiens
tgaagtcaaaaggtt

SEQ ID NO: 560703 - DNA, 15 bp, Homo sapiens
gaagtcaaaaggtta

SEQ ID NO: 560704 - DNA, 15 bp, Homo sapiens
aagtcaaaaggttag

SEQ ID NO: 560705 - DNA, 15 bp, Homo sapiens
agtcaaaaggttaga

SEQ ID NO: 560706 - DNA, 15 bp, Homo sapiens
gtcaaaaggttagac

SEQ ID NO: 560707 - DNA, 15 bp, Homo sapiens
tcaaaaggttagaca

SEQ ID NO: 560708 - DNA, 15 bp, Homo sapiens
caaaaggttagacat

SEQ ID NO: 560709 - DNA, 15 bp, Homo sapiens
aaaaggttagacatc

SEQ ID NO: 560710 - DNA, 15 bp, Homo sapiens
aaaggttagacatct

SEQ ID NO: 560711 - DNA, 15 bp, Homo sapiens
aaggttagacatctc

SEQ ID NO: 560712 - DNA, 15 bp, Homo sapiens
aggttagacatctct

SEQ ID NO: 560713 - DNA, 15 bp, Homo sapiens
ggttagacatctctt

SEQ ID NO: 560714 - DNA, 15 bp, Homo sapiens
gttagacatctcttt

SEQ ID NO: 560715 - DNA, 15 bp, Homo sapiens
ttagacatctctttg

SEQ ID NO: 560716 - DNA, 15 bp, Homo sapiens
tagacatctctttga

SEQ ID NO: 560717 - DNA, 15 bp, Homo sapiens
agacatctctttgag

SEQ ID NO: 560718 - DNA, 15 bp, Homo sapiens
gacatctctttgagg

SEQ ID NO: 560719 - DNA, 15 bp, Homo sapiens
acatctctttgaggt

SEQ ID NO: 560720 - DNA, 15 bp, Homo sapiens
catctctttgaggta

SEQ ID NO: 560721 - DNA, 15 bp, Homo sapiens
atctctttgaggtag

SEQ ID NO: 560722 - DNA, 15 bp, Homo sapiens
tctctttgaggtagt

SEQ ID NO: 560723 - DNA, 15 bp, Homo sapiens
ctctttgaggtagtc

SEQ ID NO: 560724 - DNA, 15 bp, Homo sapiens
tctttgaggtagtcc

SEQ ID NO: 560725 - DNA, 15 bp, Homo sapiens
ctttgaggtagtccg

SEQ ID NO: 560726 - DNA, 15 bp, Homo sapiens
tttgaggtagtccga

SEQ ID NO: 560727 - DNA, 15 bp, Homo sapiens
ttgaggtagtccgaa

SEQ ID NO: 560728 - DNA, 15 bp, Homo sapiens
tgaggtagtccgaag

SEQ ID NO: 560729 - DNA, 15 bp, Homo sapiens
gaggtagtccgaagg

SEQ ID NO: 560730 - DNA, 15 bp, Homo sapiens
aggtagtccgaaggc

SEQ ID NO: 560731 - DNA, 15 bp, Homo sapiens
ggtagtccgaaggca

SEQ ID NO: 560732 - DNA, 15 bp, Homo sapiens
gtagtccgaaggcat

SEQ ID NO: 560733 - DNA, 15 bp, Homo sapiens
tagtccgaaggcatc

SEQ ID NO: 560734 - DNA, 15 bp, Homo sapiens
agtccgaaggcatct

SEQ ID NO: 560735 - DNA, 15 bp, Homo sapiens
gtccgaaggcatctg

SEQ ID NO: 560736 - DNA, 15 bp, Homo sapiens
tccgaaggcatctgc

SEQ ID NO: 560737 - DNA, 15 bp, Homo sapiens
ccgaaggcatctgct

SEQ ID NO: 560738 - DNA, 15 bp, Homo sapiens
cgaaggcatctgctt

SEQ ID NO: 560739 - DNA, 15 bp, Homo sapiens
gaaggcatctgcttg

SEQ ID NO: 560740 - DNA, 15 bp, Homo sapiens
aaggcatctgcttgt

SEQ ID NO: 560741 - DNA, 15 bp, Homo sapiens
aggcatctgcttgta

SEQ ID NO: 560742 - DNA, 15 bp, Homo sapiens
ggcatctgcttgtag

SEQ ID NO: 560743 - DNA, 15 bp, Homo sapiens
gcatctgcttgtagg

SEQ ID NO: 560744 - DNA, 15 bp, Homo sapiens
catctgcttgtaggt

SEQ ID NO: 560745 - DNA, 15 bp, Homo sapiens
atctgcttgtaggtc

SEQ ID NO: 560746 - DNA, 15 bp, Homo sapiens
tctgcttgtaggtct

SEQ ID NO: 560747 - DNA, 15 bp, Homo sapiens
ctgcttgtaggtcta

SEQ ID NO: 560748 - DNA, 15 bp, Homo sapiens
tgcttgtaggtctaa

SEQ ID NO: 560749 - DNA, 15 bp, Homo sapiens
gcttgtaggtctaaa

SEQ ID NO: 560750 - DNA, 15 bp, Homo sapiens
cttgtaggtctaaag

SEQ ID NO: 560751 - DNA, 15 bp, Homo sapiens
ttgtaggtctaaagg

SEQ ID NO: 560752 - DNA, 15 bp, Homo sapiens
tgtaggtctaaaggc

SEQ ID NO: 560753 - DNA, 15 bp, Homo sapiens
gtaggtctaaaggca

SEQ ID NO: 560754 - DNA, 15 bp, Homo sapiens
taggtctaaaggcag

SEQ ID NO: 560755 - DNA, 15 bp, Homo sapiens
aggtctaaaggcaga

SEQ ID NO: 560756 - DNA, 15 bp, Homo sapiens
ggtctaaaggcagaa

SEQ ID NO: 560757 - DNA, 15 bp, Homo sapiens
gtctaaaggcagaaa

SEQ ID NO: 560758 - DNA, 15 bp, Homo sapiens
tctaaaggcagaaat

SEQ ID NO: 560759 - DNA, 15 bp, Homo sapiens
ctaaaggcagaaatg

SEQ ID NO: 560760 - DNA, 15 bp, Homo sapiens
taaaggcagaaatgt

SEQ ID NO: 560761 - DNA, 15 bp, Homo sapiens
aaaggcagaaatgtt

SEQ ID NO: 560762 - DNA, 15 bp, Homo sapiens
aaggcagaaatgtta

SEQ ID NO: 560763 - DNA, 15 bp, Homo sapiens
aggcagaaatgttaa

SEQ ID NO: 560764 - DNA, 15 bp, Homo sapiens
ggcagaaatgttaag

SEQ ID NO: 560765 - DNA, 15 bp, Homo sapiens
gcagaaatgttaagg

SEQ ID NO: 560766 - DNA, 15 bp, Homo sapiens
cagaaatgttaaggg

SEQ ID NO: 560767 - DNA, 15 bp, Homo sapiens
agaaatgttaagggc

SEQ ID NO: 560768 - DNA, 15 bp, Homo sapiens
gaaatgttaagggct

SEQ ID NO: 560769 - DNA, 15 bp, Homo sapiens
aaatgttaagggctg

SEQ ID NO: 560770 - DNA, 15 bp, Homo sapiens
aatgttaagggctgc

SEQ ID NO: 560771 - DNA, 15 bp, Homo sapiens
atgttaagggctgcc

SEQ ID NO: 560772 - DNA, 15 bp, Homo sapiens
tgttaagggctgcct

SEQ ID NO: 560773 - DNA, 15 bp, Homo sapiens
gttaagggctgcctc

SEQ ID NO: 560774 - DNA, 15 bp, Homo sapiens
ttaagggctgcctcc

SEQ ID NO: 560775 - DNA, 15 bp, Homo sapiens
taagggctgcctcct

SEQ ID NO: 560776 - DNA, 15 bp, Homo sapiens
aagggctgcctcctg

SEQ ID NO: 560777 - DNA, 15 bp, Homo sapiens
agggctgcctcctgc

SEQ ID NO: 560778 - DNA, 15 bp, Homo sapiens
gggctgcctcctgcc

SEQ ID NO: 560779 - DNA, 15 bp, Homo sapiens
ggctgcctcctgcct

SEQ ID NO: 560780 - DNA, 15 bp, Homo sapiens
gctgcctcctgcctt

SEQ ID NO: 560781 - DNA, 15 bp, Homo sapiens
ctgcctcctgccttg

SEQ ID NO: 560782 - DNA, 15 bp, Homo sapiens
tgcctcctgccttgg

SEQ ID NO: 560783 - DNA, 15 bp, Homo sapiens
gcctcctgccttggc

SEQ ID NO: 560784 - DNA, 15 bp, Homo sapiens
cctcctgccttggcc

SEQ ID NO: 560785 - DNA, 15 bp, Homo sapiens
ctcctgccttggccc

SEQ ID NO: 560786 - DNA, 15 bp, Homo sapiens
tcctgccttggcccg

SEQ ID NO: 560787 - DNA, 15 bp, Homo sapiens
cctgccttggcccgt

SEQ ID NO: 560788 - DNA, 15 bp, Homo sapiens
ctgccttggcccgtg

SEQ ID NO: 560789 - DNA, 15 bp, Homo sapiens
tgccttggcccgtgg

SEQ ID NO: 560790 - DNA, 15 bp, Homo sapiens
gccttggcccgtggt

SEQ ID NO: 560791 - DNA, 15 bp, Homo sapiens
ccttggcccgtggtg

SEQ ID NO: 560792 - DNA, 15 bp, Homo sapiens
cttggcccgtggtgt

SEQ ID NO: 560793 - DNA, 15 bp, Homo sapiens
ttggcccgtggtgtt

SEQ ID NO: 560794 - DNA, 15 bp, Homo sapiens
tggcccgtggtgttt

SEQ ID NO: 560795 - DNA, 15 bp, Homo sapiens
ggcccgtggtgtttg

SEQ ID NO: 560796 - DNA, 15 bp, Homo sapiens
gcccgtggtgtttgt

SEQ ID NO: 560797 - DNA, 15 bp, Homo sapiens
cccgtggtgtttgtt

SEQ ID NO: 560798 - DNA, 15 bp, Homo sapiens
ccgtggtgtttgttt

SEQ ID NO: 560799 - DNA, 15 bp, Homo sapiens
cgtggtgtttgtttt

SEQ ID NO: 560800 - DNA, 15 bp, Homo sapiens
gtggtgtttgttttc

SEQ ID NO: 560801 - DNA, 15 bp, Homo sapiens
tggtgtttgttttcc

SEQ ID NO: 560802 - DNA, 15 bp, Homo sapiens
ggtgtttgttttccc

SEQ ID NO: 560803 - DNA, 15 bp, Homo sapiens
gtgtttgttttccct

SEQ ID NO: 560804 - DNA, 15 bp, Homo sapiens
tgtttgttttccctg

SEQ ID NO: 560805 - DNA, 15 bp, Homo sapiens
gtttgttttccctgg

SEQ ID NO: 560806 - DNA, 15 bp, Homo sapiens
tttgttttccctggg

SEQ ID NO: 560807 - DNA, 15 bp, Homo sapiens
ttgttttccctggga

SEQ ID NO: 560808 - DNA, 15 bp, Homo sapiens
tgttttccctgggaa

SEQ ID NO: 560809 - DNA, 15 bp, Homo sapiens
gttttccctgggaag

SEQ ID NO: 560810 - DNA, 15 bp, Homo sapiens
ttttccctgggaagc

SEQ ID NO: 560811 - DNA, 15 bp, Homo sapiens
tttccctgggaagct

SEQ ID NO: 560812 - DNA, 15 bp, Homo sapiens
ttccctgggaagctg

SEQ ID NO: 560813 - DNA, 15 bp, Homo sapiens
tccctgggaagctgc

SEQ ID NO: 560814 - DNA, 15 bp, Homo sapiens
ccctgggaagctgca

SEQ ID NO: 560815 - DNA, 15 bp, Homo sapiens
cctgggaagctgcat

SEQ ID NO: 560816 - DNA, 15 bp, Homo sapiens
ctgggaagctgcatc

SEQ ID NO: 560817 - DNA, 15 bp, Homo sapiens
tgggaagctgcatct

SEQ ID NO: 560818 - DNA, 15 bp, Homo sapiens
gggaagctgcatctc

SEQ ID NO: 560819 - DNA, 15 bp, Homo sapiens
ggaagctgcatctca

SEQ ID NO: 560820 - DNA, 15 bp, Homo sapiens
gaagctgcatctcac

SEQ ID NO: 560821 - DNA, 15 bp, Homo sapiens
aagctgcatctcacc

SEQ ID NO: 560822 - DNA, 15 bp, Homo sapiens
agctgcatctcacca

SEQ ID NO: 560823 - DNA, 15 bp, Homo sapiens
gctgcatctcaccat

SEQ ID NO: 560824 - DNA, 15 bp, Homo sapiens
ctgcatctcaccata

SEQ ID NO: 560825 - DNA, 15 bp, Homo sapiens
tgcatctcaccatat

SEQ ID NO: 560826 - DNA, 15 bp, Homo sapiens
gcatctcaccatatc

SEQ ID NO: 560827 - DNA, 15 bp, Homo sapiens
catctcaccatatcc

SEQ ID NO: 560828 - DNA, 15 bp, Homo sapiens
atctcaccatatccc

SEQ ID NO: 560829 - DNA, 15 bp, Homo sapiens
tctcaccatatccct

SEQ ID NO: 560830 - DNA, 15 bp, Homo sapiens
ctcaccatatccctg

SEQ ID NO: 560831 - DNA, 15 bp, Homo sapiens
tcaccatatccctgg

SEQ ID NO: 560832 - DNA, 15 bp, Homo sapiens
caccatatccctgga

SEQ ID NO: 560833 - DNA, 15 bp, Homo sapiens
accatatccctggat

SEQ ID NO: 560834 - DNA, 15 bp, Homo sapiens
ccatatccctggatt

SEQ ID NO: 560835 - DNA, 15 bp, Homo sapiens
catatccctggatta

SEQ ID NO: 560836 - DNA, 15 bp, Homo sapiens
atatccctggattac

SEQ ID NO: 560837 - DNA, 15 bp, Homo sapiens
tatccctggattaca

SEQ ID NO: 560838 - DNA, 15 bp, Homo sapiens
atccctggattacag

SEQ ID NO: 560839 - DNA, 15 bp, Homo sapiens
tccctggattacagc

SEQ ID NO: 560840 - DNA, 15 bp, Homo sapiens
ccctggattacagct

SEQ ID NO: 560841 - DNA, 15 bp, Homo sapiens
cctggattacagctg

SEQ ID NO: 560842 - DNA, 15 bp, Homo sapiens
ctggattacagctgc

SEQ ID NO: 560843 - DNA, 15 bp, Homo sapiens
tggattacagctgcc

SEQ ID NO: 560844 - DNA, 15 bp, Homo sapiens
ggattacagctgcct

SEQ ID NO: 560845 - DNA, 15 bp, Homo sapiens
gattacagctgcctc

SEQ ID NO: 560846 - DNA, 15 bp, Homo sapiens
attacagctgcctcc

SEQ ID NO: 560847 - DNA, 15 bp, Homo sapiens
ttacagctgcctccc

SEQ ID NO: 560848 - DNA, 15 bp, Homo sapiens
tacagctgcctccct

SEQ ID NO: 560849 - DNA, 15 bp, Homo sapiens
acagctgcctccctg

SEQ ID NO: 560850 - DNA, 15 bp, Homo sapiens
cagctgcctccctgt

SEQ ID NO: 560851 - DNA, 15 bp, Homo sapiens
agctgcctccctgtg

SEQ ID NO: 560852 - DNA, 15 bp, Homo sapiens
gctgcctccctgtgc

SEQ ID NO: 560853 - DNA, 15 bp, Homo sapiens
ctgcctccctgtgct

SEQ ID NO: 560854 - DNA, 15 bp, Homo sapiens
tgcctccctgtgctc

SEQ ID NO: 560855 - DNA, 15 bp, Homo sapiens
gcctccctgtgctct

SEQ ID NO: 560856 - DNA, 15 bp, Homo sapiens
cctccctgtgctctg

SEQ ID NO: 560857 - DNA, 15 bp, Homo sapiens
ctccctgtgctctgg

SEQ ID NO: 560858 - DNA, 15 bp, Homo sapiens
tccctgtgctctggg

SEQ ID NO: 560859 - DNA, 15 bp, Homo sapiens
ccctgtgctctgggc

SEQ ID NO: 560860 - DNA, 15 bp, Homo sapiens
cctgtgctctgggcc

SEQ ID NO: 560861 - DNA, 15 bp, Homo sapiens
ctgtgctctgggcca

SEQ ID NO: 560862 - DNA, 15 bp, Homo sapiens
tgtgctctgggccaa

SEQ ID NO: 560863 - DNA, 15 bp, Homo sapiens
gtgctctgggccaaa

SEQ ID NO: 560864 - DNA, 15 bp, Homo sapiens
tgctctgggccaaat

SEQ ID NO: 560865 - DNA, 15 bp, Homo sapiens
gctctgggccaaatt

SEQ ID NO: 560866 - DNA, 15 bp, Homo sapiens
ctctgggccaaattc

SEQ ID NO: 560867 - DNA, 15 bp, Homo sapiens
tctgggccaaattca

SEQ ID NO: 560868 - DNA, 15 bp, Homo sapiens
ctgggccaaattcaa

SEQ ID NO: 560869 - DNA, 15 bp, Homo sapiens
tgggccaaattcaag

SEQ ID NO: 560870 - DNA, 15 bp, Homo sapiens
gggccaaattcaaga

SEQ ID NO: 560871 - DNA, 15 bp, Homo sapiens
ggccaaattcaagaa

SEQ ID NO: 560872 - DNA, 15 bp, Homo sapiens
gccaaattcaagaag

SEQ ID NO: 560873 - DNA, 15 bp, Homo sapiens
ccaaattcaagaagg

SEQ ID NO: 560874 - DNA, 15 bp, Homo sapiens
caaattcaagaaggt

SEQ ID NO: 560875 - DNA, 15 bp, Homo sapiens
aaattcaagaaggtg

SEQ ID NO: 560876 - DNA, 15 bp, Homo sapiens
aattcaagaaggtgt

SEQ ID NO: 560877 - DNA, 15 bp, Homo sapiens
attcaagaaggtgtg

SEQ ID NO: 560878 - DNA, 15 bp, Homo sapiens
ttcaagaaggtgtga

SEQ ID NO: 560879 - DNA, 15 bp, Homo sapiens
tcaagaaggtgtgag

SEQ ID NO: 560880 - DNA, 15 bp, Homo sapiens
caagaaggtgtgagc

SEQ ID NO: 560881 - DNA, 15 bp, Homo sapiens
aagaaggtgtgagca

SEQ ID NO: 560882 - DNA, 15 bp, Homo sapiens
agaaggtgtgagcaa

SEQ ID NO: 560883 - DNA, 15 bp, Homo sapiens
gaaggtgtgagcaag

SEQ ID NO: 560884 - DNA, 15 bp, Homo sapiens
aaggtgtgagcaaga

SEQ ID NO: 560885 - DNA, 15 bp, Homo sapiens
aggtgtgagcaagag

SEQ ID NO: 560886 - DNA, 15 bp, Homo sapiens
ggtgtgagcaagagt

SEQ ID NO: 560887 - DNA, 15 bp, Homo sapiens
gtgtgagcaagagtg

SEQ ID NO: 560888 - DNA, 15 bp, Homo sapiens
tgtgagcaagagtga

SEQ ID NO: 560889 - DNA, 15 bp, Homo sapiens
gtgagcaagagtgag

SEQ ID NO: 560890 - DNA, 15 bp, Homo sapiens
tgagcaagagtgagg

SEQ ID NO: 560891 - DNA, 15 bp, Homo sapiens
gagcaagagtgaggc

SEQ ID NO: 560892 - DNA, 15 bp, Homo sapiens
agcaagagtgaggca

SEQ ID NO: 560893 - DNA, 15 bp, Homo sapiens
gcaagagtgaggcag

SEQ ID NO: 560894 - DNA, 15 bp, Homo sapiens
caagagtgaggcagc

SEQ ID NO: 560895 - DNA, 15 bp, Homo sapiens
aagagtgaggcagca

SEQ ID NO: 560896 - DNA, 15 bp, Homo sapiens
agagtgaggcagcag

SEQ ID NO: 560897 - DNA, 15 bp, Homo sapiens
gagtgaggcagcaga

SEQ ID NO: 560898 - DNA, 15 bp, Homo sapiens
agtgaggcagcagac

SEQ ID NO: 560899 - DNA, 15 bp, Homo sapiens
gtgaggcagcagacg

SEQ ID NO: 560900 - DNA, 15 bp, Homo sapiens
tgaggcagcagacgg

SEQ ID NO: 560901 - DNA, 15 bp, Homo sapiens
gaggcagcagacggg

SEQ ID NO: 560902 - DNA, 15 bp, Homo sapiens
aggcagcagacgggt

SEQ ID NO: 560903 - DNA, 15 bp, Homo sapiens
ggcagcagacgggtg

SEQ ID NO: 560904 - DNA, 15 bp, Homo sapiens
gcagcagacgggtgg

SEQ ID NO: 560905 - DNA, 15 bp, Homo sapiens
cagcagacgggtggg

SEQ ID NO: 560906 - DNA, 15 bp, Homo sapiens
agcagacgggtgggg

SEQ ID NO: 560907 - DNA, 15 bp, Homo sapiens
gcagacgggtggggc

SEQ ID NO: 560908 - DNA, 15 bp, Homo sapiens
cagacgggtggggct

SEQ ID NO: 560909 - DNA, 15 bp, Homo sapiens
agacgggtggggctt

SEQ ID NO: 560910 - DNA, 15 bp, Homo sapiens
gacgggtggggcttg

SEQ ID NO: 560911 - DNA, 15 bp, Homo sapiens
acgggtggggcttgt

SEQ ID NO: 560912 - DNA, 15 bp, Homo sapiens
cgggtggggcttgta

SEQ ID NO: 560913 - DNA, 15 bp, Homo sapiens
gggtggggcttgtag

SEQ ID NO: 560914 - DNA, 15 bp, Homo sapiens
ggtggggcttgtaga

SEQ ID NO: 560915 - DNA, 15 bp, Homo sapiens
gtggggcttgtagaa

SEQ ID NO: 560916 - DNA, 15 bp, Homo sapiens
tggggcttgtagaaa

SEQ ID NO: 560917 - DNA, 15 bp, Homo sapiens
ggggcttgtagaaat

SEQ ID NO: 560918 - DNA, 15 bp, Homo sapiens
gggcttgtagaaatt

SEQ ID NO: 560919 - DNA, 15 bp, Homo sapiens
ggcttgtagaaattt

SEQ ID NO: 560920 - DNA, 15 bp, Homo sapiens
gcttgtagaaatttc

SEQ ID NO: 560921 - DNA, 15 bp, Homo sapiens
cttgtagaaatttct

SEQ ID NO: 560922 - DNA, 15 bp, Homo sapiens
ttgtagaaatttctc

SEQ ID NO: 560923 - DNA, 15 bp, Homo sapiens
tgtagaaatttctct

SEQ ID NO: 560924 - DNA, 15 bp, Homo sapiens
gtagaaatttctctg

SEQ ID NO: 560925 - DNA, 15 bp, Homo sapiens
tagaaatttctctgt

SEQ ID NO: 560926 - DNA, 15 bp, Homo sapiens
agaaatttctctgta

SEQ ID NO: 560927 - DNA, 15 bp, Homo sapiens
gaaatttctctgtac

SEQ ID NO: 560928 - DNA, 15 bp, Homo sapiens
aaatttctctgtacc

SEQ ID NO: 560929 - DNA, 15 bp, Homo sapiens
aatttctctgtaccc

SEQ ID NO: 560930 - DNA, 15 bp, Homo sapiens
atttctctgtaccct

SEQ ID NO: 560931 - DNA, 15 bp, Homo sapiens
tttctctgtaccctt

SEQ ID NO: 560932 - DNA, 15 bp, Homo sapiens
ttctctgtacccttt

SEQ ID NO: 560933 - DNA, 15 bp, Homo sapiens
tctctgtacccttta

SEQ ID NO: 560934 - DNA, 15 bp, Homo sapiens
ctctgtaccctttag

SEQ ID NO: 560935 - DNA, 15 bp, Homo sapiens
tctgtaccctttagg

SEQ ID NO: 560936 - DNA, 15 bp, Homo sapiens
ctgtaccctttagga

SEQ ID NO: 560937 - DNA, 15 bp, Homo sapiens
tgtaccctttaggac

SEQ ID NO: 560938 - DNA, 15 bp, Homo sapiens
gtaccctttaggact

SEQ ID NO: 560939 - DNA, 15 bp, Homo sapiens
taccctttaggactt

SEQ ID NO: 560940 - DNA, 15 bp, Homo sapiens
accctttaggactta

SEQ ID NO: 560941 - DNA, 15 bp, Homo sapiens
ccctttaggacttag

SEQ ID NO: 560942 - DNA, 15 bp, Homo sapiens
cctttaggacttaga

SEQ ID NO: 560943 - DNA, 15 bp, Homo sapiens
ctttaggacttagaa

SEQ ID NO: 560944 - DNA, 15 bp, Homo sapiens
tttaggacttagaaa

SEQ ID NO: 560945 - DNA, 15 bp, Homo sapiens
ttaggacttagaaat

SEQ ID NO: 560946 - DNA, 15 bp, Homo sapiens
taggacttagaaatg

SEQ ID NO: 560947 - DNA, 15 bp, Homo sapiens
aggacttagaaatga

SEQ ID NO: 560948 - DNA, 15 bp, Homo sapiens
ggacttagaaatgac

SEQ ID NO: 560949 - DNA, 15 bp, Homo sapiens
gacttagaaatgact

SEQ ID NO: 560950 - DNA, 15 bp, Homo sapiens
acttagaaatgactc

SEQ ID NO: 560951 - DNA, 15 bp, Homo sapiens
cttagaaatgactcc

SEQ ID NO: 560952 - DNA, 15 bp, Homo sapiens
ttagaaatgactcct

SEQ ID NO: 560953 - DNA, 15 bp, Homo sapiens
tagaaatgactccta

SEQ ID NO: 560954 - DNA, 15 bp, Homo sapiens
agaaatgactcctaa

SEQ ID NO: 560955 - DNA, 15 bp, Homo sapiens
gaaatgactcctaaa

SEQ ID NO: 560956 - DNA, 15 bp, Homo sapiens
aaatgactcctaaag

SEQ ID NO: 560957 - DNA, 15 bp, Homo sapiens
aatgactcctaaagc

SEQ ID NO: 560958 - DNA, 15 bp, Homo sapiens
atgactcctaaagca

SEQ ID NO: 560959 - DNA, 15 bp, Homo sapiens
tgactcctaaagcaa

SEQ ID NO: 560960 - DNA, 15 bp, Homo sapiens
gactcctaaagcaat

SEQ ID NO: 560961 - DNA, 15 bp, Homo sapiens
actcctaaagcaatt

SEQ ID NO: 560962 - DNA, 15 bp, Homo sapiens
ctcctaaagcaattc

SEQ ID NO: 560963 - DNA, 15 bp, Homo sapiens
tcctaaagcaattct

SEQ ID NO: 560964 - DNA, 15 bp, Homo sapiens
cctaaagcaattcta

SEQ ID NO: 560965 - DNA, 15 bp, Homo sapiens
ctaaagcaattctaa

SEQ ID NO: 560966 - DNA, 15 bp, Homo sapiens
taaagcaattctaag

SEQ ID NO: 560967 - DNA, 15 bp, Homo sapiens
aaagcaattctaagt

SEQ ID NO: 560968 - DNA, 15 bp, Homo sapiens
aagcaattctaagtt

SEQ ID NO: 560969 - DNA, 15 bp, Homo sapiens
agcaattctaagttt

SEQ ID NO: 560970 - DNA, 15 bp, Homo sapiens
gcaattctaagtttg

SEQ ID NO: 560971 - DNA, 15 bp, Homo sapiens
caattctaagtttgc

SEQ ID NO: 560972 - DNA, 15 bp, Homo sapiens
aattctaagtttgct

SEQ ID NO: 560973 - DNA, 15 bp, Homo sapiens
attctaagtttgctc

SEQ ID NO: 560974 - DNA, 15 bp, Homo sapiens
ttctaagtttgctct

SEQ ID NO: 560975 - DNA, 15 bp, Homo sapiens
tctaagtttgctctt

SEQ ID NO: 560976 - DNA, 15 bp, Homo sapiens
ctaagtttgctcttc

SEQ ID NO: 560977 - DNA, 15 bp, Homo sapiens
taagtttgctcttcc

SEQ ID NO: 560978 - DNA, 15 bp, Homo sapiens
aagtttgctcttcca

SEQ ID NO: 560979 - DNA, 15 bp, Homo sapiens
agtttgctcttccac

SEQ ID NO: 560980 - DNA, 15 bp, Homo sapiens
gtttgctcttccaca

SEQ ID NO: 560981 - DNA, 15 bp, Homo sapiens
tttgctcttccacaa

SEQ ID NO: 560982 - DNA, 15 bp, Homo sapiens
ttgctcttccacaag

SEQ ID NO: 560983 - DNA, 15 bp, Homo sapiens
tgctcttccacaagc

SEQ ID NO: 560984 - DNA, 15 bp, Homo sapiens
gctcttccacaagca

SEQ ID NO: 560985 - DNA, 15 bp, Homo sapiens
ctcttccacaagcat

SEQ ID NO: 560986 - DNA, 15 bp, Homo sapiens
tcttccacaagcatc

SEQ ID NO: 560987 - DNA, 15 bp, Homo sapiens
cttccacaagcatct

SEQ ID NO: 560988 - DNA, 15 bp, Homo sapiens
ttccacaagcatctg

SEQ ID NO: 560989 - DNA, 15 bp, Homo sapiens
tccacaagcatctga

SEQ ID NO: 560990 - DNA, 15 bp, Homo sapiens
ccacaagcatctgac

SEQ ID NO: 560991 - DNA, 15 bp, Homo sapiens
cacaagcatctgacc

SEQ ID NO: 560992 - DNA, 15 bp, Homo sapiens
acaagcatctgacct

SEQ ID NO: 560993 - DNA, 15 bp, Homo sapiens
caagcatctgaccta

SEQ ID NO: 560994 - DNA, 15 bp, Homo sapiens
aagcatctgacctaa

SEQ ID NO: 560995 - DNA, 15 bp, Homo sapiens
agcatctgacctaac

SEQ ID NO: 560996 - DNA, 15 bp, Homo sapiens
gcatctgacctaaca

SEQ ID NO: 560997 - DNA, 15 bp, Homo sapiens
catctgacctaacaa

SEQ ID NO: 560998 - DNA, 15 bp, Homo sapiens
atctgacctaacaaa

SEQ ID NO: 560999 - DNA, 15 bp, Homo sapiens
tctgacctaacaaag

SEQ ID NO: 561000 - DNA, 15 bp, Homo sapiens
ctgacctaacaaagg

SEQ ID NO: 561001 - DNA, 15 bp, Homo sapiens
tgacctaacaaagga

SEQ ID NO: 561002 - DNA, 15 bp, Homo sapiens
gacctaacaaaggaa

SEQ ID NO: 561003 - DNA, 15 bp, Homo sapiens
acctaacaaaggaag

SEQ ID NO: 561004 - DNA, 15 bp, Homo sapiens
cctaacaaaggaaga

SEQ ID NO: 561005 - DNA, 15 bp, Homo sapiens
ctaacaaaggaagag

SEQ ID NO: 561006 - DNA, 15 bp, Homo sapiens
taacaaaggaagagg

SEQ ID NO: 561007 - DNA, 15 bp, Homo sapiens
aacaaaggaagagga

SEQ ID NO: 561008 - DNA, 15 bp, Homo sapiens
acaaaggaagaggaa

SEQ ID NO: 561009 - DNA, 15 bp, Homo sapiens
caaaggaagaggaag

SEQ ID NO: 561010 - DNA, 15 bp, Homo sapiens
aaaggaagaggaaga

SEQ ID NO: 561011 - DNA, 15 bp, Homo sapiens
aaggaagaggaagaa

SEQ ID NO: 561012 - DNA, 15 bp, Homo sapiens
aggaagaggaagaat

SEQ ID NO: 561013 - DNA, 15 bp, Homo sapiens
ggaagaggaagaatc

SEQ ID NO: 561014 - DNA, 15 bp, Homo sapiens
gaagaggaagaatca

SEQ ID NO: 561015 - DNA, 15 bp, Homo sapiens
aagaggaagaatcac

SEQ ID NO: 561016 - DNA, 15 bp, Homo sapiens
agaggaagaatcact

SEQ ID NO: 561017 - DNA, 15 bp, Homo sapiens
gaggaagaatcactt

SEQ ID NO: 561018 - DNA, 15 bp, Homo sapiens
aggaagaatcacttc

SEQ ID NO: 561019 - DNA, 15 bp, Homo sapiens
ggaagaatcacttcc

SEQ ID NO: 561020 - DNA, 15 bp, Homo sapiens
gaagaatcacttcca

SEQ ID NO: 561021 - DNA, 15 bp, Homo sapiens
aagaatcacttccat

SEQ ID NO: 561022 - DNA, 15 bp, Homo sapiens
agaatcacttccatt

SEQ ID NO: 561023 - DNA, 15 bp, Homo sapiens
gaatcacttccattt

SEQ ID NO: 561024 - DNA, 15 bp, Homo sapiens
aatcacttccattta

SEQ ID NO: 561025 - DNA, 15 bp, Homo sapiens
atcacttccatttat

SEQ ID NO: 561026 - DNA, 15 bp, Homo sapiens
tcacttccatttatt

SEQ ID NO: 561027 - DNA, 15 bp, Homo sapiens
cacttccatttattg

SEQ ID NO: 561028 - DNA, 15 bp, Homo sapiens
acttccatttattga

SEQ ID NO: 561029 - DNA, 15 bp, Homo sapiens
cttccatttattgag

SEQ ID NO: 561030 - DNA, 15 bp, Homo sapiens
ttccatttattgagt

SEQ ID NO: 561031 - DNA, 15 bp, Homo sapiens
tccatttattgagtg

SEQ ID NO: 561032 - DNA, 15 bp, Homo sapiens
ccatttattgagtgc

SEQ ID NO: 561033 - DNA, 15 bp, Homo sapiens
catttattgagtgct

SEQ ID NO: 561034 - DNA, 15 bp, Homo sapiens
atttattgagtgctt

SEQ ID NO: 561035 - DNA, 15 bp, Homo sapiens
tttattgagtgcttt

SEQ ID NO: 561036 - DNA, 15 bp, Homo sapiens
ttattgagtgctttc

SEQ ID NO: 561037 - DNA, 15 bp, Homo sapiens
tattgagtgctttct

SEQ ID NO: 561038 - DNA, 15 bp, Homo sapiens
attgagtgctttcta

SEQ ID NO: 561039 - DNA, 15 bp, Homo sapiens
ttgagtgctttctag

SEQ ID NO: 561040 - DNA, 15 bp, Homo sapiens
tgagtgctttctagg

SEQ ID NO: 561041 - DNA, 15 bp, Homo sapiens
gagtgctttctaggt

SEQ ID NO: 561042 - DNA, 15 bp, Homo sapiens
agtgctttctaggtg

SEQ ID NO: 561043 - DNA, 15 bp, Homo sapiens
gtgctttctaggtgc

SEQ ID NO: 561044 - DNA, 15 bp, Homo sapiens
tgctttctaggtgcc

SEQ ID NO: 561045 - DNA, 15 bp, Homo sapiens
gctttctaggtgcca

SEQ ID NO: 561046 - DNA, 15 bp, Homo sapiens
ctttctaggtgccag

SEQ ID NO: 561047 - DNA, 15 bp, Homo sapiens
tttctaggtgccagg

SEQ ID NO: 561048 - DNA, 15 bp, Homo sapiens
ttctaggtgccaggc

SEQ ID NO: 561049 - DNA, 15 bp, Homo sapiens
tctaggtgccaggca

SEQ ID NO: 561050 - DNA, 15 bp, Homo sapiens
ctaggtgccaggcac

SEQ ID NO: 561051 - DNA, 15 bp, Homo sapiens
taggtgccaggcacc

SEQ ID NO: 561052 - DNA, 15 bp, Homo sapiens
aggtgccaggcacca

SEQ ID NO: 561053 - DNA, 15 bp, Homo sapiens
ggtgccaggcaccac

SEQ ID NO: 561054 - DNA, 15 bp, Homo sapiens
gtgccaggcaccacg

SEQ ID NO: 561055 - DNA, 15 bp, Homo sapiens
tgccaggcaccacgt

SEQ ID NO: 561056 - DNA, 15 bp, Homo sapiens
gccaggcaccacgta

SEQ ID NO: 561057 - DNA, 15 bp, Homo sapiens
ccaggcaccacgtaa

SEQ ID NO: 561058 - DNA, 15 bp, Homo sapiens
caggcaccacgtaaa

SEQ ID NO: 561059 - DNA, 15 bp, Homo sapiens
aggcaccacgtaaat

SEQ ID NO: 561060 - DNA, 15 bp, Homo sapiens
ggcaccacgtaaatt

SEQ ID NO: 561061 - DNA, 15 bp, Homo sapiens
gcaccacgtaaattg

SEQ ID NO: 561062 - DNA, 15 bp, Homo sapiens
caccacgtaaattgc

SEQ ID NO: 561063 - DNA, 15 bp, Homo sapiens
accacgtaaattgct

SEQ ID NO: 561064 - DNA, 15 bp, Homo sapiens
ccacgtaaattgctt

SEQ ID NO: 561065 - DNA, 15 bp, Homo sapiens
cacgtaaattgcttt

SEQ ID NO: 561066 - DNA, 15 bp, Homo sapiens
acgtaaattgcttta

SEQ ID NO: 561067 - DNA, 15 bp, Homo sapiens
cgtaaattgctttat

SEQ ID NO: 561068 - DNA, 15 bp, Homo sapiens
gtaaattgctttatc

SEQ ID NO: 561069 - DNA, 15 bp, Homo sapiens
taaattgctttatct

SEQ ID NO: 561070 - DNA, 15 bp, Homo sapiens
aaattgctttatctc

SEQ ID NO: 561071 - DNA, 15 bp, Homo sapiens
aattgctttatctcc

SEQ ID NO: 561072 - DNA, 15 bp, Homo sapiens
attgctttatctcca

SEQ ID NO: 561073 - DNA, 15 bp, Homo sapiens
ttgctttatctccat

SEQ ID NO: 561074 - DNA, 15 bp, Homo sapiens
tgctttatctccatg

SEQ ID NO: 561075 - DNA, 15 bp, Homo sapiens
gctttatctccatgg

SEQ ID NO: 561076 - DNA, 15 bp, Homo sapiens
ctttatctccatggc

SEQ ID NO: 561077 - DNA, 15 bp, Homo sapiens
tttatctccatggca

SEQ ID NO: 561078 - DNA, 15 bp, Homo sapiens
ttatctccatggcat

SEQ ID NO: 561079 - DNA, 15 bp, Homo sapiens
tatctccatggcatt

SEQ ID NO: 561080 - DNA, 15 bp, Homo sapiens
atctccatggcatta

SEQ ID NO: 561081 - DNA, 15 bp, Homo sapiens
tctccatggcattac

SEQ ID NO: 561082 - DNA, 15 bp, Homo sapiens
ctccatggcattact

SEQ ID NO: 561083 - DNA, 15 bp, Homo sapiens
tccatggcattactt

SEQ ID NO: 561084 - DNA, 15 bp, Homo sapiens
ccatggcattactta

SEQ ID NO: 561085 - DNA, 15 bp, Homo sapiens
catggcattacttaa

SEQ ID NO: 561086 - DNA, 15 bp, Homo sapiens
atggcattacttaaa

SEQ ID NO: 561087 - DNA, 15 bp, Homo sapiens
tggcattacttaaaa

SEQ ID NO: 561088 - DNA, 15 bp, Homo sapiens
ggcattacttaaaac

SEQ ID NO: 561089 - DNA, 15 bp, Homo sapiens
gcattacttaaaaca

SEQ ID NO: 561090 - DNA, 15 bp, Homo sapiens
cattacttaaaacac

SEQ ID NO: 561091 - DNA, 15 bp, Homo sapiens
attacttaaaacacc

SEQ ID NO: 561092 - DNA, 15 bp, Homo sapiens
ttacttaaaacacct

SEQ ID NO: 561093 - DNA, 15 bp, Homo sapiens
tacttaaaacacctg

SEQ ID NO: 561094 - DNA, 15 bp, Homo sapiens
acttaaaacacctgt

SEQ ID NO: 561095 - DNA, 15 bp, Homo sapiens
cttaaaacacctgtc

SEQ ID NO: 561096 - DNA, 15 bp, Homo sapiens
ttaaaacacctgtca

SEQ ID NO: 561097 - DNA, 15 bp, Homo sapiens
taaaacacctgtcac

SEQ ID NO: 561098 - DNA, 15 bp, Homo sapiens
aaaacacctgtcaca

SEQ ID NO: 561099 - DNA, 15 bp, Homo sapiens
aaacacctgtcacag

SEQ ID NO: 561100 - DNA, 15 bp, Homo sapiens
aacacctgtcacagg

SEQ ID NO: 561101 - DNA, 15 bp, Homo sapiens
acacctgtcacagga

SEQ ID NO: 561102 - DNA, 15 bp, Homo sapiens
cacctgtcacaggag

SEQ ID NO: 561103 - DNA, 15 bp, Homo sapiens
acctgtcacaggaga

SEQ ID NO: 561104 - DNA, 15 bp, Homo sapiens
cctgtcacaggagac

SEQ ID NO: 561105 - DNA, 15 bp, Homo sapiens
ctgtcacaggagacc

SEQ ID NO: 561106 - DNA, 15 bp, Homo sapiens
tgtcacaggagacca

SEQ ID NO: 561107 - DNA, 15 bp, Homo sapiens
gtcacaggagaccag

SEQ ID NO: 561108 - DNA, 15 bp, Homo sapiens
tcacaggagaccagc

SEQ ID NO: 561109 - DNA, 15 bp, Homo sapiens
cacaggagaccagct

SEQ ID NO: 561110 - DNA, 15 bp, Homo sapiens
acaggagaccagcta

SEQ ID NO: 561111 - DNA, 15 bp, Homo sapiens
caggagaccagctag

SEQ ID NO: 561112 - DNA, 15 bp, Homo sapiens
aggagaccagctagt

SEQ ID NO: 561113 - DNA, 15 bp, Homo sapiens
ggagaccagctagta

SEQ ID NO: 561114 - DNA, 15 bp, Homo sapiens
gagaccagctagtaa

SEQ ID NO: 561115 - DNA, 15 bp, Homo sapiens
agaccagctagtaat

SEQ ID NO: 561116 - DNA, 15 bp, Homo sapiens
gaccagctagtaatg

SEQ ID NO: 561117 - DNA, 15 bp, Homo sapiens
accagctagtaatgt

SEQ ID NO: 561118 - DNA, 15 bp, Homo sapiens
ccagctagtaatgtt

SEQ ID NO: 561119 - DNA, 15 bp, Homo sapiens
cagctagtaatgttt

SEQ ID NO: 561120 - DNA, 15 bp, Homo sapiens
agctagtaatgttta

SEQ ID NO: 561121 - DNA, 15 bp, Homo sapiens
gctagtaatgtttag

SEQ ID NO: 561122 - DNA, 15 bp, Homo sapiens
ctagtaatgtttagc

SEQ ID NO: 561123 - DNA, 15 bp, Homo sapiens
tagtaatgtttagcc

SEQ ID NO: 561124 - DNA, 15 bp, Homo sapiens
agtaatgtttagccc

SEQ ID NO: 561125 - DNA, 15 bp, Homo sapiens
gtaatgtttagccca

SEQ ID NO: 561126 - DNA, 15 bp, Homo sapiens
taatgtttagcccag

SEQ ID NO: 561127 - DNA, 15 bp, Homo sapiens
aatgtttagcccagg

SEQ ID NO: 561128 - DNA, 15 bp, Homo sapiens
atgtttagcccaggt

SEQ ID NO: 561129 - DNA, 15 bp, Homo sapiens
tgtttagcccaggtg

SEQ ID NO: 561130 - DNA, 15 bp, Homo sapiens
gtttagcccaggtgt

SEQ ID NO: 561131 - DNA, 15 bp, Homo sapiens
tttagcccaggtgta

SEQ ID NO: 561132 - DNA, 15 bp, Homo sapiens
ttagcccaggtgtat

SEQ ID NO: 561133 - DNA, 15 bp, Homo sapiens
tagcccaggtgtatc

SEQ ID NO: 561134 - DNA, 15 bp, Homo sapiens
agcccaggtgtatcg

SEQ ID NO: 561135 - DNA, 15 bp, Homo sapiens
gcccaggtgtatcgt

SEQ ID NO: 561136 - DNA, 15 bp, Homo sapiens
cccaggtgtatcgtc

SEQ ID NO: 561137 - DNA, 15 bp, Homo sapiens
ccaggtgtatcgtct

SEQ ID NO: 561138 - DNA, 15 bp, Homo sapiens
caggtgtatcgtctc

SEQ ID NO: 561139 - DNA, 15 bp, Homo sapiens
aggtgtatcgtctcc

SEQ ID NO: 561140 - DNA, 15 bp, Homo sapiens
ggtgtatcgtctccc

SEQ ID NO: 561141 - DNA, 15 bp, Homo sapiens
gtgtatcgtctccct

SEQ ID NO: 561142 - DNA, 15 bp, Homo sapiens
tgtatcgtctccctc

SEQ ID NO: 561143 - DNA, 15 bp, Homo sapiens
gtatcgtctccctcc

SEQ ID NO: 561144 - DNA, 15 bp, Homo sapiens
tatcgtctccctcct

SEQ ID NO: 561145 - DNA, 15 bp, Homo sapiens
atcgtctccctcctc

SEQ ID NO: 561146 - DNA, 15 bp, Homo sapiens
tcgtctccctcctca

SEQ ID NO: 561147 - DNA, 15 bp, Homo sapiens
cgtctccctcctcac

SEQ ID NO: 561148 - DNA, 15 bp, Homo sapiens
gtctccctcctcact

SEQ ID NO: 561149 - DNA, 15 bp, Homo sapiens
tctccctcctcactg

SEQ ID NO: 561150 - DNA, 15 bp, Homo sapiens
ctccctcctcactga

SEQ ID NO: 561151 - DNA, 15 bp, Homo sapiens
tccctcctcactgaa

SEQ ID NO: 561152 - DNA, 15 bp, Homo sapiens
ccctcctcactgaaa

SEQ ID NO: 561153 - DNA, 15 bp, Homo sapiens
cctcctcactgaaag

SEQ ID NO: 561154 - DNA, 15 bp, Homo sapiens
ctcctcactgaaagc

SEQ ID NO: 561155 - DNA, 15 bp, Homo sapiens
tcctcactgaaagca

SEQ ID NO: 561156 - DNA, 15 bp, Homo sapiens
cctcactgaaagcag

SEQ ID NO: 561157 - DNA, 15 bp, Homo sapiens
ctcactgaaagcaga

SEQ ID NO: 561158 - DNA, 15 bp, Homo sapiens
tcactgaaagcagac

SEQ ID NO: 561159 - DNA, 15 bp, Homo sapiens
cactgaaagcagaca

SEQ ID NO: 561160 - DNA, 15 bp, Homo sapiens
actgaaagcagacaa

SEQ ID NO: 561161 - DNA, 15 bp, Homo sapiens
ctgaaagcagacaat

SEQ ID NO: 561162 - DNA, 15 bp, Homo sapiens
tgaaagcagacaatg

SEQ ID NO: 561163 - DNA, 15 bp, Homo sapiens
gaaagcagacaatga

SEQ ID NO: 561164 - DNA, 15 bp, Homo sapiens
aaagcagacaatgaa

SEQ ID NO: 561165 - DNA, 15 bp, Homo sapiens
aagcagacaatgaaa

SEQ ID NO: 561166 - DNA, 15 bp, Homo sapiens
agcagacaatgaaac

SEQ ID NO: 561167 - DNA, 15 bp, Homo sapiens
gcagacaatgaaact

SEQ ID NO: 561168 - DNA, 15 bp, Homo sapiens
cagacaatgaaactg

SEQ ID NO: 561169 - DNA, 15 bp, Homo sapiens
agacaatgaaactgt

SEQ ID NO: 561170 - DNA, 15 bp, Homo sapiens
gacaatgaaactgta

SEQ ID NO: 561171 - DNA, 15 bp, Homo sapiens
acaatgaaactgtat

SEQ ID NO: 561172 - DNA, 15 bp, Homo sapiens
caatgaaactgtatt

SEQ ID NO: 561173 - DNA, 15 bp, Homo sapiens
aatgaaactgtatta

SEQ ID NO: 561174 - DNA, 15 bp, Homo sapiens
atgaaactgtattag

SEQ ID NO: 561175 - DNA, 15 bp, Homo sapiens
tgaaactgtattaga

SEQ ID NO: 561176 - DNA, 15 bp, Homo sapiens
gaaactgtattagaa

SEQ ID NO: 561177 - DNA, 15 bp, Homo sapiens
aaactgtattagaac

SEQ ID NO: 561178 - DNA, 15 bp, Homo sapiens
aactgtattagaact

SEQ ID NO: 561179 - DNA, 15 bp, Homo sapiens
actgtattagaactg

SEQ ID NO: 561180 - DNA, 15 bp, Homo sapiens
ctgtattagaactga

SEQ ID NO: 561181 - DNA, 15 bp, Homo sapiens
tgtattagaactgac

SEQ ID NO: 561182 - DNA, 15 bp, Homo sapiens
gtattagaactgaca

SEQ ID NO: 561183 - DNA, 15 bp, Homo sapiens
tattagaactgacag

SEQ ID NO: 561184 - DNA, 15 bp, Homo sapiens
attagaactgacagg

SEQ ID NO: 561185 - DNA, 15 bp, Homo sapiens
ttagaactgacaggt

SEQ ID NO: 561186 - DNA, 15 bp, Homo sapiens
tagaactgacaggtg

SEQ ID NO: 561187 - DNA, 15 bp, Homo sapiens
agaactgacaggtgg

SEQ ID NO: 561188 - DNA, 15 bp, Homo sapiens
gaactgacaggtggg

SEQ ID NO: 561189 - DNA, 15 bp, Homo sapiens
aactgacaggtggga

SEQ ID NO: 561190 - DNA, 15 bp, Homo sapiens
actgacaggtgggaa

SEQ ID NO: 561191 - DNA, 15 bp, Homo sapiens
ctgacaggtgggaat

SEQ ID NO: 561192 - DNA, 15 bp, Homo sapiens
tgacaggtgggaatc

SEQ ID NO: 561193 - DNA, 15 bp, Homo sapiens
gacaggtgggaatct

SEQ ID NO: 561194 - DNA, 15 bp, Homo sapiens
acaggtgggaatctc

SEQ ID NO: 561195 - DNA, 15 bp, Homo sapiens
caggtgggaatctct

SEQ ID NO: 561196 - DNA, 15 bp, Homo sapiens
aggtgggaatctctt

SEQ ID NO: 561197 - DNA, 15 bp, Homo sapiens
ggtgggaatctcttt

SEQ ID NO: 561198 - DNA, 15 bp, Homo sapiens
gtgggaatctctttg

SEQ ID NO: 561199 - DNA, 15 bp, Homo sapiens
tgggaatctctttgt

SEQ ID NO: 561200 - DNA, 15 bp, Homo sapiens
gggaatctctttgta

SEQ ID NO: 561201 - DNA, 15 bp, Homo sapiens
ggaatctctttgtac

SEQ ID NO: 561202 - DNA, 15 bp, Homo sapiens
gaatctctttgtaca

SEQ ID NO: 561203 - DNA, 15 bp, Homo sapiens
aatctctttgtacag

SEQ ID NO: 561204 - DNA, 15 bp, Homo sapiens
atctctttgtacagc

SEQ ID NO: 561205 - DNA, 15 bp, Homo sapiens
tctctttgtacagcc

SEQ ID NO: 561206 - DNA, 15 bp, Homo sapiens
ctctttgtacagccc

SEQ ID NO: 561207 - DNA, 15 bp, Homo sapiens
tctttgtacagccca

SEQ ID NO: 561208 - DNA, 15 bp, Homo sapiens
ctttgtacagcccaa

SEQ ID NO: 561209 - DNA, 15 bp, Homo sapiens
tttgtacagcccaaa

SEQ ID NO: 561210 - DNA, 15 bp, Homo sapiens
ttgtacagcccaaag

SEQ ID NO: 561211 - DNA, 15 bp, Homo sapiens
tgtacagcccaaagc

SEQ ID NO: 561212 - DNA, 15 bp, Homo sapiens
gtacagcccaaagca

SEQ ID NO: 561213 - DNA, 15 bp, Homo sapiens
tacagcccaaagcaa

SEQ ID NO: 561214 - DNA, 15 bp, Homo sapiens
acagcccaaagcaaa

SEQ ID NO: 561215 - DNA, 15 bp, Homo sapiens
cagcccaaagcaaag

SEQ ID NO: 561216 - DNA, 15 bp, Homo sapiens
agcccaaagcaaagc

SEQ ID NO: 561217 - DNA, 15 bp, Homo sapiens
gcccaaagcaaagct

SEQ ID NO: 561218 - DNA, 15 bp, Homo sapiens
cccaaagcaaagctg

SEQ ID NO: 561219 - DNA, 15 bp, Homo sapiens
ccaaagcaaagctga

SEQ ID NO: 561220 - DNA, 15 bp, Homo sapiens
caaagcaaagctgag

SEQ ID NO: 561221 - DNA, 15 bp, Homo sapiens
aaagcaaagctgagc

SEQ ID NO: 561222 - DNA, 15 bp, Homo sapiens
aagcaaagctgagcc

SEQ ID NO: 561223 - DNA, 15 bp, Homo sapiens
agcaaagctgagcct

SEQ ID NO: 561224 - DNA, 15 bp, Homo sapiens
gcaaagctgagcctc

SEQ ID NO: 561225 - DNA, 15 bp, Homo sapiens
caaagctgagcctca

SEQ ID NO: 561226 - DNA, 15 bp, Homo sapiens
aaagctgagcctcac

SEQ ID NO: 561227 - DNA, 15 bp, Homo sapiens
aagctgagcctcact

SEQ ID NO: 561228 - DNA, 15 bp, Homo sapiens
agctgagcctcactg

SEQ ID NO: 561229 - DNA, 15 bp, Homo sapiens
gctgagcctcactgg

SEQ ID NO: 561230 - DNA, 15 bp, Homo sapiens
ctgagcctcactggg

SEQ ID NO: 561231 - DNA, 15 bp, Homo sapiens
tgagcctcactgggt

SEQ ID NO: 561232 - DNA, 15 bp, Homo sapiens
gagcctcactgggtc

SEQ ID NO: 561233 - DNA, 15 bp, Homo sapiens
agcctcactgggtct

SEQ ID NO: 561234 - DNA, 15 bp, Homo sapiens
gcctcactgggtctt

SEQ ID NO: 561235 - DNA, 15 bp, Homo sapiens
cctcactgggtcttc

SEQ ID NO: 561236 - DNA, 15 bp, Homo sapiens
ctcactgggtcttca

SEQ ID NO: 561237 - DNA, 15 bp, Homo sapiens
tcactgggtcttcac

SEQ ID NO: 561238 - DNA, 15 bp, Homo sapiens
cactgggtcttcact

SEQ ID NO: 561239 - DNA, 15 bp, Homo sapiens
actgggtcttcactc

SEQ ID NO: 561240 - DNA, 15 bp, Homo sapiens
ctgggtcttcactca

SEQ ID NO: 561241 - DNA, 15 bp, Homo sapiens
tgggtcttcactcaa

SEQ ID NO: 561242 - DNA, 15 bp, Homo sapiens
gggtcttcactcaaa

SEQ ID NO: 561243 - DNA, 15 bp, Homo sapiens
ggtcttcactcaaat

SEQ ID NO: 561244 - DNA, 15 bp, Homo sapiens
gtcttcactcaaatg

SEQ ID NO: 561245 - DNA, 15 bp, Homo sapiens
tcttcactcaaatgg

SEQ ID NO: 561246 - DNA, 15 bp, Homo sapiens
cttcactcaaatggt

SEQ ID NO: 561247 - DNA, 15 bp, Homo sapiens
ttcactcaaatggtt

SEQ ID NO: 561248 - DNA, 15 bp, Homo sapiens
tcactcaaatggttt

SEQ ID NO: 561249 - DNA, 15 bp, Homo sapiens
cactcaaatggtttc

SEQ ID NO: 561250 - DNA, 15 bp, Homo sapiens
actcaaatggtttca

SEQ ID NO: 561251 - DNA, 15 bp, Homo sapiens
ctcaaatggtttcaa

SEQ ID NO: 561252 - DNA, 15 bp, Homo sapiens
tcaaatggtttcaaa

SEQ ID NO: 561253 - DNA, 15 bp, Homo sapiens
caaatggtttcaaac

SEQ ID NO: 561254 - DNA, 15 bp, Homo sapiens
aaatggtttcaaact

SEQ ID NO: 561255 - DNA, 15 bp, Homo sapiens
aatggtttcaaactc

SEQ ID NO: 561256 - DNA, 15 bp, Homo sapiens
atggtttcaaactcc

SEQ ID NO: 561257 - DNA, 15 bp, Homo sapiens
tggtttcaaactccc

SEQ ID NO: 561258 - DNA, 15 bp, Homo sapiens
ggtttcaaactcccc

SEQ ID NO: 561259 - DNA, 15 bp, Homo sapiens
gtttcaaactcccct

SEQ ID NO: 561260 - DNA, 15 bp, Homo sapiens
tttcaaactcccctg

SEQ ID NO: 561261 - DNA, 15 bp, Homo sapiens
ttcaaactcccctgc

SEQ ID NO: 561262 - DNA, 15 bp, Homo sapiens
tcaaactcccctgct

SEQ ID NO: 561263 - DNA, 15 bp, Homo sapiens
caaactcccctgctt

SEQ ID NO: 561264 - DNA, 15 bp, Homo sapiens
aaactcccctgcttc

SEQ ID NO: 561265 - DNA, 15 bp, Homo sapiens
aactcccctgcttca

SEQ ID NO: 561266 - DNA, 15 bp, Homo sapiens
actcccctgcttcag

SEQ ID NO: 561267 - DNA, 15 bp, Homo sapiens
ctcccctgcttcagt

SEQ ID NO: 561268 - DNA, 15 bp, Homo sapiens
tcccctgcttcagtc

SEQ ID NO: 561269 - DNA, 15 bp, Homo sapiens
cccctgcttcagtca

SEQ ID NO: 561270 - DNA, 15 bp, Homo sapiens
ccctgcttcagtcaa

SEQ ID NO: 561271 - DNA, 15 bp, Homo sapiens
cctgcttcagtcaaa

SEQ ID NO: 561272 - DNA, 15 bp, Homo sapiens
ctgcttcagtcaaac

SEQ ID NO: 561273 - DNA, 15 bp, Homo sapiens
tgcttcagtcaaaca

SEQ ID NO: 561274 - DNA, 15 bp, Homo sapiens
gcttcagtcaaacag

SEQ ID NO: 561275 - DNA, 15 bp, Homo sapiens
cttcagtcaaacagc

SEQ ID NO: 561276 - DNA, 15 bp, Homo sapiens
ttcagtcaaacagct

SEQ ID NO: 561277 - DNA, 15 bp, Homo sapiens
tcagtcaaacagctc

SEQ ID NO: 561278 - DNA, 15 bp, Homo sapiens
cagtcaaacagctcc

SEQ ID NO: 561279 - DNA, 15 bp, Homo sapiens
agtcaaacagctccc

SEQ ID NO: 561280 - DNA, 15 bp, Homo sapiens
gtcaaacagctccca

SEQ ID NO: 561281 - DNA, 15 bp, Homo sapiens
tcaaacagctcccag

SEQ ID NO: 561282 - DNA, 15 bp, Homo sapiens
caaacagctcccagc

SEQ ID NO: 561283 - DNA, 15 bp, Homo sapiens
aaacagctcccagcc

SEQ ID NO: 561284 - DNA, 15 bp, Homo sapiens
aacagctcccagcct

SEQ ID NO: 561285 - DNA, 15 bp, Homo sapiens
acagctcccagcctg

SEQ ID NO: 561286 - DNA, 15 bp, Homo sapiens
cagctcccagcctgg

SEQ ID NO: 561287 - DNA, 15 bp, Homo sapiens
agctcccagcctggg

SEQ ID NO: 561288 - DNA, 15 bp, Homo sapiens
gctcccagcctggga

SEQ ID NO: 561289 - DNA, 15 bp, Homo sapiens
ctcccagcctgggag

SEQ ID NO: 561290 - DNA, 15 bp, Homo sapiens
tcccagcctgggagg

SEQ ID NO: 561291 - DNA, 15 bp, Homo sapiens
cccagcctgggaggg

SEQ ID NO: 561292 - DNA, 15 bp, Homo sapiens
ccagcctgggaggga

SEQ ID NO: 561293 - DNA, 15 bp, Homo sapiens
cagcctgggagggaa

SEQ ID NO: 561294 - DNA, 15 bp, Homo sapiens
agcctgggagggaaa

SEQ ID NO: 561295 - DNA, 15 bp, Homo sapiens
gcctgggagggaaag

SEQ ID NO: 561296 - DNA, 15 bp, Homo sapiens
cctgggagggaaagc

SEQ ID NO: 561297 - DNA, 15 bp, Homo sapiens
ctgggagggaaagct

SEQ ID NO: 561298 - DNA, 15 bp, Homo sapiens
tgggagggaaagctt

SEQ ID NO: 561299 - DNA, 15 bp, Homo sapiens
gggagggaaagcttg

SEQ ID NO: 561300 - DNA, 15 bp, Homo sapiens
ggagggaaagcttgc

SEQ ID NO: 561301 - DNA, 15 bp, Homo sapiens
gagggaaagcttgct

SEQ ID NO: 561302 - DNA, 15 bp, Homo sapiens
agggaaagcttgctg

SEQ ID NO: 561303 - DNA, 15 bp, Homo sapiens
gggaaagcttgctgg

SEQ ID NO: 561304 - DNA, 15 bp, Homo sapiens
ggaaagcttgctgga

SEQ ID NO: 561305 - DNA, 15 bp, Homo sapiens
gaaagcttgctggac

SEQ ID NO: 561306 - DNA, 15 bp, Homo sapiens
aaagcttgctggact

SEQ ID NO: 561307 - DNA, 15 bp, Homo sapiens
aagcttgctggactg

SEQ ID NO: 561308 - DNA, 15 bp, Homo sapiens
agcttgctggactga

SEQ ID NO: 561309 - DNA, 15 bp, Homo sapiens
gcttgctggactgaa

SEQ ID NO: 561310 - DNA, 15 bp, Homo sapiens
cttgctggactgaag

SEQ ID NO: 561311 - DNA, 15 bp, Homo sapiens
ttgctggactgaagg

SEQ ID NO: 561312 - DNA, 15 bp, Homo sapiens
tgctggactgaaggg

SEQ ID NO: 561313 - DNA, 15 bp, Homo sapiens
gctggactgaagggt

SEQ ID NO: 561314 - DNA, 15 bp, Homo sapiens
ctggactgaagggtt

SEQ ID NO: 561315 - DNA, 15 bp, Homo sapiens
tggactgaagggttt

SEQ ID NO: 561316 - DNA, 15 bp, Homo sapiens
ggactgaagggtttg

SEQ ID NO: 561317 - DNA, 15 bp, Homo sapiens
gactgaagggtttgg

SEQ ID NO: 561318 - DNA, 15 bp, Homo sapiens
actgaagggtttggg

SEQ ID NO: 561319 - DNA, 15 bp, Homo sapiens
ctgaagggtttgggg

SEQ ID NO: 561320 - DNA, 15 bp, Homo sapiens
tgaagggtttgggga

SEQ ID NO: 561321 - DNA, 15 bp, Homo sapiens
gaagggtttggggat

SEQ ID NO: 561322 - DNA, 15 bp, Homo sapiens
aagggtttggggatc

SEQ ID NO: 561323 - DNA, 15 bp, Homo sapiens
agggtttggggatct

SEQ ID NO: 561324 - DNA, 15 bp, Homo sapiens
gggtttggggatctg

SEQ ID NO: 561325 - DNA, 15 bp, Homo sapiens
ggtttggggatctga

SEQ ID NO: 561326 - DNA, 15 bp, Homo sapiens
gtttggggatctgag

SEQ ID NO: 561327 - DNA, 15 bp, Homo sapiens
tttggggatctgaga

SEQ ID NO: 561328 - DNA, 15 bp, Homo sapiens
ttggggatctgagat

SEQ ID NO: 561329 - DNA, 15 bp, Homo sapiens
tggggatctgagatt

SEQ ID NO: 561330 - DNA, 15 bp, Homo sapiens
ggggatctgagattg

SEQ ID NO: 561331 - DNA, 15 bp, Homo sapiens
gggatctgagattgt

SEQ ID NO: 561332 - DNA, 15 bp, Homo sapiens
ggatctgagattgtc

SEQ ID NO: 561333 - DNA, 15 bp, Homo sapiens
gatctgagattgtct

SEQ ID NO: 561334 - DNA, 15 bp, Homo sapiens
atctgagattgtctt

SEQ ID NO: 561335 - DNA, 15 bp, Homo sapiens
tctgagattgtcttt

SEQ ID NO: 561336 - DNA, 15 bp, Homo sapiens
ctgagattgtctttg

SEQ ID NO: 561337 - DNA, 15 bp, Homo sapiens
tgagattgtctttga

SEQ ID NO: 561338 - DNA, 15 bp, Homo sapiens
gagattgtctttgaa

SEQ ID NO: 561339 - DNA, 15 bp, Homo sapiens
agattgtctttgaac

SEQ ID NO: 561340 - DNA, 15 bp, Homo sapiens
gattgtctttgaacc

SEQ ID NO: 561341 - DNA, 15 bp, Homo sapiens
attgtctttgaacca

SEQ ID NO: 561342 - DNA, 15 bp, Homo sapiens
ttgtctttgaaccaa

SEQ ID NO: 561343 - DNA, 15 bp, Homo sapiens
tgtctttgaaccaac

SEQ ID NO: 561344 - DNA, 15 bp, Homo sapiens
gtctttgaaccaacc

SEQ ID NO: 561345 - DNA, 15 bp, Homo sapiens
tctttgaaccaacct

SEQ ID NO: 561346 - DNA, 15 bp, Homo sapiens
ctttgaaccaacctt

SEQ ID NO: 561347 - DNA, 15 bp, Homo sapiens
tttgaaccaaccttt

SEQ ID NO: 561348 - DNA, 15 bp, Homo sapiens
ttgaaccaacctttg

SEQ ID NO: 561349 - DNA, 15 bp, Homo sapiens
tgaaccaacctttgg

SEQ ID NO: 561350 - DNA, 15 bp, Homo sapiens
gaaccaacctttggc

SEQ ID NO: 561351 - DNA, 15 bp, Homo sapiens
aaccaacctttggca

SEQ ID NO: 561352 - DNA, 15 bp, Homo sapiens
accaacctttggcac

SEQ ID NO: 561353 - DNA, 15 bp, Homo sapiens
ccaacctttggcacc

SEQ ID NO: 561354 - DNA, 15 bp, Homo sapiens
caacctttggcacca

SEQ ID NO: 561355 - DNA, 15 bp, Homo sapiens
aacctttggcaccat

SEQ ID NO: 561356 - DNA, 15 bp, Homo sapiens
acctttggcaccatc

SEQ ID NO: 561357 - DNA, 15 bp, Homo sapiens
cctttggcaccatct

SEQ ID NO: 561358 - DNA, 15 bp, Homo sapiens
ctttggcaccatctc

SEQ ID NO: 561359 - DNA, 15 bp, Homo sapiens
tttggcaccatctca

SEQ ID NO: 561360 - DNA, 15 bp, Homo sapiens
ttggcaccatctcat

SEQ ID NO: 561361 - DNA, 15 bp, Homo sapiens
tggcaccatctcatt

SEQ ID NO: 561362 - DNA, 15 bp, Homo sapiens
ggcaccatctcattt

SEQ ID NO: 561363 - DNA, 15 bp, Homo sapiens
gcaccatctcatttt

SEQ ID NO: 561364 - DNA, 15 bp, Homo sapiens
caccatctcattttg

SEQ ID NO: 561365 - DNA, 15 bp, Homo sapiens
accatctcattttgg

SEQ ID NO: 561366 - DNA, 15 bp, Homo sapiens
ccatctcattttggt

SEQ ID NO: 561367 - DNA, 15 bp, Homo sapiens
catctcattttggtc

SEQ ID NO: 561368 - DNA, 15 bp, Homo sapiens
atctcattttggtcg

SEQ ID NO: 561369 - DNA, 15 bp, Homo sapiens
tctcattttggtcgt

SEQ ID NO: 561370 - DNA, 15 bp, Homo sapiens
ctcattttggtcgtc

SEQ ID NO: 561371 - DNA, 15 bp, Homo sapiens
tcattttggtcgtca

SEQ ID NO: 561372 - DNA, 15 bp, Homo sapiens
cattttggtcgtcat

SEQ ID NO: 561373 - DNA, 15 bp, Homo sapiens
attttggtcgtcatt

SEQ ID NO: 561374 - DNA, 15 bp, Homo sapiens
ttttggtcgtcattt

SEQ ID NO: 561375 - DNA, 15 bp, Homo sapiens
tttggtcgtcatttt

SEQ ID NO: 561376 - DNA, 15 bp, Homo sapiens
ttggtcgtcattttg

SEQ ID NO: 561377 - DNA, 15 bp, Homo sapiens
tggtcgtcattttgg

SEQ ID NO: 561378 - DNA, 15 bp, Homo sapiens
ggtcgtcattttggg

SEQ ID NO: 561379 - DNA, 15 bp, Homo sapiens
gtcgtcattttgggg

SEQ ID NO: 561380 - DNA, 15 bp, Homo sapiens
tcgtcattttgggga

SEQ ID NO: 561381 - DNA, 15 bp, Homo sapiens
cgtcattttggggaa

SEQ ID NO: 561382 - DNA, 15 bp, Homo sapiens
gtcattttggggaag

SEQ ID NO: 561383 - DNA, 15 bp, Homo sapiens
tcattttggggaagg

SEQ ID NO: 561384 - DNA, 15 bp, Homo sapiens
cattttggggaagga

SEQ ID NO: 561385 - DNA, 15 bp, Homo sapiens
attttggggaaggaa

SEQ ID NO: 561386 - DNA, 15 bp, Homo sapiens
ttttggggaaggaat

SEQ ID NO: 561387 - DNA, 15 bp, Homo sapiens
tttggggaaggaatc

SEQ ID NO: 561388 - DNA, 15 bp, Homo sapiens
ttggggaaggaatct

SEQ ID NO: 561389 - DNA, 15 bp, Homo sapiens
tggggaaggaatctt

SEQ ID NO: 561390 - DNA, 15 bp, Homo sapiens
ggggaaggaatcttg

SEQ ID NO: 561391 - DNA, 15 bp, Homo sapiens
gggaaggaatcttgg

SEQ ID NO: 561392 - DNA, 15 bp, Homo sapiens
ggaaggaatcttgga

SEQ ID NO: 561393 - DNA, 15 bp, Homo sapiens
gaaggaatcttggaa

SEQ ID NO: 561394 - DNA, 15 bp, Homo sapiens
aaggaatcttggaaa

SEQ ID NO: 561395 - DNA, 15 bp, Homo sapiens
aggaatcttggaaat

SEQ ID NO: 561396 - DNA, 15 bp, Homo sapiens
ggaatcttggaaatg

SEQ ID NO: 561397 - DNA, 15 bp, Homo sapiens
gaatcttggaaatgg

SEQ ID NO: 561398 - DNA, 15 bp, Homo sapiens
aatcttggaaatggg

SEQ ID NO: 561399 - DNA, 15 bp, Homo sapiens
atcttggaaatgggc

SEQ ID NO: 561400 - DNA, 15 bp, Homo sapiens
tcttggaaatgggca

SEQ ID NO: 561401 - DNA, 15 bp, Homo sapiens
cttggaaatgggcag

SEQ ID NO: 561402 - DNA, 15 bp, Homo sapiens
ttggaaatgggcaga

SEQ ID NO: 561403 - DNA, 15 bp, Homo sapiens
tggaaatgggcagaa

SEQ ID NO: 561404 - DNA, 15 bp, Homo sapiens
ggaaatgggcagaag

SEQ ID NO: 561405 - DNA, 15 bp, Homo sapiens
gaaatgggcagaagt

SEQ ID NO: 561406 - DNA, 15 bp, Homo sapiens
aaatgggcagaagtg

SEQ ID NO: 561407 - DNA, 15 bp, Homo sapiens
aatgggcagaagtgg

SEQ ID NO: 561408 - DNA, 15 bp, Homo sapiens
atgggcagaagtggc

SEQ ID NO: 561409 - DNA, 15 bp, Homo sapiens
tgggcagaagtggcc

SEQ ID NO: 561410 - DNA, 15 bp, Homo sapiens
gggcagaagtggcca

SEQ ID NO: 561411 - DNA, 15 bp, Homo sapiens
ggcagaagtggccag

SEQ ID NO: 561412 - DNA, 15 bp, Homo sapiens
gcagaagtggccaga

SEQ ID NO: 561413 - DNA, 15 bp, Homo sapiens
cagaagtggccagac

SEQ ID NO: 561414 - DNA, 15 bp, Homo sapiens
agaagtggccagact

SEQ ID NO: 561415 - DNA, 15 bp, Homo sapiens
gaagtggccagactg

SEQ ID NO: 561416 - DNA, 15 bp, Homo sapiens
aagtggccagactgc

SEQ ID NO: 561417 - DNA, 15 bp, Homo sapiens
agtggccagactgct

SEQ ID NO: 561418 - DNA, 15 bp, Homo sapiens
gtggccagactgcta

SEQ ID NO: 561419 - DNA, 15 bp, Homo sapiens
tggccagactgctat

SEQ ID NO: 561420 - DNA, 15 bp, Homo sapiens
ggccagactgctatg

SEQ ID NO: 561421 - DNA, 15 bp, Homo sapiens
gccagactgctatgt

SEQ ID NO: 561422 - DNA, 15 bp, Homo sapiens
ccagactgctatgtc

SEQ ID NO: 561423 - DNA, 15 bp, Homo sapiens
cagactgctatgtcg

SEQ ID NO: 561424 - DNA, 15 bp, Homo sapiens
agactgctatgtcga

SEQ ID NO: 561425 - DNA, 15 bp, Homo sapiens
gactgctatgtcgac

SEQ ID NO: 561426 - DNA, 15 bp, Homo sapiens
actgctatgtcgacc

SEQ ID NO: 561427 - DNA, 15 bp, Homo sapiens
ctgctatgtcgaccc

SEQ ID NO: 561428 - DNA, 15 bp, Homo sapiens
tgctatgtcgaccct

SEQ ID NO: 561429 - DNA, 15 bp, Homo sapiens
gctatgtcgaccctc

SEQ ID NO: 561430 - DNA, 15 bp, Homo sapiens
ctatgtcgaccctcc

SEQ ID NO: 561431 - DNA, 15 bp, Homo sapiens
tatgtcgaccctcca

SEQ ID NO: 561432 - DNA, 15 bp, Homo sapiens
atgtcgaccctccaa

SEQ ID NO: 561433 - DNA, 15 bp, Homo sapiens
tgtcgaccctccaaa

SEQ ID NO: 561434 - DNA, 15 bp, Homo sapiens
gtcgaccctccaaac

SEQ ID NO: 561435 - DNA, 15 bp, Homo sapiens
tcgaccctccaaact

SEQ ID NO: 561436 - DNA, 15 bp, Homo sapiens
cgaccctccaaactt

SEQ ID NO: 561437 - DNA, 15 bp, Homo sapiens
gaccctccaaacttt

SEQ ID NO: 561438 - DNA, 15 bp, Homo sapiens
accctccaaactttc

SEQ ID NO: 561439 - DNA, 15 bp, Homo sapiens
ccctccaaactttct

SEQ ID NO: 561440 - DNA, 15 bp, Homo sapiens
cctccaaactttctt

SEQ ID NO: 561441 - DNA, 15 bp, Homo sapiens
ctccaaactttcttt

SEQ ID NO: 561442 - DNA, 15 bp, Homo sapiens
tccaaactttctttg

SEQ ID NO: 561443 - DNA, 15 bp, Homo sapiens
ccaaactttctttga

SEQ ID NO: 561444 - DNA, 15 bp, Homo sapiens
caaactttctttgat

SEQ ID NO: 561445 - DNA, 15 bp, Homo sapiens
aaactttctttgatc

SEQ ID NO: 561446 - DNA, 15 bp, Homo sapiens
aactttctttgatca

SEQ ID NO: 561447 - DNA, 15 bp, Homo sapiens
actttctttgatcag

SEQ ID NO: 561448 - DNA, 15 bp, Homo sapiens
ctttctttgatcagt

SEQ ID NO: 561449 - DNA, 15 bp, Homo sapiens
tttctttgatcagtg

SEQ ID NO: 561450 - DNA, 15 bp, Homo sapiens
ttctttgatcagtgt

SEQ ID NO: 561451 - DNA, 15 bp, Homo sapiens
tctttgatcagtgtt

SEQ ID NO: 561452 - DNA, 15 bp, Homo sapiens
ctttgatcagtgttg

SEQ ID NO: 561453 - DNA, 15 bp, Homo sapiens
tttgatcagtgttga

SEQ ID NO: 561454 - DNA, 15 bp, Homo sapiens
ttgatcagtgttgaa

SEQ ID NO: 561455 - DNA, 15 bp, Homo sapiens
tgatcagtgttgaaa

SEQ ID NO: 561456 - DNA, 15 bp, Homo sapiens
gatcagtgttgaaat

SEQ ID NO: 561457 - DNA, 15 bp, Homo sapiens
atcagtgttgaaatg

SEQ ID NO: 561458 - DNA, 15 bp, Homo sapiens
tcagtgttgaaatgc

SEQ ID NO: 561459 - DNA, 15 bp, Homo sapiens
cagtgttgaaatgct

SEQ ID NO: 561460 - DNA, 15 bp, Homo sapiens
agtgttgaaatgctt

SEQ ID NO: 561461 - DNA, 15 bp, Homo sapiens
gtgttgaaatgcttt

SEQ ID NO: 561462 - DNA, 15 bp, Homo sapiens
tgttgaaatgctttc

SEQ ID NO: 561463 - DNA, 15 bp, Homo sapiens
gttgaaatgctttca

SEQ ID NO: 561464 - DNA, 15 bp, Homo sapiens
ttgaaatgctttcaa

SEQ ID NO: 561465 - DNA, 15 bp, Homo sapiens
tgaaatgctttcaaa

SEQ ID NO: 561466 - DNA, 15 bp, Homo sapiens
gaaatgctttcaaaa

SEQ ID NO: 561467 - DNA, 15 bp, Homo sapiens
aaatgctttcaaaag

SEQ ID NO: 561468 - DNA, 15 bp, Homo sapiens
aatgctttcaaaagg

SEQ ID NO: 561469 - DNA, 15 bp, Homo sapiens
atgctttcaaaagga

SEQ ID NO: 561470 - DNA, 15 bp, Homo sapiens
tgctttcaaaaggaa

SEQ ID NO: 561471 - DNA, 15 bp, Homo sapiens
gctttcaaaaggaat

SEQ ID NO: 561472 - DNA, 15 bp, Homo sapiens
ctttcaaaaggaata

SEQ ID NO: 561473 - DNA, 15 bp, Homo sapiens
tttcaaaaggaatag

SEQ ID NO: 561474 - DNA, 15 bp, Homo sapiens
ttcaaaaggaatagc

SEQ ID NO: 561475 - DNA, 15 bp, Homo sapiens
tcaaaaggaatagca

SEQ ID NO: 561476 - DNA, 15 bp, Homo sapiens
caaaaggaatagcaa

SEQ ID NO: 561477 - DNA, 15 bp, Homo sapiens
aaaaggaatagcaaa

SEQ ID NO: 561478 - DNA, 15 bp, Homo sapiens
aaaggaatagcaaaa

SEQ ID NO: 561479 - DNA, 15 bp, Homo sapiens
aaggaatagcaaaac

SEQ ID NO: 561480 - DNA, 15 bp, Homo sapiens
aggaatagcaaaaca

SEQ ID NO: 561481 - DNA, 15 bp, Homo sapiens
ggaatagcaaaacat

SEQ ID NO: 561482 - DNA, 15 bp, Homo sapiens
gaatagcaaaacatc

SEQ ID NO: 561483 - DNA, 15 bp, Homo sapiens
aatagcaaaacatca

SEQ ID NO: 561484 - DNA, 15 bp, Homo sapiens
atagcaaaacatcag

SEQ ID NO: 561485 - DNA, 15 bp, Homo sapiens
tagcaaaacatcagg

SEQ ID NO: 561486 - DNA, 15 bp, Homo sapiens
agcaaaacatcaggc

SEQ ID NO: 561487 - DNA, 15 bp, Homo sapiens
gcaaaacatcaggct

SEQ ID NO: 561488 - DNA, 15 bp, Homo sapiens
caaaacatcaggctt

SEQ ID NO: 561489 - DNA, 15 bp, Homo sapiens
aaaacatcaggcttg

SEQ ID NO: 561490 - DNA, 15 bp, Homo sapiens
aaacatcaggcttgg

SEQ ID NO: 561491 - DNA, 15 bp, Homo sapiens
aacatcaggcttggc

SEQ ID NO: 561492 - DNA, 15 bp, Homo sapiens
acatcaggcttggct

SEQ ID NO: 561493 - DNA, 15 bp, Homo sapiens
catcaggcttggctg

SEQ ID NO: 561494 - DNA, 15 bp, Homo sapiens
atcaggcttggctga

SEQ ID NO: 561495 - DNA, 15 bp, Homo sapiens
tcaggcttggctgag

SEQ ID NO: 561496 - DNA, 15 bp, Homo sapiens
caggcttggctgagc

SEQ ID NO: 561497 - DNA, 15 bp, Homo sapiens
aggcttggctgagcc

SEQ ID NO: 561498 - DNA, 15 bp, Homo sapiens
ggcttggctgagcca

SEQ ID NO: 561499 - DNA, 15 bp, Homo sapiens
gcttggctgagccaa

SEQ ID NO: 561500 - DNA, 15 bp, Homo sapiens
cttggctgagccaag

SEQ ID NO: 561501 - DNA, 15 bp, Homo sapiens
ttggctgagccaagt

SEQ ID NO: 561502 - DNA, 15 bp, Homo sapiens
tggctgagccaagtt

SEQ ID NO: 561503 - DNA, 15 bp, Homo sapiens
ggctgagccaagtta

SEQ ID NO: 561504 - DNA, 15 bp, Homo sapiens
gctgagccaagttac

SEQ ID NO: 561505 - DNA, 15 bp, Homo sapiens
ctgagccaagttacc

SEQ ID NO: 561506 - DNA, 15 bp, Homo sapiens
tgagccaagttacct

SEQ ID NO: 561507 - DNA, 15 bp, Homo sapiens
gagccaagttaccta

SEQ ID NO: 561508 - DNA, 15 bp, Homo sapiens
agccaagttacctat

SEQ ID NO: 561509 - DNA, 15 bp, Homo sapiens
gccaagttacctata

SEQ ID NO: 561510 - DNA, 15 bp, Homo sapiens
ccaagttacctatag

SEQ ID NO: 561511 - DNA, 15 bp, Homo sapiens
caagttacctatagc

SEQ ID NO: 561512 - DNA, 15 bp, Homo sapiens
aagttacctatagcg

SEQ ID NO: 561513 - DNA, 15 bp, Homo sapiens
agttacctatagcgc

SEQ ID NO: 561514 - DNA, 15 bp, Homo sapiens
gttacctatagcgct

SEQ ID NO: 561515 - DNA, 15 bp, Homo sapiens
ttacctatagcgctg

SEQ ID NO: 561516 - DNA, 15 bp, Homo sapiens
tacctatagcgctgg

SEQ ID NO: 561517 - DNA, 15 bp, Homo sapiens
acctatagcgctggt

SEQ ID NO: 561518 - DNA, 15 bp, Homo sapiens
cctatagcgctggtg

SEQ ID NO: 561519 - DNA, 15 bp, Homo sapiens
ctatagcgctggtgg

SEQ ID NO: 561520 - DNA, 15 bp, Homo sapiens
tatagcgctggtggt

SEQ ID NO: 561521 - DNA, 15 bp, Homo sapiens
atagcgctggtggtg

SEQ ID NO: 561522 - DNA, 15 bp, Homo sapiens
tagcgctggtggtga

SEQ ID NO: 561523 - DNA, 15 bp, Homo sapiens
agcgctggtggtgaa

SEQ ID NO: 561524 - DNA, 15 bp, Homo sapiens
gcgctggtggtgaaa

SEQ ID NO: 561525 - DNA, 15 bp, Homo sapiens
cgctggtggtgaaaa

SEQ ID NO: 561526 - DNA, 15 bp, Homo sapiens
gctggtggtgaaaat

SEQ ID NO: 561527 - DNA, 15 bp, Homo sapiens
ctggtggtgaaaata

SEQ ID NO: 561528 - DNA, 15 bp, Homo sapiens
tggtggtgaaaataa

SEQ ID NO: 561529 - DNA, 15 bp, Homo sapiens
ggtggtgaaaataaa

SEQ ID NO: 561530 - DNA, 15 bp, Homo sapiens
gtggtgaaaataaaa

SEQ ID NO: 561531 - DNA, 15 bp, Homo sapiens
tggtgaaaataaaac

SEQ ID NO: 561532 - DNA, 15 bp, Homo sapiens
ggtgaaaataaaaca

SEQ ID NO: 561533 - DNA, 15 bp, Homo sapiens
gtgaaaataaaacaa

SEQ ID NO: 561534 - DNA, 15 bp, Homo sapiens
tgaaaataaaacaaa

SEQ ID NO: 561535 - DNA, 15 bp, Homo sapiens
gaaaataaaacaaat

SEQ ID NO: 561536 - DNA, 15 bp, Homo sapiens
aaaataaaacaaatt

SEQ ID NO: 561537 - DNA, 15 bp, Homo sapiens
aaataaaacaaattc

SEQ ID NO: 561538 - DNA, 15 bp, Homo sapiens
aataaaacaaattca

SEQ ID NO: 561539 - DNA, 15 bp, Homo sapiens
ataaaacaaattcat

SEQ ID NO: 561540 - DNA, 15 bp, Homo sapiens
taaaacaaattcatg

SEQ ID NO: 561541 - DNA, 15 bp, Homo sapiens
aaaacaaattcatgt

SEQ ID NO: 561542 - DNA, 15 bp, Homo sapiens
aaacaaattcatgtc

SEQ ID NO: 561543 - DNA, 15 bp, Homo sapiens
aacaaattcatgtca

SEQ ID NO: 561544 - DNA, 15 bp, Homo sapiens
acaaattcatgtcaa

SEQ ID NO: 561545 - DNA, 15 bp, Homo sapiens
caaattcatgtcaaa

SEQ ID NO: 561546 - DNA, 15 bp, Homo sapiens
aaattcatgtcaaat

SEQ ID NO: 561547 - DNA, 15 bp, Homo sapiens
aattcatgtcaaatg

SEQ ID NO: 561548 - DNA, 15 bp, Homo sapiens
attcatgtcaaatga

SEQ ID NO: 561549 - DNA, 15 bp, Homo sapiens
ttcatgtcaaatgat

SEQ ID NO: 561550 - DNA, 15 bp, Homo sapiens
tcatgtcaaatgatt

SEQ ID NO: 561551 - DNA, 15 bp, Homo sapiens
catgtcaaatgattt

SEQ ID NO: 561552 - DNA, 15 bp, Homo sapiens
atgtcaaatgatttt

SEQ ID NO: 561553 - DNA, 15 bp, Homo sapiens
tgtcaaatgattttc

SEQ ID NO: 561554 - DNA, 15 bp, Homo sapiens
gtcaaatgattttca

SEQ ID NO: 561555 - DNA, 15 bp, Homo sapiens
tcaaatgattttcaa

SEQ ID NO: 561556 - DNA, 15 bp, Homo sapiens
caaatgattttcaaa

SEQ ID NO: 561557 - DNA, 15 bp, Homo sapiens
aaatgattttcaaag

SEQ ID NO: 561558 - DNA, 15 bp, Homo sapiens
aatgattttcaaagc

SEQ ID NO: 561559 - DNA, 15 bp, Homo sapiens
atgattttcaaagca

SEQ ID NO: 561560 - DNA, 15 bp, Homo sapiens
tgattttcaaagcac

SEQ ID NO: 561561 - DNA, 15 bp, Homo sapiens
gattttcaaagcact

SEQ ID NO: 561562 - DNA, 15 bp, Homo sapiens
attttcaaagcactt

SEQ ID NO: 561563 - DNA, 15 bp, Homo sapiens
ttttcaaagcacttt

SEQ ID NO: 561564 - DNA, 15 bp, Homo sapiens
tttcaaagcactttc

SEQ ID NO: 561565 - DNA, 15 bp, Homo sapiens
ttcaaagcactttca

SEQ ID NO: 561566 - DNA, 15 bp, Homo sapiens
tcaaagcactttcag

SEQ ID NO: 561567 - DNA, 15 bp, Homo sapiens
caaagcactttcagg

SEQ ID NO: 561568 - DNA, 15 bp, Homo sapiens
aaagcactttcaggc

SEQ ID NO: 561569 - DNA, 15 bp, Homo sapiens
aagcactttcaggct

SEQ ID NO: 561570 - DNA, 15 bp, Homo sapiens
agcactttcaggcta

SEQ ID NO: 561571 - DNA, 15 bp, Homo sapiens
gcactttcaggctat

SEQ ID NO: 561572 - DNA, 15 bp, Homo sapiens
cactttcaggctatg

SEQ ID NO: 561573 - DNA, 15 bp, Homo sapiens
actttcaggctatgg

SEQ ID NO: 561574 - DNA, 15 bp, Homo sapiens
ctttcaggctatgga

SEQ ID NO: 561575 - DNA, 15 bp, Homo sapiens
tttcaggctatggat

SEQ ID NO: 561576 - DNA, 15 bp, Homo sapiens
ttcaggctatggatt

SEQ ID NO: 561577 - DNA, 15 bp, Homo sapiens
tcaggctatggattt

SEQ ID NO: 561578 - DNA, 15 bp, Homo sapiens
caggctatggattta

SEQ ID NO: 561579 - DNA, 15 bp, Homo sapiens
aggctatggatttac

SEQ ID NO: 561580 - DNA, 15 bp, Homo sapiens
ggctatggatttact

SEQ ID NO: 561581 - DNA, 15 bp, Homo sapiens
gctatggatttactt

SEQ ID NO: 561582 - DNA, 15 bp, Homo sapiens
ctatggatttacttc

SEQ ID NO: 561583 - DNA, 15 bp, Homo sapiens
tatggatttacttca

SEQ ID NO: 561584 - DNA, 15 bp, Homo sapiens
atggatttacttcat

SEQ ID NO: 561585 - DNA, 15 bp, Homo sapiens
tggatttacttcatt

SEQ ID NO: 561586 - DNA, 15 bp, Homo sapiens
ggatttacttcatta

SEQ ID NO: 561587 - DNA, 15 bp, Homo sapiens
gatttacttcattat

SEQ ID NO: 561588 - DNA, 15 bp, Homo sapiens
atttacttcattatt

SEQ ID NO: 561589 - DNA, 15 bp, Homo sapiens
tttacttcattattt

SEQ ID NO: 561590 - DNA, 15 bp, Homo sapiens
ttacttcattatttt

SEQ ID NO: 561591 - DNA, 15 bp, Homo sapiens
tacttcattatttta

SEQ ID NO: 561592 - DNA, 15 bp, Homo sapiens
acttcattattttag

SEQ ID NO: 561593 - DNA, 15 bp, Homo sapiens
cttcattattttagc

SEQ ID NO: 561594 - DNA, 15 bp, Homo sapiens
ttcattattttagct

SEQ ID NO: 561595 - DNA, 15 bp, Homo sapiens
tcattattttagctc

SEQ ID NO: 561596 - DNA, 15 bp, Homo sapiens
cattattttagctcc

SEQ ID NO: 561597 - DNA, 15 bp, Homo sapiens
attattttagctccg

SEQ ID NO: 561598 - DNA, 15 bp, Homo sapiens
ttattttagctccgg

SEQ ID NO: 561599 - DNA, 15 bp, Homo sapiens
tattttagctccggc

SEQ ID NO: 561600 - DNA, 15 bp, Homo sapiens
attttagctccggct

SEQ ID NO: 561601 - DNA, 15 bp, Homo sapiens
ttttagctccggcta

SEQ ID NO: 561602 - DNA, 15 bp, Homo sapiens
tttagctccggctag

SEQ ID NO: 561603 - DNA, 15 bp, Homo sapiens
ttagctccggctaga

SEQ ID NO: 561604 - DNA, 15 bp, Homo sapiens
tagctccggctagat

SEQ ID NO: 561605 - DNA, 15 bp, Homo sapiens
agctccggctagatc

SEQ ID NO: 561606 - DNA, 15 bp, Homo sapiens
gctccggctagatct

SEQ ID NO: 561607 - DNA, 15 bp, Homo sapiens
ctccggctagatctt

SEQ ID NO: 561608 - DNA, 15 bp, Homo sapiens
tccggctagatcttt

SEQ ID NO: 561609 - DNA, 15 bp, Homo sapiens
ccggctagatctttt

SEQ ID NO: 561610 - DNA, 15 bp, Homo sapiens
cggctagatctttta

SEQ ID NO: 561611 - DNA, 15 bp, Homo sapiens
ggctagatcttttag

SEQ ID NO: 561612 - DNA, 15 bp, Homo sapiens
gctagatcttttagg

SEQ ID NO: 561613 - DNA, 15 bp, Homo sapiens
ctagatcttttaggt

SEQ ID NO: 561614 - DNA, 15 bp, Homo sapiens
tagatcttttaggtc

SEQ ID NO: 561615 - DNA, 15 bp, Homo sapiens
agatcttttaggtcc

SEQ ID NO: 561616 - DNA, 15 bp, Homo sapiens
gatcttttaggtcct

SEQ ID NO: 561617 - DNA, 15 bp, Homo sapiens
atcttttaggtcctc

SEQ ID NO: 561618 - DNA, 15 bp, Homo sapiens
tcttttaggtcctca

SEQ ID NO: 561619 - DNA, 15 bp, Homo sapiens
cttttaggtcctcac

SEQ ID NO: 561620 - DNA, 15 bp, Homo sapiens
ttttaggtcctcaca

SEQ ID NO: 561621 - DNA, 15 bp, Homo sapiens
tttaggtcctcacac

SEQ ID NO: 561622 - DNA, 15 bp, Homo sapiens
ttaggtcctcacaca

SEQ ID NO: 561623 - DNA, 15 bp, Homo sapiens
taggtcctcacacat

SEQ ID NO: 561624 - DNA, 15 bp, Homo sapiens
aggtcctcacacatt

SEQ ID NO: 561625 - DNA, 15 bp, Homo sapiens
ggtcctcacacattt

SEQ ID NO: 561626 - DNA, 15 bp, Homo sapiens
gtcctcacacatttt

SEQ ID NO: 561627 - DNA, 15 bp, Homo sapiens
tcctcacacattttg

SEQ ID NO: 561628 - DNA, 15 bp, Homo sapiens
cctcacacattttgg

SEQ ID NO: 561629 - DNA, 15 bp, Homo sapiens
ctcacacattttggc

SEQ ID NO: 561630 - DNA, 15 bp, Homo sapiens
tcacacattttggct

SEQ ID NO: 561631 - DNA, 15 bp, Homo sapiens
cacacattttggctt

SEQ ID NO: 561632 - DNA, 15 bp, Homo sapiens
acacattttggcttc

SEQ ID NO: 561633 - DNA, 15 bp, Homo sapiens
cacattttggcttcc

SEQ ID NO: 561634 - DNA, 15 bp, Homo sapiens
acattttggcttcct

SEQ ID NO: 561635 - DNA, 15 bp, Homo sapiens
cattttggcttcctc

SEQ ID NO: 561636 - DNA, 15 bp, Homo sapiens
attttggcttcctcc

SEQ ID NO: 561637 - DNA, 15 bp, Homo sapiens
ttttggcttcctcca

SEQ ID NO: 561638 - DNA, 15 bp, Homo sapiens
tttggcttcctccag

SEQ ID NO: 561639 - DNA, 15 bp, Homo sapiens
ttggcttcctccagg

SEQ ID NO: 561640 - DNA, 15 bp, Homo sapiens
tggcttcctccaggc

SEQ ID NO: 561641 - DNA, 15 bp, Homo sapiens
ggcttcctccaggcc

SEQ ID NO: 561642 - DNA, 15 bp, Homo sapiens
gcttcctccaggcca

SEQ ID NO: 561643 - DNA, 15 bp, Homo sapiens
cttcctccaggccag

SEQ ID NO: 561644 - DNA, 15 bp, Homo sapiens
ttcctccaggccagg

SEQ ID NO: 561645 - DNA, 15 bp, Homo sapiens
tcctccaggccaggc

SEQ ID NO: 561646 - DNA, 15 bp, Homo sapiens
cctccaggccaggct

SEQ ID NO: 561647 - DNA, 15 bp, Homo sapiens
ctccaggccaggctg

SEQ ID NO: 561648 - DNA, 15 bp, Homo sapiens
tccaggccaggctgt

SEQ ID NO: 561649 - DNA, 15 bp, Homo sapiens
ccaggccaggctgtg

SEQ ID NO: 561650 - DNA, 15 bp, Homo sapiens
caggccaggctgtgg

SEQ ID NO: 561651 - DNA, 15 bp, Homo sapiens
aggccaggctgtgga

SEQ ID NO: 561652 - DNA, 15 bp, Homo sapiens
ggccaggctgtggat

SEQ ID NO: 561653 - DNA, 15 bp, Homo sapiens
gccaggctgtggata

SEQ ID NO: 561654 - DNA, 15 bp, Homo sapiens
ccaggctgtggatat

SEQ ID NO: 561655 - DNA, 15 bp, Homo sapiens
caggctgtggatatg

SEQ ID NO: 561656 - DNA, 15 bp, Homo sapiens
aggctgtggatatga

SEQ ID NO: 561657 - DNA, 15 bp, Homo sapiens
ggctgtggatatgag

SEQ ID NO: 561658 - DNA, 15 bp, Homo sapiens
gctgtggatatgagg

SEQ ID NO: 561659 - DNA, 15 bp, Homo sapiens
ctgtggatatgaggg

SEQ ID NO: 561660 - DNA, 15 bp, Homo sapiens
tgtggatatgagggg

SEQ ID NO: 561661 - DNA, 15 bp, Homo sapiens
gtggatatgagggga

SEQ ID NO: 561662 - DNA, 15 bp, Homo sapiens
tggatatgaggggaa

SEQ ID NO: 561663 - DNA, 15 bp, Homo sapiens
ggatatgaggggaag

SEQ ID NO: 561664 - DNA, 15 bp, Homo sapiens
gatatgaggggaagt

SEQ ID NO: 561665 - DNA, 15 bp, Homo sapiens
atatgaggggaagtc

SEQ ID NO: 561666 - DNA, 15 bp, Homo sapiens
tatgaggggaagtct

SEQ ID NO: 561667 - DNA, 15 bp, Homo sapiens
atgaggggaagtctc

SEQ ID NO: 561668 - DNA, 15 bp, Homo sapiens
tgaggggaagtctca

SEQ ID NO: 561669 - DNA, 15 bp, Homo sapiens
gaggggaagtctcat

SEQ ID NO: 561670 - DNA, 15 bp, Homo sapiens
aggggaagtctcatt

SEQ ID NO: 561671 - DNA, 15 bp, Homo sapiens
ggggaagtctcattt

SEQ ID NO: 561672 - DNA, 15 bp, Homo sapiens
gggaagtctcatttg

SEQ ID NO: 561673 - DNA, 15 bp, Homo sapiens
ggaagtctcatttgg

SEQ ID NO: 561674 - DNA, 15 bp, Homo sapiens
gaagtctcatttggg

SEQ ID NO: 561675 - DNA, 15 bp, Homo sapiens
aagtctcatttgggc

SEQ ID NO: 561676 - DNA, 15 bp, Homo sapiens
agtctcatttgggca

SEQ ID NO: 561677 - DNA, 15 bp, Homo sapiens
gtctcatttgggcaa

SEQ ID NO: 561678 - DNA, 15 bp, Homo sapiens
tctcatttgggcaag

SEQ ID NO: 561679 - DNA, 15 bp, Homo sapiens
ctcatttgggcaagt

SEQ ID NO: 561680 - DNA, 15 bp, Homo sapiens
tcatttgggcaagtc

SEQ ID NO: 561681 - DNA, 15 bp, Homo sapiens
catttgggcaagtcc

SEQ ID NO: 561682 - DNA, 15 bp, Homo sapiens
atttgggcaagtcca

SEQ ID NO: 561683 - DNA, 15 bp, Homo sapiens
tttgggcaagtccac

SEQ ID NO: 561684 - DNA, 15 bp, Homo sapiens
ttgggcaagtccaca

SEQ ID NO: 561685 - DNA, 15 bp, Homo sapiens
tgggcaagtccacaa

SEQ ID NO: 561686 - DNA, 15 bp, Homo sapiens
gggcaagtccacaaa

SEQ ID NO: 561687 - DNA, 15 bp, Homo sapiens
ggcaagtccacaaat

SEQ ID NO: 561688 - DNA, 15 bp, Homo sapiens
gcaagtccacaaatc

SEQ ID NO: 561689 - DNA, 15 bp, Homo sapiens
caagtccacaaatca

SEQ ID NO: 561690 - DNA, 15 bp, Homo sapiens
aagtccacaaatcaa

SEQ ID NO: 561691 - DNA, 15 bp, Homo sapiens
agtccacaaatcaag

SEQ ID NO: 561692 - DNA, 15 bp, Homo sapiens
gtccacaaatcaagg

SEQ ID NO: 561693 - DNA, 15 bp, Homo sapiens
tccacaaatcaaggc

SEQ ID NO: 561694 - DNA, 15 bp, Homo sapiens
ccacaaatcaaggca

SEQ ID NO: 561695 - DNA, 15 bp, Homo sapiens
cacaaatcaaggcaa

SEQ ID NO: 561696 - DNA, 15 bp, Homo sapiens
acaaatcaaggcaat

SEQ ID NO: 561697 - DNA, 15 bp, Homo sapiens
caaatcaaggcaata

SEQ ID NO: 561698 - DNA, 15 bp, Homo sapiens
aaatcaaggcaataa

SEQ ID NO: 561699 - DNA, 15 bp, Homo sapiens
aatcaaggcaataaa

SEQ ID NO: 561700 - DNA, 15 bp, Homo sapiens
atcaaggcaataaaa

SEQ ID NO: 561701 - DNA, 15 bp, Homo sapiens
tcaaggcaataaaat

SEQ ID NO: 561702 - DNA, 15 bp, Homo sapiens
caaggcaataaaata

SEQ ID NO: 561703 - DNA, 15 bp, Homo sapiens
aaggcaataaaatat

SEQ ID NO: 561704 - DNA, 15 bp, Homo sapiens
aggcaataaaatatt

SEQ ID NO: 561705 - DNA, 15 bp, Homo sapiens
ggcaataaaatatta

SEQ ID NO: 561706 - DNA, 15 bp, Homo sapiens
gcaataaaatattag

SEQ ID NO: 561707 - DNA, 15 bp, Homo sapiens
caataaaatattagt

SEQ ID NO: 561708 - DNA, 15 bp, Homo sapiens
aataaaatattagtg

SEQ ID NO: 561709 - DNA, 15 bp, Homo sapiens
ataaaatattagtgg

SEQ ID NO: 561710 - DNA, 15 bp, Homo sapiens
taaaatattagtgga

SEQ ID NO: 561711 - DNA, 15 bp, Homo sapiens
aaaatattagtggaa

SEQ ID NO: 561712 - DNA, 15 bp, Homo sapiens
aaatattagtggaat

SEQ ID NO: 561713 - DNA, 15 bp, Homo sapiens
aatattagtggaata

SEQ ID NO: 561714 - DNA, 15 bp, Homo sapiens
atattagtggaataa

SEQ ID NO: 561715 - DNA, 15 bp, Homo sapiens
tattagtggaataac

SEQ ID NO: 561716 - DNA, 15 bp, Homo sapiens
attagtggaataacc

SEQ ID NO: 561717 - DNA, 15 bp, Homo sapiens
ttagtggaataaccg

SEQ ID NO: 561718 - DNA, 15 bp, Homo sapiens
tagtggaataaccga

SEQ ID NO: 561719 - DNA, 15 bp, Homo sapiens
agtggaataaccgat

SEQ ID NO: 561720 - DNA, 15 bp, Homo sapiens
gtggaataaccgatt

SEQ ID NO: 561721 - DNA, 15 bp, Homo sapiens
tggaataaccgattg

SEQ ID NO: 561722 - DNA, 15 bp, Homo sapiens
ggaataaccgattga

SEQ ID NO: 561723 - DNA, 15 bp, Homo sapiens
gaataaccgattgaa

SEQ ID NO: 561724 - DNA, 15 bp, Homo sapiens
aataaccgattgaat

SEQ ID NO: 561725 - DNA, 15 bp, Homo sapiens
ataaccgattgaatt

SEQ ID NO: 561726 - DNA, 15 bp, Homo sapiens
taaccgattgaattt

SEQ ID NO: 561727 - DNA, 15 bp, Homo sapiens
aaccgattgaattta

SEQ ID NO: 561728 - DNA, 15 bp, Homo sapiens
accgattgaatttat

SEQ ID NO: 561729 - DNA, 15 bp, Homo sapiens
ccgattgaatttatg

SEQ ID NO: 561730 - DNA, 15 bp, Homo sapiens
cgattgaatttatga

SEQ ID NO: 561731 - DNA, 15 bp, Homo sapiens
gattgaatttatgat

SEQ ID NO: 561732 - DNA, 15 bp, Homo sapiens
attgaatttatgatg

SEQ ID NO: 561733 - DNA, 15 bp, Homo sapiens
ttgaatttatgatgg

SEQ ID NO: 561734 - DNA, 15 bp, Homo sapiens
tgaatttatgatggg

SEQ ID NO: 561735 - DNA, 15 bp, Homo sapiens
gaatttatgatggga

SEQ ID NO: 561736 - DNA, 15 bp, Homo sapiens
aatttatgatgggat

SEQ ID NO: 561737 - DNA, 15 bp, Homo sapiens
atttatgatgggatt

SEQ ID NO: 561738 - DNA, 15 bp, Homo sapiens
tttatgatgggattt

SEQ ID NO: 561739 - DNA, 15 bp, Homo sapiens
ttatgatgggattta

SEQ ID NO: 561740 - DNA, 15 bp, Homo sapiens
tatgatgggatttaa

SEQ ID NO: 561741 - DNA, 15 bp, Homo sapiens
atgatgggatttaaa

SEQ ID NO: 561742 - DNA, 15 bp, Homo sapiens
tgatgggatttaaag

SEQ ID NO: 561743 - DNA, 15 bp, Homo sapiens
gatgggatttaaaga

SEQ ID NO: 561744 - DNA, 15 bp, Homo sapiens
atgggatttaaagac

SEQ ID NO: 561745 - DNA, 15 bp, Homo sapiens
tgggatttaaagaca

SEQ ID NO: 561746 - DNA, 15 bp, Homo sapiens
gggatttaaagacaa

SEQ ID NO: 561747 - DNA, 15 bp, Homo sapiens
ggatttaaagacaag

SEQ ID NO: 561748 - DNA, 15 bp, Homo sapiens
gatttaaagacaagt

SEQ ID NO: 561749 - DNA, 15 bp, Homo sapiens
atttaaagacaagta

SEQ ID NO: 561750 - DNA, 15 bp, Homo sapiens
tttaaagacaagtat

SEQ ID NO: 561751 - DNA, 15 bp, Homo sapiens
ttaaagacaagtata

SEQ ID NO: 561752 - DNA, 15 bp, Homo sapiens
taaagacaagtataa

SEQ ID NO: 561753 - DNA, 15 bp, Homo sapiens
aaagacaagtataaa

SEQ ID NO: 561754 - DNA, 15 bp, Homo sapiens
aagacaagtataaat

SEQ ID NO: 561755 - DNA, 15 bp, Homo sapiens
agacaagtataaatg

SEQ ID NO: 561756 - DNA, 15 bp, Homo sapiens
gacaagtataaatgt

SEQ ID NO: 561757 - DNA, 15 bp, Homo sapiens
acaagtataaatgtg

SEQ ID NO: 561758 - DNA, 15 bp, Homo sapiens
caagtataaatgtgg

SEQ ID NO: 561759 - DNA, 15 bp, Homo sapiens
aagtataaatgtggg

SEQ ID NO: 561760 - DNA, 15 bp, Homo sapiens
agtataaatgtgggc

SEQ ID NO: 561761 - DNA, 15 bp, Homo sapiens
gtataaatgtgggcc

SEQ ID NO: 561762 - DNA, 15 bp, Homo sapiens
tataaatgtgggccc

SEQ ID NO: 561763 - DNA, 15 bp, Homo sapiens
ataaatgtgggccct

SEQ ID NO: 561764 - DNA, 15 bp, Homo sapiens
taaatgtgggcccta

SEQ ID NO: 561765 - DNA, 15 bp, Homo sapiens
aaatgtgggccctag

SEQ ID NO: 561766 - DNA, 15 bp, Homo sapiens
aatgtgggccctagt

SEQ ID NO: 561767 - DNA, 15 bp, Homo sapiens
atgtgggccctagtt

SEQ ID NO: 561768 - DNA, 15 bp, Homo sapiens
tgtgggccctagtta

SEQ ID NO: 561769 - DNA, 15 bp, Homo sapiens
gtgggccctagttaa

SEQ ID NO: 561770 - DNA, 15 bp, Homo sapiens
tgggccctagttaat

SEQ ID NO: 561771 - DNA, 15 bp, Homo sapiens
gggccctagttaatc

SEQ ID NO: 561772 - DNA, 15 bp, Homo sapiens
ggccctagttaatca

SEQ ID NO: 561773 - DNA, 15 bp, Homo sapiens
gccctagttaatcac

SEQ ID NO: 561774 - DNA, 15 bp, Homo sapiens
ccctagttaatcact

SEQ ID NO: 561775 - DNA, 15 bp, Homo sapiens
cctagttaatcacta

SEQ ID NO: 561776 - DNA, 15 bp, Homo sapiens
ctagttaatcactag

SEQ ID NO: 561777 - DNA, 15 bp, Homo sapiens
tagttaatcactagc

SEQ ID NO: 561778 - DNA, 15 bp, Homo sapiens
agttaatcactagct

SEQ ID NO: 561779 - DNA, 15 bp, Homo sapiens
gttaatcactagctc

SEQ ID NO: 561780 - DNA, 15 bp, Homo sapiens
ttaatcactagctcc

SEQ ID NO: 561781 - DNA, 15 bp, Homo sapiens
taatcactagctcca

SEQ ID NO: 561782 - DNA, 15 bp, Homo sapiens
aatcactagctccat

SEQ ID NO: 561783 - DNA, 15 bp, Homo sapiens
atcactagctccatg

SEQ ID NO: 561784 - DNA, 15 bp, Homo sapiens
tcactagctccatgt

SEQ ID NO: 561785 - DNA, 15 bp, Homo sapiens
cactagctccatgtt

SEQ ID NO: 561786 - DNA, 15 bp, Homo sapiens
actagctccatgttc

SEQ ID NO: 561787 - DNA, 15 bp, Homo sapiens
ctagctccatgttca

SEQ ID NO: 561788 - DNA, 15 bp, Homo sapiens
tagctccatgttcag

SEQ ID NO: 561789 - DNA, 15 bp, Homo sapiens
agctccatgttcaga

SEQ ID NO: 561790 - DNA, 15 bp, Homo sapiens
gctccatgttcagat

SEQ ID NO: 561791 - DNA, 15 bp, Homo sapiens
ctccatgttcagatg

SEQ ID NO: 561792 - DNA, 15 bp, Homo sapiens
tccatgttcagatgg

SEQ ID NO: 561793 - DNA, 15 bp, Homo sapiens
ccatgttcagatggg

SEQ ID NO: 561794 - DNA, 15 bp, Homo sapiens
catgttcagatggga

SEQ ID NO: 561795 - DNA, 15 bp, Homo sapiens
atgttcagatgggaa

SEQ ID NO: 561796 - DNA, 15 bp, Homo sapiens
tgttcagatgggaag

SEQ ID NO: 561797 - DNA, 15 bp, Homo sapiens
gttcagatgggaaga

SEQ ID NO: 561798 - DNA, 15 bp, Homo sapiens
ttcagatgggaagaa

SEQ ID NO: 561799 - DNA, 15 bp, Homo sapiens
tcagatgggaagaaa

SEQ ID NO: 561800 - DNA, 15 bp, Homo sapiens
cagatgggaagaaac

SEQ ID NO: 561801 - DNA, 15 bp, Homo sapiens
agatgggaagaaact

SEQ ID NO: 561802 - DNA, 15 bp, Homo sapiens
gatgggaagaaacta

SEQ ID NO: 561803 - DNA, 15 bp, Homo sapiens
atgggaagaaactag

SEQ ID NO: 561804 - DNA, 15 bp, Homo sapiens
tgggaagaaactagg

SEQ ID NO: 561805 - DNA, 15 bp, Homo sapiens
gggaagaaactagga

SEQ ID NO: 561806 - DNA, 15 bp, Homo sapiens
ggaagaaactaggac

SEQ ID NO: 561807 - DNA, 15 bp, Homo sapiens
gaagaaactaggact

SEQ ID NO: 561808 - DNA, 15 bp, Homo sapiens
aagaaactaggacta

SEQ ID NO: 561809 - DNA, 15 bp, Homo sapiens
agaaactaggactaa

SEQ ID NO: 561810 - DNA, 15 bp, Homo sapiens
gaaactaggactaaa

SEQ ID NO: 561811 - DNA, 15 bp, Homo sapiens
aaactaggactaaat

SEQ ID NO: 561812 - DNA, 15 bp, Homo sapiens
aactaggactaaatc

SEQ ID NO: 561813 - DNA, 15 bp, Homo sapiens
actaggactaaatca

SEQ ID NO: 561814 - DNA, 15 bp, Homo sapiens
ctaggactaaatcat

SEQ ID NO: 561815 - DNA, 15 bp, Homo sapiens
taggactaaatcatc

SEQ ID NO: 561816 - DNA, 15 bp, Homo sapiens
aggactaaatcatcc

SEQ ID NO: 561817 - DNA, 15 bp, Homo sapiens
ggactaaatcatcca

SEQ ID NO: 561818 - DNA, 15 bp, Homo sapiens
gactaaatcatccag

SEQ ID NO: 561819 - DNA, 15 bp, Homo sapiens
actaaatcatccagg

SEQ ID NO: 561820 - DNA, 15 bp, Homo sapiens
ctaaatcatccagga

SEQ ID NO: 561821 - DNA, 15 bp, Homo sapiens
taaatcatccaggaa

SEQ ID NO: 561822 - DNA, 15 bp, Homo sapiens
aaatcatccaggaaa

SEQ ID NO: 561823 - DNA, 15 bp, Homo sapiens
aatcatccaggaaat

SEQ ID NO: 561824 - DNA, 15 bp, Homo sapiens
atcatccaggaaatg

SEQ ID NO: 561825 - DNA, 15 bp, Homo sapiens
tcatccaggaaatgc

SEQ ID NO: 561826 - DNA, 15 bp, Homo sapiens
catccaggaaatgca

SEQ ID NO: 561827 - DNA, 15 bp, Homo sapiens
atccaggaaatgcat

SEQ ID NO: 561828 - DNA, 15 bp, Homo sapiens
tccaggaaatgcatt

SEQ ID NO: 561829 - DNA, 15 bp, Homo sapiens
ccaggaaatgcattt

SEQ ID NO: 561830 - DNA, 15 bp, Homo sapiens
caggaaatgcatttg

SEQ ID NO: 561831 - DNA, 15 bp, Homo sapiens
aggaaatgcatttgg

SEQ ID NO: 561832 - DNA, 15 bp, Homo sapiens
ggaaatgcatttgga

SEQ ID NO: 561833 - DNA, 15 bp, Homo sapiens
gaaatgcatttggaa

SEQ ID NO: 561834 - DNA, 15 bp, Homo sapiens
aaatgcatttggaag

SEQ ID NO: 561835 - DNA, 15 bp, Homo sapiens
aatgcatttggaaga

SEQ ID NO: 561836 - DNA, 15 bp, Homo sapiens
atgcatttggaagag

SEQ ID NO: 561837 - DNA, 15 bp, Homo sapiens
tgcatttggaagagt

SEQ ID NO: 561838 - DNA, 15 bp, Homo sapiens
gcatttggaagagtt

SEQ ID NO: 561839 - DNA, 15 bp, Homo sapiens
catttggaagagttt

SEQ ID NO: 561840 - DNA, 15 bp, Homo sapiens
atttggaagagttta

SEQ ID NO: 561841 - DNA, 15 bp, Homo sapiens
tttggaagagtttag

SEQ ID NO: 561842 - DNA, 15 bp, Homo sapiens
ttggaagagtttagc

SEQ ID NO: 561843 - DNA, 15 bp, Homo sapiens
tggaagagtttagca

SEQ ID NO: 561844 - DNA, 15 bp, Homo sapiens
ggaagagtttagcat

SEQ ID NO: 561845 - DNA, 15 bp, Homo sapiens
gaagagtttagcatg

SEQ ID NO: 561846 - DNA, 15 bp, Homo sapiens
aagagtttagcatga

SEQ ID NO: 561847 - DNA, 15 bp, Homo sapiens
agagtttagcatgat

SEQ ID NO: 561848 - DNA, 15 bp, Homo sapiens
gagtttagcatgatc

SEQ ID NO: 561849 - DNA, 15 bp, Homo sapiens
agtttagcatgatcc

SEQ ID NO: 561850 - DNA, 15 bp, Homo sapiens
gtttagcatgatcca

SEQ ID NO: 561851 - DNA, 15 bp, Homo sapiens
tttagcatgatccag

SEQ ID NO: 561852 - DNA, 15 bp, Homo sapiens
ttagcatgatccaga

SEQ ID NO: 561853 - DNA, 15 bp, Homo sapiens
tagcatgatccagag

SEQ ID NO: 561854 - DNA, 15 bp, Homo sapiens
agcatgatccagagt

SEQ ID NO: 561855 - DNA, 15 bp, Homo sapiens
gcatgatccagagtt

SEQ ID NO: 561856 - DNA, 15 bp, Homo sapiens
catgatccagagttg

SEQ ID NO: 561857 - DNA, 15 bp, Homo sapiens
atgatccagagttga

SEQ ID NO: 561858 - DNA, 15 bp, Homo sapiens
tgatccagagttgaa

SEQ ID NO: 561859 - DNA, 15 bp, Homo sapiens
gatccagagttgaag

SEQ ID NO: 561860 - DNA, 15 bp, Homo sapiens
atccagagttgaaga

SEQ ID NO: 561861 - DNA, 15 bp, Homo sapiens
tccagagttgaagat

SEQ ID NO: 561862 - DNA, 15 bp, Homo sapiens
ccagagttgaagatt

SEQ ID NO: 561863 - DNA, 15 bp, Homo sapiens
cagagttgaagattt

SEQ ID NO: 561864 - DNA, 15 bp, Homo sapiens
agagttgaagattta

SEQ ID NO: 561865 - DNA, 15 bp, Homo sapiens
gagttgaagatttat

SEQ ID NO: 561866 - DNA, 15 bp, Homo sapiens
agttgaagatttata

SEQ ID NO: 561867 - DNA, 15 bp, Homo sapiens
gttgaagatttataa

SEQ ID NO: 561868 - DNA, 15 bp, Homo sapiens
ttgaagatttataat

SEQ ID NO: 561869 - DNA, 15 bp, Homo sapiens
tgaagatttataatt

SEQ ID NO: 561870 - DNA, 15 bp, Homo sapiens
gaagatttataattc

SEQ ID NO: 561871 - DNA, 15 bp, Homo sapiens
aagatttataattca

SEQ ID NO: 561872 - DNA, 15 bp, Homo sapiens
agatttataattcat

SEQ ID NO: 561873 - DNA, 15 bp, Homo sapiens
gatttataattcatt

SEQ ID NO: 561874 - DNA, 15 bp, Homo sapiens
atttataattcattg

SEQ ID NO: 561875 - DNA, 15 bp, Homo sapiens
tttataattcattgt

SEQ ID NO: 561876 - DNA, 15 bp, Homo sapiens
ttataattcattgtg

SEQ ID NO: 561877 - DNA, 15 bp, Homo sapiens
tataattcattgtgc

SEQ ID NO: 561878 - DNA, 15 bp, Homo sapiens
ataattcattgtgct

SEQ ID NO: 561879 - DNA, 15 bp, Homo sapiens
taattcattgtgctg

SEQ ID NO: 561880 - DNA, 15 bp, Homo sapiens
aattcattgtgctgt

SEQ ID NO: 561881 - DNA, 15 bp, Homo sapiens
attcattgtgctgta

SEQ ID NO: 561882 - DNA, 15 bp, Homo sapiens
ttcattgtgctgtag

SEQ ID NO: 561883 - DNA, 15 bp, Homo sapiens
tcattgtgctgtaga

SEQ ID NO: 561884 - DNA, 15 bp, Homo sapiens
cattgtgctgtagag

SEQ ID NO: 561885 - DNA, 15 bp, Homo sapiens
attgtgctgtagagg

SEQ ID NO: 561886 - DNA, 15 bp, Homo sapiens
ttgtgctgtagaggg

SEQ ID NO: 561887 - DNA, 15 bp, Homo sapiens
tgtgctgtagaggga

SEQ ID NO: 561888 - DNA, 15 bp, Homo sapiens
gtgctgtagagggag

SEQ ID NO: 561889 - DNA, 15 bp, Homo sapiens
tgctgtagagggaga

SEQ ID NO: 561890 - DNA, 15 bp, Homo sapiens
gctgtagagggagag

SEQ ID NO: 561891 - DNA, 15 bp, Homo sapiens
ctgtagagggagagt

SEQ ID NO: 561892 - DNA, 15 bp, Homo sapiens
tgtagagggagagta

SEQ ID NO: 561893 - DNA, 15 bp, Homo sapiens
gtagagggagagtaa

SEQ ID NO: 561894 - DNA, 15 bp, Homo sapiens
tagagggagagtaat

SEQ ID NO: 561895 - DNA, 15 bp, Homo sapiens
agagggagagtaata

SEQ ID NO: 561896 - DNA, 15 bp, Homo sapiens
gagggagagtaataa

SEQ ID NO: 561897 - DNA, 15 bp, Homo sapiens
agggagagtaataat

SEQ ID NO: 561898 - DNA, 15 bp, Homo sapiens
gggagagtaataata

SEQ ID NO: 561899 - DNA, 15 bp, Homo sapiens
ggagagtaataatat

SEQ ID NO: 561900 - DNA, 15 bp, Homo sapiens
gagagtaataatatt

SEQ ID NO: 561901 - DNA, 15 bp, Homo sapiens
agagtaataatattg

SEQ ID NO: 561902 - DNA, 15 bp, Homo sapiens
gagtaataatattgt

SEQ ID NO: 561903 - DNA, 15 bp, Homo sapiens
agtaataatattgtt

SEQ ID NO: 561904 - DNA, 15 bp, Homo sapiens
gtaataatattgttg

SEQ ID NO: 561905 - DNA, 15 bp, Homo sapiens
taataatattgttgc

SEQ ID NO: 561906 - DNA, 15 bp, Homo sapiens
aataatattgttgca

SEQ ID NO: 561907 - DNA, 15 bp, Homo sapiens
ataatattgttgcag

SEQ ID NO: 561908 - DNA, 15 bp, Homo sapiens
taatattgttgcaga

SEQ ID NO: 561909 - DNA, 15 bp, Homo sapiens
aatattgttgcagag

SEQ ID NO: 561910 - DNA, 15 bp, Homo sapiens
atattgttgcagagc

SEQ ID NO: 561911 - DNA, 15 bp, Homo sapiens
tattgttgcagagcc

SEQ ID NO: 561912 - DNA, 15 bp, Homo sapiens
attgttgcagagccc

SEQ ID NO: 561913 - DNA, 15 bp, Homo sapiens
ttgttgcagagccca

SEQ ID NO: 561914 - DNA, 15 bp, Homo sapiens
tgttgcagagcccaa

SEQ ID NO: 561915 - DNA, 15 bp, Homo sapiens
gttgcagagcccaaa

SEQ ID NO: 561916 - DNA, 15 bp, Homo sapiens
ttgcagagcccaaag

SEQ ID NO: 561917 - DNA, 15 bp, Homo sapiens
tgcagagcccaaagc

SEQ ID NO: 561918 - DNA, 15 bp, Homo sapiens
gcagagcccaaagca

SEQ ID NO: 561919 - DNA, 15 bp, Homo sapiens
cagagcccaaagcaa

SEQ ID NO: 561920 - DNA, 15 bp, Homo sapiens
agagcccaaagcaag

SEQ ID NO: 561921 - DNA, 15 bp, Homo sapiens
gagcccaaagcaagg

SEQ ID NO: 561922 - DNA, 15 bp, Homo sapiens
agcccaaagcaaggg

SEQ ID NO: 561923 - DNA, 15 bp, Homo sapiens
gcccaaagcaaggga

SEQ ID NO: 561924 - DNA, 15 bp, Homo sapiens
cccaaagcaagggag

SEQ ID NO: 561925 - DNA, 15 bp, Homo sapiens
ccaaagcaagggagg

SEQ ID NO: 561926 - DNA, 15 bp, Homo sapiens
caaagcaagggagga

SEQ ID NO: 561927 - DNA, 15 bp, Homo sapiens
aaagcaagggaggaa

SEQ ID NO: 561928 - DNA, 15 bp, Homo sapiens
aagcaagggaggaaa

SEQ ID NO: 561929 - DNA, 15 bp, Homo sapiens
agcaagggaggaaat

SEQ ID NO: 561930 - DNA, 15 bp, Homo sapiens
gcaagggaggaaata

SEQ ID NO: 561931 - DNA, 15 bp, Homo sapiens
caagggaggaaataa

SEQ ID NO: 561932 - DNA, 15 bp, Homo sapiens
aagggaggaaataat

SEQ ID NO: 561933 - DNA, 15 bp, Homo sapiens
agggaggaaataata

SEQ ID NO: 561934 - DNA, 15 bp, Homo sapiens
gggaggaaataataa

SEQ ID NO: 561935 - DNA, 15 bp, Homo sapiens
ggaggaaataataaa

SEQ ID NO: 561936 - DNA, 15 bp, Homo sapiens
gaggaaataataaaa

SEQ ID NO: 561937 - DNA, 15 bp, Homo sapiens
aggaaataataaaat

SEQ ID NO: 561938 - DNA, 15 bp, Homo sapiens
ggaaataataaaata

SEQ ID NO: 561939 - DNA, 15 bp, Homo sapiens
gaaataataaaataa

SEQ ID NO: 561940 - DNA, 15 bp, Homo sapiens
aaataataaaataaa

SEQ ID NO: 561941 - DNA, 15 bp, Homo sapiens
aataataaaataaat

SEQ ID NO: 561942 - DNA, 15 bp, Homo sapiens
ataataaaataaata

SEQ ID NO: 561943 - DNA, 15 bp, Homo sapiens
taataaaataaataa

SEQ ID NO: 561944 - DNA, 15 bp, Homo sapiens
aataaaataaataaa

SEQ ID NO: 561945 - DNA, 15 bp, Homo sapiens
ataaaataaataaaa

SEQ ID NO: 561946 - DNA, 15 bp, Homo sapiens
taaaataaataaaat

SEQ ID NO: 561947 - DNA, 15 bp, Homo sapiens
aaaataaataaaata

SEQ ID NO: 561948 - DNA, 15 bp, Homo sapiens
aaataaataaaatat

SEQ ID NO: 561949 - DNA, 15 bp, Homo sapiens
aataaataaaatata

SEQ ID NO: 561950 - DNA, 15 bp, Homo sapiens
ataaataaaatatat

SEQ ID NO: 561951 - DNA, 15 bp, Homo sapiens
taaataaaatatatg

SEQ ID NO: 561952 - DNA, 15 bp, Homo sapiens
aaataaaatatatgg

SEQ ID NO: 561953 - DNA, 15 bp, Homo sapiens
aataaaatatatggt

SEQ ID NO: 561954 - DNA, 15 bp, Homo sapiens
ataaaatatatggtg

SEQ ID NO: 561955 - DNA, 15 bp, Homo sapiens
taaaatatatggtgt

SEQ ID NO: 561956 - DNA, 15 bp, Homo sapiens
aaaatatatggtgta

SEQ ID NO: 561957 - DNA, 15 bp, Homo sapiens
aaatatatggtgtaa

SEQ ID NO: 561958 - DNA, 15 bp, Homo sapiens
aatatatggtgtaaa

SEQ ID NO: 561959 - DNA, 15 bp, Homo sapiens
atatatggtgtaaaa

SEQ ID NO: 561960 - DNA, 15 bp, Homo sapiens
tatatggtgtaaaat

SEQ ID NO: 561961 - DNA, 15 bp, Homo sapiens
atatggtgtaaaatt

SEQ ID NO: 561962 - DNA, 15 bp, Homo sapiens
tatggtgtaaaattg

SEQ ID NO: 561963 - DNA, 15 bp, Homo sapiens
atggtgtaaaattga

SEQ ID NO: 561964 - DNA, 15 bp, Homo sapiens
tggtgtaaaattgaa

SEQ ID NO: 561965 - DNA, 15 bp, Homo sapiens
ggtgtaaaattgaat

SEQ ID NO: 561966 - DNA, 15 bp, Homo sapiens
gtgtaaaattgaatt

SEQ ID NO: 561967 - DNA, 15 bp, Homo sapiens
tgtaaaattgaattt

SEQ ID NO: 561968 - DNA, 15 bp, Homo sapiens
gtaaaattgaatttg

SEQ ID NO: 561969 - DNA, 15 bp, Homo sapiens
taaaattgaatttga

SEQ ID NO: 561970 - DNA, 15 bp, Homo sapiens
aaaattgaatttgag

SEQ ID NO: 561971 - DNA, 15 bp, Homo sapiens
aaattgaatttgagg

SEQ ID NO: 561972 - DNA, 15 bp, Homo sapiens
aattgaatttgaggc

SEQ ID NO: 561973 - DNA, 15 bp, Homo sapiens
attgaatttgaggcc

SEQ ID NO: 561974 - DNA, 15 bp, Homo sapiens
ttgaatttgaggcct

SEQ ID NO: 561975 - DNA, 15 bp, Homo sapiens
tgaatttgaggcctt

SEQ ID NO: 561976 - DNA, 15 bp, Homo sapiens
gaatttgaggccttg

SEQ ID NO: 561977 - DNA, 15 bp, Homo sapiens
aatttgaggccttgg

SEQ ID NO: 561978 - DNA, 15 bp, Homo sapiens
atttgaggccttgga

SEQ ID NO: 561979 - DNA, 15 bp, Homo sapiens
tttgaggccttggat

SEQ ID NO: 561980 - DNA, 15 bp, Homo sapiens
ttgaggccttggata

SEQ ID NO: 561981 - DNA, 15 bp, Homo sapiens
tgaggccttggatac

SEQ ID NO: 561982 - DNA, 15 bp, Homo sapiens
gaggccttggatact

SEQ ID NO: 561983 - DNA, 15 bp, Homo sapiens
aggccttggatacta

SEQ ID NO: 561984 - DNA, 15 bp, Homo sapiens
ggccttggatactaa

SEQ ID NO: 561985 - DNA, 15 bp, Homo sapiens
gccttggatactaaa

SEQ ID NO: 561986 - DNA, 15 bp, Homo sapiens
ccttggatactaaaa

SEQ ID NO: 561987 - DNA, 15 bp, Homo sapiens
cttggatactaaaag

SEQ ID NO: 561988 - DNA, 15 bp, Homo sapiens
ttggatactaaaagt

SEQ ID NO: 561989 - DNA, 15 bp, Homo sapiens
tggatactaaaagtg

SEQ ID NO: 561990 - DNA, 15 bp, Homo sapiens
ggatactaaaagtga

SEQ ID NO: 561991 - DNA, 15 bp, Homo sapiens
gatactaaaagtgag

SEQ ID NO: 561992 - DNA, 15 bp, Homo sapiens
atactaaaagtgagg

SEQ ID NO: 561993 - DNA, 15 bp, Homo sapiens
tactaaaagtgagga

SEQ ID NO: 561994 - DNA, 15 bp, Homo sapiens
actaaaagtgaggaa

SEQ ID NO: 561995 - DNA, 15 bp, Homo sapiens
ctaaaagtgaggaac

SEQ ID NO: 561996 - DNA, 15 bp, Homo sapiens
taaaagtgaggaact

SEQ ID NO: 561997 - DNA, 15 bp, Homo sapiens
aaaagtgaggaactg

SEQ ID NO: 561998 - DNA, 15 bp, Homo sapiens
aaagtgaggaactgg

SEQ ID NO: 561999 - DNA, 15 bp, Homo sapiens
aagtgaggaactggg

SEQ ID NO: 562000 - DNA, 15 bp, Homo sapiens
agtgaggaactggga

SEQ ID NO: 562001 - DNA, 15 bp, Homo sapiens
gtgaggaactgggag

SEQ ID NO: 562002 - DNA, 15 bp, Homo sapiens
tgaggaactgggaga

SEQ ID NO: 562003 - DNA, 15 bp, Homo sapiens
gaggaactgggagaa

SEQ ID NO: 562004 - DNA, 15 bp, Homo sapiens
aggaactgggagaag

SEQ ID NO: 562005 - DNA, 15 bp, Homo sapiens
ggaactgggagaagt

SEQ ID NO: 562006 - DNA, 15 bp, Homo sapiens
gaactgggagaagtg

SEQ ID NO: 562007 - DNA, 15 bp, Homo sapiens
aactgggagaagtga

SEQ ID NO: 562008 - DNA, 15 bp, Homo sapiens
actgggagaagtgaa

SEQ ID NO: 562009 - DNA, 15 bp, Homo sapiens
ctgggagaagtgaag

SEQ ID NO: 562010 - DNA, 15 bp, Homo sapiens
tgggagaagtgaaga

SEQ ID NO: 562011 - DNA, 15 bp, Homo sapiens
gggagaagtgaagaa

SEQ ID NO: 562012 - DNA, 15 bp, Homo sapiens
ggagaagtgaagaat

SEQ ID NO: 562013 - DNA, 15 bp, Homo sapiens
gagaagtgaagaatg

SEQ ID NO: 562014 - DNA, 15 bp, Homo sapiens
agaagtgaagaatga

SEQ ID NO: 562015 - DNA, 15 bp, Homo sapiens
gaagtgaagaatgaa

SEQ ID NO: 562016 - DNA, 15 bp, Homo sapiens
aagtgaagaatgaaa

SEQ ID NO: 562017 - DNA, 15 bp, Homo sapiens
agtgaagaatgaaat

SEQ ID NO: 562018 - DNA, 15 bp, Homo sapiens
gtgaagaatgaaata

SEQ ID NO: 562019 - DNA, 15 bp, Homo sapiens
tgaagaatgaaataa

SEQ ID NO: 562020 - DNA, 15 bp, Homo sapiens
gaagaatgaaataat

SEQ ID NO: 562021 - DNA, 15 bp, Homo sapiens
aagaatgaaataata

SEQ ID NO: 562022 - DNA, 15 bp, Homo sapiens
agaatgaaataatat

SEQ ID NO: 562023 - DNA, 15 bp, Homo sapiens
gaatgaaataatatg

SEQ ID NO: 562024 - DNA, 15 bp, Homo sapiens
aatgaaataatatgc

SEQ ID NO: 562025 - DNA, 15 bp, Homo sapiens
atgaaataatatgct

SEQ ID NO: 562026 - DNA, 15 bp, Homo sapiens
tgaaataatatgcta

SEQ ID NO: 562027 - DNA, 15 bp, Homo sapiens
gaaataatatgctac

SEQ ID NO: 562028 - DNA, 15 bp, Homo sapiens
aaataatatgctaca

SEQ ID NO: 562029 - DNA, 15 bp, Homo sapiens
aataatatgctacat

SEQ ID NO: 562030 - DNA, 15 bp, Homo sapiens
ataatatgctacata

SEQ ID NO: 562031 - DNA, 15 bp, Homo sapiens
taatatgctacataa

SEQ ID NO: 562032 - DNA, 15 bp, Homo sapiens
aatatgctacataat

SEQ ID NO: 562033 - DNA, 15 bp, Homo sapiens
atatgctacataatc

SEQ ID NO: 562034 - DNA, 15 bp, Homo sapiens
tatgctacataatcc

SEQ ID NO: 562035 - DNA, 15 bp, Homo sapiens
atgctacataatcca

SEQ ID NO: 562036 - DNA, 15 bp, Homo sapiens
tgctacataatccaa

SEQ ID NO: 562037 - DNA, 15 bp, Homo sapiens
gctacataatccaac

SEQ ID NO: 562038 - DNA, 15 bp, Homo sapiens
ctacataatccaact

SEQ ID NO: 562039 - DNA, 15 bp, Homo sapiens
tacataatccaactc

SEQ ID NO: 562040 - DNA, 15 bp, Homo sapiens
acataatccaactct

SEQ ID NO: 562041 - DNA, 15 bp, Homo sapiens
cataatccaactctc

SEQ ID NO: 562042 - DNA, 15 bp, Homo sapiens
ataatccaactctcc

SEQ ID NO: 562043 - DNA, 15 bp, Homo sapiens
taatccaactctccc

SEQ ID NO: 562044 - DNA, 15 bp, Homo sapiens
aatccaactctcccg

SEQ ID NO: 562045 - DNA, 15 bp, Homo sapiens
atccaactctcccga

SEQ ID NO: 562046 - DNA, 15 bp, Homo sapiens
tccaactctcccgag

SEQ ID NO: 562047 - DNA, 15 bp, Homo sapiens
ccaactctcccgagg

SEQ ID NO: 562048 - DNA, 15 bp, Homo sapiens
caactctcccgagga

SEQ ID NO: 562049 - DNA, 15 bp, Homo sapiens
aactctcccgaggat

SEQ ID NO: 562050 - DNA, 15 bp, Homo sapiens
actctcccgaggata

SEQ ID NO: 562051 - DNA, 15 bp, Homo sapiens
ctctcccgaggatat

SEQ ID NO: 562052 - DNA, 15 bp, Homo sapiens
tctcccgaggatatg

SEQ ID NO: 562053 - DNA, 15 bp, Homo sapiens
ctcccgaggatatgt

SEQ ID NO: 562054 - DNA, 15 bp, Homo sapiens
tcccgaggatatgtt

SEQ ID NO: 562055 - DNA, 15 bp, Homo sapiens
cccgaggatatgttt

SEQ ID NO: 562056 - DNA, 15 bp, Homo sapiens
ccgaggatatgtttc

SEQ ID NO: 562057 - DNA, 15 bp, Homo sapiens
cgaggatatgtttct

SEQ ID NO: 562058 - DNA, 15 bp, Homo sapiens
gaggatatgtttctc

SEQ ID NO: 562059 - DNA, 15 bp, Homo sapiens
aggatatgtttctct

SEQ ID NO: 562060 - DNA, 15 bp, Homo sapiens
ggatatgtttctcta

SEQ ID NO: 562061 - DNA, 15 bp, Homo sapiens
gatatgtttctctag

SEQ ID NO: 562062 - DNA, 15 bp, Homo sapiens
atatgtttctctaga

SEQ ID NO: 562063 - DNA, 15 bp, Homo sapiens
tatgtttctctagaa

SEQ ID NO: 562064 - DNA, 15 bp, Homo sapiens
atgtttctctagaat

SEQ ID NO: 562065 - DNA, 15 bp, Homo sapiens
tgtttctctagaatt

SEQ ID NO: 562066 - DNA, 15 bp, Homo sapiens
gtttctctagaattc

SEQ ID NO: 562067 - DNA, 15 bp, Homo sapiens
tttctctagaattct

SEQ ID NO: 562068 - DNA, 15 bp, Homo sapiens
ttctctagaattctg

SEQ ID NO: 562069 - DNA, 15 bp, Homo sapiens
tctctagaattctga

SEQ ID NO: 562070 - DNA, 15 bp, Homo sapiens
ctctagaattctgaa

SEQ ID NO: 562071 - DNA, 15 bp, Homo sapiens
tctagaattctgaaa

SEQ ID NO: 562072 - DNA, 15 bp, Homo sapiens
ctagaattctgaaaa

SEQ ID NO: 562073 - DNA, 15 bp, Homo sapiens
tagaattctgaaaag

SEQ ID NO: 562074 - DNA, 15 bp, Homo sapiens
agaattctgaaaagg

SEQ ID NO: 562075 - DNA, 15 bp, Homo sapiens
gaattctgaaaaggt

SEQ ID NO: 562076 - DNA, 15 bp, Homo sapiens
aattctgaaaaggtg

SEQ ID NO: 562077 - DNA, 15 bp, Homo sapiens
attctgaaaaggtgc

SEQ ID NO: 562078 - DNA, 15 bp, Homo sapiens
ttctgaaaaggtgca

SEQ ID NO: 562079 - DNA, 15 bp, Homo sapiens
tctgaaaaggtgcaa

SEQ ID NO: 562080 - DNA, 15 bp, Homo sapiens
ctgaaaaggtgcaaa

SEQ ID NO: 562081 - DNA, 15 bp, Homo sapiens
tgaaaaggtgcaaaa

SEQ ID NO: 562082 - DNA, 15 bp, Homo sapiens
gaaaaggtgcaaaat

SEQ ID NO: 562083 - DNA, 15 bp, Homo sapiens
aaaaggtgcaaaatt

SEQ ID NO: 562084 - DNA, 15 bp, Homo sapiens
aaaggtgcaaaatta

SEQ ID NO: 562085 - DNA, 15 bp, Homo sapiens
aaggtgcaaaattat

SEQ ID NO: 562086 - DNA, 15 bp, Homo sapiens
aggtgcaaaattatt

SEQ ID NO: 562087 - DNA, 15 bp, Homo sapiens
ggtgcaaaattattt

SEQ ID NO: 562088 - DNA, 15 bp, Homo sapiens
gtgcaaaattatttc

SEQ ID NO: 562089 - DNA, 15 bp, Homo sapiens
tgcaaaattatttcc

SEQ ID NO: 562090 - DNA, 15 bp, Homo sapiens
gcaaaattatttcca

SEQ ID NO: 562091 - DNA, 15 bp, Homo sapiens
caaaattatttccat

SEQ ID NO: 562092 - DNA, 15 bp, Homo sapiens
aaaattatttccatt

SEQ ID NO: 562093 - DNA, 15 bp, Homo sapiens
aaattatttccattt

SEQ ID NO: 562094 - DNA, 15 bp, Homo sapiens
aattatttccatttg

SEQ ID NO: 562095 - DNA, 15 bp, Homo sapiens
attatttccatttgc

SEQ ID NO: 562096 - DNA, 15 bp, Homo sapiens
ttatttccatttgcc

SEQ ID NO: 562097 - DNA, 15 bp, Homo sapiens
tatttccatttgcca

SEQ ID NO: 562098 - DNA, 15 bp, Homo sapiens
atttccatttgccaa

SEQ ID NO: 562099 - DNA, 15 bp, Homo sapiens
tttccatttgccaat

SEQ ID NO: 562100 - DNA, 15 bp, Homo sapiens
ttccatttgccaatg

SEQ ID NO: 562101 - DNA, 15 bp, Homo sapiens
tccatttgccaatga

SEQ ID NO: 562102 - DNA, 15 bp, Homo sapiens
ccatttgccaatgat

SEQ ID NO: 562103 - DNA, 15 bp, Homo sapiens
catttgccaatgatc

SEQ ID NO: 562104 - DNA, 15 bp, Homo sapiens
atttgccaatgatcc

SEQ ID NO: 562105 - DNA, 15 bp, Homo sapiens
tttgccaatgatcca

SEQ ID NO: 562106 - DNA, 15 bp, Homo sapiens
ttgccaatgatccat

SEQ ID NO: 562107 - DNA, 15 bp, Homo sapiens
tgccaatgatccatg

SEQ ID NO: 562108 - DNA, 15 bp, Homo sapiens
gccaatgatccatgc

SEQ ID NO: 562109 - DNA, 15 bp, Homo sapiens
ccaatgatccatgcc

SEQ ID NO: 562110 - DNA, 15 bp, Homo sapiens
caatgatccatgcct

SEQ ID NO: 562111 - DNA, 15 bp, Homo sapiens
aatgatccatgccta

SEQ ID NO: 562112 - DNA, 15 bp, Homo sapiens
atgatccatgcctaa

SEQ ID NO: 562113 - DNA, 15 bp, Homo sapiens
tgatccatgcctaat

SEQ ID NO: 562114 - DNA, 15 bp, Homo sapiens
gatccatgcctaatt

SEQ ID NO: 562115 - DNA, 15 bp, Homo sapiens
atccatgcctaattg

SEQ ID NO: 562116 - DNA, 15 bp, Homo sapiens
tccatgcctaattgc

SEQ ID NO: 562117 - DNA, 15 bp, Homo sapiens
ccatgcctaattgct

SEQ ID NO: 562118 - DNA, 15 bp, Homo sapiens
catgcctaattgctt

SEQ ID NO: 562119 - DNA, 15 bp, Homo sapiens
atgcctaattgcttc

SEQ ID NO: 562120 - DNA, 15 bp, Homo sapiens
tgcctaattgcttct

SEQ ID NO: 562121 - DNA, 15 bp, Homo sapiens
gcctaattgcttctg

SEQ ID NO: 562122 - DNA, 15 bp, Homo sapiens
cctaattgcttctgg

SEQ ID NO: 562123 - DNA, 15 bp, Homo sapiens
ctaattgcttctgga

SEQ ID NO: 562124 - DNA, 15 bp, Homo sapiens
taattgcttctggag

SEQ ID NO: 562125 - DNA, 15 bp, Homo sapiens
aattgcttctggaga

SEQ ID NO: 562126 - DNA, 15 bp, Homo sapiens
attgcttctggagag

SEQ ID NO: 562127 - DNA, 15 bp, Homo sapiens
ttgcttctggagagt

SEQ ID NO: 562128 - DNA, 15 bp, Homo sapiens
tgcttctggagagta

SEQ ID NO: 562129 - DNA, 15 bp, Homo sapiens
gcttctggagagtaa

SEQ ID NO: 562130 - DNA, 15 bp, Homo sapiens
cttctggagagtaaa

SEQ ID NO: 562131 - DNA, 15 bp, Homo sapiens
ttctggagagtaaaa

SEQ ID NO: 562132 - DNA, 15 bp, Homo sapiens
tctggagagtaaaag

SEQ ID NO: 562133 - DNA, 15 bp, Homo sapiens
ctggagagtaaaaga

SEQ ID NO: 562134 - DNA, 15 bp, Homo sapiens
tggagagtaaaagag

SEQ ID NO: 562135 - DNA, 15 bp, Homo sapiens
ggagagtaaaagagc

SEQ ID NO: 562136 - DNA, 15 bp, Homo sapiens
gagagtaaaagagca

SEQ ID NO: 562137 - DNA, 15 bp, Homo sapiens
agagtaaaagagcaa

SEQ ID NO: 562138 - DNA, 15 bp, Homo sapiens
gagtaaaagagcaag

SEQ ID NO: 562139 - DNA, 15 bp, Homo sapiens
agtaaaagagcaaga

SEQ ID NO: 562140 - DNA, 15 bp, Homo sapiens
gtaaaagagcaagaa

SEQ ID NO: 562141 - DNA, 15 bp, Homo sapiens
taaaagagcaagaaa

SEQ ID NO: 562142 - DNA, 15 bp, Homo sapiens
aaaagagcaagaaat

SEQ ID NO: 562143 - DNA, 15 bp, Homo sapiens
aaagagcaagaaatg

SEQ ID NO: 562144 - DNA, 15 bp, Homo sapiens
aagagcaagaaatgt

SEQ ID NO: 562145 - DNA, 15 bp, Homo sapiens
agagcaagaaatgta

SEQ ID NO: 562146 - DNA, 15 bp, Homo sapiens
gagcaagaaatgtat

SEQ ID NO: 562147 - DNA, 15 bp, Homo sapiens
agcaagaaatgtatc

SEQ ID NO: 562148 - DNA, 15 bp, Homo sapiens
gcaagaaatgtatct

SEQ ID NO: 562149 - DNA, 15 bp, Homo sapiens
caagaaatgtatctg

SEQ ID NO: 562150 - DNA, 15 bp, Homo sapiens
aagaaatgtatctga

SEQ ID NO: 562151 - DNA, 15 bp, Homo sapiens
agaaatgtatctgag

SEQ ID NO: 562152 - DNA, 15 bp, Homo sapiens
gaaatgtatctgaga

SEQ ID NO: 562153 - DNA, 15 bp, Homo sapiens
aaatgtatctgagag

SEQ ID NO: 562154 - DNA, 15 bp, Homo sapiens
aatgtatctgagaga

SEQ ID NO: 562155 - DNA, 15 bp, Homo sapiens
atgtatctgagagag

SEQ ID NO: 562156 - DNA, 15 bp, Homo sapiens
tgtatctgagagaga

SEQ ID NO: 562157 - DNA, 15 bp, Homo sapiens
gtatctgagagagag

SEQ ID NO: 562158 - DNA, 15 bp, Homo sapiens
tatctgagagagaga

SEQ ID NO: 562159 - DNA, 15 bp, Homo sapiens
atctgagagagagag

SEQ ID NO: 562160 - DNA, 15 bp, Homo sapiens
tctgagagagagaga

SEQ ID NO: 562161 - DNA, 15 bp, Homo sapiens
ctgagagagagagag

SEQ ID NO: 562162 - DNA, 15 bp, Homo sapiens
tgagagagagagagg

SEQ ID NO: 562163 - DNA, 15 bp, Homo sapiens
gagagagagagagga

SEQ ID NO: 562164 - DNA, 15 bp, Homo sapiens
agagagagagaggaa

SEQ ID NO: 562165 - DNA, 15 bp, Homo sapiens
gagagagagaggaag

SEQ ID NO: 562166 - DNA, 15 bp, Homo sapiens
agagagagaggaaga

SEQ ID NO: 562167 - DNA, 15 bp, Homo sapiens
gagagagaggaagac

SEQ ID NO: 562168 - DNA, 15 bp, Homo sapiens
agagagaggaagaca

SEQ ID NO: 562169 - DNA, 15 bp, Homo sapiens
gagagaggaagacat

SEQ ID NO: 562170 - DNA, 15 bp, Homo sapiens
agagaggaagacata

SEQ ID NO: 562171 - DNA, 15 bp, Homo sapiens
gagaggaagacatac

SEQ ID NO: 562172 - DNA, 15 bp, Homo sapiens
agaggaagacatact

SEQ ID NO: 562173 - DNA, 15 bp, Homo sapiens
gaggaagacatactt

SEQ ID NO: 562174 - DNA, 15 bp, Homo sapiens
aggaagacatacttg

SEQ ID NO: 562175 - DNA, 15 bp, Homo sapiens
ggaagacatacttgt

SEQ ID NO: 562176 - DNA, 15 bp, Homo sapiens
gaagacatacttgta

SEQ ID NO: 562177 - DNA, 15 bp, Homo sapiens
aagacatacttgtac

SEQ ID NO: 562178 - DNA, 15 bp, Homo sapiens
agacatacttgtaca

SEQ ID NO: 562179 - DNA, 15 bp, Homo sapiens
gacatacttgtacaa

SEQ ID NO: 562180 - DNA, 15 bp, Homo sapiens
acatacttgtacaat

SEQ ID NO: 562181 - DNA, 15 bp, Homo sapiens
catacttgtacaatg

SEQ ID NO: 562182 - DNA, 15 bp, Homo sapiens
atacttgtacaatga

SEQ ID NO: 562183 - DNA, 15 bp, Homo sapiens
tacttgtacaatgac

SEQ ID NO: 562184 - DNA, 15 bp, Homo sapiens
acttgtacaatgaca

SEQ ID NO: 562185 - DNA, 15 bp, Homo sapiens
cttgtacaatgacac

SEQ ID NO: 562186 - DNA, 15 bp, Homo sapiens
ttgtacaatgacact

SEQ ID NO: 562187 - DNA, 15 bp, Homo sapiens
tgtacaatgacactt

SEQ ID NO: 562188 - DNA, 15 bp, Homo sapiens
gtacaatgacacttt

SEQ ID NO: 562189 - DNA, 15 bp, Homo sapiens
tacaatgacacttta

SEQ ID NO: 562190 - DNA, 15 bp, Homo sapiens
acaatgacactttag

SEQ ID NO: 562191 - DNA, 15 bp, Homo sapiens
caatgacactttaga

SEQ ID NO: 562192 - DNA, 15 bp, Homo sapiens
aatgacactttagag

SEQ ID NO: 562193 - DNA, 15 bp, Homo sapiens
atgacactttagagg

SEQ ID NO: 562194 - DNA, 15 bp, Homo sapiens
tgacactttagagga

SEQ ID NO: 562195 - DNA, 15 bp, Homo sapiens
gacactttagaggag

SEQ ID NO: 562196 - DNA, 15 bp, Homo sapiens
acactttagaggagc

SEQ ID NO: 562197 - DNA, 15 bp, Homo sapiens
cactttagaggagct

SEQ ID NO: 562198 - DNA, 15 bp, Homo sapiens
actttagaggagctc

SEQ ID NO: 562199 - DNA, 15 bp, Homo sapiens
ctttagaggagctcc

SEQ ID NO: 562200 - DNA, 15 bp, Homo sapiens
tttagaggagctccg

SEQ ID NO: 562201 - DNA, 15 bp, Homo sapiens
ttagaggagctccgc

SEQ ID NO: 562202 - DNA, 15 bp, Homo sapiens
tagaggagctccgct

SEQ ID NO: 562203 - DNA, 15 bp, Homo sapiens
agaggagctccgctt

SEQ ID NO: 562204 - DNA, 15 bp, Homo sapiens
gaggagctccgcttt

SEQ ID NO: 562205 - DNA, 15 bp, Homo sapiens
aggagctccgctttc

SEQ ID NO: 562206 - DNA, 15 bp, Homo sapiens
ggagctccgctttct

SEQ ID NO: 562207 - DNA, 15 bp, Homo sapiens
gagctccgctttctg

SEQ ID NO: 562208 - DNA, 15 bp, Homo sapiens
agctccgctttctgg

SEQ ID NO: 562209 - DNA, 15 bp, Homo sapiens
gctccgctttctggc

SEQ ID NO: 562210 - DNA, 15 bp, Homo sapiens
ctccgctttctggct

SEQ ID NO: 562211 - DNA, 15 bp, Homo sapiens
tccgctttctggctt

SEQ ID NO: 562212 - DNA, 15 bp, Homo sapiens
ccgctttctggcttc

SEQ ID NO: 562213 - DNA, 15 bp, Homo sapiens
cgctttctggcttca

SEQ ID NO: 562214 - DNA, 15 bp, Homo sapiens
gctttctggcttcag

SEQ ID NO: 562215 - DNA, 15 bp, Homo sapiens
ctttctggcttcaga

SEQ ID NO: 562216 - DNA, 15 bp, Homo sapiens
tttctggcttcagag

SEQ ID NO: 562217 - DNA, 15 bp, Homo sapiens
ttctggcttcagagc

SEQ ID NO: 562218 - DNA, 15 bp, Homo sapiens
tctggcttcagagca

SEQ ID NO: 562219 - DNA, 15 bp, Homo sapiens
ctggcttcagagcag

SEQ ID NO: 562220 - DNA, 15 bp, Homo sapiens
tggcttcagagcagt

SEQ ID NO: 562221 - DNA, 15 bp, Homo sapiens
ggcttcagagcagtg

SEQ ID NO: 562222 - DNA, 15 bp, Homo sapiens
gcttcagagcagtgt

SEQ ID NO: 562223 - DNA, 15 bp, Homo sapiens
cttcagagcagtgta

SEQ ID NO: 562224 - DNA, 15 bp, Homo sapiens
ttcagagcagtgtaa

SEQ ID NO: 562225 - DNA, 15 bp, Homo sapiens
tcagagcagtgtaac

SEQ ID NO: 562226 - DNA, 15 bp, Homo sapiens
cagagcagtgtaact

SEQ ID NO: 562227 - DNA, 15 bp, Homo sapiens
agagcagtgtaactc

SEQ ID NO: 562228 - DNA, 15 bp, Homo sapiens
gagcagtgtaactca

SEQ ID NO: 562229 - DNA, 15 bp, Homo sapiens
agcagtgtaactcac

SEQ ID NO: 562230 - DNA, 15 bp, Homo sapiens
gcagtgtaactcaca

SEQ ID NO: 562231 - DNA, 15 bp, Homo sapiens
cagtgtaactcacag

SEQ ID NO: 562232 - DNA, 15 bp, Homo sapiens
agtgtaactcacagg

SEQ ID NO: 562233 - DNA, 15 bp, Homo sapiens
gtgtaactcacaggt

SEQ ID NO: 562234 - DNA, 15 bp, Homo sapiens
tgtaactcacaggtg

SEQ ID NO: 562235 - DNA, 15 bp, Homo sapiens
gtaactcacaggtga

SEQ ID NO: 562236 - DNA, 15 bp, Homo sapiens
taactcacaggtgag

SEQ ID NO: 562237 - DNA, 15 bp, Homo sapiens
aactcacaggtgagg

SEQ ID NO: 562238 - DNA, 15 bp, Homo sapiens
actcacaggtgaggt

SEQ ID NO: 562239 - DNA, 15 bp, Homo sapiens
ctcacaggtgaggta

SEQ ID NO: 562240 - DNA, 15 bp, Homo sapiens
tcacaggtgaggtaa

SEQ ID NO: 562241 - DNA, 15 bp, Homo sapiens
cacaggtgaggtaaa

SEQ ID NO: 562242 - DNA, 15 bp, Homo sapiens
acaggtgaggtaaag

SEQ ID NO: 562243 - DNA, 15 bp, Homo sapiens
caggtgaggtaaagc

SEQ ID NO: 562244 - DNA, 15 bp, Homo sapiens
aggtgaggtaaagca

SEQ ID NO: 562245 - DNA, 15 bp, Homo sapiens
ggtgaggtaaagcag

SEQ ID NO: 562246 - DNA, 15 bp, Homo sapiens
gtgaggtaaagcagg

SEQ ID NO: 562247 - DNA, 15 bp, Homo sapiens
tgaggtaaagcagga

SEQ ID NO: 562248 - DNA, 15 bp, Homo sapiens
gaggtaaagcaggat

SEQ ID NO: 562249 - DNA, 15 bp, Homo sapiens
aggtaaagcaggatg

SEQ ID NO: 562250 - DNA, 15 bp, Homo sapiens
ggtaaagcaggatgg

SEQ ID NO: 562251 - DNA, 15 bp, Homo sapiens
gtaaagcaggatggt

SEQ ID NO: 562252 - DNA, 15 bp, Homo sapiens
taaagcaggatggtg

SEQ ID NO: 562253 - DNA, 15 bp, Homo sapiens
aaagcaggatggtga

SEQ ID NO: 562254 - DNA, 15 bp, Homo sapiens
aagcaggatggtgag

SEQ ID NO: 562255 - DNA, 15 bp, Homo sapiens
agcaggatggtgaga

SEQ ID NO: 562256 - DNA, 15 bp, Homo sapiens
gcaggatggtgagaa

SEQ ID NO: 562257 - DNA, 15 bp, Homo sapiens
caggatggtgagaag

SEQ ID NO: 562258 - DNA, 15 bp, Homo sapiens
aggatggtgagaaga

SEQ ID NO: 562259 - DNA, 15 bp, Homo sapiens
ggatggtgagaagag

SEQ ID NO: 562260 - DNA, 15 bp, Homo sapiens
gatggtgagaagagg

SEQ ID NO: 562261 - DNA, 15 bp, Homo sapiens
atggtgagaagagga

SEQ ID NO: 562262 - DNA, 15 bp, Homo sapiens
tggtgagaagaggaa

SEQ ID NO: 562263 - DNA, 15 bp, Homo sapiens
ggtgagaagaggaaa

SEQ ID NO: 562264 - DNA, 15 bp, Homo sapiens
gtgagaagaggaaag

SEQ ID NO: 562265 - DNA, 15 bp, Homo sapiens
tgagaagaggaaagg

SEQ ID NO: 562266 - DNA, 15 bp, Homo sapiens
gagaagaggaaaggg

SEQ ID NO: 562267 - DNA, 15 bp, Homo sapiens
agaagaggaaagggg

SEQ ID NO: 562268 - DNA, 15 bp, Homo sapiens
gaagaggaaaggggc

SEQ ID NO: 562269 - DNA, 15 bp, Homo sapiens
aagaggaaaggggct

SEQ ID NO: 562270 - DNA, 15 bp, Homo sapiens
agaggaaaggggctt

SEQ ID NO: 562271 - DNA, 15 bp, Homo sapiens
gaggaaaggggcttt

SEQ ID NO: 562272 - DNA, 15 bp, Homo sapiens
aggaaaggggctttg

SEQ ID NO: 562273 - DNA, 15 bp, Homo sapiens
ggaaaggggctttgg

SEQ ID NO: 562274 - DNA, 15 bp, Homo sapiens
gaaaggggctttggg

SEQ ID NO: 562275 - DNA, 15 bp, Homo sapiens
aaaggggctttgggg

SEQ ID NO: 562276 - DNA, 15 bp, Homo sapiens
aaggggctttggggg

SEQ ID NO: 562277 - DNA, 15 bp, Homo sapiens
aggggctttggggga

SEQ ID NO: 562278 - DNA, 15 bp, Homo sapiens
ggggctttgggggaa

SEQ ID NO: 562279 - DNA, 15 bp, Homo sapiens
gggctttgggggaac

SEQ ID NO: 562280 - DNA, 15 bp, Homo sapiens
ggctttgggggaacc

SEQ ID NO: 562281 - DNA, 15 bp, Homo sapiens
gctttgggggaaccc

SEQ ID NO: 562282 - DNA, 15 bp, Homo sapiens
ctttgggggaaccca

SEQ ID NO: 562283 - DNA, 15 bp, Homo sapiens
tttgggggaacccac

SEQ ID NO: 562284 - DNA, 15 bp, Homo sapiens
ttgggggaacccacc

SEQ ID NO: 562285 - DNA, 15 bp, Homo sapiens
tgggggaacccacct

SEQ ID NO: 562286 - DNA, 15 bp, Homo sapiens
gggggaacccacctc

SEQ ID NO: 562287 - DNA, 15 bp, Homo sapiens
ggggaacccacctct

SEQ ID NO: 562288 - DNA, 15 bp, Homo sapiens
gggaacccacctctt

SEQ ID NO: 562289 - DNA, 15 bp, Homo sapiens
ggaacccacctcttc

SEQ ID NO: 562290 - DNA, 15 bp, Homo sapiens
gaacccacctcttca

SEQ ID NO: 562291 - DNA, 15 bp, Homo sapiens
aacccacctcttcag

SEQ ID NO: 562292 - DNA, 15 bp, Homo sapiens
acccacctcttcagc

SEQ ID NO: 562293 - DNA, 15 bp, Homo sapiens
cccacctcttcagct

SEQ ID NO: 562294 - DNA, 15 bp, Homo sapiens
ccacctcttcagctt

SEQ ID NO: 562295 - DNA, 15 bp, Homo sapiens
cacctcttcagctta

SEQ ID NO: 562296 - DNA, 15 bp, Homo sapiens
acctcttcagcttag

SEQ ID NO: 562297 - DNA, 15 bp, Homo sapiens
cctcttcagcttagt

SEQ ID NO: 562298 - DNA, 15 bp, Homo sapiens
ctcttcagcttagtg

SEQ ID NO: 562299 - DNA, 15 bp, Homo sapiens
tcttcagcttagtga

SEQ ID NO: 562300 - DNA, 15 bp, Homo sapiens
cttcagcttagtgaa

SEQ ID NO: 562301 - DNA, 15 bp, Homo sapiens
ttcagcttagtgaag

SEQ ID NO: 562302 - DNA, 15 bp, Homo sapiens
tcagcttagtgaagt

SEQ ID NO: 562303 - DNA, 15 bp, Homo sapiens
cagcttagtgaagtc

SEQ ID NO: 562304 - DNA, 15 bp, Homo sapiens
agcttagtgaagtcc

SEQ ID NO: 562305 - DNA, 15 bp, Homo sapiens
gcttagtgaagtcct

SEQ ID NO: 562306 - DNA, 15 bp, Homo sapiens
cttagtgaagtccta

SEQ ID NO: 562307 - DNA, 15 bp, Homo sapiens
ttagtgaagtcctat

SEQ ID NO: 562308 - DNA, 15 bp, Homo sapiens
tagtgaagtcctata

SEQ ID NO: 562309 - DNA, 15 bp, Homo sapiens
agtgaagtcctataa

SEQ ID NO: 562310 - DNA, 15 bp, Homo sapiens
gtgaagtcctataat

SEQ ID NO: 562311 - DNA, 15 bp, Homo sapiens
tgaagtcctataatg

SEQ ID NO: 562312 - DNA, 15 bp, Homo sapiens
gaagtcctataatgg

SEQ ID NO: 562313 - DNA, 15 bp, Homo sapiens
aagtcctataatggt

SEQ ID NO: 562314 - DNA, 15 bp, Homo sapiens
agtcctataatggtt

SEQ ID NO: 562315 - DNA, 15 bp, Homo sapiens
gtcctataatggttt

SEQ ID NO: 562316 - DNA, 15 bp, Homo sapiens
tcctataatggtttc

SEQ ID NO: 562317 - DNA, 15 bp, Homo sapiens
cctataatggtttct

SEQ ID NO: 562318 - DNA, 15 bp, Homo sapiens
ctataatggtttcta

SEQ ID NO: 562319 - DNA, 15 bp, Homo sapiens
tataatggtttctat

SEQ ID NO: 562320 - DNA, 15 bp, Homo sapiens
ataatggtttctatt

SEQ ID NO: 562321 - DNA, 15 bp, Homo sapiens
taatggtttctattg

SEQ ID NO: 562322 - DNA, 15 bp, Homo sapiens
aatggtttctattgg

SEQ ID NO: 562323 - DNA, 15 bp, Homo sapiens
atggtttctattgga

SEQ ID NO: 562324 - DNA, 15 bp, Homo sapiens
tggtttctattggaa

SEQ ID NO: 562325 - DNA, 15 bp, Homo sapiens
ggtttctattggaac

SEQ ID NO: 562326 - DNA, 15 bp, Homo sapiens
gtttctattggaacc

SEQ ID NO: 562327 - DNA, 15 bp, Homo sapiens
tttctattggaaccc

SEQ ID NO: 562328 - DNA, 15 bp, Homo sapiens
ttctattggaacccc

SEQ ID NO: 562329 - DNA, 15 bp, Homo sapiens
tctattggaacccca

SEQ ID NO: 562330 - DNA, 15 bp, Homo sapiens
ctattggaaccccag

SEQ ID NO: 562331 - DNA, 15 bp, Homo sapiens
tattggaaccccagc

SEQ ID NO: 562332 - DNA, 15 bp, Homo sapiens
attggaaccccagcc

SEQ ID NO: 562333 - DNA, 15 bp, Homo sapiens
ttggaaccccagccc

SEQ ID NO: 562334 - DNA, 15 bp, Homo sapiens
tggaaccccagccca

SEQ ID NO: 562335 - DNA, 15 bp, Homo sapiens
ggaaccccagcccag

SEQ ID NO: 562336 - DNA, 15 bp, Homo sapiens
gaaccccagcccaga

SEQ ID NO: 562337 - DNA, 15 bp, Homo sapiens
aaccccagcccagat

SEQ ID NO: 562338 - DNA, 15 bp, Homo sapiens
accccagcccagata

SEQ ID NO: 562339 - DNA, 15 bp, Homo sapiens
ccccagcccagatac

SEQ ID NO: 562340 - DNA, 15 bp, Homo sapiens
cccagcccagatact

SEQ ID NO: 562341 - DNA, 15 bp, Homo sapiens
ccagcccagatactt

SEQ ID NO: 562342 - DNA, 15 bp, Homo sapiens
cagcccagatactta

SEQ ID NO: 562343 - DNA, 15 bp, Homo sapiens
agcccagatacttac

SEQ ID NO: 562344 - DNA, 15 bp, Homo sapiens
gcccagatacttacc

SEQ ID NO: 562345 - DNA, 15 bp, Homo sapiens
cccagatacttacca

SEQ ID NO: 562346 - DNA, 15 bp, Homo sapiens
ccagatacttaccag

SEQ ID NO: 562347 - DNA, 15 bp, Homo sapiens
cagatacttaccagc

SEQ ID NO: 562348 - DNA, 15 bp, Homo sapiens
agatacttaccagcg

SEQ ID NO: 562349 - DNA, 15 bp, Homo sapiens
gatacttaccagcga

SEQ ID NO: 562350 - DNA, 15 bp, Homo sapiens
atacttaccagcgat

SEQ ID NO: 562351 - DNA, 15 bp, Homo sapiens
tacttaccagcgatg

SEQ ID NO: 562352 - DNA, 15 bp, Homo sapiens
acttaccagcgatgg

SEQ ID NO: 562353 - DNA, 15 bp, Homo sapiens
cttaccagcgatggg

SEQ ID NO: 562354 - DNA, 15 bp, Homo sapiens
ttaccagcgatgggg

SEQ ID NO: 562355 - DNA, 15 bp, Homo sapiens
taccagcgatggggc

SEQ ID NO: 562356 - DNA, 15 bp, Homo sapiens
accagcgatggggct

SEQ ID NO: 562357 - DNA, 15 bp, Homo sapiens
ccagcgatggggctt

SEQ ID NO: 562358 - DNA, 15 bp, Homo sapiens
cagcgatggggcttt

SEQ ID NO: 562359 - DNA, 15 bp, Homo sapiens
agcgatggggctttg

SEQ ID NO: 562360 - DNA, 15 bp, Homo sapiens
gcgatggggctttgg

SEQ ID NO: 562361 - DNA, 15 bp, Homo sapiens
cgatggggctttggg

SEQ ID NO: 562362 - DNA, 15 bp, Homo sapiens
gatggggctttgggc

SEQ ID NO: 562363 - DNA, 15 bp, Homo sapiens
atggggctttgggca

SEQ ID NO: 562364 - DNA, 15 bp, Homo sapiens
tggggctttgggcaa

SEQ ID NO: 562365 - DNA, 15 bp, Homo sapiens
ggggctttgggcaaa

SEQ ID NO: 562366 - DNA, 15 bp, Homo sapiens
gggctttgggcaaag

SEQ ID NO: 562367 - DNA, 15 bp, Homo sapiens
ggctttgggcaaagg

SEQ ID NO: 562368 - DNA, 15 bp, Homo sapiens
gctttgggcaaagga

SEQ ID NO: 562369 - DNA, 15 bp, Homo sapiens
ctttgggcaaaggac

SEQ ID NO: 562370 - DNA, 15 bp, Homo sapiens
tttgggcaaaggact

SEQ ID NO: 562371 - DNA, 15 bp, Homo sapiens
ttgggcaaaggactt

SEQ ID NO: 562372 - DNA, 15 bp, Homo sapiens
tgggcaaaggactta

SEQ ID NO: 562373 - DNA, 15 bp, Homo sapiens
gggcaaaggacttaa

SEQ ID NO: 562374 - DNA, 15 bp, Homo sapiens
ggcaaaggacttaac

SEQ ID NO: 562375 - DNA, 15 bp, Homo sapiens
gcaaaggacttaacc

SEQ ID NO: 562376 - DNA, 15 bp, Homo sapiens
caaaggacttaacct

SEQ ID NO: 562377 - DNA, 15 bp, Homo sapiens
aaaggacttaacctt

SEQ ID NO: 562378 - DNA, 15 bp, Homo sapiens
aaggacttaaccttt

SEQ ID NO: 562379 - DNA, 15 bp, Homo sapiens
aggacttaacctttt

SEQ ID NO: 562380 - DNA, 15 bp, Homo sapiens
ggacttaacctttta

SEQ ID NO: 562381 - DNA, 15 bp, Homo sapiens
gacttaaccttttaa

SEQ ID NO: 562382 - DNA, 15 bp, Homo sapiens
acttaaccttttaag

SEQ ID NO: 562383 - DNA, 15 bp, Homo sapiens
cttaaccttttaaga

SEQ ID NO: 562384 - DNA, 15 bp, Homo sapiens
ttaaccttttaagac

SEQ ID NO: 562385 - DNA, 15 bp, Homo sapiens
taaccttttaagact

SEQ ID NO: 562386 - DNA, 15 bp, Homo sapiens
aaccttttaagactc

SEQ ID NO: 562387 - DNA, 15 bp, Homo sapiens
accttttaagactcc

SEQ ID NO: 562388 - DNA, 15 bp, Homo sapiens
ccttttaagactcca

SEQ ID NO: 562389 - DNA, 15 bp, Homo sapiens
cttttaagactccat

SEQ ID NO: 562390 - DNA, 15 bp, Homo sapiens
ttttaagactccatt

SEQ ID NO: 562391 - DNA, 15 bp, Homo sapiens
tttaagactccattt

SEQ ID NO: 562392 - DNA, 15 bp, Homo sapiens
ttaagactccatttt

SEQ ID NO: 562393 - DNA, 15 bp, Homo sapiens
taagactccattttg

SEQ ID NO: 562394 - DNA, 15 bp, Homo sapiens
aagactccattttgc

SEQ ID NO: 562395 - DNA, 15 bp, Homo sapiens
agactccattttgca

SEQ ID NO: 562396 - DNA, 15 bp, Homo sapiens
gactccattttgcat

SEQ ID NO: 562397 - DNA, 15 bp, Homo sapiens
actccattttgcatc

SEQ ID NO: 562398 - DNA, 15 bp, Homo sapiens
ctccattttgcatct

SEQ ID NO: 562399 - DNA, 15 bp, Homo sapiens
tccattttgcatctg

SEQ ID NO: 562400 - DNA, 15 bp, Homo sapiens
ccattttgcatctgt

SEQ ID NO: 562401 - DNA, 15 bp, Homo sapiens
cattttgcatctgta

SEQ ID NO: 562402 - DNA, 15 bp, Homo sapiens
attttgcatctgtaa

SEQ ID NO: 562403 - DNA, 15 bp, Homo sapiens
ttttgcatctgtaaa

SEQ ID NO: 562404 - DNA, 15 bp, Homo sapiens
tttgcatctgtaaaa

SEQ ID NO: 562405 - DNA, 15 bp, Homo sapiens
ttgcatctgtaaaat

SEQ ID NO: 562406 - DNA, 15 bp, Homo sapiens
tgcatctgtaaaatg

SEQ ID NO: 562407 - DNA, 15 bp, Homo sapiens
gcatctgtaaaatgg

SEQ ID NO: 562408 - DNA, 15 bp, Homo sapiens
atctgtaaaatgggg

SEQ ID NO: 562409 - DNA, 15 bp, Homo sapiens
tctgtaaaatgggga

SEQ ID NO: 562410 - DNA, 15 bp, Homo sapiens
ctgtaaaatggggat

SEQ ID NO: 562411 - DNA, 15 bp, Homo sapiens
tgtaaaatggggata

SEQ ID NO: 562412 - DNA, 15 bp, Homo sapiens
gtaaaatggggatat

SEQ ID NO: 562413 - DNA, 15 bp, Homo sapiens
taaaatggggatatt

SEQ ID NO: 562414 - DNA, 15 bp, Homo sapiens
aaaatggggatatta

SEQ ID NO: 562415 - DNA, 15 bp, Homo sapiens
aaatggggatattaa

SEQ ID NO: 562416 - DNA, 15 bp, Homo sapiens
aatggggatattaaa

SEQ ID NO: 562417 - DNA, 15 bp, Homo sapiens
atggggatattaaaa

SEQ ID NO: 562418 - DNA, 15 bp, Homo sapiens
tggggatattaaaag

SEQ ID NO: 562419 - DNA, 15 bp, Homo sapiens
ggggatattaaaaga

SEQ ID NO: 562420 - DNA, 15 bp, Homo sapiens
gggatattaaaagat

SEQ ID NO: 562421 - DNA, 15 bp, Homo sapiens
ggatattaaaagatt

SEQ ID NO: 562422 - DNA, 15 bp, Homo sapiens
gatattaaaagattt

SEQ ID NO: 562423 - DNA, 15 bp, Homo sapiens
atattaaaagatttc

SEQ ID NO: 562424 - DNA, 15 bp, Homo sapiens
tattaaaagatttcc

SEQ ID NO: 562425 - DNA, 15 bp, Homo sapiens
attaaaagatttcct

SEQ ID NO: 562426 - DNA, 15 bp, Homo sapiens
ttaaaagatttcctt

SEQ ID NO: 562427 - DNA, 15 bp, Homo sapiens
taaaagatttccttg

SEQ ID NO: 562428 - DNA, 15 bp, Homo sapiens
aaaagatttccttgg

SEQ ID NO: 562429 - DNA, 15 bp, Homo sapiens
aaagatttccttggt

SEQ ID NO: 562430 - DNA, 15 bp, Homo sapiens
aagatttccttggta

SEQ ID NO: 562431 - DNA, 15 bp, Homo sapiens
agatttccttggtaa

SEQ ID NO: 562432 - DNA, 15 bp, Homo sapiens
gatttccttggtaag

SEQ ID NO: 562433 - DNA, 15 bp, Homo sapiens
atttccttggtaagt

SEQ ID NO: 562434 - DNA, 15 bp, Homo sapiens
tttccttggtaagta

SEQ ID NO: 562435 - DNA, 15 bp, Homo sapiens
ttccttggtaagtaa

SEQ ID NO: 562436 - DNA, 15 bp, Homo sapiens
tccttggtaagtaaa

SEQ ID NO: 562437 - DNA, 15 bp, Homo sapiens
ccttggtaagtaaaa

SEQ ID NO: 562438 - DNA, 15 bp, Homo sapiens
cttggtaagtaaaaa

SEQ ID NO: 562439 - DNA, 15 bp, Homo sapiens
ttggtaagtaaaaat

SEQ ID NO: 562440 - DNA, 15 bp, Homo sapiens
tggtaagtaaaaata

SEQ ID NO: 562441 - DNA, 15 bp, Homo sapiens
ggtaagtaaaaatag

SEQ ID NO: 562442 - DNA, 15 bp, Homo sapiens
gtaagtaaaaatagg

SEQ ID NO: 562443 - DNA, 15 bp, Homo sapiens
taagtaaaaataggg

SEQ ID NO: 562444 - DNA, 15 bp, Homo sapiens
aagtaaaaatagggc

SEQ ID NO: 562445 - DNA, 15 bp, Homo sapiens
agtaaaaatagggct

SEQ ID NO: 562446 - DNA, 15 bp, Homo sapiens
gtaaaaatagggctc

SEQ ID NO: 562447 - DNA, 15 bp, Homo sapiens
taaaaatagggctcg

SEQ ID NO: 562448 - DNA, 15 bp, Homo sapiens
aaaaatagggctcgc

SEQ ID NO: 562449 - DNA, 15 bp, Homo sapiens
aaaatagggctcgcg

SEQ ID NO: 562450 - DNA, 15 bp, Homo sapiens
aaatagggctcgcgg

SEQ ID NO: 562451 - DNA, 15 bp, Homo sapiens
aatagggctcgcgga

SEQ ID NO: 562452 - DNA, 15 bp, Homo sapiens
atagggctcgcggag

SEQ ID NO: 562453 - DNA, 15 bp, Homo sapiens
tagggctcgcggagc

SEQ ID NO: 562454 - DNA, 15 bp, Homo sapiens
agggctcgcggagca

SEQ ID NO: 562455 - DNA, 15 bp, Homo sapiens
gggctcgcggagcag

SEQ ID NO: 562456 - DNA, 15 bp, Homo sapiens
ggctcgcggagcagg

SEQ ID NO: 562457 - DNA, 15 bp, Homo sapiens
gctcgcggagcaggt

SEQ ID NO: 562458 - DNA, 15 bp, Homo sapiens
ctcgcggagcaggtg

SEQ ID NO: 562459 - DNA, 15 bp, Homo sapiens
tcgcggagcaggtgg

SEQ ID NO: 562460 - DNA, 15 bp, Homo sapiens
cgcggagcaggtggc

SEQ ID NO: 562461 - DNA, 15 bp, Homo sapiens
gcggagcaggtggca

SEQ ID NO: 562462 - DNA, 15 bp, Homo sapiens
cggagcaggtggcac

SEQ ID NO: 562463 - DNA, 15 bp, Homo sapiens
ggagcaggtggcaca

SEQ ID NO: 562464 - DNA, 15 bp, Homo sapiens
gagcaggtggcacat

SEQ ID NO: 562465 - DNA, 15 bp, Homo sapiens
agcaggtggcacata

SEQ ID NO: 562466 - DNA, 15 bp, Homo sapiens
gcaggtggcacatag

SEQ ID NO: 562467 - DNA, 15 bp, Homo sapiens
caggtggcacatagc

SEQ ID NO: 562468 - DNA, 15 bp, Homo sapiens
aggtggcacatagca

SEQ ID NO: 562469 - DNA, 15 bp, Homo sapiens
ggtggcacatagcac

SEQ ID NO: 562470 - DNA, 15 bp, Homo sapiens
gtggcacatagcacc

SEQ ID NO: 562471 - DNA, 15 bp, Homo sapiens
tggcacatagcaccc

SEQ ID NO: 562472 - DNA, 15 bp, Homo sapiens
ggcacatagcaccca

SEQ ID NO: 562473 - DNA, 15 bp, Homo sapiens
gcacatagcacccac

SEQ ID NO: 562474 - DNA, 15 bp, Homo sapiens
cacatagcacccacc

SEQ ID NO: 562475 - DNA, 15 bp, Homo sapiens
acatagcacccacca

SEQ ID NO: 562476 - DNA, 15 bp, Homo sapiens
catagcacccaccat

SEQ ID NO: 562477 - DNA, 15 bp, Homo sapiens
atagcacccaccatc

SEQ ID NO: 562478 - DNA, 15 bp, Homo sapiens
tagcacccaccatct

SEQ ID NO: 562479 - DNA, 15 bp, Homo sapiens
agcacccaccatctg

SEQ ID NO: 562480 - DNA, 15 bp, Homo sapiens
gcacccaccatctga

SEQ ID NO: 562481 - DNA, 15 bp, Homo sapiens
cacccaccatctgag

SEQ ID NO: 562482 - DNA, 15 bp, Homo sapiens
acccaccatctgagc

SEQ ID NO: 562483 - DNA, 15 bp, Homo sapiens
cccaccatctgagcc

SEQ ID NO: 562484 - DNA, 15 bp, Homo sapiens
ccaccatctgagccg

SEQ ID NO: 562485 - DNA, 15 bp, Homo sapiens
caccatctgagccgt

SEQ ID NO: 562486 - DNA, 15 bp, Homo sapiens
accatctgagccgtc

SEQ ID NO: 562487 - DNA, 15 bp, Homo sapiens
ccatctgagccgtca

SEQ ID NO: 562488 - DNA, 15 bp, Homo sapiens
catctgagccgtcac

SEQ ID NO: 562489 - DNA, 15 bp, Homo sapiens
atctgagccgtcact

SEQ ID NO: 562490 - DNA, 15 bp, Homo sapiens
tctgagccgtcactg

SEQ ID NO: 562491 - DNA, 15 bp, Homo sapiens
ctgagccgtcactgc

SEQ ID NO: 562492 - DNA, 15 bp, Homo sapiens
tgagccgtcactgct

SEQ ID NO: 562493 - DNA, 15 bp, Homo sapiens
gagccgtcactgctc

SEQ ID NO: 562494 - DNA, 15 bp, Homo sapiens
agccgtcactgctca

SEQ ID NO: 562495 - DNA, 15 bp, Homo sapiens
gccgtcactgctcac

SEQ ID NO: 562496 - DNA, 15 bp, Homo sapiens
ccgtcactgctcaca

SEQ ID NO: 562497 - DNA, 15 bp, Homo sapiens
cgtcactgctcacag

SEQ ID NO: 562498 - DNA, 15 bp, Homo sapiens
gtcactgctcacagg

SEQ ID NO: 562499 - DNA, 15 bp, Homo sapiens
tcactgctcacaggg

SEQ ID NO: 562500 - DNA, 15 bp, Homo sapiens
cactgctcacagggc

SEQ ID NO: 562501 - DNA, 15 bp, Homo sapiens
actgctcacagggca

SEQ ID NO: 562502 - DNA, 15 bp, Homo sapiens
ctgctcacagggcat

SEQ ID NO: 562503 - DNA, 15 bp, Homo sapiens
tgctcacagggcatt

SEQ ID NO: 562504 - DNA, 15 bp, Homo sapiens
gctcacagggcatta

SEQ ID NO: 562505 - DNA, 15 bp, Homo sapiens
ctcacagggcattag

SEQ ID NO: 562506 - DNA, 15 bp, Homo sapiens
tcacagggcattagg

SEQ ID NO: 562507 - DNA, 15 bp, Homo sapiens
cacagggcattaggt

SEQ ID NO: 562508 - DNA, 15 bp, Homo sapiens
acagggcattaggtt

SEQ ID NO: 562509 - DNA, 15 bp, Homo sapiens
cagggcattaggttg

SEQ ID NO: 562510 - DNA, 15 bp, Homo sapiens
agggcattaggttgt

SEQ ID NO: 562511 - DNA, 15 bp, Homo sapiens
gggcattaggttgtt

SEQ ID NO: 562512 - DNA, 15 bp, Homo sapiens
ggcattaggttgttg

SEQ ID NO: 562513 - DNA, 15 bp, Homo sapiens
gcattaggttgttgg

SEQ ID NO: 562514 - DNA, 15 bp, Homo sapiens
cattaggttgttgga

SEQ ID NO: 562515 - DNA, 15 bp, Homo sapiens
attaggttgttggaa

SEQ ID NO: 562516 - DNA, 15 bp, Homo sapiens
ttaggttgttggaat

SEQ ID NO: 562517 - DNA, 15 bp, Homo sapiens
taggttgttggaatg

SEQ ID NO: 562518 - DNA, 15 bp, Homo sapiens
aggttgttggaatga

SEQ ID NO: 562519 - DNA, 15 bp, Homo sapiens
ggttgttggaatgac

SEQ ID NO: 562520 - DNA, 15 bp, Homo sapiens
gttgttggaatgaca

SEQ ID NO: 562521 - DNA, 15 bp, Homo sapiens
ttgttggaatgacat

SEQ ID NO: 562522 - DNA, 15 bp, Homo sapiens
tgttggaatgacatt

SEQ ID NO: 562523 - DNA, 15 bp, Homo sapiens
gttggaatgacattc

SEQ ID NO: 562524 - DNA, 15 bp, Homo sapiens
ttggaatgacattca

SEQ ID NO: 562525 - DNA, 15 bp, Homo sapiens
tggaatgacattcag

SEQ ID NO: 562526 - DNA, 15 bp, Homo sapiens
ggaatgacattcagc

SEQ ID NO: 562527 - DNA, 15 bp, Homo sapiens
gaatgacattcagca

SEQ ID NO: 562528 - DNA, 15 bp, Homo sapiens
aatgacattcagcag

SEQ ID NO: 562529 - DNA, 15 bp, Homo sapiens
atgacattcagcagc

SEQ ID NO: 562530 - DNA, 15 bp, Homo sapiens
tgacattcagcagca

SEQ ID NO: 562531 - DNA, 15 bp, Homo sapiens
gacattcagcagcag

SEQ ID NO: 562532 - DNA, 15 bp, Homo sapiens
acattcagcagcagg

SEQ ID NO: 562533 - DNA, 15 bp, Homo sapiens
cattcagcagcaggc

SEQ ID NO: 562534 - DNA, 15 bp, Homo sapiens
attcagcagcaggct

SEQ ID NO: 562535 - DNA, 15 bp, Homo sapiens
ttcagcagcaggctg

SEQ ID NO: 562536 - DNA, 15 bp, Homo sapiens
tcagcagcaggctgt

SEQ ID NO: 562537 - DNA, 15 bp, Homo sapiens
cagcagcaggctgtg

SEQ ID NO: 562538 - DNA, 15 bp, Homo sapiens
agcagcaggctgtga

SEQ ID NO: 562539 - DNA, 15 bp, Homo sapiens
gcagcaggctgtgac

SEQ ID NO: 562540 - DNA, 15 bp, Homo sapiens
cagcaggctgtgacc

SEQ ID NO: 562541 - DNA, 15 bp, Homo sapiens
agcaggctgtgacct

SEQ ID NO: 562542 - DNA, 15 bp, Homo sapiens
gcaggctgtgacctg

SEQ ID NO: 562543 - DNA, 15 bp, Homo sapiens
caggctgtgacctgt

SEQ ID NO: 562544 - DNA, 15 bp, Homo sapiens
aggctgtgacctgtg

SEQ ID NO: 562545 - DNA, 15 bp, Homo sapiens
ggctgtgacctgtga

SEQ ID NO: 562546 - DNA, 15 bp, Homo sapiens
gctgtgacctgtgaa

SEQ ID NO: 562547 - DNA, 15 bp, Homo sapiens
ctgtgacctgtgaac

SEQ ID NO: 562548 - DNA, 15 bp, Homo sapiens
tgtgacctgtgaacc

SEQ ID NO: 562549 - DNA, 15 bp, Homo sapiens
gtgacctgtgaaccc

SEQ ID NO: 562550 - DNA, 15 bp, Homo sapiens
tgacctgtgaaccca

SEQ ID NO: 562551 - DNA, 15 bp, Homo sapiens
gacctgtgaacccaa

SEQ ID NO: 562552 - DNA, 15 bp, Homo sapiens
acctgtgaacccaaa

SEQ ID NO: 562553 - DNA, 15 bp, Homo sapiens
cctgtgaacccaaac

SEQ ID NO: 562554 - DNA, 15 bp, Homo sapiens
ctgtgaacccaaact

SEQ ID NO: 562555 - DNA, 15 bp, Homo sapiens
tgtgaacccaaactc

SEQ ID NO: 562556 - DNA, 15 bp, Homo sapiens
gtgaacccaaactct

SEQ ID NO: 562557 - DNA, 15 bp, Homo sapiens
tgaacccaaactctc

SEQ ID NO: 562558 - DNA, 15 bp, Homo sapiens
gaacccaaactctcc

SEQ ID NO: 562559 - DNA, 15 bp, Homo sapiens
aacccaaactctcct

SEQ ID NO: 562560 - DNA, 15 bp, Homo sapiens
acccaaactctccta

SEQ ID NO: 562561 - DNA, 15 bp, Homo sapiens
cccaaactctcctaa

SEQ ID NO: 562562 - DNA, 15 bp, Homo sapiens
ccaaactctcctaac

SEQ ID NO: 562563 - DNA, 15 bp, Homo sapiens
caaactctcctaact

SEQ ID NO: 562564 - DNA, 15 bp, Homo sapiens
aaactctcctaactc

SEQ ID NO: 562565 - DNA, 15 bp, Homo sapiens
aactctcctaactcc

SEQ ID NO: 562566 - DNA, 15 bp, Homo sapiens
actctcctaactcct

SEQ ID NO: 562567 - DNA, 15 bp, Homo sapiens
ctctcctaactcctc

SEQ ID NO: 562568 - DNA, 15 bp, Homo sapiens
tctcctaactcctcc

SEQ ID NO: 562569 - DNA, 15 bp, Homo sapiens
ctcctaactcctccc

SEQ ID NO: 562570 - DNA, 15 bp, Homo sapiens
tcctaactcctcccc

SEQ ID NO: 562571 - DNA, 15 bp, Homo sapiens
cctaactcctcccct

SEQ ID NO: 562572 - DNA, 15 bp, Homo sapiens
ctaactcctcccctt

SEQ ID NO: 562573 - DNA, 15 bp, Homo sapiens
taactcctccccttt

SEQ ID NO: 562574 - DNA, 15 bp, Homo sapiens
aactcctcccctttg

SEQ ID NO: 562575 - DNA, 15 bp, Homo sapiens
actcctcccctttgc

SEQ ID NO: 562576 - DNA, 15 bp, Homo sapiens
ctcctcccctttgcc

SEQ ID NO: 562577 - DNA, 15 bp, Homo sapiens
tcctcccctttgcca

SEQ ID NO: 562578 - DNA, 15 bp, Homo sapiens
cctcccctttgccag

SEQ ID NO: 562579 - DNA, 15 bp, Homo sapiens
ctcccctttgccagc

SEQ ID NO: 562580 - DNA, 15 bp, Homo sapiens
tcccctttgccagct

SEQ ID NO: 562581 - DNA, 15 bp, Homo sapiens
ccctttgccagctcc

SEQ ID NO: 562582 - DNA, 15 bp, Homo sapiens
cctttgccagctcct

SEQ ID NO: 562583 - DNA, 15 bp, Homo sapiens
ctttgccagctcctc

SEQ ID NO: 562584 - DNA, 15 bp, Homo sapiens
tttgccagctcctcc

SEQ ID NO: 562585 - DNA, 15 bp, Homo sapiens
ttgccagctcctcca

SEQ ID NO: 562586 - DNA, 15 bp, Homo sapiens
tgccagctcctccac

SEQ ID NO: 562587 - DNA, 15 bp, Homo sapiens
gccagctcctccacc

SEQ ID NO: 562588 - DNA, 15 bp, Homo sapiens
ccagctcctccacct

SEQ ID NO: 562589 - DNA, 15 bp, Homo sapiens
cagctcctccacctt

SEQ ID NO: 562590 - DNA, 15 bp, Homo sapiens
agctcctccaccttc

SEQ ID NO: 562591 - DNA, 15 bp, Homo sapiens
gctcctccaccttca

SEQ ID NO: 562592 - DNA, 15 bp, Homo sapiens
ctcctccaccttcag

SEQ ID NO: 562593 - DNA, 15 bp, Homo sapiens
tcctccaccttcagc

SEQ ID NO: 562594 - DNA, 15 bp, Homo sapiens
cctccaccttcagca

SEQ ID NO: 562595 - DNA, 15 bp, Homo sapiens
ctccaccttcagcac

SEQ ID NO: 562596 - DNA, 15 bp, Homo sapiens
tccaccttcagcaca

SEQ ID NO: 562597 - DNA, 15 bp, Homo sapiens
ccaccttcagcacaa

SEQ ID NO: 562598 - DNA, 15 bp, Homo sapiens
caccttcagcacaac

SEQ ID NO: 562599 - DNA, 15 bp, Homo sapiens
accttcagcacaaca

SEQ ID NO: 562600 - DNA, 15 bp, Homo sapiens
ccttcagcacaacac

SEQ ID NO: 562601 - DNA, 15 bp, Homo sapiens
cttcagcacaacaca

SEQ ID NO: 562602 - DNA, 15 bp, Homo sapiens
ttcagcacaacacag

SEQ ID NO: 562603 - DNA, 15 bp, Homo sapiens
tcagcacaacacagc

SEQ ID NO: 562604 - DNA, 15 bp, Homo sapiens
cagcacaacacagca

SEQ ID NO: 562605 - DNA, 15 bp, Homo sapiens
agcacaacacagcag

SEQ ID NO: 562606 - DNA, 15 bp, Homo sapiens
gcacaacacagcagc

SEQ ID NO: 562607 - DNA, 15 bp, Homo sapiens
cacaacacagcagcc

SEQ ID NO: 562608 - DNA, 15 bp, Homo sapiens
acaacacagcagcca

SEQ ID NO: 562609 - DNA, 15 bp, Homo sapiens
caacacagcagccac

SEQ ID NO: 562610 - DNA, 15 bp, Homo sapiens
aacacagcagccact

SEQ ID NO: 562611 - DNA, 15 bp, Homo sapiens
acacagcagccactc

SEQ ID NO: 562612 - DNA, 15 bp, Homo sapiens
cacagcagccactct

SEQ ID NO: 562613 - DNA, 15 bp, Homo sapiens
acagcagccactctc

SEQ ID NO: 562614 - DNA, 15 bp, Homo sapiens
cagcagccactctcg

SEQ ID NO: 562615 - DNA, 15 bp, Homo sapiens
agcagccactctcgt

SEQ ID NO: 562616 - DNA, 15 bp, Homo sapiens
gcagccactctcgtg

SEQ ID NO: 562617 - DNA, 15 bp, Homo sapiens
cagccactctcgtgc

SEQ ID NO: 562618 - DNA, 15 bp, Homo sapiens
agccactctcgtgca

SEQ ID NO: 562619 - DNA, 15 bp, Homo sapiens
gccactctcgtgcat

SEQ ID NO: 562620 - DNA, 15 bp, Homo sapiens
ccactctcgtgcatg

SEQ ID NO: 562621 - DNA, 15 bp, Homo sapiens
cactctcgtgcatgg

SEQ ID NO: 562622 - DNA, 15 bp, Homo sapiens
actctcgtgcatggg

SEQ ID NO: 562623 - DNA, 15 bp, Homo sapiens
ctctcgtgcatgggc

SEQ ID NO: 562624 - DNA, 15 bp, Homo sapiens
tctcgtgcatgggca

SEQ ID NO: 562625 - DNA, 15 bp, Homo sapiens
ctcgtgcatgggcag

SEQ ID NO: 562626 - DNA, 15 bp, Homo sapiens
tcgtgcatgggcagg

SEQ ID NO: 562627 - DNA, 15 bp, Homo sapiens
cgtgcatgggcaggg

SEQ ID NO: 562628 - DNA, 15 bp, Homo sapiens
gtgcatgggcagggc

SEQ ID NO: 562629 - DNA, 15 bp, Homo sapiens
tgcatgggcagggcc

SEQ ID NO: 562630 - DNA, 15 bp, Homo sapiens
gcatgggcagggcct

SEQ ID NO: 562631 - DNA, 15 bp, Homo sapiens
catgggcagggcctg

SEQ ID NO: 562632 - DNA, 15 bp, Homo sapiens
atgggcagggcctgg

SEQ ID NO: 562633 - DNA, 15 bp, Homo sapiens
tgggcagggcctggg

SEQ ID NO: 562634 - DNA, 15 bp, Homo sapiens
gggcagggcctgggc

SEQ ID NO: 562635 - DNA, 15 bp, Homo sapiens
ggcagggcctgggca

SEQ ID NO: 562636 - DNA, 15 bp, Homo sapiens
gcagggcctgggcac

SEQ ID NO: 562637 - DNA, 15 bp, Homo sapiens
cagggcctgggcact

SEQ ID NO: 562638 - DNA, 15 bp, Homo sapiens
agggcctgggcactt

SEQ ID NO: 562639 - DNA, 15 bp, Homo sapiens
gggcctgggcacttt

SEQ ID NO: 562640 - DNA, 15 bp, Homo sapiens
ggcctgggcacttta

SEQ ID NO: 562641 - DNA, 15 bp, Homo sapiens
gcctgggcactttac

SEQ ID NO: 562642 - DNA, 15 bp, Homo sapiens
cctgggcactttaca

SEQ ID NO: 562643 - DNA, 15 bp, Homo sapiens
ctgggcactttacaa

SEQ ID NO: 562644 - DNA, 15 bp, Homo sapiens
tgggcactttacaaa

SEQ ID NO: 562645 - DNA, 15 bp, Homo sapiens
gggcactttacaaag

SEQ ID NO: 562646 - DNA, 15 bp, Homo sapiens
ggcactttacaaagc

SEQ ID NO: 562647 - DNA, 15 bp, Homo sapiens
gcactttacaaagca

SEQ ID NO: 562648 - DNA, 15 bp, Homo sapiens
cactttacaaagcag

SEQ ID NO: 562649 - DNA, 15 bp, Homo sapiens
actttacaaagcaga

SEQ ID NO: 562650 - DNA, 15 bp, Homo sapiens
ctttacaaagcagac

SEQ ID NO: 562651 - DNA, 15 bp, Homo sapiens
tttacaaagcagact

SEQ ID NO: 562652 - DNA, 15 bp, Homo sapiens
ttacaaagcagacta

SEQ ID NO: 562653 - DNA, 15 bp, Homo sapiens
tacaaagcagactac

SEQ ID NO: 562654 - DNA, 15 bp, Homo sapiens
acaaagcagactact

SEQ ID NO: 562655 - DNA, 15 bp, Homo sapiens
caaagcagactactc

SEQ ID NO: 562656 - DNA, 15 bp, Homo sapiens
aaagcagactactcg

SEQ ID NO: 562657 - DNA, 15 bp, Homo sapiens
aagcagactactcgg

SEQ ID NO: 562658 - DNA, 15 bp, Homo sapiens
agcagactactcggg

SEQ ID NO: 562659 - DNA, 15 bp, Homo sapiens
gcagactactcgggc

SEQ ID NO: 562660 - DNA, 15 bp, Homo sapiens
cagactactcgggcc

SEQ ID NO: 562661 - DNA, 15 bp, Homo sapiens
agactactcgggccc

SEQ ID NO: 562662 - DNA, 15 bp, Homo sapiens
gactactcgggccct

SEQ ID NO: 562663 - DNA, 15 bp, Homo sapiens
actactcgggccctg

SEQ ID NO: 562664 - DNA, 15 bp, Homo sapiens
ctactcgggccctgc

SEQ ID NO: 562665 - DNA, 15 bp, Homo sapiens
tactcgggccctgcc

SEQ ID NO: 562666 - DNA, 15 bp, Homo sapiens
actcgggccctgcca

SEQ ID NO: 562667 - DNA, 15 bp, Homo sapiens
ctcgggccctgccac

SEQ ID NO: 562668 - DNA, 15 bp, Homo sapiens
tcgggccctgccacc

SEQ ID NO: 562669 - DNA, 15 bp, Homo sapiens
cgggccctgccaccc

SEQ ID NO: 562670 - DNA, 15 bp, Homo sapiens
gggccctgccaccca

SEQ ID NO: 562671 - DNA, 15 bp, Homo sapiens
ggccctgccacccag

SEQ ID NO: 562672 - DNA, 15 bp, Homo sapiens
gccctgccacccaga

SEQ ID NO: 562673 - DNA, 15 bp, Homo sapiens
ccctgccacccagat

SEQ ID NO: 562674 - DNA, 15 bp, Homo sapiens
cctgccacccagatt

SEQ ID NO: 562675 - DNA, 15 bp, Homo sapiens
ctgccacccagattc

SEQ ID NO: 562676 - DNA, 15 bp, Homo sapiens
tgccacccagattct

SEQ ID NO: 562677 - DNA, 15 bp, Homo sapiens
gccacccagattctc

SEQ ID NO: 562678 - DNA, 15 bp, Homo sapiens
ccacccagattctca

SEQ ID NO: 562679 - DNA, 15 bp, Homo sapiens
cacccagattctcac

SEQ ID NO: 562680 - DNA, 15 bp, Homo sapiens
acccagattctcaca

SEQ ID NO: 562681 - DNA, 15 bp, Homo sapiens
cccagattctcacac

SEQ ID NO: 562682 - DNA, 15 bp, Homo sapiens
ccagattctcacaca

SEQ ID NO: 562683 - DNA, 15 bp, Homo sapiens
cagattctcacacat

SEQ ID NO: 562684 - DNA, 15 bp, Homo sapiens
agattctcacacata

SEQ ID NO: 562685 - DNA, 15 bp, Homo sapiens
gattctcacacataa

SEQ ID NO: 562686 - DNA, 15 bp, Homo sapiens
attctcacacataaa

SEQ ID NO: 562687 - DNA, 15 bp, Homo sapiens
ttctcacacataaaa

SEQ ID NO: 562688 - DNA, 15 bp, Homo sapiens
tctcacacataaaaa

SEQ ID NO: 562689 - DNA, 15 bp, Homo sapiens
ctcacacataaaaac

SEQ ID NO: 562690 - DNA, 15 bp, Homo sapiens
tcacacataaaaacc

SEQ ID NO: 562691 - DNA, 15 bp, Homo sapiens
cacacataaaaacca

SEQ ID NO: 562692 - DNA, 15 bp, Homo sapiens
acacataaaaaccaa

SEQ ID NO: 562693 - DNA, 15 bp, Homo sapiens
cacataaaaaccaag

SEQ ID NO: 562694 - DNA, 15 bp, Homo sapiens
acataaaaaccaagg

SEQ ID NO: 562695 - DNA, 15 bp, Homo sapiens
cataaaaaccaaggt

SEQ ID NO: 562696 - DNA, 15 bp, Homo sapiens
ataaaaaccaaggtg

SEQ ID NO: 562697 - DNA, 15 bp, Homo sapiens
taaaaaccaaggtgg

SEQ ID NO: 562698 - DNA, 15 bp, Homo sapiens
aaaaaccaaggtgga

SEQ ID NO: 562699 - DNA, 15 bp, Homo sapiens
aaaaccaaggtggaa

SEQ ID NO: 562700 - DNA, 15 bp, Homo sapiens
aaaccaaggtggaat

SEQ ID NO: 562701 - DNA, 15 bp, Homo sapiens
aaccaaggtggaatg

SEQ ID NO: 562702 - DNA, 15 bp, Homo sapiens
accaaggtggaatgg

SEQ ID NO: 562703 - DNA, 15 bp, Homo sapiens
ccaaggtggaatgga

SEQ ID NO: 562704 - DNA, 15 bp, Homo sapiens
caaggtggaatggag

SEQ ID NO: 562705 - DNA, 15 bp, Homo sapiens
aaggtggaatggaga

SEQ ID NO: 562706 - DNA, 15 bp, Homo sapiens
aggtggaatggagag

SEQ ID NO: 562707 - DNA, 15 bp, Homo sapiens
ggtggaatggagagt

SEQ ID NO: 562708 - DNA, 15 bp, Homo sapiens
gtggaatggagagtc

SEQ ID NO: 562709 - DNA, 15 bp, Homo sapiens
tggaatggagagtcc

SEQ ID NO: 562710 - DNA, 15 bp, Homo sapiens
ggaatggagagtcca

SEQ ID NO: 562711 - DNA, 15 bp, Homo sapiens
gaatggagagtccaa

SEQ ID NO: 562712 - DNA, 15 bp, Homo sapiens
aatggagagtccaag

SEQ ID NO: 562713 - DNA, 15 bp, Homo sapiens
atggagagtccaagg

SEQ ID NO: 562714 - DNA, 15 bp, Homo sapiens
tggagagtccaagga

SEQ ID NO: 562715 - DNA, 15 bp, Homo sapiens
ggagagtccaaggac

SEQ ID NO: 562716 - DNA, 15 bp, Homo sapiens
gagagtccaaggaca

SEQ ID NO: 562717 - DNA, 15 bp, Homo sapiens
agagtccaaggacag

SEQ ID NO: 562718 - DNA, 15 bp, Homo sapiens
gagtccaaggacagt

SEQ ID NO: 562719 - DNA, 15 bp, Homo sapiens
agtccaaggacagtt

SEQ ID NO: 562720 - DNA, 15 bp, Homo sapiens
gtccaaggacagttg

SEQ ID NO: 562721 - DNA, 15 bp, Homo sapiens
tccaaggacagttgg

SEQ ID NO: 562722 - DNA, 15 bp, Homo sapiens
ccaaggacagttggt

SEQ ID NO: 562723 - DNA, 15 bp, Homo sapiens
caaggacagttggtg

SEQ ID NO: 562724 - DNA, 15 bp, Homo sapiens
aaggacagttggtgg

SEQ ID NO: 562725 - DNA, 15 bp, Homo sapiens
aggacagttggtgga

SEQ ID NO: 562726 - DNA, 15 bp, Homo sapiens
ggacagttggtggat

SEQ ID NO: 562727 - DNA, 15 bp, Homo sapiens
gacagttggtggatg

SEQ ID NO: 562728 - DNA, 15 bp, Homo sapiens
acagttggtggatgc

SEQ ID NO: 562729 - DNA, 15 bp, Homo sapiens
cagttggtggatgct

SEQ ID NO: 562730 - DNA, 15 bp, Homo sapiens
agttggtggatgctt

SEQ ID NO: 562731 - DNA, 15 bp, Homo sapiens
gttggtggatgcttg

SEQ ID NO: 562732 - DNA, 15 bp, Homo sapiens
ttggtggatgcttgt

SEQ ID NO: 562733 - DNA, 15 bp, Homo sapiens
tggtggatgcttgtg

SEQ ID NO: 562734 - DNA, 15 bp, Homo sapiens
ggtggatgcttgtgt

SEQ ID NO: 562735 - DNA, 15 bp, Homo sapiens
gtggatgcttgtgta

SEQ ID NO: 562736 - DNA, 15 bp, Homo sapiens
tggatgcttgtgtaa

SEQ ID NO: 562737 - DNA, 15 bp, Homo sapiens
ggatgcttgtgtaaa

SEQ ID NO: 562738 - DNA, 15 bp, Homo sapiens
gatgcttgtgtaaaa

SEQ ID NO: 562739 - DNA, 15 bp, Homo sapiens
atgcttgtgtaaaag

SEQ ID NO: 562740 - DNA, 15 bp, Homo sapiens
tgcttgtgtaaaagt

SEQ ID NO: 562741 - DNA, 15 bp, Homo sapiens
gcttgtgtaaaagtg

SEQ ID NO: 562742 - DNA, 15 bp, Homo sapiens
cttgtgtaaaagtgc

SEQ ID NO: 562743 - DNA, 15 bp, Homo sapiens
ttgtgtaaaagtgct

SEQ ID NO: 562744 - DNA, 15 bp, Homo sapiens
tgtgtaaaagtgctg

SEQ ID NO: 562745 - DNA, 15 bp, Homo sapiens
gtgtaaaagtgctgg

SEQ ID NO: 562746 - DNA, 15 bp, Homo sapiens
tgtaaaagtgctggg

SEQ ID NO: 562747 - DNA, 15 bp, Homo sapiens
gtaaaagtgctggga

SEQ ID NO: 562748 - DNA, 15 bp, Homo sapiens
taaaagtgctgggaa

SEQ ID NO: 562749 - DNA, 15 bp, Homo sapiens
aaaagtgctgggaaa

SEQ ID NO: 562750 - DNA, 15 bp, Homo sapiens
aaagtgctgggaaac

SEQ ID NO: 562751 - DNA, 15 bp, Homo sapiens
aagtgctgggaaact

SEQ ID NO: 562752 - DNA, 15 bp, Homo sapiens
agtgctgggaaactt

SEQ ID NO: 562753 - DNA, 15 bp, Homo sapiens
gtgctgggaaacttg

SEQ ID NO: 562754 - DNA, 15 bp, Homo sapiens
tgctgggaaacttgc

SEQ ID NO: 562755 - DNA, 15 bp, Homo sapiens
gctgggaaacttgcc

SEQ ID NO: 562756 - DNA, 15 bp, Homo sapiens
ctgggaaacttgcct

SEQ ID NO: 562757 - DNA, 15 bp, Homo sapiens
tgggaaacttgcctc

SEQ ID NO: 562758 - DNA, 15 bp, Homo sapiens
gggaaacttgcctct

SEQ ID NO: 562759 - DNA, 15 bp, Homo sapiens
ggaaacttgcctctg

SEQ ID NO: 562760 - DNA, 15 bp, Homo sapiens
gaaacttgcctctgg

SEQ ID NO: 562761 - DNA, 15 bp, Homo sapiens
aaacttgcctctggc

SEQ ID NO: 562762 - DNA, 15 bp, Homo sapiens
aacttgcctctggct

SEQ ID NO: 562763 - DNA, 15 bp, Homo sapiens
acttgcctctggctg

SEQ ID NO: 562764 - DNA, 15 bp, Homo sapiens
cttgcctctggctgc

SEQ ID NO: 562765 - DNA, 15 bp, Homo sapiens
ttgcctctggctgcc

SEQ ID NO: 562766 - DNA, 15 bp, Homo sapiens
tgcctctggctgccc

SEQ ID NO: 562767 - DNA, 15 bp, Homo sapiens
gcctctggctgccca

SEQ ID NO: 562768 - DNA, 15 bp, Homo sapiens
cctctggctgcccag

SEQ ID NO: 562769 - DNA, 15 bp, Homo sapiens
ctctggctgcccagc

SEQ ID NO: 562770 - DNA, 15 bp, Homo sapiens
tctggctgcccagct

SEQ ID NO: 562771 - DNA, 15 bp, Homo sapiens
ctggctgcccagctg

SEQ ID NO: 562772 - DNA, 15 bp, Homo sapiens
tggctgcccagctgt

SEQ ID NO: 562773 - DNA, 15 bp, Homo sapiens
ggctgcccagctgtg

SEQ ID NO: 562774 - DNA, 15 bp, Homo sapiens
gctgcccagctgtga

SEQ ID NO: 562775 - DNA, 15 bp, Homo sapiens
ctgcccagctgtgaa

SEQ ID NO: 562776 - DNA, 15 bp, Homo sapiens
tgcccagctgtgaag

SEQ ID NO: 562777 - DNA, 15 bp, Homo sapiens
gcccagctgtgaagc

SEQ ID NO: 562778 - DNA, 15 bp, Homo sapiens
cccagctgtgaagcg

SEQ ID NO: 562779 - DNA, 15 bp, Homo sapiens
ccagctgtgaagcgt

SEQ ID NO: 562780 - DNA, 15 bp, Homo sapiens
cagctgtgaagcgtg

SEQ ID NO: 562781 - DNA, 15 bp, Homo sapiens
agctgtgaagcgtga

SEQ ID NO: 562782 - DNA, 15 bp, Homo sapiens
gctgtgaagcgtgag

SEQ ID NO: 562783 - DNA, 15 bp, Homo sapiens
ctgtgaagcgtgagc

SEQ ID NO: 562784 - DNA, 15 bp, Homo sapiens
tgtgaagcgtgagcc

SEQ ID NO: 562785 - DNA, 15 bp, Homo sapiens
gtgaagcgtgagcct

SEQ ID NO: 562786 - DNA, 15 bp, Homo sapiens
tgaagcgtgagcctt

SEQ ID NO: 562787 - DNA, 15 bp, Homo sapiens
gaagcgtgagccttg

SEQ ID NO: 562788 - DNA, 15 bp, Homo sapiens
aagcgtgagccttgc

SEQ ID NO: 562789 - DNA, 15 bp, Homo sapiens
agcgtgagccttgct

SEQ ID NO: 562790 - DNA, 15 bp, Homo sapiens
gcgtgagccttgctt

SEQ ID NO: 562791 - DNA, 15 bp, Homo sapiens
cgtgagccttgcttc

SEQ ID NO: 562792 - DNA, 15 bp, Homo sapiens
gtgagccttgcttct

SEQ ID NO: 562793 - DNA, 15 bp, Homo sapiens
tgagccttgcttctt

SEQ ID NO: 562794 - DNA, 15 bp, Homo sapiens
gagccttgcttcttg

SEQ ID NO: 562795 - DNA, 15 bp, Homo sapiens
agccttgcttcttgc

SEQ ID NO: 562796 - DNA, 15 bp, Homo sapiens
gccttgcttcttgcc

SEQ ID NO: 562797 - DNA, 15 bp, Homo sapiens
ccttgcttcttgccc

SEQ ID NO: 562798 - DNA, 15 bp, Homo sapiens
cttgcttcttgcccc

SEQ ID NO: 562799 - DNA, 15 bp, Homo sapiens
ttgcttcttgcccca

SEQ ID NO: 562800 - DNA, 15 bp, Homo sapiens
tgcttcttgccccac

SEQ ID NO: 562801 - DNA, 15 bp, Homo sapiens
gcttcttgccccaca

SEQ ID NO: 562802 - DNA, 15 bp, Homo sapiens
cttcttgccccacat

SEQ ID NO: 562803 - DNA, 15 bp, Homo sapiens
ttcttgccccacatc

SEQ ID NO: 562804 - DNA, 15 bp, Homo sapiens
tcttgccccacatcc

SEQ ID NO: 562805 - DNA, 15 bp, Homo sapiens
cttgccccacatcca

SEQ ID NO: 562806 - DNA, 15 bp, Homo sapiens
ttgccccacatccac

SEQ ID NO: 562807 - DNA, 15 bp, Homo sapiens
tgccccacatccact

SEQ ID NO: 562808 - DNA, 15 bp, Homo sapiens
gccccacatccactc

SEQ ID NO: 562809 - DNA, 15 bp, Homo sapiens
ccccacatccactcc

SEQ ID NO: 562810 - DNA, 15 bp, Homo sapiens
cccacatccactcct

SEQ ID NO: 562811 - DNA, 15 bp, Homo sapiens
ccacatccactccta

SEQ ID NO: 562812 - DNA, 15 bp, Homo sapiens
cacatccactcctag

SEQ ID NO: 562813 - DNA, 15 bp, Homo sapiens
acatccactcctagt

SEQ ID NO: 562814 - DNA, 15 bp, Homo sapiens
catccactcctagtc

SEQ ID NO: 562815 - DNA, 15 bp, Homo sapiens
atccactcctagtca

SEQ ID NO: 562816 - DNA, 15 bp, Homo sapiens
tccactcctagtcat

SEQ ID NO: 562817 - DNA, 15 bp, Homo sapiens
ccactcctagtcatt

SEQ ID NO: 562818 - DNA, 15 bp, Homo sapiens
cactcctagtcattc

SEQ ID NO: 562819 - DNA, 15 bp, Homo sapiens
actcctagtcattca

SEQ ID NO: 562820 - DNA, 15 bp, Homo sapiens
ctcctagtcattcaa

SEQ ID NO: 562821 - DNA, 15 bp, Homo sapiens
tcctagtcattcaat

SEQ ID NO: 562822 - DNA, 15 bp, Homo sapiens
cctagtcattcaatc

SEQ ID NO: 562823 - DNA, 15 bp, Homo sapiens
ctagtcattcaatcc

SEQ ID NO: 562824 - DNA, 15 bp, Homo sapiens
tagtcattcaatcct

SEQ ID NO: 562825 - DNA, 15 bp, Homo sapiens
agtcattcaatcctg

SEQ ID NO: 562826 - DNA, 15 bp, Homo sapiens
gtcattcaatcctgg

SEQ ID NO: 562827 - DNA, 15 bp, Homo sapiens
tcattcaatcctggt

SEQ ID NO: 562828 - DNA, 15 bp, Homo sapiens
cattcaatcctggtt

SEQ ID NO: 562829 - DNA, 15 bp, Homo sapiens
attcaatcctggttc

SEQ ID NO: 562830 - DNA, 15 bp, Homo sapiens
ttcaatcctggttcc

SEQ ID NO: 562831 - DNA, 15 bp, Homo sapiens
tcaatcctggttccc

SEQ ID NO: 562832 - DNA, 15 bp, Homo sapiens
caatcctggttccct

SEQ ID NO: 562833 - DNA, 15 bp, Homo sapiens
aatcctggttccctg

SEQ ID NO: 562834 - DNA, 15 bp, Homo sapiens
atcctggttccctgc

SEQ ID NO: 562835 - DNA, 15 bp, Homo sapiens
tcctggttccctgct

SEQ ID NO: 562836 - DNA, 15 bp, Homo sapiens
cctggttccctgctt

SEQ ID NO: 562837 - DNA, 15 bp, Homo sapiens
ctggttccctgcttt

SEQ ID NO: 562838 - DNA, 15 bp, Homo sapiens
tggttccctgctttg

SEQ ID NO: 562839 - DNA, 15 bp, Homo sapiens
ggttccctgctttgc

SEQ ID NO: 562840 - DNA, 15 bp, Homo sapiens
gttccctgctttgcc

SEQ ID NO: 562841 - DNA, 15 bp, Homo sapiens
ttccctgctttgcca

SEQ ID NO: 562842 - DNA, 15 bp, Homo sapiens
tccctgctttgccag

SEQ ID NO: 562843 - DNA, 15 bp, Homo sapiens
ccctgctttgccagg

SEQ ID NO: 562844 - DNA, 15 bp, Homo sapiens
cctgctttgccagga

SEQ ID NO: 562845 - DNA, 15 bp, Homo sapiens
ctgctttgccaggag

SEQ ID NO: 562846 - DNA, 15 bp, Homo sapiens
tgctttgccaggagc

SEQ ID NO: 562847 - DNA, 15 bp, Homo sapiens
gctttgccaggagcc

SEQ ID NO: 562848 - DNA, 15 bp, Homo sapiens
ctttgccaggagcct

SEQ ID NO: 562849 - DNA, 15 bp, Homo sapiens
tttgccaggagcctt

SEQ ID NO: 562850 - DNA, 15 bp, Homo sapiens
ttgccaggagccttc

SEQ ID NO: 562851 - DNA, 15 bp, Homo sapiens
tgccaggagccttca

SEQ ID NO: 562852 - DNA, 15 bp, Homo sapiens
gccaggagccttcac

SEQ ID NO: 562853 - DNA, 15 bp, Homo sapiens
ccaggagccttcaca

SEQ ID NO: 562854 - DNA, 15 bp, Homo sapiens
caggagccttcacag

SEQ ID NO: 562855 - DNA, 15 bp, Homo sapiens
aggagccttcacaga

SEQ ID NO: 562856 - DNA, 15 bp, Homo sapiens
ggagccttcacagac

SEQ ID NO: 562857 - DNA, 15 bp, Homo sapiens
gagccttcacagacg

SEQ ID NO: 562858 - DNA, 15 bp, Homo sapiens
agccttcacagacgc

SEQ ID NO: 562859 - DNA, 15 bp, Homo sapiens
gccttcacagacgct

SEQ ID NO: 562860 - DNA, 15 bp, Homo sapiens
ccttcacagacgctg

SEQ ID NO: 562861 - DNA, 15 bp, Homo sapiens
cttcacagacgctgt

SEQ ID NO: 562862 - DNA, 15 bp, Homo sapiens
ttcacagacgctgta

SEQ ID NO: 562863 - DNA, 15 bp, Homo sapiens
tcacagacgctgtag

SEQ ID NO: 562864 - DNA, 15 bp, Homo sapiens
cacagacgctgtaga

SEQ ID NO: 562865 - DNA, 15 bp, Homo sapiens
acagacgctgtagaa

SEQ ID NO: 562866 - DNA, 15 bp, Homo sapiens
cagacgctgtagaat

SEQ ID NO: 562867 - DNA, 15 bp, Homo sapiens
agacgctgtagaatg

SEQ ID NO: 562868 - DNA, 15 bp, Homo sapiens
gacgctgtagaatga

SEQ ID NO: 562869 - DNA, 15 bp, Homo sapiens
acgctgtagaatgag

SEQ ID NO: 562870 - DNA, 15 bp, Homo sapiens
cgctgtagaatgaga

SEQ ID NO: 562871 - DNA, 15 bp, Homo sapiens
gctgtagaatgagag

SEQ ID NO: 562872 - DNA, 15 bp, Homo sapiens
ctgtagaatgagagg

SEQ ID NO: 562873 - DNA, 15 bp, Homo sapiens
tgtagaatgagaggg

SEQ ID NO: 562874 - DNA, 15 bp, Homo sapiens
gtagaatgagagggt

SEQ ID NO: 562875 - DNA, 15 bp, Homo sapiens
tagaatgagagggtg

SEQ ID NO: 562876 - DNA, 15 bp, Homo sapiens
agaatgagagggtga

SEQ ID NO: 562877 - DNA, 15 bp, Homo sapiens
gaatgagagggtgag

SEQ ID NO: 562878 - DNA, 15 bp, Homo sapiens
aatgagagggtgagt

SEQ ID NO: 562879 - DNA, 15 bp, Homo sapiens
atgagagggtgagtt

SEQ ID NO: 562880 - DNA, 15 bp, Homo sapiens
tgagagggtgagttg

SEQ ID NO: 562881 - DNA, 15 bp, Homo sapiens
gagagggtgagttgc

SEQ ID NO: 562882 - DNA, 15 bp, Homo sapiens
agagggtgagttgct

SEQ ID NO: 562883 - DNA, 15 bp, Homo sapiens
gagggtgagttgctt

SEQ ID NO: 562884 - DNA, 15 bp, Homo sapiens
agggtgagttgcttg

SEQ ID NO: 562885 - DNA, 15 bp, Homo sapiens
gggtgagttgcttga

SEQ ID NO: 562886 - DNA, 15 bp, Homo sapiens
ggtgagttgcttgag

SEQ ID NO: 562887 - DNA, 15 bp, Homo sapiens
gtgagttgcttgagg

SEQ ID NO: 562888 - DNA, 15 bp, Homo sapiens
tgagttgcttgaggg

SEQ ID NO: 562889 - DNA, 15 bp, Homo sapiens
gagttgcttgagggg

SEQ ID NO: 562890 - DNA, 15 bp, Homo sapiens
agttgcttgaggggt

SEQ ID NO: 562891 - DNA, 15 bp, Homo sapiens
gttgcttgaggggta

SEQ ID NO: 562892 - DNA, 15 bp, Homo sapiens
ttgcttgaggggtag

SEQ ID NO: 562893 - DNA, 15 bp, Homo sapiens
tgcttgaggggtagc

SEQ ID NO: 562894 - DNA, 15 bp, Homo sapiens
gcttgaggggtagca

SEQ ID NO: 562895 - DNA, 15 bp, Homo sapiens
cttgaggggtagcac

SEQ ID NO: 562896 - DNA, 15 bp, Homo sapiens
ttgaggggtagcaca

SEQ ID NO: 562897 - DNA, 15 bp, Homo sapiens
tgaggggtagcacag

SEQ ID NO: 562898 - DNA, 15 bp, Homo sapiens
gaggggtagcacaga

SEQ ID NO: 562899 - DNA, 15 bp, Homo sapiens
aggggtagcacagat

SEQ ID NO: 562900 - DNA, 15 bp, Homo sapiens
ggggtagcacagata

SEQ ID NO: 562901 - DNA, 15 bp, Homo sapiens
gggtagcacagatat

SEQ ID NO: 562902 - DNA, 15 bp, Homo sapiens
ggtagcacagatatt

SEQ ID NO: 562903 - DNA, 15 bp, Homo sapiens
gtagcacagatattc

SEQ ID NO: 562904 - DNA, 15 bp, Homo sapiens
tagcacagatattcc

SEQ ID NO: 562905 - DNA, 15 bp, Homo sapiens
agcacagatattcct

SEQ ID NO: 562906 - DNA, 15 bp, Homo sapiens
gcacagatattcctg

SEQ ID NO: 562907 - DNA, 15 bp, Homo sapiens
cacagatattcctgc

SEQ ID NO: 562908 - DNA, 15 bp, Homo sapiens
acagatattcctgcc

SEQ ID NO: 562909 - DNA, 15 bp, Homo sapiens
cagatattcctgcct

SEQ ID NO: 562910 - DNA, 15 bp, Homo sapiens
agatattcctgccta

SEQ ID NO: 562911 - DNA, 15 bp, Homo sapiens
gatattcctgcctaa

SEQ ID NO: 562912 - DNA, 15 bp, Homo sapiens
atattcctgcctaat

SEQ ID NO: 562913 - DNA, 15 bp, Homo sapiens
tattcctgcctaata

SEQ ID NO: 562914 - DNA, 15 bp, Homo sapiens
attcctgcctaataa

SEQ ID NO: 562915 - DNA, 15 bp, Homo sapiens
ttcctgcctaataaa

SEQ ID NO: 562916 - DNA, 15 bp, Homo sapiens
tcctgcctaataaat

SEQ ID NO: 562917 - DNA, 15 bp, Homo sapiens
cctgcctaataaata

SEQ ID NO: 562918 - DNA, 15 bp, Homo sapiens
ctgcctaataaatat

SEQ ID NO: 562919 - DNA, 15 bp, Homo sapiens
tgcctaataaatatg

SEQ ID NO: 562920 - DNA, 15 bp, Homo sapiens
gcctaataaatatgt

SEQ ID NO: 562921 - DNA, 15 bp, Homo sapiens
cctaataaatatgtt

SEQ ID NO: 562922 - DNA, 15 bp, Homo sapiens
ctaataaatatgtta

SEQ ID NO: 562923 - DNA, 15 bp, Homo sapiens
taataaatatgttaa

SEQ ID NO: 562924 - DNA, 15 bp, Homo sapiens
aataaatatgttaaa

SEQ ID NO: 562925 - DNA, 15 bp, Homo sapiens
ataaatatgttaaat

SEQ ID NO: 562926 - DNA, 15 bp, Homo sapiens
taaatatgttaaatc

SEQ ID NO: 562927 - DNA, 15 bp, Homo sapiens
aaatatgttaaatca

SEQ ID NO: 562928 - DNA, 15 bp, Homo sapiens
aatatgttaaatcaa

SEQ ID NO: 562929 - DNA, 15 bp, Homo sapiens
atatgttaaatcaaa

SEQ ID NO: 562930 - DNA, 15 bp, Homo sapiens
tatgttaaatcaaac

SEQ ID NO: 562931 - DNA, 15 bp, Homo sapiens
atgttaaatcaaaca

SEQ ID NO: 562932 - DNA, 15 bp, Homo sapiens
tgttaaatcaaacag

SEQ ID NO: 562933 - DNA, 15 bp, Homo sapiens
gttaaatcaaacagg

SEQ ID NO: 562934 - DNA, 15 bp, Homo sapiens
ttaaatcaaacaggc

SEQ ID NO: 562935 - DNA, 15 bp, Homo sapiens
taaatcaaacaggct

SEQ ID NO: 562936 - DNA, 15 bp, Homo sapiens
aaatcaaacaggctc

SEQ ID NO: 562937 - DNA, 15 bp, Homo sapiens
aatcaaacaggctca

SEQ ID NO: 562938 - DNA, 15 bp, Homo sapiens
atcaaacaggctcat

SEQ ID NO: 562939 - DNA, 15 bp, Homo sapiens
tcaaacaggctcatt

SEQ ID NO: 562940 - DNA, 15 bp, Homo sapiens
caaacaggctcatta

SEQ ID NO: 562941 - DNA, 15 bp, Homo sapiens
aaacaggctcattag

SEQ ID NO: 562942 - DNA, 15 bp, Homo sapiens
aacaggctcattaga

SEQ ID NO: 562943 - DNA, 15 bp, Homo sapiens
acaggctcattagaa

SEQ ID NO: 562944 - DNA, 15 bp, Homo sapiens
caggctcattagaag

SEQ ID NO: 562945 - DNA, 15 bp, Homo sapiens
aggctcattagaagc

SEQ ID NO: 562946 - DNA, 15 bp, Homo sapiens
ggctcattagaagcc

SEQ ID NO: 562947 - DNA, 15 bp, Homo sapiens
gctcattagaagccg

SEQ ID NO: 562948 - DNA, 15 bp, Homo sapiens
ctcattagaagccgg

SEQ ID NO: 562949 - DNA, 15 bp, Homo sapiens
tcattagaagccgga

SEQ ID NO: 562950 - DNA, 15 bp, Homo sapiens
cattagaagccggag

SEQ ID NO: 562951 - DNA, 15 bp, Homo sapiens
attagaagccggagg

SEQ ID NO: 562952 - DNA, 15 bp, Homo sapiens
ttagaagccggaggc

SEQ ID NO: 562953 - DNA, 15 bp, Homo sapiens
tagaagccggaggct

SEQ ID NO: 562954 - DNA, 15 bp, Homo sapiens
agaagccggaggcta

SEQ ID NO: 562955 - DNA, 15 bp, Homo sapiens
gaagccggaggctaa

SEQ ID NO: 562956 - DNA, 15 bp, Homo sapiens
aagccggaggctaat

SEQ ID NO: 562957 - DNA, 15 bp, Homo sapiens
agccggaggctaatg

SEQ ID NO: 562958 - DNA, 15 bp, Homo sapiens
gccggaggctaatgg

SEQ ID NO: 562959 - DNA, 15 bp, Homo sapiens
ccggaggctaatggc

SEQ ID NO: 562960 - DNA, 15 bp, Homo sapiens
cggaggctaatggcc

SEQ ID NO: 562961 - DNA, 15 bp, Homo sapiens
ggaggctaatggccg

SEQ ID NO: 562962 - DNA, 15 bp, Homo sapiens
gaggctaatggccga

SEQ ID NO: 562963 - DNA, 15 bp, Homo sapiens
aggctaatggccgac

SEQ ID NO: 562964 - DNA, 15 bp, Homo sapiens
ggctaatggccgact

SEQ ID NO: 562965 - DNA, 15 bp, Homo sapiens
gctaatggccgactt

SEQ ID NO: 562966 - DNA, 15 bp, Homo sapiens
ctaatggccgactta

SEQ ID NO: 562967 - DNA, 15 bp, Homo sapiens
taatggccgacttac

SEQ ID NO: 562968 - DNA, 15 bp, Homo sapiens
aatggccgacttaca

SEQ ID NO: 562969 - DNA, 15 bp, Homo sapiens
atggccgacttacaa

SEQ ID NO: 562970 - DNA, 15 bp, Homo sapiens
tggccgacttacaat

SEQ ID NO: 562971 - DNA, 15 bp, Homo sapiens
ggccgacttacaata

SEQ ID NO: 562972 - DNA, 15 bp, Homo sapiens
gccgacttacaataa

SEQ ID NO: 562973 - DNA, 15 bp, Homo sapiens
ccgacttacaataaa

SEQ ID NO: 562974 - DNA, 15 bp, Homo sapiens
cgacttacaataaaa

SEQ ID NO: 562975 - DNA, 15 bp, Homo sapiens
gacttacaataaaat

SEQ ID NO: 562976 - DNA, 15 bp, Homo sapiens
acttacaataaaatg

SEQ ID NO: 562977 - DNA, 15 bp, Homo sapiens
cttacaataaaatgc

SEQ ID NO: 562978 - DNA, 15 bp, Homo sapiens
ttacaataaaatgcc

SEQ ID NO: 562979 - DNA, 15 bp, Homo sapiens
tacaataaaatgccg

SEQ ID NO: 562980 - DNA, 15 bp, Homo sapiens
acaataaaatgccga

SEQ ID NO: 562981 - DNA, 15 bp, Homo sapiens
caataaaatgccgag

SEQ ID NO: 562982 - DNA, 15 bp, Homo sapiens
aataaaatgccgagt

SEQ ID NO: 562983 - DNA, 15 bp, Homo sapiens
ataaaatgccgagtc

SEQ ID NO: 562984 - DNA, 15 bp, Homo sapiens
taaaatgccgagtct

SEQ ID NO: 562985 - DNA, 15 bp, Homo sapiens
aaaatgccgagtctc

SEQ ID NO: 562986 - DNA, 15 bp, Homo sapiens
aaatgccgagtctct

SEQ ID NO: 562987 - DNA, 15 bp, Homo sapiens
aatgccgagtctctc

SEQ ID NO: 562988 - DNA, 15 bp, Homo sapiens
atgccgagtctctcc

SEQ ID NO: 562989 - DNA, 15 bp, Homo sapiens
tgccgagtctctcct

SEQ ID NO: 562990 - DNA, 15 bp, Homo sapiens
gccgagtctctcctc

SEQ ID NO: 562991 - DNA, 15 bp, Homo sapiens
ccgagtctctcctcc

SEQ ID NO: 562992 - DNA, 15 bp, Homo sapiens
cgagtctctcctccc

SEQ ID NO: 562993 - DNA, 15 bp, Homo sapiens
gagtctctcctcccc

SEQ ID NO: 562994 - DNA, 15 bp, Homo sapiens
agtctctcctccccc

SEQ ID NO: 562995 - DNA, 15 bp, Homo sapiens
gtctctcctccccca

SEQ ID NO: 562996 - DNA, 15 bp, Homo sapiens
tctctcctcccccag

SEQ ID NO: 562997 - DNA, 15 bp, Homo sapiens
ctctcctcccccagg

SEQ ID NO: 562998 - DNA, 15 bp, Homo sapiens
tctcctcccccagga

SEQ ID NO: 562999 - DNA, 15 bp, Homo sapiens
ctcctcccccaggaa

SEQ ID NO: 563000 - DNA, 15 bp, Homo sapiens
tcctcccccaggaag

SEQ ID NO: 563001 - DNA, 15 bp, Homo sapiens
cctcccccaggaagt

SEQ ID NO: 563002 - DNA, 15 bp, Homo sapiens
ctcccccaggaagtc

SEQ ID NO: 563003 - DNA, 15 bp, Homo sapiens
tcccccaggaagtct

SEQ ID NO: 563004 - DNA, 15 bp, Homo sapiens
cccccaggaagtctt

SEQ ID NO: 563005 - DNA, 15 bp, Homo sapiens
ccccaggaagtcttc

SEQ ID NO: 563006 - DNA, 15 bp, Homo sapiens
cccaggaagtcttcc

SEQ ID NO: 563007 - DNA, 15 bp, Homo sapiens
ccaggaagtcttcct

SEQ ID NO: 563008 - DNA, 15 bp, Homo sapiens
caggaagtcttcctt

SEQ ID NO: 563009 - DNA, 15 bp, Homo sapiens
aggaagtcttccttg

SEQ ID NO: 563010 - DNA, 15 bp, Homo sapiens
ggaagtcttccttga

SEQ ID NO: 563011 - DNA, 15 bp, Homo sapiens
gaagtcttccttgac

SEQ ID NO: 563012 - DNA, 15 bp, Homo sapiens
aagtcttccttgact

SEQ ID NO: 563013 - DNA, 15 bp, Homo sapiens
agtcttccttgactc

SEQ ID NO: 563014 - DNA, 15 bp, Homo sapiens
gtcttccttgactct

SEQ ID NO: 563015 - DNA, 15 bp, Homo sapiens
tcttccttgactctc

SEQ ID NO: 563016 - DNA, 15 bp, Homo sapiens
cttccttgactctcc

SEQ ID NO: 563017 - DNA, 15 bp, Homo sapiens
ttccttgactctcca

SEQ ID NO: 563018 - DNA, 15 bp, Homo sapiens
tccttgactctccaa

SEQ ID NO: 563019 - DNA, 15 bp, Homo sapiens
ccttgactctccaaa

SEQ ID NO: 563020 - DNA, 15 bp, Homo sapiens
cttgactctccaaat

SEQ ID NO: 563021 - DNA, 15 bp, Homo sapiens
ttgactctccaaatt

SEQ ID NO: 563022 - DNA, 15 bp, Homo sapiens
tgactctccaaattt

SEQ ID NO: 563023 - DNA, 15 bp, Homo sapiens
gactctccaaatttt

SEQ ID NO: 563024 - DNA, 15 bp, Homo sapiens
actctccaaattttc

SEQ ID NO: 563025 - DNA, 15 bp, Homo sapiens
ctctccaaattttca

SEQ ID NO: 563026 - DNA, 15 bp, Homo sapiens
tctccaaattttcac

SEQ ID NO: 563027 - DNA, 15 bp, Homo sapiens
ctccaaattttcact

SEQ ID NO: 563028 - DNA, 15 bp, Homo sapiens
tccaaattttcacta

SEQ ID NO: 563029 - DNA, 15 bp, Homo sapiens
ccaaattttcactat

SEQ ID NO: 563030 - DNA, 15 bp, Homo sapiens
caaattttcactatt

SEQ ID NO: 563031 - DNA, 15 bp, Homo sapiens
aaattttcactattc

SEQ ID NO: 563032 - DNA, 15 bp, Homo sapiens
aattttcactattcc

SEQ ID NO: 563033 - DNA, 15 bp, Homo sapiens
attttcactattccc

SEQ ID NO: 563034 - DNA, 15 bp, Homo sapiens
ttttcactattccct

SEQ ID NO: 563035 - DNA, 15 bp, Homo sapiens
tttcactattccctt

SEQ ID NO: 563036 - DNA, 15 bp, Homo sapiens
ttcactattcccttc

SEQ ID NO: 563037 - DNA, 15 bp, Homo sapiens
tcactattcccttcc

SEQ ID NO: 563038 - DNA, 15 bp, Homo sapiens
cactattcccttcca

SEQ ID NO: 563039 - DNA, 15 bp, Homo sapiens
actattcccttccac

SEQ ID NO: 563040 - DNA, 15 bp, Homo sapiens
ctattcccttccact

SEQ ID NO: 563041 - DNA, 15 bp, Homo sapiens
tattcccttccactt

SEQ ID NO: 563042 - DNA, 15 bp, Homo sapiens
attcccttccactta

SEQ ID NO: 563043 - DNA, 15 bp, Homo sapiens
ttcccttccacttat

SEQ ID NO: 563044 - DNA, 15 bp, Homo sapiens
tcccttccacttatg

SEQ ID NO: 563045 - DNA, 15 bp, Homo sapiens
cccttccacttatga

SEQ ID NO: 563046 - DNA, 15 bp, Homo sapiens
ccttccacttatgag

SEQ ID NO: 563047 - DNA, 15 bp, Homo sapiens
cttccacttatgagt

SEQ ID NO: 563048 - DNA, 15 bp, Homo sapiens
ttccacttatgagtc

SEQ ID NO: 563049 - DNA, 15 bp, Homo sapiens
tccacttatgagtcc

SEQ ID NO: 563050 - DNA, 15 bp, Homo sapiens
ccacttatgagtcct

SEQ ID NO: 563051 - DNA, 15 bp, Homo sapiens
cacttatgagtcctc

SEQ ID NO: 563052 - DNA, 15 bp, Homo sapiens
acttatgagtcctcg

SEQ ID NO: 563053 - DNA, 15 bp, Homo sapiens
cttatgagtcctcga

SEQ ID NO: 563054 - DNA, 15 bp, Homo sapiens
ttatgagtcctcgaa

SEQ ID NO: 563055 - DNA, 15 bp, Homo sapiens
tatgagtcctcgaac

SEQ ID NO: 563056 - DNA, 15 bp, Homo sapiens
atgagtcctcgaacc

SEQ ID NO: 563057 - DNA, 15 bp, Homo sapiens
tgagtcctcgaacca

SEQ ID NO: 563058 - DNA, 15 bp, Homo sapiens
gagtcctcgaaccac

SEQ ID NO: 563059 - DNA, 15 bp, Homo sapiens
agtcctcgaaccacc

SEQ ID NO: 563060 - DNA, 15 bp, Homo sapiens
gtcctcgaaccaccg

SEQ ID NO: 563061 - DNA, 15 bp, Homo sapiens
tcctcgaaccaccgc

SEQ ID NO: 563062 - DNA, 15 bp, Homo sapiens
cctcgaaccaccgcc

SEQ ID NO: 563063 - DNA, 15 bp, Homo sapiens
ctcgaaccaccgcca

SEQ ID NO: 563064 - DNA, 15 bp, Homo sapiens
tcgaaccaccgccac

SEQ ID NO: 563065 - DNA, 15 bp, Homo sapiens
cgaaccaccgccaca

SEQ ID NO: 563066 - DNA, 15 bp, Homo sapiens
gaaccaccgccacac

SEQ ID NO: 563067 - DNA, 15 bp, Homo sapiens
aaccaccgccacaca

SEQ ID NO: 563068 - DNA, 15 bp, Homo sapiens
accaccgccacacag

SEQ ID NO: 563069 - DNA, 15 bp, Homo sapiens
ccaccgccacacagt

SEQ ID NO: 563070 - DNA, 15 bp, Homo sapiens
caccgccacacagtc

SEQ ID NO: 563071 - DNA, 15 bp, Homo sapiens
accgccacacagtcc

SEQ ID NO: 563072 - DNA, 15 bp, Homo sapiens
ccgccacacagtcca

SEQ ID NO: 563073 - DNA, 15 bp, Homo sapiens
cgccacacagtccat

SEQ ID NO: 563074 - DNA, 15 bp, Homo sapiens
gccacacagtccatt

SEQ ID NO: 563075 - DNA, 15 bp, Homo sapiens
ccacacagtccattg

SEQ ID NO: 563076 - DNA, 15 bp, Homo sapiens
cacacagtccattgc

SEQ ID NO: 563077 - DNA, 15 bp, Homo sapiens
acacagtccattgct

SEQ ID NO: 563078 - DNA, 15 bp, Homo sapiens
cacagtccattgctt

SEQ ID NO: 563079 - DNA, 15 bp, Homo sapiens
acagtccattgctta

SEQ ID NO: 563080 - DNA, 15 bp, Homo sapiens
cagtccattgcttag

SEQ ID NO: 563081 - DNA, 15 bp, Homo sapiens
agtccattgcttagt

SEQ ID NO: 563082 - DNA, 15 bp, Homo sapiens
gtccattgcttagta

SEQ ID NO: 563083 - DNA, 15 bp, Homo sapiens
tccattgcttagtag

SEQ ID NO: 563084 - DNA, 15 bp, Homo sapiens
ccattgcttagtagt

SEQ ID NO: 563085 - DNA, 15 bp, Homo sapiens
cattgcttagtagtg

SEQ ID NO: 563086 - DNA, 15 bp, Homo sapiens
attgcttagtagtgg

SEQ ID NO: 563087 - DNA, 15 bp, Homo sapiens
ttgcttagtagtggt

SEQ ID NO: 563088 - DNA, 15 bp, Homo sapiens
tgcttagtagtggtg

SEQ ID NO: 563089 - DNA, 15 bp, Homo sapiens
gcttagtagtggtgt

SEQ ID NO: 563090 - DNA, 15 bp, Homo sapiens
cttagtagtggtgtg

SEQ ID NO: 563091 - DNA, 15 bp, Homo sapiens
ttagtagtggtgtgc

SEQ ID NO: 563092 - DNA, 15 bp, Homo sapiens
tagtagtggtgtgct

SEQ ID NO: 563093 - DNA, 15 bp, Homo sapiens
agtagtggtgtgctt

SEQ ID NO: 563094 - DNA, 15 bp, Homo sapiens
gtagtggtgtgcttg

SEQ ID NO: 563095 - DNA, 15 bp, Homo sapiens
tagtggtgtgcttgc

SEQ ID NO: 563096 - DNA, 15 bp, Homo sapiens
agtggtgtgcttgcc

SEQ ID NO: 563097 - DNA, 15 bp, Homo sapiens
gtggtgtgcttgcct

SEQ ID NO: 563098 - DNA, 15 bp, Homo sapiens
tggtgtgcttgccta

SEQ ID NO: 563099 - DNA, 15 bp, Homo sapiens
ggtgtgcttgcctac

SEQ ID NO: 563100 - DNA, 15 bp, Homo sapiens
gtgtgcttgcctacc

SEQ ID NO: 563101 - DNA, 15 bp, Homo sapiens
tgtgcttgcctacct

SEQ ID NO: 563102 - DNA, 15 bp, Homo sapiens
gtgcttgcctacctg

SEQ ID NO: 563103 - DNA, 15 bp, Homo sapiens
tgcttgcctacctgt

SEQ ID NO: 563104 - DNA, 15 bp, Homo sapiens
gcttgcctacctgtt

SEQ ID NO: 563105 - DNA, 15 bp, Homo sapiens
cttgcctacctgttt

SEQ ID NO: 563106 - DNA, 15 bp, Homo sapiens
ttgcctacctgtttc

SEQ ID NO: 563107 - DNA, 15 bp, Homo sapiens
tgcctacctgtttca

SEQ ID NO: 563108 - DNA, 15 bp, Homo sapiens
gcctacctgtttcat

SEQ ID NO: 563109 - DNA, 15 bp, Homo sapiens
cctacctgtttcatg

SEQ ID NO: 563110 - DNA, 15 bp, Homo sapiens
ctacctgtttcatgg

SEQ ID NO: 563111 - DNA, 15 bp, Homo sapiens
tacctgtttcatggg

SEQ ID NO: 563112 - DNA, 15 bp, Homo sapiens
acctgtttcatggga

SEQ ID NO: 563113 - DNA, 15 bp, Homo sapiens
cctgtttcatgggaa

SEQ ID NO: 563114 - DNA, 15 bp, Homo sapiens
ctgtttcatgggaat

SEQ ID NO: 563115 - DNA, 15 bp, Homo sapiens
tgtttcatgggaatg

SEQ ID NO: 563116 - DNA, 15 bp, Homo sapiens
gtttcatgggaatga

SEQ ID NO: 563117 - DNA, 15 bp, Homo sapiens
tttcatgggaatgag

SEQ ID NO: 563118 - DNA, 15 bp, Homo sapiens
ttcatgggaatgagt

SEQ ID NO: 563119 - DNA, 15 bp, Homo sapiens
tcatgggaatgagta

SEQ ID NO: 563120 - DNA, 15 bp, Homo sapiens
catgggaatgagtat

SEQ ID NO: 563121 - DNA, 15 bp, Homo sapiens
atgggaatgagtatt

SEQ ID NO: 563122 - DNA, 15 bp, Homo sapiens
tgggaatgagtattt

SEQ ID NO: 563123 - DNA, 15 bp, Homo sapiens
gggaatgagtatttc

SEQ ID NO: 563124 - DNA, 15 bp, Homo sapiens
ggaatgagtatttct

SEQ ID NO: 563125 - DNA, 15 bp, Homo sapiens
gaatgagtatttctt

SEQ ID NO: 563126 - DNA, 15 bp, Homo sapiens
aatgagtatttcttg

SEQ ID NO: 563127 - DNA, 15 bp, Homo sapiens
atgagtatttcttga

SEQ ID NO: 563128 - DNA, 15 bp, Homo sapiens
tgagtatttcttgaa

SEQ ID NO: 563129 - DNA, 15 bp, Homo sapiens
gagtatttcttgaag

SEQ ID NO: 563130 - DNA, 15 bp, Homo sapiens
agtatttcttgaagg

SEQ ID NO: 563131 - DNA, 15 bp, Homo sapiens
gtatttcttgaaggc

SEQ ID NO: 563132 - DNA, 15 bp, Homo sapiens
tatttcttgaaggca

SEQ ID NO: 563133 - DNA, 15 bp, Homo sapiens
atttcttgaaggcaa

SEQ ID NO: 563134 - DNA, 15 bp, Homo sapiens
tttcttgaaggcaag

SEQ ID NO: 563135 - DNA, 15 bp, Homo sapiens
ttcttgaaggcaagc

SEQ ID NO: 563136 - DNA, 15 bp, Homo sapiens
tcttgaaggcaagcg

SEQ ID NO: 563137 - DNA, 15 bp, Homo sapiens
cttgaaggcaagcgt

SEQ ID NO: 563138 - DNA, 15 bp, Homo sapiens
ttgaaggcaagcgtc

SEQ ID NO: 563139 - DNA, 15 bp, Homo sapiens
tgaaggcaagcgtca

SEQ ID NO: 563140 - DNA, 15 bp, Homo sapiens
gaaggcaagcgtcat

SEQ ID NO: 563141 - DNA, 15 bp, Homo sapiens
aaggcaagcgtcatg

SEQ ID NO: 563142 - DNA, 15 bp, Homo sapiens
aggcaagcgtcatgt

SEQ ID NO: 563143 - DNA, 15 bp, Homo sapiens
ggcaagcgtcatgta

SEQ ID NO: 563144 - DNA, 15 bp, Homo sapiens
gcaagcgtcatgtaa

SEQ ID NO: 563145 - DNA, 15 bp, Homo sapiens
caagcgtcatgtaat

SEQ ID NO: 563146 - DNA, 15 bp, Homo sapiens
aagcgtcatgtaatt

SEQ ID NO: 563147 - DNA, 15 bp, Homo sapiens
agcgtcatgtaattt

SEQ ID NO: 563148 - DNA, 15 bp, Homo sapiens
gcgtcatgtaatttt

SEQ ID NO: 563149 - DNA, 15 bp, Homo sapiens
cgtcatgtaattttc

SEQ ID NO: 563150 - DNA, 15 bp, Homo sapiens
gtcatgtaattttct

SEQ ID NO: 563151 - DNA, 15 bp, Homo sapiens
tcatgtaattttctt

SEQ ID NO: 563152 - DNA, 15 bp, Homo sapiens
catgtaattttcttc

SEQ ID NO: 563153 - DNA, 15 bp, Homo sapiens
atgtaattttcttct

SEQ ID NO: 563154 - DNA, 15 bp, Homo sapiens
tgtaattttcttcta

SEQ ID NO: 563155 - DNA, 15 bp, Homo sapiens
gtaattttcttctat

SEQ ID NO: 563156 - DNA, 15 bp, Homo sapiens
taattttcttctatg

SEQ ID NO: 563157 - DNA, 15 bp, Homo sapiens
aattttcttctatga

SEQ ID NO: 563158 - DNA, 15 bp, Homo sapiens
attttcttctatgat

SEQ ID NO: 563159 - DNA, 15 bp, Homo sapiens
ttttcttctatgata

SEQ ID NO: 563160 - DNA, 15 bp, Homo sapiens
tttcttctatgataa

SEQ ID NO: 563161 - DNA, 15 bp, Homo sapiens
ttcttctatgataag

SEQ ID NO: 563162 - DNA, 15 bp, Homo sapiens
tcttctatgataagg

SEQ ID NO: 563163 - DNA, 15 bp, Homo sapiens
cttctatgataagga

SEQ ID NO: 563164 - DNA, 15 bp, Homo sapiens
ttctatgataaggat

SEQ ID NO: 563165 - DNA, 15 bp, Homo sapiens
tctatgataaggata

SEQ ID NO: 563166 - DNA, 15 bp, Homo sapiens
ctatgataaggatat

SEQ ID NO: 563167 - DNA, 15 bp, Homo sapiens
tatgataaggatatt

SEQ ID NO: 563168 - DNA, 15 bp, Homo sapiens
atgataaggatattt

SEQ ID NO: 563169 - DNA, 15 bp, Homo sapiens
tgataaggatattta

SEQ ID NO: 563170 - DNA, 15 bp, Homo sapiens
gataaggatatttaa

SEQ ID NO: 563171 - DNA, 15 bp, Homo sapiens
ataaggatatttaag

SEQ ID NO: 563172 - DNA, 15 bp, Homo sapiens
taaggatatttaagg

SEQ ID NO: 563173 - DNA, 15 bp, Homo sapiens
aaggatatttaaggt

SEQ ID NO: 563174 - DNA, 15 bp, Homo sapiens
aggatatttaaggtg

SEQ ID NO: 563175 - DNA, 15 bp, Homo sapiens
ggatatttaaggtgt

SEQ ID NO: 563176 - DNA, 15 bp, Homo sapiens
gatatttaaggtgtt

SEQ ID NO: 563177 - DNA, 15 bp, Homo sapiens
atatttaaggtgttt

SEQ ID NO: 563178 - DNA, 15 bp, Homo sapiens
tatttaaggtgttta

SEQ ID NO: 563179 - DNA, 15 bp, Homo sapiens
atttaaggtgtttat

SEQ ID NO: 563180 - DNA, 15 bp, Homo sapiens
tttaaggtgtttatt

SEQ ID NO: 563181 - DNA, 15 bp, Homo sapiens
ttaaggtgtttattg

SEQ ID NO: 563182 - DNA, 15 bp, Homo sapiens
taaggtgtttattgg

SEQ ID NO: 563183 - DNA, 15 bp, Homo sapiens
aaggtgtttattgga

SEQ ID NO: 563184 - DNA, 15 bp, Homo sapiens
aggtgtttattggac

SEQ ID NO: 563185 - DNA, 15 bp, Homo sapiens
ggtgtttattggacc

SEQ ID NO: 563186 - DNA, 15 bp, Homo sapiens
gtgtttattggaccc

SEQ ID NO: 563187 - DNA, 15 bp, Homo sapiens
tgtttattggaccca

SEQ ID NO: 563188 - DNA, 15 bp, Homo sapiens
gtttattggacccac

SEQ ID NO: 563189 - DNA, 15 bp, Homo sapiens
tttattggacccact

SEQ ID NO: 563190 - DNA, 15 bp, Homo sapiens
ttattggacccacta

SEQ ID NO: 563191 - DNA, 15 bp, Homo sapiens
tattggacccactaa

SEQ ID NO: 563192 - DNA, 15 bp, Homo sapiens
attggacccactaac

SEQ ID NO: 563193 - DNA, 15 bp, Homo sapiens
ttggacccactaacc

SEQ ID NO: 563194 - DNA, 15 bp, Homo sapiens
tggacccactaacca

SEQ ID NO: 563195 - DNA, 15 bp, Homo sapiens
ggacccactaaccat

SEQ ID NO: 563196 - DNA, 15 bp, Homo sapiens
gacccactaaccatt

SEQ ID NO: 563197 - DNA, 15 bp, Homo sapiens
acccactaaccattg

SEQ ID NO: 563198 - DNA, 15 bp, Homo sapiens
cccactaaccattgg

SEQ ID NO: 563199 - DNA, 15 bp, Homo sapiens
ccactaaccattggt

SEQ ID NO: 563200 - DNA, 15 bp, Homo sapiens
cactaaccattggtt

SEQ ID NO: 563201 - DNA, 15 bp, Homo sapiens
actaaccattggttg

SEQ ID NO: 563202 - DNA, 15 bp, Homo sapiens
ctaaccattggttgc

SEQ ID NO: 563203 - DNA, 15 bp, Homo sapiens
taaccattggttgcc

SEQ ID NO: 563204 - DNA, 15 bp, Homo sapiens
aaccattggttgcca

SEQ ID NO: 563205 - DNA, 15 bp, Homo sapiens
accattggttgccaa

SEQ ID NO: 563206 - DNA, 15 bp, Homo sapiens
ccattggttgccaag

SEQ ID NO: 563207 - DNA, 15 bp, Homo sapiens
cattggttgccaagt

SEQ ID NO: 563208 - DNA, 15 bp, Homo sapiens
attggttgccaagtg

SEQ ID NO: 563209 - DNA, 15 bp, Homo sapiens
ttggttgccaagtga

SEQ ID NO: 563210 - DNA, 15 bp, Homo sapiens
tggttgccaagtgaa

SEQ ID NO: 563211 - DNA, 15 bp, Homo sapiens
ggttgccaagtgaag

SEQ ID NO: 563212 - DNA, 15 bp, Homo sapiens
gttgccaagtgaaga

SEQ ID NO: 563213 - DNA, 15 bp, Homo sapiens
ttgccaagtgaagag

SEQ ID NO: 563214 - DNA, 15 bp, Homo sapiens
tgccaagtgaagaga

SEQ ID NO: 563215 - DNA, 15 bp, Homo sapiens
gccaagtgaagagat

SEQ ID NO: 563216 - DNA, 15 bp, Homo sapiens
ccaagtgaagagatg

SEQ ID NO: 563217 - DNA, 15 bp, Homo sapiens
caagtgaagagatgg

SEQ ID NO: 563218 - DNA, 15 bp, Homo sapiens
aagtgaagagatggg

SEQ ID NO: 563219 - DNA, 15 bp, Homo sapiens
agtgaagagatgggc

SEQ ID NO: 563220 - DNA, 15 bp, Homo sapiens
gtgaagagatgggct

SEQ ID NO: 563221 - DNA, 15 bp, Homo sapiens
tgaagagatgggctt

SEQ ID NO: 563222 - DNA, 15 bp, Homo sapiens
gaagagatgggcttc

SEQ ID NO: 563223 - DNA, 15 bp, Homo sapiens
aagagatgggcttca

SEQ ID NO: 563224 - DNA, 15 bp, Homo sapiens
agagatgggcttcag

SEQ ID NO: 563225 - DNA, 15 bp, Homo sapiens
gagatgggcttcaga

SEQ ID NO: 563226 - DNA, 15 bp, Homo sapiens
agatgggcttcagac

SEQ ID NO: 563227 - DNA, 15 bp, Homo sapiens
gatgggcttcagact

SEQ ID NO: 563228 - DNA, 15 bp, Homo sapiens
atgggcttcagactg

SEQ ID NO: 563229 - DNA, 15 bp, Homo sapiens
tgggcttcagactgt

SEQ ID NO: 563230 - DNA, 15 bp, Homo sapiens
gggcttcagactgtg

SEQ ID NO: 563231 - DNA, 15 bp, Homo sapiens
ggcttcagactgtga

SEQ ID NO: 563232 - DNA, 15 bp, Homo sapiens
gcttcagactgtgat

SEQ ID NO: 563233 - DNA, 15 bp, Homo sapiens
cttcagactgtgatg

SEQ ID NO: 563234 - DNA, 15 bp, Homo sapiens
ttcagactgtgatga

SEQ ID NO: 563235 - DNA, 15 bp, Homo sapiens
tcagactgtgatgag

SEQ ID NO: 563236 - DNA, 15 bp, Homo sapiens
cagactgtgatgagt

SEQ ID NO: 563237 - DNA, 15 bp, Homo sapiens
agactgtgatgagtg

SEQ ID NO: 563238 - DNA, 15 bp, Homo sapiens
gactgtgatgagtga

SEQ ID NO: 563239 - DNA, 15 bp, Homo sapiens
actgtgatgagtgat

SEQ ID NO: 563240 - DNA, 15 bp, Homo sapiens
ctgtgatgagtgata

SEQ ID NO: 563241 - DNA, 15 bp, Homo sapiens
tgtgatgagtgataa

SEQ ID NO: 563242 - DNA, 15 bp, Homo sapiens
gtgatgagtgataaa

SEQ ID NO: 563243 - DNA, 15 bp, Homo sapiens
tgatgagtgataaaa

SEQ ID NO: 563244 - DNA, 15 bp, Homo sapiens
gatgagtgataaaag

SEQ ID NO: 563245 - DNA, 15 bp, Homo sapiens
atgagtgataaaaga

SEQ ID NO: 563246 - DNA, 15 bp, Homo sapiens
tgagtgataaaagag

SEQ ID NO: 563247 - DNA, 15 bp, Homo sapiens
gagtgataaaagagt

SEQ ID NO: 563248 - DNA, 15 bp, Homo sapiens
agtgataaaagagtt

SEQ ID NO: 563249 - DNA, 15 bp, Homo sapiens
gtgataaaagagttc

SEQ ID NO: 563250 - DNA, 15 bp, Homo sapiens
tgataaaagagttct

SEQ ID NO: 563251 - DNA, 15 bp, Homo sapiens
gataaaagagttctg

SEQ ID NO: 563252 - DNA, 15 bp, Homo sapiens
ataaaagagttctgc

SEQ ID NO: 563253 - DNA, 15 bp, Homo sapiens
taaaagagttctgcc

SEQ ID NO: 563254 - DNA, 15 bp, Homo sapiens
aaaagagttctgcct

SEQ ID NO: 563255 - DNA, 15 bp, Homo sapiens
aaagagttctgccta

SEQ ID NO: 563256 - DNA, 15 bp, Homo sapiens
aagagttctgcctac

SEQ ID NO: 563257 - DNA, 15 bp, Homo sapiens
agagttctgcctact

SEQ ID NO: 563258 - DNA, 15 bp, Homo sapiens
gagttctgcctactg

SEQ ID NO: 563259 - DNA, 15 bp, Homo sapiens
agttctgcctactgt

SEQ ID NO: 563260 - DNA, 15 bp, Homo sapiens
gttctgcctactgtg

SEQ ID NO: 563261 - DNA, 15 bp, Homo sapiens
ttctgcctactgtgg

SEQ ID NO: 563262 - DNA, 15 bp, Homo sapiens
tctgcctactgtgga

SEQ ID NO: 563263 - DNA, 15 bp, Homo sapiens
ctgcctactgtggaa

SEQ ID NO: 563264 - DNA, 15 bp, Homo sapiens
tgcctactgtggaac

SEQ ID NO: 563265 - DNA, 15 bp, Homo sapiens
gcctactgtggaacc

SEQ ID NO: 563266 - DNA, 15 bp, Homo sapiens
cctactgtggaacct

SEQ ID NO: 563267 - DNA, 15 bp, Homo sapiens
ctactgtggaacctg

SEQ ID NO: 563268 - DNA, 15 bp, Homo sapiens
tactgtggaacctgc

SEQ ID NO: 563269 - DNA, 15 bp, Homo sapiens
actgtggaacctgct

SEQ ID NO: 563270 - DNA, 15 bp, Homo sapiens
ctgtggaacctgctg

SEQ ID NO: 563271 - DNA, 15 bp, Homo sapiens
tgtggaacctgctgg

SEQ ID NO: 563272 - DNA, 15 bp, Homo sapiens
gtggaacctgctgga

SEQ ID NO: 563273 - DNA, 15 bp, Homo sapiens
tggaacctgctggaa

SEQ ID NO: 563274 - DNA, 15 bp, Homo sapiens
ggaacctgctggaac

SEQ ID NO: 563275 - DNA, 15 bp, Homo sapiens
gaacctgctggaact

SEQ ID NO: 563276 - DNA, 15 bp, Homo sapiens
aacctgctggaactc

SEQ ID NO: 563277 - DNA, 15 bp, Homo sapiens
acctgctggaactca

SEQ ID NO: 563278 - DNA, 15 bp, Homo sapiens
cctgctggaactcat

SEQ ID NO: 563279 - DNA, 15 bp, Homo sapiens
ctgctggaactcatc

SEQ ID NO: 563280 - DNA, 15 bp, Homo sapiens
tgctggaactcatca

SEQ ID NO: 563281 - DNA, 15 bp, Homo sapiens
gctggaactcatcac

SEQ ID NO: 563282 - DNA, 15 bp, Homo sapiens
ctggaactcatcact

SEQ ID NO: 563283 - DNA, 15 bp, Homo sapiens
tggaactcatcactt

SEQ ID NO: 563284 - DNA, 15 bp, Homo sapiens
ggaactcatcacttg

SEQ ID NO: 563285 - DNA, 15 bp, Homo sapiens
gaactcatcacttgt

SEQ ID NO: 563286 - DNA, 15 bp, Homo sapiens
aactcatcacttgtg

SEQ ID NO: 563287 - DNA, 15 bp, Homo sapiens
actcatcacttgtgc

SEQ ID NO: 563288 - DNA, 15 bp, Homo sapiens
ctcatcacttgtgct

SEQ ID NO: 563289 - DNA, 15 bp, Homo sapiens
tcatcacttgtgctg

SEQ ID NO: 563290 - DNA, 15 bp, Homo sapiens
catcacttgtgctga

SEQ ID NO: 563291 - DNA, 15 bp, Homo sapiens
atcacttgtgctgaa

SEQ ID NO: 563292 - DNA, 15 bp, Homo sapiens
tcacttgtgctgaaa

SEQ ID NO: 563293 - DNA, 15 bp, Homo sapiens
cacttgtgctgaaag

SEQ ID NO: 563294 - DNA, 15 bp, Homo sapiens
acttgtgctgaaagt

SEQ ID NO: 563295 - DNA, 15 bp, Homo sapiens
cttgtgctgaaagtg

SEQ ID NO: 563296 - DNA, 15 bp, Homo sapiens
ttgtgctgaaagtgc

SEQ ID NO: 563297 - DNA, 15 bp, Homo sapiens
tgtgctgaaagtgca

SEQ ID NO: 563298 - DNA, 15 bp, Homo sapiens
gtgctgaaagtgcaa

SEQ ID NO: 563299 - DNA, 15 bp, Homo sapiens
tgctgaaagtgcaac

SEQ ID NO: 563300 - DNA, 15 bp, Homo sapiens
gctgaaagtgcaaca

SEQ ID NO: 563301 - DNA, 15 bp, Homo sapiens
ctgaaagtgcaacat

SEQ ID NO: 563302 - DNA, 15 bp, Homo sapiens
tgaaagtgcaacatc

SEQ ID NO: 563303 - DNA, 15 bp, Homo sapiens
gaaagtgcaacatcc

SEQ ID NO: 563304 - DNA, 15 bp, Homo sapiens
aaagtgcaacatccc

SEQ ID NO: 563305 - DNA, 15 bp, Homo sapiens
aagtgcaacatcccc

SEQ ID NO: 563306 - DNA, 15 bp, Homo sapiens
agtgcaacatcccca

SEQ ID NO: 563307 - DNA, 15 bp, Homo sapiens
gtgcaacatccccac

SEQ ID NO: 563308 - DNA, 15 bp, Homo sapiens
tgcaacatccccacc

SEQ ID NO: 563309 - DNA, 15 bp, Homo sapiens
gcaacatccccacca

SEQ ID NO: 563310 - DNA, 15 bp, Homo sapiens
caacatccccaccac

SEQ ID NO: 563311 - DNA, 15 bp, Homo sapiens
aacatccccaccaca

SEQ ID NO: 563312 - DNA, 15 bp, Homo sapiens
acatccccaccacac

SEQ ID NO: 563313 - DNA, 15 bp, Homo sapiens
catccccaccacaca

SEQ ID NO: 563314 - DNA, 15 bp, Homo sapiens
atccccaccacacac

SEQ ID NO: 563315 - DNA, 15 bp, Homo sapiens
tccccaccacacaca

SEQ ID NO: 563316 - DNA, 15 bp, Homo sapiens
ccccaccacacacac

SEQ ID NO: 563317 - DNA, 15 bp, Homo sapiens
cccaccacacacaca

SEQ ID NO: 563318 - DNA, 15 bp, Homo sapiens
ccaccacacacacac

SEQ ID NO: 563319 - DNA, 15 bp, Homo sapiens
caccacacacacaca

SEQ ID NO: 563320 - DNA, 15 bp, Homo sapiens
accacacacacacac

SEQ ID NO: 563321 - DNA, 15 bp, Homo sapiens
ccacacacacacaca

SEQ ID NO: 563322 - DNA, 15 bp, Homo sapiens
acacatacacacact

SEQ ID NO: 563323 - DNA, 15 bp, Homo sapiens
cacatacacacactg

SEQ ID NO: 563324 - DNA, 15 bp, Homo sapiens
acatacacacactga

SEQ ID NO: 563325 - DNA, 15 bp, Homo sapiens
catacacacactgag

SEQ ID NO: 563326 - DNA, 15 bp, Homo sapiens
atacacacactgaga

SEQ ID NO: 563327 - DNA, 15 bp, Homo sapiens
tacacacactgagaa

SEQ ID NO: 563328 - DNA, 15 bp, Homo sapiens
acacacactgagaag

SEQ ID NO: 563329 - DNA, 15 bp, Homo sapiens
cacacactgagaagg

SEQ ID NO: 563330 - DNA, 15 bp, Homo sapiens
acacactgagaagga

SEQ ID NO: 563331 - DNA, 15 bp, Homo sapiens
cacactgagaaggag

SEQ ID NO: 563332 - DNA, 15 bp, Homo sapiens
acactgagaaggagg

SEQ ID NO: 563333 - DNA, 15 bp, Homo sapiens
cactgagaaggagga

SEQ ID NO: 563334 - DNA, 15 bp, Homo sapiens
actgagaaggaggag

SEQ ID NO: 563335 - DNA, 15 bp, Homo sapiens
ctgagaaggaggagg

SEQ ID NO: 563336 - DNA, 15 bp, Homo sapiens
tgagaaggaggagga

SEQ ID NO: 563337 - DNA, 15 bp, Homo sapiens
gagaaggaggaggag

SEQ ID NO: 563338 - DNA, 15 bp, Homo sapiens
agaaggaggaggagg

SEQ ID NO: 563339 - DNA, 15 bp, Homo sapiens
gaaggaggaggaggt

SEQ ID NO: 563340 - DNA, 15 bp, Homo sapiens
aaggaggaggaggta

SEQ ID NO: 563341 - DNA, 15 bp, Homo sapiens
aggaggaggaggtat

SEQ ID NO: 563342 - DNA, 15 bp, Homo sapiens
ggaggaggaggtatg

SEQ ID NO: 563343 - DNA, 15 bp, Homo sapiens
gaggaggaggtatga

SEQ ID NO: 563344 - DNA, 15 bp, Homo sapiens
aggaggaggtatgag

SEQ ID NO: 563345 - DNA, 15 bp, Homo sapiens
ggaggaggtatgagt

SEQ ID NO: 563346 - DNA, 15 bp, Homo sapiens
gaggaggtatgagtg

SEQ ID NO: 563347 - DNA, 15 bp, Homo sapiens
aggaggtatgagtgt

SEQ ID NO: 563348 - DNA, 15 bp, Homo sapiens
ggaggtatgagtgtc

SEQ ID NO: 563349 - DNA, 15 bp, Homo sapiens
gaggtatgagtgtcc

SEQ ID NO: 563350 - DNA, 15 bp, Homo sapiens
aggtatgagtgtcct

SEQ ID NO: 563351 - DNA, 15 bp, Homo sapiens
ggtatgagtgtccta

SEQ ID NO: 563352 - DNA, 15 bp, Homo sapiens
gtatgagtgtcctac

SEQ ID NO: 563353 - DNA, 15 bp, Homo sapiens
tatgagtgtcctacc

SEQ ID NO: 563354 - DNA, 15 bp, Homo sapiens
atgagtgtcctacca

SEQ ID NO: 563355 - DNA, 15 bp, Homo sapiens
tgagtgtcctaccat

SEQ ID NO: 563356 - DNA, 15 bp, Homo sapiens
gagtgtcctaccata

SEQ ID NO: 563357 - DNA, 15 bp, Homo sapiens
agtgtcctaccatag

SEQ ID NO: 563358 - DNA, 15 bp, Homo sapiens
gtgtcctaccataga

SEQ ID NO: 563359 - DNA, 15 bp, Homo sapiens
tgtcctaccatagag

SEQ ID NO: 563360 - DNA, 15 bp, Homo sapiens
gtcctaccatagaga

SEQ ID NO: 563361 - DNA, 15 bp, Homo sapiens
tcctaccatagagat

SEQ ID NO: 563362 - DNA, 15 bp, Homo sapiens
cctaccatagagatg

SEQ ID NO: 563363 - DNA, 15 bp, Homo sapiens
ctaccatagagatgg

SEQ ID NO: 563364 - DNA, 15 bp, Homo sapiens
taccatagagatggc

SEQ ID NO: 563365 - DNA, 15 bp, Homo sapiens
accatagagatggcc

SEQ ID NO: 563366 - DNA, 15 bp, Homo sapiens
ccatagagatggcct

SEQ ID NO: 563367 - DNA, 15 bp, Homo sapiens
catagagatggcctc

SEQ ID NO: 563368 - DNA, 15 bp, Homo sapiens
atagagatggcctca

SEQ ID NO: 563369 - DNA, 15 bp, Homo sapiens
tagagatggcctcag

SEQ ID NO: 563370 - DNA, 15 bp, Homo sapiens
agagatggcctcagt

SEQ ID NO: 563371 - DNA, 15 bp, Homo sapiens
gagatggcctcagtg

SEQ ID NO: 563372 - DNA, 15 bp, Homo sapiens
agatggcctcagtgg

SEQ ID NO: 563373 - DNA, 15 bp, Homo sapiens
gatggcctcagtggt

SEQ ID NO: 563374 - DNA, 15 bp, Homo sapiens
atggcctcagtggtt

SEQ ID NO: 563375 - DNA, 15 bp, Homo sapiens
tggcctcagtggtta

SEQ ID NO: 563376 - DNA, 15 bp, Homo sapiens
ggcctcagtggttac

SEQ ID NO: 563377 - DNA, 15 bp, Homo sapiens
gcctcagtggttacc

SEQ ID NO: 563378 - DNA, 15 bp, Homo sapiens
cctcagtggttacct

SEQ ID NO: 563379 - DNA, 15 bp, Homo sapiens
ctcagtggttacctt

SEQ ID NO: 563380 - DNA, 15 bp, Homo sapiens
tcagtggttacctta

SEQ ID NO: 563381 - DNA, 15 bp, Homo sapiens
cagtggttaccttac

SEQ ID NO: 563382 - DNA, 15 bp, Homo sapiens
agtggttaccttacc

SEQ ID NO: 563383 - DNA, 15 bp, Homo sapiens
gtggttaccttacct

SEQ ID NO: 563384 - DNA, 15 bp, Homo sapiens
tggttaccttacctg

SEQ ID NO: 563385 - DNA, 15 bp, Homo sapiens
ggttaccttacctgt

SEQ ID NO: 563386 - DNA, 15 bp, Homo sapiens
gttaccttacctgtg

SEQ ID NO: 563387 - DNA, 15 bp, Homo sapiens
ttaccttacctgtgt

SEQ ID NO: 563388 - DNA, 15 bp, Homo sapiens
taccttacctgtgtt

SEQ ID NO: 563389 - DNA, 15 bp, Homo sapiens
accttacctgtgttc

SEQ ID NO: 563390 - DNA, 15 bp, Homo sapiens
ccttacctgtgttca

SEQ ID NO: 563391 - DNA, 15 bp, Homo sapiens
cttacctgtgttcac

SEQ ID NO: 563392 - DNA, 15 bp, Homo sapiens
ttacctgtgttcact

SEQ ID NO: 563393 - DNA, 15 bp, Homo sapiens
tacctgtgttcactc

SEQ ID NO: 563394 - DNA, 15 bp, Homo sapiens
acctgtgttcactca

SEQ ID NO: 563395 - DNA, 15 bp, Homo sapiens
cctgtgttcactcaa

SEQ ID NO: 563396 - DNA, 15 bp, Homo sapiens
ctgtgttcactcaag

SEQ ID NO: 563397 - DNA, 15 bp, Homo sapiens
tgtgttcactcaaga

SEQ ID NO: 563398 - DNA, 15 bp, Homo sapiens
gtgttcactcaagag

SEQ ID NO: 563399 - DNA, 15 bp, Homo sapiens
tgttcactcaagagc

SEQ ID NO: 563400 - DNA, 15 bp, Homo sapiens
gttcactcaagagct

SEQ ID NO: 563401 - DNA, 15 bp, Homo sapiens
ttcactcaagagcta

SEQ ID NO: 563402 - DNA, 15 bp, Homo sapiens
tcactcaagagctaa

SEQ ID NO: 563403 - DNA, 15 bp, Homo sapiens
cactcaagagctaaa

SEQ ID NO: 563404 - DNA, 15 bp, Homo sapiens
actcaagagctaaaa

SEQ ID NO: 563405 - DNA, 15 bp, Homo sapiens
ctcaagagctaaaat

SEQ ID NO: 563406 - DNA, 15 bp, Homo sapiens
tcaagagctaaaatg

SEQ ID NO: 563407 - DNA, 15 bp, Homo sapiens
caagagctaaaatgt

SEQ ID NO: 563408 - DNA, 15 bp, Homo sapiens
aagagctaaaatgtt

SEQ ID NO: 563409 - DNA, 15 bp, Homo sapiens
agagctaaaatgttc

SEQ ID NO: 563410 - DNA, 15 bp, Homo sapiens
gagctaaaatgttct

SEQ ID NO: 563411 - DNA, 15 bp, Homo sapiens
agctaaaatgttctc

SEQ ID NO: 563412 - DNA, 15 bp, Homo sapiens
gctaaaatgttctcc

SEQ ID NO: 563413 - DNA, 15 bp, Homo sapiens
ctaaaatgttctccc

SEQ ID NO: 563414 - DNA, 15 bp, Homo sapiens
taaaatgttctcccc

SEQ ID NO: 563415 - DNA, 15 bp, Homo sapiens
aaaatgttctcccca

SEQ ID NO: 563416 - DNA, 15 bp, Homo sapiens
aaatgttctccccaa

SEQ ID NO: 563417 - DNA, 15 bp, Homo sapiens
aatgttctccccaac

SEQ ID NO: 563418 - DNA, 15 bp, Homo sapiens
atgttctccccaacg

SEQ ID NO: 563419 - DNA, 15 bp, Homo sapiens
tgttctccccaacgt

SEQ ID NO: 563420 - DNA, 15 bp, Homo sapiens
gttctccccaacgtc

SEQ ID NO: 563421 - DNA, 15 bp, Homo sapiens
ttctccccaacgtca

SEQ ID NO: 563422 - DNA, 15 bp, Homo sapiens
tctccccaacgtcat

SEQ ID NO: 563423 - DNA, 15 bp, Homo sapiens
ctccccaacgtcatc

SEQ ID NO: 563424 - DNA, 15 bp, Homo sapiens
tccccaacgtcatct

SEQ ID NO: 563425 - DNA, 15 bp, Homo sapiens
ccccaacgtcatctc

SEQ ID NO: 563426 - DNA, 15 bp, Homo sapiens
cccaacgtcatctct

SEQ ID NO: 563427 - DNA, 15 bp, Homo sapiens
ccaacgtcatctctc

SEQ ID NO: 563428 - DNA, 15 bp, Homo sapiens
caacgtcatctctca

SEQ ID NO: 563429 - DNA, 15 bp, Homo sapiens
aacgtcatctctcat

SEQ ID NO: 563430 - DNA, 15 bp, Homo sapiens
acgtcatctctcatc

SEQ ID NO: 563431 - DNA, 15 bp, Homo sapiens
cgtcatctctcatct

SEQ ID NO: 563432 - DNA, 15 bp, Homo sapiens
gtcatctctcatctt

SEQ ID NO: 563433 - DNA, 15 bp, Homo sapiens
tcatctctcatcttt

SEQ ID NO: 563434 - DNA, 15 bp, Homo sapiens
catctctcatctttg

SEQ ID NO: 563435 - DNA, 15 bp, Homo sapiens
atctctcatctttgg

SEQ ID NO: 563436 - DNA, 15 bp, Homo sapiens
tctctcatctttggg

SEQ ID NO: 563437 - DNA, 15 bp, Homo sapiens
ctctcatctttgggt

SEQ ID NO: 563438 - DNA, 15 bp, Homo sapiens
tctcatctttgggta

SEQ ID NO: 563439 - DNA, 15 bp, Homo sapiens
ctcatctttgggtat

SEQ ID NO: 563440 - DNA, 15 bp, Homo sapiens
tcatctttgggtatt

SEQ ID NO: 563441 - DNA, 15 bp, Homo sapiens
catctttgggtattt

SEQ ID NO: 563442 - DNA, 15 bp, Homo sapiens
atctttgggtattta

SEQ ID NO: 563443 - DNA, 15 bp, Homo sapiens
tctttgggtatttaa

SEQ ID NO: 563444 - DNA, 15 bp, Homo sapiens
ctttgggtatttaaa

SEQ ID NO: 563445 - DNA, 15 bp, Homo sapiens
tttgggtatttaaat

SEQ ID NO: 563446 - DNA, 15 bp, Homo sapiens
ttgggtatttaaata

SEQ ID NO: 563447 - DNA, 15 bp, Homo sapiens
tgggtatttaaatat

SEQ ID NO: 563448 - DNA, 15 bp, Homo sapiens
gggtatttaaatatc

SEQ ID NO: 563449 - DNA, 15 bp, Homo sapiens
ggtatttaaatatct

SEQ ID NO: 563450 - DNA, 15 bp, Homo sapiens
gtatttaaatatcta

SEQ ID NO: 563451 - DNA, 15 bp, Homo sapiens
tatttaaatatctaa

SEQ ID NO: 563452 - DNA, 15 bp, Homo sapiens
atttaaatatctaaa

SEQ ID NO: 563453 - DNA, 15 bp, Homo sapiens
tttaaatatctaaaa

SEQ ID NO: 563454 - DNA, 15 bp, Homo sapiens
ttaaatatctaaaat

SEQ ID NO: 563455 - DNA, 15 bp, Homo sapiens
taaatatctaaaata

SEQ ID NO: 563456 - DNA, 15 bp, Homo sapiens
aaatatctaaaatat

SEQ ID NO: 563457 - DNA, 15 bp, Homo sapiens
aatatctaaaatatg

SEQ ID NO: 563458 - DNA, 15 bp, Homo sapiens
atatctaaaatatgt

SEQ ID NO: 563459 - DNA, 15 bp, Homo sapiens
tatctaaaatatgtt

SEQ ID NO: 563460 - DNA, 15 bp, Homo sapiens
atctaaaatatgttt

SEQ ID NO: 563461 - DNA, 15 bp, Homo sapiens
tctaaaatatgtttt

SEQ ID NO: 563462 - DNA, 15 bp, Homo sapiens
ctaaaatatgttttg

SEQ ID NO: 563463 - DNA, 15 bp, Homo sapiens
taaaatatgttttgg

SEQ ID NO: 563464 - DNA, 15 bp, Homo sapiens
aaaatatgttttggg

SEQ ID NO: 563465 - DNA, 15 bp, Homo sapiens
aaatatgttttgggg

SEQ ID NO: 563466 - DNA, 15 bp, Homo sapiens
aatatgttttgggga

SEQ ID NO: 563467 - DNA, 15 bp, Homo sapiens
atatgttttggggat

SEQ ID NO: 563468 - DNA, 15 bp, Homo sapiens
tatgttttggggatg

SEQ ID NO: 563469 - DNA, 15 bp, Homo sapiens
atgttttggggatgc

SEQ ID NO: 563470 - DNA, 15 bp, Homo sapiens
tgttttggggatgcc

SEQ ID NO: 563471 - DNA, 15 bp, Homo sapiens
gttttggggatgccc

SEQ ID NO: 563472 - DNA, 15 bp, Homo sapiens
ttttggggatgccct

SEQ ID NO: 563473 - DNA, 15 bp, Homo sapiens
tttggggatgccctg

SEQ ID NO: 563474 - DNA, 15 bp, Homo sapiens
ttggggatgccctgg

SEQ ID NO: 563475 - DNA, 15 bp, Homo sapiens
tggggatgccctggt

SEQ ID NO: 563476 - DNA, 15 bp, Homo sapiens
ggggatgccctggta

SEQ ID NO: 563477 - DNA, 15 bp, Homo sapiens
gggatgccctggtag

SEQ ID NO: 563478 - DNA, 15 bp, Homo sapiens
ggatgccctggtaga

SEQ ID NO: 563479 - DNA, 15 bp, Homo sapiens
gatgccctggtagaa

SEQ ID NO: 563480 - DNA, 15 bp, Homo sapiens
atgccctggtagaaa

SEQ ID NO: 563481 - DNA, 15 bp, Homo sapiens
tgccctggtagaaat

SEQ ID NO: 563482 - DNA, 15 bp, Homo sapiens
gccctggtagaaatt

SEQ ID NO: 563483 - DNA, 15 bp, Homo sapiens
ccctggtagaaattt

SEQ ID NO: 563484 - DNA, 15 bp, Homo sapiens
cctggtagaaatttc

SEQ ID NO: 563485 - DNA, 15 bp, Homo sapiens
ctggtagaaatttct

SEQ ID NO: 563486 - DNA, 15 bp, Homo sapiens
tggtagaaatttcta

SEQ ID NO: 563487 - DNA, 15 bp, Homo sapiens
ggtagaaatttctac

SEQ ID NO: 563488 - DNA, 15 bp, Homo sapiens
gtagaaatttctaca

SEQ ID NO: 563489 - DNA, 15 bp, Homo sapiens
tagaaatttctacac

SEQ ID NO: 563490 - DNA, 15 bp, Homo sapiens
agaaatttctacaca

SEQ ID NO: 563491 - DNA, 15 bp, Homo sapiens
gaaatttctacacag

SEQ ID NO: 563492 - DNA, 15 bp, Homo sapiens
aaatttctacacagc

SEQ ID NO: 563493 - DNA, 15 bp, Homo sapiens
aatttctacacagct

SEQ ID NO: 563494 - DNA, 15 bp, Homo sapiens
atttctacacagctg

SEQ ID NO: 563495 - DNA, 15 bp, Homo sapiens
tttctacacagctgt

SEQ ID NO: 563496 - DNA, 15 bp, Homo sapiens
ttctacacagctgtg

SEQ ID NO: 563497 - DNA, 15 bp, Homo sapiens
tctacacagctgtgc

SEQ ID NO: 563498 - DNA, 15 bp, Homo sapiens
ctacacagctgtgct

SEQ ID NO: 563499 - DNA, 15 bp, Homo sapiens
tacacagctgtgctc

SEQ ID NO: 563500 - DNA, 15 bp, Homo sapiens
acacagctgtgctca

SEQ ID NO: 563501 - DNA, 15 bp, Homo sapiens
cacagctgtgctcaa

SEQ ID NO: 563502 - DNA, 15 bp, Homo sapiens
acagctgtgctcaaa

SEQ ID NO: 563503 - DNA, 15 bp, Homo sapiens
cagctgtgctcaaaa

SEQ ID NO: 563504 - DNA, 15 bp, Homo sapiens
agctgtgctcaaaag

SEQ ID NO: 563505 - DNA, 15 bp, Homo sapiens
aatgtgttacttctc

SEQ ID NO: 563506 - DNA, 15 bp, Homo sapiens
atgtgttacttctct

SEQ ID NO: 563507 - DNA, 15 bp, Homo sapiens
tgtgttacttctctt

SEQ ID NO: 563508 - DNA, 15 bp, Homo sapiens
gtgttacttctcttc

SEQ ID NO: 563509 - DNA, 15 bp, Homo sapiens
tgttacttctcttct

SEQ ID NO: 563510 - DNA, 15 bp, Homo sapiens
gttacttctcttcta

SEQ ID NO: 563511 - DNA, 15 bp, Homo sapiens
ttacttctcttctac

SEQ ID NO: 563512 - DNA, 15 bp, Homo sapiens
tacttctcttctact

SEQ ID NO: 563513 - DNA, 15 bp, Homo sapiens
acttctcttctactt

SEQ ID NO: 563514 - DNA, 15 bp, Homo sapiens
cttctcttctacttt

SEQ ID NO: 563515 - DNA, 15 bp, Homo sapiens
ttctcttctactttc

SEQ ID NO: 563516 - DNA, 15 bp, Homo sapiens
tctcttctactttct

SEQ ID NO: 563517 - DNA, 15 bp, Homo sapiens
ctcttctactttctg

SEQ ID NO: 563518 - DNA, 15 bp, Homo sapiens
tcttctactttctgt

SEQ ID NO: 563519 - DNA, 15 bp, Homo sapiens
cttctactttctgtt

SEQ ID NO: 563520 - DNA, 15 bp, Homo sapiens
ttctactttctgttc

SEQ ID NO: 563521 - DNA, 15 bp, Homo sapiens
tctactttctgttct

SEQ ID NO: 563522 - DNA, 15 bp, Homo sapiens
ctactttctgttctg

SEQ ID NO: 563523 - DNA, 15 bp, Homo sapiens
tactttctgttctgc

SEQ ID NO: 563524 - DNA, 15 bp, Homo sapiens
actttctgttctgct

SEQ ID NO: 563525 - DNA, 15 bp, Homo sapiens
ctttctgttctgctc

SEQ ID NO: 563526 - DNA, 15 bp, Homo sapiens
tttctgttctgctcc

SEQ ID NO: 563527 - DNA, 15 bp, Homo sapiens
ttctgttctgctccc

SEQ ID NO: 563528 - DNA, 15 bp, Homo sapiens
tctgttctgctccca

SEQ ID NO: 563529 - DNA, 15 bp, Homo sapiens
ctgttctgctcccac

SEQ ID NO: 563530 - DNA, 15 bp, Homo sapiens
tgttctgctcccact

SEQ ID NO: 563531 - DNA, 15 bp, Homo sapiens
gttctgctcccacta

SEQ ID NO: 563532 - DNA, 15 bp, Homo sapiens
ttctgctcccactag

SEQ ID NO: 563533 - DNA, 15 bp, Homo sapiens
tctgctcccactaga

SEQ ID NO: 563534 - DNA, 15 bp, Homo sapiens
ctgctcccactagaa

SEQ ID NO: 563535 - DNA, 15 bp, Homo sapiens
tgctcccactagaat

SEQ ID NO: 563536 - DNA, 15 bp, Homo sapiens
gctcccactagaatt

SEQ ID NO: 563537 - DNA, 15 bp, Homo sapiens
ctcccactagaatta

SEQ ID NO: 563538 - DNA, 15 bp, Homo sapiens
tcccactagaattat

SEQ ID NO: 563539 - DNA, 15 bp, Homo sapiens
cccactagaattatc

SEQ ID NO: 563540 - DNA, 15 bp, Homo sapiens
ccactagaattatct

SEQ ID NO: 563541 - DNA, 15 bp, Homo sapiens
cactagaattatctc

SEQ ID NO: 563542 - DNA, 15 bp, Homo sapiens
actagaattatctcc

SEQ ID NO: 563543 - DNA, 15 bp, Homo sapiens
ctagaattatctcct

SEQ ID NO: 563544 - DNA, 15 bp, Homo sapiens
tagaattatctcctt

SEQ ID NO: 563545 - DNA, 15 bp, Homo sapiens
agaattatctccttc

SEQ ID NO: 563546 - DNA, 15 bp, Homo sapiens
gaattatctccttcc

SEQ ID NO: 563547 - DNA, 15 bp, Homo sapiens
aattatctccttccc

SEQ ID NO: 563548 - DNA, 15 bp, Homo sapiens
attatctccttcccc

SEQ ID NO: 563549 - DNA, 15 bp, Homo sapiens
ttatctccttccccc

SEQ ID NO: 563550 - DNA, 15 bp, Homo sapiens
tatctccttccccca

SEQ ID NO: 563551 - DNA, 15 bp, Homo sapiens
atctccttcccccag

SEQ ID NO: 563552 - DNA, 15 bp, Homo sapiens
tctccttcccccagg

SEQ ID NO: 563553 - DNA, 15 bp, Homo sapiens
ctccttcccccaggc

SEQ ID NO: 563554 - DNA, 15 bp, Homo sapiens
tccttcccccaggcc

SEQ ID NO: 563555 - DNA, 15 bp, Homo sapiens
ccttcccccaggccc

SEQ ID NO: 563556 - DNA, 15 bp, Homo sapiens
cttcccccaggccct

SEQ ID NO: 563557 - DNA, 15 bp, Homo sapiens
ttcccccaggccctc

SEQ ID NO: 563558 - DNA, 15 bp, Homo sapiens
tcccccaggccctca

SEQ ID NO: 563559 - DNA, 15 bp, Homo sapiens
cccccaggccctcag

SEQ ID NO: 563560 - DNA, 15 bp, Homo sapiens
ccccaggccctcaga

SEQ ID NO: 563561 - DNA, 15 bp, Homo sapiens
cccaggccctcagat

SEQ ID NO: 563562 - DNA, 15 bp, Homo sapiens
ccaggccctcagatc

SEQ ID NO: 563563 - DNA, 15 bp, Homo sapiens
caggccctcagatcc

SEQ ID NO: 563564 - DNA, 15 bp, Homo sapiens
aggccctcagatcca

SEQ ID NO: 563565 - DNA, 15 bp, Homo sapiens
ggccctcagatccac

SEQ ID NO: 563566 - DNA, 15 bp, Homo sapiens
gccctcagatccacc

SEQ ID NO: 563567 - DNA, 15 bp, Homo sapiens
ccctcagatccaccc

SEQ ID NO: 563568 - DNA, 15 bp, Homo sapiens
cctcagatccacccc

SEQ ID NO: 563569 - DNA, 15 bp, Homo sapiens
ctcagatccacccca

SEQ ID NO: 563570 - DNA, 15 bp, Homo sapiens
tcagatccaccccac

SEQ ID NO: 563571 - DNA, 15 bp, Homo sapiens
cagatccaccccaca

SEQ ID NO: 563572 - DNA, 15 bp, Homo sapiens
agatccaccccacat

SEQ ID NO: 563573 - DNA, 15 bp, Homo sapiens
gatccaccccacata

SEQ ID NO: 563574 - DNA, 15 bp, Homo sapiens
atccaccccacatac

SEQ ID NO: 563575 - DNA, 15 bp, Homo sapiens
tccaccccacatacc

SEQ ID NO: 563576 - DNA, 15 bp, Homo sapiens
ccaccccacatacca

SEQ ID NO: 563577 - DNA, 15 bp, Homo sapiens
caccccacataccac

SEQ ID NO: 563578 - DNA, 15 bp, Homo sapiens
accccacataccaca

SEQ ID NO: 563579 - DNA, 15 bp, Homo sapiens
ccccacataccacaa

SEQ ID NO: 563580 - DNA, 15 bp, Homo sapiens
cccacataccacaag

SEQ ID NO: 563581 - DNA, 15 bp, Homo sapiens
ccacataccacaagc

SEQ ID NO: 563582 - DNA, 15 bp, Homo sapiens
cacataccacaagct

SEQ ID NO: 563583 - DNA, 15 bp, Homo sapiens
acataccacaagctc

SEQ ID NO: 563584 - DNA, 15 bp, Homo sapiens
cataccacaagctca

SEQ ID NO: 563585 - DNA, 15 bp, Homo sapiens
ataccacaagctcat

SEQ ID NO: 563586 - DNA, 15 bp, Homo sapiens
taccacaagctcatt

SEQ ID NO: 563587 - DNA, 15 bp, Homo sapiens
accacaagctcattc

SEQ ID NO: 563588 - DNA, 15 bp, Homo sapiens
ccacaagctcattct

SEQ ID NO: 563589 - DNA, 15 bp, Homo sapiens
cacaagctcattctt

SEQ ID NO: 563590 - DNA, 15 bp, Homo sapiens
acaagctcattcttc

SEQ ID NO: 563591 - DNA, 15 bp, Homo sapiens
caagctcattcttca

SEQ ID NO: 563592 - DNA, 15 bp, Homo sapiens
aagctcattcttcac

SEQ ID NO: 563593 - DNA, 15 bp, Homo sapiens
agctcattcttcacc

SEQ ID NO: 563594 - DNA, 15 bp, Homo sapiens
gctcattcttcacca

SEQ ID NO: 563595 - DNA, 15 bp, Homo sapiens
ctcattcttcaccac

SEQ ID NO: 563596 - DNA, 15 bp, Homo sapiens
tcattcttcaccaca

SEQ ID NO: 563597 - DNA, 15 bp, Homo sapiens
cattcttcaccacac

SEQ ID NO: 563598 - DNA, 15 bp, Homo sapiens
attcttcaccacacc

SEQ ID NO: 563599 - DNA, 15 bp, Homo sapiens
ttcttcaccacaccc

SEQ ID NO: 563600 - DNA, 15 bp, Homo sapiens
tcttcaccacaccct

SEQ ID NO: 563601 - DNA, 15 bp, Homo sapiens
cttcaccacaccctg

SEQ ID NO: 563602 - DNA, 15 bp, Homo sapiens
ttcaccacaccctgt

SEQ ID NO: 563603 - DNA, 15 bp, Homo sapiens
tcaccacaccctgtt

SEQ ID NO: 563604 - DNA, 15 bp, Homo sapiens
caccacaccctgttt

SEQ ID NO: 563605 - DNA, 15 bp, Homo sapiens
accacaccctgtttt

SEQ ID NO: 563606 - DNA, 15 bp, Homo sapiens
ccacaccctgttttc

SEQ ID NO: 563607 - DNA, 15 bp, Homo sapiens
cacaccctgttttct

SEQ ID NO: 563608 - DNA, 15 bp, Homo sapiens
acaccctgttttcta

SEQ ID NO: 563609 - DNA, 15 bp, Homo sapiens
caccctgttttctag

SEQ ID NO: 563610 - DNA, 15 bp, Homo sapiens
accctgttttctagc

SEQ ID NO: 563611 - DNA, 15 bp, Homo sapiens
ccctgttttctagca

SEQ ID NO: 563612 - DNA, 15 bp, Homo sapiens
cctgttttctagcat

SEQ ID NO: 563613 - DNA, 15 bp, Homo sapiens
ctgttttctagcatg

SEQ ID NO: 563614 - DNA, 15 bp, Homo sapiens
tgttttctagcatgg

SEQ ID NO: 563615 - DNA, 15 bp, Homo sapiens
gttttctagcatggc

SEQ ID NO: 563616 - DNA, 15 bp, Homo sapiens
ttttctagcatggct

SEQ ID NO: 563617 - DNA, 15 bp, Homo sapiens
tttctagcatggctg

SEQ ID NO: 563618 - DNA, 15 bp, Homo sapiens
ttctagcatggctgc

SEQ ID NO: 563619 - DNA, 15 bp, Homo sapiens
tctagcatggctgca

SEQ ID NO: 563620 - DNA, 15 bp, Homo sapiens
ctagcatggctgcaa

SEQ ID NO: 563621 - DNA, 15 bp, Homo sapiens
tagcatggctgcaag

SEQ ID NO: 563622 - DNA, 15 bp, Homo sapiens
agcatggctgcaagc

SEQ ID NO: 563623 - DNA, 15 bp, Homo sapiens
gcatggctgcaagcg

SEQ ID NO: 563624 - DNA, 15 bp, Homo sapiens
catggctgcaagcgc

SEQ ID NO: 563625 - DNA, 15 bp, Homo sapiens
atggctgcaagcgca

SEQ ID NO: 563626 - DNA, 15 bp, Homo sapiens
tggctgcaagcgcaa

SEQ ID NO: 563627 - DNA, 15 bp, Homo sapiens
ggctgcaagcgcaaa

SEQ ID NO: 563628 - DNA, 15 bp, Homo sapiens
gctgcaagcgcaaaa

SEQ ID NO: 563629 - DNA, 15 bp, Homo sapiens
ctgcaagcgcaaaac

SEQ ID NO: 563630 - DNA, 15 bp, Homo sapiens
tgcaagcgcaaaacc

SEQ ID NO: 563631 - DNA, 15 bp, Homo sapiens
gcaagcgcaaaacct

SEQ ID NO: 563632 - DNA, 15 bp, Homo sapiens
caagcgcaaaacctc

SEQ ID NO: 563633 - DNA, 15 bp, Homo sapiens
aagcgcaaaacctcc

SEQ ID NO: 563634 - DNA, 15 bp, Homo sapiens
agcgcaaaacctccc

SEQ ID NO: 563635 - DNA, 15 bp, Homo sapiens
gcgcaaaacctccct

SEQ ID NO: 563636 - DNA, 15 bp, Homo sapiens
cgcaaaacctccctt

SEQ ID NO: 563637 - DNA, 15 bp, Homo sapiens
gcaaaacctccctta

SEQ ID NO: 563638 - DNA, 15 bp, Homo sapiens
caaaacctcccttag

SEQ ID NO: 563639 - DNA, 15 bp, Homo sapiens
aaaacctcccttagt

SEQ ID NO: 563640 - DNA, 15 bp, Homo sapiens
aaacctcccttagtt

SEQ ID NO: 563641 - DNA, 15 bp, Homo sapiens
aacctcccttagttc

SEQ ID NO: 563642 - DNA, 15 bp, Homo sapiens
acctcccttagttcc

SEQ ID NO: 563643 - DNA, 15 bp, Homo sapiens
cctcccttagttccc

SEQ ID NO: 563644 - DNA, 15 bp, Homo sapiens
ctcccttagttccca

SEQ ID NO: 563645 - DNA, 15 bp, Homo sapiens
tcccttagttcccac

SEQ ID NO: 563646 - DNA, 15 bp, Homo sapiens
cccttagttcccacc

SEQ ID NO: 563647 - DNA, 15 bp, Homo sapiens
ccttagttcccacct

SEQ ID NO: 563648 - DNA, 15 bp, Homo sapiens
cttagttcccacctg

SEQ ID NO: 563649 - DNA, 15 bp, Homo sapiens
ttagttcccacctgc

SEQ ID NO: 563650 - DNA, 15 bp, Homo sapiens
tagttcccacctgca

SEQ ID NO: 563651 - DNA, 15 bp, Homo sapiens
agttcccacctgcaa

SEQ ID NO: 563652 - DNA, 15 bp, Homo sapiens
gttcccacctgcaac

SEQ ID NO: 563653 - DNA, 15 bp, Homo sapiens
ttcccacctgcaacg

SEQ ID NO: 563654 - DNA, 15 bp, Homo sapiens
tcccacctgcaacgc

SEQ ID NO: 563655 - DNA, 15 bp, Homo sapiens
cccacctgcaacgcc

SEQ ID NO: 563656 - DNA, 15 bp, Homo sapiens
ccacctgcaacgcca

SEQ ID NO: 563657 - DNA, 15 bp, Homo sapiens
cacctgcaacgccaa

SEQ ID NO: 563658 - DNA, 15 bp, Homo sapiens
acctgcaacgccaag

SEQ ID NO: 563659 - DNA, 15 bp, Homo sapiens
cctgcaacgccaagg

SEQ ID NO: 563660 - DNA, 15 bp, Homo sapiens
ctgcaacgccaaggt

SEQ ID NO: 563661 - DNA, 15 bp, Homo sapiens
tgcaacgccaaggtc

SEQ ID NO: 563662 - DNA, 15 bp, Homo sapiens
gcaacgccaaggtcc

SEQ ID NO: 563663 - DNA, 15 bp, Homo sapiens
caacgccaaggtccc

SEQ ID NO: 563664 - DNA, 15 bp, Homo sapiens
aacgccaaggtccca

SEQ ID NO: 563665 - DNA, 15 bp, Homo sapiens
acgccaaggtcccag

SEQ ID NO: 563666 - DNA, 15 bp, Homo sapiens
cgccaaggtcccaga

SEQ ID NO: 563667 - DNA, 15 bp, Homo sapiens
gccaaggtcccagag

SEQ ID NO: 563668 - DNA, 15 bp, Homo sapiens
ccaaggtcccagagt

SEQ ID NO: 563669 - DNA, 15 bp, Homo sapiens
caaggtcccagagtt

SEQ ID NO: 563670 - DNA, 15 bp, Homo sapiens
aaggtcccagagttt

SEQ ID NO: 563671 - DNA, 15 bp, Homo sapiens
aggtcccagagtttg

SEQ ID NO: 563672 - DNA, 15 bp, Homo sapiens
ggtcccagagtttgc

SEQ ID NO: 563673 - DNA, 15 bp, Homo sapiens
gtcccagagtttgct

SEQ ID NO: 563674 - DNA, 15 bp, Homo sapiens
tcccagagtttgctg

SEQ ID NO: 563675 - DNA, 15 bp, Homo sapiens
cccagagtttgctga

SEQ ID NO: 563676 - DNA, 15 bp, Homo sapiens
ccagagtttgctgag

SEQ ID NO: 563677 - DNA, 15 bp, Homo sapiens
cagagtttgctgagc

SEQ ID NO: 563678 - DNA, 15 bp, Homo sapiens
agagtttgctgagct

SEQ ID NO: 563679 - DNA, 15 bp, Homo sapiens
gagtttgctgagcta

SEQ ID NO: 563680 - DNA, 15 bp, Homo sapiens
agtttgctgagctac

SEQ ID NO: 563681 - DNA, 15 bp, Homo sapiens
gtttgctgagctacc

SEQ ID NO: 563682 - DNA, 15 bp, Homo sapiens
tttgctgagctacca

SEQ ID NO: 563683 - DNA, 15 bp, Homo sapiens
ttgctgagctaccat

SEQ ID NO: 563684 - DNA, 15 bp, Homo sapiens
tgctgagctaccatc

SEQ ID NO: 563685 - DNA, 15 bp, Homo sapiens
gctgagctaccatca

SEQ ID NO: 563686 - DNA, 15 bp, Homo sapiens
ctgagctaccatcag

SEQ ID NO: 563687 - DNA, 15 bp, Homo sapiens
tgagctaccatcagc

SEQ ID NO: 563688 - DNA, 15 bp, Homo sapiens
gagctaccatcagca

SEQ ID NO: 563689 - DNA, 15 bp, Homo sapiens
agctaccatcagcaa

SEQ ID NO: 563690 - DNA, 15 bp, Homo sapiens
gctaccatcagcaag

SEQ ID NO: 563691 - DNA, 15 bp, Homo sapiens
ctaccatcagcaaga

SEQ ID NO: 563692 - DNA, 15 bp, Homo sapiens
taccatcagcaagac

SEQ ID NO: 563693 - DNA, 15 bp, Homo sapiens
accatcagcaagacc

SEQ ID NO: 563694 - DNA, 15 bp, Homo sapiens
ccatcagcaagacct

SEQ ID NO: 563695 - DNA, 15 bp, Homo sapiens
catcagcaagacctt

SEQ ID NO: 563696 - DNA, 15 bp, Homo sapiens
atcagcaagaccttg

SEQ ID NO: 563697 - DNA, 15 bp, Homo sapiens
tcagcaagaccttga

SEQ ID NO: 563698 - DNA, 15 bp, Homo sapiens
cagcaagaccttgaa

SEQ ID NO: 563699 - DNA, 15 bp, Homo sapiens
agcaagaccttgaac

SEQ ID NO: 563700 - DNA, 15 bp, Homo sapiens
gcaagaccttgaaca

SEQ ID NO: 563701 - DNA, 15 bp, Homo sapiens
caagaccttgaacat

SEQ ID NO: 563702 - DNA, 15 bp, Homo sapiens
aagaccttgaacatg

SEQ ID NO: 563703 - DNA, 15 bp, Homo sapiens
agaccttgaacatgc

SEQ ID NO: 563704 - DNA, 15 bp, Homo sapiens
gaccttgaacatgcc

SEQ ID NO: 563705 - DNA, 15 bp, Homo sapiens
accttgaacatgcct

SEQ ID NO: 563706 - DNA, 15 bp, Homo sapiens
ccttgaacatgcctc

SEQ ID NO: 563707 - DNA, 15 bp, Homo sapiens
cttgaacatgcctcg

SEQ ID NO: 563708 - DNA, 15 bp, Homo sapiens
ttgaacatgcctcgg

SEQ ID NO: 563709 - DNA, 15 bp, Homo sapiens
tgaacatgcctcggc

SEQ ID NO: 563710 - DNA, 15 bp, Homo sapiens
gaacatgcctcggcc

SEQ ID NO: 563711 - DNA, 15 bp, Homo sapiens
aacatgcctcggccc

SEQ ID NO: 563712 - DNA, 15 bp, Homo sapiens
acatgcctcggccct

SEQ ID NO: 563713 - DNA, 15 bp, Homo sapiens
catgcctcggccctc

SEQ ID NO: 563714 - DNA, 15 bp, Homo sapiens
atgcctcggccctct

SEQ ID NO: 563715 - DNA, 15 bp, Homo sapiens
tgcctcggccctctc

SEQ ID NO: 563716 - DNA, 15 bp, Homo sapiens
gcctcggccctctct

SEQ ID NO: 563717 - DNA, 15 bp, Homo sapiens
cctcggccctctctc

SEQ ID NO: 563718 - DNA, 15 bp, Homo sapiens
ctcggccctctctcc

SEQ ID NO: 563719 - DNA, 15 bp, Homo sapiens
tcggccctctctcct

SEQ ID NO: 563720 - DNA, 15 bp, Homo sapiens
cggccctctctcctc

SEQ ID NO: 563721 - DNA, 15 bp, Homo sapiens
ggccctctctcctct

SEQ ID NO: 563722 - DNA, 15 bp, Homo sapiens
gccctctctcctctc

SEQ ID NO: 563723 - DNA, 15 bp, Homo sapiens
ccctctctcctctcc

SEQ ID NO: 563724 - DNA, 15 bp, Homo sapiens
cctctctcctctccc

SEQ ID NO: 563725 - DNA, 15 bp, Homo sapiens
ctctctcctctccct

SEQ ID NO: 563726 - DNA, 15 bp, Homo sapiens
tctctcctctccctc

SEQ ID NO: 563727 - DNA, 15 bp, Homo sapiens
ctctcctctccctcc

SEQ ID NO: 563728 - DNA, 15 bp, Homo sapiens
tctcctctccctcca

SEQ ID NO: 563729 - DNA, 15 bp, Homo sapiens
ctcctctccctccac

SEQ ID NO: 563730 - DNA, 15 bp, Homo sapiens
tcctctccctccaca

SEQ ID NO: 563731 - DNA, 15 bp, Homo sapiens
cctctccctccacat

SEQ ID NO: 563732 - DNA, 15 bp, Homo sapiens
ctctccctccacatt

SEQ ID NO: 563733 - DNA, 15 bp, Homo sapiens
tctccctccacattg

SEQ ID NO: 563734 - DNA, 15 bp, Homo sapiens
ctccctccacattgc

SEQ ID NO: 563735 - DNA, 15 bp, Homo sapiens
tccctccacattgct

SEQ ID NO: 563736 - DNA, 15 bp, Homo sapiens
ccctccacattgctc

SEQ ID NO: 563737 - DNA, 15 bp, Homo sapiens
cctccacattgctct

SEQ ID NO: 563738 - DNA, 15 bp, Homo sapiens
ctccacattgctcta

SEQ ID NO: 563739 - DNA, 15 bp, Homo sapiens
tccacattgctctac

SEQ ID NO: 563740 - DNA, 15 bp, Homo sapiens
ccacattgctctact

SEQ ID NO: 563741 - DNA, 15 bp, Homo sapiens
cacattgctctactt

SEQ ID NO: 563742 - DNA, 15 bp, Homo sapiens
acattgctctacttc

SEQ ID NO: 563743 - DNA, 15 bp, Homo sapiens
cattgctctacttca

SEQ ID NO: 563744 - DNA, 15 bp, Homo sapiens
attgctctacttcag

SEQ ID NO: 563745 - DNA, 15 bp, Homo sapiens
ttgctctacttcagt

SEQ ID NO: 563746 - DNA, 15 bp, Homo sapiens
tgctctacttcagtg

SEQ ID NO: 563747 - DNA, 15 bp, Homo sapiens
gctctacttcagtgg

SEQ ID NO: 563748 - DNA, 15 bp, Homo sapiens
ctctacttcagtggt

SEQ ID NO: 563749 - DNA, 15 bp, Homo sapiens
tctacttcagtggta

SEQ ID NO: 563750 - DNA, 15 bp, Homo sapiens
ctacttcagtggtac

SEQ ID NO: 563751 - DNA, 15 bp, Homo sapiens
tacttcagtggtaca

SEQ ID NO: 563752 - DNA, 15 bp, Homo sapiens
acttcagtggtacag

SEQ ID NO: 563753 - DNA, 15 bp, Homo sapiens
cttcagtggtacagc

SEQ ID NO: 563754 - DNA, 15 bp, Homo sapiens
ttcagtggtacagct

SEQ ID NO: 563755 - DNA, 15 bp, Homo sapiens
tcagtggtacagctc

SEQ ID NO: 563756 - DNA, 15 bp, Homo sapiens
cagtggtacagctcc

SEQ ID NO: 563757 - DNA, 15 bp, Homo sapiens
agtggtacagctcct

SEQ ID NO: 563758 - DNA, 15 bp, Homo sapiens
gtggtacagctcctc

SEQ ID NO: 563759 - DNA, 15 bp, Homo sapiens
tggtacagctcctcc

SEQ ID NO: 563760 - DNA, 15 bp, Homo sapiens
ggtacagctcctccc

SEQ ID NO: 563761 - DNA, 15 bp, Homo sapiens
gtacagctcctccca

SEQ ID NO: 563762 - DNA, 15 bp, Homo sapiens
tacagctcctcccat

SEQ ID NO: 563763 - DNA, 15 bp, Homo sapiens
acagctcctcccatg

SEQ ID NO: 563764 - DNA, 15 bp, Homo sapiens
cagctcctcccatgg

SEQ ID NO: 563765 - DNA, 15 bp, Homo sapiens
agctcctcccatggc

SEQ ID NO: 563766 - DNA, 15 bp, Homo sapiens
gctcctcccatggct

SEQ ID NO: 563767 - DNA, 15 bp, Homo sapiens
ctcctcccatggctg

SEQ ID NO: 563768 - DNA, 15 bp, Homo sapiens
tcctcccatggctgt

SEQ ID NO: 563769 - DNA, 15 bp, Homo sapiens
cctcccatggctgtc

SEQ ID NO: 563770 - DNA, 15 bp, Homo sapiens
ctcccatggctgtct

SEQ ID NO: 563771 - DNA, 15 bp, Homo sapiens
tcccatggctgtctc

SEQ ID NO: 563772 - DNA, 15 bp, Homo sapiens
cccatggctgtctct

SEQ ID NO: 563773 - DNA, 15 bp, Homo sapiens
ccatggctgtctcta

SEQ ID NO: 563774 - DNA, 15 bp, Homo sapiens
catggctgtctctag

SEQ ID NO: 563775 - DNA, 15 bp, Homo sapiens
atggctgtctctaga

SEQ ID NO: 563776 - DNA, 15 bp, Homo sapiens
tggctgtctctagac

SEQ ID NO: 563777 - DNA, 15 bp, Homo sapiens
ggctgtctctagacc

SEQ ID NO: 563778 - DNA, 15 bp, Homo sapiens
gctgtctctagacct

SEQ ID NO: 563779 - DNA, 15 bp, Homo sapiens
ctgtctctagacctc

SEQ ID NO: 563780 - DNA, 15 bp, Homo sapiens
tgtctctagacctca

SEQ ID NO: 563781 - DNA, 15 bp, Homo sapiens
gtctctagacctcac

SEQ ID NO: 563782 - DNA, 15 bp, Homo sapiens
tctctagacctcacc

SEQ ID NO: 563783 - DNA, 15 bp, Homo sapiens
ctctagacctcacct

SEQ ID NO: 563784 - DNA, 15 bp, Homo sapiens
tctagacctcacctt

SEQ ID NO: 563785 - DNA, 15 bp, Homo sapiens
ctagacctcaccttg

SEQ ID NO: 563786 - DNA, 15 bp, Homo sapiens
tagacctcaccttga

SEQ ID NO: 563787 - DNA, 15 bp, Homo sapiens
agacctcaccttgac

SEQ ID NO: 563788 - DNA, 15 bp, Homo sapiens
gacctcaccttgaca

SEQ ID NO: 563789 - DNA, 15 bp, Homo sapiens
acctcaccttgacat

SEQ ID NO: 563790 - DNA, 15 bp, Homo sapiens
cctcaccttgacatc

SEQ ID NO: 563791 - DNA, 15 bp, Homo sapiens
ctcaccttgacatct

SEQ ID NO: 563792 - DNA, 15 bp, Homo sapiens
tcaccttgacatctc

SEQ ID NO: 563793 - DNA, 15 bp, Homo sapiens
caccttgacatctca

SEQ ID NO: 563794 - DNA, 15 bp, Homo sapiens
accttgacatctcac

SEQ ID NO: 563795 - DNA, 15 bp, Homo sapiens
ccttgacatctcacc

SEQ ID NO: 563796 - DNA, 15 bp, Homo sapiens
cttgacatctcacca

SEQ ID NO: 563797 - DNA, 15 bp, Homo sapiens
ttgacatctcaccac

SEQ ID NO: 563798 - DNA, 15 bp, Homo sapiens
tgacatctcaccacc

SEQ ID NO: 563799 - DNA, 15 bp, Homo sapiens
gacatctcaccaccc

SEQ ID NO: 563800 - DNA, 15 bp, Homo sapiens
acatctcaccaccca

SEQ ID NO: 563801 - DNA, 15 bp, Homo sapiens
catctcaccacccac

SEQ ID NO: 563802 - DNA, 15 bp, Homo sapiens
atctcaccacccacc

SEQ ID NO: 563803 - DNA, 15 bp, Homo sapiens
tctcaccacccacct

SEQ ID NO: 563804 - DNA, 15 bp, Homo sapiens
ctcaccacccacctc

SEQ ID NO: 563805 - DNA, 15 bp, Homo sapiens
tcaccacccacctct

SEQ ID NO: 563806 - DNA, 15 bp, Homo sapiens
caccacccacctctg

SEQ ID NO: 563807 - DNA, 15 bp, Homo sapiens
accacccacctctgc

SEQ ID NO: 563808 - DNA, 15 bp, Homo sapiens
ccacccacctctgcc

SEQ ID NO: 563809 - DNA, 15 bp, Homo sapiens
cacccacctctgcct

SEQ ID NO: 563810 - DNA, 15 bp, Homo sapiens
acccacctctgcctt

SEQ ID NO: 563811 - DNA, 15 bp, Homo sapiens
cccacctctgccttg

SEQ ID NO: 563812 - DNA, 15 bp, Homo sapiens
ccacctctgccttgt

SEQ ID NO: 563813 - DNA, 15 bp, Homo sapiens
cacctctgccttgtt

SEQ ID NO: 563814 - DNA, 15 bp, Homo sapiens
acctctgccttgttc

SEQ ID NO: 563815 - DNA, 15 bp, Homo sapiens
cctctgccttgttcc

SEQ ID NO: 563816 - DNA, 15 bp, Homo sapiens
ctctgccttgttcct

SEQ ID NO: 563817 - DNA, 15 bp, Homo sapiens
tctgccttgttccta

SEQ ID NO: 563818 - DNA, 15 bp, Homo sapiens
ctgccttgttcctac

SEQ ID NO: 563819 - DNA, 15 bp, Homo sapiens
tgccttgttcctacc

SEQ ID NO: 563820 - DNA, 15 bp, Homo sapiens
gccttgttcctacct

SEQ ID NO: 563821 - DNA, 15 bp, Homo sapiens
ccttgttcctacctg

SEQ ID NO: 563822 - DNA, 15 bp, Homo sapiens
cttgttcctacctga

SEQ ID NO: 563823 - DNA, 15 bp, Homo sapiens
ttgttcctacctgat

SEQ ID NO: 563824 - DNA, 15 bp, Homo sapiens
tgttcctacctgatg

SEQ ID NO: 563825 - DNA, 15 bp, Homo sapiens
gttcctacctgatgc

SEQ ID NO: 563826 - DNA, 15 bp, Homo sapiens
ttcctacctgatgca

SEQ ID NO: 563827 - DNA, 15 bp, Homo sapiens
tcctacctgatgcac

SEQ ID NO: 563828 - DNA, 15 bp, Homo sapiens
cctacctgatgcact

SEQ ID NO: 563829 - DNA, 15 bp, Homo sapiens
ctacctgatgcactc

SEQ ID NO: 563830 - DNA, 15 bp, Homo sapiens
tacctgatgcactct

SEQ ID NO: 563831 - DNA, 15 bp, Homo sapiens
acctgatgcactctc

SEQ ID NO: 563832 - DNA, 15 bp, Homo sapiens
cctgatgcactctcc

SEQ ID NO: 563833 - DNA, 15 bp, Homo sapiens
ctgatgcactctccc

SEQ ID NO: 563834 - DNA, 15 bp, Homo sapiens
tgatgcactctcccc

SEQ ID NO: 563835 - DNA, 15 bp, Homo sapiens
gatgcactctcccct

SEQ ID NO: 563836 - DNA, 15 bp, Homo sapiens
atgcactctcccctc

SEQ ID NO: 563837 - DNA, 15 bp, Homo sapiens
tgcactctcccctct

SEQ ID NO: 563838 - DNA, 15 bp, Homo sapiens
gcactctcccctctc

SEQ ID NO: 563839 - DNA, 15 bp, Homo sapiens
cactctcccctctcc

SEQ ID NO: 563840 - DNA, 15 bp, Homo sapiens
actctcccctctcca

SEQ ID NO: 563841 - DNA, 15 bp, Homo sapiens
ctctcccctctccaa

SEQ ID NO: 563842 - DNA, 15 bp, Homo sapiens
tctcccctctccaaa

SEQ ID NO: 563843 - DNA, 15 bp, Homo sapiens
ctcccctctccaaag

SEQ ID NO: 563844 - DNA, 15 bp, Homo sapiens
tcccctctccaaaga

SEQ ID NO: 563845 - DNA, 15 bp, Homo sapiens
cccctctccaaagag

SEQ ID NO: 563846 - DNA, 15 bp, Homo sapiens
ccctctccaaagagt

SEQ ID NO: 563847 - DNA, 15 bp, Homo sapiens
cctctccaaagagtc

SEQ ID NO: 563848 - DNA, 15 bp, Homo sapiens
ctctccaaagagtca

SEQ ID NO: 563849 - DNA, 15 bp, Homo sapiens
tctccaaagagtcac

SEQ ID NO: 563850 - DNA, 15 bp, Homo sapiens
ctccaaagagtcacc

SEQ ID NO: 563851 - DNA, 15 bp, Homo sapiens
tccaaagagtcacct

SEQ ID NO: 563852 - DNA, 15 bp, Homo sapiens
ccaaagagtcacctg

SEQ ID NO: 563853 - DNA, 15 bp, Homo sapiens
caaagagtcacctgg

SEQ ID NO: 563854 - DNA, 15 bp, Homo sapiens
aaagagtcacctggc

SEQ ID NO: 563855 - DNA, 15 bp, Homo sapiens
aagagtcacctggcc

SEQ ID NO: 563856 - DNA, 15 bp, Homo sapiens
agagtcacctggccc

SEQ ID NO: 563857 - DNA, 15 bp, Homo sapiens
gagtcacctggccct

SEQ ID NO: 563858 - DNA, 15 bp, Homo sapiens
agtcacctggcccta

SEQ ID NO: 563859 - DNA, 15 bp, Homo sapiens
gtcacctggccctag

SEQ ID NO: 563860 - DNA, 15 bp, Homo sapiens
tcacctggccctagt

SEQ ID NO: 563861 - DNA, 15 bp, Homo sapiens
cacctggccctagtt

SEQ ID NO: 563862 - DNA, 15 bp, Homo sapiens
acctggccctagttc

SEQ ID NO: 563863 - DNA, 15 bp, Homo sapiens
cctggccctagttcc

SEQ ID NO: 563864 - DNA, 15 bp, Homo sapiens
ctggccctagttcca

SEQ ID NO: 563865 - DNA, 15 bp, Homo sapiens
tggccctagttccac

SEQ ID NO: 563866 - DNA, 15 bp, Homo sapiens
ggccctagttccact

SEQ ID NO: 563867 - DNA, 15 bp, Homo sapiens
gccctagttccactc

SEQ ID NO: 563868 - DNA, 15 bp, Homo sapiens
ccctagttccactca

SEQ ID NO: 563869 - DNA, 15 bp, Homo sapiens
cctagttccactcac

SEQ ID NO: 563870 - DNA, 15 bp, Homo sapiens
ctagttccactcacc

SEQ ID NO: 563871 - DNA, 15 bp, Homo sapiens
tagttccactcacct

SEQ ID NO: 563872 - DNA, 15 bp, Homo sapiens
agttccactcacctc

SEQ ID NO: 563873 - DNA, 15 bp, Homo sapiens
gttccactcacctct

SEQ ID NO: 563874 - DNA, 15 bp, Homo sapiens
ttccactcacctctc

SEQ ID NO: 563875 - DNA, 15 bp, Homo sapiens
tccactcacctctct

SEQ ID NO: 563876 - DNA, 15 bp, Homo sapiens
ccactcacctctctg

SEQ ID NO: 563877 - DNA, 15 bp, Homo sapiens
cactcacctctctgt

SEQ ID NO: 563878 - DNA, 15 bp, Homo sapiens
actcacctctctgtc

SEQ ID NO: 563879 - DNA, 15 bp, Homo sapiens
ctcacctctctgtca

SEQ ID NO: 563880 - DNA, 15 bp, Homo sapiens
tcacctctctgtcaa

SEQ ID NO: 563881 - DNA, 15 bp, Homo sapiens
cacctctctgtcaac

SEQ ID NO: 563882 - DNA, 15 bp, Homo sapiens
acctctctgtcaacc

SEQ ID NO: 563883 - DNA, 15 bp, Homo sapiens
cctctctgtcaacct

SEQ ID NO: 563884 - DNA, 15 bp, Homo sapiens
ctctctgtcaacctc

SEQ ID NO: 563885 - DNA, 15 bp, Homo sapiens
tctctgtcaacctcc

SEQ ID NO: 563886 - DNA, 15 bp, Homo sapiens
ctctgtcaacctcca

SEQ ID NO: 563887 - DNA, 15 bp, Homo sapiens
tctgtcaacctccag

SEQ ID NO: 563888 - DNA, 15 bp, Homo sapiens
ctgtcaacctccagg

SEQ ID NO: 563889 - DNA, 15 bp, Homo sapiens
tgtcaacctccagga

SEQ ID NO: 563890 - DNA, 15 bp, Homo sapiens
gtcaacctccaggaa

SEQ ID NO: 563891 - DNA, 15 bp, Homo sapiens
tcaacctccaggaac

SEQ ID NO: 563892 - DNA, 15 bp, Homo sapiens
caacctccaggaacc

SEQ ID NO: 563893 - DNA, 15 bp, Homo sapiens
aacctccaggaaccc

SEQ ID NO: 563894 - DNA, 15 bp, Homo sapiens
acctccaggaaccct

SEQ ID NO: 563895 - DNA, 15 bp, Homo sapiens
cctccaggaaccctt

SEQ ID NO: 563896 - DNA, 15 bp, Homo sapiens
ctccaggaacccttt

SEQ ID NO: 563897 - DNA, 15 bp, Homo sapiens
tccaggaacccttta

SEQ ID NO: 563898 - DNA, 15 bp, Homo sapiens
ccaggaaccctttat

SEQ ID NO: 563899 - DNA, 15 bp, Homo sapiens
caggaaccctttatg

SEQ ID NO: 563900 - DNA, 15 bp, Homo sapiens
aggaaccctttatgt

SEQ ID NO: 563901 - DNA, 15 bp, Homo sapiens
ggaaccctttatgtg

SEQ ID NO: 563902 - DNA, 15 bp, Homo sapiens
gaaccctttatgtgt

SEQ ID NO: 563903 - DNA, 15 bp, Homo sapiens
aaccctttatgtgtc

SEQ ID NO: 563904 - DNA, 15 bp, Homo sapiens
accctttatgtgtcc

SEQ ID NO: 563905 - DNA, 15 bp, Homo sapiens
ccctttatgtgtcct

SEQ ID NO: 563906 - DNA, 15 bp, Homo sapiens
cctttatgtgtcctc

SEQ ID NO: 563907 - DNA, 15 bp, Homo sapiens
ctttatgtgtcctcc

SEQ ID NO: 563908 - DNA, 15 bp, Homo sapiens
tttatgtgtcctcca

SEQ ID NO: 563909 - DNA, 15 bp, Homo sapiens
ttatgtgtcctccat

SEQ ID NO: 563910 - DNA, 15 bp, Homo sapiens
tatgtgtcctccatg

SEQ ID NO: 563911 - DNA, 15 bp, Homo sapiens
atgtgtcctccatgc

SEQ ID NO: 563912 - DNA, 15 bp, Homo sapiens
tgtgtcctccatgcc

SEQ ID NO: 563913 - DNA, 15 bp, Homo sapiens
gtgtcctccatgcct

SEQ ID NO: 563914 - DNA, 15 bp, Homo sapiens
tgtcctccatgcctt

SEQ ID NO: 563915 - DNA, 15 bp, Homo sapiens
gtcctccatgcctta

SEQ ID NO: 563916 - DNA, 15 bp, Homo sapiens
tcctccatgccttag

SEQ ID NO: 563917 - DNA, 15 bp, Homo sapiens
cctccatgccttagg

SEQ ID NO: 563918 - DNA, 15 bp, Homo sapiens
ctccatgccttaggc

SEQ ID NO: 563919 - DNA, 15 bp, Homo sapiens
tccatgccttaggca

SEQ ID NO: 563920 - DNA, 15 bp, Homo sapiens
ccatgccttaggcac

SEQ ID NO: 563921 - DNA, 15 bp, Homo sapiens
catgccttaggcaca

SEQ ID NO: 563922 - DNA, 15 bp, Homo sapiens
atgccttaggcacat

SEQ ID NO: 563923 - DNA, 15 bp, Homo sapiens
tgccttaggcacatg

SEQ ID NO: 563924 - DNA, 15 bp, Homo sapiens
gccttaggcacatga

SEQ ID NO: 563925 - DNA, 15 bp, Homo sapiens
ccttaggcacatgac

SEQ ID NO: 563926 - DNA, 15 bp, Homo sapiens
cttaggcacatgacc

SEQ ID NO: 563927 - DNA, 15 bp, Homo sapiens
ttaggcacatgaccc

SEQ ID NO: 563928 - DNA, 15 bp, Homo sapiens
taggcacatgacccg

SEQ ID NO: 563929 - DNA, 15 bp, Homo sapiens
aggcacatgacccgt

SEQ ID NO: 563930 - DNA, 15 bp, Homo sapiens
ggcacatgacccgtg

SEQ ID NO: 563931 - DNA, 15 bp, Homo sapiens
gcacatgacccgtgt

SEQ ID NO: 563932 - DNA, 15 bp, Homo sapiens
cacatgacccgtgtt

SEQ ID NO: 563933 - DNA, 15 bp, Homo sapiens
acatgacccgtgttt

SEQ ID NO: 563934 - DNA, 15 bp, Homo sapiens
catgacccgtgtttc

SEQ ID NO: 563935 - DNA, 15 bp, Homo sapiens
atgacccgtgtttcc

SEQ ID NO: 563936 - DNA, 15 bp, Homo sapiens
tgacccgtgtttcct

SEQ ID NO: 563937 - DNA, 15 bp, Homo sapiens
gacccgtgtttcctc

SEQ ID NO: 563938 - DNA, 15 bp, Homo sapiens
acccgtgtttcctca

SEQ ID NO: 563939 - DNA, 15 bp, Homo sapiens
cccgtgtttcctcac

SEQ ID NO: 563940 - DNA, 15 bp, Homo sapiens
ccgtgtttcctcaca

SEQ ID NO: 563941 - DNA, 15 bp, Homo sapiens
cgtgtttcctcacaa

SEQ ID NO: 563942 - DNA, 15 bp, Homo sapiens
gtgtttcctcacaat

SEQ ID NO: 563943 - DNA, 15 bp, Homo sapiens
tgtttcctcacaatc

SEQ ID NO: 563944 - DNA, 15 bp, Homo sapiens
gtttcctcacaatca

SEQ ID NO: 563945 - DNA, 15 bp, Homo sapiens
tttcctcacaatcac

SEQ ID NO: 563946 - DNA, 15 bp, Homo sapiens
ttcctcacaatcaca

SEQ ID NO: 563947 - DNA, 15 bp, Homo sapiens
tcctcacaatcacag

SEQ ID NO: 563948 - DNA, 15 bp, Homo sapiens
cctcacaatcacagt

SEQ ID NO: 563949 - DNA, 15 bp, Homo sapiens
ctcacaatcacagtt

SEQ ID NO: 563950 - DNA, 15 bp, Homo sapiens
tcacaatcacagtta

SEQ ID NO: 563951 - DNA, 15 bp, Homo sapiens
cacaatcacagttac

SEQ ID NO: 563952 - DNA, 15 bp, Homo sapiens
acaatcacagttacc

SEQ ID NO: 563953 - DNA, 15 bp, Homo sapiens
caatcacagttaccc

SEQ ID NO: 563954 - DNA, 15 bp, Homo sapiens
aatcacagttaccct

SEQ ID NO: 563955 - DNA, 15 bp, Homo sapiens
atcacagttaccctc

SEQ ID NO: 563956 - DNA, 15 bp, Homo sapiens
tcacagttaccctct

SEQ ID NO: 563957 - DNA, 15 bp, Homo sapiens
cacagttaccctctc

SEQ ID NO: 563958 - DNA, 15 bp, Homo sapiens
acagttaccctctca

SEQ ID NO: 563959 - DNA, 15 bp, Homo sapiens
cagttaccctctcat

SEQ ID NO: 563960 - DNA, 15 bp, Homo sapiens
agttaccctctcata

SEQ ID NO: 563961 - DNA, 15 bp, Homo sapiens
gttaccctctcatac

SEQ ID NO: 563962 - DNA, 15 bp, Homo sapiens
ttaccctctcatact

SEQ ID NO: 563963 - DNA, 15 bp, Homo sapiens
taccctctcatactc

SEQ ID NO: 563964 - DNA, 15 bp, Homo sapiens
accctctcatactca

SEQ ID NO: 563965 - DNA, 15 bp, Homo sapiens
ccctctcatactcac

SEQ ID NO: 563966 - DNA, 15 bp, Homo sapiens
cctctcatactcaca

SEQ ID NO: 563967 - DNA, 15 bp, Homo sapiens
ctctcatactcacat

SEQ ID NO: 563968 - DNA, 15 bp, Homo sapiens
tctcatactcacatg

SEQ ID NO: 563969 - DNA, 15 bp, Homo sapiens
ctcatactcacatgc

SEQ ID NO: 563970 - DNA, 15 bp, Homo sapiens
tcatactcacatgca

SEQ ID NO: 563971 - DNA, 15 bp, Homo sapiens
catactcacatgcaa

SEQ ID NO: 563972 - DNA, 15 bp, Homo sapiens
atactcacatgcaag

SEQ ID NO: 563973 - DNA, 15 bp, Homo sapiens
tactcacatgcaagg

SEQ ID NO: 563974 - DNA, 15 bp, Homo sapiens
actcacatgcaagga

SEQ ID NO: 563975 - DNA, 15 bp, Homo sapiens
ctcacatgcaaggac

SEQ ID NO: 563976 - DNA, 15 bp, Homo sapiens
tcacatgcaaggacg

SEQ ID NO: 563977 - DNA, 15 bp, Homo sapiens
cacatgcaaggacga

SEQ ID NO: 563978 - DNA, 15 bp, Homo sapiens
acatgcaaggacgag

SEQ ID NO: 563979 - DNA, 15 bp, Homo sapiens
catgcaaggacgagg

SEQ ID NO: 563980 - DNA, 15 bp, Homo sapiens
atgcaaggacgagga

SEQ ID NO: 563981 - DNA, 15 bp, Homo sapiens
tgcaaggacgaggaa

SEQ ID NO: 563982 - DNA, 15 bp, Homo sapiens
gcaaggacgaggaac

SEQ ID NO: 563983 - DNA, 15 bp, Homo sapiens
caaggacgaggaact

SEQ ID NO: 563984 - DNA, 15 bp, Homo sapiens
aaggacgaggaactt

SEQ ID NO: 563985 - DNA, 15 bp, Homo sapiens
aggacgaggaacttg

SEQ ID NO: 563986 - DNA, 15 bp, Homo sapiens
ggacgaggaacttgt

SEQ ID NO: 563987 - DNA, 15 bp, Homo sapiens
gacgaggaacttgtt

SEQ ID NO: 563988 - DNA, 15 bp, Homo sapiens
acgaggaacttgttt

SEQ ID NO: 563989 - DNA, 15 bp, Homo sapiens
cgaggaacttgtttc

SEQ ID NO: 563990 - DNA, 15 bp, Homo sapiens
gaggaacttgtttcc

SEQ ID NO: 563991 - DNA, 15 bp, Homo sapiens
aggaacttgtttcct

SEQ ID NO: 563992 - DNA, 15 bp, Homo sapiens
ggaacttgtttccta

SEQ ID NO: 563993 - DNA, 15 bp, Homo sapiens
gaacttgtttcctat

SEQ ID NO: 563994 - DNA, 15 bp, Homo sapiens
aacttgtttcctatt

SEQ ID NO: 563995 - DNA, 15 bp, Homo sapiens
acttgtttcctatta

SEQ ID NO: 563996 - DNA, 15 bp, Homo sapiens
cttgtttcctattac

SEQ ID NO: 563997 - DNA, 15 bp, Homo sapiens
ttgtttcctattact

SEQ ID NO: 563998 - DNA, 15 bp, Homo sapiens
tgtttcctattactt

SEQ ID NO: 563999 - DNA, 15 bp, Homo sapiens
gtttcctattacttc

SEQ ID NO: 564000 - DNA, 15 bp, Homo sapiens
tttcctattacttca

SEQ ID NO: 564001 - DNA, 15 bp, Homo sapiens
ttcctattacttcac

SEQ ID NO: 564002 - DNA, 15 bp, Homo sapiens
tcctattacttcaca

SEQ ID NO: 564003 - DNA, 15 bp, Homo sapiens
cctattacttcacac

SEQ ID NO: 564004 - DNA, 15 bp, Homo sapiens
ctattacttcacacc

SEQ ID NO: 564005 - DNA, 15 bp, Homo sapiens
tattacttcacaccc

SEQ ID NO: 564006 - DNA, 15 bp, Homo sapiens
attacttcacaccca

SEQ ID NO: 564007 - DNA, 15 bp, Homo sapiens
ttacttcacacccac

SEQ ID NO: 564008 - DNA, 15 bp, Homo sapiens
tacttcacacccact

SEQ ID NO: 564009 - DNA, 15 bp, Homo sapiens
acttcacacccactc

SEQ ID NO: 564010 - DNA, 15 bp, Homo sapiens
cttcacacccactcc

SEQ ID NO: 564011 - DNA, 15 bp, Homo sapiens
ttcacacccactccc

SEQ ID NO: 564012 - DNA, 15 bp, Homo sapiens
tcacacccactccct

SEQ ID NO: 564013 - DNA, 15 bp, Homo sapiens
cacacccactccctg

SEQ ID NO: 564014 - DNA, 15 bp, Homo sapiens
acacccactccctgg

SEQ ID NO: 564015 - DNA, 15 bp, Homo sapiens
cacccactccctggc

SEQ ID NO: 564016 - DNA, 15 bp, Homo sapiens
acccactccctggcc

SEQ ID NO: 564017 - DNA, 15 bp, Homo sapiens
cccactccctggcca

SEQ ID NO: 564018 - DNA, 15 bp, Homo sapiens
ccactccctggccat

SEQ ID NO: 564019 - DNA, 15 bp, Homo sapiens
cactccctggccatg

SEQ ID NO: 564020 - DNA, 15 bp, Homo sapiens
actccctggccatgc

SEQ ID NO: 564021 - DNA, 15 bp, Homo sapiens
ctccctggccatgca

SEQ ID NO: 564022 - DNA, 15 bp, Homo sapiens
tccctggccatgcac

SEQ ID NO: 564023 - DNA, 15 bp, Homo sapiens
ccctggccatgcaca

SEQ ID NO: 564024 - DNA, 15 bp, Homo sapiens
cctggccatgcacac

SEQ ID NO: 564025 - DNA, 15 bp, Homo sapiens
ctggccatgcacaca

SEQ ID NO: 564026 - DNA, 15 bp, Homo sapiens
tggccatgcacacaa

SEQ ID NO: 564027 - DNA, 15 bp, Homo sapiens
ggccatgcacacaat

SEQ ID NO: 564028 - DNA, 15 bp, Homo sapiens
gccatgcacacaata

SEQ ID NO: 564029 - DNA, 15 bp, Homo sapiens
ccatgcacacaatac

SEQ ID NO: 564030 - DNA, 15 bp, Homo sapiens
catgcacacaataca

SEQ ID NO: 564031 - DNA, 15 bp, Homo sapiens
atgcacacaatacag

SEQ ID NO: 564032 - DNA, 15 bp, Homo sapiens
tgcacacaatacagt

SEQ ID NO: 564033 - DNA, 15 bp, Homo sapiens
gcacacaatacagtg

SEQ ID NO: 564034 - DNA, 15 bp, Homo sapiens
cacacaatacagtgc

SEQ ID NO: 564035 - DNA, 15 bp, Homo sapiens
acacaatacagtgca

SEQ ID NO: 564036 - DNA, 15 bp, Homo sapiens
cacaatacagtgcag

SEQ ID NO: 564037 - DNA, 15 bp, Homo sapiens
acaatacagtgcaga

SEQ ID NO: 564038 - DNA, 15 bp, Homo sapiens
caatacagtgcagaa

SEQ ID NO: 564039 - DNA, 15 bp, Homo sapiens
aatacagtgcagaag

SEQ ID NO: 564040 - DNA, 15 bp, Homo sapiens
atacagtgcagaagt

SEQ ID NO: 564041 - DNA, 15 bp, Homo sapiens
tacagtgcagaagtt

SEQ ID NO: 564042 - DNA, 15 bp, Homo sapiens
acagtgcagaagttg

SEQ ID NO: 564043 - DNA, 15 bp, Homo sapiens
cagtgcagaagttgg

SEQ ID NO: 564044 - DNA, 15 bp, Homo sapiens
agtgcagaagttggt

SEQ ID NO: 564045 - DNA, 15 bp, Homo sapiens
gtgcagaagttggtc

SEQ ID NO: 564046 - DNA, 15 bp, Homo sapiens
tgcagaagttggtcc

SEQ ID NO: 564047 - DNA, 15 bp, Homo sapiens
gcagaagttggtccc

SEQ ID NO: 564048 - DNA, 15 bp, Homo sapiens
cagaagttggtccca

SEQ ID NO: 564049 - DNA, 15 bp, Homo sapiens
agaagttggtcccaa

SEQ ID NO: 564050 - DNA, 15 bp, Homo sapiens
gaagttggtcccaaa

SEQ ID NO: 564051 - DNA, 15 bp, Homo sapiens
aagttggtcccaaat

SEQ ID NO: 564052 - DNA, 15 bp, Homo sapiens
agttggtcccaaatc

SEQ ID NO: 564053 - DNA, 15 bp, Homo sapiens
gttggtcccaaatct

SEQ ID NO: 564054 - DNA, 15 bp, Homo sapiens
ttggtcccaaatcta

SEQ ID NO: 564055 - DNA, 15 bp, Homo sapiens
tggtcccaaatctat

SEQ ID NO: 564056 - DNA, 15 bp, Homo sapiens
ggtcccaaatctatt

SEQ ID NO: 564057 - DNA, 15 bp, Homo sapiens
gtcccaaatctatta

SEQ ID NO: 564058 - DNA, 15 bp, Homo sapiens
tcccaaatctattac

SEQ ID NO: 564059 - DNA, 15 bp, Homo sapiens
cccaaatctattacc

SEQ ID NO: 564060 - DNA, 15 bp, Homo sapiens
ccaaatctattacca

SEQ ID NO: 564061 - DNA, 15 bp, Homo sapiens
caaatctattaccag

SEQ ID NO: 564062 - DNA, 15 bp, Homo sapiens
aaatctattaccaga

SEQ ID NO: 564063 - DNA, 15 bp, Homo sapiens
aatctattaccagag

SEQ ID NO: 564064 - DNA, 15 bp, Homo sapiens
atctattaccagagg

SEQ ID NO: 564065 - DNA, 15 bp, Homo sapiens
tctattaccagaggc

SEQ ID NO: 564066 - DNA, 15 bp, Homo sapiens
ctattaccagaggcc

SEQ ID NO: 564067 - DNA, 15 bp, Homo sapiens
tattaccagaggcct

SEQ ID NO: 564068 - DNA, 15 bp, Homo sapiens
attaccagaggccta

SEQ ID NO: 564069 - DNA, 15 bp, Homo sapiens
ttaccagaggcctaa

SEQ ID NO: 564070 - DNA, 15 bp, Homo sapiens
taccagaggcctaag

SEQ ID NO: 564071 - DNA, 15 bp, Homo sapiens
accagaggcctaagc

SEQ ID NO: 564072 - DNA, 15 bp, Homo sapiens
ccagaggcctaagca

SEQ ID NO: 564073 - DNA, 15 bp, Homo sapiens
cagaggcctaagcag

SEQ ID NO: 564074 - DNA, 15 bp, Homo sapiens
agaggcctaagcagc

SEQ ID NO: 564075 - DNA, 15 bp, Homo sapiens
gaggcctaagcagca

SEQ ID NO: 564076 - DNA, 15 bp, Homo sapiens
aggcctaagcagcag

SEQ ID NO: 564077 - DNA, 15 bp, Homo sapiens
ggcctaagcagcagc

SEQ ID NO: 564078 - DNA, 15 bp, Homo sapiens
gcctaagcagcagcc

SEQ ID NO: 564079 - DNA, 15 bp, Homo sapiens
cctaagcagcagcct

SEQ ID NO: 564080 - DNA, 15 bp, Homo sapiens
ctaagcagcagcctc

SEQ ID NO: 564081 - DNA, 15 bp, Homo sapiens
taagcagcagcctcc

SEQ ID NO: 564082 - DNA, 15 bp, Homo sapiens
aagcagcagcctcct

SEQ ID NO: 564083 - DNA, 15 bp, Homo sapiens
agcagcagcctcctc

SEQ ID NO: 564084 - DNA, 15 bp, Homo sapiens
gcagcagcctcctcc

SEQ ID NO: 564085 - DNA, 15 bp, Homo sapiens
cagcagcctcctcct

SEQ ID NO: 564086 - DNA, 15 bp, Homo sapiens
agcagcctcctcctg

SEQ ID NO: 564087 - DNA, 15 bp, Homo sapiens
gcagcctcctcctgc

SEQ ID NO: 564088 - DNA, 15 bp, Homo sapiens
cagcctcctcctgct

SEQ ID NO: 564089 - DNA, 15 bp, Homo sapiens
agcctcctcctgctc

SEQ ID NO: 564090 - DNA, 15 bp, Homo sapiens
gcctcctcctgctca

SEQ ID NO: 564091 - DNA, 15 bp, Homo sapiens
cctcctcctgctcaa

SEQ ID NO: 564092 - DNA, 15 bp, Homo sapiens
ctcctcctgctcaaa

SEQ ID NO: 564093 - DNA, 15 bp, Homo sapiens
tcctcctgctcaaag

SEQ ID NO: 564094 - DNA, 15 bp, Homo sapiens
cctcctgctcaaaga

SEQ ID NO: 564095 - DNA, 15 bp, Homo sapiens
ctcctgctcaaagaa

SEQ ID NO: 564096 - DNA, 15 bp, Homo sapiens
tcctgctcaaagaaa

SEQ ID NO: 564097 - DNA, 15 bp, Homo sapiens
cctgctcaaagaaaa

SEQ ID NO: 564098 - DNA, 15 bp, Homo sapiens
ctgctcaaagaaaaa

SEQ ID NO: 564099 - DNA, 15 bp, Homo sapiens
tgctcaaagaaaaat

SEQ ID NO: 564100 - DNA, 15 bp, Homo sapiens
gctcaaagaaaaatg

SEQ ID NO: 564101 - DNA, 15 bp, Homo sapiens
ctcaaagaaaaatgt

SEQ ID NO: 564102 - DNA, 15 bp, Homo sapiens
tcaaagaaaaatgtt

SEQ ID NO: 564103 - DNA, 15 bp, Homo sapiens
caaagaaaaatgttc

SEQ ID NO: 564104 - DNA, 15 bp, Homo sapiens
aaagaaaaatgttct

SEQ ID NO: 564105 - DNA, 15 bp, Homo sapiens
aagaaaaatgttctg

SEQ ID NO: 564106 - DNA, 15 bp, Homo sapiens
agaaaaatgttctgc

SEQ ID NO: 564107 - DNA, 15 bp, Homo sapiens
gaaaaatgttctgcc

SEQ ID NO: 564108 - DNA, 15 bp, Homo sapiens
aaaaatgttctgccg

SEQ ID NO: 564109 - DNA, 15 bp, Homo sapiens
aaaatgttctgccgc

SEQ ID NO: 564110 - DNA, 15 bp, Homo sapiens
aaatgttctgccgct

SEQ ID NO: 564111 - DNA, 15 bp, Homo sapiens
aatgttctgccgctg

SEQ ID NO: 564112 - DNA, 15 bp, Homo sapiens
atgttctgccgctgc

SEQ ID NO: 564113 - DNA, 15 bp, Homo sapiens
tgttctgccgctgcc

SEQ ID NO: 564114 - DNA, 15 bp, Homo sapiens
gttctgccgctgcca

SEQ ID NO: 564115 - DNA, 15 bp, Homo sapiens
ttctgccgctgccaa

SEQ ID NO: 564116 - DNA, 15 bp, Homo sapiens
tctgccgctgccaac

SEQ ID NO: 564117 - DNA, 15 bp, Homo sapiens
ctgccgctgccaaca

SEQ ID NO: 564118 - DNA, 15 bp, Homo sapiens
tgccgctgccaacat

SEQ ID NO: 564119 - DNA, 15 bp, Homo sapiens
gccgctgccaacatt

SEQ ID NO: 564120 - DNA, 15 bp, Homo sapiens
ccgctgccaacattg

SEQ ID NO: 564121 - DNA, 15 bp, Homo sapiens
cgctgccaacattgc

SEQ ID NO: 564122 - DNA, 15 bp, Homo sapiens
gctgccaacattgca

SEQ ID NO: 564123 - DNA, 15 bp, Homo sapiens
ctgccaacattgcac

SEQ ID NO: 564124 - DNA, 15 bp, Homo sapiens
tgccaacattgcact

SEQ ID NO: 564125 - DNA, 15 bp, Homo sapiens
gccaacattgcactt

SEQ ID NO: 564126 - DNA, 15 bp, Homo sapiens
ccaacattgcacttc

SEQ ID NO: 564127 - DNA, 15 bp, Homo sapiens
caacattgcacttcc

SEQ ID NO: 564128 - DNA, 15 bp, Homo sapiens
aacattgcacttcct

SEQ ID NO: 564129 - DNA, 15 bp, Homo sapiens
acattgcacttcctc

SEQ ID NO: 564130 - DNA, 15 bp, Homo sapiens
cattgcacttcctct

SEQ ID NO: 564131 - DNA, 15 bp, Homo sapiens
attgcacttcctctg

SEQ ID NO: 564132 - DNA, 15 bp, Homo sapiens
ttgcacttcctctgc

SEQ ID NO: 564133 - DNA, 15 bp, Homo sapiens
tgcacttcctctgca

SEQ ID NO: 564134 - DNA, 15 bp, Homo sapiens
gcacttcctctgcaa

SEQ ID NO: 564135 - DNA, 15 bp, Homo sapiens
cacttcctctgcaag

SEQ ID NO: 564136 - DNA, 15 bp, Homo sapiens
acttcctctgcaaga

SEQ ID NO: 564137 - DNA, 15 bp, Homo sapiens
cttcctctgcaagac

SEQ ID NO: 564138 - DNA, 15 bp, Homo sapiens
ttcctctgcaagaca

SEQ ID NO: 564139 - DNA, 15 bp, Homo sapiens
tcctctgcaagacat

SEQ ID NO: 564140 - DNA, 15 bp, Homo sapiens
cctctgcaagacatc

SEQ ID NO: 564141 - DNA, 15 bp, Homo sapiens
ctctgcaagacatct

SEQ ID NO: 564142 - DNA, 15 bp, Homo sapiens
tctgcaagacatctc

SEQ ID NO: 564143 - DNA, 15 bp, Homo sapiens
ctgcaagacatctca

SEQ ID NO: 564144 - DNA, 15 bp, Homo sapiens
tgcaagacatctcag

SEQ ID NO: 564145 - DNA, 15 bp, Homo sapiens
gcaagacatctcaga

SEQ ID NO: 564146 - DNA, 15 bp, Homo sapiens
caagacatctcagaa

SEQ ID NO: 564147 - DNA, 15 bp, Homo sapiens
aagacatctcagaaa

SEQ ID NO: 564148 - DNA, 15 bp, Homo sapiens
agacatctcagaaaa

SEQ ID NO: 564149 - DNA, 15 bp, Homo sapiens
gacatctcagaaaat

SEQ ID NO: 564150 - DNA, 15 bp, Homo sapiens
acatctcagaaaatg

SEQ ID NO: 564151 - DNA, 15 bp, Homo sapiens
catctcagaaaatgc

SEQ ID NO: 564152 - DNA, 15 bp, Homo sapiens
atctcagaaaatgcc

SEQ ID NO: 564153 - DNA, 15 bp, Homo sapiens
tctcagaaaatgccc

SEQ ID NO: 564154 - DNA, 15 bp, Homo sapiens
ctcagaaaatgccca

SEQ ID NO: 564155 - DNA, 15 bp, Homo sapiens
tcagaaaatgcccat

SEQ ID NO: 564156 - DNA, 15 bp, Homo sapiens
cagaaaatgcccatc

SEQ ID NO: 564157 - DNA, 15 bp, Homo sapiens
agaaaatgcccatca

SEQ ID NO: 564158 - DNA, 15 bp, Homo sapiens
gaaaatgcccatcag

SEQ ID NO: 564159 - DNA, 15 bp, Homo sapiens
aaaatgcccatcaga

SEQ ID NO: 564160 - DNA, 15 bp, Homo sapiens
aaatgcccatcagag

SEQ ID NO: 564161 - DNA, 15 bp, Homo sapiens
aatgcccatcagagc

SEQ ID NO: 564162 - DNA, 15 bp, Homo sapiens
atgcccatcagagcc

SEQ ID NO: 564163 - DNA, 15 bp, Homo sapiens
tgcccatcagagcct

SEQ ID NO: 564164 - DNA, 15 bp, Homo sapiens
gcccatcagagcctt

SEQ ID NO: 564165 - DNA, 15 bp, Homo sapiens
cccatcagagccttc

SEQ ID NO: 564166 - DNA, 15 bp, Homo sapiens
ccatcagagccttcc

SEQ ID NO: 564167 - DNA, 15 bp, Homo sapiens
catcagagccttcca

SEQ ID NO: 564168 - DNA, 15 bp, Homo sapiens
atcagagccttccac

SEQ ID NO: 564169 - DNA, 15 bp, Homo sapiens
tcagagccttccacc

SEQ ID NO: 564170 - DNA, 15 bp, Homo sapiens
cagagccttccacct

SEQ ID NO: 564171 - DNA, 15 bp, Homo sapiens
agagccttccacctc

SEQ ID NO: 564172 - DNA, 15 bp, Homo sapiens
gagccttccacctca

SEQ ID NO: 564173 - DNA, 15 bp, Homo sapiens
agccttccacctcat

SEQ ID NO: 564174 - DNA, 15 bp, Homo sapiens
gccttccacctcatt

SEQ ID NO: 564175 - DNA, 15 bp, Homo sapiens
ccttccacctcattc

SEQ ID NO: 564176 - DNA, 15 bp, Homo sapiens
cttccacctcattcc

SEQ ID NO: 564177 - DNA, 15 bp, Homo sapiens
ttccacctcattcca

SEQ ID NO: 564178 - DNA, 15 bp, Homo sapiens
tccacctcattccaa

SEQ ID NO: 564179 - DNA, 15 bp, Homo sapiens
ccacctcattccaag

SEQ ID NO: 564180 - DNA, 15 bp, Homo sapiens
cacctcattccaagc

SEQ ID NO: 564181 - DNA, 15 bp, Homo sapiens
acctcattccaagct

SEQ ID NO: 564182 - DNA, 15 bp, Homo sapiens
cctcattccaagctt

SEQ ID NO: 564183 - DNA, 15 bp, Homo sapiens
ctcattccaagcttg

SEQ ID NO: 564184 - DNA, 15 bp, Homo sapiens
tcattccaagcttgc

SEQ ID NO: 564185 - DNA, 15 bp, Homo sapiens
cattccaagcttgca

SEQ ID NO: 564186 - DNA, 15 bp, Homo sapiens
attccaagcttgcaa

SEQ ID NO: 564187 - DNA, 15 bp, Homo sapiens
ttccaagcttgcaag

SEQ ID NO: 564188 - DNA, 15 bp, Homo sapiens
tccaagcttgcaagc

SEQ ID NO: 564189 - DNA, 15 bp, Homo sapiens
ccaagcttgcaagca

SEQ ID NO: 564190 - DNA, 15 bp, Homo sapiens
caagcttgcaagcaa

SEQ ID NO: 564191 - DNA, 15 bp, Homo sapiens
aagcttgcaagcaag

SEQ ID NO: 564192 - DNA, 15 bp, Homo sapiens
agcttgcaagcaagc

SEQ ID NO: 564193 - DNA, 15 bp, Homo sapiens
gcttgcaagcaagct

SEQ ID NO: 564194 - DNA, 15 bp, Homo sapiens
cttgcaagcaagctg

SEQ ID NO: 564195 - DNA, 15 bp, Homo sapiens
ttgcaagcaagctgg

SEQ ID NO: 564196 - DNA, 15 bp, Homo sapiens
tgcaagcaagctggt

SEQ ID NO: 564197 - DNA, 15 bp, Homo sapiens
gcaagcaagctggtc

SEQ ID NO: 564198 - DNA, 15 bp, Homo sapiens
caagcaagctggtct

SEQ ID NO: 564199 - DNA, 15 bp, Homo sapiens
aagcaagctggtctt

SEQ ID NO: 564200 - DNA, 15 bp, Homo sapiens
agcaagctggtcttt

SEQ ID NO: 564201 - DNA, 15 bp, Homo sapiens
gcaagctggtctttc

SEQ ID NO: 564202 - DNA, 15 bp, Homo sapiens
caagctggtctttca

SEQ ID NO: 564203 - DNA, 15 bp, Homo sapiens
aagctggtctttcat

SEQ ID NO: 564204 - DNA, 15 bp, Homo sapiens
agctggtctttcatt

SEQ ID NO: 564205 - DNA, 15 bp, Homo sapiens
gctggtctttcattt

SEQ ID NO: 564206 - DNA, 15 bp, Homo sapiens
ctggtctttcatttg

SEQ ID NO: 564207 - DNA, 15 bp, Homo sapiens
tggtctttcatttgt

SEQ ID NO: 564208 - DNA, 15 bp, Homo sapiens
ggtctttcatttgtc

SEQ ID NO: 564209 - DNA, 15 bp, Homo sapiens
gtctttcatttgtct

SEQ ID NO: 564210 - DNA, 15 bp, Homo sapiens
tctttcatttgtctt

SEQ ID NO: 564211 - DNA, 15 bp, Homo sapiens
ctttcatttgtcttg

SEQ ID NO: 564212 - DNA, 15 bp, Homo sapiens
tttcatttgtcttgt

SEQ ID NO: 564213 - DNA, 15 bp, Homo sapiens
ttcatttgtcttgtt

SEQ ID NO: 564214 - DNA, 15 bp, Homo sapiens
tcatttgtcttgttt

SEQ ID NO: 564215 - DNA, 15 bp, Homo sapiens
catttgtcttgtttg

SEQ ID NO: 564216 - DNA, 15 bp, Homo sapiens
atttgtcttgtttgt

SEQ ID NO: 564217 - DNA, 15 bp, Homo sapiens
tttgtcttgtttgtt

SEQ ID NO: 564218 - DNA, 15 bp, Homo sapiens
ttgtcttgtttgttt

SEQ ID NO: 564219 - DNA, 15 bp, Homo sapiens
tgtcttgtttgtttt

SEQ ID NO: 564220 - DNA, 15 bp, Homo sapiens
gtcttgtttgttttt

SEQ ID NO: 564221 - DNA, 15 bp, Homo sapiens
tcttgtttgttttta

SEQ ID NO: 564222 - DNA, 15 bp, Homo sapiens
cttgtttgtttttaa

SEQ ID NO: 564223 - DNA, 15 bp, Homo sapiens
ttgtttgtttttaag

SEQ ID NO: 564224 - DNA, 15 bp, Homo sapiens
tgtttgtttttaagc

SEQ ID NO: 564225 - DNA, 15 bp, Homo sapiens
gtttgtttttaagca

SEQ ID NO: 564226 - DNA, 15 bp, Homo sapiens
tttgtttttaagcaa

SEQ ID NO: 564227 - DNA, 15 bp, Homo sapiens
ttgtttttaagcaag

SEQ ID NO: 564228 - DNA, 15 bp, Homo sapiens
tgtttttaagcaaga

SEQ ID NO: 564229 - DNA, 15 bp, Homo sapiens
gtttttaagcaagaa

SEQ ID NO: 564230 - DNA, 15 bp, Homo sapiens
tttttaagcaagaag

SEQ ID NO: 564231 - DNA, 15 bp, Homo sapiens
ttttaagcaagaaga

SEQ ID NO: 564232 - DNA, 15 bp, Homo sapiens
tttaagcaagaagaa

SEQ ID NO: 564233 - DNA, 15 bp, Homo sapiens
ttaagcaagaagaat

SEQ ID NO: 564234 - DNA, 15 bp, Homo sapiens
taagcaagaagaatc

SEQ ID NO: 564235 - DNA, 15 bp, Homo sapiens
aagcaagaagaatcc

SEQ ID NO: 564236 - DNA, 15 bp, Homo sapiens
agcaagaagaatccc

SEQ ID NO: 564237 - DNA, 15 bp, Homo sapiens
gcaagaagaatccct

SEQ ID NO: 564238 - DNA, 15 bp, Homo sapiens
caagaagaatccctt

SEQ ID NO: 564239 - DNA, 15 bp, Homo sapiens
aagaagaatcccttt

SEQ ID NO: 564240 - DNA, 15 bp, Homo sapiens
agaagaatcccttta

SEQ ID NO: 564241 - DNA, 15 bp, Homo sapiens
gaagaatccctttag

SEQ ID NO: 564242 - DNA, 15 bp, Homo sapiens
aagaatccctttaga

SEQ ID NO: 564243 - DNA, 15 bp, Homo sapiens
agaatccctttagag

SEQ ID NO: 564244 - DNA, 15 bp, Homo sapiens
gaatccctttagagg

SEQ ID NO: 564245 - DNA, 15 bp, Homo sapiens
aatccctttagagga

SEQ ID NO: 564246 - DNA, 15 bp, Homo sapiens
atccctttagaggag

SEQ ID NO: 564247 - DNA, 15 bp, Homo sapiens
tccctttagaggagg

SEQ ID NO: 564248 - DNA, 15 bp, Homo sapiens
ccctttagaggagga

SEQ ID NO: 564249 - DNA, 15 bp, Homo sapiens
cctttagaggaggaa

SEQ ID NO: 564250 - DNA, 15 bp, Homo sapiens
ctttagaggaggaat

SEQ ID NO: 564251 - DNA, 15 bp, Homo sapiens
tttagaggaggaatt

SEQ ID NO: 564252 - DNA, 15 bp, Homo sapiens
ttagaggaggaatta

SEQ ID NO: 564253 - DNA, 15 bp, Homo sapiens
tagaggaggaattag

SEQ ID NO: 564254 - DNA, 15 bp, Homo sapiens
agaggaggaattagg

SEQ ID NO: 564255 - DNA, 15 bp, Homo sapiens
gaggaggaattagga

SEQ ID NO: 564256 - DNA, 15 bp, Homo sapiens
aggaggaattaggaa

SEQ ID NO: 564257 - DNA, 15 bp, Homo sapiens
ggaggaattaggaaa

SEQ ID NO: 564258 - DNA, 15 bp, Homo sapiens
gaggaattaggaaag

SEQ ID NO: 564259 - DNA, 15 bp, Homo sapiens
aggaattaggaaaga

SEQ ID NO: 564260 - DNA, 15 bp, Homo sapiens
ggaattaggaaagaa

SEQ ID NO: 564261 - DNA, 15 bp, Homo sapiens
gaattaggaaagaaa

SEQ ID NO: 564262 - DNA, 15 bp, Homo sapiens
aattaggaaagaaaa

SEQ ID NO: 564263 - DNA, 15 bp, Homo sapiens
attaggaaagaaaaa

SEQ ID NO: 564264 - DNA, 15 bp, Homo sapiens
ttaggaaagaaaaaa

SEQ ID NO: 564265 - DNA, 15 bp, Homo sapiens
taggaaagaaaaaaa

SEQ ID NO: 564266 - DNA, 15 bp, Homo sapiens
aggaaagaaaaaaaa

SEQ ID NO: 564267 - DNA, 15 bp, Homo sapiens
ggaaagaaaaaaaag

SEQ ID NO: 564268 - DNA, 15 bp, Homo sapiens
gaaagaaaaaaaagt

SEQ ID NO: 564269 - DNA, 15 bp, Homo sapiens
aaagaaaaaaaagtc

SEQ ID NO: 564270 - DNA, 15 bp, Homo sapiens
aagaaaaaaaagtca

SEQ ID NO: 564271 - DNA, 15 bp, Homo sapiens
agaaaaaaaagtcaa

SEQ ID NO: 564272 - DNA, 15 bp, Homo sapiens
gaaaaaaaagtcaaa

SEQ ID NO: 564273 - DNA, 15 bp, Homo sapiens
aaaaaaaagtcaaac

SEQ ID NO: 564274 - DNA, 15 bp, Homo sapiens
aaaaaaagtcaaaca

SEQ ID NO: 564275 - DNA, 15 bp, Homo sapiens
aaaaaagtcaaacag

SEQ ID NO: 564276 - DNA, 15 bp, Homo sapiens
aaaaagtcaaacaga

SEQ ID NO: 564277 - DNA, 15 bp, Homo sapiens
aaaagtcaaacagaa

SEQ ID NO: 564278 - DNA, 15 bp, Homo sapiens
aaagtcaaacagaaa

SEQ ID NO: 564279 - DNA, 15 bp, Homo sapiens
aagtcaaacagaaac

SEQ ID NO: 564280 - DNA, 15 bp, Homo sapiens
agtcaaacagaaaca

SEQ ID NO: 564281 - DNA, 15 bp, Homo sapiens
gtcaaacagaaacag

SEQ ID NO: 564282 - DNA, 15 bp, Homo sapiens
tcaaacagaaacaga

SEQ ID NO: 564283 - DNA, 15 bp, Homo sapiens
caaacagaaacagaa

SEQ ID NO: 564284 - DNA, 15 bp, Homo sapiens
aacagaaacagaagg

SEQ ID NO: 564285 - DNA, 15 bp, Homo sapiens
acagaaacagaagga

SEQ ID NO: 564286 - DNA, 15 bp, Homo sapiens
cagaaacagaaggag

SEQ ID NO: 564287 - DNA, 15 bp, Homo sapiens
agaaacagaaggagt

SEQ ID NO: 564288 - DNA, 15 bp, Homo sapiens
gaaacagaaggagtg

SEQ ID NO: 564289 - DNA, 15 bp, Homo sapiens
aaacagaaggagtgg

SEQ ID NO: 564290 - DNA, 15 bp, Homo sapiens
aacagaaggagtgga

SEQ ID NO: 564291 - DNA, 15 bp, Homo sapiens
acagaaggagtggag

SEQ ID NO: 564292 - DNA, 15 bp, Homo sapiens
cagaaggagtggagg

SEQ ID NO: 564293 - DNA, 15 bp, Homo sapiens
agaaggagtggaggt

SEQ ID NO: 564294 - DNA, 15 bp, Homo sapiens
gaaggagtggaggtt

SEQ ID NO: 564295 - DNA, 15 bp, Homo sapiens
aaggagtggaggttt

SEQ ID NO: 564296 - DNA, 15 bp, Homo sapiens
aggagtggaggtttg

SEQ ID NO: 564297 - DNA, 15 bp, Homo sapiens
ggagtggaggtttgt

SEQ ID NO: 564298 - DNA, 15 bp, Homo sapiens
gagtggaggtttgtc

SEQ ID NO: 564299 - DNA, 15 bp, Homo sapiens
agtggaggtttgtct

SEQ ID NO: 564300 - DNA, 15 bp, Homo sapiens
gtggaggtttgtctc

SEQ ID NO: 564301 - DNA, 15 bp, Homo sapiens
tggaggtttgtctct

SEQ ID NO: 564302 - DNA, 15 bp, Homo sapiens
ggaggtttgtctctc

SEQ ID NO: 564303 - DNA, 15 bp, Homo sapiens
gaggtttgtctctct

SEQ ID NO: 564304 - DNA, 15 bp, Homo sapiens
aggtttgtctctctc

SEQ ID NO: 564305 - DNA, 15 bp, Homo sapiens
ggtttgtctctctct

SEQ ID NO: 564306 - DNA, 15 bp, Homo sapiens
gtttgtctctctctt

SEQ ID NO: 564307 - DNA, 15 bp, Homo sapiens
tttgtctctctcttt

SEQ ID NO: 564308 - DNA, 15 bp, Homo sapiens
ttgtctctctctttt

SEQ ID NO: 564309 - DNA, 15 bp, Homo sapiens
tgtctctctcttttg

SEQ ID NO: 564310 - DNA, 15 bp, Homo sapiens
gtctctctcttttgt

SEQ ID NO: 564311 - DNA, 15 bp, Homo sapiens
tctctctcttttgtc

SEQ ID NO: 564312 - DNA, 15 bp, Homo sapiens
ctctctcttttgtcc

SEQ ID NO: 564313 - DNA, 15 bp, Homo sapiens
tctctcttttgtccc

SEQ ID NO: 564314 - DNA, 15 bp, Homo sapiens
ctctcttttgtcccc

SEQ ID NO: 564315 - DNA, 15 bp, Homo sapiens
tctcttttgtcccct

SEQ ID NO: 564316 - DNA, 15 bp, Homo sapiens
ctcttttgtcccctg

SEQ ID NO: 564317 - DNA, 15 bp, Homo sapiens
tcttttgtcccctgc

SEQ ID NO: 564318 - DNA, 15 bp, Homo sapiens
cttttgtcccctgcc

SEQ ID NO: 564319 - DNA, 15 bp, Homo sapiens
ttttgtcccctgcct

SEQ ID NO: 564320 - DNA, 15 bp, Homo sapiens
tttgtcccctgcctt

SEQ ID NO: 564321 - DNA, 15 bp, Homo sapiens
ttgtcccctgccttg

SEQ ID NO: 564322 - DNA, 15 bp, Homo sapiens
tgtcccctgccttgc

SEQ ID NO: 564323 - DNA, 15 bp, Homo sapiens
gtcccctgccttgcc

SEQ ID NO: 564324 - DNA, 15 bp, Homo sapiens
tcccctgccttgccc

SEQ ID NO: 564325 - DNA, 15 bp, Homo sapiens
cccctgccttgccct

SEQ ID NO: 564326 - DNA, 15 bp, Homo sapiens
ccctgccttgccctt

SEQ ID NO: 564327 - DNA, 15 bp, Homo sapiens
cctgccttgcccttc

SEQ ID NO: 564328 - DNA, 15 bp, Homo sapiens
ctgccttgcccttcc

SEQ ID NO: 564329 - DNA, 15 bp, Homo sapiens
tgccttgcccttcct

SEQ ID NO: 564330 - DNA, 15 bp, Homo sapiens
gccttgcccttcctc

SEQ ID NO: 564331 - DNA, 15 bp, Homo sapiens
ccttgcccttcctcc

SEQ ID NO: 564332 - DNA, 15 bp, Homo sapiens
cttgcccttcctccc

SEQ ID NO: 564333 - DNA, 15 bp, Homo sapiens
ttgcccttcctccct

SEQ ID NO: 564334 - DNA, 15 bp, Homo sapiens
tgcccttcctcccta

SEQ ID NO: 564335 - DNA, 15 bp, Homo sapiens
gcccttcctccctat

SEQ ID NO: 564336 - DNA, 15 bp, Homo sapiens
cccttcctccctatc

SEQ ID NO: 564337 - DNA, 15 bp, Homo sapiens
ccttcctccctatcc

SEQ ID NO: 564338 - DNA, 15 bp, Homo sapiens
cttcctccctatccc

SEQ ID NO: 564339 - DNA, 15 bp, Homo sapiens
ttcctccctatccca

SEQ ID NO: 564340 - DNA, 15 bp, Homo sapiens
tcctccctatcccat

SEQ ID NO: 564341 - DNA, 15 bp, Homo sapiens
cctccctatcccatc

SEQ ID NO: 564342 - DNA, 15 bp, Homo sapiens
ctccctatcccatcc

SEQ ID NO: 564343 - DNA, 15 bp, Homo sapiens
tccctatcccatccc

SEQ ID NO: 564344 - DNA, 15 bp, Homo sapiens
ccctatcccatcccc

SEQ ID NO: 564345 - DNA, 15 bp, Homo sapiens
cctatcccatccccc

SEQ ID NO: 564346 - DNA, 15 bp, Homo sapiens
ctatcccatccccct

SEQ ID NO: 564347 - DNA, 15 bp, Homo sapiens
tatcccatccccctc

SEQ ID NO: 564348 - DNA, 15 bp, Homo sapiens
atcccatccccctca

SEQ ID NO: 564349 - DNA, 15 bp, Homo sapiens
tcccatccccctcac

SEQ ID NO: 564350 - DNA, 15 bp, Homo sapiens
cccatccccctcact

SEQ ID NO: 564351 - DNA, 15 bp, Homo sapiens
ccatccccctcactt

SEQ ID NO: 564352 - DNA, 15 bp, Homo sapiens
catccccctcacttt

SEQ ID NO: 564353 - DNA, 15 bp, Homo sapiens
atccccctcactttc

SEQ ID NO: 564354 - DNA, 15 bp, Homo sapiens
tccccctcactttct

SEQ ID NO: 564355 - DNA, 15 bp, Homo sapiens
cccctcactttctgt

SEQ ID NO: 564356 - DNA, 15 bp, Homo sapiens
ccctcactttctgtg

SEQ ID NO: 564357 - DNA, 15 bp, Homo sapiens
cctcactttctgtgt

SEQ ID NO: 564358 - DNA, 15 bp, Homo sapiens
ctcactttctgtgtt

SEQ ID NO: 564359 - DNA, 15 bp, Homo sapiens
tcactttctgtgttg

SEQ ID NO: 564360 - DNA, 15 bp, Homo sapiens
cactttctgtgttgc

SEQ ID NO: 564361 - DNA, 15 bp, Homo sapiens
actttctgtgttgct

SEQ ID NO: 564362 - DNA, 15 bp, Homo sapiens
ctttctgtgttgctt

SEQ ID NO: 564363 - DNA, 15 bp, Homo sapiens
tttctgtgttgcttt

SEQ ID NO: 564364 - DNA, 15 bp, Homo sapiens
ttctgtgttgctttt

SEQ ID NO: 564365 - DNA, 15 bp, Homo sapiens
tctgtgttgcttttc

SEQ ID NO: 564366 - DNA, 15 bp, Homo sapiens
ctgtgttgcttttca

SEQ ID NO: 564367 - DNA, 15 bp, Homo sapiens
tgtgttgcttttcat

SEQ ID NO: 564368 - DNA, 15 bp, Homo sapiens
gtgttgcttttcatg

SEQ ID NO: 564369 - DNA, 15 bp, Homo sapiens
tgttgcttttcatgc

SEQ ID NO: 564370 - DNA, 15 bp, Homo sapiens
gttgcttttcatgcc

SEQ ID NO: 564371 - DNA, 15 bp, Homo sapiens
ttgcttttcatgcca

SEQ ID NO: 564372 - DNA, 15 bp, Homo sapiens
tgcttttcatgccag

SEQ ID NO: 564373 - DNA, 15 bp, Homo sapiens
gcttttcatgccagt

SEQ ID NO: 564374 - DNA, 15 bp, Homo sapiens
cttttcatgccagtt

SEQ ID NO: 564375 - DNA, 15 bp, Homo sapiens
ttttcatgccagttg

SEQ ID NO: 564376 - DNA, 15 bp, Homo sapiens
tttcatgccagttgc

SEQ ID NO: 564377 - DNA, 15 bp, Homo sapiens
ttcatgccagttgct

SEQ ID NO: 564378 - DNA, 15 bp, Homo sapiens
tcatgccagttgcta

SEQ ID NO: 564379 - DNA, 15 bp, Homo sapiens
catgccagttgctaa

SEQ ID NO: 564380 - DNA, 15 bp, Homo sapiens
atgccagttgctaaa

SEQ ID NO: 564381 - DNA, 15 bp, Homo sapiens
tgccagttgctaaag

SEQ ID NO: 564382 - DNA, 15 bp, Homo sapiens
gccagttgctaaaga

SEQ ID NO: 564383 - DNA, 15 bp, Homo sapiens
ccagttgctaaagac

SEQ ID NO: 564384 - DNA, 15 bp, Homo sapiens
cagttgctaaagact

SEQ ID NO: 564385 - DNA, 15 bp, Homo sapiens
agttgctaaagactg

SEQ ID NO: 564386 - DNA, 15 bp, Homo sapiens
gttgctaaagactgt

SEQ ID NO: 564387 - DNA, 15 bp, Homo sapiens
ttgctaaagactgta

SEQ ID NO: 564388 - DNA, 15 bp, Homo sapiens
tgctaaagactgtaa

SEQ ID NO: 564389 - DNA, 15 bp, Homo sapiens
gctaaagactgtaat

SEQ ID NO: 564390 - DNA, 15 bp, Homo sapiens
ctaaagactgtaatt

SEQ ID NO: 564391 - DNA, 15 bp, Homo sapiens
taaagactgtaattt

SEQ ID NO: 564392 - DNA, 15 bp, Homo sapiens
aaagactgtaatttt

SEQ ID NO: 564393 - DNA, 15 bp, Homo sapiens
aagactgtaatttta

SEQ ID NO: 564394 - DNA, 15 bp, Homo sapiens
agactgtaattttaa

SEQ ID NO: 564395 - DNA, 15 bp, Homo sapiens
gactgtaattttaaa

SEQ ID NO: 564396 - DNA, 15 bp, Homo sapiens
actgtaattttaaaa

SEQ ID NO: 564397 - DNA, 15 bp, Homo sapiens
ctgtaattttaaaac

SEQ ID NO: 564398 - DNA, 15 bp, Homo sapiens
tgtaattttaaaact

SEQ ID NO: 564399 - DNA, 15 bp, Homo sapiens
gtaattttaaaactg

SEQ ID NO: 564400 - DNA, 15 bp, Homo sapiens
taattttaaaactga

SEQ ID NO: 564401 - DNA, 15 bp, Homo sapiens
aattttaaaactgaa

SEQ ID NO: 564402 - DNA, 15 bp, Homo sapiens
attttaaaactgaac

SEQ ID NO: 564403 - DNA, 15 bp, Homo sapiens
ttttaaaactgaacg

SEQ ID NO: 564404 - DNA, 15 bp, Homo sapiens
tttaaaactgaacgg

SEQ ID NO: 564405 - DNA, 15 bp, Homo sapiens
ttaaaactgaacggg

SEQ ID NO: 564406 - DNA, 15 bp, Homo sapiens
taaaactgaacgggc

SEQ ID NO: 564407 - DNA, 15 bp, Homo sapiens
aaaactgaacgggct

SEQ ID NO: 564408 - DNA, 15 bp, Homo sapiens
aaactgaacgggctt

SEQ ID NO: 564409 - DNA, 15 bp, Homo sapiens
aactgaacgggcttt

SEQ ID NO: 564410 - DNA, 15 bp, Homo sapiens
actgaacgggctttt

SEQ ID NO: 564411 - DNA, 15 bp, Homo sapiens
ctgaacgggcttttc

SEQ ID NO: 564412 - DNA, 15 bp, Homo sapiens
tgaacgggcttttcc

SEQ ID NO: 564413 - DNA, 15 bp, Homo sapiens
gaacgggcttttcca

SEQ ID NO: 564414 - DNA, 15 bp, Homo sapiens
aacgggcttttccag

SEQ ID NO: 564415 - DNA, 15 bp, Homo sapiens
acgggcttttccaga

SEQ ID NO: 564416 - DNA, 15 bp, Homo sapiens
cgggcttttccagag

SEQ ID NO: 564417 - DNA, 15 bp, Homo sapiens
gggcttttccagagc

SEQ ID NO: 564418 - DNA, 15 bp, Homo sapiens
ggcttttccagagcc

SEQ ID NO: 564419 - DNA, 15 bp, Homo sapiens
gcttttccagagcct

SEQ ID NO: 564420 - DNA, 15 bp, Homo sapiens
cttttccagagcctt

SEQ ID NO: 564421 - DNA, 15 bp, Homo sapiens
ttttccagagccttg

SEQ ID NO: 564422 - DNA, 15 bp, Homo sapiens
tttccagagccttga

SEQ ID NO: 564423 - DNA, 15 bp, Homo sapiens
ttccagagccttgag

SEQ ID NO: 564424 - DNA, 15 bp, Homo sapiens
tccagagccttgagg

SEQ ID NO: 564425 - DNA, 15 bp, Homo sapiens
ccagagccttgagga

SEQ ID NO: 564426 - DNA, 15 bp, Homo sapiens
cagagccttgaggaa

SEQ ID NO: 564427 - DNA, 15 bp, Homo sapiens
agagccttgaggaat

SEQ ID NO: 564428 - DNA, 15 bp, Homo sapiens
gagccttgaggaatg

SEQ ID NO: 564429 - DNA, 15 bp, Homo sapiens
agccttgaggaatgt

SEQ ID NO: 564430 - DNA, 15 bp, Homo sapiens
gccttgaggaatgtg

SEQ ID NO: 564431 - DNA, 15 bp, Homo sapiens
ccttgaggaatgtgc

SEQ ID NO: 564432 - DNA, 15 bp, Homo sapiens
cttgaggaatgtgca

SEQ ID NO: 564433 - DNA, 15 bp, Homo sapiens
ttgaggaatgtgcat

SEQ ID NO: 564434 - DNA, 15 bp, Homo sapiens
tgaggaatgtgcatc

SEQ ID NO: 564435 - DNA, 15 bp, Homo sapiens
gaggaatgtgcatct

SEQ ID NO: 564436 - DNA, 15 bp, Homo sapiens
aggaatgtgcatctg

SEQ ID NO: 564437 - DNA, 15 bp, Homo sapiens
ggaatgtgcatctgc

SEQ ID NO: 564438 - DNA, 15 bp, Homo sapiens
gaatgtgcatctgca

SEQ ID NO: 564439 - DNA, 15 bp, Homo sapiens
aatgtgcatctgcac

SEQ ID NO: 564440 - DNA, 15 bp, Homo sapiens
atgtgcatctgcacg

SEQ ID NO: 564441 - DNA, 15 bp, Homo sapiens
tgtgcatctgcacgt

SEQ ID NO: 564442 - DNA, 15 bp, Homo sapiens
gtgcatctgcacgtg

SEQ ID NO: 564443 - DNA, 15 bp, Homo sapiens
tgcatctgcacgtgg

SEQ ID NO: 564444 - DNA, 15 bp, Homo sapiens
gcatctgcacgtgga

SEQ ID NO: 564445 - DNA, 15 bp, Homo sapiens
catctgcacgtggat

SEQ ID NO: 564446 - DNA, 15 bp, Homo sapiens
atctgcacgtggatt

SEQ ID NO: 564447 - DNA, 15 bp, Homo sapiens
tctgcacgtggattt

SEQ ID NO: 564448 - DNA, 15 bp, Homo sapiens
ctgcacgtggatttt

SEQ ID NO: 564449 - DNA, 15 bp, Homo sapiens
tgcacgtggattttt

SEQ ID NO: 564450 - DNA, 15 bp, Homo sapiens
gcacgtggatttttc

SEQ ID NO: 564451 - DNA, 15 bp, Homo sapiens
cacgtggatttttcc

SEQ ID NO: 564452 - DNA, 15 bp, Homo sapiens
acgtggatttttcca

SEQ ID NO: 564453 - DNA, 15 bp, Homo sapiens
cgtggatttttccac

SEQ ID NO: 564454 - DNA, 15 bp, Homo sapiens
gtggatttttccaca

SEQ ID NO: 564455 - DNA, 15 bp, Homo sapiens
tggatttttccacaa

SEQ ID NO: 564456 - DNA, 15 bp, Homo sapiens
ggatttttccacaaa

SEQ ID NO: 564457 - DNA, 15 bp, Homo sapiens
gatttttccacaaaa

SEQ ID NO: 564458 - DNA, 15 bp, Homo sapiens
atttttccacaaaaa

SEQ ID NO: 564459 - DNA, 15 bp, Homo sapiens
tttttccacaaaaaa

SEQ ID NO: 564460 - DNA, 15 bp, Homo sapiens
ttttccacaaaaaaa

SEQ ID NO: 564461 - DNA, 15 bp, Homo sapiens
tttccacaaaaaaag

SEQ ID NO: 564462 - DNA, 15 bp, Homo sapiens
ttccacaaaaaaagt

SEQ ID NO: 564463 - DNA, 15 bp, Homo sapiens
tccacaaaaaaagtg

SEQ ID NO: 564464 - DNA, 15 bp, Homo sapiens
ccacaaaaaaagtgt

SEQ ID NO: 564465 - DNA, 15 bp, Homo sapiens
cacaaaaaaagtgtc

SEQ ID NO: 564466 - DNA, 15 bp, Homo sapiens
acaaaaaaagtgtcc

SEQ ID NO: 564467 - DNA, 15 bp, Homo sapiens
caaaaaaagtgtccc

SEQ ID NO: 564468 - DNA, 15 bp, Homo sapiens
aaaaaaagtgtccct

SEQ ID NO: 564469 - DNA, 15 bp, Homo sapiens
aaaaaagtgtccctg

SEQ ID NO: 564470 - DNA, 15 bp, Homo sapiens
aaaaagtgtccctgt

SEQ ID NO: 564471 - DNA, 15 bp, Homo sapiens
aaaagtgtccctgtc

SEQ ID NO: 564472 - DNA, 15 bp, Homo sapiens
aaagtgtccctgtct

SEQ ID NO: 564473 - DNA, 15 bp, Homo sapiens
aagtgtccctgtctt

SEQ ID NO: 564474 - DNA, 15 bp, Homo sapiens
agtgtccctgtcttt

SEQ ID NO: 564475 - DNA, 15 bp, Homo sapiens
gtgtccctgtctttt

SEQ ID NO: 564476 - DNA, 15 bp, Homo sapiens
tgtccctgtcttttg

SEQ ID NO: 564477 - DNA, 15 bp, Homo sapiens
gtccctgtcttttgg

SEQ ID NO: 564478 - DNA, 15 bp, Homo sapiens
tccctgtcttttgga

SEQ ID NO: 564479 - DNA, 15 bp, Homo sapiens
ccctgtcttttggat

SEQ ID NO: 564480 - DNA, 15 bp, Homo sapiens
cctgtcttttggatc

SEQ ID NO: 564481 - DNA, 15 bp, Homo sapiens
ctgtcttttggatct

SEQ ID NO: 564482 - DNA, 15 bp, Homo sapiens
tgtcttttggatctt

SEQ ID NO: 564483 - DNA, 15 bp, Homo sapiens
gtcttttggatcttc

SEQ ID NO: 564484 - DNA, 15 bp, Homo sapiens
tcttttggatcttct

SEQ ID NO: 564485 - DNA, 15 bp, Homo sapiens
cttttggatcttctt

SEQ ID NO: 564486 - DNA, 15 bp, Homo sapiens
ttttggatcttctta

SEQ ID NO: 564487 - DNA, 15 bp, Homo sapiens
tttggatcttcttag

SEQ ID NO: 564488 - DNA, 15 bp, Homo sapiens
ttggatcttcttagc

SEQ ID NO: 564489 - DNA, 15 bp, Homo sapiens
tggatcttcttagcc

SEQ ID NO: 564490 - DNA, 15 bp, Homo sapiens
ggatcttcttagcca

SEQ ID NO: 564491 - DNA, 15 bp, Homo sapiens
gatcttcttagccag

SEQ ID NO: 564492 - DNA, 15 bp, Homo sapiens
atcttcttagccaga

SEQ ID NO: 564493 - DNA, 15 bp, Homo sapiens
tcttcttagccagaa

SEQ ID NO: 564494 - DNA, 15 bp, Homo sapiens
cttcttagccagaaa

SEQ ID NO: 564495 - DNA, 15 bp, Homo sapiens
ttcttagccagaaac

SEQ ID NO: 564496 - DNA, 15 bp, Homo sapiens
tcttagccagaaaca

SEQ ID NO: 564497 - DNA, 15 bp, Homo sapiens
cttagccagaaacaa

SEQ ID NO: 564498 - DNA, 15 bp, Homo sapiens
ttagccagaaacaat

SEQ ID NO: 564499 - DNA, 15 bp, Homo sapiens
tagccagaaacaatg

SEQ ID NO: 564500 - DNA, 15 bp, Homo sapiens
agccagaaacaatga

SEQ ID NO: 564501 - DNA, 15 bp, Homo sapiens
gccagaaacaatgag

SEQ ID NO: 564502 - DNA, 15 bp, Homo sapiens
ccagaaacaatgagg

SEQ ID NO: 564503 - DNA, 15 bp, Homo sapiens
cagaaacaatgaggc

SEQ ID NO: 564504 - DNA, 15 bp, Homo sapiens
agaaacaatgaggcc

SEQ ID NO: 564505 - DNA, 15 bp, Homo sapiens
gaaacaatgaggcca

SEQ ID NO: 564506 - DNA, 15 bp, Homo sapiens
aaacaatgaggccag

SEQ ID NO: 564507 - DNA, 15 bp, Homo sapiens
aacaatgaggccagg

SEQ ID NO: 564508 - DNA, 15 bp, Homo sapiens
acaatgaggccaggc

SEQ ID NO: 564509 - DNA, 15 bp, Homo sapiens
caatgaggccaggca

SEQ ID NO: 564510 - DNA, 15 bp, Homo sapiens
aatgaggccaggcaa

SEQ ID NO: 564511 - DNA, 15 bp, Homo sapiens
atgaggccaggcaat

SEQ ID NO: 564512 - DNA, 15 bp, Homo sapiens
tgaggccaggcaatc

SEQ ID NO: 564513 - DNA, 15 bp, Homo sapiens
gaggccaggcaatca

SEQ ID NO: 564514 - DNA, 15 bp, Homo sapiens
aggccaggcaatcag

SEQ ID NO: 564515 - DNA, 15 bp, Homo sapiens
ggccaggcaatcaga

SEQ ID NO: 564516 - DNA, 15 bp, Homo sapiens
gccaggcaatcagag

SEQ ID NO: 564517 - DNA, 15 bp, Homo sapiens
ccaggcaatcagagt

SEQ ID NO: 564518 - DNA, 15 bp, Homo sapiens
caggcaatcagagtc

SEQ ID NO: 564519 - DNA, 15 bp, Homo sapiens
aggcaatcagagtcc

SEQ ID NO: 564520 - DNA, 15 bp, Homo sapiens
ggcaatcagagtcca

SEQ ID NO: 564521 - DNA, 15 bp, Homo sapiens
gcaatcagagtccat

SEQ ID NO: 564522 - DNA, 15 bp, Homo sapiens
caatcagagtccatc

SEQ ID NO: 564523 - DNA, 15 bp, Homo sapiens
aatcagagtccatcc

SEQ ID NO: 564524 - DNA, 15 bp, Homo sapiens
atcagagtccatccg

SEQ ID NO: 564525 - DNA, 15 bp, Homo sapiens
tcagagtccatccgt

SEQ ID NO: 564526 - DNA, 15 bp, Homo sapiens
cagagtccatccgtc

SEQ ID NO: 564527 - DNA, 15 bp, Homo sapiens
agagtccatccgtct

SEQ ID NO: 564528 - DNA, 15 bp, Homo sapiens
gagtccatccgtctt

SEQ ID NO: 564529 - DNA, 15 bp, Homo sapiens
agtccatccgtcttc

SEQ ID NO: 564530 - DNA, 15 bp, Homo sapiens
gtccatccgtcttcc

SEQ ID NO: 564531 - DNA, 15 bp, Homo sapiens
tccatccgtcttccc

SEQ ID NO: 564532 - DNA, 15 bp, Homo sapiens
ccatccgtcttccca

SEQ ID NO: 564533 - DNA, 15 bp, Homo sapiens
catccgtcttcccaa

SEQ ID NO: 564534 - DNA, 15 bp, Homo sapiens
atccgtcttcccaac

SEQ ID NO: 564535 - DNA, 15 bp, Homo sapiens
tccgtcttcccaact

SEQ ID NO: 564536 - DNA, 15 bp, Homo sapiens
ccgtcttcccaactc

SEQ ID NO: 564537 - DNA, 15 bp, Homo sapiens
cgtcttcccaactct

SEQ ID NO: 564538 - DNA, 15 bp, Homo sapiens
gtcttcccaactctt

SEQ ID NO: 564539 - DNA, 15 bp, Homo sapiens
tcttcccaactctta

SEQ ID NO: 564540 - DNA, 15 bp, Homo sapiens
cttcccaactcttat

SEQ ID NO: 564541 - DNA, 15 bp, Homo sapiens
ttcccaactcttatt

SEQ ID NO: 564542 - DNA, 15 bp, Homo sapiens
tcccaactcttattc

SEQ ID NO: 564543 - DNA, 15 bp, Homo sapiens
cccaactcttattct

SEQ ID NO: 564544 - DNA, 15 bp, Homo sapiens
ccaactcttattcta

SEQ ID NO: 564545 - DNA, 15 bp, Homo sapiens
caactcttattctaa

SEQ ID NO: 564546 - DNA, 15 bp, Homo sapiens
aactcttattctaat

SEQ ID NO: 564547 - DNA, 15 bp, Homo sapiens
actcttattctaatt

SEQ ID NO: 564548 - DNA, 15 bp, Homo sapiens
ctcttattctaattt

SEQ ID NO: 564549 - DNA, 15 bp, Homo sapiens
tcttattctaatttg

SEQ ID NO: 564550 - DNA, 15 bp, Homo sapiens
cttattctaatttgt

SEQ ID NO: 564551 - DNA, 15 bp, Homo sapiens
ttattctaatttgtt

SEQ ID NO: 564552 - DNA, 15 bp, Homo sapiens
tattctaatttgttt

SEQ ID NO: 564553 - DNA, 15 bp, Homo sapiens
attctaatttgtttg

SEQ ID NO: 564554 - DNA, 15 bp, Homo sapiens
ttctaatttgtttga

SEQ ID NO: 564555 - DNA, 15 bp, Homo sapiens
tctaatttgtttgag

SEQ ID NO: 564556 - DNA, 15 bp, Homo sapiens
ctaatttgtttgaga

SEQ ID NO: 564557 - DNA, 15 bp, Homo sapiens
taatttgtttgagag

SEQ ID NO: 564558 - DNA, 15 bp, Homo sapiens
aatttgtttgagagg

SEQ ID NO: 564559 - DNA, 15 bp, Homo sapiens
atttgtttgagaggc

SEQ ID NO: 564560 - DNA, 15 bp, Homo sapiens
tttgtttgagaggct

SEQ ID NO: 564561 - DNA, 15 bp, Homo sapiens
ttgtttgagaggctc

SEQ ID NO: 564562 - DNA, 15 bp, Homo sapiens
tgtttgagaggctca

SEQ ID NO: 564563 - DNA, 15 bp, Homo sapiens
gtttgagaggctcag

SEQ ID NO: 564564 - DNA, 15 bp, Homo sapiens
tttgagaggctcaga

SEQ ID NO: 564565 - DNA, 15 bp, Homo sapiens
ttgagaggctcagaa

SEQ ID NO: 564566 - DNA, 15 bp, Homo sapiens
tgagaggctcagaag

SEQ ID NO: 564567 - DNA, 15 bp, Homo sapiens
gagaggctcagaagg

SEQ ID NO: 564568 - DNA, 15 bp, Homo sapiens
agaggctcagaaggg

SEQ ID NO: 564569 - DNA, 15 bp, Homo sapiens
gaggctcagaagggg

SEQ ID NO: 564570 - DNA, 15 bp, Homo sapiens
aggctcagaaggggc

SEQ ID NO: 564571 - DNA, 15 bp, Homo sapiens
ggctcagaaggggct

SEQ ID NO: 564572 - DNA, 15 bp, Homo sapiens
gctcagaaggggctg

SEQ ID NO: 564573 - DNA, 15 bp, Homo sapiens
ctcagaaggggctga

SEQ ID NO: 564574 - DNA, 15 bp, Homo sapiens
tcagaaggggctgaa

SEQ ID NO: 564575 - DNA, 15 bp, Homo sapiens
cagaaggggctgaag

SEQ ID NO: 564576 - DNA, 15 bp, Homo sapiens
agaaggggctgaagg

SEQ ID NO: 564577 - DNA, 15 bp, Homo sapiens
gaaggggctgaaggg

SEQ ID NO: 564578 - DNA, 15 bp, Homo sapiens
aaggggctgaagggc

SEQ ID NO: 564579 - DNA, 15 bp, Homo sapiens
aggggctgaagggca

SEQ ID NO: 564580 - DNA, 15 bp, Homo sapiens
ggggctgaagggcat

SEQ ID NO: 564581 - DNA, 15 bp, Homo sapiens
gggctgaagggcatg

SEQ ID NO: 564582 - DNA, 15 bp, Homo sapiens
ggctgaagggcatgg

SEQ ID NO: 564583 - DNA, 15 bp, Homo sapiens
gctgaagggcatggt

SEQ ID NO: 564584 - DNA, 15 bp, Homo sapiens
ctgaagggcatggtt

SEQ ID NO: 564585 - DNA, 15 bp, Homo sapiens
tgaagggcatggttg

SEQ ID NO: 564586 - DNA, 15 bp, Homo sapiens
gaagggcatggttgt

SEQ ID NO: 564587 - DNA, 15 bp, Homo sapiens
aagggcatggttgtg

SEQ ID NO: 564588 - DNA, 15 bp, Homo sapiens
agggcatggttgtgt

SEQ ID NO: 564589 - DNA, 15 bp, Homo sapiens
gggcatggttgtgtt

SEQ ID NO: 564590 - DNA, 15 bp, Homo sapiens
ggcatggttgtgttt

SEQ ID NO: 564591 - DNA, 15 bp, Homo sapiens
gcatggttgtgtttc

SEQ ID NO: 564592 - DNA, 15 bp, Homo sapiens
catggttgtgtttca

SEQ ID NO: 564593 - DNA, 15 bp, Homo sapiens
atggttgtgtttcac

SEQ ID NO: 564594 - DNA, 15 bp, Homo sapiens
tggttgtgtttcacc

SEQ ID NO: 564595 - DNA, 15 bp, Homo sapiens
ggttgtgtttcaccc

SEQ ID NO: 564596 - DNA, 15 bp, Homo sapiens
gttgtgtttcacccc

SEQ ID NO: 564597 - DNA, 15 bp, Homo sapiens
ttgtgtttcaccccg

SEQ ID NO: 564598 - DNA, 15 bp, Homo sapiens
tgtgtttcaccccgt

SEQ ID NO: 564599 - DNA, 15 bp, Homo sapiens
gtgtttcaccccgtc

SEQ ID NO: 564600 - DNA, 15 bp, Homo sapiens
tgtttcaccccgtca

SEQ ID NO: 564601 - DNA, 15 bp, Homo sapiens
gtttcaccccgtcag

SEQ ID NO: 564602 - DNA, 15 bp, Homo sapiens
tttcaccccgtcaga

SEQ ID NO: 564603 - DNA, 15 bp, Homo sapiens
ttcaccccgtcagac

SEQ ID NO: 564604 - DNA, 15 bp, Homo sapiens
tcaccccgtcagact

SEQ ID NO: 564605 - DNA, 15 bp, Homo sapiens
caccccgtcagactc

SEQ ID NO: 564606 - DNA, 15 bp, Homo sapiens
accccgtcagactct

SEQ ID NO: 564607 - DNA, 15 bp, Homo sapiens
ccccgtcagactctg

SEQ ID NO: 564608 - DNA, 15 bp, Homo sapiens
cccgtcagactctgt

SEQ ID NO: 564609 - DNA, 15 bp, Homo sapiens
ccgtcagactctgtt

SEQ ID NO: 564610 - DNA, 15 bp, Homo sapiens
cgtcagactctgttg

SEQ ID NO: 564611 - DNA, 15 bp, Homo sapiens
gtcagactctgttgt

SEQ ID NO: 564612 - DNA, 15 bp, Homo sapiens
tcagactctgttgtt

SEQ ID NO: 564613 - DNA, 15 bp, Homo sapiens
cagactctgttgttt

SEQ ID NO: 564614 - DNA, 15 bp, Homo sapiens
agactctgttgtttg

SEQ ID NO: 564615 - DNA, 15 bp, Homo sapiens
gactctgttgtttga

SEQ ID NO: 564616 - DNA, 15 bp, Homo sapiens
actctgttgtttgat

SEQ ID NO: 564617 - DNA, 15 bp, Homo sapiens
ctctgttgtttgatg

SEQ ID NO: 564618 - DNA, 15 bp, Homo sapiens
tctgttgtttgatga

SEQ ID NO: 564619 - DNA, 15 bp, Homo sapiens
ctgttgtttgatgag

SEQ ID NO: 564620 - DNA, 15 bp, Homo sapiens
tgttgtttgatgagg

SEQ ID NO: 564621 - DNA, 15 bp, Homo sapiens
gttgtttgatgaggt

SEQ ID NO: 564622 - DNA, 15 bp, Homo sapiens
ttgtttgatgaggtt

SEQ ID NO: 564623 - DNA, 15 bp, Homo sapiens
tgtttgatgaggttt

SEQ ID NO: 564624 - DNA, 15 bp, Homo sapiens
gtttgatgaggtttg

SEQ ID NO: 564625 - DNA, 15 bp, Homo sapiens
tttgatgaggtttgt

SEQ ID NO: 564626 - DNA, 15 bp, Homo sapiens
ttgatgaggtttgtg

SEQ ID NO: 564627 - DNA, 15 bp, Homo sapiens
tgatgaggtttgtgc

SEQ ID NO: 564628 - DNA, 15 bp, Homo sapiens
gatgaggtttgtgct

SEQ ID NO: 564629 - DNA, 15 bp, Homo sapiens
atgaggtttgtgctc

SEQ ID NO: 564630 - DNA, 15 bp, Homo sapiens
tgaggtttgtgctcc

SEQ ID NO: 564631 - DNA, 15 bp, Homo sapiens
gaggtttgtgctcca

SEQ ID NO: 564632 - DNA, 15 bp, Homo sapiens
aggtttgtgctccat

SEQ ID NO: 564633 - DNA, 15 bp, Homo sapiens
ggtttgtgctccatt

SEQ ID NO: 564634 - DNA, 15 bp, Homo sapiens
gtttgtgctccattt

SEQ ID NO: 564635 - DNA, 15 bp, Homo sapiens
tttgtgctccatttg

SEQ ID NO: 564636 - DNA, 15 bp, Homo sapiens
ttgtgctccatttgt

SEQ ID NO: 564637 - DNA, 15 bp, Homo sapiens
tgtgctccatttgtt

SEQ ID NO: 564638 - DNA, 15 bp, Homo sapiens
gtgctccatttgttc

SEQ ID NO: 564639 - DNA, 15 bp, Homo sapiens
tgctccatttgttcg

SEQ ID NO: 564640 - DNA, 15 bp, Homo sapiens
gctccatttgttcgg

SEQ ID NO: 564641 - DNA, 15 bp, Homo sapiens
ctccatttgttcgga

SEQ ID NO: 564642 - DNA, 15 bp, Homo sapiens
tccatttgttcggat

SEQ ID NO: 564643 - DNA, 15 bp, Homo sapiens
ccatttgttcggatg

SEQ ID NO: 564644 - DNA, 15 bp, Homo sapiens
catttgttcggatgg

SEQ ID NO: 564645 - DNA, 15 bp, Homo sapiens
atttgttcggatggt

SEQ ID NO: 564646 - DNA, 15 bp, Homo sapiens
tttgttcggatggtt

SEQ ID NO: 564647 - DNA, 15 bp, Homo sapiens
ttgttcggatggttt

SEQ ID NO: 564648 - DNA, 15 bp, Homo sapiens
tgttcggatggtttt

SEQ ID NO: 564649 - DNA, 15 bp, Homo sapiens
gttcggatggttttt

SEQ ID NO: 564650 - DNA, 15 bp, Homo sapiens
ttcggatggttttta

SEQ ID NO: 564651 - DNA, 15 bp, Homo sapiens
tcggatggtttttat

SEQ ID NO: 564652 - DNA, 15 bp, Homo sapiens
cggatggtttttatg

SEQ ID NO: 564653 - DNA, 15 bp, Homo sapiens
ggatggtttttatgg

SEQ ID NO: 564654 - DNA, 15 bp, Homo sapiens
gatggtttttatggt

SEQ ID NO: 564655 - DNA, 15 bp, Homo sapiens
atggtttttatggtt

SEQ ID NO: 564656 - DNA, 15 bp, Homo sapiens
tggtttttatggttt

SEQ ID NO: 564657 - DNA, 15 bp, Homo sapiens
ggtttttatggtttc

SEQ ID NO: 564658 - DNA, 15 bp, Homo sapiens
gtttttatggtttct

SEQ ID NO: 564659 - DNA, 15 bp, Homo sapiens
tttttatggtttctt

SEQ ID NO: 564660 - DNA, 15 bp, Homo sapiens
ttttatggtttcttt

SEQ ID NO: 564661 - DNA, 15 bp, Homo sapiens
tttatggtttctttg

SEQ ID NO: 564662 - DNA, 15 bp, Homo sapiens
ttatggtttctttgt

SEQ ID NO: 564663 - DNA, 15 bp, Homo sapiens
tatggtttctttgtt

SEQ ID NO: 564664 - DNA, 15 bp, Homo sapiens
atggtttctttgttg

SEQ ID NO: 564665 - DNA, 15 bp, Homo sapiens
tggtttctttgttgt

SEQ ID NO: 564666 - DNA, 15 bp, Homo sapiens
ggtttctttgttgtt

SEQ ID NO: 564667 - DNA, 15 bp, Homo sapiens
gtttctttgttgttc

SEQ ID NO: 564668 - DNA, 15 bp, Homo sapiens
tttctttgttgttca

SEQ ID NO: 564669 - DNA, 15 bp, Homo sapiens
ttctttgttgttcat

SEQ ID NO: 564670 - DNA, 15 bp, Homo sapiens
tctttgttgttcatg

SEQ ID NO: 564671 - DNA, 15 bp, Homo sapiens
ctttgttgttcatgg

SEQ ID NO: 564672 - DNA, 15 bp, Homo sapiens
tttgttgttcatgga

SEQ ID NO: 564673 - DNA, 15 bp, Homo sapiens
ttgttgttcatggaa

SEQ ID NO: 564674 - DNA, 15 bp, Homo sapiens
tgttgttcatggaat

SEQ ID NO: 564675 - DNA, 15 bp, Homo sapiens
gttgttcatggaata

SEQ ID NO: 564676 - DNA, 15 bp, Homo sapiens
ttgttcatggaataa

SEQ ID NO: 564677 - DNA, 15 bp, Homo sapiens
tgttcatggaataac

SEQ ID NO: 564678 - DNA, 15 bp, Homo sapiens
gttcatggaataact

SEQ ID NO: 564679 - DNA, 15 bp, Homo sapiens
ttcatggaataactt

SEQ ID NO: 564680 - DNA, 15 bp, Homo sapiens
tcatggaataacttt

SEQ ID NO: 564681 - DNA, 15 bp, Homo sapiens
catggaataactttg

SEQ ID NO: 564682 - DNA, 15 bp, Homo sapiens
atggaataactttga

SEQ ID NO: 564683 - DNA, 15 bp, Homo sapiens
tggaataactttgaa

SEQ ID NO: 564684 - DNA, 15 bp, Homo sapiens
ggaataactttgaag

SEQ ID NO: 564685 - DNA, 15 bp, Homo sapiens
gaataactttgaagg

SEQ ID NO: 564686 - DNA, 15 bp, Homo sapiens
aataactttgaaggt

SEQ ID NO: 564687 - DNA, 15 bp, Homo sapiens
ataactttgaaggtc

SEQ ID NO: 564688 - DNA, 15 bp, Homo sapiens
taactttgaaggtca

SEQ ID NO: 564689 - DNA, 15 bp, Homo sapiens
aactttgaaggtcat

SEQ ID NO: 564690 - DNA, 15 bp, Homo sapiens
actttgaaggtcata

SEQ ID NO: 564691 - DNA, 15 bp, Homo sapiens
ctttgaaggtcataa

SEQ ID NO: 564692 - DNA, 15 bp, Homo sapiens
tttgaaggtcataat

SEQ ID NO: 564693 - DNA, 15 bp, Homo sapiens
ttgaaggtcataatt

SEQ ID NO: 564694 - DNA, 15 bp, Homo sapiens
tgaaggtcataattc

SEQ ID NO: 564695 - DNA, 15 bp, Homo sapiens
gaaggtcataattct

SEQ ID NO: 564696 - DNA, 15 bp, Homo sapiens
aaggtcataattctg

SEQ ID NO: 564697 - DNA, 15 bp, Homo sapiens
aggtcataattctgt

SEQ ID NO: 564698 - DNA, 15 bp, Homo sapiens
ggtcataattctgta

SEQ ID NO: 564699 - DNA, 15 bp, Homo sapiens
gtcataattctgtat

SEQ ID NO: 564700 - DNA, 15 bp, Homo sapiens
tcataattctgtatc

SEQ ID NO: 564701 - DNA, 15 bp, Homo sapiens
cataattctgtatcc

SEQ ID NO: 564702 - DNA, 15 bp, Homo sapiens
ataattctgtatcct

SEQ ID NO: 564703 - DNA, 15 bp, Homo sapiens
taattctgtatcctc

SEQ ID NO: 564704 - DNA, 15 bp, Homo sapiens
aattctgtatcctca

SEQ ID NO: 564705 - DNA, 15 bp, Homo sapiens
attctgtatcctcaa

SEQ ID NO: 564706 - DNA, 15 bp, Homo sapiens
ttctgtatcctcaag

SEQ ID NO: 564707 - DNA, 15 bp, Homo sapiens
tctgtatcctcaagc

SEQ ID NO: 564708 - DNA, 15 bp, Homo sapiens
ctgtatcctcaagct

SEQ ID NO: 564709 - DNA, 15 bp, Homo sapiens
tgtatcctcaagctc

SEQ ID NO: 564710 - DNA, 15 bp, Homo sapiens
gtatcctcaagctcc

SEQ ID NO: 564711 - DNA, 15 bp, Homo sapiens
tatcctcaagctcct

SEQ ID NO: 564712 - DNA, 15 bp, Homo sapiens
atcctcaagctcctc

SEQ ID NO: 564713 - DNA, 15 bp, Homo sapiens
tcctcaagctcctct

SEQ ID NO: 564714 - DNA, 15 bp, Homo sapiens
cctcaagctcctctg

SEQ ID NO: 564715 - DNA, 15 bp, Homo sapiens
ctcaagctcctctgc

SEQ ID NO: 564716 - DNA, 15 bp, Homo sapiens
tcaagctcctctgct

SEQ ID NO: 564717 - DNA, 15 bp, Homo sapiens
caagctcctctgcta

SEQ ID NO: 564718 - DNA, 15 bp, Homo sapiens
aagctcctctgctat

SEQ ID NO: 564719 - DNA, 15 bp, Homo sapiens
agctcctctgctatt

SEQ ID NO: 564720 - DNA, 15 bp, Homo sapiens
gctcctctgctattc

SEQ ID NO: 564721 - DNA, 15 bp, Homo sapiens
ctcctctgctattcc

SEQ ID NO: 564722 - DNA, 15 bp, Homo sapiens
tcctctgctattcct

SEQ ID NO: 564723 - DNA, 15 bp, Homo sapiens
cctctgctattcctg

SEQ ID NO: 564724 - DNA, 15 bp, Homo sapiens
ctctgctattcctgc

SEQ ID NO: 564725 - DNA, 15 bp, Homo sapiens
tctgctattcctgct

SEQ ID NO: 564726 - DNA, 15 bp, Homo sapiens
ctgctattcctgctc

SEQ ID NO: 564727 - DNA, 15 bp, Homo sapiens
tgctattcctgctca

SEQ ID NO: 564728 - DNA, 15 bp, Homo sapiens
gctattcctgctcaa

SEQ ID NO: 564729 - DNA, 15 bp, Homo sapiens
ctattcctgctcaat

SEQ ID NO: 564730 - DNA, 15 bp, Homo sapiens
tattcctgctcaatg

SEQ ID NO: 564731 - DNA, 15 bp, Homo sapiens
attcctgctcaatgt

SEQ ID NO: 564732 - DNA, 15 bp, Homo sapiens
ttcctgctcaatgtc

SEQ ID NO: 564733 - DNA, 15 bp, Homo sapiens
tcctgctcaatgtct

SEQ ID NO: 564734 - DNA, 15 bp, Homo sapiens
cctgctcaatgtctc

SEQ ID NO: 564735 - DNA, 15 bp, Homo sapiens
ctgctcaatgtctca

SEQ ID NO: 564736 - DNA, 15 bp, Homo sapiens
tgctcaatgtctcaa

SEQ ID NO: 564737 - DNA, 15 bp, Homo sapiens
gctcaatgtctcaat

SEQ ID NO: 564738 - DNA, 15 bp, Homo sapiens
ctcaatgtctcaatg

SEQ ID NO: 564739 - DNA, 15 bp, Homo sapiens
tcaatgtctcaatgg

SEQ ID NO: 564740 - DNA, 15 bp, Homo sapiens
caatgtctcaatggg

SEQ ID NO: 564741 - DNA, 15 bp, Homo sapiens
aatgtctcaatggga

SEQ ID NO: 564742 - DNA, 15 bp, Homo sapiens
atgtctcaatgggac

SEQ ID NO: 564743 - DNA, 15 bp, Homo sapiens
tgtctcaatgggact

SEQ ID NO: 564744 - DNA, 15 bp, Homo sapiens
gtctcaatgggactc

SEQ ID NO: 564745 - DNA, 15 bp, Homo sapiens
tctcaatgggactca

SEQ ID NO: 564746 - DNA, 15 bp, Homo sapiens
ctcaatgggactcat

SEQ ID NO: 564747 - DNA, 15 bp, Homo sapiens
tcaatgggactcata

SEQ ID NO: 564748 - DNA, 15 bp, Homo sapiens
caatgggactcatac

SEQ ID NO: 564749 - DNA, 15 bp, Homo sapiens
aatgggactcatacc

SEQ ID NO: 564750 - DNA, 15 bp, Homo sapiens
atgggactcatacca

SEQ ID NO: 564751 - DNA, 15 bp, Homo sapiens
tgggactcataccaa

SEQ ID NO: 564752 - DNA, 15 bp, Homo sapiens
gggactcataccaag

SEQ ID NO: 564753 - DNA, 15 bp, Homo sapiens
ggactcataccaaga

SEQ ID NO: 564754 - DNA, 15 bp, Homo sapiens
gactcataccaagag

SEQ ID NO: 564755 - DNA, 15 bp, Homo sapiens
actcataccaagaga

SEQ ID NO: 564756 - DNA, 15 bp, Homo sapiens
ctcataccaagagaa

SEQ ID NO: 564757 - DNA, 15 bp, Homo sapiens
tcataccaagagaaa

SEQ ID NO: 564758 - DNA, 15 bp, Homo sapiens
cataccaagagaaag

SEQ ID NO: 564759 - DNA, 15 bp, Homo sapiens
ataccaagagaaagg

SEQ ID NO: 564760 - DNA, 15 bp, Homo sapiens
taccaagagaaaggg

SEQ ID NO: 564761 - DNA, 15 bp, Homo sapiens
accaagagaaaggga

SEQ ID NO: 564762 - DNA, 15 bp, Homo sapiens
ccaagagaaagggaa

SEQ ID NO: 564763 - DNA, 15 bp, Homo sapiens
caagagaaagggaag

SEQ ID NO: 564764 - DNA, 15 bp, Homo sapiens
aagagaaagggaagg

SEQ ID NO: 564765 - DNA, 15 bp, Homo sapiens
agagaaagggaagga

SEQ ID NO: 564766 - DNA, 15 bp, Homo sapiens
gagaaagggaaggaa

SEQ ID NO: 564767 - DNA, 15 bp, Homo sapiens
agaaagggaaggaag

SEQ ID NO: 564768 - DNA, 15 bp, Homo sapiens
gaaagggaaggaaga

SEQ ID NO: 564769 - DNA, 15 bp, Homo sapiens
aaagggaaggaagaa

SEQ ID NO: 564770 - DNA, 15 bp, Homo sapiens
aagggaaggaagaag

SEQ ID NO: 564771 - DNA, 15 bp, Homo sapiens
agggaaggaagaagt

SEQ ID NO: 564772 - DNA, 15 bp, Homo sapiens
gggaaggaagaagtt

SEQ ID NO: 564773 - DNA, 15 bp, Homo sapiens
ggaaggaagaagttt

SEQ ID NO: 564774 - DNA, 15 bp, Homo sapiens
gaaggaagaagtttc

SEQ ID NO: 564775 - DNA, 15 bp, Homo sapiens
aaggaagaagtttcc

SEQ ID NO: 564776 - DNA, 15 bp, Homo sapiens
aggaagaagtttcca

SEQ ID NO: 564777 - DNA, 15 bp, Homo sapiens
ggaagaagtttccag

SEQ ID NO: 564778 - DNA, 15 bp, Homo sapiens
gaagaagtttccagc

SEQ ID NO: 564779 - DNA, 15 bp, Homo sapiens
aagaagtttccagct

SEQ ID NO: 564780 - DNA, 15 bp, Homo sapiens
agaagtttccagcta

SEQ ID NO: 564781 - DNA, 15 bp, Homo sapiens
gaagtttccagctag

SEQ ID NO: 564782 - DNA, 15 bp, Homo sapiens
aagtttccagctagt

SEQ ID NO: 564783 - DNA, 15 bp, Homo sapiens
agtttccagctagtt

SEQ ID NO: 564784 - DNA, 15 bp, Homo sapiens
gtttccagctagtta

SEQ ID NO: 564785 - DNA, 15 bp, Homo sapiens
tttccagctagttag

SEQ ID NO: 564786 - DNA, 15 bp, Homo sapiens
ttccagctagttagt

SEQ ID NO: 564787 - DNA, 15 bp, Homo sapiens
tccagctagttagtt

SEQ ID NO: 564788 - DNA, 15 bp, Homo sapiens
ccagctagttagtta

SEQ ID NO: 564789 - DNA, 15 bp, Homo sapiens
cagctagttagttaa

SEQ ID NO: 564790 - DNA, 15 bp, Homo sapiens
agctagttagttaag

SEQ ID NO: 564791 - DNA, 15 bp, Homo sapiens
gctagttagttaagc

SEQ ID NO: 564792 - DNA, 15 bp, Homo sapiens
ctagttagttaagca

SEQ ID NO: 564793 - DNA, 15 bp, Homo sapiens
tagttagttaagcaa

SEQ ID NO: 564794 - DNA, 15 bp, Homo sapiens
agttagttaagcaat

SEQ ID NO: 564795 - DNA, 15 bp, Homo sapiens
gttagttaagcaatt

SEQ ID NO: 564796 - DNA, 15 bp, Homo sapiens
ttagttaagcaattt

SEQ ID NO: 564797 - DNA, 15 bp, Homo sapiens
tagttaagcaatttc

SEQ ID NO: 564798 - DNA, 15 bp, Homo sapiens
agttaagcaatttct

SEQ ID NO: 564799 - DNA, 15 bp, Homo sapiens
gttaagcaatttctc

SEQ ID NO: 564800 - DNA, 15 bp, Homo sapiens
ttaagcaatttctca

SEQ ID NO: 564801 - DNA, 15 bp, Homo sapiens
taagcaatttctcaa

SEQ ID NO: 564802 - DNA, 15 bp, Homo sapiens
aagcaatttctcaac

SEQ ID NO: 564803 - DNA, 15 bp, Homo sapiens
agcaatttctcaaca

SEQ ID NO: 564804 - DNA, 15 bp, Homo sapiens
gcaatttctcaacac

SEQ ID NO: 564805 - DNA, 15 bp, Homo sapiens
caatttctcaacaca

SEQ ID NO: 564806 - DNA, 15 bp, Homo sapiens
aatttctcaacacat

SEQ ID NO: 564807 - DNA, 15 bp, Homo sapiens
atttctcaacacatt

SEQ ID NO: 564808 - DNA, 15 bp, Homo sapiens
tttctcaacacattt

SEQ ID NO: 564809 - DNA, 15 bp, Homo sapiens
ttctcaacacattta

SEQ ID NO: 564810 - DNA, 15 bp, Homo sapiens
tctcaacacatttat

SEQ ID NO: 564811 - DNA, 15 bp, Homo sapiens
ctcaacacatttatg

SEQ ID NO: 564812 - DNA, 15 bp, Homo sapiens
tcaacacatttatgg

SEQ ID NO: 564813 - DNA, 15 bp, Homo sapiens
caacacatttatgga

SEQ ID NO: 564814 - DNA, 15 bp, Homo sapiens
aacacatttatggaa

SEQ ID NO: 564815 - DNA, 15 bp, Homo sapiens
acacatttatggaag

SEQ ID NO: 564816 - DNA, 15 bp, Homo sapiens
cacatttatggaagc

SEQ ID NO: 564817 - DNA, 15 bp, Homo sapiens
acatttatggaagca

SEQ ID NO: 564818 - DNA, 15 bp, Homo sapiens
catttatggaagcat

SEQ ID NO: 564819 - DNA, 15 bp, Homo sapiens
atttatggaagcatg

SEQ ID NO: 564820 - DNA, 15 bp, Homo sapiens
tttatggaagcatgt

SEQ ID NO: 564821 - DNA, 15 bp, Homo sapiens
ttatggaagcatgtg

SEQ ID NO: 564822 - DNA, 15 bp, Homo sapiens
tatggaagcatgtgg

SEQ ID NO: 564823 - DNA, 15 bp, Homo sapiens
atggaagcatgtgga

SEQ ID NO: 564824 - DNA, 15 bp, Homo sapiens
tggaagcatgtggaa

SEQ ID NO: 564825 - DNA, 15 bp, Homo sapiens
ggaagcatgtggaat

SEQ ID NO: 564826 - DNA, 15 bp, Homo sapiens
gaagcatgtggaatc

SEQ ID NO: 564827 - DNA, 15 bp, Homo sapiens
aagcatgtggaatct

SEQ ID NO: 564828 - DNA, 15 bp, Homo sapiens
agcatgtggaatctt

SEQ ID NO: 564829 - DNA, 15 bp, Homo sapiens
gcatgtggaatcttt

SEQ ID NO: 564830 - DNA, 15 bp, Homo sapiens
catgtggaatctttc

SEQ ID NO: 564831 - DNA, 15 bp, Homo sapiens
atgtggaatctttca

SEQ ID NO: 564832 - DNA, 15 bp, Homo sapiens
tgtggaatctttcaa

SEQ ID NO: 564833 - DNA, 15 bp, Homo sapiens
gtggaatctttcaag

SEQ ID NO: 564834 - DNA, 15 bp, Homo sapiens
tggaatctttcaaga

SEQ ID NO: 564835 - DNA, 15 bp, Homo sapiens
ggaatctttcaagaa

SEQ ID NO: 564836 - DNA, 15 bp, Homo sapiens
gaatctttcaagaaa

SEQ ID NO: 564837 - DNA, 15 bp, Homo sapiens
aatctttcaagaaag

SEQ ID NO: 564838 - DNA, 15 bp, Homo sapiens
atctttcaagaaagg

SEQ ID NO: 564839 - DNA, 15 bp, Homo sapiens
tctttcaagaaaggg

SEQ ID NO: 564840 - DNA, 15 bp, Homo sapiens
ctttcaagaaagggg

SEQ ID NO: 564841 - DNA, 15 bp, Homo sapiens
tttcaagaaaggggt

SEQ ID NO: 564842 - DNA, 15 bp, Homo sapiens
ttcaagaaaggggtt

SEQ ID NO: 564843 - DNA, 15 bp, Homo sapiens
tcaagaaaggggtta

SEQ ID NO: 564844 - DNA, 15 bp, Homo sapiens
caagaaaggggttac

SEQ ID NO: 564845 - DNA, 15 bp, Homo sapiens
aagaaaggggttacg

SEQ ID NO: 564846 - DNA, 15 bp, Homo sapiens
agaaaggggttacga

SEQ ID NO: 564847 - DNA, 15 bp, Homo sapiens
gaaaggggttacgat

SEQ ID NO: 564848 - DNA, 15 bp, Homo sapiens
aaaggggttacgatc

SEQ ID NO: 564849 - DNA, 15 bp, Homo sapiens
aaggggttacgatca

SEQ ID NO: 564850 - DNA, 15 bp, Homo sapiens
aggggttacgatcac

SEQ ID NO: 564851 - DNA, 15 bp, Homo sapiens
ggggttacgatcaca

SEQ ID NO: 564852 - DNA, 15 bp, Homo sapiens
gggttacgatcacaa

SEQ ID NO: 564853 - DNA, 15 bp, Homo sapiens
ggttacgatcacaaa

SEQ ID NO: 564854 - DNA, 15 bp, Homo sapiens
gttacgatcacaaaa

SEQ ID NO: 564855 - DNA, 15 bp, Homo sapiens
ttacgatcacaaaag

SEQ ID NO: 564856 - DNA, 15 bp, Homo sapiens
tacgatcacaaaagt

SEQ ID NO: 564857 - DNA, 15 bp, Homo sapiens
acgatcacaaaagtt

SEQ ID NO: 564858 - DNA, 15 bp, Homo sapiens
cgatcacaaaagttc

SEQ ID NO: 564859 - DNA, 15 bp, Homo sapiens
gatcacaaaagttcg

SEQ ID NO: 564860 - DNA, 15 bp, Homo sapiens
atcacaaaagttcga

SEQ ID NO: 564861 - DNA, 15 bp, Homo sapiens
tcacaaaagttcgat

SEQ ID NO: 564862 - DNA, 15 bp, Homo sapiens
cacaaaagttcgatt

SEQ ID NO: 564863 - DNA, 15 bp, Homo sapiens
acaaaagttcgattt

SEQ ID NO: 564864 - DNA, 15 bp, Homo sapiens
caaaagttcgatttg

SEQ ID NO: 564865 - DNA, 15 bp, Homo sapiens
aaaagttcgatttga

SEQ ID NO: 564866 - DNA, 15 bp, Homo sapiens
aaagttcgatttgag

SEQ ID NO: 564867 - DNA, 15 bp, Homo sapiens
aagttcgatttgagg

SEQ ID NO: 564868 - DNA, 15 bp, Homo sapiens
agttcgatttgagga

SEQ ID NO: 564869 - DNA, 15 bp, Homo sapiens
gttcgatttgaggag

SEQ ID NO: 564870 - DNA, 15 bp, Homo sapiens
ttcgatttgaggagt

SEQ ID NO: 564871 - DNA, 15 bp, Homo sapiens
tcgatttgaggagta

SEQ ID NO: 564872 - DNA, 15 bp, Homo sapiens
cgatttgaggagtat

SEQ ID NO: 564873 - DNA, 15 bp, Homo sapiens
gatttgaggagtatt

SEQ ID NO: 564874 - DNA, 15 bp, Homo sapiens
atttgaggagtattc

SEQ ID NO: 564875 - DNA, 15 bp, Homo sapiens
tttgaggagtattct

SEQ ID NO: 564876 - DNA, 15 bp, Homo sapiens
ttgaggagtattctc

SEQ ID NO: 564877 - DNA, 15 bp, Homo sapiens
tgaggagtattctcc

SEQ ID NO: 564878 - DNA, 15 bp, Homo sapiens
gaggagtattctcca

SEQ ID NO: 564879 - DNA, 15 bp, Homo sapiens
aggagtattctccaa

SEQ ID NO: 564880 - DNA, 15 bp, Homo sapiens
ggagtattctccaag

SEQ ID NO: 564881 - DNA, 15 bp, Homo sapiens
gagtattctccaaga

SEQ ID NO: 564882 - DNA, 15 bp, Homo sapiens
agtattctccaagac

SEQ ID NO: 564883 - DNA, 15 bp, Homo sapiens
gtattctccaagaca

SEQ ID NO: 564884 - DNA, 15 bp, Homo sapiens
tattctccaagacaa

SEQ ID NO: 564885 - DNA, 15 bp, Homo sapiens
attctccaagacaac

SEQ ID NO: 564886 - DNA, 15 bp, Homo sapiens
ttctccaagacaact

SEQ ID NO: 564887 - DNA, 15 bp, Homo sapiens
tctccaagacaactg

SEQ ID NO: 564888 - DNA, 15 bp, Homo sapiens
ctccaagacaactga

SEQ ID NO: 564889 - DNA, 15 bp, Homo sapiens
tccaagacaactgag

SEQ ID NO: 564890 - DNA, 15 bp, Homo sapiens
ccaagacaactgaga

SEQ ID NO: 564891 - DNA, 15 bp, Homo sapiens
caagacaactgagaa

SEQ ID NO: 564892 - DNA, 15 bp, Homo sapiens
aagacaactgagaag

SEQ ID NO: 564893 - DNA, 15 bp, Homo sapiens
agacaactgagaagc

SEQ ID NO: 564894 - DNA, 15 bp, Homo sapiens
gacaactgagaagca

SEQ ID NO: 564895 - DNA, 15 bp, Homo sapiens
acaactgagaagcaa

SEQ ID NO: 564896 - DNA, 15 bp, Homo sapiens
caactgagaagcaag

SEQ ID NO: 564897 - DNA, 15 bp, Homo sapiens
aactgagaagcaagc

SEQ ID NO: 564898 - DNA, 15 bp, Homo sapiens
actgagaagcaagcc

SEQ ID NO: 564899 - DNA, 15 bp, Homo sapiens
ctgagaagcaagccc

SEQ ID NO: 564900 - DNA, 15 bp, Homo sapiens
tgagaagcaagccct

SEQ ID NO: 564901 - DNA, 15 bp, Homo sapiens
gagaagcaagccctt

SEQ ID NO: 564902 - DNA, 15 bp, Homo sapiens
agaagcaagccctta

SEQ ID NO: 564903 - DNA, 15 bp, Homo sapiens
gaagcaagcccttag

SEQ ID NO: 564904 - DNA, 15 bp, Homo sapiens
aagcaagcccttagt

SEQ ID NO: 564905 - DNA, 15 bp, Homo sapiens
agcaagcccttagtc

SEQ ID NO: 564906 - DNA, 15 bp, Homo sapiens
gcaagcccttagtca

SEQ ID NO: 564907 - DNA, 15 bp, Homo sapiens
caagcccttagtcat

SEQ ID NO: 564908 - DNA, 15 bp, Homo sapiens
aagcccttagtcatg

SEQ ID NO: 564909 - DNA, 15 bp, Homo sapiens
agcccttagtcatgc

SEQ ID NO: 564910 - DNA, 15 bp, Homo sapiens
gcccttagtcatgcc

SEQ ID NO: 564911 - DNA, 15 bp, Homo sapiens
cccttagtcatgccc

SEQ ID NO: 564912 - DNA, 15 bp, Homo sapiens
ccttagtcatgccca

SEQ ID NO: 564913 - DNA, 15 bp, Homo sapiens
cttagtcatgcccag

SEQ ID NO: 564914 - DNA, 15 bp, Homo sapiens
ttagtcatgcccagg

SEQ ID NO: 564915 - DNA, 15 bp, Homo sapiens
tagtcatgcccaggt

SEQ ID NO: 564916 - DNA, 15 bp, Homo sapiens
agtcatgcccaggtg

SEQ ID NO: 564917 - DNA, 15 bp, Homo sapiens
gtcatgcccaggtgg

SEQ ID NO: 564918 - DNA, 15 bp, Homo sapiens
tcatgcccaggtggg

SEQ ID NO: 564919 - DNA, 15 bp, Homo sapiens
catgcccaggtgggg

SEQ ID NO: 564920 - DNA, 15 bp, Homo sapiens
atgcccaggtgggga

SEQ ID NO: 564921 - DNA, 15 bp, Homo sapiens
tgcccaggtggggag

SEQ ID NO: 564922 - DNA, 15 bp, Homo sapiens
gcccaggtggggagc

SEQ ID NO: 564923 - DNA, 15 bp, Homo sapiens
cccaggtggggagca

SEQ ID NO: 564924 - DNA, 15 bp, Homo sapiens
ccaggtggggagcag

SEQ ID NO: 564925 - DNA, 15 bp, Homo sapiens
caggtggggagcagg

SEQ ID NO: 564926 - DNA, 15 bp, Homo sapiens
aggtggggagcaggt

SEQ ID NO: 564927 - DNA, 15 bp, Homo sapiens
ggtggggagcaggtc

SEQ ID NO: 564928 - DNA, 15 bp, Homo sapiens
gtggggagcaggtct

SEQ ID NO: 564929 - DNA, 15 bp, Homo sapiens
tggggagcaggtctc

SEQ ID NO: 564930 - DNA, 15 bp, Homo sapiens
ggggagcaggtctcc

SEQ ID NO: 564931 - DNA, 15 bp, Homo sapiens
gggagcaggtctcca

SEQ ID NO: 564932 - DNA, 15 bp, Homo sapiens
ggagcaggtctccaa

SEQ ID NO: 564933 - DNA, 15 bp, Homo sapiens
gagcaggtctccaac

SEQ ID NO: 564934 - DNA, 15 bp, Homo sapiens
agcaggtctccaacc

SEQ ID NO: 564935 - DNA, 15 bp, Homo sapiens
gcaggtctccaacct

SEQ ID NO: 564936 - DNA, 15 bp, Homo sapiens
caggtctccaacctc

SEQ ID NO: 564937 - DNA, 15 bp, Homo sapiens
aggtctccaacctct

SEQ ID NO: 564938 - DNA, 15 bp, Homo sapiens
ggtctccaacctctc

SEQ ID NO: 564939 - DNA, 15 bp, Homo sapiens
gtctccaacctctca

SEQ ID NO: 564940 - DNA, 15 bp, Homo sapiens
tctccaacctctcat

SEQ ID NO: 564941 - DNA, 15 bp, Homo sapiens
ctccaacctctcatt

SEQ ID NO: 564942 - DNA, 15 bp, Homo sapiens
tccaacctctcattt

SEQ ID NO: 564943 - DNA, 15 bp, Homo sapiens
ccaacctctcatttc

SEQ ID NO: 564944 - DNA, 15 bp, Homo sapiens
caacctctcatttcc

SEQ ID NO: 564945 - DNA, 15 bp, Homo sapiens
aacctctcatttcct

SEQ ID NO: 564946 - DNA, 15 bp, Homo sapiens
acctctcatttcctg

SEQ ID NO: 564947 - DNA, 15 bp, Homo sapiens
cctctcatttcctga

SEQ ID NO: 564948 - DNA, 15 bp, Homo sapiens
ctctcatttcctgat

SEQ ID NO: 564949 - DNA, 15 bp, Homo sapiens
tctcatttcctgatc

SEQ ID NO: 564950 - DNA, 15 bp, Homo sapiens
ctcatttcctgatcc

SEQ ID NO: 564951 - DNA, 15 bp, Homo sapiens
tcatttcctgatcca

SEQ ID NO: 564952 - DNA, 15 bp, Homo sapiens
catttcctgatccag

SEQ ID NO: 564953 - DNA, 15 bp, Homo sapiens
atttcctgatccagc

SEQ ID NO: 564954 - DNA, 15 bp, Homo sapiens
tttcctgatccagcc

SEQ ID NO: 564955 - DNA, 15 bp, Homo sapiens
ttcctgatccagccc

SEQ ID NO: 564956 - DNA, 15 bp, Homo sapiens
tcctgatccagcccc

SEQ ID NO: 564957 - DNA, 15 bp, Homo sapiens
cctgatccagcccct

SEQ ID NO: 564958 - DNA, 15 bp, Homo sapiens
ctgatccagcccctt

SEQ ID NO: 564959 - DNA, 15 bp, Homo sapiens
tgatccagccccttt

SEQ ID NO: 564960 - DNA, 15 bp, Homo sapiens
gatccagcccctttc

SEQ ID NO: 564961 - DNA, 15 bp, Homo sapiens
atccagcccctttcc

SEQ ID NO: 564962 - DNA, 15 bp, Homo sapiens
tccagcccctttccc

SEQ ID NO: 564963 - DNA, 15 bp, Homo sapiens
ccagcccctttccca

SEQ ID NO: 564964 - DNA, 15 bp, Homo sapiens
cagcccctttcccag

SEQ ID NO: 564965 - DNA, 15 bp, Homo sapiens
agcccctttcccagc

SEQ ID NO: 564966 - DNA, 15 bp, Homo sapiens
gcccctttcccagcc

SEQ ID NO: 564967 - DNA, 15 bp, Homo sapiens
cccctttcccagcca

SEQ ID NO: 564968 - DNA, 15 bp, Homo sapiens
ccctttcccagccac

SEQ ID NO: 564969 - DNA, 15 bp, Homo sapiens
cctttcccagccaca

SEQ ID NO: 564970 - DNA, 15 bp, Homo sapiens
ctttcccagccacat

SEQ ID NO: 564971 - DNA, 15 bp, Homo sapiens
tttcccagccacatt

SEQ ID NO: 564972 - DNA, 15 bp, Homo sapiens
ttcccagccacattt

SEQ ID NO: 564973 - DNA, 15 bp, Homo sapiens
tcccagccacatttc

SEQ ID NO: 564974 - DNA, 15 bp, Homo sapiens
cccagccacatttct

SEQ ID NO: 564975 - DNA, 15 bp, Homo sapiens
ccagccacatttctg

SEQ ID NO: 564976 - DNA, 15 bp, Homo sapiens
cagccacatttctgg

SEQ ID NO: 564977 - DNA, 15 bp, Homo sapiens
agccacatttctggc

SEQ ID NO: 564978 - DNA, 15 bp, Homo sapiens
gccacatttctggcc

SEQ ID NO: 564979 - DNA, 15 bp, Homo sapiens
ccacatttctggcct

SEQ ID NO: 564980 - DNA, 15 bp, Homo sapiens
cacatttctggcctc

SEQ ID NO: 564981 - DNA, 15 bp, Homo sapiens
acatttctggcctct

SEQ ID NO: 564982 - DNA, 15 bp, Homo sapiens
catttctggcctctt

SEQ ID NO: 564983 - DNA, 15 bp, Homo sapiens
atttctggcctcttc

SEQ ID NO: 564984 - DNA, 15 bp, Homo sapiens
tttctggcctcttcc

SEQ ID NO: 564985 - DNA, 15 bp, Homo sapiens
ttctggcctcttccc

SEQ ID NO: 564986 - DNA, 15 bp, Homo sapiens
tctggcctcttccct

SEQ ID NO: 564987 - DNA, 15 bp, Homo sapiens
ctggcctcttccctt

SEQ ID NO: 564988 - DNA, 15 bp, Homo sapiens
tggcctcttcccttt

SEQ ID NO: 564989 - DNA, 15 bp, Homo sapiens
ggcctcttccctttc

SEQ ID NO: 564990 - DNA, 15 bp, Homo sapiens
gcctcttccctttct

SEQ ID NO: 564991 - DNA, 15 bp, Homo sapiens
cctcttccctttctc

SEQ ID NO: 564992 - DNA, 15 bp, Homo sapiens
ctcttccctttctct

SEQ ID NO: 564993 - DNA, 15 bp, Homo sapiens
tcttccctttctctg

SEQ ID NO: 564994 - DNA, 15 bp, Homo sapiens
cttccctttctctgt

SEQ ID NO: 564995 - DNA, 15 bp, Homo sapiens
ttccctttctctgtg

SEQ ID NO: 564996 - DNA, 15 bp, Homo sapiens
tccctttctctgtgg

SEQ ID NO: 564997 - DNA, 15 bp, Homo sapiens
ccctttctctgtggt

SEQ ID NO: 564998 - DNA, 15 bp, Homo sapiens
cctttctctgtggtc

SEQ ID NO: 564999 - DNA, 15 bp, Homo sapiens
ctttctctgtggtca

SEQ ID NO: 565000 - DNA, 15 bp, Homo sapiens
tttctctgtggtcat

SEQ ID NO: 565001 - DNA, 15 bp, Homo sapiens
ttctctgtggtcatc

SEQ ID NO: 565002 - DNA, 15 bp, Homo sapiens
tctctgtggtcatca

SEQ ID NO: 565003 - DNA, 15 bp, Homo sapiens
ctctgtggtcatcag

SEQ ID NO: 565004 - DNA, 15 bp, Homo sapiens
tctgtggtcatcagc

SEQ ID NO: 565005 - DNA, 15 bp, Homo sapiens
ctgtggtcatcagcc

SEQ ID NO: 565006 - DNA, 15 bp, Homo sapiens
tgtggtcatcagccc

SEQ ID NO: 565007 - DNA, 15 bp, Homo sapiens
gtggtcatcagccca

SEQ ID NO: 565008 - DNA, 15 bp, Homo sapiens
tggtcatcagcccag

SEQ ID NO: 565009 - DNA, 15 bp, Homo sapiens
ggtcatcagcccagc

SEQ ID NO: 565010 - DNA, 15 bp, Homo sapiens
gtcatcagcccagcc

SEQ ID NO: 565011 - DNA, 15 bp, Homo sapiens
tcatcagcccagccc

SEQ ID NO: 565012 - DNA, 15 bp, Homo sapiens
catcagcccagccct

SEQ ID NO: 565013 - DNA, 15 bp, Homo sapiens
atcagcccagccctc

SEQ ID NO: 565014 - DNA, 15 bp, Homo sapiens
tcagcccagccctct

SEQ ID NO: 565015 - DNA, 15 bp, Homo sapiens
cagcccagccctctc

SEQ ID NO: 565016 - DNA, 15 bp, Homo sapiens
agcccagccctctcc

SEQ ID NO: 565017 - DNA, 15 bp, Homo sapiens
gcccagccctctcca

SEQ ID NO: 565018 - DNA, 15 bp, Homo sapiens
cccagccctctccac

SEQ ID NO: 565019 - DNA, 15 bp, Homo sapiens
ccagccctctccact

SEQ ID NO: 565020 - DNA, 15 bp, Homo sapiens
cagccctctccacta

SEQ ID NO: 565021 - DNA, 15 bp, Homo sapiens
agccctctccactat

SEQ ID NO: 565022 - DNA, 15 bp, Homo sapiens
gccctctccactatc

SEQ ID NO: 565023 - DNA, 15 bp, Homo sapiens
ccctctccactatca

SEQ ID NO: 565024 - DNA, 15 bp, Homo sapiens
cctctccactatcaa

SEQ ID NO: 565025 - DNA, 15 bp, Homo sapiens
ctctccactatcaat

SEQ ID NO: 565026 - DNA, 15 bp, Homo sapiens
tctccactatcaata

SEQ ID NO: 565027 - DNA, 15 bp, Homo sapiens
ctccactatcaatag

SEQ ID NO: 565028 - DNA, 15 bp, Homo sapiens
tccactatcaataga

SEQ ID NO: 565029 - DNA, 15 bp, Homo sapiens
ccactatcaatagaa

SEQ ID NO: 565030 - DNA, 15 bp, Homo sapiens
cactatcaatagaaa

SEQ ID NO: 565031 - DNA, 15 bp, Homo sapiens
actatcaatagaaaa

SEQ ID NO: 565032 - DNA, 15 bp, Homo sapiens
ctatcaatagaaaag

SEQ ID NO: 565033 - DNA, 15 bp, Homo sapiens
tatcaatagaaaagc

SEQ ID NO: 565034 - DNA, 15 bp, Homo sapiens
atcaatagaaaagcc

SEQ ID NO: 565035 - DNA, 15 bp, Homo sapiens
tcaatagaaaagccc

SEQ ID NO: 565036 - DNA, 15 bp, Homo sapiens
caatagaaaagcccg

SEQ ID NO: 565037 - DNA, 15 bp, Homo sapiens
aatagaaaagcccga

SEQ ID NO: 565038 - DNA, 15 bp, Homo sapiens
atagaaaagcccgag

SEQ ID NO: 565039 - DNA, 15 bp, Homo sapiens
tagaaaagcccgaga

SEQ ID NO: 565040 - DNA, 15 bp, Homo sapiens
agaaaagcccgagag

SEQ ID NO: 565041 - DNA, 15 bp, Homo sapiens
gaaaagcccgagagc

SEQ ID NO: 565042 - DNA, 15 bp, Homo sapiens
aaaagcccgagagcc

SEQ ID NO: 565043 - DNA, 15 bp, Homo sapiens
aaagcccgagagccc

SEQ ID NO: 565044 - DNA, 15 bp, Homo sapiens
aagcccgagagccct

SEQ ID NO: 565045 - DNA, 15 bp, Homo sapiens
agcccgagagccctc

SEQ ID NO: 565046 - DNA, 15 bp, Homo sapiens
gcccgagagccctca

SEQ ID NO: 565047 - DNA, 15 bp, Homo sapiens
cccgagagccctcag

SEQ ID NO: 565048 - DNA, 15 bp, Homo sapiens
ccgagagccctcaga

SEQ ID NO: 565049 - DNA, 15 bp, Homo sapiens
cgagagccctcagag

SEQ ID NO: 565050 - DNA, 15 bp, Homo sapiens
gagagccctcagaga

SEQ ID NO: 565051 - DNA, 15 bp, Homo sapiens
agagccctcagagag

SEQ ID NO: 565052 - DNA, 15 bp, Homo sapiens
gagccctcagagagc

SEQ ID NO: 565053 - DNA, 15 bp, Homo sapiens
agccctcagagagcc

SEQ ID NO: 565054 - DNA, 15 bp, Homo sapiens
gccctcagagagcct

SEQ ID NO: 565055 - DNA, 15 bp, Homo sapiens
ccctcagagagcctg

SEQ ID NO: 565056 - DNA, 15 bp, Homo sapiens
cctcagagagcctgg

SEQ ID NO: 565057 - DNA, 15 bp, Homo sapiens
ctcagagagcctgga

SEQ ID NO: 565058 - DNA, 15 bp, Homo sapiens
tcagagagcctggaa

SEQ ID NO: 565059 - DNA, 15 bp, Homo sapiens
cagagagcctggaat

SEQ ID NO: 565060 - DNA, 15 bp, Homo sapiens
agagagcctggaatg

SEQ ID NO: 565061 - DNA, 15 bp, Homo sapiens
gagagcctggaatgt

SEQ ID NO: 565062 - DNA, 15 bp, Homo sapiens
agagcctggaatgtg

SEQ ID NO: 565063 - DNA, 15 bp, Homo sapiens
gagcctggaatgtgc

SEQ ID NO: 565064 - DNA, 15 bp, Homo sapiens
agcctggaatgtgct

SEQ ID NO: 565065 - DNA, 15 bp, Homo sapiens
gcctggaatgtgctc

SEQ ID NO: 565066 - DNA, 15 bp, Homo sapiens
cctggaatgtgctcc

SEQ ID NO: 565067 - DNA, 15 bp, Homo sapiens
ctggaatgtgctccc

SEQ ID NO: 565068 - DNA, 15 bp, Homo sapiens
tggaatgtgctccca

SEQ ID NO: 565069 - DNA, 15 bp, Homo sapiens
ggaatgtgctcccac

SEQ ID NO: 565070 - DNA, 15 bp, Homo sapiens
gaatgtgctcccacc

SEQ ID NO: 565071 - DNA, 15 bp, Homo sapiens
aatgtgctcccaccg

SEQ ID NO: 565072 - DNA, 15 bp, Homo sapiens
atgtgctcccaccgc

SEQ ID NO: 565073 - DNA, 15 bp, Homo sapiens
tgtgctcccaccgct

SEQ ID NO: 565074 - DNA, 15 bp, Homo sapiens
gtgctcccaccgctg

SEQ ID NO: 565075 - DNA, 15 bp, Homo sapiens
tgctcccaccgctgt

SEQ ID NO: 565076 - DNA, 15 bp, Homo sapiens
gctcccaccgctgtg

SEQ ID NO: 565077 - DNA, 15 bp, Homo sapiens
ctcccaccgctgtga

SEQ ID NO: 565078 - DNA, 15 bp, Homo sapiens
tcccaccgctgtgat

SEQ ID NO: 565079 - DNA, 15 bp, Homo sapiens
cccaccgctgtgatg

SEQ ID NO: 565080 - DNA, 15 bp, Homo sapiens
ccaccgctgtgatgt

SEQ ID NO: 565081 - DNA, 15 bp, Homo sapiens
caccgctgtgatgtc

SEQ ID NO: 565082 - DNA, 15 bp, Homo sapiens
accgctgtgatgtca

SEQ ID NO: 565083 - DNA, 15 bp, Homo sapiens
ccgctgtgatgtcat

SEQ ID NO: 565084 - DNA, 15 bp, Homo sapiens
cgctgtgatgtcatc

SEQ ID NO: 565085 - DNA, 15 bp, Homo sapiens
gctgtgatgtcatcc

SEQ ID NO: 565086 - DNA, 15 bp, Homo sapiens
ctgtgatgtcatccc

SEQ ID NO: 565087 - DNA, 15 bp, Homo sapiens
tgtgatgtcatccca

SEQ ID NO: 565088 - DNA, 15 bp, Homo sapiens
gtgatgtcatcccac

SEQ ID NO: 565089 - DNA, 15 bp, Homo sapiens
tgatgtcatcccaca

SEQ ID NO: 565090 - DNA, 15 bp, Homo sapiens
gatgtcatcccacat

SEQ ID NO: 565091 - DNA, 15 bp, Homo sapiens
atgtcatcccacatc

SEQ ID NO: 565092 - DNA, 15 bp, Homo sapiens
tgtcatcccacatca

SEQ ID NO: 565093 - DNA, 15 bp, Homo sapiens
gtcatcccacatcat

SEQ ID NO: 565094 - DNA, 15 bp, Homo sapiens
tcatcccacatcatc

SEQ ID NO: 565095 - DNA, 15 bp, Homo sapiens
catcccacatcatcc

SEQ ID NO: 565096 - DNA, 15 bp, Homo sapiens
atcccacatcatcca

SEQ ID NO: 565097 - DNA, 15 bp, Homo sapiens
tcccacatcatccat

SEQ ID NO: 565098 - DNA, 15 bp, Homo sapiens
cccacatcatccatg

SEQ ID NO: 565099 - DNA, 15 bp, Homo sapiens
ccacatcatccatgt

SEQ ID NO: 565100 - DNA, 15 bp, Homo sapiens
cacatcatccatgtg

SEQ ID NO: 565101 - DNA, 15 bp, Homo sapiens
acatcatccatgtgc

SEQ ID NO: 565102 - DNA, 15 bp, Homo sapiens
catcatccatgtgct

SEQ ID NO: 565103 - DNA, 15 bp, Homo sapiens
atcatccatgtgctg

SEQ ID NO: 565104 - DNA, 15 bp, Homo sapiens
tcatccatgtgctga

SEQ ID NO: 565105 - DNA, 15 bp, Homo sapiens
catccatgtgctgaa

SEQ ID NO: 565106 - DNA, 15 bp, Homo sapiens
atccatgtgctgaaa

SEQ ID NO: 565107 - DNA, 15 bp, Homo sapiens
tccatgtgctgaaat

SEQ ID NO: 565108 - DNA, 15 bp, Homo sapiens
ccatgtgctgaaatc

SEQ ID NO: 565109 - DNA, 15 bp, Homo sapiens
catgtgctgaaatca

SEQ ID NO: 565110 - DNA, 15 bp, Homo sapiens
atgtgctgaaatcag

SEQ ID NO: 565111 - DNA, 15 bp, Homo sapiens
tgtgctgaaatcagg

SEQ ID NO: 565112 - DNA, 15 bp, Homo sapiens
gtgctgaaatcaggg

SEQ ID NO: 565113 - DNA, 15 bp, Homo sapiens
tgctgaaatcaggga

SEQ ID NO: 565114 - DNA, 15 bp, Homo sapiens
gctgaaatcagggac

SEQ ID NO: 565115 - DNA, 15 bp, Homo sapiens
ctgaaatcagggact

SEQ ID NO: 565116 - DNA, 15 bp, Homo sapiens
tgaaatcagggactg

SEQ ID NO: 565117 - DNA, 15 bp, Homo sapiens
gaaatcagggactgg

SEQ ID NO: 565118 - DNA, 15 bp, Homo sapiens
aaatcagggactgga

SEQ ID NO: 565119 - DNA, 15 bp, Homo sapiens
aatcagggactggag

SEQ ID NO: 565120 - DNA, 15 bp, Homo sapiens
atcagggactggagt

SEQ ID NO: 565121 - DNA, 15 bp, Homo sapiens
tcagggactggagtc

SEQ ID NO: 565122 - DNA, 15 bp, Homo sapiens
cagggactggagtcg

SEQ ID NO: 565123 - DNA, 15 bp, Homo sapiens
agggactggagtcgg

SEQ ID NO: 565124 - DNA, 15 bp, Homo sapiens
gggactggagtcggc

SEQ ID NO: 565125 - DNA, 15 bp, Homo sapiens
ggactggagtcggcc

SEQ ID NO: 565126 - DNA, 15 bp, Homo sapiens
gactggagtcggccc

SEQ ID NO: 565127 - DNA, 15 bp, Homo sapiens
actggagtcggcccc

SEQ ID NO: 565128 - DNA, 15 bp, Homo sapiens
ctggagtcggccccc

SEQ ID NO: 565129 - DNA, 15 bp, Homo sapiens
tggagtcggccccca

SEQ ID NO: 565130 - DNA, 15 bp, Homo sapiens
ggagtcggcccccag

SEQ ID NO: 565131 - DNA, 15 bp, Homo sapiens
gagtcggcccccagg

SEQ ID NO: 565132 - DNA, 15 bp, Homo sapiens
agtcggcccccagga

SEQ ID NO: 565133 - DNA, 15 bp, Homo sapiens
gtcggcccccaggaa

SEQ ID NO: 565134 - DNA, 15 bp, Homo sapiens
tcggcccccaggaat

SEQ ID NO: 565135 - DNA, 15 bp, Homo sapiens
cggcccccaggaatg

SEQ ID NO: 565136 - DNA, 15 bp, Homo sapiens
ggcccccaggaatgt

SEQ ID NO: 565137 - DNA, 15 bp, Homo sapiens
gcccccaggaatgtc

SEQ ID NO: 565138 - DNA, 15 bp, Homo sapiens
cccccaggaatgtca

SEQ ID NO: 565139 - DNA, 15 bp, Homo sapiens
ccccaggaatgtcat

SEQ ID NO: 565140 - DNA, 15 bp, Homo sapiens
cccaggaatgtcatg

SEQ ID NO: 565141 - DNA, 15 bp, Homo sapiens
ccaggaatgtcatgg

SEQ ID NO: 565142 - DNA, 15 bp, Homo sapiens
caggaatgtcatggc

SEQ ID NO: 565143 - DNA, 15 bp, Homo sapiens
aggaatgtcatggcc

SEQ ID NO: 565144 - DNA, 15 bp, Homo sapiens
ggaatgtcatggcca

SEQ ID NO: 565145 - DNA, 15 bp, Homo sapiens
gaatgtcatggccat

SEQ ID NO: 565146 - DNA, 15 bp, Homo sapiens
aatgtcatggccatg

SEQ ID NO: 565147 - DNA, 15 bp, Homo sapiens
atgtcatggccatgg

SEQ ID NO: 565148 - DNA, 15 bp, Homo sapiens
tgtcatggccatggg

SEQ ID NO: 565149 - DNA, 15 bp, Homo sapiens
gtcatggccatgggc

SEQ ID NO: 565150 - DNA, 15 bp, Homo sapiens
tcatggccatgggct

SEQ ID NO: 565151 - DNA, 15 bp, Homo sapiens
catggccatgggctt

SEQ ID NO: 565152 - DNA, 15 bp, Homo sapiens
atggccatgggcttt

SEQ ID NO: 565153 - DNA, 15 bp, Homo sapiens
tggccatgggctttg

SEQ ID NO: 565154 - DNA, 15 bp, Homo sapiens
ggccatgggctttga

SEQ ID NO: 565155 - DNA, 15 bp, Homo sapiens
gccatgggctttgag

SEQ ID NO: 565156 - DNA, 15 bp, Homo sapiens
ccatgggctttgaga

SEQ ID NO: 565157 - DNA, 15 bp, Homo sapiens
catgggctttgagac

SEQ ID NO: 565158 - DNA, 15 bp, Homo sapiens
atgggctttgagaca

SEQ ID NO: 565159 - DNA, 15 bp, Homo sapiens
tgggctttgagacac

SEQ ID NO: 565160 - DNA, 15 bp, Homo sapiens
gggctttgagacact

SEQ ID NO: 565161 - DNA, 15 bp, Homo sapiens
ggctttgagacactc

SEQ ID NO: 565162 - DNA, 15 bp, Homo sapiens
gctttgagacactct

SEQ ID NO: 565163 - DNA, 15 bp, Homo sapiens
ctttgagacactctt

SEQ ID NO: 565164 - DNA, 15 bp, Homo sapiens
tttgagacactcttc

SEQ ID NO: 565165 - DNA, 15 bp, Homo sapiens
ttgagacactcttct

SEQ ID NO: 565166 - DNA, 15 bp, Homo sapiens
tgagacactcttctt

SEQ ID NO: 565167 - DNA, 15 bp, Homo sapiens
gagacactcttctta

SEQ ID NO: 565168 - DNA, 15 bp, Homo sapiens
agacactcttcttat

SEQ ID NO: 565169 - DNA, 15 bp, Homo sapiens
gacactcttcttatg

SEQ ID NO: 565170 - DNA, 15 bp, Homo sapiens
acactcttcttatgg

SEQ ID NO: 565171 - DNA, 15 bp, Homo sapiens
cactcttcttatggg

SEQ ID NO: 565172 - DNA, 15 bp, Homo sapiens
actcttcttatgggc

SEQ ID NO: 565173 - DNA, 15 bp, Homo sapiens
ctcttcttatgggcc

SEQ ID NO: 565174 - DNA, 15 bp, Homo sapiens
tcttcttatgggcct

SEQ ID NO: 565175 - DNA, 15 bp, Homo sapiens
cttcttatgggcctt

SEQ ID NO: 565176 - DNA, 15 bp, Homo sapiens
ttcttatgggccttt

SEQ ID NO: 565177 - DNA, 15 bp, Homo sapiens
tcttatgggcctttc

SEQ ID NO: 565178 - DNA, 15 bp, Homo sapiens
cttatgggcctttca

SEQ ID NO: 565179 - DNA, 15 bp, Homo sapiens
ttatgggcctttcac

SEQ ID NO: 565180 - DNA, 15 bp, Homo sapiens
tatgggcctttcacc

SEQ ID NO: 565181 - DNA, 15 bp, Homo sapiens
atgggcctttcaccc

SEQ ID NO: 565182 - DNA, 15 bp, Homo sapiens
tgggcctttcaccca

SEQ ID NO: 565183 - DNA, 15 bp, Homo sapiens
gggcctttcacccaa

SEQ ID NO: 565184 - DNA, 15 bp, Homo sapiens
ggcctttcacccaat

SEQ ID NO: 565185 - DNA, 15 bp, Homo sapiens
gcctttcacccaatc

SEQ ID NO: 565186 - DNA, 15 bp, Homo sapiens
cctttcacccaatcc

SEQ ID NO: 565187 - DNA, 15 bp, Homo sapiens
ctttcacccaatcca

SEQ ID NO: 565188 - DNA, 15 bp, Homo sapiens
tttcacccaatccag

SEQ ID NO: 565189 - DNA, 15 bp, Homo sapiens
ttcacccaatccaga

SEQ ID NO: 565190 - DNA, 15 bp, Homo sapiens
tcacccaatccagac

SEQ ID NO: 565191 - DNA, 15 bp, Homo sapiens
cacccaatccagacc

SEQ ID NO: 565192 - DNA, 15 bp, Homo sapiens
acccaatccagacct

SEQ ID NO: 565193 - DNA, 15 bp, Homo sapiens
cccaatccagacctt

SEQ ID NO: 565194 - DNA, 15 bp, Homo sapiens
ccaatccagaccttg

SEQ ID NO: 565195 - DNA, 15 bp, Homo sapiens
caatccagaccttgc

SEQ ID NO: 565196 - DNA, 15 bp, Homo sapiens
aatccagaccttgcc

SEQ ID NO: 565197 - DNA, 15 bp, Homo sapiens
atccagaccttgcct

SEQ ID NO: 565198 - DNA, 15 bp, Homo sapiens
tccagaccttgcctg

SEQ ID NO: 565199 - DNA, 15 bp, Homo sapiens
ccagaccttgcctgc

SEQ ID NO: 565200 - DNA, 15 bp, Homo sapiens
cagaccttgcctgct

SEQ ID NO: 565201 - DNA, 15 bp, Homo sapiens
agaccttgcctgctc

SEQ ID NO: 565202 - DNA, 15 bp, Homo sapiens
gaccttgcctgctct

SEQ ID NO: 565203 - DNA, 15 bp, Homo sapiens
accttgcctgctctt

SEQ ID NO: 565204 - DNA, 15 bp, Homo sapiens
ccttgcctgctcttc

SEQ ID NO: 565205 - DNA, 15 bp, Homo sapiens
cttgcctgctcttca

SEQ ID NO: 565206 - DNA, 15 bp, Homo sapiens
ttgcctgctcttcag

SEQ ID NO: 565207 - DNA, 15 bp, Homo sapiens
tgcctgctcttcaga

SEQ ID NO: 565208 - DNA, 15 bp, Homo sapiens
gcctgctcttcagag

SEQ ID NO: 565209 - DNA, 15 bp, Homo sapiens
cctgctcttcagagc

SEQ ID NO: 565210 - DNA, 15 bp, Homo sapiens
ctgctcttcagagct

SEQ ID NO: 565211 - DNA, 15 bp, Homo sapiens
tgctcttcagagctg

SEQ ID NO: 565212 - DNA, 15 bp, Homo sapiens
gctcttcagagctgc

SEQ ID NO: 565213 - DNA, 15 bp, Homo sapiens
ctcttcagagctgct

SEQ ID NO: 565214 - DNA, 15 bp, Homo sapiens
tcttcagagctgctt

SEQ ID NO: 565215 - DNA, 15 bp, Homo sapiens
cttcagagctgcttg

SEQ ID NO: 565216 - DNA, 15 bp, Homo sapiens
ttcagagctgcttga

SEQ ID NO: 565217 - DNA, 15 bp, Homo sapiens
tcagagctgcttgaa

SEQ ID NO: 565218 - DNA, 15 bp, Homo sapiens
cagagctgcttgaag

SEQ ID NO: 565219 - DNA, 15 bp, Homo sapiens
agagctgcttgaagg

SEQ ID NO: 565220 - DNA, 15 bp, Homo sapiens
gagctgcttgaagga

SEQ ID NO: 565221 - DNA, 15 bp, Homo sapiens
agctgcttgaaggat

SEQ ID NO: 565222 - DNA, 15 bp, Homo sapiens
gctgcttgaaggatt

SEQ ID NO: 565223 - DNA, 15 bp, Homo sapiens
ctgcttgaaggattt

SEQ ID NO: 565224 - DNA, 15 bp, Homo sapiens
tgcttgaaggatttt

SEQ ID NO: 565225 - DNA, 15 bp, Homo sapiens
gcttgaaggattttg

SEQ ID NO: 565226 - DNA, 15 bp, Homo sapiens
cttgaaggattttgc

SEQ ID NO: 565227 - DNA, 15 bp, Homo sapiens
ttgaaggattttgct

SEQ ID NO: 565228 - DNA, 15 bp, Homo sapiens
tgaaggattttgcta

SEQ ID NO: 565229 - DNA, 15 bp, Homo sapiens
gaaggattttgctac

SEQ ID NO: 565230 - DNA, 15 bp, Homo sapiens
aaggattttgctaca

SEQ ID NO: 565231 - DNA, 15 bp, Homo sapiens
aggattttgctacag

SEQ ID NO: 565232 - DNA, 15 bp, Homo sapiens
ggattttgctacaga

SEQ ID NO: 565233 - DNA, 15 bp, Homo sapiens
gattttgctacagaa

SEQ ID NO: 565234 - DNA, 15 bp, Homo sapiens
attttgctacagaac

SEQ ID NO: 565235 - DNA, 15 bp, Homo sapiens
ttttgctacagaact

SEQ ID NO: 565236 - DNA, 15 bp, Homo sapiens
tttgctacagaacta

SEQ ID NO: 565237 - DNA, 15 bp, Homo sapiens
ttgctacagaactat

SEQ ID NO: 565238 - DNA, 15 bp, Homo sapiens
tgctacagaactatg

SEQ ID NO: 565239 - DNA, 15 bp, Homo sapiens
gctacagaactatgg

SEQ ID NO: 565240 - DNA, 15 bp, Homo sapiens
ctacagaactatgga

SEQ ID NO: 565241 - DNA, 15 bp, Homo sapiens
tacagaactatggac

SEQ ID NO: 565242 - DNA, 15 bp, Homo sapiens
acagaactatggaca

SEQ ID NO: 565243 - DNA, 15 bp, Homo sapiens
cagaactatggacat

SEQ ID NO: 565244 - DNA, 15 bp, Homo sapiens
agaactatggacatt

SEQ ID NO: 565245 - DNA, 15 bp, Homo sapiens
gaactatggacattt

SEQ ID NO: 565246 - DNA, 15 bp, Homo sapiens
aactatggacattta

SEQ ID NO: 565247 - DNA, 15 bp, Homo sapiens
actatggacatttaa

SEQ ID NO: 565248 - DNA, 15 bp, Homo sapiens
ctatggacatttaag

SEQ ID NO: 565249 - DNA, 15 bp, Homo sapiens
tatggacatttaaga

SEQ ID NO: 565250 - DNA, 15 bp, Homo sapiens
atggacatttaagaa

SEQ ID NO: 565251 - DNA, 15 bp, Homo sapiens
tggacatttaagaaa

SEQ ID NO: 565252 - DNA, 15 bp, Homo sapiens
ggacatttaagaaat

SEQ ID NO: 565253 - DNA, 15 bp, Homo sapiens
gacatttaagaaatg

SEQ ID NO: 565254 - DNA, 15 bp, Homo sapiens
acatttaagaaatgt

SEQ ID NO: 565255 - DNA, 15 bp, Homo sapiens
catttaagaaatgtc

SEQ ID NO: 565256 - DNA, 15 bp, Homo sapiens
atttaagaaatgtct

SEQ ID NO: 565257 - DNA, 15 bp, Homo sapiens
tttaagaaatgtcta

SEQ ID NO: 565258 - DNA, 15 bp, Homo sapiens
ttaagaaatgtctaa

SEQ ID NO: 565259 - DNA, 15 bp, Homo sapiens
taagaaatgtctaac

SEQ ID NO: 565260 - DNA, 15 bp, Homo sapiens
aagaaatgtctaacc

SEQ ID NO: 565261 - DNA, 15 bp, Homo sapiens
agaaatgtctaacct

SEQ ID NO: 565262 - DNA, 15 bp, Homo sapiens
gaaatgtctaacctt

SEQ ID NO: 565263 - DNA, 15 bp, Homo sapiens
aaatgtctaaccttg

SEQ ID NO: 565264 - DNA, 15 bp, Homo sapiens
aatgtctaaccttgt

SEQ ID NO: 565265 - DNA, 15 bp, Homo sapiens
atgtctaaccttgtg

SEQ ID NO: 565266 - DNA, 15 bp, Homo sapiens
tgtctaaccttgtgt

SEQ ID NO: 565267 - DNA, 15 bp, Homo sapiens
gtctaaccttgtgtc

SEQ ID NO: 565268 - DNA, 15 bp, Homo sapiens
tctaaccttgtgtca

SEQ ID NO: 565269 - DNA, 15 bp, Homo sapiens
ctaaccttgtgtcag

SEQ ID NO: 565270 - DNA, 15 bp, Homo sapiens
taaccttgtgtcagt

SEQ ID NO: 565271 - DNA, 15 bp, Homo sapiens
aaccttgtgtcagtt

SEQ ID NO: 565272 - DNA, 15 bp, Homo sapiens
accttgtgtcagttt

SEQ ID NO: 565273 - DNA, 15 bp, Homo sapiens
ccttgtgtcagttta

SEQ ID NO: 565274 - DNA, 15 bp, Homo sapiens
cttgtgtcagtttat

SEQ ID NO: 565275 - DNA, 15 bp, Homo sapiens
ttgtgtcagtttata

SEQ ID NO: 565276 - DNA, 15 bp, Homo sapiens
tgtgtcagtttatat

SEQ ID NO: 565277 - DNA, 15 bp, Homo sapiens
gtgtcagtttatatt

SEQ ID NO: 565278 - DNA, 15 bp, Homo sapiens
tgtcagtttatattt

SEQ ID NO: 565279 - DNA, 15 bp, Homo sapiens
gtcagtttatatttg

SEQ ID NO: 565280 - DNA, 15 bp, Homo sapiens
tcagtttatatttgt

SEQ ID NO: 565281 - DNA, 15 bp, Homo sapiens
cagtttatatttgta

SEQ ID NO: 565282 - DNA, 15 bp, Homo sapiens
agtttatatttgtag

SEQ ID NO: 565283 - DNA, 15 bp, Homo sapiens
gtttatatttgtaga

SEQ ID NO: 565284 - DNA, 15 bp, Homo sapiens
tttatatttgtagaa

SEQ ID NO: 565285 - DNA, 15 bp, Homo sapiens
ttatatttgtagaac

SEQ ID NO: 565286 - DNA, 15 bp, Homo sapiens
tatatttgtagaacg

SEQ ID NO: 565287 - DNA, 15 bp, Homo sapiens
atatttgtagaacgc

SEQ ID NO: 565288 - DNA, 15 bp, Homo sapiens
tatttgtagaacgct

SEQ ID NO: 565289 - DNA, 15 bp, Homo sapiens
atttgtagaacgctt

SEQ ID NO: 565290 - DNA, 15 bp, Homo sapiens
tttgtagaacgcttc

SEQ ID NO: 565291 - DNA, 15 bp, Homo sapiens
ttgtagaacgcttca

SEQ ID NO: 565292 - DNA, 15 bp, Homo sapiens
tgtagaacgcttcat

SEQ ID NO: 565293 - DNA, 15 bp, Homo sapiens
gtagaacgcttcata

SEQ ID NO: 565294 - DNA, 15 bp, Homo sapiens
tagaacgcttcataa

SEQ ID NO: 565295 - DNA, 15 bp, Homo sapiens
agaacgcttcataag

SEQ ID NO: 565296 - DNA, 15 bp, Homo sapiens
gaacgcttcataagg

SEQ ID NO: 565297 - DNA, 15 bp, Homo sapiens
aacgcttcataaggt

SEQ ID NO: 565298 - DNA, 15 bp, Homo sapiens
acgcttcataaggtg

SEQ ID NO: 565299 - DNA, 15 bp, Homo sapiens
cgcttcataaggtgc

SEQ ID NO: 565300 - DNA, 15 bp, Homo sapiens
gcttcataaggtgct

SEQ ID NO: 565301 - DNA, 15 bp, Homo sapiens
cttcataaggtgctt

SEQ ID NO: 565302 - DNA, 15 bp, Homo sapiens
ttcataaggtgcttt

SEQ ID NO: 565303 - DNA, 15 bp, Homo sapiens
tcataaggtgctttt

SEQ ID NO: 565304 - DNA, 15 bp, Homo sapiens
cataaggtgcttttc

SEQ ID NO: 565305 - DNA, 15 bp, Homo sapiens
ataaggtgcttttcc

SEQ ID NO: 565306 - DNA, 15 bp, Homo sapiens
taaggtgcttttcca

SEQ ID NO: 565307 - DNA, 15 bp, Homo sapiens
aaggtgcttttccat

SEQ ID NO: 565308 - DNA, 15 bp, Homo sapiens
aggtgcttttccata

SEQ ID NO: 565309 - DNA, 15 bp, Homo sapiens
ggtgcttttccatat

SEQ ID NO: 565310 - DNA, 15 bp, Homo sapiens
gtgcttttccatatg

SEQ ID NO: 565311 - DNA, 15 bp, Homo sapiens
tgcttttccatatgt

SEQ ID NO: 565312 - DNA, 15 bp, Homo sapiens
gcttttccatatgtt

SEQ ID NO: 565313 - DNA, 15 bp, Homo sapiens
cttttccatatgtta

SEQ ID NO: 565314 - DNA, 15 bp, Homo sapiens
ttttccatatgttat

SEQ ID NO: 565315 - DNA, 15 bp, Homo sapiens
tttccatatgttatc

SEQ ID NO: 565316 - DNA, 15 bp, Homo sapiens
ttccatatgttatct

SEQ ID NO: 565317 - DNA, 15 bp, Homo sapiens
tccatatgttatctc

SEQ ID NO: 565318 - DNA, 15 bp, Homo sapiens
ccatatgttatctca

SEQ ID NO: 565319 - DNA, 15 bp, Homo sapiens
catatgttatctcat

SEQ ID NO: 565320 - DNA, 15 bp, Homo sapiens
atatgttatctcatc

SEQ ID NO: 565321 - DNA, 15 bp, Homo sapiens
tatgttatctcatct

SEQ ID NO: 565322 - DNA, 15 bp, Homo sapiens
atgttatctcatctg

SEQ ID NO: 565323 - DNA, 15 bp, Homo sapiens
tgttatctcatctga

SEQ ID NO: 565324 - DNA, 15 bp, Homo sapiens
gttatctcatctgat

SEQ ID NO: 565325 - DNA, 15 bp, Homo sapiens
ttatctcatctgatc

SEQ ID NO: 565326 - DNA, 15 bp, Homo sapiens
tatctcatctgatca

SEQ ID NO: 565327 - DNA, 15 bp, Homo sapiens
atctcatctgatcat

SEQ ID NO: 565328 - DNA, 15 bp, Homo sapiens
tctcatctgatcatt

SEQ ID NO: 565329 - DNA, 15 bp, Homo sapiens
ctcatctgatcattt

SEQ ID NO: 565330 - DNA, 15 bp, Homo sapiens
tcatctgatcatttc

SEQ ID NO: 565331 - DNA, 15 bp, Homo sapiens
catctgatcatttcc

SEQ ID NO: 565332 - DNA, 15 bp, Homo sapiens
atctgatcatttcca

SEQ ID NO: 565333 - DNA, 15 bp, Homo sapiens
tctgatcatttccac

SEQ ID NO: 565334 - DNA, 15 bp, Homo sapiens
ctgatcatttccaca

SEQ ID NO: 565335 - DNA, 15 bp, Homo sapiens
tgatcatttccacaa

SEQ ID NO: 565336 - DNA, 15 bp, Homo sapiens
gatcatttccacaac

SEQ ID NO: 565337 - DNA, 15 bp, Homo sapiens
atcatttccacaacc

SEQ ID NO: 565338 - DNA, 15 bp, Homo sapiens
tcatttccacaaccc

SEQ ID NO: 565339 - DNA, 15 bp, Homo sapiens
catttccacaacccc

SEQ ID NO: 565340 - DNA, 15 bp, Homo sapiens
atttccacaacccca

SEQ ID NO: 565341 - DNA, 15 bp, Homo sapiens
tttccacaaccccat

SEQ ID NO: 565342 - DNA, 15 bp, Homo sapiens
ttccacaaccccata

SEQ ID NO: 565343 - DNA, 15 bp, Homo sapiens
tccacaaccccataa

SEQ ID NO: 565344 - DNA, 15 bp, Homo sapiens
ccacaaccccataag

SEQ ID NO: 565345 - DNA, 15 bp, Homo sapiens
cacaaccccataagg

SEQ ID NO: 565346 - DNA, 15 bp, Homo sapiens
acaaccccataaggt

SEQ ID NO: 565347 - DNA, 15 bp, Homo sapiens
caaccccataaggta

SEQ ID NO: 565348 - DNA, 15 bp, Homo sapiens
aaccccataaggtag

SEQ ID NO: 565349 - DNA, 15 bp, Homo sapiens
accccataaggtaga

SEQ ID NO: 565350 - DNA, 15 bp, Homo sapiens
ccccataaggtagat

SEQ ID NO: 565351 - DNA, 15 bp, Homo sapiens
cccataaggtagata

SEQ ID NO: 565352 - DNA, 15 bp, Homo sapiens
ccataaggtagataa

SEQ ID NO: 565353 - DNA, 15 bp, Homo sapiens
cataaggtagataaa

SEQ ID NO: 565354 - DNA, 15 bp, Homo sapiens
ataaggtagataaaa

SEQ ID NO: 565355 - DNA, 15 bp, Homo sapiens
taaggtagataaaac

SEQ ID NO: 565356 - DNA, 15 bp, Homo sapiens
aaggtagataaaaca

SEQ ID NO: 565357 - DNA, 15 bp, Homo sapiens
aggtagataaaacat

SEQ ID NO: 565358 - DNA, 15 bp, Homo sapiens
ggtagataaaacata

SEQ ID NO: 565359 - DNA, 15 bp, Homo sapiens
gtagataaaacataa

SEQ ID NO: 565360 - DNA, 15 bp, Homo sapiens
tagataaaacataaa

SEQ ID NO: 565361 - DNA, 15 bp, Homo sapiens
agataaaacataaat

SEQ ID NO: 565362 - DNA, 15 bp, Homo sapiens
gataaaacataaatt

SEQ ID NO: 565363 - DNA, 15 bp, Homo sapiens
ataaaacataaattt

SEQ ID NO: 565364 - DNA, 15 bp, Homo sapiens
taaaacataaatttt

SEQ ID NO: 565365 - DNA, 15 bp, Homo sapiens
aaaacataaattttt

SEQ ID NO: 565366 - DNA, 15 bp, Homo sapiens
aaacataaattttta

SEQ ID NO: 565367 - DNA, 15 bp, Homo sapiens
aacataaatttttat

SEQ ID NO: 565368 - DNA, 15 bp, Homo sapiens
acataaatttttatt

SEQ ID NO: 565369 - DNA, 15 bp, Homo sapiens
cataaatttttattt

SEQ ID NO: 565370 - DNA, 15 bp, Homo sapiens
ataaatttttatttc

SEQ ID NO: 565371 - DNA, 15 bp, Homo sapiens
taaatttttatttcc

SEQ ID NO: 565372 - DNA, 15 bp, Homo sapiens
aaatttttatttccg

SEQ ID NO: 565373 - DNA, 15 bp, Homo sapiens
aatttttatttccgt

SEQ ID NO: 565374 - DNA, 15 bp, Homo sapiens
atttttatttccgta

SEQ ID NO: 565375 - DNA, 15 bp, Homo sapiens
tttttatttccgtat

SEQ ID NO: 565376 - DNA, 15 bp, Homo sapiens
ttttatttccgtatt

SEQ ID NO: 565377 - DNA, 15 bp, Homo sapiens
tttatttccgtatta

SEQ ID NO: 565378 - DNA, 15 bp, Homo sapiens
ttatttccgtattaa

SEQ ID NO: 565379 - DNA, 15 bp, Homo sapiens
tatttccgtattaaa

SEQ ID NO: 565380 - DNA, 15 bp, Homo sapiens
atttccgtattaaaa

SEQ ID NO: 565381 - DNA, 15 bp, Homo sapiens
tttccgtattaaaat

SEQ ID NO: 565382 - DNA, 15 bp, Homo sapiens
ttccgtattaaaatt

SEQ ID NO: 565383 - DNA, 15 bp, Homo sapiens
tccgtattaaaattg

SEQ ID NO: 565384 - DNA, 15 bp, Homo sapiens
ccgtattaaaattga

SEQ ID NO: 565385 - DNA, 15 bp, Homo sapiens
cgtattaaaattgaa

SEQ ID NO: 565386 - DNA, 15 bp, Homo sapiens
gtattaaaattgaag

SEQ ID NO: 565387 - DNA, 15 bp, Homo sapiens
tattaaaattgaagc

SEQ ID NO: 565388 - DNA, 15 bp, Homo sapiens
attaaaattgaagcc

SEQ ID NO: 565389 - DNA, 15 bp, Homo sapiens
ttaaaattgaagccc

SEQ ID NO: 565390 - DNA, 15 bp, Homo sapiens
taaaattgaagccca

SEQ ID NO: 565391 - DNA, 15 bp, Homo sapiens
aaaattgaagcccag

SEQ ID NO: 565392 - DNA, 15 bp, Homo sapiens
aaattgaagcccaga

SEQ ID NO: 565393 - DNA, 15 bp, Homo sapiens
aattgaagcccagag

SEQ ID NO: 565394 - DNA, 15 bp, Homo sapiens
attgaagcccagagg

SEQ ID NO: 565395 - DNA, 15 bp, Homo sapiens
ttgaagcccagagga

SEQ ID NO: 565396 - DNA, 15 bp, Homo sapiens
tgaagcccagaggag

SEQ ID NO: 565397 - DNA, 15 bp, Homo sapiens
gaagcccagaggaga

SEQ ID NO: 565398 - DNA, 15 bp, Homo sapiens
aagcccagaggagac

SEQ ID NO: 565399 - DNA, 15 bp, Homo sapiens
agcccagaggagact

SEQ ID NO: 565400 - DNA, 15 bp, Homo sapiens
gcccagaggagactt

SEQ ID NO: 565401 - DNA, 15 bp, Homo sapiens
cccagaggagacttt

SEQ ID NO: 565402 - DNA, 15 bp, Homo sapiens
ccagaggagactttt

SEQ ID NO: 565403 - DNA, 15 bp, Homo sapiens
cagaggagacttttg

SEQ ID NO: 565404 - DNA, 15 bp, Homo sapiens
agaggagacttttga

SEQ ID NO: 565405 - DNA, 15 bp, Homo sapiens
gaggagacttttgat

SEQ ID NO: 565406 - DNA, 15 bp, Homo sapiens
aggagacttttgatt

SEQ ID NO: 565407 - DNA, 15 bp, Homo sapiens
ggagacttttgattc

SEQ ID NO: 565408 - DNA, 15 bp, Homo sapiens
gagacttttgattca

SEQ ID NO: 565409 - DNA, 15 bp, Homo sapiens
agacttttgattcat

SEQ ID NO: 565410 - DNA, 15 bp, Homo sapiens
gacttttgattcatc

SEQ ID NO: 565411 - DNA, 15 bp, Homo sapiens
acttttgattcatcc

SEQ ID NO: 565412 - DNA, 15 bp, Homo sapiens
cttttgattcatccc

SEQ ID NO: 565413 - DNA, 15 bp, Homo sapiens
ttttgattcatccca

SEQ ID NO: 565414 - DNA, 15 bp, Homo sapiens
tttgattcatcccag

SEQ ID NO: 565415 - DNA, 15 bp, Homo sapiens
ttgattcatcccagg

SEQ ID NO: 565416 - DNA, 15 bp, Homo sapiens
tgattcatcccaggt

SEQ ID NO: 565417 - DNA, 15 bp, Homo sapiens
gattcatcccaggtt

SEQ ID NO: 565418 - DNA, 15 bp, Homo sapiens
attcatcccaggttt

SEQ ID NO: 565419 - DNA, 15 bp, Homo sapiens
ttcatcccaggtttc

SEQ ID NO: 565420 - DNA, 15 bp, Homo sapiens
tcatcccaggtttca

SEQ ID NO: 565421 - DNA, 15 bp, Homo sapiens
catcccaggtttcac

SEQ ID NO: 565422 - DNA, 15 bp, Homo sapiens
atcccaggtttcaca

SEQ ID NO: 565423 - DNA, 15 bp, Homo sapiens
tcccaggtttcacaa

SEQ ID NO: 565424 - DNA, 15 bp, Homo sapiens
cccaggtttcacaac

SEQ ID NO: 565425 - DNA, 15 bp, Homo sapiens
ccaggtttcacaaca

SEQ ID NO: 565426 - DNA, 15 bp, Homo sapiens
caggtttcacaacaa

SEQ ID NO: 565427 - DNA, 15 bp, Homo sapiens
aggtttcacaacaaa

SEQ ID NO: 565428 - DNA, 15 bp, Homo sapiens
ggtttcacaacaaag

SEQ ID NO: 565429 - DNA, 15 bp, Homo sapiens
gtttcacaacaaaga

SEQ ID NO: 565430 - DNA, 15 bp, Homo sapiens
tttcacaacaaagag

SEQ ID NO: 565431 - DNA, 15 bp, Homo sapiens
ttcacaacaaagagt

SEQ ID NO: 565432 - DNA, 15 bp, Homo sapiens
tcacaacaaagagtg

SEQ ID NO: 565433 - DNA, 15 bp, Homo sapiens
cacaacaaagagtgt

SEQ ID NO: 565434 - DNA, 15 bp, Homo sapiens
acaacaaagagtgtc

SEQ ID NO: 565435 - DNA, 15 bp, Homo sapiens
caacaaagagtgtca

SEQ ID NO: 565436 - DNA, 15 bp, Homo sapiens
aacaaagagtgtcag

SEQ ID NO: 565437 - DNA, 15 bp, Homo sapiens
acaaagagtgtcagg

SEQ ID NO: 565438 - DNA, 15 bp, Homo sapiens
caaagagtgtcagga

SEQ ID NO: 565439 - DNA, 15 bp, Homo sapiens
aaagagtgtcaggaa

SEQ ID NO: 565440 - DNA, 15 bp, Homo sapiens
aagagtgtcaggaag

SEQ ID NO: 565441 - DNA, 15 bp, Homo sapiens
agagtgtcaggaaga

SEQ ID NO: 565442 - DNA, 15 bp, Homo sapiens
gagtgtcaggaagag

SEQ ID NO: 565443 - DNA, 15 bp, Homo sapiens
agtgtcaggaagaga

SEQ ID NO: 565444 - DNA, 15 bp, Homo sapiens
gtgtcaggaagagaa

SEQ ID NO: 565445 - DNA, 15 bp, Homo sapiens
tgtcaggaagagaac

SEQ ID NO: 565446 - DNA, 15 bp, Homo sapiens
gtcaggaagagaact

SEQ ID NO: 565447 - DNA, 15 bp, Homo sapiens
tcaggaagagaactt

SEQ ID NO: 565448 - DNA, 15 bp, Homo sapiens
caggaagagaacttg

SEQ ID NO: 565449 - DNA, 15 bp, Homo sapiens
aggaagagaacttga

SEQ ID NO: 565450 - DNA, 15 bp, Homo sapiens
ggaagagaacttgaa

SEQ ID NO: 565451 - DNA, 15 bp, Homo sapiens
gaagagaacttgaac

SEQ ID NO: 565452 - DNA, 15 bp, Homo sapiens
aagagaacttgaacc

SEQ ID NO: 565453 - DNA, 15 bp, Homo sapiens
agagaacttgaacca

SEQ ID NO: 565454 - DNA, 15 bp, Homo sapiens
gagaacttgaaccaa

SEQ ID NO: 565455 - DNA, 15 bp, Homo sapiens
agaacttgaaccaat

SEQ ID NO: 565456 - DNA, 15 bp, Homo sapiens
gaacttgaaccaatc

SEQ ID NO: 565457 - DNA, 15 bp, Homo sapiens
aacttgaaccaatcc

SEQ ID NO: 565458 - DNA, 15 bp, Homo sapiens
acttgaaccaatcct

SEQ ID NO: 565459 - DNA, 15 bp, Homo sapiens
cttgaaccaatcctc

SEQ ID NO: 565460 - DNA, 15 bp, Homo sapiens
ttgaaccaatcctct

SEQ ID NO: 565461 - DNA, 15 bp, Homo sapiens
tgaaccaatcctctg

SEQ ID NO: 565462 - DNA, 15 bp, Homo sapiens
gaaccaatcctctga

SEQ ID NO: 565463 - DNA, 15 bp, Homo sapiens
aaccaatcctctgac

SEQ ID NO: 565464 - DNA, 15 bp, Homo sapiens
accaatcctctgact

SEQ ID NO: 565465 - DNA, 15 bp, Homo sapiens
ccaatcctctgactt

SEQ ID NO: 565466 - DNA, 15 bp, Homo sapiens
caatcctctgacttc

SEQ ID NO: 565467 - DNA, 15 bp, Homo sapiens
aatcctctgacttca

SEQ ID NO: 565468 - DNA, 15 bp, Homo sapiens
atcctctgacttcac

SEQ ID NO: 565469 - DNA, 15 bp, Homo sapiens
tcctctgacttcaca

SEQ ID NO: 565470 - DNA, 15 bp, Homo sapiens
cctctgacttcacat

SEQ ID NO: 565471 - DNA, 15 bp, Homo sapiens
ctctgacttcacatt

SEQ ID NO: 565472 - DNA, 15 bp, Homo sapiens
tctgacttcacattc

SEQ ID NO: 565473 - DNA, 15 bp, Homo sapiens
ctgacttcacattca

SEQ ID NO: 565474 - DNA, 15 bp, Homo sapiens
tgacttcacattcag

SEQ ID NO: 565475 - DNA, 15 bp, Homo sapiens
gacttcacattcagg

SEQ ID NO: 565476 - DNA, 15 bp, Homo sapiens
acttcacattcaggg

SEQ ID NO: 565477 - DNA, 15 bp, Homo sapiens
cttcacattcagggt

SEQ ID NO: 565478 - DNA, 15 bp, Homo sapiens
ttcacattcagggtt

SEQ ID NO: 565479 - DNA, 15 bp, Homo sapiens
tcacattcagggttc

SEQ ID NO: 565480 - DNA, 15 bp, Homo sapiens
cacattcagggttct

SEQ ID NO: 565481 - DNA, 15 bp, Homo sapiens
acattcagggttctt

SEQ ID NO: 565482 - DNA, 15 bp, Homo sapiens
cattcagggttcttc

SEQ ID NO: 565483 - DNA, 15 bp, Homo sapiens
attcagggttcttcc

SEQ ID NO: 565484 - DNA, 15 bp, Homo sapiens
ttcagggttcttccc

SEQ ID NO: 565485 - DNA, 15 bp, Homo sapiens
tcagggttcttccca

SEQ ID NO: 565486 - DNA, 15 bp, Homo sapiens
cagggttcttcccat

SEQ ID NO: 565487 - DNA, 15 bp, Homo sapiens
agggttcttcccatt

SEQ ID NO: 565488 - DNA, 15 bp, Homo sapiens
gggttcttcccatta

SEQ ID NO: 565489 - DNA, 15 bp, Homo sapiens
ggttcttcccattac

SEQ ID NO: 565490 - DNA, 15 bp, Homo sapiens
gttcttcccattact

SEQ ID NO: 565491 - DNA, 15 bp, Homo sapiens
ttcttcccattactt

SEQ ID NO: 565492 - DNA, 15 bp, Homo sapiens
tcttcccattacttt

SEQ ID NO: 565493 - DNA, 15 bp, Homo sapiens
cttcccattactttg

SEQ ID NO: 565494 - DNA, 15 bp, Homo sapiens
ttcccattactttgg

SEQ ID NO: 565495 - DNA, 15 bp, Homo sapiens
tcccattactttggc

SEQ ID NO: 565496 - DNA, 15 bp, Homo sapiens
cccattactttggct

SEQ ID NO: 565497 - DNA, 15 bp, Homo sapiens
ccattactttggctc

SEQ ID NO: 565498 - DNA, 15 bp, Homo sapiens
cattactttggctcc

SEQ ID NO: 565499 - DNA, 15 bp, Homo sapiens
attactttggctccc

SEQ ID NO: 565500 - DNA, 15 bp, Homo sapiens
ttactttggctccca

SEQ ID NO: 565501 - DNA, 15 bp, Homo sapiens
tactttggctcccag

SEQ ID NO: 565502 - DNA, 15 bp, Homo sapiens
actttggctcccaga

SEQ ID NO: 565503 - DNA, 15 bp, Homo sapiens
ctttggctcccagat

SEQ ID NO: 565504 - DNA, 15 bp, Homo sapiens
tttggctcccagata

SEQ ID NO: 565505 - DNA, 15 bp, Homo sapiens
ttggctcccagataa

SEQ ID NO: 565506 - DNA, 15 bp, Homo sapiens
tggctcccagataag

SEQ ID NO: 565507 - DNA, 15 bp, Homo sapiens
ggctcccagataaga

SEQ ID NO: 565508 - DNA, 15 bp, Homo sapiens
gctcccagataagac

SEQ ID NO: 565509 - DNA, 15 bp, Homo sapiens
ctcccagataagact

SEQ ID NO: 565510 - DNA, 15 bp, Homo sapiens
tcccagataagacta

SEQ ID NO: 565511 - DNA, 15 bp, Homo sapiens
cccagataagactac

SEQ ID NO: 565512 - DNA, 15 bp, Homo sapiens
ccagataagactaca

SEQ ID NO: 565513 - DNA, 15 bp, Homo sapiens
cagataagactacaa

SEQ ID NO: 565514 - DNA, 15 bp, Homo sapiens
agataagactacaat

SEQ ID NO: 565515 - DNA, 15 bp, Homo sapiens
gataagactacaatc

SEQ ID NO: 565516 - DNA, 15 bp, Homo sapiens
ataagactacaatct

SEQ ID NO: 565517 - DNA, 15 bp, Homo sapiens
taagactacaatctt

SEQ ID NO: 565518 - DNA, 15 bp, Homo sapiens
aagactacaatcttc

SEQ ID NO: 565519 - DNA, 15 bp, Homo sapiens
agactacaatcttct

SEQ ID NO: 565520 - DNA, 15 bp, Homo sapiens
gactacaatcttctg

SEQ ID NO: 565521 - DNA, 15 bp, Homo sapiens
actacaatcttctga

SEQ ID NO: 565522 - DNA, 15 bp, Homo sapiens
ctacaatcttctgaa

SEQ ID NO: 565523 - DNA, 15 bp, Homo sapiens
tacaatcttctgaaa

SEQ ID NO: 565524 - DNA, 15 bp, Homo sapiens
acaatcttctgaaag

SEQ ID NO: 565525 - DNA, 15 bp, Homo sapiens
caatcttctgaaagt

SEQ ID NO: 565526 - DNA, 15 bp, Homo sapiens
aatcttctgaaagtc

SEQ ID NO: 565527 - DNA, 15 bp, Homo sapiens
atcttctgaaagtca

SEQ ID NO: 565528 - DNA, 15 bp, Homo sapiens
tcttctgaaagtcag

SEQ ID NO: 565529 - DNA, 15 bp, Homo sapiens
cttctgaaagtcaga

SEQ ID NO: 565530 - DNA, 15 bp, Homo sapiens
ttctgaaagtcagag

SEQ ID NO: 565531 - DNA, 15 bp, Homo sapiens
tctgaaagtcagagt

SEQ ID NO: 565532 - DNA, 15 bp, Homo sapiens
ctgaaagtcagagtg

SEQ ID NO: 565533 - DNA, 15 bp, Homo sapiens
tgaaagtcagagtgt

SEQ ID NO: 565534 - DNA, 15 bp, Homo sapiens
gaaagtcagagtgtt

SEQ ID NO: 565535 - DNA, 15 bp, Homo sapiens
aaagtcagagtgtta

SEQ ID NO: 565536 - DNA, 15 bp, Homo sapiens
aagtcagagtgttaa

SEQ ID NO: 565537 - DNA, 15 bp, Homo sapiens
agtcagagtgttaat

SEQ ID NO: 565538 - DNA, 15 bp, Homo sapiens
gtcagagtgttaata

SEQ ID NO: 565539 - DNA, 15 bp, Homo sapiens
tcagagtgttaatat

SEQ ID NO: 565540 - DNA, 15 bp, Homo sapiens
cagagtgttaatatt

SEQ ID NO: 565541 - DNA, 15 bp, Homo sapiens
agagtgttaatattc

SEQ ID NO: 565542 - DNA, 15 bp, Homo sapiens
gagtgttaatattcc

SEQ ID NO: 565543 - DNA, 15 bp, Homo sapiens
agtgttaatattcca

SEQ ID NO: 565544 - DNA, 15 bp, Homo sapiens
gtgttaatattccaa

SEQ ID NO: 565545 - DNA, 15 bp, Homo sapiens
tgttaatattccaac

SEQ ID NO: 565546 - DNA, 15 bp, Homo sapiens
gttaatattccaacc

SEQ ID NO: 565547 - DNA, 15 bp, Homo sapiens
ttaatattccaaccc

SEQ ID NO: 565548 - DNA, 15 bp, Homo sapiens
taatattccaacccc

SEQ ID NO: 565549 - DNA, 15 bp, Homo sapiens
aatattccaacccca

SEQ ID NO: 565550 - DNA, 15 bp, Homo sapiens
atattccaaccccag

SEQ ID NO: 565551 - DNA, 15 bp, Homo sapiens
tattccaaccccagg

SEQ ID NO: 565552 - DNA, 15 bp, Homo sapiens
attccaaccccaggg

SEQ ID NO: 565553 - DNA, 15 bp, Homo sapiens
ttccaaccccagggg

SEQ ID NO: 565554 - DNA, 15 bp, Homo sapiens
tccaaccccaggggg

SEQ ID NO: 565555 - DNA, 15 bp, Homo sapiens
ccaaccccagggggt

SEQ ID NO: 565556 - DNA, 15 bp, Homo sapiens
caaccccagggggtg

SEQ ID NO: 565557 - DNA, 15 bp, Homo sapiens
aaccccagggggtga

SEQ ID NO: 565558 - DNA, 15 bp, Homo sapiens
accccagggggtgag

SEQ ID NO: 565559 - DNA, 15 bp, Homo sapiens
ccccagggggtgagt

SEQ ID NO: 565560 - DNA, 15 bp, Homo sapiens
cccagggggtgagta

SEQ ID NO: 565561 - DNA, 15 bp, Homo sapiens
ccagggggtgagtac

SEQ ID NO: 565562 - DNA, 15 bp, Homo sapiens
cagggggtgagtaca

SEQ ID NO: 565563 - DNA, 15 bp, Homo sapiens
agggggtgagtacac

SEQ ID NO: 565564 - DNA, 15 bp, Homo sapiens
gggggtgagtacact

SEQ ID NO: 565565 - DNA, 15 bp, Homo sapiens
ggggtgagtacactt

SEQ ID NO: 565566 - DNA, 15 bp, Homo sapiens
gggtgagtacacttc

SEQ ID NO: 565567 - DNA, 15 bp, Homo sapiens
ggtgagtacacttcc

SEQ ID NO: 565568 - DNA, 15 bp, Homo sapiens
gtgagtacacttcca

SEQ ID NO: 565569 - DNA, 15 bp, Homo sapiens
tgagtacacttccag

SEQ ID NO: 565570 - DNA, 15 bp, Homo sapiens
gagtacacttccaga

SEQ ID NO: 565571 - DNA, 15 bp, Homo sapiens
agtacacttccagaa

SEQ ID NO: 565572 - DNA, 15 bp, Homo sapiens
gtacacttccagaat

SEQ ID NO: 565573 - DNA, 15 bp, Homo sapiens
tacacttccagaatt

SEQ ID NO: 565574 - DNA, 15 bp, Homo sapiens
acacttccagaattt

SEQ ID NO: 565575 - DNA, 15 bp, Homo sapiens
cacttccagaattta

SEQ ID NO: 565576 - DNA, 15 bp, Homo sapiens
acttccagaatttag

SEQ ID NO: 565577 - DNA, 15 bp, Homo sapiens
cttccagaatttagg

SEQ ID NO: 565578 - DNA, 15 bp, Homo sapiens
ttccagaatttaggg

SEQ ID NO: 565579 - DNA, 15 bp, Homo sapiens
tccagaatttaggga

SEQ ID NO: 565580 - DNA, 15 bp, Homo sapiens
ccagaatttagggat

SEQ ID NO: 565581 - DNA, 15 bp, Homo sapiens
cagaatttagggatg

SEQ ID NO: 565582 - DNA, 15 bp, Homo sapiens
agaatttagggatgc

SEQ ID NO: 565583 - DNA, 15 bp, Homo sapiens
gaatttagggatgct

SEQ ID NO: 565584 - DNA, 15 bp, Homo sapiens
aatttagggatgctt

SEQ ID NO: 565585 - DNA, 15 bp, Homo sapiens
atttagggatgcttt

SEQ ID NO: 565586 - DNA, 15 bp, Homo sapiens
tttagggatgcttta

SEQ ID NO: 565587 - DNA, 15 bp, Homo sapiens
ttagggatgctttaa

SEQ ID NO: 565588 - DNA, 15 bp, Homo sapiens
tagggatgctttaaa

SEQ ID NO: 565589 - DNA, 15 bp, Homo sapiens
agggatgctttaaaa

SEQ ID NO: 565590 - DNA, 15 bp, Homo sapiens
gggatgctttaaaag

SEQ ID NO: 565591 - DNA, 15 bp, Homo sapiens
ggatgctttaaaagc

SEQ ID NO: 565592 - DNA, 15 bp, Homo sapiens
gatgctttaaaagcc

SEQ ID NO: 565593 - DNA, 15 bp, Homo sapiens
atgctttaaaagcca

SEQ ID NO: 565594 - DNA, 15 bp, Homo sapiens
tgctttaaaagccat

SEQ ID NO: 565595 - DNA, 15 bp, Homo sapiens
gctttaaaagccatt

SEQ ID NO: 565596 - DNA, 15 bp, Homo sapiens
ctttaaaagccattg

SEQ ID NO: 565597 - DNA, 15 bp, Homo sapiens
tttaaaagccattgc

SEQ ID NO: 565598 - DNA, 15 bp, Homo sapiens
ttaaaagccattgct

SEQ ID NO: 565599 - DNA, 15 bp, Homo sapiens
taaaagccattgctg

SEQ ID NO: 565600 - DNA, 15 bp, Homo sapiens
aaaagccattgctga

SEQ ID NO: 565601 - DNA, 15 bp, Homo sapiens
aaagccattgctgaa

SEQ ID NO: 565602 - DNA, 15 bp, Homo sapiens
aagccattgctgaat

SEQ ID NO: 565603 - DNA, 15 bp, Homo sapiens
agccattgctgaatt

SEQ ID NO: 565604 - DNA, 15 bp, Homo sapiens
gccattgctgaattg

SEQ ID NO: 565605 - DNA, 15 bp, Homo sapiens
ccattgctgaattga

SEQ ID NO: 565606 - DNA, 15 bp, Homo sapiens
cattgctgaattgaa

SEQ ID NO: 565607 - DNA, 15 bp, Homo sapiens
attgctgaattgaat

SEQ ID NO: 565608 - DNA, 15 bp, Homo sapiens
ttgctgaattgaatt

SEQ ID NO: 565609 - DNA, 15 bp, Homo sapiens
tgctgaattgaattt

SEQ ID NO: 565610 - DNA, 15 bp, Homo sapiens
gctgaattgaatttt

SEQ ID NO: 565611 - DNA, 15 bp, Homo sapiens
ctgaattgaatttta

SEQ ID NO: 565612 - DNA, 15 bp, Homo sapiens
tgaattgaattttat

SEQ ID NO: 565613 - DNA, 15 bp, Homo sapiens
gaattgaattttatt

SEQ ID NO: 565614 - DNA, 15 bp, Homo sapiens
aattgaattttattt

SEQ ID NO: 565615 - DNA, 15 bp, Homo sapiens
attgaattttatttc

SEQ ID NO: 565616 - DNA, 15 bp, Homo sapiens
ttgaattttatttct

SEQ ID NO: 565617 - DNA, 15 bp, Homo sapiens
tgaattttatttctc

SEQ ID NO: 565618 - DNA, 15 bp, Homo sapiens
gaattttatttctcc

SEQ ID NO: 565619 - DNA, 15 bp, Homo sapiens
aattttatttctcct

SEQ ID NO: 565620 - DNA, 15 bp, Homo sapiens
attttatttctcctg

SEQ ID NO: 565621 - DNA, 15 bp, Homo sapiens
ttttatttctcctga

SEQ ID NO: 565622 - DNA, 15 bp, Homo sapiens
tttatttctcctgat

SEQ ID NO: 565623 - DNA, 15 bp, Homo sapiens
ttatttctcctgatc

SEQ ID NO: 565624 - DNA, 15 bp, Homo sapiens
tatttctcctgatca

SEQ ID NO: 565625 - DNA, 15 bp, Homo sapiens
atttctcctgatcac

SEQ ID NO: 565626 - DNA, 15 bp, Homo sapiens
tttctcctgatcact

SEQ ID NO: 565627 - DNA, 15 bp, Homo sapiens
ttctcctgatcacta

SEQ ID NO: 565628 - DNA, 15 bp, Homo sapiens
tctcctgatcactac

SEQ ID NO: 565629 - DNA, 15 bp, Homo sapiens
ctcctgatcactaca

SEQ ID NO: 565630 - DNA, 15 bp, Homo sapiens
tcctgatcactacag

SEQ ID NO: 565631 - DNA, 15 bp, Homo sapiens
cctgatcactacaga

SEQ ID NO: 565632 - DNA, 15 bp, Homo sapiens
ctgatcactacagat

SEQ ID NO: 565633 - DNA, 15 bp, Homo sapiens
tgatcactacagata

SEQ ID NO: 565634 - DNA, 15 bp, Homo sapiens
gatcactacagataa

SEQ ID NO: 565635 - DNA, 15 bp, Homo sapiens
atcactacagataat

SEQ ID NO: 565636 - DNA, 15 bp, Homo sapiens
tcactacagataatg

SEQ ID NO: 565637 - DNA, 15 bp, Homo sapiens
cactacagataatgc

SEQ ID NO: 565638 - DNA, 15 bp, Homo sapiens
actacagataatgct

SEQ ID NO: 565639 - DNA, 15 bp, Homo sapiens
ctacagataatgctc

SEQ ID NO: 565640 - DNA, 15 bp, Homo sapiens
tacagataatgctca

SEQ ID NO: 565641 - DNA, 15 bp, Homo sapiens
acagataatgctcat

SEQ ID NO: 565642 - DNA, 15 bp, Homo sapiens
cagataatgctcatg

SEQ ID NO: 565643 - DNA, 15 bp, Homo sapiens
agataatgctcatgc

SEQ ID NO: 565644 - DNA, 15 bp, Homo sapiens
gataatgctcatgca

SEQ ID NO: 565645 - DNA, 15 bp, Homo sapiens
ataatgctcatgcaa

SEQ ID NO: 565646 - DNA, 15 bp, Homo sapiens
taatgctcatgcaac

SEQ ID NO: 565647 - DNA, 15 bp, Homo sapiens
aatgctcatgcaact

SEQ ID NO: 565648 - DNA, 15 bp, Homo sapiens
atgctcatgcaactt

SEQ ID NO: 565649 - DNA, 15 bp, Homo sapiens
tgctcatgcaacttt

SEQ ID NO: 565650 - DNA, 15 bp, Homo sapiens
gctcatgcaactttt

SEQ ID NO: 565651 - DNA, 15 bp, Homo sapiens
ctcatgcaacttttc

SEQ ID NO: 565652 - DNA, 15 bp, Homo sapiens
tcatgcaacttttct

SEQ ID NO: 565653 - DNA, 15 bp, Homo sapiens
catgcaacttttctg

SEQ ID NO: 565654 - DNA, 15 bp, Homo sapiens
atgcaacttttctga

SEQ ID NO: 565655 - DNA, 15 bp, Homo sapiens
tgcaacttttctgag

SEQ ID NO: 565656 - DNA, 15 bp, Homo sapiens
gcaacttttctgaga

SEQ ID NO: 565657 - DNA, 15 bp, Homo sapiens
caacttttctgagaa

SEQ ID NO: 565658 - DNA, 15 bp, Homo sapiens
aacttttctgagaag

SEQ ID NO: 565659 - DNA, 15 bp, Homo sapiens
acttttctgagaagc

SEQ ID NO: 565660 - DNA, 15 bp, Homo sapiens
cttttctgagaagca

SEQ ID NO: 565661 - DNA, 15 bp, Homo sapiens
ttttctgagaagcag

SEQ ID NO: 565662 - DNA, 15 bp, Homo sapiens
tttctgagaagcagg

SEQ ID NO: 565663 - DNA, 15 bp, Homo sapiens
ttctgagaagcaggc

SEQ ID NO: 565664 - DNA, 15 bp, Homo sapiens
tctgagaagcaggcg

SEQ ID NO: 565665 - DNA, 15 bp, Homo sapiens
ctgagaagcaggcga

SEQ ID NO: 565666 - DNA, 15 bp, Homo sapiens
tgagaagcaggcgat

SEQ ID NO: 565667 - DNA, 15 bp, Homo sapiens
gagaagcaggcgatg

SEQ ID NO: 565668 - DNA, 15 bp, Homo sapiens
agaagcaggcgatgc

SEQ ID NO: 565669 - DNA, 15 bp, Homo sapiens
gaagcaggcgatgct

SEQ ID NO: 565670 - DNA, 15 bp, Homo sapiens
aagcaggcgatgcta

SEQ ID NO: 565671 - DNA, 15 bp, Homo sapiens
agcaggcgatgctaa

SEQ ID NO: 565672 - DNA, 15 bp, Homo sapiens
gcaggcgatgctaat

SEQ ID NO: 565673 - DNA, 15 bp, Homo sapiens
caggcgatgctaatg

SEQ ID NO: 565674 - DNA, 15 bp, Homo sapiens
aggcgatgctaatgt

SEQ ID NO: 565675 - DNA, 15 bp, Homo sapiens
ggcgatgctaatgta

SEQ ID NO: 565676 - DNA, 15 bp, Homo sapiens
gcgatgctaatgtac

SEQ ID NO: 565677 - DNA, 15 bp, Homo sapiens
cgatgctaatgtacc

SEQ ID NO: 565678 - DNA, 15 bp, Homo sapiens
gatgctaatgtaccc

SEQ ID NO: 565679 - DNA, 15 bp, Homo sapiens
atgctaatgtacccc

SEQ ID NO: 565680 - DNA, 15 bp, Homo sapiens
tgctaatgtacccct

SEQ ID NO: 565681 - DNA, 15 bp, Homo sapiens
gctaatgtaccccta

SEQ ID NO: 565682 - DNA, 15 bp, Homo sapiens
ctaatgtacccctat

SEQ ID NO: 565683 - DNA, 15 bp, Homo sapiens
taatgtacccctatt

SEQ ID NO: 565684 - DNA, 15 bp, Homo sapiens
aatgtacccctattt

SEQ ID NO: 565685 - DNA, 15 bp, Homo sapiens
atgtacccctatttg

SEQ ID NO: 565686 - DNA, 15 bp, Homo sapiens
tgtacccctatttgt

SEQ ID NO: 565687 - DNA, 15 bp, Homo sapiens
gtacccctatttgtt

SEQ ID NO: 565688 - DNA, 15 bp, Homo sapiens
tacccctatttgtta

SEQ ID NO: 565689 - DNA, 15 bp, Homo sapiens
acccctatttgttat

SEQ ID NO: 565690 - DNA, 15 bp, Homo sapiens
cccctatttgttatt

SEQ ID NO: 565691 - DNA, 15 bp, Homo sapiens
ccctatttgttattg

SEQ ID NO: 565692 - DNA, 15 bp, Homo sapiens
cctatttgttattgt

SEQ ID NO: 565693 - DNA, 15 bp, Homo sapiens
ctatttgttattgtt

SEQ ID NO: 565694 - DNA, 15 bp, Homo sapiens
tatttgttattgttc

SEQ ID NO: 565695 - DNA, 15 bp, Homo sapiens
atttgttattgttca

SEQ ID NO: 565696 - DNA, 15 bp, Homo sapiens
tttgttattgttcat

SEQ ID NO: 565697 - DNA, 15 bp, Homo sapiens
ttgttattgttcatt

SEQ ID NO: 565698 - DNA, 15 bp, Homo sapiens
tgttattgttcatta

SEQ ID NO: 565699 - DNA, 15 bp, Homo sapiens
gttattgttcattag

SEQ ID NO: 565700 - DNA, 15 bp, Homo sapiens
ttattgttcattaga

SEQ ID NO: 565701 - DNA, 15 bp, Homo sapiens
tattgttcattagac

SEQ ID NO: 565702 - DNA, 15 bp, Homo sapiens
attgttcattagacc

SEQ ID NO: 565703 - DNA, 15 bp, Homo sapiens
ttgttcattagaccc

SEQ ID NO: 565704 - DNA, 15 bp, Homo sapiens
tgttcattagaccct

SEQ ID NO: 565705 - DNA, 15 bp, Homo sapiens
gttcattagaccctt

SEQ ID NO: 565706 - DNA, 15 bp, Homo sapiens
ttcattagacccttc

SEQ ID NO: 565707 - DNA, 15 bp, Homo sapiens
tcattagacccttct

SEQ ID NO: 565708 - DNA, 15 bp, Homo sapiens
cattagacccttctt

SEQ ID NO: 565709 - DNA, 15 bp, Homo sapiens
attagacccttctta

SEQ ID NO: 565710 - DNA, 15 bp, Homo sapiens
ttagacccttcttat

SEQ ID NO: 565711 - DNA, 15 bp, Homo sapiens
tagacccttcttatg

SEQ ID NO: 565712 - DNA, 15 bp, Homo sapiens
agacccttcttatga

SEQ ID NO: 565713 - DNA, 15 bp, Homo sapiens
gacccttcttatgac

SEQ ID NO: 565714 - DNA, 15 bp, Homo sapiens
acccttcttatgact

SEQ ID NO: 565715 - DNA, 15 bp, Homo sapiens
cccttcttatgactc

SEQ ID NO: 565716 - DNA, 15 bp, Homo sapiens
ccttcttatgactca

SEQ ID NO: 565717 - DNA, 15 bp, Homo sapiens
cttcttatgactcag

SEQ ID NO: 565718 - DNA, 15 bp, Homo sapiens
ttcttatgactcagt

SEQ ID NO: 565719 - DNA, 15 bp, Homo sapiens
tcttatgactcagtc

SEQ ID NO: 565720 - DNA, 15 bp, Homo sapiens
cttatgactcagtca

SEQ ID NO: 565721 - DNA, 15 bp, Homo sapiens
ttatgactcagtcag

SEQ ID NO: 565722 - DNA, 15 bp, Homo sapiens
tatgactcagtcaga

SEQ ID NO: 565723 - DNA, 15 bp, Homo sapiens
atgactcagtcagaa

SEQ ID NO: 565724 - DNA, 15 bp, Homo sapiens
tgactcagtcagaag

SEQ ID NO: 565725 - DNA, 15 bp, Homo sapiens
gactcagtcagaaga

SEQ ID NO: 565726 - DNA, 15 bp, Homo sapiens
actcagtcagaagag

SEQ ID NO: 565727 - DNA, 15 bp, Homo sapiens
ctcagtcagaagagg

SEQ ID NO: 565728 - DNA, 15 bp, Homo sapiens
tcagtcagaagagga

SEQ ID NO: 565729 - DNA, 15 bp, Homo sapiens
cagtcagaagaggag

SEQ ID NO: 565730 - DNA, 15 bp, Homo sapiens
agtcagaagaggagc

SEQ ID NO: 565731 - DNA, 15 bp, Homo sapiens
gtcagaagaggagct

SEQ ID NO: 565732 - DNA, 15 bp, Homo sapiens
tcagaagaggagctt

SEQ ID NO: 565733 - DNA, 15 bp, Homo sapiens
cagaagaggagcttg

SEQ ID NO: 565734 - DNA, 15 bp, Homo sapiens
agaagaggagcttgg

SEQ ID NO: 565735 - DNA, 15 bp, Homo sapiens
gaagaggagcttggg

SEQ ID NO: 565736 - DNA, 15 bp, Homo sapiens
aagaggagcttgggg

SEQ ID NO: 565737 - DNA, 15 bp, Homo sapiens
agaggagcttggggc

SEQ ID NO: 565738 - DNA, 15 bp, Homo sapiens
gaggagcttggggca

SEQ ID NO: 565739 - DNA, 15 bp, Homo sapiens
aggagcttggggcaa

SEQ ID NO: 565740 - DNA, 15 bp, Homo sapiens
ggagcttggggcaat

SEQ ID NO: 565741 - DNA, 15 bp, Homo sapiens
gagcttggggcaata

SEQ ID NO: 565742 - DNA, 15 bp, Homo sapiens
agcttggggcaataa

SEQ ID NO: 565743 - DNA, 15 bp, Homo sapiens
gcttggggcaataac

SEQ ID NO: 565744 - DNA, 15 bp, Homo sapiens
cttggggcaataaca

SEQ ID NO: 565745 - DNA, 15 bp, Homo sapiens
ttggggcaataacat

SEQ ID NO: 565746 - DNA, 15 bp, Homo sapiens
tggggcaataacatg

SEQ ID NO: 565747 - DNA, 15 bp, Homo sapiens
ggggcaataacatga

SEQ ID NO: 565748 - DNA, 15 bp, Homo sapiens
gggcaataacatgaa

SEQ ID NO: 565749 - DNA, 15 bp, Homo sapiens
ggcaataacatgaat

SEQ ID NO: 565750 - DNA, 15 bp, Homo sapiens
gcaataacatgaatt

SEQ ID NO: 565751 - DNA, 15 bp, Homo sapiens
caataacatgaattc

SEQ ID NO: 565752 - DNA, 15 bp, Homo sapiens
aataacatgaattct

SEQ ID NO: 565753 - DNA, 15 bp, Homo sapiens
ataacatgaattctg

SEQ ID NO: 565754 - DNA, 15 bp, Homo sapiens
taacatgaattctgg

SEQ ID NO: 565755 - DNA, 15 bp, Homo sapiens
aacatgaattctggc

SEQ ID NO: 565756 - DNA, 15 bp, Homo sapiens
acatgaattctggcc

SEQ ID NO: 565757 - DNA, 15 bp, Homo sapiens
catgaattctggcct

SEQ ID NO: 565758 - DNA, 15 bp, Homo sapiens
atgaattctggcctc

SEQ ID NO: 565759 - DNA, 15 bp, Homo sapiens
tgaattctggcctca

SEQ ID NO: 565760 - DNA, 15 bp, Homo sapiens
gaattctggcctcaa

SEQ ID NO: 565761 - DNA, 15 bp, Homo sapiens
aattctggcctcaac

SEQ ID NO: 565762 - DNA, 15 bp, Homo sapiens
attctggcctcaaca

SEQ ID NO: 565763 - DNA, 15 bp, Homo sapiens
ttctggcctcaacaa

SEQ ID NO: 565764 - DNA, 15 bp, Homo sapiens
tctggcctcaacaaa

SEQ ID NO: 565765 - DNA, 15 bp, Homo sapiens
ctggcctcaacaaaa

SEQ ID NO: 565766 - DNA, 15 bp, Homo sapiens
tggcctcaacaaaag

SEQ ID NO: 565767 - DNA, 15 bp, Homo sapiens
ggcctcaacaaaagt

SEQ ID NO: 565768 - DNA, 15 bp, Homo sapiens
gcctcaacaaaagta

SEQ ID NO: 565769 - DNA, 15 bp, Homo sapiens
cctcaacaaaagtaa

SEQ ID NO: 565770 - DNA, 15 bp, Homo sapiens
ctcaacaaaagtaag

SEQ ID NO: 565771 - DNA, 15 bp, Homo sapiens
tcaacaaaagtaagt

SEQ ID NO: 565772 - DNA, 15 bp, Homo sapiens
caacaaaagtaagta

SEQ ID NO: 565773 - DNA, 15 bp, Homo sapiens
aacaaaagtaagtaa

SEQ ID NO: 565774 - DNA, 15 bp, Homo sapiens
acaaaagtaagtaaa

SEQ ID NO: 565775 - DNA, 15 bp, Homo sapiens
caaaagtaagtaaat

SEQ ID NO: 565776 - DNA, 15 bp, Homo sapiens
aaaagtaagtaaatg

SEQ ID NO: 565777 - DNA, 15 bp, Homo sapiens
aaagtaagtaaatgt

SEQ ID NO: 565778 - DNA, 15 bp, Homo sapiens
aagtaagtaaatgtt

SEQ ID NO: 565779 - DNA, 15 bp, Homo sapiens
agtaagtaaatgttt

SEQ ID NO: 565780 - DNA, 15 bp, Homo sapiens
gtaagtaaatgtttt

SEQ ID NO: 565781 - DNA, 15 bp, Homo sapiens
taagtaaatgtttta

SEQ ID NO: 565782 - DNA, 15 bp, Homo sapiens
aagtaaatgttttat

SEQ ID NO: 565783 - DNA, 15 bp, Homo sapiens
agtaaatgttttata

SEQ ID NO: 565784 - DNA, 15 bp, Homo sapiens
gtaaatgttttatag

SEQ ID NO: 565785 - DNA, 15 bp, Homo sapiens
taaatgttttatagt

SEQ ID NO: 565786 - DNA, 15 bp, Homo sapiens
aaatgttttatagtt

SEQ ID NO: 565787 - DNA, 15 bp, Homo sapiens
aatgttttatagttc

SEQ ID NO: 565788 - DNA, 15 bp, Homo sapiens
atgttttatagttct

SEQ ID NO: 565789 - DNA, 15 bp, Homo sapiens
tgttttatagttctt

SEQ ID NO: 565790 - DNA, 15 bp, Homo sapiens
gttttatagttcttt

SEQ ID NO: 565791 - DNA, 15 bp, Homo sapiens
ttttatagttctttg

SEQ ID NO: 565792 - DNA, 15 bp, Homo sapiens
tttatagttctttgg

SEQ ID NO: 565793 - DNA, 15 bp, Homo sapiens
ttatagttctttgga

SEQ ID NO: 565794 - DNA, 15 bp, Homo sapiens
tatagttctttggag

SEQ ID NO: 565795 - DNA, 15 bp, Homo sapiens
atagttctttggagg

SEQ ID NO: 565796 - DNA, 15 bp, Homo sapiens
tagttctttggagga

SEQ ID NO: 565797 - DNA, 15 bp, Homo sapiens
agttctttggaggaa

SEQ ID NO: 565798 - DNA, 15 bp, Homo sapiens
gttctttggaggaaa

SEQ ID NO: 565799 - DNA, 15 bp, Homo sapiens
ttctttggaggaaag

SEQ ID NO: 565800 - DNA, 15 bp, Homo sapiens
tctttggaggaaagc

SEQ ID NO: 565801 - DNA, 15 bp, Homo sapiens
ctttggaggaaagca

SEQ ID NO: 565802 - DNA, 15 bp, Homo sapiens
tttggaggaaagcat

SEQ ID NO: 565803 - DNA, 15 bp, Homo sapiens
ttggaggaaagcatg

SEQ ID NO: 565804 - DNA, 15 bp, Homo sapiens
tggaggaaagcatgt

SEQ ID NO: 565805 - DNA, 15 bp, Homo sapiens
ggaggaaagcatgtt

SEQ ID NO: 565806 - DNA, 15 bp, Homo sapiens
gaggaaagcatgttt

SEQ ID NO: 565807 - DNA, 15 bp, Homo sapiens
aggaaagcatgtttc

SEQ ID NO: 565808 - DNA, 15 bp, Homo sapiens
ggaaagcatgtttct

SEQ ID NO: 565809 - DNA, 15 bp, Homo sapiens
gaaagcatgtttctg

SEQ ID NO: 565810 - DNA, 15 bp, Homo sapiens
aaagcatgtttctga

SEQ ID NO: 565811 - DNA, 15 bp, Homo sapiens
aagcatgtttctgag

SEQ ID NO: 565812 - DNA, 15 bp, Homo sapiens
agcatgtttctgagg

SEQ ID NO: 565813 - DNA, 15 bp, Homo sapiens
gcatgtttctgagga

SEQ ID NO: 565814 - DNA, 15 bp, Homo sapiens
catgtttctgaggac

SEQ ID NO: 565815 - DNA, 15 bp, Homo sapiens
atgtttctgaggaca

SEQ ID NO: 565816 - DNA, 15 bp, Homo sapiens
tgtttctgaggacag

SEQ ID NO: 565817 - DNA, 15 bp, Homo sapiens
gtttctgaggacagg

SEQ ID NO: 565818 - DNA, 15 bp, Homo sapiens
tttctgaggacagga

SEQ ID NO: 565819 - DNA, 15 bp, Homo sapiens
ttctgaggacaggat

SEQ ID NO: 565820 - DNA, 15 bp, Homo sapiens
tctgaggacaggatt

SEQ ID NO: 565821 - DNA, 15 bp, Homo sapiens
ctgaggacaggattg

SEQ ID NO: 565822 - DNA, 15 bp, Homo sapiens
tgaggacaggattgg

SEQ ID NO: 565823 - DNA, 15 bp, Homo sapiens
gaggacaggattgga

SEQ ID NO: 565824 - DNA, 15 bp, Homo sapiens
aggacaggattggag

SEQ ID NO: 565825 - DNA, 15 bp, Homo sapiens
ggacaggattggaga

SEQ ID NO: 565826 - DNA, 15 bp, Homo sapiens
gacaggattggagaa

SEQ ID NO: 565827 - DNA, 15 bp, Homo sapiens
acaggattggagaac

SEQ ID NO: 565828 - DNA, 15 bp, Homo sapiens
caggattggagaaca

SEQ ID NO: 565829 - DNA, 15 bp, Homo sapiens
aggattggagaacag

SEQ ID NO: 565830 - DNA, 15 bp, Homo sapiens
ggattggagaacagg

SEQ ID NO: 565831 - DNA, 15 bp, Homo sapiens
gattggagaacagga

SEQ ID NO: 565832 - DNA, 15 bp, Homo sapiens
attggagaacaggat

SEQ ID NO: 565833 - DNA, 15 bp, Homo sapiens
ttggagaacaggatc

SEQ ID NO: 565834 - DNA, 15 bp, Homo sapiens
tggagaacaggatca

SEQ ID NO: 565835 - DNA, 15 bp, Homo sapiens
ggagaacaggatcat

SEQ ID NO: 565836 - DNA, 15 bp, Homo sapiens
gagaacaggatcatg

SEQ ID NO: 565837 - DNA, 15 bp, Homo sapiens
agaacaggatcatga

SEQ ID NO: 565838 - DNA, 15 bp, Homo sapiens
gaacaggatcatgag

SEQ ID NO: 565839 - DNA, 15 bp, Homo sapiens
aacaggatcatgaga

SEQ ID NO: 565840 - DNA, 15 bp, Homo sapiens
acaggatcatgagac

SEQ ID NO: 565841 - DNA, 15 bp, Homo sapiens
caggatcatgagaca

SEQ ID NO: 565842 - DNA, 15 bp, Homo sapiens
aggatcatgagacac

SEQ ID NO: 565843 - DNA, 15 bp, Homo sapiens
ggatcatgagacaca

SEQ ID NO: 565844 - DNA, 15 bp, Homo sapiens
gatcatgagacacag

SEQ ID NO: 565845 - DNA, 15 bp, Homo sapiens
atcatgagacacagg

SEQ ID NO: 565846 - DNA, 15 bp, Homo sapiens
tcatgagacacagga

SEQ ID NO: 565847 - DNA, 15 bp, Homo sapiens
catgagacacaggag

SEQ ID NO: 565848 - DNA, 15 bp, Homo sapiens
atgagacacaggaga

SEQ ID NO: 565849 - DNA, 15 bp, Homo sapiens
tgagacacaggagag

SEQ ID NO: 565850 - DNA, 15 bp, Homo sapiens
gagacacaggagagc

SEQ ID NO: 565851 - DNA, 15 bp, Homo sapiens
agacacaggagagca

SEQ ID NO: 565852 - DNA, 15 bp, Homo sapiens
gacacaggagagcag

SEQ ID NO: 565853 - DNA, 15 bp, Homo sapiens
acacaggagagcagc

SEQ ID NO: 565854 - DNA, 15 bp, Homo sapiens
cacaggagagcagca

SEQ ID NO: 565855 - DNA, 15 bp, Homo sapiens
acaggagagcagcaa

SEQ ID NO: 565856 - DNA, 15 bp, Homo sapiens
caggagagcagcaag

SEQ ID NO: 565857 - DNA, 15 bp, Homo sapiens
aggagagcagcaagc

SEQ ID NO: 565858 - DNA, 15 bp, Homo sapiens
ggagagcagcaagca

SEQ ID NO: 565859 - DNA, 15 bp, Homo sapiens
gagagcagcaagcat

SEQ ID NO: 565860 - DNA, 15 bp, Homo sapiens
agagcagcaagcatt

SEQ ID NO: 565861 - DNA, 15 bp, Homo sapiens
gagcagcaagcattt

SEQ ID NO: 565862 - DNA, 15 bp, Homo sapiens
agcagcaagcatttg

SEQ ID NO: 565863 - DNA, 15 bp, Homo sapiens
gcagcaagcatttgt

SEQ ID NO: 565864 - DNA, 15 bp, Homo sapiens
cagcaagcatttgtt

SEQ ID NO: 565865 - DNA, 15 bp, Homo sapiens
agcaagcatttgttt

SEQ ID NO: 565866 - DNA, 15 bp, Homo sapiens
gcaagcatttgtttc

SEQ ID NO: 565867 - DNA, 15 bp, Homo sapiens
caagcatttgtttcc

SEQ ID NO: 565868 - DNA, 15 bp, Homo sapiens
aagcatttgtttccc

SEQ ID NO: 565869 - DNA, 15 bp, Homo sapiens
agcatttgtttccct

SEQ ID NO: 565870 - DNA, 15 bp, Homo sapiens
gcatttgtttccctg

SEQ ID NO: 565871 - DNA, 15 bp, Homo sapiens
catttgtttccctgc

SEQ ID NO: 565872 - DNA, 15 bp, Homo sapiens
atttgtttccctgct

SEQ ID NO: 565873 - DNA, 15 bp, Homo sapiens
tttgtttccctgctt

SEQ ID NO: 565874 - DNA, 15 bp, Homo sapiens
ttgtttccctgcttt

SEQ ID NO: 565875 - DNA, 15 bp, Homo sapiens
tgtttccctgctttt

SEQ ID NO: 565876 - DNA, 15 bp, Homo sapiens
gtttccctgcttttt

SEQ ID NO: 565877 - DNA, 15 bp, Homo sapiens
tttccctgctttttg

SEQ ID NO: 565878 - DNA, 15 bp, Homo sapiens
ttccctgctttttga

SEQ ID NO: 565879 - DNA, 15 bp, Homo sapiens
tccctgctttttgag

SEQ ID NO: 565880 - DNA, 15 bp, Homo sapiens
ccctgctttttgagt

SEQ ID NO: 565881 - DNA, 15 bp, Homo sapiens
cctgctttttgagta

SEQ ID NO: 565882 - DNA, 15 bp, Homo sapiens
ctgctttttgagtag

SEQ ID NO: 565883 - DNA, 15 bp, Homo sapiens
tgctttttgagtaga

SEQ ID NO: 565884 - DNA, 15 bp, Homo sapiens
gctttttgagtagac

SEQ ID NO: 565885 - DNA, 15 bp, Homo sapiens
ctttttgagtagaca

SEQ ID NO: 565886 - DNA, 15 bp, Homo sapiens
tttttgagtagacat

SEQ ID NO: 565887 - DNA, 15 bp, Homo sapiens
ttttgagtagacatc

SEQ ID NO: 565888 - DNA, 15 bp, Homo sapiens
tttgagtagacatca

SEQ ID NO: 565889 - DNA, 15 bp, Homo sapiens
ttgagtagacatcaa

SEQ ID NO: 565890 - DNA, 15 bp, Homo sapiens
tgagtagacatcaaa

SEQ ID NO: 565891 - DNA, 15 bp, Homo sapiens
gagtagacatcaaaa

SEQ ID NO: 565892 - DNA, 15 bp, Homo sapiens
agtagacatcaaaat

SEQ ID NO: 565893 - DNA, 15 bp, Homo sapiens
gtagacatcaaaatt

SEQ ID NO: 565894 - DNA, 15 bp, Homo sapiens
tagacatcaaaatta

SEQ ID NO: 565895 - DNA, 15 bp, Homo sapiens
agacatcaaaattat

SEQ ID NO: 565896 - DNA, 15 bp, Homo sapiens
gacatcaaaattatt

SEQ ID NO: 565897 - DNA, 15 bp, Homo sapiens
acatcaaaattattt

SEQ ID NO: 565898 - DNA, 15 bp, Homo sapiens
catcaaaattatttg

SEQ ID NO: 565899 - DNA, 15 bp, Homo sapiens
atcaaaattatttgc

SEQ ID NO: 565900 - DNA, 15 bp, Homo sapiens
tcaaaattatttgcc

SEQ ID NO: 565901 - DNA, 15 bp, Homo sapiens
caaaattatttgcca

SEQ ID NO: 565902 - DNA, 15 bp, Homo sapiens
aaaattatttgccaa

SEQ ID NO: 565903 - DNA, 15 bp, Homo sapiens
aaattatttgccaat

SEQ ID NO: 565904 - DNA, 15 bp, Homo sapiens
aattatttgccaatt

SEQ ID NO: 565905 - DNA, 15 bp, Homo sapiens
attatttgccaattt

SEQ ID NO: 565906 - DNA, 15 bp, Homo sapiens
ttatttgccaattta

SEQ ID NO: 565907 - DNA, 15 bp, Homo sapiens
tatttgccaatttag

SEQ ID NO: 565908 - DNA, 15 bp, Homo sapiens
atttgccaatttagg

SEQ ID NO: 565909 - DNA, 15 bp, Homo sapiens
tttgccaatttaggg

SEQ ID NO: 565910 - DNA, 15 bp, Homo sapiens
ttgccaatttagggc

SEQ ID NO: 565911 - DNA, 15 bp, Homo sapiens
tgccaatttagggcc

SEQ ID NO: 565912 - DNA, 15 bp, Homo sapiens
gccaatttagggcct

SEQ ID NO: 565913 - DNA, 15 bp, Homo sapiens
ccaatttagggcctt

SEQ ID NO: 565914 - DNA, 15 bp, Homo sapiens
caatttagggccttt

SEQ ID NO: 565915 - DNA, 15 bp, Homo sapiens
aatttagggcctttc

SEQ ID NO: 565916 - DNA, 15 bp, Homo sapiens
atttagggcctttcc

SEQ ID NO: 565917 - DNA, 15 bp, Homo sapiens
tttagggcctttcca

SEQ ID NO: 565918 - DNA, 15 bp, Homo sapiens
ttagggcctttccat

SEQ ID NO: 565919 - DNA, 15 bp, Homo sapiens
tagggcctttccatg

SEQ ID NO: 565920 - DNA, 15 bp, Homo sapiens
agggcctttccatga

SEQ ID NO: 565921 - DNA, 15 bp, Homo sapiens
gggcctttccatgat

SEQ ID NO: 565922 - DNA, 15 bp, Homo sapiens
ggcctttccatgata

SEQ ID NO: 565923 - DNA, 15 bp, Homo sapiens
gcctttccatgatac

SEQ ID NO: 565924 - DNA, 15 bp, Homo sapiens
cctttccatgatacc

SEQ ID NO: 565925 - DNA, 15 bp, Homo sapiens
ctttccatgatacca

SEQ ID NO: 565926 - DNA, 15 bp, Homo sapiens
tttccatgataccag

SEQ ID NO: 565927 - DNA, 15 bp, Homo sapiens
ttccatgataccagt

SEQ ID NO: 565928 - DNA, 15 bp, Homo sapiens
tccatgataccagtc

SEQ ID NO: 565929 - DNA, 15 bp, Homo sapiens
ccatgataccagtcc

SEQ ID NO: 565930 - DNA, 15 bp, Homo sapiens
catgataccagtcct

SEQ ID NO: 565931 - DNA, 15 bp, Homo sapiens
atgataccagtcctt

SEQ ID NO: 565932 - DNA, 15 bp, Homo sapiens
tgataccagtccttg

SEQ ID NO: 565933 - DNA, 15 bp, Homo sapiens
gataccagtccttga

SEQ ID NO: 565934 - DNA, 15 bp, Homo sapiens
ataccagtccttgaa

SEQ ID NO: 565935 - DNA, 15 bp, Homo sapiens
taccagtccttgaaa

SEQ ID NO: 565936 - DNA, 15 bp, Homo sapiens
accagtccttgaaag

SEQ ID NO: 565937 - DNA, 15 bp, Homo sapiens
ccagtccttgaaaga

SEQ ID NO: 565938 - DNA, 15 bp, Homo sapiens
cagtccttgaaagat

SEQ ID NO: 565939 - DNA, 15 bp, Homo sapiens
agtccttgaaagatg

SEQ ID NO: 565940 - DNA, 15 bp, Homo sapiens
gtccttgaaagatga

SEQ ID NO: 565941 - DNA, 15 bp, Homo sapiens
tccttgaaagatgat

SEQ ID NO: 565942 - DNA, 15 bp, Homo sapiens
ccttgaaagatgata

SEQ ID NO: 565943 - DNA, 15 bp, Homo sapiens
cttgaaagatgatat

SEQ ID NO: 565944 - DNA, 15 bp, Homo sapiens
ttgaaagatgatatg

SEQ ID NO: 565945 - DNA, 15 bp, Homo sapiens
tgaaagatgatatgg

SEQ ID NO: 565946 - DNA, 15 bp, Homo sapiens
gaaagatgatatggg

SEQ ID NO: 565947 - DNA, 15 bp, Homo sapiens
aaagatgatatggga

SEQ ID NO: 565948 - DNA, 15 bp, Homo sapiens
aagatgatatgggat

SEQ ID NO: 565949 - DNA, 15 bp, Homo sapiens
agatgatatgggatt

SEQ ID NO: 565950 - DNA, 15 bp, Homo sapiens
gatgatatgggattt

SEQ ID NO: 565951 - DNA, 15 bp, Homo sapiens
atgatatgggatttt

SEQ ID NO: 565952 - DNA, 15 bp, Homo sapiens
tgatatgggattttc

SEQ ID NO: 565953 - DNA, 15 bp, Homo sapiens
gatatgggattttcg

SEQ ID NO: 565954 - DNA, 15 bp, Homo sapiens
atatgggattttcgt

SEQ ID NO: 565955 - DNA, 15 bp, Homo sapiens
tatgggattttcgtt

SEQ ID NO: 565956 - DNA, 15 bp, Homo sapiens
atgggattttcgttt

SEQ ID NO: 565957 - DNA, 15 bp, Homo sapiens
tgggattttcgttta

SEQ ID NO: 565958 - DNA, 15 bp, Homo sapiens
gggattttcgtttag

SEQ ID NO: 565959 - DNA, 15 bp, Homo sapiens
ggattttcgtttaga

SEQ ID NO: 565960 - DNA, 15 bp, Homo sapiens
gattttcgtttagat

SEQ ID NO: 565961 - DNA, 15 bp, Homo sapiens
attttcgtttagatt

SEQ ID NO: 565962 - DNA, 15 bp, Homo sapiens
ttttcgtttagattt

SEQ ID NO: 565963 - DNA, 15 bp, Homo sapiens
tttcgtttagatttt

SEQ ID NO: 565964 - DNA, 15 bp, Homo sapiens
ttcgtttagattttt

SEQ ID NO: 565965 - DNA, 15 bp, Homo sapiens
tcgtttagatttttg

SEQ ID NO: 565966 - DNA, 15 bp, Homo sapiens
cgtttagatttttga

SEQ ID NO: 565967 - DNA, 15 bp, Homo sapiens
gtttagatttttgag

SEQ ID NO: 565968 - DNA, 15 bp, Homo sapiens
tttagatttttgagt

SEQ ID NO: 565969 - DNA, 15 bp, Homo sapiens
ttagatttttgagtt

SEQ ID NO: 565970 - DNA, 15 bp, Homo sapiens
tagatttttgagttt

SEQ ID NO: 565971 - DNA, 15 bp, Homo sapiens
agatttttgagtttt

SEQ ID NO: 565972 - DNA, 15 bp, Homo sapiens
gatttttgagttttg

SEQ ID NO: 565973 - DNA, 15 bp, Homo sapiens
atttttgagttttgt

SEQ ID NO: 565974 - DNA, 15 bp, Homo sapiens
tttttgagttttgtt

SEQ ID NO: 565975 - DNA, 15 bp, Homo sapiens
ttttgagttttgttt

SEQ ID NO: 565976 - DNA, 15 bp, Homo sapiens
tttgagttttgtttt

SEQ ID NO: 565977 - DNA, 15 bp, Homo sapiens
ttgagttttgtttta

SEQ ID NO: 565978 - DNA, 15 bp, Homo sapiens
tgagttttgttttat

SEQ ID NO: 565979 - DNA, 15 bp, Homo sapiens
gagttttgttttatt

SEQ ID NO: 565980 - DNA, 15 bp, Homo sapiens
agttttgttttattg

SEQ ID NO: 565981 - DNA, 15 bp, Homo sapiens
gttttgttttattgc

SEQ ID NO: 565982 - DNA, 15 bp, Homo sapiens
ttttgttttattgcg

SEQ ID NO: 565983 - DNA, 15 bp, Homo sapiens
tttgttttattgcgc

SEQ ID NO: 565984 - DNA, 15 bp, Homo sapiens
ttgttttattgcgct

SEQ ID NO: 565985 - DNA, 15 bp, Homo sapiens
tgttttattgcgctc

SEQ ID NO: 565986 - DNA, 15 bp, Homo sapiens
gttttattgcgctcg

SEQ ID NO: 565987 - DNA, 15 bp, Homo sapiens
ttttattgcgctcgg

SEQ ID NO: 565988 - DNA, 15 bp, Homo sapiens
tttattgcgctcggt

SEQ ID NO: 565989 - DNA, 15 bp, Homo sapiens
ttattgcgctcggtt

SEQ ID NO: 565990 - DNA, 15 bp, Homo sapiens
tattgcgctcggttt

SEQ ID NO: 565991 - DNA, 15 bp, Homo sapiens
attgcgctcggtttt

SEQ ID NO: 565992 - DNA, 15 bp, Homo sapiens
ttgcgctcggtttta

SEQ ID NO: 565993 - DNA, 15 bp, Homo sapiens
tgcgctcggttttag

SEQ ID NO: 565994 - DNA, 15 bp, Homo sapiens
gcgctcggttttaga

SEQ ID NO: 565995 - DNA, 15 bp, Homo sapiens
cgctcggttttagaa

SEQ ID NO: 565996 - DNA, 15 bp, Homo sapiens
gctcggttttagaac

SEQ ID NO: 565997 - DNA, 15 bp, Homo sapiens
ctcggttttagaaca

SEQ ID NO: 565998 - DNA, 15 bp, Homo sapiens
tcggttttagaacat

SEQ ID NO: 565999 - DNA, 15 bp, Homo sapiens
cggttttagaacatg

SEQ ID NO: 566000 - DNA, 15 bp, Homo sapiens
ggttttagaacatgg

SEQ ID NO: 566001 - DNA, 15 bp, Homo sapiens
gttttagaacatggg

SEQ ID NO: 566002 - DNA, 15 bp, Homo sapiens
ttttagaacatggga

SEQ ID NO: 566003 - DNA, 15 bp, Homo sapiens
tttagaacatgggaa

SEQ ID NO: 566004 - DNA, 15 bp, Homo sapiens
ttagaacatgggaaa

SEQ ID NO: 566005 - DNA, 15 bp, Homo sapiens
tagaacatgggaaat

SEQ ID NO: 566006 - DNA, 15 bp, Homo sapiens
agaacatgggaaatt

SEQ ID NO: 566007 - DNA, 15 bp, Homo sapiens
gaacatgggaaattt

SEQ ID NO: 566008 - DNA, 15 bp, Homo sapiens
aacatgggaaatttg

SEQ ID NO: 566009 - DNA, 15 bp, Homo sapiens
acatgggaaatttga

SEQ ID NO: 566010 - DNA, 15 bp, Homo sapiens
catgggaaatttgaa

SEQ ID NO: 566011 - DNA, 15 bp, Homo sapiens
atgggaaatttgaag

SEQ ID NO: 566012 - DNA, 15 bp, Homo sapiens
tgggaaatttgaagg

SEQ ID NO: 566013 - DNA, 15 bp, Homo sapiens
gggaaatttgaaggt

SEQ ID NO: 566014 - DNA, 15 bp, Homo sapiens
ggaaatttgaaggtt

SEQ ID NO: 566015 - DNA, 15 bp, Homo sapiens
gaaatttgaaggttt

SEQ ID NO: 566016 - DNA, 15 bp, Homo sapiens
aaatttgaaggtttt

SEQ ID NO: 566017 - DNA, 15 bp, Homo sapiens
aatttgaaggttttc

SEQ ID NO: 566018 - DNA, 15 bp, Homo sapiens
atttgaaggttttct

SEQ ID NO: 566019 - DNA, 15 bp, Homo sapiens
tttgaaggttttctt

SEQ ID NO: 566020 - DNA, 15 bp, Homo sapiens
ttgaaggttttcttg

SEQ ID NO: 566021 - DNA, 15 bp, Homo sapiens
tgaaggttttcttga

SEQ ID NO: 566022 - DNA, 15 bp, Homo sapiens
gaaggttttcttgag

SEQ ID NO: 566023 - DNA, 15 bp, Homo sapiens
aaggttttcttgaga

SEQ ID NO: 566024 - DNA, 15 bp, Homo sapiens
aggttttcttgagac

SEQ ID NO: 566025 - DNA, 15 bp, Homo sapiens
ggttttcttgagaca

SEQ ID NO: 566026 - DNA, 15 bp, Homo sapiens
gttttcttgagacaa

SEQ ID NO: 566027 - DNA, 15 bp, Homo sapiens
ttttcttgagacaag

SEQ ID NO: 566028 - DNA, 15 bp, Homo sapiens
tttcttgagacaagg

SEQ ID NO: 566029 - DNA, 15 bp, Homo sapiens
ttcttgagacaaggt

SEQ ID NO: 566030 - DNA, 15 bp, Homo sapiens
tcttgagacaaggtt

SEQ ID NO: 566031 - DNA, 15 bp, Homo sapiens
cttgagacaaggttc

SEQ ID NO: 566032 - DNA, 15 bp, Homo sapiens
ttgagacaaggttct

SEQ ID NO: 566033 - DNA, 15 bp, Homo sapiens
tgagacaaggttctg

SEQ ID NO: 566034 - DNA, 15 bp, Homo sapiens
gagacaaggttctgt

SEQ ID NO: 566035 - DNA, 15 bp, Homo sapiens
agacaaggttctgta

SEQ ID NO: 566036 - DNA, 15 bp, Homo sapiens
gacaaggttctgtac

SEQ ID NO: 566037 - DNA, 15 bp, Homo sapiens
acaaggttctgtacc

SEQ ID NO: 566038 - DNA, 15 bp, Homo sapiens
caaggttctgtacca

SEQ ID NO: 566039 - DNA, 15 bp, Homo sapiens
aaggttctgtaccaa

SEQ ID NO: 566040 - DNA, 15 bp, Homo sapiens
aggttctgtaccaat

SEQ ID NO: 566041 - DNA, 15 bp, Homo sapiens
ggttctgtaccaatg

SEQ ID NO: 566042 - DNA, 15 bp, Homo sapiens
gttctgtaccaatga

SEQ ID NO: 566043 - DNA, 15 bp, Homo sapiens
ttctgtaccaatgaa

SEQ ID NO: 566044 - DNA, 15 bp, Homo sapiens
tctgtaccaatgaat

SEQ ID NO: 566045 - DNA, 15 bp, Homo sapiens
ctgtaccaatgaatg

SEQ ID NO: 566046 - DNA, 15 bp, Homo sapiens
tgtaccaatgaatgg

SEQ ID NO: 566047 - DNA, 15 bp, Homo sapiens
gtaccaatgaatggt

SEQ ID NO: 566048 - DNA, 15 bp, Homo sapiens
taccaatgaatggtc

SEQ ID NO: 566049 - DNA, 15 bp, Homo sapiens
accaatgaatggtca

SEQ ID NO: 566050 - DNA, 15 bp, Homo sapiens
ccaatgaatggtcac

SEQ ID NO: 566051 - DNA, 15 bp, Homo sapiens
caatgaatggtcact

SEQ ID NO: 566052 - DNA, 15 bp, Homo sapiens
aatgaatggtcactg

SEQ ID NO: 566053 - DNA, 15 bp, Homo sapiens
atgaatggtcactgt

SEQ ID NO: 566054 - DNA, 15 bp, Homo sapiens
tgaatggtcactgtc

SEQ ID NO: 566055 - DNA, 15 bp, Homo sapiens
gaatggtcactgtca

SEQ ID NO: 566056 - DNA, 15 bp, Homo sapiens
aatggtcactgtcac

SEQ ID NO: 566057 - DNA, 15 bp, Homo sapiens
atggtcactgtcact

SEQ ID NO: 566058 - DNA, 15 bp, Homo sapiens
tggtcactgtcactg

SEQ ID NO: 566059 - DNA, 15 bp, Homo sapiens
ggtcactgtcactgg

SEQ ID NO: 566060 - DNA, 15 bp, Homo sapiens
gtcactgtcactggg

SEQ ID NO: 566061 - DNA, 15 bp, Homo sapiens
tcactgtcactgggt

SEQ ID NO: 566062 - DNA, 15 bp, Homo sapiens
cactgtcactgggtt

SEQ ID NO: 566063 - DNA, 15 bp, Homo sapiens
actgtcactgggttt

SEQ ID NO: 566064 - DNA, 15 bp, Homo sapiens
ctgtcactgggtttt

SEQ ID NO: 566065 - DNA, 15 bp, Homo sapiens
tgtcactgggttttg

SEQ ID NO: 566066 - DNA, 15 bp, Homo sapiens
gtcactgggttttgc

SEQ ID NO: 566067 - DNA, 15 bp, Homo sapiens
tcactgggttttgct

SEQ ID NO: 566068 - DNA, 15 bp, Homo sapiens
cactgggttttgctt

SEQ ID NO: 566069 - DNA, 15 bp, Homo sapiens
actgggttttgcttt

SEQ ID NO: 566070 - DNA, 15 bp, Homo sapiens
ctgggttttgctttt

SEQ ID NO: 566071 - DNA, 15 bp, Homo sapiens
tgggttttgcttttg

SEQ ID NO: 566072 - DNA, 15 bp, Homo sapiens
gggttttgcttttgt

SEQ ID NO: 566073 - DNA, 15 bp, Homo sapiens
ggttttgcttttgtt

SEQ ID NO: 566074 - DNA, 15 bp, Homo sapiens
gttttgcttttgtta

SEQ ID NO: 566075 - DNA, 15 bp, Homo sapiens
ttttgcttttgttat

SEQ ID NO: 566076 - DNA, 15 bp, Homo sapiens
tttgcttttgttatt

SEQ ID NO: 566077 - DNA, 15 bp, Homo sapiens
ttgcttttgttattt

SEQ ID NO: 566078 - DNA, 15 bp, Homo sapiens
tgcttttgttattta

SEQ ID NO: 566079 - DNA, 15 bp, Homo sapiens
gcttttgttatttaa

SEQ ID NO: 566080 - DNA, 15 bp, Homo sapiens
cttttgttatttaaa

SEQ ID NO: 566081 - DNA, 15 bp, Homo sapiens
ttttgttatttaaat

SEQ ID NO: 566082 - DNA, 15 bp, Homo sapiens
tttgttatttaaatc

SEQ ID NO: 566083 - DNA, 15 bp, Homo sapiens
ttgttatttaaatca

SEQ ID NO: 566084 - DNA, 15 bp, Homo sapiens
tgttatttaaatcaa

SEQ ID NO: 566085 - DNA, 15 bp, Homo sapiens
gttatttaaatcaag

SEQ ID NO: 566086 - DNA, 15 bp, Homo sapiens
ttatttaaatcaaga

SEQ ID NO: 566087 - DNA, 15 bp, Homo sapiens
tatttaaatcaagat

SEQ ID NO: 566088 - DNA, 15 bp, Homo sapiens
atttaaatcaagata

SEQ ID NO: 566089 - DNA, 15 bp, Homo sapiens
tttaaatcaagataa

SEQ ID NO: 566090 - DNA, 15 bp, Homo sapiens
ttaaatcaagataat

SEQ ID NO: 566091 - DNA, 15 bp, Homo sapiens
taaatcaagataatg

SEQ ID NO: 566092 - DNA, 15 bp, Homo sapiens
aaatcaagataatga

SEQ ID NO: 566093 - DNA, 15 bp, Homo sapiens
aatcaagataatgac

SEQ ID NO: 566094 - DNA, 15 bp, Homo sapiens
atcaagataatgact

SEQ ID NO: 566095 - DNA, 15 bp, Homo sapiens
tcaagataatgactc

SEQ ID NO: 566096 - DNA, 15 bp, Homo sapiens
caagataatgactct

SEQ ID NO: 566097 - DNA, 15 bp, Homo sapiens
aagataatgactctc

SEQ ID NO: 566098 - DNA, 15 bp, Homo sapiens
agataatgactctct

SEQ ID NO: 566099 - DNA, 15 bp, Homo sapiens
gataatgactctcta

SEQ ID NO: 566100 - DNA, 15 bp, Homo sapiens
ataatgactctctat

SEQ ID NO: 566101 - DNA, 15 bp, Homo sapiens
taatgactctctata

SEQ ID NO: 566102 - DNA, 15 bp, Homo sapiens
aatgactctctataa

SEQ ID NO: 566103 - DNA, 15 bp, Homo sapiens
atgactctctataat

SEQ ID NO: 566104 - DNA, 15 bp, Homo sapiens
tgactctctataatt

SEQ ID NO: 566105 - DNA, 15 bp, Homo sapiens
gactctctataattt

SEQ ID NO: 566106 - DNA, 15 bp, Homo sapiens
actctctataatttt

SEQ ID NO: 566107 - DNA, 15 bp, Homo sapiens
ctctctataattttg

SEQ ID NO: 566108 - DNA, 15 bp, Homo sapiens
tctctataattttgc

SEQ ID NO: 566109 - DNA, 15 bp, Homo sapiens
ctctataattttgct

SEQ ID NO: 566110 - DNA, 15 bp, Homo sapiens
tctataattttgctc

SEQ ID NO: 566111 - DNA, 15 bp, Homo sapiens
ctataattttgctcc

SEQ ID NO: 566112 - DNA, 15 bp, Homo sapiens
tataattttgctccc

SEQ ID NO: 566113 - DNA, 15 bp, Homo sapiens
ataattttgctcccg

SEQ ID NO: 566114 - DNA, 15 bp, Homo sapiens
taattttgctcccgt

SEQ ID NO: 566115 - DNA, 15 bp, Homo sapiens
aattttgctcccgta

SEQ ID NO: 566116 - DNA, 15 bp, Homo sapiens
attttgctcccgtaa

SEQ ID NO: 566117 - DNA, 15 bp, Homo sapiens
ttttgctcccgtaac

SEQ ID NO: 566118 - DNA, 15 bp, Homo sapiens
tttgctcccgtaact

SEQ ID NO: 566119 - DNA, 15 bp, Homo sapiens
ttgctcccgtaactg

SEQ ID NO: 566120 - DNA, 15 bp, Homo sapiens
tgctcccgtaactgt

SEQ ID NO: 566121 - DNA, 15 bp, Homo sapiens
gctcccgtaactgtt

SEQ ID NO: 566122 - DNA, 15 bp, Homo sapiens
ctcccgtaactgttg

SEQ ID NO: 566123 - DNA, 15 bp, Homo sapiens
tcccgtaactgttga

SEQ ID NO: 566124 - DNA, 15 bp, Homo sapiens
cccgtaactgttgag

SEQ ID NO: 566125 - DNA, 15 bp, Homo sapiens
ccgtaactgttgagg

SEQ ID NO: 566126 - DNA, 15 bp, Homo sapiens
cgtaactgttgaggc

SEQ ID NO: 566127 - DNA, 15 bp, Homo sapiens
gtaactgttgaggct

SEQ ID NO: 566128 - DNA, 15 bp, Homo sapiens
taactgttgaggcta

SEQ ID NO: 566129 - DNA, 15 bp, Homo sapiens
aactgttgaggctaa

SEQ ID NO: 566130 - DNA, 15 bp, Homo sapiens
actgttgaggctaag

SEQ ID NO: 566131 - DNA, 15 bp, Homo sapiens
ctgttgaggctaagt

SEQ ID NO: 566132 - DNA, 15 bp, Homo sapiens
tgttgaggctaagtc

SEQ ID NO: 566133 - DNA, 15 bp, Homo sapiens
gttgaggctaagtcg

SEQ ID NO: 566134 - DNA, 15 bp, Homo sapiens
ttgaggctaagtcgt

SEQ ID NO: 566135 - DNA, 15 bp, Homo sapiens
tgaggctaagtcgta

SEQ ID NO: 566136 - DNA, 15 bp, Homo sapiens
gaggctaagtcgtac

SEQ ID NO: 566137 - DNA, 15 bp, Homo sapiens
aggctaagtcgtacc

SEQ ID NO: 566138 - DNA, 15 bp, Homo sapiens
ggctaagtcgtacca

SEQ ID NO: 566139 - DNA, 15 bp, Homo sapiens
gctaagtcgtaccaa

SEQ ID NO: 566140 - DNA, 15 bp, Homo sapiens
ctaagtcgtaccaat

SEQ ID NO: 566141 - DNA, 15 bp, Homo sapiens
taagtcgtaccaatt

SEQ ID NO: 566142 - DNA, 15 bp, Homo sapiens
aagtcgtaccaattt

SEQ ID NO: 566143 - DNA, 15 bp, Homo sapiens
agtcgtaccaatttc

SEQ ID NO: 566144 - DNA, 15 bp, Homo sapiens
gtcgtaccaatttcc

SEQ ID NO: 566145 - DNA, 15 bp, Homo sapiens
tcgtaccaatttccc

SEQ ID NO: 566146 - DNA, 15 bp, Homo sapiens
cgtaccaatttcccc

SEQ ID NO: 566147 - DNA, 15 bp, Homo sapiens
gtaccaatttcccca

SEQ ID NO: 566148 - DNA, 15 bp, Homo sapiens
taccaatttccccat

SEQ ID NO: 566149 - DNA, 15 bp, Homo sapiens
accaatttccccatt

SEQ ID NO: 566150 - DNA, 15 bp, Homo sapiens
ccaatttccccattc

SEQ ID NO: 566151 - DNA, 15 bp, Homo sapiens
caatttccccattcc

SEQ ID NO: 566152 - DNA, 15 bp, Homo sapiens
aatttccccattccc

SEQ ID NO: 566153 - DNA, 15 bp, Homo sapiens
atttccccattcccc

SEQ ID NO: 566154 - DNA, 15 bp, Homo sapiens
tttccccattcccct

SEQ ID NO: 566155 - DNA, 15 bp, Homo sapiens
ttccccattcccctt

SEQ ID NO: 566156 - DNA, 15 bp, Homo sapiens
tccccattccccttg

SEQ ID NO: 566157 - DNA, 15 bp, Homo sapiens
ccccattccccttga

SEQ ID NO: 566158 - DNA, 15 bp, Homo sapiens
cccattccccttgat

SEQ ID NO: 566159 - DNA, 15 bp, Homo sapiens
ccattccccttgata

SEQ ID NO: 566160 - DNA, 15 bp, Homo sapiens
cattccccttgatac

SEQ ID NO: 566161 - DNA, 15 bp, Homo sapiens
attccccttgatact

SEQ ID NO: 566162 - DNA, 15 bp, Homo sapiens
ttccccttgatactg

SEQ ID NO: 566163 - DNA, 15 bp, Homo sapiens
tccccttgatactgg

SEQ ID NO: 566164 - DNA, 15 bp, Homo sapiens
ccccttgatactggg

SEQ ID NO: 566165 - DNA, 15 bp, Homo sapiens
cccttgatactgggt

SEQ ID NO: 566166 - DNA, 15 bp, Homo sapiens
ccttgatactgggta

SEQ ID NO: 566167 - DNA, 15 bp, Homo sapiens
cttgatactgggtag

SEQ ID NO: 566168 - DNA, 15 bp, Homo sapiens
ttgatactgggtaga

SEQ ID NO: 566169 - DNA, 15 bp, Homo sapiens
tgatactgggtagat

SEQ ID NO: 566170 - DNA, 15 bp, Homo sapiens
gatactgggtagatt

SEQ ID NO: 566171 - DNA, 15 bp, Homo sapiens
atactgggtagattt

SEQ ID NO: 566172 - DNA, 15 bp, Homo sapiens
tactgggtagatttc

SEQ ID NO: 566173 - DNA, 15 bp, Homo sapiens
actgggtagatttcc

SEQ ID NO: 566174 - DNA, 15 bp, Homo sapiens
ctgggtagatttcct

SEQ ID NO: 566175 - DNA, 15 bp, Homo sapiens
tgggtagatttcctc

SEQ ID NO: 566176 - DNA, 15 bp, Homo sapiens
gggtagatttcctca

SEQ ID NO: 566177 - DNA, 15 bp, Homo sapiens
ggtagatttcctcat

SEQ ID NO: 566178 - DNA, 15 bp, Homo sapiens
gtagatttcctcata

SEQ ID NO: 566179 - DNA, 15 bp, Homo sapiens
tagatttcctcatat

SEQ ID NO: 566180 - DNA, 15 bp, Homo sapiens
agatttcctcatatc

SEQ ID NO: 566181 - DNA, 15 bp, Homo sapiens
gatttcctcatatca

SEQ ID NO: 566182 - DNA, 15 bp, Homo sapiens
atttcctcatatcat

SEQ ID NO: 566183 - DNA, 15 bp, Homo sapiens
tttcctcatatcatc

SEQ ID NO: 566184 - DNA, 15 bp, Homo sapiens
ttcctcatatcatca

SEQ ID NO: 566185 - DNA, 15 bp, Homo sapiens
tcctcatatcatcat

SEQ ID NO: 566186 - DNA, 15 bp, Homo sapiens
cctcatatcatcatc

SEQ ID NO: 566187 - DNA, 15 bp, Homo sapiens
ctcatatcatcatct

SEQ ID NO: 566188 - DNA, 15 bp, Homo sapiens
tcatatcatcatctc

SEQ ID NO: 566189 - DNA, 15 bp, Homo sapiens
catatcatcatctca

SEQ ID NO: 566190 - DNA, 15 bp, Homo sapiens
atatcatcatctcac

SEQ ID NO: 566191 - DNA, 15 bp, Homo sapiens
tatcatcatctcacc

SEQ ID NO: 566192 - DNA, 15 bp, Homo sapiens
atcatcatctcacca

SEQ ID NO: 566193 - DNA, 15 bp, Homo sapiens
tcatcatctcaccac

SEQ ID NO: 566194 - DNA, 15 bp, Homo sapiens
catcatctcaccact

SEQ ID NO: 566195 - DNA, 15 bp, Homo sapiens
atcatctcaccactt

SEQ ID NO: 566196 - DNA, 15 bp, Homo sapiens
tcatctcaccacttg

SEQ ID NO: 566197 - DNA, 15 bp, Homo sapiens
catctcaccacttgg

SEQ ID NO: 566198 - DNA, 15 bp, Homo sapiens
atctcaccacttggt

SEQ ID NO: 566199 - DNA, 15 bp, Homo sapiens
tctcaccacttggtg

SEQ ID NO: 566200 - DNA, 15 bp, Homo sapiens
ctcaccacttggtgg

SEQ ID NO: 566201 - DNA, 15 bp, Homo sapiens
tcaccacttggtgga

SEQ ID NO: 566202 - DNA, 15 bp, Homo sapiens
caccacttggtggag

SEQ ID NO: 566203 - DNA, 15 bp, Homo sapiens
accacttggtggaga

SEQ ID NO: 566204 - DNA, 15 bp, Homo sapiens
ccacttggtggagaa

SEQ ID NO: 566205 - DNA, 15 bp, Homo sapiens
cacttggtggagaaa

SEQ ID NO: 566206 - DNA, 15 bp, Homo sapiens
acttggtggagaaat

SEQ ID NO: 566207 - DNA, 15 bp, Homo sapiens
cttggtggagaaatt

SEQ ID NO: 566208 - DNA, 15 bp, Homo sapiens
ttggtggagaaattg

SEQ ID NO: 566209 - DNA, 15 bp, Homo sapiens
tggtggagaaattga

SEQ ID NO: 566210 - DNA, 15 bp, Homo sapiens
ggtggagaaattgat

SEQ ID NO: 566211 - DNA, 15 bp, Homo sapiens
gtggagaaattgatg

SEQ ID NO: 566212 - DNA, 15 bp, Homo sapiens
tggagaaattgatgt

SEQ ID NO: 566213 - DNA, 15 bp, Homo sapiens
ggagaaattgatgtc

SEQ ID NO: 566214 - DNA, 15 bp, Homo sapiens
gagaaattgatgtct

SEQ ID NO: 566215 - DNA, 15 bp, Homo sapiens
agaaattgatgtctc

SEQ ID NO: 566216 - DNA, 15 bp, Homo sapiens
gaaattgatgtctca

SEQ ID NO: 566217 - DNA, 15 bp, Homo sapiens
aaattgatgtctcag

SEQ ID NO: 566218 - DNA, 15 bp, Homo sapiens
aattgatgtctcaga

SEQ ID NO: 566219 - DNA, 15 bp, Homo sapiens
attgatgtctcagaa

SEQ ID NO: 566220 - DNA, 15 bp, Homo sapiens
ttgatgtctcagaac

SEQ ID NO: 566221 - DNA, 15 bp, Homo sapiens
tgatgtctcagaacc

SEQ ID NO: 566222 - DNA, 15 bp, Homo sapiens
gatgtctcagaaccc

SEQ ID NO: 566223 - DNA, 15 bp, Homo sapiens
atgtctcagaaccct

SEQ ID NO: 566224 - DNA, 15 bp, Homo sapiens
tgtctcagaaccctg

SEQ ID NO: 566225 - DNA, 15 bp, Homo sapiens
gtctcagaaccctgc

SEQ ID NO: 566226 - DNA, 15 bp, Homo sapiens
tctcagaaccctgcc

SEQ ID NO: 566227 - DNA, 15 bp, Homo sapiens
ctcagaaccctgcca

SEQ ID NO: 566228 - DNA, 15 bp, Homo sapiens
tcagaaccctgccat

SEQ ID NO: 566229 - DNA, 15 bp, Homo sapiens
cagaaccctgccatc

SEQ ID NO: 566230 - DNA, 15 bp, Homo sapiens
agaaccctgccatct

SEQ ID NO: 566231 - DNA, 15 bp, Homo sapiens
gaaccctgccatctc

SEQ ID NO: 566232 - DNA, 15 bp, Homo sapiens
aaccctgccatctcc

SEQ ID NO: 566233 - DNA, 15 bp, Homo sapiens
accctgccatctcct

SEQ ID NO: 566234 - DNA, 15 bp, Homo sapiens
ccctgccatctcctc

SEQ ID NO: 566235 - DNA, 15 bp, Homo sapiens
cctgccatctcctca

SEQ ID NO: 566236 - DNA, 15 bp, Homo sapiens
ctgccatctcctcaa

SEQ ID NO: 566237 - DNA, 15 bp, Homo sapiens
tgccatctcctcaac

SEQ ID NO: 566238 - DNA, 15 bp, Homo sapiens
gccatctcctcaaca

SEQ ID NO: 566239 - DNA, 15 bp, Homo sapiens
ccatctcctcaacag

SEQ ID NO: 566240 - DNA, 15 bp, Homo sapiens
catctcctcaacagg

SEQ ID NO: 566241 - DNA, 15 bp, Homo sapiens
atctcctcaacaggt

SEQ ID NO: 566242 - DNA, 15 bp, Homo sapiens
tctcctcaacaggtt

SEQ ID NO: 566243 - DNA, 15 bp, Homo sapiens
ctcctcaacaggtta

SEQ ID NO: 566244 - DNA, 15 bp, Homo sapiens
tcctcaacaggttat

SEQ ID NO: 566245 - DNA, 15 bp, Homo sapiens
cctcaacaggttatc

SEQ ID NO: 566246 - DNA, 15 bp, Homo sapiens
ctcaacaggttatct

SEQ ID NO: 566247 - DNA, 15 bp, Homo sapiens
tcaacaggttatctt

SEQ ID NO: 566248 - DNA, 15 bp, Homo sapiens
caacaggttatcttc

SEQ ID NO: 566249 - DNA, 15 bp, Homo sapiens
aacaggttatcttct

SEQ ID NO: 566250 - DNA, 15 bp, Homo sapiens
acaggttatcttctg

SEQ ID NO: 566251 - DNA, 15 bp, Homo sapiens
caggttatcttctgt

SEQ ID NO: 566252 - DNA, 15 bp, Homo sapiens
aggttatcttctgtc

SEQ ID NO: 566253 - DNA, 15 bp, Homo sapiens
ggttatcttctgtcc

SEQ ID NO: 566254 - DNA, 15 bp, Homo sapiens
gttatcttctgtccc

SEQ ID NO: 566255 - DNA, 15 bp, Homo sapiens
ttatcttctgtccct

SEQ ID NO: 566256 - DNA, 15 bp, Homo sapiens
tatcttctgtccctg

SEQ ID NO: 566257 - DNA, 15 bp, Homo sapiens
atcttctgtccctga

SEQ ID NO: 566258 - DNA, 15 bp, Homo sapiens
tcttctgtccctgat

SEQ ID NO: 566259 - DNA, 15 bp, Homo sapiens
cttctgtccctgatg

SEQ ID NO: 566260 - DNA, 15 bp, Homo sapiens
ttctgtccctgatga

SEQ ID NO: 566261 - DNA, 15 bp, Homo sapiens
tctgtccctgatgag

SEQ ID NO: 566262 - DNA, 15 bp, Homo sapiens
ctgtccctgatgagg

SEQ ID NO: 566263 - DNA, 15 bp, Homo sapiens
tgtccctgatgagga

SEQ ID NO: 566264 - DNA, 15 bp, Homo sapiens
gtccctgatgaggag

SEQ ID NO: 566265 - DNA, 15 bp, Homo sapiens
tccctgatgaggaga

SEQ ID NO: 566266 - DNA, 15 bp, Homo sapiens
ccctgatgaggagat

SEQ ID NO: 566267 - DNA, 15 bp, Homo sapiens
cctgatgaggagatg

SEQ ID NO: 566268 - DNA, 15 bp, Homo sapiens
ctgatgaggagatgc

SEQ ID NO: 566269 - DNA, 15 bp, Homo sapiens
tgatgaggagatgcc

SEQ ID NO: 566270 - DNA, 15 bp, Homo sapiens
gatgaggagatgccg

SEQ ID NO: 566271 - DNA, 15 bp, Homo sapiens
atgaggagatgccgg

SEQ ID NO: 566272 - DNA, 15 bp, Homo sapiens
tgaggagatgccggg

SEQ ID NO: 566273 - DNA, 15 bp, Homo sapiens
gaggagatgccgggg

SEQ ID NO: 566274 - DNA, 15 bp, Homo sapiens
aggagatgccggggg

SEQ ID NO: 566275 - DNA, 15 bp, Homo sapiens
ggagatgccgggggg

SEQ ID NO: 566276 - DNA, 15 bp, Homo sapiens
gagatgccggggggt

SEQ ID NO: 566277 - DNA, 15 bp, Homo sapiens
agatgccggggggtc

SEQ ID NO: 566278 - DNA, 15 bp, Homo sapiens
gatgccggggggtct

SEQ ID NO: 566279 - DNA, 15 bp, Homo sapiens
atgccggggggtctg

SEQ ID NO: 566280 - DNA, 15 bp, Homo sapiens
tgccggggggtctgg

SEQ ID NO: 566281 - DNA, 15 bp, Homo sapiens
gccggggggtctggg

SEQ ID NO: 566282 - DNA, 15 bp, Homo sapiens
ccggggggtctggga

SEQ ID NO: 566283 - DNA, 15 bp, Homo sapiens
cggggggtctgggac

SEQ ID NO: 566284 - DNA, 15 bp, Homo sapiens
ggggggtctgggaca

SEQ ID NO: 566285 - DNA, 15 bp, Homo sapiens
gggggtctgggacat

SEQ ID NO: 566286 - DNA, 15 bp, Homo sapiens
ggggtctgggacatc

SEQ ID NO: 566287 - DNA, 15 bp, Homo sapiens
gggtctgggacatca

SEQ ID NO: 566288 - DNA, 15 bp, Homo sapiens
ggtctgggacatcag

SEQ ID NO: 566289 - DNA, 15 bp, Homo sapiens
gtctgggacatcagg

SEQ ID NO: 566290 - DNA, 15 bp, Homo sapiens
tctgggacatcaggt

SEQ ID NO: 566291 - DNA, 15 bp, Homo sapiens
ctgggacatcaggtt

SEQ ID NO: 566292 - DNA, 15 bp, Homo sapiens
tgggacatcaggttc

SEQ ID NO: 566293 - DNA, 15 bp, Homo sapiens
gggacatcaggttct

SEQ ID NO: 566294 - DNA, 15 bp, Homo sapiens
ggacatcaggttctc

SEQ ID NO: 566295 - DNA, 15 bp, Homo sapiens
gacatcaggttctcc

SEQ ID NO: 566296 - DNA, 15 bp, Homo sapiens
acatcaggttctcca

SEQ ID NO: 566297 - DNA, 15 bp, Homo sapiens
catcaggttctccac

SEQ ID NO: 566298 - DNA, 15 bp, Homo sapiens
atcaggttctccacc

SEQ ID NO: 566299 - DNA, 15 bp, Homo sapiens
tcaggttctccacca

SEQ ID NO: 566300 - DNA, 15 bp, Homo sapiens
caggttctccaccaa

SEQ ID NO: 566301 - DNA, 15 bp, Homo sapiens
aggttctccaccaag

SEQ ID NO: 566302 - DNA, 15 bp, Homo sapiens
ggttctccaccaagt

SEQ ID NO: 566303 - DNA, 15 bp, Homo sapiens
gttctccaccaagtg

SEQ ID NO: 566304 - DNA, 15 bp, Homo sapiens
ttctccaccaagtgg

SEQ ID NO: 566305 - DNA, 15 bp, Homo sapiens
tctccaccaagtggt

SEQ ID NO: 566306 - DNA, 15 bp, Homo sapiens
ctccaccaagtggtg

SEQ ID NO: 566307 - DNA, 15 bp, Homo sapiens
tccaccaagtggtga

SEQ ID NO: 566308 - DNA, 15 bp, Homo sapiens
ccaccaagtggtgag

SEQ ID NO: 566309 - DNA, 15 bp, Homo sapiens
caccaagtggtgaga

SEQ ID NO: 566310 - DNA, 15 bp, Homo sapiens
accaagtggtgagat

SEQ ID NO: 566311 - DNA, 15 bp, Homo sapiens
ccaagtggtgagatg

SEQ ID NO: 566312 - DNA, 15 bp, Homo sapiens
caagtggtgagatga

SEQ ID NO: 566313 - DNA, 15 bp, Homo sapiens
aagtggtgagatgat

SEQ ID NO: 566314 - DNA, 15 bp, Homo sapiens
agtggtgagatgatg

SEQ ID NO: 566315 - DNA, 15 bp, Homo sapiens
gtggtgagatgatga

SEQ ID NO: 566316 - DNA, 15 bp, Homo sapiens
tggtgagatgatgac

SEQ ID NO: 566317 - DNA, 15 bp, Homo sapiens
ggtgagatgatgaca

SEQ ID NO: 566318 - DNA, 15 bp, Homo sapiens
gtgagatgatgacat

SEQ ID NO: 566319 - DNA, 15 bp, Homo sapiens
tgagatgatgacatg

SEQ ID NO: 566320 - DNA, 15 bp, Homo sapiens
gagatgatgacatgt

SEQ ID NO: 566321 - DNA, 15 bp, Homo sapiens
agatgatgacatgtc

SEQ ID NO: 566322 - DNA, 15 bp, Homo sapiens
gatgatgacatgtcg

SEQ ID NO: 566323 - DNA, 15 bp, Homo sapiens
atgatgacatgtcga

SEQ ID NO: 566324 - DNA, 15 bp, Homo sapiens
tgatgacatgtcgaa

SEQ ID NO: 566325 - DNA, 15 bp, Homo sapiens
gatgacatgtcgaag

SEQ ID NO: 566326 - DNA, 15 bp, Homo sapiens
atgacatgtcgaagt

SEQ ID NO: 566327 - DNA, 15 bp, Homo sapiens
tgacatgtcgaagtc

SEQ ID NO: 566328 - DNA, 15 bp, Homo sapiens
gacatgtcgaagtct

SEQ ID NO: 566329 - DNA, 15 bp, Homo sapiens
acatgtcgaagtcta

SEQ ID NO: 566330 - DNA, 15 bp, Homo sapiens
catgtcgaagtctac

SEQ ID NO: 566331 - DNA, 15 bp, Homo sapiens
atgtcgaagtctacc

SEQ ID NO: 566332 - DNA, 15 bp, Homo sapiens
tgtcgaagtctaccc

SEQ ID NO: 566333 - DNA, 15 bp, Homo sapiens
gtcgaagtctaccca

SEQ ID NO: 566334 - DNA, 15 bp, Homo sapiens
tcgaagtctacccaa

SEQ ID NO: 566335 - DNA, 15 bp, Homo sapiens
cgaagtctacccaat

SEQ ID NO: 566336 - DNA, 15 bp, Homo sapiens
gaagtctacccaata

SEQ ID NO: 566337 - DNA, 15 bp, Homo sapiens
aagtctacccaatat

SEQ ID NO: 566338 - DNA, 15 bp, Homo sapiens
agtctacccaatatc

SEQ ID NO: 566339 - DNA, 15 bp, Homo sapiens
gtctacccaatatcc

SEQ ID NO: 566340 - DNA, 15 bp, Homo sapiens
tctacccaatatccc

SEQ ID NO: 566341 - DNA, 15 bp, Homo sapiens
ctacccaatatcccc

SEQ ID NO: 566342 - DNA, 15 bp, Homo sapiens
tacccaatatccccc

SEQ ID NO: 566343 - DNA, 15 bp, Homo sapiens
acccaatatccccca

SEQ ID NO: 566344 - DNA, 15 bp, Homo sapiens
cccaatatcccccag

SEQ ID NO: 566345 - DNA, 15 bp, Homo sapiens
ccaatatcccccagt

SEQ ID NO: 566346 - DNA, 15 bp, Homo sapiens
caatatcccccagta

SEQ ID NO: 566347 - DNA, 15 bp, Homo sapiens
aatatcccccagtaa

SEQ ID NO: 566348 - DNA, 15 bp, Homo sapiens
atatcccccagtaag

SEQ ID NO: 566349 - DNA, 15 bp, Homo sapiens
tatcccccagtaaga

SEQ ID NO: 566350 - DNA, 15 bp, Homo sapiens
atcccccagtaagag

SEQ ID NO: 566351 - DNA, 15 bp, Homo sapiens
tcccccagtaagaga

SEQ ID NO: 566352 - DNA, 15 bp, Homo sapiens
cccccagtaagagaa

SEQ ID NO: 566353 - DNA, 15 bp, Homo sapiens
ccccagtaagagaat

SEQ ID NO: 566354 - DNA, 15 bp, Homo sapiens
cccagtaagagaata

SEQ ID NO: 566355 - DNA, 15 bp, Homo sapiens
ccagtaagagaataa

SEQ ID NO: 566356 - DNA, 15 bp, Homo sapiens
cagtaagagaataag

SEQ ID NO: 566357 - DNA, 15 bp, Homo sapiens
agtaagagaataagg

SEQ ID NO: 566358 - DNA, 15 bp, Homo sapiens
gtaagagaataaggg

SEQ ID NO: 566359 - DNA, 15 bp, Homo sapiens
taagagaataagggg

SEQ ID NO: 566360 - DNA, 15 bp, Homo sapiens
aagagaataaggggc

SEQ ID NO: 566361 - DNA, 15 bp, Homo sapiens
agagaataaggggca

SEQ ID NO: 566362 - DNA, 15 bp, Homo sapiens
gagaataaggggcaa

SEQ ID NO: 566363 - DNA, 15 bp, Homo sapiens
agaataaggggcaag

SEQ ID NO: 566364 - DNA, 15 bp, Homo sapiens
gaataaggggcaaga

SEQ ID NO: 566365 - DNA, 15 bp, Homo sapiens
aataaggggcaagaa

SEQ ID NO: 566366 - DNA, 15 bp, Homo sapiens
ataaggggcaagaat

SEQ ID NO: 566367 - DNA, 15 bp, Homo sapiens
taaggggcaagaatg

SEQ ID NO: 566368 - DNA, 15 bp, Homo sapiens
aaggggcaagaatga

SEQ ID NO: 566369 - DNA, 15 bp, Homo sapiens
aggggcaagaatgac

SEQ ID NO: 566370 - DNA, 15 bp, Homo sapiens
ggggcaagaatgact

SEQ ID NO: 566371 - DNA, 15 bp, Homo sapiens
gggcaagaatgactc

SEQ ID NO: 566372 - DNA, 15 bp, Homo sapiens
ggcaagaatgactca

SEQ ID NO: 566373 - DNA, 15 bp, Homo sapiens
gcaagaatgactcat

SEQ ID NO: 566374 - DNA, 15 bp, Homo sapiens
caagaatgactcatg

SEQ ID NO: 566375 - DNA, 15 bp, Homo sapiens
aagaatgactcatga

SEQ ID NO: 566376 - DNA, 15 bp, Homo sapiens
agaatgactcatgaa

SEQ ID NO: 566377 - DNA, 15 bp, Homo sapiens
gaatgactcatgaac

SEQ ID NO: 566378 - DNA, 15 bp, Homo sapiens
aatgactcatgaact

SEQ ID NO: 566379 - DNA, 15 bp, Homo sapiens
atgactcatgaactc

SEQ ID NO: 566380 - DNA, 15 bp, Homo sapiens
tgactcatgaactcc

SEQ ID NO: 566381 - DNA, 15 bp, Homo sapiens
gactcatgaactcct

SEQ ID NO: 566382 - DNA, 15 bp, Homo sapiens
actcatgaactcctg

SEQ ID NO: 566383 - DNA, 15 bp, Homo sapiens
ctcatgaactcctgt

SEQ ID NO: 566384 - DNA, 15 bp, Homo sapiens
tcatgaactcctgta

SEQ ID NO: 566385 - DNA, 15 bp, Homo sapiens
catgaactcctgtac

SEQ ID NO: 566386 - DNA, 15 bp, Homo sapiens
atgaactcctgtacc

SEQ ID NO: 566387 - DNA, 15 bp, Homo sapiens
tgaactcctgtacca

SEQ ID NO: 566388 - DNA, 15 bp, Homo sapiens
gaactcctgtaccag

SEQ ID NO: 566389 - DNA, 15 bp, Homo sapiens
aactcctgtaccaga

SEQ ID NO: 566390 - DNA, 15 bp, Homo sapiens
actcctgtaccagaa

SEQ ID NO: 566391 - DNA, 15 bp, Homo sapiens
ctcctgtaccagaaa

SEQ ID NO: 566392 - DNA, 15 bp, Homo sapiens
tcctgtaccagaaat

SEQ ID NO: 566393 - DNA, 15 bp, Homo sapiens
cctgtaccagaaatc

SEQ ID NO: 566394 - DNA, 15 bp, Homo sapiens
ctgtaccagaaatca

SEQ ID NO: 566395 - DNA, 15 bp, Homo sapiens
tgtaccagaaatcaa

SEQ ID NO: 566396 - DNA, 15 bp, Homo sapiens
gtaccagaaatcaaa

SEQ ID NO: 566397 - DNA, 15 bp, Homo sapiens
taccagaaatcaaac

SEQ ID NO: 566398 - DNA, 15 bp, Homo sapiens
accagaaatcaaact

SEQ ID NO: 566399 - DNA, 15 bp, Homo sapiens
ccagaaatcaaactt

SEQ ID NO: 566400 - DNA, 15 bp, Homo sapiens
cagaaatcaaacttg

SEQ ID NO: 566401 - DNA, 15 bp, Homo sapiens
agaaatcaaacttgc

SEQ ID NO: 566402 - DNA, 15 bp, Homo sapiens
gaaatcaaacttgcc

SEQ ID NO: 566403 - DNA, 15 bp, Homo sapiens
aaatcaaacttgcca

SEQ ID NO: 566404 - DNA, 15 bp, Homo sapiens
aatcaaacttgccat

SEQ ID NO: 566405 - DNA, 15 bp, Homo sapiens
atcaaacttgccatg

SEQ ID NO: 566406 - DNA, 15 bp, Homo sapiens
tcaaacttgccatgc

SEQ ID NO: 566407 - DNA, 15 bp, Homo sapiens
caaacttgccatgcc

SEQ ID NO: 566408 - DNA, 15 bp, Homo sapiens
aaacttgccatgcct

SEQ ID NO: 566409 - DNA, 15 bp, Homo sapiens
aacttgccatgccta

SEQ ID NO: 566410 - DNA, 15 bp, Homo sapiens
acttgccatgcctag

SEQ ID NO: 566411 - DNA, 15 bp, Homo sapiens
cttgccatgcctagg

SEQ ID NO: 566412 - DNA, 15 bp, Homo sapiens
ttgccatgcctagga

SEQ ID NO: 566413 - DNA, 15 bp, Homo sapiens
tgccatgcctaggaa

SEQ ID NO: 566414 - DNA, 15 bp, Homo sapiens
gccatgcctaggaag

SEQ ID NO: 566415 - DNA, 15 bp, Homo sapiens
ccatgcctaggaagc

SEQ ID NO: 566416 - DNA, 15 bp, Homo sapiens
catgcctaggaagca

SEQ ID NO: 566417 - DNA, 15 bp, Homo sapiens
atgcctaggaagcaa

SEQ ID NO: 566418 - DNA, 15 bp, Homo sapiens
tgcctaggaagcaaa

SEQ ID NO: 566419 - DNA, 15 bp, Homo sapiens
gcctaggaagcaaaa

SEQ ID NO: 566420 - DNA, 15 bp, Homo sapiens
cctaggaagcaaaat

SEQ ID NO: 566421 - DNA, 15 bp, Homo sapiens
ctaggaagcaaaata

SEQ ID NO: 566422 - DNA, 15 bp, Homo sapiens
taggaagcaaaatat

SEQ ID NO: 566423 - DNA, 15 bp, Homo sapiens
aggaagcaaaatatg

SEQ ID NO: 566424 - DNA, 15 bp, Homo sapiens
ggaagcaaaatatga

SEQ ID NO: 566425 - DNA, 15 bp, Homo sapiens
gaagcaaaatatgaa

SEQ ID NO: 566426 - DNA, 15 bp, Homo sapiens
aagcaaaatatgaag

SEQ ID NO: 566427 - DNA, 15 bp, Homo sapiens
agcaaaatatgaagc

SEQ ID NO: 566428 - DNA, 15 bp, Homo sapiens
gcaaaatatgaagca

SEQ ID NO: 566429 - DNA, 15 bp, Homo sapiens
caaaatatgaagcac

SEQ ID NO: 566430 - DNA, 15 bp, Homo sapiens
aaaatatgaagcaca

SEQ ID NO: 566431 - DNA, 15 bp, Homo sapiens
aaatatgaagcacat

SEQ ID NO: 566432 - DNA, 15 bp, Homo sapiens
aatatgaagcacatg

SEQ ID NO: 566433 - DNA, 15 bp, Homo sapiens
atatgaagcacatga

SEQ ID NO: 566434 - DNA, 15 bp, Homo sapiens
tatgaagcacatgaa

SEQ ID NO: 566435 - DNA, 15 bp, Homo sapiens
atgaagcacatgaac

SEQ ID NO: 566436 - DNA, 15 bp, Homo sapiens
tgaagcacatgaaca

SEQ ID NO: 566437 - DNA, 15 bp, Homo sapiens
gaagcacatgaacag

SEQ ID NO: 566438 - DNA, 15 bp, Homo sapiens
aagcacatgaacagg

SEQ ID NO: 566439 - DNA, 15 bp, Homo sapiens
agcacatgaacaggt

SEQ ID NO: 566440 - DNA, 15 bp, Homo sapiens
gcacatgaacaggtg

SEQ ID NO: 566441 - DNA, 15 bp, Homo sapiens
cacatgaacaggtgg

SEQ ID NO: 566442 - DNA, 15 bp, Homo sapiens
acatgaacaggtggt

SEQ ID NO: 566443 - DNA, 15 bp, Homo sapiens
catgaacaggtggta

SEQ ID NO: 566444 - DNA, 15 bp, Homo sapiens
atgaacaggtggtaa

SEQ ID NO: 566445 - DNA, 15 bp, Homo sapiens
tgaacaggtggtaaa

SEQ ID NO: 566446 - DNA, 15 bp, Homo sapiens
gaacaggtggtaaag

SEQ ID NO: 566447 - DNA, 15 bp, Homo sapiens
aacaggtggtaaagg

SEQ ID NO: 566448 - DNA, 15 bp, Homo sapiens
acaggtggtaaaggg

SEQ ID NO: 566449 - DNA, 15 bp, Homo sapiens
caggtggtaaaggga

SEQ ID NO: 566450 - DNA, 15 bp, Homo sapiens
aggtggtaaagggaa

SEQ ID NO: 566451 - DNA, 15 bp, Homo sapiens
ggtggtaaagggaat

SEQ ID NO: 566452 - DNA, 15 bp, Homo sapiens
gtggtaaagggaatt

SEQ ID NO: 566453 - DNA, 15 bp, Homo sapiens
tggtaaagggaattc

SEQ ID NO: 566454 - DNA, 15 bp, Homo sapiens
ggtaaagggaattct

SEQ ID NO: 566455 - DNA, 15 bp, Homo sapiens
gtaaagggaattctt

SEQ ID NO: 566456 - DNA, 15 bp, Homo sapiens
taaagggaattcttt

SEQ ID NO: 566457 - DNA, 15 bp, Homo sapiens
aaagggaattctttc

SEQ ID NO: 566458 - DNA, 15 bp, Homo sapiens
aagggaattctttca

SEQ ID NO: 566459 - DNA, 15 bp, Homo sapiens
agggaattctttcaa

SEQ ID NO: 566460 - DNA, 15 bp, Homo sapiens
gggaattctttcaag

SEQ ID NO: 566461 - DNA, 15 bp, Homo sapiens
ggaattctttcaaga

SEQ ID NO: 566462 - DNA, 15 bp, Homo sapiens
gaattctttcaagaa

SEQ ID NO: 566463 - DNA, 15 bp, Homo sapiens
aattctttcaagaaa

SEQ ID NO: 566464 - DNA, 15 bp, Homo sapiens
attctttcaagaaag

SEQ ID NO: 566465 - DNA, 15 bp, Homo sapiens
ttctttcaagaaaga

SEQ ID NO: 566466 - DNA, 15 bp, Homo sapiens
tctttcaagaaagag

SEQ ID NO: 566467 - DNA, 15 bp, Homo sapiens
ctttcaagaaagagg

SEQ ID NO: 566468 - DNA, 15 bp, Homo sapiens
tttcaagaaagaggt

SEQ ID NO: 566469 - DNA, 15 bp, Homo sapiens
ttcaagaaagaggtt

SEQ ID NO: 566470 - DNA, 15 bp, Homo sapiens
tcaagaaagaggttg

SEQ ID NO: 566471 - DNA, 15 bp, Homo sapiens
caagaaagaggttgg

SEQ ID NO: 566472 - DNA, 15 bp, Homo sapiens
aagaaagaggttggg

SEQ ID NO: 566473 - DNA, 15 bp, Homo sapiens
agaaagaggttgggg

SEQ ID NO: 566474 - DNA, 15 bp, Homo sapiens
gaaagaggttggggt

SEQ ID NO: 566475 - DNA, 15 bp, Homo sapiens
aaagaggttggggtt

SEQ ID NO: 566476 - DNA, 15 bp, Homo sapiens
aagaggttggggtta

SEQ ID NO: 566477 - DNA, 15 bp, Homo sapiens
agaggttggggttac

SEQ ID NO: 566478 - DNA, 15 bp, Homo sapiens
gaggttggggttaca

SEQ ID NO: 566479 - DNA, 15 bp, Homo sapiens
aggttggggttacaa

SEQ ID NO: 566480 - DNA, 15 bp, Homo sapiens
ggttggggttacaaa

SEQ ID NO: 566481 - DNA, 15 bp, Homo sapiens
gttggggttacaaat

SEQ ID NO: 566482 - DNA, 15 bp, Homo sapiens
ttggggttacaaatt

SEQ ID NO: 566483 - DNA, 15 bp, Homo sapiens
tggggttacaaatta

SEQ ID NO: 566484 - DNA, 15 bp, Homo sapiens
ggggttacaaattaa

SEQ ID NO: 566485 - DNA, 15 bp, Homo sapiens
gggttacaaattaat

SEQ ID NO: 566486 - DNA, 15 bp, Homo sapiens
ggttacaaattaatg

SEQ ID NO: 566487 - DNA, 15 bp, Homo sapiens
gttacaaattaatgc

SEQ ID NO: 566488 - DNA, 15 bp, Homo sapiens
ttacaaattaatgcc

SEQ ID NO: 566489 - DNA, 15 bp, Homo sapiens
tacaaattaatgccc

SEQ ID NO: 566490 - DNA, 15 bp, Homo sapiens
acaaattaatgccca

SEQ ID NO: 566491 - DNA, 15 bp, Homo sapiens
caaattaatgcccaa

SEQ ID NO: 566492 - DNA, 15 bp, Homo sapiens
aaattaatgcccaaa

SEQ ID NO: 566493 - DNA, 15 bp, Homo sapiens
aattaatgcccaaac

SEQ ID NO: 566494 - DNA, 15 bp, Homo sapiens
attaatgcccaaaca

SEQ ID NO: 566495 - DNA, 15 bp, Homo sapiens
ttaatgcccaaacaa

SEQ ID NO: 566496 - DNA, 15 bp, Homo sapiens
taatgcccaaacaat

SEQ ID NO: 566497 - DNA, 15 bp, Homo sapiens
aatgcccaaacaata

SEQ ID NO: 566498 - DNA, 15 bp, Homo sapiens
atgcccaaacaataa

SEQ ID NO: 566499 - DNA, 15 bp, Homo sapiens
tgcccaaacaataac

SEQ ID NO: 566500 - DNA, 15 bp, Homo sapiens
gcccaaacaataacc

SEQ ID NO: 566501 - DNA, 15 bp, Homo sapiens
cccaaacaataacca

SEQ ID NO: 566502 - DNA, 15 bp, Homo sapiens
ccaaacaataaccaa

SEQ ID NO: 566503 - DNA, 15 bp, Homo sapiens
caaacaataaccaag

SEQ ID NO: 566504 - DNA, 15 bp, Homo sapiens
aaacaataaccaaga

SEQ ID NO: 566505 - DNA, 15 bp, Homo sapiens
aacaataaccaagac

SEQ ID NO: 566506 - DNA, 15 bp, Homo sapiens
acaataaccaagacc

SEQ ID NO: 566507 - DNA, 15 bp, Homo sapiens
caataaccaagaccc

SEQ ID NO: 566508 - DNA, 15 bp, Homo sapiens
aataaccaagacccc

SEQ ID NO: 566509 - DNA, 15 bp, Homo sapiens
ataaccaagacccct

SEQ ID NO: 566510 - DNA, 15 bp, Homo sapiens
taaccaagacccctt

SEQ ID NO: 566511 - DNA, 15 bp, Homo sapiens
aaccaagaccccttc

SEQ ID NO: 566512 - DNA, 15 bp, Homo sapiens
accaagaccccttcc

SEQ ID NO: 566513 - DNA, 15 bp, Homo sapiens
ccaagaccccttcca

SEQ ID NO: 566514 - DNA, 15 bp, Homo sapiens
caagaccccttccaa

SEQ ID NO: 566515 - DNA, 15 bp, Homo sapiens
aagaccccttccaat

SEQ ID NO: 566516 - DNA, 15 bp, Homo sapiens
agaccccttccaatt

SEQ ID NO: 566517 - DNA, 15 bp, Homo sapiens
gaccccttccaatta

SEQ ID NO: 566518 - DNA, 15 bp, Homo sapiens
accccttccaattat

SEQ ID NO: 566519 - DNA, 15 bp, Homo sapiens
ccccttccaattatg

SEQ ID NO: 566520 - DNA, 15 bp, Homo sapiens
cccttccaattatgt

SEQ ID NO: 566521 - DNA, 15 bp, Homo sapiens
ccttccaattatgtg

SEQ ID NO: 566522 - DNA, 15 bp, Homo sapiens
cttccaattatgtgt

SEQ ID NO: 566523 - DNA, 15 bp, Homo sapiens
ttccaattatgtgta

SEQ ID NO: 566524 - DNA, 15 bp, Homo sapiens
tccaattatgtgtat

SEQ ID NO: 566525 - DNA, 15 bp, Homo sapiens
ccaattatgtgtatt

SEQ ID NO: 566526 - DNA, 15 bp, Homo sapiens
caattatgtgtatta

SEQ ID NO: 566527 - DNA, 15 bp, Homo sapiens
aattatgtgtattaa

SEQ ID NO: 566528 - DNA, 15 bp, Homo sapiens
attatgtgtattaat

SEQ ID NO: 566529 - DNA, 15 bp, Homo sapiens
ttatgtgtattaatt

SEQ ID NO: 566530 - DNA, 15 bp, Homo sapiens
tatgtgtattaatta

SEQ ID NO: 566531 - DNA, 15 bp, Homo sapiens
atgtgtattaattat

SEQ ID NO: 566532 - DNA, 15 bp, Homo sapiens
tgtgtattaattatt

SEQ ID NO: 566533 - DNA, 15 bp, Homo sapiens
gtgtattaattattt

SEQ ID NO: 566534 - DNA, 15 bp, Homo sapiens
tgtattaattattta

SEQ ID NO: 566535 - DNA, 15 bp, Homo sapiens
gtattaattatttac

SEQ ID NO: 566536 - DNA, 15 bp, Homo sapiens
tattaattatttact

SEQ ID NO: 566537 - DNA, 15 bp, Homo sapiens
attaattatttactt

SEQ ID NO: 566538 - DNA, 15 bp, Homo sapiens
ttaattatttactta

SEQ ID NO: 566539 - DNA, 15 bp, Homo sapiens
taattatttacttac

SEQ ID NO: 566540 - DNA, 15 bp, Homo sapiens
aattatttacttact

SEQ ID NO: 566541 - DNA, 15 bp, Homo sapiens
attatttacttactc

SEQ ID NO: 566542 - DNA, 15 bp, Homo sapiens
ttatttacttactct

SEQ ID NO: 566543 - DNA, 15 bp, Homo sapiens
tatttacttactctg

SEQ ID NO: 566544 - DNA, 15 bp, Homo sapiens
atttacttactctgc

SEQ ID NO: 566545 - DNA, 15 bp, Homo sapiens
tttacttactctgca

SEQ ID NO: 566546 - DNA, 15 bp, Homo sapiens
ttacttactctgcac

SEQ ID NO: 566547 - DNA, 15 bp, Homo sapiens
tacttactctgcaca

SEQ ID NO: 566548 - DNA, 15 bp, Homo sapiens
acttactctgcacat

SEQ ID NO: 566549 - DNA, 15 bp, Homo sapiens
cttactctgcacatg

SEQ ID NO: 566550 - DNA, 15 bp, Homo sapiens
ttactctgcacatga

SEQ ID NO: 566551 - DNA, 15 bp, Homo sapiens
tactctgcacatgac

SEQ ID NO: 566552 - DNA, 15 bp, Homo sapiens
actctgcacatgaca

SEQ ID NO: 566553 - DNA, 15 bp, Homo sapiens
ctctgcacatgacat

SEQ ID NO: 566554 - DNA, 15 bp, Homo sapiens
tctgcacatgacatt

SEQ ID NO: 566555 - DNA, 15 bp, Homo sapiens
ctgcacatgacattt

SEQ ID NO: 566556 - DNA, 15 bp, Homo sapiens
tgcacatgacatttg

SEQ ID NO: 566557 - DNA, 15 bp, Homo sapiens
gcacatgacatttgg

SEQ ID NO: 566558 - DNA, 15 bp, Homo sapiens
cacatgacatttggc

SEQ ID NO: 566559 - DNA, 15 bp, Homo sapiens
acatgacatttggca

SEQ ID NO: 566560 - DNA, 15 bp, Homo sapiens
catgacatttggcaa

SEQ ID NO: 566561 - DNA, 15 bp, Homo sapiens
atgacatttggcaat

SEQ ID NO: 566562 - DNA, 15 bp, Homo sapiens
tgacatttggcaata

SEQ ID NO: 566563 - DNA, 15 bp, Homo sapiens
gacatttggcaatat

SEQ ID NO: 566564 - DNA, 15 bp, Homo sapiens
acatttggcaatata

SEQ ID NO: 566565 - DNA, 15 bp, Homo sapiens
catttggcaatataa

SEQ ID NO: 566566 - DNA, 15 bp, Homo sapiens
atttggcaatataag

SEQ ID NO: 566567 - DNA, 15 bp, Homo sapiens
tttggcaatataaga

SEQ ID NO: 566568 - DNA, 15 bp, Homo sapiens
ttggcaatataagat

SEQ ID NO: 566569 - DNA, 15 bp, Homo sapiens
tggcaatataagatt

SEQ ID NO: 566570 - DNA, 15 bp, Homo sapiens
ggcaatataagattc

SEQ ID NO: 566571 - DNA, 15 bp, Homo sapiens
gcaatataagattca

SEQ ID NO: 566572 - DNA, 15 bp, Homo sapiens
caatataagattcac

SEQ ID NO: 566573 - DNA, 15 bp, Homo sapiens
aatataagattcaca

SEQ ID NO: 566574 - DNA, 15 bp, Homo sapiens
atataagattcacaa

SEQ ID NO: 566575 - DNA, 15 bp, Homo sapiens
tataagattcacaaa

SEQ ID NO: 566576 - DNA, 15 bp, Homo sapiens
ataagattcacaaag

SEQ ID NO: 566577 - DNA, 15 bp, Homo sapiens
taagattcacaaaga

SEQ ID NO: 566578 - DNA, 15 bp, Homo sapiens
aagattcacaaagat

SEQ ID NO: 566579 - DNA, 15 bp, Homo sapiens
agattcacaaagatg

SEQ ID NO: 566580 - DNA, 15 bp, Homo sapiens
gattcacaaagatga

SEQ ID NO: 566581 - DNA, 15 bp, Homo sapiens
attcacaaagatgaa

SEQ ID NO: 566582 - DNA, 15 bp, Homo sapiens
ttcacaaagatgaat

SEQ ID NO: 566583 - DNA, 15 bp, Homo sapiens
tcacaaagatgaatc

SEQ ID NO: 566584 - DNA, 15 bp, Homo sapiens
cacaaagatgaatca

SEQ ID NO: 566585 - DNA, 15 bp, Homo sapiens
acaaagatgaatcag

SEQ ID NO: 566586 - DNA, 15 bp, Homo sapiens
caaagatgaatcaga

SEQ ID NO: 566587 - DNA, 15 bp, Homo sapiens
aaagatgaatcagac

SEQ ID NO: 566588 - DNA, 15 bp, Homo sapiens
aagatgaatcagaca

SEQ ID NO: 566589 - DNA, 15 bp, Homo sapiens
agatgaatcagacat

SEQ ID NO: 566590 - DNA, 15 bp, Homo sapiens
gatgaatcagacatg

SEQ ID NO: 566591 - DNA, 15 bp, Homo sapiens
atgaatcagacatgc

SEQ ID NO: 566592 - DNA, 15 bp, Homo sapiens
tgaatcagacatgca

SEQ ID NO: 566593 - DNA, 15 bp, Homo sapiens
gaatcagacatgcac

SEQ ID NO: 566594 - DNA, 15 bp, Homo sapiens
aatcagacatgcact

SEQ ID NO: 566595 - DNA, 15 bp, Homo sapiens
atcagacatgcactg

SEQ ID NO: 566596 - DNA, 15 bp, Homo sapiens
tcagacatgcactgg

SEQ ID NO: 566597 - DNA, 15 bp, Homo sapiens
cagacatgcactggt

SEQ ID NO: 566598 - DNA, 15 bp, Homo sapiens
agacatgcactggtc

SEQ ID NO: 566599 - DNA, 15 bp, Homo sapiens
gacatgcactggtcc

SEQ ID NO: 566600 - DNA, 15 bp, Homo sapiens
acatgcactggtccc

SEQ ID NO: 566601 - DNA, 15 bp, Homo sapiens
catgcactggtccca

SEQ ID NO: 566602 - DNA, 15 bp, Homo sapiens
atgcactggtcccat

SEQ ID NO: 566603 - DNA, 15 bp, Homo sapiens
tgcactggtcccata

SEQ ID NO: 566604 - DNA, 15 bp, Homo sapiens
gcactggtcccataa

SEQ ID NO: 566605 - DNA, 15 bp, Homo sapiens
cactggtcccataag

SEQ ID NO: 566606 - DNA, 15 bp, Homo sapiens
actggtcccataagc

SEQ ID NO: 566607 - DNA, 15 bp, Homo sapiens
ctggtcccataagcg

SEQ ID NO: 566608 - DNA, 15 bp, Homo sapiens
tggtcccataagcgg

SEQ ID NO: 566609 - DNA, 15 bp, Homo sapiens
ggtcccataagcggg

SEQ ID NO: 566610 - DNA, 15 bp, Homo sapiens
gtcccataagcggga

SEQ ID NO: 566611 - DNA, 15 bp, Homo sapiens
tcccataagcgggag

SEQ ID NO: 566612 - DNA, 15 bp, Homo sapiens
cccataagcgggaga

SEQ ID NO: 566613 - DNA, 15 bp, Homo sapiens
ccataagcgggagag

SEQ ID NO: 566614 - DNA, 15 bp, Homo sapiens
cataagcgggagaga

SEQ ID NO: 566615 - DNA, 15 bp, Homo sapiens
ataagcgggagagag

SEQ ID NO: 566616 - DNA, 15 bp, Homo sapiens
taagcgggagagaga

SEQ ID NO: 566617 - DNA, 15 bp, Homo sapiens
aagcgggagagagaa

SEQ ID NO: 566618 - DNA, 15 bp, Homo sapiens
agcgggagagagaaa

SEQ ID NO: 566619 - DNA, 15 bp, Homo sapiens
gcgggagagagaaat

SEQ ID NO: 566620 - DNA, 15 bp, Homo sapiens
cgggagagagaaatc

SEQ ID NO: 566621 - DNA, 15 bp, Homo sapiens
gggagagagaaatca

SEQ ID NO: 566622 - DNA, 15 bp, Homo sapiens
ggagagagaaatcaa

SEQ ID NO: 566623 - DNA, 15 bp, Homo sapiens
gagagagaaatcaag

SEQ ID NO: 566624 - DNA, 15 bp, Homo sapiens
agagagaaatcaagc

SEQ ID NO: 566625 - DNA, 15 bp, Homo sapiens
gagagaaatcaagca

SEQ ID NO: 566626 - DNA, 15 bp, Homo sapiens
agagaaatcaagcac

SEQ ID NO: 566627 - DNA, 15 bp, Homo sapiens
gagaaatcaagcaca

SEQ ID NO: 566628 - DNA, 15 bp, Homo sapiens
agaaatcaagcacac

SEQ ID NO: 566629 - DNA, 15 bp, Homo sapiens
gaaatcaagcacaca

SEQ ID NO: 566630 - DNA, 15 bp, Homo sapiens
aaatcaagcacacac

SEQ ID NO: 566631 - DNA, 15 bp, Homo sapiens
aatcaagcacacaca

SEQ ID NO: 566632 - DNA, 15 bp, Homo sapiens
atcaagcacacacag

SEQ ID NO: 566633 - DNA, 15 bp, Homo sapiens
tcaagcacacacaga

SEQ ID NO: 566634 - DNA, 15 bp, Homo sapiens
caagcacacacagaa

SEQ ID NO: 566635 - DNA, 15 bp, Homo sapiens
aagcacacacagaac

SEQ ID NO: 566636 - DNA, 15 bp, Homo sapiens
agcacacacagaact

SEQ ID NO: 566637 - DNA, 15 bp, Homo sapiens
gcacacacagaactc

SEQ ID NO: 566638 - DNA, 15 bp, Homo sapiens
cacacacagaactcc

SEQ ID NO: 566639 - DNA, 15 bp, Homo sapiens
acacacagaactcct

SEQ ID NO: 566640 - DNA, 15 bp, Homo sapiens
cacacagaactcctt

SEQ ID NO: 566641 - DNA, 15 bp, Homo sapiens
acacagaactccttt

SEQ ID NO: 566642 - DNA, 15 bp, Homo sapiens
cacagaactcctttc

SEQ ID NO: 566643 - DNA, 15 bp, Homo sapiens
acagaactcctttct

SEQ ID NO: 566644 - DNA, 15 bp, Homo sapiens
cagaactcctttctt

SEQ ID NO: 566645 - DNA, 15 bp, Homo sapiens
agaactcctttcttc

SEQ ID NO: 566646 - DNA, 15 bp, Homo sapiens
gaactcctttcttct

SEQ ID NO: 566647 - DNA, 15 bp, Homo sapiens
aactcctttcttctg

SEQ ID NO: 566648 - DNA, 15 bp, Homo sapiens
actcctttcttctgg

SEQ ID NO: 566649 - DNA, 15 bp, Homo sapiens
ctcctttcttctggt

SEQ ID NO: 566650 - DNA, 15 bp, Homo sapiens
tcctttcttctggtt

SEQ ID NO: 566651 - DNA, 15 bp, Homo sapiens
cctttcttctggttg

SEQ ID NO: 566652 - DNA, 15 bp, Homo sapiens
ctttcttctggttgg

SEQ ID NO: 566653 - DNA, 15 bp, Homo sapiens
tttcttctggttggt

SEQ ID NO: 566654 - DNA, 15 bp, Homo sapiens
ttcttctggttggta

SEQ ID NO: 566655 - DNA, 15 bp, Homo sapiens
tcttctggttggtat

SEQ ID NO: 566656 - DNA, 15 bp, Homo sapiens
cttctggttggtatc

SEQ ID NO: 566657 - DNA, 15 bp, Homo sapiens
ttctggttggtatca

SEQ ID NO: 566658 - DNA, 15 bp, Homo sapiens
tctggttggtatcaa

SEQ ID NO: 566659 - DNA, 15 bp, Homo sapiens
ctggttggtatcaag

SEQ ID NO: 566660 - DNA, 15 bp, Homo sapiens
tggttggtatcaagg

SEQ ID NO: 566661 - DNA, 15 bp, Homo sapiens
ggttggtatcaagga

SEQ ID NO: 566662 - DNA, 15 bp, Homo sapiens
gttggtatcaaggaa

SEQ ID NO: 566663 - DNA, 15 bp, Homo sapiens
ttggtatcaaggaag

SEQ ID NO: 566664 - DNA, 15 bp, Homo sapiens
tggtatcaaggaagg

SEQ ID NO: 566665 - DNA, 15 bp, Homo sapiens
ggtatcaaggaaggc

SEQ ID NO: 566666 - DNA, 15 bp, Homo sapiens
gtatcaaggaaggct

SEQ ID NO: 566667 - DNA, 15 bp, Homo sapiens
tatcaaggaaggctt

SEQ ID NO: 566668 - DNA, 15 bp, Homo sapiens
atcaaggaaggcttt

SEQ ID NO: 566669 - DNA, 15 bp, Homo sapiens
tcaaggaaggctttg

SEQ ID NO: 566670 - DNA, 15 bp, Homo sapiens
caaggaaggctttgt

SEQ ID NO: 566671 - DNA, 15 bp, Homo sapiens
aaggaaggctttgtg

SEQ ID NO: 566672 - DNA, 15 bp, Homo sapiens
aggaaggctttgtgg

SEQ ID NO: 566673 - DNA, 15 bp, Homo sapiens
ggaaggctttgtgga

SEQ ID NO: 566674 - DNA, 15 bp, Homo sapiens
gaaggctttgtggac

SEQ ID NO: 566675 - DNA, 15 bp, Homo sapiens
aaggctttgtggacc

SEQ ID NO: 566676 - DNA, 15 bp, Homo sapiens
aggctttgtggacct

SEQ ID NO: 566677 - DNA, 15 bp, Homo sapiens
ggctttgtggacctg

SEQ ID NO: 566678 - DNA, 15 bp, Homo sapiens
gctttgtggacctgg

SEQ ID NO: 566679 - DNA, 15 bp, Homo sapiens
ctttgtggacctggt

SEQ ID NO: 566680 - DNA, 15 bp, Homo sapiens
tttgtggacctggta

SEQ ID NO: 566681 - DNA, 15 bp, Homo sapiens
ttgtggacctggtag

SEQ ID NO: 566682 - DNA, 15 bp, Homo sapiens
tgtggacctggtagc

SEQ ID NO: 566683 - DNA, 15 bp, Homo sapiens
gtggacctggtagca

SEQ ID NO: 566684 - DNA, 15 bp, Homo sapiens
tggacctggtagcac

SEQ ID NO: 566685 - DNA, 15 bp, Homo sapiens
ggacctggtagcact

SEQ ID NO: 566686 - DNA, 15 bp, Homo sapiens
gacctggtagcactt

SEQ ID NO: 566687 - DNA, 15 bp, Homo sapiens
acctggtagcacttg

SEQ ID NO: 566688 - DNA, 15 bp, Homo sapiens
cctggtagcacttga

SEQ ID NO: 566689 - DNA, 15 bp, Homo sapiens
ctggtagcacttgag

SEQ ID NO: 566690 - DNA, 15 bp, Homo sapiens
tggtagcacttgagt

SEQ ID NO: 566691 - DNA, 15 bp, Homo sapiens
ggtagcacttgagtt

SEQ ID NO: 566692 - DNA, 15 bp, Homo sapiens
gtagcacttgagtta

SEQ ID NO: 566693 - DNA, 15 bp, Homo sapiens
tagcacttgagttag

SEQ ID NO: 566694 - DNA, 15 bp, Homo sapiens
agcacttgagttagc

SEQ ID NO: 566695 - DNA, 15 bp, Homo sapiens
gcacttgagttagct

SEQ ID NO: 566696 - DNA, 15 bp, Homo sapiens
cacttgagttagctc

SEQ ID NO: 566697 - DNA, 15 bp, Homo sapiens
acttgagttagctct

SEQ ID NO: 566698 - DNA, 15 bp, Homo sapiens
cttgagttagctctg

SEQ ID NO: 566699 - DNA, 15 bp, Homo sapiens
ttgagttagctctgg

SEQ ID NO: 566700 - DNA, 15 bp, Homo sapiens
tgagttagctctgga

SEQ ID NO: 566701 - DNA, 15 bp, Homo sapiens
gagttagctctggaa

SEQ ID NO: 566702 - DNA, 15 bp, Homo sapiens
agttagctctggaag

SEQ ID NO: 566703 - DNA, 15 bp, Homo sapiens
gttagctctggaagg

SEQ ID NO: 566704 - DNA, 15 bp, Homo sapiens
ttagctctggaagga

SEQ ID NO: 566705 - DNA, 15 bp, Homo sapiens
tagctctggaaggag

SEQ ID NO: 566706 - DNA, 15 bp, Homo sapiens
agctctggaaggaga

SEQ ID NO: 566707 - DNA, 15 bp, Homo sapiens
gctctggaaggagag

SEQ ID NO: 566708 - DNA, 15 bp, Homo sapiens
ctctggaaggagagg

SEQ ID NO: 566709 - DNA, 15 bp, Homo sapiens
tctggaaggagaggc

SEQ ID NO: 566710 - DNA, 15 bp, Homo sapiens
ctggaaggagaggca

SEQ ID NO: 566711 - DNA, 15 bp, Homo sapiens
tggaaggagaggcag

SEQ ID NO: 566712 - DNA, 15 bp, Homo sapiens
ggaaggagaggcagg

SEQ ID NO: 566713 - DNA, 15 bp, Homo sapiens
gaaggagaggcagga

SEQ ID NO: 566714 - DNA, 15 bp, Homo sapiens
aaggagaggcaggat

SEQ ID NO: 566715 - DNA, 15 bp, Homo sapiens
aggagaggcaggatt

SEQ ID NO: 566716 - DNA, 15 bp, Homo sapiens
ggagaggcaggattt

SEQ ID NO: 566717 - DNA, 15 bp, Homo sapiens
gagaggcaggatttg

SEQ ID NO: 566718 - DNA, 15 bp, Homo sapiens
agaggcaggatttgg

SEQ ID NO: 566719 - DNA, 15 bp, Homo sapiens
gaggcaggatttgga

SEQ ID NO: 566720 - DNA, 15 bp, Homo sapiens
aggcaggatttggac

SEQ ID NO: 566721 - DNA, 15 bp, Homo sapiens
ggcaggatttggacc

SEQ ID NO: 566722 - DNA, 15 bp, Homo sapiens
gcaggatttggacct

SEQ ID NO: 566723 - DNA, 15 bp, Homo sapiens
caggatttggacctg

SEQ ID NO: 566724 - DNA, 15 bp, Homo sapiens
aggatttggacctgt

SEQ ID NO: 566725 - DNA, 15 bp, Homo sapiens
ggatttggacctgtg

SEQ ID NO: 566726 - DNA, 15 bp, Homo sapiens
gatttggacctgtgg

SEQ ID NO: 566727 - DNA, 15 bp, Homo sapiens
atttggacctgtggc

SEQ ID NO: 566728 - DNA, 15 bp, Homo sapiens
tttggacctgtggcg

SEQ ID NO: 566729 - DNA, 15 bp, Homo sapiens
ttggacctgtggcga

SEQ ID NO: 566730 - DNA, 15 bp, Homo sapiens
tggacctgtggcgat

SEQ ID NO: 566731 - DNA, 15 bp, Homo sapiens
ggacctgtggcgata

SEQ ID NO: 566732 - DNA, 15 bp, Homo sapiens
gacctgtggcgatat

SEQ ID NO: 566733 - DNA, 15 bp, Homo sapiens
acctgtggcgatatg

SEQ ID NO: 566734 - DNA, 15 bp, Homo sapiens
cctgtggcgatatgg

SEQ ID NO: 566735 - DNA, 15 bp, Homo sapiens
ctgtggcgatatggg

SEQ ID NO: 566736 - DNA, 15 bp, Homo sapiens
tgtggcgatatgggc

SEQ ID NO: 566737 - DNA, 15 bp, Homo sapiens
gtggcgatatgggct

SEQ ID NO: 566738 - DNA, 15 bp, Homo sapiens
tggcgatatgggctg

SEQ ID NO: 566739 - DNA, 15 bp, Homo sapiens
ggcgatatgggctgg

SEQ ID NO: 566740 - DNA, 15 bp, Homo sapiens
gcgatatgggctggg

SEQ ID NO: 566741 - DNA, 15 bp, Homo sapiens
cgatatgggctgggg

SEQ ID NO: 566742 - DNA, 15 bp, Homo sapiens
gatatgggctgggga

SEQ ID NO: 566743 - DNA, 15 bp, Homo sapiens
atatgggctggggaa

SEQ ID NO: 566744 - DNA, 15 bp, Homo sapiens
tatgggctggggaag

SEQ ID NO: 566745 - DNA, 15 bp, Homo sapiens
atgggctggggaaga

SEQ ID NO: 566746 - DNA, 15 bp, Homo sapiens
tgggctggggaagac

SEQ ID NO: 566747 - DNA, 15 bp, Homo sapiens
gggctggggaagaca

SEQ ID NO: 566748 - DNA, 15 bp, Homo sapiens
ggctggggaagacat

SEQ ID NO: 566749 - DNA, 15 bp, Homo sapiens
gctggggaagacatg

SEQ ID NO: 566750 - DNA, 15 bp, Homo sapiens
ctggggaagacatga

SEQ ID NO: 566751 - DNA, 15 bp, Homo sapiens
tggggaagacatgag

SEQ ID NO: 566752 - DNA, 15 bp, Homo sapiens
ggggaagacatgagc

SEQ ID NO: 566753 - DNA, 15 bp, Homo sapiens
gggaagacatgagct

SEQ ID NO: 566754 - DNA, 15 bp, Homo sapiens
ggaagacatgagctt

SEQ ID NO: 566755 - DNA, 15 bp, Homo sapiens
gaagacatgagcttg

SEQ ID NO: 566756 - DNA, 15 bp, Homo sapiens
aagacatgagcttgg

SEQ ID NO: 566757 - DNA, 15 bp, Homo sapiens
agacatgagcttggc

SEQ ID NO: 566758 - DNA, 15 bp, Homo sapiens
gacatgagcttggca

SEQ ID NO: 566759 - DNA, 15 bp, Homo sapiens
acatgagcttggcat

SEQ ID NO: 566760 - DNA, 15 bp, Homo sapiens
catgagcttggcatg

SEQ ID NO: 566761 - DNA, 15 bp, Homo sapiens
atgagcttggcatgt

SEQ ID NO: 566762 - DNA, 15 bp, Homo sapiens
tgagcttggcatgtc

SEQ ID NO: 566763 - DNA, 15 bp, Homo sapiens
gagcttggcatgtct

SEQ ID NO: 566764 - DNA, 15 bp, Homo sapiens
agcttggcatgtctg

SEQ ID NO: 566765 - DNA, 15 bp, Homo sapiens
gcttggcatgtctga

SEQ ID NO: 566766 - DNA, 15 bp, Homo sapiens
cttggcatgtctgac

SEQ ID NO: 566767 - DNA, 15 bp, Homo sapiens
ttggcatgtctgaca

SEQ ID NO: 566768 - DNA, 15 bp, Homo sapiens
tggcatgtctgacag

SEQ ID NO: 566769 - DNA, 15 bp, Homo sapiens
ggcatgtctgacagt

SEQ ID NO: 566770 - DNA, 15 bp, Homo sapiens
gcatgtctgacagtc

SEQ ID NO: 566771 - DNA, 15 bp, Homo sapiens
catgtctgacagtca

SEQ ID NO: 566772 - DNA, 15 bp, Homo sapiens
atgtctgacagtcag

SEQ ID NO: 566773 - DNA, 15 bp, Homo sapiens
tgtctgacagtcagt

SEQ ID NO: 566774 - DNA, 15 bp, Homo sapiens
gtctgacagtcagtg

SEQ ID NO: 566775 - DNA, 15 bp, Homo sapiens
tctgacagtcagtga

SEQ ID NO: 566776 - DNA, 15 bp, Homo sapiens
ctgacagtcagtgag

SEQ ID NO: 566777 - DNA, 15 bp, Homo sapiens
tgacagtcagtgagg

SEQ ID NO: 566778 - DNA, 15 bp, Homo sapiens
gacagtcagtgagga

SEQ ID NO: 566779 - DNA, 15 bp, Homo sapiens
acagtcagtgaggac

SEQ ID NO: 566780 - DNA, 15 bp, Homo sapiens
cagtcagtgaggacc

SEQ ID NO: 566781 - DNA, 15 bp, Homo sapiens
agtcagtgaggacct

SEQ ID NO: 566782 - DNA, 15 bp, Homo sapiens
gtcagtgaggacctc

SEQ ID NO: 566783 - DNA, 15 bp, Homo sapiens
tcagtgaggacctca

SEQ ID NO: 566784 - DNA, 15 bp, Homo sapiens
cagtgaggacctcag

SEQ ID NO: 566785 - DNA, 15 bp, Homo sapiens
agtgaggacctcagg

SEQ ID NO: 566786 - DNA, 15 bp, Homo sapiens
gtgaggacctcaggt

SEQ ID NO: 566787 - DNA, 15 bp, Homo sapiens
tgaggacctcaggtt

SEQ ID NO: 566788 - DNA, 15 bp, Homo sapiens
gaggacctcaggttc

SEQ ID NO: 566789 - DNA, 15 bp, Homo sapiens
aggacctcaggttcc

SEQ ID NO: 566790 - DNA, 15 bp, Homo sapiens
ggacctcaggttcct

SEQ ID NO: 566791 - DNA, 15 bp, Homo sapiens
gacctcaggttcctg

SEQ ID NO: 566792 - DNA, 15 bp, Homo sapiens
acctcaggttcctgg

SEQ ID NO: 566793 - DNA, 15 bp, Homo sapiens
cctcaggttcctgga

SEQ ID NO: 566794 - DNA, 15 bp, Homo sapiens
ctcaggttcctggag

SEQ ID NO: 566795 - DNA, 15 bp, Homo sapiens
tcaggttcctggagc

SEQ ID NO: 566796 - DNA, 15 bp, Homo sapiens
caggttcctggagct

SEQ ID NO: 566797 - DNA, 15 bp, Homo sapiens
aggttcctggagctt

SEQ ID NO: 566798 - DNA, 15 bp, Homo sapiens
ggttcctggagctta

SEQ ID NO: 566799 - DNA, 15 bp, Homo sapiens
gttcctggagcttag

SEQ ID NO: 566800 - DNA, 15 bp, Homo sapiens
ttcctggagcttagg

SEQ ID NO: 566801 - DNA, 15 bp, Homo sapiens
tcctggagcttagga

SEQ ID NO: 566802 - DNA, 15 bp, Homo sapiens
cctggagcttaggat

SEQ ID NO: 566803 - DNA, 15 bp, Homo sapiens
ctggagcttaggatg

SEQ ID NO: 566804 - DNA, 15 bp, Homo sapiens
tggagcttaggatgt

SEQ ID NO: 566805 - DNA, 15 bp, Homo sapiens
ggagcttaggatgtg

SEQ ID NO: 566806 - DNA, 15 bp, Homo sapiens
gagcttaggatgtgt

SEQ ID NO: 566807 - DNA, 15 bp, Homo sapiens
agcttaggatgtgtg

SEQ ID NO: 566808 - DNA, 15 bp, Homo sapiens
gcttaggatgtgtga

SEQ ID NO: 566809 - DNA, 15 bp, Homo sapiens
cttaggatgtgtgat

SEQ ID NO: 566810 - DNA, 15 bp, Homo sapiens
ttaggatgtgtgatg

SEQ ID NO: 566811 - DNA, 15 bp, Homo sapiens
taggatgtgtgatgc

SEQ ID NO: 566812 - DNA, 15 bp, Homo sapiens
aggatgtgtgatgca

SEQ ID NO: 566813 - DNA, 15 bp, Homo sapiens
ggatgtgtgatgcag

SEQ ID NO: 566814 - DNA, 15 bp, Homo sapiens
gatgtgtgatgcaga

SEQ ID NO: 566815 - DNA, 15 bp, Homo sapiens
atgtgtgatgcagaa

SEQ ID NO: 566816 - DNA, 15 bp, Homo sapiens
tgtgtgatgcagaag

SEQ ID NO: 566817 - DNA, 15 bp, Homo sapiens
gtgtgatgcagaaga

SEQ ID NO: 566818 - DNA, 15 bp, Homo sapiens
tgtgatgcagaagaa

SEQ ID NO: 566819 - DNA, 15 bp, Homo sapiens
gtgatgcagaagaag

SEQ ID NO: 566820 - DNA, 15 bp, Homo sapiens
tgatgcagaagaagt

SEQ ID NO: 566821 - DNA, 15 bp, Homo sapiens
gatgcagaagaagtc

SEQ ID NO: 566822 - DNA, 15 bp, Homo sapiens
atgcagaagaagtct

SEQ ID NO: 566823 - DNA, 15 bp, Homo sapiens
tgcagaagaagtctg

SEQ ID NO: 566824 - DNA, 15 bp, Homo sapiens
gcagaagaagtctgg

SEQ ID NO: 566825 - DNA, 15 bp, Homo sapiens
cagaagaagtctgga

SEQ ID NO: 566826 - DNA, 15 bp, Homo sapiens
agaagaagtctggaa

SEQ ID NO: 566827 - DNA, 15 bp, Homo sapiens
gaagaagtctggaaa

SEQ ID NO: 566828 - DNA, 15 bp, Homo sapiens
aagaagtctggaaag

SEQ ID NO: 566829 - DNA, 15 bp, Homo sapiens
agaagtctggaaagg

SEQ ID NO: 566830 - DNA, 15 bp, Homo sapiens
gaagtctggaaaggt

SEQ ID NO: 566831 - DNA, 15 bp, Homo sapiens
aagtctggaaaggta

SEQ ID NO: 566832 - DNA, 15 bp, Homo sapiens
agtctggaaaggtaa

SEQ ID NO: 566833 - DNA, 15 bp, Homo sapiens
gtctggaaaggtaag

SEQ ID NO: 566834 - DNA, 15 bp, Homo sapiens
tctggaaaggtaaga

SEQ ID NO: 566835 - DNA, 15 bp, Homo sapiens
ctggaaaggtaagaa

SEQ ID NO: 566836 - DNA, 15 bp, Homo sapiens
tggaaaggtaagaaa

SEQ ID NO: 566837 - DNA, 15 bp, Homo sapiens
ggaaaggtaagaaac

SEQ ID NO: 566838 - DNA, 15 bp, Homo sapiens
gaaaggtaagaaaca

SEQ ID NO: 566839 - DNA, 15 bp, Homo sapiens
aaaggtaagaaacag

SEQ ID NO: 566840 - DNA, 15 bp, Homo sapiens
aaggtaagaaacaga

SEQ ID NO: 566841 - DNA, 15 bp, Homo sapiens
aggtaagaaacagaa

SEQ ID NO: 566842 - DNA, 15 bp, Homo sapiens
ggtaagaaacagaat

SEQ ID NO: 566843 - DNA, 15 bp, Homo sapiens
gtaagaaacagaatt

SEQ ID NO: 566844 - DNA, 15 bp, Homo sapiens
taagaaacagaattg

SEQ ID NO: 566845 - DNA, 15 bp, Homo sapiens
aagaaacagaattgt

SEQ ID NO: 566846 - DNA, 15 bp, Homo sapiens
agaaacagaattgta

SEQ ID NO: 566847 - DNA, 15 bp, Homo sapiens
gaaacagaattgtaa

SEQ ID NO: 566848 - DNA, 15 bp, Homo sapiens
aaacagaattgtaaa

SEQ ID NO: 566849 - DNA, 15 bp, Homo sapiens
aacagaattgtaaat

SEQ ID NO: 566850 - DNA, 15 bp, Homo sapiens
acagaattgtaaatg

SEQ ID NO: 566851 - DNA, 15 bp, Homo sapiens
cagaattgtaaatga

SEQ ID NO: 566852 - DNA, 15 bp, Homo sapiens
agaattgtaaatgat

SEQ ID NO: 566853 - DNA, 15 bp, Homo sapiens
gaattgtaaatgatg

SEQ ID NO: 566854 - DNA, 15 bp, Homo sapiens
aattgtaaatgatgc

SEQ ID NO: 566855 - DNA, 15 bp, Homo sapiens
attgtaaatgatgct

SEQ ID NO: 566856 - DNA, 15 bp, Homo sapiens
ttgtaaatgatgcta

SEQ ID NO: 566857 - DNA, 15 bp, Homo sapiens
tgtaaatgatgctat

SEQ ID NO: 566858 - DNA, 15 bp, Homo sapiens
gtaaatgatgctatg

SEQ ID NO: 566859 - DNA, 15 bp, Homo sapiens
taaatgatgctatga

SEQ ID NO: 566860 - DNA, 15 bp, Homo sapiens
aaatgatgctatgaa

SEQ ID NO: 566861 - DNA, 15 bp, Homo sapiens
aatgatgctatgaag

SEQ ID NO: 566862 - DNA, 15 bp, Homo sapiens
atgatgctatgaaga

SEQ ID NO: 566863 - DNA, 15 bp, Homo sapiens
tgatgctatgaagat

SEQ ID NO: 566864 - DNA, 15 bp, Homo sapiens
gatgctatgaagata

SEQ ID NO: 566865 - DNA, 15 bp, Homo sapiens
atgctatgaagatat

SEQ ID NO: 566866 - DNA, 15 bp, Homo sapiens
tgctatgaagatatg

SEQ ID NO: 566867 - DNA, 15 bp, Homo sapiens
gctatgaagatatgc

SEQ ID NO: 566868 - DNA, 15 bp, Homo sapiens
ctatgaagatatgcc

SEQ ID NO: 566869 - DNA, 15 bp, Homo sapiens
tatgaagatatgcct

SEQ ID NO: 566870 - DNA, 15 bp, Homo sapiens
atgaagatatgcctt

SEQ ID NO: 566871 - DNA, 15 bp, Homo sapiens
tgaagatatgcctta

SEQ ID NO: 566872 - DNA, 15 bp, Homo sapiens
gaagatatgccttag

SEQ ID NO: 566873 - DNA, 15 bp, Homo sapiens
aagatatgccttagt

SEQ ID NO: 566874 - DNA, 15 bp, Homo sapiens
agatatgccttagtt

SEQ ID NO: 566875 - DNA, 15 bp, Homo sapiens
gatatgccttagttc

SEQ ID NO: 566876 - DNA, 15 bp, Homo sapiens
atatgccttagttct

SEQ ID NO: 566877 - DNA, 15 bp, Homo sapiens
tatgccttagttctt

SEQ ID NO: 566878 - DNA, 15 bp, Homo sapiens
atgccttagttcttt

SEQ ID NO: 566879 - DNA, 15 bp, Homo sapiens
tgccttagttcttta

SEQ ID NO: 566880 - DNA, 15 bp, Homo sapiens
gccttagttctttag

SEQ ID NO: 566881 - DNA, 15 bp, Homo sapiens
ccttagttctttagg

SEQ ID NO: 566882 - DNA, 15 bp, Homo sapiens
cttagttctttaggc

SEQ ID NO: 566883 - DNA, 15 bp, Homo sapiens
ttagttctttaggca

SEQ ID NO: 566884 - DNA, 15 bp, Homo sapiens
tagttctttaggcaa

SEQ ID NO: 566885 - DNA, 15 bp, Homo sapiens
agttctttaggcaat

SEQ ID NO: 566886 - DNA, 15 bp, Homo sapiens
gttctttaggcaatg

SEQ ID NO: 566887 - DNA, 15 bp, Homo sapiens
ttctttaggcaatga

SEQ ID NO: 566888 - DNA, 15 bp, Homo sapiens
tctttaggcaatgaa

SEQ ID NO: 566889 - DNA, 15 bp, Homo sapiens
ctttaggcaatgaag

SEQ ID NO: 566890 - DNA, 15 bp, Homo sapiens
tttaggcaatgaaga

SEQ ID NO: 566891 - DNA, 15 bp, Homo sapiens
ttaggcaatgaagag

SEQ ID NO: 566892 - DNA, 15 bp, Homo sapiens
taggcaatgaagagt

SEQ ID NO: 566893 - DNA, 15 bp, Homo sapiens
aggcaatgaagagtc

SEQ ID NO: 566894 - DNA, 15 bp, Homo sapiens
ggcaatgaagagtca

SEQ ID NO: 566895 - DNA, 15 bp, Homo sapiens
gcaatgaagagtcac

SEQ ID NO: 566896 - DNA, 15 bp, Homo sapiens
caatgaagagtcact

SEQ ID NO: 566897 - DNA, 15 bp, Homo sapiens
aatgaagagtcacta

SEQ ID NO: 566898 - DNA, 15 bp, Homo sapiens
atgaagagtcactaa

SEQ ID NO: 566899 - DNA, 15 bp, Homo sapiens
tgaagagtcactaag

SEQ ID NO: 566900 - DNA, 15 bp, Homo sapiens
gaagagtcactaagg

SEQ ID NO: 566901 - DNA, 15 bp, Homo sapiens
aagagtcactaaggt

SEQ ID NO: 566902 - DNA, 15 bp, Homo sapiens
agagtcactaaggtt

SEQ ID NO: 566903 - DNA, 15 bp, Homo sapiens
gagtcactaaggttt

SEQ ID NO: 566904 - DNA, 15 bp, Homo sapiens
agtcactaaggtttt

SEQ ID NO: 566905 - DNA, 15 bp, Homo sapiens
gtcactaaggttttg

SEQ ID NO: 566906 - DNA, 15 bp, Homo sapiens
tcactaaggttttga

SEQ ID NO: 566907 - DNA, 15 bp, Homo sapiens
cactaaggttttgaa

SEQ ID NO: 566908 - DNA, 15 bp, Homo sapiens
actaaggttttgaac

SEQ ID NO: 566909 - DNA, 15 bp, Homo sapiens
ctaaggttttgaaca

SEQ ID NO: 566910 - DNA, 15 bp, Homo sapiens
taaggttttgaacac

SEQ ID NO: 566911 - DNA, 15 bp, Homo sapiens
aaggttttgaacact

SEQ ID NO: 566912 - DNA, 15 bp, Homo sapiens
aggttttgaacactg

SEQ ID NO: 566913 - DNA, 15 bp, Homo sapiens
ggttttgaacactgg

SEQ ID NO: 566914 - DNA, 15 bp, Homo sapiens
gttttgaacactggc

SEQ ID NO: 566915 - DNA, 15 bp, Homo sapiens
ttttgaacactggcg

SEQ ID NO: 566916 - DNA, 15 bp, Homo sapiens
tttgaacactggcgt

SEQ ID NO: 566917 - DNA, 15 bp, Homo sapiens
ttgaacactggcgtg

SEQ ID NO: 566918 - DNA, 15 bp, Homo sapiens
tgaacactggcgtgt

SEQ ID NO: 566919 - DNA, 15 bp, Homo sapiens
gaacactggcgtgta

SEQ ID NO: 566920 - DNA, 15 bp, Homo sapiens
aacactggcgtgtat

SEQ ID NO: 566921 - DNA, 15 bp, Homo sapiens
acactggcgtgtatg

SEQ ID NO: 566922 - DNA, 15 bp, Homo sapiens
cactggcgtgtatgg

SEQ ID NO: 566923 - DNA, 15 bp, Homo sapiens
actggcgtgtatggt

SEQ ID NO: 566924 - DNA, 15 bp, Homo sapiens
ctggcgtgtatggtg

SEQ ID NO: 566925 - DNA, 15 bp, Homo sapiens
tggcgtgtatggtgg

SEQ ID NO: 566926 - DNA, 15 bp, Homo sapiens
ggcgtgtatggtggg

SEQ ID NO: 566927 - DNA, 15 bp, Homo sapiens
gcgtgtatggtgggt

SEQ ID NO: 566928 - DNA, 15 bp, Homo sapiens
cgtgtatggtgggtt

SEQ ID NO: 566929 - DNA, 15 bp, Homo sapiens
gtgtatggtgggttg

SEQ ID NO: 566930 - DNA, 15 bp, Homo sapiens
tgtatggtgggttgt

SEQ ID NO: 566931 - DNA, 15 bp, Homo sapiens
gtatggtgggttgtg

SEQ ID NO: 566932 - DNA, 15 bp, Homo sapiens
tatggtgggttgtgg

SEQ ID NO: 566933 - DNA, 15 bp, Homo sapiens
atggtgggttgtggg

SEQ ID NO: 566934 - DNA, 15 bp, Homo sapiens
tggtgggttgtgggg

SEQ ID NO: 566935 - DNA, 15 bp, Homo sapiens
ggtgggttgtgggga

SEQ ID NO: 566936 - DNA, 15 bp, Homo sapiens
gtgggttgtggggag

SEQ ID NO: 566937 - DNA, 15 bp, Homo sapiens
tgggttgtggggaga

SEQ ID NO: 566938 - DNA, 15 bp, Homo sapiens
gggttgtggggagac

SEQ ID NO: 566939 - DNA, 15 bp, Homo sapiens
ggttgtggggagaca

SEQ ID NO: 566940 - DNA, 15 bp, Homo sapiens
gttgtggggagacag

SEQ ID NO: 566941 - DNA, 15 bp, Homo sapiens
ttgtggggagacaga

SEQ ID NO: 566942 - DNA, 15 bp, Homo sapiens
tgtggggagacagaa

SEQ ID NO: 566943 - DNA, 15 bp, Homo sapiens
gtggggagacagaag

SEQ ID NO: 566944 - DNA, 15 bp, Homo sapiens
tggggagacagaaga

SEQ ID NO: 566945 - DNA, 15 bp, Homo sapiens
ggggagacagaagag

SEQ ID NO: 566946 - DNA, 15 bp, Homo sapiens
gggagacagaagagt

SEQ ID NO: 566947 - DNA, 15 bp, Homo sapiens
ggagacagaagagta

SEQ ID NO: 566948 - DNA, 15 bp, Homo sapiens
gagacagaagagtaa

SEQ ID NO: 566949 - DNA, 15 bp, Homo sapiens
agacagaagagtaat

SEQ ID NO: 566950 - DNA, 15 bp, Homo sapiens
gacagaagagtaatg

SEQ ID NO: 566951 - DNA, 15 bp, Homo sapiens
acagaagagtaatga

SEQ ID NO: 566952 - DNA, 15 bp, Homo sapiens
cagaagagtaatgag

SEQ ID NO: 566953 - DNA, 15 bp, Homo sapiens
agaagagtaatgagg

SEQ ID NO: 566954 - DNA, 15 bp, Homo sapiens
gaagagtaatgagga

SEQ ID NO: 566955 - DNA, 15 bp, Homo sapiens
aagagtaatgaggac

SEQ ID NO: 566956 - DNA, 15 bp, Homo sapiens
agagtaatgaggaca

SEQ ID NO: 566957 - DNA, 15 bp, Homo sapiens
gagtaatgaggacac

SEQ ID NO: 566958 - DNA, 15 bp, Homo sapiens
agtaatgaggacacc

SEQ ID NO: 566959 - DNA, 15 bp, Homo sapiens
gtaatgaggacacca

SEQ ID NO: 566960 - DNA, 15 bp, Homo sapiens
taatgaggacaccag

SEQ ID NO: 566961 - DNA, 15 bp, Homo sapiens
aatgaggacaccagt

SEQ ID NO: 566962 - DNA, 15 bp, Homo sapiens
atgaggacaccagtc

SEQ ID NO: 566963 - DNA, 15 bp, Homo sapiens
tgaggacaccagtca

SEQ ID NO: 566964 - DNA, 15 bp, Homo sapiens
gaggacaccagtcag

SEQ ID NO: 566965 - DNA, 15 bp, Homo sapiens
aggacaccagtcaga

SEQ ID NO: 566966 - DNA, 15 bp, Homo sapiens
ggacaccagtcagac

SEQ ID NO: 566967 - DNA, 15 bp, Homo sapiens
gacaccagtcagact

SEQ ID NO: 566968 - DNA, 15 bp, Homo sapiens
acaccagtcagacta

SEQ ID NO: 566969 - DNA, 15 bp, Homo sapiens
caccagtcagactaa

SEQ ID NO: 566970 - DNA, 15 bp, Homo sapiens
accagtcagactaag

SEQ ID NO: 566971 - DNA, 15 bp, Homo sapiens
ccagtcagactaagc

SEQ ID NO: 566972 - DNA, 15 bp, Homo sapiens
cagtcagactaagcc

SEQ ID NO: 566973 - DNA, 15 bp, Homo sapiens
agtcagactaagcca

SEQ ID NO: 566974 - DNA, 15 bp, Homo sapiens
gtcagactaagccag

SEQ ID NO: 566975 - DNA, 15 bp, Homo sapiens
tcagactaagccaga

SEQ ID NO: 566976 - DNA, 15 bp, Homo sapiens
cagactaagccagaa

SEQ ID NO: 566977 - DNA, 15 bp, Homo sapiens
agactaagccagaaa

SEQ ID NO: 566978 - DNA, 15 bp, Homo sapiens
gactaagccagaaac

SEQ ID NO: 566979 - DNA, 15 bp, Homo sapiens
actaagccagaaacc

SEQ ID NO: 566980 - DNA, 15 bp, Homo sapiens
ctaagccagaaacca

SEQ ID NO: 566981 - DNA, 15 bp, Homo sapiens
taagccagaaaccat

SEQ ID NO: 566982 - DNA, 15 bp, Homo sapiens
aagccagaaaccatg

SEQ ID NO: 566983 - DNA, 15 bp, Homo sapiens
agccagaaaccatgc

SEQ ID NO: 566984 - DNA, 15 bp, Homo sapiens
gccagaaaccatgca

SEQ ID NO: 566985 - DNA, 15 bp, Homo sapiens
ccagaaaccatgcaa

SEQ ID NO: 566986 - DNA, 15 bp, Homo sapiens
cagaaaccatgcaag

SEQ ID NO: 566987 - DNA, 15 bp, Homo sapiens
agaaaccatgcaaga

SEQ ID NO: 566988 - DNA, 15 bp, Homo sapiens
gaaaccatgcaagaa

SEQ ID NO: 566989 - DNA, 15 bp, Homo sapiens
aaaccatgcaagaag

SEQ ID NO: 566990 - DNA, 15 bp, Homo sapiens
aaccatgcaagaagc

SEQ ID NO: 566991 - DNA, 15 bp, Homo sapiens
accatgcaagaagca

SEQ ID NO: 566992 - DNA, 15 bp, Homo sapiens
ccatgcaagaagcaa

SEQ ID NO: 566993 - DNA, 15 bp, Homo sapiens
catgcaagaagcaat

SEQ ID NO: 566994 - DNA, 15 bp, Homo sapiens
atgcaagaagcaata

SEQ ID NO: 566995 - DNA, 15 bp, Homo sapiens
tgcaagaagcaatac

SEQ ID NO: 566996 - DNA, 15 bp, Homo sapiens
gcaagaagcaataca

SEQ ID NO: 566997 - DNA, 15 bp, Homo sapiens
caagaagcaatacag

SEQ ID NO: 566998 - DNA, 15 bp, Homo sapiens
aagaagcaatacaga

SEQ ID NO: 566999 - DNA, 15 bp, Homo sapiens
agaagcaatacagat

SEQ ID NO: 567000 - DNA, 15 bp, Homo sapiens
gaagcaatacagatc

SEQ ID NO: 567001 - DNA, 15 bp, Homo sapiens
aagcaatacagatct

SEQ ID NO: 567002 - DNA, 15 bp, Homo sapiens
agcaatacagatctg

SEQ ID NO: 567003 - DNA, 15 bp, Homo sapiens
gcaatacagatctgt

SEQ ID NO: 567004 - DNA, 15 bp, Homo sapiens
caatacagatctgtg

SEQ ID NO: 567005 - DNA, 15 bp, Homo sapiens
aatacagatctgtga

SEQ ID NO: 567006 - DNA, 15 bp, Homo sapiens
atacagatctgtgat

SEQ ID NO: 567007 - DNA, 15 bp, Homo sapiens
tacagatctgtgatg

SEQ ID NO: 567008 - DNA, 15 bp, Homo sapiens
acagatctgtgatgc

SEQ ID NO: 567009 - DNA, 15 bp, Homo sapiens
cagatctgtgatgca

SEQ ID NO: 567010 - DNA, 15 bp, Homo sapiens
agatctgtgatgcag

SEQ ID NO: 567011 - DNA, 15 bp, Homo sapiens
gatctgtgatgcaga

SEQ ID NO: 567012 - DNA, 15 bp, Homo sapiens
atctgtgatgcagaa

SEQ ID NO: 567013 - DNA, 15 bp, Homo sapiens
tctgtgatgcagaag

SEQ ID NO: 567014 - DNA, 15 bp, Homo sapiens
ctgtgatgcagaagt

SEQ ID NO: 567015 - DNA, 15 bp, Homo sapiens
tgtgatgcagaagtg

SEQ ID NO: 567016 - DNA, 15 bp, Homo sapiens
gtgatgcagaagtga

SEQ ID NO: 567017 - DNA, 15 bp, Homo sapiens
tgatgcagaagtgat

SEQ ID NO: 567018 - DNA, 15 bp, Homo sapiens
gatgcagaagtgatc

SEQ ID NO: 567019 - DNA, 15 bp, Homo sapiens
atgcagaagtgatca

SEQ ID NO: 567020 - DNA, 15 bp, Homo sapiens
tgcagaagtgatcat

SEQ ID NO: 567021 - DNA, 15 bp, Homo sapiens
gcagaagtgatcatg

SEQ ID NO: 567022 - DNA, 15 bp, Homo sapiens
cagaagtgatcatgg

SEQ ID NO: 567023 - DNA, 15 bp, Homo sapiens
agaagtgatcatggg

SEQ ID NO: 567024 - DNA, 15 bp, Homo sapiens
gaagtgatcatggga

SEQ ID NO: 567025 - DNA, 15 bp, Homo sapiens
aagtgatcatgggaa

SEQ ID NO: 567026 - DNA, 15 bp, Homo sapiens
agtgatcatgggaat

SEQ ID NO: 567027 - DNA, 15 bp, Homo sapiens
gtgatcatgggaatg

SEQ ID NO: 567028 - DNA, 15 bp, Homo sapiens
tgatcatgggaatgg

SEQ ID NO: 567029 - DNA, 15 bp, Homo sapiens
gatcatgggaatgga

SEQ ID NO: 567030 - DNA, 15 bp, Homo sapiens
atcatgggaatggaa

SEQ ID NO: 567031 - DNA, 15 bp, Homo sapiens
tcatgggaatggaag

SEQ ID NO: 567032 - DNA, 15 bp, Homo sapiens
catgggaatggaagg

SEQ ID NO: 567033 - DNA, 15 bp, Homo sapiens
atgggaatggaaggg

SEQ ID NO: 567034 - DNA, 15 bp, Homo sapiens
tgggaatggaagggg

SEQ ID NO: 567035 - DNA, 15 bp, Homo sapiens
gggaatggaaggggt

SEQ ID NO: 567036 - DNA, 15 bp, Homo sapiens
ggaatggaaggggtg

SEQ ID NO: 567037 - DNA, 15 bp, Homo sapiens
gaatggaaggggtgt

SEQ ID NO: 567038 - DNA, 15 bp, Homo sapiens
aatggaaggggtgtg

SEQ ID NO: 567039 - DNA, 15 bp, Homo sapiens
atggaaggggtgtgt

SEQ ID NO: 567040 - DNA, 15 bp, Homo sapiens
tggaaggggtgtgtg

SEQ ID NO: 567041 - DNA, 15 bp, Homo sapiens
ggaaggggtgtgtga

SEQ ID NO: 567042 - DNA, 15 bp, Homo sapiens
gaaggggtgtgtgag

SEQ ID NO: 567043 - DNA, 15 bp, Homo sapiens
aaggggtgtgtgaga

SEQ ID NO: 567044 - DNA, 15 bp, Homo sapiens
aggggtgtgtgagag

SEQ ID NO: 567045 - DNA, 15 bp, Homo sapiens
ggggtgtgtgagaga

SEQ ID NO: 567046 - DNA, 15 bp, Homo sapiens
gggtgtgtgagagat

SEQ ID NO: 567047 - DNA, 15 bp, Homo sapiens
ggtgtgtgagagata

SEQ ID NO: 567048 - DNA, 15 bp, Homo sapiens
gtgtgtgagagatac

SEQ ID NO: 567049 - DNA, 15 bp, Homo sapiens
tgtgtgagagatacc

SEQ ID NO: 567050 - DNA, 15 bp, Homo sapiens
gtgtgagagatacca

SEQ ID NO: 567051 - DNA, 15 bp, Homo sapiens
tgtgagagataccaa

SEQ ID NO: 567052 - DNA, 15 bp, Homo sapiens
gtgagagataccaag

SEQ ID NO: 567053 - DNA, 15 bp, Homo sapiens
tgagagataccaagg

SEQ ID NO: 567054 - DNA, 15 bp, Homo sapiens
gagagataccaagga

SEQ ID NO: 567055 - DNA, 15 bp, Homo sapiens
agagataccaaggag

SEQ ID NO: 567056 - DNA, 15 bp, Homo sapiens
gagataccaaggagg

SEQ ID NO: 567057 - DNA, 15 bp, Homo sapiens
agataccaaggagga

SEQ ID NO: 567058 - DNA, 15 bp, Homo sapiens
gataccaaggaggaa

SEQ ID NO: 567059 - DNA, 15 bp, Homo sapiens
ataccaaggaggaaa

SEQ ID NO: 567060 - DNA, 15 bp, Homo sapiens
taccaaggaggaaac

SEQ ID NO: 567061 - DNA, 15 bp, Homo sapiens
accaaggaggaaact

SEQ ID NO: 567062 - DNA, 15 bp, Homo sapiens
ccaaggaggaaactc

SEQ ID NO: 567063 - DNA, 15 bp, Homo sapiens
caaggaggaaactca

SEQ ID NO: 567064 - DNA, 15 bp, Homo sapiens
aaggaggaaactcac

SEQ ID NO: 567065 - DNA, 15 bp, Homo sapiens
aggaggaaactcaca

SEQ ID NO: 567066 - DNA, 15 bp, Homo sapiens
ggaggaaactcacaa

SEQ ID NO: 567067 - DNA, 15 bp, Homo sapiens
gaggaaactcacaag

SEQ ID NO: 567068 - DNA, 15 bp, Homo sapiens
aggaaactcacaaga

SEQ ID NO: 567069 - DNA, 15 bp, Homo sapiens
ggaaactcacaagac

SEQ ID NO: 567070 - DNA, 15 bp, Homo sapiens
gaaactcacaagaca

SEQ ID NO: 567071 - DNA, 15 bp, Homo sapiens
aaactcacaagacag

SEQ ID NO: 567072 - DNA, 15 bp, Homo sapiens
aactcacaagacagg

SEQ ID NO: 567073 - DNA, 15 bp, Homo sapiens
actcacaagacaggg

SEQ ID NO: 567074 - DNA, 15 bp, Homo sapiens
ctcacaagacaggga

SEQ ID NO: 567075 - DNA, 15 bp, Homo sapiens
tcacaagacagggac

SEQ ID NO: 567076 - DNA, 15 bp, Homo sapiens
cacaagacagggaca

SEQ ID NO: 567077 - DNA, 15 bp, Homo sapiens
acaagacagggacac

SEQ ID NO: 567078 - DNA, 15 bp, Homo sapiens
caagacagggacacc

SEQ ID NO: 567079 - DNA, 15 bp, Homo sapiens
aagacagggacacca

SEQ ID NO: 567080 - DNA, 15 bp, Homo sapiens
agacagggacaccag

SEQ ID NO: 567081 - DNA, 15 bp, Homo sapiens
gacagggacaccagg

SEQ ID NO: 567082 - DNA, 15 bp, Homo sapiens
acagggacaccagga

SEQ ID NO: 567083 - DNA, 15 bp, Homo sapiens
cagggacaccaggaa

SEQ ID NO: 567084 - DNA, 15 bp, Homo sapiens
agggacaccaggaag

SEQ ID NO: 567085 - DNA, 15 bp, Homo sapiens
gggacaccaggaagc

SEQ ID NO: 567086 - DNA, 15 bp, Homo sapiens
ggacaccaggaagca

SEQ ID NO: 567087 - DNA, 15 bp, Homo sapiens
gacaccaggaagcag

SEQ ID NO: 567088 - DNA, 15 bp, Homo sapiens
acaccaggaagcagc

SEQ ID NO: 567089 - DNA, 15 bp, Homo sapiens
caccaggaagcagct

SEQ ID NO: 567090 - DNA, 15 bp, Homo sapiens
accaggaagcagctg

SEQ ID NO: 567091 - DNA, 15 bp, Homo sapiens
ccaggaagcagctga

SEQ ID NO: 567092 - DNA, 15 bp, Homo sapiens
caggaagcagctgat

SEQ ID NO: 567093 - DNA, 15 bp, Homo sapiens
aggaagcagctgatc

SEQ ID NO: 567094 - DNA, 15 bp, Homo sapiens
ggaagcagctgatct

SEQ ID NO: 567095 - DNA, 15 bp, Homo sapiens
gaagcagctgatctt

SEQ ID NO: 567096 - DNA, 15 bp, Homo sapiens
aagcagctgatcttt

SEQ ID NO: 567097 - DNA, 15 bp, Homo sapiens
agcagctgatctttg

SEQ ID NO: 567098 - DNA, 15 bp, Homo sapiens
gcagctgatctttgc

SEQ ID NO: 567099 - DNA, 15 bp, Homo sapiens
cagctgatctttgct

SEQ ID NO: 567100 - DNA, 15 bp, Homo sapiens
agctgatctttgctc

SEQ ID NO: 567101 - DNA, 15 bp, Homo sapiens
gctgatctttgctca

SEQ ID NO: 567102 - DNA, 15 bp, Homo sapiens
ctgatctttgctcag

SEQ ID NO: 567103 - DNA, 15 bp, Homo sapiens
tgatctttgctcaga

SEQ ID NO: 567104 - DNA, 15 bp, Homo sapiens
gatctttgctcagat

SEQ ID NO: 567105 - DNA, 15 bp, Homo sapiens
atctttgctcagatg

SEQ ID NO: 567106 - DNA, 15 bp, Homo sapiens
tctttgctcagatgt

SEQ ID NO: 567107 - DNA, 15 bp, Homo sapiens
ctttgctcagatgtc

SEQ ID NO: 567108 - DNA, 15 bp, Homo sapiens
tttgctcagatgtca

SEQ ID NO: 567109 - DNA, 15 bp, Homo sapiens
ttgctcagatgtcac

SEQ ID NO: 567110 - DNA, 15 bp, Homo sapiens
tgctcagatgtcact

SEQ ID NO: 567111 - DNA, 15 bp, Homo sapiens
gctcagatgtcactt

SEQ ID NO: 567112 - DNA, 15 bp, Homo sapiens
ctcagatgtcacttt

SEQ ID NO: 567113 - DNA, 15 bp, Homo sapiens
tcagatgtcactttc

SEQ ID NO: 567114 - DNA, 15 bp, Homo sapiens
cagatgtcactttct

SEQ ID NO: 567115 - DNA, 15 bp, Homo sapiens
agatgtcactttctc

SEQ ID NO: 567116 - DNA, 15 bp, Homo sapiens
gatgtcactttctca

SEQ ID NO: 567117 - DNA, 15 bp, Homo sapiens
atgtcactttctcag

SEQ ID NO: 567118 - DNA, 15 bp, Homo sapiens
tgtcactttctcagt

SEQ ID NO: 567119 - DNA, 15 bp, Homo sapiens
gtcactttctcagta

SEQ ID NO: 567120 - DNA, 15 bp, Homo sapiens
tcactttctcagtaa

SEQ ID NO: 567121 - DNA, 15 bp, Homo sapiens
cactttctcagtaag

SEQ ID NO: 567122 - DNA, 15 bp, Homo sapiens
actttctcagtaagg

SEQ ID NO: 567123 - DNA, 15 bp, Homo sapiens
ctttctcagtaagga

SEQ ID NO: 567124 - DNA, 15 bp, Homo sapiens
tttctcagtaaggac

SEQ ID NO: 567125 - DNA, 15 bp, Homo sapiens
ttctcagtaaggact

SEQ ID NO: 567126 - DNA, 15 bp, Homo sapiens
tctcagtaaggactt

SEQ ID NO: 567127 - DNA, 15 bp, Homo sapiens
ctcagtaaggacttc

SEQ ID NO: 567128 - DNA, 15 bp, Homo sapiens
tcagtaaggacttct

SEQ ID NO: 567129 - DNA, 15 bp, Homo sapiens
cagtaaggacttctc

SEQ ID NO: 567130 - DNA, 15 bp, Homo sapiens
agtaaggacttctct

SEQ ID NO: 567131 - DNA, 15 bp, Homo sapiens
gtaaggacttctcta

SEQ ID NO: 567132 - DNA, 15 bp, Homo sapiens
taaggacttctctaa

SEQ ID NO: 567133 - DNA, 15 bp, Homo sapiens
aaggacttctctaac

SEQ ID NO: 567134 - DNA, 15 bp, Homo sapiens
aggacttctctaact

SEQ ID NO: 567135 - DNA, 15 bp, Homo sapiens
ggacttctctaactt

SEQ ID NO: 567136 - DNA, 15 bp, Homo sapiens
gacttctctaacttt

SEQ ID NO: 567137 - DNA, 15 bp, Homo sapiens
acttctctaactttc

SEQ ID NO: 567138 - DNA, 15 bp, Homo sapiens
cttctctaactttcc

SEQ ID NO: 567139 - DNA, 15 bp, Homo sapiens
ttctctaactttccg

SEQ ID NO: 567140 - DNA, 15 bp, Homo sapiens
tctctaactttccga

SEQ ID NO: 567141 - DNA, 15 bp, Homo sapiens
ctctaactttccgat

SEQ ID NO: 567142 - DNA, 15 bp, Homo sapiens
tctaactttccgatt

SEQ ID NO: 567143 - DNA, 15 bp, Homo sapiens
ctaactttccgattt

SEQ ID NO: 567144 - DNA, 15 bp, Homo sapiens
taactttccgatttg

SEQ ID NO: 567145 - DNA, 15 bp, Homo sapiens
aactttccgatttga

SEQ ID NO: 567146 - DNA, 15 bp, Homo sapiens
actttccgatttgaa

SEQ ID NO: 567147 - DNA, 15 bp, Homo sapiens
ctttccgatttgaaa

SEQ ID NO: 567148 - DNA, 15 bp, Homo sapiens
tttccgatttgaaaa

SEQ ID NO: 567149 - DNA, 15 bp, Homo sapiens
ttccgatttgaaaat

SEQ ID NO: 567150 - DNA, 15 bp, Homo sapiens
tccgatttgaaaatg

SEQ ID NO: 567151 - DNA, 15 bp, Homo sapiens
ccgatttgaaaatga

SEQ ID NO: 567152 - DNA, 15 bp, Homo sapiens
cgatttgaaaatgaa

SEQ ID NO: 567153 - DNA, 15 bp, Homo sapiens
gatttgaaaatgaaa

SEQ ID NO: 567154 - DNA, 15 bp, Homo sapiens
atttgaaaatgaaat

SEQ ID NO: 567155 - DNA, 15 bp, Homo sapiens
tttgaaaatgaaatc

SEQ ID NO: 567156 - DNA, 15 bp, Homo sapiens
ttgaaaatgaaatcc

SEQ ID NO: 567157 - DNA, 15 bp, Homo sapiens
tgaaaatgaaatcca

SEQ ID NO: 567158 - DNA, 15 bp, Homo sapiens
gaaaatgaaatccac

SEQ ID NO: 567159 - DNA, 15 bp, Homo sapiens
aaaatgaaatccaca

SEQ ID NO: 567160 - DNA, 15 bp, Homo sapiens
aaatgaaatccacag

SEQ ID NO: 567161 - DNA, 15 bp, Homo sapiens
aatgaaatccacagc

SEQ ID NO: 567162 - DNA, 15 bp, Homo sapiens
atgaaatccacagcc

SEQ ID NO: 567163 - DNA, 15 bp, Homo sapiens
tgaaatccacagcct

SEQ ID NO: 567164 - DNA, 15 bp, Homo sapiens
gaaatccacagcctc

SEQ ID NO: 567165 - DNA, 15 bp, Homo sapiens
aaatccacagcctca

SEQ ID NO: 567166 - DNA, 15 bp, Homo sapiens
aatccacagcctcag

SEQ ID NO: 567167 - DNA, 15 bp, Homo sapiens
atccacagcctcagt

SEQ ID NO: 567168 - DNA, 15 bp, Homo sapiens
tccacagcctcagta

SEQ ID NO: 567169 - DNA, 15 bp, Homo sapiens
ccacagcctcagtac

SEQ ID NO: 567170 - DNA, 15 bp, Homo sapiens
cacagcctcagtacc

SEQ ID NO: 567171 - DNA, 15 bp, Homo sapiens
acagcctcagtacca

SEQ ID NO: 567172 - DNA, 15 bp, Homo sapiens
cagcctcagtaccat

SEQ ID NO: 567173 - DNA, 15 bp, Homo sapiens
agcctcagtaccatc

SEQ ID NO: 567174 - DNA, 15 bp, Homo sapiens
gcctcagtaccatca

SEQ ID NO: 567175 - DNA, 15 bp, Homo sapiens
cctcagtaccatcag

SEQ ID NO: 567176 - DNA, 15 bp, Homo sapiens
ctcagtaccatcagt

SEQ ID NO: 567177 - DNA, 15 bp, Homo sapiens
tcagtaccatcagtg

SEQ ID NO: 567178 - DNA, 15 bp, Homo sapiens
cagtaccatcagtga

SEQ ID NO: 567179 - DNA, 15 bp, Homo sapiens
agtaccatcagtgat

SEQ ID NO: 567180 - DNA, 15 bp, Homo sapiens
gtaccatcagtgatg

SEQ ID NO: 567181 - DNA, 15 bp, Homo sapiens
taccatcagtgatgc

SEQ ID NO: 567182 - DNA, 15 bp, Homo sapiens
accatcagtgatgct

SEQ ID NO: 567183 - DNA, 15 bp, Homo sapiens
ccatcagtgatgcta

SEQ ID NO: 567184 - DNA, 15 bp, Homo sapiens
catcagtgatgctat

SEQ ID NO: 567185 - DNA, 15 bp, Homo sapiens
atcagtgatgctata

SEQ ID NO: 567186 - DNA, 15 bp, Homo sapiens
tcagtgatgctatac

SEQ ID NO: 567187 - DNA, 15 bp, Homo sapiens
cagtgatgctatact

SEQ ID NO: 567188 - DNA, 15 bp, Homo sapiens
agtgatgctatactg

SEQ ID NO: 567189 - DNA, 15 bp, Homo sapiens
gtgatgctatactgt

SEQ ID NO: 567190 - DNA, 15 bp, Homo sapiens
tgatgctatactgtt

SEQ ID NO: 567191 - DNA, 15 bp, Homo sapiens
gatgctatactgtta

SEQ ID NO: 567192 - DNA, 15 bp, Homo sapiens
atgctatactgttag

SEQ ID NO: 567193 - DNA, 15 bp, Homo sapiens
tgctatactgttagt

SEQ ID NO: 567194 - DNA, 15 bp, Homo sapiens
gctatactgttagtt

SEQ ID NO: 567195 - DNA, 15 bp, Homo sapiens
ctatactgttagttt

SEQ ID NO: 567196 - DNA, 15 bp, Homo sapiens
tatactgttagttta

SEQ ID NO: 567197 - DNA, 15 bp, Homo sapiens
atactgttagtttac

SEQ ID NO: 567198 - DNA, 15 bp, Homo sapiens
tactgttagtttact

SEQ ID NO: 567199 - DNA, 15 bp, Homo sapiens
actgttagtttactt

SEQ ID NO: 567200 - DNA, 15 bp, Homo sapiens
ctgttagtttacttt

SEQ ID NO: 567201 - DNA, 15 bp, Homo sapiens
tgttagtttactttt

SEQ ID NO: 567202 - DNA, 15 bp, Homo sapiens
gttagtttacttttt

SEQ ID NO: 567203 - DNA, 15 bp, Homo sapiens
ttagtttacttttta

SEQ ID NO: 567204 - DNA, 15 bp, Homo sapiens
tagtttactttttaa

SEQ ID NO: 567205 - DNA, 15 bp, Homo sapiens
agtttactttttaaa

SEQ ID NO: 567206 - DNA, 15 bp, Homo sapiens
gtttactttttaaaa

SEQ ID NO: 567207 - DNA, 15 bp, Homo sapiens
tttactttttaaaaa

SEQ ID NO: 567208 - DNA, 15 bp, Homo sapiens
ttactttttaaaaat

SEQ ID NO: 567209 - DNA, 15 bp, Homo sapiens
tactttttaaaaatt

SEQ ID NO: 567210 - DNA, 15 bp, Homo sapiens
actttttaaaaattt

SEQ ID NO: 567211 - DNA, 15 bp, Homo sapiens
ctttttaaaaatttg

SEQ ID NO: 567212 - DNA, 15 bp, Homo sapiens
tttttaaaaatttga

SEQ ID NO: 567213 - DNA, 15 bp, Homo sapiens
ttttaaaaatttgaa

SEQ ID NO: 567214 - DNA, 15 bp, Homo sapiens
tttaaaaatttgaaa

SEQ ID NO: 567215 - DNA, 15 bp, Homo sapiens
ttaaaaatttgaaaa

SEQ ID NO: 567216 - DNA, 15 bp, Homo sapiens
taaaaatttgaaaat

SEQ ID NO: 567217 - DNA, 15 bp, Homo sapiens
aaaaatttgaaaatg

SEQ ID NO: 567218 - DNA, 15 bp, Homo sapiens
aaaatttgaaaatga

SEQ ID NO: 567219 - DNA, 15 bp, Homo sapiens
aaatttgaaaatgaa

SEQ ID NO: 567220 - DNA, 15 bp, Homo sapiens
aatttgaaaatgaaa

SEQ ID NO: 567221 - DNA, 15 bp, Homo sapiens
atttgaaaatgaaaa

SEQ ID NO: 567222 - DNA, 15 bp, Homo sapiens
tttgaaaatgaaaag

SEQ ID NO: 567223 - DNA, 15 bp, Homo sapiens
ttgaaaatgaaaagg

SEQ ID NO: 567224 - DNA, 15 bp, Homo sapiens
tgaaaatgaaaaggt

SEQ ID NO: 567225 - DNA, 15 bp, Homo sapiens
gaaaatgaaaaggtg

SEQ ID NO: 567226 - DNA, 15 bp, Homo sapiens
aaaatgaaaaggtga

SEQ ID NO: 567227 - DNA, 15 bp, Homo sapiens
aaatgaaaaggtgac

SEQ ID NO: 567228 - DNA, 15 bp, Homo sapiens
aatgaaaaggtgaca

SEQ ID NO: 567229 - DNA, 15 bp, Homo sapiens
atgaaaaggtgacat

SEQ ID NO: 567230 - DNA, 15 bp, Homo sapiens
tgaaaaggtgacatt

SEQ ID NO: 567231 - DNA, 15 bp, Homo sapiens
gaaaaggtgacattt

SEQ ID NO: 567232 - DNA, 15 bp, Homo sapiens
aaaaggtgacattta

SEQ ID NO: 567233 - DNA, 15 bp, Homo sapiens
aaaggtgacatttaa

SEQ ID NO: 567234 - DNA, 15 bp, Homo sapiens
aaggtgacatttaag

SEQ ID NO: 567235 - DNA, 15 bp, Homo sapiens
aggtgacatttaagc

SEQ ID NO: 567236 - DNA, 15 bp, Homo sapiens
ggtgacatttaagca

SEQ ID NO: 567237 - DNA, 15 bp, Homo sapiens
gtgacatttaagcaa

SEQ ID NO: 567238 - DNA, 15 bp, Homo sapiens
tgacatttaagcaaa

SEQ ID NO: 567239 - DNA, 15 bp, Homo sapiens
gacatttaagcaaag

SEQ ID NO: 567240 - DNA, 15 bp, Homo sapiens
acatttaagcaaaga

SEQ ID NO: 567241 - DNA, 15 bp, Homo sapiens
catttaagcaaagac

SEQ ID NO: 567242 - DNA, 15 bp, Homo sapiens
atttaagcaaagaca

SEQ ID NO: 567243 - DNA, 15 bp, Homo sapiens
tttaagcaaagacaa

SEQ ID NO: 567244 - DNA, 15 bp, Homo sapiens
ttaagcaaagacaaa

SEQ ID NO: 567245 - DNA, 15 bp, Homo sapiens
taagcaaagacaaaa

SEQ ID NO: 567246 - DNA, 15 bp, Homo sapiens
aagcaaagacaaaat

SEQ ID NO: 567247 - DNA, 15 bp, Homo sapiens
agcaaagacaaaatt

SEQ ID NO: 567248 - DNA, 15 bp, Homo sapiens
gcaaagacaaaattt

SEQ ID NO: 567249 - DNA, 15 bp, Homo sapiens
caaagacaaaatttt

SEQ ID NO: 567250 - DNA, 15 bp, Homo sapiens
aaagacaaaatttta

SEQ ID NO: 567251 - DNA, 15 bp, Homo sapiens
aagacaaaattttaa

SEQ ID NO: 567252 - DNA, 15 bp, Homo sapiens
agacaaaattttaag

SEQ ID NO: 567253 - DNA, 15 bp, Homo sapiens
gacaaaattttaaga

SEQ ID NO: 567254 - DNA, 15 bp, Homo sapiens
acaaaattttaagaa

SEQ ID NO: 567255 - DNA, 15 bp, Homo sapiens
caaaattttaagaat

SEQ ID NO: 567256 - DNA, 15 bp, Homo sapiens
aaaattttaagaatt

SEQ ID NO: 567257 - DNA, 15 bp, Homo sapiens
aaattttaagaattt

SEQ ID NO: 567258 - DNA, 15 bp, Homo sapiens
aattttaagaattta

SEQ ID NO: 567259 - DNA, 15 bp, Homo sapiens
attttaagaatttaa

SEQ ID NO: 567260 - DNA, 15 bp, Homo sapiens
ttttaagaatttaaa

SEQ ID NO: 567261 - DNA, 15 bp, Homo sapiens
tttaagaatttaaaa

SEQ ID NO: 567262 - DNA, 15 bp, Homo sapiens
ttaagaatttaaaaa

SEQ ID NO: 567263 - DNA, 15 bp, Homo sapiens
taagaatttaaaaat

SEQ ID NO: 567264 - DNA, 15 bp, Homo sapiens
aagaatttaaaaatg

SEQ ID NO: 567265 - DNA, 15 bp, Homo sapiens
agaatttaaaaatgt

SEQ ID NO: 567266 - DNA, 15 bp, Homo sapiens
gaatttaaaaatgtg

SEQ ID NO: 567267 - DNA, 15 bp, Homo sapiens
aatttaaaaatgtgt

SEQ ID NO: 567268 - DNA, 15 bp, Homo sapiens
atttaaaaatgtgtt

SEQ ID NO: 567269 - DNA, 15 bp, Homo sapiens
tttaaaaatgtgttt

SEQ ID NO: 567270 - DNA, 15 bp, Homo sapiens
ttaaaaatgtgttta

SEQ ID NO: 567271 - DNA, 15 bp, Homo sapiens
taaaaatgtgtttat

SEQ ID NO: 567272 - DNA, 15 bp, Homo sapiens
aaaaatgtgtttatt

SEQ ID NO: 567273 - DNA, 15 bp, Homo sapiens
aaaatgtgtttatta

SEQ ID NO: 567274 - DNA, 15 bp, Homo sapiens
aaatgtgtttattat

SEQ ID NO: 567275 - DNA, 15 bp, Homo sapiens
aatgtgtttattatt

SEQ ID NO: 567276 - DNA, 15 bp, Homo sapiens
atgtgtttattattg

SEQ ID NO: 567277 - DNA, 15 bp, Homo sapiens
tgtgtttattattgt

SEQ ID NO: 567278 - DNA, 15 bp, Homo sapiens
gtgtttattattgtc

SEQ ID NO: 567279 - DNA, 15 bp, Homo sapiens
tgtttattattgtct

SEQ ID NO: 567280 - DNA, 15 bp, Homo sapiens
gtttattattgtctc

SEQ ID NO: 567281 - DNA, 15 bp, Homo sapiens
tttattattgtctct

SEQ ID NO: 567282 - DNA, 15 bp, Homo sapiens
ttattattgtctctc

SEQ ID NO: 567283 - DNA, 15 bp, Homo sapiens
tattattgtctctcc

SEQ ID NO: 567284 - DNA, 15 bp, Homo sapiens
attattgtctctccc

SEQ ID NO: 567285 - DNA, 15 bp, Homo sapiens
ttattgtctctccca

SEQ ID NO: 567286 - DNA, 15 bp, Homo sapiens
tattgtctctcccat

SEQ ID NO: 567287 - DNA, 15 bp, Homo sapiens
attgtctctcccatt

SEQ ID NO: 567288 - DNA, 15 bp, Homo sapiens
ttgtctctcccattg

SEQ ID NO: 567289 - DNA, 15 bp, Homo sapiens
tgtctctcccattgg

SEQ ID NO: 567290 - DNA, 15 bp, Homo sapiens
gtctctcccattgga

SEQ ID NO: 567291 - DNA, 15 bp, Homo sapiens
tctctcccattggaa

SEQ ID NO: 567292 - DNA, 15 bp, Homo sapiens
ctctcccattggaat

SEQ ID NO: 567293 - DNA, 15 bp, Homo sapiens
tctcccattggaatg

SEQ ID NO: 567294 - DNA, 15 bp, Homo sapiens
ctcccattggaatgc

SEQ ID NO: 567295 - DNA, 15 bp, Homo sapiens
tcccattggaatgcg

SEQ ID NO: 567296 - DNA, 15 bp, Homo sapiens
cccattggaatgcga

SEQ ID NO: 567297 - DNA, 15 bp, Homo sapiens
ccattggaatgcgag

SEQ ID NO: 567298 - DNA, 15 bp, Homo sapiens
cattggaatgcgagt

SEQ ID NO: 567299 - DNA, 15 bp, Homo sapiens
attggaatgcgagtt

SEQ ID NO: 567300 - DNA, 15 bp, Homo sapiens
ttggaatgcgagttc

SEQ ID NO: 567301 - DNA, 15 bp, Homo sapiens
tggaatgcgagttct

SEQ ID NO: 567302 - DNA, 15 bp, Homo sapiens
ggaatgcgagttcta

SEQ ID NO: 567303 - DNA, 15 bp, Homo sapiens
gaatgcgagttctac

SEQ ID NO: 567304 - DNA, 15 bp, Homo sapiens
aatgcgagttctacc

SEQ ID NO: 567305 - DNA, 15 bp, Homo sapiens
atgcgagttctacca

SEQ ID NO: 567306 - DNA, 15 bp, Homo sapiens
tgcgagttctaccag

SEQ ID NO: 567307 - DNA, 15 bp, Homo sapiens
gcgagttctaccagg

SEQ ID NO: 567308 - DNA, 15 bp, Homo sapiens
cgagttctaccagga

SEQ ID NO: 567309 - DNA, 15 bp, Homo sapiens
gagttctaccaggaa

SEQ ID NO: 567310 - DNA, 15 bp, Homo sapiens
agttctaccaggaac

SEQ ID NO: 567311 - DNA, 15 bp, Homo sapiens
gttctaccaggaact

SEQ ID NO: 567312 - DNA, 15 bp, Homo sapiens
ttctaccaggaactg

SEQ ID NO: 567313 - DNA, 15 bp, Homo sapiens
tctaccaggaactgc

SEQ ID NO: 567314 - DNA, 15 bp, Homo sapiens
ctaccaggaactgct

SEQ ID NO: 567315 - DNA, 15 bp, Homo sapiens
taccaggaactgctt

SEQ ID NO: 567316 - DNA, 15 bp, Homo sapiens
accaggaactgcttg

SEQ ID NO: 567317 - DNA, 15 bp, Homo sapiens
ccaggaactgcttgt

SEQ ID NO: 567318 - DNA, 15 bp, Homo sapiens
caggaactgcttgtt

SEQ ID NO: 567319 - DNA, 15 bp, Homo sapiens
aggaactgcttgttc

SEQ ID NO: 567320 - DNA, 15 bp, Homo sapiens
ggaactgcttgttca

SEQ ID NO: 567321 - DNA, 15 bp, Homo sapiens
gaactgcttgttcat

SEQ ID NO: 567322 - DNA, 15 bp, Homo sapiens
aactgcttgttcatt

SEQ ID NO: 567323 - DNA, 15 bp, Homo sapiens
actgcttgttcattc

SEQ ID NO: 567324 - DNA, 15 bp, Homo sapiens
ctgcttgttcattcc

SEQ ID NO: 567325 - DNA, 15 bp, Homo sapiens
tgcttgttcattcct

SEQ ID NO: 567326 - DNA, 15 bp, Homo sapiens
gcttgttcattcctg

SEQ ID NO: 567327 - DNA, 15 bp, Homo sapiens
cttgttcattcctga

SEQ ID NO: 567328 - DNA, 15 bp, Homo sapiens
ttgttcattcctgaa

SEQ ID NO: 567329 - DNA, 15 bp, Homo sapiens
tgttcattcctgaat

SEQ ID NO: 567330 - DNA, 15 bp, Homo sapiens
gttcattcctgaatc

SEQ ID NO: 567331 - DNA, 15 bp, Homo sapiens
ttcattcctgaatct

SEQ ID NO: 567332 - DNA, 15 bp, Homo sapiens
tcattcctgaatctc

SEQ ID NO: 567333 - DNA, 15 bp, Homo sapiens
cattcctgaatctcc

SEQ ID NO: 567334 - DNA, 15 bp, Homo sapiens
attcctgaatctcca

SEQ ID NO: 567335 - DNA, 15 bp, Homo sapiens
ttcctgaatctccag

SEQ ID NO: 567336 - DNA, 15 bp, Homo sapiens
tcctgaatctccagc

SEQ ID NO: 567337 - DNA, 15 bp, Homo sapiens
cctgaatctccagcc

SEQ ID NO: 567338 - DNA, 15 bp, Homo sapiens
ctgaatctccagcct

SEQ ID NO: 567339 - DNA, 15 bp, Homo sapiens
tgaatctccagcctg

SEQ ID NO: 567340 - DNA, 15 bp, Homo sapiens
gaatctccagcctgg

SEQ ID NO: 567341 - DNA, 15 bp, Homo sapiens
aatctccagcctgga

SEQ ID NO: 567342 - DNA, 15 bp, Homo sapiens
atctccagcctggag

SEQ ID NO: 567343 - DNA, 15 bp, Homo sapiens
tctccagcctggaga

SEQ ID NO: 567344 - DNA, 15 bp, Homo sapiens
ctccagcctggagaa

SEQ ID NO: 567345 - DNA, 15 bp, Homo sapiens
tccagcctggagaac

SEQ ID NO: 567346 - DNA, 15 bp, Homo sapiens
ccagcctggagaaca

SEQ ID NO: 567347 - DNA, 15 bp, Homo sapiens
cagcctggagaacag

SEQ ID NO: 567348 - DNA, 15 bp, Homo sapiens
agcctggagaacagg

SEQ ID NO: 567349 - DNA, 15 bp, Homo sapiens
gcctggagaacaggg

SEQ ID NO: 567350 - DNA, 15 bp, Homo sapiens
cctggagaacagggc

SEQ ID NO: 567351 - DNA, 15 bp, Homo sapiens
ctggagaacagggcc

SEQ ID NO: 567352 - DNA, 15 bp, Homo sapiens
tggagaacagggcca

SEQ ID NO: 567353 - DNA, 15 bp, Homo sapiens
ggagaacagggccag

SEQ ID NO: 567354 - DNA, 15 bp, Homo sapiens
gagaacagggccagc

SEQ ID NO: 567355 - DNA, 15 bp, Homo sapiens
agaacagggccagca

SEQ ID NO: 567356 - DNA, 15 bp, Homo sapiens
gaacagggccagcac

SEQ ID NO: 567357 - DNA, 15 bp, Homo sapiens
aacagggccagcaca

SEQ ID NO: 567358 - DNA, 15 bp, Homo sapiens
acagggccagcacat

SEQ ID NO: 567359 - DNA, 15 bp, Homo sapiens
cagggccagcacata

SEQ ID NO: 567360 - DNA, 15 bp, Homo sapiens
agggccagcacatag

SEQ ID NO: 567361 - DNA, 15 bp, Homo sapiens
gggccagcacatagt

SEQ ID NO: 567362 - DNA, 15 bp, Homo sapiens
ggccagcacatagta

SEQ ID NO: 567363 - DNA, 15 bp, Homo sapiens
gccagcacatagtag

SEQ ID NO: 567364 - DNA, 15 bp, Homo sapiens
ccagcacatagtaga

SEQ ID NO: 567365 - DNA, 15 bp, Homo sapiens
cagcacatagtagat

SEQ ID NO: 567366 - DNA, 15 bp, Homo sapiens
agcacatagtagatt

SEQ ID NO: 567367 - DNA, 15 bp, Homo sapiens
gcacatagtagattc

SEQ ID NO: 567368 - DNA, 15 bp, Homo sapiens
cacatagtagattct

SEQ ID NO: 567369 - DNA, 15 bp, Homo sapiens
acatagtagattcta

SEQ ID NO: 567370 - DNA, 15 bp, Homo sapiens
catagtagattctag

SEQ ID NO: 567371 - DNA, 15 bp, Homo sapiens
atagtagattctagg

SEQ ID NO: 567372 - DNA, 15 bp, Homo sapiens
tagtagattctaggt

SEQ ID NO: 567373 - DNA, 15 bp, Homo sapiens
agtagattctaggta

SEQ ID NO: 567374 - DNA, 15 bp, Homo sapiens
gtagattctaggtaa

SEQ ID NO: 567375 - DNA, 15 bp, Homo sapiens
tagattctaggtaaa

SEQ ID NO: 567376 - DNA, 15 bp, Homo sapiens
agattctaggtaaat

SEQ ID NO: 567377 - DNA, 15 bp, Homo sapiens
gattctaggtaaatg

SEQ ID NO: 567378 - DNA, 15 bp, Homo sapiens
attctaggtaaatgt

SEQ ID NO: 567379 - DNA, 15 bp, Homo sapiens
ttctaggtaaatgtt

SEQ ID NO: 567380 - DNA, 15 bp, Homo sapiens
tctaggtaaatgttt

SEQ ID NO: 567381 - DNA, 15 bp, Homo sapiens
ctaggtaaatgtttc

SEQ ID NO: 567382 - DNA, 15 bp, Homo sapiens
taggtaaatgtttct

SEQ ID NO: 567383 - DNA, 15 bp, Homo sapiens
aggtaaatgtttcta

SEQ ID NO: 567384 - DNA, 15 bp, Homo sapiens
ggtaaatgtttctaa

SEQ ID NO: 567385 - DNA, 15 bp, Homo sapiens
gtaaatgtttctaaa

SEQ ID NO: 567386 - DNA, 15 bp, Homo sapiens
taaatgtttctaaaa

SEQ ID NO: 567387 - DNA, 15 bp, Homo sapiens
aaatgtttctaaaat

SEQ ID NO: 567388 - DNA, 15 bp, Homo sapiens
aatgtttctaaaata

SEQ ID NO: 567389 - DNA, 15 bp, Homo sapiens
atgtttctaaaataa

SEQ ID NO: 567390 - DNA, 15 bp, Homo sapiens
tgtttctaaaataag

SEQ ID NO: 567391 - DNA, 15 bp, Homo sapiens
gtttctaaaataaga

SEQ ID NO: 567392 - DNA, 15 bp, Homo sapiens
tttctaaaataagat

SEQ ID NO: 567393 - DNA, 15 bp, Homo sapiens
ttctaaaataagatg

SEQ ID NO: 567394 - DNA, 15 bp, Homo sapiens
tctaaaataagatga

SEQ ID NO: 567395 - DNA, 15 bp, Homo sapiens
ctaaaataagatgaa

SEQ ID NO: 567396 - DNA, 15 bp, Homo sapiens
taaaataagatgaat

SEQ ID NO: 567397 - DNA, 15 bp, Homo sapiens
aaaataagatgaata

SEQ ID NO: 567398 - DNA, 15 bp, Homo sapiens
aaataagatgaataa

SEQ ID NO: 567399 - DNA, 15 bp, Homo sapiens
aataagatgaataaa

SEQ ID NO: 567400 - DNA, 15 bp, Homo sapiens
ataagatgaataaat

SEQ ID NO: 567401 - DNA, 15 bp, Homo sapiens
taagatgaataaatg

SEQ ID NO: 567402 - DNA, 15 bp, Homo sapiens
aagatgaataaatga

SEQ ID NO: 567403 - DNA, 15 bp, Homo sapiens
agatgaataaatgag

SEQ ID NO: 567404 - DNA, 15 bp, Homo sapiens
gatgaataaatgagt

SEQ ID NO: 567405 - DNA, 15 bp, Homo sapiens
atgaataaatgagtc

SEQ ID NO: 567406 - DNA, 15 bp, Homo sapiens
tgaataaatgagtca

SEQ ID NO: 567407 - DNA, 15 bp, Homo sapiens
gaataaatgagtcag

SEQ ID NO: 567408 - DNA, 15 bp, Homo sapiens
aataaatgagtcagt

SEQ ID NO: 567409 - DNA, 15 bp, Homo sapiens
ataaatgagtcagtg

SEQ ID NO: 567410 - DNA, 15 bp, Homo sapiens
taaatgagtcagtgg

SEQ ID NO: 567411 - DNA, 15 bp, Homo sapiens
aaatgagtcagtgga

SEQ ID NO: 567412 - DNA, 15 bp, Homo sapiens
aatgagtcagtggag

SEQ ID NO: 567413 - DNA, 15 bp, Homo sapiens
atgagtcagtggaga

SEQ ID NO: 567414 - DNA, 15 bp, Homo sapiens
tgagtcagtggagag

SEQ ID NO: 567415 - DNA, 15 bp, Homo sapiens
gagtcagtggagagt

SEQ ID NO: 567416 - DNA, 15 bp, Homo sapiens
agtcagtggagagtg

SEQ ID NO: 567417 - DNA, 15 bp, Homo sapiens
gtcagtggagagtgg

SEQ ID NO: 567418 - DNA, 15 bp, Homo sapiens
tcagtggagagtggg

SEQ ID NO: 567419 - DNA, 15 bp, Homo sapiens
cagtggagagtgggc

SEQ ID NO: 567420 - DNA, 15 bp, Homo sapiens
agtggagagtgggcg

SEQ ID NO: 567421 - DNA, 15 bp, Homo sapiens
gtggagagtgggcga

SEQ ID NO: 567422 - DNA, 15 bp, Homo sapiens
tggagagtgggcgaa

SEQ ID NO: 567423 - DNA, 15 bp, Homo sapiens
ggagagtgggcgaag

SEQ ID NO: 567424 - DNA, 15 bp, Homo sapiens
gagagtgggcgaagg

SEQ ID NO: 567425 - DNA, 15 bp, Homo sapiens
agagtgggcgaagga

SEQ ID NO: 567426 - DNA, 15 bp, Homo sapiens
gagtgggcgaaggaa

SEQ ID NO: 567427 - DNA, 15 bp, Homo sapiens
agtgggcgaaggaat

SEQ ID NO: 567428 - DNA, 15 bp, Homo sapiens
gtgggcgaaggaatg

SEQ ID NO: 567429 - DNA, 15 bp, Homo sapiens
tgggcgaaggaatga

SEQ ID NO: 567430 - DNA, 15 bp, Homo sapiens
gggcgaaggaatgag

SEQ ID NO: 567431 - DNA, 15 bp, Homo sapiens
ggcgaaggaatgagt

SEQ ID NO: 567432 - DNA, 15 bp, Homo sapiens
gcgaaggaatgagtg

SEQ ID NO: 567433 - DNA, 15 bp, Homo sapiens
cgaaggaatgagtga

SEQ ID NO: 567434 - DNA, 15 bp, Homo sapiens
gaaggaatgagtgag

SEQ ID NO: 567435 - DNA, 15 bp, Homo sapiens
aaggaatgagtgaga

SEQ ID NO: 567436 - DNA, 15 bp, Homo sapiens
aggaatgagtgagaa

SEQ ID NO: 567437 - DNA, 15 bp, Homo sapiens
ggaatgagtgagaaa

SEQ ID NO: 567438 - DNA, 15 bp, Homo sapiens
gaatgagtgagaaag

SEQ ID NO: 567439 - DNA, 15 bp, Homo sapiens
aatgagtgagaaagc

SEQ ID NO: 567440 - DNA, 15 bp, Homo sapiens
atgagtgagaaagca

SEQ ID NO: 567441 - DNA, 15 bp, Homo sapiens
tgagtgagaaagcac

SEQ ID NO: 567442 - DNA, 15 bp, Homo sapiens
gagtgagaaagcaca

SEQ ID NO: 567443 - DNA, 15 bp, Homo sapiens
agtgagaaagcacat

SEQ ID NO: 567444 - DNA, 15 bp, Homo sapiens
gtgagaaagcacatc

SEQ ID NO: 567445 - DNA, 15 bp, Homo sapiens
tgagaaagcacatct

SEQ ID NO: 567446 - DNA, 15 bp, Homo sapiens
gagaaagcacatctg

SEQ ID NO: 567447 - DNA, 15 bp, Homo sapiens
agaaagcacatctgt

SEQ ID NO: 567448 - DNA, 15 bp, Homo sapiens
gaaagcacatctgtc

SEQ ID NO: 567449 - DNA, 15 bp, Homo sapiens
aaagcacatctgtca

SEQ ID NO: 567450 - DNA, 15 bp, Homo sapiens
aagcacatctgtcaa

SEQ ID NO: 567451 - DNA, 15 bp, Homo sapiens
agcacatctgtcaag

SEQ ID NO: 567452 - DNA, 15 bp, Homo sapiens
gcacatctgtcaaga

SEQ ID NO: 567453 - DNA, 15 bp, Homo sapiens
cacatctgtcaagac

SEQ ID NO: 567454 - DNA, 15 bp, Homo sapiens
acatctgtcaagacg

SEQ ID NO: 567455 - DNA, 15 bp, Homo sapiens
catctgtcaagacgt

SEQ ID NO: 567456 - DNA, 15 bp, Homo sapiens
atctgtcaagacgtc

SEQ ID NO: 567457 - DNA, 15 bp, Homo sapiens
tctgtcaagacgtct

SEQ ID NO: 567458 - DNA, 15 bp, Homo sapiens
ctgtcaagacgtctt

SEQ ID NO: 567459 - DNA, 15 bp, Homo sapiens
tgtcaagacgtcttg

SEQ ID NO: 567460 - DNA, 15 bp, Homo sapiens
gtcaagacgtcttgc

SEQ ID NO: 567461 - DNA, 15 bp, Homo sapiens
tcaagacgtcttgct

SEQ ID NO: 567462 - DNA, 15 bp, Homo sapiens
caagacgtcttgctc

SEQ ID NO: 567463 - DNA, 15 bp, Homo sapiens
aagacgtcttgctcc

SEQ ID NO: 567464 - DNA, 15 bp, Homo sapiens
agacgtcttgctccc

SEQ ID NO: 567465 - DNA, 15 bp, Homo sapiens
gacgtcttgctcccc

SEQ ID NO: 567466 - DNA, 15 bp, Homo sapiens
acgtcttgctcccct

SEQ ID NO: 567467 - DNA, 15 bp, Homo sapiens
cgtcttgctcccctc

SEQ ID NO: 567468 - DNA, 15 bp, Homo sapiens
gtcttgctcccctcg

SEQ ID NO: 567469 - DNA, 15 bp, Homo sapiens
tcttgctcccctcgg

SEQ ID NO: 567470 - DNA, 15 bp, Homo sapiens
cttgctcccctcggg

SEQ ID NO: 567471 - DNA, 15 bp, Homo sapiens
ttgctcccctcgggg

SEQ ID NO: 567472 - DNA, 15 bp, Homo sapiens
tgctcccctcgggga

SEQ ID NO: 567473 - DNA, 15 bp, Homo sapiens
gctcccctcggggag

SEQ ID NO: 567474 - DNA, 15 bp, Homo sapiens
ctcccctcggggagc

SEQ ID NO: 567475 - DNA, 15 bp, Homo sapiens
tcccctcggggagct

SEQ ID NO: 567476 - DNA, 15 bp, Homo sapiens
cccctcggggagctg

SEQ ID NO: 567477 - DNA, 15 bp, Homo sapiens
ccctcggggagctgg

SEQ ID NO: 567478 - DNA, 15 bp, Homo sapiens
cctcggggagctggg

SEQ ID NO: 567479 - DNA, 15 bp, Homo sapiens
ctcggggagctgggt

SEQ ID NO: 567480 - DNA, 15 bp, Homo sapiens
tcggggagctgggtc

SEQ ID NO: 567481 - DNA, 15 bp, Homo sapiens
cggggagctgggtcc

SEQ ID NO: 567482 - DNA, 15 bp, Homo sapiens
ggggagctgggtcct

SEQ ID NO: 567483 - DNA, 15 bp, Homo sapiens
gggagctgggtccta

SEQ ID NO: 567484 - DNA, 15 bp, Homo sapiens
ggagctgggtcctac

SEQ ID NO: 567485 - DNA, 15 bp, Homo sapiens
gagctgggtcctact

SEQ ID NO: 567486 - DNA, 15 bp, Homo sapiens
agctgggtcctactc

SEQ ID NO: 567487 - DNA, 15 bp, Homo sapiens
gctgggtcctactca

SEQ ID NO: 567488 - DNA, 15 bp, Homo sapiens
ctgggtcctactcac

SEQ ID NO: 567489 - DNA, 15 bp, Homo sapiens
tgggtcctactcact

SEQ ID NO: 567490 - DNA, 15 bp, Homo sapiens
gggtcctactcactg

SEQ ID NO: 567491 - DNA, 15 bp, Homo sapiens
ggtcctactcactgc

SEQ ID NO: 567492 - DNA, 15 bp, Homo sapiens
gtcctactcactgca

SEQ ID NO: 567493 - DNA, 15 bp, Homo sapiens
tcctactcactgcat

SEQ ID NO: 567494 - DNA, 15 bp, Homo sapiens
cctactcactgcatt

SEQ ID NO: 567495 - DNA, 15 bp, Homo sapiens
ctactcactgcattt

SEQ ID NO: 567496 - DNA, 15 bp, Homo sapiens
tactcactgcatttc

SEQ ID NO: 567497 - DNA, 15 bp, Homo sapiens
actcactgcatttct

SEQ ID NO: 567498 - DNA, 15 bp, Homo sapiens
ctcactgcatttctt

SEQ ID NO: 567499 - DNA, 15 bp, Homo sapiens
tcactgcatttcttt

SEQ ID NO: 567500 - DNA, 15 bp, Homo sapiens
cactgcatttctttc

SEQ ID NO: 567501 - DNA, 15 bp, Homo sapiens
actgcatttctttcc

SEQ ID NO: 567502 - DNA, 15 bp, Homo sapiens
ctgcatttctttccc

SEQ ID NO: 567503 - DNA, 15 bp, Homo sapiens
tgcatttctttccct

SEQ ID NO: 567504 - DNA, 15 bp, Homo sapiens
gcatttctttccctc

SEQ ID NO: 567505 - DNA, 15 bp, Homo sapiens
catttctttccctct

SEQ ID NO: 567506 - DNA, 15 bp, Homo sapiens
atttctttccctctt

SEQ ID NO: 567507 - DNA, 15 bp, Homo sapiens
tttctttccctcttg

SEQ ID NO: 567508 - DNA, 15 bp, Homo sapiens
ttctttccctcttgc

SEQ ID NO: 567509 - DNA, 15 bp, Homo sapiens
tctttccctcttgcc

SEQ ID NO: 567510 - DNA, 15 bp, Homo sapiens
ctttccctcttgcca

SEQ ID NO: 567511 - DNA, 15 bp, Homo sapiens
tttccctcttgccac

SEQ ID NO: 567512 - DNA, 15 bp, Homo sapiens
ttccctcttgccaca

SEQ ID NO: 567513 - DNA, 15 bp, Homo sapiens
tccctcttgccacag

SEQ ID NO: 567514 - DNA, 15 bp, Homo sapiens
ccctcttgccacagg

SEQ ID NO: 567515 - DNA, 15 bp, Homo sapiens
cctcttgccacaggt

SEQ ID NO: 567516 - DNA, 15 bp, Homo sapiens
ctcttgccacaggtc

SEQ ID NO: 567517 - DNA, 15 bp, Homo sapiens
tcttgccacaggtcc

SEQ ID NO: 567518 - DNA, 15 bp, Homo sapiens
cttgccacaggtcct

SEQ ID NO: 567519 - DNA, 15 bp, Homo sapiens
ttgccacaggtcctc

SEQ ID NO: 567520 - DNA, 15 bp, Homo sapiens
tgccacaggtcctcc

SEQ ID NO: 567521 - DNA, 15 bp, Homo sapiens
gccacaggtcctccc

SEQ ID NO: 567522 - DNA, 15 bp, Homo sapiens
ccacaggtcctcccc

SEQ ID NO: 567523 - DNA, 15 bp, Homo sapiens
cacaggtcctcccct

SEQ ID NO: 567524 - DNA, 15 bp, Homo sapiens
acaggtcctcccctt

SEQ ID NO: 567525 - DNA, 15 bp, Homo sapiens
caggtcctccccttg

SEQ ID NO: 567526 - DNA, 15 bp, Homo sapiens
aggtcctccccttgg

SEQ ID NO: 567527 - DNA, 15 bp, Homo sapiens
ggtcctccccttgga

SEQ ID NO: 567528 - DNA, 15 bp, Homo sapiens
gtcctccccttggag

SEQ ID NO: 567529 - DNA, 15 bp, Homo sapiens
tcctccccttggagg

SEQ ID NO: 567530 - DNA, 15 bp, Homo sapiens
cctccccttggaggg

SEQ ID NO: 567531 - DNA, 15 bp, Homo sapiens
ctccccttggagggg

SEQ ID NO: 567532 - DNA, 15 bp, Homo sapiens
tccccttggaggggc

SEQ ID NO: 567533 - DNA, 15 bp, Homo sapiens
ccccttggaggggca

SEQ ID NO: 567534 - DNA, 15 bp, Homo sapiens
cccttggaggggcac

SEQ ID NO: 567535 - DNA, 15 bp, Homo sapiens
ccttggaggggcaca

SEQ ID NO: 567536 - DNA, 15 bp, Homo sapiens
cttggaggggcacaa

SEQ ID NO: 567537 - DNA, 15 bp, Homo sapiens
ttggaggggcacaaa

SEQ ID NO: 567538 - DNA, 15 bp, Homo sapiens
tggaggggcacaaac

SEQ ID NO: 567539 - DNA, 15 bp, Homo sapiens
ggaggggcacaaacg

SEQ ID NO: 567540 - DNA, 15 bp, Homo sapiens
gaggggcacaaacga

SEQ ID NO: 567541 - DNA, 15 bp, Homo sapiens
aggggcacaaacgat

SEQ ID NO: 567542 - DNA, 15 bp, Homo sapiens
ggggcacaaacgatc

SEQ ID NO: 567543 - DNA, 15 bp, Homo sapiens
gggcacaaacgatca

SEQ ID NO: 567544 - DNA, 15 bp, Homo sapiens
ggcacaaacgatcag

SEQ ID NO: 567545 - DNA, 15 bp, Homo sapiens
gcacaaacgatcagt

SEQ ID NO: 567546 - DNA, 15 bp, Homo sapiens
cacaaacgatcagta

SEQ ID NO: 567547 - DNA, 15 bp, Homo sapiens
acaaacgatcagtaa

SEQ ID NO: 567548 - DNA, 15 bp, Homo sapiens
caaacgatcagtaag

SEQ ID NO: 567549 - DNA, 15 bp, Homo sapiens
aaacgatcagtaaga

SEQ ID NO: 567550 - DNA, 15 bp, Homo sapiens
aacgatcagtaagaa

SEQ ID NO: 567551 - DNA, 15 bp, Homo sapiens
acgatcagtaagaat

SEQ ID NO: 567552 - DNA, 15 bp, Homo sapiens
cgatcagtaagaata

SEQ ID NO: 567553 - DNA, 15 bp, Homo sapiens
gatcagtaagaatac

SEQ ID NO: 567554 - DNA, 15 bp, Homo sapiens
atcagtaagaataca

SEQ ID NO: 567555 - DNA, 15 bp, Homo sapiens
tcagtaagaatacag

SEQ ID NO: 567556 - DNA, 15 bp, Homo sapiens
cagtaagaatacaga

SEQ ID NO: 567557 - DNA, 15 bp, Homo sapiens
agtaagaatacagag

SEQ ID NO: 567558 - DNA, 15 bp, Homo sapiens
gtaagaatacagagc

SEQ ID NO: 567559 - DNA, 15 bp, Homo sapiens
taagaatacagagca

SEQ ID NO: 567560 - DNA, 15 bp, Homo sapiens
aagaatacagagcaa

SEQ ID NO: 567561 - DNA, 15 bp, Homo sapiens
agaatacagagcaac

SEQ ID NO: 567562 - DNA, 15 bp, Homo sapiens
gaatacagagcaacg

SEQ ID NO: 567563 - DNA, 15 bp, Homo sapiens
aatacagagcaacgg

SEQ ID NO: 567564 - DNA, 15 bp, Homo sapiens
atacagagcaacggc

SEQ ID NO: 567565 - DNA, 15 bp, Homo sapiens
tacagagcaacggcc

SEQ ID NO: 567566 - DNA, 15 bp, Homo sapiens
acagagcaacggccc

SEQ ID NO: 567567 - DNA, 15 bp, Homo sapiens
cagagcaacggcccc

SEQ ID NO: 567568 - DNA, 15 bp, Homo sapiens
agagcaacggcccca

SEQ ID NO: 567569 - DNA, 15 bp, Homo sapiens
gagcaacggccccag

SEQ ID NO: 567570 - DNA, 15 bp, Homo sapiens
agcaacggccccagc

SEQ ID NO: 567571 - DNA, 15 bp, Homo sapiens
gcaacggccccagcc

SEQ ID NO: 567572 - DNA, 15 bp, Homo sapiens
caacggccccagcca

SEQ ID NO: 567573 - DNA, 15 bp, Homo sapiens
aacggccccagccag

SEQ ID NO: 567574 - DNA, 15 bp, Homo sapiens
acggccccagccagg

SEQ ID NO: 567575 - DNA, 15 bp, Homo sapiens
cggccccagccaggt

SEQ ID NO: 567576 - DNA, 15 bp, Homo sapiens
ccttatatcttttga

SEQ ID NO: 567577 - DNA, 15 bp, Homo sapiens
cttatatcttttgaa

SEQ ID NO: 567578 - DNA, 15 bp, Homo sapiens
ttatatcttttgaaa

SEQ ID NO: 567579 - DNA, 15 bp, Homo sapiens
tatatcttttgaaaa

SEQ ID NO: 567580 - DNA, 15 bp, Homo sapiens
atatcttttgaaaaa

SEQ ID NO: 567581 - DNA, 15 bp, Homo sapiens
tatcttttgaaaaaa

SEQ ID NO: 567582 - DNA, 15 bp, Homo sapiens
atcttttgaaaaaaa

SEQ ID NO: 567583 - DNA, 15 bp, Homo sapiens
tcttttgaaaaaaat

SEQ ID NO: 567584 - DNA, 15 bp, Homo sapiens
cttttgaaaaaaatt

SEQ ID NO: 567585 - DNA, 15 bp, Homo sapiens
ttttgaaaaaaattt

SEQ ID NO: 567586 - DNA, 15 bp, Homo sapiens
tttgaaaaaaattta

SEQ ID NO: 567587 - DNA, 15 bp, Homo sapiens
ttgaaaaaaatttac

SEQ ID NO: 567588 - DNA, 15 bp, Homo sapiens
tgaaaaaaatttact

SEQ ID NO: 567589 - DNA, 15 bp, Homo sapiens
gaaaaaaatttactc

SEQ ID NO: 567590 - DNA, 15 bp, Homo sapiens
aaaaaaatttactca

SEQ ID NO: 567591 - DNA, 15 bp, Homo sapiens
aaaaaatttactcaa

SEQ ID NO: 567592 - DNA, 15 bp, Homo sapiens
ctgtaaaacttctga

SEQ ID NO: 567593 - DNA, 15 bp, Homo sapiens
tgtaaaacttctgaa

SEQ ID NO: 567594 - DNA, 15 bp, Homo sapiens
gtaaaacttctgaaa

SEQ ID NO: 567595 - DNA, 15 bp, Homo sapiens
taaaacttctgaaag

SEQ ID NO: 567596 - DNA, 15 bp, Homo sapiens
aaaacttctgaaaga

SEQ ID NO: 567597 - DNA, 15 bp, Homo sapiens
aaacttctgaaagat

SEQ ID NO: 567598 - DNA, 15 bp, Homo sapiens
aacttctgaaagata

SEQ ID NO: 567599 - DNA, 15 bp, Homo sapiens
acttctgaaagataa

SEQ ID NO: 567600 - DNA, 15 bp, Homo sapiens
cttctgaaagataac

SEQ ID NO: 567601 - DNA, 15 bp, Homo sapiens
ttctgaaagataaca

SEQ ID NO: 567602 - DNA, 15 bp, Homo sapiens
tctgaaagataacat

SEQ ID NO: 567603 - DNA, 15 bp, Homo sapiens
ctgaaagataacata

SEQ ID NO: 567604 - DNA, 15 bp, Homo sapiens
tgaaagataacatag

SEQ ID NO: 567605 - DNA, 15 bp, Homo sapiens
gaaagataacatagg

SEQ ID NO: 567606 - DNA, 15 bp, Homo sapiens
aaagataacatagga

SEQ ID NO: 567607 - DNA, 15 bp, Homo sapiens
aatctaggtgaacta

SEQ ID NO: 567608 - DNA, 15 bp, Homo sapiens
atctaggtgaactag

SEQ ID NO: 567609 - DNA, 15 bp, Homo sapiens
tctaggtgaactaga

SEQ ID NO: 567610 - DNA, 15 bp, Homo sapiens
ctaggtgaactagat

SEQ ID NO: 567611 - DNA, 15 bp, Homo sapiens
taggtgaactagata

SEQ ID NO: 567612 - DNA, 15 bp, Homo sapiens
aggtgaactagatag

SEQ ID NO: 567613 - DNA, 15 bp, Homo sapiens
ggtgaactagataga

SEQ ID NO: 567614 - DNA, 15 bp, Homo sapiens
gtgaactagatagat

SEQ ID NO: 567615 - DNA, 15 bp, Homo sapiens
tgaactagatagatt

SEQ ID NO: 567616 - DNA, 15 bp, Homo sapiens
gaactagatagattt

SEQ ID NO: 567617 - DNA, 15 bp, Homo sapiens
aactagatagatttc

SEQ ID NO: 567618 - DNA, 15 bp, Homo sapiens
actagatagatttca

SEQ ID NO: 567619 - DNA, 15 bp, Homo sapiens
ctagatagatttcat

SEQ ID NO: 567620 - DNA, 15 bp, Homo sapiens
tagatagatttcatg

SEQ ID NO: 567621 - DNA, 15 bp, Homo sapiens
agatagatttcatgc

SEQ ID NO: 567622 - DNA, 15 bp, Homo sapiens
gatagatttcatgca

SEQ ID NO: 567623 - DNA, 15 bp, Homo sapiens
atagatttcatgcac

SEQ ID NO: 567624 - DNA, 15 bp, Homo sapiens
tagatttcatgcact

SEQ ID NO: 567625 - DNA, 15 bp, Homo sapiens
agatttcatgcactg

SEQ ID NO: 567626 - DNA, 15 bp, Homo sapiens
gatttcatgcactgg

SEQ ID NO: 567627 - DNA, 15 bp, Homo sapiens
atttcatgcactgga

SEQ ID NO: 567628 - DNA, 15 bp, Homo sapiens
tttcatgcactggaa

SEQ ID NO: 567629 - DNA, 15 bp, Homo sapiens
ttcatgcactggaat

SEQ ID NO: 567630 - DNA, 15 bp, Homo sapiens
tcatgcactggaatg

SEQ ID NO: 567631 - DNA, 15 bp, Homo sapiens
catgcactggaatga

SEQ ID NO: 567632 - DNA, 15 bp, Homo sapiens
atgcactggaatgaa

SEQ ID NO: 567633 - DNA, 15 bp, Homo sapiens
tgcactggaatgaag

SEQ ID NO: 567634 - DNA, 15 bp, Homo sapiens
gcactggaatgaagt

SEQ ID NO: 567635 - DNA, 15 bp, Homo sapiens
cactggaatgaagtg

SEQ ID NO: 567636 - DNA, 15 bp, Homo sapiens
actggaatgaagtga

SEQ ID NO: 567637 - DNA, 15 bp, Homo sapiens
ctggaatgaagtgaa

SEQ ID NO: 567638 - DNA, 15 bp, Homo sapiens
tggaatgaagtgaag

SEQ ID NO: 567639 - DNA, 15 bp, Homo sapiens
ggaatgaagtgaagg

SEQ ID NO: 567640 - DNA, 15 bp, Homo sapiens
gaatgaagtgaaggg

SEQ ID NO: 567641 - DNA, 15 bp, Homo sapiens
aatgaagtgaagggg

SEQ ID NO: 567642 - DNA, 15 bp, Homo sapiens
atgaagtgaaggggg

SEQ ID NO: 567643 - DNA, 15 bp, Homo sapiens
tgaagtgaaggggga

SEQ ID NO: 567644 - DNA, 15 bp, Homo sapiens
gaagtgaagggggaa

SEQ ID NO: 567645 - DNA, 15 bp, Homo sapiens
aagtgaagggggaaa

SEQ ID NO: 567646 - DNA, 15 bp, Homo sapiens
agtgaagggggaaag

SEQ ID NO: 567647 - DNA, 15 bp, Homo sapiens
gtgaagggggaaagt

SEQ ID NO: 567648 - DNA, 15 bp, Homo sapiens
tgaagggggaaagta

SEQ ID NO: 567649 - DNA, 15 bp, Homo sapiens
gaagggggaaagtag

SEQ ID NO: 567650 - DNA, 15 bp, Homo sapiens
aagggggaaagtaga

SEQ ID NO: 567651 - DNA, 15 bp, Homo sapiens
agggggaaagtagaa

SEQ ID NO: 567652 - DNA, 15 bp, Homo sapiens
gggggaaagtagaag

SEQ ID NO: 567653 - DNA, 15 bp, Homo sapiens
ggggaaagtagaagg

SEQ ID NO: 567654 - DNA, 15 bp, Homo sapiens
gggaaagtagaaggt

SEQ ID NO: 567655 - DNA, 15 bp, Homo sapiens
ggaaagtagaaggtg

SEQ ID NO: 567656 - DNA, 15 bp, Homo sapiens
gaaagtagaaggtga

SEQ ID NO: 567657 - DNA, 15 bp, Homo sapiens
aaagtagaaggtgag

SEQ ID NO: 567658 - DNA, 15 bp, Homo sapiens
aagtagaaggtgaga

SEQ ID NO: 567659 - DNA, 15 bp, Homo sapiens
agtagaaggtgagat

SEQ ID NO: 567660 - DNA, 15 bp, Homo sapiens
gtagaaggtgagata

SEQ ID NO: 567661 - DNA, 15 bp, Homo sapiens
tagaaggtgagatag

SEQ ID NO: 567662 - DNA, 15 bp, Homo sapiens
agaaggtgagatagc

SEQ ID NO: 567663 - DNA, 15 bp, Homo sapiens
gaaggtgagatagcg

SEQ ID NO: 567664 - DNA, 15 bp, Homo sapiens
aaggtgagatagcgg

SEQ ID NO: 567665 - DNA, 15 bp, Homo sapiens
aggtgagatagcgga

SEQ ID NO: 567666 - DNA, 15 bp, Homo sapiens
ggtgagatagcggag

SEQ ID NO: 567667 - DNA, 15 bp, Homo sapiens
gtgagatagcggaga

SEQ ID NO: 567668 - DNA, 15 bp, Homo sapiens
tgagatagcggagat

SEQ ID NO: 567669 - DNA, 15 bp, Homo sapiens
gagatagcggagata

SEQ ID NO: 567670 - DNA, 15 bp, Homo sapiens
agatagcggagataa

SEQ ID NO: 567671 - DNA, 15 bp, Homo sapiens
gatagcggagataac

SEQ ID NO: 567672 - DNA, 15 bp, Homo sapiens
atagcggagataaca

SEQ ID NO: 567673 - DNA, 15 bp, Homo sapiens
tagcggagataacag

SEQ ID NO: 567674 - DNA, 15 bp, Homo sapiens
agcggagataacaga

SEQ ID NO: 567675 - DNA, 15 bp, Homo sapiens
gcggagataacagaa

SEQ ID NO: 567676 - DNA, 15 bp, Homo sapiens
cggagataacagaag

SEQ ID NO: 567677 - DNA, 15 bp, Homo sapiens
ggagataacagaagt

SEQ ID NO: 567678 - DNA, 15 bp, Homo sapiens
gagataacagaagtc

SEQ ID NO: 567679 - DNA, 15 bp, Homo sapiens
agataacagaagtca

SEQ ID NO: 567680 - DNA, 15 bp, Homo sapiens
gataacagaagtcag

SEQ ID NO: 567681 - DNA, 15 bp, Homo sapiens
ataacagaagtcaga

SEQ ID NO: 567682 - DNA, 15 bp, Homo sapiens
taacagaagtcagag

SEQ ID NO: 567683 - DNA, 15 bp, Homo sapiens
aacagaagtcagagt

SEQ ID NO: 567684 - DNA, 15 bp, Homo sapiens
acagaagtcagagta

SEQ ID NO: 567685 - DNA, 15 bp, Homo sapiens
cagaagtcagagtat

SEQ ID NO: 567686 - DNA, 15 bp, Homo sapiens
agaagtcagagtata

SEQ ID NO: 567687 - DNA, 15 bp, Homo sapiens
gaagtcagagtatat

SEQ ID NO: 567688 - DNA, 15 bp, Homo sapiens
aagtcagagtatata

SEQ ID NO: 567689 - DNA, 15 bp, Homo sapiens
agtcagagtatatag

SEQ ID NO: 567690 - DNA, 15 bp, Homo sapiens
gtcagagtatatagg

SEQ ID NO: 567691 - DNA, 15 bp, Homo sapiens
tcagagtatataggg

SEQ ID NO: 567692 - DNA, 15 bp, Homo sapiens
cagagtatatagggc

SEQ ID NO: 567693 - DNA, 15 bp, Homo sapiens
agagtatatagggca

SEQ ID NO: 567694 - DNA, 15 bp, Homo sapiens
gagtatatagggcac

SEQ ID NO: 567695 - DNA, 15 bp, Homo sapiens
agtatatagggcact

SEQ ID NO: 567696 - DNA, 15 bp, Homo sapiens
gtatatagggcactg

SEQ ID NO: 567697 - DNA, 15 bp, Homo sapiens
tatatagggcactga

SEQ ID NO: 567698 - DNA, 15 bp, Homo sapiens
atatagggcactgaa

SEQ ID NO: 567699 - DNA, 15 bp, Homo sapiens
tatagggcactgaag

SEQ ID NO: 567700 - DNA, 15 bp, Homo sapiens
atagggcactgaagc

SEQ ID NO: 567701 - DNA, 15 bp, Homo sapiens
tagggcactgaagcc

SEQ ID NO: 567702 - DNA, 15 bp, Homo sapiens
agggcactgaagcca

SEQ ID NO: 567703 - DNA, 15 bp, Homo sapiens
gggcactgaagccag

SEQ ID NO: 567704 - DNA, 15 bp, Homo sapiens
ggcactgaagccaga

SEQ ID NO: 567705 - DNA, 15 bp, Homo sapiens
gcactgaagccagaa

SEQ ID NO: 567706 - DNA, 15 bp, Homo sapiens
cactgaagccagaat

SEQ ID NO: 567707 - DNA, 15 bp, Homo sapiens
actgaagccagaata

SEQ ID NO: 567708 - DNA, 15 bp, Homo sapiens
ctgaagccagaataa

SEQ ID NO: 567709 - DNA, 15 bp, Homo sapiens
tgaagccagaataaa

SEQ ID NO: 567710 - DNA, 15 bp, Homo sapiens
gaagccagaataaat

SEQ ID NO: 567711 - DNA, 15 bp, Homo sapiens
aagccagaataaata

SEQ ID NO: 567712 - DNA, 15 bp, Homo sapiens
agccagaataaataa

SEQ ID NO: 567713 - DNA, 15 bp, Homo sapiens
gccagaataaataat

SEQ ID NO: 567714 - DNA, 15 bp, Homo sapiens
ccagaataaataatg

SEQ ID NO: 567715 - DNA, 15 bp, Homo sapiens
cagaataaataatga

SEQ ID NO: 567716 - DNA, 15 bp, Homo sapiens
agaataaataatgac

SEQ ID NO: 567717 - DNA, 15 bp, Homo sapiens
gaataaataatgact

SEQ ID NO: 567718 - DNA, 15 bp, Homo sapiens
aataaataatgactc

SEQ ID NO: 567719 - DNA, 15 bp, Homo sapiens
ataaataatgactct

SEQ ID NO: 567720 - DNA, 15 bp, Homo sapiens
taaataatgactctg

SEQ ID NO: 567721 - DNA, 15 bp, Homo sapiens
aaataatgactctgg

SEQ ID NO: 567722 - DNA, 15 bp, Homo sapiens
aataatgactctggc

SEQ ID NO: 567723 - DNA, 15 bp, Homo sapiens
ataatgactctggct

SEQ ID NO: 567724 - DNA, 15 bp, Homo sapiens
taatgactctggctt

SEQ ID NO: 567725 - DNA, 15 bp, Homo sapiens
aatgactctggcttt

SEQ ID NO: 567726 - DNA, 15 bp, Homo sapiens
atgactctggctttt

SEQ ID NO: 567727 - DNA, 15 bp, Homo sapiens
tgactctggctttta

SEQ ID NO: 567728 - DNA, 15 bp, Homo sapiens
gactctggcttttac

SEQ ID NO: 567729 - DNA, 15 bp, Homo sapiens
actctggcttttact

SEQ ID NO: 567730 - DNA, 15 bp, Homo sapiens
ctctggcttttactc

SEQ ID NO: 567731 - DNA, 15 bp, Homo sapiens
tctggcttttactct

SEQ ID NO: 567732 - DNA, 15 bp, Homo sapiens
ctggcttttactctg

SEQ ID NO: 567733 - DNA, 15 bp, Homo sapiens
tggcttttactctga

SEQ ID NO: 567734 - DNA, 15 bp, Homo sapiens
ggcttttactctgag

SEQ ID NO: 567735 - DNA, 15 bp, Homo sapiens
gcttttactctgaga

SEQ ID NO: 567736 - DNA, 15 bp, Homo sapiens
cttttactctgagag

SEQ ID NO: 567737 - DNA, 15 bp, Homo sapiens
ttttactctgagaga

SEQ ID NO: 567738 - DNA, 15 bp, Homo sapiens
tttactctgagagat

SEQ ID NO: 567739 - DNA, 15 bp, Homo sapiens
ttactctgagagatg

SEQ ID NO: 567740 - DNA, 15 bp, Homo sapiens
tactctgagagatgt

SEQ ID NO: 567741 - DNA, 15 bp, Homo sapiens
actctgagagatgta

SEQ ID NO: 567742 - DNA, 15 bp, Homo sapiens
ctctgagagatgtag

SEQ ID NO: 567743 - DNA, 15 bp, Homo sapiens
tctgagagatgtagg

SEQ ID NO: 567744 - DNA, 15 bp, Homo sapiens
ctgagagatgtaggg

SEQ ID NO: 567745 - DNA, 15 bp, Homo sapiens
tgagagatgtaggga

SEQ ID NO: 567746 - DNA, 15 bp, Homo sapiens
gagagatgtagggag

SEQ ID NO: 567747 - DNA, 15 bp, Homo sapiens
agagatgtagggagt

SEQ ID NO: 567748 - DNA, 15 bp, Homo sapiens
gagatgtagggagtc

SEQ ID NO: 567749 - DNA, 15 bp, Homo sapiens
agatgtagggagtca

SEQ ID NO: 567750 - DNA, 15 bp, Homo sapiens
gatgtagggagtcac

SEQ ID NO: 567751 - DNA, 15 bp, Homo sapiens
atgtagggagtcact

SEQ ID NO: 567752 - DNA, 15 bp, Homo sapiens
tgtagggagtcactg

SEQ ID NO: 567753 - DNA, 15 bp, Homo sapiens
gtagggagtcactgg

SEQ ID NO: 567754 - DNA, 15 bp, Homo sapiens
tagggagtcactggg

SEQ ID NO: 567755 - DNA, 15 bp, Homo sapiens
agggagtcactgggg

SEQ ID NO: 567756 - DNA, 15 bp, Homo sapiens
gggagtcactggggg

SEQ ID NO: 567757 - DNA, 15 bp, Homo sapiens
ggagtcactggggga

SEQ ID NO: 567758 - DNA, 15 bp, Homo sapiens
gagtcactgggggat

SEQ ID NO: 567759 - DNA, 15 bp, Homo sapiens
agtcactgggggatt

SEQ ID NO: 567760 - DNA, 15 bp, Homo sapiens
gtcactgggggattg

SEQ ID NO: 567761 - DNA, 15 bp, Homo sapiens
tcactgggggattgt

SEQ ID NO: 567762 - DNA, 15 bp, Homo sapiens
cactgggggattgtg

SEQ ID NO: 567763 - DNA, 15 bp, Homo sapiens
actgggggattgtga

SEQ ID NO: 567764 - DNA, 15 bp, Homo sapiens
ctgggggattgtgag

SEQ ID NO: 567765 - DNA, 15 bp, Homo sapiens
tgggggattgtgagt

SEQ ID NO: 567766 - DNA, 15 bp, Homo sapiens
gggggattgtgagtg

SEQ ID NO: 567767 - DNA, 15 bp, Homo sapiens
ggggattgtgagtgg

SEQ ID NO: 567768 - DNA, 15 bp, Homo sapiens
gggattgtgagtggc

SEQ ID NO: 567769 - DNA, 15 bp, Homo sapiens
ggattgtgagtggca

SEQ ID NO: 567770 - DNA, 15 bp, Homo sapiens
gattgtgagtggcag

SEQ ID NO: 567771 - DNA, 15 bp, Homo sapiens
attgtgagtggcaga

SEQ ID NO: 567772 - DNA, 15 bp, Homo sapiens
ttgtgagtggcagag

SEQ ID NO: 567773 - DNA, 15 bp, Homo sapiens
tgtgagtggcagagt

SEQ ID NO: 567774 - DNA, 15 bp, Homo sapiens
gtgagtggcagagtg

SEQ ID NO: 567775 - DNA, 15 bp, Homo sapiens
tgagtggcagagtga

SEQ ID NO: 567776 - DNA, 15 bp, Homo sapiens
gagtggcagagtgac

SEQ ID NO: 567777 - DNA, 15 bp, Homo sapiens
agtggcagagtgact

SEQ ID NO: 567778 - DNA, 15 bp, Homo sapiens
gtggcagagtgactt

SEQ ID NO: 567779 - DNA, 15 bp, Homo sapiens
tggcagagtgacttg

SEQ ID NO: 567780 - DNA, 15 bp, Homo sapiens
ggcagagtgacttga

SEQ ID NO: 567781 - DNA, 15 bp, Homo sapiens
gcagagtgacttgat

SEQ ID NO: 567782 - DNA, 15 bp, Homo sapiens
cagagtgacttgatt

SEQ ID NO: 567783 - DNA, 15 bp, Homo sapiens
agagtgacttgattg

SEQ ID NO: 567784 - DNA, 15 bp, Homo sapiens
gagtgacttgattga

SEQ ID NO: 567785 - DNA, 15 bp, Homo sapiens
agtgacttgattgac

SEQ ID NO: 567786 - DNA, 15 bp, Homo sapiens
gtgacttgattgaca

SEQ ID NO: 567787 - DNA, 15 bp, Homo sapiens
tgacttgattgacac

SEQ ID NO: 567788 - DNA, 15 bp, Homo sapiens
gacttgattgacacc

SEQ ID NO: 567789 - DNA, 15 bp, Homo sapiens
acttgattgacacct

SEQ ID NO: 567790 - DNA, 15 bp, Homo sapiens
cttgattgacacctc

SEQ ID NO: 567791 - DNA, 15 bp, Homo sapiens
ttgattgacacctca

SEQ ID NO: 567792 - DNA, 15 bp, Homo sapiens
tgattgacacctcaa

SEQ ID NO: 567793 - DNA, 15 bp, Homo sapiens
gattgacacctcaac

SEQ ID NO: 567794 - DNA, 15 bp, Homo sapiens
attgacacctcaaca

SEQ ID NO: 567795 - DNA, 15 bp, Homo sapiens
ttgacacctcaacag

SEQ ID NO: 567796 - DNA, 15 bp, Homo sapiens
tgacacctcaacagg

SEQ ID NO: 567797 - DNA, 15 bp, Homo sapiens
gacacctcaacaggg

SEQ ID NO: 567798 - DNA, 15 bp, Homo sapiens
acacctcaacagggt

SEQ ID NO: 567799 - DNA, 15 bp, Homo sapiens
cacctcaacagggtc

SEQ ID NO: 567800 - DNA, 15 bp, Homo sapiens
acctcaacagggtca

SEQ ID NO: 567801 - DNA, 15 bp, Homo sapiens
cctcaacagggtcat

SEQ ID NO: 567802 - DNA, 15 bp, Homo sapiens
ctcaacagggtcatt

SEQ ID NO: 567803 - DNA, 15 bp, Homo sapiens
tcaacagggtcattc

SEQ ID NO: 567804 - DNA, 15 bp, Homo sapiens
caacagggtcattct

SEQ ID NO: 567805 - DNA, 15 bp, Homo sapiens
aacagggtcattctg

SEQ ID NO: 567806 - DNA, 15 bp, Homo sapiens
acagggtcattctgt

SEQ ID NO: 567807 - DNA, 15 bp, Homo sapiens
cagggtcattctgtc

SEQ ID NO: 567808 - DNA, 15 bp, Homo sapiens
agggtcattctgtct

SEQ ID NO: 567809 - DNA, 15 bp, Homo sapiens
gggtcattctgtctt

SEQ ID NO: 567810 - DNA, 15 bp, Homo sapiens
ggtcattctgtcttc

SEQ ID NO: 567811 - DNA, 15 bp, Homo sapiens
gtcattctgtcttct

SEQ ID NO: 567812 - DNA, 15 bp, Homo sapiens
tcattctgtcttctg

SEQ ID NO: 567813 - DNA, 15 bp, Homo sapiens
cattctgtcttctgt

SEQ ID NO: 567814 - DNA, 15 bp, Homo sapiens
attctgtcttctgtg

SEQ ID NO: 567815 - DNA, 15 bp, Homo sapiens
ttctgtcttctgtgc

SEQ ID NO: 567816 - DNA, 15 bp, Homo sapiens
tctgtcttctgtgct

SEQ ID NO: 567817 - DNA, 15 bp, Homo sapiens
ctgtcttctgtgctg

SEQ ID NO: 567818 - DNA, 15 bp, Homo sapiens
tgtcttctgtgctga

SEQ ID NO: 567819 - DNA, 15 bp, Homo sapiens
gtcttctgtgctgag

SEQ ID NO: 567820 - DNA, 15 bp, Homo sapiens
tcttctgtgctgaga

SEQ ID NO: 567821 - DNA, 15 bp, Homo sapiens
cttctgtgctgagaa

SEQ ID NO: 567822 - DNA, 15 bp, Homo sapiens
ttctgtgctgagaac

SEQ ID NO: 567823 - DNA, 15 bp, Homo sapiens
tctgtgctgagaact

SEQ ID NO: 567824 - DNA, 15 bp, Homo sapiens
ctgtgctgagaactg

SEQ ID NO: 567825 - DNA, 15 bp, Homo sapiens
tgtgctgagaactgt

SEQ ID NO: 567826 - DNA, 15 bp, Homo sapiens
gtgctgagaactgtc

SEQ ID NO: 567827 - DNA, 15 bp, Homo sapiens
tgctgagaactgtca

SEQ ID NO: 567828 - DNA, 15 bp, Homo sapiens
gctgagaactgtcag

SEQ ID NO: 567829 - DNA, 15 bp, Homo sapiens
ctgagaactgtcaga

SEQ ID NO: 567830 - DNA, 15 bp, Homo sapiens
tgagaactgtcagag

SEQ ID NO: 567831 - DNA, 15 bp, Homo sapiens
gagaactgtcagaga

SEQ ID NO: 567832 - DNA, 15 bp, Homo sapiens
agaactgtcagagag

SEQ ID NO: 567833 - DNA, 15 bp, Homo sapiens
gaactgtcagagagg

SEQ ID NO: 567834 - DNA, 15 bp, Homo sapiens
aactgtcagagaggg

SEQ ID NO: 567835 - DNA, 15 bp, Homo sapiens
actgtcagagagggt

SEQ ID NO: 567836 - DNA, 15 bp, Homo sapiens
ctgtcagagagggta

SEQ ID NO: 567837 - DNA, 15 bp, Homo sapiens
tgtcagagagggtac

SEQ ID NO: 567838 - DNA, 15 bp, Homo sapiens
gtcagagagggtaca

SEQ ID NO: 567839 - DNA, 15 bp, Homo sapiens
tcagagagggtacaa

SEQ ID NO: 567840 - DNA, 15 bp, Homo sapiens
cagagagggtacaac

SEQ ID NO: 567841 - DNA, 15 bp, Homo sapiens
agagagggtacaaca

SEQ ID NO: 567842 - DNA, 15 bp, Homo sapiens
gagagggtacaacag

SEQ ID NO: 567843 - DNA, 15 bp, Homo sapiens
agagggtacaacagt

SEQ ID NO: 567844 - DNA, 15 bp, Homo sapiens
gagggtacaacagtg

SEQ ID NO: 567845 - DNA, 15 bp, Homo sapiens
agggtacaacagtgg

SEQ ID NO: 567846 - DNA, 15 bp, Homo sapiens
gggtacaacagtgga

SEQ ID NO: 567847 - DNA, 15 bp, Homo sapiens
ggtacaacagtggac

SEQ ID NO: 567848 - DNA, 15 bp, Homo sapiens
gtacaacagtggaca

SEQ ID NO: 567849 - DNA, 15 bp, Homo sapiens
tacaacagtggacag

SEQ ID NO: 567850 - DNA, 15 bp, Homo sapiens
acaacagtggacagt

SEQ ID NO: 567851 - DNA, 15 bp, Homo sapiens
caacagtggacagtg

SEQ ID NO: 567852 - DNA, 15 bp, Homo sapiens
aacagtggacagtga

SEQ ID NO: 567853 - DNA, 15 bp, Homo sapiens
acagtggacagtgac

SEQ ID NO: 567854 - DNA, 15 bp, Homo sapiens
cagtggacagtgact

SEQ ID NO: 567855 - DNA, 15 bp, Homo sapiens
agtggacagtgactg

SEQ ID NO: 567856 - DNA, 15 bp, Homo sapiens
gtggacagtgactgc

SEQ ID NO: 567857 - DNA, 15 bp, Homo sapiens
tggacagtgactgca

SEQ ID NO: 567858 - DNA, 15 bp, Homo sapiens
ggacagtgactgcag

SEQ ID NO: 567859 - DNA, 15 bp, Homo sapiens
gacagtgactgcagg

SEQ ID NO: 567860 - DNA, 15 bp, Homo sapiens
acagtgactgcaggg

SEQ ID NO: 567861 - DNA, 15 bp, Homo sapiens
cagtgactgcaggga

SEQ ID NO: 567862 - DNA, 15 bp, Homo sapiens
agtgactgcagggat

SEQ ID NO: 567863 - DNA, 15 bp, Homo sapiens
gtgactgcagggata

SEQ ID NO: 567864 - DNA, 15 bp, Homo sapiens
tgactgcagggatac

SEQ ID NO: 567865 - DNA, 15 bp, Homo sapiens
gactgcagggatacc

SEQ ID NO: 567866 - DNA, 15 bp, Homo sapiens
actgcagggatacca

SEQ ID NO: 567867 - DNA, 15 bp, Homo sapiens
ctgcagggataccag

SEQ ID NO: 567868 - DNA, 15 bp, Homo sapiens
tgcagggataccagc

SEQ ID NO: 567869 - DNA, 15 bp, Homo sapiens
gcagggataccagcg

SEQ ID NO: 567870 - DNA, 15 bp, Homo sapiens
cagggataccagcga

SEQ ID NO: 567871 - DNA, 15 bp, Homo sapiens
agggataccagcgaa

SEQ ID NO: 567872 - DNA, 15 bp, Homo sapiens
gggataccagcgaag

SEQ ID NO: 567873 - DNA, 15 bp, Homo sapiens
ggataccagcgaaga

SEQ ID NO: 567874 - DNA, 15 bp, Homo sapiens
gataccagcgaagaa

SEQ ID NO: 567875 - DNA, 15 bp, Homo sapiens
ataccagcgaagaag

SEQ ID NO: 567876 - DNA, 15 bp, Homo sapiens
taccagcgaagaagt

SEQ ID NO: 567877 - DNA, 15 bp, Homo sapiens
accagcgaagaagtt

SEQ ID NO: 567878 - DNA, 15 bp, Homo sapiens
ccagcgaagaagttg

SEQ ID NO: 567879 - DNA, 15 bp, Homo sapiens
cagcgaagaagttgc

SEQ ID NO: 567880 - DNA, 15 bp, Homo sapiens
agcgaagaagttgct

SEQ ID NO: 567881 - DNA, 15 bp, Homo sapiens
gcgaagaagttgctg

SEQ ID NO: 567882 - DNA, 15 bp, Homo sapiens
cgaagaagttgctgc

SEQ ID NO: 567883 - DNA, 15 bp, Homo sapiens
gaagaagttgctgcc

SEQ ID NO: 567884 - DNA, 15 bp, Homo sapiens
aagaagttgctgcca

SEQ ID NO: 567885 - DNA, 15 bp, Homo sapiens
agaagttgctgccat

SEQ ID NO: 567886 - DNA, 15 bp, Homo sapiens
gaagttgctgccata

SEQ ID NO: 567887 - DNA, 15 bp, Homo sapiens
aagttgctgccataa

SEQ ID NO: 567888 - DNA, 15 bp, Homo sapiens
agttgctgccataat

SEQ ID NO: 567889 - DNA, 15 bp, Homo sapiens
gttgctgccataatg

SEQ ID NO: 567890 - DNA, 15 bp, Homo sapiens
ttgctgccataatgc

SEQ ID NO: 567891 - DNA, 15 bp, Homo sapiens
tgctgccataatgca

SEQ ID NO: 567892 - DNA, 15 bp, Homo sapiens
gctgccataatgcag

SEQ ID NO: 567893 - DNA, 15 bp, Homo sapiens
ctgccataatgcagg

SEQ ID NO: 567894 - DNA, 15 bp, Homo sapiens
tgccataatgcaggt

SEQ ID NO: 567895 - DNA, 15 bp, Homo sapiens
gccataatgcaggta

SEQ ID NO: 567896 - DNA, 15 bp, Homo sapiens
ccataatgcaggtaa

SEQ ID NO: 567897 - DNA, 15 bp, Homo sapiens
cataatgcaggtaag

SEQ ID NO: 567898 - DNA, 15 bp, Homo sapiens
ataatgcaggtaaga

SEQ ID NO: 567899 - DNA, 15 bp, Homo sapiens
taatgcaggtaagag

SEQ ID NO: 567900 - DNA, 15 bp, Homo sapiens
aatgcaggtaagaga

SEQ ID NO: 567901 - DNA, 15 bp, Homo sapiens
atgcaggtaagagaa

SEQ ID NO: 567902 - DNA, 15 bp, Homo sapiens
tgcaggtaagagaat

SEQ ID NO: 567903 - DNA, 15 bp, Homo sapiens
gcaggtaagagaatg

SEQ ID NO: 567904 - DNA, 15 bp, Homo sapiens
caggtaagagaatgg

SEQ ID NO: 567905 - DNA, 15 bp, Homo sapiens
aggtaagagaatgga

SEQ ID NO: 567906 - DNA, 15 bp, Homo sapiens
ggtaagagaatggaa

SEQ ID NO: 567907 - DNA, 15 bp, Homo sapiens
gtaagagaatggaag

SEQ ID NO: 567908 - DNA, 15 bp, Homo sapiens
taagagaatggaagc

SEQ ID NO: 567909 - DNA, 15 bp, Homo sapiens
aagagaatggaagct

SEQ ID NO: 567910 - DNA, 15 bp, Homo sapiens
agagaatggaagctt

SEQ ID NO: 567911 - DNA, 15 bp, Homo sapiens
gagaatggaagcttg

SEQ ID NO: 567912 - DNA, 15 bp, Homo sapiens
agaatggaagcttgg

SEQ ID NO: 567913 - DNA, 15 bp, Homo sapiens
gaatggaagcttgga

SEQ ID NO: 567914 - DNA, 15 bp, Homo sapiens
aatggaagcttggac

SEQ ID NO: 567915 - DNA, 15 bp, Homo sapiens
atggaagcttggact

SEQ ID NO: 567916 - DNA, 15 bp, Homo sapiens
tggaagcttggacta

SEQ ID NO: 567917 - DNA, 15 bp, Homo sapiens
ggaagcttggactat

SEQ ID NO: 567918 - DNA, 15 bp, Homo sapiens
gaagcttggactatg

SEQ ID NO: 567919 - DNA, 15 bp, Homo sapiens
aagcttggactatgg

SEQ ID NO: 567920 - DNA, 15 bp, Homo sapiens
agcttggactatggt

SEQ ID NO: 567921 - DNA, 15 bp, Homo sapiens
gcttggactatggtt

SEQ ID NO: 567922 - DNA, 15 bp, Homo sapiens
cttggactatggttt

SEQ ID NO: 567923 - DNA, 15 bp, Homo sapiens
ttggactatggtttt

SEQ ID NO: 567924 - DNA, 15 bp, Homo sapiens
tggactatggtttta

SEQ ID NO: 567925 - DNA, 15 bp, Homo sapiens
ggactatggttttag

SEQ ID NO: 567926 - DNA, 15 bp, Homo sapiens
gactatggttttagc

SEQ ID NO: 567927 - DNA, 15 bp, Homo sapiens
actatggttttagct

SEQ ID NO: 567928 - DNA, 15 bp, Homo sapiens
ctatggttttagctg

SEQ ID NO: 567929 - DNA, 15 bp, Homo sapiens
tatggttttagctga

SEQ ID NO: 567930 - DNA, 15 bp, Homo sapiens
atggttttagctgag

SEQ ID NO: 567931 - DNA, 15 bp, Homo sapiens
tggttttagctgagc

SEQ ID NO: 567932 - DNA, 15 bp, Homo sapiens
ggttttagctgagca

SEQ ID NO: 567933 - DNA, 15 bp, Homo sapiens
gttttagctgagcaa

SEQ ID NO: 567934 - DNA, 15 bp, Homo sapiens
ttttagctgagcaaa

SEQ ID NO: 567935 - DNA, 15 bp, Homo sapiens
tttagctgagcaaat

SEQ ID NO: 567936 - DNA, 15 bp, Homo sapiens
ttagctgagcaaatg

SEQ ID NO: 567937 - DNA, 15 bp, Homo sapiens
tagctgagcaaatga

SEQ ID NO: 567938 - DNA, 15 bp, Homo sapiens
agctgagcaaatgat

SEQ ID NO: 567939 - DNA, 15 bp, Homo sapiens
gctgagcaaatgatc

SEQ ID NO: 567940 - DNA, 15 bp, Homo sapiens
ctgagcaaatgatca

SEQ ID NO: 567941 - DNA, 15 bp, Homo sapiens
tgagcaaatgatcag

SEQ ID NO: 567942 - DNA, 15 bp, Homo sapiens
gagcaaatgatcaga

SEQ ID NO: 567943 - DNA, 15 bp, Homo sapiens
agcaaatgatcagaa

SEQ ID NO: 567944 - DNA, 15 bp, Homo sapiens
gcaaatgatcagaaa

SEQ ID NO: 567945 - DNA, 15 bp, Homo sapiens
caaatgatcagaaac

SEQ ID NO: 567946 - DNA, 15 bp, Homo sapiens
aaatgatcagaaaca

SEQ ID NO: 567947 - DNA, 15 bp, Homo sapiens
aatgatcagaaacag

SEQ ID NO: 567948 - DNA, 15 bp, Homo sapiens
atgatcagaaacaga

SEQ ID NO: 567949 - DNA, 15 bp, Homo sapiens
tgatcagaaacagag

SEQ ID NO: 567950 - DNA, 15 bp, Homo sapiens
gatcagaaacagagt

SEQ ID NO: 567951 - DNA, 15 bp, Homo sapiens
atcagaaacagagtc

SEQ ID NO: 567952 - DNA, 15 bp, Homo sapiens
tcagaaacagagtct

SEQ ID NO: 567953 - DNA, 15 bp, Homo sapiens
cagaaacagagtctg

SEQ ID NO: 567954 - DNA, 15 bp, Homo sapiens
agaaacagagtctgg

SEQ ID NO: 567955 - DNA, 15 bp, Homo sapiens
gaaacagagtctgga

SEQ ID NO: 567956 - DNA, 15 bp, Homo sapiens
aaacagagtctggat

SEQ ID NO: 567957 - DNA, 15 bp, Homo sapiens
aacagagtctggatt

SEQ ID NO: 567958 - DNA, 15 bp, Homo sapiens
acagagtctggattc

SEQ ID NO: 567959 - DNA, 15 bp, Homo sapiens
cagagtctggattct

SEQ ID NO: 567960 - DNA, 15 bp, Homo sapiens
agagtctggattcta

SEQ ID NO: 567961 - DNA, 15 bp, Homo sapiens
gagtctggattctac

SEQ ID NO: 567962 - DNA, 15 bp, Homo sapiens
agtctggattctaca

SEQ ID NO: 567963 - DNA, 15 bp, Homo sapiens
gtctggattctacaa

SEQ ID NO: 567964 - DNA, 15 bp, Homo sapiens
tctggattctacaat

SEQ ID NO: 567965 - DNA, 15 bp, Homo sapiens
ctggattctacaatg

SEQ ID NO: 567966 - DNA, 15 bp, Homo sapiens
tggattctacaatga

SEQ ID NO: 567967 - DNA, 15 bp, Homo sapiens
ggattctacaatgat

SEQ ID NO: 567968 - DNA, 15 bp, Homo sapiens
gattctacaatgatt

SEQ ID NO: 567969 - DNA, 15 bp, Homo sapiens
attctacaatgattt

SEQ ID NO: 567970 - DNA, 15 bp, Homo sapiens
ttctacaatgatttg

SEQ ID NO: 567971 - DNA, 15 bp, Homo sapiens
tctacaatgatttgc

SEQ ID NO: 567972 - DNA, 15 bp, Homo sapiens
ctacaatgatttgct

SEQ ID NO: 567973 - DNA, 15 bp, Homo sapiens
tacaatgatttgctg

SEQ ID NO: 567974 - DNA, 15 bp, Homo sapiens
acaatgatttgctga

SEQ ID NO: 567975 - DNA, 15 bp, Homo sapiens
caatgatttgctgat

SEQ ID NO: 567976 - DNA, 15 bp, Homo sapiens
aatgatttgctgatg

SEQ ID NO: 567977 - DNA, 15 bp, Homo sapiens
atgatttgctgatgg

SEQ ID NO: 567978 - DNA, 15 bp, Homo sapiens
tgatttgctgatgga

SEQ ID NO: 567979 - DNA, 15 bp, Homo sapiens
gatttgctgatggat

SEQ ID NO: 567980 - DNA, 15 bp, Homo sapiens
atttgctgatggatc

SEQ ID NO: 567981 - DNA, 15 bp, Homo sapiens
tttgctgatggatct

SEQ ID NO: 567982 - DNA, 15 bp, Homo sapiens
ttgctgatggatctg

SEQ ID NO: 567983 - DNA, 15 bp, Homo sapiens
tgctgatggatctga

SEQ ID NO: 567984 - DNA, 15 bp, Homo sapiens
gctgatggatctgat

SEQ ID NO: 567985 - DNA, 15 bp, Homo sapiens
ctgatggatctgatg

SEQ ID NO: 567986 - DNA, 15 bp, Homo sapiens
tgatggatctgatgt

SEQ ID NO: 567987 - DNA, 15 bp, Homo sapiens
gatggatctgatgtg

SEQ ID NO: 567988 - DNA, 15 bp, Homo sapiens
atggatctgatgtgt

SEQ ID NO: 567989 - DNA, 15 bp, Homo sapiens
tggatctgatgtgtg

SEQ ID NO: 567990 - DNA, 15 bp, Homo sapiens
ggatctgatgtgtga

SEQ ID NO: 567991 - DNA, 15 bp, Homo sapiens
gatctgatgtgtgaa

SEQ ID NO: 567992 - DNA, 15 bp, Homo sapiens
atctgatgtgtgaaa

SEQ ID NO: 567993 - DNA, 15 bp, Homo sapiens
tctgatgtgtgaaag

SEQ ID NO: 567994 - DNA, 15 bp, Homo sapiens
ctgatgtgtgaaaga

SEQ ID NO: 567995 - DNA, 15 bp, Homo sapiens
tgatgtgtgaaagag

SEQ ID NO: 567996 - DNA, 15 bp, Homo sapiens
gatgtgtgaaagagg

SEQ ID NO: 567997 - DNA, 15 bp, Homo sapiens
atgtgtgaaagaggg

SEQ ID NO: 567998 - DNA, 15 bp, Homo sapiens
tgtgtgaaagagggt

SEQ ID NO: 567999 - DNA, 15 bp, Homo sapiens
gtgtgaaagagggtc

SEQ ID NO: 568000 - DNA, 15 bp, Homo sapiens
tgtgaaagagggtca

SEQ ID NO: 568001 - DNA, 15 bp, Homo sapiens
gtgaaagagggtcaa

SEQ ID NO: 568002 - DNA, 15 bp, Homo sapiens
tgaaagagggtcaaa

SEQ ID NO: 568003 - DNA, 15 bp, Homo sapiens
gaaagagggtcaaaa

SEQ ID NO: 568004 - DNA, 15 bp, Homo sapiens
aaagagggtcaaaat

SEQ ID NO: 568005 - DNA, 15 bp, Homo sapiens
aagagggtcaaaatg

SEQ ID NO: 568006 - DNA, 15 bp, Homo sapiens
agagggtcaaaatgt

SEQ ID NO: 568007 - DNA, 15 bp, Homo sapiens
gagggtcaaaatgtc

SEQ ID NO: 568008 - DNA, 15 bp, Homo sapiens
agggtcaaaatgtct

SEQ ID NO: 568009 - DNA, 15 bp, Homo sapiens
gggtcaaaatgtctc

SEQ ID NO: 568010 - DNA, 15 bp, Homo sapiens
ggtcaaaatgtctca

SEQ ID NO: 568011 - DNA, 15 bp, Homo sapiens
gtcaaaatgtctcag

SEQ ID NO: 568012 - DNA, 15 bp, Homo sapiens
tcaaaatgtctcagt

SEQ ID NO: 568013 - DNA, 15 bp, Homo sapiens
caaaatgtctcagtt

SEQ ID NO: 568014 - DNA, 15 bp, Homo sapiens
aaaatgtctcagttt

SEQ ID NO: 568015 - DNA, 15 bp, Homo sapiens
aaatgtctcagtttt

SEQ ID NO: 568016 - DNA, 15 bp, Homo sapiens
aatgtctcagtttta

SEQ ID NO: 568017 - DNA, 15 bp, Homo sapiens
atgtctcagttttag

SEQ ID NO: 568018 - DNA, 15 bp, Homo sapiens
tgtctcagttttagg

SEQ ID NO: 568019 - DNA, 15 bp, Homo sapiens
gtctcagttttaggc

SEQ ID NO: 568020 - DNA, 15 bp, Homo sapiens
tctcagttttaggct

SEQ ID NO: 568021 - DNA, 15 bp, Homo sapiens
ctcagttttaggctt

SEQ ID NO: 568022 - DNA, 15 bp, Homo sapiens
tcagttttaggcttg

SEQ ID NO: 568023 - DNA, 15 bp, Homo sapiens
cagttttaggcttga

SEQ ID NO: 568024 - DNA, 15 bp, Homo sapiens
agttttaggcttgag

SEQ ID NO: 568025 - DNA, 15 bp, Homo sapiens
gttttaggcttgagc

SEQ ID NO: 568026 - DNA, 15 bp, Homo sapiens
ttttaggcttgagca

SEQ ID NO: 568027 - DNA, 15 bp, Homo sapiens
tttaggcttgagcaa

SEQ ID NO: 568028 - DNA, 15 bp, Homo sapiens
ttaggcttgagcaac

SEQ ID NO: 568029 - DNA, 15 bp, Homo sapiens
taggcttgagcaacg

SEQ ID NO: 568030 - DNA, 15 bp, Homo sapiens
aggcttgagcaacga

SEQ ID NO: 568031 - DNA, 15 bp, Homo sapiens
ggcttgagcaacgaa

SEQ ID NO: 568032 - DNA, 15 bp, Homo sapiens
gcttgagcaacgaac

SEQ ID NO: 568033 - DNA, 15 bp, Homo sapiens
cttgagcaacgaact

SEQ ID NO: 568034 - DNA, 15 bp, Homo sapiens
ttgagcaacgaactg

SEQ ID NO: 568035 - DNA, 15 bp, Homo sapiens
tgagcaacgaactgg

SEQ ID NO: 568036 - DNA, 15 bp, Homo sapiens
gagcaacgaactgga

SEQ ID NO: 568037 - DNA, 15 bp, Homo sapiens
agcaacgaactggaa

SEQ ID NO: 568038 - DNA, 15 bp, Homo sapiens
gcaacgaactggaag

SEQ ID NO: 568039 - DNA, 15 bp, Homo sapiens
caacgaactggaagg

SEQ ID NO: 568040 - DNA, 15 bp, Homo sapiens
aacgaactggaaggc

SEQ ID NO: 568041 - DNA, 15 bp, Homo sapiens
acgaactggaaggca

SEQ ID NO: 568042 - DNA, 15 bp, Homo sapiens
cgaactggaaggcag

SEQ ID NO: 568043 - DNA, 15 bp, Homo sapiens
gaactggaaggcagg

SEQ ID NO: 568044 - DNA, 15 bp, Homo sapiens
aactggaaggcagga

SEQ ID NO: 568045 - DNA, 15 bp, Homo sapiens
actggaaggcaggag

SEQ ID NO: 568046 - DNA, 15 bp, Homo sapiens
ctggaaggcaggagc

SEQ ID NO: 568047 - DNA, 15 bp, Homo sapiens
tggaaggcaggagct

SEQ ID NO: 568048 - DNA, 15 bp, Homo sapiens
ggaaggcaggagctg

SEQ ID NO: 568049 - DNA, 15 bp, Homo sapiens
gaaggcaggagctgc

SEQ ID NO: 568050 - DNA, 15 bp, Homo sapiens
aaggcaggagctgcc

SEQ ID NO: 568051 - DNA, 15 bp, Homo sapiens
aggcaggagctgcct

SEQ ID NO: 568052 - DNA, 15 bp, Homo sapiens
ggcaggagctgcctg

SEQ ID NO: 568053 - DNA, 15 bp, Homo sapiens
gcaggagctgcctgt

SEQ ID NO: 568054 - DNA, 15 bp, Homo sapiens
caggagctgcctgta

SEQ ID NO: 568055 - DNA, 15 bp, Homo sapiens
aggagctgcctgtaa

SEQ ID NO: 568056 - DNA, 15 bp, Homo sapiens
ggagctgcctgtaac

SEQ ID NO: 568057 - DNA, 15 bp, Homo sapiens
gagctgcctgtaacg

SEQ ID NO: 568058 - DNA, 15 bp, Homo sapiens
agctgcctgtaacga

SEQ ID NO: 568059 - DNA, 15 bp, Homo sapiens
gctgcctgtaacgag

SEQ ID NO: 568060 - DNA, 15 bp, Homo sapiens
ctgcctgtaacgaga

SEQ ID NO: 568061 - DNA, 15 bp, Homo sapiens
tgcctgtaacgagag

SEQ ID NO: 568062 - DNA, 15 bp, Homo sapiens
gcctgtaacgagaga

SEQ ID NO: 568063 - DNA, 15 bp, Homo sapiens
cctgtaacgagagac

SEQ ID NO: 568064 - DNA, 15 bp, Homo sapiens
ctgtaacgagagaca

SEQ ID NO: 568065 - DNA, 15 bp, Homo sapiens
tgtaacgagagacag

SEQ ID NO: 568066 - DNA, 15 bp, Homo sapiens
gtaacgagagacagg

SEQ ID NO: 568067 - DNA, 15 bp, Homo sapiens
taacgagagacagga

SEQ ID NO: 568068 - DNA, 15 bp, Homo sapiens
aacgagagacaggag

SEQ ID NO: 568069 - DNA, 15 bp, Homo sapiens
acgagagacaggaga

SEQ ID NO: 568070 - DNA, 15 bp, Homo sapiens
cgagagacaggagag

SEQ ID NO: 568071 - DNA, 15 bp, Homo sapiens
gagagacaggagaga

SEQ ID NO: 568072 - DNA, 15 bp, Homo sapiens
agagacaggagagaa

SEQ ID NO: 568073 - DNA, 15 bp, Homo sapiens
gagacaggagagaaa

SEQ ID NO: 568074 - DNA, 15 bp, Homo sapiens
agacaggagagaaag

SEQ ID NO: 568075 - DNA, 15 bp, Homo sapiens
gacaggagagaaaga

SEQ ID NO: 568076 - DNA, 15 bp, Homo sapiens
acaggagagaaagag

SEQ ID NO: 568077 - DNA, 15 bp, Homo sapiens
caggagagaaagaga

SEQ ID NO: 568078 - DNA, 15 bp, Homo sapiens
aggagagaaagagag

SEQ ID NO: 568079 - DNA, 15 bp, Homo sapiens
ggagagaaagagaga

SEQ ID NO: 568080 - DNA, 15 bp, Homo sapiens
gagagaaagagagag

SEQ ID NO: 568081 - DNA, 15 bp, Homo sapiens
agagaaagagagaga

SEQ ID NO: 568082 - DNA, 15 bp, Homo sapiens
gagaaagagagagag

SEQ ID NO: 568083 - DNA, 15 bp, Homo sapiens
agaaagagagagaga

SEQ ID NO: 568084 - DNA, 15 bp, Homo sapiens
gaaagagagagagag

SEQ ID NO: 568085 - DNA, 15 bp, Homo sapiens
aaagagagagagaga

SEQ ID NO: 568086 - DNA, 15 bp, Homo sapiens
aagagagagagagag

SEQ ID NO: 568087 - DNA, 15 bp, Homo sapiens
agagagagagagaga

SEQ ID NO: 568088 - DNA, 15 bp, Homo sapiens
gagagagagagagag

SEQ ID NO: 568089 - DNA, 15 bp, Homo sapiens
agagagagagagagg

SEQ ID NO: 568090 - DNA, 15 bp, Homo sapiens
gagagagagagagga

SEQ ID NO: 568091 - DNA, 15 bp, Homo sapiens
agagagagagaggac

SEQ ID NO: 568092 - DNA, 15 bp, Homo sapiens
gagagagagaggact

SEQ ID NO: 568093 - DNA, 15 bp, Homo sapiens
agagagagaggactt

SEQ ID NO: 568094 - DNA, 15 bp, Homo sapiens
gagagagaggacttt

SEQ ID NO: 568095 - DNA, 15 bp, Homo sapiens
agagagaggactttg

SEQ ID NO: 568096 - DNA, 15 bp, Homo sapiens
gagagaggactttgg

SEQ ID NO: 568097 - DNA, 15 bp, Homo sapiens
agagaggactttgga

SEQ ID NO: 568098 - DNA, 15 bp, Homo sapiens
gagaggactttggaa

SEQ ID NO: 568099 - DNA, 15 bp, Homo sapiens
agaggactttggaag

SEQ ID NO: 568100 - DNA, 15 bp, Homo sapiens
gaggactttggaaga

SEQ ID NO: 568101 - DNA, 15 bp, Homo sapiens
aggactttggaagag

SEQ ID NO: 568102 - DNA, 15 bp, Homo sapiens
ggactttggaagagc

SEQ ID NO: 568103 - DNA, 15 bp, Homo sapiens
gactttggaagagca

SEQ ID NO: 568104 - DNA, 15 bp, Homo sapiens
actttggaagagcag

SEQ ID NO: 568105 - DNA, 15 bp, Homo sapiens
ctttggaagagcagg

SEQ ID NO: 568106 - DNA, 15 bp, Homo sapiens
tttggaagagcaggc

SEQ ID NO: 568107 - DNA, 15 bp, Homo sapiens
ttggaagagcaggct

SEQ ID NO: 568108 - DNA, 15 bp, Homo sapiens
tggaagagcaggctc

SEQ ID NO: 568109 - DNA, 15 bp, Homo sapiens
ggaagagcaggctca

SEQ ID NO: 568110 - DNA, 15 bp, Homo sapiens
gaagagcaggctcat

SEQ ID NO: 568111 - DNA, 15 bp, Homo sapiens
aagagcaggctcatg

SEQ ID NO: 568112 - DNA, 15 bp, Homo sapiens
agagcaggctcatga

SEQ ID NO: 568113 - DNA, 15 bp, Homo sapiens
gagcaggctcatgat

SEQ ID NO: 568114 - DNA, 15 bp, Homo sapiens
agcaggctcatgatc

SEQ ID NO: 568115 - DNA, 15 bp, Homo sapiens
gcaggctcatgatca

SEQ ID NO: 568116 - DNA, 15 bp, Homo sapiens
caggctcatgatcag

SEQ ID NO: 568117 - DNA, 15 bp, Homo sapiens
aggctcatgatcagg

SEQ ID NO: 568118 - DNA, 15 bp, Homo sapiens
ggctcatgatcaggc

SEQ ID NO: 568119 - DNA, 15 bp, Homo sapiens
gctcatgatcaggcc

SEQ ID NO: 568120 - DNA, 15 bp, Homo sapiens
ctcatgatcaggcct

SEQ ID NO: 568121 - DNA, 15 bp, Homo sapiens
tcatgatcaggcctg

SEQ ID NO: 568122 - DNA, 15 bp, Homo sapiens
catgatcaggcctga

SEQ ID NO: 568123 - DNA, 15 bp, Homo sapiens
atgatcaggcctgag

SEQ ID NO: 568124 - DNA, 15 bp, Homo sapiens
tgatcaggcctgagc

SEQ ID NO: 568125 - DNA, 15 bp, Homo sapiens
gatcaggcctgagct

SEQ ID NO: 568126 - DNA, 15 bp, Homo sapiens
atcaggcctgagctc

SEQ ID NO: 568127 - DNA, 15 bp, Homo sapiens
tcaggcctgagctca

SEQ ID NO: 568128 - DNA, 15 bp, Homo sapiens
caggcctgagctcag

SEQ ID NO: 568129 - DNA, 15 bp, Homo sapiens
aggcctgagctcagt

SEQ ID NO: 568130 - DNA, 15 bp, Homo sapiens
ggcctgagctcagtg

SEQ ID NO: 568131 - DNA, 15 bp, Homo sapiens
gcctgagctcagtgt

SEQ ID NO: 568132 - DNA, 15 bp, Homo sapiens
cctgagctcagtgtc

SEQ ID NO: 568133 - DNA, 15 bp, Homo sapiens
ctgagctcagtgtct

SEQ ID NO: 568134 - DNA, 15 bp, Homo sapiens
tgagctcagtgtctg

SEQ ID NO: 568135 - DNA, 15 bp, Homo sapiens
gagctcagtgtctga

SEQ ID NO: 568136 - DNA, 15 bp, Homo sapiens
agctcagtgtctgaa

SEQ ID NO: 568137 - DNA, 15 bp, Homo sapiens
gctcagtgtctgaat

SEQ ID NO: 568138 - DNA, 15 bp, Homo sapiens
ctcagtgtctgaatt

SEQ ID NO: 568139 - DNA, 15 bp, Homo sapiens
tcagtgtctgaattc

SEQ ID NO: 568140 - DNA, 15 bp, Homo sapiens
cagtgtctgaattca

SEQ ID NO: 568141 - DNA, 15 bp, Homo sapiens
agtgtctgaattcag

SEQ ID NO: 568142 - DNA, 15 bp, Homo sapiens
gtgtctgaattcagg

SEQ ID NO: 568143 - DNA, 15 bp, Homo sapiens
tgtctgaattcaggt

SEQ ID NO: 568144 - DNA, 15 bp, Homo sapiens
gtctgaattcaggta

SEQ ID NO: 568145 - DNA, 15 bp, Homo sapiens
tctgaattcaggtaa

SEQ ID NO: 568146 - DNA, 15 bp, Homo sapiens
ctgaattcaggtaag

SEQ ID NO: 568147 - DNA, 15 bp, Homo sapiens
tgaattcaggtaagc

SEQ ID NO: 568148 - DNA, 15 bp, Homo sapiens
gaattcaggtaagct

SEQ ID NO: 568149 - DNA, 15 bp, Homo sapiens
aattcaggtaagcta

SEQ ID NO: 568150 - DNA, 15 bp, Homo sapiens
attcaggtaagctat

SEQ ID NO: 568151 - DNA, 15 bp, Homo sapiens
ttcaggtaagctatc

SEQ ID NO: 568152 - DNA, 15 bp, Homo sapiens
tcaggtaagctatct

SEQ ID NO: 568153 - DNA, 15 bp, Homo sapiens
caggtaagctatctt

SEQ ID NO: 568154 - DNA, 15 bp, Homo sapiens
aggtaagctatcttg

SEQ ID NO: 568155 - DNA, 15 bp, Homo sapiens
ggtaagctatcttga

SEQ ID NO: 568156 - DNA, 15 bp, Homo sapiens
gtaagctatcttgaa

SEQ ID NO: 568157 - DNA, 15 bp, Homo sapiens
taagctatcttgaaa

SEQ ID NO: 568158 - DNA, 15 bp, Homo sapiens
aagctatcttgaaag

SEQ ID NO: 568159 - DNA, 15 bp, Homo sapiens
agctatcttgaaagg

SEQ ID NO: 568160 - DNA, 15 bp, Homo sapiens
gctatcttgaaaggg

SEQ ID NO: 568161 - DNA, 15 bp, Homo sapiens
ctatcttgaaagggg

SEQ ID NO: 568162 - DNA, 15 bp, Homo sapiens
tatcttgaaagggga

SEQ ID NO: 568163 - DNA, 15 bp, Homo sapiens
atcttgaaaggggaa

SEQ ID NO: 568164 - DNA, 15 bp, Homo sapiens
tcttgaaaggggaaa

SEQ ID NO: 568165 - DNA, 15 bp, Homo sapiens
cttgaaaggggaaat

SEQ ID NO: 568166 - DNA, 15 bp, Homo sapiens
ttgaaaggggaaata

SEQ ID NO: 568167 - DNA, 15 bp, Homo sapiens
tgaaaggggaaatat

SEQ ID NO: 568168 - DNA, 15 bp, Homo sapiens
gaaaggggaaatatc

SEQ ID NO: 568169 - DNA, 15 bp, Homo sapiens
aaaggggaaatatca

SEQ ID NO: 568170 - DNA, 15 bp, Homo sapiens
aaggggaaatatcaa

SEQ ID NO: 568171 - DNA, 15 bp, Homo sapiens
aggggaaatatcaaa

SEQ ID NO: 568172 - DNA, 15 bp, Homo sapiens
ggggaaatatcaaaa

SEQ ID NO: 568173 - DNA, 15 bp, Homo sapiens
gggaaatatcaaaag

SEQ ID NO: 568174 - DNA, 15 bp, Homo sapiens
ggaaatatcaaaagc

SEQ ID NO: 568175 - DNA, 15 bp, Homo sapiens
gaaatatcaaaagct

SEQ ID NO: 568176 - DNA, 15 bp, Homo sapiens
aaatatcaaaagcta

SEQ ID NO: 568177 - DNA, 15 bp, Homo sapiens
aatatcaaaagctag

SEQ ID NO: 568178 - DNA, 15 bp, Homo sapiens
atatcaaaagctaga

SEQ ID NO: 568179 - DNA, 15 bp, Homo sapiens
tatcaaaagctagag

SEQ ID NO: 568180 - DNA, 15 bp, Homo sapiens
atcaaaagctagaga

SEQ ID NO: 568181 - DNA, 15 bp, Homo sapiens
tcaaaagctagagat

SEQ ID NO: 568182 - DNA, 15 bp, Homo sapiens
caaaagctagagatc

SEQ ID NO: 568183 - DNA, 15 bp, Homo sapiens
aaaagctagagatca

SEQ ID NO: 568184 - DNA, 15 bp, Homo sapiens
aaagctagagatcag

SEQ ID NO: 568185 - DNA, 15 bp, Homo sapiens
aagctagagatcaga

SEQ ID NO: 568186 - DNA, 15 bp, Homo sapiens
agctagagatcagag

SEQ ID NO: 568187 - DNA, 15 bp, Homo sapiens
gctagagatcagagt

SEQ ID NO: 568188 - DNA, 15 bp, Homo sapiens
ctagagatcagagta

SEQ ID NO: 568189 - DNA, 15 bp, Homo sapiens
tagagatcagagtaa

SEQ ID NO: 568190 - DNA, 15 bp, Homo sapiens
agagatcagagtaag

SEQ ID NO: 568191 - DNA, 15 bp, Homo sapiens
gagatcagagtaagg

SEQ ID NO: 568192 - DNA, 15 bp, Homo sapiens
agatcagagtaaggc

SEQ ID NO: 568193 - DNA, 15 bp, Homo sapiens
gatcagagtaaggct

SEQ ID NO: 568194 - DNA, 15 bp, Homo sapiens
atcagagtaaggctg

SEQ ID NO: 568195 - DNA, 15 bp, Homo sapiens
tcagagtaaggctga

SEQ ID NO: 568196 - DNA, 15 bp, Homo sapiens
cagagtaaggctgag

SEQ ID NO: 568197 - DNA, 15 bp, Homo sapiens
agagtaaggctgaga

SEQ ID NO: 568198 - DNA, 15 bp, Homo sapiens
gagtaaggctgagac

SEQ ID NO: 568199 - DNA, 15 bp, Homo sapiens
agtaaggctgagact

SEQ ID NO: 568200 - DNA, 15 bp, Homo sapiens
gtaaggctgagactc

SEQ ID NO: 568201 - DNA, 15 bp, Homo sapiens
taaggctgagactca

SEQ ID NO: 568202 - DNA, 15 bp, Homo sapiens
aaggctgagactcag

SEQ ID NO: 568203 - DNA, 15 bp, Homo sapiens
aggctgagactcaga

SEQ ID NO: 568204 - DNA, 15 bp, Homo sapiens
ggctgagactcagag

SEQ ID NO: 568205 - DNA, 15 bp, Homo sapiens
gctgagactcagagt

SEQ ID NO: 568206 - DNA, 15 bp, Homo sapiens
ctgagactcagagtc

SEQ ID NO: 568207 - DNA, 15 bp, Homo sapiens
tgagactcagagtca

SEQ ID NO: 568208 - DNA, 15 bp, Homo sapiens
gagactcagagtcaa

SEQ ID NO: 568209 - DNA, 15 bp, Homo sapiens
agactcagagtcaag

SEQ ID NO: 568210 - DNA, 15 bp, Homo sapiens
gactcagagtcaagt

SEQ ID NO: 568211 - DNA, 15 bp, Homo sapiens
actcagagtcaagtg

SEQ ID NO: 568212 - DNA, 15 bp, Homo sapiens
ctcagagtcaagtgg

SEQ ID NO: 568213 - DNA, 15 bp, Homo sapiens
tcagagtcaagtggg

SEQ ID NO: 568214 - DNA, 15 bp, Homo sapiens
cagagtcaagtgggg

SEQ ID NO: 568215 - DNA, 15 bp, Homo sapiens
agagtcaagtgggga

SEQ ID NO: 568216 - DNA, 15 bp, Homo sapiens
gagtcaagtggggaa

SEQ ID NO: 568217 - DNA, 15 bp, Homo sapiens
agtcaagtggggaag

SEQ ID NO: 568218 - DNA, 15 bp, Homo sapiens
gtcaagtggggaaga

SEQ ID NO: 568219 - DNA, 15 bp, Homo sapiens
tcaagtggggaagac

SEQ ID NO: 568220 - DNA, 15 bp, Homo sapiens
caagtggggaagact

SEQ ID NO: 568221 - DNA, 15 bp, Homo sapiens
aagtggggaagacta

SEQ ID NO: 568222 - DNA, 15 bp, Homo sapiens
agtggggaagactaa

SEQ ID NO: 568223 - DNA, 15 bp, Homo sapiens
gtggggaagactaag

SEQ ID NO: 568224 - DNA, 15 bp, Homo sapiens
tggggaagactaagt

SEQ ID NO: 568225 - DNA, 15 bp, Homo sapiens
ggggaagactaagtt

SEQ ID NO: 568226 - DNA, 15 bp, Homo sapiens
gggaagactaagttg

SEQ ID NO: 568227 - DNA, 15 bp, Homo sapiens
ggaagactaagttgc

SEQ ID NO: 568228 - DNA, 15 bp, Homo sapiens
gaagactaagttgca

SEQ ID NO: 568229 - DNA, 15 bp, Homo sapiens
aagactaagttgcag

SEQ ID NO: 568230 - DNA, 15 bp, Homo sapiens
agactaagttgcagt

SEQ ID NO: 568231 - DNA, 15 bp, Homo sapiens
gactaagttgcagta

SEQ ID NO: 568232 - DNA, 15 bp, Homo sapiens
actaagttgcagtat

SEQ ID NO: 568233 - DNA, 15 bp, Homo sapiens
ctaagttgcagtatg

SEQ ID NO: 568234 - DNA, 15 bp, Homo sapiens
taagttgcagtatgt

SEQ ID NO: 568235 - DNA, 15 bp, Homo sapiens
aagttgcagtatgta

SEQ ID NO: 568236 - DNA, 15 bp, Homo sapiens
agttgcagtatgtac

SEQ ID NO: 568237 - DNA, 15 bp, Homo sapiens
gttgcagtatgtact

SEQ ID NO: 568238 - DNA, 15 bp, Homo sapiens
ttgcagtatgtactg

SEQ ID NO: 568239 - DNA, 15 bp, Homo sapiens
tgcagtatgtactgg

SEQ ID NO: 568240 - DNA, 15 bp, Homo sapiens
gcagtatgtactggc

SEQ ID NO: 568241 - DNA, 15 bp, Homo sapiens
cagtatgtactggca

SEQ ID NO: 568242 - DNA, 15 bp, Homo sapiens
agtatgtactggcag

SEQ ID NO: 568243 - DNA, 15 bp, Homo sapiens
gtatgtactggcagt

SEQ ID NO: 568244 - DNA, 15 bp, Homo sapiens
tatgtactggcagtg

SEQ ID NO: 568245 - DNA, 15 bp, Homo sapiens
atgtactggcagtga

SEQ ID NO: 568246 - DNA, 15 bp, Homo sapiens
tgtactggcagtgaa

SEQ ID NO: 568247 - DNA, 15 bp, Homo sapiens
gtactggcagtgaag

SEQ ID NO: 568248 - DNA, 15 bp, Homo sapiens
tactggcagtgaaga

SEQ ID NO: 568249 - DNA, 15 bp, Homo sapiens
actggcagtgaagat

SEQ ID NO: 568250 - DNA, 15 bp, Homo sapiens
ctggcagtgaagata

SEQ ID NO: 568251 - DNA, 15 bp, Homo sapiens
tggcagtgaagataa

SEQ ID NO: 568252 - DNA, 15 bp, Homo sapiens
ggcagtgaagataag

SEQ ID NO: 568253 - DNA, 15 bp, Homo sapiens
gcagtgaagataagt

SEQ ID NO: 568254 - DNA, 15 bp, Homo sapiens
cagtgaagataagta

SEQ ID NO: 568255 - DNA, 15 bp, Homo sapiens
agtgaagataagtat

SEQ ID NO: 568256 - DNA, 15 bp, Homo sapiens
gtgaagataagtatt

SEQ ID NO: 568257 - DNA, 15 bp, Homo sapiens
tgaagataagtattt

SEQ ID NO: 568258 - DNA, 15 bp, Homo sapiens
gaagataagtattta

SEQ ID NO: 568259 - DNA, 15 bp, Homo sapiens
aagataagtatttat

SEQ ID NO: 568260 - DNA, 15 bp, Homo sapiens
agataagtatttatt

SEQ ID NO: 568261 - DNA, 15 bp, Homo sapiens
gataagtatttattc

SEQ ID NO: 568262 - DNA, 15 bp, Homo sapiens
ataagtatttattca

SEQ ID NO: 568263 - DNA, 15 bp, Homo sapiens
taagtatttattcat

SEQ ID NO: 568264 - DNA, 15 bp, Homo sapiens
aagtatttattcatt

SEQ ID NO: 568265 - DNA, 15 bp, Homo sapiens
agtatttattcattc

SEQ ID NO: 568266 - DNA, 15 bp, Homo sapiens
gtatttattcattca

SEQ ID NO: 568267 - DNA, 15 bp, Homo sapiens
tatttattcattcat

SEQ ID NO: 568268 - DNA, 15 bp, Homo sapiens
atttattcattcatt

SEQ ID NO: 568269 - DNA, 15 bp, Homo sapiens
tttattcattcattg

SEQ ID NO: 568270 - DNA, 15 bp, Homo sapiens
ttattcattcattga

SEQ ID NO: 568271 - DNA, 15 bp, Homo sapiens
tattcattcattgaa

SEQ ID NO: 568272 - DNA, 15 bp, Homo sapiens
attcattcattgaac

SEQ ID NO: 568273 - DNA, 15 bp, Homo sapiens
ttcattcattgaaca

SEQ ID NO: 568274 - DNA, 15 bp, Homo sapiens
tcattcattgaacat

SEQ ID NO: 568275 - DNA, 15 bp, Homo sapiens
cattcattgaacata

SEQ ID NO: 568276 - DNA, 15 bp, Homo sapiens
attcattgaacatac

SEQ ID NO: 568277 - DNA, 15 bp, Homo sapiens
ttcattgaacatacc

SEQ ID NO: 568278 - DNA, 15 bp, Homo sapiens
tcattgaacatacct

SEQ ID NO: 568279 - DNA, 15 bp, Homo sapiens
cattgaacatacctt

SEQ ID NO: 568280 - DNA, 15 bp, Homo sapiens
attgaacataccttg

SEQ ID NO: 568281 - DNA, 15 bp, Homo sapiens
ttgaacataccttga

SEQ ID NO: 568282 - DNA, 15 bp, Homo sapiens
tgaacataccttgaa

SEQ ID NO: 568283 - DNA, 15 bp, Homo sapiens
gaacataccttgaaa

SEQ ID NO: 568284 - DNA, 15 bp, Homo sapiens
aacataccttgaaat

SEQ ID NO: 568285 - DNA, 15 bp, Homo sapiens
acataccttgaaatc

SEQ ID NO: 568286 - DNA, 15 bp, Homo sapiens
cataccttgaaatca

SEQ ID NO: 568287 - DNA, 15 bp, Homo sapiens
ataccttgaaatcaa

SEQ ID NO: 568288 - DNA, 15 bp, Homo sapiens
taccttgaaatcaac

SEQ ID NO: 568289 - DNA, 15 bp, Homo sapiens
accttgaaatcaacc

SEQ ID NO: 568290 - DNA, 15 bp, Homo sapiens
ccttgaaatcaacca

SEQ ID NO: 568291 - DNA, 15 bp, Homo sapiens
cttgaaatcaaccac

SEQ ID NO: 568292 - DNA, 15 bp, Homo sapiens
ttgaaatcaaccact

SEQ ID NO: 568293 - DNA, 15 bp, Homo sapiens
tgaaatcaaccactt

SEQ ID NO: 568294 - DNA, 15 bp, Homo sapiens
gaaatcaaccacttt

SEQ ID NO: 568295 - DNA, 15 bp, Homo sapiens
aaatcaaccactttt

SEQ ID NO: 568296 - DNA, 15 bp, Homo sapiens
aatcaaccactttta

SEQ ID NO: 568297 - DNA, 15 bp, Homo sapiens
atcaaccacttttaa

SEQ ID NO: 568298 - DNA, 15 bp, Homo sapiens
tcaaccacttttaat

SEQ ID NO: 568299 - DNA, 15 bp, Homo sapiens
caaccacttttaatg

SEQ ID NO: 568300 - DNA, 15 bp, Homo sapiens
aaccacttttaatgt

SEQ ID NO: 568301 - DNA, 15 bp, Homo sapiens
accacttttaatgtg

SEQ ID NO: 568302 - DNA, 15 bp, Homo sapiens
ccacttttaatgtgc

SEQ ID NO: 568303 - DNA, 15 bp, Homo sapiens
cacttttaatgtgcc

SEQ ID NO: 568304 - DNA, 15 bp, Homo sapiens
acttttaatgtgcca

SEQ ID NO: 568305 - DNA, 15 bp, Homo sapiens
cttttaatgtgccag

SEQ ID NO: 568306 - DNA, 15 bp, Homo sapiens
ttttaatgtgccagg

SEQ ID NO: 568307 - DNA, 15 bp, Homo sapiens
tttaatgtgccaggg

SEQ ID NO: 568308 - DNA, 15 bp, Homo sapiens
ttaatgtgccaggga

SEQ ID NO: 568309 - DNA, 15 bp, Homo sapiens
taatgtgccagggac

SEQ ID NO: 568310 - DNA, 15 bp, Homo sapiens
aatgtgccagggaca

SEQ ID NO: 568311 - DNA, 15 bp, Homo sapiens
atgtgccagggacac

SEQ ID NO: 568312 - DNA, 15 bp, Homo sapiens
tgtgccagggacaca

SEQ ID NO: 568313 - DNA, 15 bp, Homo sapiens
gtgccagggacacaa

SEQ ID NO: 568314 - DNA, 15 bp, Homo sapiens
tgccagggacacaaa

SEQ ID NO: 568315 - DNA, 15 bp, Homo sapiens
gccagggacacaaag

SEQ ID NO: 568316 - DNA, 15 bp, Homo sapiens
ccagggacacaaaga

SEQ ID NO: 568317 - DNA, 15 bp, Homo sapiens
cagggacacaaagat

SEQ ID NO: 568318 - DNA, 15 bp, Homo sapiens
agggacacaaagata

SEQ ID NO: 568319 - DNA, 15 bp, Homo sapiens
gggacacaaagatag

SEQ ID NO: 568320 - DNA, 15 bp, Homo sapiens
ggacacaaagataga

SEQ ID NO: 568321 - DNA, 15 bp, Homo sapiens
gacacaaagatagaa

SEQ ID NO: 568322 - DNA, 15 bp, Homo sapiens
acacaaagatagaaa

SEQ ID NO: 568323 - DNA, 15 bp, Homo sapiens
cacaaagatagaaaa

SEQ ID NO: 568324 - DNA, 15 bp, Homo sapiens
acaaagatagaaaag

SEQ ID NO: 568325 - DNA, 15 bp, Homo sapiens
caaagatagaaaaga

SEQ ID NO: 568326 - DNA, 15 bp, Homo sapiens
aaagatagaaaagac

SEQ ID NO: 568327 - DNA, 15 bp, Homo sapiens
aagatagaaaagaca

SEQ ID NO: 568328 - DNA, 15 bp, Homo sapiens
agatagaaaagacat

SEQ ID NO: 568329 - DNA, 15 bp, Homo sapiens
gatagaaaagacatt

SEQ ID NO: 568330 - DNA, 15 bp, Homo sapiens
atagaaaagacattt

SEQ ID NO: 568331 - DNA, 15 bp, Homo sapiens
tagaaaagacatttg

SEQ ID NO: 568332 - DNA, 15 bp, Homo sapiens
agaaaagacatttgc

SEQ ID NO: 568333 - DNA, 15 bp, Homo sapiens
gaaaagacatttgcc

SEQ ID NO: 568334 - DNA, 15 bp, Homo sapiens
aaaagacatttgccc

SEQ ID NO: 568335 - DNA, 15 bp, Homo sapiens
aaagacatttgccct

SEQ ID NO: 568336 - DNA, 15 bp, Homo sapiens
aagacatttgccctg

SEQ ID NO: 568337 - DNA, 15 bp, Homo sapiens
agacatttgccctgt

SEQ ID NO: 568338 - DNA, 15 bp, Homo sapiens
gacatttgccctgtc

SEQ ID NO: 568339 - DNA, 15 bp, Homo sapiens
acatttgccctgtct

SEQ ID NO: 568340 - DNA, 15 bp, Homo sapiens
catttgccctgtctg

SEQ ID NO: 568341 - DNA, 15 bp, Homo sapiens
atttgccctgtctgg

SEQ ID NO: 568342 - DNA, 15 bp, Homo sapiens
tttgccctgtctgga

SEQ ID NO: 568343 - DNA, 15 bp, Homo sapiens
ttgccctgtctggaa

SEQ ID NO: 568344 - DNA, 15 bp, Homo sapiens
tgccctgtctggaag

SEQ ID NO: 568345 - DNA, 15 bp, Homo sapiens
gccctgtctggaagg

SEQ ID NO: 568346 - DNA, 15 bp, Homo sapiens
ccctgtctggaaggt

SEQ ID NO: 568347 - DNA, 15 bp, Homo sapiens
cctgtctggaaggta

SEQ ID NO: 568348 - DNA, 15 bp, Homo sapiens
ctgtctggaaggtac

SEQ ID NO: 568349 - DNA, 15 bp, Homo sapiens
tgtctggaaggtact

SEQ ID NO: 568350 - DNA, 15 bp, Homo sapiens
gtctggaaggtacta

SEQ ID NO: 568351 - DNA, 15 bp, Homo sapiens
tctggaaggtactaa

SEQ ID NO: 568352 - DNA, 15 bp, Homo sapiens
ctggaaggtactaat

SEQ ID NO: 568353 - DNA, 15 bp, Homo sapiens
tggaaggtactaata

SEQ ID NO: 568354 - DNA, 15 bp, Homo sapiens
ggaaggtactaataa

SEQ ID NO: 568355 - DNA, 15 bp, Homo sapiens
gaaggtactaataat

SEQ ID NO: 568356 - DNA, 15 bp, Homo sapiens
aaggtactaataatc

SEQ ID NO: 568357 - DNA, 15 bp, Homo sapiens
aggtactaataatcc

SEQ ID NO: 568358 - DNA, 15 bp, Homo sapiens
ggtactaataatcca

SEQ ID NO: 568359 - DNA, 15 bp, Homo sapiens
gtactaataatccaa

SEQ ID NO: 568360 - DNA, 15 bp, Homo sapiens
tactaataatccaat

SEQ ID NO: 568361 - DNA, 15 bp, Homo sapiens
actaataatccaata

SEQ ID NO: 568362 - DNA, 15 bp, Homo sapiens
ctaataatccaataa

SEQ ID NO: 568363 - DNA, 15 bp, Homo sapiens
taataatccaataag

SEQ ID NO: 568364 - DNA, 15 bp, Homo sapiens
aataatccaataagg

SEQ ID NO: 568365 - DNA, 15 bp, Homo sapiens
ataatccaataagga

SEQ ID NO: 568366 - DNA, 15 bp, Homo sapiens
taatccaataaggaa

SEQ ID NO: 568367 - DNA, 15 bp, Homo sapiens
aatccaataaggaaa

SEQ ID NO: 568368 - DNA, 15 bp, Homo sapiens
atccaataaggaaaa

SEQ ID NO: 568369 - DNA, 15 bp, Homo sapiens
tccaataaggaaaac

SEQ ID NO: 568370 - DNA, 15 bp, Homo sapiens
ccaataaggaaaaca

SEQ ID NO: 568371 - DNA, 15 bp, Homo sapiens
caataaggaaaacag

SEQ ID NO: 568372 - DNA, 15 bp, Homo sapiens
aataaggaaaacaga

SEQ ID NO: 568373 - DNA, 15 bp, Homo sapiens
ataaggaaaacagaa

SEQ ID NO: 568374 - DNA, 15 bp, Homo sapiens
taaggaaaacagaaa

SEQ ID NO: 568375 - DNA, 15 bp, Homo sapiens
aaggaaaacagaaat

SEQ ID NO: 568376 - DNA, 15 bp, Homo sapiens
aggaaaacagaaata

SEQ ID NO: 568377 - DNA, 15 bp, Homo sapiens
ggaaaacagaaatat

SEQ ID NO: 568378 - DNA, 15 bp, Homo sapiens
gaaaacagaaatata

SEQ ID NO: 568379 - DNA, 15 bp, Homo sapiens
aaaacagaaatataa

SEQ ID NO: 568380 - DNA, 15 bp, Homo sapiens
aaacagaaatataaa

SEQ ID NO: 568381 - DNA, 15 bp, Homo sapiens
aacagaaatataaat

SEQ ID NO: 568382 - DNA, 15 bp, Homo sapiens
acagaaatataaata

SEQ ID NO: 568383 - DNA, 15 bp, Homo sapiens
cagaaatataaataa

SEQ ID NO: 568384 - DNA, 15 bp, Homo sapiens
agaaatataaataaa

SEQ ID NO: 568385 - DNA, 15 bp, Homo sapiens
gaaatataaataaat

SEQ ID NO: 568386 - DNA, 15 bp, Homo sapiens
aaatataaataaatt

SEQ ID NO: 568387 - DNA, 15 bp, Homo sapiens
aatataaataaatta

SEQ ID NO: 568388 - DNA, 15 bp, Homo sapiens
atataaataaattat

SEQ ID NO: 568389 - DNA, 15 bp, Homo sapiens
tataaataaattatt

SEQ ID NO: 568390 - DNA, 15 bp, Homo sapiens
ataaataaattattc

SEQ ID NO: 568391 - DNA, 15 bp, Homo sapiens
taaataaattattct

SEQ ID NO: 568392 - DNA, 15 bp, Homo sapiens
aaataaattattcta

SEQ ID NO: 568393 - DNA, 15 bp, Homo sapiens
aataaattattctag

SEQ ID NO: 568394 - DNA, 15 bp, Homo sapiens
ataaattattctagt

SEQ ID NO: 568395 - DNA, 15 bp, Homo sapiens
taaattattctagta

SEQ ID NO: 568396 - DNA, 15 bp, Homo sapiens
aaattattctagtac

SEQ ID NO: 568397 - DNA, 15 bp, Homo sapiens
aattattctagtaca

SEQ ID NO: 568398 - DNA, 15 bp, Homo sapiens
attattctagtacac

SEQ ID NO: 568399 - DNA, 15 bp, Homo sapiens
ttattctagtacact

SEQ ID NO: 568400 - DNA, 15 bp, Homo sapiens
tattctagtacacta

SEQ ID NO: 568401 - DNA, 15 bp, Homo sapiens
attctagtacactaa

SEQ ID NO: 568402 - DNA, 15 bp, Homo sapiens
ttctagtacactaac

SEQ ID NO: 568403 - DNA, 15 bp, Homo sapiens
tctagtacactaacc

SEQ ID NO: 568404 - DNA, 15 bp, Homo sapiens
ctagtacactaacca

SEQ ID NO: 568405 - DNA, 15 bp, Homo sapiens
tagtacactaaccat

SEQ ID NO: 568406 - DNA, 15 bp, Homo sapiens
agtacactaaccatc

SEQ ID NO: 568407 - DNA, 15 bp, Homo sapiens
gtacactaaccatca

SEQ ID NO: 568408 - DNA, 15 bp, Homo sapiens
tacactaaccatcat

SEQ ID NO: 568409 - DNA, 15 bp, Homo sapiens
acactaaccatcata

SEQ ID NO: 568410 - DNA, 15 bp, Homo sapiens
cactaaccatcatag

SEQ ID NO: 568411 - DNA, 15 bp, Homo sapiens
actaaccatcatagt

SEQ ID NO: 568412 - DNA, 15 bp, Homo sapiens
ctaaccatcatagta

SEQ ID NO: 568413 - DNA, 15 bp, Homo sapiens
taaccatcatagtag

SEQ ID NO: 568414 - DNA, 15 bp, Homo sapiens
aaccatcatagtaga

SEQ ID NO: 568415 - DNA, 15 bp, Homo sapiens
accatcatagtagag

SEQ ID NO: 568416 - DNA, 15 bp, Homo sapiens
ccatcatagtagagg

SEQ ID NO: 568417 - DNA, 15 bp, Homo sapiens
catcatagtagaggt

SEQ ID NO: 568418 - DNA, 15 bp, Homo sapiens
atcatagtagaggta

SEQ ID NO: 568419 - DNA, 15 bp, Homo sapiens
tcatagtagaggtat

SEQ ID NO: 568420 - DNA, 15 bp, Homo sapiens
catagtagaggtatt

SEQ ID NO: 568421 - DNA, 15 bp, Homo sapiens
atagtagaggtattc

SEQ ID NO: 568422 - DNA, 15 bp, Homo sapiens
tagtagaggtattca

SEQ ID NO: 568423 - DNA, 15 bp, Homo sapiens
agtagaggtattcaa

SEQ ID NO: 568424 - DNA, 15 bp, Homo sapiens
gtagaggtattcaac

SEQ ID NO: 568425 - DNA, 15 bp, Homo sapiens
tagaggtattcaaca

SEQ ID NO: 568426 - DNA, 15 bp, Homo sapiens
agaggtattcaacat

SEQ ID NO: 568427 - DNA, 15 bp, Homo sapiens
gaggtattcaacatt

SEQ ID NO: 568428 - DNA, 15 bp, Homo sapiens
aggtattcaacattt

SEQ ID NO: 568429 - DNA, 15 bp, Homo sapiens
ggtattcaacatttg

SEQ ID NO: 568430 - DNA, 15 bp, Homo sapiens
gtattcaacatttgt

SEQ ID NO: 568431 - DNA, 15 bp, Homo sapiens
tattcaacatttgtt

SEQ ID NO: 568432 - DNA, 15 bp, Homo sapiens
attcaacatttgttg

SEQ ID NO: 568433 - DNA, 15 bp, Homo sapiens
ttcaacatttgttga

SEQ ID NO: 568434 - DNA, 15 bp, Homo sapiens
tcaacatttgttgag

SEQ ID NO: 568435 - DNA, 15 bp, Homo sapiens
caacatttgttgagt

SEQ ID NO: 568436 - DNA, 15 bp, Homo sapiens
aacatttgttgagtc

SEQ ID NO: 568437 - DNA, 15 bp, Homo sapiens
acatttgttgagtct

SEQ ID NO: 568438 - DNA, 15 bp, Homo sapiens
catttgttgagtctc

SEQ ID NO: 568439 - DNA, 15 bp, Homo sapiens
atttgttgagtctct

SEQ ID NO: 568440 - DNA, 15 bp, Homo sapiens
tttgttgagtctctg

SEQ ID NO: 568441 - DNA, 15 bp, Homo sapiens
ttgttgagtctctgc

SEQ ID NO: 568442 - DNA, 15 bp, Homo sapiens
tgttgagtctctgct

SEQ ID NO: 568443 - DNA, 15 bp, Homo sapiens
gttgagtctctgcta

SEQ ID NO: 568444 - DNA, 15 bp, Homo sapiens
ttgagtctctgctat

SEQ ID NO: 568445 - DNA, 15 bp, Homo sapiens
tgagtctctgctata

SEQ ID NO: 568446 - DNA, 15 bp, Homo sapiens
gagtctctgctatat

SEQ ID NO: 568447 - DNA, 15 bp, Homo sapiens
agtctctgctatatg

SEQ ID NO: 568448 - DNA, 15 bp, Homo sapiens
gtctctgctatatgc

SEQ ID NO: 568449 - DNA, 15 bp, Homo sapiens
tctctgctatatgcc

SEQ ID NO: 568450 - DNA, 15 bp, Homo sapiens
ctctgctatatgcca

SEQ ID NO: 568451 - DNA, 15 bp, Homo sapiens
tctgctatatgccaa

SEQ ID NO: 568452 - DNA, 15 bp, Homo sapiens
ctgctatatgccaag

SEQ ID NO: 568453 - DNA, 15 bp, Homo sapiens
tgctatatgccaagc

SEQ ID NO: 568454 - DNA, 15 bp, Homo sapiens
gctatatgccaagca

SEQ ID NO: 568455 - DNA, 15 bp, Homo sapiens
ctatatgccaagcag

SEQ ID NO: 568456 - DNA, 15 bp, Homo sapiens
tatatgccaagcagt

SEQ ID NO: 568457 - DNA, 15 bp, Homo sapiens
atatgccaagcagtg

SEQ ID NO: 568458 - DNA, 15 bp, Homo sapiens
tatgccaagcagtgt

SEQ ID NO: 568459 - DNA, 15 bp, Homo sapiens
atgccaagcagtgta

SEQ ID NO: 568460 - DNA, 15 bp, Homo sapiens
tgccaagcagtgtaa

SEQ ID NO: 568461 - DNA, 15 bp, Homo sapiens
gccaagcagtgtaat

SEQ ID NO: 568462 - DNA, 15 bp, Homo sapiens
ccaagcagtgtaatg

SEQ ID NO: 568463 - DNA, 15 bp, Homo sapiens
caagcagtgtaatga

SEQ ID NO: 568464 - DNA, 15 bp, Homo sapiens
aagcagtgtaatgag

SEQ ID NO: 568465 - DNA, 15 bp, Homo sapiens
agcagtgtaatgagg

SEQ ID NO: 568466 - DNA, 15 bp, Homo sapiens
gcagtgtaatgagga

SEQ ID NO: 568467 - DNA, 15 bp, Homo sapiens
cagtgtaatgaggaa

SEQ ID NO: 568468 - DNA, 15 bp, Homo sapiens
agtgtaatgaggaag

SEQ ID NO: 568469 - DNA, 15 bp, Homo sapiens
gtgtaatgaggaagc

SEQ ID NO: 568470 - DNA, 15 bp, Homo sapiens
tgtaatgaggaagca

SEQ ID NO: 568471 - DNA, 15 bp, Homo sapiens
gtaatgaggaagcag

SEQ ID NO: 568472 - DNA, 15 bp, Homo sapiens
taatgaggaagcaga

SEQ ID NO: 568473 - DNA, 15 bp, Homo sapiens
aatgaggaagcagag

SEQ ID NO: 568474 - DNA, 15 bp, Homo sapiens
atgaggaagcagagg

SEQ ID NO: 568475 - DNA, 15 bp, Homo sapiens
tgaggaagcagaggg

SEQ ID NO: 568476 - DNA, 15 bp, Homo sapiens
gaggaagcagagggt

SEQ ID NO: 568477 - DNA, 15 bp, Homo sapiens
aggaagcagagggta

SEQ ID NO: 568478 - DNA, 15 bp, Homo sapiens
ggaagcagagggtat

SEQ ID NO: 568479 - DNA, 15 bp, Homo sapiens
gaagcagagggtatg

SEQ ID NO: 568480 - DNA, 15 bp, Homo sapiens
aagcagagggtatgc

SEQ ID NO: 568481 - DNA, 15 bp, Homo sapiens
agcagagggtatgca

SEQ ID NO: 568482 - DNA, 15 bp, Homo sapiens
gcagagggtatgcac

SEQ ID NO: 568483 - DNA, 15 bp, Homo sapiens
cagagggtatgcaca

SEQ ID NO: 568484 - DNA, 15 bp, Homo sapiens
agagggtatgcacaa

SEQ ID NO: 568485 - DNA, 15 bp, Homo sapiens
gagggtatgcacaaa

SEQ ID NO: 568486 - DNA, 15 bp, Homo sapiens
agggtatgcacaaag

SEQ ID NO: 568487 - DNA, 15 bp, Homo sapiens
gggtatgcacaaagt

SEQ ID NO: 568488 - DNA, 15 bp, Homo sapiens
ggtatgcacaaagtt

SEQ ID NO: 568489 - DNA, 15 bp, Homo sapiens
gtatgcacaaagttc

SEQ ID NO: 568490 - DNA, 15 bp, Homo sapiens
tatgcacaaagttct

SEQ ID NO: 568491 - DNA, 15 bp, Homo sapiens
atgcacaaagttcta

SEQ ID NO: 568492 - DNA, 15 bp, Homo sapiens
tgcacaaagttctac

SEQ ID NO: 568493 - DNA, 15 bp, Homo sapiens
gcacaaagttctaca

SEQ ID NO: 568494 - DNA, 15 bp, Homo sapiens
cacaaagttctacaa

SEQ ID NO: 568495 - DNA, 15 bp, Homo sapiens
acaaagttctacaag

SEQ ID NO: 568496 - DNA, 15 bp, Homo sapiens
caaagttctacaaga

SEQ ID NO: 568497 - DNA, 15 bp, Homo sapiens
aaagttctacaagag

SEQ ID NO: 568498 - DNA, 15 bp, Homo sapiens
aagttctacaagagc

SEQ ID NO: 568499 - DNA, 15 bp, Homo sapiens
agttctacaagagca

SEQ ID NO: 568500 - DNA, 15 bp, Homo sapiens
gttctacaagagcac

SEQ ID NO: 568501 - DNA, 15 bp, Homo sapiens
ttctacaagagcaca

SEQ ID NO: 568502 - DNA, 15 bp, Homo sapiens
tctacaagagcacaa

SEQ ID NO: 568503 - DNA, 15 bp, Homo sapiens
ctacaagagcacaaa

SEQ ID NO: 568504 - DNA, 15 bp, Homo sapiens
tacaagagcacaaaa

SEQ ID NO: 568505 - DNA, 15 bp, Homo sapiens
acaagagcacaaaat

SEQ ID NO: 568506 - DNA, 15 bp, Homo sapiens
caagagcacaaaata

SEQ ID NO: 568507 - DNA, 15 bp, Homo sapiens
aagagcacaaaataa

SEQ ID NO: 568508 - DNA, 15 bp, Homo sapiens
agagcacaaaataag

SEQ ID NO: 568509 - DNA, 15 bp, Homo sapiens
gagcacaaaataagt

SEQ ID NO: 568510 - DNA, 15 bp, Homo sapiens
agcacaaaataagtt

SEQ ID NO: 568511 - DNA, 15 bp, Homo sapiens
gcacaaaataagttc

SEQ ID NO: 568512 - DNA, 15 bp, Homo sapiens
cacaaaataagttct

SEQ ID NO: 568513 - DNA, 15 bp, Homo sapiens
acaaaataagttctg

SEQ ID NO: 568514 - DNA, 15 bp, Homo sapiens
caaaataagttctgg

SEQ ID NO: 568515 - DNA, 15 bp, Homo sapiens
aaaataagttctggc

SEQ ID NO: 568516 - DNA, 15 bp, Homo sapiens
aaataagttctggca

SEQ ID NO: 568517 - DNA, 15 bp, Homo sapiens
aataagttctggcaa

SEQ ID NO: 568518 - DNA, 15 bp, Homo sapiens
ataagttctggcaaa

SEQ ID NO: 568519 - DNA, 15 bp, Homo sapiens
taagttctggcaaag

SEQ ID NO: 568520 - DNA, 15 bp, Homo sapiens
aagttctggcaaagg

SEQ ID NO: 568521 - DNA, 15 bp, Homo sapiens
agttctggcaaaggt

SEQ ID NO: 568522 - DNA, 15 bp, Homo sapiens
gttctggcaaaggtt

SEQ ID NO: 568523 - DNA, 15 bp, Homo sapiens
ttctggcaaaggttt

SEQ ID NO: 568524 - DNA, 15 bp, Homo sapiens
tctggcaaaggtttg

SEQ ID NO: 568525 - DNA, 15 bp, Homo sapiens
ctggcaaaggtttgt

SEQ ID NO: 568526 - DNA, 15 bp, Homo sapiens
tggcaaaggtttgta

SEQ ID NO: 568527 - DNA, 15 bp, Homo sapiens
ggcaaaggtttgtaa

SEQ ID NO: 568528 - DNA, 15 bp, Homo sapiens
gcaaaggtttgtaaa

SEQ ID NO: 568529 - DNA, 15 bp, Homo sapiens
caaaggtttgtaaag

SEQ ID NO: 568530 - DNA, 15 bp, Homo sapiens
aaaggtttgtaaaga

SEQ ID NO: 568531 - DNA, 15 bp, Homo sapiens
aaggtttgtaaagac

SEQ ID NO: 568532 - DNA, 15 bp, Homo sapiens
aggtttgtaaagaca

SEQ ID NO: 568533 - DNA, 15 bp, Homo sapiens
ggtttgtaaagacat

SEQ ID NO: 568534 - DNA, 15 bp, Homo sapiens
gtttgtaaagacatt

SEQ ID NO: 568535 - DNA, 15 bp, Homo sapiens
tttgtaaagacattc

SEQ ID NO: 568536 - DNA, 15 bp, Homo sapiens
ttgtaaagacattca

SEQ ID NO: 568537 - DNA, 15 bp, Homo sapiens
tgtaaagacattcac

SEQ ID NO: 568538 - DNA, 15 bp, Homo sapiens
gtaaagacattcaca

SEQ ID NO: 568539 - DNA, 15 bp, Homo sapiens
taaagacattcacaa

SEQ ID NO: 568540 - DNA, 15 bp, Homo sapiens
aaagacattcacaag

SEQ ID NO: 568541 - DNA, 15 bp, Homo sapiens
aagacattcacaagg

SEQ ID NO: 568542 - DNA, 15 bp, Homo sapiens
agacattcacaaggg

SEQ ID NO: 568543 - DNA, 15 bp, Homo sapiens
gacattcacaagggt

SEQ ID NO: 568544 - DNA, 15 bp, Homo sapiens
acattcacaagggtt

SEQ ID NO: 568545 - DNA, 15 bp, Homo sapiens
cattcacaagggttt

SEQ ID NO: 568546 - DNA, 15 bp, Homo sapiens
attcacaagggtttt

SEQ ID NO: 568547 - DNA, 15 bp, Homo sapiens
ttcacaagggttttc

SEQ ID NO: 568548 - DNA, 15 bp, Homo sapiens
tcacaagggttttca

SEQ ID NO: 568549 - DNA, 15 bp, Homo sapiens
cacaagggttttcac

SEQ ID NO: 568550 - DNA, 15 bp, Homo sapiens
acaagggttttcacc

SEQ ID NO: 568551 - DNA, 15 bp, Homo sapiens
caagggttttcacca

SEQ ID NO: 568552 - DNA, 15 bp, Homo sapiens
aagggttttcaccac

SEQ ID NO: 568553 - DNA, 15 bp, Homo sapiens
agggttttcaccaca

SEQ ID NO: 568554 - DNA, 15 bp, Homo sapiens
gggttttcaccacag

SEQ ID NO: 568555 - DNA, 15 bp, Homo sapiens
ggttttcaccacagt

SEQ ID NO: 568556 - DNA, 15 bp, Homo sapiens
gttttcaccacagta

SEQ ID NO: 568557 - DNA, 15 bp, Homo sapiens
ttttcaccacagtat

SEQ ID NO: 568558 - DNA, 15 bp, Homo sapiens
tttcaccacagtatg

SEQ ID NO: 568559 - DNA, 15 bp, Homo sapiens
ttcaccacagtatga

SEQ ID NO: 568560 - DNA, 15 bp, Homo sapiens
tcaccacagtatgac

SEQ ID NO: 568561 - DNA, 15 bp, Homo sapiens
caccacagtatgact

SEQ ID NO: 568562 - DNA, 15 bp, Homo sapiens
accacagtatgactt

SEQ ID NO: 568563 - DNA, 15 bp, Homo sapiens
ccacagtatgacttc

SEQ ID NO: 568564 - DNA, 15 bp, Homo sapiens
cacagtatgacttca

SEQ ID NO: 568565 - DNA, 15 bp, Homo sapiens
acagtatgacttcag

SEQ ID NO: 568566 - DNA, 15 bp, Homo sapiens
cagtatgacttcagg

SEQ ID NO: 568567 - DNA, 15 bp, Homo sapiens
agtatgacttcaggg

SEQ ID NO: 568568 - DNA, 15 bp, Homo sapiens
gtatgacttcaggga

SEQ ID NO: 568569 - DNA, 15 bp, Homo sapiens
tatgacttcagggag

SEQ ID NO: 568570 - DNA, 15 bp, Homo sapiens
atgacttcagggagt

SEQ ID NO: 568571 - DNA, 15 bp, Homo sapiens
tgacttcagggagtt

SEQ ID NO: 568572 - DNA, 15 bp, Homo sapiens
gacttcagggagttg

SEQ ID NO: 568573 - DNA, 15 bp, Homo sapiens
acttcagggagttgg

SEQ ID NO: 568574 - DNA, 15 bp, Homo sapiens
cttcagggagttggc

SEQ ID NO: 568575 - DNA, 15 bp, Homo sapiens
ttcagggagttggca

SEQ ID NO: 568576 - DNA, 15 bp, Homo sapiens
tcagggagttggcag

SEQ ID NO: 568577 - DNA, 15 bp, Homo sapiens
cagggagttggcagt

SEQ ID NO: 568578 - DNA, 15 bp, Homo sapiens
agggagttggcagta

SEQ ID NO: 568579 - DNA, 15 bp, Homo sapiens
gggagttggcagtaa

SEQ ID NO: 568580 - DNA, 15 bp, Homo sapiens
ggagttggcagtaac

SEQ ID NO: 568581 - DNA, 15 bp, Homo sapiens
gagttggcagtaacc

SEQ ID NO: 568582 - DNA, 15 bp, Homo sapiens
agttggcagtaacct

SEQ ID NO: 568583 - DNA, 15 bp, Homo sapiens
gttggcagtaaccta

SEQ ID NO: 568584 - DNA, 15 bp, Homo sapiens
ttggcagtaacctag

SEQ ID NO: 568585 - DNA, 15 bp, Homo sapiens
tggcagtaacctaga

SEQ ID NO: 568586 - DNA, 15 bp, Homo sapiens
ggcagtaacctagat

SEQ ID NO: 568587 - DNA, 15 bp, Homo sapiens
gcagtaacctagatg

SEQ ID NO: 568588 - DNA, 15 bp, Homo sapiens
cagtaacctagatgc

SEQ ID NO: 568589 - DNA, 15 bp, Homo sapiens
agtaacctagatgcc

SEQ ID NO: 568590 - DNA, 15 bp, Homo sapiens
gtaacctagatgccc

SEQ ID NO: 568591 - DNA, 15 bp, Homo sapiens
taacctagatgcccg

SEQ ID NO: 568592 - DNA, 15 bp, Homo sapiens
aacctagatgcccga

SEQ ID NO: 568593 - DNA, 15 bp, Homo sapiens
acctagatgcccgat

SEQ ID NO: 568594 - DNA, 15 bp, Homo sapiens
cctagatgcccgatc

SEQ ID NO: 568595 - DNA, 15 bp, Homo sapiens
ctagatgcccgatca

SEQ ID NO: 568596 - DNA, 15 bp, Homo sapiens
tagatgcccgatcag

SEQ ID NO: 568597 - DNA, 15 bp, Homo sapiens
agatgcccgatcagt

SEQ ID NO: 568598 - DNA, 15 bp, Homo sapiens
gatgcccgatcagta

SEQ ID NO: 568599 - DNA, 15 bp, Homo sapiens
atgcccgatcagtag

SEQ ID NO: 568600 - DNA, 15 bp, Homo sapiens
tgcccgatcagtagg

SEQ ID NO: 568601 - DNA, 15 bp, Homo sapiens
gcccgatcagtaggg

SEQ ID NO: 568602 - DNA, 15 bp, Homo sapiens
cccgatcagtaggga

SEQ ID NO: 568603 - DNA, 15 bp, Homo sapiens
ccgatcagtagggat

SEQ ID NO: 568604 - DNA, 15 bp, Homo sapiens
cgatcagtagggata

SEQ ID NO: 568605 - DNA, 15 bp, Homo sapiens
gatcagtagggatat

SEQ ID NO: 568606 - DNA, 15 bp, Homo sapiens
atcagtagggatatg

SEQ ID NO: 568607 - DNA, 15 bp, Homo sapiens
tcagtagggatatgt

SEQ ID NO: 568608 - DNA, 15 bp, Homo sapiens
cagtagggatatgta

SEQ ID NO: 568609 - DNA, 15 bp, Homo sapiens
agtagggatatgtat

SEQ ID NO: 568610 - DNA, 15 bp, Homo sapiens
gtagggatatgtatg

SEQ ID NO: 568611 - DNA, 15 bp, Homo sapiens
tagggatatgtatga

SEQ ID NO: 568612 - DNA, 15 bp, Homo sapiens
agggatatgtatgaa

SEQ ID NO: 568613 - DNA, 15 bp, Homo sapiens
gggatatgtatgaat

SEQ ID NO: 568614 - DNA, 15 bp, Homo sapiens
ggatatgtatgaata

SEQ ID NO: 568615 - DNA, 15 bp, Homo sapiens
gatatgtatgaataa

SEQ ID NO: 568616 - DNA, 15 bp, Homo sapiens
atatgtatgaataaa

SEQ ID NO: 568617 - DNA, 15 bp, Homo sapiens
tatgtatgaataaaa

SEQ ID NO: 568618 - DNA, 15 bp, Homo sapiens
atgtatgaataaaat

SEQ ID NO: 568619 - DNA, 15 bp, Homo sapiens
tgtatgaataaaatt

SEQ ID NO: 568620 - DNA, 15 bp, Homo sapiens
gtatgaataaaattt

SEQ ID NO: 568621 - DNA, 15 bp, Homo sapiens
tatgaataaaatttc

SEQ ID NO: 568622 - DNA, 15 bp, Homo sapiens
atgaataaaatttct

SEQ ID NO: 568623 - DNA, 15 bp, Homo sapiens
tgaataaaatttctg

SEQ ID NO: 568624 - DNA, 15 bp, Homo sapiens
gaataaaatttctgg

SEQ ID NO: 568625 - DNA, 15 bp, Homo sapiens
aataaaatttctggc

SEQ ID NO: 568626 - DNA, 15 bp, Homo sapiens
ataaaatttctggca

SEQ ID NO: 568627 - DNA, 15 bp, Homo sapiens
taaaatttctggcat

SEQ ID NO: 568628 - DNA, 15 bp, Homo sapiens
aaaatttctggcata

SEQ ID NO: 568629 - DNA, 15 bp, Homo sapiens
aaatttctggcatac

SEQ ID NO: 568630 - DNA, 15 bp, Homo sapiens
aatttctggcatact

SEQ ID NO: 568631 - DNA, 15 bp, Homo sapiens
atttctggcatactc

SEQ ID NO: 568632 - DNA, 15 bp, Homo sapiens
tttctggcatactcg

SEQ ID NO: 568633 - DNA, 15 bp, Homo sapiens
ttctggcatactcgg

SEQ ID NO: 568634 - DNA, 15 bp, Homo sapiens
tctggcatactcggt

SEQ ID NO: 568635 - DNA, 15 bp, Homo sapiens
ctggcatactcggta

SEQ ID NO: 568636 - DNA, 15 bp, Homo sapiens
tggcatactcggtag

SEQ ID NO: 568637 - DNA, 15 bp, Homo sapiens
ggcatactcggtagc

SEQ ID NO: 568638 - DNA, 15 bp, Homo sapiens
gcatactcggtagca

SEQ ID NO: 568639 - DNA, 15 bp, Homo sapiens
catactcggtagcaa

SEQ ID NO: 568640 - DNA, 15 bp, Homo sapiens
atactcggtagcaaa

SEQ ID NO: 568641 - DNA, 15 bp, Homo sapiens
tactcggtagcaaac

SEQ ID NO: 568642 - DNA, 15 bp, Homo sapiens
actcggtagcaaact

SEQ ID NO: 568643 - DNA, 15 bp, Homo sapiens
ctcggtagcaaacta

SEQ ID NO: 568644 - DNA, 15 bp, Homo sapiens
tcggtagcaaactag

SEQ ID NO: 568645 - DNA, 15 bp, Homo sapiens
cggtagcaaactagg

SEQ ID NO: 568646 - DNA, 15 bp, Homo sapiens
ggtagcaaactaggt

SEQ ID NO: 568647 - DNA, 15 bp, Homo sapiens
gtagcaaactaggtg

SEQ ID NO: 568648 - DNA, 15 bp, Homo sapiens
tagcaaactaggtgt

SEQ ID NO: 568649 - DNA, 15 bp, Homo sapiens
agcaaactaggtgta

SEQ ID NO: 568650 - DNA, 15 bp, Homo sapiens
gcaaactaggtgtac

SEQ ID NO: 568651 - DNA, 15 bp, Homo sapiens
caaactaggtgtaca

SEQ ID NO: 568652 - DNA, 15 bp, Homo sapiens
aaactaggtgtacac

SEQ ID NO: 568653 - DNA, 15 bp, Homo sapiens
aactaggtgtacaca

SEQ ID NO: 568654 - DNA, 15 bp, Homo sapiens
actaggtgtacacac

SEQ ID NO: 568655 - DNA, 15 bp, Homo sapiens
ctaggtgtacacaca

SEQ ID NO: 568656 - DNA, 15 bp, Homo sapiens
taggtgtacacacag

SEQ ID NO: 568657 - DNA, 15 bp, Homo sapiens
aggtgtacacacagc

SEQ ID NO: 568658 - DNA, 15 bp, Homo sapiens
ggtgtacacacagca

SEQ ID NO: 568659 - DNA, 15 bp, Homo sapiens
gtgtacacacagcaa

SEQ ID NO: 568660 - DNA, 15 bp, Homo sapiens
tgtacacacagcaat

SEQ ID NO: 568661 - DNA, 15 bp, Homo sapiens
gtacacacagcaatg

SEQ ID NO: 568662 - DNA, 15 bp, Homo sapiens
tacacacagcaatgt

SEQ ID NO: 568663 - DNA, 15 bp, Homo sapiens
acacacagcaatgtg

SEQ ID NO: 568664 - DNA, 15 bp, Homo sapiens
cacacagcaatgtgg

SEQ ID NO: 568665 - DNA, 15 bp, Homo sapiens
acacagcaatgtggg

SEQ ID NO: 568666 - DNA, 15 bp, Homo sapiens
cacagcaatgtgggt

SEQ ID NO: 568667 - DNA, 15 bp, Homo sapiens
acagcaatgtgggta

SEQ ID NO: 568668 - DNA, 15 bp, Homo sapiens
cagcaatgtgggtat

SEQ ID NO: 568669 - DNA, 15 bp, Homo sapiens
agcaatgtgggtata

SEQ ID NO: 568670 - DNA, 15 bp, Homo sapiens
gcaatgtgggtatag

SEQ ID NO: 568671 - DNA, 15 bp, Homo sapiens
caatgtgggtatagc

SEQ ID NO: 568672 - DNA, 15 bp, Homo sapiens
aatgtgggtatagct

SEQ ID NO: 568673 - DNA, 15 bp, Homo sapiens
atgtgggtatagctc

SEQ ID NO: 568674 - DNA, 15 bp, Homo sapiens
tgtgggtatagctca

SEQ ID NO: 568675 - DNA, 15 bp, Homo sapiens
gtgggtatagctcaa

SEQ ID NO: 568676 - DNA, 15 bp, Homo sapiens
tgggtatagctcaaa

SEQ ID NO: 568677 - DNA, 15 bp, Homo sapiens
gggtatagctcaaaa

SEQ ID NO: 568678 - DNA, 15 bp, Homo sapiens
ggtatagctcaaaaa

SEQ ID NO: 568679 - DNA, 15 bp, Homo sapiens
gtatagctcaaaaac

SEQ ID NO: 568680 - DNA, 15 bp, Homo sapiens
tatagctcaaaaaca

SEQ ID NO: 568681 - DNA, 15 bp, Homo sapiens
atagctcaaaaacag

SEQ ID NO: 568682 - DNA, 15 bp, Homo sapiens
tagctcaaaaacaga

SEQ ID NO: 568683 - DNA, 15 bp, Homo sapiens
agctcaaaaacagac

SEQ ID NO: 568684 - DNA, 15 bp, Homo sapiens
gctcaaaaacagact

SEQ ID NO: 568685 - DNA, 15 bp, Homo sapiens
ctcaaaaacagactg

SEQ ID NO: 568686 - DNA, 15 bp, Homo sapiens
tcaaaaacagactgt

SEQ ID NO: 568687 - DNA, 15 bp, Homo sapiens
caaaaacagactgtt

SEQ ID NO: 568688 - DNA, 15 bp, Homo sapiens
aaaaacagactgttg

SEQ ID NO: 568689 - DNA, 15 bp, Homo sapiens
aaaacagactgttga

SEQ ID NO: 568690 - DNA, 15 bp, Homo sapiens
aaacagactgttgag

SEQ ID NO: 568691 - DNA, 15 bp, Homo sapiens
aacagactgttgagt

SEQ ID NO: 568692 - DNA, 15 bp, Homo sapiens
acagactgttgagta

SEQ ID NO: 568693 - DNA, 15 bp, Homo sapiens
cagactgttgagtaa

SEQ ID NO: 568694 - DNA, 15 bp, Homo sapiens
agactgttgagtaaa

SEQ ID NO: 568695 - DNA, 15 bp, Homo sapiens
gactgttgagtaaaa

SEQ ID NO: 568696 - DNA, 15 bp, Homo sapiens
actgttgagtaaaac

SEQ ID NO: 568697 - DNA, 15 bp, Homo sapiens
ctgttgagtaaaaca

SEQ ID NO: 568698 - DNA, 15 bp, Homo sapiens
tgttgagtaaaacag

SEQ ID NO: 568699 - DNA, 15 bp, Homo sapiens
gttgagtaaaacagt

SEQ ID NO: 568700 - DNA, 15 bp, Homo sapiens
ttgagtaaaacagtg

SEQ ID NO: 568701 - DNA, 15 bp, Homo sapiens
tgagtaaaacagtgg

SEQ ID NO: 568702 - DNA, 15 bp, Homo sapiens
gagtaaaacagtggg

SEQ ID NO: 568703 - DNA, 15 bp, Homo sapiens
agtaaaacagtggga

SEQ ID NO: 568704 - DNA, 15 bp, Homo sapiens
gtaaaacagtgggaa

SEQ ID NO: 568705 - DNA, 15 bp, Homo sapiens
taaaacagtgggaaa

SEQ ID NO: 568706 - DNA, 15 bp, Homo sapiens
aaaacagtgggaaat

SEQ ID NO: 568707 - DNA, 15 bp, Homo sapiens
aaacagtgggaaata

SEQ ID NO: 568708 - DNA, 15 bp, Homo sapiens
aacagtgggaaatag

SEQ ID NO: 568709 - DNA, 15 bp, Homo sapiens
acagtgggaaataga

SEQ ID NO: 568710 - DNA, 15 bp, Homo sapiens
cagtgggaaatagag

SEQ ID NO: 568711 - DNA, 15 bp, Homo sapiens
agtgggaaatagaga

SEQ ID NO: 568712 - DNA, 15 bp, Homo sapiens
gtgggaaatagagat

SEQ ID NO: 568713 - DNA, 15 bp, Homo sapiens
tgggaaatagagatt

SEQ ID NO: 568714 - DNA, 15 bp, Homo sapiens
gggaaatagagattt

SEQ ID NO: 568715 - DNA, 15 bp, Homo sapiens
ggaaatagagattta

SEQ ID NO: 568716 - DNA, 15 bp, Homo sapiens
gaaatagagatttac

SEQ ID NO: 568717 - DNA, 15 bp, Homo sapiens
aaatagagatttaca

SEQ ID NO: 568718 - DNA, 15 bp, Homo sapiens
aatagagatttacag

SEQ ID NO: 568719 - DNA, 15 bp, Homo sapiens
atagagatttacagt

SEQ ID NO: 568720 - DNA, 15 bp, Homo sapiens
tagagatttacagtc

SEQ ID NO: 568721 - DNA, 15 bp, Homo sapiens
agagatttacagtcc

SEQ ID NO: 568722 - DNA, 15 bp, Homo sapiens
gagatttacagtcca

SEQ ID NO: 568723 - DNA, 15 bp, Homo sapiens
agatttacagtccaa

SEQ ID NO: 568724 - DNA, 15 bp, Homo sapiens
gatttacagtccaat

SEQ ID NO: 568725 - DNA, 15 bp, Homo sapiens
atttacagtccaata

SEQ ID NO: 568726 - DNA, 15 bp, Homo sapiens
tttacagtccaatac

SEQ ID NO: 568727 - DNA, 15 bp, Homo sapiens
ttacagtccaatacc

SEQ ID NO: 568728 - DNA, 15 bp, Homo sapiens
tacagtccaatacca

SEQ ID NO: 568729 - DNA, 15 bp, Homo sapiens
acagtccaataccat

SEQ ID NO: 568730 - DNA, 15 bp, Homo sapiens
cagtccaataccatc

SEQ ID NO: 568731 - DNA, 15 bp, Homo sapiens
agtccaataccatct

SEQ ID NO: 568732 - DNA, 15 bp, Homo sapiens
gtccaataccatctc

SEQ ID NO: 568733 - DNA, 15 bp, Homo sapiens
tccaataccatctct

SEQ ID NO: 568734 - DNA, 15 bp, Homo sapiens
ccaataccatctctg

SEQ ID NO: 568735 - DNA, 15 bp, Homo sapiens
caataccatctctgt

SEQ ID NO: 568736 - DNA, 15 bp, Homo sapiens
aataccatctctgta

SEQ ID NO: 568737 - DNA, 15 bp, Homo sapiens
ataccatctctgtaa

SEQ ID NO: 568738 - DNA, 15 bp, Homo sapiens
taccatctctgtaaa

SEQ ID NO: 568739 - DNA, 15 bp, Homo sapiens
accatctctgtaaat

SEQ ID NO: 568740 - DNA, 15 bp, Homo sapiens
ccatctctgtaaatg

SEQ ID NO: 568741 - DNA, 15 bp, Homo sapiens
catctctgtaaatgc

SEQ ID NO: 568742 - DNA, 15 bp, Homo sapiens
atctctgtaaatgca

SEQ ID NO: 568743 - DNA, 15 bp, Homo sapiens
tctctgtaaatgcaa

SEQ ID NO: 568744 - DNA, 15 bp, Homo sapiens
ctctgtaaatgcaag

SEQ ID NO: 568745 - DNA, 15 bp, Homo sapiens
tctgtaaatgcaaga

SEQ ID NO: 568746 - DNA, 15 bp, Homo sapiens
ctgtaaatgcaagag

SEQ ID NO: 568747 - DNA, 15 bp, Homo sapiens
tgtaaatgcaagagg

SEQ ID NO: 568748 - DNA, 15 bp, Homo sapiens
gtaaatgcaagaggc

SEQ ID NO: 568749 - DNA, 15 bp, Homo sapiens
taaatgcaagaggca

SEQ ID NO: 568750 - DNA, 15 bp, Homo sapiens
aaatgcaagaggcat

SEQ ID NO: 568751 - DNA, 15 bp, Homo sapiens
aatgcaagaggcata

SEQ ID NO: 568752 - DNA, 15 bp, Homo sapiens
atgcaagaggcataa

SEQ ID NO: 568753 - DNA, 15 bp, Homo sapiens
tgcaagaggcataaa

SEQ ID NO: 568754 - DNA, 15 bp, Homo sapiens
gcaagaggcataaac

SEQ ID NO: 568755 - DNA, 15 bp, Homo sapiens
caagaggcataaaca

SEQ ID NO: 568756 - DNA, 15 bp, Homo sapiens
aagaggcataaacaa

SEQ ID NO: 568757 - DNA, 15 bp, Homo sapiens
agaggcataaacaaa

SEQ ID NO: 568758 - DNA, 15 bp, Homo sapiens
gaggcataaacaaaa

SEQ ID NO: 568759 - DNA, 15 bp, Homo sapiens
aggcataaacaaaac

SEQ ID NO: 568760 - DNA, 15 bp, Homo sapiens
ggcataaacaaaaca

SEQ ID NO: 568761 - DNA, 15 bp, Homo sapiens
gcataaacaaaacat

SEQ ID NO: 568762 - DNA, 15 bp, Homo sapiens
cataaacaaaacatt

SEQ ID NO: 568763 - DNA, 15 bp, Homo sapiens
ataaacaaaacatta

SEQ ID NO: 568764 - DNA, 15 bp, Homo sapiens
taaacaaaacattat

SEQ ID NO: 568765 - DNA, 15 bp, Homo sapiens
aaacaaaacattatc

SEQ ID NO: 568766 - DNA, 15 bp, Homo sapiens
aacaaaacattatct

SEQ ID NO: 568767 - DNA, 15 bp, Homo sapiens
acaaaacattatctg

SEQ ID NO: 568768 - DNA, 15 bp, Homo sapiens
caaaacattatctgt

SEQ ID NO: 568769 - DNA, 15 bp, Homo sapiens
aaaacattatctgtg

SEQ ID NO: 568770 - DNA, 15 bp, Homo sapiens
aaacattatctgtgt

SEQ ID NO: 568771 - DNA, 15 bp, Homo sapiens
aacattatctgtgtt

SEQ ID NO: 568772 - DNA, 15 bp, Homo sapiens
acattatctgtgtta

SEQ ID NO: 568773 - DNA, 15 bp, Homo sapiens
cattatctgtgttaa

SEQ ID NO: 568774 - DNA, 15 bp, Homo sapiens
attatctgtgttaaa

SEQ ID NO: 568775 - DNA, 15 bp, Homo sapiens
ttatctgtgttaaat

SEQ ID NO: 568776 - DNA, 15 bp, Homo sapiens
tatctgtgttaaatt

SEQ ID NO: 568777 - DNA, 15 bp, Homo sapiens
atctgtgttaaatta

SEQ ID NO: 568778 - DNA, 15 bp, Homo sapiens
tctgtgttaaattat

SEQ ID NO: 568779 - DNA, 15 bp, Homo sapiens
ctgtgttaaattatc

SEQ ID NO: 568780 - DNA, 15 bp, Homo sapiens
tgtgttaaattatca

SEQ ID NO: 568781 - DNA, 15 bp, Homo sapiens
gtgttaaattatcaa

SEQ ID NO: 568782 - DNA, 15 bp, Homo sapiens
tgttaaattatcaag

SEQ ID NO: 568783 - DNA, 15 bp, Homo sapiens
gttaaattatcaagg

SEQ ID NO: 568784 - DNA, 15 bp, Homo sapiens
ttaaattatcaagga

SEQ ID NO: 568785 - DNA, 15 bp, Homo sapiens
taaattatcaaggat

SEQ ID NO: 568786 - DNA, 15 bp, Homo sapiens
aaattatcaaggatc

SEQ ID NO: 568787 - DNA, 15 bp, Homo sapiens
aattatcaaggatct

SEQ ID NO: 568788 - DNA, 15 bp, Homo sapiens
attatcaaggatctc

SEQ ID NO: 568789 - DNA, 15 bp, Homo sapiens
ttatcaaggatctct

SEQ ID NO: 568790 - DNA, 15 bp, Homo sapiens
tatcaaggatctcta

SEQ ID NO: 568791 - DNA, 15 bp, Homo sapiens
atcaaggatctctat

SEQ ID NO: 568792 - DNA, 15 bp, Homo sapiens
tcaaggatctctatc

SEQ ID NO: 568793 - DNA, 15 bp, Homo sapiens
caaggatctctatcg

SEQ ID NO: 568794 - DNA, 15 bp, Homo sapiens
aaggatctctatcga

SEQ ID NO: 568795 - DNA, 15 bp, Homo sapiens
aggatctctatcgaa

SEQ ID NO: 568796 - DNA, 15 bp, Homo sapiens
ggatctctatcgaac

SEQ ID NO: 568797 - DNA, 15 bp, Homo sapiens
gatctctatcgaaca

SEQ ID NO: 568798 - DNA, 15 bp, Homo sapiens
atctctatcgaacat

SEQ ID NO: 568799 - DNA, 15 bp, Homo sapiens
tctctatcgaacata

SEQ ID NO: 568800 - DNA, 15 bp, Homo sapiens
ctctatcgaacatat

SEQ ID NO: 568801 - DNA, 15 bp, Homo sapiens
tctatcgaacatatt

SEQ ID NO: 568802 - DNA, 15 bp, Homo sapiens
ctatcgaacatattg

SEQ ID NO: 568803 - DNA, 15 bp, Homo sapiens
tatcgaacatattgc

SEQ ID NO: 568804 - DNA, 15 bp, Homo sapiens
atcgaacatattgca

SEQ ID NO: 568805 - DNA, 15 bp, Homo sapiens
tcgaacatattgcag

SEQ ID NO: 568806 - DNA, 15 bp, Homo sapiens
cgaacatattgcagc

SEQ ID NO: 568807 - DNA, 15 bp, Homo sapiens
gaacatattgcagct

SEQ ID NO: 568808 - DNA, 15 bp, Homo sapiens
aacatattgcagctt

SEQ ID NO: 568809 - DNA, 15 bp, Homo sapiens
acatattgcagcttg

SEQ ID NO: 568810 - DNA, 15 bp, Homo sapiens
catattgcagcttgt

SEQ ID NO: 568811 - DNA, 15 bp, Homo sapiens
atattgcagcttgtg

SEQ ID NO: 568812 - DNA, 15 bp, Homo sapiens
tattgcagcttgtgt

SEQ ID NO: 568813 - DNA, 15 bp, Homo sapiens
attgcagcttgtgtc

SEQ ID NO: 568814 - DNA, 15 bp, Homo sapiens
ttgcagcttgtgtct

SEQ ID NO: 568815 - DNA, 15 bp, Homo sapiens
tgcagcttgtgtcta

SEQ ID NO: 568816 - DNA, 15 bp, Homo sapiens
gcagcttgtgtctag

SEQ ID NO: 568817 - DNA, 15 bp, Homo sapiens
cagcttgtgtctaga

SEQ ID NO: 568818 - DNA, 15 bp, Homo sapiens
agcttgtgtctagaa

SEQ ID NO: 568819 - DNA, 15 bp, Homo sapiens
gcttgtgtctagaag

SEQ ID NO: 568820 - DNA, 15 bp, Homo sapiens
cttgtgtctagaaga

SEQ ID NO: 568821 - DNA, 15 bp, Homo sapiens
ttgtgtctagaagaa

SEQ ID NO: 568822 - DNA, 15 bp, Homo sapiens
tgtgtctagaagaat

SEQ ID NO: 568823 - DNA, 15 bp, Homo sapiens
gtgtctagaagaatg

SEQ ID NO: 568824 - DNA, 15 bp, Homo sapiens
tgtctagaagaatga

SEQ ID NO: 568825 - DNA, 15 bp, Homo sapiens
gtctagaagaatgag

SEQ ID NO: 568826 - DNA, 15 bp, Homo sapiens
tctagaagaatgaga

SEQ ID NO: 568827 - DNA, 15 bp, Homo sapiens
ctagaagaatgagag

SEQ ID NO: 568828 - DNA, 15 bp, Homo sapiens
tagaagaatgagagt

SEQ ID NO: 568829 - DNA, 15 bp, Homo sapiens
agaagaatgagagtg

SEQ ID NO: 568830 - DNA, 15 bp, Homo sapiens
gaagaatgagagtgg

SEQ ID NO: 568831 - DNA, 15 bp, Homo sapiens
aagaatgagagtggg

SEQ ID NO: 568832 - DNA, 15 bp, Homo sapiens
agaatgagagtgggg

SEQ ID NO: 568833 - DNA, 15 bp, Homo sapiens
gaatgagagtgggga

SEQ ID NO: 568834 - DNA, 15 bp, Homo sapiens
aatgagagtggggat

SEQ ID NO: 568835 - DNA, 15 bp, Homo sapiens
atgagagtggggatc

SEQ ID NO: 568836 - DNA, 15 bp, Homo sapiens
tgagagtggggatcg

SEQ ID NO: 568837 - DNA, 15 bp, Homo sapiens
gagagtggggatcga

SEQ ID NO: 568838 - DNA, 15 bp, Homo sapiens
agagtggggatcgag

SEQ ID NO: 568839 - DNA, 15 bp, Homo sapiens
gagtggggatcgaga

SEQ ID NO: 568840 - DNA, 15 bp, Homo sapiens
agtggggatcgagaa

SEQ ID NO: 568841 - DNA, 15 bp, Homo sapiens
gtggggatcgagaaa

SEQ ID NO: 568842 - DNA, 15 bp, Homo sapiens
tggggatcgagaaag

SEQ ID NO: 568843 - DNA, 15 bp, Homo sapiens
ggggatcgagaaaga

SEQ ID NO: 568844 - DNA, 15 bp, Homo sapiens
gggatcgagaaagat

SEQ ID NO: 568845 - DNA, 15 bp, Homo sapiens
ggatcgagaaagatg

SEQ ID NO: 568846 - DNA, 15 bp, Homo sapiens
gatcgagaaagatga

SEQ ID NO: 568847 - DNA, 15 bp, Homo sapiens
atcgagaaagatgag

SEQ ID NO: 568848 - DNA, 15 bp, Homo sapiens
tcgagaaagatgagg

SEQ ID NO: 568849 - DNA, 15 bp, Homo sapiens
cgagaaagatgagga

SEQ ID NO: 568850 - DNA, 15 bp, Homo sapiens
gagaaagatgaggaa

SEQ ID NO: 568851 - DNA, 15 bp, Homo sapiens
agaaagatgaggaaa

SEQ ID NO: 568852 - DNA, 15 bp, Homo sapiens
gaaagatgaggaaaa

SEQ ID NO: 568853 - DNA, 15 bp, Homo sapiens
aaagatgaggaaaaa

SEQ ID NO: 568854 - DNA, 15 bp, Homo sapiens
aagatgaggaaaaaa

SEQ ID NO: 568855 - DNA, 15 bp, Homo sapiens
agatgaggaaaaaat

SEQ ID NO: 568856 - DNA, 15 bp, Homo sapiens
gatgaggaaaaaata

SEQ ID NO: 568857 - DNA, 15 bp, Homo sapiens
atgaggaaaaaataa

SEQ ID NO: 568858 - DNA, 15 bp, Homo sapiens
tgaggaaaaaataat

SEQ ID NO: 568859 - DNA, 15 bp, Homo sapiens
gaggaaaaaataata

SEQ ID NO: 568860 - DNA, 15 bp, Homo sapiens
aggaaaaaataatat

SEQ ID NO: 568861 - DNA, 15 bp, Homo sapiens
ggaaaaaataatata

SEQ ID NO: 568862 - DNA, 15 bp, Homo sapiens
gaaaaaataatataa

SEQ ID NO: 568863 - DNA, 15 bp, Homo sapiens
aaaaaataatataaa

SEQ ID NO: 568864 - DNA, 15 bp, Homo sapiens
aaaaataatataaac

SEQ ID NO: 568865 - DNA, 15 bp, Homo sapiens
aaaataatataaaca

SEQ ID NO: 568866 - DNA, 15 bp, Homo sapiens
aaataatataaacac

SEQ ID NO: 568867 - DNA, 15 bp, Homo sapiens
aataatataaacact

SEQ ID NO: 568868 - DNA, 15 bp, Homo sapiens
ataatataaacacta

SEQ ID NO: 568869 - DNA, 15 bp, Homo sapiens
taatataaacactat

SEQ ID NO: 568870 - DNA, 15 bp, Homo sapiens
aatataaacactata

SEQ ID NO: 568871 - DNA, 15 bp, Homo sapiens
atataaacactataa

SEQ ID NO: 568872 - DNA, 15 bp, Homo sapiens
tataaacactataaa

SEQ ID NO: 568873 - DNA, 15 bp, Homo sapiens
ataaacactataaaa

SEQ ID NO: 568874 - DNA, 15 bp, Homo sapiens
taaacactataaaat

SEQ ID NO: 568875 - DNA, 15 bp, Homo sapiens
aaacactataaaata

SEQ ID NO: 568876 - DNA, 15 bp, Homo sapiens
aacactataaaataa

SEQ ID NO: 568877 - DNA, 15 bp, Homo sapiens
acactataaaataat

SEQ ID NO: 568878 - DNA, 15 bp, Homo sapiens
cactataaaataatg

SEQ ID NO: 568879 - DNA, 15 bp, Homo sapiens
actataaaataatgt

SEQ ID NO: 568880 - DNA, 15 bp, Homo sapiens
ctataaaataatgta

SEQ ID NO: 568881 - DNA, 15 bp, Homo sapiens
tataaaataatgtaa

SEQ ID NO: 568882 - DNA, 15 bp, Homo sapiens
ataaaataatgtaaa

SEQ ID NO: 568883 - DNA, 15 bp, Homo sapiens
taaaataatgtaaac

SEQ ID NO: 568884 - DNA, 15 bp, Homo sapiens
aaaataatgtaaaca

SEQ ID NO: 568885 - DNA, 15 bp, Homo sapiens
aaataatgtaaacaa

SEQ ID NO: 568886 - DNA, 15 bp, Homo sapiens
aataatgtaaacaag

SEQ ID NO: 568887 - DNA, 15 bp, Homo sapiens
ataatgtaaacaagg

SEQ ID NO: 568888 - DNA, 15 bp, Homo sapiens
taatgtaaacaagga

SEQ ID NO: 568889 - DNA, 15 bp, Homo sapiens
aatgtaaacaaggac

SEQ ID NO: 568890 - DNA, 15 bp, Homo sapiens
atgtaaacaaggacc

SEQ ID NO: 568891 - DNA, 15 bp, Homo sapiens
tgtaaacaaggaccc

SEQ ID NO: 568892 - DNA, 15 bp, Homo sapiens
gtaaacaaggaccct

SEQ ID NO: 568893 - DNA, 15 bp, Homo sapiens
taaacaaggaccctg

SEQ ID NO: 568894 - DNA, 15 bp, Homo sapiens
aaacaaggaccctgt

SEQ ID NO: 568895 - DNA, 15 bp, Homo sapiens
aacaaggaccctgta

SEQ ID NO: 568896 - DNA, 15 bp, Homo sapiens
acaaggaccctgtag

SEQ ID NO: 568897 - DNA, 15 bp, Homo sapiens
caaggaccctgtagg

SEQ ID NO: 568898 - DNA, 15 bp, Homo sapiens
aaggaccctgtaggg

SEQ ID NO: 568899 - DNA, 15 bp, Homo sapiens
aggaccctgtaggga

SEQ ID NO: 568900 - DNA, 15 bp, Homo sapiens
ggaccctgtagggac

SEQ ID NO: 568901 - DNA, 15 bp, Homo sapiens
gaccctgtagggact

SEQ ID NO: 568902 - DNA, 15 bp, Homo sapiens
accctgtagggactg

SEQ ID NO: 568903 - DNA, 15 bp, Homo sapiens
ccctgtagggactga

SEQ ID NO: 568904 - DNA, 15 bp, Homo sapiens
cctgtagggactgat

SEQ ID NO: 568905 - DNA, 15 bp, Homo sapiens
ctgtagggactgata

SEQ ID NO: 568906 - DNA, 15 bp, Homo sapiens
tgtagggactgatat

SEQ ID NO: 568907 - DNA, 15 bp, Homo sapiens
gtagggactgatatg

SEQ ID NO: 568908 - DNA, 15 bp, Homo sapiens
tagggactgatatga

SEQ ID NO: 568909 - DNA, 15 bp, Homo sapiens
agggactgatatgac

SEQ ID NO: 568910 - DNA, 15 bp, Homo sapiens
gggactgatatgaca

SEQ ID NO: 568911 - DNA, 15 bp, Homo sapiens
ggactgatatgacaa

SEQ ID NO: 568912 - DNA, 15 bp, Homo sapiens
gactgatatgacaat

SEQ ID NO: 568913 - DNA, 15 bp, Homo sapiens
actgatatgacaatg

SEQ ID NO: 568914 - DNA, 15 bp, Homo sapiens
ctgatatgacaatgt

SEQ ID NO: 568915 - DNA, 15 bp, Homo sapiens
tgatatgacaatgtg

SEQ ID NO: 568916 - DNA, 15 bp, Homo sapiens
gatatgacaatgtgc

SEQ ID NO: 568917 - DNA, 15 bp, Homo sapiens
atatgacaatgtgct

SEQ ID NO: 568918 - DNA, 15 bp, Homo sapiens
tatgacaatgtgctg

SEQ ID NO: 568919 - DNA, 15 bp, Homo sapiens
atgacaatgtgctga

SEQ ID NO: 568920 - DNA, 15 bp, Homo sapiens
tgacaatgtgctgaa

SEQ ID NO: 568921 - DNA, 15 bp, Homo sapiens
gacaatgtgctgaaa

SEQ ID NO: 568922 - DNA, 15 bp, Homo sapiens
acaatgtgctgaaaa

SEQ ID NO: 568923 - DNA, 15 bp, Homo sapiens
caatgtgctgaaaat

SEQ ID NO: 568924 - DNA, 15 bp, Homo sapiens
aatgtgctgaaaatt

SEQ ID NO: 568925 - DNA, 15 bp, Homo sapiens
atgtgctgaaaattg

SEQ ID NO: 568926 - DNA, 15 bp, Homo sapiens
tgtgctgaaaattga

SEQ ID NO: 568927 - DNA, 15 bp, Homo sapiens
gtgctgaaaattgag

SEQ ID NO: 568928 - DNA, 15 bp, Homo sapiens
tgctgaaaattgagg

SEQ ID NO: 568929 - DNA, 15 bp, Homo sapiens
gctgaaaattgagga

SEQ ID NO: 568930 - DNA, 15 bp, Homo sapiens
ctgaaaattgaggag

SEQ ID NO: 568931 - DNA, 15 bp, Homo sapiens
tgaaaattgaggagc

SEQ ID NO: 568932 - DNA, 15 bp, Homo sapiens
gaaaattgaggagca

SEQ ID NO: 568933 - DNA, 15 bp, Homo sapiens
aaaattgaggagcaa

SEQ ID NO: 568934 - DNA, 15 bp, Homo sapiens
aaattgaggagcaaa

SEQ ID NO: 568935 - DNA, 15 bp, Homo sapiens
aattgaggagcaaag

SEQ ID NO: 568936 - DNA, 15 bp, Homo sapiens
attgaggagcaaagt

SEQ ID NO: 568937 - DNA, 15 bp, Homo sapiens
ttgaggagcaaagtt

SEQ ID NO: 568938 - DNA, 15 bp, Homo sapiens
tgaggagcaaagtta

SEQ ID NO: 568939 - DNA, 15 bp, Homo sapiens
gaggagcaaagttaa

SEQ ID NO: 568940 - DNA, 15 bp, Homo sapiens
aggagcaaagttaac

SEQ ID NO: 568941 - DNA, 15 bp, Homo sapiens
ggagcaaagttaact

SEQ ID NO: 568942 - DNA, 15 bp, Homo sapiens
gagcaaagttaactc

SEQ ID NO: 568943 - DNA, 15 bp, Homo sapiens
agcaaagttaactct

SEQ ID NO: 568944 - DNA, 15 bp, Homo sapiens
gcaaagttaactctc

SEQ ID NO: 568945 - DNA, 15 bp, Homo sapiens
caaagttaactctct

SEQ ID NO: 568946 - DNA, 15 bp, Homo sapiens
aaagttaactctctg

SEQ ID NO: 568947 - DNA, 15 bp, Homo sapiens
aagttaactctctgt

SEQ ID NO: 568948 - DNA, 15 bp, Homo sapiens
agttaactctctgta

SEQ ID NO: 568949 - DNA, 15 bp, Homo sapiens
gttaactctctgtac

SEQ ID NO: 568950 - DNA, 15 bp, Homo sapiens
ttaactctctgtacc

SEQ ID NO: 568951 - DNA, 15 bp, Homo sapiens
taactctctgtacct

SEQ ID NO: 568952 - DNA, 15 bp, Homo sapiens
aactctctgtacctg

SEQ ID NO: 568953 - DNA, 15 bp, Homo sapiens
actctctgtacctga

SEQ ID NO: 568954 - DNA, 15 bp, Homo sapiens
ctctctgtacctgag

SEQ ID NO: 568955 - DNA, 15 bp, Homo sapiens
tctctgtacctgaga

SEQ ID NO: 568956 - DNA, 15 bp, Homo sapiens
ctctgtacctgagat

SEQ ID NO: 568957 - DNA, 15 bp, Homo sapiens
tctgtacctgagata

SEQ ID NO: 568958 - DNA, 15 bp, Homo sapiens
ctgtacctgagataa

SEQ ID NO: 568959 - DNA, 15 bp, Homo sapiens
tgtacctgagataaa

SEQ ID NO: 568960 - DNA, 15 bp, Homo sapiens
gtacctgagataaaa

SEQ ID NO: 568961 - DNA, 15 bp, Homo sapiens
tacctgagataaaat

SEQ ID NO: 568962 - DNA, 15 bp, Homo sapiens
acctgagataaaata

SEQ ID NO: 568963 - DNA, 15 bp, Homo sapiens
cctgagataaaataa

SEQ ID NO: 568964 - DNA, 15 bp, Homo sapiens
ctgagataaaataac

SEQ ID NO: 568965 - DNA, 15 bp, Homo sapiens
tgagataaaataact

SEQ ID NO: 568966 - DNA, 15 bp, Homo sapiens
gagataaaataacta

SEQ ID NO: 568967 - DNA, 15 bp, Homo sapiens
agataaaataactag

SEQ ID NO: 568968 - DNA, 15 bp, Homo sapiens
gataaaataactagc

SEQ ID NO: 568969 - DNA, 15 bp, Homo sapiens
ataaaataactagct

SEQ ID NO: 568970 - DNA, 15 bp, Homo sapiens
taaaataactagcta

SEQ ID NO: 568971 - DNA, 15 bp, Homo sapiens
aaaataactagctaa

SEQ ID NO: 568972 - DNA, 15 bp, Homo sapiens
aaataactagctaat

SEQ ID NO: 568973 - DNA, 15 bp, Homo sapiens
aataactagctaata

SEQ ID NO: 568974 - DNA, 15 bp, Homo sapiens
ataactagctaatag

SEQ ID NO: 568975 - DNA, 15 bp, Homo sapiens
taactagctaatagg

SEQ ID NO: 568976 - DNA, 15 bp, Homo sapiens
aactagctaatagga

SEQ ID NO: 568977 - DNA, 15 bp, Homo sapiens
actagctaataggaa

SEQ ID NO: 568978 - DNA, 15 bp, Homo sapiens
ctagctaataggaat

SEQ ID NO: 568979 - DNA, 15 bp, Homo sapiens
tagctaataggaatc

SEQ ID NO: 568980 - DNA, 15 bp, Homo sapiens
agctaataggaatcc

SEQ ID NO: 568981 - DNA, 15 bp, Homo sapiens
gctaataggaatcca

SEQ ID NO: 568982 - DNA, 15 bp, Homo sapiens
ctaataggaatccag

SEQ ID NO: 568983 - DNA, 15 bp, Homo sapiens
taataggaatccagc

SEQ ID NO: 568984 - DNA, 15 bp, Homo sapiens
aataggaatccagct

SEQ ID NO: 568985 - DNA, 15 bp, Homo sapiens
ataggaatccagctg

SEQ ID NO: 568986 - DNA, 15 bp, Homo sapiens
taggaatccagctga

SEQ ID NO: 568987 - DNA, 15 bp, Homo sapiens
aggaatccagctgaa

SEQ ID NO: 568988 - DNA, 15 bp, Homo sapiens
ggaatccagctgaaa

SEQ ID NO: 568989 - DNA, 15 bp, Homo sapiens
gaatccagctgaaaa

SEQ ID NO: 568990 - DNA, 15 bp, Homo sapiens
aatccagctgaaaac

SEQ ID NO: 568991 - DNA, 15 bp, Homo sapiens
atccagctgaaaacc

SEQ ID NO: 568992 - DNA, 15 bp, Homo sapiens
tccagctgaaaacct

SEQ ID NO: 568993 - DNA, 15 bp, Homo sapiens
ccagctgaaaacctt

SEQ ID NO: 568994 - DNA, 15 bp, Homo sapiens
cagctgaaaacctta

SEQ ID NO: 568995 - DNA, 15 bp, Homo sapiens
agctgaaaaccttaa

SEQ ID NO: 568996 - DNA, 15 bp, Homo sapiens
gctgaaaaccttaag

SEQ ID NO: 568997 - DNA, 15 bp, Homo sapiens
ctgaaaaccttaagg

SEQ ID NO: 568998 - DNA, 15 bp, Homo sapiens
tgaaaaccttaaggt

SEQ ID NO: 568999 - DNA, 15 bp, Homo sapiens
gaaaaccttaaggtg

SEQ ID NO: 569000 - DNA, 15 bp, Homo sapiens
aaaaccttaaggtgc

SEQ ID NO: 569001 - DNA, 15 bp, Homo sapiens
aaaccttaaggtgca

SEQ ID NO: 569002 - DNA, 15 bp, Homo sapiens
aaccttaaggtgcag

SEQ ID NO: 569003 - DNA, 15 bp, Homo sapiens
accttaaggtgcagg

SEQ ID NO: 569004 - DNA, 15 bp, Homo sapiens
ccttaaggtgcaggg

SEQ ID NO: 569005 - DNA, 15 bp, Homo sapiens
cttaaggtgcagggc

SEQ ID NO: 569006 - DNA, 15 bp, Homo sapiens
ttaaggtgcagggcc

SEQ ID NO: 569007 - DNA, 15 bp, Homo sapiens
taaggtgcagggcct

SEQ ID NO: 569008 - DNA, 15 bp, Homo sapiens
aaggtgcagggcctc

SEQ ID NO: 569009 - DNA, 15 bp, Homo sapiens
aggtgcagggcctct

SEQ ID NO: 569010 - DNA, 15 bp, Homo sapiens
ggtgcagggcctcta

SEQ ID NO: 569011 - DNA, 15 bp, Homo sapiens
gtgcagggcctctat

SEQ ID NO: 569012 - DNA, 15 bp, Homo sapiens
tgcagggcctctatg

SEQ ID NO: 569013 - DNA, 15 bp, Homo sapiens
gcagggcctctatgg

SEQ ID NO: 569014 - DNA, 15 bp, Homo sapiens
cagggcctctatggg

SEQ ID NO: 569015 - DNA, 15 bp, Homo sapiens
agggcctctatgggg

SEQ ID NO: 569016 - DNA, 15 bp, Homo sapiens
gggcctctatggggc

SEQ ID NO: 569017 - DNA, 15 bp, Homo sapiens
ggcctctatggggcc

SEQ ID NO: 569018 - DNA, 15 bp, Homo sapiens
gcctctatggggccc

SEQ ID NO: 569019 - DNA, 15 bp, Homo sapiens
cctctatggggccca

SEQ ID NO: 569020 - DNA, 15 bp, Homo sapiens
ctctatggggcccag

SEQ ID NO: 569021 - DNA, 15 bp, Homo sapiens
tctatggggcccagg

SEQ ID NO: 569022 - DNA, 15 bp, Homo sapiens
ctatggggcccagga

SEQ ID NO: 569023 - DNA, 15 bp, Homo sapiens
tatggggcccaggaa

SEQ ID NO: 569024 - DNA, 15 bp, Homo sapiens
atggggcccaggaag

SEQ ID NO: 569025 - DNA, 15 bp, Homo sapiens
tggggcccaggaagg

SEQ ID NO: 569026 - DNA, 15 bp, Homo sapiens
ggggcccaggaagga

SEQ ID NO: 569027 - DNA, 15 bp, Homo sapiens
gggcccaggaaggat

SEQ ID NO: 569028 - DNA, 15 bp, Homo sapiens
ggcccaggaaggatg

SEQ ID NO: 569029 - DNA, 15 bp, Homo sapiens
gcccaggaaggatgt

SEQ ID NO: 569030 - DNA, 15 bp, Homo sapiens
cccaggaaggatgtg

SEQ ID NO: 569031 - DNA, 15 bp, Homo sapiens
ccaggaaggatgtgt

SEQ ID NO: 569032 - DNA, 15 bp, Homo sapiens
caggaaggatgtgta

SEQ ID NO: 569033 - DNA, 15 bp, Homo sapiens
aggaaggatgtgtag

SEQ ID NO: 569034 - DNA, 15 bp, Homo sapiens
ggaaggatgtgtaga

SEQ ID NO: 569035 - DNA, 15 bp, Homo sapiens
gaaggatgtgtagag

SEQ ID NO: 569036 - DNA, 15 bp, Homo sapiens
aaggatgtgtagaga

SEQ ID NO: 569037 - DNA, 15 bp, Homo sapiens
aggatgtgtagagac

SEQ ID NO: 569038 - DNA, 15 bp, Homo sapiens
ggatgtgtagagaca

SEQ ID NO: 569039 - DNA, 15 bp, Homo sapiens
gatgtgtagagacat

SEQ ID NO: 569040 - DNA, 15 bp, Homo sapiens
atgtgtagagacatg

SEQ ID NO: 569041 - DNA, 15 bp, Homo sapiens
tgtgtagagacatga

SEQ ID NO: 569042 - DNA, 15 bp, Homo sapiens
gtgtagagacatgaa

SEQ ID NO: 569043 - DNA, 15 bp, Homo sapiens
tgtagagacatgaac

SEQ ID NO: 569044 - DNA, 15 bp, Homo sapiens
gtagagacatgaacg

SEQ ID NO: 569045 - DNA, 15 bp, Homo sapiens
tagagacatgaacgg

SEQ ID NO: 569046 - DNA, 15 bp, Homo sapiens
agagacatgaacgga

SEQ ID NO: 569047 - DNA, 15 bp, Homo sapiens
gagacatgaacggat

SEQ ID NO: 569048 - DNA, 15 bp, Homo sapiens
agacatgaacggatg

SEQ ID NO: 569049 - DNA, 15 bp, Homo sapiens
gacatgaacggatga

SEQ ID NO: 569050 - DNA, 15 bp, Homo sapiens
acatgaacggatgaa

SEQ ID NO: 569051 - DNA, 15 bp, Homo sapiens
catgaacggatgaaa

SEQ ID NO: 569052 - DNA, 15 bp, Homo sapiens
atgaacggatgaaag

SEQ ID NO: 569053 - DNA, 15 bp, Homo sapiens
tgaacggatgaaagt

SEQ ID NO: 569054 - DNA, 15 bp, Homo sapiens
gaacggatgaaagtg

SEQ ID NO: 569055 - DNA, 15 bp, Homo sapiens
aacggatgaaagtgc

SEQ ID NO: 569056 - DNA, 15 bp, Homo sapiens
acggatgaaagtgca

SEQ ID NO: 569057 - DNA, 15 bp, Homo sapiens
cggatgaaagtgcat

SEQ ID NO: 569058 - DNA, 15 bp, Homo sapiens
ggatgaaagtgcatc

SEQ ID NO: 569059 - DNA, 15 bp, Homo sapiens
gatgaaagtgcatca

SEQ ID NO: 569060 - DNA, 15 bp, Homo sapiens
atgaaagtgcatcac

SEQ ID NO: 569061 - DNA, 15 bp, Homo sapiens
tgaaagtgcatcaca

SEQ ID NO: 569062 - DNA, 15 bp, Homo sapiens
gaaagtgcatcacag

SEQ ID NO: 569063 - DNA, 15 bp, Homo sapiens
aaagtgcatcacagg

SEQ ID NO: 569064 - DNA, 15 bp, Homo sapiens
aagtgcatcacaggt

SEQ ID NO: 569065 - DNA, 15 bp, Homo sapiens
agtgcatcacaggtt

SEQ ID NO: 569066 - DNA, 15 bp, Homo sapiens
gtgcatcacaggttc

SEQ ID NO: 569067 - DNA, 15 bp, Homo sapiens
tgcatcacaggttca

SEQ ID NO: 569068 - DNA, 15 bp, Homo sapiens
gcatcacaggttcag

SEQ ID NO: 569069 - DNA, 15 bp, Homo sapiens
catcacaggttcagg

SEQ ID NO: 569070 - DNA, 15 bp, Homo sapiens
atcacaggttcaggg

SEQ ID NO: 569071 - DNA, 15 bp, Homo sapiens
tcacaggttcaggga

SEQ ID NO: 569072 - DNA, 15 bp, Homo sapiens
cacaggttcagggaa

SEQ ID NO: 569073 - DNA, 15 bp, Homo sapiens
acaggttcagggaac

SEQ ID NO: 569074 - DNA, 15 bp, Homo sapiens
caggttcagggaaca

SEQ ID NO: 569075 - DNA, 15 bp, Homo sapiens
aggttcagggaacaa

SEQ ID NO: 569076 - DNA, 15 bp, Homo sapiens
ggttcagggaacaac

SEQ ID NO: 569077 - DNA, 15 bp, Homo sapiens
gttcagggaacaaca

SEQ ID NO: 569078 - DNA, 15 bp, Homo sapiens
ttcagggaacaacac

SEQ ID NO: 569079 - DNA, 15 bp, Homo sapiens
tcagggaacaacaca

SEQ ID NO: 569080 - DNA, 15 bp, Homo sapiens
cagggaacaacacag

SEQ ID NO: 569081 - DNA, 15 bp, Homo sapiens
agggaacaacacagg

SEQ ID NO: 569082 - DNA, 15 bp, Homo sapiens
gggaacaacacaggt

SEQ ID NO: 569083 - DNA, 15 bp, Homo sapiens
ggaacaacacaggtt

SEQ ID NO: 569084 - DNA, 15 bp, Homo sapiens
gaacaacacaggttg

SEQ ID NO: 569085 - DNA, 15 bp, Homo sapiens
aacaacacaggttga

SEQ ID NO: 569086 - DNA, 15 bp, Homo sapiens
acaacacaggttgag

SEQ ID NO: 569087 - DNA, 15 bp, Homo sapiens
caacacaggttgagt

SEQ ID NO: 569088 - DNA, 15 bp, Homo sapiens
aacacaggttgagtg

SEQ ID NO: 569089 - DNA, 15 bp, Homo sapiens
acacaggttgagtgt

SEQ ID NO: 569090 - DNA, 15 bp, Homo sapiens
cacaggttgagtgtg

SEQ ID NO: 569091 - DNA, 15 bp, Homo sapiens
acaggttgagtgtgg

SEQ ID NO: 569092 - DNA, 15 bp, Homo sapiens
caggttgagtgtggc

SEQ ID NO: 569093 - DNA, 15 bp, Homo sapiens
aggttgagtgtggct

SEQ ID NO: 569094 - DNA, 15 bp, Homo sapiens
ggttgagtgtggctt

SEQ ID NO: 569095 - DNA, 15 bp, Homo sapiens
gttgagtgtggcttg

SEQ ID NO: 569096 - DNA, 15 bp, Homo sapiens
ttgagtgtggcttgt

SEQ ID NO: 569097 - DNA, 15 bp, Homo sapiens
tgagtgtggcttgta

SEQ ID NO: 569098 - DNA, 15 bp, Homo sapiens
gagtgtggcttgtag

SEQ ID NO: 569099 - DNA, 15 bp, Homo sapiens
agtgtggcttgtagt

SEQ ID NO: 569100 - DNA, 15 bp, Homo sapiens
gtgtggcttgtagta

SEQ ID NO: 569101 - DNA, 15 bp, Homo sapiens
tgtggcttgtagtaa

SEQ ID NO: 569102 - DNA, 15 bp, Homo sapiens
gtggcttgtagtaaa

SEQ ID NO: 569103 - DNA, 15 bp, Homo sapiens
tggcttgtagtaaaa

SEQ ID NO: 569104 - DNA, 15 bp, Homo sapiens
ggcttgtagtaaaaa

SEQ ID NO: 569105 - DNA, 15 bp, Homo sapiens
gcttgtagtaaaaat

SEQ ID NO: 569106 - DNA, 15 bp, Homo sapiens
cttgtagtaaaaatg

SEQ ID NO: 569107 - DNA, 15 bp, Homo sapiens
ttgtagtaaaaatgg

SEQ ID NO: 569108 - DNA, 15 bp, Homo sapiens
tgtagtaaaaatggt

SEQ ID NO: 569109 - DNA, 15 bp, Homo sapiens
gtagtaaaaatggtt

SEQ ID NO: 569110 - DNA, 15 bp, Homo sapiens
tagtaaaaatggttg

SEQ ID NO: 569111 - DNA, 15 bp, Homo sapiens
agtaaaaatggttgt

SEQ ID NO: 569112 - DNA, 15 bp, Homo sapiens
gtaaaaatggttgtg

SEQ ID NO: 569113 - DNA, 15 bp, Homo sapiens
taaaaatggttgtga

SEQ ID NO: 569114 - DNA, 15 bp, Homo sapiens
aaaaatggttgtgaa

SEQ ID NO: 569115 - DNA, 15 bp, Homo sapiens
aaaatggttgtgaag

SEQ ID NO: 569116 - DNA, 15 bp, Homo sapiens
aaatggttgtgaaga

SEQ ID NO: 569117 - DNA, 15 bp, Homo sapiens
aatggttgtgaagag

SEQ ID NO: 569118 - DNA, 15 bp, Homo sapiens
atggttgtgaagagt

SEQ ID NO: 569119 - DNA, 15 bp, Homo sapiens
tggttgtgaagagtt

SEQ ID NO: 569120 - DNA, 15 bp, Homo sapiens
ggttgtgaagagttg

SEQ ID NO: 569121 - DNA, 15 bp, Homo sapiens
gttgtgaagagttga

SEQ ID NO: 569122 - DNA, 15 bp, Homo sapiens
ttgtgaagagttgac

SEQ ID NO: 569123 - DNA, 15 bp, Homo sapiens
tgtgaagagttgaca

SEQ ID NO: 569124 - DNA, 15 bp, Homo sapiens
gtgaagagttgacat

SEQ ID NO: 569125 - DNA, 15 bp, Homo sapiens
tgaagagttgacata

SEQ ID NO: 569126 - DNA, 15 bp, Homo sapiens
gaagagttgacatat

SEQ ID NO: 569127 - DNA, 15 bp, Homo sapiens
aagagttgacatatt

SEQ ID NO: 569128 - DNA, 15 bp, Homo sapiens
agagttgacatattt

SEQ ID NO: 569129 - DNA, 15 bp, Homo sapiens
gagttgacatatttt

SEQ ID NO: 569130 - DNA, 15 bp, Homo sapiens
agttgacatattttt

SEQ ID NO: 569131 - DNA, 15 bp, Homo sapiens
gttgacatattttta

SEQ ID NO: 569132 - DNA, 15 bp, Homo sapiens
ttgacatatttttaa

SEQ ID NO: 569133 - DNA, 15 bp, Homo sapiens
tgacatatttttaag

SEQ ID NO: 569134 - DNA, 15 bp, Homo sapiens
gacatatttttaagc

SEQ ID NO: 569135 - DNA, 15 bp, Homo sapiens
acatatttttaagcc

SEQ ID NO: 569136 - DNA, 15 bp, Homo sapiens
catatttttaagccc

SEQ ID NO: 569137 - DNA, 15 bp, Homo sapiens
atatttttaagccct

SEQ ID NO: 569138 - DNA, 15 bp, Homo sapiens
tatttttaagccctg

SEQ ID NO: 569139 - DNA, 15 bp, Homo sapiens
atttttaagccctgg

SEQ ID NO: 569140 - DNA, 15 bp, Homo sapiens
tttttaagccctggg

SEQ ID NO: 569141 - DNA, 15 bp, Homo sapiens
ttttaagccctgggt

SEQ ID NO: 569142 - DNA, 15 bp, Homo sapiens
tttaagccctgggta

SEQ ID NO: 569143 - DNA, 15 bp, Homo sapiens
ttaagccctgggtaa

SEQ ID NO: 569144 - DNA, 15 bp, Homo sapiens
taagccctgggtaaa

SEQ ID NO: 569145 - DNA, 15 bp, Homo sapiens
aagccctgggtaaat

SEQ ID NO: 569146 - DNA, 15 bp, Homo sapiens
agccctgggtaaatt

SEQ ID NO: 569147 - DNA, 15 bp, Homo sapiens
gccctgggtaaattg

SEQ ID NO: 569148 - DNA, 15 bp, Homo sapiens
ccctgggtaaattga

SEQ ID NO: 569149 - DNA, 15 bp, Homo sapiens
cctgggtaaattgaa

SEQ ID NO: 569150 - DNA, 15 bp, Homo sapiens
ctgggtaaattgaac

SEQ ID NO: 569151 - DNA, 15 bp, Homo sapiens
tgggtaaattgaaca

SEQ ID NO: 569152 - DNA, 15 bp, Homo sapiens
gggtaaattgaacaa

SEQ ID NO: 569153 - DNA, 15 bp, Homo sapiens
ggtaaattgaacaac

SEQ ID NO: 569154 - DNA, 15 bp, Homo sapiens
gtaaattgaacaaca

SEQ ID NO: 569155 - DNA, 15 bp, Homo sapiens
taaattgaacaacag

SEQ ID NO: 569156 - DNA, 15 bp, Homo sapiens
aaattgaacaacagc

SEQ ID NO: 569157 - DNA, 15 bp, Homo sapiens
aattgaacaacagct

SEQ ID NO: 569158 - DNA, 15 bp, Homo sapiens
attgaacaacagctt

SEQ ID NO: 569159 - DNA, 15 bp, Homo sapiens
ttgaacaacagctta

SEQ ID NO: 569160 - DNA, 15 bp, Homo sapiens
tgaacaacagcttac

SEQ ID NO: 569161 - DNA, 15 bp, Homo sapiens
gaacaacagcttaca

SEQ ID NO: 569162 - DNA, 15 bp, Homo sapiens
aacaacagcttacac

SEQ ID NO: 569163 - DNA, 15 bp, Homo sapiens
acaacagcttacact

SEQ ID NO: 569164 - DNA, 15 bp, Homo sapiens
caacagcttacactt

SEQ ID NO: 569165 - DNA, 15 bp, Homo sapiens
aacagcttacacttg

SEQ ID NO: 569166 - DNA, 15 bp, Homo sapiens
acagcttacacttgg

SEQ ID NO: 569167 - DNA, 15 bp, Homo sapiens
cagcttacacttgga

SEQ ID NO: 569168 - DNA, 15 bp, Homo sapiens
agcttacacttggag

SEQ ID NO: 569169 - DNA, 15 bp, Homo sapiens
gcttacacttggagg

SEQ ID NO: 569170 - DNA, 15 bp, Homo sapiens
cttacacttggaggg

SEQ ID NO: 569171 - DNA, 15 bp, Homo sapiens
ttacacttggagggg

SEQ ID NO: 569172 - DNA, 15 bp, Homo sapiens
tacacttggaggggt

SEQ ID NO: 569173 - DNA, 15 bp, Homo sapiens
acacttggaggggta

SEQ ID NO: 569174 - DNA, 15 bp, Homo sapiens
cacttggaggggtat

SEQ ID NO: 569175 - DNA, 15 bp, Homo sapiens
acttggaggggtata

SEQ ID NO: 569176 - DNA, 15 bp, Homo sapiens
cttggaggggtataa

SEQ ID NO: 569177 - DNA, 15 bp, Homo sapiens
ttggaggggtataat

SEQ ID NO: 569178 - DNA, 15 bp, Homo sapiens
tggaggggtataatc

SEQ ID NO: 569179 - DNA, 15 bp, Homo sapiens
ggaggggtataatca

SEQ ID NO: 569180 - DNA, 15 bp, Homo sapiens
gaggggtataatcat

SEQ ID NO: 569181 - DNA, 15 bp, Homo sapiens
aggggtataatcatt

SEQ ID NO: 569182 - DNA, 15 bp, Homo sapiens
ggggtataatcattc

SEQ ID NO: 569183 - DNA, 15 bp, Homo sapiens
gggtataatcattct

SEQ ID NO: 569184 - DNA, 15 bp, Homo sapiens
ggtataatcattcta

SEQ ID NO: 569185 - DNA, 15 bp, Homo sapiens
gtataatcattctaa

SEQ ID NO: 569186 - DNA, 15 bp, Homo sapiens
tataatcattctaat

SEQ ID NO: 569187 - DNA, 15 bp, Homo sapiens
ataatcattctaatc

SEQ ID NO: 569188 - DNA, 15 bp, Homo sapiens
taatcattctaatca

SEQ ID NO: 569189 - DNA, 15 bp, Homo sapiens
aatcattctaatcaa

SEQ ID NO: 569190 - DNA, 15 bp, Homo sapiens
atcattctaatcaat

SEQ ID NO: 569191 - DNA, 15 bp, Homo sapiens
tcattctaatcaatg

SEQ ID NO: 569192 - DNA, 15 bp, Homo sapiens
cattctaatcaatgt

SEQ ID NO: 569193 - DNA, 15 bp, Homo sapiens
attctaatcaatgtg

SEQ ID NO: 569194 - DNA, 15 bp, Homo sapiens
ttctaatcaatgtgt

SEQ ID NO: 569195 - DNA, 15 bp, Homo sapiens
tctaatcaatgtgtc

SEQ ID NO: 569196 - DNA, 15 bp, Homo sapiens
ctaatcaatgtgtcc

SEQ ID NO: 569197 - DNA, 15 bp, Homo sapiens
taatcaatgtgtccc

SEQ ID NO: 569198 - DNA, 15 bp, Homo sapiens
aatcaatgtgtcccc

SEQ ID NO: 569199 - DNA, 15 bp, Homo sapiens
atcaatgtgtcccct

SEQ ID NO: 569200 - DNA, 15 bp, Homo sapiens
tcaatgtgtcccctt

SEQ ID NO: 569201 - DNA, 15 bp, Homo sapiens
caatgtgtccccttt

SEQ ID NO: 569202 - DNA, 15 bp, Homo sapiens
aatgtgtcccctttt

SEQ ID NO: 569203 - DNA, 15 bp, Homo sapiens
atgtgtcccctttta

SEQ ID NO: 569204 - DNA, 15 bp, Homo sapiens
tgtgtccccttttac

SEQ ID NO: 569205 - DNA, 15 bp, Homo sapiens
gtgtccccttttact

SEQ ID NO: 569206 - DNA, 15 bp, Homo sapiens
tgtccccttttacta

SEQ ID NO: 569207 - DNA, 15 bp, Homo sapiens
gtccccttttactat

SEQ ID NO: 569208 - DNA, 15 bp, Homo sapiens
tccccttttactata

SEQ ID NO: 569209 - DNA, 15 bp, Homo sapiens
ccccttttactataa

SEQ ID NO: 569210 - DNA, 15 bp, Homo sapiens
cccttttactataat

SEQ ID NO: 569211 - DNA, 15 bp, Homo sapiens
ccttttactataata

SEQ ID NO: 569212 - DNA, 15 bp, Homo sapiens
cttttactataatac

SEQ ID NO: 569213 - DNA, 15 bp, Homo sapiens
ttttactataataca

SEQ ID NO: 569214 - DNA, 15 bp, Homo sapiens
tttactataatacat

SEQ ID NO: 569215 - DNA, 15 bp, Homo sapiens
ttactataatacatt

SEQ ID NO: 569216 - DNA, 15 bp, Homo sapiens
tactataatacattg

SEQ ID NO: 569217 - DNA, 15 bp, Homo sapiens
actataatacattgg

SEQ ID NO: 569218 - DNA, 15 bp, Homo sapiens
ctataatacattgga

SEQ ID NO: 569219 - DNA, 15 bp, Homo sapiens
tataatacattggag

SEQ ID NO: 569220 - DNA, 15 bp, Homo sapiens
ataatacattggagt

SEQ ID NO: 569221 - DNA, 15 bp, Homo sapiens
taatacattggagtt

SEQ ID NO: 569222 - DNA, 15 bp, Homo sapiens
aatacattggagttg

SEQ ID NO: 569223 - DNA, 15 bp, Homo sapiens
atacattggagttgc

SEQ ID NO: 569224 - DNA, 15 bp, Homo sapiens
tacattggagttgca

SEQ ID NO: 569225 - DNA, 15 bp, Homo sapiens
acattggagttgcag

SEQ ID NO: 569226 - DNA, 15 bp, Homo sapiens
cattggagttgcagc

SEQ ID NO: 569227 - DNA, 15 bp, Homo sapiens
attggagttgcagct

SEQ ID NO: 569228 - DNA, 15 bp, Homo sapiens
ttggagttgcagcta

SEQ ID NO: 569229 - DNA, 15 bp, Homo sapiens
tggagttgcagctaa

SEQ ID NO: 569230 - DNA, 15 bp, Homo sapiens
ggagttgcagctaat

SEQ ID NO: 569231 - DNA, 15 bp, Homo sapiens
gagttgcagctaatg

SEQ ID NO: 569232 - DNA, 15 bp, Homo sapiens
agttgcagctaatgc

SEQ ID NO: 569233 - DNA, 15 bp, Homo sapiens
gttgcagctaatgct

SEQ ID NO: 569234 - DNA, 15 bp, Homo sapiens
ttgcagctaatgctc

SEQ ID NO: 569235 - DNA, 15 bp, Homo sapiens
tgcagctaatgctct

SEQ ID NO: 569236 - DNA, 15 bp, Homo sapiens
gcagctaatgctctg

SEQ ID NO: 569237 - DNA, 15 bp, Homo sapiens
cagctaatgctctgc

SEQ ID NO: 569238 - DNA, 15 bp, Homo sapiens
agctaatgctctgct

SEQ ID NO: 569239 - DNA, 15 bp, Homo sapiens
gctaatgctctgctc

SEQ ID NO: 569240 - DNA, 15 bp, Homo sapiens
ctaatgctctgctcc

SEQ ID NO: 569241 - DNA, 15 bp, Homo sapiens
taatgctctgctccc

SEQ ID NO: 569242 - DNA, 15 bp, Homo sapiens
aatgctctgctccca

SEQ ID NO: 569243 - DNA, 15 bp, Homo sapiens
atgctctgctcccat

SEQ ID NO: 569244 - DNA, 15 bp, Homo sapiens
tgctctgctcccatt

SEQ ID NO: 569245 - DNA, 15 bp, Homo sapiens
gctctgctcccattc

SEQ ID NO: 569246 - DNA, 15 bp, Homo sapiens
ctctgctcccattca

SEQ ID NO: 569247 - DNA, 15 bp, Homo sapiens
tctgctcccattcag

SEQ ID NO: 569248 - DNA, 15 bp, Homo sapiens
ctgctcccattcagc

SEQ ID NO: 569249 - DNA, 15 bp, Homo sapiens
tgctcccattcagcc

SEQ ID NO: 569250 - DNA, 15 bp, Homo sapiens
gctcccattcagcct

SEQ ID NO: 569251 - DNA, 15 bp, Homo sapiens
ctcccattcagccta

SEQ ID NO: 569252 - DNA, 15 bp, Homo sapiens
tcccattcagcctat

SEQ ID NO: 569253 - DNA, 15 bp, Homo sapiens
cccattcagcctatg

SEQ ID NO: 569254 - DNA, 15 bp, Homo sapiens
ccattcagcctatga

SEQ ID NO: 569255 - DNA, 15 bp, Homo sapiens
cattcagcctatgat

SEQ ID NO: 569256 - DNA, 15 bp, Homo sapiens
attcagcctatgatg

SEQ ID NO: 569257 - DNA, 15 bp, Homo sapiens
ttcagcctatgatga

SEQ ID NO: 569258 - DNA, 15 bp, Homo sapiens
tcagcctatgatgag

SEQ ID NO: 569259 - DNA, 15 bp, Homo sapiens
cagcctatgatgaga

SEQ ID NO: 569260 - DNA, 15 bp, Homo sapiens
agcctatgatgagat

SEQ ID NO: 569261 - DNA, 15 bp, Homo sapiens
gcctatgatgagatt

SEQ ID NO: 569262 - DNA, 15 bp, Homo sapiens
cctatgatgagattc

SEQ ID NO: 569263 - DNA, 15 bp, Homo sapiens
ctatgatgagattct

SEQ ID NO: 569264 - DNA, 15 bp, Homo sapiens
tatgatgagattctc

SEQ ID NO: 569265 - DNA, 15 bp, Homo sapiens
atgatgagattctct

SEQ ID NO: 569266 - DNA, 15 bp, Homo sapiens
tgatgagattctctt

SEQ ID NO: 569267 - DNA, 15 bp, Homo sapiens
gatgagattctcttt

SEQ ID NO: 569268 - DNA, 15 bp, Homo sapiens
atgagattctctttc

SEQ ID NO: 569269 - DNA, 15 bp, Homo sapiens
tgagattctctttca

SEQ ID NO: 569270 - DNA, 15 bp, Homo sapiens
gagattctctttcag

SEQ ID NO: 569271 - DNA, 15 bp, Homo sapiens
agattctctttcagc

SEQ ID NO: 569272 - DNA, 15 bp, Homo sapiens
gattctctttcagcc

SEQ ID NO: 569273 - DNA, 15 bp, Homo sapiens
attctctttcagccc

SEQ ID NO: 569274 - DNA, 15 bp, Homo sapiens
ttctctttcagccct

SEQ ID NO: 569275 - DNA, 15 bp, Homo sapiens
tctctttcagcccta

SEQ ID NO: 569276 - DNA, 15 bp, Homo sapiens
ctctttcagccctat

SEQ ID NO: 569277 - DNA, 15 bp, Homo sapiens
tctttcagccctatt

SEQ ID NO: 569278 - DNA, 15 bp, Homo sapiens
ctttcagccctattg

SEQ ID NO: 569279 - DNA, 15 bp, Homo sapiens
tttcagccctattgg

SEQ ID NO: 569280 - DNA, 15 bp, Homo sapiens
ttcagccctattggg

SEQ ID NO: 569281 - DNA, 15 bp, Homo sapiens
tcagccctattgggt

SEQ ID NO: 569282 - DNA, 15 bp, Homo sapiens
cagccctattgggtt

SEQ ID NO: 569283 - DNA, 15 bp, Homo sapiens
agccctattgggttc

SEQ ID NO: 569284 - DNA, 15 bp, Homo sapiens
gccctattgggttct

SEQ ID NO: 569285 - DNA, 15 bp, Homo sapiens
ccctattgggttctt

SEQ ID NO: 569286 - DNA, 15 bp, Homo sapiens
cctattgggttcttg

SEQ ID NO: 569287 - DNA, 15 bp, Homo sapiens
ctattgggttcttgg

SEQ ID NO: 569288 - DNA, 15 bp, Homo sapiens
tattgggttcttggc

SEQ ID NO: 569289 - DNA, 15 bp, Homo sapiens
attgggttcttggcc

SEQ ID NO: 569290 - DNA, 15 bp, Homo sapiens
ttgggttcttggcct

SEQ ID NO: 569291 - DNA, 15 bp, Homo sapiens
tgggttcttggcctc

SEQ ID NO: 569292 - DNA, 15 bp, Homo sapiens
gggttcttggcctca

SEQ ID NO: 569293 - DNA, 15 bp, Homo sapiens
ggttcttggcctcat

SEQ ID NO: 569294 - DNA, 15 bp, Homo sapiens
gttcttggcctcatg

SEQ ID NO: 569295 - DNA, 15 bp, Homo sapiens
ttcttggcctcatgt

SEQ ID NO: 569296 - DNA, 15 bp, Homo sapiens
tcttggcctcatgtg

SEQ ID NO: 569297 - DNA, 15 bp, Homo sapiens
cttggcctcatgtga

SEQ ID NO: 569298 - DNA, 15 bp, Homo sapiens
ttggcctcatgtgac

SEQ ID NO: 569299 - DNA, 15 bp, Homo sapiens
tggcctcatgtgact

SEQ ID NO: 569300 - DNA, 15 bp, Homo sapiens
ggcctcatgtgacta

SEQ ID NO: 569301 - DNA, 15 bp, Homo sapiens
gcctcatgtgactac

SEQ ID NO: 569302 - DNA, 15 bp, Homo sapiens
cctcatgtgactact

SEQ ID NO: 569303 - DNA, 15 bp, Homo sapiens
ctcatgtgactactc

SEQ ID NO: 569304 - DNA, 15 bp, Homo sapiens
tcatgtgactactcc

SEQ ID NO: 569305 - DNA, 15 bp, Homo sapiens
catgtgactactcca

SEQ ID NO: 569306 - DNA, 15 bp, Homo sapiens
atgtgactactccaa

SEQ ID NO: 569307 - DNA, 15 bp, Homo sapiens
tgtgactactccaaa

SEQ ID NO: 569308 - DNA, 15 bp, Homo sapiens
gtgactactccaaag

SEQ ID NO: 569309 - DNA, 15 bp, Homo sapiens
tgactactccaaaga

SEQ ID NO: 569310 - DNA, 15 bp, Homo sapiens
gactactccaaagac

SEQ ID NO: 569311 - DNA, 15 bp, Homo sapiens
actactccaaagacc

SEQ ID NO: 569312 - DNA, 15 bp, Homo sapiens
ctactccaaagaccc

SEQ ID NO: 569313 - DNA, 15 bp, Homo sapiens
tactccaaagaccct

SEQ ID NO: 569314 - DNA, 15 bp, Homo sapiens
actccaaagacccta

SEQ ID NO: 569315 - DNA, 15 bp, Homo sapiens
ctccaaagaccctag

SEQ ID NO: 569316 - DNA, 15 bp, Homo sapiens
tccaaagaccctagt

SEQ ID NO: 569317 - DNA, 15 bp, Homo sapiens
ccaaagaccctagtc

SEQ ID NO: 569318 - DNA, 15 bp, Homo sapiens
caaagaccctagtcc

SEQ ID NO: 569319 - DNA, 15 bp, Homo sapiens
aaagaccctagtcca

SEQ ID NO: 569320 - DNA, 15 bp, Homo sapiens
aagaccctagtccaa

SEQ ID NO: 569321 - DNA, 15 bp, Homo sapiens
agaccctagtccaaa

SEQ ID NO: 569322 - DNA, 15 bp, Homo sapiens
gaccctagtccaaaa

SEQ ID NO: 569323 - DNA, 15 bp, Homo sapiens
accctagtccaaaag

SEQ ID NO: 569324 - DNA, 15 bp, Homo sapiens
ccctagtccaaaagg

SEQ ID NO: 569325 - DNA, 15 bp, Homo sapiens
cctagtccaaaaggt

SEQ ID NO: 569326 - DNA, 15 bp, Homo sapiens
ctagtccaaaaggtc

SEQ ID NO: 569327 - DNA, 15 bp, Homo sapiens
tagtccaaaaggtct

SEQ ID NO: 569328 - DNA, 15 bp, Homo sapiens
agtccaaaaggtctt

SEQ ID NO: 569329 - DNA, 15 bp, Homo sapiens
gtccaaaaggtcttt

SEQ ID NO: 569330 - DNA, 15 bp, Homo sapiens
tccaaaaggtctttc

SEQ ID NO: 569331 - DNA, 15 bp, Homo sapiens
ccaaaaggtctttcc

SEQ ID NO: 569332 - DNA, 15 bp, Homo sapiens
caaaaggtctttcct

SEQ ID NO: 569333 - DNA, 15 bp, Homo sapiens
aaaaggtctttcctg

SEQ ID NO: 569334 - DNA, 15 bp, Homo sapiens
aaaggtctttcctgt

SEQ ID NO: 569335 - DNA, 15 bp, Homo sapiens
aaggtctttcctgtt

SEQ ID NO: 569336 - DNA, 15 bp, Homo sapiens
aggtctttcctgttt

SEQ ID NO: 569337 - DNA, 15 bp, Homo sapiens
ggtctttcctgtttg

SEQ ID NO: 569338 - DNA, 15 bp, Homo sapiens
gtctttcctgtttgc

SEQ ID NO: 569339 - DNA, 15 bp, Homo sapiens
tctttcctgtttgct

SEQ ID NO: 569340 - DNA, 15 bp, Homo sapiens
ctttcctgtttgcta

SEQ ID NO: 569341 - DNA, 15 bp, Homo sapiens
tttcctgtttgctat

SEQ ID NO: 569342 - DNA, 15 bp, Homo sapiens
ttcctgtttgctatg

SEQ ID NO: 569343 - DNA, 15 bp, Homo sapiens
tcctgtttgctatgg

SEQ ID NO: 569344 - DNA, 15 bp, Homo sapiens
cctgtttgctatggc

SEQ ID NO: 569345 - DNA, 15 bp, Homo sapiens
ctgtttgctatggcc

SEQ ID NO: 569346 - DNA, 15 bp, Homo sapiens
tgtttgctatggcct

SEQ ID NO: 569347 - DNA, 15 bp, Homo sapiens
gtttgctatggcctt

SEQ ID NO: 569348 - DNA, 15 bp, Homo sapiens
tttgctatggccttg

SEQ ID NO: 569349 - DNA, 15 bp, Homo sapiens
ttgctatggccttga

SEQ ID NO: 569350 - DNA, 15 bp, Homo sapiens
tgctatggccttgag

SEQ ID NO: 569351 - DNA, 15 bp, Homo sapiens
gctatggccttgagg

SEQ ID NO: 569352 - DNA, 15 bp, Homo sapiens
ctatggccttgagga

SEQ ID NO: 569353 - DNA, 15 bp, Homo sapiens
tatggccttgaggaa

SEQ ID NO: 569354 - DNA, 15 bp, Homo sapiens
atggccttgaggaat

SEQ ID NO: 569355 - DNA, 15 bp, Homo sapiens
tggccttgaggaatg

SEQ ID NO: 569356 - DNA, 15 bp, Homo sapiens
ggccttgaggaatgt

SEQ ID NO: 569357 - DNA, 15 bp, Homo sapiens
gccttgaggaatgtg

SEQ ID NO: 569358 - DNA, 15 bp, Homo sapiens
ccttgaggaatgtgg

SEQ ID NO: 569359 - DNA, 15 bp, Homo sapiens
cttgaggaatgtggc

SEQ ID NO: 569360 - DNA, 15 bp, Homo sapiens
ttgaggaatgtggcc

SEQ ID NO: 569361 - DNA, 15 bp, Homo sapiens
tgaggaatgtggccc

SEQ ID NO: 569362 - DNA, 15 bp, Homo sapiens
gaggaatgtggccct

SEQ ID NO: 569363 - DNA, 15 bp, Homo sapiens
aggaatgtggcccta

SEQ ID NO: 569364 - DNA, 15 bp, Homo sapiens
ggaatgtggccctag

SEQ ID NO: 569365 - DNA, 15 bp, Homo sapiens
gaatgtggccctaga

SEQ ID NO: 569366 - DNA, 15 bp, Homo sapiens
aatgtggccctagat

SEQ ID NO: 569367 - DNA, 15 bp, Homo sapiens
atgtggccctagatc

SEQ ID NO: 569368 - DNA, 15 bp, Homo sapiens
tgtggccctagatcc

SEQ ID NO: 569369 - DNA, 15 bp, Homo sapiens
gtggccctagatcca

SEQ ID NO: 569370 - DNA, 15 bp, Homo sapiens
tggccctagatccac

SEQ ID NO: 569371 - DNA, 15 bp, Homo sapiens
ggccctagatccacc

SEQ ID NO: 569372 - DNA, 15 bp, Homo sapiens
gccctagatccaccg

SEQ ID NO: 569373 - DNA, 15 bp, Homo sapiens
ccctagatccaccgc

SEQ ID NO: 569374 - DNA, 15 bp, Homo sapiens
cctagatccaccgct

SEQ ID NO: 569375 - DNA, 15 bp, Homo sapiens
ctagatccaccgctt

SEQ ID NO: 569376 - DNA, 15 bp, Homo sapiens
tagatccaccgcttt

SEQ ID NO: 569377 - DNA, 15 bp, Homo sapiens
agatccaccgcttta

SEQ ID NO: 569378 - DNA, 15 bp, Homo sapiens
gatccaccgctttaa

SEQ ID NO: 569379 - DNA, 15 bp, Homo sapiens
atccaccgctttaaa

SEQ ID NO: 569380 - DNA, 15 bp, Homo sapiens
tccaccgctttaaag

SEQ ID NO: 569381 - DNA, 15 bp, Homo sapiens
ccaccgctttaaagc

SEQ ID NO: 569382 - DNA, 15 bp, Homo sapiens
caccgctttaaagct

SEQ ID NO: 569383 - DNA, 15 bp, Homo sapiens
accgctttaaagctg

SEQ ID NO: 569384 - DNA, 15 bp, Homo sapiens
ccgctttaaagctgg

SEQ ID NO: 569385 - DNA, 15 bp, Homo sapiens
cgctttaaagctgga

SEQ ID NO: 569386 - DNA, 15 bp, Homo sapiens
gctttaaagctggag

SEQ ID NO: 569387 - DNA, 15 bp, Homo sapiens
ctttaaagctggagt

SEQ ID NO: 569388 - DNA, 15 bp, Homo sapiens
tttaaagctggagtt

SEQ ID NO: 569389 - DNA, 15 bp, Homo sapiens
ttaaagctggagttc

SEQ ID NO: 569390 - DNA, 15 bp, Homo sapiens
taaagctggagttcc

SEQ ID NO: 569391 - DNA, 15 bp, Homo sapiens
aaagctggagttcca

SEQ ID NO: 569392 - DNA, 15 bp, Homo sapiens
aagctggagttccac

SEQ ID NO: 569393 - DNA, 15 bp, Homo sapiens
agctggagttccacc

SEQ ID NO: 569394 - DNA, 15 bp, Homo sapiens
gctggagttccacca

SEQ ID NO: 569395 - DNA, 15 bp, Homo sapiens
ctggagttccaccag

SEQ ID NO: 569396 - DNA, 15 bp, Homo sapiens
tggagttccaccagc

SEQ ID NO: 569397 - DNA, 15 bp, Homo sapiens
ggagttccaccagca

SEQ ID NO: 569398 - DNA, 15 bp, Homo sapiens
gagttccaccagcag

SEQ ID NO: 569399 - DNA, 15 bp, Homo sapiens
agttccaccagcagc

SEQ ID NO: 569400 - DNA, 15 bp, Homo sapiens
gttccaccagcagca

SEQ ID NO: 569401 - DNA, 15 bp, Homo sapiens
ttccaccagcagcaa

SEQ ID NO: 569402 - DNA, 15 bp, Homo sapiens
tccaccagcagcaac

SEQ ID NO: 569403 - DNA, 15 bp, Homo sapiens
ccaccagcagcaaca

SEQ ID NO: 569404 - DNA, 15 bp, Homo sapiens
caccagcagcaacat

SEQ ID NO: 569405 - DNA, 15 bp, Homo sapiens
accagcagcaacatc

SEQ ID NO: 569406 - DNA, 15 bp, Homo sapiens
ccagcagcaacatcc

SEQ ID NO: 569407 - DNA, 15 bp, Homo sapiens
cagcagcaacatcct

SEQ ID NO: 569408 - DNA, 15 bp, Homo sapiens
agcagcaacatcctc

SEQ ID NO: 569409 - DNA, 15 bp, Homo sapiens
gcagcaacatcctct

SEQ ID NO: 569410 - DNA, 15 bp, Homo sapiens
cagcaacatcctctc

SEQ ID NO: 569411 - DNA, 15 bp, Homo sapiens
agcaacatcctctca

SEQ ID NO: 569412 - DNA, 15 bp, Homo sapiens
gcaacatcctctcat

SEQ ID NO: 569413 - DNA, 15 bp, Homo sapiens
caacatcctctcatt

SEQ ID NO: 569414 - DNA, 15 bp, Homo sapiens
aacatcctctcattc

SEQ ID NO: 569415 - DNA, 15 bp, Homo sapiens
acatcctctcattct

SEQ ID NO: 569416 - DNA, 15 bp, Homo sapiens
catcctctcattctg

SEQ ID NO: 569417 - DNA, 15 bp, Homo sapiens
atcctctcattctgg

SEQ ID NO: 569418 - DNA, 15 bp, Homo sapiens
tcctctcattctggg

SEQ ID NO: 569419 - DNA, 15 bp, Homo sapiens
cctctcattctgggg

SEQ ID NO: 569420 - DNA, 15 bp, Homo sapiens
ctctcattctggggc

SEQ ID NO: 569421 - DNA, 15 bp, Homo sapiens
tctcattctggggca

SEQ ID NO: 569422 - DNA, 15 bp, Homo sapiens
ctcattctggggcac

SEQ ID NO: 569423 - DNA, 15 bp, Homo sapiens
tcattctggggcacc

SEQ ID NO: 569424 - DNA, 15 bp, Homo sapiens
cattctggggcacct

SEQ ID NO: 569425 - DNA, 15 bp, Homo sapiens
attctggggcacctg

SEQ ID NO: 569426 - DNA, 15 bp, Homo sapiens
ttctggggcacctgc

SEQ ID NO: 569427 - DNA, 15 bp, Homo sapiens
tctggggcacctgcc

SEQ ID NO: 569428 - DNA, 15 bp, Homo sapiens
ctggggcacctgcct

SEQ ID NO: 569429 - DNA, 15 bp, Homo sapiens
tggggcacctgcctg

SEQ ID NO: 569430 - DNA, 15 bp, Homo sapiens
ggggcacctgcctgg

SEQ ID NO: 569431 - DNA, 15 bp, Homo sapiens
gggcacctgcctggg

SEQ ID NO: 569432 - DNA, 15 bp, Homo sapiens
ggcacctgcctgggg

SEQ ID NO: 569433 - DNA, 15 bp, Homo sapiens
gcacctgcctggggc

SEQ ID NO: 569434 - DNA, 15 bp, Homo sapiens
cacctgcctggggca

SEQ ID NO: 569435 - DNA, 15 bp, Homo sapiens
acctgcctggggcag

SEQ ID NO: 569436 - DNA, 15 bp, Homo sapiens
cctgcctggggcagg

SEQ ID NO: 569437 - DNA, 15 bp, Homo sapiens
ctgcctggggcaggt

SEQ ID NO: 569438 - DNA, 15 bp, Homo sapiens
tgcctggggcaggtc

SEQ ID NO: 569439 - DNA, 15 bp, Homo sapiens
gcctggggcaggtca

SEQ ID NO: 569440 - DNA, 15 bp, Homo sapiens
cctggggcaggtcat

SEQ ID NO: 569441 - DNA, 15 bp, Homo sapiens
ctggggcaggtcatc

SEQ ID NO: 569442 - DNA, 15 bp, Homo sapiens
tggggcaggtcatcc

SEQ ID NO: 569443 - DNA, 15 bp, Homo sapiens
ggggcaggtcatcct

SEQ ID NO: 569444 - DNA, 15 bp, Homo sapiens
gggcaggtcatcctg

SEQ ID NO: 569445 - DNA, 15 bp, Homo sapiens
ggcaggtcatcctgc

SEQ ID NO: 569446 - DNA, 15 bp, Homo sapiens
gcaggtcatcctgcc

SEQ ID NO: 569447 - DNA, 15 bp, Homo sapiens
caggtcatcctgcct

SEQ ID NO: 569448 - DNA, 15 bp, Homo sapiens
aggtcatcctgcctc

SEQ ID NO: 569449 - DNA, 15 bp, Homo sapiens
ggtcatcctgcctct

SEQ ID NO: 569450 - DNA, 15 bp, Homo sapiens
gtcatcctgcctctg

SEQ ID NO: 569451 - DNA, 15 bp, Homo sapiens
tcatcctgcctctgc

SEQ ID NO: 569452 - DNA, 15 bp, Homo sapiens
catcctgcctctgcc

SEQ ID NO: 569453 - DNA, 15 bp, Homo sapiens
atcctgcctctgcca

SEQ ID NO: 569454 - DNA, 15 bp, Homo sapiens
tcctgcctctgccaa

SEQ ID NO: 569455 - DNA, 15 bp, Homo sapiens
cctgcctctgccaac

SEQ ID NO: 569456 - DNA, 15 bp, Homo sapiens
ctgcctctgccaact

SEQ ID NO: 569457 - DNA, 15 bp, Homo sapiens
tgcctctgccaactc

SEQ ID NO: 569458 - DNA, 15 bp, Homo sapiens
gcctctgccaactca

SEQ ID NO: 569459 - DNA, 15 bp, Homo sapiens
cctctgccaactcag

SEQ ID NO: 569460 - DNA, 15 bp, Homo sapiens
ctctgccaactcagt

SEQ ID NO: 569461 - DNA, 15 bp, Homo sapiens
tctgccaactcagtg

SEQ ID NO: 569462 - DNA, 15 bp, Homo sapiens
ctgccaactcagtgc

SEQ ID NO: 569463 - DNA, 15 bp, Homo sapiens
tgccaactcagtgct

SEQ ID NO: 569464 - DNA, 15 bp, Homo sapiens
gccaactcagtgcta

SEQ ID NO: 569465 - DNA, 15 bp, Homo sapiens
ccaactcagtgctat

SEQ ID NO: 569466 - DNA, 15 bp, Homo sapiens
caactcagtgctatt

SEQ ID NO: 569467 - DNA, 15 bp, Homo sapiens
aactcagtgctatta

SEQ ID NO: 569468 - DNA, 15 bp, Homo sapiens
actcagtgctattag

SEQ ID NO: 569469 - DNA, 15 bp, Homo sapiens
ctcagtgctattagt

SEQ ID NO: 569470 - DNA, 15 bp, Homo sapiens
tcagtgctattagtt

SEQ ID NO: 569471 - DNA, 15 bp, Homo sapiens
cagtgctattagtta

SEQ ID NO: 569472 - DNA, 15 bp, Homo sapiens
agtgctattagttaa

SEQ ID NO: 569473 - DNA, 15 bp, Homo sapiens
gtgctattagttaac

SEQ ID NO: 569474 - DNA, 15 bp, Homo sapiens
tgctattagttaact

SEQ ID NO: 569475 - DNA, 15 bp, Homo sapiens
gctattagttaactc

SEQ ID NO: 569476 - DNA, 15 bp, Homo sapiens
ctattagttaactct

SEQ ID NO: 569477 - DNA, 15 bp, Homo sapiens
tattagttaactctc

SEQ ID NO: 569478 - DNA, 15 bp, Homo sapiens
attagttaactctca

SEQ ID NO: 569479 - DNA, 15 bp, Homo sapiens
ttagttaactctcac

SEQ ID NO: 569480 - DNA, 15 bp, Homo sapiens
tagttaactctcacc

SEQ ID NO: 569481 - DNA, 15 bp, Homo sapiens
agttaactctcacct

SEQ ID NO: 569482 - DNA, 15 bp, Homo sapiens
gttaactctcacctg

SEQ ID NO: 569483 - DNA, 15 bp, Homo sapiens
ttaactctcacctgc

SEQ ID NO: 569484 - DNA, 15 bp, Homo sapiens
taactctcacctgcc

SEQ ID NO: 569485 - DNA, 15 bp, Homo sapiens
aactctcacctgcca

SEQ ID NO: 569486 - DNA, 15 bp, Homo sapiens
actctcacctgccat

SEQ ID NO: 569487 - DNA, 15 bp, Homo sapiens
ctctcacctgccata

SEQ ID NO: 569488 - DNA, 15 bp, Homo sapiens
tctcacctgccatat

SEQ ID NO: 569489 - DNA, 15 bp, Homo sapiens
ctcacctgccatatt

SEQ ID NO: 569490 - DNA, 15 bp, Homo sapiens
tcacctgccatattc

SEQ ID NO: 569491 - DNA, 15 bp, Homo sapiens
cacctgccatattcc

SEQ ID NO: 569492 - DNA, 15 bp, Homo sapiens
acctgccatattcca

SEQ ID NO: 569493 - DNA, 15 bp, Homo sapiens
cctgccatattccag

SEQ ID NO: 569494 - DNA, 15 bp, Homo sapiens
ctgccatattccagc

SEQ ID NO: 569495 - DNA, 15 bp, Homo sapiens
tgccatattccagct

SEQ ID NO: 569496 - DNA, 15 bp, Homo sapiens
gccatattccagctg

SEQ ID NO: 569497 - DNA, 15 bp, Homo sapiens
ccatattccagctgg

SEQ ID NO: 569498 - DNA, 15 bp, Homo sapiens
catattccagctgga

SEQ ID NO: 569499 - DNA, 15 bp, Homo sapiens
atattccagctggaa

SEQ ID NO: 569500 - DNA, 15 bp, Homo sapiens
tattccagctggaat

SEQ ID NO: 569501 - DNA, 15 bp, Homo sapiens
attccagctggaatc

SEQ ID NO: 569502 - DNA, 15 bp, Homo sapiens
ttccagctggaatca

SEQ ID NO: 569503 - DNA, 15 bp, Homo sapiens
tccagctggaatcat

SEQ ID NO: 569504 - DNA, 15 bp, Homo sapiens
ccagctggaatcatc

SEQ ID NO: 569505 - DNA, 15 bp, Homo sapiens
cagctggaatcatct

SEQ ID NO: 569506 - DNA, 15 bp, Homo sapiens
agctggaatcatctc

SEQ ID NO: 569507 - DNA, 15 bp, Homo sapiens
gctggaatcatctcc

SEQ ID NO: 569508 - DNA, 15 bp, Homo sapiens
ctggaatcatctccc

SEQ ID NO: 569509 - DNA, 15 bp, Homo sapiens
tggaatcatctcccc

SEQ ID NO: 569510 - DNA, 15 bp, Homo sapiens
ggaatcatctcccct

SEQ ID NO: 569511 - DNA, 15 bp, Homo sapiens
gaatcatctcccctt

SEQ ID NO: 569512 - DNA, 15 bp, Homo sapiens
aatcatctccccttc

SEQ ID NO: 569513 - DNA, 15 bp, Homo sapiens
atcatctccccttct

SEQ ID NO: 569514 - DNA, 15 bp, Homo sapiens
tcatctccccttctc

SEQ ID NO: 569515 - DNA, 15 bp, Homo sapiens
catctccccttctcc

SEQ ID NO: 569516 - DNA, 15 bp, Homo sapiens
atctccccttctcca

SEQ ID NO: 569517 - DNA, 15 bp, Homo sapiens
tctccccttctccac

SEQ ID NO: 569518 - DNA, 15 bp, Homo sapiens
ctccccttctccacc

SEQ ID NO: 569519 - DNA, 15 bp, Homo sapiens
tccccttctccaccc

SEQ ID NO: 569520 - DNA, 15 bp, Homo sapiens
ccccttctccacccc

SEQ ID NO: 569521 - DNA, 15 bp, Homo sapiens
cccttctccacccca

SEQ ID NO: 569522 - DNA, 15 bp, Homo sapiens
ccttctccaccccag

SEQ ID NO: 569523 - DNA, 15 bp, Homo sapiens
cttctccaccccaga

SEQ ID NO: 569524 - DNA, 15 bp, Homo sapiens
ttctccaccccagac

SEQ ID NO: 569525 - DNA, 15 bp, Homo sapiens
tctccaccccagact

SEQ ID NO: 569526 - DNA, 15 bp, Homo sapiens
ctccaccccagacta

SEQ ID NO: 569527 - DNA, 15 bp, Homo sapiens
tccaccccagactag

SEQ ID NO: 569528 - DNA, 15 bp, Homo sapiens
ccaccccagactagg

SEQ ID NO: 569529 - DNA, 15 bp, Homo sapiens
caccccagactaggt

SEQ ID NO: 569530 - DNA, 15 bp, Homo sapiens
accccagactaggtc

SEQ ID NO: 569531 - DNA, 15 bp, Homo sapiens
ccccagactaggtca

SEQ ID NO: 569532 - DNA, 15 bp, Homo sapiens
cccagactaggtcat

SEQ ID NO: 569533 - DNA, 15 bp, Homo sapiens
ccagactaggtcatg

SEQ ID NO: 569534 - DNA, 15 bp, Homo sapiens
cagactaggtcatgt

SEQ ID NO: 569535 - DNA, 15 bp, Homo sapiens
agactaggtcatgtt

SEQ ID NO: 569536 - DNA, 15 bp, Homo sapiens
gactaggtcatgttc

SEQ ID NO: 569537 - DNA, 15 bp, Homo sapiens
actaggtcatgttcc

SEQ ID NO: 569538 - DNA, 15 bp, Homo sapiens
ctaggtcatgttccg

SEQ ID NO: 569539 - DNA, 15 bp, Homo sapiens
taggtcatgttccgc

SEQ ID NO: 569540 - DNA, 15 bp, Homo sapiens
aggtcatgttccgcc

SEQ ID NO: 569541 - DNA, 15 bp, Homo sapiens
ggtcatgttccgcca

SEQ ID NO: 569542 - DNA, 15 bp, Homo sapiens
gtcatgttccgccat

SEQ ID NO: 569543 - DNA, 15 bp, Homo sapiens
tcatgttccgccatc

SEQ ID NO: 569544 - DNA, 15 bp, Homo sapiens
catgttccgccatca

SEQ ID NO: 569545 - DNA, 15 bp, Homo sapiens
atgttccgccatcat

SEQ ID NO: 569546 - DNA, 15 bp, Homo sapiens
tgttccgccatcatg

SEQ ID NO: 569547 - DNA, 15 bp, Homo sapiens
gttccgccatcatgg

SEQ ID NO: 569548 - DNA, 15 bp, Homo sapiens
ttccgccatcatgga

SEQ ID NO: 569549 - DNA, 15 bp, Homo sapiens
tccgccatcatggaa

SEQ ID NO: 569550 - DNA, 15 bp, Homo sapiens
ccgccatcatggaag

SEQ ID NO: 569551 - DNA, 15 bp, Homo sapiens
cgccatcatggaagc

SEQ ID NO: 569552 - DNA, 15 bp, Homo sapiens
gccatcatggaagcg

SEQ ID NO: 569553 - DNA, 15 bp, Homo sapiens
ccatcatggaagcgc

SEQ ID NO: 569554 - DNA, 15 bp, Homo sapiens
catcatggaagcgcc

SEQ ID NO: 569555 - DNA, 15 bp, Homo sapiens
atcatggaagcgcct

SEQ ID NO: 569556 - DNA, 15 bp, Homo sapiens
tcatggaagcgccta

SEQ ID NO: 569557 - DNA, 15 bp, Homo sapiens
catggaagcgcctat

SEQ ID NO: 569558 - DNA, 15 bp, Homo sapiens
atggaagcgcctatt

SEQ ID NO: 569559 - DNA, 15 bp, Homo sapiens
tggaagcgcctattc

SEQ ID NO: 569560 - DNA, 15 bp, Homo sapiens
ggaagcgcctattct

SEQ ID NO: 569561 - DNA, 15 bp, Homo sapiens
gaagcgcctattctt

SEQ ID NO: 569562 - DNA, 15 bp, Homo sapiens
aagcgcctattcttc

SEQ ID NO: 569563 - DNA, 15 bp, Homo sapiens
agcgcctattcttca

SEQ ID NO: 569564 - DNA, 15 bp, Homo sapiens
gcgcctattcttcat

SEQ ID NO: 569565 - DNA, 15 bp, Homo sapiens
cgcctattcttcata

SEQ ID NO: 569566 - DNA, 15 bp, Homo sapiens
gcctattcttcatac

SEQ ID NO: 569567 - DNA, 15 bp, Homo sapiens
cctattcttcatacc

SEQ ID NO: 569568 - DNA, 15 bp, Homo sapiens
ctattcttcataccc

SEQ ID NO: 569569 - DNA, 15 bp, Homo sapiens
tattcttcatacccc

SEQ ID NO: 569570 - DNA, 15 bp, Homo sapiens
attcttcatacccct

SEQ ID NO: 569571 - DNA, 15 bp, Homo sapiens
ttcttcatacccctt

SEQ ID NO: 569572 - DNA, 15 bp, Homo sapiens
tcttcatacccctta

SEQ ID NO: 569573 - DNA, 15 bp, Homo sapiens
cttcataccccttat

SEQ ID NO: 569574 - DNA, 15 bp, Homo sapiens
ttcataccccttatc

SEQ ID NO: 569575 - DNA, 15 bp, Homo sapiens
tcataccccttatca

SEQ ID NO: 569576 - DNA, 15 bp, Homo sapiens
cataccccttatcac

SEQ ID NO: 569577 - DNA, 15 bp, Homo sapiens
ataccccttatcaca

SEQ ID NO: 569578 - DNA, 15 bp, Homo sapiens
taccccttatcacag

SEQ ID NO: 569579 - DNA, 15 bp, Homo sapiens
accccttatcacagc

SEQ ID NO: 569580 - DNA, 15 bp, Homo sapiens
ccccttatcacagct

SEQ ID NO: 569581 - DNA, 15 bp, Homo sapiens
cccttatcacagctg

SEQ ID NO: 569582 - DNA, 15 bp, Homo sapiens
ccttatcacagctgc

SEQ ID NO: 569583 - DNA, 15 bp, Homo sapiens
cttatcacagctgca

SEQ ID NO: 569584 - DNA, 15 bp, Homo sapiens
ttatcacagctgcaa

SEQ ID NO: 569585 - DNA, 15 bp, Homo sapiens
tatcacagctgcaac

SEQ ID NO: 569586 - DNA, 15 bp, Homo sapiens
atcacagctgcaact

SEQ ID NO: 569587 - DNA, 15 bp, Homo sapiens
tcacagctgcaacta

SEQ ID NO: 569588 - DNA, 15 bp, Homo sapiens
cacagctgcaactac

SEQ ID NO: 569589 - DNA, 15 bp, Homo sapiens
acagctgcaactact

SEQ ID NO: 569590 - DNA, 15 bp, Homo sapiens
cagctgcaactactc

SEQ ID NO: 569591 - DNA, 15 bp, Homo sapiens
agctgcaactactca

SEQ ID NO: 569592 - DNA, 15 bp, Homo sapiens
gctgcaactactcat

SEQ ID NO: 569593 - DNA, 15 bp, Homo sapiens
ctgcaactactcatt

SEQ ID NO: 569594 - DNA, 15 bp, Homo sapiens
tgcaactactcattt

SEQ ID NO: 569595 - DNA, 15 bp, Homo sapiens
gcaactactcattta

SEQ ID NO: 569596 - DNA, 15 bp, Homo sapiens
caactactcatttac

SEQ ID NO: 569597 - DNA, 15 bp, Homo sapiens
aactactcatttact

SEQ ID NO: 569598 - DNA, 15 bp, Homo sapiens
actactcatttactt

SEQ ID NO: 569599 - DNA, 15 bp, Homo sapiens
ctactcatttacttg

SEQ ID NO: 569600 - DNA, 15 bp, Homo sapiens
tactcatttacttgt

SEQ ID NO: 569601 - DNA, 15 bp, Homo sapiens
actcatttacttgtc

SEQ ID NO: 569602 - DNA, 15 bp, Homo sapiens
ctcatttacttgtct

SEQ ID NO: 569603 - DNA, 15 bp, Homo sapiens
tcatttacttgtctg

SEQ ID NO: 569604 - DNA, 15 bp, Homo sapiens
catttacttgtctga

SEQ ID NO: 569605 - DNA, 15 bp, Homo sapiens
atttacttgtctgac

SEQ ID NO: 569606 - DNA, 15 bp, Homo sapiens
tttacttgtctgaca

SEQ ID NO: 569607 - DNA, 15 bp, Homo sapiens
ttacttgtctgacaa

SEQ ID NO: 569608 - DNA, 15 bp, Homo sapiens
tacttgtctgacaat

SEQ ID NO: 569609 - DNA, 15 bp, Homo sapiens
acttgtctgacaatt

SEQ ID NO: 569610 - DNA, 15 bp, Homo sapiens
cttgtctgacaattt

SEQ ID NO: 569611 - DNA, 15 bp, Homo sapiens
ttgtctgacaatttg

SEQ ID NO: 569612 - DNA, 15 bp, Homo sapiens
tgtctgacaatttga

SEQ ID NO: 569613 - DNA, 15 bp, Homo sapiens
gtctgacaatttgat

SEQ ID NO: 569614 - DNA, 15 bp, Homo sapiens
tctgacaatttgatt

SEQ ID NO: 569615 - DNA, 15 bp, Homo sapiens
ctgacaatttgattt

SEQ ID NO: 569616 - DNA, 15 bp, Homo sapiens
tgacaatttgattta

SEQ ID NO: 569617 - DNA, 15 bp, Homo sapiens
gacaatttgatttat

SEQ ID NO: 569618 - DNA, 15 bp, Homo sapiens
acaatttgatttatg

SEQ ID NO: 569619 - DNA, 15 bp, Homo sapiens
caatttgatttatgt

SEQ ID NO: 569620 - DNA, 15 bp, Homo sapiens
aatttgatttatgtc

SEQ ID NO: 569621 - DNA, 15 bp, Homo sapiens
atttgatttatgtcc

SEQ ID NO: 569622 - DNA, 15 bp, Homo sapiens
tttgatttatgtcca

SEQ ID NO: 569623 - DNA, 15 bp, Homo sapiens
ttgatttatgtccac

SEQ ID NO: 569624 - DNA, 15 bp, Homo sapiens
tgatttatgtccacc

SEQ ID NO: 569625 - DNA, 15 bp, Homo sapiens
gatttatgtccacct

SEQ ID NO: 569626 - DNA, 15 bp, Homo sapiens
atttatgtccaccta

SEQ ID NO: 569627 - DNA, 15 bp, Homo sapiens
tttatgtccacctac

SEQ ID NO: 569628 - DNA, 15 bp, Homo sapiens
ttatgtccacctact

SEQ ID NO: 569629 - DNA, 15 bp, Homo sapiens
tatgtccacctactt

SEQ ID NO: 569630 - DNA, 15 bp, Homo sapiens
atgtccacctacttt

SEQ ID NO: 569631 - DNA, 15 bp, Homo sapiens
tgtccacctactttg

SEQ ID NO: 569632 - DNA, 15 bp, Homo sapiens
gtccacctactttgc

SEQ ID NO: 569633 - DNA, 15 bp, Homo sapiens
tccacctactttgct

SEQ ID NO: 569634 - DNA, 15 bp, Homo sapiens
ccacctactttgcta

SEQ ID NO: 569635 - DNA, 15 bp, Homo sapiens
cacctactttgctag

SEQ ID NO: 569636 - DNA, 15 bp, Homo sapiens
acctactttgctagg

SEQ ID NO: 569637 - DNA, 15 bp, Homo sapiens
cctactttgctaggt

SEQ ID NO: 569638 - DNA, 15 bp, Homo sapiens
ctactttgctaggta

SEQ ID NO: 569639 - DNA, 15 bp, Homo sapiens
tactttgctaggtac

SEQ ID NO: 569640 - DNA, 15 bp, Homo sapiens
actttgctaggtact

SEQ ID NO: 569641 - DNA, 15 bp, Homo sapiens
ctttgctaggtacta

SEQ ID NO: 569642 - DNA, 15 bp, Homo sapiens
tttgctaggtactaa

SEQ ID NO: 569643 - DNA, 15 bp, Homo sapiens
ttgctaggtactaag

SEQ ID NO: 569644 - DNA, 15 bp, Homo sapiens
tgctaggtactaagt

SEQ ID NO: 569645 - DNA, 15 bp, Homo sapiens
gctaggtactaagtt

SEQ ID NO: 569646 - DNA, 15 bp, Homo sapiens
ctaggtactaagttc

SEQ ID NO: 569647 - DNA, 15 bp, Homo sapiens
taggtactaagttca

SEQ ID NO: 569648 - DNA, 15 bp, Homo sapiens
aggtactaagttcaa

SEQ ID NO: 569649 - DNA, 15 bp, Homo sapiens
ggtactaagttcaat

SEQ ID NO: 569650 - DNA, 15 bp, Homo sapiens
gtactaagttcaatg

SEQ ID NO: 569651 - DNA, 15 bp, Homo sapiens
tactaagttcaatgc

SEQ ID NO: 569652 - DNA, 15 bp, Homo sapiens
actaagttcaatgct

SEQ ID NO: 569653 - DNA, 15 bp, Homo sapiens
ctaagttcaatgctg

SEQ ID NO: 569654 - DNA, 15 bp, Homo sapiens
taagttcaatgctgg

SEQ ID NO: 569655 - DNA, 15 bp, Homo sapiens
aagttcaatgctggc

SEQ ID NO: 569656 - DNA, 15 bp, Homo sapiens
agttcaatgctggca

SEQ ID NO: 569657 - DNA, 15 bp, Homo sapiens
gttcaatgctggcag

SEQ ID NO: 569658 - DNA, 15 bp, Homo sapiens
ttcaatgctggcagt

SEQ ID NO: 569659 - DNA, 15 bp, Homo sapiens
tcaatgctggcagtc

SEQ ID NO: 569660 - DNA, 15 bp, Homo sapiens
caatgctggcagtcg

SEQ ID NO: 569661 - DNA, 15 bp, Homo sapiens
aatgctggcagtcgt

SEQ ID NO: 569662 - DNA, 15 bp, Homo sapiens
atgctggcagtcgtt

SEQ ID NO: 569663 - DNA, 15 bp, Homo sapiens
tgctggcagtcgttt

SEQ ID NO: 569664 - DNA, 15 bp, Homo sapiens
gctggcagtcgtttc

SEQ ID NO: 569665 - DNA, 15 bp, Homo sapiens
ctggcagtcgtttct

SEQ ID NO: 569666 - DNA, 15 bp, Homo sapiens
tggcagtcgtttctt

SEQ ID NO: 569667 - DNA, 15 bp, Homo sapiens
ggcagtcgtttcttc

SEQ ID NO: 569668 - DNA, 15 bp, Homo sapiens
gcagtcgtttcttct

SEQ ID NO: 569669 - DNA, 15 bp, Homo sapiens
cagtcgtttcttctt

SEQ ID NO: 569670 - DNA, 15 bp, Homo sapiens
agtcgtttcttcttt

SEQ ID NO: 569671 - DNA, 15 bp, Homo sapiens
gtcgtttcttctttt

SEQ ID NO: 569672 - DNA, 15 bp, Homo sapiens
tcgtttcttcttttt

SEQ ID NO: 569673 - DNA, 15 bp, Homo sapiens
cgtttcttctttttt

SEQ ID NO: 569674 - DNA, 15 bp, Homo sapiens
gtttcttcttttttt

SEQ ID NO: 569675 - DNA, 15 bp, Homo sapiens
tttcttctttttttt

SEQ ID NO: 569676 - DNA, 15 bp, Homo sapiens
ttcttcttttttttt

SEQ ID NO: 569677 - DNA, 15 bp, Homo sapiens
tcttctttttttttc

SEQ ID NO: 569678 - DNA, 15 bp, Homo sapiens
cttctttttttttct

SEQ ID NO: 569679 - DNA, 15 bp, Homo sapiens
ttctttttttttctt

SEQ ID NO: 569680 - DNA, 15 bp, Homo sapiens
tctttttttttcttt

SEQ ID NO: 569681 - DNA, 15 bp, Homo sapiens
ctttttttttctttt

SEQ ID NO: 569682 - DNA, 15 bp, Homo sapiens
tttttttttcttttc

SEQ ID NO: 569683 - DNA, 15 bp, Homo sapiens
ttttttttcttttct

SEQ ID NO: 569684 - DNA, 15 bp, Homo sapiens
tttttttcttttctg

SEQ ID NO: 569685 - DNA, 15 bp, Homo sapiens
ttttttcttttctgt

SEQ ID NO: 569686 - DNA, 15 bp, Homo sapiens
tttttcttttctgtt

SEQ ID NO: 569687 - DNA, 15 bp, Homo sapiens
ttttcttttctgttt

SEQ ID NO: 569688 - DNA, 15 bp, Homo sapiens
tttcttttctgtttt

SEQ ID NO: 569689 - DNA, 15 bp, Homo sapiens
ttcttttctgttttg

SEQ ID NO: 569690 - DNA, 15 bp, Homo sapiens
tcttttctgttttgc

SEQ ID NO: 569691 - DNA, 15 bp, Homo sapiens
cttttctgttttgct

SEQ ID NO: 569692 - DNA, 15 bp, Homo sapiens
ttttctgttttgctc

SEQ ID NO: 569693 - DNA, 15 bp, Homo sapiens
tttctgttttgctca

SEQ ID NO: 569694 - DNA, 15 bp, Homo sapiens
ttctgttttgctcac

SEQ ID NO: 569695 - DNA, 15 bp, Homo sapiens
tctgttttgctcacc

SEQ ID NO: 569696 - DNA, 15 bp, Homo sapiens
ctgttttgctcaccg

SEQ ID NO: 569697 - DNA, 15 bp, Homo sapiens
tgttttgctcaccga

SEQ ID NO: 569698 - DNA, 15 bp, Homo sapiens
gttttgctcaccgat

SEQ ID NO: 569699 - DNA, 15 bp, Homo sapiens
ttttgctcaccgatt

SEQ ID NO: 569700 - DNA, 15 bp, Homo sapiens
tttgctcaccgattt

SEQ ID NO: 569701 - DNA, 15 bp, Homo sapiens
ttgctcaccgatttc

SEQ ID NO: 569702 - DNA, 15 bp, Homo sapiens
tgctcaccgatttct

SEQ ID NO: 569703 - DNA, 15 bp, Homo sapiens
gctcaccgatttctc

SEQ ID NO: 569704 - DNA, 15 bp, Homo sapiens
ctcaccgatttctcg

SEQ ID NO: 569705 - DNA, 15 bp, Homo sapiens
tcaccgatttctcgt

SEQ ID NO: 569706 - DNA, 15 bp, Homo sapiens
caccgatttctcgtt

SEQ ID NO: 569707 - DNA, 15 bp, Homo sapiens
accgatttctcgtta

SEQ ID NO: 569708 - DNA, 15 bp, Homo sapiens
ccgatttctcgttag

SEQ ID NO: 569709 - DNA, 15 bp, Homo sapiens
cgatttctcgttagc

SEQ ID NO: 569710 - DNA, 15 bp, Homo sapiens
gatttctcgttagca

SEQ ID NO: 569711 - DNA, 15 bp, Homo sapiens
atttctcgttagcac

SEQ ID NO: 569712 - DNA, 15 bp, Homo sapiens
tttctcgttagcact

SEQ ID NO: 569713 - DNA, 15 bp, Homo sapiens
ttctcgttagcactt

SEQ ID NO: 569714 - DNA, 15 bp, Homo sapiens
tctcgttagcactta

SEQ ID NO: 569715 - DNA, 15 bp, Homo sapiens
ctcgttagcacttag

SEQ ID NO: 569716 - DNA, 15 bp, Homo sapiens
tcgttagcacttagc

SEQ ID NO: 569717 - DNA, 15 bp, Homo sapiens
cgttagcacttagca

SEQ ID NO: 569718 - DNA, 15 bp, Homo sapiens
gttagcacttagcac

SEQ ID NO: 569719 - DNA, 15 bp, Homo sapiens
ttagcacttagcaca

SEQ ID NO: 569720 - DNA, 15 bp, Homo sapiens
tagcacttagcacag

SEQ ID NO: 569721 - DNA, 15 bp, Homo sapiens
agcacttagcacagt

SEQ ID NO: 569722 - DNA, 15 bp, Homo sapiens
gcacttagcacagtg

SEQ ID NO: 569723 - DNA, 15 bp, Homo sapiens
cacttagcacagtgt

SEQ ID NO: 569724 - DNA, 15 bp, Homo sapiens
acttagcacagtgtc

SEQ ID NO: 569725 - DNA, 15 bp, Homo sapiens
cttagcacagtgtct

SEQ ID NO: 569726 - DNA, 15 bp, Homo sapiens
ttagcacagtgtctg

SEQ ID NO: 569727 - DNA, 15 bp, Homo sapiens
tagcacagtgtctgg

SEQ ID NO: 569728 - DNA, 15 bp, Homo sapiens
agcacagtgtctggc

SEQ ID NO: 569729 - DNA, 15 bp, Homo sapiens
gcacagtgtctggca

SEQ ID NO: 569730 - DNA, 15 bp, Homo sapiens
cacagtgtctggcac

SEQ ID NO: 569731 - DNA, 15 bp, Homo sapiens
acagtgtctggcaca

SEQ ID NO: 569732 - DNA, 15 bp, Homo sapiens
cagtgtctggcacac

SEQ ID NO: 569733 - DNA, 15 bp, Homo sapiens
agtgtctggcacacg

SEQ ID NO: 569734 - DNA, 15 bp, Homo sapiens
gtgtctggcacacga

SEQ ID NO: 569735 - DNA, 15 bp, Homo sapiens
tgtctggcacacgat

SEQ ID NO: 569736 - DNA, 15 bp, Homo sapiens
gtctggcacacgata

SEQ ID NO: 569737 - DNA, 15 bp, Homo sapiens
tctggcacacgatag

SEQ ID NO: 569738 - DNA, 15 bp, Homo sapiens
ctggcacacgataga

SEQ ID NO: 569739 - DNA, 15 bp, Homo sapiens
tggcacacgatagat

SEQ ID NO: 569740 - DNA, 15 bp, Homo sapiens
ggcacacgatagatg

SEQ ID NO: 569741 - DNA, 15 bp, Homo sapiens
gcacacgatagatgc

SEQ ID NO: 569742 - DNA, 15 bp, Homo sapiens
cacacgatagatgct

SEQ ID NO: 569743 - DNA, 15 bp, Homo sapiens
acacgatagatgctc

SEQ ID NO: 569744 - DNA, 15 bp, Homo sapiens
cacgatagatgctcc

SEQ ID NO: 569745 - DNA, 15 bp, Homo sapiens
acgatagatgctccg

SEQ ID NO: 569746 - DNA, 15 bp, Homo sapiens
cgatagatgctccgt

SEQ ID NO: 569747 - DNA, 15 bp, Homo sapiens
gatagatgctccgtc

SEQ ID NO: 569748 - DNA, 15 bp, Homo sapiens
atagatgctccgtca

SEQ ID NO: 569749 - DNA, 15 bp, Homo sapiens
tagatgctccgtcaa

SEQ ID NO: 569750 - DNA, 15 bp, Homo sapiens
agatgctccgtcaac

SEQ ID NO: 569751 - DNA, 15 bp, Homo sapiens
gatgctccgtcaact

SEQ ID NO: 569752 - DNA, 15 bp, Homo sapiens
atgctccgtcaactt

SEQ ID NO: 569753 - DNA, 15 bp, Homo sapiens
tgctccgtcaacttc

SEQ ID NO: 569754 - DNA, 15 bp, Homo sapiens
gctccgtcaacttct

SEQ ID NO: 569755 - DNA, 15 bp, Homo sapiens
ctccgtcaacttctc

SEQ ID NO: 569756 - DNA, 15 bp, Homo sapiens
tccgtcaacttctca

SEQ ID NO: 569757 - DNA, 15 bp, Homo sapiens
ccgtcaacttctcag

SEQ ID NO: 569758 - DNA, 15 bp, Homo sapiens
cgtcaacttctcagt

SEQ ID NO: 569759 - DNA, 15 bp, Homo sapiens
gtcaacttctcagtt

SEQ ID NO: 569760 - DNA, 15 bp, Homo sapiens
tcaacttctcagttg

SEQ ID NO: 569761 - DNA, 15 bp, Homo sapiens
caacttctcagttgg

SEQ ID NO: 569762 - DNA, 15 bp, Homo sapiens
aacttctcagttgga

SEQ ID NO: 569763 - DNA, 15 bp, Homo sapiens
acttctcagttggat

SEQ ID NO: 569764 - DNA, 15 bp, Homo sapiens
cttctcagttggata

SEQ ID NO: 569765 - DNA, 15 bp, Homo sapiens
ttctcagttggatac

SEQ ID NO: 569766 - DNA, 15 bp, Homo sapiens
tctcagttggatacc

SEQ ID NO: 569767 - DNA, 15 bp, Homo sapiens
ctcagttggatacca

SEQ ID NO: 569768 - DNA, 15 bp, Homo sapiens
tcagttggataccag

SEQ ID NO: 569769 - DNA, 15 bp, Homo sapiens
cagttggataccagc

SEQ ID NO: 569770 - DNA, 15 bp, Homo sapiens
agttggataccagca

SEQ ID NO: 569771 - DNA, 15 bp, Homo sapiens
gttggataccagcat

SEQ ID NO: 569772 - DNA, 15 bp, Homo sapiens
ttggataccagcatc

SEQ ID NO: 569773 - DNA, 15 bp, Homo sapiens
tggataccagcatcc

SEQ ID NO: 569774 - DNA, 15 bp, Homo sapiens
ggataccagcatccc

SEQ ID NO: 569775 - DNA, 15 bp, Homo sapiens
gataccagcatcccg

SEQ ID NO: 569776 - DNA, 15 bp, Homo sapiens
ataccagcatcccga

SEQ ID NO: 569777 - DNA, 15 bp, Homo sapiens
taccagcatcccgaa

SEQ ID NO: 569778 - DNA, 15 bp, Homo sapiens
accagcatcccgaag

SEQ ID NO: 569779 - DNA, 15 bp, Homo sapiens
ccagcatcccgaagg

SEQ ID NO: 569780 - DNA, 15 bp, Homo sapiens
cagcatcccgaaggg

SEQ ID NO: 569781 - DNA, 15 bp, Homo sapiens
agcatcccgaaggga

SEQ ID NO: 569782 - DNA, 15 bp, Homo sapiens
gcatcccgaagggaa

SEQ ID NO: 569783 - DNA, 15 bp, Homo sapiens
catcccgaagggaac

SEQ ID NO: 569784 - DNA, 15 bp, Homo sapiens
atcccgaagggaaca

SEQ ID NO: 569785 - DNA, 15 bp, Homo sapiens
tcccgaagggaacat

SEQ ID NO: 569786 - DNA, 15 bp, Homo sapiens
cccgaagggaacatg

SEQ ID NO: 569787 - DNA, 15 bp, Homo sapiens
ccgaagggaacatgg

SEQ ID NO: 569788 - DNA, 15 bp, Homo sapiens
cgaagggaacatgga

SEQ ID NO: 569789 - DNA, 15 bp, Homo sapiens
gaagggaacatggat

SEQ ID NO: 569790 - DNA, 15 bp, Homo sapiens
aagggaacatggatt

SEQ ID NO: 569791 - DNA, 15 bp, Homo sapiens
agggaacatggatta

SEQ ID NO: 569792 - DNA, 15 bp, Homo sapiens
gggaacatggattaa

SEQ ID NO: 569793 - DNA, 15 bp, Homo sapiens
ggaacatggattaag

SEQ ID NO: 569794 - DNA, 15 bp, Homo sapiens
gaacatggattaagg

SEQ ID NO: 569795 - DNA, 15 bp, Homo sapiens
aacatggattaaggc

SEQ ID NO: 569796 - DNA, 15 bp, Homo sapiens
acatggattaaggca

SEQ ID NO: 569797 - DNA, 15 bp, Homo sapiens
catggattaaggcag

SEQ ID NO: 569798 - DNA, 15 bp, Homo sapiens
atggattaaggcagc

SEQ ID NO: 569799 - DNA, 15 bp, Homo sapiens
tggattaaggcagct

SEQ ID NO: 569800 - DNA, 15 bp, Homo sapiens
ggattaaggcagcta

SEQ ID NO: 569801 - DNA, 15 bp, Homo sapiens
gattaaggcagctat

SEQ ID NO: 569802 - DNA, 15 bp, Homo sapiens
attaaggcagctata

SEQ ID NO: 569803 - DNA, 15 bp, Homo sapiens
ttaaggcagctataa

SEQ ID NO: 569804 - DNA, 15 bp, Homo sapiens
taaggcagctataag

SEQ ID NO: 569805 - DNA, 15 bp, Homo sapiens
aaggcagctataagc

SEQ ID NO: 569806 - DNA, 15 bp, Homo sapiens
aggcagctataagca

SEQ ID NO: 569807 - DNA, 15 bp, Homo sapiens
ggcagctataagcac

SEQ ID NO: 569808 - DNA, 15 bp, Homo sapiens
gcagctataagcacg

SEQ ID NO: 569809 - DNA, 15 bp, Homo sapiens
cagctataagcacgg

SEQ ID NO: 569810 - DNA, 15 bp, Homo sapiens
agctataagcacggt

SEQ ID NO: 569811 - DNA, 15 bp, Homo sapiens
gctataagcacggtg

SEQ ID NO: 569812 - DNA, 15 bp, Homo sapiens
ctataagcacggtgt

SEQ ID NO: 569813 - DNA, 15 bp, Homo sapiens
tataagcacggtgta

SEQ ID NO: 569814 - DNA, 15 bp, Homo sapiens
ataagcacggtgtaa

SEQ ID NO: 569815 - DNA, 15 bp, Homo sapiens
taagcacggtgtaaa

SEQ ID NO: 569816 - DNA, 15 bp, Homo sapiens
aagcacggtgtaaaa

SEQ ID NO: 569817 - DNA, 15 bp, Homo sapiens
agcacggtgtaaaaa

SEQ ID NO: 569818 - DNA, 15 bp, Homo sapiens
gcacggtgtaaaaac

SEQ ID NO: 569819 - DNA, 15 bp, Homo sapiens
cacggtgtaaaaaca

SEQ ID NO: 569820 - DNA, 15 bp, Homo sapiens
acggtgtaaaaacag

SEQ ID NO: 569821 - DNA, 15 bp, Homo sapiens
cggtgtaaaaacagg

SEQ ID NO: 569822 - DNA, 15 bp, Homo sapiens
ggtgtaaaaacagga

SEQ ID NO: 569823 - DNA, 15 bp, Homo sapiens
gtgtaaaaacaggaa

SEQ ID NO: 569824 - DNA, 15 bp, Homo sapiens
tgtaaaaacaggaat

SEQ ID NO: 569825 - DNA, 15 bp, Homo sapiens
gtaaaaacaggaata

SEQ ID NO: 569826 - DNA, 15 bp, Homo sapiens
taaaaacaggaataa

SEQ ID NO: 569827 - DNA, 15 bp, Homo sapiens
aaaaacaggaataag

SEQ ID NO: 569828 - DNA, 15 bp, Homo sapiens
aaaacaggaataaga

SEQ ID NO: 569829 - DNA, 15 bp, Homo sapiens
aaacaggaataagaa

SEQ ID NO: 569830 - DNA, 15 bp, Homo sapiens
aacaggaataagaaa

SEQ ID NO: 569831 - DNA, 15 bp, Homo sapiens
acaggaataagaaaa

SEQ ID NO: 569832 - DNA, 15 bp, Homo sapiens
caggaataagaaaaa

SEQ ID NO: 569833 - DNA, 15 bp, Homo sapiens
aggaataagaaaaag

SEQ ID NO: 569834 - DNA, 15 bp, Homo sapiens
ggaataagaaaaagt

SEQ ID NO: 569835 - DNA, 15 bp, Homo sapiens
gaataagaaaaagtt

SEQ ID NO: 569836 - DNA, 15 bp, Homo sapiens
aataagaaaaagttg

SEQ ID NO: 569837 - DNA, 15 bp, Homo sapiens
ataagaaaaagttga

SEQ ID NO: 569838 - DNA, 15 bp, Homo sapiens
taagaaaaagttgag

SEQ ID NO: 569839 - DNA, 15 bp, Homo sapiens
aagaaaaagttgagg

SEQ ID NO: 569840 - DNA, 15 bp, Homo sapiens
agaaaaagttgaggt

SEQ ID NO: 569841 - DNA, 15 bp, Homo sapiens
gaaaaagttgaggtt

SEQ ID NO: 569842 - DNA, 15 bp, Homo sapiens
aaaaagttgaggttt

SEQ ID NO: 569843 - DNA, 15 bp, Homo sapiens
aaaagttgaggtttg

SEQ ID NO: 569844 - DNA, 15 bp, Homo sapiens
aaagttgaggtttgt

SEQ ID NO: 569845 - DNA, 15 bp, Homo sapiens
aagttgaggtttgtt

SEQ ID NO: 569846 - DNA, 15 bp, Homo sapiens
agttgaggtttgttt

SEQ ID NO: 569847 - DNA, 15 bp, Homo sapiens
gttgaggtttgtttc

SEQ ID NO: 569848 - DNA, 15 bp, Homo sapiens
ttgaggtttgtttca

SEQ ID NO: 569849 - DNA, 15 bp, Homo sapiens
tgaggtttgtttcac

SEQ ID NO: 569850 - DNA, 15 bp, Homo sapiens
gaggtttgtttcaca

SEQ ID NO: 569851 - DNA, 15 bp, Homo sapiens
aggtttgtttcacag

SEQ ID NO: 569852 - DNA, 15 bp, Homo sapiens
ggtttgtttcacagt

SEQ ID NO: 569853 - DNA, 15 bp, Homo sapiens
gtttgtttcacagtg

SEQ ID NO: 569854 - DNA, 15 bp, Homo sapiens
tttgtttcacagtgg

SEQ ID NO: 569855 - DNA, 15 bp, Homo sapiens
ttgtttcacagtgga

SEQ ID NO: 569856 - DNA, 15 bp, Homo sapiens
tgtttcacagtggaa

SEQ ID NO: 569857 - DNA, 15 bp, Homo sapiens
gtttcacagtggaat

SEQ ID NO: 569858 - DNA, 15 bp, Homo sapiens
tttcacagtggaatg

SEQ ID NO: 569859 - DNA, 15 bp, Homo sapiens
ttcacagtggaatgt

SEQ ID NO: 569860 - DNA, 15 bp, Homo sapiens
tcacagtggaatgta

SEQ ID NO: 569861 - DNA, 15 bp, Homo sapiens
cacagtggaatgtaa

SEQ ID NO: 569862 - DNA, 15 bp, Homo sapiens
acagtggaatgtaaa

SEQ ID NO: 569863 - DNA, 15 bp, Homo sapiens
cagtggaatgtaaag

SEQ ID NO: 569864 - DNA, 15 bp, Homo sapiens
agtggaatgtaaagg

SEQ ID NO: 569865 - DNA, 15 bp, Homo sapiens
gtggaatgtaaaggg

SEQ ID NO: 569866 - DNA, 15 bp, Homo sapiens
tggaatgtaaagggt

SEQ ID NO: 569867 - DNA, 15 bp, Homo sapiens
ggaatgtaaagggtt

SEQ ID NO: 569868 - DNA, 15 bp, Homo sapiens
gaatgtaaagggttg

SEQ ID NO: 569869 - DNA, 15 bp, Homo sapiens
aatgtaaagggttgc

SEQ ID NO: 569870 - DNA, 15 bp, Homo sapiens
atgtaaagggttgca

SEQ ID NO: 569871 - DNA, 15 bp, Homo sapiens
tgtaaagggttgcaa

SEQ ID NO: 569872 - DNA, 15 bp, Homo sapiens
gtaaagggttgcaag

SEQ ID NO: 569873 - DNA, 15 bp, Homo sapiens
taaagggttgcaagg

SEQ ID NO: 569874 - DNA, 15 bp, Homo sapiens
aaagggttgcaagga

SEQ ID NO: 569875 - DNA, 15 bp, Homo sapiens
aagggttgcaaggag

SEQ ID NO: 569876 - DNA, 15 bp, Homo sapiens
agggttgcaaggagg

SEQ ID NO: 569877 - DNA, 15 bp, Homo sapiens
gggttgcaaggaggt

SEQ ID NO: 569878 - DNA, 15 bp, Homo sapiens
ggttgcaaggaggtg

SEQ ID NO: 569879 - DNA, 15 bp, Homo sapiens
gttgcaaggaggtgc

SEQ ID NO: 569880 - DNA, 15 bp, Homo sapiens
ttgcaaggaggtgca

SEQ ID NO: 569881 - DNA, 15 bp, Homo sapiens
tgcaaggaggtgcat

SEQ ID NO: 569882 - DNA, 15 bp, Homo sapiens
gcaaggaggtgcatc

SEQ ID NO: 569883 - DNA, 15 bp, Homo sapiens
caaggaggtgcatcg

SEQ ID NO: 569884 - DNA, 15 bp, Homo sapiens
aaggaggtgcatcgg

SEQ ID NO: 569885 - DNA, 15 bp, Homo sapiens
aggaggtgcatcggc

SEQ ID NO: 569886 - DNA, 15 bp, Homo sapiens
ggaggtgcatcggcc

SEQ ID NO: 569887 - DNA, 15 bp, Homo sapiens
gaggtgcatcggccc

SEQ ID NO: 569888 - DNA, 15 bp, Homo sapiens
aggtgcatcggcccc

SEQ ID NO: 569889 - DNA, 15 bp, Homo sapiens
ggtgcatcggcccct

SEQ ID NO: 569890 - DNA, 15 bp, Homo sapiens
gtgcatcggcccctg

SEQ ID NO: 569891 - DNA, 15 bp, Homo sapiens
tgcatcggcccctgt

SEQ ID NO: 569892 - DNA, 15 bp, Homo sapiens
gcatcggcccctgtg

SEQ ID NO: 569893 - DNA, 15 bp, Homo sapiens
catcggcccctgtgg

SEQ ID NO: 569894 - DNA, 15 bp, Homo sapiens
atcggcccctgtgga

SEQ ID NO: 569895 - DNA, 15 bp, Homo sapiens
tcggcccctgtggac

SEQ ID NO: 569896 - DNA, 15 bp, Homo sapiens
cggcccctgtggaca

SEQ ID NO: 569897 - DNA, 15 bp, Homo sapiens
ggcccctgtggacag

SEQ ID NO: 569898 - DNA, 15 bp, Homo sapiens
gcccctgtggacagg

SEQ ID NO: 569899 - DNA, 15 bp, Homo sapiens
cccctgtggacagga

SEQ ID NO: 569900 - DNA, 15 bp, Homo sapiens
ccctgtggacaggac

SEQ ID NO: 569901 - DNA, 15 bp, Homo sapiens
cctgtggacaggacg

SEQ ID NO: 569902 - DNA, 15 bp, Homo sapiens
ctgtggacaggacgc

SEQ ID NO: 569903 - DNA, 15 bp, Homo sapiens
tgtggacaggacgca

SEQ ID NO: 569904 - DNA, 15 bp, Homo sapiens
gtggacaggacgcat

SEQ ID NO: 569905 - DNA, 15 bp, Homo sapiens
tggacaggacgcatg

SEQ ID NO: 569906 - DNA, 15 bp, Homo sapiens
ggacaggacgcatga

SEQ ID NO: 569907 - DNA, 15 bp, Homo sapiens
gacaggacgcatgac

SEQ ID NO: 569908 - DNA, 15 bp, Homo sapiens
acaggacgcatgact

SEQ ID NO: 569909 - DNA, 15 bp, Homo sapiens
caggacgcatgactg

SEQ ID NO: 569910 - DNA, 15 bp, Homo sapiens
aggacgcatgactgc

SEQ ID NO: 569911 - DNA, 15 bp, Homo sapiens
ggacgcatgactgct

SEQ ID NO: 569912 - DNA, 15 bp, Homo sapiens
gacgcatgactgcta

SEQ ID NO: 569913 - DNA, 15 bp, Homo sapiens
acgcatgactgctac

SEQ ID NO: 569914 - DNA, 15 bp, Homo sapiens
cgcatgactgctaca

SEQ ID NO: 569915 - DNA, 15 bp, Homo sapiens
gcatgactgctacac

SEQ ID NO: 569916 - DNA, 15 bp, Homo sapiens
catgactgctacaca

SEQ ID NO: 569917 - DNA, 15 bp, Homo sapiens
atgactgctacacac

SEQ ID NO: 569918 - DNA, 15 bp, Homo sapiens
tgactgctacacacg

SEQ ID NO: 569919 - DNA, 15 bp, Homo sapiens
gactgctacacacgt

SEQ ID NO: 569920 - DNA, 15 bp, Homo sapiens
actgctacacacgtg

SEQ ID NO: 569921 - DNA, 15 bp, Homo sapiens
ctgctacacacgtgt

SEQ ID NO: 569922 - DNA, 15 bp, Homo sapiens
tgctacacacgtgtt

SEQ ID NO: 569923 - DNA, 15 bp, Homo sapiens
gctacacacgtgttc

SEQ ID NO: 569924 - DNA, 15 bp, Homo sapiens
ctacacacgtgttca

SEQ ID NO: 569925 - DNA, 15 bp, Homo sapiens
tacacacgtgttcac

SEQ ID NO: 569926 - DNA, 15 bp, Homo sapiens
acacacgtgttcacc

SEQ ID NO: 569927 - DNA, 15 bp, Homo sapiens
cacacgtgttcaccc

SEQ ID NO: 569928 - DNA, 15 bp, Homo sapiens
acacgtgttcacccc

SEQ ID NO: 569929 - DNA, 15 bp, Homo sapiens
cacgtgttcacccca

SEQ ID NO: 569930 - DNA, 15 bp, Homo sapiens
acgtgttcaccccac

SEQ ID NO: 569931 - DNA, 15 bp, Homo sapiens
cgtgttcaccccacc

SEQ ID NO: 569932 - DNA, 15 bp, Homo sapiens
gtgttcaccccaccc

SEQ ID NO: 569933 - DNA, 15 bp, Homo sapiens
tgttcaccccaccct

SEQ ID NO: 569934 - DNA, 15 bp, Homo sapiens
gttcaccccaccctc

SEQ ID NO: 569935 - DNA, 15 bp, Homo sapiens
ttcaccccaccctct

SEQ ID NO: 569936 - DNA, 15 bp, Homo sapiens
tcaccccaccctctg

SEQ ID NO: 569937 - DNA, 15 bp, Homo sapiens
caccccaccctctgg

SEQ ID NO: 569938 - DNA, 15 bp, Homo sapiens
accccaccctctggc

SEQ ID NO: 569939 - DNA, 15 bp, Homo sapiens
ccccaccctctggca

SEQ ID NO: 569940 - DNA, 15 bp, Homo sapiens
cccaccctctggcac

SEQ ID NO: 569941 - DNA, 15 bp, Homo sapiens
ccaccctctggcaca

SEQ ID NO: 569942 - DNA, 15 bp, Homo sapiens
caccctctggcacag

SEQ ID NO: 569943 - DNA, 15 bp, Homo sapiens
accctctggcacagg

SEQ ID NO: 569944 - DNA, 15 bp, Homo sapiens
ccctctggcacaggg

SEQ ID NO: 569945 - DNA, 15 bp, Homo sapiens
cctctggcacagggt

SEQ ID NO: 569946 - DNA, 15 bp, Homo sapiens
ctctggcacagggtg

SEQ ID NO: 569947 - DNA, 15 bp, Homo sapiens
tctggcacagggtgc

SEQ ID NO: 569948 - DNA, 15 bp, Homo sapiens
ctggcacagggtgca

SEQ ID NO: 569949 - DNA, 15 bp, Homo sapiens
tggcacagggtgcac

SEQ ID NO: 569950 - DNA, 15 bp, Homo sapiens
ggcacagggtgcaca

SEQ ID NO: 569951 - DNA, 15 bp, Homo sapiens
gcacagggtgcacat

SEQ ID NO: 569952 - DNA, 15 bp, Homo sapiens
cacagggtgcacata

SEQ ID NO: 569953 - DNA, 15 bp, Homo sapiens
acagggtgcacatac

SEQ ID NO: 569954 - DNA, 15 bp, Homo sapiens
cagggtgcacataca

SEQ ID NO: 569955 - DNA, 15 bp, Homo sapiens
agggtgcacatacag

SEQ ID NO: 569956 - DNA, 15 bp, Homo sapiens
gggtgcacatacagt

SEQ ID NO: 569957 - DNA, 15 bp, Homo sapiens
ggtgcacatacagta

SEQ ID NO: 569958 - DNA, 15 bp, Homo sapiens
gtgcacatacagtag

SEQ ID NO: 569959 - DNA, 15 bp, Homo sapiens
tgcacatacagtagg

SEQ ID NO: 569960 - DNA, 15 bp, Homo sapiens
gcacatacagtaggg

SEQ ID NO: 569961 - DNA, 15 bp, Homo sapiens
cacatacagtagggg

SEQ ID NO: 569962 - DNA, 15 bp, Homo sapiens
acatacagtaggggc

SEQ ID NO: 569963 - DNA, 15 bp, Homo sapiens
catacagtaggggca

SEQ ID NO: 569964 - DNA, 15 bp, Homo sapiens
atacagtaggggcag

SEQ ID NO: 569965 - DNA, 15 bp, Homo sapiens
tacagtaggggcaga

SEQ ID NO: 569966 - DNA, 15 bp, Homo sapiens
acagtaggggcagaa

SEQ ID NO: 569967 - DNA, 15 bp, Homo sapiens
cagtaggggcagaaa

SEQ ID NO: 569968 - DNA, 15 bp, Homo sapiens
agtaggggcagaaat

SEQ ID NO: 569969 - DNA, 15 bp, Homo sapiens
gtaggggcagaaatg

SEQ ID NO: 569970 - DNA, 15 bp, Homo sapiens
taggggcagaaatga

SEQ ID NO: 569971 - DNA, 15 bp, Homo sapiens
aggggcagaaatgaa

SEQ ID NO: 569972 - DNA, 15 bp, Homo sapiens
ggggcagaaatgaac

SEQ ID NO: 569973 - DNA, 15 bp, Homo sapiens
gggcagaaatgaacc

SEQ ID NO: 569974 - DNA, 15 bp, Homo sapiens
ggcagaaatgaacct

SEQ ID NO: 569975 - DNA, 15 bp, Homo sapiens
gcagaaatgaacctc

SEQ ID NO: 569976 - DNA, 15 bp, Homo sapiens
cagaaatgaacctca

SEQ ID NO: 569977 - DNA, 15 bp, Homo sapiens
agaaatgaacctcaa

SEQ ID NO: 569978 - DNA, 15 bp, Homo sapiens
gaaatgaacctcaag

SEQ ID NO: 569979 - DNA, 15 bp, Homo sapiens
aaatgaacctcaagt

SEQ ID NO: 569980 - DNA, 15 bp, Homo sapiens
aatgaacctcaagtg

SEQ ID NO: 569981 - DNA, 15 bp, Homo sapiens
atgaacctcaagtgc

SEQ ID NO: 569982 - DNA, 15 bp, Homo sapiens
tgaacctcaagtgct

SEQ ID NO: 569983 - DNA, 15 bp, Homo sapiens
gaacctcaagtgctt

SEQ ID NO: 569984 - DNA, 15 bp, Homo sapiens
aacctcaagtgctta

SEQ ID NO: 569985 - DNA, 15 bp, Homo sapiens
acctcaagtgcttaa

SEQ ID NO: 569986 - DNA, 15 bp, Homo sapiens
cctcaagtgcttaac

SEQ ID NO: 569987 - DNA, 15 bp, Homo sapiens
ctcaagtgcttaaca

SEQ ID NO: 569988 - DNA, 15 bp, Homo sapiens
tcaagtgcttaacac

SEQ ID NO: 569989 - DNA, 15 bp, Homo sapiens
caagtgcttaacaca

SEQ ID NO: 569990 - DNA, 15 bp, Homo sapiens
aagtgcttaacacaa

SEQ ID NO: 569991 - DNA, 15 bp, Homo sapiens
agtgcttaacacaat

SEQ ID NO: 569992 - DNA, 15 bp, Homo sapiens
gtgcttaacacaatt

SEQ ID NO: 569993 - DNA, 15 bp, Homo sapiens
tgcttaacacaattt

SEQ ID NO: 569994 - DNA, 15 bp, Homo sapiens
gcttaacacaatttt

SEQ ID NO: 569995 - DNA, 15 bp, Homo sapiens
cttaacacaattttt

SEQ ID NO: 569996 - DNA, 15 bp, Homo sapiens
ttaacacaattttta

SEQ ID NO: 569997 - DNA, 15 bp, Homo sapiens
taacacaatttttaa

SEQ ID NO: 569998 - DNA, 15 bp, Homo sapiens
aacacaatttttaaa

SEQ ID NO: 569999 - DNA, 15 bp, Homo sapiens
acacaatttttaaaa

SEQ ID NO: 570000 - DNA, 15 bp, Homo sapiens
cacaatttttaaaaa

SEQ ID NO: 570001 - DNA, 15 bp, Homo sapiens
acaatttttaaaaaa

SEQ ID NO: 570002 - DNA, 15 bp, Homo sapiens
caatttttaaaaaat

SEQ ID NO: 570003 - DNA, 15 bp, Homo sapiens
aatttttaaaaaata

SEQ ID NO: 570004 - DNA, 15 bp, Homo sapiens
atttttaaaaaatat

SEQ ID NO: 570005 - DNA, 15 bp, Homo sapiens
tttttaaaaaatata

SEQ ID NO: 570006 - DNA, 15 bp, Homo sapiens
ttttaaaaaatatat

SEQ ID NO: 570007 - DNA, 15 bp, Homo sapiens
tttaaaaaatatata

SEQ ID NO: 570008 - DNA, 15 bp, Homo sapiens
ttaaaaaatatatag

SEQ ID NO: 570009 - DNA, 15 bp, Homo sapiens
taaaaaatatatagt

SEQ ID NO: 570010 - DNA, 15 bp, Homo sapiens
aaaaaatatatagtc

SEQ ID NO: 570011 - DNA, 15 bp, Homo sapiens
aaaaatatatagtca

SEQ ID NO: 570012 - DNA, 15 bp, Homo sapiens
aaaatatatagtcaa

SEQ ID NO: 570013 - DNA, 15 bp, Homo sapiens
aaatatatagtcaag

SEQ ID NO: 570014 - DNA, 15 bp, Homo sapiens
aatatatagtcaagt

SEQ ID NO: 570015 - DNA, 15 bp, Homo sapiens
atatatagtcaagtg

SEQ ID NO: 570016 - DNA, 15 bp, Homo sapiens
tatatagtcaagtga

SEQ ID NO: 570017 - DNA, 15 bp, Homo sapiens
atatagtcaagtgaa

SEQ ID NO: 570018 - DNA, 15 bp, Homo sapiens
tatagtcaagtgaaa

SEQ ID NO: 570019 - DNA, 15 bp, Homo sapiens
atagtcaagtgaaag

SEQ ID NO: 570020 - DNA, 15 bp, Homo sapiens
tagtcaagtgaaagt

SEQ ID NO: 570021 - DNA, 15 bp, Homo sapiens
agtcaagtgaaagta

SEQ ID NO: 570022 - DNA, 15 bp, Homo sapiens
gtcaagtgaaagtat

SEQ ID NO: 570023 - DNA, 15 bp, Homo sapiens
tcaagtgaaagtatg

SEQ ID NO: 570024 - DNA, 15 bp, Homo sapiens
caagtgaaagtatga

SEQ ID NO: 570025 - DNA, 15 bp, Homo sapiens
aagtgaaagtatgaa

SEQ ID NO: 570026 - DNA, 15 bp, Homo sapiens
agtgaaagtatgaaa

SEQ ID NO: 570027 - DNA, 15 bp, Homo sapiens
gtgaaagtatgaaaa

SEQ ID NO: 570028 - DNA, 15 bp, Homo sapiens
tgaaagtatgaaaat

SEQ ID NO: 570029 - DNA, 15 bp, Homo sapiens
gaaagtatgaaaatg

SEQ ID NO: 570030 - DNA, 15 bp, Homo sapiens
aaagtatgaaaatga

SEQ ID NO: 570031 - DNA, 15 bp, Homo sapiens
aagtatgaaaatgag

SEQ ID NO: 570032 - DNA, 15 bp, Homo sapiens
agtatgaaaatgagt

SEQ ID NO: 570033 - DNA, 15 bp, Homo sapiens
gtatgaaaatgagtt

SEQ ID NO: 570034 - DNA, 15 bp, Homo sapiens
tatgaaaatgagttg

SEQ ID NO: 570035 - DNA, 15 bp, Homo sapiens
atgaaaatgagttga

SEQ ID NO: 570036 - DNA, 15 bp, Homo sapiens
tgaaaatgagttgag

SEQ ID NO: 570037 - DNA, 15 bp, Homo sapiens
gaaaatgagttgagg

SEQ ID NO: 570038 - DNA, 15 bp, Homo sapiens
aaaatgagttgagga

SEQ ID NO: 570039 - DNA, 15 bp, Homo sapiens
aaatgagttgaggaa

SEQ ID NO: 570040 - DNA, 15 bp, Homo sapiens
aatgagttgaggaaa

SEQ ID NO: 570041 - DNA, 15 bp, Homo sapiens
atgagttgaggaaag

SEQ ID NO: 570042 - DNA, 15 bp, Homo sapiens
tgagttgaggaaagg

SEQ ID NO: 570043 - DNA, 15 bp, Homo sapiens
gagttgaggaaaggc

SEQ ID NO: 570044 - DNA, 15 bp, Homo sapiens
agttgaggaaaggcg

SEQ ID NO: 570045 - DNA, 15 bp, Homo sapiens
gttgaggaaaggcga

SEQ ID NO: 570046 - DNA, 15 bp, Homo sapiens
ttgaggaaaggcgag

SEQ ID NO: 570047 - DNA, 15 bp, Homo sapiens
tgaggaaaggcgagt

SEQ ID NO: 570048 - DNA, 15 bp, Homo sapiens
gaggaaaggcgagta

SEQ ID NO: 570049 - DNA, 15 bp, Homo sapiens
aggaaaggcgagtac

SEQ ID NO: 570050 - DNA, 15 bp, Homo sapiens
ggaaaggcgagtacg

SEQ ID NO: 570051 - DNA, 15 bp, Homo sapiens
gaaaggcgagtacgt

SEQ ID NO: 570052 - DNA, 15 bp, Homo sapiens
aaaggcgagtacgtg

SEQ ID NO: 570053 - DNA, 15 bp, Homo sapiens
aaggcgagtacgtgg

SEQ ID NO: 570054 - DNA, 15 bp, Homo sapiens
aggcgagtacgtggg

SEQ ID NO: 570055 - DNA, 15 bp, Homo sapiens
ggcgagtacgtgggt

SEQ ID NO: 570056 - DNA, 15 bp, Homo sapiens
gcgagtacgtgggtc

SEQ ID NO: 570057 - DNA, 15 bp, Homo sapiens
cgagtacgtgggtca

SEQ ID NO: 570058 - DNA, 15 bp, Homo sapiens
gagtacgtgggtcaa

SEQ ID NO: 570059 - DNA, 15 bp, Homo sapiens
agtacgtgggtcaaa

SEQ ID NO: 570060 - DNA, 15 bp, Homo sapiens
gtacgtgggtcaaag

SEQ ID NO: 570061 - DNA, 15 bp, Homo sapiens
tacgtgggtcaaagc

SEQ ID NO: 570062 - DNA, 15 bp, Homo sapiens
acgtgggtcaaagct

SEQ ID NO: 570063 - DNA, 15 bp, Homo sapiens
cgtgggtcaaagctg

SEQ ID NO: 570064 - DNA, 15 bp, Homo sapiens
gtgggtcaaagctgg

SEQ ID NO: 570065 - DNA, 15 bp, Homo sapiens
tgggtcaaagctggg

SEQ ID NO: 570066 - DNA, 15 bp, Homo sapiens
gggtcaaagctgggt

SEQ ID NO: 570067 - DNA, 15 bp, Homo sapiens
ggtcaaagctgggtc

SEQ ID NO: 570068 - DNA, 15 bp, Homo sapiens
gtcaaagctgggtct

SEQ ID NO: 570069 - DNA, 15 bp, Homo sapiens
tcaaagctgggtctg

SEQ ID NO: 570070 - DNA, 15 bp, Homo sapiens
caaagctgggtctga

SEQ ID NO: 570071 - DNA, 15 bp, Homo sapiens
aaagctgggtctgag

SEQ ID NO: 570072 - DNA, 15 bp, Homo sapiens
aagctgggtctgagg

SEQ ID NO: 570073 - DNA, 15 bp, Homo sapiens
agctgggtctgagga

SEQ ID NO: 570074 - DNA, 15 bp, Homo sapiens
gctgggtctgaggaa

SEQ ID NO: 570075 - DNA, 15 bp, Homo sapiens
ctgggtctgaggaaa

SEQ ID NO: 570076 - DNA, 15 bp, Homo sapiens
tgggtctgaggaaag

SEQ ID NO: 570077 - DNA, 15 bp, Homo sapiens
gggtctgaggaaagg

SEQ ID NO: 570078 - DNA, 15 bp, Homo sapiens
ggtctgaggaaaggc

SEQ ID NO: 570079 - DNA, 15 bp, Homo sapiens
gtctgaggaaaggct

SEQ ID NO: 570080 - DNA, 15 bp, Homo sapiens
tctgaggaaaggctc

SEQ ID NO: 570081 - DNA, 15 bp, Homo sapiens
ctgaggaaaggctca

SEQ ID NO: 570082 - DNA, 15 bp, Homo sapiens
tgaggaaaggctcac

SEQ ID NO: 570083 - DNA, 15 bp, Homo sapiens
gaggaaaggctcaca

SEQ ID NO: 570084 - DNA, 15 bp, Homo sapiens
aggaaaggctcacat

SEQ ID NO: 570085 - DNA, 15 bp, Homo sapiens
ggaaaggctcacatt

SEQ ID NO: 570086 - DNA, 15 bp, Homo sapiens
gaaaggctcacattt

SEQ ID NO: 570087 - DNA, 15 bp, Homo sapiens
aaaggctcacatttt

SEQ ID NO: 570088 - DNA, 15 bp, Homo sapiens
aaggctcacattttg

SEQ ID NO: 570089 - DNA, 15 bp, Homo sapiens
aggctcacattttga

SEQ ID NO: 570090 - DNA, 15 bp, Homo sapiens
ggctcacattttgag

SEQ ID NO: 570091 - DNA, 15 bp, Homo sapiens
gctcacattttgaga

SEQ ID NO: 570092 - DNA, 15 bp, Homo sapiens
ctcacattttgagat

SEQ ID NO: 570093 - DNA, 15 bp, Homo sapiens
tcacattttgagatc

SEQ ID NO: 570094 - DNA, 15 bp, Homo sapiens
cacattttgagatcc

SEQ ID NO: 570095 - DNA, 15 bp, Homo sapiens
acattttgagatccc

SEQ ID NO: 570096 - DNA, 15 bp, Homo sapiens
cattttgagatcccg

SEQ ID NO: 570097 - DNA, 15 bp, Homo sapiens
attttgagatcccga

SEQ ID NO: 570098 - DNA, 15 bp, Homo sapiens
ttttgagatcccgac

SEQ ID NO: 570099 - DNA, 15 bp, Homo sapiens
tttgagatcccgact

SEQ ID NO: 570100 - DNA, 15 bp, Homo sapiens
ttgagatcccgactc

SEQ ID NO: 570101 - DNA, 15 bp, Homo sapiens
tgagatcccgactca

SEQ ID NO: 570102 - DNA, 15 bp, Homo sapiens
gagatcccgactcaa

SEQ ID NO: 570103 - DNA, 15 bp, Homo sapiens
agatcccgactcaat

SEQ ID NO: 570104 - DNA, 15 bp, Homo sapiens
gatcccgactcaatc

SEQ ID NO: 570105 - DNA, 15 bp, Homo sapiens
atcccgactcaatcc

SEQ ID NO: 570106 - DNA, 15 bp, Homo sapiens
tcccgactcaatcca

SEQ ID NO: 570107 - DNA, 15 bp, Homo sapiens
cccgactcaatccat

SEQ ID NO: 570108 - DNA, 15 bp, Homo sapiens
ccgactcaatccatg

SEQ ID NO: 570109 - DNA, 15 bp, Homo sapiens
cgactcaatccatgt

SEQ ID NO: 570110 - DNA, 15 bp, Homo sapiens
gactcaatccatgtc

SEQ ID NO: 570111 - DNA, 15 bp, Homo sapiens
actcaatccatgtcc

SEQ ID NO: 570112 - DNA, 15 bp, Homo sapiens
ctcaatccatgtccc

SEQ ID NO: 570113 - DNA, 15 bp, Homo sapiens
tcaatccatgtccct

SEQ ID NO: 570114 - DNA, 15 bp, Homo sapiens
caatccatgtccctt

SEQ ID NO: 570115 - DNA, 15 bp, Homo sapiens
aatccatgtccctta

SEQ ID NO: 570116 - DNA, 15 bp, Homo sapiens
atccatgtcccttaa

SEQ ID NO: 570117 - DNA, 15 bp, Homo sapiens
tccatgtcccttaaa

SEQ ID NO: 570118 - DNA, 15 bp, Homo sapiens
ccatgtcccttaaag

SEQ ID NO: 570119 - DNA, 15 bp, Homo sapiens
catgtcccttaaagg

SEQ ID NO: 570120 - DNA, 15 bp, Homo sapiens
atgtcccttaaaggg

SEQ ID NO: 570121 - DNA, 15 bp, Homo sapiens
tgtcccttaaagggc

SEQ ID NO: 570122 - DNA, 15 bp, Homo sapiens
gtcccttaaagggca

SEQ ID NO: 570123 - DNA, 15 bp, Homo sapiens
tcccttaaagggcac

SEQ ID NO: 570124 - DNA, 15 bp, Homo sapiens
cccttaaagggcaca

SEQ ID NO: 570125 - DNA, 15 bp, Homo sapiens
ccttaaagggcacag

SEQ ID NO: 570126 - DNA, 15 bp, Homo sapiens
cttaaagggcacagg

SEQ ID NO: 570127 - DNA, 15 bp, Homo sapiens
ttaaagggcacaggg

SEQ ID NO: 570128 - DNA, 15 bp, Homo sapiens
taaagggcacagggt

SEQ ID NO: 570129 - DNA, 15 bp, Homo sapiens
aaagggcacagggtg

SEQ ID NO: 570130 - DNA, 15 bp, Homo sapiens
aagggcacagggtgt

SEQ ID NO: 570131 - DNA, 15 bp, Homo sapiens
agggcacagggtgtc

SEQ ID NO: 570132 - DNA, 15 bp, Homo sapiens
gggcacagggtgtct

SEQ ID NO: 570133 - DNA, 15 bp, Homo sapiens
ggcacagggtgtctc

SEQ ID NO: 570134 - DNA, 15 bp, Homo sapiens
gcacagggtgtctcc

SEQ ID NO: 570135 - DNA, 15 bp, Homo sapiens
cacagggtgtctcca

SEQ ID NO: 570136 - DNA, 15 bp, Homo sapiens
acagggtgtctccac

SEQ ID NO: 570137 - DNA, 15 bp, Homo sapiens
cagggtgtctccaca

SEQ ID NO: 570138 - DNA, 15 bp, Homo sapiens
agggtgtctccacag

SEQ ID NO: 570139 - DNA, 15 bp, Homo sapiens
gggtgtctccacagg

SEQ ID NO: 570140 - DNA, 15 bp, Homo sapiens
ggtgtctccacaggg

SEQ ID NO: 570141 - DNA, 15 bp, Homo sapiens
gtgtctccacagggc

SEQ ID NO: 570142 - DNA, 15 bp, Homo sapiens
tgtctccacagggcc

SEQ ID NO: 570143 - DNA, 15 bp, Homo sapiens
gtctccacagggccg

SEQ ID NO: 570144 - DNA, 15 bp, Homo sapiens
tctccacagggccgc

SEQ ID NO: 570145 - DNA, 15 bp, Homo sapiens
ctccacagggccgcc

SEQ ID NO: 570146 - DNA, 15 bp, Homo sapiens
tccacagggccgccc

SEQ ID NO: 570147 - DNA, 15 bp, Homo sapiens
ccacagggccgccca

SEQ ID NO: 570148 - DNA, 15 bp, Homo sapiens
cacagggccgcccaa

SEQ ID NO: 570149 - DNA, 15 bp, Homo sapiens
acagggccgcccaaa

SEQ ID NO: 570150 - DNA, 15 bp, Homo sapiens
cagggccgcccaaaa

SEQ ID NO: 570151 - DNA, 15 bp, Homo sapiens
agggccgcccaaaat

SEQ ID NO: 570152 - DNA, 15 bp, Homo sapiens
gggccgcccaaaatc

SEQ ID NO: 570153 - DNA, 15 bp, Homo sapiens
ggccgcccaaaatct

SEQ ID NO: 570154 - DNA, 15 bp, Homo sapiens
gccgcccaaaatctg

SEQ ID NO: 570155 - DNA, 15 bp, Homo sapiens
ccgcccaaaatctgg

SEQ ID NO: 570156 - DNA, 15 bp, Homo sapiens
cgcccaaaatctggt

SEQ ID NO: 570157 - DNA, 15 bp, Homo sapiens
gcccaaaatctggtg

SEQ ID NO: 570158 - DNA, 15 bp, Homo sapiens
cccaaaatctggtga

SEQ ID NO: 570159 - DNA, 15 bp, Homo sapiens
ccaaaatctggtgag

SEQ ID NO: 570160 - DNA, 15 bp, Homo sapiens
caaaatctggtgaga

SEQ ID NO: 570161 - DNA, 15 bp, Homo sapiens
aaaatctggtgagag

SEQ ID NO: 570162 - DNA, 15 bp, Homo sapiens
aaatctggtgagaga

SEQ ID NO: 570163 - DNA, 15 bp, Homo sapiens
aatctggtgagagag

SEQ ID NO: 570164 - DNA, 15 bp, Homo sapiens
atctggtgagagagg

SEQ ID NO: 570165 - DNA, 15 bp, Homo sapiens
tctggtgagagaggg

SEQ ID NO: 570166 - DNA, 15 bp, Homo sapiens
ctggtgagagagggc

SEQ ID NO: 570167 - DNA, 15 bp, Homo sapiens
tggtgagagagggcg

SEQ ID NO: 570168 - DNA, 15 bp, Homo sapiens
ggtgagagagggcgt

SEQ ID NO: 570169 - DNA, 15 bp, Homo sapiens
gtgagagagggcgta

SEQ ID NO: 570170 - DNA, 15 bp, Homo sapiens
tgagagagggcgtag

SEQ ID NO: 570171 - DNA, 15 bp, Homo sapiens
gagagagggcgtaga

SEQ ID NO: 570172 - DNA, 15 bp, Homo sapiens
agagagggcgtagac

SEQ ID NO: 570173 - DNA, 15 bp, Homo sapiens
gagagggcgtagacg

SEQ ID NO: 570174 - DNA, 15 bp, Homo sapiens
agagggcgtagacgc

SEQ ID NO: 570175 - DNA, 15 bp, Homo sapiens
gagggcgtagacgcc

SEQ ID NO: 570176 - DNA, 15 bp, Homo sapiens
agggcgtagacgcct

SEQ ID NO: 570177 - DNA, 15 bp, Homo sapiens
gggcgtagacgcctc

SEQ ID NO: 570178 - DNA, 15 bp, Homo sapiens
ggcgtagacgcctca

SEQ ID NO: 570179 - DNA, 15 bp, Homo sapiens
gcgtagacgcctcac

SEQ ID NO: 570180 - DNA, 15 bp, Homo sapiens
cgtagacgcctcacc

SEQ ID NO: 570181 - DNA, 15 bp, Homo sapiens
gtagacgcctcacct

SEQ ID NO: 570182 - DNA, 15 bp, Homo sapiens
tagacgcctcacctt

SEQ ID NO: 570183 - DNA, 15 bp, Homo sapiens
agacgcctcaccttc

SEQ ID NO: 570184 - DNA, 15 bp, Homo sapiens
gacgcctcaccttct

SEQ ID NO: 570185 - DNA, 15 bp, Homo sapiens
acgcctcaccttctg

SEQ ID NO: 570186 - DNA, 15 bp, Homo sapiens
cgcctcaccttctgc

SEQ ID NO: 570187 - DNA, 15 bp, Homo sapiens
gcctcaccttctgcc

SEQ ID NO: 570188 - DNA, 15 bp, Homo sapiens
cctcaccttctgcct

SEQ ID NO: 570189 - DNA, 15 bp, Homo sapiens
ctcaccttctgcctc

SEQ ID NO: 570190 - DNA, 15 bp, Homo sapiens
tcaccttctgcctct

SEQ ID NO: 570191 - DNA, 15 bp, Homo sapiens
caccttctgcctcta

SEQ ID NO: 570192 - DNA, 15 bp, Homo sapiens
accttctgcctctac

SEQ ID NO: 570193 - DNA, 15 bp, Homo sapiens
ccttctgcctctacg

SEQ ID NO: 570194 - DNA, 15 bp, Homo sapiens
cttctgcctctacgg

SEQ ID NO: 570195 - DNA, 15 bp, Homo sapiens
ttctgcctctacggg

SEQ ID NO: 570196 - DNA, 15 bp, Homo sapiens
tctgcctctacgggt

SEQ ID NO: 570197 - DNA, 15 bp, Homo sapiens
ctgcctctacgggtc

SEQ ID NO: 570198 - DNA, 15 bp, Homo sapiens
tgcctctacgggtca

SEQ ID NO: 570199 - DNA, 15 bp, Homo sapiens
gcctctacgggtcac

SEQ ID NO: 570200 - DNA, 15 bp, Homo sapiens
cctctacgggtcaca

SEQ ID NO: 570201 - DNA, 15 bp, Homo sapiens
ctctacgggtcacaa

SEQ ID NO: 570202 - DNA, 15 bp, Homo sapiens
tctacgggtcacaaa

SEQ ID NO: 570203 - DNA, 15 bp, Homo sapiens
ctacgggtcacaaaa

SEQ ID NO: 570204 - DNA, 15 bp, Homo sapiens
tacgggtcacaaaag

SEQ ID NO: 570205 - DNA, 15 bp, Homo sapiens
acgggtcacaaaagc

SEQ ID NO: 570206 - DNA, 15 bp, Homo sapiens
cgggtcacaaaagcc

SEQ ID NO: 570207 - DNA, 15 bp, Homo sapiens
gggtcacaaaagcct

SEQ ID NO: 570208 - DNA, 15 bp, Homo sapiens
ggtcacaaaagcctg

SEQ ID NO: 570209 - DNA, 15 bp, Homo sapiens
gtcacaaaagcctgg

SEQ ID NO: 570210 - DNA, 15 bp, Homo sapiens
tcacaaaagcctggg

SEQ ID NO: 570211 - DNA, 15 bp, Homo sapiens
cacaaaagcctgggt

SEQ ID NO: 570212 - DNA, 15 bp, Homo sapiens
acaaaagcctgggtc

SEQ ID NO: 570213 - DNA, 15 bp, Homo sapiens
caaaagcctgggtca

SEQ ID NO: 570214 - DNA, 15 bp, Homo sapiens
aaaagcctgggtcac

SEQ ID NO: 570215 - DNA, 15 bp, Homo sapiens
aaagcctgggtcacc

SEQ ID NO: 570216 - DNA, 15 bp, Homo sapiens
aagcctgggtcaccc

SEQ ID NO: 570217 - DNA, 15 bp, Homo sapiens
agcctgggtcaccct

SEQ ID NO: 570218 - DNA, 15 bp, Homo sapiens
gcctgggtcaccctg

SEQ ID NO: 570219 - DNA, 15 bp, Homo sapiens
cctgggtcaccctgg

SEQ ID NO: 570220 - DNA, 15 bp, Homo sapiens
ctgggtcaccctggt

SEQ ID NO: 570221 - DNA, 15 bp, Homo sapiens
tgggtcaccctggtt

SEQ ID NO: 570222 - DNA, 15 bp, Homo sapiens
gggtcaccctggttg

SEQ ID NO: 570223 - DNA, 15 bp, Homo sapiens
ggtcaccctggttgc

SEQ ID NO: 570224 - DNA, 15 bp, Homo sapiens
gtcaccctggttgcc

SEQ ID NO: 570225 - DNA, 15 bp, Homo sapiens
tcaccctggttgcca

SEQ ID NO: 570226 - DNA, 15 bp, Homo sapiens
caccctggttgccac

SEQ ID NO: 570227 - DNA, 15 bp, Homo sapiens
accctggttgccact

SEQ ID NO: 570228 - DNA, 15 bp, Homo sapiens
ccctggttgccactg

SEQ ID NO: 570229 - DNA, 15 bp, Homo sapiens
cctggttgccactgt

SEQ ID NO: 570230 - DNA, 15 bp, Homo sapiens
ctggttgccactgtt

SEQ ID NO: 570231 - DNA, 15 bp, Homo sapiens
tggttgccactgttc

SEQ ID NO: 570232 - DNA, 15 bp, Homo sapiens
ggttgccactgttcc

SEQ ID NO: 570233 - DNA, 15 bp, Homo sapiens
gttgccactgttcct

SEQ ID NO: 570234 - DNA, 15 bp, Homo sapiens
ttgccactgttccta

SEQ ID NO: 570235 - DNA, 15 bp, Homo sapiens
tgccactgttcctag

SEQ ID NO: 570236 - DNA, 15 bp, Homo sapiens
gccactgttcctagt

SEQ ID NO: 570237 - DNA, 15 bp, Homo sapiens
ccactgttcctagtt

SEQ ID NO: 570238 - DNA, 15 bp, Homo sapiens
cactgttcctagttc

SEQ ID NO: 570239 - DNA, 15 bp, Homo sapiens
actgttcctagttca

SEQ ID NO: 570240 - DNA, 15 bp, Homo sapiens
ctgttcctagttcaa

SEQ ID NO: 570241 - DNA, 15 bp, Homo sapiens
tgttcctagttcaaa

SEQ ID NO: 570242 - DNA, 15 bp, Homo sapiens
gttcctagttcaaag

SEQ ID NO: 570243 - DNA, 15 bp, Homo sapiens
ttcctagttcaaagt

SEQ ID NO: 570244 - DNA, 15 bp, Homo sapiens
tcctagttcaaagtc

SEQ ID NO: 570245 - DNA, 15 bp, Homo sapiens
cctagttcaaagtct

SEQ ID NO: 570246 - DNA, 15 bp, Homo sapiens
ctagttcaaagtctt

SEQ ID NO: 570247 - DNA, 15 bp, Homo sapiens
tagttcaaagtcttc

SEQ ID NO: 570248 - DNA, 15 bp, Homo sapiens
agttcaaagtcttct

SEQ ID NO: 570249 - DNA, 15 bp, Homo sapiens
gttcaaagtcttctt

SEQ ID NO: 570250 - DNA, 15 bp, Homo sapiens
ttcaaagtcttcttc

SEQ ID NO: 570251 - DNA, 15 bp, Homo sapiens
tcaaagtcttcttct

SEQ ID NO: 570252 - DNA, 15 bp, Homo sapiens
caaagtcttcttctg

SEQ ID NO: 570253 - DNA, 15 bp, Homo sapiens
aaagtcttcttctgt

SEQ ID NO: 570254 - DNA, 15 bp, Homo sapiens
aagtcttcttctgtc

SEQ ID NO: 570255 - DNA, 15 bp, Homo sapiens
agtcttcttctgtct

SEQ ID NO: 570256 - DNA, 15 bp, Homo sapiens
gtcttcttctgtcta

SEQ ID NO: 570257 - DNA, 15 bp, Homo sapiens
tcttcttctgtctaa

SEQ ID NO: 570258 - DNA, 15 bp, Homo sapiens
cttcttctgtctaat

SEQ ID NO: 570259 - DNA, 15 bp, Homo sapiens
ttcttctgtctaatc

SEQ ID NO: 570260 - DNA, 15 bp, Homo sapiens
tcttctgtctaatcc

SEQ ID NO: 570261 - DNA, 15 bp, Homo sapiens
cttctgtctaatcct

SEQ ID NO: 570262 - DNA, 15 bp, Homo sapiens
ttctgtctaatcctt

SEQ ID NO: 570263 - DNA, 15 bp, Homo sapiens
tctgtctaatccttc

SEQ ID NO: 570264 - DNA, 15 bp, Homo sapiens
ctgtctaatccttca

SEQ ID NO: 570265 - DNA, 15 bp, Homo sapiens
tgtctaatccttcac

SEQ ID NO: 570266 - DNA, 15 bp, Homo sapiens
gtctaatccttcacc

SEQ ID NO: 570267 - DNA, 15 bp, Homo sapiens
tctaatccttcaccc

SEQ ID NO: 570268 - DNA, 15 bp, Homo sapiens
ctaatccttcacccc

SEQ ID NO: 570269 - DNA, 15 bp, Homo sapiens
taatccttcacccct

SEQ ID NO: 570270 - DNA, 15 bp, Homo sapiens
aatccttcaccccta

SEQ ID NO: 570271 - DNA, 15 bp, Homo sapiens
atccttcacccctat

SEQ ID NO: 570272 - DNA, 15 bp, Homo sapiens
tccttcacccctatt

SEQ ID NO: 570273 - DNA, 15 bp, Homo sapiens
ccttcacccctattc

SEQ ID NO: 570274 - DNA, 15 bp, Homo sapiens
cttcacccctattct

SEQ ID NO: 570275 - DNA, 15 bp, Homo sapiens
ttcacccctattctc

SEQ ID NO: 570276 - DNA, 15 bp, Homo sapiens
tcacccctattctcg

SEQ ID NO: 570277 - DNA, 15 bp, Homo sapiens
cacccctattctcgc

SEQ ID NO: 570278 - DNA, 15 bp, Homo sapiens
acccctattctcgcc

SEQ ID NO: 570279 - DNA, 15 bp, Homo sapiens
cccctattctcgcct

SEQ ID NO: 570280 - DNA, 15 bp, Homo sapiens
ccctattctcgcctt

SEQ ID NO: 570281 - DNA, 15 bp, Homo sapiens
cctattctcgccttc

SEQ ID NO: 570282 - DNA, 15 bp, Homo sapiens
ctattctcgccttcc

SEQ ID NO: 570283 - DNA, 15 bp, Homo sapiens
tattctcgccttcca

SEQ ID NO: 570284 - DNA, 15 bp, Homo sapiens
attctcgccttccac

SEQ ID NO: 570285 - DNA, 15 bp, Homo sapiens
ttctcgccttccact

SEQ ID NO: 570286 - DNA, 15 bp, Homo sapiens
tctcgccttccactc

SEQ ID NO: 570287 - DNA, 15 bp, Homo sapiens
ctcgccttccactcc

SEQ ID NO: 570288 - DNA, 15 bp, Homo sapiens
tcgccttccactcca

SEQ ID NO: 570289 - DNA, 15 bp, Homo sapiens
cgccttccactccac

SEQ ID NO: 570290 - DNA, 15 bp, Homo sapiens
gccttccactccacc

SEQ ID NO: 570291 - DNA, 15 bp, Homo sapiens
ccttccactccacct

SEQ ID NO: 570292 - DNA, 15 bp, Homo sapiens
cttccactccacctc

SEQ ID NO: 570293 - DNA, 15 bp, Homo sapiens
ttccactccacctcc

SEQ ID NO: 570294 - DNA, 15 bp, Homo sapiens
tccactccacctccc

SEQ ID NO: 570295 - DNA, 15 bp, Homo sapiens
ccactccacctcccg

SEQ ID NO: 570296 - DNA, 15 bp, Homo sapiens
cactccacctcccgc

SEQ ID NO: 570297 - DNA, 15 bp, Homo sapiens
actccacctcccgct

SEQ ID NO: 570298 - DNA, 15 bp, Homo sapiens
ctccacctcccgctc

SEQ ID NO: 570299 - DNA, 15 bp, Homo sapiens
tccacctcccgctca

SEQ ID NO: 570300 - DNA, 15 bp, Homo sapiens
ccacctcccgctcag

SEQ ID NO: 570301 - DNA, 15 bp, Homo sapiens
cacctcccgctcagt

SEQ ID NO: 570302 - DNA, 15 bp, Homo sapiens
acctcccgctcagtc

SEQ ID NO: 570303 - DNA, 15 bp, Homo sapiens
cctcccgctcagtca

SEQ ID NO: 570304 - DNA, 15 bp, Homo sapiens
ctcccgctcagtcag

SEQ ID NO: 570305 - DNA, 15 bp, Homo sapiens
tcccgctcagtcaga

SEQ ID NO: 570306 - DNA, 15 bp, Homo sapiens
cccgctcagtcagac

SEQ ID NO: 570307 - DNA, 15 bp, Homo sapiens
ccgctcagtcagact

SEQ ID NO: 570308 - DNA, 15 bp, Homo sapiens
cgctcagtcagactg

SEQ ID NO: 570309 - DNA, 15 bp, Homo sapiens
gctcagtcagactgc

SEQ ID NO: 570310 - DNA, 15 bp, Homo sapiens
ctcagtcagactgcg

SEQ ID NO: 570311 - DNA, 15 bp, Homo sapiens
tcagtcagactgcgc

SEQ ID NO: 570312 - DNA, 15 bp, Homo sapiens
cagtcagactgcgct

SEQ ID NO: 570313 - DNA, 15 bp, Homo sapiens
agtcagactgcgcta

SEQ ID NO: 570314 - DNA, 15 bp, Homo sapiens
gtcagactgcgctac

SEQ ID NO: 570315 - DNA, 15 bp, Homo sapiens
tcagactgcgctact

SEQ ID NO: 570316 - DNA, 15 bp, Homo sapiens
cagactgcgctactt

SEQ ID NO: 570317 - DNA, 15 bp, Homo sapiens
agactgcgctacttt

SEQ ID NO: 570318 - DNA, 15 bp, Homo sapiens
gactgcgctactttg

SEQ ID NO: 570319 - DNA, 15 bp, Homo sapiens
actgcgctactttga

SEQ ID NO: 570320 - DNA, 15 bp, Homo sapiens
ctgcgctactttgaa

SEQ ID NO: 570321 - DNA, 15 bp, Homo sapiens
tgcgctactttgaac

SEQ ID NO: 570322 - DNA, 15 bp, Homo sapiens
gcgctactttgaacc

SEQ ID NO: 570323 - DNA, 15 bp, Homo sapiens
cgctactttgaaccg

SEQ ID NO: 570324 - DNA, 15 bp, Homo sapiens
gctactttgaaccgg

SEQ ID NO: 570325 - DNA, 15 bp, Homo sapiens
ctactttgaaccgga

SEQ ID NO: 570326 - DNA, 15 bp, Homo sapiens
tactttgaaccggac

SEQ ID NO: 570327 - DNA, 15 bp, Homo sapiens
actttgaaccggacc

SEQ ID NO: 570328 - DNA, 15 bp, Homo sapiens
ctttgaaccggacca

SEQ ID NO: 570329 - DNA, 15 bp, Homo sapiens
tttgaaccggaccaa

SEQ ID NO: 570330 - DNA, 15 bp, Homo sapiens
ttgaaccggaccaaa

SEQ ID NO: 570331 - DNA, 15 bp, Homo sapiens
tgaaccggaccaaac

SEQ ID NO: 570332 - DNA, 15 bp, Homo sapiens
gaaccggaccaaacc

SEQ ID NO: 570333 - DNA, 15 bp, Homo sapiens
aaccggaccaaacca

SEQ ID NO: 570334 - DNA, 15 bp, Homo sapiens
accggaccaaaccaa

SEQ ID NO: 570335 - DNA, 15 bp, Homo sapiens
ccggaccaaaccaaa

SEQ ID NO: 570336 - DNA, 15 bp, Homo sapiens
cggaccaaaccaaac

SEQ ID NO: 570337 - DNA, 15 bp, Homo sapiens
ggaccaaaccaaacc

SEQ ID NO: 570338 - DNA, 15 bp, Homo sapiens
gaccaaaccaaacca

SEQ ID NO: 570339 - DNA, 15 bp, Homo sapiens
accaaaccaaaccaa

SEQ ID NO: 570340 - DNA, 15 bp, Homo sapiens
ccaaaccaaaccaaa

SEQ ID NO: 570341 - DNA, 15 bp, Homo sapiens
caaaccaaaccaaac

SEQ ID NO: 570342 - DNA, 15 bp, Homo sapiens
aaaccaaaccaaacc

SEQ ID NO: 570343 - DNA, 15 bp, Homo sapiens
aaccaaaccaaacca

SEQ ID NO: 570344 - DNA, 15 bp, Homo sapiens
accaaaccaaaccag

SEQ ID NO: 570345 - DNA, 15 bp, Homo sapiens
ccaaaccaaaccaga

SEQ ID NO: 570346 - DNA, 15 bp, Homo sapiens
caaaccaaaccagac

SEQ ID NO: 570347 - DNA, 15 bp, Homo sapiens
aaaccaaaccagacc

SEQ ID NO: 570348 - DNA, 15 bp, Homo sapiens
aaccaaaccagacca

SEQ ID NO: 570349 - DNA, 15 bp, Homo sapiens
accaaaccagaccag

SEQ ID NO: 570350 - DNA, 15 bp, Homo sapiens
ccaaaccagaccaga

SEQ ID NO: 570351 - DNA, 15 bp, Homo sapiens
caaaccagaccagac

SEQ ID NO: 570352 - DNA, 15 bp, Homo sapiens
aaaccagaccagaca

SEQ ID NO: 570353 - DNA, 15 bp, Homo sapiens
aaccagaccagacac

SEQ ID NO: 570354 - DNA, 15 bp, Homo sapiens
accagaccagacacc

SEQ ID NO: 570355 - DNA, 15 bp, Homo sapiens
ccagaccagacaccc

SEQ ID NO: 570356 - DNA, 15 bp, Homo sapiens
cagaccagacacccc

SEQ ID NO: 570357 - DNA, 15 bp, Homo sapiens
agaccagacaccccc

SEQ ID NO: 570358 - DNA, 15 bp, Homo sapiens
gaccagacaccccct

SEQ ID NO: 570359 - DNA, 15 bp, Homo sapiens
accagacaccccctc

SEQ ID NO: 570360 - DNA, 15 bp, Homo sapiens
ccagacaccccctcc

SEQ ID NO: 570361 - DNA, 15 bp, Homo sapiens
cagacaccccctccc

SEQ ID NO: 570362 - DNA, 15 bp, Homo sapiens
agacaccccctcccg

SEQ ID NO: 570363 - DNA, 15 bp, Homo sapiens
gacaccccctcccgc

SEQ ID NO: 570364 - DNA, 15 bp, Homo sapiens
acaccccctcccgcg

SEQ ID NO: 570365 - DNA, 15 bp, Homo sapiens
caccccctcccgcgg

SEQ ID NO: 570366 - DNA, 15 bp, Homo sapiens
accccctcccgcgga

SEQ ID NO: 570367 - DNA, 15 bp, Homo sapiens
ccccctcccgcggaa

SEQ ID NO: 570368 - DNA, 15 bp, Homo sapiens
cccctcccgcggaat

SEQ ID NO: 570369 - DNA, 15 bp, Homo sapiens
ccctcccgcggaatc

SEQ ID NO: 570370 - DNA, 15 bp, Homo sapiens
cctcccgcggaatcc

SEQ ID NO: 570371 - DNA, 15 bp, Homo sapiens
ctcccgcggaatccc

SEQ ID NO: 570372 - DNA, 15 bp, Homo sapiens
tcccgcggaatccca

SEQ ID NO: 570373 - DNA, 15 bp, Homo sapiens
cccgcggaatcccag

SEQ ID NO: 570374 - DNA, 15 bp, Homo sapiens
ccgcggaatcccaga

SEQ ID NO: 570375 - DNA, 15 bp, Homo sapiens
cgcggaatcccagag

SEQ ID NO: 570376 - DNA, 15 bp, Homo sapiens
gcggaatcccagaga

SEQ ID NO: 570377 - DNA, 15 bp, Homo sapiens
cggaatcccagagag

SEQ ID NO: 570378 - DNA, 15 bp, Homo sapiens
ggaatcccagagagg

SEQ ID NO: 570379 - DNA, 15 bp, Homo sapiens
gaatcccagagaggc

SEQ ID NO: 570380 - DNA, 15 bp, Homo sapiens
aatcccagagaggcc

SEQ ID NO: 570381 - DNA, 15 bp, Homo sapiens
atcccagagaggccg

SEQ ID NO: 570382 - DNA, 15 bp, Homo sapiens
tcccagagaggccga

SEQ ID NO: 570383 - DNA, 15 bp, Homo sapiens
cccagagaggccgaa

SEQ ID NO: 570384 - DNA, 15 bp, Homo sapiens
ccagagaggccgaac

SEQ ID NO: 570385 - DNA, 15 bp, Homo sapiens
cagagaggccgaact

SEQ ID NO: 570386 - DNA, 15 bp, Homo sapiens
agagaggccgaactg

SEQ ID NO: 570387 - DNA, 15 bp, Homo sapiens
gagaggccgaactgg

SEQ ID NO: 570388 - DNA, 15 bp, Homo sapiens
agaggccgaactggg

SEQ ID NO: 570389 - DNA, 15 bp, Homo sapiens
gaggccgaactggga

SEQ ID NO: 570390 - DNA, 15 bp, Homo sapiens
aggccgaactgggat

SEQ ID NO: 570391 - DNA, 15 bp, Homo sapiens
ggccgaactgggata

SEQ ID NO: 570392 - DNA, 15 bp, Homo sapiens
gccgaactgggataa

SEQ ID NO: 570393 - DNA, 15 bp, Homo sapiens
ccgaactgggataac

SEQ ID NO: 570394 - DNA, 15 bp, Homo sapiens
cgaactgggataacc

SEQ ID NO: 570395 - DNA, 15 bp, Homo sapiens
gaactgggataaccg

SEQ ID NO: 570396 - DNA, 15 bp, Homo sapiens
aactgggataaccgg

SEQ ID NO: 570397 - DNA, 15 bp, Homo sapiens
actgggataaccgga

SEQ ID NO: 570398 - DNA, 15 bp, Homo sapiens
ctgggataaccggat

SEQ ID NO: 570399 - DNA, 15 bp, Homo sapiens
tgggataaccggatg

SEQ ID NO: 570400 - DNA, 15 bp, Homo sapiens
gggataaccggatgc

SEQ ID NO: 570401 - DNA, 15 bp, Homo sapiens
ggataaccggatgca

SEQ ID NO: 570402 - DNA, 15 bp, Homo sapiens
gataaccggatgcat

SEQ ID NO: 570403 - DNA, 15 bp, Homo sapiens
ataaccggatgcatt

SEQ ID NO: 570404 - DNA, 15 bp, Homo sapiens
taaccggatgcattt

SEQ ID NO: 570405 - DNA, 15 bp, Homo sapiens
aaccggatgcatttg

SEQ ID NO: 570406 - DNA, 15 bp, Homo sapiens
accggatgcatttga

SEQ ID NO: 570407 - DNA, 15 bp, Homo sapiens
ccggatgcatttgat

SEQ ID NO: 570408 - DNA, 15 bp, Homo sapiens
cggatgcatttgatt

SEQ ID NO: 570409 - DNA, 15 bp, Homo sapiens
ggatgcatttgattt

SEQ ID NO: 570410 - DNA, 15 bp, Homo sapiens
gatgcatttgatttc

SEQ ID NO: 570411 - DNA, 15 bp, Homo sapiens
atgcatttgatttcc

SEQ ID NO: 570412 - DNA, 15 bp, Homo sapiens
tgcatttgatttccc

SEQ ID NO: 570413 - DNA, 15 bp, Homo sapiens
gcatttgatttccca

SEQ ID NO: 570414 - DNA, 15 bp, Homo sapiens
catttgatttcccac

SEQ ID NO: 570415 - DNA, 15 bp, Homo sapiens
atttgatttcccacg

SEQ ID NO: 570416 - DNA, 15 bp, Homo sapiens
tttgatttcccacgc

SEQ ID NO: 570417 - DNA, 15 bp, Homo sapiens
ttgatttcccacgcc

SEQ ID NO: 570418 - DNA, 15 bp, Homo sapiens
tgatttcccacgcca

SEQ ID NO: 570419 - DNA, 15 bp, Homo sapiens
gatttcccacgccac

SEQ ID NO: 570420 - DNA, 15 bp, Homo sapiens
atttcccacgccact

SEQ ID NO: 570421 - DNA, 15 bp, Homo sapiens
tttcccacgccactg

SEQ ID NO: 570422 - DNA, 15 bp, Homo sapiens
ttcccacgccactga

SEQ ID NO: 570423 - DNA, 15 bp, Homo sapiens
tcccacgccactgag

SEQ ID NO: 570424 - DNA, 15 bp, Homo sapiens
cccacgccactgagt

SEQ ID NO: 570425 - DNA, 15 bp, Homo sapiens
ccacgccactgagtg

SEQ ID NO: 570426 - DNA, 15 bp, Homo sapiens
cacgccactgagtgc

SEQ ID NO: 570427 - DNA, 15 bp, Homo sapiens
acgccactgagtgca

SEQ ID NO: 570428 - DNA, 15 bp, Homo sapiens
cgccactgagtgcac

SEQ ID NO: 570429 - DNA, 15 bp, Homo sapiens
gccactgagtgcacc

SEQ ID NO: 570430 - DNA, 15 bp, Homo sapiens
ccactgagtgcacct

SEQ ID NO: 570431 - DNA, 15 bp, Homo sapiens
cactgagtgcacctc

SEQ ID NO: 570432 - DNA, 15 bp, Homo sapiens
actgagtgcacctct

SEQ ID NO: 570433 - DNA, 15 bp, Homo sapiens
ctgagtgcacctctg

SEQ ID NO: 570434 - DNA, 15 bp, Homo sapiens
tgagtgcacctctgc

SEQ ID NO: 570435 - DNA, 15 bp, Homo sapiens
gagtgcacctctgca

SEQ ID NO: 570436 - DNA, 15 bp, Homo sapiens
agtgcacctctgcag

SEQ ID NO: 570437 - DNA, 15 bp, Homo sapiens
gtgcacctctgcaga

SEQ ID NO: 570438 - DNA, 15 bp, Homo sapiens
tgcacctctgcagaa

SEQ ID NO: 570439 - DNA, 15 bp, Homo sapiens
gcacctctgcagaaa

SEQ ID NO: 570440 - DNA, 15 bp, Homo sapiens
cacctctgcagaaat

SEQ ID NO: 570441 - DNA, 15 bp, Homo sapiens
acctctgcagaaatg

SEQ ID NO: 570442 - DNA, 15 bp, Homo sapiens
cctctgcagaaatgg

SEQ ID NO: 570443 - DNA, 15 bp, Homo sapiens
ctctgcagaaatggg

SEQ ID NO: 570444 - DNA, 15 bp, Homo sapiens
tctgcagaaatgggc

SEQ ID NO: 570445 - DNA, 15 bp, Homo sapiens
ctgcagaaatgggcg

SEQ ID NO: 570446 - DNA, 15 bp, Homo sapiens
tgcagaaatgggcgt

SEQ ID NO: 570447 - DNA, 15 bp, Homo sapiens
gcagaaatgggcgtt

SEQ ID NO: 570448 - DNA, 15 bp, Homo sapiens
cagaaatgggcgttc

SEQ ID NO: 570449 - DNA, 15 bp, Homo sapiens
agaaatgggcgttct

SEQ ID NO: 570450 - DNA, 15 bp, Homo sapiens
gaaatgggcgttctg

SEQ ID NO: 570451 - DNA, 15 bp, Homo sapiens
aaatgggcgttctgg

SEQ ID NO: 570452 - DNA, 15 bp, Homo sapiens
aatgggcgttctggc

SEQ ID NO: 570453 - DNA, 15 bp, Homo sapiens
atgggcgttctggcc

SEQ ID NO: 570454 - DNA, 15 bp, Homo sapiens
tgggcgttctggccc

SEQ ID NO: 570455 - DNA, 15 bp, Homo sapiens
gggcgttctggccct

SEQ ID NO: 570456 - DNA, 15 bp, Homo sapiens
ggcgttctggccctc

SEQ ID NO: 570457 - DNA, 15 bp, Homo sapiens
gcgttctggccctcg

SEQ ID NO: 570458 - DNA, 15 bp, Homo sapiens
cgttctggccctcgc

SEQ ID NO: 570459 - DNA, 15 bp, Homo sapiens
gttctggccctcgcg

SEQ ID NO: 570460 - DNA, 15 bp, Homo sapiens
ttctggccctcgcga

SEQ ID NO: 570461 - DNA, 15 bp, Homo sapiens
tctggccctcgcgag

SEQ ID NO: 570462 - DNA, 15 bp, Homo sapiens
ctggccctcgcgagg

SEQ ID NO: 570463 - DNA, 15 bp, Homo sapiens
tggccctcgcgaggc

SEQ ID NO: 570464 - DNA, 15 bp, Homo sapiens
ggccctcgcgaggca

SEQ ID NO: 570465 - DNA, 15 bp, Homo sapiens
gccctcgcgaggcag

SEQ ID NO: 570466 - DNA, 15 bp, Homo sapiens
ccctcgcgaggcagt

SEQ ID NO: 570467 - DNA, 15 bp, Homo sapiens
cctcgcgaggcagtg

SEQ ID NO: 570468 - DNA, 15 bp, Homo sapiens
ctcgcgaggcagtgc

SEQ ID NO: 570469 - DNA, 15 bp, Homo sapiens
tcgcgaggcagtgcg

SEQ ID NO: 570470 - DNA, 15 bp, Homo sapiens
cgcgaggcagtgcga

SEQ ID NO: 570471 - DNA, 15 bp, Homo sapiens
gcgaggcagtgcgac

SEQ ID NO: 570472 - DNA, 15 bp, Homo sapiens
cgaggcagtgcgacc

SEQ ID NO: 570473 - DNA, 15 bp, Homo sapiens
gaggcagtgcgacct

SEQ ID NO: 570474 - DNA, 15 bp, Homo sapiens
aggcagtgcgacctg

SEQ ID NO: 570475 - DNA, 15 bp, Homo sapiens
ggcagtgcgacctgt

SEQ ID NO: 570476 - DNA, 15 bp, Homo sapiens
gcagtgcgacctgtc

SEQ ID NO: 570477 - DNA, 15 bp, Homo sapiens
cagtgcgacctgtca

SEQ ID NO: 570478 - DNA, 15 bp, Homo sapiens
agtgcgacctgtcac

SEQ ID NO: 570479 - DNA, 15 bp, Homo sapiens
gtgcgacctgtcacc

SEQ ID NO: 570480 - DNA, 15 bp, Homo sapiens
tgcgacctgtcaccg

SEQ ID NO: 570481 - DNA, 15 bp, Homo sapiens
gcgacctgtcaccgc

SEQ ID NO: 570482 - DNA, 15 bp, Homo sapiens
cgacctgtcaccgcc

SEQ ID NO: 570483 - DNA, 15 bp, Homo sapiens
gacctgtcaccgccc

SEQ ID NO: 570484 - DNA, 15 bp, Homo sapiens
acctgtcaccgccct

SEQ ID NO: 570485 - DNA, 15 bp, Homo sapiens
cctgtcaccgccctt

SEQ ID NO: 570486 - DNA, 15 bp, Homo sapiens
ctgtcaccgcccttc

SEQ ID NO: 570487 - DNA, 15 bp, Homo sapiens
tgtcaccgcccttca

SEQ ID NO: 570488 - DNA, 15 bp, Homo sapiens
gtcaccgcccttcag

SEQ ID NO: 570489 - DNA, 15 bp, Homo sapiens
tcaccgcccttcagc

SEQ ID NO: 570490 - DNA, 15 bp, Homo sapiens
caccgcccttcagcc

SEQ ID NO: 570491 - DNA, 15 bp, Homo sapiens
accgcccttcagcct

SEQ ID NO: 570492 - DNA, 15 bp, Homo sapiens
ccgcccttcagcctt

SEQ ID NO: 570493 - DNA, 15 bp, Homo sapiens
cgcccttcagccttc

SEQ ID NO: 570494 - DNA, 15 bp, Homo sapiens
gcccttcagccttcc

SEQ ID NO: 570495 - DNA, 15 bp, Homo sapiens
cccttcagccttccc

SEQ ID NO: 570496 - DNA, 15 bp, Homo sapiens
ccttcagccttcccg

SEQ ID NO: 570497 - DNA, 15 bp, Homo sapiens
cttcagccttcccgc

SEQ ID NO: 570498 - DNA, 15 bp, Homo sapiens
ttcagccttcccgcc

SEQ ID NO: 570499 - DNA, 15 bp, Homo sapiens
tcagccttcccgccc

SEQ ID NO: 570500 - DNA, 15 bp, Homo sapiens
cagccttcccgccct

SEQ ID NO: 570501 - DNA, 15 bp, Homo sapiens
agccttcccgccctc

SEQ ID NO: 570502 - DNA, 15 bp, Homo sapiens
gccttcccgccctcc

SEQ ID NO: 570503 - DNA, 15 bp, Homo sapiens
ccttcccgccctcca

SEQ ID NO: 570504 - DNA, 15 bp, Homo sapiens
cttcccgccctccac

SEQ ID NO: 570505 - DNA, 15 bp, Homo sapiens
ttcccgccctccacc

SEQ ID NO: 570506 - DNA, 15 bp, Homo sapiens
tcccgccctccacca

SEQ ID NO: 570507 - DNA, 15 bp, Homo sapiens
cccgccctccaccaa

SEQ ID NO: 570508 - DNA, 15 bp, Homo sapiens
ccgccctccaccaag

SEQ ID NO: 570509 - DNA, 15 bp, Homo sapiens
cgccctccaccaagc

SEQ ID NO: 570510 - DNA, 15 bp, Homo sapiens
gccctccaccaagcc

SEQ ID NO: 570511 - DNA, 15 bp, Homo sapiens
ccctccaccaagccc

SEQ ID NO: 570512 - DNA, 15 bp, Homo sapiens
cctccaccaagcccg

SEQ ID NO: 570513 - DNA, 15 bp, Homo sapiens
ctccaccaagcccgc

SEQ ID NO: 570514 - DNA, 15 bp, Homo sapiens
tccaccaagcccgcg

SEQ ID NO: 570515 - DNA, 15 bp, Homo sapiens
ccaccaagcccgcgc

SEQ ID NO: 570516 - DNA, 15 bp, Homo sapiens
caccaagcccgcgca

SEQ ID NO: 570517 - DNA, 15 bp, Homo sapiens
accaagcccgcgcac

SEQ ID NO: 570518 - DNA, 15 bp, Homo sapiens
ccaagcccgcgcacg

SEQ ID NO: 570519 - DNA, 15 bp, Homo sapiens
caagcccgcgcacgc

SEQ ID NO: 570520 - DNA, 15 bp, Homo sapiens
aagcccgcgcacgcc

SEQ ID NO: 570521 - DNA, 15 bp, Homo sapiens
agcccgcgcacgccc

SEQ ID NO: 570522 - DNA, 15 bp, Homo sapiens
gcccgcgcacgcccg

SEQ ID NO: 570523 - DNA, 15 bp, Homo sapiens
cccgcgcacgcccgg

SEQ ID NO: 570524 - DNA, 15 bp, Homo sapiens
ccgcgcacgcccggc

SEQ ID NO: 570525 - DNA, 15 bp, Homo sapiens
cgcgcacgcccggcc

SEQ ID NO: 570526 - DNA, 15 bp, Homo sapiens
gcgcacgcccggccc

SEQ ID NO: 570527 - DNA, 15 bp, Homo sapiens
cgcacgcccggcccg

SEQ ID NO: 570528 - DNA, 15 bp, Homo sapiens
gcacgcccggcccgc

SEQ ID NO: 570529 - DNA, 15 bp, Homo sapiens
cacgcccggcccgcg

SEQ ID NO: 570530 - DNA, 15 bp, Homo sapiens
acgcccggcccgcgc

SEQ ID NO: 570531 - DNA, 15 bp, Homo sapiens
cgcccggcccgcgcg

SEQ ID NO: 570532 - DNA, 15 bp, Homo sapiens
gcccggcccgcgcgt

SEQ ID NO: 570533 - DNA, 15 bp, Homo sapiens
cccggcccgcgcgtc

SEQ ID NO: 570534 - DNA, 15 bp, Homo sapiens
ccggcccgcgcgtct

SEQ ID NO: 570535 - DNA, 15 bp, Homo sapiens
cggcccgcgcgtctg

SEQ ID NO: 570536 - DNA, 15 bp, Homo sapiens
ggcccgcgcgtctgt

SEQ ID NO: 570537 - DNA, 15 bp, Homo sapiens
gcccgcgcgtctgtc

SEQ ID NO: 570538 - DNA, 15 bp, Homo sapiens
cccgcgcgtctgtct

SEQ ID NO: 570539 - DNA, 15 bp, Homo sapiens
ccgcgcgtctgtctt

SEQ ID NO: 570540 - DNA, 15 bp, Homo sapiens
cgcgcgtctgtcttt

SEQ ID NO: 570541 - DNA, 15 bp, Homo sapiens
gcgcgtctgtctttc

SEQ ID NO: 570542 - DNA, 15 bp, Homo sapiens
cgcgtctgtctttcg

SEQ ID NO: 570543 - DNA, 15 bp, Homo sapiens
gcgtctgtctttcga

SEQ ID NO: 570544 - DNA, 15 bp, Homo sapiens
cgtctgtctttcgac

SEQ ID NO: 570545 - DNA, 15 bp, Homo sapiens
gtctgtctttcgacc

SEQ ID NO: 570546 - DNA, 15 bp, Homo sapiens
tctgtctttcgaccc

SEQ ID NO: 570547 - DNA, 15 bp, Homo sapiens
ctgtctttcgacccg

SEQ ID NO: 570548 - DNA, 15 bp, Homo sapiens
tgtctttcgacccgg

SEQ ID NO: 570549 - DNA, 15 bp, Homo sapiens
gtctttcgacccggc

SEQ ID NO: 570550 - DNA, 15 bp, Homo sapiens
tctttcgacccggca

SEQ ID NO: 570551 - DNA, 15 bp, Homo sapiens
ctttcgacccggcac

SEQ ID NO: 570552 - DNA, 15 bp, Homo sapiens
tttcgacccggcacc

SEQ ID NO: 570553 - DNA, 15 bp, Homo sapiens
ttcgacccggcaccc

SEQ ID NO: 570554 - DNA, 15 bp, Homo sapiens
tcgacccggcacccc

SEQ ID NO: 570555 - DNA, 15 bp, Homo sapiens
cgacccggcaccccg

SEQ ID NO: 570556 - DNA, 15 bp, Homo sapiens
gacccggcaccccgg

SEQ ID NO: 570557 - DNA, 15 bp, Homo sapiens
acccggcaccccggc

SEQ ID NO: 570558 - DNA, 15 bp, Homo sapiens
cccggcaccccggcc

SEQ ID NO: 570559 - DNA, 15 bp, Homo sapiens
ccggcaccccggccg

SEQ ID NO: 570560 - DNA, 15 bp, Homo sapiens
cggcaccccggccgg

SEQ ID NO: 570561 - DNA, 15 bp, Homo sapiens
ggcaccccggccggt

SEQ ID NO: 570562 - DNA, 15 bp, Homo sapiens
gcaccccggccggtt

SEQ ID NO: 570563 - DNA, 15 bp, Homo sapiens
caccccggccggttc

SEQ ID NO: 570564 - DNA, 15 bp, Homo sapiens
accccggccggttcc

SEQ ID NO: 570565 - DNA, 15 bp, Homo sapiens
ccccggccggttccc

SEQ ID NO: 570566 - DNA, 15 bp, Homo sapiens
cccggccggttccca

SEQ ID NO: 570567 - DNA, 15 bp, Homo sapiens
ccggccggttcccag

SEQ ID NO: 570568 - DNA, 15 bp, Homo sapiens
cggccggttcccagc

SEQ ID NO: 570569 - DNA, 15 bp, Homo sapiens
ggccggttcccagca

SEQ ID NO: 570570 - DNA, 15 bp, Homo sapiens
gccggttcccagcag

SEQ ID NO: 570571 - DNA, 15 bp, Homo sapiens
ccggttcccagcagc

SEQ ID NO: 570572 - DNA, 15 bp, Homo sapiens
cggttcccagcagcg

SEQ ID NO: 570573 - DNA, 15 bp, Homo sapiens
ggttcccagcagcgc

SEQ ID NO: 570574 - DNA, 15 bp, Homo sapiens
gttcccagcagcgcg

SEQ ID NO: 570575 - DNA, 15 bp, Homo sapiens
ttcccagcagcgcgc

SEQ ID NO: 570576 - DNA, 15 bp, Homo sapiens
tcccagcagcgcgca

SEQ ID NO: 570577 - DNA, 15 bp, Homo sapiens
cccagcagcgcgcat

SEQ ID NO: 570578 - DNA, 15 bp, Homo sapiens
ccagcagcgcgcatg

SEQ ID NO: 570579 - DNA, 15 bp, Homo sapiens
cagcagcgcgcatgc

SEQ ID NO: 570580 - DNA, 15 bp, Homo sapiens
agcagcgcgcatgcg

SEQ ID NO: 570581 - DNA, 15 bp, Homo sapiens
gcagcgcgcatgcgc

SEQ ID NO: 570582 - DNA, 15 bp, Homo sapiens
cagcgcgcatgcgcg

SEQ ID NO: 570583 - DNA, 15 bp, Homo sapiens
agcgcgcatgcgcgc

SEQ ID NO: 570584 - DNA, 15 bp, Homo sapiens
gcgcgcatgcgcgcg

SEQ ID NO: 570585 - DNA, 15 bp, Homo sapiens
cgcgcatgcgcgcgc

SEQ ID NO: 570586 - DNA, 15 bp, Homo sapiens
gcgcatgcgcgcgct

SEQ ID NO: 570587 - DNA, 15 bp, Homo sapiens
cgcatgcgcgcgctc

SEQ ID NO: 570588 - DNA, 15 bp, Homo sapiens
gcatgcgcgcgctcc

SEQ ID NO: 570589 - DNA, 15 bp, Homo sapiens
catgcgcgcgctccc

SEQ ID NO: 570590 - DNA, 15 bp, Homo sapiens
atgcgcgcgctccca

SEQ ID NO: 570591 - DNA, 15 bp, Homo sapiens
tgcgcgcgctcccag

SEQ ID NO: 570592 - DNA, 15 bp, Homo sapiens
gcgcgcgctcccagg

SEQ ID NO: 570593 - DNA, 15 bp, Homo sapiens
cgcgcgctcccaggc

SEQ ID NO: 570594 - DNA, 15 bp, Homo sapiens
gcgcgctcccaggcc

SEQ ID NO: 570595 - DNA, 15 bp, Homo sapiens
cgcgctcccaggcca

SEQ ID NO: 570596 - DNA, 15 bp, Homo sapiens
gcgctcccaggccac

SEQ ID NO: 570597 - DNA, 15 bp, Homo sapiens
cgctcccaggccact

SEQ ID NO: 570598 - DNA, 15 bp, Homo sapiens
gctcccaggccactt

SEQ ID NO: 570599 - DNA, 15 bp, Homo sapiens
ctcccaggccacttg

SEQ ID NO: 570600 - DNA, 15 bp, Homo sapiens
tcccaggccacttga

SEQ ID NO: 570601 - DNA, 15 bp, Homo sapiens
cccaggccacttgaa

SEQ ID NO: 570602 - DNA, 15 bp, Homo sapiens
ccaggccacttgaag

SEQ ID NO: 570603 - DNA, 15 bp, Homo sapiens
caggccacttgaaga

SEQ ID NO: 570604 - DNA, 15 bp, Homo sapiens
aggccacttgaagag

SEQ ID NO: 570605 - DNA, 15 bp, Homo sapiens
ggccacttgaagaga

SEQ ID NO: 570606 - DNA, 15 bp, Homo sapiens
gccacttgaagagag

SEQ ID NO: 570607 - DNA, 15 bp, Homo sapiens
ccacttgaagagaga

SEQ ID NO: 570608 - DNA, 15 bp, Homo sapiens
cacttgaagagagag

SEQ ID NO: 570609 - DNA, 15 bp, Homo sapiens
acttgaagagagagg

SEQ ID NO: 570610 - DNA, 15 bp, Homo sapiens
cttgaagagagaggg

SEQ ID NO: 570611 - DNA, 15 bp, Homo sapiens
ttgaagagagagggc

SEQ ID NO: 570612 - DNA, 15 bp, Homo sapiens
tgaagagagagggcg

SEQ ID NO: 570613 - DNA, 15 bp, Homo sapiens
gaagagagagggcgg

SEQ ID NO: 570614 - DNA, 15 bp, Homo sapiens
aagagagagggcggg

SEQ ID NO: 570615 - DNA, 15 bp, Homo sapiens
agagagagggcgggg

SEQ ID NO: 570616 - DNA, 15 bp, Homo sapiens
gagagagggcggggc

SEQ ID NO: 570617 - DNA, 15 bp, Homo sapiens
agagagggcggggcc

SEQ ID NO: 570618 - DNA, 15 bp, Homo sapiens
gagagggcggggccg

SEQ ID NO: 570619 - DNA, 15 bp, Homo sapiens
agagggcggggccga

SEQ ID NO: 570620 - DNA, 15 bp, Homo sapiens
gagggcggggccgag

SEQ ID NO: 570621 - DNA, 15 bp, Homo sapiens
agggcggggccgagg

SEQ ID NO: 570622 - DNA, 15 bp, Homo sapiens
gggcggggccgaggg

SEQ ID NO: 570623 - DNA, 15 bp, Homo sapiens
ggcggggccgagggg

SEQ ID NO: 570624 - DNA, 15 bp, Homo sapiens
gcggggccgaggggc

SEQ ID NO: 570625 - DNA, 15 bp, Homo sapiens
cggggccgaggggct

SEQ ID NO: 570626 - DNA, 15 bp, Homo sapiens
ggggccgaggggctg

SEQ ID NO: 570627 - DNA, 15 bp, Homo sapiens
gggccgaggggctga

SEQ ID NO: 570628 - DNA, 15 bp, Homo sapiens
ggccgaggggctgag

SEQ ID NO: 570629 - DNA, 15 bp, Homo sapiens
gccgaggggctgagc

SEQ ID NO: 570630 - DNA, 15 bp, Homo sapiens
ccgaggggctgagcc

SEQ ID NO: 570631 - DNA, 15 bp, Homo sapiens
cgaggggctgagccc

SEQ ID NO: 570632 - DNA, 15 bp, Homo sapiens
gaggggctgagcccg

SEQ ID NO: 570633 - DNA, 15 bp, Homo sapiens
aggggctgagcccgc

SEQ ID NO: 570634 - DNA, 15 bp, Homo sapiens
ggggctgagcccgcg

SEQ ID NO: 570635 - DNA, 15 bp, Homo sapiens
gggctgagcccgcgg

SEQ ID NO: 570636 - DNA, 15 bp, Homo sapiens
ggctgagcccgcggg

SEQ ID NO: 570637 - DNA, 15 bp, Homo sapiens
gctgagcccgcgggg

SEQ ID NO: 570638 - DNA, 15 bp, Homo sapiens
ctgagcccgcggggg

SEQ ID NO: 570639 - DNA, 15 bp, Homo sapiens
tgagcccgcgggggg

SEQ ID NO: 570640 - DNA, 15 bp, Homo sapiens
gagcccgcgggggga

SEQ ID NO: 570641 - DNA, 15 bp, Homo sapiens
agcccgcggggggag

SEQ ID NO: 570642 - DNA, 15 bp, Homo sapiens
gcccgcggggggagg

SEQ ID NO: 570643 - DNA, 15 bp, Homo sapiens
cccgcggggggaggg

SEQ ID NO: 570644 - DNA, 15 bp, Homo sapiens
ccgcggggggaggga

SEQ ID NO: 570645 - DNA, 15 bp, Homo sapiens
cgcggggggagggaa

SEQ ID NO: 570646 - DNA, 15 bp, Homo sapiens
gcggggggagggaac

SEQ ID NO: 570647 - DNA, 15 bp, Homo sapiens
cggggggagggaaca

SEQ ID NO: 570648 - DNA, 15 bp, Homo sapiens
ggggggagggaacag

SEQ ID NO: 570649 - DNA, 15 bp, Homo sapiens
gggggagggaacagc

SEQ ID NO: 570650 - DNA, 15 bp, Homo sapiens
ggggagggaacagcg

SEQ ID NO: 570651 - DNA, 15 bp, Homo sapiens
gggagggaacagcgt

SEQ ID NO: 570652 - DNA, 15 bp, Homo sapiens
ggagggaacagcgtt

SEQ ID NO: 570653 - DNA, 15 bp, Homo sapiens
gagggaacagcgttg

SEQ ID NO: 570654 - DNA, 15 bp, Homo sapiens
agggaacagcgttga

SEQ ID NO: 570655 - DNA, 15 bp, Homo sapiens
gggaacagcgttgat

SEQ ID NO: 570656 - DNA, 15 bp, Homo sapiens
ggaacagcgttgatc

SEQ ID NO: 570657 - DNA, 15 bp, Homo sapiens
gaacagcgttgatca

SEQ ID NO: 570658 - DNA, 15 bp, Homo sapiens
aacagcgttgatcac

SEQ ID NO: 570659 - DNA, 15 bp, Homo sapiens
acagcgttgatcacg

SEQ ID NO: 570660 - DNA, 15 bp, Homo sapiens
cagcgttgatcacgt

SEQ ID NO: 570661 - DNA, 15 bp, Homo sapiens
agcgttgatcacgtg

SEQ ID NO: 570662 - DNA, 15 bp, Homo sapiens
gcgttgatcacgtga

SEQ ID NO: 570663 - DNA, 15 bp, Homo sapiens
cgttgatcacgtgac

SEQ ID NO: 570664 - DNA, 15 bp, Homo sapiens
gttgatcacgtgacg

SEQ ID NO: 570665 - DNA, 15 bp, Homo sapiens
ttgatcacgtgacgt

SEQ ID NO: 570666 - DNA, 15 bp, Homo sapiens
tgatcacgtgacgtg

SEQ ID NO: 570667 - DNA, 15 bp, Homo sapiens
gatcacgtgacgtgg

SEQ ID NO: 570668 - DNA, 15 bp, Homo sapiens
atcacgtgacgtggt

SEQ ID NO: 570669 - DNA, 15 bp, Homo sapiens
tcacgtgacgtggtt

SEQ ID NO: 570670 - DNA, 15 bp, Homo sapiens
cacgtgacgtggttt

SEQ ID NO: 570671 - DNA, 15 bp, Homo sapiens
acgtgacgtggtttc

SEQ ID NO: 570672 - DNA, 15 bp, Homo sapiens
cgtgacgtggtttca

SEQ ID NO: 570673 - DNA, 15 bp, Homo sapiens
gtgacgtggtttcag

SEQ ID NO: 570674 - DNA, 15 bp, Homo sapiens
tgacgtggtttcagt

SEQ ID NO: 570675 - DNA, 15 bp, Homo sapiens
gacgtggtttcagtg

SEQ ID NO: 570676 - DNA, 15 bp, Homo sapiens
acgtggtttcagtgt

SEQ ID NO: 570677 - DNA, 15 bp, Homo sapiens
cgtggtttcagtgtt

SEQ ID NO: 570678 - DNA, 15 bp, Homo sapiens
gtggtttcagtgttt

SEQ ID NO: 570679 - DNA, 15 bp, Homo sapiens
tggtttcagtgttta

SEQ ID NO: 570680 - DNA, 15 bp, Homo sapiens
ggtttcagtgtttac

SEQ ID NO: 570681 - DNA, 15 bp, Homo sapiens
gtttcagtgtttaca

SEQ ID NO: 570682 - DNA, 15 bp, Homo sapiens
tttcagtgtttacac

SEQ ID NO: 570683 - DNA, 15 bp, Homo sapiens
ttcagtgtttacacc

SEQ ID NO: 570684 - DNA, 15 bp, Homo sapiens
tcagtgtttacaccc

SEQ ID NO: 570685 - DNA, 15 bp, Homo sapiens
cagtgtttacacccg

SEQ ID NO: 570686 - DNA, 15 bp, Homo sapiens
agtgtttacacccgc

SEQ ID NO: 570687 - DNA, 15 bp, Homo sapiens
gtgtttacacccgca

SEQ ID NO: 570688 - DNA, 15 bp, Homo sapiens
tgtttacacccgcag

SEQ ID NO: 570689 - DNA, 15 bp, Homo sapiens
gtttacacccgcagc

SEQ ID NO: 570690 - DNA, 15 bp, Homo sapiens
tttacacccgcagcg

SEQ ID NO: 570691 - DNA, 15 bp, Homo sapiens
ttacacccgcagcgg

SEQ ID NO: 570692 - DNA, 15 bp, Homo sapiens
tacacccgcagcggg

SEQ ID NO: 570693 - DNA, 15 bp, Homo sapiens
acacccgcagcgggc

SEQ ID NO: 570694 - DNA, 15 bp, Homo sapiens
cacccgcagcgggcc

SEQ ID NO: 570695 - DNA, 15 bp, Homo sapiens
acccgcagcgggccg

SEQ ID NO: 570696 - DNA, 15 bp, Homo sapiens
cccgcagcgggccgg

SEQ ID NO: 570697 - DNA, 15 bp, Homo sapiens
ccgcagcgggccggg

SEQ ID NO: 570698 - DNA, 15 bp, Homo sapiens
cgcagcgggccgggg

SEQ ID NO: 570699 - DNA, 15 bp, Homo sapiens
gcagcgggccggggg

SEQ ID NO: 570700 - DNA, 15 bp, Homo sapiens
cagcgggccgggggt

SEQ ID NO: 570701 - DNA, 15 bp, Homo sapiens
agcgggccgggggtt

SEQ ID NO: 570702 - DNA, 15 bp, Homo sapiens
gcgggccgggggttc

SEQ ID NO: 570703 - DNA, 15 bp, Homo sapiens
cgggccgggggttcg

SEQ ID NO: 570704 - DNA, 15 bp, Homo sapiens
gggccgggggttcgg

SEQ ID NO: 570705 - DNA, 15 bp, Homo sapiens
ggccgggggttcggc

SEQ ID NO: 570706 - DNA, 15 bp, Homo sapiens
gccgggggttcggcc

SEQ ID NO: 570707 - DNA, 15 bp, Homo sapiens
ccgggggttcggcct

SEQ ID NO: 570708 - DNA, 15 bp, Homo sapiens
cgggggttcggcctc

SEQ ID NO: 570709 - DNA, 15 bp, Homo sapiens
gggggttcggcctca

SEQ ID NO: 570710 - DNA, 15 bp, Homo sapiens
ggggttcggcctcag

SEQ ID NO: 570711 - DNA, 15 bp, Homo sapiens
gggttcggcctcagt

SEQ ID NO: 570712 - DNA, 15 bp, Homo sapiens
ggttcggcctcagtc

SEQ ID NO: 570713 - DNA, 15 bp, Homo sapiens
gttcggcctcagtca

SEQ ID NO: 570714 - DNA, 15 bp, Homo sapiens
ttcggcctcagtcag

SEQ ID NO: 570715 - DNA, 15 bp, Homo sapiens
tcggcctcagtcagg

SEQ ID NO: 570716 - DNA, 15 bp, Homo sapiens
cggcctcagtcaggc

SEQ ID NO: 570717 - DNA, 15 bp, Homo sapiens
ggcctcagtcaggcg

SEQ ID NO: 570718 - DNA, 15 bp, Homo sapiens
gcctcagtcaggcgc

SEQ ID NO: 570719 - DNA, 15 bp, Homo sapiens
cctcagtcaggcgct

SEQ ID NO: 570720 - DNA, 15 bp, Homo sapiens
ctcagtcaggcgctc

SEQ ID NO: 570721 - DNA, 15 bp, Homo sapiens
tcagtcaggcgctca

SEQ ID NO: 570722 - DNA, 15 bp, Homo sapiens
cagtcaggcgctcag

SEQ ID NO: 570723 - DNA, 15 bp, Homo sapiens
agtcaggcgctcagc

SEQ ID NO: 570724 - DNA, 15 bp, Homo sapiens
gtcaggcgctcagct

SEQ ID NO: 570725 - DNA, 15 bp, Homo sapiens
tcaggcgctcagctc

SEQ ID NO: 570726 - DNA, 15 bp, Homo sapiens
caggcgctcagctcc

SEQ ID NO: 570727 - DNA, 15 bp, Homo sapiens
aggcgctcagctccg

SEQ ID NO: 570728 - DNA, 15 bp, Homo sapiens
ggcgctcagctccgt

SEQ ID NO: 570729 - DNA, 15 bp, Homo sapiens
gcgctcagctccgtt

SEQ ID NO: 570730 - DNA, 15 bp, Homo sapiens
cgctcagctccgttt

SEQ ID NO: 570731 - DNA, 15 bp, Homo sapiens
gctcagctccgtttc

SEQ ID NO: 570732 - DNA, 15 bp, Homo sapiens
ctcagctccgtttcg

SEQ ID NO: 570733 - DNA, 15 bp, Homo sapiens
tcagctccgtttcgg

SEQ ID NO: 570734 - DNA, 15 bp, Homo sapiens
cagctccgtttcggt

SEQ ID NO: 570735 - DNA, 15 bp, Homo sapiens
agctccgtttcggtt

SEQ ID NO: 570736 - DNA, 15 bp, Homo sapiens
gctccgtttcggttt

SEQ ID NO: 570737 - DNA, 15 bp, Homo sapiens
ctccgtttcggtttc

SEQ ID NO: 570738 - DNA, 15 bp, Homo sapiens
tccgtttcggtttca

SEQ ID NO: 570739 - DNA, 15 bp, Homo sapiens
ccgtttcggtttcac

SEQ ID NO: 570740 - DNA, 15 bp, Homo sapiens
cgtttcggtttcact

SEQ ID NO: 570741 - DNA, 15 bp, Homo sapiens
gtttcggtttcactt

SEQ ID NO: 570742 - DNA, 15 bp, Homo sapiens
tttcggtttcacttc

SEQ ID NO: 570743 - DNA, 15 bp, Homo sapiens
ttcggtttcacttcc

SEQ ID NO: 570744 - DNA, 15 bp, Homo sapiens
tcggtttcacttccg

SEQ ID NO: 570745 - DNA, 15 bp, Homo sapiens
cggtttcacttccgg

SEQ ID NO: 570746 - DNA, 15 bp, Homo sapiens
ggtttcacttccggt

SEQ ID NO: 570747 - DNA, 15 bp, Homo sapiens
gtttcacttccggtg

SEQ ID NO: 570748 - DNA, 15 bp, Homo sapiens
tttcacttccggtgg

SEQ ID NO: 570749 - DNA, 15 bp, Homo sapiens
ttcacttccggtgga

SEQ ID NO: 570750 - DNA, 15 bp, Homo sapiens
tcacttccggtggag

SEQ ID NO: 570751 - DNA, 15 bp, Homo sapiens
cacttccggtggagg

SEQ ID NO: 570752 - DNA, 15 bp, Homo sapiens
acttccggtggaggg

SEQ ID NO: 570753 - DNA, 15 bp, Homo sapiens
cttccggtggagggc

SEQ ID NO: 570754 - DNA, 15 bp, Homo sapiens
ttccggtggagggcc

SEQ ID NO: 570755 - DNA, 15 bp, Homo sapiens
tccggtggagggccg

SEQ ID NO: 570756 - DNA, 15 bp, Homo sapiens
ccggtggagggccgc

SEQ ID NO: 570757 - DNA, 15 bp, Homo sapiens
cggtggagggccgcc

SEQ ID NO: 570758 - DNA, 15 bp, Homo sapiens
ggtggagggccgcct

SEQ ID NO: 570759 - DNA, 15 bp, Homo sapiens
gtggagggccgcctc

SEQ ID NO: 570760 - DNA, 15 bp, Homo sapiens
tggagggccgcctct

SEQ ID NO: 570761 - DNA, 15 bp, Homo sapiens
ggagggccgcctctg

SEQ ID NO: 570762 - DNA, 15 bp, Homo sapiens
gagggccgcctctga

SEQ ID NO: 570763 - DNA, 15 bp, Homo sapiens
agggccgcctctgag

SEQ ID NO: 570764 - DNA, 15 bp, Homo sapiens
gggccgcctctgagc

SEQ ID NO: 570765 - DNA, 15 bp, Homo sapiens
ggccgcctctgagcg

SEQ ID NO: 570766 - DNA, 15 bp, Homo sapiens
gccgcctctgagcgg

SEQ ID NO: 570767 - DNA, 15 bp, Homo sapiens
ccgcctctgagcggg

SEQ ID NO: 570768 - DNA, 15 bp, Homo sapiens
cgcctctgagcgggc

SEQ ID NO: 570769 - DNA, 15 bp, Homo sapiens
gcctctgagcgggcg

SEQ ID NO: 570770 - DNA, 15 bp, Homo sapiens
cctctgagcgggcgg

SEQ ID NO: 570771 - DNA, 15 bp, Homo sapiens
ctctgagcgggcggc

SEQ ID NO: 570772 - DNA, 15 bp, Homo sapiens
tctgagcgggcggcg

SEQ ID NO: 570773 - DNA, 15 bp, Homo sapiens
ctgagcgggcggcgg

SEQ ID NO: 570774 - DNA, 15 bp, Homo sapiens
tgagcgggcggcggg

SEQ ID NO: 570775 - DNA, 15 bp, Homo sapiens
gagcgggcggcgggc

SEQ ID NO: 570776 - DNA, 15 bp, Homo sapiens
agcgggcggcgggcc

SEQ ID NO: 570777 - DNA, 15 bp, Homo sapiens
gcgggcggcgggccg

SEQ ID NO: 570778 - DNA, 15 bp, Homo sapiens
cgggcggcgggccga

SEQ ID NO: 570779 - DNA, 15 bp, Homo sapiens
gggcggcgggccgac

SEQ ID NO: 570780 - DNA, 15 bp, Homo sapiens
ggcggcgggccgacg

SEQ ID NO: 570781 - DNA, 15 bp, Homo sapiens
gcggcgggccgacgg

SEQ ID NO: 570782 - DNA, 15 bp, Homo sapiens
cggcgggccgacggc

SEQ ID NO: 570783 - DNA, 15 bp, Homo sapiens
ggcgggccgacggcg

SEQ ID NO: 570784 - DNA, 15 bp, Homo sapiens
gcgggccgacggcga

SEQ ID NO: 570785 - DNA, 15 bp, Homo sapiens
cgggccgacggcgag

SEQ ID NO: 570786 - DNA, 15 bp, Homo sapiens
gggccgacggcgagc

SEQ ID NO: 570787 - DNA, 15 bp, Homo sapiens
ggccgacggcgagcg

SEQ ID NO: 570788 - DNA, 15 bp, Homo sapiens
gccgacggcgagcgc

SEQ ID NO: 570789 - DNA, 15 bp, Homo sapiens
ccgacggcgagcgcg

SEQ ID NO: 570790 - DNA, 15 bp, Homo sapiens
cgacggcgagcgcgg

SEQ ID NO: 570791 - DNA, 15 bp, Homo sapiens
gacggcgagcgcggg

SEQ ID NO: 570792 - DNA, 15 bp, Homo sapiens
acggcgagcgcgggc

SEQ ID NO: 570793 - DNA, 15 bp, Homo sapiens
cggcgagcgcgggcg

SEQ ID NO: 570794 - DNA, 15 bp, Homo sapiens
ggcgagcgcgggcgg

SEQ ID NO: 570795 - DNA, 15 bp, Homo sapiens
gcgagcgcgggcggc

SEQ ID NO: 570796 - DNA, 15 bp, Homo sapiens
cgagcgcgggcggcg

SEQ ID NO: 570797 - DNA, 15 bp, Homo sapiens
gagcgcgggcggcgg

SEQ ID NO: 570798 - DNA, 15 bp, Homo sapiens
agcgcgggcggcggc

SEQ ID NO: 570799 - DNA, 15 bp, Homo sapiens
gcgcgggcggcggcg

SEQ ID NO: 570800 - DNA, 15 bp, Homo sapiens
cgcgggcggcggcgg

SEQ ID NO: 570801 - DNA, 15 bp, Homo sapiens
gcgggcggcggcggt

SEQ ID NO: 570802 - DNA, 15 bp, Homo sapiens
cgggcggcggcggtg

SEQ ID NO: 570803 - DNA, 15 bp, Homo sapiens
gggcggcggcggtga

SEQ ID NO: 570804 - DNA, 15 bp, Homo sapiens
ggcggcggcggtgac

SEQ ID NO: 570805 - DNA, 15 bp, Homo sapiens
gcggcggcggtgacg

SEQ ID NO: 570806 - DNA, 15 bp, Homo sapiens
cggcggcggtgacgg

SEQ ID NO: 570807 - DNA, 15 bp, Homo sapiens
ggcggcggtgacgga

SEQ ID NO: 570808 - DNA, 15 bp, Homo sapiens
gcggcggtgacggag

SEQ ID NO: 570809 - DNA, 15 bp, Homo sapiens
cggcggtgacggagg

SEQ ID NO: 570810 - DNA, 15 bp, Homo sapiens
ggcggtgacggaggc

SEQ ID NO: 570811 - DNA, 15 bp, Homo sapiens
gcggtgacggaggcg

SEQ ID NO: 570812 - DNA, 15 bp, Homo sapiens
cggtgacggaggcgc

SEQ ID NO: 570813 - DNA, 15 bp, Homo sapiens
ggtgacggaggcgcc

SEQ ID NO: 570814 - DNA, 15 bp, Homo sapiens
gtgacggaggcgccg

SEQ ID NO: 570815 - DNA, 15 bp, Homo sapiens
tgacggaggcgccgc

SEQ ID NO: 570816 - DNA, 15 bp, Homo sapiens
gacggaggcgccgct

SEQ ID NO: 570817 - DNA, 15 bp, Homo sapiens
acggaggcgccgctg

SEQ ID NO: 570818 - DNA, 15 bp, Homo sapiens
cggaggcgccgctgc

SEQ ID NO: 570819 - DNA, 15 bp, Homo sapiens
ggaggcgccgctgcc

SEQ ID NO: 570820 - DNA, 15 bp, Homo sapiens
gaggcgccgctgcca

SEQ ID NO: 570821 - DNA, 15 bp, Homo sapiens
aggcgccgctgccag

SEQ ID NO: 570822 - DNA, 15 bp, Homo sapiens
ggcgccgctgccagg

SEQ ID NO: 570823 - DNA, 15 bp, Homo sapiens
gcgccgctgccaggg

SEQ ID NO: 570824 - DNA, 15 bp, Homo sapiens
cgccgctgccagggg

SEQ ID NO: 570825 - DNA, 15 bp, Homo sapiens
gccgctgccaggggg

SEQ ID NO: 570826 - DNA, 15 bp, Homo sapiens
ccgctgccagggggc

SEQ ID NO: 570827 - DNA, 15 bp, Homo sapiens
cgctgccagggggcg

SEQ ID NO: 570828 - DNA, 15 bp, Homo sapiens
gctgccagggggcgt

SEQ ID NO: 570829 - DNA, 15 bp, Homo sapiens
ctgccagggggcgtg

SEQ ID NO: 570830 - DNA, 15 bp, Homo sapiens
tgccagggggcgtgc

SEQ ID NO: 570831 - DNA, 15 bp, Homo sapiens
gccagggggcgtgcg

SEQ ID NO: 570832 - DNA, 15 bp, Homo sapiens
ccagggggcgtgcgg

SEQ ID NO: 570833 - DNA, 15 bp, Homo sapiens
cagggggcgtgcggc

SEQ ID NO: 570834 - DNA, 15 bp, Homo sapiens
agggggcgtgcggca

SEQ ID NO: 570835 - DNA, 15 bp, Homo sapiens
gggggcgtgcggcag

SEQ ID NO: 570836 - DNA, 15 bp, Homo sapiens
ggggcgtgcggcagc

SEQ ID NO: 570837 - DNA, 15 bp, Homo sapiens
gggcgtgcggcagcg

SEQ ID NO: 570838 - DNA, 15 bp, Homo sapiens
ggcgtgcggcagcgc

SEQ ID NO: 570839 - DNA, 15 bp, Homo sapiens
gcgtgcggcagcgcg

SEQ ID NO: 570840 - DNA, 15 bp, Homo sapiens
cgtgcggcagcgcgg

SEQ ID NO: 570841 - DNA, 15 bp, Homo sapiens
gtgcggcagcgcggc

SEQ ID NO: 570842 - DNA, 15 bp, Homo sapiens
tgcggcagcgcggcg

SEQ ID NO: 570843 - DNA, 15 bp, Homo sapiens
gcggcagcgcggcgg

SEQ ID NO: 570844 - DNA, 15 bp, Homo sapiens
cggcagcgcggcggc

SEQ ID NO: 570845 - DNA, 15 bp, Homo sapiens
ggcagcgcggcggcg

SEQ ID NO: 570846 - DNA, 15 bp, Homo sapiens
gcagcgcggcggcgg

SEQ ID NO: 570847 - DNA, 15 bp, Homo sapiens
cagcgcggcggcggc

SEQ ID NO: 570848 - DNA, 15 bp, Homo sapiens
agcgcggcggcggcg

SEQ ID NO: 570849 - DNA, 15 bp, Homo sapiens
gcgcggcggcggcgg

SEQ ID NO: 570850 - DNA, 15 bp, Homo sapiens
cgcggcggcggcggc

SEQ ID NO: 570851 - DNA, 15 bp, Homo sapiens
gcggcggcggcggcg

SEQ ID NO: 570852 - DNA, 15 bp, Homo sapiens
cggcggcggcggcgg

SEQ ID NO: 570853 - DNA, 15 bp, Homo sapiens
ggcggcggcggcggc

SEQ ID NO: 570854 - DNA, 15 bp, Homo sapiens
ggcggcggcggcgga

SEQ ID NO: 570855 - DNA, 15 bp, Homo sapiens
gcggcggcggcggag

SEQ ID NO: 570856 - DNA, 15 bp, Homo sapiens
cggcggcggcggagg

SEQ ID NO: 570857 - DNA, 15 bp, Homo sapiens
ggcggcggcggaggc

SEQ ID NO: 570858 - DNA, 15 bp, Homo sapiens
gcggcggcggaggcg

SEQ ID NO: 570859 - DNA, 15 bp, Homo sapiens
cggcggcggaggcgg

SEQ ID NO: 570860 - DNA, 15 bp, Homo sapiens
ggcggcggaggcggc

SEQ ID NO: 570861 - DNA, 15 bp, Homo sapiens
gcggcggaggcggcg

SEQ ID NO: 570862 - DNA, 15 bp, Homo sapiens
cggcggaggcggcgg

SEQ ID NO: 570863 - DNA, 15 bp, Homo sapiens
ggcggaggcggcggc

SEQ ID NO: 570864 - DNA, 15 bp, Homo sapiens
gcggaggcggcggcg

SEQ ID NO: 570865 - DNA, 15 bp, Homo sapiens
cggaggcggcggcgg

SEQ ID NO: 570866 - DNA, 15 bp, Homo sapiens
ggaggcggcggcggc

SEQ ID NO: 570867 - DNA, 15 bp, Homo sapiens
gaggcggcggcggcg

SEQ ID NO: 570868 - DNA, 15 bp, Homo sapiens
aggcggcggcggcgg

SEQ ID NO: 570869 - DNA, 15 bp, Homo sapiens
gcggcggcggcggct

SEQ ID NO: 570870 - DNA, 15 bp, Homo sapiens
cggcggcggcggctg

SEQ ID NO: 570871 - DNA, 15 bp, Homo sapiens
ggcggcggcggctgg

SEQ ID NO: 570872 - DNA, 15 bp, Homo sapiens
gcggcggcggctggg

SEQ ID NO: 570873 - DNA, 15 bp, Homo sapiens
cggcggcggctgggc

SEQ ID NO: 570874 - DNA, 15 bp, Homo sapiens
ggcggcggctgggcc

SEQ ID NO: 570875 - DNA, 15 bp, Homo sapiens
gcggcggctgggcct

SEQ ID NO: 570876 - DNA, 15 bp, Homo sapiens
cggcggctgggcctc

SEQ ID NO: 570877 - DNA, 15 bp, Homo sapiens
ggcggctgggcctcg

SEQ ID NO: 570878 - DNA, 15 bp, Homo sapiens
gcggctgggcctcga

SEQ ID NO: 570879 - DNA, 15 bp, Homo sapiens
cggctgggcctcgag

SEQ ID NO: 570880 - DNA, 15 bp, Homo sapiens
ggctgggcctcgagc

SEQ ID NO: 570881 - DNA, 15 bp, Homo sapiens
gctgggcctcgagcg

SEQ ID NO: 570882 - DNA, 15 bp, Homo sapiens
ctgggcctcgagcgc

SEQ ID NO: 570883 - DNA, 15 bp, Homo sapiens
tgggcctcgagcgcc

SEQ ID NO: 570884 - DNA, 15 bp, Homo sapiens
gggcctcgagcgccc

SEQ ID NO: 570885 - DNA, 15 bp, Homo sapiens
ggcctcgagcgcccg

SEQ ID NO: 570886 - DNA, 15 bp, Homo sapiens
gcctcgagcgcccgc

SEQ ID NO: 570887 - DNA, 15 bp, Homo sapiens
cctcgagcgcccgca

SEQ ID NO: 570888 - DNA, 15 bp, Homo sapiens
ctcgagcgcccgcag

SEQ ID NO: 570889 - DNA, 15 bp, Homo sapiens
tcgagcgcccgcagc

SEQ ID NO: 570890 - DNA, 15 bp, Homo sapiens
cgagcgcccgcagcc

SEQ ID NO: 570891 - DNA, 15 bp, Homo sapiens
gagcgcccgcagccc

SEQ ID NO: 570892 - DNA, 15 bp, Homo sapiens
agcgcccgcagccca

SEQ ID NO: 570893 - DNA, 15 bp, Homo sapiens
gcgcccgcagcccac

SEQ ID NO: 570894 - DNA, 15 bp, Homo sapiens
cgcccgcagcccacc

SEQ ID NO: 570895 - DNA, 15 bp, Homo sapiens
gcccgcagcccacct

SEQ ID NO: 570896 - DNA, 15 bp, Homo sapiens
cccgcagcccacctc

SEQ ID NO: 570897 - DNA, 15 bp, Homo sapiens
ccgcagcccacctct

SEQ ID NO: 570898 - DNA, 15 bp, Homo sapiens
cgcagcccacctctc

SEQ ID NO: 570899 - DNA, 15 bp, Homo sapiens
gcagcccacctctcg

SEQ ID NO: 570900 - DNA, 15 bp, Homo sapiens
cagcccacctctcgg

SEQ ID NO: 570901 - DNA, 15 bp, Homo sapiens
agcccacctctcggg

SEQ ID NO: 570902 - DNA, 15 bp, Homo sapiens
gcccacctctcgggg

SEQ ID NO: 570903 - DNA, 15 bp, Homo sapiens
cccacctctcggggg

SEQ ID NO: 570904 - DNA, 15 bp, Homo sapiens
ccacctctcgggggc

SEQ ID NO: 570905 - DNA, 15 bp, Homo sapiens
cacctctcgggggcg

SEQ ID NO: 570906 - DNA, 15 bp, Homo sapiens
acctctcgggggcgg

SEQ ID NO: 570907 - DNA, 15 bp, Homo sapiens
cctctcgggggcggg

SEQ ID NO: 570908 - DNA, 15 bp, Homo sapiens
ctctcgggggcgggc

SEQ ID NO: 570909 - DNA, 15 bp, Homo sapiens
tctcgggggcgggct

SEQ ID NO: 570910 - DNA, 15 bp, Homo sapiens
ctcgggggcgggctc

SEQ ID NO: 570911 - DNA, 15 bp, Homo sapiens
tcgggggcgggctcc

SEQ ID NO: 570912 - DNA, 15 bp, Homo sapiens
cgggggcgggctccc

SEQ ID NO: 570913 - DNA, 15 bp, Homo sapiens
gggggcgggctcccg

SEQ ID NO: 570914 - DNA, 15 bp, Homo sapiens
ggggcgggctcccgg

SEQ ID NO: 570915 - DNA, 15 bp, Homo sapiens
gggcgggctcccggc

SEQ ID NO: 570916 - DNA, 15 bp, Homo sapiens
ggcgggctcccggcg

SEQ ID NO: 570917 - DNA, 15 bp, Homo sapiens
gcgggctcccggcgc

SEQ ID NO: 570918 - DNA, 15 bp, Homo sapiens
cgggctcccggcgct

SEQ ID NO: 570919 - DNA, 15 bp, Homo sapiens
gggctcccggcgcta

SEQ ID NO: 570920 - DNA, 15 bp, Homo sapiens
ggctcccggcgctag

SEQ ID NO: 570921 - DNA, 15 bp, Homo sapiens
gctcccggcgctagc

SEQ ID NO: 570922 - DNA, 15 bp, Homo sapiens
ctcccggcgctagca

SEQ ID NO: 570923 - DNA, 15 bp, Homo sapiens
tcccggcgctagcag

SEQ ID NO: 570924 - DNA, 15 bp, Homo sapiens
cccggcgctagcagg

SEQ ID NO: 570925 - DNA, 15 bp, Homo sapiens
ccggcgctagcaggg

SEQ ID NO: 570926 - DNA, 15 bp, Homo sapiens
cggcgctagcagggc

SEQ ID NO: 570927 - DNA, 15 bp, Homo sapiens
ggcgctagcagggct

SEQ ID NO: 570928 - DNA, 15 bp, Homo sapiens
gcgctagcagggctg

SEQ ID NO: 570929 - DNA, 15 bp, Homo sapiens
cgctagcagggctga

SEQ ID NO: 570930 - DNA, 15 bp, Homo sapiens
gctagcagggctgaa

SEQ ID NO: 570931 - DNA, 15 bp, Homo sapiens
ctagcagggctgaag

SEQ ID NO: 570932 - DNA, 15 bp, Homo sapiens
tagcagggctgaaga

SEQ ID NO: 570933 - DNA, 15 bp, Homo sapiens
agcagggctgaagag

SEQ ID NO: 570934 - DNA, 15 bp, Homo sapiens
gcagggctgaagaga

SEQ ID NO: 570935 - DNA, 15 bp, Homo sapiens
cagggctgaagagaa

SEQ ID NO: 570936 - DNA, 15 bp, Homo sapiens
agggctgaagagaag

SEQ ID NO: 570937 - DNA, 15 bp, Homo sapiens
gggctgaagagaaga

SEQ ID NO: 570938 - DNA, 15 bp, Homo sapiens
ggctgaagagaagat

SEQ ID NO: 570939 - DNA, 15 bp, Homo sapiens
gctgaagagaagatg

SEQ ID NO: 570940 - DNA, 15 bp, Homo sapiens
ctgaagagaagatgg

SEQ ID NO: 570941 - DNA, 15 bp, Homo sapiens
tgaagagaagatgga

SEQ ID NO: 570942 - DNA, 15 bp, Homo sapiens
gaagagaagatggag

SEQ ID NO: 570943 - DNA, 15 bp, Homo sapiens
aagagaagatggagg

SEQ ID NO: 570944 - DNA, 15 bp, Homo sapiens
agagaagatggagga

SEQ ID NO: 570945 - DNA, 15 bp, Homo sapiens
gagaagatggaggag

SEQ ID NO: 570946 - DNA, 15 bp, Homo sapiens
agaagatggaggagc

SEQ ID NO: 570947 - DNA, 15 bp, Homo sapiens
gaagatggaggagct

SEQ ID NO: 570948 - DNA, 15 bp, Homo sapiens
aagatggaggagctg

SEQ ID NO: 570949 - DNA, 15 bp, Homo sapiens
agatggaggagctgg

SEQ ID NO: 570950 - DNA, 15 bp, Homo sapiens
gatggaggagctggt

SEQ ID NO: 570951 - DNA, 15 bp, Homo sapiens
atggaggagctggtg

SEQ ID NO: 570952 - DNA, 15 bp, Homo sapiens
tggaggagctggtgg

SEQ ID NO: 570953 - DNA, 15 bp, Homo sapiens
ggaggagctggtggt

SEQ ID NO: 570954 - DNA, 15 bp, Homo sapiens
gaggagctggtggtg

SEQ ID NO: 570955 - DNA, 15 bp, Homo sapiens
aggagctggtggtgg

SEQ ID NO: 570956 - DNA, 15 bp, Homo sapiens
ggagctggtggtgga

SEQ ID NO: 570957 - DNA, 15 bp, Homo sapiens
gagctggtggtggaa

SEQ ID NO: 570958 - DNA, 15 bp, Homo sapiens
agctggtggtggaag

SEQ ID NO: 570959 - DNA, 15 bp, Homo sapiens
gctggtggtggaagt

SEQ ID NO: 570960 - DNA, 15 bp, Homo sapiens
ctggtggtggaagtg

SEQ ID NO: 570961 - DNA, 15 bp, Homo sapiens
tggtggtggaagtgc

SEQ ID NO: 570962 - DNA, 15 bp, Homo sapiens
ggtggtggaagtgcg

SEQ ID NO: 570963 - DNA, 15 bp, Homo sapiens
gtggtggaagtgcgg

SEQ ID NO: 570964 - DNA, 15 bp, Homo sapiens
tggtggaagtgcggg

SEQ ID NO: 570965 - DNA, 15 bp, Homo sapiens
ggtggaagtgcgggg

SEQ ID NO: 570966 - DNA, 15 bp, Homo sapiens
gtggaagtgcggggc

SEQ ID NO: 570967 - DNA, 15 bp, Homo sapiens
tggaagtgcggggct

SEQ ID NO: 570968 - DNA, 15 bp, Homo sapiens
ggaagtgcggggctc

SEQ ID NO: 570969 - DNA, 15 bp, Homo sapiens
gaagtgcggggctcc

SEQ ID NO: 570970 - DNA, 15 bp, Homo sapiens
aagtgcggggctcca

SEQ ID NO: 570971 - DNA, 15 bp, Homo sapiens
agtgcggggctccaa

SEQ ID NO: 570972 - DNA, 15 bp, Homo sapiens
gtgcggggctccaat

SEQ ID NO: 570973 - DNA, 15 bp, Homo sapiens
tgcggggctccaatg

SEQ ID NO: 570974 - DNA, 15 bp, Homo sapiens
gcggggctccaatgg

SEQ ID NO: 570975 - DNA, 15 bp, Homo sapiens
cggggctccaatggc

SEQ ID NO: 570976 - DNA, 15 bp, Homo sapiens
ggggctccaatggcg

SEQ ID NO: 570977 - DNA, 15 bp, Homo sapiens
gggctccaatggcgc

SEQ ID NO: 570978 - DNA, 15 bp, Homo sapiens
ggctccaatggcgct

SEQ ID NO: 570979 - DNA, 15 bp, Homo sapiens
gctccaatggcgctt

SEQ ID NO: 570980 - DNA, 15 bp, Homo sapiens
ctccaatggcgcttt

SEQ ID NO: 570981 - DNA, 15 bp, Homo sapiens
tccaatggcgctttc

SEQ ID NO: 570982 - DNA, 15 bp, Homo sapiens
ccaatggcgctttct

SEQ ID NO: 570983 - DNA, 15 bp, Homo sapiens
caatggcgctttcta

SEQ ID NO: 570984 - DNA, 15 bp, Homo sapiens
aatggcgctttctac

SEQ ID NO: 570985 - DNA, 15 bp, Homo sapiens
atggcgctttctaca

SEQ ID NO: 570986 - DNA, 15 bp, Homo sapiens
tggcgctttctacaa

SEQ ID NO: 570987 - DNA, 15 bp, Homo sapiens
ggcgctttctacaag

SEQ ID NO: 570988 - DNA, 15 bp, Homo sapiens
gcgctttctacaagg

SEQ ID NO: 570989 - DNA, 15 bp, Homo sapiens
cgctttctacaaggt

SEQ ID NO: 570990 - DNA, 15 bp, Homo sapiens
gctttctacaaggta

SEQ ID NO: 570991 - DNA, 15 bp, Homo sapiens
ctttctacaaggtac

SEQ ID NO: 570992 - DNA, 15 bp, Homo sapiens
tttctacaaggtact

SEQ ID NO: 570993 - DNA, 15 bp, Homo sapiens
ttctacaaggtactt

SEQ ID NO: 570994 - DNA, 15 bp, Homo sapiens
tctacaaggtacttg

SEQ ID NO: 570995 - DNA, 15 bp, Homo sapiens
ctacaaggtacttgg

SEQ ID NO: 570996 - DNA, 15 bp, Homo sapiens
tacaaggtacttggc

SEQ ID NO: 570997 - DNA, 15 bp, Homo sapiens
acaaggtacttggct

SEQ ID NO: 570998 - DNA, 15 bp, Homo sapiens
caaggtacttggctc

SEQ ID NO: 570999 - DNA, 15 bp, Homo sapiens
aaggtacttggctct

SEQ ID NO: 571000 - DNA, 15 bp, Homo sapiens
aggtacttggctcta

SEQ ID NO: 571001 - DNA, 15 bp, Homo sapiens
ggtacttggctctag

SEQ ID NO: 571002 - DNA, 15 bp, Homo sapiens
gtacttggctctagg

SEQ ID NO: 571003 - DNA, 15 bp, Homo sapiens
tacttggctctaggg

SEQ ID NO: 571004 - DNA, 15 bp, Homo sapiens
acttggctctagggc

SEQ ID NO: 571005 - DNA, 15 bp, Homo sapiens
cttggctctagggca

SEQ ID NO: 571006 - DNA, 15 bp, Homo sapiens
ttggctctagggcag

SEQ ID NO: 571007 - DNA, 15 bp, Homo sapiens
tggctctagggcagg

SEQ ID NO: 571008 - DNA, 15 bp, Homo sapiens
ggctctagggcaggc

SEQ ID NO: 571009 - DNA, 15 bp, Homo sapiens
gctctagggcaggcc

SEQ ID NO: 571010 - DNA, 15 bp, Homo sapiens
ctctagggcaggccc

SEQ ID NO: 571011 - DNA, 15 bp, Homo sapiens
tctagggcaggcccc

SEQ ID NO: 571012 - DNA, 15 bp, Homo sapiens
ctagggcaggcccca

SEQ ID NO: 571013 - DNA, 15 bp, Homo sapiens
tagggcaggccccat

SEQ ID NO: 571014 - DNA, 15 bp, Homo sapiens
agggcaggccccatc

SEQ ID NO: 571015 - DNA, 15 bp, Homo sapiens
gggcaggccccatct

SEQ ID NO: 571016 - DNA, 15 bp, Homo sapiens
ggcaggccccatctt

SEQ ID NO: 571017 - DNA, 15 bp, Homo sapiens
gcaggccccatcttc

SEQ ID NO: 571018 - DNA, 15 bp, Homo sapiens
caggccccatcttcg

SEQ ID NO: 571019 - DNA, 15 bp, Homo sapiens
aggccccatcttcgc

SEQ ID NO: 571020 - DNA, 15 bp, Homo sapiens
ggccccatcttcgcc

SEQ ID NO: 571021 - DNA, 15 bp, Homo sapiens
gccccatcttcgccc

SEQ ID NO: 571022 - DNA, 15 bp, Homo sapiens
ccccatcttcgccct

SEQ ID NO: 571023 - DNA, 15 bp, Homo sapiens
cccatcttcgccctt

SEQ ID NO: 571024 - DNA, 15 bp, Homo sapiens
ccatcttcgcccttc

SEQ ID NO: 571025 - DNA, 15 bp, Homo sapiens
catcttcgcccttcc

SEQ ID NO: 571026 - DNA, 15 bp, Homo sapiens
atcttcgcccttcct

SEQ ID NO: 571027 - DNA, 15 bp, Homo sapiens
tcttcgcccttcctt

SEQ ID NO: 571028 - DNA, 15 bp, Homo sapiens
cttcgcccttccttc

SEQ ID NO: 571029 - DNA, 15 bp, Homo sapiens
ttcgcccttccttcc

SEQ ID NO: 571030 - DNA, 15 bp, Homo sapiens
tcgcccttccttccc

SEQ ID NO: 571031 - DNA, 15 bp, Homo sapiens
cgcccttccttccct

SEQ ID NO: 571032 - DNA, 15 bp, Homo sapiens
gcccttccttccctc

SEQ ID NO: 571033 - DNA, 15 bp, Homo sapiens
cccttccttccctcc

SEQ ID NO: 571034 - DNA, 15 bp, Homo sapiens
ccttccttccctccc

SEQ ID NO: 571035 - DNA, 15 bp, Homo sapiens
cttccttccctccct

SEQ ID NO: 571036 - DNA, 15 bp, Homo sapiens
ttccttccctccctt

SEQ ID NO: 571037 - DNA, 15 bp, Homo sapiens
tccttccctcccttt

SEQ ID NO: 571038 - DNA, 15 bp, Homo sapiens
ccttccctccctttt

SEQ ID NO: 571039 - DNA, 15 bp, Homo sapiens
cttccctcccttttc

SEQ ID NO: 571040 - DNA, 15 bp, Homo sapiens
ttccctcccttttct

SEQ ID NO: 571041 - DNA, 15 bp, Homo sapiens
tccctcccttttctt

SEQ ID NO: 571042 - DNA, 15 bp, Homo sapiens
ccctcccttttcttc

SEQ ID NO: 571043 - DNA, 15 bp, Homo sapiens
cctcccttttcttct

SEQ ID NO: 571044 - DNA, 15 bp, Homo sapiens
ctcccttttcttctt

SEQ ID NO: 571045 - DNA, 15 bp, Homo sapiens
tcccttttcttcttg

SEQ ID NO: 571046 - DNA, 15 bp, Homo sapiens
cccttttcttcttgg

SEQ ID NO: 571047 - DNA, 15 bp, Homo sapiens
ccttttcttcttggt

SEQ ID NO: 571048 - DNA, 15 bp, Homo sapiens
cttttcttcttggtg

SEQ ID NO: 571049 - DNA, 15 bp, Homo sapiens
ttttcttcttggtgt

SEQ ID NO: 571050 - DNA, 15 bp, Homo sapiens
tttcttcttggtgtc

SEQ ID NO: 571051 - DNA, 15 bp, Homo sapiens
ttcttcttggtgtcg

SEQ ID NO: 571052 - DNA, 15 bp, Homo sapiens
tcttcttggtgtcgg

SEQ ID NO: 571053 - DNA, 15 bp, Homo sapiens
cttcttggtgtcggc

SEQ ID NO: 571054 - DNA, 15 bp, Homo sapiens
ttcttggtgtcggcg

SEQ ID NO: 571055 - DNA, 15 bp, Homo sapiens
tcttggtgtcggcgg

SEQ ID NO: 571056 - DNA, 15 bp, Homo sapiens
cttggtgtcggcggg

SEQ ID NO: 571057 - DNA, 15 bp, Homo sapiens
ttggtgtcggcggga

SEQ ID NO: 571058 - DNA, 15 bp, Homo sapiens
tggtgtcggcgggag

SEQ ID NO: 571059 - DNA, 15 bp, Homo sapiens
ggtgtcggcgggagg

SEQ ID NO: 571060 - DNA, 15 bp, Homo sapiens
gtgtcggcgggaggc

SEQ ID NO: 571061 - DNA, 15 bp, Homo sapiens
tgtcggcgggaggca

SEQ ID NO: 571062 - DNA, 15 bp, Homo sapiens
gtcggcgggaggcag

SEQ ID NO: 571063 - DNA, 15 bp, Homo sapiens
tcggcgggaggcagg

SEQ ID NO: 571064 - DNA, 15 bp, Homo sapiens
cggcgggaggcaggc

SEQ ID NO: 571065 - DNA, 15 bp, Homo sapiens
ggcgggaggcaggcc

SEQ ID NO: 571066 - DNA, 15 bp, Homo sapiens
gcgggaggcaggccc

SEQ ID NO: 571067 - DNA, 15 bp, Homo sapiens
cgggaggcaggcccg

SEQ ID NO: 571068 - DNA, 15 bp, Homo sapiens
gggaggcaggcccgg

SEQ ID NO: 571069 - DNA, 15 bp, Homo sapiens
ggaggcaggcccggg

SEQ ID NO: 571070 - DNA, 15 bp, Homo sapiens
gaggcaggcccgggg

SEQ ID NO: 571071 - DNA, 15 bp, Homo sapiens
aggcaggcccggggc

SEQ ID NO: 571072 - DNA, 15 bp, Homo sapiens
ggcaggcccggggcc

SEQ ID NO: 571073 - DNA, 15 bp, Homo sapiens
gcaggcccggggccc

SEQ ID NO: 571074 - DNA, 15 bp, Homo sapiens
caggcccggggccct

SEQ ID NO: 571075 - DNA, 15 bp, Homo sapiens
aggcccggggccctc

SEQ ID NO: 571076 - DNA, 15 bp, Homo sapiens
ggcccggggccctct

SEQ ID NO: 571077 - DNA, 15 bp, Homo sapiens
gcccggggccctctt

SEQ ID NO: 571078 - DNA, 15 bp, Homo sapiens
cccggggccctcttc

SEQ ID NO: 571079 - DNA, 15 bp, Homo sapiens
ccggggccctcttcc

SEQ ID NO: 571080 - DNA, 15 bp, Homo sapiens
cggggccctcttccc

SEQ ID NO: 571081 - DNA, 15 bp, Homo sapiens
ggggccctcttcccg

SEQ ID NO: 571082 - DNA, 15 bp, Homo sapiens
gggccctcttcccga

SEQ ID NO: 571083 - DNA, 15 bp, Homo sapiens
ggccctcttcccgag

SEQ ID NO: 571084 - DNA, 15 bp, Homo sapiens
gccctcttcccgagc

SEQ ID NO: 571085 - DNA, 15 bp, Homo sapiens
ccctcttcccgagca

SEQ ID NO: 571086 - DNA, 15 bp, Homo sapiens
cctcttcccgagcac

SEQ ID NO: 571087 - DNA, 15 bp, Homo sapiens
ctcttcccgagcacc

SEQ ID NO: 571088 - DNA, 15 bp, Homo sapiens
tcttcccgagcaccg

SEQ ID NO: 571089 - DNA, 15 bp, Homo sapiens
cttcccgagcaccgc

SEQ ID NO: 571090 - DNA, 15 bp, Homo sapiens
ttcccgagcaccgcg

SEQ ID NO: 571091 - DNA, 15 bp, Homo sapiens
tcccgagcaccgcgc

SEQ ID NO: 571092 - DNA, 15 bp, Homo sapiens
cccgagcaccgcgcc

SEQ ID NO: 571093 - DNA, 15 bp, Homo sapiens
ccgagcaccgcgcct

SEQ ID NO: 571094 - DNA, 15 bp, Homo sapiens
cgagcaccgcgcctg

SEQ ID NO: 571095 - DNA, 15 bp, Homo sapiens
gagcaccgcgcctgg

SEQ ID NO: 571096 - DNA, 15 bp, Homo sapiens
agcaccgcgcctggg

SEQ ID NO: 571097 - DNA, 15 bp, Homo sapiens
gcaccgcgcctgggt

SEQ ID NO: 571098 - DNA, 15 bp, Homo sapiens
caccgcgcctgggtg

SEQ ID NO: 571099 - DNA, 15 bp, Homo sapiens
accgcgcctgggtgc

SEQ ID NO: 571100 - DNA, 15 bp, Homo sapiens
ccgcgcctgggtgcc

SEQ ID NO: 571101 - DNA, 15 bp, Homo sapiens
cgcgcctgggtgcca

SEQ ID NO: 571102 - DNA, 15 bp, Homo sapiens
gcgcctgggtgccag

SEQ ID NO: 571103 - DNA, 15 bp, Homo sapiens
cgcctgggtgccagg

SEQ ID NO: 571104 - DNA, 15 bp, Homo sapiens
gcctgggtgccaggg

SEQ ID NO: 571105 - DNA, 15 bp, Homo sapiens
cctgggtgccagggc

SEQ ID NO: 571106 - DNA, 15 bp, Homo sapiens
ctgggtgccagggca

SEQ ID NO: 571107 - DNA, 15 bp, Homo sapiens
tgggtgccagggcac

SEQ ID NO: 571108 - DNA, 15 bp, Homo sapiens
gggtgccagggcacg

SEQ ID NO: 571109 - DNA, 15 bp, Homo sapiens
ggtgccagggcacgc

SEQ ID NO: 571110 - DNA, 15 bp, Homo sapiens
gtgccagggcacgct

SEQ ID NO: 571111 - DNA, 15 bp, Homo sapiens
tgccagggcacgctc

SEQ ID NO: 571112 - DNA, 15 bp, Homo sapiens
gccagggcacgctcg

SEQ ID NO: 571113 - DNA, 15 bp, Homo sapiens
ccagggcacgctcgg

SEQ ID NO: 571114 - DNA, 15 bp, Homo sapiens
cagggcacgctcggc

SEQ ID NO: 571115 - DNA, 15 bp, Homo sapiens
agggcacgctcggcg

SEQ ID NO: 571116 - DNA, 15 bp, Homo sapiens
gggcacgctcggcgg

SEQ ID NO: 571117 - DNA, 15 bp, Homo sapiens
ggcacgctcggcggg

SEQ ID NO: 571118 - DNA, 15 bp, Homo sapiens
gcacgctcggcggga

SEQ ID NO: 571119 - DNA, 15 bp, Homo sapiens
cacgctcggcgggat

SEQ ID NO: 571120 - DNA, 15 bp, Homo sapiens
acgctcggcgggatg

SEQ ID NO: 571121 - DNA, 15 bp, Homo sapiens
cgctcggcgggatgt

SEQ ID NO: 571122 - DNA, 15 bp, Homo sapiens
gctcggcgggatgtt

SEQ ID NO: 571123 - DNA, 15 bp, Homo sapiens
ctcggcgggatgttg

SEQ ID NO: 571124 - DNA, 15 bp, Homo sapiens
tcggcgggatgttgt

SEQ ID NO: 571125 - DNA, 15 bp, Homo sapiens
cggcgggatgttgtt

SEQ ID NO: 571126 - DNA, 15 bp, Homo sapiens
ggcgggatgttgttg

SEQ ID NO: 571127 - DNA, 15 bp, Homo sapiens
gcgggatgttgttgg

SEQ ID NO: 571128 - DNA, 15 bp, Homo sapiens
cgggatgttgttggg

SEQ ID NO: 571129 - DNA, 15 bp, Homo sapiens
gggatgttgttggga

SEQ ID NO: 571130 - DNA, 15 bp, Homo sapiens
ggatgttgttgggag

SEQ ID NO: 571131 - DNA, 15 bp, Homo sapiens
gatgttgttgggagg

SEQ ID NO: 571132 - DNA, 15 bp, Homo sapiens
atgttgttgggaggg

SEQ ID NO: 571133 - DNA, 15 bp, Homo sapiens
tgttgttgggaggga

SEQ ID NO: 571134 - DNA, 15 bp, Homo sapiens
gttgttgggagggaa

SEQ ID NO: 571135 - DNA, 15 bp, Homo sapiens
ttgttgggagggaag

SEQ ID NO: 571136 - DNA, 15 bp, Homo sapiens
tgttgggagggaagg

SEQ ID NO: 571137 - DNA, 15 bp, Homo sapiens
gttgggagggaagga

SEQ ID NO: 571138 - DNA, 15 bp, Homo sapiens
ttgggagggaaggac

SEQ ID NO: 571139 - DNA, 15 bp, Homo sapiens
tgggagggaaggact

SEQ ID NO: 571140 - DNA, 15 bp, Homo sapiens
gggagggaaggactg

SEQ ID NO: 571141 - DNA, 15 bp, Homo sapiens
ggagggaaggactgg

SEQ ID NO: 571142 - DNA, 15 bp, Homo sapiens
gagggaaggactgga

SEQ ID NO: 571143 - DNA, 15 bp, Homo sapiens
agggaaggactggac

SEQ ID NO: 571144 - DNA, 15 bp, Homo sapiens
gggaaggactggact

SEQ ID NO: 571145 - DNA, 15 bp, Homo sapiens
ggaaggactggactt

SEQ ID NO: 571146 - DNA, 15 bp, Homo sapiens
gaaggactggacttg

SEQ ID NO: 571147 - DNA, 15 bp, Homo sapiens
aaggactggacttgg

SEQ ID NO: 571148 - DNA, 15 bp, Homo sapiens
aggactggacttggg

SEQ ID NO: 571149 - DNA, 15 bp, Homo sapiens
ggactggacttgggg

SEQ ID NO: 571150 - DNA, 15 bp, Homo sapiens
gactggacttggggc

SEQ ID NO: 571151 - DNA, 15 bp, Homo sapiens
actggacttggggcc

SEQ ID NO: 571152 - DNA, 15 bp, Homo sapiens
ctggacttggggcct

SEQ ID NO: 571153 - DNA, 15 bp, Homo sapiens
tggacttggggcctg

SEQ ID NO: 571154 - DNA, 15 bp, Homo sapiens
ggacttggggcctgt

SEQ ID NO: 571155 - DNA, 15 bp, Homo sapiens
gacttggggcctgtt

SEQ ID NO: 571156 - DNA, 15 bp, Homo sapiens
acttggggcctgttg

SEQ ID NO: 571157 - DNA, 15 bp, Homo sapiens
cttggggcctgttgg

SEQ ID NO: 571158 - DNA, 15 bp, Homo sapiens
ttggggcctgttgga

SEQ ID NO: 571159 - DNA, 15 bp, Homo sapiens
tggggcctgttggaa

SEQ ID NO: 571160 - DNA, 15 bp, Homo sapiens
ggggcctgttggaag

SEQ ID NO: 571161 - DNA, 15 bp, Homo sapiens
gggcctgttggaagc

SEQ ID NO: 571162 - DNA, 15 bp, Homo sapiens
ggcctgttggaagcc

SEQ ID NO: 571163 - DNA, 15 bp, Homo sapiens
gcctgttggaagccc

SEQ ID NO: 571164 - DNA, 15 bp, Homo sapiens
cctgttggaagcccc

SEQ ID NO: 571165 - DNA, 15 bp, Homo sapiens
ctgttggaagcccct

SEQ ID NO: 571166 - DNA, 15 bp, Homo sapiens
tgttggaagcccctc

SEQ ID NO: 571167 - DNA, 15 bp, Homo sapiens
gttggaagcccctct

SEQ ID NO: 571168 - DNA, 15 bp, Homo sapiens
ttggaagcccctctc

SEQ ID NO: 571169 - DNA, 15 bp, Homo sapiens
tggaagcccctctcc

SEQ ID NO: 571170 - DNA, 15 bp, Homo sapiens
ggaagcccctctccg

SEQ ID NO: 571171 - DNA, 15 bp, Homo sapiens
gaagcccctctccga

SEQ ID NO: 571172 - DNA, 15 bp, Homo sapiens
aagcccctctccgac

SEQ ID NO: 571173 - DNA, 15 bp, Homo sapiens
agcccctctccgact

SEQ ID NO: 571174 - DNA, 15 bp, Homo sapiens
gcccctctccgactc

SEQ ID NO: 571175 - DNA, 15 bp, Homo sapiens
cccctctccgactcc

SEQ ID NO: 571176 - DNA, 15 bp, Homo sapiens
ccctctccgactccg

SEQ ID NO: 571177 - DNA, 15 bp, Homo sapiens
cctctccgactccga

SEQ ID NO: 571178 - DNA, 15 bp, Homo sapiens
ctctccgactccgag

SEQ ID NO: 571179 - DNA, 15 bp, Homo sapiens
tctccgactccgaga

SEQ ID NO: 571180 - DNA, 15 bp, Homo sapiens
ctccgactccgagag

SEQ ID NO: 571181 - DNA, 15 bp, Homo sapiens
tccgactccgagagg

SEQ ID NO: 571182 - DNA, 15 bp, Homo sapiens
ccgactccgagaggc

SEQ ID NO: 571183 - DNA, 15 bp, Homo sapiens
cgactccgagaggcc

SEQ ID NO: 571184 - DNA, 15 bp, Homo sapiens
gactccgagaggccc

SEQ ID NO: 571185 - DNA, 15 bp, Homo sapiens
actccgagaggccct

SEQ ID NO: 571186 - DNA, 15 bp, Homo sapiens
ctccgagaggcccta

SEQ ID NO: 571187 - DNA, 15 bp, Homo sapiens
tccgagaggccctag

SEQ ID NO: 571188 - DNA, 15 bp, Homo sapiens
ccgagaggccctagc

SEQ ID NO: 571189 - DNA, 15 bp, Homo sapiens
cgagaggccctagcg

SEQ ID NO: 571190 - DNA, 15 bp, Homo sapiens
gagaggccctagcgc

SEQ ID NO: 571191 - DNA, 15 bp, Homo sapiens
agaggccctagcgcc

SEQ ID NO: 571192 - DNA, 15 bp, Homo sapiens
gaggccctagcgcct

SEQ ID NO: 571193 - DNA, 15 bp, Homo sapiens
aggccctagcgccta

SEQ ID NO: 571194 - DNA, 15 bp, Homo sapiens
ggccctagcgcctat

SEQ ID NO: 571195 - DNA, 15 bp, Homo sapiens
gccctagcgcctatc

SEQ ID NO: 571196 - DNA, 15 bp, Homo sapiens
ccctagcgcctatcg

SEQ ID NO: 571197 - DNA, 15 bp, Homo sapiens
cctagcgcctatcga

SEQ ID NO: 571198 - DNA, 15 bp, Homo sapiens
ctagcgcctatcgaa

SEQ ID NO: 571199 - DNA, 15 bp, Homo sapiens
tagcgcctatcgaaa

SEQ ID NO: 571200 - DNA, 15 bp, Homo sapiens
agcgcctatcgaaat

SEQ ID NO: 571201 - DNA, 15 bp, Homo sapiens
gcgcctatcgaaatg

SEQ ID NO: 571202 - DNA, 15 bp, Homo sapiens
cgcctatcgaaatga

SEQ ID NO: 571203 - DNA, 15 bp, Homo sapiens
gcctatcgaaatgag

SEQ ID NO: 571204 - DNA, 15 bp, Homo sapiens
cctatcgaaatgaga

SEQ ID NO: 571205 - DNA, 15 bp, Homo sapiens
ctatcgaaatgagag

SEQ ID NO: 571206 - DNA, 15 bp, Homo sapiens
tatcgaaatgagaga

SEQ ID NO: 571207 - DNA, 15 bp, Homo sapiens
atcgaaatgagagac

SEQ ID NO: 571208 - DNA, 15 bp, Homo sapiens
tcgaaatgagagacc

SEQ ID NO: 571209 - DNA, 15 bp, Homo sapiens
cgaaatgagagacca

SEQ ID NO: 571210 - DNA, 15 bp, Homo sapiens
gaaatgagagaccag

SEQ ID NO: 571211 - DNA, 15 bp, Homo sapiens
aaatgagagaccagc

SEQ ID NO: 571212 - DNA, 15 bp, Homo sapiens
aatgagagaccagcg

SEQ ID NO: 571213 - DNA, 15 bp, Homo sapiens
atgagagaccagcga

SEQ ID NO: 571214 - DNA, 15 bp, Homo sapiens
tgagagaccagcgag

SEQ ID NO: 571215 - DNA, 15 bp, Homo sapiens
gagagaccagcgagg

SEQ ID NO: 571216 - DNA, 15 bp, Homo sapiens
agagaccagcgagga

SEQ ID NO: 571217 - DNA, 15 bp, Homo sapiens
gagaccagcgaggag

SEQ ID NO: 571218 - DNA, 15 bp, Homo sapiens
agaccagcgaggaga

SEQ ID NO: 571219 - DNA, 15 bp, Homo sapiens
gaccagcgaggagag

SEQ ID NO: 571220 - DNA, 15 bp, Homo sapiens
accagcgaggagagg

SEQ ID NO: 571221 - DNA, 15 bp, Homo sapiens
ccagcgaggagaggg

SEQ ID NO: 571222 - DNA, 15 bp, Homo sapiens
cagcgaggagagggt

SEQ ID NO: 571223 - DNA, 15 bp, Homo sapiens
agcgaggagagggtt

SEQ ID NO: 571224 - DNA, 15 bp, Homo sapiens
gcgaggagagggttc

SEQ ID NO: 571225 - DNA, 15 bp, Homo sapiens
cgaggagagggttct

SEQ ID NO: 571226 - DNA, 15 bp, Homo sapiens
gaggagagggttctc

SEQ ID NO: 571227 - DNA, 15 bp, Homo sapiens
aggagagggttctct

SEQ ID NO: 571228 - DNA, 15 bp, Homo sapiens
ggagagggttctctt

SEQ ID NO: 571229 - DNA, 15 bp, Homo sapiens
gagagggttctcttt

SEQ ID NO: 571230 - DNA, 15 bp, Homo sapiens
agagggttctctttc

SEQ ID NO: 571231 - DNA, 15 bp, Homo sapiens
gagggttctctttcg

SEQ ID NO: 571232 - DNA, 15 bp, Homo sapiens
agggttctctttcgg

SEQ ID NO: 571233 - DNA, 15 bp, Homo sapiens
gggttctctttcggc

SEQ ID NO: 571234 - DNA, 15 bp, Homo sapiens
ggttctctttcggcg

SEQ ID NO: 571235 - DNA, 15 bp, Homo sapiens
gttctctttcggcgc

SEQ ID NO: 571236 - DNA, 15 bp, Homo sapiens
ttctctttcggcgcc

SEQ ID NO: 571237 - DNA, 15 bp, Homo sapiens
tctctttcggcgccg

SEQ ID NO: 571238 - DNA, 15 bp, Homo sapiens
ctctttcggcgccga

SEQ ID NO: 571239 - DNA, 15 bp, Homo sapiens
tctttcggcgccgag

SEQ ID NO: 571240 - DNA, 15 bp, Homo sapiens
ctttcggcgccgagc

SEQ ID NO: 571241 - DNA, 15 bp, Homo sapiens
tagaaggtgcgtgtg

SEQ ID NO: 571242 - DNA, 15 bp, Homo sapiens
agaaggtgcgtgtgg

SEQ ID NO: 571243 - DNA, 15 bp, Homo sapiens
gaaggtgcgtgtgga

SEQ ID NO: 571244 - DNA, 15 bp, Homo sapiens
aaggtgcgtgtggaa

SEQ ID NO: 571245 - DNA, 15 bp, Homo sapiens
aggtgcgtgtggaag

SEQ ID NO: 571246 - DNA, 15 bp, Homo sapiens
ggtgcgtgtggaagg

SEQ ID NO: 571247 - DNA, 15 bp, Homo sapiens
gtgcgtgtggaagga

SEQ ID NO: 571248 - DNA, 15 bp, Homo sapiens
tgcgtgtggaaggaa

SEQ ID NO: 571249 - DNA, 15 bp, Homo sapiens
gcgtgtggaaggaag

SEQ ID NO: 571250 - DNA, 15 bp, Homo sapiens
cgtgtggaaggaagg

SEQ ID NO: 571251 - DNA, 15 bp, Homo sapiens
gtgtggaaggaaggc

SEQ ID NO: 571252 - DNA, 15 bp, Homo sapiens
tgtggaaggaaggct

SEQ ID NO: 571253 - DNA, 15 bp, Homo sapiens
gtggaaggaaggctg

SEQ ID NO: 571254 - DNA, 15 bp, Homo sapiens
tggaaggaaggctgg

SEQ ID NO: 571255 - DNA, 15 bp, Homo sapiens
ggaaggaaggctgga

SEQ ID NO: 571256 - DNA, 15 bp, Homo sapiens
gaaggaaggctggaa

SEQ ID NO: 571257 - DNA, 15 bp, Homo sapiens
aaggaaggctggaaa

SEQ ID NO: 571258 - DNA, 15 bp, Homo sapiens
aggaaggctggaaaa

SEQ ID NO: 571259 - DNA, 15 bp, Homo sapiens
ggaaggctggaaaat

SEQ ID NO: 571260 - DNA, 15 bp, Homo sapiens
gaaggctggaaaata

SEQ ID NO: 571261 - DNA, 15 bp, Homo sapiens
aaggctggaaaatag

SEQ ID NO: 571262 - DNA, 15 bp, Homo sapiens
aggctggaaaatagc

SEQ ID NO: 571263 - DNA, 15 bp, Homo sapiens
ggctggaaaatagct

SEQ ID NO: 571264 - DNA, 15 bp, Homo sapiens
gctggaaaatagcta

SEQ ID NO: 571265 - DNA, 15 bp, Homo sapiens
ctggaaaatagctat

SEQ ID NO: 571266 - DNA, 15 bp, Homo sapiens
tggaaaatagctatt

SEQ ID NO: 571267 - DNA, 15 bp, Homo sapiens
ggaaaatagctatta

SEQ ID NO: 571268 - DNA, 15 bp, Homo sapiens
gaaaatagctattag

SEQ ID NO: 571269 - DNA, 15 bp, Homo sapiens
aaaatagctattagc

SEQ ID NO: 571270 - DNA, 15 bp, Homo sapiens
aaatagctattagca

SEQ ID NO: 571271 - DNA, 15 bp, Homo sapiens
aatagctattagcag

SEQ ID NO: 571272 - DNA, 15 bp, Homo sapiens
atagctattagcagt

SEQ ID NO: 571273 - DNA, 15 bp, Homo sapiens
tagctattagcagtg

SEQ ID NO: 571274 - DNA, 15 bp, Homo sapiens
agctattagcagtgt

SEQ ID NO: 571275 - DNA, 15 bp, Homo sapiens
gctattagcagtgtc

SEQ ID NO: 571276 - DNA, 15 bp, Homo sapiens
ctattagcagtgtcc

SEQ ID NO: 571277 - DNA, 15 bp, Homo sapiens
tattagcagtgtcca

SEQ ID NO: 571278 - DNA, 15 bp, Homo sapiens
attagcagtgtccaa

SEQ ID NO: 571279 - DNA, 15 bp, Homo sapiens
ttagcagtgtccaac

SEQ ID NO: 571280 - DNA, 15 bp, Homo sapiens
tagcagtgtccaaca

SEQ ID NO: 571281 - DNA, 15 bp, Homo sapiens
agcagtgtccaacac

SEQ ID NO: 571282 - DNA, 15 bp, Homo sapiens
gcagtgtccaacaca

SEQ ID NO: 571283 - DNA, 15 bp, Homo sapiens
cagtgtccaacacaa

SEQ ID NO: 571284 - DNA, 15 bp, Homo sapiens
agtgtccaacacaat

SEQ ID NO: 571285 - DNA, 15 bp, Homo sapiens
gtgtccaacacaatt

SEQ ID NO: 571286 - DNA, 15 bp, Homo sapiens
tgtccaacacaattc

SEQ ID NO: 571287 - DNA, 15 bp, Homo sapiens
gtccaacacaattct

SEQ ID NO: 571288 - DNA, 15 bp, Homo sapiens
tccaacacaattctt

SEQ ID NO: 571289 - DNA, 15 bp, Homo sapiens
ccaacacaattctta

SEQ ID NO: 571290 - DNA, 15 bp, Homo sapiens
caacacaattcttaa

SEQ ID NO: 571291 - DNA, 15 bp, Homo sapiens
aacacaattcttaaa

SEQ ID NO: 571292 - DNA, 15 bp, Homo sapiens
acacaattcttaaat

SEQ ID NO: 571293 - DNA, 15 bp, Homo sapiens
cacaattcttaaatg

SEQ ID NO: 571294 - DNA, 15 bp, Homo sapiens
acaattcttaaatgt

SEQ ID NO: 571295 - DNA, 15 bp, Homo sapiens
caattcttaaatgta

SEQ ID NO: 571296 - DNA, 15 bp, Homo sapiens
cccaaggaaagtgtg

SEQ ID NO: 571297 - DNA, 15 bp, Homo sapiens
ccaaggaaagtgtgc

SEQ ID NO: 571298 - DNA, 15 bp, Homo sapiens
caaggaaagtgtgct

SEQ ID NO: 571299 - DNA, 15 bp, Homo sapiens
aaggaaagtgtgctt

SEQ ID NO: 571300 - DNA, 15 bp, Homo sapiens
aggaaagtgtgcttg

SEQ ID NO: 571301 - DNA, 15 bp, Homo sapiens
ggaaagtgtgcttgt

SEQ ID NO: 571302 - DNA, 15 bp, Homo sapiens
gaaagtgtgcttgta

SEQ ID NO: 571303 - DNA, 15 bp, Homo sapiens
aaagtgtgcttgtat

SEQ ID NO: 571304 - DNA, 15 bp, Homo sapiens
aagtgtgcttgtatt

SEQ ID NO: 571305 - DNA, 15 bp, Homo sapiens
agtgtgcttgtattt

SEQ ID NO: 571306 - DNA, 15 bp, Homo sapiens
gtgtgcttgtattta

SEQ ID NO: 571307 - DNA, 15 bp, Homo sapiens
tgtgcttgtatttat

SEQ ID NO: 571308 - DNA, 15 bp, Homo sapiens
gtgcttgtatttatg

SEQ ID NO: 571309 - DNA, 15 bp, Homo sapiens
tgcttgtatttatgg

SEQ ID NO: 571310 - DNA, 15 bp, Homo sapiens
gcttgtatttatggg

SEQ ID NO: 571311 - DNA, 15 bp, Homo sapiens
cttgtatttatgggc

SEQ ID NO: 571312 - DNA, 15 bp, Homo sapiens
ttgtatttatgggcg

SEQ ID NO: 571313 - DNA, 15 bp, Homo sapiens
tgtatttatgggcgt

SEQ ID NO: 571314 - DNA, 15 bp, Homo sapiens
gtatttatgggcgtc

SEQ ID NO: 571315 - DNA, 15 bp, Homo sapiens
tatttatgggcgtct

SEQ ID NO: 571316 - DNA, 15 bp, Homo sapiens
atttatgggcgtcta

SEQ ID NO: 571317 - DNA, 15 bp, Homo sapiens
tttatgggcgtctat

SEQ ID NO: 571318 - DNA, 15 bp, Homo sapiens
ttatgggcgtctatt

SEQ ID NO: 571319 - DNA, 15 bp, Homo sapiens
tatgggcgtctattt

SEQ ID NO: 571320 - DNA, 15 bp, Homo sapiens
atgggcgtctatttt

SEQ ID NO: 571321 - DNA, 15 bp, Homo sapiens
tgggcgtctattttc

SEQ ID NO: 571322 - DNA, 15 bp, Homo sapiens
gggcgtctattttca

SEQ ID NO: 571323 - DNA, 15 bp, Homo sapiens
ggcgtctattttcag

SEQ ID NO: 571324 - DNA, 15 bp, Homo sapiens
gcgtctattttcaga

SEQ ID NO: 571325 - DNA, 15 bp, Homo sapiens
cgtctattttcagag

SEQ ID NO: 571326 - DNA, 15 bp, Homo sapiens
gtctattttcagagc

SEQ ID NO: 571327 - DNA, 15 bp, Homo sapiens
tctattttcagagca

SEQ ID NO: 571328 - DNA, 15 bp, Homo sapiens
ctattttcagagcac

SEQ ID NO: 571329 - DNA, 15 bp, Homo sapiens
tattttcagagcact

SEQ ID NO: 571330 - DNA, 15 bp, Homo sapiens
attttcagagcacta

SEQ ID NO: 571331 - DNA, 15 bp, Homo sapiens
ttttcagagcactaa

SEQ ID NO: 571332 - DNA, 15 bp, Homo sapiens
tttcagagcactaat

SEQ ID NO: 571333 - DNA, 15 bp, Homo sapiens
ttcagagcactaatt

SEQ ID NO: 571334 - DNA, 15 bp, Homo sapiens
tcagagcactaatta

SEQ ID NO: 571335 - DNA, 15 bp, Homo sapiens
cagagcactaattat

SEQ ID NO: 571336 - DNA, 15 bp, Homo sapiens
agagcactaattatt

SEQ ID NO: 571337 - DNA, 15 bp, Homo sapiens
gagcactaattattg

SEQ ID NO: 571338 - DNA, 15 bp, Homo sapiens
agcactaattattgc

SEQ ID NO: 571339 - DNA, 15 bp, Homo sapiens
gcactaattattgct

SEQ ID NO: 571340 - DNA, 15 bp, Homo sapiens
cactaattattgctg

SEQ ID NO: 571341 - DNA, 15 bp, Homo sapiens
actaattattgctga

SEQ ID NO: 571342 - DNA, 15 bp, Homo sapiens
ctaattattgctgaa

SEQ ID NO: 571343 - DNA, 15 bp, Homo sapiens
taattattgctgaat

SEQ ID NO: 571344 - DNA, 15 bp, Homo sapiens
aattattgctgaatt

SEQ ID NO: 571345 - DNA, 15 bp, Homo sapiens
attattgctgaatta

SEQ ID NO: 571346 - DNA, 15 bp, Homo sapiens
ttattgctgaattag

SEQ ID NO: 571347 - DNA, 15 bp, Homo sapiens
tattgctgaattaga

SEQ ID NO: 571348 - DNA, 15 bp, Homo sapiens
attgctgaattagaa

SEQ ID NO: 571349 - DNA, 15 bp, Homo sapiens
ttgctgaattagaac

SEQ ID NO: 571350 - DNA, 15 bp, Homo sapiens
tgctgaattagaaca

SEQ ID NO: 571351 - DNA, 15 bp, Homo sapiens
gctgaattagaacag

SEQ ID NO: 571352 - DNA, 15 bp, Homo sapiens
ctgaattagaacaga

SEQ ID NO: 571353 - DNA, 15 bp, Homo sapiens
tgaattagaacagaa

SEQ ID NO: 571354 - DNA, 15 bp, Homo sapiens
gaattagaacagaaa

SEQ ID NO: 571355 - DNA, 15 bp, Homo sapiens
aattagaacagaaat

SEQ ID NO: 571356 - DNA, 15 bp, Homo sapiens
attagaacagaaata

SEQ ID NO: 571357 - DNA, 15 bp, Homo sapiens
ttagaacagaaatat

SEQ ID NO: 571358 - DNA, 15 bp, Homo sapiens
tagaacagaaatata

SEQ ID NO: 571359 - DNA, 15 bp, Homo sapiens
agaacagaaatatag

SEQ ID NO: 571360 - DNA, 15 bp, Homo sapiens
gaacagaaatatagg

SEQ ID NO: 571361 - DNA, 15 bp, Homo sapiens
aacagaaatatagga

SEQ ID NO: 571362 - DNA, 15 bp, Homo sapiens
acagaaatataggaa

SEQ ID NO: 571363 - DNA, 15 bp, Homo sapiens
cagaaatataggaaa

SEQ ID NO: 571364 - DNA, 15 bp, Homo sapiens
agaaatataggaaaa

SEQ ID NO: 571365 - DNA, 15 bp, Homo sapiens
gaaatataggaaaac

SEQ ID NO: 571366 - DNA, 15 bp, Homo sapiens
aaatataggaaaact

SEQ ID NO: 571367 - DNA, 15 bp, Homo sapiens
aatataggaaaactg

SEQ ID NO: 571368 - DNA, 15 bp, Homo sapiens
atataggaaaactga

SEQ ID NO: 571369 - DNA, 15 bp, Homo sapiens
tataggaaaactgat

SEQ ID NO: 571370 - DNA, 15 bp, Homo sapiens
ataggaaaactgatt

SEQ ID NO: 571371 - DNA, 15 bp, Homo sapiens
taggaaaactgattt

SEQ ID NO: 571372 - DNA, 15 bp, Homo sapiens
aggaaaactgatttt

SEQ ID NO: 571373 - DNA, 15 bp, Homo sapiens
ggaaaactgattttt

SEQ ID NO: 571374 - DNA, 15 bp, Homo sapiens
gaaaactgattttta

SEQ ID NO: 571375 - DNA, 15 bp, Homo sapiens
aaaactgatttttac

SEQ ID NO: 571376 - DNA, 15 bp, Homo sapiens
aaactgatttttaca

SEQ ID NO: 571377 - DNA, 15 bp, Homo sapiens
aactgatttttacaa

SEQ ID NO: 571378 - DNA, 15 bp, Homo sapiens
actgatttttacaag

SEQ ID NO: 571379 - DNA, 15 bp, Homo sapiens
ctgatttttacaagg

SEQ ID NO: 571380 - DNA, 15 bp, Homo sapiens
tgatttttacaagga

SEQ ID NO: 571381 - DNA, 15 bp, Homo sapiens
gatttttacaaggag

SEQ ID NO: 571382 - DNA, 15 bp, Homo sapiens
atttttacaaggagc

SEQ ID NO: 571383 - DNA, 15 bp, Homo sapiens
tttttacaaggagct

SEQ ID NO: 571384 - DNA, 15 bp, Homo sapiens
ttttacaaggagctt

SEQ ID NO: 571385 - DNA, 15 bp, Homo sapiens
tttacaaggagcttc

SEQ ID NO: 571386 - DNA, 15 bp, Homo sapiens
ttacaaggagcttca

SEQ ID NO: 571387 - DNA, 15 bp, Homo sapiens
tacaaggagcttcaa

SEQ ID NO: 571388 - DNA, 15 bp, Homo sapiens
acaaggagcttcaaa

SEQ ID NO: 571389 - DNA, 15 bp, Homo sapiens
caaggagcttcaaag

SEQ ID NO: 571390 - DNA, 15 bp, Homo sapiens
aaggagcttcaaagc

SEQ ID NO: 571391 - DNA, 15 bp, Homo sapiens
aggagcttcaaagca

SEQ ID NO: 571392 - DNA, 15 bp, Homo sapiens
ggagcttcaaagcaa

SEQ ID NO: 571393 - DNA, 15 bp, Homo sapiens
gagcttcaaagcaat

SEQ ID NO: 571394 - DNA, 15 bp, Homo sapiens
agcttcaaagcaatc

SEQ ID NO: 571395 - DNA, 15 bp, Homo sapiens
gcttcaaagcaatct

SEQ ID NO: 571396 - DNA, 15 bp, Homo sapiens
cttcaaagcaatctc

SEQ ID NO: 571397 - DNA, 15 bp, Homo sapiens
ttcaaagcaatctca

SEQ ID NO: 571398 - DNA, 15 bp, Homo sapiens
tcaaagcaatctcag

SEQ ID NO: 571399 - DNA, 15 bp, Homo sapiens
caaagcaatctcagg

SEQ ID NO: 571400 - DNA, 15 bp, Homo sapiens
aaagcaatctcaggt

SEQ ID NO: 571401 - DNA, 15 bp, Homo sapiens
aagcaatctcaggta

SEQ ID NO: 571402 - DNA, 15 bp, Homo sapiens
agcaatctcaggtag

SEQ ID NO: 571403 - DNA, 15 bp, Homo sapiens
gcaatctcaggtagt

SEQ ID NO: 571404 - DNA, 15 bp, Homo sapiens
caatctcaggtagtt

SEQ ID NO: 571405 - DNA, 15 bp, Homo sapiens
aatctcaggtagttt

SEQ ID NO: 571406 - DNA, 15 bp, Homo sapiens
atctcaggtagtttc

SEQ ID NO: 571407 - DNA, 15 bp, Homo sapiens
tctcaggtagtttct

SEQ ID NO: 571408 - DNA, 15 bp, Homo sapiens
ctcaggtagtttctg

SEQ ID NO: 571409 - DNA, 15 bp, Homo sapiens
tcaggtagtttctga

SEQ ID NO: 571410 - DNA, 15 bp, Homo sapiens
caggtagtttctgat

SEQ ID NO: 571411 - DNA, 15 bp, Homo sapiens
aggtagtttctgatt

SEQ ID NO: 571412 - DNA, 15 bp, Homo sapiens
ggtagtttctgatta

SEQ ID NO: 571413 - DNA, 15 bp, Homo sapiens
gtagtttctgattat

SEQ ID NO: 571414 - DNA, 15 bp, Homo sapiens
tagtttctgattatg

SEQ ID NO: 571415 - DNA, 15 bp, Homo sapiens
agtttctgattatgt

SEQ ID NO: 571416 - DNA, 15 bp, Homo sapiens
gtttctgattatgta

SEQ ID NO: 571417 - DNA, 15 bp, Homo sapiens
tttctgattatgtat

SEQ ID NO: 571418 - DNA, 15 bp, Homo sapiens
ttctgattatgtatc

SEQ ID NO: 571419 - DNA, 15 bp, Homo sapiens
tctgattatgtatct

SEQ ID NO: 571420 - DNA, 15 bp, Homo sapiens
ctgattatgtatctc

SEQ ID NO: 571421 - DNA, 15 bp, Homo sapiens
tgattatgtatctct

SEQ ID NO: 571422 - DNA, 15 bp, Homo sapiens
gattatgtatctctg

SEQ ID NO: 571423 - DNA, 15 bp, Homo sapiens
attatgtatctctgc

SEQ ID NO: 571424 - DNA, 15 bp, Homo sapiens
ttatgtatctctgcc

SEQ ID NO: 571425 - DNA, 15 bp, Homo sapiens
tatgtatctctgcct

SEQ ID NO: 571426 - DNA, 15 bp, Homo sapiens
atgtatctctgccta

SEQ ID NO: 571427 - DNA, 15 bp, Homo sapiens
tgtatctctgcctac

SEQ ID NO: 571428 - DNA, 15 bp, Homo sapiens
gtatctctgcctacc

SEQ ID NO: 571429 - DNA, 15 bp, Homo sapiens
tatctctgcctacct

SEQ ID NO: 571430 - DNA, 15 bp, Homo sapiens
atctctgcctacctc

SEQ ID NO: 571431 - DNA, 15 bp, Homo sapiens
tctctgcctacctcg

SEQ ID NO: 571432 - DNA, 15 bp, Homo sapiens
ctctgcctacctcgg

SEQ ID NO: 571433 - DNA, 15 bp, Homo sapiens
tctgcctacctcggg

SEQ ID NO: 571434 - DNA, 15 bp, Homo sapiens
ctgcctacctcgggg

SEQ ID NO: 571435 - DNA, 15 bp, Homo sapiens
tgcctacctcggggt

SEQ ID NO: 571436 - DNA, 15 bp, Homo sapiens
gcctacctcggggta

SEQ ID NO: 571437 - DNA, 15 bp, Homo sapiens
cctacctcggggtac

SEQ ID NO: 571438 - DNA, 15 bp, Homo sapiens
ctacctcggggtaca

SEQ ID NO: 571439 - DNA, 15 bp, Homo sapiens
tacctcggggtacat

SEQ ID NO: 571440 - DNA, 15 bp, Homo sapiens
acctcggggtacata

SEQ ID NO: 571441 - DNA, 15 bp, Homo sapiens
cctcggggtacatag

SEQ ID NO: 571442 - DNA, 15 bp, Homo sapiens
ctcggggtacataga

SEQ ID NO: 571443 - DNA, 15 bp, Homo sapiens
tcggggtacatagac

SEQ ID NO: 571444 - DNA, 15 bp, Homo sapiens
cggggtacatagaca

SEQ ID NO: 571445 - DNA, 15 bp, Homo sapiens
ggggtacatagacag

SEQ ID NO: 571446 - DNA, 15 bp, Homo sapiens
gggtacatagacagg

SEQ ID NO: 571447 - DNA, 15 bp, Homo sapiens
ggtacatagacaggg

SEQ ID NO: 571448 - DNA, 15 bp, Homo sapiens
gtacatagacagggt

SEQ ID NO: 571449 - DNA, 15 bp, Homo sapiens
tacatagacagggtt

SEQ ID NO: 571450 - DNA, 15 bp, Homo sapiens
acatagacagggtta

SEQ ID NO: 571451 - DNA, 15 bp, Homo sapiens
catagacagggttac

SEQ ID NO: 571452 - DNA, 15 bp, Homo sapiens
atagacagggttaca

SEQ ID NO: 571453 - DNA, 15 bp, Homo sapiens
tagacagggttacaa

SEQ ID NO: 571454 - DNA, 15 bp, Homo sapiens
agacagggttacaat

SEQ ID NO: 571455 - DNA, 15 bp, Homo sapiens
gacagggttacaatt

SEQ ID NO: 571456 - DNA, 15 bp, Homo sapiens
acagggttacaattt

SEQ ID NO: 571457 - DNA, 15 bp, Homo sapiens
cagggttacaatttg

SEQ ID NO: 571458 - DNA, 15 bp, Homo sapiens
agggttacaatttgg

SEQ ID NO: 571459 - DNA, 15 bp, Homo sapiens
gggttacaatttggt

SEQ ID NO: 571460 - DNA, 15 bp, Homo sapiens
ggttacaatttggtt

SEQ ID NO: 571461 - DNA, 15 bp, Homo sapiens
gttacaatttggttg

SEQ ID NO: 571462 - DNA, 15 bp, Homo sapiens
ttacaatttggttga

SEQ ID NO: 571463 - DNA, 15 bp, Homo sapiens
tacaatttggttgag

SEQ ID NO: 571464 - DNA, 15 bp, Homo sapiens
acaatttggttgagg

SEQ ID NO: 571465 - DNA, 15 bp, Homo sapiens
caatttggttgagga

SEQ ID NO: 571466 - DNA, 15 bp, Homo sapiens
aatttggttgaggat

SEQ ID NO: 571467 - DNA, 15 bp, Homo sapiens
atttggttgaggata

SEQ ID NO: 571468 - DNA, 15 bp, Homo sapiens
tttggttgaggatat

SEQ ID NO: 571469 - DNA, 15 bp, Homo sapiens
ttggttgaggatata

SEQ ID NO: 571470 - DNA, 15 bp, Homo sapiens
tggttgaggatatat

SEQ ID NO: 571471 - DNA, 15 bp, Homo sapiens
ggttgaggatatatg

SEQ ID NO: 571472 - DNA, 15 bp, Homo sapiens
gttgaggatatatga

SEQ ID NO: 571473 - DNA, 15 bp, Homo sapiens
ttgaggatatatgac

SEQ ID NO: 571474 - DNA, 15 bp, Homo sapiens
tgaggatatatgaca

SEQ ID NO: 571475 - DNA, 15 bp, Homo sapiens
gaggatatatgacat

SEQ ID NO: 571476 - DNA, 15 bp, Homo sapiens
aggatatatgacatg

SEQ ID NO: 571477 - DNA, 15 bp, Homo sapiens
ggatatatgacatgt

SEQ ID NO: 571478 - DNA, 15 bp, Homo sapiens
gatatatgacatgtg

SEQ ID NO: 571479 - DNA, 15 bp, Homo sapiens
atatatgacatgtgg

SEQ ID NO: 571480 - DNA, 15 bp, Homo sapiens
tatatgacatgtggt

SEQ ID NO: 571481 - DNA, 15 bp, Homo sapiens
atatgacatgtggtt

SEQ ID NO: 571482 - DNA, 15 bp, Homo sapiens
tatgacatgtggttt

SEQ ID NO: 571483 - DNA, 15 bp, Homo sapiens
atgacatgtggtttt

SEQ ID NO: 571484 - DNA, 15 bp, Homo sapiens
tgacatgtggttttt

SEQ ID NO: 571485 - DNA, 15 bp, Homo sapiens
gacatgtggttttta

SEQ ID NO: 571486 - DNA, 15 bp, Homo sapiens
acatgtggtttttaa

SEQ ID NO: 571487 - DNA, 15 bp, Homo sapiens
catgtggtttttaaa

SEQ ID NO: 571488 - DNA, 15 bp, Homo sapiens
atgtggtttttaaag

SEQ ID NO: 571489 - DNA, 15 bp, Homo sapiens
tgtggtttttaaaga

SEQ ID NO: 571490 - DNA, 15 bp, Homo sapiens
gtggtttttaaagac

SEQ ID NO: 571491 - DNA, 15 bp, Homo sapiens
tggtttttaaagaca

SEQ ID NO: 571492 - DNA, 15 bp, Homo sapiens
ggtttttaaagacac

SEQ ID NO: 571493 - DNA, 15 bp, Homo sapiens
gtttttaaagacacc

SEQ ID NO: 571494 - DNA, 15 bp, Homo sapiens
tttttaaagacacct

SEQ ID NO: 571495 - DNA, 15 bp, Homo sapiens
ttttaaagacaccta

SEQ ID NO: 571496 - DNA, 15 bp, Homo sapiens
tttaaagacacctag

SEQ ID NO: 571497 - DNA, 15 bp, Homo sapiens
ttaaagacacctagg

SEQ ID NO: 571498 - DNA, 15 bp, Homo sapiens
taaagacacctaggg

SEQ ID NO: 571499 - DNA, 15 bp, Homo sapiens
aaagacacctagggg

SEQ ID NO: 571500 - DNA, 15 bp, Homo sapiens
aagacacctaggggc

SEQ ID NO: 571501 - DNA, 15 bp, Homo sapiens
agacacctaggggca

SEQ ID NO: 571502 - DNA, 15 bp, Homo sapiens
gacacctaggggcat

SEQ ID NO: 571503 - DNA, 15 bp, Homo sapiens
acacctaggggcatt

SEQ ID NO: 571504 - DNA, 15 bp, Homo sapiens
cacctaggggcattt

SEQ ID NO: 571505 - DNA, 15 bp, Homo sapiens
acctaggggcatttt

SEQ ID NO: 571506 - DNA, 15 bp, Homo sapiens
cctaggggcatttta

SEQ ID NO: 571507 - DNA, 15 bp, Homo sapiens
ctaggggcattttaa

SEQ ID NO: 571508 - DNA, 15 bp, Homo sapiens
taggggcattttaag

SEQ ID NO: 571509 - DNA, 15 bp, Homo sapiens
aggggcattttaaga

SEQ ID NO: 571510 - DNA, 15 bp, Homo sapiens
ggggcattttaagaa

SEQ ID NO: 571511 - DNA, 15 bp, Homo sapiens
gggcattttaagaaa

SEQ ID NO: 571512 - DNA, 15 bp, Homo sapiens
ggcattttaagaaaa

SEQ ID NO: 571513 - DNA, 15 bp, Homo sapiens
gcattttaagaaaat

SEQ ID NO: 571514 - DNA, 15 bp, Homo sapiens
cattttaagaaaatt

SEQ ID NO: 571515 - DNA, 15 bp, Homo sapiens
attttaagaaaattt

SEQ ID NO: 571516 - DNA, 15 bp, Homo sapiens
ttttaagaaaatttc

SEQ ID NO: 571517 - DNA, 15 bp, Homo sapiens
tttaagaaaatttcc

SEQ ID NO: 571518 - DNA, 15 bp, Homo sapiens
ttaagaaaatttcct

SEQ ID NO: 571519 - DNA, 15 bp, Homo sapiens
taagaaaatttcctc

SEQ ID NO: 571520 - DNA, 15 bp, Homo sapiens
aagaaaatttcctcg

SEQ ID NO: 571521 - DNA, 15 bp, Homo sapiens
agaaaatttcctcga

SEQ ID NO: 571522 - DNA, 15 bp, Homo sapiens
gaaaatttcctcgat

SEQ ID NO: 571523 - DNA, 15 bp, Homo sapiens
aaaatttcctcgata

SEQ ID NO: 571524 - DNA, 15 bp, Homo sapiens
aaatttcctcgatat

SEQ ID NO: 571525 - DNA, 15 bp, Homo sapiens
aatttcctcgatatc

SEQ ID NO: 571526 - DNA, 15 bp, Homo sapiens
atttcctcgatatct

SEQ ID NO: 571527 - DNA, 15 bp, Homo sapiens
tttcctcgatatctg

SEQ ID NO: 571528 - DNA, 15 bp, Homo sapiens
ttcctcgatatctga

SEQ ID NO: 571529 - DNA, 15 bp, Homo sapiens
tcctcgatatctgaa

SEQ ID NO: 571530 - DNA, 15 bp, Homo sapiens
cctcgatatctgaaa

SEQ ID NO: 571531 - DNA, 15 bp, Homo sapiens
ctcgatatctgaaaa

SEQ ID NO: 571532 - DNA, 15 bp, Homo sapiens
tcgatatctgaaaat

SEQ ID NO: 571533 - DNA, 15 bp, Homo sapiens
cgatatctgaaaatc

SEQ ID NO: 571534 - DNA, 15 bp, Homo sapiens
gatatctgaaaatct

SEQ ID NO: 571535 - DNA, 15 bp, Homo sapiens
atatctgaaaatctg

SEQ ID NO: 571536 - DNA, 15 bp, Homo sapiens
tatctgaaaatctgt

SEQ ID NO: 571537 - DNA, 15 bp, Homo sapiens
atctgaaaatctgta

SEQ ID NO: 571538 - DNA, 15 bp, Homo sapiens
tctgaaaatctgtag

SEQ ID NO: 571539 - DNA, 15 bp, Homo sapiens
ctgaaaatctgtaga

SEQ ID NO: 571540 - DNA, 15 bp, Homo sapiens
tgaaaatctgtagat

SEQ ID NO: 571541 - DNA, 15 bp, Homo sapiens
gaaaatctgtagatt

SEQ ID NO: 571542 - DNA, 15 bp, Homo sapiens
aaaatctgtagattt

SEQ ID NO: 571543 - DNA, 15 bp, Homo sapiens
aaatctgtagatttc

SEQ ID NO: 571544 - DNA, 15 bp, Homo sapiens
aatctgtagatttca

SEQ ID NO: 571545 - DNA, 15 bp, Homo sapiens
atctgtagatttcaa

SEQ ID NO: 571546 - DNA, 15 bp, Homo sapiens
tctgtagatttcaaa

SEQ ID NO: 571547 - DNA, 15 bp, Homo sapiens
ctgtagatttcaaaa

SEQ ID NO: 571548 - DNA, 15 bp, Homo sapiens
tgtagatttcaaaat

SEQ ID NO: 571549 - DNA, 15 bp, Homo sapiens
gtagatttcaaaatt

SEQ ID NO: 571550 - DNA, 15 bp, Homo sapiens
tagatttcaaaatta

SEQ ID NO: 571551 - DNA, 15 bp, Homo sapiens
agatttcaaaattat

SEQ ID NO: 571552 - DNA, 15 bp, Homo sapiens
gatttcaaaattatg

SEQ ID NO: 571553 - DNA, 15 bp, Homo sapiens
atttcaaaattatgt

SEQ ID NO: 571554 - DNA, 15 bp, Homo sapiens
tttcaaaattatgtt

SEQ ID NO: 571555 - DNA, 15 bp, Homo sapiens
ttcaaaattatgtta

SEQ ID NO: 571556 - DNA, 15 bp, Homo sapiens
tcaaaattatgttaa

SEQ ID NO: 571557 - DNA, 15 bp, Homo sapiens
caaaattatgttaat

SEQ ID NO: 571558 - DNA, 15 bp, Homo sapiens
aaaattatgttaatc

SEQ ID NO: 571559 - DNA, 15 bp, Homo sapiens
aaattatgttaatca

SEQ ID NO: 571560 - DNA, 15 bp, Homo sapiens
aattatgttaatcat

SEQ ID NO: 571561 - DNA, 15 bp, Homo sapiens
attatgttaatcatg

SEQ ID NO: 571562 - DNA, 15 bp, Homo sapiens
ttatgttaatcatga

SEQ ID NO: 571563 - DNA, 15 bp, Homo sapiens
tatgttaatcatgaa

SEQ ID NO: 571564 - DNA, 15 bp, Homo sapiens
atgttaatcatgaaa

SEQ ID NO: 571565 - DNA, 15 bp, Homo sapiens
tgttaatcatgaaat

SEQ ID NO: 571566 - DNA, 15 bp, Homo sapiens
gttaatcatgaaata

SEQ ID NO: 571567 - DNA, 15 bp, Homo sapiens
ttaatcatgaaatat

SEQ ID NO: 571568 - DNA, 15 bp, Homo sapiens
taatcatgaaatatt

SEQ ID NO: 571569 - DNA, 15 bp, Homo sapiens
aatcatgaaatattc

SEQ ID NO: 571570 - DNA, 15 bp, Homo sapiens
atcatgaaatattct

SEQ ID NO: 571571 - DNA, 15 bp, Homo sapiens
tcatgaaatattctg

SEQ ID NO: 571572 - DNA, 15 bp, Homo sapiens
catgaaatattctgt

SEQ ID NO: 571573 - DNA, 15 bp, Homo sapiens
atgaaatattctgtg

SEQ ID NO: 571574 - DNA, 15 bp, Homo sapiens
tgaaatattctgtgt

SEQ ID NO: 571575 - DNA, 15 bp, Homo sapiens
gaaatattctgtgtt

SEQ ID NO: 571576 - DNA, 15 bp, Homo sapiens
aaatattctgtgttg

SEQ ID NO: 571577 - DNA, 15 bp, Homo sapiens
aatattctgtgttgt

SEQ ID NO: 571578 - DNA, 15 bp, Homo sapiens
atattctgtgttgta

SEQ ID NO: 571579 - DNA, 15 bp, Homo sapiens
tattctgtgttgtaa

SEQ ID NO: 571580 - DNA, 15 bp, Homo sapiens
attctgtgttgtaat

SEQ ID NO: 571581 - DNA, 15 bp, Homo sapiens
ttctgtgttgtaatt

SEQ ID NO: 571582 - DNA, 15 bp, Homo sapiens
tctgtgttgtaattt

SEQ ID NO: 571583 - DNA, 15 bp, Homo sapiens
ctgtgttgtaatttt

SEQ ID NO: 571584 - DNA, 15 bp, Homo sapiens
tgtgttgtaattttt

SEQ ID NO: 571585 - DNA, 15 bp, Homo sapiens
gtgttgtaatttttg

SEQ ID NO: 571586 - DNA, 15 bp, Homo sapiens
tgttgtaatttttgt

SEQ ID NO: 571587 - DNA, 15 bp, Homo sapiens
gttgtaatttttgtg

SEQ ID NO: 571588 - DNA, 15 bp, Homo sapiens
ttgtaatttttgtgt

SEQ ID NO: 571589 - DNA, 15 bp, Homo sapiens
tgtaatttttgtgta

SEQ ID NO: 571590 - DNA, 15 bp, Homo sapiens
gtaatttttgtgtag

SEQ ID NO: 571591 - DNA, 15 bp, Homo sapiens
taatttttgtgtagg

SEQ ID NO: 571592 - DNA, 15 bp, Homo sapiens
aatttttgtgtaggt

SEQ ID NO: 571593 - DNA, 15 bp, Homo sapiens
atttttgtgtaggtg

SEQ ID NO: 571594 - DNA, 15 bp, Homo sapiens
tttttgtgtaggtgt

SEQ ID NO: 571595 - DNA, 15 bp, Homo sapiens
ttttgtgtaggtgta

SEQ ID NO: 571596 - DNA, 15 bp, Homo sapiens
tttgtgtaggtgtat

SEQ ID NO: 571597 - DNA, 15 bp, Homo sapiens
ttgtgtaggtgtatt

SEQ ID NO: 571598 - DNA, 15 bp, Homo sapiens
tgtgtaggtgtattc

SEQ ID NO: 571599 - DNA, 15 bp, Homo sapiens
gtgtaggtgtattcc

SEQ ID NO: 571600 - DNA, 15 bp, Homo sapiens
tggccaaagtcagcc

SEQ ID NO: 571601 - DNA, 15 bp, Homo sapiens
ggccaaagtcagccc

SEQ ID NO: 571602 - DNA, 15 bp, Homo sapiens
gccaaagtcagccct

SEQ ID NO: 571603 - DNA, 15 bp, Homo sapiens
ccaaagtcagcccta

SEQ ID NO: 571604 - DNA, 15 bp, Homo sapiens
caaagtcagccctag

SEQ ID NO: 571605 - DNA, 15 bp, Homo sapiens
aaagtcagccctagg

SEQ ID NO: 571606 - DNA, 15 bp, Homo sapiens
aagtcagccctaggc

SEQ ID NO: 571607 - DNA, 15 bp, Homo sapiens
agtcagccctaggca

SEQ ID NO: 571608 - DNA, 15 bp, Homo sapiens
gtcagccctaggcac

SEQ ID NO: 571609 - DNA, 15 bp, Homo sapiens
tcagccctaggcaca

SEQ ID NO: 571610 - DNA, 15 bp, Homo sapiens
cagccctaggcacag

SEQ ID NO: 571611 - DNA, 15 bp, Homo sapiens
agccctaggcacagt

SEQ ID NO: 571612 - DNA, 15 bp, Homo sapiens
gccctaggcacagtc

SEQ ID NO: 571613 - DNA, 15 bp, Homo sapiens
ccctaggcacagtca

SEQ ID NO: 571614 - DNA, 15 bp, Homo sapiens
cctaggcacagtcaa

SEQ ID NO: 571615 - DNA, 15 bp, Homo sapiens
ctaggcacagtcaag

SEQ ID NO: 571616 - DNA, 15 bp, Homo sapiens
taggcacagtcaaga

SEQ ID NO: 571617 - DNA, 15 bp, Homo sapiens
aggcacagtcaagaa

SEQ ID NO: 571618 - DNA, 15 bp, Homo sapiens
ggcacagtcaagaag

SEQ ID NO: 571619 - DNA, 15 bp, Homo sapiens
gcacagtcaagaagt

SEQ ID NO: 571620 - DNA, 15 bp, Homo sapiens
cacagtcaagaagta

SEQ ID NO: 571621 - DNA, 15 bp, Homo sapiens
acagtcaagaagtag

SEQ ID NO: 571622 - DNA, 15 bp, Homo sapiens
cagtcaagaagtagg

SEQ ID NO: 571623 - DNA, 15 bp, Homo sapiens
agtcaagaagtaggc

SEQ ID NO: 571624 - DNA, 15 bp, Homo sapiens
gtcaagaagtaggcg

SEQ ID NO: 571625 - DNA, 15 bp, Homo sapiens
tcaagaagtaggcga

SEQ ID NO: 571626 - DNA, 15 bp, Homo sapiens
caagaagtaggcgaa

SEQ ID NO: 571627 - DNA, 15 bp, Homo sapiens
aagaagtaggcgaag

SEQ ID NO: 571628 - DNA, 15 bp, Homo sapiens
agaagtaggcgaagt

SEQ ID NO: 571629 - DNA, 15 bp, Homo sapiens
gaagtaggcgaagtt

SEQ ID NO: 571630 - DNA, 15 bp, Homo sapiens
aagtaggcgaagttt

SEQ ID NO: 571631 - DNA, 15 bp, Homo sapiens
agtaggcgaagtttc

SEQ ID NO: 571632 - DNA, 15 bp, Homo sapiens
gtaggcgaagtttct

SEQ ID NO: 571633 - DNA, 15 bp, Homo sapiens
taggcgaagtttctc

SEQ ID NO: 571634 - DNA, 15 bp, Homo sapiens
aggcgaagtttctct

SEQ ID NO: 571635 - DNA, 15 bp, Homo sapiens
ggcgaagtttctctt

SEQ ID NO: 571636 - DNA, 15 bp, Homo sapiens
gcgaagtttctcttt

SEQ ID NO: 571637 - DNA, 15 bp, Homo sapiens
cgaagtttctctttg

SEQ ID NO: 571638 - DNA, 15 bp, Homo sapiens
gaagtttctctttgc

SEQ ID NO: 571639 - DNA, 15 bp, Homo sapiens
aagtttctctttgcc

SEQ ID NO: 571640 - DNA, 15 bp, Homo sapiens
agtttctctttgcct

SEQ ID NO: 571641 - DNA, 15 bp, Homo sapiens
gtttctctttgcctt

SEQ ID NO: 571642 - DNA, 15 bp, Homo sapiens
tttctctttgccttc

SEQ ID NO: 571643 - DNA, 15 bp, Homo sapiens
ttctctttgccttcc

SEQ ID NO: 571644 - DNA, 15 bp, Homo sapiens
tctctttgccttccc

SEQ ID NO: 571645 - DNA, 15 bp, Homo sapiens
ctctttgccttccca

SEQ ID NO: 571646 - DNA, 15 bp, Homo sapiens
tctttgccttcccag

SEQ ID NO: 571647 - DNA, 15 bp, Homo sapiens
ctttgccttcccagc

SEQ ID NO: 571648 - DNA, 15 bp, Homo sapiens
tttgccttcccagct

SEQ ID NO: 571649 - DNA, 15 bp, Homo sapiens
ttgccttcccagctt

SEQ ID NO: 571650 - DNA, 15 bp, Homo sapiens
tgccttcccagcttt

SEQ ID NO: 571651 - DNA, 15 bp, Homo sapiens
gccttcccagctttt

SEQ ID NO: 571652 - DNA, 15 bp, Homo sapiens
ccttcccagcttttc

SEQ ID NO: 571653 - DNA, 15 bp, Homo sapiens
cttcccagcttttct

SEQ ID NO: 571654 - DNA, 15 bp, Homo sapiens
ttcccagcttttctg

SEQ ID NO: 571655 - DNA, 15 bp, Homo sapiens
tcccagcttttctgt

SEQ ID NO: 571656 - DNA, 15 bp, Homo sapiens
cccagcttttctgtc

SEQ ID NO: 571657 - DNA, 15 bp, Homo sapiens
ccagcttttctgtcc

SEQ ID NO: 571658 - DNA, 15 bp, Homo sapiens
cagcttttctgtccg

SEQ ID NO: 571659 - DNA, 15 bp, Homo sapiens
agcttttctgtccgt

SEQ ID NO: 571660 - DNA, 15 bp, Homo sapiens
gcttttctgtccgtg

SEQ ID NO: 571661 - DNA, 15 bp, Homo sapiens
cttttctgtccgtgc

SEQ ID NO: 571662 - DNA, 15 bp, Homo sapiens
ttttctgtccgtgct

SEQ ID NO: 571663 - DNA, 15 bp, Homo sapiens
tttctgtccgtgctt

SEQ ID NO: 571664 - DNA, 15 bp, Homo sapiens
ttctgtccgtgcttc

SEQ ID NO: 571665 - DNA, 15 bp, Homo sapiens
tctgtccgtgcttct

SEQ ID NO: 571666 - DNA, 15 bp, Homo sapiens
ctgtccgtgcttctt

SEQ ID NO: 571667 - DNA, 15 bp, Homo sapiens
tgtccgtgcttcttt

SEQ ID NO: 571668 - DNA, 15 bp, Homo sapiens
gtccgtgcttctttc

SEQ ID NO: 571669 - DNA, 15 bp, Homo sapiens
tccgtgcttctttct

SEQ ID NO: 571670 - DNA, 15 bp, Homo sapiens
ccgtgcttctttctt

SEQ ID NO: 571671 - DNA, 15 bp, Homo sapiens
cgtgcttctttcttc

SEQ ID NO: 571672 - DNA, 15 bp, Homo sapiens
gtgcttctttcttct

SEQ ID NO: 571673 - DNA, 15 bp, Homo sapiens
tgcttctttcttctc

SEQ ID NO: 571674 - DNA, 15 bp, Homo sapiens
gcttctttcttctct

SEQ ID NO: 571675 - DNA, 15 bp, Homo sapiens
cttctttcttctctc

SEQ ID NO: 571676 - DNA, 15 bp, Homo sapiens
ttctttcttctctcc

SEQ ID NO: 571677 - DNA, 15 bp, Homo sapiens
tctttcttctctccc

SEQ ID NO: 571678 - DNA, 15 bp, Homo sapiens
ctttcttctctccca

SEQ ID NO: 571679 - DNA, 15 bp, Homo sapiens
tttcttctctcccag

SEQ ID NO: 571680 - DNA, 15 bp, Homo sapiens
ttcttctctcccagt

SEQ ID NO: 571681 - DNA, 15 bp, Homo sapiens
tcttctctcccagta

SEQ ID NO: 571682 - DNA, 15 bp, Homo sapiens
cttctctcccagtac

SEQ ID NO: 571683 - DNA, 15 bp, Homo sapiens
ttctctcccagtacc

SEQ ID NO: 571684 - DNA, 15 bp, Homo sapiens
tctctcccagtacct

SEQ ID NO: 571685 - DNA, 15 bp, Homo sapiens
ctctcccagtacctt

SEQ ID NO: 571686 - DNA, 15 bp, Homo sapiens
tctcccagtaccttt

SEQ ID NO: 571687 - DNA, 15 bp, Homo sapiens
ctcccagtacctttc

SEQ ID NO: 571688 - DNA, 15 bp, Homo sapiens
tcccagtacctttca

SEQ ID NO: 571689 - DNA, 15 bp, Homo sapiens
cccagtacctttcag

SEQ ID NO: 571690 - DNA, 15 bp, Homo sapiens
ccagtacctttcagt

SEQ ID NO: 571691 - DNA, 15 bp, Homo sapiens
cagtacctttcagtg

SEQ ID NO: 571692 - DNA, 15 bp, Homo sapiens
agtacctttcagtga

SEQ ID NO: 571693 - DNA, 15 bp, Homo sapiens
gtacctttcagtgaa

SEQ ID NO: 571694 - DNA, 15 bp, Homo sapiens
tacctttcagtgaac

SEQ ID NO: 571695 - DNA, 15 bp, Homo sapiens
acctttcagtgaacc

SEQ ID NO: 571696 - DNA, 15 bp, Homo sapiens
cctttcagtgaacct

SEQ ID NO: 571697 - DNA, 15 bp, Homo sapiens
ctttcagtgaacctg

SEQ ID NO: 571698 - DNA, 15 bp, Homo sapiens
tttcagtgaacctga

SEQ ID NO: 571699 - DNA, 15 bp, Homo sapiens
ttcagtgaacctgat

SEQ ID NO: 571700 - DNA, 15 bp, Homo sapiens
tcagtgaacctgatc

SEQ ID NO: 571701 - DNA, 15 bp, Homo sapiens
cagtgaacctgatcc

SEQ ID NO: 571702 - DNA, 15 bp, Homo sapiens
agtgaacctgatccc

SEQ ID NO: 571703 - DNA, 15 bp, Homo sapiens
gtgaacctgatcccc

SEQ ID NO: 571704 - DNA, 15 bp, Homo sapiens
tgaacctgatcccca

SEQ ID NO: 571705 - DNA, 15 bp, Homo sapiens
gaacctgatccccac

SEQ ID NO: 571706 - DNA, 15 bp, Homo sapiens
aacctgatccccacc

SEQ ID NO: 571707 - DNA, 15 bp, Homo sapiens
acctgatccccacct

SEQ ID NO: 571708 - DNA, 15 bp, Homo sapiens
cctgatccccacctg

SEQ ID NO: 571709 - DNA, 15 bp, Homo sapiens
ctgatccccacctgc

SEQ ID NO: 571710 - DNA, 15 bp, Homo sapiens
tgatccccacctgcc

SEQ ID NO: 571711 - DNA, 15 bp, Homo sapiens
gatccccacctgcca

SEQ ID NO: 571712 - DNA, 15 bp, Homo sapiens
atccccacctgccag

SEQ ID NO: 571713 - DNA, 15 bp, Homo sapiens
tccccacctgccagt

SEQ ID NO: 571714 - DNA, 15 bp, Homo sapiens
ccccacctgccagtg

SEQ ID NO: 571715 - DNA, 15 bp, Homo sapiens
cccacctgccagtgc

SEQ ID NO: 571716 - DNA, 15 bp, Homo sapiens
ccacctgccagtgcc

SEQ ID NO: 571717 - DNA, 15 bp, Homo sapiens
cacctgccagtgcct

SEQ ID NO: 571718 - DNA, 15 bp, Homo sapiens
acctgccagtgccta

SEQ ID NO: 571719 - DNA, 15 bp, Homo sapiens
cctgccagtgcctac

SEQ ID NO: 571720 - DNA, 15 bp, Homo sapiens
ctgccagtgcctact

SEQ ID NO: 571721 - DNA, 15 bp, Homo sapiens
tgccagtgcctactg

SEQ ID NO: 571722 - DNA, 15 bp, Homo sapiens
gccagtgcctactgt

SEQ ID NO: 571723 - DNA, 15 bp, Homo sapiens
ccagtgcctactgtc

SEQ ID NO: 571724 - DNA, 15 bp, Homo sapiens
cagtgcctactgtct

SEQ ID NO: 571725 - DNA, 15 bp, Homo sapiens
agtgcctactgtctt

SEQ ID NO: 571726 - DNA, 15 bp, Homo sapiens
gtgcctactgtcttt

SEQ ID NO: 571727 - DNA, 15 bp, Homo sapiens
tgcctactgtctttc

SEQ ID NO: 571728 - DNA, 15 bp, Homo sapiens
gcctactgtctttct

SEQ ID NO: 571729 - DNA, 15 bp, Homo sapiens
cctactgtctttctt

SEQ ID NO: 571730 - DNA, 15 bp, Homo sapiens
ctactgtctttcttg

SEQ ID NO: 571731 - DNA, 15 bp, Homo sapiens
tactgtctttcttgc

SEQ ID NO: 571732 - DNA, 15 bp, Homo sapiens
actgtctttcttgct

SEQ ID NO: 571733 - DNA, 15 bp, Homo sapiens
ctgtctttcttgctc

SEQ ID NO: 571734 - DNA, 15 bp, Homo sapiens
tgtctttcttgctca

SEQ ID NO: 571735 - DNA, 15 bp, Homo sapiens
gtctttcttgctcaa

SEQ ID NO: 571736 - DNA, 15 bp, Homo sapiens
tctttcttgctcaac

SEQ ID NO: 571737 - DNA, 15 bp, Homo sapiens
ctttcttgctcaaca

SEQ ID NO: 571738 - DNA, 15 bp, Homo sapiens
tttcttgctcaacag

SEQ ID NO: 571739 - DNA, 15 bp, Homo sapiens
ttcttgctcaacagt

SEQ ID NO: 571740 - DNA, 15 bp, Homo sapiens
tcttgctcaacagtg

SEQ ID NO: 571741 - DNA, 15 bp, Homo sapiens
cttgctcaacagtgt

SEQ ID NO: 571742 - DNA, 15 bp, Homo sapiens
ttgctcaacagtgta

SEQ ID NO: 571743 - DNA, 15 bp, Homo sapiens
tgctcaacagtgtat

SEQ ID NO: 571744 - DNA, 15 bp, Homo sapiens
gctcaacagtgtatc

SEQ ID NO: 571745 - DNA, 15 bp, Homo sapiens
ctcaacagtgtatct

SEQ ID NO: 571746 - DNA, 15 bp, Homo sapiens
tcaacagtgtatctc

SEQ ID NO: 571747 - DNA, 15 bp, Homo sapiens
caacagtgtatctcc

SEQ ID NO: 571748 - DNA, 15 bp, Homo sapiens
aacagtgtatctcct

SEQ ID NO: 571749 - DNA, 15 bp, Homo sapiens
acagtgtatctcctt

SEQ ID NO: 571750 - DNA, 15 bp, Homo sapiens
cagtgtatctccttt

SEQ ID NO: 571751 - DNA, 15 bp, Homo sapiens
agtgtatctcctttg

SEQ ID NO: 571752 - DNA, 15 bp, Homo sapiens
gtgtatctcctttgt

SEQ ID NO: 571753 - DNA, 15 bp, Homo sapiens
tgtatctcctttgta

SEQ ID NO: 571754 - DNA, 15 bp, Homo sapiens
gtatctcctttgtaa

SEQ ID NO: 571755 - DNA, 15 bp, Homo sapiens
tatctcctttgtaac

SEQ ID NO: 571756 - DNA, 15 bp, Homo sapiens
atctcctttgtaact

SEQ ID NO: 571757 - DNA, 15 bp, Homo sapiens
tctcctttgtaactt

SEQ ID NO: 571758 - DNA, 15 bp, Homo sapiens
ctcctttgtaacttg

SEQ ID NO: 571759 - DNA, 15 bp, Homo sapiens
tcctttgtaacttgc

SEQ ID NO: 571760 - DNA, 15 bp, Homo sapiens
cctttgtaacttgct

SEQ ID NO: 571761 - DNA, 15 bp, Homo sapiens
ctttgtaacttgcta

SEQ ID NO: 571762 - DNA, 15 bp, Homo sapiens
tttgtaacttgctaa

SEQ ID NO: 571763 - DNA, 15 bp, Homo sapiens
ttgtaacttgctaat

SEQ ID NO: 571764 - DNA, 15 bp, Homo sapiens
tgtaacttgctaatg

SEQ ID NO: 571765 - DNA, 15 bp, Homo sapiens
gtaacttgctaatga

SEQ ID NO: 571766 - DNA, 15 bp, Homo sapiens
taacttgctaatgat

SEQ ID NO: 571767 - DNA, 15 bp, Homo sapiens
aacttgctaatgatg

SEQ ID NO: 571768 - DNA, 15 bp, Homo sapiens
acttgctaatgatgg

SEQ ID NO: 571769 - DNA, 15 bp, Homo sapiens
cttgctaatgatggt

SEQ ID NO: 571770 - DNA, 15 bp, Homo sapiens
ttgctaatgatggta

SEQ ID NO: 571771 - DNA, 15 bp, Homo sapiens
tgctaatgatggtat

SEQ ID NO: 571772 - DNA, 15 bp, Homo sapiens
gctaatgatggtata

SEQ ID NO: 571773 - DNA, 15 bp, Homo sapiens
ctaatgatggtataa

SEQ ID NO: 571774 - DNA, 15 bp, Homo sapiens
taatgatggtataag

SEQ ID NO: 571775 - DNA, 15 bp, Homo sapiens
aatgatggtataagg

SEQ ID NO: 571776 - DNA, 15 bp, Homo sapiens
atgatggtataaggt

SEQ ID NO: 571777 - DNA, 15 bp, Homo sapiens
tgatggtataaggta

SEQ ID NO: 571778 - DNA, 15 bp, Homo sapiens
gatggtataaggtat

SEQ ID NO: 571779 - DNA, 15 bp, Homo sapiens
atggtataaggtata

SEQ ID NO: 571780 - DNA, 15 bp, Homo sapiens
tggtataaggtataa

SEQ ID NO: 571781 - DNA, 15 bp, Homo sapiens
ggtataaggtataat

SEQ ID NO: 571782 - DNA, 15 bp, Homo sapiens
gtataaggtataatc

SEQ ID NO: 571783 - DNA, 15 bp, Homo sapiens
tataaggtataatcc

SEQ ID NO: 571784 - DNA, 15 bp, Homo sapiens
ataaggtataatcca

SEQ ID NO: 571785 - DNA, 15 bp, Homo sapiens
taaggtataatccat

SEQ ID NO: 571786 - DNA, 15 bp, Homo sapiens
aaggtataatccatt

SEQ ID NO: 571787 - DNA, 15 bp, Homo sapiens
aggtataatccattt

SEQ ID NO: 571788 - DNA, 15 bp, Homo sapiens
ggtataatccatttc

SEQ ID NO: 571789 - DNA, 15 bp, Homo sapiens
gtataatccatttca

SEQ ID NO: 571790 - DNA, 15 bp, Homo sapiens
tataatccatttcac

SEQ ID NO: 571791 - DNA, 15 bp, Homo sapiens
ataatccatttcacg

SEQ ID NO: 571792 - DNA, 15 bp, Homo sapiens
taatccatttcacgc

SEQ ID NO: 571793 - DNA, 15 bp, Homo sapiens
aatccatttcacgca

SEQ ID NO: 571794 - DNA, 15 bp, Homo sapiens
atccatttcacgcat

SEQ ID NO: 571795 - DNA, 15 bp, Homo sapiens
tccatttcacgcata

SEQ ID NO: 571796 - DNA, 15 bp, Homo sapiens
ccatttcacgcatat

SEQ ID NO: 571797 - DNA, 15 bp, Homo sapiens
catttcacgcatatt

SEQ ID NO: 571798 - DNA, 15 bp, Homo sapiens
atttcacgcatattt

SEQ ID NO: 571799 - DNA, 15 bp, Homo sapiens
tttcacgcatatttg

SEQ ID NO: 571800 - DNA, 15 bp, Homo sapiens
ttcacgcatatttgc

SEQ ID NO: 571801 - DNA, 15 bp, Homo sapiens
tcacgcatatttgca

SEQ ID NO: 571802 - DNA, 15 bp, Homo sapiens
cacgcatatttgcat

SEQ ID NO: 571803 - DNA, 15 bp, Homo sapiens
acgcatatttgcatt

SEQ ID NO: 571804 - DNA, 15 bp, Homo sapiens
cgcatatttgcattt

SEQ ID NO: 571805 - DNA, 15 bp, Homo sapiens
gcatatttgcatttc

SEQ ID NO: 571806 - DNA, 15 bp, Homo sapiens
catatttgcatttca

SEQ ID NO: 571807 - DNA, 15 bp, Homo sapiens
atatttgcatttcaa

SEQ ID NO: 571808 - DNA, 15 bp, Homo sapiens
tatttgcatttcaaa

SEQ ID NO: 571809 - DNA, 15 bp, Homo sapiens
atttgcatttcaaaa

SEQ ID NO: 571810 - DNA, 15 bp, Homo sapiens
tttgcatttcaaaaa

SEQ ID NO: 571811 - DNA, 15 bp, Homo sapiens
ttgcatttcaaaaag

SEQ ID NO: 571812 - DNA, 15 bp, Homo sapiens
tgcatttcaaaaagg

SEQ ID NO: 571813 - DNA, 15 bp, Homo sapiens
gcatttcaaaaagga

SEQ ID NO: 571814 - DNA, 15 bp, Homo sapiens
catttcaaaaaggaa

SEQ ID NO: 571815 - DNA, 15 bp, Homo sapiens
atttcaaaaaggaac

SEQ ID NO: 571816 - DNA, 15 bp, Homo sapiens
tttcaaaaaggaact

SEQ ID NO: 571817 - DNA, 15 bp, Homo sapiens
ttcaaaaaggaactc

SEQ ID NO: 571818 - DNA, 15 bp, Homo sapiens
tcaaaaaggaactct

SEQ ID NO: 571819 - DNA, 15 bp, Homo sapiens
caaaaaggaactctt

SEQ ID NO: 571820 - DNA, 15 bp, Homo sapiens
aaaaaggaactcttt

SEQ ID NO: 571821 - DNA, 15 bp, Homo sapiens
aaaaggaactcttta

SEQ ID NO: 571822 - DNA, 15 bp, Homo sapiens
aaaggaactctttaa

SEQ ID NO: 571823 - DNA, 15 bp, Homo sapiens
aaggaactctttaag

SEQ ID NO: 571824 - DNA, 15 bp, Homo sapiens
aggaactctttaaga

SEQ ID NO: 571825 - DNA, 15 bp, Homo sapiens
ggaactctttaagat

SEQ ID NO: 571826 - DNA, 15 bp, Homo sapiens
gaactctttaagatg

SEQ ID NO: 571827 - DNA, 15 bp, Homo sapiens
aactctttaagatgg

SEQ ID NO: 571828 - DNA, 15 bp, Homo sapiens
actctttaagatgga

SEQ ID NO: 571829 - DNA, 15 bp, Homo sapiens
ctctttaagatggaa

SEQ ID NO: 571830 - DNA, 15 bp, Homo sapiens
tctttaagatggaaa

SEQ ID NO: 571831 - DNA, 15 bp, Homo sapiens
ctttaagatggaaaa

SEQ ID NO: 571832 - DNA, 15 bp, Homo sapiens
tttaagatggaaaag

SEQ ID NO: 571833 - DNA, 15 bp, Homo sapiens
ttaagatggaaaagc

SEQ ID NO: 571834 - DNA, 15 bp, Homo sapiens
taagatggaaaagcc

SEQ ID NO: 571835 - DNA, 15 bp, Homo sapiens
aagatggaaaagcct

SEQ ID NO: 571836 - DNA, 15 bp, Homo sapiens
agatggaaaagcctt

SEQ ID NO: 571837 - DNA, 15 bp, Homo sapiens
gatggaaaagccttc

SEQ ID NO: 571838 - DNA, 15 bp, Homo sapiens
atggaaaagccttca

SEQ ID NO: 571839 - DNA, 15 bp, Homo sapiens
tggaaaagccttcaa

SEQ ID NO: 571840 - DNA, 15 bp, Homo sapiens
ggaaaagccttcaag

SEQ ID NO: 571841 - DNA, 15 bp, Homo sapiens
gaaaagccttcaaga

SEQ ID NO: 571842 - DNA, 15 bp, Homo sapiens
aaaagccttcaagat

SEQ ID NO: 571843 - DNA, 15 bp, Homo sapiens
aaagccttcaagatc

SEQ ID NO: 571844 - DNA, 15 bp, Homo sapiens
aagccttcaagatcc

SEQ ID NO: 571845 - DNA, 15 bp, Homo sapiens
agccttcaagatcca

SEQ ID NO: 571846 - DNA, 15 bp, Homo sapiens
gccttcaagatccac

SEQ ID NO: 571847 - DNA, 15 bp, Homo sapiens
ccttcaagatccaca

SEQ ID NO: 571848 - DNA, 15 bp, Homo sapiens
cttcaagatccacag

SEQ ID NO: 571849 - DNA, 15 bp, Homo sapiens
ttcaagatccacagg

SEQ ID NO: 571850 - DNA, 15 bp, Homo sapiens
tcaagatccacagga

SEQ ID NO: 571851 - DNA, 15 bp, Homo sapiens
caagatccacaggaa

SEQ ID NO: 571852 - DNA, 15 bp, Homo sapiens
aagatccacaggaat

SEQ ID NO: 571853 - DNA, 15 bp, Homo sapiens
agatccacaggaatg

SEQ ID NO: 571854 - DNA, 15 bp, Homo sapiens
gatccacaggaatga

SEQ ID NO: 571855 - DNA, 15 bp, Homo sapiens
atccacaggaatgaa

SEQ ID NO: 571856 - DNA, 15 bp, Homo sapiens
tccacaggaatgaag

SEQ ID NO: 571857 - DNA, 15 bp, Homo sapiens
ccacaggaatgaagc

SEQ ID NO: 571858 - DNA, 15 bp, Homo sapiens
cacaggaatgaagct

SEQ ID NO: 571859 - DNA, 15 bp, Homo sapiens
acaggaatgaagcta

SEQ ID NO: 571860 - DNA, 15 bp, Homo sapiens
caggaatgaagctat

SEQ ID NO: 571861 - DNA, 15 bp, Homo sapiens
aggaatgaagctata

SEQ ID NO: 571862 - DNA, 15 bp, Homo sapiens
ggaatgaagctataa

SEQ ID NO: 571863 - DNA, 15 bp, Homo sapiens
gaatgaagctataat

SEQ ID NO: 571864 - DNA, 15 bp, Homo sapiens
aatgaagctataatg

SEQ ID NO: 571865 - DNA, 15 bp, Homo sapiens
atgaagctataatgg

SEQ ID NO: 571866 - DNA, 15 bp, Homo sapiens
tgaagctataatggt

SEQ ID NO: 571867 - DNA, 15 bp, Homo sapiens
gaagctataatggtg

SEQ ID NO: 571868 - DNA, 15 bp, Homo sapiens
aagctataatggtga

SEQ ID NO: 571869 - DNA, 15 bp, Homo sapiens
agctataatggtgaa

SEQ ID NO: 571870 - DNA, 15 bp, Homo sapiens
gctataatggtgaag

SEQ ID NO: 571871 - DNA, 15 bp, Homo sapiens
ctataatggtgaagc

SEQ ID NO: 571872 - DNA, 15 bp, Homo sapiens
tataatggtgaagct

SEQ ID NO: 571873 - DNA, 15 bp, Homo sapiens
ataatggtgaagcta

SEQ ID NO: 571874 - DNA, 15 bp, Homo sapiens
taatggtgaagctat

SEQ ID NO: 571875 - DNA, 15 bp, Homo sapiens
aatggtgaagctata

SEQ ID NO: 571876 - DNA, 15 bp, Homo sapiens
atggtgaagctataa

SEQ ID NO: 571877 - DNA, 15 bp, Homo sapiens
tggtgaagctataat

SEQ ID NO: 571878 - DNA, 15 bp, Homo sapiens
ggtgaagctataatt

SEQ ID NO: 571879 - DNA, 15 bp, Homo sapiens
gtgaagctataattg

SEQ ID NO: 571880 - DNA, 15 bp, Homo sapiens
tgaagctataattgg

SEQ ID NO: 571881 - DNA, 15 bp, Homo sapiens
gaagctataattggt

SEQ ID NO: 571882 - DNA, 15 bp, Homo sapiens
aagctataattggtc

SEQ ID NO: 571883 - DNA, 15 bp, Homo sapiens
agctataattggtca

SEQ ID NO: 571884 - DNA, 15 bp, Homo sapiens
gctataattggtcat

SEQ ID NO: 571885 - DNA, 15 bp, Homo sapiens
ctataattggtcatt

SEQ ID NO: 571886 - DNA, 15 bp, Homo sapiens
tataattggtcatta

SEQ ID NO: 571887 - DNA, 15 bp, Homo sapiens
ataattggtcattag

SEQ ID NO: 571888 - DNA, 15 bp, Homo sapiens
taattggtcattagc

SEQ ID NO: 571889 - DNA, 15 bp, Homo sapiens
aattggtcattagct

SEQ ID NO: 571890 - DNA, 15 bp, Homo sapiens
attggtcattagctc

SEQ ID NO: 571891 - DNA, 15 bp, Homo sapiens
ttggtcattagctcc

SEQ ID NO: 571892 - DNA, 15 bp, Homo sapiens
tggtcattagctcca

SEQ ID NO: 571893 - DNA, 15 bp, Homo sapiens
ggtcattagctccaa

SEQ ID NO: 571894 - DNA, 15 bp, Homo sapiens
gtcattagctccaac

SEQ ID NO: 571895 - DNA, 15 bp, Homo sapiens
tcattagctccaaca

SEQ ID NO: 571896 - DNA, 15 bp, Homo sapiens
cattagctccaacag

SEQ ID NO: 571897 - DNA, 15 bp, Homo sapiens
attagctccaacaga

SEQ ID NO: 571898 - DNA, 15 bp, Homo sapiens
ttagctccaacagag

SEQ ID NO: 571899 - DNA, 15 bp, Homo sapiens
tagctccaacagagg

SEQ ID NO: 571900 - DNA, 15 bp, Homo sapiens
agctccaacagagga

SEQ ID NO: 571901 - DNA, 15 bp, Homo sapiens
gctccaacagaggaa

SEQ ID NO: 571902 - DNA, 15 bp, Homo sapiens
ctccaacagaggaag

SEQ ID NO: 571903 - DNA, 15 bp, Homo sapiens
tccaacagaggaaga

SEQ ID NO: 571904 - DNA, 15 bp, Homo sapiens
ccaacagaggaagag

SEQ ID NO: 571905 - DNA, 15 bp, Homo sapiens
caacagaggaagaga

SEQ ID NO: 571906 - DNA, 15 bp, Homo sapiens
aacagaggaagagag

SEQ ID NO: 571907 - DNA, 15 bp, Homo sapiens
acagaggaagagaga

SEQ ID NO: 571908 - DNA, 15 bp, Homo sapiens
cagaggaagagagag

SEQ ID NO: 571909 - DNA, 15 bp, Homo sapiens
agaggaagagagagg

SEQ ID NO: 571910 - DNA, 15 bp, Homo sapiens
gaggaagagagaggt

SEQ ID NO: 571911 - DNA, 15 bp, Homo sapiens
aggaagagagaggta

SEQ ID NO: 571912 - DNA, 15 bp, Homo sapiens
ggaagagagaggtag

SEQ ID NO: 571913 - DNA, 15 bp, Homo sapiens
gaagagagaggtagt

SEQ ID NO: 571914 - DNA, 15 bp, Homo sapiens
aagagagaggtagta

SEQ ID NO: 571915 - DNA, 15 bp, Homo sapiens
agagagaggtagtag

SEQ ID NO: 571916 - DNA, 15 bp, Homo sapiens
gagagaggtagtaga

SEQ ID NO: 571917 - DNA, 15 bp, Homo sapiens
agagaggtagtagag

SEQ ID NO: 571918 - DNA, 15 bp, Homo sapiens
gagaggtagtagagc

SEQ ID NO: 571919 - DNA, 15 bp, Homo sapiens
agaggtagtagagct

SEQ ID NO: 571920 - DNA, 15 bp, Homo sapiens
gaggtagtagagctg

SEQ ID NO: 571921 - DNA, 15 bp, Homo sapiens
aggtagtagagctga

SEQ ID NO: 571922 - DNA, 15 bp, Homo sapiens
ggtagtagagctgat

SEQ ID NO: 571923 - DNA, 15 bp, Homo sapiens
gtagtagagctgata

SEQ ID NO: 571924 - DNA, 15 bp, Homo sapiens
tagtagagctgatat

SEQ ID NO: 571925 - DNA, 15 bp, Homo sapiens
agtagagctgatatt

SEQ ID NO: 571926 - DNA, 15 bp, Homo sapiens
gtagagctgatattc

SEQ ID NO: 571927 - DNA, 15 bp, Homo sapiens
tagagctgatattct

SEQ ID NO: 571928 - DNA, 15 bp, Homo sapiens
agagctgatattctg

SEQ ID NO: 571929 - DNA, 15 bp, Homo sapiens
gagctgatattctgg

SEQ ID NO: 571930 - DNA, 15 bp, Homo sapiens
agctgatattctgga

SEQ ID NO: 571931 - DNA, 15 bp, Homo sapiens
gctgatattctggag

SEQ ID NO: 571932 - DNA, 15 bp, Homo sapiens
ctgatattctggagt

SEQ ID NO: 571933 - DNA, 15 bp, Homo sapiens
tgatattctggagtt

SEQ ID NO: 571934 - DNA, 15 bp, Homo sapiens
gatattctggagttg

SEQ ID NO: 571935 - DNA, 15 bp, Homo sapiens
atattctggagttgg

SEQ ID NO: 571936 - DNA, 15 bp, Homo sapiens
tattctggagttggg

SEQ ID NO: 571937 - DNA, 15 bp, Homo sapiens
attctggagttgggg

SEQ ID NO: 571938 - DNA, 15 bp, Homo sapiens
ttctggagttgggga

SEQ ID NO: 571939 - DNA, 15 bp, Homo sapiens
tctggagttggggag

SEQ ID NO: 571940 - DNA, 15 bp, Homo sapiens
ctggagttggggaga

SEQ ID NO: 571941 - DNA, 15 bp, Homo sapiens
tggagttggggagag

SEQ ID NO: 571942 - DNA, 15 bp, Homo sapiens
ggagttggggagagt

SEQ ID NO: 571943 - DNA, 15 bp, Homo sapiens
gagttggggagagtt

SEQ ID NO: 571944 - DNA, 15 bp, Homo sapiens
agttggggagagtta

SEQ ID NO: 571945 - DNA, 15 bp, Homo sapiens
gttggggagagttac

SEQ ID NO: 571946 - DNA, 15 bp, Homo sapiens
ttggggagagttacc

SEQ ID NO: 571947 - DNA, 15 bp, Homo sapiens
tggggagagttacct

SEQ ID NO: 571948 - DNA, 15 bp, Homo sapiens
ggggagagttaccta

SEQ ID NO: 571949 - DNA, 15 bp, Homo sapiens
gggagagttacctac

SEQ ID NO: 571950 - DNA, 15 bp, Homo sapiens
ggagagttacctact

SEQ ID NO: 571951 - DNA, 15 bp, Homo sapiens
gagagttacctactc

SEQ ID NO: 571952 - DNA, 15 bp, Homo sapiens
agagttacctactcc

SEQ ID NO: 571953 - DNA, 15 bp, Homo sapiens
gagttacctactcct

SEQ ID NO: 571954 - DNA, 15 bp, Homo sapiens
agttacctactccta

SEQ ID NO: 571955 - DNA, 15 bp, Homo sapiens
gttacctactcctaa

SEQ ID NO: 571956 - DNA, 15 bp, Homo sapiens
ttacctactcctaag

SEQ ID NO: 571957 - DNA, 15 bp, Homo sapiens
tacctactcctaagg

SEQ ID NO: 571958 - DNA, 15 bp, Homo sapiens
acctactcctaaggc

SEQ ID NO: 571959 - DNA, 15 bp, Homo sapiens
cctactcctaaggcc

SEQ ID NO: 571960 - DNA, 15 bp, Homo sapiens
ctactcctaaggcca

SEQ ID NO: 571961 - DNA, 15 bp, Homo sapiens
tactcctaaggccaa

SEQ ID NO: 571962 - DNA, 15 bp, Homo sapiens
actcctaaggccaac

SEQ ID NO: 571963 - DNA, 15 bp, Homo sapiens
ctcctaaggccaacc

SEQ ID NO: 571964 - DNA, 15 bp, Homo sapiens
tcctaaggccaacct

SEQ ID NO: 571965 - DNA, 15 bp, Homo sapiens
cctaaggccaacctt

SEQ ID NO: 571966 - DNA, 15 bp, Homo sapiens
ctaaggccaaccttg

SEQ ID NO: 571967 - DNA, 15 bp, Homo sapiens
taaggccaaccttga

SEQ ID NO: 571968 - DNA, 15 bp, Homo sapiens
aaggccaaccttgaa

SEQ ID NO: 571969 - DNA, 15 bp, Homo sapiens
aggccaaccttgaac

SEQ ID NO: 571970 - DNA, 15 bp, Homo sapiens
ggccaaccttgaacc

SEQ ID NO: 571971 - DNA, 15 bp, Homo sapiens
gccaaccttgaacct

SEQ ID NO: 571972 - DNA, 15 bp, Homo sapiens
ccaaccttgaaccta

SEQ ID NO: 571973 - DNA, 15 bp, Homo sapiens
caaccttgaacctaa

SEQ ID NO: 571974 - DNA, 15 bp, Homo sapiens
aaccttgaacctaac

SEQ ID NO: 571975 - DNA, 15 bp, Homo sapiens
accttgaacctaacc

SEQ ID NO: 571976 - DNA, 15 bp, Homo sapiens
ccttgaacctaaccc

SEQ ID NO: 571977 - DNA, 15 bp, Homo sapiens
cttgaacctaacccc

SEQ ID NO: 571978 - DNA, 15 bp, Homo sapiens
ttgaacctaacccct

SEQ ID NO: 571979 - DNA, 15 bp, Homo sapiens
tgaacctaaccccta

SEQ ID NO: 571980 - DNA, 15 bp, Homo sapiens
gaacctaacccctaa

SEQ ID NO: 571981 - DNA, 15 bp, Homo sapiens
aacctaacccctaac

SEQ ID NO: 571982 - DNA, 15 bp, Homo sapiens
acctaacccctaacc

SEQ ID NO: 571983 - DNA, 15 bp, Homo sapiens
cctaacccctaaccc

SEQ ID NO: 571984 - DNA, 15 bp, Homo sapiens
ctaacccctaacccc

SEQ ID NO: 571985 - DNA, 15 bp, Homo sapiens
taacccctaacccct

SEQ ID NO: 571986 - DNA, 15 bp, Homo sapiens
aacccctaacccctc

SEQ ID NO: 571987 - DNA, 15 bp, Homo sapiens
acccctaacccctct

SEQ ID NO: 571988 - DNA, 15 bp, Homo sapiens
cccctaacccctctc

SEQ ID NO: 571989 - DNA, 15 bp, Homo sapiens
ccctaacccctctcc

SEQ ID NO: 571990 - DNA, 15 bp, Homo sapiens
cctaacccctctccc

SEQ ID NO: 571991 - DNA, 15 bp, Homo sapiens
ctaacccctctccca

SEQ ID NO: 571992 - DNA, 15 bp, Homo sapiens
taacccctctcccaa

SEQ ID NO: 571993 - DNA, 15 bp, Homo sapiens
aacccctctcccaac

SEQ ID NO: 571994 - DNA, 15 bp, Homo sapiens
acccctctcccaaca

SEQ ID NO: 571995 - DNA, 15 bp, Homo sapiens
cccctctcccaacag

SEQ ID NO: 571996 - DNA, 15 bp, Homo sapiens
ccctctcccaacagt

SEQ ID NO: 571997 - DNA, 15 bp, Homo sapiens
cctctcccaacagtc

SEQ ID NO: 571998 - DNA, 15 bp, Homo sapiens
ctctcccaacagtct

SEQ ID NO: 571999 - DNA, 15 bp, Homo sapiens
tctcccaacagtctg

SEQ ID NO: 572000 - DNA, 15 bp, Homo sapiens
ctcccaacagtctgt

SEQ ID NO: 572001 - DNA, 15 bp, Homo sapiens
tcccaacagtctgtt

SEQ ID NO: 572002 - DNA, 15 bp, Homo sapiens
cccaacagtctgttc

SEQ ID NO: 572003 - DNA, 15 bp, Homo sapiens
ccaacagtctgttct

SEQ ID NO: 572004 - DNA, 15 bp, Homo sapiens
caacagtctgttctt

SEQ ID NO: 572005 - DNA, 15 bp, Homo sapiens
aacagtctgttcttt

SEQ ID NO: 572006 - DNA, 15 bp, Homo sapiens
acagtctgttctttt

SEQ ID NO: 572007 - DNA, 15 bp, Homo sapiens
cagtctgttcttttt

SEQ ID NO: 572008 - DNA, 15 bp, Homo sapiens
agtctgttcttttta

SEQ ID NO: 572009 - DNA, 15 bp, Homo sapiens
gtctgttctttttac

SEQ ID NO: 572010 - DNA, 15 bp, Homo sapiens
tctgttctttttact

SEQ ID NO: 572011 - DNA, 15 bp, Homo sapiens
ctgttctttttactc

SEQ ID NO: 572012 - DNA, 15 bp, Homo sapiens
tgttctttttactca

SEQ ID NO: 572013 - DNA, 15 bp, Homo sapiens
gttctttttactcat

SEQ ID NO: 572014 - DNA, 15 bp, Homo sapiens
ttctttttactcatg

SEQ ID NO: 572015 - DNA, 15 bp, Homo sapiens
tctttttactcatga

SEQ ID NO: 572016 - DNA, 15 bp, Homo sapiens
ctttttactcatgaa

SEQ ID NO: 572017 - DNA, 15 bp, Homo sapiens
tttttactcatgaat

SEQ ID NO: 572018 - DNA, 15 bp, Homo sapiens
ttttactcatgaatt

SEQ ID NO: 572019 - DNA, 15 bp, Homo sapiens
tttactcatgaattt

SEQ ID NO: 572020 - DNA, 15 bp, Homo sapiens
ttactcatgaatttc

SEQ ID NO: 572021 - DNA, 15 bp, Homo sapiens
tactcatgaatttct

SEQ ID NO: 572022 - DNA, 15 bp, Homo sapiens
actcatgaatttctg

SEQ ID NO: 572023 - DNA, 15 bp, Homo sapiens
ctcatgaatttctgc

SEQ ID NO: 572024 - DNA, 15 bp, Homo sapiens
tcatgaatttctgcc

SEQ ID NO: 572025 - DNA, 15 bp, Homo sapiens
catgaatttctgcct

SEQ ID NO: 572026 - DNA, 15 bp, Homo sapiens
atgaatttctgcctc

SEQ ID NO: 572027 - DNA, 15 bp, Homo sapiens
tgaatttctgcctca

SEQ ID NO: 572028 - DNA, 15 bp, Homo sapiens
gaatttctgcctcac

SEQ ID NO: 572029 - DNA, 15 bp, Homo sapiens
aatttctgcctcacc

SEQ ID NO: 572030 - DNA, 15 bp, Homo sapiens
atttctgcctcaccg

SEQ ID NO: 572031 - DNA, 15 bp, Homo sapiens
tttctgcctcaccgt

SEQ ID NO: 572032 - DNA, 15 bp, Homo sapiens
ttctgcctcaccgtg

SEQ ID NO: 572033 - DNA, 15 bp, Homo sapiens
tctgcctcaccgtgg

SEQ ID NO: 572034 - DNA, 15 bp, Homo sapiens
ctgcctcaccgtgga

SEQ ID NO: 572035 - DNA, 15 bp, Homo sapiens
tgcctcaccgtggag

SEQ ID NO: 572036 - DNA, 15 bp, Homo sapiens
gcctcaccgtggagc

SEQ ID NO: 572037 - DNA, 15 bp, Homo sapiens
cctcaccgtggagct

SEQ ID NO: 572038 - DNA, 15 bp, Homo sapiens
ctcaccgtggagctc

SEQ ID NO: 572039 - DNA, 15 bp, Homo sapiens
tcaccgtggagctct

SEQ ID NO: 572040 - DNA, 15 bp, Homo sapiens
acatcaaggtttgaa

SEQ ID NO: 572041 - DNA, 15 bp, Homo sapiens
catcaaggtttgaac

SEQ ID NO: 572042 - DNA, 15 bp, Homo sapiens
atcaaggtttgaact

SEQ ID NO: 572043 - DNA, 15 bp, Homo sapiens
tcaaggtttgaactt

SEQ ID NO: 572044 - DNA, 15 bp, Homo sapiens
caaggtttgaactta

SEQ ID NO: 572045 - DNA, 15 bp, Homo sapiens
aaggtttgaacttag

SEQ ID NO: 572046 - DNA, 15 bp, Homo sapiens
aggtttgaacttagg

SEQ ID NO: 572047 - DNA, 15 bp, Homo sapiens
ggtttgaacttaggt

SEQ ID NO: 572048 - DNA, 15 bp, Homo sapiens
gtttgaacttaggtg

SEQ ID NO: 572049 - DNA, 15 bp, Homo sapiens
tttgaacttaggtgg

SEQ ID NO: 572050 - DNA, 15 bp, Homo sapiens
ttgaacttaggtggc

SEQ ID NO: 572051 - DNA, 15 bp, Homo sapiens
tgaacttaggtggct

SEQ ID NO: 572052 - DNA, 15 bp, Homo sapiens
gaacttaggtggcta

SEQ ID NO: 572053 - DNA, 15 bp, Homo sapiens
aacttaggtggctaa

SEQ ID NO: 572054 - DNA, 15 bp, Homo sapiens
acttaggtggctaat

SEQ ID NO: 572055 - DNA, 15 bp, Homo sapiens
cttaggtggctaata

SEQ ID NO: 572056 - DNA, 15 bp, Homo sapiens
ttaggtggctaataa

SEQ ID NO: 572057 - DNA, 15 bp, Homo sapiens
taggtggctaataac

SEQ ID NO: 572058 - DNA, 15 bp, Homo sapiens
aggtggctaataaca

SEQ ID NO: 572059 - DNA, 15 bp, Homo sapiens
ggtggctaataacat

SEQ ID NO: 572060 - DNA, 15 bp, Homo sapiens
gtggctaataacata

SEQ ID NO: 572061 - DNA, 15 bp, Homo sapiens
tggctaataacatac

SEQ ID NO: 572062 - DNA, 15 bp, Homo sapiens
ggctaataacatacc

SEQ ID NO: 572063 - DNA, 15 bp, Homo sapiens
gctaataacatacct

SEQ ID NO: 572064 - DNA, 15 bp, Homo sapiens
ctaataacatacctt

SEQ ID NO: 572065 - DNA, 15 bp, Homo sapiens
taataacataccttt

SEQ ID NO: 572066 - DNA, 15 bp, Homo sapiens
aataacatacctttt

SEQ ID NO: 572067 - DNA, 15 bp, Homo sapiens
ataacataccttttt

SEQ ID NO: 572068 - DNA, 15 bp, Homo sapiens
taacataccttttta

SEQ ID NO: 572069 - DNA, 15 bp, Homo sapiens
aacatacctttttaa

SEQ ID NO: 572070 - DNA, 15 bp, Homo sapiens
acatacctttttaaa

SEQ ID NO: 572071 - DNA, 15 bp, Homo sapiens
catacctttttaaaa

SEQ ID NO: 572072 - DNA, 15 bp, Homo sapiens
atacctttttaaaaa

SEQ ID NO: 572073 - DNA, 15 bp, Homo sapiens
tacctttttaaaaat

SEQ ID NO: 572074 - DNA, 15 bp, Homo sapiens
acctttttaaaaatg

SEQ ID NO: 572075 - DNA, 15 bp, Homo sapiens
cctttttaaaaatga

SEQ ID NO: 572076 - DNA, 15 bp, Homo sapiens
ctttttaaaaatgag

SEQ ID NO: 572077 - DNA, 15 bp, Homo sapiens
tttttaaaaatgaga

SEQ ID NO: 572078 - DNA, 15 bp, Homo sapiens
ttttaaaaatgagaa

SEQ ID NO: 572079 - DNA, 15 bp, Homo sapiens
tttaaaaatgagaat

SEQ ID NO: 572080 - DNA, 15 bp, Homo sapiens
ttaaaaatgagaatg

SEQ ID NO: 572081 - DNA, 15 bp, Homo sapiens
taaaaatgagaatga

SEQ ID NO: 572082 - DNA, 15 bp, Homo sapiens
aaaaatgagaatgaa

SEQ ID NO: 572083 - DNA, 15 bp, Homo sapiens
aaaatgagaatgaaa

SEQ ID NO: 572084 - DNA, 15 bp, Homo sapiens
aaatgagaatgaaac

SEQ ID NO: 572085 - DNA, 15 bp, Homo sapiens
aatgagaatgaaaca

SEQ ID NO: 572086 - DNA, 15 bp, Homo sapiens
atgagaatgaaacat

SEQ ID NO: 572087 - DNA, 15 bp, Homo sapiens
tgagaatgaaacatg

SEQ ID NO: 572088 - DNA, 15 bp, Homo sapiens
gagaatgaaacatgt

SEQ ID NO: 572089 - DNA, 15 bp, Homo sapiens
agaatgaaacatgtt

SEQ ID NO: 572090 - DNA, 15 bp, Homo sapiens
gaatgaaacatgttt

SEQ ID NO: 572091 - DNA, 15 bp, Homo sapiens
aatgaaacatgttta

SEQ ID NO: 572092 - DNA, 15 bp, Homo sapiens
atgaaacatgtttat

SEQ ID NO: 572093 - DNA, 15 bp, Homo sapiens
tgaaacatgtttata

SEQ ID NO: 572094 - DNA, 15 bp, Homo sapiens
gatggggtcccgctg

SEQ ID NO: 572095 - DNA, 15 bp, Homo sapiens
atggggtcccgctgt

SEQ ID NO: 572096 - DNA, 15 bp, Homo sapiens
tggggtcccgctgtg

SEQ ID NO: 572097 - DNA, 15 bp, Homo sapiens
ggggtcccgctgtgc

SEQ ID NO: 572098 - DNA, 15 bp, Homo sapiens
gggtcccgctgtgca

SEQ ID NO: 572099 - DNA, 15 bp, Homo sapiens
ggtcccgctgtgcag

SEQ ID NO: 572100 - DNA, 15 bp, Homo sapiens
gtcccgctgtgcagg

SEQ ID NO: 572101 - DNA, 15 bp, Homo sapiens
tcccgctgtgcagga

SEQ ID NO: 572102 - DNA, 15 bp, Homo sapiens
cccgctgtgcaggag

SEQ ID NO: 572103 - DNA, 15 bp, Homo sapiens
ccgctgtgcaggagc

SEQ ID NO: 572104 - DNA, 15 bp, Homo sapiens
cgctgtgcaggagca

SEQ ID NO: 572105 - DNA, 15 bp, Homo sapiens
gctgtgcaggagcac

SEQ ID NO: 572106 - DNA, 15 bp, Homo sapiens
ctgtgcaggagcacg

SEQ ID NO: 572107 - DNA, 15 bp, Homo sapiens
tgtgcaggagcacgt

SEQ ID NO: 572108 - DNA, 15 bp, Homo sapiens
gtgcaggagcacgtg

SEQ ID NO: 572109 - DNA, 15 bp, Homo sapiens
tgcaggagcacgtgt

SEQ ID NO: 572110 - DNA, 15 bp, Homo sapiens
gcaggagcacgtgtg

SEQ ID NO: 572111 - DNA, 15 bp, Homo sapiens
caggagcacgtgtga

SEQ ID NO: 572112 - DNA, 15 bp, Homo sapiens
aggagcacgtgtgaa

SEQ ID NO: 572113 - DNA, 15 bp, Homo sapiens
ggagcacgtgtgaag

SEQ ID NO: 572114 - DNA, 15 bp, Homo sapiens
gagcacgtgtgaagg

SEQ ID NO: 572115 - DNA, 15 bp, Homo sapiens
agcacgtgtgaaggg

SEQ ID NO: 572116 - DNA, 15 bp, Homo sapiens
gcacgtgtgaagggg

SEQ ID NO: 572117 - DNA, 15 bp, Homo sapiens
cacgtgtgaagggga

SEQ ID NO: 572118 - DNA, 15 bp, Homo sapiens
acgtgtgaaggggat

SEQ ID NO: 572119 - DNA, 15 bp, Homo sapiens
cgtgtgaaggggatg

SEQ ID NO: 572120 - DNA, 15 bp, Homo sapiens
gtgtgaaggggatgg

SEQ ID NO: 572121 - DNA, 15 bp, Homo sapiens
tgtgaaggggatggg

SEQ ID NO: 572122 - DNA, 15 bp, Homo sapiens
gtgaaggggatgggg

SEQ ID NO: 572123 - DNA, 15 bp, Homo sapiens
tgaaggggatggggg

SEQ ID NO: 572124 - DNA, 15 bp, Homo sapiens
gaaggggatgggggc

SEQ ID NO: 572125 - DNA, 15 bp, Homo sapiens
aaggggatgggggct

SEQ ID NO: 572126 - DNA, 15 bp, Homo sapiens
aggggatgggggctg

SEQ ID NO: 572127 - DNA, 15 bp, Homo sapiens
ggggatgggggctgg

SEQ ID NO: 572128 - DNA, 15 bp, Homo sapiens
gggatgggggctggc

SEQ ID NO: 572129 - DNA, 15 bp, Homo sapiens
ggatgggggctggca

SEQ ID NO: 572130 - DNA, 15 bp, Homo sapiens
gatgggggctggcac

SEQ ID NO: 572131 - DNA, 15 bp, Homo sapiens
atgggggctggcacc

SEQ ID NO: 572132 - DNA, 15 bp, Homo sapiens
tgggggctggcacct

SEQ ID NO: 572133 - DNA, 15 bp, Homo sapiens
gggggctggcacctg

SEQ ID NO: 572134 - DNA, 15 bp, Homo sapiens
ggggctggcacctga

SEQ ID NO: 572135 - DNA, 15 bp, Homo sapiens
gggctggcacctgag

SEQ ID NO: 572136 - DNA, 15 bp, Homo sapiens
ggctggcacctgagg

SEQ ID NO: 572137 - DNA, 15 bp, Homo sapiens
gctggcacctgaggg

SEQ ID NO: 572138 - DNA, 15 bp, Homo sapiens
ctggcacctgagggc

SEQ ID NO: 572139 - DNA, 15 bp, Homo sapiens
tggcacctgagggcg

SEQ ID NO: 572140 - DNA, 15 bp, Homo sapiens
ggcacctgagggcgc

SEQ ID NO: 572141 - DNA, 15 bp, Homo sapiens
gcacctgagggcgca

SEQ ID NO: 572142 - DNA, 15 bp, Homo sapiens
cacctgagggcgcag

SEQ ID NO: 572143 - DNA, 15 bp, Homo sapiens
acctgagggcgcagg

SEQ ID NO: 572144 - DNA, 15 bp, Homo sapiens
cctgagggcgcaggg

SEQ ID NO: 572145 - DNA, 15 bp, Homo sapiens
ctgagggcgcagggc

SEQ ID NO: 572146 - DNA, 15 bp, Homo sapiens
tgagggcgcagggcg

SEQ ID NO: 572147 - DNA, 15 bp, Homo sapiens
gagggcgcagggcgt

SEQ ID NO: 572148 - DNA, 15 bp, Homo sapiens
agggcgcagggcgtg

SEQ ID NO: 572149 - DNA, 15 bp, Homo sapiens
gggcgcagggcgtgg

SEQ ID NO: 572150 - DNA, 15 bp, Homo sapiens
ggcgcagggcgtggg

SEQ ID NO: 572151 - DNA, 15 bp, Homo sapiens
gcgcagggcgtgggg

SEQ ID NO: 572152 - DNA, 15 bp, Homo sapiens
cgcagggcgtggggt

SEQ ID NO: 572153 - DNA, 15 bp, Homo sapiens
gcagggcgtggggtg

SEQ ID NO: 572154 - DNA, 15 bp, Homo sapiens
cagggcgtggggtgg

SEQ ID NO: 572155 - DNA, 15 bp, Homo sapiens
agggcgtggggtggg

SEQ ID NO: 572156 - DNA, 15 bp, Homo sapiens
gggcgtggggtgggc

SEQ ID NO: 572157 - DNA, 15 bp, Homo sapiens
ggcgtggggtgggcc

SEQ ID NO: 572158 - DNA, 15 bp, Homo sapiens
gcgtggggtgggccc

SEQ ID NO: 572159 - DNA, 15 bp, Homo sapiens
cgtggggtgggcccc

SEQ ID NO: 572160 - DNA, 15 bp, Homo sapiens
gtggggtgggccccg

SEQ ID NO: 572161 - DNA, 15 bp, Homo sapiens
tggggtgggccccgg

SEQ ID NO: 572162 - DNA, 15 bp, Homo sapiens
ggggtgggccccggc

SEQ ID NO: 572163 - DNA, 15 bp, Homo sapiens
gggtgggccccggca

SEQ ID NO: 572164 - DNA, 15 bp, Homo sapiens
ggtgggccccggcac

SEQ ID NO: 572165 - DNA, 15 bp, Homo sapiens
gtgggccccggcacc

SEQ ID NO: 572166 - DNA, 15 bp, Homo sapiens
tgggccccggcaccc

SEQ ID NO: 572167 - DNA, 15 bp, Homo sapiens
gggccccggcacccc

SEQ ID NO: 572168 - DNA, 15 bp, Homo sapiens
ggccccggcacccct

SEQ ID NO: 572169 - DNA, 15 bp, Homo sapiens
gccccggcacccctg

SEQ ID NO: 572170 - DNA, 15 bp, Homo sapiens
ccccggcacccctga

SEQ ID NO: 572171 - DNA, 15 bp, Homo sapiens
cccggcacccctgat

SEQ ID NO: 572172 - DNA, 15 bp, Homo sapiens
ccggcacccctgatc

SEQ ID NO: 572173 - DNA, 15 bp, Homo sapiens
cggcacccctgatct

SEQ ID NO: 572174 - DNA, 15 bp, Homo sapiens
ggcacccctgatctg

SEQ ID NO: 572175 - DNA, 15 bp, Homo sapiens
gcacccctgatctgg

SEQ ID NO: 572176 - DNA, 15 bp, Homo sapiens
cacccctgatctggt

SEQ ID NO: 572177 - DNA, 15 bp, Homo sapiens
acccctgatctggta

SEQ ID NO: 572178 - DNA, 15 bp, Homo sapiens
cccctgatctggtac

SEQ ID NO: 572179 - DNA, 15 bp, Homo sapiens
ccctgatctggtaca

SEQ ID NO: 572180 - DNA, 15 bp, Homo sapiens
cctgatctggtacag

SEQ ID NO: 572181 - DNA, 15 bp, Homo sapiens
ctgatctggtacagt

SEQ ID NO: 572182 - DNA, 15 bp, Homo sapiens
tgatctggtacagtg

SEQ ID NO: 572183 - DNA, 15 bp, Homo sapiens
gatctggtacagtgt

SEQ ID NO: 572184 - DNA, 15 bp, Homo sapiens
atctggtacagtgtc

SEQ ID NO: 572185 - DNA, 15 bp, Homo sapiens
tctggtacagtgtct

SEQ ID NO: 572186 - DNA, 15 bp, Homo sapiens
ctggtacagtgtctg

SEQ ID NO: 572187 - DNA, 15 bp, Homo sapiens
tggtacagtgtctgg

SEQ ID NO: 572188 - DNA, 15 bp, Homo sapiens
ggtacagtgtctggc

SEQ ID NO: 572189 - DNA, 15 bp, Homo sapiens
gtacagtgtctggcc

SEQ ID NO: 572190 - DNA, 15 bp, Homo sapiens
tacagtgtctggcct

SEQ ID NO: 572191 - DNA, 15 bp, Homo sapiens
acagtgtctggcctg

SEQ ID NO: 572192 - DNA, 15 bp, Homo sapiens
cagtgtctggcctgc

SEQ ID NO: 572193 - DNA, 15 bp, Homo sapiens
agtgtctggcctgcc

SEQ ID NO: 572194 - DNA, 15 bp, Homo sapiens
gtgtctggcctgccc

SEQ ID NO: 572195 - DNA, 15 bp, Homo sapiens
tgtctggcctgcccc

SEQ ID NO: 572196 - DNA, 15 bp, Homo sapiens
gtctggcctgcccca

SEQ ID NO: 572197 - DNA, 15 bp, Homo sapiens
tctggcctgccccat

SEQ ID NO: 572198 - DNA, 15 bp, Homo sapiens
ctggcctgccccatg

SEQ ID NO: 572199 - DNA, 15 bp, Homo sapiens
tggcctgccccatgg

SEQ ID NO: 572200 - DNA, 15 bp, Homo sapiens
ggcctgccccatggg

SEQ ID NO: 572201 - DNA, 15 bp, Homo sapiens
gcctgccccatgggg

SEQ ID NO: 572202 - DNA, 15 bp, Homo sapiens
cctgccccatggggc

SEQ ID NO: 572203 - DNA, 15 bp, Homo sapiens
ctgccccatggggcc

SEQ ID NO: 572204 - DNA, 15 bp, Homo sapiens
tgccccatggggccg

SEQ ID NO: 572205 - DNA, 15 bp, Homo sapiens
gccccatggggccgg

SEQ ID NO: 572206 - DNA, 15 bp, Homo sapiens
ccccatggggccggc

SEQ ID NO: 572207 - DNA, 15 bp, Homo sapiens
cccatggggccggcc

SEQ ID NO: 572208 - DNA, 15 bp, Homo sapiens
ccatggggccggccc

SEQ ID NO: 572209 - DNA, 15 bp, Homo sapiens
catggggccggcccg

SEQ ID NO: 572210 - DNA, 15 bp, Homo sapiens
atggggccggcccgt

SEQ ID NO: 572211 - DNA, 15 bp, Homo sapiens
tggggccggcccgtc

SEQ ID NO: 572212 - DNA, 15 bp, Homo sapiens
ggggccggcccgtcc

SEQ ID NO: 572213 - DNA, 15 bp, Homo sapiens
gggccggcccgtcct

SEQ ID NO: 572214 - DNA, 15 bp, Homo sapiens
ggccggcccgtcctt

SEQ ID NO: 572215 - DNA, 15 bp, Homo sapiens
gccggcccgtccttg

SEQ ID NO: 572216 - DNA, 15 bp, Homo sapiens
ccggcccgtccttgc

SEQ ID NO: 572217 - DNA, 15 bp, Homo sapiens
cggcccgtccttgcc

SEQ ID NO: 572218 - DNA, 15 bp, Homo sapiens
ggcccgtccttgccc

SEQ ID NO: 572219 - DNA, 15 bp, Homo sapiens
gcccgtccttgccca

SEQ ID NO: 572220 - DNA, 15 bp, Homo sapiens
cccgtccttgcccag

SEQ ID NO: 572221 - DNA, 15 bp, Homo sapiens
ccgtccttgcccagc

SEQ ID NO: 572222 - DNA, 15 bp, Homo sapiens
cgtccttgcccagcc

SEQ ID NO: 572223 - DNA, 15 bp, Homo sapiens
gtccttgcccagcct

SEQ ID NO: 572224 - DNA, 15 bp, Homo sapiens
tccttgcccagcctc

SEQ ID NO: 572225 - DNA, 15 bp, Homo sapiens
ccttgcccagcctct

SEQ ID NO: 572226 - DNA, 15 bp, Homo sapiens
cttgcccagcctctc

SEQ ID NO: 572227 - DNA, 15 bp, Homo sapiens
ttgcccagcctctcc

SEQ ID NO: 572228 - DNA, 15 bp, Homo sapiens
tgcccagcctctcct

SEQ ID NO: 572229 - DNA, 15 bp, Homo sapiens
gcccagcctctcctg

SEQ ID NO: 572230 - DNA, 15 bp, Homo sapiens
cccagcctctcctgc

SEQ ID NO: 572231 - DNA, 15 bp, Homo sapiens
ccagcctctcctgcc

SEQ ID NO: 572232 - DNA, 15 bp, Homo sapiens
cagcctctcctgcca

SEQ ID NO: 572233 - DNA, 15 bp, Homo sapiens
agcctctcctgccac

SEQ ID NO: 572234 - DNA, 15 bp, Homo sapiens
gcctctcctgccact

SEQ ID NO: 572235 - DNA, 15 bp, Homo sapiens
cctctcctgccactc

SEQ ID NO: 572236 - DNA, 15 bp, Homo sapiens
ctctcctgccactct

SEQ ID NO: 572237 - DNA, 15 bp, Homo sapiens
tctcctgccactctg

SEQ ID NO: 572238 - DNA, 15 bp, Homo sapiens
ctcctgccactctgt

SEQ ID NO: 572239 - DNA, 15 bp, Homo sapiens
tcctgccactctgtc

SEQ ID NO: 572240 - DNA, 15 bp, Homo sapiens
cctgccactctgtct

SEQ ID NO: 572241 - DNA, 15 bp, Homo sapiens
ctgccactctgtctt

SEQ ID NO: 572242 - DNA, 15 bp, Homo sapiens
tgccactctgtcttt

SEQ ID NO: 572243 - DNA, 15 bp, Homo sapiens
gccactctgtctttg

SEQ ID NO: 572244 - DNA, 15 bp, Homo sapiens
ccactctgtctttgt

SEQ ID NO: 572245 - DNA, 15 bp, Homo sapiens
cactctgtctttgtc

SEQ ID NO: 572246 - DNA, 15 bp, Homo sapiens
actctgtctttgtcc

SEQ ID NO: 572247 - DNA, 15 bp, Homo sapiens
ctctgtctttgtccc

SEQ ID NO: 572248 - DNA, 15 bp, Homo sapiens
tctgtctttgtccct

SEQ ID NO: 572249 - DNA, 15 bp, Homo sapiens
ctgtctttgtccctc

SEQ ID NO: 572250 - DNA, 15 bp, Homo sapiens
tgtctttgtccctcc

SEQ ID NO: 572251 - DNA, 15 bp, Homo sapiens
gtctttgtccctcct

SEQ ID NO: 572252 - DNA, 15 bp, Homo sapiens
tctttgtccctcctg

SEQ ID NO: 572253 - DNA, 15 bp, Homo sapiens
ctttgtccctcctgg

SEQ ID NO: 572254 - DNA, 15 bp, Homo sapiens
tttgtccctcctggc

SEQ ID NO: 572255 - DNA, 15 bp, Homo sapiens
ttgtccctcctggct

SEQ ID NO: 572256 - DNA, 15 bp, Homo sapiens
tgtccctcctggctg

SEQ ID NO: 572257 - DNA, 15 bp, Homo sapiens
gtccctcctggctgc

SEQ ID NO: 572258 - DNA, 15 bp, Homo sapiens
tccctcctggctgcc

SEQ ID NO: 572259 - DNA, 15 bp, Homo sapiens
ccctcctggctgccg

SEQ ID NO: 572260 - DNA, 15 bp, Homo sapiens
cctcctggctgccgc

SEQ ID NO: 572261 - DNA, 15 bp, Homo sapiens
ctcctggctgccgct

SEQ ID NO: 572262 - DNA, 15 bp, Homo sapiens
tcctggctgccgctg

SEQ ID NO: 572263 - DNA, 15 bp, Homo sapiens
cctggctgccgctgc

SEQ ID NO: 572264 - DNA, 15 bp, Homo sapiens
ctggctgccgctgcc

SEQ ID NO: 572265 - DNA, 15 bp, Homo sapiens
tggctgccgctgccc

SEQ ID NO: 572266 - DNA, 15 bp, Homo sapiens
ggctgccgctgcccg

SEQ ID NO: 572267 - DNA, 15 bp, Homo sapiens
gctgccgctgcccgg

SEQ ID NO: 572268 - DNA, 15 bp, Homo sapiens
ctgccgctgcccggc

SEQ ID NO: 572269 - DNA, 15 bp, Homo sapiens
tgccgctgcccggct

SEQ ID NO: 572270 - DNA, 15 bp, Homo sapiens
gccgctgcccggctc

SEQ ID NO: 572271 - DNA, 15 bp, Homo sapiens
ccgctgcccggctca

SEQ ID NO: 572272 - DNA, 15 bp, Homo sapiens
cgctgcccggctcat

SEQ ID NO: 572273 - DNA, 15 bp, Homo sapiens
gctgcccggctcatc

SEQ ID NO: 572274 - DNA, 15 bp, Homo sapiens
ctgcccggctcatct

SEQ ID NO: 572275 - DNA, 15 bp, Homo sapiens
tgcccggctcatctc

SEQ ID NO: 572276 - DNA, 15 bp, Homo sapiens
gcccggctcatctct

SEQ ID NO: 572277 - DNA, 15 bp, Homo sapiens
cccggctcatctctc

SEQ ID NO: 572278 - DNA, 15 bp, Homo sapiens
ccggctcatctctcc

SEQ ID NO: 572279 - DNA, 15 bp, Homo sapiens
cggctcatctctccc

SEQ ID NO: 572280 - DNA, 15 bp, Homo sapiens
ggctcatctctccct

SEQ ID NO: 572281 - DNA, 15 bp, Homo sapiens
gctcatctctccctc

SEQ ID NO: 572282 - DNA, 15 bp, Homo sapiens
ctcatctctccctcc

SEQ ID NO: 572283 - DNA, 15 bp, Homo sapiens
tcatctctccctccg

SEQ ID NO: 572284 - DNA, 15 bp, Homo sapiens
catctctccctccgt

SEQ ID NO: 572285 - DNA, 15 bp, Homo sapiens
atctctccctccgtg

SEQ ID NO: 572286 - DNA, 15 bp, Homo sapiens
tctctccctccgtgg

SEQ ID NO: 572287 - DNA, 15 bp, Homo sapiens
ctctccctccgtggc

SEQ ID NO: 572288 - DNA, 15 bp, Homo sapiens
tctccctccgtggct

SEQ ID NO: 572289 - DNA, 15 bp, Homo sapiens
ctccctccgtggctc

SEQ ID NO: 572290 - DNA, 15 bp, Homo sapiens
tccctccgtggctcg

SEQ ID NO: 572291 - DNA, 15 bp, Homo sapiens
ccctccgtggctcgg

SEQ ID NO: 572292 - DNA, 15 bp, Homo sapiens
cctccgtggctcggg

SEQ ID NO: 572293 - DNA, 15 bp, Homo sapiens
ctccgtggctcgggg

SEQ ID NO: 572294 - DNA, 15 bp, Homo sapiens
tccgtggctcgggga

SEQ ID NO: 572295 - DNA, 15 bp, Homo sapiens
ccgtggctcggggag

SEQ ID NO: 572296 - DNA, 15 bp, Homo sapiens
cgtggctcggggagc

SEQ ID NO: 572297 - DNA, 15 bp, Homo sapiens
gtggctcggggagcg

SEQ ID NO: 572298 - DNA, 15 bp, Homo sapiens
tggctcggggagcgc

SEQ ID NO: 572299 - DNA, 15 bp, Homo sapiens
ggctcggggagcgct

SEQ ID NO: 572300 - DNA, 15 bp, Homo sapiens
gctcggggagcgctc

SEQ ID NO: 572301 - DNA, 15 bp, Homo sapiens
ctcggggagcgctct

SEQ ID NO: 572302 - DNA, 15 bp, Homo sapiens
tcggggagcgctctc

SEQ ID NO: 572303 - DNA, 15 bp, Homo sapiens
cggggagcgctctct

SEQ ID NO: 572304 - DNA, 15 bp, Homo sapiens
ggggagcgctctctc

SEQ ID NO: 572305 - DNA, 15 bp, Homo sapiens
gggagcgctctctcg

SEQ ID NO: 572306 - DNA, 15 bp, Homo sapiens
ggagcgctctctcgc

SEQ ID NO: 572307 - DNA, 15 bp, Homo sapiens
gagcgctctctcgca

SEQ ID NO: 572308 - DNA, 15 bp, Homo sapiens
agcgctctctcgcag

SEQ ID NO: 572309 - DNA, 15 bp, Homo sapiens
gcgctctctcgcagc

SEQ ID NO: 572310 - DNA, 15 bp, Homo sapiens
cgctctctcgcagct

SEQ ID NO: 572311 - DNA, 15 bp, Homo sapiens
gctctctcgcagctg

SEQ ID NO: 572312 - DNA, 15 bp, Homo sapiens
ctctctcgcagctgt

SEQ ID NO: 572313 - DNA, 15 bp, Homo sapiens
tctctcgcagctgtc

SEQ ID NO: 572314 - DNA, 15 bp, Homo sapiens
ctctcgcagctgtct

SEQ ID NO: 572315 - DNA, 15 bp, Homo sapiens
tctcgcagctgtctt

SEQ ID NO: 572316 - DNA, 15 bp, Homo sapiens
ctcgcagctgtcttt

SEQ ID NO: 572317 - DNA, 15 bp, Homo sapiens
tcgcagctgtctttc

SEQ ID NO: 572318 - DNA, 15 bp, Homo sapiens
cgcagctgtctttct

SEQ ID NO: 572319 - DNA, 15 bp, Homo sapiens
gcagctgtctttctc

SEQ ID NO: 572320 - DNA, 15 bp, Homo sapiens
cagctgtctttctca

SEQ ID NO: 572321 - DNA, 15 bp, Homo sapiens
agctgtctttctcag

SEQ ID NO: 572322 - DNA, 15 bp, Homo sapiens
gctgtctttctcaga

SEQ ID NO: 572323 - DNA, 15 bp, Homo sapiens
ctgtctttctcagat

SEQ ID NO: 572324 - DNA, 15 bp, Homo sapiens
tgtctttctcagatg

SEQ ID NO: 572325 - DNA, 15 bp, Homo sapiens
gtctttctcagatgc

SEQ ID NO: 572326 - DNA, 15 bp, Homo sapiens
tctttctcagatgcc

SEQ ID NO: 572327 - DNA, 15 bp, Homo sapiens
ctttctcagatgccc

SEQ ID NO: 572328 - DNA, 15 bp, Homo sapiens
tttctcagatgcccc

SEQ ID NO: 572329 - DNA, 15 bp, Homo sapiens
ttctcagatgcccca

SEQ ID NO: 572330 - DNA, 15 bp, Homo sapiens
tctcagatgccccac

SEQ ID NO: 572331 - DNA, 15 bp, Homo sapiens
ctcagatgccccact

SEQ ID NO: 572332 - DNA, 15 bp, Homo sapiens
tcagatgccccactt

SEQ ID NO: 572333 - DNA, 15 bp, Homo sapiens
cagatgccccacttc

SEQ ID NO: 572334 - DNA, 15 bp, Homo sapiens
agatgccccacttct

SEQ ID NO: 572335 - DNA, 15 bp, Homo sapiens
gatgccccacttctc

SEQ ID NO: 572336 - DNA, 15 bp, Homo sapiens
atgccccacttctct

SEQ ID NO: 572337 - DNA, 15 bp, Homo sapiens
tgccccacttctctg

SEQ ID NO: 572338 - DNA, 15 bp, Homo sapiens
gccccacttctctgt

SEQ ID NO: 572339 - DNA, 15 bp, Homo sapiens
ccccacttctctgtc

SEQ ID NO: 572340 - DNA, 15 bp, Homo sapiens
cccacttctctgtcc

SEQ ID NO: 572341 - DNA, 15 bp, Homo sapiens
ccacttctctgtcct

SEQ ID NO: 572342 - DNA, 15 bp, Homo sapiens
cacttctctgtcctc

SEQ ID NO: 572343 - DNA, 15 bp, Homo sapiens
acttctctgtcctct

SEQ ID NO: 572344 - DNA, 15 bp, Homo sapiens
cttctctgtcctctg

SEQ ID NO: 572345 - DNA, 15 bp, Homo sapiens
ttctctgtcctctgg

SEQ ID NO: 572346 - DNA, 15 bp, Homo sapiens
tctctgtcctctggt

SEQ ID NO: 572347 - DNA, 15 bp, Homo sapiens
ctctgtcctctggtt

SEQ ID NO: 572348 - DNA, 15 bp, Homo sapiens
tctgtcctctggttc

SEQ ID NO: 572349 - DNA, 15 bp, Homo sapiens
ctgtcctctggttct

SEQ ID NO: 572350 - DNA, 15 bp, Homo sapiens
tgtcctctggttctg

SEQ ID NO: 572351 - DNA, 15 bp, Homo sapiens
gtcctctggttctgt

SEQ ID NO: 572352 - DNA, 15 bp, Homo sapiens
tcctctggttctgtg

SEQ ID NO: 572353 - DNA, 15 bp, Homo sapiens
cctctggttctgtgt

SEQ ID NO: 572354 - DNA, 15 bp, Homo sapiens
ctctggttctgtgtc

SEQ ID NO: 572355 - DNA, 15 bp, Homo sapiens
tctggttctgtgtct

SEQ ID NO: 572356 - DNA, 15 bp, Homo sapiens
ctggttctgtgtctg

SEQ ID NO: 572357 - DNA, 15 bp, Homo sapiens
tggttctgtgtctgc

SEQ ID NO: 572358 - DNA, 15 bp, Homo sapiens
ggttctgtgtctgcc

SEQ ID NO: 572359 - DNA, 15 bp, Homo sapiens
gttctgtgtctgcca

SEQ ID NO: 572360 - DNA, 15 bp, Homo sapiens
ttctgtgtctgccac

SEQ ID NO: 572361 - DNA, 15 bp, Homo sapiens
tctgtgtctgccacc

SEQ ID NO: 572362 - DNA, 15 bp, Homo sapiens
ctgtgtctgccacca

SEQ ID NO: 572363 - DNA, 15 bp, Homo sapiens
tgtgtctgccaccac

SEQ ID NO: 572364 - DNA, 15 bp, Homo sapiens
gtgtctgccaccacc

SEQ ID NO: 572365 - DNA, 15 bp, Homo sapiens
tgtctgccaccacct

SEQ ID NO: 572366 - DNA, 15 bp, Homo sapiens
gtctgccaccacctg

SEQ ID NO: 572367 - DNA, 15 bp, Homo sapiens
tctgccaccacctgt

SEQ ID NO: 572368 - DNA, 15 bp, Homo sapiens
ctgccaccacctgtc

SEQ ID NO: 572369 - DNA, 15 bp, Homo sapiens
tgccaccacctgtct

SEQ ID NO: 572370 - DNA, 15 bp, Homo sapiens
gccaccacctgtctg

SEQ ID NO: 572371 - DNA, 15 bp, Homo sapiens
ccaccacctgtctgt

SEQ ID NO: 572372 - DNA, 15 bp, Homo sapiens
caccacctgtctgtg

SEQ ID NO: 572373 - DNA, 15 bp, Homo sapiens
accacctgtctgtgt

SEQ ID NO: 572374 - DNA, 15 bp, Homo sapiens
ccacctgtctgtgtc

SEQ ID NO: 572375 - DNA, 15 bp, Homo sapiens
cacctgtctgtgtcc

SEQ ID NO: 572376 - DNA, 15 bp, Homo sapiens
acctgtctgtgtcct

SEQ ID NO: 572377 - DNA, 15 bp, Homo sapiens
cctgtctgtgtcctg

SEQ ID NO: 572378 - DNA, 15 bp, Homo sapiens
ctgtctgtgtcctgt

SEQ ID NO: 572379 - DNA, 15 bp, Homo sapiens
tgtctgtgtcctgtc

SEQ ID NO: 572380 - DNA, 15 bp, Homo sapiens
gtctgtgtcctgtct

SEQ ID NO: 572381 - DNA, 15 bp, Homo sapiens
tctgtgtcctgtctc

SEQ ID NO: 572382 - DNA, 15 bp, Homo sapiens
ctgtgtcctgtctct

SEQ ID NO: 572383 - DNA, 15 bp, Homo sapiens
tgtgtcctgtctctc

SEQ ID NO: 572384 - DNA, 15 bp, Homo sapiens
gtgtcctgtctctcc

SEQ ID NO: 572385 - DNA, 15 bp, Homo sapiens
tgtcctgtctctcca

SEQ ID NO: 572386 - DNA, 15 bp, Homo sapiens
gtcctgtctctccac

SEQ ID NO: 572387 - DNA, 15 bp, Homo sapiens
tcctgtctctccacc

SEQ ID NO: 572388 - DNA, 15 bp, Homo sapiens
cctgtctctccacct

SEQ ID NO: 572389 - DNA, 15 bp, Homo sapiens
ctgtctctccacctc

SEQ ID NO: 572390 - DNA, 15 bp, Homo sapiens
tgtctctccacctcc

SEQ ID NO: 572391 - DNA, 15 bp, Homo sapiens
gtctctccacctccc

SEQ ID NO: 572392 - DNA, 15 bp, Homo sapiens
tctctccacctcccc

SEQ ID NO: 572393 - DNA, 15 bp, Homo sapiens
ctctccacctccccc

SEQ ID NO: 572394 - DNA, 15 bp, Homo sapiens
tctccacctccccct

SEQ ID NO: 572395 - DNA, 15 bp, Homo sapiens
ctccacctccccctc

SEQ ID NO: 572396 - DNA, 15 bp, Homo sapiens
tccacctccccctcc

SEQ ID NO: 572397 - DNA, 15 bp, Homo sapiens
ccacctccccctcca

SEQ ID NO: 572398 - DNA, 15 bp, Homo sapiens
cacctccccctccat

SEQ ID NO: 572399 - DNA, 15 bp, Homo sapiens
acctccccctccatg

SEQ ID NO: 572400 - DNA, 15 bp, Homo sapiens
cctccccctccatgt

SEQ ID NO: 572401 - DNA, 15 bp, Homo sapiens
ctccccctccatgtc

SEQ ID NO: 572402 - DNA, 15 bp, Homo sapiens
tccccctccatgtct

SEQ ID NO: 572403 - DNA, 15 bp, Homo sapiens
ccccctccatgtctg

SEQ ID NO: 572404 - DNA, 15 bp, Homo sapiens
cccctccatgtctgg

SEQ ID NO: 572405 - DNA, 15 bp, Homo sapiens
ccctccatgtctggc

SEQ ID NO: 572406 - DNA, 15 bp, Homo sapiens
cctccatgtctggct

SEQ ID NO: 572407 - DNA, 15 bp, Homo sapiens
ctccatgtctggctc

SEQ ID NO: 572408 - DNA, 15 bp, Homo sapiens
tccatgtctggctct

SEQ ID NO: 572409 - DNA, 15 bp, Homo sapiens
ccatgtctggctctg

SEQ ID NO: 572410 - DNA, 15 bp, Homo sapiens
catgtctggctctgt

SEQ ID NO: 572411 - DNA, 15 bp, Homo sapiens
atgtctggctctgtc

SEQ ID NO: 572412 - DNA, 15 bp, Homo sapiens
tgtctggctctgtct

SEQ ID NO: 572413 - DNA, 15 bp, Homo sapiens
gtctggctctgtctc

SEQ ID NO: 572414 - DNA, 15 bp, Homo sapiens
tctggctctgtctcc

SEQ ID NO: 572415 - DNA, 15 bp, Homo sapiens
ctggctctgtctccc

SEQ ID NO: 572416 - DNA, 15 bp, Homo sapiens
tggctctgtctccct

SEQ ID NO: 572417 - DNA, 15 bp, Homo sapiens
ggctctgtctccctc

SEQ ID NO: 572418 - DNA, 15 bp, Homo sapiens
gctctgtctccctca

SEQ ID NO: 572419 - DNA, 15 bp, Homo sapiens
ctctgtctccctcag

SEQ ID NO: 572420 - DNA, 15 bp, Homo sapiens
tctgtctccctcagg

SEQ ID NO: 572421 - DNA, 15 bp, Homo sapiens
ctgtctccctcaggt

SEQ ID NO: 572422 - DNA, 15 bp, Homo sapiens
tgtctccctcaggtc

SEQ ID NO: 572423 - DNA, 15 bp, Homo sapiens
gtctccctcaggtcc

SEQ ID NO: 572424 - DNA, 15 bp, Homo sapiens
tctccctcaggtccc

SEQ ID NO: 572425 - DNA, 15 bp, Homo sapiens
ctccctcaggtccca

SEQ ID NO: 572426 - DNA, 15 bp, Homo sapiens
tccctcaggtcccag

SEQ ID NO: 572427 - DNA, 15 bp, Homo sapiens
ccctcaggtcccagg

SEQ ID NO: 572428 - DNA, 15 bp, Homo sapiens
cctcaggtcccaggc

SEQ ID NO: 572429 - DNA, 15 bp, Homo sapiens
ctcaggtcccaggcc

SEQ ID NO: 572430 - DNA, 15 bp, Homo sapiens
tcaggtcccaggccc

SEQ ID NO: 572431 - DNA, 15 bp, Homo sapiens
caggtcccaggccca

SEQ ID NO: 572432 - DNA, 15 bp, Homo sapiens
aggtcccaggcccag

SEQ ID NO: 572433 - DNA, 15 bp, Homo sapiens
ggtcccaggcccagc

SEQ ID NO: 572434 - DNA, 15 bp, Homo sapiens
gtcccaggcccagcc

SEQ ID NO: 572435 - DNA, 15 bp, Homo sapiens
tcccaggcccagccc

SEQ ID NO: 572436 - DNA, 15 bp, Homo sapiens
cccaggcccagcccc

SEQ ID NO: 572437 - DNA, 15 bp, Homo sapiens
ccaggcccagccccc

SEQ ID NO: 572438 - DNA, 15 bp, Homo sapiens
caggcccagccccct

SEQ ID NO: 572439 - DNA, 15 bp, Homo sapiens
aggcccagccccctg

SEQ ID NO: 572440 - DNA, 15 bp, Homo sapiens
ggcccagccccctgg

SEQ ID NO: 572441 - DNA, 15 bp, Homo sapiens
gcccagccccctggg

SEQ ID NO: 572442 - DNA, 15 bp, Homo sapiens
cccagccccctgggt

SEQ ID NO: 572443 - DNA, 15 bp, Homo sapiens
ccagccccctgggtc

SEQ ID NO: 572444 - DNA, 15 bp, Homo sapiens
cagccccctgggtct

SEQ ID NO: 572445 - DNA, 15 bp, Homo sapiens
agccccctgggtctc

SEQ ID NO: 572446 - DNA, 15 bp, Homo sapiens
gccccctgggtctca

SEQ ID NO: 572447 - DNA, 15 bp, Homo sapiens
ccccctgggtctcaa

SEQ ID NO: 572448 - DNA, 15 bp, Homo sapiens
cccctgggtctcaag

SEQ ID NO: 572449 - DNA, 15 bp, Homo sapiens
ccctgggtctcaagt

SEQ ID NO: 572450 - DNA, 15 bp, Homo sapiens
cctgggtctcaagtt

SEQ ID NO: 572451 - DNA, 15 bp, Homo sapiens
ctgggtctcaagttc

SEQ ID NO: 572452 - DNA, 15 bp, Homo sapiens
tgggtctcaagttca

SEQ ID NO: 572453 - DNA, 15 bp, Homo sapiens
gggtctcaagttcac

SEQ ID NO: 572454 - DNA, 15 bp, Homo sapiens
ggtctcaagttcact

SEQ ID NO: 572455 - DNA, 15 bp, Homo sapiens
gtctcaagttcactc

SEQ ID NO: 572456 - DNA, 15 bp, Homo sapiens
tctcaagttcactct

SEQ ID NO: 572457 - DNA, 15 bp, Homo sapiens
ctcaagttcactctc

SEQ ID NO: 572458 - DNA, 15 bp, Homo sapiens
tcaagttcactctct

SEQ ID NO: 572459 - DNA, 15 bp, Homo sapiens
caagttcactctctg

SEQ ID NO: 572460 - DNA, 15 bp, Homo sapiens
aagttcactctctgt

SEQ ID NO: 572461 - DNA, 15 bp, Homo sapiens
agttcactctctgtg

SEQ ID NO: 572462 - DNA, 15 bp, Homo sapiens
gttcactctctgtgg

SEQ ID NO: 572463 - DNA, 15 bp, Homo sapiens
ttcactctctgtggg

SEQ ID NO: 572464 - DNA, 15 bp, Homo sapiens
tcactctctgtgggg

SEQ ID NO: 572465 - DNA, 15 bp, Homo sapiens
cactctctgtggggt

SEQ ID NO: 572466 - DNA, 15 bp, Homo sapiens
actctctgtggggtg

SEQ ID NO: 572467 - DNA, 15 bp, Homo sapiens
ctctctgtggggtga

SEQ ID NO: 572468 - DNA, 15 bp, Homo sapiens
tctctgtggggtgag

SEQ ID NO: 572469 - DNA, 15 bp, Homo sapiens
ctctgtggggtgagg

SEQ ID NO: 572470 - DNA, 15 bp, Homo sapiens
tctgtggggtgaggg

SEQ ID NO: 572471 - DNA, 15 bp, Homo sapiens
ctgtggggtgagggg

SEQ ID NO: 572472 - DNA, 15 bp, Homo sapiens
tgtggggtgaggggt

SEQ ID NO: 572473 - DNA, 15 bp, Homo sapiens
gtggggtgaggggtg

SEQ ID NO: 572474 - DNA, 15 bp, Homo sapiens
tggggtgaggggtgc

SEQ ID NO: 572475 - DNA, 15 bp, Homo sapiens
ggggtgaggggtgct

SEQ ID NO: 572476 - DNA, 15 bp, Homo sapiens
gggtgaggggtgctg

SEQ ID NO: 572477 - DNA, 15 bp, Homo sapiens
ggtgaggggtgctgc

SEQ ID NO: 572478 - DNA, 15 bp, Homo sapiens
gtgaggggtgctgct

SEQ ID NO: 572479 - DNA, 15 bp, Homo sapiens
tgaggggtgctgctc

SEQ ID NO: 572480 - DNA, 15 bp, Homo sapiens
gaggggtgctgctca

SEQ ID NO: 572481 - DNA, 15 bp, Homo sapiens
aggggtgctgctcag

SEQ ID NO: 572482 - DNA, 15 bp, Homo sapiens
ggggtgctgctcagg

SEQ ID NO: 572483 - DNA, 15 bp, Homo sapiens
gggtgctgctcaggc

SEQ ID NO: 572484 - DNA, 15 bp, Homo sapiens
ggtgctgctcaggcg

SEQ ID NO: 572485 - DNA, 15 bp, Homo sapiens
gtgctgctcaggcgc

SEQ ID NO: 572486 - DNA, 15 bp, Homo sapiens
tgctgctcaggcgca

SEQ ID NO: 572487 - DNA, 15 bp, Homo sapiens
gctgctcaggcgcag

SEQ ID NO: 572488 - DNA, 15 bp, Homo sapiens
ctgctcaggcgcagc

SEQ ID NO: 572489 - DNA, 15 bp, Homo sapiens
tgctcaggcgcagct

SEQ ID NO: 572490 - DNA, 15 bp, Homo sapiens
gctcaggcgcagctc

SEQ ID NO: 572491 - DNA, 15 bp, Homo sapiens
ctcaggcgcagctct

SEQ ID NO: 572492 - DNA, 15 bp, Homo sapiens
tcaggcgcagctctg

SEQ ID NO: 572493 - DNA, 15 bp, Homo sapiens
caggcgcagctctgc

SEQ ID NO: 572494 - DNA, 15 bp, Homo sapiens
aggcgcagctctgcc

SEQ ID NO: 572495 - DNA, 15 bp, Homo sapiens
ggcgcagctctgccc

SEQ ID NO: 572496 - DNA, 15 bp, Homo sapiens
gcgcagctctgcccc

SEQ ID NO: 572497 - DNA, 15 bp, Homo sapiens
cgcagctctgccccg

SEQ ID NO: 572498 - DNA, 15 bp, Homo sapiens
gcagctctgccccgt

SEQ ID NO: 572499 - DNA, 15 bp, Homo sapiens
cagctctgccccgtg

SEQ ID NO: 572500 - DNA, 15 bp, Homo sapiens
agctctgccccgtgc

SEQ ID NO: 572501 - DNA, 15 bp, Homo sapiens
gctctgccccgtgct

SEQ ID NO: 572502 - DNA, 15 bp, Homo sapiens
ctctgccccgtgctg

SEQ ID NO: 572503 - DNA, 15 bp, Homo sapiens
tctgccccgtgctgc

SEQ ID NO: 572504 - DNA, 15 bp, Homo sapiens
ctgccccgtgctgca

SEQ ID NO: 572505 - DNA, 15 bp, Homo sapiens
tgccccgtgctgcac

SEQ ID NO: 572506 - DNA, 15 bp, Homo sapiens
gccccgtgctgcacc

SEQ ID NO: 572507 - DNA, 15 bp, Homo sapiens
ccccgtgctgcacct

SEQ ID NO: 572508 - DNA, 15 bp, Homo sapiens
cccgtgctgcacctg

SEQ ID NO: 572509 - DNA, 15 bp, Homo sapiens
ccgtgctgcacctgc

SEQ ID NO: 572510 - DNA, 15 bp, Homo sapiens
cgtgctgcacctgcc

SEQ ID NO: 572511 - DNA, 15 bp, Homo sapiens
gtgctgcacctgccc

SEQ ID NO: 572512 - DNA, 15 bp, Homo sapiens
tgctgcacctgcccc

SEQ ID NO: 572513 - DNA, 15 bp, Homo sapiens
gctgcacctgcccct

SEQ ID NO: 572514 - DNA, 15 bp, Homo sapiens
ctgcacctgcccctt

SEQ ID NO: 572515 - DNA, 15 bp, Homo sapiens
tgcacctgccccttg

SEQ ID NO: 572516 - DNA, 15 bp, Homo sapiens
gcacctgccccttgg

SEQ ID NO: 572517 - DNA, 15 bp, Homo sapiens
cacctgccccttgga

SEQ ID NO: 572518 - DNA, 15 bp, Homo sapiens
acctgccccttggaa

SEQ ID NO: 572519 - DNA, 15 bp, Homo sapiens
cctgccccttggaag

SEQ ID NO: 572520 - DNA, 15 bp, Homo sapiens
ctgccccttggaaga

SEQ ID NO: 572521 - DNA, 15 bp, Homo sapiens
tgccccttggaagat

SEQ ID NO: 572522 - DNA, 15 bp, Homo sapiens
gccccttggaagata

SEQ ID NO: 572523 - DNA, 15 bp, Homo sapiens
ccccttggaagatac

SEQ ID NO: 572524 - DNA, 15 bp, Homo sapiens
cccttggaagatact

SEQ ID NO: 572525 - DNA, 15 bp, Homo sapiens
ccttggaagatactg

SEQ ID NO: 572526 - DNA, 15 bp, Homo sapiens
cttggaagatactga

SEQ ID NO: 572527 - DNA, 15 bp, Homo sapiens
ttggaagatactgag

SEQ ID NO: 572528 - DNA, 15 bp, Homo sapiens
tggaagatactgagc

SEQ ID NO: 572529 - DNA, 15 bp, Homo sapiens
ggaagatactgagcc

SEQ ID NO: 572530 - DNA, 15 bp, Homo sapiens
gaagatactgagcct

SEQ ID NO: 572531 - DNA, 15 bp, Homo sapiens
aagatactgagcctt

SEQ ID NO: 572532 - DNA, 15 bp, Homo sapiens
agatactgagcctta

SEQ ID NO: 572533 - DNA, 15 bp, Homo sapiens
gatactgagccttat

SEQ ID NO: 572534 - DNA, 15 bp, Homo sapiens
atactgagccttatg

SEQ ID NO: 572535 - DNA, 15 bp, Homo sapiens
tactgagccttatgt

SEQ ID NO: 572536 - DNA, 15 bp, Homo sapiens
actgagccttatgtg

SEQ ID NO: 572537 - DNA, 15 bp, Homo sapiens
ctgagccttatgtga

SEQ ID NO: 572538 - DNA, 15 bp, Homo sapiens
tgagccttatgtgac

SEQ ID NO: 572539 - DNA, 15 bp, Homo sapiens
gagccttatgtgact

SEQ ID NO: 572540 - DNA, 15 bp, Homo sapiens
agccttatgtgactg

SEQ ID NO: 572541 - DNA, 15 bp, Homo sapiens
gccttatgtgactgc

SEQ ID NO: 572542 - DNA, 15 bp, Homo sapiens
ccttatgtgactgca

SEQ ID NO: 572543 - DNA, 15 bp, Homo sapiens
cttatgtgactgcac

SEQ ID NO: 572544 - DNA, 15 bp, Homo sapiens
ttatgtgactgcact

SEQ ID NO: 572545 - DNA, 15 bp, Homo sapiens
tatgtgactgcactg

SEQ ID NO: 572546 - DNA, 15 bp, Homo sapiens
atgtgactgcactgc

SEQ ID NO: 572547 - DNA, 15 bp, Homo sapiens
tgtgactgcactgcc

SEQ ID NO: 572548 - DNA, 15 bp, Homo sapiens
gtgactgcactgccc

SEQ ID NO: 572549 - DNA, 15 bp, Homo sapiens
tgactgcactgcccc

SEQ ID NO: 572550 - DNA, 15 bp, Homo sapiens
gactgcactgcccct

SEQ ID NO: 572551 - DNA, 15 bp, Homo sapiens
actgcactgcccctc

SEQ ID NO: 572552 - DNA, 15 bp, Homo sapiens
ctgcactgcccctct

SEQ ID NO: 572553 - DNA, 15 bp, Homo sapiens
tgcactgcccctctc

SEQ ID NO: 572554 - DNA, 15 bp, Homo sapiens
gcactgcccctctcc

SEQ ID NO: 572555 - DNA, 15 bp, Homo sapiens
cactgcccctctcct

SEQ ID NO: 572556 - DNA, 15 bp, Homo sapiens
actgcccctctcctg

SEQ ID NO: 572557 - DNA, 15 bp, Homo sapiens
ctgcccctctcctgg

SEQ ID NO: 572558 - DNA, 15 bp, Homo sapiens
tgcccctctcctgga

SEQ ID NO: 572559 - DNA, 15 bp, Homo sapiens
gcccctctcctggac

SEQ ID NO: 572560 - DNA, 15 bp, Homo sapiens
cccctctcctggacg

SEQ ID NO: 572561 - DNA, 15 bp, Homo sapiens
ccctctcctggacgg

SEQ ID NO: 572562 - DNA, 15 bp, Homo sapiens
cctctcctggacggt

SEQ ID NO: 572563 - DNA, 15 bp, Homo sapiens
ctctcctggacggtt

SEQ ID NO: 572564 - DNA, 15 bp, Homo sapiens
tctcctggacggttt

SEQ ID NO: 572565 - DNA, 15 bp, Homo sapiens
ctcctggacggtttt

SEQ ID NO: 572566 - DNA, 15 bp, Homo sapiens
tcctggacggttttc

SEQ ID NO: 572567 - DNA, 15 bp, Homo sapiens
cctggacggttttcc

SEQ ID NO: 572568 - DNA, 15 bp, Homo sapiens
ctggacggttttcct

SEQ ID NO: 572569 - DNA, 15 bp, Homo sapiens
tggacggttttcctc

SEQ ID NO: 572570 - DNA, 15 bp, Homo sapiens
ggacggttttcctca

SEQ ID NO: 572571 - DNA, 15 bp, Homo sapiens
gacggttttcctcac

SEQ ID NO: 572572 - DNA, 15 bp, Homo sapiens
acggttttcctcact

SEQ ID NO: 572573 - DNA, 15 bp, Homo sapiens
cggttttcctcactg

SEQ ID NO: 572574 - DNA, 15 bp, Homo sapiens
ggttttcctcactga

SEQ ID NO: 572575 - DNA, 15 bp, Homo sapiens
gttttcctcactgac

SEQ ID NO: 572576 - DNA, 15 bp, Homo sapiens
ttttcctcactgacc

SEQ ID NO: 572577 - DNA, 15 bp, Homo sapiens
tttcctcactgaccc

SEQ ID NO: 572578 - DNA, 15 bp, Homo sapiens
ttcctcactgacccc

SEQ ID NO: 572579 - DNA, 15 bp, Homo sapiens
tcctcactgaccccc

SEQ ID NO: 572580 - DNA, 15 bp, Homo sapiens
cctcactgaccccca

SEQ ID NO: 572581 - DNA, 15 bp, Homo sapiens
ctcactgacccccac

SEQ ID NO: 572582 - DNA, 15 bp, Homo sapiens
tcactgacccccact

SEQ ID NO: 572583 - DNA, 15 bp, Homo sapiens
cactgacccccacta

SEQ ID NO: 572584 - DNA, 15 bp, Homo sapiens
actgacccccactat

SEQ ID NO: 572585 - DNA, 15 bp, Homo sapiens
ctgacccccactatc

SEQ ID NO: 572586 - DNA, 15 bp, Homo sapiens
tgacccccactatcc

SEQ ID NO: 572587 - DNA, 15 bp, Homo sapiens
gacccccactatccc

SEQ ID NO: 572588 - DNA, 15 bp, Homo sapiens
acccccactatccct

SEQ ID NO: 572589 - DNA, 15 bp, Homo sapiens
cccccactatcccta

SEQ ID NO: 572590 - DNA, 15 bp, Homo sapiens
ccccactatccctat

SEQ ID NO: 572591 - DNA, 15 bp, Homo sapiens
cccactatccctatc

SEQ ID NO: 572592 - DNA, 15 bp, Homo sapiens
ccactatccctatca

SEQ ID NO: 572593 - DNA, 15 bp, Homo sapiens
cactatccctatcac

SEQ ID NO: 572594 - DNA, 15 bp, Homo sapiens
actatccctatcact

SEQ ID NO: 572595 - DNA, 15 bp, Homo sapiens
ctatccctatcactc

SEQ ID NO: 572596 - DNA, 15 bp, Homo sapiens
tatccctatcactct

SEQ ID NO: 572597 - DNA, 15 bp, Homo sapiens
atccctatcactctc

SEQ ID NO: 572598 - DNA, 15 bp, Homo sapiens
tccctatcactctca

SEQ ID NO: 572599 - DNA, 15 bp, Homo sapiens
ccctatcactctcac

SEQ ID NO: 572600 - DNA, 15 bp, Homo sapiens
cctatcactctcacc

SEQ ID NO: 572601 - DNA, 15 bp, Homo sapiens
ctatcactctcaccc

SEQ ID NO: 572602 - DNA, 15 bp, Homo sapiens
tatcactctcacccc

SEQ ID NO: 572603 - DNA, 15 bp, Homo sapiens
atcactctcaccccc

SEQ ID NO: 572604 - DNA, 15 bp, Homo sapiens
tcactctcaccccca

SEQ ID NO: 572605 - DNA, 15 bp, Homo sapiens
cactctcacccccac

SEQ ID NO: 572606 - DNA, 15 bp, Homo sapiens
actctcacccccact

SEQ ID NO: 572607 - DNA, 15 bp, Homo sapiens
ctctcacccccactt

SEQ ID NO: 572608 - DNA, 15 bp, Homo sapiens
tctcacccccacttc

SEQ ID NO: 572609 - DNA, 15 bp, Homo sapiens
ctcacccccacttcc

SEQ ID NO: 572610 - DNA, 15 bp, Homo sapiens
tcacccccacttccc

SEQ ID NO: 572611 - DNA, 15 bp, Homo sapiens
cacccccacttccct

SEQ ID NO: 572612 - DNA, 15 bp, Homo sapiens
acccccacttccctc

SEQ ID NO: 572613 - DNA, 15 bp, Homo sapiens
cccccacttccctcc

SEQ ID NO: 572614 - DNA, 15 bp, Homo sapiens
ccccacttccctcct

SEQ ID NO: 572615 - DNA, 15 bp, Homo sapiens
cccacttccctcctg

SEQ ID NO: 572616 - DNA, 15 bp, Homo sapiens
ccacttccctcctgt

SEQ ID NO: 572617 - DNA, 15 bp, Homo sapiens
cacttccctcctgtc

SEQ ID NO: 572618 - DNA, 15 bp, Homo sapiens
acttccctcctgtct

SEQ ID NO: 572619 - DNA, 15 bp, Homo sapiens
cttccctcctgtctc

SEQ ID NO: 572620 - DNA, 15 bp, Homo sapiens
ttccctcctgtctct

SEQ ID NO: 572621 - DNA, 15 bp, Homo sapiens
tccctcctgtctctt

SEQ ID NO: 572622 - DNA, 15 bp, Homo sapiens
ccctcctgtctcttc

SEQ ID NO: 572623 - DNA, 15 bp, Homo sapiens
cctcctgtctcttct

SEQ ID NO: 572624 - DNA, 15 bp, Homo sapiens
ctcctgtctcttctg

SEQ ID NO: 572625 - DNA, 15 bp, Homo sapiens
tcctgtctcttctgg

SEQ ID NO: 572626 - DNA, 15 bp, Homo sapiens
cctgtctcttctgga

SEQ ID NO: 572627 - DNA, 15 bp, Homo sapiens
ctgtctcttctggag

SEQ ID NO: 572628 - DNA, 15 bp, Homo sapiens
tgtctcttctggagt

SEQ ID NO: 572629 - DNA, 15 bp, Homo sapiens
gtctcttctggagtg

SEQ ID NO: 572630 - DNA, 15 bp, Homo sapiens
tctcttctggagtga

SEQ ID NO: 572631 - DNA, 15 bp, Homo sapiens
ctcttctggagtgat

SEQ ID NO: 572632 - DNA, 15 bp, Homo sapiens
tcttctggagtgatt

SEQ ID NO: 572633 - DNA, 15 bp, Homo sapiens
cttctggagtgattc

SEQ ID NO: 572634 - DNA, 15 bp, Homo sapiens
ttctggagtgattcc

SEQ ID NO: 572635 - DNA, 15 bp, Homo sapiens
tctggagtgattcct

SEQ ID NO: 572636 - DNA, 15 bp, Homo sapiens
ctggagtgattcctc

SEQ ID NO: 572637 - DNA, 15 bp, Homo sapiens
tggagtgattcctca

SEQ ID NO: 572638 - DNA, 15 bp, Homo sapiens
ggagtgattcctcat

SEQ ID NO: 572639 - DNA, 15 bp, Homo sapiens
gagtgattcctcatt

SEQ ID NO: 572640 - DNA, 15 bp, Homo sapiens
agtgattcctcattc

SEQ ID NO: 572641 - DNA, 15 bp, Homo sapiens
gtgattcctcattca

SEQ ID NO: 572642 - DNA, 15 bp, Homo sapiens
tgattcctcattcat

SEQ ID NO: 572643 - DNA, 15 bp, Homo sapiens
gattcctcattcatc

SEQ ID NO: 572644 - DNA, 15 bp, Homo sapiens
attcctcattcatcc

SEQ ID NO: 572645 - DNA, 15 bp, Homo sapiens
ttcctcattcatcct

SEQ ID NO: 572646 - DNA, 15 bp, Homo sapiens
tcctcattcatcctc

SEQ ID NO: 572647 - DNA, 15 bp, Homo sapiens
cctcattcatcctct

SEQ ID NO: 572648 - DNA, 15 bp, Homo sapiens
ctcattcatcctctt

SEQ ID NO: 572649 - DNA, 15 bp, Homo sapiens
tcattcatcctcttc

SEQ ID NO: 572650 - DNA, 15 bp, Homo sapiens
cattcatcctcttcc

SEQ ID NO: 572651 - DNA, 15 bp, Homo sapiens
attcatcctcttccc

SEQ ID NO: 572652 - DNA, 15 bp, Homo sapiens
ttcatcctcttcccc

SEQ ID NO: 572653 - DNA, 15 bp, Homo sapiens
tcatcctcttcccct

SEQ ID NO: 572654 - DNA, 15 bp, Homo sapiens
catcctcttccccta

SEQ ID NO: 572655 - DNA, 15 bp, Homo sapiens
atcctcttcccctac

SEQ ID NO: 572656 - DNA, 15 bp, Homo sapiens
tcctcttcccctacc

SEQ ID NO: 572657 - DNA, 15 bp, Homo sapiens
cctcttcccctacct

SEQ ID NO: 572658 - DNA, 15 bp, Homo sapiens
ctcttcccctacctg

SEQ ID NO: 572659 - DNA, 15 bp, Homo sapiens
tcttcccctacctgt

SEQ ID NO: 572660 - DNA, 15 bp, Homo sapiens
cttcccctacctgtt

SEQ ID NO: 572661 - DNA, 15 bp, Homo sapiens
ttcccctacctgttc

SEQ ID NO: 572662 - DNA, 15 bp, Homo sapiens
tcccctacctgttct

SEQ ID NO: 572663 - DNA, 15 bp, Homo sapiens
cccctacctgttctc

SEQ ID NO: 572664 - DNA, 15 bp, Homo sapiens
ccctacctgttctct

SEQ ID NO: 572665 - DNA, 15 bp, Homo sapiens
cctacctgttctctc

SEQ ID NO: 572666 - DNA, 15 bp, Homo sapiens
ctacctgttctctcc

SEQ ID NO: 572667 - DNA, 15 bp, Homo sapiens
tacctgttctctcct

SEQ ID NO: 572668 - DNA, 15 bp, Homo sapiens
acctgttctctcctc

SEQ ID NO: 572669 - DNA, 15 bp, Homo sapiens
cctgttctctcctct

SEQ ID NO: 572670 - DNA, 15 bp, Homo sapiens
ctgttctctcctctc

SEQ ID NO: 572671 - DNA, 15 bp, Homo sapiens
tgttctctcctctcc

SEQ ID NO: 572672 - DNA, 15 bp, Homo sapiens
gttctctcctctcca

SEQ ID NO: 572673 - DNA, 15 bp, Homo sapiens
ttctctcctctccac

SEQ ID NO: 572674 - DNA, 15 bp, Homo sapiens
tctctcctctccact

SEQ ID NO: 572675 - DNA, 15 bp, Homo sapiens
ctctcctctccactc

SEQ ID NO: 572676 - DNA, 15 bp, Homo sapiens
tctcctctccactcg

SEQ ID NO: 572677 - DNA, 15 bp, Homo sapiens
ctcctctccactcgc

SEQ ID NO: 572678 - DNA, 15 bp, Homo sapiens
tcctctccactcgcc

SEQ ID NO: 572679 - DNA, 15 bp, Homo sapiens
cctctccactcgcca

SEQ ID NO: 572680 - DNA, 15 bp, Homo sapiens
ctctccactcgccat

SEQ ID NO: 572681 - DNA, 15 bp, Homo sapiens
tctccactcgccatg

SEQ ID NO: 572682 - DNA, 15 bp, Homo sapiens
ctccactcgccatgg

SEQ ID NO: 572683 - DNA, 15 bp, Homo sapiens
tccactcgccatgga

SEQ ID NO: 572684 - DNA, 15 bp, Homo sapiens
ccactcgccatggag

SEQ ID NO: 572685 - DNA, 15 bp, Homo sapiens
cactcgccatggagg

SEQ ID NO: 572686 - DNA, 15 bp, Homo sapiens
actcgccatggaggg

SEQ ID NO: 572687 - DNA, 15 bp, Homo sapiens
ctcgccatggagggg

SEQ ID NO: 572688 - DNA, 15 bp, Homo sapiens
tcgccatggaggggc

SEQ ID NO: 572689 - DNA, 15 bp, Homo sapiens
cgccatggaggggcc

SEQ ID NO: 572690 - DNA, 15 bp, Homo sapiens
gccatggaggggccc

SEQ ID NO: 572691 - DNA, 15 bp, Homo sapiens
ccatggaggggccct

SEQ ID NO: 572692 - DNA, 15 bp, Homo sapiens
catggaggggccctg

SEQ ID NO: 572693 - DNA, 15 bp, Homo sapiens
atggaggggccctgc

SEQ ID NO: 572694 - DNA, 15 bp, Homo sapiens
tggaggggccctgct

SEQ ID NO: 572695 - DNA, 15 bp, Homo sapiens
ggaggggccctgctc

SEQ ID NO: 572696 - DNA, 15 bp, Homo sapiens
gaggggccctgctct

SEQ ID NO: 572697 - DNA, 15 bp, Homo sapiens
aggggccctgctctg

SEQ ID NO: 572698 - DNA, 15 bp, Homo sapiens
ggggccctgctctga

SEQ ID NO: 572699 - DNA, 15 bp, Homo sapiens
gggccctgctctgag

SEQ ID NO: 572700 - DNA, 15 bp, Homo sapiens
ggccctgctctgagt

SEQ ID NO: 572701 - DNA, 15 bp, Homo sapiens
gccctgctctgagtg

SEQ ID NO: 572702 - DNA, 15 bp, Homo sapiens
ccctgctctgagtga

SEQ ID NO: 572703 - DNA, 15 bp, Homo sapiens
cctgctctgagtgac

SEQ ID NO: 572704 - DNA, 15 bp, Homo sapiens
ctgctctgagtgacc

SEQ ID NO: 572705 - DNA, 15 bp, Homo sapiens
tgctctgagtgaccc

SEQ ID NO: 572706 - DNA, 15 bp, Homo sapiens
gctctgagtgacccc

SEQ ID NO: 572707 - DNA, 15 bp, Homo sapiens
ctctgagtgacccca

SEQ ID NO: 572708 - DNA, 15 bp, Homo sapiens
tctgagtgaccccat

SEQ ID NO: 572709 - DNA, 15 bp, Homo sapiens
ctgagtgaccccatc

SEQ ID NO: 572710 - DNA, 15 bp, Homo sapiens
tgagtgaccccatct

SEQ ID NO: 572711 - DNA, 15 bp, Homo sapiens
gagtgaccccatctt

SEQ ID NO: 572712 - DNA, 15 bp, Homo sapiens
agtgaccccatcttc

SEQ ID NO: 572713 - DNA, 15 bp, Homo sapiens
gtgaccccatcttcc

SEQ ID NO: 572714 - DNA, 15 bp, Homo sapiens
tgaccccatcttccc

SEQ ID NO: 572715 - DNA, 15 bp, Homo sapiens
gaccccatcttcccc

SEQ ID NO: 572716 - DNA, 15 bp, Homo sapiens
accccatcttcccct

SEQ ID NO: 572717 - DNA, 15 bp, Homo sapiens
ccccatcttcccctg

SEQ ID NO: 572718 - DNA, 15 bp, Homo sapiens
cccatcttcccctgc

SEQ ID NO: 572719 - DNA, 15 bp, Homo sapiens
ccatcttcccctgcc

SEQ ID NO: 572720 - DNA, 15 bp, Homo sapiens
catcttcccctgcca

SEQ ID NO: 572721 - DNA, 15 bp, Homo sapiens
atcttcccctgccac

SEQ ID NO: 572722 - DNA, 15 bp, Homo sapiens
tcttcccctgccacc

SEQ ID NO: 572723 - DNA, 15 bp, Homo sapiens
cttcccctgccacct

SEQ ID NO: 572724 - DNA, 15 bp, Homo sapiens
ttcccctgccacctc

SEQ ID NO: 572725 - DNA, 15 bp, Homo sapiens
tcccctgccacctcc

SEQ ID NO: 572726 - DNA, 15 bp, Homo sapiens
cccctgccacctccc

SEQ ID NO: 572727 - DNA, 15 bp, Homo sapiens
ccctgccacctcccc

SEQ ID NO: 572728 - DNA, 15 bp, Homo sapiens
cctgccacctcccca

SEQ ID NO: 572729 - DNA, 15 bp, Homo sapiens
ctgccacctccccac

SEQ ID NO: 572730 - DNA, 15 bp, Homo sapiens
tgccacctccccacc

SEQ ID NO: 572731 - DNA, 15 bp, Homo sapiens
gccacctccccacct

SEQ ID NO: 572732 - DNA, 15 bp, Homo sapiens
ccacctccccacctg

SEQ ID NO: 572733 - DNA, 15 bp, Homo sapiens
cacctccccacctgc

SEQ ID NO: 572734 - DNA, 15 bp, Homo sapiens
acctccccacctgca

SEQ ID NO: 572735 - DNA, 15 bp, Homo sapiens
cctccccacctgcat

SEQ ID NO: 572736 - DNA, 15 bp, Homo sapiens
ctccccacctgcatc

SEQ ID NO: 572737 - DNA, 15 bp, Homo sapiens
tccccacctgcatct

SEQ ID NO: 572738 - DNA, 15 bp, Homo sapiens
ccccacctgcatctt

SEQ ID NO: 572739 - DNA, 15 bp, Homo sapiens
cccacctgcatcttg

SEQ ID NO: 572740 - DNA, 15 bp, Homo sapiens
ccacctgcatcttgg

SEQ ID NO: 572741 - DNA, 15 bp, Homo sapiens
cacctgcatcttggg

SEQ ID NO: 572742 - DNA, 15 bp, Homo sapiens
acctgcatcttgggg

SEQ ID NO: 572743 - DNA, 15 bp, Homo sapiens
cctgcatcttggggc

SEQ ID NO: 572744 - DNA, 15 bp, Homo sapiens
ctgcatcttggggct

SEQ ID NO: 572745 - DNA, 15 bp, Homo sapiens
tgcatcttggggctg

SEQ ID NO: 572746 - DNA, 15 bp, Homo sapiens
gcatcttggggctgg

SEQ ID NO: 572747 - DNA, 15 bp, Homo sapiens
catcttggggctgga

SEQ ID NO: 572748 - DNA, 15 bp, Homo sapiens
atcttggggctggaa

SEQ ID NO: 572749 - DNA, 15 bp, Homo sapiens
tcttggggctggaag

SEQ ID NO: 572750 - DNA, 15 bp, Homo sapiens
cttggggctggaaga

SEQ ID NO: 572751 - DNA, 15 bp, Homo sapiens
ttggggctggaagag

SEQ ID NO: 572752 - DNA, 15 bp, Homo sapiens
tggggctggaagagc

SEQ ID NO: 572753 - DNA, 15 bp, Homo sapiens
ggggctggaagagca

SEQ ID NO: 572754 - DNA, 15 bp, Homo sapiens
gggctggaagagcat

SEQ ID NO: 572755 - DNA, 15 bp, Homo sapiens
ggctggaagagcatg

SEQ ID NO: 572756 - DNA, 15 bp, Homo sapiens
gctggaagagcatgg

SEQ ID NO: 572757 - DNA, 15 bp, Homo sapiens
ctggaagagcatgga

SEQ ID NO: 572758 - DNA, 15 bp, Homo sapiens
tggaagagcatggat

SEQ ID NO: 572759 - DNA, 15 bp, Homo sapiens
ggaagagcatggata

SEQ ID NO: 572760 - DNA, 15 bp, Homo sapiens
gaagagcatggataa

SEQ ID NO: 572761 - DNA, 15 bp, Homo sapiens
aagagcatggataag

SEQ ID NO: 572762 - DNA, 15 bp, Homo sapiens
agagcatggataaga

SEQ ID NO: 572763 - DNA, 15 bp, Homo sapiens
gagcatggataagag

SEQ ID NO: 572764 - DNA, 15 bp, Homo sapiens
agcatggataagagg

SEQ ID NO: 572765 - DNA, 15 bp, Homo sapiens
gcatggataagaggc

SEQ ID NO: 572766 - DNA, 15 bp, Homo sapiens
catggataagaggct

SEQ ID NO: 572767 - DNA, 15 bp, Homo sapiens
atggataagaggctc

SEQ ID NO: 572768 - DNA, 15 bp, Homo sapiens
tggataagaggctca

SEQ ID NO: 572769 - DNA, 15 bp, Homo sapiens
ggataagaggctcac

SEQ ID NO: 572770 - DNA, 15 bp, Homo sapiens
gataagaggctcaca

SEQ ID NO: 572771 - DNA, 15 bp, Homo sapiens
ataagaggctcacac

SEQ ID NO: 572772 - DNA, 15 bp, Homo sapiens
taagaggctcacaca

SEQ ID NO: 572773 - DNA, 15 bp, Homo sapiens
aagaggctcacacag

SEQ ID NO: 572774 - DNA, 15 bp, Homo sapiens
agaggctcacacaga

SEQ ID NO: 572775 - DNA, 15 bp, Homo sapiens
gaggctcacacagac

SEQ ID NO: 572776 - DNA, 15 bp, Homo sapiens
aggctcacacagact

SEQ ID NO: 572777 - DNA, 15 bp, Homo sapiens
ggctcacacagactc

SEQ ID NO: 572778 - DNA, 15 bp, Homo sapiens
gctcacacagactct

SEQ ID NO: 572779 - DNA, 15 bp, Homo sapiens
ctcacacagactctt

SEQ ID NO: 572780 - DNA, 15 bp, Homo sapiens
tcacacagactcttc

SEQ ID NO: 572781 - DNA, 15 bp, Homo sapiens
cacacagactcttcc

SEQ ID NO: 572782 - DNA, 15 bp, Homo sapiens
acacagactcttccg

SEQ ID NO: 572783 - DNA, 15 bp, Homo sapiens
cacagactcttccgc

SEQ ID NO: 572784 - DNA, 15 bp, Homo sapiens
acagactcttccgca

SEQ ID NO: 572785 - DNA, 15 bp, Homo sapiens
cagactcttccgcag

SEQ ID NO: 572786 - DNA, 15 bp, Homo sapiens
agactcttccgcagg

SEQ ID NO: 572787 - DNA, 15 bp, Homo sapiens
gactcttccgcaggc

SEQ ID NO: 572788 - DNA, 15 bp, Homo sapiens
actcttccgcaggct

SEQ ID NO: 572789 - DNA, 15 bp, Homo sapiens
ctcttccgcaggctt

SEQ ID NO: 572790 - DNA, 15 bp, Homo sapiens
tcttccgcaggcttt

SEQ ID NO: 572791 - DNA, 15 bp, Homo sapiens
cttccgcaggcttta

SEQ ID NO: 572792 - DNA, 15 bp, Homo sapiens
ttccgcaggctttat

SEQ ID NO: 572793 - DNA, 15 bp, Homo sapiens
tccgcaggctttatt

SEQ ID NO: 572794 - DNA, 15 bp, Homo sapiens
ccgcaggctttattc

SEQ ID NO: 572795 - DNA, 15 bp, Homo sapiens
cgcaggctttattct

SEQ ID NO: 572796 - DNA, 15 bp, Homo sapiens
gcaggctttattctg

SEQ ID NO: 572797 - DNA, 15 bp, Homo sapiens
caggctttattctgc

SEQ ID NO: 572798 - DNA, 15 bp, Homo sapiens
aggctttattctgcc

SEQ ID NO: 572799 - DNA, 15 bp, Homo sapiens
ggctttattctgcct

SEQ ID NO: 572800 - DNA, 15 bp, Homo sapiens
gctttattctgcctg

SEQ ID NO: 572801 - DNA, 15 bp, Homo sapiens
ctttattctgcctgg

SEQ ID NO: 572802 - DNA, 15 bp, Homo sapiens
tttattctgcctggg

SEQ ID NO: 572803 - DNA, 15 bp, Homo sapiens
ttattctgcctgggc

SEQ ID NO: 572804 - DNA, 15 bp, Homo sapiens
tattctgcctgggcc

SEQ ID NO: 572805 - DNA, 15 bp, Homo sapiens
attctgcctgggcca

SEQ ID NO: 572806 - DNA, 15 bp, Homo sapiens
ttctgcctgggccac

SEQ ID NO: 572807 - DNA, 15 bp, Homo sapiens
tctgcctgggccacc

SEQ ID NO: 572808 - DNA, 15 bp, Homo sapiens
ctgcctgggccacca

SEQ ID NO: 572809 - DNA, 15 bp, Homo sapiens
tgcctgggccaccac

SEQ ID NO: 572810 - DNA, 15 bp, Homo sapiens
gcctgggccaccaca

SEQ ID NO: 572811 - DNA, 15 bp, Homo sapiens
cctgggccaccacag

SEQ ID NO: 572812 - DNA, 15 bp, Homo sapiens
ctgggccaccacagc

SEQ ID NO: 572813 - DNA, 15 bp, Homo sapiens
tgggccaccacagct

SEQ ID NO: 572814 - DNA, 15 bp, Homo sapiens
gggccaccacagctc

SEQ ID NO: 572815 - DNA, 15 bp, Homo sapiens
ggccaccacagctct

SEQ ID NO: 572816 - DNA, 15 bp, Homo sapiens
gccaccacagctctg

SEQ ID NO: 572817 - DNA, 15 bp, Homo sapiens
ccaccacagctctga

SEQ ID NO: 572818 - DNA, 15 bp, Homo sapiens
caccacagctctgag

SEQ ID NO: 572819 - DNA, 15 bp, Homo sapiens
accacagctctgagg

SEQ ID NO: 572820 - DNA, 15 bp, Homo sapiens
ccacagctctgagga

SEQ ID NO: 572821 - DNA, 15 bp, Homo sapiens
cacagctctgaggat

SEQ ID NO: 572822 - DNA, 15 bp, Homo sapiens
acagctctgaggata

SEQ ID NO: 572823 - DNA, 15 bp, Homo sapiens
cagctctgaggatac

SEQ ID NO: 572824 - DNA, 15 bp, Homo sapiens
agctctgaggatact

SEQ ID NO: 572825 - DNA, 15 bp, Homo sapiens
gctctgaggatactt

SEQ ID NO: 572826 - DNA, 15 bp, Homo sapiens
ctctgaggatacttc

SEQ ID NO: 572827 - DNA, 15 bp, Homo sapiens
tctgaggatacttct

SEQ ID NO: 572828 - DNA, 15 bp, Homo sapiens
ctgaggatacttctg

SEQ ID NO: 572829 - DNA, 15 bp, Homo sapiens
tgaggatacttctgt

SEQ ID NO: 572830 - DNA, 15 bp, Homo sapiens
gaggatacttctgtt

SEQ ID NO: 572831 - DNA, 15 bp, Homo sapiens
aggatacttctgttc

SEQ ID NO: 572832 - DNA, 15 bp, Homo sapiens
ggatacttctgttct

SEQ ID NO: 572833 - DNA, 15 bp, Homo sapiens
gatacttctgttctc

SEQ ID NO: 572834 - DNA, 15 bp, Homo sapiens
atacttctgttctcc

SEQ ID NO: 572835 - DNA, 15 bp, Homo sapiens
tacttctgttctcct

SEQ ID NO: 572836 - DNA, 15 bp, Homo sapiens
acttctgttctcctc

SEQ ID NO: 572837 - DNA, 15 bp, Homo sapiens
cttctgttctcctca

SEQ ID NO: 572838 - DNA, 15 bp, Homo sapiens
ttctgttctcctcac

SEQ ID NO: 572839 - DNA, 15 bp, Homo sapiens
tctgttctcctcact

SEQ ID NO: 572840 - DNA, 15 bp, Homo sapiens
ctgttctcctcactc

SEQ ID NO: 572841 - DNA, 15 bp, Homo sapiens
tgttctcctcactcc

SEQ ID NO: 572842 - DNA, 15 bp, Homo sapiens
gttctcctcactccc

SEQ ID NO: 572843 - DNA, 15 bp, Homo sapiens
ttctcctcactccca

SEQ ID NO: 572844 - DNA, 15 bp, Homo sapiens
tctcctcactcccag

SEQ ID NO: 572845 - DNA, 15 bp, Homo sapiens
ctcctcactcccagt

SEQ ID NO: 572846 - DNA, 15 bp, Homo sapiens
tcctcactcccagtc

SEQ ID NO: 572847 - DNA, 15 bp, Homo sapiens
cctcactcccagtcc

SEQ ID NO: 572848 - DNA, 15 bp, Homo sapiens
ctcactcccagtcca

SEQ ID NO: 572849 - DNA, 15 bp, Homo sapiens
tcactcccagtccag

SEQ ID NO: 572850 - DNA, 15 bp, Homo sapiens
cactcccagtccagg

SEQ ID NO: 572851 - DNA, 15 bp, Homo sapiens
actcccagtccaggg

SEQ ID NO: 572852 - DNA, 15 bp, Homo sapiens
ctcccagtccagggc

SEQ ID NO: 572853 - DNA, 15 bp, Homo sapiens
tcccagtccagggct

SEQ ID NO: 572854 - DNA, 15 bp, Homo sapiens
cccagtccagggctc

SEQ ID NO: 572855 - DNA, 15 bp, Homo sapiens
ccagtccagggctca

SEQ ID NO: 572856 - DNA, 15 bp, Homo sapiens
cagtccagggctcac

SEQ ID NO: 572857 - DNA, 15 bp, Homo sapiens
agtccagggctcacc

SEQ ID NO: 572858 - DNA, 15 bp, Homo sapiens
gtccagggctcaccc

SEQ ID NO: 572859 - DNA, 15 bp, Homo sapiens
tccagggctcacccc

SEQ ID NO: 572860 - DNA, 15 bp, Homo sapiens
ccagggctcacccca

SEQ ID NO: 572861 - DNA, 15 bp, Homo sapiens
cagggctcaccccag

SEQ ID NO: 572862 - DNA, 15 bp, Homo sapiens
agggctcaccccagc

SEQ ID NO: 572863 - DNA, 15 bp, Homo sapiens
gggctcaccccagcc

SEQ ID NO: 572864 - DNA, 15 bp, Homo sapiens
ggctcaccccagcct

SEQ ID NO: 572865 - DNA, 15 bp, Homo sapiens
gctcaccccagcctg

SEQ ID NO: 572866 - DNA, 15 bp, Homo sapiens
ctcaccccagcctga

SEQ ID NO: 572867 - DNA, 15 bp, Homo sapiens
tcaccccagcctgac

SEQ ID NO: 572868 - DNA, 15 bp, Homo sapiens
caccccagcctgaca

SEQ ID NO: 572869 - DNA, 15 bp, Homo sapiens
accccagcctgacac

SEQ ID NO: 572870 - DNA, 15 bp, Homo sapiens
ccccagcctgacact

SEQ ID NO: 572871 - DNA, 15 bp, Homo sapiens
cccagcctgacactt

SEQ ID NO: 572872 - DNA, 15 bp, Homo sapiens
ccagcctgacacttc

SEQ ID NO: 572873 - DNA, 15 bp, Homo sapiens
cagcctgacacttct

SEQ ID NO: 572874 - DNA, 15 bp, Homo sapiens
agcctgacacttctc

SEQ ID NO: 572875 - DNA, 15 bp, Homo sapiens
gcctgacacttctcg

SEQ ID NO: 572876 - DNA, 15 bp, Homo sapiens
cctgacacttctcga

SEQ ID NO: 572877 - DNA, 15 bp, Homo sapiens
ctgacacttctcgat

SEQ ID NO: 572878 - DNA, 15 bp, Homo sapiens
tgacacttctcgatc

SEQ ID NO: 572879 - DNA, 15 bp, Homo sapiens
gacacttctcgatct

SEQ ID NO: 572880 - DNA, 15 bp, Homo sapiens
acacttctcgatctc

SEQ ID NO: 572881 - DNA, 15 bp, Homo sapiens
cacttctcgatctct

SEQ ID NO: 572882 - DNA, 15 bp, Homo sapiens
acttctcgatctctg

SEQ ID NO: 572883 - DNA, 15 bp, Homo sapiens
cttctcgatctctgg

SEQ ID NO: 572884 - DNA, 15 bp, Homo sapiens
ttctcgatctctggg

SEQ ID NO: 572885 - DNA, 15 bp, Homo sapiens
tctcgatctctgggt

SEQ ID NO: 572886 - DNA, 15 bp, Homo sapiens
ctcgatctctgggtc

SEQ ID NO: 572887 - DNA, 15 bp, Homo sapiens
tcgatctctgggtct

SEQ ID NO: 572888 - DNA, 15 bp, Homo sapiens
cgatctctgggtctt

SEQ ID NO: 572889 - DNA, 15 bp, Homo sapiens
gatctctgggtcttt

SEQ ID NO: 572890 - DNA, 15 bp, Homo sapiens
atctctgggtctttc

SEQ ID NO: 572891 - DNA, 15 bp, Homo sapiens
tctctgggtctttct

SEQ ID NO: 572892 - DNA, 15 bp, Homo sapiens
ctctgggtctttctc

SEQ ID NO: 572893 - DNA, 15 bp, Homo sapiens
tctgggtctttctcc

SEQ ID NO: 572894 - DNA, 15 bp, Homo sapiens
ctgggtctttctcct

SEQ ID NO: 572895 - DNA, 15 bp, Homo sapiens
tgggtctttctcctt

SEQ ID NO: 572896 - DNA, 15 bp, Homo sapiens
gggtctttctccttc

SEQ ID NO: 572897 - DNA, 15 bp, Homo sapiens
ggtctttctccttcg

SEQ ID NO: 572898 - DNA, 15 bp, Homo sapiens
gtctttctccttcgc

SEQ ID NO: 572899 - DNA, 15 bp, Homo sapiens
tctttctccttcgcg

SEQ ID NO: 572900 - DNA, 15 bp, Homo sapiens
ctttctccttcgcgc

SEQ ID NO: 572901 - DNA, 15 bp, Homo sapiens
tttctccttcgcgca

SEQ ID NO: 572902 - DNA, 15 bp, Homo sapiens
ttctccttcgcgcaa

SEQ ID NO: 572903 - DNA, 15 bp, Homo sapiens
tctccttcgcgcaag

SEQ ID NO: 572904 - DNA, 15 bp, Homo sapiens
ctccttcgcgcaagg

SEQ ID NO: 572905 - DNA, 15 bp, Homo sapiens
tccttcgcgcaaggt

SEQ ID NO: 572906 - DNA, 15 bp, Homo sapiens
ccttcgcgcaaggtc

SEQ ID NO: 572907 - DNA, 15 bp, Homo sapiens
cttcgcgcaaggtca

SEQ ID NO: 572908 - DNA, 15 bp, Homo sapiens
ttcgcgcaaggtcac

SEQ ID NO: 572909 - DNA, 15 bp, Homo sapiens
tcgcgcaaggtcact

SEQ ID NO: 572910 - DNA, 15 bp, Homo sapiens
cgcgcaaggtcactc

SEQ ID NO: 572911 - DNA, 15 bp, Homo sapiens
gcgcaaggtcactca

SEQ ID NO: 572912 - DNA, 15 bp, Homo sapiens
cgcaaggtcactcat

SEQ ID NO: 572913 - DNA, 15 bp, Homo sapiens
gcaaggtcactcatt

SEQ ID NO: 572914 - DNA, 15 bp, Homo sapiens
caaggtcactcattg

SEQ ID NO: 572915 - DNA, 15 bp, Homo sapiens
aaggtcactcattgg

SEQ ID NO: 572916 - DNA, 15 bp, Homo sapiens
aggtcactcattgga

SEQ ID NO: 572917 - DNA, 15 bp, Homo sapiens
ggtcactcattggac

SEQ ID NO: 572918 - DNA, 15 bp, Homo sapiens
gtcactcattggaca

SEQ ID NO: 572919 - DNA, 15 bp, Homo sapiens
tcactcattggacag

SEQ ID NO: 572920 - DNA, 15 bp, Homo sapiens
cactcattggacagg

SEQ ID NO: 572921 - DNA, 15 bp, Homo sapiens
actcattggacaggg

SEQ ID NO: 572922 - DNA, 15 bp, Homo sapiens
ctcattggacagggc

SEQ ID NO: 572923 - DNA, 15 bp, Homo sapiens
tcattggacagggca

SEQ ID NO: 572924 - DNA, 15 bp, Homo sapiens
cattggacagggcag

SEQ ID NO: 572925 - DNA, 15 bp, Homo sapiens
attggacagggcagt

SEQ ID NO: 572926 - DNA, 15 bp, Homo sapiens
ttggacagggcagta

SEQ ID NO: 572927 - DNA, 15 bp, Homo sapiens
tggacagggcagtat

SEQ ID NO: 572928 - DNA, 15 bp, Homo sapiens
ggacagggcagtatt

SEQ ID NO: 572929 - DNA, 15 bp, Homo sapiens
gacagggcagtattg

SEQ ID NO: 572930 - DNA, 15 bp, Homo sapiens
acagggcagtattgt

SEQ ID NO: 572931 - DNA, 15 bp, Homo sapiens
cagggcagtattgtc

SEQ ID NO: 572932 - DNA, 15 bp, Homo sapiens
agggcagtattgtca

SEQ ID NO: 572933 - DNA, 15 bp, Homo sapiens
gggcagtattgtcaa

SEQ ID NO: 572934 - DNA, 15 bp, Homo sapiens
ggcagtattgtcaaa

SEQ ID NO: 572935 - DNA, 15 bp, Homo sapiens
gcagtattgtcaaaa

SEQ ID NO: 572936 - DNA, 15 bp, Homo sapiens
cagtattgtcaaaag

SEQ ID NO: 572937 - DNA, 15 bp, Homo sapiens
agtattgtcaaaaga

SEQ ID NO: 572938 - DNA, 15 bp, Homo sapiens
gtattgtcaaaagag

SEQ ID NO: 572939 - DNA, 15 bp, Homo sapiens
tattgtcaaaagagc

SEQ ID NO: 572940 - DNA, 15 bp, Homo sapiens
attgtcaaaagagca

SEQ ID NO: 572941 - DNA, 15 bp, Homo sapiens
ttgtcaaaagagcac

SEQ ID NO: 572942 - DNA, 15 bp, Homo sapiens
tgtcaaaagagcact

SEQ ID NO: 572943 - DNA, 15 bp, Homo sapiens
gtcaaaagagcactg

SEQ ID NO: 572944 - DNA, 15 bp, Homo sapiens
tcaaaagagcactgg

SEQ ID NO: 572945 - DNA, 15 bp, Homo sapiens
caaaagagcactgga

SEQ ID NO: 572946 - DNA, 15 bp, Homo sapiens
aaaagagcactggac

SEQ ID NO: 572947 - DNA, 15 bp, Homo sapiens
aaagagcactggact

SEQ ID NO: 572948 - DNA, 15 bp, Homo sapiens
aagagcactggactg

SEQ ID NO: 572949 - DNA, 15 bp, Homo sapiens
agagcactggactgg

SEQ ID NO: 572950 - DNA, 15 bp, Homo sapiens
gagcactggactggg

SEQ ID NO: 572951 - DNA, 15 bp, Homo sapiens
agcactggactgggg

SEQ ID NO: 572952 - DNA, 15 bp, Homo sapiens
gcactggactgggga

SEQ ID NO: 572953 - DNA, 15 bp, Homo sapiens
cactggactggggag

SEQ ID NO: 572954 - DNA, 15 bp, Homo sapiens
actggactggggagt

SEQ ID NO: 572955 - DNA, 15 bp, Homo sapiens
ctggactggggagtc

SEQ ID NO: 572956 - DNA, 15 bp, Homo sapiens
tggactggggagtcc

SEQ ID NO: 572957 - DNA, 15 bp, Homo sapiens
ggactggggagtcct

SEQ ID NO: 572958 - DNA, 15 bp, Homo sapiens
gactggggagtcctt

SEQ ID NO: 572959 - DNA, 15 bp, Homo sapiens
actggggagtccttt

SEQ ID NO: 572960 - DNA, 15 bp, Homo sapiens
ctggggagtcctttt

SEQ ID NO: 572961 - DNA, 15 bp, Homo sapiens
tggggagtccttttg

SEQ ID NO: 572962 - DNA, 15 bp, Homo sapiens
ggggagtccttttgt

SEQ ID NO: 572963 - DNA, 15 bp, Homo sapiens
gggagtccttttgtc

SEQ ID NO: 572964 - DNA, 15 bp, Homo sapiens
ggagtccttttgtct

SEQ ID NO: 572965 - DNA, 15 bp, Homo sapiens
gagtccttttgtctg

SEQ ID NO: 572966 - DNA, 15 bp, Homo sapiens
agtccttttgtctgc

SEQ ID NO: 572967 - DNA, 15 bp, Homo sapiens
gtccttttgtctgct

SEQ ID NO: 572968 - DNA, 15 bp, Homo sapiens
tccttttgtctgctt

SEQ ID NO: 572969 - DNA, 15 bp, Homo sapiens
ccttttgtctgcttt

SEQ ID NO: 572970 - DNA, 15 bp, Homo sapiens
cttttgtctgctttt

SEQ ID NO: 572971 - DNA, 15 bp, Homo sapiens
ttttgtctgcttttc

SEQ ID NO: 572972 - DNA, 15 bp, Homo sapiens
tttgtctgcttttca

SEQ ID NO: 572973 - DNA, 15 bp, Homo sapiens
ttgtctgcttttcat

SEQ ID NO: 572974 - DNA, 15 bp, Homo sapiens
tgtctgcttttcatc

SEQ ID NO: 572975 - DNA, 15 bp, Homo sapiens
gtctgcttttcatca

SEQ ID NO: 572976 - DNA, 15 bp, Homo sapiens
tctgcttttcatcag

SEQ ID NO: 572977 - DNA, 15 bp, Homo sapiens
ctgcttttcatcagc

SEQ ID NO: 572978 - DNA, 15 bp, Homo sapiens
tgcttttcatcagct

SEQ ID NO: 572979 - DNA, 15 bp, Homo sapiens
gcttttcatcagcta

SEQ ID NO: 572980 - DNA, 15 bp, Homo sapiens
cttttcatcagctaa

SEQ ID NO: 572981 - DNA, 15 bp, Homo sapiens
ttttcatcagctaac

SEQ ID NO: 572982 - DNA, 15 bp, Homo sapiens
tttcatcagctaacc

SEQ ID NO: 572983 - DNA, 15 bp, Homo sapiens
ttcatcagctaacct

SEQ ID NO: 572984 - DNA, 15 bp, Homo sapiens
tcatcagctaacctt

SEQ ID NO: 572985 - DNA, 15 bp, Homo sapiens
catcagctaaccttc

SEQ ID NO: 572986 - DNA, 15 bp, Homo sapiens
atcagctaaccttca

SEQ ID NO: 572987 - DNA, 15 bp, Homo sapiens
tcagctaaccttcag

SEQ ID NO: 572988 - DNA, 15 bp, Homo sapiens
cagctaaccttcagt

SEQ ID NO: 572989 - DNA, 15 bp, Homo sapiens
agctaaccttcagtt

SEQ ID NO: 572990 - DNA, 15 bp, Homo sapiens
gctaaccttcagttt

SEQ ID NO: 572991 - DNA, 15 bp, Homo sapiens
ctaaccttcagtttc

SEQ ID NO: 572992 - DNA, 15 bp, Homo sapiens
taaccttcagtttct

SEQ ID NO: 572993 - DNA, 15 bp, Homo sapiens
aaccttcagtttctg

SEQ ID NO: 572994 - DNA, 15 bp, Homo sapiens
accttcagtttctgt

SEQ ID NO: 572995 - DNA, 15 bp, Homo sapiens
ccttcagtttctgtc

SEQ ID NO: 572996 - DNA, 15 bp, Homo sapiens
cttcagtttctgtcc

SEQ ID NO: 572997 - DNA, 15 bp, Homo sapiens
ttcagtttctgtcca

SEQ ID NO: 572998 - DNA, 15 bp, Homo sapiens
tcagtttctgtccac

SEQ ID NO: 572999 - DNA, 15 bp, Homo sapiens
cagtttctgtccacc

SEQ ID NO: 573000 - DNA, 15 bp, Homo sapiens
agtttctgtccacct

SEQ ID NO: 573001 - DNA, 15 bp, Homo sapiens
gtttctgtccaccta

SEQ ID NO: 573002 - DNA, 15 bp, Homo sapiens
tttctgtccacctat

SEQ ID NO: 573003 - DNA, 15 bp, Homo sapiens
ttctgtccacctatg

SEQ ID NO: 573004 - DNA, 15 bp, Homo sapiens
tctgtccacctatgt

SEQ ID NO: 573005 - DNA, 15 bp, Homo sapiens
ctgtccacctatgtc

SEQ ID NO: 573006 - DNA, 15 bp, Homo sapiens
tgtccacctatgtcc

SEQ ID NO: 573007 - DNA, 15 bp, Homo sapiens
gtccacctatgtccc

SEQ ID NO: 573008 - DNA, 15 bp, Homo sapiens
tccacctatgtcccc

SEQ ID NO: 573009 - DNA, 15 bp, Homo sapiens
ccacctatgtcccct

SEQ ID NO: 573010 - DNA, 15 bp, Homo sapiens
cacctatgtccccta

SEQ ID NO: 573011 - DNA, 15 bp, Homo sapiens
acctatgtcccctac

SEQ ID NO: 573012 - DNA, 15 bp, Homo sapiens
cctatgtcccctaca

SEQ ID NO: 573013 - DNA, 15 bp, Homo sapiens
ctatgtcccctacat

SEQ ID NO: 573014 - DNA, 15 bp, Homo sapiens
tatgtcccctacata

SEQ ID NO: 573015 - DNA, 15 bp, Homo sapiens
atgtcccctacataa

SEQ ID NO: 573016 - DNA, 15 bp, Homo sapiens
tgtcccctacataac

SEQ ID NO: 573017 - DNA, 15 bp, Homo sapiens
gtcccctacataact

SEQ ID NO: 573018 - DNA, 15 bp, Homo sapiens
tcccctacataactc

SEQ ID NO: 573019 - DNA, 15 bp, Homo sapiens
cccctacataactct

SEQ ID NO: 573020 - DNA, 15 bp, Homo sapiens
ccctacataactctc

SEQ ID NO: 573021 - DNA, 15 bp, Homo sapiens
cctacataactctct

SEQ ID NO: 573022 - DNA, 15 bp, Homo sapiens
ctacataactctctc

SEQ ID NO: 573023 - DNA, 15 bp, Homo sapiens
tacataactctctcc

SEQ ID NO: 573024 - DNA, 15 bp, Homo sapiens
acataactctctcca

SEQ ID NO: 573025 - DNA, 15 bp, Homo sapiens
cataactctctccac

SEQ ID NO: 573026 - DNA, 15 bp, Homo sapiens
ataactctctccaca

SEQ ID NO: 573027 - DNA, 15 bp, Homo sapiens
taactctctccacaa

SEQ ID NO: 573028 - DNA, 15 bp, Homo sapiens
aactctctccacaac

SEQ ID NO: 573029 - DNA, 15 bp, Homo sapiens
actctctccacaact

SEQ ID NO: 573030 - DNA, 15 bp, Homo sapiens
ctctctccacaactc

SEQ ID NO: 573031 - DNA, 15 bp, Homo sapiens
tctctccacaactct

SEQ ID NO: 573032 - DNA, 15 bp, Homo sapiens
ctctccacaactcta

SEQ ID NO: 573033 - DNA, 15 bp, Homo sapiens
tctccacaactctaa

SEQ ID NO: 573034 - DNA, 15 bp, Homo sapiens
ctccacaactctaac

SEQ ID NO: 573035 - DNA, 15 bp, Homo sapiens
tccacaactctaacc

SEQ ID NO: 573036 - DNA, 15 bp, Homo sapiens
ccacaactctaacca

SEQ ID NO: 573037 - DNA, 15 bp, Homo sapiens
cacaactctaaccac

SEQ ID NO: 573038 - DNA, 15 bp, Homo sapiens
acaactctaaccacc

SEQ ID NO: 573039 - DNA, 15 bp, Homo sapiens
caactctaaccaccc

SEQ ID NO: 573040 - DNA, 15 bp, Homo sapiens
aactctaaccaccca

SEQ ID NO: 573041 - DNA, 15 bp, Homo sapiens
actctaaccacccat

SEQ ID NO: 573042 - DNA, 15 bp, Homo sapiens
ctctaaccacccatc

SEQ ID NO: 573043 - DNA, 15 bp, Homo sapiens
tctaaccacccatcc

SEQ ID NO: 573044 - DNA, 15 bp, Homo sapiens
ctaaccacccatccc

SEQ ID NO: 573045 - DNA, 15 bp, Homo sapiens
taaccacccatccct

SEQ ID NO: 573046 - DNA, 15 bp, Homo sapiens
aaccacccatccctt

SEQ ID NO: 573047 - DNA, 15 bp, Homo sapiens
accacccatccctta

SEQ ID NO: 573048 - DNA, 15 bp, Homo sapiens
ccacccatcccttag

SEQ ID NO: 573049 - DNA, 15 bp, Homo sapiens
cacccatcccttaga

SEQ ID NO: 573050 - DNA, 15 bp, Homo sapiens
acccatcccttagat

SEQ ID NO: 573051 - DNA, 15 bp, Homo sapiens
cccatcccttagata

SEQ ID NO: 573052 - DNA, 15 bp, Homo sapiens
ccatcccttagatag

SEQ ID NO: 573053 - DNA, 15 bp, Homo sapiens
catcccttagatagg

SEQ ID NO: 573054 - DNA, 15 bp, Homo sapiens
atcccttagataggg

SEQ ID NO: 573055 - DNA, 15 bp, Homo sapiens
tcccttagatagggc

SEQ ID NO: 573056 - DNA, 15 bp, Homo sapiens
cccttagatagggcc

SEQ ID NO: 573057 - DNA, 15 bp, Homo sapiens
ccttagatagggccc

SEQ ID NO: 573058 - DNA, 15 bp, Homo sapiens
cttagatagggcccc

SEQ ID NO: 573059 - DNA, 15 bp, Homo sapiens
ttagatagggccccg

SEQ ID NO: 573060 - DNA, 15 bp, Homo sapiens
tagatagggccccgg

SEQ ID NO: 573061 - DNA, 15 bp, Homo sapiens
agatagggccccggc

SEQ ID NO: 573062 - DNA, 15 bp, Homo sapiens
gatagggccccggcc

SEQ ID NO: 573063 - DNA, 15 bp, Homo sapiens
atagggccccggccc

SEQ ID NO: 573064 - DNA, 15 bp, Homo sapiens
tagggccccggccca

SEQ ID NO: 573065 - DNA, 15 bp, Homo sapiens
agggccccggcccag

SEQ ID NO: 573066 - DNA, 15 bp, Homo sapiens
gggccccggcccagg

SEQ ID NO: 573067 - DNA, 15 bp, Homo sapiens
ggccccggcccaggc

SEQ ID NO: 573068 - DNA, 15 bp, Homo sapiens
gccccggcccaggcc

SEQ ID NO: 573069 - DNA, 15 bp, Homo sapiens
ccccggcccaggccc

SEQ ID NO: 573070 - DNA, 15 bp, Homo sapiens
cccggcccaggccca

SEQ ID NO: 573071 - DNA, 15 bp, Homo sapiens
ccggcccaggcccat

SEQ ID NO: 573072 - DNA, 15 bp, Homo sapiens
cggcccaggcccatc

SEQ ID NO: 573073 - DNA, 15 bp, Homo sapiens
ggcccaggcccatca

SEQ ID NO: 573074 - DNA, 15 bp, Homo sapiens
gcccaggcccatcac

SEQ ID NO: 573075 - DNA, 15 bp, Homo sapiens
cccaggcccatcact

SEQ ID NO: 573076 - DNA, 15 bp, Homo sapiens
ccaggcccatcactt

SEQ ID NO: 573077 - DNA, 15 bp, Homo sapiens
caggcccatcacttt

SEQ ID NO: 573078 - DNA, 15 bp, Homo sapiens
aggcccatcactttg

SEQ ID NO: 573079 - DNA, 15 bp, Homo sapiens
ggcccatcactttga

SEQ ID NO: 573080 - DNA, 15 bp, Homo sapiens
gcccatcactttgag

SEQ ID NO: 573081 - DNA, 15 bp, Homo sapiens
cccatcactttgagc

SEQ ID NO: 573082 - DNA, 15 bp, Homo sapiens
ccatcactttgagcc

SEQ ID NO: 573083 - DNA, 15 bp, Homo sapiens
catcactttgagcct

SEQ ID NO: 573084 - DNA, 15 bp, Homo sapiens
atcactttgagcctt

SEQ ID NO: 573085 - DNA, 15 bp, Homo sapiens
tcactttgagccttg

SEQ ID NO: 573086 - DNA, 15 bp, Homo sapiens
cactttgagccttgg

SEQ ID NO: 573087 - DNA, 15 bp, Homo sapiens
actttgagccttgga

SEQ ID NO: 573088 - DNA, 15 bp, Homo sapiens
ctttgagccttggac

SEQ ID NO: 573089 - DNA, 15 bp, Homo sapiens
tttgagccttggacc

SEQ ID NO: 573090 - DNA, 15 bp, Homo sapiens
ttgagccttggaccc

SEQ ID NO: 573091 - DNA, 15 bp, Homo sapiens
tgagccttggacccc

SEQ ID NO: 573092 - DNA, 15 bp, Homo sapiens
gagccttggacccct

SEQ ID NO: 573093 - DNA, 15 bp, Homo sapiens
agccttggacccctc

SEQ ID NO: 573094 - DNA, 15 bp, Homo sapiens
gccttggacccctca

SEQ ID NO: 573095 - DNA, 15 bp, Homo sapiens
ccttggacccctcat

SEQ ID NO: 573096 - DNA, 15 bp, Homo sapiens
cttggacccctcatg

SEQ ID NO: 573097 - DNA, 15 bp, Homo sapiens
ttggacccctcatgg

SEQ ID NO: 573098 - DNA, 15 bp, Homo sapiens
tggacccctcatggg

SEQ ID NO: 573099 - DNA, 15 bp, Homo sapiens
ggacccctcatgggg

SEQ ID NO: 573100 - DNA, 15 bp, Homo sapiens
gacccctcatggggc

SEQ ID NO: 573101 - DNA, 15 bp, Homo sapiens
acccctcatggggcc

SEQ ID NO: 573102 - DNA, 15 bp, Homo sapiens
cccctcatggggccg

SEQ ID NO: 573103 - DNA, 15 bp, Homo sapiens
ccctcatggggccgg

SEQ ID NO: 573104 - DNA, 15 bp, Homo sapiens
cctcatggggccggc

SEQ ID NO: 573105 - DNA, 15 bp, Homo sapiens
ctcatggggccggcc

SEQ ID NO: 573106 - DNA, 15 bp, Homo sapiens
tcatggggccggcct

SEQ ID NO: 573107 - DNA, 15 bp, Homo sapiens
catggggccggcctg

SEQ ID NO: 573108 - DNA, 15 bp, Homo sapiens
atggggccggcctgt

SEQ ID NO: 573109 - DNA, 15 bp, Homo sapiens
tggggccggcctgtg

SEQ ID NO: 573110 - DNA, 15 bp, Homo sapiens
ggggccggcctgtgg

SEQ ID NO: 573111 - DNA, 15 bp, Homo sapiens
gggccggcctgtggc

SEQ ID NO: 573112 - DNA, 15 bp, Homo sapiens
ggccggcctgtggcc

SEQ ID NO: 573113 - DNA, 15 bp, Homo sapiens
gccggcctgtggcca

SEQ ID NO: 573114 - DNA, 15 bp, Homo sapiens
ccggcctgtggccag

SEQ ID NO: 573115 - DNA, 15 bp, Homo sapiens
cggcctgtggccagc

SEQ ID NO: 573116 - DNA, 15 bp, Homo sapiens
ggcctgtggccagca

SEQ ID NO: 573117 - DNA, 15 bp, Homo sapiens
gcctgtggccagcag

SEQ ID NO: 573118 - DNA, 15 bp, Homo sapiens
cctgtggccagcagg

SEQ ID NO: 573119 - DNA, 15 bp, Homo sapiens
ctgtggccagcaggg

SEQ ID NO: 573120 - DNA, 15 bp, Homo sapiens
tgtggccagcagggg

SEQ ID NO: 573121 - DNA, 15 bp, Homo sapiens
gtggccagcaggggc

SEQ ID NO: 573122 - DNA, 15 bp, Homo sapiens
tggccagcaggggct

SEQ ID NO: 573123 - DNA, 15 bp, Homo sapiens
ggccagcaggggctt

SEQ ID NO: 573124 - DNA, 15 bp, Homo sapiens
gccagcaggggcttc

SEQ ID NO: 573125 - DNA, 15 bp, Homo sapiens
ccagcaggggcttcc

SEQ ID NO: 573126 - DNA, 15 bp, Homo sapiens
cagcaggggcttccg

SEQ ID NO: 573127 - DNA, 15 bp, Homo sapiens
agcaggggcttccgt

SEQ ID NO: 573128 - DNA, 15 bp, Homo sapiens
gcaggggcttccgtc

SEQ ID NO: 573129 - DNA, 15 bp, Homo sapiens
caggggcttccgtcc

SEQ ID NO: 573130 - DNA, 15 bp, Homo sapiens
aggggcttccgtccc

SEQ ID NO: 573131 - DNA, 15 bp, Homo sapiens
ggggcttccgtccca

SEQ ID NO: 573132 - DNA, 15 bp, Homo sapiens
gggcttccgtcccag

SEQ ID NO: 573133 - DNA, 15 bp, Homo sapiens
ggcttccgtcccagt

SEQ ID NO: 573134 - DNA, 15 bp, Homo sapiens
gcttccgtcccagtc

SEQ ID NO: 573135 - DNA, 15 bp, Homo sapiens
cttccgtcccagtca

SEQ ID NO: 573136 - DNA, 15 bp, Homo sapiens
ttccgtcccagtcat

SEQ ID NO: 573137 - DNA, 15 bp, Homo sapiens
tccgtcccagtcatg

SEQ ID NO: 573138 - DNA, 15 bp, Homo sapiens
ccgtcccagtcatga

SEQ ID NO: 573139 - DNA, 15 bp, Homo sapiens
cgtcccagtcatgag

SEQ ID NO: 573140 - DNA, 15 bp, Homo sapiens
gtcccagtcatgagg

SEQ ID NO: 573141 - DNA, 15 bp, Homo sapiens
tcccagtcatgagga

SEQ ID NO: 573142 - DNA, 15 bp, Homo sapiens
cccagtcatgaggag

SEQ ID NO: 573143 - DNA, 15 bp, Homo sapiens
ccagtcatgaggagc

SEQ ID NO: 573144 - DNA, 15 bp, Homo sapiens
cagtcatgaggagcc

SEQ ID NO: 573145 - DNA, 15 bp, Homo sapiens
agtcatgaggagcct

SEQ ID NO: 573146 - DNA, 15 bp, Homo sapiens
gtcatgaggagcctg

SEQ ID NO: 573147 - DNA, 15 bp, Homo sapiens
tcatgaggagcctgg

SEQ ID NO: 573148 - DNA, 15 bp, Homo sapiens
catgaggagcctggg

SEQ ID NO: 573149 - DNA, 15 bp, Homo sapiens
atgaggagcctgggg

SEQ ID NO: 573150 - DNA, 15 bp, Homo sapiens
tgaggagcctggggc

SEQ ID NO: 573151 - DNA, 15 bp, Homo sapiens
gaggagcctggggcc

SEQ ID NO: 573152 - DNA, 15 bp, Homo sapiens
aggagcctggggcct

SEQ ID NO: 573153 - DNA, 15 bp, Homo sapiens
ggagcctggggcctc

SEQ ID NO: 573154 - DNA, 15 bp, Homo sapiens
gagcctggggcctct

SEQ ID NO: 573155 - DNA, 15 bp, Homo sapiens
agcctggggcctctt

SEQ ID NO: 573156 - DNA, 15 bp, Homo sapiens
gcctggggcctcttg

SEQ ID NO: 573157 - DNA, 15 bp, Homo sapiens
cctggggcctcttgg

SEQ ID NO: 573158 - DNA, 15 bp, Homo sapiens
ctggggcctcttggg

SEQ ID NO: 573159 - DNA, 15 bp, Homo sapiens
tggggcctcttgggc

SEQ ID NO: 573160 - DNA, 15 bp, Homo sapiens
ggggcctcttgggct

SEQ ID NO: 573161 - DNA, 15 bp, Homo sapiens
gggcctcttgggctt

SEQ ID NO: 573162 - DNA, 15 bp, Homo sapiens
ggcctcttgggcttg

SEQ ID NO: 573163 - DNA, 15 bp, Homo sapiens
gcctcttgggcttgg

SEQ ID NO: 573164 - DNA, 15 bp, Homo sapiens
cctcttgggcttggt

SEQ ID NO: 573165 - DNA, 15 bp, Homo sapiens
ctcttgggcttggtt

SEQ ID NO: 573166 - DNA, 15 bp, Homo sapiens
tcttgggcttggttc

SEQ ID NO: 573167 - DNA, 15 bp, Homo sapiens
cttgggcttggttct

SEQ ID NO: 573168 - DNA, 15 bp, Homo sapiens
ttgggcttggttctt

SEQ ID NO: 573169 - DNA, 15 bp, Homo sapiens
tgggcttggttcttc

SEQ ID NO: 573170 - DNA, 15 bp, Homo sapiens
gggcttggttcttca

SEQ ID NO: 573171 - DNA, 15 bp, Homo sapiens
ggcttggttcttcaa

SEQ ID NO: 573172 - DNA, 15 bp, Homo sapiens
gcttggttcttcaac

SEQ ID NO: 573173 - DNA, 15 bp, Homo sapiens
cttggttcttcaacc

SEQ ID NO: 573174 - DNA, 15 bp, Homo sapiens
ttggttcttcaaccc

SEQ ID NO: 573175 - DNA, 15 bp, Homo sapiens
tggttcttcaaccca

SEQ ID NO: 573176 - DNA, 15 bp, Homo sapiens
ggttcttcaacccac

SEQ ID NO: 573177 - DNA, 15 bp, Homo sapiens
gttcttcaacccact

SEQ ID NO: 573178 - DNA, 15 bp, Homo sapiens
ttcttcaacccactg

SEQ ID NO: 573179 - DNA, 15 bp, Homo sapiens
tcttcaacccactga

SEQ ID NO: 573180 - DNA, 15 bp, Homo sapiens
cttcaacccactgaa

SEQ ID NO: 573181 - DNA, 15 bp, Homo sapiens
ttcaacccactgaag

SEQ ID NO: 573182 - DNA, 15 bp, Homo sapiens
tcaacccactgaaga

SEQ ID NO: 573183 - DNA, 15 bp, Homo sapiens
caacccactgaagag

SEQ ID NO: 573184 - DNA, 15 bp, Homo sapiens
aacccactgaagagc

SEQ ID NO: 573185 - DNA, 15 bp, Homo sapiens
acccactgaagagct

SEQ ID NO: 573186 - DNA, 15 bp, Homo sapiens
cccactgaagagctg

SEQ ID NO: 573187 - DNA, 15 bp, Homo sapiens
ccactgaagagctga

SEQ ID NO: 573188 - DNA, 15 bp, Homo sapiens
cactgaagagctgag

SEQ ID NO: 573189 - DNA, 15 bp, Homo sapiens
actgaagagctgaga

SEQ ID NO: 573190 - DNA, 15 bp, Homo sapiens
ctgaagagctgagag

SEQ ID NO: 573191 - DNA, 15 bp, Homo sapiens
tgaagagctgagagc

SEQ ID NO: 573192 - DNA, 15 bp, Homo sapiens
gaagagctgagagcc

SEQ ID NO: 573193 - DNA, 15 bp, Homo sapiens
aagagctgagagcca

SEQ ID NO: 573194 - DNA, 15 bp, Homo sapiens
agagctgagagccat

SEQ ID NO: 573195 - DNA, 15 bp, Homo sapiens
gagctgagagccatg

SEQ ID NO: 573196 - DNA, 15 bp, Homo sapiens
agctgagagccatgt

SEQ ID NO: 573197 - DNA, 15 bp, Homo sapiens
gctgagagccatgtc

SEQ ID NO: 573198 - DNA, 15 bp, Homo sapiens
ctgagagccatgtca

SEQ ID NO: 573199 - DNA, 15 bp, Homo sapiens
tgagagccatgtcac

SEQ ID NO: 573200 - DNA, 15 bp, Homo sapiens
gagagccatgtcact

SEQ ID NO: 573201 - DNA, 15 bp, Homo sapiens
agagccatgtcactg

SEQ ID NO: 573202 - DNA, 15 bp, Homo sapiens
gagccatgtcactgg

SEQ ID NO: 573203 - DNA, 15 bp, Homo sapiens
agccatgtcactgga

SEQ ID NO: 573204 - DNA, 15 bp, Homo sapiens
gccatgtcactggac

SEQ ID NO: 573205 - DNA, 15 bp, Homo sapiens
ccatgtcactggacc

SEQ ID NO: 573206 - DNA, 15 bp, Homo sapiens
catgtcactggaccc

SEQ ID NO: 573207 - DNA, 15 bp, Homo sapiens
atgtcactggacccc

SEQ ID NO: 573208 - DNA, 15 bp, Homo sapiens
tgtcactggacccca

SEQ ID NO: 573209 - DNA, 15 bp, Homo sapiens
gtcactggaccccac

SEQ ID NO: 573210 - DNA, 15 bp, Homo sapiens
tcactggaccccact

SEQ ID NO: 573211 - DNA, 15 bp, Homo sapiens
cactggaccccactt

SEQ ID NO: 573212 - DNA, 15 bp, Homo sapiens
actggaccccacttg

SEQ ID NO: 573213 - DNA, 15 bp, Homo sapiens
ctggaccccacttga

SEQ ID NO: 573214 - DNA, 15 bp, Homo sapiens
tggaccccacttgag

SEQ ID NO: 573215 - DNA, 15 bp, Homo sapiens
ggaccccacttgagg

SEQ ID NO: 573216 - DNA, 15 bp, Homo sapiens
gaccccacttgaggc

SEQ ID NO: 573217 - DNA, 15 bp, Homo sapiens
accccacttgaggcc

SEQ ID NO: 573218 - DNA, 15 bp, Homo sapiens
ccccacttgaggcct

SEQ ID NO: 573219 - DNA, 15 bp, Homo sapiens
cccacttgaggcctt

SEQ ID NO: 573220 - DNA, 15 bp, Homo sapiens
ccacttgaggcctta

SEQ ID NO: 573221 - DNA, 15 bp, Homo sapiens
cacttgaggccttag

SEQ ID NO: 573222 - DNA, 15 bp, Homo sapiens
acttgaggccttagt

SEQ ID NO: 573223 - DNA, 15 bp, Homo sapiens
cttgaggccttagtt

SEQ ID NO: 573224 - DNA, 15 bp, Homo sapiens
ttgaggccttagttt

SEQ ID NO: 573225 - DNA, 15 bp, Homo sapiens
tgaggccttagtttc

SEQ ID NO: 573226 - DNA, 15 bp, Homo sapiens
gaggccttagtttct

SEQ ID NO: 573227 - DNA, 15 bp, Homo sapiens
aggccttagtttctt

SEQ ID NO: 573228 - DNA, 15 bp, Homo sapiens
ggccttagtttcttc

SEQ ID NO: 573229 - DNA, 15 bp, Homo sapiens
gccttagtttcttcc

SEQ ID NO: 573230 - DNA, 15 bp, Homo sapiens
ccttagtttcttcct

SEQ ID NO: 573231 - DNA, 15 bp, Homo sapiens
cttagtttcttcctt

SEQ ID NO: 573232 - DNA, 15 bp, Homo sapiens
ttagtttcttccttc

SEQ ID NO: 573233 - DNA, 15 bp, Homo sapiens
tagtttcttccttcc

SEQ ID NO: 573234 - DNA, 15 bp, Homo sapiens
agtttcttccttccc

SEQ ID NO: 573235 - DNA, 15 bp, Homo sapiens
gtttcttccttcccc

SEQ ID NO: 573236 - DNA, 15 bp, Homo sapiens
tttcttccttcccct

SEQ ID NO: 573237 - DNA, 15 bp, Homo sapiens
ttcttccttcccctc

SEQ ID NO: 573238 - DNA, 15 bp, Homo sapiens
tcttccttcccctcc

SEQ ID NO: 573239 - DNA, 15 bp, Homo sapiens
cttccttcccctcct

SEQ ID NO: 573240 - DNA, 15 bp, Homo sapiens
ttccttcccctcctg

SEQ ID NO: 573241 - DNA, 15 bp, Homo sapiens
tccttcccctcctgc

SEQ ID NO: 573242 - DNA, 15 bp, Homo sapiens
ccttcccctcctgca

SEQ ID NO: 573243 - DNA, 15 bp, Homo sapiens
cttcccctcctgcat

SEQ ID NO: 573244 - DNA, 15 bp, Homo sapiens
ttcccctcctgcatg

SEQ ID NO: 573245 - DNA, 15 bp, Homo sapiens
tcccctcctgcatgg

SEQ ID NO: 573246 - DNA, 15 bp, Homo sapiens
cccctcctgcatggc

SEQ ID NO: 573247 - DNA, 15 bp, Homo sapiens
ccctcctgcatggcc

SEQ ID NO: 573248 - DNA, 15 bp, Homo sapiens
cctcctgcatggcct

SEQ ID NO: 573249 - DNA, 15 bp, Homo sapiens
ctcctgcatggcctt

SEQ ID NO: 573250 - DNA, 15 bp, Homo sapiens
tcctgcatggccttc

SEQ ID NO: 573251 - DNA, 15 bp, Homo sapiens
cctgcatggccttcc

SEQ ID NO: 573252 - DNA, 15 bp, Homo sapiens
ctgcatggccttccc

SEQ ID NO: 573253 - DNA, 15 bp, Homo sapiens
tgcatggccttcccc

SEQ ID NO: 573254 - DNA, 15 bp, Homo sapiens
gcatggccttcccca

SEQ ID NO: 573255 - DNA, 15 bp, Homo sapiens
catggccttccccag

SEQ ID NO: 573256 - DNA, 15 bp, Homo sapiens
atggccttccccagg

SEQ ID NO: 573257 - DNA, 15 bp, Homo sapiens
tggccttccccaggt

SEQ ID NO: 573258 - DNA, 15 bp, Homo sapiens
ggccttccccaggtt

SEQ ID NO: 573259 - DNA, 15 bp, Homo sapiens
gccttccccaggttt

SEQ ID NO: 573260 - DNA, 15 bp, Homo sapiens
ccttccccaggtttc

SEQ ID NO: 573261 - DNA, 15 bp, Homo sapiens
cttccccaggtttcc

SEQ ID NO: 573262 - DNA, 15 bp, Homo sapiens
ttccccaggtttccc

SEQ ID NO: 573263 - DNA, 15 bp, Homo sapiens
tccccaggtttcccc

SEQ ID NO: 573264 - DNA, 15 bp, Homo sapiens
ccccaggtttcccct

SEQ ID NO: 573265 - DNA, 15 bp, Homo sapiens
cccaggtttcccctt

SEQ ID NO: 573266 - DNA, 15 bp, Homo sapiens
ccaggtttccccttc

SEQ ID NO: 573267 - DNA, 15 bp, Homo sapiens
caggtttccccttct

SEQ ID NO: 573268 - DNA, 15 bp, Homo sapiens
aggtttccccttctt

SEQ ID NO: 573269 - DNA, 15 bp, Homo sapiens
ggtttccccttctta

SEQ ID NO: 573270 - DNA, 15 bp, Homo sapiens
gtttccccttcttac

SEQ ID NO: 573271 - DNA, 15 bp, Homo sapiens
tttccccttcttact

SEQ ID NO: 573272 - DNA, 15 bp, Homo sapiens
ttccccttcttactt

SEQ ID NO: 573273 - DNA, 15 bp, Homo sapiens
tccccttcttactta

SEQ ID NO: 573274 - DNA, 15 bp, Homo sapiens
ccccttcttacttat

SEQ ID NO: 573275 - DNA, 15 bp, Homo sapiens
cccttcttacttatg

SEQ ID NO: 573276 - DNA, 15 bp, Homo sapiens
ccttcttacttatga

SEQ ID NO: 573277 - DNA, 15 bp, Homo sapiens
cttcttacttatgag

SEQ ID NO: 573278 - DNA, 15 bp, Homo sapiens
ttcttacttatgaga

SEQ ID NO: 573279 - DNA, 15 bp, Homo sapiens
tcttacttatgagac

SEQ ID NO: 573280 - DNA, 15 bp, Homo sapiens
cttacttatgagaca

SEQ ID NO: 573281 - DNA, 15 bp, Homo sapiens
ttacttatgagacag

SEQ ID NO: 573282 - DNA, 15 bp, Homo sapiens
tacttatgagacagt

SEQ ID NO: 573283 - DNA, 15 bp, Homo sapiens
acttatgagacagtg

SEQ ID NO: 573284 - DNA, 15 bp, Homo sapiens
cttatgagacagtgg

SEQ ID NO: 573285 - DNA, 15 bp, Homo sapiens
ttatgagacagtggg

SEQ ID NO: 573286 - DNA, 15 bp, Homo sapiens
tatgagacagtgggt

SEQ ID NO: 573287 - DNA, 15 bp, Homo sapiens
atgagacagtgggtc

SEQ ID NO: 573288 - DNA, 15 bp, Homo sapiens
tgagacagtgggtct

SEQ ID NO: 573289 - DNA, 15 bp, Homo sapiens
gagacagtgggtctg

SEQ ID NO: 573290 - DNA, 15 bp, Homo sapiens
agacagtgggtctgg

SEQ ID NO: 573291 - DNA, 15 bp, Homo sapiens
gacagtgggtctggg

SEQ ID NO: 573292 - DNA, 15 bp, Homo sapiens
acagtgggtctgggc

SEQ ID NO: 573293 - DNA, 15 bp, Homo sapiens
cagtgggtctgggcc

SEQ ID NO: 573294 - DNA, 15 bp, Homo sapiens
agtgggtctgggcct

SEQ ID NO: 573295 - DNA, 15 bp, Homo sapiens
gtgggtctgggcctc

SEQ ID NO: 573296 - DNA, 15 bp, Homo sapiens
tgggtctgggcctca

SEQ ID NO: 573297 - DNA, 15 bp, Homo sapiens
gggtctgggcctcac

SEQ ID NO: 573298 - DNA, 15 bp, Homo sapiens
ggtctgggcctcaca

SEQ ID NO: 573299 - DNA, 15 bp, Homo sapiens
gtctgggcctcacaa

SEQ ID NO: 573300 - DNA, 15 bp, Homo sapiens
tctgggcctcacaat

SEQ ID NO: 573301 - DNA, 15 bp, Homo sapiens
ctgggcctcacaata

SEQ ID NO: 573302 - DNA, 15 bp, Homo sapiens
tgggcctcacaatag

SEQ ID NO: 573303 - DNA, 15 bp, Homo sapiens
gggcctcacaatagg

SEQ ID NO: 573304 - DNA, 15 bp, Homo sapiens
ggcctcacaataggg

SEQ ID NO: 573305 - DNA, 15 bp, Homo sapiens
gcctcacaatagggg

SEQ ID NO: 573306 - DNA, 15 bp, Homo sapiens
cctcacaatagggga

SEQ ID NO: 573307 - DNA, 15 bp, Homo sapiens
ctcacaataggggat

SEQ ID NO: 573308 - DNA, 15 bp, Homo sapiens
tcacaataggggatg

SEQ ID NO: 573309 - DNA, 15 bp, Homo sapiens
cacaataggggatgc

SEQ ID NO: 573310 - DNA, 15 bp, Homo sapiens
acaataggggatgct

SEQ ID NO: 573311 - DNA, 15 bp, Homo sapiens
caataggggatgctc

SEQ ID NO: 573312 - DNA, 15 bp, Homo sapiens
aataggggatgctca

SEQ ID NO: 573313 - DNA, 15 bp, Homo sapiens
ataggggatgctcag

SEQ ID NO: 573314 - DNA, 15 bp, Homo sapiens
taggggatgctcagg

SEQ ID NO: 573315 - DNA, 15 bp, Homo sapiens
aggggatgctcaggc

SEQ ID NO: 573316 - DNA, 15 bp, Homo sapiens
ggggatgctcaggct

SEQ ID NO: 573317 - DNA, 15 bp, Homo sapiens
gggatgctcaggctt

SEQ ID NO: 573318 - DNA, 15 bp, Homo sapiens
ggatgctcaggctta

SEQ ID NO: 573319 - DNA, 15 bp, Homo sapiens
gatgctcaggcttag

SEQ ID NO: 573320 - DNA, 15 bp, Homo sapiens
atgctcaggcttagg

SEQ ID NO: 573321 - DNA, 15 bp, Homo sapiens
tgctcaggcttaggt

SEQ ID NO: 573322 - DNA, 15 bp, Homo sapiens
gctcaggcttaggtg

SEQ ID NO: 573323 - DNA, 15 bp, Homo sapiens
ctcaggcttaggtgc

SEQ ID NO: 573324 - DNA, 15 bp, Homo sapiens
tcaggcttaggtgcc

SEQ ID NO: 573325 - DNA, 15 bp, Homo sapiens
caggcttaggtgcct

SEQ ID NO: 573326 - DNA, 15 bp, Homo sapiens
aggcttaggtgcctc

SEQ ID NO: 573327 - DNA, 15 bp, Homo sapiens
ggcttaggtgcctcc

SEQ ID NO: 573328 - DNA, 15 bp, Homo sapiens
gcttaggtgcctccc

SEQ ID NO: 573329 - DNA, 15 bp, Homo sapiens
cttaggtgcctcccc

SEQ ID NO: 573330 - DNA, 15 bp, Homo sapiens
ttaggtgcctccccg

SEQ ID NO: 573331 - DNA, 15 bp, Homo sapiens
taggtgcctccccgt

SEQ ID NO: 573332 - DNA, 15 bp, Homo sapiens
aggtgcctccccgtc

SEQ ID NO: 573333 - DNA, 15 bp, Homo sapiens
ggtgcctccccgtcc

SEQ ID NO: 573334 - DNA, 15 bp, Homo sapiens
gtgcctccccgtccc

SEQ ID NO: 573335 - DNA, 15 bp, Homo sapiens
tgcctccccgtcccc

SEQ ID NO: 573336 - DNA, 15 bp, Homo sapiens
gcctccccgtccccc

SEQ ID NO: 573337 - DNA, 15 bp, Homo sapiens
cctccccgtccccca

SEQ ID NO: 573338 - DNA, 15 bp, Homo sapiens
ctccccgtcccccag

SEQ ID NO: 573339 - DNA, 15 bp, Homo sapiens
tccccgtcccccaga

SEQ ID NO: 573340 - DNA, 15 bp, Homo sapiens
ccccgtcccccagac

SEQ ID NO: 573341 - DNA, 15 bp, Homo sapiens
cccgtcccccagaca

SEQ ID NO: 573342 - DNA, 15 bp, Homo sapiens
ccgtcccccagacag

SEQ ID NO: 573343 - DNA, 15 bp, Homo sapiens
cgtcccccagacagt

SEQ ID NO: 573344 - DNA, 15 bp, Homo sapiens
gtcccccagacagtc

SEQ ID NO: 573345 - DNA, 15 bp, Homo sapiens
tcccccagacagtcc

SEQ ID NO: 573346 - DNA, 15 bp, Homo sapiens
cccccagacagtccc

SEQ ID NO: 573347 - DNA, 15 bp, Homo sapiens
ccccagacagtccct

SEQ ID NO: 573348 - DNA, 15 bp, Homo sapiens
cccagacagtccctc

SEQ ID NO: 573349 - DNA, 15 bp, Homo sapiens
ccagacagtccctca

SEQ ID NO: 573350 - DNA, 15 bp, Homo sapiens
cagacagtccctcag

SEQ ID NO: 573351 - DNA, 15 bp, Homo sapiens
agacagtccctcagc

SEQ ID NO: 573352 - DNA, 15 bp, Homo sapiens
gacagtccctcagcc

SEQ ID NO: 573353 - DNA, 15 bp, Homo sapiens
acagtccctcagccc

SEQ ID NO: 573354 - DNA, 15 bp, Homo sapiens
cagtccctcagcccc

SEQ ID NO: 573355 - DNA, 15 bp, Homo sapiens
agtccctcagcccca

SEQ ID NO: 573356 - DNA, 15 bp, Homo sapiens
gtccctcagccccag

SEQ ID NO: 573357 - DNA, 15 bp, Homo sapiens
tccctcagccccagt

SEQ ID NO: 573358 - DNA, 15 bp, Homo sapiens
ccctcagccccagtg

SEQ ID NO: 573359 - DNA, 15 bp, Homo sapiens
cctcagccccagtga

SEQ ID NO: 573360 - DNA, 15 bp, Homo sapiens
ctcagccccagtgaa

SEQ ID NO: 573361 - DNA, 15 bp, Homo sapiens
tcagccccagtgaac

SEQ ID NO: 573362 - DNA, 15 bp, Homo sapiens
cagccccagtgaacg

SEQ ID NO: 573363 - DNA, 15 bp, Homo sapiens
agccccagtgaacgt

SEQ ID NO: 573364 - DNA, 15 bp, Homo sapiens
gccccagtgaacgtc

SEQ ID NO: 573365 - DNA, 15 bp, Homo sapiens
ccccagtgaacgtca

SEQ ID NO: 573366 - DNA, 15 bp, Homo sapiens
cccagtgaacgtcac

SEQ ID NO: 573367 - DNA, 15 bp, Homo sapiens
ccagtgaacgtcacc

SEQ ID NO: 573368 - DNA, 15 bp, Homo sapiens
cagtgaacgtcaccg

SEQ ID NO: 573369 - DNA, 15 bp, Homo sapiens
agtgaacgtcaccgt

SEQ ID NO: 573370 - DNA, 15 bp, Homo sapiens
gtgaacgtcaccgtc

SEQ ID NO: 573371 - DNA, 15 bp, Homo sapiens
tgaacgtcaccgtca

SEQ ID NO: 573372 - DNA, 15 bp, Homo sapiens
gaacgtcaccgtcag

SEQ ID NO: 573373 - DNA, 15 bp, Homo sapiens
aacgtcaccgtcagg

SEQ ID NO: 573374 - DNA, 15 bp, Homo sapiens
acgtcaccgtcaggc

SEQ ID NO: 573375 - DNA, 15 bp, Homo sapiens
cgtcaccgtcaggca

SEQ ID NO: 573376 - DNA, 15 bp, Homo sapiens
gtcaccgtcaggcac

SEQ ID NO: 573377 - DNA, 15 bp, Homo sapiens
tcaccgtcaggcacc

SEQ ID NO: 573378 - DNA, 15 bp, Homo sapiens
caccgtcaggcacct

SEQ ID NO: 573379 - DNA, 15 bp, Homo sapiens
accgtcaggcacctc

SEQ ID NO: 573380 - DNA, 15 bp, Homo sapiens
ccgtcaggcacctca

SEQ ID NO: 573381 - DNA, 15 bp, Homo sapiens
cgtcaggcacctcaa

SEQ ID NO: 573382 - DNA, 15 bp, Homo sapiens
gtcaggcacctcaag

SEQ ID NO: 573383 - DNA, 15 bp, Homo sapiens
tcaggcacctcaagg

SEQ ID NO: 573384 - DNA, 15 bp, Homo sapiens
caggcacctcaaggc

SEQ ID NO: 573385 - DNA, 15 bp, Homo sapiens
aggcacctcaaggcc

SEQ ID NO: 573386 - DNA, 15 bp, Homo sapiens
ggcacctcaaggcca

SEQ ID NO: 573387 - DNA, 15 bp, Homo sapiens
gcacctcaaggccaa

SEQ ID NO: 573388 - DNA, 15 bp, Homo sapiens
cacctcaaggccaac

SEQ ID NO: 573389 - DNA, 15 bp, Homo sapiens
acctcaaggccaact

SEQ ID NO: 573390 - DNA, 15 bp, Homo sapiens
cctcaaggccaactc

SEQ ID NO: 573391 - DNA, 15 bp, Homo sapiens
ctcaaggccaactct

SEQ ID NO: 573392 - DNA, 15 bp, Homo sapiens
tcaaggccaactctg

SEQ ID NO: 573393 - DNA, 15 bp, Homo sapiens
caaggccaactctgc

SEQ ID NO: 573394 - DNA, 15 bp, Homo sapiens
aaggccaactctgca

SEQ ID NO: 573395 - DNA, 15 bp, Homo sapiens
aggccaactctgcag

SEQ ID NO: 573396 - DNA, 15 bp, Homo sapiens
ggccaactctgcagt

SEQ ID NO: 573397 - DNA, 15 bp, Homo sapiens
gccaactctgcagtg

SEQ ID NO: 573398 - DNA, 15 bp, Homo sapiens
ccaactctgcagtgg

SEQ ID NO: 573399 - DNA, 15 bp, Homo sapiens
caactctgcagtggt

SEQ ID NO: 573400 - DNA, 15 bp, Homo sapiens
aactctgcagtggtg

SEQ ID NO: 573401 - DNA, 15 bp, Homo sapiens
actctgcagtggtga

SEQ ID NO: 573402 - DNA, 15 bp, Homo sapiens
ctctgcagtggtgag

SEQ ID NO: 573403 - DNA, 15 bp, Homo sapiens
tctgcagtggtgagc

SEQ ID NO: 573404 - DNA, 15 bp, Homo sapiens
ctgcagtggtgagct

SEQ ID NO: 573405 - DNA, 15 bp, Homo sapiens
tgcagtggtgagctg

SEQ ID NO: 573406 - DNA, 15 bp, Homo sapiens
gcagtggtgagctgg

SEQ ID NO: 573407 - DNA, 15 bp, Homo sapiens
cagtggtgagctggg

SEQ ID NO: 573408 - DNA, 15 bp, Homo sapiens
agtggtgagctggga

SEQ ID NO: 573409 - DNA, 15 bp, Homo sapiens
gtggtgagctgggat

SEQ ID NO: 573410 - DNA, 15 bp, Homo sapiens
tggtgagctgggatg

SEQ ID NO: 573411 - DNA, 15 bp, Homo sapiens
ggtgagctgggatgt

SEQ ID NO: 573412 - DNA, 15 bp, Homo sapiens
gtgagctgggatgtt

SEQ ID NO: 573413 - DNA, 15 bp, Homo sapiens
tgagctgggatgttc

SEQ ID NO: 573414 - DNA, 15 bp, Homo sapiens
gagctgggatgttct

SEQ ID NO: 573415 - DNA, 15 bp, Homo sapiens
agctgggatgttctg

SEQ ID NO: 573416 - DNA, 15 bp, Homo sapiens
gctgggatgttctgg

SEQ ID NO: 573417 - DNA, 15 bp, Homo sapiens
ctgggatgttctgga

SEQ ID NO: 573418 - DNA, 15 bp, Homo sapiens
tgggatgttctggag

SEQ ID NO: 573419 - DNA, 15 bp, Homo sapiens
gggatgttctggagg

SEQ ID NO: 573420 - DNA, 15 bp, Homo sapiens
ggatgttctggagga

SEQ ID NO: 573421 - DNA, 15 bp, Homo sapiens
gatgttctggaggat

SEQ ID NO: 573422 - DNA, 15 bp, Homo sapiens
atgttctggaggatg

SEQ ID NO: 573423 - DNA, 15 bp, Homo sapiens
tgttctggaggatga

SEQ ID NO: 573424 - DNA, 15 bp, Homo sapiens
gttctggaggatgag

SEQ ID NO: 573425 - DNA, 15 bp, Homo sapiens
ttctggaggatgagg

SEQ ID NO: 573426 - DNA, 15 bp, Homo sapiens
tctggaggatgaggt

SEQ ID NO: 573427 - DNA, 15 bp, Homo sapiens
ctggaggatgaggtt

SEQ ID NO: 573428 - DNA, 15 bp, Homo sapiens
tggaggatgaggttg

SEQ ID NO: 573429 - DNA, 15 bp, Homo sapiens
ggaggatgaggttgt

SEQ ID NO: 573430 - DNA, 15 bp, Homo sapiens
gaggatgaggttgtc

SEQ ID NO: 573431 - DNA, 15 bp, Homo sapiens
aggatgaggttgtca

SEQ ID NO: 573432 - DNA, 15 bp, Homo sapiens
ggatgaggttgtcat

SEQ ID NO: 573433 - DNA, 15 bp, Homo sapiens
gatgaggttgtcatc

SEQ ID NO: 573434 - DNA, 15 bp, Homo sapiens
atgaggttgtcatcg

SEQ ID NO: 573435 - DNA, 15 bp, Homo sapiens
tgaggttgtcatcgg

SEQ ID NO: 573436 - DNA, 15 bp, Homo sapiens
gaggttgtcatcgga

SEQ ID NO: 573437 - DNA, 15 bp, Homo sapiens
aggttgtcatcggat

SEQ ID NO: 573438 - DNA, 15 bp, Homo sapiens
ggttgtcatcggatt

SEQ ID NO: 573439 - DNA, 15 bp, Homo sapiens
gttgtcatcggattt

SEQ ID NO: 573440 - DNA, 15 bp, Homo sapiens
ttgtcatcggatttg

SEQ ID NO: 573441 - DNA, 15 bp, Homo sapiens
tgtcatcggatttgc

SEQ ID NO: 573442 - DNA, 15 bp, Homo sapiens
gtcatcggatttgcc

SEQ ID NO: 573443 - DNA, 15 bp, Homo sapiens
tcatcggatttgcca

SEQ ID NO: 573444 - DNA, 15 bp, Homo sapiens
catcggatttgccat

SEQ ID NO: 573445 - DNA, 15 bp, Homo sapiens
atcggatttgccatc

SEQ ID NO: 573446 - DNA, 15 bp, Homo sapiens
tcggatttgccatct

SEQ ID NO: 573447 - DNA, 15 bp, Homo sapiens
cggatttgccatctc

SEQ ID NO: 573448 - DNA, 15 bp, Homo sapiens
ggatttgccatctcc

SEQ ID NO: 573449 - DNA, 15 bp, Homo sapiens
gatttgccatctccc

SEQ ID NO: 573450 - DNA, 15 bp, Homo sapiens
atttgccatctccca

SEQ ID NO: 573451 - DNA, 15 bp, Homo sapiens
tttgccatctcccag

SEQ ID NO: 573452 - DNA, 15 bp, Homo sapiens
ttgccatctcccagc

SEQ ID NO: 573453 - DNA, 15 bp, Homo sapiens
tgccatctcccagca

SEQ ID NO: 573454 - DNA, 15 bp, Homo sapiens
gccatctcccagcag

SEQ ID NO: 573455 - DNA, 15 bp, Homo sapiens
ccatctcccagcagg

SEQ ID NO: 573456 - DNA, 15 bp, Homo sapiens
catctcccagcaggt

SEQ ID NO: 573457 - DNA, 15 bp, Homo sapiens
atctcccagcaggta

SEQ ID NO: 573458 - DNA, 15 bp, Homo sapiens
tctcccagcaggtaa

SEQ ID NO: 573459 - DNA, 15 bp, Homo sapiens
ctcccagcaggtaat

SEQ ID NO: 573460 - DNA, 15 bp, Homo sapiens
tcccagcaggtaatg

SEQ ID NO: 573461 - DNA, 15 bp, Homo sapiens
cccagcaggtaatgc

SEQ ID NO: 573462 - DNA, 15 bp, Homo sapiens
ccagcaggtaatgct

SEQ ID NO: 573463 - DNA, 15 bp, Homo sapiens
cagcaggtaatgctc

SEQ ID NO: 573464 - DNA, 15 bp, Homo sapiens
agcaggtaatgctcc

SEQ ID NO: 573465 - DNA, 15 bp, Homo sapiens
gcaggtaatgctcca

SEQ ID NO: 573466 - DNA, 15 bp, Homo sapiens
caggtaatgctccac

SEQ ID NO: 573467 - DNA, 15 bp, Homo sapiens
aggtaatgctccact

SEQ ID NO: 573468 - DNA, 15 bp, Homo sapiens
ggtaatgctccactg

SEQ ID NO: 573469 - DNA, 15 bp, Homo sapiens
gtaatgctccactgt

SEQ ID NO: 573470 - DNA, 15 bp, Homo sapiens
taatgctccactgtc

SEQ ID NO: 573471 - DNA, 15 bp, Homo sapiens
aatgctccactgtcc

SEQ ID NO: 573472 - DNA, 15 bp, Homo sapiens
atgctccactgtcct

SEQ ID NO: 573473 - DNA, 15 bp, Homo sapiens
tgctccactgtcctt

SEQ ID NO: 573474 - DNA, 15 bp, Homo sapiens
gctccactgtcctta

SEQ ID NO: 573475 - DNA, 15 bp, Homo sapiens
ctccactgtccttag

SEQ ID NO: 573476 - DNA, 15 bp, Homo sapiens
tccactgtccttagg

SEQ ID NO: 573477 - DNA, 15 bp, Homo sapiens
ccactgtccttagga

SEQ ID NO: 573478 - DNA, 15 bp, Homo sapiens
cactgtccttaggag

SEQ ID NO: 573479 - DNA, 15 bp, Homo sapiens
actgtccttaggagg

SEQ ID NO: 573480 - DNA, 15 bp, Homo sapiens
ctgtccttaggaggg

SEQ ID NO: 573481 - DNA, 15 bp, Homo sapiens
tgtccttaggaggga

SEQ ID NO: 573482 - DNA, 15 bp, Homo sapiens
gtccttaggagggaa

SEQ ID NO: 573483 - DNA, 15 bp, Homo sapiens
tccttaggagggaag

SEQ ID NO: 573484 - DNA, 15 bp, Homo sapiens
ccttaggagggaagg

SEQ ID NO: 573485 - DNA, 15 bp, Homo sapiens
cttaggagggaagga

SEQ ID NO: 573486 - DNA, 15 bp, Homo sapiens
ttaggagggaaggac

SEQ ID NO: 573487 - DNA, 15 bp, Homo sapiens
taggagggaaggaca

SEQ ID NO: 573488 - DNA, 15 bp, Homo sapiens
aggagggaaggacac

SEQ ID NO: 573489 - DNA, 15 bp, Homo sapiens
ggagggaaggacaca

SEQ ID NO: 573490 - DNA, 15 bp, Homo sapiens
gagggaaggacacat

SEQ ID NO: 573491 - DNA, 15 bp, Homo sapiens
agggaaggacacatc

SEQ ID NO: 573492 - DNA, 15 bp, Homo sapiens
gggaaggacacatca

SEQ ID NO: 573493 - DNA, 15 bp, Homo sapiens
ggaaggacacatcaa

SEQ ID NO: 573494 - DNA, 15 bp, Homo sapiens
gaaggacacatcaag

SEQ ID NO: 573495 - DNA, 15 bp, Homo sapiens
aaggacacatcaaga

SEQ ID NO: 573496 - DNA, 15 bp, Homo sapiens
aggacacatcaagac

SEQ ID NO: 573497 - DNA, 15 bp, Homo sapiens
ggacacatcaagaca

SEQ ID NO: 573498 - DNA, 15 bp, Homo sapiens
gacacatcaagacag

SEQ ID NO: 573499 - DNA, 15 bp, Homo sapiens
acacatcaagacagt

SEQ ID NO: 573500 - DNA, 15 bp, Homo sapiens
cacatcaagacagta

SEQ ID NO: 573501 - DNA, 15 bp, Homo sapiens
acatcaagacagtag

SEQ ID NO: 573502 - DNA, 15 bp, Homo sapiens
catcaagacagtagt

SEQ ID NO: 573503 - DNA, 15 bp, Homo sapiens
atcaagacagtagtg

SEQ ID NO: 573504 - DNA, 15 bp, Homo sapiens
tcaagacagtagtgg

SEQ ID NO: 573505 - DNA, 15 bp, Homo sapiens
caagacagtagtggc

SEQ ID NO: 573506 - DNA, 15 bp, Homo sapiens
aagacagtagtggca

SEQ ID NO: 573507 - DNA, 15 bp, Homo sapiens
agacagtagtggcag

SEQ ID NO: 573508 - DNA, 15 bp, Homo sapiens
gacagtagtggcaga

SEQ ID NO: 573509 - DNA, 15 bp, Homo sapiens
acagtagtggcagat

SEQ ID NO: 573510 - DNA, 15 bp, Homo sapiens
cagtagtggcagatg

SEQ ID NO: 573511 - DNA, 15 bp, Homo sapiens
agtagtggcagatgg

SEQ ID NO: 573512 - DNA, 15 bp, Homo sapiens
gtagtggcagatggg

SEQ ID NO: 573513 - DNA, 15 bp, Homo sapiens
tagtggcagatgggg

SEQ ID NO: 573514 - DNA, 15 bp, Homo sapiens
agtggcagatggggg

SEQ ID NO: 573515 - DNA, 15 bp, Homo sapiens
gtggcagatgggggt

SEQ ID NO: 573516 - DNA, 15 bp, Homo sapiens
tggcagatgggggta

SEQ ID NO: 573517 - DNA, 15 bp, Homo sapiens
ggcagatgggggtag

SEQ ID NO: 573518 - DNA, 15 bp, Homo sapiens
gcagatgggggtagg

SEQ ID NO: 573519 - DNA, 15 bp, Homo sapiens
cagatgggggtagga

SEQ ID NO: 573520 - DNA, 15 bp, Homo sapiens
agatgggggtaggag

SEQ ID NO: 573521 - DNA, 15 bp, Homo sapiens
gatgggggtaggagt

SEQ ID NO: 573522 - DNA, 15 bp, Homo sapiens
atgggggtaggagtg

SEQ ID NO: 573523 - DNA, 15 bp, Homo sapiens
tgggggtaggagtgt

SEQ ID NO: 573524 - DNA, 15 bp, Homo sapiens
gggggtaggagtgtg

SEQ ID NO: 573525 - DNA, 15 bp, Homo sapiens
ggggtaggagtgtgg

SEQ ID NO: 573526 - DNA, 15 bp, Homo sapiens
gggtaggagtgtggc

SEQ ID NO: 573527 - DNA, 15 bp, Homo sapiens
ggtaggagtgtggca

SEQ ID NO: 573528 - DNA, 15 bp, Homo sapiens
gtaggagtgtggcag

SEQ ID NO: 573529 - DNA, 15 bp, Homo sapiens
taggagtgtggcagt

SEQ ID NO: 573530 - DNA, 15 bp, Homo sapiens
aggagtgtggcagtg

SEQ ID NO: 573531 - DNA, 15 bp, Homo sapiens
ggagtgtggcagtgg

SEQ ID NO: 573532 - DNA, 15 bp, Homo sapiens
gagtgtggcagtggt

SEQ ID NO: 573533 - DNA, 15 bp, Homo sapiens
agtgtggcagtggtg

SEQ ID NO: 573534 - DNA, 15 bp, Homo sapiens
gtgtggcagtggtgg

SEQ ID NO: 573535 - DNA, 15 bp, Homo sapiens
tgtggcagtggtggt

SEQ ID NO: 573536 - DNA, 15 bp, Homo sapiens
gtggcagtggtggtg

SEQ ID NO: 573537 - DNA, 15 bp, Homo sapiens
tggcagtggtggtga

SEQ ID NO: 573538 - DNA, 15 bp, Homo sapiens
ggcagtggtggtgat

SEQ ID NO: 573539 - DNA, 15 bp, Homo sapiens
gcagtggtggtgatg

SEQ ID NO: 573540 - DNA, 15 bp, Homo sapiens
cagtggtggtgatgg

SEQ ID NO: 573541 - DNA, 15 bp, Homo sapiens
agtggtggtgatgga

SEQ ID NO: 573542 - DNA, 15 bp, Homo sapiens
gtggtggtgatggag

SEQ ID NO: 573543 - DNA, 15 bp, Homo sapiens
tggtggtgatggaga

SEQ ID NO: 573544 - DNA, 15 bp, Homo sapiens
ggtggtgatggagaa

SEQ ID NO: 573545 - DNA, 15 bp, Homo sapiens
gtggtgatggagaaa

SEQ ID NO: 573546 - DNA, 15 bp, Homo sapiens
tggtgatggagaaat

SEQ ID NO: 573547 - DNA, 15 bp, Homo sapiens
ggtgatggagaaata

SEQ ID NO: 573548 - DNA, 15 bp, Homo sapiens
gtgatggagaaatag

SEQ ID NO: 573549 - DNA, 15 bp, Homo sapiens
tgatggagaaataga

SEQ ID NO: 573550 - DNA, 15 bp, Homo sapiens
gatggagaaatagaa

SEQ ID NO: 573551 - DNA, 15 bp, Homo sapiens
atggagaaatagaaa

SEQ ID NO: 573552 - DNA, 15 bp, Homo sapiens
tggagaaatagaaag

SEQ ID NO: 573553 - DNA, 15 bp, Homo sapiens
ggagaaatagaaagg

SEQ ID NO: 573554 - DNA, 15 bp, Homo sapiens
gagaaatagaaagga

SEQ ID NO: 573555 - DNA, 15 bp, Homo sapiens
agaaatagaaaggaa

SEQ ID NO: 573556 - DNA, 15 bp, Homo sapiens
gaaatagaaaggaaa

SEQ ID NO: 573557 - DNA, 15 bp, Homo sapiens
aaatagaaaggaaat

SEQ ID NO: 573558 - DNA, 15 bp, Homo sapiens
aatagaaaggaaata

SEQ ID NO: 573559 - DNA, 15 bp, Homo sapiens
atagaaaggaaatag

SEQ ID NO: 573560 - DNA, 15 bp, Homo sapiens
tagaaaggaaatagg

SEQ ID NO: 573561 - DNA, 15 bp, Homo sapiens
agaaaggaaatagga

SEQ ID NO: 573562 - DNA, 15 bp, Homo sapiens
gaaaggaaataggaa

SEQ ID NO: 573563 - DNA, 15 bp, Homo sapiens
aaaggaaataggaac

SEQ ID NO: 573564 - DNA, 15 bp, Homo sapiens
aaggaaataggaact

SEQ ID NO: 573565 - DNA, 15 bp, Homo sapiens
aggaaataggaactt

SEQ ID NO: 573566 - DNA, 15 bp, Homo sapiens
ggaaataggaacttg

SEQ ID NO: 573567 - DNA, 15 bp, Homo sapiens
gaaataggaacttgg

SEQ ID NO: 573568 - DNA, 15 bp, Homo sapiens
aaataggaacttggg

SEQ ID NO: 573569 - DNA, 15 bp, Homo sapiens
aataggaacttgggg

SEQ ID NO: 573570 - DNA, 15 bp, Homo sapiens
ataggaacttggggc

SEQ ID NO: 573571 - DNA, 15 bp, Homo sapiens
taggaacttggggca

SEQ ID NO: 573572 - DNA, 15 bp, Homo sapiens
aggaacttggggcaa

SEQ ID NO: 573573 - DNA, 15 bp, Homo sapiens
ggaacttggggcaag

SEQ ID NO: 573574 - DNA, 15 bp, Homo sapiens
gaacttggggcaagg

SEQ ID NO: 573575 - DNA, 15 bp, Homo sapiens
aacttggggcaaggg

SEQ ID NO: 573576 - DNA, 15 bp, Homo sapiens
acttggggcaaggga

SEQ ID NO: 573577 - DNA, 15 bp, Homo sapiens
cttggggcaagggag

SEQ ID NO: 573578 - DNA, 15 bp, Homo sapiens
ttggggcaagggaga

SEQ ID NO: 573579 - DNA, 15 bp, Homo sapiens
tggggcaagggagat

SEQ ID NO: 573580 - DNA, 15 bp, Homo sapiens
ggggcaagggagatg

SEQ ID NO: 573581 - DNA, 15 bp, Homo sapiens
gggcaagggagatga

SEQ ID NO: 573582 - DNA, 15 bp, Homo sapiens
ggcaagggagatgaa

SEQ ID NO: 573583 - DNA, 15 bp, Homo sapiens
gcaagggagatgaac

SEQ ID NO: 573584 - DNA, 15 bp, Homo sapiens
caagggagatgaaca

SEQ ID NO: 573585 - DNA, 15 bp, Homo sapiens
aagggagatgaacag

SEQ ID NO: 573586 - DNA, 15 bp, Homo sapiens
agggagatgaacagc

SEQ ID NO: 573587 - DNA, 15 bp, Homo sapiens
gggagatgaacagca

SEQ ID NO: 573588 - DNA, 15 bp, Homo sapiens
ggagatgaacagcaa

SEQ ID NO: 573589 - DNA, 15 bp, Homo sapiens
gagatgaacagcaat

SEQ ID NO: 573590 - DNA, 15 bp, Homo sapiens
agatgaacagcaatt

SEQ ID NO: 573591 - DNA, 15 bp, Homo sapiens
gatgaacagcaattt

SEQ ID NO: 573592 - DNA, 15 bp, Homo sapiens
atgaacagcaatttg

SEQ ID NO: 573593 - DNA, 15 bp, Homo sapiens
tgaacagcaatttgg

SEQ ID NO: 573594 - DNA, 15 bp, Homo sapiens
gaacagcaatttgga

SEQ ID NO: 573595 - DNA, 15 bp, Homo sapiens
aacagcaatttggac

SEQ ID NO: 573596 - DNA, 15 bp, Homo sapiens
acagcaatttggaca

SEQ ID NO: 573597 - DNA, 15 bp, Homo sapiens
cagcaatttggacat

SEQ ID NO: 573598 - DNA, 15 bp, Homo sapiens
agcaatttggacata

SEQ ID NO: 573599 - DNA, 15 bp, Homo sapiens
gcaatttggacatat

SEQ ID NO: 573600 - DNA, 15 bp, Homo sapiens
caatttggacatatg

SEQ ID NO: 573601 - DNA, 15 bp, Homo sapiens
aatttggacatatgt

SEQ ID NO: 573602 - DNA, 15 bp, Homo sapiens
atttggacatatgtc

SEQ ID NO: 573603 - DNA, 15 bp, Homo sapiens
tttggacatatgtct

SEQ ID NO: 573604 - DNA, 15 bp, Homo sapiens
ttggacatatgtctg

SEQ ID NO: 573605 - DNA, 15 bp, Homo sapiens
tggacatatgtctga

SEQ ID NO: 573606 - DNA, 15 bp, Homo sapiens
ggacatatgtctgaa

SEQ ID NO: 573607 - DNA, 15 bp, Homo sapiens
gacatatgtctgaaa

SEQ ID NO: 573608 - DNA, 15 bp, Homo sapiens
acatatgtctgaaaa

SEQ ID NO: 573609 - DNA, 15 bp, Homo sapiens
catatgtctgaaaat

SEQ ID NO: 573610 - DNA, 15 bp, Homo sapiens
atatgtctgaaaatt

SEQ ID NO: 573611 - DNA, 15 bp, Homo sapiens
tatgtctgaaaattg

SEQ ID NO: 573612 - DNA, 15 bp, Homo sapiens
atgtctgaaaattgg

SEQ ID NO: 573613 - DNA, 15 bp, Homo sapiens
tgtctgaaaattggg

SEQ ID NO: 573614 - DNA, 15 bp, Homo sapiens
gtctgaaaattgggg

SEQ ID NO: 573615 - DNA, 15 bp, Homo sapiens
tctgaaaattggggc

SEQ ID NO: 573616 - DNA, 15 bp, Homo sapiens
ctgaaaattggggcc

SEQ ID NO: 573617 - DNA, 15 bp, Homo sapiens
tgaaaattggggccc

SEQ ID NO: 573618 - DNA, 15 bp, Homo sapiens
gaaaattggggcccc

SEQ ID NO: 573619 - DNA, 15 bp, Homo sapiens
aaaattggggcccca

SEQ ID NO: 573620 - DNA, 15 bp, Homo sapiens
aaattggggccccat

SEQ ID NO: 573621 - DNA, 15 bp, Homo sapiens
aattggggccccatt

SEQ ID NO: 573622 - DNA, 15 bp, Homo sapiens
attggggccccattc

SEQ ID NO: 573623 - DNA, 15 bp, Homo sapiens
ttggggccccattca

SEQ ID NO: 573624 - DNA, 15 bp, Homo sapiens
tggggccccattcag

SEQ ID NO: 573625 - DNA, 15 bp, Homo sapiens
ggggccccattcaga

SEQ ID NO: 573626 - DNA, 15 bp, Homo sapiens
gggccccattcagac

SEQ ID NO: 573627 - DNA, 15 bp, Homo sapiens
ggccccattcagaca

SEQ ID NO: 573628 - DNA, 15 bp, Homo sapiens
gccccattcagacat

SEQ ID NO: 573629 - DNA, 15 bp, Homo sapiens
ccccattcagacata

SEQ ID NO: 573630 - DNA, 15 bp, Homo sapiens
cccattcagacatat

SEQ ID NO: 573631 - DNA, 15 bp, Homo sapiens
ccattcagacatatg

SEQ ID NO: 573632 - DNA, 15 bp, Homo sapiens
cattcagacatatgt

SEQ ID NO: 573633 - DNA, 15 bp, Homo sapiens
attcagacatatgtc

SEQ ID NO: 573634 - DNA, 15 bp, Homo sapiens
ttcagacatatgtct

SEQ ID NO: 573635 - DNA, 15 bp, Homo sapiens
tcagacatatgtctg

SEQ ID NO: 573636 - DNA, 15 bp, Homo sapiens
cagacatatgtctga

SEQ ID NO: 573637 - DNA, 15 bp, Homo sapiens
agacatatgtctgaa

SEQ ID NO: 573638 - DNA, 15 bp, Homo sapiens
tatgtctgaaaattc

SEQ ID NO: 573639 - DNA, 15 bp, Homo sapiens
atgtctgaaaattct

SEQ ID NO: 573640 - DNA, 15 bp, Homo sapiens
tgtctgaaaattctc

SEQ ID NO: 573641 - DNA, 15 bp, Homo sapiens
gtctgaaaattctct

SEQ ID NO: 573642 - DNA, 15 bp, Homo sapiens
tctgaaaattctcta

SEQ ID NO: 573643 - DNA, 15 bp, Homo sapiens
ctgaaaattctctag

SEQ ID NO: 573644 - DNA, 15 bp, Homo sapiens
tgaaaattctctaga

SEQ ID NO: 573645 - DNA, 15 bp, Homo sapiens
gaaaattctctagaa

SEQ ID NO: 573646 - DNA, 15 bp, Homo sapiens
aaaattctctagaag

SEQ ID NO: 573647 - DNA, 15 bp, Homo sapiens
aaattctctagaaga

SEQ ID NO: 573648 - DNA, 15 bp, Homo sapiens
aattctctagaagag

SEQ ID NO: 573649 - DNA, 15 bp, Homo sapiens
attctctagaagaga

SEQ ID NO: 573650 - DNA, 15 bp, Homo sapiens
ttctctagaagagaa

SEQ ID NO: 573651 - DNA, 15 bp, Homo sapiens
tctctagaagagaat

SEQ ID NO: 573652 - DNA, 15 bp, Homo sapiens
ctctagaagagaatc

SEQ ID NO: 573653 - DNA, 15 bp, Homo sapiens
tctagaagagaatca

SEQ ID NO: 573654 - DNA, 15 bp, Homo sapiens
ctagaagagaatcag

SEQ ID NO: 573655 - DNA, 15 bp, Homo sapiens
tagaagagaatcagt

SEQ ID NO: 573656 - DNA, 15 bp, Homo sapiens
agaagagaatcagtc

SEQ ID NO: 573657 - DNA, 15 bp, Homo sapiens
gaagagaatcagtca

SEQ ID NO: 573658 - DNA, 15 bp, Homo sapiens
aagagaatcagtcag

SEQ ID NO: 573659 - DNA, 15 bp, Homo sapiens
agagaatcagtcagt

SEQ ID NO: 573660 - DNA, 15 bp, Homo sapiens
gagaatcagtcagtg

SEQ ID NO: 573661 - DNA, 15 bp, Homo sapiens
agaatcagtcagtga

SEQ ID NO: 573662 - DNA, 15 bp, Homo sapiens
gaatcagtcagtgag

SEQ ID NO: 573663 - DNA, 15 bp, Homo sapiens
aatcagtcagtgagg

SEQ ID NO: 573664 - DNA, 15 bp, Homo sapiens
atcagtcagtgaggg

SEQ ID NO: 573665 - DNA, 15 bp, Homo sapiens
tcagtcagtgaggga

SEQ ID NO: 573666 - DNA, 15 bp, Homo sapiens
cagtcagtgagggag

SEQ ID NO: 573667 - DNA, 15 bp, Homo sapiens
agtcagtgagggagg

SEQ ID NO: 573668 - DNA, 15 bp, Homo sapiens
gtcagtgagggaggg

SEQ ID NO: 573669 - DNA, 15 bp, Homo sapiens
tcagtgagggagggt

SEQ ID NO: 573670 - DNA, 15 bp, Homo sapiens
cagtgagggagggtt

SEQ ID NO: 573671 - DNA, 15 bp, Homo sapiens
agtgagggagggttt

SEQ ID NO: 573672 - DNA, 15 bp, Homo sapiens
gtgagggagggtttg

SEQ ID NO: 573673 - DNA, 15 bp, Homo sapiens
tgagggagggtttgg

SEQ ID NO: 573674 - DNA, 15 bp, Homo sapiens
gagggagggtttggg

SEQ ID NO: 573675 - DNA, 15 bp, Homo sapiens
agggagggtttggga

SEQ ID NO: 573676 - DNA, 15 bp, Homo sapiens
gggagggtttgggaa

SEQ ID NO: 573677 - DNA, 15 bp, Homo sapiens
ggagggtttgggaac

SEQ ID NO: 573678 - DNA, 15 bp, Homo sapiens
gagggtttgggaact

SEQ ID NO: 573679 - DNA, 15 bp, Homo sapiens
agggtttgggaactt

SEQ ID NO: 573680 - DNA, 15 bp, Homo sapiens
gggtttgggaacttt

SEQ ID NO: 573681 - DNA, 15 bp, Homo sapiens
ggtttgggaactttc

SEQ ID NO: 573682 - DNA, 15 bp, Homo sapiens
gtttgggaactttca

SEQ ID NO: 573683 - DNA, 15 bp, Homo sapiens
tttgggaactttcaa

SEQ ID NO: 573684 - DNA, 15 bp, Homo sapiens
ttgggaactttcaag

SEQ ID NO: 573685 - DNA, 15 bp, Homo sapiens
tgggaactttcaagt

SEQ ID NO: 573686 - DNA, 15 bp, Homo sapiens
gggaactttcaagtg

SEQ ID NO: 573687 - DNA, 15 bp, Homo sapiens
ggaactttcaagtgg

SEQ ID NO: 573688 - DNA, 15 bp, Homo sapiens
gaactttcaagtgga

SEQ ID NO: 573689 - DNA, 15 bp, Homo sapiens
aactttcaagtggaa

SEQ ID NO: 573690 - DNA, 15 bp, Homo sapiens
actttcaagtggaac

SEQ ID NO: 573691 - DNA, 15 bp, Homo sapiens
ctttcaagtggaaca

SEQ ID NO: 573692 - DNA, 15 bp, Homo sapiens
tttcaagtggaacac

SEQ ID NO: 573693 - DNA, 15 bp, Homo sapiens
ttcaagtggaacaca

SEQ ID NO: 573694 - DNA, 15 bp, Homo sapiens
tcaagtggaacacag

SEQ ID NO: 573695 - DNA, 15 bp, Homo sapiens
caagtggaacacaga

SEQ ID NO: 573696 - DNA, 15 bp, Homo sapiens
aagtggaacacagaa

SEQ ID NO: 573697 - DNA, 15 bp, Homo sapiens
agtggaacacagaaa

SEQ ID NO: 573698 - DNA, 15 bp, Homo sapiens
gtggaacacagaaat

SEQ ID NO: 573699 - DNA, 15 bp, Homo sapiens
tggaacacagaaatt

SEQ ID NO: 573700 - DNA, 15 bp, Homo sapiens
ggaacacagaaatta

SEQ ID NO: 573701 - DNA, 15 bp, Homo sapiens
gaacacagaaattaa

SEQ ID NO: 573702 - DNA, 15 bp, Homo sapiens
aacacagaaattaag

SEQ ID NO: 573703 - DNA, 15 bp, Homo sapiens
acacagaaattaagg

SEQ ID NO: 573704 - DNA, 15 bp, Homo sapiens
cacagaaattaaggt

SEQ ID NO: 573705 - DNA, 15 bp, Homo sapiens
acagaaattaaggtt

SEQ ID NO: 573706 - DNA, 15 bp, Homo sapiens
cagaaattaaggttt

SEQ ID NO: 573707 - DNA, 15 bp, Homo sapiens
agaaattaaggtttt

SEQ ID NO: 573708 - DNA, 15 bp, Homo sapiens
gaaattaaggttttg

SEQ ID NO: 573709 - DNA, 15 bp, Homo sapiens
aaattaaggttttga

SEQ ID NO: 573710 - DNA, 15 bp, Homo sapiens
aattaaggttttgat

SEQ ID NO: 573711 - DNA, 15 bp, Homo sapiens
attaaggttttgatc

SEQ ID NO: 573712 - DNA, 15 bp, Homo sapiens
ttaaggttttgatct

SEQ ID NO: 573713 - DNA, 15 bp, Homo sapiens
taaggttttgatctc

SEQ ID NO: 573714 - DNA, 15 bp, Homo sapiens
aaggttttgatctca

SEQ ID NO: 573715 - DNA, 15 bp, Homo sapiens
aggttttgatctcag

SEQ ID NO: 573716 - DNA, 15 bp, Homo sapiens
ggttttgatctcaga

SEQ ID NO: 573717 - DNA, 15 bp, Homo sapiens
gttttgatctcagag

SEQ ID NO: 573718 - DNA, 15 bp, Homo sapiens
ttttgatctcagaga

SEQ ID NO: 573719 - DNA, 15 bp, Homo sapiens
tttgatctcagagac

SEQ ID NO: 573720 - DNA, 15 bp, Homo sapiens
ttgatctcagagaca

SEQ ID NO: 573721 - DNA, 15 bp, Homo sapiens
tgatctcagagacat

SEQ ID NO: 573722 - DNA, 15 bp, Homo sapiens
gatctcagagacatc

SEQ ID NO: 573723 - DNA, 15 bp, Homo sapiens
atctcagagacatct

SEQ ID NO: 573724 - DNA, 15 bp, Homo sapiens
tctcagagacatctg

SEQ ID NO: 573725 - DNA, 15 bp, Homo sapiens
ctcagagacatctgc

SEQ ID NO: 573726 - DNA, 15 bp, Homo sapiens
tcagagacatctgca

SEQ ID NO: 573727 - DNA, 15 bp, Homo sapiens
cagagacatctgcat

SEQ ID NO: 573728 - DNA, 15 bp, Homo sapiens
agagacatctgcatt

SEQ ID NO: 573729 - DNA, 15 bp, Homo sapiens
gagacatctgcattt

SEQ ID NO: 573730 - DNA, 15 bp, Homo sapiens
agacatctgcattta

SEQ ID NO: 573731 - DNA, 15 bp, Homo sapiens
gacatctgcatttag

SEQ ID NO: 573732 - DNA, 15 bp, Homo sapiens
acatctgcatttagg

SEQ ID NO: 573733 - DNA, 15 bp, Homo sapiens
catctgcatttagga

SEQ ID NO: 573734 - DNA, 15 bp, Homo sapiens
atctgcatttaggac

SEQ ID NO: 573735 - DNA, 15 bp, Homo sapiens
tctgcatttaggacc

SEQ ID NO: 573736 - DNA, 15 bp, Homo sapiens
ctgcatttaggacct

SEQ ID NO: 573737 - DNA, 15 bp, Homo sapiens
tgcatttaggaccta

SEQ ID NO: 573738 - DNA, 15 bp, Homo sapiens
gcatttaggacctag

SEQ ID NO: 573739 - DNA, 15 bp, Homo sapiens
catttaggacctagc

SEQ ID NO: 573740 - DNA, 15 bp, Homo sapiens
atttaggacctagct

SEQ ID NO: 573741 - DNA, 15 bp, Homo sapiens
tttaggacctagctc

SEQ ID NO: 573742 - DNA, 15 bp, Homo sapiens
ttaggacctagctcc

SEQ ID NO: 573743 - DNA, 15 bp, Homo sapiens
taggacctagctcca

SEQ ID NO: 573744 - DNA, 15 bp, Homo sapiens
aggacctagctccag

SEQ ID NO: 573745 - DNA, 15 bp, Homo sapiens
ggacctagctccagt

SEQ ID NO: 573746 - DNA, 15 bp, Homo sapiens
gacctagctccagtg

SEQ ID NO: 573747 - DNA, 15 bp, Homo sapiens
acctagctccagtgc

SEQ ID NO: 573748 - DNA, 15 bp, Homo sapiens
cctagctccagtgct

SEQ ID NO: 573749 - DNA, 15 bp, Homo sapiens
ctagctccagtgctt

SEQ ID NO: 573750 - DNA, 15 bp, Homo sapiens
tagctccagtgctta

SEQ ID NO: 573751 - DNA, 15 bp, Homo sapiens
agctccagtgcttac

SEQ ID NO: 573752 - DNA, 15 bp, Homo sapiens
gctccagtgcttact

SEQ ID NO: 573753 - DNA, 15 bp, Homo sapiens
ctccagtgcttacta

SEQ ID NO: 573754 - DNA, 15 bp, Homo sapiens
tccagtgcttactag

SEQ ID NO: 573755 - DNA, 15 bp, Homo sapiens
ccagtgcttactaga

SEQ ID NO: 573756 - DNA, 15 bp, Homo sapiens
cagtgcttactagat

SEQ ID NO: 573757 - DNA, 15 bp, Homo sapiens
agtgcttactagatg

SEQ ID NO: 573758 - DNA, 15 bp, Homo sapiens
gtgcttactagatgt

SEQ ID NO: 573759 - DNA, 15 bp, Homo sapiens
tgcttactagatgtg

SEQ ID NO: 573760 - DNA, 15 bp, Homo sapiens
gcttactagatgtgt

SEQ ID NO: 573761 - DNA, 15 bp, Homo sapiens
cttactagatgtgtg

SEQ ID NO: 573762 - DNA, 15 bp, Homo sapiens
ttactagatgtgtgg

SEQ ID NO: 573763 - DNA, 15 bp, Homo sapiens
tactagatgtgtggc

SEQ ID NO: 573764 - DNA, 15 bp, Homo sapiens
actagatgtgtggcc

SEQ ID NO: 573765 - DNA, 15 bp, Homo sapiens
ctagatgtgtggcct

SEQ ID NO: 573766 - DNA, 15 bp, Homo sapiens
tagatgtgtggcctt

SEQ ID NO: 573767 - DNA, 15 bp, Homo sapiens
agatgtgtggccttg

SEQ ID NO: 573768 - DNA, 15 bp, Homo sapiens
gatgtgtggccttgg

SEQ ID NO: 573769 - DNA, 15 bp, Homo sapiens
atgtgtggccttggg

SEQ ID NO: 573770 - DNA, 15 bp, Homo sapiens
tgtgtggccttgggc

SEQ ID NO: 573771 - DNA, 15 bp, Homo sapiens
gtgtggccttgggca

SEQ ID NO: 573772 - DNA, 15 bp, Homo sapiens
tgtggccttgggcaa

SEQ ID NO: 573773 - DNA, 15 bp, Homo sapiens
gtggccttgggcaac

SEQ ID NO: 573774 - DNA, 15 bp, Homo sapiens
tggccttgggcaact

SEQ ID NO: 573775 - DNA, 15 bp, Homo sapiens
ggccttgggcaactt

SEQ ID NO: 573776 - DNA, 15 bp, Homo sapiens
gccttgggcaacttc

SEQ ID NO: 573777 - DNA, 15 bp, Homo sapiens
ccttgggcaacttcc

SEQ ID NO: 573778 - DNA, 15 bp, Homo sapiens
cttgggcaacttccc

SEQ ID NO: 573779 - DNA, 15 bp, Homo sapiens
ttgggcaacttcccc

SEQ ID NO: 573780 - DNA, 15 bp, Homo sapiens
tgggcaacttcccca

SEQ ID NO: 573781 - DNA, 15 bp, Homo sapiens
gggcaacttccccaa

SEQ ID NO: 573782 - DNA, 15 bp, Homo sapiens
ggcaacttccccaac

SEQ ID NO: 573783 - DNA, 15 bp, Homo sapiens
gcaacttccccaacc

SEQ ID NO: 573784 - DNA, 15 bp, Homo sapiens
caacttccccaacct

SEQ ID NO: 573785 - DNA, 15 bp, Homo sapiens
aacttccccaacctc

SEQ ID NO: 573786 - DNA, 15 bp, Homo sapiens
acttccccaacctct

SEQ ID NO: 573787 - DNA, 15 bp, Homo sapiens
cttccccaacctctc

SEQ ID NO: 573788 - DNA, 15 bp, Homo sapiens
ttccccaacctctct

SEQ ID NO: 573789 - DNA, 15 bp, Homo sapiens
tccccaacctctctg

SEQ ID NO: 573790 - DNA, 15 bp, Homo sapiens
ccccaacctctctga

SEQ ID NO: 573791 - DNA, 15 bp, Homo sapiens
cccaacctctctgaa

SEQ ID NO: 573792 - DNA, 15 bp, Homo sapiens
ccaacctctctgaac

SEQ ID NO: 573793 - DNA, 15 bp, Homo sapiens
caacctctctgaacc

SEQ ID NO: 573794 - DNA, 15 bp, Homo sapiens
aacctctctgaacct

SEQ ID NO: 573795 - DNA, 15 bp, Homo sapiens
acctctctgaacctg

SEQ ID NO: 573796 - DNA, 15 bp, Homo sapiens
cctctctgaacctgt

SEQ ID NO: 573797 - DNA, 15 bp, Homo sapiens
ctctctgaacctgtt

SEQ ID NO: 573798 - DNA, 15 bp, Homo sapiens
tctctgaacctgttt

SEQ ID NO: 573799 - DNA, 15 bp, Homo sapiens
ctctgaacctgtttc

SEQ ID NO: 573800 - DNA, 15 bp, Homo sapiens
tctgaacctgtttcc

SEQ ID NO: 573801 - DNA, 15 bp, Homo sapiens
ctgaacctgtttcct

SEQ ID NO: 573802 - DNA, 15 bp, Homo sapiens
tgaacctgtttcctt

SEQ ID NO: 573803 - DNA, 15 bp, Homo sapiens
gaacctgtttccttc

SEQ ID NO: 573804 - DNA, 15 bp, Homo sapiens
aacctgtttccttcc

SEQ ID NO: 573805 - DNA, 15 bp, Homo sapiens
acctgtttccttccc

SEQ ID NO: 573806 - DNA, 15 bp, Homo sapiens
cctgtttccttccct

SEQ ID NO: 573807 - DNA, 15 bp, Homo sapiens
ctgtttccttccctg

SEQ ID NO: 573808 - DNA, 15 bp, Homo sapiens
tgtttccttccctgt

SEQ ID NO: 573809 - DNA, 15 bp, Homo sapiens
gtttccttccctgta

SEQ ID NO: 573810 - DNA, 15 bp, Homo sapiens
tttccttccctgtaa

SEQ ID NO: 573811 - DNA, 15 bp, Homo sapiens
ttccttccctgtaaa

SEQ ID NO: 573812 - DNA, 15 bp, Homo sapiens
tccttccctgtaaaa

SEQ ID NO: 573813 - DNA, 15 bp, Homo sapiens
ccttccctgtaaaat

SEQ ID NO: 573814 - DNA, 15 bp, Homo sapiens
cttccctgtaaaatg

SEQ ID NO: 573815 - DNA, 15 bp, Homo sapiens
ttccctgtaaaatgg

SEQ ID NO: 573816 - DNA, 15 bp, Homo sapiens
tccctgtaaaatgga

SEQ ID NO: 573817 - DNA, 15 bp, Homo sapiens
ccctgtaaaatggag

SEQ ID NO: 573818 - DNA, 15 bp, Homo sapiens
cctgtaaaatggaga

SEQ ID NO: 573819 - DNA, 15 bp, Homo sapiens
ctgtaaaatggagat

SEQ ID NO: 573820 - DNA, 15 bp, Homo sapiens
tgtaaaatggagata

SEQ ID NO: 573821 - DNA, 15 bp, Homo sapiens
gtaaaatggagatat

SEQ ID NO: 573822 - DNA, 15 bp, Homo sapiens
taaaatggagatatt

SEQ ID NO: 573823 - DNA, 15 bp, Homo sapiens
aaaatggagatattg

SEQ ID NO: 573824 - DNA, 15 bp, Homo sapiens
aaatggagatattga

SEQ ID NO: 573825 - DNA, 15 bp, Homo sapiens
aatggagatattgat

SEQ ID NO: 573826 - DNA, 15 bp, Homo sapiens
atggagatattgata

SEQ ID NO: 573827 - DNA, 15 bp, Homo sapiens
tggagatattgatag

SEQ ID NO: 573828 - DNA, 15 bp, Homo sapiens
ggagatattgatagc

SEQ ID NO: 573829 - DNA, 15 bp, Homo sapiens
gagatattgatagcg

SEQ ID NO: 573830 - DNA, 15 bp, Homo sapiens
agatattgatagcgg

SEQ ID NO: 573831 - DNA, 15 bp, Homo sapiens
gatattgatagcgga

SEQ ID NO: 573832 - DNA, 15 bp, Homo sapiens
atattgatagcggag

SEQ ID NO: 573833 - DNA, 15 bp, Homo sapiens
tattgatagcggagg

SEQ ID NO: 573834 - DNA, 15 bp, Homo sapiens
attgatagcggaggt

SEQ ID NO: 573835 - DNA, 15 bp, Homo sapiens
ttgatagcggaggtg

SEQ ID NO: 573836 - DNA, 15 bp, Homo sapiens
tgatagcggaggtga

SEQ ID NO: 573837 - DNA, 15 bp, Homo sapiens
gatagcggaggtgat

SEQ ID NO: 573838 - DNA, 15 bp, Homo sapiens
atagcggaggtgatg

SEQ ID NO: 573839 - DNA, 15 bp, Homo sapiens
tagcggaggtgatgg

SEQ ID NO: 573840 - DNA, 15 bp, Homo sapiens
agcggaggtgatgga

SEQ ID NO: 573841 - DNA, 15 bp, Homo sapiens
gcggaggtgatggaa

SEQ ID NO: 573842 - DNA, 15 bp, Homo sapiens
cggaggtgatggaat

SEQ ID NO: 573843 - DNA, 15 bp, Homo sapiens
ggaggtgatggaatg

SEQ ID NO: 573844 - DNA, 15 bp, Homo sapiens
gaggtgatggaatga

SEQ ID NO: 573845 - DNA, 15 bp, Homo sapiens
aggtgatggaatgat

SEQ ID NO: 573846 - DNA, 15 bp, Homo sapiens
ggtgatggaatgatg

SEQ ID NO: 573847 - DNA, 15 bp, Homo sapiens
gtgatggaatgatga

SEQ ID NO: 573848 - DNA, 15 bp, Homo sapiens
tgatggaatgatgaa

SEQ ID NO: 573849 - DNA, 15 bp, Homo sapiens
gatggaatgatgaag

SEQ ID NO: 573850 - DNA, 15 bp, Homo sapiens
atggaatgatgaaga

SEQ ID NO: 573851 - DNA, 15 bp, Homo sapiens
tggaatgatgaagat

SEQ ID NO: 573852 - DNA, 15 bp, Homo sapiens
ggaatgatgaagatt

SEQ ID NO: 573853 - DNA, 15 bp, Homo sapiens
gaatgatgaagattg

SEQ ID NO: 573854 - DNA, 15 bp, Homo sapiens
aatgatgaagattgt

SEQ ID NO: 573855 - DNA, 15 bp, Homo sapiens
atgatgaagattgtg

SEQ ID NO: 573856 - DNA, 15 bp, Homo sapiens
tgatgaagattgtgt

SEQ ID NO: 573857 - DNA, 15 bp, Homo sapiens
gatgaagattgtgta

SEQ ID NO: 573858 - DNA, 15 bp, Homo sapiens
atgaagattgtgtat

SEQ ID NO: 573859 - DNA, 15 bp, Homo sapiens
tgaagattgtgtatg

SEQ ID NO: 573860 - DNA, 15 bp, Homo sapiens
gaagattgtgtatgt

SEQ ID NO: 573861 - DNA, 15 bp, Homo sapiens
aagattgtgtatgta

SEQ ID NO: 573862 - DNA, 15 bp, Homo sapiens
agattgtgtatgtaa

SEQ ID NO: 573863 - DNA, 15 bp, Homo sapiens
gattgtgtatgtaaa

SEQ ID NO: 573864 - DNA, 15 bp, Homo sapiens
attgtgtatgtaaag

SEQ ID NO: 573865 - DNA, 15 bp, Homo sapiens
ttgtgtatgtaaagg

SEQ ID NO: 573866 - DNA, 15 bp, Homo sapiens
tgtgtatgtaaaggc

SEQ ID NO: 573867 - DNA, 15 bp, Homo sapiens
gtgtatgtaaaggct

SEQ ID NO: 573868 - DNA, 15 bp, Homo sapiens
tgtatgtaaaggctt

SEQ ID NO: 573869 - DNA, 15 bp, Homo sapiens
gtatgtaaaggcttt

SEQ ID NO: 573870 - DNA, 15 bp, Homo sapiens
tatgtaaaggctttg

SEQ ID NO: 573871 - DNA, 15 bp, Homo sapiens
atgtaaaggctttgt

SEQ ID NO: 573872 - DNA, 15 bp, Homo sapiens
tgtaaaggctttgtc

SEQ ID NO: 573873 - DNA, 15 bp, Homo sapiens
gtaaaggctttgtca

SEQ ID NO: 573874 - DNA, 15 bp, Homo sapiens
taaaggctttgtcac

SEQ ID NO: 573875 - DNA, 15 bp, Homo sapiens
aaaggctttgtcacc

SEQ ID NO: 573876 - DNA, 15 bp, Homo sapiens
aaggctttgtcacca

SEQ ID NO: 573877 - DNA, 15 bp, Homo sapiens
aggctttgtcaccac

SEQ ID NO: 573878 - DNA, 15 bp, Homo sapiens
ggctttgtcaccact

SEQ ID NO: 573879 - DNA, 15 bp, Homo sapiens
gctttgtcaccactg

SEQ ID NO: 573880 - DNA, 15 bp, Homo sapiens
ctttgtcaccactgg

SEQ ID NO: 573881 - DNA, 15 bp, Homo sapiens
tttgtcaccactggg

SEQ ID NO: 573882 - DNA, 15 bp, Homo sapiens
ttgtcaccactggga

SEQ ID NO: 573883 - DNA, 15 bp, Homo sapiens
tgtcaccactgggag

SEQ ID NO: 573884 - DNA, 15 bp, Homo sapiens
gtcaccactgggagg

SEQ ID NO: 573885 - DNA, 15 bp, Homo sapiens
tcaccactgggaggt

SEQ ID NO: 573886 - DNA, 15 bp, Homo sapiens
caccactgggaggtg

SEQ ID NO: 573887 - DNA, 15 bp, Homo sapiens
accactgggaggtgg

SEQ ID NO: 573888 - DNA, 15 bp, Homo sapiens
ccactgggaggtggg

SEQ ID NO: 573889 - DNA, 15 bp, Homo sapiens
cactgggaggtgggc

SEQ ID NO: 573890 - DNA, 15 bp, Homo sapiens
actgggaggtgggca

SEQ ID NO: 573891 - DNA, 15 bp, Homo sapiens
ctgggaggtgggcag

SEQ ID NO: 573892 - DNA, 15 bp, Homo sapiens
tgggaggtgggcagg

SEQ ID NO: 573893 - DNA, 15 bp, Homo sapiens
gggaggtgggcagga

SEQ ID NO: 573894 - DNA, 15 bp, Homo sapiens
ggaggtgggcaggag

SEQ ID NO: 573895 - DNA, 15 bp, Homo sapiens
gaggtgggcaggagc

SEQ ID NO: 573896 - DNA, 15 bp, Homo sapiens
aggtgggcaggagcg

SEQ ID NO: 573897 - DNA, 15 bp, Homo sapiens
ggtgggcaggagcgg

SEQ ID NO: 573898 - DNA, 15 bp, Homo sapiens
gtgggcaggagcggg

SEQ ID NO: 573899 - DNA, 15 bp, Homo sapiens
tgggcaggagcgggg

SEQ ID NO: 573900 - DNA, 15 bp, Homo sapiens
gggcaggagcggggc

SEQ ID NO: 573901 - DNA, 15 bp, Homo sapiens
ggcaggagcggggct

SEQ ID NO: 573902 - DNA, 15 bp, Homo sapiens
gcaggagcggggctg

SEQ ID NO: 573903 - DNA, 15 bp, Homo sapiens
caggagcggggctgg

SEQ ID NO: 573904 - DNA, 15 bp, Homo sapiens
aggagcggggctggt

SEQ ID NO: 573905 - DNA, 15 bp, Homo sapiens
ggagcggggctggtc

SEQ ID NO: 573906 - DNA, 15 bp, Homo sapiens
gagcggggctggtca

SEQ ID NO: 573907 - DNA, 15 bp, Homo sapiens
agcggggctggtcac

SEQ ID NO: 573908 - DNA, 15 bp, Homo sapiens
gcggggctggtcacc

SEQ ID NO: 573909 - DNA, 15 bp, Homo sapiens
cggggctggtcaccg

SEQ ID NO: 573910 - DNA, 15 bp, Homo sapiens
ggggctggtcaccga

SEQ ID NO: 573911 - DNA, 15 bp, Homo sapiens
gggctggtcaccgag

SEQ ID NO: 573912 - DNA, 15 bp, Homo sapiens
ggctggtcaccgagt

SEQ ID NO: 573913 - DNA, 15 bp, Homo sapiens
gctggtcaccgagtg

SEQ ID NO: 573914 - DNA, 15 bp, Homo sapiens
ctggtcaccgagtgt

SEQ ID NO: 573915 - DNA, 15 bp, Homo sapiens
tggtcaccgagtgtt

SEQ ID NO: 573916 - DNA, 15 bp, Homo sapiens
ggtcaccgagtgttg

SEQ ID NO: 573917 - DNA, 15 bp, Homo sapiens
gtcaccgagtgttga

SEQ ID NO: 573918 - DNA, 15 bp, Homo sapiens
tcaccgagtgttgac

SEQ ID NO: 573919 - DNA, 15 bp, Homo sapiens
caccgagtgttgaca

SEQ ID NO: 573920 - DNA, 15 bp, Homo sapiens
accgagtgttgacag

SEQ ID NO: 573921 - DNA, 15 bp, Homo sapiens
ccgagtgttgacagc

SEQ ID NO: 573922 - DNA, 15 bp, Homo sapiens
cgagtgttgacagca

SEQ ID NO: 573923 - DNA, 15 bp, Homo sapiens
gagtgttgacagcag

SEQ ID NO: 573924 - DNA, 15 bp, Homo sapiens
agtgttgacagcagt

SEQ ID NO: 573925 - DNA, 15 bp, Homo sapiens
gtgttgacagcagtg

SEQ ID NO: 573926 - DNA, 15 bp, Homo sapiens
tgttgacagcagtga

SEQ ID NO: 573927 - DNA, 15 bp, Homo sapiens
gttgacagcagtgac

SEQ ID NO: 573928 - DNA, 15 bp, Homo sapiens
ttgacagcagtgacc

SEQ ID NO: 573929 - DNA, 15 bp, Homo sapiens
tgacagcagtgaccg

SEQ ID NO: 573930 - DNA, 15 bp, Homo sapiens
gacagcagtgaccgg

SEQ ID NO: 573931 - DNA, 15 bp, Homo sapiens
acagcagtgaccggc

SEQ ID NO: 573932 - DNA, 15 bp, Homo sapiens
cagcagtgaccggcg

SEQ ID NO: 573933 - DNA, 15 bp, Homo sapiens
agcagtgaccggcgc

SEQ ID NO: 573934 - DNA, 15 bp, Homo sapiens
gcagtgaccggcgct

SEQ ID NO: 573935 - DNA, 15 bp, Homo sapiens
cagtgaccggcgctt

SEQ ID NO: 573936 - DNA, 15 bp, Homo sapiens
agtgaccggcgcttg

SEQ ID NO: 573937 - DNA, 15 bp, Homo sapiens
gtgaccggcgcttgt

SEQ ID NO: 573938 - DNA, 15 bp, Homo sapiens
tgaccggcgcttgtc

SEQ ID NO: 573939 - DNA, 15 bp, Homo sapiens
gaccggcgcttgtct

SEQ ID NO: 573940 - DNA, 15 bp, Homo sapiens
ccgagaccttcttct

SEQ ID NO: 573941 - DNA, 15 bp, Homo sapiens
cgagaccttcttctt

SEQ ID NO: 573942 - DNA, 15 bp, Homo sapiens
gagaccttcttcttc

SEQ ID NO: 573943 - DNA, 15 bp, Homo sapiens
agaccttcttcttcc

SEQ ID NO: 573944 - DNA, 15 bp, Homo sapiens
gaccttcttcttccc

SEQ ID NO: 573945 - DNA, 15 bp, Homo sapiens
accttcttcttccct

SEQ ID NO: 573946 - DNA, 15 bp, Homo sapiens
ccttcttcttccctc

SEQ ID NO: 573947 - DNA, 15 bp, Homo sapiens
cttcttcttccctca

SEQ ID NO: 573948 - DNA, 15 bp, Homo sapiens
ttcttcttccctcag

SEQ ID NO: 573949 - DNA, 15 bp, Homo sapiens
tcttcttccctcaga

SEQ ID NO: 573950 - DNA, 15 bp, Homo sapiens
cttcttccctcagat

SEQ ID NO: 573951 - DNA, 15 bp, Homo sapiens
ttcttccctcagatt

SEQ ID NO: 573952 - DNA, 15 bp, Homo sapiens
tcttccctcagattc

SEQ ID NO: 573953 - DNA, 15 bp, Homo sapiens
cttccctcagattct

SEQ ID NO: 573954 - DNA, 15 bp, Homo sapiens
ttccctcagattctg

SEQ ID NO: 573955 - DNA, 15 bp, Homo sapiens
tccctcagattctgg

SEQ ID NO: 573956 - DNA, 15 bp, Homo sapiens
ccctcagattctggg

SEQ ID NO: 573957 - DNA, 15 bp, Homo sapiens
cctcagattctggga

SEQ ID NO: 573958 - DNA, 15 bp, Homo sapiens
ctcagattctgggaa

SEQ ID NO: 573959 - DNA, 15 bp, Homo sapiens
tcagattctgggaaa

SEQ ID NO: 573960 - DNA, 15 bp, Homo sapiens
cagattctgggaaat

SEQ ID NO: 573961 - DNA, 15 bp, Homo sapiens
agattctgggaaatg

SEQ ID NO: 573962 - DNA, 15 bp, Homo sapiens
gattctgggaaatgg

SEQ ID NO: 573963 - DNA, 15 bp, Homo sapiens
attctgggaaatgga

SEQ ID NO: 573964 - DNA, 15 bp, Homo sapiens
ttctgggaaatggag

SEQ ID NO: 573965 - DNA, 15 bp, Homo sapiens
tctgggaaatggagg

SEQ ID NO: 573966 - DNA, 15 bp, Homo sapiens
ctgggaaatggagga

SEQ ID NO: 573967 - DNA, 15 bp, Homo sapiens
tgggaaatggaggac

SEQ ID NO: 573968 - DNA, 15 bp, Homo sapiens
gggaaatggaggact

SEQ ID NO: 573969 - DNA, 15 bp, Homo sapiens
ggaaatggaggactc

SEQ ID NO: 573970 - DNA, 15 bp, Homo sapiens
gaaatggaggactct

SEQ ID NO: 573971 - DNA, 15 bp, Homo sapiens
aaatggaggactctg

SEQ ID NO: 573972 - DNA, 15 bp, Homo sapiens
aatggaggactctga

SEQ ID NO: 573973 - DNA, 15 bp, Homo sapiens
atggaggactctgac

SEQ ID NO: 573974 - DNA, 15 bp, Homo sapiens
tggaggactctgacc

SEQ ID NO: 573975 - DNA, 15 bp, Homo sapiens
ggaggactctgacca

SEQ ID NO: 573976 - DNA, 15 bp, Homo sapiens
gaggactctgaccag

SEQ ID NO: 573977 - DNA, 15 bp, Homo sapiens
aggactctgaccagc

SEQ ID NO: 573978 - DNA, 15 bp, Homo sapiens
ggactctgaccagcc

SEQ ID NO: 573979 - DNA, 15 bp, Homo sapiens
gactctgaccagccc

SEQ ID NO: 573980 - DNA, 15 bp, Homo sapiens
actctgaccagcccc

SEQ ID NO: 573981 - DNA, 15 bp, Homo sapiens
ctctgaccagcccct

SEQ ID NO: 573982 - DNA, 15 bp, Homo sapiens
tctgaccagcccctt

SEQ ID NO: 573983 - DNA, 15 bp, Homo sapiens
ctgaccagccccttc

SEQ ID NO: 573984 - DNA, 15 bp, Homo sapiens
tgaccagccccttct

SEQ ID NO: 573985 - DNA, 15 bp, Homo sapiens
gaccagccccttctc

SEQ ID NO: 573986 - DNA, 15 bp, Homo sapiens
accagccccttctct

SEQ ID NO: 573987 - DNA, 15 bp, Homo sapiens
ccagccccttctctc

SEQ ID NO: 573988 - DNA, 15 bp, Homo sapiens
cagccccttctctca

SEQ ID NO: 573989 - DNA, 15 bp, Homo sapiens
agccccttctctcat

SEQ ID NO: 573990 - DNA, 15 bp, Homo sapiens
gccccttctctcatg

SEQ ID NO: 573991 - DNA, 15 bp, Homo sapiens
ccccttctctcatga

SEQ ID NO: 573992 - DNA, 15 bp, Homo sapiens
cccttctctcatgaa

SEQ ID NO: 573993 - DNA, 15 bp, Homo sapiens
ccttctctcatgaaa

SEQ ID NO: 573994 - DNA, 15 bp, Homo sapiens
cttctctcatgaaaa

SEQ ID NO: 573995 - DNA, 15 bp, Homo sapiens
ttctctcatgaaaaa

SEQ ID NO: 573996 - DNA, 15 bp, Homo sapiens
tctctcatgaaaaaa

SEQ ID NO: 573997 - DNA, 15 bp, Homo sapiens
ctctcatgaaaaaaa

SEQ ID NO: 573998 - DNA, 15 bp, Homo sapiens
tctcatgaaaaaaag

SEQ ID NO: 573999 - DNA, 15 bp, Homo sapiens
ctcatgaaaaaaagg

SEQ ID NO: 574000 - DNA, 15 bp, Homo sapiens
tcatgaaaaaaaggg

SEQ ID NO: 574001 - DNA, 15 bp, Homo sapiens
catgaaaaaaagggt

SEQ ID NO: 574002 - DNA, 15 bp, Homo sapiens
atgaaaaaaagggta

SEQ ID NO: 574003 - DNA, 15 bp, Homo sapiens
tgaaaaaaagggtaa

SEQ ID NO: 574004 - DNA, 15 bp, Homo sapiens
gaaaaaaagggtaag

SEQ ID NO: 574005 - DNA, 15 bp, Homo sapiens
aaaaaaagggtaagg

SEQ ID NO: 574006 - DNA, 15 bp, Homo sapiens
aaaaaagggtaaggg

SEQ ID NO: 574007 - DNA, 15 bp, Homo sapiens
aaaaagggtaagggg

SEQ ID NO: 574008 - DNA, 15 bp, Homo sapiens
aaaagggtaaggggt

SEQ ID NO: 574009 - DNA, 15 bp, Homo sapiens
aaagggtaaggggtt

SEQ ID NO: 574010 - DNA, 15 bp, Homo sapiens
aagggtaaggggttt

SEQ ID NO: 574011 - DNA, 15 bp, Homo sapiens
agggtaaggggtttg

SEQ ID NO: 574012 - DNA, 15 bp, Homo sapiens
gggtaaggggtttgg

SEQ ID NO: 574013 - DNA, 15 bp, Homo sapiens
ggtaaggggtttgga

SEQ ID NO: 574014 - DNA, 15 bp, Homo sapiens
gtaaggggtttggac

SEQ ID NO: 574015 - DNA, 15 bp, Homo sapiens
taaggggtttggaca

SEQ ID NO: 574016 - DNA, 15 bp, Homo sapiens
aaggggtttggacat

SEQ ID NO: 574017 - DNA, 15 bp, Homo sapiens
aggggtttggacatc

SEQ ID NO: 574018 - DNA, 15 bp, Homo sapiens
ggggtttggacatct

SEQ ID NO: 574019 - DNA, 15 bp, Homo sapiens
gggtttggacatctc

SEQ ID NO: 574020 - DNA, 15 bp, Homo sapiens
ggtttggacatctct

SEQ ID NO: 574021 - DNA, 15 bp, Homo sapiens
gtttggacatctcta

SEQ ID NO: 574022 - DNA, 15 bp, Homo sapiens
tttggacatctctaa

SEQ ID NO: 574023 - DNA, 15 bp, Homo sapiens
ttggacatctctaag

SEQ ID NO: 574024 - DNA, 15 bp, Homo sapiens
tggacatctctaagg

SEQ ID NO: 574025 - DNA, 15 bp, Homo sapiens
ggacatctctaaggt

SEQ ID NO: 574026 - DNA, 15 bp, Homo sapiens
gacatctctaaggtg

SEQ ID NO: 574027 - DNA, 15 bp, Homo sapiens
acatctctaaggtga

SEQ ID NO: 574028 - DNA, 15 bp, Homo sapiens
catctctaaggtgaa

SEQ ID NO: 574029 - DNA, 15 bp, Homo sapiens
atctctaaggtgaaa

SEQ ID NO: 574030 - DNA, 15 bp, Homo sapiens
tctctaaggtgaaaa

SEQ ID NO: 574031 - DNA, 15 bp, Homo sapiens
ctctaaggtgaaaag

SEQ ID NO: 574032 - DNA, 15 bp, Homo sapiens
tctaaggtgaaaagt

SEQ ID NO: 574033 - DNA, 15 bp, Homo sapiens
ctaaggtgaaaagtc

SEQ ID NO: 574034 - DNA, 15 bp, Homo sapiens
taaggtgaaaagtct

SEQ ID NO: 574035 - DNA, 15 bp, Homo sapiens
aaggtgaaaagtctc

SEQ ID NO: 574036 - DNA, 15 bp, Homo sapiens
aggtgaaaagtctcc

SEQ ID NO: 574037 - DNA, 15 bp, Homo sapiens
ggtgaaaagtctcca

SEQ ID NO: 574038 - DNA, 15 bp, Homo sapiens
gtgaaaagtctccaa

SEQ ID NO: 574039 - DNA, 15 bp, Homo sapiens
tgaaaagtctccaag

SEQ ID NO: 574040 - DNA, 15 bp, Homo sapiens
gaaaagtctccaagt

SEQ ID NO: 574041 - DNA, 15 bp, Homo sapiens
aaaagtctccaagtc

SEQ ID NO: 574042 - DNA, 15 bp, Homo sapiens
aaagtctccaagtcc

SEQ ID NO: 574043 - DNA, 15 bp, Homo sapiens
aagtctccaagtcct

SEQ ID NO: 574044 - DNA, 15 bp, Homo sapiens
agtctccaagtcctg

SEQ ID NO: 574045 - DNA, 15 bp, Homo sapiens
gtctccaagtcctgc

SEQ ID NO: 574046 - DNA, 15 bp, Homo sapiens
tctccaagtcctgcc

SEQ ID NO: 574047 - DNA, 15 bp, Homo sapiens
ctccaagtcctgcca

SEQ ID NO: 574048 - DNA, 15 bp, Homo sapiens
tccaagtcctgccaa

SEQ ID NO: 574049 - DNA, 15 bp, Homo sapiens
ccaagtcctgccaac

SEQ ID NO: 574050 - DNA, 15 bp, Homo sapiens
caagtcctgccaacg

SEQ ID NO: 574051 - DNA, 15 bp, Homo sapiens
aagtcctgccaacga

SEQ ID NO: 574052 - DNA, 15 bp, Homo sapiens
agtcctgccaacgac

SEQ ID NO: 574053 - DNA, 15 bp, Homo sapiens
gtcctgccaacgaca

SEQ ID NO: 574054 - DNA, 15 bp, Homo sapiens
tcctgccaacgacag

SEQ ID NO: 574055 - DNA, 15 bp, Homo sapiens
cctgccaacgacagt

SEQ ID NO: 574056 - DNA, 15 bp, Homo sapiens
ctgccaacgacagtt

SEQ ID NO: 574057 - DNA, 15 bp, Homo sapiens
tgccaacgacagttc

SEQ ID NO: 574058 - DNA, 15 bp, Homo sapiens
gccaacgacagttct

SEQ ID NO: 574059 - DNA, 15 bp, Homo sapiens
ccaacgacagttctg

SEQ ID NO: 574060 - DNA, 15 bp, Homo sapiens
caacgacagttctgg

SEQ ID NO: 574061 - DNA, 15 bp, Homo sapiens
aacgacagttctggg

SEQ ID NO: 574062 - DNA, 15 bp, Homo sapiens
acgacagttctggga

SEQ ID NO: 574063 - DNA, 15 bp, Homo sapiens
cgacagttctgggaa

SEQ ID NO: 574064 - DNA, 15 bp, Homo sapiens
gacagttctgggaaa

SEQ ID NO: 574065 - DNA, 15 bp, Homo sapiens
acagttctgggaaac

SEQ ID NO: 574066 - DNA, 15 bp, Homo sapiens
cagttctgggaaaca

SEQ ID NO: 574067 - DNA, 15 bp, Homo sapiens
agttctgggaaacag

SEQ ID NO: 574068 - DNA, 15 bp, Homo sapiens
gttctgggaaacaga

SEQ ID NO: 574069 - DNA, 15 bp, Homo sapiens
ttctgggaaacagat

SEQ ID NO: 574070 - DNA, 15 bp, Homo sapiens
tctgggaaacagatc

SEQ ID NO: 574071 - DNA, 15 bp, Homo sapiens
ctgggaaacagatct

SEQ ID NO: 574072 - DNA, 15 bp, Homo sapiens
tgggaaacagatctg

SEQ ID NO: 574073 - DNA, 15 bp, Homo sapiens
gggaaacagatctga

SEQ ID NO: 574074 - DNA, 15 bp, Homo sapiens
ggaaacagatctgac

SEQ ID NO: 574075 - DNA, 15 bp, Homo sapiens
gaaacagatctgacc

SEQ ID NO: 574076 - DNA, 15 bp, Homo sapiens
aaacagatctgaccc

SEQ ID NO: 574077 - DNA, 15 bp, Homo sapiens
aacagatctgacccc

SEQ ID NO: 574078 - DNA, 15 bp, Homo sapiens
acagatctgacccct

SEQ ID NO: 574079 - DNA, 15 bp, Homo sapiens
cagatctgacccctt

SEQ ID NO: 574080 - DNA, 15 bp, Homo sapiens
agatctgaccccttc

SEQ ID NO: 574081 - DNA, 15 bp, Homo sapiens
gatctgaccccttct

SEQ ID NO: 574082 - DNA, 15 bp, Homo sapiens
atctgaccccttctc

SEQ ID NO: 574083 - DNA, 15 bp, Homo sapiens
tctgaccccttctct

SEQ ID NO: 574084 - DNA, 15 bp, Homo sapiens
ctgaccccttctcta

SEQ ID NO: 574085 - DNA, 15 bp, Homo sapiens
tgaccccttctctac

SEQ ID NO: 574086 - DNA, 15 bp, Homo sapiens
gaccccttctctacc

SEQ ID NO: 574087 - DNA, 15 bp, Homo sapiens
accccttctctacct

SEQ ID NO: 574088 - DNA, 15 bp, Homo sapiens
ccccttctctacctc

SEQ ID NO: 574089 - DNA, 15 bp, Homo sapiens
cccttctctacctca

SEQ ID NO: 574090 - DNA, 15 bp, Homo sapiens
ccttctctacctcac

SEQ ID NO: 574091 - DNA, 15 bp, Homo sapiens
cttctctacctcact

SEQ ID NO: 574092 - DNA, 15 bp, Homo sapiens
ttctctacctcactc

SEQ ID NO: 574093 - DNA, 15 bp, Homo sapiens
tctctacctcactct

SEQ ID NO: 574094 - DNA, 15 bp, Homo sapiens
ctctacctcactctt

SEQ ID NO: 574095 - DNA, 15 bp, Homo sapiens
tctacctcactcttc

SEQ ID NO: 574096 - DNA, 15 bp, Homo sapiens
ctacctcactcttca

SEQ ID NO: 574097 - DNA, 15 bp, Homo sapiens
tacctcactcttcac

SEQ ID NO: 574098 - DNA, 15 bp, Homo sapiens
acctcactcttcacc

SEQ ID NO: 574099 - DNA, 15 bp, Homo sapiens
cctcactcttcacca

SEQ ID NO: 574100 - DNA, 15 bp, Homo sapiens
ctcactcttcaccaa

SEQ ID NO: 574101 - DNA, 15 bp, Homo sapiens
tcactcttcaccaaa

SEQ ID NO: 574102 - DNA, 15 bp, Homo sapiens
cactcttcaccaaaa

SEQ ID NO: 574103 - DNA, 15 bp, Homo sapiens
actcttcaccaaaaa

SEQ ID NO: 574104 - DNA, 15 bp, Homo sapiens
ctcttcaccaaaaaa

SEQ ID NO: 574105 - DNA, 15 bp, Homo sapiens
tcttcaccaaaaaac

SEQ ID NO: 574106 - DNA, 15 bp, Homo sapiens
cttcaccaaaaaacc

SEQ ID NO: 574107 - DNA, 15 bp, Homo sapiens
ttcaccaaaaaacca

SEQ ID NO: 574108 - DNA, 15 bp, Homo sapiens
tcaccaaaaaaccag

SEQ ID NO: 574109 - DNA, 15 bp, Homo sapiens
caccaaaaaaccagc

SEQ ID NO: 574110 - DNA, 15 bp, Homo sapiens
accaaaaaaccagca

SEQ ID NO: 574111 - DNA, 15 bp, Homo sapiens
ccaaaaaaccagcat

SEQ ID NO: 574112 - DNA, 15 bp, Homo sapiens
caaaaaaccagcata

SEQ ID NO: 574113 - DNA, 15 bp, Homo sapiens
aaaaaaccagcatat

SEQ ID NO: 574114 - DNA, 15 bp, Homo sapiens
aaaaaccagcatatt

SEQ ID NO: 574115 - DNA, 15 bp, Homo sapiens
aaaaccagcatattg

SEQ ID NO: 574116 - DNA, 15 bp, Homo sapiens
aaaccagcatattgt

SEQ ID NO: 574117 - DNA, 15 bp, Homo sapiens
aaccagcatattgtt

SEQ ID NO: 574118 - DNA, 15 bp, Homo sapiens
accagcatattgtta

SEQ ID NO: 574119 - DNA, 15 bp, Homo sapiens
ccagcatattgttag

SEQ ID NO: 574120 - DNA, 15 bp, Homo sapiens
cagcatattgttagc

SEQ ID NO: 574121 - DNA, 15 bp, Homo sapiens
agcatattgttagct

SEQ ID NO: 574122 - DNA, 15 bp, Homo sapiens
gcatattgttagctg

SEQ ID NO: 574123 - DNA, 15 bp, Homo sapiens
catattgttagctgc

SEQ ID NO: 574124 - DNA, 15 bp, Homo sapiens
atattgttagctgcc

SEQ ID NO: 574125 - DNA, 15 bp, Homo sapiens
tattgttagctgcct

SEQ ID NO: 574126 - DNA, 15 bp, Homo sapiens
attgttagctgcctt

SEQ ID NO: 574127 - DNA, 15 bp, Homo sapiens
ttgttagctgcctta

SEQ ID NO: 574128 - DNA, 15 bp, Homo sapiens
tgttagctgccttat

SEQ ID NO: 574129 - DNA, 15 bp, Homo sapiens
gttagctgccttata

SEQ ID NO: 574130 - DNA, 15 bp, Homo sapiens
ttagctgccttatag

SEQ ID NO: 574131 - DNA, 15 bp, Homo sapiens
tagctgccttatagg

SEQ ID NO: 574132 - DNA, 15 bp, Homo sapiens
agctgccttatagga

SEQ ID NO: 574133 - DNA, 15 bp, Homo sapiens
gctgccttataggat

SEQ ID NO: 574134 - DNA, 15 bp, Homo sapiens
ctgccttataggatt

SEQ ID NO: 574135 - DNA, 15 bp, Homo sapiens
tgccttataggatta

SEQ ID NO: 574136 - DNA, 15 bp, Homo sapiens
gccttataggattag

SEQ ID NO: 574137 - DNA, 15 bp, Homo sapiens
ccttataggattaga

SEQ ID NO: 574138 - DNA, 15 bp, Homo sapiens
cttataggattagat

SEQ ID NO: 574139 - DNA, 15 bp, Homo sapiens
ttataggattagatg

SEQ ID NO: 574140 - DNA, 15 bp, Homo sapiens
tataggattagatga

SEQ ID NO: 574141 - DNA, 15 bp, Homo sapiens
ataggattagatgag

SEQ ID NO: 574142 - DNA, 15 bp, Homo sapiens
taggattagatgagt

SEQ ID NO: 574143 - DNA, 15 bp, Homo sapiens
aggattagatgagta

SEQ ID NO: 574144 - DNA, 15 bp, Homo sapiens
ggattagatgagtac

SEQ ID NO: 574145 - DNA, 15 bp, Homo sapiens
gattagatgagtact

SEQ ID NO: 574146 - DNA, 15 bp, Homo sapiens
attagatgagtactt

SEQ ID NO: 574147 - DNA, 15 bp, Homo sapiens
ttagatgagtacttg

SEQ ID NO: 574148 - DNA, 15 bp, Homo sapiens
tagatgagtacttgc

SEQ ID NO: 574149 - DNA, 15 bp, Homo sapiens
agatgagtacttgcc

SEQ ID NO: 574150 - DNA, 15 bp, Homo sapiens
gatgagtacttgcct

SEQ ID NO: 574151 - DNA, 15 bp, Homo sapiens
atgagtacttgcctt

SEQ ID NO: 574152 - DNA, 15 bp, Homo sapiens
tgagtacttgccttc

SEQ ID NO: 574153 - DNA, 15 bp, Homo sapiens
gagtacttgccttcg

SEQ ID NO: 574154 - DNA, 15 bp, Homo sapiens
agtacttgccttcgc

SEQ ID NO: 574155 - DNA, 15 bp, Homo sapiens
gtacttgccttcgcc

SEQ ID NO: 574156 - DNA, 15 bp, Homo sapiens
tacttgccttcgccc

SEQ ID NO: 574157 - DNA, 15 bp, Homo sapiens
acttgccttcgccct

SEQ ID NO: 574158 - DNA, 15 bp, Homo sapiens
cttgccttcgccctc

SEQ ID NO: 574159 - DNA, 15 bp, Homo sapiens
ttgccttcgccctcc

SEQ ID NO: 574160 - DNA, 15 bp, Homo sapiens
tgccttcgccctccc

SEQ ID NO: 574161 - DNA, 15 bp, Homo sapiens
gccttcgccctccct

SEQ ID NO: 574162 - DNA, 15 bp, Homo sapiens
ccttcgccctccctc

SEQ ID NO: 574163 - DNA, 15 bp, Homo sapiens
cttcgccctccctca

SEQ ID NO: 574164 - DNA, 15 bp, Homo sapiens
ttcgccctccctcag

SEQ ID NO: 574165 - DNA, 15 bp, Homo sapiens
tcgccctccctcaga

SEQ ID NO: 574166 - DNA, 15 bp, Homo sapiens
cgccctccctcagaa

SEQ ID NO: 574167 - DNA, 15 bp, Homo sapiens
gccctccctcagaag

SEQ ID NO: 574168 - DNA, 15 bp, Homo sapiens
ccctccctcagaaga

SEQ ID NO: 574169 - DNA, 15 bp, Homo sapiens
cctccctcagaagag

SEQ ID NO: 574170 - DNA, 15 bp, Homo sapiens
ctccctcagaagagg

SEQ ID NO: 574171 - DNA, 15 bp, Homo sapiens
tccctcagaagaggt

SEQ ID NO: 574172 - DNA, 15 bp, Homo sapiens
ccctcagaagaggtt

SEQ ID NO: 574173 - DNA, 15 bp, Homo sapiens
cctcagaagaggttc

SEQ ID NO: 574174 - DNA, 15 bp, Homo sapiens
ctcagaagaggttca

SEQ ID NO: 574175 - DNA, 15 bp, Homo sapiens
tcagaagaggttcag

SEQ ID NO: 574176 - DNA, 15 bp, Homo sapiens
cagaagaggttcagc

SEQ ID NO: 574177 - DNA, 15 bp, Homo sapiens
agaagaggttcagct

SEQ ID NO: 574178 - DNA, 15 bp, Homo sapiens
gaagaggttcagctt

SEQ ID NO: 574179 - DNA, 15 bp, Homo sapiens
aagaggttcagcttc

SEQ ID NO: 574180 - DNA, 15 bp, Homo sapiens
agaggttcagcttct

SEQ ID NO: 574181 - DNA, 15 bp, Homo sapiens
gaggttcagcttctt

SEQ ID NO: 574182 - DNA, 15 bp, Homo sapiens
aggttcagcttcttg

SEQ ID NO: 574183 - DNA, 15 bp, Homo sapiens
ggttcagcttcttgg

SEQ ID NO: 574184 - DNA, 15 bp, Homo sapiens
gttcagcttcttggg

SEQ ID NO: 574185 - DNA, 15 bp, Homo sapiens
ttcagcttcttgggg

SEQ ID NO: 574186 - DNA, 15 bp, Homo sapiens
tcagcttcttggggc

SEQ ID NO: 574187 - DNA, 15 bp, Homo sapiens
cagcttcttggggct

SEQ ID NO: 574188 - DNA, 15 bp, Homo sapiens
agcttcttggggctg

SEQ ID NO: 574189 - DNA, 15 bp, Homo sapiens
gcttcttggggctgg

SEQ ID NO: 574190 - DNA, 15 bp, Homo sapiens
cttcttggggctgga

SEQ ID NO: 574191 - DNA, 15 bp, Homo sapiens
ttcttggggctggac

SEQ ID NO: 574192 - DNA, 15 bp, Homo sapiens
tcttggggctggaca

SEQ ID NO: 574193 - DNA, 15 bp, Homo sapiens
cttggggctggacac

SEQ ID NO: 574194 - DNA, 15 bp, Homo sapiens
ttggggctggacact

SEQ ID NO: 574195 - DNA, 15 bp, Homo sapiens
tggggctggacactt

SEQ ID NO: 574196 - DNA, 15 bp, Homo sapiens
ggggctggacacttc

SEQ ID NO: 574197 - DNA, 15 bp, Homo sapiens
gggctggacacttcc

SEQ ID NO: 574198 - DNA, 15 bp, Homo sapiens
ggctggacacttcca

SEQ ID NO: 574199 - DNA, 15 bp, Homo sapiens
gctggacacttccac

SEQ ID NO: 574200 - DNA, 15 bp, Homo sapiens
ctggacacttccaca

SEQ ID NO: 574201 - DNA, 15 bp, Homo sapiens
tggacacttccacag

SEQ ID NO: 574202 - DNA, 15 bp, Homo sapiens
ggacacttccacagg

SEQ ID NO: 574203 - DNA, 15 bp, Homo sapiens
gacacttccacaggc

SEQ ID NO: 574204 - DNA, 15 bp, Homo sapiens
acacttccacaggcc

SEQ ID NO: 574205 - DNA, 15 bp, Homo sapiens
cacttccacaggcct

SEQ ID NO: 574206 - DNA, 15 bp, Homo sapiens
acttccacaggcctt

SEQ ID NO: 574207 - DNA, 15 bp, Homo sapiens
cttccacaggccttt

SEQ ID NO: 574208 - DNA, 15 bp, Homo sapiens
ttccacaggcctttt

SEQ ID NO: 574209 - DNA, 15 bp, Homo sapiens
tccacaggcctttta

SEQ ID NO: 574210 - DNA, 15 bp, Homo sapiens
ccacaggccttttac

SEQ ID NO: 574211 - DNA, 15 bp, Homo sapiens
cacaggccttttacc

SEQ ID NO: 574212 - DNA, 15 bp, Homo sapiens
acaggccttttacct

SEQ ID NO: 574213 - DNA, 15 bp, Homo sapiens
caggccttttacctc

SEQ ID NO: 574214 - DNA, 15 bp, Homo sapiens
aggccttttacctct

SEQ ID NO: 574215 - DNA, 15 bp, Homo sapiens
ggccttttacctctg

SEQ ID NO: 574216 - DNA, 15 bp, Homo sapiens
gccttttacctctgg

SEQ ID NO: 574217 - DNA, 15 bp, Homo sapiens
ccttttacctctggt

SEQ ID NO: 574218 - DNA, 15 bp, Homo sapiens
cttttacctctggtc

SEQ ID NO: 574219 - DNA, 15 bp, Homo sapiens
ttttacctctggtca

SEQ ID NO: 574220 - DNA, 15 bp, Homo sapiens
tttacctctggtcat

SEQ ID NO: 574221 - DNA, 15 bp, Homo sapiens
ttacctctggtcatg

SEQ ID NO: 574222 - DNA, 15 bp, Homo sapiens
tacctctggtcatgg

SEQ ID NO: 574223 - DNA, 15 bp, Homo sapiens
acctctggtcatggc

SEQ ID NO: 574224 - DNA, 15 bp, Homo sapiens
cctctggtcatggcc

SEQ ID NO: 574225 - DNA, 15 bp, Homo sapiens
ctctggtcatggcca

SEQ ID NO: 574226 - DNA, 15 bp, Homo sapiens
tctggtcatggccac

SEQ ID NO: 574227 - DNA, 15 bp, Homo sapiens
ctggtcatggccaca

SEQ ID NO: 574228 - DNA, 15 bp, Homo sapiens
tggtcatggccacag

SEQ ID NO: 574229 - DNA, 15 bp, Homo sapiens
ggtcatggccacagc

SEQ ID NO: 574230 - DNA, 15 bp, Homo sapiens
gtcatggccacagcc

SEQ ID NO: 574231 - DNA, 15 bp, Homo sapiens
tcatggccacagcct

SEQ ID NO: 574232 - DNA, 15 bp, Homo sapiens
catggccacagcctt

SEQ ID NO: 574233 - DNA, 15 bp, Homo sapiens
atggccacagccttt

SEQ ID NO: 574234 - DNA, 15 bp, Homo sapiens
tggccacagcctttt

SEQ ID NO: 574235 - DNA, 15 bp, Homo sapiens
ggccacagccttttt

SEQ ID NO: 574236 - DNA, 15 bp, Homo sapiens
gccacagcctttttt

SEQ ID NO: 574237 - DNA, 15 bp, Homo sapiens
ccacagccttttttt

SEQ ID NO: 574238 - DNA, 15 bp, Homo sapiens
cacagcctttttttc

SEQ ID NO: 574239 - DNA, 15 bp, Homo sapiens
acagcctttttttct

SEQ ID NO: 574240 - DNA, 15 bp, Homo sapiens
cagcctttttttctt

SEQ ID NO: 574241 - DNA, 15 bp, Homo sapiens
agcctttttttcttc

SEQ ID NO: 574242 - DNA, 15 bp, Homo sapiens
gcctttttttcttct

SEQ ID NO: 574243 - DNA, 15 bp, Homo sapiens
cctttttttcttctg

SEQ ID NO: 574244 - DNA, 15 bp, Homo sapiens
ctttttttcttctgg

SEQ ID NO: 574245 - DNA, 15 bp, Homo sapiens
tttttttcttctggg

SEQ ID NO: 574246 - DNA, 15 bp, Homo sapiens
ttttttcttctgggg

SEQ ID NO: 574247 - DNA, 15 bp, Homo sapiens
tttttcttctggggt

SEQ ID NO: 574248 - DNA, 15 bp, Homo sapiens
ttttcttctggggtg

SEQ ID NO: 574249 - DNA, 15 bp, Homo sapiens
tttcttctggggtgc

SEQ ID NO: 574250 - DNA, 15 bp, Homo sapiens
ttcttctggggtgct

SEQ ID NO: 574251 - DNA, 15 bp, Homo sapiens
tcttctggggtgctg

SEQ ID NO: 574252 - DNA, 15 bp, Homo sapiens
cttctggggtgctgt

SEQ ID NO: 574253 - DNA, 15 bp, Homo sapiens
ttctggggtgctgtg

SEQ ID NO: 574254 - DNA, 15 bp, Homo sapiens
tctggggtgctgtgc

SEQ ID NO: 574255 - DNA, 15 bp, Homo sapiens
ctggggtgctgtgcc

SEQ ID NO: 574256 - DNA, 15 bp, Homo sapiens
tggggtgctgtgcct

SEQ ID NO: 574257 - DNA, 15 bp, Homo sapiens
ggggtgctgtgcctc

SEQ ID NO: 574258 - DNA, 15 bp, Homo sapiens
gggtgctgtgcctcc

SEQ ID NO: 574259 - DNA, 15 bp, Homo sapiens
ggtgctgtgcctcca

SEQ ID NO: 574260 - DNA, 15 bp, Homo sapiens
gtgctgtgcctccag

SEQ ID NO: 574261 - DNA, 15 bp, Homo sapiens
tgctgtgcctccagg

SEQ ID NO: 574262 - DNA, 15 bp, Homo sapiens
gctgtgcctccaggg

SEQ ID NO: 574263 - DNA, 15 bp, Homo sapiens
ctgtgcctccagggg

SEQ ID NO: 574264 - DNA, 15 bp, Homo sapiens
tgtgcctccaggggt

SEQ ID NO: 574265 - DNA, 15 bp, Homo sapiens
gtgcctccaggggtc

SEQ ID NO: 574266 - DNA, 15 bp, Homo sapiens
tgcctccaggggtcc

SEQ ID NO: 574267 - DNA, 15 bp, Homo sapiens
gcctccaggggtcca

SEQ ID NO: 574268 - DNA, 15 bp, Homo sapiens
cctccaggggtccag

SEQ ID NO: 574269 - DNA, 15 bp, Homo sapiens
ctccaggggtccagg

SEQ ID NO: 574270 - DNA, 15 bp, Homo sapiens
tccaggggtccaggc

SEQ ID NO: 574271 - DNA, 15 bp, Homo sapiens
ccaggggtccaggcc

SEQ ID NO: 574272 - DNA, 15 bp, Homo sapiens
caggggtccaggcct

SEQ ID NO: 574273 - DNA, 15 bp, Homo sapiens
aggggtccaggcctg

SEQ ID NO: 574274 - DNA, 15 bp, Homo sapiens
ggggtccaggcctgg

SEQ ID NO: 574275 - DNA, 15 bp, Homo sapiens
gggtccaggcctggg

SEQ ID NO: 574276 - DNA, 15 bp, Homo sapiens
ggtccaggcctggga

SEQ ID NO: 574277 - DNA, 15 bp, Homo sapiens
gtccaggcctgggaa

SEQ ID NO: 574278 - DNA, 15 bp, Homo sapiens
tccaggcctgggaag

SEQ ID NO: 574279 - DNA, 15 bp, Homo sapiens
ccaggcctgggaagc

SEQ ID NO: 574280 - DNA, 15 bp, Homo sapiens
caggcctgggaagct

SEQ ID NO: 574281 - DNA, 15 bp, Homo sapiens
aggcctgggaagctc

SEQ ID NO: 574282 - DNA, 15 bp, Homo sapiens
ggcctgggaagctca

SEQ ID NO: 574283 - DNA, 15 bp, Homo sapiens
gcctgggaagctcag

SEQ ID NO: 574284 - DNA, 15 bp, Homo sapiens
cctgggaagctcagg

SEQ ID NO: 574285 - DNA, 15 bp, Homo sapiens
ctgggaagctcaggg

SEQ ID NO: 574286 - DNA, 15 bp, Homo sapiens
tgggaagctcagggg

SEQ ID NO: 574287 - DNA, 15 bp, Homo sapiens
gggaagctcagggga

SEQ ID NO: 574288 - DNA, 15 bp, Homo sapiens
ggaagctcaggggaa

SEQ ID NO: 574289 - DNA, 15 bp, Homo sapiens
gaagctcaggggaag

SEQ ID NO: 574290 - DNA, 15 bp, Homo sapiens
aagctcaggggaagt

SEQ ID NO: 574291 - DNA, 15 bp, Homo sapiens
agctcaggggaagtc

SEQ ID NO: 574292 - DNA, 15 bp, Homo sapiens
gctcaggggaagtca

SEQ ID NO: 574293 - DNA, 15 bp, Homo sapiens
ctcaggggaagtcac

SEQ ID NO: 574294 - DNA, 15 bp, Homo sapiens
tcaggggaagtcact

SEQ ID NO: 574295 - DNA, 15 bp, Homo sapiens
caggggaagtcactg

SEQ ID NO: 574296 - DNA, 15 bp, Homo sapiens
aggggaagtcactgc

SEQ ID NO: 574297 - DNA, 15 bp, Homo sapiens
ggggaagtcactgcc

SEQ ID NO: 574298 - DNA, 15 bp, Homo sapiens
gggaagtcactgcct

SEQ ID NO: 574299 - DNA, 15 bp, Homo sapiens
ggaagtcactgcctg

SEQ ID NO: 574300 - DNA, 15 bp, Homo sapiens
gaagtcactgcctgg

SEQ ID NO: 574301 - DNA, 15 bp, Homo sapiens
aagtcactgcctggc

SEQ ID NO: 574302 - DNA, 15 bp, Homo sapiens
agtcactgcctggcc

SEQ ID NO: 574303 - DNA, 15 bp, Homo sapiens
gtcactgcctggcct

SEQ ID NO: 574304 - DNA, 15 bp, Homo sapiens
tcactgcctggcctg

SEQ ID NO: 574305 - DNA, 15 bp, Homo sapiens
cactgcctggcctgg

SEQ ID NO: 574306 - DNA, 15 bp, Homo sapiens
actgcctggcctggg

SEQ ID NO: 574307 - DNA, 15 bp, Homo sapiens
ctgcctggcctgggg

SEQ ID NO: 574308 - DNA, 15 bp, Homo sapiens
tgcctggcctgggga

SEQ ID NO: 574309 - DNA, 15 bp, Homo sapiens
gcctggcctggggac

SEQ ID NO: 574310 - DNA, 15 bp, Homo sapiens
cctggcctggggaca

SEQ ID NO: 574311 - DNA, 15 bp, Homo sapiens
ctggcctggggacat

SEQ ID NO: 574312 - DNA, 15 bp, Homo sapiens
tggcctggggacatt

SEQ ID NO: 574313 - DNA, 15 bp, Homo sapiens
ggcctggggacattc

SEQ ID NO: 574314 - DNA, 15 bp, Homo sapiens
gcctggggacattct

SEQ ID NO: 574315 - DNA, 15 bp, Homo sapiens
cctggggacattctc

SEQ ID NO: 574316 - DNA, 15 bp, Homo sapiens
ctggggacattctcc

SEQ ID NO: 574317 - DNA, 15 bp, Homo sapiens
tggggacattctcct

SEQ ID NO: 574318 - DNA, 15 bp, Homo sapiens
ggggacattctccta

SEQ ID NO: 574319 - DNA, 15 bp, Homo sapiens
gggacattctcctaa

SEQ ID NO: 574320 - DNA, 15 bp, Homo sapiens
ggacattctcctaac

SEQ ID NO: 574321 - DNA, 15 bp, Homo sapiens
gacattctcctaacc

SEQ ID NO: 574322 - DNA, 15 bp, Homo sapiens
acattctcctaacct

SEQ ID NO: 574323 - DNA, 15 bp, Homo sapiens
cattctcctaaccta

SEQ ID NO: 574324 - DNA, 15 bp, Homo sapiens
attctcctaacctac

SEQ ID NO: 574325 - DNA, 15 bp, Homo sapiens
ttctcctaacctact

SEQ ID NO: 574326 - DNA, 15 bp, Homo sapiens
tctcctaacctactc

SEQ ID NO: 574327 - DNA, 15 bp, Homo sapiens
ctcctaacctactca

SEQ ID NO: 574328 - DNA, 15 bp, Homo sapiens
tcctaacctactcac

SEQ ID NO: 574329 - DNA, 15 bp, Homo sapiens
cctaacctactcacc

SEQ ID NO: 574330 - DNA, 15 bp, Homo sapiens
ctaacctactcaccc

SEQ ID NO: 574331 - DNA, 15 bp, Homo sapiens
taacctactcaccct

SEQ ID NO: 574332 - DNA, 15 bp, Homo sapiens
aacctactcaccctt

SEQ ID NO: 574333 - DNA, 15 bp, Homo sapiens
acctactcacccttc

SEQ ID NO: 574334 - DNA, 15 bp, Homo sapiens
cctactcacccttct

SEQ ID NO: 574335 - DNA, 15 bp, Homo sapiens
ctactcacccttcta

SEQ ID NO: 574336 - DNA, 15 bp, Homo sapiens
tactcacccttctag

SEQ ID NO: 574337 - DNA, 15 bp, Homo sapiens
actcacccttctaga

SEQ ID NO: 574338 - DNA, 15 bp, Homo sapiens
ctcacccttctagac

SEQ ID NO: 574339 - DNA, 15 bp, Homo sapiens
tcacccttctagacc

SEQ ID NO: 574340 - DNA, 15 bp, Homo sapiens
cacccttctagaccc

SEQ ID NO: 574341 - DNA, 15 bp, Homo sapiens
acccttctagaccca

SEQ ID NO: 574342 - DNA, 15 bp, Homo sapiens
cccttctagacccag

SEQ ID NO: 574343 - DNA, 15 bp, Homo sapiens
ccttctagacccagc

SEQ ID NO: 574344 - DNA, 15 bp, Homo sapiens
cttctagacccagcc

SEQ ID NO: 574345 - DNA, 15 bp, Homo sapiens
ttctagacccagcca

SEQ ID NO: 574346 - DNA, 15 bp, Homo sapiens
tctagacccagccac

SEQ ID NO: 574347 - DNA, 15 bp, Homo sapiens
ctagacccagccacc

SEQ ID NO: 574348 - DNA, 15 bp, Homo sapiens
tagacccagccacca

SEQ ID NO: 574349 - DNA, 15 bp, Homo sapiens
agacccagccaccat

SEQ ID NO: 574350 - DNA, 15 bp, Homo sapiens
gacccagccaccatg

SEQ ID NO: 574351 - DNA, 15 bp, Homo sapiens
acccagccaccatgg

SEQ ID NO: 574352 - DNA, 15 bp, Homo sapiens
cccagccaccatggc

SEQ ID NO: 574353 - DNA, 15 bp, Homo sapiens
ccagccaccatggct

SEQ ID NO: 574354 - DNA, 15 bp, Homo sapiens
cagccaccatggctg

SEQ ID NO: 574355 - DNA, 15 bp, Homo sapiens
agccaccatggctgt

SEQ ID NO: 574356 - DNA, 15 bp, Homo sapiens
gccaccatggctgtg

SEQ ID NO: 574357 - DNA, 15 bp, Homo sapiens
ccaccatggctgtga

SEQ ID NO: 574358 - DNA, 15 bp, Homo sapiens
caccatggctgtgag

SEQ ID NO: 574359 - DNA, 15 bp, Homo sapiens
accatggctgtgaga

SEQ ID NO: 574360 - DNA, 15 bp, Homo sapiens
ccatggctgtgagac

SEQ ID NO: 574361 - DNA, 15 bp, Homo sapiens
catggctgtgagaca

SEQ ID NO: 574362 - DNA, 15 bp, Homo sapiens
atggctgtgagacag

SEQ ID NO: 574363 - DNA, 15 bp, Homo sapiens
tggctgtgagacagc

SEQ ID NO: 574364 - DNA, 15 bp, Homo sapiens
ggctgtgagacagcc

SEQ ID NO: 574365 - DNA, 15 bp, Homo sapiens
gctgtgagacagcca

SEQ ID NO: 574366 - DNA, 15 bp, Homo sapiens
ctgtgagacagccac

SEQ ID NO: 574367 - DNA, 15 bp, Homo sapiens
tgtgagacagccacc

SEQ ID NO: 574368 - DNA, 15 bp, Homo sapiens
gtgagacagccaccg

SEQ ID NO: 574369 - DNA, 15 bp, Homo sapiens
tgagacagccaccgt

SEQ ID NO: 574370 - DNA, 15 bp, Homo sapiens
gagacagccaccgtg

SEQ ID NO: 574371 - DNA, 15 bp, Homo sapiens
agacagccaccgtga

SEQ ID NO: 574372 - DNA, 15 bp, Homo sapiens
gacagccaccgtgaa

SEQ ID NO: 574373 - DNA, 15 bp, Homo sapiens
acagccaccgtgaaa

SEQ ID NO: 574374 - DNA, 15 bp, Homo sapiens
cagccaccgtgaaaa

SEQ ID NO: 574375 - DNA, 15 bp, Homo sapiens
agccaccgtgaaaac

SEQ ID NO: 574376 - DNA, 15 bp, Homo sapiens
gccaccgtgaaaact

SEQ ID NO: 574377 - DNA, 15 bp, Homo sapiens
ccaccgtgaaaactc

SEQ ID NO: 574378 - DNA, 15 bp, Homo sapiens
caccgtgaaaactcc

SEQ ID NO: 574379 - DNA, 15 bp, Homo sapiens
accgtgaaaactccc

SEQ ID NO: 574380 - DNA, 15 bp, Homo sapiens
ccgtgaaaactccct

SEQ ID NO: 574381 - DNA, 15 bp, Homo sapiens
cgtgaaaactccctc

SEQ ID NO: 574382 - DNA, 15 bp, Homo sapiens
gtgaaaactccctca

SEQ ID NO: 574383 - DNA, 15 bp, Homo sapiens
tgaaaactccctcaa

SEQ ID NO: 574384 - DNA, 15 bp, Homo sapiens
gaaaactccctcaat

SEQ ID NO: 574385 - DNA, 15 bp, Homo sapiens
aaaactccctcaatc

SEQ ID NO: 574386 - DNA, 15 bp, Homo sapiens
aaactccctcaatcc

SEQ ID NO: 574387 - DNA, 15 bp, Homo sapiens
aactccctcaatcca

SEQ ID NO: 574388 - DNA, 15 bp, Homo sapiens
actccctcaatccat

SEQ ID NO: 574389 - DNA, 15 bp, Homo sapiens
ctccctcaatccatc

SEQ ID NO: 574390 - DNA, 15 bp, Homo sapiens
tccctcaatccatcc

SEQ ID NO: 574391 - DNA, 15 bp, Homo sapiens
ccctcaatccatcca

SEQ ID NO: 574392 - DNA, 15 bp, Homo sapiens
cctcaatccatccat

SEQ ID NO: 574393 - DNA, 15 bp, Homo sapiens
ctcaatccatccatt

SEQ ID NO: 574394 - DNA, 15 bp, Homo sapiens
tcaatccatccatta

SEQ ID NO: 574395 - DNA, 15 bp, Homo sapiens
caatccatccattag

SEQ ID NO: 574396 - DNA, 15 bp, Homo sapiens
aatccatccattaga

SEQ ID NO: 574397 - DNA, 15 bp, Homo sapiens
atccatccattagaa

SEQ ID NO: 574398 - DNA, 15 bp, Homo sapiens
tccatccattagaat

SEQ ID NO: 574399 - DNA, 15 bp, Homo sapiens
ccatccattagaatg

SEQ ID NO: 574400 - DNA, 15 bp, Homo sapiens
catccattagaatgg

SEQ ID NO: 574401 - DNA, 15 bp, Homo sapiens
atccattagaatggc

SEQ ID NO: 574402 - DNA, 15 bp, Homo sapiens
tccattagaatggcc

SEQ ID NO: 574403 - DNA, 15 bp, Homo sapiens
ccattagaatggccc

SEQ ID NO: 574404 - DNA, 15 bp, Homo sapiens
cattagaatggccct

SEQ ID NO: 574405 - DNA, 15 bp, Homo sapiens
attagaatggccctc

SEQ ID NO: 574406 - DNA, 15 bp, Homo sapiens
ttagaatggccctcc

SEQ ID NO: 574407 - DNA, 15 bp, Homo sapiens
tagaatggccctcct

SEQ ID NO: 574408 - DNA, 15 bp, Homo sapiens
agaatggccctcctg

SEQ ID NO: 574409 - DNA, 15 bp, Homo sapiens
gaatggccctcctgc

SEQ ID NO: 574410 - DNA, 15 bp, Homo sapiens
aatggccctcctgct

SEQ ID NO: 574411 - DNA, 15 bp, Homo sapiens
atggccctcctgctt

SEQ ID NO: 574412 - DNA, 15 bp, Homo sapiens
tggccctcctgcttc

SEQ ID NO: 574413 - DNA, 15 bp, Homo sapiens
ggccctcctgcttcc

SEQ ID NO: 574414 - DNA, 15 bp, Homo sapiens
gccctcctgcttcca

SEQ ID NO: 574415 - DNA, 15 bp, Homo sapiens
ccctcctgcttccac

SEQ ID NO: 574416 - DNA, 15 bp, Homo sapiens
cctcctgcttccaca

SEQ ID NO: 574417 - DNA, 15 bp, Homo sapiens
ctcctgcttccacac

SEQ ID NO: 574418 - DNA, 15 bp, Homo sapiens
tcctgcttccacacc

SEQ ID NO: 574419 - DNA, 15 bp, Homo sapiens
cctgcttccacaccc

SEQ ID NO: 574420 - DNA, 15 bp, Homo sapiens
ctgcttccacacccc

SEQ ID NO: 574421 - DNA, 15 bp, Homo sapiens
tgcttccacaccccc

SEQ ID NO: 574422 - DNA, 15 bp, Homo sapiens
gcttccacaccccca

SEQ ID NO: 574423 - DNA, 15 bp, Homo sapiens
cttccacacccccac

SEQ ID NO: 574424 - DNA, 15 bp, Homo sapiens
ttccacacccccacc

SEQ ID NO: 574425 - DNA, 15 bp, Homo sapiens
tccacacccccaccg

SEQ ID NO: 574426 - DNA, 15 bp, Homo sapiens
ccacacccccaccgc

SEQ ID NO: 574427 - DNA, 15 bp, Homo sapiens
cacacccccaccgca

SEQ ID NO: 574428 - DNA, 15 bp, Homo sapiens
acacccccaccgcat

SEQ ID NO: 574429 - DNA, 15 bp, Homo sapiens
cacccccaccgcata

SEQ ID NO: 574430 - DNA, 15 bp, Homo sapiens
acccccaccgcatac

SEQ ID NO: 574431 - DNA, 15 bp, Homo sapiens
cccccaccgcatact

SEQ ID NO: 574432 - DNA, 15 bp, Homo sapiens
ccccaccgcatactg

SEQ ID NO: 574433 - DNA, 15 bp, Homo sapiens
cccaccgcatactgt

SEQ ID NO: 574434 - DNA, 15 bp, Homo sapiens
ccaccgcatactgtt

SEQ ID NO: 574435 - DNA, 15 bp, Homo sapiens
caccgcatactgttc

SEQ ID NO: 574436 - DNA, 15 bp, Homo sapiens
accgcatactgttca

SEQ ID NO: 574437 - DNA, 15 bp, Homo sapiens
ccgcatactgttcac

SEQ ID NO: 574438 - DNA, 15 bp, Homo sapiens
cgcatactgttcact

SEQ ID NO: 574439 - DNA, 15 bp, Homo sapiens
gcatactgttcactc

SEQ ID NO: 574440 - DNA, 15 bp, Homo sapiens
catactgttcactcc

SEQ ID NO: 574441 - DNA, 15 bp, Homo sapiens
atactgttcactcct

SEQ ID NO: 574442 - DNA, 15 bp, Homo sapiens
tactgttcactcctc

SEQ ID NO: 574443 - DNA, 15 bp, Homo sapiens
actgttcactcctct

SEQ ID NO: 574444 - DNA, 15 bp, Homo sapiens
ctgttcactcctctc

SEQ ID NO: 574445 - DNA, 15 bp, Homo sapiens
tgttcactcctctct

SEQ ID NO: 574446 - DNA, 15 bp, Homo sapiens
gttcactcctctctt

SEQ ID NO: 574447 - DNA, 15 bp, Homo sapiens
ttcactcctctcttt

SEQ ID NO: 574448 - DNA, 15 bp, Homo sapiens
tcactcctctcttta

SEQ ID NO: 574449 - DNA, 15 bp, Homo sapiens
cactcctctctttag

SEQ ID NO: 574450 - DNA, 15 bp, Homo sapiens
actcctctctttagc

SEQ ID NO: 574451 - DNA, 15 bp, Homo sapiens
ctcctctctttagcc

SEQ ID NO: 574452 - DNA, 15 bp, Homo sapiens
tcctctctttagccc

SEQ ID NO: 574453 - DNA, 15 bp, Homo sapiens
cctctctttagccct

SEQ ID NO: 574454 - DNA, 15 bp, Homo sapiens
ctctctttagccctt

SEQ ID NO: 574455 - DNA, 15 bp, Homo sapiens
tctctttagcccttc

SEQ ID NO: 574456 - DNA, 15 bp, Homo sapiens
ctctttagcccttct

SEQ ID NO: 574457 - DNA, 15 bp, Homo sapiens
tctttagcccttctt

SEQ ID NO: 574458 - DNA, 15 bp, Homo sapiens
ctttagcccttcttt

SEQ ID NO: 574459 - DNA, 15 bp, Homo sapiens
tttagcccttcttta

SEQ ID NO: 574460 - DNA, 15 bp, Homo sapiens
ttagcccttctttaa

SEQ ID NO: 574461 - DNA, 15 bp, Homo sapiens
tagcccttctttaac

SEQ ID NO: 574462 - DNA, 15 bp, Homo sapiens
agcccttctttaacc

SEQ ID NO: 574463 - DNA, 15 bp, Homo sapiens
gcccttctttaaccc

SEQ ID NO: 574464 - DNA, 15 bp, Homo sapiens
cccttctttaaccct

SEQ ID NO: 574465 - DNA, 15 bp, Homo sapiens
ccttctttaaccctc

SEQ ID NO: 574466 - DNA, 15 bp, Homo sapiens
cttctttaaccctct

SEQ ID NO: 574467 - DNA, 15 bp, Homo sapiens
ttctttaaccctctc

SEQ ID NO: 574468 - DNA, 15 bp, Homo sapiens
tctttaaccctctct

SEQ ID NO: 574469 - DNA, 15 bp, Homo sapiens
ctttaaccctctctt

SEQ ID NO: 574470 - DNA, 15 bp, Homo sapiens
tttaaccctctcttt

SEQ ID NO: 574471 - DNA, 15 bp, Homo sapiens
ttaaccctctcttta

SEQ ID NO: 574472 - DNA, 15 bp, Homo sapiens
taaccctctctttag

SEQ ID NO: 574473 - DNA, 15 bp, Homo sapiens
aaccctctctttagc

SEQ ID NO: 574474 - DNA, 15 bp, Homo sapiens
accctctctttagcc

SEQ ID NO: 574475 - DNA, 15 bp, Homo sapiens
ccctctctttagccc

SEQ ID NO: 574476 - DNA, 15 bp, Homo sapiens
tctctttagcccttg

SEQ ID NO: 574477 - DNA, 15 bp, Homo sapiens
ctctttagcccttgt

SEQ ID NO: 574478 - DNA, 15 bp, Homo sapiens
tctttagcccttgtg

SEQ ID NO: 574479 - DNA, 15 bp, Homo sapiens
ctttagcccttgtgt

SEQ ID NO: 574480 - DNA, 15 bp, Homo sapiens
tttagcccttgtgtt

SEQ ID NO: 574481 - DNA, 15 bp, Homo sapiens
ttagcccttgtgtta

SEQ ID NO: 574482 - DNA, 15 bp, Homo sapiens
tagcccttgtgttag

SEQ ID NO: 574483 - DNA, 15 bp, Homo sapiens
agcccttgtgttagt

SEQ ID NO: 574484 - DNA, 15 bp, Homo sapiens
gcccttgtgttagtt

SEQ ID NO: 574485 - DNA, 15 bp, Homo sapiens
cccttgtgttagttc

SEQ ID NO: 574486 - DNA, 15 bp, Homo sapiens
ccttgtgttagttcg

SEQ ID NO: 574487 - DNA, 15 bp, Homo sapiens
cttgtgttagttcgt

SEQ ID NO: 574488 - DNA, 15 bp, Homo sapiens
ttgtgttagttcgtt

SEQ ID NO: 574489 - DNA, 15 bp, Homo sapiens
tgtgttagttcgttc

SEQ ID NO: 574490 - DNA, 15 bp, Homo sapiens
gtgttagttcgttcg

SEQ ID NO: 574491 - DNA, 15 bp, Homo sapiens
tgttagttcgttcgg

SEQ ID NO: 574492 - DNA, 15 bp, Homo sapiens
gttagttcgttcggc

SEQ ID NO: 574493 - DNA, 15 bp, Homo sapiens
ttagttcgttcggct

SEQ ID NO: 574494 - DNA, 15 bp, Homo sapiens
tagttcgttcggctc

SEQ ID NO: 574495 - DNA, 15 bp, Homo sapiens
agttcgttcggctca

SEQ ID NO: 574496 - DNA, 15 bp, Homo sapiens
gttcgttcggctcat

SEQ ID NO: 574497 - DNA, 15 bp, Homo sapiens
ttcgttcggctcatg

SEQ ID NO: 574498 - DNA, 15 bp, Homo sapiens
tcgttcggctcatgt

SEQ ID NO: 574499 - DNA, 15 bp, Homo sapiens
cgttcggctcatgtc

SEQ ID NO: 574500 - DNA, 15 bp, Homo sapiens
gttcggctcatgtct

SEQ ID NO: 574501 - DNA, 15 bp, Homo sapiens
ttcggctcatgtctc

SEQ ID NO: 574502 - DNA, 15 bp, Homo sapiens
tcggctcatgtctct

SEQ ID NO: 574503 - DNA, 15 bp, Homo sapiens
cggctcatgtctctc

SEQ ID NO: 574504 - DNA, 15 bp, Homo sapiens
ggctcatgtctctcc

SEQ ID NO: 574505 - DNA, 15 bp, Homo sapiens
gctcatgtctctcct

SEQ ID NO: 574506 - DNA, 15 bp, Homo sapiens
ctcatgtctctcctt

SEQ ID NO: 574507 - DNA, 15 bp, Homo sapiens
tcatgtctctccttt

SEQ ID NO: 574508 - DNA, 15 bp, Homo sapiens
catgtctctccttta

SEQ ID NO: 574509 - DNA, 15 bp, Homo sapiens
atgtctctcctttac

SEQ ID NO: 574510 - DNA, 15 bp, Homo sapiens
tgtctctcctttacc

SEQ ID NO: 574511 - DNA, 15 bp, Homo sapiens
gtctctcctttacct

SEQ ID NO: 574512 - DNA, 15 bp, Homo sapiens
tctctcctttacctg

SEQ ID NO: 574513 - DNA, 15 bp, Homo sapiens
ctctcctttacctgt

SEQ ID NO: 574514 - DNA, 15 bp, Homo sapiens
tctcctttacctgtg

SEQ ID NO: 574515 - DNA, 15 bp, Homo sapiens
ctcctttacctgtgg

SEQ ID NO: 574516 - DNA, 15 bp, Homo sapiens
tcctttacctgtggt

SEQ ID NO: 574517 - DNA, 15 bp, Homo sapiens
cctttacctgtggtc

SEQ ID NO: 574518 - DNA, 15 bp, Homo sapiens
ctttacctgtggtct

SEQ ID NO: 574519 - DNA, 15 bp, Homo sapiens
tttacctgtggtctg

SEQ ID NO: 574520 - DNA, 15 bp, Homo sapiens
ttacctgtggtctgt

SEQ ID NO: 574521 - DNA, 15 bp, Homo sapiens
tacctgtggtctgtg

SEQ ID NO: 574522 - DNA, 15 bp, Homo sapiens
acctgtggtctgtga

SEQ ID NO: 574523 - DNA, 15 bp, Homo sapiens
cctgtggtctgtgag

SEQ ID NO: 574524 - DNA, 15 bp, Homo sapiens
ctgtggtctgtgagc

SEQ ID NO: 574525 - DNA, 15 bp, Homo sapiens
tgtggtctgtgagct

SEQ ID NO: 574526 - DNA, 15 bp, Homo sapiens
gtggtctgtgagctc

SEQ ID NO: 574527 - DNA, 15 bp, Homo sapiens
tggtctgtgagctcc

SEQ ID NO: 574528 - DNA, 15 bp, Homo sapiens
ggtctgtgagctccc

SEQ ID NO: 574529 - DNA, 15 bp, Homo sapiens
gtctgtgagctccct

SEQ ID NO: 574530 - DNA, 15 bp, Homo sapiens
tctgtgagctccctg

SEQ ID NO: 574531 - DNA, 15 bp, Homo sapiens
ctgtgagctccctga

SEQ ID NO: 574532 - DNA, 15 bp, Homo sapiens
tgtgagctccctgag

SEQ ID NO: 574533 - DNA, 15 bp, Homo sapiens
gtgagctccctgaga

SEQ ID NO: 574534 - DNA, 15 bp, Homo sapiens
tgagctccctgagaa

SEQ ID NO: 574535 - DNA, 15 bp, Homo sapiens
gagctccctgagaat

SEQ ID NO: 574536 - DNA, 15 bp, Homo sapiens
agctccctgagaatg

SEQ ID NO: 574537 - DNA, 15 bp, Homo sapiens
gctccctgagaatga

SEQ ID NO: 574538 - DNA, 15 bp, Homo sapiens
ctccctgagaatgaa

SEQ ID NO: 574539 - DNA, 15 bp, Homo sapiens
tccctgagaatgaag

SEQ ID NO: 574540 - DNA, 15 bp, Homo sapiens
ccctgagaatgaaga

SEQ ID NO: 574541 - DNA, 15 bp, Homo sapiens
cctgagaatgaagac

SEQ ID NO: 574542 - DNA, 15 bp, Homo sapiens
ctgagaatgaagacc

SEQ ID NO: 574543 - DNA, 15 bp, Homo sapiens
tgagaatgaagacca

SEQ ID NO: 574544 - DNA, 15 bp, Homo sapiens
gagaatgaagaccaa

SEQ ID NO: 574545 - DNA, 15 bp, Homo sapiens
agaatgaagaccaag

SEQ ID NO: 574546 - DNA, 15 bp, Homo sapiens
gaatgaagaccaagt

SEQ ID NO: 574547 - DNA, 15 bp, Homo sapiens
aatgaagaccaagtt

SEQ ID NO: 574548 - DNA, 15 bp, Homo sapiens
atgaagaccaagttt

SEQ ID NO: 574549 - DNA, 15 bp, Homo sapiens
tgaagaccaagtttt

SEQ ID NO: 574550 - DNA, 15 bp, Homo sapiens
gaagaccaagttttt

SEQ ID NO: 574551 - DNA, 15 bp, Homo sapiens
aagaccaagtttttt

SEQ ID NO: 574552 - DNA, 15 bp, Homo sapiens
agaccaagttttttt

SEQ ID NO: 574553 - DNA, 15 bp, Homo sapiens
gaccaagtttttttt

SEQ ID NO: 574554 - DNA, 15 bp, Homo sapiens
accaagttttttttt

SEQ ID NO: 574555 - DNA, 15 bp, Homo sapiens
ccaagtttttttttg

SEQ ID NO: 574556 - DNA, 15 bp, Homo sapiens
caagtttttttttgt

SEQ ID NO: 574557 - DNA, 15 bp, Homo sapiens
aagtttttttttgtt

SEQ ID NO: 574558 - DNA, 15 bp, Homo sapiens
agtttttttttgttt

SEQ ID NO: 574559 - DNA, 15 bp, Homo sapiens
gtttttttttgtttg

SEQ ID NO: 574560 - DNA, 15 bp, Homo sapiens
tttttttttgtttgt

SEQ ID NO: 574561 - DNA, 15 bp, Homo sapiens
ttttttttgtttgtt

SEQ ID NO: 574562 - DNA, 15 bp, Homo sapiens
tttttttgtttgttt

SEQ ID NO: 574563 - DNA, 15 bp, Homo sapiens
ttttttgtttgtttt

SEQ ID NO: 574564 - DNA, 15 bp, Homo sapiens
tttttgtttgttttg

SEQ ID NO: 574565 - DNA, 15 bp, Homo sapiens
ttttgtttgttttgt

SEQ ID NO: 574566 - DNA, 15 bp, Homo sapiens
tttgtttgttttgtt

SEQ ID NO: 574567 - DNA, 15 bp, Homo sapiens
ttgtttgttttgttt

SEQ ID NO: 574568 - DNA, 15 bp, Homo sapiens
tgtttgttttgtttt

SEQ ID NO: 574569 - DNA, 15 bp, Homo sapiens
gtttgttttgttttt

SEQ ID NO: 574570 - DNA, 15 bp, Homo sapiens
tttgttttgtttttt

SEQ ID NO: 574571 - DNA, 15 bp, Homo sapiens
ttgttttgttttttg

SEQ ID NO: 574572 - DNA, 15 bp, Homo sapiens
tgttttgttttttga

SEQ ID NO: 574573 - DNA, 15 bp, Homo sapiens
gttttgttttttgag

SEQ ID NO: 574574 - DNA, 15 bp, Homo sapiens
ttttgttttttgaga

SEQ ID NO: 574575 - DNA, 15 bp, Homo sapiens
tttgttttttgagac

SEQ ID NO: 574576 - DNA, 15 bp, Homo sapiens
ttgttttttgagaca

SEQ ID NO: 574577 - DNA, 15 bp, Homo sapiens
tgttttttgagacaa

SEQ ID NO: 574578 - DNA, 15 bp, Homo sapiens
gttttttgagacaaa

SEQ ID NO: 574579 - DNA, 15 bp, Homo sapiens
ttttttgagacaaag

SEQ ID NO: 574580 - DNA, 15 bp, Homo sapiens
tttttgagacaaagg

SEQ ID NO: 574581 - DNA, 15 bp, Homo sapiens
ttttgagacaaaggt

SEQ ID NO: 574582 - DNA, 15 bp, Homo sapiens
tttgagacaaaggtt

SEQ ID NO: 574583 - DNA, 15 bp, Homo sapiens
ttgagacaaaggttt

SEQ ID NO: 574584 - DNA, 15 bp, Homo sapiens
tgagacaaaggtttt

SEQ ID NO: 574585 - DNA, 15 bp, Homo sapiens
gagacaaaggttttg

SEQ ID NO: 574586 - DNA, 15 bp, Homo sapiens
agacaaaggttttgt

SEQ ID NO: 574587 - DNA, 15 bp, Homo sapiens
gacaaaggttttgtt

SEQ ID NO: 574588 - DNA, 15 bp, Homo sapiens
acaaaggttttgttt

SEQ ID NO: 574589 - DNA, 15 bp, Homo sapiens
caaaggttttgtttt

SEQ ID NO: 574590 - DNA, 15 bp, Homo sapiens
aaaggttttgttttt

SEQ ID NO: 574591 - DNA, 15 bp, Homo sapiens
aaggttttgtttttt

SEQ ID NO: 574592 - DNA, 15 bp, Homo sapiens
aggttttgttttttg

SEQ ID NO: 574593 - DNA, 15 bp, Homo sapiens
ggttttgttttttga

SEQ ID NO: 574594 - DNA, 15 bp, Homo sapiens
ttgttttttgagacc

SEQ ID NO: 574595 - DNA, 15 bp, Homo sapiens
tgttttttgagaccc

SEQ ID NO: 574596 - DNA, 15 bp, Homo sapiens
gttttttgagaccca

SEQ ID NO: 574597 - DNA, 15 bp, Homo sapiens
ttttttgagacccag

SEQ ID NO: 574598 - DNA, 15 bp, Homo sapiens
tttttgagacccagg

SEQ ID NO: 574599 - DNA, 15 bp, Homo sapiens
ttttgagacccaggt

SEQ ID NO: 574600 - DNA, 15 bp, Homo sapiens
tttgagacccaggtt

SEQ ID NO: 574601 - DNA, 15 bp, Homo sapiens
ttgagacccaggttg

SEQ ID NO: 574602 - DNA, 15 bp, Homo sapiens
tgagacccaggttgg

SEQ ID NO: 574603 - DNA, 15 bp, Homo sapiens
gagacccaggttgga

SEQ ID NO: 574604 - DNA, 15 bp, Homo sapiens
agacccaggttggag

SEQ ID NO: 574605 - DNA, 15 bp, Homo sapiens
gacccaggttggagt

SEQ ID NO: 574606 - DNA, 15 bp, Homo sapiens
acccaggttggagtg

SEQ ID NO: 574607 - DNA, 15 bp, Homo sapiens
cccaggttggagtgc

SEQ ID NO: 574608 - DNA, 15 bp, Homo sapiens
ccaggttggagtgca

SEQ ID NO: 574609 - DNA, 15 bp, Homo sapiens
caggttggagtgcag

SEQ ID NO: 574610 - DNA, 15 bp, Homo sapiens
aggttggagtgcagt

SEQ ID NO: 574611 - DNA, 15 bp, Homo sapiens
ggttggagtgcagtg

SEQ ID NO: 574612 - DNA, 15 bp, Homo sapiens
gttggagtgcagtgg

SEQ ID NO: 574613 - DNA, 15 bp, Homo sapiens
ttggagtgcagtggt

SEQ ID NO: 574614 - DNA, 15 bp, Homo sapiens
tggagtgcagtggtg

SEQ ID NO: 574615 - DNA, 15 bp, Homo sapiens
ggagtgcagtggtgc

SEQ ID NO: 574616 - DNA, 15 bp, Homo sapiens
gagtgcagtggtgca

SEQ ID NO: 574617 - DNA, 15 bp, Homo sapiens
agtgcagtggtgcaa

SEQ ID NO: 574618 - DNA, 15 bp, Homo sapiens
gtgcagtggtgcaat

SEQ ID NO: 574619 - DNA, 15 bp, Homo sapiens
tgcagtggtgcaatc

SEQ ID NO: 574620 - DNA, 15 bp, Homo sapiens
gcagtggtgcaatca

SEQ ID NO: 574621 - DNA, 15 bp, Homo sapiens
cagtggtgcaatcat

SEQ ID NO: 574622 - DNA, 15 bp, Homo sapiens
agtggtgcaatcata

SEQ ID NO: 574623 - DNA, 15 bp, Homo sapiens
gtggtgcaatcatag

SEQ ID NO: 574624 - DNA, 15 bp, Homo sapiens
tggtgcaatcatagc

SEQ ID NO: 574625 - DNA, 15 bp, Homo sapiens
ggtgcaatcatagct

SEQ ID NO: 574626 - DNA, 15 bp, Homo sapiens
gtgcaatcatagctc

SEQ ID NO: 574627 - DNA, 15 bp, Homo sapiens
tgcaatcatagctca

SEQ ID NO: 574628 - DNA, 15 bp, Homo sapiens
gcaatcatagctcac

SEQ ID NO: 574629 - DNA, 15 bp, Homo sapiens
caatcatagctcact

SEQ ID NO: 574630 - DNA, 15 bp, Homo sapiens
aatcatagctcactg

SEQ ID NO: 574631 - DNA, 15 bp, Homo sapiens
atcatagctcactgc

SEQ ID NO: 574632 - DNA, 15 bp, Homo sapiens
tcatagctcactgca

SEQ ID NO: 574633 - DNA, 15 bp, Homo sapiens
catagctcactgcag

SEQ ID NO: 574634 - DNA, 15 bp, Homo sapiens
atagctcactgcagc

SEQ ID NO: 574635 - DNA, 15 bp, Homo sapiens
tagctcactgcagcc

SEQ ID NO: 574636 - DNA, 15 bp, Homo sapiens
agctcactgcagcct

SEQ ID NO: 574637 - DNA, 15 bp, Homo sapiens
gctcactgcagcctt

SEQ ID NO: 574638 - DNA, 15 bp, Homo sapiens
ctcactgcagccttg

SEQ ID NO: 574639 - DNA, 15 bp, Homo sapiens
tcactgcagccttga

SEQ ID NO: 574640 - DNA, 15 bp, Homo sapiens
cactgcagccttgac

SEQ ID NO: 574641 - DNA, 15 bp, Homo sapiens
actgcagccttgacc

SEQ ID NO: 574642 - DNA, 15 bp, Homo sapiens
ctgcagccttgacct

SEQ ID NO: 574643 - DNA, 15 bp, Homo sapiens
tgcagccttgacctc

SEQ ID NO: 574644 - DNA, 15 bp, Homo sapiens
gcagccttgacctcc

SEQ ID NO: 574645 - DNA, 15 bp, Homo sapiens
cagccttgacctcct

SEQ ID NO: 574646 - DNA, 15 bp, Homo sapiens
agccttgacctcctg

SEQ ID NO: 574647 - DNA, 15 bp, Homo sapiens
gccttgacctcctgg

SEQ ID NO: 574648 - DNA, 15 bp, Homo sapiens
ccttgacctcctggg

SEQ ID NO: 574649 - DNA, 15 bp, Homo sapiens
cttgacctcctgggc

SEQ ID NO: 574650 - DNA, 15 bp, Homo sapiens
ttgacctcctgggct

SEQ ID NO: 574651 - DNA, 15 bp, Homo sapiens
tgacctcctgggctc

SEQ ID NO: 574652 - DNA, 15 bp, Homo sapiens
gacctcctgggctca

SEQ ID NO: 574653 - DNA, 15 bp, Homo sapiens
acctcctgggctcaa

SEQ ID NO: 574654 - DNA, 15 bp, Homo sapiens
cctcctgggctcaag

SEQ ID NO: 574655 - DNA, 15 bp, Homo sapiens
ctcctgggctcaagt

SEQ ID NO: 574656 - DNA, 15 bp, Homo sapiens
tcctgggctcaagtg

SEQ ID NO: 574657 - DNA, 15 bp, Homo sapiens
cctgggctcaagtga

SEQ ID NO: 574658 - DNA, 15 bp, Homo sapiens
ctgggctcaagtgat

SEQ ID NO: 574659 - DNA, 15 bp, Homo sapiens
tgggctcaagtgatc

SEQ ID NO: 574660 - DNA, 15 bp, Homo sapiens
gggctcaagtgatcc

SEQ ID NO: 574661 - DNA, 15 bp, Homo sapiens
ggctcaagtgatcct

SEQ ID NO: 574662 - DNA, 15 bp, Homo sapiens
gctcaagtgatcctc

SEQ ID NO: 574663 - DNA, 15 bp, Homo sapiens
ctcaagtgatcctca

SEQ ID NO: 574664 - DNA, 15 bp, Homo sapiens
tcaagtgatcctcat

SEQ ID NO: 574665 - DNA, 15 bp, Homo sapiens
caagtgatcctcatg

SEQ ID NO: 574666 - DNA, 15 bp, Homo sapiens
aagtgatcctcatgc

SEQ ID NO: 574667 - DNA, 15 bp, Homo sapiens
agtgatcctcatgcc

SEQ ID NO: 574668 - DNA, 15 bp, Homo sapiens
gtgatcctcatgcct

SEQ ID NO: 574669 - DNA, 15 bp, Homo sapiens
tgatcctcatgcctt

SEQ ID NO: 574670 - DNA, 15 bp, Homo sapiens
gatcctcatgcctta

SEQ ID NO: 574671 - DNA, 15 bp, Homo sapiens
atcctcatgccttag

SEQ ID NO: 574672 - DNA, 15 bp, Homo sapiens
tcctcatgccttagc

SEQ ID NO: 574673 - DNA, 15 bp, Homo sapiens
cctcatgccttagcc

SEQ ID NO: 574674 - DNA, 15 bp, Homo sapiens
ctcatgccttagcct

SEQ ID NO: 574675 - DNA, 15 bp, Homo sapiens
tcatgccttagcctc

SEQ ID NO: 574676 - DNA, 15 bp, Homo sapiens
catgccttagcctcc

SEQ ID NO: 574677 - DNA, 15 bp, Homo sapiens
atgccttagcctcct

SEQ ID NO: 574678 - DNA, 15 bp, Homo sapiens
tgccttagcctcctg

SEQ ID NO: 574679 - DNA, 15 bp, Homo sapiens
gccttagcctcctga

SEQ ID NO: 574680 - DNA, 15 bp, Homo sapiens
ccttagcctcctgag

SEQ ID NO: 574681 - DNA, 15 bp, Homo sapiens
cttagcctcctgagt

SEQ ID NO: 574682 - DNA, 15 bp, Homo sapiens
ttagcctcctgagta

SEQ ID NO: 574683 - DNA, 15 bp, Homo sapiens
tagcctcctgagtag

SEQ ID NO: 574684 - DNA, 15 bp, Homo sapiens
agcctcctgagtagc

SEQ ID NO: 574685 - DNA, 15 bp, Homo sapiens
gcctcctgagtagct

SEQ ID NO: 574686 - DNA, 15 bp, Homo sapiens
cctcctgagtagctg

SEQ ID NO: 574687 - DNA, 15 bp, Homo sapiens
ctcctgagtagctga

SEQ ID NO: 574688 - DNA, 15 bp, Homo sapiens
tcctgagtagctgag

SEQ ID NO: 574689 - DNA, 15 bp, Homo sapiens
cctgagtagctgaga

SEQ ID NO: 574690 - DNA, 15 bp, Homo sapiens
ctgagtagctgagac

SEQ ID NO: 574691 - DNA, 15 bp, Homo sapiens
tgagtagctgagact

SEQ ID NO: 574692 - DNA, 15 bp, Homo sapiens
gagtagctgagacta

SEQ ID NO: 574693 - DNA, 15 bp, Homo sapiens
agtagctgagactac

SEQ ID NO: 574694 - DNA, 15 bp, Homo sapiens
gtagctgagactaca

SEQ ID NO: 574695 - DNA, 15 bp, Homo sapiens
tagctgagactacag

SEQ ID NO: 574696 - DNA, 15 bp, Homo sapiens
agctgagactacaga

SEQ ID NO: 574697 - DNA, 15 bp, Homo sapiens
gctgagactacagac

SEQ ID NO: 574698 - DNA, 15 bp, Homo sapiens
ctgagactacagaca

SEQ ID NO: 574699 - DNA, 15 bp, Homo sapiens
tgagactacagacat

SEQ ID NO: 574700 - DNA, 15 bp, Homo sapiens
gagactacagacatg

SEQ ID NO: 574701 - DNA, 15 bp, Homo sapiens
agactacagacatgt

SEQ ID NO: 574702 - DNA, 15 bp, Homo sapiens
gactacagacatgtg

SEQ ID NO: 574703 - DNA, 15 bp, Homo sapiens
actacagacatgtgc

SEQ ID NO: 574704 - DNA, 15 bp, Homo sapiens
ctacagacatgtgcc

SEQ ID NO: 574705 - DNA, 15 bp, Homo sapiens
tacagacatgtgcca

SEQ ID NO: 574706 - DNA, 15 bp, Homo sapiens
acagacatgtgccac

SEQ ID NO: 574707 - DNA, 15 bp, Homo sapiens
cagacatgtgccacc

SEQ ID NO: 574708 - DNA, 15 bp, Homo sapiens
agacatgtgccacca

SEQ ID NO: 574709 - DNA, 15 bp, Homo sapiens
gacatgtgccaccat

SEQ ID NO: 574710 - DNA, 15 bp, Homo sapiens
acatgtgccaccatg

SEQ ID NO: 574711 - DNA, 15 bp, Homo sapiens
catgtgccaccatgc

SEQ ID NO: 574712 - DNA, 15 bp, Homo sapiens
atgtgccaccatgcc

SEQ ID NO: 574713 - DNA, 15 bp, Homo sapiens
tgtgccaccatgcct

SEQ ID NO: 574714 - DNA, 15 bp, Homo sapiens
gtgccaccatgcctg

SEQ ID NO: 574715 - DNA, 15 bp, Homo sapiens
tgccaccatgcctgg

SEQ ID NO: 574716 - DNA, 15 bp, Homo sapiens
caccatgcctggcta

SEQ ID NO: 574717 - DNA, 15 bp, Homo sapiens
accatgcctggctaa

SEQ ID NO: 574718 - DNA, 15 bp, Homo sapiens
ccatgcctggctaat

SEQ ID NO: 574719 - DNA, 15 bp, Homo sapiens
catgcctggctaatt

SEQ ID NO: 574720 - DNA, 15 bp, Homo sapiens
atgcctggctaattt

SEQ ID NO: 574721 - DNA, 15 bp, Homo sapiens
tgcctggctaatttt

SEQ ID NO: 574722 - DNA, 15 bp, Homo sapiens
gcctggctaattttt

SEQ ID NO: 574723 - DNA, 15 bp, Homo sapiens
cctggctaatttttt

SEQ ID NO: 574724 - DNA, 15 bp, Homo sapiens
ctggctaatttttta

SEQ ID NO: 574725 - DNA, 15 bp, Homo sapiens
tggctaattttttat

SEQ ID NO: 574726 - DNA, 15 bp, Homo sapiens
ggctaattttttatt

SEQ ID NO: 574727 - DNA, 15 bp, Homo sapiens
gctaattttttattt

SEQ ID NO: 574728 - DNA, 15 bp, Homo sapiens
ctaattttttatttt

SEQ ID NO: 574729 - DNA, 15 bp, Homo sapiens
taattttttattttt

SEQ ID NO: 574730 - DNA, 15 bp, Homo sapiens
aattttttatttttt

SEQ ID NO: 574731 - DNA, 15 bp, Homo sapiens
attttttattttttg

SEQ ID NO: 574732 - DNA, 15 bp, Homo sapiens
ttttttattttttgt

SEQ ID NO: 574733 - DNA, 15 bp, Homo sapiens
tttttattttttgta

SEQ ID NO: 574734 - DNA, 15 bp, Homo sapiens
ttttattttttgtag

SEQ ID NO: 574735 - DNA, 15 bp, Homo sapiens
tttattttttgtaga

SEQ ID NO: 574736 - DNA, 15 bp, Homo sapiens
ttattttttgtagag

SEQ ID NO: 574737 - DNA, 15 bp, Homo sapiens
tattttttgtagaga

SEQ ID NO: 574738 - DNA, 15 bp, Homo sapiens
attttttgtagagat

SEQ ID NO: 574739 - DNA, 15 bp, Homo sapiens
ttttttgtagagata

SEQ ID NO: 574740 - DNA, 15 bp, Homo sapiens
tttttgtagagatag

SEQ ID NO: 574741 - DNA, 15 bp, Homo sapiens
ttttgtagagatagg

SEQ ID NO: 574742 - DNA, 15 bp, Homo sapiens
tttgtagagataggg

SEQ ID NO: 574743 - DNA, 15 bp, Homo sapiens
ttgtagagatagggt

SEQ ID NO: 574744 - DNA, 15 bp, Homo sapiens
tgtagagatagggtc

SEQ ID NO: 574745 - DNA, 15 bp, Homo sapiens
gtagagatagggtct

SEQ ID NO: 574746 - DNA, 15 bp, Homo sapiens
tagagatagggtctt

SEQ ID NO: 574747 - DNA, 15 bp, Homo sapiens
agagatagggtcttg

SEQ ID NO: 574748 - DNA, 15 bp, Homo sapiens
gagatagggtcttgc

SEQ ID NO: 574749 - DNA, 15 bp, Homo sapiens
agatagggtcttgct

SEQ ID NO: 574750 - DNA, 15 bp, Homo sapiens
gatagggtcttgcta

SEQ ID NO: 574751 - DNA, 15 bp, Homo sapiens
atagggtcttgctat

SEQ ID NO: 574752 - DNA, 15 bp, Homo sapiens
tagggtcttgctatg

SEQ ID NO: 574753 - DNA, 15 bp, Homo sapiens
agggtcttgctatgt

SEQ ID NO: 574754 - DNA, 15 bp, Homo sapiens
gggtcttgctatgtt

SEQ ID NO: 574755 - DNA, 15 bp, Homo sapiens
ggtcttgctatgttg

SEQ ID NO: 574756 - DNA, 15 bp, Homo sapiens
gtcttgctatgttgt

SEQ ID NO: 574757 - DNA, 15 bp, Homo sapiens
tcttgctatgttgtc

SEQ ID NO: 574758 - DNA, 15 bp, Homo sapiens
cttgctatgttgtcc

SEQ ID NO: 574759 - DNA, 15 bp, Homo sapiens
ttgctatgttgtcca

SEQ ID NO: 574760 - DNA, 15 bp, Homo sapiens
tgctatgttgtccag

SEQ ID NO: 574761 - DNA, 15 bp, Homo sapiens
gctatgttgtccagg

SEQ ID NO: 574762 - DNA, 15 bp, Homo sapiens
ctatgttgtccaggc

SEQ ID NO: 574763 - DNA, 15 bp, Homo sapiens
tatgttgtccaggct

SEQ ID NO: 574764 - DNA, 15 bp, Homo sapiens
atgttgtccaggctg

SEQ ID NO: 574765 - DNA, 15 bp, Homo sapiens
tgttgtccaggctgg

SEQ ID NO: 574766 - DNA, 15 bp, Homo sapiens
gttgtccaggctggt

SEQ ID NO: 574767 - DNA, 15 bp, Homo sapiens
ttgtccaggctggta

SEQ ID NO: 574768 - DNA, 15 bp, Homo sapiens
tgtccaggctggtaa

SEQ ID NO: 574769 - DNA, 15 bp, Homo sapiens
gtccaggctggtaaa

SEQ ID NO: 574770 - DNA, 15 bp, Homo sapiens
tccaggctggtaaag

SEQ ID NO: 574771 - DNA, 15 bp, Homo sapiens
ccaggctggtaaagg

SEQ ID NO: 574772 - DNA, 15 bp, Homo sapiens
caggctggtaaaggc

SEQ ID NO: 574773 - DNA, 15 bp, Homo sapiens
aggctggtaaaggcc

SEQ ID NO: 574774 - DNA, 15 bp, Homo sapiens
ggctggtaaaggcca

SEQ ID NO: 574775 - DNA, 15 bp, Homo sapiens
gctggtaaaggccaa

SEQ ID NO: 574776 - DNA, 15 bp, Homo sapiens
ctggtaaaggccaag

SEQ ID NO: 574777 - DNA, 15 bp, Homo sapiens
tggtaaaggccaagt

SEQ ID NO: 574778 - DNA, 15 bp, Homo sapiens
ggtaaaggccaagtt

SEQ ID NO: 574779 - DNA, 15 bp, Homo sapiens
gtaaaggccaagttt

SEQ ID NO: 574780 - DNA, 15 bp, Homo sapiens
taaaggccaagtttc

SEQ ID NO: 574781 - DNA, 15 bp, Homo sapiens
aaaggccaagtttca

SEQ ID NO: 574782 - DNA, 15 bp, Homo sapiens
aaggccaagtttcat

SEQ ID NO: 574783 - DNA, 15 bp, Homo sapiens
aggccaagtttcatt

SEQ ID NO: 574784 - DNA, 15 bp, Homo sapiens
ggccaagtttcattc

SEQ ID NO: 574785 - DNA, 15 bp, Homo sapiens
gccaagtttcattca

SEQ ID NO: 574786 - DNA, 15 bp, Homo sapiens
ccaagtttcattcat

SEQ ID NO: 574787 - DNA, 15 bp, Homo sapiens
caagtttcattcatc

SEQ ID NO: 574788 - DNA, 15 bp, Homo sapiens
aagtttcattcatct

SEQ ID NO: 574789 - DNA, 15 bp, Homo sapiens
agtttcattcatctt

SEQ ID NO: 574790 - DNA, 15 bp, Homo sapiens
gtttcattcatcttt

SEQ ID NO: 574791 - DNA, 15 bp, Homo sapiens
tttcattcatctttg

SEQ ID NO: 574792 - DNA, 15 bp, Homo sapiens
ttcattcatctttgt

SEQ ID NO: 574793 - DNA, 15 bp, Homo sapiens
tcattcatctttgta

SEQ ID NO: 574794 - DNA, 15 bp, Homo sapiens
cattcatctttgtac

SEQ ID NO: 574795 - DNA, 15 bp, Homo sapiens
attcatctttgtact

SEQ ID NO: 574796 - DNA, 15 bp, Homo sapiens
ttcatctttgtactc

SEQ ID NO: 574797 - DNA, 15 bp, Homo sapiens
tcatctttgtactca

SEQ ID NO: 574798 - DNA, 15 bp, Homo sapiens
catctttgtactcaa

SEQ ID NO: 574799 - DNA, 15 bp, Homo sapiens
atctttgtactcaat

SEQ ID NO: 574800 - DNA, 15 bp, Homo sapiens
tctttgtactcaatt

SEQ ID NO: 574801 - DNA, 15 bp, Homo sapiens
ctttgtactcaattc

SEQ ID NO: 574802 - DNA, 15 bp, Homo sapiens
tttgtactcaattca

SEQ ID NO: 574803 - DNA, 15 bp, Homo sapiens
ttgtactcaattcaa

SEQ ID NO: 574804 - DNA, 15 bp, Homo sapiens
tgtactcaattcaac

SEQ ID NO: 574805 - DNA, 15 bp, Homo sapiens
gtactcaattcaacc

SEQ ID NO: 574806 - DNA, 15 bp, Homo sapiens
tactcaattcaacca

SEQ ID NO: 574807 - DNA, 15 bp, Homo sapiens
actcaattcaaccag

SEQ ID NO: 574808 - DNA, 15 bp, Homo sapiens
ctcaattcaaccagc

SEQ ID NO: 574809 - DNA, 15 bp, Homo sapiens
tcaattcaaccagca

SEQ ID NO: 574810 - DNA, 15 bp, Homo sapiens
caattcaaccagcat

SEQ ID NO: 574811 - DNA, 15 bp, Homo sapiens
aattcaaccagcatt

SEQ ID NO: 574812 - DNA, 15 bp, Homo sapiens
attcaaccagcattt

SEQ ID NO: 574813 - DNA, 15 bp, Homo sapiens
ttcaaccagcattta

SEQ ID NO: 574814 - DNA, 15 bp, Homo sapiens
tcaaccagcatttac

SEQ ID NO: 574815 - DNA, 15 bp, Homo sapiens
caaccagcatttact

SEQ ID NO: 574816 - DNA, 15 bp, Homo sapiens
aaccagcatttactg

SEQ ID NO: 574817 - DNA, 15 bp, Homo sapiens
accagcatttactga

SEQ ID NO: 574818 - DNA, 15 bp, Homo sapiens
ccagcatttactgaa

SEQ ID NO: 574819 - DNA, 15 bp, Homo sapiens
cagcatttactgaac

SEQ ID NO: 574820 - DNA, 15 bp, Homo sapiens
agcatttactgaaca

SEQ ID NO: 574821 - DNA, 15 bp, Homo sapiens
gcatttactgaacaa

SEQ ID NO: 574822 - DNA, 15 bp, Homo sapiens
catttactgaacaat

SEQ ID NO: 574823 - DNA, 15 bp, Homo sapiens
atttactgaacaatc

SEQ ID NO: 574824 - DNA, 15 bp, Homo sapiens
tttactgaacaatca

SEQ ID NO: 574825 - DNA, 15 bp, Homo sapiens
ttactgaacaatcac

SEQ ID NO: 574826 - DNA, 15 bp, Homo sapiens
tactgaacaatcact

SEQ ID NO: 574827 - DNA, 15 bp, Homo sapiens
actgaacaatcactc

SEQ ID NO: 574828 - DNA, 15 bp, Homo sapiens
ctgaacaatcactcc

SEQ ID NO: 574829 - DNA, 15 bp, Homo sapiens
tgaacaatcactcca

SEQ ID NO: 574830 - DNA, 15 bp, Homo sapiens
gaacaatcactccag

SEQ ID NO: 574831 - DNA, 15 bp, Homo sapiens
aacaatcactccagc

SEQ ID NO: 574832 - DNA, 15 bp, Homo sapiens
acaatcactccagcc

SEQ ID NO: 574833 - DNA, 15 bp, Homo sapiens
caatcactccagccc

SEQ ID NO: 574834 - DNA, 15 bp, Homo sapiens
aatcactccagccca

SEQ ID NO: 574835 - DNA, 15 bp, Homo sapiens
atcactccagcccaa

SEQ ID NO: 574836 - DNA, 15 bp, Homo sapiens
tcactccagcccaaa

SEQ ID NO: 574837 - DNA, 15 bp, Homo sapiens
cactccagcccaaac

SEQ ID NO: 574838 - DNA, 15 bp, Homo sapiens
actccagcccaaaca

SEQ ID NO: 574839 - DNA, 15 bp, Homo sapiens
ctccagcccaaacag

SEQ ID NO: 574840 - DNA, 15 bp, Homo sapiens
tccagcccaaacagt

SEQ ID NO: 574841 - DNA, 15 bp, Homo sapiens
ccagcccaaacagta

SEQ ID NO: 574842 - DNA, 15 bp, Homo sapiens
cagcccaaacagtag

SEQ ID NO: 574843 - DNA, 15 bp, Homo sapiens
agcccaaacagtagt

SEQ ID NO: 574844 - DNA, 15 bp, Homo sapiens
gcccaaacagtagtg

SEQ ID NO: 574845 - DNA, 15 bp, Homo sapiens
cccaaacagtagtgc

SEQ ID NO: 574846 - DNA, 15 bp, Homo sapiens
ccaaacagtagtgct

SEQ ID NO: 574847 - DNA, 15 bp, Homo sapiens
caaacagtagtgcta

SEQ ID NO: 574848 - DNA, 15 bp, Homo sapiens
aaacagtagtgctac

SEQ ID NO: 574849 - DNA, 15 bp, Homo sapiens
aacagtagtgctaca

SEQ ID NO: 574850 - DNA, 15 bp, Homo sapiens
acagtagtgctacaa

SEQ ID NO: 574851 - DNA, 15 bp, Homo sapiens
cagtagtgctacaat

SEQ ID NO: 574852 - DNA, 15 bp, Homo sapiens
agtagtgctacaatc

SEQ ID NO: 574853 - DNA, 15 bp, Homo sapiens
gtagtgctacaatca

SEQ ID NO: 574854 - DNA, 15 bp, Homo sapiens
tagtgctacaatcat

SEQ ID NO: 574855 - DNA, 15 bp, Homo sapiens
agtgctacaatcatg

SEQ ID NO: 574856 - DNA, 15 bp, Homo sapiens
gtgctacaatcatga

SEQ ID NO: 574857 - DNA, 15 bp, Homo sapiens
tgctacaatcatgac

SEQ ID NO: 574858 - DNA, 15 bp, Homo sapiens
gctacaatcatgact

SEQ ID NO: 574859 - DNA, 15 bp, Homo sapiens
ctacaatcatgacta

SEQ ID NO: 574860 - DNA, 15 bp, Homo sapiens
tacaatcatgactaa

SEQ ID NO: 574861 - DNA, 15 bp, Homo sapiens
acaatcatgactaag

SEQ ID NO: 574862 - DNA, 15 bp, Homo sapiens
caatcatgactaaga

SEQ ID NO: 574863 - DNA, 15 bp, Homo sapiens
aatcatgactaagaa

SEQ ID NO: 574864 - DNA, 15 bp, Homo sapiens
atcatgactaagaag

SEQ ID NO: 574865 - DNA, 15 bp, Homo sapiens
tcatgactaagaaga

SEQ ID NO: 574866 - DNA, 15 bp, Homo sapiens
catgactaagaagac

SEQ ID NO: 574867 - DNA, 15 bp, Homo sapiens
atgactaagaagacc

SEQ ID NO: 574868 - DNA, 15 bp, Homo sapiens
tgactaagaagaccc

SEQ ID NO: 574869 - DNA, 15 bp, Homo sapiens
gactaagaagacccc

SEQ ID NO: 574870 - DNA, 15 bp, Homo sapiens
actaagaagacccct

SEQ ID NO: 574871 - DNA, 15 bp, Homo sapiens
ctaagaagacccctc

SEQ ID NO: 574872 - DNA, 15 bp, Homo sapiens
taagaagacccctct

SEQ ID NO: 574873 - DNA, 15 bp, Homo sapiens
aagaagacccctctg

SEQ ID NO: 574874 - DNA, 15 bp, Homo sapiens
agaagacccctctgc

SEQ ID NO: 574875 - DNA, 15 bp, Homo sapiens
gaagacccctctgct

SEQ ID NO: 574876 - DNA, 15 bp, Homo sapiens
aagacccctctgctt

SEQ ID NO: 574877 - DNA, 15 bp, Homo sapiens
agacccctctgcttg

SEQ ID NO: 574878 - DNA, 15 bp, Homo sapiens
gacccctctgcttgc

SEQ ID NO: 574879 - DNA, 15 bp, Homo sapiens
acccctctgcttgca

SEQ ID NO: 574880 - DNA, 15 bp, Homo sapiens
cccctctgcttgcaa

SEQ ID NO: 574881 - DNA, 15 bp, Homo sapiens
ccctctgcttgcaaa

SEQ ID NO: 574882 - DNA, 15 bp, Homo sapiens
cctctgcttgcaaag

SEQ ID NO: 574883 - DNA, 15 bp, Homo sapiens
ctctgcttgcaaaga

SEQ ID NO: 574884 - DNA, 15 bp, Homo sapiens
tctgcttgcaaagaa

SEQ ID NO: 574885 - DNA, 15 bp, Homo sapiens
ctgcttgcaaagaac

SEQ ID NO: 574886 - DNA, 15 bp, Homo sapiens
tgcttgcaaagaact

SEQ ID NO: 574887 - DNA, 15 bp, Homo sapiens
gcttgcaaagaacta

SEQ ID NO: 574888 - DNA, 15 bp, Homo sapiens
cttgcaaagaactat

SEQ ID NO: 574889 - DNA, 15 bp, Homo sapiens
ttgcaaagaactatc

SEQ ID NO: 574890 - DNA, 15 bp, Homo sapiens
tgcaaagaactatct

SEQ ID NO: 574891 - DNA, 15 bp, Homo sapiens
gcaaagaactatctg

SEQ ID NO: 574892 - DNA, 15 bp, Homo sapiens
caaagaactatctgg

SEQ ID NO: 574893 - DNA, 15 bp, Homo sapiens
aaagaactatctggg

SEQ ID NO: 574894 - DNA, 15 bp, Homo sapiens
aagaactatctgggc

SEQ ID NO: 574895 - DNA, 15 bp, Homo sapiens
agaactatctgggcg

SEQ ID NO: 574896 - DNA, 15 bp, Homo sapiens
gaactatctgggcga

SEQ ID NO: 574897 - DNA, 15 bp, Homo sapiens
aactatctgggcgaa

SEQ ID NO: 574898 - DNA, 15 bp, Homo sapiens
actatctgggcgaag

SEQ ID NO: 574899 - DNA, 15 bp, Homo sapiens
ctatctgggcgaagc

SEQ ID NO: 574900 - DNA, 15 bp, Homo sapiens
tatctgggcgaagcc

SEQ ID NO: 574901 - DNA, 15 bp, Homo sapiens
atctgggcgaagcca

SEQ ID NO: 574902 - DNA, 15 bp, Homo sapiens
tctgggcgaagccag

SEQ ID NO: 574903 - DNA, 15 bp, Homo sapiens
ctgggcgaagccagg

SEQ ID NO: 574904 - DNA, 15 bp, Homo sapiens
tgggcgaagccaggc

SEQ ID NO: 574905 - DNA, 15 bp, Homo sapiens
gggcgaagccaggcc

SEQ ID NO: 574906 - DNA, 15 bp, Homo sapiens
ggcgaagccaggccc

SEQ ID NO: 574907 - DNA, 15 bp, Homo sapiens
gcgaagccaggccca

SEQ ID NO: 574908 - DNA, 15 bp, Homo sapiens
cgaagccaggcccaa

SEQ ID NO: 574909 - DNA, 15 bp, Homo sapiens
gaagccaggcccaaa

SEQ ID NO: 574910 - DNA, 15 bp, Homo sapiens
aagccaggcccaaac

SEQ ID NO: 574911 - DNA, 15 bp, Homo sapiens
agccaggcccaaact

SEQ ID NO: 574912 - DNA, 15 bp, Homo sapiens
gccaggcccaaactt

SEQ ID NO: 574913 - DNA, 15 bp, Homo sapiens
ccaggcccaaacttt

SEQ ID NO: 574914 - DNA, 15 bp, Homo sapiens
caggcccaaactttt

SEQ ID NO: 574915 - DNA, 15 bp, Homo sapiens
aggcccaaacttttc

SEQ ID NO: 574916 - DNA, 15 bp, Homo sapiens
ggcccaaacttttct

SEQ ID NO: 574917 - DNA, 15 bp, Homo sapiens
gcccaaacttttctt

SEQ ID NO: 574918 - DNA, 15 bp, Homo sapiens
cccaaacttttcttt

SEQ ID NO: 574919 - DNA, 15 bp, Homo sapiens
ccaaacttttctttt

SEQ ID NO: 574920 - DNA, 15 bp, Homo sapiens
caaacttttcttttt

SEQ ID NO: 574921 - DNA, 15 bp, Homo sapiens
aaacttttctttttt

SEQ ID NO: 574922 - DNA, 15 bp, Homo sapiens
aacttttcttttttc

SEQ ID NO: 574923 - DNA, 15 bp, Homo sapiens
acttttcttttttct

SEQ ID NO: 574924 - DNA, 15 bp, Homo sapiens
cttttcttttttctt

SEQ ID NO: 574925 - DNA, 15 bp, Homo sapiens
ttttcttttttcttt

SEQ ID NO: 574926 - DNA, 15 bp, Homo sapiens
tttcttttttctttt

SEQ ID NO: 574927 - DNA, 15 bp, Homo sapiens
ttcttttttcttttc

SEQ ID NO: 574928 - DNA, 15 bp, Homo sapiens
tcttttttcttttcg

SEQ ID NO: 574929 - DNA, 15 bp, Homo sapiens
cttttttcttttcgt

SEQ ID NO: 574930 - DNA, 15 bp, Homo sapiens
ttttttcttttcgtt

SEQ ID NO: 574931 - DNA, 15 bp, Homo sapiens
tttttcttttcgttt

SEQ ID NO: 574932 - DNA, 15 bp, Homo sapiens
ttttcttttcgttta

SEQ ID NO: 574933 - DNA, 15 bp, Homo sapiens
tttcttttcgtttac

SEQ ID NO: 574934 - DNA, 15 bp, Homo sapiens
ttcttttcgtttact

SEQ ID NO: 574935 - DNA, 15 bp, Homo sapiens
tcttttcgtttactc

SEQ ID NO: 574936 - DNA, 15 bp, Homo sapiens
cttttcgtttactct

SEQ ID NO: 574937 - DNA, 15 bp, Homo sapiens
ttttcgtttactctt

SEQ ID NO: 574938 - DNA, 15 bp, Homo sapiens
tttcgtttactcttc

SEQ ID NO: 574939 - DNA, 15 bp, Homo sapiens
ttcgtttactcttct

SEQ ID NO: 574940 - DNA, 15 bp, Homo sapiens
tcgtttactcttctt

SEQ ID NO: 574941 - DNA, 15 bp, Homo sapiens
cgtttactcttcttt

SEQ ID NO: 574942 - DNA, 15 bp, Homo sapiens
gtttactcttctttt

SEQ ID NO: 574943 - DNA, 15 bp, Homo sapiens
tttactcttcttttt

SEQ ID NO: 574944 - DNA, 15 bp, Homo sapiens
ttactcttctttttt

SEQ ID NO: 574945 - DNA, 15 bp, Homo sapiens
tactcttcttttttc

SEQ ID NO: 574946 - DNA, 15 bp, Homo sapiens
actcttcttttttct

SEQ ID NO: 574947 - DNA, 15 bp, Homo sapiens
ctcttcttttttctt

SEQ ID NO: 574948 - DNA, 15 bp, Homo sapiens
tcttcttttttcttt

SEQ ID NO: 574949 - DNA, 15 bp, Homo sapiens
cttcttttttctttt

SEQ ID NO: 574950 - DNA, 15 bp, Homo sapiens
ttcttttttcttttt

SEQ ID NO: 574951 - DNA, 15 bp, Homo sapiens
tcttttttctttttc

SEQ ID NO: 574952 - DNA, 15 bp, Homo sapiens
cttttttctttttca

SEQ ID NO: 574953 - DNA, 15 bp, Homo sapiens
ttttttctttttcat

SEQ ID NO: 574954 - DNA, 15 bp, Homo sapiens
tttttctttttcatt

SEQ ID NO: 574955 - DNA, 15 bp, Homo sapiens
ttttctttttcattt

SEQ ID NO: 574956 - DNA, 15 bp, Homo sapiens
tttctttttcatttt

SEQ ID NO: 574957 - DNA, 15 bp, Homo sapiens
ttctttttcattttc

SEQ ID NO: 574958 - DNA, 15 bp, Homo sapiens
tctttttcattttct

SEQ ID NO: 574959 - DNA, 15 bp, Homo sapiens
ctttttcattttctt

SEQ ID NO: 574960 - DNA, 15 bp, Homo sapiens
tttttcattttcttg

SEQ ID NO: 574961 - DNA, 15 bp, Homo sapiens
ttttcattttcttgg

SEQ ID NO: 574962 - DNA, 15 bp, Homo sapiens
tttcattttcttggg

SEQ ID NO: 574963 - DNA, 15 bp, Homo sapiens
ttcattttcttgggc

SEQ ID NO: 574964 - DNA, 15 bp, Homo sapiens
tcattttcttgggct

SEQ ID NO: 574965 - DNA, 15 bp, Homo sapiens
cattttcttgggctg

SEQ ID NO: 574966 - DNA, 15 bp, Homo sapiens
attttcttgggctga

SEQ ID NO: 574967 - DNA, 15 bp, Homo sapiens
ttttcttgggctgaa

SEQ ID NO: 574968 - DNA, 15 bp, Homo sapiens
tttcttgggctgaac

SEQ ID NO: 574969 - DNA, 15 bp, Homo sapiens
ttcttgggctgaact

SEQ ID NO: 574970 - DNA, 15 bp, Homo sapiens
tcttgggctgaactt

SEQ ID NO: 574971 - DNA, 15 bp, Homo sapiens
cttgggctgaactta

SEQ ID NO: 574972 - DNA, 15 bp, Homo sapiens
ttgggctgaacttaa

SEQ ID NO: 574973 - DNA, 15 bp, Homo sapiens
tgggctgaacttaaa

SEQ ID NO: 574974 - DNA, 15 bp, Homo sapiens
gggctgaacttaaac

SEQ ID NO: 574975 - DNA, 15 bp, Homo sapiens
ggctgaacttaaact

SEQ ID NO: 574976 - DNA, 15 bp, Homo sapiens
gctgaacttaaacta

SEQ ID NO: 574977 - DNA, 15 bp, Homo sapiens
ctgaacttaaactat

SEQ ID NO: 574978 - DNA, 15 bp, Homo sapiens
tgaacttaaactata

SEQ ID NO: 574979 - DNA, 15 bp, Homo sapiens
gaacttaaactataa

SEQ ID NO: 574980 - DNA, 15 bp, Homo sapiens
aacttaaactataat

SEQ ID NO: 574981 - DNA, 15 bp, Homo sapiens
acttaaactataatc

SEQ ID NO: 574982 - DNA, 15 bp, Homo sapiens
cttaaactataatcc

SEQ ID NO: 574983 - DNA, 15 bp, Homo sapiens
ttaaactataatcca

SEQ ID NO: 574984 - DNA, 15 bp, Homo sapiens
taaactataatccag

SEQ ID NO: 574985 - DNA, 15 bp, Homo sapiens
aaactataatccagt

SEQ ID NO: 574986 - DNA, 15 bp, Homo sapiens
aactataatccagtg

SEQ ID NO: 574987 - DNA, 15 bp, Homo sapiens
actataatccagtgt

SEQ ID NO: 574988 - DNA, 15 bp, Homo sapiens
ctataatccagtgtg

SEQ ID NO: 574989 - DNA, 15 bp, Homo sapiens
tataatccagtgtga

SEQ ID NO: 574990 - DNA, 15 bp, Homo sapiens
ataatccagtgtgat

SEQ ID NO: 574991 - DNA, 15 bp, Homo sapiens
taatccagtgtgatg

SEQ ID NO: 574992 - DNA, 15 bp, Homo sapiens
aatccagtgtgatga

SEQ ID NO: 574993 - DNA, 15 bp, Homo sapiens
atccagtgtgatgag

SEQ ID NO: 574994 - DNA, 15 bp, Homo sapiens
tccagtgtgatgagt

SEQ ID NO: 574995 - DNA, 15 bp, Homo sapiens
ccagtgtgatgagtg

SEQ ID NO: 574996 - DNA, 15 bp, Homo sapiens
cagtgtgatgagtgc

SEQ ID NO: 574997 - DNA, 15 bp, Homo sapiens
agtgtgatgagtgct

SEQ ID NO: 574998 - DNA, 15 bp, Homo sapiens
gtgtgatgagtgcta

SEQ ID NO: 574999 - DNA, 15 bp, Homo sapiens
tgtgatgagtgctat

SEQ ID NO: 575000 - DNA, 15 bp, Homo sapiens
gtgatgagtgctatg

SEQ ID NO: 575001 - DNA, 15 bp, Homo sapiens
tgatgagtgctatga

SEQ ID NO: 575002 - DNA, 15 bp, Homo sapiens
gatgagtgctatgat

SEQ ID NO: 575003 - DNA, 15 bp, Homo sapiens
atgagtgctatgata

SEQ ID NO: 575004 - DNA, 15 bp, Homo sapiens
tgagtgctatgatag

SEQ ID NO: 575005 - DNA, 15 bp, Homo sapiens
gagtgctatgatagt

SEQ ID NO: 575006 - DNA, 15 bp, Homo sapiens
agtgctatgatagta

SEQ ID NO: 575007 - DNA, 15 bp, Homo sapiens
gtgctatgatagtac

SEQ ID NO: 575008 - DNA, 15 bp, Homo sapiens
tgctatgatagtacc

SEQ ID NO: 575009 - DNA, 15 bp, Homo sapiens
gctatgatagtacca

SEQ ID NO: 575010 - DNA, 15 bp, Homo sapiens
ctatgatagtaccat

SEQ ID NO: 575011 - DNA, 15 bp, Homo sapiens
tatgatagtaccatg

SEQ ID NO: 575012 - DNA, 15 bp, Homo sapiens
atgatagtaccatgt

SEQ ID NO: 575013 - DNA, 15 bp, Homo sapiens
tgatagtaccatgta

SEQ ID NO: 575014 - DNA, 15 bp, Homo sapiens
gatagtaccatgtag

SEQ ID NO: 575015 - DNA, 15 bp, Homo sapiens
atagtaccatgtagg

SEQ ID NO: 575016 - DNA, 15 bp, Homo sapiens
tagtaccatgtagga

SEQ ID NO: 575017 - DNA, 15 bp, Homo sapiens
agtaccatgtaggag

SEQ ID NO: 575018 - DNA, 15 bp, Homo sapiens
gtaccatgtaggaga

SEQ ID NO: 575019 - DNA, 15 bp, Homo sapiens
taccatgtaggagag

SEQ ID NO: 575020 - DNA, 15 bp, Homo sapiens
accatgtaggagagc

SEQ ID NO: 575021 - DNA, 15 bp, Homo sapiens
ccatgtaggagagca

SEQ ID NO: 575022 - DNA, 15 bp, Homo sapiens
catgtaggagagcag

SEQ ID NO: 575023 - DNA, 15 bp, Homo sapiens
atgtaggagagcaga

SEQ ID NO: 575024 - DNA, 15 bp, Homo sapiens
tgtaggagagcagag

SEQ ID NO: 575025 - DNA, 15 bp, Homo sapiens
gtaggagagcagagg

SEQ ID NO: 575026 - DNA, 15 bp, Homo sapiens
taggagagcagagga

SEQ ID NO: 575027 - DNA, 15 bp, Homo sapiens
aggagagcagaggag

SEQ ID NO: 575028 - DNA, 15 bp, Homo sapiens
ggagagcagaggaga

SEQ ID NO: 575029 - DNA, 15 bp, Homo sapiens
gagagcagaggagag

SEQ ID NO: 575030 - DNA, 15 bp, Homo sapiens
agagcagaggagagg

SEQ ID NO: 575031 - DNA, 15 bp, Homo sapiens
gagcagaggagaggg

SEQ ID NO: 575032 - DNA, 15 bp, Homo sapiens
agcagaggagaggga

SEQ ID NO: 575033 - DNA, 15 bp, Homo sapiens
gcagaggagagggaa

SEQ ID NO: 575034 - DNA, 15 bp, Homo sapiens
cagaggagagggaat

SEQ ID NO: 575035 - DNA, 15 bp, Homo sapiens
agaggagagggaata

SEQ ID NO: 575036 - DNA, 15 bp, Homo sapiens
gaggagagggaataa

SEQ ID NO: 575037 - DNA, 15 bp, Homo sapiens
aggagagggaataac

SEQ ID NO: 575038 - DNA, 15 bp, Homo sapiens
ggagagggaataact

SEQ ID NO: 575039 - DNA, 15 bp, Homo sapiens
gagagggaataactg

SEQ ID NO: 575040 - DNA, 15 bp, Homo sapiens
agagggaataactgt

SEQ ID NO: 575041 - DNA, 15 bp, Homo sapiens
gagggaataactgtg

SEQ ID NO: 575042 - DNA, 15 bp, Homo sapiens
agggaataactgtgg

SEQ ID NO: 575043 - DNA, 15 bp, Homo sapiens
gggaataactgtggg

SEQ ID NO: 575044 - DNA, 15 bp, Homo sapiens
ggaataactgtgggt

SEQ ID NO: 575045 - DNA, 15 bp, Homo sapiens
gaataactgtgggtt

SEQ ID NO: 575046 - DNA, 15 bp, Homo sapiens
aataactgtgggtta

SEQ ID NO: 575047 - DNA, 15 bp, Homo sapiens
ataactgtgggttag

SEQ ID NO: 575048 - DNA, 15 bp, Homo sapiens
taactgtgggttaga

SEQ ID NO: 575049 - DNA, 15 bp, Homo sapiens
aactgtgggttagaa

SEQ ID NO: 575050 - DNA, 15 bp, Homo sapiens
actgtgggttagaaa

SEQ ID NO: 575051 - DNA, 15 bp, Homo sapiens
ctgtgggttagaaat

SEQ ID NO: 575052 - DNA, 15 bp, Homo sapiens
tgtgggttagaaatc

SEQ ID NO: 575053 - DNA, 15 bp, Homo sapiens
gtgggttagaaatca

SEQ ID NO: 575054 - DNA, 15 bp, Homo sapiens
tgggttagaaatcag

SEQ ID NO: 575055 - DNA, 15 bp, Homo sapiens
gggttagaaatcagg

SEQ ID NO: 575056 - DNA, 15 bp, Homo sapiens
ggttagaaatcagga

SEQ ID NO: 575057 - DNA, 15 bp, Homo sapiens
gttagaaatcaggaa

SEQ ID NO: 575058 - DNA, 15 bp, Homo sapiens
ttagaaatcaggaaa

SEQ ID NO: 575059 - DNA, 15 bp, Homo sapiens
tagaaatcaggaaaa

SEQ ID NO: 575060 - DNA, 15 bp, Homo sapiens
agaaatcaggaaaaa

SEQ ID NO: 575061 - DNA, 15 bp, Homo sapiens
gaaatcaggaaaaac

SEQ ID NO: 575062 - DNA, 15 bp, Homo sapiens
aaatcaggaaaaaca

SEQ ID NO: 575063 - DNA, 15 bp, Homo sapiens
aatcaggaaaaacac

SEQ ID NO: 575064 - DNA, 15 bp, Homo sapiens
atcaggaaaaacaca

SEQ ID NO: 575065 - DNA, 15 bp, Homo sapiens
tcaggaaaaacacag

SEQ ID NO: 575066 - DNA, 15 bp, Homo sapiens
caggaaaaacacaga

SEQ ID NO: 575067 - DNA, 15 bp, Homo sapiens
aggaaaaacacagag

SEQ ID NO: 575068 - DNA, 15 bp, Homo sapiens
ggaaaaacacagaga

SEQ ID NO: 575069 - DNA, 15 bp, Homo sapiens
gaaaaacacagagag

SEQ ID NO: 575070 - DNA, 15 bp, Homo sapiens
aaaaacacagagagg

SEQ ID NO: 575071 - DNA, 15 bp, Homo sapiens
aaaacacagagagga

SEQ ID NO: 575072 - DNA, 15 bp, Homo sapiens
aaacacagagaggag

SEQ ID NO: 575073 - DNA, 15 bp, Homo sapiens
aacacagagaggaga

SEQ ID NO: 575074 - DNA, 15 bp, Homo sapiens
acacagagaggagat

SEQ ID NO: 575075 - DNA, 15 bp, Homo sapiens
cacagagaggagata

SEQ ID NO: 575076 - DNA, 15 bp, Homo sapiens
acagagaggagataa

SEQ ID NO: 575077 - DNA, 15 bp, Homo sapiens
cagagaggagataac

SEQ ID NO: 575078 - DNA, 15 bp, Homo sapiens
agagaggagataaca

SEQ ID NO: 575079 - DNA, 15 bp, Homo sapiens
gagaggagataacat

SEQ ID NO: 575080 - DNA, 15 bp, Homo sapiens
agaggagataacatg

SEQ ID NO: 575081 - DNA, 15 bp, Homo sapiens
gaggagataacatgg

SEQ ID NO: 575082 - DNA, 15 bp, Homo sapiens
aggagataacatggg

SEQ ID NO: 575083 - DNA, 15 bp, Homo sapiens
ggagataacatggga

SEQ ID NO: 575084 - DNA, 15 bp, Homo sapiens
gagataacatgggaa

SEQ ID NO: 575085 - DNA, 15 bp, Homo sapiens
agataacatgggaat

SEQ ID NO: 575086 - DNA, 15 bp, Homo sapiens
gataacatgggaatt

SEQ ID NO: 575087 - DNA, 15 bp, Homo sapiens
ataacatgggaattg

SEQ ID NO: 575088 - DNA, 15 bp, Homo sapiens
taacatgggaattga

SEQ ID NO: 575089 - DNA, 15 bp, Homo sapiens
aacatgggaattgag

SEQ ID NO: 575090 - DNA, 15 bp, Homo sapiens
acatgggaattgagc

SEQ ID NO: 575091 - DNA, 15 bp, Homo sapiens
catgggaattgagct

SEQ ID NO: 575092 - DNA, 15 bp, Homo sapiens
atgggaattgagctt

SEQ ID NO: 575093 - DNA, 15 bp, Homo sapiens
tgggaattgagcttt

SEQ ID NO: 575094 - DNA, 15 bp, Homo sapiens
gggaattgagctttg

SEQ ID NO: 575095 - DNA, 15 bp, Homo sapiens
ggaattgagctttga

SEQ ID NO: 575096 - DNA, 15 bp, Homo sapiens
gaattgagctttgaa

SEQ ID NO: 575097 - DNA, 15 bp, Homo sapiens
aattgagctttgaag

SEQ ID NO: 575098 - DNA, 15 bp, Homo sapiens
attgagctttgaagg

SEQ ID NO: 575099 - DNA, 15 bp, Homo sapiens
ttgagctttgaagga

SEQ ID NO: 575100 - DNA, 15 bp, Homo sapiens
tgagctttgaaggat

SEQ ID NO: 575101 - DNA, 15 bp, Homo sapiens
gagctttgaaggata

SEQ ID NO: 575102 - DNA, 15 bp, Homo sapiens
agctttgaaggataa

SEQ ID NO: 575103 - DNA, 15 bp, Homo sapiens
gctttgaaggataaa

SEQ ID NO: 575104 - DNA, 15 bp, Homo sapiens
ctttgaaggataaat

SEQ ID NO: 575105 - DNA, 15 bp, Homo sapiens
tttgaaggataaata

SEQ ID NO: 575106 - DNA, 15 bp, Homo sapiens
ttgaaggataaatag

SEQ ID NO: 575107 - DNA, 15 bp, Homo sapiens
tgaaggataaatagg

SEQ ID NO: 575108 - DNA, 15 bp, Homo sapiens
gaaggataaatagga

SEQ ID NO: 575109 - DNA, 15 bp, Homo sapiens
aaggataaataggag

SEQ ID NO: 575110 - DNA, 15 bp, Homo sapiens
aggataaataggagt

SEQ ID NO: 575111 - DNA, 15 bp, Homo sapiens
ggataaataggagtt

SEQ ID NO: 575112 - DNA, 15 bp, Homo sapiens
gataaataggagttc

SEQ ID NO: 575113 - DNA, 15 bp, Homo sapiens
ataaataggagttca

SEQ ID NO: 575114 - DNA, 15 bp, Homo sapiens
taaataggagttcac

SEQ ID NO: 575115 - DNA, 15 bp, Homo sapiens
aaataggagttcacc

SEQ ID NO: 575116 - DNA, 15 bp, Homo sapiens
aataggagttcacca

SEQ ID NO: 575117 - DNA, 15 bp, Homo sapiens
ataggagttcaccaa

SEQ ID NO: 575118 - DNA, 15 bp, Homo sapiens
taggagttcaccaag

SEQ ID NO: 575119 - DNA, 15 bp, Homo sapiens
aggagttcaccaagc

SEQ ID NO: 575120 - DNA, 15 bp, Homo sapiens
ggagttcaccaagca

SEQ ID NO: 575121 - DNA, 15 bp, Homo sapiens
gagttcaccaagcag

SEQ ID NO: 575122 - DNA, 15 bp, Homo sapiens
agttcaccaagcagc

SEQ ID NO: 575123 - DNA, 15 bp, Homo sapiens
gttcaccaagcagcc

SEQ ID NO: 575124 - DNA, 15 bp, Homo sapiens
ttcaccaagcagcca

SEQ ID NO: 575125 - DNA, 15 bp, Homo sapiens
tcaccaagcagccaa

SEQ ID NO: 575126 - DNA, 15 bp, Homo sapiens
caccaagcagccaaa

SEQ ID NO: 575127 - DNA, 15 bp, Homo sapiens
accaagcagccaaaa

SEQ ID NO: 575128 - DNA, 15 bp, Homo sapiens
ccaagcagccaaaag

SEQ ID NO: 575129 - DNA, 15 bp, Homo sapiens
caagcagccaaaaga

SEQ ID NO: 575130 - DNA, 15 bp, Homo sapiens
aagcagccaaaagag

SEQ ID NO: 575131 - DNA, 15 bp, Homo sapiens
agcagccaaaagagg

SEQ ID NO: 575132 - DNA, 15 bp, Homo sapiens
gcagccaaaagagga

SEQ ID NO: 575133 - DNA, 15 bp, Homo sapiens
cagccaaaagaggaa

SEQ ID NO: 575134 - DNA, 15 bp, Homo sapiens
agccaaaagaggaat

SEQ ID NO: 575135 - DNA, 15 bp, Homo sapiens
gccaaaagaggaata

SEQ ID NO: 575136 - DNA, 15 bp, Homo sapiens
ccaaaagaggaatag

SEQ ID NO: 575137 - DNA, 15 bp, Homo sapiens
caaaagaggaatagt

SEQ ID NO: 575138 - DNA, 15 bp, Homo sapiens
aaaagaggaatagtg

SEQ ID NO: 575139 - DNA, 15 bp, Homo sapiens
aaagaggaatagtgt

SEQ ID NO: 575140 - DNA, 15 bp, Homo sapiens
aagaggaatagtgtt

SEQ ID NO: 575141 - DNA, 15 bp, Homo sapiens
agaggaatagtgttc

SEQ ID NO: 575142 - DNA, 15 bp, Homo sapiens
gaggaatagtgttca

SEQ ID NO: 575143 - DNA, 15 bp, Homo sapiens
aggaatagtgttcag

SEQ ID NO: 575144 - DNA, 15 bp, Homo sapiens
ggaatagtgttcagg

SEQ ID NO: 575145 - DNA, 15 bp, Homo sapiens
gaatagtgttcaggg

SEQ ID NO: 575146 - DNA, 15 bp, Homo sapiens
aatagtgttcagggc

SEQ ID NO: 575147 - DNA, 15 bp, Homo sapiens
atagtgttcagggca

SEQ ID NO: 575148 - DNA, 15 bp, Homo sapiens
tagtgttcagggcat

SEQ ID NO: 575149 - DNA, 15 bp, Homo sapiens
agtgttcagggcatg

SEQ ID NO: 575150 - DNA, 15 bp, Homo sapiens
gtgttcagggcatgg

SEQ ID NO: 575151 - DNA, 15 bp, Homo sapiens
tgttcagggcatggt

SEQ ID NO: 575152 - DNA, 15 bp, Homo sapiens
gttcagggcatggtg

SEQ ID NO: 575153 - DNA, 15 bp, Homo sapiens
ttcagggcatggtgt

SEQ ID NO: 575154 - DNA, 15 bp, Homo sapiens
tcagggcatggtgtg

SEQ ID NO: 575155 - DNA, 15 bp, Homo sapiens
cagggcatggtgtgt

SEQ ID NO: 575156 - DNA, 15 bp, Homo sapiens
agggcatggtgtgtt

SEQ ID NO: 575157 - DNA, 15 bp, Homo sapiens
gggcatggtgtgttc

SEQ ID NO: 575158 - DNA, 15 bp, Homo sapiens
ggcatggtgtgttca

SEQ ID NO: 575159 - DNA, 15 bp, Homo sapiens
gcatggtgtgttcaa

SEQ ID NO: 575160 - DNA, 15 bp, Homo sapiens
catggtgtgttcaag

SEQ ID NO: 575161 - DNA, 15 bp, Homo sapiens
atggtgtgttcaaga

SEQ ID NO: 575162 - DNA, 15 bp, Homo sapiens
tggtgtgttcaagaa

SEQ ID NO: 575163 - DNA, 15 bp, Homo sapiens
ggtgtgttcaagaaa

SEQ ID NO: 575164 - DNA, 15 bp, Homo sapiens
gtgtgttcaagaaac

SEQ ID NO: 575165 - DNA, 15 bp, Homo sapiens
tgtgttcaagaaaca

SEQ ID NO: 575166 - DNA, 15 bp, Homo sapiens
gtgttcaagaaacaa

SEQ ID NO: 575167 - DNA, 15 bp, Homo sapiens
tgttcaagaaacaaa

SEQ ID NO: 575168 - DNA, 15 bp, Homo sapiens
gttcaagaaacaaag

SEQ ID NO: 575169 - DNA, 15 bp, Homo sapiens
ttcaagaaacaaagt

SEQ ID NO: 575170 - DNA, 15 bp, Homo sapiens
tcaagaaacaaagta

SEQ ID NO: 575171 - DNA, 15 bp, Homo sapiens
caagaaacaaagtaa

SEQ ID NO: 575172 - DNA, 15 bp, Homo sapiens
aagaaacaaagtaag

SEQ ID NO: 575173 - DNA, 15 bp, Homo sapiens
agaaacaaagtaagc

SEQ ID NO: 575174 - DNA, 15 bp, Homo sapiens
gaaacaaagtaagct

SEQ ID NO: 575175 - DNA, 15 bp, Homo sapiens
aaacaaagtaagctc

SEQ ID NO: 575176 - DNA, 15 bp, Homo sapiens
aacaaagtaagctca

SEQ ID NO: 575177 - DNA, 15 bp, Homo sapiens
acaaagtaagctcag

SEQ ID NO: 575178 - DNA, 15 bp, Homo sapiens
caaagtaagctcagt

SEQ ID NO: 575179 - DNA, 15 bp, Homo sapiens
aaagtaagctcagtc

SEQ ID NO: 575180 - DNA, 15 bp, Homo sapiens
aagtaagctcagtct

SEQ ID NO: 575181 - DNA, 15 bp, Homo sapiens
agtaagctcagtctg

SEQ ID NO: 575182 - DNA, 15 bp, Homo sapiens
gtaagctcagtctgg

SEQ ID NO: 575183 - DNA, 15 bp, Homo sapiens
taagctcagtctggt

SEQ ID NO: 575184 - DNA, 15 bp, Homo sapiens
aagctcagtctggtt

SEQ ID NO: 575185 - DNA, 15 bp, Homo sapiens
agctcagtctggttc

SEQ ID NO: 575186 - DNA, 15 bp, Homo sapiens
gctcagtctggttca

SEQ ID NO: 575187 - DNA, 15 bp, Homo sapiens
ctcagtctggttcag

SEQ ID NO: 575188 - DNA, 15 bp, Homo sapiens
tcagtctggttcagg

SEQ ID NO: 575189 - DNA, 15 bp, Homo sapiens
cagtctggttcaggg

SEQ ID NO: 575190 - DNA, 15 bp, Homo sapiens
agtctggttcagggc

SEQ ID NO: 575191 - DNA, 15 bp, Homo sapiens
gtctggttcagggca

SEQ ID NO: 575192 - DNA, 15 bp, Homo sapiens
tctggttcagggcag

SEQ ID NO: 575193 - DNA, 15 bp, Homo sapiens
ctggttcagggcagc

SEQ ID NO: 575194 - DNA, 15 bp, Homo sapiens
tggttcagggcagct

SEQ ID NO: 575195 - DNA, 15 bp, Homo sapiens
ggttcagggcagctg

SEQ ID NO: 575196 - DNA, 15 bp, Homo sapiens
gttcagggcagctgc

SEQ ID NO: 575197 - DNA, 15 bp, Homo sapiens
ttcagggcagctgca

SEQ ID NO: 575198 - DNA, 15 bp, Homo sapiens
tcagggcagctgcaa

SEQ ID NO: 575199 - DNA, 15 bp, Homo sapiens
cagggcagctgcaat

SEQ ID NO: 575200 - DNA, 15 bp, Homo sapiens
agggcagctgcaatc

SEQ ID NO: 575201 - DNA, 15 bp, Homo sapiens
gggcagctgcaatcc

SEQ ID NO: 575202 - DNA, 15 bp, Homo sapiens
ggcagctgcaatcca

SEQ ID NO: 575203 - DNA, 15 bp, Homo sapiens
gcagctgcaatccaa

SEQ ID NO: 575204 - DNA, 15 bp, Homo sapiens
cagctgcaatccaag

SEQ ID NO: 575205 - DNA, 15 bp, Homo sapiens
agctgcaatccaaga

SEQ ID NO: 575206 - DNA, 15 bp, Homo sapiens
gctgcaatccaagaa

SEQ ID NO: 575207 - DNA, 15 bp, Homo sapiens
ctgcaatccaagaaa

SEQ ID NO: 575208 - DNA, 15 bp, Homo sapiens
tgcaatccaagaaag

SEQ ID NO: 575209 - DNA, 15 bp, Homo sapiens
gcaatccaagaaaga

SEQ ID NO: 575210 - DNA, 15 bp, Homo sapiens
caatccaagaaagaa

SEQ ID NO: 575211 - DNA, 15 bp, Homo sapiens
aatccaagaaagaag

SEQ ID NO: 575212 - DNA, 15 bp, Homo sapiens
atccaagaaagaagg

SEQ ID NO: 575213 - DNA, 15 bp, Homo sapiens
tccaagaaagaaggt

SEQ ID NO: 575214 - DNA, 15 bp, Homo sapiens
ccaagaaagaaggta

SEQ ID NO: 575215 - DNA, 15 bp, Homo sapiens
caagaaagaaggtag

SEQ ID NO: 575216 - DNA, 15 bp, Homo sapiens
aagaaagaaggtaga

SEQ ID NO: 575217 - DNA, 15 bp, Homo sapiens
agaaagaaggtagaa

SEQ ID NO: 575218 - DNA, 15 bp, Homo sapiens
gaaagaaggtagaac

SEQ ID NO: 575219 - DNA, 15 bp, Homo sapiens
aaagaaggtagaacg

SEQ ID NO: 575220 - DNA, 15 bp, Homo sapiens
aagaaggtagaacgt

SEQ ID NO: 575221 - DNA, 15 bp, Homo sapiens
agaaggtagaacgtg

SEQ ID NO: 575222 - DNA, 15 bp, Homo sapiens
gaaggtagaacgtgg

SEQ ID NO: 575223 - DNA, 15 bp, Homo sapiens
aaggtagaacgtggg

SEQ ID NO: 575224 - DNA, 15 bp, Homo sapiens
aggtagaacgtgggg

SEQ ID NO: 575225 - DNA, 15 bp, Homo sapiens
ggtagaacgtggggg

SEQ ID NO: 575226 - DNA, 15 bp, Homo sapiens
gtagaacgtggggga

SEQ ID NO: 575227 - DNA, 15 bp, Homo sapiens
tagaacgtgggggag

SEQ ID NO: 575228 - DNA, 15 bp, Homo sapiens
agaacgtgggggagt

SEQ ID NO: 575229 - DNA, 15 bp, Homo sapiens
gaacgtgggggagta

SEQ ID NO: 575230 - DNA, 15 bp, Homo sapiens
aacgtgggggagtaa

SEQ ID NO: 575231 - DNA, 15 bp, Homo sapiens
acgtgggggagtaaa

SEQ ID NO: 575232 - DNA, 15 bp, Homo sapiens
cgtgggggagtaaag

SEQ ID NO: 575233 - DNA, 15 bp, Homo sapiens
gtgggggagtaaagg

SEQ ID NO: 575234 - DNA, 15 bp, Homo sapiens
tgggggagtaaagga

SEQ ID NO: 575235 - DNA, 15 bp, Homo sapiens
gggggagtaaaggat

SEQ ID NO: 575236 - DNA, 15 bp, Homo sapiens
ggggagtaaaggatg

SEQ ID NO: 575237 - DNA, 15 bp, Homo sapiens
gggagtaaaggatgg

SEQ ID NO: 575238 - DNA, 15 bp, Homo sapiens
ggagtaaaggatggt

SEQ ID NO: 575239 - DNA, 15 bp, Homo sapiens
gagtaaaggatggtg

SEQ ID NO: 575240 - DNA, 15 bp, Homo sapiens
agtaaaggatggtga

SEQ ID NO: 575241 - DNA, 15 bp, Homo sapiens
gtaaaggatggtgag

SEQ ID NO: 575242 - DNA, 15 bp, Homo sapiens
taaaggatggtgagg

SEQ ID NO: 575243 - DNA, 15 bp, Homo sapiens
aaaggatggtgaggc

SEQ ID NO: 575244 - DNA, 15 bp, Homo sapiens
aaggatggtgaggct

SEQ ID NO: 575245 - DNA, 15 bp, Homo sapiens
aggatggtgaggctg

SEQ ID NO: 575246 - DNA, 15 bp, Homo sapiens
ggatggtgaggctgc

SEQ ID NO: 575247 - DNA, 15 bp, Homo sapiens
gatggtgaggctgca

SEQ ID NO: 575248 - DNA, 15 bp, Homo sapiens
atggtgaggctgcag

SEQ ID NO: 575249 - DNA, 15 bp, Homo sapiens
tggtgaggctgcaga

SEQ ID NO: 575250 - DNA, 15 bp, Homo sapiens
ggtgaggctgcagac

SEQ ID NO: 575251 - DNA, 15 bp, Homo sapiens
gtgaggctgcagact

SEQ ID NO: 575252 - DNA, 15 bp, Homo sapiens
tgaggctgcagactg

SEQ ID NO: 575253 - DNA, 15 bp, Homo sapiens
gaggctgcagactgg

SEQ ID NO: 575254 - DNA, 15 bp, Homo sapiens
aggctgcagactgga

SEQ ID NO: 575255 - DNA, 15 bp, Homo sapiens
ggctgcagactggag

SEQ ID NO: 575256 - DNA, 15 bp, Homo sapiens
gctgcagactggagt

SEQ ID NO: 575257 - DNA, 15 bp, Homo sapiens
ctgcagactggagtc

SEQ ID NO: 575258 - DNA, 15 bp, Homo sapiens
tgcagactggagtct

SEQ ID NO: 575259 - DNA, 15 bp, Homo sapiens
gcagactggagtctt

SEQ ID NO: 575260 - DNA, 15 bp, Homo sapiens
cagactggagtcttt

SEQ ID NO: 575261 - DNA, 15 bp, Homo sapiens
agactggagtctttt

SEQ ID NO: 575262 - DNA, 15 bp, Homo sapiens
gactggagtcttttg

SEQ ID NO: 575263 - DNA, 15 bp, Homo sapiens
actggagtcttttga

SEQ ID NO: 575264 - DNA, 15 bp, Homo sapiens
ctggagtcttttgag

SEQ ID NO: 575265 - DNA, 15 bp, Homo sapiens
tggagtcttttgagg

SEQ ID NO: 575266 - DNA, 15 bp, Homo sapiens
ggagtcttttgaggg

SEQ ID NO: 575267 - DNA, 15 bp, Homo sapiens
gagtcttttgaggga

SEQ ID NO: 575268 - DNA, 15 bp, Homo sapiens
agtcttttgagggat

SEQ ID NO: 575269 - DNA, 15 bp, Homo sapiens
gtcttttgagggatt

SEQ ID NO: 575270 - DNA, 15 bp, Homo sapiens
tcttttgagggattt

SEQ ID NO: 575271 - DNA, 15 bp, Homo sapiens
cttttgagggatttg

SEQ ID NO: 575272 - DNA, 15 bp, Homo sapiens
ttttgagggatttga

SEQ ID NO: 575273 - DNA, 15 bp, Homo sapiens
tttgagggatttgaa

SEQ ID NO: 575274 - DNA, 15 bp, Homo sapiens
ttgagggatttgaat

SEQ ID NO: 575275 - DNA, 15 bp, Homo sapiens
tgagggatttgaata

SEQ ID NO: 575276 - DNA, 15 bp, Homo sapiens
gagggatttgaatac

SEQ ID NO: 575277 - DNA, 15 bp, Homo sapiens
agggatttgaatacc

SEQ ID NO: 575278 - DNA, 15 bp, Homo sapiens
gggatttgaatacca

SEQ ID NO: 575279 - DNA, 15 bp, Homo sapiens
ggatttgaataccat

SEQ ID NO: 575280 - DNA, 15 bp, Homo sapiens
gatttgaataccatg

SEQ ID NO: 575281 - DNA, 15 bp, Homo sapiens
atttgaataccatgc

SEQ ID NO: 575282 - DNA, 15 bp, Homo sapiens
tttgaataccatgct

SEQ ID NO: 575283 - DNA, 15 bp, Homo sapiens
ttgaataccatgcta

SEQ ID NO: 575284 - DNA, 15 bp, Homo sapiens
tgaataccatgctaa

SEQ ID NO: 575285 - DNA, 15 bp, Homo sapiens
gaataccatgctaaa

SEQ ID NO: 575286 - DNA, 15 bp, Homo sapiens
aataccatgctaaag

SEQ ID NO: 575287 - DNA, 15 bp, Homo sapiens
ataccatgctaaagc

SEQ ID NO: 575288 - DNA, 15 bp, Homo sapiens
taccatgctaaagct

SEQ ID NO: 575289 - DNA, 15 bp, Homo sapiens
accatgctaaagctt

SEQ ID NO: 575290 - DNA, 15 bp, Homo sapiens
ccatgctaaagcttt

SEQ ID NO: 575291 - DNA, 15 bp, Homo sapiens
catgctaaagcttta

SEQ ID NO: 575292 - DNA, 15 bp, Homo sapiens
atgctaaagctttat

SEQ ID NO: 575293 - DNA, 15 bp, Homo sapiens
tgctaaagctttatt

SEQ ID NO: 575294 - DNA, 15 bp, Homo sapiens
gctaaagctttatta

SEQ ID NO: 575295 - DNA, 15 bp, Homo sapiens
ctaaagctttattac

SEQ ID NO: 575296 - DNA, 15 bp, Homo sapiens
taaagctttattacc

SEQ ID NO: 575297 - DNA, 15 bp, Homo sapiens
aaagctttattacca

SEQ ID NO: 575298 - DNA, 15 bp, Homo sapiens
aagctttattaccat

SEQ ID NO: 575299 - DNA, 15 bp, Homo sapiens
agctttattaccatg

SEQ ID NO: 575300 - DNA, 15 bp, Homo sapiens
gctttattaccatgg

SEQ ID NO: 575301 - DNA, 15 bp, Homo sapiens
ctttattaccatggt

SEQ ID NO: 575302 - DNA, 15 bp, Homo sapiens
tttattaccatggtg

SEQ ID NO: 575303 - DNA, 15 bp, Homo sapiens
ttattaccatggtgg

SEQ ID NO: 575304 - DNA, 15 bp, Homo sapiens
tattaccatggtggt

SEQ ID NO: 575305 - DNA, 15 bp, Homo sapiens
attaccatggtggtt

SEQ ID NO: 575306 - DNA, 15 bp, Homo sapiens
ttaccatggtggttg

SEQ ID NO: 575307 - DNA, 15 bp, Homo sapiens
taccatggtggttga

SEQ ID NO: 575308 - DNA, 15 bp, Homo sapiens
accatggtggttgag

SEQ ID NO: 575309 - DNA, 15 bp, Homo sapiens
ccatggtggttgaga

SEQ ID NO: 575310 - DNA, 15 bp, Homo sapiens
catggtggttgagaa

SEQ ID NO: 575311 - DNA, 15 bp, Homo sapiens
atggtggttgagaaa

SEQ ID NO: 575312 - DNA, 15 bp, Homo sapiens
tggtggttgagaaag

SEQ ID NO: 575313 - DNA, 15 bp, Homo sapiens
ggtggttgagaaagg

SEQ ID NO: 575314 - DNA, 15 bp, Homo sapiens
gtggttgagaaaggc

SEQ ID NO: 575315 - DNA, 15 bp, Homo sapiens
tggttgagaaaggca

SEQ ID NO: 575316 - DNA, 15 bp, Homo sapiens
ggttgagaaaggcag

SEQ ID NO: 575317 - DNA, 15 bp, Homo sapiens
gttgagaaaggcagg

SEQ ID NO: 575318 - DNA, 15 bp, Homo sapiens
ttgagaaaggcaggc

SEQ ID NO: 575319 - DNA, 15 bp, Homo sapiens
tgagaaaggcaggct

SEQ ID NO: 575320 - DNA, 15 bp, Homo sapiens
gagaaaggcaggctg

SEQ ID NO: 575321 - DNA, 15 bp, Homo sapiens
agaaaggcaggctgt

SEQ ID NO: 575322 - DNA, 15 bp, Homo sapiens
gaaaggcaggctgta

SEQ ID NO: 575323 - DNA, 15 bp, Homo sapiens
aaaggcaggctgtat

SEQ ID NO: 575324 - DNA, 15 bp, Homo sapiens
aaggcaggctgtatt

SEQ ID NO: 575325 - DNA, 15 bp, Homo sapiens
aggcaggctgtattg

SEQ ID NO: 575326 - DNA, 15 bp, Homo sapiens
ggcaggctgtattgt

SEQ ID NO: 575327 - DNA, 15 bp, Homo sapiens
gcaggctgtattgta

SEQ ID NO: 575328 - DNA, 15 bp, Homo sapiens
caggctgtattgtag

SEQ ID NO: 575329 - DNA, 15 bp, Homo sapiens
aggctgtattgtaga

SEQ ID NO: 575330 - DNA, 15 bp, Homo sapiens
ggctgtattgtagaa

SEQ ID NO: 575331 - DNA, 15 bp, Homo sapiens
gctgtattgtagaag

SEQ ID NO: 575332 - DNA, 15 bp, Homo sapiens
ctgtattgtagaagc

SEQ ID NO: 575333 - DNA, 15 bp, Homo sapiens
tgtattgtagaagca

SEQ ID NO: 575334 - DNA, 15 bp, Homo sapiens
gtattgtagaagcat

SEQ ID NO: 575335 - DNA, 15 bp, Homo sapiens
tattgtagaagcatt

SEQ ID NO: 575336 - DNA, 15 bp, Homo sapiens
attgtagaagcattt

SEQ ID NO: 575337 - DNA, 15 bp, Homo sapiens
ttgtagaagcatttg

SEQ ID NO: 575338 - DNA, 15 bp, Homo sapiens
tgtagaagcatttgg

SEQ ID NO: 575339 - DNA, 15 bp, Homo sapiens
gtagaagcatttggg

SEQ ID NO: 575340 - DNA, 15 bp, Homo sapiens
tagaagcatttggga

SEQ ID NO: 575341 - DNA, 15 bp, Homo sapiens
agaagcatttgggaa

SEQ ID NO: 575342 - DNA, 15 bp, Homo sapiens
gaagcatttgggaaa

SEQ ID NO: 575343 - DNA, 15 bp, Homo sapiens
aagcatttgggaaaa

SEQ ID NO: 575344 - DNA, 15 bp, Homo sapiens
agcatttgggaaaaa

SEQ ID NO: 575345 - DNA, 15 bp, Homo sapiens
gcatttgggaaaaaa

SEQ ID NO: 575346 - DNA, 15 bp, Homo sapiens
catttgggaaaaaaa

SEQ ID NO: 575347 - DNA, 15 bp, Homo sapiens
atttgggaaaaaaat

SEQ ID NO: 575348 - DNA, 15 bp, Homo sapiens
tttgggaaaaaaatg

SEQ ID NO: 575349 - DNA, 15 bp, Homo sapiens
ttgggaaaaaaatgc

SEQ ID NO: 575350 - DNA, 15 bp, Homo sapiens
tgggaaaaaaatgct

SEQ ID NO: 575351 - DNA, 15 bp, Homo sapiens
gggaaaaaaatgctc

SEQ ID NO: 575352 - DNA, 15 bp, Homo sapiens
ggaaaaaaatgctcc

SEQ ID NO: 575353 - DNA, 15 bp, Homo sapiens
gaaaaaaatgctcct

SEQ ID NO: 575354 - DNA, 15 bp, Homo sapiens
aaaaaaatgctcctt

SEQ ID NO: 575355 - DNA, 15 bp, Homo sapiens
aaaaaatgctcctta

SEQ ID NO: 575356 - DNA, 15 bp, Homo sapiens
aaaaatgctccttag

SEQ ID NO: 575357 - DNA, 15 bp, Homo sapiens
aaaatgctccttagg

SEQ ID NO: 575358 - DNA, 15 bp, Homo sapiens
aaatgctccttaggc

SEQ ID NO: 575359 - DNA, 15 bp, Homo sapiens
aatgctccttaggca

SEQ ID NO: 575360 - DNA, 15 bp, Homo sapiens
atgctccttaggcac

SEQ ID NO: 575361 - DNA, 15 bp, Homo sapiens
tgctccttaggcaca

SEQ ID NO: 575362 - DNA, 15 bp, Homo sapiens
gctccttaggcacac

SEQ ID NO: 575363 - DNA, 15 bp, Homo sapiens
ctccttaggcacaca

SEQ ID NO: 575364 - DNA, 15 bp, Homo sapiens
tccttaggcacacag

SEQ ID NO: 575365 - DNA, 15 bp, Homo sapiens
ccttaggcacacaga

SEQ ID NO: 575366 - DNA, 15 bp, Homo sapiens
cttaggcacacagaa

SEQ ID NO: 575367 - DNA, 15 bp, Homo sapiens
ttaggcacacagaaa

SEQ ID NO: 575368 - DNA, 15 bp, Homo sapiens
taggcacacagaaaa

SEQ ID NO: 575369 - DNA, 15 bp, Homo sapiens
aggcacacagaaaaa

SEQ ID NO: 575370 - DNA, 15 bp, Homo sapiens
ggcacacagaaaaac

SEQ ID NO: 575371 - DNA, 15 bp, Homo sapiens
gcacacagaaaaaca

SEQ ID NO: 575372 - DNA, 15 bp, Homo sapiens
cacacagaaaaacag

SEQ ID NO: 575373 - DNA, 15 bp, Homo sapiens
acacagaaaaacagg

SEQ ID NO: 575374 - DNA, 15 bp, Homo sapiens
cacagaaaaacaggc

SEQ ID NO: 575375 - DNA, 15 bp, Homo sapiens
acagaaaaacaggca

SEQ ID NO: 575376 - DNA, 15 bp, Homo sapiens
cagaaaaacaggcac

SEQ ID NO: 575377 - DNA, 15 bp, Homo sapiens
agaaaaacaggcact

SEQ ID NO: 575378 - DNA, 15 bp, Homo sapiens
gaaaaacaggcactt

SEQ ID NO: 575379 - DNA, 15 bp, Homo sapiens
aaaaacaggcacttg

SEQ ID NO: 575380 - DNA, 15 bp, Homo sapiens
aaaacaggcacttgg

SEQ ID NO: 575381 - DNA, 15 bp, Homo sapiens
aaacaggcacttgga

SEQ ID NO: 575382 - DNA, 15 bp, Homo sapiens
aacaggcacttggaa

SEQ ID NO: 575383 - DNA, 15 bp, Homo sapiens
acaggcacttggaaa

SEQ ID NO: 575384 - DNA, 15 bp, Homo sapiens
caggcacttggaaaa

SEQ ID NO: 575385 - DNA, 15 bp, Homo sapiens
aggcacttggaaaaa

SEQ ID NO: 575386 - DNA, 15 bp, Homo sapiens
ggcacttggaaaaat

SEQ ID NO: 575387 - DNA, 15 bp, Homo sapiens
gcacttggaaaaatg

SEQ ID NO: 575388 - DNA, 15 bp, Homo sapiens
cacttggaaaaatga

SEQ ID NO: 575389 - DNA, 15 bp, Homo sapiens
acttggaaaaatgag

SEQ ID NO: 575390 - DNA, 15 bp, Homo sapiens
cttggaaaaatgagg

SEQ ID NO: 575391 - DNA, 15 bp, Homo sapiens
ttggaaaaatgaggg

SEQ ID NO: 575392 - DNA, 15 bp, Homo sapiens
tggaaaaatgaggga

SEQ ID NO: 575393 - DNA, 15 bp, Homo sapiens
ggaaaaatgagggaa

SEQ ID NO: 575394 - DNA, 15 bp, Homo sapiens
gaaaaatgagggaaa

SEQ ID NO: 575395 - DNA, 15 bp, Homo sapiens
aaaaatgagggaaaa

SEQ ID NO: 575396 - DNA, 15 bp, Homo sapiens
aaaatgagggaaaaa

SEQ ID NO: 575397 - DNA, 15 bp, Homo sapiens
aaatgagggaaaaac

SEQ ID NO: 575398 - DNA, 15 bp, Homo sapiens
aatgagggaaaaaca

SEQ ID NO: 575399 - DNA, 15 bp, Homo sapiens
atgagggaaaaacaa

SEQ ID NO: 575400 - DNA, 15 bp, Homo sapiens
tgagggaaaaacaaa

SEQ ID NO: 575401 - DNA, 15 bp, Homo sapiens
gagggaaaaacaaag

SEQ ID NO: 575402 - DNA, 15 bp, Homo sapiens
agggaaaaacaaagg

SEQ ID NO: 575403 - DNA, 15 bp, Homo sapiens
gggaaaaacaaaggg

SEQ ID NO: 575404 - DNA, 15 bp, Homo sapiens
ggaaaaacaaagggt

SEQ ID NO: 575405 - DNA, 15 bp, Homo sapiens
gaaaaacaaagggtt

SEQ ID NO: 575406 - DNA, 15 bp, Homo sapiens
aaaaacaaagggttg

SEQ ID NO: 575407 - DNA, 15 bp, Homo sapiens
aaaacaaagggttgt

SEQ ID NO: 575408 - DNA, 15 bp, Homo sapiens
aaacaaagggttgta

SEQ ID NO: 575409 - DNA, 15 bp, Homo sapiens
aacaaagggttgtac

SEQ ID NO: 575410 - DNA, 15 bp, Homo sapiens
acaaagggttgtaca

SEQ ID NO: 575411 - DNA, 15 bp, Homo sapiens
caaagggttgtacaa

SEQ ID NO: 575412 - DNA, 15 bp, Homo sapiens
aaagggttgtacaaa

SEQ ID NO: 575413 - DNA, 15 bp, Homo sapiens
aagggttgtacaaaa

SEQ ID NO: 575414 - DNA, 15 bp, Homo sapiens
agggttgtacaaaag

SEQ ID NO: 575415 - DNA, 15 bp, Homo sapiens
gggttgtacaaaaga

SEQ ID NO: 575416 - DNA, 15 bp, Homo sapiens
ggttgtacaaaagag

SEQ ID NO: 575417 - DNA, 15 bp, Homo sapiens
gttgtacaaaagagg

SEQ ID NO: 575418 - DNA, 15 bp, Homo sapiens
ttgtacaaaagagga

SEQ ID NO: 575419 - DNA, 15 bp, Homo sapiens
tgtacaaaagaggag

SEQ ID NO: 575420 - DNA, 15 bp, Homo sapiens
gtacaaaagaggagg

SEQ ID NO: 575421 - DNA, 15 bp, Homo sapiens
tacaaaagaggaggt

SEQ ID NO: 575422 - DNA, 15 bp, Homo sapiens
acaaaagaggaggtt

SEQ ID NO: 575423 - DNA, 15 bp, Homo sapiens
caaaagaggaggttt

SEQ ID NO: 575424 - DNA, 15 bp, Homo sapiens
aaaagaggaggtttg

SEQ ID NO: 575425 - DNA, 15 bp, Homo sapiens
aaagaggaggtttgc

SEQ ID NO: 575426 - DNA, 15 bp, Homo sapiens
aagaggaggtttgct

SEQ ID NO: 575427 - DNA, 15 bp, Homo sapiens
agaggaggtttgctt

SEQ ID NO: 575428 - DNA, 15 bp, Homo sapiens
gaggaggtttgctta

SEQ ID NO: 575429 - DNA, 15 bp, Homo sapiens
aggaggtttgcttat

SEQ ID NO: 575430 - DNA, 15 bp, Homo sapiens
ggaggtttgcttatg

SEQ ID NO: 575431 - DNA, 15 bp, Homo sapiens
gaggtttgcttatgg

SEQ ID NO: 575432 - DNA, 15 bp, Homo sapiens
aggtttgcttatggt

SEQ ID NO: 575433 - DNA, 15 bp, Homo sapiens
ggtttgcttatggtg

SEQ ID NO: 575434 - DNA, 15 bp, Homo sapiens
gtttgcttatggtgc

SEQ ID NO: 575435 - DNA, 15 bp, Homo sapiens
tttgcttatggtgcg

SEQ ID NO: 575436 - DNA, 15 bp, Homo sapiens
ttgcttatggtgcgt

SEQ ID NO: 575437 - DNA, 15 bp, Homo sapiens
tgcttatggtgcgtt

SEQ ID NO: 575438 - DNA, 15 bp, Homo sapiens
gcttatggtgcgtta

SEQ ID NO: 575439 - DNA, 15 bp, Homo sapiens
cttatggtgcgttat

SEQ ID NO: 575440 - DNA, 15 bp, Homo sapiens
ttatggtgcgttatt

SEQ ID NO: 575441 - DNA, 15 bp, Homo sapiens
tatggtgcgttatta

SEQ ID NO: 575442 - DNA, 15 bp, Homo sapiens
atggtgcgttattag

SEQ ID NO: 575443 - DNA, 15 bp, Homo sapiens
tggtgcgttattaga

SEQ ID NO: 575444 - DNA, 15 bp, Homo sapiens
ggtgcgttattagat

SEQ ID NO: 575445 - DNA, 15 bp, Homo sapiens
gtgcgttattagatt

SEQ ID NO: 575446 - DNA, 15 bp, Homo sapiens
tgcgttattagattt

SEQ ID NO: 575447 - DNA, 15 bp, Homo sapiens
gcgttattagatttg

SEQ ID NO: 575448 - DNA, 15 bp, Homo sapiens
cgttattagatttgg

SEQ ID NO: 575449 - DNA, 15 bp, Homo sapiens
gttattagatttggc

SEQ ID NO: 575450 - DNA, 15 bp, Homo sapiens
ttattagatttggca

SEQ ID NO: 575451 - DNA, 15 bp, Homo sapiens
tattagatttggcac

SEQ ID NO: 575452 - DNA, 15 bp, Homo sapiens
attagatttggcaca

SEQ ID NO: 575453 - DNA, 15 bp, Homo sapiens
ttagatttggcacag

SEQ ID NO: 575454 - DNA, 15 bp, Homo sapiens
tagatttggcacaga

SEQ ID NO: 575455 - DNA, 15 bp, Homo sapiens
agatttggcacagac

SEQ ID NO: 575456 - DNA, 15 bp, Homo sapiens
gatttggcacagaca

SEQ ID NO: 575457 - DNA, 15 bp, Homo sapiens
atttggcacagacag

SEQ ID NO: 575458 - DNA, 15 bp, Homo sapiens
tttggcacagacagt

SEQ ID NO: 575459 - DNA, 15 bp, Homo sapiens
ttggcacagacagta

SEQ ID NO: 575460 - DNA, 15 bp, Homo sapiens
tggcacagacagtat

SEQ ID NO: 575461 - DNA, 15 bp, Homo sapiens
ggcacagacagtatt

SEQ ID NO: 575462 - DNA, 15 bp, Homo sapiens
gcacagacagtattt

SEQ ID NO: 575463 - DNA, 15 bp, Homo sapiens
cacagacagtattta

SEQ ID NO: 575464 - DNA, 15 bp, Homo sapiens
acagacagtatttat

SEQ ID NO: 575465 - DNA, 15 bp, Homo sapiens
cagacagtatttata

SEQ ID NO: 575466 - DNA, 15 bp, Homo sapiens
agacagtatttatat

SEQ ID NO: 575467 - DNA, 15 bp, Homo sapiens
gacagtatttatata

SEQ ID NO: 575468 - DNA, 15 bp, Homo sapiens
acagtatttatataa

SEQ ID NO: 575469 - DNA, 15 bp, Homo sapiens
cagtatttatataat

SEQ ID NO: 575470 - DNA, 15 bp, Homo sapiens
agtatttatataatc

SEQ ID NO: 575471 - DNA, 15 bp, Homo sapiens
gtatttatataatca

SEQ ID NO: 575472 - DNA, 15 bp, Homo sapiens
tatttatataatcat

SEQ ID NO: 575473 - DNA, 15 bp, Homo sapiens
atttatataatcata

SEQ ID NO: 575474 - DNA, 15 bp, Homo sapiens
tttatataatcataa

SEQ ID NO: 575475 - DNA, 15 bp, Homo sapiens
ttatataatcataac

SEQ ID NO: 575476 - DNA, 15 bp, Homo sapiens
tatataatcataaca

SEQ ID NO: 575477 - DNA, 15 bp, Homo sapiens
atataatcataacaa

SEQ ID NO: 575478 - DNA, 15 bp, Homo sapiens
tataatcataacaat

SEQ ID NO: 575479 - DNA, 15 bp, Homo sapiens
ataatcataacaata

SEQ ID NO: 575480 - DNA, 15 bp, Homo sapiens
taatcataacaatat

SEQ ID NO: 575481 - DNA, 15 bp, Homo sapiens
aatcataacaatata

SEQ ID NO: 575482 - DNA, 15 bp, Homo sapiens
atcataacaatataa

SEQ ID NO: 575483 - DNA, 15 bp, Homo sapiens
tcataacaatataaa

SEQ ID NO: 575484 - DNA, 15 bp, Homo sapiens
cataacaatataaac

SEQ ID NO: 575485 - DNA, 15 bp, Homo sapiens
ataacaatataaaca

SEQ ID NO: 575486 - DNA, 15 bp, Homo sapiens
taacaatataaacat

SEQ ID NO: 575487 - DNA, 15 bp, Homo sapiens
aacaatataaacata

SEQ ID NO: 575488 - DNA, 15 bp, Homo sapiens
acaatataaacatag

SEQ ID NO: 575489 - DNA, 15 bp, Homo sapiens
caatataaacatagc

SEQ ID NO: 575490 - DNA, 15 bp, Homo sapiens
aatataaacatagcg

SEQ ID NO: 575491 - DNA, 15 bp, Homo sapiens
atataaacatagcga

SEQ ID NO: 575492 - DNA, 15 bp, Homo sapiens
tataaacatagcgaa

SEQ ID NO: 575493 - DNA, 15 bp, Homo sapiens
ataaacatagcgaat

SEQ ID NO: 575494 - DNA, 15 bp, Homo sapiens
taaacatagcgaatt

SEQ ID NO: 575495 - DNA, 15 bp, Homo sapiens
aaacatagcgaatta

SEQ ID NO: 575496 - DNA, 15 bp, Homo sapiens
aacatagcgaattaa

SEQ ID NO: 575497 - DNA, 15 bp, Homo sapiens
acatagcgaattaac

SEQ ID NO: 575498 - DNA, 15 bp, Homo sapiens
catagcgaattaacc

SEQ ID NO: 575499 - DNA, 15 bp, Homo sapiens
atagcgaattaaccc

SEQ ID NO: 575500 - DNA, 15 bp, Homo sapiens
tagcgaattaaccca

SEQ ID NO: 575501 - DNA, 15 bp, Homo sapiens
agcgaattaacccaa

SEQ ID NO: 575502 - DNA, 15 bp, Homo sapiens
gcgaattaacccaaa

SEQ ID NO: 575503 - DNA, 15 bp, Homo sapiens
cgaattaacccaaaa

SEQ ID NO: 575504 - DNA, 15 bp, Homo sapiens
gaattaacccaaaat

SEQ ID NO: 575505 - DNA, 15 bp, Homo sapiens
aattaacccaaaatt

SEQ ID NO: 575506 - DNA, 15 bp, Homo sapiens
attaacccaaaattg

SEQ ID NO: 575507 - DNA, 15 bp, Homo sapiens
ttaacccaaaattgt

SEQ ID NO: 575508 - DNA, 15 bp, Homo sapiens
taacccaaaattgtg

SEQ ID NO: 575509 - DNA, 15 bp, Homo sapiens
aacccaaaattgtga

SEQ ID NO: 575510 - DNA, 15 bp, Homo sapiens
acccaaaattgtgat

SEQ ID NO: 575511 - DNA, 15 bp, Homo sapiens
cccaaaattgtgatg

SEQ ID NO: 575512 - DNA, 15 bp, Homo sapiens
ccaaaattgtgatgt

SEQ ID NO: 575513 - DNA, 15 bp, Homo sapiens
caaaattgtgatgta

SEQ ID NO: 575514 - DNA, 15 bp, Homo sapiens
aaaattgtgatgtaa

SEQ ID NO: 575515 - DNA, 15 bp, Homo sapiens
aaattgtgatgtaat

SEQ ID NO: 575516 - DNA, 15 bp, Homo sapiens
aattgtgatgtaatt

SEQ ID NO: 575517 - DNA, 15 bp, Homo sapiens
attgtgatgtaattt

SEQ ID NO: 575518 - DNA, 15 bp, Homo sapiens
ttgtgatgtaatttt

SEQ ID NO: 575519 - DNA, 15 bp, Homo sapiens
tgtgatgtaattttg

SEQ ID NO: 575520 - DNA, 15 bp, Homo sapiens
gtgatgtaattttgt

SEQ ID NO: 575521 - DNA, 15 bp, Homo sapiens
tgatgtaattttgtt

SEQ ID NO: 575522 - DNA, 15 bp, Homo sapiens
gatgtaattttgtta

SEQ ID NO: 575523 - DNA, 15 bp, Homo sapiens
atgtaattttgttag

SEQ ID NO: 575524 - DNA, 15 bp, Homo sapiens
tgtaattttgttagg

SEQ ID NO: 575525 - DNA, 15 bp, Homo sapiens
gtaattttgttagga

SEQ ID NO: 575526 - DNA, 15 bp, Homo sapiens
taattttgttaggat

SEQ ID NO: 575527 - DNA, 15 bp, Homo sapiens
aattttgttaggata

SEQ ID NO: 575528 - DNA, 15 bp, Homo sapiens
attttgttaggataa

SEQ ID NO: 575529 - DNA, 15 bp, Homo sapiens
ttttgttaggataat

SEQ ID NO: 575530 - DNA, 15 bp, Homo sapiens
tttgttaggataata

SEQ ID NO: 575531 - DNA, 15 bp, Homo sapiens
ttgttaggataatag

SEQ ID NO: 575532 - DNA, 15 bp, Homo sapiens
tgttaggataatagg

SEQ ID NO: 575533 - DNA, 15 bp, Homo sapiens
gttaggataataggg

SEQ ID NO: 575534 - DNA, 15 bp, Homo sapiens
ttaggataataggga

SEQ ID NO: 575535 - DNA, 15 bp, Homo sapiens
taggataatagggag

SEQ ID NO: 575536 - DNA, 15 bp, Homo sapiens
aggataatagggagg

SEQ ID NO: 575537 - DNA, 15 bp, Homo sapiens
ggataatagggaggg

SEQ ID NO: 575538 - DNA, 15 bp, Homo sapiens
gataatagggaggga

SEQ ID NO: 575539 - DNA, 15 bp, Homo sapiens
ataatagggagggaa

SEQ ID NO: 575540 - DNA, 15 bp, Homo sapiens
taatagggagggaag

SEQ ID NO: 575541 - DNA, 15 bp, Homo sapiens
aatagggagggaagt

SEQ ID NO: 575542 - DNA, 15 bp, Homo sapiens
atagggagggaagta

SEQ ID NO: 575543 - DNA, 15 bp, Homo sapiens
tagggagggaagtag

SEQ ID NO: 575544 - DNA, 15 bp, Homo sapiens
agggagggaagtaga

SEQ ID NO: 575545 - DNA, 15 bp, Homo sapiens
gggagggaagtagag

SEQ ID NO: 575546 - DNA, 15 bp, Homo sapiens
ggagggaagtagagg

SEQ ID NO: 575547 - DNA, 15 bp, Homo sapiens
gagggaagtagagga

SEQ ID NO: 575548 - DNA, 15 bp, Homo sapiens
agggaagtagaggaa

SEQ ID NO: 575549 - DNA, 15 bp, Homo sapiens
gggaagtagaggaag

SEQ ID NO: 575550 - DNA, 15 bp, Homo sapiens
ggaagtagaggaagt

SEQ ID NO: 575551 - DNA, 15 bp, Homo sapiens
gaagtagaggaagtt

SEQ ID NO: 575552 - DNA, 15 bp, Homo sapiens
aagtagaggaagttg

SEQ ID NO: 575553 - DNA, 15 bp, Homo sapiens
agtagaggaagttgt

SEQ ID NO: 575554 - DNA, 15 bp, Homo sapiens
gtagaggaagttgtt

SEQ ID NO: 575555 - DNA, 15 bp, Homo sapiens
tagaggaagttgtta

SEQ ID NO: 575556 - DNA, 15 bp, Homo sapiens
agaggaagttgttat

SEQ ID NO: 575557 - DNA, 15 bp, Homo sapiens
gaggaagttgttatg

SEQ ID NO: 575558 - DNA, 15 bp, Homo sapiens
aggaagttgttatgc

SEQ ID NO: 575559 - DNA, 15 bp, Homo sapiens
ggaagttgttatgct

SEQ ID NO: 575560 - DNA, 15 bp, Homo sapiens
gaagttgttatgctt

SEQ ID NO: 575561 - DNA, 15 bp, Homo sapiens
aagttgttatgcttt

SEQ ID NO: 575562 - DNA, 15 bp, Homo sapiens
agttgttatgcttta

SEQ ID NO: 575563 - DNA, 15 bp, Homo sapiens
gttgttatgctttat

SEQ ID NO: 575564 - DNA, 15 bp, Homo sapiens
ttgttatgctttatc

SEQ ID NO: 575565 - DNA, 15 bp, Homo sapiens
tgttatgctttatct

SEQ ID NO: 575566 - DNA, 15 bp, Homo sapiens
gttatgctttatcta

SEQ ID NO: 575567 - DNA, 15 bp, Homo sapiens
ttatgctttatctac

SEQ ID NO: 575568 - DNA, 15 bp, Homo sapiens
tatgctttatctacc

SEQ ID NO: 575569 - DNA, 15 bp, Homo sapiens
atgctttatctacca

SEQ ID NO: 575570 - DNA, 15 bp, Homo sapiens
tgctttatctaccat

SEQ ID NO: 575571 - DNA, 15 bp, Homo sapiens
gctttatctaccatg

SEQ ID NO: 575572 - DNA, 15 bp, Homo sapiens
ctttatctaccatgt

SEQ ID NO: 575573 - DNA, 15 bp, Homo sapiens
tttatctaccatgtt

SEQ ID NO: 575574 - DNA, 15 bp, Homo sapiens
ttatctaccatgttt

SEQ ID NO: 575575 - DNA, 15 bp, Homo sapiens
tatctaccatgtttg

SEQ ID NO: 575576 - DNA, 15 bp, Homo sapiens
atctaccatgtttgg

SEQ ID NO: 575577 - DNA, 15 bp, Homo sapiens
tctaccatgtttgga

SEQ ID NO: 575578 - DNA, 15 bp, Homo sapiens
ctaccatgtttggaa

SEQ ID NO: 575579 - DNA, 15 bp, Homo sapiens
taccatgtttggaag

SEQ ID NO: 575580 - DNA, 15 bp, Homo sapiens
accatgtttggaagt

SEQ ID NO: 575581 - DNA, 15 bp, Homo sapiens
ccatgtttggaagtc

SEQ ID NO: 575582 - DNA, 15 bp, Homo sapiens
catgtttggaagtca

SEQ ID NO: 575583 - DNA, 15 bp, Homo sapiens
atgtttggaagtcaa

SEQ ID NO: 575584 - DNA, 15 bp, Homo sapiens
tgtttggaagtcaac

SEQ ID NO: 575585 - DNA, 15 bp, Homo sapiens
gtttggaagtcaaca

SEQ ID NO: 575586 - DNA, 15 bp, Homo sapiens
tttggaagtcaacag

SEQ ID NO: 575587 - DNA, 15 bp, Homo sapiens
ttggaagtcaacaga

SEQ ID NO: 575588 - DNA, 15 bp, Homo sapiens
tggaagtcaacagac

SEQ ID NO: 575589 - DNA, 15 bp, Homo sapiens
ggaagtcaacagact

SEQ ID NO: 575590 - DNA, 15 bp, Homo sapiens
gaagtcaacagactt

SEQ ID NO: 575591 - DNA, 15 bp, Homo sapiens
aagtcaacagacttc

SEQ ID NO: 575592 - DNA, 15 bp, Homo sapiens
agtcaacagacttct

SEQ ID NO: 575593 - DNA, 15 bp, Homo sapiens
gtcaacagacttcta

SEQ ID NO: 575594 - DNA, 15 bp, Homo sapiens
tcaacagacttctaa

SEQ ID NO: 575595 - DNA, 15 bp, Homo sapiens
caacagacttctaaa

SEQ ID NO: 575596 - DNA, 15 bp, Homo sapiens
aacagacttctaaaa

SEQ ID NO: 575597 - DNA, 15 bp, Homo sapiens
acagacttctaaaat

SEQ ID NO: 575598 - DNA, 15 bp, Homo sapiens
cagacttctaaaata

SEQ ID NO: 575599 - DNA, 15 bp, Homo sapiens
agacttctaaaatag

SEQ ID NO: 575600 - DNA, 15 bp, Homo sapiens
gacttctaaaataga

SEQ ID NO: 575601 - DNA, 15 bp, Homo sapiens
acttctaaaatagat

SEQ ID NO: 575602 - DNA, 15 bp, Homo sapiens
cttctaaaatagatc

SEQ ID NO: 575603 - DNA, 15 bp, Homo sapiens
ttctaaaatagatca

SEQ ID NO: 575604 - DNA, 15 bp, Homo sapiens
tctaaaatagatcaa

SEQ ID NO: 575605 - DNA, 15 bp, Homo sapiens
ctaaaatagatcaag

SEQ ID NO: 575606 - DNA, 15 bp, Homo sapiens
taaaatagatcaaga

SEQ ID NO: 575607 - DNA, 15 bp, Homo sapiens
aaaatagatcaagaa

SEQ ID NO: 575608 - DNA, 15 bp, Homo sapiens
aaatagatcaagaaa

SEQ ID NO: 575609 - DNA, 15 bp, Homo sapiens
aatagatcaagaaat

SEQ ID NO: 575610 - DNA, 15 bp, Homo sapiens
atagatcaagaaata

SEQ ID NO: 575611 - DNA, 15 bp, Homo sapiens
tagatcaagaaataa

SEQ ID NO: 575612 - DNA, 15 bp, Homo sapiens
agatcaagaaataac

SEQ ID NO: 575613 - DNA, 15 bp, Homo sapiens
gatcaagaaataaca

SEQ ID NO: 575614 - DNA, 15 bp, Homo sapiens
atcaagaaataacat

SEQ ID NO: 575615 - DNA, 15 bp, Homo sapiens
tcaagaaataacatt

SEQ ID NO: 575616 - DNA, 15 bp, Homo sapiens
caagaaataacattc

SEQ ID NO: 575617 - DNA, 15 bp, Homo sapiens
aagaaataacattct

SEQ ID NO: 575618 - DNA, 15 bp, Homo sapiens
agaaataacattcta

SEQ ID NO: 575619 - DNA, 15 bp, Homo sapiens
gaaataacattctaa

SEQ ID NO: 575620 - DNA, 15 bp, Homo sapiens
aaataacattctaaa

SEQ ID NO: 575621 - DNA, 15 bp, Homo sapiens
aataacattctaaat

SEQ ID NO: 575622 - DNA, 15 bp, Homo sapiens
ataacattctaaata

SEQ ID NO: 575623 - DNA, 15 bp, Homo sapiens
taacattctaaatat

SEQ ID NO: 575624 - DNA, 15 bp, Homo sapiens
aacattctaaatata

SEQ ID NO: 575625 - DNA, 15 bp, Homo sapiens
acattctaaatatag

SEQ ID NO: 575626 - DNA, 15 bp, Homo sapiens
cattctaaatataga

SEQ ID NO: 575627 - DNA, 15 bp, Homo sapiens
attctaaatatagag

SEQ ID NO: 575628 - DNA, 15 bp, Homo sapiens
ttctaaatatagagg

SEQ ID NO: 575629 - DNA, 15 bp, Homo sapiens
tctaaatatagaggt

SEQ ID NO: 575630 - DNA, 15 bp, Homo sapiens
ctaaatatagaggta

SEQ ID NO: 575631 - DNA, 15 bp, Homo sapiens
taaatatagaggtaa

SEQ ID NO: 575632 - DNA, 15 bp, Homo sapiens
aaatatagaggtaaa

SEQ ID NO: 575633 - DNA, 15 bp, Homo sapiens
aatatagaggtaaaa

SEQ ID NO: 575634 - DNA, 15 bp, Homo sapiens
atatagaggtaaaat

SEQ ID NO: 575635 - DNA, 15 bp, Homo sapiens
tatagaggtaaaatt

SEQ ID NO: 575636 - DNA, 15 bp, Homo sapiens
atagaggtaaaattg

SEQ ID NO: 575637 - DNA, 15 bp, Homo sapiens
tagaggtaaaattgg

SEQ ID NO: 575638 - DNA, 15 bp, Homo sapiens
agaggtaaaattggg

SEQ ID NO: 575639 - DNA, 15 bp, Homo sapiens
gaggtaaaattggga

SEQ ID NO: 575640 - DNA, 15 bp, Homo sapiens
aggtaaaattgggaa

SEQ ID NO: 575641 - DNA, 15 bp, Homo sapiens
ggtaaaattgggaaa

SEQ ID NO: 575642 - DNA, 15 bp, Homo sapiens
gtaaaattgggaaaa

SEQ ID NO: 575643 - DNA, 15 bp, Homo sapiens
taaaattgggaaaac

SEQ ID NO: 575644 - DNA, 15 bp, Homo sapiens
aaaattgggaaaaca

SEQ ID NO: 575645 - DNA, 15 bp, Homo sapiens
aaattgggaaaacac

SEQ ID NO: 575646 - DNA, 15 bp, Homo sapiens
aattgggaaaacacc

SEQ ID NO: 575647 - DNA, 15 bp, Homo sapiens
attgggaaaacacct

SEQ ID NO: 575648 - DNA, 15 bp, Homo sapiens
ttgggaaaacaccta

SEQ ID NO: 575649 - DNA, 15 bp, Homo sapiens
tgggaaaacacctag

SEQ ID NO: 575650 - DNA, 15 bp, Homo sapiens
gggaaaacacctaga

SEQ ID NO: 575651 - DNA, 15 bp, Homo sapiens
ggaaaacacctagaa

SEQ ID NO: 575652 - DNA, 15 bp, Homo sapiens
gaaaacacctagaag

SEQ ID NO: 575653 - DNA, 15 bp, Homo sapiens
aaaacacctagaagg

SEQ ID NO: 575654 - DNA, 15 bp, Homo sapiens
aaacacctagaagga

SEQ ID NO: 575655 - DNA, 15 bp, Homo sapiens
aacacctagaaggac

SEQ ID NO: 575656 - DNA, 15 bp, Homo sapiens
acacctagaaggact

SEQ ID NO: 575657 - DNA, 15 bp, Homo sapiens
cacctagaaggactg

SEQ ID NO: 575658 - DNA, 15 bp, Homo sapiens
acctagaaggactgg

SEQ ID NO: 575659 - DNA, 15 bp, Homo sapiens
cctagaaggactgga

SEQ ID NO: 575660 - DNA, 15 bp, Homo sapiens
ctagaaggactggag

SEQ ID NO: 575661 - DNA, 15 bp, Homo sapiens
tagaaggactggagt

SEQ ID NO: 575662 - DNA, 15 bp, Homo sapiens
agaaggactggagtt

SEQ ID NO: 575663 - DNA, 15 bp, Homo sapiens
gaaggactggagttg

SEQ ID NO: 575664 - DNA, 15 bp, Homo sapiens
aaggactggagttgg

SEQ ID NO: 575665 - DNA, 15 bp, Homo sapiens
aggactggagttggc

SEQ ID NO: 575666 - DNA, 15 bp, Homo sapiens
ggactggagttggct

SEQ ID NO: 575667 - DNA, 15 bp, Homo sapiens
gactggagttggctg

SEQ ID NO: 575668 - DNA, 15 bp, Homo sapiens
actggagttggctgc

SEQ ID NO: 575669 - DNA, 15 bp, Homo sapiens
ctggagttggctgcc

SEQ ID NO: 575670 - DNA, 15 bp, Homo sapiens
tggagttggctgcct

SEQ ID NO: 575671 - DNA, 15 bp, Homo sapiens
ggagttggctgcctt

SEQ ID NO: 575672 - DNA, 15 bp, Homo sapiens
gagttggctgcctta

SEQ ID NO: 575673 - DNA, 15 bp, Homo sapiens
agttggctgccttaa

SEQ ID NO: 575674 - DNA, 15 bp, Homo sapiens
gttggctgccttaat

SEQ ID NO: 575675 - DNA, 15 bp, Homo sapiens
ttggctgccttaata

SEQ ID NO: 575676 - DNA, 15 bp, Homo sapiens
tggctgccttaatac

SEQ ID NO: 575677 - DNA, 15 bp, Homo sapiens
ggctgccttaatact

SEQ ID NO: 575678 - DNA, 15 bp, Homo sapiens
gctgccttaatactg

SEQ ID NO: 575679 - DNA, 15 bp, Homo sapiens
ctgccttaatactgt

SEQ ID NO: 575680 - DNA, 15 bp, Homo sapiens
tgccttaatactgtc

SEQ ID NO: 575681 - DNA, 15 bp, Homo sapiens
gccttaatactgtct

SEQ ID NO: 575682 - DNA, 15 bp, Homo sapiens
ccttaatactgtctg

SEQ ID NO: 575683 - DNA, 15 bp, Homo sapiens
cttaatactgtctga

SEQ ID NO: 575684 - DNA, 15 bp, Homo sapiens
ttaatactgtctgac

SEQ ID NO: 575685 - DNA, 15 bp, Homo sapiens
taatactgtctgact

SEQ ID NO: 575686 - DNA, 15 bp, Homo sapiens
aatactgtctgactt

SEQ ID NO: 575687 - DNA, 15 bp, Homo sapiens
atactgtctgacttt

SEQ ID NO: 575688 - DNA, 15 bp, Homo sapiens
tactgtctgactttt

SEQ ID NO: 575689 - DNA, 15 bp, Homo sapiens
actgtctgactttta

SEQ ID NO: 575690 - DNA, 15 bp, Homo sapiens
ctgtctgacttttaa

SEQ ID NO: 575691 - DNA, 15 bp, Homo sapiens
tgtctgacttttaaa

SEQ ID NO: 575692 - DNA, 15 bp, Homo sapiens
gtctgacttttaaaa

SEQ ID NO: 575693 - DNA, 15 bp, Homo sapiens
tctgacttttaaaaa

SEQ ID NO: 575694 - DNA, 15 bp, Homo sapiens
ctgacttttaaaaaa

SEQ ID NO: 575695 - DNA, 15 bp, Homo sapiens
tgacttttaaaaaac

SEQ ID NO: 575696 - DNA, 15 bp, Homo sapiens
gacttttaaaaaaca

SEQ ID NO: 575697 - DNA, 15 bp, Homo sapiens
acttttaaaaaacat

SEQ ID NO: 575698 - DNA, 15 bp, Homo sapiens
cttttaaaaaacatt

SEQ ID NO: 575699 - DNA, 15 bp, Homo sapiens
ttttaaaaaacattc

SEQ ID NO: 575700 - DNA, 15 bp, Homo sapiens
tttaaaaaacattct

SEQ ID NO: 575701 - DNA, 15 bp, Homo sapiens
ttaaaaaacattctg

SEQ ID NO: 575702 - DNA, 15 bp, Homo sapiens
taaaaaacattctgt

SEQ ID NO: 575703 - DNA, 15 bp, Homo sapiens
aaaaaacattctgtt

SEQ ID NO: 575704 - DNA, 15 bp, Homo sapiens
aaaaacattctgttc

SEQ ID NO: 575705 - DNA, 15 bp, Homo sapiens
aaaacattctgttca

SEQ ID NO: 575706 - DNA, 15 bp, Homo sapiens
aaacattctgttcat

SEQ ID NO: 575707 - DNA, 15 bp, Homo sapiens
aacattctgttcatg

SEQ ID NO: 575708 - DNA, 15 bp, Homo sapiens
acattctgttcatgt

SEQ ID NO: 575709 - DNA, 15 bp, Homo sapiens
cattctgttcatgta

SEQ ID NO: 575710 - DNA, 15 bp, Homo sapiens
attctgttcatgtat

SEQ ID NO: 575711 - DNA, 15 bp, Homo sapiens
ttctgttcatgtatt

SEQ ID NO: 575712 - DNA, 15 bp, Homo sapiens
tctgttcatgtatta

SEQ ID NO: 575713 - DNA, 15 bp, Homo sapiens
ctgttcatgtattat

SEQ ID NO: 575714 - DNA, 15 bp, Homo sapiens
tgttcatgtattatt

SEQ ID NO: 575715 - DNA, 15 bp, Homo sapiens
gttcatgtattatta

SEQ ID NO: 575716 - DNA, 15 bp, Homo sapiens
ttcatgtattattag

SEQ ID NO: 575717 - DNA, 15 bp, Homo sapiens
tcatgtattattagt

SEQ ID NO: 575718 - DNA, 15 bp, Homo sapiens
catgtattattagtt

SEQ ID NO: 575719 - DNA, 15 bp, Homo sapiens
atgtattattagttt

SEQ ID NO: 575720 - DNA, 15 bp, Homo sapiens
tgtattattagtttg

SEQ ID NO: 575721 - DNA, 15 bp, Homo sapiens
gtattattagtttga

SEQ ID NO: 575722 - DNA, 15 bp, Homo sapiens
tattattagtttgat

SEQ ID NO: 575723 - DNA, 15 bp, Homo sapiens
attattagtttgata

SEQ ID NO: 575724 - DNA, 15 bp, Homo sapiens
ttattagtttgataa

SEQ ID NO: 575725 - DNA, 15 bp, Homo sapiens
tattagtttgataaa

SEQ ID NO: 575726 - DNA, 15 bp, Homo sapiens
attagtttgataaaa

SEQ ID NO: 575727 - DNA, 15 bp, Homo sapiens
ttagtttgataaaac

SEQ ID NO: 575728 - DNA, 15 bp, Homo sapiens
tagtttgataaaact

SEQ ID NO: 575729 - DNA, 15 bp, Homo sapiens
agtttgataaaacta

SEQ ID NO: 575730 - DNA, 15 bp, Homo sapiens
gtttgataaaactaa

SEQ ID NO: 575731 - DNA, 15 bp, Homo sapiens
tttgataaaactaaa

SEQ ID NO: 575732 - DNA, 15 bp, Homo sapiens
ttgataaaactaaac

SEQ ID NO: 575733 - DNA, 15 bp, Homo sapiens
tgataaaactaaaca

SEQ ID NO: 575734 - DNA, 15 bp, Homo sapiens
gataaaactaaacat

SEQ ID NO: 575735 - DNA, 15 bp, Homo sapiens
ataaaactaaacatt

SEQ ID NO: 575736 - DNA, 15 bp, Homo sapiens
taaaactaaacattt

SEQ ID NO: 575737 - DNA, 15 bp, Homo sapiens
aaaactaaacattta

SEQ ID NO: 575738 - DNA, 15 bp, Homo sapiens
aaactaaacatttaa

SEQ ID NO: 575739 - DNA, 15 bp, Homo sapiens
aactaaacatttaac

SEQ ID NO: 575740 - DNA, 15 bp, Homo sapiens
actaaacatttaaca

SEQ ID NO: 575741 - DNA, 15 bp, Homo sapiens
ctaaacatttaacag

SEQ ID NO: 575742 - DNA, 15 bp, Homo sapiens
taaacatttaacaga

SEQ ID NO: 575743 - DNA, 15 bp, Homo sapiens
aaacatttaacagac

SEQ ID NO: 575744 - DNA, 15 bp, Homo sapiens
aacatttaacagact

SEQ ID NO: 575745 - DNA, 15 bp, Homo sapiens
acatttaacagactg

SEQ ID NO: 575746 - DNA, 15 bp, Homo sapiens
catttaacagactgc

SEQ ID NO: 575747 - DNA, 15 bp, Homo sapiens
atttaacagactgca

SEQ ID NO: 575748 - DNA, 15 bp, Homo sapiens
tttaacagactgcag

SEQ ID NO: 575749 - DNA, 15 bp, Homo sapiens
ttaacagactgcagg

SEQ ID NO: 575750 - DNA, 15 bp, Homo sapiens
taacagactgcaggc

SEQ ID NO: 575751 - DNA, 15 bp, Homo sapiens
aacagactgcaggcc

SEQ ID NO: 575752 - DNA, 15 bp, Homo sapiens
acagactgcaggccc

SEQ ID NO: 575753 - DNA, 15 bp, Homo sapiens
cagactgcaggccct

SEQ ID NO: 575754 - DNA, 15 bp, Homo sapiens
agactgcaggccctg

SEQ ID NO: 575755 - DNA, 15 bp, Homo sapiens
gactgcaggccctgg

SEQ ID NO: 575756 - DNA, 15 bp, Homo sapiens
actgcaggccctgga

SEQ ID NO: 575757 - DNA, 15 bp, Homo sapiens
ctgcaggccctggag

SEQ ID NO: 575758 - DNA, 15 bp, Homo sapiens
tgcaggccctggagt

SEQ ID NO: 575759 - DNA, 15 bp, Homo sapiens
gcaggccctggagtt

SEQ ID NO: 575760 - DNA, 15 bp, Homo sapiens
caggccctggagttc

SEQ ID NO: 575761 - DNA, 15 bp, Homo sapiens
aggccctggagttca

SEQ ID NO: 575762 - DNA, 15 bp, Homo sapiens
ggccctggagttcat

SEQ ID NO: 575763 - DNA, 15 bp, Homo sapiens
gccctggagttcatg

SEQ ID NO: 575764 - DNA, 15 bp, Homo sapiens
ccctggagttcatgt

SEQ ID NO: 575765 - DNA, 15 bp, Homo sapiens
cctggagttcatgtc

SEQ ID NO: 575766 - DNA, 15 bp, Homo sapiens
ctggagttcatgtcc

SEQ ID NO: 575767 - DNA, 15 bp, Homo sapiens
tggagttcatgtcct

SEQ ID NO: 575768 - DNA, 15 bp, Homo sapiens
ggagttcatgtccta

SEQ ID NO: 575769 - DNA, 15 bp, Homo sapiens
gagttcatgtcctag

SEQ ID NO: 575770 - DNA, 15 bp, Homo sapiens
agttcatgtcctagt

SEQ ID NO: 575771 - DNA, 15 bp, Homo sapiens
gttcatgtcctagtt

SEQ ID NO: 575772 - DNA, 15 bp, Homo sapiens
ttcatgtcctagttc

SEQ ID NO: 575773 - DNA, 15 bp, Homo sapiens
tcatgtcctagttcc

SEQ ID NO: 575774 - DNA, 15 bp, Homo sapiens
catgtcctagttcca

SEQ ID NO: 575775 - DNA, 15 bp, Homo sapiens
atgtcctagttccac

SEQ ID NO: 575776 - DNA, 15 bp, Homo sapiens
tgtcctagttccacc

SEQ ID NO: 575777 - DNA, 15 bp, Homo sapiens
gtcctagttccacca

SEQ ID NO: 575778 - DNA, 15 bp, Homo sapiens
tcctagttccaccac

SEQ ID NO: 575779 - DNA, 15 bp, Homo sapiens
cctagttccaccact

SEQ ID NO: 575780 - DNA, 15 bp, Homo sapiens
ctagttccaccactg

SEQ ID NO: 575781 - DNA, 15 bp, Homo sapiens
tagttccaccactgt

SEQ ID NO: 575782 - DNA, 15 bp, Homo sapiens
agttccaccactgtg

SEQ ID NO: 575783 - DNA, 15 bp, Homo sapiens
gttccaccactgtgt

SEQ ID NO: 575784 - DNA, 15 bp, Homo sapiens
ttccaccactgtgtg

SEQ ID NO: 575785 - DNA, 15 bp, Homo sapiens
tccaccactgtgtga

SEQ ID NO: 575786 - DNA, 15 bp, Homo sapiens
ccaccactgtgtgac

SEQ ID NO: 575787 - DNA, 15 bp, Homo sapiens
caccactgtgtgacc

SEQ ID NO: 575788 - DNA, 15 bp, Homo sapiens
accactgtgtgacct

SEQ ID NO: 575789 - DNA, 15 bp, Homo sapiens
ccactgtgtgacctt

SEQ ID NO: 575790 - DNA, 15 bp, Homo sapiens
cactgtgtgaccttg

SEQ ID NO: 575791 - DNA, 15 bp, Homo sapiens
actgtgtgaccttga

SEQ ID NO: 575792 - DNA, 15 bp, Homo sapiens
ctgtgtgaccttgag

SEQ ID NO: 575793 - DNA, 15 bp, Homo sapiens
tgtgtgaccttgagt

SEQ ID NO: 575794 - DNA, 15 bp, Homo sapiens
gtgtgaccttgagtt

SEQ ID NO: 575795 - DNA, 15 bp, Homo sapiens
tgtgaccttgagtta

SEQ ID NO: 575796 - DNA, 15 bp, Homo sapiens
gtgaccttgagttaa

SEQ ID NO: 575797 - DNA, 15 bp, Homo sapiens
tgaccttgagttaag

SEQ ID NO: 575798 - DNA, 15 bp, Homo sapiens
gaccttgagttaagt

SEQ ID NO: 575799 - DNA, 15 bp, Homo sapiens
accttgagttaagtt

SEQ ID NO: 575800 - DNA, 15 bp, Homo sapiens
ccttgagttaagtta

SEQ ID NO: 575801 - DNA, 15 bp, Homo sapiens
cttgagttaagttag

SEQ ID NO: 575802 - DNA, 15 bp, Homo sapiens
ttgagttaagttagt

SEQ ID NO: 575803 - DNA, 15 bp, Homo sapiens
tgagttaagttagtg

SEQ ID NO: 575804 - DNA, 15 bp, Homo sapiens
gagttaagttagtga

SEQ ID NO: 575805 - DNA, 15 bp, Homo sapiens
agttaagttagtgaa

SEQ ID NO: 575806 - DNA, 15 bp, Homo sapiens
gttaagttagtgaaa

SEQ ID NO: 575807 - DNA, 15 bp, Homo sapiens
ttaagttagtgaaac

SEQ ID NO: 575808 - DNA, 15 bp, Homo sapiens
taagttagtgaaact

SEQ ID NO: 575809 - DNA, 15 bp, Homo sapiens
aagttagtgaaactc

SEQ ID NO: 575810 - DNA, 15 bp, Homo sapiens
agttagtgaaactct

SEQ ID NO: 575811 - DNA, 15 bp, Homo sapiens
gttagtgaaactctc

SEQ ID NO: 575812 - DNA, 15 bp, Homo sapiens
ttagtgaaactctct

SEQ ID NO: 575813 - DNA, 15 bp, Homo sapiens
tagtgaaactctctc

SEQ ID NO: 575814 - DNA, 15 bp, Homo sapiens
agtgaaactctctct

SEQ ID NO: 575815 - DNA, 15 bp, Homo sapiens
gtgaaactctctctg

SEQ ID NO: 575816 - DNA, 15 bp, Homo sapiens
tgaaactctctctgc

SEQ ID NO: 575817 - DNA, 15 bp, Homo sapiens
gaaactctctctgca

SEQ ID NO: 575818 - DNA, 15 bp, Homo sapiens
aaactctctctgcat

SEQ ID NO: 575819 - DNA, 15 bp, Homo sapiens
aactctctctgcatc

SEQ ID NO: 575820 - DNA, 15 bp, Homo sapiens
actctctctgcatca

SEQ ID NO: 575821 - DNA, 15 bp, Homo sapiens
ctctctctgcatcag

SEQ ID NO: 575822 - DNA, 15 bp, Homo sapiens
tctctctgcatcagt

SEQ ID NO: 575823 - DNA, 15 bp, Homo sapiens
ctctctgcatcagtg

SEQ ID NO: 575824 - DNA, 15 bp, Homo sapiens
tctctgcatcagtgt

SEQ ID NO: 575825 - DNA, 15 bp, Homo sapiens
ctctgcatcagtgtc

SEQ ID NO: 575826 - DNA, 15 bp, Homo sapiens
tctgcatcagtgtcc

SEQ ID NO: 575827 - DNA, 15 bp, Homo sapiens
ctgcatcagtgtcct

SEQ ID NO: 575828 - DNA, 15 bp, Homo sapiens
tgcatcagtgtcctc

SEQ ID NO: 575829 - DNA, 15 bp, Homo sapiens
gcatcagtgtcctca

SEQ ID NO: 575830 - DNA, 15 bp, Homo sapiens
catcagtgtcctcac

SEQ ID NO: 575831 - DNA, 15 bp, Homo sapiens
atcagtgtcctcact

SEQ ID NO: 575832 - DNA, 15 bp, Homo sapiens
tcagtgtcctcactt

SEQ ID NO: 575833 - DNA, 15 bp, Homo sapiens
cagtgtcctcacttg

SEQ ID NO: 575834 - DNA, 15 bp, Homo sapiens
agtgtcctcacttgt

SEQ ID NO: 575835 - DNA, 15 bp, Homo sapiens
gtgtcctcacttgta

SEQ ID NO: 575836 - DNA, 15 bp, Homo sapiens
tgtcctcacttgtac

SEQ ID NO: 575837 - DNA, 15 bp, Homo sapiens
gtcctcacttgtacc

SEQ ID NO: 575838 - DNA, 15 bp, Homo sapiens
tcctcacttgtaccc

SEQ ID NO: 575839 - DNA, 15 bp, Homo sapiens
cctcacttgtaccct

SEQ ID NO: 575840 - DNA, 15 bp, Homo sapiens
ctcacttgtaccctg

SEQ ID NO: 575841 - DNA, 15 bp, Homo sapiens
tcacttgtaccctgg

SEQ ID NO: 575842 - DNA, 15 bp, Homo sapiens
cacttgtaccctggg

SEQ ID NO: 575843 - DNA, 15 bp, Homo sapiens
acttgtaccctggga

SEQ ID NO: 575844 - DNA, 15 bp, Homo sapiens
cttgtaccctgggaa

SEQ ID NO: 575845 - DNA, 15 bp, Homo sapiens
ttgtaccctgggaat

SEQ ID NO: 575846 - DNA, 15 bp, Homo sapiens
tgtaccctgggaatt

SEQ ID NO: 575847 - DNA, 15 bp, Homo sapiens
gtaccctgggaatta

SEQ ID NO: 575848 - DNA, 15 bp, Homo sapiens
taccctgggaattat

SEQ ID NO: 575849 - DNA, 15 bp, Homo sapiens
accctgggaattata

SEQ ID NO: 575850 - DNA, 15 bp, Homo sapiens
ccctgggaattataa

SEQ ID NO: 575851 - DNA, 15 bp, Homo sapiens
cctgggaattataat

SEQ ID NO: 575852 - DNA, 15 bp, Homo sapiens
ctgggaattataata

SEQ ID NO: 575853 - DNA, 15 bp, Homo sapiens
tgggaattataataa

SEQ ID NO: 575854 - DNA, 15 bp, Homo sapiens
gggaattataataat

SEQ ID NO: 575855 - DNA, 15 bp, Homo sapiens
ggaattataataata

SEQ ID NO: 575856 - DNA, 15 bp, Homo sapiens
gaattataataatag

SEQ ID NO: 575857 - DNA, 15 bp, Homo sapiens
aattataataatagg

SEQ ID NO: 575858 - DNA, 15 bp, Homo sapiens
attataataataggt

SEQ ID NO: 575859 - DNA, 15 bp, Homo sapiens
ttataataataggta

SEQ ID NO: 575860 - DNA, 15 bp, Homo sapiens
tataataataggtat

SEQ ID NO: 575861 - DNA, 15 bp, Homo sapiens
ataataataggtatc

SEQ ID NO: 575862 - DNA, 15 bp, Homo sapiens
taataataggtatcc

SEQ ID NO: 575863 - DNA, 15 bp, Homo sapiens
aataataggtatcct

SEQ ID NO: 575864 - DNA, 15 bp, Homo sapiens
ataataggtatcctc

SEQ ID NO: 575865 - DNA, 15 bp, Homo sapiens
taataggtatcctca

SEQ ID NO: 575866 - DNA, 15 bp, Homo sapiens
aataggtatcctcac

SEQ ID NO: 575867 - DNA, 15 bp, Homo sapiens
ataggtatcctcaca

SEQ ID NO: 575868 - DNA, 15 bp, Homo sapiens
taggtatcctcacag

SEQ ID NO: 575869 - DNA, 15 bp, Homo sapiens
aggtatcctcacaga

SEQ ID NO: 575870 - DNA, 15 bp, Homo sapiens
ggtatcctcacagag

SEQ ID NO: 575871 - DNA, 15 bp, Homo sapiens
gtatcctcacagagt

SEQ ID NO: 575872 - DNA, 15 bp, Homo sapiens
tatcctcacagagtt

SEQ ID NO: 575873 - DNA, 15 bp, Homo sapiens
atcctcacagagttg

SEQ ID NO: 575874 - DNA, 15 bp, Homo sapiens
tcctcacagagttgt

SEQ ID NO: 575875 - DNA, 15 bp, Homo sapiens
cctcacagagttgtg

SEQ ID NO: 575876 - DNA, 15 bp, Homo sapiens
ctcacagagttgtga

SEQ ID NO: 575877 - DNA, 15 bp, Homo sapiens
tcacagagttgtgag

SEQ ID NO: 575878 - DNA, 15 bp, Homo sapiens
cacagagttgtgagg

SEQ ID NO: 575879 - DNA, 15 bp, Homo sapiens
acagagttgtgagga

SEQ ID NO: 575880 - DNA, 15 bp, Homo sapiens
cagagttgtgaggat

SEQ ID NO: 575881 - DNA, 15 bp, Homo sapiens
agagttgtgaggatt

SEQ ID NO: 575882 - DNA, 15 bp, Homo sapiens
gagttgtgaggatta

SEQ ID NO: 575883 - DNA, 15 bp, Homo sapiens
agttgtgaggattaa

SEQ ID NO: 575884 - DNA, 15 bp, Homo sapiens
gttgtgaggattaag

SEQ ID NO: 575885 - DNA, 15 bp, Homo sapiens
ttgtgaggattaagt

SEQ ID NO: 575886 - DNA, 15 bp, Homo sapiens
tgtgaggattaagtg

SEQ ID NO: 575887 - DNA, 15 bp, Homo sapiens
gtgaggattaagtga

SEQ ID NO: 575888 - DNA, 15 bp, Homo sapiens
tgaggattaagtgag

SEQ ID NO: 575889 - DNA, 15 bp, Homo sapiens
gaggattaagtgaga

SEQ ID NO: 575890 - DNA, 15 bp, Homo sapiens
aggattaagtgagat

SEQ ID NO: 575891 - DNA, 15 bp, Homo sapiens
ggattaagtgagata

SEQ ID NO: 575892 - DNA, 15 bp, Homo sapiens
gattaagtgagatag

SEQ ID NO: 575893 - DNA, 15 bp, Homo sapiens
attaagtgagataga

SEQ ID NO: 575894 - DNA, 15 bp, Homo sapiens
ttaagtgagatagaa

SEQ ID NO: 575895 - DNA, 15 bp, Homo sapiens
taagtgagatagaat

SEQ ID NO: 575896 - DNA, 15 bp, Homo sapiens
aagtgagatagaata

SEQ ID NO: 575897 - DNA, 15 bp, Homo sapiens
agtgagatagaatat

SEQ ID NO: 575898 - DNA, 15 bp, Homo sapiens
gtgagatagaatatg

SEQ ID NO: 575899 - DNA, 15 bp, Homo sapiens
tgagatagaatatgt

SEQ ID NO: 575900 - DNA, 15 bp, Homo sapiens
gagatagaatatgtc

SEQ ID NO: 575901 - DNA, 15 bp, Homo sapiens
agatagaatatgtca

SEQ ID NO: 575902 - DNA, 15 bp, Homo sapiens
gatagaatatgtcag

SEQ ID NO: 575903 - DNA, 15 bp, Homo sapiens
atagaatatgtcagt

SEQ ID NO: 575904 - DNA, 15 bp, Homo sapiens
tagaatatgtcagtg

SEQ ID NO: 575905 - DNA, 15 bp, Homo sapiens
agaatatgtcagtgc

SEQ ID NO: 575906 - DNA, 15 bp, Homo sapiens
gaatatgtcagtgca

SEQ ID NO: 575907 - DNA, 15 bp, Homo sapiens
aatatgtcagtgcac

SEQ ID NO: 575908 - DNA, 15 bp, Homo sapiens
atatgtcagtgcaca

SEQ ID NO: 575909 - DNA, 15 bp, Homo sapiens
tatgtcagtgcacag

SEQ ID NO: 575910 - DNA, 15 bp, Homo sapiens
atgtcagtgcacagc

SEQ ID NO: 575911 - DNA, 15 bp, Homo sapiens
tgtcagtgcacagca

SEQ ID NO: 575912 - DNA, 15 bp, Homo sapiens
gtcagtgcacagcac

SEQ ID NO: 575913 - DNA, 15 bp, Homo sapiens
tcagtgcacagcaca

SEQ ID NO: 575914 - DNA, 15 bp, Homo sapiens
cagtgcacagcacag

SEQ ID NO: 575915 - DNA, 15 bp, Homo sapiens
agtgcacagcacagg

SEQ ID NO: 575916 - DNA, 15 bp, Homo sapiens
gtgcacagcacaggg

SEQ ID NO: 575917 - DNA, 15 bp, Homo sapiens
tgcacagcacagggc

SEQ ID NO: 575918 - DNA, 15 bp, Homo sapiens
gcacagcacagggcc

SEQ ID NO: 575919 - DNA, 15 bp, Homo sapiens
cacagcacagggcct

SEQ ID NO: 575920 - DNA, 15 bp, Homo sapiens
acagcacagggcctg

SEQ ID NO: 575921 - DNA, 15 bp, Homo sapiens
cagcacagggcctgg

SEQ ID NO: 575922 - DNA, 15 bp, Homo sapiens
agcacagggcctggc

SEQ ID NO: 575923 - DNA, 15 bp, Homo sapiens
gcacagggcctggca

SEQ ID NO: 575924 - DNA, 15 bp, Homo sapiens
cacagggcctggcac

SEQ ID NO: 575925 - DNA, 15 bp, Homo sapiens
acagggcctggcacg

SEQ ID NO: 575926 - DNA, 15 bp, Homo sapiens
cagggcctggcacga

SEQ ID NO: 575927 - DNA, 15 bp, Homo sapiens
agggcctggcacgag

SEQ ID NO: 575928 - DNA, 15 bp, Homo sapiens
gggcctggcacgagc

SEQ ID NO: 575929 - DNA, 15 bp, Homo sapiens
ggcctggcacgagct

SEQ ID NO: 575930 - DNA, 15 bp, Homo sapiens
gcctggcacgagctc

SEQ ID NO: 575931 - DNA, 15 bp, Homo sapiens
cctggcacgagctca

SEQ ID NO: 575932 - DNA, 15 bp, Homo sapiens
ctggcacgagctcaa

SEQ ID NO: 575933 - DNA, 15 bp, Homo sapiens
tggcacgagctcaac

SEQ ID NO: 575934 - DNA, 15 bp, Homo sapiens
ggcacgagctcaaca

SEQ ID NO: 575935 - DNA, 15 bp, Homo sapiens
gcacgagctcaacaa

SEQ ID NO: 575936 - DNA, 15 bp, Homo sapiens
cacgagctcaacaaa

SEQ ID NO: 575937 - DNA, 15 bp, Homo sapiens
acgagctcaacaaat

SEQ ID NO: 575938 - DNA, 15 bp, Homo sapiens
cgagctcaacaaatg

SEQ ID NO: 575939 - DNA, 15 bp, Homo sapiens
gagctcaacaaatgc

SEQ ID NO: 575940 - DNA, 15 bp, Homo sapiens
agctcaacaaatgct

SEQ ID NO: 575941 - DNA, 15 bp, Homo sapiens
gctcaacaaatgcta

SEQ ID NO: 575942 - DNA, 15 bp, Homo sapiens
ctcaacaaatgctat

SEQ ID NO: 575943 - DNA, 15 bp, Homo sapiens
tcaacaaatgctatt

SEQ ID NO: 575944 - DNA, 15 bp, Homo sapiens
caacaaatgctatta

SEQ ID NO: 575945 - DNA, 15 bp, Homo sapiens
aacaaatgctattat

SEQ ID NO: 575946 - DNA, 15 bp, Homo sapiens
acaaatgctattatt

SEQ ID NO: 575947 - DNA, 15 bp, Homo sapiens
caaatgctattattg

SEQ ID NO: 575948 - DNA, 15 bp, Homo sapiens
aaatgctattattgt

SEQ ID NO: 575949 - DNA, 15 bp, Homo sapiens
aatgctattattgtt

SEQ ID NO: 575950 - DNA, 15 bp, Homo sapiens
atgctattattgttt

SEQ ID NO: 575951 - DNA, 15 bp, Homo sapiens
tgctattattgtttc

SEQ ID NO: 575952 - DNA, 15 bp, Homo sapiens
gctattattgtttct

SEQ ID NO: 575953 - DNA, 15 bp, Homo sapiens
ctattattgtttcta

SEQ ID NO: 575954 - DNA, 15 bp, Homo sapiens
tattattgtttctat

SEQ ID NO: 575955 - DNA, 15 bp, Homo sapiens
attattgtttctatt

SEQ ID NO: 575956 - DNA, 15 bp, Homo sapiens
ttattgtttctattt

SEQ ID NO: 575957 - DNA, 15 bp, Homo sapiens
tattgtttctatttt

SEQ ID NO: 575958 - DNA, 15 bp, Homo sapiens
attgtttctattttc

SEQ ID NO: 575959 - DNA, 15 bp, Homo sapiens
ttgtttctattttcc

SEQ ID NO: 575960 - DNA, 15 bp, Homo sapiens
tgtttctattttccc

SEQ ID NO: 575961 - DNA, 15 bp, Homo sapiens
gtttctattttcccc

SEQ ID NO: 575962 - DNA, 15 bp, Homo sapiens
tttctattttcccct

SEQ ID NO: 575963 - DNA, 15 bp, Homo sapiens
ttctattttcccctc

SEQ ID NO: 575964 - DNA, 15 bp, Homo sapiens
tctattttcccctca

SEQ ID NO: 575965 - DNA, 15 bp, Homo sapiens
ctattttcccctcaa

SEQ ID NO: 575966 - DNA, 15 bp, Homo sapiens
tattttcccctcaag

SEQ ID NO: 575967 - DNA, 15 bp, Homo sapiens
attttcccctcaagg

SEQ ID NO: 575968 - DNA, 15 bp, Homo sapiens
ttttcccctcaagga

SEQ ID NO: 575969 - DNA, 15 bp, Homo sapiens
tttcccctcaaggaa

SEQ ID NO: 575970 - DNA, 15 bp, Homo sapiens
ttcccctcaaggaaa

SEQ ID NO: 575971 - DNA, 15 bp, Homo sapiens
tcccctcaaggaaaa

SEQ ID NO: 575972 - DNA, 15 bp, Homo sapiens
cccctcaaggaaaac

SEQ ID NO: 575973 - DNA, 15 bp, Homo sapiens
ccctcaaggaaaaca

SEQ ID NO: 575974 - DNA, 15 bp, Homo sapiens
cctcaaggaaaacag

SEQ ID NO: 575975 - DNA, 15 bp, Homo sapiens
ctcaaggaaaacagg

SEQ ID NO: 575976 - DNA, 15 bp, Homo sapiens
tcaaggaaaacagga

SEQ ID NO: 575977 - DNA, 15 bp, Homo sapiens
caaggaaaacaggag

SEQ ID NO: 575978 - DNA, 15 bp, Homo sapiens
aaggaaaacaggagc

SEQ ID NO: 575979 - DNA, 15 bp, Homo sapiens
aggaaaacaggagct

SEQ ID NO: 575980 - DNA, 15 bp, Homo sapiens
ggaaaacaggagctg

SEQ ID NO: 575981 - DNA, 15 bp, Homo sapiens
gaaaacaggagctgt

SEQ ID NO: 575982 - DNA, 15 bp, Homo sapiens
aaaacaggagctgtc

SEQ ID NO: 575983 - DNA, 15 bp, Homo sapiens
aaacaggagctgtca

SEQ ID NO: 575984 - DNA, 15 bp, Homo sapiens
aacaggagctgtcag

SEQ ID NO: 575985 - DNA, 15 bp, Homo sapiens
acaggagctgtcaga

SEQ ID NO: 575986 - DNA, 15 bp, Homo sapiens
caggagctgtcagag

SEQ ID NO: 575987 - DNA, 15 bp, Homo sapiens
aggagctgtcagagg

SEQ ID NO: 575988 - DNA, 15 bp, Homo sapiens
ggagctgtcagaggt

SEQ ID NO: 575989 - DNA, 15 bp, Homo sapiens
gagctgtcagaggtt

SEQ ID NO: 575990 - DNA, 15 bp, Homo sapiens
agctgtcagaggttt

SEQ ID NO: 575991 - DNA, 15 bp, Homo sapiens
gctgtcagaggtttt

SEQ ID NO: 575992 - DNA, 15 bp, Homo sapiens
ctgtcagaggttttt

SEQ ID NO: 575993 - DNA, 15 bp, Homo sapiens
tgtcagaggtttttt

SEQ ID NO: 575994 - DNA, 15 bp, Homo sapiens
gtcagaggttttttt

SEQ ID NO: 575995 - DNA, 15 bp, Homo sapiens
tcagaggtttttttg

SEQ ID NO: 575996 - DNA, 15 bp, Homo sapiens
cagaggtttttttgt

SEQ ID NO: 575997 - DNA, 15 bp, Homo sapiens
agaggtttttttgtt

SEQ ID NO: 575998 - DNA, 15 bp, Homo sapiens
gaggtttttttgttt

SEQ ID NO: 575999 - DNA, 15 bp, Homo sapiens
aggtttttttgtttg

SEQ ID NO: 576000 - DNA, 15 bp, Homo sapiens
ggtttttttgtttgt

SEQ ID NO: 576001 - DNA, 15 bp, Homo sapiens
gtttttttgtttgtt

SEQ ID NO: 576002 - DNA, 15 bp, Homo sapiens
tttttgtttgttttt

SEQ ID NO: 576003 - DNA, 15 bp, Homo sapiens
ttttgtttgtttttc

SEQ ID NO: 576004 - DNA, 15 bp, Homo sapiens
tttgtttgtttttct

SEQ ID NO: 576005 - DNA, 15 bp, Homo sapiens
ttgtttgtttttctt

SEQ ID NO: 576006 - DNA, 15 bp, Homo sapiens
tgtttgtttttcttt

SEQ ID NO: 576007 - DNA, 15 bp, Homo sapiens
gtttgtttttctttg

SEQ ID NO: 576008 - DNA, 15 bp, Homo sapiens
tttgtttttctttga

SEQ ID NO: 576009 - DNA, 15 bp, Homo sapiens
ttgtttttctttgag

SEQ ID NO: 576010 - DNA, 15 bp, Homo sapiens
tgtttttctttgaga

SEQ ID NO: 576011 - DNA, 15 bp, Homo sapiens
gtttttctttgagac

SEQ ID NO: 576012 - DNA, 15 bp, Homo sapiens
tttttctttgagaca

SEQ ID NO: 576013 - DNA, 15 bp, Homo sapiens
ttttctttgagacag

SEQ ID NO: 576014 - DNA, 15 bp, Homo sapiens
tttctttgagacaga

SEQ ID NO: 576015 - DNA, 15 bp, Homo sapiens
ttctttgagacagag

SEQ ID NO: 576016 - DNA, 15 bp, Homo sapiens
tctttgagacagagt

SEQ ID NO: 576017 - DNA, 15 bp, Homo sapiens
ctttgagacagagtc

SEQ ID NO: 576018 - DNA, 15 bp, Homo sapiens
tttgagacagagtct

SEQ ID NO: 576019 - DNA, 15 bp, Homo sapiens
ttgagacagagtctc

SEQ ID NO: 576020 - DNA, 15 bp, Homo sapiens
tgagacagagtctct

SEQ ID NO: 576021 - DNA, 15 bp, Homo sapiens
gagacagagtctctc

SEQ ID NO: 576022 - DNA, 15 bp, Homo sapiens
agacagagtctctct

SEQ ID NO: 576023 - DNA, 15 bp, Homo sapiens
gacagagtctctctc

SEQ ID NO: 576024 - DNA, 15 bp, Homo sapiens
acagagtctctctct

SEQ ID NO: 576025 - DNA, 15 bp, Homo sapiens
cagagtctctctctg

SEQ ID NO: 576026 - DNA, 15 bp, Homo sapiens
agagtctctctctgt

SEQ ID NO: 576027 - DNA, 15 bp, Homo sapiens
gagtctctctctgtt

SEQ ID NO: 576028 - DNA, 15 bp, Homo sapiens
agtctctctctgttg

SEQ ID NO: 576029 - DNA, 15 bp, Homo sapiens
gtctctctctgttgc

SEQ ID NO: 576030 - DNA, 15 bp, Homo sapiens
tctctctctgttgcc

SEQ ID NO: 576031 - DNA, 15 bp, Homo sapiens
ctctctctgttgccc

SEQ ID NO: 576032 - DNA, 15 bp, Homo sapiens
tctctctgttgccca

SEQ ID NO: 576033 - DNA, 15 bp, Homo sapiens
ctctctgttgcccag

SEQ ID NO: 576034 - DNA, 15 bp, Homo sapiens
tctctgttgcccagg

SEQ ID NO: 576035 - DNA, 15 bp, Homo sapiens
ctctgttgcccaggc

SEQ ID NO: 576036 - DNA, 15 bp, Homo sapiens
tctgttgcccaggct

SEQ ID NO: 576037 - DNA, 15 bp, Homo sapiens
ctgttgcccaggctg

SEQ ID NO: 576038 - DNA, 15 bp, Homo sapiens
tggagtgcagtggcc

SEQ ID NO: 576039 - DNA, 15 bp, Homo sapiens
ggagtgcagtggcct

SEQ ID NO: 576040 - DNA, 15 bp, Homo sapiens
gagtgcagtggcctg

SEQ ID NO: 576041 - DNA, 15 bp, Homo sapiens
agtgcagtggcctga

SEQ ID NO: 576042 - DNA, 15 bp, Homo sapiens
gtgcagtggcctgat

SEQ ID NO: 576043 - DNA, 15 bp, Homo sapiens
tgcagtggcctgatc

SEQ ID NO: 576044 - DNA, 15 bp, Homo sapiens
gcagtggcctgatct

SEQ ID NO: 576045 - DNA, 15 bp, Homo sapiens
cagtggcctgatctc

SEQ ID NO: 576046 - DNA, 15 bp, Homo sapiens
agtggcctgatctca

SEQ ID NO: 576047 - DNA, 15 bp, Homo sapiens
gtggcctgatctcag

SEQ ID NO: 576048 - DNA, 15 bp, Homo sapiens
tggcctgatctcagc

SEQ ID NO: 576049 - DNA, 15 bp, Homo sapiens
ggcctgatctcagct

SEQ ID NO: 576050 - DNA, 15 bp, Homo sapiens
gcctgatctcagctc

SEQ ID NO: 576051 - DNA, 15 bp, Homo sapiens
cctgatctcagctca

SEQ ID NO: 576052 - DNA, 15 bp, Homo sapiens
ctgatctcagctcac

SEQ ID NO: 576053 - DNA, 15 bp, Homo sapiens
tgatctcagctcact

SEQ ID NO: 576054 - DNA, 15 bp, Homo sapiens
gatctcagctcactg

SEQ ID NO: 576055 - DNA, 15 bp, Homo sapiens
ctcactgcaacctct

SEQ ID NO: 576056 - DNA, 15 bp, Homo sapiens
tcactgcaacctctg

SEQ ID NO: 576057 - DNA, 15 bp, Homo sapiens
cactgcaacctctgc

SEQ ID NO: 576058 - DNA, 15 bp, Homo sapiens
actgcaacctctgcc

SEQ ID NO: 576059 - DNA, 15 bp, Homo sapiens
ctgcaacctctgcct

SEQ ID NO: 576060 - DNA, 15 bp, Homo sapiens
tgcaacctctgcctc

SEQ ID NO: 576061 - DNA, 15 bp, Homo sapiens
tctgcctcccaggtt

SEQ ID NO: 576062 - DNA, 15 bp, Homo sapiens
ctgcctcccaggttc

SEQ ID NO: 576063 - DNA, 15 bp, Homo sapiens
tgcctcccaggttca

SEQ ID NO: 576064 - DNA, 15 bp, Homo sapiens
ctcccaggttcaagc

SEQ ID NO: 576065 - DNA, 15 bp, Homo sapiens
tcccaggttcaagct

SEQ ID NO: 576066 - DNA, 15 bp, Homo sapiens
cccaggttcaagcta

SEQ ID NO: 576067 - DNA, 15 bp, Homo sapiens
ccaggttcaagctat

SEQ ID NO: 576068 - DNA, 15 bp, Homo sapiens
caggttcaagctatt

SEQ ID NO: 576069 - DNA, 15 bp, Homo sapiens
aggttcaagctattc

SEQ ID NO: 576070 - DNA, 15 bp, Homo sapiens
ggttcaagctattct

SEQ ID NO: 576071 - DNA, 15 bp, Homo sapiens
gttcaagctattctc

SEQ ID NO: 576072 - DNA, 15 bp, Homo sapiens
ttcaagctattctcc

SEQ ID NO: 576073 - DNA, 15 bp, Homo sapiens
tcaagctattctcct

SEQ ID NO: 576074 - DNA, 15 bp, Homo sapiens
caagctattctcctg

SEQ ID NO: 576075 - DNA, 15 bp, Homo sapiens
aagctattctcctgc

SEQ ID NO: 576076 - DNA, 15 bp, Homo sapiens
agctattctcctgcc

SEQ ID NO: 576077 - DNA, 15 bp, Homo sapiens
gctattctcctgcct

SEQ ID NO: 576078 - DNA, 15 bp, Homo sapiens
ctattctcctgcctc

SEQ ID NO: 576079 - DNA, 15 bp, Homo sapiens
tattctcctgcctca

SEQ ID NO: 576080 - DNA, 15 bp, Homo sapiens
ctgcctcagcctcct

SEQ ID NO: 576081 - DNA, 15 bp, Homo sapiens
tgcctcagcctcctg

SEQ ID NO: 576082 - DNA, 15 bp, Homo sapiens
gcctcagcctcctga

SEQ ID NO: 576083 - DNA, 15 bp, Homo sapiens
cctcagcctcctgag

SEQ ID NO: 576084 - DNA, 15 bp, Homo sapiens
ctcagcctcctgagt

SEQ ID NO: 576085 - DNA, 15 bp, Homo sapiens
tcagcctcctgagta

SEQ ID NO: 576086 - DNA, 15 bp, Homo sapiens
cagcctcctgagtag

SEQ ID NO: 576087 - DNA, 15 bp, Homo sapiens
ctcctgagtagctgg

SEQ ID NO: 576088 - DNA, 15 bp, Homo sapiens
tcctgagtagctggg

SEQ ID NO: 576089 - DNA, 15 bp, Homo sapiens
cctgagtagctggga

SEQ ID NO: 576090 - DNA, 15 bp, Homo sapiens
ctgagtagctgggat

SEQ ID NO: 576091 - DNA, 15 bp, Homo sapiens
tgagtagctgggatt

SEQ ID NO: 576092 - DNA, 15 bp, Homo sapiens
agtagctgggattat

SEQ ID NO: 576093 - DNA, 15 bp, Homo sapiens
gtagctgggattata

SEQ ID NO: 576094 - DNA, 15 bp, Homo sapiens
tagctgggattatag

SEQ ID NO: 576095 - DNA, 15 bp, Homo sapiens
agctgggattatagg

SEQ ID NO: 576096 - DNA, 15 bp, Homo sapiens
gctgggattataggc

SEQ ID NO: 576097 - DNA, 15 bp, Homo sapiens
ctgggattataggca

SEQ ID NO: 576098 - DNA, 15 bp, Homo sapiens
tgggattataggcac

SEQ ID NO: 576099 - DNA, 15 bp, Homo sapiens
gggattataggcacc

SEQ ID NO: 576100 - DNA, 15 bp, Homo sapiens
ggattataggcacct

SEQ ID NO: 576101 - DNA, 15 bp, Homo sapiens
gattataggcacctg

SEQ ID NO: 576102 - DNA, 15 bp, Homo sapiens
attataggcacctgc

SEQ ID NO: 576103 - DNA, 15 bp, Homo sapiens
ttataggcacctgcc

SEQ ID NO: 576104 - DNA, 15 bp, Homo sapiens
tataggcacctgcca

SEQ ID NO: 576105 - DNA, 15 bp, Homo sapiens
ataggcacctgccac

SEQ ID NO: 576106 - DNA, 15 bp, Homo sapiens
taggcacctgccacc

SEQ ID NO: 576107 - DNA, 15 bp, Homo sapiens
aggcacctgccacca

SEQ ID NO: 576108 - DNA, 15 bp, Homo sapiens
ggcacctgccaccac

SEQ ID NO: 576109 - DNA, 15 bp, Homo sapiens
gcacctgccaccacg

SEQ ID NO: 576110 - DNA, 15 bp, Homo sapiens
cacctgccaccacgc

SEQ ID NO: 576111 - DNA, 15 bp, Homo sapiens
acctgccaccacgcc

SEQ ID NO: 576112 - DNA, 15 bp, Homo sapiens
cctgccaccacgccc

SEQ ID NO: 576113 - DNA, 15 bp, Homo sapiens
ctgccaccacgccca

SEQ ID NO: 576114 - DNA, 15 bp, Homo sapiens
tgccaccacgcccag

SEQ ID NO: 576115 - DNA, 15 bp, Homo sapiens
gccaccacgcccagc

SEQ ID NO: 576116 - DNA, 15 bp, Homo sapiens
ccaccacgcccagct

SEQ ID NO: 576117 - DNA, 15 bp, Homo sapiens
caccacgcccagcta

SEQ ID NO: 576118 - DNA, 15 bp, Homo sapiens
accacgcccagctaa

SEQ ID NO: 576119 - DNA, 15 bp, Homo sapiens
ccacgcccagctaat

SEQ ID NO: 576120 - DNA, 15 bp, Homo sapiens
cacgcccagctaatt

SEQ ID NO: 576121 - DNA, 15 bp, Homo sapiens
acgcccagctaattt

SEQ ID NO: 576122 - DNA, 15 bp, Homo sapiens
cgcccagctaatttt

SEQ ID NO: 576123 - DNA, 15 bp, Homo sapiens
gcccagctaattttt

SEQ ID NO: 576124 - DNA, 15 bp, Homo sapiens
cccagctaatttttg

SEQ ID NO: 576125 - DNA, 15 bp, Homo sapiens
ccagctaatttttgt

SEQ ID NO: 576126 - DNA, 15 bp, Homo sapiens
cagctaatttttgta

SEQ ID NO: 576127 - DNA, 15 bp, Homo sapiens
agctaatttttgtat

SEQ ID NO: 576128 - DNA, 15 bp, Homo sapiens
gctaatttttgtatt

SEQ ID NO: 576129 - DNA, 15 bp, Homo sapiens
ctaatttttgtattt

SEQ ID NO: 576130 - DNA, 15 bp, Homo sapiens
taatttttgtatttt

SEQ ID NO: 576131 - DNA, 15 bp, Homo sapiens
aatttttgtattttt

SEQ ID NO: 576132 - DNA, 15 bp, Homo sapiens
atttttgtattttta

SEQ ID NO: 576133 - DNA, 15 bp, Homo sapiens
gtatttttagtagac

SEQ ID NO: 576134 - DNA, 15 bp, Homo sapiens
tatttttagtagaca

SEQ ID NO: 576135 - DNA, 15 bp, Homo sapiens
atttttagtagacag

SEQ ID NO: 576136 - DNA, 15 bp, Homo sapiens
tttttagtagacagg

SEQ ID NO: 576137 - DNA, 15 bp, Homo sapiens
ttttagtagacaggg

SEQ ID NO: 576138 - DNA, 15 bp, Homo sapiens
tttagtagacagggt

SEQ ID NO: 576139 - DNA, 15 bp, Homo sapiens
ttagtagacagggtt

SEQ ID NO: 576140 - DNA, 15 bp, Homo sapiens
tagtagacagggttt

SEQ ID NO: 576141 - DNA, 15 bp, Homo sapiens
agtagacagggtttc

SEQ ID NO: 576142 - DNA, 15 bp, Homo sapiens
gtagacagggtttca

SEQ ID NO: 576143 - DNA, 15 bp, Homo sapiens
tagacagggtttcac

SEQ ID NO: 576144 - DNA, 15 bp, Homo sapiens
agacagggtttcacc

SEQ ID NO: 576145 - DNA, 15 bp, Homo sapiens
gacagggtttcacca

SEQ ID NO: 576146 - DNA, 15 bp, Homo sapiens
acagggtttcaccat

SEQ ID NO: 576147 - DNA, 15 bp, Homo sapiens
cagggtttcaccatg

SEQ ID NO: 576148 - DNA, 15 bp, Homo sapiens
agggtttcaccatgt

SEQ ID NO: 576149 - DNA, 15 bp, Homo sapiens
gccaggctggtctct

SEQ ID NO: 576150 - DNA, 15 bp, Homo sapiens
ccaggctggtctcta

SEQ ID NO: 576151 - DNA, 15 bp, Homo sapiens
caggctggtctctat

SEQ ID NO: 576152 - DNA, 15 bp, Homo sapiens
aggctggtctctatt

SEQ ID NO: 576153 - DNA, 15 bp, Homo sapiens
ggctggtctctattt

SEQ ID NO: 576154 - DNA, 15 bp, Homo sapiens
gctggtctctatttc

SEQ ID NO: 576155 - DNA, 15 bp, Homo sapiens
ctggtctctatttcc

SEQ ID NO: 576156 - DNA, 15 bp, Homo sapiens
tggtctctatttcct

SEQ ID NO: 576157 - DNA, 15 bp, Homo sapiens
ggtctctatttcctg

SEQ ID NO: 576158 - DNA, 15 bp, Homo sapiens
gtctctatttcctga

SEQ ID NO: 576159 - DNA, 15 bp, Homo sapiens
tctctatttcctgac

SEQ ID NO: 576160 - DNA, 15 bp, Homo sapiens
ctctatttcctgacc

SEQ ID NO: 576161 - DNA, 15 bp, Homo sapiens
tctatttcctgacct

SEQ ID NO: 576162 - DNA, 15 bp, Homo sapiens
ctatttcctgacctc

SEQ ID NO: 576163 - DNA, 15 bp, Homo sapiens
tatttcctgacctcg

SEQ ID NO: 576164 - DNA, 15 bp, Homo sapiens
atttcctgacctcgt

SEQ ID NO: 576165 - DNA, 15 bp, Homo sapiens
tttcctgacctcgtg

SEQ ID NO: 576166 - DNA, 15 bp, Homo sapiens
ttcctgacctcgtga

SEQ ID NO: 576167 - DNA, 15 bp, Homo sapiens
tcctgacctcgtgat

SEQ ID NO: 576168 - DNA, 15 bp, Homo sapiens
cctgacctcgtgatc

SEQ ID NO: 576169 - DNA, 15 bp, Homo sapiens
ctgacctcgtgatcc

SEQ ID NO: 576170 - DNA, 15 bp, Homo sapiens
tgacctcgtgatcca

SEQ ID NO: 576171 - DNA, 15 bp, Homo sapiens
gacctcgtgatccac

SEQ ID NO: 576172 - DNA, 15 bp, Homo sapiens
acctcgtgatccacc

SEQ ID NO: 576173 - DNA, 15 bp, Homo sapiens
cctcgtgatccaccc

SEQ ID NO: 576174 - DNA, 15 bp, Homo sapiens
ctcgtgatccaccca

SEQ ID NO: 576175 - DNA, 15 bp, Homo sapiens
tcgtgatccacccat

SEQ ID NO: 576176 - DNA, 15 bp, Homo sapiens
cgtgatccacccatg

SEQ ID NO: 576177 - DNA, 15 bp, Homo sapiens
gtgatccacccatgt

SEQ ID NO: 576178 - DNA, 15 bp, Homo sapiens
tgatccacccatgtt

SEQ ID NO: 576179 - DNA, 15 bp, Homo sapiens
gatccacccatgttg

SEQ ID NO: 576180 - DNA, 15 bp, Homo sapiens
atccacccatgttgg

SEQ ID NO: 576181 - DNA, 15 bp, Homo sapiens
tccacccatgttggc

SEQ ID NO: 576182 - DNA, 15 bp, Homo sapiens
ccacccatgttggcc

SEQ ID NO: 576183 - DNA, 15 bp, Homo sapiens
cacccatgttggcct

SEQ ID NO: 576184 - DNA, 15 bp, Homo sapiens
acccatgttggcctc

SEQ ID NO: 576185 - DNA, 15 bp, Homo sapiens
cccatgttggcctcc

SEQ ID NO: 576186 - DNA, 15 bp, Homo sapiens
ccatgttggcctccc

SEQ ID NO: 576187 - DNA, 15 bp, Homo sapiens
catgttggcctccca

SEQ ID NO: 576188 - DNA, 15 bp, Homo sapiens
atgttggcctcccaa

SEQ ID NO: 576189 - DNA, 15 bp, Homo sapiens
tgttggcctcccaaa

SEQ ID NO: 576190 - DNA, 15 bp, Homo sapiens
gttggcctcccaaag

SEQ ID NO: 576191 - DNA, 15 bp, Homo sapiens
aaagtgctgggattg

SEQ ID NO: 576192 - DNA, 15 bp, Homo sapiens
aagtgctgggattgc

SEQ ID NO: 576193 - DNA, 15 bp, Homo sapiens
agtgctgggattgcc

SEQ ID NO: 576194 - DNA, 15 bp, Homo sapiens
gtgctgggattgccg

SEQ ID NO: 576195 - DNA, 15 bp, Homo sapiens
tgctgggattgccgg

SEQ ID NO: 576196 - DNA, 15 bp, Homo sapiens
gctgggattgccggg

SEQ ID NO: 576197 - DNA, 15 bp, Homo sapiens
ctgggattgccgggc

SEQ ID NO: 576198 - DNA, 15 bp, Homo sapiens
tgggattgccgggca

SEQ ID NO: 576199 - DNA, 15 bp, Homo sapiens
gggattgccgggcat

SEQ ID NO: 576200 - DNA, 15 bp, Homo sapiens
ggattgccgggcatg

SEQ ID NO: 576201 - DNA, 15 bp, Homo sapiens
gattgccgggcatgg

SEQ ID NO: 576202 - DNA, 15 bp, Homo sapiens
attgccgggcatggt

SEQ ID NO: 576203 - DNA, 15 bp, Homo sapiens
ttgccgggcatggtg

SEQ ID NO: 576204 - DNA, 15 bp, Homo sapiens
tgccgggcatggtgg

SEQ ID NO: 576205 - DNA, 15 bp, Homo sapiens
gccgggcatggtggc

SEQ ID NO: 576206 - DNA, 15 bp, Homo sapiens
ccgggcatggtggct

SEQ ID NO: 576207 - DNA, 15 bp, Homo sapiens
cgggcatggtggctc

SEQ ID NO: 576208 - DNA, 15 bp, Homo sapiens
gggcatggtggctca

SEQ ID NO: 576209 - DNA, 15 bp, Homo sapiens
ggcatggtggctcat

SEQ ID NO: 576210 - DNA, 15 bp, Homo sapiens
gcatggtggctcata

SEQ ID NO: 576211 - DNA, 15 bp, Homo sapiens
catggtggctcatac

SEQ ID NO: 576212 - DNA, 15 bp, Homo sapiens
atggtggctcatacc

SEQ ID NO: 576213 - DNA, 15 bp, Homo sapiens
tggtggctcatacct

SEQ ID NO: 576214 - DNA, 15 bp, Homo sapiens
ggtggctcatacctg

SEQ ID NO: 576215 - DNA, 15 bp, Homo sapiens
gtggctcatacctgt

SEQ ID NO: 576216 - DNA, 15 bp, Homo sapiens
tggctcatacctgta

SEQ ID NO: 576217 - DNA, 15 bp, Homo sapiens
ggctcatacctgtaa

SEQ ID NO: 576218 - DNA, 15 bp, Homo sapiens
gctcatacctgtaat

SEQ ID NO: 576219 - DNA, 15 bp, Homo sapiens
ctcatacctgtaatc

SEQ ID NO: 576220 - DNA, 15 bp, Homo sapiens
tcatacctgtaatcc

SEQ ID NO: 576221 - DNA, 15 bp, Homo sapiens
catacctgtaatccc

SEQ ID NO: 576222 - DNA, 15 bp, Homo sapiens
atacctgtaatccca

SEQ ID NO: 576223 - DNA, 15 bp, Homo sapiens
tacctgtaatcccag

SEQ ID NO: 576224 - DNA, 15 bp, Homo sapiens
acctgtaatcccagc

SEQ ID NO: 576225 - DNA, 15 bp, Homo sapiens
atcccagcactttgg

SEQ ID NO: 576226 - DNA, 15 bp, Homo sapiens
tcccagcactttggg

SEQ ID NO: 576227 - DNA, 15 bp, Homo sapiens
cccagcactttggga

SEQ ID NO: 576228 - DNA, 15 bp, Homo sapiens
ccagcactttgggag

SEQ ID NO: 576229 - DNA, 15 bp, Homo sapiens
cagcactttgggagg

SEQ ID NO: 576230 - DNA, 15 bp, Homo sapiens
agcactttgggaggc

SEQ ID NO: 576231 - DNA, 15 bp, Homo sapiens
gcactttgggaggcc

SEQ ID NO: 576232 - DNA, 15 bp, Homo sapiens
cactttgggaggcca

SEQ ID NO: 576233 - DNA, 15 bp, Homo sapiens
actttgggaggccaa

SEQ ID NO: 576234 - DNA, 15 bp, Homo sapiens
ctttgggaggccaat

SEQ ID NO: 576235 - DNA, 15 bp, Homo sapiens
tttgggaggccaatg

SEQ ID NO: 576236 - DNA, 15 bp, Homo sapiens
ttgggaggccaatgt

SEQ ID NO: 576237 - DNA, 15 bp, Homo sapiens
tgggaggccaatgtg

SEQ ID NO: 576238 - DNA, 15 bp, Homo sapiens
gggaggccaatgtgg

SEQ ID NO: 576239 - DNA, 15 bp, Homo sapiens
ggaggccaatgtggg

SEQ ID NO: 576240 - DNA, 15 bp, Homo sapiens
gaggccaatgtgggc

SEQ ID NO: 576241 - DNA, 15 bp, Homo sapiens
aggccaatgtgggcg

SEQ ID NO: 576242 - DNA, 15 bp, Homo sapiens
ggccaatgtgggcgg

SEQ ID NO: 576243 - DNA, 15 bp, Homo sapiens
gccaatgtgggcgga

SEQ ID NO: 576244 - DNA, 15 bp, Homo sapiens
ccaatgtgggcggat

SEQ ID NO: 576245 - DNA, 15 bp, Homo sapiens
caatgtgggcggatc

SEQ ID NO: 576246 - DNA, 15 bp, Homo sapiens
aatgtgggcggatca

SEQ ID NO: 576247 - DNA, 15 bp, Homo sapiens
atgtgggcggatcac

SEQ ID NO: 576248 - DNA, 15 bp, Homo sapiens
tgtgggcggatcacc

SEQ ID NO: 576249 - DNA, 15 bp, Homo sapiens
gtgggcggatcacct

SEQ ID NO: 576250 - DNA, 15 bp, Homo sapiens
tgggcggatcacctg

SEQ ID NO: 576251 - DNA, 15 bp, Homo sapiens
gggcggatcacctga

SEQ ID NO: 576252 - DNA, 15 bp, Homo sapiens
ggcggatcacctgag

SEQ ID NO: 576253 - DNA, 15 bp, Homo sapiens
gcggatcacctgagg

SEQ ID NO: 576254 - DNA, 15 bp, Homo sapiens
cggatcacctgaggt

SEQ ID NO: 576255 - DNA, 15 bp, Homo sapiens
ggatcacctgaggtc

SEQ ID NO: 576256 - DNA, 15 bp, Homo sapiens
gatcacctgaggtcg

SEQ ID NO: 576257 - DNA, 15 bp, Homo sapiens
atcacctgaggtcgg

SEQ ID NO: 576258 - DNA, 15 bp, Homo sapiens
tcacctgaggtcggg

SEQ ID NO: 576259 - DNA, 15 bp, Homo sapiens
cacctgaggtcggga

SEQ ID NO: 576260 - DNA, 15 bp, Homo sapiens
acctgaggtcgggag

SEQ ID NO: 576261 - DNA, 15 bp, Homo sapiens
cctgaggtcgggagt

SEQ ID NO: 576262 - DNA, 15 bp, Homo sapiens
ctgaggtcgggagtt

SEQ ID NO: 576263 - DNA, 15 bp, Homo sapiens
tgaggtcgggagttc

SEQ ID NO: 576264 - DNA, 15 bp, Homo sapiens
gaggtcgggagttcg

SEQ ID NO: 576265 - DNA, 15 bp, Homo sapiens
aggtcgggagttcga

SEQ ID NO: 576266 - DNA, 15 bp, Homo sapiens
ggtcgggagttcgag

SEQ ID NO: 576267 - DNA, 15 bp, Homo sapiens
gtcgggagttcgaga

SEQ ID NO: 576268 - DNA, 15 bp, Homo sapiens
tcgggagttcgagac

SEQ ID NO: 576269 - DNA, 15 bp, Homo sapiens
cgggagttcgagacc

SEQ ID NO: 576270 - DNA, 15 bp, Homo sapiens
gggagttcgagacca

SEQ ID NO: 576271 - DNA, 15 bp, Homo sapiens
tcgagaccagcctga

SEQ ID NO: 576272 - DNA, 15 bp, Homo sapiens
cgagaccagcctgac

SEQ ID NO: 576273 - DNA, 15 bp, Homo sapiens
gagaccagcctgacc

SEQ ID NO: 576274 - DNA, 15 bp, Homo sapiens
agaccagcctgacca

SEQ ID NO: 576275 - DNA, 15 bp, Homo sapiens
gaccagcctgaccaa

SEQ ID NO: 576276 - DNA, 15 bp, Homo sapiens
accagcctgaccaac

SEQ ID NO: 576277 - DNA, 15 bp, Homo sapiens
ccagcctgaccaaca

SEQ ID NO: 576278 - DNA, 15 bp, Homo sapiens
cagcctgaccaacat

SEQ ID NO: 576279 - DNA, 15 bp, Homo sapiens
agcctgaccaacatg

SEQ ID NO: 576280 - DNA, 15 bp, Homo sapiens
gcctgaccaacatgg

SEQ ID NO: 576281 - DNA, 15 bp, Homo sapiens
cctgaccaacatgga

SEQ ID NO: 576282 - DNA, 15 bp, Homo sapiens
ctgaccaacatggag

SEQ ID NO: 576283 - DNA, 15 bp, Homo sapiens
tgaccaacatggaga

SEQ ID NO: 576284 - DNA, 15 bp, Homo sapiens
gaccaacatggagaa

SEQ ID NO: 576285 - DNA, 15 bp, Homo sapiens
accaacatggagaaa

SEQ ID NO: 576286 - DNA, 15 bp, Homo sapiens
ccaacatggagaaac

SEQ ID NO: 576287 - DNA, 15 bp, Homo sapiens
caacatggagaaacc

SEQ ID NO: 576288 - DNA, 15 bp, Homo sapiens
aacatggagaaaccc

SEQ ID NO: 576289 - DNA, 15 bp, Homo sapiens
acatggagaaacccc

SEQ ID NO: 576290 - DNA, 15 bp, Homo sapiens
catggagaaaccccg

SEQ ID NO: 576291 - DNA, 15 bp, Homo sapiens
atggagaaaccccgt

SEQ ID NO: 576292 - DNA, 15 bp, Homo sapiens
tggagaaaccccgtc

SEQ ID NO: 576293 - DNA, 15 bp, Homo sapiens
ggagaaaccccgtct

SEQ ID NO: 576294 - DNA, 15 bp, Homo sapiens
gagaaaccccgtctc

SEQ ID NO: 576295 - DNA, 15 bp, Homo sapiens
agaaaccccgtctct

SEQ ID NO: 576296 - DNA, 15 bp, Homo sapiens
ttcaaatgtgacttg

SEQ ID NO: 576297 - DNA, 15 bp, Homo sapiens
tcaaatgtgacttga

SEQ ID NO: 576298 - DNA, 15 bp, Homo sapiens
caaatgtgacttgaa

SEQ ID NO: 576299 - DNA, 15 bp, Homo sapiens
aaatgtgacttgaag

SEQ ID NO: 576300 - DNA, 15 bp, Homo sapiens
aatgtgacttgaagt

SEQ ID NO: 576301 - DNA, 15 bp, Homo sapiens
atgtgacttgaagtt

SEQ ID NO: 576302 - DNA, 15 bp, Homo sapiens
tgtgacttgaagtta

SEQ ID NO: 576303 - DNA, 15 bp, Homo sapiens
gtgacttgaagttaa

SEQ ID NO: 576304 - DNA, 15 bp, Homo sapiens
tgacttgaagttaag

SEQ ID NO: 576305 - DNA, 15 bp, Homo sapiens
gacttgaagttaagt

SEQ ID NO: 576306 - DNA, 15 bp, Homo sapiens
acttgaagttaagtt

SEQ ID NO: 576307 - DNA, 15 bp, Homo sapiens
cttgaagttaagttg

SEQ ID NO: 576308 - DNA, 15 bp, Homo sapiens
ttgaagttaagttga

SEQ ID NO: 576309 - DNA, 15 bp, Homo sapiens
tgaagttaagttgaa

SEQ ID NO: 576310 - DNA, 15 bp, Homo sapiens
gaagttaagttgaag

SEQ ID NO: 576311 - DNA, 15 bp, Homo sapiens
aagttaagttgaagg

SEQ ID NO: 576312 - DNA, 15 bp, Homo sapiens
agttaagttgaagga

SEQ ID NO: 576313 - DNA, 15 bp, Homo sapiens
gttaagttgaaggaa

SEQ ID NO: 576314 - DNA, 15 bp, Homo sapiens
ttaagttgaaggaaa

SEQ ID NO: 576315 - DNA, 15 bp, Homo sapiens
taagttgaaggaaaa

SEQ ID NO: 576316 - DNA, 15 bp, Homo sapiens
aagttgaaggaaaac

SEQ ID NO: 576317 - DNA, 15 bp, Homo sapiens
agttgaaggaaaact

SEQ ID NO: 576318 - DNA, 15 bp, Homo sapiens
gttgaaggaaaactg

SEQ ID NO: 576319 - DNA, 15 bp, Homo sapiens
ttgaaggaaaactgt

SEQ ID NO: 576320 - DNA, 15 bp, Homo sapiens
tgaaggaaaactgta

SEQ ID NO: 576321 - DNA, 15 bp, Homo sapiens
gaaggaaaactgtac

SEQ ID NO: 576322 - DNA, 15 bp, Homo sapiens
aaggaaaactgtaca

SEQ ID NO: 576323 - DNA, 15 bp, Homo sapiens
aggaaaactgtacac

SEQ ID NO: 576324 - DNA, 15 bp, Homo sapiens
ggaaaactgtacaca

SEQ ID NO: 576325 - DNA, 15 bp, Homo sapiens
gaaaactgtacacaa

SEQ ID NO: 576326 - DNA, 15 bp, Homo sapiens
aaaactgtacacaaa

SEQ ID NO: 576327 - DNA, 15 bp, Homo sapiens
aaactgtacacaaat

SEQ ID NO: 576328 - DNA, 15 bp, Homo sapiens
aactgtacacaaata

SEQ ID NO: 576329 - DNA, 15 bp, Homo sapiens
actgtacacaaatag

SEQ ID NO: 576330 - DNA, 15 bp, Homo sapiens
ctgtacacaaatagt

SEQ ID NO: 576331 - DNA, 15 bp, Homo sapiens
tgtacacaaatagtt

SEQ ID NO: 576332 - DNA, 15 bp, Homo sapiens
gtacacaaatagttc

SEQ ID NO: 576333 - DNA, 15 bp, Homo sapiens
tacacaaatagttcc

SEQ ID NO: 576334 - DNA, 15 bp, Homo sapiens
acacaaatagttcct

SEQ ID NO: 576335 - DNA, 15 bp, Homo sapiens
cacaaatagttccta

SEQ ID NO: 576336 - DNA, 15 bp, Homo sapiens
acaaatagttcctaa

SEQ ID NO: 576337 - DNA, 15 bp, Homo sapiens
caaatagttcctaac

SEQ ID NO: 576338 - DNA, 15 bp, Homo sapiens
aaatagttcctaacc

SEQ ID NO: 576339 - DNA, 15 bp, Homo sapiens
aatagttcctaacca

SEQ ID NO: 576340 - DNA, 15 bp, Homo sapiens
atagttcctaaccag

SEQ ID NO: 576341 - DNA, 15 bp, Homo sapiens
tagttcctaaccagg

SEQ ID NO: 576342 - DNA, 15 bp, Homo sapiens
agttcctaaccaggt

SEQ ID NO: 576343 - DNA, 15 bp, Homo sapiens
gttcctaaccaggtg

SEQ ID NO: 576344 - DNA, 15 bp, Homo sapiens
ttcctaaccaggtgc

SEQ ID NO: 576345 - DNA, 15 bp, Homo sapiens
tcctaaccaggtgca

SEQ ID NO: 576346 - DNA, 15 bp, Homo sapiens
cctaaccaggtgcag

SEQ ID NO: 576347 - DNA, 15 bp, Homo sapiens
ctaaccaggtgcagt

SEQ ID NO: 576348 - DNA, 15 bp, Homo sapiens
taaccaggtgcagtg

SEQ ID NO: 576349 - DNA, 15 bp, Homo sapiens
aaccaggtgcagtgg

SEQ ID NO: 576350 - DNA, 15 bp, Homo sapiens
accaggtgcagtggc

SEQ ID NO: 576351 - DNA, 15 bp, Homo sapiens
ccaggtgcagtggct

SEQ ID NO: 576352 - DNA, 15 bp, Homo sapiens
caggtgcagtggctc

SEQ ID NO: 576353 - DNA, 15 bp, Homo sapiens
aggtgcagtggctca

SEQ ID NO: 576354 - DNA, 15 bp, Homo sapiens
ggtgcagtggctcac

SEQ ID NO: 576355 - DNA, 15 bp, Homo sapiens
gtgcagtggctcacg

SEQ ID NO: 576356 - DNA, 15 bp, Homo sapiens
tgcagtggctcacgc

SEQ ID NO: 576357 - DNA, 15 bp, Homo sapiens
gcagtggctcacgcc

SEQ ID NO: 576358 - DNA, 15 bp, Homo sapiens
cagtggctcacgcct

SEQ ID NO: 576359 - DNA, 15 bp, Homo sapiens
agtggctcacgccta

SEQ ID NO: 576360 - DNA, 15 bp, Homo sapiens
gtggctcacgcctat

SEQ ID NO: 576361 - DNA, 15 bp, Homo sapiens
tggctcacgcctata

SEQ ID NO: 576362 - DNA, 15 bp, Homo sapiens
ggctcacgcctataa

SEQ ID NO: 576363 - DNA, 15 bp, Homo sapiens
gctcacgcctataac

SEQ ID NO: 576364 - DNA, 15 bp, Homo sapiens
ctcacgcctataacc

SEQ ID NO: 576365 - DNA, 15 bp, Homo sapiens
tcacgcctataaccc

SEQ ID NO: 576366 - DNA, 15 bp, Homo sapiens
cacgcctataacccc

SEQ ID NO: 576367 - DNA, 15 bp, Homo sapiens
acgcctataacccca

SEQ ID NO: 576368 - DNA, 15 bp, Homo sapiens
cgcctataaccccaa

SEQ ID NO: 576369 - DNA, 15 bp, Homo sapiens
gcctataaccccaac

SEQ ID NO: 576370 - DNA, 15 bp, Homo sapiens
cctataaccccaaca

SEQ ID NO: 576371 - DNA, 15 bp, Homo sapiens
ctataaccccaacac

SEQ ID NO: 576372 - DNA, 15 bp, Homo sapiens
tataaccccaacact

SEQ ID NO: 576373 - DNA, 15 bp, Homo sapiens
ataaccccaacactt

SEQ ID NO: 576374 - DNA, 15 bp, Homo sapiens
taaccccaacacttt

SEQ ID NO: 576375 - DNA, 15 bp, Homo sapiens
aaccccaacactttg

SEQ ID NO: 576376 - DNA, 15 bp, Homo sapiens
accccaacactttgg

SEQ ID NO: 576377 - DNA, 15 bp, Homo sapiens
ccccaacactttggg

SEQ ID NO: 576378 - DNA, 15 bp, Homo sapiens
cccaacactttggga

SEQ ID NO: 576379 - DNA, 15 bp, Homo sapiens
ccaacactttgggag

SEQ ID NO: 576380 - DNA, 15 bp, Homo sapiens
caacactttgggagg

SEQ ID NO: 576381 - DNA, 15 bp, Homo sapiens
aacactttgggaggc

SEQ ID NO: 576382 - DNA, 15 bp, Homo sapiens
acactttgggaggcc

SEQ ID NO: 576383 - DNA, 15 bp, Homo sapiens
ctttgggaggccaag

SEQ ID NO: 576384 - DNA, 15 bp, Homo sapiens
tttgggaggccaagg

SEQ ID NO: 576385 - DNA, 15 bp, Homo sapiens
ttgggaggccaaggt

SEQ ID NO: 576386 - DNA, 15 bp, Homo sapiens
tgggaggccaaggtg

SEQ ID NO: 576387 - DNA, 15 bp, Homo sapiens
gggaggccaaggtgg

SEQ ID NO: 576388 - DNA, 15 bp, Homo sapiens
ggaggccaaggtggg

SEQ ID NO: 576389 - DNA, 15 bp, Homo sapiens
gaggccaaggtgggg

SEQ ID NO: 576390 - DNA, 15 bp, Homo sapiens
aggccaaggtggggc

SEQ ID NO: 576391 - DNA, 15 bp, Homo sapiens
ggccaaggtggggca

SEQ ID NO: 576392 - DNA, 15 bp, Homo sapiens
gccaaggtggggcag

SEQ ID NO: 576393 - DNA, 15 bp, Homo sapiens
ccaaggtggggcaga

SEQ ID NO: 576394 - DNA, 15 bp, Homo sapiens
caaggtggggcagat

SEQ ID NO: 576395 - DNA, 15 bp, Homo sapiens
aaggtggggcagatc

SEQ ID NO: 576396 - DNA, 15 bp, Homo sapiens
aggtggggcagatca

SEQ ID NO: 576397 - DNA, 15 bp, Homo sapiens
ggtggggcagatcac

SEQ ID NO: 576398 - DNA, 15 bp, Homo sapiens
gtggggcagatcact

SEQ ID NO: 576399 - DNA, 15 bp, Homo sapiens
tggggcagatcactt

SEQ ID NO: 576400 - DNA, 15 bp, Homo sapiens
ggggcagatcacttg

SEQ ID NO: 576401 - DNA, 15 bp, Homo sapiens
gggcagatcacttga

SEQ ID NO: 576402 - DNA, 15 bp, Homo sapiens
ggcagatcacttgag

SEQ ID NO: 576403 - DNA, 15 bp, Homo sapiens
gcagatcacttgagg

SEQ ID NO: 576404 - DNA, 15 bp, Homo sapiens
cagatcacttgaggc

SEQ ID NO: 576405 - DNA, 15 bp, Homo sapiens
agatcacttgaggcc

SEQ ID NO: 576406 - DNA, 15 bp, Homo sapiens
gatcacttgaggcca

SEQ ID NO: 576407 - DNA, 15 bp, Homo sapiens
atcacttgaggccag

SEQ ID NO: 576408 - DNA, 15 bp, Homo sapiens
tcacttgaggccagg

SEQ ID NO: 576409 - DNA, 15 bp, Homo sapiens
cacttgaggccagga

SEQ ID NO: 576410 - DNA, 15 bp, Homo sapiens
acttgaggccaggag

SEQ ID NO: 576411 - DNA, 15 bp, Homo sapiens
cttgaggccaggagt

SEQ ID NO: 576412 - DNA, 15 bp, Homo sapiens
ttgaggccaggagtt

SEQ ID NO: 576413 - DNA, 15 bp, Homo sapiens
tgaggccaggagttc

SEQ ID NO: 576414 - DNA, 15 bp, Homo sapiens
gaggccaggagttca

SEQ ID NO: 576415 - DNA, 15 bp, Homo sapiens
aggccaggagttcaa

SEQ ID NO: 576416 - DNA, 15 bp, Homo sapiens
ggccaggagttcaag

SEQ ID NO: 576417 - DNA, 15 bp, Homo sapiens
gccaggagttcaaga

SEQ ID NO: 576418 - DNA, 15 bp, Homo sapiens
ccaggagttcaagac

SEQ ID NO: 576419 - DNA, 15 bp, Homo sapiens
caggagttcaagacc

SEQ ID NO: 576420 - DNA, 15 bp, Homo sapiens
aggagttcaagacca

SEQ ID NO: 576421 - DNA, 15 bp, Homo sapiens
ggagttcaagaccag

SEQ ID NO: 576422 - DNA, 15 bp, Homo sapiens
gagttcaagaccagc

SEQ ID NO: 576423 - DNA, 15 bp, Homo sapiens
agttcaagaccagcc

SEQ ID NO: 576424 - DNA, 15 bp, Homo sapiens
gttcaagaccagcct

SEQ ID NO: 576425 - DNA, 15 bp, Homo sapiens
ttcaagaccagcctg

SEQ ID NO: 576426 - DNA, 15 bp, Homo sapiens
tcaagaccagcctgg

SEQ ID NO: 576427 - DNA, 15 bp, Homo sapiens
caagaccagcctggc

SEQ ID NO: 576428 - DNA, 15 bp, Homo sapiens
aagaccagcctggcc

SEQ ID NO: 576429 - DNA, 15 bp, Homo sapiens
gcctggccaacatgg

SEQ ID NO: 576430 - DNA, 15 bp, Homo sapiens
cctggccaacatggt

SEQ ID NO: 576431 - DNA, 15 bp, Homo sapiens
ctggccaacatggtg

SEQ ID NO: 576432 - DNA, 15 bp, Homo sapiens
tggccaacatggtga

SEQ ID NO: 576433 - DNA, 15 bp, Homo sapiens
ggccaacatggtgaa

SEQ ID NO: 576434 - DNA, 15 bp, Homo sapiens
gccaacatggtgaaa

SEQ ID NO: 576435 - DNA, 15 bp, Homo sapiens
ccaacatggtgaaac

SEQ ID NO: 576436 - DNA, 15 bp, Homo sapiens
caacatggtgaaacc

SEQ ID NO: 576437 - DNA, 15 bp, Homo sapiens
aacatggtgaaaccc

SEQ ID NO: 576438 - DNA, 15 bp, Homo sapiens
acatggtgaaaccct

SEQ ID NO: 576439 - DNA, 15 bp, Homo sapiens
catggtgaaaccctg

SEQ ID NO: 576440 - DNA, 15 bp, Homo sapiens
atggtgaaaccctgt

SEQ ID NO: 576441 - DNA, 15 bp, Homo sapiens
tggtgaaaccctgtc

SEQ ID NO: 576442 - DNA, 15 bp, Homo sapiens
ggtgaaaccctgtct

SEQ ID NO: 576443 - DNA, 15 bp, Homo sapiens
gtgaaaccctgtctc

SEQ ID NO: 576444 - DNA, 15 bp, Homo sapiens
tgaaaccctgtctct

SEQ ID NO: 576445 - DNA, 15 bp, Homo sapiens
gaaaccctgtctcta

SEQ ID NO: 576446 - DNA, 15 bp, Homo sapiens
aaaccctgtctctac

SEQ ID NO: 576447 - DNA, 15 bp, Homo sapiens
aaccctgtctctact

SEQ ID NO: 576448 - DNA, 15 bp, Homo sapiens
accctgtctctacta

SEQ ID NO: 576449 - DNA, 15 bp, Homo sapiens
ccctgtctctactaa

SEQ ID NO: 576450 - DNA, 15 bp, Homo sapiens
cctgtctctactaaa

SEQ ID NO: 576451 - DNA, 15 bp, Homo sapiens
ctgtctctactaaaa

SEQ ID NO: 576452 - DNA, 15 bp, Homo sapiens
tgtctctactaaaaa

SEQ ID NO: 576453 - DNA, 15 bp, Homo sapiens
taaaaatacaaaaat

SEQ ID NO: 576454 - DNA, 15 bp, Homo sapiens
aaaaatacaaaaatt

SEQ ID NO: 576455 - DNA, 15 bp, Homo sapiens
aaaatacaaaaatta

SEQ ID NO: 576456 - DNA, 15 bp, Homo sapiens
aaatacaaaaattaa

SEQ ID NO: 576457 - DNA, 15 bp, Homo sapiens
aatacaaaaattaac

SEQ ID NO: 576458 - DNA, 15 bp, Homo sapiens
atacaaaaattaact

SEQ ID NO: 576459 - DNA, 15 bp, Homo sapiens
tacaaaaattaacta

SEQ ID NO: 576460 - DNA, 15 bp, Homo sapiens
acaaaaattaactag

SEQ ID NO: 576461 - DNA, 15 bp, Homo sapiens
caaaaattaactagg

SEQ ID NO: 576462 - DNA, 15 bp, Homo sapiens
aaaaattaactaggt

SEQ ID NO: 576463 - DNA, 15 bp, Homo sapiens
aaaattaactaggtg

SEQ ID NO: 576464 - DNA, 15 bp, Homo sapiens
aaattaactaggtgt

SEQ ID NO: 576465 - DNA, 15 bp, Homo sapiens
aattaactaggtgtg

SEQ ID NO: 576466 - DNA, 15 bp, Homo sapiens
attaactaggtgtgt

SEQ ID NO: 576467 - DNA, 15 bp, Homo sapiens
ttaactaggtgtgtt

SEQ ID NO: 576468 - DNA, 15 bp, Homo sapiens
taactaggtgtgttg

SEQ ID NO: 576469 - DNA, 15 bp, Homo sapiens
aactaggtgtgttgg

SEQ ID NO: 576470 - DNA, 15 bp, Homo sapiens
actaggtgtgttggc

SEQ ID NO: 576471 - DNA, 15 bp, Homo sapiens
ctaggtgtgttggcg

SEQ ID NO: 576472 - DNA, 15 bp, Homo sapiens
taggtgtgttggcgc

SEQ ID NO: 576473 - DNA, 15 bp, Homo sapiens
aggtgtgttggcgca

SEQ ID NO: 576474 - DNA, 15 bp, Homo sapiens
ggtgtgttggcgcac

SEQ ID NO: 576475 - DNA, 15 bp, Homo sapiens
gtgtgttggcgcaca

SEQ ID NO: 576476 - DNA, 15 bp, Homo sapiens
tgtgttggcgcacac

SEQ ID NO: 576477 - DNA, 15 bp, Homo sapiens
gtgttggcgcacacc

SEQ ID NO: 576478 - DNA, 15 bp, Homo sapiens
tgttggcgcacacct

SEQ ID NO: 576479 - DNA, 15 bp, Homo sapiens
gttggcgcacacctg

SEQ ID NO: 576480 - DNA, 15 bp, Homo sapiens
ttggcgcacacctgt

SEQ ID NO: 576481 - DNA, 15 bp, Homo sapiens
tggcgcacacctgta

SEQ ID NO: 576482 - DNA, 15 bp, Homo sapiens
ggcgcacacctgtaa

SEQ ID NO: 576483 - DNA, 15 bp, Homo sapiens
gcgcacacctgtaat

SEQ ID NO: 576484 - DNA, 15 bp, Homo sapiens
cgcacacctgtaatc

SEQ ID NO: 576485 - DNA, 15 bp, Homo sapiens
gcacacctgtaatcc

SEQ ID NO: 576486 - DNA, 15 bp, Homo sapiens
cacacctgtaatccc

SEQ ID NO: 576487 - DNA, 15 bp, Homo sapiens
acacctgtaatccca

SEQ ID NO: 576488 - DNA, 15 bp, Homo sapiens
cacctgtaatcccag

SEQ ID NO: 576489 - DNA, 15 bp, Homo sapiens
aatcccagctactca

SEQ ID NO: 576490 - DNA, 15 bp, Homo sapiens
atcccagctactcag

SEQ ID NO: 576491 - DNA, 15 bp, Homo sapiens
ctcaggaggctgaga

SEQ ID NO: 576492 - DNA, 15 bp, Homo sapiens
tcaggaggctgagac

SEQ ID NO: 576493 - DNA, 15 bp, Homo sapiens
caggaggctgagaca

SEQ ID NO: 576494 - DNA, 15 bp, Homo sapiens
aggaggctgagacat

SEQ ID NO: 576495 - DNA, 15 bp, Homo sapiens
ggaggctgagacatg

SEQ ID NO: 576496 - DNA, 15 bp, Homo sapiens
gaggctgagacatga

SEQ ID NO: 576497 - DNA, 15 bp, Homo sapiens
aggctgagacatgaa

SEQ ID NO: 576498 - DNA, 15 bp, Homo sapiens
ggctgagacatgaaa

SEQ ID NO: 576499 - DNA, 15 bp, Homo sapiens
gctgagacatgaaaa

SEQ ID NO: 576500 - DNA, 15 bp, Homo sapiens
ctgagacatgaaaat

SEQ ID NO: 576501 - DNA, 15 bp, Homo sapiens
tgagacatgaaaatc

SEQ ID NO: 576502 - DNA, 15 bp, Homo sapiens
gagacatgaaaatca

SEQ ID NO: 576503 - DNA, 15 bp, Homo sapiens
agacatgaaaatcac

SEQ ID NO: 576504 - DNA, 15 bp, Homo sapiens
gacatgaaaatcact

SEQ ID NO: 576505 - DNA, 15 bp, Homo sapiens
acatgaaaatcactt

SEQ ID NO: 576506 - DNA, 15 bp, Homo sapiens
catgaaaatcacttg

SEQ ID NO: 576507 - DNA, 15 bp, Homo sapiens
atgaaaatcacttga

SEQ ID NO: 576508 - DNA, 15 bp, Homo sapiens
tgaaaatcacttgaa

SEQ ID NO: 576509 - DNA, 15 bp, Homo sapiens
gaaaatcacttgaac

SEQ ID NO: 576510 - DNA, 15 bp, Homo sapiens
aaaatcacttgaacc

SEQ ID NO: 576511 - DNA, 15 bp, Homo sapiens
aaatcacttgaaccc

SEQ ID NO: 576512 - DNA, 15 bp, Homo sapiens
aatcacttgaaccca

SEQ ID NO: 576513 - DNA, 15 bp, Homo sapiens
atcacttgaacccag

SEQ ID NO: 576514 - DNA, 15 bp, Homo sapiens
tcacttgaacccagg

SEQ ID NO: 576515 - DNA, 15 bp, Homo sapiens
cacttgaacccagga

SEQ ID NO: 576516 - DNA, 15 bp, Homo sapiens
acttgaacccaggag

SEQ ID NO: 576517 - DNA, 15 bp, Homo sapiens
cttgaacccaggagg

SEQ ID NO: 576518 - DNA, 15 bp, Homo sapiens
ttgaacccaggaggt

SEQ ID NO: 576519 - DNA, 15 bp, Homo sapiens
tgaacccaggaggta

SEQ ID NO: 576520 - DNA, 15 bp, Homo sapiens
gaacccaggaggtag

SEQ ID NO: 576521 - DNA, 15 bp, Homo sapiens
aacccaggaggtaga

SEQ ID NO: 576522 - DNA, 15 bp, Homo sapiens
acccaggaggtagag

SEQ ID NO: 576523 - DNA, 15 bp, Homo sapiens
cccaggaggtagagg

SEQ ID NO: 576524 - DNA, 15 bp, Homo sapiens
ccaggaggtagaggt

SEQ ID NO: 576525 - DNA, 15 bp, Homo sapiens
caggaggtagaggtt

SEQ ID NO: 576526 - DNA, 15 bp, Homo sapiens
aggaggtagaggttg

SEQ ID NO: 576527 - DNA, 15 bp, Homo sapiens
ggaggtagaggttgc

SEQ ID NO: 576528 - DNA, 15 bp, Homo sapiens
gaggtagaggttgca

SEQ ID NO: 576529 - DNA, 15 bp, Homo sapiens
aggtagaggttgcag

SEQ ID NO: 576530 - DNA, 15 bp, Homo sapiens
ggtagaggttgcagt

SEQ ID NO: 576531 - DNA, 15 bp, Homo sapiens
gtagaggttgcagtg

SEQ ID NO: 576532 - DNA, 15 bp, Homo sapiens
tagaggttgcagtga

SEQ ID NO: 576533 - DNA, 15 bp, Homo sapiens
agaggttgcagtgag

SEQ ID NO: 576534 - DNA, 15 bp, Homo sapiens
aggttgcagtgagcc

SEQ ID NO: 576535 - DNA, 15 bp, Homo sapiens
ggttgcagtgagcca

SEQ ID NO: 576536 - DNA, 15 bp, Homo sapiens
gttgcagtgagccaa

SEQ ID NO: 576537 - DNA, 15 bp, Homo sapiens
ttgcagtgagccaag

SEQ ID NO: 576538 - DNA, 15 bp, Homo sapiens
tgcagtgagccaaga

SEQ ID NO: 576539 - DNA, 15 bp, Homo sapiens
gcagtgagccaagat

SEQ ID NO: 576540 - DNA, 15 bp, Homo sapiens
cagtgagccaagatc

SEQ ID NO: 576541 - DNA, 15 bp, Homo sapiens
agtgagccaagatcg

SEQ ID NO: 576542 - DNA, 15 bp, Homo sapiens
gtgagccaagatcgc

SEQ ID NO: 576543 - DNA, 15 bp, Homo sapiens
tgagccaagatcgcg

SEQ ID NO: 576544 - DNA, 15 bp, Homo sapiens
gagccaagatcgcgc

SEQ ID NO: 576545 - DNA, 15 bp, Homo sapiens
agccaagatcgcgcc

SEQ ID NO: 576546 - DNA, 15 bp, Homo sapiens
gccaagatcgcgcca

SEQ ID NO: 576547 - DNA, 15 bp, Homo sapiens
ccaagatcgcgccat

SEQ ID NO: 576548 - DNA, 15 bp, Homo sapiens
caagatcgcgccatt

SEQ ID NO: 576549 - DNA, 15 bp, Homo sapiens
aagatcgcgccattg

SEQ ID NO: 576550 - DNA, 15 bp, Homo sapiens
tccagcctgggcaag

SEQ ID NO: 576551 - DNA, 15 bp, Homo sapiens
ccagcctgggcaaga

SEQ ID NO: 576552 - DNA, 15 bp, Homo sapiens
cagcctgggcaagag

SEQ ID NO: 576553 - DNA, 15 bp, Homo sapiens
agcctgggcaagaga

SEQ ID NO: 576554 - DNA, 15 bp, Homo sapiens
gcctgggcaagagag

SEQ ID NO: 576555 - DNA, 15 bp, Homo sapiens
cctgggcaagagagt

SEQ ID NO: 576556 - DNA, 15 bp, Homo sapiens
ctgggcaagagagtg

SEQ ID NO: 576557 - DNA, 15 bp, Homo sapiens
tgggcaagagagtga

SEQ ID NO: 576558 - DNA, 15 bp, Homo sapiens
gggcaagagagtgag

SEQ ID NO: 576559 - DNA, 15 bp, Homo sapiens
ggcaagagagtgaga

SEQ ID NO: 576560 - DNA, 15 bp, Homo sapiens
gcaagagagtgagac

SEQ ID NO: 576561 - DNA, 15 bp, Homo sapiens
caagagagtgagacg

SEQ ID NO: 576562 - DNA, 15 bp, Homo sapiens
aagagagtgagacgc

SEQ ID NO: 576563 - DNA, 15 bp, Homo sapiens
agagagtgagacgct

SEQ ID NO: 576564 - DNA, 15 bp, Homo sapiens
gagagtgagacgctg

SEQ ID NO: 576565 - DNA, 15 bp, Homo sapiens
agagtgagacgctgt

SEQ ID NO: 576566 - DNA, 15 bp, Homo sapiens
gagtgagacgctgtc

SEQ ID NO: 576567 - DNA, 15 bp, Homo sapiens
agtgagacgctgtct

SEQ ID NO: 576568 - DNA, 15 bp, Homo sapiens
gtgagacgctgtctc

SEQ ID NO: 576569 - DNA, 15 bp, Homo sapiens
tgagacgctgtctca

SEQ ID NO: 576570 - DNA, 15 bp, Homo sapiens
gagacgctgtctcaa

SEQ ID NO: 576571 - DNA, 15 bp, Homo sapiens
agacgctgtctcaaa

SEQ ID NO: 576572 - DNA, 15 bp, Homo sapiens
gacgctgtctcaaaa

SEQ ID NO: 576573 - DNA, 15 bp, Homo sapiens
acgctgtctcaaaac

SEQ ID NO: 576574 - DNA, 15 bp, Homo sapiens
cgctgtctcaaaaca

SEQ ID NO: 576575 - DNA, 15 bp, Homo sapiens
gctgtctcaaaacaa

SEQ ID NO: 576576 - DNA, 15 bp, Homo sapiens
ctgtctcaaaacaaa

SEQ ID NO: 576577 - DNA, 15 bp, Homo sapiens
tgtctcaaaacaaat

SEQ ID NO: 576578 - DNA, 15 bp, Homo sapiens
gtctcaaaacaaata

SEQ ID NO: 576579 - DNA, 15 bp, Homo sapiens
tctcaaaacaaatag

SEQ ID NO: 576580 - DNA, 15 bp, Homo sapiens
ctcaaaacaaatagt

SEQ ID NO: 576581 - DNA, 15 bp, Homo sapiens
tcaaaacaaatagtt

SEQ ID NO: 576582 - DNA, 15 bp, Homo sapiens
caaaacaaatagttc

SEQ ID NO: 576583 - DNA, 15 bp, Homo sapiens
aaaacaaatagttcc

SEQ ID NO: 576584 - DNA, 15 bp, Homo sapiens
aaacaaatagttcct

SEQ ID NO: 576585 - DNA, 15 bp, Homo sapiens
aacaaatagttcctt

SEQ ID NO: 576586 - DNA, 15 bp, Homo sapiens
acaaatagttcctta

SEQ ID NO: 576587 - DNA, 15 bp, Homo sapiens
caaatagttccttag

SEQ ID NO: 576588 - DNA, 15 bp, Homo sapiens
aaatagttccttagt

SEQ ID NO: 576589 - DNA, 15 bp, Homo sapiens
aatagttccttagtg

SEQ ID NO: 576590 - DNA, 15 bp, Homo sapiens
atagttccttagtga

SEQ ID NO: 576591 - DNA, 15 bp, Homo sapiens
tagttccttagtgat

SEQ ID NO: 576592 - DNA, 15 bp, Homo sapiens
agttccttagtgata

SEQ ID NO: 576593 - DNA, 15 bp, Homo sapiens
gttccttagtgatat

SEQ ID NO: 576594 - DNA, 15 bp, Homo sapiens
ttccttagtgatata

SEQ ID NO: 576595 - DNA, 15 bp, Homo sapiens
tccttagtgatatat

SEQ ID NO: 576596 - DNA, 15 bp, Homo sapiens
ccttagtgatatatt

SEQ ID NO: 576597 - DNA, 15 bp, Homo sapiens
cttagtgatatattt

SEQ ID NO: 576598 - DNA, 15 bp, Homo sapiens
ttagtgatatatttc

SEQ ID NO: 576599 - DNA, 15 bp, Homo sapiens
tagtgatatatttca

SEQ ID NO: 576600 - DNA, 15 bp, Homo sapiens
agtgatatatttcag

SEQ ID NO: 576601 - DNA, 15 bp, Homo sapiens
gtgatatatttcagg

SEQ ID NO: 576602 - DNA, 15 bp, Homo sapiens
tgatatatttcagga

SEQ ID NO: 576603 - DNA, 15 bp, Homo sapiens
gatatatttcaggac

SEQ ID NO: 576604 - DNA, 15 bp, Homo sapiens
atatatttcaggact

SEQ ID NO: 576605 - DNA, 15 bp, Homo sapiens
tatatttcaggacta

SEQ ID NO: 576606 - DNA, 15 bp, Homo sapiens
atatttcaggactat

SEQ ID NO: 576607 - DNA, 15 bp, Homo sapiens
tatttcaggactatc

SEQ ID NO: 576608 - DNA, 15 bp, Homo sapiens
atttcaggactatca

SEQ ID NO: 576609 - DNA, 15 bp, Homo sapiens
tttcaggactatcac

SEQ ID NO: 576610 - DNA, 15 bp, Homo sapiens
ttcaggactatcact

SEQ ID NO: 576611 - DNA, 15 bp, Homo sapiens
tcaggactatcactt

SEQ ID NO: 576612 - DNA, 15 bp, Homo sapiens
caggactatcactta

SEQ ID NO: 576613 - DNA, 15 bp, Homo sapiens
aggactatcacttag

SEQ ID NO: 576614 - DNA, 15 bp, Homo sapiens
ggactatcacttaga

SEQ ID NO: 576615 - DNA, 15 bp, Homo sapiens
gactatcacttagac

SEQ ID NO: 576616 - DNA, 15 bp, Homo sapiens
actatcacttagact

SEQ ID NO: 576617 - DNA, 15 bp, Homo sapiens
ctatcacttagactg

SEQ ID NO: 576618 - DNA, 15 bp, Homo sapiens
tatcacttagactgc

SEQ ID NO: 576619 - DNA, 15 bp, Homo sapiens
atcacttagactgct

SEQ ID NO: 576620 - DNA, 15 bp, Homo sapiens
tcacttagactgctt

SEQ ID NO: 576621 - DNA, 15 bp, Homo sapiens
cacttagactgcttt

SEQ ID NO: 576622 - DNA, 15 bp, Homo sapiens
acttagactgcttta

SEQ ID NO: 576623 - DNA, 15 bp, Homo sapiens
cttagactgctttaa

SEQ ID NO: 576624 - DNA, 15 bp, Homo sapiens
ttagactgctttaaa

SEQ ID NO: 576625 - DNA, 15 bp, Homo sapiens
tagactgctttaaag

SEQ ID NO: 576626 - DNA, 15 bp, Homo sapiens
agactgctttaaagg

SEQ ID NO: 576627 - DNA, 15 bp, Homo sapiens
gactgctttaaaggt

SEQ ID NO: 576628 - DNA, 15 bp, Homo sapiens
actgctttaaaggtt

SEQ ID NO: 576629 - DNA, 15 bp, Homo sapiens
ctgctttaaaggtta

SEQ ID NO: 576630 - DNA, 15 bp, Homo sapiens
tgctttaaaggttat

SEQ ID NO: 576631 - DNA, 15 bp, Homo sapiens
gctttaaaggttatc

SEQ ID NO: 576632 - DNA, 15 bp, Homo sapiens
ctttaaaggttatcc

SEQ ID NO: 576633 - DNA, 15 bp, Homo sapiens
tttaaaggttatcca

SEQ ID NO: 576634 - DNA, 15 bp, Homo sapiens
ttaaaggttatccaa

SEQ ID NO: 576635 - DNA, 15 bp, Homo sapiens
taaaggttatccaaa

SEQ ID NO: 576636 - DNA, 15 bp, Homo sapiens
aaaggttatccaaaa

SEQ ID NO: 576637 - DNA, 15 bp, Homo sapiens
aaggttatccaaaat

SEQ ID NO: 576638 - DNA, 15 bp, Homo sapiens
aggttatccaaaata

SEQ ID NO: 576639 - DNA, 15 bp, Homo sapiens
ggttatccaaaatat

SEQ ID NO: 576640 - DNA, 15 bp, Homo sapiens
gttatccaaaatatt

SEQ ID NO: 576641 - DNA, 15 bp, Homo sapiens
ttatccaaaatatta

SEQ ID NO: 576642 - DNA, 15 bp, Homo sapiens
tatccaaaatattat

SEQ ID NO: 576643 - DNA, 15 bp, Homo sapiens
atccaaaatattata

SEQ ID NO: 576644 - DNA, 15 bp, Homo sapiens
tccaaaatattatat

SEQ ID NO: 576645 - DNA, 15 bp, Homo sapiens
ccaaaatattatatt

SEQ ID NO: 576646 - DNA, 15 bp, Homo sapiens
caaaatattatattc

SEQ ID NO: 576647 - DNA, 15 bp, Homo sapiens
aaaatattatattcc

SEQ ID NO: 576648 - DNA, 15 bp, Homo sapiens
aaatattatattcca

SEQ ID NO: 576649 - DNA, 15 bp, Homo sapiens
aatattatattccac

SEQ ID NO: 576650 - DNA, 15 bp, Homo sapiens
atattatattccacc

SEQ ID NO: 576651 - DNA, 15 bp, Homo sapiens
tattatattccaccc

SEQ ID NO: 576652 - DNA, 15 bp, Homo sapiens
attatattccacccc

SEQ ID NO: 576653 - DNA, 15 bp, Homo sapiens
ttatattccaccccc

SEQ ID NO: 576654 - DNA, 15 bp, Homo sapiens
tatattccaccccct

SEQ ID NO: 576655 - DNA, 15 bp, Homo sapiens
atattccaccccctt

SEQ ID NO: 576656 - DNA, 15 bp, Homo sapiens
tattccacccccttt

SEQ ID NO: 576657 - DNA, 15 bp, Homo sapiens
attccaccccctttc

SEQ ID NO: 576658 - DNA, 15 bp, Homo sapiens
ttccaccccctttca

SEQ ID NO: 576659 - DNA, 15 bp, Homo sapiens
tccaccccctttcaa

SEQ ID NO: 576660 - DNA, 15 bp, Homo sapiens
ccaccccctttcaat

SEQ ID NO: 576661 - DNA, 15 bp, Homo sapiens
caccccctttcaatg

SEQ ID NO: 576662 - DNA, 15 bp, Homo sapiens
accccctttcaatgg

SEQ ID NO: 576663 - DNA, 15 bp, Homo sapiens
ccccctttcaatggg

SEQ ID NO: 576664 - DNA, 15 bp, Homo sapiens
cccctttcaatgggt

SEQ ID NO: 576665 - DNA, 15 bp, Homo sapiens
ccctttcaatgggtg

SEQ ID NO: 576666 - DNA, 15 bp, Homo sapiens
cctttcaatgggtgc

SEQ ID NO: 576667 - DNA, 15 bp, Homo sapiens
ctttcaatgggtgct

SEQ ID NO: 576668 - DNA, 15 bp, Homo sapiens
tttcaatgggtgctg

SEQ ID NO: 576669 - DNA, 15 bp, Homo sapiens
ttcaatgggtgctgg

SEQ ID NO: 576670 - DNA, 15 bp, Homo sapiens
tcaatgggtgctggg

SEQ ID NO: 576671 - DNA, 15 bp, Homo sapiens
caatgggtgctggga

SEQ ID NO: 576672 - DNA, 15 bp, Homo sapiens
aatgggtgctgggaa

SEQ ID NO: 576673 - DNA, 15 bp, Homo sapiens
atgggtgctgggaag

SEQ ID NO: 576674 - DNA, 15 bp, Homo sapiens
tgggtgctgggaagg

SEQ ID NO: 576675 - DNA, 15 bp, Homo sapiens
gggtgctgggaaggg

SEQ ID NO: 576676 - DNA, 15 bp, Homo sapiens
ggtgctgggaagggc

SEQ ID NO: 576677 - DNA, 15 bp, Homo sapiens
gtgctgggaagggcc

SEQ ID NO: 576678 - DNA, 15 bp, Homo sapiens
tgctgggaagggcca

SEQ ID NO: 576679 - DNA, 15 bp, Homo sapiens
gctgggaagggccag

SEQ ID NO: 576680 - DNA, 15 bp, Homo sapiens
ctgggaagggccaga

SEQ ID NO: 576681 - DNA, 15 bp, Homo sapiens
tgggaagggccagat

SEQ ID NO: 576682 - DNA, 15 bp, Homo sapiens
gggaagggccagatt

SEQ ID NO: 576683 - DNA, 15 bp, Homo sapiens
ggaagggccagattt

SEQ ID NO: 576684 - DNA, 15 bp, Homo sapiens
gaagggccagatttt

SEQ ID NO: 576685 - DNA, 15 bp, Homo sapiens
aagggccagattttc

SEQ ID NO: 576686 - DNA, 15 bp, Homo sapiens
agggccagattttcc

SEQ ID NO: 576687 - DNA, 15 bp, Homo sapiens
gggccagattttccg

SEQ ID NO: 576688 - DNA, 15 bp, Homo sapiens
ggccagattttccgt

SEQ ID NO: 576689 - DNA, 15 bp, Homo sapiens
gccagattttccgtc

SEQ ID NO: 576690 - DNA, 15 bp, Homo sapiens
ccagattttccgtct

SEQ ID NO: 576691 - DNA, 15 bp, Homo sapiens
cagattttccgtcta

SEQ ID NO: 576692 - DNA, 15 bp, Homo sapiens
agattttccgtctat

SEQ ID NO: 576693 - DNA, 15 bp, Homo sapiens
gattttccgtctatg

SEQ ID NO: 576694 - DNA, 15 bp, Homo sapiens
attttccgtctatgg

SEQ ID NO: 576695 - DNA, 15 bp, Homo sapiens
ttttccgtctatggc

SEQ ID NO: 576696 - DNA, 15 bp, Homo sapiens
tttccgtctatggca

SEQ ID NO: 576697 - DNA, 15 bp, Homo sapiens
ttccgtctatggcat

SEQ ID NO: 576698 - DNA, 15 bp, Homo sapiens
tccgtctatggcatg

SEQ ID NO: 576699 - DNA, 15 bp, Homo sapiens
ccgtctatggcatgt

SEQ ID NO: 576700 - DNA, 15 bp, Homo sapiens
cgtctatggcatgtc

SEQ ID NO: 576701 - DNA, 15 bp, Homo sapiens
gtctatggcatgtcc

SEQ ID NO: 576702 - DNA, 15 bp, Homo sapiens
tctatggcatgtccc

SEQ ID NO: 576703 - DNA, 15 bp, Homo sapiens
ctatggcatgtccca

SEQ ID NO: 576704 - DNA, 15 bp, Homo sapiens
tatggcatgtcccag

SEQ ID NO: 576705 - DNA, 15 bp, Homo sapiens
atggcatgtcccagt

SEQ ID NO: 576706 - DNA, 15 bp, Homo sapiens
tggcatgtcccagtt

SEQ ID NO: 576707 - DNA, 15 bp, Homo sapiens
ggcatgtcccagttg

SEQ ID NO: 576708 - DNA, 15 bp, Homo sapiens
gcatgtcccagttgt

SEQ ID NO: 576709 - DNA, 15 bp, Homo sapiens
catgtcccagttgtc

SEQ ID NO: 576710 - DNA, 15 bp, Homo sapiens
atgtcccagttgtca

SEQ ID NO: 576711 - DNA, 15 bp, Homo sapiens
tgtcccagttgtcac

SEQ ID NO: 576712 - DNA, 15 bp, Homo sapiens
gtcccagttgtcaca

SEQ ID NO: 576713 - DNA, 15 bp, Homo sapiens
tcccagttgtcacag

SEQ ID NO: 576714 - DNA, 15 bp, Homo sapiens
cccagttgtcacagg

SEQ ID NO: 576715 - DNA, 15 bp, Homo sapiens
ccagttgtcacaggg

SEQ ID NO: 576716 - DNA, 15 bp, Homo sapiens
cagttgtcacagggg

SEQ ID NO: 576717 - DNA, 15 bp, Homo sapiens
agttgtcacaggggg

SEQ ID NO: 576718 - DNA, 15 bp, Homo sapiens
gttgtcacaggggga

SEQ ID NO: 576719 - DNA, 15 bp, Homo sapiens
ttgtcacagggggag

SEQ ID NO: 576720 - DNA, 15 bp, Homo sapiens
tgtcacagggggagg

SEQ ID NO: 576721 - DNA, 15 bp, Homo sapiens
gtcacagggggagga

SEQ ID NO: 576722 - DNA, 15 bp, Homo sapiens
tcacagggggaggac

SEQ ID NO: 576723 - DNA, 15 bp, Homo sapiens
cacagggggaggaca

SEQ ID NO: 576724 - DNA, 15 bp, Homo sapiens
acagggggaggacag

SEQ ID NO: 576725 - DNA, 15 bp, Homo sapiens
cagggggaggacagg

SEQ ID NO: 576726 - DNA, 15 bp, Homo sapiens
agggggaggacaggt

SEQ ID NO: 576727 - DNA, 15 bp, Homo sapiens
gggggaggacaggtg

SEQ ID NO: 576728 - DNA, 15 bp, Homo sapiens
ggggaggacaggtgg

SEQ ID NO: 576729 - DNA, 15 bp, Homo sapiens
gggaggacaggtggg

SEQ ID NO: 576730 - DNA, 15 bp, Homo sapiens
ggaggacaggtgggg

SEQ ID NO: 576731 - DNA, 15 bp, Homo sapiens
gaggacaggtgggga

SEQ ID NO: 576732 - DNA, 15 bp, Homo sapiens
aggacaggtggggag

SEQ ID NO: 576733 - DNA, 15 bp, Homo sapiens
ggacaggtggggagg

SEQ ID NO: 576734 - DNA, 15 bp, Homo sapiens
gacaggtggggagga

SEQ ID NO: 576735 - DNA, 15 bp, Homo sapiens
acaggtggggaggaa

SEQ ID NO: 576736 - DNA, 15 bp, Homo sapiens
caggtggggaggaag

SEQ ID NO: 576737 - DNA, 15 bp, Homo sapiens
aggtggggaggaagg

SEQ ID NO: 576738 - DNA, 15 bp, Homo sapiens
ggtggggaggaagga

SEQ ID NO: 576739 - DNA, 15 bp, Homo sapiens
gtggggaggaaggac

SEQ ID NO: 576740 - DNA, 15 bp, Homo sapiens
tggggaggaaggaca

SEQ ID NO: 576741 - DNA, 15 bp, Homo sapiens
ggggaggaaggacaa

SEQ ID NO: 576742 - DNA, 15 bp, Homo sapiens
gggaggaaggacaag

SEQ ID NO: 576743 - DNA, 15 bp, Homo sapiens
ggaggaaggacaagg

SEQ ID NO: 576744 - DNA, 15 bp, Homo sapiens
gaggaaggacaaggc

SEQ ID NO: 576745 - DNA, 15 bp, Homo sapiens
aggaaggacaaggca

SEQ ID NO: 576746 - DNA, 15 bp, Homo sapiens
ggaaggacaaggcag

SEQ ID NO: 576747 - DNA, 15 bp, Homo sapiens
gaaggacaaggcagg

SEQ ID NO: 576748 - DNA, 15 bp, Homo sapiens
aaggacaaggcagga

SEQ ID NO: 576749 - DNA, 15 bp, Homo sapiens
aggacaaggcaggag

SEQ ID NO: 576750 - DNA, 15 bp, Homo sapiens
ggacaaggcaggagc

SEQ ID NO: 576751 - DNA, 15 bp, Homo sapiens
gacaaggcaggagcc

SEQ ID NO: 576752 - DNA, 15 bp, Homo sapiens
acaaggcaggagcct

SEQ ID NO: 576753 - DNA, 15 bp, Homo sapiens
caaggcaggagccta

SEQ ID NO: 576754 - DNA, 15 bp, Homo sapiens
aaggcaggagcctat

SEQ ID NO: 576755 - DNA, 15 bp, Homo sapiens
aggcaggagcctatt

SEQ ID NO: 576756 - DNA, 15 bp, Homo sapiens
ggcaggagcctattc

SEQ ID NO: 576757 - DNA, 15 bp, Homo sapiens
gcaggagcctattca

SEQ ID NO: 576758 - DNA, 15 bp, Homo sapiens
caggagcctattcat

SEQ ID NO: 576759 - DNA, 15 bp, Homo sapiens
aggagcctattcatt

SEQ ID NO: 576760 - DNA, 15 bp, Homo sapiens
ggagcctattcattt

SEQ ID NO: 576761 - DNA, 15 bp, Homo sapiens
gagcctattcattta

SEQ ID NO: 576762 - DNA, 15 bp, Homo sapiens
agcctattcatttag

SEQ ID NO: 576763 - DNA, 15 bp, Homo sapiens
gcctattcatttagg

SEQ ID NO: 576764 - DNA, 15 bp, Homo sapiens
cctattcatttagga

SEQ ID NO: 576765 - DNA, 15 bp, Homo sapiens
ctattcatttaggaa

SEQ ID NO: 576766 - DNA, 15 bp, Homo sapiens
tattcatttaggaat

SEQ ID NO: 576767 - DNA, 15 bp, Homo sapiens
attcatttaggaatt

SEQ ID NO: 576768 - DNA, 15 bp, Homo sapiens
ttcatttaggaattc

SEQ ID NO: 576769 - DNA, 15 bp, Homo sapiens
tcatttaggaattcc

SEQ ID NO: 576770 - DNA, 15 bp, Homo sapiens
catttaggaattcca

SEQ ID NO: 576771 - DNA, 15 bp, Homo sapiens
atttaggaattccac

SEQ ID NO: 576772 - DNA, 15 bp, Homo sapiens
tttaggaattccacc

SEQ ID NO: 576773 - DNA, 15 bp, Homo sapiens
ttaggaattccacca

SEQ ID NO: 576774 - DNA, 15 bp, Homo sapiens
taggaattccaccac

SEQ ID NO: 576775 - DNA, 15 bp, Homo sapiens
aggaattccaccact

SEQ ID NO: 576776 - DNA, 15 bp, Homo sapiens
ggaattccaccactg

SEQ ID NO: 576777 - DNA, 15 bp, Homo sapiens
gaattccaccactga

SEQ ID NO: 576778 - DNA, 15 bp, Homo sapiens
aattccaccactgac

SEQ ID NO: 576779 - DNA, 15 bp, Homo sapiens
attccaccactgacc

SEQ ID NO: 576780 - DNA, 15 bp, Homo sapiens
ttccaccactgacca

SEQ ID NO: 576781 - DNA, 15 bp, Homo sapiens
tccaccactgaccag

SEQ ID NO: 576782 - DNA, 15 bp, Homo sapiens
ccaccactgaccagc

SEQ ID NO: 576783 - DNA, 15 bp, Homo sapiens
caccactgaccagct

SEQ ID NO: 576784 - DNA, 15 bp, Homo sapiens
accactgaccagctg

SEQ ID NO: 576785 - DNA, 15 bp, Homo sapiens
ccactgaccagctga

SEQ ID NO: 576786 - DNA, 15 bp, Homo sapiens
cactgaccagctgat

SEQ ID NO: 576787 - DNA, 15 bp, Homo sapiens
actgaccagctgata

SEQ ID NO: 576788 - DNA, 15 bp, Homo sapiens
ctgaccagctgatac

SEQ ID NO: 576789 - DNA, 15 bp, Homo sapiens
tgaccagctgatact

SEQ ID NO: 576790 - DNA, 15 bp, Homo sapiens
gaccagctgatactt

SEQ ID NO: 576791 - DNA, 15 bp, Homo sapiens
accagctgatacttc

SEQ ID NO: 576792 - DNA, 15 bp, Homo sapiens
ccagctgatacttcc

SEQ ID NO: 576793 - DNA, 15 bp, Homo sapiens
cagctgatacttcct

SEQ ID NO: 576794 - DNA, 15 bp, Homo sapiens
agctgatacttcctg

SEQ ID NO: 576795 - DNA, 15 bp, Homo sapiens
gctgatacttcctgt

SEQ ID NO: 576796 - DNA, 15 bp, Homo sapiens
ctgatacttcctgtg

SEQ ID NO: 576797 - DNA, 15 bp, Homo sapiens
tgatacttcctgtga

SEQ ID NO: 576798 - DNA, 15 bp, Homo sapiens
gatacttcctgtgac

SEQ ID NO: 576799 - DNA, 15 bp, Homo sapiens
atacttcctgtgaca

SEQ ID NO: 576800 - DNA, 15 bp, Homo sapiens
tacttcctgtgacaa

SEQ ID NO: 576801 - DNA, 15 bp, Homo sapiens
acttcctgtgacaag

SEQ ID NO: 576802 - DNA, 15 bp, Homo sapiens
cttcctgtgacaagt

SEQ ID NO: 576803 - DNA, 15 bp, Homo sapiens
ttcctgtgacaagtg

SEQ ID NO: 576804 - DNA, 15 bp, Homo sapiens
tcctgtgacaagtgg

SEQ ID NO: 576805 - DNA, 15 bp, Homo sapiens
cctgtgacaagtgga

SEQ ID NO: 576806 - DNA, 15 bp, Homo sapiens
ctgtgacaagtggaa

SEQ ID NO: 576807 - DNA, 15 bp, Homo sapiens
tgtgacaagtggaat

SEQ ID NO: 576808 - DNA, 15 bp, Homo sapiens
gtgacaagtggaatt

SEQ ID NO: 576809 - DNA, 15 bp, Homo sapiens
tgacaagtggaattt

SEQ ID NO: 576810 - DNA, 15 bp, Homo sapiens
gacaagtggaatttt

SEQ ID NO: 576811 - DNA, 15 bp, Homo sapiens
acaagtggaattttt

SEQ ID NO: 576812 - DNA, 15 bp, Homo sapiens
caagtggaatttttt

SEQ ID NO: 576813 - DNA, 15 bp, Homo sapiens
aagtggaattttttt

SEQ ID NO: 576814 - DNA, 15 bp, Homo sapiens
agtggaatttttttt

SEQ ID NO: 576815 - DNA, 15 bp, Homo sapiens
gtggaattttttttt

SEQ ID NO: 576816 - DNA, 15 bp, Homo sapiens
tggaatttttttttt

SEQ ID NO: 576817 - DNA, 15 bp, Homo sapiens
ggaattttttttttt

SEQ ID NO: 576818 - DNA, 15 bp, Homo sapiens
gaatttttttttttt

SEQ ID NO: 576819 - DNA, 15 bp, Homo sapiens
aattttttttttttt

SEQ ID NO: 576820 - DNA, 15 bp, Homo sapiens
ttttttttttttttc

SEQ ID NO: 576821 - DNA, 15 bp, Homo sapiens
tttttttttttttcc

SEQ ID NO: 576822 - DNA, 15 bp, Homo sapiens
ttttttttttttccc

SEQ ID NO: 576823 - DNA, 15 bp, Homo sapiens
tttttttttttccct

SEQ ID NO: 576824 - DNA, 15 bp, Homo sapiens
ttttttttttccctg

SEQ ID NO: 576825 - DNA, 15 bp, Homo sapiens
tttttttttccctga

SEQ ID NO: 576826 - DNA, 15 bp, Homo sapiens
ttttttttccctgac

SEQ ID NO: 576827 - DNA, 15 bp, Homo sapiens
tttttttccctgaca

SEQ ID NO: 576828 - DNA, 15 bp, Homo sapiens
ttttttccctgacag

SEQ ID NO: 576829 - DNA, 15 bp, Homo sapiens
tttttccctgacagg

SEQ ID NO: 576830 - DNA, 15 bp, Homo sapiens
ttttccctgacaggt

SEQ ID NO: 576831 - DNA, 15 bp, Homo sapiens
tttccctgacaggtg

SEQ ID NO: 576832 - DNA, 15 bp, Homo sapiens
ttccctgacaggtgc

SEQ ID NO: 576833 - DNA, 15 bp, Homo sapiens
tccctgacaggtgct

SEQ ID NO: 576834 - DNA, 15 bp, Homo sapiens
ccctgacaggtgctc

SEQ ID NO: 576835 - DNA, 15 bp, Homo sapiens
cctgacaggtgctct

SEQ ID NO: 576836 - DNA, 15 bp, Homo sapiens
ctgacaggtgctctg

SEQ ID NO: 576837 - DNA, 15 bp, Homo sapiens
tgacaggtgctctgg

SEQ ID NO: 576838 - DNA, 15 bp, Homo sapiens
gacaggtgctctggc

SEQ ID NO: 576839 - DNA, 15 bp, Homo sapiens
acaggtgctctggca

SEQ ID NO: 576840 - DNA, 15 bp, Homo sapiens
caggtgctctggcat

SEQ ID NO: 576841 - DNA, 15 bp, Homo sapiens
aggtgctctggcata

SEQ ID NO: 576842 - DNA, 15 bp, Homo sapiens
ggtgctctggcatac

SEQ ID NO: 576843 - DNA, 15 bp, Homo sapiens
gtgctctggcataca

SEQ ID NO: 576844 - DNA, 15 bp, Homo sapiens
tgctctggcatacaa

SEQ ID NO: 576845 - DNA, 15 bp, Homo sapiens
gctctggcatacaaa

SEQ ID NO: 576846 - DNA, 15 bp, Homo sapiens
ctctggcatacaaag

SEQ ID NO: 576847 - DNA, 15 bp, Homo sapiens
tctggcatacaaagc

SEQ ID NO: 576848 - DNA, 15 bp, Homo sapiens
ctggcatacaaagca

SEQ ID NO: 576849 - DNA, 15 bp, Homo sapiens
tggcatacaaagcaa

SEQ ID NO: 576850 - DNA, 15 bp, Homo sapiens
ggcatacaaagcaag

SEQ ID NO: 576851 - DNA, 15 bp, Homo sapiens
gcatacaaagcaagc

SEQ ID NO: 576852 - DNA, 15 bp, Homo sapiens
catacaaagcaagca

SEQ ID NO: 576853 - DNA, 15 bp, Homo sapiens
atacaaagcaagcat

SEQ ID NO: 576854 - DNA, 15 bp, Homo sapiens
tacaaagcaagcata

SEQ ID NO: 576855 - DNA, 15 bp, Homo sapiens
acaaagcaagcatac

SEQ ID NO: 576856 - DNA, 15 bp, Homo sapiens
caaagcaagcataca

SEQ ID NO: 576857 - DNA, 15 bp, Homo sapiens
aaagcaagcatacac

SEQ ID NO: 576858 - DNA, 15 bp, Homo sapiens
aagcaagcatacact

SEQ ID NO: 576859 - DNA, 15 bp, Homo sapiens
agcaagcatacacta

SEQ ID NO: 576860 - DNA, 15 bp, Homo sapiens
gcaagcatacactaa

SEQ ID NO: 576861 - DNA, 15 bp, Homo sapiens
caagcatacactaaa

SEQ ID NO: 576862 - DNA, 15 bp, Homo sapiens
aagcatacactaaaa

SEQ ID NO: 576863 - DNA, 15 bp, Homo sapiens
agcatacactaaaat

SEQ ID NO: 576864 - DNA, 15 bp, Homo sapiens
gcatacactaaaatc

SEQ ID NO: 576865 - DNA, 15 bp, Homo sapiens
catacactaaaatca

SEQ ID NO: 576866 - DNA, 15 bp, Homo sapiens
atacactaaaatcag

SEQ ID NO: 576867 - DNA, 15 bp, Homo sapiens
tacactaaaatcagc

SEQ ID NO: 576868 - DNA, 15 bp, Homo sapiens
acactaaaatcagct

SEQ ID NO: 576869 - DNA, 15 bp, Homo sapiens
cactaaaatcagctt

SEQ ID NO: 576870 - DNA, 15 bp, Homo sapiens
actaaaatcagctta

SEQ ID NO: 576871 - DNA, 15 bp, Homo sapiens
ctaaaatcagcttag

SEQ ID NO: 576872 - DNA, 15 bp, Homo sapiens
taaaatcagcttagg

SEQ ID NO: 576873 - DNA, 15 bp, Homo sapiens
aaaatcagcttagga

SEQ ID NO: 576874 - DNA, 15 bp, Homo sapiens
aaatcagcttaggaa

SEQ ID NO: 576875 - DNA, 15 bp, Homo sapiens
aatcagcttaggaat

SEQ ID NO: 576876 - DNA, 15 bp, Homo sapiens
atcagcttaggaata

SEQ ID NO: 576877 - DNA, 15 bp, Homo sapiens
tcagcttaggaataa

SEQ ID NO: 576878 - DNA, 15 bp, Homo sapiens
cagcttaggaataat

SEQ ID NO: 576879 - DNA, 15 bp, Homo sapiens
agcttaggaataatt

SEQ ID NO: 576880 - DNA, 15 bp, Homo sapiens
gcttaggaataattg

SEQ ID NO: 576881 - DNA, 15 bp, Homo sapiens
cttaggaataattgt

SEQ ID NO: 576882 - DNA, 15 bp, Homo sapiens
ttaggaataattgtt

SEQ ID NO: 576883 - DNA, 15 bp, Homo sapiens
taggaataattgttt

SEQ ID NO: 576884 - DNA, 15 bp, Homo sapiens
aggaataattgtttt

SEQ ID NO: 576885 - DNA, 15 bp, Homo sapiens
ggaataattgttttc

SEQ ID NO: 576886 - DNA, 15 bp, Homo sapiens
gaataattgttttct

SEQ ID NO: 576887 - DNA, 15 bp, Homo sapiens
aataattgttttctc

SEQ ID NO: 576888 - DNA, 15 bp, Homo sapiens
ataattgttttctct

SEQ ID NO: 576889 - DNA, 15 bp, Homo sapiens
taattgttttctctt

SEQ ID NO: 576890 - DNA, 15 bp, Homo sapiens
aattgttttctctta

SEQ ID NO: 576891 - DNA, 15 bp, Homo sapiens
attgttttctcttag

SEQ ID NO: 576892 - DNA, 15 bp, Homo sapiens
ttgttttctcttaga

SEQ ID NO: 576893 - DNA, 15 bp, Homo sapiens
tgttttctcttagaa

SEQ ID NO: 576894 - DNA, 15 bp, Homo sapiens
gttttctcttagaaa

SEQ ID NO: 576895 - DNA, 15 bp, Homo sapiens
ttttctcttagaaaa

SEQ ID NO: 576896 - DNA, 15 bp, Homo sapiens
tttctcttagaaaag

SEQ ID NO: 576897 - DNA, 15 bp, Homo sapiens
ttctcttagaaaagc

SEQ ID NO: 576898 - DNA, 15 bp, Homo sapiens
tctcttagaaaagca

SEQ ID NO: 576899 - DNA, 15 bp, Homo sapiens
ctcttagaaaagcag

SEQ ID NO: 576900 - DNA, 15 bp, Homo sapiens
tcttagaaaagcaga

SEQ ID NO: 576901 - DNA, 15 bp, Homo sapiens
cttagaaaagcagaa

SEQ ID NO: 576902 - DNA, 15 bp, Homo sapiens
ttagaaaagcagaac

SEQ ID NO: 576903 - DNA, 15 bp, Homo sapiens
tagaaaagcagaaca

SEQ ID NO: 576904 - DNA, 15 bp, Homo sapiens
agaaaagcagaacat

SEQ ID NO: 576905 - DNA, 15 bp, Homo sapiens
gaaaagcagaacatt

SEQ ID NO: 576906 - DNA, 15 bp, Homo sapiens
aaaagcagaacatta

SEQ ID NO: 576907 - DNA, 15 bp, Homo sapiens
aaagcagaacattac

SEQ ID NO: 576908 - DNA, 15 bp, Homo sapiens
aagcagaacattact

SEQ ID NO: 576909 - DNA, 15 bp, Homo sapiens
agcagaacattacta

SEQ ID NO: 576910 - DNA, 15 bp, Homo sapiens
gcagaacattactaa

SEQ ID NO: 576911 - DNA, 15 bp, Homo sapiens
cagaacattactaag

SEQ ID NO: 576912 - DNA, 15 bp, Homo sapiens
agaacattactaaga

SEQ ID NO: 576913 - DNA, 15 bp, Homo sapiens
gaacattactaagag

SEQ ID NO: 576914 - DNA, 15 bp, Homo sapiens
aacattactaagaga

SEQ ID NO: 576915 - DNA, 15 bp, Homo sapiens
acattactaagagaa

SEQ ID NO: 576916 - DNA, 15 bp, Homo sapiens
cattactaagagaag

SEQ ID NO: 576917 - DNA, 15 bp, Homo sapiens
attactaagagaagc

SEQ ID NO: 576918 - DNA, 15 bp, Homo sapiens
ttactaagagaagca

SEQ ID NO: 576919 - DNA, 15 bp, Homo sapiens
tactaagagaagcag

SEQ ID NO: 576920 - DNA, 15 bp, Homo sapiens
actaagagaagcagg

SEQ ID NO: 576921 - DNA, 15 bp, Homo sapiens
ctaagagaagcaggg

SEQ ID NO: 576922 - DNA, 15 bp, Homo sapiens
taagagaagcaggga

SEQ ID NO: 576923 - DNA, 15 bp, Homo sapiens
aagagaagcagggaa

SEQ ID NO: 576924 - DNA, 15 bp, Homo sapiens
agagaagcagggaac

SEQ ID NO: 576925 - DNA, 15 bp, Homo sapiens
gagaagcagggaact

SEQ ID NO: 576926 - DNA, 15 bp, Homo sapiens
agaagcagggaactc

SEQ ID NO: 576927 - DNA, 15 bp, Homo sapiens
gaagcagggaactcc

SEQ ID NO: 576928 - DNA, 15 bp, Homo sapiens
aagcagggaactcca

SEQ ID NO: 576929 - DNA, 15 bp, Homo sapiens
agcagggaactccac

SEQ ID NO: 576930 - DNA, 15 bp, Homo sapiens
gcagggaactccact

SEQ ID NO: 576931 - DNA, 15 bp, Homo sapiens
cagggaactccactt

SEQ ID NO: 576932 - DNA, 15 bp, Homo sapiens
agggaactccacttt

SEQ ID NO: 576933 - DNA, 15 bp, Homo sapiens
gggaactccactttc

SEQ ID NO: 576934 - DNA, 15 bp, Homo sapiens
ggaactccactttct

SEQ ID NO: 576935 - DNA, 15 bp, Homo sapiens
gaactccactttcta

SEQ ID NO: 576936 - DNA, 15 bp, Homo sapiens
aactccactttctag

SEQ ID NO: 576937 - DNA, 15 bp, Homo sapiens
actccactttctagc

SEQ ID NO: 576938 - DNA, 15 bp, Homo sapiens
ctccactttctagct

SEQ ID NO: 576939 - DNA, 15 bp, Homo sapiens
tccactttctagctt

SEQ ID NO: 576940 - DNA, 15 bp, Homo sapiens
ccactttctagcttt

SEQ ID NO: 576941 - DNA, 15 bp, Homo sapiens
cactttctagcttta

SEQ ID NO: 576942 - DNA, 15 bp, Homo sapiens
actttctagctttag

SEQ ID NO: 576943 - DNA, 15 bp, Homo sapiens
ctttctagctttagg

SEQ ID NO: 576944 - DNA, 15 bp, Homo sapiens
tttctagctttaggt

SEQ ID NO: 576945 - DNA, 15 bp, Homo sapiens
ttctagctttaggtg

SEQ ID NO: 576946 - DNA, 15 bp, Homo sapiens
tctagctttaggtgg

SEQ ID NO: 576947 - DNA, 15 bp, Homo sapiens
ctagctttaggtggt

SEQ ID NO: 576948 - DNA, 15 bp, Homo sapiens
tagctttaggtggtt

SEQ ID NO: 576949 - DNA, 15 bp, Homo sapiens
agctttaggtggttg

SEQ ID NO: 576950 - DNA, 15 bp, Homo sapiens
gctttaggtggttgg

SEQ ID NO: 576951 - DNA, 15 bp, Homo sapiens
ctttaggtggttggg

SEQ ID NO: 576952 - DNA, 15 bp, Homo sapiens
tttaggtggttgggt

SEQ ID NO: 576953 - DNA, 15 bp, Homo sapiens
ttaggtggttgggtt

SEQ ID NO: 576954 - DNA, 15 bp, Homo sapiens
taggtggttgggttt

SEQ ID NO: 576955 - DNA, 15 bp, Homo sapiens
aggtggttgggtttt

SEQ ID NO: 576956 - DNA, 15 bp, Homo sapiens
ggtggttgggttttt

SEQ ID NO: 576957 - DNA, 15 bp, Homo sapiens
gtggttgggtttttt

SEQ ID NO: 576958 - DNA, 15 bp, Homo sapiens
tggttgggttttttc

SEQ ID NO: 576959 - DNA, 15 bp, Homo sapiens
ggttgggttttttct

SEQ ID NO: 576960 - DNA, 15 bp, Homo sapiens
gttgggttttttctt

SEQ ID NO: 576961 - DNA, 15 bp, Homo sapiens
ttgggttttttcttc

SEQ ID NO: 576962 - DNA, 15 bp, Homo sapiens
tgggttttttcttcc

SEQ ID NO: 576963 - DNA, 15 bp, Homo sapiens
gggttttttcttcct

SEQ ID NO: 576964 - DNA, 15 bp, Homo sapiens
ggttttttcttccta

SEQ ID NO: 576965 - DNA, 15 bp, Homo sapiens
gttttttcttcctat

SEQ ID NO: 576966 - DNA, 15 bp, Homo sapiens
ttttttcttcctata

SEQ ID NO: 576967 - DNA, 15 bp, Homo sapiens
tttttcttcctataa

SEQ ID NO: 576968 - DNA, 15 bp, Homo sapiens
ttttcttcctataaa

SEQ ID NO: 576969 - DNA, 15 bp, Homo sapiens
tttcttcctataaaa

SEQ ID NO: 576970 - DNA, 15 bp, Homo sapiens
ttcttcctataaaag

SEQ ID NO: 576971 - DNA, 15 bp, Homo sapiens
tcttcctataaaagc

SEQ ID NO: 576972 - DNA, 15 bp, Homo sapiens
cttcctataaaagct

SEQ ID NO: 576973 - DNA, 15 bp, Homo sapiens
ttcctataaaagctc

SEQ ID NO: 576974 - DNA, 15 bp, Homo sapiens
tcctataaaagctca

SEQ ID NO: 576975 - DNA, 15 bp, Homo sapiens
cctataaaagctcaa

SEQ ID NO: 576976 - DNA, 15 bp, Homo sapiens
ctataaaagctcaaa

SEQ ID NO: 576977 - DNA, 15 bp, Homo sapiens
tataaaagctcaaaa

SEQ ID NO: 576978 - DNA, 15 bp, Homo sapiens
ataaaagctcaaaat

SEQ ID NO: 576979 - DNA, 15 bp, Homo sapiens
taaaagctcaaaata

SEQ ID NO: 576980 - DNA, 15 bp, Homo sapiens
aaaagctcaaaatag

SEQ ID NO: 576981 - DNA, 15 bp, Homo sapiens
aaagctcaaaatagg

SEQ ID NO: 576982 - DNA, 15 bp, Homo sapiens
aagctcaaaataggc

SEQ ID NO: 576983 - DNA, 15 bp, Homo sapiens
agctcaaaataggct

SEQ ID NO: 576984 - DNA, 15 bp, Homo sapiens
gctcaaaataggcta

SEQ ID NO: 576985 - DNA, 15 bp, Homo sapiens
ctcaaaataggctaa

SEQ ID NO: 576986 - DNA, 15 bp, Homo sapiens
tcaaaataggctaat

SEQ ID NO: 576987 - DNA, 15 bp, Homo sapiens
caaaataggctaatt

SEQ ID NO: 576988 - DNA, 15 bp, Homo sapiens
aaaataggctaatta

SEQ ID NO: 576989 - DNA, 15 bp, Homo sapiens
aaataggctaattag

SEQ ID NO: 576990 - DNA, 15 bp, Homo sapiens
aataggctaattaga

SEQ ID NO: 576991 - DNA, 15 bp, Homo sapiens
ataggctaattagag

SEQ ID NO: 576992 - DNA, 15 bp, Homo sapiens
taggctaattagaga

SEQ ID NO: 576993 - DNA, 15 bp, Homo sapiens
aggctaattagagaa

SEQ ID NO: 576994 - DNA, 15 bp, Homo sapiens
ggctaattagagaat

SEQ ID NO: 576995 - DNA, 15 bp, Homo sapiens
gctaattagagaatg

SEQ ID NO: 576996 - DNA, 15 bp, Homo sapiens
ctaattagagaatga

SEQ ID NO: 576997 - DNA, 15 bp, Homo sapiens
taattagagaatgac

SEQ ID NO: 576998 - DNA, 15 bp, Homo sapiens
aattagagaatgacc

SEQ ID NO: 576999 - DNA, 15 bp, Homo sapiens
attagagaatgaccc

SEQ ID NO: 577000 - DNA, 15 bp, Homo sapiens
ttagagaatgacccc

SEQ ID NO: 577001 - DNA, 15 bp, Homo sapiens
tagagaatgaccccc

SEQ ID NO: 577002 - DNA, 15 bp, Homo sapiens
agagaatgaccccct

SEQ ID NO: 577003 - DNA, 15 bp, Homo sapiens
gagaatgaccccctt

SEQ ID NO: 577004 - DNA, 15 bp, Homo sapiens
agaatgacccccttc

SEQ ID NO: 577005 - DNA, 15 bp, Homo sapiens
gaatgacccccttcc

SEQ ID NO: 577006 - DNA, 15 bp, Homo sapiens
aatgacccccttcct

SEQ ID NO: 577007 - DNA, 15 bp, Homo sapiens
atgacccccttcctc

SEQ ID NO: 577008 - DNA, 15 bp, Homo sapiens
tgacccccttcctct

SEQ ID NO: 577009 - DNA, 15 bp, Homo sapiens
gacccccttcctctt

SEQ ID NO: 577010 - DNA, 15 bp, Homo sapiens
acccccttcctcttg

SEQ ID NO: 577011 - DNA, 15 bp, Homo sapiens
cccccttcctcttgg

SEQ ID NO: 577012 - DNA, 15 bp, Homo sapiens
ccccttcctcttgga

SEQ ID NO: 577013 - DNA, 15 bp, Homo sapiens
cccttcctcttggag

SEQ ID NO: 577014 - DNA, 15 bp, Homo sapiens
ccttcctcttggaga

SEQ ID NO: 577015 - DNA, 15 bp, Homo sapiens
cttcctcttggagaa

SEQ ID NO: 577016 - DNA, 15 bp, Homo sapiens
ttcctcttggagaag

SEQ ID NO: 577017 - DNA, 15 bp, Homo sapiens
tcctcttggagaagg

SEQ ID NO: 577018 - DNA, 15 bp, Homo sapiens
cctcttggagaaggt

SEQ ID NO: 577019 - DNA, 15 bp, Homo sapiens
ctcttggagaaggtc

SEQ ID NO: 577020 - DNA, 15 bp, Homo sapiens
tcttggagaaggtcc

SEQ ID NO: 577021 - DNA, 15 bp, Homo sapiens
cttggagaaggtcca

SEQ ID NO: 577022 - DNA, 15 bp, Homo sapiens
ttggagaaggtccat

SEQ ID NO: 577023 - DNA, 15 bp, Homo sapiens
tggagaaggtccatc

SEQ ID NO: 577024 - DNA, 15 bp, Homo sapiens
ggagaaggtccatct

SEQ ID NO: 577025 - DNA, 15 bp, Homo sapiens
gagaaggtccatctc

SEQ ID NO: 577026 - DNA, 15 bp, Homo sapiens
agaaggtccatctct

SEQ ID NO: 577027 - DNA, 15 bp, Homo sapiens
gaaggtccatctctc

SEQ ID NO: 577028 - DNA, 15 bp, Homo sapiens
aaggtccatctctcc

SEQ ID NO: 577029 - DNA, 15 bp, Homo sapiens
aggtccatctctcct

SEQ ID NO: 577030 - DNA, 15 bp, Homo sapiens
ggtccatctctcctt

SEQ ID NO: 577031 - DNA, 15 bp, Homo sapiens
gtccatctctccttt

SEQ ID NO: 577032 - DNA, 15 bp, Homo sapiens
tccatctctcctttt

SEQ ID NO: 577033 - DNA, 15 bp, Homo sapiens
ccatctctccttttc

SEQ ID NO: 577034 - DNA, 15 bp, Homo sapiens
catctctccttttcc

SEQ ID NO: 577035 - DNA, 15 bp, Homo sapiens
atctctccttttcct

SEQ ID NO: 577036 - DNA, 15 bp, Homo sapiens
tctctccttttcctc

SEQ ID NO: 577037 - DNA, 15 bp, Homo sapiens
ctctccttttcctct

SEQ ID NO: 577038 - DNA, 15 bp, Homo sapiens
tctccttttcctctt

SEQ ID NO: 577039 - DNA, 15 bp, Homo sapiens
ctccttttcctcttc

SEQ ID NO: 577040 - DNA, 15 bp, Homo sapiens
tccttttcctcttca

SEQ ID NO: 577041 - DNA, 15 bp, Homo sapiens
ccttttcctcttcac

SEQ ID NO: 577042 - DNA, 15 bp, Homo sapiens
cttttcctcttcact

SEQ ID NO: 577043 - DNA, 15 bp, Homo sapiens
ttttcctcttcactt

SEQ ID NO: 577044 - DNA, 15 bp, Homo sapiens
tttcctcttcacttt

SEQ ID NO: 577045 - DNA, 15 bp, Homo sapiens
ttcctcttcactttt

SEQ ID NO: 577046 - DNA, 15 bp, Homo sapiens
tcctcttcacttttc

SEQ ID NO: 577047 - DNA, 15 bp, Homo sapiens
cctcttcacttttcc

SEQ ID NO: 577048 - DNA, 15 bp, Homo sapiens
ctcttcacttttccg

SEQ ID NO: 577049 - DNA, 15 bp, Homo sapiens
tcttcacttttccgt

SEQ ID NO: 577050 - DNA, 15 bp, Homo sapiens
cttcacttttccgta

SEQ ID NO: 577051 - DNA, 15 bp, Homo sapiens
ttcacttttccgtaa

SEQ ID NO: 577052 - DNA, 15 bp, Homo sapiens
tcacttttccgtaat

SEQ ID NO: 577053 - DNA, 15 bp, Homo sapiens
cacttttccgtaatg

SEQ ID NO: 577054 - DNA, 15 bp, Homo sapiens
acttttccgtaatgt

SEQ ID NO: 577055 - DNA, 15 bp, Homo sapiens
cttttccgtaatgta

SEQ ID NO: 577056 - DNA, 15 bp, Homo sapiens
ttttccgtaatgtaa

SEQ ID NO: 577057 - DNA, 15 bp, Homo sapiens
tttccgtaatgtaaa

SEQ ID NO: 577058 - DNA, 15 bp, Homo sapiens
ttccgtaatgtaaaa

SEQ ID NO: 577059 - DNA, 15 bp, Homo sapiens
tccgtaatgtaaaat

SEQ ID NO: 577060 - DNA, 15 bp, Homo sapiens
ccgtaatgtaaaatg

SEQ ID NO: 577061 - DNA, 15 bp, Homo sapiens
cgtaatgtaaaatgg

SEQ ID NO: 577062 - DNA, 15 bp, Homo sapiens
gtaatgtaaaatgga

SEQ ID NO: 577063 - DNA, 15 bp, Homo sapiens
taatgtaaaatggac

SEQ ID NO: 577064 - DNA, 15 bp, Homo sapiens
aatgtaaaatggaca

SEQ ID NO: 577065 - DNA, 15 bp, Homo sapiens
atgtaaaatggacaa

SEQ ID NO: 577066 - DNA, 15 bp, Homo sapiens
tgtaaaatggacaaa

SEQ ID NO: 577067 - DNA, 15 bp, Homo sapiens
gtaaaatggacaaaa

SEQ ID NO: 577068 - DNA, 15 bp, Homo sapiens
taaaatggacaaaag

SEQ ID NO: 577069 - DNA, 15 bp, Homo sapiens
aaaatggacaaaaga

SEQ ID NO: 577070 - DNA, 15 bp, Homo sapiens
aaatggacaaaagat

SEQ ID NO: 577071 - DNA, 15 bp, Homo sapiens
aatggacaaaagatc

SEQ ID NO: 577072 - DNA, 15 bp, Homo sapiens
atggacaaaagatcc

SEQ ID NO: 577073 - DNA, 15 bp, Homo sapiens
tggacaaaagatcct

SEQ ID NO: 577074 - DNA, 15 bp, Homo sapiens
ggacaaaagatccta

SEQ ID NO: 577075 - DNA, 15 bp, Homo sapiens
gacaaaagatcctat

SEQ ID NO: 577076 - DNA, 15 bp, Homo sapiens
acaaaagatcctatc

SEQ ID NO: 577077 - DNA, 15 bp, Homo sapiens
caaaagatcctatct

SEQ ID NO: 577078 - DNA, 15 bp, Homo sapiens
aaaagatcctatcta

SEQ ID NO: 577079 - DNA, 15 bp, Homo sapiens
aaagatcctatctac

SEQ ID NO: 577080 - DNA, 15 bp, Homo sapiens
aagatcctatctaca

SEQ ID NO: 577081 - DNA, 15 bp, Homo sapiens
agatcctatctacac

SEQ ID NO: 577082 - DNA, 15 bp, Homo sapiens
gatcctatctacacc

SEQ ID NO: 577083 - DNA, 15 bp, Homo sapiens
atcctatctacacct

SEQ ID NO: 577084 - DNA, 15 bp, Homo sapiens
tcctatctacacctg

SEQ ID NO: 577085 - DNA, 15 bp, Homo sapiens
cctatctacacctga

SEQ ID NO: 577086 - DNA, 15 bp, Homo sapiens
ctatctacacctgat

SEQ ID NO: 577087 - DNA, 15 bp, Homo sapiens
tatctacacctgata

SEQ ID NO: 577088 - DNA, 15 bp, Homo sapiens
atctacacctgatag

SEQ ID NO: 577089 - DNA, 15 bp, Homo sapiens
tctacacctgatagg

SEQ ID NO: 577090 - DNA, 15 bp, Homo sapiens
ctacacctgatagga

SEQ ID NO: 577091 - DNA, 15 bp, Homo sapiens
tacacctgataggaa

SEQ ID NO: 577092 - DNA, 15 bp, Homo sapiens
acacctgataggaac

SEQ ID NO: 577093 - DNA, 15 bp, Homo sapiens
cacctgataggaaca

SEQ ID NO: 577094 - DNA, 15 bp, Homo sapiens
acctgataggaacaa

SEQ ID NO: 577095 - DNA, 15 bp, Homo sapiens
cctgataggaacaaa

SEQ ID NO: 577096 - DNA, 15 bp, Homo sapiens
ctgataggaacaaaa

SEQ ID NO: 577097 - DNA, 15 bp, Homo sapiens
tgataggaacaaaac

SEQ ID NO: 577098 - DNA, 15 bp, Homo sapiens
gataggaacaaaaca

SEQ ID NO: 577099 - DNA, 15 bp, Homo sapiens
ataggaacaaaacag

SEQ ID NO: 577100 - DNA, 15 bp, Homo sapiens
taggaacaaaacaga

SEQ ID NO: 577101 - DNA, 15 bp, Homo sapiens
aggaacaaaacagat

SEQ ID NO: 577102 - DNA, 15 bp, Homo sapiens
ggaacaaaacagata

SEQ ID NO: 577103 - DNA, 15 bp, Homo sapiens
gaacaaaacagatat

SEQ ID NO: 577104 - DNA, 15 bp, Homo sapiens
aacaaaacagatatg

SEQ ID NO: 577105 - DNA, 15 bp, Homo sapiens
acaaaacagatatgc

SEQ ID NO: 577106 - DNA, 15 bp, Homo sapiens
caaaacagatatgca

SEQ ID NO: 577107 - DNA, 15 bp, Homo sapiens
aaaacagatatgcat

SEQ ID NO: 577108 - DNA, 15 bp, Homo sapiens
aaacagatatgcata

SEQ ID NO: 577109 - DNA, 15 bp, Homo sapiens
aacagatatgcatag

SEQ ID NO: 577110 - DNA, 15 bp, Homo sapiens
acagatatgcatagg

SEQ ID NO: 577111 - DNA, 15 bp, Homo sapiens
cagatatgcataggt

SEQ ID NO: 577112 - DNA, 15 bp, Homo sapiens
agatatgcataggtt

SEQ ID NO: 577113 - DNA, 15 bp, Homo sapiens
gatatgcataggtta

SEQ ID NO: 577114 - DNA, 15 bp, Homo sapiens
atatgcataggttaa

SEQ ID NO: 577115 - DNA, 15 bp, Homo sapiens
tatgcataggttaag

SEQ ID NO: 577116 - DNA, 15 bp, Homo sapiens
atgcataggttaagg

SEQ ID NO: 577117 - DNA, 15 bp, Homo sapiens
tgcataggttaagga

SEQ ID NO: 577118 - DNA, 15 bp, Homo sapiens
gcataggttaaggag

SEQ ID NO: 577119 - DNA, 15 bp, Homo sapiens
cataggttaaggaga

SEQ ID NO: 577120 - DNA, 15 bp, Homo sapiens
ataggttaaggagag

SEQ ID NO: 577121 - DNA, 15 bp, Homo sapiens
taggttaaggagagt

SEQ ID NO: 577122 - DNA, 15 bp, Homo sapiens
aggttaaggagagtg

SEQ ID NO: 577123 - DNA, 15 bp, Homo sapiens
ggttaaggagagtgc

SEQ ID NO: 577124 - DNA, 15 bp, Homo sapiens
gttaaggagagtgcc

SEQ ID NO: 577125 - DNA, 15 bp, Homo sapiens
ttaaggagagtgcct

SEQ ID NO: 577126 - DNA, 15 bp, Homo sapiens
taaggagagtgcctc

SEQ ID NO: 577127 - DNA, 15 bp, Homo sapiens
aaggagagtgcctca

SEQ ID NO: 577128 - DNA, 15 bp, Homo sapiens
aggagagtgcctcag

SEQ ID NO: 577129 - DNA, 15 bp, Homo sapiens
ggagagtgcctcaga

SEQ ID NO: 577130 - DNA, 15 bp, Homo sapiens
gagagtgcctcagat

SEQ ID NO: 577131 - DNA, 15 bp, Homo sapiens
agagtgcctcagatt

SEQ ID NO: 577132 - DNA, 15 bp, Homo sapiens
gagtgcctcagattg

SEQ ID NO: 577133 - DNA, 15 bp, Homo sapiens
agtgcctcagattga

SEQ ID NO: 577134 - DNA, 15 bp, Homo sapiens
gtgcctcagattgag

SEQ ID NO: 577135 - DNA, 15 bp, Homo sapiens
tgcctcagattgaga

SEQ ID NO: 577136 - DNA, 15 bp, Homo sapiens
gcctcagattgagac

SEQ ID NO: 577137 - DNA, 15 bp, Homo sapiens
cctcagattgagaca

SEQ ID NO: 577138 - DNA, 15 bp, Homo sapiens
ctcagattgagacaa

SEQ ID NO: 577139 - DNA, 15 bp, Homo sapiens
tcagattgagacaag

SEQ ID NO: 577140 - DNA, 15 bp, Homo sapiens
cagattgagacaaga

SEQ ID NO: 577141 - DNA, 15 bp, Homo sapiens
agattgagacaagaa

SEQ ID NO: 577142 - DNA, 15 bp, Homo sapiens
gattgagacaagaat

SEQ ID NO: 577143 - DNA, 15 bp, Homo sapiens
attgagacaagaatg

SEQ ID NO: 577144 - DNA, 15 bp, Homo sapiens
ttgagacaagaatgt

SEQ ID NO: 577145 - DNA, 15 bp, Homo sapiens
tgagacaagaatgtc

SEQ ID NO: 577146 - DNA, 15 bp, Homo sapiens
gagacaagaatgtca

SEQ ID NO: 577147 - DNA, 15 bp, Homo sapiens
agacaagaatgtcaa

SEQ ID NO: 577148 - DNA, 15 bp, Homo sapiens
gacaagaatgtcaag

SEQ ID NO: 577149 - DNA, 15 bp, Homo sapiens
acaagaatgtcaagt

SEQ ID NO: 577150 - DNA, 15 bp, Homo sapiens
caagaatgtcaagtt

SEQ ID NO: 577151 - DNA, 15 bp, Homo sapiens
aagaatgtcaagttg

SEQ ID NO: 577152 - DNA, 15 bp, Homo sapiens
agaatgtcaagttgc

SEQ ID NO: 577153 - DNA, 15 bp, Homo sapiens
gaatgtcaagttgct

SEQ ID NO: 577154 - DNA, 15 bp, Homo sapiens
aatgtcaagttgctg

SEQ ID NO: 577155 - DNA, 15 bp, Homo sapiens
atgtcaagttgctga

SEQ ID NO: 577156 - DNA, 15 bp, Homo sapiens
tgtcaagttgctgag

SEQ ID NO: 577157 - DNA, 15 bp, Homo sapiens
gtcaagttgctgagt

SEQ ID NO: 577158 - DNA, 15 bp, Homo sapiens
tcaagttgctgagta

SEQ ID NO: 577159 - DNA, 15 bp, Homo sapiens
caagttgctgagtac

SEQ ID NO: 577160 - DNA, 15 bp, Homo sapiens
aagttgctgagtact

SEQ ID NO: 577161 - DNA, 15 bp, Homo sapiens
agttgctgagtactt

SEQ ID NO: 577162 - DNA, 15 bp, Homo sapiens
gttgctgagtactta

SEQ ID NO: 577163 - DNA, 15 bp, Homo sapiens
ttgctgagtacttag

SEQ ID NO: 577164 - DNA, 15 bp, Homo sapiens
tgctgagtacttagc

SEQ ID NO: 577165 - DNA, 15 bp, Homo sapiens
gctgagtacttagca

SEQ ID NO: 577166 - DNA, 15 bp, Homo sapiens
ctgagtacttagcaa

SEQ ID NO: 577167 - DNA, 15 bp, Homo sapiens
tgagtacttagcaaa

SEQ ID NO: 577168 - DNA, 15 bp, Homo sapiens
gagtacttagcaaac

SEQ ID NO: 577169 - DNA, 15 bp, Homo sapiens
agtacttagcaaact

SEQ ID NO: 577170 - DNA, 15 bp, Homo sapiens
gtacttagcaaactt

SEQ ID NO: 577171 - DNA, 15 bp, Homo sapiens
tacttagcaaactta

SEQ ID NO: 577172 - DNA, 15 bp, Homo sapiens
acttagcaaacttat

SEQ ID NO: 577173 - DNA, 15 bp, Homo sapiens
cttagcaaacttata

SEQ ID NO: 577174 - DNA, 15 bp, Homo sapiens
ttagcaaacttatat

SEQ ID NO: 577175 - DNA, 15 bp, Homo sapiens
tagcaaacttatatt

SEQ ID NO: 577176 - DNA, 15 bp, Homo sapiens
agcaaacttatattg

SEQ ID NO: 577177 - DNA, 15 bp, Homo sapiens
gcaaacttatattga

SEQ ID NO: 577178 - DNA, 15 bp, Homo sapiens
caaacttatattgag

SEQ ID NO: 577179 - DNA, 15 bp, Homo sapiens
aaacttatattgagt

SEQ ID NO: 577180 - DNA, 15 bp, Homo sapiens
aacttatattgagtc

SEQ ID NO: 577181 - DNA, 15 bp, Homo sapiens
acttatattgagtct

SEQ ID NO: 577182 - DNA, 15 bp, Homo sapiens
cttatattgagtctt

SEQ ID NO: 577183 - DNA, 15 bp, Homo sapiens
ttatattgagtcttt

SEQ ID NO: 577184 - DNA, 15 bp, Homo sapiens
tatattgagtctttt

SEQ ID NO: 577185 - DNA, 15 bp, Homo sapiens
atattgagtcttttg

SEQ ID NO: 577186 - DNA, 15 bp, Homo sapiens
tattgagtcttttgc

SEQ ID NO: 577187 - DNA, 15 bp, Homo sapiens
attgagtcttttgca

SEQ ID NO: 577188 - DNA, 15 bp, Homo sapiens
ttgagtcttttgcat

SEQ ID NO: 577189 - DNA, 15 bp, Homo sapiens
tgagtcttttgcatg

SEQ ID NO: 577190 - DNA, 15 bp, Homo sapiens
gagtcttttgcatgg

SEQ ID NO: 577191 - DNA, 15 bp, Homo sapiens
agtcttttgcatgga

SEQ ID NO: 577192 - DNA, 15 bp, Homo sapiens
gtcttttgcatggac

SEQ ID NO: 577193 - DNA, 15 bp, Homo sapiens
tcttttgcatggact

SEQ ID NO: 577194 - DNA, 15 bp, Homo sapiens
cttttgcatggactc

SEQ ID NO: 577195 - DNA, 15 bp, Homo sapiens
ttttgcatggactca

SEQ ID NO: 577196 - DNA, 15 bp, Homo sapiens
tttgcatggactcaa

SEQ ID NO: 577197 - DNA, 15 bp, Homo sapiens
ttgcatggactcaat

SEQ ID NO: 577198 - DNA, 15 bp, Homo sapiens
tgcatggactcaata

SEQ ID NO: 577199 - DNA, 15 bp, Homo sapiens
gcatggactcaatat

SEQ ID NO: 577200 - DNA, 15 bp, Homo sapiens
catggactcaatatt

SEQ ID NO: 577201 - DNA, 15 bp, Homo sapiens
atggactcaatatta

SEQ ID NO: 577202 - DNA, 15 bp, Homo sapiens
tggactcaatattat

SEQ ID NO: 577203 - DNA, 15 bp, Homo sapiens
ggactcaatattata

SEQ ID NO: 577204 - DNA, 15 bp, Homo sapiens
gactcaatattatat

SEQ ID NO: 577205 - DNA, 15 bp, Homo sapiens
actcaatattatatt

SEQ ID NO: 577206 - DNA, 15 bp, Homo sapiens
ctcaatattatattt

SEQ ID NO: 577207 - DNA, 15 bp, Homo sapiens
tcaatattatatttt

SEQ ID NO: 577208 - DNA, 15 bp, Homo sapiens
caatattatattttg

SEQ ID NO: 577209 - DNA, 15 bp, Homo sapiens
aatattatattttgt

SEQ ID NO: 577210 - DNA, 15 bp, Homo sapiens
atattatattttgtc

SEQ ID NO: 577211 - DNA, 15 bp, Homo sapiens
tattatattttgtct

SEQ ID NO: 577212 - DNA, 15 bp, Homo sapiens
attatattttgtcta

SEQ ID NO: 577213 - DNA, 15 bp, Homo sapiens
ttatattttgtctag

SEQ ID NO: 577214 - DNA, 15 bp, Homo sapiens
tatattttgtctaga

SEQ ID NO: 577215 - DNA, 15 bp, Homo sapiens
atattttgtctagaa

SEQ ID NO: 577216 - DNA, 15 bp, Homo sapiens
tattttgtctagaat

SEQ ID NO: 577217 - DNA, 15 bp, Homo sapiens
attttgtctagaatt

SEQ ID NO: 577218 - DNA, 15 bp, Homo sapiens
ttttgtctagaattt

SEQ ID NO: 577219 - DNA, 15 bp, Homo sapiens
tttgtctagaattta

SEQ ID NO: 577220 - DNA, 15 bp, Homo sapiens
ttgtctagaatttat

SEQ ID NO: 577221 - DNA, 15 bp, Homo sapiens
tgtctagaatttata

SEQ ID NO: 577222 - DNA, 15 bp, Homo sapiens
gtctagaatttatag

SEQ ID NO: 577223 - DNA, 15 bp, Homo sapiens
tctagaatttataga

SEQ ID NO: 577224 - DNA, 15 bp, Homo sapiens
ctagaatttatagac

SEQ ID NO: 577225 - DNA, 15 bp, Homo sapiens
tagaatttatagaca

SEQ ID NO: 577226 - DNA, 15 bp, Homo sapiens
agaatttatagacaa

SEQ ID NO: 577227 - DNA, 15 bp, Homo sapiens
gaatttatagacaaa

SEQ ID NO: 577228 - DNA, 15 bp, Homo sapiens
aatttatagacaaaa

SEQ ID NO: 577229 - DNA, 15 bp, Homo sapiens
atttatagacaaaac

SEQ ID NO: 577230 - DNA, 15 bp, Homo sapiens
tttatagacaaaact

SEQ ID NO: 577231 - DNA, 15 bp, Homo sapiens
ttatagacaaaactt

SEQ ID NO: 577232 - DNA, 15 bp, Homo sapiens
tatagacaaaactta

SEQ ID NO: 577233 - DNA, 15 bp, Homo sapiens
atagacaaaacttat

SEQ ID NO: 577234 - DNA, 15 bp, Homo sapiens
tagacaaaacttata

SEQ ID NO: 577235 - DNA, 15 bp, Homo sapiens
agacaaaacttatag

SEQ ID NO: 577236 - DNA, 15 bp, Homo sapiens
gacaaaacttatagc

SEQ ID NO: 577237 - DNA, 15 bp, Homo sapiens
acaaaacttatagca

SEQ ID NO: 577238 - DNA, 15 bp, Homo sapiens
caaaacttatagcac

SEQ ID NO: 577239 - DNA, 15 bp, Homo sapiens
aaaacttatagcaca

SEQ ID NO: 577240 - DNA, 15 bp, Homo sapiens
aaacttatagcacag

SEQ ID NO: 577241 - DNA, 15 bp, Homo sapiens
aacttatagcacagc

SEQ ID NO: 577242 - DNA, 15 bp, Homo sapiens
acttatagcacagca

SEQ ID NO: 577243 - DNA, 15 bp, Homo sapiens
cttatagcacagcag

SEQ ID NO: 577244 - DNA, 15 bp, Homo sapiens
ttatagcacagcagg

SEQ ID NO: 577245 - DNA, 15 bp, Homo sapiens
tatagcacagcaggc

SEQ ID NO: 577246 - DNA, 15 bp, Homo sapiens
atagcacagcaggcc

SEQ ID NO: 577247 - DNA, 15 bp, Homo sapiens
tagcacagcaggcca

SEQ ID NO: 577248 - DNA, 15 bp, Homo sapiens
agcacagcaggccag

SEQ ID NO: 577249 - DNA, 15 bp, Homo sapiens
gcacagcaggccaga

SEQ ID NO: 577250 - DNA, 15 bp, Homo sapiens
cacagcaggccagat

SEQ ID NO: 577251 - DNA, 15 bp, Homo sapiens
acagcaggccagata

SEQ ID NO: 577252 - DNA, 15 bp, Homo sapiens
cagcaggccagatag

SEQ ID NO: 577253 - DNA, 15 bp, Homo sapiens
agcaggccagatagc

SEQ ID NO: 577254 - DNA, 15 bp, Homo sapiens
gcaggccagatagca

SEQ ID NO: 577255 - DNA, 15 bp, Homo sapiens
caggccagatagcat

SEQ ID NO: 577256 - DNA, 15 bp, Homo sapiens
aggccagatagcatg

SEQ ID NO: 577257 - DNA, 15 bp, Homo sapiens
ggccagatagcatgg

SEQ ID NO: 577258 - DNA, 15 bp, Homo sapiens
gccagatagcatggc

SEQ ID NO: 577259 - DNA, 15 bp, Homo sapiens
ccagatagcatggct

SEQ ID NO: 577260 - DNA, 15 bp, Homo sapiens
cagatagcatggcta

SEQ ID NO: 577261 - DNA, 15 bp, Homo sapiens
agatagcatggctaa

SEQ ID NO: 577262 - DNA, 15 bp, Homo sapiens
gatagcatggctaaa

SEQ ID NO: 577263 - DNA, 15 bp, Homo sapiens
atagcatggctaaac

SEQ ID NO: 577264 - DNA, 15 bp, Homo sapiens
tagcatggctaaaca

SEQ ID NO: 577265 - DNA, 15 bp, Homo sapiens
agcatggctaaacat

SEQ ID NO: 577266 - DNA, 15 bp, Homo sapiens
gcatggctaaacatg

SEQ ID NO: 577267 - DNA, 15 bp, Homo sapiens
catggctaaacatgt

SEQ ID NO: 577268 - DNA, 15 bp, Homo sapiens
atggctaaacatgtt

SEQ ID NO: 577269 - DNA, 15 bp, Homo sapiens
tggctaaacatgttg

SEQ ID NO: 577270 - DNA, 15 bp, Homo sapiens
ggctaaacatgttgc

SEQ ID NO: 577271 - DNA, 15 bp, Homo sapiens
gctaaacatgttgct

SEQ ID NO: 577272 - DNA, 15 bp, Homo sapiens
ctaaacatgttgcta

SEQ ID NO: 577273 - DNA, 15 bp, Homo sapiens
taaacatgttgctac

SEQ ID NO: 577274 - DNA, 15 bp, Homo sapiens
aaacatgttgctact

SEQ ID NO: 577275 - DNA, 15 bp, Homo sapiens
aacatgttgctactt

SEQ ID NO: 577276 - DNA, 15 bp, Homo sapiens
acatgttgctacttg

SEQ ID NO: 577277 - DNA, 15 bp, Homo sapiens
catgttgctacttgt

SEQ ID NO: 577278 - DNA, 15 bp, Homo sapiens
atgttgctacttgtt

SEQ ID NO: 577279 - DNA, 15 bp, Homo sapiens
tgttgctacttgttt

SEQ ID NO: 577280 - DNA, 15 bp, Homo sapiens
gttgctacttgtttt

SEQ ID NO: 577281 - DNA, 15 bp, Homo sapiens
ttgctacttgttttc

SEQ ID NO: 577282 - DNA, 15 bp, Homo sapiens
tgctacttgttttct

SEQ ID NO: 577283 - DNA, 15 bp, Homo sapiens
gctacttgttttctc

SEQ ID NO: 577284 - DNA, 15 bp, Homo sapiens
ctacttgttttctca

SEQ ID NO: 577285 - DNA, 15 bp, Homo sapiens
tacttgttttctcag

SEQ ID NO: 577286 - DNA, 15 bp, Homo sapiens
acttgttttctcagc

SEQ ID NO: 577287 - DNA, 15 bp, Homo sapiens
cttgttttctcagca

SEQ ID NO: 577288 - DNA, 15 bp, Homo sapiens
ttgttttctcagcat

SEQ ID NO: 577289 - DNA, 15 bp, Homo sapiens
tgttttctcagcatg

SEQ ID NO: 577290 - DNA, 15 bp, Homo sapiens
gttttctcagcatga

SEQ ID NO: 577291 - DNA, 15 bp, Homo sapiens
ttttctcagcatgaa

SEQ ID NO: 577292 - DNA, 15 bp, Homo sapiens
tttctcagcatgaac

SEQ ID NO: 577293 - DNA, 15 bp, Homo sapiens
ttctcagcatgaact

SEQ ID NO: 577294 - DNA, 15 bp, Homo sapiens
tctcagcatgaactc

SEQ ID NO: 577295 - DNA, 15 bp, Homo sapiens
ctcagcatgaactca

SEQ ID NO: 577296 - DNA, 15 bp, Homo sapiens
tcagcatgaactcag

SEQ ID NO: 577297 - DNA, 15 bp, Homo sapiens
cagcatgaactcaga

SEQ ID NO: 577298 - DNA, 15 bp, Homo sapiens
agcatgaactcagat

SEQ ID NO: 577299 - DNA, 15 bp, Homo sapiens
gcatgaactcagatt

SEQ ID NO: 577300 - DNA, 15 bp, Homo sapiens
catgaactcagattt

SEQ ID NO: 577301 - DNA, 15 bp, Homo sapiens
atgaactcagatttt

SEQ ID NO: 577302 - DNA, 15 bp, Homo sapiens
tgaactcagattttt

SEQ ID NO: 577303 - DNA, 15 bp, Homo sapiens
gaactcagattttta

SEQ ID NO: 577304 - DNA, 15 bp, Homo sapiens
aactcagatttttaa

SEQ ID NO: 577305 - DNA, 15 bp, Homo sapiens
actcagatttttaaa

SEQ ID NO: 577306 - DNA, 15 bp, Homo sapiens
ctcagatttttaaag

SEQ ID NO: 577307 - DNA, 15 bp, Homo sapiens
tcagatttttaaagc

SEQ ID NO: 577308 - DNA, 15 bp, Homo sapiens
cagatttttaaagca

SEQ ID NO: 577309 - DNA, 15 bp, Homo sapiens
agatttttaaagcac

SEQ ID NO: 577310 - DNA, 15 bp, Homo sapiens
gatttttaaagcact

SEQ ID NO: 577311 - DNA, 15 bp, Homo sapiens
atttttaaagcactg

SEQ ID NO: 577312 - DNA, 15 bp, Homo sapiens
tttttaaagcactgg

SEQ ID NO: 577313 - DNA, 15 bp, Homo sapiens
ttttaaagcactggc

SEQ ID NO: 577314 - DNA, 15 bp, Homo sapiens
tttaaagcactggct

SEQ ID NO: 577315 - DNA, 15 bp, Homo sapiens
ttaaagcactggcta

SEQ ID NO: 577316 - DNA, 15 bp, Homo sapiens
taaagcactggctaa

SEQ ID NO: 577317 - DNA, 15 bp, Homo sapiens
aaagcactggctaat

SEQ ID NO: 577318 - DNA, 15 bp, Homo sapiens
aagcactggctaata

SEQ ID NO: 577319 - DNA, 15 bp, Homo sapiens
agcactggctaatat

SEQ ID NO: 577320 - DNA, 15 bp, Homo sapiens
gcactggctaatata

SEQ ID NO: 577321 - DNA, 15 bp, Homo sapiens
cactggctaatatag

SEQ ID NO: 577322 - DNA, 15 bp, Homo sapiens
actggctaatatagg

SEQ ID NO: 577323 - DNA, 15 bp, Homo sapiens
ctggctaatataggt

SEQ ID NO: 577324 - DNA, 15 bp, Homo sapiens
tggctaatataggtg

SEQ ID NO: 577325 - DNA, 15 bp, Homo sapiens
ggctaatataggtga

SEQ ID NO: 577326 - DNA, 15 bp, Homo sapiens
gctaatataggtgac

SEQ ID NO: 577327 - DNA, 15 bp, Homo sapiens
ctaatataggtgaca

SEQ ID NO: 577328 - DNA, 15 bp, Homo sapiens
taatataggtgacaa

SEQ ID NO: 577329 - DNA, 15 bp, Homo sapiens
aatataggtgacaag

SEQ ID NO: 577330 - DNA, 15 bp, Homo sapiens
atataggtgacaagt

SEQ ID NO: 577331 - DNA, 15 bp, Homo sapiens
tataggtgacaagtt

SEQ ID NO: 577332 - DNA, 15 bp, Homo sapiens
ataggtgacaagtta

SEQ ID NO: 577333 - DNA, 15 bp, Homo sapiens
taggtgacaagttat

SEQ ID NO: 577334 - DNA, 15 bp, Homo sapiens
aggtgacaagttatt

SEQ ID NO: 577335 - DNA, 15 bp, Homo sapiens
ggtgacaagttatta

SEQ ID NO: 577336 - DNA, 15 bp, Homo sapiens
gtgacaagttattat

SEQ ID NO: 577337 - DNA, 15 bp, Homo sapiens
tgacaagttattatt

SEQ ID NO: 577338 - DNA, 15 bp, Homo sapiens
gacaagttattattg

SEQ ID NO: 577339 - DNA, 15 bp, Homo sapiens
acaagttattattgc

SEQ ID NO: 577340 - DNA, 15 bp, Homo sapiens
caagttattattgcc

SEQ ID NO: 577341 - DNA, 15 bp, Homo sapiens
aagttattattgcct

SEQ ID NO: 577342 - DNA, 15 bp, Homo sapiens
agttattattgcctt

SEQ ID NO: 577343 - DNA, 15 bp, Homo sapiens
gttattattgccttc

SEQ ID NO: 577344 - DNA, 15 bp, Homo sapiens
ttattattgccttcc

SEQ ID NO: 577345 - DNA, 15 bp, Homo sapiens
tattattgccttccc

SEQ ID NO: 577346 - DNA, 15 bp, Homo sapiens
attattgccttccct

SEQ ID NO: 577347 - DNA, 15 bp, Homo sapiens
ttattgccttccctt

SEQ ID NO: 577348 - DNA, 15 bp, Homo sapiens
tattgccttcccttt

SEQ ID NO: 577349 - DNA, 15 bp, Homo sapiens
attgccttccctttt

SEQ ID NO: 577350 - DNA, 15 bp, Homo sapiens
ttgccttcccttttt

SEQ ID NO: 577351 - DNA, 15 bp, Homo sapiens
tgccttccctttttt

SEQ ID NO: 577352 - DNA, 15 bp, Homo sapiens
gccttcccttttttc

SEQ ID NO: 577353 - DNA, 15 bp, Homo sapiens
ccttcccttttttcc

SEQ ID NO: 577354 - DNA, 15 bp, Homo sapiens
cttcccttttttcct

SEQ ID NO: 577355 - DNA, 15 bp, Homo sapiens
ttcccttttttcctt

SEQ ID NO: 577356 - DNA, 15 bp, Homo sapiens
tcccttttttccttg

SEQ ID NO: 577357 - DNA, 15 bp, Homo sapiens
cccttttttccttgc

SEQ ID NO: 577358 - DNA, 15 bp, Homo sapiens
ccttttttccttgct

SEQ ID NO: 577359 - DNA, 15 bp, Homo sapiens
cttttttccttgctt

SEQ ID NO: 577360 - DNA, 15 bp, Homo sapiens
ttttttccttgcttc

SEQ ID NO: 577361 - DNA, 15 bp, Homo sapiens
tttttccttgcttct

SEQ ID NO: 577362 - DNA, 15 bp, Homo sapiens
ttttccttgcttctg

SEQ ID NO: 577363 - DNA, 15 bp, Homo sapiens
tttccttgcttctgg

SEQ ID NO: 577364 - DNA, 15 bp, Homo sapiens
ttccttgcttctggg

SEQ ID NO: 577365 - DNA, 15 bp, Homo sapiens
tccttgcttctgggg

SEQ ID NO: 577366 - DNA, 15 bp, Homo sapiens
ccttgcttctggggg

SEQ ID NO: 577367 - DNA, 15 bp, Homo sapiens
cttgcttctgggggt

SEQ ID NO: 577368 - DNA, 15 bp, Homo sapiens
ttgcttctgggggta

SEQ ID NO: 577369 - DNA, 15 bp, Homo sapiens
tgcttctgggggtaa

SEQ ID NO: 577370 - DNA, 15 bp, Homo sapiens
gcttctgggggtaag

SEQ ID NO: 577371 - DNA, 15 bp, Homo sapiens
cttctgggggtaagt

SEQ ID NO: 577372 - DNA, 15 bp, Homo sapiens
ttctgggggtaagtc

SEQ ID NO: 577373 - DNA, 15 bp, Homo sapiens
tctgggggtaagtct

SEQ ID NO: 577374 - DNA, 15 bp, Homo sapiens
ctgggggtaagtcta

SEQ ID NO: 577375 - DNA, 15 bp, Homo sapiens
tgggggtaagtctaa

SEQ ID NO: 577376 - DNA, 15 bp, Homo sapiens
gggggtaagtctaag

SEQ ID NO: 577377 - DNA, 15 bp, Homo sapiens
ggggtaagtctaaga

SEQ ID NO: 577378 - DNA, 15 bp, Homo sapiens
gggtaagtctaagaa

SEQ ID NO: 577379 - DNA, 15 bp, Homo sapiens
ggtaagtctaagaag

SEQ ID NO: 577380 - DNA, 15 bp, Homo sapiens
gtaagtctaagaagc

SEQ ID NO: 577381 - DNA, 15 bp, Homo sapiens
taagtctaagaagct

SEQ ID NO: 577382 - DNA, 15 bp, Homo sapiens
aagtctaagaagctt

SEQ ID NO: 577383 - DNA, 15 bp, Homo sapiens
agtctaagaagcttt

SEQ ID NO: 577384 - DNA, 15 bp, Homo sapiens
gtctaagaagctttg

SEQ ID NO: 577385 - DNA, 15 bp, Homo sapiens
tctaagaagctttgg

SEQ ID NO: 577386 - DNA, 15 bp, Homo sapiens
ctaagaagctttggt

SEQ ID NO: 577387 - DNA, 15 bp, Homo sapiens
taagaagctttggtt

SEQ ID NO: 577388 - DNA, 15 bp, Homo sapiens
aagaagctttggttc

SEQ ID NO: 577389 - DNA, 15 bp, Homo sapiens
agaagctttggttca

SEQ ID NO: 577390 - DNA, 15 bp, Homo sapiens
gaagctttggttcac

SEQ ID NO: 577391 - DNA, 15 bp, Homo sapiens
aagctttggttcacg

SEQ ID NO: 577392 - DNA, 15 bp, Homo sapiens
agctttggttcacga

SEQ ID NO: 577393 - DNA, 15 bp, Homo sapiens
gctttggttcacgaa

SEQ ID NO: 577394 - DNA, 15 bp, Homo sapiens
ctttggttcacgaaa

SEQ ID NO: 577395 - DNA, 15 bp, Homo sapiens
tttggttcacgaaag

SEQ ID NO: 577396 - DNA, 15 bp, Homo sapiens
ttggttcacgaaagg

SEQ ID NO: 577397 - DNA, 15 bp, Homo sapiens
tggttcacgaaaggg

SEQ ID NO: 577398 - DNA, 15 bp, Homo sapiens
ggttcacgaaaggga

SEQ ID NO: 577399 - DNA, 15 bp, Homo sapiens
gttcacgaaagggat

SEQ ID NO: 577400 - DNA, 15 bp, Homo sapiens
ttcacgaaagggatc

SEQ ID NO: 577401 - DNA, 15 bp, Homo sapiens
tcacgaaagggatct

SEQ ID NO: 577402 - DNA, 15 bp, Homo sapiens
cacgaaagggatcta

SEQ ID NO: 577403 - DNA, 15 bp, Homo sapiens
acgaaagggatctaa

SEQ ID NO: 577404 - DNA, 15 bp, Homo sapiens
cgaaagggatctaag

SEQ ID NO: 577405 - DNA, 15 bp, Homo sapiens
gaaagggatctaagg

SEQ ID NO: 577406 - DNA, 15 bp, Homo sapiens
aaagggatctaagga

SEQ ID NO: 577407 - DNA, 15 bp, Homo sapiens
aagggatctaaggaa

SEQ ID NO: 577408 - DNA, 15 bp, Homo sapiens
agggatctaaggaac

SEQ ID NO: 577409 - DNA, 15 bp, Homo sapiens
gggatctaaggaaca

SEQ ID NO: 577410 - DNA, 15 bp, Homo sapiens
ggatctaaggaacac

SEQ ID NO: 577411 - DNA, 15 bp, Homo sapiens
gatctaaggaacact

SEQ ID NO: 577412 - DNA, 15 bp, Homo sapiens
atctaaggaacactg

SEQ ID NO: 577413 - DNA, 15 bp, Homo sapiens
tctaaggaacactgt

SEQ ID NO: 577414 - DNA, 15 bp, Homo sapiens
ctaaggaacactgtg

SEQ ID NO: 577415 - DNA, 15 bp, Homo sapiens
taaggaacactgtgt

SEQ ID NO: 577416 - DNA, 15 bp, Homo sapiens
aaggaacactgtgtc

SEQ ID NO: 577417 - DNA, 15 bp, Homo sapiens
aggaacactgtgtct

SEQ ID NO: 577418 - DNA, 15 bp, Homo sapiens
ggaacactgtgtctc

SEQ ID NO: 577419 - DNA, 15 bp, Homo sapiens
gaacactgtgtctcc

SEQ ID NO: 577420 - DNA, 15 bp, Homo sapiens
aacactgtgtctccc

SEQ ID NO: 577421 - DNA, 15 bp, Homo sapiens
acactgtgtctccca

SEQ ID NO: 577422 - DNA, 15 bp, Homo sapiens
cactgtgtctcccac

SEQ ID NO: 577423 - DNA, 15 bp, Homo sapiens
actgtgtctcccaca

SEQ ID NO: 577424 - DNA, 15 bp, Homo sapiens
ctgtgtctcccacat

SEQ ID NO: 577425 - DNA, 15 bp, Homo sapiens
tgtgtctcccacatc

SEQ ID NO: 577426 - DNA, 15 bp, Homo sapiens
gtgtctcccacatct

SEQ ID NO: 577427 - DNA, 15 bp, Homo sapiens
tgtctcccacatcta

SEQ ID NO: 577428 - DNA, 15 bp, Homo sapiens
gtctcccacatctac

SEQ ID NO: 577429 - DNA, 15 bp, Homo sapiens
tctcccacatctacc

SEQ ID NO: 577430 - DNA, 15 bp, Homo sapiens
ctcccacatctaccc

SEQ ID NO: 577431 - DNA, 15 bp, Homo sapiens
tcccacatctaccca

SEQ ID NO: 577432 - DNA, 15 bp, Homo sapiens
cccacatctacccac

SEQ ID NO: 577433 - DNA, 15 bp, Homo sapiens
ccacatctacccacg

SEQ ID NO: 577434 - DNA, 15 bp, Homo sapiens
cacatctacccacgc

SEQ ID NO: 577435 - DNA, 15 bp, Homo sapiens
acatctacccacgct

SEQ ID NO: 577436 - DNA, 15 bp, Homo sapiens
catctacccacgctt

SEQ ID NO: 577437 - DNA, 15 bp, Homo sapiens
atctacccacgctta

SEQ ID NO: 577438 - DNA, 15 bp, Homo sapiens
tctacccacgcttat

SEQ ID NO: 577439 - DNA, 15 bp, Homo sapiens
ctacccacgcttatc

SEQ ID NO: 577440 - DNA, 15 bp, Homo sapiens
tacccacgcttatcc

SEQ ID NO: 577441 - DNA, 15 bp, Homo sapiens
acccacgcttatcca

SEQ ID NO: 577442 - DNA, 15 bp, Homo sapiens
cccacgcttatccaa

SEQ ID NO: 577443 - DNA, 15 bp, Homo sapiens
ccacgcttatccaac

SEQ ID NO: 577444 - DNA, 15 bp, Homo sapiens
cacgcttatccaacc

SEQ ID NO: 577445 - DNA, 15 bp, Homo sapiens
acgcttatccaacct

SEQ ID NO: 577446 - DNA, 15 bp, Homo sapiens
cgcttatccaacctt

SEQ ID NO: 577447 - DNA, 15 bp, Homo sapiens
gcttatccaaccttc

SEQ ID NO: 577448 - DNA, 15 bp, Homo sapiens
cttatccaaccttca

SEQ ID NO: 577449 - DNA, 15 bp, Homo sapiens
ttatccaaccttcac

SEQ ID NO: 577450 - DNA, 15 bp, Homo sapiens
tatccaaccttcacc

SEQ ID NO: 577451 - DNA, 15 bp, Homo sapiens
atccaaccttcaccc

SEQ ID NO: 577452 - DNA, 15 bp, Homo sapiens
tccaaccttcaccca

SEQ ID NO: 577453 - DNA, 15 bp, Homo sapiens
ccaaccttcacccag

SEQ ID NO: 577454 - DNA, 15 bp, Homo sapiens
caaccttcacccagt

SEQ ID NO: 577455 - DNA, 15 bp, Homo sapiens
aaccttcacccagtt

SEQ ID NO: 577456 - DNA, 15 bp, Homo sapiens
accttcacccagttt

SEQ ID NO: 577457 - DNA, 15 bp, Homo sapiens
ccttcacccagtttt

SEQ ID NO: 577458 - DNA, 15 bp, Homo sapiens
cttcacccagttttt

SEQ ID NO: 577459 - DNA, 15 bp, Homo sapiens
ttcacccagttttta

SEQ ID NO: 577460 - DNA, 15 bp, Homo sapiens
tcacccagtttttag

SEQ ID NO: 577461 - DNA, 15 bp, Homo sapiens
cacccagtttttaga

SEQ ID NO: 577462 - DNA, 15 bp, Homo sapiens
acccagtttttagaa

SEQ ID NO: 577463 - DNA, 15 bp, Homo sapiens
cccagtttttagaag

SEQ ID NO: 577464 - DNA, 15 bp, Homo sapiens
ccagtttttagaagc

SEQ ID NO: 577465 - DNA, 15 bp, Homo sapiens
cagtttttagaagcc

SEQ ID NO: 577466 - DNA, 15 bp, Homo sapiens
agtttttagaagccg

SEQ ID NO: 577467 - DNA, 15 bp, Homo sapiens
gtttttagaagccgc

SEQ ID NO: 577468 - DNA, 15 bp, Homo sapiens
tttttagaagccgca

SEQ ID NO: 577469 - DNA, 15 bp, Homo sapiens
ttttagaagccgcag

SEQ ID NO: 577470 - DNA, 15 bp, Homo sapiens
tttagaagccgcagt

SEQ ID NO: 577471 - DNA, 15 bp, Homo sapiens
ttagaagccgcagtt

SEQ ID NO: 577472 - DNA, 15 bp, Homo sapiens
tagaagccgcagttt

SEQ ID NO: 577473 - DNA, 15 bp, Homo sapiens
agaagccgcagtttc

SEQ ID NO: 577474 - DNA, 15 bp, Homo sapiens
gaagccgcagtttct

SEQ ID NO: 577475 - DNA, 15 bp, Homo sapiens
aagccgcagtttctg

SEQ ID NO: 577476 - DNA, 15 bp, Homo sapiens
agccgcagtttctgg

SEQ ID NO: 577477 - DNA, 15 bp, Homo sapiens
gccgcagtttctgga

SEQ ID NO: 577478 - DNA, 15 bp, Homo sapiens
ccgcagtttctggag

SEQ ID NO: 577479 - DNA, 15 bp, Homo sapiens
cgcagtttctggaga

SEQ ID NO: 577480 - DNA, 15 bp, Homo sapiens
gcagtttctggagaa

SEQ ID NO: 577481 - DNA, 15 bp, Homo sapiens
cagtttctggagaaa

SEQ ID NO: 577482 - DNA, 15 bp, Homo sapiens
agtttctggagaaac

SEQ ID NO: 577483 - DNA, 15 bp, Homo sapiens
gtttctggagaaact

SEQ ID NO: 577484 - DNA, 15 bp, Homo sapiens
tttctggagaaactg

SEQ ID NO: 577485 - DNA, 15 bp, Homo sapiens
ttctggagaaactgg

SEQ ID NO: 577486 - DNA, 15 bp, Homo sapiens
tctggagaaactggg

SEQ ID NO: 577487 - DNA, 15 bp, Homo sapiens
ctggagaaactgggt

SEQ ID NO: 577488 - DNA, 15 bp, Homo sapiens
tggagaaactgggtt

SEQ ID NO: 577489 - DNA, 15 bp, Homo sapiens
ggagaaactgggtta

SEQ ID NO: 577490 - DNA, 15 bp, Homo sapiens
gagaaactgggttat

SEQ ID NO: 577491 - DNA, 15 bp, Homo sapiens
agaaactgggttatg

SEQ ID NO: 577492 - DNA, 15 bp, Homo sapiens
gaaactgggttatga

SEQ ID NO: 577493 - DNA, 15 bp, Homo sapiens
aaactgggttatgaa

SEQ ID NO: 577494 - DNA, 15 bp, Homo sapiens
aactgggttatgaac

SEQ ID NO: 577495 - DNA, 15 bp, Homo sapiens
actgggttatgaaca

SEQ ID NO: 577496 - DNA, 15 bp, Homo sapiens
ctgggttatgaacaa

SEQ ID NO: 577497 - DNA, 15 bp, Homo sapiens
tgggttatgaacaac

SEQ ID NO: 577498 - DNA, 15 bp, Homo sapiens
gggttatgaacaacc

SEQ ID NO: 577499 - DNA, 15 bp, Homo sapiens
ggttatgaacaacca

SEQ ID NO: 577500 - DNA, 15 bp, Homo sapiens
gttatgaacaaccat

SEQ ID NO: 577501 - DNA, 15 bp, Homo sapiens
ttatgaacaaccatc

SEQ ID NO: 577502 - DNA, 15 bp, Homo sapiens
tatgaacaaccatca

SEQ ID NO: 577503 - DNA, 15 bp, Homo sapiens
atgaacaaccatcaa

SEQ ID NO: 577504 - DNA, 15 bp, Homo sapiens
tgaacaaccatcaat

SEQ ID NO: 577505 - DNA, 15 bp, Homo sapiens
gaacaaccatcaatt

SEQ ID NO: 577506 - DNA, 15 bp, Homo sapiens
aacaaccatcaattc

SEQ ID NO: 577507 - DNA, 15 bp, Homo sapiens
acaaccatcaattct

SEQ ID NO: 577508 - DNA, 15 bp, Homo sapiens
caaccatcaattctg

SEQ ID NO: 577509 - DNA, 15 bp, Homo sapiens
aaccatcaattctgt

SEQ ID NO: 577510 - DNA, 15 bp, Homo sapiens
accatcaattctgta

SEQ ID NO: 577511 - DNA, 15 bp, Homo sapiens
ccatcaattctgtac

SEQ ID NO: 577512 - DNA, 15 bp, Homo sapiens
catcaattctgtacc

SEQ ID NO: 577513 - DNA, 15 bp, Homo sapiens
atcaattctgtacca

SEQ ID NO: 577514 - DNA, 15 bp, Homo sapiens
tcaattctgtaccac

SEQ ID NO: 577515 - DNA, 15 bp, Homo sapiens
caattctgtaccact

SEQ ID NO: 577516 - DNA, 15 bp, Homo sapiens
aattctgtaccactg

SEQ ID NO: 577517 - DNA, 15 bp, Homo sapiens
attctgtaccactga

SEQ ID NO: 577518 - DNA, 15 bp, Homo sapiens
ttctgtaccactgat

SEQ ID NO: 577519 - DNA, 15 bp, Homo sapiens
tctgtaccactgatt

SEQ ID NO: 577520 - DNA, 15 bp, Homo sapiens
ctgtaccactgattc

SEQ ID NO: 577521 - DNA, 15 bp, Homo sapiens
tgtaccactgattct

SEQ ID NO: 577522 - DNA, 15 bp, Homo sapiens
gtaccactgattctg

SEQ ID NO: 577523 - DNA, 15 bp, Homo sapiens
taccactgattctgg

SEQ ID NO: 577524 - DNA, 15 bp, Homo sapiens
accactgattctggt

SEQ ID NO: 577525 - DNA, 15 bp, Homo sapiens
ccactgattctggtt

SEQ ID NO: 577526 - DNA, 15 bp, Homo sapiens
cactgattctggttt

SEQ ID NO: 577527 - DNA, 15 bp, Homo sapiens
actgattctggtttc

SEQ ID NO: 577528 - DNA, 15 bp, Homo sapiens
ctgattctggtttct

SEQ ID NO: 577529 - DNA, 15 bp, Homo sapiens
tgattctggtttctt

SEQ ID NO: 577530 - DNA, 15 bp, Homo sapiens
gattctggtttctta

SEQ ID NO: 577531 - DNA, 15 bp, Homo sapiens
attctggtttcttac

SEQ ID NO: 577532 - DNA, 15 bp, Homo sapiens
ttctggtttcttaca

SEQ ID NO: 577533 - DNA, 15 bp, Homo sapiens
tctggtttcttacat

SEQ ID NO: 577534 - DNA, 15 bp, Homo sapiens
ctggtttcttacatc

SEQ ID NO: 577535 - DNA, 15 bp, Homo sapiens
tggtttcttacatcc

SEQ ID NO: 577536 - DNA, 15 bp, Homo sapiens
ggtttcttacatccc

SEQ ID NO: 577537 - DNA, 15 bp, Homo sapiens
gtttcttacatcccc

SEQ ID NO: 577538 - DNA, 15 bp, Homo sapiens
tttcttacatcccct

SEQ ID NO: 577539 - DNA, 15 bp, Homo sapiens
ttcttacatcccctt

SEQ ID NO: 577540 - DNA, 15 bp, Homo sapiens
tcttacatccccttc

SEQ ID NO: 577541 - DNA, 15 bp, Homo sapiens
cttacatccccttca

SEQ ID NO: 577542 - DNA, 15 bp, Homo sapiens
ttacatccccttcaa

SEQ ID NO: 577543 - DNA, 15 bp, Homo sapiens
tacatccccttcaaa

SEQ ID NO: 577544 - DNA, 15 bp, Homo sapiens
acatccccttcaaag

SEQ ID NO: 577545 - DNA, 15 bp, Homo sapiens
catccccttcaaaga

SEQ ID NO: 577546 - DNA, 15 bp, Homo sapiens
atccccttcaaagag

SEQ ID NO: 577547 - DNA, 15 bp, Homo sapiens
tccccttcaaagaga

SEQ ID NO: 577548 - DNA, 15 bp, Homo sapiens
ccccttcaaagagag

SEQ ID NO: 577549 - DNA, 15 bp, Homo sapiens
cccttcaaagagaga

SEQ ID NO: 577550 - DNA, 15 bp, Homo sapiens
ccttcaaagagagaa

SEQ ID NO: 577551 - DNA, 15 bp, Homo sapiens
cttcaaagagagaat

SEQ ID NO: 577552 - DNA, 15 bp, Homo sapiens
ttcaaagagagaatg

SEQ ID NO: 577553 - DNA, 15 bp, Homo sapiens
tcaaagagagaatgc

SEQ ID NO: 577554 - DNA, 15 bp, Homo sapiens
caaagagagaatgct

SEQ ID NO: 577555 - DNA, 15 bp, Homo sapiens
aaagagagaatgctc

SEQ ID NO: 577556 - DNA, 15 bp, Homo sapiens
aagagagaatgctct

SEQ ID NO: 577557 - DNA, 15 bp, Homo sapiens
agagagaatgctctt

SEQ ID NO: 577558 - DNA, 15 bp, Homo sapiens
gagagaatgctcttg

SEQ ID NO: 577559 - DNA, 15 bp, Homo sapiens
agagaatgctcttgg

SEQ ID NO: 577560 - DNA, 15 bp, Homo sapiens
gagaatgctcttgga

SEQ ID NO: 577561 - DNA, 15 bp, Homo sapiens
agaatgctcttggat

SEQ ID NO: 577562 - DNA, 15 bp, Homo sapiens
gaatgctcttggata

SEQ ID NO: 577563 - DNA, 15 bp, Homo sapiens
aatgctcttggatag

SEQ ID NO: 577564 - DNA, 15 bp, Homo sapiens
atgctcttggatagc

SEQ ID NO: 577565 - DNA, 15 bp, Homo sapiens
tgctcttggatagca

SEQ ID NO: 577566 - DNA, 15 bp, Homo sapiens
gctcttggatagcat

SEQ ID NO: 577567 - DNA, 15 bp, Homo sapiens
ctcttggatagcatg

SEQ ID NO: 577568 - DNA, 15 bp, Homo sapiens
tcttggatagcatgg

SEQ ID NO: 577569 - DNA, 15 bp, Homo sapiens
cttggatagcatggc

SEQ ID NO: 577570 - DNA, 15 bp, Homo sapiens
ttggatagcatggct

SEQ ID NO: 577571 - DNA, 15 bp, Homo sapiens
tggatagcatggctt

SEQ ID NO: 577572 - DNA, 15 bp, Homo sapiens
ggatagcatggcttc

SEQ ID NO: 577573 - DNA, 15 bp, Homo sapiens
gatagcatggcttct

SEQ ID NO: 577574 - DNA, 15 bp, Homo sapiens
atagcatggcttctt

SEQ ID NO: 577575 - DNA, 15 bp, Homo sapiens
tagcatggcttcttc

SEQ ID NO: 577576 - DNA, 15 bp, Homo sapiens
agcatggcttcttcc

SEQ ID NO: 577577 - DNA, 15 bp, Homo sapiens
gcatggcttcttcca

SEQ ID NO: 577578 - DNA, 15 bp, Homo sapiens
catggcttcttccac

SEQ ID NO: 577579 - DNA, 15 bp, Homo sapiens
atggcttcttccaca

SEQ ID NO: 577580 - DNA, 15 bp, Homo sapiens
tggcttcttccacaa

SEQ ID NO: 577581 - DNA, 15 bp, Homo sapiens
ggcttcttccacaat

SEQ ID NO: 577582 - DNA, 15 bp, Homo sapiens
gcttcttccacaatc

SEQ ID NO: 577583 - DNA, 15 bp, Homo sapiens
cttcttccacaatca

SEQ ID NO: 577584 - DNA, 15 bp, Homo sapiens
ttcttccacaatcaa

SEQ ID NO: 577585 - DNA, 15 bp, Homo sapiens
tcttccacaatcaat

SEQ ID NO: 577586 - DNA, 15 bp, Homo sapiens
cttccacaatcaatg

SEQ ID NO: 577587 - DNA, 15 bp, Homo sapiens
ttccacaatcaatgc

SEQ ID NO: 577588 - DNA, 15 bp, Homo sapiens
tccacaatcaatgct

SEQ ID NO: 577589 - DNA, 15 bp, Homo sapiens
ccacaatcaatgcta

SEQ ID NO: 577590 - DNA, 15 bp, Homo sapiens
cacaatcaatgctag

SEQ ID NO: 577591 - DNA, 15 bp, Homo sapiens
acaatcaatgctagc

SEQ ID NO: 577592 - DNA, 15 bp, Homo sapiens
caatcaatgctagct

SEQ ID NO: 577593 - DNA, 15 bp, Homo sapiens
aatcaatgctagctc

SEQ ID NO: 577594 - DNA, 15 bp, Homo sapiens
atcaatgctagctct

SEQ ID NO: 577595 - DNA, 15 bp, Homo sapiens
tcaatgctagctctg

SEQ ID NO: 577596 - DNA, 15 bp, Homo sapiens
caatgctagctctgg

SEQ ID NO: 577597 - DNA, 15 bp, Homo sapiens
aatgctagctctgga

SEQ ID NO: 577598 - DNA, 15 bp, Homo sapiens
atgctagctctggag

SEQ ID NO: 577599 - DNA, 15 bp, Homo sapiens
tgctagctctggaga

SEQ ID NO: 577600 - DNA, 15 bp, Homo sapiens
gctagctctggagaa

SEQ ID NO: 577601 - DNA, 15 bp, Homo sapiens
ctagctctggagaag

SEQ ID NO: 577602 - DNA, 15 bp, Homo sapiens
tagctctggagaagc

SEQ ID NO: 577603 - DNA, 15 bp, Homo sapiens
agctctggagaagca

SEQ ID NO: 577604 - DNA, 15 bp, Homo sapiens
gctctggagaagcag

SEQ ID NO: 577605 - DNA, 15 bp, Homo sapiens
ctctggagaagcaga

SEQ ID NO: 577606 - DNA, 15 bp, Homo sapiens
tctggagaagcagag

SEQ ID NO: 577607 - DNA, 15 bp, Homo sapiens
ctggagaagcagaga

SEQ ID NO: 577608 - DNA, 15 bp, Homo sapiens
tggagaagcagagat

SEQ ID NO: 577609 - DNA, 15 bp, Homo sapiens
ggagaagcagagata

SEQ ID NO: 577610 - DNA, 15 bp, Homo sapiens
gagaagcagagatag

SEQ ID NO: 577611 - DNA, 15 bp, Homo sapiens
agaagcagagatagg

SEQ ID NO: 577612 - DNA, 15 bp, Homo sapiens
gaagcagagataggg

SEQ ID NO: 577613 - DNA, 15 bp, Homo sapiens
aagcagagataggga

SEQ ID NO: 577614 - DNA, 15 bp, Homo sapiens
agcagagatagggag

SEQ ID NO: 577615 - DNA, 15 bp, Homo sapiens
gcagagatagggagg

SEQ ID NO: 577616 - DNA, 15 bp, Homo sapiens
cagagatagggaggc

SEQ ID NO: 577617 - DNA, 15 bp, Homo sapiens
agagatagggaggcc

SEQ ID NO: 577618 - DNA, 15 bp, Homo sapiens
gagatagggaggcca

SEQ ID NO: 577619 - DNA, 15 bp, Homo sapiens
agatagggaggccaa

SEQ ID NO: 577620 - DNA, 15 bp, Homo sapiens
gatagggaggccaat

SEQ ID NO: 577621 - DNA, 15 bp, Homo sapiens
atagggaggccaatc

SEQ ID NO: 577622 - DNA, 15 bp, Homo sapiens
tagggaggccaatca

SEQ ID NO: 577623 - DNA, 15 bp, Homo sapiens
agggaggccaatcac

SEQ ID NO: 577624 - DNA, 15 bp, Homo sapiens
gggaggccaatcaca

SEQ ID NO: 577625 - DNA, 15 bp, Homo sapiens
ggaggccaatcacac

SEQ ID NO: 577626 - DNA, 15 bp, Homo sapiens
gaggccaatcacaca

SEQ ID NO: 577627 - DNA, 15 bp, Homo sapiens
aggccaatcacacag

SEQ ID NO: 577628 - DNA, 15 bp, Homo sapiens
ggccaatcacacagc

SEQ ID NO: 577629 - DNA, 15 bp, Homo sapiens
gccaatcacacagcc

SEQ ID NO: 577630 - DNA, 15 bp, Homo sapiens
ccaatcacacagcca

SEQ ID NO: 577631 - DNA, 15 bp, Homo sapiens
caatcacacagccat

SEQ ID NO: 577632 - DNA, 15 bp, Homo sapiens
aatcacacagccatg

SEQ ID NO: 577633 - DNA, 15 bp, Homo sapiens
atcacacagccatgg

SEQ ID NO: 577634 - DNA, 15 bp, Homo sapiens
tcacacagccatggg

SEQ ID NO: 577635 - DNA, 15 bp, Homo sapiens
cacacagccatggga

SEQ ID NO: 577636 - DNA, 15 bp, Homo sapiens
acacagccatgggaa

SEQ ID NO: 577637 - DNA, 15 bp, Homo sapiens
cacagccatgggaag

SEQ ID NO: 577638 - DNA, 15 bp, Homo sapiens
acagccatgggaagg

SEQ ID NO: 577639 - DNA, 15 bp, Homo sapiens
cagccatgggaagga

SEQ ID NO: 577640 - DNA, 15 bp, Homo sapiens
agccatgggaaggaa

SEQ ID NO: 577641 - DNA, 15 bp, Homo sapiens
gccatgggaaggaat

SEQ ID NO: 577642 - DNA, 15 bp, Homo sapiens
ccatgggaaggaata

SEQ ID NO: 577643 - DNA, 15 bp, Homo sapiens
catgggaaggaataa

SEQ ID NO: 577644 - DNA, 15 bp, Homo sapiens
atgggaaggaataaa

SEQ ID NO: 577645 - DNA, 15 bp, Homo sapiens
tgggaaggaataaaa

SEQ ID NO: 577646 - DNA, 15 bp, Homo sapiens
gggaaggaataaaag

SEQ ID NO: 577647 - DNA, 15 bp, Homo sapiens
ggaaggaataaaagg

SEQ ID NO: 577648 - DNA, 15 bp, Homo sapiens
gaaggaataaaaggc

SEQ ID NO: 577649 - DNA, 15 bp, Homo sapiens
aaggaataaaaggca

SEQ ID NO: 577650 - DNA, 15 bp, Homo sapiens
aggaataaaaggcaa

SEQ ID NO: 577651 - DNA, 15 bp, Homo sapiens
ggaataaaaggcaat

SEQ ID NO: 577652 - DNA, 15 bp, Homo sapiens
gaataaaaggcaatg

SEQ ID NO: 577653 - DNA, 15 bp, Homo sapiens
aataaaaggcaatgc

SEQ ID NO: 577654 - DNA, 15 bp, Homo sapiens
ataaaaggcaatgcc

SEQ ID NO: 577655 - DNA, 15 bp, Homo sapiens
taaaaggcaatgcct

SEQ ID NO: 577656 - DNA, 15 bp, Homo sapiens
aaaaggcaatgcctg

SEQ ID NO: 577657 - DNA, 15 bp, Homo sapiens
aaaggcaatgcctgc

SEQ ID NO: 577658 - DNA, 15 bp, Homo sapiens
aaggcaatgcctgcc

SEQ ID NO: 577659 - DNA, 15 bp, Homo sapiens
aggcaatgcctgcct

SEQ ID NO: 577660 - DNA, 15 bp, Homo sapiens
ggcaatgcctgcctg

SEQ ID NO: 577661 - DNA, 15 bp, Homo sapiens
gcaatgcctgcctga

SEQ ID NO: 577662 - DNA, 15 bp, Homo sapiens
caatgcctgcctgat

SEQ ID NO: 577663 - DNA, 15 bp, Homo sapiens
aatgcctgcctgatc

SEQ ID NO: 577664 - DNA, 15 bp, Homo sapiens
atgcctgcctgatca

SEQ ID NO: 577665 - DNA, 15 bp, Homo sapiens
tgcctgcctgatcac

SEQ ID NO: 577666 - DNA, 15 bp, Homo sapiens
gcctgcctgatcacg

SEQ ID NO: 577667 - DNA, 15 bp, Homo sapiens
cctgcctgatcacgg

SEQ ID NO: 577668 - DNA, 15 bp, Homo sapiens
ctgcctgatcacggc

SEQ ID NO: 577669 - DNA, 15 bp, Homo sapiens
tgcctgatcacggct

SEQ ID NO: 577670 - DNA, 15 bp, Homo sapiens
gcctgatcacggctg

SEQ ID NO: 577671 - DNA, 15 bp, Homo sapiens
cctgatcacggctga

SEQ ID NO: 577672 - DNA, 15 bp, Homo sapiens
ctgatcacggctgag

SEQ ID NO: 577673 - DNA, 15 bp, Homo sapiens
tgatcacggctgagc

SEQ ID NO: 577674 - DNA, 15 bp, Homo sapiens
gatcacggctgagcc

SEQ ID NO: 577675 - DNA, 15 bp, Homo sapiens
atcacggctgagcca

SEQ ID NO: 577676 - DNA, 15 bp, Homo sapiens
tcacggctgagccat

SEQ ID NO: 577677 - DNA, 15 bp, Homo sapiens
cacggctgagccatc

SEQ ID NO: 577678 - DNA, 15 bp, Homo sapiens
acggctgagccatct

SEQ ID NO: 577679 - DNA, 15 bp, Homo sapiens
cggctgagccatctt

SEQ ID NO: 577680 - DNA, 15 bp, Homo sapiens
ggctgagccatcttc

SEQ ID NO: 577681 - DNA, 15 bp, Homo sapiens
gctgagccatcttcc

SEQ ID NO: 577682 - DNA, 15 bp, Homo sapiens
ctgagccatcttccc

SEQ ID NO: 577683 - DNA, 15 bp, Homo sapiens
tgagccatcttcccc

SEQ ID NO: 577684 - DNA, 15 bp, Homo sapiens
gagccatcttccccc

SEQ ID NO: 577685 - DNA, 15 bp, Homo sapiens
agccatcttccccct

SEQ ID NO: 577686 - DNA, 15 bp, Homo sapiens
gccatcttccccctc

SEQ ID NO: 577687 - DNA, 15 bp, Homo sapiens
ccatcttccccctct

SEQ ID NO: 577688 - DNA, 15 bp, Homo sapiens
catcttccccctctg

SEQ ID NO: 577689 - DNA, 15 bp, Homo sapiens
atcttccccctctgc

SEQ ID NO: 577690 - DNA, 15 bp, Homo sapiens
tcttccccctctgca

SEQ ID NO: 577691 - DNA, 15 bp, Homo sapiens
cttccccctctgcaa

SEQ ID NO: 577692 - DNA, 15 bp, Homo sapiens
ttccccctctgcaaa

SEQ ID NO: 577693 - DNA, 15 bp, Homo sapiens
tccccctctgcaaaa

SEQ ID NO: 577694 - DNA, 15 bp, Homo sapiens
ccccctctgcaaaaa

SEQ ID NO: 577695 - DNA, 15 bp, Homo sapiens
cccctctgcaaaaac

SEQ ID NO: 577696 - DNA, 15 bp, Homo sapiens
ccctctgcaaaaact

SEQ ID NO: 577697 - DNA, 15 bp, Homo sapiens
cctctgcaaaaactg

SEQ ID NO: 577698 - DNA, 15 bp, Homo sapiens
ctctgcaaaaactga

SEQ ID NO: 577699 - DNA, 15 bp, Homo sapiens
tctgcaaaaactgag

SEQ ID NO: 577700 - DNA, 15 bp, Homo sapiens
ctgcaaaaactgagg

SEQ ID NO: 577701 - DNA, 15 bp, Homo sapiens
tgcaaaaactgaggc

SEQ ID NO: 577702 - DNA, 15 bp, Homo sapiens
gcaaaaactgaggca

SEQ ID NO: 577703 - DNA, 15 bp, Homo sapiens
caaaaactgaggcat

SEQ ID NO: 577704 - DNA, 15 bp, Homo sapiens
aaaaactgaggcata

SEQ ID NO: 577705 - DNA, 15 bp, Homo sapiens
aaaactgaggcataa

SEQ ID NO: 577706 - DNA, 15 bp, Homo sapiens
aaactgaggcataat

SEQ ID NO: 577707 - DNA, 15 bp, Homo sapiens
aactgaggcataatg

SEQ ID NO: 577708 - DNA, 15 bp, Homo sapiens
actgaggcataatga

SEQ ID NO: 577709 - DNA, 15 bp, Homo sapiens
ctgaggcataatgat

SEQ ID NO: 577710 - DNA, 15 bp, Homo sapiens
tgaggcataatgata

SEQ ID NO: 577711 - DNA, 15 bp, Homo sapiens
gaggcataatgatat

SEQ ID NO: 577712 - DNA, 15 bp, Homo sapiens
aggcataatgatatt

SEQ ID NO: 577713 - DNA, 15 bp, Homo sapiens
ggcataatgatattt

SEQ ID NO: 577714 - DNA, 15 bp, Homo sapiens
gcataatgatatttc

SEQ ID NO: 577715 - DNA, 15 bp, Homo sapiens
cataatgatatttca

SEQ ID NO: 577716 - DNA, 15 bp, Homo sapiens
ataatgatatttcag

SEQ ID NO: 577717 - DNA, 15 bp, Homo sapiens
taatgatatttcagg

SEQ ID NO: 577718 - DNA, 15 bp, Homo sapiens
aatgatatttcaggc

SEQ ID NO: 577719 - DNA, 15 bp, Homo sapiens
atgatatttcaggct

SEQ ID NO: 577720 - DNA, 15 bp, Homo sapiens
tgatatttcaggctc

SEQ ID NO: 577721 - DNA, 15 bp, Homo sapiens
gatatttcaggctct

SEQ ID NO: 577722 - DNA, 15 bp, Homo sapiens
atatttcaggctctc

SEQ ID NO: 577723 - DNA, 15 bp, Homo sapiens
tatttcaggctctcc

SEQ ID NO: 577724 - DNA, 15 bp, Homo sapiens
atttcaggctctccc

SEQ ID NO: 577725 - DNA, 15 bp, Homo sapiens
tttcaggctctccct

SEQ ID NO: 577726 - DNA, 15 bp, Homo sapiens
ttcaggctctcccta

SEQ ID NO: 577727 - DNA, 15 bp, Homo sapiens
tcaggctctccctat

SEQ ID NO: 577728 - DNA, 15 bp, Homo sapiens
caggctctccctatg

SEQ ID NO: 577729 - DNA, 15 bp, Homo sapiens
aggctctccctatgt

SEQ ID NO: 577730 - DNA, 15 bp, Homo sapiens
ggctctccctatgtc

SEQ ID NO: 577731 - DNA, 15 bp, Homo sapiens
gctctccctatgtca

SEQ ID NO: 577732 - DNA, 15 bp, Homo sapiens
ctctccctatgtcag

SEQ ID NO: 577733 - DNA, 15 bp, Homo sapiens
tctccctatgtcagg

SEQ ID NO: 577734 - DNA, 15 bp, Homo sapiens
ctccctatgtcaggc

SEQ ID NO: 577735 - DNA, 15 bp, Homo sapiens
tccctatgtcaggct

SEQ ID NO: 577736 - DNA, 15 bp, Homo sapiens
ccctatgtcaggctc

SEQ ID NO: 577737 - DNA, 15 bp, Homo sapiens
cctatgtcaggctcc

SEQ ID NO: 577738 - DNA, 15 bp, Homo sapiens
ctatgtcaggctcct

SEQ ID NO: 577739 - DNA, 15 bp, Homo sapiens
tatgtcaggctcctg

SEQ ID NO: 577740 - DNA, 15 bp, Homo sapiens
atgtcaggctcctga

SEQ ID NO: 577741 - DNA, 15 bp, Homo sapiens
tgtcaggctcctgac

SEQ ID NO: 577742 - DNA, 15 bp, Homo sapiens
gtcaggctcctgaca

SEQ ID NO: 577743 - DNA, 15 bp, Homo sapiens
tcaggctcctgacat

SEQ ID NO: 577744 - DNA, 15 bp, Homo sapiens
caggctcctgacatg

SEQ ID NO: 577745 - DNA, 15 bp, Homo sapiens
aggctcctgacatgc

SEQ ID NO: 577746 - DNA, 15 bp, Homo sapiens
ggctcctgacatgca

SEQ ID NO: 577747 - DNA, 15 bp, Homo sapiens
gctcctgacatgcac

SEQ ID NO: 577748 - DNA, 15 bp, Homo sapiens
ctcctgacatgcacc

SEQ ID NO: 577749 - DNA, 15 bp, Homo sapiens
tcctgacatgcacca

SEQ ID NO: 577750 - DNA, 15 bp, Homo sapiens
cctgacatgcaccat

SEQ ID NO: 577751 - DNA, 15 bp, Homo sapiens
ctgacatgcaccata

SEQ ID NO: 577752 - DNA, 15 bp, Homo sapiens
tgacatgcaccatat

SEQ ID NO: 577753 - DNA, 15 bp, Homo sapiens
gacatgcaccatatg

SEQ ID NO: 577754 - DNA, 15 bp, Homo sapiens
acatgcaccatatgt

SEQ ID NO: 577755 - DNA, 15 bp, Homo sapiens
catgcaccatatgta

SEQ ID NO: 577756 - DNA, 15 bp, Homo sapiens
atgcaccatatgtag

SEQ ID NO: 577757 - DNA, 15 bp, Homo sapiens
tgcaccatatgtagc

SEQ ID NO: 577758 - DNA, 15 bp, Homo sapiens
gcaccatatgtagct

SEQ ID NO: 577759 - DNA, 15 bp, Homo sapiens
caccatatgtagctg

SEQ ID NO: 577760 - DNA, 15 bp, Homo sapiens
accatatgtagctgc

SEQ ID NO: 577761 - DNA, 15 bp, Homo sapiens
ccatatgtagctgca

SEQ ID NO: 577762 - DNA, 15 bp, Homo sapiens
catatgtagctgcaa

SEQ ID NO: 577763 - DNA, 15 bp, Homo sapiens
atatgtagctgcaaa

SEQ ID NO: 577764 - DNA, 15 bp, Homo sapiens
tatgtagctgcaaat

SEQ ID NO: 577765 - DNA, 15 bp, Homo sapiens
atgtagctgcaaatc

SEQ ID NO: 577766 - DNA, 15 bp, Homo sapiens
tgtagctgcaaatcc

SEQ ID NO: 577767 - DNA, 15 bp, Homo sapiens
gtagctgcaaatccc

SEQ ID NO: 577768 - DNA, 15 bp, Homo sapiens
tagctgcaaatccca

SEQ ID NO: 577769 - DNA, 15 bp, Homo sapiens
agctgcaaatcccaa

SEQ ID NO: 577770 - DNA, 15 bp, Homo sapiens
gctgcaaatcccaat

SEQ ID NO: 577771 - DNA, 15 bp, Homo sapiens
ctgcaaatcccaatc

SEQ ID NO: 577772 - DNA, 15 bp, Homo sapiens
tgcaaatcccaatca

SEQ ID NO: 577773 - DNA, 15 bp, Homo sapiens
gcaaatcccaatcaa

SEQ ID NO: 577774 - DNA, 15 bp, Homo sapiens
caaatcccaatcaat

SEQ ID NO: 577775 - DNA, 15 bp, Homo sapiens
aaatcccaatcaatt

SEQ ID NO: 577776 - DNA, 15 bp, Homo sapiens
aatcccaatcaattt

SEQ ID NO: 577777 - DNA, 15 bp, Homo sapiens
atcccaatcaatttc

SEQ ID NO: 577778 - DNA, 15 bp, Homo sapiens
tcccaatcaatttca

SEQ ID NO: 577779 - DNA, 15 bp, Homo sapiens
cccaatcaatttcaa

SEQ ID NO: 577780 - DNA, 15 bp, Homo sapiens
ccaatcaatttcaac

SEQ ID NO: 577781 - DNA, 15 bp, Homo sapiens
caatcaatttcaaca

SEQ ID NO: 577782 - DNA, 15 bp, Homo sapiens
aatcaatttcaacat

SEQ ID NO: 577783 - DNA, 15 bp, Homo sapiens
atcaatttcaacatt

SEQ ID NO: 577784 - DNA, 15 bp, Homo sapiens
tcaatttcaacattt

SEQ ID NO: 577785 - DNA, 15 bp, Homo sapiens
caatttcaacatttc

SEQ ID NO: 577786 - DNA, 15 bp, Homo sapiens
aatttcaacatttct

SEQ ID NO: 577787 - DNA, 15 bp, Homo sapiens
atttcaacatttctt

SEQ ID NO: 577788 - DNA, 15 bp, Homo sapiens
tttcaacatttctta

SEQ ID NO: 577789 - DNA, 15 bp, Homo sapiens
ttcaacatttcttaa

SEQ ID NO: 577790 - DNA, 15 bp, Homo sapiens
tcaacatttcttaac

SEQ ID NO: 577791 - DNA, 15 bp, Homo sapiens
caacatttcttaact

SEQ ID NO: 577792 - DNA, 15 bp, Homo sapiens
aacatttcttaactg

SEQ ID NO: 577793 - DNA, 15 bp, Homo sapiens
acatttcttaactgc

SEQ ID NO: 577794 - DNA, 15 bp, Homo sapiens
catttcttaactgct

SEQ ID NO: 577795 - DNA, 15 bp, Homo sapiens
atttcttaactgcta

SEQ ID NO: 577796 - DNA, 15 bp, Homo sapiens
tttcttaactgctag

SEQ ID NO: 577797 - DNA, 15 bp, Homo sapiens
ttcttaactgctaga

SEQ ID NO: 577798 - DNA, 15 bp, Homo sapiens
tcttaactgctagaa

SEQ ID NO: 577799 - DNA, 15 bp, Homo sapiens
cttaactgctagaac

SEQ ID NO: 577800 - DNA, 15 bp, Homo sapiens
ttaactgctagaaca

SEQ ID NO: 577801 - DNA, 15 bp, Homo sapiens
taactgctagaacac

SEQ ID NO: 577802 - DNA, 15 bp, Homo sapiens
aactgctagaacacc

SEQ ID NO: 577803 - DNA, 15 bp, Homo sapiens
actgctagaacacct

SEQ ID NO: 577804 - DNA, 15 bp, Homo sapiens
ctgctagaacacctt

SEQ ID NO: 577805 - DNA, 15 bp, Homo sapiens
tgctagaacaccttt

SEQ ID NO: 577806 - DNA, 15 bp, Homo sapiens
gctagaacacctttc

SEQ ID NO: 577807 - DNA, 15 bp, Homo sapiens
ctagaacacctttct

SEQ ID NO: 577808 - DNA, 15 bp, Homo sapiens
tagaacacctttctc

SEQ ID NO: 577809 - DNA, 15 bp, Homo sapiens
agaacacctttctca

SEQ ID NO: 577810 - DNA, 15 bp, Homo sapiens
gaacacctttctcaa

SEQ ID NO: 577811 - DNA, 15 bp, Homo sapiens
aacacctttctcaac

SEQ ID NO: 577812 - DNA, 15 bp, Homo sapiens
acacctttctcaaca

SEQ ID NO: 577813 - DNA, 15 bp, Homo sapiens
cacctttctcaacac

SEQ ID NO: 577814 - DNA, 15 bp, Homo sapiens
acctttctcaacact

SEQ ID NO: 577815 - DNA, 15 bp, Homo sapiens
cctttctcaacactg

SEQ ID NO: 577816 - DNA, 15 bp, Homo sapiens
ctttctcaacactgt

SEQ ID NO: 577817 - DNA, 15 bp, Homo sapiens
tttctcaacactgta

SEQ ID NO: 577818 - DNA, 15 bp, Homo sapiens
ttctcaacactgtaa

SEQ ID NO: 577819 - DNA, 15 bp, Homo sapiens
tctcaacactgtaat

SEQ ID NO: 577820 - DNA, 15 bp, Homo sapiens
ctcaacactgtaatt

SEQ ID NO: 577821 - DNA, 15 bp, Homo sapiens
tcaacactgtaattt

SEQ ID NO: 577822 - DNA, 15 bp, Homo sapiens
caacactgtaattta

SEQ ID NO: 577823 - DNA, 15 bp, Homo sapiens
aacactgtaatttac

SEQ ID NO: 577824 - DNA, 15 bp, Homo sapiens
acactgtaatttacc

SEQ ID NO: 577825 - DNA, 15 bp, Homo sapiens
cactgtaatttacct

SEQ ID NO: 577826 - DNA, 15 bp, Homo sapiens
actgtaatttacctt

SEQ ID NO: 577827 - DNA, 15 bp, Homo sapiens
ctgtaatttaccttc

SEQ ID NO: 577828 - DNA, 15 bp, Homo sapiens
tgtaatttaccttca

SEQ ID NO: 577829 - DNA, 15 bp, Homo sapiens
gtaatttaccttcaa

SEQ ID NO: 577830 - DNA, 15 bp, Homo sapiens
taatttaccttcaaa

SEQ ID NO: 577831 - DNA, 15 bp, Homo sapiens
aatttaccttcaaaa

SEQ ID NO: 577832 - DNA, 15 bp, Homo sapiens
atttaccttcaaaag

SEQ ID NO: 577833 - DNA, 15 bp, Homo sapiens
tttaccttcaaaaga

SEQ ID NO: 577834 - DNA, 15 bp, Homo sapiens
ttaccttcaaaagaa

SEQ ID NO: 577835 - DNA, 15 bp, Homo sapiens
taccttcaaaagaat

SEQ ID NO: 577836 - DNA, 15 bp, Homo sapiens
accttcaaaagaata

SEQ ID NO: 577837 - DNA, 15 bp, Homo sapiens
ccttcaaaagaatag

SEQ ID NO: 577838 - DNA, 15 bp, Homo sapiens
cttcaaaagaatagg

SEQ ID NO: 577839 - DNA, 15 bp, Homo sapiens
ttcaaaagaataggg

SEQ ID NO: 577840 - DNA, 15 bp, Homo sapiens
tcaaaagaataggga

SEQ ID NO: 577841 - DNA, 15 bp, Homo sapiens
caaaagaatagggag

SEQ ID NO: 577842 - DNA, 15 bp, Homo sapiens
aaaagaatagggagc

SEQ ID NO: 577843 - DNA, 15 bp, Homo sapiens
aaagaatagggagca

SEQ ID NO: 577844 - DNA, 15 bp, Homo sapiens
aagaatagggagcaa

SEQ ID NO: 577845 - DNA, 15 bp, Homo sapiens
agaatagggagcaag

SEQ ID NO: 577846 - DNA, 15 bp, Homo sapiens
gaatagggagcaagc

SEQ ID NO: 577847 - DNA, 15 bp, Homo sapiens
aatagggagcaagca

SEQ ID NO: 577848 - DNA, 15 bp, Homo sapiens
atagggagcaagcac

SEQ ID NO: 577849 - DNA, 15 bp, Homo sapiens
tagggagcaagcacc

SEQ ID NO: 577850 - DNA, 15 bp, Homo sapiens
agggagcaagcaccc

SEQ ID NO: 577851 - DNA, 15 bp, Homo sapiens
gggagcaagcaccct

SEQ ID NO: 577852 - DNA, 15 bp, Homo sapiens
ggagcaagcaccctc

SEQ ID NO: 577853 - DNA, 15 bp, Homo sapiens
gagcaagcaccctcg

SEQ ID NO: 577854 - DNA, 15 bp, Homo sapiens
agcaagcaccctcgc

SEQ ID NO: 577855 - DNA, 15 bp, Homo sapiens
gcaagcaccctcgcc

SEQ ID NO: 577856 - DNA, 15 bp, Homo sapiens
caagcaccctcgcct

SEQ ID NO: 577857 - DNA, 15 bp, Homo sapiens
aagcaccctcgcctt

SEQ ID NO: 577858 - DNA, 15 bp, Homo sapiens
agcaccctcgccttt

SEQ ID NO: 577859 - DNA, 15 bp, Homo sapiens
gcaccctcgcctttc

SEQ ID NO: 577860 - DNA, 15 bp, Homo sapiens
caccctcgcctttcc

SEQ ID NO: 577861 - DNA, 15 bp, Homo sapiens
accctcgcctttcca

SEQ ID NO: 577862 - DNA, 15 bp, Homo sapiens
ccctcgcctttccag

SEQ ID NO: 577863 - DNA, 15 bp, Homo sapiens
cctcgcctttccagt

SEQ ID NO: 577864 - DNA, 15 bp, Homo sapiens
ctcgcctttccagta

SEQ ID NO: 577865 - DNA, 15 bp, Homo sapiens
tcgcctttccagtac

SEQ ID NO: 577866 - DNA, 15 bp, Homo sapiens
cgcctttccagtacc

SEQ ID NO: 577867 - DNA, 15 bp, Homo sapiens
gcctttccagtacca

SEQ ID NO: 577868 - DNA, 15 bp, Homo sapiens
cctttccagtaccac

SEQ ID NO: 577869 - DNA, 15 bp, Homo sapiens
ctttccagtaccaca

SEQ ID NO: 577870 - DNA, 15 bp, Homo sapiens
tttccagtaccacat

SEQ ID NO: 577871 - DNA, 15 bp, Homo sapiens
ttccagtaccacatt

SEQ ID NO: 577872 - DNA, 15 bp, Homo sapiens
tccagtaccacattc

SEQ ID NO: 577873 - DNA, 15 bp, Homo sapiens
ccagtaccacattct

SEQ ID NO: 577874 - DNA, 15 bp, Homo sapiens
cagtaccacattcta

SEQ ID NO: 577875 - DNA, 15 bp, Homo sapiens
agtaccacattctac

SEQ ID NO: 577876 - DNA, 15 bp, Homo sapiens
gtaccacattctact

SEQ ID NO: 577877 - DNA, 15 bp, Homo sapiens
taccacattctacta

SEQ ID NO: 577878 - DNA, 15 bp, Homo sapiens
accacattctactaa

SEQ ID NO: 577879 - DNA, 15 bp, Homo sapiens
ccacattctactaac

SEQ ID NO: 577880 - DNA, 15 bp, Homo sapiens
cacattctactaact

SEQ ID NO: 577881 - DNA, 15 bp, Homo sapiens
acattctactaactg

SEQ ID NO: 577882 - DNA, 15 bp, Homo sapiens
cattctactaactgc

SEQ ID NO: 577883 - DNA, 15 bp, Homo sapiens
attctactaactgcc

SEQ ID NO: 577884 - DNA, 15 bp, Homo sapiens
ttctactaactgccg

SEQ ID NO: 577885 - DNA, 15 bp, Homo sapiens
tctactaactgccgc

SEQ ID NO: 577886 - DNA, 15 bp, Homo sapiens
ctactaactgccgcc

SEQ ID NO: 577887 - DNA, 15 bp, Homo sapiens
tactaactgccgccc

SEQ ID NO: 577888 - DNA, 15 bp, Homo sapiens
actaactgccgcccc

SEQ ID NO: 577889 - DNA, 15 bp, Homo sapiens
ctaactgccgccccc

SEQ ID NO: 577890 - DNA, 15 bp, Homo sapiens
taactgccgcccccc

SEQ ID NO: 577891 - DNA, 15 bp, Homo sapiens
aactgccgcccccct

SEQ ID NO: 577892 - DNA, 15 bp, Homo sapiens
actgccgcccccctc

SEQ ID NO: 577893 - DNA, 15 bp, Homo sapiens
ctgccgcccccctcc

SEQ ID NO: 577894 - DNA, 15 bp, Homo sapiens
tgccgcccccctccc

SEQ ID NO: 577895 - DNA, 15 bp, Homo sapiens
gccgcccccctcccc

SEQ ID NO: 577896 - DNA, 15 bp, Homo sapiens
ccgcccccctcccca

SEQ ID NO: 577897 - DNA, 15 bp, Homo sapiens
cgcccccctccccac

SEQ ID NO: 577898 - DNA, 15 bp, Homo sapiens
gcccccctccccacc

SEQ ID NO: 577899 - DNA, 15 bp, Homo sapiens
cccccctccccaccc

SEQ ID NO: 577900 - DNA, 15 bp, Homo sapiens
ccccctccccacccc

SEQ ID NO: 577901 - DNA, 15 bp, Homo sapiens
cccctccccacccca

SEQ ID NO: 577902 - DNA, 15 bp, Homo sapiens
ccctccccaccccac

SEQ ID NO: 577903 - DNA, 15 bp, Homo sapiens
cctccccaccccact

SEQ ID NO: 577904 - DNA, 15 bp, Homo sapiens
ctccccaccccacta

SEQ ID NO: 577905 - DNA, 15 bp, Homo sapiens
tccccaccccactaa

SEQ ID NO: 577906 - DNA, 15 bp, Homo sapiens
ccccaccccactaac

SEQ ID NO: 577907 - DNA, 15 bp, Homo sapiens
cccaccccactaacc

SEQ ID NO: 577908 - DNA, 15 bp, Homo sapiens
ccaccccactaacct

SEQ ID NO: 577909 - DNA, 15 bp, Homo sapiens
caccccactaaccta

SEQ ID NO: 577910 - DNA, 15 bp, Homo sapiens
accccactaacctac

SEQ ID NO: 577911 - DNA, 15 bp, Homo sapiens
ccccactaacctacc

SEQ ID NO: 577912 - DNA, 15 bp, Homo sapiens
cccactaacctacct

SEQ ID NO: 577913 - DNA, 15 bp, Homo sapiens
ccactaacctaccta

SEQ ID NO: 577914 - DNA, 15 bp, Homo sapiens
cactaacctacctac

SEQ ID NO: 577915 - DNA, 15 bp, Homo sapiens
actaacctacctacg

SEQ ID NO: 577916 - DNA, 15 bp, Homo sapiens
ctaacctacctacgc

SEQ ID NO: 577917 - DNA, 15 bp, Homo sapiens
taacctacctacgca

SEQ ID NO: 577918 - DNA, 15 bp, Homo sapiens
aacctacctacgcaa

SEQ ID NO: 577919 - DNA, 15 bp, Homo sapiens
acctacctacgcaaa

SEQ ID NO: 577920 - DNA, 15 bp, Homo sapiens
cctacctacgcaaag

SEQ ID NO: 577921 - DNA, 15 bp, Homo sapiens
ctacctacgcaaagg

SEQ ID NO: 577922 - DNA, 15 bp, Homo sapiens
tacctacgcaaagga

SEQ ID NO: 577923 - DNA, 15 bp, Homo sapiens
acctacgcaaaggaa

SEQ ID NO: 577924 - DNA, 15 bp, Homo sapiens
cctacgcaaaggaag

SEQ ID NO: 577925 - DNA, 15 bp, Homo sapiens
ctacgcaaaggaaga

SEQ ID NO: 577926 - DNA, 15 bp, Homo sapiens
tacgcaaaggaagaa

SEQ ID NO: 577927 - DNA, 15 bp, Homo sapiens
acgcaaaggaagaag

SEQ ID NO: 577928 - DNA, 15 bp, Homo sapiens
cgcaaaggaagaagg

SEQ ID NO: 577929 - DNA, 15 bp, Homo sapiens
gcaaaggaagaaggc

SEQ ID NO: 577930 - DNA, 15 bp, Homo sapiens
caaaggaagaaggca

SEQ ID NO: 577931 - DNA, 15 bp, Homo sapiens
aaaggaagaaggcaa

SEQ ID NO: 577932 - DNA, 15 bp, Homo sapiens
aaggaagaaggcaaa

SEQ ID NO: 577933 - DNA, 15 bp, Homo sapiens
aggaagaaggcaaat

SEQ ID NO: 577934 - DNA, 15 bp, Homo sapiens
ggaagaaggcaaata

SEQ ID NO: 577935 - DNA, 15 bp, Homo sapiens
gaagaaggcaaataa

SEQ ID NO: 577936 - DNA, 15 bp, Homo sapiens
aagaaggcaaataac

SEQ ID NO: 577937 - DNA, 15 bp, Homo sapiens
agaaggcaaataacc

SEQ ID NO: 577938 - DNA, 15 bp, Homo sapiens
gaaggcaaataaccc

SEQ ID NO: 577939 - DNA, 15 bp, Homo sapiens
aaggcaaataaccct

SEQ ID NO: 577940 - DNA, 15 bp, Homo sapiens
aggcaaataaccctc

SEQ ID NO: 577941 - DNA, 15 bp, Homo sapiens
ggcaaataaccctcc

SEQ ID NO: 577942 - DNA, 15 bp, Homo sapiens
gcaaataaccctcca

SEQ ID NO: 577943 - DNA, 15 bp, Homo sapiens
caaataaccctccat

SEQ ID NO: 577944 - DNA, 15 bp, Homo sapiens
aaataaccctccatc

SEQ ID NO: 577945 - DNA, 15 bp, Homo sapiens
aataaccctccatcg

SEQ ID NO: 577946 - DNA, 15 bp, Homo sapiens
ataaccctccatcga

SEQ ID NO: 577947 - DNA, 15 bp, Homo sapiens
taaccctccatcgaa

SEQ ID NO: 577948 - DNA, 15 bp, Homo sapiens
aaccctccatcgaag

SEQ ID NO: 577949 - DNA, 15 bp, Homo sapiens
accctccatcgaagc

SEQ ID NO: 577950 - DNA, 15 bp, Homo sapiens
ccctccatcgaagcc

SEQ ID NO: 577951 - DNA, 15 bp, Homo sapiens
cctccatcgaagcct

SEQ ID NO: 577952 - DNA, 15 bp, Homo sapiens
ctccatcgaagccta

SEQ ID NO: 577953 - DNA, 15 bp, Homo sapiens
tccatcgaagcctac

SEQ ID NO: 577954 - DNA, 15 bp, Homo sapiens
ccatcgaagcctacg

SEQ ID NO: 577955 - DNA, 15 bp, Homo sapiens
catcgaagcctacga

SEQ ID NO: 577956 - DNA, 15 bp, Homo sapiens
atcgaagcctacgac

SEQ ID NO: 577957 - DNA, 15 bp, Homo sapiens
tcgaagcctacgaca

SEQ ID NO: 577958 - DNA, 15 bp, Homo sapiens
cgaagcctacgacag

SEQ ID NO: 577959 - DNA, 15 bp, Homo sapiens
gaagcctacgacaga

SEQ ID NO: 577960 - DNA, 15 bp, Homo sapiens
aagcctacgacagac

SEQ ID NO: 577961 - DNA, 15 bp, Homo sapiens
agcctacgacagacc

SEQ ID NO: 577962 - DNA, 15 bp, Homo sapiens
gcctacgacagaccg

SEQ ID NO: 577963 - DNA, 15 bp, Homo sapiens
cctacgacagaccgc

SEQ ID NO: 577964 - DNA, 15 bp, Homo sapiens
ctacgacagaccgcc

SEQ ID NO: 577965 - DNA, 15 bp, Homo sapiens
tacgacagaccgcca

SEQ ID NO: 577966 - DNA, 15 bp, Homo sapiens
acgacagaccgccac

SEQ ID NO: 577967 - DNA, 15 bp, Homo sapiens
cgacagaccgccaca

SEQ ID NO: 577968 - DNA, 15 bp, Homo sapiens
gacagaccgccacag

SEQ ID NO: 577969 - DNA, 15 bp, Homo sapiens
acagaccgccacagt

SEQ ID NO: 577970 - DNA, 15 bp, Homo sapiens
cagaccgccacagta

SEQ ID NO: 577971 - DNA, 15 bp, Homo sapiens
agaccgccacagtac

SEQ ID NO: 577972 - DNA, 15 bp, Homo sapiens
gaccgccacagtaca

SEQ ID NO: 577973 - DNA, 15 bp, Homo sapiens
accgccacagtacat

SEQ ID NO: 577974 - DNA, 15 bp, Homo sapiens
ccgccacagtacata

SEQ ID NO: 577975 - DNA, 15 bp, Homo sapiens
cgccacagtacatat

SEQ ID NO: 577976 - DNA, 15 bp, Homo sapiens
gccacagtacatatg

SEQ ID NO: 577977 - DNA, 15 bp, Homo sapiens
ccacagtacatatgt

SEQ ID NO: 577978 - DNA, 15 bp, Homo sapiens
cacagtacatatgtc

SEQ ID NO: 577979 - DNA, 15 bp, Homo sapiens
acagtacatatgtca

SEQ ID NO: 577980 - DNA, 15 bp, Homo sapiens
cagtacatatgtcac

SEQ ID NO: 577981 - DNA, 15 bp, Homo sapiens
agtacatatgtcact

SEQ ID NO: 577982 - DNA, 15 bp, Homo sapiens
gtacatatgtcactg

SEQ ID NO: 577983 - DNA, 15 bp, Homo sapiens
tacatatgtcactga

SEQ ID NO: 577984 - DNA, 15 bp, Homo sapiens
acatatgtcactgac

SEQ ID NO: 577985 - DNA, 15 bp, Homo sapiens
catatgtcactgaca

SEQ ID NO: 577986 - DNA, 15 bp, Homo sapiens
atatgtcactgacaa

SEQ ID NO: 577987 - DNA, 15 bp, Homo sapiens
tatgtcactgacaaa

SEQ ID NO: 577988 - DNA, 15 bp, Homo sapiens
atgtcactgacaaag

SEQ ID NO: 577989 - DNA, 15 bp, Homo sapiens
tgtcactgacaaaga

SEQ ID NO: 577990 - DNA, 15 bp, Homo sapiens
gtcactgacaaagaa

SEQ ID NO: 577991 - DNA, 15 bp, Homo sapiens
tcactgacaaagaac

SEQ ID NO: 577992 - DNA, 15 bp, Homo sapiens
cactgacaaagaact

SEQ ID NO: 577993 - DNA, 15 bp, Homo sapiens
actgacaaagaactt

SEQ ID NO: 577994 - DNA, 15 bp, Homo sapiens
ctgacaaagaacttt

SEQ ID NO: 577995 - DNA, 15 bp, Homo sapiens
tgacaaagaactttt

SEQ ID NO: 577996 - DNA, 15 bp, Homo sapiens
gacaaagaactttta

SEQ ID NO: 577997 - DNA, 15 bp, Homo sapiens
acaaagaacttttat

SEQ ID NO: 577998 - DNA, 15 bp, Homo sapiens
caaagaacttttatt

SEQ ID NO: 577999 - DNA, 15 bp, Homo sapiens
aaagaacttttattt

SEQ ID NO: 578000 - DNA, 15 bp, Homo sapiens
aagaacttttatttc

SEQ ID NO: 578001 - DNA, 15 bp, Homo sapiens
agaacttttatttct

SEQ ID NO: 578002 - DNA, 15 bp, Homo sapiens
gaacttttatttctt

SEQ ID NO: 578003 - DNA, 15 bp, Homo sapiens
aacttttatttcttt

SEQ ID NO: 578004 - DNA, 15 bp, Homo sapiens
acttttatttctttt

SEQ ID NO: 578005 - DNA, 15 bp, Homo sapiens
cttttatttcttttt

SEQ ID NO: 578006 - DNA, 15 bp, Homo sapiens
ttttatttcttttta

SEQ ID NO: 578007 - DNA, 15 bp, Homo sapiens
tttatttctttttaa

SEQ ID NO: 578008 - DNA, 15 bp, Homo sapiens
ttatttctttttaat

SEQ ID NO: 578009 - DNA, 15 bp, Homo sapiens
tatttctttttaatg

SEQ ID NO: 578010 - DNA, 15 bp, Homo sapiens
atttctttttaatga

SEQ ID NO: 578011 - DNA, 15 bp, Homo sapiens
tttctttttaatgac

SEQ ID NO: 578012 - DNA, 15 bp, Homo sapiens
ttctttttaatgaca

SEQ ID NO: 578013 - DNA, 15 bp, Homo sapiens
tctttttaatgacat

SEQ ID NO: 578014 - DNA, 15 bp, Homo sapiens
ctttttaatgacatt

SEQ ID NO: 578015 - DNA, 15 bp, Homo sapiens
tttttaatgacatta

SEQ ID NO: 578016 - DNA, 15 bp, Homo sapiens
ttttaatgacattaa

SEQ ID NO: 578017 - DNA, 15 bp, Homo sapiens
tttaatgacattaaa

SEQ ID NO: 578018 - DNA, 15 bp, Homo sapiens
ttaatgacattaaac

SEQ ID NO: 578019 - DNA, 15 bp, Homo sapiens
taatgacattaaaca

SEQ ID NO: 578020 - DNA, 15 bp, Homo sapiens
aatgacattaaacac

SEQ ID NO: 578021 - DNA, 15 bp, Homo sapiens
atgacattaaacaca

SEQ ID NO: 578022 - DNA, 15 bp, Homo sapiens
tgacattaaacacaa

SEQ ID NO: 578023 - DNA, 15 bp, Homo sapiens
gacattaaacacaac

SEQ ID NO: 578024 - DNA, 15 bp, Homo sapiens
acattaaacacaact

SEQ ID NO: 578025 - DNA, 15 bp, Homo sapiens
cattaaacacaactg

SEQ ID NO: 578026 - DNA, 15 bp, Homo sapiens
attaaacacaactgc

SEQ ID NO: 578027 - DNA, 15 bp, Homo sapiens
ttaaacacaactgct

SEQ ID NO: 578028 - DNA, 15 bp, Homo sapiens
taaacacaactgcta

SEQ ID NO: 578029 - DNA, 15 bp, Homo sapiens
aaacacaactgctac

SEQ ID NO: 578030 - DNA, 15 bp, Homo sapiens
aacacaactgctaca

SEQ ID NO: 578031 - DNA, 15 bp, Homo sapiens
acacaactgctacaa

SEQ ID NO: 578032 - DNA, 15 bp, Homo sapiens
cacaactgctacaag

SEQ ID NO: 578033 - DNA, 15 bp, Homo sapiens
acaactgctacaagg

SEQ ID NO: 578034 - DNA, 15 bp, Homo sapiens
caactgctacaaggg

SEQ ID NO: 578035 - DNA, 15 bp, Homo sapiens
aactgctacaaggga

SEQ ID NO: 578036 - DNA, 15 bp, Homo sapiens
actgctacaagggaa

SEQ ID NO: 578037 - DNA, 15 bp, Homo sapiens
ctgctacaagggaaa

SEQ ID NO: 578038 - DNA, 15 bp, Homo sapiens
tgctacaagggaaaa

SEQ ID NO: 578039 - DNA, 15 bp, Homo sapiens
gctacaagggaaaaa

SEQ ID NO: 578040 - DNA, 15 bp, Homo sapiens
ctacaagggaaaaaa

SEQ ID NO: 578041 - DNA, 15 bp, Homo sapiens
tacaagggaaaaaac

SEQ ID NO: 578042 - DNA, 15 bp, Homo sapiens
acaagggaaaaaaca

SEQ ID NO: 578043 - DNA, 15 bp, Homo sapiens
caagggaaaaaacat

SEQ ID NO: 578044 - DNA, 15 bp, Homo sapiens
aagggaaaaaacatg

SEQ ID NO: 578045 - DNA, 15 bp, Homo sapiens
agggaaaaaacatga

SEQ ID NO: 578046 - DNA, 15 bp, Homo sapiens
gggaaaaaacatgat

SEQ ID NO: 578047 - DNA, 15 bp, Homo sapiens
ggaaaaaacatgata

SEQ ID NO: 578048 - DNA, 15 bp, Homo sapiens
gaaaaaacatgataa

SEQ ID NO: 578049 - DNA, 15 bp, Homo sapiens
aaaaaacatgataaa

SEQ ID NO: 578050 - DNA, 15 bp, Homo sapiens
aaaaacatgataaag

SEQ ID NO: 578051 - DNA, 15 bp, Homo sapiens
aaaacatgataaaga

SEQ ID NO: 578052 - DNA, 15 bp, Homo sapiens
aaacatgataaagag

SEQ ID NO: 578053 - DNA, 15 bp, Homo sapiens
aacatgataaagagg

SEQ ID NO: 578054 - DNA, 15 bp, Homo sapiens
acatgataaagagga

SEQ ID NO: 578055 - DNA, 15 bp, Homo sapiens
catgataaagaggag

SEQ ID NO: 578056 - DNA, 15 bp, Homo sapiens
atgataaagaggagg

SEQ ID NO: 578057 - DNA, 15 bp, Homo sapiens
tgataaagaggaggc

SEQ ID NO: 578058 - DNA, 15 bp, Homo sapiens
gataaagaggaggca

SEQ ID NO: 578059 - DNA, 15 bp, Homo sapiens
ataaagaggaggcac

SEQ ID NO: 578060 - DNA, 15 bp, Homo sapiens
taaagaggaggcacc

SEQ ID NO: 578061 - DNA, 15 bp, Homo sapiens
aaagaggaggcacca

SEQ ID NO: 578062 - DNA, 15 bp, Homo sapiens
aagaggaggcaccaa

SEQ ID NO: 578063 - DNA, 15 bp, Homo sapiens
agaggaggcaccaaa

SEQ ID NO: 578064 - DNA, 15 bp, Homo sapiens
gaggaggcaccaaac

SEQ ID NO: 578065 - DNA, 15 bp, Homo sapiens
aggaggcaccaaact

SEQ ID NO: 578066 - DNA, 15 bp, Homo sapiens
ggaggcaccaaactt

SEQ ID NO: 578067 - DNA, 15 bp, Homo sapiens
gaggcaccaaacttc

SEQ ID NO: 578068 - DNA, 15 bp, Homo sapiens
aggcaccaaacttca

SEQ ID NO: 578069 - DNA, 15 bp, Homo sapiens
ggcaccaaacttcag

SEQ ID NO: 578070 - DNA, 15 bp, Homo sapiens
gcaccaaacttcagt

SEQ ID NO: 578071 - DNA, 15 bp, Homo sapiens
caccaaacttcagtt

SEQ ID NO: 578072 - DNA, 15 bp, Homo sapiens
accaaacttcagttt

SEQ ID NO: 578073 - DNA, 15 bp, Homo sapiens
ccaaacttcagtttc

SEQ ID NO: 578074 - DNA, 15 bp, Homo sapiens
caaacttcagtttca

SEQ ID NO: 578075 - DNA, 15 bp, Homo sapiens
aaacttcagtttcat

SEQ ID NO: 578076 - DNA, 15 bp, Homo sapiens
aacttcagtttcata

SEQ ID NO: 578077 - DNA, 15 bp, Homo sapiens
acttcagtttcataa

SEQ ID NO: 578078 - DNA, 15 bp, Homo sapiens
cttcagtttcataat

SEQ ID NO: 578079 - DNA, 15 bp, Homo sapiens
ttcagtttcataatt

SEQ ID NO: 578080 - DNA, 15 bp, Homo sapiens
tcagtttcataattg

SEQ ID NO: 578081 - DNA, 15 bp, Homo sapiens
cagtttcataattga

SEQ ID NO: 578082 - DNA, 15 bp, Homo sapiens
agtttcataattgaa

SEQ ID NO: 578083 - DNA, 15 bp, Homo sapiens
gtttcataattgaaa

SEQ ID NO: 578084 - DNA, 15 bp, Homo sapiens
tttcataattgaaac

SEQ ID NO: 578085 - DNA, 15 bp, Homo sapiens
ttcataattgaaact

SEQ ID NO: 578086 - DNA, 15 bp, Homo sapiens
tcataattgaaactg

SEQ ID NO: 578087 - DNA, 15 bp, Homo sapiens
cataattgaaactga

SEQ ID NO: 578088 - DNA, 15 bp, Homo sapiens
ataattgaaactgac

SEQ ID NO: 578089 - DNA, 15 bp, Homo sapiens
taattgaaactgaca

SEQ ID NO: 578090 - DNA, 15 bp, Homo sapiens
aattgaaactgacaa

SEQ ID NO: 578091 - DNA, 15 bp, Homo sapiens
attgaaactgacaac

SEQ ID NO: 578092 - DNA, 15 bp, Homo sapiens
ttgaaactgacaacg

SEQ ID NO: 578093 - DNA, 15 bp, Homo sapiens
tgaaactgacaacgc

SEQ ID NO: 578094 - DNA, 15 bp, Homo sapiens
gaaactgacaacgcc

SEQ ID NO: 578095 - DNA, 15 bp, Homo sapiens
aaactgacaacgcca

SEQ ID NO: 578096 - DNA, 15 bp, Homo sapiens
aactgacaacgccag

SEQ ID NO: 578097 - DNA, 15 bp, Homo sapiens
actgacaacgccagt

SEQ ID NO: 578098 - DNA, 15 bp, Homo sapiens
ctgacaacgccagta

SEQ ID NO: 578099 - DNA, 15 bp, Homo sapiens
tgacaacgccagtaa

SEQ ID NO: 578100 - DNA, 15 bp, Homo sapiens
gacaacgccagtaaa

SEQ ID NO: 578101 - DNA, 15 bp, Homo sapiens
acaacgccagtaaat

SEQ ID NO: 578102 - DNA, 15 bp, Homo sapiens
caacgccagtaaatc

SEQ ID NO: 578103 - DNA, 15 bp, Homo sapiens
aacgccagtaaatca

SEQ ID NO: 578104 - DNA, 15 bp, Homo sapiens
acgccagtaaatcag

SEQ ID NO: 578105 - DNA, 15 bp, Homo sapiens
cgccagtaaatcagg

SEQ ID NO: 578106 - DNA, 15 bp, Homo sapiens
gccagtaaatcaggg

SEQ ID NO: 578107 - DNA, 15 bp, Homo sapiens
ccagtaaatcagggc

SEQ ID NO: 578108 - DNA, 15 bp, Homo sapiens
cagtaaatcagggcc

SEQ ID NO: 578109 - DNA, 15 bp, Homo sapiens
agtaaatcagggcct

SEQ ID NO: 578110 - DNA, 15 bp, Homo sapiens
gtaaatcagggcctg

SEQ ID NO: 578111 - DNA, 15 bp, Homo sapiens
taaatcagggcctgc

SEQ ID NO: 578112 - DNA, 15 bp, Homo sapiens
aaatcagggcctgca

SEQ ID NO: 578113 - DNA, 15 bp, Homo sapiens
aatcagggcctgcat

SEQ ID NO: 578114 - DNA, 15 bp, Homo sapiens
atcagggcctgcatt

SEQ ID NO: 578115 - DNA, 15 bp, Homo sapiens
tcagggcctgcattc

SEQ ID NO: 578116 - DNA, 15 bp, Homo sapiens
cagggcctgcattcg

SEQ ID NO: 578117 - DNA, 15 bp, Homo sapiens
agggcctgcattcga

SEQ ID NO: 578118 - DNA, 15 bp, Homo sapiens
gggcctgcattcgaa

SEQ ID NO: 578119 - DNA, 15 bp, Homo sapiens
ggcctgcattcgaaa

SEQ ID NO: 578120 - DNA, 15 bp, Homo sapiens
gcctgcattcgaaac

SEQ ID NO: 578121 - DNA, 15 bp, Homo sapiens
cctgcattcgaaact

SEQ ID NO: 578122 - DNA, 15 bp, Homo sapiens
ctgcattcgaaacta

SEQ ID NO: 578123 - DNA, 15 bp, Homo sapiens
tgcattcgaaactac

SEQ ID NO: 578124 - DNA, 15 bp, Homo sapiens
gcattcgaaactaca

SEQ ID NO: 578125 - DNA, 15 bp, Homo sapiens
cattcgaaactacag

SEQ ID NO: 578126 - DNA, 15 bp, Homo sapiens
attcgaaactacagg

SEQ ID NO: 578127 - DNA, 15 bp, Homo sapiens
ttcgaaactacaggt

SEQ ID NO: 578128 - DNA, 15 bp, Homo sapiens
tcgaaactacaggtt

SEQ ID NO: 578129 - DNA, 15 bp, Homo sapiens
cgaaactacaggtta

SEQ ID NO: 578130 - DNA, 15 bp, Homo sapiens
gaaactacaggttat

SEQ ID NO: 578131 - DNA, 15 bp, Homo sapiens
aaactacaggttatt

SEQ ID NO: 578132 - DNA, 15 bp, Homo sapiens
aactacaggttattt

SEQ ID NO: 578133 - DNA, 15 bp, Homo sapiens
actacaggttatttc

SEQ ID NO: 578134 - DNA, 15 bp, Homo sapiens
ctacaggttatttca

SEQ ID NO: 578135 - DNA, 15 bp, Homo sapiens
tacaggttatttcag

SEQ ID NO: 578136 - DNA, 15 bp, Homo sapiens
acaggttatttcagg

SEQ ID NO: 578137 - DNA, 15 bp, Homo sapiens
caggttatttcaggc

SEQ ID NO: 578138 - DNA, 15 bp, Homo sapiens
aggttatttcaggct

SEQ ID NO: 578139 - DNA, 15 bp, Homo sapiens
ggttatttcaggctc

SEQ ID NO: 578140 - DNA, 15 bp, Homo sapiens
gttatttcaggctcc

SEQ ID NO: 578141 - DNA, 15 bp, Homo sapiens
ttatttcaggctcct

SEQ ID NO: 578142 - DNA, 15 bp, Homo sapiens
tatttcaggctcctt

SEQ ID NO: 578143 - DNA, 15 bp, Homo sapiens
atttcaggctcctta

SEQ ID NO: 578144 - DNA, 15 bp, Homo sapiens
tttcaggctccttac

SEQ ID NO: 578145 - DNA, 15 bp, Homo sapiens
ttcaggctccttact

SEQ ID NO: 578146 - DNA, 15 bp, Homo sapiens
tcaggctccttactt

SEQ ID NO: 578147 - DNA, 15 bp, Homo sapiens
caggctccttacttg

SEQ ID NO: 578148 - DNA, 15 bp, Homo sapiens
aggctccttacttgt

SEQ ID NO: 578149 - DNA, 15 bp, Homo sapiens
ggctccttacttgta

SEQ ID NO: 578150 - DNA, 15 bp, Homo sapiens
gctccttacttgtaa

SEQ ID NO: 578151 - DNA, 15 bp, Homo sapiens
ctccttacttgtaag

SEQ ID NO: 578152 - DNA, 15 bp, Homo sapiens
tccttacttgtaagt

SEQ ID NO: 578153 - DNA, 15 bp, Homo sapiens
ccttacttgtaagta

SEQ ID NO: 578154 - DNA, 15 bp, Homo sapiens
cttacttgtaagtaa

SEQ ID NO: 578155 - DNA, 15 bp, Homo sapiens
ttacttgtaagtaaa

SEQ ID NO: 578156 - DNA, 15 bp, Homo sapiens
tacttgtaagtaaac

SEQ ID NO: 578157 - DNA, 15 bp, Homo sapiens
acttgtaagtaaaca

SEQ ID NO: 578158 - DNA, 15 bp, Homo sapiens
cttgtaagtaaacaa

SEQ ID NO: 578159 - DNA, 15 bp, Homo sapiens
ttgtaagtaaacaat

SEQ ID NO: 578160 - DNA, 15 bp, Homo sapiens
tgtaagtaaacaatg

SEQ ID NO: 578161 - DNA, 15 bp, Homo sapiens
gtaagtaaacaatgt

SEQ ID NO: 578162 - DNA, 15 bp, Homo sapiens
taagtaaacaatgta

SEQ ID NO: 578163 - DNA, 15 bp, Homo sapiens
aagtaaacaatgtaa

SEQ ID NO: 578164 - DNA, 15 bp, Homo sapiens
agtaaacaatgtaaa

SEQ ID NO: 578165 - DNA, 15 bp, Homo sapiens
gtaaacaatgtaaac

SEQ ID NO: 578166 - DNA, 15 bp, Homo sapiens
taaacaatgtaaaca

SEQ ID NO: 578167 - DNA, 15 bp, Homo sapiens
aaacaatgtaaacag

SEQ ID NO: 578168 - DNA, 15 bp, Homo sapiens
aacaatgtaaacagc

SEQ ID NO: 578169 - DNA, 15 bp, Homo sapiens
acaatgtaaacagca

SEQ ID NO: 578170 - DNA, 15 bp, Homo sapiens
caatgtaaacagcat

SEQ ID NO: 578171 - DNA, 15 bp, Homo sapiens
aatgtaaacagcata

SEQ ID NO: 578172 - DNA, 15 bp, Homo sapiens
atgtaaacagcatat

SEQ ID NO: 578173 - DNA, 15 bp, Homo sapiens
tgtaaacagcatatt

SEQ ID NO: 578174 - DNA, 15 bp, Homo sapiens
gtaaacagcatattt

SEQ ID NO: 578175 - DNA, 15 bp, Homo sapiens
taaacagcatatttt

SEQ ID NO: 578176 - DNA, 15 bp, Homo sapiens
aaacagcatattttt

SEQ ID NO: 578177 - DNA, 15 bp, Homo sapiens
aacagcatattttta

SEQ ID NO: 578178 - DNA, 15 bp, Homo sapiens
acagcatatttttac

SEQ ID NO: 578179 - DNA, 15 bp, Homo sapiens
cagcatatttttact

SEQ ID NO: 578180 - DNA, 15 bp, Homo sapiens
agcatatttttactc

SEQ ID NO: 578181 - DNA, 15 bp, Homo sapiens
gcatatttttactct

SEQ ID NO: 578182 - DNA, 15 bp, Homo sapiens
catatttttactctg

SEQ ID NO: 578183 - DNA, 15 bp, Homo sapiens
atatttttactctgc

SEQ ID NO: 578184 - DNA, 15 bp, Homo sapiens
tatttttactctgct

SEQ ID NO: 578185 - DNA, 15 bp, Homo sapiens
atttttactctgctt

SEQ ID NO: 578186 - DNA, 15 bp, Homo sapiens
tttttactctgcttt

SEQ ID NO: 578187 - DNA, 15 bp, Homo sapiens
ttttactctgctttg

SEQ ID NO: 578188 - DNA, 15 bp, Homo sapiens
tttactctgctttgt

SEQ ID NO: 578189 - DNA, 15 bp, Homo sapiens
ttactctgctttgtc

SEQ ID NO: 578190 - DNA, 15 bp, Homo sapiens
tactctgctttgtca

SEQ ID NO: 578191 - DNA, 15 bp, Homo sapiens
actctgctttgtcaa

SEQ ID NO: 578192 - DNA, 15 bp, Homo sapiens
ctctgctttgtcaag

SEQ ID NO: 578193 - DNA, 15 bp, Homo sapiens
tctgctttgtcaaga

SEQ ID NO: 578194 - DNA, 15 bp, Homo sapiens
ctgctttgtcaagac

SEQ ID NO: 578195 - DNA, 15 bp, Homo sapiens
tgctttgtcaagacc

SEQ ID NO: 578196 - DNA, 15 bp, Homo sapiens
gctttgtcaagaccc

SEQ ID NO: 578197 - DNA, 15 bp, Homo sapiens
ctttgtcaagacccc

SEQ ID NO: 578198 - DNA, 15 bp, Homo sapiens
tttgtcaagaccccc

SEQ ID NO: 578199 - DNA, 15 bp, Homo sapiens
ttgtcaagaccccca

SEQ ID NO: 578200 - DNA, 15 bp, Homo sapiens
tgtcaagacccccat

SEQ ID NO: 578201 - DNA, 15 bp, Homo sapiens
gtcaagacccccatg

SEQ ID NO: 578202 - DNA, 15 bp, Homo sapiens
tcaagacccccatgg

SEQ ID NO: 578203 - DNA, 15 bp, Homo sapiens
caagacccccatggt

SEQ ID NO: 578204 - DNA, 15 bp, Homo sapiens
aagacccccatggtg

SEQ ID NO: 578205 - DNA, 15 bp, Homo sapiens
agacccccatggtgg

SEQ ID NO: 578206 - DNA, 15 bp, Homo sapiens
gacccccatggtggg

SEQ ID NO: 578207 - DNA, 15 bp, Homo sapiens
acccccatggtggga

SEQ ID NO: 578208 - DNA, 15 bp, Homo sapiens
cccccatggtgggaa

SEQ ID NO: 578209 - DNA, 15 bp, Homo sapiens
ccccatggtgggaat

SEQ ID NO: 578210 - DNA, 15 bp, Homo sapiens
cccatggtgggaatg

SEQ ID NO: 578211 - DNA, 15 bp, Homo sapiens
ccatggtgggaatgt

SEQ ID NO: 578212 - DNA, 15 bp, Homo sapiens
catggtgggaatgtc

SEQ ID NO: 578213 - DNA, 15 bp, Homo sapiens
atggtgggaatgtcg

SEQ ID NO: 578214 - DNA, 15 bp, Homo sapiens
tggtgggaatgtcgt

SEQ ID NO: 578215 - DNA, 15 bp, Homo sapiens
ggtgggaatgtcgtc

SEQ ID NO: 578216 - DNA, 15 bp, Homo sapiens
gtgggaatgtcgtca

SEQ ID NO: 578217 - DNA, 15 bp, Homo sapiens
tgggaatgtcgtcat

SEQ ID NO: 578218 - DNA, 15 bp, Homo sapiens
gggaatgtcgtcatg

SEQ ID NO: 578219 - DNA, 15 bp, Homo sapiens
ggaatgtcgtcatgg

SEQ ID NO: 578220 - DNA, 15 bp, Homo sapiens
gaatgtcgtcatgga

SEQ ID NO: 578221 - DNA, 15 bp, Homo sapiens
aatgtcgtcatggat

SEQ ID NO: 578222 - DNA, 15 bp, Homo sapiens
atgtcgtcatggatg

SEQ ID NO: 578223 - DNA, 15 bp, Homo sapiens
tgtcgtcatggatga

SEQ ID NO: 578224 - DNA, 15 bp, Homo sapiens
gtcgtcatggatgaa

SEQ ID NO: 578225 - DNA, 15 bp, Homo sapiens
tcgtcatggatgaag

SEQ ID NO: 578226 - DNA, 15 bp, Homo sapiens
cgtcatggatgaaga

SEQ ID NO: 578227 - DNA, 15 bp, Homo sapiens
gtcatggatgaagaa

SEQ ID NO: 578228 - DNA, 15 bp, Homo sapiens
tcatggatgaagaaa

SEQ ID NO: 578229 - DNA, 15 bp, Homo sapiens
catggatgaagaaag

SEQ ID NO: 578230 - DNA, 15 bp, Homo sapiens
atggatgaagaaagc

SEQ ID NO: 578231 - DNA, 15 bp, Homo sapiens
tggatgaagaaagca

SEQ ID NO: 578232 - DNA, 15 bp, Homo sapiens
ggatgaagaaagcag

SEQ ID NO: 578233 - DNA, 15 bp, Homo sapiens
gatgaagaaagcagt

SEQ ID NO: 578234 - DNA, 15 bp, Homo sapiens
atgaagaaagcagtt

SEQ ID NO: 578235 - DNA, 15 bp, Homo sapiens
tgaagaaagcagtta

SEQ ID NO: 578236 - DNA, 15 bp, Homo sapiens
gaagaaagcagttaa

SEQ ID NO: 578237 - DNA, 15 bp, Homo sapiens
aagaaagcagttaaa

SEQ ID NO: 578238 - DNA, 15 bp, Homo sapiens
agaaagcagttaaat

SEQ ID NO: 578239 - DNA, 15 bp, Homo sapiens
gaaagcagttaaatg

SEQ ID NO: 578240 - DNA, 15 bp, Homo sapiens
aaagcagttaaatgc

SEQ ID NO: 578241 - DNA, 15 bp, Homo sapiens
aagcagttaaatgca

SEQ ID NO: 578242 - DNA, 15 bp, Homo sapiens
agcagttaaatgcac

SEQ ID NO: 578243 - DNA, 15 bp, Homo sapiens
gcagttaaatgcacc

SEQ ID NO: 578244 - DNA, 15 bp, Homo sapiens
cagttaaatgcacct

SEQ ID NO: 578245 - DNA, 15 bp, Homo sapiens
agttaaatgcaccta

SEQ ID NO: 578246 - DNA, 15 bp, Homo sapiens
gttaaatgcacctaa

SEQ ID NO: 578247 - DNA, 15 bp, Homo sapiens
ttaaatgcacctaac

SEQ ID NO: 578248 - DNA, 15 bp, Homo sapiens
taaatgcacctaaca

SEQ ID NO: 578249 - DNA, 15 bp, Homo sapiens
aaatgcacctaacac

SEQ ID NO: 578250 - DNA, 15 bp, Homo sapiens
aatgcacctaacact

SEQ ID NO: 578251 - DNA, 15 bp, Homo sapiens
atgcacctaacactt

SEQ ID NO: 578252 - DNA, 15 bp, Homo sapiens
tgcacctaacacttg

SEQ ID NO: 578253 - DNA, 15 bp, Homo sapiens
gcacctaacacttgc

SEQ ID NO: 578254 - DNA, 15 bp, Homo sapiens
cacctaacacttgct

SEQ ID NO: 578255 - DNA, 15 bp, Homo sapiens
acctaacacttgctt

SEQ ID NO: 578256 - DNA, 15 bp, Homo sapiens
cctaacacttgctta

SEQ ID NO: 578257 - DNA, 15 bp, Homo sapiens
ctaacacttgcttaa

SEQ ID NO: 578258 - DNA, 15 bp, Homo sapiens
taacacttgcttaaa

SEQ ID NO: 578259 - DNA, 15 bp, Homo sapiens
aacacttgcttaaaa

SEQ ID NO: 578260 - DNA, 15 bp, Homo sapiens
acacttgcttaaaaa

SEQ ID NO: 578261 - DNA, 15 bp, Homo sapiens
cacttgcttaaaaaa

SEQ ID NO: 578262 - DNA, 15 bp, Homo sapiens
acttgcttaaaaaat

SEQ ID NO: 578263 - DNA, 15 bp, Homo sapiens
cttgcttaaaaaata

SEQ ID NO: 578264 - DNA, 15 bp, Homo sapiens
ttgcttaaaaaataa

SEQ ID NO: 578265 - DNA, 15 bp, Homo sapiens
tgcttaaaaaataat

SEQ ID NO: 578266 - DNA, 15 bp, Homo sapiens
gcttaaaaaataata

SEQ ID NO: 578267 - DNA, 15 bp, Homo sapiens
cttaaaaaataatac

SEQ ID NO: 578268 - DNA, 15 bp, Homo sapiens
ttaaaaaataataca

SEQ ID NO: 578269 - DNA, 15 bp, Homo sapiens
taaaaaataatacag

SEQ ID NO: 578270 - DNA, 15 bp, Homo sapiens
aaaaaataatacagc

SEQ ID NO: 578271 - DNA, 15 bp, Homo sapiens
aaaaataatacagca

SEQ ID NO: 578272 - DNA, 15 bp, Homo sapiens
aaaataatacagcaa

SEQ ID NO: 578273 - DNA, 15 bp, Homo sapiens
aaataatacagcaag

SEQ ID NO: 578274 - DNA, 15 bp, Homo sapiens
aataatacagcaaga

SEQ ID NO: 578275 - DNA, 15 bp, Homo sapiens
ataatacagcaagaa

SEQ ID NO: 578276 - DNA, 15 bp, Homo sapiens
taatacagcaagaat

SEQ ID NO: 578277 - DNA, 15 bp, Homo sapiens
aatacagcaagaatt

SEQ ID NO: 578278 - DNA, 15 bp, Homo sapiens
atacagcaagaattc

SEQ ID NO: 578279 - DNA, 15 bp, Homo sapiens
tacagcaagaattcc

SEQ ID NO: 578280 - DNA, 15 bp, Homo sapiens
acagcaagaattcca

SEQ ID NO: 578281 - DNA, 15 bp, Homo sapiens
cagcaagaattccaa

SEQ ID NO: 578282 - DNA, 15 bp, Homo sapiens
agcaagaattccaac

SEQ ID NO: 578283 - DNA, 15 bp, Homo sapiens
gcaagaattccaact

SEQ ID NO: 578284 - DNA, 15 bp, Homo sapiens
caagaattccaactg

SEQ ID NO: 578285 - DNA, 15 bp, Homo sapiens
aagaattccaactgc

SEQ ID NO: 578286 - DNA, 15 bp, Homo sapiens
agaattccaactgca

SEQ ID NO: 578287 - DNA, 15 bp, Homo sapiens
gaattccaactgcaa

SEQ ID NO: 578288 - DNA, 15 bp, Homo sapiens
aattccaactgcaat

SEQ ID NO: 578289 - DNA, 15 bp, Homo sapiens
attccaactgcaata

SEQ ID NO: 578290 - DNA, 15 bp, Homo sapiens
ttccaactgcaatat

SEQ ID NO: 578291 - DNA, 15 bp, Homo sapiens
tccaactgcaatatt

SEQ ID NO: 578292 - DNA, 15 bp, Homo sapiens
ccaactgcaatatta

SEQ ID NO: 578293 - DNA, 15 bp, Homo sapiens
caactgcaatattag

SEQ ID NO: 578294 - DNA, 15 bp, Homo sapiens
aactgcaatattaga

SEQ ID NO: 578295 - DNA, 15 bp, Homo sapiens
actgcaatattagac

SEQ ID NO: 578296 - DNA, 15 bp, Homo sapiens
ctgcaatattagact

SEQ ID NO: 578297 - DNA, 15 bp, Homo sapiens
tgcaatattagactt

SEQ ID NO: 578298 - DNA, 15 bp, Homo sapiens
gcaatattagactta

SEQ ID NO: 578299 - DNA, 15 bp, Homo sapiens
caatattagacttag

SEQ ID NO: 578300 - DNA, 15 bp, Homo sapiens
aatattagacttaga

SEQ ID NO: 578301 - DNA, 15 bp, Homo sapiens
atattagacttagag

SEQ ID NO: 578302 - DNA, 15 bp, Homo sapiens
tattagacttagagg

SEQ ID NO: 578303 - DNA, 15 bp, Homo sapiens
attagacttagaggc

SEQ ID NO: 578304 - DNA, 15 bp, Homo sapiens
ttagacttagaggcc

SEQ ID NO: 578305 - DNA, 15 bp, Homo sapiens
tagacttagaggcca

SEQ ID NO: 578306 - DNA, 15 bp, Homo sapiens
agacttagaggccaa

SEQ ID NO: 578307 - DNA, 15 bp, Homo sapiens
gacttagaggccaat

SEQ ID NO: 578308 - DNA, 15 bp, Homo sapiens
acttagaggccaata

SEQ ID NO: 578309 - DNA, 15 bp, Homo sapiens
cttagaggccaatac

SEQ ID NO: 578310 - DNA, 15 bp, Homo sapiens
ttagaggccaatacc

SEQ ID NO: 578311 - DNA, 15 bp, Homo sapiens
tagaggccaatacca

SEQ ID NO: 578312 - DNA, 15 bp, Homo sapiens
agaggccaataccaa

SEQ ID NO: 578313 - DNA, 15 bp, Homo sapiens
gaggccaataccaaa

SEQ ID NO: 578314 - DNA, 15 bp, Homo sapiens
aggccaataccaaat

SEQ ID NO: 578315 - DNA, 15 bp, Homo sapiens
ggccaataccaaata

SEQ ID NO: 578316 - DNA, 15 bp, Homo sapiens
gccaataccaaatat

SEQ ID NO: 578317 - DNA, 15 bp, Homo sapiens
ccaataccaaatata

SEQ ID NO: 578318 - DNA, 15 bp, Homo sapiens
caataccaaatataa

SEQ ID NO: 578319 - DNA, 15 bp, Homo sapiens
aataccaaatataag

SEQ ID NO: 578320 - DNA, 15 bp, Homo sapiens
ataccaaatataaga

SEQ ID NO: 578321 - DNA, 15 bp, Homo sapiens
taccaaatataagag

SEQ ID NO: 578322 - DNA, 15 bp, Homo sapiens
accaaatataagaga

SEQ ID NO: 578323 - DNA, 15 bp, Homo sapiens
ccaaatataagagat

SEQ ID NO: 578324 - DNA, 15 bp, Homo sapiens
caaatataagagata

SEQ ID NO: 578325 - DNA, 15 bp, Homo sapiens
aaatataagagatat

SEQ ID NO: 578326 - DNA, 15 bp, Homo sapiens
aatataagagatatg

SEQ ID NO: 578327 - DNA, 15 bp, Homo sapiens
atataagagatatgc

SEQ ID NO: 578328 - DNA, 15 bp, Homo sapiens
tataagagatatgca

SEQ ID NO: 578329 - DNA, 15 bp, Homo sapiens
ataagagatatgcag

SEQ ID NO: 578330 - DNA, 15 bp, Homo sapiens
taagagatatgcagc

SEQ ID NO: 578331 - DNA, 15 bp, Homo sapiens
aagagatatgcagct

SEQ ID NO: 578332 - DNA, 15 bp, Homo sapiens
agagatatgcagctt

SEQ ID NO: 578333 - DNA, 15 bp, Homo sapiens
gagatatgcagcttt

SEQ ID NO: 578334 - DNA, 15 bp, Homo sapiens
agatatgcagctttg

SEQ ID NO: 578335 - DNA, 15 bp, Homo sapiens
gatatgcagctttga

SEQ ID NO: 578336 - DNA, 15 bp, Homo sapiens
atatgcagctttgaa

SEQ ID NO: 578337 - DNA, 15 bp, Homo sapiens
tatgcagctttgaaa

SEQ ID NO: 578338 - DNA, 15 bp, Homo sapiens
atgcagctttgaaaa

SEQ ID NO: 578339 - DNA, 15 bp, Homo sapiens
tgcagctttgaaaag

SEQ ID NO: 578340 - DNA, 15 bp, Homo sapiens
gcagctttgaaaaga

SEQ ID NO: 578341 - DNA, 15 bp, Homo sapiens
cagctttgaaaagag

SEQ ID NO: 578342 - DNA, 15 bp, Homo sapiens
agctttgaaaagaga

SEQ ID NO: 578343 - DNA, 15 bp, Homo sapiens
gctttgaaaagagat

SEQ ID NO: 578344 - DNA, 15 bp, Homo sapiens
ctttgaaaagagatg

SEQ ID NO: 578345 - DNA, 15 bp, Homo sapiens
tttgaaaagagatga

SEQ ID NO: 578346 - DNA, 15 bp, Homo sapiens
ttgaaaagagatgaa

SEQ ID NO: 578347 - DNA, 15 bp, Homo sapiens
tgaaaagagatgaaa

SEQ ID NO: 578348 - DNA, 15 bp, Homo sapiens
gaaaagagatgaaaa

SEQ ID NO: 578349 - DNA, 15 bp, Homo sapiens
aaaagagatgaaaac

SEQ ID NO: 578350 - DNA, 15 bp, Homo sapiens
aaagagatgaaaact

SEQ ID NO: 578351 - DNA, 15 bp, Homo sapiens
aagagatgaaaactc

SEQ ID NO: 578352 - DNA, 15 bp, Homo sapiens
agagatgaaaactcc

SEQ ID NO: 578353 - DNA, 15 bp, Homo sapiens
gagatgaaaactcca

SEQ ID NO: 578354 - DNA, 15 bp, Homo sapiens
agatgaaaactccag

SEQ ID NO: 578355 - DNA, 15 bp, Homo sapiens
gatgaaaactccaga

SEQ ID NO: 578356 - DNA, 15 bp, Homo sapiens
atgaaaactccagat

SEQ ID NO: 578357 - DNA, 15 bp, Homo sapiens
tgaaaactccagatt

SEQ ID NO: 578358 - DNA, 15 bp, Homo sapiens
gaaaactccagattc

SEQ ID NO: 578359 - DNA, 15 bp, Homo sapiens
aaaactccagattct

SEQ ID NO: 578360 - DNA, 15 bp, Homo sapiens
aaactccagattcta

SEQ ID NO: 578361 - DNA, 15 bp, Homo sapiens
aactccagattctac

SEQ ID NO: 578362 - DNA, 15 bp, Homo sapiens
actccagattctacc

SEQ ID NO: 578363 - DNA, 15 bp, Homo sapiens
ctccagattctaccc

SEQ ID NO: 578364 - DNA, 15 bp, Homo sapiens
tccagattctaccca

SEQ ID NO: 578365 - DNA, 15 bp, Homo sapiens
ccagattctacccag

SEQ ID NO: 578366 - DNA, 15 bp, Homo sapiens
cagattctacccagt

SEQ ID NO: 578367 - DNA, 15 bp, Homo sapiens
agattctacccagta

SEQ ID NO: 578368 - DNA, 15 bp, Homo sapiens
gattctacccagtac

SEQ ID NO: 578369 - DNA, 15 bp, Homo sapiens
attctacccagtacc

SEQ ID NO: 578370 - DNA, 15 bp, Homo sapiens
ttctacccagtacca

SEQ ID NO: 578371 - DNA, 15 bp, Homo sapiens
tctacccagtaccat

SEQ ID NO: 578372 - DNA, 15 bp, Homo sapiens
ctacccagtaccatc

SEQ ID NO: 578373 - DNA, 15 bp, Homo sapiens
tacccagtaccatct

SEQ ID NO: 578374 - DNA, 15 bp, Homo sapiens
acccagtaccatctt

SEQ ID NO: 578375 - DNA, 15 bp, Homo sapiens
cccagtaccatcttt

SEQ ID NO: 578376 - DNA, 15 bp, Homo sapiens
ccagtaccatcttta

SEQ ID NO: 578377 - DNA, 15 bp, Homo sapiens
cagtaccatctttaa

SEQ ID NO: 578378 - DNA, 15 bp, Homo sapiens
agtaccatctttaag

SEQ ID NO: 578379 - DNA, 15 bp, Homo sapiens
gtaccatctttaagg

SEQ ID NO: 578380 - DNA, 15 bp, Homo sapiens
taccatctttaaggc

SEQ ID NO: 578381 - DNA, 15 bp, Homo sapiens
accatctttaaggcg

SEQ ID NO: 578382 - DNA, 15 bp, Homo sapiens
ccatctttaaggcga

SEQ ID NO: 578383 - DNA, 15 bp, Homo sapiens
catctttaaggcgaa

SEQ ID NO: 578384 - DNA, 15 bp, Homo sapiens
atctttaaggcgaac

SEQ ID NO: 578385 - DNA, 15 bp, Homo sapiens
tctttaaggcgaaca

SEQ ID NO: 578386 - DNA, 15 bp, Homo sapiens
ctttaaggcgaacat

SEQ ID NO: 578387 - DNA, 15 bp, Homo sapiens
tttaaggcgaacatg

SEQ ID NO: 578388 - DNA, 15 bp, Homo sapiens
ttaaggcgaacatgc

SEQ ID NO: 578389 - DNA, 15 bp, Homo sapiens
taaggcgaacatgcc

SEQ ID NO: 578390 - DNA, 15 bp, Homo sapiens
aaggcgaacatgcca

SEQ ID NO: 578391 - DNA, 15 bp, Homo sapiens
aggcgaacatgccag

SEQ ID NO: 578392 - DNA, 15 bp, Homo sapiens
ggcgaacatgccaga

SEQ ID NO: 578393 - DNA, 15 bp, Homo sapiens
gcgaacatgccagat

SEQ ID NO: 578394 - DNA, 15 bp, Homo sapiens
cgaacatgccagata

SEQ ID NO: 578395 - DNA, 15 bp, Homo sapiens
gaacatgccagataa

SEQ ID NO: 578396 - DNA, 15 bp, Homo sapiens
aacatgccagataat

SEQ ID NO: 578397 - DNA, 15 bp, Homo sapiens
acatgccagataatg

SEQ ID NO: 578398 - DNA, 15 bp, Homo sapiens
catgccagataatga

SEQ ID NO: 578399 - DNA, 15 bp, Homo sapiens
atgccagataatgag

SEQ ID NO: 578400 - DNA, 15 bp, Homo sapiens
tgccagataatgagt

SEQ ID NO: 578401 - DNA, 15 bp, Homo sapiens
gccagataatgagtt

SEQ ID NO: 578402 - DNA, 15 bp, Homo sapiens
ccagataatgagttt

SEQ ID NO: 578403 - DNA, 15 bp, Homo sapiens
cagataatgagtttt

SEQ ID NO: 578404 - DNA, 15 bp, Homo sapiens
agataatgagttttc

SEQ ID NO: 578405 - DNA, 15 bp, Homo sapiens
gataatgagttttct

SEQ ID NO: 578406 - DNA, 15 bp, Homo sapiens
ataatgagttttctt

SEQ ID NO: 578407 - DNA, 15 bp, Homo sapiens
taatgagttttcttt

SEQ ID NO: 578408 - DNA, 15 bp, Homo sapiens
aatgagttttctttg

SEQ ID NO: 578409 - DNA, 15 bp, Homo sapiens
atgagttttctttgg

SEQ ID NO: 578410 - DNA, 15 bp, Homo sapiens
tgagttttctttggc

SEQ ID NO: 578411 - DNA, 15 bp, Homo sapiens
gagttttctttggct

SEQ ID NO: 578412 - DNA, 15 bp, Homo sapiens
agttttctttggctt

SEQ ID NO: 578413 - DNA, 15 bp, Homo sapiens
gttttctttggcttt

SEQ ID NO: 578414 - DNA, 15 bp, Homo sapiens
ttttctttggctttg

SEQ ID NO: 578415 - DNA, 15 bp, Homo sapiens
tttctttggctttgt

SEQ ID NO: 578416 - DNA, 15 bp, Homo sapiens
ttctttggctttgtt

SEQ ID NO: 578417 - DNA, 15 bp, Homo sapiens
tctttggctttgttt

SEQ ID NO: 578418 - DNA, 15 bp, Homo sapiens
ctttggctttgtttt

SEQ ID NO: 578419 - DNA, 15 bp, Homo sapiens
tttggctttgttttt

SEQ ID NO: 578420 - DNA, 15 bp, Homo sapiens
ttggctttgtttttt

SEQ ID NO: 578421 - DNA, 15 bp, Homo sapiens
tggctttgttttttc

SEQ ID NO: 578422 - DNA, 15 bp, Homo sapiens
ggctttgttttttct

SEQ ID NO: 578423 - DNA, 15 bp, Homo sapiens
gctttgttttttctt

SEQ ID NO: 578424 - DNA, 15 bp, Homo sapiens
ctttgttttttcttc

SEQ ID NO: 578425 - DNA, 15 bp, Homo sapiens
tttgttttttcttct

SEQ ID NO: 578426 - DNA, 15 bp, Homo sapiens
ttgttttttcttctt

SEQ ID NO: 578427 - DNA, 15 bp, Homo sapiens
tgttttttcttctta

SEQ ID NO: 578428 - DNA, 15 bp, Homo sapiens
gttttttcttcttaa

SEQ ID NO: 578429 - DNA, 15 bp, Homo sapiens
ttttttcttcttaaa

SEQ ID NO: 578430 - DNA, 15 bp, Homo sapiens
tttttcttcttaaag

SEQ ID NO: 578431 - DNA, 15 bp, Homo sapiens
ttttcttcttaaaga

SEQ ID NO: 578432 - DNA, 15 bp, Homo sapiens
tttcttcttaaagaa

SEQ ID NO: 578433 - DNA, 15 bp, Homo sapiens
ttcttcttaaagaat

SEQ ID NO: 578434 - DNA, 15 bp, Homo sapiens
tcttcttaaagaata

SEQ ID NO: 578435 - DNA, 15 bp, Homo sapiens
cttcttaaagaatac

SEQ ID NO: 578436 - DNA, 15 bp, Homo sapiens
ttcttaaagaatacc

SEQ ID NO: 578437 - DNA, 15 bp, Homo sapiens
tcttaaagaatacca

SEQ ID NO: 578438 - DNA, 15 bp, Homo sapiens
cttaaagaataccat

SEQ ID NO: 578439 - DNA, 15 bp, Homo sapiens
ttaaagaataccatg

SEQ ID NO: 578440 - DNA, 15 bp, Homo sapiens
taaagaataccatgt

SEQ ID NO: 578441 - DNA, 15 bp, Homo sapiens
aaagaataccatgtt

SEQ ID NO: 578442 - DNA, 15 bp, Homo sapiens
aagaataccatgtta

SEQ ID NO: 578443 - DNA, 15 bp, Homo sapiens
agaataccatgttaa

SEQ ID NO: 578444 - DNA, 15 bp, Homo sapiens
gaataccatgttaac

SEQ ID NO: 578445 - DNA, 15 bp, Homo sapiens
aataccatgttaacc

SEQ ID NO: 578446 - DNA, 15 bp, Homo sapiens
ataccatgttaacca

SEQ ID NO: 578447 - DNA, 15 bp, Homo sapiens
taccatgttaaccac

SEQ ID NO: 578448 - DNA, 15 bp, Homo sapiens
accatgttaaccact

SEQ ID NO: 578449 - DNA, 15 bp, Homo sapiens
ccatgttaaccacta

SEQ ID NO: 578450 - DNA, 15 bp, Homo sapiens
catgttaaccactag

SEQ ID NO: 578451 - DNA, 15 bp, Homo sapiens
atgttaaccactaga

SEQ ID NO: 578452 - DNA, 15 bp, Homo sapiens
tgttaaccactagag

SEQ ID NO: 578453 - DNA, 15 bp, Homo sapiens
gttaaccactagaga

SEQ ID NO: 578454 - DNA, 15 bp, Homo sapiens
ttaaccactagagaa

SEQ ID NO: 578455 - DNA, 15 bp, Homo sapiens
taaccactagagaac

SEQ ID NO: 578456 - DNA, 15 bp, Homo sapiens
aaccactagagaaca

SEQ ID NO: 578457 - DNA, 15 bp, Homo sapiens
accactagagaacag

SEQ ID NO: 578458 - DNA, 15 bp, Homo sapiens
ccactagagaacagc

SEQ ID NO: 578459 - DNA, 15 bp, Homo sapiens
cactagagaacagct

SEQ ID NO: 578460 - DNA, 15 bp, Homo sapiens
actagagaacagctc

SEQ ID NO: 578461 - DNA, 15 bp, Homo sapiens
ctagagaacagctct

SEQ ID NO: 578462 - DNA, 15 bp, Homo sapiens
tagagaacagctctc

SEQ ID NO: 578463 - DNA, 15 bp, Homo sapiens
agagaacagctctct

SEQ ID NO: 578464 - DNA, 15 bp, Homo sapiens
gagaacagctctctc

SEQ ID NO: 578465 - DNA, 15 bp, Homo sapiens
agaacagctctctcc

SEQ ID NO: 578466 - DNA, 15 bp, Homo sapiens
gaacagctctctcct

SEQ ID NO: 578467 - DNA, 15 bp, Homo sapiens
aacagctctctcctc

SEQ ID NO: 578468 - DNA, 15 bp, Homo sapiens
acagctctctcctcc

SEQ ID NO: 578469 - DNA, 15 bp, Homo sapiens
cagctctctcctccc

SEQ ID NO: 578470 - DNA, 15 bp, Homo sapiens
agctctctcctcccc

SEQ ID NO: 578471 - DNA, 15 bp, Homo sapiens
gctctctcctccccc

SEQ ID NO: 578472 - DNA, 15 bp, Homo sapiens
ctctctcctccccca

SEQ ID NO: 578473 - DNA, 15 bp, Homo sapiens
tctctcctcccccag

SEQ ID NO: 578474 - DNA, 15 bp, Homo sapiens
ctctcctcccccagt

SEQ ID NO: 578475 - DNA, 15 bp, Homo sapiens
tctcctcccccagtc

SEQ ID NO: 578476 - DNA, 15 bp, Homo sapiens
ctcctcccccagtcc

SEQ ID NO: 578477 - DNA, 15 bp, Homo sapiens
tcctcccccagtcca

SEQ ID NO: 578478 - DNA, 15 bp, Homo sapiens
cctcccccagtccaa

SEQ ID NO: 578479 - DNA, 15 bp, Homo sapiens
ctcccccagtccaac

SEQ ID NO: 578480 - DNA, 15 bp, Homo sapiens
tcccccagtccaaca

SEQ ID NO: 578481 - DNA, 15 bp, Homo sapiens
cccccagtccaacag

SEQ ID NO: 578482 - DNA, 15 bp, Homo sapiens
ccccagtccaacaga

SEQ ID NO: 578483 - DNA, 15 bp, Homo sapiens
cccagtccaacagat

SEQ ID NO: 578484 - DNA, 15 bp, Homo sapiens
ccagtccaacagatt

SEQ ID NO: 578485 - DNA, 15 bp, Homo sapiens
cagtccaacagattt

SEQ ID NO: 578486 - DNA, 15 bp, Homo sapiens
agtccaacagattta

SEQ ID NO: 578487 - DNA, 15 bp, Homo sapiens
gtccaacagatttaa

SEQ ID NO: 578488 - DNA, 15 bp, Homo sapiens
tccaacagatttaat

SEQ ID NO: 578489 - DNA, 15 bp, Homo sapiens
ccaacagatttaatt

SEQ ID NO: 578490 - DNA, 15 bp, Homo sapiens
caacagatttaatta

SEQ ID NO: 578491 - DNA, 15 bp, Homo sapiens
aacagatttaattaa

SEQ ID NO: 578492 - DNA, 15 bp, Homo sapiens
acagatttaattaag

SEQ ID NO: 578493 - DNA, 15 bp, Homo sapiens
cagatttaattaagc

SEQ ID NO: 578494 - DNA, 15 bp, Homo sapiens
agatttaattaagct

SEQ ID NO: 578495 - DNA, 15 bp, Homo sapiens
gatttaattaagctg

SEQ ID NO: 578496 - DNA, 15 bp, Homo sapiens
atttaattaagctgc

SEQ ID NO: 578497 - DNA, 15 bp, Homo sapiens
tttaattaagctgct

SEQ ID NO: 578498 - DNA, 15 bp, Homo sapiens
ttaattaagctgcta

SEQ ID NO: 578499 - DNA, 15 bp, Homo sapiens
taattaagctgctaa

SEQ ID NO: 578500 - DNA, 15 bp, Homo sapiens
aattaagctgctaaa

SEQ ID NO: 578501 - DNA, 15 bp, Homo sapiens
attaagctgctaaag

SEQ ID NO: 578502 - DNA, 15 bp, Homo sapiens
ttaagctgctaaagc

SEQ ID NO: 578503 - DNA, 15 bp, Homo sapiens
taagctgctaaagct

SEQ ID NO: 578504 - DNA, 15 bp, Homo sapiens
aagctgctaaagctt

SEQ ID NO: 578505 - DNA, 15 bp, Homo sapiens
agctgctaaagcttt

SEQ ID NO: 578506 - DNA, 15 bp, Homo sapiens
gctgctaaagctttg

SEQ ID NO: 578507 - DNA, 15 bp, Homo sapiens
ctgctaaagctttgg

SEQ ID NO: 578508 - DNA, 15 bp, Homo sapiens
tgctaaagctttgga

SEQ ID NO: 578509 - DNA, 15 bp, Homo sapiens
gctaaagctttggaa

SEQ ID NO: 578510 - DNA, 15 bp, Homo sapiens
ctaaagctttggaaa

SEQ ID NO: 578511 - DNA, 15 bp, Homo sapiens
taaagctttggaaaa

SEQ ID NO: 578512 - DNA, 15 bp, Homo sapiens
aaagctttggaaaaa

SEQ ID NO: 578513 - DNA, 15 bp, Homo sapiens
aagctttggaaaaac

SEQ ID NO: 578514 - DNA, 15 bp, Homo sapiens
agctttggaaaaaca

SEQ ID NO: 578515 - DNA, 15 bp, Homo sapiens
gctttggaaaaacag

SEQ ID NO: 578516 - DNA, 15 bp, Homo sapiens
ctttggaaaaacaga

SEQ ID NO: 578517 - DNA, 15 bp, Homo sapiens
tttggaaaaacagaa

SEQ ID NO: 578518 - DNA, 15 bp, Homo sapiens
ttggaaaaacagaat

SEQ ID NO: 578519 - DNA, 15 bp, Homo sapiens
tggaaaaacagaatt

SEQ ID NO: 578520 - DNA, 15 bp, Homo sapiens
ggaaaaacagaatta

SEQ ID NO: 578521 - DNA, 15 bp, Homo sapiens
gaaaaacagaattat

SEQ ID NO: 578522 - DNA, 15 bp, Homo sapiens
aaaaacagaattatt

SEQ ID NO: 578523 - DNA, 15 bp, Homo sapiens
aaaacagaattattt

SEQ ID NO: 578524 - DNA, 15 bp, Homo sapiens
aaacagaattatttg

SEQ ID NO: 578525 - DNA, 15 bp, Homo sapiens
aacagaattatttga

SEQ ID NO: 578526 - DNA, 15 bp, Homo sapiens
acagaattatttgag

SEQ ID NO: 578527 - DNA, 15 bp, Homo sapiens
cagaattatttgagc

SEQ ID NO: 578528 - DNA, 15 bp, Homo sapiens
agaattatttgagct

SEQ ID NO: 578529 - DNA, 15 bp, Homo sapiens
gaattatttgagcta

SEQ ID NO: 578530 - DNA, 15 bp, Homo sapiens
aattatttgagctaa

SEQ ID NO: 578531 - DNA, 15 bp, Homo sapiens
attatttgagctaag

SEQ ID NO: 578532 - DNA, 15 bp, Homo sapiens
ttatttgagctaaga

SEQ ID NO: 578533 - DNA, 15 bp, Homo sapiens
tatttgagctaagag

SEQ ID NO: 578534 - DNA, 15 bp, Homo sapiens
atttgagctaagagg

SEQ ID NO: 578535 - DNA, 15 bp, Homo sapiens
tttgagctaagagga

SEQ ID NO: 578536 - DNA, 15 bp, Homo sapiens
ttgagctaagaggaa

SEQ ID NO: 578537 - DNA, 15 bp, Homo sapiens
tgagctaagaggaaa

SEQ ID NO: 578538 - DNA, 15 bp, Homo sapiens
gagctaagaggaaat

SEQ ID NO: 578539 - DNA, 15 bp, Homo sapiens
agctaagaggaaatg

SEQ ID NO: 578540 - DNA, 15 bp, Homo sapiens
gctaagaggaaatgt

SEQ ID NO: 578541 - DNA, 15 bp, Homo sapiens
ctaagaggaaatgtg

SEQ ID NO: 578542 - DNA, 15 bp, Homo sapiens
taagaggaaatgtga

SEQ ID NO: 578543 - DNA, 15 bp, Homo sapiens
aagaggaaatgtgat

SEQ ID NO: 578544 - DNA, 15 bp, Homo sapiens
agaggaaatgtgatt

SEQ ID NO: 578545 - DNA, 15 bp, Homo sapiens
gaggaaatgtgattg

SEQ ID NO: 578546 - DNA, 15 bp, Homo sapiens
aggaaatgtgattgt

SEQ ID NO: 578547 - DNA, 15 bp, Homo sapiens
ggaaatgtgattgtc

SEQ ID NO: 578548 - DNA, 15 bp, Homo sapiens
gaaatgtgattgtca

SEQ ID NO: 578549 - DNA, 15 bp, Homo sapiens
aaatgtgattgtcac

SEQ ID NO: 578550 - DNA, 15 bp, Homo sapiens
aatgtgattgtcaca

SEQ ID NO: 578551 - DNA, 15 bp, Homo sapiens
atgtgattgtcacat

SEQ ID NO: 578552 - DNA, 15 bp, Homo sapiens
tgtgattgtcacatt

SEQ ID NO: 578553 - DNA, 15 bp, Homo sapiens
gtgattgtcacattt

SEQ ID NO: 578554 - DNA, 15 bp, Homo sapiens
tgattgtcacatttt

SEQ ID NO: 578555 - DNA, 15 bp, Homo sapiens
gattgtcacattttc

SEQ ID NO: 578556 - DNA, 15 bp, Homo sapiens
attgtcacattttct

SEQ ID NO: 578557 - DNA, 15 bp, Homo sapiens
ttgtcacattttcta

SEQ ID NO: 578558 - DNA, 15 bp, Homo sapiens
tgtcacattttctag

SEQ ID NO: 578559 - DNA, 15 bp, Homo sapiens
gtcacattttctagt

SEQ ID NO: 578560 - DNA, 15 bp, Homo sapiens
tcacattttctagtt

SEQ ID NO: 578561 - DNA, 15 bp, Homo sapiens
cacattttctagtta

SEQ ID NO: 578562 - DNA, 15 bp, Homo sapiens
acattttctagttaa

SEQ ID NO: 578563 - DNA, 15 bp, Homo sapiens
cattttctagttaac

SEQ ID NO: 578564 - DNA, 15 bp, Homo sapiens
attttctagttaacc

SEQ ID NO: 578565 - DNA, 15 bp, Homo sapiens
ttttctagttaacct

SEQ ID NO: 578566 - DNA, 15 bp, Homo sapiens
tttctagttaacctg

SEQ ID NO: 578567 - DNA, 15 bp, Homo sapiens
ttctagttaacctgt

SEQ ID NO: 578568 - DNA, 15 bp, Homo sapiens
tctagttaacctgtc

SEQ ID NO: 578569 - DNA, 15 bp, Homo sapiens
ctagttaacctgtca

SEQ ID NO: 578570 - DNA, 15 bp, Homo sapiens
tagttaacctgtcac

SEQ ID NO: 578571 - DNA, 15 bp, Homo sapiens
agttaacctgtcact

SEQ ID NO: 578572 - DNA, 15 bp, Homo sapiens
gttaacctgtcactc

SEQ ID NO: 578573 - DNA, 15 bp, Homo sapiens
ttaacctgtcactca

SEQ ID NO: 578574 - DNA, 15 bp, Homo sapiens
taacctgtcactcat

SEQ ID NO: 578575 - DNA, 15 bp, Homo sapiens
aacctgtcactcatt

SEQ ID NO: 578576 - DNA, 15 bp, Homo sapiens
acctgtcactcattt

SEQ ID NO: 578577 - DNA, 15 bp, Homo sapiens
cctgtcactcatttg

SEQ ID NO: 578578 - DNA, 15 bp, Homo sapiens
ctgtcactcatttga

SEQ ID NO: 578579 - DNA, 15 bp, Homo sapiens
tgtcactcatttgat

SEQ ID NO: 578580 - DNA, 15 bp, Homo sapiens
gtcactcatttgatt

SEQ ID NO: 578581 - DNA, 15 bp, Homo sapiens
tcactcatttgattt

SEQ ID NO: 578582 - DNA, 15 bp, Homo sapiens
cactcatttgatttg

SEQ ID NO: 578583 - DNA, 15 bp, Homo sapiens
actcatttgatttgg

SEQ ID NO: 578584 - DNA, 15 bp, Homo sapiens
ctcatttgatttggc

SEQ ID NO: 578585 - DNA, 15 bp, Homo sapiens
tcatttgatttggca

SEQ ID NO: 578586 - DNA, 15 bp, Homo sapiens
catttgatttggcaa

SEQ ID NO: 578587 - DNA, 15 bp, Homo sapiens
atttgatttggcaaa

SEQ ID NO: 578588 - DNA, 15 bp, Homo sapiens
tttgatttggcaaag

SEQ ID NO: 578589 - DNA, 15 bp, Homo sapiens
ttgatttggcaaagg

SEQ ID NO: 578590 - DNA, 15 bp, Homo sapiens
tgatttggcaaaggc

SEQ ID NO: 578591 - DNA, 15 bp, Homo sapiens
gatttggcaaaggca

SEQ ID NO: 578592 - DNA, 15 bp, Homo sapiens
atttggcaaaggcag

SEQ ID NO: 578593 - DNA, 15 bp, Homo sapiens
tttggcaaaggcagt

SEQ ID NO: 578594 - DNA, 15 bp, Homo sapiens
ttggcaaaggcagtg

SEQ ID NO: 578595 - DNA, 15 bp, Homo sapiens
tggcaaaggcagtgc

SEQ ID NO: 578596 - DNA, 15 bp, Homo sapiens
ggcaaaggcagtgct

SEQ ID NO: 578597 - DNA, 15 bp, Homo sapiens
gcaaaggcagtgctc

SEQ ID NO: 578598 - DNA, 15 bp, Homo sapiens
caaaggcagtgctcc

SEQ ID NO: 578599 - DNA, 15 bp, Homo sapiens
aaaggcagtgctcct

SEQ ID NO: 578600 - DNA, 15 bp, Homo sapiens
aaggcagtgctccta

SEQ ID NO: 578601 - DNA, 15 bp, Homo sapiens
aggcagtgctcctat

SEQ ID NO: 578602 - DNA, 15 bp, Homo sapiens
ggcagtgctcctatt

SEQ ID NO: 578603 - DNA, 15 bp, Homo sapiens
gcagtgctcctatta

SEQ ID NO: 578604 - DNA, 15 bp, Homo sapiens
cagtgctcctattac

SEQ ID NO: 578605 - DNA, 15 bp, Homo sapiens
agtgctcctattaca

SEQ ID NO: 578606 - DNA, 15 bp, Homo sapiens
gtgctcctattacac

SEQ ID NO: 578607 - DNA, 15 bp, Homo sapiens
tgctcctattacaca

SEQ ID NO: 578608 - DNA, 15 bp, Homo sapiens
gctcctattacacat

SEQ ID NO: 578609 - DNA, 15 bp, Homo sapiens
ctcctattacacatt

SEQ ID NO: 578610 - DNA, 15 bp, Homo sapiens
tcctattacacattc

SEQ ID NO: 578611 - DNA, 15 bp, Homo sapiens
cctattacacattca

SEQ ID NO: 578612 - DNA, 15 bp, Homo sapiens
ctattacacattcag

SEQ ID NO: 578613 - DNA, 15 bp, Homo sapiens
tattacacattcagt

SEQ ID NO: 578614 - DNA, 15 bp, Homo sapiens
attacacattcagtc

SEQ ID NO: 578615 - DNA, 15 bp, Homo sapiens
ttacacattcagtct

SEQ ID NO: 578616 - DNA, 15 bp, Homo sapiens
tacacattcagtctt

SEQ ID NO: 578617 - DNA, 15 bp, Homo sapiens
acacattcagtctta

SEQ ID NO: 578618 - DNA, 15 bp, Homo sapiens
cacattcagtcttaa

SEQ ID NO: 578619 - DNA, 15 bp, Homo sapiens
acattcagtcttaaa

SEQ ID NO: 578620 - DNA, 15 bp, Homo sapiens
cattcagtcttaaaa

SEQ ID NO: 578621 - DNA, 15 bp, Homo sapiens
attcagtcttaaaac

SEQ ID NO: 578622 - DNA, 15 bp, Homo sapiens
ttcagtcttaaaacc

SEQ ID NO: 578623 - DNA, 15 bp, Homo sapiens
tcagtcttaaaaccc

SEQ ID NO: 578624 - DNA, 15 bp, Homo sapiens
cagtcttaaaacccc

SEQ ID NO: 578625 - DNA, 15 bp, Homo sapiens
agtcttaaaacccca

SEQ ID NO: 578626 - DNA, 15 bp, Homo sapiens
gtcttaaaaccccat

SEQ ID NO: 578627 - DNA, 15 bp, Homo sapiens
tcttaaaaccccatg

SEQ ID NO: 578628 - DNA, 15 bp, Homo sapiens
cttaaaaccccatgt

SEQ ID NO: 578629 - DNA, 15 bp, Homo sapiens
ttaaaaccccatgta

SEQ ID NO: 578630 - DNA, 15 bp, Homo sapiens
taaaaccccatgtac

SEQ ID NO: 578631 - DNA, 15 bp, Homo sapiens
aaaaccccatgtacc

SEQ ID NO: 578632 - DNA, 15 bp, Homo sapiens
aaaccccatgtacca

SEQ ID NO: 578633 - DNA, 15 bp, Homo sapiens
aaccccatgtaccag

SEQ ID NO: 578634 - DNA, 15 bp, Homo sapiens
accccatgtaccagg

SEQ ID NO: 578635 - DNA, 15 bp, Homo sapiens
ccccatgtaccagga

SEQ ID NO: 578636 - DNA, 15 bp, Homo sapiens
cccatgtaccaggag

SEQ ID NO: 578637 - DNA, 15 bp, Homo sapiens
ccatgtaccaggagg

SEQ ID NO: 578638 - DNA, 15 bp, Homo sapiens
catgtaccaggaggg

SEQ ID NO: 578639 - DNA, 15 bp, Homo sapiens
atgtaccaggagggc

SEQ ID NO: 578640 - DNA, 15 bp, Homo sapiens
tgtaccaggagggca

SEQ ID NO: 578641 - DNA, 15 bp, Homo sapiens
gtaccaggagggcac

SEQ ID NO: 578642 - DNA, 15 bp, Homo sapiens
taccaggagggcacg

SEQ ID NO: 578643 - DNA, 15 bp, Homo sapiens
accaggagggcacga

SEQ ID NO: 578644 - DNA, 15 bp, Homo sapiens
ccaggagggcacgag

SEQ ID NO: 578645 - DNA, 15 bp, Homo sapiens
caggagggcacgagt

SEQ ID NO: 578646 - DNA, 15 bp, Homo sapiens
aggagggcacgagtc

SEQ ID NO: 578647 - DNA, 15 bp, Homo sapiens
ggagggcacgagtct

SEQ ID NO: 578648 - DNA, 15 bp, Homo sapiens
gagggcacgagtctt

SEQ ID NO: 578649 - DNA, 15 bp, Homo sapiens
agggcacgagtctta

SEQ ID NO: 578650 - DNA, 15 bp, Homo sapiens
gggcacgagtcttag

SEQ ID NO: 578651 - DNA, 15 bp, Homo sapiens
ggcacgagtcttaga

SEQ ID NO: 578652 - DNA, 15 bp, Homo sapiens
gcacgagtcttagat

SEQ ID NO: 578653 - DNA, 15 bp, Homo sapiens
cacgagtcttagatt

SEQ ID NO: 578654 - DNA, 15 bp, Homo sapiens
acgagtcttagattt

SEQ ID NO: 578655 - DNA, 15 bp, Homo sapiens
cgagtcttagatttt

SEQ ID NO: 578656 - DNA, 15 bp, Homo sapiens
gagtcttagattttt

SEQ ID NO: 578657 - DNA, 15 bp, Homo sapiens
agtcttagatttttg

SEQ ID NO: 578658 - DNA, 15 bp, Homo sapiens
gtcttagatttttgc

SEQ ID NO: 578659 - DNA, 15 bp, Homo sapiens
tcttagatttttgcc

SEQ ID NO: 578660 - DNA, 15 bp, Homo sapiens
cttagatttttgcct

SEQ ID NO: 578661 - DNA, 15 bp, Homo sapiens
ttagatttttgccta

SEQ ID NO: 578662 - DNA, 15 bp, Homo sapiens
tagatttttgcctag

SEQ ID NO: 578663 - DNA, 15 bp, Homo sapiens
agatttttgcctagg

SEQ ID NO: 578664 - DNA, 15 bp, Homo sapiens
gatttttgcctaggc

SEQ ID NO: 578665 - DNA, 15 bp, Homo sapiens
atttttgcctaggca

SEQ ID NO: 578666 - DNA, 15 bp, Homo sapiens
tttttgcctaggcaa

SEQ ID NO: 578667 - DNA, 15 bp, Homo sapiens
ttttgcctaggcaaa

SEQ ID NO: 578668 - DNA, 15 bp, Homo sapiens
tttgcctaggcaaaa

SEQ ID NO: 578669 - DNA, 15 bp, Homo sapiens
ttgcctaggcaaaat

SEQ ID NO: 578670 - DNA, 15 bp, Homo sapiens
tgcctaggcaaaatc

SEQ ID NO: 578671 - DNA, 15 bp, Homo sapiens
gcctaggcaaaatcc

SEQ ID NO: 578672 - DNA, 15 bp, Homo sapiens
cctaggcaaaatcct

SEQ ID NO: 578673 - DNA, 15 bp, Homo sapiens
ctaggcaaaatcctg

SEQ ID NO: 578674 - DNA, 15 bp, Homo sapiens
taggcaaaatcctgt

SEQ ID NO: 578675 - DNA, 15 bp, Homo sapiens
aggcaaaatcctgtc

SEQ ID NO: 578676 - DNA, 15 bp, Homo sapiens
ggcaaaatcctgtcc

SEQ ID NO: 578677 - DNA, 15 bp, Homo sapiens
gcaaaatcctgtccc

SEQ ID NO: 578678 - DNA, 15 bp, Homo sapiens
caaaatcctgtccct

SEQ ID NO: 578679 - DNA, 15 bp, Homo sapiens
aaaatcctgtccctt

SEQ ID NO: 578680 - DNA, 15 bp, Homo sapiens
aaatcctgtcccttc

SEQ ID NO: 578681 - DNA, 15 bp, Homo sapiens
aatcctgtcccttca

SEQ ID NO: 578682 - DNA, 15 bp, Homo sapiens
atcctgtcccttcac

SEQ ID NO: 578683 - DNA, 15 bp, Homo sapiens
tcctgtcccttcact

SEQ ID NO: 578684 - DNA, 15 bp, Homo sapiens
cctgtcccttcactc

SEQ ID NO: 578685 - DNA, 15 bp, Homo sapiens
ctgtcccttcactcc

SEQ ID NO: 578686 - DNA, 15 bp, Homo sapiens
tgtcccttcactcct

SEQ ID NO: 578687 - DNA, 15 bp, Homo sapiens
gtcccttcactcctt

SEQ ID NO: 578688 - DNA, 15 bp, Homo sapiens
tcccttcactccttg

SEQ ID NO: 578689 - DNA, 15 bp, Homo sapiens
cccttcactccttgg

SEQ ID NO: 578690 - DNA, 15 bp, Homo sapiens
ccttcactccttggg

SEQ ID NO: 578691 - DNA, 15 bp, Homo sapiens
cttcactccttgggt

SEQ ID NO: 578692 - DNA, 15 bp, Homo sapiens
ttcactccttgggtt

SEQ ID NO: 578693 - DNA, 15 bp, Homo sapiens
tcactccttgggttt

SEQ ID NO: 578694 - DNA, 15 bp, Homo sapiens
cactccttgggtttt

SEQ ID NO: 578695 - DNA, 15 bp, Homo sapiens
actccttgggttttc

SEQ ID NO: 578696 - DNA, 15 bp, Homo sapiens
ctccttgggttttct

SEQ ID NO: 578697 - DNA, 15 bp, Homo sapiens
tccttgggttttctg

SEQ ID NO: 578698 - DNA, 15 bp, Homo sapiens
ccttgggttttctgt

SEQ ID NO: 578699 - DNA, 15 bp, Homo sapiens
cttgggttttctgta

SEQ ID NO: 578700 - DNA, 15 bp, Homo sapiens
ttgggttttctgtag

SEQ ID NO: 578701 - DNA, 15 bp, Homo sapiens
tgggttttctgtagg

SEQ ID NO: 578702 - DNA, 15 bp, Homo sapiens
gggttttctgtaggg

SEQ ID NO: 578703 - DNA, 15 bp, Homo sapiens
ggttttctgtaggga

SEQ ID NO: 578704 - DNA, 15 bp, Homo sapiens
gttttctgtagggaa

SEQ ID NO: 578705 - DNA, 15 bp, Homo sapiens
ttttctgtagggaac

SEQ ID NO: 578706 - DNA, 15 bp, Homo sapiens
tttctgtagggaact

SEQ ID NO: 578707 - DNA, 15 bp, Homo sapiens
ttctgtagggaacta

SEQ ID NO: 578708 - DNA, 15 bp, Homo sapiens
tctgtagggaactag

SEQ ID NO: 578709 - DNA, 15 bp, Homo sapiens
ctgtagggaactaga

SEQ ID NO: 578710 - DNA, 15 bp, Homo sapiens
tgtagggaactagac

SEQ ID NO: 578711 - DNA, 15 bp, Homo sapiens
gtagggaactagact

SEQ ID NO: 578712 - DNA, 15 bp, Homo sapiens
tagggaactagacta

SEQ ID NO: 578713 - DNA, 15 bp, Homo sapiens
agggaactagactac

SEQ ID NO: 578714 - DNA, 15 bp, Homo sapiens
gggaactagactaca

SEQ ID NO: 578715 - DNA, 15 bp, Homo sapiens
ggaactagactacag

SEQ ID NO: 578716 - DNA, 15 bp, Homo sapiens
gaactagactacagt

SEQ ID NO: 578717 - DNA, 15 bp, Homo sapiens
aactagactacagtt

SEQ ID NO: 578718 - DNA, 15 bp, Homo sapiens
actagactacagttc

SEQ ID NO: 578719 - DNA, 15 bp, Homo sapiens
ctagactacagttcc

SEQ ID NO: 578720 - DNA, 15 bp, Homo sapiens
tagactacagttccc

SEQ ID NO: 578721 - DNA, 15 bp, Homo sapiens
agactacagttccct

SEQ ID NO: 578722 - DNA, 15 bp, Homo sapiens
gactacagttcccta

SEQ ID NO: 578723 - DNA, 15 bp, Homo sapiens
actacagttccctac

SEQ ID NO: 578724 - DNA, 15 bp, Homo sapiens
ctacagttccctact

SEQ ID NO: 578725 - DNA, 15 bp, Homo sapiens
tacagttccctactg

SEQ ID NO: 578726 - DNA, 15 bp, Homo sapiens
acagttccctactgt

SEQ ID NO: 578727 - DNA, 15 bp, Homo sapiens
cagttccctactgta

SEQ ID NO: 578728 - DNA, 15 bp, Homo sapiens
agttccctactgtag

SEQ ID NO: 578729 - DNA, 15 bp, Homo sapiens
gttccctactgtagc

SEQ ID NO: 578730 - DNA, 15 bp, Homo sapiens
ttccctactgtagct

SEQ ID NO: 578731 - DNA, 15 bp, Homo sapiens
tccctactgtagctg

SEQ ID NO: 578732 - DNA, 15 bp, Homo sapiens
ccctactgtagctgc

SEQ ID NO: 578733 - DNA, 15 bp, Homo sapiens
cctactgtagctgca

SEQ ID NO: 578734 - DNA, 15 bp, Homo sapiens
ctactgtagctgcaa

SEQ ID NO: 578735 - DNA, 15 bp, Homo sapiens
tactgtagctgcaat

SEQ ID NO: 578736 - DNA, 15 bp, Homo sapiens
actgtagctgcaatg

SEQ ID NO: 578737 - DNA, 15 bp, Homo sapiens
ctgtagctgcaatgc

SEQ ID NO: 578738 - DNA, 15 bp, Homo sapiens
tgtagctgcaatgct

SEQ ID NO: 578739 - DNA, 15 bp, Homo sapiens
gtagctgcaatgcta

SEQ ID NO: 578740 - DNA, 15 bp, Homo sapiens
tagctgcaatgctag

SEQ ID NO: 578741 - DNA, 15 bp, Homo sapiens
agctgcaatgctagc

SEQ ID NO: 578742 - DNA, 15 bp, Homo sapiens
gctgcaatgctagct

SEQ ID NO: 578743 - DNA, 15 bp, Homo sapiens
ctgcaatgctagcta

SEQ ID NO: 578744 - DNA, 15 bp, Homo sapiens
tgcaatgctagctat

SEQ ID NO: 578745 - DNA, 15 bp, Homo sapiens
gcaatgctagctatt

SEQ ID NO: 578746 - DNA, 15 bp, Homo sapiens
caatgctagctattc

SEQ ID NO: 578747 - DNA, 15 bp, Homo sapiens
aatgctagctattcc

SEQ ID NO: 578748 - DNA, 15 bp, Homo sapiens
atgctagctattcca

SEQ ID NO: 578749 - DNA, 15 bp, Homo sapiens
tgctagctattccaa

SEQ ID NO: 578750 - DNA, 15 bp, Homo sapiens
gctagctattccaac

SEQ ID NO: 578751 - DNA, 15 bp, Homo sapiens
ctagctattccaact

SEQ ID NO: 578752 - DNA, 15 bp, Homo sapiens
tagctattccaacta

SEQ ID NO: 578753 - DNA, 15 bp, Homo sapiens
agctattccaactac

SEQ ID NO: 578754 - DNA, 15 bp, Homo sapiens
gctattccaactaca

SEQ ID NO: 578755 - DNA, 15 bp, Homo sapiens
ctattccaactacat

SEQ ID NO: 578756 - DNA, 15 bp, Homo sapiens
tattccaactacatt

SEQ ID NO: 578757 - DNA, 15 bp, Homo sapiens
attccaactacattt

SEQ ID NO: 578758 - DNA, 15 bp, Homo sapiens
ttccaactacattta

SEQ ID NO: 578759 - DNA, 15 bp, Homo sapiens
tccaactacatttaa

SEQ ID NO: 578760 - DNA, 15 bp, Homo sapiens
ccaactacatttaat

SEQ ID NO: 578761 - DNA, 15 bp, Homo sapiens
caactacatttaatt

SEQ ID NO: 578762 - DNA, 15 bp, Homo sapiens
aactacatttaattt

SEQ ID NO: 578763 - DNA, 15 bp, Homo sapiens
actacatttaatttt

SEQ ID NO: 578764 - DNA, 15 bp, Homo sapiens
ctacatttaatttta

SEQ ID NO: 578765 - DNA, 15 bp, Homo sapiens
tacatttaattttaa

SEQ ID NO: 578766 - DNA, 15 bp, Homo sapiens
acatttaattttaac

SEQ ID NO: 578767 - DNA, 15 bp, Homo sapiens
catttaattttaact

SEQ ID NO: 578768 - DNA, 15 bp, Homo sapiens
atttaattttaacta

SEQ ID NO: 578769 - DNA, 15 bp, Homo sapiens
tttaattttaactat

SEQ ID NO: 578770 - DNA, 15 bp, Homo sapiens
ttaattttaactatg

SEQ ID NO: 578771 - DNA, 15 bp, Homo sapiens
taattttaactatgc

SEQ ID NO: 578772 - DNA, 15 bp, Homo sapiens
aattttaactatgct

SEQ ID NO: 578773 - DNA, 15 bp, Homo sapiens
attttaactatgcta

SEQ ID NO: 578774 - DNA, 15 bp, Homo sapiens
ttttaactatgctat

SEQ ID NO: 578775 - DNA, 15 bp, Homo sapiens
tttaactatgctatg

SEQ ID NO: 578776 - DNA, 15 bp, Homo sapiens
ttaactatgctatgg

SEQ ID NO: 578777 - DNA, 15 bp, Homo sapiens
taactatgctatggt

SEQ ID NO: 578778 - DNA, 15 bp, Homo sapiens
aactatgctatggtc

SEQ ID NO: 578779 - DNA, 15 bp, Homo sapiens
actatgctatggtcc

SEQ ID NO: 578780 - DNA, 15 bp, Homo sapiens
ctatgctatggtccc

SEQ ID NO: 578781 - DNA, 15 bp, Homo sapiens
tatgctatggtccca

SEQ ID NO: 578782 - DNA, 15 bp, Homo sapiens
atgctatggtcccaa

SEQ ID NO: 578783 - DNA, 15 bp, Homo sapiens
tgctatggtcccaaa

SEQ ID NO: 578784 - DNA, 15 bp, Homo sapiens
gctatggtcccaaag

SEQ ID NO: 578785 - DNA, 15 bp, Homo sapiens
ctatggtcccaaagg

SEQ ID NO: 578786 - DNA, 15 bp, Homo sapiens
tatggtcccaaaggt

SEQ ID NO: 578787 - DNA, 15 bp, Homo sapiens
atggtcccaaaggtg

SEQ ID NO: 578788 - DNA, 15 bp, Homo sapiens
tggtcccaaaggtgg

SEQ ID NO: 578789 - DNA, 15 bp, Homo sapiens
ggtcccaaaggtgga

SEQ ID NO: 578790 - DNA, 15 bp, Homo sapiens
gtcccaaaggtggat

SEQ ID NO: 578791 - DNA, 15 bp, Homo sapiens
tcccaaaggtggatg

SEQ ID NO: 578792 - DNA, 15 bp, Homo sapiens
cccaaaggtggatgt

SEQ ID NO: 578793 - DNA, 15 bp, Homo sapiens
ccaaaggtggatgtt

SEQ ID NO: 578794 - DNA, 15 bp, Homo sapiens
caaaggtggatgttt

SEQ ID NO: 578795 - DNA, 15 bp, Homo sapiens
aaaggtggatgtttg

SEQ ID NO: 578796 - DNA, 15 bp, Homo sapiens
aaggtggatgtttgg

SEQ ID NO: 578797 - DNA, 15 bp, Homo sapiens
aggtggatgtttggc

SEQ ID NO: 578798 - DNA, 15 bp, Homo sapiens
ggtggatgtttggca

SEQ ID NO: 578799 - DNA, 15 bp, Homo sapiens
gtggatgtttggcat

SEQ ID NO: 578800 - DNA, 15 bp, Homo sapiens
tggatgtttggcatg

SEQ ID NO: 578801 - DNA, 15 bp, Homo sapiens
ggatgtttggcatgt

SEQ ID NO: 578802 - DNA, 15 bp, Homo sapiens
gatgtttggcatgtc

SEQ ID NO: 578803 - DNA, 15 bp, Homo sapiens
atgtttggcatgtct

SEQ ID NO: 578804 - DNA, 15 bp, Homo sapiens
tgtttggcatgtctc

SEQ ID NO: 578805 - DNA, 15 bp, Homo sapiens
gtttggcatgtctca

SEQ ID NO: 578806 - DNA, 15 bp, Homo sapiens
tttggcatgtctcac

SEQ ID NO: 578807 - DNA, 15 bp, Homo sapiens
ttggcatgtctcact

SEQ ID NO: 578808 - DNA, 15 bp, Homo sapiens
tggcatgtctcactc

SEQ ID NO: 578809 - DNA, 15 bp, Homo sapiens
ggcatgtctcactcc

SEQ ID NO: 578810 - DNA, 15 bp, Homo sapiens
gcatgtctcactcca

SEQ ID NO: 578811 - DNA, 15 bp, Homo sapiens
catgtctcactccat

SEQ ID NO: 578812 - DNA, 15 bp, Homo sapiens
atgtctcactccatc

SEQ ID NO: 578813 - DNA, 15 bp, Homo sapiens
tgtctcactccatca

SEQ ID NO: 578814 - DNA, 15 bp, Homo sapiens
gtctcactccatcaa

SEQ ID NO: 578815 - DNA, 15 bp, Homo sapiens
tctcactccatcaac

SEQ ID NO: 578816 - DNA, 15 bp, Homo sapiens
ctcactccatcaacc

SEQ ID NO: 578817 - DNA, 15 bp, Homo sapiens
tcactccatcaacct

SEQ ID NO: 578818 - DNA, 15 bp, Homo sapiens
cactccatcaaccta

SEQ ID NO: 578819 - DNA, 15 bp, Homo sapiens
actccatcaacctaa

SEQ ID NO: 578820 - DNA, 15 bp, Homo sapiens
ctccatcaacctaat

SEQ ID NO: 578821 - DNA, 15 bp, Homo sapiens
tccatcaacctaatt

SEQ ID NO: 578822 - DNA, 15 bp, Homo sapiens
ccatcaacctaattt

SEQ ID NO: 578823 - DNA, 15 bp, Homo sapiens
catcaacctaattta

SEQ ID NO: 578824 - DNA, 15 bp, Homo sapiens
atcaacctaatttag

SEQ ID NO: 578825 - DNA, 15 bp, Homo sapiens
tcaacctaatttagg

SEQ ID NO: 578826 - DNA, 15 bp, Homo sapiens
caacctaatttaggg

SEQ ID NO: 578827 - DNA, 15 bp, Homo sapiens
aacctaatttagggc

SEQ ID NO: 578828 - DNA, 15 bp, Homo sapiens
acctaatttagggca

SEQ ID NO: 578829 - DNA, 15 bp, Homo sapiens
cctaatttagggcag

SEQ ID NO: 578830 - DNA, 15 bp, Homo sapiens
ctaatttagggcagc

SEQ ID NO: 578831 - DNA, 15 bp, Homo sapiens
taatttagggcagcc

SEQ ID NO: 578832 - DNA, 15 bp, Homo sapiens
aatttagggcagcct

SEQ ID NO: 578833 - DNA, 15 bp, Homo sapiens
atttagggcagcctg

SEQ ID NO: 578834 - DNA, 15 bp, Homo sapiens
tttagggcagcctgg

SEQ ID NO: 578835 - DNA, 15 bp, Homo sapiens
ttagggcagcctgga

SEQ ID NO: 578836 - DNA, 15 bp, Homo sapiens
tagggcagcctggag

SEQ ID NO: 578837 - DNA, 15 bp, Homo sapiens
agggcagcctggaga

SEQ ID NO: 578838 - DNA, 15 bp, Homo sapiens
gggcagcctggagaa

SEQ ID NO: 578839 - DNA, 15 bp, Homo sapiens
ggcagcctggagaag

SEQ ID NO: 578840 - DNA, 15 bp, Homo sapiens
gcagcctggagaagt

SEQ ID NO: 578841 - DNA, 15 bp, Homo sapiens
cagcctggagaagtg

SEQ ID NO: 578842 - DNA, 15 bp, Homo sapiens
agcctggagaagtga

SEQ ID NO: 578843 - DNA, 15 bp, Homo sapiens
gcctggagaagtgac

SEQ ID NO: 578844 - DNA, 15 bp, Homo sapiens
cctggagaagtgacc

SEQ ID NO: 578845 - DNA, 15 bp, Homo sapiens
ctggagaagtgaccg

SEQ ID NO: 578846 - DNA, 15 bp, Homo sapiens
tggagaagtgaccga

SEQ ID NO: 578847 - DNA, 15 bp, Homo sapiens
ggagaagtgaccgat

SEQ ID NO: 578848 - DNA, 15 bp, Homo sapiens
gagaagtgaccgatg

SEQ ID NO: 578849 - DNA, 15 bp, Homo sapiens
agaagtgaccgatgt

SEQ ID NO: 578850 - DNA, 15 bp, Homo sapiens
gaagtgaccgatgta

SEQ ID NO: 578851 - DNA, 15 bp, Homo sapiens
aagtgaccgatgtag

SEQ ID NO: 578852 - DNA, 15 bp, Homo sapiens
agtgaccgatgtagt

SEQ ID NO: 578853 - DNA, 15 bp, Homo sapiens
gtgaccgatgtagta

SEQ ID NO: 578854 - DNA, 15 bp, Homo sapiens
tgaccgatgtagtaa

SEQ ID NO: 578855 - DNA, 15 bp, Homo sapiens
gaccgatgtagtaaa

SEQ ID NO: 578856 - DNA, 15 bp, Homo sapiens
accgatgtagtaaat

SEQ ID NO: 578857 - DNA, 15 bp, Homo sapiens
ccgatgtagtaaatg

SEQ ID NO: 578858 - DNA, 15 bp, Homo sapiens
cgatgtagtaaatgc

SEQ ID NO: 578859 - DNA, 15 bp, Homo sapiens
gatgtagtaaatgcc

SEQ ID NO: 578860 - DNA, 15 bp, Homo sapiens
atgtagtaaatgcca

SEQ ID NO: 578861 - DNA, 15 bp, Homo sapiens
tgtagtaaatgccaa

SEQ ID NO: 578862 - DNA, 15 bp, Homo sapiens
gtagtaaatgccaag

SEQ ID NO: 578863 - DNA, 15 bp, Homo sapiens
tagtaaatgccaagt

SEQ ID NO: 578864 - DNA, 15 bp, Homo sapiens
agtaaatgccaagta

SEQ ID NO: 578865 - DNA, 15 bp, Homo sapiens
gtaaatgccaagtag

SEQ ID NO: 578866 - DNA, 15 bp, Homo sapiens
taaatgccaagtagg

SEQ ID NO: 578867 - DNA, 15 bp, Homo sapiens
aaatgccaagtaggc

SEQ ID NO: 578868 - DNA, 15 bp, Homo sapiens
aatgccaagtaggct

SEQ ID NO: 578869 - DNA, 15 bp, Homo sapiens
atgccaagtaggcta

SEQ ID NO: 578870 - DNA, 15 bp, Homo sapiens
tgccaagtaggctaa

SEQ ID NO: 578871 - DNA, 15 bp, Homo sapiens
gccaagtaggctaac

SEQ ID NO: 578872 - DNA, 15 bp, Homo sapiens
ccaagtaggctaact

SEQ ID NO: 578873 - DNA, 15 bp, Homo sapiens
caagtaggctaacta

SEQ ID NO: 578874 - DNA, 15 bp, Homo sapiens
aagtaggctaactaa

SEQ ID NO: 578875 - DNA, 15 bp, Homo sapiens
agtaggctaactaaa

SEQ ID NO: 578876 - DNA, 15 bp, Homo sapiens
gtaggctaactaaaa

SEQ ID NO: 578877 - DNA, 15 bp, Homo sapiens
taggctaactaaaat

SEQ ID NO: 578878 - DNA, 15 bp, Homo sapiens
aggctaactaaaata

SEQ ID NO: 578879 - DNA, 15 bp, Homo sapiens
ggctaactaaaataa

SEQ ID NO: 578880 - DNA, 15 bp, Homo sapiens
gctaactaaaataat

SEQ ID NO: 578881 - DNA, 15 bp, Homo sapiens
ctaactaaaataata

SEQ ID NO: 578882 - DNA, 15 bp, Homo sapiens
taactaaaataatag

SEQ ID NO: 578883 - DNA, 15 bp, Homo sapiens
aactaaaataataga

SEQ ID NO: 578884 - DNA, 15 bp, Homo sapiens
actaaaataatagat

SEQ ID NO: 578885 - DNA, 15 bp, Homo sapiens
ctaaaataatagatt

SEQ ID NO: 578886 - DNA, 15 bp, Homo sapiens
taaaataatagattt

SEQ ID NO: 578887 - DNA, 15 bp, Homo sapiens
aaaataatagatttc

SEQ ID NO: 578888 - DNA, 15 bp, Homo sapiens
aaataatagatttca

SEQ ID NO: 578889 - DNA, 15 bp, Homo sapiens
aataatagatttcaa

SEQ ID NO: 578890 - DNA, 15 bp, Homo sapiens
ataatagatttcaac

SEQ ID NO: 578891 - DNA, 15 bp, Homo sapiens
taatagatttcaact

SEQ ID NO: 578892 - DNA, 15 bp, Homo sapiens
aatagatttcaacta

SEQ ID NO: 578893 - DNA, 15 bp, Homo sapiens
atagatttcaactac

SEQ ID NO: 578894 - DNA, 15 bp, Homo sapiens
tagatttcaactact

SEQ ID NO: 578895 - DNA, 15 bp, Homo sapiens
agatttcaactactg

SEQ ID NO: 578896 - DNA, 15 bp, Homo sapiens
gatttcaactactgc

SEQ ID NO: 578897 - DNA, 15 bp, Homo sapiens
atttcaactactgcc

SEQ ID NO: 578898 - DNA, 15 bp, Homo sapiens
tttcaactactgcct

SEQ ID NO: 578899 - DNA, 15 bp, Homo sapiens
ttcaactactgcctt

SEQ ID NO: 578900 - DNA, 15 bp, Homo sapiens
tcaactactgccttt

SEQ ID NO: 578901 - DNA, 15 bp, Homo sapiens
caactactgcctttg

SEQ ID NO: 578902 - DNA, 15 bp, Homo sapiens
aactactgcctttga

SEQ ID NO: 578903 - DNA, 15 bp, Homo sapiens
actactgcctttgaa

SEQ ID NO: 578904 - DNA, 15 bp, Homo sapiens
ctactgcctttgaat

SEQ ID NO: 578905 - DNA, 15 bp, Homo sapiens
tactgcctttgaata

SEQ ID NO: 578906 - DNA, 15 bp, Homo sapiens
actgcctttgaatag

SEQ ID NO: 578907 - DNA, 15 bp, Homo sapiens
ctgcctttgaataga

SEQ ID NO: 578908 - DNA, 15 bp, Homo sapiens
tgcctttgaatagaa

SEQ ID NO: 578909 - DNA, 15 bp, Homo sapiens
gcctttgaatagaac

SEQ ID NO: 578910 - DNA, 15 bp, Homo sapiens
cctttgaatagaact

SEQ ID NO: 578911 - DNA, 15 bp, Homo sapiens
ctttgaatagaactt

SEQ ID NO: 578912 - DNA, 15 bp, Homo sapiens
tttgaatagaacttc

SEQ ID NO: 578913 - DNA, 15 bp, Homo sapiens
ttgaatagaacttct

SEQ ID NO: 578914 - DNA, 15 bp, Homo sapiens
tgaatagaacttctc

SEQ ID NO: 578915 - DNA, 15 bp, Homo sapiens
gaatagaacttctcc

SEQ ID NO: 578916 - DNA, 15 bp, Homo sapiens
aatagaacttctcct

SEQ ID NO: 578917 - DNA, 15 bp, Homo sapiens
atagaacttctcctt

SEQ ID NO: 578918 - DNA, 15 bp, Homo sapiens
tagaacttctccttt

SEQ ID NO: 578919 - DNA, 15 bp, Homo sapiens
agaacttctcctttg

SEQ ID NO: 578920 - DNA, 15 bp, Homo sapiens
gaacttctcctttgc

SEQ ID NO: 578921 - DNA, 15 bp, Homo sapiens
aacttctcctttgca

SEQ ID NO: 578922 - DNA, 15 bp, Homo sapiens
acttctcctttgcat

SEQ ID NO: 578923 - DNA, 15 bp, Homo sapiens
cttctcctttgcatt

SEQ ID NO: 578924 - DNA, 15 bp, Homo sapiens
ttctcctttgcattt

SEQ ID NO: 578925 - DNA, 15 bp, Homo sapiens
tctcctttgcatttt

SEQ ID NO: 578926 - DNA, 15 bp, Homo sapiens
ctcctttgcattttg

SEQ ID NO: 578927 - DNA, 15 bp, Homo sapiens
tcctttgcattttgg

SEQ ID NO: 578928 - DNA, 15 bp, Homo sapiens
cctttgcattttggc

SEQ ID NO: 578929 - DNA, 15 bp, Homo sapiens
ctttgcattttggcc

SEQ ID NO: 578930 - DNA, 15 bp, Homo sapiens
tttgcattttggccc

SEQ ID NO: 578931 - DNA, 15 bp, Homo sapiens
ttgcattttggcccc

SEQ ID NO: 578932 - DNA, 15 bp, Homo sapiens
tgcattttggcccca

SEQ ID NO: 578933 - DNA, 15 bp, Homo sapiens
gcattttggccccag

SEQ ID NO: 578934 - DNA, 15 bp, Homo sapiens
cattttggccccaga

SEQ ID NO: 578935 - DNA, 15 bp, Homo sapiens
attttggccccagaa

SEQ ID NO: 578936 - DNA, 15 bp, Homo sapiens
ttttggccccagaat

SEQ ID NO: 578937 - DNA, 15 bp, Homo sapiens
tttggccccagaatt

SEQ ID NO: 578938 - DNA, 15 bp, Homo sapiens
ttggccccagaattt

SEQ ID NO: 578939 - DNA, 15 bp, Homo sapiens
tggccccagaattta

SEQ ID NO: 578940 - DNA, 15 bp, Homo sapiens
ggccccagaatttaa

SEQ ID NO: 578941 - DNA, 15 bp, Homo sapiens
gccccagaatttaaa

SEQ ID NO: 578942 - DNA, 15 bp, Homo sapiens
ccccagaatttaaaa

SEQ ID NO: 578943 - DNA, 15 bp, Homo sapiens
cccagaatttaaaac

SEQ ID NO: 578944 - DNA, 15 bp, Homo sapiens
ccagaatttaaaaca

SEQ ID NO: 578945 - DNA, 15 bp, Homo sapiens
cagaatttaaaacaa

SEQ ID NO: 578946 - DNA, 15 bp, Homo sapiens
agaatttaaaacaaa

SEQ ID NO: 578947 - DNA, 15 bp, Homo sapiens
gaatttaaaacaaat

SEQ ID NO: 578948 - DNA, 15 bp, Homo sapiens
aatttaaaacaaatg

SEQ ID NO: 578949 - DNA, 15 bp, Homo sapiens
atttaaaacaaatgt

SEQ ID NO: 578950 - DNA, 15 bp, Homo sapiens
tttaaaacaaatgtt

SEQ ID NO: 578951 - DNA, 15 bp, Homo sapiens
ttaaaacaaatgttc

SEQ ID NO: 578952 - DNA, 15 bp, Homo sapiens
taaaacaaatgttca

SEQ ID NO: 578953 - DNA, 15 bp, Homo sapiens
aaaacaaatgttcaa

SEQ ID NO: 578954 - DNA, 15 bp, Homo sapiens
aaacaaatgttcaag

SEQ ID NO: 578955 - DNA, 15 bp, Homo sapiens
aacaaatgttcaagg

SEQ ID NO: 578956 - DNA, 15 bp, Homo sapiens
acaaatgttcaagga

SEQ ID NO: 578957 - DNA, 15 bp, Homo sapiens
caaatgttcaaggaa

SEQ ID NO: 578958 - DNA, 15 bp, Homo sapiens
aaatgttcaaggaaa

SEQ ID NO: 578959 - DNA, 15 bp, Homo sapiens
aatgttcaaggaaaa

SEQ ID NO: 578960 - DNA, 15 bp, Homo sapiens
atgttcaaggaaaag

SEQ ID NO: 578961 - DNA, 15 bp, Homo sapiens
tgttcaaggaaaagc

SEQ ID NO: 578962 - DNA, 15 bp, Homo sapiens
gttcaaggaaaagca

SEQ ID NO: 578963 - DNA, 15 bp, Homo sapiens
ttcaaggaaaagcaa

SEQ ID NO: 578964 - DNA, 15 bp, Homo sapiens
tcaaggaaaagcaaa

SEQ ID NO: 578965 - DNA, 15 bp, Homo sapiens
caaggaaaagcaaat

SEQ ID NO: 578966 - DNA, 15 bp, Homo sapiens
aaggaaaagcaaatc

SEQ ID NO: 578967 - DNA, 15 bp, Homo sapiens
aggaaaagcaaatcc

SEQ ID NO: 578968 - DNA, 15 bp, Homo sapiens
ggaaaagcaaatcct

SEQ ID NO: 578969 - DNA, 15 bp, Homo sapiens
gaaaagcaaatcctt

SEQ ID NO: 578970 - DNA, 15 bp, Homo sapiens
aaaagcaaatccttg

SEQ ID NO: 578971 - DNA, 15 bp, Homo sapiens
aaagcaaatccttga

SEQ ID NO: 578972 - DNA, 15 bp, Homo sapiens
aagcaaatccttgac

SEQ ID NO: 578973 - DNA, 15 bp, Homo sapiens
agcaaatccttgact

SEQ ID NO: 578974 - DNA, 15 bp, Homo sapiens
gcaaatccttgactg

SEQ ID NO: 578975 - DNA, 15 bp, Homo sapiens
caaatccttgactgg

SEQ ID NO: 578976 - DNA, 15 bp, Homo sapiens
aaatccttgactgga

SEQ ID NO: 578977 - DNA, 15 bp, Homo sapiens
aatccttgactggat

SEQ ID NO: 578978 - DNA, 15 bp, Homo sapiens
atccttgactggata

SEQ ID NO: 578979 - DNA, 15 bp, Homo sapiens
tccttgactggataa

SEQ ID NO: 578980 - DNA, 15 bp, Homo sapiens
ccttgactggataaa

SEQ ID NO: 578981 - DNA, 15 bp, Homo sapiens
cttgactggataaaa

SEQ ID NO: 578982 - DNA, 15 bp, Homo sapiens
ttgactggataaaaa

SEQ ID NO: 578983 - DNA, 15 bp, Homo sapiens
tgactggataaaaac

SEQ ID NO: 578984 - DNA, 15 bp, Homo sapiens
gactggataaaaaca

SEQ ID NO: 578985 - DNA, 15 bp, Homo sapiens
actggataaaaacag

SEQ ID NO: 578986 - DNA, 15 bp, Homo sapiens
ctggataaaaacagt

SEQ ID NO: 578987 - DNA, 15 bp, Homo sapiens
tggataaaaacagta

SEQ ID NO: 578988 - DNA, 15 bp, Homo sapiens
ggataaaaacagtaa

SEQ ID NO: 578989 - DNA, 15 bp, Homo sapiens
gataaaaacagtaaa

SEQ ID NO: 578990 - DNA, 15 bp, Homo sapiens
ataaaaacagtaaac

SEQ ID NO: 578991 - DNA, 15 bp, Homo sapiens
taaaaacagtaaaca

SEQ ID NO: 578992 - DNA, 15 bp, Homo sapiens
aaaaacagtaaacac

SEQ ID NO: 578993 - DNA, 15 bp, Homo sapiens
aaaacagtaaacact

SEQ ID NO: 578994 - DNA, 15 bp, Homo sapiens
aaacagtaaacactt

SEQ ID NO: 578995 - DNA, 15 bp, Homo sapiens
aacagtaaacactta

SEQ ID NO: 578996 - DNA, 15 bp, Homo sapiens
acagtaaacacttag

SEQ ID NO: 578997 - DNA, 15 bp, Homo sapiens
cagtaaacacttagg

SEQ ID NO: 578998 - DNA, 15 bp, Homo sapiens
agtaaacacttaggg

SEQ ID NO: 578999 - DNA, 15 bp, Homo sapiens
gtaaacacttaggga

SEQ ID NO: 579000 - DNA, 15 bp, Homo sapiens
taaacacttagggac

SEQ ID NO: 579001 - DNA, 15 bp, Homo sapiens
aaacacttagggaca

SEQ ID NO: 579002 - DNA, 15 bp, Homo sapiens
aacacttagggacat

SEQ ID NO: 579003 - DNA, 15 bp, Homo sapiens
acacttagggacatt

SEQ ID NO: 579004 - DNA, 15 bp, Homo sapiens
cacttagggacattc

SEQ ID NO: 579005 - DNA, 15 bp, Homo sapiens
acttagggacattca

SEQ ID NO: 579006 - DNA, 15 bp, Homo sapiens
cttagggacattcac

SEQ ID NO: 579007 - DNA, 15 bp, Homo sapiens
ttagggacattcacc

SEQ ID NO: 579008 - DNA, 15 bp, Homo sapiens
tagggacattcacct

SEQ ID NO: 579009 - DNA, 15 bp, Homo sapiens
agggacattcaccta

SEQ ID NO: 579010 - DNA, 15 bp, Homo sapiens
gggacattcacctaa

SEQ ID NO: 579011 - DNA, 15 bp, Homo sapiens
ggacattcacctaaa

SEQ ID NO: 579012 - DNA, 15 bp, Homo sapiens
gacattcacctaaat

SEQ ID NO: 579013 - DNA, 15 bp, Homo sapiens
acattcacctaaatt

SEQ ID NO: 579014 - DNA, 15 bp, Homo sapiens
cattcacctaaattt

SEQ ID NO: 579015 - DNA, 15 bp, Homo sapiens
attcacctaaattta

SEQ ID NO: 579016 - DNA, 15 bp, Homo sapiens
ttcacctaaatttat

SEQ ID NO: 579017 - DNA, 15 bp, Homo sapiens
tcacctaaatttatt

SEQ ID NO: 579018 - DNA, 15 bp, Homo sapiens
cacctaaatttattg

SEQ ID NO: 579019 - DNA, 15 bp, Homo sapiens
acctaaatttattgt

SEQ ID NO: 579020 - DNA, 15 bp, Homo sapiens
cctaaatttattgtt

SEQ ID NO: 579021 - DNA, 15 bp, Homo sapiens
ctaaatttattgttg

SEQ ID NO: 579022 - DNA, 15 bp, Homo sapiens
taaatttattgttgg

SEQ ID NO: 579023 - DNA, 15 bp, Homo sapiens
aaatttattgttggc

SEQ ID NO: 579024 - DNA, 15 bp, Homo sapiens
aatttattgttggct

SEQ ID NO: 579025 - DNA, 15 bp, Homo sapiens
atttattgttggctt

SEQ ID NO: 579026 - DNA, 15 bp, Homo sapiens
tttattgttggctta

SEQ ID NO: 579027 - DNA, 15 bp, Homo sapiens
ttattgttggcttaa

SEQ ID NO: 579028 - DNA, 15 bp, Homo sapiens
tattgttggcttaaa

SEQ ID NO: 579029 - DNA, 15 bp, Homo sapiens
attgttggcttaaat

SEQ ID NO: 579030 - DNA, 15 bp, Homo sapiens
ttgttggcttaaatg

SEQ ID NO: 579031 - DNA, 15 bp, Homo sapiens
tgttggcttaaatga

SEQ ID NO: 579032 - DNA, 15 bp, Homo sapiens
gttggcttaaatgac

SEQ ID NO: 579033 - DNA, 15 bp, Homo sapiens
ttggcttaaatgacc

SEQ ID NO: 579034 - DNA, 15 bp, Homo sapiens
tggcttaaatgacca

SEQ ID NO: 579035 - DNA, 15 bp, Homo sapiens
ggcttaaatgaccaa

SEQ ID NO: 579036 - DNA, 15 bp, Homo sapiens
gcttaaatgaccaag

SEQ ID NO: 579037 - DNA, 15 bp, Homo sapiens
cttaaatgaccaagc

SEQ ID NO: 579038 - DNA, 15 bp, Homo sapiens
ttaaatgaccaagcg

SEQ ID NO: 579039 - DNA, 15 bp, Homo sapiens
taaatgaccaagcgt

SEQ ID NO: 579040 - DNA, 15 bp, Homo sapiens
aaatgaccaagcgtt

SEQ ID NO: 579041 - DNA, 15 bp, Homo sapiens
aatgaccaagcgttc

SEQ ID NO: 579042 - DNA, 15 bp, Homo sapiens
atgaccaagcgttcc

SEQ ID NO: 579043 - DNA, 15 bp, Homo sapiens
tgaccaagcgttccc

SEQ ID NO: 579044 - DNA, 15 bp, Homo sapiens
gaccaagcgttcccc

SEQ ID NO: 579045 - DNA, 15 bp, Homo sapiens
accaagcgttcccca

SEQ ID NO: 579046 - DNA, 15 bp, Homo sapiens
ccaagcgttccccac

SEQ ID NO: 579047 - DNA, 15 bp, Homo sapiens
caagcgttccccacg

SEQ ID NO: 579048 - DNA, 15 bp, Homo sapiens
aagcgttccccacgt

SEQ ID NO: 579049 - DNA, 15 bp, Homo sapiens
agcgttccccacgtc

SEQ ID NO: 579050 - DNA, 15 bp, Homo sapiens
gcgttccccacgtcc

SEQ ID NO: 579051 - DNA, 15 bp, Homo sapiens
cgttccccacgtccg

SEQ ID NO: 579052 - DNA, 15 bp, Homo sapiens
gttccccacgtccgt

SEQ ID NO: 579053 - DNA, 15 bp, Homo sapiens
ttccccacgtccgtt

SEQ ID NO: 579054 - DNA, 15 bp, Homo sapiens
tccccacgtccgttt

SEQ ID NO: 579055 - DNA, 15 bp, Homo sapiens
ccccacgtccgtttc

SEQ ID NO: 579056 - DNA, 15 bp, Homo sapiens
cccacgtccgtttct

SEQ ID NO: 579057 - DNA, 15 bp, Homo sapiens
ccacgtccgtttcta

SEQ ID NO: 579058 - DNA, 15 bp, Homo sapiens
cacgtccgtttctaa

SEQ ID NO: 579059 - DNA, 15 bp, Homo sapiens
acgtccgtttctaaa

SEQ ID NO: 579060 - DNA, 15 bp, Homo sapiens
cgtccgtttctaaag

SEQ ID NO: 579061 - DNA, 15 bp, Homo sapiens
gtccgtttctaaagt

SEQ ID NO: 579062 - DNA, 15 bp, Homo sapiens
tccgtttctaaagtg

SEQ ID NO: 579063 - DNA, 15 bp, Homo sapiens
ccgtttctaaagtgg

SEQ ID NO: 579064 - DNA, 15 bp, Homo sapiens
cgtttctaaagtggg

SEQ ID NO: 579065 - DNA, 15 bp, Homo sapiens
gtttctaaagtgggg

SEQ ID NO: 579066 - DNA, 15 bp, Homo sapiens
tttctaaagtggggt

SEQ ID NO: 579067 - DNA, 15 bp, Homo sapiens
ttctaaagtggggta

SEQ ID NO: 579068 - DNA, 15 bp, Homo sapiens
tctaaagtggggtag

SEQ ID NO: 579069 - DNA, 15 bp, Homo sapiens
ctaaagtggggtagg

SEQ ID NO: 579070 - DNA, 15 bp, Homo sapiens
taaagtggggtagga

SEQ ID NO: 579071 - DNA, 15 bp, Homo sapiens
aaagtggggtaggat

SEQ ID NO: 579072 - DNA, 15 bp, Homo sapiens
aagtggggtaggatg

SEQ ID NO: 579073 - DNA, 15 bp, Homo sapiens
agtggggtaggatgt

SEQ ID NO: 579074 - DNA, 15 bp, Homo sapiens
gtggggtaggatgtt

SEQ ID NO: 579075 - DNA, 15 bp, Homo sapiens
tggggtaggatgttt

SEQ ID NO: 579076 - DNA, 15 bp, Homo sapiens
ggggtaggatgttta

SEQ ID NO: 579077 - DNA, 15 bp, Homo sapiens
gggtaggatgtttag

SEQ ID NO: 579078 - DNA, 15 bp, Homo sapiens
ggtaggatgtttaga

SEQ ID NO: 579079 - DNA, 15 bp, Homo sapiens
gtaggatgtttagaa

SEQ ID NO: 579080 - DNA, 15 bp, Homo sapiens
taggatgtttagaat

SEQ ID NO: 579081 - DNA, 15 bp, Homo sapiens
aggatgtttagaatg

SEQ ID NO: 579082 - DNA, 15 bp, Homo sapiens
ggatgtttagaatgc

SEQ ID NO: 579083 - DNA, 15 bp, Homo sapiens
gatgtttagaatgca

SEQ ID NO: 579084 - DNA, 15 bp, Homo sapiens
atgtttagaatgcat

SEQ ID NO: 579085 - DNA, 15 bp, Homo sapiens
tgtttagaatgcatt

SEQ ID NO: 579086 - DNA, 15 bp, Homo sapiens
gtttagaatgcatta

SEQ ID NO: 579087 - DNA, 15 bp, Homo sapiens
tttagaatgcattac

SEQ ID NO: 579088 - DNA, 15 bp, Homo sapiens
ttagaatgcattact

SEQ ID NO: 579089 - DNA, 15 bp, Homo sapiens
tagaatgcattactc

SEQ ID NO: 579090 - DNA, 15 bp, Homo sapiens
agaatgcattactca

SEQ ID NO: 579091 - DNA, 15 bp, Homo sapiens
gaatgcattactcac

SEQ ID NO: 579092 - DNA, 15 bp, Homo sapiens
aatgcattactcaca

SEQ ID NO: 579093 - DNA, 15 bp, Homo sapiens
atgcattactcacac

SEQ ID NO: 579094 - DNA, 15 bp, Homo sapiens
tgcattactcacaca

SEQ ID NO: 579095 - DNA, 15 bp, Homo sapiens
gcattactcacacag

SEQ ID NO: 579096 - DNA, 15 bp, Homo sapiens
cattactcacacaga

SEQ ID NO: 579097 - DNA, 15 bp, Homo sapiens
attactcacacagaa

SEQ ID NO: 579098 - DNA, 15 bp, Homo sapiens
ttactcacacagaaa

SEQ ID NO: 579099 - DNA, 15 bp, Homo sapiens
tactcacacagaaag

SEQ ID NO: 579100 - DNA, 15 bp, Homo sapiens
actcacacagaaaga

SEQ ID NO: 579101 - DNA, 15 bp, Homo sapiens
ctcacacagaaagat

SEQ ID NO: 579102 - DNA, 15 bp, Homo sapiens
tcacacagaaagatg

SEQ ID NO: 579103 - DNA, 15 bp, Homo sapiens
cacacagaaagatgg

SEQ ID NO: 579104 - DNA, 15 bp, Homo sapiens
acacagaaagatggg

SEQ ID NO: 579105 - DNA, 15 bp, Homo sapiens
cacagaaagatggga

SEQ ID NO: 579106 - DNA, 15 bp, Homo sapiens
acagaaagatgggat

SEQ ID NO: 579107 - DNA, 15 bp, Homo sapiens
cagaaagatgggatt

SEQ ID NO: 579108 - DNA, 15 bp, Homo sapiens
agaaagatgggattg

SEQ ID NO: 579109 - DNA, 15 bp, Homo sapiens
gaaagatgggattga

SEQ ID NO: 579110 - DNA, 15 bp, Homo sapiens
aaagatgggattgat

SEQ ID NO: 579111 - DNA, 15 bp, Homo sapiens
aagatgggattgatg

SEQ ID NO: 579112 - DNA, 15 bp, Homo sapiens
agatgggattgatga

SEQ ID NO: 579113 - DNA, 15 bp, Homo sapiens
gatgggattgatgaa

SEQ ID NO: 579114 - DNA, 15 bp, Homo sapiens
atgggattgatgaaa

SEQ ID NO: 579115 - DNA, 15 bp, Homo sapiens
tgggattgatgaaat

SEQ ID NO: 579116 - DNA, 15 bp, Homo sapiens
gggattgatgaaatc

SEQ ID NO: 579117 - DNA, 15 bp, Homo sapiens
ggattgatgaaatca

SEQ ID NO: 579118 - DNA, 15 bp, Homo sapiens
gattgatgaaatcac

SEQ ID NO: 579119 - DNA, 15 bp, Homo sapiens
attgatgaaatcaca

SEQ ID NO: 579120 - DNA, 15 bp, Homo sapiens
ttgatgaaatcacaa

SEQ ID NO: 579121 - DNA, 15 bp, Homo sapiens
tgatgaaatcacaaa

SEQ ID NO: 579122 - DNA, 15 bp, Homo sapiens
gatgaaatcacaaaa

SEQ ID NO: 579123 - DNA, 15 bp, Homo sapiens
atgaaatcacaaaac

SEQ ID NO: 579124 - DNA, 15 bp, Homo sapiens
tgaaatcacaaaact

SEQ ID NO: 579125 - DNA, 15 bp, Homo sapiens
gaaatcacaaaacta

SEQ ID NO: 579126 - DNA, 15 bp, Homo sapiens
aaatcacaaaactaa

SEQ ID NO: 579127 - DNA, 15 bp, Homo sapiens
aatcacaaaactaaa

SEQ ID NO: 579128 - DNA, 15 bp, Homo sapiens
atcacaaaactaaac

SEQ ID NO: 579129 - DNA, 15 bp, Homo sapiens
tcacaaaactaaaca

SEQ ID NO: 579130 - DNA, 15 bp, Homo sapiens
cacaaaactaaacac

SEQ ID NO: 579131 - DNA, 15 bp, Homo sapiens
acaaaactaaacaca

SEQ ID NO: 579132 - DNA, 15 bp, Homo sapiens
caaaactaaacacag

SEQ ID NO: 579133 - DNA, 15 bp, Homo sapiens
aaaactaaacacagg

SEQ ID NO: 579134 - DNA, 15 bp, Homo sapiens
aaactaaacacaggc

SEQ ID NO: 579135 - DNA, 15 bp, Homo sapiens
aactaaacacaggct

SEQ ID NO: 579136 - DNA, 15 bp, Homo sapiens
actaaacacaggcta

SEQ ID NO: 579137 - DNA, 15 bp, Homo sapiens
ctaaacacaggctat

SEQ ID NO: 579138 - DNA, 15 bp, Homo sapiens
taaacacaggctata

SEQ ID NO: 579139 - DNA, 15 bp, Homo sapiens
aaacacaggctatag

SEQ ID NO: 579140 - DNA, 15 bp, Homo sapiens
aacacaggctatagc

SEQ ID NO: 579141 - DNA, 15 bp, Homo sapiens
acacaggctatagca

SEQ ID NO: 579142 - DNA, 15 bp, Homo sapiens
cacaggctatagcaa

SEQ ID NO: 579143 - DNA, 15 bp, Homo sapiens
acaggctatagcaac

SEQ ID NO: 579144 - DNA, 15 bp, Homo sapiens
caggctatagcaact

SEQ ID NO: 579145 - DNA, 15 bp, Homo sapiens
aggctatagcaacta

SEQ ID NO: 579146 - DNA, 15 bp, Homo sapiens
ggctatagcaactat

SEQ ID NO: 579147 - DNA, 15 bp, Homo sapiens
gctatagcaactatg

SEQ ID NO: 579148 - DNA, 15 bp, Homo sapiens
ctatagcaactatga

SEQ ID NO: 579149 - DNA, 15 bp, Homo sapiens
tatagcaactatgaa

SEQ ID NO: 579150 - DNA, 15 bp, Homo sapiens
atagcaactatgaac

SEQ ID NO: 579151 - DNA, 15 bp, Homo sapiens
tagcaactatgaaca

SEQ ID NO: 579152 - DNA, 15 bp, Homo sapiens
agcaactatgaacag

SEQ ID NO: 579153 - DNA, 15 bp, Homo sapiens
gcaactatgaacagc

SEQ ID NO: 579154 - DNA, 15 bp, Homo sapiens
caactatgaacagcc

SEQ ID NO: 579155 - DNA, 15 bp, Homo sapiens
aactatgaacagcct

SEQ ID NO: 579156 - DNA, 15 bp, Homo sapiens
actatgaacagcctt

SEQ ID NO: 579157 - DNA, 15 bp, Homo sapiens
ctatgaacagccttc

SEQ ID NO: 579158 - DNA, 15 bp, Homo sapiens
tatgaacagccttca

SEQ ID NO: 579159 - DNA, 15 bp, Homo sapiens
atgaacagccttcac

SEQ ID NO: 579160 - DNA, 15 bp, Homo sapiens
tgaacagccttcaca

SEQ ID NO: 579161 - DNA, 15 bp, Homo sapiens
gaacagccttcacag

SEQ ID NO: 579162 - DNA, 15 bp, Homo sapiens
aacagccttcacaga

SEQ ID NO: 579163 - DNA, 15 bp, Homo sapiens
acagccttcacagag

SEQ ID NO: 579164 - DNA, 15 bp, Homo sapiens
cagccttcacagaga

SEQ ID NO: 579165 - DNA, 15 bp, Homo sapiens
agccttcacagagaa

SEQ ID NO: 579166 - DNA, 15 bp, Homo sapiens
gccttcacagagaat

SEQ ID NO: 579167 - DNA, 15 bp, Homo sapiens
ccttcacagagaatg

SEQ ID NO: 579168 - DNA, 15 bp, Homo sapiens
cttcacagagaatga

SEQ ID NO: 579169 - DNA, 15 bp, Homo sapiens
ttcacagagaatgaa

SEQ ID NO: 579170 - DNA, 15 bp, Homo sapiens
tcacagagaatgaac

SEQ ID NO: 579171 - DNA, 15 bp, Homo sapiens
cacagagaatgaaca

SEQ ID NO: 579172 - DNA, 15 bp, Homo sapiens
acagagaatgaacaa

SEQ ID NO: 579173 - DNA, 15 bp, Homo sapiens
cagagaatgaacaat

SEQ ID NO: 579174 - DNA, 15 bp, Homo sapiens
agagaatgaacaata

SEQ ID NO: 579175 - DNA, 15 bp, Homo sapiens
gagaatgaacaatag

SEQ ID NO: 579176 - DNA, 15 bp, Homo sapiens
agaatgaacaatagc

SEQ ID NO: 579177 - DNA, 15 bp, Homo sapiens
gaatgaacaatagca

SEQ ID NO: 579178 - DNA, 15 bp, Homo sapiens
aatgaacaatagcac

SEQ ID NO: 579179 - DNA, 15 bp, Homo sapiens
atgaacaatagcaca

SEQ ID NO: 579180 - DNA, 15 bp, Homo sapiens
tgaacaatagcacaa

SEQ ID NO: 579181 - DNA, 15 bp, Homo sapiens
gaacaatagcacaaa

SEQ ID NO: 579182 - DNA, 15 bp, Homo sapiens
aacaatagcacaaat

SEQ ID NO: 579183 - DNA, 15 bp, Homo sapiens
acaatagcacaaatg

SEQ ID NO: 579184 - DNA, 15 bp, Homo sapiens
caatagcacaaatgc

SEQ ID NO: 579185 - DNA, 15 bp, Homo sapiens
aatagcacaaatgcc

SEQ ID NO: 579186 - DNA, 15 bp, Homo sapiens
atagcacaaatgcca

SEQ ID NO: 579187 - DNA, 15 bp, Homo sapiens
tagcacaaatgccag

SEQ ID NO: 579188 - DNA, 15 bp, Homo sapiens
agcacaaatgccaga

SEQ ID NO: 579189 - DNA, 15 bp, Homo sapiens
gcacaaatgccagac

SEQ ID NO: 579190 - DNA, 15 bp, Homo sapiens
cacaaatgccagact

SEQ ID NO: 579191 - DNA, 15 bp, Homo sapiens
acaaatgccagactg

SEQ ID NO: 579192 - DNA, 15 bp, Homo sapiens
caaatgccagactgc

SEQ ID NO: 579193 - DNA, 15 bp, Homo sapiens
aaatgccagactgca

SEQ ID NO: 579194 - DNA, 15 bp, Homo sapiens
aatgccagactgcaa

SEQ ID NO: 579195 - DNA, 15 bp, Homo sapiens
atgccagactgcaac

SEQ ID NO: 579196 - DNA, 15 bp, Homo sapiens
tgccagactgcaaca

SEQ ID NO: 579197 - DNA, 15 bp, Homo sapiens
gccagactgcaacac

SEQ ID NO: 579198 - DNA, 15 bp, Homo sapiens
ccagactgcaacact

SEQ ID NO: 579199 - DNA, 15 bp, Homo sapiens
cagactgcaacactt

SEQ ID NO: 579200 - DNA, 15 bp, Homo sapiens
agactgcaacacttc

SEQ ID NO: 579201 - DNA, 15 bp, Homo sapiens
gactgcaacacttcc

SEQ ID NO: 579202 - DNA, 15 bp, Homo sapiens
actgcaacacttcct

SEQ ID NO: 579203 - DNA, 15 bp, Homo sapiens
ctgcaacacttccta

SEQ ID NO: 579204 - DNA, 15 bp, Homo sapiens
tgcaacacttcctaa

SEQ ID NO: 579205 - DNA, 15 bp, Homo sapiens
gcaacacttcctaaa

SEQ ID NO: 579206 - DNA, 15 bp, Homo sapiens
caacacttcctaaaa

SEQ ID NO: 579207 - DNA, 15 bp, Homo sapiens
aacacttcctaaaat

SEQ ID NO: 579208 - DNA, 15 bp, Homo sapiens
acacttcctaaaatg

SEQ ID NO: 579209 - DNA, 15 bp, Homo sapiens
cacttcctaaaatga

SEQ ID NO: 579210 - DNA, 15 bp, Homo sapiens
acttcctaaaatgat

SEQ ID NO: 579211 - DNA, 15 bp, Homo sapiens
cttcctaaaatgatg

SEQ ID NO: 579212 - DNA, 15 bp, Homo sapiens
ttcctaaaatgatgt

SEQ ID NO: 579213 - DNA, 15 bp, Homo sapiens
tcctaaaatgatgtc

SEQ ID NO: 579214 - DNA, 15 bp, Homo sapiens
cctaaaatgatgtct

SEQ ID NO: 579215 - DNA, 15 bp, Homo sapiens
ctaaaatgatgtcta

SEQ ID NO: 579216 - DNA, 15 bp, Homo sapiens
taaaatgatgtctat

SEQ ID NO: 579217 - DNA, 15 bp, Homo sapiens
aaaatgatgtctata

SEQ ID NO: 579218 - DNA, 15 bp, Homo sapiens
aaatgatgtctatag

SEQ ID NO: 579219 - DNA, 15 bp, Homo sapiens
aatgatgtctatagc

SEQ ID NO: 579220 - DNA, 15 bp, Homo sapiens
atgatgtctatagct

SEQ ID NO: 579221 - DNA, 15 bp, Homo sapiens
tgatgtctatagcta

SEQ ID NO: 579222 - DNA, 15 bp, Homo sapiens
gatgtctatagctat

SEQ ID NO: 579223 - DNA, 15 bp, Homo sapiens
atgtctatagctatc

SEQ ID NO: 579224 - DNA, 15 bp, Homo sapiens
tgtctatagctatct

SEQ ID NO: 579225 - DNA, 15 bp, Homo sapiens
gtctatagctatctg

SEQ ID NO: 579226 - DNA, 15 bp, Homo sapiens
tctatagctatctgt

SEQ ID NO: 579227 - DNA, 15 bp, Homo sapiens
ctatagctatctgta

SEQ ID NO: 579228 - DNA, 15 bp, Homo sapiens
tatagctatctgtaa

SEQ ID NO: 579229 - DNA, 15 bp, Homo sapiens
atagctatctgtaaa

SEQ ID NO: 579230 - DNA, 15 bp, Homo sapiens
tagctatctgtaaag

SEQ ID NO: 579231 - DNA, 15 bp, Homo sapiens
agctatctgtaaaga

SEQ ID NO: 579232 - DNA, 15 bp, Homo sapiens
gctatctgtaaagag

SEQ ID NO: 579233 - DNA, 15 bp, Homo sapiens
ctatctgtaaagaga

SEQ ID NO: 579234 - DNA, 15 bp, Homo sapiens
tatctgtaaagagag

SEQ ID NO: 579235 - DNA, 15 bp, Homo sapiens
atctgtaaagagaga

SEQ ID NO: 579236 - DNA, 15 bp, Homo sapiens
tctgtaaagagagaa

SEQ ID NO: 579237 - DNA, 15 bp, Homo sapiens
ctgtaaagagagaat

SEQ ID NO: 579238 - DNA, 15 bp, Homo sapiens
tgtaaagagagaata

SEQ ID NO: 579239 - DNA, 15 bp, Homo sapiens
gtaaagagagaataa

SEQ ID NO: 579240 - DNA, 15 bp, Homo sapiens
taaagagagaataac

SEQ ID NO: 579241 - DNA, 15 bp, Homo sapiens
aaagagagaataacc

SEQ ID NO: 579242 - DNA, 15 bp, Homo sapiens
aagagagaataaccg

SEQ ID NO: 579243 - DNA, 15 bp, Homo sapiens
agagagaataaccgg

SEQ ID NO: 579244 - DNA, 15 bp, Homo sapiens
gagagaataaccggc

SEQ ID NO: 579245 - DNA, 15 bp, Homo sapiens
agagaataaccggcc

SEQ ID NO: 579246 - DNA, 15 bp, Homo sapiens
gagaataaccggcca

SEQ ID NO: 579247 - DNA, 15 bp, Homo sapiens
agaataaccggccag

SEQ ID NO: 579248 - DNA, 15 bp, Homo sapiens
gaataaccggccagg

SEQ ID NO: 579249 - DNA, 15 bp, Homo sapiens
aataaccggccaggt

SEQ ID NO: 579250 - DNA, 15 bp, Homo sapiens
ataaccggccaggtg

SEQ ID NO: 579251 - DNA, 15 bp, Homo sapiens
taaccggccaggtgc

SEQ ID NO: 579252 - DNA, 15 bp, Homo sapiens
aaccggccaggtgca

SEQ ID NO: 579253 - DNA, 15 bp, Homo sapiens
accggccaggtgcag

SEQ ID NO: 579254 - DNA, 15 bp, Homo sapiens
ccggccaggtgcagt

SEQ ID NO: 579255 - DNA, 15 bp, Homo sapiens
cggccaggtgcagtg

SEQ ID NO: 579256 - DNA, 15 bp, Homo sapiens
ggccaggtgcagtgg

SEQ ID NO: 579257 - DNA, 15 bp, Homo sapiens
gccaggtgcagtggc

SEQ ID NO: 579258 - DNA, 15 bp, Homo sapiens
ggtgcagtggctcat

SEQ ID NO: 579259 - DNA, 15 bp, Homo sapiens
gtgcagtggctcatg

SEQ ID NO: 579260 - DNA, 15 bp, Homo sapiens
tgcagtggctcatgc

SEQ ID NO: 579261 - DNA, 15 bp, Homo sapiens
gcagtggctcatgcc

SEQ ID NO: 579262 - DNA, 15 bp, Homo sapiens
cagtggctcatgcct

SEQ ID NO: 579263 - DNA, 15 bp, Homo sapiens
agtggctcatgcctg

SEQ ID NO: 579264 - DNA, 15 bp, Homo sapiens
gtggctcatgcctgt

SEQ ID NO: 579265 - DNA, 15 bp, Homo sapiens
tggctcatgcctgta

SEQ ID NO: 579266 - DNA, 15 bp, Homo sapiens
ggctcatgcctgtaa

SEQ ID NO: 579267 - DNA, 15 bp, Homo sapiens
gctcatgcctgtaat

SEQ ID NO: 579268 - DNA, 15 bp, Homo sapiens
ctcatgcctgtaatc

SEQ ID NO: 579269 - DNA, 15 bp, Homo sapiens
tcatgcctgtaatcc

SEQ ID NO: 579270 - DNA, 15 bp, Homo sapiens
catgcctgtaatccc

SEQ ID NO: 579271 - DNA, 15 bp, Homo sapiens
atgcctgtaatccca

SEQ ID NO: 579272 - DNA, 15 bp, Homo sapiens
tgcctgtaatcccag

SEQ ID NO: 579273 - DNA, 15 bp, Homo sapiens
gcactttaggaggcc

SEQ ID NO: 579274 - DNA, 15 bp, Homo sapiens
cactttaggaggccg

SEQ ID NO: 579275 - DNA, 15 bp, Homo sapiens
actttaggaggccga

SEQ ID NO: 579276 - DNA, 15 bp, Homo sapiens
ctttaggaggccgag

SEQ ID NO: 579277 - DNA, 15 bp, Homo sapiens
tttaggaggccgagg

SEQ ID NO: 579278 - DNA, 15 bp, Homo sapiens
ttaggaggccgaggt

SEQ ID NO: 579279 - DNA, 15 bp, Homo sapiens
taggaggccgaggtg

SEQ ID NO: 579280 - DNA, 15 bp, Homo sapiens
aggaggccgaggtgg

SEQ ID NO: 579281 - DNA, 15 bp, Homo sapiens
ggaggccgaggtggg

SEQ ID NO: 579282 - DNA, 15 bp, Homo sapiens
gaggccgaggtgggc

SEQ ID NO: 579283 - DNA, 15 bp, Homo sapiens
aggccgaggtgggca

SEQ ID NO: 579284 - DNA, 15 bp, Homo sapiens
ggccgaggtgggcag

SEQ ID NO: 579285 - DNA, 15 bp, Homo sapiens
gccgaggtgggcaga

SEQ ID NO: 579286 - DNA, 15 bp, Homo sapiens
ccgaggtgggcagat

SEQ ID NO: 579287 - DNA, 15 bp, Homo sapiens
cgaggtgggcagatc

SEQ ID NO: 579288 - DNA, 15 bp, Homo sapiens
gaggtgggcagatca

SEQ ID NO: 579289 - DNA, 15 bp, Homo sapiens
aggtgggcagatcac

SEQ ID NO: 579290 - DNA, 15 bp, Homo sapiens
ggtgggcagatcacc

SEQ ID NO: 579291 - DNA, 15 bp, Homo sapiens
gtgggcagatcacct

SEQ ID NO: 579292 - DNA, 15 bp, Homo sapiens
tgggcagatcacctg

SEQ ID NO: 579293 - DNA, 15 bp, Homo sapiens
gggcagatcacctga

SEQ ID NO: 579294 - DNA, 15 bp, Homo sapiens
ggcagatcacctgag

SEQ ID NO: 579295 - DNA, 15 bp, Homo sapiens
gcagatcacctgagg

SEQ ID NO: 579296 - DNA, 15 bp, Homo sapiens
cagatcacctgaggt

SEQ ID NO: 579297 - DNA, 15 bp, Homo sapiens
agatcacctgaggtc

SEQ ID NO: 579298 - DNA, 15 bp, Homo sapiens
gatcacctgaggtca

SEQ ID NO: 579299 - DNA, 15 bp, Homo sapiens
atcacctgaggtcag

SEQ ID NO: 579300 - DNA, 15 bp, Homo sapiens
tcacctgaggtcagg

SEQ ID NO: 579301 - DNA, 15 bp, Homo sapiens
cacctgaggtcagga

SEQ ID NO: 579302 - DNA, 15 bp, Homo sapiens
acctgaggtcaggag

SEQ ID NO: 579303 - DNA, 15 bp, Homo sapiens
cctgaggtcaggagt

SEQ ID NO: 579304 - DNA, 15 bp, Homo sapiens
ctgaggtcaggagtt

SEQ ID NO: 579305 - DNA, 15 bp, Homo sapiens
tgaggtcaggagttc

SEQ ID NO: 579306 - DNA, 15 bp, Homo sapiens
gaggtcaggagttca

SEQ ID NO: 579307 - DNA, 15 bp, Homo sapiens
aggtcaggagttcaa

SEQ ID NO: 579308 - DNA, 15 bp, Homo sapiens
ggtcaggagttcaag

SEQ ID NO: 579309 - DNA, 15 bp, Homo sapiens
gtcaggagttcaaga

SEQ ID NO: 579310 - DNA, 15 bp, Homo sapiens
tcaggagttcaagac

SEQ ID NO: 579311 - DNA, 15 bp, Homo sapiens
tcaagaccagcctga

SEQ ID NO: 579312 - DNA, 15 bp, Homo sapiens
caagaccagcctgac

SEQ ID NO: 579313 - DNA, 15 bp, Homo sapiens
aagaccagcctgacc

SEQ ID NO: 579314 - DNA, 15 bp, Homo sapiens
ccaacatggagaaat

SEQ ID NO: 579315 - DNA, 15 bp, Homo sapiens
caacatggagaaatc

SEQ ID NO: 579316 - DNA, 15 bp, Homo sapiens
aacatggagaaatcc

SEQ ID NO: 579317 - DNA, 15 bp, Homo sapiens
acatggagaaatcct

SEQ ID NO: 579318 - DNA, 15 bp, Homo sapiens
catggagaaatcctg

SEQ ID NO: 579319 - DNA, 15 bp, Homo sapiens
atggagaaatcctgt

SEQ ID NO: 579320 - DNA, 15 bp, Homo sapiens
tggagaaatcctgtc

SEQ ID NO: 579321 - DNA, 15 bp, Homo sapiens
ggagaaatcctgtct

SEQ ID NO: 579322 - DNA, 15 bp, Homo sapiens
gagaaatcctgtctc

SEQ ID NO: 579323 - DNA, 15 bp, Homo sapiens
agaaatcctgtctct

SEQ ID NO: 579324 - DNA, 15 bp, Homo sapiens
gaaatcctgtctcta

SEQ ID NO: 579325 - DNA, 15 bp, Homo sapiens
aaatcctgtctctac

SEQ ID NO: 579326 - DNA, 15 bp, Homo sapiens
aatcctgtctctact

SEQ ID NO: 579327 - DNA, 15 bp, Homo sapiens
atcctgtctctacta

SEQ ID NO: 579328 - DNA, 15 bp, Homo sapiens
tcctgtctctactaa

SEQ ID NO: 579329 - DNA, 15 bp, Homo sapiens
gtctctactaaaaaa

SEQ ID NO: 579330 - DNA, 15 bp, Homo sapiens
tctctactaaaaaat

SEQ ID NO: 579331 - DNA, 15 bp, Homo sapiens
ctctactaaaaaata

SEQ ID NO: 579332 - DNA, 15 bp, Homo sapiens
tctactaaaaaatat

SEQ ID NO: 579333 - DNA, 15 bp, Homo sapiens
ctactaaaaaatatg

SEQ ID NO: 579334 - DNA, 15 bp, Homo sapiens
tactaaaaaatatga

SEQ ID NO: 579335 - DNA, 15 bp, Homo sapiens
actaaaaaatatgaa

SEQ ID NO: 579336 - DNA, 15 bp, Homo sapiens
ctaaaaaatatgaaa

SEQ ID NO: 579337 - DNA, 15 bp, Homo sapiens
taaaaaatatgaaat

SEQ ID NO: 579338 - DNA, 15 bp, Homo sapiens
aaaaaatatgaaatt

SEQ ID NO: 579339 - DNA, 15 bp, Homo sapiens
aaaaatatgaaatta

SEQ ID NO: 579340 - DNA, 15 bp, Homo sapiens
aaaatatgaaattag

SEQ ID NO: 579341 - DNA, 15 bp, Homo sapiens
aaatatgaaattagc

SEQ ID NO: 579342 - DNA, 15 bp, Homo sapiens
aatatgaaattagcc

SEQ ID NO: 579343 - DNA, 15 bp, Homo sapiens
atatgaaattagcca

SEQ ID NO: 579344 - DNA, 15 bp, Homo sapiens
tatgaaattagccag

SEQ ID NO: 579345 - DNA, 15 bp, Homo sapiens
atgaaattagccagg

SEQ ID NO: 579346 - DNA, 15 bp, Homo sapiens
tgaaattagccaggc

SEQ ID NO: 579347 - DNA, 15 bp, Homo sapiens
gaaattagccaggca

SEQ ID NO: 579348 - DNA, 15 bp, Homo sapiens
gccaggcatggtggc

SEQ ID NO: 579349 - DNA, 15 bp, Homo sapiens
ccaggcatggtggcg

SEQ ID NO: 579350 - DNA, 15 bp, Homo sapiens
caggcatggtggcgc

SEQ ID NO: 579351 - DNA, 15 bp, Homo sapiens
aggcatggtggcgca

SEQ ID NO: 579352 - DNA, 15 bp, Homo sapiens
ggcatggtggcgcat

SEQ ID NO: 579353 - DNA, 15 bp, Homo sapiens
gcatggtggcgcatg

SEQ ID NO: 579354 - DNA, 15 bp, Homo sapiens
catggtggcgcatgc

SEQ ID NO: 579355 - DNA, 15 bp, Homo sapiens
atggtggcgcatgcc

SEQ ID NO: 579356 - DNA, 15 bp, Homo sapiens
tggtggcgcatgcct

SEQ ID NO: 579357 - DNA, 15 bp, Homo sapiens
ggtggcgcatgcctg

SEQ ID NO: 579358 - DNA, 15 bp, Homo sapiens
gtggcgcatgcctgt

SEQ ID NO: 579359 - DNA, 15 bp, Homo sapiens
tggcgcatgcctgta

SEQ ID NO: 579360 - DNA, 15 bp, Homo sapiens
ggcgcatgcctgtaa

SEQ ID NO: 579361 - DNA, 15 bp, Homo sapiens
gcgcatgcctgtaat

SEQ ID NO: 579362 - DNA, 15 bp, Homo sapiens
cgcatgcctgtaatc

SEQ ID NO: 579363 - DNA, 15 bp, Homo sapiens
gcatgcctgtaatca

SEQ ID NO: 579364 - DNA, 15 bp, Homo sapiens
catgcctgtaatcac

SEQ ID NO: 579365 - DNA, 15 bp, Homo sapiens
atgcctgtaatcaca

SEQ ID NO: 579366 - DNA, 15 bp, Homo sapiens
tgcctgtaatcacag

SEQ ID NO: 579367 - DNA, 15 bp, Homo sapiens
gcctgtaatcacagc

SEQ ID NO: 579368 - DNA, 15 bp, Homo sapiens
cctgtaatcacagct

SEQ ID NO: 579369 - DNA, 15 bp, Homo sapiens
ctgtaatcacagcta

SEQ ID NO: 579370 - DNA, 15 bp, Homo sapiens
tgtaatcacagctac

SEQ ID NO: 579371 - DNA, 15 bp, Homo sapiens
gtaatcacagctact

SEQ ID NO: 579372 - DNA, 15 bp, Homo sapiens
taatcacagctactc

SEQ ID NO: 579373 - DNA, 15 bp, Homo sapiens
aatcacagctactca

SEQ ID NO: 579374 - DNA, 15 bp, Homo sapiens
atcacagctactcag

SEQ ID NO: 579375 - DNA, 15 bp, Homo sapiens
tcacagctactcagg

SEQ ID NO: 579376 - DNA, 15 bp, Homo sapiens
cacagctactcagga

SEQ ID NO: 579377 - DNA, 15 bp, Homo sapiens
acagctactcaggag

SEQ ID NO: 579378 - DNA, 15 bp, Homo sapiens
ctactcaggaggcta

SEQ ID NO: 579379 - DNA, 15 bp, Homo sapiens
tactcaggaggctaa

SEQ ID NO: 579380 - DNA, 15 bp, Homo sapiens
actcaggaggctaag

SEQ ID NO: 579381 - DNA, 15 bp, Homo sapiens
ctcaggaggctaaga

SEQ ID NO: 579382 - DNA, 15 bp, Homo sapiens
tcaggaggctaagac

SEQ ID NO: 579383 - DNA, 15 bp, Homo sapiens
caggaggctaagaca

SEQ ID NO: 579384 - DNA, 15 bp, Homo sapiens
aggaggctaagacag

SEQ ID NO: 579385 - DNA, 15 bp, Homo sapiens
ggaggctaagacagg

SEQ ID NO: 579386 - DNA, 15 bp, Homo sapiens
gaggctaagacagga

SEQ ID NO: 579387 - DNA, 15 bp, Homo sapiens
aggctaagacaggag

SEQ ID NO: 579388 - DNA, 15 bp, Homo sapiens
ggctaagacaggaga

SEQ ID NO: 579389 - DNA, 15 bp, Homo sapiens
gctaagacaggagaa

SEQ ID NO: 579390 - DNA, 15 bp, Homo sapiens
ctaagacaggagaat

SEQ ID NO: 579391 - DNA, 15 bp, Homo sapiens
taagacaggagaatc

SEQ ID NO: 579392 - DNA, 15 bp, Homo sapiens
aagacaggagaatcc

SEQ ID NO: 579393 - DNA, 15 bp, Homo sapiens
agacaggagaatccc

SEQ ID NO: 579394 - DNA, 15 bp, Homo sapiens
gacaggagaatccct

SEQ ID NO: 579395 - DNA, 15 bp, Homo sapiens
acaggagaatccctt

SEQ ID NO: 579396 - DNA, 15 bp, Homo sapiens
caggagaatcccttg

SEQ ID NO: 579397 - DNA, 15 bp, Homo sapiens
aggagaatcccttga

SEQ ID NO: 579398 - DNA, 15 bp, Homo sapiens
ggagaatcccttgaa

SEQ ID NO: 579399 - DNA, 15 bp, Homo sapiens
gagaatcccttgaac

SEQ ID NO: 579400 - DNA, 15 bp, Homo sapiens
agaatcccttgaacc

SEQ ID NO: 579401 - DNA, 15 bp, Homo sapiens
gaatcccttgaaccc

SEQ ID NO: 579402 - DNA, 15 bp, Homo sapiens
aatcccttgaaccca

SEQ ID NO: 579403 - DNA, 15 bp, Homo sapiens
atcccttgaacccag

SEQ ID NO: 579404 - DNA, 15 bp, Homo sapiens
tcccttgaacccagg

SEQ ID NO: 579405 - DNA, 15 bp, Homo sapiens
cccttgaacccagga

SEQ ID NO: 579406 - DNA, 15 bp, Homo sapiens
ccttgaacccaggag

SEQ ID NO: 579407 - DNA, 15 bp, Homo sapiens
ttgaacccaggaggc

SEQ ID NO: 579408 - DNA, 15 bp, Homo sapiens
tgaacccaggaggcg

SEQ ID NO: 579409 - DNA, 15 bp, Homo sapiens
gaacccaggaggcgg

SEQ ID NO: 579410 - DNA, 15 bp, Homo sapiens
aacccaggaggcgga

SEQ ID NO: 579411 - DNA, 15 bp, Homo sapiens
acccaggaggcggag

SEQ ID NO: 579412 - DNA, 15 bp, Homo sapiens
cccaggaggcggagg

SEQ ID NO: 579413 - DNA, 15 bp, Homo sapiens
ccaggaggcggaggt

SEQ ID NO: 579414 - DNA, 15 bp, Homo sapiens
caggaggcggaggtt

SEQ ID NO: 579415 - DNA, 15 bp, Homo sapiens
aggaggcggaggttg

SEQ ID NO: 579416 - DNA, 15 bp, Homo sapiens
ggaggcggaggttgt

SEQ ID NO: 579417 - DNA, 15 bp, Homo sapiens
gaggcggaggttgtg

SEQ ID NO: 579418 - DNA, 15 bp, Homo sapiens
aggcggaggttgtgg

SEQ ID NO: 579419 - DNA, 15 bp, Homo sapiens
ggcggaggttgtggt

SEQ ID NO: 579420 - DNA, 15 bp, Homo sapiens
gcggaggttgtggtg

SEQ ID NO: 579421 - DNA, 15 bp, Homo sapiens
cggaggttgtggtga

SEQ ID NO: 579422 - DNA, 15 bp, Homo sapiens
ggaggttgtggtgag

SEQ ID NO: 579423 - DNA, 15 bp, Homo sapiens
gaggttgtggtgagt

SEQ ID NO: 579424 - DNA, 15 bp, Homo sapiens
aggttgtggtgagtg

SEQ ID NO: 579425 - DNA, 15 bp, Homo sapiens
ggttgtggtgagtgg

SEQ ID NO: 579426 - DNA, 15 bp, Homo sapiens
gttgtggtgagtgga

SEQ ID NO: 579427 - DNA, 15 bp, Homo sapiens
ttgtggtgagtggag

SEQ ID NO: 579428 - DNA, 15 bp, Homo sapiens
tgtggtgagtggaga

SEQ ID NO: 579429 - DNA, 15 bp, Homo sapiens
gtggtgagtggagat

SEQ ID NO: 579430 - DNA, 15 bp, Homo sapiens
tggtgagtggagata

SEQ ID NO: 579431 - DNA, 15 bp, Homo sapiens
ggtgagtggagatac

SEQ ID NO: 579432 - DNA, 15 bp, Homo sapiens
gtgagtggagatacg

SEQ ID NO: 579433 - DNA, 15 bp, Homo sapiens
tgagtggagatacgc

SEQ ID NO: 579434 - DNA, 15 bp, Homo sapiens
gagtggagatacgcc

SEQ ID NO: 579435 - DNA, 15 bp, Homo sapiens
agtggagatacgcca

SEQ ID NO: 579436 - DNA, 15 bp, Homo sapiens
gtggagatacgccat

SEQ ID NO: 579437 - DNA, 15 bp, Homo sapiens
tggagatacgccatt

SEQ ID NO: 579438 - DNA, 15 bp, Homo sapiens
ggagatacgccattg

SEQ ID NO: 579439 - DNA, 15 bp, Homo sapiens
gagatacgccattgc

SEQ ID NO: 579440 - DNA, 15 bp, Homo sapiens
agatacgccattgca

SEQ ID NO: 579441 - DNA, 15 bp, Homo sapiens
gatacgccattgcac

SEQ ID NO: 579442 - DNA, 15 bp, Homo sapiens
atacgccattgcact

SEQ ID NO: 579443 - DNA, 15 bp, Homo sapiens
tacgccattgcactc

SEQ ID NO: 579444 - DNA, 15 bp, Homo sapiens
acgccattgcactcc

SEQ ID NO: 579445 - DNA, 15 bp, Homo sapiens
agcctgggcaacaac

SEQ ID NO: 579446 - DNA, 15 bp, Homo sapiens
gcctgggcaacaaca

SEQ ID NO: 579447 - DNA, 15 bp, Homo sapiens
cctgggcaacaacag

SEQ ID NO: 579448 - DNA, 15 bp, Homo sapiens
ctgggcaacaacagc

SEQ ID NO: 579449 - DNA, 15 bp, Homo sapiens
tgggcaacaacagcg

SEQ ID NO: 579450 - DNA, 15 bp, Homo sapiens
gggcaacaacagcga

SEQ ID NO: 579451 - DNA, 15 bp, Homo sapiens
ggcaacaacagcgaa

SEQ ID NO: 579452 - DNA, 15 bp, Homo sapiens
gcaacaacagcgaaa

SEQ ID NO: 579453 - DNA, 15 bp, Homo sapiens
caacaacagcgaaac

SEQ ID NO: 579454 - DNA, 15 bp, Homo sapiens
aacaacagcgaaact

SEQ ID NO: 579455 - DNA, 15 bp, Homo sapiens
acaacagcgaaactc

SEQ ID NO: 579456 - DNA, 15 bp, Homo sapiens
caacagcgaaactcc

SEQ ID NO: 579457 - DNA, 15 bp, Homo sapiens
aacagcgaaactccg

SEQ ID NO: 579458 - DNA, 15 bp, Homo sapiens
acagcgaaactccgt

SEQ ID NO: 579459 - DNA, 15 bp, Homo sapiens
cagcgaaactccgtc

SEQ ID NO: 579460 - DNA, 15 bp, Homo sapiens
agcgaaactccgtct

SEQ ID NO: 579461 - DNA, 15 bp, Homo sapiens
gcgaaactccgtctc

SEQ ID NO: 579462 - DNA, 15 bp, Homo sapiens
cgaaactccgtctca

SEQ ID NO: 579463 - DNA, 15 bp, Homo sapiens
actccgtctcaaaaa

SEQ ID NO: 579464 - DNA, 15 bp, Homo sapiens
ctccgtctcaaaaaa

SEQ ID NO: 579465 - DNA, 15 bp, Homo sapiens
tccgtctcaaaaaaa

SEQ ID NO: 579466 - DNA, 15 bp, Homo sapiens
ccgtctcaaaaaaaa

SEQ ID NO: 579467 - DNA, 15 bp, Homo sapiens
cgtctcaaaaaaaaa

SEQ ID NO: 579468 - DNA, 15 bp, Homo sapiens
gtctcaaaaaaaaaa

SEQ ID NO: 579469 - DNA, 15 bp, Homo sapiens
tctcaaaaaaaaaag

SEQ ID NO: 579470 - DNA, 15 bp, Homo sapiens
ctcaaaaaaaaaaga

SEQ ID NO: 579471 - DNA, 15 bp, Homo sapiens
tcaaaaaaaaaagag

SEQ ID NO: 579472 - DNA, 15 bp, Homo sapiens
caaaaaaaaaagaga

SEQ ID NO: 579473 - DNA, 15 bp, Homo sapiens
aaaaaaaaaagagag

SEQ ID NO: 579474 - DNA, 15 bp, Homo sapiens
aaaaaaaaagagaga

SEQ ID NO: 579475 - DNA, 15 bp, Homo sapiens
aaaaaaaagagagaa

SEQ ID NO: 579476 - DNA, 15 bp, Homo sapiens
aaaaaaagagagaat

SEQ ID NO: 579477 - DNA, 15 bp, Homo sapiens
aaaaaagagagaata

SEQ ID NO: 579478 - DNA, 15 bp, Homo sapiens
aaaaagagagaataa

SEQ ID NO: 579479 - DNA, 15 bp, Homo sapiens
aaaagagagaataac

SEQ ID NO: 579480 - DNA, 15 bp, Homo sapiens
aagagagaataacca

SEQ ID NO: 579481 - DNA, 15 bp, Homo sapiens
agagagaataaccaa

SEQ ID NO: 579482 - DNA, 15 bp, Homo sapiens
gagagaataaccaac

SEQ ID NO: 579483 - DNA, 15 bp, Homo sapiens
agagaataaccaact

SEQ ID NO: 579484 - DNA, 15 bp, Homo sapiens
gagaataaccaactc

SEQ ID NO: 579485 - DNA, 15 bp, Homo sapiens
agaataaccaactcc

SEQ ID NO: 579486 - DNA, 15 bp, Homo sapiens
gaataaccaactcct

SEQ ID NO: 579487 - DNA, 15 bp, Homo sapiens
aataaccaactccta

SEQ ID NO: 579488 - DNA, 15 bp, Homo sapiens
ataaccaactcctaa

SEQ ID NO: 579489 - DNA, 15 bp, Homo sapiens
taaccaactcctaag

SEQ ID NO: 579490 - DNA, 15 bp, Homo sapiens
aaccaactcctaaga

SEQ ID NO: 579491 - DNA, 15 bp, Homo sapiens
accaactcctaagac

SEQ ID NO: 579492 - DNA, 15 bp, Homo sapiens
ccaactcctaagaca

SEQ ID NO: 579493 - DNA, 15 bp, Homo sapiens
caactcctaagacat

SEQ ID NO: 579494 - DNA, 15 bp, Homo sapiens
aactcctaagacatc

SEQ ID NO: 579495 - DNA, 15 bp, Homo sapiens
actcctaagacatcc

SEQ ID NO: 579496 - DNA, 15 bp, Homo sapiens
ctcctaagacatcca

SEQ ID NO: 579497 - DNA, 15 bp, Homo sapiens
tcctaagacatccat

SEQ ID NO: 579498 - DNA, 15 bp, Homo sapiens
cctaagacatccatt

SEQ ID NO: 579499 - DNA, 15 bp, Homo sapiens
ctaagacatccatta

SEQ ID NO: 579500 - DNA, 15 bp, Homo sapiens
taagacatccattaa

SEQ ID NO: 579501 - DNA, 15 bp, Homo sapiens
aagacatccattaag

SEQ ID NO: 579502 - DNA, 15 bp, Homo sapiens
agacatccattaaga

SEQ ID NO: 579503 - DNA, 15 bp, Homo sapiens
gacatccattaagac

SEQ ID NO: 579504 - DNA, 15 bp, Homo sapiens
acatccattaagaca

SEQ ID NO: 579505 - DNA, 15 bp, Homo sapiens
catccattaagacag

SEQ ID NO: 579506 - DNA, 15 bp, Homo sapiens
atccattaagacaga

SEQ ID NO: 579507 - DNA, 15 bp, Homo sapiens
tccattaagacagac

SEQ ID NO: 579508 - DNA, 15 bp, Homo sapiens
ccattaagacagacg

SEQ ID NO: 579509 - DNA, 15 bp, Homo sapiens
cattaagacagacgc

SEQ ID NO: 579510 - DNA, 15 bp, Homo sapiens
attaagacagacgca

SEQ ID NO: 579511 - DNA, 15 bp, Homo sapiens
ttaagacagacgcac

SEQ ID NO: 579512 - DNA, 15 bp, Homo sapiens
taagacagacgcaca

SEQ ID NO: 579513 - DNA, 15 bp, Homo sapiens
aagacagacgcacag

SEQ ID NO: 579514 - DNA, 15 bp, Homo sapiens
agacagacgcacagt

SEQ ID NO: 579515 - DNA, 15 bp, Homo sapiens
gacagacgcacagtc

SEQ ID NO: 579516 - DNA, 15 bp, Homo sapiens
acagacgcacagtct

SEQ ID NO: 579517 - DNA, 15 bp, Homo sapiens
cagacgcacagtctg

SEQ ID NO: 579518 - DNA, 15 bp, Homo sapiens
agacgcacagtctgt

SEQ ID NO: 579519 - DNA, 15 bp, Homo sapiens
gacgcacagtctgtc

SEQ ID NO: 579520 - DNA, 15 bp, Homo sapiens
acgcacagtctgtca

SEQ ID NO: 579521 - DNA, 15 bp, Homo sapiens
cgcacagtctgtcaa

SEQ ID NO: 579522 - DNA, 15 bp, Homo sapiens
gcacagtctgtcaac

SEQ ID NO: 579523 - DNA, 15 bp, Homo sapiens
cacagtctgtcaact

SEQ ID NO: 579524 - DNA, 15 bp, Homo sapiens
acagtctgtcaactt

SEQ ID NO: 579525 - DNA, 15 bp, Homo sapiens
cagtctgtcaacttt

SEQ ID NO: 579526 - DNA, 15 bp, Homo sapiens
agtctgtcaactttg

SEQ ID NO: 579527 - DNA, 15 bp, Homo sapiens
gtctgtcaactttgg

SEQ ID NO: 579528 - DNA, 15 bp, Homo sapiens
tctgtcaactttggt

SEQ ID NO: 579529 - DNA, 15 bp, Homo sapiens
ctgtcaactttggtt

SEQ ID NO: 579530 - DNA, 15 bp, Homo sapiens
tgtcaactttggtta

SEQ ID NO: 579531 - DNA, 15 bp, Homo sapiens
gtcaactttggttag

SEQ ID NO: 579532 - DNA, 15 bp, Homo sapiens
tcaactttggttaga

SEQ ID NO: 579533 - DNA, 15 bp, Homo sapiens
caactttggttagaa

SEQ ID NO: 579534 - DNA, 15 bp, Homo sapiens
aactttggttagaat

SEQ ID NO: 579535 - DNA, 15 bp, Homo sapiens
actttggttagaata

SEQ ID NO: 579536 - DNA, 15 bp, Homo sapiens
ctttggttagaatac

SEQ ID NO: 579537 - DNA, 15 bp, Homo sapiens
tttggttagaatacc

SEQ ID NO: 579538 - DNA, 15 bp, Homo sapiens
ttggttagaatacca

SEQ ID NO: 579539 - DNA, 15 bp, Homo sapiens
tggttagaataccaa

SEQ ID NO: 579540 - DNA, 15 bp, Homo sapiens
ggttagaataccaaa

SEQ ID NO: 579541 - DNA, 15 bp, Homo sapiens
gttagaataccaaac

SEQ ID NO: 579542 - DNA, 15 bp, Homo sapiens
ttagaataccaaacc

SEQ ID NO: 579543 - DNA, 15 bp, Homo sapiens
tagaataccaaacct

SEQ ID NO: 579544 - DNA, 15 bp, Homo sapiens
agaataccaaacctt

SEQ ID NO: 579545 - DNA, 15 bp, Homo sapiens
gaataccaaacctta

SEQ ID NO: 579546 - DNA, 15 bp, Homo sapiens
aataccaaaccttaa

SEQ ID NO: 579547 - DNA, 15 bp, Homo sapiens
ataccaaaccttaag

SEQ ID NO: 579548 - DNA, 15 bp, Homo sapiens
taccaaaccttaaga

SEQ ID NO: 579549 - DNA, 15 bp, Homo sapiens
accaaaccttaagat

SEQ ID NO: 579550 - DNA, 15 bp, Homo sapiens
ccaaaccttaagatc

SEQ ID NO: 579551 - DNA, 15 bp, Homo sapiens
caaaccttaagatca

SEQ ID NO: 579552 - DNA, 15 bp, Homo sapiens
aaaccttaagatcag

SEQ ID NO: 579553 - DNA, 15 bp, Homo sapiens
aaccttaagatcagg

SEQ ID NO: 579554 - DNA, 15 bp, Homo sapiens
accttaagatcaggt

SEQ ID NO: 579555 - DNA, 15 bp, Homo sapiens
ccttaagatcaggta

SEQ ID NO: 579556 - DNA, 15 bp, Homo sapiens
cttaagatcaggtaa

SEQ ID NO: 579557 - DNA, 15 bp, Homo sapiens
ttaagatcaggtaat

SEQ ID NO: 579558 - DNA, 15 bp, Homo sapiens
taagatcaggtaatg

SEQ ID NO: 579559 - DNA, 15 bp, Homo sapiens
aagatcaggtaatgc

SEQ ID NO: 579560 - DNA, 15 bp, Homo sapiens
agatcaggtaatgct

SEQ ID NO: 579561 - DNA, 15 bp, Homo sapiens
gatcaggtaatgctt

SEQ ID NO: 579562 - DNA, 15 bp, Homo sapiens
atcaggtaatgcttt

SEQ ID NO: 579563 - DNA, 15 bp, Homo sapiens
tcaggtaatgctttt

SEQ ID NO: 579564 - DNA, 15 bp, Homo sapiens
caggtaatgcttttg

SEQ ID NO: 579565 - DNA, 15 bp, Homo sapiens
aggtaatgcttttgt

SEQ ID NO: 579566 - DNA, 15 bp, Homo sapiens
ggtaatgcttttgtg

SEQ ID NO: 579567 - DNA, 15 bp, Homo sapiens
gtaatgcttttgtgc

SEQ ID NO: 579568 - DNA, 15 bp, Homo sapiens
taatgcttttgtgca

SEQ ID NO: 579569 - DNA, 15 bp, Homo sapiens
aatgcttttgtgcat

SEQ ID NO: 579570 - DNA, 15 bp, Homo sapiens
atgcttttgtgcata

SEQ ID NO: 579571 - DNA, 15 bp, Homo sapiens
tgcttttgtgcatag

SEQ ID NO: 579572 - DNA, 15 bp, Homo sapiens
gcttttgtgcatagg

SEQ ID NO: 579573 - DNA, 15 bp, Homo sapiens
cttttgtgcataggc

SEQ ID NO: 579574 - DNA, 15 bp, Homo sapiens
ttttgtgcataggct

SEQ ID NO: 579575 - DNA, 15 bp, Homo sapiens
tttgtgcataggctg

SEQ ID NO: 579576 - DNA, 15 bp, Homo sapiens
ttgtgcataggctgt

SEQ ID NO: 579577 - DNA, 15 bp, Homo sapiens
tgtgcataggctgtc

SEQ ID NO: 579578 - DNA, 15 bp, Homo sapiens
gtgcataggctgtca

SEQ ID NO: 579579 - DNA, 15 bp, Homo sapiens
tgcataggctgtcac

SEQ ID NO: 579580 - DNA, 15 bp, Homo sapiens
gcataggctgtcaca

SEQ ID NO: 579581 - DNA, 15 bp, Homo sapiens
cataggctgtcacaa

SEQ ID NO: 579582 - DNA, 15 bp, Homo sapiens
ataggctgtcacaac

SEQ ID NO: 579583 - DNA, 15 bp, Homo sapiens
taggctgtcacaact

SEQ ID NO: 579584 - DNA, 15 bp, Homo sapiens
aggctgtcacaacta

SEQ ID NO: 579585 - DNA, 15 bp, Homo sapiens
ggctgtcacaactat

SEQ ID NO: 579586 - DNA, 15 bp, Homo sapiens
gctgtcacaactata

SEQ ID NO: 579587 - DNA, 15 bp, Homo sapiens
ctgtcacaactatat

SEQ ID NO: 579588 - DNA, 15 bp, Homo sapiens
tgtcacaactatatt

SEQ ID NO: 579589 - DNA, 15 bp, Homo sapiens
gtcacaactatatta

SEQ ID NO: 579590 - DNA, 15 bp, Homo sapiens
tcacaactatattac

SEQ ID NO: 579591 - DNA, 15 bp, Homo sapiens
cacaactatattaca

SEQ ID NO: 579592 - DNA, 15 bp, Homo sapiens
acaactatattacat

SEQ ID NO: 579593 - DNA, 15 bp, Homo sapiens
caactatattacatc

SEQ ID NO: 579594 - DNA, 15 bp, Homo sapiens
aactatattacatcc

SEQ ID NO: 579595 - DNA, 15 bp, Homo sapiens
actatattacatcca

SEQ ID NO: 579596 - DNA, 15 bp, Homo sapiens
ctatattacatccac

SEQ ID NO: 579597 - DNA, 15 bp, Homo sapiens
tatattacatccacg

SEQ ID NO: 579598 - DNA, 15 bp, Homo sapiens
atattacatccacgt

SEQ ID NO: 579599 - DNA, 15 bp, Homo sapiens
tattacatccacgtt

SEQ ID NO: 579600 - DNA, 15 bp, Homo sapiens
attacatccacgtta

SEQ ID NO: 579601 - DNA, 15 bp, Homo sapiens
ttacatccacgttag

SEQ ID NO: 579602 - DNA, 15 bp, Homo sapiens
tacatccacgttagc

SEQ ID NO: 579603 - DNA, 15 bp, Homo sapiens
acatccacgttagca

SEQ ID NO: 579604 - DNA, 15 bp, Homo sapiens
catccacgttagcat

SEQ ID NO: 579605 - DNA, 15 bp, Homo sapiens
atccacgttagcatc

SEQ ID NO: 579606 - DNA, 15 bp, Homo sapiens
tccacgttagcatcc

SEQ ID NO: 579607 - DNA, 15 bp, Homo sapiens
ccacgttagcatcca

SEQ ID NO: 579608 - DNA, 15 bp, Homo sapiens
cacgttagcatccat

SEQ ID NO: 579609 - DNA, 15 bp, Homo sapiens
acgttagcatccatg

SEQ ID NO: 579610 - DNA, 15 bp, Homo sapiens
cgttagcatccatgt

SEQ ID NO: 579611 - DNA, 15 bp, Homo sapiens
gttagcatccatgtg

SEQ ID NO: 579612 - DNA, 15 bp, Homo sapiens
ttagcatccatgtga

SEQ ID NO: 579613 - DNA, 15 bp, Homo sapiens
tagcatccatgtgaa

SEQ ID NO: 579614 - DNA, 15 bp, Homo sapiens
agcatccatgtgaaa

SEQ ID NO: 579615 - DNA, 15 bp, Homo sapiens
gcatccatgtgaaac

SEQ ID NO: 579616 - DNA, 15 bp, Homo sapiens
catccatgtgaaact

SEQ ID NO: 579617 - DNA, 15 bp, Homo sapiens
atccatgtgaaacta

SEQ ID NO: 579618 - DNA, 15 bp, Homo sapiens
tccatgtgaaactag

SEQ ID NO: 579619 - DNA, 15 bp, Homo sapiens
ccatgtgaaactagg

SEQ ID NO: 579620 - DNA, 15 bp, Homo sapiens
catgtgaaactaggt

SEQ ID NO: 579621 - DNA, 15 bp, Homo sapiens
atgtgaaactaggta

SEQ ID NO: 579622 - DNA, 15 bp, Homo sapiens
tgtgaaactaggtat

SEQ ID NO: 579623 - DNA, 15 bp, Homo sapiens
gtgaaactaggtatc

SEQ ID NO: 579624 - DNA, 15 bp, Homo sapiens
tgaaactaggtatca

SEQ ID NO: 579625 - DNA, 15 bp, Homo sapiens
gaaactaggtatcag

SEQ ID NO: 579626 - DNA, 15 bp, Homo sapiens
aaactaggtatcagg

SEQ ID NO: 579627 - DNA, 15 bp, Homo sapiens
aactaggtatcaggg

SEQ ID NO: 579628 - DNA, 15 bp, Homo sapiens
actaggtatcagggg

SEQ ID NO: 579629 - DNA, 15 bp, Homo sapiens
ctaggtatcaggggc

SEQ ID NO: 579630 - DNA, 15 bp, Homo sapiens
taggtatcaggggct

SEQ ID NO: 579631 - DNA, 15 bp, Homo sapiens
aggtatcaggggctt

SEQ ID NO: 579632 - DNA, 15 bp, Homo sapiens
ggtatcaggggcttg

SEQ ID NO: 579633 - DNA, 15 bp, Homo sapiens
gtatcaggggcttga

SEQ ID NO: 579634 - DNA, 15 bp, Homo sapiens
tatcaggggcttgac

SEQ ID NO: 579635 - DNA, 15 bp, Homo sapiens
atcaggggcttgacc

SEQ ID NO: 579636 - DNA, 15 bp, Homo sapiens
tcaggggcttgacca

SEQ ID NO: 579637 - DNA, 15 bp, Homo sapiens
caggggcttgaccaa

SEQ ID NO: 579638 - DNA, 15 bp, Homo sapiens
aggggcttgaccaaa

SEQ ID NO: 579639 - DNA, 15 bp, Homo sapiens
ggggcttgaccaaat

SEQ ID NO: 579640 - DNA, 15 bp, Homo sapiens
gggcttgaccaaatg

SEQ ID NO: 579641 - DNA, 15 bp, Homo sapiens
ggcttgaccaaatga

SEQ ID NO: 579642 - DNA, 15 bp, Homo sapiens
gcttgaccaaatgag

SEQ ID NO: 579643 - DNA, 15 bp, Homo sapiens
cttgaccaaatgaga

SEQ ID NO: 579644 - DNA, 15 bp, Homo sapiens
ttgaccaaatgagat

SEQ ID NO: 579645 - DNA, 15 bp, Homo sapiens
tgaccaaatgagatg

SEQ ID NO: 579646 - DNA, 15 bp, Homo sapiens
gaccaaatgagatgg

SEQ ID NO: 579647 - DNA, 15 bp, Homo sapiens
accaaatgagatggt

SEQ ID NO: 579648 - DNA, 15 bp, Homo sapiens
ccaaatgagatggta

SEQ ID NO: 579649 - DNA, 15 bp, Homo sapiens
caaatgagatggtaa

SEQ ID NO: 579650 - DNA, 15 bp, Homo sapiens
aaatgagatggtaac

SEQ ID NO: 579651 - DNA, 15 bp, Homo sapiens
aatgagatggtaaca

SEQ ID NO: 579652 - DNA, 15 bp, Homo sapiens
atgagatggtaacat

SEQ ID NO: 579653 - DNA, 15 bp, Homo sapiens
tgagatggtaacatc

SEQ ID NO: 579654 - DNA, 15 bp, Homo sapiens
gagatggtaacatcc

SEQ ID NO: 579655 - DNA, 15 bp, Homo sapiens
agatggtaacatcca

SEQ ID NO: 579656 - DNA, 15 bp, Homo sapiens
gatggtaacatccag

SEQ ID NO: 579657 - DNA, 15 bp, Homo sapiens
atggtaacatccagg

SEQ ID NO: 579658 - DNA, 15 bp, Homo sapiens
tggtaacatccaggg

SEQ ID NO: 579659 - DNA, 15 bp, Homo sapiens
ggtaacatccagggc

SEQ ID NO: 579660 - DNA, 15 bp, Homo sapiens
gtaacatccagggcc

SEQ ID NO: 579661 - DNA, 15 bp, Homo sapiens
taacatccagggcct

SEQ ID NO: 579662 - DNA, 15 bp, Homo sapiens
aacatccagggccta

SEQ ID NO: 579663 - DNA, 15 bp, Homo sapiens
acatccagggcctaa

SEQ ID NO: 579664 - DNA, 15 bp, Homo sapiens
catccagggcctaaa

SEQ ID NO: 579665 - DNA, 15 bp, Homo sapiens
atccagggcctaaag

SEQ ID NO: 579666 - DNA, 15 bp, Homo sapiens
tccagggcctaaaga

SEQ ID NO: 579667 - DNA, 15 bp, Homo sapiens
ccagggcctaaagac

SEQ ID NO: 579668 - DNA, 15 bp, Homo sapiens
cagggcctaaagaca

SEQ ID NO: 579669 - DNA, 15 bp, Homo sapiens
agggcctaaagacac

SEQ ID NO: 579670 - DNA, 15 bp, Homo sapiens
gggcctaaagacacc

SEQ ID NO: 579671 - DNA, 15 bp, Homo sapiens
ggcctaaagacacct

SEQ ID NO: 579672 - DNA, 15 bp, Homo sapiens
gcctaaagacacctc

SEQ ID NO: 579673 - DNA, 15 bp, Homo sapiens
cctaaagacacctct

SEQ ID NO: 579674 - DNA, 15 bp, Homo sapiens
ctaaagacacctctt

SEQ ID NO: 579675 - DNA, 15 bp, Homo sapiens
taaagacacctcttg

SEQ ID NO: 579676 - DNA, 15 bp, Homo sapiens
aaagacacctcttgt

SEQ ID NO: 579677 - DNA, 15 bp, Homo sapiens
aagacacctcttgtt

SEQ ID NO: 579678 - DNA, 15 bp, Homo sapiens
agacacctcttgtta

SEQ ID NO: 579679 - DNA, 15 bp, Homo sapiens
gacacctcttgttaa

SEQ ID NO: 579680 - DNA, 15 bp, Homo sapiens
acacctcttgttaac

SEQ ID NO: 579681 - DNA, 15 bp, Homo sapiens
cacctcttgttaact

SEQ ID NO: 579682 - DNA, 15 bp, Homo sapiens
acctcttgttaacta

SEQ ID NO: 579683 - DNA, 15 bp, Homo sapiens
cctcttgttaactaa

SEQ ID NO: 579684 - DNA, 15 bp, Homo sapiens
ctcttgttaactaat

SEQ ID NO: 579685 - DNA, 15 bp, Homo sapiens
tcttgttaactaata

SEQ ID NO: 579686 - DNA, 15 bp, Homo sapiens
cttgttaactaatat

SEQ ID NO: 579687 - DNA, 15 bp, Homo sapiens
ttgttaactaatatg

SEQ ID NO: 579688 - DNA, 15 bp, Homo sapiens
tgttaactaatatgg

SEQ ID NO: 579689 - DNA, 15 bp, Homo sapiens
gttaactaatatgga

SEQ ID NO: 579690 - DNA, 15 bp, Homo sapiens
ttaactaatatggag

SEQ ID NO: 579691 - DNA, 15 bp, Homo sapiens
taactaatatggaga

SEQ ID NO: 579692 - DNA, 15 bp, Homo sapiens
aactaatatggagaa

SEQ ID NO: 579693 - DNA, 15 bp, Homo sapiens
actaatatggagaaa

SEQ ID NO: 579694 - DNA, 15 bp, Homo sapiens
ctaatatggagaaaa

SEQ ID NO: 579695 - DNA, 15 bp, Homo sapiens
taatatggagaaaaa

SEQ ID NO: 579696 - DNA, 15 bp, Homo sapiens
aatatggagaaaaaa

SEQ ID NO: 579697 - DNA, 15 bp, Homo sapiens
atatggagaaaaaag

SEQ ID NO: 579698 - DNA, 15 bp, Homo sapiens
tatggagaaaaaaga

SEQ ID NO: 579699 - DNA, 15 bp, Homo sapiens
atggagaaaaaagag

SEQ ID NO: 579700 - DNA, 15 bp, Homo sapiens
tggagaaaaaagagt

SEQ ID NO: 579701 - DNA, 15 bp, Homo sapiens
ggagaaaaaagagtg

SEQ ID NO: 579702 - DNA, 15 bp, Homo sapiens
gagaaaaaagagtgc

SEQ ID NO: 579703 - DNA, 15 bp, Homo sapiens
agaaaaaagagtgcc

SEQ ID NO: 579704 - DNA, 15 bp, Homo sapiens
gaaaaaagagtgcct

SEQ ID NO: 579705 - DNA, 15 bp, Homo sapiens
aaaaaagagtgcctt

SEQ ID NO: 579706 - DNA, 15 bp, Homo sapiens
aaaaagagtgccttt

SEQ ID NO: 579707 - DNA, 15 bp, Homo sapiens
aaaagagtgcctttc

SEQ ID NO: 579708 - DNA, 15 bp, Homo sapiens
aaagagtgcctttcc

SEQ ID NO: 579709 - DNA, 15 bp, Homo sapiens
aagagtgcctttcca

SEQ ID NO: 579710 - DNA, 15 bp, Homo sapiens
agagtgcctttccac

SEQ ID NO: 579711 - DNA, 15 bp, Homo sapiens
gagtgcctttccaca

SEQ ID NO: 579712 - DNA, 15 bp, Homo sapiens
agtgcctttccacac

SEQ ID NO: 579713 - DNA, 15 bp, Homo sapiens
gtgcctttccacact

SEQ ID NO: 579714 - DNA, 15 bp, Homo sapiens
tgcctttccacactc

SEQ ID NO: 579715 - DNA, 15 bp, Homo sapiens
gcctttccacactct

SEQ ID NO: 579716 - DNA, 15 bp, Homo sapiens
cctttccacactctc

SEQ ID NO: 579717 - DNA, 15 bp, Homo sapiens
ctttccacactctcc

SEQ ID NO: 579718 - DNA, 15 bp, Homo sapiens
tttccacactctccc

SEQ ID NO: 579719 - DNA, 15 bp, Homo sapiens
ttccacactctccca

SEQ ID NO: 579720 - DNA, 15 bp, Homo sapiens
tccacactctcccac

SEQ ID NO: 579721 - DNA, 15 bp, Homo sapiens
ccacactctcccaca

SEQ ID NO: 579722 - DNA, 15 bp, Homo sapiens
cacactctcccacag

SEQ ID NO: 579723 - DNA, 15 bp, Homo sapiens
acactctcccacaga

SEQ ID NO: 579724 - DNA, 15 bp, Homo sapiens
cactctcccacagaa

SEQ ID NO: 579725 - DNA, 15 bp, Homo sapiens
actctcccacagaat

SEQ ID NO: 579726 - DNA, 15 bp, Homo sapiens
ctctcccacagaatg

SEQ ID NO: 579727 - DNA, 15 bp, Homo sapiens
tctcccacagaatgg

SEQ ID NO: 579728 - DNA, 15 bp, Homo sapiens
ctcccacagaatgga

SEQ ID NO: 579729 - DNA, 15 bp, Homo sapiens
tcccacagaatggag

SEQ ID NO: 579730 - DNA, 15 bp, Homo sapiens
cccacagaatggagg

SEQ ID NO: 579731 - DNA, 15 bp, Homo sapiens
ccacagaatggaggc

SEQ ID NO: 579732 - DNA, 15 bp, Homo sapiens
cacagaatggaggct

SEQ ID NO: 579733 - DNA, 15 bp, Homo sapiens
acagaatggaggctc

SEQ ID NO: 579734 - DNA, 15 bp, Homo sapiens
cagaatggaggctcc

SEQ ID NO: 579735 - DNA, 15 bp, Homo sapiens
agaatggaggctccc

SEQ ID NO: 579736 - DNA, 15 bp, Homo sapiens
gaatggaggctccct

SEQ ID NO: 579737 - DNA, 15 bp, Homo sapiens
aatggaggctcccta

SEQ ID NO: 579738 - DNA, 15 bp, Homo sapiens
atggaggctccctaa

SEQ ID NO: 579739 - DNA, 15 bp, Homo sapiens
tggaggctccctaac

SEQ ID NO: 579740 - DNA, 15 bp, Homo sapiens
ggaggctccctaact

SEQ ID NO: 579741 - DNA, 15 bp, Homo sapiens
gaggctccctaacta

SEQ ID NO: 579742 - DNA, 15 bp, Homo sapiens
aggctccctaactaa

SEQ ID NO: 579743 - DNA, 15 bp, Homo sapiens
ggctccctaactaac

SEQ ID NO: 579744 - DNA, 15 bp, Homo sapiens
gctccctaactaaca

SEQ ID NO: 579745 - DNA, 15 bp, Homo sapiens
ctccctaactaacac

SEQ ID NO: 579746 - DNA, 15 bp, Homo sapiens
tccctaactaacact

SEQ ID NO: 579747 - DNA, 15 bp, Homo sapiens
ccctaactaacactc

SEQ ID NO: 579748 - DNA, 15 bp, Homo sapiens
cctaactaacactca

SEQ ID NO: 579749 - DNA, 15 bp, Homo sapiens
ctaactaacactcaa

SEQ ID NO: 579750 - DNA, 15 bp, Homo sapiens
taactaacactcaaa

SEQ ID NO: 579751 - DNA, 15 bp, Homo sapiens
aactaacactcaaat

SEQ ID NO: 579752 - DNA, 15 bp, Homo sapiens
actaacactcaaatt

SEQ ID NO: 579753 - DNA, 15 bp, Homo sapiens
ctaacactcaaattt

SEQ ID NO: 579754 - DNA, 15 bp, Homo sapiens
taacactcaaatttg

SEQ ID NO: 579755 - DNA, 15 bp, Homo sapiens
aacactcaaatttgg

SEQ ID NO: 579756 - DNA, 15 bp, Homo sapiens
acactcaaatttggg

SEQ ID NO: 579757 - DNA, 15 bp, Homo sapiens
cactcaaatttgggg

SEQ ID NO: 579758 - DNA, 15 bp, Homo sapiens
actcaaatttggggt

SEQ ID NO: 579759 - DNA, 15 bp, Homo sapiens
ctcaaatttggggtt

SEQ ID NO: 579760 - DNA, 15 bp, Homo sapiens
tcaaatttggggttc

SEQ ID NO: 579761 - DNA, 15 bp, Homo sapiens
caaatttggggttca

SEQ ID NO: 579762 - DNA, 15 bp, Homo sapiens
aaatttggggttcag

SEQ ID NO: 579763 - DNA, 15 bp, Homo sapiens
aatttggggttcagc

SEQ ID NO: 579764 - DNA, 15 bp, Homo sapiens
atttggggttcagca

SEQ ID NO: 579765 - DNA, 15 bp, Homo sapiens
tttggggttcagcaa

SEQ ID NO: 579766 - DNA, 15 bp, Homo sapiens
ttggggttcagcaaa

SEQ ID NO: 579767 - DNA, 15 bp, Homo sapiens
tggggttcagcaaat

SEQ ID NO: 579768 - DNA, 15 bp, Homo sapiens
ggggttcagcaaatg

SEQ ID NO: 579769 - DNA, 15 bp, Homo sapiens
gggttcagcaaatga

SEQ ID NO: 579770 - DNA, 15 bp, Homo sapiens
ggttcagcaaatgaa

SEQ ID NO: 579771 - DNA, 15 bp, Homo sapiens
gttcagcaaatgaaa

SEQ ID NO: 579772 - DNA, 15 bp, Homo sapiens
ttcagcaaatgaaac

SEQ ID NO: 579773 - DNA, 15 bp, Homo sapiens
tcagcaaatgaaact

SEQ ID NO: 579774 - DNA, 15 bp, Homo sapiens
cagcaaatgaaacta

SEQ ID NO: 579775 - DNA, 15 bp, Homo sapiens
agcaaatgaaactaa

SEQ ID NO: 579776 - DNA, 15 bp, Homo sapiens
gcaaatgaaactaaa

SEQ ID NO: 579777 - DNA, 15 bp, Homo sapiens
caaatgaaactaaat

SEQ ID NO: 579778 - DNA, 15 bp, Homo sapiens
aaatgaaactaaata

SEQ ID NO: 579779 - DNA, 15 bp, Homo sapiens
aatgaaactaaatat

SEQ ID NO: 579780 - DNA, 15 bp, Homo sapiens
atgaaactaaatatc

SEQ ID NO: 579781 - DNA, 15 bp, Homo sapiens
tgaaactaaatatca

SEQ ID NO: 579782 - DNA, 15 bp, Homo sapiens
gaaactaaatatcaa

SEQ ID NO: 579783 - DNA, 15 bp, Homo sapiens
aaactaaatatcaac

SEQ ID NO: 579784 - DNA, 15 bp, Homo sapiens
aactaaatatcaact

SEQ ID NO: 579785 - DNA, 15 bp, Homo sapiens
actaaatatcaactg

SEQ ID NO: 579786 - DNA, 15 bp, Homo sapiens
ctaaatatcaactga

SEQ ID NO: 579787 - DNA, 15 bp, Homo sapiens
taaatatcaactgac

SEQ ID NO: 579788 - DNA, 15 bp, Homo sapiens
ttaggctttggatat

SEQ ID NO: 579789 - DNA, 15 bp, Homo sapiens
taggctttggatata

SEQ ID NO: 579790 - DNA, 15 bp, Homo sapiens
aggctttggatatac

SEQ ID NO: 579791 - DNA, 15 bp, Homo sapiens
ggctttggatataca

SEQ ID NO: 579792 - DNA, 15 bp, Homo sapiens
gctttggatatacag

SEQ ID NO: 579793 - DNA, 15 bp, Homo sapiens
ctttggatatacagc

SEQ ID NO: 579794 - DNA, 15 bp, Homo sapiens
tttggatatacagct

SEQ ID NO: 579795 - DNA, 15 bp, Homo sapiens
ttggatatacagctg

SEQ ID NO: 579796 - DNA, 15 bp, Homo sapiens
tggatatacagctga

SEQ ID NO: 579797 - DNA, 15 bp, Homo sapiens
ggatatacagctgac

SEQ ID NO: 579798 - DNA, 15 bp, Homo sapiens
gatatacagctgacc

SEQ ID NO: 579799 - DNA, 15 bp, Homo sapiens
atatacagctgaccc

SEQ ID NO: 579800 - DNA, 15 bp, Homo sapiens
tatacagctgaccct

SEQ ID NO: 579801 - DNA, 15 bp, Homo sapiens
atacagctgaccctc

SEQ ID NO: 579802 - DNA, 15 bp, Homo sapiens
tacagctgaccctcc

SEQ ID NO: 579803 - DNA, 15 bp, Homo sapiens
acagctgaccctcca

SEQ ID NO: 579804 - DNA, 15 bp, Homo sapiens
cagctgaccctccat

SEQ ID NO: 579805 - DNA, 15 bp, Homo sapiens
agctgaccctccata

SEQ ID NO: 579806 - DNA, 15 bp, Homo sapiens
gctgaccctccatat

SEQ ID NO: 579807 - DNA, 15 bp, Homo sapiens
ctgaccctccatatc

SEQ ID NO: 579808 - DNA, 15 bp, Homo sapiens
tgaccctccatatcc

SEQ ID NO: 579809 - DNA, 15 bp, Homo sapiens
gaccctccatatcca

SEQ ID NO: 579810 - DNA, 15 bp, Homo sapiens
accctccatatccat

SEQ ID NO: 579811 - DNA, 15 bp, Homo sapiens
ccctccatatccatg

SEQ ID NO: 579812 - DNA, 15 bp, Homo sapiens
cctccatatccatgg

SEQ ID NO: 579813 - DNA, 15 bp, Homo sapiens
ctccatatccatggg

SEQ ID NO: 579814 - DNA, 15 bp, Homo sapiens
tccatatccatgggt

SEQ ID NO: 579815 - DNA, 15 bp, Homo sapiens
ccatatccatgggtt

SEQ ID NO: 579816 - DNA, 15 bp, Homo sapiens
catatccatgggttc

SEQ ID NO: 579817 - DNA, 15 bp, Homo sapiens
atatccatgggttct

SEQ ID NO: 579818 - DNA, 15 bp, Homo sapiens
tatccatgggttcta

SEQ ID NO: 579819 - DNA, 15 bp, Homo sapiens
atccatgggttctac

SEQ ID NO: 579820 - DNA, 15 bp, Homo sapiens
tccatgggttctaca

SEQ ID NO: 579821 - DNA, 15 bp, Homo sapiens
ccatgggttctacat

SEQ ID NO: 579822 - DNA, 15 bp, Homo sapiens
catgggttctacatc

SEQ ID NO: 579823 - DNA, 15 bp, Homo sapiens
atgggttctacatcc

SEQ ID NO: 579824 - DNA, 15 bp, Homo sapiens
tgggttctacatcca

SEQ ID NO: 579825 - DNA, 15 bp, Homo sapiens
gggttctacatccat

SEQ ID NO: 579826 - DNA, 15 bp, Homo sapiens
ggttctacatccatg

SEQ ID NO: 579827 - DNA, 15 bp, Homo sapiens
gttctacatccatgg

SEQ ID NO: 579828 - DNA, 15 bp, Homo sapiens
ttctacatccatgga

SEQ ID NO: 579829 - DNA, 15 bp, Homo sapiens
tctacatccatggat

SEQ ID NO: 579830 - DNA, 15 bp, Homo sapiens
ctacatccatggatt

SEQ ID NO: 579831 - DNA, 15 bp, Homo sapiens
tacatccatggattt

SEQ ID NO: 579832 - DNA, 15 bp, Homo sapiens
acatccatggattta

SEQ ID NO: 579833 - DNA, 15 bp, Homo sapiens
catccatggatttaa

SEQ ID NO: 579834 - DNA, 15 bp, Homo sapiens
atccatggatttaac

SEQ ID NO: 579835 - DNA, 15 bp, Homo sapiens
tccatggatttaacc

SEQ ID NO: 579836 - DNA, 15 bp, Homo sapiens
ccatggatttaacca

SEQ ID NO: 579837 - DNA, 15 bp, Homo sapiens
catggatttaaccaa

SEQ ID NO: 579838 - DNA, 15 bp, Homo sapiens
atggatttaaccaac

SEQ ID NO: 579839 - DNA, 15 bp, Homo sapiens
tggatttaaccaacc

SEQ ID NO: 579840 - DNA, 15 bp, Homo sapiens
ggatttaaccaacca

SEQ ID NO: 579841 - DNA, 15 bp, Homo sapiens
gatttaaccaaccat

SEQ ID NO: 579842 - DNA, 15 bp, Homo sapiens
atttaaccaaccatg

SEQ ID NO: 579843 - DNA, 15 bp, Homo sapiens
tttaaccaaccatgg

SEQ ID NO: 579844 - DNA, 15 bp, Homo sapiens
ttaaccaaccatggg

SEQ ID NO: 579845 - DNA, 15 bp, Homo sapiens
taaccaaccatgggt

SEQ ID NO: 579846 - DNA, 15 bp, Homo sapiens
aaccaaccatgggtc

SEQ ID NO: 579847 - DNA, 15 bp, Homo sapiens
accaaccatgggtca

SEQ ID NO: 579848 - DNA, 15 bp, Homo sapiens
ccaaccatgggtcaa

SEQ ID NO: 579849 - DNA, 15 bp, Homo sapiens
caaccatgggtcaaa

SEQ ID NO: 579850 - DNA, 15 bp, Homo sapiens
aaccatgggtcaaaa

SEQ ID NO: 579851 - DNA, 15 bp, Homo sapiens
accatgggtcaaaaa

SEQ ID NO: 579852 - DNA, 15 bp, Homo sapiens
ccatgggtcaaaaat

SEQ ID NO: 579853 - DNA, 15 bp, Homo sapiens
catgggtcaaaaata

SEQ ID NO: 579854 - DNA, 15 bp, Homo sapiens
atgggtcaaaaatat

SEQ ID NO: 579855 - DNA, 15 bp, Homo sapiens
tgggtcaaaaatatt

SEQ ID NO: 579856 - DNA, 15 bp, Homo sapiens
gggtcaaaaatattc

SEQ ID NO: 579857 - DNA, 15 bp, Homo sapiens
ggtcaaaaatattca

SEQ ID NO: 579858 - DNA, 15 bp, Homo sapiens
gtcaaaaatattcaa

SEQ ID NO: 579859 - DNA, 15 bp, Homo sapiens
tcaaaaatattcaaa

SEQ ID NO: 579860 - DNA, 15 bp, Homo sapiens
caaaaatattcaaag

SEQ ID NO: 579861 - DNA, 15 bp, Homo sapiens
aaaaatattcaaaga

SEQ ID NO: 579862 - DNA, 15 bp, Homo sapiens
aaaatattcaaagaa

SEQ ID NO: 579863 - DNA, 15 bp, Homo sapiens
aaatattcaaagaag

SEQ ID NO: 579864 - DNA, 15 bp, Homo sapiens
aatattcaaagaaga

SEQ ID NO: 579865 - DNA, 15 bp, Homo sapiens
atattcaaagaagaa

SEQ ID NO: 579866 - DNA, 15 bp, Homo sapiens
tattcaaagaagaaa

SEQ ID NO: 579867 - DNA, 15 bp, Homo sapiens
attcaaagaagaaaa

SEQ ID NO: 579868 - DNA, 15 bp, Homo sapiens
ttcaaagaagaaaaa

SEQ ID NO: 579869 - DNA, 15 bp, Homo sapiens
tcaaagaagaaaaat

SEQ ID NO: 579870 - DNA, 15 bp, Homo sapiens
caaagaagaaaaatg

SEQ ID NO: 579871 - DNA, 15 bp, Homo sapiens
aaagaagaaaaatga

SEQ ID NO: 579872 - DNA, 15 bp, Homo sapiens
aagaagaaaaatgaa

SEQ ID NO: 579873 - DNA, 15 bp, Homo sapiens
agaagaaaaatgaat

SEQ ID NO: 579874 - DNA, 15 bp, Homo sapiens
gaagaaaaatgaatg

SEQ ID NO: 579875 - DNA, 15 bp, Homo sapiens
aagaaaaatgaatgg

SEQ ID NO: 579876 - DNA, 15 bp, Homo sapiens
agaaaaatgaatggt

SEQ ID NO: 579877 - DNA, 15 bp, Homo sapiens
gaaaaatgaatggtt

SEQ ID NO: 579878 - DNA, 15 bp, Homo sapiens
aaaaatgaatggttc

SEQ ID NO: 579879 - DNA, 15 bp, Homo sapiens
aaaatgaatggttcc

SEQ ID NO: 579880 - DNA, 15 bp, Homo sapiens
aaatgaatggttcca

SEQ ID NO: 579881 - DNA, 15 bp, Homo sapiens
aatgaatggttccat

SEQ ID NO: 579882 - DNA, 15 bp, Homo sapiens
atgaatggttccatc

SEQ ID NO: 579883 - DNA, 15 bp, Homo sapiens
tgaatggttccatct

SEQ ID NO: 579884 - DNA, 15 bp, Homo sapiens
gaatggttccatctg

SEQ ID NO: 579885 - DNA, 15 bp, Homo sapiens
aatggttccatctgt

SEQ ID NO: 579886 - DNA, 15 bp, Homo sapiens
atggttccatctgta

SEQ ID NO: 579887 - DNA, 15 bp, Homo sapiens
tggttccatctgtat

SEQ ID NO: 579888 - DNA, 15 bp, Homo sapiens
ggttccatctgtatc

SEQ ID NO: 579889 - DNA, 15 bp, Homo sapiens
gttccatctgtatcg

SEQ ID NO: 579890 - DNA, 15 bp, Homo sapiens
ttccatctgtatcga

SEQ ID NO: 579891 - DNA, 15 bp, Homo sapiens
tccatctgtatcgaa

SEQ ID NO: 579892 - DNA, 15 bp, Homo sapiens
ccatctgtatcgaac

SEQ ID NO: 579893 - DNA, 15 bp, Homo sapiens
catctgtatcgaaca

SEQ ID NO: 579894 - DNA, 15 bp, Homo sapiens
atctgtatcgaacat

SEQ ID NO: 579895 - DNA, 15 bp, Homo sapiens
tctgtatcgaacatg

SEQ ID NO: 579896 - DNA, 15 bp, Homo sapiens
ctgtatcgaacatgt

SEQ ID NO: 579897 - DNA, 15 bp, Homo sapiens
tgtatcgaacatgta

SEQ ID NO: 579898 - DNA, 15 bp, Homo sapiens
gtatcgaacatgtat

SEQ ID NO: 579899 - DNA, 15 bp, Homo sapiens
tatcgaacatgtata

SEQ ID NO: 579900 - DNA, 15 bp, Homo sapiens
atcgaacatgtatag

SEQ ID NO: 579901 - DNA, 15 bp, Homo sapiens
tcgaacatgtataga

SEQ ID NO: 579902 - DNA, 15 bp, Homo sapiens
cgaacatgtatagac

SEQ ID NO: 579903 - DNA, 15 bp, Homo sapiens
gaacatgtatagaca

SEQ ID NO: 579904 - DNA, 15 bp, Homo sapiens
aacatgtatagacat

SEQ ID NO: 579905 - DNA, 15 bp, Homo sapiens
acatgtatagacatt

SEQ ID NO: 579906 - DNA, 15 bp, Homo sapiens
catgtatagacattt

SEQ ID NO: 579907 - DNA, 15 bp, Homo sapiens
atgtatagacatttt

SEQ ID NO: 579908 - DNA, 15 bp, Homo sapiens
tgtatagacattttt

SEQ ID NO: 579909 - DNA, 15 bp, Homo sapiens
gtatagacatttttc

SEQ ID NO: 579910 - DNA, 15 bp, Homo sapiens
tatagacatttttcc

SEQ ID NO: 579911 - DNA, 15 bp, Homo sapiens
atagacatttttcct

SEQ ID NO: 579912 - DNA, 15 bp, Homo sapiens
tagacatttttcctt

SEQ ID NO: 579913 - DNA, 15 bp, Homo sapiens
agacatttttccttg

SEQ ID NO: 579914 - DNA, 15 bp, Homo sapiens
gacatttttccttgt

SEQ ID NO: 579915 - DNA, 15 bp, Homo sapiens
acatttttccttgtc

SEQ ID NO: 579916 - DNA, 15 bp, Homo sapiens
catttttccttgtca

SEQ ID NO: 579917 - DNA, 15 bp, Homo sapiens
atttttccttgtcat

SEQ ID NO: 579918 - DNA, 15 bp, Homo sapiens
tttttccttgtcatt

SEQ ID NO: 579919 - DNA, 15 bp, Homo sapiens
ttttccttgtcatta

SEQ ID NO: 579920 - DNA, 15 bp, Homo sapiens
tttccttgtcattat

SEQ ID NO: 579921 - DNA, 15 bp, Homo sapiens
ttccttgtcattatt

SEQ ID NO: 579922 - DNA, 15 bp, Homo sapiens
tccttgtcattattt

SEQ ID NO: 579923 - DNA, 15 bp, Homo sapiens
ccttgtcattatttc

SEQ ID NO: 579924 - DNA, 15 bp, Homo sapiens
cttgtcattatttcc

SEQ ID NO: 579925 - DNA, 15 bp, Homo sapiens
ttgtcattatttcct

SEQ ID NO: 579926 - DNA, 15 bp, Homo sapiens
tgtcattatttccta

SEQ ID NO: 579927 - DNA, 15 bp, Homo sapiens
gtcattatttcctaa

SEQ ID NO: 579928 - DNA, 15 bp, Homo sapiens
tcattatttcctaaa

SEQ ID NO: 579929 - DNA, 15 bp, Homo sapiens
cattatttcctaaac

SEQ ID NO: 579930 - DNA, 15 bp, Homo sapiens
attatttcctaaaca

SEQ ID NO: 579931 - DNA, 15 bp, Homo sapiens
ttatttcctaaacaa

SEQ ID NO: 579932 - DNA, 15 bp, Homo sapiens
tatttcctaaacaat

SEQ ID NO: 579933 - DNA, 15 bp, Homo sapiens
atttcctaaacaata

SEQ ID NO: 579934 - DNA, 15 bp, Homo sapiens
tttcctaaacaatac

SEQ ID NO: 579935 - DNA, 15 bp, Homo sapiens
ttcctaaacaataca

SEQ ID NO: 579936 - DNA, 15 bp, Homo sapiens
tcctaaacaatacag

SEQ ID NO: 579937 - DNA, 15 bp, Homo sapiens
cctaaacaatacagt

SEQ ID NO: 579938 - DNA, 15 bp, Homo sapiens
ctaaacaatacagta

SEQ ID NO: 579939 - DNA, 15 bp, Homo sapiens
taaacaatacagtat

SEQ ID NO: 579940 - DNA, 15 bp, Homo sapiens
aaacaatacagtata

SEQ ID NO: 579941 - DNA, 15 bp, Homo sapiens
aacaatacagtataa

SEQ ID NO: 579942 - DNA, 15 bp, Homo sapiens
acaatacagtataac

SEQ ID NO: 579943 - DNA, 15 bp, Homo sapiens
caatacagtataaca

SEQ ID NO: 579944 - DNA, 15 bp, Homo sapiens
aatacagtataacaa

SEQ ID NO: 579945 - DNA, 15 bp, Homo sapiens
atacagtataacaac

SEQ ID NO: 579946 - DNA, 15 bp, Homo sapiens
tacagtataacaact

SEQ ID NO: 579947 - DNA, 15 bp, Homo sapiens
acagtataacaacta

SEQ ID NO: 579948 - DNA, 15 bp, Homo sapiens
cagtataacaactat

SEQ ID NO: 579949 - DNA, 15 bp, Homo sapiens
agtataacaactatt

SEQ ID NO: 579950 - DNA, 15 bp, Homo sapiens
gtataacaactattt

SEQ ID NO: 579951 - DNA, 15 bp, Homo sapiens
tataacaactatttg

SEQ ID NO: 579952 - DNA, 15 bp, Homo sapiens
ataacaactatttgc

SEQ ID NO: 579953 - DNA, 15 bp, Homo sapiens
taacaactatttgca

SEQ ID NO: 579954 - DNA, 15 bp, Homo sapiens
aacaactatttgcat

SEQ ID NO: 579955 - DNA, 15 bp, Homo sapiens
acaactatttgcata

SEQ ID NO: 579956 - DNA, 15 bp, Homo sapiens
caactatttgcatag

SEQ ID NO: 579957 - DNA, 15 bp, Homo sapiens
aactatttgcatagc

SEQ ID NO: 579958 - DNA, 15 bp, Homo sapiens
actatttgcatagca

SEQ ID NO: 579959 - DNA, 15 bp, Homo sapiens
ctatttgcatagcat

SEQ ID NO: 579960 - DNA, 15 bp, Homo sapiens
tatttgcatagcatt

SEQ ID NO: 579961 - DNA, 15 bp, Homo sapiens
atttgcatagcattt

SEQ ID NO: 579962 - DNA, 15 bp, Homo sapiens
tttgcatagcattta

SEQ ID NO: 579963 - DNA, 15 bp, Homo sapiens
ttgcatagcatttat

SEQ ID NO: 579964 - DNA, 15 bp, Homo sapiens
tgcatagcatttata

SEQ ID NO: 579965 - DNA, 15 bp, Homo sapiens
gcatagcatttatac

SEQ ID NO: 579966 - DNA, 15 bp, Homo sapiens
catagcatttatact

SEQ ID NO: 579967 - DNA, 15 bp, Homo sapiens
atagcatttatactg

SEQ ID NO: 579968 - DNA, 15 bp, Homo sapiens
tagcatttatactgt

SEQ ID NO: 579969 - DNA, 15 bp, Homo sapiens
agcatttatactgta

SEQ ID NO: 579970 - DNA, 15 bp, Homo sapiens
gcatttatactgtat

SEQ ID NO: 579971 - DNA, 15 bp, Homo sapiens
catttatactgtatt

SEQ ID NO: 579972 - DNA, 15 bp, Homo sapiens
atttatactgtatta

SEQ ID NO: 579973 - DNA, 15 bp, Homo sapiens
tttatactgtattag

SEQ ID NO: 579974 - DNA, 15 bp, Homo sapiens
ttatactgtattagt

SEQ ID NO: 579975 - DNA, 15 bp, Homo sapiens
tatactgtattagtt

SEQ ID NO: 579976 - DNA, 15 bp, Homo sapiens
atactgtattagtta

SEQ ID NO: 579977 - DNA, 15 bp, Homo sapiens
tactgtattagttat

SEQ ID NO: 579978 - DNA, 15 bp, Homo sapiens
actgtattagttatc

SEQ ID NO: 579979 - DNA, 15 bp, Homo sapiens
ctgtattagttatca

SEQ ID NO: 579980 - DNA, 15 bp, Homo sapiens
tgtattagttatcat

SEQ ID NO: 579981 - DNA, 15 bp, Homo sapiens
gtattagttatcata

SEQ ID NO: 579982 - DNA, 15 bp, Homo sapiens
tattagttatcataa

SEQ ID NO: 579983 - DNA, 15 bp, Homo sapiens
attagttatcataag

SEQ ID NO: 579984 - DNA, 15 bp, Homo sapiens
ttagttatcataagt

SEQ ID NO: 579985 - DNA, 15 bp, Homo sapiens
tagttatcataagta

SEQ ID NO: 579986 - DNA, 15 bp, Homo sapiens
agttatcataagtaa

SEQ ID NO: 579987 - DNA, 15 bp, Homo sapiens
gttatcataagtaat

SEQ ID NO: 579988 - DNA, 15 bp, Homo sapiens
ttatcataagtaatc

SEQ ID NO: 579989 - DNA, 15 bp, Homo sapiens
tatcataagtaatct

SEQ ID NO: 579990 - DNA, 15 bp, Homo sapiens
atcataagtaatcta

SEQ ID NO: 579991 - DNA, 15 bp, Homo sapiens
tcataagtaatctag

SEQ ID NO: 579992 - DNA, 15 bp, Homo sapiens
cataagtaatctaga

SEQ ID NO: 579993 - DNA, 15 bp, Homo sapiens
ataagtaatctagag

SEQ ID NO: 579994 - DNA, 15 bp, Homo sapiens
taagtaatctagaga

SEQ ID NO: 579995 - DNA, 15 bp, Homo sapiens
aagtaatctagagat

SEQ ID NO: 579996 - DNA, 15 bp, Homo sapiens
agtaatctagagatg

SEQ ID NO: 579997 - DNA, 15 bp, Homo sapiens
gtaatctagagatga

SEQ ID NO: 579998 - DNA, 15 bp, Homo sapiens
taatctagagatgat

SEQ ID NO: 579999 - DNA, 15 bp, Homo sapiens
aatctagagatgatt

SEQ ID NO: 580000 - DNA, 15 bp, Homo sapiens
atctagagatgattt

SEQ ID NO: 580001 - DNA, 15 bp, Homo sapiens
tctagagatgattta

SEQ ID NO: 580002 - DNA, 15 bp, Homo sapiens
ctagagatgatttaa

SEQ ID NO: 580003 - DNA, 15 bp, Homo sapiens
tagagatgatttaaa

SEQ ID NO: 580004 - DNA, 15 bp, Homo sapiens
agagatgatttaaag

SEQ ID NO: 580005 - DNA, 15 bp, Homo sapiens
gagatgatttaaagt

SEQ ID NO: 580006 - DNA, 15 bp, Homo sapiens
agatgatttaaagta

SEQ ID NO: 580007 - DNA, 15 bp, Homo sapiens
gatgatttaaagtat

SEQ ID NO: 580008 - DNA, 15 bp, Homo sapiens
atgatttaaagtata

SEQ ID NO: 580009 - DNA, 15 bp, Homo sapiens
tgatttaaagtatat

SEQ ID NO: 580010 - DNA, 15 bp, Homo sapiens
gatttaaagtatatg

SEQ ID NO: 580011 - DNA, 15 bp, Homo sapiens
atttaaagtatatgg

SEQ ID NO: 580012 - DNA, 15 bp, Homo sapiens
tttaaagtatatgga

SEQ ID NO: 580013 - DNA, 15 bp, Homo sapiens
ttaaagtatatggaa

SEQ ID NO: 580014 - DNA, 15 bp, Homo sapiens
taaagtatatggaag

SEQ ID NO: 580015 - DNA, 15 bp, Homo sapiens
aaagtatatggaagg

SEQ ID NO: 580016 - DNA, 15 bp, Homo sapiens
aagtatatggaagga

SEQ ID NO: 580017 - DNA, 15 bp, Homo sapiens
agtatatggaaggat

SEQ ID NO: 580018 - DNA, 15 bp, Homo sapiens
gtatatggaaggatg

SEQ ID NO: 580019 - DNA, 15 bp, Homo sapiens
tatatggaaggatgt

SEQ ID NO: 580020 - DNA, 15 bp, Homo sapiens
atatggaaggatgtg

SEQ ID NO: 580021 - DNA, 15 bp, Homo sapiens
tatggaaggatgtgc

SEQ ID NO: 580022 - DNA, 15 bp, Homo sapiens
atggaaggatgtgca

SEQ ID NO: 580023 - DNA, 15 bp, Homo sapiens
tggaaggatgtgcac

SEQ ID NO: 580024 - DNA, 15 bp, Homo sapiens
ggaaggatgtgcaca

SEQ ID NO: 580025 - DNA, 15 bp, Homo sapiens
gaaggatgtgcacag

SEQ ID NO: 580026 - DNA, 15 bp, Homo sapiens
aaggatgtgcacagg

SEQ ID NO: 580027 - DNA, 15 bp, Homo sapiens
aggatgtgcacaggt

SEQ ID NO: 580028 - DNA, 15 bp, Homo sapiens
ggatgtgcacaggtt

SEQ ID NO: 580029 - DNA, 15 bp, Homo sapiens
gatgtgcacaggtta

SEQ ID NO: 580030 - DNA, 15 bp, Homo sapiens
atgtgcacaggttat

SEQ ID NO: 580031 - DNA, 15 bp, Homo sapiens
tgtgcacaggttatg

SEQ ID NO: 580032 - DNA, 15 bp, Homo sapiens
gtgcacaggttatgc

SEQ ID NO: 580033 - DNA, 15 bp, Homo sapiens
tgcacaggttatgca

SEQ ID NO: 580034 - DNA, 15 bp, Homo sapiens
gcacaggttatgcaa

SEQ ID NO: 580035 - DNA, 15 bp, Homo sapiens
cacaggttatgcaaa

SEQ ID NO: 580036 - DNA, 15 bp, Homo sapiens
acaggttatgcaaac

SEQ ID NO: 580037 - DNA, 15 bp, Homo sapiens
caggttatgcaaaca

SEQ ID NO: 580038 - DNA, 15 bp, Homo sapiens
aggttatgcaaacac

SEQ ID NO: 580039 - DNA, 15 bp, Homo sapiens
ggttatgcaaacact

SEQ ID NO: 580040 - DNA, 15 bp, Homo sapiens
gttatgcaaacacta

SEQ ID NO: 580041 - DNA, 15 bp, Homo sapiens
ttatgcaaacactat

SEQ ID NO: 580042 - DNA, 15 bp, Homo sapiens
tatgcaaacactatg

SEQ ID NO: 580043 - DNA, 15 bp, Homo sapiens
atgcaaacactatgg

SEQ ID NO: 580044 - DNA, 15 bp, Homo sapiens
tgcaaacactatggc

SEQ ID NO: 580045 - DNA, 15 bp, Homo sapiens
gcaaacactatggca

SEQ ID NO: 580046 - DNA, 15 bp, Homo sapiens
caaacactatggcat

SEQ ID NO: 580047 - DNA, 15 bp, Homo sapiens
aaacactatggcatt

SEQ ID NO: 580048 - DNA, 15 bp, Homo sapiens
aacactatggcattt

SEQ ID NO: 580049 - DNA, 15 bp, Homo sapiens
acactatggcatttt

SEQ ID NO: 580050 - DNA, 15 bp, Homo sapiens
cactatggcatttta

SEQ ID NO: 580051 - DNA, 15 bp, Homo sapiens
actatggcattttat

SEQ ID NO: 580052 - DNA, 15 bp, Homo sapiens
ctatggcattttata

SEQ ID NO: 580053 - DNA, 15 bp, Homo sapiens
tatggcattttatat

SEQ ID NO: 580054 - DNA, 15 bp, Homo sapiens
atggcattttatata

SEQ ID NO: 580055 - DNA, 15 bp, Homo sapiens
tggcattttatataa

SEQ ID NO: 580056 - DNA, 15 bp, Homo sapiens
ggcattttatataag

SEQ ID NO: 580057 - DNA, 15 bp, Homo sapiens
gcattttatataagg

SEQ ID NO: 580058 - DNA, 15 bp, Homo sapiens
cattttatataagga

SEQ ID NO: 580059 - DNA, 15 bp, Homo sapiens
attttatataaggaa

SEQ ID NO: 580060 - DNA, 15 bp, Homo sapiens
ttttatataaggaac

SEQ ID NO: 580061 - DNA, 15 bp, Homo sapiens
tttatataaggaacg

SEQ ID NO: 580062 - DNA, 15 bp, Homo sapiens
ttatataaggaacgt

SEQ ID NO: 580063 - DNA, 15 bp, Homo sapiens
tatataaggaacgtg

SEQ ID NO: 580064 - DNA, 15 bp, Homo sapiens
atataaggaacgtga

SEQ ID NO: 580065 - DNA, 15 bp, Homo sapiens
tataaggaacgtgag

SEQ ID NO: 580066 - DNA, 15 bp, Homo sapiens
ataaggaacgtgagc

SEQ ID NO: 580067 - DNA, 15 bp, Homo sapiens
taaggaacgtgagca

SEQ ID NO: 580068 - DNA, 15 bp, Homo sapiens
aaggaacgtgagcat

SEQ ID NO: 580069 - DNA, 15 bp, Homo sapiens
aggaacgtgagcatc

SEQ ID NO: 580070 - DNA, 15 bp, Homo sapiens
ggaacgtgagcatct

SEQ ID NO: 580071 - DNA, 15 bp, Homo sapiens
gaacgtgagcatctg

SEQ ID NO: 580072 - DNA, 15 bp, Homo sapiens
aacgtgagcatctgt

SEQ ID NO: 580073 - DNA, 15 bp, Homo sapiens
acgtgagcatctgtg

SEQ ID NO: 580074 - DNA, 15 bp, Homo sapiens
cgtgagcatctgtgg

SEQ ID NO: 580075 - DNA, 15 bp, Homo sapiens
gtgagcatctgtgga

SEQ ID NO: 580076 - DNA, 15 bp, Homo sapiens
tgagcatctgtggat

SEQ ID NO: 580077 - DNA, 15 bp, Homo sapiens
gagcatctgtggatt

SEQ ID NO: 580078 - DNA, 15 bp, Homo sapiens
agcatctgtggattt

SEQ ID NO: 580079 - DNA, 15 bp, Homo sapiens
gcatctgtggatttt

SEQ ID NO: 580080 - DNA, 15 bp, Homo sapiens
catctgtggattttg

SEQ ID NO: 580081 - DNA, 15 bp, Homo sapiens
atctgtggattttgg

SEQ ID NO: 580082 - DNA, 15 bp, Homo sapiens
tctgtggattttggt

SEQ ID NO: 580083 - DNA, 15 bp, Homo sapiens
ctgtggattttggta

SEQ ID NO: 580084 - DNA, 15 bp, Homo sapiens
tgtggattttggtat

SEQ ID NO: 580085 - DNA, 15 bp, Homo sapiens
gtggattttggtatc

SEQ ID NO: 580086 - DNA, 15 bp, Homo sapiens
tggattttggtatcc

SEQ ID NO: 580087 - DNA, 15 bp, Homo sapiens
ggattttggtatcca

SEQ ID NO: 580088 - DNA, 15 bp, Homo sapiens
gattttggtatccag

SEQ ID NO: 580089 - DNA, 15 bp, Homo sapiens
attttggtatccaga

SEQ ID NO: 580090 - DNA, 15 bp, Homo sapiens
ttttggtatccagag

SEQ ID NO: 580091 - DNA, 15 bp, Homo sapiens
tttggtatccagaga

SEQ ID NO: 580092 - DNA, 15 bp, Homo sapiens
ttggtatccagagag

SEQ ID NO: 580093 - DNA, 15 bp, Homo sapiens
tggtatccagagagg

SEQ ID NO: 580094 - DNA, 15 bp, Homo sapiens
ggtatccagagaggg

SEQ ID NO: 580095 - DNA, 15 bp, Homo sapiens
gtatccagagagggt

SEQ ID NO: 580096 - DNA, 15 bp, Homo sapiens
tatccagagagggtc

SEQ ID NO: 580097 - DNA, 15 bp, Homo sapiens
atccagagagggtcc

SEQ ID NO: 580098 - DNA, 15 bp, Homo sapiens
tccagagagggtcct

SEQ ID NO: 580099 - DNA, 15 bp, Homo sapiens
ccagagagggtcctg

SEQ ID NO: 580100 - DNA, 15 bp, Homo sapiens
cagagagggtcctgg

SEQ ID NO: 580101 - DNA, 15 bp, Homo sapiens
agagagggtcctgga

SEQ ID NO: 580102 - DNA, 15 bp, Homo sapiens
gagagggtcctggaa

SEQ ID NO: 580103 - DNA, 15 bp, Homo sapiens
agagggtcctggaac

SEQ ID NO: 580104 - DNA, 15 bp, Homo sapiens
gagggtcctggaact

SEQ ID NO: 580105 - DNA, 15 bp, Homo sapiens
agggtcctggaacta

SEQ ID NO: 580106 - DNA, 15 bp, Homo sapiens
gggtcctggaactaa

SEQ ID NO: 580107 - DNA, 15 bp, Homo sapiens
ggtcctggaactaat

SEQ ID NO: 580108 - DNA, 15 bp, Homo sapiens
gtcctggaactaatc

SEQ ID NO: 580109 - DNA, 15 bp, Homo sapiens
tcctggaactaatcc

SEQ ID NO: 580110 - DNA, 15 bp, Homo sapiens
cctggaactaatccc

SEQ ID NO: 580111 - DNA, 15 bp, Homo sapiens
ctggaactaatccct

SEQ ID NO: 580112 - DNA, 15 bp, Homo sapiens
tggaactaatccctc

SEQ ID NO: 580113 - DNA, 15 bp, Homo sapiens
ggaactaatccctca

SEQ ID NO: 580114 - DNA, 15 bp, Homo sapiens
gaactaatccctcat

SEQ ID NO: 580115 - DNA, 15 bp, Homo sapiens
aactaatccctcatg

SEQ ID NO: 580116 - DNA, 15 bp, Homo sapiens
actaatccctcatga

SEQ ID NO: 580117 - DNA, 15 bp, Homo sapiens
ctaatccctcatgaa

SEQ ID NO: 580118 - DNA, 15 bp, Homo sapiens
taatccctcatgaat

SEQ ID NO: 580119 - DNA, 15 bp, Homo sapiens
aatccctcatgaata

SEQ ID NO: 580120 - DNA, 15 bp, Homo sapiens
atccctcatgaatac

SEQ ID NO: 580121 - DNA, 15 bp, Homo sapiens
tccctcatgaatacc

SEQ ID NO: 580122 - DNA, 15 bp, Homo sapiens
ccctcatgaatacca

SEQ ID NO: 580123 - DNA, 15 bp, Homo sapiens
cctcatgaataccaa

SEQ ID NO: 580124 - DNA, 15 bp, Homo sapiens
ctcatgaataccaag

SEQ ID NO: 580125 - DNA, 15 bp, Homo sapiens
tcatgaataccaagg

SEQ ID NO: 580126 - DNA, 15 bp, Homo sapiens
catgaataccaagga

SEQ ID NO: 580127 - DNA, 15 bp, Homo sapiens
atgaataccaaggac

SEQ ID NO: 580128 - DNA, 15 bp, Homo sapiens
tgaataccaaggaca

SEQ ID NO: 580129 - DNA, 15 bp, Homo sapiens
gaataccaaggacaa

SEQ ID NO: 580130 - DNA, 15 bp, Homo sapiens
aataccaaggacaac

SEQ ID NO: 580131 - DNA, 15 bp, Homo sapiens
ataccaaggacaact

SEQ ID NO: 580132 - DNA, 15 bp, Homo sapiens
taccaaggacaactg

SEQ ID NO: 580133 - DNA, 15 bp, Homo sapiens
accaaggacaactgt

SEQ ID NO: 580134 - DNA, 15 bp, Homo sapiens
ccaaggacaactgta

SEQ ID NO: 580135 - DNA, 15 bp, Homo sapiens
caaggacaactgtat

SEQ ID NO: 580136 - DNA, 15 bp, Homo sapiens
aaggacaactgtata

SEQ ID NO: 580137 - DNA, 15 bp, Homo sapiens
aggacaactgtatat

SEQ ID NO: 580138 - DNA, 15 bp, Homo sapiens
ggacaactgtatatg

SEQ ID NO: 580139 - DNA, 15 bp, Homo sapiens
gacaactgtatatgc

SEQ ID NO: 580140 - DNA, 15 bp, Homo sapiens
acaactgtatatgca

SEQ ID NO: 580141 - DNA, 15 bp, Homo sapiens
caactgtatatgcag

SEQ ID NO: 580142 - DNA, 15 bp, Homo sapiens
aactgtatatgcaga

SEQ ID NO: 580143 - DNA, 15 bp, Homo sapiens
actgtatatgcagaa

SEQ ID NO: 580144 - DNA, 15 bp, Homo sapiens
ctgtatatgcagaac

SEQ ID NO: 580145 - DNA, 15 bp, Homo sapiens
tgtatatgcagaacc

SEQ ID NO: 580146 - DNA, 15 bp, Homo sapiens
gtatatgcagaacct

SEQ ID NO: 580147 - DNA, 15 bp, Homo sapiens
tatatgcagaaccta

SEQ ID NO: 580148 - DNA, 15 bp, Homo sapiens
atatgcagaacctat

SEQ ID NO: 580149 - DNA, 15 bp, Homo sapiens
tatgcagaacctatg

SEQ ID NO: 580150 - DNA, 15 bp, Homo sapiens
atgcagaacctatgg

SEQ ID NO: 580151 - DNA, 15 bp, Homo sapiens
tgcagaacctatggg

SEQ ID NO: 580152 - DNA, 15 bp, Homo sapiens
gcagaacctatggga

SEQ ID NO: 580153 - DNA, 15 bp, Homo sapiens
cagaacctatgggat

SEQ ID NO: 580154 - DNA, 15 bp, Homo sapiens
agaacctatgggatt

SEQ ID NO: 580155 - DNA, 15 bp, Homo sapiens
gaacctatgggattt

SEQ ID NO: 580156 - DNA, 15 bp, Homo sapiens
aacctatgggatttg

SEQ ID NO: 580157 - DNA, 15 bp, Homo sapiens
acctatgggatttgc

SEQ ID NO: 580158 - DNA, 15 bp, Homo sapiens
cctatgggatttgct

SEQ ID NO: 580159 - DNA, 15 bp, Homo sapiens
ctatgggatttgctg

SEQ ID NO: 580160 - DNA, 15 bp, Homo sapiens
tatgggatttgctga

SEQ ID NO: 580161 - DNA, 15 bp, Homo sapiens
atgggatttgctgat

SEQ ID NO: 580162 - DNA, 15 bp, Homo sapiens
tgggatttgctgata

SEQ ID NO: 580163 - DNA, 15 bp, Homo sapiens
gggatttgctgatag

SEQ ID NO: 580164 - DNA, 15 bp, Homo sapiens
ggatttgctgataga

SEQ ID NO: 580165 - DNA, 15 bp, Homo sapiens
gatttgctgatagac

SEQ ID NO: 580166 - DNA, 15 bp, Homo sapiens
atttgctgatagact

SEQ ID NO: 580167 - DNA, 15 bp, Homo sapiens
tttgctgatagactg

SEQ ID NO: 580168 - DNA, 15 bp, Homo sapiens
ttgctgatagactga

SEQ ID NO: 580169 - DNA, 15 bp, Homo sapiens
tgctgatagactgaa

SEQ ID NO: 580170 - DNA, 15 bp, Homo sapiens
gctgatagactgaat

SEQ ID NO: 580171 - DNA, 15 bp, Homo sapiens
ctgatagactgaata

SEQ ID NO: 580172 - DNA, 15 bp, Homo sapiens
tgatagactgaatat

SEQ ID NO: 580173 - DNA, 15 bp, Homo sapiens
gatagactgaatatg

SEQ ID NO: 580174 - DNA, 15 bp, Homo sapiens
atagactgaatatgg

SEQ ID NO: 580175 - DNA, 15 bp, Homo sapiens
tagactgaatatggg

SEQ ID NO: 580176 - DNA, 15 bp, Homo sapiens
agactgaatatgggg

SEQ ID NO: 580177 - DNA, 15 bp, Homo sapiens
gactgaatatggggt

SEQ ID NO: 580178 - DNA, 15 bp, Homo sapiens
actgaatatggggtg

SEQ ID NO: 580179 - DNA, 15 bp, Homo sapiens
ctgaatatggggtga

SEQ ID NO: 580180 - DNA, 15 bp, Homo sapiens
tgaatatggggtgag

SEQ ID NO: 580181 - DNA, 15 bp, Homo sapiens
gaatatggggtgaga

SEQ ID NO: 580182 - DNA, 15 bp, Homo sapiens
aatatggggtgagag

SEQ ID NO: 580183 - DNA, 15 bp, Homo sapiens
atatggggtgagaga

SEQ ID NO: 580184 - DNA, 15 bp, Homo sapiens
tatggggtgagagag

SEQ ID NO: 580185 - DNA, 15 bp, Homo sapiens
atggggtgagagaga

SEQ ID NO: 580186 - DNA, 15 bp, Homo sapiens
tggggtgagagagaa

SEQ ID NO: 580187 - DNA, 15 bp, Homo sapiens
ggggtgagagagaaa

SEQ ID NO: 580188 - DNA, 15 bp, Homo sapiens
gggtgagagagaaaa

SEQ ID NO: 580189 - DNA, 15 bp, Homo sapiens
ggtgagagagaaaaa

SEQ ID NO: 580190 - DNA, 15 bp, Homo sapiens
gtgagagagaaaaaa

SEQ ID NO: 580191 - DNA, 15 bp, Homo sapiens
tgagagagaaaaaag

SEQ ID NO: 580192 - DNA, 15 bp, Homo sapiens
gagagagaaaaaagt

SEQ ID NO: 580193 - DNA, 15 bp, Homo sapiens
agagagaaaaaagta

SEQ ID NO: 580194 - DNA, 15 bp, Homo sapiens
gagagaaaaaagtaa

SEQ ID NO: 580195 - DNA, 15 bp, Homo sapiens
agagaaaaaagtaaa

SEQ ID NO: 580196 - DNA, 15 bp, Homo sapiens
gagaaaaaagtaaaa

SEQ ID NO: 580197 - DNA, 15 bp, Homo sapiens
agaaaaaagtaaaag

SEQ ID NO: 580198 - DNA, 15 bp, Homo sapiens
gaaaaaagtaaaaga

SEQ ID NO: 580199 - DNA, 15 bp, Homo sapiens
aaaaaagtaaaagat

SEQ ID NO: 580200 - DNA, 15 bp, Homo sapiens
aaaaagtaaaagatg

SEQ ID NO: 580201 - DNA, 15 bp, Homo sapiens
aaaagtaaaagatga

SEQ ID NO: 580202 - DNA, 15 bp, Homo sapiens
aaagtaaaagatgat

SEQ ID NO: 580203 - DNA, 15 bp, Homo sapiens
aagtaaaagatgatt

SEQ ID NO: 580204 - DNA, 15 bp, Homo sapiens
agtaaaagatgattc

SEQ ID NO: 580205 - DNA, 15 bp, Homo sapiens
gtaaaagatgattcc

SEQ ID NO: 580206 - DNA, 15 bp, Homo sapiens
taaaagatgattcca

SEQ ID NO: 580207 - DNA, 15 bp, Homo sapiens
aaaagatgattccaa

SEQ ID NO: 580208 - DNA, 15 bp, Homo sapiens
aaagatgattccaag

SEQ ID NO: 580209 - DNA, 15 bp, Homo sapiens
aagatgattccaagg

SEQ ID NO: 580210 - DNA, 15 bp, Homo sapiens
agatgattccaaggt

SEQ ID NO: 580211 - DNA, 15 bp, Homo sapiens
gatgattccaaggtt

SEQ ID NO: 580212 - DNA, 15 bp, Homo sapiens
atgattccaaggttt

SEQ ID NO: 580213 - DNA, 15 bp, Homo sapiens
tgattccaaggtttt

SEQ ID NO: 580214 - DNA, 15 bp, Homo sapiens
gattccaaggttttt

SEQ ID NO: 580215 - DNA, 15 bp, Homo sapiens
attccaaggtttttg

SEQ ID NO: 580216 - DNA, 15 bp, Homo sapiens
ttccaaggtttttga

SEQ ID NO: 580217 - DNA, 15 bp, Homo sapiens
tccaaggtttttgag

SEQ ID NO: 580218 - DNA, 15 bp, Homo sapiens
ccaaggtttttgagt

SEQ ID NO: 580219 - DNA, 15 bp, Homo sapiens
caaggtttttgagta

SEQ ID NO: 580220 - DNA, 15 bp, Homo sapiens
aaggtttttgagtat

SEQ ID NO: 580221 - DNA, 15 bp, Homo sapiens
aggtttttgagtatc

SEQ ID NO: 580222 - DNA, 15 bp, Homo sapiens
ggtttttgagtatct

SEQ ID NO: 580223 - DNA, 15 bp, Homo sapiens
gtttttgagtatctg

SEQ ID NO: 580224 - DNA, 15 bp, Homo sapiens
tttttgagtatctga

SEQ ID NO: 580225 - DNA, 15 bp, Homo sapiens
ttttgagtatctgaa

SEQ ID NO: 580226 - DNA, 15 bp, Homo sapiens
tttgagtatctgaat

SEQ ID NO: 580227 - DNA, 15 bp, Homo sapiens
ttgagtatctgaatc

SEQ ID NO: 580228 - DNA, 15 bp, Homo sapiens
tgagtatctgaatca

SEQ ID NO: 580229 - DNA, 15 bp, Homo sapiens
gagtatctgaatcaa

SEQ ID NO: 580230 - DNA, 15 bp, Homo sapiens
agtatctgaatcaaa

SEQ ID NO: 580231 - DNA, 15 bp, Homo sapiens
gtatctgaatcaaag

SEQ ID NO: 580232 - DNA, 15 bp, Homo sapiens
tatctgaatcaaagt

SEQ ID NO: 580233 - DNA, 15 bp, Homo sapiens
atctgaatcaaagta

SEQ ID NO: 580234 - DNA, 15 bp, Homo sapiens
tctgaatcaaagtaa

SEQ ID NO: 580235 - DNA, 15 bp, Homo sapiens
ctgaatcaaagtaac

SEQ ID NO: 580236 - DNA, 15 bp, Homo sapiens
tgaatcaaagtaact

SEQ ID NO: 580237 - DNA, 15 bp, Homo sapiens
gaatcaaagtaactg

SEQ ID NO: 580238 - DNA, 15 bp, Homo sapiens
aatcaaagtaactga

SEQ ID NO: 580239 - DNA, 15 bp, Homo sapiens
atcaaagtaactgaa

SEQ ID NO: 580240 - DNA, 15 bp, Homo sapiens
tcaaagtaactgaat

SEQ ID NO: 580241 - DNA, 15 bp, Homo sapiens
caaagtaactgaata

SEQ ID NO: 580242 - DNA, 15 bp, Homo sapiens
aaagtaactgaataa

SEQ ID NO: 580243 - DNA, 15 bp, Homo sapiens
aagtaactgaataaa

SEQ ID NO: 580244 - DNA, 15 bp, Homo sapiens
agtaactgaataaat

SEQ ID NO: 580245 - DNA, 15 bp, Homo sapiens
gtaactgaataaatt

SEQ ID NO: 580246 - DNA, 15 bp, Homo sapiens
taactgaataaattt

SEQ ID NO: 580247 - DNA, 15 bp, Homo sapiens
aactgaataaatttg

SEQ ID NO: 580248 - DNA, 15 bp, Homo sapiens
actgaataaatttgt

SEQ ID NO: 580249 - DNA, 15 bp, Homo sapiens
ctgaataaatttgta

SEQ ID NO: 580250 - DNA, 15 bp, Homo sapiens
tgaataaatttgtac

SEQ ID NO: 580251 - DNA, 15 bp, Homo sapiens
gaataaatttgtaca

SEQ ID NO: 580252 - DNA, 15 bp, Homo sapiens
aataaatttgtacag

SEQ ID NO: 580253 - DNA, 15 bp, Homo sapiens
ataaatttgtacagc

SEQ ID NO: 580254 - DNA, 15 bp, Homo sapiens
taaatttgtacagcc

SEQ ID NO: 580255 - DNA, 15 bp, Homo sapiens
aaatttgtacagcca

SEQ ID NO: 580256 - DNA, 15 bp, Homo sapiens
aatttgtacagccac

SEQ ID NO: 580257 - DNA, 15 bp, Homo sapiens
atttgtacagccaca

SEQ ID NO: 580258 - DNA, 15 bp, Homo sapiens
tttgtacagccacac

SEQ ID NO: 580259 - DNA, 15 bp, Homo sapiens
ttgtacagccacact

SEQ ID NO: 580260 - DNA, 15 bp, Homo sapiens
tgtacagccacactg

SEQ ID NO: 580261 - DNA, 15 bp, Homo sapiens
gtacagccacactgc

SEQ ID NO: 580262 - DNA, 15 bp, Homo sapiens
tacagccacactgca

SEQ ID NO: 580263 - DNA, 15 bp, Homo sapiens
acagccacactgcat

SEQ ID NO: 580264 - DNA, 15 bp, Homo sapiens
cagccacactgcatc

SEQ ID NO: 580265 - DNA, 15 bp, Homo sapiens
agccacactgcatca

SEQ ID NO: 580266 - DNA, 15 bp, Homo sapiens
gccacactgcatcaa

SEQ ID NO: 580267 - DNA, 15 bp, Homo sapiens
ccacactgcatcaag

SEQ ID NO: 580268 - DNA, 15 bp, Homo sapiens
cacactgcatcaaga

SEQ ID NO: 580269 - DNA, 15 bp, Homo sapiens
acactgcatcaagaa

SEQ ID NO: 580270 - DNA, 15 bp, Homo sapiens
cactgcatcaagaat

SEQ ID NO: 580271 - DNA, 15 bp, Homo sapiens
actgcatcaagaatc

SEQ ID NO: 580272 - DNA, 15 bp, Homo sapiens
ctgcatcaagaatcc

SEQ ID NO: 580273 - DNA, 15 bp, Homo sapiens
tgcatcaagaatcca

SEQ ID NO: 580274 - DNA, 15 bp, Homo sapiens
gcatcaagaatccag

SEQ ID NO: 580275 - DNA, 15 bp, Homo sapiens
catcaagaatccaga

SEQ ID NO: 580276 - DNA, 15 bp, Homo sapiens
atcaagaatccagaa

SEQ ID NO: 580277 - DNA, 15 bp, Homo sapiens
tcaagaatccagaaa

SEQ ID NO: 580278 - DNA, 15 bp, Homo sapiens
caagaatccagaaaa

SEQ ID NO: 580279 - DNA, 15 bp, Homo sapiens
aagaatccagaaaac

SEQ ID NO: 580280 - DNA, 15 bp, Homo sapiens
agaatccagaaaact

SEQ ID NO: 580281 - DNA, 15 bp, Homo sapiens
gaatccagaaaactg

SEQ ID NO: 580282 - DNA, 15 bp, Homo sapiens
aatccagaaaactgt

SEQ ID NO: 580283 - DNA, 15 bp, Homo sapiens
atccagaaaactgta

SEQ ID NO: 580284 - DNA, 15 bp, Homo sapiens
tccagaaaactgtaa

SEQ ID NO: 580285 - DNA, 15 bp, Homo sapiens
ccagaaaactgtaat

SEQ ID NO: 580286 - DNA, 15 bp, Homo sapiens
cagaaaactgtaata

SEQ ID NO: 580287 - DNA, 15 bp, Homo sapiens
agaaaactgtaatac

SEQ ID NO: 580288 - DNA, 15 bp, Homo sapiens
gaaaactgtaatact

SEQ ID NO: 580289 - DNA, 15 bp, Homo sapiens
aaaactgtaatacta

SEQ ID NO: 580290 - DNA, 15 bp, Homo sapiens
aaactgtaatactaa

SEQ ID NO: 580291 - DNA, 15 bp, Homo sapiens
aactgtaatactaaa

SEQ ID NO: 580292 - DNA, 15 bp, Homo sapiens
actgtaatactaaat

SEQ ID NO: 580293 - DNA, 15 bp, Homo sapiens
ctgtaatactaaatt

SEQ ID NO: 580294 - DNA, 15 bp, Homo sapiens
tgtaatactaaattt

SEQ ID NO: 580295 - DNA, 15 bp, Homo sapiens
gtaatactaaatttg

SEQ ID NO: 580296 - DNA, 15 bp, Homo sapiens
taatactaaatttga

SEQ ID NO: 580297 - DNA, 15 bp, Homo sapiens
aatactaaatttgag

SEQ ID NO: 580298 - DNA, 15 bp, Homo sapiens
atactaaatttgagt

SEQ ID NO: 580299 - DNA, 15 bp, Homo sapiens
tactaaatttgagtc

SEQ ID NO: 580300 - DNA, 15 bp, Homo sapiens
actaaatttgagtct

SEQ ID NO: 580301 - DNA, 15 bp, Homo sapiens
ctaaatttgagtctt

SEQ ID NO: 580302 - DNA, 15 bp, Homo sapiens
taaatttgagtctta

SEQ ID NO: 580303 - DNA, 15 bp, Homo sapiens
aaatttgagtcttaa

SEQ ID NO: 580304 - DNA, 15 bp, Homo sapiens
aatttgagtcttaaa

SEQ ID NO: 580305 - DNA, 15 bp, Homo sapiens
atttgagtcttaaaa

SEQ ID NO: 580306 - DNA, 15 bp, Homo sapiens
tttgagtcttaaaaa

SEQ ID NO: 580307 - DNA, 15 bp, Homo sapiens
ttgagtcttaaaaaa

SEQ ID NO: 580308 - DNA, 15 bp, Homo sapiens
tgagtcttaaaaaaa

SEQ ID NO: 580309 - DNA, 15 bp, Homo sapiens
gagtcttaaaaaaaa

SEQ ID NO: 580310 - DNA, 15 bp, Homo sapiens
agtcttaaaaaaaaa

SEQ ID NO: 580311 - DNA, 15 bp, Homo sapiens
gtcttaaaaaaaaaa

SEQ ID NO: 580312 - DNA, 15 bp, Homo sapiens
tcttaaaaaaaaaaa

SEQ ID NO: 580313 - DNA, 15 bp, Homo sapiens
cttaaaaaaaaaaaa

SEQ ID NO: 580314 - DNA, 15 bp, Homo sapiens
ttaaaaaaaaaaaat

SEQ ID NO: 580315 - DNA, 15 bp, Homo sapiens
taaaaaaaaaaaatt

SEQ ID NO: 580316 - DNA, 15 bp, Homo sapiens
aaaaaaaaaaaattc

SEQ ID NO: 580317 - DNA, 15 bp, Homo sapiens
aaaaaaaaaaattcc

SEQ ID NO: 580318 - DNA, 15 bp, Homo sapiens
aaaaaaaaaattcca

SEQ ID NO: 580319 - DNA, 15 bp, Homo sapiens
aaaaaaaaattccag

SEQ ID NO: 580320 - DNA, 15 bp, Homo sapiens
aaaaaaaattccaga

SEQ ID NO: 580321 - DNA, 15 bp, Homo sapiens
aaaaaaattccagaa

SEQ ID NO: 580322 - DNA, 15 bp, Homo sapiens
aaaaaattccagaag

SEQ ID NO: 580323 - DNA, 15 bp, Homo sapiens
aaaaattccagaaga

SEQ ID NO: 580324 - DNA, 15 bp, Homo sapiens
aaaattccagaagat

SEQ ID NO: 580325 - DNA, 15 bp, Homo sapiens
aaattccagaagatt

SEQ ID NO: 580326 - DNA, 15 bp, Homo sapiens
aattccagaagattt

SEQ ID NO: 580327 - DNA, 15 bp, Homo sapiens
attccagaagatttc

SEQ ID NO: 580328 - DNA, 15 bp, Homo sapiens
ttccagaagatttca

SEQ ID NO: 580329 - DNA, 15 bp, Homo sapiens
tccagaagatttcag

SEQ ID NO: 580330 - DNA, 15 bp, Homo sapiens
ccagaagatttcaga

SEQ ID NO: 580331 - DNA, 15 bp, Homo sapiens
cagaagatttcagaa

SEQ ID NO: 580332 - DNA, 15 bp, Homo sapiens
agaagatttcagaat

SEQ ID NO: 580333 - DNA, 15 bp, Homo sapiens
gaagatttcagaatt

SEQ ID NO: 580334 - DNA, 15 bp, Homo sapiens
aagatttcagaatta

SEQ ID NO: 580335 - DNA, 15 bp, Homo sapiens
agatttcagaattag

SEQ ID NO: 580336 - DNA, 15 bp, Homo sapiens
gatttcagaattagg

SEQ ID NO: 580337 - DNA, 15 bp, Homo sapiens
atttcagaattagga

SEQ ID NO: 580338 - DNA, 15 bp, Homo sapiens
tttcagaattaggaa

SEQ ID NO: 580339 - DNA, 15 bp, Homo sapiens
ttcagaattaggaag

SEQ ID NO: 580340 - DNA, 15 bp, Homo sapiens
tcagaattaggaagg

SEQ ID NO: 580341 - DNA, 15 bp, Homo sapiens
cagaattaggaaggt

SEQ ID NO: 580342 - DNA, 15 bp, Homo sapiens
agaattaggaaggtc

SEQ ID NO: 580343 - DNA, 15 bp, Homo sapiens
gaattaggaaggtcc

SEQ ID NO: 580344 - DNA, 15 bp, Homo sapiens
aattaggaaggtcct

SEQ ID NO: 580345 - DNA, 15 bp, Homo sapiens
attaggaaggtcctt

SEQ ID NO: 580346 - DNA, 15 bp, Homo sapiens
ttaggaaggtccttt

SEQ ID NO: 580347 - DNA, 15 bp, Homo sapiens
taggaaggtcctttg

SEQ ID NO: 580348 - DNA, 15 bp, Homo sapiens
aggaaggtcctttga

SEQ ID NO: 580349 - DNA, 15 bp, Homo sapiens
ggaaggtcctttgac

SEQ ID NO: 580350 - DNA, 15 bp, Homo sapiens
gaaggtcctttgaca

SEQ ID NO: 580351 - DNA, 15 bp, Homo sapiens
aaggtcctttgacac

SEQ ID NO: 580352 - DNA, 15 bp, Homo sapiens
aggtcctttgacacc

SEQ ID NO: 580353 - DNA, 15 bp, Homo sapiens
ggtcctttgacacca

SEQ ID NO: 580354 - DNA, 15 bp, Homo sapiens
gtcctttgacaccaa

SEQ ID NO: 580355 - DNA, 15 bp, Homo sapiens
tcctttgacaccaag

SEQ ID NO: 580356 - DNA, 15 bp, Homo sapiens
cctttgacaccaagt

SEQ ID NO: 580357 - DNA, 15 bp, Homo sapiens
ctttgacaccaagtt

SEQ ID NO: 580358 - DNA, 15 bp, Homo sapiens
tttgacaccaagttg

SEQ ID NO: 580359 - DNA, 15 bp, Homo sapiens
ttgacaccaagttgc

SEQ ID NO: 580360 - DNA, 15 bp, Homo sapiens
tgacaccaagttgca

SEQ ID NO: 580361 - DNA, 15 bp, Homo sapiens
gacaccaagttgcaa

SEQ ID NO: 580362 - DNA, 15 bp, Homo sapiens
acaccaagttgcaaa

SEQ ID NO: 580363 - DNA, 15 bp, Homo sapiens
caccaagttgcaaag

SEQ ID NO: 580364 - DNA, 15 bp, Homo sapiens
accaagttgcaaagc

SEQ ID NO: 580365 - DNA, 15 bp, Homo sapiens
ccaagttgcaaagct

SEQ ID NO: 580366 - DNA, 15 bp, Homo sapiens
caagttgcaaagcta

SEQ ID NO: 580367 - DNA, 15 bp, Homo sapiens
aagttgcaaagctag

SEQ ID NO: 580368 - DNA, 15 bp, Homo sapiens
agttgcaaagctagt

SEQ ID NO: 580369 - DNA, 15 bp, Homo sapiens
gttgcaaagctagta

SEQ ID NO: 580370 - DNA, 15 bp, Homo sapiens
ttgcaaagctagtat

SEQ ID NO: 580371 - DNA, 15 bp, Homo sapiens
tgcaaagctagtatt

SEQ ID NO: 580372 - DNA, 15 bp, Homo sapiens
gcaaagctagtatta

SEQ ID NO: 580373 - DNA, 15 bp, Homo sapiens
caaagctagtattag

SEQ ID NO: 580374 - DNA, 15 bp, Homo sapiens
aaagctagtattaga

SEQ ID NO: 580375 - DNA, 15 bp, Homo sapiens
aagctagtattagaa

SEQ ID NO: 580376 - DNA, 15 bp, Homo sapiens
agctagtattagaac

SEQ ID NO: 580377 - DNA, 15 bp, Homo sapiens
gctagtattagaact

SEQ ID NO: 580378 - DNA, 15 bp, Homo sapiens
ctagtattagaactc

SEQ ID NO: 580379 - DNA, 15 bp, Homo sapiens
tagtattagaactca

SEQ ID NO: 580380 - DNA, 15 bp, Homo sapiens
agtattagaactcag

SEQ ID NO: 580381 - DNA, 15 bp, Homo sapiens
gtattagaactcagg

SEQ ID NO: 580382 - DNA, 15 bp, Homo sapiens
tattagaactcaggt

SEQ ID NO: 580383 - DNA, 15 bp, Homo sapiens
attagaactcaggtt

SEQ ID NO: 580384 - DNA, 15 bp, Homo sapiens
ttagaactcaggttt

SEQ ID NO: 580385 - DNA, 15 bp, Homo sapiens
tagaactcaggtttc

SEQ ID NO: 580386 - DNA, 15 bp, Homo sapiens
agaactcaggtttcc

SEQ ID NO: 580387 - DNA, 15 bp, Homo sapiens
gaactcaggtttcct

SEQ ID NO: 580388 - DNA, 15 bp, Homo sapiens
aactcaggtttcctg

SEQ ID NO: 580389 - DNA, 15 bp, Homo sapiens
actcaggtttcctga

SEQ ID NO: 580390 - DNA, 15 bp, Homo sapiens
ctcaggtttcctgaa

SEQ ID NO: 580391 - DNA, 15 bp, Homo sapiens
tcaggtttcctgaat

SEQ ID NO: 580392 - DNA, 15 bp, Homo sapiens
caggtttcctgaatt

SEQ ID NO: 580393 - DNA, 15 bp, Homo sapiens
aggtttcctgaattt

SEQ ID NO: 580394 - DNA, 15 bp, Homo sapiens
ggtttcctgaatttc

SEQ ID NO: 580395 - DNA, 15 bp, Homo sapiens
gtttcctgaatttca

SEQ ID NO: 580396 - DNA, 15 bp, Homo sapiens
tttcctgaatttcag

SEQ ID NO: 580397 - DNA, 15 bp, Homo sapiens
ttcctgaatttcagt

SEQ ID NO: 580398 - DNA, 15 bp, Homo sapiens
tcctgaatttcagtc

SEQ ID NO: 580399 - DNA, 15 bp, Homo sapiens
cctgaatttcagtcc

SEQ ID NO: 580400 - DNA, 15 bp, Homo sapiens
ctgaatttcagtcca

SEQ ID NO: 580401 - DNA, 15 bp, Homo sapiens
tgaatttcagtccag

SEQ ID NO: 580402 - DNA, 15 bp, Homo sapiens
gaatttcagtccagt

SEQ ID NO: 580403 - DNA, 15 bp, Homo sapiens
aatttcagtccagtt

SEQ ID NO: 580404 - DNA, 15 bp, Homo sapiens
atttcagtccagttt

SEQ ID NO: 580405 - DNA, 15 bp, Homo sapiens
tttcagtccagtttt

SEQ ID NO: 580406 - DNA, 15 bp, Homo sapiens
ttcagtccagttttt

SEQ ID NO: 580407 - DNA, 15 bp, Homo sapiens
tcagtccagtttttg

SEQ ID NO: 580408 - DNA, 15 bp, Homo sapiens
cagtccagtttttgt

SEQ ID NO: 580409 - DNA, 15 bp, Homo sapiens
agtccagtttttgtt

SEQ ID NO: 580410 - DNA, 15 bp, Homo sapiens
gtccagtttttgttt

SEQ ID NO: 580411 - DNA, 15 bp, Homo sapiens
tccagtttttgtttt

SEQ ID NO: 580412 - DNA, 15 bp, Homo sapiens
ccagtttttgttttg

SEQ ID NO: 580413 - DNA, 15 bp, Homo sapiens
cagtttttgttttgt

SEQ ID NO: 580414 - DNA, 15 bp, Homo sapiens
agtttttgttttgtc

SEQ ID NO: 580415 - DNA, 15 bp, Homo sapiens
gtttttgttttgtct

SEQ ID NO: 580416 - DNA, 15 bp, Homo sapiens
tttttgttttgtctg

SEQ ID NO: 580417 - DNA, 15 bp, Homo sapiens
ttttgttttgtctgt

SEQ ID NO: 580418 - DNA, 15 bp, Homo sapiens
tttgttttgtctgtt

SEQ ID NO: 580419 - DNA, 15 bp, Homo sapiens
ttgttttgtctgttt

SEQ ID NO: 580420 - DNA, 15 bp, Homo sapiens
tgttttgtctgtttg

SEQ ID NO: 580421 - DNA, 15 bp, Homo sapiens
gttttgtctgtttgt

SEQ ID NO: 580422 - DNA, 15 bp, Homo sapiens
ttttgtctgtttgtt

SEQ ID NO: 580423 - DNA, 15 bp, Homo sapiens
tttgtctgtttgttt

SEQ ID NO: 580424 - DNA, 15 bp, Homo sapiens
ttgtctgtttgtttt

SEQ ID NO: 580425 - DNA, 15 bp, Homo sapiens
tgtctgtttgttttt

SEQ ID NO: 580426 - DNA, 15 bp, Homo sapiens
gtctgtttgtttttt

SEQ ID NO: 580427 - DNA, 15 bp, Homo sapiens
tctgtttgttttttg

SEQ ID NO: 580428 - DNA, 15 bp, Homo sapiens
ctgtttgttttttga

SEQ ID NO: 580429 - DNA, 15 bp, Homo sapiens
tgttttttgagacag

SEQ ID NO: 580430 - DNA, 15 bp, Homo sapiens
gttttttgagacagg

SEQ ID NO: 580431 - DNA, 15 bp, Homo sapiens
ttttttgagacaggg

SEQ ID NO: 580432 - DNA, 15 bp, Homo sapiens
tttttgagacagggt

SEQ ID NO: 580433 - DNA, 15 bp, Homo sapiens
ttttgagacagggtc

SEQ ID NO: 580434 - DNA, 15 bp, Homo sapiens
tttgagacagggtct

SEQ ID NO: 580435 - DNA, 15 bp, Homo sapiens
ttgagacagggtctc

SEQ ID NO: 580436 - DNA, 15 bp, Homo sapiens
tgagacagggtctcg

SEQ ID NO: 580437 - DNA, 15 bp, Homo sapiens
gagacagggtctcgc

SEQ ID NO: 580438 - DNA, 15 bp, Homo sapiens
agacagggtctcgcc

SEQ ID NO: 580439 - DNA, 15 bp, Homo sapiens
gacagggtctcgccc

SEQ ID NO: 580440 - DNA, 15 bp, Homo sapiens
acagggtctcgccct

SEQ ID NO: 580441 - DNA, 15 bp, Homo sapiens
cagggtctcgccctg

SEQ ID NO: 580442 - DNA, 15 bp, Homo sapiens
agggtctcgccctgt

SEQ ID NO: 580443 - DNA, 15 bp, Homo sapiens
gggtctcgccctgtt

SEQ ID NO: 580444 - DNA, 15 bp, Homo sapiens
ggtctcgccctgttg

SEQ ID NO: 580445 - DNA, 15 bp, Homo sapiens
gtctcgccctgttgc

SEQ ID NO: 580446 - DNA, 15 bp, Homo sapiens
tctcgccctgttgcc

SEQ ID NO: 580447 - DNA, 15 bp, Homo sapiens
ctcgccctgttgccc

SEQ ID NO: 580448 - DNA, 15 bp, Homo sapiens
tcgccctgttgccca

SEQ ID NO: 580449 - DNA, 15 bp, Homo sapiens
cgccctgttgcccag

SEQ ID NO: 580450 - DNA, 15 bp, Homo sapiens
gccctgttgcccagg

SEQ ID NO: 580451 - DNA, 15 bp, Homo sapiens
ccctgttgcccaggc

SEQ ID NO: 580452 - DNA, 15 bp, Homo sapiens
cctgttgcccaggct

SEQ ID NO: 580453 - DNA, 15 bp, Homo sapiens
tggagtgcagtggca

SEQ ID NO: 580454 - DNA, 15 bp, Homo sapiens
ggagtgcagtggcac

SEQ ID NO: 580455 - DNA, 15 bp, Homo sapiens
gagtgcagtggcaca

SEQ ID NO: 580456 - DNA, 15 bp, Homo sapiens
agtgcagtggcacaa

SEQ ID NO: 580457 - DNA, 15 bp, Homo sapiens
gtgcagtggcacaat

SEQ ID NO: 580458 - DNA, 15 bp, Homo sapiens
tgcagtggcacaatc

SEQ ID NO: 580459 - DNA, 15 bp, Homo sapiens
gcagtggcacaatca

SEQ ID NO: 580460 - DNA, 15 bp, Homo sapiens
cagtggcacaatcat

SEQ ID NO: 580461 - DNA, 15 bp, Homo sapiens
agtggcacaatcatt

SEQ ID NO: 580462 - DNA, 15 bp, Homo sapiens
gtggcacaatcattg

SEQ ID NO: 580463 - DNA, 15 bp, Homo sapiens
tggcacaatcattgc

SEQ ID NO: 580464 - DNA, 15 bp, Homo sapiens
ggcacaatcattgct

SEQ ID NO: 580465 - DNA, 15 bp, Homo sapiens
gcacaatcattgctc

SEQ ID NO: 580466 - DNA, 15 bp, Homo sapiens
cacaatcattgctca

SEQ ID NO: 580467 - DNA, 15 bp, Homo sapiens
acaatcattgctcat

SEQ ID NO: 580468 - DNA, 15 bp, Homo sapiens
caatcattgctcatc

SEQ ID NO: 580469 - DNA, 15 bp, Homo sapiens
aatcattgctcatca

SEQ ID NO: 580470 - DNA, 15 bp, Homo sapiens
atcattgctcatcac

SEQ ID NO: 580471 - DNA, 15 bp, Homo sapiens
tcattgctcatcaca

SEQ ID NO: 580472 - DNA, 15 bp, Homo sapiens
cattgctcatcacag

SEQ ID NO: 580473 - DNA, 15 bp, Homo sapiens
attgctcatcacagc

SEQ ID NO: 580474 - DNA, 15 bp, Homo sapiens
ttgctcatcacagcc

SEQ ID NO: 580475 - DNA, 15 bp, Homo sapiens
tgctcatcacagcct

SEQ ID NO: 580476 - DNA, 15 bp, Homo sapiens
gctcatcacagcctc

SEQ ID NO: 580477 - DNA, 15 bp, Homo sapiens
ctcatcacagcctca

SEQ ID NO: 580478 - DNA, 15 bp, Homo sapiens
tcatcacagcctcaa

SEQ ID NO: 580479 - DNA, 15 bp, Homo sapiens
catcacagcctcaag

SEQ ID NO: 580480 - DNA, 15 bp, Homo sapiens
atcacagcctcaagc

SEQ ID NO: 580481 - DNA, 15 bp, Homo sapiens
tcacagcctcaagct

SEQ ID NO: 580482 - DNA, 15 bp, Homo sapiens
cacagcctcaagctc

SEQ ID NO: 580483 - DNA, 15 bp, Homo sapiens
acagcctcaagctcc

SEQ ID NO: 580484 - DNA, 15 bp, Homo sapiens
cagcctcaagctcct

SEQ ID NO: 580485 - DNA, 15 bp, Homo sapiens
agcctcaagctcctg

SEQ ID NO: 580486 - DNA, 15 bp, Homo sapiens
gcctcaagctcctgg

SEQ ID NO: 580487 - DNA, 15 bp, Homo sapiens
cctcaagctcctggg

SEQ ID NO: 580488 - DNA, 15 bp, Homo sapiens
ctcaagctcctgggc

SEQ ID NO: 580489 - DNA, 15 bp, Homo sapiens
tcaagctcctgggct

SEQ ID NO: 580490 - DNA, 15 bp, Homo sapiens
caagctcctgggctt

SEQ ID NO: 580491 - DNA, 15 bp, Homo sapiens
aagctcctgggcttc

SEQ ID NO: 580492 - DNA, 15 bp, Homo sapiens
agctcctgggcttca

SEQ ID NO: 580493 - DNA, 15 bp, Homo sapiens
gctcctgggcttcaa

SEQ ID NO: 580494 - DNA, 15 bp, Homo sapiens
ctcctgggcttcaag

SEQ ID NO: 580495 - DNA, 15 bp, Homo sapiens
tcctgggcttcaagc

SEQ ID NO: 580496 - DNA, 15 bp, Homo sapiens
cctgggcttcaagca

SEQ ID NO: 580497 - DNA, 15 bp, Homo sapiens
ctgggcttcaagcaa

SEQ ID NO: 580498 - DNA, 15 bp, Homo sapiens
tgggcttcaagcaat

SEQ ID NO: 580499 - DNA, 15 bp, Homo sapiens
gggcttcaagcaatc

SEQ ID NO: 580500 - DNA, 15 bp, Homo sapiens
ggcttcaagcaatcc

SEQ ID NO: 580501 - DNA, 15 bp, Homo sapiens
gcttcaagcaatcct

SEQ ID NO: 580502 - DNA, 15 bp, Homo sapiens
cttcaagcaatcctt

SEQ ID NO: 580503 - DNA, 15 bp, Homo sapiens
ttcaagcaatccttt

SEQ ID NO: 580504 - DNA, 15 bp, Homo sapiens
tcaagcaatcctttt

SEQ ID NO: 580505 - DNA, 15 bp, Homo sapiens
caagcaatccttttc

SEQ ID NO: 580506 - DNA, 15 bp, Homo sapiens
aagcaatccttttct

SEQ ID NO: 580507 - DNA, 15 bp, Homo sapiens
agcaatccttttctc

SEQ ID NO: 580508 - DNA, 15 bp, Homo sapiens
gcaatccttttctct

SEQ ID NO: 580509 - DNA, 15 bp, Homo sapiens
caatccttttctctc

SEQ ID NO: 580510 - DNA, 15 bp, Homo sapiens
aatccttttctctca

SEQ ID NO: 580511 - DNA, 15 bp, Homo sapiens
atccttttctctcag

SEQ ID NO: 580512 - DNA, 15 bp, Homo sapiens
tccttttctctcagg

SEQ ID NO: 580513 - DNA, 15 bp, Homo sapiens
ccttttctctcaggc

SEQ ID NO: 580514 - DNA, 15 bp, Homo sapiens
cttttctctcaggca

SEQ ID NO: 580515 - DNA, 15 bp, Homo sapiens
ttttctctcaggcac

SEQ ID NO: 580516 - DNA, 15 bp, Homo sapiens
tttctctcaggcact

SEQ ID NO: 580517 - DNA, 15 bp, Homo sapiens
ttctctcaggcactc

SEQ ID NO: 580518 - DNA, 15 bp, Homo sapiens
tctctcaggcactct

SEQ ID NO: 580519 - DNA, 15 bp, Homo sapiens
ctctcaggcactctc

SEQ ID NO: 580520 - DNA, 15 bp, Homo sapiens
tctcaggcactctca

SEQ ID NO: 580521 - DNA, 15 bp, Homo sapiens
ctcaggcactctcag

SEQ ID NO: 580522 - DNA, 15 bp, Homo sapiens
tcaggcactctcagg

SEQ ID NO: 580523 - DNA, 15 bp, Homo sapiens
caggcactctcaggg

SEQ ID NO: 580524 - DNA, 15 bp, Homo sapiens
aggcactctcaggga

SEQ ID NO: 580525 - DNA, 15 bp, Homo sapiens
ggcactctcagggac

SEQ ID NO: 580526 - DNA, 15 bp, Homo sapiens
gcactctcagggact

SEQ ID NO: 580527 - DNA, 15 bp, Homo sapiens
cactctcagggacta

SEQ ID NO: 580528 - DNA, 15 bp, Homo sapiens
actctcagggactac

SEQ ID NO: 580529 - DNA, 15 bp, Homo sapiens
ctctcagggactaca

SEQ ID NO: 580530 - DNA, 15 bp, Homo sapiens
tctcagggactacag

SEQ ID NO: 580531 - DNA, 15 bp, Homo sapiens
ctcagggactacaga

SEQ ID NO: 580532 - DNA, 15 bp, Homo sapiens
tcagggactacagac

SEQ ID NO: 580533 - DNA, 15 bp, Homo sapiens
cagggactacagaca

SEQ ID NO: 580534 - DNA, 15 bp, Homo sapiens
agggactacagacac

SEQ ID NO: 580535 - DNA, 15 bp, Homo sapiens
gggactacagacaca

SEQ ID NO: 580536 - DNA, 15 bp, Homo sapiens
ggactacagacacac

SEQ ID NO: 580537 - DNA, 15 bp, Homo sapiens
gactacagacacaca

SEQ ID NO: 580538 - DNA, 15 bp, Homo sapiens
actacagacacacac

SEQ ID NO: 580539 - DNA, 15 bp, Homo sapiens
ctacagacacacacc

SEQ ID NO: 580540 - DNA, 15 bp, Homo sapiens
tacagacacacacca

SEQ ID NO: 580541 - DNA, 15 bp, Homo sapiens
acagacacacaccac

SEQ ID NO: 580542 - DNA, 15 bp, Homo sapiens
cagacacacaccacc

SEQ ID NO: 580543 - DNA, 15 bp, Homo sapiens
agacacacaccacca

SEQ ID NO: 580544 - DNA, 15 bp, Homo sapiens
gacacacaccaccat

SEQ ID NO: 580545 - DNA, 15 bp, Homo sapiens
acacacaccaccatg

SEQ ID NO: 580546 - DNA, 15 bp, Homo sapiens
acaccaccatgccca

SEQ ID NO: 580547 - DNA, 15 bp, Homo sapiens
caccaccatgcccag

SEQ ID NO: 580548 - DNA, 15 bp, Homo sapiens
accaccatgcccagt

SEQ ID NO: 580549 - DNA, 15 bp, Homo sapiens
ccaccatgcccagtt

SEQ ID NO: 580550 - DNA, 15 bp, Homo sapiens
caccatgcccagtta

SEQ ID NO: 580551 - DNA, 15 bp, Homo sapiens
accatgcccagttaa

SEQ ID NO: 580552 - DNA, 15 bp, Homo sapiens
ccatgcccagttaag

SEQ ID NO: 580553 - DNA, 15 bp, Homo sapiens
catgcccagttaagt

SEQ ID NO: 580554 - DNA, 15 bp, Homo sapiens
atgcccagttaagtt

SEQ ID NO: 580555 - DNA, 15 bp, Homo sapiens
tgcccagttaagttt

SEQ ID NO: 580556 - DNA, 15 bp, Homo sapiens
gcccagttaagtttt

SEQ ID NO: 580557 - DNA, 15 bp, Homo sapiens
cccagttaagttttt

SEQ ID NO: 580558 - DNA, 15 bp, Homo sapiens
ccagttaagtttttg

SEQ ID NO: 580559 - DNA, 15 bp, Homo sapiens
cagttaagtttttgt

SEQ ID NO: 580560 - DNA, 15 bp, Homo sapiens
agttaagtttttgta

SEQ ID NO: 580561 - DNA, 15 bp, Homo sapiens
gttaagtttttgtat

SEQ ID NO: 580562 - DNA, 15 bp, Homo sapiens
ttaagtttttgtatt

SEQ ID NO: 580563 - DNA, 15 bp, Homo sapiens
taagtttttgtattt

SEQ ID NO: 580564 - DNA, 15 bp, Homo sapiens
aagtttttgtatttt

SEQ ID NO: 580565 - DNA, 15 bp, Homo sapiens
agtttttgtattttt

SEQ ID NO: 580566 - DNA, 15 bp, Homo sapiens
gtttttgtatttttt

SEQ ID NO: 580567 - DNA, 15 bp, Homo sapiens
tttttgtattttttg

SEQ ID NO: 580568 - DNA, 15 bp, Homo sapiens
ttttgtattttttgt

SEQ ID NO: 580569 - DNA, 15 bp, Homo sapiens
tttgtattttttgta

SEQ ID NO: 580570 - DNA, 15 bp, Homo sapiens
ttgtattttttgtag

SEQ ID NO: 580571 - DNA, 15 bp, Homo sapiens
tgtattttttgtagc

SEQ ID NO: 580572 - DNA, 15 bp, Homo sapiens
gtattttttgtagcg

SEQ ID NO: 580573 - DNA, 15 bp, Homo sapiens
tattttttgtagcga

SEQ ID NO: 580574 - DNA, 15 bp, Homo sapiens
attttttgtagcgac

SEQ ID NO: 580575 - DNA, 15 bp, Homo sapiens
ttttttgtagcgacg

SEQ ID NO: 580576 - DNA, 15 bp, Homo sapiens
tttttgtagcgacgg

SEQ ID NO: 580577 - DNA, 15 bp, Homo sapiens
ttttgtagcgacggg

SEQ ID NO: 580578 - DNA, 15 bp, Homo sapiens
tttgtagcgacgggg

SEQ ID NO: 580579 - DNA, 15 bp, Homo sapiens
ttgtagcgacggggt

SEQ ID NO: 580580 - DNA, 15 bp, Homo sapiens
tgtagcgacggggtc

SEQ ID NO: 580581 - DNA, 15 bp, Homo sapiens
gtagcgacggggtct

SEQ ID NO: 580582 - DNA, 15 bp, Homo sapiens
tagcgacggggtctc

SEQ ID NO: 580583 - DNA, 15 bp, Homo sapiens
agcgacggggtctca

SEQ ID NO: 580584 - DNA, 15 bp, Homo sapiens
gcgacggggtctcac

SEQ ID NO: 580585 - DNA, 15 bp, Homo sapiens
cgacggggtctcaca

SEQ ID NO: 580586 - DNA, 15 bp, Homo sapiens
gacggggtctcacat

SEQ ID NO: 580587 - DNA, 15 bp, Homo sapiens
acggggtctcacatt

SEQ ID NO: 580588 - DNA, 15 bp, Homo sapiens
cggggtctcacattg

SEQ ID NO: 580589 - DNA, 15 bp, Homo sapiens
ggggtctcacattgg

SEQ ID NO: 580590 - DNA, 15 bp, Homo sapiens
gggtctcacattggc

SEQ ID NO: 580591 - DNA, 15 bp, Homo sapiens
ggtctcacattggcc

SEQ ID NO: 580592 - DNA, 15 bp, Homo sapiens
gtctcacattggcca

SEQ ID NO: 580593 - DNA, 15 bp, Homo sapiens
tctcacattggccag

SEQ ID NO: 580594 - DNA, 15 bp, Homo sapiens
ctcacattggccagg

SEQ ID NO: 580595 - DNA, 15 bp, Homo sapiens
tcacattggccaggc

SEQ ID NO: 580596 - DNA, 15 bp, Homo sapiens
cacattggccaggct

SEQ ID NO: 580597 - DNA, 15 bp, Homo sapiens
acattggccaggctg

SEQ ID NO: 580598 - DNA, 15 bp, Homo sapiens
cattggccaggctgg

SEQ ID NO: 580599 - DNA, 15 bp, Homo sapiens
attggccaggctggt

SEQ ID NO: 580600 - DNA, 15 bp, Homo sapiens
gtctcgaactcctgg

SEQ ID NO: 580601 - DNA, 15 bp, Homo sapiens
tctcgaactcctggg

SEQ ID NO: 580602 - DNA, 15 bp, Homo sapiens
ctcgaactcctgggc

SEQ ID NO: 580603 - DNA, 15 bp, Homo sapiens
tcgaactcctgggct

SEQ ID NO: 580604 - DNA, 15 bp, Homo sapiens
cgaactcctgggctc

SEQ ID NO: 580605 - DNA, 15 bp, Homo sapiens
gaactcctgggctca

SEQ ID NO: 580606 - DNA, 15 bp, Homo sapiens
aactcctgggctcaa

SEQ ID NO: 580607 - DNA, 15 bp, Homo sapiens
actcctgggctcaag

SEQ ID NO: 580608 - DNA, 15 bp, Homo sapiens
ctcctgggctcaagc

SEQ ID NO: 580609 - DNA, 15 bp, Homo sapiens
tcctgggctcaagca

SEQ ID NO: 580610 - DNA, 15 bp, Homo sapiens
cctgggctcaagcaa

SEQ ID NO: 580611 - DNA, 15 bp, Homo sapiens
ctgggctcaagcaat

SEQ ID NO: 580612 - DNA, 15 bp, Homo sapiens
tgggctcaagcaatc

SEQ ID NO: 580613 - DNA, 15 bp, Homo sapiens
gggctcaagcaatcc

SEQ ID NO: 580614 - DNA, 15 bp, Homo sapiens
ggctcaagcaatcct

SEQ ID NO: 580615 - DNA, 15 bp, Homo sapiens
gctcaagcaatcctc

SEQ ID NO: 580616 - DNA, 15 bp, Homo sapiens
ctcaagcaatcctcc

SEQ ID NO: 580617 - DNA, 15 bp, Homo sapiens
tcaagcaatcctcct

SEQ ID NO: 580618 - DNA, 15 bp, Homo sapiens
caagcaatcctcctg

SEQ ID NO: 580619 - DNA, 15 bp, Homo sapiens
aagcaatcctcctgc

SEQ ID NO: 580620 - DNA, 15 bp, Homo sapiens
agcaatcctcctgcc

SEQ ID NO: 580621 - DNA, 15 bp, Homo sapiens
gcaatcctcctgcct

SEQ ID NO: 580622 - DNA, 15 bp, Homo sapiens
caatcctcctgcctt

SEQ ID NO: 580623 - DNA, 15 bp, Homo sapiens
aatcctcctgccttg

SEQ ID NO: 580624 - DNA, 15 bp, Homo sapiens
atcctcctgccttgg

SEQ ID NO: 580625 - DNA, 15 bp, Homo sapiens
tcctcctgccttggc

SEQ ID NO: 580626 - DNA, 15 bp, Homo sapiens
cctcctgccttggcc

SEQ ID NO: 580627 - DNA, 15 bp, Homo sapiens
ctcctgccttggcct

SEQ ID NO: 580628 - DNA, 15 bp, Homo sapiens
tcctgccttggcctc

SEQ ID NO: 580629 - DNA, 15 bp, Homo sapiens
cctgccttggcctcc

SEQ ID NO: 580630 - DNA, 15 bp, Homo sapiens
ctgccttggcctccc

SEQ ID NO: 580631 - DNA, 15 bp, Homo sapiens
tgccttggcctccca

SEQ ID NO: 580632 - DNA, 15 bp, Homo sapiens
gccttggcctcccaa

SEQ ID NO: 580633 - DNA, 15 bp, Homo sapiens
tcccaaagtgctgga

SEQ ID NO: 580634 - DNA, 15 bp, Homo sapiens
cccaaagtgctggaa

SEQ ID NO: 580635 - DNA, 15 bp, Homo sapiens
aagtgctggaattac

SEQ ID NO: 580636 - DNA, 15 bp, Homo sapiens
agtgctggaattaca

SEQ ID NO: 580637 - DNA, 15 bp, Homo sapiens
gtgctggaattacag

SEQ ID NO: 580638 - DNA, 15 bp, Homo sapiens
tgctggaattacagg

SEQ ID NO: 580639 - DNA, 15 bp, Homo sapiens
gctggaattacaggc

SEQ ID NO: 580640 - DNA, 15 bp, Homo sapiens
ctggaattacaggcg

SEQ ID NO: 580641 - DNA, 15 bp, Homo sapiens
tggaattacaggcgt

SEQ ID NO: 580642 - DNA, 15 bp, Homo sapiens
ggaattacaggcgtg

SEQ ID NO: 580643 - DNA, 15 bp, Homo sapiens
gaattacaggcgtga

SEQ ID NO: 580644 - DNA, 15 bp, Homo sapiens
aattacaggcgtgag

SEQ ID NO: 580645 - DNA, 15 bp, Homo sapiens
ttacaggcgtgagct

SEQ ID NO: 580646 - DNA, 15 bp, Homo sapiens
tacaggcgtgagcta

SEQ ID NO: 580647 - DNA, 15 bp, Homo sapiens
acaggcgtgagctac

SEQ ID NO: 580648 - DNA, 15 bp, Homo sapiens
caggcgtgagctact

SEQ ID NO: 580649 - DNA, 15 bp, Homo sapiens
aggcgtgagctactg

SEQ ID NO: 580650 - DNA, 15 bp, Homo sapiens
ggcgtgagctactgt

SEQ ID NO: 580651 - DNA, 15 bp, Homo sapiens
gcgtgagctactgtg

SEQ ID NO: 580652 - DNA, 15 bp, Homo sapiens
cgtgagctactgtgc

SEQ ID NO: 580653 - DNA, 15 bp, Homo sapiens
gtgagctactgtgct

SEQ ID NO: 580654 - DNA, 15 bp, Homo sapiens
tgagctactgtgctc

SEQ ID NO: 580655 - DNA, 15 bp, Homo sapiens
gagctactgtgctca

SEQ ID NO: 580656 - DNA, 15 bp, Homo sapiens
agctactgtgctcag

SEQ ID NO: 580657 - DNA, 15 bp, Homo sapiens
gctactgtgctcagc

SEQ ID NO: 580658 - DNA, 15 bp, Homo sapiens
ctactgtgctcagcc

SEQ ID NO: 580659 - DNA, 15 bp, Homo sapiens
tactgtgctcagcct

SEQ ID NO: 580660 - DNA, 15 bp, Homo sapiens
actgtgctcagcctc

SEQ ID NO: 580661 - DNA, 15 bp, Homo sapiens
ctgtgctcagcctca

SEQ ID NO: 580662 - DNA, 15 bp, Homo sapiens
tgtgctcagcctcag

SEQ ID NO: 580663 - DNA, 15 bp, Homo sapiens
gtgctcagcctcagt

SEQ ID NO: 580664 - DNA, 15 bp, Homo sapiens
tgctcagcctcagtc

SEQ ID NO: 580665 - DNA, 15 bp, Homo sapiens
gctcagcctcagtcc

SEQ ID NO: 580666 - DNA, 15 bp, Homo sapiens
ctcagcctcagtcca

SEQ ID NO: 580667 - DNA, 15 bp, Homo sapiens
tcagcctcagtccag

SEQ ID NO: 580668 - DNA, 15 bp, Homo sapiens
cagcctcagtccagt

SEQ ID NO: 580669 - DNA, 15 bp, Homo sapiens
agcctcagtccagtt

SEQ ID NO: 580670 - DNA, 15 bp, Homo sapiens
gcctcagtccagttc

SEQ ID NO: 580671 - DNA, 15 bp, Homo sapiens
cctcagtccagttct

SEQ ID NO: 580672 - DNA, 15 bp, Homo sapiens
ctcagtccagttctt

SEQ ID NO: 580673 - DNA, 15 bp, Homo sapiens
tcagtccagttctta

SEQ ID NO: 580674 - DNA, 15 bp, Homo sapiens
cagtccagttcttat

SEQ ID NO: 580675 - DNA, 15 bp, Homo sapiens
agtccagttcttatt

SEQ ID NO: 580676 - DNA, 15 bp, Homo sapiens
gtccagttcttattc

SEQ ID NO: 580677 - DNA, 15 bp, Homo sapiens
tccagttcttattcc

SEQ ID NO: 580678 - DNA, 15 bp, Homo sapiens
ccagttcttattcca

SEQ ID NO: 580679 - DNA, 15 bp, Homo sapiens
cagttcttattccat

SEQ ID NO: 580680 - DNA, 15 bp, Homo sapiens
agttcttattccatt

SEQ ID NO: 580681 - DNA, 15 bp, Homo sapiens
gttcttattccatta

SEQ ID NO: 580682 - DNA, 15 bp, Homo sapiens
ttcttattccattat

SEQ ID NO: 580683 - DNA, 15 bp, Homo sapiens
tcttattccattata

SEQ ID NO: 580684 - DNA, 15 bp, Homo sapiens
cttattccattatac

SEQ ID NO: 580685 - DNA, 15 bp, Homo sapiens
ttattccattatact

SEQ ID NO: 580686 - DNA, 15 bp, Homo sapiens
tattccattatactg

SEQ ID NO: 580687 - DNA, 15 bp, Homo sapiens
attccattatactgc

SEQ ID NO: 580688 - DNA, 15 bp, Homo sapiens
ttccattatactgca

SEQ ID NO: 580689 - DNA, 15 bp, Homo sapiens
tccattatactgcat

SEQ ID NO: 580690 - DNA, 15 bp, Homo sapiens
ccattatactgcatc

SEQ ID NO: 580691 - DNA, 15 bp, Homo sapiens
cattatactgcatca

SEQ ID NO: 580692 - DNA, 15 bp, Homo sapiens
attatactgcatcac

SEQ ID NO: 580693 - DNA, 15 bp, Homo sapiens
ttatactgcatcact

SEQ ID NO: 580694 - DNA, 15 bp, Homo sapiens
tatactgcatcactt

SEQ ID NO: 580695 - DNA, 15 bp, Homo sapiens
atactgcatcacttt

SEQ ID NO: 580696 - DNA, 15 bp, Homo sapiens
tactgcatcactttt

SEQ ID NO: 580697 - DNA, 15 bp, Homo sapiens
actgcatcacttttt

SEQ ID NO: 580698 - DNA, 15 bp, Homo sapiens
ctgcatcactttttc

SEQ ID NO: 580699 - DNA, 15 bp, Homo sapiens
tgcatcactttttcc

SEQ ID NO: 580700 - DNA, 15 bp, Homo sapiens
gcatcactttttccc

SEQ ID NO: 580701 - DNA, 15 bp, Homo sapiens
catcactttttcccc

SEQ ID NO: 580702 - DNA, 15 bp, Homo sapiens
atcactttttccccc

SEQ ID NO: 580703 - DNA, 15 bp, Homo sapiens
tcactttttccccct

SEQ ID NO: 580704 - DNA, 15 bp, Homo sapiens
cactttttccccctg

SEQ ID NO: 580705 - DNA, 15 bp, Homo sapiens
actttttccccctgc

SEQ ID NO: 580706 - DNA, 15 bp, Homo sapiens
ctttttccccctgcc

SEQ ID NO: 580707 - DNA, 15 bp, Homo sapiens
tttttccccctgcct

SEQ ID NO: 580708 - DNA, 15 bp, Homo sapiens
ttttccccctgcctc

SEQ ID NO: 580709 - DNA, 15 bp, Homo sapiens
tttccccctgcctct

SEQ ID NO: 580710 - DNA, 15 bp, Homo sapiens
ttccccctgcctctt

SEQ ID NO: 580711 - DNA, 15 bp, Homo sapiens
tccccctgcctcttg

SEQ ID NO: 580712 - DNA, 15 bp, Homo sapiens
ccccctgcctcttga

SEQ ID NO: 580713 - DNA, 15 bp, Homo sapiens
cccctgcctcttgaa

SEQ ID NO: 580714 - DNA, 15 bp, Homo sapiens
ccctgcctcttgaat

SEQ ID NO: 580715 - DNA, 15 bp, Homo sapiens
cctgcctcttgaatt

SEQ ID NO: 580716 - DNA, 15 bp, Homo sapiens
ctgcctcttgaatta

SEQ ID NO: 580717 - DNA, 15 bp, Homo sapiens
tgcctcttgaattaa

SEQ ID NO: 580718 - DNA, 15 bp, Homo sapiens
gcctcttgaattaaa

SEQ ID NO: 580719 - DNA, 15 bp, Homo sapiens
cctcttgaattaaac

SEQ ID NO: 580720 - DNA, 15 bp, Homo sapiens
ctcttgaattaaaca

SEQ ID NO: 580721 - DNA, 15 bp, Homo sapiens
tcttgaattaaacaa

SEQ ID NO: 580722 - DNA, 15 bp, Homo sapiens
cttgaattaaacaat

SEQ ID NO: 580723 - DNA, 15 bp, Homo sapiens
ttgaattaaacaatt

SEQ ID NO: 580724 - DNA, 15 bp, Homo sapiens
tgaattaaacaattc

SEQ ID NO: 580725 - DNA, 15 bp, Homo sapiens
gaattaaacaattcc

SEQ ID NO: 580726 - DNA, 15 bp, Homo sapiens
aattaaacaattcca

SEQ ID NO: 580727 - DNA, 15 bp, Homo sapiens
attaaacaattccaa

SEQ ID NO: 580728 - DNA, 15 bp, Homo sapiens
ttaaacaattccaac

SEQ ID NO: 580729 - DNA, 15 bp, Homo sapiens
taaacaattccaacc

SEQ ID NO: 580730 - DNA, 15 bp, Homo sapiens
aaacaattccaaccc

SEQ ID NO: 580731 - DNA, 15 bp, Homo sapiens
aacaattccaacccc

SEQ ID NO: 580732 - DNA, 15 bp, Homo sapiens
acaattccaacccct

SEQ ID NO: 580733 - DNA, 15 bp, Homo sapiens
caattccaaccccta

SEQ ID NO: 580734 - DNA, 15 bp, Homo sapiens
aattccaacccctac

SEQ ID NO: 580735 - DNA, 15 bp, Homo sapiens
attccaacccctact

SEQ ID NO: 580736 - DNA, 15 bp, Homo sapiens
ttccaacccctactc

SEQ ID NO: 580737 - DNA, 15 bp, Homo sapiens
tccaacccctactcc

SEQ ID NO: 580738 - DNA, 15 bp, Homo sapiens
ccaacccctactccc

SEQ ID NO: 580739 - DNA, 15 bp, Homo sapiens
caacccctactcccc

SEQ ID NO: 580740 - DNA, 15 bp, Homo sapiens
aacccctactcccca

SEQ ID NO: 580741 - DNA, 15 bp, Homo sapiens
acccctactccccac

SEQ ID NO: 580742 - DNA, 15 bp, Homo sapiens
cccctactccccact

SEQ ID NO: 580743 - DNA, 15 bp, Homo sapiens
ccctactccccacta

SEQ ID NO: 580744 - DNA, 15 bp, Homo sapiens
cctactccccactac

SEQ ID NO: 580745 - DNA, 15 bp, Homo sapiens
ctactccccactaca

SEQ ID NO: 580746 - DNA, 15 bp, Homo sapiens
tactccccactacat

SEQ ID NO: 580747 - DNA, 15 bp, Homo sapiens
actccccactacatt

SEQ ID NO: 580748 - DNA, 15 bp, Homo sapiens
ctccccactacattc

SEQ ID NO: 580749 - DNA, 15 bp, Homo sapiens
tccccactacattcc

SEQ ID NO: 580750 - DNA, 15 bp, Homo sapiens
ccccactacattcct

SEQ ID NO: 580751 - DNA, 15 bp, Homo sapiens
cccactacattcctc

SEQ ID NO: 580752 - DNA, 15 bp, Homo sapiens
ccactacattcctcc

SEQ ID NO: 580753 - DNA, 15 bp, Homo sapiens
cactacattcctcct

SEQ ID NO: 580754 - DNA, 15 bp, Homo sapiens
actacattcctcctg

SEQ ID NO: 580755 - DNA, 15 bp, Homo sapiens
ctacattcctcctgc

SEQ ID NO: 580756 - DNA, 15 bp, Homo sapiens
tacattcctcctgca

SEQ ID NO: 580757 - DNA, 15 bp, Homo sapiens
acattcctcctgcag

SEQ ID NO: 580758 - DNA, 15 bp, Homo sapiens
cattcctcctgcagc

SEQ ID NO: 580759 - DNA, 15 bp, Homo sapiens
attcctcctgcagcc

SEQ ID NO: 580760 - DNA, 15 bp, Homo sapiens
ttcctcctgcagcca

SEQ ID NO: 580761 - DNA, 15 bp, Homo sapiens
tcctcctgcagccaa

SEQ ID NO: 580762 - DNA, 15 bp, Homo sapiens
cctcctgcagccaaa

SEQ ID NO: 580763 - DNA, 15 bp, Homo sapiens
ctcctgcagccaaat

SEQ ID NO: 580764 - DNA, 15 bp, Homo sapiens
tcctgcagccaaatt

SEQ ID NO: 580765 - DNA, 15 bp, Homo sapiens
cctgcagccaaattt

SEQ ID NO: 580766 - DNA, 15 bp, Homo sapiens
ctgcagccaaatttc

SEQ ID NO: 580767 - DNA, 15 bp, Homo sapiens
tgcagccaaatttca

SEQ ID NO: 580768 - DNA, 15 bp, Homo sapiens
gcagccaaatttcac

SEQ ID NO: 580769 - DNA, 15 bp, Homo sapiens
cagccaaatttcacg

SEQ ID NO: 580770 - DNA, 15 bp, Homo sapiens
agccaaatttcacgc

SEQ ID NO: 580771 - DNA, 15 bp, Homo sapiens
gccaaatttcacgcg

SEQ ID NO: 580772 - DNA, 15 bp, Homo sapiens
ccaaatttcacgcgc

SEQ ID NO: 580773 - DNA, 15 bp, Homo sapiens
caaatttcacgcgcc

SEQ ID NO: 580774 - DNA, 15 bp, Homo sapiens
aaatttcacgcgccc

SEQ ID NO: 580775 - DNA, 15 bp, Homo sapiens
aatttcacgcgcccc

SEQ ID NO: 580776 - DNA, 15 bp, Homo sapiens
atttcacgcgccccc

SEQ ID NO: 580777 - DNA, 15 bp, Homo sapiens
tttcacgcgcccccc

SEQ ID NO: 580778 - DNA, 15 bp, Homo sapiens
ttcacgcgccccccc

SEQ ID NO: 580779 - DNA, 15 bp, Homo sapiens
tcacgcgcccccccc

SEQ ID NO: 580780 - DNA, 15 bp, Homo sapiens
cacgcgccccccccc

SEQ ID NO: 580781 - DNA, 15 bp, Homo sapiens
acgcgcccccccccc

SEQ ID NO: 580782 - DNA, 15 bp, Homo sapiens
cgcgcccccccccca

SEQ ID NO: 580783 - DNA, 15 bp, Homo sapiens
gcgccccccccccac

SEQ ID NO: 580784 - DNA, 15 bp, Homo sapiens
cgccccccccccacc

SEQ ID NO: 580785 - DNA, 15 bp, Homo sapiens
gccccccccccaccg

SEQ ID NO: 580786 - DNA, 15 bp, Homo sapiens
ccccccccccaccgc

SEQ ID NO: 580787 - DNA, 15 bp, Homo sapiens
cccccccccaccgcc

SEQ ID NO: 580788 - DNA, 15 bp, Homo sapiens
ccccccccaccgcct

SEQ ID NO: 580789 - DNA, 15 bp, Homo sapiens
cccccccaccgcctt

SEQ ID NO: 580790 - DNA, 15 bp, Homo sapiens
ccccccaccgccttt

SEQ ID NO: 580791 - DNA, 15 bp, Homo sapiens
cccccaccgcctttt

SEQ ID NO: 580792 - DNA, 15 bp, Homo sapiens
ccccaccgccttttc

SEQ ID NO: 580793 - DNA, 15 bp, Homo sapiens
cccaccgccttttct

SEQ ID NO: 580794 - DNA, 15 bp, Homo sapiens
ccaccgccttttctt

SEQ ID NO: 580795 - DNA, 15 bp, Homo sapiens
caccgccttttcttt

SEQ ID NO: 580796 - DNA, 15 bp, Homo sapiens
accgccttttctttt

SEQ ID NO: 580797 - DNA, 15 bp, Homo sapiens
ccgccttttcttttt

SEQ ID NO: 580798 - DNA, 15 bp, Homo sapiens
cgccttttctttttt

SEQ ID NO: 580799 - DNA, 15 bp, Homo sapiens
gccttttcttttttt

SEQ ID NO: 580800 - DNA, 15 bp, Homo sapiens
ccttttctttttttt

SEQ ID NO: 580801 - DNA, 15 bp, Homo sapiens
cttttcttttttttt

SEQ ID NO: 580802 - DNA, 15 bp, Homo sapiens
ttttctttttttttt

SEQ ID NO: 580803 - DNA, 15 bp, Homo sapiens
tttcttttttttttt

SEQ ID NO: 580804 - DNA, 15 bp, Homo sapiens
ttctttttttttttt

SEQ ID NO: 580805 - DNA, 15 bp, Homo sapiens
tcttttttttttttt

SEQ ID NO: 580806 - DNA, 15 bp, Homo sapiens
cttttttttttttta

SEQ ID NO: 580807 - DNA, 15 bp, Homo sapiens
ttttttttttttaga

SEQ ID NO: 580808 - DNA, 15 bp, Homo sapiens
tttttttttttagac

SEQ ID NO: 580809 - DNA, 15 bp, Homo sapiens
ttttttttttagacg

SEQ ID NO: 580810 - DNA, 15 bp, Homo sapiens
tttttttttagacgg

SEQ ID NO: 580811 - DNA, 15 bp, Homo sapiens
ttttttttagacgga

SEQ ID NO: 580812 - DNA, 15 bp, Homo sapiens
tttttttagacggag

SEQ ID NO: 580813 - DNA, 15 bp, Homo sapiens
ttttttagacggagt

SEQ ID NO: 580814 - DNA, 15 bp, Homo sapiens
tttttagacggagtc

SEQ ID NO: 580815 - DNA, 15 bp, Homo sapiens
ttttagacggagtct

SEQ ID NO: 580816 - DNA, 15 bp, Homo sapiens
tttagacggagtctt

SEQ ID NO: 580817 - DNA, 15 bp, Homo sapiens
ttagacggagtcttg

SEQ ID NO: 580818 - DNA, 15 bp, Homo sapiens
tagacggagtcttgc

SEQ ID NO: 580819 - DNA, 15 bp, Homo sapiens
agacggagtcttgct

SEQ ID NO: 580820 - DNA, 15 bp, Homo sapiens
gacggagtcttgctc

SEQ ID NO: 580821 - DNA, 15 bp, Homo sapiens
acggagtcttgctct

SEQ ID NO: 580822 - DNA, 15 bp, Homo sapiens
cggagtcttgctctg

SEQ ID NO: 580823 - DNA, 15 bp, Homo sapiens
ggagtcttgctctgc

SEQ ID NO: 580824 - DNA, 15 bp, Homo sapiens
gagtcttgctctgcc

SEQ ID NO: 580825 - DNA, 15 bp, Homo sapiens
agtcttgctctgccg

SEQ ID NO: 580826 - DNA, 15 bp, Homo sapiens
gtcttgctctgccgc

SEQ ID NO: 580827 - DNA, 15 bp, Homo sapiens
tcttgctctgccgcc

SEQ ID NO: 580828 - DNA, 15 bp, Homo sapiens
cttgctctgccgccc

SEQ ID NO: 580829 - DNA, 15 bp, Homo sapiens
ttgctctgccgccca

SEQ ID NO: 580830 - DNA, 15 bp, Homo sapiens
tgctctgccgcccag

SEQ ID NO: 580831 - DNA, 15 bp, Homo sapiens
gctctgccgcccagg

SEQ ID NO: 580832 - DNA, 15 bp, Homo sapiens
ctctgccgcccaggc

SEQ ID NO: 580833 - DNA, 15 bp, Homo sapiens
tctgccgcccaggct

SEQ ID NO: 580834 - DNA, 15 bp, Homo sapiens
ctgccgcccaggctt

SEQ ID NO: 580835 - DNA, 15 bp, Homo sapiens
tgccgcccaggcttg

SEQ ID NO: 580836 - DNA, 15 bp, Homo sapiens
gccgcccaggcttga

SEQ ID NO: 580837 - DNA, 15 bp, Homo sapiens
ccgcccaggcttgag

SEQ ID NO: 580838 - DNA, 15 bp, Homo sapiens
cgcccaggcttgagt

SEQ ID NO: 580839 - DNA, 15 bp, Homo sapiens
gcccaggcttgagta

SEQ ID NO: 580840 - DNA, 15 bp, Homo sapiens
cccaggcttgagtac

SEQ ID NO: 580841 - DNA, 15 bp, Homo sapiens
ccaggcttgagtaca

SEQ ID NO: 580842 - DNA, 15 bp, Homo sapiens
caggcttgagtacag

SEQ ID NO: 580843 - DNA, 15 bp, Homo sapiens
aggcttgagtacagt

SEQ ID NO: 580844 - DNA, 15 bp, Homo sapiens
ggcttgagtacagtg

SEQ ID NO: 580845 - DNA, 15 bp, Homo sapiens
gcttgagtacagtgg

SEQ ID NO: 580846 - DNA, 15 bp, Homo sapiens
cttgagtacagtggc

SEQ ID NO: 580847 - DNA, 15 bp, Homo sapiens
ttgagtacagtggca

SEQ ID NO: 580848 - DNA, 15 bp, Homo sapiens
tgagtacagtggcac

SEQ ID NO: 580849 - DNA, 15 bp, Homo sapiens
gagtacagtggcacc

SEQ ID NO: 580850 - DNA, 15 bp, Homo sapiens
agtacagtggcacca

SEQ ID NO: 580851 - DNA, 15 bp, Homo sapiens
gtacagtggcaccat

SEQ ID NO: 580852 - DNA, 15 bp, Homo sapiens
tacagtggcaccatc

SEQ ID NO: 580853 - DNA, 15 bp, Homo sapiens
acagtggcaccatct

SEQ ID NO: 580854 - DNA, 15 bp, Homo sapiens
cagtggcaccatctt

SEQ ID NO: 580855 - DNA, 15 bp, Homo sapiens
agtggcaccatcttg

SEQ ID NO: 580856 - DNA, 15 bp, Homo sapiens
gtggcaccatcttgg

SEQ ID NO: 580857 - DNA, 15 bp, Homo sapiens
tggcaccatcttggc

SEQ ID NO: 580858 - DNA, 15 bp, Homo sapiens
ggcaccatcttggct

SEQ ID NO: 580859 - DNA, 15 bp, Homo sapiens
gcaccatcttggctc

SEQ ID NO: 580860 - DNA, 15 bp, Homo sapiens
caccatcttggctca

SEQ ID NO: 580861 - DNA, 15 bp, Homo sapiens
accatcttggctcac

SEQ ID NO: 580862 - DNA, 15 bp, Homo sapiens
ccatcttggctcact

SEQ ID NO: 580863 - DNA, 15 bp, Homo sapiens
catcttggctcactg

SEQ ID NO: 580864 - DNA, 15 bp, Homo sapiens
atcttggctcactgc

SEQ ID NO: 580865 - DNA, 15 bp, Homo sapiens
tcttggctcactgca

SEQ ID NO: 580866 - DNA, 15 bp, Homo sapiens
cttggctcactgcaa

SEQ ID NO: 580867 - DNA, 15 bp, Homo sapiens
ttggctcactgcaac

SEQ ID NO: 580868 - DNA, 15 bp, Homo sapiens
tggctcactgcaacc

SEQ ID NO: 580869 - DNA, 15 bp, Homo sapiens
ggctcactgcaacct

SEQ ID NO: 580870 - DNA, 15 bp, Homo sapiens
gctcactgcaacctt

SEQ ID NO: 580871 - DNA, 15 bp, Homo sapiens
ctcactgcaaccttc

SEQ ID NO: 580872 - DNA, 15 bp, Homo sapiens
tcactgcaaccttcg

SEQ ID NO: 580873 - DNA, 15 bp, Homo sapiens
cactgcaaccttcgc

SEQ ID NO: 580874 - DNA, 15 bp, Homo sapiens
actgcaaccttcgcc

SEQ ID NO: 580875 - DNA, 15 bp, Homo sapiens
ctgcaaccttcgcca

SEQ ID NO: 580876 - DNA, 15 bp, Homo sapiens
tgcaaccttcgccac

SEQ ID NO: 580877 - DNA, 15 bp, Homo sapiens
gcaaccttcgccacc

SEQ ID NO: 580878 - DNA, 15 bp, Homo sapiens
caaccttcgccacca

SEQ ID NO: 580879 - DNA, 15 bp, Homo sapiens
aaccttcgccaccag

SEQ ID NO: 580880 - DNA, 15 bp, Homo sapiens
accttcgccaccaga

SEQ ID NO: 580881 - DNA, 15 bp, Homo sapiens
ccttcgccaccagat

SEQ ID NO: 580882 - DNA, 15 bp, Homo sapiens
cttcgccaccagatt

SEQ ID NO: 580883 - DNA, 15 bp, Homo sapiens
ttcgccaccagattc

SEQ ID NO: 580884 - DNA, 15 bp, Homo sapiens
tcgccaccagattca

SEQ ID NO: 580885 - DNA, 15 bp, Homo sapiens
cgccaccagattcaa

SEQ ID NO: 580886 - DNA, 15 bp, Homo sapiens
gccaccagattcaag

SEQ ID NO: 580887 - DNA, 15 bp, Homo sapiens
ccaccagattcaagc

SEQ ID NO: 580888 - DNA, 15 bp, Homo sapiens
caccagattcaagca

SEQ ID NO: 580889 - DNA, 15 bp, Homo sapiens
accagattcaagcaa

SEQ ID NO: 580890 - DNA, 15 bp, Homo sapiens
ccagattcaagcaac

SEQ ID NO: 580891 - DNA, 15 bp, Homo sapiens
cagattcaagcaact

SEQ ID NO: 580892 - DNA, 15 bp, Homo sapiens
agattcaagcaactg

SEQ ID NO: 580893 - DNA, 15 bp, Homo sapiens
gattcaagcaactgt

SEQ ID NO: 580894 - DNA, 15 bp, Homo sapiens
attcaagcaactgtc

SEQ ID NO: 580895 - DNA, 15 bp, Homo sapiens
ttcaagcaactgtcc

SEQ ID NO: 580896 - DNA, 15 bp, Homo sapiens
tcaagcaactgtcct

SEQ ID NO: 580897 - DNA, 15 bp, Homo sapiens
caagcaactgtcctg

SEQ ID NO: 580898 - DNA, 15 bp, Homo sapiens
aagcaactgtcctgc

SEQ ID NO: 580899 - DNA, 15 bp, Homo sapiens
agcaactgtcctgcc

SEQ ID NO: 580900 - DNA, 15 bp, Homo sapiens
gcaactgtcctgcct

SEQ ID NO: 580901 - DNA, 15 bp, Homo sapiens
caactgtcctgcctc

SEQ ID NO: 580902 - DNA, 15 bp, Homo sapiens
aactgtcctgcctca

SEQ ID NO: 580903 - DNA, 15 bp, Homo sapiens
actgtcctgcctcag

SEQ ID NO: 580904 - DNA, 15 bp, Homo sapiens
ctgtcctgcctcagc

SEQ ID NO: 580905 - DNA, 15 bp, Homo sapiens
tgtcctgcctcagcc

SEQ ID NO: 580906 - DNA, 15 bp, Homo sapiens
gtcctgcctcagcct

SEQ ID NO: 580907 - DNA, 15 bp, Homo sapiens
ctcagcctcctgagg

SEQ ID NO: 580908 - DNA, 15 bp, Homo sapiens
tcagcctcctgaggc

SEQ ID NO: 580909 - DNA, 15 bp, Homo sapiens
cagcctcctgaggct

SEQ ID NO: 580910 - DNA, 15 bp, Homo sapiens
agcctcctgaggctg

SEQ ID NO: 580911 - DNA, 15 bp, Homo sapiens
gcctcctgaggctgg

SEQ ID NO: 580912 - DNA, 15 bp, Homo sapiens
cctcctgaggctggg

SEQ ID NO: 580913 - DNA, 15 bp, Homo sapiens
ctcctgaggctggga

SEQ ID NO: 580914 - DNA, 15 bp, Homo sapiens
tcctgaggctgggac

SEQ ID NO: 580915 - DNA, 15 bp, Homo sapiens
cctgaggctgggact

SEQ ID NO: 580916 - DNA, 15 bp, Homo sapiens
ctgaggctgggacta

SEQ ID NO: 580917 - DNA, 15 bp, Homo sapiens
tgaggctgggactac

SEQ ID NO: 580918 - DNA, 15 bp, Homo sapiens
gaggctgggactaca

SEQ ID NO: 580919 - DNA, 15 bp, Homo sapiens
aggctgggactacag

SEQ ID NO: 580920 - DNA, 15 bp, Homo sapiens
ggctgggactacaga

SEQ ID NO: 580921 - DNA, 15 bp, Homo sapiens
gctgggactacagat

SEQ ID NO: 580922 - DNA, 15 bp, Homo sapiens
ctgggactacagatg

SEQ ID NO: 580923 - DNA, 15 bp, Homo sapiens
tgggactacagatgc

SEQ ID NO: 580924 - DNA, 15 bp, Homo sapiens
gggactacagatgct

SEQ ID NO: 580925 - DNA, 15 bp, Homo sapiens
ggactacagatgctt

SEQ ID NO: 580926 - DNA, 15 bp, Homo sapiens
gactacagatgcttg

SEQ ID NO: 580927 - DNA, 15 bp, Homo sapiens
actacagatgcttgc

SEQ ID NO: 580928 - DNA, 15 bp, Homo sapiens
ctacagatgcttgcc

SEQ ID NO: 580929 - DNA, 15 bp, Homo sapiens
tacagatgcttgcca

SEQ ID NO: 580930 - DNA, 15 bp, Homo sapiens
acagatgcttgccac

SEQ ID NO: 580931 - DNA, 15 bp, Homo sapiens
cagatgcttgccacc

SEQ ID NO: 580932 - DNA, 15 bp, Homo sapiens
agatgcttgccacca

SEQ ID NO: 580933 - DNA, 15 bp, Homo sapiens
gatgcttgccaccac

SEQ ID NO: 580934 - DNA, 15 bp, Homo sapiens
atgcttgccaccaca

SEQ ID NO: 580935 - DNA, 15 bp, Homo sapiens
tgcttgccaccacac

SEQ ID NO: 580936 - DNA, 15 bp, Homo sapiens
gcttgccaccacacc

SEQ ID NO: 580937 - DNA, 15 bp, Homo sapiens
cttgccaccacaccc

SEQ ID NO: 580938 - DNA, 15 bp, Homo sapiens
ttgccaccacaccca

SEQ ID NO: 580939 - DNA, 15 bp, Homo sapiens
tgccaccacacccag

SEQ ID NO: 580940 - DNA, 15 bp, Homo sapiens
gccaccacacccagc

SEQ ID NO: 580941 - DNA, 15 bp, Homo sapiens
ccaccacacccagct

SEQ ID NO: 580942 - DNA, 15 bp, Homo sapiens
caccacacccagcta

SEQ ID NO: 580943 - DNA, 15 bp, Homo sapiens
accacacccagctaa

SEQ ID NO: 580944 - DNA, 15 bp, Homo sapiens
ccacacccagctaat

SEQ ID NO: 580945 - DNA, 15 bp, Homo sapiens
cacacccagctaatt

SEQ ID NO: 580946 - DNA, 15 bp, Homo sapiens
acacccagctaattt

SEQ ID NO: 580947 - DNA, 15 bp, Homo sapiens
cacccagctaatttt

SEQ ID NO: 580948 - DNA, 15 bp, Homo sapiens
acccagctaattttt

SEQ ID NO: 580949 - DNA, 15 bp, Homo sapiens
atttttgtatttttg

SEQ ID NO: 580950 - DNA, 15 bp, Homo sapiens
tttttgtatttttgg

SEQ ID NO: 580951 - DNA, 15 bp, Homo sapiens
ttttgtatttttggt

SEQ ID NO: 580952 - DNA, 15 bp, Homo sapiens
tttgtatttttggta

SEQ ID NO: 580953 - DNA, 15 bp, Homo sapiens
ttgtatttttggtag

SEQ ID NO: 580954 - DNA, 15 bp, Homo sapiens
tgtatttttggtaga

SEQ ID NO: 580955 - DNA, 15 bp, Homo sapiens
gtatttttggtagat

SEQ ID NO: 580956 - DNA, 15 bp, Homo sapiens
tatttttggtagata

SEQ ID NO: 580957 - DNA, 15 bp, Homo sapiens
atttttggtagatat

SEQ ID NO: 580958 - DNA, 15 bp, Homo sapiens
tttttggtagatatg

SEQ ID NO: 580959 - DNA, 15 bp, Homo sapiens
ttttggtagatatgg

SEQ ID NO: 580960 - DNA, 15 bp, Homo sapiens
tttggtagatatggg

SEQ ID NO: 580961 - DNA, 15 bp, Homo sapiens
ttggtagatatgggg

SEQ ID NO: 580962 - DNA, 15 bp, Homo sapiens
tggtagatatggggt

SEQ ID NO: 580963 - DNA, 15 bp, Homo sapiens
ggtagatatggggtt

SEQ ID NO: 580964 - DNA, 15 bp, Homo sapiens
gtagatatggggttt

SEQ ID NO: 580965 - DNA, 15 bp, Homo sapiens
tagatatggggtttc

SEQ ID NO: 580966 - DNA, 15 bp, Homo sapiens
agatatggggtttca

SEQ ID NO: 580967 - DNA, 15 bp, Homo sapiens
gatatggggtttcac

SEQ ID NO: 580968 - DNA, 15 bp, Homo sapiens
atatggggtttcacc

SEQ ID NO: 580969 - DNA, 15 bp, Homo sapiens
tatggggtttcacca

SEQ ID NO: 580970 - DNA, 15 bp, Homo sapiens
atggggtttcaccat

SEQ ID NO: 580971 - DNA, 15 bp, Homo sapiens
tggggtttcaccatg

SEQ ID NO: 580972 - DNA, 15 bp, Homo sapiens
ggtttcaccatgtta

SEQ ID NO: 580973 - DNA, 15 bp, Homo sapiens
gtttcaccatgttag

SEQ ID NO: 580974 - DNA, 15 bp, Homo sapiens
tttcaccatgttagc

SEQ ID NO: 580975 - DNA, 15 bp, Homo sapiens
ttcaccatgttagcc

SEQ ID NO: 580976 - DNA, 15 bp, Homo sapiens
tcaccatgttagcca

SEQ ID NO: 580977 - DNA, 15 bp, Homo sapiens
caccatgttagccag

SEQ ID NO: 580978 - DNA, 15 bp, Homo sapiens
accatgttagccagg

SEQ ID NO: 580979 - DNA, 15 bp, Homo sapiens
ccatgttagccagga

SEQ ID NO: 580980 - DNA, 15 bp, Homo sapiens
catgttagccaggat

SEQ ID NO: 580981 - DNA, 15 bp, Homo sapiens
atgttagccaggatg

SEQ ID NO: 580982 - DNA, 15 bp, Homo sapiens
gccaggatggtctca

SEQ ID NO: 580983 - DNA, 15 bp, Homo sapiens
ccaggatggtctcaa

SEQ ID NO: 580984 - DNA, 15 bp, Homo sapiens
caggatggtctcaaa

SEQ ID NO: 580985 - DNA, 15 bp, Homo sapiens
aggatggtctcaaac

SEQ ID NO: 580986 - DNA, 15 bp, Homo sapiens
ggatggtctcaaacg

SEQ ID NO: 580987 - DNA, 15 bp, Homo sapiens
gatggtctcaaacga

SEQ ID NO: 580988 - DNA, 15 bp, Homo sapiens
atggtctcaaacgac

SEQ ID NO: 580989 - DNA, 15 bp, Homo sapiens
tggtctcaaacgacc

SEQ ID NO: 580990 - DNA, 15 bp, Homo sapiens
ggtctcaaacgaccc

SEQ ID NO: 580991 - DNA, 15 bp, Homo sapiens
gtctcaaacgaccca

SEQ ID NO: 580992 - DNA, 15 bp, Homo sapiens
tctcaaacgacccac

SEQ ID NO: 580993 - DNA, 15 bp, Homo sapiens
ctcaaacgacccacc

SEQ ID NO: 580994 - DNA, 15 bp, Homo sapiens
tcaaacgacccaccc

SEQ ID NO: 580995 - DNA, 15 bp, Homo sapiens
caaacgacccaccca

SEQ ID NO: 580996 - DNA, 15 bp, Homo sapiens
aaacgacccacccac

SEQ ID NO: 580997 - DNA, 15 bp, Homo sapiens
aacgacccacccacc

SEQ ID NO: 580998 - DNA, 15 bp, Homo sapiens
acgacccacccacct

SEQ ID NO: 580999 - DNA, 15 bp, Homo sapiens
cgacccacccacctt

SEQ ID NO: 581000 - DNA, 15 bp, Homo sapiens
gacccacccaccttg

SEQ ID NO: 581001 - DNA, 15 bp, Homo sapiens
acccacccaccttgg

SEQ ID NO: 581002 - DNA, 15 bp, Homo sapiens
cccacccaccttggc

SEQ ID NO: 581003 - DNA, 15 bp, Homo sapiens
ccacccaccttggcc

SEQ ID NO: 581004 - DNA, 15 bp, Homo sapiens
cacccaccttggcca

SEQ ID NO: 581005 - DNA, 15 bp, Homo sapiens
acccaccttggccac

SEQ ID NO: 581006 - DNA, 15 bp, Homo sapiens
cccaccttggccacc

SEQ ID NO: 581007 - DNA, 15 bp, Homo sapiens
ccaccttggccaccc

SEQ ID NO: 581008 - DNA, 15 bp, Homo sapiens
caccttggccaccca

SEQ ID NO: 581009 - DNA, 15 bp, Homo sapiens
accttggccacccaa

SEQ ID NO: 581010 - DNA, 15 bp, Homo sapiens
ccttggccacccaaa

SEQ ID NO: 581011 - DNA, 15 bp, Homo sapiens
cttggccacccaaag

SEQ ID NO: 581012 - DNA, 15 bp, Homo sapiens
ttggccacccaaagt

SEQ ID NO: 581013 - DNA, 15 bp, Homo sapiens
tggccacccaaagtg

SEQ ID NO: 581014 - DNA, 15 bp, Homo sapiens
ggccacccaaagtgc

SEQ ID NO: 581015 - DNA, 15 bp, Homo sapiens
gccacccaaagtgct

SEQ ID NO: 581016 - DNA, 15 bp, Homo sapiens
ccacccaaagtgctg

SEQ ID NO: 581017 - DNA, 15 bp, Homo sapiens
cacccaaagtgctgg

SEQ ID NO: 581018 - DNA, 15 bp, Homo sapiens
acccaaagtgctggg

SEQ ID NO: 581019 - DNA, 15 bp, Homo sapiens
aggtgtgagccaccg

SEQ ID NO: 581020 - DNA, 15 bp, Homo sapiens
ggtgtgagccaccgc

SEQ ID NO: 581021 - DNA, 15 bp, Homo sapiens
gtgtgagccaccgcg

SEQ ID NO: 581022 - DNA, 15 bp, Homo sapiens
tgtgagccaccgcgc

SEQ ID NO: 581023 - DNA, 15 bp, Homo sapiens
gtgagccaccgcgcc

SEQ ID NO: 581024 - DNA, 15 bp, Homo sapiens
tgagccaccgcgccc

SEQ ID NO: 581025 - DNA, 15 bp, Homo sapiens
gagccaccgcgccca

SEQ ID NO: 581026 - DNA, 15 bp, Homo sapiens
agccaccgcgcccag

SEQ ID NO: 581027 - DNA, 15 bp, Homo sapiens
gccaccgcgcccagc

SEQ ID NO: 581028 - DNA, 15 bp, Homo sapiens
ccaccgcgcccagcc

SEQ ID NO: 581029 - DNA, 15 bp, Homo sapiens
caccgcgcccagcca

SEQ ID NO: 581030 - DNA, 15 bp, Homo sapiens
accgcgcccagccat

SEQ ID NO: 581031 - DNA, 15 bp, Homo sapiens
ccgcgcccagccatt

SEQ ID NO: 581032 - DNA, 15 bp, Homo sapiens
cgcgcccagccattc

SEQ ID NO: 581033 - DNA, 15 bp, Homo sapiens
gcgcccagccattct

SEQ ID NO: 581034 - DNA, 15 bp, Homo sapiens
cgcccagccattcta

SEQ ID NO: 581035 - DNA, 15 bp, Homo sapiens
gcccagccattctac

SEQ ID NO: 581036 - DNA, 15 bp, Homo sapiens
cccagccattctacc

SEQ ID NO: 581037 - DNA, 15 bp, Homo sapiens
ccagccattctaccc

SEQ ID NO: 581038 - DNA, 15 bp, Homo sapiens
cagccattctaccct

SEQ ID NO: 581039 - DNA, 15 bp, Homo sapiens
agccattctaccctt

SEQ ID NO: 581040 - DNA, 15 bp, Homo sapiens
gccattctacccttt

SEQ ID NO: 581041 - DNA, 15 bp, Homo sapiens
ccattctaccctttt

SEQ ID NO: 581042 - DNA, 15 bp, Homo sapiens
cattctacccttttc

SEQ ID NO: 581043 - DNA, 15 bp, Homo sapiens
attctacccttttcc

SEQ ID NO: 581044 - DNA, 15 bp, Homo sapiens
ttctacccttttcca

SEQ ID NO: 581045 - DNA, 15 bp, Homo sapiens
tctacccttttccat

SEQ ID NO: 581046 - DNA, 15 bp, Homo sapiens
ctacccttttccatc

SEQ ID NO: 581047 - DNA, 15 bp, Homo sapiens
tacccttttccatct

SEQ ID NO: 581048 - DNA, 15 bp, Homo sapiens
acccttttccatctt

SEQ ID NO: 581049 - DNA, 15 bp, Homo sapiens
cccttttccatcttc

SEQ ID NO: 581050 - DNA, 15 bp, Homo sapiens
ccttttccatcttct

SEQ ID NO: 581051 - DNA, 15 bp, Homo sapiens
cttttccatcttctt

SEQ ID NO: 581052 - DNA, 15 bp, Homo sapiens
ttttccatcttcttc

SEQ ID NO: 581053 - DNA, 15 bp, Homo sapiens
tttccatcttcttct

SEQ ID NO: 581054 - DNA, 15 bp, Homo sapiens
ttccatcttcttcta

SEQ ID NO: 581055 - DNA, 15 bp, Homo sapiens
tccatcttcttctaa

SEQ ID NO: 581056 - DNA, 15 bp, Homo sapiens
ccatcttcttctaat

SEQ ID NO: 581057 - DNA, 15 bp, Homo sapiens
catcttcttctaatc

SEQ ID NO: 581058 - DNA, 15 bp, Homo sapiens
atcttcttctaatca

SEQ ID NO: 581059 - DNA, 15 bp, Homo sapiens
tcttcttctaatcac

SEQ ID NO: 581060 - DNA, 15 bp, Homo sapiens
cttcttctaatcacc

SEQ ID NO: 581061 - DNA, 15 bp, Homo sapiens
ttcttctaatcaccc

SEQ ID NO: 581062 - DNA, 15 bp, Homo sapiens
tcttctaatcaccca

SEQ ID NO: 581063 - DNA, 15 bp, Homo sapiens
cttctaatcacccac

SEQ ID NO: 581064 - DNA, 15 bp, Homo sapiens
ttctaatcacccact

SEQ ID NO: 581065 - DNA, 15 bp, Homo sapiens
tctaatcacccactc

SEQ ID NO: 581066 - DNA, 15 bp, Homo sapiens
ctaatcacccactca

SEQ ID NO: 581067 - DNA, 15 bp, Homo sapiens
taatcacccactcac

SEQ ID NO: 581068 - DNA, 15 bp, Homo sapiens
aatcacccactcacc

SEQ ID NO: 581069 - DNA, 15 bp, Homo sapiens
atcacccactcaccg

SEQ ID NO: 581070 - DNA, 15 bp, Homo sapiens
tcacccactcaccgc

SEQ ID NO: 581071 - DNA, 15 bp, Homo sapiens
cacccactcaccgcg

SEQ ID NO: 581072 - DNA, 15 bp, Homo sapiens
acccactcaccgcgt

SEQ ID NO: 581073 - DNA, 15 bp, Homo sapiens
cccactcaccgcgtg

SEQ ID NO: 581074 - DNA, 15 bp, Homo sapiens
ccactcaccgcgtgg

SEQ ID NO: 581075 - DNA, 15 bp, Homo sapiens
cactcaccgcgtggt

SEQ ID NO: 581076 - DNA, 15 bp, Homo sapiens
actcaccgcgtggtg

SEQ ID NO: 581077 - DNA, 15 bp, Homo sapiens
ctcaccgcgtggtga

SEQ ID NO: 581078 - DNA, 15 bp, Homo sapiens
tcaccgcgtggtgag

SEQ ID NO: 581079 - DNA, 15 bp, Homo sapiens
caccgcgtggtgagg

SEQ ID NO: 581080 - DNA, 15 bp, Homo sapiens
accgcgtggtgaggt

SEQ ID NO: 581081 - DNA, 15 bp, Homo sapiens
ccgcgtggtgaggtc

SEQ ID NO: 581082 - DNA, 15 bp, Homo sapiens
cgcgtggtgaggtcc

SEQ ID NO: 581083 - DNA, 15 bp, Homo sapiens
gcgtggtgaggtccg

SEQ ID NO: 581084 - DNA, 15 bp, Homo sapiens
cgtggtgaggtccga

SEQ ID NO: 581085 - DNA, 15 bp, Homo sapiens
gtggtgaggtccgaa

SEQ ID NO: 581086 - DNA, 15 bp, Homo sapiens
tggtgaggtccgaag

SEQ ID NO: 581087 - DNA, 15 bp, Homo sapiens
ggtgaggtccgaagg

SEQ ID NO: 581088 - DNA, 15 bp, Homo sapiens
gtgaggtccgaagga

SEQ ID NO: 581089 - DNA, 15 bp, Homo sapiens
tgaggtccgaaggat

SEQ ID NO: 581090 - DNA, 15 bp, Homo sapiens
gaggtccgaaggatg

SEQ ID NO: 581091 - DNA, 15 bp, Homo sapiens
aggtccgaaggatgc

SEQ ID NO: 581092 - DNA, 15 bp, Homo sapiens
ggtccgaaggatgct

SEQ ID NO: 581093 - DNA, 15 bp, Homo sapiens
gtccgaaggatgctg

SEQ ID NO: 581094 - DNA, 15 bp, Homo sapiens
tccgaaggatgctgc

SEQ ID NO: 581095 - DNA, 15 bp, Homo sapiens
ccgaaggatgctgcc

SEQ ID NO: 581096 - DNA, 15 bp, Homo sapiens
cgaaggatgctgcca

SEQ ID NO: 581097 - DNA, 15 bp, Homo sapiens
gaaggatgctgccat

SEQ ID NO: 581098 - DNA, 15 bp, Homo sapiens
aaggatgctgccatt

SEQ ID NO: 581099 - DNA, 15 bp, Homo sapiens
aggatgctgccattt

SEQ ID NO: 581100 - DNA, 15 bp, Homo sapiens
ggatgctgccatttt

SEQ ID NO: 581101 - DNA, 15 bp, Homo sapiens
gatgctgccattttg

SEQ ID NO: 581102 - DNA, 15 bp, Homo sapiens
atgctgccattttga

SEQ ID NO: 581103 - DNA, 15 bp, Homo sapiens
tgctgccattttgag

SEQ ID NO: 581104 - DNA, 15 bp, Homo sapiens
gctgccattttgagt

SEQ ID NO: 581105 - DNA, 15 bp, Homo sapiens
ctgccattttgagtg

SEQ ID NO: 581106 - DNA, 15 bp, Homo sapiens
tgccattttgagtgc

SEQ ID NO: 581107 - DNA, 15 bp, Homo sapiens
gccattttgagtgct

SEQ ID NO: 581108 - DNA, 15 bp, Homo sapiens
ccattttgagtgctg

SEQ ID NO: 581109 - DNA, 15 bp, Homo sapiens
cattttgagtgctgc

SEQ ID NO: 581110 - DNA, 15 bp, Homo sapiens
attttgagtgctgca

SEQ ID NO: 581111 - DNA, 15 bp, Homo sapiens
ttttgagtgctgcat

SEQ ID NO: 581112 - DNA, 15 bp, Homo sapiens
tttgagtgctgcata

SEQ ID NO: 581113 - DNA, 15 bp, Homo sapiens
ttgagtgctgcatat

SEQ ID NO: 581114 - DNA, 15 bp, Homo sapiens
tgagtgctgcatatg

SEQ ID NO: 581115 - DNA, 15 bp, Homo sapiens
gagtgctgcatatga

SEQ ID NO: 581116 - DNA, 15 bp, Homo sapiens
agtgctgcatatgat

SEQ ID NO: 581117 - DNA, 15 bp, Homo sapiens
gtgctgcatatgatg

SEQ ID NO: 581118 - DNA, 15 bp, Homo sapiens
tgctgcatatgatga

SEQ ID NO: 581119 - DNA, 15 bp, Homo sapiens
gctgcatatgatgaa

SEQ ID NO: 581120 - DNA, 15 bp, Homo sapiens
ctgcatatgatgaac

SEQ ID NO: 581121 - DNA, 15 bp, Homo sapiens
tgcatatgatgaact

SEQ ID NO: 581122 - DNA, 15 bp, Homo sapiens
gcatatgatgaactt

SEQ ID NO: 581123 - DNA, 15 bp, Homo sapiens
catatgatgaacttg

SEQ ID NO: 581124 - DNA, 15 bp, Homo sapiens
atatgatgaacttga

SEQ ID NO: 581125 - DNA, 15 bp, Homo sapiens
tatgatgaacttgat

SEQ ID NO: 581126 - DNA, 15 bp, Homo sapiens
atgatgaacttgatc

SEQ ID NO: 581127 - DNA, 15 bp, Homo sapiens
tgatgaacttgatcc

SEQ ID NO: 581128 - DNA, 15 bp, Homo sapiens
gatgaacttgatcca

SEQ ID NO: 581129 - DNA, 15 bp, Homo sapiens
atgaacttgatccat

SEQ ID NO: 581130 - DNA, 15 bp, Homo sapiens
tgaacttgatccatc

SEQ ID NO: 581131 - DNA, 15 bp, Homo sapiens
gaacttgatccatca

SEQ ID NO: 581132 - DNA, 15 bp, Homo sapiens
aacttgatccatcaa

SEQ ID NO: 581133 - DNA, 15 bp, Homo sapiens
acttgatccatcaag

SEQ ID NO: 581134 - DNA, 15 bp, Homo sapiens
cttgatccatcaagg

SEQ ID NO: 581135 - DNA, 15 bp, Homo sapiens
ttgatccatcaaggc

SEQ ID NO: 581136 - DNA, 15 bp, Homo sapiens
tgatccatcaaggca

SEQ ID NO: 581137 - DNA, 15 bp, Homo sapiens
gatccatcaaggcac

SEQ ID NO: 581138 - DNA, 15 bp, Homo sapiens
atccatcaaggcaca

SEQ ID NO: 581139 - DNA, 15 bp, Homo sapiens
tccatcaaggcacaa

SEQ ID NO: 581140 - DNA, 15 bp, Homo sapiens
ccatcaaggcacaaa

SEQ ID NO: 581141 - DNA, 15 bp, Homo sapiens
catcaaggcacaaag

SEQ ID NO: 581142 - DNA, 15 bp, Homo sapiens
atcaaggcacaaagc

SEQ ID NO: 581143 - DNA, 15 bp, Homo sapiens
tcaaggcacaaagct

SEQ ID NO: 581144 - DNA, 15 bp, Homo sapiens
caaggcacaaagctc

SEQ ID NO: 581145 - DNA, 15 bp, Homo sapiens
aaggcacaaagctcc

SEQ ID NO: 581146 - DNA, 15 bp, Homo sapiens
aggcacaaagctccc

SEQ ID NO: 581147 - DNA, 15 bp, Homo sapiens
ggcacaaagctcccc

SEQ ID NO: 581148 - DNA, 15 bp, Homo sapiens
gcacaaagctccccc

SEQ ID NO: 581149 - DNA, 15 bp, Homo sapiens
cacaaagctcccccg

SEQ ID NO: 581150 - DNA, 15 bp, Homo sapiens
acaaagctcccccga

SEQ ID NO: 581151 - DNA, 15 bp, Homo sapiens
caaagctcccccgag

SEQ ID NO: 581152 - DNA, 15 bp, Homo sapiens
aaagctcccccgaga

SEQ ID NO: 581153 - DNA, 15 bp, Homo sapiens
aagctcccccgagat

SEQ ID NO: 581154 - DNA, 15 bp, Homo sapiens
agctcccccgagata

SEQ ID NO: 581155 - DNA, 15 bp, Homo sapiens
gctcccccgagatac

SEQ ID NO: 581156 - DNA, 15 bp, Homo sapiens
ctcccccgagatacc

SEQ ID NO: 581157 - DNA, 15 bp, Homo sapiens
tcccccgagatacct

SEQ ID NO: 581158 - DNA, 15 bp, Homo sapiens
cccccgagatacctg

SEQ ID NO: 581159 - DNA, 15 bp, Homo sapiens
ccccgagatacctgt

SEQ ID NO: 581160 - DNA, 15 bp, Homo sapiens
cccgagatacctgtg

SEQ ID NO: 581161 - DNA, 15 bp, Homo sapiens
ccgagatacctgtga

SEQ ID NO: 581162 - DNA, 15 bp, Homo sapiens
cgagatacctgtgat

SEQ ID NO: 581163 - DNA, 15 bp, Homo sapiens
gagatacctgtgata

SEQ ID NO: 581164 - DNA, 15 bp, Homo sapiens
agatacctgtgatac

SEQ ID NO: 581165 - DNA, 15 bp, Homo sapiens
gatacctgtgataca

SEQ ID NO: 581166 - DNA, 15 bp, Homo sapiens
atacctgtgatacag

SEQ ID NO: 581167 - DNA, 15 bp, Homo sapiens
tacctgtgatacaga

SEQ ID NO: 581168 - DNA, 15 bp, Homo sapiens
acctgtgatacagag

SEQ ID NO: 581169 - DNA, 15 bp, Homo sapiens
cctgtgatacagagg

SEQ ID NO: 581170 - DNA, 15 bp, Homo sapiens
ctgtgatacagaggg

SEQ ID NO: 581171 - DNA, 15 bp, Homo sapiens
tgtgatacagaggga

SEQ ID NO: 581172 - DNA, 15 bp, Homo sapiens
gtgatacagagggat

SEQ ID NO: 581173 - DNA, 15 bp, Homo sapiens
tgatacagagggatc

SEQ ID NO: 581174 - DNA, 15 bp, Homo sapiens
gatacagagggatca

SEQ ID NO: 581175 - DNA, 15 bp, Homo sapiens
atacagagggatcag

SEQ ID NO: 581176 - DNA, 15 bp, Homo sapiens
tacagagggatcagt

SEQ ID NO: 581177 - DNA, 15 bp, Homo sapiens
acagagggatcagtg

SEQ ID NO: 581178 - DNA, 15 bp, Homo sapiens
cagagggatcagtgg

SEQ ID NO: 581179 - DNA, 15 bp, Homo sapiens
agagggatcagtggt

SEQ ID NO: 581180 - DNA, 15 bp, Homo sapiens
gagggatcagtggtt

SEQ ID NO: 581181 - DNA, 15 bp, Homo sapiens
agggatcagtggtta

SEQ ID NO: 581182 - DNA, 15 bp, Homo sapiens
gggatcagtggttag

SEQ ID NO: 581183 - DNA, 15 bp, Homo sapiens
ggatcagtggttagg

SEQ ID NO: 581184 - DNA, 15 bp, Homo sapiens
gatcagtggttagga

SEQ ID NO: 581185 - DNA, 15 bp, Homo sapiens
atcagtggttaggaa

SEQ ID NO: 581186 - DNA, 15 bp, Homo sapiens
tcagtggttaggaac

SEQ ID NO: 581187 - DNA, 15 bp, Homo sapiens
cagtggttaggaaca

SEQ ID NO: 581188 - DNA, 15 bp, Homo sapiens
agtggttaggaacag

SEQ ID NO: 581189 - DNA, 15 bp, Homo sapiens
gtggttaggaacagc

SEQ ID NO: 581190 - DNA, 15 bp, Homo sapiens
tggttaggaacagct

SEQ ID NO: 581191 - DNA, 15 bp, Homo sapiens
ggttaggaacagctg

SEQ ID NO: 581192 - DNA, 15 bp, Homo sapiens
gttaggaacagctga

SEQ ID NO: 581193 - DNA, 15 bp, Homo sapiens
ttaggaacagctgag

SEQ ID NO: 581194 - DNA, 15 bp, Homo sapiens
taggaacagctgagt

SEQ ID NO: 581195 - DNA, 15 bp, Homo sapiens
aggaacagctgagtg

SEQ ID NO: 581196 - DNA, 15 bp, Homo sapiens
ggaacagctgagtga

SEQ ID NO: 581197 - DNA, 15 bp, Homo sapiens
gaacagctgagtgaa

SEQ ID NO: 581198 - DNA, 15 bp, Homo sapiens
aacagctgagtgaac

SEQ ID NO: 581199 - DNA, 15 bp, Homo sapiens
acagctgagtgaact

SEQ ID NO: 581200 - DNA, 15 bp, Homo sapiens
cagctgagtgaacta

SEQ ID NO: 581201 - DNA, 15 bp, Homo sapiens
agctgagtgaactac

SEQ ID NO: 581202 - DNA, 15 bp, Homo sapiens
gctgagtgaactacg

SEQ ID NO: 581203 - DNA, 15 bp, Homo sapiens
ctgagtgaactacgt

SEQ ID NO: 581204 - DNA, 15 bp, Homo sapiens
tgagtgaactacgtc

SEQ ID NO: 581205 - DNA, 15 bp, Homo sapiens
gagtgaactacgtca

SEQ ID NO: 581206 - DNA, 15 bp, Homo sapiens
agtgaactacgtcag

SEQ ID NO: 581207 - DNA, 15 bp, Homo sapiens
gtgaactacgtcagc

SEQ ID NO: 581208 - DNA, 15 bp, Homo sapiens
tgaactacgtcagcc

SEQ ID NO: 581209 - DNA, 15 bp, Homo sapiens
gaactacgtcagcca

SEQ ID NO: 581210 - DNA, 15 bp, Homo sapiens
aactacgtcagccaa

SEQ ID NO: 581211 - DNA, 15 bp, Homo sapiens
actacgtcagccaac

SEQ ID NO: 581212 - DNA, 15 bp, Homo sapiens
ctacgtcagccaacg

SEQ ID NO: 581213 - DNA, 15 bp, Homo sapiens
tacgtcagccaacgt

SEQ ID NO: 581214 - DNA, 15 bp, Homo sapiens
acgtcagccaacgtc

SEQ ID NO: 581215 - DNA, 15 bp, Homo sapiens
cgtcagccaacgtca

SEQ ID NO: 581216 - DNA, 15 bp, Homo sapiens
gtcagccaacgtcaa

SEQ ID NO: 581217 - DNA, 15 bp, Homo sapiens
tcagccaacgtcaaa

SEQ ID NO: 581218 - DNA, 15 bp, Homo sapiens
cagccaacgtcaaag

SEQ ID NO: 581219 - DNA, 15 bp, Homo sapiens
agccaacgtcaaagt

SEQ ID NO: 581220 - DNA, 15 bp, Homo sapiens
gccaacgtcaaagta

SEQ ID NO: 581221 - DNA, 15 bp, Homo sapiens
ccaacgtcaaagtat

SEQ ID NO: 581222 - DNA, 15 bp, Homo sapiens
caacgtcaaagtatg

SEQ ID NO: 581223 - DNA, 15 bp, Homo sapiens
aacgtcaaagtatgt

SEQ ID NO: 581224 - DNA, 15 bp, Homo sapiens
acgtcaaagtatgtg

SEQ ID NO: 581225 - DNA, 15 bp, Homo sapiens
cgtcaaagtatgtgt

SEQ ID NO: 581226 - DNA, 15 bp, Homo sapiens
gtcaaagtatgtgtt

SEQ ID NO: 581227 - DNA, 15 bp, Homo sapiens
tcaaagtatgtgttt

SEQ ID NO: 581228 - DNA, 15 bp, Homo sapiens
caaagtatgtgtttt

SEQ ID NO: 581229 - DNA, 15 bp, Homo sapiens
aaagtatgtgttttc

SEQ ID NO: 581230 - DNA, 15 bp, Homo sapiens
aagtatgtgttttca

SEQ ID NO: 581231 - DNA, 15 bp, Homo sapiens
agtatgtgttttcag

SEQ ID NO: 581232 - DNA, 15 bp, Homo sapiens
gtatgtgttttcagg

SEQ ID NO: 581233 - DNA, 15 bp, Homo sapiens
tatgtgttttcaggg

SEQ ID NO: 581234 - DNA, 15 bp, Homo sapiens
atgtgttttcaggga

SEQ ID NO: 581235 - DNA, 15 bp, Homo sapiens
tgtgttttcagggaa

SEQ ID NO: 581236 - DNA, 15 bp, Homo sapiens
gtgttttcagggaaa

SEQ ID NO: 581237 - DNA, 15 bp, Homo sapiens
tgttttcagggaaag

SEQ ID NO: 581238 - DNA, 15 bp, Homo sapiens
gttttcagggaaaga

SEQ ID NO: 581239 - DNA, 15 bp, Homo sapiens
ttttcagggaaagag

SEQ ID NO: 581240 - DNA, 15 bp, Homo sapiens
tttcagggaaagaga

SEQ ID NO: 581241 - DNA, 15 bp, Homo sapiens
ttcagggaaagagaa

SEQ ID NO: 581242 - DNA, 15 bp, Homo sapiens
tcagggaaagagaaa

SEQ ID NO: 581243 - DNA, 15 bp, Homo sapiens
cagggaaagagaaaa

SEQ ID NO: 581244 - DNA, 15 bp, Homo sapiens
agggaaagagaaaac

SEQ ID NO: 581245 - DNA, 15 bp, Homo sapiens
gggaaagagaaaaca

SEQ ID NO: 581246 - DNA, 15 bp, Homo sapiens
ggaaagagaaaacag

SEQ ID NO: 581247 - DNA, 15 bp, Homo sapiens
gaaagagaaaacagg

SEQ ID NO: 581248 - DNA, 15 bp, Homo sapiens
aaagagaaaacaggc

SEQ ID NO: 581249 - DNA, 15 bp, Homo sapiens
aagagaaaacaggca

SEQ ID NO: 581250 - DNA, 15 bp, Homo sapiens
agagaaaacaggcac

SEQ ID NO: 581251 - DNA, 15 bp, Homo sapiens
gagaaaacaggcact

SEQ ID NO: 581252 - DNA, 15 bp, Homo sapiens
agaaaacaggcactg

SEQ ID NO: 581253 - DNA, 15 bp, Homo sapiens
gaaaacaggcactgt

SEQ ID NO: 581254 - DNA, 15 bp, Homo sapiens
aaaacaggcactgtt

SEQ ID NO: 581255 - DNA, 15 bp, Homo sapiens
aaacaggcactgttc

SEQ ID NO: 581256 - DNA, 15 bp, Homo sapiens
aacaggcactgttct

SEQ ID NO: 581257 - DNA, 15 bp, Homo sapiens
acaggcactgttctc

SEQ ID NO: 581258 - DNA, 15 bp, Homo sapiens
caggcactgttctca

SEQ ID NO: 581259 - DNA, 15 bp, Homo sapiens
aggcactgttctcaa

SEQ ID NO: 581260 - DNA, 15 bp, Homo sapiens
ggcactgttctcaac

SEQ ID NO: 581261 - DNA, 15 bp, Homo sapiens
gcactgttctcaaca

SEQ ID NO: 581262 - DNA, 15 bp, Homo sapiens
cactgttctcaacaa

SEQ ID NO: 581263 - DNA, 15 bp, Homo sapiens
actgttctcaacaat

SEQ ID NO: 581264 - DNA, 15 bp, Homo sapiens
ctgttctcaacaata

SEQ ID NO: 581265 - DNA, 15 bp, Homo sapiens
tgttctcaacaatat

SEQ ID NO: 581266 - DNA, 15 bp, Homo sapiens
gttctcaacaatata

SEQ ID NO: 581267 - DNA, 15 bp, Homo sapiens
ttctcaacaatatat

SEQ ID NO: 581268 - DNA, 15 bp, Homo sapiens
tctcaacaatatata

SEQ ID NO: 581269 - DNA, 15 bp, Homo sapiens
ctcaacaatatatac

SEQ ID NO: 581270 - DNA, 15 bp, Homo sapiens
tcaacaatatatact

SEQ ID NO: 581271 - DNA, 15 bp, Homo sapiens
caacaatatatactt

SEQ ID NO: 581272 - DNA, 15 bp, Homo sapiens
aacaatatatactta

SEQ ID NO: 581273 - DNA, 15 bp, Homo sapiens
acaatatatacttac

SEQ ID NO: 581274 - DNA, 15 bp, Homo sapiens
caatatatacttaca

SEQ ID NO: 581275 - DNA, 15 bp, Homo sapiens
aatatatacttacaa

SEQ ID NO: 581276 - DNA, 15 bp, Homo sapiens
atatatacttacaat

SEQ ID NO: 581277 - DNA, 15 bp, Homo sapiens
tatatacttacaatt

SEQ ID NO: 581278 - DNA, 15 bp, Homo sapiens
atatacttacaatta

SEQ ID NO: 581279 - DNA, 15 bp, Homo sapiens
tatacttacaattat

SEQ ID NO: 581280 - DNA, 15 bp, Homo sapiens
atacttacaattatc

SEQ ID NO: 581281 - DNA, 15 bp, Homo sapiens
tacttacaattatca

SEQ ID NO: 581282 - DNA, 15 bp, Homo sapiens
acttacaattatcac

SEQ ID NO: 581283 - DNA, 15 bp, Homo sapiens
cttacaattatcaca

SEQ ID NO: 581284 - DNA, 15 bp, Homo sapiens
ttacaattatcacaa

SEQ ID NO: 581285 - DNA, 15 bp, Homo sapiens
tacaattatcacaag

SEQ ID NO: 581286 - DNA, 15 bp, Homo sapiens
acaattatcacaagc

SEQ ID NO: 581287 - DNA, 15 bp, Homo sapiens
caattatcacaagca

SEQ ID NO: 581288 - DNA, 15 bp, Homo sapiens
aattatcacaagcag

SEQ ID NO: 581289 - DNA, 15 bp, Homo sapiens
attatcacaagcagt

SEQ ID NO: 581290 - DNA, 15 bp, Homo sapiens
ttatcacaagcagtg

SEQ ID NO: 581291 - DNA, 15 bp, Homo sapiens
tatcacaagcagtga

SEQ ID NO: 581292 - DNA, 15 bp, Homo sapiens
atcacaagcagtgag

SEQ ID NO: 581293 - DNA, 15 bp, Homo sapiens
tcacaagcagtgagc

SEQ ID NO: 581294 - DNA, 15 bp, Homo sapiens
cacaagcagtgagca

SEQ ID NO: 581295 - DNA, 15 bp, Homo sapiens
acaagcagtgagcac

SEQ ID NO: 581296 - DNA, 15 bp, Homo sapiens
caagcagtgagcaca

SEQ ID NO: 581297 - DNA, 15 bp, Homo sapiens
aagcagtgagcacag

SEQ ID NO: 581298 - DNA, 15 bp, Homo sapiens
agcagtgagcacaga

SEQ ID NO: 581299 - DNA, 15 bp, Homo sapiens
gcagtgagcacagaa

SEQ ID NO: 581300 - DNA, 15 bp, Homo sapiens
cagtgagcacagaaa

SEQ ID NO: 581301 - DNA, 15 bp, Homo sapiens
agtgagcacagaaac

SEQ ID NO: 581302 - DNA, 15 bp, Homo sapiens
gtgagcacagaaact

SEQ ID NO: 581303 - DNA, 15 bp, Homo sapiens
tgagcacagaaacta

SEQ ID NO: 581304 - DNA, 15 bp, Homo sapiens
gagcacagaaactat

SEQ ID NO: 581305 - DNA, 15 bp, Homo sapiens
agcacagaaactata

SEQ ID NO: 581306 - DNA, 15 bp, Homo sapiens
gcacagaaactataa

SEQ ID NO: 581307 - DNA, 15 bp, Homo sapiens
cacagaaactataaa

SEQ ID NO: 581308 - DNA, 15 bp, Homo sapiens
acagaaactataaac

SEQ ID NO: 581309 - DNA, 15 bp, Homo sapiens
cagaaactataaacc

SEQ ID NO: 581310 - DNA, 15 bp, Homo sapiens
agaaactataaacca

SEQ ID NO: 581311 - DNA, 15 bp, Homo sapiens
gaaactataaaccag

SEQ ID NO: 581312 - DNA, 15 bp, Homo sapiens
aaactataaaccaga

SEQ ID NO: 581313 - DNA, 15 bp, Homo sapiens
aactataaaccagaa

SEQ ID NO: 581314 - DNA, 15 bp, Homo sapiens
actataaaccagaat

SEQ ID NO: 581315 - DNA, 15 bp, Homo sapiens
ctataaaccagaatg

SEQ ID NO: 581316 - DNA, 15 bp, Homo sapiens
tataaaccagaatgg

SEQ ID NO: 581317 - DNA, 15 bp, Homo sapiens
ataaaccagaatggg

SEQ ID NO: 581318 - DNA, 15 bp, Homo sapiens
taaaccagaatgggg

SEQ ID NO: 581319 - DNA, 15 bp, Homo sapiens
aaaccagaatgggga

SEQ ID NO: 581320 - DNA, 15 bp, Homo sapiens
aaccagaatggggag

SEQ ID NO: 581321 - DNA, 15 bp, Homo sapiens
accagaatggggaga

SEQ ID NO: 581322 - DNA, 15 bp, Homo sapiens
ccagaatggggagat

SEQ ID NO: 581323 - DNA, 15 bp, Homo sapiens
cagaatggggagatt

SEQ ID NO: 581324 - DNA, 15 bp, Homo sapiens
agaatggggagatta

SEQ ID NO: 581325 - DNA, 15 bp, Homo sapiens
gaatggggagattac

SEQ ID NO: 581326 - DNA, 15 bp, Homo sapiens
aatggggagattact

SEQ ID NO: 581327 - DNA, 15 bp, Homo sapiens
atggggagattactc

SEQ ID NO: 581328 - DNA, 15 bp, Homo sapiens
tggggagattactct

SEQ ID NO: 581329 - DNA, 15 bp, Homo sapiens
ggggagattactctt

SEQ ID NO: 581330 - DNA, 15 bp, Homo sapiens
gggagattactcttg

SEQ ID NO: 581331 - DNA, 15 bp, Homo sapiens
ggagattactcttgg

SEQ ID NO: 581332 - DNA, 15 bp, Homo sapiens
gagattactcttgga

SEQ ID NO: 581333 - DNA, 15 bp, Homo sapiens
agattactcttggag

SEQ ID NO: 581334 - DNA, 15 bp, Homo sapiens
gattactcttggagg

SEQ ID NO: 581335 - DNA, 15 bp, Homo sapiens
attactcttggaggg

SEQ ID NO: 581336 - DNA, 15 bp, Homo sapiens
ttactcttggagggt

SEQ ID NO: 581337 - DNA, 15 bp, Homo sapiens
tactcttggagggtg

SEQ ID NO: 581338 - DNA, 15 bp, Homo sapiens
actcttggagggtga

SEQ ID NO: 581339 - DNA, 15 bp, Homo sapiens
ctcttggagggtgaa

SEQ ID NO: 581340 - DNA, 15 bp, Homo sapiens
tcttggagggtgaag

SEQ ID NO: 581341 - DNA, 15 bp, Homo sapiens
cttggagggtgaagg

SEQ ID NO: 581342 - DNA, 15 bp, Homo sapiens
ttggagggtgaaggt

SEQ ID NO: 581343 - DNA, 15 bp, Homo sapiens
tggagggtgaaggtg

SEQ ID NO: 581344 - DNA, 15 bp, Homo sapiens
ggagggtgaaggtga

SEQ ID NO: 581345 - DNA, 15 bp, Homo sapiens
gagggtgaaggtgaa

SEQ ID NO: 581346 - DNA, 15 bp, Homo sapiens
agggtgaaggtgaag

SEQ ID NO: 581347 - DNA, 15 bp, Homo sapiens
gggtgaaggtgaagc

SEQ ID NO: 581348 - DNA, 15 bp, Homo sapiens
ggtgaaggtgaagca

SEQ ID NO: 581349 - DNA, 15 bp, Homo sapiens
gtgaaggtgaagcaa

SEQ ID NO: 581350 - DNA, 15 bp, Homo sapiens
tgaaggtgaagcaat

SEQ ID NO: 581351 - DNA, 15 bp, Homo sapiens
gaaggtgaagcaata

SEQ ID NO: 581352 - DNA, 15 bp, Homo sapiens
aaggtgaagcaataa

SEQ ID NO: 581353 - DNA, 15 bp, Homo sapiens
aggtgaagcaataat

SEQ ID NO: 581354 - DNA, 15 bp, Homo sapiens
ggtgaagcaataata

SEQ ID NO: 581355 - DNA, 15 bp, Homo sapiens
gtgaagcaataatag

SEQ ID NO: 581356 - DNA, 15 bp, Homo sapiens
tgaagcaataatagc

SEQ ID NO: 581357 - DNA, 15 bp, Homo sapiens
gaagcaataatagca

SEQ ID NO: 581358 - DNA, 15 bp, Homo sapiens
aagcaataatagcag

SEQ ID NO: 581359 - DNA, 15 bp, Homo sapiens
agcaataatagcagc

SEQ ID NO: 581360 - DNA, 15 bp, Homo sapiens
gcaataatagcagcc

SEQ ID NO: 581361 - DNA, 15 bp, Homo sapiens
caataatagcagcca

SEQ ID NO: 581362 - DNA, 15 bp, Homo sapiens
aataatagcagccac

SEQ ID NO: 581363 - DNA, 15 bp, Homo sapiens
ataatagcagccacc

SEQ ID NO: 581364 - DNA, 15 bp, Homo sapiens
taatagcagccacca

SEQ ID NO: 581365 - DNA, 15 bp, Homo sapiens
aatagcagccaccat

SEQ ID NO: 581366 - DNA, 15 bp, Homo sapiens
atagcagccaccatt

SEQ ID NO: 581367 - DNA, 15 bp, Homo sapiens
tagcagccaccattc

SEQ ID NO: 581368 - DNA, 15 bp, Homo sapiens
agcagccaccattca

SEQ ID NO: 581369 - DNA, 15 bp, Homo sapiens
gcagccaccattcat

SEQ ID NO: 581370 - DNA, 15 bp, Homo sapiens
cagccaccattcatt

SEQ ID NO: 581371 - DNA, 15 bp, Homo sapiens
agccaccattcattc

SEQ ID NO: 581372 - DNA, 15 bp, Homo sapiens
gccaccattcattca

SEQ ID NO: 581373 - DNA, 15 bp, Homo sapiens
ccaccattcattcat

SEQ ID NO: 581374 - DNA, 15 bp, Homo sapiens
caccattcattcatt

SEQ ID NO: 581375 - DNA, 15 bp, Homo sapiens
accattcattcattc

SEQ ID NO: 581376 - DNA, 15 bp, Homo sapiens
ccattcattcattca

SEQ ID NO: 581377 - DNA, 15 bp, Homo sapiens
cattcattcattcaa

SEQ ID NO: 581378 - DNA, 15 bp, Homo sapiens
attcattcattcaac

SEQ ID NO: 581379 - DNA, 15 bp, Homo sapiens
ttcattcattcaaca

SEQ ID NO: 581380 - DNA, 15 bp, Homo sapiens
tcattcattcaacac

SEQ ID NO: 581381 - DNA, 15 bp, Homo sapiens
cattcattcaacact

SEQ ID NO: 581382 - DNA, 15 bp, Homo sapiens
attcattcaacactt

SEQ ID NO: 581383 - DNA, 15 bp, Homo sapiens
ttcattcaacactta

SEQ ID NO: 581384 - DNA, 15 bp, Homo sapiens
tcattcaacacttag

SEQ ID NO: 581385 - DNA, 15 bp, Homo sapiens
cattcaacacttagc

SEQ ID NO: 581386 - DNA, 15 bp, Homo sapiens
attcaacacttagct

SEQ ID NO: 581387 - DNA, 15 bp, Homo sapiens
ttcaacacttagctc

SEQ ID NO: 581388 - DNA, 15 bp, Homo sapiens
tcaacacttagctcc

SEQ ID NO: 581389 - DNA, 15 bp, Homo sapiens
caacacttagctcct

SEQ ID NO: 581390 - DNA, 15 bp, Homo sapiens
aacacttagctccta

SEQ ID NO: 581391 - DNA, 15 bp, Homo sapiens
acacttagctcctac

SEQ ID NO: 581392 - DNA, 15 bp, Homo sapiens
cacttagctcctaca

SEQ ID NO: 581393 - DNA, 15 bp, Homo sapiens
acttagctcctacaa

SEQ ID NO: 581394 - DNA, 15 bp, Homo sapiens
cttagctcctacaat

SEQ ID NO: 581395 - DNA, 15 bp, Homo sapiens
ttagctcctacaata

SEQ ID NO: 581396 - DNA, 15 bp, Homo sapiens
tagctcctacaatat

SEQ ID NO: 581397 - DNA, 15 bp, Homo sapiens
agctcctacaatata

SEQ ID NO: 581398 - DNA, 15 bp, Homo sapiens
gctcctacaatatac

SEQ ID NO: 581399 - DNA, 15 bp, Homo sapiens
ctcctacaatataca

SEQ ID NO: 581400 - DNA, 15 bp, Homo sapiens
tcctacaatatacag

SEQ ID NO: 581401 - DNA, 15 bp, Homo sapiens
cctacaatatacagg

SEQ ID NO: 581402 - DNA, 15 bp, Homo sapiens
ctacaatatacaggg

SEQ ID NO: 581403 - DNA, 15 bp, Homo sapiens
tacaatatacaggga

SEQ ID NO: 581404 - DNA, 15 bp, Homo sapiens
acaatatacagggaa

SEQ ID NO: 581405 - DNA, 15 bp, Homo sapiens
caatatacagggaac

SEQ ID NO: 581406 - DNA, 15 bp, Homo sapiens
aatatacagggaact

SEQ ID NO: 581407 - DNA, 15 bp, Homo sapiens
atatacagggaactt

SEQ ID NO: 581408 - DNA, 15 bp, Homo sapiens
tatacagggaacttt

SEQ ID NO: 581409 - DNA, 15 bp, Homo sapiens
atacagggaacttta

SEQ ID NO: 581410 - DNA, 15 bp, Homo sapiens
tacagggaactttac

SEQ ID NO: 581411 - DNA, 15 bp, Homo sapiens
acagggaactttact

SEQ ID NO: 581412 - DNA, 15 bp, Homo sapiens
cagggaactttactt

SEQ ID NO: 581413 - DNA, 15 bp, Homo sapiens
agggaactttacttg

SEQ ID NO: 581414 - DNA, 15 bp, Homo sapiens
gggaactttacttgt

SEQ ID NO: 581415 - DNA, 15 bp, Homo sapiens
ggaactttacttgtc

SEQ ID NO: 581416 - DNA, 15 bp, Homo sapiens
gaactttacttgtcc

SEQ ID NO: 581417 - DNA, 15 bp, Homo sapiens
aactttacttgtccc

SEQ ID NO: 581418 - DNA, 15 bp, Homo sapiens
actttacttgtccct

SEQ ID NO: 581419 - DNA, 15 bp, Homo sapiens
ctttacttgtcccta

SEQ ID NO: 581420 - DNA, 15 bp, Homo sapiens
tttacttgtccctag

SEQ ID NO: 581421 - DNA, 15 bp, Homo sapiens
ttacttgtccctagg

SEQ ID NO: 581422 - DNA, 15 bp, Homo sapiens
tacttgtccctagga

SEQ ID NO: 581423 - DNA, 15 bp, Homo sapiens
acttgtccctaggaa

SEQ ID NO: 581424 - DNA, 15 bp, Homo sapiens
cttgtccctaggaat

SEQ ID NO: 581425 - DNA, 15 bp, Homo sapiens
ttgtccctaggaata

SEQ ID NO: 581426 - DNA, 15 bp, Homo sapiens
tgtccctaggaatat

SEQ ID NO: 581427 - DNA, 15 bp, Homo sapiens
gtccctaggaatatg

SEQ ID NO: 581428 - DNA, 15 bp, Homo sapiens
tccctaggaatatgg

SEQ ID NO: 581429 - DNA, 15 bp, Homo sapiens
ccctaggaatatggc

SEQ ID NO: 581430 - DNA, 15 bp, Homo sapiens
cctaggaatatggca

SEQ ID NO: 581431 - DNA, 15 bp, Homo sapiens
ctaggaatatggcag

SEQ ID NO: 581432 - DNA, 15 bp, Homo sapiens
taggaatatggcagt

SEQ ID NO: 581433 - DNA, 15 bp, Homo sapiens
aggaatatggcagtg

SEQ ID NO: 581434 - DNA, 15 bp, Homo sapiens
ggaatatggcagtga

SEQ ID NO: 581435 - DNA, 15 bp, Homo sapiens
gaatatggcagtgaa

SEQ ID NO: 581436 - DNA, 15 bp, Homo sapiens
aatatggcagtgaac

SEQ ID NO: 581437 - DNA, 15 bp, Homo sapiens
atatggcagtgaaca

SEQ ID NO: 581438 - DNA, 15 bp, Homo sapiens
tatggcagtgaacaa

SEQ ID NO: 581439 - DNA, 15 bp, Homo sapiens
atggcagtgaacaag

SEQ ID NO: 581440 - DNA, 15 bp, Homo sapiens
tggcagtgaacaaga

SEQ ID NO: 581441 - DNA, 15 bp, Homo sapiens
ggcagtgaacaagac

SEQ ID NO: 581442 - DNA, 15 bp, Homo sapiens
gcagtgaacaagaca

SEQ ID NO: 581443 - DNA, 15 bp, Homo sapiens
cagtgaacaagacac

SEQ ID NO: 581444 - DNA, 15 bp, Homo sapiens
agtgaacaagacact

SEQ ID NO: 581445 - DNA, 15 bp, Homo sapiens
gtgaacaagacacta

SEQ ID NO: 581446 - DNA, 15 bp, Homo sapiens
tgaacaagacactac

SEQ ID NO: 581447 - DNA, 15 bp, Homo sapiens
gaacaagacactacc

SEQ ID NO: 581448 - DNA, 15 bp, Homo sapiens
aacaagacactacct

SEQ ID NO: 581449 - DNA, 15 bp, Homo sapiens
acaagacactacctc

SEQ ID NO: 581450 - DNA, 15 bp, Homo sapiens
caagacactacctca

SEQ ID NO: 581451 - DNA, 15 bp, Homo sapiens
aagacactacctcaa

SEQ ID NO: 581452 - DNA, 15 bp, Homo sapiens
agacactacctcaat

SEQ ID NO: 581453 - DNA, 15 bp, Homo sapiens
gacactacctcaatg

SEQ ID NO: 581454 - DNA, 15 bp, Homo sapiens
acactacctcaatga

SEQ ID NO: 581455 - DNA, 15 bp, Homo sapiens
cactacctcaatgaa

SEQ ID NO: 581456 - DNA, 15 bp, Homo sapiens
actacctcaatgaag

SEQ ID NO: 581457 - DNA, 15 bp, Homo sapiens
ctacctcaatgaagt

SEQ ID NO: 581458 - DNA, 15 bp, Homo sapiens
tacctcaatgaagtt

SEQ ID NO: 581459 - DNA, 15 bp, Homo sapiens
acctcaatgaagttt

SEQ ID NO: 581460 - DNA, 15 bp, Homo sapiens
cctcaatgaagttta

SEQ ID NO: 581461 - DNA, 15 bp, Homo sapiens
ctcaatgaagtttat

SEQ ID NO: 581462 - DNA, 15 bp, Homo sapiens
tcaatgaagtttata

SEQ ID NO: 581463 - DNA, 15 bp, Homo sapiens
caatgaagtttatac

SEQ ID NO: 581464 - DNA, 15 bp, Homo sapiens
aatgaagtttataca

SEQ ID NO: 581465 - DNA, 15 bp, Homo sapiens
atgaagtttatacag

SEQ ID NO: 581466 - DNA, 15 bp, Homo sapiens
tgaagtttatacagg

SEQ ID NO: 581467 - DNA, 15 bp, Homo sapiens
gaagtttatacagga

SEQ ID NO: 581468 - DNA, 15 bp, Homo sapiens
aagtttatacaggag

SEQ ID NO: 581469 - DNA, 15 bp, Homo sapiens
agtttatacaggaga

SEQ ID NO: 581470 - DNA, 15 bp, Homo sapiens
gtttatacaggagac

SEQ ID NO: 581471 - DNA, 15 bp, Homo sapiens
tttatacaggagaca

SEQ ID NO: 581472 - DNA, 15 bp, Homo sapiens
ttatacaggagacag

SEQ ID NO: 581473 - DNA, 15 bp, Homo sapiens
tatacaggagacaga

SEQ ID NO: 581474 - DNA, 15 bp, Homo sapiens
atacaggagacagat

SEQ ID NO: 581475 - DNA, 15 bp, Homo sapiens
tacaggagacagatg

SEQ ID NO: 581476 - DNA, 15 bp, Homo sapiens
acaggagacagatga

SEQ ID NO: 581477 - DNA, 15 bp, Homo sapiens
caggagacagatgat

SEQ ID NO: 581478 - DNA, 15 bp, Homo sapiens
aggagacagatgatt

SEQ ID NO: 581479 - DNA, 15 bp, Homo sapiens
ggagacagatgattc

SEQ ID NO: 581480 - DNA, 15 bp, Homo sapiens
gagacagatgattcc

SEQ ID NO: 581481 - DNA, 15 bp, Homo sapiens
agacagatgattcca

SEQ ID NO: 581482 - DNA, 15 bp, Homo sapiens
gacagatgattccaa

SEQ ID NO: 581483 - DNA, 15 bp, Homo sapiens
acagatgattccaaa

SEQ ID NO: 581484 - DNA, 15 bp, Homo sapiens
cagatgattccaaag

SEQ ID NO: 581485 - DNA, 15 bp, Homo sapiens
agatgattccaaagt

SEQ ID NO: 581486 - DNA, 15 bp, Homo sapiens
gatgattccaaagtg

SEQ ID NO: 581487 - DNA, 15 bp, Homo sapiens
atgattccaaagtgg

SEQ ID NO: 581488 - DNA, 15 bp, Homo sapiens
tgattccaaagtggt

SEQ ID NO: 581489 - DNA, 15 bp, Homo sapiens
gattccaaagtggtg

SEQ ID NO: 581490 - DNA, 15 bp, Homo sapiens
attccaaagtggtgt

SEQ ID NO: 581491 - DNA, 15 bp, Homo sapiens
ttccaaagtggtgtg

SEQ ID NO: 581492 - DNA, 15 bp, Homo sapiens
tccaaagtggtgtga

SEQ ID NO: 581493 - DNA, 15 bp, Homo sapiens
ccaaagtggtgtgat

SEQ ID NO: 581494 - DNA, 15 bp, Homo sapiens
caaagtggtgtgata

SEQ ID NO: 581495 - DNA, 15 bp, Homo sapiens
aaagtggtgtgataa

SEQ ID NO: 581496 - DNA, 15 bp, Homo sapiens
aagtggtgtgataaa

SEQ ID NO: 581497 - DNA, 15 bp, Homo sapiens
agtggtgtgataaat

SEQ ID NO: 581498 - DNA, 15 bp, Homo sapiens
gtggtgtgataaatg

SEQ ID NO: 581499 - DNA, 15 bp, Homo sapiens
tggtgtgataaatgc

SEQ ID NO: 581500 - DNA, 15 bp, Homo sapiens
ggtgtgataaatgca

SEQ ID NO: 581501 - DNA, 15 bp, Homo sapiens
gtgtgataaatgcag

SEQ ID NO: 581502 - DNA, 15 bp, Homo sapiens
tgtgataaatgcagt

SEQ ID NO: 581503 - DNA, 15 bp, Homo sapiens
gtgataaatgcagtg

SEQ ID NO: 581504 - DNA, 15 bp, Homo sapiens
tgataaatgcagtga

SEQ ID NO: 581505 - DNA, 15 bp, Homo sapiens
gataaatgcagtgat

SEQ ID NO: 581506 - DNA, 15 bp, Homo sapiens
ataaatgcagtgata

SEQ ID NO: 581507 - DNA, 15 bp, Homo sapiens
taaatgcagtgatag

SEQ ID NO: 581508 - DNA, 15 bp, Homo sapiens
aaatgcagtgataga

SEQ ID NO: 581509 - DNA, 15 bp, Homo sapiens
aatgcagtgatagaa

SEQ ID NO: 581510 - DNA, 15 bp, Homo sapiens
atgcagtgatagaaa

SEQ ID NO: 581511 - DNA, 15 bp, Homo sapiens
tgcagtgatagaaat

SEQ ID NO: 581512 - DNA, 15 bp, Homo sapiens
gcagtgatagaaata

SEQ ID NO: 581513 - DNA, 15 bp, Homo sapiens
cagtgatagaaatac

SEQ ID NO: 581514 - DNA, 15 bp, Homo sapiens
agtgatagaaataca

SEQ ID NO: 581515 - DNA, 15 bp, Homo sapiens
gtgatagaaatacag

SEQ ID NO: 581516 - DNA, 15 bp, Homo sapiens
tgatagaaatacaga

SEQ ID NO: 581517 - DNA, 15 bp, Homo sapiens
gatagaaatacagac

SEQ ID NO: 581518 - DNA, 15 bp, Homo sapiens
atagaaatacagact

SEQ ID NO: 581519 - DNA, 15 bp, Homo sapiens
tagaaatacagactg

SEQ ID NO: 581520 - DNA, 15 bp, Homo sapiens
agaaatacagactgc

SEQ ID NO: 581521 - DNA, 15 bp, Homo sapiens
gaaatacagactgct

SEQ ID NO: 581522 - DNA, 15 bp, Homo sapiens
aaatacagactgcta

SEQ ID NO: 581523 - DNA, 15 bp, Homo sapiens
aatacagactgctat

SEQ ID NO: 581524 - DNA, 15 bp, Homo sapiens
atacagactgctata

SEQ ID NO: 581525 - DNA, 15 bp, Homo sapiens
tacagactgctatag

SEQ ID NO: 581526 - DNA, 15 bp, Homo sapiens
acagactgctataga

SEQ ID NO: 581527 - DNA, 15 bp, Homo sapiens
cagactgctatagag

SEQ ID NO: 581528 - DNA, 15 bp, Homo sapiens
agactgctatagaga

SEQ ID NO: 581529 - DNA, 15 bp, Homo sapiens
gactgctatagagac

SEQ ID NO: 581530 - DNA, 15 bp, Homo sapiens
actgctatagagact

SEQ ID NO: 581531 - DNA, 15 bp, Homo sapiens
ctgctatagagactg

SEQ ID NO: 581532 - DNA, 15 bp, Homo sapiens
tgctatagagactgg

SEQ ID NO: 581533 - DNA, 15 bp, Homo sapiens
gctatagagactggg

SEQ ID NO: 581534 - DNA, 15 bp, Homo sapiens
ctatagagactgggg

SEQ ID NO: 581535 - DNA, 15 bp, Homo sapiens
tatagagactggggg

SEQ ID NO: 581536 - DNA, 15 bp, Homo sapiens
atagagactgggggg

SEQ ID NO: 581537 - DNA, 15 bp, Homo sapiens
tagagactggggggg

SEQ ID NO: 581538 - DNA, 15 bp, Homo sapiens
agagactgggggggt

SEQ ID NO: 581539 - DNA, 15 bp, Homo sapiens
gagactgggggggtg

SEQ ID NO: 581540 - DNA, 15 bp, Homo sapiens
agactgggggggtgg

SEQ ID NO: 581541 - DNA, 15 bp, Homo sapiens
gactgggggggtggg

SEQ ID NO: 581542 - DNA, 15 bp, Homo sapiens
actgggggggtgggg

SEQ ID NO: 581543 - DNA, 15 bp, Homo sapiens
ctgggggggtggggg

SEQ ID NO: 581544 - DNA, 15 bp, Homo sapiens
tgggggggtgggggt

SEQ ID NO: 581545 - DNA, 15 bp, Homo sapiens
gggggggtgggggtt

SEQ ID NO: 581546 - DNA, 15 bp, Homo sapiens
ggggggtgggggtta

SEQ ID NO: 581547 - DNA, 15 bp, Homo sapiens
gggggtgggggttag

SEQ ID NO: 581548 - DNA, 15 bp, Homo sapiens
ggggtgggggttagg

SEQ ID NO: 581549 - DNA, 15 bp, Homo sapiens
gggtgggggttaggg

SEQ ID NO: 581550 - DNA, 15 bp, Homo sapiens
ggtgggggttaggga

SEQ ID NO: 581551 - DNA, 15 bp, Homo sapiens
gtgggggttagggaa

SEQ ID NO: 581552 - DNA, 15 bp, Homo sapiens
tgggggttagggaaa

SEQ ID NO: 581553 - DNA, 15 bp, Homo sapiens
gggggttagggaaag

SEQ ID NO: 581554 - DNA, 15 bp, Homo sapiens
ggggttagggaaagc

SEQ ID NO: 581555 - DNA, 15 bp, Homo sapiens
gggttagggaaagcc

SEQ ID NO: 581556 - DNA, 15 bp, Homo sapiens
ggttagggaaagccc

SEQ ID NO: 581557 - DNA, 15 bp, Homo sapiens
gttagggaaagcccc

SEQ ID NO: 581558 - DNA, 15 bp, Homo sapiens
ttagggaaagccccc

SEQ ID NO: 581559 - DNA, 15 bp, Homo sapiens
tagggaaagccccct

SEQ ID NO: 581560 - DNA, 15 bp, Homo sapiens
agggaaagccccctc

SEQ ID NO: 581561 - DNA, 15 bp, Homo sapiens
gggaaagccccctcc

SEQ ID NO: 581562 - DNA, 15 bp, Homo sapiens
ggaaagccccctcca

SEQ ID NO: 581563 - DNA, 15 bp, Homo sapiens
gaaagccccctccag

SEQ ID NO: 581564 - DNA, 15 bp, Homo sapiens
aaagccccctccagg

SEQ ID NO: 581565 - DNA, 15 bp, Homo sapiens
aagccccctccaggg

SEQ ID NO: 581566 - DNA, 15 bp, Homo sapiens
agccccctccagggg

SEQ ID NO: 581567 - DNA, 15 bp, Homo sapiens
gccccctccaggggg

SEQ ID NO: 581568 - DNA, 15 bp, Homo sapiens
ccccctccaggggga

SEQ ID NO: 581569 - DNA, 15 bp, Homo sapiens
cccctccagggggag

SEQ ID NO: 581570 - DNA, 15 bp, Homo sapiens
ccctccagggggagt

SEQ ID NO: 581571 - DNA, 15 bp, Homo sapiens
cctccagggggagta

SEQ ID NO: 581572 - DNA, 15 bp, Homo sapiens
ctccagggggagtaa

SEQ ID NO: 581573 - DNA, 15 bp, Homo sapiens
tccagggggagtaac

SEQ ID NO: 581574 - DNA, 15 bp, Homo sapiens
ccagggggagtaact

SEQ ID NO: 581575 - DNA, 15 bp, Homo sapiens
cagggggagtaacta

SEQ ID NO: 581576 - DNA, 15 bp, Homo sapiens
agggggagtaactat

SEQ ID NO: 581577 - DNA, 15 bp, Homo sapiens
gggggagtaactata

SEQ ID NO: 581578 - DNA, 15 bp, Homo sapiens
ggggagtaactatag

SEQ ID NO: 581579 - DNA, 15 bp, Homo sapiens
gggagtaactatagc

SEQ ID NO: 581580 - DNA, 15 bp, Homo sapiens
ggagtaactatagca

SEQ ID NO: 581581 - DNA, 15 bp, Homo sapiens
gagtaactatagcag

SEQ ID NO: 581582 - DNA, 15 bp, Homo sapiens
agtaactatagcagg

SEQ ID NO: 581583 - DNA, 15 bp, Homo sapiens
gtaactatagcaggg

SEQ ID NO: 581584 - DNA, 15 bp, Homo sapiens
taactatagcaggga

SEQ ID NO: 581585 - DNA, 15 bp, Homo sapiens
aactatagcagggat

SEQ ID NO: 581586 - DNA, 15 bp, Homo sapiens
actatagcagggatc

SEQ ID NO: 581587 - DNA, 15 bp, Homo sapiens
ctatagcagggatct

SEQ ID NO: 581588 - DNA, 15 bp, Homo sapiens
tatagcagggatcta

SEQ ID NO: 581589 - DNA, 15 bp, Homo sapiens
atagcagggatctaa

SEQ ID NO: 581590 - DNA, 15 bp, Homo sapiens
tagcagggatctaaa

SEQ ID NO: 581591 - DNA, 15 bp, Homo sapiens
agcagggatctaaag

SEQ ID NO: 581592 - DNA, 15 bp, Homo sapiens
gcagggatctaaagg

SEQ ID NO: 581593 - DNA, 15 bp, Homo sapiens
cagggatctaaagga

SEQ ID NO: 581594 - DNA, 15 bp, Homo sapiens
agggatctaaaggat

SEQ ID NO: 581595 - DNA, 15 bp, Homo sapiens
gggatctaaaggatg

SEQ ID NO: 581596 - DNA, 15 bp, Homo sapiens
ggatctaaaggatgt

SEQ ID NO: 581597 - DNA, 15 bp, Homo sapiens
gatctaaaggatgta

SEQ ID NO: 581598 - DNA, 15 bp, Homo sapiens
atctaaaggatgtat

SEQ ID NO: 581599 - DNA, 15 bp, Homo sapiens
tctaaaggatgtata

SEQ ID NO: 581600 - DNA, 15 bp, Homo sapiens
ctaaaggatgtataa

SEQ ID NO: 581601 - DNA, 15 bp, Homo sapiens
taaaggatgtataaa

SEQ ID NO: 581602 - DNA, 15 bp, Homo sapiens
aaaggatgtataaaa

SEQ ID NO: 581603 - DNA, 15 bp, Homo sapiens
aaggatgtataaaat

SEQ ID NO: 581604 - DNA, 15 bp, Homo sapiens
aggatgtataaaatt

SEQ ID NO: 581605 - DNA, 15 bp, Homo sapiens
ggatgtataaaatta

SEQ ID NO: 581606 - DNA, 15 bp, Homo sapiens
gatgtataaaattag

SEQ ID NO: 581607 - DNA, 15 bp, Homo sapiens
atgtataaaattagt

SEQ ID NO: 581608 - DNA, 15 bp, Homo sapiens
tgtataaaattagtg

SEQ ID NO: 581609 - DNA, 15 bp, Homo sapiens
gtataaaattagtga

SEQ ID NO: 581610 - DNA, 15 bp, Homo sapiens
tataaaattagtgag

SEQ ID NO: 581611 - DNA, 15 bp, Homo sapiens
ataaaattagtgagg

SEQ ID NO: 581612 - DNA, 15 bp, Homo sapiens
taaaattagtgaggt

SEQ ID NO: 581613 - DNA, 15 bp, Homo sapiens
aaaattagtgaggta

SEQ ID NO: 581614 - DNA, 15 bp, Homo sapiens
aaattagtgaggtaa

SEQ ID NO: 581615 - DNA, 15 bp, Homo sapiens
aattagtgaggtaaa

SEQ ID NO: 581616 - DNA, 15 bp, Homo sapiens
attagtgaggtaaag

SEQ ID NO: 581617 - DNA, 15 bp, Homo sapiens
ttagtgaggtaaaga

SEQ ID NO: 581618 - DNA, 15 bp, Homo sapiens
tagtgaggtaaagag

SEQ ID NO: 581619 - DNA, 15 bp, Homo sapiens
agtgaggtaaagagg

SEQ ID NO: 581620 - DNA, 15 bp, Homo sapiens
gtgaggtaaagaggg

SEQ ID NO: 581621 - DNA, 15 bp, Homo sapiens
tgaggtaaagagggg

SEQ ID NO: 581622 - DNA, 15 bp, Homo sapiens
gaggtaaagaggggt

SEQ ID NO: 581623 - DNA, 15 bp, Homo sapiens
aggtaaagaggggta

SEQ ID NO: 581624 - DNA, 15 bp, Homo sapiens
ggtaaagaggggtag

SEQ ID NO: 581625 - DNA, 15 bp, Homo sapiens
gtaaagaggggtagg

SEQ ID NO: 581626 - DNA, 15 bp, Homo sapiens
taaagaggggtagga

SEQ ID NO: 581627 - DNA, 15 bp, Homo sapiens
aaagaggggtaggag

SEQ ID NO: 581628 - DNA, 15 bp, Homo sapiens
aagaggggtaggagg

SEQ ID NO: 581629 - DNA, 15 bp, Homo sapiens
agaggggtaggaggt

SEQ ID NO: 581630 - DNA, 15 bp, Homo sapiens
gaggggtaggaggtt

SEQ ID NO: 581631 - DNA, 15 bp, Homo sapiens
aggggtaggaggttg

SEQ ID NO: 581632 - DNA, 15 bp, Homo sapiens
ggggtaggaggttgg

SEQ ID NO: 581633 - DNA, 15 bp, Homo sapiens
gggtaggaggttgga

SEQ ID NO: 581634 - DNA, 15 bp, Homo sapiens
ggtaggaggttggat

SEQ ID NO: 581635 - DNA, 15 bp, Homo sapiens
gtaggaggttggatg

SEQ ID NO: 581636 - DNA, 15 bp, Homo sapiens
taggaggttggatgc

SEQ ID NO: 581637 - DNA, 15 bp, Homo sapiens
aggaggttggatgcc

SEQ ID NO: 581638 - DNA, 15 bp, Homo sapiens
ggaggttggatgcca

SEQ ID NO: 581639 - DNA, 15 bp, Homo sapiens
gaggttggatgccaa

SEQ ID NO: 581640 - DNA, 15 bp, Homo sapiens
aggttggatgccaaa

SEQ ID NO: 581641 - DNA, 15 bp, Homo sapiens
ggttggatgccaaaa

SEQ ID NO: 581642 - DNA, 15 bp, Homo sapiens
gttggatgccaaaag

SEQ ID NO: 581643 - DNA, 15 bp, Homo sapiens
ttggatgccaaaaga

SEQ ID NO: 581644 - DNA, 15 bp, Homo sapiens
tggatgccaaaagat

SEQ ID NO: 581645 - DNA, 15 bp, Homo sapiens
ggatgccaaaagata

SEQ ID NO: 581646 - DNA, 15 bp, Homo sapiens
gatgccaaaagataa

SEQ ID NO: 581647 - DNA, 15 bp, Homo sapiens
atgccaaaagataac

SEQ ID NO: 581648 - DNA, 15 bp, Homo sapiens
tgccaaaagataaca

SEQ ID NO: 581649 - DNA, 15 bp, Homo sapiens
gccaaaagataacag

SEQ ID NO: 581650 - DNA, 15 bp, Homo sapiens
ccaaaagataacagt

SEQ ID NO: 581651 - DNA, 15 bp, Homo sapiens
caaaagataacagtt

SEQ ID NO: 581652 - DNA, 15 bp, Homo sapiens
aaaagataacagtta

SEQ ID NO: 581653 - DNA, 15 bp, Homo sapiens
aaagataacagttaa

SEQ ID NO: 581654 - DNA, 15 bp, Homo sapiens
aagataacagttaat

SEQ ID NO: 581655 - DNA, 15 bp, Homo sapiens
agataacagttaata

SEQ ID NO: 581656 - DNA, 15 bp, Homo sapiens
gataacagttaatac

SEQ ID NO: 581657 - DNA, 15 bp, Homo sapiens
ataacagttaataca

SEQ ID NO: 581658 - DNA, 15 bp, Homo sapiens
taacagttaatacaa

SEQ ID NO: 581659 - DNA, 15 bp, Homo sapiens
aacagttaatacaaa

SEQ ID NO: 581660 - DNA, 15 bp, Homo sapiens
acagttaatacaaag

SEQ ID NO: 581661 - DNA, 15 bp, Homo sapiens
cagttaatacaaagc

SEQ ID NO: 581662 - DNA, 15 bp, Homo sapiens
agttaatacaaagcc

SEQ ID NO: 581663 - DNA, 15 bp, Homo sapiens
gttaatacaaagccc

SEQ ID NO: 581664 - DNA, 15 bp, Homo sapiens
ttaatacaaagcccc

SEQ ID NO: 581665 - DNA, 15 bp, Homo sapiens
taatacaaagcccca

SEQ ID NO: 581666 - DNA, 15 bp, Homo sapiens
aatacaaagccccag

SEQ ID NO: 581667 - DNA, 15 bp, Homo sapiens
atacaaagccccaga

SEQ ID NO: 581668 - DNA, 15 bp, Homo sapiens
tacaaagccccagag

SEQ ID NO: 581669 - DNA, 15 bp, Homo sapiens
acaaagccccagaga

SEQ ID NO: 581670 - DNA, 15 bp, Homo sapiens
caaagccccagagac

SEQ ID NO: 581671 - DNA, 15 bp, Homo sapiens
aaagccccagagaca

SEQ ID NO: 581672 - DNA, 15 bp, Homo sapiens
aagccccagagacaa

SEQ ID NO: 581673 - DNA, 15 bp, Homo sapiens
agccccagagacaaa

SEQ ID NO: 581674 - DNA, 15 bp, Homo sapiens
gccccagagacaaaa

SEQ ID NO: 581675 - DNA, 15 bp, Homo sapiens
ccccagagacaaaag

SEQ ID NO: 581676 - DNA, 15 bp, Homo sapiens
cccagagacaaaaga

SEQ ID NO: 581677 - DNA, 15 bp, Homo sapiens
ccagagacaaaagac

SEQ ID NO: 581678 - DNA, 15 bp, Homo sapiens
cagagacaaaagaca

SEQ ID NO: 581679 - DNA, 15 bp, Homo sapiens
agagacaaaagacag

SEQ ID NO: 581680 - DNA, 15 bp, Homo sapiens
gagacaaaagacagc

SEQ ID NO: 581681 - DNA, 15 bp, Homo sapiens
agacaaaagacagca

SEQ ID NO: 581682 - DNA, 15 bp, Homo sapiens
gacaaaagacagcaa

SEQ ID NO: 581683 - DNA, 15 bp, Homo sapiens
acaaaagacagcaaa

SEQ ID NO: 581684 - DNA, 15 bp, Homo sapiens
caaaagacagcaaat

SEQ ID NO: 581685 - DNA, 15 bp, Homo sapiens
aaaagacagcaaata

SEQ ID NO: 581686 - DNA, 15 bp, Homo sapiens
aaagacagcaaatac

SEQ ID NO: 581687 - DNA, 15 bp, Homo sapiens
aagacagcaaataca

SEQ ID NO: 581688 - DNA, 15 bp, Homo sapiens
agacagcaaatacat

SEQ ID NO: 581689 - DNA, 15 bp, Homo sapiens
gacagcaaatacatt

SEQ ID NO: 581690 - DNA, 15 bp, Homo sapiens
acagcaaatacattc

SEQ ID NO: 581691 - DNA, 15 bp, Homo sapiens
cagcaaatacattca

SEQ ID NO: 581692 - DNA, 15 bp, Homo sapiens
agcaaatacattcaa

SEQ ID NO: 581693 - DNA, 15 bp, Homo sapiens
gcaaatacattcaag

SEQ ID NO: 581694 - DNA, 15 bp, Homo sapiens
caaatacattcaaga

SEQ ID NO: 581695 - DNA, 15 bp, Homo sapiens
aaatacattcaagaa

SEQ ID NO: 581696 - DNA, 15 bp, Homo sapiens
aatacattcaagaaa

SEQ ID NO: 581697 - DNA, 15 bp, Homo sapiens
atacattcaagaaac

SEQ ID NO: 581698 - DNA, 15 bp, Homo sapiens
tacattcaagaaaca

SEQ ID NO: 581699 - DNA, 15 bp, Homo sapiens
acattcaagaaacaa

SEQ ID NO: 581700 - DNA, 15 bp, Homo sapiens
cattcaagaaacaag

SEQ ID NO: 581701 - DNA, 15 bp, Homo sapiens
attcaagaaacaaga

SEQ ID NO: 581702 - DNA, 15 bp, Homo sapiens
ttcaagaaacaagag

SEQ ID NO: 581703 - DNA, 15 bp, Homo sapiens
tcaagaaacaagagg

SEQ ID NO: 581704 - DNA, 15 bp, Homo sapiens
caagaaacaagagga

SEQ ID NO: 581705 - DNA, 15 bp, Homo sapiens
aagaaacaagaggag

SEQ ID NO: 581706 - DNA, 15 bp, Homo sapiens
agaaacaagaggagt

SEQ ID NO: 581707 - DNA, 15 bp, Homo sapiens
gaaacaagaggagtt

SEQ ID NO: 581708 - DNA, 15 bp, Homo sapiens
aaacaagaggagttt

SEQ ID NO: 581709 - DNA, 15 bp, Homo sapiens
aacaagaggagttta

SEQ ID NO: 581710 - DNA, 15 bp, Homo sapiens
acaagaggagtttag

SEQ ID NO: 581711 - DNA, 15 bp, Homo sapiens
caagaggagtttaga

SEQ ID NO: 581712 - DNA, 15 bp, Homo sapiens
aagaggagtttagaa

SEQ ID NO: 581713 - DNA, 15 bp, Homo sapiens
agaggagtttagaac

SEQ ID NO: 581714 - DNA, 15 bp, Homo sapiens
gaggagtttagaaca

SEQ ID NO: 581715 - DNA, 15 bp, Homo sapiens
aggagtttagaacag

SEQ ID NO: 581716 - DNA, 15 bp, Homo sapiens
ggagtttagaacaga

SEQ ID NO: 581717 - DNA, 15 bp, Homo sapiens
gagtttagaacagat

SEQ ID NO: 581718 - DNA, 15 bp, Homo sapiens
agtttagaacagatg

SEQ ID NO: 581719 - DNA, 15 bp, Homo sapiens
gtttagaacagatgg

SEQ ID NO: 581720 - DNA, 15 bp, Homo sapiens
tttagaacagatgga

SEQ ID NO: 581721 - DNA, 15 bp, Homo sapiens
ttagaacagatggag

SEQ ID NO: 581722 - DNA, 15 bp, Homo sapiens
tagaacagatggagg

SEQ ID NO: 581723 - DNA, 15 bp, Homo sapiens
agaacagatggaggt

SEQ ID NO: 581724 - DNA, 15 bp, Homo sapiens
gaacagatggaggtg

SEQ ID NO: 581725 - DNA, 15 bp, Homo sapiens
aacagatggaggtgg

SEQ ID NO: 581726 - DNA, 15 bp, Homo sapiens
acagatggaggtggg

SEQ ID NO: 581727 - DNA, 15 bp, Homo sapiens
cagatggaggtgggc

SEQ ID NO: 581728 - DNA, 15 bp, Homo sapiens
agatggaggtgggcg

SEQ ID NO: 581729 - DNA, 15 bp, Homo sapiens
gatggaggtgggcgc

SEQ ID NO: 581730 - DNA, 15 bp, Homo sapiens
atggaggtgggcgct

SEQ ID NO: 581731 - DNA, 15 bp, Homo sapiens
tggaggtgggcgctc

SEQ ID NO: 581732 - DNA, 15 bp, Homo sapiens
ggaggtgggcgctct

SEQ ID NO: 581733 - DNA, 15 bp, Homo sapiens
gaggtgggcgctctt

SEQ ID NO: 581734 - DNA, 15 bp, Homo sapiens
aggtgggcgctcttt

SEQ ID NO: 581735 - DNA, 15 bp, Homo sapiens
ggtgggcgctctttg

SEQ ID NO: 581736 - DNA, 15 bp, Homo sapiens
gtgggcgctctttgc

SEQ ID NO: 581737 - DNA, 15 bp, Homo sapiens
tgggcgctctttgct

SEQ ID NO: 581738 - DNA, 15 bp, Homo sapiens
gggcgctctttgcta

SEQ ID NO: 581739 - DNA, 15 bp, Homo sapiens
ggcgctctttgctaa

SEQ ID NO: 581740 - DNA, 15 bp, Homo sapiens
gcgctctttgctaac

SEQ ID NO: 581741 - DNA, 15 bp, Homo sapiens
cgctctttgctaaca

SEQ ID NO: 581742 - DNA, 15 bp, Homo sapiens
gctctttgctaacaa

SEQ ID NO: 581743 - DNA, 15 bp, Homo sapiens
ctctttgctaacaag

SEQ ID NO: 581744 - DNA, 15 bp, Homo sapiens
tctttgctaacaaga

SEQ ID NO: 581745 - DNA, 15 bp, Homo sapiens
ctttgctaacaagaa

SEQ ID NO: 581746 - DNA, 15 bp, Homo sapiens
tttgctaacaagaaa

SEQ ID NO: 581747 - DNA, 15 bp, Homo sapiens
ttgctaacaagaaaa

SEQ ID NO: 581748 - DNA, 15 bp, Homo sapiens
tgctaacaagaaaaa

SEQ ID NO: 581749 - DNA, 15 bp, Homo sapiens
gctaacaagaaaaat

SEQ ID NO: 581750 - DNA, 15 bp, Homo sapiens
ctaacaagaaaaatt

SEQ ID NO: 581751 - DNA, 15 bp, Homo sapiens
taacaagaaaaattg

SEQ ID NO: 581752 - DNA, 15 bp, Homo sapiens
aacaagaaaaattgc

SEQ ID NO: 581753 - DNA, 15 bp, Homo sapiens
acaagaaaaattgct

SEQ ID NO: 581754 - DNA, 15 bp, Homo sapiens
caagaaaaattgcta

SEQ ID NO: 581755 - DNA, 15 bp, Homo sapiens
aagaaaaattgctag

SEQ ID NO: 581756 - DNA, 15 bp, Homo sapiens
agaaaaattgctaga

SEQ ID NO: 581757 - DNA, 15 bp, Homo sapiens
gaaaaattgctagat

SEQ ID NO: 581758 - DNA, 15 bp, Homo sapiens
aaaaattgctagatg

SEQ ID NO: 581759 - DNA, 15 bp, Homo sapiens
aaaattgctagatgc

SEQ ID NO: 581760 - DNA, 15 bp, Homo sapiens
aaattgctagatgca

SEQ ID NO: 581761 - DNA, 15 bp, Homo sapiens
aattgctagatgcaa

SEQ ID NO: 581762 - DNA, 15 bp, Homo sapiens
attgctagatgcaat

SEQ ID NO: 581763 - DNA, 15 bp, Homo sapiens
ttgctagatgcaatt

SEQ ID NO: 581764 - DNA, 15 bp, Homo sapiens
tgctagatgcaattt

SEQ ID NO: 581765 - DNA, 15 bp, Homo sapiens
gctagatgcaatttc

SEQ ID NO: 581766 - DNA, 15 bp, Homo sapiens
ctagatgcaatttct

SEQ ID NO: 581767 - DNA, 15 bp, Homo sapiens
tagatgcaatttctc

SEQ ID NO: 581768 - DNA, 15 bp, Homo sapiens
agatgcaatttctca

SEQ ID NO: 581769 - DNA, 15 bp, Homo sapiens
gatgcaatttctcaa

SEQ ID NO: 581770 - DNA, 15 bp, Homo sapiens
atgcaatttctcaaa

SEQ ID NO: 581771 - DNA, 15 bp, Homo sapiens
tgcaatttctcaaac

SEQ ID NO: 581772 - DNA, 15 bp, Homo sapiens
gcaatttctcaaaca

SEQ ID NO: 581773 - DNA, 15 bp, Homo sapiens
caatttctcaaacac

SEQ ID NO: 581774 - DNA, 15 bp, Homo sapiens
aatttctcaaacacc

SEQ ID NO: 581775 - DNA, 15 bp, Homo sapiens
atttctcaaacacct

SEQ ID NO: 581776 - DNA, 15 bp, Homo sapiens
tttctcaaacacctg

SEQ ID NO: 581777 - DNA, 15 bp, Homo sapiens
ttctcaaacacctgg

SEQ ID NO: 581778 - DNA, 15 bp, Homo sapiens
tctcaaacacctggg

SEQ ID NO: 581779 - DNA, 15 bp, Homo sapiens
ctcaaacacctggga

SEQ ID NO: 581780 - DNA, 15 bp, Homo sapiens
tcaaacacctgggat

SEQ ID NO: 581781 - DNA, 15 bp, Homo sapiens
caaacacctgggatc

SEQ ID NO: 581782 - DNA, 15 bp, Homo sapiens
aaacacctgggatcc

SEQ ID NO: 581783 - DNA, 15 bp, Homo sapiens
aacacctgggatcct

SEQ ID NO: 581784 - DNA, 15 bp, Homo sapiens
acacctgggatccta

SEQ ID NO: 581785 - DNA, 15 bp, Homo sapiens
cacctgggatcctag

SEQ ID NO: 581786 - DNA, 15 bp, Homo sapiens
acctgggatcctagc

SEQ ID NO: 581787 - DNA, 15 bp, Homo sapiens
cctgggatcctagca

SEQ ID NO: 581788 - DNA, 15 bp, Homo sapiens
ctgggatcctagcaa

SEQ ID NO: 581789 - DNA, 15 bp, Homo sapiens
tgggatcctagcaat

SEQ ID NO: 581790 - DNA, 15 bp, Homo sapiens
gggatcctagcaatg

SEQ ID NO: 581791 - DNA, 15 bp, Homo sapiens
ggatcctagcaatgt

SEQ ID NO: 581792 - DNA, 15 bp, Homo sapiens
gatcctagcaatgta

SEQ ID NO: 581793 - DNA, 15 bp, Homo sapiens
atcctagcaatgtac

SEQ ID NO: 581794 - DNA, 15 bp, Homo sapiens
tcctagcaatgtact

SEQ ID NO: 581795 - DNA, 15 bp, Homo sapiens
cctagcaatgtacta

SEQ ID NO: 581796 - DNA, 15 bp, Homo sapiens
ctagcaatgtactag

SEQ ID NO: 581797 - DNA, 15 bp, Homo sapiens
tagcaatgtactaga

SEQ ID NO: 581798 - DNA, 15 bp, Homo sapiens
agcaatgtactagac

SEQ ID NO: 581799 - DNA, 15 bp, Homo sapiens
gcaatgtactagaca

SEQ ID NO: 581800 - DNA, 15 bp, Homo sapiens
caatgtactagacac

SEQ ID NO: 581801 - DNA, 15 bp, Homo sapiens
aatgtactagacact

SEQ ID NO: 581802 - DNA, 15 bp, Homo sapiens
atgtactagacactt

SEQ ID NO: 581803 - DNA, 15 bp, Homo sapiens
tgtactagacacttt

SEQ ID NO: 581804 - DNA, 15 bp, Homo sapiens
gtactagacacttta

SEQ ID NO: 581805 - DNA, 15 bp, Homo sapiens
tactagacactttac

SEQ ID NO: 581806 - DNA, 15 bp, Homo sapiens
actagacactttaca

SEQ ID NO: 581807 - DNA, 15 bp, Homo sapiens
ctagacactttacat

SEQ ID NO: 581808 - DNA, 15 bp, Homo sapiens
tagacactttacata

SEQ ID NO: 581809 - DNA, 15 bp, Homo sapiens
agacactttacatat

SEQ ID NO: 581810 - DNA, 15 bp, Homo sapiens
gacactttacatatt

SEQ ID NO: 581811 - DNA, 15 bp, Homo sapiens
acactttacatatta

SEQ ID NO: 581812 - DNA, 15 bp, Homo sapiens
cactttacatattat

SEQ ID NO: 581813 - DNA, 15 bp, Homo sapiens
actttacatattatc

SEQ ID NO: 581814 - DNA, 15 bp, Homo sapiens
ctttacatattatct

SEQ ID NO: 581815 - DNA, 15 bp, Homo sapiens
tttacatattatctt

SEQ ID NO: 581816 - DNA, 15 bp, Homo sapiens
ttacatattatctta

SEQ ID NO: 581817 - DNA, 15 bp, Homo sapiens
tacatattatcttac

SEQ ID NO: 581818 - DNA, 15 bp, Homo sapiens
acatattatcttact

SEQ ID NO: 581819 - DNA, 15 bp, Homo sapiens
catattatcttactt

SEQ ID NO: 581820 - DNA, 15 bp, Homo sapiens
atattatcttactta

SEQ ID NO: 581821 - DNA, 15 bp, Homo sapiens
tattatcttacttaa

SEQ ID NO: 581822 - DNA, 15 bp, Homo sapiens
attatcttacttaat

SEQ ID NO: 581823 - DNA, 15 bp, Homo sapiens
ttatcttacttaatt

SEQ ID NO: 581824 - DNA, 15 bp, Homo sapiens
tatcttacttaattc

SEQ ID NO: 581825 - DNA, 15 bp, Homo sapiens
atcttacttaattct

SEQ ID NO: 581826 - DNA, 15 bp, Homo sapiens
tcttacttaattcta

SEQ ID NO: 581827 - DNA, 15 bp, Homo sapiens
cttacttaattctaa

SEQ ID NO: 581828 - DNA, 15 bp, Homo sapiens
ttacttaattctaaa

SEQ ID NO: 581829 - DNA, 15 bp, Homo sapiens
tacttaattctaaaa

SEQ ID NO: 581830 - DNA, 15 bp, Homo sapiens
acttaattctaaaaa

SEQ ID NO: 581831 - DNA, 15 bp, Homo sapiens
cttaattctaaaaaa

SEQ ID NO: 581832 - DNA, 15 bp, Homo sapiens
ttaattctaaaaaaa

SEQ ID NO: 581833 - DNA, 15 bp, Homo sapiens
taattctaaaaaaaa

SEQ ID NO: 581834 - DNA, 15 bp, Homo sapiens
aattctaaaaaaaat

SEQ ID NO: 581835 - DNA, 15 bp, Homo sapiens
attctaaaaaaaatc

SEQ ID NO: 581836 - DNA, 15 bp, Homo sapiens
ttctaaaaaaaatct

SEQ ID NO: 581837 - DNA, 15 bp, Homo sapiens
tctaaaaaaaatctt

SEQ ID NO: 581838 - DNA, 15 bp, Homo sapiens
ctaaaaaaaatctta

SEQ ID NO: 581839 - DNA, 15 bp, Homo sapiens
taaaaaaaatcttac

SEQ ID NO: 581840 - DNA, 15 bp, Homo sapiens
aaaaaaaatcttaca

SEQ ID NO: 581841 - DNA, 15 bp, Homo sapiens
aaaaaaatcttacat

SEQ ID NO: 581842 - DNA, 15 bp, Homo sapiens
aaaaaatcttacatg

SEQ ID NO: 581843 - DNA, 15 bp, Homo sapiens
aaaaatcttacatgg

SEQ ID NO: 581844 - DNA, 15 bp, Homo sapiens
aaaatcttacatgga

SEQ ID NO: 581845 - DNA, 15 bp, Homo sapiens
aaatcttacatggag

SEQ ID NO: 581846 - DNA, 15 bp, Homo sapiens
aatcttacatggaga

SEQ ID NO: 581847 - DNA, 15 bp, Homo sapiens
atcttacatggagat

SEQ ID NO: 581848 - DNA, 15 bp, Homo sapiens
tcttacatggagata

SEQ ID NO: 581849 - DNA, 15 bp, Homo sapiens
cttacatggagatag

SEQ ID NO: 581850 - DNA, 15 bp, Homo sapiens
ttacatggagataga

SEQ ID NO: 581851 - DNA, 15 bp, Homo sapiens
tacatggagatagat

SEQ ID NO: 581852 - DNA, 15 bp, Homo sapiens
acatggagatagatg

SEQ ID NO: 581853 - DNA, 15 bp, Homo sapiens
catggagatagatgt

SEQ ID NO: 581854 - DNA, 15 bp, Homo sapiens
atggagatagatgtt

SEQ ID NO: 581855 - DNA, 15 bp, Homo sapiens
tggagatagatgtta

SEQ ID NO: 581856 - DNA, 15 bp, Homo sapiens
ggagatagatgttat

SEQ ID NO: 581857 - DNA, 15 bp, Homo sapiens
gagatagatgttatt

SEQ ID NO: 581858 - DNA, 15 bp, Homo sapiens
agatagatgttatta

SEQ ID NO: 581859 - DNA, 15 bp, Homo sapiens
gatagatgttattaa

SEQ ID NO: 581860 - DNA, 15 bp, Homo sapiens
atagatgttattaat

SEQ ID NO: 581861 - DNA, 15 bp, Homo sapiens
tagatgttattaata

SEQ ID NO: 581862 - DNA, 15 bp, Homo sapiens
agatgttattaatat

SEQ ID NO: 581863 - DNA, 15 bp, Homo sapiens
gatgttattaatatc

SEQ ID NO: 581864 - DNA, 15 bp, Homo sapiens
atgttattaatatca

SEQ ID NO: 581865 - DNA, 15 bp, Homo sapiens
tgttattaatatcat

SEQ ID NO: 581866 - DNA, 15 bp, Homo sapiens
gttattaatatcatt

SEQ ID NO: 581867 - DNA, 15 bp, Homo sapiens
ttattaatatcattt

SEQ ID NO: 581868 - DNA, 15 bp, Homo sapiens
tattaatatcatttc

SEQ ID NO: 581869 - DNA, 15 bp, Homo sapiens
attaatatcatttca

SEQ ID NO: 581870 - DNA, 15 bp, Homo sapiens
ttaatatcatttcaa

SEQ ID NO: 581871 - DNA, 15 bp, Homo sapiens
taatatcatttcaaa

SEQ ID NO: 581872 - DNA, 15 bp, Homo sapiens
aatatcatttcaaag

SEQ ID NO: 581873 - DNA, 15 bp, Homo sapiens
atatcatttcaaaga

SEQ ID NO: 581874 - DNA, 15 bp, Homo sapiens
tatcatttcaaagat

SEQ ID NO: 581875 - DNA, 15 bp, Homo sapiens
atcatttcaaagatg

SEQ ID NO: 581876 - DNA, 15 bp, Homo sapiens
tcatttcaaagatgg

SEQ ID NO: 581877 - DNA, 15 bp, Homo sapiens
catttcaaagatggg

SEQ ID NO: 581878 - DNA, 15 bp, Homo sapiens
atttcaaagatggga

SEQ ID NO: 581879 - DNA, 15 bp, Homo sapiens
tttcaaagatgggaa

SEQ ID NO: 581880 - DNA, 15 bp, Homo sapiens
ttcaaagatgggaaa

SEQ ID NO: 581881 - DNA, 15 bp, Homo sapiens
tcaaagatgggaaac

SEQ ID NO: 581882 - DNA, 15 bp, Homo sapiens
caaagatgggaaact

SEQ ID NO: 581883 - DNA, 15 bp, Homo sapiens
aaagatgggaaacta

SEQ ID NO: 581884 - DNA, 15 bp, Homo sapiens
aagatgggaaactat

SEQ ID NO: 581885 - DNA, 15 bp, Homo sapiens
agatgggaaactatg

SEQ ID NO: 581886 - DNA, 15 bp, Homo sapiens
gatgggaaactatgg

SEQ ID NO: 581887 - DNA, 15 bp, Homo sapiens
atgggaaactatggg

SEQ ID NO: 581888 - DNA, 15 bp, Homo sapiens
tgggaaactatggga

SEQ ID NO: 581889 - DNA, 15 bp, Homo sapiens
gggaaactatgggag

SEQ ID NO: 581890 - DNA, 15 bp, Homo sapiens
ggaaactatgggagg

SEQ ID NO: 581891 - DNA, 15 bp, Homo sapiens
gaaactatgggaggt

SEQ ID NO: 581892 - DNA, 15 bp, Homo sapiens
aaactatgggaggtg

SEQ ID NO: 581893 - DNA, 15 bp, Homo sapiens
aactatgggaggtga

SEQ ID NO: 581894 - DNA, 15 bp, Homo sapiens
actatgggaggtgaa

SEQ ID NO: 581895 - DNA, 15 bp, Homo sapiens
ctatgggaggtgaac

SEQ ID NO: 581896 - DNA, 15 bp, Homo sapiens
tatgggaggtgaact

SEQ ID NO: 581897 - DNA, 15 bp, Homo sapiens
atgggaggtgaactt

SEQ ID NO: 581898 - DNA, 15 bp, Homo sapiens
tgggaggtgaacttg

SEQ ID NO: 581899 - DNA, 15 bp, Homo sapiens
gggaggtgaacttgc

SEQ ID NO: 581900 - DNA, 15 bp, Homo sapiens
ggaggtgaacttgcc

SEQ ID NO: 581901 - DNA, 15 bp, Homo sapiens
gaggtgaacttgcct

SEQ ID NO: 581902 - DNA, 15 bp, Homo sapiens
aggtgaacttgcctg

SEQ ID NO: 581903 - DNA, 15 bp, Homo sapiens
ggtgaacttgcctga

SEQ ID NO: 581904 - DNA, 15 bp, Homo sapiens
gtgaacttgcctgaa

SEQ ID NO: 581905 - DNA, 15 bp, Homo sapiens
tgaacttgcctgaaa

SEQ ID NO: 581906 - DNA, 15 bp, Homo sapiens
gaacttgcctgaaat

SEQ ID NO: 581907 - DNA, 15 bp, Homo sapiens
aacttgcctgaaata

SEQ ID NO: 581908 - DNA, 15 bp, Homo sapiens
acttgcctgaaatac

SEQ ID NO: 581909 - DNA, 15 bp, Homo sapiens
cttgcctgaaatact

SEQ ID NO: 581910 - DNA, 15 bp, Homo sapiens
ttgcctgaaatactt

SEQ ID NO: 581911 - DNA, 15 bp, Homo sapiens
tgcctgaaatacttt

SEQ ID NO: 581912 - DNA, 15 bp, Homo sapiens
gcctgaaatactttt

SEQ ID NO: 581913 - DNA, 15 bp, Homo sapiens
cctgaaatacttttt

SEQ ID NO: 581914 - DNA, 15 bp, Homo sapiens
ctgaaatactttttt

SEQ ID NO: 581915 - DNA, 15 bp, Homo sapiens
tgaaatacttttttt

SEQ ID NO: 581916 - DNA, 15 bp, Homo sapiens
gaaatactttttttt

SEQ ID NO: 581917 - DNA, 15 bp, Homo sapiens
aaatacttttttttt

SEQ ID NO: 581918 - DNA, 15 bp, Homo sapiens
aatactttttttttt

SEQ ID NO: 581919 - DNA, 15 bp, Homo sapiens
atacttttttttttt

SEQ ID NO: 581920 - DNA, 15 bp, Homo sapiens
tactttttttttttt

SEQ ID NO: 581921 - DNA, 15 bp, Homo sapiens
acttttttttttttt

SEQ ID NO: 581922 - DNA, 15 bp, Homo sapiens
ctttttttttttttg

SEQ ID NO: 581923 - DNA, 15 bp, Homo sapiens
tttttttttgagaca

SEQ ID NO: 581924 - DNA, 15 bp, Homo sapiens
ttttttttgagacag

SEQ ID NO: 581925 - DNA, 15 bp, Homo sapiens
tttttttgagacaga

SEQ ID NO: 581926 - DNA, 15 bp, Homo sapiens
ttttttgagacagag

SEQ ID NO: 581927 - DNA, 15 bp, Homo sapiens
tttttgagacagagt

SEQ ID NO: 581928 - DNA, 15 bp, Homo sapiens
ttttgagacagagtc

SEQ ID NO: 581929 - DNA, 15 bp, Homo sapiens
ttgagacagagtctt

SEQ ID NO: 581930 - DNA, 15 bp, Homo sapiens
tgagacagagtcttg

SEQ ID NO: 581931 - DNA, 15 bp, Homo sapiens
gagacagagtcttgc

SEQ ID NO: 581932 - DNA, 15 bp, Homo sapiens
agacagagtcttgct

SEQ ID NO: 581933 - DNA, 15 bp, Homo sapiens
gacagagtcttgctc

SEQ ID NO: 581934 - DNA, 15 bp, Homo sapiens
acagagtcttgctct

SEQ ID NO: 581935 - DNA, 15 bp, Homo sapiens
cagagtcttgctctg

SEQ ID NO: 581936 - DNA, 15 bp, Homo sapiens
agagtcttgctctgt

SEQ ID NO: 581937 - DNA, 15 bp, Homo sapiens
gagtcttgctctgtc

SEQ ID NO: 581938 - DNA, 15 bp, Homo sapiens
agtcttgctctgtcg

SEQ ID NO: 581939 - DNA, 15 bp, Homo sapiens
gtcttgctctgtcgt

SEQ ID NO: 581940 - DNA, 15 bp, Homo sapiens
tcttgctctgtcgtc

SEQ ID NO: 581941 - DNA, 15 bp, Homo sapiens
cttgctctgtcgtcc

SEQ ID NO: 581942 - DNA, 15 bp, Homo sapiens
ttgctctgtcgtcca

SEQ ID NO: 581943 - DNA, 15 bp, Homo sapiens
tgctctgtcgtccag

SEQ ID NO: 581944 - DNA, 15 bp, Homo sapiens
gctctgtcgtccagg

SEQ ID NO: 581945 - DNA, 15 bp, Homo sapiens
ctctgtcgtccaggc

SEQ ID NO: 581946 - DNA, 15 bp, Homo sapiens
tctgtcgtccaggct

SEQ ID NO: 581947 - DNA, 15 bp, Homo sapiens
ctgtcgtccaggcta

SEQ ID NO: 581948 - DNA, 15 bp, Homo sapiens
tgtcgtccaggctag

SEQ ID NO: 581949 - DNA, 15 bp, Homo sapiens
gtcgtccaggctaga

SEQ ID NO: 581950 - DNA, 15 bp, Homo sapiens
tcgtccaggctagag

SEQ ID NO: 581951 - DNA, 15 bp, Homo sapiens
cgtccaggctagagt

SEQ ID NO: 581952 - DNA, 15 bp, Homo sapiens
gtccaggctagagtg

SEQ ID NO: 581953 - DNA, 15 bp, Homo sapiens
tccaggctagagtgc

SEQ ID NO: 581954 - DNA, 15 bp, Homo sapiens
ccaggctagagtgca

SEQ ID NO: 581955 - DNA, 15 bp, Homo sapiens
caggctagagtgcaa

SEQ ID NO: 581956 - DNA, 15 bp, Homo sapiens
aggctagagtgcaat

SEQ ID NO: 581957 - DNA, 15 bp, Homo sapiens
ggctagagtgcaatg

SEQ ID NO: 581958 - DNA, 15 bp, Homo sapiens
gctagagtgcaatgg

SEQ ID NO: 581959 - DNA, 15 bp, Homo sapiens
ctagagtgcaatggc

SEQ ID NO: 581960 - DNA, 15 bp, Homo sapiens
tagagtgcaatggca

SEQ ID NO: 581961 - DNA, 15 bp, Homo sapiens
agagtgcaatggcat

SEQ ID NO: 581962 - DNA, 15 bp, Homo sapiens
gagtgcaatggcatg

SEQ ID NO: 581963 - DNA, 15 bp, Homo sapiens
agtgcaatggcatga

SEQ ID NO: 581964 - DNA, 15 bp, Homo sapiens
gtgcaatggcatgat

SEQ ID NO: 581965 - DNA, 15 bp, Homo sapiens
tgcaatggcatgatt

SEQ ID NO: 581966 - DNA, 15 bp, Homo sapiens
gcaatggcatgattt

SEQ ID NO: 581967 - DNA, 15 bp, Homo sapiens
caatggcatgatttc

SEQ ID NO: 581968 - DNA, 15 bp, Homo sapiens
aatggcatgatttcg

SEQ ID NO: 581969 - DNA, 15 bp, Homo sapiens
atggcatgatttcgg

SEQ ID NO: 581970 - DNA, 15 bp, Homo sapiens
tggcatgatttcggt

SEQ ID NO: 581971 - DNA, 15 bp, Homo sapiens
ggcatgatttcggtt

SEQ ID NO: 581972 - DNA, 15 bp, Homo sapiens
gcatgatttcggttc

SEQ ID NO: 581973 - DNA, 15 bp, Homo sapiens
catgatttcggttca

SEQ ID NO: 581974 - DNA, 15 bp, Homo sapiens
atgatttcggttcac

SEQ ID NO: 581975 - DNA, 15 bp, Homo sapiens
tgatttcggttcact

SEQ ID NO: 581976 - DNA, 15 bp, Homo sapiens
gatttcggttcactg

SEQ ID NO: 581977 - DNA, 15 bp, Homo sapiens
atttcggttcactgc

SEQ ID NO: 581978 - DNA, 15 bp, Homo sapiens
tttcggttcactgca

SEQ ID NO: 581979 - DNA, 15 bp, Homo sapiens
ttcggttcactgcaa

SEQ ID NO: 581980 - DNA, 15 bp, Homo sapiens
tcggttcactgcaac

SEQ ID NO: 581981 - DNA, 15 bp, Homo sapiens
cggttcactgcaacc

SEQ ID NO: 581982 - DNA, 15 bp, Homo sapiens
ggttcactgcaacct

SEQ ID NO: 581983 - DNA, 15 bp, Homo sapiens
gttcactgcaacctc

SEQ ID NO: 581984 - DNA, 15 bp, Homo sapiens
ttcactgcaacctct

SEQ ID NO: 581985 - DNA, 15 bp, Homo sapiens
gcaacctctgcctct

SEQ ID NO: 581986 - DNA, 15 bp, Homo sapiens
caacctctgcctctt

SEQ ID NO: 581987 - DNA, 15 bp, Homo sapiens
aacctctgcctcttg

SEQ ID NO: 581988 - DNA, 15 bp, Homo sapiens
acctctgcctcttgg

SEQ ID NO: 581989 - DNA, 15 bp, Homo sapiens
cctctgcctcttggg

SEQ ID NO: 581990 - DNA, 15 bp, Homo sapiens
ctctgcctcttgggt

SEQ ID NO: 581991 - DNA, 15 bp, Homo sapiens
tctgcctcttgggtt

SEQ ID NO: 581992 - DNA, 15 bp, Homo sapiens
ctgcctcttgggttc

SEQ ID NO: 581993 - DNA, 15 bp, Homo sapiens
tgcctcttgggttca

SEQ ID NO: 581994 - DNA, 15 bp, Homo sapiens
gcctcttgggttcaa

SEQ ID NO: 581995 - DNA, 15 bp, Homo sapiens
cctcttgggttcaag

SEQ ID NO: 581996 - DNA, 15 bp, Homo sapiens
ctcttgggttcaagt

SEQ ID NO: 581997 - DNA, 15 bp, Homo sapiens
tcttgggttcaagtg

SEQ ID NO: 581998 - DNA, 15 bp, Homo sapiens
cttgggttcaagtga

SEQ ID NO: 581999 - DNA, 15 bp, Homo sapiens
ttgggttcaagtgat

SEQ ID NO: 582000 - DNA, 15 bp, Homo sapiens
tgggttcaagtgatt

SEQ ID NO: 582001 - DNA, 15 bp, Homo sapiens
gggttcaagtgattc

SEQ ID NO: 582002 - DNA, 15 bp, Homo sapiens
ggttcaagtgattcc

SEQ ID NO: 582003 - DNA, 15 bp, Homo sapiens
gttcaagtgattccc

SEQ ID NO: 582004 - DNA, 15 bp, Homo sapiens
ttcaagtgattcccc

SEQ ID NO: 582005 - DNA, 15 bp, Homo sapiens
tcaagtgattcccct

SEQ ID NO: 582006 - DNA, 15 bp, Homo sapiens
caagtgattcccctg

SEQ ID NO: 582007 - DNA, 15 bp, Homo sapiens
aagtgattcccctgc

SEQ ID NO: 582008 - DNA, 15 bp, Homo sapiens
agtgattcccctgcc

SEQ ID NO: 582009 - DNA, 15 bp, Homo sapiens
gtgattcccctgcct

SEQ ID NO: 582010 - DNA, 15 bp, Homo sapiens
tgattcccctgcctc

SEQ ID NO: 582011 - DNA, 15 bp, Homo sapiens
gattcccctgcctca

SEQ ID NO: 582012 - DNA, 15 bp, Homo sapiens
attcccctgcctcag

SEQ ID NO: 582013 - DNA, 15 bp, Homo sapiens
ttcccctgcctcagc

SEQ ID NO: 582014 - DNA, 15 bp, Homo sapiens
tcccctgcctcagcc

SEQ ID NO: 582015 - DNA, 15 bp, Homo sapiens
cccctgcctcagcct

SEQ ID NO: 582016 - DNA, 15 bp, Homo sapiens
ccctgcctcagcctc

SEQ ID NO: 582017 - DNA, 15 bp, Homo sapiens
gcctcagcctcctgg

SEQ ID NO: 582018 - DNA, 15 bp, Homo sapiens
cctcagcctcctggg

SEQ ID NO: 582019 - DNA, 15 bp, Homo sapiens
ctcagcctcctgggt

SEQ ID NO: 582020 - DNA, 15 bp, Homo sapiens
tcagcctcctgggta

SEQ ID NO: 582021 - DNA, 15 bp, Homo sapiens
cagcctcctgggtag

SEQ ID NO: 582022 - DNA, 15 bp, Homo sapiens
agcctcctgggtagc

SEQ ID NO: 582023 - DNA, 15 bp, Homo sapiens
gcctcctgggtagct

SEQ ID NO: 582024 - DNA, 15 bp, Homo sapiens
cctcctgggtagctg

SEQ ID NO: 582025 - DNA, 15 bp, Homo sapiens
ctcctgggtagctgg

SEQ ID NO: 582026 - DNA, 15 bp, Homo sapiens
tcctgggtagctggg

SEQ ID NO: 582027 - DNA, 15 bp, Homo sapiens
cctgggtagctggga

SEQ ID NO: 582028 - DNA, 15 bp, Homo sapiens
ctgggtagctgggac

SEQ ID NO: 582029 - DNA, 15 bp, Homo sapiens
tgggtagctgggact

SEQ ID NO: 582030 - DNA, 15 bp, Homo sapiens
gggtagctgggacta

SEQ ID NO: 582031 - DNA, 15 bp, Homo sapiens
ggtagctgggactac

SEQ ID NO: 582032 - DNA, 15 bp, Homo sapiens
gctgggactacaggc

SEQ ID NO: 582033 - DNA, 15 bp, Homo sapiens
ctgggactacaggcg

SEQ ID NO: 582034 - DNA, 15 bp, Homo sapiens
tgggactacaggcgc

SEQ ID NO: 582035 - DNA, 15 bp, Homo sapiens
gggactacaggcgcc

SEQ ID NO: 582036 - DNA, 15 bp, Homo sapiens
ggactacaggcgcct

SEQ ID NO: 582037 - DNA, 15 bp, Homo sapiens
gactacaggcgccta

SEQ ID NO: 582038 - DNA, 15 bp, Homo sapiens
actacaggcgcctat

SEQ ID NO: 582039 - DNA, 15 bp, Homo sapiens
ctacaggcgcctatc

SEQ ID NO: 582040 - DNA, 15 bp, Homo sapiens
tacaggcgcctatca

SEQ ID NO: 582041 - DNA, 15 bp, Homo sapiens
acaggcgcctatcac

SEQ ID NO: 582042 - DNA, 15 bp, Homo sapiens
caggcgcctatcacc

SEQ ID NO: 582043 - DNA, 15 bp, Homo sapiens
aggcgcctatcacca

SEQ ID NO: 582044 - DNA, 15 bp, Homo sapiens
ggcgcctatcaccat

SEQ ID NO: 582045 - DNA, 15 bp, Homo sapiens
gcgcctatcaccatg

SEQ ID NO: 582046 - DNA, 15 bp, Homo sapiens
cgcctatcaccatgc

SEQ ID NO: 582047 - DNA, 15 bp, Homo sapiens
gcctatcaccatgcc

SEQ ID NO: 582048 - DNA, 15 bp, Homo sapiens
cctatcaccatgcca

SEQ ID NO: 582049 - DNA, 15 bp, Homo sapiens
ctatcaccatgccag

SEQ ID NO: 582050 - DNA, 15 bp, Homo sapiens
tatcaccatgccagg

SEQ ID NO: 582051 - DNA, 15 bp, Homo sapiens
atcaccatgccaggc

SEQ ID NO: 582052 - DNA, 15 bp, Homo sapiens
tcaccatgccaggct

SEQ ID NO: 582053 - DNA, 15 bp, Homo sapiens
caccatgccaggcta

SEQ ID NO: 582054 - DNA, 15 bp, Homo sapiens
accatgccaggctaa

SEQ ID NO: 582055 - DNA, 15 bp, Homo sapiens
ccatgccaggctaat

SEQ ID NO: 582056 - DNA, 15 bp, Homo sapiens
catgccaggctaatt

SEQ ID NO: 582057 - DNA, 15 bp, Homo sapiens
atgccaggctaattt

SEQ ID NO: 582058 - DNA, 15 bp, Homo sapiens
tgccaggctaatttt

SEQ ID NO: 582059 - DNA, 15 bp, Homo sapiens
gccaggctaattttt

SEQ ID NO: 582060 - DNA, 15 bp, Homo sapiens
ccaggctaattttta

SEQ ID NO: 582061 - DNA, 15 bp, Homo sapiens
caggctaatttttat

SEQ ID NO: 582062 - DNA, 15 bp, Homo sapiens
aggctaatttttata

SEQ ID NO: 582063 - DNA, 15 bp, Homo sapiens
ggctaatttttatat

SEQ ID NO: 582064 - DNA, 15 bp, Homo sapiens
gctaatttttatatt

SEQ ID NO: 582065 - DNA, 15 bp, Homo sapiens
ctaatttttatattt

SEQ ID NO: 582066 - DNA, 15 bp, Homo sapiens
taatttttatatttt

SEQ ID NO: 582067 - DNA, 15 bp, Homo sapiens
aatttttatattttt

SEQ ID NO: 582068 - DNA, 15 bp, Homo sapiens
atttttatattttta

SEQ ID NO: 582069 - DNA, 15 bp, Homo sapiens
tttttatatttttag

SEQ ID NO: 582070 - DNA, 15 bp, Homo sapiens
ttttatatttttagt

SEQ ID NO: 582071 - DNA, 15 bp, Homo sapiens
tttatatttttagta

SEQ ID NO: 582072 - DNA, 15 bp, Homo sapiens
ttatatttttagtag

SEQ ID NO: 582073 - DNA, 15 bp, Homo sapiens
tatatttttagtaga

SEQ ID NO: 582074 - DNA, 15 bp, Homo sapiens
atatttttagtagag

SEQ ID NO: 582075 - DNA, 15 bp, Homo sapiens
atttttagtagagat

SEQ ID NO: 582076 - DNA, 15 bp, Homo sapiens
tttttagtagagatg

SEQ ID NO: 582077 - DNA, 15 bp, Homo sapiens
ttttagtagagatgg

SEQ ID NO: 582078 - DNA, 15 bp, Homo sapiens
tttagtagagatggg

SEQ ID NO: 582079 - DNA, 15 bp, Homo sapiens
ttagtagagatgggg

SEQ ID NO: 582080 - DNA, 15 bp, Homo sapiens
tagtagagatggggt

SEQ ID NO: 582081 - DNA, 15 bp, Homo sapiens
agtagagatggggtt

SEQ ID NO: 582082 - DNA, 15 bp, Homo sapiens
gtagagatggggttt

SEQ ID NO: 582083 - DNA, 15 bp, Homo sapiens
tagagatggggtttc

SEQ ID NO: 582084 - DNA, 15 bp, Homo sapiens
agagatggggtttca

SEQ ID NO: 582085 - DNA, 15 bp, Homo sapiens
gagatggggtttcat

SEQ ID NO: 582086 - DNA, 15 bp, Homo sapiens
agatggggtttcatc

SEQ ID NO: 582087 - DNA, 15 bp, Homo sapiens
gatggggtttcatca

SEQ ID NO: 582088 - DNA, 15 bp, Homo sapiens
atggggtttcatcat

SEQ ID NO: 582089 - DNA, 15 bp, Homo sapiens
tggggtttcatcatg

SEQ ID NO: 582090 - DNA, 15 bp, Homo sapiens
ggggtttcatcatgt

SEQ ID NO: 582091 - DNA, 15 bp, Homo sapiens
gggtttcatcatgtt

SEQ ID NO: 582092 - DNA, 15 bp, Homo sapiens
ggtttcatcatgttg

SEQ ID NO: 582093 - DNA, 15 bp, Homo sapiens
gtttcatcatgttgg

SEQ ID NO: 582094 - DNA, 15 bp, Homo sapiens
tttcatcatgttggc

SEQ ID NO: 582095 - DNA, 15 bp, Homo sapiens
ttcatcatgttggcg

SEQ ID NO: 582096 - DNA, 15 bp, Homo sapiens
tcatcatgttggcga

SEQ ID NO: 582097 - DNA, 15 bp, Homo sapiens
catcatgttggcgag

SEQ ID NO: 582098 - DNA, 15 bp, Homo sapiens
atcatgttggcgagg

SEQ ID NO: 582099 - DNA, 15 bp, Homo sapiens
tcatgttggcgaggc

SEQ ID NO: 582100 - DNA, 15 bp, Homo sapiens
catgttggcgaggct

SEQ ID NO: 582101 - DNA, 15 bp, Homo sapiens
atgttggcgaggctg

SEQ ID NO: 582102 - DNA, 15 bp, Homo sapiens
tgttggcgaggctgg

SEQ ID NO: 582103 - DNA, 15 bp, Homo sapiens
gttggcgaggctgga

SEQ ID NO: 582104 - DNA, 15 bp, Homo sapiens
ttggcgaggctggac

SEQ ID NO: 582105 - DNA, 15 bp, Homo sapiens
tggcgaggctggact

SEQ ID NO: 582106 - DNA, 15 bp, Homo sapiens
ggcgaggctggactc

SEQ ID NO: 582107 - DNA, 15 bp, Homo sapiens
gcgaggctggactcc

SEQ ID NO: 582108 - DNA, 15 bp, Homo sapiens
cgaggctggactcca

SEQ ID NO: 582109 - DNA, 15 bp, Homo sapiens
gaggctggactccaa

SEQ ID NO: 582110 - DNA, 15 bp, Homo sapiens
aggctggactccaat

SEQ ID NO: 582111 - DNA, 15 bp, Homo sapiens
ggctggactccaatt

SEQ ID NO: 582112 - DNA, 15 bp, Homo sapiens
gctggactccaattc

SEQ ID NO: 582113 - DNA, 15 bp, Homo sapiens
ctggactccaattcc

SEQ ID NO: 582114 - DNA, 15 bp, Homo sapiens
tggactccaattcct

SEQ ID NO: 582115 - DNA, 15 bp, Homo sapiens
ggactccaattcctg

SEQ ID NO: 582116 - DNA, 15 bp, Homo sapiens
gactccaattcctga

SEQ ID NO: 582117 - DNA, 15 bp, Homo sapiens
actccaattcctgac

SEQ ID NO: 582118 - DNA, 15 bp, Homo sapiens
ctccaattcctgacc

SEQ ID NO: 582119 - DNA, 15 bp, Homo sapiens
tccaattcctgacct

SEQ ID NO: 582120 - DNA, 15 bp, Homo sapiens
ccaattcctgacctc

SEQ ID NO: 582121 - DNA, 15 bp, Homo sapiens
caattcctgacctca

SEQ ID NO: 582122 - DNA, 15 bp, Homo sapiens
aattcctgacctcaa

SEQ ID NO: 582123 - DNA, 15 bp, Homo sapiens
attcctgacctcaaa

SEQ ID NO: 582124 - DNA, 15 bp, Homo sapiens
ttcctgacctcaaat

SEQ ID NO: 582125 - DNA, 15 bp, Homo sapiens
tcctgacctcaaatg

SEQ ID NO: 582126 - DNA, 15 bp, Homo sapiens
cctgacctcaaatga

SEQ ID NO: 582127 - DNA, 15 bp, Homo sapiens
ctgacctcaaatgat

SEQ ID NO: 582128 - DNA, 15 bp, Homo sapiens
tgacctcaaatgatc

SEQ ID NO: 582129 - DNA, 15 bp, Homo sapiens
gacctcaaatgatcc

SEQ ID NO: 582130 - DNA, 15 bp, Homo sapiens
acctcaaatgatcct

SEQ ID NO: 582131 - DNA, 15 bp, Homo sapiens
cctcaaatgatcctc

SEQ ID NO: 582132 - DNA, 15 bp, Homo sapiens
ctcaaatgatcctcc

SEQ ID NO: 582133 - DNA, 15 bp, Homo sapiens
tcaaatgatcctccc

SEQ ID NO: 582134 - DNA, 15 bp, Homo sapiens
caaatgatcctccca

SEQ ID NO: 582135 - DNA, 15 bp, Homo sapiens
aaatgatcctcccaa

SEQ ID NO: 582136 - DNA, 15 bp, Homo sapiens
aatgatcctcccaaa

SEQ ID NO: 582137 - DNA, 15 bp, Homo sapiens
atgatcctcccaaag

SEQ ID NO: 582138 - DNA, 15 bp, Homo sapiens
tgatcctcccaaagt

SEQ ID NO: 582139 - DNA, 15 bp, Homo sapiens
gatcctcccaaagtg

SEQ ID NO: 582140 - DNA, 15 bp, Homo sapiens
atcctcccaaagtgc

SEQ ID NO: 582141 - DNA, 15 bp, Homo sapiens
tcctcccaaagtgct

SEQ ID NO: 582142 - DNA, 15 bp, Homo sapiens
cctcccaaagtgcta

SEQ ID NO: 582143 - DNA, 15 bp, Homo sapiens
ctcccaaagtgctag

SEQ ID NO: 582144 - DNA, 15 bp, Homo sapiens
tcccaaagtgctagg

SEQ ID NO: 582145 - DNA, 15 bp, Homo sapiens
cccaaagtgctagga

SEQ ID NO: 582146 - DNA, 15 bp, Homo sapiens
ccaaagtgctaggat

SEQ ID NO: 582147 - DNA, 15 bp, Homo sapiens
caaagtgctaggatt

SEQ ID NO: 582148 - DNA, 15 bp, Homo sapiens
aaagtgctaggatta

SEQ ID NO: 582149 - DNA, 15 bp, Homo sapiens
aagtgctaggattac

SEQ ID NO: 582150 - DNA, 15 bp, Homo sapiens
agtgctaggattaca

SEQ ID NO: 582151 - DNA, 15 bp, Homo sapiens
gtgctaggattacag

SEQ ID NO: 582152 - DNA, 15 bp, Homo sapiens
tgctaggattacagg

SEQ ID NO: 582153 - DNA, 15 bp, Homo sapiens
gctaggattacaggt

SEQ ID NO: 582154 - DNA, 15 bp, Homo sapiens
ctaggattacaggtg

SEQ ID NO: 582155 - DNA, 15 bp, Homo sapiens
taggattacaggtgt

SEQ ID NO: 582156 - DNA, 15 bp, Homo sapiens
aggattacaggtgtg

SEQ ID NO: 582157 - DNA, 15 bp, Homo sapiens
gtgagccaccatgca

SEQ ID NO: 582158 - DNA, 15 bp, Homo sapiens
tgagccaccatgcat

SEQ ID NO: 582159 - DNA, 15 bp, Homo sapiens
gagccaccatgcatg

SEQ ID NO: 582160 - DNA, 15 bp, Homo sapiens
agccaccatgcatgg

SEQ ID NO: 582161 - DNA, 15 bp, Homo sapiens
gccaccatgcatggc

SEQ ID NO: 582162 - DNA, 15 bp, Homo sapiens
ccaccatgcatggcc

SEQ ID NO: 582163 - DNA, 15 bp, Homo sapiens
caccatgcatggccc

SEQ ID NO: 582164 - DNA, 15 bp, Homo sapiens
accatgcatggccct

SEQ ID NO: 582165 - DNA, 15 bp, Homo sapiens
ccatgcatggccctg

SEQ ID NO: 582166 - DNA, 15 bp, Homo sapiens
catgcatggccctga

SEQ ID NO: 582167 - DNA, 15 bp, Homo sapiens
atgcatggccctgaa

SEQ ID NO: 582168 - DNA, 15 bp, Homo sapiens
tgcatggccctgaaa

SEQ ID NO: 582169 - DNA, 15 bp, Homo sapiens
gcatggccctgaaat

SEQ ID NO: 582170 - DNA, 15 bp, Homo sapiens
catggccctgaaatt

SEQ ID NO: 582171 - DNA, 15 bp, Homo sapiens
atggccctgaaattc

SEQ ID NO: 582172 - DNA, 15 bp, Homo sapiens
tggccctgaaattct

SEQ ID NO: 582173 - DNA, 15 bp, Homo sapiens
ggccctgaaattctt

SEQ ID NO: 582174 - DNA, 15 bp, Homo sapiens
gccctgaaattcttg

SEQ ID NO: 582175 - DNA, 15 bp, Homo sapiens
ccctgaaattcttga

SEQ ID NO: 582176 - DNA, 15 bp, Homo sapiens
cctgaaattcttgat

SEQ ID NO: 582177 - DNA, 15 bp, Homo sapiens
ctgaaattcttgatg

SEQ ID NO: 582178 - DNA, 15 bp, Homo sapiens
tgaaattcttgatga

SEQ ID NO: 582179 - DNA, 15 bp, Homo sapiens
gaaattcttgatgac

SEQ ID NO: 582180 - DNA, 15 bp, Homo sapiens
aaattcttgatgacc

SEQ ID NO: 582181 - DNA, 15 bp, Homo sapiens
aattcttgatgaccc

SEQ ID NO: 582182 - DNA, 15 bp, Homo sapiens
attcttgatgaccca

SEQ ID NO: 582183 - DNA, 15 bp, Homo sapiens
ttcttgatgacccag

SEQ ID NO: 582184 - DNA, 15 bp, Homo sapiens
tcttgatgacccagg

SEQ ID NO: 582185 - DNA, 15 bp, Homo sapiens
cttgatgacccagga

SEQ ID NO: 582186 - DNA, 15 bp, Homo sapiens
ttgatgacccaggat

SEQ ID NO: 582187 - DNA, 15 bp, Homo sapiens
tgatgacccaggatt

SEQ ID NO: 582188 - DNA, 15 bp, Homo sapiens
gatgacccaggattc

SEQ ID NO: 582189 - DNA, 15 bp, Homo sapiens
atgacccaggattca

SEQ ID NO: 582190 - DNA, 15 bp, Homo sapiens
tgacccaggattcaa

SEQ ID NO: 582191 - DNA, 15 bp, Homo sapiens
gacccaggattcaac

SEQ ID NO: 582192 - DNA, 15 bp, Homo sapiens
acccaggattcaact

SEQ ID NO: 582193 - DNA, 15 bp, Homo sapiens
cccaggattcaacta

SEQ ID NO: 582194 - DNA, 15 bp, Homo sapiens
ccaggattcaactag

SEQ ID NO: 582195 - DNA, 15 bp, Homo sapiens
caggattcaactagc

SEQ ID NO: 582196 - DNA, 15 bp, Homo sapiens
aggattcaactagct

SEQ ID NO: 582197 - DNA, 15 bp, Homo sapiens
ggattcaactagctc

SEQ ID NO: 582198 - DNA, 15 bp, Homo sapiens
gattcaactagctcc
